United States Patent Application Publication US 2006/0150283 A1 - sequence listing, part 22

SEQ ID NO: 83408 - DNA, 1287 bp, Arabidopsis thaliana
  misc_feature (1)..(1287): Ceres Seq. ID no. 12670123
  misc_feature (1)..(1287): Ortholog of  Ceres SEQ ID NO 15174875 as cited in SEQ ID NO 56464
atgtctctaccggattctctcccatcttcttcttcttctccgcctgtgacccgtgaagaaaccggctttcatcgctttgaacatcacggcaacgattccggttttgatcatcgtgatcgtccaccgtggaatcgttctgagtacgattatcgccatggaagcgttgttgcatctgagaacgtcaggaacaattccacttctgaagacccttggtcttgcgttgtcgtcgttgctaccttctgtatctttggtaatgtcgatgactttgattctggggctttatggaacaacgaatgtctggtggaagaattagggaacaagggatctggtttgatactgtatggattgaaccaagccccacagcttgatgttctgactaaatggtccgaagttcactatctagctgtgcctaatgattcttacaagtattggatacagtatttgaacaaggggtcacgcgtaaaagtttcatacaacgttgaatctgtgggttcttccttataccttgtgatagcccaaggtgtggatgggctctctgagtgggtacaagatccgacgcgtccagacactacactgtcgtggcatataatctctggcaagtgtccaagtggttatattgagcaggacataactaagtcgtcgagttattatgttgcagtaggcaacgtatacctgaatgaagtgaaggcgacgattgacattcaagttgagggggtattgtatgatactacaaatgcttattacaattgctctttccctaacgacaagtgcactctaagtgttccattatttggaactaatgctgctgtactaacctcaccaggtccaaagctgaacaattctaagaatgagttctgcgcaaaactctcatatgaaccaaggtggattgcatacatagtttgcatgggtgtagtgacagcactcttgttaattgtctcgagtctcttcaataaacgacaaccagtcactgaagatgaaaccgttgatgaaaatgatgatgtagctcctctaattccgggaaaagacgatgataactcaagctggtgctcgtcctacagttctattttgacgagtacagaggaattggaaggtgcacatggtgaaggccacagtagtacaagatatctatgtgcaatttgctatgatgcgcctagagactgtttcttcctctcttgtggacactgcgttgcttgcttccagtgcgggacacggatagctgaaacttcgggtttttgtccggtatgccgtaagaagatcaggaaggtcaagaagatcttcaatgtctaa

SEQ ID NO: 83409 - protein, 428 aa, Arabidopsis thaliana
  peptide (1)..(428): Ceres Seq. ID no. 12670124
MSLPDSLPSSSSSPPVTREETGFHRFEHHGNDSGFDHRDRPPWNRSEYDYRHGSVVASENVRNNSTSEDPWSCVVVVATFCIFGNVDDFDSGALWNNECLVEELGNKGSGLILYGLNQAPQLDVLTKWSEVHYLAVPNDSYKYWIQYLNKGSRVKVSYNVESVGSSLYLVIAQGVDGLSEWVQDPTRPDTTLSWHIISGKCPSGYIEQDITKSSSYYVAVGNVYLNEVKATIDIQVEGVLYDTTNAYYNCSFPNDKCTLSVPLFGTNAAVLTSPGPKLNNSKNEFCAKLSYEPRWIAYIVCMGVVTALLLIVSSLFNKRQPVTEDETVDENDDVAPLIPGKDDDNSSWCSSYSSILTSTEELEGAHGEGHSSTRYLCAICYDAPRDCFFLSCGHCVACFQCGTRIAETSGFCPVCRKKIRKVKKIFNV

SEQ ID NO: 83410 - DNA, 3034 bp, Arabidopsis thaliana
  misc_feature (1)..(3034): Ceres Seq. ID no. 12670125
  misc_feature (1)..(3034): Ortholog of  Ceres SEQ ID NO 13593889 as cited in SEQ ID NO 53305
  misc_feature (1)..(3034): Ortholog of  Ceres SEQ ID NO 13581959 as cited in SEQ ID NO 56156
agagagagaaacaagtggctagctagctcgccaaacttcttcaacaatggcggtttcctagggtttgatgtttatatgatcgggaaactctctcatctagatcgcgataactctcttttccatggaaatgcccggtagaagatctaattacactttgcttagtcaattttctgacgatcaggtgtcagtttccgtcaccggagctcctccgcctcactatgattccttgtcgagcgaaaacaggagcaaccataacagcgggaacaccgggaaagctaaggcggagagaggcggatttgattgggatcctagcggtggtggtggtggtgatcataggttgaataatcaaccgaatcgggttgggaataatatgtatgcttcgtctctagggttgcaaaggcaatccagtgggagtagtttcggtgagagctctttgtctggggattattacatgcctacgctttctgcggcggctaacgagatcgaatctgttggatttcctcaagatgatgggtttaggcttggatttggtggtggtggaggagatttgaggatacagatggcggcggactccgctggagggtcttcatctgggaagagctgggcgcagcagacggaggagagttatcagctgcagcttgcattggcgttaaggctttcgtcggaggctacttgtgccgacgatccgaactttctggatcctgtaccggacgagtctgctttacggacttcgccaagttcagccgaaaccgtttcacatcgtttctgggttaatggctgcttatcgtactatgataaagttcctgatgggttttatatgatgaatggtctggatccctatatttggaccttatgcatcgacctgcatgaaagtggtcgcatcccttcaattgaatcattaagagctgttgattctggtgttgattcttcgcttgaagcgatcatagttgataggcgtagtgatccagccttcaaggaacttcacaatagagtccacgacatatcttgtagctgcattaccacaaaagaggttgttgatcagctggcaaagcttatctgcaatcgtatggggggtccagttatcatgggggaagatgagttggttcccatgtggaaggagtgcattgatggtctaaaagaaatctttaaagtggtggttcccataggtagcctctctgttggactctgcagacatcgagctttactcttcaaagtactggctgacataattgatttaccctgtcgaattgccaaaggatgtaaatattgtaatagagacgatgccgcttcgtgccttgtcaggtttgggcttgatagggagtacctggttgatttagtaggaaagccaggtcacttatgggagcctgattccttgctaaatggtccttcatctatctcaatttcttctcctctgcggtttccacgaccaaagccagttgaacccgcagtcgattttaggttactagccaaacaatatttctccgatagccagtctcttaatcttgttttcgatcctgcatcagatgatatgggattctcaatgtttcataggcaatatgataatccgggtggagagaatgacgcattggcagaaaatggtggtgggtctttgccacccagtgctaatatgcctccacagaacatgatgcgtgcgtcaaatcaaattgaagcagcacctatgaatgccccaccaatcagtcagccagttccaaacagggcaaatagggaacttggacttgatggtgatgatatggacatcccgtggtgtgatcttaatataaaagaaaagattggagcaggttcctttggcactgtccaccgtgctgagtggcatggctcggatgttgctgtgaaaattctcatggagcaagacttccatgctgagcgtgttaatgagttcttaagagaggttgcgataatgaaacgccttcgccaccctaacattgttctcttcatgggtgcggtcactcaacctccaaatttgtcaatagtgacagaatatttgtcaagaggtagtttatacagacttttgcataaaagtggagcaagggagcaattagatgagagacgtcgcctgagtatggcttatgatgtggctaagggaatgaattatcttcacaatcgcaatcctccaattgtgcatagagatctaaaatctccaaacttattggttgacaaaaaatatacagtcaaggtttgtgattttggtctctcgcgattgaaggccagcacgtttctttcctcgaagtcagcagctggaacccccgagtggatggcaccagaagtcctgcgagatgagccgtctaatgaaaagtcagatgtgtacagcttcggggtcatcttgtgggagcttgctacattgcaacaaccatggggtaacttaaatccggctcaggttgtagctgcggttggtttcaagtgtaaacggctggagatcccgcgtaatctgaatcctcaggttgcagccataatcgagggttgttggaccaatgagccatggaagcgtccatcatttgcaactataatggacttgctaagaccattgatcaaatcagcggttcctccgcccaaccgctcggatttgtaaaatacccccggtccattcaaaagttgttataatcatgatatgcacatatactctcagcattcttttgctgcccaggagggagacactagttaagatatagctttaaaggtacattcctcatgagctatcaatcatatcctacagaatcccatggtttttatacatgtattatttttgcgatctttgtctgctgttttgttccctttttaatgttgcagattgttaaaatgtacatgactattgtcacagggaggaaaaaaaaatgtagtaatggaaacaatgtgagggatataatctatctatctagtcccaaagggtaagcaatattttgttgttatgtctttgtagcaatgcactgaaagctatatttaattacattgctgtacatttataccgctaaattagttactaagcgaaggtaaaaaagagcagctggtaaatgctgtc

SEQ ID NO: 83411 - protein, 821 aa, Arabidopsis thaliana
  peptide (1)..(821): Ceres Seq. ID no. 12670126
MEMPGRRSNYTLLSQFSDDQVSVSVTGAPPPHYDSLSSENRSNHNSGNTGKAKAERGGFDWDPSGGGGGDHRLNNQPNRVGNNMYASSLGLQRQSSGSSFGESSLSGDYYMPTLSAAANEIESVGFPQDDGFRLGFGGGGGDLRIQMAADSAGGSSSGKSWAQQTEESYQLQLALALRLSSEATCADDPNFLDPVPDESALRTSPSSAETVSHRFWVNGCLSYYDKVPDGFYMMNGLDPYIWTLCIDLHESGRIPSIESLRAVDSGVDSSLEAIIVDRRSDPAFKELHNRVHDISCSCITTKEVVDQLAKLICNRMGGPVIMGEDELVPMWKECIDGLKEIFKVVVPIGSLSVGLCRHRALLFKVLADIIDLPCRIAKGCKYCNRDDAASCLVRFGLDREYLVDLVGKPGHLWEPDSLLNGPSSISISSPLRFPRPKPVEPAVDFRLLAKQYFSDSQSLNLVFDPASDDMGFSMFHRQYDNPGGENDALAENGGGSLPPSANMPPQNMMRASNQIEAAPMNAPPISQPVPNRANRELGLDGDDMDIPWCDLNIKEKIGAGSFGTVHRAEWHGSDVAVKILMEQDFHAERVNEFLREVAIMKRLRHPNIVLFMGAVTQPPNLSIVTEYLSRGSLYRLLHKSGAREQLDERRRLSMAYDVAKGMNYLHNRNPPIVHRDLKSPNLLVDKKYTVKVCDFGLSRLKASTFLSSKSAAGTPEWMAPEVLRDEPSNEKSDVYSFGVILWELATLQQPWGNLNPAQVVAAVGFKCKRLEIPRNLNPQVAAIIEGCWTNEPWKRPSFATIMDLLRPLIKSAVPPPNRSDL

SEQ ID NO: 83412 - protein, 819 aa, Arabidopsis thaliana
  peptide (1)..(819): Ceres Seq. ID no. 12670127
MPGRRSNYTLLSQFSDDQVSVSVTGAPPPHYDSLSSENRSNHNSGNTGKAKAERGGFDWDPSGGGGGDHRLNNQPNRVGNNMYASSLGLQRQSSGSSFGESSLSGDYYMPTLSAAANEIESVGFPQDDGFRLGFGGGGGDLRIQMAADSAGGSSSGKSWAQQTEESYQLQLALALRLSSEATCADDPNFLDPVPDESALRTSPSSAETVSHRFWVNGCLSYYDKVPDGFYMMNGLDPYIWTLCIDLHESGRIPSIESLRAVDSGVDSSLEAIIVDRRSDPAFKELHNRVHDISCSCITTKEVVDQLAKLICNRMGGPVIMGEDELVPMWKECIDGLKEIFKVVVPIGSLSVGLCRHRALLFKVLADIIDLPCRIAKGCKYCNRDDAASCLVRFGLDREYLVDLVGKPGHLWEPDSLLNGPSSISISSPLRFPRPKPVEPAVDFRLLAKQYFSDSQSLNLVFDPASDDMGFSMFHRQYDNPGGENDALAENGGGSLPPSANMPPQNMMRASNQIEAAPMNAPPISQPVPNRANRELGLDGDDMDIPWCDLNIKEKIGAGSFGTVHRAEWHGSDVAVKILMEQDFHAERVNEFLREVAIMKRLRHPNIVLFMGAVTQPPNLSIVTEYLSRGSLYRLLHKSGAREQLDERRRLSMAYDVAKGMNYLHNRNPPIVHRDLKSPNLLVDKKYTVKVCDFGLSRLKASTFLSSKSAAGTPEWMAPEVLRDEPSNEKSDVYSFGVILWELATLQQPWGNLNPAQVVAAVGFKCKRLEIPRNLNPQVAAIIEGCWTNEPWKRPSFATIMDLLRPLIKSAVPPPNRSDL

SEQ ID NO: 83413 - protein, 738 aa, Arabidopsis thaliana
  peptide (1)..(738): Ceres Seq. ID no. 12670128
MYASSLGLQRQSSGSSFGESSLSGDYYMPTLSAAANEIESVGFPQDDGFRLGFGGGGGDLRIQMAADSAGGSSSGKSWAQQTEESYQLQLALALRLSSEATCADDPNFLDPVPDESALRTSPSSAETVSHRFWVNGCLSYYDKVPDGFYMMNGLDPYIWTLCIDLHESGRIPSIESLRAVDSGVDSSLEAIIVDRRSDPAFKELHNRVHDISCSCITTKEVVDQLAKLICNRMGGPVIMGEDELVPMWKECIDGLKEIFKVVVPIGSLSVGLCRHRALLFKVLADIIDLPCRIAKGCKYCNRDDAASCLVRFGLDREYLVDLVGKPGHLWEPDSLLNGPSSISISSPLRFPRPKPVEPAVDFRLLAKQYFSDSQSLNLVFDPASDDMGFSMFHRQYDNPGGENDALAENGGGSLPPSANMPPQNMMRASNQIEAAPMNAPPISQPVPNRANRELGLDGDDMDIPWCDLNIKEKIGAGSFGTVHRAEWHGSDVAVKILMEQDFHAERVNEFLREVAIMKRLRHPNIVLFMGAVTQPPNLSIVTEYLSRGSLYRLLHKSGAREQLDERRRLSMAYDVAKGMNYLHNRNPPIVHRDLKSPNLLVDKKYTVKVCDFGLSRLKASTFLSSKSAAGTPEWMAPEVLRDEPSNEKSDVYSFGVILWELATLQQPWGNLNPAQVVAAVGFKCKRLEIPRNLNPQVAAIIEGCWTNEPWKRPSFATIMDLLRPLIKSAVPPPNRSDL

SEQ ID NO: 83414 - DNA, 1065 bp, Arabidopsis thaliana
  misc_feature (1)..(1065): Ceres Seq. ID no. 12670129
  misc_feature (1)..(1065): Ortholog of  Ceres SEQ ID NO 14314092 as cited in SEQ ID NO 62788
  misc_feature (1)..(1065): Ortholog of  Ceres SEQ ID NO 13655302 as cited in SEQ ID NO 63307
  misc_feature (1)..(1065): Ortholog of  Ceres SEQ ID NO 13597380 as cited in SEQ ID NO 64054
  misc_feature (1)..(1065): Ortholog of  Ceres SEQ ID NO 12625474 as cited in SEQ ID NO 64169
  misc_feature (1)..(1065): Ortholog of  Ceres SEQ ID NO 13597502 as cited in SEQ ID NO 64681
atgaagatgtttattataatgttgatgaccttttcggttatcgcctgtttctacgccggcgttgggaccggtgagccacttgtaccggctctaatcataatgggagattcagttgtcgatgccggcaacaacaaccgcctcaataccctcatcaaagccaattttcctccctatggacgtgacttcttagcccacaatgccactggccgtttctctaacggaaaacttgccacagactttaccgctgagagtttagggttcacttcttacccggtgccgtatcttagccaagaagctaatgggacaaatctgttaaccggagccaatttcgcctctggtgcttccggttatgacgacggaactgccatattttacaatgcaataacattgaaccaacagctgaaaaactacaaagagtaccaaaacaaggtgacaaacattgttggaagcgaaagagcaaataaaatattctcaggcgcgattcatcttctaagcacgggatcaagcgattttcttcaaagctattacatcaacccgatccttaaccggatattcacgcctgatcaatactcagatcgtctcatgaaaccctattccacctttgtccaaaatttgtatgatttaggagctagaaagattggagtgacgacgttaccgccattgggttgtttaccggcggcgataaccttgtttggtgaaaccgggaacaataatacctgcgtggaaagactaaaccaggatgcggtttccttcaataccaaactcaacaacacgtctatgaacttaaccaacaatcttcccggtctgaaattggtcgtctttgacatctataatcctctcttaaacatggccatgaaccctgtcgagaatgggttttttgaatcaagaagagcatgttgtggaaccggaacagtggaaacgtcgtttctatgtaatgcaagatcggtgggtacatgttcgaatgctacgaattacgtgttttgggatggttttcatccatccgaagcagccaatcgtgttatcgcaaataatcttcttgtccaaggaatacccctcatctcttaa

SEQ ID NO: 83415 - protein, 354 aa, Arabidopsis thaliana
  peptide (1)..(354): Ceres Seq. ID no. 12670130
MKMFIIMLMTFSVIACFYAGVGTGEPLVPALIIMGDSVVDAGNNNRLNTLIKANFPPYGRDFLAHNATGRFSNGKLATDFTAESLGFTSYPVPYLSQEANGTNLLTGANFASGASGYDDGTAIFYNAITLNQQLKNYKEYQNKVTNIVGSERANKIFSGAIHLLSTGSSDFLQSYYINPILNRIFTPDQYSDRLMKPYSTFVQNLYDLGARKIGVTTLPPLGCLPAAITLFGETGNNNTCVERLNQDAVSFNTKLNNTSMNLTNNLPGLKLVVFDIYNPLLNMAMNPVENGFFESRRACCGTGTVETSFLCNARSVGTCSNATNYVFWDGFHPSEAANRVIANNLLVQGIPLIS

SEQ ID NO: 83416 - protein, 352 aa, Arabidopsis thaliana
  peptide (1)..(352): Ceres Seq. ID no. 12670131
MFIIMLMTFSVIACFYAGVGTGEPLVPALIIMGDSVVDAGNNNRLNTLIKANFPPYGRDFLAHNATGRFSNGKLATDFTAESLGFTSYPVPYLSQEANGTNLLTGANFASGASGYDDGTAIFYNAITLNQQLKNYKEYQNKVTNIVGSERANKIFSGAIHLLSTGSSDFLQSYYINPILNRIFTPDQYSDRLMKPYSTFVQNLYDLGARKIGVTTLPPLGCLPAAITLFGETGNNNTCVERLNQDAVSFNTKLNNTSMNLTNNLPGLKLVVFDIYNPLLNMAMNPVENGFFESRRACCGTGTVETSFLCNARSVGTCSNATNYVFWDGFHPSEAANRVIANNLLVQGIPLIS

SEQ ID NO: 83417 - protein, 348 aa, Arabidopsis thaliana
  peptide (1)..(348): Ceres Seq. ID no. 12670132
MLMTFSVIACFYAGVGTGEPLVPALIIMGDSVVDAGNNNRLNTLIKANFPPYGRDFLAHNATGRFSNGKLATDFTAESLGFTSYPVPYLSQEANGTNLLTGANFASGASGYDDGTAIFYNAITLNQQLKNYKEYQNKVTNIVGSERANKIFSGAIHLLSTGSSDFLQSYYINPILNRIFTPDQYSDRLMKPYSTFVQNLYDLGARKIGVTTLPPLGCLPAAITLFGETGNNNTCVERLNQDAVSFNTKLNNTSMNLTNNLPGLKLVVFDIYNPLLNMAMNPVENGFFESRRACCGTGTVETSFLCNARSVGTCSNATNYVFWDGFHPSEAANRVIANNLLVQGIPLIS

SEQ ID NO: 83418 - DNA, 2417 bp, Arabidopsis thaliana
  misc_feature (1)..(2417): Ceres Seq. ID no. 12670159
  misc_feature (1)..(2417): Ortholog of  Ceres SEQ ID NO 13586013 as cited in SEQ ID NO 1182
agcatccacacacactttgaatgctcaatcaaagcttcttcatagttaaacttccacacaacgtcaaaactcgagaagaagatgaaagagagagattcagagagttttgaatctctctcacatcaagttctcccaaacacttcaaattcaacacacatgatccagatggccatggccaactcaggttcatctgcagccgcacaagccggtcaagaccagcctgaccggtcaaagtggctgcttgactgtcctgaaccacctagcccgtggcatgagctcaaaagacaagtcaaaggctctttcctaaccaaagccaaaaagttcaagtcacttcaaaaacagcctttcccaaaacaaatcctctctgtcctccaagccattttcccaatcttcggttggtgcagaaactataaactcaccatgttcaagaacgatctcatggctggtttaaccctcgctagcctctgcattccgcagagcattggttatgcaactcttgcaaagcttgatcctcaatatggcctatatacgagtgtggtaccaccattgatatatgcattgatggggacatcaagagagatagcaatcggaccggtggctgtagtatctcttcttatatcttcaatgttgcagaaactcatcgatccagaaacagatcccttgggatacaagaaactggtcctaaccacaaccttcttcgccgggatcttccaagcttctttcggtttattcaggttagggtttctggtggattttctgtcgcacgcagccatagttgggttcatgggtggtgcagccattgtaattggactccaacagcttaaaggtttgcttggtatcactaacttcaccaccaacactgacattgtctctgttcttcgagctgtctggagatcttgtcaacaacaatggagccctcacactttcatcctcggatgttctttcctcagttttatccttattactcgcttcatcgggaagaagtataagaagctgttttggctaccggcaatagctccgttgatcgccgtggtagtgtcaacactaatggtgtttctgactaaagccgacgagcatggtgtgaagacagtgaggcacatcaaaggaggtcttaatccaatgtccattcaggatctcgactttaatactcctcatctcggacaaatcgctaaaatcggattaatcattgccattgttgctctaaccgaggcgattgcggtggggaggtcgttcgccggaataaaagggtacagactcgatggaaacaaagaaatggtggccattggatttatgaatgttctcggttccttcacatcttgttacgctgctactggttcattctctcggacggccgtgaattttgcggcaggatgtgagacagcaatgtccaacattgttatggcggttacggtgtttgtagcactcgagtgtctaacgaggcttctctactatactccaatcgccatcctcgcttcaataattctctcagcacttccgggactaatcaacattaacgaggctattcacatttggaaagtcgataaattcgattttcttgctctcattggagctttctttggtgttttgttcgcttccgttgagatcggacttcttgtcgcggtggttatttcgtttgccaagatcatactcatatcaattcgtccagggatagaaacgcttggaagaatgcccgggaccgatacttttacagatactaatcaatatcctatgacggttaagactcccggagtgttgatttttcgtgtcaagtctgcattgttgtgctttgccaatgccagttcaattgaggaaaggattatgggatgggtcgatgaggaagaagaagaagaaaacacaaagagcaatgccaagagaaagatcctctttgtagtccttgatatgtcaagtttgatcaacgtcgatacatcggggattactgctttgctggaactgcataacaaattaatcaaaactggtgttgagctagtgatcgttaacccgaaatggcaagtaatccacaagctgaatcaagcaaagttcgtcgacagaatcggtggcaaagtttacttgacgatcggcgaagctcttgatgcttgctttggattaaaagtttaagaaacagttttcaaaggaccagttgtgttacgggttattgcatgtgatgaatttatgtgagttgttgtgatttaaataatgtgatgcgtgcatgatcatgattaatatttaagtacgtatgtgtaatagagtgcttggtcgtgactgaataaagtcatgcaaactataatgtgaggatcgatgggtgtgtttgtaactcgatagatttggaaataatgtataatatatgtaagtttgagaattattggtgttttgtatgattgttgaaatgttatatagaatcagggatatattttttgggg

SEQ ID NO: 83419 - protein, 677 aa, Arabidopsis thaliana
  peptide (1)..(677): Ceres Seq. ID no. 12670160
MKERDSESFESLSHQVLPNTSNSTHMIQMAMANSGSSAAAQAGQDQPDRSKWLLDCPEPPSPWHELKRQVKGSFLTKAKKFKSLQKQPFPKQILSVLQAIFPIFGWCRNYKLTMFKNDLMAGLTLASLCIPQSIGYATLAKLDPQYGLYTSVVPPLIYALMGTSREIAIGPVAVVSLLISSMLQKLIDPETDPLGYKKLVLTTTFFAGIFQASFGLFRLGFLVDFLSHAAIVGFMGGAAIVIGLQQLKGLLGITNFTTNTDIVSVLRAVWRSCQQQWSPHTFILGCSFLSFILITRFIGKKYKKLFWLPAIAPLIAVVVSTLMVFLTKADEHGVKTVRHIKGGLNPMSIQDLDFNTPHLGQIAKIGLIIAIVALTEAIAVGRSFAGIKGYRLDGNKEMVAIGFMNVLGSFTSCYAATGSFSRTAVNFAAGCETAMSNIVMAVTVFVALECLTRLLYYTPIAILASIILSALPGLININEAIHIWKVDKFDFLALIGAFFGVLFASVEIGLLVAVVISFAKIILISIRPGIETLGRMPGTDTFTDTNQYPMTVKTPGVLIFRVKSALLCFANASSIEERIMGWVDEEEEEENTKSNAKRKILFVVLDMSSLINVDTSGITALLELHNKLIKTGVELVIVNPKWQVIHKLNQAKFVDRIGGKVYLTIGEALDACFGLKV

SEQ ID NO: 83420 - protein, 652 aa, Arabidopsis thaliana
  peptide (1)..(652): Ceres Seq. ID no. 12670161
MIQMAMANSGSSAAAQAGQDQPDRSKWLLDCPEPPSPWHELKRQVKGSFLTKAKKFKSLQKQPFPKQILSVLQAIFPIFGWCRNYKLTMFKNDLMAGLTLASLCIPQSIGYATLAKLDPQYGLYTSVVPPLIYALMGTSREIAIGPVAVVSLLISSMLQKLIDPETDPLGYKKLVLTTTFFAGIFQASFGLFRLGFLVDFLSHAAIVGFMGGAAIVIGLQQLKGLLGITNFTTNTDIVSVLRAVWRSCQQQWSPHTFILGCSFLSFILITRFIGKKYKKLFWLPAIAPLIAVVVSTLMVFLTKADEHGVKTVRHIKGGLNPMSIQDLDFNTPHLGQIAKIGLIIAIVALTEAIAVGRSFAGIKGYRLDGNKEMVAIGFMNVLGSFTSCYAATGSFSRTAVNFAAGCETAMSNIVMAVTVFVALECLTRLLYYTPIAILASIILSALPGLININEAIHIWKVDKFDFLALIGAFFGVLFASVEIGLLVAVVISFAKIILISIRPGIETLGRMPGTDTFTDTNQYPMTVKTPGVLIFRVKSALLCFANASSIEERIMGWVDEEEEEENTKSNAKRKILFVVLDMSSLINVDTSGITALLELHNKLIKTGVELVIVNPKWQVIHKLNQAKFVDRIGGKVYLTIGEALDACFGLKV

SEQ ID NO: 83421 - protein, 649 aa, Arabidopsis thaliana
  peptide (1)..(649): Ceres Seq. ID no. 12670162
MAMANSGSSAAAQAGQDQPDRSKWLLDCPEPPSPWHELKRQVKGSFLTKAKKFKSLQKQPFPKQILSVLQAIFPIFGWCRNYKLTMFKNDLMAGLTLASLCIPQSIGYATLAKLDPQYGLYTSVVPPLIYALMGTSREIAIGPVAVVSLLISSMLQKLIDPETDPLGYKKLVLTTTFFAGIFQASFGLFRLGFLVDFLSHAAIVGFMGGAAIVIGLQQLKGLLGITNFTTNTDIVSVLRAVWRSCQQQWSPHTFILGCSFLSFILITRFIGKKYKKLFWLPAIAPLIAVVVSTLMVFLTKADEHGVKTVRHIKGGLNPMSIQDLDFNTPHLGQIAKIGLIIAIVALTEAIAVGRSFAGIKGYRLDGNKEMVAIGFMNVLGSFTSCYAATGSFSRTAVNFAAGCETAMSNIVMAVTVFVALECLTRLLYYTPIAILASIILSALPGLININEAIHIWKVDKFDFLALIGAFFGVLFASVEIGLLVAVVISFAKIILISIRPGIETLGRMPGTDTFTDTNQYPMTVKTPGVLIFRVKSALLCFANASSIEERIMGWVDEEEEEENTKSNAKRKILFVVLDMSSLINVDTSGITALLELHNKLIKTGVELVIVNPKWQVIHKLNQAKFVDRIGGKVYLTIGEALDACFGLKV

SEQ ID NO: 83422 - DNA, 1003 bp, Arabidopsis thaliana
  misc_feature (1)..(1003): Ceres Seq. ID no. 12670163
  misc_feature (1)..(1003): Ortholog of  Ceres SEQ ID NO 12484482 as cited in SEQ ID NO 53324
  misc_feature (1)..(1003): Ortholog of  Ceres SEQ ID NO 15176234 as cited in SEQ ID NO 54949
  misc_feature (1)..(1003): Ortholog of  Ceres SEQ ID NO 14314507 as cited in SEQ ID NO 59337
gagaaatattcagtggtcggagaatggcgtctctcaaaattccagcaaatattcctcttcccgaagaagactccgagcagctccacaaggcattcaaaggatggggaactaatgaagggatgatcatatcaattttggctcatagaaacgcaacgcaacgcagtttcattcgtgccgtttatgctgctaactacaataaggatcttctcaaggaattagacggagagctttctggtgactttgagagagttgtgatgttgtggactcttgatccaacggagagagatgcgtatttggccaatgaatctaccaaattgttcaccaaaaacatttgggtcctagttgaaatcgcttgtactagaccttctcttgagtttttcaagaccaagcaagcataccatgttcgctacaagacctctctcgaggaagatgttgcataccatacatctggaaatatccgaaagctattggttcctcttgtgagcaccttcaggtacgatggaaatgctgatgaggtcaacgtgaagctggctagatccgaagctaagacacttcacaagaagatcactgagaaggcttacactgatgaagatctcatcagaatcttgacaacaaggagcaaagcacagatcaatgcaacactcaatcacttcaaggacaagtttggaagttccattaacaagtttctcaaagaagattcgaacgatgattatgttcaattactcaaaaccgcgatcaaatgcttgacatatccagagaagtactttgagaaggttctacgtcgagccatcaacaggatgggaacagacgagtgggcacttactagagtggtcactacaagagcagaggtcgacctggagcggatcaaagaagaatacttacgcaggaacagtgttcctcttgatcgagccattgctaatgacacttctggtgactacaaggatatgcttctcgcccttcttggacatgaccatgcttgaaacaacatcatcgtttcatagtc

SEQ ID NO: 83423 - protein, 325 aa, Arabidopsis thaliana
  peptide (1)..(325): Ceres Seq. ID no. 12670164
EIFSGRRMASLKIPANIPLPEEDSEQLHKAFKGWGTNEGMIISILAHRNATQRSFIRAVYAANYNKDLLKELDGELSGDFERVVMLWTLDPTERDAYLANESTKLFTKNIWVLVEIACTRPSLEFFKTKQAYHVRYKTSLEEDVAYHTSGNIRKLLVPLVSTFRYDGNADEVNVKLARSEAKTLHKKITEKAYTDEDLIRILTTRSKAQINATLNHFKDKFGSSINKFLKEDSNDDYVQLLKTAIKCLTYPEKYFEKVLRRAINRMGTDEWALTRVVTTRAEVDLERIKEEYLRRNSVPLDRAIANDTSGDYKDMLLALLGHDHA

SEQ ID NO: 83424 - protein, 318 aa, Arabidopsis thaliana
  peptide (1)..(318): Ceres Seq. ID no. 12670165
MASLKIPANIPLPEEDSEQLHKAFKGWGTNEGMIISILAHRNATQRSFIRAVYAANYNKDLLKELDGELSGDFERVVMLWTLDPTERDAYLANESTKLFTKNIWVLVEIACTRPSLEFFKTKQAYHVRYKTSLEEDVAYHTSGNIRKLLVPLVSTFRYDGNADEVNVKLARSEAKTLHKKITEKAYTDEDLIRILTTRSKAQINATLNHFKDKFGSSINKFLKEDSNDDYVQLLKTAIKCLTYPEKYFEKVLRRAINRMGTDEWALTRVVTTRAEVDLERIKEEYLRRNSVPLDRAIANDTSGDYKDMLLALLGHDHA

SEQ ID NO: 83425 - protein, 286 aa, Arabidopsis thaliana
  peptide (1)..(286): Ceres Seq. ID no. 12670166
MIISILAHRNATQRSFIRAVYAANYNKDLLKELDGELSGDFERVVMLWTLDPTERDAYLANESTKLFTKNIWVLVEIACTRPSLEFFKTKQAYHVRYKTSLEEDVAYHTSGNIRKLLVPLVSTFRYDGNADEVNVKLARSEAKTLHKKITEKAYTDEDLIRILTTRSKAQINATLNHFKDKFGSSINKFLKEDSNDDYVQLLKTAIKCLTYPEKYFEKVLRRAINRMGTDEWALTRVVTTRAEVDLERIKEEYLRRNSVPLDRAIANDTSGDYKDMLLALLGHDHA

SEQ ID NO: 83426 - DNA, 1715 bp, Arabidopsis thaliana
  misc_feature (1)..(1715): Ceres Seq. ID no. 12670167
  misc_feature (1)..(1715): Ortholog of  Ceres SEQ ID NO 13532807 as cited in SEQ ID NO 53012
  misc_feature (1)..(1715): Ortholog of  Ceres SEQ ID NO 13663060 as cited in SEQ ID NO 60964
  misc_feature (1)..(1715): Ortholog of  Ceres SEQ ID NO 13598532 as cited in SEQ ID NO 65204
  misc_feature (1)..(1715): Ortholog of  Ceres SEQ ID NO 13656849 as cited in SEQ ID NO 65764
  misc_feature (1)..(1715): Ortholog of  Ceres SEQ ID NO 13586068 as cited in SEQ ID NO 0
gtctgagagaaaaggaaagcgatcgagaaagacgtaatttgatcatcggagtaaaagatattgttcgacagtgggactcccgggaacgaagatggcgatggcatcattcgggcagctaaatctcgaggaacctcctccaatctggggatctcgcagcgttgattgctttgagaagctcgaacaaattggtgaaggcacttacggtcaagtttacatggctaaagaaatcaaaactggtgaaattgtggctctcaaaaagatacgtatggacaatgaaagagaagggtttcctataacagctattagagagataaagattctgaagaagcttcatcatgaaaatgtcattcagctgaaagagattgtgacttcaccaggtcgggacagggatgaccaaggaaagccagataataacaaatacaagggtggcatctacatggtttttgagtacatggatcatgatttgactggactagcagatcgtcctggactgagatttactgttcctcaaattaagtgttacatgaagcaattgcttaccgggcttcactattgtcatgtgaatcaagtgcttcaccgtgatataaaaggctcaaatctccttatcgacaatgagggaaatttaaagctggctgattttgggcttgcacggtcgtattctcatgatcatactggaaatcttacaaatcgtgtcatcacattgtggtataggccccctgaattactacttggggctacaaaatatggcccagcaattgacatgtggtcggttggttgcatatttgccgaacttttgcatgcaaaaccaatcttacctgggaaaaatgagcaagaacaattgaacaagatatttgagctttgtggatcacctgatgaaaaactttggcctggggtttccaagatgccttggttcaacaatttcaagcctgcacggcccttgaagaggcgtgtaagagagttcttcagacactttgatcggcatgctcttgaattactggagaaaatgttggtgcttgatccagcacagagaatatcggcaaaggatgctcttgatgccgagtacttttggactgatccgttgccatgtgacccaaagagtctgcccacatatgaatcatcacatgagttccagacaaagaaaaagcggcaacagcagcgccaaaacgaggaagcagcaaaaagacagaaactgcagcatccaccgctgcagcactctcgcttacccccattacaacatggtggacagtctcatgctgctccacattggcctgcaggtccaaaccatcccactaacaacgcaccaccacaagtacctgctggacccagccacaacttctatgggaagccgcgtggtccacctggtccaaaccgctaccctcctagcggaaaccagagcgggggttataatcaaagccgaggaggttacagcagtggatcatatcctccacaaggacgtggagctccttatgtggctggtcctagagggcctagtggtggcccgtacggggttggacctcctaactacacacaaggtggtcagtatggtggctctggtagctcgggaagagggcagaatcagagaaaccagcaatacggatggcaacagtaaagagctctaatgatttgttgatctgatatcttactcttacatttaatgtgatactagtaataaactaataatagattaatatgagaaactgaatctctttcttttc

SEQ ID NO: 83427 - protein, 505 aa, Arabidopsis thaliana
  peptide (1)..(505): Ceres Seq. ID no. 12670168
MAMASFGQLNLEEPPPIWGSRSVDCFEKLEQIGEGTYGQVYMAKEIKTGEIVALKKIRMDNEREGFPITAIREIKILKKLHHENVIQLKEIVTSPGRDRDDQGKPDNNKYKGGIYMVFEYMDHDLTGLADRPGLRFTVPQIKCYMKQLLTGLHYCHVNQVLHRDIKGSNLLIDNEGNLKLADFGLARSYSHDHTGNLTNRVITLWYRPPELLLGATKYGPAIDMWSVGCIFAELLHAKPILPGKNEQEQLNKIFELCGSPDEKLWPGVSKMPWFNNFKPARPLKRRVREFFRHFDRHALELLEKMLVLDPAQRISAKDALDAEYFWTDPLPCDPKSLPTYESSHEFQTKKKRQQQRQNEEAAKRQKLQHPPLQHSRLPPLQHGGQSHAAPHWPAGPNHPTNNAPPQVPAGPSHNFYGKPRGPPGPNRYPPSGNQSGGYNQSRGGYSSGSYPPQGRGAPYVAGPRGPSGGPYGVGPPNYTQGGQYGGSGSSGRGQNQRNQQYGWQQ

SEQ ID NO: 83428 - protein, 503 aa, Arabidopsis thaliana
  peptide (1)..(503): Ceres Seq. ID no. 12670169
MASFGQLNLEEPPPIWGSRSVDCFEKLEQIGEGTYGQVYMAKEIKTGEIVALKKIRMDNEREGFPITAIREIKILKKLHHENVIQLKEIVTSPGRDRDDQGKPDNNKYKGGIYMVFEYMDHDLTGLADRPGLRFTVPQIKCYMKQLLTGLHYCHVNQVLHRDIKGSNLLIDNEGNLKLADFGLARSYSHDHTGNLTNRVITLWYRPPELLLGATKYGPAIDMWSVGCIFAELLHAKPILPGKNEQEQLNKIFELCGSPDEKLWPGVSKMPWFNNFKPARPLKRRVREFFRHFDRHALELLEKMLVLDPAQRISAKDALDAEYFWTDPLPCDPKSLPTYESSHEFQTKKKRQQQRQNEEAAKRQKLQHPPLQHSRLPPLQHGGQSHAAPHWPAGPNHPTNNAPPQVPAGPSHNFYGKPRGPPGPNRYPPSGNQSGGYNQSRGGYSSGSYPPQGRGAPYVAGPRGPSGGPYGVGPPNYTQGGQYGGSGSSGRGQNQRNQQYGWQQ

SEQ ID NO: 83429 - protein, 464 aa, Arabidopsis thaliana
  peptide (1)..(464): Ceres Seq. ID no. 12670170
MAKEIKTGEIVALKKIRMDNEREGFPITAIREIKILKKLHHENVIQLKEIVTSPGRDRDDQGKPDNNKYKGGIYMVFEYMDHDLTGLADRPGLRFTVPQIKCYMKQLLTGLHYCHVNQVLHRDIKGSNLLIDNEGNLKLADFGLARSYSHDHTGNLTNRVITLWYRPPELLLGATKYGPAIDMWSVGCIFAELLHAKPILPGKNEQEQLNKIFELCGSPDEKLWPGVSKMPWFNNFKPARPLKRRVREFFRHFDRHALELLEKMLVLDPAQRISAKDALDAEYFWTDPLPCDPKSLPTYESSHEFQTKKKRQQQRQNEEAAKRQKLQHPPLQHSRLPPLQHGGQSHAAPHWPAGPNHPTNNAPPQVPAGPSHNFYGKPRGPPGPNRYPPSGNQSGGYNQSRGGYSSGSYPPQGRGAPYVAGPRGPSGGPYGVGPPNYTQGGQYGGSGSSGRGQNQRNQQYGWQQ

SEQ ID NO: 83430 - DNA, 1956 bp, Arabidopsis thaliana
  misc_feature (1)..(1956): Ceres Seq. ID no. 12670175
  misc_feature (1)..(1956): Ortholog of  Ceres SEQ ID NO 13654989 as cited in SEQ ID NO 63117
  misc_feature (1)..(1956): Ortholog of  Ceres SEQ ID NO 13655640 as cited in SEQ ID NO 63844
atggccaactcaattctgttattttcctttgttttggttctcccttttgtctgttcagttcaatttaacatatctcgttttggatcagatgtttctgaaatagcataccaaggagatgcaagagcaaatggggctgttgagcttaccaacattgactacacatgccgtgccggttgggctacttatggtaagcaggttcctttatggaatccaggtaccagtaagccttcggattttagtacgcgtttctccttcagaattgatacccgtaatgttgggtatggtaattacggtcatgggtttgctttctttctagctccagcgagaatccaattgcctcccaactcagctggtggtttcttgggtctattcaatggaaccaataatcagtcttctgctttcccacttgtttatgtcgagttcgacacatttactaatccagaatgggatcctctcgatgtcaaatcccatgtaggaatcaacaacaactctcttgtttcttctaactacacttcttggaatgcaacgtcacacaaccaagatataggccgtgtcctgatattctatgattccgctagaagaaacttgagtgtctcttggacttacgacttaacatctgatcctctggagaattcaagcctatcttacatcattgatctctcaaaggtactgccatcagaagttacaattgggttttctgcgacatctggaggggtcaccgagggaaatagacttctgtcatgggagttcagttcaagcctggagctaatagatataaagaaaagtcagaatgacaagaaggggatgataattggtatttcagtttctgggttcgttttgctgaccttttttattacctcgctcatcgtcttcttgaaacggaagcagcagaagaagaaagcagaggagacagaaaacttaacatcgataaatgaagatctcgaaagaggagcaggaccaagaaagtttacttataaagatcttgcatcagctgcaaacaatttcgcagatgataggaagctaggggaaggagggtttggagcggtttatagagggtacttaaacagcttagatatgatggttgcgataaagaagtttgcgggtgggtctaagcagggaaaaagagagttcgtaaccgaagtaaagataatcagcagtttgagacatcgaaaccttgtgcaactcattggttggtgccatgagaaagatgagtttctaatgatatacgagttcatgccaaatggtagccttgacgcccatctatttggtaaaaagccgcatctcgcttggcatgtgagatgcaaaataactctcggtctcgcctctgcactgctttatcttcacgaggagtgggagcagtgtgttgtacacagagacatcaaggcgagtaatgtgatgctcgactccaatttcaatgccaagcttggtgatttcgggttggctagattgatggaccacgagctaggtccacagactacagggttagcaggaacatttggttacatggctcctgaatacataagcaccggaagggcgagcaaagaatctgatgtgtatagctttggagtggttacattagagattgttacaggaagaaaatctgtggatcgaagacaaggaagagtagagcctgtaacaaaccttgtagagaaaatgtgggacctttatggaaaaggagaagttattacagctatcgacgagaaactcaggatcggtggtttcgatgagaaacaagcagaatgtctcatgattgtaggattatggtgtgctcatcctgatgtaaacacgaggccttcaataaaacaagcaatccaagtcttgaatcttgaagcaccagtgcctcatcttccgaccaaaatgcctgtcgcaacatatcatgtatcctcttcgaatactacatcggtaagctctggtggagctacggtaacgttttcaagtgctcaacatggtcgttga

SEQ ID NO: 83431 - protein, 651 aa, Arabidopsis thaliana
  peptide (1)..(651): Ceres Seq. ID no. 12670176
MANSILLFSFVLVLPFVCSVQFNISRFGSDVSEIAYQGDARANGAVELTNIDYTCRAGWATYGKQVPLWNPGTSKPSDFSTRFSFRIDTRNVGYGNYGHGFAFFLAPARIQLPPNSAGGFLGLFNGTNNQSSAFPLVYVEFDTFTNPEWDPLDVKSHVGINNNSLVSSNYTSWNATSHNQDIGRVLIFYDSARRNLSVSWTYDLTSDPLENSSLSYIIDLSKVLPSEVTIGFSATSGGVTEGNRLLSWEFSSSLELIDIKKSQNDKKGMIIGISVSGFVLLTFFITSLIVFLKRKQQKKKAEETENLTSINEDLERGAGPRKFTYKDLASAANNFADDRKLGEGGFGAVYRGYLNSLDMMVAIKKFAGGSKQGKREFVTEVKIISSLRHRNLVQLIGWCHEKDEFLMIYEFMPNGSLDAHLFGKKPHLAWHVRCKITLGLASALLYLHEEWEQCVVHRDIKASNVMLDSNFNAKLGDFGLARLMDHELGPQTTGLAGTFGYMAPEYISTGRASKESDVYSFGVVTLEIVTGRKSVDRRQGRVEPVTNLVEKMWDLYGKGEVITAIDEKLRIGGFDEKQAECLMIVGLWCAHPDVNTRPSIKQAIQVLNLEAPVPHLPTKMPVATYHVSSSNTTSVSSGGATVTFSSAQHGR

SEQ ID NO: 83432 - protein, 383 aa, Arabidopsis thaliana
  peptide (1)..(383): Ceres Seq. ID no. 12670177
MIIGISVSGFVLLTFFITSLIVFLKRKQQKKKAEETENLTSINEDLERGAGPRKFTYKDLASAANNFADDRKLGEGGFGAVYRGYLNSLDMMVAIKKFAGGSKQGKREFVTEVKIISSLRHRNLVQLIGWCHEKDEFLMIYEFMPNGSLDAHLFGKKPHLAWHVRCKITLGLASALLYLHEEWEQCVVHRDIKASNVMLDSNFNAKLGDFGLARLMDHELGPQTTGLAGTFGYMAPEYISTGRASKESDVYSFGVVTLEIVTGRKSVDRRQGRVEPVTNLVEKMWDLYGKGEVITAIDEKLRIGGFDEKQAECLMIVGLWCAHPDVNTRPSIKQAIQVLNLEAPVPHLPTKMPVATYHVSSSNTTSVSSGGATVTFSSAQHGR

SEQ ID NO: 83433 - DNA, 974 bp, Arabidopsis thaliana
  misc_feature (1)..(974): Ceres Seq. ID no. 12670192
  misc_feature (1)..(974): Ortholog of  Ceres SEQ ID NO 14308171 as cited in SEQ ID NO 58912
gaagaaaagaaaaaaagaatccttcaacgagggttttgtaggagagttcacattttttttttttttgtctcagactccgccaattctctggaaacttaatttggatattgttaatttgttctcgcatagatcgattcctcttacggagaaatgcaatcgattcgtagcagtacaaggttgcttcagaggcatcgtttctccatctccaacactcttcgtttcacttcttcttcttcttcttctggaagctggtctgaaaatgaatcgaggatggtaggatttgattctttcccttgtaccagagctgcgacatatctcattagctcgttgaaaaatgtcggtttttcctcttcggcgatacctaaacaagactttaagtattcgttgaggtgcttttctactaccggagattctgttcaatctactcctcaaggatcccctgagtcagattgtgttgtgcctcagagaatcaagtttaagcggcttgataaaaccgctaagcatataatgcagattgtagacaaggaggcagttgaggaagtgagaaatcttagagagattccagagataaagcctggttacattgttcagcttaaagtggaagtgcctgagaacaagaggcgtgtatcaatagtaaaaggcgttgtcatagcaaggcgtaatgctggtcttaactcaacatttagaattagaaggcttgtcgctggagtgggcgttgaatccatgttccccttgtattccccaaacctgagggagattaaggtggtggacaagaagaaagtaagaagagccaagctctattacctcagggacaaggtgaatgctctcaagaagcattaacaaccatataaaaagcaatctactcttatcttaaaacaattttcgaaggttttagttacactccctcaaaaggagacgatttggccttagtgtcacattgaattcgtgtaatgataatgaatctcttcagtcct

SEQ ID NO: 83434 - protein, 229 aa, Arabidopsis thaliana
  peptide (1)..(229): Ceres Seq. ID no. 12670193
MQSIRSSTRLLQRHRFSISNTLRFTSSSSSSGSWSENESRMVGFDSFPCTRAATYLISSLKNVGFSSSAIPKQDFKYSLRCFSTTGDSVQSTPQGSPESDCVVPQRIKFKRLDKTAKHIMQIVDKEAVEEVRNLREIPEIKPGYIVQLKVEVPENKRRVSIVKGVVIARRNAGLNSTFRIRRLVAGVGVESMFPLYSPNLREIKVVDKKKVRRAKLYYLRDKVNALKKH

SEQ ID NO: 83435 - protein, 189 aa, Arabidopsis thaliana
  peptide (1)..(189): Ceres Seq. ID no. 12670194
MVGFDSFPCTRAATYLISSLKNVGFSSSAIPKQDFKYSLRCFSTTGDSVQSTPQGSPESDCVVPQRIKFKRLDKTAKHIMQIVDKEAVEEVRNLREIPEIKPGYIVQLKVEVPENKRRVSIVKGVVIARRNAGLNSTFRIRRLVAGVGVESMFPLYSPNLREIKVVDKKKVRRAKLYYLRDKVNALKKH

SEQ ID NO: 83436 - DNA, 1011 bp, Arabidopsis thaliana
  misc_feature (1)..(1011): Ceres Seq. ID no. 12670227
  misc_feature (1)..(1011): Ortholog of  Ceres SEQ ID NO 13495070 as cited in SEQ ID NO 53216
  misc_feature (1)..(1011): Ortholog of  Ceres SEQ ID NO 13656228 as cited in SEQ ID NO 65648
  misc_feature (1)..(1011): Ortholog of  Ceres SEQ ID NO 15179618 as cited in SEQ ID NO 0
atggatctcgcgtcgaatcttggtgggaagatcgataaatccgatgttctcaccgccgtcgaaaagtatgagcaatatcatgtcttccatggaggaaacgaggaagagagaaaagccaattatactgacatggttaataagtactatgaccttgctactagcttttatgagtacggatggggagaatccttccattttgcacaaagatggaaaggagaatcgcttcgagagagtattaagcgacacgagcactttcttgctcttcagcttggcatccaaccaggacaaaaggtactggatgtaggatgtggaattggtggaccgttgagggaaattgcaagattcagcaattcagttgttaccgggctcaacaataacgaataccagatcaccagaggcaaggaactaaaccgacttgcaggtgtcgacaagacatgtaactttgtcaaggctgacttcatgaagatgccattcccggaaaacagtttcgatgcagtttatgcaatagaagcaacttgccatgcacctgatgcgtatggatgctacaaagagatctacagagtgctaaagcctgggcaatgttttgctgcctatgagtggtgtatgactgatgcatttgaccctgataacgccgaacatcagaaaataaagggagagatagagattggagatggtcttcctgacattaggctgactacaaaatgcctcgaagctctgaagcaggccggttttgaagtgatatgggaaaaggatctggccaaggactcgccggtcccatggtacttacctcttgacaaaaatcatttctcactcagtagcttccgccttacagctgttggacgattcataaccaaaaacatggtcaagatccttgaatacataagacttgcacctcaaggaagccaaagggtctcaaatttcctggagcaggctgcggaaggattagtcgacggtggaaggagagagattttcacgccaatgtatttcttcttggcccggaagccagagtaa

SEQ ID NO: 83437 - protein, 336 aa, Arabidopsis thaliana; identical to SEQ ID NO: 26651
  peptide (1)..(336): Ceres Seq. ID no. 12670228

SEQ ID NO: 83438 - protein, 293 aa, Arabidopsis thaliana; identical to SEQ ID NO: 26652
  peptide (1)..(293): Ceres Seq. ID no. 12670229

SEQ ID NO: 83439 - protein, 183 aa, Arabidopsis thaliana
  peptide (1)..(183): Ceres Seq. ID no. 12670230
MKMPFPENSFDAVYAIEATCHAPDAYGCYKEIYRVLKPGQCFAAYEWCMTDAFDPDNAEHQKIKGEIEIGDGLPDIRLTTKCLEALKQAGFEVIWEKDLAKDSPVPWYLPLDKNHFSLSSFRLTAVGRFITKNMVKILEYIRLAPQGSQRVSNFLEQAAEGLVDGGRREIFTPMYFFLARKPE

SEQ ID NO: 83440 - DNA, 675 bp, Arabidopsis thaliana
  misc_feature (1)..(675): Ceres Seq. ID no. 12670231
  misc_feature (1)..(675): Ortholog of  Ceres SEQ ID NO 13595000 as cited in SEQ ID NO 55912
atgagtggggcaggtgtaccggactttttctacagagaagctcaacgtcttggctatgttgctcgctcagctttcaagcttctacagattcaaaaacagtacaagctcatcaaaccaggctcctctgttcttgacctaggttgcgcgcctggtgcttggcttcaggttgcttgccaaagcttaggcccacttagaagtggtggaattgtcgttggtatggatataaagaaggtgaaggttcctccacagtgtgattctcgagtgcaaaccattgctgctgatgttttaaactttcccagacaaaagattcgggagttatcacctcagcaattgggattttcagtcattctttcagatatgtgtcactcagtatctggaataaccactagagatgcagctctgtctgctgaattgggaatgcgagcacttgatttggctgttggtcaagctgccatctctcagtcacctaatgatgatgatggaggcccaaacgaaagtcgtcctggtgtacttaggcatggtggccatcttgtgatcaagcttctagaaagcgaggatgctcaagattttgctcgaatttgcaagcctatcttcaacaaggcatcttggttgaggccaaaagctacaagaccatcatctcgagaaatttacttgatttgccagggatttcgataa

SEQ ID NO: 83441 - protein, 224 aa, Arabidopsis thaliana
  peptide (1)..(224): Ceres Seq. ID no. 12670232
MSGAGVPDFFYREAQRLGYVARSAFKLLQIQKQYKLIKPGSSVLDLGCAPGAWLQVACQSLGPLRSGGIVVGMDIKKVKVPPQCDSRVQTIAADVLNFPRQKIRELSPQQLGFSVILSDMCHSVSGITTRDAALSAELGMRALDLAVGQAAISQSPNDDDGGPNESRPGVLRHGGHLVIKLLESEDAQDFARICKPIFNKASWLRPKATRPSSREIYLICQGFR

SEQ ID NO: 83442 - protein, 152 aa, Arabidopsis thaliana
  peptide (1)..(152): Ceres Seq. ID no. 12670233
MDIKKVKVPPQCDSRVQTIAADVLNFPRQKIRELSPQQLGFSVILSDMCHSVSGITTRDAALSAELGMRALDLAVGQAAISQSPNDDDGGPNESRPGVLRHGGHLVIKLLESEDAQDFARICKPIFNKASWLRPKATRPSSREIYLICQGFR

SEQ ID NO: 83443 - DNA, 1026 bp, Arabidopsis thaliana
  misc_feature (1)..(1026): Ceres Seq. ID no. 12670234
  misc_feature (1)..(1026): Ortholog of  Ceres SEQ ID NO 12582601 as cited in SEQ ID NO 51064
  misc_feature (1)..(1026): Ortholog of  Ceres SEQ ID NO 13581092 as cited in SEQ ID NO 54771
  misc_feature (1)..(1026): Ortholog of  Ceres SEQ ID NO 13594298 as cited in SEQ ID NO 57803
  misc_feature (1)..(1026): Ortholog of  Ceres SEQ ID NO 13503476 as cited in SEQ ID NO 61978
  misc_feature (1)..(1026): Ortholog of  Ceres SEQ ID NO 12578438 as cited in SEQ ID NO 62201
  misc_feature (1)..(1026): Ortholog of  Ceres SEQ ID NO 12617675 as cited in SEQ ID NO 64656
aatgtccgcatagtgtttgtttggtgtgatcagagtgagaatgggtcgtctttcatcaactctctgcctcacgtttctgattttggccacagttgcatttggtgtacctcctaaaaagtccattaatgttccatttgggaggaactacttccccacttgggcttttgatcacattaagtatctcaatggtggttctgaagtgcatcttgtcctcgacaagtacactggcactggctttcagtccaaaggttcctacttgtttggccacttcagtatgcacataaagatggttgctggtgactctgctggaactgtgaccgccttctatttgtcgtcccagaactcagaacatgatgagatagactttgagtttctagggaacagaactggccagccttacattttgcagactaacgtgtttacaggaggcgccggaaaccgtgagcaacgaatcaacctctggtttgatccttccaaggactatcattcctattcagttctctggaacatgtatcagattgtgttctttgtggatgatgtgccgatacgagtgttcaagaatagcaaagacgttggggtgaagtttccattcaaccaaccaatgaagatatattcgagtctgtggaatgcagacgactgggccacaaggggagggttggagaagaccaactgggaaaaagctccttttgtcgcgtcctacagaggcttccacgtcgatggatgtgaagcttcagtaaatgctaagttctgcgagacgcagggaaaacgttggtgggatcagaaagagttccaggacttggacgctaaccagtacaagcgtctcaaatgggttcgtaagagatacaccatctacaactattgcactgaccgcgtccgatttcccgtacctcctccagagtgccgcagagaccgcgacatatagtgatttttcagattttatctagattgttttcccactgtatgacaatatttcctacttttgtaatgtttattcttcttattacaatttaatctagaaaagtttgg

SEQ ID NO: 83444 - protein, 293 aa, Arabidopsis thaliana
  peptide (1)..(293): Ceres Seq. ID no. 12670235
MGRLSSTLCLTFLILATVAFGVPPKKSINVPFGRNYFPTWAFDHIKYLNGGSEVHLVLDKYTGTGFQSKGSYLFGHFSMHIKMVAGDSAGTVTAFYLSSQNSEHDEIDFEFLGNRTGQPYILQTNVFTGGAGNREQRINLWFDPSKDYHSYSVLWNMYQIVFFVDDVPIRVFKNSKDVGVKFPFNQPMKIYSSLWNADDWATRGGLEKTNWEKAPFVASYRGFHVDGCEASVNAKFCETQGKRWWDQKEFQDLDANQYKRLKWVRKRYTIYNYCTDRVRFPVPPPECRRDRDI

SEQ ID NO: 83445 - protein, 215 aa, Arabidopsis thaliana
  peptide (1)..(215): Ceres Seq. ID no. 12670236
MHIKMVAGDSAGTVTAFYLSSQNSEHDEIDFEFLGNRTGQPYILQTNVFTGGAGNREQRINLWFDPSKDYHSYSVLWNMYQIVFFVDDVPIRVFKNSKDVGVKFPFNQPMKIYSSLWNADDWATRGGLEKTNWEKAPFVASYRGFHVDGCEASVNAKFCETQGKRWWDQKEFQDLDANQYKRLKWVRKRYTIYNYCTDRVRFPVPPPECRRDRDI

SEQ ID NO: 83446 - protein, 211 aa, Arabidopsis thaliana
  peptide (1)..(211): Ceres Seq. ID no. 12670237
MVAGDSAGTVTAFYLSSQNSEHDEIDFEFLGNRTGQPYILQTNVFTGGAGNREQRINLWFDPSKDYHSYSVLWNMYQIVFFVDDVPIRVFKNSKDVGVKFPFNQPMKIYSSLWNADDWATRGGLEKTNWEKAPFVASYRGFHVDGCEASVNAKFCETQGKRWWDQKEFQDLDANQYKRLKWVRKRYTIYNYCTDRVRFPVPPPECRRDRDI

SEQ ID NO: 83447 - DNA, 1827 bp, Arabidopsis thaliana
  misc_feature (1)..(1827): Ceres Seq. ID no. 12670256
  misc_feature (1)..(1827): Ortholog of  Ceres SEQ ID NO 13654989 as cited in SEQ ID NO 63117
  misc_feature (1)..(1827): Ortholog of  Ceres SEQ ID NO 13584744 as cited in SEQ ID NO 69137
atgaattgttttccgtgtttcacttcacaaaagagcagaaacgctccatgcacgacgaacgagactaacgatgataacgttgaacacgacgaattcagaccacctgttgttgcgacgacgaaacggactgaagaaagagaacctgcagagcaacaaccaccggtgaaaacattcaatttccgggagttagcgacggcgaccaagaatttccggcaagaatgtcttttaggagaaggtggattcggtagggtttacaaaggaactcttcaatctactggccagttggtagctgtaaagcagctagacaagcatggattacatggtaacaaagagtttctagctgaagtcttgtcattggctaaacttgaacacccgaatcttgttaagcttataggatactgtgctgatggagatcaacggcttttagtctttgagtatgtctctggaggttcccttcaagaccatctttacgaacaaaagccaggccagaagccgatggattggataacgaggatgaagattgcgtttggtgcagcgcaaggattggattacttgcacgataaagttactccagcggtgatataccgagatttgaaagcttctaacatcttgttagatgctgagttttaccctaagctttgtgattttggtctgcataatctagagccaggaacaggtgatagcttgtttctttcttcccgggttatggatacttatggttattcagcacctgagtacactcgaggggacgatctcactgtcaagtcagatgtttatagcttcggagttgtgttgctcgaactcatcaccggtagaagagctattgacaccactaagcctaatgatgagcaaaatctagttgcttgggcacaaccgatatttaaagacccgaaaagatatccggatatggcagatcctcttttgaggaagaatttctcagagagagggttaaatcaagcagtggcaataacatcaatgtgtctacaagaggaaccaactgctcgtcctttgataagtgatgtaatggttgctcttagcttcctttcaatgtctacagaagatggtattccagccacggttccaatggaatcgttcagggacaaaagcaacaaatccagttcttcatcagactcggaggatgaagaagaagaaaaggaacaaaaagcagaaaaagaagaagaatcaacaagtaagaaaagacaagagcaggaagaaaccgcgacagattcagatgatgagtctgattcaaactccgaaaaggatcaagaagaggaacagtctcagttagagaaagccagggagtctagtagctcatcctctgactctggaagtgagagaagatcaattgatgaaacaaacgcaactgctcagagcttgaagataagttacagtaattatagctctgaggaagaagataacgagaagctaagcagtaaaagcagctgtaaatcaaacgaagaaagcactttttcgcggtatgacagcggtagagatcacgatgattcgtcaagaaacacaagcatgcgaatcaatagtcttgctcatgatgataaggaggaagacgaggaggagaatcatgaaacacggagctatagtgatcacgatgattcgccaaggaacactagcatgcgaatcaatagtctttctcatgatgatgatgaggaagaggaggaggagaatcatcaaactcggcttgagcacattcatagctcgaaatctgaagaccaaagtgtttattcagatgatgatgccggcgaaagtggtgagtcgtctttgcataggatcgaagcaaaggaagaagaacatatttcttctgaccatgattaa

SEQ ID NO: 83448 - protein, 608 aa, Arabidopsis thaliana
  peptide (1)..(608): Ceres Seq. ID no. 12670257
MNCFPCFTSQKSRNAPCTTNETNDDNVEHDEFRPPVVATTKRTEEREPAEQQPPVKTFNFRELATATKNFRQECLLGEGGFGRVYKGTLQSTGQLVAVKQLDKHGLHGNKEFLAEVLSLAKLEHPNLVKLIGYCADGDQRLLVFEYVSGGSLQDHLYEQKPGQKPMDWITRMKIAFGAAQGLDYLHDKVTPAVIYRDLKASNILLDAEFYPKLCDFGLHNLEPGTGDSLFLSSRVMDTYGYSAPEYTRGDDLTVKSDVYSFGVVLLELITGRRAIDTTKPNDEQNLVAWAQPIFKDPKRYPDMADPLLRKNFSERGLNQAVAITSMCLQEEPTARPLISDVMVALSFLSMSTEDGIPATVPMESFRDKSNKSSSSSDSEDEEEEKEQKAEKEEESTSKKRQEQEETATDSDDESDSNSEKDQEEEQSQLEKARESSSSSSDSGSERRSIDETNATAQSLKISYSNYSSEEEDNEKLSSKSSCKSNEESTFSRYDSGRDHDDSSRNTSMRINSLAHDDKEEDEEENHETRSYSDHDDSPRNTSMRINSLSHDDDEEEEEENHQTRLEHIHSSKSEDQSVYSDDDAGESGESSLHRIEAKEEEHISSDHD

SEQ ID NO: 83449 - protein, 443 aa, Arabidopsis thaliana
  peptide (1)..(443): Ceres Seq. ID no. 12670258
MDWITRMKIAFGAAQGLDYLHDKVTPAVIYRDLKASNILLDAEFYPKLCDFGLHNLEPGTGDSLFLSSRVMDTYGYSAPEYTRGDDLTVKSDVYSFGVVLLELITGRRAIDTTKPNDEQNLVAWAQPIFKDPKRYPDMADPLLRKNFSERGLNQAVAITSMCLQEEPTARPLISDVMVALSFLSMSTEDGIPATVPMESFRDKSNKSSSSSDSEDEEEEKEQKAEKEEESTSKKRQEQEETATDSDDESDSNSEKDQEEEQSQLEKARESSSSSSDSGSERRSIDETNATAQSLKISYSNYSSEEEDNEKLSSKSSCKSNEESTFSRYDSGRDHDDSSRNTSMRINSLAHDDKEEDEEENHETRSYSDHDDSPRNTSMRINSLSHDDDEEEEEENHQTRLEHIHSSKSEDQSVYSDDDAGESGESSLHRIEAKEEEHISSDHD

SEQ ID NO: 83450 - protein, 437 aa, Arabidopsis thaliana
  peptide (1)..(437): Ceres Seq. ID no. 12670259
MKIAFGAAQGLDYLHDKVTPAVIYRDLKASNILLDAEFYPKLCDFGLHNLEPGTGDSLFLSSRVMDTYGYSAPEYTRGDDLTVKSDVYSFGVVLLELITGRRAIDTTKPNDEQNLVAWAQPIFKDPKRYPDMADPLLRKNFSERGLNQAVAITSMCLQEEPTARPLISDVMVALSFLSMSTEDGIPATVPMESFRDKSNKSSSSSDSEDEEEEKEQKAEKEEESTSKKRQEQEETATDSDDESDSNSEKDQEEEQSQLEKARESSSSSSDSGSERRSIDETNATAQSLKISYSNYSSEEEDNEKLSSKSSCKSNEESTFSRYDSGRDHDDSSRNTSMRINSLAHDDKEEDEEENHETRSYSDHDDSPRNTSMRINSLSHDDDEEEEEENHQTRLEHIHSSKSEDQSVYSDDDAGESGESSLHRIEAKEEEHISSDHD

SEQ ID NO: 83451 - DNA, 1267 bp, Arabidopsis thaliana
  misc_feature (1)..(1267): Ceres Seq. ID no. 12670260
  misc_feature (1)..(1267): Ortholog of  Ceres SEQ ID NO 14310524 as cited in SEQ ID NO 58840
  misc_feature (1)..(1267): Ortholog of  Ceres SEQ ID NO 15169541 as cited in SEQ ID NO 67500
accaaaaaaaaaaaggtttattattctttgagattcctaagatatgtcttcacttgcagatttaatcaatctcgatctctccgattccactgaccagatcatcgccgagtacatatggattggtggatcgggcttggatatgagaagcaaagcaaggactttgcctggaccagtgacggatccatcgcagttaccgaaatggaactacgacggttcaagcaccggccaagctccgggcgatgacagtgaagtcatcatctaccctcaagctatcttcaaagaccccttcagaagaggcaacaacatccttgtgatgtgtgacgcatatacaccggcaggagagccgattccgacgaacaaaaggcatgcggcggctaagatctttgaagaccctagtgttgtcgccgaagaaacatggtacggaattgaacaagagtataccttgttgcaaaaggatattaagtggccggtaggttggccggtcggcggtttcccaggtcctcagggaccgtactactgtggagttggagcagacaaagcctttggaagagacatcgttgattctcattacaaagcttgtctttacgccggaatcaatgtcagtgggactaacggcgaagttatgcctggccagtgggagttccaagtcggtcccaccgttggaatcgctgccgccgatcaggtctgggttgctcgttacattcttgagaggatcacagaattggctggagttgttctgtctctagaccctaaaccaattccgggagattggaatggtgcaggggcacacacaaattacagtacgaagtcgatgagagaagatggagggtacgaggtgataaagaaagcaatagagaagcttggattgcgtcacaaggaacacattgctgcttatggtgaaggcaacgagcgtcgtctcaccggaaaacatgaaaccgccgatatcaacactttcttatggggtgtggcaaaccgtggggcatcgattagggttgggcgtgacactgagcaggctggaaaaggatactttgaagatcgtaggccagcttcgaacatggatccttacactgtgacctccatgattgctgaatccacaatcctttggaaaccatgaaagaagaaaccttgagcctcaaggaatctctataatatcagttcatgttcattcttctatggtctctttctcattctgaaacagttctcatgtgttctttgtttattatgtttgatttgaagtcttcaatttgtttctgagaacgatagttcc

SEQ ID NO: 83452 - protein, 356 aa, Arabidopsis thaliana
  peptide (1)..(356): Ceres Seq. ID no. 12670261
MSSLADLINLDLSDSTDQIIAEYIWIGGSGLDMRSKARTLPGPVTDPSQLPKWNYDGSSTGQAPGDDSEVIIYPQAIFKDPFRRGNNILVMCDAYTPAGEPIPTNKRHAAAKIFEDPSVVAEETWYGIEQEYTLLQKDIKWPVGWPVGGFPGPQGPYYCGVGADKAFGRDIVDSHYKACLYAGINVSGTNGEVMPGQWEFQVGPTVGIAAADQVWVARYILERITELAGVVLSLDPKPIPGDWNGAGAHTNYSTKSMREDGGYEVIKKAIEKLGLRHKEHIAAYGEGNERRLTGKHETADINTFLWGVANRGASIRVGRDTEQAGKGYFEDRRPASNMDPYTVTSMIAESTILWKP

SEQ ID NO: 83453 - protein, 324 aa, Arabidopsis thaliana
  peptide (1)..(324): Ceres Seq. ID no. 12670262
MRSKARTLPGPVTDPSQLPKWNYDGSSTGQAPGDDSEVIIYPQAIFKDPFRRGNNILVMCDAYTPAGEPIPTNKRHAAAKIFEDPSVVAEETWYGIEQEYTLLQKDIKWPVGWPVGGFPGPQGPYYCGVGADKAFGRDIVDSHYKACLYAGINVSGTNGEVMPGQWEFQVGPTVGIAAADQVWVARYILERITELAGVVLSLDPKPIPGDWNGAGAHTNYSTKSMREDGGYEVIKKAIEKLGLRHKEHIAAYGEGNERRLTGKHETADINTFLWGVANRGASIRVGRDTEQAGKGYFEDRRPASNMDPYTVTSMIAESTILWKP

SEQ ID NO: 83454 - protein, 266 aa, Arabidopsis thaliana
  peptide (1)..(266): Ceres Seq. ID no. 12670263
MCDAYTPAGEPIPTNKRHAAAKIFEDPSVVAEETWYGIEQEYTLLQKDIKWPVGWPVGGFPGPQGPYYCGVGADKAFGRDIVDSHYKACLYAGINVSGTNGEVMPGQWEFQVGPTVGIAAADQVWVARYILERITELAGVVLSLDPKPIPGDWNGAGAHTNYSTKSMREDGGYEVIKKAIEKLGLRHKEHIAAYGEGNERRLTGKHETADINTFLWGVANRGASIRVGRDTEQAGKGYFEDRRPASNMDPYTVTSMIAESTILWKP

SEQ ID NO: 83455 - DNA, 1213 bp, Arabidopsis thaliana
  misc_feature (1)..(1213): Ceres Seq. ID no. 12670268
  misc_feature (1)..(1213): Ortholog of  Ceres SEQ ID NO 12611159 as cited in SEQ ID NO 59821
atggggcgatcaccatgttgcgatgagaatggtctaaagaaagggccatggacacaagaggaggatgataaactgatagatcacattcaaaaacatggccatggcagctggagagctcttccaaagcaagccggtttaaaccgatgcggaaagagttgtagattaagatggaccaactacttgagacctgacatcaagagaggaaatttcactgaagaggaagaacaaactattatcaacctccattcccttcttggaaacaagtggtcgtcgatagccggtaatcttcctggaagaacggacaatgaaataaaaaactattggaacacacatttgagaaagaaacttctccaaatggggattgatccggtgacccataggccaagaaccgaccatctaaacgttttagcagctctcccgcagcttatagccgccgcaaatttcaacagcctcttgaatctcaaccaaaatgtgcaactggatgcaacaactcttgctaaagctcaactgctacacactatgattcaagtccttagcaccaataacaacaccaccaatccttctttttcttcatcaactatgcaaaacagtaacaccaatctctttggccaagcttcttacttagagaaccaaaatctttttggtcagtctcaaaacttctctcacattcttgaggatgagaatttgatggtcaaaacccaaattattgataaccctttggactctttttcttcccccatacaacccggttttcaagatgatcataattcactccctctattggttccggcgtctcctgaagaatctaaagaaactcaaaggatgatcaagaacaaagacatcgtcgattaccatcatcatgatgcttcaaacccttcatcatcaaactcaacgtttacacaagatcatcatcacccatggtgtgacactattgatgatggagcaagtgattctttttggaaagagataatagagcaaacttgttcggaaccatggccatttcctgaatagacaagattgaaaaatgattaaagagagagtatatttatttttcttgttatttgttgtcgatagagttaaaagcatatttattcttcactaatccttaccgtgttttttttgtaagaccatgtgtgtgtggtaaacattgatcttgtacaaacttgattacattactgtattaatacaaatattcgtgtttgtaattactttc

SEQ ID NO: 83456 - protein, 336 aa, Arabidopsis thaliana
  peptide (1)..(336): Ceres Seq. ID no. 12670269
MGRSPCCDENGLKKGPWTQEEDDKLIDHIQKHGHGSWRALPKQAGLNRCGKSCRLRWTNYLRPDIKRGNFTEEEEQTIINLHSLLGNKWSSIAGNLPGRTDNEIKNYWNTHLRKKLLQMGIDPVTHRPRTDHLNVLAALPQLIAAANFNSLLNLNQNVQLDATTLAKAQLLHTMIQVLSTNNNTTNPSFSSSTMQNSNTNLFGQASYLENQNLFGQSQNFSHILEDENLMVKTQIIDNPLDSFSSPIQPGFQDDHNSLPLLVPASPEESKETQRMIKNKDIVDYHHHDASNPSSSNSTFTQDHHHPWCDTIDDGASDSFWKEIIEQTCSEPWPFPE

SEQ ID NO: 83457 - protein, 218 aa, Arabidopsis thaliana
  peptide (1)..(218): Ceres Seq. ID no. 12670270
MGIDPVTHRPRTDHLNVLAALPQLIAAANFNSLLNLNQNVQLDATTLAKAQLLHTMIQVLSTNNNTTNPSFSSSTMQNSNTNLFGQASYLENQNLFGQSQNFSHILEDENLMVKTQIIDNPLDSFSSPIQPGFQDDHNSLPLLVPASPEESKETQRMIKNKDIVDYHHHDASNPSSSNSTFTQDHHHPWCDTIDDGASDSFWKEIIEQTCSEPWPFPE

SEQ ID NO: 83458 - DNA, 1032 bp, Arabidopsis thaliana
  misc_feature (1)..(1032): Ceres Seq. ID no. 12670279
  misc_feature (1)..(1032): Ortholog of  Ceres SEQ ID NO 13596891 as cited in SEQ ID NO 62868
  misc_feature (1)..(1032): Ortholog of  Ceres SEQ ID NO 12617235 as cited in SEQ ID NO 63990
  misc_feature (1)..(1032): Ortholog of  Ceres SEQ ID NO 13655371 as cited in SEQ ID NO 68945
atgacgacgaacaagcaggtcatattcaaagaccacgtgagtggtttccctaaggaatccgatttcaatttcaccaccaccaccgtcgaacttagggttccggaaggttctaaatcggttcttgtgaagaatctctacctgtcatgcgatccttatatgcggtctcgcatggggaaacctgatccctcctctgctcttgctcaagcttacgctcccggcaagccaatctatgggtatggagtgtctagagtgatagaatctgggcatccagattacaagaaaggtgatttactctggggaatagttggatgggaggagtatagtgttattacaccaatggctcacatgcatttcaagatccaacatacagatgttccattatcctactatactggacttctcggtatgcctggtatgactgcctatgctgggttttatgaagtttgttctccaaagaaaggagagacagtttatgtgtcagctgcatctggtgcggttggtcagcttgtgggacaatttgctaagatgatgggctgttatgttgttggaagcgctggaagtaaagaaaaggttgatctcctgaagaccaagtttgggtttgatgatgcatttaactacaaggaagaatctgaccttagtgctgccctcaaaaggtgttttcccaagggcatcgacatgtactttgagaacgtaggaggcaaaatgctagatgcagtgctcttaaacatgaacccacacgggcgtatcgctgtctgtggaatgatctcacagtacaatcttgaaaatcaagaaggtgtacacaacctatccaatatcatctacaaacgaatacgcattcaaggctttgtagtggctgatttctacgacaaatacccaaagttcttggagttggtgcttccgcgcattaaagaagggaagataacgtatgtggaagatgtagctgatgggctcgagaaagctcctgaagctcttgtggggcttttccatggtaagaacgttgggaaacaagttgttgttattgctcgtgagtga

SEQ ID NO: 83459 - protein, 343 aa, Arabidopsis thaliana; identical to SEQ ID NO: 43475
  peptide (1)..(343): Ceres Seq. ID no. 12670280

SEQ ID NO: 83460 - protein, 291 aa, Arabidopsis thaliana; identical to SEQ ID NO: 43476
  peptide (1)..(291): Ceres Seq. ID no. 12670281

SEQ ID NO: 83461 - protein, 287 aa, Arabidopsis thaliana; identical to SEQ ID NO: 43477
  peptide (1)..(287): Ceres Seq. ID no. 12670282

SEQ ID NO: 83462 - DNA, 921 bp, Arabidopsis thaliana
  misc_feature (1)..(921): Ceres Seq. ID no. 12670296
  misc_feature (1)..(921): Ortholog of  Ceres SEQ ID NO 15176290 as cited in SEQ ID NO 54445
attatattccgtacaatccgatcgatttcccggcgccagatctcaccgcgactcgtctactttccgatttggttcgtgttgactcagttacgattaaactatggatccaatggatatagtcggcaaatccaaggaagacgcttctcttccaaaagctacgatgactaaaattataaaggagatgttaccaccagatgttcgtgttgcaagagatgctcaagatcttctcattgaatgttgtgtagagtttataaatcttgtatcttcagaatctaatgatgtttgtaacaaagaggataaacggacgattgctcctgagcatgttctcaaggcattacaggttcttggttttggagaatacattgaagaagtctatgctgcgtatgagcaacataagtatgaaacaatgcaggacacacagaggagcgtgaaatggaaccctggagctcaaatgactgaggaggaagcagcagctgagcaacaacgtatgtttgcagaagcacgtgcaagaatgaatggaggtgtttcggttcctcaacctgaacatccagaaactgaccagagaagtccgcaaagctaactgaaaccgtaagggtaagtgttaggcaagaaaaaacaacatccttttaacattcccttgtaagttgcaaatgcgtatgttctctgtttatatgctcttagtatgatatatgttagttagtgtttcacgatctaaaaacacttgtgattcagatgtaattagtaagcattccttgttttgtgtttacttgtgtcttgactaagcatggtgggtcaggtctacacaaagcatctgattcgatgacttacaggaatcttaatgtttgtagattggataaatttggtgattggtgtaattgtttttccataaacacaatgcaatcattgtttagtgttgttaac

SEQ ID NO: 83463 - protein, 159 aa, Arabidopsis thaliana
  peptide (1)..(159): Ceres Seq. ID no. 12670297
MDPMDIVGKSKEDASLPKATMTKIIKEMLPPDVRVARDAQDLLIECCVEFINLVSSESNDVCNKEDKRTIAPEHVLKALQVLGFGEYIEEVYAAYEQHKYETMQDTQRSVKWNPGAQMTEEEAAAEQQRMFAEARARMNGGVSVPQPEHPETDQRSPQS

SEQ ID NO: 83464 - protein, 156 aa, Arabidopsis thaliana
  peptide (1)..(156): Ceres Seq. ID no. 12670298
MDIVGKSKEDASLPKATMTKIIKEMLPPDVRVARDAQDLLIECCVEFINLVSSESNDVCNKEDKRTIAPEHVLKALQVLGFGEYIEEVYAAYEQHKYETMQDTQRSVKWNPGAQMTEEEAAAEQQRMFAEARARMNGGVSVPQPEHPETDQRSPQS

SEQ ID NO: 83465 - protein, 139 aa, Arabidopsis thaliana
  peptide (1)..(139): Ceres Seq. ID no. 12670299
MTKIIKEMLPPDVRVARDAQDLLIECCVEFINLVSSESNDVCNKEDKRTIAPEHVLKALQVLGFGEYIEEVYAAYEQHKYETMQDTQRSVKWNPGAQMTEEEAAAEQQRMFAEARARMNGGVSVPQPEHPETDQRSPQS

SEQ ID NO: 83466 - DNA, 1500 bp, Arabidopsis thaliana
  misc_feature (1)..(1500): Ceres Seq. ID no. 12670304
  misc_feature (1)..(1500): Ortholog of  Ceres SEQ ID NO 13594349 as cited in SEQ ID NO 58161
  misc_feature (1)..(1500): Ortholog of  Ceres SEQ ID NO 13663419 as cited in SEQ ID NO 66561
  misc_feature (1)..(1500): Ortholog of  Ceres SEQ ID NO 15177892 as cited in SEQ ID NO 0
atgggttctcatagtgttgagttctctgttcttgtcctatttcttgtgtcctttcttcttggctcaacatcagcagaaaagctgtgcagtgacaacgacggcgacaacggttgtttccggtctagggttttggcagcgcaacgagctgatcgagtgaaagagcttccgggacagccgccagtgaaattccggcaatacgccggttatgtgacggttaatgaaacacatggaagagcattgttctattggttctttgaagccactcagaatccaagcaaaaaacctgtcctcctttggctcaatggaggaccgggatgttcatcaatcggattcggagctgcagaagaactgggaccattcttcccacaaaactcgagtcagcctaaactcaagctaaatccatacagctggaacaaagcggcgaatttgttattcttggaatcgccggttggagttggattctcctatactaacacaagccgtgatataaaacaactcggcgacactgtcacagcgagagactcgtacaacttccttgtcaactggttcaagagatttccccagtacaagtcacacgacttctacattgccggagaaagctacgccggccattacgtcccacaactttcggagctcatctacaaagaaaacaagattgcgtccaagaaagatttcattaatctcaagggtttaatgataggaaacgcgttattggatgacgaaacggatcaaaaggggatgatagaatatgcatgggatcacgcggtgatatcagatgcattgtacgagaaagtgaacaaaaactgcgatttcaaacaaaaacttgtgaccaaggaatgcaacgacgctttagatgagtattttgatgtatacaagatccttgacatgtacagtctgtacgctccaaagtgtgtccccacctccacgaactcctctacttctcattcagtcgccggaaaccgccccctacccgcattccgaagcattctacgaccccgtctcatctctcacaatgaaggatggaggaggatggccgccgggtacgatccatgtgcatcagagtatacagaaaaatatatgaacagaaaagatgttcaggaggcacttcacgctaatgtcaccaacatctcttacccttggactcattgcagtgacactgtctcattctggtctgacgctcccgcttctatgcttccaaccttaagaacacttgtttcagcgggattacgcgtatgggttttcagtggggatacagacgggcgaatccccgtgaccgcaaccagatactcactaaagaagctaggtcttaagatagtccaagactggacaccttggtacaccaaactacaggtcggagggtggacggtggagtatgacggtttaatgtttgtgacggtaagaggagcgggacaccaggttccgacatttaaacctagagaagctcttcagctcattcatcattttctaggcaataagaaacttcctacttttcccttttga

SEQ ID NO: 83467 - protein, 499 aa, Arabidopsis thaliana
  peptide (1)..(499): Ceres Seq. ID no. 12670305
MGSHSVEFSVLVLFLVSFLLGSTSAEKLCSDNDGDNGCFRSRVLAAQRADRVKELPGQPPVKFRQYAGYVTVNETHGRALFYWFFEATQNPSKKPVLLWLNGGPGCSSIGFGAAEELGPFFPQNSSQPKLKLNPYSWNKAANLLFLESPVGVGFSYTNTSRDIKQLGDTVTARDSYNFLVNWFKRFPQYKSHDFYIAGESYAGHYVPQLSELIYKENKIASKKDFINLKGLMIGNALLDDETDQKGMIEYAWDHAVISDALYEKVNKNCDFKQKLVTKECNDALDEYFDVYKILDMYSLYAPKCVPTSTNSSTSHSVAGNRPLPAFRSILRPRLISHNEGWRRMAAGYDPCASEYTEKYMNRKDVQEALHANVTNISYPWTHCSDTVSFWSDAPASMLPTLRTLVSAGLRVWVFSGDTDGRIPVTATRYSLKKLGLKIVQDWTPWYTKLQVGGWTVEYDGLMFVTVRGAGHQVPTFKPREALQLIHHFLGNKKLPTFPF

SEQ ID NO: 83468 - protein, 268 aa, Arabidopsis thaliana
  peptide (1)..(268): Ceres Seq. ID no. 12670306
MIGNALLDDETDQKGMIEYAWDHAVISDALYEKVNKNCDFKQKLVTKECNDALDEYFDVYKILDMYSLYAPKCVPTSTNSSTSHSVAGNRPLPAFRSILRPRLISHNEGWRRMAAGYDPCASEYTEKYMNRKDVQEALHANVTNISYPWTHCSDTVSFWSDAPASMLPTLRTLVSAGLRVWVFSGDTDGRIPVTATRYSLKKLGLKIVQDWTPWYTKLQVGGWTVEYDGLMFVTVRGAGHQVPTFKPREALQLIHHFLGNKKLPTFPF

SEQ ID NO: 83469 - protein, 253 aa, Arabidopsis thaliana
  peptide (1)..(253): Ceres Seq. ID no. 12670307
MIEYAWDHAVISDALYEKVNKNCDFKQKLVTKECNDALDEYFDVYKILDMYSLYAPKCVPTSTNSSTSHSVAGNRPLPAFRSILRPRLISHNEGWRRMAAGYDPCASEYTEKYMNRKDVQEALHANVTNISYPWTHCSDTVSFWSDAPASMLPTLRTLVSAGLRVWVFSGDTDGRIPVTATRYSLKKLGLKIVQDWTPWYTKLQVGGWTVEYDGLMFVTVRGAGHQVPTFKPREALQLIHHFLGNKKLPTFPF

SEQ ID NO: 83470 - DNA, 906 bp, Arabidopsis thaliana
  misc_feature (1)..(906): Ceres Seq. ID no. 12670312
  misc_feature (1)..(906): Ortholog of  Ceres SEQ ID NO 13595454 as cited in SEQ ID NO 56502
atgaatgggagagttagaactaattttgagaggtttctcgaatgttcatctccacgtgtcccgattcaattttatactcaggcaaggggatcgtcttcttcttcaccaatagctttgggagctattgaagaagaagaagtgagaaagcctcgcatcgtcctcaatgatatttggtctgcctgtaaaaactggagcactgttggtatcgaagtccctctttcgctggaaaacttcgactccgatgttaaacagtactataatccttcactctccgccattcagatctttaccatcaaacccttctctgatgattcaaggagctctgccattgggatagatggtacagagacaggatctgctataactgactctgacagcaacggcaagcttcagtgtttggatgctggtgacttgggctacctttattttcaatataatgaggtagaaaggccatttgataggtttcctctcactttcaagatggctgacctagctgaggagcacactggactgtctagtctgacgagttcagatctttctccaaatagctggatttcgatagcttggtatcccatttatccaattccaccagtgataggcgtggacgggatatctgccgctttcctaacgtaccatttattgaagccaaactttccagaaacaattggtaaggatgataaggggaatgaacaaggagagtcaagtacaccagaagttctacttcctccatttggagcaatgacttacaaggcctttggtaacctgtggatgatgcctgggacatcagattatcagaacagagagatgaatgaagaatctgctgactcgtggctgagaaaacgcggcttctcccacagcgatttcaacttctttatgtcccgtaagttttacggcggaccctattaa

SEQ ID NO: 83471 - protein, 301 aa, Arabidopsis thaliana
  peptide (1)..(301): Ceres Seq. ID no. 12670313
MNGRVRTNFERFLECSSPRVPIQFYTQARGSSSSSPIALGAIEEEEVRKPRIVLNDIWSACKNWSTVGIEVPLSLENFDSDVKQYYNPSLSAIQIFTIKPFSDDSRSSAIGIDGTETGSAITDSDSNGKLQCLDAGDLGYLYFQYNEVERPFDRFPLTFKMADLAEEHTGLSSLTSSDLSPNSWISIAWYPIYPIPPVIGVDGISAAFLTYHLLKPNFPETIGKDDKGNEQGESSTPEVLLPPFGAMTYKAFGNLWMMPGTSDYQNREMNEESADSWLRKRGFSHSDFNFFMSRKFYGGPY

SEQ ID NO: 83472 - DNA, 693 bp, Arabidopsis thaliana
  misc_feature (1)..(693): Ceres Seq. ID no. 12670318
  misc_feature (1)..(693): Ortholog of  Ceres SEQ ID NO 14315477 as cited in SEQ ID NO 57177
atgagtaaacgaaaacgtccggatccgaaatcatcgggaggtgatctaaacgagccacacgagaagaagcttctggatctgattcgaataaaccaaggaagaggcgcaactatgttcgaattgaaacgcgagaaaacgatcccagcaactatagttactcgattgatcgcttctctacggaagaagaatctcatcaaagaagtagcaaacatgaacaacaaaggtgtcaaacattatcttgcaatggagtttgagccttgtagtgaacttactggtggtgaatggtacactgatggagctcttgacctgtcgaaaatcgaagatttgaaagccaagtgtgtgatgattttggagaggcataggcagagggttgttactttggaggttttgtgtgggtattttgttaaagaggagaagctgagtgttgatcagactaaggagatacttaagaacttgattttggataatttgatcatggaggtgaagagtaatggaatgaatgagtttgcttctacgagaatcggagaagtttgctacaggttgaccgggaaaaagttcggtaatggcgaaccgagagctggagcttttgcttcgattccttgcggggtttgtccgcatatagcgatctgttcacctgatggtgttatctctcccactacatgtgtttattttcagaaatggttagacttttag

SEQ ID NO: 83473 - protein, 230 aa, Arabidopsis thaliana
  peptide (1)..(230): Ceres Seq. ID no. 12670319
MSKRKRPDPKSSGGDLNEPHEKKLLDLIRINQGRGATMFELKREKTIPATIVTRLIASLRKKNLIKEVANMNNKGVKHYLAMEFEPCSELTGGEWYTDGALDLSKIEDLKAKCVMILERHRQRVVTLEVLCGYFVKEEKLSVDQTKEILKNLILDNLIMEVKSNGMNEFASTRIGEVCYRLTGKKFGNGEPRAGAFASIPCGVCPHIAICSPDGVISPTTCVYFQKWLDF

SEQ ID NO: 83474 - protein, 193 aa, Arabidopsis thaliana
  peptide (1)..(193): Ceres Seq. ID no. 12670320
MFELKREKTIPATIVTRLIASLRKKNLIKEVANMNNKGVKHYLAMEFEPCSELTGGEWYTDGALDLSKIEDLKAKCVMILERHRQRVVTLEVLCGYFVKEEKLSVDQTKEILKNLILDNLIMEVKSNGMNEFASTRIGEVCYRLTGKKFGNGEPRAGAFASIPCGVCPHIAICSPDGVISPTTCVYFQKWLDF

SEQ ID NO: 83475 - protein, 160 aa, Arabidopsis thaliana
  peptide (1)..(160): Ceres Seq. ID no. 12670321
MNNKGVKHYLAMEFEPCSELTGGEWYTDGALDLSKIEDLKAKCVMILERHRQRVVTLEVLCGYFVKEEKLSVDQTKEILKNLILDNLIMEVKSNGMNEFASTRIGEVCYRLTGKKFGNGEPRAGAFASIPCGVCPHIAICSPDGVISPTTCVYFQKWLDF

SEQ ID NO: 83476 - DNA, 1725 bp, Arabidopsis thaliana
  misc_feature (1)..(1725): Ceres Seq. ID no. 12670341
  misc_feature (1)..(1725): Ortholog of  Ceres SEQ ID NO 15177678 as cited in SEQ ID NO 0
atgtcagttgctagtgtagcgttgagtccagccctggaggaacttgtcaactttccaggtattattggacggtttggtttcaacttagacgacccaatcctggtttttctgactattgctggatctgtgatccctaagcgggtcatggagtcagattcaatagcatctgtgaagctaaggattcagagtatcaagggtttttttgtgaagaagcagaaacttctgtatgatggtagagaggtatctcgaaatgattcccaaattcgagattatggccttgctgatgggaaactgttgcatttggttattagactttcagatcttcaagccatttctgtaagaactgttgatgggaaagagtttgagctcgttgttgagaggagtagaaatgttggttacgtgaagcagcaaattgcttcaaaggaaaaagagctcggaatccccagggatcatgaactcacattagatggtgaagagctggatgaccagagactcatcactgatctctgtcaaaatggagacaatgtgattcacttgctaattagcaaatccgctaaagtcagagctaaaccagtggggaaggattttgaagtgtttatcgaagatgtaaatcacaagcacaatgtggatggtagaagaggaaaaaacatatcatcagaagcgaagcctaaagagttcttcgtggagccttttattgttaatcctgaaattaaacttccgatattgctgaaagagcttatcagctccactttagaaggcttggagaagggaaatggcccaattcgatcatctgatggatcaggaggagcttattttatgcaagatccatctggacacaagtatgtctctgtcttcaagcccattgacgaggaaccaatggctgtgaacaatccgcatggacagcctgtttcagtagatggcgagggactaaagaaaggcacacaggttggtgaaggagctatcagagaagtagcagcctacattttggactatcctatgactggaccacgaacttttcctcatgaccaaaccggttttgctggtgttccgccaacaacaatggtcaaatgcttgcacaaagatttcaaccatcccaatggttacagtttctctcctgagaacacaaagataggctcactgcagatgtttgtgagtaatgttggaagttgcgaagatatgggataccgagtattccctgtcgatcaggttcacaagatatcagtactagacataagactggctaatgctgatcgtcatgctggcaacattttggttagccgagatggaaaagatggtcagatggtgcttactccaatagaccatggctattgctttcccaataagtttgaagattgcacattcgaatggctatactggcctcaagcaaaagagccatactcttcagagacattggaatacatcaaatccttggaccccgagaaagacatcgaacttctgagattccatggttgggagattccaccttcatgcacccgtgtcctccgtatttcaaccatgcttctaaagaaaggttctgcaaagggtctcacaccttttaccatcggaagcataatgtgcagagaaacactcaaggaagaatctgtgatcgagcaaatcatacatgatgcagaagccatagtgcccacagagacaaccgaagatgagtttataagcaccgtctctgccattatggacaaccggctcgaccagtatgcttggaactga

SEQ ID NO: 83477 - protein, 574 aa, Arabidopsis thaliana
  peptide (1)..(574): Ceres Seq. ID no. 12670342
MSVASVALSPALEELVNFPGIIGRFGFNLDDPILVFLTIAGSVIPKRVMESDSIASVKLRIQSIKGFFVKKQKLLYDGREVSRNDSQIRDYGLADGKLLHLVIRLSDLQAISVRTVDGKEFELVVERSRNVGYVKQQIASKEKELGIPRDHELTLDGEELDDQRLITDLCQNGDNVIHLLISKSAKVRAKPVGKDFEVFIEDVNHKHNVDGRRGKNISSEAKPKEFFVEPFIVNPEIKLPILLKELISSTLEGLEKGNGPIRSSDGSGGAYFMQDPSGHKYVSVFKPIDEEPMAVNNPHGQPVSVDGEGLKKGTQVGEGAIREVAAYILDYPMTGPRTFPHDQTGFAGVPPTTMVKCLHKDFNHPNGYSFSPENTKIGSLQMFVSNVGSCEDMGYRVFPVDQVHKISVLDIRLANADRHAGNILVSRDGKDGQMVLTPIDHGYCFPNKFEDCTFEWLYWPQAKEPYSSETLEYIKSLDPEKDIELLRFHGWEIPPSCTRVLRISTMLLKKGSAKGLTPFTIGSIMCRETLKEESVIEQIIHDAEAIVPTETTEDEFISTVSAIMDNRLDQYAWN

SEQ ID NO: 83478 - protein, 526 aa, Arabidopsis thaliana
  peptide (1)..(526): Ceres Seq. ID no. 12670343
MESDSIASVKLRIQSIKGFFVKKQKLLYDGREVSRNDSQIRDYGLADGKLLHLVIRLSDLQAISVRTVDGKEFELVVERSRNVGYVKQQIASKEKELGIPRDHELTLDGEELDDQRLITDLCQNGDNVIHLLISKSAKVRAKPVGKDFEVFIEDVNHKHNVDGRRGKNISSEAKPKEFFVEPFIVNPEIKLPILLKELISSTLEGLEKGNGPIRSSDGSGGAYFMQDPSGHKYVSVFKPIDEEPMAVNNPHGQPVSVDGEGLKKGTQVGEGAIREVAAYILDYPMTGPRTFPHDQTGFAGVPPTTMVKCLHKDFNHPNGYSFSPENTKIGSLQMFVSNVGSCEDMGYRVFPVDQVHKISVLDIRLANADRHAGNILVSRDGKDGQMVLTPIDHGYCFPNKFEDCTFEWLYWPQAKEPYSSETLEYIKSLDPEKDIELLRFHGWEIPPSCTRVLRISTMLLKKGSAKGLTPFTIGSIMCRETLKEESVIEQIIHDAEAIVPTETTEDEFISTVSAIMDNRLDQYAWN

SEQ ID NO: 83479 - protein, 302 aa, Arabidopsis thaliana
  peptide (1)..(302): Ceres Seq. ID no. 12670344
MQDPSGHKYVSVFKPIDEEPMAVNNPHGQPVSVDGEGLKKGTQVGEGAIREVAAYILDYPMTGPRTFPHDQTGFAGVPPTTMVKCLHKDFNHPNGYSFSPENTKIGSLQMFVSNVGSCEDMGYRVFPVDQVHKISVLDIRLANADRHAGNILVSRDGKDGQMVLTPIDHGYCFPNKFEDCTFEWLYWPQAKEPYSSETLEYIKSLDPEKDIELLRFHGWEIPPSCTRVLRISTMLLKKGSAKGLTPFTIGSIMCRETLKEESVIEQIIHDAEAIVPTETTEDEFISTVSAIMDNRLDQYAWN

SEQ ID NO: 83480 - DNA, 3114 bp, Arabidopsis thaliana
  misc_feature (1)..(3114): Ceres Seq. ID no. 12670424
  misc_feature (1)..(3114): Ortholog of  Ceres SEQ ID NO 15169032 as cited in SEQ ID NO 55013
atggaagcagcttcaagttttttgtgtagaagtattcggattccgtcgactactacggcgacggcggcgttcacgttcactcgaccgccgttaaactacgtttgtgttgtcggagttcgtgttttcccgacgcggaaggtcttttgcagcggcgttaatggcggctccagtgttactaagaagaagccacgaaggaaaagtaacgtttccgataaacttaggtttaagaaaattgagaagaggaacgataatactgaatctgagagtttaagtgttgttgaggaaccgaagaacgataaagaattgagtcttcgagctttgaatcaaaatggtgatccattagggcggagagatttagggaggaacgtagtgaagtggattagtcaggcgatgaaagcgatggcttcggattttgcaactgcggaggttcagggggagttttcggagttgaggcagaacgtcggatctggtttgacgtttgtgattcaagctcaaccgtatctcaatgctattcccatgccattaggttctgaagtcatttgtttgaaggcttgtactcattatcctaccttgttcgatcatttccagagagagttgcgtgatgttcttcaagacctggagcggaagaatataatggagagttggaaggagtctgagtcttggaagctgctcaaggagattgcaaattcagctcagcatcgggaggttgctcgcaaagctgctcaagctaagcctgttcaaggagttttggggatggactcagagaaggtgaaggctatacaggaaaggattgatgagttcaccagccagatgtcgcagttacttcaagtggaacgagatacagaactggaagttacacaggaagaactagatgttgttcctactccagatgagagctctgattcctcaaaaccgattgagttcttggttaggcatggtgatgctccacaggaactttgtgatacaatttgcaatttgtatgcagttagtacctccacagggctcggaggtatgcacttggtgttgtttaaggttgggggaaaccaccgtcttcctcctactacactttcccctggtgacatggtttgcataagagtttgtgacagtaggggtgctggggcaactgcctgtacgcagggctttgttcacaaccttggagaagatgggtgtagcattggtgtggctctagaatctcgtcatggagatcctactttttccaagctctttggaaagagtgtgagaattgatcgtattcatgggttggccgatgcccttacttacgaggtatatctttgttccatattggttaaagatgcagtgttttatcacagtaacctccatcttaaatatgcttgtcatcgtaactgcgaagccctaatgcttctgcagaagaatggtctgcagaagaaaaatccatcaatatctgttgtggcgactttatttggggatggtgaagatataacatggctggagcaaaatgattatgtagactggagtgaagcggagttgagtgatgagccagtgagtaagttatttgattcttcccaaaggagagccatagctcttggagtaaacaaaaaaagacctgttatgatagtccaaggacctcctggcacgggaaagactggaatgcttaaggaggtcattaccctggctgttcaacagggggaaagagtacttgtaacagcgcctactaatgcagctgttgataacatggtcgagaagctcttgcatcttggactaaacattgtccgagtaggaaatcccgctagaatatcatctgctgttgcttcaaagtctttgggggaaattgtgaactctaagcttgcaagcttccgagcagaattggaaaggaagaagtcagatttaagaaaagatcttcggcaatgcctgagggatgatgttcttgcagctggcattcggcagctcttgaaacagcttggaaagacgttgaagaagaaggaaaaagagactgtgaaggaaatactatcaaatgcacaggttgtttttgccactaacattggagcagctgatcctttgattaggaggttagaaacatttgatttggttgttatagatgaagctggtcagtctatcgagccttcatgctggatcccaatattgcaagggaaacgttgtattctttccggtgatccatgccaattagcaccagttgttctatcacgtaaagctttagaaggtggacttggtgtatccttactggaaagagctgcatctttacatgatggagttcttgcgacaaaattaacaactcagtatcgtatgaacgatgtaatcgctggttgggcatcaaaggagatgtatggtggatggttgaaatctgctccaagtgtggcctctcatctgcttatcgattctccttttgtgaagaaattttccattttagcattatctggtttctcttgcaactctgttggtttgtctttcatgatactatctttacttgtggttgaaatatctactgattacagcttttttatggccttattgaaaagtgatgttgctcatgagcttgcaatagatgctacttggataacgcaatgcccactggttctgcttgacacaagaatgccatatgggagtttatccgtgggctgcgaggagcgtttggatccagctggcacaggctcattatacaatgaaggagaagcagatattgtggttaatcacgtcatttctttgatatacgcaggtgttagtccaatggctattgctgttcaatccccatatgttgctcaggttcaacttctcagagaaaggctggatgattttccagtggctgatggagttgaggtcgcaaccattgacagctttcaagggcgggaggctgatgcagtgatcatctcaatggtacggtcaaacaacctaggtgcagtgggattcctaggggatagcagacggatgaatgtagccattacaagagcccggaagcacgtggcagtggtatgtgacagctccacaatctgccacaacacgttcctagcaagactgttgcgccacatacgctatttcgggagagttaagcatgcagaccctggtagcttgggagggtcaggactaggcttggacccaatgttgccctaccttggttaa

SEQ ID NO: 83481 - protein, 1037 aa, Arabidopsis thaliana
  peptide (1)..(1037): Ceres Seq. ID no. 12670425
MEAASSFLCRSIRIPSTTTATAAFTFTRPPLNYVCVVGVRVFPTRKVFCSGVNGGSSVTKKKPRRKSNVSDKLRFKKIEKRNDNTESESLSVVEEPKNDKELSLRALNQNGDPLGRRDLGRNVVKWISQAMKAMASDFATAEVQGEFSELRQNVGSGLTFVIQAQPYLNAIPMPLGSEVICLKACTHYPTLFDHFQRELRDVLQDLERKNIMESWKESESWKLLKEIANSAQHREVARKAAQAKPVQGVLGMDSEKVKAIQERIDEFTSQMSQLLQVERDTELEVTQEELDVVPTPDESSDSSKPIEFLVRHGDAPQELCDTICNLYAVSTSTGLGGMHLVLFKVGGNHRLPPTTLSPGDMVCIRVCDSRGAGATACTQGFVHNLGEDGCSIGVALESRHGDPTFSKLFGKSVRIDRIHGLADALTYEVYLCSILVKDAVFYHSNLHLKYACHRNCEALMLLQKNGLQKKNPSISVVATLFGDGEDITWLEQNDYVDWSEAELSDEPVSKLFDSSQRRAIALGVNKKRPVMIVQGPPGTGKTGMLKEVITLAVQQGERVLVTAPTNAAVDNMVEKLLHLGLNIVRVGNPARISSAVASKSLGEIVNSKLASFRAELERKKSDLRKDLRQCLRDDVLAAGIRQLLKQLGKTLKKKEKETVKEILSNAQVVFATNIGAADPLIRRLETFDLVVIDEAGQSIEPSCWIPILQGKRCILSGDPCQLAPVVLSRKALEGGLGVSLLERAASLHDGVLATKLTTQYRMNDVIAGWASKEMYGGWLKSAPSVASHLLIDSPFVKKFSILALSGFSCNSVGLSFMILSLLVVEISTDYSFFMALLKSDVAHELAIDATWITQCPLVLLDTRMPYGSLSVGCEERLDPAGTGSLYNEGEADIVVNHVISLIYAGVSPMAIAVQSPYVAQVQLLRERLDDFPVADGVEVATIDSFQGREADAVIISMVRSNNLGAVGFLGDSRRMNVAITRARKHVAVVCDSSTICHNTFLARLLRHIRYFGRVKHADPGSLGGSGLGLDPMLPYLG

SEQ ID NO: 83482 - protein, 907 aa, Arabidopsis thaliana
  peptide (1)..(907): Ceres Seq. ID no. 12670426
MKAMASDFATAEVQGEFSELRQNVGSGLTFVIQAQPYLNAIPMPLGSEVICLKACTHYPTLFDHFQRELRDVLQDLERKNIMESWKESESWKLLKEIANSAQHREVARKAAQAKPVQGVLGMDSEKVKAIQERIDEFTSQMSQLLQVERDTELEVTQEELDVVPTPDESSDSSKPIEFLVRHGDAPQELCDTICNLYAVSTSTGLGGMHLVLFKVGGNHRLPPTTLSPGDMVCIRVCDSRGAGATACTQGFVHNLGEDGCSIGVALESRHGDPTFSKLFGKSVRIDRIHGLADALTYEVYLCSILVKDAVFYHSNLHLKYACHRNCEALMLLQKNGLQKKNPSISVVATLFGDGEDITWLEQNDYVDWSEAELSDEPVSKLFDSSQRRAIALGVNKKRPVMIVQGPPGTGKTGMLKEVITLAVQQGERVLVTAPTNAAVDNMVEKLLHLGLNIVRVGNPARISSAVASKSLGEIVNSKLASFRAELERKKSDLRKDLRQCLRDDVLAAGIRQLLKQLGKTLKKKEKETVKEILSNAQVVFATNIGAADPLIRRLETFDLVVIDEAGQSIEPSCWIPILQGKRCILSGDPCQLAPVVLSRKALEGGLGVSLLERAASLHDGVLATKLTTQYRMNDVIAGWASKEMYGGWLKSAPSVASHLLIDSPFVKKFSILALSGFSCNSVGLSFMILSLLVVEISTDYSFFMALLKSDVAHELAIDATWITQCPLVLLDTRMPYGSLSVGCEERLDPAGTGSLYNEGEADIVVNHVISLIYAGVSPMAIAVQSPYVAQVQLLRERLDDFPVADGVEVATIDSFQGREADAVIISMVRSNNLGAVGFLGDSRRMNVAITRARKHVAVVCDSSTICHNTFLARLLRHIRYFGRVKHADPGSLGGSGLGLDPMLPYLG

SEQ ID NO: 83483 - protein, 904 aa, Arabidopsis thaliana
  peptide (1)..(904): Ceres Seq. ID no. 12670427
MASDFATAEVQGEFSELRQNVGSGLTFVIQAQPYLNAIPMPLGSEVICLKACTHYPTLFDHFQRELRDVLQDLERKNIMESWKESESWKLLKEIANSAQHREVARKAAQAKPVQGVLGMDSEKVKAIQERIDEFTSQMSQLLQVERDTELEVTQEELDVVPTPDESSDSSKPIEFLVRHGDAPQELCDTICNLYAVSTSTGLGGMHLVLFKVGGNHRLPPTTLSPGDMVCIRVCDSRGAGATACTQGFVHNLGEDGCSIGVALESRHGDPTFSKLFGKSVRIDRIHGLADALTYEVYLCSILVKDAVFYHSNLHLKYACHRNCEALMLLQKNGLQKKNPSISVVATLFGDGEDITWLEQNDYVDWSEAELSDEPVSKLFDSSQRRAIALGVNKKRPVMIVQGPPGTGKTGMLKEVITLAVQQGERVLVTAPTNAAVDNMVEKLLHLGLNIVRVGNPARISSAVASKSLGEIVNSKLASFRAELERKKSDLRKDLRQCLRDDVLAAGIRQLLKQLGKTLKKKEKETVKEILSNAQVVFATNIGAADPLIRRLETFDLVVIDEAGQSIEPSCWIPILQGKRCILSGDPCQLAPVVLSRKALEGGLGVSLLERAASLHDGVLATKLTTQYRMNDVIAGWASKEMYGGWLKSAPSVASHLLIDSPFVKKFSILALSGFSCNSVGLSFMILSLLVVEISTDYSFFMALLKSDVAHELAIDATWITQCPLVLLDTRMPYGSLSVGCEERLDPAGTGSLYNEGEADIVVNHVISLIYAGVSPMAIAVQSPYVAQVQLLRERLDDFPVADGVEVATIDSFQGREADAVIISMVRSNNLGAVGFLGDSRRMNVAITRARKHVAVVCDSSTICHNTFLARLLRHIRYFGRVKHADPGSLGGSGLGLDPMLPYLG

SEQ ID NO: 83484 - DNA, 2133 bp, Arabidopsis thaliana
  misc_feature (1)..(2133): Ceres Seq. ID no. 12670478
  misc_feature (1)..(2133): Ortholog of  Ceres SEQ ID NO 12586556 as cited in SEQ ID NO 64667
  misc_feature (1)..(2133): Ortholog of  Ceres SEQ ID NO 13660894 as cited in SEQ ID NO 67475
atgtcagccttgtctgtgatcgaacaacgattgttaaagtgggacaagctcgcgtctttagtacccaaatcaaaaaaaactccttttccgattgatcgtctaaacgagcttttgaaagtctgtgctaattcaagttatctaagaattggagaatcgattcacgctcatttgattgttaccaaccaatcatctagagctgaagacgcgtatcagatcaattctctgatcaatctctatgtgaaatgcagagaaactgttcgtgcacgcaagctgttcgatttaatgcctgagagaaatgttgtttcttggtgtgcgatgatgaagggatatcaaaattctgggtttgattttgaagttttgaagctttttaaaagtatgtttttttctggtgaatcgagacctaatgagtttgtagctactgtggtttttaagtcttgttcaaactctgggaggattgaagaaggtaaacagtttcatggatgttttcttaagtatggtttgatttctcatgagtttgtacggaacactcttgtttacatgtattctttgtgttcggggaatggcgaggctatacgagttttggatgatcttccttattgtgatctttctgtgtttagttctgctcttagtggttatctagagtgtggtgcttttaaagaagggcttgatgttttgagaaagacagctaacgaagattttgtttggaacaacctcacgtatttgtcttctttacggcttttctccaatctcagagatttgaatttggctctgcaggttcatagccgaatggtgaggtttggtttcaacgctgaagttgaggcttgtggtgcactcattaatatgtatggcaaatgtggtaaagtcctttatgctcagagagttttcgatgatacacacgctcaaaacattttcttgaatacaacgatcatggatgcttacttccaggataagtctttcgaggaggctctgaatctgttttcaaagatggatactaaagaggttccaccaaatgagtacacctttgctattttgctgaattcaattgcagagctatcgcttctaaaacagggcgatcttctacatggacttgttttgaaatccggctataggaaccatgtaatggtaggcaatgcattggttaacatgtacgccaaaagtggcagcattgaggatgcaaggaaagcattctcaggcatgacttttagagatatagttacttggaacacaatgatatctggatgctcacatcatggattggggagggaagcgcttgaagcctttgatagaatgatttttacaggagagattcccaaccgcataacttttatcggcgttttgcaggcttgtagccatattggttttgtggagcaagggcttcattactttaatcagctgatgaagaaatttgatgtccagcctgatatacagcattatacatgcattgttggacttttgagcaaggctggaatgttcaaggatgctgaggatttcatgagaacagctccaattgaatgggatgttgttgcatggagaactttgctaaatgcttgttatgttcgccggaattacaggttaggaaaaaaagtagcagaatatgccattgagaagtatccaaacgactcaggagtttacgtattgttatccaatatccacgccaagtcaagggagtgggaaggtgtggcaaaagtgcgttctttgatgaataacagaggtgttaagaaggagcctggagtaagctggatagggatacgtaatcaaacccatgtgtttcttgcagaggataatcaacaccccgagattacgctgatttatgcaaaggttaaggaagttatgtcgaagattaaaccattagggtattcgcctgatgttgctggagctttccatgatgtcgatgaagaacagagagaagataacctctcttatcatagtgagaagctagctgtggcatatggtctgataaaaacgccagagaaatcaccattgtacgtgactaaaaacgtgaggatatgtgatgattgtcactctgcaattaagcttatctcgaagatctcaaaacgatacatagttatcagagattccaatcggttccatcatttcctagatggtcagtgttcttgctgtgattactggtga

SEQ ID NO: 83485 - protein, 710 aa, Arabidopsis thaliana
  peptide (1)..(710): Ceres Seq. ID no. 12670479
MSALSVIEQRLLKWDKLASLVPKSKKTPFPIDRLNELLKVCANSSYLRIGESIHAHLIVTNQSSRAEDAYQINSLINLYVKCRETVRARKLFDLMPERNVVSWCAMMKGYQNSGFDFEVLKLFKSMFFSGESRPNEFVATVVFKSCSNSGRIEEGKQFHGCFLKYGLISHEFVRNTLVYMYSLCSGNGEAIRVLDDLPYCDLSVFSSALSGYLECGAFKEGLDVLRKTANEDFVWNNLTYLSSLRLFSNLRDLNLALQVHSRMVRFGFNAEVEACGALINMYGKCGKVLYAQRVFDDTHAQNIFLNTTIMDAYFQDKSFEEALNLFSKMDTKEVPPNEYTFAILLNSIAELSLLKQGDLLHGLVLKSGYRNHVMVGNALVNMYAKSGSIEDARKAFSGMTFRDIVTWNTMISGCSHHGLGREALEAFDRMIFTGEIPNRITFIGVLQACSHIGFVEQGLHYFNQLMKKFDVQPDIQHYTCIVGLLSKAGMFKDAEDFMRTAPIEWDVVAWRTLLNACYVRRNYRLGKKVAEYAIEKYPNDSGVYVLLSNIHAKSREWEGVAKVRSLMNNRGVKKEPGVSWIGIRNQTHVFLAEDNQHPEITLIYAKVKEVMSKIKPLGYSPDVAGAFHDVDEEQREDNLSYHSEKLAVAYGLIKTPEKSPLYVTKNVRICDDCHSAIKLISKISKRYIVIRDSNRFHHFLDGQCSCCDYW

SEQ ID NO: 83486 - protein, 616 aa, Arabidopsis thaliana
  peptide (1)..(616): Ceres Seq. ID no. 12670480
MPERNVVSWCAMMKGYQNSGFDFEVLKLFKSMFFSGESRPNEFVATVVFKSCSNSGRIEEGKQFHGCFLKYGLISHEFVRNTLVYMYSLCSGNGEAIRVLDDLPYCDLSVFSSALSGYLECGAFKEGLDVLRKTANEDFVWNNLTYLSSLRLFSNLRDLNLALQVHSRMVRFGFNAEVEACGALINMYGKCGKVLYAQRVFDDTHAQNIFLNTTIMDAYFQDKSFEEALNLFSKMDTKEVPPNEYTFAILLNSIAELSLLKQGDLLHGLVLKSGYRNHVMVGNALVNMYAKSGSIEDARKAFSGMTFRDIVTWNTMISGCSHHGLGREALEAFDRMIFTGEIPNRITFIGVLQACSHIGFVEQGLHYFNQLMKKFDVQPDIQHYTCIVGLLSKAGMFKDAEDFMRTAPIEWDVVAWRTLLNACYVRRNYRLGKKVAEYAIEKYPNDSGVYVLLSNIHAKSREWEGVAKVRSLMNNRGVKKEPGVSWIGIRNQTHVFLAEDNQHPEITLIYAKVKEVMSKIKPLGYSPDVAGAFHDVDEEQREDNLSYHSEKLAVAYGLIKTPEKSPLYVTKNVRICDDCHSAIKLISKISKRYIVIRDSNRFHHFLDGQCSCCDYW

SEQ ID NO: 83487 - protein, 605 aa, Arabidopsis thaliana
  peptide (1)..(605): Ceres Seq. ID no. 12670481
MMKGYQNSGFDFEVLKLFKSMFFSGESRPNEFVATVVFKSCSNSGRIEEGKQFHGCFLKYGLISHEFVRNTLVYMYSLCSGNGEAIRVLDDLPYCDLSVFSSALSGYLECGAFKEGLDVLRKTANEDFVWNNLTYLSSLRLFSNLRDLNLALQVHSRMVRFGFNAEVEACGALINMYGKCGKVLYAQRVFDDTHAQNIFLNTTIMDAYFQDKSFEEALNLFSKMDTKEVPPNEYTFAILLNSIAELSLLKQGDLLHGLVLKSGYRNHVMVGNALVNMYAKSGSIEDARKAFSGMTFRDIVTWNTMISGCSHHGLGREALEAFDRMIFTGEIPNRITFIGVLQACSHIGFVEQGLHYFNQLMKKFDVQPDIQHYTCIVGLLSKAGMFKDAEDFMRTAPIEWDVVAWRTLLNACYVRRNYRLGKKVAEYAIEKYPNDSGVYVLLSNIHAKSREWEGVAKVRSLMNNRGVKKEPGVSWIGIRNQTHVFLAEDNQHPEITLIYAKVKEVMSKIKPLGYSPDVAGAFHDVDEEQREDNLSYHSEKLAVAYGLIKTPEKSPLYVTKNVRICDDCHSAIKLISKISKRYIVIRDSNRFHHFLDGQCSCCDYW

SEQ ID NO: 83488 - DNA, 2037 bp, Arabidopsis thaliana
  misc_feature (1)..(2037): Ceres Seq. ID no. 12670489
  misc_feature (1)..(2037): Ortholog of  Ceres SEQ ID NO 13657677 as cited in SEQ ID NO 66119
atgtacatagaaattgcttcatcttcttcactttctcttccattattacccttaaccagacctcatatctacacttcgatacccttctccaccattcctgaagctagacaacgcaatctcatcttcacagtctctgcttcttcttcttcagaatccacacaaaacaaaaaggtatggagaaaacaaccggagaagaacactacgtcgtcgtttcaggccttaaggaaacatcggaggtatcaaagatctgcttttctcgaccacaacgtcgatatggacgagcttttagcttcaattcaccagacccagaacgaaaaagagcttttttctttgctttcaacttacaaagacagacaattatctatacggttcatggtctctcttctttctcgagaaaatgattggcagagatcattggcattgctcgattgggttcatgaggaagccaaatacacaccttctgtgttcgcctacaatgttgttcttcgaaatgtgttgagagctaagcagtttgatattgcacacggactgttcgacgaaatgcgtcagagagctcttgcccctgataggtatacttattcaacgctaattacctcgtttggtaaagagggtatgtttgattctgctttgtcttggcttcaaaagatggaacaagaccgtgtttctggtgaccttgttttgtatagcaacctcattgagctttctaggaggctgtgtgattactctaaggctatctcgattttctcgaggttgaagaggtctggtattacgcctgatcttgttgcgtataattcgatgatcaatgtttatggaaaggccaaattgtttagagaggcgcggttgcttataaaggagatgaatgaagctggtgtcttaccaaatacagttagttactctactcttttgagtgtttatgtagagaatcacaagtttttagaagctttatcggttttcgcagagatgaaagaggtgaattgtgcgttggatctcacgacttgtaatataatgattgatgtttatggtcagcttgacatggttaaagaagctgataggttgttttggagtttgaggaaaatggatattgaacctaatgttgttagctacaatactatccttcgtgtttacggtgaggctgagcttttcggtgaagcgattcatcttttcaggttgatgcagaggaaagacattgaacagaacgttgttacttacaatacgatgattaagatctatgggaaaactatggagcacgaaaaggccacgaatcttgttcaagagatgcagagccgaggaattgaacctaatgccattacctactcaactattatatcaatatggggaaaagctgggaaattggaccgagctgcgacactgtttcagaagctgaggagctctggtgtggaaatcgatcaagttctgtatcaaaccatgattgtggcttatgaaagagttggtctaatgggtcatgctaaacgtctgcttcacgagttaaagctcccggataatattcctcgggaaaccgctatcaccattctggctaaagctgggagaacggaagaggcgacatgggtttttcgtcaagcctttgaatccggggaggtaaaagacatatcagtatttggctgtatgatcaatctttactcaagaaaccaaagatacgtaaatgtcatcgaagtgtttgagaaaatgagaaccgctggttactttccggattcgaatgtgatagctatggtgttgaacgcgtacgggaaacaaagagagtttgaaaaagcagacacggtttacagagaaatgcaagaggaaggatgtgttttccctgatgaagttcatttccaaatgctgagtttatactcatcgaagaaagattttgagatggttgagtcgttgtttcagagattagaatctgatcctaatgtcaatagcaaggagttgcatttggttgtggcggctttgtatgagagagcagataaactaaacgatgcttcaagagtcatgaatcggatgagagaacgaggaatcttaaagccatttcctggttga

SEQ ID NO: 83489 - protein, 678 aa, Arabidopsis thaliana
  peptide (1)..(678): Ceres Seq. ID no. 12670490
MYIEIASSSSLSLPLLPLTRPHIYTSIPFSTIPEARQRNLIFTVSASSSSESTQNKKVWRKQPEKNTTSSFQALRKHRRYQRSAFLDHNVDMDELLASIHQTQNEKELFSLLSTYKDRQLSIRFMVSLLSRENDWQRSLALLDWVHEEAKYTPSVFAYNVVLRNVLRAKQFDIAHGLFDEMRQRALAPDRYTYSTLITSFGKEGMFDSALSWLQKMEQDRVSGDLVLYSNLIELSRRLCDYSKAISIFSRLKRSGITPDLVAYNSMINVYGKAKLFREARLLIKEMNEAGVLPNTVSYSTLLSVYVENHKFLEALSVFAEMKEVNCALDLTTCNIMIDVYGQLDMVKEADRLFWSLRKMDIEPNVVSYNTILRVYGEAELFGEAIHLFRLMQRKDIEQNVVTYNTMIKIYGKTMEHEKATNLVQEMQSRGIEPNAITYSTIISIWGKAGKLDRAATLFQKLRSSGVEIDQVLYQTMIVAYERVGLMGHAKRLLHELKLPDNIPRETAITILAKAGRTEEATWVFRQAFESGEVKDISVFGCMINLYSRNQRYVNVIEVFEKMRTAGYFPDSNVIAMVLNAYGKQREFEKADTVYREMQEEGCVFPDEVHFQMLSLYSSKKDFEMVESLFQRLESDPNVNSKELHLVVAALYERADKLNDASRVMNRMRERGILKPFPG

SEQ ID NO: 83490 - protein, 587 aa, Arabidopsis thaliana
  peptide (1)..(587): Ceres Seq. ID no. 12670491
MDELLASIHQTQNEKELFSLLSTYKDRQLSIRFMVSLLSRENDWQRSLALLDWVHEEAKYTPSVFAYNVVLRNVLRAKQFDIAHGLFDEMRQRALAPDRYTYSTLITSFGKEGMFDSALSWLQKMEQDRVSGDLVLYSNLIELSRRLCDYSKAISIFSRLKRSGITPDLVAYNSMINVYGKAKLFREARLLIKEMNEAGVLPNTVSYSTLLSVYVENHKFLEALSVFAEMKEVNCALDLTTCNIMIDVYGQLDMVKEADRLFWSLRKMDIEPNVVSYNTILRVYGEAELFGEAIHLFRLMQRKDIEQNVVTYNTMIKIYGKTMEHEKATNLVQEMQSRGIEPNAITYSTIISIWGKAGKLDRAATLFQKLRSSGVEIDQVLYQTMIVAYERVGLMGHAKRLLHELKLPDNIPRETAITILAKAGRTEEATWVFRQAFESGEVKDISVFGCMINLYSRNQRYVNVIEVFEKMRTAGYFPDSNVIAMVLNAYGKQREFEKADTVYREMQEEGCVFPDEVHFQMLSLYSSKKDFEMVESLFQRLESDPNVNSKELHLVVAALYERADKLNDASRVMNRMRERGILKPFPG

SEQ ID NO: 83491 - protein, 554 aa, Arabidopsis thaliana
  peptide (1)..(554): Ceres Seq. ID no. 12670492
MVSLLSRENDWQRSLALLDWVHEEAKYTPSVFAYNVVLRNVLRAKQFDIAHGLFDEMRQRALAPDRYTYSTLITSFGKEGMFDSALSWLQKMEQDRVSGDLVLYSNLIELSRRLCDYSKAISIFSRLKRSGITPDLVAYNSMINVYGKAKLFREARLLIKEMNEAGVLPNTVSYSTLLSVYVENHKFLEALSVFAEMKEVNCALDLTTCNIMIDVYGQLDMVKEADRLFWSLRKMDIEPNVVSYNTILRVYGEAELFGEAIHLFRLMQRKDIEQNVVTYNTMIKIYGKTMEHEKATNLVQEMQSRGIEPNAITYSTIISIWGKAGKLDRAATLFQKLRSSGVEIDQVLYQTMIVAYERVGLMGHAKRLLHELKLPDNIPRETAITILAKAGRTEEATWVFRQAFESGEVKDISVFGCMINLYSRNQRYVNVIEVFEKMRTAGYFPDSNVIAMVLNAYGKQREFEKADTVYREMQEEGCVFPDEVHFQMLSLYSSKKDFEMVESLFQRLESDPNVNSKELHLVVAALYERADKLNDASRVMNRMRERGILKPFPG

SEQ ID NO: 83492 - DNA, 771 bp, Arabidopsis thaliana
  misc_feature (1)..(771): Ceres Seq. ID no. 12670493
  misc_feature (1)..(771): Ortholog of  Ceres SEQ ID NO 14301994 as cited in SEQ ID NO 56653
  misc_feature (1)..(771): Ortholog of  Ceres SEQ ID NO 13595658 as cited in SEQ ID NO 59888
  misc_feature (1)..(771): Ortholog of  Ceres SEQ ID NO 13661330 as cited in SEQ ID NO 61614
  misc_feature (1)..(771): Ortholog of  Ceres SEQ ID NO 13596025 as cited in SEQ ID NO 62024
  misc_feature (1)..(771): Ortholog of  Ceres SEQ ID NO 13662324 as cited in SEQ ID NO 62162
  misc_feature (1)..(771): Ortholog of  Ceres SEQ ID NO 12625713 as cited in SEQ ID NO 64160
atgaaattccagtctacctccttgttacaacttttcataatatcgagttgtatagtatatggcaaagtaacaagccatgaggtaacgttttacgtgcaaaataaatgttcatttccgatttggccggccgttgccccaaactccggccatccggtgctagcctctggtggattttatctgccatgcggaggtattaaacgcattgatgctcctttgggttggagtggtcgcatttgggctagaacaggctgtgacttcacttcaaactcgaaacaagcttgtgaaacaggtgattgtgatggacatctggagtgtaatggattaatcggaaaacctccggcaacacttattcaaattgcggtacaagccgacaaatccaaacctaatttctacgatgtaagcctcgtggacggttataatcttcccgtcgtagtgaactcgaaacccgtatcatccaaatgcaccatcttagggtgccataaagatctcaaaaccacatgtcctgaagaactacaggttttgaacgaagagggacgagttgtggcgtgcaagagtgcatgtttagcgtttgataacgacagattttgttgccggaatgcatatggaacgccggaaaagtgcaaaagaaacacgtactctatgttgtttaaagaagcttgtcccaactattacagttatgcctacgagacacctcctcctttggtcacttgctccgccaaggaatatcttatcacgttttgtccatcaaactggggccatagttccacgtaa

SEQ ID NO: 83493 - protein, 256 aa, Arabidopsis thaliana
  peptide (1)..(256): Ceres Seq. ID no. 12670494
MKFQSTSLLQLFIISSCIVYGKVTSHEVTFYVQNKCSFPIWPAVAPNSGHPVLASGGFYLPCGGIKRIDAPLGWSGRIWARTGCDFTSNSKQACETGDCDGHLECNGLIGKPPATLIQIAVQADKSKPNFYDVSLVDGYNLPVVVNSKPVSSKCTILGCHKDLKTTCPEELQVLNEEGRVVACKSACLAFDNDRFCCRNAYGTPEKCKRNTYSMLFKEACPNYYSYAYETPPPLVTCSAKEYLITFCPSNWGHSST

SEQ ID NO: 83494 - DNA, 882 bp, Arabidopsis thaliana
  misc_feature (1)..(882): Ceres Seq. ID no. 12670506
  misc_feature (1)..(882): Ortholog of  Ceres SEQ ID NO 12336358 as cited in SEQ ID NO 20733
  misc_feature (1)..(882): Ortholog of  Ceres SEQ ID NO 12623467 as cited in SEQ ID NO 60951
atggctctacgcagagcaatcactaaacgtctcattgactgttacagatccgatgtaacacaacaacactcatttttcagacaactctcaccctataacatgaagatccatcgtcagtacatgacttcacctaatggtccgaatcttacggaccggattgtcgggatccgcatcgagtccgtttctccgccgaggcgggaggaaacaccggtgatgggtttatcagttagtgagactaagaagttgttgaggctatatcaaatggagaaagtgaaagagagactcagagagattcctaaaagctctgtttcttattgggaatttattcagatctgttgtgagagttgtgggaatgatgagcaaggttctcaaatggctaagtctttggatcattcgggatgtgtcgtcgttttaggagacatagtttttcttcatccccatcagatagccaagtctatggaggcaatgatcaagcaaacatcagtacttccaaacgatccaaggaaagaagagttagttcagcttgcgactacaaagaagagtattgacatagaggcacgacgtatagtgcaggccgagttatattgtggtctcggtttcctagctgtgcaaactataggctttatgcgtcttaccttttgggaactaagctgggacgtaatggaacccatctgcttctttgtcacaaccattcatttcatcctcggttacatcttttttcttcggacatcgacggaaccatcattcgaaggactttttcgacagcggtttaagaccaaacagaagaagcttatggagaggcatggatttgattttctgaggtacaatgagctcaactctttgttcacaacatttccgtgtaaatttcattatccggtttag

SEQ ID NO: 83495 - protein, 293 aa, Arabidopsis thaliana
  peptide (1)..(293): Ceres Seq. ID no. 12670507
MALRRAITKRLIDCYRSDVTQQHSFFRQLSPYNMKIHRQYMTSPNGPNLTDRIVGIRIESVSPPRREETPVMGLSVSETKKLLRLYQMEKVKERLREIPKSSVSYWEFIQICCESCGNDEQGSQMAKSLDHSGCVVVLGDIVFLHPHQIAKSMEAMIKQTSVLPNDPRKEELVQLATTKKSIDIEARRIVQAELYCGLGFLAVQTIGFMRLTFWELSWDVMEPICFFVTTIHFILGYIFFLRTSTEPSFEGLFRQRFKTKQKKLMERHGFDFLRYNELNSLFTTFPCKFHYPV

SEQ ID NO: 83496 - protein, 260 aa, Arabidopsis thaliana
  peptide (1)..(260): Ceres Seq. ID no. 12670508
MKIHRQYMTSPNGPNLTDRIVGIRIESVSPPRREETPVMGLSVSETKKLLRLYQMEKVKERLREIPKSSVSYWEFIQICCESCGNDEQGSQMAKSLDHSGCVVVLGDIVFLHPHQIAKSMEAMIKQTSVLPNDPRKEELVQLATTKKSIDIEARRIVQAELYCGLGFLAVQTIGFMRLTFWELSWDVMEPICFFVTTIHFILGYIFFLRTSTEPSFEGLFRQRFKTKQKKLMERHGFDFLRYNELNSLFTTFPCKFHYPV

SEQ ID NO: 83497 - protein, 253 aa, Arabidopsis thaliana
  peptide (1)..(253): Ceres Seq. ID no. 12670509
MTSPNGPNLTDRIVGIRIESVSPPRREETPVMGLSVSETKKLLRLYQMEKVKERLREIPKSSVSYWEFIQICCESCGNDEQGSQMAKSLDHSGCVVVLGDIVFLHPHQIAKSMEAMIKQTSVLPNDPRKEELVQLATTKKSIDIEARRIVQAELYCGLGFLAVQTIGFMRLTFWELSWDVMEPICFFVTTIHFILGYIFFLRTSTEPSFEGLFRQRFKTKQKKLMERHGFDFLRYNELNSLFTTFPCKFHYPV

SEQ ID NO: 83498 - DNA, 1775 bp, Arabidopsis thaliana
  misc_feature (1)..(1775): Ceres Seq. ID no. 12670510
  misc_feature (1)..(1775): Ortholog of  Ceres SEQ ID NO 14301475 as cited in SEQ ID NO 62936
  misc_feature (1)..(1775): Ortholog of  Ceres SEQ ID NO 13596935 as cited in SEQ ID NO 63031
  misc_feature (1)..(1775): Ortholog of  Ceres SEQ ID NO 15179123 as cited in SEQ ID NO 0
ctcaatcacaacactcgccactgtttcgaatagatggcttctatttcaaccccttttccgatttctctccacccaaaaaccgtacgatcaaagccgttgaaattccgagttttgacccgtccgatcaaagcttccgggtcagaaactcctgatctaaccgtagcgacacgaaccggatccaaagatctcccgatccgaaacataccgggaaactacggtttaccaatcgtaggaccaatcaaagaccgttgggattacttttacgaccaaggagctgaagagttcttcaaatcacgaatccgtaaatacaactccacggtgtacagagtcaacatgccaccgggagcttttatcgccgagaatccacaagtcgtggctttactcgacggtaaaagcttcccggttttattcgatgtcgataaagtcgaaaagaaagatcttttcaccggtacttacatgccgtcaacggaactaaccggaggctaccgtatcctctcgtacctcgatccatcggagcctaaacacgaaaagctcaaaaatctccttttcttcctcctcaagtcatctcgaaaccggatcttccctgagtttcaagctacttactccgagcttttcgattctttggagaaagagctttcccttaaagggaaagcggatttcggcggttccagcgacggaaccgcctttaatttcttggctcgagctttctacgggacgaatcccgcagatacaaagctcaaagccgacgctccgggtttgatcactaaatgggttttattcaatctccatccattactctctattggtttaccgagagttatagaagaacctctcatccatacatttagtctaccaccggcgttagtcaaatctgattaccagagactctacgagtttttcttagaatccgccggtgagattctcgttgaagccgataaattgggtatctcacgagaagaagctactcacaatcttctcttcgccacgtgcttcaacacgtggggtgggatgaagattttgtttccgaatatggttaaacgtatcgggcgggcgggtcatcaagttcataaccgattagcggaggagattagatctgtgattaaatccaacggcggagaactcacgatgggagcgattgagaaaatggagttaaccaaatcagtggtttacgaatgtctccggtttgaaccaccggttacggctcaatacggtagagcgaagaaggatctggttatcgaaagccacgacgcggcgtttaaagtcaaagccggtgaaatgctttacggttatcaaccgttggcgacgagagatccgaagatttttgatcgggcggatgagtttgtgccggagagattcgtcggagaagaaggagagaagcttttgaggcatgtgttgtggtcgaatggaccggagacggagactccgacggtggggaataaacaatgcgccggtaaggattttgttgttttggtggcgaggttgtttgtgattgagattttccggcgatatgattcgtttgatattgaggttggtacgtcgccgttaggaagctccgttaatttctcgtcgttaaggaaagctagcttttaggagccaagggtaaatttgtaattgtatatgttcgcacctgtgtagtccatctgttttcttgttccagtttcgtgaattttgagaaaatgttgtataatctgttgctgctctacatgttcgtttttttgtcataatattaaagttcaagctggtaataagtatttacaaatctgtgagataatttc

SEQ ID NO: 83499 - protein, 518 aa, Arabidopsis thaliana
  peptide (1)..(518): Ceres Seq. ID no. 12670511
MASISTPFPISLHPKTVRSKPLKFRVLTRPIKASGSETPDLTVATRTGSKDLPIRNIPGNYGLPIVGPIKDRWDYFYDQGAEEFFKSRIRKYNSTVYRVNMPPGAFIAENPQVVALLDGKSFPVLFDVDKVEKKDLFTGTYMPSTELTGGYRILSYLDPSEPKHEKLKNLLFFLLKSSRNRIFPEFQATYSELFDSLEKELSLKGKADFGGSSDGTAFNFLARAFYGTNPADTKLKADAPGLITKWVLFNLHPLLSIGLPRVIEEPLIHTFSLPPALVKSDYQRLYEFFLESAGEILVEADKLGISREEATHNLLFATCFNTWGGMKILFPNMVKRIGRAGHQVHNRLAEEIRSVIKSNGGELTMGAIEKMELTKSVVYECLRFEPPVTAQYGRAKKDLVIESHDAAFKVKAGEMLYGYQPLATRDPKIFDRADEFVPERFVGEEGEKLLRHVLWSNGPETETPTVGNKQCAGKDFVVLVARLFVIEIFRRYDSFDIEVGTSPLGSSVNFSSLRKASF

SEQ ID NO: 83500 - protein, 418 aa, Arabidopsis thaliana
  peptide (1)..(418): Ceres Seq. ID no. 12670512
MPPGAFIAENPQVVALLDGKSFPVLFDVDKVEKKDLFTGTYMPSTELTGGYRILSYLDPSEPKHEKLKNLLFFLLKSSRNRIFPEFQATYSELFDSLEKELSLKGKADFGGSSDGTAFNFLARAFYGTNPADTKLKADAPGLITKWVLFNLHPLLSIGLPRVIEEPLIHTFSLPPALVKSDYQRLYEFFLESAGEILVEADKLGISREEATHNLLFATCFNTWGGMKILFPNMVKRIGRAGHQVHNRLAEEIRSVIKSNGGELTMGAIEKMELTKSVVYECLRFEPPVTAQYGRAKKDLVIESHDAAFKVKAGEMLYGYQPLATRDPKIFDRADEFVPERFVGEEGEKLLRHVLWSNGPETETPTVGNKQCAGKDFVVLVARLFVIEIFRRYDSFDIEVGTSPLGSSVNFSSLRKASF

SEQ ID NO: 83501 - protein, 377 aa, Arabidopsis thaliana
  peptide (1)..(377): Ceres Seq. ID no. 12670513
MPSTELTGGYRILSYLDPSEPKHEKLKNLLFFLLKSSRNRIFPEFQATYSELFDSLEKELSLKGKADFGGSSDGTAFNFLARAFYGTNPADTKLKADAPGLITKWVLFNLHPLLSIGLPRVIEEPLIHTFSLPPALVKSDYQRLYEFFLESAGEILVEADKLGISREEATHNLLFATCFNTWGGMKILFPNMVKRIGRAGHQVHNRLAEEIRSVIKSNGGELTMGAIEKMELTKSVVYECLRFEPPVTAQYGRAKKDLVIESHDAAFKVKAGEMLYGYQPLATRDPKIFDRADEFVPERFVGEEGEKLLRHVLWSNGPETETPTVGNKQCAGKDFVVLVARLFVIEIFRRYDSFDIEVGTSPLGSSVNFSSLRKASF

SEQ ID NO: 83502 - DNA, 2038 bp, Arabidopsis thaliana
  misc_feature (1)..(2038): Ceres Seq. ID no. 12670548
  misc_feature (1)..(2038): Ortholog of  Ceres SEQ ID NO 13657008 as cited in SEQ ID NO 69164
atgaagaagctctgaatctaaaactcctctctccgaccccaaatccagaaattcaagcgaggaatagaatctcccactagagaaaagcaatcccagaaaccctaagttcttcacgtttcgttcttttgcttgttgatcaagcaggatatctccgagatttgtgagtctcttgctacttcttcctggagaacgattcagggtttgatgtgataagaatagtcatcgaggaagatagatttggggatttttttttatttgtagattcatgaaacaaattcgtcgatggcagaggattttgatcctcgctctgctatcgatatctgtattcgctccgcttattttcgtatcgaatcggcttaagagcatcactcccgttggtcgtagagaatttattgaagagttatccaaaattagattcacgacaaatgaccttagacttagcgctattgaacatgaggatggagaaggcttgaaggggccaaggctcattctcttcaaggatggggagtttaattcgtctgctgaaagtgatggtggtaatacttacaaaaacagggaagaacaagtgattgtttcacagaagatgacagttagctctgatgaaaagggtcaaattctaccaacagtcaaccaacttgctaataaaacggatttcaagccccctttatctaagggtgaaaagaacacaagggttcagcccgacagagcaacagatgtgaaaacgaaggagatcagagacaaaattattcaagctaaagcctacctgaatttcgctccacctggaagtaactctcaagttgtgaaggagttgagaggtcggctgaaagagctggaacggtctgttggtgatgcaacaaaggacaaggacttatcaaagggcgctctccgcagggtgaagcccatggaaaatgtgttatataaggctagtcgtgtctttaacaattgccctgccatcgctaccaaactccgtgccatgaattataacacagaagaacaagttcaggcgcagaaaaatcaagcagcgtatctaatgcagcttgcagcaaggaccaccccaaaagggcttcactgtctctcaatgcggctgacatcagaatacttttcactggatcctgaaaaaaggcagatgcctaaccagcaaaattattttgacgctaatttcaatcattatgttgtcttctctgacaatgttttggcttcttcagtcgttgttaactctacgatatcttcatcaaaggagccagaaagaatagtcttccatgtcgtgactgattcacttaattacccagcaatctcaatgtggtttctgctaaacattcaaagtaaagctactatccaaatcctaaacattgatgatatggatgtcctgcctagagattatgatcaattactgatgaagcaaaactctaatgacccaagattcatttctacactcaatcacgcacgcttctatctcccggatatattcccgggtttgaacaagatggtactcttggaccatgatgtagttgttcaaagagatttaagtagactgtggagcattgatatgaaaggaaaggtggttggagctgtagagacttgtcttgaaggtgaatcttcatttcgatcaatgagcacatttattaatttctcagacacatgggtcgctgggaaatttagtcctagagcttgcacatgggctttcgggatgaatctaattgatctcgaagaatggagaatacggaagttgacttctacatacataaaatacttcaacctgggaacaaagagaccattgtggaaagctgggagcttaccaataggttggttgactttctataggcaaacattagcattggacaagagatggcatgtgatggggttaggtcgcgaatcaggagtcaaagcggttgacatcgaacaagcggcagttatacactacgatggggtcatgaagccgtggttggacattggaaaagagaattacaaacgttactggaacatacacgtcccttaccatcacacctacttgcaacagtgcaatcttcaagcttgatac

SEQ ID NO: 83503 - protein, 589 aa, Arabidopsis thaliana
  peptide (1)..(589): Ceres Seq. ID no. 12670549
MKQIRRWQRILILALLSISVFAPLIFVSNRLKSITPVGRREFIEELSKIRFTTNDLRLSAIEHEDGEGLKGPRLILFKDGEFNSSAESDGGNTYKNREEQVIVSQKMTVSSDEKGQILPTVNQLANKTDFKPPLSKGEKNTRVQPDRATDVKTKEIRDKIIQAKAYLNFAPPGSNSQVVKELRGRLKELERSVGDATKDKDLSKGALRRVKPMENVLYKASRVFNNCPAIATKLRAMNYNTEEQVQAQKNQAAYLMQLAARTTPKGLHCLSMRLTSEYFSLDPEKRQMPNQQNYFDANFNHYVVFSDNVLASSVVVNSTISSSKEPERIVFHVVTDSLNYPAISMWFLLNIQSKATIQILNIDDMDVLPRDYDQLLMKQNSNDPRFISTLNHARFYLPDIFPGLNKMVLLDHDVVVQRDLSRLWSIDMKGKVVGAVETCLEGESSFRSMSTFINFSDTWVAGKFSPRACTWAFGMNLIDLEEWRIRKLTSTYIKYFNLGTKRPLWKAGSLPIGWLTFYRQTLALDKRWHVMGLGRESGVKAVDIEQAAVIHYDGVMKPWLDIGKENYKRYWNIHVPYHHTYLQQCNLQA

SEQ ID NO: 83504 - protein, 483 aa, Arabidopsis thaliana
  peptide (1)..(483): Ceres Seq. ID no. 12670550
MTVSSDEKGQILPTVNQLANKTDFKPPLSKGEKNTRVQPDRATDVKTKEIRDKIIQAKAYLNFAPPGSNSQVVKELRGRLKELERSVGDATKDKDLSKGALRRVKPMENVLYKASRVFNNCPAIATKLRAMNYNTEEQVQAQKNQAAYLMQLAARTTPKGLHCLSMRLTSEYFSLDPEKRQMPNQQNYFDANFNHYVVFSDNVLASSVVVNSTISSSKEPERIVFHVVTDSLNYPAISMWFLLNIQSKATIQILNIDDMDVLPRDYDQLLMKQNSNDPRFISTLNHARFYLPDIFPGLNKMVLLDHDVVVQRDLSRLWSIDMKGKVVGAVETCLEGESSFRSMSTFINFSDTWVAGKFSPRACTWAFGMNLIDLEEWRIRKLTSTYIKYFNLGTKRPLWKAGSLPIGWLTFYRQTLALDKRWHVMGLGRESGVKAVDIEQAAVIHYDGVMKPWLDIGKENYKRYWNIHVPYHHTYLQQCNLQA

SEQ ID NO: 83505 - protein, 377 aa, Arabidopsis thaliana
  peptide (1)..(377): Ceres Seq. ID no. 12670551
MENVLYKASRVFNNCPAIATKLRAMNYNTEEQVQAQKNQAAYLMQLAARTTPKGLHCLSMRLTSEYFSLDPEKRQMPNQQNYFDANFNHYVVFSDNVLASSVVVNSTISSSKEPERIVFHVVTDSLNYPAISMWFLLNIQSKATIQILNIDDMDVLPRDYDQLLMKQNSNDPRFISTLNHARFYLPDIFPGLNKMVLLDHDVVVQRDLSRLWSIDMKGKVVGAVETCLEGESSFRSMSTFINFSDTWVAGKFSPRACTWAFGMNLIDLEEWRIRKLTSTYIKYFNLGTKRPLWKAGSLPIGWLTFYRQTLALDKRWHVMGLGRESGVKAVDIEQAAVIHYDGVMKPWLDIGKENYKRYWNIHVPYHHTYLQQCNLQA

SEQ ID NO: 83506 - DNA, 1638 bp, Arabidopsis thaliana
  misc_feature (1)..(1638): Ceres Seq. ID no. 12670559
  misc_feature (1)..(1638): Ortholog of  Ceres SEQ ID NO 13502952 as cited in SEQ ID NO 62271
  misc_feature (1)..(1638): Ortholog of  Ceres SEQ ID NO 13502973 as cited in SEQ ID NO 68052
  misc_feature (1)..(1638): Ortholog of  Ceres SEQ ID NO 13596000 as cited in SEQ ID NO 68188
  misc_feature (1)..(1638): Ortholog of  Ceres SEQ ID NO 15179420 as cited in SEQ ID NO 0
ttctaggccaaaactatctccacgattctaacaaacaaaaattacagaaatgtcaatgtcatcgtcctcctttatctctctcactttcttcttccttcttctcgtttcttcatcgtcatcttccgatgacatctctgagctattcgacgactggtgccagaaacatggcaaaacgtacggttcagaagaagagaggcaacagaggattcaaatctttaaagataatcacgacttcgttacgcaacacaatctcatcactaacgctacttactctctctctctcaatgctttcgcggatctgactcaccacgagttcaaggcttctcgtcttggtctctctgtttccgctccgtcggtgataatggctagtaagggacagagtctcggtggtagcgtaaaggttccagattctgttgattggagaaagaagggagctgttactaatgtcaaagatcaaggaagctgcggggcatgttggtcgttctcggcgactggagctatggagggaattaaccagatagtaacaggagatctcatcagcctctctgagcaggaactgattgattgtgacaagtcctacaatgctggctgtaatggtggtctcatggactatgcttttgaatttgtcattaaaaaccatggaatagacacagagaaagactatccttatcaagaacgtgatggcacctgtaagaaggataagttgaaacaaaaggttgtgacaattgatagctatgctggtgtaaaatcaaatgatgagaaagcgttaatggaggctgtagcggctcagccagttagtgttggcatctgtggaagcgagagagcgtttcagctatattctagtggaatattctctggcccgtgttcgacatcattggatcatgctgtgctcatagtaggatatggttcacagaatggtgttgattattggattgtgaaaaactcatggggaaaaagttggggaatggatgggtttatgcacatgcagcgtaacactgaaaattcagacggcgtttgcggaatcaacatgcttgcttcatatcccatcaagacacatccaaacccgcctccaccgtcccctcctggccctacaaaatgcaaccttttcacgtattgttcatctggagagacttgttgctgtgcaagagaattgtttggtttatgcttctcatggaaatgctgcgagatagaatccgctgtgtgttgcaaggatggtcgtcattgttgtccacatgattaccctgtttgtgatacaaccagaagtctctgccttaagaaaactggtaatttcactgcgatcaagcccttctggaagaagaattcttcaaaacaacttggccgatttgaggaatgggttatgtgagagaagttttacgcacatgttacagaaaattcaaactcatccatacaaaaacctcgtagattcgattatctgcgaggggattatttgtagctgttattgagatagatatatacgatatcatcacggatgtatttttagtctctcatttggatgtatacaacttctgagtcaataaaggacacttgcaggacaagcacagtatttgtatctgcaagacacataaagtaataagagtatcatctatgtatattatagagagactaagcttcactgtt

SEQ ID NO: 83507 - protein, 437 aa, Arabidopsis thaliana
  peptide (1)..(437): Ceres Seq. ID no. 12670560
MSMSSSSFISLTFFFLLLVSSSSSSDDISELFDDWCQKHGKTYGSEEERQQRIQIFKDNHDFVTQHNLITNATYSLSLNAFADLTHHEFKASRLGLSVSAPSVIMASKGQSLGGSVKVPDSVDWRKKGAVTNVKDQGSCGACWSFSATGAMEGINQIVTGDLISLSEQELIDCDKSYNAGCNGGLMDYAFEFVIKNHGIDTEKDYPYQERDGTCKKDKLKQKVVTIDSYAGVKSNDEKALMEAVAAQPVSVGICGSERAFQLYSSGIFSGPCSTSLDHAVLIVGYGSQNGVDYWIVKNSWGKSWGMDGFMHMQRNTENSDGVCGINMLASYPIKTHPNPPPPSPPGPTKCNLFTYCSSGETCCCARELFGLCFSWKCCEIESAVCCKDGRHCCPHDYPVCDTTRSLCLKKTGNFTAIKPFWKKNSSKQLGRFEEWVM

SEQ ID NO: 83508 - protein, 435 aa, Arabidopsis thaliana
  peptide (1)..(435): Ceres Seq. ID no. 12670561
MSSSSFISLTFFFLLLVSSSSSSDDISELFDDWCQKHGKTYGSEEERQQRIQIFKDNHDFVTQHNLITNATYSLSLNAFADLTHHEFKASRLGLSVSAPSVIMASKGQSLGGSVKVPDSVDWRKKGAVTNVKDQGSCGACWSFSATGAMEGINQIVTGDLISLSEQELIDCDKSYNAGCNGGLMDYAFEFVIKNHGIDTEKDYPYQERDGTCKKDKLKQKVVTIDSYAGVKSNDEKALMEAVAAQPVSVGICGSERAFQLYSSGIFSGPCSTSLDHAVLIVGYGSQNGVDYWIVKNSWGKSWGMDGFMHMQRNTENSDGVCGINMLASYPIKTHPNPPPPSPPGPTKCNLFTYCSSGETCCCARELFGLCFSWKCCEIESAVCCKDGRHCCPHDYPVCDTTRSLCLKKTGNFTAIKPFWKKNSSKQLGRFEEWVM

SEQ ID NO: 83509 - protein, 333 aa, Arabidopsis thaliana
  peptide (1)..(333): Ceres Seq. ID no. 12670562
MASKGQSLGGSVKVPDSVDWRKKGAVTNVKDQGSCGACWSFSATGAMEGINQIVTGDLISLSEQELIDCDKSYNAGCNGGLMDYAFEFVIKNHGIDTEKDYPYQERDGTCKKDKLKQKVVTIDSYAGVKSNDEKALMEAVAAQPVSVGICGSERAFQLYSSGIFSGPCSTSLDHAVLIVGYGSQNGVDYWIVKNSWGKSWGMDGFMHMQRNTENSDGVCGINMLASYPIKTHPNPPPPSPPGPTKCNLFTYCSSGETCCCARELFGLCFSWKCCEIESAVCCKDGRHCCPHDYPVCDTTRSLCLKKTGNFTAIKPFWKKNSSKQLGRFEEWVM

SEQ ID NO: 83510 - DNA, 1797 bp, Arabidopsis thaliana
  misc_feature (1)..(1797): Ceres Seq. ID no. 12670563
  misc_feature (1)..(1797): Ortholog of  Ceres SEQ ID NO 13657677 as cited in SEQ ID NO 66119
  misc_feature (1)..(1797): Ortholog of  Ceres SEQ ID NO 15226685 as cited in SEQ ID NO 0
atggatttgatggtgtccacaagcagtgctcaagaagggttttgcttgattcaacaatttcatcgcgaatataaacgaggtaataagcttgacgtctcatgtcgtacttctggtagtattagttctaaaatccctcttgggtcacgaaaaaggaatcgacttgttctggtttctgcggcttctaaggttgagagttcaggtcttaatggtagagctcaaaagttcgaaactttgtcctctgggtatagcaatagtaacggaaatggtcattatagctctgtgaattcgtcttttgcgttggaagatgtcgagagtaataaccatttgcgtcagatggttagaaccggtgaattggaggaagggtttaagtttctagagaacatggtttatcacggtaatgttcctgatatcattccgtgcacgacattgattcgcggattctgtaggttgggtaagacgaggaaagctgcaaagatcttggagattcttgaaggctctggtgctgttcctgatgttataacttacaatgttatgattagtgggtattgcaaagctggggagatcaataacgcgttatctgttcttgatagaatgagtgtttcgccggatgttgtcacttataataccatcttgcgttctctttgcgatagtgggaaacttaagcaagccatggaggttcttgataggatgcttcagagagactgttatccagatgtgattacttacactatattgattgaagctacttgcagagatagtggtgtgggacatgcgatgaagcttctcgatgaaatgagggatagaggatgtactcctgatgttgtgacttacaacgttcttgtgaatggtatttgtaaagaggggagattggatgaggccattaagtttttgaatgacatgccgtcttctggatgtcaaccaaatgttattacacataacataattctgcggagtatgtgtagtactgggagatggatggatgcagagaagcttcttgctgatatgcttcgtaaaggcttttcgccaagcgttgtcactttcaatatcttgattaatttcttgtgtagaaaaggtttgcttggccgagcgattgacatattggagaagatgcctcaacatggatgtcagccgaattctttgagttacaacccgctgcttcacgggttttgcaaggagaaaaagatggatagggctatcgagtatttggagagaatggtttctcgtggttgttatccagacattgtcacctacaacactatgctaacagctttgtgcaaagatgggaaagttgaagatgcggttgagatacttaatcaacttagtagcaagggatgttctcctgttctaatcacttataatactgtcattgatgggcttgcaaaagctggtaaaactggcaaagcgataaaactgctagatgagatgcgtgcgaaagatttaaagcctgacactatcacctattcctctcttgttggaggtttaagcagggaaggaaaagtagacgaagccattaagtttttccatgagtttgagcggatgggcattaggccaaatgcagtcacctttaattctatcatgcttggactctgtaagagtcggcaaacagatcgtgccatcgatttcttggtttttatgatcaacagagggtgtaaaccgaatgaaacatcatacacgattctgatagaaggcttagcttatgaaggtatggcaaaggaagctttggagctgcttaatgagctttgtaacaagggactcatgaagaaaagctctgctgagcaagttgcagggaagatgtag

SEQ ID NO: 83511 - protein, 598 aa, Arabidopsis thaliana
  peptide (1)..(598): Ceres Seq. ID no. 12670564
MDLMVSTSSAQEGFCLIQQFHREYKRGNKLDVSCRTSGSISSKIPLGSRKRNRLVLVSAASKVESSGLNGRAQKFETLSSGYSNSNGNGHYSSVNSSFALEDVESNNHLRQMVRTGELEEGFKFLENMVYHGNVPDIIPCTTLIRGFCRLGKTRKAAKILEILEGSGAVPDVITYNVMISGYCKAGEINNALSVLDRMSVSPDVVTYNTILRSLCDSGKLKQAMEVLDRMLQRDCYPDVITYTILIEATCRDSGVGHAMKLLDEMRDRGCTPDVVTYNVLVNGICKEGRLDEAIKFLNDMPSSGCQPNVITHNIILRSMCSTGRWMDAEKLLADMLRKGFSPSVVTFNILINFLCRKGLLGRAIDILEKMPQHGCQPNSLSYNPLLHGFCKEKKMDRAIEYLERMVSRGCYPDIVTYNTMLTALCKDGKVEDAVEILNQLSSKGCSPVLITYNTVIDGLAKAGKTGKAIKLLDEMRAKDLKPDTITYSSLVGGLSREGKVDEAIKFFHEFERMGIRPNAVTFNSIMLGLCKSRQTDRAIDFLVFMINRGCKPNETSYTILIEGLAYEGMAKEALELLNELCNKGLMKKSSAEQVAGKM

SEQ ID NO: 83512 - protein, 595 aa, Arabidopsis thaliana
  peptide (1)..(595): Ceres Seq. ID no. 12670565
MVSTSSAQEGFCLIQQFHREYKRGNKLDVSCRTSGSISSKIPLGSRKRNRLVLVSAASKVESSGLNGRAQKFETLSSGYSNSNGNGHYSSVNSSFALEDVESNNHLRQMVRTGELEEGFKFLENMVYHGNVPDIIPCTTLIRGFCRLGKTRKAAKILEILEGSGAVPDVITYNVMISGYCKAGEINNALSVLDRMSVSPDVVTYNTILRSLCDSGKLKQAMEVLDRMLQRDCYPDVITYTILIEATCRDSGVGHAMKLLDEMRDRGCTPDVVTYNVLVNGICKEGRLDEAIKFLNDMPSSGCQPNVITHNIILRSMCSTGRWMDAEKLLADMLRKGFSPSVVTFNILINFLCRKGLLGRAIDILEKMPQHGCQPNSLSYNPLLHGFCKEKKMDRAIEYLERMVSRGCYPDIVTYNTMLTALCKDGKVEDAVEILNQLSSKGCSPVLITYNTVIDGLAKAGKTGKAIKLLDEMRAKDLKPDTITYSSLVGGLSREGKVDEAIKFFHEFERMGIRPNAVTFNSIMLGLCKSRQTDRAIDFLVFMINRGCKPNETSYTILIEGLAYEGMAKEALELLNELCNKGLMKKSSAEQVAGKM

SEQ ID NO: 83513 - protein, 487 aa, Arabidopsis thaliana
  peptide (1)..(487): Ceres Seq. ID no. 12670566
MVRTGELEEGFKFLENMVYHGNVPDIIPCTTLIRGFCRLGKTRKAAKILEILEGSGAVPDVITYNVMISGYCKAGEINNALSVLDRMSVSPDVVTYNTILRSLCDSGKLKQAMEVLDRMLQRDCYPDVITYTILIEATCRDSGVGHAMKLLDEMRDRGCTPDVVTYNVLVNGICKEGRLDEAIKFLNDMPSSGCQPNVITHNIILRSMCSTGRWMDAEKLLADMLRKGFSPSVVTFNILINFLCRKGLLGRAIDILEKMPQHGCQPNSLSYNPLLHGFCKEKKMDRAIEYLERMVSRGCYPDIVTYNTMLTALCKDGKVEDAVEILNQLSSKGCSPVLITYNTVIDGLAKAGKTGKAIKLLDEMRAKDLKPDTITYSSLVGGLSREGKVDEAIKFFHEFERMGIRPNAVTFNSIMLGLCKSRQTDRAIDFLVFMINRGCKPNETSYTILIEGLAYEGMAKEALELLNELCNKGLMKKSSAEQVAGKM

SEQ ID NO: 83514 - DNA, 750 bp, Arabidopsis thaliana
  misc_feature (1)..(750): Ceres Seq. ID no. 12670597
  misc_feature (1)..(750): Ortholog of  Ceres SEQ ID NO 14311243 as cited in SEQ ID NO 20434
  misc_feature (1)..(750): Ortholog of  Ceres SEQ ID NO 12609528 as cited in SEQ ID NO 51902
  misc_feature (1)..(750): Ortholog of  Ceres SEQ ID NO 12625248 as cited in SEQ ID NO 68797
atgggaaatcagaagctcaaatggacggcggaggaagaggaggcgttactcgccggagttaggaagcatggccctggaaagtggaagaatattctccgcgatcctgaattagctgagcagctctctagtcgctctaacatcgacctcaaggataaatggcgtaatttaagtgttgctcctggtattcaaggctctaaggataagatacggacaccaaaaatcaaagctgctgcttttcatctggctgccgctgctgctgccgctattgtaactcctactcatagtggtcactcttctccagttgctactcttccccgaagtggatcttctgatttgagcattgatgatagttttaacattgtagttgatccaaagaatgctcccaggtatgatggaatgatatttgaagctctttcaaacttgacggatgctaatggatctgatgtcagcgcaattttcaacttcattgagcagcaacgacaagaagtgccaccaaatttcaggaggatgcttagttcaagattgaggaggcttgcagctcagggaaagcttgaaaagcagattgttgaagcttcaataacagcagcttataagctcgtagaagtagagaacaaattagatgtgtcgaaaggagctgcagaagagatagagagactgatgaaactggcagaagaggctgatgagatgctagtgatagcgagagagatgcacgaagaatgtagtcagggaaagattatgtacttgaattga

SEQ ID NO: 83515 - protein, 249 aa, Arabidopsis thaliana
  peptide (1)..(249): Ceres Seq. ID no. 12670598
MGNQKLKWTAEEEEALLAGVRKHGPGKWKNILRDPELAEQLSSRSNIDLKDKWRNLSVAPGIQGSKDKIRTPKIKAAAFHLAAAAAAAIVTPTHSGHSSPVATLPRSGSSDLSIDDSFNIVVDPKNAPRYDGMIFEALSNLTDANGSDVSAIFNFIEQQRQEVPPNFRRMLSSRLRRLAAQGKLEKQIVEASITAAYKLVEVENKLDVSKGAAEEIERLMKLAEEADEMLVIAREMHEECSQGKIMYLN

SEQ ID NO: 83516 - DNA, 2862 bp, Arabidopsis thaliana
  misc_feature (1)..(2862): Ceres Seq. ID no. 12670650
  misc_feature (1)..(2862): Ortholog of  Ceres SEQ ID NO 13600301 as cited in SEQ ID NO 1010
atgggttgcggaggatccaaagtagatgatcaaccacttgtgattctctgtagagagaggaaacaactcatcaaagctgcttctcatcatcgttgtgctttagccgctgctcatctctcttactttcaatctctctgtgacgttggtgattccattaaacgtttcgtcgacgaagaactcgtcctcgttgggacttcttcttcttcttcccctgattctcctgttcttactcttccttccgacgaagggaagccacataaacacaagatctcctcttcttcaacctctgtttcgcattcggttattgaagacgacgacgaaggagaaggagaagatcagcatttgcatttatcatctggatccgagttagattctggatcggaatctggatctgatgattcattaggtcatatccatattgaaactagccctaaagtgaaagagaaagaaacacgcttaccggaaaattaccagcccggttatcaatccggttatcaatccggttatcagcccggttttacgccgggatatcaatatcaaccgggttactcggctgggtatcagtatccggttgaaggatggggattcatgggagagaatccgaatttaaacccgtacccgaatccgaaccagaatccgggaatgtactttatgaagaagtctgtgcaaccgtcacgaccggtagtgtttcagccggagaatcatagagtggagaatgggcaatggttgccggagaatggagttgggtattctaattattacccaggaaacgctaatactgggtattttggttacccggagcaacgtagagagccaccgtctccggtgaggccgactccagcacctccgtctccgcctaggatttcaagttgggattttttgaatgtgtttgatacttatgattataatagagctggtggtggtgaaagttccggtgccggagctgggttttttccagccatgggtggaggtaagtcgaattcaagtagtcctgattcgagggaagtgagagagagggaagggattcctgagttggaagaagaaacagagcaagaagttatctttgggcagacgtttaaacatatgaagagaaaaggcattgagaaggtgaaagaacaacacagacaggagaatgagattcacgagagaaagatcaagaaacgaggagattcaggtgaaggaacttcaagggcagtgcctgtggtagaaagggctacggagagctcttttggttcaaagactgtgtcgtcgttttcgagcagtgaagaagagtcggagtttcatcatgttaatgatggagaagggaagagtagcagtaatgatttaggtgggcatgagacggttgctactaagagtgttggagaagtagaagaagaatatgtgaggaagaaaggagttagctttgagttggatgaaaatgtaactacttcttttgatgttgaatcttccaagattagtagtctatctgcattgtcggttcatgccactagagatcttagagaagttgtgaaggagatcaagagtgagtttgaggttgcttcttcacatgggaaggaagtggctgtgttgcttgaggttagcaagttgccttatcagcagaaaagttcggggctcaaagtcatcttctcccggatcatgtatctggttgcaccatccacagtttcatcgcgctctcagcctcaaccgtcaatacgtttaacatctaggatattgaaaattgcaaaatcatacaatggtcaggatgttagagaaggcttaactgggaacctctcagcaaccttggagcaactctatgcttgggaaaagaaactgtacaaagaagtcaaggatgaagagaagcttcgtgttgtctatgaagaaaagtgcagaacactgaaaaaactggatagtcttggtgcggaatctagcaagattgatactactcgagcagccattagaaagctgctaaccaaactcgacgtctgtataagatctgttgattccatttccagcaggatacataaactgagagacgaagaattacagcctcaactaacacaattgattcacgggttgataagaatgtggagatcaatgctcaagtgccaccagaagcagttccaggcaatcatggagagcaaggttcgatctctcagggcaaacaccggcttacaaagagactccggtttgaaagctattcttgatttggagatggagctacgagaatggtgcattagcttcaacgactgggtcaatactcagaaatcatacgtggagtctctaaatggatggctctcaagatgtcttcactatgaacctgaatcaacggaggacggaattgcccctttctctcctagccgtgttggagctccacaggttttcgttatatgcaaagattggcaagaagcaatggcgagaatctctggagagaacgtttcaaacgcaatgcaaggctttgcctcgagtctgcatgaactatgggagagacaagatgaggagcaaaggcagagagtgaaagcagagtatgtgtcacacgatttcgagaaacggttgaatgatcttcggatggagagggcgagagtgagaatgagaaacgatcagctacaagacggtgcatcagagaaaagcgtggtcttgtccgagagcgggatctcggcgttggatgatttgaaagtggacttggattcaatgaggaagaagctagaagaagaaagagcaagacacaaggaaacaattaaacttgtgaacaatgcagcttcaagcagcttacaagctggtttagtaccaatctttgaggctttggggaatttcacttcacaagttgtgaaagctcatgaagatgttaggtttcaacaacaacaacagcctgagtctgaagattga

SEQ ID NO: 83517 - protein, 953 aa, Arabidopsis thaliana
  peptide (1)..(953): Ceres Seq. ID no. 12670651
MGCGGSKVDDQPLVILCRERKQLIKAASHHRCALAAAHLSYFQSLCDVGDSIKRFVDEELVLVGTSSSSSPDSPVLTLPSDEGKPHKHKISSSSTSVSHSVIEDDDEGEGEDQHLHLSSGSELDSGSESGSDDSLGHIHIETSPKVKEKETRLPENYQPGYQSGYQSGYQPGFTPGYQYQPGYSAGYQYPVEGWGFMGENPNLNPYPNPNQNPGMYFMKKSVQPSRPVVFQPENHRVENGQWLPENGVGYSNYYPGNANTGYFGYPEQRREPPSPVRPTPAPPSPPRISSWDFLNVFDTYDYNRAGGGESSGAGAGFFPAMGGGKSNSSSPDSREVREREGIPELEEETEQEVIFGQTFKHMKRKGIEKVKEQHRQENEIHERKIKKRGDSGEGTSRAVPVVERATESSFGSKTVSSFSSSEEESEFHHVNDGEGKSSSNDLGGHETVATKSVGEVEEEYVRKKGVSFELDENVTTSFDVESSKISSLSALSVHATRDLREVVKEIKSEFEVASSHGKEVAVLLEVSKLPYQQKSSGLKVIFSRIMYLVAPSTVSSRSQPQPSIRLTSRILKIAKSYNGQDVREGLTGNLSATLEQLYAWEKKLYKEVKDEEKLRVVYEEKCRTLKKLDSLGAESSKIDTTRAAIRKLLTKLDVCIRSVDSISSRIHKLRDEELQPQLTQLIHGLIRMWRSMLKCHQKQFQAIMESKVRSLRANTGLQRDSGLKAILDLEMELREWCISFNDWVNTQKSYVESLNGWLSRCLHYEPESTEDGIAPFSPSRVGAPQVFVICKDWQEAMARISGENVSNAMQGFASSLHELWERQDEEQRQRVKAEYVSHDFEKRLNDLRMERARVRMRNDQLQDGASEKSVVLSESGISALDDLKVDLDSMRKKLEEERARHKETIKLVNNAASSSLQAGLVPIFEALGNFTSQVVKAHEDVRFQQQQQPESED

SEQ ID NO: 83518 - protein, 757 aa, Arabidopsis thaliana
  peptide (1)..(757): Ceres Seq. ID no. 12670652
MGENPNLNPYPNPNQNPGMYFMKKSVQPSRPVVFQPENHRVENGQWLPENGVGYSNYYPGNANTGYFGYPEQRREPPSPVRPTPAPPSPPRISSWDFLNVFDTYDYNRAGGGESSGAGAGFFPAMGGGKSNSSSPDSREVREREGIPELEEETEQEVIFGQTFKHMKRKGIEKVKEQHRQENEIHERKIKKRGDSGEGTSRAVPVVERATESSFGSKTVSSFSSSEEESEFHHVNDGEGKSSSNDLGGHETVATKSVGEVEEEYVRKKGVSFELDENVTTSFDVESSKISSLSALSVHATRDLREVVKEIKSEFEVASSHGKEVAVLLEVSKLPYQQKSSGLKVIFSRIMYLVAPSTVSSRSQPQPSIRLTSRILKIAKSYNGQDVREGLTGNLSATLEQLYAWEKKLYKEVKDEEKLRVVYEEKCRTLKKLDSLGAESSKIDTTRAAIRKLLTKLDVCIRSVDSISSRIHKLRDEELQPQLTQLIHGLIRMWRSMLKCHQKQFQAIMESKVRSLRANTGLQRDSGLKAILDLEMELREWCISFNDWVNTQKSYVESLNGWLSRCLHYEPESTEDGIAPFSPSRVGAPQVFVICKDWQEAMARISGENVSNAMQGFASSLHELWERQDEEQRQRVKAEYVSHDFEKRLNDLRMERARVRMRNDQLQDGASEKSVVLSESGISALDDLKVDLDSMRKKLEEERARHKETIKLVNNAASSSLQAGLVPIFEALGNFTSQVVKAHEDVRFQQQQQPESED

SEQ ID NO: 83519 - protein, 739 aa, Arabidopsis thaliana
  peptide (1)..(739): Ceres Seq. ID no. 12670653
MYFMKKSVQPSRPVVFQPENHRVENGQWLPENGVGYSNYYPGNANTGYFGYPEQRREPPSPVRPTPAPPSPPRISSWDFLNVFDTYDYNRAGGGESSGAGAGFFPAMGGGKSNSSSPDSREVREREGIPELEEETEQEVIFGQTFKHMKRKGIEKVKEQHRQENEIHERKIKKRGDSGEGTSRAVPVVERATESSFGSKTVSSFSSSEEESEFHHVNDGEGKSSSNDLGGHETVATKSVGEVEEEYVRKKGVSFELDENVTTSFDVESSKISSLSALSVHATRDLREVVKEIKSEFEVASSHGKEVAVLLEVSKLPYQQKSSGLKVIFSRIMYLVAPSTVSSRSQPQPSIRLTSRILKIAKSYNGQDVREGLTGNLSATLEQLYAWEKKLYKEVKDEEKLRVVYEEKCRTLKKLDSLGAESSKIDTTRAAIRKLLTKLDVCIRSVDSISSRIHKLRDEELQPQLTQLIHGLIRMWRSMLKCHQKQFQAIMESKVRSLRANTGLQRDSGLKAILDLEMELREWCISFNDWVNTQKSYVESLNGWLSRCLHYEPESTEDGIAPFSPSRVGAPQVFVICKDWQEAMARISGENVSNAMQGFASSLHELWERQDEEQRQRVKAEYVSHDFEKRLNDLRMERARVRMRNDQLQDGASEKSVVLSESGISALDDLKVDLDSMRKKLEEERARHKETIKLVNNAASSSLQAGLVPIFEALGNFTSQVVKAHEDVRFQQQQQPESED

SEQ ID NO: 83520 - DNA, 1680 bp, Arabidopsis thaliana
  misc_feature (1)..(1680): Ceres Seq. ID no. 12670681
  misc_feature (1)..(1680): Ortholog of  Ceres SEQ ID NO 14303627 as cited in SEQ ID NO 62070
  misc_feature (1)..(1680): Ortholog of  Ceres SEQ ID NO 13597546 as cited in SEQ ID NO 65017
  misc_feature (1)..(1680): Ortholog of  Ceres SEQ ID NO 15176077 as cited in SEQ ID NO 66728
  misc_feature (1)..(1680): Ortholog of  Ceres SEQ ID NO 13654353 as cited in SEQ ID NO 68318
atctccaacacaaaaaccaatccattagagagagaactcacaaaacatacttcgaattcccattgtttaaaagacgaagataatggatttctccggtttgtttctcactctctccgcggcggctctgtttctctgtttactccgatttatcgccggagtccgccgtagctcctccacgaaactccctcttcctccgggaacaatgggttatccttacgtcggcgaaacattccaactttactcacaagaccctaatgtgttctttgcagcaaaacagagaagatacggatcggtgttcaagactcatgtattgggatgtccatgtgtgatgatctcgagccctgaagcagcgaaattcgtattggttacaaagtctcatttgtttaaaccgacttttccggccagtaaagagaggatgcttggaaaacaagccatcttcttccatcaaggagattatcattccaaacttagaaagcttgttttaagagctttcatgcctgatgcaatcagaaacatggtccctcacattgaatcaattgctcaagaatcactcaattcttgggatggaactcaactcaacacttaccaggaaatgaaaacatacactttcaatgttgcgttaatctcaatactcggcaaagacgaagtttattaccgagaagatctaaaacgatgctactacattctagagaaaggttacaattcgatgccgattaatcttccaggaacattattccacaaagccatgaaagctcgcaaggagctagctcaaatcctcgctaacatcttatccaaaagaagacaaaacccatcatcacacacagatctcctcggatcattcatggaagacaaagcaggattaaccgacgaacaaatcgccgataacatcatcggagtaatcttcgccgcaagagacacgacggcgagtgttctgacgtggatcctcaagtacttagctgataatccaactgttctagaagctgtcactgaagagcaaatggcaataaggaaagataaaaaagaaggagagagtctcacttgggaagatacaaagaagatgccattaacttatagagtaatccaagagacattaagagctgctacaatcttatctttcacatttagagaagctgtcgaagatgtcgaatacgaaggatatttgataccaaagggatggaaagtactgccactattcagaaatattcatcacaatgctgatatattttcggatccggggaaattcgatccgtcgagattcgaagttgcgccgaaaccgaatacattcatgccttttggtagtgggattcattcttgtccaggcaatgagttagctaaacttgaaatctctgttctaatccatcatctcaccactaagtacagatggtcaatcgtagggcctagcgatggaattcagtatgggccgttcgctcttcctcagaatggattgcctattgccttggaacgaaaaccatagatgaattacgagaataccatttacctttcttaaattagaaagtgaggaattttttttcttatttaagaggaaaatctaattcttttttataatagaaatgaaaagaaagtagaagaaaaaaatcccaagtgggaccccccaagtgtatataagttttagtttataaaatgtagagaattaaattttcggagaaaaaagagaattag

SEQ ID NO: 83521 - protein, 463 aa, Arabidopsis thaliana
  peptide (1)..(463): Ceres Seq. ID no. 12670682
MDFSGLFLTLSAAALFLCLLRFIAGVRRSSSTKLPLPPGTMGYPYVGETFQLYSQDPNVFFAAKQRRYGSVFKTHVLGCPCVMISSPEAAKFVLVTKSHLFKPTFPASKERMLGKQAIFFHQGDYHSKLRKLVLRAFMPDAIRNMVPHIESIAQESLNSWDGTQLNTYQEMKTYTFNVALISILGKDEVYYREDLKRCYYILEKGYNSMPINLPGTLFHKAMKARKELAQILANILSKRRQNPSSHTDLLGSFMEDKAGLTDEQIADNIIGVIFAARDTTASVLTWILKYLADNPTVLEAVTEEQMAIRKDKKEGESLTWEDTKKMPLTYRVIQETLRAATILSFTFREAVEDVEYEGYLIPKGWKVLPLFRNIHHNADIFSDPGKFDPSRFEVAPKPNTFMPFGSGIHSCPGNELAKLEISVLIHHLTTKYRWSIVGPSDGIQYGPFALPQNGLPIALERKP

SEQ ID NO: 83522 - protein, 423 aa, Arabidopsis thaliana
  peptide (1)..(423): Ceres Seq. ID no. 12670683
MGYPYVGETFQLYSQDPNVFFAAKQRRYGSVFKTHVLGCPCVMISSPEAAKFVLVTKSHLFKPTFPASKERMLGKQAIFFHQGDYHSKLRKLVLRAFMPDAIRNMVPHIESIAQESLNSWDGTQLNTYQEMKTYTFNVALISILGKDEVYYREDLKRCYYILEKGYNSMPINLPGTLFHKAMKARKELAQILANILSKRRQNPSSHTDLLGSFMEDKAGLTDEQIADNIIGVIFAARDTTASVLTWILKYLADNPTVLEAVTEEQMAIRKDKKEGESLTWEDTKKMPLTYRVIQETLRAATILSFTFREAVEDVEYEGYLIPKGWKVLPLFRNIHHNADIFSDPGKFDPSRFEVAPKPNTFMPFGSGIHSCPGNELAKLEISVLIHHLTTKYRWSIVGPSDGIQYGPFALPQNGLPIALERKP

SEQ ID NO: 83523 - protein, 381 aa, Arabidopsis thaliana
  peptide (1)..(381): Ceres Seq. ID no. 12670684
MISSPEAAKFVLVTKSHLFKPTFPASKERMLGKQAIFFHQGDYHSKLRKLVLRAFMPDAIRNMVPHIESIAQESLNSWDGTQLNTYQEMKTYTFNVALISILGKDEVYYREDLKRCYYILEKGYNSMPINLPGTLFHKAMKARKELAQILANILSKRRQNPSSHTDLLGSFMEDKAGLTDEQIADNIIGVIFAARDTTASVLTWILKYLADNPTVLEAVTEEQMAIRKDKKEGESLTWEDTKKMPLTYRVIQETLRAATILSFTFREAVEDVEYEGYLIPKGWKVLPLFRNIHHNADIFSDPGKFDPSRFEVAPKPNTFMPFGSGIHSCPGNELAKLEISVLIHHLTTKYRWSIVGPSDGIQYGPFALPQNGLPIALERKP

SEQ ID NO: 83524 - DNA, 2562 bp, Arabidopsis thaliana
  misc_feature (1)..(2562): Ceres Seq. ID no. 12670685
  misc_feature (1)..(2562): Ortholog of  Ceres SEQ ID NO 13655755 as cited in SEQ ID NO 65117
atggcggtgagtttgacggagggagtggtaatgaagatgttgaacggagaagtgacgagcgagacagatatgatgccagtgctacaagtaacggaattgaagctgattcagagcaagcttcatcaaaatcaggaatctagcaatcgatataagtttttattatcagatgggactgacttggcagcaggaatgcttaatacttcattgaacagtttagtgaatcaaggaactattcaattgggttcggttataagactcactcactacatctgcaatctcatccagactcgaaggattgttgttattatgcaattggaggttattgtggagaaatgtaatataattggaaatcctaaagaacctgggcatagctcgattaatccacaacgtggtggagttaacacacaaagcaatggtggttctgagcagcaacaagctagaaggagtgatgtgaatggtgggagatacggtgtatcggctaattcgcctcaacctcaagttgttcataacagttccgacgctggaagatactgtgtatcggctaattcacctcagcctcaagttgttcatagcagttccgacgctggaagatatggtgtatcggctaattcacctcagcgtcaagttgttcataacagtcccgacgctgggagatatggacagcctcaagttagtcaaagatatggtactggttctggttatccggaaacatcaccttccactagaccgtatgtgagctcaaatgcaggttatggaggctctaggcaggaccaacctcgggctcctactgcaacaactgcttattcccgtccggttcagtcagcttatcagccacaacaaccaccgatgtatgttaacaggggacctgtggctaggaacgaagctcctccgaggataaatccgattgctgctcttaatccttaccagggtcggtggaccatcaaggttagggtcacgagtaaggcagacctgaggcggtttaataatccgcgtggggaagggaagttgttcagttttgatcttcttgatgctgatggtggagaaatacgggtgacttgttttaatgatgcggttgatcaattctttgacaagattgtagttggtaatgtttatctgatttcaaggggaaatttgaagcctgctcagaagaactttaatcatcttccgaatgattatgaaatacatttggactctgcatcaacgatacagccttgtgaagatgatggtaccattccacgctatcatttccattttcgtaacataggtgatattgaaaacatggagaacaacagcaccactgatgtaattggtattgtttcgtccatcagtccgacagtagcaattatgcggaaaaacttaactgaggtacagaaaaggtctcttcagttgaaggatatgtcaggccgaagtgttgaggtaaccatgtggggtaatttctgcaacgcagaaggacagaaattgcaaaatctttgtgattctggggtattcccggttcttgctttgaaagcgggcaggatcggtgaattcaacgggaagcaagtgagcacaattggagcaagtcaattctttatagagccagatttccctgaagccagagaattaaggcaatggtatgagagagaaggaaggaatgctcattttacctccatatctagagagttttccggtgttggcagacaagaagttcgcaaggtaattgcacagatcaaggacgagaagctagggacctcagagaagccggactggatcacagtctgtgccaccatttcattcatgaaggttgaaaatttctgctatacggcttgtcctatcatgaatggagatcgtccatgcagcaaaaaggtcacaaataacggagatgggacatggcgttgtgagaagtgtgacaaatgcgtggatgaatgtgactacaggtatatattacagatccagttacaggaccatacagacctaacctgggcaactgcattccaagaagctggtgaagagataatgggaatgtctgcaaaagatttgtattatgtgaagtatgaaaatcaggatgaggagaaatttgaagatatcatccgcagtgtcgcttttactaagtacattttcaagctgaagattaaagaagaaacttacagcgatgagcagcgggttaaagcaacagttgtgaaagctgaaaagctgaattattcttcaaataccaggttcatgctagaggcaatagataaactcaagataggagatgcaaattctctccctataaaggcagagagttccaattacaggtctgatgcatttaattccggtgttggaacctcaggaactagagacaccgcatcagtcgatgcacgcagagaatttggattacctgcagcaaaccaagtgggtcaatatggaaatcagtacagtagtgatgcaaggtctcttggcggttttactagctgcaacgtgtgtcgcagcaacagccatgtttctgcaaactgcccaacccttatgagtgagccacaaggacaatacatgggtggcacaaatgcaggaggaggtatgccaaggcaacatgtaggcagctactga

SEQ ID NO: 83525 - protein, 853 aa, Arabidopsis thaliana
  peptide (1)..(853): Ceres Seq. ID no. 12670686
MAVSLTEGVVMKMLNGEVTSETDMMPVLQVTELKLIQSKLHQNQESSNRYKFLLSDGTDLAAGMLNTSLNSLVNQGTIQLGSVIRLTHYICNLIQTRRIVVIMQLEVIVEKCNIIGNPKEPGHSSINPQRGGVNTQSNGGSEQQQARRSDVNGGRYGVSANSPQPQVVHNSSDAGRYCVSANSPQPQVVHSSSDAGRYGVSANSPQRQVVHNSPDAGRYGQPQVSQRYGTGSGYPETSPSTRPYVSSNAGYGGSRQDQPRAPTATTAYSRPVQSAYQPQQPPMYVNRGPVARNEAPPRINPIAALNPYQGRWTIKVRVTSKADLRRFNNPRGEGKLFSFDLLDADGGEIRVTCFNDAVDQFFDKIVVGNVYLISRGNLKPAQKNFNHLPNDYEIHLDSASTIQPCEDDGTIPRYHFHFRNIGDIENMENNSTTDVIGIVSSISPTVAIMRKNLTEVQKRSLQLKDMSGRSVEVTMWGNFCNAEGQKLQNLCDSGVFPVLALKAGRIGEFNGKQVSTIGASQFFIEPDFPEARELRQWYEREGRNAHFTSISREFSGVGRQEVRKVIAQIKDEKLGTSEKPDWITVCATISFMKVENFCYTACPIMNGDRPCSKKVTNNGDGTWRCEKCDKCVDECDYRYILQIQLQDHTDLTWATAFQEAGEEIMGMSAKDLYYVKYENQDEEKFEDIIRSVAFTKYIFKLKIKEETYSDEQRVKATVVKAEKLNYSSNTRFMLEAIDKLKIGDANSLPIKAESSNYRSDAFNSGVGTSGTRDTASVDARREFGLPAANQVGQYGNQYSSDARSLGGFTSCNVCRSNSHVSANCPTLMSEPQGQYMGGTNAGGGMPRQHVGSY

SEQ ID NO: 83526 - protein, 843 aa, Arabidopsis thaliana
  peptide (1)..(843): Ceres Seq. ID no. 12670687
MKMLNGEVTSETDMMPVLQVTELKLIQSKLHQNQESSNRYKFLLSDGTDLAAGMLNTSLNSLVNQGTIQLGSVIRLTHYICNLIQTRRIVVIMQLEVIVEKCNIIGNPKEPGHSSINPQRGGVNTQSNGGSEQQQARRSDVNGGRYGVSANSPQPQVVHNSSDAGRYCVSANSPQPQVVHSSSDAGRYGVSANSPQRQVVHNSPDAGRYGQPQVSQRYGTGSGYPETSPSTRPYVSSNAGYGGSRQDQPRAPTATTAYSRPVQSAYQPQQPPMYVNRGPVARNEAPPRINPIAALNPYQGRWTIKVRVTSKADLRRFNNPRGEGKLFSFDLLDADGGEIRVTCFNDAVDQFFDKIVVGNVYLISRGNLKPAQKNFNHLPNDYEIHLDSASTIQPCEDDGTIPRYHFHFRNIGDIENMENNSTTDVIGIVSSISPTVAIMRKNLTEVQKRSLQLKDMSGRSVEVTMWGNFCNAEGQKLQNLCDSGVFPVLALKAGRIGEFNGKQVSTIGASQFFIEPDFPEARELRQWYEREGRNAHFTSISREFSGVGRQEVRKVIAQIKDEKLGTSEKPDWITVCATISFMKVENFCYTACPIMNGDRPCSKKVTNNGDGTWRCEKCDKCVDECDYRYILQIQLQDHTDLTWATAFQEAGEEIMGMSAKDLYYVKYENQDEEKFEDIIRSVAFTKYIFKLKIKEETYSDEQRVKATVVKAEKLNYSSNTRFMLEAIDKLKIGDANSLPIKAESSNYRSDAFNSGVGTSGTRDTASVDARREFGLPAANQVGQYGNQYSSDARSLGGFTSCNVCRSNSHVSANCPTLMSEPQGQYMGGTNAGGGMPRQHVGSY

SEQ ID NO: 83527 - protein, 841 aa, Arabidopsis thaliana
  peptide (1)..(841): Ceres Seq. ID no. 12670688
MLNGEVTSETDMMPVLQVTELKLIQSKLHQNQESSNRYKFLLSDGTDLAAGMLNTSLNSLVNQGTIQLGSVIRLTHYICNLIQTRRIVVIMQLEVIVEKCNIIGNPKEPGHSSINPQRGGVNTQSNGGSEQQQARRSDVNGGRYGVSANSPQPQVVHNSSDAGRYCVSANSPQPQVVHSSSDAGRYGVSANSPQRQVVHNSPDAGRYGQPQVSQRYGTGSGYPETSPSTRPYVSSNAGYGGSRQDQPRAPTATTAYSRPVQSAYQPQQPPMYVNRGPVARNEAPPRINPIAALNPYQGRWTIKVRVTSKADLRRFNNPRGEGKLFSFDLLDADGGEIRVTCFNDAVDQFFDKIVVGNVYLISRGNLKPAQKNFNHLPNDYEIHLDSASTIQPCEDDGTIPRYHFHFRNIGDIENMENNSTTDVIGIVSSISPTVAIMRKNLTEVQKRSLQLKDMSGRSVEVTMWGNFCNAEGQKLQNLCDSGVFPVLALKAGRIGEFNGKQVSTIGASQFFIEPDFPEARELRQWYEREGRNAHFTSISREFSGVGRQEVRKVIAQIKDEKLGTSEKPDWITVCATISFMKVENFCYTACPIMNGDRPCSKKVTNNGDGTWRCEKCDKCVDECDYRYILQIQLQDHTDLTWATAFQEAGEEIMGMSAKDLYYVKYENQDEEKFEDIIRSVAFTKYIFKLKIKEETYSDEQRVKATVVKAEKLNYSSNTRFMLEAIDKLKIGDANSLPIKAESSNYRSDAFNSGVGTSGTRDTASVDARREFGLPAANQVGQYGNQYSSDARSLGGFTSCNVCRSNSHVSANCPTLMSEPQGQYMGGTNAGGGMPRQHVGSY

SEQ ID NO: 83528 - DNA, 1320 bp, Arabidopsis thaliana
  misc_feature (1)..(1320): Ceres Seq. ID no. 12670701
  misc_feature (1)..(1320): Ortholog of  Ceres SEQ ID NO 13599900 as cited in SEQ ID NO 531
  misc_feature (1)..(1320): Ortholog of  Ceres SEQ ID NO 13659971 as cited in SEQ ID NO 67565
  misc_feature (1)..(1320): Ortholog of  Ceres SEQ ID NO 13500385 as cited in SEQ ID NO 67583
atggataaaaacggcatagttttgatgcgaaaatatgaattaggtcgtcttctaggtcaaggcacattcgcaaaagtgtaccacgcacgcaacataaaaacaggagaaagcgtagcgatcaaggtgatcgacaaacagaaagttgcgaaagtcggattaatcgatcaaatcaaacgagaaatatcagtgatgcgtctcgttcgtcacccccacgtcgtcttcctccatgaagtaatggcgagcaagacaaagatctatttcgctatggaatacgttaaaggcggtgagctttttgataaagtctctaaaggaaagcttaaagaaaacattgctcgaaaatatttccagcaattgatcggagcaatcgattattgccatagccgcggagtttaccaccgcgatctcaaaccggagaatcttcttctagacgaaaacggcgatttgaaaatatcggattttggccttagcgcgttgagggagtcgaagcagcaagatggcttgcttcacacgacatgtggaacacctgcttacgtggcacctgaagtgataggcaagaaaggttatgatggagctaaagccgatgtttggtcttgcggggttgtgttgtacgtgctattggctggatttcttccgtttcacgagcaaaatcttgtggaaatgtatcggaaaatcacgaaaggcgaattcaaatgtccgaattggtttcctcccgaggtcaagaagttgttgtctcggattcttgaccctaaccctaattcaagaatcaagattgaaaaaatcatggagaattcctggtttcaaaagggtttcaagaagatcgaaacgcctaaatctcccgaaagtcatcagatcgactcactgatcagcgatgtccacgcagctttttccgtaaaaccgatgtcttacaacgcgtttgacttgatctcttcgctgtctcaaggattcgatctctcgggtttgtttgagaaagaagagagatcagaatcgaagtttacaacgaagaaagatgcaaaagagatagtgtcgaaattcgaggagatagcaacaagtagtgagagattcaatttgacgaagagcgatgtaggagtgaagatggaagataagagagaaggaagaaaaggacatcttgcgattgatgttgagatatttgaagtgacaaatagttttcatatggttgagtttaagaaaagtggaggtgatacaatggagtataagcaattttgtgatcgtgagcttaggccttctttgaaagatattgtttggaaatggcaaggaaacaacaacaatagcaacaatgagaagattgaagtgatacattaa

SEQ ID NO: 83529 - protein, 439 aa, Arabidopsis thaliana
  peptide (1)..(439): Ceres Seq. ID no. 12670702
MDKNGIVLMRKYELGRLLGQGTFAKVYHARNIKTGESVAIKVIDKQKVAKVGLIDQIKREISVMRLVRHPHVVFLHEVMASKTKIYFAMEYVKGGELFDKVSKGKLKENIARKYFQQLIGAIDYCHSRGVYHRDLKPENLLLDENGDLKISDFGLSALRESKQQDGLLHTTCGTPAYVAPEVIGKKGYDGAKADVWSCGVVLYVLLAGFLPFHEQNLVEMYRKITKGEFKCPNWFPPEVKKLLSRILDPNPNSRIKIEKIMENSWFQKGFKKIETPKSPESHQIDSLISDVHAAFSVKPMSYNAFDLISSLSQGFDLSGLFEKEERSESKFTTKKDAKEIVSKFEEIATSSERFNLTKSDVGVKMEDKREGRKGHLAIDVEIFEVTNSFHMVEFKKSGGDTMEYKQFCDRELRPSLKDIVWKWQGNNNNSNNEKIEVIH

SEQ ID NO: 83530 - protein, 431 aa, Arabidopsis thaliana
  peptide (1)..(431): Ceres Seq. ID no. 12670703
MRKYELGRLLGQGTFAKVYHARNIKTGESVAIKVIDKQKVAKVGLIDQIKREISVMRLVRHPHVVFLHEVMASKTKIYFAMEYVKGGELFDKVSKGKLKENIARKYFQQLIGAIDYCHSRGVYHRDLKPENLLLDENGDLKISDFGLSALRESKQQDGLLHTTCGTPAYVAPEVIGKKGYDGAKADVWSCGVVLYVLLAGFLPFHEQNLVEMYRKITKGEFKCPNWFPPEVKKLLSRILDPNPNSRIKIEKIMENSWFQKGFKKIETPKSPESHQIDSLISDVHAAFSVKPMSYNAFDLISSLSQGFDLSGLFEKEERSESKFTTKKDAKEIVSKFEEIATSSERFNLTKSDVGVKMEDKREGRKGHLAIDVEIFEVTNSFHMVEFKKSGGDTMEYKQFCDRELRPSLKDIVWKWQGNNNNSNNEKIEVIH

SEQ ID NO: 83531 - protein, 376 aa, Arabidopsis thaliana
  peptide (1)..(376): Ceres Seq. ID no. 12670704
MRLVRHPHVVFLHEVMASKTKIYFAMEYVKGGELFDKVSKGKLKENIARKYFQQLIGAIDYCHSRGVYHRDLKPENLLLDENGDLKISDFGLSALRESKQQDGLLHTTCGTPAYVAPEVIGKKGYDGAKADVWSCGVVLYVLLAGFLPFHEQNLVEMYRKITKGEFKCPNWFPPEVKKLLSRILDPNPNSRIKIEKIMENSWFQKGFKKIETPKSPESHQIDSLISDVHAAFSVKPMSYNAFDLISSLSQGFDLSGLFEKEERSESKFTTKKDAKEIVSKFEEIATSSERFNLTKSDVGVKMEDKREGRKGHLAIDVEIFEVTNSFHMVEFKKSGGDTMEYKQFCDRELRPSLKDIVWKWQGNNNNSNNEKIEVIH

SEQ ID NO: 83532 - DNA, 486 bp, Arabidopsis thaliana
  misc_feature (1)..(486): Ceres Seq. ID no. 12670705
  misc_feature (1)..(486): Ortholog of  Ceres SEQ ID NO 13599448 as cited in SEQ ID NO 521
  misc_feature (1)..(486): Ortholog of  Ceres SEQ ID NO 13596408 as cited in SEQ ID NO 62028
atggaaacttctcaaaaatatcatacgtgcggttccacactagtacaaactatagatgctccactatctctagtttggtcaattctacgtcggtttgataaccctcaagcctacaaacaattcgtgaaaacgtgcaatctaagctccggcgatggaggagaaggctccgtccgtgaagtgacggtggtttccggtcttccagcggagttcagccgagagagattagatgaacttgacgatgagtctcatgtgatgatgattagcattataggtggtgatcatcgtttggttaattaccggtcgaaaacgatggcgtttgtggcggcggatacggaggagaagacggtggtggtggagagttatgtggtggatgtgccggaaggaaatagtgaggaggaaacgacgtcttttgctgatacaatcgttgggtttaatcttaagtcattggctaagctctcggagagggtggctcatctaaagttgtaa

SEQ ID NO: 83533 - protein, 161 aa, Arabidopsis thaliana
  peptide (1)..(161): Ceres Seq. ID no. 12670706
METSQKYHTCGSTLVQTIDAPLSLVWSILRRFDNPQAYKQFVKTCNLSSGDGGEGSVREVTVVSGLPAEFSRERLDELDDESHVMMISIIGGDHRLVNYRSKTMAFVAADTEEKTVVVESYVVDVPEGNSEEETTSFADTIVGFNLKSLAKLSERVAHLKL

SEQ ID NO: 83534 - DNA, 2380 bp, Arabidopsis thaliana
  misc_feature (1)..(2380): Ceres Seq. ID no. 12670719
  misc_feature (1)..(2380): Ortholog of  Ceres SEQ ID NO 13654989 as cited in SEQ ID NO 63117
  misc_feature (1)..(2380): Ortholog of  Ceres SEQ ID NO 13584744 as cited in SEQ ID NO 69137
acacgccatgagaactcttcttcaatggcacttaccatctcaatctcttgtttctcctcttactttgtgtctctccttcttcttgttctatcttccttctcctttgtttgcttctccctctccaccgtctccatctcccacatctctaatcagactcttgtatgtgctctcaacaaccactcttatcttcaatgttccagtttccctttaaattcgattccattttctttaaccggtaaccttcgaaatcgaaggttttcgggggttgtttcagggaatgggtttgtgtgcggattgatatcgcggctggattccaacacttccacacttctttgttggagattctctgttgatggaactaatatgttgcacaaaagaatctaccacggtcctgagctcgaagagctagaagccgggaatttccgcatttgtggagttgaaagagtctcaaggcgcctccgttgctggcaaccgtactatctgccacggccggataattaccgttccattgccttgggagataattttttctgtgggctatctcagccacctggtatgatcagttgtgaaggtatagccaaagtgccgagtggagaccactacatcgcgatagcggctggatcacgacaagcgtgtgcgatcactgttgacaatgatgtcgagtgttggggacaaacacagtcgctgccacgtgaaaagttcttagcactagcggttggggaagaccgtggttgcggtgttagatggtctaatggaactgtggtgtgttggggcaacaacaacaactttagtttgcctcaaacgcttaaggacattcattttacatcaatatatgctaaagggccaatgttttgcggtgttgccacaagaaattacactctaatttgttgggggaatgagaattttaaatccggtgttttcactccattccaaggcctaatttctcaagtggtaatgccaggaccgtgtagaagagaatgcccttaccgtccattgtcaggatcacagtccttatgcggcaatgagttgatgatttgcgatttgaaaagaaatgatggagagtttcctgatactagggctcaaaactctaagaacaaaacttggagcagaagaaacattgcgtttctagtggtcggatgcgttggaacgttttccttgctccttgtcatcagtttcttgatctttaaaagccactgtcgatgccgtgtccatgactctggacgtcttgatgatactaggacaatagacatacccaagctcgagaagaggctgtgcactctagcaagtttaggtaatcctgggcagctaatggagttctcaattgacgagctagctctagccacggatggtttctctgtccggtttcatcttggtataggcagcttcggctctgtttatcaaggtgttttgtcggatggacgtcatgtcgcaatcaaacgagctgagctaacaaatcctacattgtctgggacaacgatgagacaccgacgagcagataaggattcagcgttcgtgaacgagctagagtctatgtcgcggcttaaccacaaaaatcttgttcgacttctgggtttctatgaggacacagaagagaggattttggtgtacgagtacatgaaaaatggatctctagccgatcaccttcacaatcctcaatttgaccctctttcgtggcaaacacgcttgatgatcgcgcttgacgctgctcgtgggatccaataccttcatgagtttatcgtgcctccggtgatccaccgtgacataaagtcatcaaacatacttttggacgccacatggacagccaaagtttcagatttcggcctatctcaaatgggtccaacggaagaagatgacgtctcacatctctctttacacgctgccggtacattgggatatatcgacccggagtactacaagtttcaacagctcacaaccaagagcgatgtttacagctttggcgtggtgttgctggagttgctgtctggtcacaaagcgatacacaataacgaagacgaaaaccctagaaacttagtggaatatgttgtaccatacattttgctggatgaggctcatagaatacttgaccagaggattccaccgccgaccccttacgaaatcgaggcggtggctcatgtcggatacttggcagcggagtgtttgatgccgtgtagtcggaaaaggccgtcaatggtggaggtagtcagtaaactagagagtgctttggccgcttgtttgacggctccaaagacggagaccgtatctcgatcaaacacttattagccacgtttagcttaattaaatcttgtggtcaactgtaattgtatttatttttctagggattaggaatttaattaattggtacagaattttaatattttct

SEQ ID NO: 83535 - protein, 759 aa, Arabidopsis thaliana
  peptide (1)..(759): Ceres Seq. ID no. 12670720
TRHENSSSMALTISISCFSSYFVSLLLLVLSSFSFVCFSLSTVSISHISNQTLVCALNNHSYLQCSSFPLNSIPFSLTGNLRNRRFSGVVSGNGFVCGLISRLDSNTSTLLCWRFSVDGTNMLHKRIYHGPELEELEAGNFRICGVERVSRRLRCWQPYYLPRPDNYRSIALGDNFFCGLSQPPGMISCEGIAKVPSGDHYIAIAAGSRQACAITVDNDVECWGQTQSLPREKFLALAVGEDRGCGVRWSNGTVVCWGNNNNFSLPQTLKDIHFTSIYAKGPMFCGVATRNYTLICWGNENFKSGVFTPFQGLISQVVMPGPCRRECPYRPLSGSQSLCGNELMICDLKRNDGEFPDTRAQNSKNKTWSRRNIAFLVVGCVGTFSLLLVISFLIFKSHCRCRVHDSGRLDDTRTIDIPKLEKRLCTLASLGNPGQLMEFSIDELALATDGFSVRFHLGIGSFGSVYQGVLSDGRHVAIKRAELTNPTLSGTTMRHRRADKDSAFVNELESMSRLNHKNLVRLLGFYEDTEERILVYEYMKNGSLADHLHNPQFDPLSWQTRLMIALDAARGIQYLHEFIVPPVIHRDIKSSNILLDATWTAKVSDFGLSQMGPTEEDDVSHLSLHAAGTLGYIDPEYYKFQQLTTKSDVYSFGVVLLELLSGHKAIHNNEDENPRNLVEYVVPYILLDEAHRILDQRIPPPTPYEIEAVAHVGYLAAECLMPCSRKRPSMVEVVSKLESALAACLTAPKTETVSRSNTY

SEQ ID NO: 83536 - protein, 751 aa, Arabidopsis thaliana
  peptide (1)..(751): Ceres Seq. ID no. 12670721
MALTISISCFSSYFVSLLLLVLSSFSFVCFSLSTVSISHISNQTLVCALNNHSYLQCSSFPLNSIPFSLTGNLRNRRFSGVVSGNGFVCGLISRLDSNTSTLLCWRFSVDGTNMLHKRIYHGPELEELEAGNFRICGVERVSRRLRCWQPYYLPRPDNYRSIALGDNFFCGLSQPPGMISCEGIAKVPSGDHYIAIAAGSRQACAITVDNDVECWGQTQSLPREKFLALAVGEDRGCGVRWSNGTVVCWGNNNNFSLPQTLKDIHFTSIYAKGPMFCGVATRNYTLICWGNENFKSGVFTPFQGLISQVVMPGPCRRECPYRPLSGSQSLCGNELMICDLKRNDGEFPDTRAQNSKNKTWSRRNIAFLVVGCVGTFSLLLVISFLIFKSHCRCRVHDSGRLDDTRTIDIPKLEKRLCTLASLGNPGQLMEFSIDELALATDGFSVRFHLGIGSFGSVYQGVLSDGRHVAIKRAELTNPTLSGTTMRHRRADKDSAFVNELESMSRLNHKNLVRLLGFYEDTEERILVYEYMKNGSLADHLHNPQFDPLSWQTRLMIALDAARGIQYLHEFIVPPVIHRDIKSSNILLDATWTAKVSDFGLSQMGPTEEDDVSHLSLHAAGTLGYIDPEYYKFQQLTTKSDVYSFGVVLLELLSGHKAIHNNEDENPRNLVEYVVPYILLDEAHRILDQRIPPPTPYEIEAVAHVGYLAAECLMPCSRKRPSMVEVVSKLESALAACLTAPKTETVSRSNTY

SEQ ID NO: 83537 - protein, 638 aa, Arabidopsis thaliana
  peptide (1)..(638): Ceres Seq. ID no. 12670722
MLHKRIYHGPELEELEAGNFRICGVERVSRRLRCWQPYYLPRPDNYRSIALGDNFFCGLSQPPGMISCEGIAKVPSGDHYIAIAAGSRQACAITVDNDVECWGQTQSLPREKFLALAVGEDRGCGVRWSNGTVVCWGNNNNFSLPQTLKDIHFTSIYAKGPMFCGVATRNYTLICWGNENFKSGVFTPFQGLISQVVMPGPCRRECPYRPLSGSQSLCGNELMICDLKRNDGEFPDTRAQNSKNKTWSRRNIAFLVVGCVGTFSLLLVISFLIFKSHCRCRVHDSGRLDDTRTIDIPKLEKRLCTLASLGNPGQLMEFSIDELALATDGFSVRFHLGIGSFGSVYQGVLSDGRHVAIKRAELTNPTLSGTTMRHRRADKDSAFVNELESMSRLNHKNLVRLLGFYEDTEERILVYEYMKNGSLADHLHNPQFDPLSWQTRLMIALDAARGIQYLHEFIVPPVIHRDIKSSNILLDATWTAKVSDFGLSQMGPTEEDDVSHLSLHAAGTLGYIDPEYYKFQQLTTKSDVYSFGVVLLELLSGHKAIHNNEDENPRNLVEYVVPYILLDEAHRILDQRIPPPTPYEIEAVAHVGYLAAECLMPCSRKRPSMVEVVSKLESALAACLTAPKTETVSRSNTY

SEQ ID NO: 83538 - DNA, 849 bp, Arabidopsis thaliana
  misc_feature (1)..(849): Ceres Seq. ID no. 12670726
  misc_feature (1)..(849): Ortholog of  Ceres SEQ ID NO 13594298 as cited in SEQ ID NO 57803
  misc_feature (1)..(849): Ortholog of  Ceres SEQ ID NO 13503476 as cited in SEQ ID NO 61978
  misc_feature (1)..(849): Ortholog of  Ceres SEQ ID NO 12578438 as cited in SEQ ID NO 62201
  misc_feature (1)..(849): Ortholog of  Ceres SEQ ID NO 12617675 as cited in SEQ ID NO 64656
atggtgtcattttgcggtagaaggttcgccttcttgattatctttctctttgcagcacaatatgagcgtgtctacgctggtagctttcacaaggacgttcagatacattggggtgatggccgtggaaaaattctcgacaatgtcggaaatcttctttctctctcgctcgacaaattctctggttccggttttcagtcccatcaagagtttctttatggcaaagtagaggttcaaatgaaacttgtacctggtaactctgctggaacagtgacaacattctatctaaaatctcctggaactacatgggatgaaatagattttgagttcttgggaaacataagtggtcatccatatactcttcatactaatgtttacacaaaaggcacaggagacaaagaacaacagtttcatctatggtttgacccaactgttgactttcacacttattgtatcatatggaatccccaaagggtcatttttacaatagatggaattccgataagagaattcaagaactccgaagcccttggagttcccttcccaaagcatcaaccaatgaggctctatgctagcctttgggaagccgagcattgggctacaagaggaggattagagaaaacagactggtccaaagctcctttcaccgctttctacagaaactacaatgtggatgcatgtgtgtggtccaatggaaaatcatcatgctctgcgaattcctcatggtttactcaagtacttgatttcaaaggcaagaatagagtgaaatgggcacagagaaagtacatggtctacaactattgcactgataagaaaagatttcctcaaggtgctcctccagagtgcagttaa

SEQ ID NO: 83539 - protein, 282 aa, Arabidopsis thaliana
  peptide (1)..(282): Ceres Seq. ID no. 12670727
MVSFCGRRFAFLIIFLFAAQYERVYAGSFHKDVQIHWGDGRGKILDNVGNLLSLSLDKFSGSGFQSHQEFLYGKVEVQMKLVPGNSAGTVTTFYLKSPGTTWDEIDFEFLGNISGHPYTLHTNVYTKGTGDKEQQFHLWFDPTVDFHTYCIIWNPQRVIFTIDGIPIREFKNSEALGVPFPKHQPMRLYASLWEAEHWATRGGLEKTDWSKAPFTAFYRNYNVDACVWSNGKSSCSANSSWFTQVLDFKGKNRVKWAQRKYMVYNYCTDKKRFPQGAPPECS

SEQ ID NO: 83540 - protein, 204 aa, Arabidopsis thaliana
  peptide (1)..(204): Ceres Seq. ID no. 12670728
MKLVPGNSAGTVTTFYLKSPGTTWDEIDFEFLGNISGHPYTLHTNVYTKGTGDKEQQFHLWFDPTVDFHTYCIIWNPQRVIFTIDGIPIREFKNSEALGVPFPKHQPMRLYASLWEAEHWATRGGLEKTDWSKAPFTAFYRNYNVDACVWSNGKSSCSANSSWFTQVLDFKGKNRVKWAQRKYMVYNYCTDKKRFPQGAPPECS

SEQ ID NO: 83541 - DNA, 1510 bp, Arabidopsis thaliana
  misc_feature (1)..(1510): Ceres Seq. ID no. 12670729
  misc_feature (1)..(1510): Ortholog of  Ceres SEQ ID NO 13599602 as cited in SEQ ID NO 0
gaatcctagaggtaacaaaacactttcattagtaaactgaatttgaaggatgaattttttttttgatatatgaatgttgatgaatcagatgtttgcattgtgggtgttgcacgtactccaatgggtggctttctcggatctctttcatctttacctgccacaaagcttggatctttagctattgcagctgctttgaagagagcaaatgttgatccagctcttgttcaagaagttgtctttggcaatgttcttagtgctaatttgggtcaagctcctgctcgtcaagctgctttaggtgcaggaatccctaactctgttatctgtactacagttaacaaggtttgtgcatcaggcatgaaagcggtaatgattgctgctcaaagtatccagttagggatcaatgatgtagttgtggcgggtggtatggaaagcatgtctaatacaccaaaatatttggcagaagcaaggaagggatctcgttttggtcatgattctttagtagatggaatgttgaaggatggactatgggatgtctataacgactgtgggatgggaagctgtgcagaattatgcgctgagaagtttcagattacaagggagcagcaagatgactatgcagttcagagttttgagcgtggtattgctgcccaggaagctggcgccttcacatgggaaatcgtcccggttgaagtttctggaggaagaggtaggccatcaaccattgttgacaaggacgaaggtcttgggaagtttgatgctgcaaaattgaggaaactccgtcctagtttcaaagagaatggagggactgttacagctggaaatgcgtctagcataagtgatggtgcagctgcccttgtcctagtgagcggagagaaggctcttcagctaggacttctagtattagcaaaaattaaagggtatggtgacgcagctcaggaaccagagtttttcactactgctcctgctcttgctataccaaaagccattgcacatgctggtttggaatcttctcaagttgattactatgagatcaatgaagcatttgcagttgtagcacttgcaaatcaaaagctactcgggattgctccagagaaagtgaacgtaaatggaggagctgtctccttaggacaccctctaggctgcagtggcgcccgtattctaatcacgttgcttgggatactaaagaagagaaacggaaagtacggtgtgggaggagtgtgcaacggaggaggaggtgcttctgctctagttcttgagctcctttgatgcattatgaatccaggttggtaaactaaatagatggatctatctctcatccaacttccatgagtcagtcattgcactttacgttttatgttagttggtctctcaataaaggagtgatcgttgatgttgttaagtctatttatttatatgaactcggcttctttttttctcttaccggtgacagtcagttattgaatcatggaccgatttaccgtagttaatgatttatcctcatgtactcatt

SEQ ID NO: 83542 - protein, 398 aa, Arabidopsis thaliana
  peptide (1)..(398): Ceres Seq. ID no. 12670730
MNVDESDVCIVGVARTPMGGFLGSLSSLPATKLGSLAIAAALKRANVDPALVQEVVFGNVLSANLGQAPARQAALGAGIPNSVICTTVNKVCASGMKAVMIAAQSIQLGINDVVVAGGMESMSNTPKYLAEARKGSRFGHDSLVDGMLKDGLWDVYNDCGMGSCAELCAEKFQITREQQDDYAVQSFERGIAAQEAGAFTWEIVPVEVSGGRGRPSTIVDKDEGLGKFDAAKLRKLRPSFKENGGTVTAGNASSISDGAAALVLVSGEKALQLGLLVLAKIKGYGDAAQEPEFFTTAPALAIPKAIAHAGLESSQVDYYEINEAFAVVALANQKLLGIAPEKVNVNGGAVSLGHPLGCSGARILITLLGILKKRNGKYGVGGVCNGGGGASALVLELL

SEQ ID NO: 83543 - protein, 381 aa, Arabidopsis thaliana; identical to SEQ ID NO: 41747
  peptide (1)..(381): Ceres Seq. ID no. 12670731

SEQ ID NO: 83544 - protein, 303 aa, Arabidopsis thaliana; identical to SEQ ID NO: 41748
  peptide (1)..(303): Ceres Seq. ID no. 12670732

SEQ ID NO: 83545 - DNA, 701 bp, Arabidopsis thaliana
  misc_feature (1)..(701): Ceres Seq. ID no. 12670747
  misc_feature (1)..(701): Ortholog of  Ceres SEQ ID NO 13595569 as cited in SEQ ID NO 56778
  misc_feature (1)..(701): Ortholog of  Ceres SEQ ID NO 12611159 as cited in SEQ ID NO 59821
  misc_feature (1)..(701): Ortholog of  Ceres SEQ ID NO 13661001 as cited in SEQ ID NO 67531
atggaatgcaaaagagaagaagggaagtcttacgtgaagagagggttgtggaaaccagaagaagatatgatattaaaaagctatgttgagactcatggtgaaggaaactgggcagacatttctcgtagatccgggttgaagagaggaggaaaaagctgtaggctgagatggaagaactatctaagaccaaatatcaaaagaggaagcatgtcaccacaagaacaagaccttatcatccgcatgcataagcttcttggaaacagatggtcgttgatcgctggtcgccttccaggtcgtactgacaatgaagtgaagaactactggaatactcatttgaacaagaaacctaattcccgaagacagaatgcacctgaatcaatcgtcggcgccactcctttcacggataagccagttatgtctacagaactgagaagaagccatggagaaggaggagaagaggagagcaatacctggatggaggagaccaaccactttggctatgacgtccacgtaggatctcccttgccacttatttcccactacccagacaacactctcgtgtttgacccatgtttttcctttaccgatttctttcctctgctttaggactttcctggatttatctcgaaggataaattcttgcatagacttttcgagtcattatgttattattgctttacttatacaatttacatcgagtt

SEQ ID NO: 83546 - protein, 201 aa, Arabidopsis thaliana
  peptide (1)..(201): Ceres Seq. ID no. 12670748
MECKREEGKSYVKRGLWKPEEDMILKSYVETHGEGNWADISRRSGLKRGGKSCRLRWKNYLRPNIKRGSMSPQEQDLIIRMHKLLGNRWSLIAGRLPGRTDNEVKNYWNTHLNKKPNSRRQNAPESIVGATPFTDKPVMSTELRRSHGEGGEEESNTWMEETNHFGYDVHVGSPLPLISHYPDNTLVFDPCFSFTDFFPLL

SEQ ID NO: 83547 - protein, 179 aa, Arabidopsis thaliana
  peptide (1)..(179): Ceres Seq. ID no. 12670749
MILKSYVETHGEGNWADISRRSGLKRGGKSCRLRWKNYLRPNIKRGSMSPQEQDLIIRMHKLLGNRWSLIAGRLPGRTDNEVKNYWNTHLNKKPNSRRQNAPESIVGATPFTDKPVMSTELRRSHGEGGEEESNTWMEETNHFGYDVHVGSPLPLISHYPDNTLVFDPCFSFTDFFPLL

SEQ ID NO: 83548 - protein, 132 aa, Arabidopsis thaliana
  peptide (1)..(132): Ceres Seq. ID no. 12670750
MSPQEQDLIIRMHKLLGNRWSLIAGRLPGRTDNEVKNYWNTHLNKKPNSRRQNAPESIVGATPFTDKPVMSTELRRSHGEGGEEESNTWMEETNHFGYDVHVGSPLPLISHYPDNTLVFDPCFSFTDFFPLL

SEQ ID NO: 83549 - DNA, 1065 bp, Arabidopsis thaliana
  misc_feature (1)..(1065): Ceres Seq. ID no. 12670772
  misc_feature (1)..(1065): Ortholog of  Ceres SEQ ID NO 14310543 as cited in SEQ ID NO 59101
  misc_feature (1)..(1065): Ortholog of  Ceres SEQ ID NO 14311207 as cited in SEQ ID NO 60304
atggacgaatatattgatttccgaccattgaagtacacagagcacaagacttcaatgactaaatacaccaaaaagtcatcggaaaaactttccggtggtaagtcattgaaaaaggttagtatttgttatactgatcctgacgcaacagattcatcaagtgacgaagacgaagaagatttcttgtttcctcgccggagagtcaaaagattcgttaacgagatcactgttgagcctagctgtaacaacgtcgtcaccggagtttcgatgaaagatagaaagagactctcttcttcctccgatgaaactcaatctccggcgtcgagtcgtcaacgtcctaataacaaagtttcagtctccggtcagataaagaagttccgtggtgttagacaacggccatgggggaaatgggcggcggagattagagatccggagcaacgtcggaggatttggctcgggacttttgagacggcggaggaagctgccgtggtttatgataacgccgctataagactccgtggaccggacgctttaactaatttctccataccgcctcaagaagaggaagaagaagaagaaccggaaccggttattgaggagaaaccggttattatgacgacgccaacaccaacaacatcgagttctgaatcaactgaagaagatttacaacatctctcatctcctacttcggttctcaatcaccggtcagaagagattcaacaagtacaacaaccgtttaaatcagctaaacccgaaccgggggtttcaaatgcaccatggtggcataccgggtttaataccggtttaggtgaatcagacgattcatttcctttggatactccgtttcttgacaactatttcaatgaatcaccaccagagatgtcaatatttgaccaaccaatggatcaaattttctgtgaaaatgatgatatcttcaatgatatgttgttcttgggtggtgaaactatgaacattgaagatgagttaacaagttctagtatcaaagatatgggttcaacgtttagtgattttgatgattcattgatatcagatctattagttgcttaa

SEQ ID NO: 83550 - protein, 354 aa, Arabidopsis thaliana
  peptide (1)..(354): Ceres Seq. ID no. 12670773
MDEYIDFRPLKYTEHKTSMTKYTKKSSEKLSGGKSLKKVSICYTDPDATDSSSDEDEEDFLFPRRRVKRFVNEITVEPSCNNVVTGVSMKDRKRLSSSSDETQSPASSRQRPNNKVSVSGQIKKFRGVRQRPWGKWAAEIRDPEQRRRIWLGTFETAEEAAVVYDNAAIRLRGPDALTNFSIPPQEEEEEEEPEPVIEEKPVIMTTPTPTTSSSESTEEDLQHLSSPTSVLNHRSEEIQQVQQPFKSAKPEPGVSNAPWWHTGFNTGLGESDDSFPLDTPFLDNYFNESPPEMSIFDQPMDQIFCENDDIFNDMLFLGGETMNIEDELTSSSIKDMGSTFSDFDDSLISDLLVA

SEQ ID NO: 83551 - protein, 336 aa, Arabidopsis thaliana
  peptide (1)..(336): Ceres Seq. ID no. 12670774
MTKYTKKSSEKLSGGKSLKKVSICYTDPDATDSSSDEDEEDFLFPRRRVKRFVNEITVEPSCNNVVTGVSMKDRKRLSSSSDETQSPASSRQRPNNKVSVSGQIKKFRGVRQRPWGKWAAEIRDPEQRRRIWLGTFETAEEAAVVYDNAAIRLRGPDALTNFSIPPQEEEEEEEPEPVIEEKPVIMTTPTPTTSSSESTEEDLQHLSSPTSVLNHRSEEIQQVQQPFKSAKPEPGVSNAPWWHTGFNTGLGESDDSFPLDTPFLDNYFNESPPEMSIFDQPMDQIFCENDDIFNDMLFLGGETMNIEDELTSSSIKDMGSTFSDFDDSLISDLLVA

SEQ ID NO: 83552 - protein, 266 aa, Arabidopsis thaliana
  peptide (1)..(266): Ceres Seq. ID no. 12670775
MKDRKRLSSSSDETQSPASSRQRPNNKVSVSGQIKKFRGVRQRPWGKWAAEIRDPEQRRRIWLGTFETAEEAAVVYDNAAIRLRGPDALTNFSIPPQEEEEEEEPEPVIEEKPVIMTTPTPTTSSSESTEEDLQHLSSPTSVLNHRSEEIQQVQQPFKSAKPEPGVSNAPWWHTGFNTGLGESDDSFPLDTPFLDNYFNESPPEMSIFDQPMDQIFCENDDIFNDMLFLGGETMNIEDELTSSSIKDMGSTFSDFDDSLISDLLVA

SEQ ID NO: 83553 - DNA, 633 bp, Arabidopsis thaliana
  misc_feature (1)..(633): Ceres Seq. ID no. 12670780
  misc_feature (1)..(633): Ortholog of  Ceres SEQ ID NO 13598160 as cited in SEQ ID NO 61317
  misc_feature (1)..(633): Ortholog of  Ceres SEQ ID NO 13579986 as cited in SEQ ID NO 64562
atgtcggacatggatgatgaaatcacgaggattttcaaggtgcgtcgcacggtgcttcagatgctgagggatcgaggttacactatagaagaatcggacttgaacttgaaaagagaagagtttgttcagaggttttgtaaaactatgaacaaagtgaacaaggaagctcttttcgtctcagccaataaggggccaaatccagccgacaagatttacgtgttctacccggaagggcctaaggtgggagtcccagtgattaagaaggaagtggcaataaagatgcgagacgataaagttcatcgagggatcgtagttgttccaatggccataactgctcccgctagaatggccgtatcagaactcaacaagatgctaacgattgaagtctttgaggaagctgaattggtgaccaacatcactgagcataaactcgtcaacaagtactatgttctcgacgatcaagcaaagaagaaattactcaacacgtacacggtgcaagacacacagttgcctcgcatccttgtcactgatcctcttgccagatactatggactcaagcgaggacaagttgtcaagatcagacgaagcgatgctacttcattggactattatacctaccgatttgctgtttga

SEQ ID NO: 83554 - protein, 210 aa, Arabidopsis thaliana
  peptide (1)..(210): Ceres Seq. ID no. 12670781
MSDMDDEITRIFKVRRTVLQMLRDRGYTIEESDLNLKREEFVQRFCKTMNKVNKEALFVSANKGPNPADKIYVFYPEGPKVGVPVIKKEVAIKMRDDKVHRGIVVVPMAITAPARMAVSELNKMLTIEVFEEAELVTNITEHKLVNKYYVLDDQAKKKLLNTYTVQDTQLPRILVTDPLARYYGLKRGQVVKIRRSDATSLDYYTYRFAV

SEQ ID NO: 83555 - protein, 207 aa, Arabidopsis thaliana
  peptide (1)..(207): Ceres Seq. ID no. 12670782
MDDEITRIFKVRRTVLQMLRDRGYTIEESDLNLKREEFVQRFCKTMNKVNKEALFVSANKGPNPADKIYVFYPEGPKVGVPVIKKEVAIKMRDDKVHRGIVVVPMAITAPARMAVSELNKMLTIEVFEEAELVTNITEHKLVNKYYVLDDQAKKKLLNTYTVQDTQLPRILVTDPLARYYGLKRGQVVKIRRSDATSLDYYTYRFAV

SEQ ID NO: 83556 - protein, 190 aa, Arabidopsis thaliana
  peptide (1)..(190): Ceres Seq. ID no. 12670783
MLRDRGYTIEESDLNLKREEFVQRFCKTMNKVNKEALFVSANKGPNPADKIYVFYPEGPKVGVPVIKKEVAIKMRDDKVHRGIVVVPMAITAPARMAVSELNKMLTIEVFEEAELVTNITEHKLVNKYYVLDDQAKKKLLNTYTVQDTQLPRILVTDPLARYYGLKRGQVVKIRRSDATSLDYYTYRFAV

SEQ ID NO: 83557 - DNA, 1963 bp, Arabidopsis thaliana
  misc_feature (1)..(1963): Ceres Seq. ID no. 12670798
  misc_feature (1)..(1963): Ortholog of  Ceres SEQ ID NO 13599900 as cited in SEQ ID NO 531
  misc_feature (1)..(1963): Ortholog of  Ceres SEQ ID NO 13659971 as cited in SEQ ID NO 67565
  misc_feature (1)..(1963): Ortholog of  Ceres SEQ ID NO 13500385 as cited in SEQ ID NO 67583
gtggaccgccaatgacgtttaacttcgttttcatctcttcttcttcttcttcttccgtcttctcctccatttttgttggtaaacccagaaagaaataaggaagagaaggggcctttaggggcggatagagagatctacacgtctttctactagatctcggattcattcccagaatcctctttcctcaccggctcaattctaccaagtttctaagaggtttattcatattcggcatagaaactcagaaatggtggaggatgtgtcctcctatcactaggggattagctgcacgagctcatgaggttatgactcatgagctacctccaactctgagctatctctggatcaagtagtttttttttttttggagcctgttataagtttgtagattagatggaaaataagccaagtgttttgactgataaatatgatgttgggaggttattgggtcaaggtacttttgccaaggtgtattatggaaggagtattcttactaaccagagtgttgctatcaagatgatcgataaggaaaaggttatgaaagttgggcttatcgaacagatcaagagagagatctctgttatgaggattgctagacaccctaacgttgtggagctatatgaggtcatggcaacaaaaacgaggatctactttgttatggagtattgtaaaggtggagagcttttcaacaaggttgccaaagggaaattgagagatgatgttgcttggaaatacttttatcagcttatcaacgcagttgatttttgccacagccgagaggtgtatcatcgtgacataaagccggagaacctattgctagatgataatgagaatctcaaggtatctgatttcgggttaagcgcccttgctgactgcaagagacaagatggcctcctccacactacttgtggtacacctgcatatgttgctccagaagtgatcaatcgaaaaggctatgatggcacaaaagcagatatttggtcttgtggtgtggttttgtttgtcctattggcaggctatctacctttccatgactccaatctgatggagatgtacaggaagataggaaaagcagattttaaggcaccaagctggtttgctccagaagtacggaggctgttgtgtaagatgctagaccctaaccctgaaactagaatcaccatcgcaagaatcagggagagttcttggttcagaaaaggtttacatatgaaacagaaaaagatggagaaacgagtcaaagagataaactctgtggaagctggtactgcaggtacaaatgagaacggagcaggtccaagtgagaatggagcaggtccaagtgaaaacggagacagggtcacggaggaaaaccatacagacgaacctacaaatttgaacgcttttgatttaattgccttgtctgctgggtttgatctggcaggactgtttggagatgataacaagagagaatctagattcacatcacagaaacctgcttcagtgatcatatctaagctggaggaagtagcacagcgattgaaactgagcataagaaagcgagaagcaggtttgttcaaattggaacgattaaaagaaggaagaaaagggattctgtcgatggatgcagaaatatttcaagtgacgccaaactttcatttagtggaagtgaagaaatcaaatggagatactctcgagtatcagaaattagtagcagaggatcttagacctgctctgtcagatattgtatgggtttggcagggtgagaaagatgagcttacttcacagcaagagacagaataccaacaacaacaacaacaagaacaacaagaacaggaagaaccattgaagttttgaaatttgttcttgtcaagtttttggaattttgcttaacactgaatcactgatgttaatcgtatatgagtttcttacatttttaatttgtggaaaaaaggaatccatcataatataaagaagtcgtttaaag

SEQ ID NO: 83558 - protein, 479 aa, Arabidopsis thaliana
  peptide (1)..(479): Ceres Seq. ID no. 12670799
MENKPSVLTDKYDVGRLLGQGTFAKVYYGRSILTNQSVAIKMIDKEKVMKVGLIEQIKREISVMRIARHPNVVELYEVMATKTRIYFVMEYCKGGELFNKVAKGKLRDDVAWKYFYQLINAVDFCHSREVYHRDIKPENLLLDDNENLKVSDFGLSALADCKRQDGLLHTTCGTPAYVAPEVINRKGYDGTKADIWSCGVVLFVLLAGYLPFHDSNLMEMYRKIGKADFKAPSWFAPEVRRLLCKMLDPNPETRITIARIRESSWFRKGLHMKQKKMEKRVKEINSVEAGTAGTNENGAGPSENGAGPSENGDRVTEENHTDEPTNLNAFDLIALSAGFDLAGLFGDDNKRESRFTSQKPASVIISKLEEVAQRLKLSIRKREAGLFKLERLKEGRKGILSMDAEIFQVTPNFHLVEVKKSNGDTLEYQKLVAEDLRPALSDIVWVWQGEKDELTSQQETEYQQQQQQEQQEQEEPLKF

SEQ ID NO: 83559 - protein, 438 aa, Arabidopsis thaliana
  peptide (1)..(438): Ceres Seq. ID no. 12670800
MIDKEKVMKVGLIEQIKREISVMRIARHPNVVELYEVMATKTRIYFVMEYCKGGELFNKVAKGKLRDDVAWKYFYQLINAVDFCHSREVYHRDIKPENLLLDDNENLKVSDFGLSALADCKRQDGLLHTTCGTPAYVAPEVINRKGYDGTKADIWSCGVVLFVLLAGYLPFHDSNLMEMYRKIGKADFKAPSWFAPEVRRLLCKMLDPNPETRITIARIRESSWFRKGLHMKQKKMEKRVKEINSVEAGTAGTNENGAGPSENGAGPSENGDRVTEENHTDEPTNLNAFDLIALSAGFDLAGLFGDDNKRESRFTSQKPASVIISKLEEVAQRLKLSIRKREAGLFKLERLKEGRKGILSMDAEIFQVTPNFHLVEVKKSNGDTLEYQKLVAEDLRPALSDIVWVWQGEKDELTSQQETEYQQQQQQEQQEQEEPLKF

SEQ ID NO: 83560 - protein, 431 aa, Arabidopsis thaliana
  peptide (1)..(431): Ceres Seq. ID no. 12670801
MKVGLIEQIKREISVMRIARHPNVVELYEVMATKTRIYFVMEYCKGGELFNKVAKGKLRDDVAWKYFYQLINAVDFCHSREVYHRDIKPENLLLDDNENLKVSDFGLSALADCKRQDGLLHTTCGTPAYVAPEVINRKGYDGTKADIWSCGVVLFVLLAGYLPFHDSNLMEMYRKIGKADFKAPSWFAPEVRRLLCKMLDPNPETRITIARIRESSWFRKGLHMKQKKMEKRVKEINSVEAGTAGTNENGAGPSENGAGPSENGDRVTEENHTDEPTNLNAFDLIALSAGFDLAGLFGDDNKRESRFTSQKPASVIISKLEEVAQRLKLSIRKREAGLFKLERLKEGRKGILSMDAEIFQVTPNFHLVEVKKSNGDTLEYQKLVAEDLRPALSDIVWVWQGEKDELTSQQETEYQQQQQQEQQEQEEPLKF

SEQ ID NO: 83561 - DNA, 549 bp, Arabidopsis thaliana
  misc_feature (1)..(549): Ceres Seq. ID no. 12670806
  misc_feature (1)..(549): Ortholog of  Ceres SEQ ID NO 13595187 as cited in SEQ ID NO 56052
  misc_feature (1)..(549): Ortholog of  Ceres SEQ ID NO 15169505 as cited in SEQ ID NO 61011
  misc_feature (1)..(549): Ortholog of  Ceres SEQ ID NO 13662053 as cited in SEQ ID NO 61547
  misc_feature (1)..(549): Ortholog of  Ceres SEQ ID NO 13624283 as cited in SEQ ID NO 0
atggagggagaaaccgcagccaaagcagcggcaagttcctcctcatccccgagccggtacgagtctcaaaagaggcgagactggaacactttccttcagtatctaaggaaccacaagccacctctgaatctgtctcgttgtagtggcgcacacgtccttgagttccttaagtacctcgaccagtttggtaagaccaaagtccatgccacggcttgtcccttcttcggacaacctaacccaccgtctcagtgcacttgccctctcaagcaagcttggggaagtctcgatgctctcatcggccgtctaagggctgctttcgaggaaatcggcggtggtcttcctgagtcaaaccctttcgctgccaaggctgttaggatctatcttaaagaagtccgtcaaacacaggctaaggctcgagggattccttacgacaagaagaaaagaaaacgtccgcatacagacacggcaactccaatcgccggtgacggagacgatgccgaaggaagtggtggtgctgctttggtcgttacggctgcaactacggtatag

SEQ ID NO: 83562 - protein, 182 aa, Arabidopsis thaliana
  peptide (1)..(182): Ceres Seq. ID no. 12670807
MEGETAAKAAASSSSSPSRYESQKRRDWNTFLQYLRNHKPPLNLSRCSGAHVLEFLKYLDQFGKTKVHATACPFFGQPNPPSQCTCPLKQAWGSLDALIGRLRAAFEEIGGGLPESNPFAAKAVRIYLKEVRQTQAKARGIPYDKKKRKRPHTDTATPIAGDGDDAEGSGGAALVVTAATTV

SEQ ID NO: 83563 - DNA, 1815 bp, Arabidopsis thaliana
  misc_feature (1)..(1815): Ceres Seq. ID no. 12670808
  misc_feature (1)..(1815): Ortholog of  Ceres SEQ ID NO 13581959 as cited in SEQ ID NO 56156
atggctgcagccttggagtgctggtcgagtcgtgccggagatggtggcgatcccgacaacgatctggtcgatcaggtactcatgcgaacgcacgacaggtctgagtccgtaattacgtctctacctgagacgagtttggaggttgaaggttccacgacggtttttgatcagagctcgtcggctatgcagaagcggtttcagcgtctcagccgcaacgtgtcagaggcgattgtgtcgcttaaaaacacgcttaatctggattctgctcgggataatcagagtttcggcggagctatgacgcccaaggcggaagtcagtggcggcggcggcggaaggaagctcgtttgggctactgtagtgaagaaccttgctaagatgtatcctgggagtcaattaccggagaagctcgtatcaaatctcaagaagcattacgattccttgccattcagttatagtcaggctgatttcgatatgaaagaagtatttctacacgtcaagttgatagaacaagctgctggagatgacaatcctgtgtttatgattcaagaagtgtctactgaggaacctcgaggttccgtgctcagactcacattcgcctgtaactcttttctatcatggtcaactatgtcaggcgttcttgatagtgcttcgatttgttgcaagaagatacaaatctttgagaagaaggggttgactctcggggttgttcttcttctggatcaatctgggcaacatagtttgtttaaaacccgggtagaaaacaccctcaaggttgcaaccaaaaagccaaaaccgacatctgttaagctccctttcgggctttgtggctgtcaagaacagaacggtggtgtaggggaacttggaggtgttgaagaagagtccattcagcatagtagtaggctagggatagaaaacttgaatagtacgatccagattcaggttccacttccgagttcttcatttgctgtatcagtagatgaatggcagaccatccaatcgggtggcaatgagattggaaaatggctattgaattctgatagttttgagttcggtgatcagattggaccaacttctctcaaaggaattttccgcggtaaaagagtgggaatcgagaaactaaaaggttgtgataaggggaattcctatgagtttgagctccgaaaagattacttggagctgatggcttgtggacacaagagcattctgcaattttacggtgtttgcatcgatgagaaccatggattatgcgttgtgacaaaactgatggaaggtgggtcactccatgaactgatgttgaagaataagaagcttcaaaccaagcagatactgcgaattgcaatagacatagccgaagggctgaagttcgtgaatgaccatggtgttgcttatcgggaccttaacacacaaagaatattactagataagcatggcaatgcatgtttgggaaatattgggatagtcaccgcttgtaagagctttggtgaggccgtggaatatgaaactgatggttatcgatggcttgcacctgagatcatagctggtgacccggaaaatacgacagagacttggatgagcaatgcttatagttttgggatggtactgtgggagatggtgacgggagaggcggcttatgcatcttgctcgcccgtgcaggcggcagttgggatagcggcttgtggcctgagaccggaaattccaaaagaatgccctcaagtcctgagaactctgatgatcaattgctggaacaactccccctccaaacgccccaacttctctcatatccataacacgttacttcgcgccgtttcacggtaa

SEQ ID NO: 83564 - protein, 604 aa, Arabidopsis thaliana
  peptide (1)..(604): Ceres Seq. ID no. 12670809
MAAALECWSSRAGDGGDPDNDLVDQVLMRTHDRSESVITSLPETSLEVEGSTTVFDQSSSAMQKRFQRLSRNVSEAIVSLKNTLNLDSARDNQSFGGAMTPKAEVSGGGGGRKLVWATVVKNLAKMYPGSQLPEKLVSNLKKHYDSLPFSYSQADFDMKEVFLHVKLIEQAAGDDNPVFMIQEVSTEEPRGSVLRLTFACNSFLSWSTMSGVLDSASICCKKIQIFEKKGLTLGVVLLLDQSGQHSLFKTRVENTLKVATKKPKPTSVKLPFGLCGCQEQNGGVGELGGVEEESIQHSSRLGIENLNSTIQIQVPLPSSSFAVSVDEWQTIQSGGNEIGKWLLNSDSFEFGDQIGPTSLKGIFRGKRVGIEKLKGCDKGNSYEFELRKDYLELMACGHKSILQFYGVCIDENHGLCVVTKLMEGGSLHELMLKNKKLQTKQILRIAIDIAEGLKFVNDHGVAYRDLNTQRILLDKHGNACLGNIGIVTACKSFGEAVEYETDGYRWLAPEIIAGDPENTTETWMSNAYSFGMVLWEMVTGEAAYASCSPVQAAVGIAACGLRPEIPKECPQVLRTLMINCWNNSPSKRPNFSHIHNTLLRAVSR

SEQ ID NO: 83565 - protein, 577 aa, Arabidopsis thaliana
  peptide (1)..(577): Ceres Seq. ID no. 12670810
MRTHDRSESVITSLPETSLEVEGSTTVFDQSSSAMQKRFQRLSRNVSEAIVSLKNTLNLDSARDNQSFGGAMTPKAEVSGGGGGRKLVWATVVKNLAKMYPGSQLPEKLVSNLKKHYDSLPFSYSQADFDMKEVFLHVKLIEQAAGDDNPVFMIQEVSTEEPRGSVLRLTFACNSFLSWSTMSGVLDSASICCKKIQIFEKKGLTLGVVLLLDQSGQHSLFKTRVENTLKVATKKPKPTSVKLPFGLCGCQEQNGGVGELGGVEEESIQHSSRLGIENLNSTIQIQVPLPSSSFAVSVDEWQTIQSGGNEIGKWLLNSDSFEFGDQIGPTSLKGIFRGKRVGIEKLKGCDKGNSYEFELRKDYLELMACGHKSILQFYGVCIDENHGLCVVTKLMEGGSLHELMLKNKKLQTKQILRIAIDIAEGLKFVNDHGVAYRDLNTQRILLDKHGNACLGNIGIVTACKSFGEAVEYETDGYRWLAPEIIAGDPENTTETWMSNAYSFGMVLWEMVTGEAAYASCSPVQAAVGIAACGLRPEIPKECPQVLRTLMINCWNNSPSKRPNFSHIHNTLLRAVSR

SEQ ID NO: 83566 - protein, 543 aa, Arabidopsis thaliana
  peptide (1)..(543): Ceres Seq. ID no. 12670811
MQKRFQRLSRNVSEAIVSLKNTLNLDSARDNQSFGGAMTPKAEVSGGGGGRKLVWATVVKNLAKMYPGSQLPEKLVSNLKKHYDSLPFSYSQADFDMKEVFLHVKLIEQAAGDDNPVFMIQEVSTEEPRGSVLRLTFACNSFLSWSTMSGVLDSASICCKKIQIFEKKGLTLGVVLLLDQSGQHSLFKTRVENTLKVATKKPKPTSVKLPFGLCGCQEQNGGVGELGGVEEESIQHSSRLGIENLNSTIQIQVPLPSSSFAVSVDEWQTIQSGGNEIGKWLLNSDSFEFGDQIGPTSLKGIFRGKRVGIEKLKGCDKGNSYEFELRKDYLELMACGHKSILQFYGVCIDENHGLCVVTKLMEGGSLHELMLKNKKLQTKQILRIAIDIAEGLKFVNDHGVAYRDLNTQRILLDKHGNACLGNIGIVTACKSFGEAVEYETDGYRWLAPEIIAGDPENTTETWMSNAYSFGMVLWEMVTGEAAYASCSPVQAAVGIAACGLRPEIPKECPQVLRTLMINCWNNSPSKRPNFSHIHNTLLRAVSR

SEQ ID NO: 83567 - DNA, 1867 bp, Arabidopsis thaliana
  misc_feature (1)..(1867): Ceres Seq. ID no. 12670812
  misc_feature (1)..(1867): Ortholog of  Ceres SEQ ID NO 14316184 as cited in SEQ ID NO 54517
  misc_feature (1)..(1867): Ortholog of  Ceres SEQ ID NO 12616225 as cited in SEQ ID NO 68930
actgactctatcactctcagagattaggatagaaataatcagaaatctccgtctattgtcgtcgtcggccggagattaattattccggtgacgtttagttggtttttcttcattgtgcagcaaaaagaaaaagagtgagcgagagagcttagaaactgagcccaaagacattgactactggtactctgttcaattcaatcgagatcctccgagattcgctctcaaatctgagaataacaatcaccattcccgcagtaagagcggcggcgatttttgcaagaagaagaagagaggagaaatggcgaacaaggtttctaacttctcggatctgattcaacgagttacggcgtcttgtttgttgcatccactctccgccggccggcaagatctcgctgtgaatcgccgggaagagtacgatactgaagaagaggagaatgaggaggaaggtgagattcagtacgaagacgcattggagaaggagaatggtaaagatgagacaattagggctaagaacggaaggaacggtgtgagtgttgagacggtgcaggagatggagatggtgatggacgaagttttcacggcggctgctgctatgaagagagcttacgttgcgcttcaggaagctcattcgccgtgggatccggagaagatgcacgatgctgatatggcgatggtggctgagctgagaaggattggttcattgagggaaagattcaggaggatgagaggtaccggaagtggtggtcgaaggaaaaacgacgccggaagaggaatgctgagagaggccgtggcgccttatgaggcggttgtgaaggagctgaagaaagaagtgaaagtgaaagatactgagattgagaatctgaaggagaaagtcaaagtggcttctatggccaacggtaacggaggcaagaaacaccgattgctttcaagccggaaagttaactgtaccacacagattgctgtgtctccggtgccggagttatttgagatgacaatgattcaggtgaaagaagcatcaaagtctttcacagggattctattgtcactaatgcgagctgcacattgggacattgcagcggctgttcgatccattgaagccgcttcagcttcatccgacggaatgtctgcttcttcgtttgcatcctcggttcagtcatctgtcccgaaccagcacgcgaagtttgctcttgagtcttacatctgtaggaaaatcttccaaggatttgatcacgaaacgttttacatggatggaagcttatcttctcttatcaacccggatcagtaccgtcgtgactgctttgcgcagttcaaagatatgaaagcaatggatcctatggagttgctagggatcttaccaacttgccattttggtaaattctgctcgaagaagtacctttcgatcattcaccaaaaaatggaagagtcgttgttcggggactcggaacagcgggagttggttgtagccggtaaccacccaagaagtcagttctatggagagttcttggggctagctaaagcagtctggctgcttcatctcctggcattctcgctcgacccatccccgagtcactttgaagcaaacagaggagccgagtttcactctcagtacatggagagtgtcgtgaggttttcggatggccgtgttcctgcgggtcaagttgttggatttcctgtttgtccaggattcaagcttagccatcaagggaaaggatcaatcatcaaatccagagtttacttggttccaagggcttaaaaaggtttctttgagttcactgtttcttaggaatacattatgtcctcgtgtgttgtttaagactttaagacaatctagcttcggaaaaatcttgaaataaagagaccgttcgta

SEQ ID NO: 83568 - protein, 484 aa, Arabidopsis thaliana
  peptide (1)..(484): Ceres Seq. ID no. 12670813
MANKVSNFSDLIQRVTASCLLHPLSAGRQDLAVNRREEYDTEEEENEEEGEIQYEDALEKENGKDETIRAKNGRNGVSVETVQEMEMVMDEVFTAAAAMKRAYVALQEAHSPWDPEKMHDADMAMVAELRRIGSLRERFRRMRGTGSGGRRKNDAGRGMLREAVAPYEAVVKELKKEVKVKDTEIENLKEKVKVASMANGNGGKKHRLLSSRKVNCTTQIAVSPVPELFEMTMIQVKEASKSFTGILLSLMRAAHWDIAAAVRSIEAASASSDGMSASSFASSVQSSVPNQHAKFALESYICRKIFQGFDHETFYMDGSLSSLINPDQYRRDCFAQFKDMKAMDPMELLGILPTCHFGKFCSKKYLSIIHQKMEESLFGDSEQRELVVAGNHPRSQFYGEFLGLAKAVWLLHLLAFSLDPSPSHFEANRGAEFHSQYMESVVRFSDGRVPAGQVVGFPVCPGFKLSHQGKGSIIKSRVYLVPRA

SEQ ID NO: 83569 - protein, 400 aa, Arabidopsis thaliana
  peptide (1)..(400): Ceres Seq. ID no. 12670814
MEMVMDEVFTAAAAMKRAYVALQEAHSPWDPEKMHDADMAMVAELRRIGSLRERFRRMRGTGSGGRRKNDAGRGMLREAVAPYEAVVKELKKEVKVKDTEIENLKEKVKVASMANGNGGKKHRLLSSRKVNCTTQIAVSPVPELFEMTMIQVKEASKSFTGILLSLMRAAHWDIAAAVRSIEAASASSDGMSASSFASSVQSSVPNQHAKFALESYICRKIFQGFDHETFYMDGSLSSLINPDQYRRDCFAQFKDMKAMDPMELLGILPTCHFGKFCSKKYLSIIHQKMEESLFGDSEQRELVVAGNHPRSQFYGEFLGLAKAVWLLHLLAFSLDPSPSHFEANRGAEFHSQYMESVVRFSDGRVPAGQVVGFPVCPGFKLSHQGKGSIIKSRVYLVPRA

SEQ ID NO: 83570 - protein, 398 aa, Arabidopsis thaliana
  peptide (1)..(398): Ceres Seq. ID no. 12670815
MVMDEVFTAAAAMKRAYVALQEAHSPWDPEKMHDADMAMVAELRRIGSLRERFRRMRGTGSGGRRKNDAGRGMLREAVAPYEAVVKELKKEVKVKDTEIENLKEKVKVASMANGNGGKKHRLLSSRKVNCTTQIAVSPVPELFEMTMIQVKEASKSFTGILLSLMRAAHWDIAAAVRSIEAASASSDGMSASSFASSVQSSVPNQHAKFALESYICRKIFQGFDHETFYMDGSLSSLINPDQYRRDCFAQFKDMKAMDPMELLGILPTCHFGKFCSKKYLSIIHQKMEESLFGDSEQRELVVAGNHPRSQFYGEFLGLAKAVWLLHLLAFSLDPSPSHFEANRGAEFHSQYMESVVRFSDGRVPAGQVVGFPVCPGFKLSHQGKGSIIKSRVYLVPRA

SEQ ID NO: 83571 - DNA, 1513 bp, Arabidopsis thaliana
  misc_feature (1)..(1513): Ceres Seq. ID no. 12670824
  misc_feature (1)..(1513): Ortholog of  Ceres SEQ ID NO 14310834 as cited in SEQ ID NO 53613
accgttaaatcgacgttcgaaattccgaggagaggaatcataccatggaatcgcaccacgcgtctctaggtcgccgtactttggaagagattcgtcaaaagagagcagctcaaaggctaagcaaagcttcttcaggtccagatcttagtgaaattcccaatcctgccgatttcccagtgatcagaaaatctgagagcggaaatcgactttctgagacagatgttggtgctttatattcccagcttaaagaactgcagaagaagaatgcagaaatggaggagcgcaacaaaattttgtcttcaaagcttcaaacgaaggaagttgagaatgaatcacttgagactcggttgaatgtgctggaacaaaacacagtgccatctctgagaaaagccctcaaggaaattgcaatggagaaagatgctgctgttgttttacgagaggatctctcagctcaagttaggactcttaagagacgtgttaatcaggcagaggaggaacaatatcgagctgaggaagatgcagcatctcttagagcagagcttaattcgatacaacagcaagcaatgggtaattcatttgctggcatgtcgccaatgggagtttccccagaccaactaccaatattagaaaaggagatggctaacctaaaactagaattacagaaagaatcagtgttgaggcagcaagaacaacatcgtttagctgaagaacaaactcgagtagcttctttaatgtctgaaaagcaggaactggaacagaaaatttcagttttatccagcagggcctcagaagtatcagagtctggtcaaaaagtattttcagtggaagataaagaaaaactcgagaagcagttgcatgatatggctgttgcacttgaaagattagagagtagtaggcaaaaacttctcatggaaattgacaaccaatcatctgaaatagagaagctatttgaggaaaactcgaacctctcagcttcgtatcaagaatcaatcaacatatcaaatcagtgggagaatcaagtgaaagaatgtctgaagcaaaacgtagaactccgtgaagttctggacaagttgagaacagaacaagctggttctttttcacgagggccttcagaatttgaggcaaatgggtcgcatggaactgatactctatccctcaagggtgaacttgcgaaagaacagagcagagcggaatcattatctgctcaagtcctccaactctcagctcaactccagcaagcaacacaagcatacaatgggcttatgcgcatctataaacctgtgcttagaaacatagagagtagcttaatcaagctgaagcaagatggatcggttacagtggcacagtgaatcaggaaccaagggcacacttctgagtattgaatatatttttatacaacaaaacatctatttagaaccaaggggacaagtgaatctaacacttttttctttattgaacaatttggttcgttgtgttgtaactgttgttcattgaaagcttcggttcgttttcc

SEQ ID NO: 83572 - protein, 434 aa, Arabidopsis thaliana
  peptide (1)..(434): Ceres Seq. ID no. 12670825
MESHHASLGRRTLEEIRQKRAAQRLSKASSGPDLSEIPNPADFPVIRKSESGNRLSETDVGALYSQLKELQKKNAEMEERNKILSSKLQTKEVENESLETRLNVLEQNTVPSLRKALKEIAMEKDAAVVLREDLSAQVRTLKRRVNQAEEEQYRAEEDAASLRAELNSIQQQAMGNSFAGMSPMGVSPDQLPILEKEMANLKLELQKESVLRQQEQHRLAEEQTRVASLMSEKQELEQKISVLSSRASEVSESGQKVFSVEDKEKLEKQLHDMAVALERLESSRQKLLMEIDNQSSEIEKLFEENSNLSASYQESINISNQWENQVKECLKQNVELREVLDKLRTEQAGSFSRGPSEFEANGSHGTDTLSLKGELAKEQSRAESLSAQVLQLSAQLQQATQAYNGLMRIYKPVLRNIESSLIKLKQDGSVTVAQ

SEQ ID NO: 83573 - protein, 358 aa, Arabidopsis thaliana
  peptide (1)..(358): Ceres Seq. ID no. 12670826
MEERNKILSSKLQTKEVENESLETRLNVLEQNTVPSLRKALKEIAMEKDAAVVLREDLSAQVRTLKRRVNQAEEEQYRAEEDAASLRAELNSIQQQAMGNSFAGMSPMGVSPDQLPILEKEMANLKLELQKESVLRQQEQHRLAEEQTRVASLMSEKQELEQKISVLSSRASEVSESGQKVFSVEDKEKLEKQLHDMAVALERLESSRQKLLMEIDNQSSEIEKLFEENSNLSASYQESINISNQWENQVKECLKQNVELREVLDKLRTEQAGSFSRGPSEFEANGSHGTDTLSLKGELAKEQSRAESLSAQVLQLSAQLQQATQAYNGLMRIYKPVLRNIESSLIKLKQDGSVTVAQ

SEQ ID NO: 83574 - protein, 313 aa, Arabidopsis thaliana
  peptide (1)..(313): Ceres Seq. ID no. 12670827
MEKDAAVVLREDLSAQVRTLKRRVNQAEEEQYRAEEDAASLRAELNSIQQQAMGNSFAGMSPMGVSPDQLPILEKEMANLKLELQKESVLRQQEQHRLAEEQTRVASLMSEKQELEQKISVLSSRASEVSESGQKVFSVEDKEKLEKQLHDMAVALERLESSRQKLLMEIDNQSSEIEKLFEENSNLSASYQESINISNQWENQVKECLKQNVELREVLDKLRTEQAGSFSRGPSEFEANGSHGTDTLSLKGELAKEQSRAESLSAQVLQLSAQLQQATQAYNGLMRIYKPVLRNIESSLIKLKQDGSVTVAQ

SEQ ID NO: 83575 - DNA, 561 bp, Arabidopsis thaliana
  misc_feature (1)..(561): Ceres Seq. ID no. 12670830
  misc_feature (1)..(561): Ortholog of  Ceres SEQ ID NO 12618538 as cited in SEQ ID NO 64474
atgttcaacaaaaaccaaggatccaacggtggttcatcttccaatgtcggcatcggagctgattcaccttaccttcaaaaggcacgttcaggcaaaacagagatcagagaactcgaagcagttttcaagaaattcgacgtgaacggagatggtaagatctcgtcaaaggaacttggtgcaataatgacgagtctaggtcatgaggtaccagaagaagaactagagaaagcgatcactgagatagatcgtaaaggagatggttacataaactttgaagagtttgtggagctgaacacgaaaggtatggatcaaaatgatgttttggagaatctgaaagatgcgttttcggtttacgatatcgatgggaatggttcgatatcggctgaggagttgcatgaggttttgaggagtcttggtgatgaatgttcgatcgcggagtgtaggaagatgattggtggtgttgataaagatggtgatggtacgattgattttgaagagtttaagattatgatgactatgggatctagacgtgataatgtcatgggaggtggtccgaggtag

SEQ ID NO: 83576 - protein, 186 aa, Arabidopsis thaliana
  peptide (1)..(186): Ceres Seq. ID no. 12670831
MFNKNQGSNGGSSSNVGIGADSPYLQKARSGKTEIRELEAVFKKFDVNGDGKISSKELGAIMTSLGHEVPEEELEKAITEIDRKGDGYINFEEFVELNTKGMDQNDVLENLKDAFSVYDIDGNGSISAEELHEVLRSLGDECSIAECRKMIGGVDKDGDGTIDFEEFKIMMTMGSRRDNVMGGGPR

SEQ ID NO: 83577 - protein, 125 aa, Arabidopsis thaliana
  peptide (1)..(125): Ceres Seq. ID no. 12670832
MTSLGHEVPEEELEKAITEIDRKGDGYINFEEFVELNTKGMDQNDVLENLKDAFSVYDIDGNGSISAEELHEVLRSLGDECSIAECRKMIGGVDKDGDGTIDFEEFKIMMTMGSRRDNVMGGGPR

SEQ ID NO: 83578 - DNA, 669 bp, Arabidopsis thaliana
  misc_feature (1)..(669): Ceres Seq. ID no. 12670837
  misc_feature (1)..(669): Ortholog of  Ceres SEQ ID NO 15224924 as cited in SEQ ID NO 64061
atggcagaatcgaattcgataccttccgttgttatcaattcctctaaacagaatggtcctatcatcgtgattgataattacgacagcttcacttacaatctctgccagtatatgggagagctacaatgccattttgaagtttaccgcaatgatgaacttacagtagaagagctgaaaagaaaaaatccaagaggagtgttgatttctcctggacctggtacccctcaagactctgggatttccttgcaaactgttttggaactcggaccacttgttcctttatttggagtatgtatgggtttgcagtgtataggagaagcatttggaggaaagattgtgcggtcaccatttggtgttatgcatgggaaaagctcaatggttcactatgatgagaaaggagaagaaggcttgttctctggattatcaaaccctttcattgtaggtagatatcacagtctcgtgatcgaaaaagatacatttcctagtgatgagctcgaggttacagcatggacagaagatggtctggttatggctgcccgtcacagaaagtacaagcatatacagggagttcaatttcatccggagagtattataacaactgagggcaagacaattgtccgcaatttcatcaaaatcgtagagaaaaaggattccgagaagctgacgtag

SEQ ID NO: 83579 - protein, 222 aa, Arabidopsis thaliana
  peptide (1)..(222): Ceres Seq. ID no. 12670838
MAESNSIPSVVINSSKQNGPIIVIDNYDSFTYNLCQYMGELQCHFEVYRNDELTVEELKRKNPRGVLISPGPGTPQDSGISLQTVLELGPLVPLFGVCMGLQCIGEAFGGKIVRSPFGVMHGKSSMVHYDEKGEEGLFSGLSNPFIVGRYHSLVIEKDTFPSDELEVTAWTEDGLVMAARHRKYKHIQGVQFHPESIITTEGKTIVRNFIKIVEKKDSEKLT

SEQ ID NO: 83580 - protein, 185 aa, Arabidopsis thaliana
  peptide (1)..(185): Ceres Seq. ID no. 12670839
MGELQCHFEVYRNDELTVEELKRKNPRGVLISPGPGTPQDSGISLQTVLELGPLVPLFGVCMGLQCIGEAFGGKIVRSPFGVMHGKSSMVHYDEKGEEGLFSGLSNPFIVGRYHSLVIEKDTFPSDELEVTAWTEDGLVMAARHRKYKHIQGVQFHPESIITTEGKTIVRNFIKIVEKKDSEKLT

SEQ ID NO: 83581 - protein, 124 aa, Arabidopsis thaliana
  peptide (1)..(124): Ceres Seq. ID no. 12670840
MGLQCIGEAFGGKIVRSPFGVMHGKSSMVHYDEKGEEGLFSGLSNPFIVGRYHSLVIEKDTFPSDELEVTAWTEDGLVMAARHRKYKHIQGVQFHPESIITTEGKTIVRNFIKIVEKKDSEKLT

SEQ ID NO: 83582 - DNA, 3738 bp, Arabidopsis thaliana
  misc_feature (1)..(3738): Ceres Seq. ID no. 12670845
  misc_feature (1)..(3738): Ortholog of  Ceres SEQ ID NO 15179695 as cited in SEQ ID NO 193
atggataacacagaaagatcctctaatggaaacatccaagccgagacggaagcaaaggaggagaagaaaaatataaagaaggaatcagtgtcattgatgggtttgtttagcgcagcagataaacttgattactttctcatgttgctaggaggtttaggtgcgtgtatacatggcgctacgcttcctctcttcttcgtgttcttcggaaaaatgctagattctcttggaaatctttctacagatcctaaagccatatcttcccgcgtttcacagaatgctctgtacttggtctacttaggattggtcaattttgtatcagcttggatcggagtttcttgttggatgcaaacaggggaaagacaaacagcacgattgcgtataaattatctcaaatcgatattagcaaaagacattactttctttgatactgaagctagagattcaaatctcatttttcacatatcaagcgatgctatcttggttcaagatgcaattggcgataagaccgaccatgttttgcggtatctatctcagtttatagcgggatttgtcattggttttttgtcggtatggcaactaacgctgctcacgttaggagtggttccactgatagctattgcaggaggagggtatgctatagtcatgtctacaatctcagagaagagtgagactgcttatgctgatgcaggaaaagtcgcagaagaggttatgtcacaggtgagaacagtgtatgcttttgtaggagaagagaaagctgtaaaatcttactcaaattctctcaagaaagctctgaaactcggtaaaaggagcggtcttgctaaaggtttaggagttggattaacatatagcctcttgttctgtgcttgggctttgcttttgtggtatgcaagtcttcttgtacgccacggcaaaaccaatggtgcaaaagccttcacaaccatcctcaatgtcattttcagtggattcgccttaggtcaagccgcacctagcttatccgcgattgctaagggtagagttgctgctgcaaacatattcagaatgatagggaacaacaattctgaaagttctcaaagattagacgagggaacaacattgcaaaatgtagctgggaggattgagtttcaaaaagtgtctttcgcatatccttctagaccaaacatggtttttgagaatcttagtttcacaatacggtcaggcaagacttttgcatttgtcggtccaagtggttcagggaaaagcacaatcatatcaatggttcaacgtttctatgaacctaactcaggggagattctcttagatggaaatgacatcaagagcctaaagcttaaatggtttagagaacagcttggattagtgagtcaagaaccagcattattcgccacaacaatagcttccaatattcttttaggtaaagagaatgcgaatatggatcagatcatagaagctgctaaagcagctaatgctgattctttcattaaatcattacctaatggttacaatactcaggttggagaaggaggaactcaactctcaggaggacagaaacagaggattgcaattgctcgagcagttctaagaaatccaaagatattacttttagatgaagcaacaagcgctcttgatgccgaatcagagaagattgttcagcaagcacttgacaatgtcatggaaaaaagaacaacaatcgtcgttgcacatagattatccaccattcgaaatgttgacaagattgttgtcttgagagatggtcaagttagggaaaccggaagccactcagaactcatgttaagaggaggagattatgcgactcttgtcaattgccaagagacagaacctcaagaaaactcgagatcaattatgtctgaaacttgtaaatctcaagctggatcttctagttcaagaagagtttctagctcaaggaggacttcaagcttcagggtagaccaagagaagactaaaaatgatgattccaaaaaagactttagctcttcttcgatgatatgggaacttataaagttgaattctccagaatggccatatgcattacttggctccattggtgcagtacttgctggagcacaaactccattgttctctatggggattgcttatgtgttaactgcattttattcgccttttcctaatgtgatcaagcgcgacgtagaaaaggtagctattatctttgctggagctggaatagtaactgcacctatatatcttctccaacattacttctatacactaatgggagagcgtcttacttctagggttcgcttatccttgttctcagcgattctttcaaatgagattggatggtttgatctggatgagaacaacactggctcacttacttcaatcttagctgctgatgcaactttggtgaggagtgctctagcggatcgcctctcgacaatagtccaaaacttgtctcttacagtcactgcattggcacttgcctttttctatagttggcgtgttgcagctgtggtaacggcttgtttccctcttctcattgcggcttcacttaccgagcaactatttttaaaaggctttggaggagattacacaagagcttactctagggcaacttcagtggcacgtgaagcgattgcaaatataagaactgtcgctgcatatggtgccgaaaagcagatctcggaacagtttacttgtgagctaagcaagcccaccaagaatgcctttgtcagaggtcatatctctggatttggatacggtttgtctcagtttcttgcgttctgttcctacgctcttggtctctggtacgtatcggttttgatcaatcataaggagacgaattttggggatagtatcaaatccttcatggtgttgatcgtcacagctttctcagtttcggaaacgcttgctttgaccccagatatcgtgaagggcacgcaagcactcgggtcagttttcagggttttacatagagagaccaagatatctccagaccagcctaactcaagaatggttagtcaagtcaaaggagatatagagtttagaaacgtgagttttgtgtatcccacaagacccgaaattgacattttcaaaaacctaaacctccgagtttcagccgggaaaagtcttgcggtcgtaggacctagtggttcgggaaagagcacggtgatcggactgatcatgagattctacgatccgagcaacggcaatctttgcatcgatgggcaagacataaaaaccctaaacttacgtagcttgcgcaagaagctagcgctagttcaacaagaaccggctctcttttcaacaaccatatacgaaaacattaagtatggcaatgaaaacgcatcggaggcagagatcatggaagctgcgaaagcggcgaatgcgcacgagttcattatcaagatggaagaagggtacaaaacgcacgcgggtgataagggagtacaattatcaggtgggcagaaacagagagtggctatcgcgagggcggttttaaaggacccttcagtgcttctccttgatgaggcaacaagtgctctggacacgagctcggagaaactagtccaagaggcgctagacaagctaatgaagggacgaacgacggtattggtggctcataggctgtcgaccataagaaaagcagatacggtcgctgtgttgcataagggaagggttgtagagaaaggaagtcatagagagcttgtttcaatacctaatgggttttataagcaattgacgagtcttcaagaagtactgtga

SEQ ID NO: 83583 - protein, 1245 aa, Arabidopsis thaliana
  peptide (1)..(1245): Ceres Seq. ID no. 12670846
MDNTERSSNGNIQAETEAKEEKKNIKKESVSLMGLFSAADKLDYFLMLLGGLGACIHGATLPLFFVFFGKMLDSLGNLSTDPKAISSRVSQNALYLVYLGLVNFVSAWIGVSCWMQTGERQTARLRINYLKSILAKDITFFDTEARDSNLIFHISSDAILVQDAIGDKTDHVLRYLSQFIAGFVIGFLSVWQLTLLTLGVVPLIAIAGGGYAIVMSTISEKSETAYADAGKVAEEVMSQVRTVYAFVGEEKAVKSYSNSLKKALKLGKRSGLAKGLGVGLTYSLLFCAWALLLWYASLLVRHGKTNGAKAFTTILNVIFSGFALGQAAPSLSAIAKGRVAAANIFRMIGNNNSESSQRLDEGTTLQNVAGRIEFQKVSFAYPSRPNMVFENLSFTIRSGKTFAFVGPSGSGKSTIISMVQRFYEPNSGEILLDGNDIKSLKLKWFREQLGLVSQEPALFATTIASNILLGKENANMDQIIEAAKAANADSFIKSLPNGYNTQVGEGGTQLSGGQKQRIAIARAVLRNPKILLLDEATSALDAESEKIVQQALDNVMEKRTTIVVAHRLSTIRNVDKIVVLRDGQVRETGSHSELMLRGGDYATLVNCQETEPQENSRSIMSETCKSQAGSSSSRRVSSSRRTSSFRVDQEKTKNDDSKKDFSSSSMIWELIKLNSPEWPYALLGSIGAVLAGAQTPLFSMGIAYVLTAFYSPFPNVIKRDVEKVAIIFAGAGIVTAPIYLLQHYFYTLMGERLTSRVRLSLFSAILSNEIGWFDLDENNTGSLTSILAADATLVRSALADRLSTIVQNLSLTVTALALAFFYSWRVAAVVTACFPLLIAASLTEQLFLKGFGGDYTRAYSRATSVAREAIANIRTVAAYGAEKQISEQFTCELSKPTKNAFVRGHISGFGYGLSQFLAFCSYALGLWYVSVLINHKETNFGDSIKSFMVLIVTAFSVSETLALTPDIVKGTQALGSVFRVLHRETKISPDQPNSRMVSQVKGDIEFRNVSFVYPTRPEIDIFKNLNLRVSAGKSLAVVGPSGSGKSTVIGLIMRFYDPSNGNLCIDGQDIKTLNLRSLRKKLALVQQEPALFSTTIYENIKYGNENASEAEIMEAAKAANAHEFIIKMEEGYKTHAGDKGVQLSGGQKQRVAIARAVLKDPSVLLLDEATSALDTSSEKLVQEALDKLMKGRTTVLVAHRLSTIRKADTVAVLHKGRVVEKGSHRELVSIPNGFYKQLTSLQEVL

SEQ ID NO: 83584 - protein, 1213 aa, Arabidopsis thaliana
  peptide (1)..(1213): Ceres Seq. ID no. 12670847
MGLFSAADKLDYFLMLLGGLGACIHGATLPLFFVFFGKMLDSLGNLSTDPKAISSRVSQNALYLVYLGLVNFVSAWIGVSCWMQTGERQTARLRINYLKSILAKDITFFDTEARDSNLIFHISSDAILVQDAIGDKTDHVLRYLSQFIAGFVIGFLSVWQLTLLTLGVVPLIAIAGGGYAIVMSTISEKSETAYADAGKVAEEVMSQVRTVYAFVGEEKAVKSYSNSLKKALKLGKRSGLAKGLGVGLTYSLLFCAWALLLWYASLLVRHGKTNGAKAFTTILNVIFSGFALGQAAPSLSAIAKGRVAAANIFRMIGNNNSESSQRLDEGTTLQNVAGRIEFQKVSFAYPSRPNMVFENLSFTIRSGKTFAFVGPSGSGKSTIISMVQRFYEPNSGEILLDGNDIKSLKLKWFREQLGLVSQEPALFATTIASNILLGKENANMDQIIEAAKAANADSFIKSLPNGYNTQVGEGGTQLSGGQKQRIAIARAVLRNPKILLLDEATSALDAESEKIVQQALDNVMEKRTTIVVAHRLSTIRNVDKIVVLRDGQVRETGSHSELMLRGGDYATLVNCQETEPQENSRSIMSETCKSQAGSSSSRRVSSSRRTSSFRVDQEKTKNDDSKKDFSSSSMIWELIKLNSPEWPYALLGSIGAVLAGAQTPLFSMGIAYVLTAFYSPFPNVIKRDVEKVAIIFAGAGIVTAPIYLLQHYFYTLMGERLTSRVRLSLFSAILSNEIGWFDLDENNTGSLTSILAADATLVRSALADRLSTIVQNLSLTVTALALAFFYSWRVAAVVTACFPLLIAASLTEQLFLKGFGGDYTRAYSRATSVAREAIANIRTVAAYGAEKQISEQFTCELSKPTKNAFVRGHISGFGYGLSQFLAFCSYALGLWYVSVLINHKETNFGDSIKSFMVLIVTAFSVSETLALTPDIVKGTQALGSVFRVLHRETKISPDQPNSRMVSQVKGDIEFRNVSFVYPTRPEIDIFKNLNLRVSAGKSLAVVGPSGSGKSTVIGLIMRFYDPSNGNLCIDGQDIKTLNLRSLRKKLALVQQEPALFSTTIYENIKYGNENASEAEIMEAAKAANAHEFIIKMEEGYKTHAGDKGVQLSGGQKQRVAIARAVLKDPSVLLLDEATSALDTSSEKLVQEALDKLMKGRTTVLVAHRLSTIRKADTVAVLHKGRVVEKGSHRELVSIPNGFYKQLTSLQEVL

SEQ ID NO: 83585 - protein, 1199 aa, Arabidopsis thaliana
  peptide (1)..(1199): Ceres Seq. ID no. 12670848
MLLGGLGACIHGATLPLFFVFFGKMLDSLGNLSTDPKAISSRVSQNALYLVYLGLVNFVSAWIGVSCWMQTGERQTARLRINYLKSILAKDITFFDTEARDSNLIFHISSDAILVQDAIGDKTDHVLRYLSQFIAGFVIGFLSVWQLTLLTLGVVPLIAIAGGGYAIVMSTISEKSETAYADAGKVAEEVMSQVRTVYAFVGEEKAVKSYSNSLKKALKLGKRSGLAKGLGVGLTYSLLFCAWALLLWYASLLVRHGKTNGAKAFTTILNVIFSGFALGQAAPSLSAIAKGRVAAANIFRMIGNNNSESSQRLDEGTTLQNVAGRIEFQKVSFAYPSRPNMVFENLSFTIRSGKTFAFVGPSGSGKSTIISMVQRFYEPNSGEILLDGNDIKSLKLKWFREQLGLVSQEPALFATTIASNILLGKENANMDQIIEAAKAANADSFIKSLPNGYNTQVGEGGTQLSGGQKQRIAIARAVLRNPKILLLDEATSALDAESEKIVQQALDNVMEKRTTIVVAHRLSTIRNVDKIVVLRDGQVRETGSHSELMLRGGDYATLVNCQETEPQENSRSIMSETCKSQAGSSSSRRVSSSRRTSSFRVDQEKTKNDDSKKDFSSSSMIWELIKLNSPEWPYALLGSIGAVLAGAQTPLFSMGIAYVLTAFYSPFPNVIKRDVEKVAIIFAGAGIVTAPIYLLQHYFYTLMGERLTSRVRLSLFSAILSNEIGWFDLDENNTGSLTSILAADATLVRSALADRLSTIVQNLSLTVTALALAFFYSWRVAAVVTACFPLLIAASLTEQLFLKGFGGDYTRAYSRATSVAREAIANIRTVAAYGAEKQISEQFTCELSKPTKNAFVRGHISGFGYGLSQFLAFCSYALGLWYVSVLINHKETNFGDSIKSFMVLIVTAFSVSETLALTPDIVKGTQALGSVFRVLHRETKISPDQPNSRMVSQVKGDIEFRNVSFVYPTRPEIDIFKNLNLRVSAGKSLAVVGPSGSGKSTVIGLIMRFYDPSNGNLCIDGQDIKTLNLRSLRKKLALVQQEPALFSTTIYENIKYGNENASEAEIMEAAKAANAHEFIIKMEEGYKTHAGDKGVQLSGGQKQRVAIARAVLKDPSVLLLDEATSALDTSSEKLVQEALDKLMKGRTTVLVAHRLSTIRKADTVAVLHKGRVVEKGSHRELVSIPNGFYKQLTSLQEVL

SEQ ID NO: 83586 - DNA, 531 bp, Arabidopsis thaliana
  misc_feature (1)..(531): Ceres Seq. ID no. 12670853
  misc_feature (1)..(531): Ortholog of  Ceres SEQ ID NO 13594241 as cited in SEQ ID NO 57394
atggcggatataacagaatatctagagagatcgatgcagaattgttcacttattgatcggagaagtagtatgggagatggatttggtatgagcgatgaacatatcccgatctcagatagattcttggagctcagttctcacttctctgttccttctcatttggaacagtgtcttgatcttaagacaggagagatttactacagaagctggaatagtggaatgagagtgaaagaagatccgagaaaatcgatgagtcgtggtaactatgcagaccaatccagtggtgaatcgtctggaacagttttttcatcagaagaagttagctcgtattatgaaagcgaagagtcttcatcagagtcgtctccttcatcaagaaagtatcacaaagaggaacaagacgaagatgttcttgtggtagctggttgcaaagcttgtttaatgtatttcatggtacctaaactctttaaggattgccccaaatgtgcaactcagcttctccactttgatcaacttcactctacttctccttga

SEQ ID NO: 83587 - protein, 176 aa, Arabidopsis thaliana
  peptide (1)..(176): Ceres Seq. ID no. 12670854
MADITEYLERSMQNCSLIDRRSSMGDGFGMSDEHIPISDRFLELSSHFSVPSHLEQCLDLKTGEIYYRSWNSGMRVKEDPRKSMSRGNYADQSSGESSGTVFSSEEVSSYYESEESSSESSPSSRKYHKEEQDEDVLVVAGCKACLMYFMVPKLFKDCPKCATQLLHFDQLHSTSP

SEQ ID NO: 83588 - protein, 165 aa, Arabidopsis thaliana
  peptide (1)..(165): Ceres Seq. ID no. 12670855
MQNCSLIDRRSSMGDGFGMSDEHIPISDRFLELSSHFSVPSHLEQCLDLKTGEIYYRSWNSGMRVKEDPRKSMSRGNYADQSSGESSGTVFSSEEVSSYYESEESSSESSPSSRKYHKEEQDEDVLVVAGCKACLMYFMVPKLFKDCPKCATQLLHFDQLHSTSP

SEQ ID NO: 83589 - protein, 153 aa, Arabidopsis thaliana
  peptide (1)..(153): Ceres Seq. ID no. 12670856
MGDGFGMSDEHIPISDRFLELSSHFSVPSHLEQCLDLKTGEIYYRSWNSGMRVKEDPRKSMSRGNYADQSSGESSGTVFSSEEVSSYYESEESSSESSPSSRKYHKEEQDEDVLVVAGCKACLMYFMVPKLFKDCPKCATQLLHFDQLHSTSP

SEQ ID NO: 83590 - DNA, 1547 bp, Arabidopsis thaliana
  misc_feature (1)..(1547): Ceres Seq. ID no. 12670864
  misc_feature (1)..(1547): Ortholog of  Ceres SEQ ID NO 13639663 as cited in SEQ ID NO 57850
caaaaacctctccgttttttcctctctgtttagctttgaattcacaagagtcatgcgaagattcaactgggttctgcggcatgtacaagctcgaagaacttttgattccgcgatcggattgcgtcaagggtctcagaagccgttgttcgagcgatacattcacgctacaggtataaacaactccagtgctcgtaattactatgatgttctcggtgtttctcctaaagctacacgggaggagattaaaaaatcatttcatgagcttgcgaaaaaattccaccctgatacaaatagaaataatccgtcagcaaaaaggaagttccaggaaataagagaggcatatgagaccctgggaaattcggaaagaagagaagaatatgataagctgcagtatcggaattcggattatgtaaataatgacggtggtgattcagagaggttcagacgtgcataccagtccaatttctcggatactttccacaagattttttctgagatatttgagaacaatcagataaaacctgatattcgggtggaactgtcgctttctctttccgaagctgcagaagggtgcacaaaacgtttgtcttttgatgcatatgtcttttgtgattcctgtgatgggcttggccaccctagcgatgctgccatgagcatttgtccaacatgcaggggggttggacgagtaactattcctccttttacagcatcatgccagacgtgcaaggggacgggacacattattaaggaatactgcatgtcttgtagaggatcaggtattgtggaaggcacaaagacagctgaacttgtgatccctggaggggtggagtctgaagctacaatcacaatcgtaggtgctggtaatgtaagttcaagaacaagtcaacctgggaacttgtatatcaaactaaaggttgctaatgattcaactttcactagggatggctcagatatatatgtggatgctaatattagctttacacaagctattttggggggcaaagttgtggtgccaacactttcaggcaagatacagctagatataccaaaggggactcagcctgatcaacttcttgttttaagaggcaaaggactaccgaagcaaggcttttttgtagatcatggagatcagtatgttcgcttccgcgttaactttcctactgaagtgaatgaacgtcagcgtgctatactggaagagtttgcaaaggaagaaatcaacaatgagttgagcgactctgctgaaggaagttggtggaatctaacgggtcctcagatcatccgcgacttctcgttaatggtgctgctggcgctattgttgagcaggttaatgggatgaagccaccacgagagatgaaagataaaagcattcaacagaagacaaatgaagactaatttcatctattgctggtagaacaaaaagctcaccagcataacagagagtgtcattgtttgacctcataattctattacaaactcatttgatgtgaataataagagacatcaaacaagttaagctgaaataaagaaaagaaaaaaaaaagtccttt

SEQ ID NO: 83591 - protein, 444 aa, Arabidopsis thaliana
  peptide (1)..(444): Ceres Seq. ID no. 12670865
KNLSVFSSLFSFEFTRVMRRFNWVLRHVQARRTFDSAIGLRQGSQKPLFERYIHATGINNSSARNYYDVLGVSPKATREEIKKSFHELAKKFHPDTNRNNPSAKRKFQEIREAYETLGNSERREEYDKLQYRNSDYVNNDGGDSERFRRAYQSNFSDTFHKIFSEIFENNQIKPDIRVELSLSLSEAAEGCTKRLSFDAYVFCDSCDGLGHPSDAAMSICPTCRGVGRVTIPPFTASCQTCKGTGHIIKEYCMSCRGSGIVEGTKTAELVIPGGVESEATITIVGAGNVSSRTSQPGNLYIKLKVANDSTFTRDGSDIYVDANISFTQAILGGKVVVPTLSGKIQLDIPKGTQPDQLLVLRGKGLPKQGFFVDHGDQYVRFRVNFPTEVNERQRAILEEFAKEEINNELSDSAEGSWWNLTGPQIIRDFSLMVLLALLLSRLMG

SEQ ID NO: 83592 - protein, 427 aa, Arabidopsis thaliana
  peptide (1)..(427): Ceres Seq. ID no. 12670866
MRRFNWVLRHVQARRTFDSAIGLRQGSQKPLFERYIHATGINNSSARNYYDVLGVSPKATREEIKKSFHELAKKFHPDTNRNNPSAKRKFQEIREAYETLGNSERREEYDKLQYRNSDYVNNDGGDSERFRRAYQSNFSDTFHKIFSEIFENNQIKPDIRVELSLSLSEAAEGCTKRLSFDAYVFCDSCDGLGHPSDAAMSICPTCRGVGRVTIPPFTASCQTCKGTGHIIKEYCMSCRGSGIVEGTKTAELVIPGGVESEATITIVGAGNVSSRTSQPGNLYIKLKVANDSTFTRDGSDIYVDANISFTQAILGGKVVVPTLSGKIQLDIPKGTQPDQLLVLRGKGLPKQGFFVDHGDQYVRFRVNFPTEVNERQRAILEEFAKEEINNELSDSAEGSWWNLTGPQIIRDFSLMVLLALLLSRLMG

SEQ ID NO: 83593 - protein, 228 aa, Arabidopsis thaliana
  peptide (1)..(228): Ceres Seq. ID no. 12670867
MSICPTCRGVGRVTIPPFTASCQTCKGTGHIIKEYCMSCRGSGIVEGTKTAELVIPGGVESEATITIVGAGNVSSRTSQPGNLYIKLKVANDSTFTRDGSDIYVDANISFTQAILGGKVVVPTLSGKIQLDIPKGTQPDQLLVLRGKGLPKQGFFVDHGDQYVRFRVNFPTEVNERQRAILEEFAKEEINNELSDSAEGSWWNLTGPQIIRDFSLMVLLALLLSRLMG

SEQ ID NO: 83594 - DNA, 519 bp, Arabidopsis thaliana
  misc_feature (1)..(519): Ceres Seq. ID no. 12670896
  misc_feature (1)..(519): Ortholog of  Ceres SEQ ID NO 15178260 as cited in SEQ ID NO 59907
atgaaagaaagtagccggaagcaaggagctgcgtcaccgtgtgctgcgtgtaagcttttgcggcggcggtgcgctcaagattgcgttttctcgccgtattttccggccgatgagcctcagaaatttgctaatgttcatagagtgttcggtgctagcaacgtcaacaagatgcttcaggaattaccaatccaccagcgaggggacgctgtgagcagcatggtttacgaggctaatgcaagagtgcgggatccggtttacggttgcgttggggcaatttcgtccctccagcaacagatagatgtgttgcaagctcagctagctctagctcaagctgaggtggtgcatctacgtgtacgccagtcgactaatttcccagggcacggactatgcccggatagtccgagtagcagcgggtcaccgtcttcgaagcaagtgagtccacaggacaacaagggcatgtttagccatatggacattgtggatgaagccagtttgggagagtctatgtggtcttgctag

SEQ ID NO: 83595 - protein, 172 aa, Arabidopsis thaliana
  peptide (1)..(172): Ceres Seq. ID no. 12670897
MKESSRKQGAASPCAACKLLRRRCAQDCVFSPYFPADEPQKFANVHRVFGASNVNKMLQELPIHQRGDAVSSMVYEANARVRDPVYGCVGAISSLQQQIDVLQAQLALAQAEVVHLRVRQSTNFPGHGLCPDSPSSSGSPSSKQVSPQDNKGMFSHMDIVDEASLGESMWSC

SEQ ID NO: 83596 - protein, 116 aa, Arabidopsis thaliana
  peptide (1)..(116): Ceres Seq. ID no. 12670898
MLQELPIHQRGDAVSSMVYEANARVRDPVYGCVGAISSLQQQIDVLQAQLALAQAEVVHLRVRQSTNFPGHGLCPDSPSSSGSPSSKQVSPQDNKGMFSHMDIVDEASLGESMWSC

SEQ ID NO: 83597 - protein, 100 aa, Arabidopsis thaliana
  peptide (1)..(100): Ceres Seq. ID no. 12670899
MVYEANARVRDPVYGCVGAISSLQQQIDVLQAQLALAQAEVVHLRVRQSTNFPGHGLCPDSPSSSGSPSSKQVSPQDNKGMFSHMDIVDEASLGESMWSC

SEQ ID NO: 83598 - DNA, 1564 bp, Arabidopsis thaliana
  misc_feature (1)..(1564): Ceres Seq. ID no. 12670956
  misc_feature (1)..(1564): Ortholog of  Ceres SEQ ID NO 15169199 as cited in SEQ ID NO 55297
  misc_feature (1)..(1564): Ortholog of  Ceres SEQ ID NO 15175690 as cited in SEQ ID NO 55466
  misc_feature (1)..(1564): Ortholog of  Ceres SEQ ID NO 14306381 as cited in SEQ ID NO 58812
gagaaaaaacagcaaagaaaatcagagagatcaaaaaaaagaaaaaaaagaacagagattcttttgaactaacgaagacatatcgtttctctaaagtagaatctttggtattcggaaaaatgtcgtttctgagtattgttcgtgatgttagagatactgtaggaagcttttcgagacgtagtttcgacgtgagagtatctaatgggacgactcatcagaggagtaaatctcacggtgttgaggcacatattgaagatcttattgtaatcaagaacactcgttgggctaatttaccggctgcgctattacgagatgtgatgaaaaagttggatgaaagcgagagtacttggcctgcacgtaaacaagtcgttgcttgtgctggtgtctgcaagacatggagactaatgtgcaaagatattgtgaaaagtcctgagttctcaggcaaactcacatttccagtttcgttgaaacagcccgggcctagggatggaatcatacaatgttatatcaaaagagacaagtctaacatgacttaccacctttacctttctcttagtcctgccatacttgttgaaagtgggaagtttcttctctcggcaaagcgctcacggagagctacatacacagagtatgtaatatcaatggatgcagacaacatttcaagatcaagcagcacttacattggcaaactgaagtctaactttctagggacaaaatttatagtatatgatacggctcctgcgtacaacagtagccagatattgtccccaccaaaccggagtcgtagtttcaactccaagaaagtgtctcccaaagtcccttctggaagttacaacattgctcaagttacatacgagctgaacttgcttggaacccgtggacctcgtagaatgaactgcattatgcactctatcccctccttagctctagaacccggaggtactgtccctagccaacctgagtttctacaacgttcccttgatgaatctttccgcagcatcggttcctcaaagatagtcaaccactcgggagatttcacccgaccgaaagaggaagaaggaaaggtgcgacctttggtactgaaaactaaaccgccaaggtggctccaaccgttgcgatgttggtgccttaacttcaaagggagagtgactgtagcttctgtcaagaacttccagttgatgtccgctgcaacggttcagcccggtagtggtagtgatggtggagcattggctacgaggccatcgttatcaccacagcagccagagcaatcaaaccatgataagataatactacactttgggaaagtgggtaaggatatgttcactatggactatcgttatcctctctctgcctttcaagcgtttgccatttccctgagcacctttgatactaaattggcatgtgaataaaagtagaaagatcataagagggacttaaaactaataggaaccgtttacgatatgcgagggtttgtttgtttttgtttatctgtctgatctggtgtgttagtgaatgtgaacttttgtggttgtttatcttcgaaaagaaaaaataagtgttggtg

SEQ ID NO: 83599 - protein, 468 aa, Arabidopsis thaliana
  peptide (1)..(468): Ceres Seq. ID no. 12670957
EKTAKKIREIKKKKKKNRDSFELTKTYRFSKVESLVFGKMSFLSIVRDVRDTVGSFSRRSFDVRVSNGTTHQRSKSHGVEAHIEDLIVIKNTRWANLPAALLRDVMKKLDESESTWPARKQVVACAGVCKTWRLMCKDIVKSPEFSGKLTFPVSLKQPGPRDGIIQCYIKRDKSNMTYHLYLSLSPAILVESGKFLLSAKRSRRATYTEYVISMDADNISRSSSTYIGKLKSNFLGTKFIVYDTAPAYNSSQILSPPNRSRSFNSKKVSPKVPSGSYNIAQVTYELNLLGTRGPRRMNCIMHSIPSLALEPGGTVPSQPEFLQRSLDESFRSIGSSKIVNHSGDFTRPKEEEGKVRPLVLKTKPPRWLQPLRCWCLNFKGRVTVASVKNFQLMSAATVQPGSGSDGGALATRPSLSPQQPEQSNHDKIILHFGKVGKDMFTMDYRYPLSAFQAFAISLSTFDTKLACE

SEQ ID NO: 83600 - protein, 429 aa, Arabidopsis thaliana
  peptide (1)..(429): Ceres Seq. ID no. 12670958
MSFLSIVRDVRDTVGSFSRRSFDVRVSNGTTHQRSKSHGVEAHIEDLIVIKNTRWANLPAALLRDVMKKLDESESTWPARKQVVACAGVCKTWRLMCKDIVKSPEFSGKLTFPVSLKQPGPRDGIIQCYIKRDKSNMTYHLYLSLSPAILVESGKFLLSAKRSRRATYTEYVISMDADNISRSSSTYIGKLKSNFLGTKFIVYDTAPAYNSSQILSPPNRSRSFNSKKVSPKVPSGSYNIAQVTYELNLLGTRGPRRMNCIMHSIPSLALEPGGTVPSQPEFLQRSLDESFRSIGSSKIVNHSGDFTRPKEEEGKVRPLVLKTKPPRWLQPLRCWCLNFKGRVTVASVKNFQLMSAATVQPGSGSDGGALATRPSLSPQQPEQSNHDKIILHFGKVGKDMFTMDYRYPLSAFQAFAISLSTFDTKLACE

SEQ ID NO: 83601 - protein, 363 aa, Arabidopsis thaliana
  peptide (1)..(363): Ceres Seq. ID no. 12670959
MKKLDESESTWPARKQVVACAGVCKTWRLMCKDIVKSPEFSGKLTFPVSLKQPGPRDGIIQCYIKRDKSNMTYHLYLSLSPAILVESGKFLLSAKRSRRATYTEYVISMDADNISRSSSTYIGKLKSNFLGTKFIVYDTAPAYNSSQILSPPNRSRSFNSKKVSPKVPSGSYNIAQVTYELNLLGTRGPRRMNCIMHSIPSLALEPGGTVPSQPEFLQRSLDESFRSIGSSKIVNHSGDFTRPKEEEGKVRPLVLKTKPPRWLQPLRCWCLNFKGRVTVASVKNFQLMSAATVQPGSGSDGGALATRPSLSPQQPEQSNHDKIILHFGKVGKDMFTMDYRYPLSAFQAFAISLSTFDTKLACE

SEQ ID NO: 83602 - DNA, 1383 bp, Arabidopsis thaliana
  misc_feature (1)..(1383): Ceres Seq. ID no. 12670978
  misc_feature (1)..(1383): Ortholog of  Ceres SEQ ID NO 15177414 as cited in SEQ ID NO 57242
  misc_feature (1)..(1383): Ortholog of  Ceres SEQ ID NO 13594151 as cited in SEQ ID NO 58886
atgtcgaacattcttcagaatcggcgatcttcgttttcctcttcgacgaaatcttcattagcgaagcgtcaagcaccatcttcatcggagaattctgttaaacttatgccggcgatgacgaagaaacgagcaccgttaagtaacattaccaatcaaaaaatcgcctcacgattacaaaattctgattcggtacattgttcaaacaagtcagcgaaattgaagatagcaccaagtgtttgcgttaatgccagtttctctagcaatctgcaacaaagcatagttcctcacaaagttgcttcttcacctagcaaatctgatgatggctcagtatcaatggacgagactaggtcttcaagtgattcctacaagagtcctcaagttgagtatatcgaaaacgacgacgtttcggctgttgtttcgattgagaggaaagctttgagtaatctgttcataacgccgaattcagaaacaattgataattattgtagtagagatgtgttatctgatatgaagaaaatggataagaatcagattgttaacattgatagtaacaatggtgatcctcagctttgtgctacgtttgcttgtgacatttataagcatcttcgtgcttctgaggctaagaagcgacctgatgttgattacatggagagagttcagaaagatgtgaattcgagtatgcgtggaatcttagttgattggcttattgaggtgtctgaagagtataggcttgtaccggagacgttgtatttgactgtgaactatatagataggtatttatctgggaatgtgattagtagacagaaacttcagttgcttggtgtggcttgtatgatgatagcagcgaaatatgaagagatatgtgctccacaagttgaggagttttgttacattactgataatacatatctcaaagatgaagttcttgatatggaatctgatgttctgaattacttgaagtttgaaatgactgcaccaactacgaaatgttttctaagacgctttgttcgagctgctcatggtgttcatgaagctccattgatgcagctagaatgtatggctaactacattgcggaattatcgctactagagtacactatgctctctcattctccttcactagtagctgcttccgccattttcttggctaagtacattctagacccaacaagacgaccatggaactcgacgttgcaacactatacgcaatataaagcgatggagttgagaggatgtgtgaaggatcttcaacgattgtgtagtactgctcacggctctacactacctgctgttagagagaagtatagtcaacacaaatacaagtttgtggcgaagaagttttgtccatccgtaatcccacaagagttcttcaacaacagctaa

SEQ ID NO: 83603 - protein, 460 aa, Arabidopsis thaliana
  peptide (1)..(460): Ceres Seq. ID no. 12670979
MSNILQNRRSSFSSSTKSSLAKRQAPSSSENSVKLMPAMTKKRAPLSNITNQKIASRLQNSDSVHCSNKSAKLKIAPSVCVNASFSSNLQQSIVPHKVASSPSKSDDGSVSMDETRSSSDSYKSPQVEYIENDDVSAVVSIERKALSNLFITPNSETIDNYCSRDVLSDMKKMDKNQIVNIDSNNGDPQLCATFACDIYKHLRASEAKKRPDVDYMERVQKDVNSSMRGILVDWLIEVSEEYRLVPETLYLTVNYIDRYLSGNVISRQKLQLLGVACMMIAAKYEEICAPQVEEFCYITDNTYLKDEVLDMESDVLNYLKFEMTAPTTKCFLRRFVRAAHGVHEAPLMQLECMANYIAELSLLEYTMLSHSPSLVAASAIFLAKYILDPTRRPWNSTLQHYTQYKAMELRGCVKDLQRLCSTAHGSTLPAVREKYSQHKYKFVAKKFCPSVIPQEFFNNS

SEQ ID NO: 83604 - protein, 425 aa, Arabidopsis thaliana
  peptide (1)..(425): Ceres Seq. ID no. 12670980
MPAMTKKRAPLSNITNQKIASRLQNSDSVHCSNKSAKLKIAPSVCVNASFSSNLQQSIVPHKVASSPSKSDDGSVSMDETRSSSDSYKSPQVEYIENDDVSAVVSIERKALSNLFITPNSETIDNYCSRDVLSDMKKMDKNQIVNIDSNNGDPQLCATFACDIYKHLRASEAKKRPDVDYMERVQKDVNSSMRGILVDWLIEVSEEYRLVPETLYLTVNYIDRYLSGNVISRQKLQLLGVACMMIAAKYEEICAPQVEEFCYITDNTYLKDEVLDMESDVLNYLKFEMTAPTTKCFLRRFVRAAHGVHEAPLMQLECMANYIAELSLLEYTMLSHSPSLVAASAIFLAKYILDPTRRPWNSTLQHYTQYKAMELRGCVKDLQRLCSTAHGSTLPAVREKYSQHKYKFVAKKFCPSVIPQEFFNNS

SEQ ID NO: 83605 - protein, 422 aa, Arabidopsis thaliana
  peptide (1)..(422): Ceres Seq. ID no. 12670981
MTKKRAPLSNITNQKIASRLQNSDSVHCSNKSAKLKIAPSVCVNASFSSNLQQSIVPHKVASSPSKSDDGSVSMDETRSSSDSYKSPQVEYIENDDVSAVVSIERKALSNLFITPNSETIDNYCSRDVLSDMKKMDKNQIVNIDSNNGDPQLCATFACDIYKHLRASEAKKRPDVDYMERVQKDVNSSMRGILVDWLIEVSEEYRLVPETLYLTVNYIDRYLSGNVISRQKLQLLGVACMMIAAKYEEICAPQVEEFCYITDNTYLKDEVLDMESDVLNYLKFEMTAPTTKCFLRRFVRAAHGVHEAPLMQLECMANYIAELSLLEYTMLSHSPSLVAASAIFLAKYILDPTRRPWNSTLQHYTQYKAMELRGCVKDLQRLCSTAHGSTLPAVREKYSQHKYKFVAKKFCPSVIPQEFFNNS

SEQ ID NO: 83606 - DNA, 1372 bp, Arabidopsis thaliana
  misc_feature (1)..(1372): Ceres Seq. ID no. 12670982
  misc_feature (1)..(1372): Ortholog of  Ceres SEQ ID NO 13582332 as cited in SEQ ID NO 59890
  misc_feature (1)..(1372): Ortholog of  Ceres SEQ ID NO 13598278 as cited in SEQ ID NO 68456
aatctctctctttttacaccggcgataattttccgatcccgattataagatggcgaaggaaccagttcgtgttcttgttaccggagctgcaggtaatcaagaaccaatcttggtgaaagaagagagtgtggttggtataccaacaccactcttgaagcttaaaagttggcaatggtgggttcttgtatccgttaacatctttttccttattggtggtcaagctgcttcggttcttcttggtaggttttactatgatgaaggtggaaacagtaaatggatggcaactcttgttcaaacggctgcttttcctatactctatatcccgcttttgctacttccgtcttcggctagtgtagagtcttcggagagttcgtgttcactcaagtacattgttttgatctatgttttgctcggtgtgatcattgctggagataatatgttatactctgttggacttttgtacctctctgcatcgacgtattcgctcatttgcgctactcagttagctttcaacgcggtgttctcttatttcatcaatgctcagaagttcactgctttgattctcaactccgttgttctcttgtcgttctccgctgctttgatagctctcaatgatgatgcggatactccttctggtgtctccaggtctaagtatattgttgggtttgtgtgtacacttgctgcgtctgctctctattctctgttgctatctcttatgcagttctcgttcgagaagattctgaagagggagacgttttctgtggttcttgaaatgcaaatctacacttctttagtggcgacttgtgtttcggttatagggctttttgctagcggggaatggagaacgctgcatggggaaatggaaggttatcataaagggcaagcctcttatgtactgaccttggtctggacagcagttacttggcaagtgtgttctgttggagtcgtgggtttgatatttctggtgacgtcgctcttctcaaacgtcattagtacgctctctctagctgtgactccactagcagctttggttgtgttccgtgataaaatgagtggtgttaagattatggcaatgctgatcgctatttggggtttcgcttcttatgtttaccagaatcatattgatgacttgaaagtaagacaagcacgacaacaagctcaagccgggcgggtagaaccgccctgttgattctgcgatgattcaggcagaaacattaatttagaaggctatacgttctgtttagataagcaacaataattgtcactcgtaggacaagctactggtcttgccatattgtttctgaaatcaaatgtgtcgtacgaatgtatgatcaagtctaatatactggtaggtaaatggaacttcgtgaat

SEQ ID NO: 83607 - protein, 379 aa, Arabidopsis thaliana
  peptide (1)..(379): Ceres Seq. ID no. 12670983
MAKEPVRVLVTGAAGNQEPILVKEESVVGIPTPLLKLKSWQWWVLVSVNIFFLIGGQAASVLLGRFYYDEGGNSKWMATLVQTAAFPILYIPLLLLPSSASVESSESSCSLKYIVLIYVLLGVIIAGDNMLYSVGLLYLSASTYSLICATQLAFNAVFSYFINAQKFTALILNSVVLLSFSAALIALNDDADTPSGVSRSKYIVGFVCTLAASALYSLLLSLMQFSFEKILKRETFSVVLEMQIYTSLVATCVSVIGLFASGEWRTLHGEMEGYHKGQASYVLTLVWTAVTWQVCSVGVVGLIFLVTSLFSNVISTLSLAVTPLAALVVFRDKMSGVKIMAMLIAIWGFASYVYQNHIDDLKVRQARQQAQAGRVEPPC

SEQ ID NO: 83608 - protein, 303 aa, Arabidopsis thaliana
  peptide (1)..(303): Ceres Seq. ID no. 12670984
MATLVQTAAFPILYIPLLLLPSSASVESSESSCSLKYIVLIYVLLGVIIAGDNMLYSVGLLYLSASTYSLICATQLAFNAVFSYFINAQKFTALILNSVVLLSFSAALIALNDDADTPSGVSRSKYIVGFVCTLAASALYSLLLSLMQFSFEKILKRETFSVVLEMQIYTSLVATCVSVIGLFASGEWRTLHGEMEGYHKGQASYVLTLVWTAVTWQVCSVGVVGLIFLVTSLFSNVISTLSLAVTPLAALVVFRDKMSGVKIMAMLIAIWGFASYVYQNHIDDLKVRQARQQAQAGRVEPPC

SEQ ID NO: 83609 - protein, 250 aa, Arabidopsis thaliana
  peptide (1)..(250): Ceres Seq. ID no. 12670985
MLYSVGLLYLSASTYSLICATQLAFNAVFSYFINAQKFTALILNSVVLLSFSAALIALNDDADTPSGVSRSKYIVGFVCTLAASALYSLLLSLMQFSFEKILKRETFSVVLEMQIYTSLVATCVSVIGLFASGEWRTLHGEMEGYHKGQASYVLTLVWTAVTWQVCSVGVVGLIFLVTSLFSNVISTLSLAVTPLAALVVFRDKMSGVKIMAMLIAIWGFASYVYQNHIDDLKVRQARQQAQAGRVEPPC

SEQ ID NO: 83610 - DNA, 2239 bp, Arabidopsis thaliana
  misc_feature (1)..(2239): Ceres Seq. ID no. 12671015
  misc_feature (1)..(2239): Ortholog of  Ceres SEQ ID NO 13598865 as cited in SEQ ID NO 0
atcttatctacttcactttttgattacaaaaaccaaacaaacaaacaacaaaccagaagttttatttttgttaaagagtaaccaaaaaaaaaaaacagagtaccttcttcttcacacacataaaaagagacggtaccaaaaaataaaaacagagcaaaccacaaaaatggggaagcatttattccgatcatctcctccaccggagaaaccaacagctcatctctctctcgcggaatcagctgttcaagaatgtatgagcaacatcaacaccgtcatatcaaaatggacttctccggctgcttcttcctccgacgacttcctcttctccaccaacagtcgtcgtgaagcagaggagtttgttacagccgttagacatctacaaagcacgatgcatcgtttggtttccgttaacccttcctcggagaagctaatctacgcacagaatctaatgcaatcggcgatgaagcttctcgaatcagagtttcatcgtgttttaaaagcgaaccgtgagtatttagatcctgaatgtgtctctgtacgttcttacagatcatcgagattcagtacttcgactacgactagtgtctccgattccgaagacgaaagcagttacgaagaaaacgccgacgaagagcatagattctccggtggagattccgacgcaatggatgatctcaagatgattgctgattgtatgatctctaccggctacgctaaggaatgcgttagggtttataaaaccgtacggaaatcgattgttgatgagacgctgcataatctgcaaatggagagattcaatcttcatcaggttcagaaaatggattgggagattctcgaatcaaagatcaaaacatggctaaaagctgtgaaattagctgttagaaaattgttcttcggtgagaggattttagctgatcatgttttctcttcctctggtttaatcgttgaatcttctttcactgagattactcaagaaggagcattgattctcttcactttcccggaatatgcttccaagatcaaaaagttaactccggagaaaatgtttcggtttctggatatgtatgaagctcttgcgaatctctatgttgagattgaatcaatcttctacttcgaatcagctgctgcggttagatctcaggtgataaactcgttagctagactcggcgatgcgacgaggttgatgatgacggatttcgaatcggcgattcagaaagaaacctcgaagactccgatcatcggtggtggtgttcatcctctgactcgttacgttatgaattacctctccttcctcgctgattacagtgattccatcgctgcgatattcgaaaactggaagctgagtgtgccgacgccgttgccggattctttatacataagcggcggcgatgaagcgaatccggaggatctgtattcgtctccggtctctgtacgtatcgcttgggtgattttactcacgctttgtaaaatcgacggtaaagctcagccgtataaagacgttgctttgtcttatctcttcctcgctaacaatctccaatacgtcgtcgttaaagtccgatcgtcgactctgaaggttcttctcggagacgattgggtgtttaggcatgaagagaaggtgaagctgtatgctgataagtttgagaagcttgcgtgggggaaagtgctggatttactaccggagattccgacggatgagatttcgccggaggaagctaaggttttggtggcgagattcaacgatgagtttgagacgtcgtaccggaaacagacttcgtgggttatacccgacccgaaacttagggaccagattaaaatcacgttgagtcagaaacttatgctggtttgtaccgagttttaccggatgaaccggtttgcatatggtatggttggagataatgaggctatttccagatatacccctgaagatattgggaattacctctcggatctttactttgggtctagaggctcagggagtgtttcgacagctggtgggtctggatccggatccggatccggaactggttcgtcgagtacgggtaaagctcgtggcggacgtagtagtcattgaatgagaatctcgtgatattagttttttttttttcttttctttaatttgtgtggttataatgtaacctatagtgattgatgtgtcgaatatcttattcaattatgtgtgtacagatatatgttgaattattgagctcttcttttcttaaaagcaaatcattcgattact

SEQ ID NO: 83611 - protein, 689 aa, Arabidopsis thaliana
  peptide (1)..(689): Ceres Seq. ID no. 12671016
SYLLHFLITKTKQTNNKPEVLFLLKSNQKKKTEYLLLHTHKKRRYQKIKTEQTTKMGKHLFRSSPPPEKPTAHLSLAESAVQECMSNINTVISKWTSPAASSSDDFLFSTNSRREAEEFVTAVRHLQSTMHRLVSVNPSSEKLIYAQNLMQSAMKLLESEFHRVLKANREYLDPECVSVRSYRSSRFSTSTTTSVSDSEDESSYEENADEEHRFSGGDSDAMDDLKMIADCMISTGYAKECVRVYKTVRKSIVDETLHNLQMERFNLHQVQKMDWEILESKIKTWLKAVKLAVRKLFFGERILADHVFSSSGLIVESSFTEITQEGALILFTFPEYASKIKKLTPEKMFRFLDMYEALANLYVEIESIFYFESAAAVRSQVINSLARLGDATRLMMTDFESAIQKETSKTPIIGGGVHPLTRYVMNYLSFLADYSDSIAAIFENWKLSVPTPLPDSLYISGGDEANPEDLYSSPVSVRIAWVILLTLCKIDGKAQPYKDVALSYLFLANNLQYVVVKVRSSTLKVLLGDDWVFRHEEKVKLYADKFEKLAWGKVLDLLPEIPTDEISPEEAKVLVARFNDEFETSYRKQTSWVIPDPKLRDQIKITLSQKLMLVCTEFYRMNRFAYGMVGDNEAISRYTPEDIGNYLSDLYFGSRGSGSVSTAGGSGSGSGSGTGSSSTGKARGGRSSH

SEQ ID NO: 83612 - protein, 634 aa, Arabidopsis thaliana
  peptide (1)..(634): Ceres Seq. ID no. 12671017
MGKHLFRSSPPPEKPTAHLSLAESAVQECMSNINTVISKWTSPAASSSDDFLFSTNSRREAEEFVTAVRHLQSTMHRLVSVNPSSEKLIYAQNLMQSAMKLLESEFHRVLKANREYLDPECVSVRSYRSSRFSTSTTTSVSDSEDESSYEENADEEHRFSGGDSDAMDDLKMIADCMISTGYAKECVRVYKTVRKSIVDETLHNLQMERFNLHQVQKMDWEILESKIKTWLKAVKLAVRKLFFGERILADHVFSSSGLIVESSFTEITQEGALILFTFPEYASKIKKLTPEKMFRFLDMYEALANLYVEIESIFYFESAAAVRSQVINSLARLGDATRLMMTDFESAIQKETSKTPIIGGGVHPLTRYVMNYLSFLADYSDSIAAIFENWKLSVPTPLPDSLYISGGDEANPEDLYSSPVSVRIAWVILLTLCKIDGKAQPYKDVALSYLFLANNLQYVVVKVRSSTLKVLLGDDWVFRHEEKVKLYADKFEKLAWGKVLDLLPEIPTDEISPEEAKVLVARFNDEFETSYRKQTSWVIPDPKLRDQIKITLSQKLMLVCTEFYRMNRFAYGMVGDNEAISRYTPEDIGNYLSDLYFGSRGSGSVSTAGGSGSGSGSGTGSSSTGKARGGRSSH

SEQ ID NO: 83613 - protein, 605 aa, Arabidopsis thaliana
  peptide (1)..(605): Ceres Seq. ID no. 12671018
MSNINTVISKWTSPAASSSDDFLFSTNSRREAEEFVTAVRHLQSTMHRLVSVNPSSEKLIYAQNLMQSAMKLLESEFHRVLKANREYLDPECVSVRSYRSSRFSTSTTTSVSDSEDESSYEENADEEHRFSGGDSDAMDDLKMIADCMISTGYAKECVRVYKTVRKSIVDETLHNLQMERFNLHQVQKMDWEILESKIKTWLKAVKLAVRKLFFGERILADHVFSSSGLIVESSFTEITQEGALILFTFPEYASKIKKLTPEKMFRFLDMYEALANLYVEIESIFYFESAAAVRSQVINSLARLGDATRLMMTDFESAIQKETSKTPIIGGGVHPLTRYVMNYLSFLADYSDSIAAIFENWKLSVPTPLPDSLYISGGDEANPEDLYSSPVSVRIAWVILLTLCKIDGKAQPYKDVALSYLFLANNLQYVVVKVRSSTLKVLLGDDWVFRHEEKVKLYADKFEKLAWGKVLDLLPEIPTDEISPEEAKVLVARFNDEFETSYRKQTSWVIPDPKLRDQIKITLSQKLMLVCTEFYRMNRFAYGMVGDNEAISRYTPEDIGNYLSDLYFGSRGSGSVSTAGGSGSGSGSGTGSSSTGKARGGRSSH

SEQ ID NO: 83614 - DNA, 1494 bp, Arabidopsis thaliana
  misc_feature (1)..(1494): Ceres Seq. ID no. 12671019
  misc_feature (1)..(1494): Ortholog of  Ceres SEQ ID NO 15169627 as cited in SEQ ID NO 64517
  misc_feature (1)..(1494): Ortholog of  Ceres SEQ ID NO 14307952 as cited in SEQ ID NO 66029
atggcgacatggtttcacatcttctgcgtctctttcacagtcaacttccttctatatctcttcttccgcagaactaacaacaatcttcctctacctccgaaccctaacttcttccccatgcctggtcccttccagtggctccgtcaaggcttcgatgatttctactcctatctccgctccatccaccaccgtctcggcccaatcatctctctccgcatcttttccgtccctgccatcttcgtctctgatcgttccttggctcacaaggctcttgttttaaacggcgccgtattctctgatcgtccaccggcgcttcctaccggaaagatcatcactagtaaccaacacaccatcagctcaggatcatacggagctacgtggcgacttctccgtcgtaatctcacctccgagattcttcatccatcccgtgtcaaatcttattccaacgctcgtcgctctgttcttgaaaacctctgttctcgaattcgtaatcacggggaagaagcaaaaccgatcgtcgtcgttgatcatctccgttatgcaatgttctcgcttcttgttctcatgtgtttcggagataagcttgacgaagaacagatcaaacaagtcgaattcgttcaaagaagagagctcatcacgttaccaagattcaacatcctcaatgtcttccctagtttcaccaagttgtttctgagaaagagatgggaagagtttcttacgttcaggagagaacacaagaacgtcttgcttccgttgattcgttcccggagaaagatcatgatcgaatctaaagattccggtaaagaatacatacaatcgtatgtagatactctgctcgatcttgagcttcctgatgagaagaggaaactaaacgaagacgagatcgtgagtttatgctctgagtttctcaacgccgggactgatacaacagcgacgacacttcaatggataatggcgaatcttgtaatcggtgaagaagaagagaaggagattgaagaagaagagatgaagaagatgccgtatcttaaagctgtcgtgttagaaggtctccggttacatccaccgggacatttgttgttaccacacagagtaagtgaagacactgagctaggaggatacagagttccaaagaaagggacgtttaatatcaatgtggcgatgatagggagagatccaacagtgtgggaggagccaatggagtttaagccggagagattcatcggagaagataaagaagttgatgttactggaagtagagggataaagatgatgccgtttggagcaggaaggaggatctgtccagggattggatcggccatgttgcatttggagtattttgtggtgaatttggttaaagagtttgagtggaaagaagttgaaggttatgaagttgacttgtctgagaaatgggagttcactgttgttatgaagtatcctcttaaagctcttgctgtgacaagaaggaaggagaagacacatatcgtcatggcttag

SEQ ID NO: 83615 - protein, 497 aa, Arabidopsis thaliana
  peptide (1)..(497): Ceres Seq. ID no. 12671020
MATWFHIFCVSFTVNFLLYLFFRRTNNNLPLPPNPNFFPMPGPFQWLRQGFDDFYSYLRSIHHRLGPIISLRIFSVPAIFVSDRSLAHKALVLNGAVFSDRPPALPTGKIITSNQHTISSGSYGATWRLLRRNLTSEILHPSRVKSYSNARRSVLENLCSRIRNHGEEAKPIVVVDHLRYAMFSLLVLMCFGDKLDEEQIKQVEFVQRRELITLPRFNILNVFPSFTKLFLRKRWEEFLTFRREHKNVLLPLIRSRRKIMIESKDSGKEYIQSYVDTLLDLELPDEKRKLNEDEIVSLCSEFLNAGTDTTATTLQWIMANLVIGEEEEKEIEEEEMKKMPYLKAVVLEGLRLHPPGHLLLPHRVSEDTELGGYRVPKKGTFNINVAMIGRDPTVWEEPMEFKPERFIGEDKEVDVTGSRGIKMMPFGAGRRICPGIGSAMLHLEYFVVNLVKEFEWKEVEGYEVDLSEKWEFTVVMKYPLKALAVTRRKEKTHIVMA

SEQ ID NO: 83616 - protein, 458 aa, Arabidopsis thaliana
  peptide (1)..(458): Ceres Seq. ID no. 12671021
MPGPFQWLRQGFDDFYSYLRSIHHRLGPIISLRIFSVPAIFVSDRSLAHKALVLNGAVFSDRPPALPTGKIITSNQHTISSGSYGATWRLLRRNLTSEILHPSRVKSYSNARRSVLENLCSRIRNHGEEAKPIVVVDHLRYAMFSLLVLMCFGDKLDEEQIKQVEFVQRRELITLPRFNILNVFPSFTKLFLRKRWEEFLTFRREHKNVLLPLIRSRRKIMIESKDSGKEYIQSYVDTLLDLELPDEKRKLNEDEIVSLCSEFLNAGTDTTATTLQWIMANLVIGEEEEKEIEEEEMKKMPYLKAVVLEGLRLHPPGHLLLPHRVSEDTELGGYRVPKKGTFNINVAMIGRDPTVWEEPMEFKPERFIGEDKEVDVTGSRGIKMMPFGAGRRICPGIGSAMLHLEYFVVNLVKEFEWKEVEGYEVDLSEKWEFTVVMKYPLKALAVTRRKEKTHIVMA

SEQ ID NO: 83617 - protein, 316 aa, Arabidopsis thaliana
  peptide (1)..(316): Ceres Seq. ID no. 12671022
MFSLLVLMCFGDKLDEEQIKQVEFVQRRELITLPRFNILNVFPSFTKLFLRKRWEEFLTFRREHKNVLLPLIRSRRKIMIESKDSGKEYIQSYVDTLLDLELPDEKRKLNEDEIVSLCSEFLNAGTDTTATTLQWIMANLVIGEEEEKEIEEEEMKKMPYLKAVVLEGLRLHPPGHLLLPHRVSEDTELGGYRVPKKGTFNINVAMIGRDPTVWEEPMEFKPERFIGEDKEVDVTGSRGIKMMPFGAGRRICPGIGSAMLHLEYFVVNLVKEFEWKEVEGYEVDLSEKWEFTVVMKYPLKALAVTRRKEKTHIVMA

SEQ ID NO: 83618 - DNA, 1965 bp, Arabidopsis thaliana
  misc_feature (1)..(1965): Ceres Seq. ID no. 12671023
  misc_feature (1)..(1965): Ortholog of  Ceres SEQ ID NO 13657677 as cited in SEQ ID NO 66119
atgttgaagcttctgcttccccaacatagaacatcagtttacttgttcaagtttcaatttttcaactttagattcttatctcaatctccttctctgtcaaattcggcatcttctttctcttcttcgagtctggctgaagcaatactgaaatgcagatcagcggaagaagcgttcaagctgttcgaaacgtcttcgagatctcgagtctccaagtcaaacgatcttcaatctttttcggcagtgattcatgttttaaccggagctcacaagtatacgctcgccagatgtttgataaaaagcctcatagaacgtctgaaacgccacagtgagccgagtaacatgtctcatagacttttcaatgctctggaagatattcagagtccaaaattcagtatcggagtgtttagtctattgattatggagtttctggagatgggtttgtttgaagaagctctttgggtgagtcgagagatgaaatgttcaccggattcaaaagcttgtctttcgattttgaatggcttggttagaaggagacggtttgattcagtttgggttgattaccaacttatgatctctcgtgggttggtccctgatgtccacatttactttgttttgtttcaatgctgtttcaagcaaggtctttactccaagaaagagaaacttcttgatgaaatgacgtcgttagggatcaagccgaatgtttatatctataccatatatatccttgatctctgtagggataataagatggaggaagcggagaaaatgttcgagttgatgaagaaacatggtgttcttccaaacttgtatacttacagtgcaatgattgatggttactgcaagaccggtaacgtgagacaagcttacggattgtataaggagattcttgttgctgaattgctgccaaatgttgttgttttcggtacattggtcgatggattttgcaaagctcgcgaattggtaactgcgaggagccttttcgtgcatatggtgaagtttggggttgatcctaatttatatgtttataactgtttaattcatggacattgcaaatcagggaacatgttggaagcagtgggattactttctgagatggaaagtttgaatctttcgcctgatgtattcacttacactatacttatcaacgggctatgtattgaagatcaggtagcagaagcaaatcgattatttcagaagatgaagaatgagagaatttttccgagctctgcgacttacaactcgctgattcatgggtattgtaaagaatacaatatggagcaagctctggatttgtgctctgagatgacagcaagtggtgtagaacccaacatcataaccttttctactttgatcgatggttactgcaatgtgagagacataaaagctgcaatgggcttgtacttcgagatgaccatcaaaggtatagttcctgatgttgtgacctacacagctttgattgatgcacatttcaaggaggccaacatgaaagaagcactcaggctgtatagtgacatgctagaggcaggaatccaccccaatgatcacacgttcgcttgcctagtagatggattctggaaagaaggacgactctctgttgccatcgatttttatcaagaaaacaatcaacagaggagctgttggaatcatgtggggtttacatgcttgattgaagggttgtgtcagaacggctacattcttagagctagcagattcttctcagacatgagatcctgcgggataacccctgacatatgcagttacgtttcaatgttaaagggccacctccaagaaaagcgtattactgatacaatgatgttgcagtgtgacatgatcaaaactgggatattgccaaaccttttggtgaatcaattgctagccaggttttaccaagcgaatggatatgtaaaatcagcttgttttttgaccaattcaagtcgtttgaaaactgtcagcaattcctgttag

SEQ ID NO: 83619 - protein, 654 aa, Arabidopsis thaliana
  peptide (1)..(654): Ceres Seq. ID no. 12671024
MLKLLLPQHRTSVYLFKFQFFNFRFLSQSPSLSNSASSFSSSSLAEAILKCRSAEEAFKLFETSSRSRVSKSNDLQSFSAVIHVLTGAHKYTLARCLIKSLIERLKRHSEPSNMSHRLFNALEDIQSPKFSIGVFSLLIMEFLEMGLFEEALWVSREMKCSPDSKACLSILNGLVRRRRFDSVWVDYQLMISRGLVPDVHIYFVLFQCCFKQGLYSKKEKLLDEMTSLGIKPNVYIYTIYILDLCRDNKMEEAEKMFELMKKHGVLPNLYTYSAMIDGYCKTGNVRQAYGLYKEILVAELLPNVVVFGTLVDGFCKARELVTARSLFVHMVKFGVDPNLYVYNCLIHGHCKSGNMLEAVGLLSEMESLNLSPDVFTYTILINGLCIEDQVAEANRLFQKMKNERIFPSSATYNSLIHGYCKEYNMEQALDLCSEMTASGVEPNIITFSTLIDGYCNVRDIKAAMGLYFEMTIKGIVPDVVTYTALIDAHFKEANMKEALRLYSDMLEAGIHPNDHTFACLVDGFWKEGRLSVAIDFYQENNQQRSCWNHVGFTCLIEGLCQNGYILRASRFFSDMRSCGITPDICSYVSMLKGHLQEKRITDTMMLQCDMIKTGILPNLLVNQLLARFYQANGYVKSACFLTNSSRLKTVSNSC

SEQ ID NO: 83620 - protein, 541 aa, Arabidopsis thaliana
  peptide (1)..(541): Ceres Seq. ID no. 12671025
MSHRLFNALEDIQSPKFSIGVFSLLIMEFLEMGLFEEALWVSREMKCSPDSKACLSILNGLVRRRRFDSVWVDYQLMISRGLVPDVHIYFVLFQCCFKQGLYSKKEKLLDEMTSLGIKPNVYIYTIYILDLCRDNKMEEAEKMFELMKKHGVLPNLYTYSAMIDGYCKTGNVRQAYGLYKEILVAELLPNVVVFGTLVDGFCKARELVTARSLFVHMVKFGVDPNLYVYNCLIHGHCKSGNMLEAVGLLSEMESLNLSPDVFTYTILINGLCIEDQVAEANRLFQKMKNERIFPSSATYNSLIHGYCKEYNMEQALDLCSEMTASGVEPNIITFSTLIDGYCNVRDIKAAMGLYFEMTIKGIVPDVVTYTALIDAHFKEANMKEALRLYSDMLEAGIHPNDHTFACLVDGFWKEGRLSVAIDFYQENNQQRSCWNHVGFTCLIEGLCQNGYILRASRFFSDMRSCGITPDICSYVSMLKGHLQEKRITDTMMLQCDMIKTGILPNLLVNQLLARFYQANGYVKSACFLTNSSRLKTVSNSC

SEQ ID NO: 83621 - protein, 515 aa, Arabidopsis thaliana
  peptide (1)..(515): Ceres Seq. ID no. 12671026
MEFLEMGLFEEALWVSREMKCSPDSKACLSILNGLVRRRRFDSVWVDYQLMISRGLVPDVHIYFVLFQCCFKQGLYSKKEKLLDEMTSLGIKPNVYIYTIYILDLCRDNKMEEAEKMFELMKKHGVLPNLYTYSAMIDGYCKTGNVRQAYGLYKEILVAELLPNVVVFGTLVDGFCKARELVTARSLFVHMVKFGVDPNLYVYNCLIHGHCKSGNMLEAVGLLSEMESLNLSPDVFTYTILINGLCIEDQVAEANRLFQKMKNERIFPSSATYNSLIHGYCKEYNMEQALDLCSEMTASGVEPNIITFSTLIDGYCNVRDIKAAMGLYFEMTIKGIVPDVVTYTALIDAHFKEANMKEALRLYSDMLEAGIHPNDHTFACLVDGFWKEGRLSVAIDFYQENNQQRSCWNHVGFTCLIEGLCQNGYILRASRFFSDMRSCGITPDICSYVSMLKGHLQEKRITDTMMLQCDMIKTGILPNLLVNQLLARFYQANGYVKSACFLTNSSRLKTVSNSC

SEQ ID NO: 83622 - DNA, 633 bp, Arabidopsis thaliana
  misc_feature (1)..(633): Ceres Seq. ID no. 12671043
  misc_feature (1)..(633): Ortholog of  Ceres SEQ ID NO 13638595 as cited in SEQ ID NO 52050
  misc_feature (1)..(633): Ortholog of  Ceres SEQ ID NO 13594254 as cited in SEQ ID NO 57534
  misc_feature (1)..(633): Ortholog of  Ceres SEQ ID NO 12623490 as cited in SEQ ID NO 61136
atgaagttcttcgtcgtgatcgtgttttgtgcaatcttcttatctgtctctggggattcggacaatatgcaggacacatgtcccacggctccgggagaacagagcatcttcttcatcaacggctatccttgcaagaacccgaccaagattaccgctcaggatttcaagtccaccaaacttacagaagctggagatacagacaattatctccagtcgaatgtcacattgctcactgcattagagtttccaggtctcaacactcttggcctctcggtctcacggactgatcttgaaagggacggatctgtgccgttccattcgcatccgaggtcatctgagatgctctttgtggtcaaaggagtcgtgtttgctggatttgtggatactaacaacaagatttttcaaacggttctgcaaaaaggcgatgtttttgtcttccctaaaggattgcttcatttctgcttgagcggtggctttgaaccagccaccgctttctcgttttacaatagccagaatcctggagtcgtgaatattggagaagtttttgggatcgatcaagagcatataaagatcatgacgaggtgtttagctactggctctggctgtagggtcactgacggtgatgagctttag

SEQ ID NO: 83623 - protein, 210 aa, Arabidopsis thaliana
  peptide (1)..(210): Ceres Seq. ID no. 12671044
MKFFVVIVFCAIFLSVSGDSDNMQDTCPTAPGEQSIFFINGYPCKNPTKITAQDFKSTKLTEAGDTDNYLQSNVTLLTALEFPGLNTLGLSVSRTDLERDGSVPFHSHPRSSEMLFVVKGVVFAGFVDTNNKIFQTVLQKGDVFVFPKGLLHFCLSGGFEPATAFSFYNSQNPGVVNIGEVFGIDQEHIKIMTRCLATGSGCRVTDGDEL

SEQ ID NO: 83624 - protein, 188 aa, Arabidopsis thaliana
  peptide (1)..(188): Ceres Seq. ID no. 12671045
MQDTCPTAPGEQSIFFINGYPCKNPTKITAQDFKSTKLTEAGDTDNYLQSNVTLLTALEFPGLNTLGLSVSRTDLERDGSVPFHSHPRSSEMLFVVKGVVFAGFVDTNNKIFQTVLQKGDVFVFPKGLLHFCLSGGFEPATAFSFYNSQNPGVVNIGEVFGIDQEHIKIMTRCLATGSGCRVTDGDEL

SEQ ID NO: 83625 - DNA, 945 bp, Arabidopsis thaliana
  misc_feature (1)..(945): Ceres Seq. ID no. 12671144
  misc_feature (1)..(945): Ortholog of  Ceres SEQ ID NO 15168476 as cited in SEQ ID NO 60262
atggctgcgatcactgagatggccactgattcaaatgacgtaatcaacgatggtggaactggagacggaattgagaagagcacggattctaaaccggaaatcgaatcggatgacctcaaacccaaatccaaaccggaatatgatcaaatgaagaagcttgttgccatgttcaagaaactcaatcctgaagctaaggagtttttcccttcttacaagaggaatactaatcagtctgacgattttgtgattgctataaagccatctggtgaagacaacaaaaaggttgccattaaccggaggagaagaaacaactataaccaagggaggagagtgaggttacctggaagagcttctaaggctcaaagagaagatagtattagaagaacagtgtatgtctctgacattgatcagagtgtgactgaggaaggccttgctggcttgttcagcagctgtggacaagttgttgattgtcgaatctgcggggatccgaattcagttcttcgctttgcgtttgttgagttttctgatgaccaaggtgcacgatcggctttaagtcttggtggaacaatgatcggatattacccagttagagtcttaccttcaaaaactgctattcttccagtgaatcccacatttctccccaggtcagaagatgaaagagagatgtgttcaaggaccatctactgcacaaatgttgacaagaatgccactgaagatgatgtcaataccttctttcagtctgcctgcggtgaggttactcgcttaaggcttcttggtgaccaagtgcattctactcgcatagcttttgttgaatttgccatggcagagagtgcagttgcagcgctaaactgcagcggaatagtcttaggatctcagccgataagggtaagcccttcaaagacaccagtgagatcgcgaatcactcgatcaccatcgccaaactag

SEQ ID NO: 83626 - protein, 314 aa, Arabidopsis thaliana
  peptide (1)..(314): Ceres Seq. ID no. 12671145
MAAITEMATDSNDVINDGGTGDGIEKSTDSKPEIESDDLKPKSKPEYDQMKKLVAMFKKLNPEAKEFFPSYKRNTNQSDDFVIAIKPSGEDNKKVAINRRRRNNYNQGRRVRLPGRASKAQREDSIRRTVYVSDIDQSVTEEGLAGLFSSCGQVVDCRICGDPNSVLRFAFVEFSDDQGARSALSLGGTMIGYYPVRVLPSKTAILPVNPTFLPRSEDEREMCSRTIYCTNVDKNATEDDVNTFFQSACGEVTRLRLLGDQVHSTRIAFVEFAMAESAVAALNCSGIVLGSQPIRVSPSKTPVRSRITRSPSPN

SEQ ID NO: 83627 - protein, 308 aa, Arabidopsis thaliana
  peptide (1)..(308): Ceres Seq. ID no. 12671146
MATDSNDVINDGGTGDGIEKSTDSKPEIESDDLKPKSKPEYDQMKKLVAMFKKLNPEAKEFFPSYKRNTNQSDDFVIAIKPSGEDNKKVAINRRRRNNYNQGRRVRLPGRASKAQREDSIRRTVYVSDIDQSVTEEGLAGLFSSCGQVVDCRICGDPNSVLRFAFVEFSDDQGARSALSLGGTMIGYYPVRVLPSKTAILPVNPTFLPRSEDEREMCSRTIYCTNVDKNATEDDVNTFFQSACGEVTRLRLLGDQVHSTRIAFVEFAMAESAVAALNCSGIVLGSQPIRVSPSKTPVRSRITRSPSPN

SEQ ID NO: 83628 - protein, 265 aa, Arabidopsis thaliana
  peptide (1)..(265): Ceres Seq. ID no. 12671147
MKKLVAMFKKLNPEAKEFFPSYKRNTNQSDDFVIAIKPSGEDNKKVAINRRRRNNYNQGRRVRLPGRASKAQREDSIRRTVYVSDIDQSVTEEGLAGLFSSCGQVVDCRICGDPNSVLRFAFVEFSDDQGARSALSLGGTMIGYYPVRVLPSKTAILPVNPTFLPRSEDEREMCSRTIYCTNVDKNATEDDVNTFFQSACGEVTRLRLLGDQVHSTRIAFVEFAMAESAVAALNCSGIVLGSQPIRVSPSKTPVRSRITRSPSPN

SEQ ID NO: 83629 - DNA, 1915 bp, Arabidopsis thaliana
  misc_feature (1)..(1915): Ceres Seq. ID no. 12671165
  misc_feature (1)..(1915): Ortholog of  Ceres SEQ ID NO 14313636 as cited in SEQ ID NO 64205
caaaagaaacagaacaacaatggcgaaattaaatcgttccaacattggtctctcactgttactatctatgttcctcgcaaactttatcaccgatcttgaagcttcttctcatcaagatctcaaccaaccgtaccggaccggttatcactttcaacctctcaaaaattggatgaacgatcctaatggaccaatgatatacaaaggaatataccatcttttttaccaatataacccatacggtgccgtttgggatgtgagaatcgtgtggggacactccacgtcagttgacttagtcaactggatttcacaacctccagcttttaatccatctcagccgtcagatatcaacggttgttggtcaggctccgtcacgattctaccaaacggcaaacctgtgatcctctacaccggcattgaccaaaacaaaggtcaagtccaaaacgtcgccgttccggttaacatctctgatccttatctccgagaatggtcaaaaccgccgcaaaatcctctaatgacaactaacgcggttaacggaattaacccggaccggtttcgtgatccgaccaccgcgtggcttggacgtgacggagaatggcgagtaatcgtcggaagctcgacggacgatcgacgaggattagcgattctttacaaaagcagagatttcttcaactggacgcaatcaatgaagcctttacattacgaagacttaaccggaatgtgggaatgtcctgattttttcccggtttcgataaccggatcggacggtgtagaaacgtcgtcggttggtgagaatgggattaagcatgtgcttaaagtgagtttgattgagacattgcatgattattacacgattgggagttatgatcgtgagaaagatgtttacgtaccggatcttgggtttgtgcaaaacgaatcagctccgaggttagattacgggaaatattacgcgtcgaaaacgttttacgatgatgttaaaaaacgaaggatcttgtggggttgggttaatgaatcgtctccagctaaagatgatattgagaagggttggtctggtcttcagtcatttccgaggaaaatatggctcgatgaatcaggaaaggaattgctacagtggccgattgaagagattgagacattgcgtgggcaacaagtcaactggcaaaagaaagttctcaaagcaggatctactctccaagttcatggtgtcactgctgcgcaggcagatgttgaggtatcgttcaaggtgaaggaattggaaaaggcggatgtgattgaaccgagttggaccgatccacaaaagatatgtagtcagggagatttatcggttatgtcgggtttaggaccatttggtttgatggttttggcatccaatgacatggaagagtacacgtccgtttacttcagaattttcaagtcaaatgacgatactaacaagaagactaaatacgtggtgttgatgtgcagtgaccaaagcagatcatcgttaaatgatgaaaatgataaatcaacctttggtgcttttgttgcgatagacccttctcaccaaacaatttctcttaggactttgattgatcactcgatagtggagagttatggtggaggaggcagaacatgtataacctcaagagtgtatccaaaattggcaatcggagaaaatgcaaatctgtttgtcttcaacaaaggcactcaaagtgttgatatcttgaccctaagtgcttggagtttaaagtctgctcaaatcaatggcgacttaatgtcaccatttattgagcgtgaagagtcacgctcacctaatcatcagttttgaatgaaaaatattttacattgtacgggtaaaacgaaatatataagagattattacatattaagagatattaacattcttattttaccattcacttccaaatttgaagatttt

SEQ ID NO: 83630 - protein, 600 aa, Arabidopsis thaliana
  peptide (1)..(600): Ceres Seq. ID no. 12671166
KRNRTTMAKLNRSNIGLSLLLSMFLANFITDLEASSHQDLNQPYRTGYHFQPLKNWMNDPNGPMIYKGIYHLFYQYNPYGAVWDVRIVWGHSTSVDLVNWISQPPAFNPSQPSDINGCWSGSVTILPNGKPVILYTGIDQNKGQVQNVAVPVNISDPYLREWSKPPQNPLMTTNAVNGINPDRFRDPTTAWLGRDGEWRVIVGSSTDDRRGLAILYKSRDFFNWTQSMKPLHYEDLTGMWECPDFFPVSITGSDGVETSSVGENGIKHVLKVSLIETLHDYYTIGSYDREKDVYVPDLGFVQNESAPRLDYGKYYASKTFYDDVKKRRILWGWVNESSPAKDDIEKGWSGLQSFPRKIWLDESGKELLQWPIEEIETLRGQQVNWQKKVLKAGSTLQVHGVTAAQADVEVSFKVKELEKADVIEPSWTDPQKICSQGDLSVMSGLGPFGLMVLASNDMEEYTSVYFRIFKSNDDTNKKTKYVVLMCSDQSRSSLNDENDKSTFGAFVAIDPSHQTISLRTLIDHSIVESYGGGGRTCITSRVYPKLAIGENANLFVFNKGTQSVDILTLSAWSLKSAQINGDLMSPFIEREESRSPNHQF

SEQ ID NO: 83631 - protein, 594 aa, Arabidopsis thaliana
  peptide (1)..(594): Ceres Seq. ID no. 12671167
MAKLNRSNIGLSLLLSMFLANFITDLEASSHQDLNQPYRTGYHFQPLKNWMNDPNGPMIYKGIYHLFYQYNPYGAVWDVRIVWGHSTSVDLVNWISQPPAFNPSQPSDINGCWSGSVTILPNGKPVILYTGIDQNKGQVQNVAVPVNISDPYLREWSKPPQNPLMTTNAVNGINPDRFRDPTTAWLGRDGEWRVIVGSSTDDRRGLAILYKSRDFFNWTQSMKPLHYEDLTGMWECPDFFPVSITGSDGVETSSVGENGIKHVLKVSLIETLHDYYTIGSYDREKDVYVPDLGFVQNESAPRLDYGKYYASKTFYDDVKKRRILWGWVNESSPAKDDIEKGWSGLQSFPRKIWLDESGKELLQWPIEEIETLRGQQVNWQKKVLKAGSTLQVHGVTAAQADVEVSFKVKELEKADVIEPSWTDPQKICSQGDLSVMSGLGPFGLMVLASNDMEEYTSVYFRIFKSNDDTNKKTKYVVLMCSDQSRSSLNDENDKSTFGAFVAIDPSHQTISLRTLIDHSIVESYGGGGRTCITSRVYPKLAIGENANLFVFNKGTQSVDILTLSAWSLKSAQINGDLMSPFIEREESRSPNHQF

SEQ ID NO: 83632 - protein, 578 aa, Arabidopsis thaliana
  peptide (1)..(578): Ceres Seq. ID no. 12671168
MFLANFITDLEASSHQDLNQPYRTGYHFQPLKNWMNDPNGPMIYKGIYHLFYQYNPYGAVWDVRIVWGHSTSVDLVNWISQPPAFNPSQPSDINGCWSGSVTILPNGKPVILYTGIDQNKGQVQNVAVPVNISDPYLREWSKPPQNPLMTTNAVNGINPDRFRDPTTAWLGRDGEWRVIVGSSTDDRRGLAILYKSRDFFNWTQSMKPLHYEDLTGMWECPDFFPVSITGSDGVETSSVGENGIKHVLKVSLIETLHDYYTIGSYDREKDVYVPDLGFVQNESAPRLDYGKYYASKTFYDDVKKRRILWGWVNESSPAKDDIEKGWSGLQSFPRKIWLDESGKELLQWPIEEIETLRGQQVNWQKKVLKAGSTLQVHGVTAAQADVEVSFKVKELEKADVIEPSWTDPQKICSQGDLSVMSGLGPFGLMVLASNDMEEYTSVYFRIFKSNDDTNKKTKYVVLMCSDQSRSSLNDENDKSTFGAFVAIDPSHQTISLRTLIDHSIVESYGGGGRTCITSRVYPKLAIGENANLFVFNKGTQSVDILTLSAWSLKSAQINGDLMSPFIEREESRSPNHQF

SEQ ID NO: 83633 - DNA, 1254 bp, Arabidopsis thaliana
  misc_feature (1)..(1254): Ceres Seq. ID no. 12671197
  misc_feature (1)..(1254): Ortholog of  Ceres SEQ ID NO 14312216 as cited in SEQ ID NO 53930
  misc_feature (1)..(1254): Ortholog of  Ceres SEQ ID NO 13656404 as cited in SEQ ID NO 65806
  misc_feature (1)..(1254): Ortholog of  Ceres SEQ ID NO 12779935 as cited in SEQ ID NO 66774
  misc_feature (1)..(1254): Ortholog of  Ceres SEQ ID NO 13598695 as cited in SEQ ID NO 67368
  misc_feature (1)..(1254): Ortholog of  Ceres SEQ ID NO 13591174 as cited in SEQ ID NO 68289
atgaagaagcttctatggagttggatcattctcttcaacatccatgtaaatggaatgatgatggagtttgatgaaatggagtggttcacagttttcaatggaacaaaagtgtttcagactcaaaatgatgttttttctgaagctaagtttcctatggttggactcactctgattcaatctgctgctgctaaaggagctgtgtgtttggatggaagtcttcccggataccatttgcatcgcgggtttggttccggagcgaacaattggctcgttcaattagagggaggtggatggtgtgataccattagaaattgtgtttaccgtaaaaccactcgtcgtggatcttcttcatatatggagaaagagataccatttaccggcattctaagtgataaagccgcggataatccagacttttataactggaatagagtaaaagttcggtattgtgacggtggatcgtttagcggggatagcgaaaataaggctgcacaacttcagtttagaggaaagagaatttggttagctgctatggaagatttgatggcaaaaggtatgcgtcaagctaagcaggctctgctctctggatgttctgcaggaggtcttgcggtgattttacgatgtgatgattttgggaaattgtttcctccttccaccagagtgaaatgtttgagtgatgctggtttcttccttgatgccatcgatgtgtctggaggtcgatctcttagacgattatacgccggtgtggtcagattacagaatctgcaaaccaaccttcctcagtattgtgtaaaccgtcttaatcccacttcgtgttttttcccacaaaacctaatcaaccaagtcaagactccactttttattcttaatgctgcatatgattcttggcagattcaagagagtttagctccaaaatctgcagatccaagtggaagttggaatgattgtagacttaactacgccaagtgtagtgcatctcagatccaattcttgcaaggttttaggacgcgtatggtgaatttggtaaaaggtttcgcgatgccaagtaagaacggtgtgttcctcaattcgtgctttgctcattgccaaacagagaggcatgacacttggttcgcccaaaactctccagctattaagaacaagggtattgcagtagctgtgggagattggtatttcgaaagaggaggagcaaagctcatagactgtgcttatccttgtgacaagacttgtcacaatttggtctttagaagataa

SEQ ID NO: 83634 - protein, 417 aa, Arabidopsis thaliana; identical to SEQ ID NO: 40655
  peptide (1)..(417): Ceres Seq. ID no. 12671198

SEQ ID NO: 83635 - protein, 399 aa, Arabidopsis thaliana
  peptide (1)..(399): Ceres Seq. ID no. 12671199
MMMEFDEMEWFTVFNGTKVFQTQNDVFSEAKFPMVGLTLIQSAAAKGAVCLDGSLPGYHLHRGFGSGANNWLVQLEGGGWCDTIRNCVYRKTTRRGSSSYMEKEIPFTGILSDKAADNPDFYNWNRVKVRYCDGGSFSGDSENKAAQLQFRGKRIWLAAMEDLMAKGMRQAKQALLSGCSAGGLAVILRCDDFGKLFPPSTRVKCLSDAGFFLDAIDVSGGRSLRRLYAGVVRLQNLQTNLPQYCVNRLNPTSCFFPQNLINQVKTPLFILNAAYDSWQIQESLAPKSADPSGSWNDCRLNYAKCSASQIQFLQGFRTRMVNLVKGFAMPSKNGVFLNSCFAHCQTERHDTWFAQNSPAIKNKGIAVAVGDWYFERGGAKLIDCAYPCDKTCHNLVFRR

SEQ ID NO: 83636 - protein, 398 aa, Arabidopsis thaliana
  peptide (1)..(398): Ceres Seq. ID no. 12671200
MMEFDEMEWFTVFNGTKVFQTQNDVFSEAKFPMVGLTLIQSAAAKGAVCLDGSLPGYHLHRGFGSGANNWLVQLEGGGWCDTIRNCVYRKTTRRGSSSYMEKEIPFTGILSDKAADNPDFYNWNRVKVRYCDGGSFSGDSENKAAQLQFRGKRIWLAAMEDLMAKGMRQAKQALLSGCSAGGLAVILRCDDFGKLFPPSTRVKCLSDAGFFLDAIDVSGGRSLRRLYAGVVRLQNLQTNLPQYCVNRLNPTSCFFPQNLINQVKTPLFILNAAYDSWQIQESLAPKSADPSGSWNDCRLNYAKCSASQIQFLQGFRTRMVNLVKGFAMPSKNGVFLNSCFAHCQTERHDTWFAQNSPAIKNKGIAVAVGDWYFERGGAKLIDCAYPCDKTCHNLVFRR

SEQ ID NO: 83637 - DNA, 1400 bp, Arabidopsis thaliana
  misc_feature (1)..(1400): Ceres Seq. ID no. 12671213
  misc_feature (1)..(1400): Ortholog of  Ceres SEQ ID NO 15179578 as cited in SEQ ID NO 0
aatgctctgttttgttctctcgagaaaattctcagactcagagaaaagtaaaaacagagaagaaagatgagaagcggtgctaatggaaacaacgttttcgatactataaacgcagctgcttctgctattgcttcttctgatgatcgtcttcatcaatcttctccgattcataagaagagaaaatggtggaatcgatggagtctgttgaaatgtttcggatcttcaagacaaagaaaacgaataggaaactcggttcttgttcctgaaccggtatcaatgtcttcttcaaattcaacaacatcaaattccggttatcgttcggttatcacaacacttccttttatagctccaccttcatctccagcttcatttttccaatcagagccaccttctgctacacaatcacctgttggaatcctctcttttagtcctttgccttgtaacaaccgtccttccatcttcgccattggaccttacgctcatgaaactcaattggtatctcctccggttttctcaacttacactactgaaccatcttcagctccaatcacacctcctcttgatgactcatctatctacttaaccaccacaacaccttcttcacctgaagtgccttttgctcagctctttaactcgaaccatcaaaccggtagctatggttataagttcccaatgtcttctagttatgagtttcagttttaccaacttcctcctggtagtccacttggtcagcttatttccccgagccctggttctggtccaacttctccttttcccgatggagaaacctcgctgttccctcactttcaagtctctgatcctccaaaactgttgagtccaaagactgctggtgttacaactccttgtaaagagcagaagattgtaagaccgcataaaccggtttcattcgatcttgatgctgatcatgtcattagatgcgtggatcagaagctaagaacaacgttccctgaagcatcatcagatcaagaatcaatgaatcattcgtctctcgggtccaataaggaattcaatttcggcacggatgagaaacatttgaccgttgatgaacatagatcagcttcgccgaagaacagcaatgattggtcttttttccctgtgatgcagtcaggtacactaagctaaccttcatcagaagaatagaaatctgaaatttagatatcgattcggacaaatatcttgttcaagattcaagaacaattatagaatttttagatgattctgttcaggatcttaaggatattttcttgtctctctttttggttttgtaataaatatttggcatcgttagttgttgtatatggctactctttatgtagttttttgtttttgtgaatacacatttgatcgcatttgtaaataaaatttaatcagtttcttcg

SEQ ID NO: 83638 - protein, 358 aa, Arabidopsis thaliana
  peptide (1)..(358): Ceres Seq. ID no. 12671214
MRSGANGNNVFDTINAAASAIASSDDRLHQSSPIHKKRKWWNRWSLLKCFGSSRQRKRIGNSVLVPEPVSMSSSNSTTSNSGYRSVITTLPFIAPPSSPASFFQSEPPSATQSPVGILSFSPLPCNNRPSIFAIGPYAHETQLVSPPVFSTYTTEPSSAPITPPLDDSSIYLTTTTPSSPEVPFAQLFNSNHQTGSYGYKFPMSSSYEFQFYQLPPGSPLGQLISPSPGSGPTSPFPDGETSLFPHFQVSDPPKLLSPKTAGVTTPCKEQKIVRPHKPVSFDLDADHVIRCVDQKLRTTFPEASSDQESMNHSSLGSNKEFNFGTDEKHLTVDEHRSASPKNSNDWSFFPVMQSGTLS

SEQ ID NO: 83639 - protein, 288 aa, Arabidopsis thaliana
  peptide (1)..(288): Ceres Seq. ID no. 12671215
MSSSNSTTSNSGYRSVITTLPFIAPPSSPASFFQSEPPSATQSPVGILSFSPLPCNNRPSIFAIGPYAHETQLVSPPVFSTYTTEPSSAPITPPLDDSSIYLTTTTPSSPEVPFAQLFNSNHQTGSYGYKFPMSSSYEFQFYQLPPGSPLGQLISPSPGSGPTSPFPDGETSLFPHFQVSDPPKLLSPKTAGVTTPCKEQKIVRPHKPVSFDLDADHVIRCVDQKLRTTFPEASSDQESMNHSSLGSNKEFNFGTDEKHLTVDEHRSASPKNSNDWSFFPVMQSGTLS

SEQ ID NO: 83640 - DNA, 1343 bp, Arabidopsis thaliana
  misc_feature (1)..(1343): Ceres Seq. ID no. 12671218
  misc_feature (1)..(1343): Ortholog of  Ceres SEQ ID NO 14316404 as cited in SEQ ID NO 57641
  misc_feature (1)..(1343): Ortholog of  Ceres SEQ ID NO 12611159 as cited in SEQ ID NO 59821
atgggtcatcactcatgctgcaaccagcaaaaggtgaagagagggctttggtcaccggaagaagatgagaagcttattagatatatcacaactcatggctatggatgttggagtgaagtccctgaaaaagcagggcttcaaagatgtggaaaaagttgtagattgcgatggataaactatcttcgacctgatatcaggagaggaaggttctctccagaagaagagaaattgatcataagccttcatggagttgtgggaaacaggtgggctcatatagctagtcatttaccgggaagaacagataacgagattaaaaactattggaattcatggattaagaaaaagatacgaaaaccgcaccatcattacagtcgtcatcaaccgtcagtaactactgtgacattgaatgcggacactacatcgattgccactaccatcgaggcctctaccaccacaacatcgactatcgataacttacattttgacggtttcactgattctcctaaccaattaaatttcaccaatgatcaagaaactaatataaagattcaagaaacttttttctcccataaacctcctctcttcatggtagacacaacacttcctatcctagaaggaatgttctctgaaaacatcatcacaaacaataacaagaacaatgatcatgatgacacgcaaagaggaggaagagaaaatgtttgtgaacaagcatttctaacaactaacacggaagaatgggatatgaatcttcgtcagcaagagccgtttcaagttcctacactggcgtcacatgtgttcaacaactcttccaattcaaatattgacacggttataagttataatctaccggcgctaatagagggaaatgtcgataacatcgtccataatgaaaacagcaatgtccaagatggagaaatggcgtccacattcgaatgtttaaagaggcaagaactaagctatgatcaatgggacgattcacaacaatgctctaactttttcttttgggacaaccttaatataaacgtggaaggttcatctcttgttggaaaccaagacccatcaatgaatttgggatcatctgccttatcttcttctttcccttcttcgttttaaattaatgtttaaatcacagcaaataaactccgctaatttgtttataagtttgtttattcaccttttttctcttagagtttgtaacgggattttcactttattatgtaatgagtgttctaaattgttgatgtttgtaacgggattttcactttattatgtaatgagtgttctaaattgttgataaagagatggtgtgaatgtatgtatataaaactcaaggtcttgtccgc

SEQ ID NO: 83641 - protein, 370 aa, Arabidopsis thaliana
  peptide (1)..(370): Ceres Seq. ID no. 12671219
MGHHSCCNQQKVKRGLWSPEEDEKLIRYITTHGYGCWSEVPEKAGLQRCGKSCRLRWINYLRPDIRRGRFSPEEEKLIISLHGVVGNRWAHIASHLPGRTDNEIKNYWNSWIKKKIRKPHHHYSRHQPSVTTVTLNADTTSIATTIEASTTTTSTIDNLHFDGFTDSPNQLNFTNDQETNIKIQETFFSHKPPLFMVDTTLPILEGMFSENIITNNNKNNDHDDTQRGGRENVCEQAFLTTNTEEWDMNLRQQEPFQVPTLASHVFNNSSNSNIDTVISYNLPALIEGNVDNIVHNENSNVQDGEMASTFECLKRQELSYDQWDDSQQCSNFFFWDNLNINVEGSSLVGNQDPSMNLGSSALSSSFPSSF

SEQ ID NO: 83642 - DNA, 1158 bp, Arabidopsis thaliana
  misc_feature (1)..(1158): Ceres Seq. ID no. 12671224
  misc_feature (1)..(1158): Ortholog of  Ceres SEQ ID NO 13596465 as cited in SEQ ID NO 62133
atggatgtaagagaagctatgaagaaccaaacccacgttgccatgatcctttccgggcacgtcttatcttccgcgcccaaagactctaacgtcatcttctcaccggcgtcaataaactctgcgatcacgatgcacgccgctggtcccggaggtgatttagtctccggccaaatcctctccttcctaagatcatcttcaattgatgagctcaaaaccgtgttccgagaactagcctccgtcgtctatgccgacagaagcgccaccggcggcccaaagataacggcggcgaatggcctttggattgataaatcacttccgactgatcccaagttcaaggacctcttcgagaacttctttaaggctgtttatgttccagtagatttccgatcagaggctgaagaagtgcgtaaggaggtgaattcatgggttgaacatcacaccaataatctgatcaaggatcttcttcctgatggatccgtgacaagcctaaccaacaagatttacgcaaacgcattgtctttcaagggagcttggaaaagaccatttgaaaagtactatacaagagataatgacttctaccttgtcaatggcacatcagtctctgtgccattcatgtccagctatgagaaccaatacgtaagagcttatgacggtttcaaggtcctcaggcttccttaccaacgaggcagtgatgataccaatcgtaaattctcaatgtatttctatctcccagacaagaaagatggattggatgatctcttggagaaaatggcatctacacctggattcttggatagtcacattccgacatatagagatgaacttgagaaatttagaattccaaagtttaagatcgaattcggtttttctgttacaagcgttttggatcgattgggattgcgttcaatgtcaatgtaccataaagcttgtgtcgagattgatgaagaaggtgctgaagctgcggctgctactgctgatggagattgtggttgttctcttgattttgtggagcctcctaagaagatagattttgtggccgatcatccatttcttttcttgattcgagaagaaaaaactggaaccgttttgttcgttggtcagatctttgatccttcgggaccttgttcgggatctaattcggactcagatgactattaa

SEQ ID NO: 83643 - protein, 385 aa, Arabidopsis thaliana
  peptide (1)..(385): Ceres Seq. ID no. 12671225
MDVREAMKNQTHVAMILSGHVLSSAPKDSNVIFSPASINSAITMHAAGPGGDLVSGQILSFLRSSSIDELKTVFRELASVVYADRSATGGPKITAANGLWIDKSLPTDPKFKDLFENFFKAVYVPVDFRSEAEEVRKEVNSWVEHHTNNLIKDLLPDGSVTSLTNKIYANALSFKGAWKRPFEKYYTRDNDFYLVNGTSVSVPFMSSYENQYVRAYDGFKVLRLPYQRGSDDTNRKFSMYFYLPDKKDGLDDLLEKMASTPGFLDSHIPTYRDELEKFRIPKFKIEFGFSVTSVLDRLGLRSMSMYHKACVEIDEEGAEAAAATADGDCGCSLDFVEPPKKIDFVADHPFLFLIREEKTGTVLFVGQIFDPSGPCSGSNSDSDDY

SEQ ID NO: 83644 - protein, 379 aa, Arabidopsis thaliana
  peptide (1)..(379): Ceres Seq. ID no. 12671226
MKNQTHVAMILSGHVLSSAPKDSNVIFSPASINSAITMHAAGPGGDLVSGQILSFLRSSSIDELKTVFRELASVVYADRSATGGPKITAANGLWIDKSLPTDPKFKDLFENFFKAVYVPVDFRSEAEEVRKEVNSWVEHHTNNLIKDLLPDGSVTSLTNKIYANALSFKGAWKRPFEKYYTRDNDFYLVNGTSVSVPFMSSYENQYVRAYDGFKVLRLPYQRGSDDTNRKFSMYFYLPDKKDGLDDLLEKMASTPGFLDSHIPTYRDELEKFRIPKFKIEFGFSVTSVLDRLGLRSMSMYHKACVEIDEEGAEAAAATADGDCGCSLDFVEPPKKIDFVADHPFLFLIREEKTGTVLFVGQIFDPSGPCSGSNSDSDDY

SEQ ID NO: 83645 - protein, 371 aa, Arabidopsis thaliana
  peptide (1)..(371): Ceres Seq. ID no. 12671227
MILSGHVLSSAPKDSNVIFSPASINSAITMHAAGPGGDLVSGQILSFLRSSSIDELKTVFRELASVVYADRSATGGPKITAANGLWIDKSLPTDPKFKDLFENFFKAVYVPVDFRSEAEEVRKEVNSWVEHHTNNLIKDLLPDGSVTSLTNKIYANALSFKGAWKRPFEKYYTRDNDFYLVNGTSVSVPFMSSYENQYVRAYDGFKVLRLPYQRGSDDTNRKFSMYFYLPDKKDGLDDLLEKMASTPGFLDSHIPTYRDELEKFRIPKFKIEFGFSVTSVLDRLGLRSMSMYHKACVEIDEEGAEAAAATADGDCGCSLDFVEPPKKIDFVADHPFLFLIREEKTGTVLFVGQIFDPSGPCSGSNSDSDDY

SEQ ID NO: 83646 - DNA, 3941 bp, Arabidopsis thaliana
  misc_feature (1)..(3941): Ceres Seq. ID no. 12671228
  misc_feature (1)..(3941): Ortholog of  Ceres SEQ ID NO 14309727 as cited in SEQ ID NO 1030
  misc_feature (1)..(3941): Ortholog of  Ceres SEQ ID NO 13581686 as cited in SEQ ID NO 57695
  misc_feature (1)..(3941): Ortholog of  Ceres SEQ ID NO 15224315 as cited in SEQ ID NO 66131
atgcataaactagaatgaccaacaaagatactctcaaagtctcacttgtctaaaaaacagataaaaatcatttccaattttgagaaaaggaaaaaaaacaactccaataatactttttgattttcttttcgttgcattaaaataaatgtggcaaaaatccaataatattactattataagttaaaaaaactcaaaaaaaaaaaaaagtatattccgtcaactttttctcagtccggttcaatcatctccatcatcgttgatctctctctctccgtcaacgttctctctataaagcagagagtttcacagcgcgtgaaaaatggcttttcccacttagccacaacgacgcgtttcaattctccatctctccctctctctctctctttcttcaaagattccaccaacctatacatatacttatatataatctatgctacgtgtatatacttccgatatccttcaaccaactctttgaattccgactttggatctatgaaaccgttctcaaagaacgatcggcgacggtggtcatttgattcagtttccgccggaaaaaccgccgtcggaagtgcatcaacttcaccgggaactgaatactccattaacggtgatcaagagttcgttgaagtcacaatcgatcttcaagacgatgacacaatcgttcttcgtagcgtcgagccagcaaccgccattaatgtcatcggagatatctccgacgacaacaccggaataatgactccggtttcgatttcgagatctccgacgatgaaacgaacttcatctaatcggttccgacaattctcacaagagcttaaagccgaagctgtggcgaaagcgaaacagttatctcaggagttgaaacgattctcatggtctcgttctttctcaggtaacttaaccactactagtaccgccgctaatcaaagcggcggtgctggtggtggtttggtgaactcggctttagaagcgcgagcgttgcgaaagcaacgtgctcagttagatcggactcggtctagtgctcaaagagctcttcgtggtttgagattcattagcaataagcaaaagaacgttgatggttggaacgatgttcaatcaaatttcgaaaaattcgaaaaaaatggttacatctatcgctccgatttcgctcaatgcataggaatgaaagattcgaaagaatttgcattggaactgttcgatgcattgagtagaagaagaagattaaaagtagagaaaatcaatcacgatgagctttatgagtattggtcacaaatcaacgacgagagttttgattctcgtctccagatcttcttcgacatagtggacaagaatgaagatgggagaattacagaagaggaagtaaaagagataataatgttgagtgcatctgcaaataagctatcaagattaaaggaacaagcagaggaatatgcagctttgattatggaagagttagatcctgaaagacttggctacatagagctatggcaactagagactttgcttctacaaaaagacacatacctcaattacagtcaagcattgagctatacgagccaagcattgagccaaaaccttcaagggttaaggggaaagagtcgaatacatagaatgagttcggatttcgtctacattatgcaagagaattggaaaaggatatgggttttatccttatggatcatgatcatgatcggattattcttgtggaaattcttccaatacaagcaaaaagatgcatttcatgtgatgggatattgtttactcacagccaaaggagcagctgaaacacttaaattcaacatggctctaatacttttcccagtttgcagaaacaccattacttggcttagatccacaagactctcttacttcgttccttttgatgataatatcaacttccacaagacaattgctggagccattgtagtagctgtgatccttcatattggagaccatcttgcttgtgatttccctagaattgttagagccaccgaatacgattacaatcggtatctgtttcattactttcaaacaaaacagccaacatacttcgacctcgttaagggacctgaaggaatcactgggattttaatggtcattttgatgattatttcattcacattagcaacaagatggtttaggcgtaacctagtcaagcttcctaagccatttgatcgactaaccggttttaacgccttttggtattcgcatcatttgttcgtcattgtttatatcttgcttattcttcatggtatcttcctctatttcgccaagccttggtatgttcgtacgacatggatgtatcttgcagtaccagttttactctatggtggagaaagaacacttaggtacttccgttctggttcttattcggttcgactgcttaaggttgctatatatcctggtaatgttctaacgctacaaatgtcgaaaccaactcaatttcgttacaaaagcggacaatacatgtttgtccaatgtcctgcggtttcgccattcgagtggcatccattctcaattacttccgcacctgaagatgattatatcagcattcacattagacaacttggtgattggactcaagaactcaaaagagtattctctgaagtttgtgagccaccggttggcggtaaaagcggacttctcagagccgacgaaacaacaaagaaaagtttgccaaagctattgatagatggaccgtacggtgcaccagcacaagattataggaaatatgatgttctcttattagttggtcttggcattggtgcaactccatttatcagtatcttgaaagatttgcttaacaacattgttaaaatggaagagcatgcggattcgatctcggatttcagtagatcatcagaatacagcacaggaagcaacggtgacacgccaagacgaaagagaatactaaaaaccacaaatgcttatttctactgggtcacaagagaacaaggctcttttgattggttcaaaggtgtcatgaacgaagttgcagaacttgaccaacggggtgtgatagagatgcataactatttaacaagtgtgtatgaagaaggtgatgctcgttctgctctcattacaatggttcaagctcttaatcatgccaaaaatggtgtcgacattgtctctggcactagggtcagaacacactttgcaagacctaattggaagaaggttctcacaaagctaagttccaagcattgcaatgcaagaataggagtgttttattgcggagtaccggttttagggaaggagcttagcaaactatgcaacacattcaatcaaaaaggttcaaccaagtttgaatttcacaaggagcatttctaaaagacaagaaggaagaagccaaaagccctctagattctttaatatctcaaatttagccacttatagtataaaggcaatctcttcactatttaattcaaagtgattaaacgttaacacactgtcaaaagtgagtgtgttaacgtttagctccacacgttctaggtttatatacaccgaggcatacgtgtaaatatacgagacagaagaaattcaagggggtttgatagaagcatatagtaaaattttaaaatttcttgtatagtaagcaaatgagatggagactctagaagagaggtgaggtttggtgagggatagcgacagtaatacgacgtcgtattcgattgtagaggaagtgcaatacagctgcagggaagataaatgatggaagcaaataatgcgttgataaggtccatgtgattaggaagatgacactctttttgggggatatttttttctattttttttttttagtggagtcggtgaaagagagactagagtttttagaatattggaagaatatttgggaataagggagttataatatttttgtatcattgtattatataactaatgtaaggtgtacaaagcataaaatttgatagttcctttcttct

SEQ ID NO: 83647 - protein, 944 aa, Arabidopsis thaliana
  peptide (1)..(944): Ceres Seq. ID no. 12671229
MKPFSKNDRRRWSFDSVSAGKTAVGSASTSPGTEYSINGDQEFVEVTIDLQDDDTIVLRSVEPATAINVIGDISDDNTGIMTPVSISRSPTMKRTSSNRFRQFSQELKAEAVAKAKQLSQELKRFSWSRSFSGNLTTTSTAANQSGGAGGGLVNSALEARALRKQRAQLDRTRSSAQRALRGLRFISNKQKNVDGWNDVQSNFEKFEKNGYIYRSDFAQCIGMKDSKEFALELFDALSRRRRLKVEKINHDELYEYWSQINDESFDSRLQIFFDIVDKNEDGRITEEEVKEIIMLSASANKLSRLKEQAEEYAALIMEELDPERLGYIELWQLETLLLQKDTYLNYSQALSYTSQALSQNLQGLRGKSRIHRMSSDFVYIMQENWKRIWVLSLWIMIMIGLFLWKFFQYKQKDAFHVMGYCLLTAKGAAETLKFNMALILFPVCRNTITWLRSTRLSYFVPFDDNINFHKTIAGAIVVAVILHIGDHLACDFPRIVRATEYDYNRYLFHYFQTKQPTYFDLVKGPEGITGILMVILMIISFTLATRWFRRNLVKLPKPFDRLTGFNAFWYSHHLFVIVYILLILHGIFLYFAKPWYVRTTWMYLAVPVLLYGGERTLRYFRSGSYSVRLLKVAIYPGNVLTLQMSKPTQFRYKSGQYMFVQCPAVSPFEWHPFSITSAPEDDYISIHIRQLGDWTQELKRVFSEVCEPPVGGKSGLLRADETTKKSLPKLLIDGPYGAPAQDYRKYDVLLLVGLGIGATPFISILKDLLNNIVKMEEHADSISDFSRSSEYSTGSNGDTPRRKRILKTTNAYFYWVTREQGSFDWFKGVMNEVAELDQRGVIEMHNYLTSVYEEGDARSALITMVQALNHAKNGVDIVSGTRVRTHFARPNWKKVLTKLSSKHCNARIGVFYCGVPVLGKELSKLCNTFNQKGSTKFEFHKEHF

SEQ ID NO: 83648 - protein, 864 aa, Arabidopsis thaliana
  peptide (1)..(864): Ceres Seq. ID no. 12671230
MTPVSISRSPTMKRTSSNRFRQFSQELKAEAVAKAKQLSQELKRFSWSRSFSGNLTTTSTAANQSGGAGGGLVNSALEARALRKQRAQLDRTRSSAQRALRGLRFISNKQKNVDGWNDVQSNFEKFEKNGYIYRSDFAQCIGMKDSKEFALELFDALSRRRRLKVEKINHDELYEYWSQINDESFDSRLQIFFDIVDKNEDGRITEEEVKEIIMLSASANKLSRLKEQAEEYAALIMEELDPERLGYIELWQLETLLLQKDTYLNYSQALSYTSQALSQNLQGLRGKSRIHRMSSDFVYIMQENWKRIWVLSLWIMIMIGLFLWKFFQYKQKDAFHVMGYCLLTAKGAAETLKFNMALILFPVCRNTITWLRSTRLSYFVPFDDNINFHKTIAGAIVVAVILHIGDHLACDFPRIVRATEYDYNRYLFHYFQTKQPTYFDLVKGPEGITGILMVILMIISFTLATRWFRRNLVKLPKPFDRLTGFNAFWYSHHLFVIVYILLILHGIFLYFAKPWYVRTTWMYLAVPVLLYGGERTLRYFRSGSYSVRLLKVAIYPGNVLTLQMSKPTQFRYKSGQYMFVQCPAVSPFEWHPFSITSAPEDDYISIHIRQLGDWTQELKRVFSEVCEPPVGGKSGLLRADETTKKSLPKLLIDGPYGAPAQDYRKYDVLLLVGLGIGATPFISILKDLLNNIVKMEEHADSISDFSRSSEYSTGSNGDTPRRKRILKTTNAYFYWVTREQGSFDWFKGVMNEVAELDQRGVIEMHNYLTSVYEEGDARSALITMVQALNHAKNGVDIVSGTRVRTHFARPNWKKVLTKLSSKHCNARIGVFYCGVPVLGKELSKLCNTFNQKGSTKFEFHKEHF

SEQ ID NO: 83649 - protein, 853 aa, Arabidopsis thaliana
  peptide (1)..(853): Ceres Seq. ID no. 12671231
MKRTSSNRFRQFSQELKAEAVAKAKQLSQELKRFSWSRSFSGNLTTTSTAANQSGGAGGGLVNSALEARALRKQRAQLDRTRSSAQRALRGLRFISNKQKNVDGWNDVQSNFEKFEKNGYIYRSDFAQCIGMKDSKEFALELFDALSRRRRLKVEKINHDELYEYWSQINDESFDSRLQIFFDIVDKNEDGRITEEEVKEIIMLSASANKLSRLKEQAEEYAALIMEELDPERLGYIELWQLETLLLQKDTYLNYSQALSYTSQALSQNLQGLRGKSRIHRMSSDFVYIMQENWKRIWVLSLWIMIMIGLFLWKFFQYKQKDAFHVMGYCLLTAKGAAETLKFNMALILFPVCRNTITWLRSTRLSYFVPFDDNINFHKTIAGAIVVAVILHIGDHLACDFPRIVRATEYDYNRYLFHYFQTKQPTYFDLVKGPEGITGILMVILMIISFTLATRWFRRNLVKLPKPFDRLTGFNAFWYSHHLFVIVYILLILHGIFLYFAKPWYVRTTWMYLAVPVLLYGGERTLRYFRSGSYSVRLLKVAIYPGNVLTLQMSKPTQFRYKSGQYMFVQCPAVSPFEWHPFSITSAPEDDYISIHIRQLGDWTQELKRVFSEVCEPPVGGKSGLLRADETTKKSLPKLLIDGPYGAPAQDYRKYDVLLLVGLGIGATPFISILKDLLNNIVKMEEHADSISDFSRSSEYSTGSNGDTPRRKRILKTTNAYFYWVTREQGSFDWFKGVMNEVAELDQRGVIEMHNYLTSVYEEGDARSALITMVQALNHAKNGVDIVSGTRVRTHFARPNWKKVLTKLSSKHCNARIGVFYCGVPVLGKELSKLCNTFNQKGSTKFEFHKEHF

SEQ ID NO: 83650 - DNA, 1539 bp, Arabidopsis thaliana
  misc_feature (1)..(1539): Ceres Seq. ID no. 12671265
  misc_feature (1)..(1539): Ortholog of  Ceres SEQ ID NO 12614670 as cited in SEQ ID NO 68565
atgatggttacattagtactaaagtacgtcctcgtgatagtcatgaccttgatattaagagtcctatacgactccatttgttgctacttcctcacaccaagacgaatcaagaagtttatggaacgtcaaggcatcacggggcctaaaccccgtctcctcaccggaaacatcattgatatctccaaaatgctctctcactccgcttctaacgactgctcttccatccaccacaacatcgtcccacgccttcttcctcattacgtctcttggtccaaacaatatgggaagagatttataatgtggaacgggacagaaccgagactatgcctaacggagaccgagatgattaaagaattgctaacgaagcacaatccggtcaccgggaaatcatggctgcaacaacaaggaactaaagggtttatagggcgtgggcttctcatggccaacggcgaggcttggcaccaccaacgtcacatggcagctccggctttcacacgtgataggctcaaaggatacgctaagcatatggtggaatgcacgaagatgatggctgagaggctgagaaaggaggttggagaagaggtggaaattggtgaggagatgcggcggctcacggcggatataatatcgaggacggaatttggaagtagttgtgataaaggaaaggagctttttagtctactcactgtacttcaacgtctttgtgctcaagccactcgccacctctgttttcccggtagccggtttctacctagcaaatacaatagagaaataaagtctctgaaaacggaagtggaacgtcttttgatggagattatagacagccgaaaagacagtgtagagatcggtcggagtagctcatacggggatgacctcttagggcttcttttgaaccagatggatagcaacaagaacaaccttaatgttcaaatgataatggatgagtgcaagactttcttctttaccggtcatgagacaacctctcttctcctcacgtggactctcatgctccttgctcataatcccacttggcaggacaatgtccgcgatgaggtccggcaagtttgtggccaagatggtgtcccttccgttgaacagctctcaagtcttacttcgttaaacaaagtgataaacgagtcattaagactttaccctcctgccacacttttaccaagaatggcatttgaagacataaaactaggtgacctaatcatccctaaaggtttatctatttggatccctgtccttgcgatccatcatagtaatgaattatggggcgaagatgcgaacgagttcaaccctgaacgatttactactagaagttttgcatctagtcgccattttatgccttttgcggctggacctaggaactgcattggccagacttttgccatgatggaggcgaagataatattagcaatgcttgtttccaaattcagttttgcaatatcggagaactatagacatgctcctatagttgtgcttactataaaacctaagtatggagttcaattagttttgaagccacttgatctatga

SEQ ID NO: 83651 - protein, 512 aa, Arabidopsis thaliana
  peptide (1)..(512): Ceres Seq. ID no. 12671266
MMVTLVLKYVLVIVMTLILRVLYDSICCYFLTPRRIKKFMERQGITGPKPRLLTGNIIDISKMLSHSASNDCSSIHHNIVPRLLPHYVSWSKQYGKRFIMWNGTEPRLCLTETEMIKELLTKHNPVTGKSWLQQQGTKGFIGRGLLMANGEAWHHQRHMAAPAFTRDRLKGYAKHMVECTKMMAERLRKEVGEEVEIGEEMRRLTADIISRTEFGSSCDKGKELFSLLTVLQRLCAQATRHLCFPGSRFLPSKYNREIKSLKTEVERLLMEIIDSRKDSVEIGRSSSYGDDLLGLLLNQMDSNKNNLNVQMIMDECKTFFFTGHETTSLLLTWTLMLLAHNPTWQDNVRDEVRQVCGQDGVPSVEQLSSLTSLNKVINESLRLYPPATLLPRMAFEDIKLGDLIIPKGLSIWIPVLAIHHSNELWGEDANEFNPERFTTRSFASSRHFMPFAAGPRNCIGQTFAMMEAKIILAMLVSKFSFAISENYRHAPIVVLTIKPKYGVQLVLKPLDL

SEQ ID NO: 83652 - protein, 511 aa, Arabidopsis thaliana
  peptide (1)..(511): Ceres Seq. ID no. 12671267
MVTLVLKYVLVIVMTLILRVLYDSICCYFLTPRRIKKFMERQGITGPKPRLLTGNIIDISKMLSHSASNDCSSIHHNIVPRLLPHYVSWSKQYGKRFIMWNGTEPRLCLTETEMIKELLTKHNPVTGKSWLQQQGTKGFIGRGLLMANGEAWHHQRHMAAPAFTRDRLKGYAKHMVECTKMMAERLRKEVGEEVEIGEEMRRLTADIISRTEFGSSCDKGKELFSLLTVLQRLCAQATRHLCFPGSRFLPSKYNREIKSLKTEVERLLMEIIDSRKDSVEIGRSSSYGDDLLGLLLNQMDSNKNNLNVQMIMDECKTFFFTGHETTSLLLTWTLMLLAHNPTWQDNVRDEVRQVCGQDGVPSVEQLSSLTSLNKVINESLRLYPPATLLPRMAFEDIKLGDLIIPKGLSIWIPVLAIHHSNELWGEDANEFNPERFTTRSFASSRHFMPFAAGPRNCIGQTFAMMEAKIILAMLVSKFSFAISENYRHAPIVVLTIKPKYGVQLVLKPLDL

SEQ ID NO: 83653 - protein, 498 aa, Arabidopsis thaliana
  peptide (1)..(498): Ceres Seq. ID no. 12671268
MTLILRVLYDSICCYFLTPRRIKKFMERQGITGPKPRLLTGNIIDISKMLSHSASNDCSSIHHNIVPRLLPHYVSWSKQYGKRFIMWNGTEPRLCLTETEMIKELLTKHNPVTGKSWLQQQGTKGFIGRGLLMANGEAWHHQRHMAAPAFTRDRLKGYAKHMVECTKMMAERLRKEVGEEVEIGEEMRRLTADIISRTEFGSSCDKGKELFSLLTVLQRLCAQATRHLCFPGSRFLPSKYNREIKSLKTEVERLLMEIIDSRKDSVEIGRSSSYGDDLLGLLLNQMDSNKNNLNVQMIMDECKTFFFTGHETTSLLLTWTLMLLAHNPTWQDNVRDEVRQVCGQDGVPSVEQLSSLTSLNKVINESLRLYPPATLLPRMAFEDIKLGDLIIPKGLSIWIPVLAIHHSNELWGEDANEFNPERFTTRSFASSRHFMPFAAGPRNCIGQTFAMMEAKIILAMLVSKFSFAISENYRHAPIVVLTIKPKYGVQLVLKPLDL

SEQ ID NO: 83654 - DNA, 3108 bp, Arabidopsis thaliana
  misc_feature (1)..(3108): Ceres Seq. ID no. 12671277
  misc_feature (1)..(3108): Ortholog of  Ceres SEQ ID NO 14308747 as cited in SEQ ID NO 55372
atgagtagcgtcgcagaggataattcctttacctgtgacatagcaaccatcttcgtggctatctgtcggaaccctcctgctaatccttcagattctttatttcgtcagtccataattgacttactctacttcaattcgtcaccagtcgttatgcaatctgaatatgaaattagtactctgtatcaagaagctcatagccgttggttgaaacctcctgaggtactcttcatattgcagaatcatgaaagcttgacgcttactaatacagctcctcaaagacctacaagtgggtctttgttgcttttcaataaaagggttcttaaattctttcgtaaagatggtcatcaatggcggagaaaaagagatggtagagctattgctgaagcacatgaacgacttaaggtgggtaacgctgaggcattgaattgttattatgctcatggagagcaagaccctacttttcggaggcgtatctactggatgttagatccggaatacgagcatattgtccttgttcattacagggatgtaagcgaacgagaagagggacaacaaactggtggacaagtttatcagtttgcaccaattctttccactcaaaatgtaagctacaatcagtacattggtgattcttcggacatatatcagcagtcttctacttcgccgggcgttgcagaggttaactctaacttggaaggcagtgcaagttcttctgagtttggacaggctttaaagatgcttaaggaacaactgagtatcggagatgaacatgttaattctgttgatccacactacattcaaccagaaagtcttgatagtctccagtttttagagtacagtgacatagatcaccttgctcaaccaacaactgtatatcagagaccagagaataacaaactagagagatgttatggaggcaattttggagcccaatacagtgccaagaatgattctaacaaactagagagatgctatggagggtatgttggtggagccgaataccattctagcaatctcatgctcgtaaagaatggttcaggaccttcaggtggtacaggagggagtggagatcaagggtctgaatcttggaaagatgtgttggaggcatgtgaggcttctatacctcttaactctgagggaagcacaccaagttctgcaaaaggattgctagctggattgcaggaagactcaaattggagttacagcaatcaggttgaccaatctacatttttgttgcctcaagatcttggttctttccaacttcctgcttcttattctgcactggtagctcctgagaataatggtgaatactgtggaatgatggaggacggaatgaaaatcggtctgcctttcgagcaagaaatgagagttacaggtgctcataatcaaaagtttactatccaggacatatcaccagactggggttacgcgaatgaaactacaaaggtgataatcattggatcatttctctgtgatccaacagaatctacatggtcttgcatgtttgggaatgctcaagttccttttgagatcattaaagaaggtgttatacggtgtgaagcccctcaatgtggtcctggaaaagtcaatttatgcattacttctggagatggactcttgtgtagtgaaataagggaatttgagtatcgtgagaagcctgacacatgttgccctaaatgcagtgagccacagacctctgatatgtccacaagtccaaatgagcttatattacttgtaaggtttgtgcaaacacttctatcagaccgatcgtcggaaagaaaaagtaacttagagtctggcaatgataagctgttgacgaaactgaaagctgatgatgatcaatggagacatgtcataggaacgatcatagatggcagtgcatcatcaacaagtacagttgattggcttctacaggaactgcttaaagacaagctggatacatggctgtcttcaagatcatgtgatgaagattacataacgtgttctttgtcaaagcaggaacaaggtattatccatatggttgcaggccttggcttcgagtgggcattttatccaatccttgctcatggagtcaatgtagattttcgtgatattaagggatggagcgctcttcattgggctgcacaatttggaagtgaaaaaatggtggctgcccttatagcttcaggggcatcggctggagcagtgactgatccaagtcggcaagatccaaatggcaaaactgcagcttcaatagctgcctctaatggccacaagggtcttgcaggttatctgtcagaggtggcgttaacaaaccatctctcatcgctcacacttgaagaaaccgagaattcaaaagacactgctcaagtgcaaactgagaaaactttgaattccatctcagaacaaagtccttccggtaacgaggatcaagtgtcattgaaagacacactggctgcagtacgaaatgcagctcaagcagctgcaagaatccaagcagcttttcgcgcacattcattcagaaagcgaaaacaaagagaagcagctttggttgcttgcttacaagagtatgggatgtattgtgaagatatagaagggatctcggccatgtcaaagctaacgtttggaaagggcaggaactacaattcagcagctttatctattcagaagaattttcgtggctataaagatcgtaaatgttttctagagcttcgccagaaagttgtaaagattcaggctcatgtgcgaggttaccaaataaggaaaaattacaaagtaatctgttgggcagtaagaattttagataaggttgtactcaggtggagaagaaaaggagttggactaagagggttcagacaagacgtagagagtacagaggacagtgaagacgaagacattctcaaggtgttccgcaaacagaaagtagatgttgcagtgaacgaggctttctctcgtgttctatcgatgtctaactctccagaggctcgccagcaataccaccgagtgctcaagagatattgtcagacaaaggctgagcttggaaaaacagagacattagttggagaggacgatgatgggttgttcgacatagctgatatggaatatgacactttgttttcattgccttga

SEQ ID NO: 83655 - protein, 1035 aa, Arabidopsis thaliana
  peptide (1)..(1035): Ceres Seq. ID no. 12671278
MSSVAEDNSFTCDIATIFVAICRNPPANPSDSLFRQSIIDLLYFNSSPVVMQSEYEISTLYQEAHSRWLKPPEVLFILQNHESLTLTNTAPQRPTSGSLLLFNKRVLKFFRKDGHQWRRKRDGRAIAEAHERLKVGNAEALNCYYAHGEQDPTFRRRIYWMLDPEYEHIVLVHYRDVSEREEGQQTGGQVYQFAPILSTQNVSYNQYIGDSSDIYQQSSTSPGVAEVNSNLEGSASSSEFGQALKMLKEQLSIGDEHVNSVDPHYIQPESLDSLQFLEYSDIDHLAQPTTVYQRPENNKLERCYGGNFGAQYSAKNDSNKLERCYGGYVGGAEYHSSNLMLVKNGSGPSGGTGGSGDQGSESWKDVLEACEASIPLNSEGSTPSSAKGLLAGLQEDSNWSYSNQVDQSTFLLPQDLGSFQLPASYSALVAPENNGEYCGMMEDGMKIGLPFEQEMRVTGAHNQKFTIQDISPDWGYANETTKVIIIGSFLCDPTESTWSCMFGNAQVPFEIIKEGVIRCEAPQCGPGKVNLCITSGDGLLCSEIREFEYREKPDTCCPKCSEPQTSDMSTSPNELILLVRFVQTLLSDRSSERKSNLESGNDKLLTKLKADDDQWRHVIGTIIDGSASSTSTVDWLLQELLKDKLDTWLSSRSCDEDYITCSLSKQEQGIIHMVAGLGFEWAFYPILAHGVNVDFRDIKGWSALHWAAQFGSEKMVAALIASGASAGAVTDPSRQDPNGKTAASIAASNGHKGLAGYLSEVALTNHLSSLTLEETENSKDTAQVQTEKTLNSISEQSPSGNEDQVSLKDTLAAVRNAAQAAARIQAAFRAHSFRKRKQREAALVACLQEYGMYCEDIEGISAMSKLTFGKGRNYNSAALSIQKNFRGYKDRKCFLELRQKVVKIQAHVRGYQIRKNYKVICWAVRILDKVVLRWRRKGVGLRGFRQDVESTEDSEDEDILKVFRKQKVDVAVNEAFSRVLSMSNSPEARQQYHRVLKRYCQTKAELGKTETLVGEDDDGLFDIADMEYDTLFSLP

SEQ ID NO: 83656 - protein, 985 aa, Arabidopsis thaliana
  peptide (1)..(985): Ceres Seq. ID no. 12671279
MQSEYEISTLYQEAHSRWLKPPEVLFILQNHESLTLTNTAPQRPTSGSLLLFNKRVLKFFRKDGHQWRRKRDGRAIAEAHERLKVGNAEALNCYYAHGEQDPTFRRRIYWMLDPEYEHIVLVHYRDVSEREEGQQTGGQVYQFAPILSTQNVSYNQYIGDSSDIYQQSSTSPGVAEVNSNLEGSASSSEFGQALKMLKEQLSIGDEHVNSVDPHYIQPESLDSLQFLEYSDIDHLAQPTTVYQRPENNKLERCYGGNFGAQYSAKNDSNKLERCYGGYVGGAEYHSSNLMLVKNGSGPSGGTGGSGDQGSESWKDVLEACEASIPLNSEGSTPSSAKGLLAGLQEDSNWSYSNQVDQSTFLLPQDLGSFQLPASYSALVAPENNGEYCGMMEDGMKIGLPFEQEMRVTGAHNQKFTIQDISPDWGYANETTKVIIIGSFLCDPTESTWSCMFGNAQVPFEIIKEGVIRCEAPQCGPGKVNLCITSGDGLLCSEIREFEYREKPDTCCPKCSEPQTSDMSTSPNELILLVRFVQTLLSDRSSERKSNLESGNDKLLTKLKADDDQWRHVIGTIIDGSASSTSTVDWLLQELLKDKLDTWLSSRSCDEDYITCSLSKQEQGIIHMVAGLGFEWAFYPILAHGVNVDFRDIKGWSALHWAAQFGSEKMVAALIASGASAGAVTDPSRQDPNGKTAASIAASNGHKGLAGYLSEVALTNHLSSLTLEETENSKDTAQVQTEKTLNSISEQSPSGNEDQVSLKDTLAAVRNAAQAAARIQAAFRAHSFRKRKQREAALVACLQEYGMYCEDIEGISAMSKLTFGKGRNYNSAALSIQKNFRGYKDRKCFLELRQKVVKIQAHVRGYQIRKNYKVICWAVRILDKVVLRWRRKGVGLRGFRQDVESTEDSEDEDILKVFRKQKVDVAVNEAFSRVLSMSNSPEARQQYHRVLKRYCQTKAELGKTETLVGEDDDGLFDIADMEYDTLFSLP

SEQ ID NO: 83657 - protein, 875 aa, Arabidopsis thaliana
  peptide (1)..(875): Ceres Seq. ID no. 12671280
MLDPEYEHIVLVHYRDVSEREEGQQTGGQVYQFAPILSTQNVSYNQYIGDSSDIYQQSSTSPGVAEVNSNLEGSASSSEFGQALKMLKEQLSIGDEHVNSVDPHYIQPESLDSLQFLEYSDIDHLAQPTTVYQRPENNKLERCYGGNFGAQYSAKNDSNKLERCYGGYVGGAEYHSSNLMLVKNGSGPSGGTGGSGDQGSESWKDVLEACEASIPLNSEGSTPSSAKGLLAGLQEDSNWSYSNQVDQSTFLLPQDLGSFQLPASYSALVAPENNGEYCGMMEDGMKIGLPFEQEMRVTGAHNQKFTIQDISPDWGYANETTKVIIIGSFLCDPTESTWSCMFGNAQVPFEIIKEGVIRCEAPQCGPGKVNLCITSGDGLLCSEIREFEYREKPDTCCPKCSEPQTSDMSTSPNELILLVRFVQTLLSDRSSERKSNLESGNDKLLTKLKADDDQWRHVIGTIIDGSASSTSTVDWLLQELLKDKLDTWLSSRSCDEDYITCSLSKQEQGIIHMVAGLGFEWAFYPILAHGVNVDFRDIKGWSALHWAAQFGSEKMVAALIASGASAGAVTDPSRQDPNGKTAASIAASNGHKGLAGYLSEVALTNHLSSLTLEETENSKDTAQVQTEKTLNSISEQSPSGNEDQVSLKDTLAAVRNAAQAAARIQAAFRAHSFRKRKQREAALVACLQEYGMYCEDIEGISAMSKLTFGKGRNYNSAALSIQKNFRGYKDRKCFLELRQKVVKIQAHVRGYQIRKNYKVICWAVRILDKVVLRWRRKGVGLRGFRQDVESTEDSEDEDILKVFRKQKVDVAVNEAFSRVLSMSNSPEARQQYHRVLKRYCQTKAELGKTETLVGEDDDGLFDIADMEYDTLFSLP

SEQ ID NO: 83658 - DNA, 987 bp, Arabidopsis thaliana
  misc_feature (1)..(987): Ceres Seq. ID no. 12671281
  misc_feature (1)..(987): Ortholog of  Ceres SEQ ID NO 13594176 as cited in SEQ ID NO 59144
atggctaaaatgatcatattaccaaaactggtccaaaagagtgttgtatcgccgaagcagacttcgcaagagagagtagtaacaagcacgttctctccgccaaaaccagccggagaaaatatctcagttcaacggagatgcgagttgtcagaatatcatgcgtcgggacacgtcatctctcacctccctcctccgttcgcggttgcgaagcccactccgacgacgtctctgcttcctcagccggtacgactaattaacgcggatgcagaagatgcgagttgtagtagcacgcctagttggagaatcaagaagagtctaacatgtgtttgctttaaccgcaagagagcatatgaacgcatttgctctaacttgacaccattgcaggaagaaagacttaaaaggttgaggaagagaatgaagaattactatgatgcatcacggcccgatcatcaggatgcattaagagcactgtggtcagcaacgtatcctgatgaaaagcttcaagatttgatctcagaccagtggaaaaatatgggatggcaaggaaaagatccatccactgatttcagaggagctggattcatttcactggagaatcttctattctttgcaaagactttctcgacttcgtttcagcgtctgttgaataaacaaggaggcaaaagagcggcttgggaatatccattcgctgtagcgggcgtcaacataaccttcatgatcatgcaaatgcttgaccttgaagcatcaaaacctaggagttttatacggttggtgttcttacaaatgttgtcagaaagcgaatgggcctttgatttgctttactgtgtggcctttgtggtaatggacaagcaatggctggacaagaacgccacctacatggaattcaacgatgtgctaagatgtacaagggggcagcttgagagagagctgatgatggatgatgttttcagaattgaggatatgccttctttctctcttctctcttag

SEQ ID NO: 83659 - protein, 328 aa, Arabidopsis thaliana
  peptide (1)..(328): Ceres Seq. ID no. 12671282
MAKMIILPKLVQKSVVSPKQTSQERVVTSTFSPPKPAGENISVQRRCELSEYHASGHVISHLPPPFAVAKPTPTTSLLPQPVRLINADAEDASCSSTPSWRIKKSLTCVCFNRKRAYERICSNLTPLQEERLKRLRKRMKNYYDASRPDHQDALRALWSATYPDEKLQDLISDQWKNMGWQGKDPSTDFRGAGFISLENLLFFAKTFSTSFQRLLNKQGGKRAAWEYPFAVAGVNITFMIMQMLDLEASKPRSFIRLVFLQMLSESEWAFDLLYCVAFVVMDKQWLDKNATYMEFNDVLRCTRGQLERELMMDDVFRIEDMPSFSLLS

SEQ ID NO: 83660 - protein, 325 aa, Arabidopsis thaliana
  peptide (1)..(325): Ceres Seq. ID no. 12671283
MIILPKLVQKSVVSPKQTSQERVVTSTFSPPKPAGENISVQRRCELSEYHASGHVISHLPPPFAVAKPTPTTSLLPQPVRLINADAEDASCSSTPSWRIKKSLTCVCFNRKRAYERICSNLTPLQEERLKRLRKRMKNYYDASRPDHQDALRALWSATYPDEKLQDLISDQWKNMGWQGKDPSTDFRGAGFISLENLLFFAKTFSTSFQRLLNKQGGKRAAWEYPFAVAGVNITFMIMQMLDLEASKPRSFIRLVFLQMLSESEWAFDLLYCVAFVVMDKQWLDKNATYMEFNDVLRCTRGQLERELMMDDVFRIEDMPSFSLLS

SEQ ID NO: 83661 - protein, 190 aa, Arabidopsis thaliana
  peptide (1)..(190): Ceres Seq. ID no. 12671284
MKNYYDASRPDHQDALRALWSATYPDEKLQDLISDQWKNMGWQGKDPSTDFRGAGFISLENLLFFAKTFSTSFQRLLNKQGGKRAAWEYPFAVAGVNITFMIMQMLDLEASKPRSFIRLVFLQMLSESEWAFDLLYCVAFVVMDKQWLDKNATYMEFNDVLRCTRGQLERELMMDDVFRIEDMPSFSLLS

SEQ ID NO: 83662 - DNA, 1395 bp, Arabidopsis thaliana
  misc_feature (1)..(1395): Ceres Seq. ID no. 12671297
  misc_feature (1)..(1395): Ortholog of  Ceres SEQ ID NO 12609146 as cited in SEQ ID NO 52118
  misc_feature (1)..(1395): Ortholog of  Ceres SEQ ID NO 14316158 as cited in SEQ ID NO 52413
  misc_feature (1)..(1395): Ortholog of  Ceres SEQ ID NO 12587035 as cited in SEQ ID NO 63605
atgactaataaacttcgctcagaagaaacaatcacgtccctttcttctttcatggctagtacacttagcattgcgtcaccctctccttgttctattccattgtcggtcacaaaggtctcgcctttaaagagaaagagacctacccacttaaatatccctgacctcaatcctcaacaaccgatttcaactgattacttccgtttcagagagggtgacgcaaaggtctcgcctttaaagagaaagagacctgcccacctaaatatccctgacctcaatcctcaacaaccgattcgaactgattacttcagtttcacagactttgctcaccaaaacggcaccgtaagcttcggtggcaatggttttggtgtcgtctccagaaacggtaagaagaagtttatggaagatactcacagaattgttccttgtttggttggtaactccaaaaagagtttctttggagtttatgatggtcatggaggtgctaaagctgcagaatttgtggctgagaatttgcacaaatatgttgttgagatgatggagaattgtaaggggaaggaggagaaagttgaagcctttaaggctgcttttttgaggactgatcgtgatttcctagaaaaggtaataaaggaacaatctttgaagggtgttgtgagtggtgcttgctgtgttactgctgtgatacaagatcaggagatgattgtatcaaatttgggagattgtagagctgtcctgtgtagagcaggtgttgctgaggctcttactgatgatcacaaaccaggaagggatgatgaaaaggaaagaattgagagtcagagtttgatacctttcatgacatttggtttacagggaggttatgtcgataatcatcaaggggcttggcgagttcagggaatacttgcggtttccagaagcattggagatgcacacttaaagaagtgggtggttgctgaacctgagacgagagtactagaactggaacaagatatggagtttcttgtcttagcttctgatggactttgggatgtggttagcaatcaagaagctgtttataccgtgttgcatgttctagctcagagaaagacgcctaaagaaagtgaggaggagaacttggttcagggctttgtcaatatgagcccatcttcgaaacttcgtcgagcttcactggtcaagtctcccagatgtgctaaatcccaaagttactactacaactcagagaatgaatcaccctcactcaaccgtgaaatagggagttcaccttcaaagtcaccgataacaccgtggaagtctctttgggccaaagcggcttgcaaagagcttgcgaacctggctgcaaaaagaggcagtatggatgatatcacagtggtgataattgatctcaaccattacaaaggctga

SEQ ID NO: 83663 - protein, 464 aa, Arabidopsis thaliana
  peptide (1)..(464): Ceres Seq. ID no. 12671298
MTNKLRSEETITSLSSFMASTLSIASPSPCSIPLSVTKVSPLKRKRPTHLNIPDLNPQQPISTDYFRFREGDAKVSPLKRKRPAHLNIPDLNPQQPIRTDYFSFTDFAHQNGTVSFGGNGFGVVSRNGKKKFMEDTHRIVPCLVGNSKKSFFGVYDGHGGAKAAEFVAENLHKYVVEMMENCKGKEEKVEAFKAAFLRTDRDFLEKVIKEQSLKGVVSGACCVTAVIQDQEMIVSNLGDCRAVLCRAGVAEALTDDHKPGRDDEKERIESQSLIPFMTFGLQGGYVDNHQGAWRVQGILAVSRSIGDAHLKKWVVAEPETRVLELEQDMEFLVLASDGLWDVVSNQEAVYTVLHVLAQRKTPKESEEENLVQGFVNMSPSSKLRRASLVKSPRCAKSQSYYYNSENESPSLNREIGSSPSKSPITPWKSLWAKAACKELANLAAKRGSMDDITVVIIDLNHYKG

SEQ ID NO: 83664 - protein, 447 aa, Arabidopsis thaliana
  peptide (1)..(447): Ceres Seq. ID no. 12671299
MASTLSIASPSPCSIPLSVTKVSPLKRKRPTHLNIPDLNPQQPISTDYFRFREGDAKVSPLKRKRPAHLNIPDLNPQQPIRTDYFSFTDFAHQNGTVSFGGNGFGVVSRNGKKKFMEDTHRIVPCLVGNSKKSFFGVYDGHGGAKAAEFVAENLHKYVVEMMENCKGKEEKVEAFKAAFLRTDRDFLEKVIKEQSLKGVVSGACCVTAVIQDQEMIVSNLGDCRAVLCRAGVAEALTDDHKPGRDDEKERIESQSLIPFMTFGLQGGYVDNHQGAWRVQGILAVSRSIGDAHLKKWVVAEPETRVLELEQDMEFLVLASDGLWDVVSNQEAVYTVLHVLAQRKTPKESEEENLVQGFVNMSPSSKLRRASLVKSPRCAKSQSYYYNSENESPSLNREIGSSPSKSPITPWKSLWAKAACKELANLAAKRGSMDDITVVIIDLNHYKG

SEQ ID NO: 83665 - protein, 332 aa, Arabidopsis thaliana
  peptide (1)..(332): Ceres Seq. ID no. 12671300
MEDTHRIVPCLVGNSKKSFFGVYDGHGGAKAAEFVAENLHKYVVEMMENCKGKEEKVEAFKAAFLRTDRDFLEKVIKEQSLKGVVSGACCVTAVIQDQEMIVSNLGDCRAVLCRAGVAEALTDDHKPGRDDEKERIESQSLIPFMTFGLQGGYVDNHQGAWRVQGILAVSRSIGDAHLKKWVVAEPETRVLELEQDMEFLVLASDGLWDVVSNQEAVYTVLHVLAQRKTPKESEEENLVQGFVNMSPSSKLRRASLVKSPRCAKSQSYYYNSENESPSLNREIGSSPSKSPITPWKSLWAKAACKELANLAAKRGSMDDITVVIIDLNHYKG

SEQ ID NO: 83666 - DNA, 1691 bp, Arabidopsis thaliana
  misc_feature (1)..(1691): Ceres Seq. ID no. 12671321
  misc_feature (1)..(1691): Ortholog of  Ceres SEQ ID NO 14301471 as cited in SEQ ID NO 68064
  misc_feature (1)..(1691): Ortholog of  Ceres SEQ ID NO 13574418 as cited in SEQ ID NO 0
  misc_feature (1)..(1691): Ortholog of  Ceres SEQ ID NO 13600272 as cited in SEQ ID NO 0
acactcaccactgttctaaattctctcttttttttttccttaaccaaaaaagctctctttttttcttctgggtttcatcgtttccaatctaaaatcatcgtagatttgtttgaaattcttcaaattgagccggtatcaagacatggcgggaagtgaagcggtagaagataaggagataaaatcggcggtttcaagctgtgaagcgtatttcgagaaagtacaatcaaggaagaatctacccaaatctcttcaagaaaccctaaactctgctttcgccggaatcccagtctcctccttccctcaagtccccggcggcagagtgatagagattcaagcggaaacacctgtatcagaagcagtaaagatcttatcagatagcaagattctatcagctcctgtgattaacacagatcacgagagttctttagattggagagaaagatatttaggaatcattgactactcttcaatcatcttatgggtgctagagagtgctgaactcgctgcaatcgcgttgtccgctacgtcagcaactgctgctggtgttggtgctggagctgttggagctcttggtgttgcagcgctcgggatgaccggtccggttgctgctgcggggctagccgcagctgcggttggagccgcggttgctggtggtgttgcagctgaacgtgggattggaaaagatgctccaactgctgctgataagttggggaaagatttctatgaagttattcttcaagaagagccttttaaatcaaccactgtaagttttttaacagaacattaagttatttgtgttgtgatggtcctgattgatcatggatatatgtttatgttgtcaggttagaacaatacttaagtcgtttagatgggctccttttcttccggtttcaacagagagttcgatgttgagtgttatgttgttactctcgaaatatcggttaagaaatgtgccggttattaaaacaggagaaccggatatcaagaactacgttactcaatctgcagttgttcatggtcttgaaggttgcaaaggtagagattggtttgatcacatttccgctctcccgatttctgatctcggcctcccgtttatgtcacccaatgaggttattagcattgagagtgaggaacttatccttgaagcatttaaaaggatgagagacaacaacattggtggtctccctgtagttgaagggttgaataagaagattgttggtaacattagcatgagagacattagatatttgcttttacaacctgaagtcttttccaatttcagacaactcacggtgaagagtttcgcgacaaagattgctacagcgggagaggaatacggtttagcgattcctgcaataacttgtaggcctgattcgactttagggagtgttataaacagtttggcttcgaggtcggtgcatcgggtttatgtagcggctggagatgagaatgagctttatggggttataacactgagggatgtgatctcttgtttcgtatcagaacctccaaattactttgagaactgtctcggtttctcggttaaggaaatgcttaaccgatgatctcttgtttctcagcttttttttggctttgttgtttgttctttcttggtttagatttctgaagttgttgtctttatatctaatttgtaaccaaccattttgagttttaaagttctatcattaacg

SEQ ID NO: 83667 - protein, 248 aa, Arabidopsis thaliana
  peptide (1)..(248): Ceres Seq. ID no. 12671322
MDICLCCQVRTILKSFRWAPFLPVSTESSMLSVMLLLSKYRLRNVPVIKTGEPDIKNYVTQSAVVHGLEGCKGRDWFDHISALPISDLGLPFMSPNEVISIESEELILEAFKRMRDNNIGGLPVVEGLNKKIVGNISMRDIRYLLLQPEVFSNFRQLTVKSFATKIATAGEEYGLAIPAITCRPDSTLGSVINSLASRSVHRVYVAAGDENELYGVITLRDVISCFVSEPPNYFENCLGFSVKEMLNR

SEQ ID NO: 83668 - protein, 219 aa, Arabidopsis thaliana
  peptide (1)..(219): Ceres Seq. ID no. 12671323
MLSVMLLLSKYRLRNVPVIKTGEPDIKNYVTQSAVVHGLEGCKGRDWFDHISALPISDLGLPFMSPNEVISIESEELILEAFKRMRDNNIGGLPVVEGLNKKIVGNISMRDIRYLLLQPEVFSNFRQLTVKSFATKIATAGEEYGLAIPAITCRPDSTLGSVINSLASRSVHRVYVAAGDENELYGVITLRDVISCFVSEPPNYFENCLGFSVKEMLNR

SEQ ID NO: 83669 - protein, 215 aa, Arabidopsis thaliana
  peptide (1)..(215): Ceres Seq. ID no. 12671324
MLLLSKYRLRNVPVIKTGEPDIKNYVTQSAVVHGLEGCKGRDWFDHISALPISDLGLPFMSPNEVISIESEELILEAFKRMRDNNIGGLPVVEGLNKKIVGNISMRDIRYLLLQPEVFSNFRQLTVKSFATKIATAGEEYGLAIPAITCRPDSTLGSVINSLASRSVHRVYVAAGDENELYGVITLRDVISCFVSEPPNYFENCLGFSVKEMLNR

SEQ ID NO: 83670 - DNA, 1137 bp, Arabidopsis thaliana
  misc_feature (1)..(1137): Ceres Seq. ID no. 12671329
  misc_feature (1)..(1137): Ortholog of  Ceres SEQ ID NO 14310880 as cited in SEQ ID NO 55342
  misc_feature (1)..(1137): Ortholog of  Ceres SEQ ID NO 14313451 as cited in SEQ ID NO 62474
atgaggttttgtgttttcgggtttttatcgcttttcttgattgtttctcctgcctccgcctggttcttccctaactccaccgcggtaccaccgtctctacgtaacactacacgtgttttctgggacgctttctccaatttcaccggttgtcaccacggccaaaacgttgatggtctctaccgtatcaaaaaatacttccaacgttttggttacatccctgaaacgttttcgggaaatttcaccgatgattttgatgatatcctcaaagccgctgtcgaattgtatcagacgaatttcaatcttaacgttaccggtgagcttgatgcgcttaccattcaacacatcgtgatcccgcgttgcggtaatcctgacgtggtcaacggtacttcgttgatgcatggcgggagaagaaagaccttcgaggtcaacttctcccgcacgcatttgcacgcggttaaacgctacacgttattcccaggcgagccacggtggccgagaaaccgccgtgacttgacctacgcgttcgacccgaaaaacccgttgacggaagaggtcaagagcgtgttctcacgcgcttttggtcgttggtctgacgtcaccgcgttaaacttcactctttccgagtctttctcgacgtctgacatcacaatcggattctacaccggcgaccatggtgacggagagcctttcgacggcgttttgggaacattagctcacgctttctctcctcccagcgggaaattccacctagacgcagatgagaactgggtggtctccggagacctagacagtttcctctccgtaactgctgcggttgatcttgaatcagtggcggttcacgagatcggtcatcttctaggtttaggacattcttcagttgaggaatccatcatgtatccaacgatcacgacagggaaacgtaaggttgacttaaccaatgatgacgtggaaggaatccaatacttgtacggtgcaaaccctaacttcaacggcacaacatctccaccgtcgaccactaaacaccagcgagacactggtggcttcagtgccgcctggagaatcgacggttcatcgagatcaacaattgttagtctcttgttgtcaaccgtcggattggtcttgtggttcttaccgtag

SEQ ID NO: 83671 - protein, 378 aa, Arabidopsis thaliana
  peptide (1)..(378): Ceres Seq. ID no. 12671330
MRFCVFGFLSLFLIVSPASAWFFPNSTAVPPSLRNTTRVFWDAFSNFTGCHHGQNVDGLYRIKKYFQRFGYIPETFSGNFTDDFDDILKAAVELYQTNFNLNVTGELDALTIQHIVIPRCGNPDVVNGTSLMHGGRRKTFEVNFSRTHLHAVKRYTLFPGEPRWPRNRRDLTYAFDPKNPLTEEVKSVFSRAFGRWSDVTALNFTLSESFSTSDITIGFYTGDHGDGEPFDGVLGTLAHAFSPPSGKFHLDADENWVVSGDLDSFLSVTAAVDLESVAVHEIGHLLGLGHSSVEESIMYPTITTGKRKVDLTNDDVEGIQYLYGANPNFNGTTSPPSTTKHQRDTGGFSAAWRIDGSSRSTIVSLLLSTVGLVLWFLP

SEQ ID NO: 83672 - protein, 247 aa, Arabidopsis thaliana
  peptide (1)..(247): Ceres Seq. ID no. 12671331
MHGGRRKTFEVNFSRTHLHAVKRYTLFPGEPRWPRNRRDLTYAFDPKNPLTEEVKSVFSRAFGRWSDVTALNFTLSESFSTSDITIGFYTGDHGDGEPFDGVLGTLAHAFSPPSGKFHLDADENWVVSGDLDSFLSVTAAVDLESVAVHEIGHLLGLGHSSVEESIMYPTITTGKRKVDLTNDDVEGIQYLYGANPNFNGTTSPPSTTKHQRDTGGFSAAWRIDGSSRSTIVSLLLSTVGLVLWFLP

SEQ ID NO: 83673 - DNA, 1785 bp, Arabidopsis thaliana
  misc_feature (1)..(1785): Ceres Seq. ID no. 12671340
  misc_feature (1)..(1785): Ortholog of  Ceres SEQ ID NO 15171224 as cited in SEQ ID NO 52348
atggctggttcatcaacgaaacgatttcctctatatgctaaagattatgagctctttgaagaggtaggagaaggtgttagtgctactgtgtatagagctcgttgcattgctcttaacgagattgtcgctgttaaaatcttggatctcgaaaaatgcaggaatgatttggaaacaatacgcaaggaagttcatataatgagtttgattgatcatccgaatttattgaaagcgcattgttcgtttatcgacagtagtagtttgtggattgtaatgccttatatgtcgggtggttcttgttttcatttaatgaaatctgtatatccggaaggtcttgagcaacctataattgctactttgttgagggaagtgcttaaagctcttgtttatcttcatagacaaggtcacatccatagagatgttaaggctgggaatatattgattcactcaaaaggcgtagttaaacttggagactttggagtttcagcatgtatgtttgatagtggagaaagaatgcaaacaaggaatacattcgttgggactccttgttggatggcacctgaggttatgcagcaactagatggatatgatttcaagtatcttgctcatggtcatgccccattttccaaatatccacctatgaaggtgctactaatgacattacaaaatgcacctcctcgtctagactatgacagagataagaaattctcaaagtcatttagagagttaatcgcagcgtgcttagttaaagatccgaaaaagcgtccaactgcagcaaaacttctgaaacatcctttcttcaaacatgctcggtctacagattatttgtcccgtaaaattcttcatggtctttctccacttggtgaacgttttaaaaagctcaaggaggcagaggctgagttgttcaaaggcataaatggtgacaaagaacagttgtctcagcatgagtatatgagaggaattagtgcttggaactttgatcttgaagcattgagaaggcaggcatcacttgtaattattccaaatgaagaaatctataattcagagatacaggaactgaacagaaatggagatgtaccaaaaggaaaaccagtgatacaaaggtcacagactatgcctttggaatatttctcagaaaaggcaagtgatatggtgagtgagagtagcagtcaattaaccggttcattacttccttcgtttcatcgcaaattcctcccggctcttggcaatgcatgtaactcgagcgatagagcagcagagaagctcgcttttgaagagccacgtcaagtactacacccattagcggatacaaagaaaattagaaaagcaggaagtgatcagcaggagaaaccaaaaaatggttacgcagatagtcctgtgaaccgtgaatcttccacattatcaaaggaaccattagcggatacaaagcaagttagaaaaccaggaaatgagcaggagaaaccaaaaaacggctatatagttagtcatgtgaaccgtgaatcttccacatcagaggaaatcctcccactgttgcagagtctcctggttcagaatgacattcaaagggcgcaagtaatcaggttaattagattttttgatcgaactgcgaaaacggaaaatccaatctcaaaaaccgaaggagtgcaggagaaagatctgcaatctcaagttcagtttttggagcaaagtgttgagaagcttgtagaggaagttcagagaagaaaagatataaatagtcagctagagcaacagatcagctctctgattagcagcaacaacatctcttaa

SEQ ID NO: 83674 - protein, 594 aa, Arabidopsis thaliana
  peptide (1)..(594): Ceres Seq. ID no. 12671341
MAGSSTKRFPLYAKDYELFEEVGEGVSATVYRARCIALNEIVAVKILDLEKCRNDLETIRKEVHIMSLIDHPNLLKAHCSFIDSSSLWIVMPYMSGGSCFHLMKSVYPEGLEQPIIATLLREVLKALVYLHRQGHIHRDVKAGNILIHSKGVVKLGDFGVSACMFDSGERMQTRNTFVGTPCWMAPEVMQQLDGYDFKYLAHGHAPFSKYPPMKVLLMTLQNAPPRLDYDRDKKFSKSFRELIAACLVKDPKKRPTAAKLLKHPFFKHARSTDYLSRKILHGLSPLGERFKKLKEAEAELFKGINGDKEQLSQHEYMRGISAWNFDLEALRRQASLVIIPNEEIYNSEIQELNRNGDVPKGKPVIQRSQTMPLEYFSEKASDMVSESSSQLTGSLLPSFHRKFLPALGNACNSSDRAAEKLAFEEPRQVLHPLADTKKIRKAGSDQQEKPKNGYADSPVNRESSTLSKEPLADTKQVRKPGNEQEKPKNGYIVSHVNRESSTSEEILPLLQSLLVQNDIQRAQVIRLIRFFDRTAKTENPISKTEGVQEKDLQSQVQFLEQSVEKLVEEVQRRKDINSQLEQQISSLISSNNIS

SEQ ID NO: 83675 - protein, 529 aa, Arabidopsis thaliana
  peptide (1)..(529): Ceres Seq. ID no. 12671342
MSLIDHPNLLKAHCSFIDSSSLWIVMPYMSGGSCFHLMKSVYPEGLEQPIIATLLREVLKALVYLHRQGHIHRDVKAGNILIHSKGVVKLGDFGVSACMFDSGERMQTRNTFVGTPCWMAPEVMQQLDGYDFKYLAHGHAPFSKYPPMKVLLMTLQNAPPRLDYDRDKKFSKSFRELIAACLVKDPKKRPTAAKLLKHPFFKHARSTDYLSRKILHGLSPLGERFKKLKEAEAELFKGINGDKEQLSQHEYMRGISAWNFDLEALRRQASLVIIPNEEIYNSEIQELNRNGDVPKGKPVIQRSQTMPLEYFSEKASDMVSESSSQLTGSLLPSFHRKFLPALGNACNSSDRAAEKLAFEEPRQVLHPLADTKKIRKAGSDQQEKPKNGYADSPVNRESSTLSKEPLADTKQVRKPGNEQEKPKNGYIVSHVNRESSTSEEILPLLQSLLVQNDIQRAQVIRLIRFFDRTAKTENPISKTEGVQEKDLQSQVQFLEQSVEKLVEEVQRRKDINSQLEQQISSLISSNNIS

SEQ ID NO: 83676 - protein, 504 aa, Arabidopsis thaliana
  peptide (1)..(504): Ceres Seq. ID no. 12671343
MPYMSGGSCFHLMKSVYPEGLEQPIIATLLREVLKALVYLHRQGHIHRDVKAGNILIHSKGVVKLGDFGVSACMFDSGERMQTRNTFVGTPCWMAPEVMQQLDGYDFKYLAHGHAPFSKYPPMKVLLMTLQNAPPRLDYDRDKKFSKSFRELIAACLVKDPKKRPTAAKLLKHPFFKHARSTDYLSRKILHGLSPLGERFKKLKEAEAELFKGINGDKEQLSQHEYMRGISAWNFDLEALRRQASLVIIPNEEIYNSEIQELNRNGDVPKGKPVIQRSQTMPLEYFSEKASDMVSESSSQLTGSLLPSFHRKFLPALGNACNSSDRAAEKLAFEEPRQVLHPLADTKKIRKAGSDQQEKPKNGYADSPVNRESSTLSKEPLADTKQVRKPGNEQEKPKNGYIVSHVNRESSTSEEILPLLQSLLVQNDIQRAQVIRLIRFFDRTAKTENPISKTEGVQEKDLQSQVQFLEQSVEKLVEEVQRRKDINSQLEQQISSLISSNNIS

SEQ ID NO: 83677 - DNA, 1062 bp, Arabidopsis thaliana
  misc_feature (1)..(1062): Ceres Seq. ID no. 12671375
  misc_feature (1)..(1062): Ortholog of  Ceres SEQ ID NO 13593955 as cited in SEQ ID NO 54278
  misc_feature (1)..(1062): Ortholog of  Ceres SEQ ID NO 13597380 as cited in SEQ ID NO 64054
atgttggtgttagcattattttccatttacttcttatcaatagaagctgtccggaatgaatcatttcctgcgctattagcttttggagattcaatggtcgatactggtaacaacaattacctcctgactctaatgaaaggaaattactggccatatgggtggaatttcgactcaaaaataccgaccggaagatttggaaacggaagagttttctccgatgtagttggtataatattaaagagttctttacaatgcttttttgtaatttctgctgaaggtttggggatcaaaagaattgtaccagcttatcgtaagttatacattgctccaagcgaccttaaaacgggtgtttcttttgcatcaggtggtgcaggagtcgaccctgttacatccaaattgctgagagttttatcgccagctgaccaagtaaaagatttcaaaggctacaaaagaaagctaaaaggtgtagtaggcaggtcaaaagcaaaaaaaatagttgcaaattcagtgattcttgtttctgaaggaaataatgatattggaatcacatatgcgattcatgatgctggtatgcgattaatgactccgaaagtatacaccagtaaattagttggttggaacaaaaaatttataaaagatttatatgatcacggagcaagaaaatttgcggtgatgggagtgataccattgggatgtttgcctatgtcaagacttatttttggtgggttcttcgtgtggtgtaatttcttggcaaacacaatctctgaagattacaacaaaaaattgaaaagcggaattaaaagttggagaggagcatcagattttaggggtgctaggtttgtctatgtcgacatgtacaactctcttatggatgttatcaacaatcataggaaatacggatttacccatgagaagaatggatgttgttgtatgcttacggcaatagtaccatgctccaacccagataaatatgtcttctatgactttgctcatccctccgagaaagcctacaaaacaattgctaaaaagcttgtcgaggatatcaagacaggacttgcctga

SEQ ID NO: 83678 - protein, 353 aa, Arabidopsis thaliana
  peptide (1)..(353): Ceres Seq. ID no. 12671376
MLVLALFSIYFLSIEAVRNESFPALLAFGDSMVDTGNNNYLLTLMKGNYWPYGWNFDSKIPTGRFGNGRVFSDVVGIILKSSLQCFFVISAEGLGIKRIVPAYRKLYIAPSDLKTGVSFASGGAGVDPVTSKLLRVLSPADQVKDFKGYKRKLKGVVGRSKAKKIVANSVILVSEGNNDIGITYAIHDAGMRLMTPKVYTSKLVGWNKKFIKDLYDHGARKFAVMGVIPLGCLPMSRLIFGGFFVWCNFLANTISEDYNKKLKSGIKSWRGASDFRGARFVYVDMYNSLMDVINNHRKYGFTHEKNGCCCMLTAIVPCSNPDKYVFYDFAHPSEKAYKTIAKKLVEDIKTGLA

SEQ ID NO: 83679 - protein, 322 aa, Arabidopsis thaliana
  peptide (1)..(322): Ceres Seq. ID no. 12671377
MVDTGNNNYLLTLMKGNYWPYGWNFDSKIPTGRFGNGRVFSDVVGIILKSSLQCFFVISAEGLGIKRIVPAYRKLYIAPSDLKTGVSFASGGAGVDPVTSKLLRVLSPADQVKDFKGYKRKLKGVVGRSKAKKIVANSVILVSEGNNDIGITYAIHDAGMRLMTPKVYTSKLVGWNKKFIKDLYDHGARKFAVMGVIPLGCLPMSRLIFGGFFVWCNFLANTISEDYNKKLKSGIKSWRGASDFRGARFVYVDMYNSLMDVINNHRKYGFTHEKNGCCCMLTAIVPCSNPDKYVFYDFAHPSEKAYKTIAKKLVEDIKTGLA

SEQ ID NO: 83680 - protein, 309 aa, Arabidopsis thaliana
  peptide (1)..(309): Ceres Seq. ID no. 12671378
MKGNYWPYGWNFDSKIPTGRFGNGRVFSDVVGIILKSSLQCFFVISAEGLGIKRIVPAYRKLYIAPSDLKTGVSFASGGAGVDPVTSKLLRVLSPADQVKDFKGYKRKLKGVVGRSKAKKIVANSVILVSEGNNDIGITYAIHDAGMRLMTPKVYTSKLVGWNKKFIKDLYDHGARKFAVMGVIPLGCLPMSRLIFGGFFVWCNFLANTISEDYNKKLKSGIKSWRGASDFRGARFVYVDMYNSLMDVINNHRKYGFTHEKNGCCCMLTAIVPCSNPDKYVFYDFAHPSEKAYKTIAKKLVEDIKTGLA

SEQ ID NO: 83681 - DNA, 1068 bp, Arabidopsis thaliana
  misc_feature (1)..(1068): Ceres Seq. ID no. 12671404
  misc_feature (1)..(1068): Ortholog of  Ceres SEQ ID NO 13584744 as cited in SEQ ID NO 69137
atggctaatgcaaaggaaacaacgttttatataacaatctctgtggttgcttttgtcattggcaaaatcgtaatcgctcttcttttctacaagagatggaagagaaagcacacaattcatgaaaatggatttccagtcaaaggaggaggaaaaatggtgatgtttagatctcaattacttaactctgtttcctccgacatgtttatgaagaagacacataaactaagcaacaaagacattcttggttctggaggatttggaactgtgtacagattagtcattgatgattcaactacttttgctgtgaagaggctaaacagaggaacttctgagagagacagagggtttcatagagagttagaagcaatggctgatataaaacacagaaacattgtaactcttcatggctactttacttctccacattacaatcttctcatctatgagctcatgcctaatgggagcttggattcttttctacacggaagaaaagctttggattgggcgtcgagatatagaatcgcagtaggagcggctagagggatttcgtaccttcaccatgattgcattcctcacattatccatagagacatcaaatctagcaacatacttcttgatcacaacatggaagctagggtttctgatttcggtttagccactttgatggagccagacaagactcatgtttcgacttttgtggctggaacattcggatatttagctcctgagtatttcgatactggaaaagcgacaatgaaaggagatgtttacagtttcggagttgttctgttggagcttttaactggaagaaaaccaacagatgacgagtttttcgaagaaggaacaaagcttgttacttgggttaaaggagtggtaagagaccaaagagaagaggtggtgatagataaccgattaagaggatcatcggttcaagagaatgaagagatgaacgatgtgtttggtatagcgatgatgtgtcttgaacccgaaccagcaattagaccagccatgactgaggttgtcaaattgctcgaatacatcaaactttccacacgttcctctttttga

SEQ ID NO: 83682 - protein, 355 aa, Arabidopsis thaliana
  peptide (1)..(355): Ceres Seq. ID no. 12671405
MANAKETTFYITISVVAFVIGKIVIALLFYKRWKRKHTIHENGFPVKGGGKMVMFRSQLLNSVSSDMFMKKTHKLSNKDILGSGGFGTVYRLVIDDSTTFAVKRLNRGTSERDRGFHRELEAMADIKHRNIVTLHGYFTSPHYNLLIYELMPNGSLDSFLHGRKALDWASRYRIAVGAARGISYLHHDCIPHIIHRDIKSSNILLDHNMEARVSDFGLATLMEPDKTHVSTFVAGTFGYLAPEYFDTGKATMKGDVYSFGVVLLELLTGRKPTDDEFFEEGTKLVTWVKGVVRDQREEVVIDNRLRGSSVQENEEMNDVFGIAMMCLEPEPAIRPAMTEVVKLLEYIKLSTRSSF

SEQ ID NO: 83683 - protein, 304 aa, Arabidopsis thaliana
  peptide (1)..(304): Ceres Seq. ID no. 12671406
MVMFRSQLLNSVSSDMFMKKTHKLSNKDILGSGGFGTVYRLVIDDSTTFAVKRLNRGTSERDRGFHRELEAMADIKHRNIVTLHGYFTSPHYNLLIYELMPNGSLDSFLHGRKALDWASRYRIAVGAARGISYLHHDCIPHIIHRDIKSSNILLDHNMEARVSDFGLATLMEPDKTHVSTFVAGTFGYLAPEYFDTGKATMKGDVYSFGVVLLELLTGRKPTDDEFFEEGTKLVTWVKGVVRDQREEVVIDNRLRGSSVQENEEMNDVFGIAMMCLEPEPAIRPAMTEVVKLLEYIKLSTRSSF

SEQ ID NO: 83684 - protein, 302 aa, Arabidopsis thaliana
  peptide (1)..(302): Ceres Seq. ID no. 12671407
MFRSQLLNSVSSDMFMKKTHKLSNKDILGSGGFGTVYRLVIDDSTTFAVKRLNRGTSERDRGFHRELEAMADIKHRNIVTLHGYFTSPHYNLLIYELMPNGSLDSFLHGRKALDWASRYRIAVGAARGISYLHHDCIPHIIHRDIKSSNILLDHNMEARVSDFGLATLMEPDKTHVSTFVAGTFGYLAPEYFDTGKATMKGDVYSFGVVLLELLTGRKPTDDEFFEEGTKLVTWVKGVVRDQREEVVIDNRLRGSSVQENEEMNDVFGIAMMCLEPEPAIRPAMTEVVKLLEYIKLSTRSSF

SEQ ID NO: 83685 - DNA, 1336 bp, Arabidopsis thaliana
  misc_feature (1)..(1336): Ceres Seq. ID no. 12671421
  misc_feature (1)..(1336): Ortholog of  Ceres SEQ ID NO 13599003 as cited in SEQ ID NO 0
atcacattcgtttcttgaatcccctctttcagagagagaaagagagtcagagagagagagagagagaatgttccatgctaagaaaccttcaagtatgaatggttcatatgagaacagagctatgtgcgttcaaggcgattcaggccttgtcctcaccaccgaccctaaaccgcgtttgcgttggaccgtcgaactccacgagcgttttgtggacgccgtcgctcagctcggcggccccgacagtatgaacacacatacacaaatatatattcaatccatttaaccaattataaatgtgttttttcaaagtttttgatcatttctatttgcagaagcgaccccaaagacgattatgagagttatgggtgtgaagggtcttactctttaccacctaaagagccatcttcagaaattcaggcttggaaagcagccgcacaaggagtacggagatcactccacaaaggaaggttcaagagcttctgccatggatattcagcgcaacgtagcttcttcttctggcatgatgagtcgcaacatgaatgagatgcaaatggaagtgcagagaaggttgcatgaacagctagaggtgcaaagacatctgcaactgaggattgaagcacaaggaaagtacatgcaatctatcttggagagagcttgccaaaccctagccggtgagaacatggcagccgccaccgcagcagccgccgtcggaggaggatacaagggtaatctgggaagttcgagtctttcagcagcggtgggcccacctcctcatcctcttagtttcccgccgtttcaagacctaaacatctatggaaacacaaccgaccaagtcctcgaccatcacaacttccatcatcaaaacatagagaaccatttcacgggtaacaatgctgcagacaccaacatttacttggggaagaagcgacctaatcctaattttggtaacgatgtaaggaaaggactattgatgtggtctgatcaagatcacgatctttccgcaaaccaatcgatcgatgatgagcatagaattcagatacagatggctacacatgtctccacggatttggattctttgtcggagatctacgaaaggaaatcaggtttatcaggtgatgaagggaataatggtgggaaattactggaaaggccatcgcctaggagatcaccattgagtcctatgatgaaccctaatggtggattaatacaaggaagaaactcgccatttgggtgatacaatttattaatttttatctatgagtgatgcatgggaatgtaagaacgagatatatatgttttgtcattgtgagtttgacgtagggtttagagatgagac

SEQ ID NO: 83686 - protein, 293 aa, Arabidopsis thaliana
  peptide (1)..(293): Ceres Seq. ID no. 12671422
MRVMGVKGLTLYHLKSHLQKFRLGKQPHKEYGDHSTKEGSRASAMDIQRNVASSSGMMSRNMNEMQMEVQRRLHEQLEVQRHLQLRIEAQGKYMQSILERACQTLAGENMAAATAAAAVGGGYKGNLGSSSLSAAVGPPPHPLSFPPFQDLNIYGNTTDQVLDHHNFHHQNIENHFTGNNAADTNIYLGKKRPNPNFGNDVRKGLLMWSDQDHDLSANQSIDDEHRIQIQMATHVSTDLDSLSEIYERKSGLSGDEGNNGGKLLERPSPRRSPLSPMMNPNGGLIQGRNSPFG

SEQ ID NO: 83687 - protein, 290 aa, Arabidopsis thaliana
  peptide (1)..(290): Ceres Seq. ID no. 12671423
MGVKGLTLYHLKSHLQKFRLGKQPHKEYGDHSTKEGSRASAMDIQRNVASSSGMMSRNMNEMQMEVQRRLHEQLEVQRHLQLRIEAQGKYMQSILERACQTLAGENMAAATAAAAVGGGYKGNLGSSSLSAAVGPPPHPLSFPPFQDLNIYGNTTDQVLDHHNFHHQNIENHFTGNNAADTNIYLGKKRPNPNFGNDVRKGLLMWSDQDHDLSANQSIDDEHRIQIQMATHVSTDLDSLSEIYERKSGLSGDEGNNGGKLLERPSPRRSPLSPMMNPNGGLIQGRNSPFG

SEQ ID NO: 83688 - protein, 249 aa, Arabidopsis thaliana
  peptide (1)..(249): Ceres Seq. ID no. 12671424
MDIQRNVASSSGMMSRNMNEMQMEVQRRLHEQLEVQRHLQLRIEAQGKYMQSILERACQTLAGENMAAATAAAAVGGGYKGNLGSSSLSAAVGPPPHPLSFPPFQDLNIYGNTTDQVLDHHNFHHQNIENHFTGNNAADTNIYLGKKRPNPNFGNDVRKGLLMWSDQDHDLSANQSIDDEHRIQIQMATHVSTDLDSLSEIYERKSGLSGDEGNNGGKLLERPSPRRSPLSPMMNPNGGLIQGRNSPFG

SEQ ID NO: 83689 - DNA, 2490 bp, Arabidopsis thaliana
  misc_feature (1)..(2490): Ceres Seq. ID no. 12671441
  misc_feature (1)..(2490): Ortholog of  Ceres SEQ ID NO 15176095 as cited in SEQ ID NO 59699
agtgaaagtccaacaaagatacaaagaagaagagagaagaagaagaagaatgaagctaacacataacttctcgtttcttcttcttcttcttcttgttcacatgagctcgaaacacattcttgcttctaaagattcgtcttcatatgtggtgtacttcggagctcactctcatgtcggagagataacagaagatgccatggatcgagtcaaagaaactcactacgactttcttggttccttcactggaagccgtgagagagccacagacgccattttctactcatacacaaagcacatcaacggattcgctgctcatctagaccacgaccttgcttatgaaatctccaaacaccctgaagttgtgtctgtcttcccaaacaaagctttaaagcttcacacgactcgatcatgggactttttgggtttggaacataactcttacgttccttcctcttccatttggagaaaggctaggttcggagaagataccattattgcaaatctcgatacaggtgtgtggccagaatcaaagagctttagagatgaaggcttgggaccaattccttcaagatggaagggaatatgtcaaaaccaaaaagatgccactttccattgcaataggaaactgataggagcaaggtacttcaacaagggctacgcagccgccgtaggacatctcaactcaagcttcgactctccacgtgatctcgacggccatggctcccacactctctccaccgccgccggagattttgttcctggagtcagcatcttcggccaaggcaacggcacggccaaaggtggctcccctcgcgccagagtggccgcgtacaaagtctgctggccgccagtcaaaggcaacgaatgctacgacgcagacgtcctcgctgctttcgacgctgccatacacgacggagctgacgtcatatccgtctctctaggcggcgagcctacctcgttttttaacgacagtgtcgctattggttcctttcacgccgctaagaagcggatcgtggttgtttgctctgccggaaactctggaccggcagatagtacggtttctaatgtcgcgccatggcagattaccgttggtgctagcaccatggaccgtgagtttgctagcaatcttgttctcggtaatggaaaacattacaagggacaaagcttgtcatccacggcattgccacatgctaagttctatccaattatggcatctgtaaatgcaaaagctaagaacgcttcagctttggatgcacaattatgcaaacttggatcgcttgaccctataaagacaaagggaaagatattagtgtgtctcagagggcagaacgggagggtggaaaagggtcgggccgtggctttagggggtggcatagggatggttcttgagaacacttatgtcaccgggaatgatttactcgctgacccgcatgtccttccagccacacagctcacttctaaggatagttttgctgtgtcaagatatatcagccaaaccaagaagccgattgcacacattactccttcaaggacagatttgggactaaaaccagcgcctgtaatggcttcattttcttcaaaaggtccaagcatagtggctcctcagattctgaagcctgacataactgctcctggtgtgagtgtgatcgctgcctacactggagcagtctctccaacaaacgaacagtttgatcctcgacgacttctgttcaatgctatttcaggaacctctatgtcttgtcctcatatctctggcattgcgggtcttctcaaaactcgttatccttcttggagccccgcagctatccgctctgccatcatgactaccgcaacaataatggatgacattcctggacctatccaaaatgcaaccaacatgaaggcaacacctttcagttttggggcaggacacgtccaaccaaatttagctgtgaatcccggtctcgtatacgatttaggcatcaaggattacctcaacttcttatgctcacttggatacaatgcatcacaaatctctgtattctcgggcaacaactttacttgttcaagccctaaaatcagtcttgttaacctcaactatccttccatcacagttccaaacttaacatcaagcaaagtcaccgtttcaaggactgttaaaaacgttggacgaccttcgatgtataccgtcaaggtgaataacccacagggtgtttatgtcgcggtgaagccaacgagcttgaatttcaccaaagttggagagcaaaagacgtttaaagtgatccttgtgaaaagtaagggaaatgtggctaagggctatgtgtttggagaattggtttggtcagacaagaagcatcgtgtgagaagtcccattgtggtgaagctctaactttgaatttgagtgccaattatgatatttgatctatgaagtttagttgcctatatgtttgaatttaaggcttacaaagaatggtgtaatgttgtgctgatcatataaaataatacctagac

SEQ ID NO: 83690 - protein, 788 aa, Arabidopsis thaliana
  peptide (1)..(788): Ceres Seq. ID no. 12671442
VKVQQRYKEEERRRRRMKLTHNFSFLLLLLLVHMSSKHILASKDSSSYVVYFGAHSHVGEITEDAMDRVKETHYDFLGSFTGSRERATDAIFYSYTKHINGFAAHLDHDLAYEISKHPEVVSVFPNKALKLHTTRSWDFLGLEHNSYVPSSSIWRKARFGEDTIIANLDTGVWPESKSFRDEGLGPIPSRWKGICQNQKDATFHCNRKLIGARYFNKGYAAAVGHLNSSFDSPRDLDGHGSHTLSTAAGDFVPGVSIFGQGNGTAKGGSPRARVAAYKVCWPPVKGNECYDADVLAAFDAAIHDGADVISVSLGGEPTSFFNDSVAIGSFHAAKKRIVVVCSAGNSGPADSTVSNVAPWQITVGASTMDREFASNLVLGNGKHYKGQSLSSTALPHAKFYPIMASVNAKAKNASALDAQLCKLGSLDPIKTKGKILVCLRGQNGRVEKGRAVALGGGIGMVLENTYVTGNDLLADPHVLPATQLTSKDSFAVSRYISQTKKPIAHITPSRTDLGLKPAPVMASFSSKGPSIVAPQILKPDITAPGVSVIAAYTGAVSPTNEQFDPRRLLFNAISGTSMSCPHISGIAGLLKTRYPSWSPAAIRSAIMTTATIMDDIPGPIQNATNMKATPFSFGAGHVQPNLAVNPGLVYDLGIKDYLNFLCSLGYNASQISVFSGNNFTCSSPKISLVNLNYPSITVPNLTSSKVTVSRTVKNVGRPSMYTVKVNNPQGVYVAVKPTSLNFTKVGEQKTFKVILVKSKGNVAKGYVFGELVWSDKKHRVRSPIVVKL

SEQ ID NO: 83691 - protein, 772 aa, Arabidopsis thaliana
  peptide (1)..(772): Ceres Seq. ID no. 12671443
MKLTHNFSFLLLLLLVHMSSKHILASKDSSSYVVYFGAHSHVGEITEDAMDRVKETHYDFLGSFTGSRERATDAIFYSYTKHINGFAAHLDHDLAYEISKHPEVVSVFPNKALKLHTTRSWDFLGLEHNSYVPSSSIWRKARFGEDTIIANLDTGVWPESKSFRDEGLGPIPSRWKGICQNQKDATFHCNRKLIGARYFNKGYAAAVGHLNSSFDSPRDLDGHGSHTLSTAAGDFVPGVSIFGQGNGTAKGGSPRARVAAYKVCWPPVKGNECYDADVLAAFDAAIHDGADVISVSLGGEPTSFFNDSVAIGSFHAAKKRIVVVCSAGNSGPADSTVSNVAPWQITVGASTMDREFASNLVLGNGKHYKGQSLSSTALPHAKFYPIMASVNAKAKNASALDAQLCKLGSLDPIKTKGKILVCLRGQNGRVEKGRAVALGGGIGMVLENTYVTGNDLLADPHVLPATQLTSKDSFAVSRYISQTKKPIAHITPSRTDLGLKPAPVMASFSSKGPSIVAPQILKPDITAPGVSVIAAYTGAVSPTNEQFDPRRLLFNAISGTSMSCPHISGIAGLLKTRYPSWSPAAIRSAIMTTATIMDDIPGPIQNATNMKATPFSFGAGHVQPNLAVNPGLVYDLGIKDYLNFLCSLGYNASQISVFSGNNFTCSSPKISLVNLNYPSITVPNLTSSKVTVSRTVKNVGRPSMYTVKVNNPQGVYVAVKPTSLNFTKVGEQKTFKVILVKSKGNVAKGYVFGELVWSDKKHRVRSPIVVKL

SEQ ID NO: 83692 - protein, 755 aa, Arabidopsis thaliana
  peptide (1)..(755): Ceres Seq. ID no. 12671444
MSSKHILASKDSSSYVVYFGAHSHVGEITEDAMDRVKETHYDFLGSFTGSRERATDAIFYSYTKHINGFAAHLDHDLAYEISKHPEVVSVFPNKALKLHTTRSWDFLGLEHNSYVPSSSIWRKARFGEDTIIANLDTGVWPESKSFRDEGLGPIPSRWKGICQNQKDATFHCNRKLIGARYFNKGYAAAVGHLNSSFDSPRDLDGHGSHTLSTAAGDFVPGVSIFGQGNGTAKGGSPRARVAAYKVCWPPVKGNECYDADVLAAFDAAIHDGADVISVSLGGEPTSFFNDSVAIGSFHAAKKRIVVVCSAGNSGPADSTVSNVAPWQITVGASTMDREFASNLVLGNGKHYKGQSLSSTALPHAKFYPIMASVNAKAKNASALDAQLCKLGSLDPIKTKGKILVCLRGQNGRVEKGRAVALGGGIGMVLENTYVTGNDLLADPHVLPATQLTSKDSFAVSRYISQTKKPIAHITPSRTDLGLKPAPVMASFSSKGPSIVAPQILKPDITAPGVSVIAAYTGAVSPTNEQFDPRRLLFNAISGTSMSCPHISGIAGLLKTRYPSWSPAAIRSAIMTTATIMDDIPGPIQNATNMKATPFSFGAGHVQPNLAVNPGLVYDLGIKDYLNFLCSLGYNASQISVFSGNNFTCSSPKISLVNLNYPSITVPNLTSSKVTVSRTVKNVGRPSMYTVKVNNPQGVYVAVKPTSLNFTKVGEQKTFKVILVKSKGNVAKGYVFGELVWSDKKHRVRSPIVVKL

SEQ ID NO: 83693 - DNA, 924 bp, Arabidopsis thaliana
  misc_feature (1)..(924): Ceres Seq. ID no. 12671445
  misc_feature (1)..(924): Ortholog of  Ceres SEQ ID NO 14315989 as cited in SEQ ID NO 57571
atgtcatttagatcacattcgagagggagtagtcaattcgcagagaaggtaacagaggatcctgtaacgtacaagacagcacaaagcaccgtgacgtgcatttaccaagcgcatatatccggattctggaggaatgttacggtattgtggtcaaagaatctcatgaatcattcgcttatggtcatggtgacaaacgtggaaggcgatatgaattattgttgcaaggttgatctgaagccttggcatttttggaacaagaaaggctacaagtcgttcgatgtggaaggtaacccggtagaggtgtattgggattttaggtctgcgaaattcacgagtagtccagagccgagctcggatttctacgtggctttagtctcggaggaagaggtggttttgcttgtgggtgattacaagaagaaagctttcaagagaacaaagtcgaggcctgctttggtcgaggctgccttgttctacaagaaagaaaacgtgtttggcaagaagtgtttcaccaccagggctaagttttacgataggaaaaaagaacacgagatcatcgtggaaagctcgacctccgggcctaaagagccagagatgtggattagcatagatgggattgtgttgatacaagtcaagaatttgcaatggaaattcagagggaatcagacagtgttggtagataaacaacctgttcaagtgttttgggacgtgtatgattggttgttcagcatgcctgggacaggccatggtttgttcatattcaaaccagggaccaccgaagacagcgacatggaaggaagtggtcacggtggtggtggtggtggtgagagcgatacaagtacagggagcaggtattattcgaccaagagtagtaacccttggccgccagagttttgcctttttcttcatgcatacaaacttgagtag

SEQ ID NO: 83694 - protein, 307 aa, Arabidopsis thaliana
  peptide (1)..(307): Ceres Seq. ID no. 12671446
MSFRSHSRGSSQFAEKVTEDPVTYKTAQSTVTCIYQAHISGFWRNVTVLWSKNLMNHSLMVMVTNVEGDMNYCCKVDLKPWHFWNKKGYKSFDVEGNPVEVYWDFRSAKFTSSPEPSSDFYVALVSEEEVVLLVGDYKKKAFKRTKSRPALVEAALFYKKENVFGKKCFTTRAKFYDRKKEHEIIVESSTSGPKEPEMWISIDGIVLIQVKNLQWKFRGNQTVLVDKQPVQVFWDVYDWLFSMPGTGHGLFIFKPGTTEDSDMEGSGHGGGGGGESDTSTGSRYYSTKSSNPWPPEFCLFLHAYKLE

SEQ ID NO: 83695 - protein, 253 aa, Arabidopsis thaliana
  peptide (1)..(253): Ceres Seq. ID no. 12671447
MNHSLMVMVTNVEGDMNYCCKVDLKPWHFWNKKGYKSFDVEGNPVEVYWDFRSAKFTSSPEPSSDFYVALVSEEEVVLLVGDYKKKAFKRTKSRPALVEAALFYKKENVFGKKCFTTRAKFYDRKKEHEIIVESSTSGPKEPEMWISIDGIVLIQVKNLQWKFRGNQTVLVDKQPVQVFWDVYDWLFSMPGTGHGLFIFKPGTTEDSDMEGSGHGGGGGGESDTSTGSRYYSTKSSNPWPPEFCLFLHAYKLE

SEQ ID NO: 83696 - protein, 248 aa, Arabidopsis thaliana
  peptide (1)..(248): Ceres Seq. ID no. 12671448
MVMVTNVEGDMNYCCKVDLKPWHFWNKKGYKSFDVEGNPVEVYWDFRSAKFTSSPEPSSDFYVALVSEEEVVLLVGDYKKKAFKRTKSRPALVEAALFYKKENVFGKKCFTTRAKFYDRKKEHEIIVESSTSGPKEPEMWISIDGIVLIQVKNLQWKFRGNQTVLVDKQPVQVFWDVYDWLFSMPGTGHGLFIFKPGTTEDSDMEGSGHGGGGGGESDTSTGSRYYSTKSSNPWPPEFCLFLHAYKLE

SEQ ID NO: 83697 - DNA, 2094 bp, Arabidopsis thaliana
  misc_feature (1)..(2094): Ceres Seq. ID no. 12671471
  misc_feature (1)..(2094): Ortholog of  Ceres SEQ ID NO 12586556 as cited in SEQ ID NO 64667
  misc_feature (1)..(2094): Ortholog of  Ceres SEQ ID NO 13660894 as cited in SEQ ID NO 67475
atggcaacaaaatcatttctcaaactcgctgctgatctctcttctttcaccgattcttcaccattcgcaaagcttcttgattcatgcatcaaatccaagttatcagcaatctacgtccgttatgtccatgcttctgtcatcaaatcaggtttctccaatgaaatatttatacagaatcggctcatcgacgcttattcgaaatgtgggtcactcgaggatggtcgccaagtgttcgacaaaatgcctcaacgaaatatctacacttggaactctgttgtgacgggtttgacaaagttaggatttttagatgaagctgattctttattcaggtcaatgcctgaacgtgatcaatgtacttggaattctatggtttcgggttttgcgcaacatgataggtgtgaagaggctttgtgttattttgctatgatgcataaggaagggtttgtgcttaatgaatatagttttgctagtgttcttagtgcttgttctggtttgaatgatatgaataagggtgtacaagtacattctttgattgcgaaatcgccttttttgtcagatgtgtatataggttctgctcttgttgacatgtattccaaatgcggtaatgtaaatgatgctcagagggtttttgatgagatgggtgatagaaatgttgtttcttggaatagtttgattacatgttttgaacaaaatggtcctgcggtggaagctctcgatgtttttcaaatgatgttagaatctagggttgagccagatgaggttactttagctagtgtgattagtgcctgtgcaagcttgtcggcgattaaggttggtcaggaagttcatggccgtgttgttaaaaacgataagttgaggaatgatataattctaagcaatgcgtttgtggatatgtatgcaaagtgcagcaggataaaagaagctaggtttatatttgatagcatgcctatcagaaatgttattgcagaaacctccatgatcagtgggtacgcaatggctgcaagcactaaggcggctagactcatgtttaccaaaatggcggagaggaatgttgtttcatggaatgcgcttattgctggctatacgcagaacggagaaaacgaagaagcacttagtctcttttgtctcttgaagagggaatcagtatgcccaactcactattcctttgctaatatcctcaaggcatgtgcagatcttgcagagttacatctcggtatgcaggctcacgtgcatgtcttgaagcatggctttaagtttcaatctggtgaagaagatgatatatttgttggcaattccttgatagatatgtatgtgaaatgtggttgtgtagaagagggttatcttgtattcaggaagatgatggaaagagattgtgtttcctggaacgcgatgattattggatttgcacaaaatggttatggaaatgaggctcttgagttgttcagagaaatgcttgagtctggagaaaaaccagatcacattaccatgattggtgttctttctgcatgcgggcatgctggatttgttgaagaagggcggcactacttttcttctatgaccagagattttggtgtggctccgcttagggatcactatacttgcatggtcgatttgcttggtcgagctggatttctcgaagaagcaaagagcatgattgaggagatgcctatgcaaccagattctgttatatggggttctttgcttgctgcttgtaaagtacataggaacattacgttaggtaaatacgttgcagagaagcttttagaagtagagccgtcaaattcaggaccatatgttcttctttctaacatgtacgctgagctcggaaaatgggaggatgtgatgaatgtacgaaagtcgatgaggaaagagggagtcacaaagcagccagggtgtagttggataaagatacaaggacatgatcatgttttcatggttaaagataaaagccatcctcgaaaaaagcagatacactcgcttcttgatattttaatagccgagatgagaccggaacaagatcatactgaaataggatcactctcgtccgaggaaatggattattcatctaatcttctttgggacaacgccatgtaa

SEQ ID NO: 83698 - protein, 697 aa, Arabidopsis thaliana
  peptide (1)..(697): Ceres Seq. ID no. 12671472
MATKSFLKLAADLSSFTDSSPFAKLLDSCIKSKLSAIYVRYVHASVIKSGFSNEIFIQNRLIDAYSKCGSLEDGRQVFDKMPQRNIYTWNSVVTGLTKLGFLDEADSLFRSMPERDQCTWNSMVSGFAQHDRCEEALCYFAMMHKEGFVLNEYSFASVLSACSGLNDMNKGVQVHSLIAKSPFLSDVYIGSALVDMYSKCGNVNDAQRVFDEMGDRNVVSWNSLITCFEQNGPAVEALDVFQMMLESRVEPDEVTLASVISACASLSAIKVGQEVHGRVVKNDKLRNDIILSNAFVDMYAKCSRIKEARFIFDSMPIRNVIAETSMISGYAMAASTKAARLMFTKMAERNVVSWNALIAGYTQNGENEEALSLFCLLKRESVCPTHYSFANILKACADLAELHLGMQAHVHVLKHGFKFQSGEEDDIFVGNSLIDMYVKCGCVEEGYLVFRKMMERDCVSWNAMIIGFAQNGYGNEALELFREMLESGEKPDHITMIGVLSACGHAGFVEEGRHYFSSMTRDFGVAPLRDHYTCMVDLLGRAGFLEEAKSMIEEMPMQPDSVIWGSLLAACKVHRNITLGKYVAEKLLEVEPSNSGPYVLLSNMYAELGKWEDVMNVRKSMRKEGVTKQPGCSWIKIQGHDHVFMVKDKSHPRKKQIHSLLDILIAEMRPEQDHTEIGSLSSEEMDYSSNLLWDNAM

SEQ ID NO: 83699 - protein, 617 aa, Arabidopsis thaliana
  peptide (1)..(617): Ceres Seq. ID no. 12671473
MPQRNIYTWNSVVTGLTKLGFLDEADSLFRSMPERDQCTWNSMVSGFAQHDRCEEALCYFAMMHKEGFVLNEYSFASVLSACSGLNDMNKGVQVHSLIAKSPFLSDVYIGSALVDMYSKCGNVNDAQRVFDEMGDRNVVSWNSLITCFEQNGPAVEALDVFQMMLESRVEPDEVTLASVISACASLSAIKVGQEVHGRVVKNDKLRNDIILSNAFVDMYAKCSRIKEARFIFDSMPIRNVIAETSMISGYAMAASTKAARLMFTKMAERNVVSWNALIAGYTQNGENEEALSLFCLLKRESVCPTHYSFANILKACADLAELHLGMQAHVHVLKHGFKFQSGEEDDIFVGNSLIDMYVKCGCVEEGYLVFRKMMERDCVSWNAMIIGFAQNGYGNEALELFREMLESGEKPDHITMIGVLSACGHAGFVEEGRHYFSSMTRDFGVAPLRDHYTCMVDLLGRAGFLEEAKSMIEEMPMQPDSVIWGSLLAACKVHRNITLGKYVAEKLLEVEPSNSGPYVLLSNMYAELGKWEDVMNVRKSMRKEGVTKQPGCSWIKIQGHDHVFMVKDKSHPRKKQIHSLLDILIAEMRPEQDHTEIGSLSSEEMDYSSNLLWDNAM

SEQ ID NO: 83700 - protein, 586 aa, Arabidopsis thaliana
  peptide (1)..(586): Ceres Seq. ID no. 12671474
MPERDQCTWNSMVSGFAQHDRCEEALCYFAMMHKEGFVLNEYSFASVLSACSGLNDMNKGVQVHSLIAKSPFLSDVYIGSALVDMYSKCGNVNDAQRVFDEMGDRNVVSWNSLITCFEQNGPAVEALDVFQMMLESRVEPDEVTLASVISACASLSAIKVGQEVHGRVVKNDKLRNDIILSNAFVDMYAKCSRIKEARFIFDSMPIRNVIAETSMISGYAMAASTKAARLMFTKMAERNVVSWNALIAGYTQNGENEEALSLFCLLKRESVCPTHYSFANILKACADLAELHLGMQAHVHVLKHGFKFQSGEEDDIFVGNSLIDMYVKCGCVEEGYLVFRKMMERDCVSWNAMIIGFAQNGYGNEALELFREMLESGEKPDHITMIGVLSACGHAGFVEEGRHYFSSMTRDFGVAPLRDHYTCMVDLLGRAGFLEEAKSMIEEMPMQPDSVIWGSLLAACKVHRNITLGKYVAEKLLEVEPSNSGPYVLLSNMYAELGKWEDVMNVRKSMRKEGVTKQPGCSWIKIQGHDHVFMVKDKSHPRKKQIHSLLDILIAEMRPEQDHTEIGSLSSEEMDYSSNLLWDNAM

SEQ ID NO: 83701 - DNA, 1535 bp, Arabidopsis thaliana
  misc_feature (1)..(1535): Ceres Seq. ID no. 12671475
  misc_feature (1)..(1535): Ortholog of  Ceres SEQ ID NO 15171805 as cited in SEQ ID NO 57433
  misc_feature (1)..(1535): Ortholog of  Ceres SEQ ID NO 13596743 as cited in SEQ ID NO 62731
gtctacatatctttttgaagccgtcataacttgcaagtaaagaatggtcagtctaatgttctttagttcggcctcacctttatgctcttctccatcaaaaattcccaaggctagtttggacttcgagatgaagaaacttggtggcagcacaaaacttgttcggaacgtgaatttggagaaactaaagaacaattatttgtttcctgaaatcaacagacgtgaacttgagcacattgaaaagcatccaaatgtacaattgataagccttgggactggtgatacaacagagcctattccagagcaaataacctcacatatgtctaacttcgcacatggcctatcgaccgtagaaggatatagagggtatgggttggaacaaggaaataagaccctgcgaaaagctattgctgaaacgttttatagagatttgcacgtaaaaagcaatgaagtttttgtatcagatggtgcacaaagtgatatttctcgtcttcagctactcttaggctccaacgtcacaattgctgtgcaagatcctaccttcccggcttacatagattcaagtgtgataatcggtcagactggtcatttccatgaaaaaaccaagaagtaccaaaatgttgtttacatgccatgtgggcctaacaatagtttcttccctgatctggctatgaccccaaggaccgatgtcatcttcttttgttctcctaataaccctactggttatgttgcatccagaaaacaactacatcaactagttgattttgcaaagaccaatgggtccattattatatttgactccgcatatgctgcttttatcgaagatggtagtccacgttctatatatgaaattcctggtgctagagaggtcgcgattgaagtttcatcattctctaagtttgcgggtttcaccggtgttcggcttggttggtctatcatccctgatgagctcttgtactctaatggttttcccattatcaacgatttccatcgtattgtgaccacttccttcaacggagcttcaaatattgctcaggctggtggattggcatgcctttcttctggtggccttaaggagatacggtcggtgaacaactactacaaagagaacaggaagatactgatggacactctagtctcgcttggcctcaaggtttatggtggtgtaaatgctccatacttgtgggttcactttaagggatcaaaatcgtgggacgtttttaatgagattcttgaaaacactcatataataacagtaccaggctcaggttttggacccggtggagaagagtatttgaggattagtgggtttggacgcagagatcacattgttgaagcatcaaagaggttgcagaatttctttaacacacgaaccaaacattttacttatctctcttccacttctaataccaattaggataaatacatctcgtgttatgtgcatcgtcttgaataatttcttccacctcttgtaccataatgtatattattgaaataataaaagctacgagaccatggaccatggtagtgtttttcat

SEQ ID NO: 83702 - protein, 456 aa, Arabidopsis thaliana
  peptide (1)..(456): Ceres Seq. ID no. 12671476
MVSLMFFSSASPLCSSPSKIPKASLDFEMKKLGGSTKLVRNVNLEKLKNNYLFPEINRRELEHIEKHPNVQLISLGTGDTTEPIPEQITSHMSNFAHGLSTVEGYRGYGLEQGNKTLRKAIAETFYRDLHVKSNEVFVSDGAQSDISRLQLLLGSNVTIAVQDPTFPAYIDSSVIIGQTGHFHEKTKKYQNVVYMPCGPNNSFFPDLAMTPRTDVIFFCSPNNPTGYVASRKQLHQLVDFAKTNGSIIIFDSAYAAFIEDGSPRSIYEIPGAREVAIEVSSFSKFAGFTGVRLGWSIIPDELLYSNGFPIINDFHRIVTTSFNGASNIAQAGGLACLSSGGLKEIRSVNNYYKENRKILMDTLVSLGLKVYGGVNAPYLWVHFKGSKSWDVFNEILENTHIITVPGSGFGPGGEEYLRISGFGRRDHIVEASKRLQNFFNTRTKHFTYLSSTSNTN

SEQ ID NO: 83703 - protein, 452 aa, Arabidopsis thaliana
  peptide (1)..(452): Ceres Seq. ID no. 12671477
MFFSSASPLCSSPSKIPKASLDFEMKKLGGSTKLVRNVNLEKLKNNYLFPEINRRELEHIEKHPNVQLISLGTGDTTEPIPEQITSHMSNFAHGLSTVEGYRGYGLEQGNKTLRKAIAETFYRDLHVKSNEVFVSDGAQSDISRLQLLLGSNVTIAVQDPTFPAYIDSSVIIGQTGHFHEKTKKYQNVVYMPCGPNNSFFPDLAMTPRTDVIFFCSPNNPTGYVASRKQLHQLVDFAKTNGSIIIFDSAYAAFIEDGSPRSIYEIPGAREVAIEVSSFSKFAGFTGVRLGWSIIPDELLYSNGFPIINDFHRIVTTSFNGASNIAQAGGLACLSSGGLKEIRSVNNYYKENRKILMDTLVSLGLKVYGGVNAPYLWVHFKGSKSWDVFNEILENTHIITVPGSGFGPGGEEYLRISGFGRRDHIVEASKRLQNFFNTRTKHFTYLSSTSNTN

SEQ ID NO: 83704 - protein, 428 aa, Arabidopsis thaliana
  peptide (1)..(428): Ceres Seq. ID no. 12671478
MKKLGGSTKLVRNVNLEKLKNNYLFPEINRRELEHIEKHPNVQLISLGTGDTTEPIPEQITSHMSNFAHGLSTVEGYRGYGLEQGNKTLRKAIAETFYRDLHVKSNEVFVSDGAQSDISRLQLLLGSNVTIAVQDPTFPAYIDSSVIIGQTGHFHEKTKKYQNVVYMPCGPNNSFFPDLAMTPRTDVIFFCSPNNPTGYVASRKQLHQLVDFAKTNGSIIIFDSAYAAFIEDGSPRSIYEIPGAREVAIEVSSFSKFAGFTGVRLGWSIIPDELLYSNGFPIINDFHRIVTTSFNGASNIAQAGGLACLSSGGLKEIRSVNNYYKENRKILMDTLVSLGLKVYGGVNAPYLWVHFKGSKSWDVFNEILENTHIITVPGSGFGPGGEEYLRISGFGRRDHIVEASKRLQNFFNTRTKHFTYLSSTSNTN

SEQ ID NO: 83705 - DNA, 2628 bp, Arabidopsis thaliana
  misc_feature (1)..(2628): Ceres Seq. ID no. 12671489
  misc_feature (1)..(2628): Ortholog of  Ceres SEQ ID NO 13590691 as cited in SEQ ID NO 66290
ctcaaaaccctaacccctttttcaaattacttccatctttagatcgaatcaaatcaatgtccgtcgacgatctccctccgtcgtcggcctccgccgtaacgccactaggctcctccgtgattccgattgtgaacaagctccaagacatattcgctcagctaggaagtcaatcgacgatcgctcttccgcaagtagctgtcgtcggaagtcaaagcagtggcaaatccagcgttctagaagctctcgtcggccgtgactttcttcctcgtggcaatgatatttgcacgcgccgacctctccgtctccagcttgttcagacgaaacctagctctgatggtggatccgatgaagagtggggcgagtttcttcaccacgatcctgttagacgtatctacgatttctctgagattcgccgtgagattgaggcggagactaatagagtatcaggagagaacaaaggtgtatcagatattccgattggtttgaagatattttcacctaatgttttggatattagtcttgtggatcttcctggtatcactaaggttcctgttggtgatcagccaagtgatatcgaagcgcgtataagaacgatgatcttgacttacattaaggaacctagttgcttgatacttgctgttagccctgctaatactgatttagcaaattcagatgcattacaaatcgcaggaaatgctgatcctgatggtcatagaaccataggtgtaatcacaaagttggatattatggacagaggtactgatgctcggaatcaccttctgggaaaaacaattcctcttcgacttggatacgtgggagttgtaaatcgtagtcaagaggatattttgatgaaccgtagcatcaaggatgctcttgttgcagaggaaaagttctttcgtagtcgtccagtttacagcggtctcacagatcgtttgggtgtccctcaactggcaaagaaattaaatcaggtccttgttcaacacatcaaggcactgcttcctagtttaaagtcacgtatcaacaatgcattgtttgctacagcaaaggagtatgagagctatggggatataacagagtctaggggtggtcaaggagctcttctcctcagttttattacaaaatactgcgaagcatactcctctaccctggaagggaaaagtaaagaaatgtcaacatctgagctctcgggtggagcaagaattctctacattttccaatcagtatttgttaagagcttagaggaggttgatccatgtgaagacttaacagctgatgatattcggactgcaatacaaaatgcaactggtcccagatctgcattatttgttccagatgttccatttgaagttcttgtcaggaggcaaatatctcgtttattagatcccagccttcagtgcgctaggttcatcttcgatgagctagtaaagattagtcatcagtgtatgatgaaagagttacagcggtttccagtcctgcaaaagcgcatggatgaggttattgggaactttctgcgagaaggtcttgaaccttcgcaggcaatgatccgagatcttattgaaatggagatggattatataaacacctcacacccaaattttatcgggggaactaaagccgtggagcaagcaatgcaaacagtcaaatcttctaggattccgcatcctgttgcgcggccaagggatactgtggagcctgagaggacggcttcttccgggagtcaaataaaaacccgatcttttctcggccgacaagctaatggaatcatcactgatcaggcagttccaactgcagcagatgctgaaagacctgcaccagctggaagcacaagctggagtggtttctcatcaatttttcgggggagtgatggtcaggcagctgctaaaaacaacctattaaacaaaccattcagcgaaactactcaagaagtgtatcagaacttgtcaacaatctatttaaaggagcctccaactattttgaagtcatctgaaactcattcagaacaggagtcagttgagattgagataacaaagctattattgaaatcctactatgacattgtaaggaagaatgtcgaggacttggtcccaaaagcaatcatgcattttctggtaaattacacgaaacgtgagctgcacaatgttttcatcgagaagctttacagggagaacttaattgaagaactgttgaaagagcccgatgagttagcgataaagaggaaacgcacgcaagagactcttcgcattcttcagcaggctaatcggacgttagacgagctgccgttagaagctgaatcggtcgagagaggttacaaaattggttcagaagcgaaacatgaggagttaccgggcacaagaagatcaaggacagaaactaatgggaacggacggcttcatatgtaaattcaaattgtgattgcacgcatgactcattcatttggtgatggaaaagatttgttttcttccctttaaatcggttgtgcgtggggaaagaaaggtgttcttaggtatagtgaaacgtgatgataaacagaggttttgttgtgagggtattatcaacctactggaaaatgtgacttaatatttgtttctcaaaaccgagaagaataatcaattcctaattttacttttc

SEQ ID NO: 83706 - protein, 798 aa, Arabidopsis thaliana
  peptide (1)..(798): Ceres Seq. ID no. 12671490
QNPNPFFKLLPSLDRIKSMSVDDLPPSSASAVTPLGSSVIPIVNKLQDIFAQLGSQSTIALPQVAVVGSQSSGKSSVLEALVGRDFLPRGNDICTRRPLRLQLVQTKPSSDGGSDEEWGEFLHHDPVRRIYDFSEIRREIEAETNRVSGENKGVSDIPIGLKIFSPNVLDISLVDLPGITKVPVGDQPSDIEARIRTMILTYIKEPSCLILAVSPANTDLANSDALQIAGNADPDGHRTIGVITKLDIMDRGTDARNHLLGKTIPLRLGYVGVVNRSQEDILMNRSIKDALVAEEKFFRSRPVYSGLTDRLGVPQLAKKLNQVLVQHIKALLPSLKSRINNALFATAKEYESYGDITESRGGQGALLLSFITKYCEAYSSTLEGKSKEMSTSELSGGARILYIFQSVFVKSLEEVDPCEDLTADDIRTAIQNATGPRSALFVPDVPFEVLVRRQISRLLDPSLQCARFIFDELVKISHQCMMKELQRFPVLQKRMDEVIGNFLREGLEPSQAMIRDLIEMEMDYINTSHPNFIGGTKAVEQAMQTVKSSRIPHPVARPRDTVEPERTASSGSQIKTRSFLGRQANGIITDQAVPTAADAERPAPAGSTSWSGFSSIFRGSDGQAAAKNNLLNKPFSETTQEVYQNLSTIYLKEPPTILKSSETHSEQESVEIEITKLLLKSYYDIVRKNVEDLVPKAIMHFLVNYTKRELHNVFIEKLYRENLIEELLKEPDELAIKRKRTQETLRILQQANRTLDELPLEAESVERGYKIGSEAKHEELPGTRRSRTETNGNGRLHM

SEQ ID NO: 83707 - protein, 780 aa, Arabidopsis thaliana
  peptide (1)..(780): Ceres Seq. ID no. 12671491
MSVDDLPPSSASAVTPLGSSVIPIVNKLQDIFAQLGSQSTIALPQVAVVGSQSSGKSSVLEALVGRDFLPRGNDICTRRPLRLQLVQTKPSSDGGSDEEWGEFLHHDPVRRIYDFSEIRREIEAETNRVSGENKGVSDIPIGLKIFSPNVLDISLVDLPGITKVPVGDQPSDIEARIRTMILTYIKEPSCLILAVSPANTDLANSDALQIAGNADPDGHRTIGVITKLDIMDRGTDARNHLLGKTIPLRLGYVGVVNRSQEDILMNRSIKDALVAEEKFFRSRPVYSGLTDRLGVPQLAKKLNQVLVQHIKALLPSLKSRINNALFATAKEYESYGDITESRGGQGALLLSFITKYCEAYSSTLEGKSKEMSTSELSGGARILYIFQSVFVKSLEEVDPCEDLTADDIRTAIQNATGPRSALFVPDVPFEVLVRRQISRLLDPSLQCARFIFDELVKISHQCMMKELQRFPVLQKRMDEVIGNFLREGLEPSQAMIRDLIEMEMDYINTSHPNFIGGTKAVEQAMQTVKSSRIPHPVARPRDTVEPERTASSGSQIKTRSFLGRQANGIITDQAVPTAADAERPAPAGSTSWSGFSSIFRGSDGQAAAKNNLLNKPFSETTQEVYQNLSTIYLKEPPTILKSSETHSEQESVEIEITKLLLKSYYDIVRKNVEDLVPKAIMHFLVNYTKRELHNVFIEKLYRENLIEELLKEPDELAIKRKRTQETLRILQQANRTLDELPLEAESVERGYKIGSEAKHEELPGTRRSRTETNGNGRLHM

SEQ ID NO: 83708 - protein, 601 aa, Arabidopsis thaliana
  peptide (1)..(601): Ceres Seq. ID no. 12671492
MILTYIKEPSCLILAVSPANTDLANSDALQIAGNADPDGHRTIGVITKLDIMDRGTDARNHLLGKTIPLRLGYVGVVNRSQEDILMNRSIKDALVAEEKFFRSRPVYSGLTDRLGVPQLAKKLNQVLVQHIKALLPSLKSRINNALFATAKEYESYGDITESRGGQGALLLSFITKYCEAYSSTLEGKSKEMSTSELSGGARILYIFQSVFVKSLEEVDPCEDLTADDIRTAIQNATGPRSALFVPDVPFEVLVRRQISRLLDPSLQCARFIFDELVKISHQCMMKELQRFPVLQKRMDEVIGNFLREGLEPSQAMIRDLIEMEMDYINTSHPNFIGGTKAVEQAMQTVKSSRIPHPVARPRDTVEPERTASSGSQIKTRSFLGRQANGIITDQAVPTAADAERPAPAGSTSWSGFSSIFRGSDGQAAAKNNLLNKPFSETTQEVYQNLSTIYLKEPPTILKSSETHSEQESVEIEITKLLLKSYYDIVRKNVEDLVPKAIMHFLVNYTKRELHNVFIEKLYRENLIEELLKEPDELAIKRKRTQETLRILQQANRTLDELPLEAESVERGYKIGSEAKHEELPGTRRSRTETNGNGRLHM

SEQ ID NO: 83709 - DNA, 1615 bp, Arabidopsis thaliana
  misc_feature (1)..(1615): Ceres Seq. ID no. 12671505
  misc_feature (1)..(1615): Ortholog of  Ceres SEQ ID NO 14314755 as cited in SEQ ID NO 59919
  misc_feature (1)..(1615): Ortholog of  Ceres SEQ ID NO 13597574 as cited in SEQ ID NO 64677
  misc_feature (1)..(1615): Ortholog of  Ceres SEQ ID NO 13597843 as cited in SEQ ID NO 64850
  misc_feature (1)..(1615): Ortholog of  Ceres SEQ ID NO 13597678 as cited in SEQ ID NO 65375
  misc_feature (1)..(1615): Ortholog of  Ceres SEQ ID NO 13662880 as cited in SEQ ID NO 65422
  misc_feature (1)..(1615): Ortholog of  Ceres SEQ ID NO 12779098 as cited in SEQ ID NO 67698
  misc_feature (1)..(1615): Ortholog of  Ceres SEQ ID NO 13596180 as cited in SEQ ID NO 67941
  misc_feature (1)..(1615): Ortholog of  Ceres SEQ ID NO 13591190 as cited in SEQ ID NO 68044
  misc_feature (1)..(1615): Ortholog of  Ceres SEQ ID NO 13595961 as cited in SEQ ID NO 68223
atgaacagagaagtctctgagagaattcatattttgttcttccccttcatggctcaaggccacatgattccaattttggacatggccaagcttttctcgaggagaggagccaagtcaacccttctcacaaccccaatcaacgctaagatcttcgagaaacctattgaagcattcaaaaatcaaaaccctgatctcgaaatcggaatcaagatcttcaatttcccttgtgtagagcttggattgcctgaaggatgcgagaacgctgactttatcaactcataccaaaaatctgactcaggtgacttgttcttgaagtttcttttctctaccaagtatatgaaacaacagttggagagtttcattgaaacaaccaaaccaagtgctcttgttgccgatatgttcttcccttgggcgacagaatctgctgagaagctcggtgtaccaagacttgtgttccacggtacatctttcttttctttgtgttgttcgtataacatgaggattcataagccacacaagaaagtcgctacgagttctactccttttgtaatccctggtctcccaggagacatagttattacagaagaccaagccaatgttgccaaagaagaaacgccaatgggaaagtttatgaaagaggttagggaatcagagaccaatagctttggtgtattggttaatagcttctacgagctggaatcagcttatgctgatttttatcgtagttttgtggcgaaaagagcttggcatatcggtccgctttcgctatctaacagagagttaggagagaaagccagaagagggaaaaaggctaacattgatgagcaagaatgcctaaaatggctggactctaagacacctggttcagtagtttacttgtcctttgggagcggaactaatttcaccaacgaccagctgttagagatcgcttttggtcttgaaggttctggacaaagtttcatctgggtggttaggaaaaatgaaaaccaaggtgacaatgaagagtggttgcctgaagggtttaaagagaggacaacagggaaagggctaataatacctggatgggcgccgcaagtgctgatacttgaccataaagcaattggaggatttgtgactcattgcggatggaactcggctatagagggcattgccgcggggctgcctatggtaacatggccaatgggggcagaacagttctacaatgagaagctattgacaaaagtgttgagaataggagtgaacgttggagctaccgagttggtgaaaaaaggaaagttgattagtagagcacaagtggagaaggcagtaagggaagtgattggtggtgagaaggcagaggaaaggcggctatgggctaagaagctgggcgagatggctaaagccgctgtggaagaaggagggtcctcttataatgatgtgaacaagtttatggaagagctgaatggtagaaagtagaggaagagaatatgtttaatgttctgagatagattattgactttgtgttcctctttggagttgttctttatgtcatcttagcttttgctactgtttagtaagagaaagtccattgtgtgtttctatataataaagaatagacctgaagataggcattttc

SEQ ID NO: 83710 - protein, 484 aa, Arabidopsis thaliana
  peptide (1)..(484): Ceres Seq. ID no. 12671506
MNREVSERIHILFFPFMAQGHMIPILDMAKLFSRRGAKSTLLTTPINAKIFEKPIEAFKNQNPDLEIGIKIFNFPCVELGLPEGCENADFINSYQKSDSGDLFLKFLFSTKYMKQQLESFIETTKPSALVADMFFPWATESAEKLGVPRLVFHGTSFFSLCCSYNMRIHKPHKKVATSSTPFVIPGLPGDIVITEDQANVAKEETPMGKFMKEVRESETNSFGVLVNSFYELESAYADFYRSFVAKRAWHIGPLSLSNRELGEKARRGKKANIDEQECLKWLDSKTPGSVVYLSFGSGTNFTNDQLLEIAFGLEGSGQSFIWVVRKNENQGDNEEWLPEGFKERTTGKGLIIPGWAPQVLILDHKAIGGFVTHCGWNSAIEGIAAGLPMVTWPMGAEQFYNEKLLTKVLRIGVNVGATELVKKGKLISRAQVEKAVREVIGGEKAEERRLWAKKLGEMAKAAVEEGGSSYNDVNKFMEELNGRK

SEQ ID NO: 83711 - protein, 468 aa, Arabidopsis thaliana
  peptide (1)..(468): Ceres Seq. ID no. 12671507
MAQGHMIPILDMAKLFSRRGAKSTLLTTPINAKIFEKPIEAFKNQNPDLEIGIKIFNFPCVELGLPEGCENADFINSYQKSDSGDLFLKFLFSTKYMKQQLESFIETTKPSALVADMFFPWATESAEKLGVPRLVFHGTSFFSLCCSYNMRIHKPHKKVATSSTPFVIPGLPGDIVITEDQANVAKEETPMGKFMKEVRESETNSFGVLVNSFYELESAYADFYRSFVAKRAWHIGPLSLSNRELGEKARRGKKANIDEQECLKWLDSKTPGSVVYLSFGSGTNFTNDQLLEIAFGLEGSGQSFIWVVRKNENQGDNEEWLPEGFKERTTGKGLIIPGWAPQVLILDHKAIGGFVTHCGWNSAIEGIAAGLPMVTWPMGAEQFYNEKLLTKVLRIGVNVGATELVKKGKLISRAQVEKAVREVIGGEKAEERRLWAKKLGEMAKAAVEEGGSSYNDVNKFMEELNGRK

SEQ ID NO: 83712 - protein, 463 aa, Arabidopsis thaliana
  peptide (1)..(463): Ceres Seq. ID no. 12671508
MIPILDMAKLFSRRGAKSTLLTTPINAKIFEKPIEAFKNQNPDLEIGIKIFNFPCVELGLPEGCENADFINSYQKSDSGDLFLKFLFSTKYMKQQLESFIETTKPSALVADMFFPWATESAEKLGVPRLVFHGTSFFSLCCSYNMRIHKPHKKVATSSTPFVIPGLPGDIVITEDQANVAKEETPMGKFMKEVRESETNSFGVLVNSFYELESAYADFYRSFVAKRAWHIGPLSLSNRELGEKARRGKKANIDEQECLKWLDSKTPGSVVYLSFGSGTNFTNDQLLEIAFGLEGSGQSFIWVVRKNENQGDNEEWLPEGFKERTTGKGLIIPGWAPQVLILDHKAIGGFVTHCGWNSAIEGIAAGLPMVTWPMGAEQFYNEKLLTKVLRIGVNVGATELVKKGKLISRAQVEKAVREVIGGEKAEERRLWAKKLGEMAKAAVEEGGSSYNDVNKFMEELNGRK

SEQ ID NO: 83713 - DNA, 1884 bp, Arabidopsis thaliana
  misc_feature (1)..(1884): Ceres Seq. ID no. 12671509
  misc_feature (1)..(1884): Ortholog of  Ceres SEQ ID NO 13657677 as cited in SEQ ID NO 66119
atgagacgtttcacagtcccctgtatcttacgccaccgaatctcaattctttccggcgccggctattctcctgccgccgctcgtctttcctctttagcacaaacatcaactcccgagtcagtattaccgccgataacttctgaaattttgctcgagtcgataagatcttctcagtggcatatcgtcgaacacgttgcagacaaactcacaccttcgcttgtatctacaactctactcagcctcgtcaagactcctaatttagccttcaatttcgtcaaccacatcgacctttatcgcctggactttcaaacacagtgtctagccatcgctgtcatctccaagctctcttctccaaaacccgttactcagttactgaaagaagtcgttacttctcgtaagaactcaataagaaaccttttcgatgaattagtgcttgcccatgatcgattagagacgaaaagcacgattcttttcgatctcttagtcagatgttgttgtcaattgagaatggttgatgaagccatagagtgcttttacttgatgaaggagaaaggtttttatcccaaaactgaaacttgtaatcacattttgactttgttatcaaggttgaatcgtatagagaacgcttgggtcttctatgctgatatgtataggatggagattaaatcgaatgtgtacactttcaatataatgatcaatgtattgtgtaaggaagggaagttgaagaaggctaagggttttttaggtatcatggaggtttttgggattaagccaactatagtgacttacaacactcttgttcaagggttttctttgagaggacgaatcgaaggagctcgtttgattatcagtgaaatgaaatctaaaggctttcaaccagatatgcagacgtataatccgattctgtcttggatgtgtaatgaaggaagagcttctgaggtgttgagggagatgaaggagattgggttggttccggattctgtttcgtacaatattttgatccgtggttgtagtaacaatggggatttggagatggcttttgcttacagggatgagatggtgaaacaaggtatggtgccgacgttttatacttacaacacgttgatacatggtttgtttatggagaataagatagaagctgctgagatattgattagggagattagagagaagggtatagttttggattctgtcacttacaatatactgataaatggttattgccagcatggagatgcaaagaaagcatttgctttgcatgacgaaatgatgaccgatggaattcagcctacgcagtttacttatacgtcgcttatttatgtcctgtgtagaaaaaataaaacgagggaagcggatgagttgtttgagaaagttgtgggaaagggaatgaagcctgatcttgtgatgatgaataccttgatggatggtcactgtgctataggcaacatggaccgtgcattttcgcttcttaaagagatggacatgatgagtatcaatcctgatgatgtgacatacaattgtttgatgcgagggctatgtggagaagggaaatttgaggaagctcgtgagctgatgggagagatgaagagaagaggaatcaaacctgaccacattagttacaacactctaataagtgggtatagtaagaaaggggatacaaagcatgctttcatggttcgtgatgagatgttgagtctcgggtttaatcctactcttctcacttacaatgctctgttaaaaggtttgagtaaaaaccaggagggtgaactagcagaggagctgctaagggaaatgaaaagtgaaggcatcgttcctaatgacagctccttttgctctgtcattgaggcaatgtctaatttggatgcaaaaaaatctgatagttga

SEQ ID NO: 83714 - protein, 627 aa, Arabidopsis thaliana
  peptide (1)..(627): Ceres Seq. ID no. 12671510
MRRFTVPCILRHRISILSGAGYSPAAARLSSLAQTSTPESVLPPITSEILLESIRSSQWHIVEHVADKLTPSLVSTTLLSLVKTPNLAFNFVNHIDLYRLDFQTQCLAIAVISKLSSPKPVTQLLKEVVTSRKNSIRNLFDELVLAHDRLETKSTILFDLLVRCCCQLRMVDEAIECFYLMKEKGFYPKTETCNHILTLLSRLNRIENAWVFYADMYRMEIKSNVYTFNIMINVLCKEGKLKKAKGFLGIMEVFGIKPTIVTYNTLVQGFSLRGRIEGARLIISEMKSKGFQPDMQTYNPILSWMCNEGRASEVLREMKEIGLVPDSVSYNILIRGCSNNGDLEMAFAYRDEMVKQGMVPTFYTYNTLIHGLFMENKIEAAEILIREIREKGIVLDSVTYNILINGYCQHGDAKKAFALHDEMMTDGIQPTQFTYTSLIYVLCRKNKTREADELFEKVVGKGMKPDLVMMNTLMDGHCAIGNMDRAFSLLKEMDMMSINPDDVTYNCLMRGLCGEGKFEEARELMGEMKRRGIKPDHISYNTLISGYSKKGDTKHAFMVRDEMLSLGFNPTLLTYNALLKGLSKNQEGELAEELLREMKSEGIVPNDSSFCSVIEAMSNLDAKKSDS

SEQ ID NO: 83715 - protein, 458 aa, Arabidopsis thaliana
  peptide (1)..(458): Ceres Seq. ID no. 12671511
MVDEAIECFYLMKEKGFYPKTETCNHILTLLSRLNRIENAWVFYADMYRMEIKSNVYTFNIMINVLCKEGKLKKAKGFLGIMEVFGIKPTIVTYNTLVQGFSLRGRIEGARLIISEMKSKGFQPDMQTYNPILSWMCNEGRASEVLREMKEIGLVPDSVSYNILIRGCSNNGDLEMAFAYRDEMVKQGMVPTFYTYNTLIHGLFMENKIEAAEILIREIREKGIVLDSVTYNILINGYCQHGDAKKAFALHDEMMTDGIQPTQFTYTSLIYVLCRKNKTREADELFEKVVGKGMKPDLVMMNTLMDGHCAIGNMDRAFSLLKEMDMMSINPDDVTYNCLMRGLCGEGKFEEARELMGEMKRRGIKPDHISYNTLISGYSKKGDTKHAFMVRDEMLSLGFNPTLLTYNALLKGLSKNQEGELAEELLREMKSEGIVPNDSSFCSVIEAMSNLDAKKSDS

SEQ ID NO: 83716 - protein, 447 aa, Arabidopsis thaliana
  peptide (1)..(447): Ceres Seq. ID no. 12671512
MKEKGFYPKTETCNHILTLLSRLNRIENAWVFYADMYRMEIKSNVYTFNIMINVLCKEGKLKKAKGFLGIMEVFGIKPTIVTYNTLVQGFSLRGRIEGARLIISEMKSKGFQPDMQTYNPILSWMCNEGRASEVLREMKEIGLVPDSVSYNILIRGCSNNGDLEMAFAYRDEMVKQGMVPTFYTYNTLIHGLFMENKIEAAEILIREIREKGIVLDSVTYNILINGYCQHGDAKKAFALHDEMMTDGIQPTQFTYTSLIYVLCRKNKTREADELFEKVVGKGMKPDLVMMNTLMDGHCAIGNMDRAFSLLKEMDMMSINPDDVTYNCLMRGLCGEGKFEEARELMGEMKRRGIKPDHISYNTLISGYSKKGDTKHAFMVRDEMLSLGFNPTLLTYNALLKGLSKNQEGELAEELLREMKSEGIVPNDSSFCSVIEAMSNLDAKKSDS

SEQ ID NO: 83717 - DNA, 1300 bp, Arabidopsis thaliana
  misc_feature (1)..(1300): Ceres Seq. ID no. 12671513
  misc_feature (1)..(1300): Ortholog of  Ceres SEQ ID NO 12627215 as cited in SEQ ID NO 60976
  misc_feature (1)..(1300): Ortholog of  Ceres SEQ ID NO 13654980 as cited in SEQ ID NO 63094
  misc_feature (1)..(1300): Ortholog of  Ceres SEQ ID NO 15174852 as cited in SEQ ID NO 67166
  misc_feature (1)..(1300): Ortholog of  Ceres SEQ ID NO 12589584 as cited in SEQ ID NO 0
  misc_feature (1)..(1300): Ortholog of  Ceres SEQ ID NO 12635657 as cited in SEQ ID NO 0
  misc_feature (1)..(1300): Ortholog of  Ceres SEQ ID NO 12635879 as cited in SEQ ID NO 0
  misc_feature (1)..(1300): Ortholog of  Ceres SEQ ID NO 13599649 as cited in SEQ ID NO 0
tttgtctcttcctctgattctttctctctctctctctctctctctctctctctctctctctctctctctctctctctctctctctctctctctctctctctgtctcgtctttgtttcggtttcaagaaagcaagaggaagaagaagaagaagaagatgggtaggtcaaagtgtttcatggacattagcattggaggtgagcttgaaggaaggattgttattgagctttacgatgatgttgttcccaaaaccgctgagaattttcgattactctgtaccggtgagaagggtttaggtccaaatactggtgtacctctccattacaaggggaatcgatttcatcgtgttatcaaggggtttatgatacaaggtggggatatatcagctaatgatggtactggtggtgagtctatctatggcttgaagtttgacgatgagaattttgagctgaaacatgagaggaaagggatgctctctatggctaactctggtcccaacactaatggctctcagtttttcattacgacaactcgcacttctcatttagatgggaaacatgttgtgtttggaagggttacgaaaggaatgggtgttgttcggtcgattgagcatgttagcatagaggaacagtcttgtccttctcaggatgttgtgatccatgactgtggagaaatccctgagggtgcagatgatgggatttgtgactttttcaaggatggtgatgtgtaccctgactggcctattgatctgaatgaaagcccagctgagttatcttggtggatggagactgttgattttgtcaaggctcatgggaatgagcactttaagaaacaagactataagatggctcttagaaagtaccgtaaggctttacgctatctggatatttgctgggagaaagagggcattgatgaagagacgagtactgccttgcgtaagacaaagtcgcagatcttcactaatagtgctgcctgcaaactcaaattcggagatgcaaaaggagcgttgttggacactgaatttgctatgcgtgatgaagataacaatgttaaagcattgtttcgacaaggccaggcatacatggctcttaataacgtcgatgctgctgctgaaagccttgagaaagctcttcaattcgaacctaatgacgctggtatcaagaaagaatatgctgctgttatgaaaaagattgcctttagagacaacgaagagaaaaagcagtaccgcaaaatgttcgtataggggggggggggggtgctctgcttcatttagggtttggtcggatagtgaggaagaagact

SEQ ID NO: 83718 - protein, 361 aa, Arabidopsis thaliana
  peptide (1)..(361): Ceres Seq. ID no. 12671514
MGRSKCFMDISIGGELEGRIVIELYDDVVPKTAENFRLLCTGEKGLGPNTGVPLHYKGNRFHRVIKGFMIQGGDISANDGTGGESIYGLKFDDENFELKHERKGMLSMANSGPNTNGSQFFITTTRTSHLDGKHVVFGRVTKGMGVVRSIEHVSIEEQSCPSQDVVIHDCGEIPEGADDGICDFFKDGDVYPDWPIDLNESPAELSWWMETVDFVKAHGNEHFKKQDYKMALRKYRKALRYLDICWEKEGIDEETSTALRKTKSQIFTNSAACKLKFGDAKGALLDTEFAMRDEDNNVKALFRQGQAYMALNNVDAAAESLEKALQFEPNDAGIKKEYAAVMKKIAFRDNEEKKQYRKMFV

SEQ ID NO: 83719 - protein, 354 aa, Arabidopsis thaliana
  peptide (1)..(354): Ceres Seq. ID no. 12671515
MDISIGGELEGRIVIELYDDVVPKTAENFRLLCTGEKGLGPNTGVPLHYKGNRFHRVIKGFMIQGGDISANDGTGGESIYGLKFDDENFELKHERKGMLSMANSGPNTNGSQFFITTTRTSHLDGKHVVFGRVTKGMGVVRSIEHVSIEEQSCPSQDVVIHDCGEIPEGADDGICDFFKDGDVYPDWPIDLNESPAELSWWMETVDFVKAHGNEHFKKQDYKMALRKYRKALRYLDICWEKEGIDEETSTALRKTKSQIFTNSAACKLKFGDAKGALLDTEFAMRDEDNNVKALFRQGQAYMALNNVDAAAESLEKALQFEPNDAGIKKEYAAVMKKIAFRDNEEKKQYRKMFV

SEQ ID NO: 83720 - protein, 293 aa, Arabidopsis thaliana
  peptide (1)..(293): Ceres Seq. ID no. 12671516
MIQGGDISANDGTGGESIYGLKFDDENFELKHERKGMLSMANSGPNTNGSQFFITTTRTSHLDGKHVVFGRVTKGMGVVRSIEHVSIEEQSCPSQDVVIHDCGEIPEGADDGICDFFKDGDVYPDWPIDLNESPAELSWWMETVDFVKAHGNEHFKKQDYKMALRKYRKALRYLDICWEKEGIDEETSTALRKTKSQIFTNSAACKLKFGDAKGALLDTEFAMRDEDNNVKALFRQGQAYMALNNVDAAAESLEKALQFEPNDAGIKKEYAAVMKKIAFRDNEEKKQYRKMFV

SEQ ID NO: 83721 - DNA, 776 bp, Arabidopsis thaliana
  misc_feature (1)..(776): Ceres Seq. ID no. 12671521
  misc_feature (1)..(776): Ortholog of  Ceres SEQ ID NO 13659881 as cited in SEQ ID NO 66938
atgtcgaattttgaaatggctgggacaggatcatcaagaaacaacgaagaagacaatcaacaaaacacaaattgggtttggtacaaacacaccaataataacctaagtacgagccacaacaatcagatatggcagcagccaagcctcgatctatatccgggtcagatcgacgtctgtgatatgaccacgtcatcgagatctctaacgataagctgtcaagagtgtggaaaccaagccaagaaagggtgcacgcacgggcggtgtagaacttgctgcaagagtaacggactccactgtcccacccacgtgaggagcacgtggatccccattgccaaacgccgtgagcggcagcagcagctacagacgccaacctccaacccaaccggcggtagcggcagagttgggaagtatagagacattaatcaacatgctactttagactcatcagggttagagatgggagagacaagatttccagatgaagtgagctcggatgcacttttccgatgcgtcagaatgagtggtaccgatgatggagagggccaatacgcataccaaacgacggtgggcatagctggtcatctctttaaaggaattctctataaccaaggtccagaaaacaagtccatgcgcagtacacaattctacgagaacccaccaagatcttaattttttttatatcttctttatttttgtcgtatgcaataatctctattaaaactttgttgattcaagattatccaaaactcaatactttacagatgaagtaactcggt

SEQ ID NO: 83722 - protein, 222 aa, Arabidopsis thaliana
  peptide (1)..(222): Ceres Seq. ID no. 12671522
MSNFEMAGTGSSRNNEEDNQQNTNWVWYKHTNNNLSTSHNNQIWQQPSLDLYPGQIDVCDMTTSSRSLTISCQECGNQAKKGCTHGRCRTCCKSNGLHCPTHVRSTWIPIAKRRERQQQLQTPTSNPTGGSGRVGKYRDINQHATLDSSGLEMGETRFPDEVSSDALFRCVRMSGTDDGEGQYAYQTTVGIAGHLFKGILYNQGPENKSMRSTQFYENPPRS

SEQ ID NO: 83723 - protein, 217 aa, Arabidopsis thaliana
  peptide (1)..(217): Ceres Seq. ID no. 12671523
MAGTGSSRNNEEDNQQNTNWVWYKHTNNNLSTSHNNQIWQQPSLDLYPGQIDVCDMTTSSRSLTISCQECGNQAKKGCTHGRCRTCCKSNGLHCPTHVRSTWIPIAKRRERQQQLQTPTSNPTGGSGRVGKYRDINQHATLDSSGLEMGETRFPDEVSSDALFRCVRMSGTDDGEGQYAYQTTVGIAGHLFKGILYNQGPENKSMRSTQFYENPPRS

SEQ ID NO: 83724 - protein, 162 aa, Arabidopsis thaliana
  peptide (1)..(162): Ceres Seq. ID no. 12671524
MTTSSRSLTISCQECGNQAKKGCTHGRCRTCCKSNGLHCPTHVRSTWIPIAKRRERQQQLQTPTSNPTGGSGRVGKYRDINQHATLDSSGLEMGETRFPDEVSSDALFRCVRMSGTDDGEGQYAYQTTVGIAGHLFKGILYNQGPENKSMRSTQFYENPPRS

SEQ ID NO: 83725 - DNA, 1234 bp, Arabidopsis thaliana
  misc_feature (1)..(1234): Ceres Seq. ID no. 12671525
  misc_feature (1)..(1234): Ortholog of  Ceres SEQ ID NO 12562983 as cited in SEQ ID NO 53309
gaatataaacaagaacccaacaccagatacattataattaatcccaactcaagaagctttaaaatcttcaccttccatttgctattgatcatcttcttacatctctctccctctaaatatatccaaacaagaacgaaaggaaaaagagtacatacaatggtgaactttgtggatttacaaaaaccattgttgtaccgcctcatgaaattggccggtgtcattccttacaccgtagagcttgaaccagggacaaagatgaacttctggatcccaaaagaaaccctaaaaaaaaccaaaaaatctgacaaaaactttgccgtggaaccccaaaaacctacgaaaccagtcctattgttcatccatggctttgcagccgaagggatcgtgacgtggcagttccaggtcggatcattagccaagaagtactcagtctatataccagacctcctcttctttggtgggtcctactccgacaacgcggatcgatcaccagcgtttcaagcccactgtttagtcaagtctcttcgtatcctcggtatcgaaaagtttactcttgtagggtttagttacggtggcatggttgctttcaagatcgccgaggagtaccctgagatggttcaagccatggtggtttcaggttcgatactcgcgatgactgatacgatcagtgagtctaatttgaaccagttaggatttaagtcgtcggcggatcttttgttaccaacttcggttaaagggctcaagactctcttcacccttgctgttcataaacccatgtggttcccgaaacggctcttcaaggatttcattgaggtgatgattaccaataggaaggaaagagcagaattgttagaagctttggtcatcagcaacaaagatgtgacaatccctcgttttcaacagaaaatacatcttctgtggggcgaaagtgatcaaatttttaaccttgaatttgccaagagcatgaaagagcaactaggcgaaaatgcaacaatggagagtataaaaaaagcaggtcacttggcacatttggagagaccttgtgtctataacagacgtctcaaaaagtttcttgcttcagtttactccgaaaactaatttggatgtaatcgattctcacatcaacaccgaatgaatttatttatcttatttctttggtttcagttcttctttcaaaataatgtaacctgatatattatatttcataaaataatctatggttcaattctatgtc

SEQ ID NO: 83726 - protein, 365 aa, Arabidopsis thaliana
  peptide (1)..(365): Ceres Seq. ID no. 12671526
EYKQEPNTRYIIINPNSRSFKIFTFHLLLIIFLHLSPSKYIQTRTKGKRVHTMVNFVDLQKPLLYRLMKLAGVIPYTVELEPGTKMNFWIPKETLKKTKKSDKNFAVEPQKPTKPVLLFIHGFAAEGIVTWQFQVGSLAKKYSVYIPDLLFFGGSYSDNADRSPAFQAHCLVKSLRILGIEKFTLVGFSYGGMVAFKIAEEYPEMVQAMVVSGSILAMTDTISESNLNQLGFKSSADLLLPTSVKGLKTLFTLAVHKPMWFPKRLFKDFIEVMITNRKERAELLEALVISNKDVTIPRFQQKIHLLWGESDQIFNLEFAKSMKEQLGENATMESIKKAGHLAHLERPCVYNRRLKKFLASVYSEN

SEQ ID NO: 83727 - protein, 313 aa, Arabidopsis thaliana
  peptide (1)..(313): Ceres Seq. ID no. 12671527
MVNFVDLQKPLLYRLMKLAGVIPYTVELEPGTKMNFWIPKETLKKTKKSDKNFAVEPQKPTKPVLLFIHGFAAEGIVTWQFQVGSLAKKYSVYIPDLLFFGGSYSDNADRSPAFQAHCLVKSLRILGIEKFTLVGFSYGGMVAFKIAEEYPEMVQAMVVSGSILAMTDTISESNLNQLGFKSSADLLLPTSVKGLKTLFTLAVHKPMWFPKRLFKDFIEVMITNRKERAELLEALVISNKDVTIPRFQQKIHLLWGESDQIFNLEFAKSMKEQLGENATMESIKKAGHLAHLERPCVYNRRLKKFLASVYSEN

SEQ ID NO: 83728 - protein, 298 aa, Arabidopsis thaliana
  peptide (1)..(298): Ceres Seq. ID no. 12671528
MKLAGVIPYTVELEPGTKMNFWIPKETLKKTKKSDKNFAVEPQKPTKPVLLFIHGFAAEGIVTWQFQVGSLAKKYSVYIPDLLFFGGSYSDNADRSPAFQAHCLVKSLRILGIEKFTLVGFSYGGMVAFKIAEEYPEMVQAMVVSGSILAMTDTISESNLNQLGFKSSADLLLPTSVKGLKTLFTLAVHKPMWFPKRLFKDFIEVMITNRKERAELLEALVISNKDVTIPRFQQKIHLLWGESDQIFNLEFAKSMKEQLGENATMESIKKAGHLAHLERPCVYNRRLKKFLASVYSEN

SEQ ID NO: 83729 - DNA, 804 bp, Arabidopsis thaliana
  misc_feature (1)..(804): Ceres Seq. ID no. 12671537
  misc_feature (1)..(804): Ortholog of  Ceres SEQ ID NO 13646595 as cited in SEQ ID NO 20561
  misc_feature (1)..(804): Ortholog of  Ceres SEQ ID NO 13597574 as cited in SEQ ID NO 64677
  misc_feature (1)..(804): Ortholog of  Ceres SEQ ID NO 13597843 as cited in SEQ ID NO 64850
  misc_feature (1)..(804): Ortholog of  Ceres SEQ ID NO 13597678 as cited in SEQ ID NO 65375
  misc_feature (1)..(804): Ortholog of  Ceres SEQ ID NO 13596180 as cited in SEQ ID NO 67941
  misc_feature (1)..(804): Ortholog of  Ceres SEQ ID NO 13591190 as cited in SEQ ID NO 68044
  misc_feature (1)..(804): Ortholog of  Ceres SEQ ID NO 13595961 as cited in SEQ ID NO 68223
atgagcgatggtgttttggtaaatacttgggaggagttacaaggaaacactctcgctgcgcttagagaggacgaagaattgagccgggtcatgaaagtaccggtttatcctattgggccaattgttaggactaaccagcatgtagacaaacccaatagtatattcgagtggctagacgagcaacgggaaaggtcagtggtgtttgtgtgtttagggagcggtggaacgttgacgtttgagcaaacagtggaactcgctttgggtttagagttaagtggtcaaaggttcgtttgggttctacgtaggcccgcttcatatctcggggcgatctccagcgatgatgaacaggtaagtgccagtctacctgaaggtttcttggaccgcacgcgtggtgtggggattgtggttacgcaatgggcaccacaagttgagatcttgagccatagatcgatcggtgggttcttgtctcactgcggttggagttcggctttggaaagtttgactaaaggagttccgatcatcgcttggcctctttatgcggagcagtggatgaatgccacgttattgactgaggagatcggtgtggccgttcgtacatcggagttaccgtcggagagagtcatcggaagggaagaagtggcatctctggtgagaaagattatggcggaagaggatgaagaaggacagaaaattagggctaaagctgaggaggtgagggttagctccgaacgagcttggagtaaagacgggtcatcttataattctctattcgaatgggcaaaacgatgttatcttgtaccgtga

SEQ ID NO: 83730 - protein, 267 aa, Arabidopsis thaliana
  peptide (1)..(267): Ceres Seq. ID no. 12671538
MSDGVLVNTWEELQGNTLAALREDEELSRVMKVPVYPIGPIVRTNQHVDKPNSIFEWLDEQRERSVVFVCLGSGGTLTFEQTVELALGLELSGQRFVWVLRRPASYLGAISSDDEQVSASLPEGFLDRTRGVGIVVTQWAPQVEILSHRSIGGFLSHCGWSSALESLTKGVPIIAWPLYAEQWMNATLLTEEIGVAVRTSELPSERVIGREEVASLVRKIMAEEDEEGQKIRAKAEEVRVSSERAWSKDGSSYNSLFEWAKRCYLVP

SEQ ID NO: 83731 - protein, 237 aa, Arabidopsis thaliana
  peptide (1)..(237): Ceres Seq. ID no. 12671539
MKVPVYPIGPIVRTNQHVDKPNSIFEWLDEQRERSVVFVCLGSGGTLTFEQTVELALGLELSGQRFVWVLRRPASYLGAISSDDEQVSASLPEGFLDRTRGVGIVVTQWAPQVEILSHRSIGGFLSHCGWSSALESLTKGVPIIAWPLYAEQWMNATLLTEEIGVAVRTSELPSERVIGREEVASLVRKIMAEEDEEGQKIRAKAEEVRVSSERAWSKDGSSYNSLFEWAKRCYLVP

SEQ ID NO: 83732 - DNA, 2666 bp, Arabidopsis thaliana
  misc_feature (1)..(2666): Ceres Seq. ID no. 12671548
  misc_feature (1)..(2666): Ortholog of  Ceres SEQ ID NO 13657677 as cited in SEQ ID NO 66119
aactttcactcactcttcttctccttcaatcccaatttcggataacgtctttcaatggacggagcactcttccctcacaaacctccatacccaattcaatccaagagacctccaccatctcaatcctctaaccaatctatcaaattcagttccgctactcttcacttacctcctccttctcctccttctttccctctcgattctcttcttcaccatctcgttcacctctcttccccgcctcctagacactccaactccgccgccgctcgtttcccttctctcgaagtctcgactgattcatcatcgtcgaaacccattctgggtattgaaattgagaacgagagaaatgggtctttgaaactcttgtgtaagaaagaagttgtcttggttaattccattgttgaacagcctttgactggtttgagtaggttttttgattctgtgaaatcggaattgcttagaactgatttggttagtttggttaagggtctagatgattctgggcattgggaaagagctgtttttttgtttgaatggttagttttgtcttcaaattctggagctttgaagctagatcatcaagttatcgaaatctttgttaggattttaggtagagaatctcagtactctgttgcagctaagttgctcgataaaattcctctacaagaatatctcctcgatgttcgggcttacacgacgatcttacatgcgtattcacggactgggaagtatgaaaaggctatcgatttgtttgagaggatgaaagagatgggtccttcacctactttggtgacttacaatgtgattctcgatgttttcgggaaaatgggtcgatcttggcggaaaattctaggggttttagatgaaatgagaagcaaaggattgaagtttgatgagtttacttgtagtactgtgctctctgcttgtgcaagagaaggtttgttaagagaggccaaggagtttttcgctgaacttaagtcatgcggctatgaacctggtactgttacgtacaatgctttgttgcaagtttttggtaaagcaggagtttatacagaagcgttgagtgttttgaaagagatggaggaaaatagctgcccagcagattctgtgacatataatgagcttgttgctgcttatgttagagctggttttagcaaggaagctgctggtgtcattgagatgatgacgaaaaagggtgtaatgccgaacgcaatcacttatactacagtgatagatgcatatggaaaggcgggaaaggaggacgaggctttgaagctgttttatagtatgaaagaagctggttgtgttccgaatacttgcacctacaatgcagtgcttagtctgttggggaagaagtcgagatccaacgaaatgataaagatgttatgtgatatgaagtctaatggatgttcccctaatcgtgccacttggaacacaatgcttgctctgtgtgggaataagggtatggataagtttgtgaaccgggtgttccgtgaaatgaagagctgcggatttgaacctgatagggacacattcaacacgctgatcagtgcctatgggcgatgtggttcagaggttgatgcatcgaaaatgtatggtgagatgacaagagcagggttcaacgcttgcgttacgacttacaacgcgttacttaatgccttggcaagaaaaggagattggagatcaggcgaaaatgtgatttccgacatgaaaagtaaaggtttcaaacctactgaaacatcttattccttgatgcttcagtgttatgctaaaggagggaactatctagggatagagagaatcgagaataggataaaggagggccaaatattcccgagctggatgcttttgagaacattactcctcgcaaactttaaatgccgagcactagcaggatcagagagagcattcacattgtttaaaaagcacggatacaaacccgacatggtgattttcaactcaatgctctccattttcacgaggaacaacatgtacgatcaagcagaggggattctcgagtctatccgcgaggatgggctaagcccggatcttgtaacctacaacagcctgatggacatgtacgtaagaagaggagagtgttggaaagccgaagaaatcctcaagactctagaaaaatcgcagttaaaaccggacctggtctcttacaacacggtgatcaaaggtttctgcagaagagggttgatgcaagaagcggttaggatgctgtctgagatgacagagcggggaatcagaccgtgcattttcacttacaacacgtttgtttcgggttacacggcgatgggaatgtttgcagagatagaagatgtgattgagtgcatggcgaagaatgattgcagaccaaatgagctgacttttaaaatggtagtagatggttattgcagagcagggaagtatagtgaagctatggattttgtgtccaagattaagacctttgatccttgcttcgatgatcagtctattcaacggcttgctctccgagtacgtgagaatttagaatcctaaatcaattatatatttttctttttttcttttgtagatttgggtttcttctttttttgtattgaatttatatttcattcactttaaattaatcaaaactttgaagatgaataactaaaagataataatacatgtttctactcttt

SEQ ID NO: 83733 - protein, 822 aa, Arabidopsis thaliana
  peptide (1)..(822): Ceres Seq. ID no. 12671549
MDGALFPHKPPYPIQSKRPPPSQSSNQSIKFSSATLHLPPPSPPSFPLDSLLHHLVHLSSPPPRHSNSAAARFPSLEVSTDSSSSKPILGIEIENERNGSLKLLCKKEVVLVNSIVEQPLTGLSRFFDSVKSELLRTDLVSLVKGLDDSGHWERAVFLFEWLVLSSNSGALKLDHQVIEIFVRILGRESQYSVAAKLLDKIPLQEYLLDVRAYTTILHAYSRTGKYEKAIDLFERMKEMGPSPTLVTYNVILDVFGKMGRSWRKILGVLDEMRSKGLKFDEFTCSTVLSACAREGLLREAKEFFAELKSCGYEPGTVTYNALLQVFGKAGVYTEALSVLKEMEENSCPADSVTYNELVAAYVRAGFSKEAAGVIEMMTKKGVMPNAITYTTVIDAYGKAGKEDEALKLFYSMKEAGCVPNTCTYNAVLSLLGKKSRSNEMIKMLCDMKSNGCSPNRATWNTMLALCGNKGMDKFVNRVFREMKSCGFEPDRDTFNTLISAYGRCGSEVDASKMYGEMTRAGFNACVTTYNALLNALARKGDWRSGENVISDMKSKGFKPTETSYSLMLQCYAKGGNYLGIERIENRIKEGQIFPSWMLLRTLLLANFKCRALAGSERAFTLFKKHGYKPDMVIFNSMLSIFTRNNMYDQAEGILESIREDGLSPDLVTYNSLMDMYVRRGECWKAEEILKTLEKSQLKPDLVSYNTVIKGFCRRGLMQEAVRMLSEMTERGIRPCIFTYNTFVSGYTAMGMFAEIEDVIECMAKNDCRPNELTFKMVVDGYCRAGKYSEAMDFVSKIKTFDPCFDDQSIQRLALRVRENLES

SEQ ID NO: 83734 - protein, 587 aa, Arabidopsis thaliana
  peptide (1)..(587): Ceres Seq. ID no. 12671550
MKEMGPSPTLVTYNVILDVFGKMGRSWRKILGVLDEMRSKGLKFDEFTCSTVLSACAREGLLREAKEFFAELKSCGYEPGTVTYNALLQVFGKAGVYTEALSVLKEMEENSCPADSVTYNELVAAYVRAGFSKEAAGVIEMMTKKGVMPNAITYTTVIDAYGKAGKEDEALKLFYSMKEAGCVPNTCTYNAVLSLLGKKSRSNEMIKMLCDMKSNGCSPNRATWNTMLALCGNKGMDKFVNRVFREMKSCGFEPDRDTFNTLISAYGRCGSEVDASKMYGEMTRAGFNACVTTYNALLNALARKGDWRSGENVISDMKSKGFKPTETSYSLMLQCYAKGGNYLGIERIENRIKEGQIFPSWMLLRTLLLANFKCRALAGSERAFTLFKKHGYKPDMVIFNSMLSIFTRNNMYDQAEGILESIREDGLSPDLVTYNSLMDMYVRRGECWKAEEILKTLEKSQLKPDLVSYNTVIKGFCRRGLMQEAVRMLSEMTERGIRPCIFTYNTFVSGYTAMGMFAEIEDVIECMAKNDCRPNELTFKMVVDGYCRAGKYSEAMDFVSKIKTFDPCFDDQSIQRLALRVRENLES

SEQ ID NO: 83735 - protein, 584 aa, Arabidopsis thaliana
  peptide (1)..(584): Ceres Seq. ID no. 12671551
MGPSPTLVTYNVILDVFGKMGRSWRKILGVLDEMRSKGLKFDEFTCSTVLSACAREGLLREAKEFFAELKSCGYEPGTVTYNALLQVFGKAGVYTEALSVLKEMEENSCPADSVTYNELVAAYVRAGFSKEAAGVIEMMTKKGVMPNAITYTTVIDAYGKAGKEDEALKLFYSMKEAGCVPNTCTYNAVLSLLGKKSRSNEMIKMLCDMKSNGCSPNRATWNTMLALCGNKGMDKFVNRVFREMKSCGFEPDRDTFNTLISAYGRCGSEVDASKMYGEMTRAGFNACVTTYNALLNALARKGDWRSGENVISDMKSKGFKPTETSYSLMLQCYAKGGNYLGIERIENRIKEGQIFPSWMLLRTLLLANFKCRALAGSERAFTLFKKHGYKPDMVIFNSMLSIFTRNNMYDQAEGILESIREDGLSPDLVTYNSLMDMYVRRGECWKAEEILKTLEKSQLKPDLVSYNTVIKGFCRRGLMQEAVRMLSEMTERGIRPCIFTYNTFVSGYTAMGMFAEIEDVIECMAKNDCRPNELTFKMVVDGYCRAGKYSEAMDFVSKIKTFDPCFDDQSIQRLALRVRENLES

SEQ ID NO: 83736 - DNA, 1083 bp, Arabidopsis thaliana
  misc_feature (1)..(1083): Ceres Seq. ID no. 12671552
  misc_feature (1)..(1083): Ortholog of  Ceres SEQ ID NO 13581579 as cited in SEQ ID NO 58361
  misc_feature (1)..(1083): Ortholog of  Ceres SEQ ID NO 13596969 as cited in SEQ ID NO 63375
  misc_feature (1)..(1083): Ortholog of  Ceres SEQ ID NO 13597519 as cited in SEQ ID NO 64759
  misc_feature (1)..(1083): Ortholog of  Ceres SEQ ID NO 13597870 as cited in SEQ ID NO 64982
  misc_feature (1)..(1083): Ortholog of  Ceres SEQ ID NO 13595926 as cited in SEQ ID NO 67778
  misc_feature (1)..(1083): Ortholog of  Ceres SEQ ID NO 12567001 as cited in SEQ ID NO 0
atgaagaaccaaagcagcttctccattgttgctcttcttctcattttcttttcctcatctgtctttgctcagctgcagacaaatttttaccggaagtcatgtcctaacgtggaaactattgtccgcaatgccgtccgccaaaagttccagcagacttttgttacggctccggccaccctccgccttttcttccatgattgcttcgtccgtggatgtgatgcttcgatattgctggcatcaccatctgagaaggatcaccctgatgacaagtcactagccggagacgggtttgatacggtggcaaaggcaaagcaggcccttgatagggaccccaactgccgtaacaaagtctcatgcgctgacattttggctctcgccactcgtgacgtcgtcgttttgaccggaggaccgaactatccggtagagctagggaggagagacggcagactatcgacagtggctagcgttcaacacagtctaccccagcctagtttcaaattggaccaacttaacactatgttcgctcgtcacggtctatcccaaaccgatatgattgcactctcaggagcacatactataggattcgcacattgtggcaagttttcgaaaagaatttacaattttagtcctaaacgtccaattgatccgactttgaatattcgttacgccttacaattgagacaaatgtgccccattcgggtcgacttgaggatcgcaattaacatggatcctacttctccaaatacatttgacaatgcttatttcaaaaacctccaaaaagggatgggtttgttcacgtcagatcaagttttgttctctgatgaacgatctagatcaactgtcaattcatttgcttctagtgaagcaacttttagacaagcttttatttcggctataacgaagttgggtcgggttggagttaaaaccggtaacgcgggtgagataagacgggattgttcacgtgttaattagtgatttgttgtttcttttatttaagaaattttgcttcttcttttttaagatttgttttctgaattgtatggttctttgacgaaaaaaaaagaaaaaaagaagaattgtttc

SEQ ID NO: 83737 - protein, 323 aa, Arabidopsis thaliana
  peptide (1)..(323): Ceres Seq. ID no. 12671553
MKNQSSFSIVALLLIFFSSSVFAQLQTNFYRKSCPNVETIVRNAVRQKFQQTFVTAPATLRLFFHDCFVRGCDASILLASPSEKDHPDDKSLAGDGFDTVAKAKQALDRDPNCRNKVSCADILALATRDVVVLTGGPNYPVELGRRDGRLSTVASVQHSLPQPSFKLDQLNTMFARHGLSQTDMIALSGAHTIGFAHCGKFSKRIYNFSPKRPIDPTLNIRYALQLRQMCPIRVDLRIAINMDPTSPNTFDNAYFKNLQKGMGLFTSDQVLFSDERSRSTVNSFASSEATFRQAFISAITKLGRVGVKTGNAGEIRRDCSRVN

SEQ ID NO: 83738 - DNA, 813 bp, Arabidopsis thaliana
  misc_feature (1)..(813): Ceres Seq. ID no. 12671578
  misc_feature (1)..(813): Ortholog of  Ceres SEQ ID NO 13594416 as cited in SEQ ID NO 51058
  misc_feature (1)..(813): Ortholog of  Ceres SEQ ID NO 13596609 as cited in SEQ ID NO 63070
  misc_feature (1)..(813): Ortholog of  Ceres SEQ ID NO 12616895 as cited in SEQ ID NO 63909
  misc_feature (1)..(813): Ortholog of  Ceres SEQ ID NO 14302096 as cited in SEQ ID NO 68356
  misc_feature (1)..(813): Ortholog of  Ceres SEQ ID NO 13598574 as cited in SEQ ID NO 69083
atggcgttagcgaataacttaacggcgatactcaacttactagcgttactctgttccataccaataacggcgtcaggtatatggctagcttcaaagccagacaacgagtgtgtcaatctcctccgttggcccgttgtcgtcctcggcgttctcatcctcgtcgtctccgccacaggcttcatcggcgcctacaagtacaaggaaactctactggcggtttacttgtgctgtatggcgatattgatcggacttttgctggtggttcttatatttgcattcgtcgtgacccggcccgatggatcgtatcgggttccgggtagaggttataaagagtataggcttgaagggttctcgaattggcttaaggagaacgttgtggattccaagaactggggaaggctaagggcttgtttggctgatactaatgtttgtcctaaactcaaccaagaattcatcaccgccgatcagttcttctcctcctctaagatcactcctctccagtccggctgctgcaaaccaccaaccgcatgtggctacaactttgtgaacccaacactgtggctaaatccaaccaatatggctgcagacgcagactgttacttatggagcaatgaccaaagccagctttgttacaattgcaactcatgcaaagctggtttattgggaaaccttagaaaagaatggcgtaaagcaaatctcatacttatcatcacagtcgttgttctcatatgggtttatgttattgcttgtagcgcgtttaggaatgctcagactgaggatctcttccgcaaatacaaacaaggttgggtctaa

SEQ ID NO: 83739 - protein, 270 aa, Arabidopsis thaliana
  peptide (1)..(270): Ceres Seq. ID no. 12671579
MALANNLTAILNLLALLCSIPITASGIWLASKPDNECVNLLRWPVVVLGVLILVVSATGFIGAYKYKETLLAVYLCCMAILIGLLLVVLIFAFVVTRPDGSYRVPGRGYKEYRLEGFSNWLKENVVDSKNWGRLRACLADTNVCPKLNQEFITADQFFSSSKITPLQSGCCKPPTACGYNFVNPTLWLNPTNMAADADCYLWSNDQSQLCYNCNSCKAGLLGNLRKEWRKANLILIITVVVLIWVYVIACSAFRNAQTEDLFRKYKQGWV

SEQ ID NO: 83740 - protein, 193 aa, Arabidopsis thaliana
  peptide (1)..(193): Ceres Seq. ID no. 12671580
MAILIGLLLVVLIFAFVVTRPDGSYRVPGRGYKEYRLEGFSNWLKENVVDSKNWGRLRACLADTNVCPKLNQEFITADQFFSSSKITPLQSGCCKPPTACGYNFVNPTLWLNPTNMAADADCYLWSNDQSQLCYNCNSCKAGLLGNLRKEWRKANLILIITVVVLIWVYVIACSAFRNAQTEDLFRKYKQGWV

SEQ ID NO: 83741 - DNA, 1059 bp, Arabidopsis thaliana
  misc_feature (1)..(1059): Ceres Seq. ID no. 12671585
  misc_feature (1)..(1059): Ortholog of  Ceres SEQ ID NO 13594037 as cited in SEQ ID NO 55666
atgggactttataaaacgaagtccaaacgttcaattgctaactatcatcatatcataatcatcaatattttcatcctctcttcaatcacatcttcttccatggcttcttcttcttctccatcttccattgatttttcgactgcaattctaataagagttgatcaatcgggcaaaggagacttcagtaagattcaagaagcaattgaatctatccctcccaatctaaacaactctcaactctatttcatttgggttaagcctggaatttaccgagaaaaagtggtgatacctgcggagaaaccctacataacattgagtgggacacaagcttccaacacttttctcatatggagcgatggcgaagacattttggaatcacccactctcactatctttgcatccgattttgtatgccgatttctcactattcagaataagtttggaacggcgggacgtgcggttgcactgagggtggcggcggataaggcagcgttctacggatgcgtgataacgtcgtaccaagacactctccttgacgacaatggaaaccattacttcaagaactgctatattgaaggagccaccgatttcatttgtggaagcgcttcttctctatatgaaaggtgtcatttacactcgttgtcgccgaataatgggtctataacggcgcaaatgagaacgtcggccacagagaaatcaggctttacattcttgggatgcaagttaactggatcaggttccacatttttgggaagaccatggggagcttattctagggttgtctttgcttattccttcttctccaatgtcgtcgcacctcaaggatggaaccaatggggagattcaaccaaagaaaatactgtatattatggtgaatacaaatgttatggtcccggagcagacagggaacaaagagtagaatggtcaaaacagttatcggatgaagaagctaccgtcttcttgagcaaggactttatcggcggcaaagactggctccgacctgccccttctcacttcaagaatgctcccaaacaaacccaaaataaagaaattaattaa

SEQ ID NO: 83742 - protein, 352 aa, Arabidopsis thaliana
  peptide (1)..(352): Ceres Seq. ID no. 12671586
MGLYKTKSKRSIANYHHIIIINIFILSSITSSSMASSSSPSSIDFSTAILIRVDQSGKGDFSKIQEAIESIPPNLNNSQLYFIWVKPGIYREKVVIPAEKPYITLSGTQASNTFLIWSDGEDILESPTLTIFASDFVCRFLTIQNKFGTAGRAVALRVAADKAAFYGCVITSYQDTLLDDNGNHYFKNCYIEGATDFICGSASSLYERCHLHSLSPNNGSITAQMRTSATEKSGFTFLGCKLTGSGSTFLGRPWGAYSRVVFAYSFFSNVVAPQGWNQWGDSTKENTVYYGEYKCYGPGADREQRVEWSKQLSDEEATVFLSKDFIGGKDWLRPAPSHFKNAPKQTQNKEIN

SEQ ID NO: 83743 - protein, 319 aa, Arabidopsis thaliana
  peptide (1)..(319): Ceres Seq. ID no. 12671587
MASSSSPSSIDFSTAILIRVDQSGKGDFSKIQEAIESIPPNLNNSQLYFIWVKPGIYREKVVIPAEKPYITLSGTQASNTFLIWSDGEDILESPTLTIFASDFVCRFLTIQNKFGTAGRAVALRVAADKAAFYGCVITSYQDTLLDDNGNHYFKNCYIEGATDFICGSASSLYERCHLHSLSPNNGSITAQMRTSATEKSGFTFLGCKLTGSGSTFLGRPWGAYSRVVFAYSFFSNVVAPQGWNQWGDSTKENTVYYGEYKCYGPGADREQRVEWSKQLSDEEATVFLSKDFIGGKDWLRPAPSHFKNAPKQTQNKEIN

SEQ ID NO: 83744 - DNA, 951 bp, Arabidopsis thaliana
  misc_feature (1)..(951): Ceres Seq. ID no. 12671614
  misc_feature (1)..(951): Ortholog of  Ceres SEQ ID NO 13582619 as cited in SEQ ID NO 56520
  misc_feature (1)..(951): Ortholog of  Ceres SEQ ID NO 13660872 as cited in SEQ ID NO 60830
  misc_feature (1)..(951): Ortholog of  Ceres SEQ ID NO 12616221 as cited in SEQ ID NO 63291
atggaacaaggagatcatcagcagcataagaaagaagaagaagctttgccaccgggtttcagatttcatccgacggatgaggagctaatctcatattacttggttaataagattgccgatcaaaacttcaccgggaaagcaatcgctgacgttgatcttaacaagtccgagccatgggagcttcctgagaaggcgaaaatgggaggaaaagaatggtacttttttagcctccgggaccggaagtacccgacgggagtgaggacgaatagggcgacgaatacaggatattggaaaaccacaggaaaagacaaagagatattcaatagcacaacctcggagttggtcgggatgaagaagactttggtcttttacagaggacgagctcctcgtggggagaagacttgttgggtcatgcatgagtatcgacttcactccaagtcctcatatagaacctccaagcaagacgagtgggtagtgtgtagagtgttcaagaaaacagaagcaaccaagaaatacataagcaccagtagcagcagcacaagtcatcaccacaacaaccacacaagagcctcaatactatcaaccaacaacaataatcctaattactcatcagacctccttcaactcccaccgcatctacaaccacacccgagcctcaatattaaccaatccctcatggcaaacgccgttcacctagctgagctctcaagagtcttccgtgcctctacaagcaccaccatggactcttctcatcagcagctaatgaactacacccacatgcctgtctcagggctcaacctcaaccttggcggtgcactggtccagccgcctcctgttgtgtctcttgaggatgttgccgcggttagtgcttcgtacaatggcgaaaacgggtttggaaatgtggagatgagccagtgcatggacttggatggatactggccatcttattga

SEQ ID NO: 83745 - protein, 316 aa, Arabidopsis thaliana
  peptide (1)..(316): Ceres Seq. ID no. 12671615
MEQGDHQQHKKEEEALPPGFRFHPTDEELISYYLVNKIADQNFTGKAIADVDLNKSEPWELPEKAKMGGKEWYFFSLRDRKYPTGVRTNRATNTGYWKTTGKDKEIFNSTTSELVGMKKTLVFYRGRAPRGEKTCWVMHEYRLHSKSSYRTSKQDEWVVCRVFKKTEATKKYISTSSSSTSHHHNNHTRASILSTNNNNPNYSSDLLQLPPHLQPHPSLNINQSLMANAVHLAELSRVFRASTSTTMDSSHQQLMNYTHMPVSGLNLNLGGALVQPPPVVSLEDVAAVSASYNGENGFGNVEMSQCMDLDGYWPSY

SEQ ID NO: 83746 - protein, 250 aa, Arabidopsis thaliana
  peptide (1)..(250): Ceres Seq. ID no. 12671616
MGGKEWYFFSLRDRKYPTGVRTNRATNTGYWKTTGKDKEIFNSTTSELVGMKKTLVFYRGRAPRGEKTCWVMHEYRLHSKSSYRTSKQDEWVVCRVFKKTEATKKYISTSSSSTSHHHNNHTRASILSTNNNNPNYSSDLLQLPPHLQPHPSLNINQSLMANAVHLAELSRVFRASTSTTMDSSHQQLMNYTHMPVSGLNLNLGGALVQPPPVVSLEDVAAVSASYNGENGFGNVEMSQCMDLDGYWPSY

SEQ ID NO: 83747 - protein, 200 aa, Arabidopsis thaliana
  peptide (1)..(200): Ceres Seq. ID no. 12671617
MKKTLVFYRGRAPRGEKTCWVMHEYRLHSKSSYRTSKQDEWVVCRVFKKTEATKKYISTSSSSTSHHHNNHTRASILSTNNNNPNYSSDLLQLPPHLQPHPSLNINQSLMANAVHLAELSRVFRASTSTTMDSSHQQLMNYTHMPVSGLNLNLGGALVQPPPVVSLEDVAAVSASYNGENGFGNVEMSQCMDLDGYWPSY

SEQ ID NO: 83748 - DNA, 2607 bp, Arabidopsis thaliana
  misc_feature (1)..(2607): Ceres Seq. ID no. 12671636
  misc_feature (1)..(2607): Ortholog of  Ceres SEQ ID NO 12586556 as cited in SEQ ID NO 64667
  misc_feature (1)..(2607): Ortholog of  Ceres SEQ ID NO 13660894 as cited in SEQ ID NO 67475
atgcgattcacaacgacaatatggcgacctccatctttggaaaatttcaaacccaagtttcgtatatacgcaaatggcgttgcccaagttcgaatctattgctttggtactgtatcatcctctcgtttatataatgcacacaacctgttcgacaaaagtcctggccgagatagggaaagttatataagcttgctttttgggttttctcgtgatggacgaactcaggaagcaaagagactcttcttgaatattcatcgtttggggatggagatggactgttctatcttttcctctgttttaaaggtttctgctactttatgtgatgagctttttggtagacagttgcattgccagtgtataaagtttgggtttttagatgatgtaagtgtgggaacatcgctggttgatacgtatatgaaaggtagtaactttaaggacggaaggaaagtttttgatgaaatgaaagagaggaatgttgttacttggactacattgataagcgggtatgctcggaattcgatgaatgatgaagttttgacattgtttatgagaatgcagaacgaagggactcagccgaactcatttacttttgcagctgctcttggagttttggctgaagaaggagtgggtgggaggggacttcaggtacatacagttgttgtaaagaacggtttagataaaacgattccggtttctaattctctgattaatctgtatctcaagtgtgggaatgttaggaaagctagaattttgtttgataaaacagaagtaaagagtgtggttacttggaatagtatgatttcgggatatgcagcgaacgggcttgatttagaagcgttgggaatgttttactctatgaggcttaattatgtgcggttatctgaatcgagctttgcttccgttatcaagctctgcgctaacctcaaagaactgaggtttacagaacagctccattgcagtgttgtaaaatacgggtttttgtttgatcagaatataaggacggctctaatggtagcgtatagtaaatgtacggcgatgcttgatgctcttaggctgttcaaagagataggatgcgtaggaaatgttgtgtcgtggacagcgatgattagtggtttcttgcagaatgatgggaaagaggaagcagtagatttattttctgaaatgaagaggaaaggtgttagaccaaacgaattcacttattctgtcattctcacagctcttcctgtgatttctccatcagaggtccacgcacaggttgtaaagactaactacgagagatcttcaactgttggaactgctcttttagatgcttatgtgaagttaggcaaagtagaagaggctgcaaaagtttttagcggtattgatgataaagacattgtggcttggtcagcgatgcttgcaggatatgctcagaccggagagacagaggcagctataaagatgtttggtgagctaacaaaaggagggataaaaccgaacgagttcacattctctagcatccttaacgtgtgtgcggctactaatgcgtctatgggacagggaaagcaattccacgggttcgctataaaatcaagactcgatagttctctgtgtgttagtagtgctcttctaaccatgtatgcaaagaaaggcaacatcgagagtgcggaagaagtctttaaaaggcagagagagaaagatctagtatcatggaattcgatgatctctgggtatgcacaacacgggcaagctatgaaggctctcgatgttttcaaggagatgaagaagagaaaggtgaaaatggatggtgtaacattcatcggagtatttgctgcttgtacacatgcggggttagtagaagaaggcgaaaaatatttcgatataatggtgagagactgcaagatagcacctacaaaggagcataatagttgtatggtggatctatacagccgagctgggcaacttgaaaaggctatgaaggtcatagaaaacatgccaaatccggctggttccaccatttggagaacaattctagctgcatgccgtgtgcacaagaaaacagagctagggagattagctgcagagaagatcattgcgatgaagccagaagattcagcggcatatgtattattgtctaacatgtatgcagagtcaggagattggcaagagagagccaaagtaaggaagctgatgaatgagaggaacgtgaagaaagaacctggttatagttggattgaggtcaagaacaagacttactcgttcttggcgggtgatcggtctcatcctctcaaagatcaaatctatatgaagctagaagatttaagtacacggctgaaggatttagggtatgagccagatacaagttatgtgcttcaagatattgatgatgagcataaagaagcagttcttgctcagcatagtgagagattagctattgctttcgggttgatagctacaccaaagggaagccctcttttgatcattaagaaccttagggtttgtggagattgtcatttagtgatcaaattaattgcaaagattgaagaaagagagatcgtagttagagattcaaatcggtttcatcactttagcagtgatggagtttgctcatgtggagacttttggtga

SEQ ID NO: 83749 - protein, 868 aa, Arabidopsis thaliana
  peptide (1)..(868): Ceres Seq. ID no. 12671637
MRFTTTIWRPPSLENFKPKFRIYANGVAQVRIYCFGTVSSSRLYNAHNLFDKSPGRDRESYISLLFGFSRDGRTQEAKRLFLNIHRLGMEMDCSIFSSVLKVSATLCDELFGRQLHCQCIKFGFLDDVSVGTSLVDTYMKGSNFKDGRKVFDEMKERNVVTWTTLISGYARNSMNDEVLTLFMRMQNEGTQPNSFTFAAALGVLAEEGVGGRGLQVHTVVVKNGLDKTIPVSNSLINLYLKCGNVRKARILFDKTEVKSVVTWNSMISGYAANGLDLEALGMFYSMRLNYVRLSESSFASVIKLCANLKELRFTEQLHCSVVKYGFLFDQNIRTALMVAYSKCTAMLDALRLFKEIGCVGNVVSWTAMISGFLQNDGKEEAVDLFSEMKRKGVRPNEFTYSVILTALPVISPSEVHAQVVKTNYERSSTVGTALLDAYVKLGKVEEAAKVFSGIDDKDIVAWSAMLAGYAQTGETEAAIKMFGELTKGGIKPNEFTFSSILNVCAATNASMGQGKQFHGFAIKSRLDSSLCVSSALLTMYAKKGNIESAEEVFKRQREKDLVSWNSMISGYAQHGQAMKALDVFKEMKKRKVKMDGVTFIGVFAACTHAGLVEEGEKYFDIMVRDCKIAPTKEHNSCMVDLYSRAGQLEKAMKVIENMPNPAGSTIWRTILAACRVHKKTELGRLAAEKIIAMKPEDSAAYVLLSNMYAESGDWQERAKVRKLMNERNVKKEPGYSWIEVKNKTYSFLAGDRSHPLKDQIYMKLEDLSTRLKDLGYEPDTSYVLQDIDDEHKEAVLAQHSERLAIAFGLIATPKGSPLLIIKNLRVCGDCHLVIKLIAKIEEREIVVRDSNRFHHFSSDGVCSCGDFW

SEQ ID NO: 83750 - protein, 780 aa, Arabidopsis thaliana
  peptide (1)..(780): Ceres Seq. ID no. 12671638
MEMDCSIFSSVLKVSATLCDELFGRQLHCQCIKFGFLDDVSVGTSLVDTYMKGSNFKDGRKVFDEMKERNVVTWTTLISGYARNSMNDEVLTLFMRMQNEGTQPNSFTFAAALGVLAEEGVGGRGLQVHTVVVKNGLDKTIPVSNSLINLYLKCGNVRKARILFDKTEVKSVVTWNSMISGYAANGLDLEALGMFYSMRLNYVRLSESSFASVIKLCANLKELRFTEQLHCSVVKYGFLFDQNIRTALMVAYSKCTAMLDALRLFKEIGCVGNVVSWTAMISGFLQNDGKEEAVDLFSEMKRKGVRPNEFTYSVILTALPVISPSEVHAQVVKTNYERSSTVGTALLDAYVKLGKVEEAAKVFSGIDDKDIVAWSAMLAGYAQTGETEAAIKMFGELTKGGIKPNEFTFSSILNVCAATNASMGQGKQFHGFAIKSRLDSSLCVSSALLTMYAKKGNIESAEEVFKRQREKDLVSWNSMISGYAQHGQAMKALDVFKEMKKRKVKMDGVTFIGVFAACTHAGLVEEGEKYFDIMVRDCKIAPTKEHNSCMVDLYSRAGQLEKAMKVIENMPNPAGSTIWRTILAACRVHKKTELGRLAAEKIIAMKPEDSAAYVLLSNMYAESGDWQERAKVRKLMNERNVKKEPGYSWIEVKNKTYSFLAGDRSHPLKDQIYMKLEDLSTRLKDLGYEPDTSYVLQDIDDEHKEAVLAQHSERLAIAFGLIATPKGSPLLIIKNLRVCGDCHLVIKLIAKIEEREIVVRDSNRFHHFSSDGVCSCGDFW

SEQ ID NO: 83751 - protein, 778 aa, Arabidopsis thaliana
  peptide (1)..(778): Ceres Seq. ID no. 12671639
MDCSIFSSVLKVSATLCDELFGRQLHCQCIKFGFLDDVSVGTSLVDTYMKGSNFKDGRKVFDEMKERNVVTWTTLISGYARNSMNDEVLTLFMRMQNEGTQPNSFTFAAALGVLAEEGVGGRGLQVHTVVVKNGLDKTIPVSNSLINLYLKCGNVRKARILFDKTEVKSVVTWNSMISGYAANGLDLEALGMFYSMRLNYVRLSESSFASVIKLCANLKELRFTEQLHCSVVKYGFLFDQNIRTALMVAYSKCTAMLDALRLFKEIGCVGNVVSWTAMISGFLQNDGKEEAVDLFSEMKRKGVRPNEFTYSVILTALPVISPSEVHAQVVKTNYERSSTVGTALLDAYVKLGKVEEAAKVFSGIDDKDIVAWSAMLAGYAQTGETEAAIKMFGELTKGGIKPNEFTFSSILNVCAATNASMGQGKQFHGFAIKSRLDSSLCVSSALLTMYAKKGNIESAEEVFKRQREKDLVSWNSMISGYAQHGQAMKALDVFKEMKKRKVKMDGVTFIGVFAACTHAGLVEEGEKYFDIMVRDCKIAPTKEHNSCMVDLYSRAGQLEKAMKVIENMPNPAGSTIWRTILAACRVHKKTELGRLAAEKIIAMKPEDSAAYVLLSNMYAESGDWQERAKVRKLMNERNVKKEPGYSWIEVKNKTYSFLAGDRSHPLKDQIYMKLEDLSTRLKDLGYEPDTSYVLQDIDDEHKEAVLAQHSERLAIAFGLIATPKGSPLLIIKNLRVCGDCHLVIKLIAKIEEREIVVRDSNRFHHFSSDGVCSCGDFW

SEQ ID NO: 83752 - DNA, 2050 bp, Arabidopsis thaliana
  misc_feature (1)..(2050): Ceres Seq. ID no. 12671662
  misc_feature (1)..(2050): Ortholog of  Ceres SEQ ID NO 13597411 as cited in SEQ ID NO 64125
acaatcagctctttgttccatactttacaattacatataaacaaattcccctattcctctgatctactttatagccctgagactctctttctgtactctaatcatttatctagctctctcattctcttattctggatcagccaagtttctccatttctcaatcaagaaaatcttgaaatactcaaatcttttcaagattcactttcaaagatatcttgataatagcctcaaactctggtttcaaagatgggaaacgacgagaccgtacgattcttgattcacttcttcaatggaagatggttcatggtgtttgcttcgtttctcatcatggcttgcgctggagccacctacctttttggtacttactctaaagatatcaaatctacacttggttacgatcagaccacgttgaacctcttaggtttctttaaagatcttggagcaaacgttggtgtcttgtccggtctaatagctgaggtcacaccgacttggttcgtcctcaccattggctcggcgatgaacttcgtcggttactttatgatctggcttaccgtaaccggcaaagtcgctaagccaaaggtttggcaaatgtgtctttatatttgtataggagccaactcgcagaactttgcaaacacaggagctttggttacttgtgttaagaatttccctgagagcagaggagttatgcttggtttgcttaagggttatgttggactaagtggtgcaatcttcacgcagctttattttgcgatctatggacacgattccaagtctttgatcttgttgatagcatggttgcctgctgcggtttctcttgtgtttgtgtatttgataagagagaagaaggttgtgaggcagaggaatgagcttagtgtgttttaccaattcctttatatttctatattcttggctttgttccttatggcaatgaacattgctgagaagcaagttcatttctcaaaagccgcttatgcggctagcgctacgatatgttgtgctttgctttttgtgcctcttacggtttccgttaagcaagagcttgaagtttggaacatgatgaagttacctatcgaagagccaagcgaggtcaaggttgagaaaccaaagaaagaacttgatcttgatcaggacaaagccgccaaggtgaatggagaagagaaggagacaaaatcttgtttctcgacggtgttttctccaccgccaagaggggaagattacacaatattacaagcattgttaagcaccgacatgataatcctatttgtcgcgacattctgtggtttaggatcgagcttgactgccgtagacaacctcgggcagataggagaatccctcggctacccgaaccacacggttagttcctttgtgtctctagtcagcatatggaactacttcggtcgagtgttctctggctttgtctcggaatacttacttgcaaagtataaattaccccggccgcttatgatgacattagtcctcttattgagttgtgctggccaccttctcatcgcgttcccggtaccaggctcggtatatatagcgtcaattctaatgggattctctttcggtgcacaacttcctctgctctttgccatcatctcagaactttttggactcaagtactactctacattgttcaattgtggacaacttgctagcccgctcgggtcttacatcctgaacgttcgtgtcacgggaatgctttacgataaagaggccttgaagcaactaacggctcgagggctaacccgaaaagacgtaaaggacttgacttgcttaggaagtcaatgttataagctgccgtttctgattttggcagcagtaacgttttttggagcacttgtatctttggggctagcgataaggacgagagagttttacaaaggtgatatttacaagaagtttagggagagtcctgagtccgagtctgaattagttcctgattcaagaaaagctgttgaatttgttggtaaataattatcacacaaattgtttttgttacttgaatcatagttgaataaattaatagaaaagagccgtttaattt

SEQ ID NO: 83753 - protein, 577 aa, Arabidopsis thaliana
  peptide (1)..(577): Ceres Seq. ID no. 12671663
MGNDETVRFLIHFFNGRWFMVFASFLIMACAGATYLFGTYSKDIKSTLGYDQTTLNLLGFFKDLGANVGVLSGLIAEVTPTWFVLTIGSAMNFVGYFMIWLTVTGKVAKPKVWQMCLYICIGANSQNFANTGALVTCVKNFPESRGVMLGLLKGYVGLSGAIFTQLYFAIYGHDSKSLILLIAWLPAAVSLVFVYLIREKKVVRQRNELSVFYQFLYISIFLALFLMAMNIAEKQVHFSKAAYAASATICCALLFVPLTVSVKQELEVWNMMKLPIEEPSEVKVEKPKKELDLDQDKAAKVNGEEKETKSCFSTVFSPPPRGEDYTILQALLSTDMIILFVATFCGLGSSLTAVDNLGQIGESLGYPNHTVSSFVSLVSIWNYFGRVFSGFVSEYLLAKYKLPRPLMMTLVLLLSCAGHLLIAFPVPGSVYIASILMGFSFGAQLPLLFAIISELFGLKYYSTLFNCGQLASPLGSYILNVRVTGMLYDKEALKQLTARGLTRKDVKDLTCLGSQCYKLPFLILAAVTFFGALVSLGLAIRTREFYKGDIYKKFRESPESESELVPDSRKAVEFVGK

SEQ ID NO: 83754 - protein, 558 aa, Arabidopsis thaliana
  peptide (1)..(558): Ceres Seq. ID no. 12671664
MVFASFLIMACAGATYLFGTYSKDIKSTLGYDQTTLNLLGFFKDLGANVGVLSGLIAEVTPTWFVLTIGSAMNFVGYFMIWLTVTGKVAKPKVWQMCLYICIGANSQNFANTGALVTCVKNFPESRGVMLGLLKGYVGLSGAIFTQLYFAIYGHDSKSLILLIAWLPAAVSLVFVYLIREKKVVRQRNELSVFYQFLYISIFLALFLMAMNIAEKQVHFSKAAYAASATICCALLFVPLTVSVKQELEVWNMMKLPIEEPSEVKVEKPKKELDLDQDKAAKVNGEEKETKSCFSTVFSPPPRGEDYTILQALLSTDMIILFVATFCGLGSSLTAVDNLGQIGESLGYPNHTVSSFVSLVSIWNYFGRVFSGFVSEYLLAKYKLPRPLMMTLVLLLSCAGHLLIAFPVPGSVYIASILMGFSFGAQLPLLFAIISELFGLKYYSTLFNCGQLASPLGSYILNVRVTGMLYDKEALKQLTARGLTRKDVKDLTCLGSQCYKLPFLILAAVTFFGALVSLGLAIRTREFYKGDIYKKFRESPESESELVPDSRKAVEFVGK

SEQ ID NO: 83755 - protein, 550 aa, Arabidopsis thaliana
  peptide (1)..(550): Ceres Seq. ID no. 12671665
MACAGATYLFGTYSKDIKSTLGYDQTTLNLLGFFKDLGANVGVLSGLIAEVTPTWFVLTIGSAMNFVGYFMIWLTVTGKVAKPKVWQMCLYICIGANSQNFANTGALVTCVKNFPESRGVMLGLLKGYVGLSGAIFTQLYFAIYGHDSKSLILLIAWLPAAVSLVFVYLIREKKVVRQRNELSVFYQFLYISIFLALFLMAMNIAEKQVHFSKAAYAASATICCALLFVPLTVSVKQELEVWNMMKLPIEEPSEVKVEKPKKELDLDQDKAAKVNGEEKETKSCFSTVFSPPPRGEDYTILQALLSTDMIILFVATFCGLGSSLTAVDNLGQIGESLGYPNHTVSSFVSLVSIWNYFGRVFSGFVSEYLLAKYKLPRPLMMTLVLLLSCAGHLLIAFPVPGSVYIASILMGFSFGAQLPLLFAIISELFGLKYYSTLFNCGQLASPLGSYILNVRVTGMLYDKEALKQLTARGLTRKDVKDLTCLGSQCYKLPFLILAAVTFFGALVSLGLAIRTREFYKGDIYKKFRESPESESELVPDSRKAVEFVGK

SEQ ID NO: 83756 - DNA, 2064 bp, Arabidopsis thaliana
  misc_feature (1)..(2064): Ceres Seq. ID no. 12671666
  misc_feature (1)..(2064): Ortholog of  Ceres SEQ ID NO 13657138 as cited in SEQ ID NO 65923
  misc_feature (1)..(2064): Ortholog of  Ceres SEQ ID NO 13584744 as cited in SEQ ID NO 69137
attcattcacattacactgtagttttacctgtgaattctataaaaattctactctacttgtaatctggtctaatctaaacataacttgtttcaggttttagattcttgcactcttggaggttgagcttagttcgacatgaaggtctttatctaatctccactcgctggcaatgaagatgagagtggaaaccgcacttgcgatccttttggttctcatatcaattcaacaatgttatggaggtgtaagcaactatacatgtacgtgtttctcttcgggcaatcgaagtgatatcctggaatctaactgttccacatcatgtaattgcagaccagacagagatcaatgggtatgtttgtgtcctgcaaatggatttccggttatagccattggtggttcaaattcgtcatgcttcacttcatgcaactgctctgctggtgctacaaaatcttcaaagaagcaatatttatcgaggaaactcgttatagttatactactcttctgcggtgtactcatttcactagcattccttgcctctatgatttgttacatttgtagaaaggacaagttttctggacaaaccccttcagtctcttcagatagagaatctagctggcatagctctgctaacttaataaaccgtaaaagctcggtttcacaatcgaaaattagcatcagctcctcagtggcaggttgcttctttcagaatgcttctttgttttgtgtgagcaaacctgaaacaatccatggagctatctttcagttctcatacacagaattagagcaagcaaccaataaattctcaagtaacagtgtaataggacatggaggaagtagttgtgtttaccgtggacagctcaaagacggtaaaaccgctgcgatcaaacgtctaaatacccctaaaggagacgacactgacactctattctcaacagaggtagagttattatcaagactccatcattaccatgtggtaccgttaattggatattgttcggagtttcatggcaaacatgcagagaggcttctggtttttgagtacatgtcttatggaagtctaagagattgcttagatggagagttaggggagaaaatgacatggaacatccgaatctctgtcgctcttggagctgcaagaggacttgagtatcttcatgaagctgccgctccaagaatcttacaccgagatgtgaaatccacaaatattctccttgatgagaattggcatgcaaaaataacagatcttgggatggctaagtgtttgagtagcgatggtttacaaagcggttcaagctctccaaccacaggactacaaggaacatttggctactttgcacctgaatacgcaattgcaggatgtgcttcacagatgtcagatgttttcagctttggtgttgttctactcgagcttataaccggaaggaaaccgatacagaaaccaagcaacaacaaaggcgaagaaagcctagttatatgggctgtgccacggttacaagatagtaagcgggtgatcgaggaactgcctgatccgcggctaaacgggaagtttgcggaagaagagatgcagataatggcgtatcttgctaaagagtgtttgcttttggatccagaaagtagaccaacaatgagagaagttgttcagattctttcaaccatcacaccagacacatcatccagacgtagaaatttccccattaattatcttttccagagtaacgagaagaagaaagaaagcaaagtgggatggtcaagaggagggagcaagagtggacaggaagaggaaacagtggatctgactgagccacggttcgagtcattctgcttgccgaatgtgaagccggtcttgcttgaaccatctgcacatatttaaaaagtagatagaaaagcacagaacaaaaactgccatttcgcactgtgtagataaaaagctcactctgacgagagtgaagcgttgagacttgagagtttactacaagtgagagtgtcaagatttgttctaaactagaggacttttaattgataattttaataaatatatttaacaaaatgtacacaagagttattat

SEQ ID NO: 83757 - protein, 565 aa, Arabidopsis thaliana
  peptide (1)..(565): Ceres Seq. ID no. 12671667
MKMRVETALAILLVLISIQQCYGGVSNYTCTCFSSGNRSDILESNCSTSCNCRPDRDQWVCLCPANGFPVIAIGGSNSSCFTSCNCSAGATKSSKKQYLSRKLVIVILLFCGVLISLAFLASMICYICRKDKFSGQTPSVSSDRESSWHSSANLINRKSSVSQSKISISSSVAGCFFQNASLFCVSKPETIHGAIFQFSYTELEQATNKFSSNSVIGHGGSSCVYRGQLKDGKTAAIKRLNTPKGDDTDTLFSTEVELLSRLHHYHVVPLIGYCSEFHGKHAERLLVFEYMSYGSLRDCLDGELGEKMTWNIRISVALGAARGLEYLHEAAAPRILHRDVKSTNILLDENWHAKITDLGMAKCLSSDGLQSGSSSPTTGLQGTFGYFAPEYAIAGCASQMSDVFSFGVVLLELITGRKPIQKPSNNKGEESLVIWAVPRLQDSKRVIEELPDPRLNGKFAEEEMQIMAYLAKECLLLDPESRPTMREVVQILSTITPDTSSRRRNFPINYLFQSNEKKKESKVGWSRGGSKSGQEEETVDLTEPRFESFCLPNVKPVLLEPSAHI

SEQ ID NO: 83758 - protein, 563 aa, Arabidopsis thaliana
  peptide (1)..(563): Ceres Seq. ID no. 12671668
MRVETALAILLVLISIQQCYGGVSNYTCTCFSSGNRSDILESNCSTSCNCRPDRDQWVCLCPANGFPVIAIGGSNSSCFTSCNCSAGATKSSKKQYLSRKLVIVILLFCGVLISLAFLASMICYICRKDKFSGQTPSVSSDRESSWHSSANLINRKSSVSQSKISISSSVAGCFFQNASLFCVSKPETIHGAIFQFSYTELEQATNKFSSNSVIGHGGSSCVYRGQLKDGKTAAIKRLNTPKGDDTDTLFSTEVELLSRLHHYHVVPLIGYCSEFHGKHAERLLVFEYMSYGSLRDCLDGELGEKMTWNIRISVALGAARGLEYLHEAAAPRILHRDVKSTNILLDENWHAKITDLGMAKCLSSDGLQSGSSSPTTGLQGTFGYFAPEYAIAGCASQMSDVFSFGVVLLELITGRKPIQKPSNNKGEESLVIWAVPRLQDSKRVIEELPDPRLNGKFAEEEMQIMAYLAKECLLLDPESRPTMREVVQILSTITPDTSSRRRNFPINYLFQSNEKKKESKVGWSRGGSKSGQEEETVDLTEPRFESFCLPNVKPVLLEPSAHI

SEQ ID NO: 83759 - protein, 443 aa, Arabidopsis thaliana
  peptide (1)..(443): Ceres Seq. ID no. 12671669
MICYICRKDKFSGQTPSVSSDRESSWHSSANLINRKSSVSQSKISISSSVAGCFFQNASLFCVSKPETIHGAIFQFSYTELEQATNKFSSNSVIGHGGSSCVYRGQLKDGKTAAIKRLNTPKGDDTDTLFSTEVELLSRLHHYHVVPLIGYCSEFHGKHAERLLVFEYMSYGSLRDCLDGELGEKMTWNIRISVALGAARGLEYLHEAAAPRILHRDVKSTNILLDENWHAKITDLGMAKCLSSDGLQSGSSSPTTGLQGTFGYFAPEYAIAGCASQMSDVFSFGVVLLELITGRKPIQKPSNNKGEESLVIWAVPRLQDSKRVIEELPDPRLNGKFAEEEMQIMAYLAKECLLLDPESRPTMREVVQILSTITPDTSSRRRNFPINYLFQSNEKKKESKVGWSRGGSKSGQEEETVDLTEPRFESFCLPNVKPVLLEPSAHI

SEQ ID NO: 83760 - DNA, 885 bp, Arabidopsis thaliana
  misc_feature (1)..(885): Ceres Seq. ID no. 12671678
  misc_feature (1)..(885): Ortholog of  Ceres SEQ ID NO 14306443 as cited in SEQ ID NO 53658
atggatggggtgggtgaaagttcgactcaaaatgaggtagaagagaagcctgtgattgttagagttaagcgaaaagttggacagtctctgctcgatgctttctgtccttctgtggcagaggatgtgaaaccgaagaaggtgctagtgcggcatttggagacagttacggactctgaaaccacagctgatattatccactctttctttagaaaggaacagcgcctgaccaaatctgtacaaaagcaacagattgcttcagagaatgctcggtttgagcaaatatggcggagtaggaagggaaacaaggaaggcatccatgagaagtgtcatttctttgacgttattcgtgttgatactgaagaaagacgagacaatgcacaagagtttacatccctggaggaccagaaaatgctcgctagtttcttgcctctccttagagaatgtattccaacagcagctgaagagattgaagctgatatacaatctagtcacaccgaagaatacgtttatgattattatgctgtgaacgaagagatggatatcagcgaagatagttccaagaatcagtttcctcttgtcatagtagaggatgaagaagaattctgtgatggatctgatgaatcagactacgactctgaagattcaaacgctgaagatcatccaaagactgattacccagaggaggaagaagaagaagaagaagaagatgatgatgatgatgatgatgatgaatcagaagaagaaaagagtgaagcctctgatgaatcagacgacgaggagacttcaaaacgacatgtgagaagtgtccttggagatgacgagtttgatgattacgcagaggatgtgtatggttacagcgagagcgatgaggagtttgagtcttag

SEQ ID NO: 83761 - protein, 294 aa, Arabidopsis thaliana
  peptide (1)..(294): Ceres Seq. ID no. 12671679
MDGVGESSTQNEVEEKPVIVRVKRKVGQSLLDAFCPSVAEDVKPKKVLVRHLETVTDSETTADIIHSFFRKEQRLTKSVQKQQIASENARFEQIWRSRKGNKEGIHEKCHFFDVIRVDTEERRDNAQEFTSLEDQKMLASFLPLLRECIPTAAEEIEADIQSSHTEEYVYDYYAVNEEMDISEDSSKNQFPLVIVEDEEEFCDGSDESDYDSEDSNAEDHPKTDYPEEEEEEEEEDDDDDDDDESEEEKSEASDESDDEETSKRHVRSVLGDDEFDDYAEDVYGYSESDEEFES

SEQ ID NO: 83762 - protein, 158 aa, Arabidopsis thaliana
  peptide (1)..(158): Ceres Seq. ID no. 12671680
MLASFLPLLRECIPTAAEEIEADIQSSHTEEYVYDYYAVNEEMDISEDSSKNQFPLVIVEDEEEFCDGSDESDYDSEDSNAEDHPKTDYPEEEEEEEEEDDDDDDDDESEEEKSEASDESDDEETSKRHVRSVLGDDEFDDYAEDVYGYSESDEEFES

SEQ ID NO: 83763 - DNA, 1080 bp, Arabidopsis thaliana
  misc_feature (1)..(1080): Ceres Seq. ID no. 12671681
  misc_feature (1)..(1080): Ortholog of  Ceres SEQ ID NO 13593955 as cited in SEQ ID NO 54278
  misc_feature (1)..(1080): Ortholog of  Ceres SEQ ID NO 13597380 as cited in SEQ ID NO 64054
  misc_feature (1)..(1080): Ortholog of  Ceres SEQ ID NO 12625474 as cited in SEQ ID NO 64169
  misc_feature (1)..(1080): Ortholog of  Ceres SEQ ID NO 13597502 as cited in SEQ ID NO 64681
atgtctacatctaaaaccatagtgtttggtctctttgtcgcaacactcctcgtctcttgcaatgtggctgcaaacgccacaacgcagccgcttttcccagcgattctaatcttcggtgactcaaccgtagacacaggcaacaacaactaccattcacaaaccatcttcaaggctaagcatctcccttacggcgttgatctaccgggccatgaagctaacggaagatattcaaatggaaaagtaatctctgacgtcattgcttccaaactcaacatcaaagagttggttcctccgtttctacaaccaaacatctcccaccaagacattgtcactggcgtctctttcgcatccgcgggtgcgggctacgatgaccggagctcactctcgagcaaagcaatcccggtctcacaacagccaagcatgtttaagaattatattgctcgtctcaaaggtatcgtaggagacaagaaagcaatggagatcattaacaacgctttagtggtcataagcgcagggcctaacgatttcatcttgaacttttatgatatccccacgaggcgtcttgagtatcctactatccatggttaccaagagtttatcctcaagaggcttgacggttttgtccgggagctttatagtttaggttgccgaaatattgtggtcggagggttaccaccaatgggatgtttaccaatccaaatgaccgcgaaaatgagaaacattttgagattttgtgtggaacaagaaaacaaagactccgttttgtacaatcagaaactagtaaagaaactgcctgagatccaagcgtctctaccgggaagcaatttcctttacgccaacgtctacgacccattgatggacatgatccaaaaccctagtaaatacggattcaaggagactaagaaaggatgttgcggaacaggatacttggaaacaacattcatgtgcaatccccttacaaagacttgtccgaatcactccgatcacttgttttgggactcaattcatccctcggaagctgcctacaattacattggcaactttgtggatgctcagattcgaggctggattaaggcttaa

SEQ ID NO: 83764 - protein, 359 aa, Arabidopsis thaliana
  peptide (1)..(359): Ceres Seq. ID no. 12671682
MSTSKTIVFGLFVATLLVSCNVAANATTQPLFPAILIFGDSTVDTGNNNYHSQTIFKAKHLPYGVDLPGHEANGRYSNGKVISDVIASKLNIKELVPPFLQPNISHQDIVTGVSFASAGAGYDDRSSLSSKAIPVSQQPSMFKNYIARLKGIVGDKKAMEIINNALVVISAGPNDFILNFYDIPTRRLEYPTIHGYQEFILKRLDGFVRELYSLGCRNIVVGGLPPMGCLPIQMTAKMRNILRFCVEQENKDSVLYNQKLVKKLPEIQASLPGSNFLYANVYDPLMDMIQNPSKYGFKETKKGCCGTGYLETTFMCNPLTKTCPNHSDHLFWDSIHPSEAAYNYIGNFVDAQIRGWIKA

SEQ ID NO: 83765 - protein, 219 aa, Arabidopsis thaliana
  peptide (1)..(219): Ceres Seq. ID no. 12671683
MFKNYIARLKGIVGDKKAMEIINNALVVISAGPNDFILNFYDIPTRRLEYPTIHGYQEFILKRLDGFVRELYSLGCRNIVVGGLPPMGCLPIQMTAKMRNILRFCVEQENKDSVLYNQKLVKKLPEIQASLPGSNFLYANVYDPLMDMIQNPSKYGFKETKKGCCGTGYLETTFMCNPLTKTCPNHSDHLFWDSIHPSEAAYNYIGNFVDAQIRGWIKA

SEQ ID NO: 83766 - protein, 201 aa, Arabidopsis thaliana
  peptide (1)..(201): Ceres Seq. ID no. 12671684
MEIINNALVVISAGPNDFILNFYDIPTRRLEYPTIHGYQEFILKRLDGFVRELYSLGCRNIVVGGLPPMGCLPIQMTAKMRNILRFCVEQENKDSVLYNQKLVKKLPEIQASLPGSNFLYANVYDPLMDMIQNPSKYGFKETKKGCCGTGYLETTFMCNPLTKTCPNHSDHLFWDSIHPSEAAYNYIGNFVDAQIRGWIKA

SEQ ID NO: 83767 - DNA, 1859 bp, Arabidopsis thaliana
  misc_feature (1)..(1859): Ceres Seq. ID no. 12671685
  misc_feature (1)..(1859): Ortholog of  Ceres SEQ ID NO 14313714 as cited in SEQ ID NO 54084
aaaaaataaaacaaattcgaagaaatataaatgagatttttgtagctagctcctccaaatccaaatcgttgcgttaaggtttcttcaagtttcaatctttttgcaatgaattgcccagccatgactgcttctccttcttcttcctcttcttcttcctactcaacgtttcgtcctcctcctccactcttgccacaattgagtaacgattcacaaagatctgttgttatgcactgcacaagattaccctttgaagcatttgctgctacttcatcaaaccggcttcttgggaaacattcattgcctttgagagcagctttggttacttcgaaccctttaaacatttcatcttcctcagttatctctgatgccatttcatcttcctctgttatcactgatgatgccaaaattggtgtcttgttattaaaccttggaggtcctgagactttagatgatgtacaaccctttttgtttaacctcttcgccgacccggacattatacggttgccgccggtattccagtttcttcagaagccattagcacagtttatatcagtagcaagagcacccaaaagcaaggaaggatatgcatctattggtggaggttctcctcttcgccacataactgatgcacaggctgaagaattaagaaaatgcctttgggaaaaaaatgtaccagcaaaggtatatgttggtatgcggtattggcatccattcactgaggaagccattgaacagataaaaagagatggaattacaaaactagttgttctaccactttatcctcaattttctatatcaactagtggttcaagcctaagactcttggagagaatatttcgagaggacgagtatcttgttaacatgcaacatactgttataccatcgtggtatcagcgggagggatatataaaggcaatggcaaatctaatccaaagcgagttgggaaaatttggttctcctaatcaggttgtaatatttttcagtgcacatggcgtgcctcttgcatatgtcgaagaagccggtgatccttacaaggcagagatggaagaatgtgttgatctaatcatggaggaattagacaagagaaagataactaatgcttacactcttgcttatcagagcagagttggaccagttgaatggctgaaaccatacactgaagaagccattactgaacttggtaaaaaaggtgttgaaaatcttctggctgtacccataagttttgtgagcgagcacattgaaactctggaggagatagatgttgagtataaagagttggctttgaagtctggtatcaaaaactgggggcgagtacctgctctaggaacagaacctatgtttatatctgacttggcagatgctgttgtggaaagtcttccatacgttggtgctatggctgtctcaaaccttgaagctcgacagtcgttagttccgctcgggagtgtagaagaattattagcaacgtatgattcacagagaagggagttaccagcaccggtgacaatgtgggaatggggatggacaaaaagtgcagaaacatggaacggaagagcagcaatgttagcggtgctagcactcttggtgctcgaagtcaccaccggaaaagggtttctgcatcagtggggcatcttgccttcattataataaagataacgtatagtctttttctctatgaaaacccaatccaagaatccaaatgtgagctttcacatgtggaataaggccagctatgttattatgctctcttcttctctgttgtagaaatgttgacatttaaatacttcatactgtatcttcataaaacattaaatgttgacattttaatcggcatgctttttcgcaacgtgaatgtttgagtc

SEQ ID NO: 83768 - protein, 512 aa, Arabidopsis thaliana
  peptide (1)..(512): Ceres Seq. ID no. 12671686
MNCPAMTASPSSSSSSSYSTFRPPPPLLPQLSNDSQRSVVMHCTRLPFEAFAATSSNRLLGKHSLPLRAALVTSNPLNISSSSVISDAISSSSVITDDAKIGVLLLNLGGPETLDDVQPFLFNLFADPDIIRLPPVFQFLQKPLAQFISVARAPKSKEGYASIGGGSPLRHITDAQAEELRKCLWEKNVPAKVYVGMRYWHPFTEEAIEQIKRDGITKLVVLPLYPQFSISTSGSSLRLLERIFREDEYLVNMQHTVIPSWYQREGYIKAMANLIQSELGKFGSPNQVVIFFSAHGVPLAYVEEAGDPYKAEMEECVDLIMEELDKRKITNAYTLAYQSRVGPVEWLKPYTEEAITELGKKGVENLLAVPISFVSEHIETLEEIDVEYKELALKSGIKNWGRVPALGTEPMFISDLADAVVESLPYVGAMAVSNLEARQSLVPLGSVEELLATYDSQRRELPAPVTMWEWGWTKSAETWNGRAAMLAVLALLVLEVTTGKGFLHQWGILPSL

SEQ ID NO: 83769 - protein, 507 aa, Arabidopsis thaliana
  peptide (1)..(507): Ceres Seq. ID no. 12671687
MTASPSSSSSSSYSTFRPPPPLLPQLSNDSQRSVVMHCTRLPFEAFAATSSNRLLGKHSLPLRAALVTSNPLNISSSSVISDAISSSSVITDDAKIGVLLLNLGGPETLDDVQPFLFNLFADPDIIRLPPVFQFLQKPLAQFISVARAPKSKEGYASIGGGSPLRHITDAQAEELRKCLWEKNVPAKVYVGMRYWHPFTEEAIEQIKRDGITKLVVLPLYPQFSISTSGSSLRLLERIFREDEYLVNMQHTVIPSWYQREGYIKAMANLIQSELGKFGSPNQVVIFFSAHGVPLAYVEEAGDPYKAEMEECVDLIMEELDKRKITNAYTLAYQSRVGPVEWLKPYTEEAITELGKKGVENLLAVPISFVSEHIETLEEIDVEYKELALKSGIKNWGRVPALGTEPMFISDLADAVVESLPYVGAMAVSNLEARQSLVPLGSVEELLATYDSQRRELPAPVTMWEWGWTKSAETWNGRAAMLAVLALLVLEVTTGKGFLHQWGILPSL

SEQ ID NO: 83770 - protein, 472 aa, Arabidopsis thaliana
  peptide (1)..(472): Ceres Seq. ID no. 12671688
MHCTRLPFEAFAATSSNRLLGKHSLPLRAALVTSNPLNISSSSVISDAISSSSVITDDAKIGVLLLNLGGPETLDDVQPFLFNLFADPDIIRLPPVFQFLQKPLAQFISVARAPKSKEGYASIGGGSPLRHITDAQAEELRKCLWEKNVPAKVYVGMRYWHPFTEEAIEQIKRDGITKLVVLPLYPQFSISTSGSSLRLLERIFREDEYLVNMQHTVIPSWYQREGYIKAMANLIQSELGKFGSPNQVVIFFSAHGVPLAYVEEAGDPYKAEMEECVDLIMEELDKRKITNAYTLAYQSRVGPVEWLKPYTEEAITELGKKGVENLLAVPISFVSEHIETLEEIDVEYKELALKSGIKNWGRVPALGTEPMFISDLADAVVESLPYVGAMAVSNLEARQSLVPLGSVEELLATYDSQRRELPAPVTMWEWGWTKSAETWNGRAAMLAVLALLVLEVTTGKGFLHQWGILPSL

SEQ ID NO: 83771 - DNA, 1848 bp, Arabidopsis thaliana
  misc_feature (1)..(1848): Ceres Seq. ID no. 12671693
  misc_feature (1)..(1848): Ortholog of  Ceres SEQ ID NO 14306949 as cited in SEQ ID NO 54919
  misc_feature (1)..(1848): Ortholog of  Ceres SEQ ID NO 15175723 as cited in SEQ ID NO 57875
  misc_feature (1)..(1848): Ortholog of  Ceres SEQ ID NO 14314909 as cited in SEQ ID NO 58002
ggttgagtgattgctgaagccaacttaaaagagagagaagagaagagtgactctgtgtgtgtgtgcaagaaagtcttctctttcacacctttcgttttctcgaacctctcctttaaagatggtggaggaatcttgggtttgacaactcattaacactgaccctctttttagctctacaagcatccaaggaacccctcttacttttccctcttcttcattccctctctctctatatctcccaattccttctctttttttaaccttgatcttcttcttataagagactcagagctgttcttcaagatgggattgtgtaagcttgaaacttgactatctgggtctctcccattttctgttctcttttgtattctgagtgaaagttttgttttctgggggaaaaaattagggttcttagatggaggagatagaaggaacaaacagagcagctgttgagagttgtcatagagttcttaatcttttacatagatcacagcaacaagatcatgttggttttgaaaagaatttagtatctgaaactagagaagctgtgattaggttcaagagagttgggagtttgttaagcagtagtgttggtcatgctaggtttagaagagctaagaaacttcagagtcatgtctctcaaagtctcttacttgatccatgtcaacaaaggacaacagaagttccatcatcatcttctcagaaaacaccggtactccggtctggtttccaggaattgagcttgagacaaccttcagattcactcactttagggactcgctcttttagtttaaactcaaatgctaaagctcctctccttcagcttaatcagcagacaatgcctccttcgaattatcctactttgtttccagtacaacaacaacaacaacaacaacaacaacaacaacagcaggagcagcagcagcagcagcagcagcaacagcaacagtttcatgaacggttacaagctcaccatcttcatcagcaacagcagctacagaaacatcaagctgagcttatgcttaggaaatgcaatggtgggataagtttgagtttcgataactctagttgtactccaactatgtcatccactaggtcctttgtttcttcacttagcatagatggtagtgttgctaatatagagggaaagaactccttccattttggggttcctagttcaactgatcagaattcactacattctaagaggaaatgccccttgaaaggagatgaacatggaagcttaaaatgcgggagctctagccgatgccactgcgctaagaagaggaaacatcgggttaggagatcgattagagtaccggctataagtaacaaggttgcagatatccctcctgatgattattcatggcgaaaatatggtcagaagcccatcaagggctctccttatcccagaggatattacaaatgtagtagcatgagaggttgtccagcgaggaagcatgttgagagatgtttggaagatccggcaatgcttattgttacttatgaagcagagcataaccacccgaaattgccatctcaagctataacaacttaactctcgtttatctttgcggtccagcataaaccttctcatgtatgttgttctcttttgtgcgcgatgatcggctttggggttgctgcaatgttgtgatatatggatcggggtaagtgcttttgttggggtggatttgcttgtgagagtttgctgcaattgttggattttgagctatatatggggtaaatgtaggattggtcaagactctttttctgtttctcaagtttattggtcttaatgattaaaagtttaatggtttgtttctggctatgtatcttttttttcttctc

SEQ ID NO: 83772 - protein, 380 aa, Arabidopsis thaliana; identical to SEQ ID NO: 75997
  peptide (1)..(380): Ceres Seq. ID no. 12671694

SEQ ID NO: 83773 - protein, 239 aa, Arabidopsis thaliana; identical to SEQ ID NO: 75998
  peptide (1)..(239): Ceres Seq. ID no. 12671695

SEQ ID NO: 83774 - DNA, 1101 bp, Arabidopsis thaliana
  misc_feature (1)..(1101): Ceres Seq. ID no. 12671700
  misc_feature (1)..(1101): Ortholog of  Ceres SEQ ID NO 13654989 as cited in SEQ ID NO 63117
  misc_feature (1)..(1101): Ortholog of  Ceres SEQ ID NO 13657138 as cited in SEQ ID NO 65923
  misc_feature (1)..(1101): Ortholog of  Ceres SEQ ID NO 13584744 as cited in SEQ ID NO 69137
atgcgtaggtggatctgttgtggggataaaaaaggagattcagatttatcaaatgaagaggtgcatttgaaaagtccatggcaaaattctgaggcaaatcaaaagaatcaaaaaccacaagctgttgtaaagcctgaggcgcagaaagaagctcttcccatcgaagttcctcccttgtctgtggatgaggttaaagaaaagactgacaattttggatctaagtctctgattggtgagggttcttatggaagggtatattatgcaactctaaatgatgggaaagcagttgctttgaagaaactcgatgttgcacctgaagctgaaacaaacaccgagttcctgaatcaggtttccatggtttcaagactaaaacatgagaatctcattcaactggttggttattgtgttgatgaaaacctccgtgttcttgcttatgagtttgcaacaatgggatcactgcacgacattctacatggtaggaagggagttcaaggagcacagccaggtccaacacttgactggttaacgagggtgaagatagctgttgaggcagctaggggtttagaataccttcatgagaaggttcagcctcctgtaatacatagagacataagatctagcaatgttctcctttttgaagactatcaagcaaaagttgcagattttaatctctcaaatcaagctcctgataatgctgctcgtcttcactctacgagagttttaggcacctttggctatcacgctccagaatatgctatgacaggacagttaacgcagaagagtgacgtgtatagctttggggttgttcttctagagcttttgacaggaaggaaacctgtagatcatacaatgccacgcggccaacagagtcttgtaacttgggctacaccgagactcagtgaagataaagtgaagcaatgtgttgatccaaagttaaaaggagaatatcctcctaaatcagtagccaagctagcagcggtggcagcattatgtgtgcaatacgaatctgagtttagaccaaatatgagtatagttgtaaaagctttgcagccacttctcaaaccaccagcaccagccccagccccagtaccggaatcctga

SEQ ID NO: 83775 - protein, 366 aa, Arabidopsis thaliana
  peptide (1)..(366): Ceres Seq. ID no. 12671701
MRRWICCGDKKGDSDLSNEEVHLKSPWQNSEANQKNQKPQAVVKPEAQKEALPIEVPPLSVDEVKEKTDNFGSKSLIGEGSYGRVYYATLNDGKAVALKKLDVAPEAETNTEFLNQVSMVSRLKHENLIQLVGYCVDENLRVLAYEFATMGSLHDILHGRKGVQGAQPGPTLDWLTRVKIAVEAARGLEYLHEKVQPPVIHRDIRSSNVLLFEDYQAKVADFNLSNQAPDNAARLHSTRVLGTFGYHAPEYAMTGQLTQKSDVYSFGVVLLELLTGRKPVDHTMPRGQQSLVTWATPRLSEDKVKQCVDPKLKGEYPPKSVAKLAAVAALCVQYESEFRPNMSIVVKALQPLLKPPAPAPAPVPES

SEQ ID NO: 83776 - protein, 248 aa, Arabidopsis thaliana
  peptide (1)..(248): Ceres Seq. ID no. 12671702
MVSRLKHENLIQLVGYCVDENLRVLAYEFATMGSLHDILHGRKGVQGAQPGPTLDWLTRVKIAVEAARGLEYLHEKVQPPVIHRDIRSSNVLLFEDYQAKVADFNLSNQAPDNAARLHSTRVLGTFGYHAPEYAMTGQLTQKSDVYSFGVVLLELLTGRKPVDHTMPRGQQSLVTWATPRLSEDKVKQCVDPKLKGEYPPKSVAKLAAVAALCVQYESEFRPNMSIVVKALQPLLKPPAPAPAPVPES

SEQ ID NO: 83777 - protein, 217 aa, Arabidopsis thaliana
  peptide (1)..(217): Ceres Seq. ID no. 12671703
MGSLHDILHGRKGVQGAQPGPTLDWLTRVKIAVEAARGLEYLHEKVQPPVIHRDIRSSNVLLFEDYQAKVADFNLSNQAPDNAARLHSTRVLGTFGYHAPEYAMTGQLTQKSDVYSFGVVLLELLTGRKPVDHTMPRGQQSLVTWATPRLSEDKVKQCVDPKLKGEYPPKSVAKLAAVAALCVQYESEFRPNMSIVVKALQPLLKPPAPAPAPVPES

SEQ ID NO: 83778 - DNA, 1738 bp, Arabidopsis thaliana
  misc_feature (1)..(1738): Ceres Seq. ID no. 12671720
  misc_feature (1)..(1738): Ortholog of  Ceres SEQ ID NO 15173087 as cited in SEQ ID NO 67193
atcaaaaattgttgtatcaagattttctctcaggtgactgaacaacagagaaaaacatggcgaaaaaaggaaaagaagtgttgaacgctttggacgcagccaaaacgcagatgtaccatttcacagcgattgtaatcgcgggtatgggttttttcactgatgcttacgatctatttagcatctccctcgtcacgaagctcctaggccgcatatactaccacgttgatagctccaagaagcctggaacgctccctcctaatgttgctgccgctgttaatggtgtggccttctgcggtaccttagcaggccagctcttcttcggttggctcggtgacaagctcggccgcaagaaagtttacggtattaccttgatgctcatggtactatgttctctcgggtctggtctatcatttggtcactcagctaacggagtaatggccacactttgtttcttccggttctggctcggtttcggcataggcggcgactaccctctctcagccaccatcatgtcggaatacgccaacaagaaaacacgtggcgccttcatagcagccgtcttcgctatgcaaggcttcggaatcttagccggaggaatcgtgtctctcatcgtctcgagtacatttgaccatgccttcaaagcgcccacctacgaggttgatcctgttggctccactgttcctcaagcggattacgtgtggcggattgtgctcatgtttggagctatcccagctttacttacttattattggcggatgaaaatgccggaaactgctcggtataccgctcttgtagctcggaataccaaacaagccgcctccgatatgtctaaggtgcttcaagtggatctaattgcagaagaagaagcacaatcaaattcaaattcatcaaaccctaatttcaccttcggtttattcaccagagaattcgctcgccgtcacggtctccaccttctcggcacaaccaccacatggttcctcctagacatcgcctattacagcagcaacctcttccaaaaagacatctacacagcaatcggatggattcccgccgccgaaacaatgaacgcaatccacgaagtcttcaccgtctcaaaagctcaaaccctaatcgctctctgcggcaccgtccctggttactggttcaccgtcgcattcatcgatatactcggtcgattcttcatccagttgatgggatttatcttcatgacgatctttatgttcgctttagcgattccttatgatcattggagacatagagagaatcgaattggttttttgattatgtattcgttgactatgttcttcgctaattttggacctaatgcgacgacgtttgttgttcctgctgagatatttccggcgaggttgagatcgacttgtcatgggatatcggcggcgagtggtaaggcgggagcgattgttggagcgtttgggtttctttacgcggcgcagagttcggattcggagaagactgatgctggttatcctcctgggattggtgttaggaattcgttgttgatgcttgcttgtgttaatttcttggggattgtttttactctgttggttccggagtctaaagggaagtctttggaagagatttcgagagaagatgaggaacaaagcggcggagatacggtggtggagatgactgtggcaaattccggtagaaaagtcccggtttgattattttgtgttactcattttgtaaatttactctatatatgaaagtcccttgc

SEQ ID NO: 83779 - protein, 542 aa, Arabidopsis thaliana
  peptide (1)..(542): Ceres Seq. ID no. 12671721
MAKKGKEVLNALDAAKTQMYHFTAIVIAGMGFFTDAYDLFSISLVTKLLGRIYYHVDSSKKPGTLPPNVAAAVNGVAFCGTLAGQLFFGWLGDKLGRKKVYGITLMLMVLCSLGSGLSFGHSANGVMATLCFFRFWLGFGIGGDYPLSATIMSEYANKKTRGAFIAAVFAMQGFGILAGGIVSLIVSSTFDHAFKAPTYEVDPVGSTVPQADYVWRIVLMFGAIPALLTYYWRMKMPETARYTALVARNTKQAASDMSKVLQVDLIAEEEAQSNSNSSNPNFTFGLFTREFARRHGLHLLGTTTTWFLLDIAYYSSNLFQKDIYTAIGWIPAAETMNAIHEVFTVSKAQTLIALCGTVPGYWFTVAFIDILGRFFIQLMGFIFMTIFMFALAIPYDHWRHRENRIGFLIMYSLTMFFANFGPNATTFVVPAEIFPARLRSTCHGISAASGKAGAIVGAFGFLYAAQSSDSEKTDAGYPPGIGVRNSLLMLACVNFLGIVFTLLVPESKGKSLEEISREDEEQSGGDTVVEMTVANSGRKVPV

SEQ ID NO: 83780 - protein, 524 aa, Arabidopsis thaliana
  peptide (1)..(524): Ceres Seq. ID no. 12671722
MYHFTAIVIAGMGFFTDAYDLFSISLVTKLLGRIYYHVDSSKKPGTLPPNVAAAVNGVAFCGTLAGQLFFGWLGDKLGRKKVYGITLMLMVLCSLGSGLSFGHSANGVMATLCFFRFWLGFGIGGDYPLSATIMSEYANKKTRGAFIAAVFAMQGFGILAGGIVSLIVSSTFDHAFKAPTYEVDPVGSTVPQADYVWRIVLMFGAIPALLTYYWRMKMPETARYTALVARNTKQAASDMSKVLQVDLIAEEEAQSNSNSSNPNFTFGLFTREFARRHGLHLLGTTTTWFLLDIAYYSSNLFQKDIYTAIGWIPAAETMNAIHEVFTVSKAQTLIALCGTVPGYWFTVAFIDILGRFFIQLMGFIFMTIFMFALAIPYDHWRHRENRIGFLIMYSLTMFFANFGPNATTFVVPAEIFPARLRSTCHGISAASGKAGAIVGAFGFLYAAQSSDSEKTDAGYPPGIGVRNSLLMLACVNFLGIVFTLLVPESKGKSLEEISREDEEQSGGDTVVEMTVANSGRKVPV

SEQ ID NO: 83781 - protein, 513 aa, Arabidopsis thaliana
  peptide (1)..(513): Ceres Seq. ID no. 12671723
MGFFTDAYDLFSISLVTKLLGRIYYHVDSSKKPGTLPPNVAAAVNGVAFCGTLAGQLFFGWLGDKLGRKKVYGITLMLMVLCSLGSGLSFGHSANGVMATLCFFRFWLGFGIGGDYPLSATIMSEYANKKTRGAFIAAVFAMQGFGILAGGIVSLIVSSTFDHAFKAPTYEVDPVGSTVPQADYVWRIVLMFGAIPALLTYYWRMKMPETARYTALVARNTKQAASDMSKVLQVDLIAEEEAQSNSNSSNPNFTFGLFTREFARRHGLHLLGTTTTWFLLDIAYYSSNLFQKDIYTAIGWIPAAETMNAIHEVFTVSKAQTLIALCGTVPGYWFTVAFIDILGRFFIQLMGFIFMTIFMFALAIPYDHWRHRENRIGFLIMYSLTMFFANFGPNATTFVVPAEIFPARLRSTCHGISAASGKAGAIVGAFGFLYAAQSSDSEKTDAGYPPGIGVRNSLLMLACVNFLGIVFTLLVPESKGKSLEEISREDEEQSGGDTVVEMTVANSGRKVPV

SEQ ID NO: 83782 - DNA, 282 bp, Arabidopsis thaliana
  misc_feature (1)..(282): Ceres Seq. ID no. 12671768
  misc_feature (1)..(282): Ortholog of  Ceres SEQ ID NO 12578784 as cited in SEQ ID NO 20729
atgggattctctggcttagctccgattcttcacaagctgataatcttttgggaccaacctgaagcccttcacacgacatgttatgagattttgatgggtttgctttatgggttaggagctctggtttatgcaactaggatcccagagagatggatgccgggtaaattcgatatagcaggacatagccatcagttgtttcatgttctggtagttgctggtgcgttcacgcactatagagctgggctagtgtatcttaagtggagagatattgaaggatgttga

SEQ ID NO: 83783 - protein, 93 aa, Arabidopsis thaliana; identical to SEQ ID NO: 75508
  peptide (1)..(93): Ceres Seq. ID no. 12671769

SEQ ID NO: 83784 - protein, 62 aa, Arabidopsis thaliana; identical to SEQ ID NO: 69645
  peptide (1)..(62): Ceres Seq. ID no. 12671770

SEQ ID NO: 83785 - DNA, 1741 bp, Arabidopsis thaliana
  misc_feature (1)..(1741): Ceres Seq. ID no. 12671785
  misc_feature (1)..(1741): Ortholog of  Ceres SEQ ID NO 12586556 as cited in SEQ ID NO 64667
  misc_feature (1)..(1741): Ortholog of  Ceres SEQ ID NO 13660894 as cited in SEQ ID NO 67475
tctgatgagcatgtactccaagcttggagattttccttccgctgttgcagtatatggacgtatgcgtaagaagaattatatgtcatctaacatactcatcaatgggtatgttcgtgcaggcgatttggtaaatgcccggaaggtgtttgatgaaatgcctgatagaaagctcacaacttggaatgctatgattgctggtttgatccagtttgagtttaacgaagagggtttgagtttgtttagggaaatgcacggattggggttttcgcctgatgaatatactcttggtagtgtttttagcggatctgctgggttgaggtcagtgtctatagggcagcagattcatggctacacgatcaaatatgggcttgagttggatttagttgttaatagttcgttggctcatatgtatatgagaaatgggaaattgcaagatggcgagattgttataagatcaatgccggttcgtaatttggttgcatggaatacactcatcatggggaacgcgcaaaacggatgtcctgaaaccgtgctttatctgtataagatgatgaaaatctcaggttgtaggccgaacaagatcacatttgtaactgtgctcagttcttgttctgacttagcgataagaggtcaaggtcagcagattcatgcggaagctattaaaattggggctagctctgtcgtagctgtagttagttcattgatcagtatgtattcaaaatgtgggtgtcttggagatgcagctaaagctttctcggaacgtgaagatgaagatgaagtgatgtggagctcaatgatttctgcttatgggtttcatggacaaggcgatgaggcaatcgagctgtttaatactatggcagagcagacgaacatggagataaacgaggtcgcgtttctgaatttactttatgcgtgtagtcattctggcttaaaagacaaagggcttgagttgtttgacatgatggtggaaaaatacgggttcaagccaggtttaaagcactacacttgtgtggtggatttgctcggtcgagcaggctgtttggatcaagccgaggcaataataaggtctatgccaataaaaacagacattgttatatggaaaacattgttatctgcgtgtaacatacacaaaaacgcagaaatggcacagagagtctttaaagagattcttcagattgaccctaatgactctgcttgttacgtcctgcttgcaaatgttcacgcctcagctaagagatggcgcgatgtatcagaggtgagaaaatcgatgagagataagaatgtgaagaaagaagcgggaatcagctggtttgaacacaaaggtgaagttcatcagtttaagatgggagatcgctctcagtctaaatctaaagagatctattcatacctgaaagaactgactctggagatgaagctgaagggatacaagcctgatacagcgtcagtattgcatgatatggatgaggaggagaaagaatcagacttggtgcagcacagcgagaaactagcggttgcatttgcgctcatgatattacctgaaggtgcaccgattagaataatcaagaacttgcgggtttgcagtgattgccatgttgctttcaaatatatatcggtgatcaagaaccgagagatcacgttaagagatggtagtagattccatcatttcattaacggaaagtgttcttgcggcgattattggtagctgggcagttaaagtatgctatgactctctgcttcagag

SEQ ID NO: 83786 - protein, 566 aa, Arabidopsis thaliana
  peptide (1)..(566): Ceres Seq. ID no. 12671786
LMSMYSKLGDFPSAVAVYGRMRKKNYMSSNILINGYVRAGDLVNARKVFDEMPDRKLTTWNAMIAGLIQFEFNEEGLSLFREMHGLGFSPDEYTLGSVFSGSAGLRSVSIGQQIHGYTIKYGLELDLVVNSSLAHMYMRNGKLQDGEIVIRSMPVRNLVAWNTLIMGNAQNGCPETVLYLYKMMKISGCRPNKITFVTVLSSCSDLAIRGQGQQIHAEAIKIGASSVVAVVSSLISMYSKCGCLGDAAKAFSEREDEDEVMWSSMISAYGFHGQGDEAIELFNTMAEQTNMEINEVAFLNLLYACSHSGLKDKGLELFDMMVEKYGFKPGLKHYTCVVDLLGRAGCLDQAEAIIRSMPIKTDIVIWKTLLSACNIHKNAEMAQRVFKEILQIDPNDSACYVLLANVHASAKRWRDVSEVRKSMRDKNVKKEAGISWFEHKGEVHQFKMGDRSQSKSKEIYSYLKELTLEMKLKGYKPDTASVLHDMDEEEKESDLVQHSEKLAVAFALMILPEGAPIRIIKNLRVCSDCHVAFKYISVIKNREITLRDGSRFHHFINGKCSCGDYW

SEQ ID NO: 83787 - protein, 565 aa, Arabidopsis thaliana
  peptide (1)..(565): Ceres Seq. ID no. 12671787
MSMYSKLGDFPSAVAVYGRMRKKNYMSSNILINGYVRAGDLVNARKVFDEMPDRKLTTWNAMIAGLIQFEFNEEGLSLFREMHGLGFSPDEYTLGSVFSGSAGLRSVSIGQQIHGYTIKYGLELDLVVNSSLAHMYMRNGKLQDGEIVIRSMPVRNLVAWNTLIMGNAQNGCPETVLYLYKMMKISGCRPNKITFVTVLSSCSDLAIRGQGQQIHAEAIKIGASSVVAVVSSLISMYSKCGCLGDAAKAFSEREDEDEVMWSSMISAYGFHGQGDEAIELFNTMAEQTNMEINEVAFLNLLYACSHSGLKDKGLELFDMMVEKYGFKPGLKHYTCVVDLLGRAGCLDQAEAIIRSMPIKTDIVIWKTLLSACNIHKNAEMAQRVFKEILQIDPNDSACYVLLANVHASAKRWRDVSEVRKSMRDKNVKKEAGISWFEHKGEVHQFKMGDRSQSKSKEIYSYLKELTLEMKLKGYKPDTASVLHDMDEEEKESDLVQHSEKLAVAFALMILPEGAPIRIIKNLRVCSDCHVAFKYISVIKNREITLRDGSRFHHFINGKCSCGDYW

SEQ ID NO: 83788 - protein, 563 aa, Arabidopsis thaliana
  peptide (1)..(563): Ceres Seq. ID no. 12671788
MYSKLGDFPSAVAVYGRMRKKNYMSSNILINGYVRAGDLVNARKVFDEMPDRKLTTWNAMIAGLIQFEFNEEGLSLFREMHGLGFSPDEYTLGSVFSGSAGLRSVSIGQQIHGYTIKYGLELDLVVNSSLAHMYMRNGKLQDGEIVIRSMPVRNLVAWNTLIMGNAQNGCPETVLYLYKMMKISGCRPNKITFVTVLSSCSDLAIRGQGQQIHAEAIKIGASSVVAVVSSLISMYSKCGCLGDAAKAFSEREDEDEVMWSSMISAYGFHGQGDEAIELFNTMAEQTNMEINEVAFLNLLYACSHSGLKDKGLELFDMMVEKYGFKPGLKHYTCVVDLLGRAGCLDQAEAIIRSMPIKTDIVIWKTLLSACNIHKNAEMAQRVFKEILQIDPNDSACYVLLANVHASAKRWRDVSEVRKSMRDKNVKKEAGISWFEHKGEVHQFKMGDRSQSKSKEIYSYLKELTLEMKLKGYKPDTASVLHDMDEEEKESDLVQHSEKLAVAFALMILPEGAPIRIIKNLRVCSDCHVAFKYISVIKNREITLRDGSRFHHFINGKCSCGDYW

SEQ ID NO: 83789 - DNA, 1116 bp, Arabidopsis thaliana
  misc_feature (1)..(1116): Ceres Seq. ID no. 12671789
  misc_feature (1)..(1116): Ortholog of  Ceres SEQ ID NO 15177870 as cited in SEQ ID NO 52373
  misc_feature (1)..(1116): Ortholog of  Ceres SEQ ID NO 13582380 as cited in SEQ ID NO 56782
atggagaaacagtacctcactttcatttctttttgtttctccatcaccatttgtgggttcctcatagtttcttggctggcaagaagcataatccgtaatgggattagaacattaacatggagaaaggaaacgaagaggaagaaaaagaatcaagaagatgaaaacaaaatgtctctcctggatttgccggacttaaccttagactgcatattagagaagctctcaccatcagagctctgtgcaatgactagtgtttgctccgagctaagagataagtgtgtaagcgatcatctatgggagaagcatatggagacaaaatggggaagattgatgggtgatgcagcgattcaagagtggaaatctcacgttgctacgataatgagatgtctcacaagtagtagtagtagtagtagaaagagtaaaccaaactggagttcgaggtttgttgcgaatttgaaaccctttgcatggttaagttcaaaccatggttgtgaaaacagaggatcatcatcatatttggcacctatagattctgtgatgtattggtactcgaatcttgaaaatggcaagttttggttccctgctcaagtctacaatcgcgagaacggacatgttggattcatgatgtcttgttacgatgctaagatcagatacgatttcaagactgatacatttcaagctagatactcggcacatggccggcgagcggcggaggaaaaggtgacgtggcagaggctgagaccgtctcaagacgacacaaagtcacgtgatctgcacgtgtcagattgtttgcacggacttcgacctggtgaccatttcgagatccaatggcgacgaaccaaagagttcccttatggttggtggttcggaatcgttggtcatctacaaaactgcgacggcgtacaaaattgtcgttgcgactctgacgagaatgtggtgatggagttcagacaattcagaccggaatcaccgtggagaagaacggtgataaagaggaaagaccaccgtgagacgggaaatgaagaaaacggtttctacggcggagtaaagaaattgggtacggaggaagagatttctacgtggaagcaattgtggccatcacaagccttggagtag

SEQ ID NO: 83790 - protein, 371 aa, Arabidopsis thaliana
  peptide (1)..(371): Ceres Seq. ID no. 12671790
MEKQYLTFISFCFSITICGFLIVSWLARSIIRNGIRTLTWRKETKRKKKNQEDENKMSLLDLPDLTLDCILEKLSPSELCAMTSVCSELRDKCVSDHLWEKHMETKWGRLMGDAAIQEWKSHVATIMRCLTSSSSSSRKSKPNWSSRFVANLKPFAWLSSNHGCENRGSSSYLAPIDSVMYWYSNLENGKFWFPAQVYNRENGHVGFMMSCYDAKIRYDFKTDTFQARYSAHGRRAAEEKVTWQRLRPSQDDTKSRDLHVSDCLHGLRPGDHFEIQWRRTKEFPYGWWFGIVGHLQNCDGVQNCRCDSDENVVMEFRQFRPESPWRRTVIKRKDHRETGNEENGFYGGVKKLGTEEEISTWKQLWPSQALE

SEQ ID NO: 83791 - protein, 315 aa, Arabidopsis thaliana
  peptide (1)..(315): Ceres Seq. ID no. 12671791
MSLLDLPDLTLDCILEKLSPSELCAMTSVCSELRDKCVSDHLWEKHMETKWGRLMGDAAIQEWKSHVATIMRCLTSSSSSSRKSKPNWSSRFVANLKPFAWLSSNHGCENRGSSSYLAPIDSVMYWYSNLENGKFWFPAQVYNRENGHVGFMMSCYDAKIRYDFKTDTFQARYSAHGRRAAEEKVTWQRLRPSQDDTKSRDLHVSDCLHGLRPGDHFEIQWRRTKEFPYGWWFGIVGHLQNCDGVQNCRCDSDENVVMEFRQFRPESPWRRTVIKRKDHRETGNEENGFYGGVKKLGTEEEISTWKQLWPSQALE

SEQ ID NO: 83792 - protein, 290 aa, Arabidopsis thaliana
  peptide (1)..(290): Ceres Seq. ID no. 12671792
MTSVCSELRDKCVSDHLWEKHMETKWGRLMGDAAIQEWKSHVATIMRCLTSSSSSSRKSKPNWSSRFVANLKPFAWLSSNHGCENRGSSSYLAPIDSVMYWYSNLENGKFWFPAQVYNRENGHVGFMMSCYDAKIRYDFKTDTFQARYSAHGRRAAEEKVTWQRLRPSQDDTKSRDLHVSDCLHGLRPGDHFEIQWRRTKEFPYGWWFGIVGHLQNCDGVQNCRCDSDENVVMEFRQFRPESPWRRTVIKRKDHRETGNEENGFYGGVKKLGTEEEISTWKQLWPSQALE

SEQ ID NO: 83793 - DNA, 1100 bp, Arabidopsis thaliana
  misc_feature (1)..(1100): Ceres Seq. ID no. 12671801
  misc_feature (1)..(1100): Ortholog of  Ceres SEQ ID NO 15176306 as cited in SEQ ID NO 52784
  misc_feature (1)..(1100): Ortholog of  Ceres SEQ ID NO 13582624 as cited in SEQ ID NO 56287
  misc_feature (1)..(1100): Ortholog of  Ceres SEQ ID NO 13597264 as cited in SEQ ID NO 63897
  misc_feature (1)..(1100): Ortholog of  Ceres SEQ ID NO 13598570 as cited in SEQ ID NO 65434
  misc_feature (1)..(1100): Ortholog of  Ceres SEQ ID NO 13656452 as cited in SEQ ID NO 65745
  misc_feature (1)..(1100): Ortholog of  Ceres SEQ ID NO 13596238 as cited in SEQ ID NO 68834
  misc_feature (1)..(1100): Ortholog of  Ceres SEQ ID NO 15174329 as cited in SEQ ID NO 0
acacaactctcccctcaaaacattccatcaaaggaaaaaaatggcgacacaaaatgcgattctgaaaaaagctctcatcattttcctctttactctaaccatcatgacaggaaccgcgttttcacaaaactgtggtacaaacgggtgtaaaggcaacatgtgctgcagcaggtggggatattgtggtaccacaaaagcctactgtggcactgggtgccagagtggaccttgcaactctaaacctaaacctactccgactccaagcggtagtggcggtctaaatgctggtcctcgtggtaccatagcaagcgttatcacaccagcgttcttcaacagcatcatgagtaaagtcggaagcggttgcccagcgaaagggttttacactcgccaggctttcatcgcagccgctgaatcgttcgcagcctacaaaggaactgttgctaagcgtgagattgccgccatgttggctcagttctctcacgaatctggaagtttttgttacaaagaagaaatagccagaggaaggtactgctcaccaagcacaacatatccttgtcaacccggaaagaactactatggtcgcggtccgatccaaatcacatggaactacaactatggtgcagccggaaagttccttggacttcctctcttgaaggacccagatatggtggctcgtagcccaactgtggctttccagtgtgccatgtggttttggaacaagaatgtgcgtccggttttgagccaagggtttggtgcaaccacgaggaggatcaacggtggtgaatgtaatggtgggcgtccagctgcagtgcagagcagggttaaccattacttggacttctgcaagaagcttggggtcactcctggaaccaatctctcatgttgaagacactactagtttatgagggtttttcattaatgtcgtctggttaagaatttcgtatcgaataataaagtgaagtcgaaaatactagaacttataaaatttgtaagagattagaagttatattgtgtggttgatgtctcttaaggtaactatattgtgtgttgtttgtatccgctcgctagcataagtaataaagatggaagtattatccaat

SEQ ID NO: 83794 - protein, 294 aa, Arabidopsis thaliana
  peptide (1)..(294): Ceres Seq. ID no. 12671802
HNSPLKTFHQRKKMATQNAILKKALIIFLFTLTIMTGTAFSQNCGTNGCKGNMCCSRWGYCGTTKAYCGTGCQSGPCNSKPKPTPTPSGSGGLNAGPRGTIASVITPAFFNSIMSKVGSGCPAKGFYTRQAFIAAAESFAAYKGTVAKREIAAMLAQFSHESGSFCYKEEIARGRYCSPSTTYPCQPGKNYYGRGPIQITWNYNYGAAGKFLGLPLLKDPDMVARSPTVAFQCAMWFWNKNVRPVLSQGFGATTRRINGGECNGGRPAAVQSRVNHYLDFCKKLGVTPGTNLSC

SEQ ID NO: 83795 - protein, 281 aa, Arabidopsis thaliana
  peptide (1)..(281): Ceres Seq. ID no. 12671803
MATQNAILKKALIIFLFTLTIMTGTAFSQNCGTNGCKGNMCCSRWGYCGTTKAYCGTGCQSGPCNSKPKPTPTPSGSGGLNAGPRGTIASVITPAFFNSIMSKVGSGCPAKGFYTRQAFIAAAESFAAYKGTVAKREIAAMLAQFSHESGSFCYKEEIARGRYCSPSTTYPCQPGKNYYGRGPIQITWNYNYGAAGKFLGLPLLKDPDMVARSPTVAFQCAMWFWNKNVRPVLSQGFGATTRRINGGECNGGRPAAVQSRVNHYLDFCKKLGVTPGTNLSC

SEQ ID NO: 83796 - protein, 260 aa, Arabidopsis thaliana
  peptide (1)..(260): Ceres Seq. ID no. 12671804
MTGTAFSQNCGTNGCKGNMCCSRWGYCGTTKAYCGTGCQSGPCNSKPKPTPTPSGSGGLNAGPRGTIASVITPAFFNSIMSKVGSGCPAKGFYTRQAFIAAAESFAAYKGTVAKREIAAMLAQFSHESGSFCYKEEIARGRYCSPSTTYPCQPGKNYYGRGPIQITWNYNYGAAGKFLGLPLLKDPDMVARSPTVAFQCAMWFWNKNVRPVLSQGFGATTRRINGGECNGGRPAAVQSRVNHYLDFCKKLGVTPGTNLSC

SEQ ID NO: 83797 - DNA, 1350 bp, Arabidopsis thaliana
  misc_feature (1)..(1350): Ceres Seq. ID no. 12671813
  misc_feature (1)..(1350): Ortholog of  Ceres SEQ ID NO 13594345 as cited in SEQ ID NO 58043
  misc_feature (1)..(1350): Ortholog of  Ceres SEQ ID NO 12614112 as cited in SEQ ID NO 60891
  misc_feature (1)..(1350): Ortholog of  Ceres SEQ ID NO 13597574 as cited in SEQ ID NO 64677
  misc_feature (1)..(1350): Ortholog of  Ceres SEQ ID NO 13662880 as cited in SEQ ID NO 65422
  misc_feature (1)..(1350): Ortholog of  Ceres SEQ ID NO 12779098 as cited in SEQ ID NO 67698
  misc_feature (1)..(1350): Ortholog of  Ceres SEQ ID NO 13596180 as cited in SEQ ID NO 67941
  misc_feature (1)..(1350): Ortholog of  Ceres SEQ ID NO 13591190 as cited in SEQ ID NO 68044
  misc_feature (1)..(1350): Ortholog of  Ceres SEQ ID NO 13596089 as cited in SEQ ID NO 68373
atggagaagatgagaggacatgtattagcagtgccatttccaagccaaggacacatcaccccgattcgccaattctgcaaacgacttcactccaaaggtttcaaaaccactcacactctcaccacttttatcttcaacacaatccacctcgacccatctagtcctatctccatagccacaatctccgatggctatgaccagggagggttctcatcagccggttctgtcccggagtacctacaaaacttcaaaaccttcggctccaaaaccgtcgctgatatcatccgcaaacaccagagtactgataaccctattacttgtatcgtctatgattctttcatgccttgggcgcttgaccttgcaatggattttggtctagctgcggctcctttcttcacgcagtcttgcgccgttaactatatcaattatctttcttacataaacaatggtagcttgacacttcccatcaaggatttgcctcttcttgagctccaagatttgcctactttcgtcactcctactggttcacaccttgcttactttgagatggtgcttcaacagttcaccaacttcgacaaagctgatttcgtactcgttaattccttccatgacctcgaccttcatgaagaggagttgttgtcgaaagtatgtcctgtgttgacaattggtccaactgttccatcaatgtacttagaccaacagatcaaatcagacaacgactatgatctgaacctctttgacttaaaagaagctgccttatgcactgactggctagacaagaggccagaaggatcggtagtatatatagcttttgggagcatggctaaactgagtagtgagcagatggaagagattgcttcggcgataagcaacttcagctacctctgggttgtcagagcttcagaggagtcaaagctcccaccagggtttcttgaaacagtggataaagacaagagcttggtcttgaagtggagtcctcagcttcaagttctgtcaaacaaagccatcggttgtttcatgactcactgtggctggaactcaaccatggagggtttgagtttaggggttcccatggtggctatgcctcaatggactgatcaaccaatgaatgcaaagtatatacaagatgtatggaaggttggggttcgtgtgaaagcagagaaagaaagtggcatttgcaaaagagaggagattgagtttagcatcaaggaagtgatggaaggagagaagagcaaagagatgaaagagaatgcgggaaaatggagagacttggctgtgaagtcactcagtgaaggaggttctacagatatcaacattaacgaatttgtatcaaaaattcaaatcaaataa

SEQ ID NO: 83798 - protein, 449 aa, Arabidopsis thaliana
  peptide (1)..(449): Ceres Seq. ID no. 12671814
MEKMRGHVLAVPFPSQGHITPIRQFCKRLHSKGFKTTHTLTTFIFNTIHLDPSSPISIATISDGYDQGGFSSAGSVPEYLQNFKTFGSKTVADIIRKHQSTDNPITCIVYDSFMPWALDLAMDFGLAAAPFFTQSCAVNYINYLSYINNGSLTLPIKDLPLLELQDLPTFVTPTGSHLAYFEMVLQQFTNFDKADFVLVNSFHDLDLHEEELLSKVCPVLTIGPTVPSMYLDQQIKSDNDYDLNLFDLKEAALCTDWLDKRPEGSVVYIAFGSMAKLSSEQMEEIASAISNFSYLWVVRASEESKLPPGFLETVDKDKSLVLKWSPQLQVLSNKAIGCFMTHCGWNSTMEGLSLGVPMVAMPQWTDQPMNAKYIQDVWKVGVRVKAEKESGICKREEIEFSIKEVMEGEKSKEMKENAGKWRDLAVKSLSEGGSTDININEFVSKIQIK

SEQ ID NO: 83799 - protein, 446 aa, Arabidopsis thaliana
  peptide (1)..(446): Ceres Seq. ID no. 12671815
MRGHVLAVPFPSQGHITPIRQFCKRLHSKGFKTTHTLTTFIFNTIHLDPSSPISIATISDGYDQGGFSSAGSVPEYLQNFKTFGSKTVADIIRKHQSTDNPITCIVYDSFMPWALDLAMDFGLAAAPFFTQSCAVNYINYLSYINNGSLTLPIKDLPLLELQDLPTFVTPTGSHLAYFEMVLQQFTNFDKADFVLVNSFHDLDLHEEELLSKVCPVLTIGPTVPSMYLDQQIKSDNDYDLNLFDLKEAALCTDWLDKRPEGSVVYIAFGSMAKLSSEQMEEIASAISNFSYLWVVRASEESKLPPGFLETVDKDKSLVLKWSPQLQVLSNKAIGCFMTHCGWNSTMEGLSLGVPMVAMPQWTDQPMNAKYIQDVWKVGVRVKAEKESGICKREEIEFSIKEVMEGEKSKEMKENAGKWRDLAVKSLSEGGSTDININEFVSKIQIK

SEQ ID NO: 83800 - protein, 336 aa, Arabidopsis thaliana
  peptide (1)..(336): Ceres Seq. ID no. 12671816
MPWALDLAMDFGLAAAPFFTQSCAVNYINYLSYINNGSLTLPIKDLPLLELQDLPTFVTPTGSHLAYFEMVLQQFTNFDKADFVLVNSFHDLDLHEEELLSKVCPVLTIGPTVPSMYLDQQIKSDNDYDLNLFDLKEAALCTDWLDKRPEGSVVYIAFGSMAKLSSEQMEEIASAISNFSYLWVVRASEESKLPPGFLETVDKDKSLVLKWSPQLQVLSNKAIGCFMTHCGWNSTMEGLSLGVPMVAMPQWTDQPMNAKYIQDVWKVGVRVKAEKESGICKREEIEFSIKEVMEGEKSKEMKENAGKWRDLAVKSLSEGGSTDININEFVSKIQIK

SEQ ID NO: 83801 - DNA, 1407 bp, Arabidopsis thaliana
  misc_feature (1)..(1407): Ceres Seq. ID no. 12671854
  misc_feature (1)..(1407): Ortholog of  Ceres SEQ ID NO 13623250 as cited in SEQ ID NO 0
atgggggagattgtggttttaagtagtgatgatggtatggagactataaagaacagagtaaagtcatcggaagttgttcagtgggagaagtatttgcctaaaactgtacttagggttttgttagttgaatctgattactcaactcgtcaaatcatcactgcccttcttcgtaaatgctgttacaaagttgtagctgtttctgatggtttagctgcgtgggaggttctaaaggagaagtcacataacattgatcttatactaacagagctggatttgccatctatatctggttttgctctgcttgctttggtaatggagcatgaagcttgcaagaacattcctgtcataatgatgtcttctcaagattcgataaaaatggtgttgaagtgtatgctgagaggtgctgctgattatctaatcaaaccaatgaggaaaaacgagttgaaaaatctatggcaacatgtttggagaagactgactttgcgtgatgatcctactgctcatgctcaaagcttaccagcttcacagcacaaccttgaagatactgatgaaacttgtgaagattccagatatcattcagatcaaggaagtggtgctcaggctatcaattacaatggtcacaataagctgatggagaatggcaaatcagtggatgaaagagacgagtttaaggaaacttttgatgtgacaatggatttgattggtggaattgacaagcgtcctgatagtatttataaagacaagagtcgagatgagtgtgttggtcctgagcttggactttctctgaaaagatcttgctctgtaagttttgagaaccaagatgaaagcaagcatcaaaagcttagcctctctgatgcgtcggccttctcaagatttgaggaaagcaagtcagcagaaaaagccgtcgttgctttagaggagagtacttcaggtgagccaaagacaccaaccgaatcacatgaaaagttaagaaaagtaacatctgatcaaggaagcgccacaacgagcagcaaccaggagaatatcggatcatcaagcgtaagcttccgtaaccaagttcttcagtccacagtaacgaatcagaagcaagattcacccataccggtagaatcaaatcgcgagaaagcagctagcaaggaagtagaagctggttctcaaagcaccaatgaggggattgctggacaaagcagtagcacagagaaaccaaaggaagaagaaagtgcgaaacaacgttggagtagaagccagagagaagctgcattgatgaagttccggttgaagaggaaagatcgatgctttgacaaaaaggttcggtaccagagcaggaagaagctagcagaacaacgtcctcgagtgaaaggccagttcgtgcgaaccgtgaattcagacgcgtctacaaaatcatga

SEQ ID NO: 83802 - protein, 468 aa, Arabidopsis thaliana
  peptide (1)..(468): Ceres Seq. ID no. 12671855
MGEIVVLSSDDGMETIKNRVKSSEVVQWEKYLPKTVLRVLLVESDYSTRQIITALLRKCCYKVVAVSDGLAAWEVLKEKSHNIDLILTELDLPSISGFALLALVMEHEACKNIPVIMMSSQDSIKMVLKCMLRGAADYLIKPMRKNELKNLWQHVWRRLTLRDDPTAHAQSLPASQHNLEDTDETCEDSRYHSDQGSGAQAINYNGHNKLMENGKSVDERDEFKETFDVTMDLIGGIDKRPDSIYKDKSRDECVGPELGLSLKRSCSVSFENQDESKHQKLSLSDASAFSRFEESKSAEKAVVALEESTSGEPKTPTESHEKLRKVTSDQGSATTSSNQENIGSSSVSFRNQVLQSTVTNQKQDSPIPVESNREKAASKEVEAGSQSTNEGIAGQSSSTEKPKEEESAKQRWSRSQREAALMKFRLKRKDRCFDKKVRYQSRKKLAEQRPRVKGQFVRTVNSDASTKS

SEQ ID NO: 83803 - protein, 456 aa, Arabidopsis thaliana
  peptide (1)..(456): Ceres Seq. ID no. 12671856
METIKNRVKSSEVVQWEKYLPKTVLRVLLVESDYSTRQIITALLRKCCYKVVAVSDGLAAWEVLKEKSHNIDLILTELDLPSISGFALLALVMEHEACKNIPVIMMSSQDSIKMVLKCMLRGAADYLIKPMRKNELKNLWQHVWRRLTLRDDPTAHAQSLPASQHNLEDTDETCEDSRYHSDQGSGAQAINYNGHNKLMENGKSVDERDEFKETFDVTMDLIGGIDKRPDSIYKDKSRDECVGPELGLSLKRSCSVSFENQDESKHQKLSLSDASAFSRFEESKSAEKAVVALEESTSGEPKTPTESHEKLRKVTSDQGSATTSSNQENIGSSSVSFRNQVLQSTVTNQKQDSPIPVESNREKAASKEVEAGSQSTNEGIAGQSSSTEKPKEEESAKQRWSRSQREAALMKFRLKRKDRCFDKKVRYQSRKKLAEQRPRVKGQFVRTVNSDASTKS

SEQ ID NO: 83804 - protein, 364 aa, Arabidopsis thaliana
  peptide (1)..(364): Ceres Seq. ID no. 12671857
MEHEACKNIPVIMMSSQDSIKMVLKCMLRGAADYLIKPMRKNELKNLWQHVWRRLTLRDDPTAHAQSLPASQHNLEDTDETCEDSRYHSDQGSGAQAINYNGHNKLMENGKSVDERDEFKETFDVTMDLIGGIDKRPDSIYKDKSRDECVGPELGLSLKRSCSVSFENQDESKHQKLSLSDASAFSRFEESKSAEKAVVALEESTSGEPKTPTESHEKLRKVTSDQGSATTSSNQENIGSSSVSFRNQVLQSTVTNQKQDSPIPVESNREKAASKEVEAGSQSTNEGIAGQSSSTEKPKEEESAKQRWSRSQREAALMKFRLKRKDRCFDKKVRYQSRKKLAEQRPRVKGQFVRTVNSDASTKS

SEQ ID NO: 83805 - DNA, 777 bp, Arabidopsis thaliana
  misc_feature (1)..(777): Ceres Seq. ID no. 12671858
  misc_feature (1)..(777): Ortholog of  Ceres SEQ ID NO 13594163 as cited in SEQ ID NO 60426
atgtcgggactcagattggaaggcaagatcgtaattataacaggcggagccagcgggattggagccgacgccgctaggctgttcacggaccacggagctaaggtggttatagttgacgtacaagaagaactaggccaaaacgtcgcagttttgatcgggaaagacaaagctagtttttaccgttgcgatgtgacaaatgagacggaagtcgaggacgcagttaagttcaccgtcgaaaaacacggaaagctagacgttctgtttagcaacgccggagtcttggaaccactggaaagcttcctcgactttgacctcgaacggtttgaccgcataatggctgttaacgttcgcggtgcagctgcgtttatcaaacacgcggcacgagccatggtggagaaaggcacgcgtggctccatcgtttgtacgacgagcgtctcggcggagatcggtggggggcatcatggttacacggcgtctaaacacgggcttgtcggcctgattagatcggcctgtggtgatttggggaagtatgggattagagtcaatggagtcgcaccgtacgcggtggcaacgccaatgactagccacgacgaggtaacgggaaagcagttggaggattattttgacgccaagggaattctcaaggggatggtgcttaaagctagccacgttgcacaagtggctctgttcttggcttctgatgattcggcttatataagtggtcagaatttggcggtggatggtggttatactgtcgttaagccaagccgtgattaa

SEQ ID NO: 83806 - protein, 258 aa, Arabidopsis thaliana
  peptide (1)..(258): Ceres Seq. ID no. 12671859
MSGLRLEGKIVIITGGASGIGADAARLFTDHGAKVVIVDVQEELGQNVAVLIGKDKASFYRCDVTNETEVEDAVKFTVEKHGKLDVLFSNAGVLEPLESFLDFDLERFDRIMAVNVRGAAAFIKHAARAMVEKGTRGSIVCTTSVSAEIGGGHHGYTASKHGLVGLIRSACGDLGKYGIRVNGVAPYAVATPMTSHDEVTGKQLEDYFDAKGILKGMVLKASHVAQVALFLASDDSAYISGQNLAVDGGYTVVKPSRD

SEQ ID NO: 83807 - protein, 147 aa, Arabidopsis thaliana; identical to SEQ ID NO: 78822
  peptide (1)..(147): Ceres Seq. ID no. 12671860

SEQ ID NO: 83808 - protein, 129 aa, Arabidopsis thaliana; identical to SEQ ID NO: 78823
  peptide (1)..(129): Ceres Seq. ID no. 12671861

SEQ ID NO: 83809 - DNA, 772 bp, Arabidopsis thaliana
  misc_feature (1)..(772): Ceres Seq. ID no. 12671885
  misc_feature (1)..(772): Ortholog of  Ceres SEQ ID NO 14305994 as cited in SEQ ID NO 52280
  misc_feature (1)..(772): Ortholog of  Ceres SEQ ID NO 14306255 as cited in SEQ ID NO 56917
actcttgagaagctctcgattaagcttgaacttggaggatcaatggccgacgttcgcacacactcgcaccagcttcaagtgcaccctcaacgccagcatgaaggaggcatcaaagtcctttatcctcagagtggcccttcttccactcaggtgctagccgtgtttgtcggtgtaccgataggaggaacgctgctgactatagccggtttgacattagccggttcggttataggactaatgctagcattcccgttgtttctcatctttagtccggttattgtaccagcagcctttgtcatcggtctagctatgactggattcctggcttcaggggccataggtctcaccggactatcatccatgtcgtgggtactcaactacatccgccgggccgggcagcatatcccggaggagcttgaggaagcgaagcatcgtttggctgacatggccgagtatgtgggacagaggactaaagatgctggacaaaccatagaagacaaagctcatgatgtccgagaggccaagacttttgatgtccgagaccgagacaccaccaagggtactcataatgtccgagacaccaagactacataaagcgtgtgttttgagtgaaccatgttgaataaaaaaaatcgactgttagttcttaatgttcatgtgttttgagtgtttgtatttgcttgtaagcttattttgggtttagtttcctcttctttttttttcctgtaacaataatgtcggagacattttgcttctatcagttctttgtttt

SEQ ID NO: 83810 - protein, 197 aa, Arabidopsis thaliana
  peptide (1)..(197): Ceres Seq. ID no. 12671886
TLEKLSIKLELGGSMADVRTHSHQLQVHPQRQHEGGIKVLYPQSGPSSTQVLAVFVGVPIGGTLLTIAGLTLAGSVIGLMLAFPLFLIFSPVIVPAAFVIGLAMTGFLASGAIGLTGLSSMSWVLNYIRRAGQHIPEELEEAKHRLADMAEYVGQRTKDAGQTIEDKAHDVREAKTFDVRDRDTTKGTHNVRDTKTT

SEQ ID NO: 83811 - protein, 183 aa, Arabidopsis thaliana
  peptide (1)..(183): Ceres Seq. ID no. 12671887
MADVRTHSHQLQVHPQRQHEGGIKVLYPQSGPSSTQVLAVFVGVPIGGTLLTIAGLTLAGSVIGLMLAFPLFLIFSPVIVPAAFVIGLAMTGFLASGAIGLTGLSSMSWVLNYIRRAGQHIPEELEEAKHRLADMAEYVGQRTKDAGQTIEDKAHDVREAKTFDVRDRDTTKGTHNVRDTKTT

SEQ ID NO: 83812 - protein, 118 aa, Arabidopsis thaliana
  peptide (1)..(118): Ceres Seq. ID no. 12671888
MLAFPLFLIFSPVIVPAAFVIGLAMTGFLASGAIGLTGLSSMSWVLNYIRRAGQHIPEELEEAKHRLADMAEYVGQRTKDAGQTIEDKAHDVREAKTFDVRDRDTTKGTHNVRDTKTT

SEQ ID NO: 83813 - DNA, 2627 bp, Arabidopsis thaliana
  misc_feature (1)..(2627): Ceres Seq. ID no. 12671889
  misc_feature (1)..(2627): Ortholog of  Ceres SEQ ID NO 13595870 as cited in SEQ ID NO 62101
  misc_feature (1)..(2627): Ortholog of  Ceres SEQ ID NO 13590241 as cited in SEQ ID NO 63878
  misc_feature (1)..(2627): Ortholog of  Ceres SEQ ID NO 13657939 as cited in SEQ ID NO 66349
attgaaacgccatctcagctctaattcagtacgatggggaggagaggtcgcggcggcggcggtggtatgggcggaggaatcaatcgtagatatctgagtcaagttatggatacgtgcggcaaggatttatctacggcggaggacatcgttgatgatcttcgttccaggtacggcaattttgcgaggttgactcggcaagtgcttctactcaatgtcaggcaagtccttaatgttagaaacaacaagagggttaaagacgaagatgaagatgacaacattggagatgaggaaggttctgcttctcagaggaagaaacagagacgggttgatgagaaagaggagaaattgcagcgagcggagcagtcgcatttaaggaagaggaatatggaacgttcagtgtcttcttctccgtcttcttcttcttcttcggaagacagtggtgatgtgtcgacttctgaggacgcggtttatggcgagaagctgagtccgccgcggtttgatctgatcaatgacagtctaagagataactacgctaagttgaacagctcctcgaagaaaccaattgggtcgcctgcggaaaagaatgtggaagttgagactgtgagcaacaaaggtagaagcaagttggctacaatgggggccagaaaggaggctaaagtttctctttccctcagtggagctactggtaatggtgatttggaagttgagggtactaaaggacctacttttaaagactttggtgggattaagaaaatattggatgaattggagatgaatgttctattccccattctcaatcctgagccgtttaagaagattggagtgaagccaccaagtgggattctatttcatggaccacctggctgtgggaagactaagttggccaatgccattgccaatgaagctggtgttccgttttataagatttcagccacagaggtgatttctggtgtttctggtgcttctgaagagaatatcagagagctcttttctaaagcatataggactgcgccttcgattgtgtttatcgatgagattgatgcgattggttcaaagagagagaatcagcaaagagagatggagaagcggatagtaacacaattgttgacttgtatggatggacctggtaacaaaggcgataaaaatgctcctgattctagtgctggttttgttcttgtcattggagctacaaataggcctgatgctcttgatcctgctttgaggagaagtggacgatttgaaactgagatcgctctaactgctccagatgaagacgcaagggctgagatactctctgttgtagcccaaaaacttagattagaaggaccctttgacaagaaaagaatagctcgtttaacaccgggttttgttggagctgatttggagagtgttgcttacttggctggcaggaaagccattaagagaatcttggattcaaggaaatctgaacagtctggggacggtgaagacgataaatcttggctgaggatgccctggccagaagaagagttggaaaagctctttgtcaaaatgtctgatttcgaggaagcagtgaatctagttcaggcatctttaacaagagaaggattctctatcgtgcctgatgtcaagtgggatgatgttggtggacttgaccatctacgacttcaattcaaccgttatatagtgaggcctatcaaaaagcctgatatttataaggcttttggggtagacttagagacagggtttttgctctatggaccaccgggttgtggcaagacattgattgcaaaggcagctgctaacgaggctggagctaatttcatgcacatcaagggtgccgaacttctaaataaatacgttggagaaagtgagcttgctattcgtacgttgtttcagcgagctcggacatgtgcaccatgtgtaatcttctttgatgaggtggatgctttgacaacaagtcgtggcaaagaaggtgcttgggttgttgaacggcttttgaaccagtttcttgttgagctggatggtggagagaggcgtaatgtatatgtaattggagctacaaacaggccagatgtagttgatcctgctttcttgagaccgggtagatttgggaatcttctttatgtacccctccccaacgcagatgagcgtgcttcaattctaaaagctattgcaaggaagaaaccgatagatcctagtgttgatctggatggaattgcaaagaataactgtgaaggtttcagcggagctgatctcgcacacttggtgcaaaaagctacattccaagcagtggaggagatgataggctccagtgagtcgtctgaagatgatgttacagatataacgcagtgtacaatcaagacgaggcatttcgagcaagccttgtccttagtctcaccatctgtgaacaaacagcaaagaagacactatgacgcactatcaacaaagcttcaagaaagcgttgggaggaacactgaacaagtcaccatagggccatcttttaccctcgagtaaaaacactctttacttatagaatgtctgcaaaatctcattttccaagggtagatacggtctttagttaaatataaagactcgtctgtttttctacttcagacacgtaatagaatcaagttatgtttccaact

SEQ ID NO: 83814 - protein, 820 aa, Arabidopsis thaliana
  peptide (1)..(820): Ceres Seq. ID no. 12671890
MGRRGRGGGGGMGGGINRRYLSQVMDTCGKDLSTAEDIVDDLRSRYGNFARLTRQVLLLNVRQVLNVRNNKRVKDEDEDDNIGDEEGSASQRKKQRRVDEKEEKLQRAEQSHLRKRNMERSVSSSPSSSSSSEDSGDVSTSEDAVYGEKLSPPRFDLINDSLRDNYAKLNSSSKKPIGSPAEKNVEVETVSNKGRSKLATMGARKEAKVSLSLSGATGNGDLEVEGTKGPTFKDFGGIKKILDELEMNVLFPILNPEPFKKIGVKPPSGILFHGPPGCGKTKLANAIANEAGVPFYKISATEVISGVSGASEENIRELFSKAYRTAPSIVFIDEIDAIGSKRENQQREMEKRIVTQLLTCMDGPGNKGDKNAPDSSAGFVLVIGATNRPDALDPALRRSGRFETEIALTAPDEDARAEILSVVAQKLRLEGPFDKKRIARLTPGFVGADLESVAYLAGRKAIKRILDSRKSEQSGDGEDDKSWLRMPWPEEELEKLFVKMSDFEEAVNLVQASLTREGFSIVPDVKWDDVGGLDHLRLQFNRYIVRPIKKPDIYKAFGVDLETGFLLYGPPGCGKTLIAKAAANEAGANFMHIKGAELLNKYVGESELAIRTLFQRARTCAPCVIFFDEVDALTTSRGKEGAWVVERLLNQFLVELDGGERRNVYVIGATNRPDVVDPAFLRPGRFGNLLYVPLPNADERASILKAIARKKPIDPSVDLDGIAKNNCEGFSGADLAHLVQKATFQAVEEMIGSSESSEDDVTDITQCTIKTRHFEQALSLVSPSVNKQQRRHYDALSTKLQESVGRNTEQVTIGPSFTLE

SEQ ID NO: 83815 - protein, 809 aa, Arabidopsis thaliana
  peptide (1)..(809): Ceres Seq. ID no. 12671891
MGGGINRRYLSQVMDTCGKDLSTAEDIVDDLRSRYGNFARLTRQVLLLNVRQVLNVRNNKRVKDEDEDDNIGDEEGSASQRKKQRRVDEKEEKLQRAEQSHLRKRNMERSVSSSPSSSSSSEDSGDVSTSEDAVYGEKLSPPRFDLINDSLRDNYAKLNSSSKKPIGSPAEKNVEVETVSNKGRSKLATMGARKEAKVSLSLSGATGNGDLEVEGTKGPTFKDFGGIKKILDELEMNVLFPILNPEPFKKIGVKPPSGILFHGPPGCGKTKLANAIANEAGVPFYKISATEVISGVSGASEENIRELFSKAYRTAPSIVFIDEIDAIGSKRENQQREMEKRIVTQLLTCMDGPGNKGDKNAPDSSAGFVLVIGATNRPDALDPALRRSGRFETEIALTAPDEDARAEILSVVAQKLRLEGPFDKKRIARLTPGFVGADLESVAYLAGRKAIKRILDSRKSEQSGDGEDDKSWLRMPWPEEELEKLFVKMSDFEEAVNLVQASLTREGFSIVPDVKWDDVGGLDHLRLQFNRYIVRPIKKPDIYKAFGVDLETGFLLYGPPGCGKTLIAKAAANEAGANFMHIKGAELLNKYVGESELAIRTLFQRARTCAPCVIFFDEVDALTTSRGKEGAWVVERLLNQFLVELDGGERRNVYVIGATNRPDVVDPAFLRPGRFGNLLYVPLPNADERASILKAIARKKPIDPSVDLDGIAKNNCEGFSGADLAHLVQKATFQAVEEMIGSSESSEDDVTDITQCTIKTRHFEQALSLVSPSVNKQQRRHYDALSTKLQESVGRNTEQVTIGPSFTLE

SEQ ID NO: 83816 - protein, 796 aa, Arabidopsis thaliana
  peptide (1)..(796): Ceres Seq. ID no. 12671892
MDTCGKDLSTAEDIVDDLRSRYGNFARLTRQVLLLNVRQVLNVRNNKRVKDEDEDDNIGDEEGSASQRKKQRRVDEKEEKLQRAEQSHLRKRNMERSVSSSPSSSSSSEDSGDVSTSEDAVYGEKLSPPRFDLINDSLRDNYAKLNSSSKKPIGSPAEKNVEVETVSNKGRSKLATMGARKEAKVSLSLSGATGNGDLEVEGTKGPTFKDFGGIKKILDELEMNVLFPILNPEPFKKIGVKPPSGILFHGPPGCGKTKLANAIANEAGVPFYKISATEVISGVSGASEENIRELFSKAYRTAPSIVFIDEIDAIGSKRENQQREMEKRIVTQLLTCMDGPGNKGDKNAPDSSAGFVLVIGATNRPDALDPALRRSGRFETEIALTAPDEDARAEILSVVAQKLRLEGPFDKKRIARLTPGFVGADLESVAYLAGRKAIKRILDSRKSEQSGDGEDDKSWLRMPWPEEELEKLFVKMSDFEEAVNLVQASLTREGFSIVPDVKWDDVGGLDHLRLQFNRYIVRPIKKPDIYKAFGVDLETGFLLYGPPGCGKTLIAKAAANEAGANFMHIKGAELLNKYVGESELAIRTLFQRARTCAPCVIFFDEVDALTTSRGKEGAWVVERLLNQFLVELDGGERRNVYVIGATNRPDVVDPAFLRPGRFGNLLYVPLPNADERASILKAIARKKPIDPSVDLDGIAKNNCEGFSGADLAHLVQKATFQAVEEMIGSSESSEDDVTDITQCTIKTRHFEQALSLVSPSVNKQQRRHYDALSTKLQESVGRNTEQVTIGPSFTLE

SEQ ID NO: 83817 - DNA, 1470 bp, Arabidopsis thaliana
  misc_feature (1)..(1470): Ceres Seq. ID no. 12671893
  misc_feature (1)..(1470): Ortholog of  Ceres SEQ ID NO 14303137 as cited in SEQ ID NO 53594
  misc_feature (1)..(1470): Ortholog of  Ceres SEQ ID NO 13585454 as cited in SEQ ID NO 65280
  misc_feature (1)..(1470): Ortholog of  Ceres SEQ ID NO 14307889 as cited in SEQ ID NO 67245
atgggaggagggaattccaaagaagagtcgtcatcaccatcttcatcatcatgggcttctcatcaaagttatcctcaatatggacctgatagctacaactatcctcctccacccacttatgctcccgctccatctcctgctcctgctcctgctccggtgcctgctccatctccggcttccagttatggccctcagtatagtcaagagggttatgcatcacagcctaataatcctccaccacccacttatgctcccgctccatctccggcttccagttatggccatcagtatagtcaagagggctatgcatcagcagcatcacagcctaattatcctccacctccttcacagagtcaagttgctgacaggaagaaatttgatcggaggtattccaaaatatcggataactactcttctttactgcaggtgtccgaggctctaggccgtgcaggtcttgaatcttctaatctaatcgttggtattgatttcaccaagagcaatgaatggacaggggccaagtccttcaataggaaaagcttgcatcacttgagcaataccccgaatccatacgagcaagcaattactatcattggaagaaccttagccgcctttgacgaggataacttaattccttgttatggttttggagacgcatcaactcatgatcaagacgtgtttagtttctatccagagggaagattctgtaatggatttgaggaagtattggctcgttatagagaaattgtacctcagcttaagctcgcaggaccaacttcttttgccccgatcattgaaatggcaatgacagtggttgagcagagtagtggccaatatcatgtgttagtgattatagctgatggccaggtcacaagaagtgtcgataccgaacacgggcggctaagtccgcaagaacagaagacagtagatgcaattgtgaaagcaagtacccttcctttgtcaatagtcttagttggggtcggggatggaccatgggacatgatgcaggaatttgatgataacatacctgcccgagctttcgataacttccagtttgtgaacttcacagagatcatgtcaaagaacaaagaccagtctcggaaggagacagagtttgcgctgtctgctctcatggagatccctccacagtacaaagcaacgatagagcttaaccttttaggggtaagaaatggaaatatcccacagagaatcccacttccgccaccggtgcagagtggatcatcattctctagttcccggataccgaattttgaaccgagtgtacctccttatccatttgagagcaagcaaatgagtagtgcagacgatattcagctatgtccgatatgtctgagcaacccgaaaaacatggcgtttggttgtggccatcagacttgttgtgaatgcggaccagatcttaaagtgtgtcctatttgtcgtgcgccgatccagaccagaatcaagctttactaa

SEQ ID NO: 83818 - protein, 489 aa, Arabidopsis thaliana
  peptide (1)..(489): Ceres Seq. ID no. 12671894
MGGGNSKEESSSPSSSSWASHQSYPQYGPDSYNYPPPPTYAPAPSPAPAPAPVPAPSPASSYGPQYSQEGYASQPNNPPPPTYAPAPSPASSYGHQYSQEGYASAASQPNYPPPPSQSQVADRKKFDRRYSKISDNYSSLLQVSEALGRAGLESSNLIVGIDFTKSNEWTGAKSFNRKSLHHLSNTPNPYEQAITIIGRTLAAFDEDNLIPCYGFGDASTHDQDVFSFYPEGRFCNGFEEVLARYREIVPQLKLAGPTSFAPIIEMAMTVVEQSSGQYHVLVIIADGQVTRSVDTEHGRLSPQEQKTVDAIVKASTLPLSIVLVGVGDGPWDMMQEFDDNIPARAFDNFQFVNFTEIMSKNKDQSRKETEFALSALMEIPPQYKATIELNLLGVRNGNIPQRIPLPPPVQSGSSFSSSRIPNFEPSVPPYPFESKQMSSADDIQLCPICLSNPKNMAFGCGHQTCCECGPDLKVCPICRAPIQTRIKLY

SEQ ID NO: 83819 - DNA, 2023 bp, Arabidopsis thaliana
  misc_feature (1)..(2023): Ceres Seq. ID no. 12671899
  misc_feature (1)..(2023): Ortholog of  Ceres SEQ ID NO 13597411 as cited in SEQ ID NO 64125
gaaagaaatacaaggttgatcgtacaaagaaatcgaaaaaatggcgaggacgacgcgagaaagagtgaaatcgttcataaacaatagatggctagtgtttgttgcggccatgtggattcagtcttgcgctggcatcggttacttgttcggcagcatctctcctgtcatcaagagctccctcaactacaaccagaaacagctctccaggctcggtgtcgccaaagatctcggcgatagtgtcggcttcctcgctggtactctctccgagatcttgcctctctgggccgctcttctcgtcggctctgtccagaaccttgtcggctatggctgggtttggcttatcgtcaccggtcgtgctcccattcttcctttatgggctatgtgtatcctcatttttgttgggaacaacggggagacctacttcaacaccgctgcattagtttctggtgttcagaactttcccaagagccgtggtcctgtcgtcggtatcctcaaggggtttgctggcctcggcggtgccatcctctcccaggtatacacaatgatccactcctctgaccgtgcatccctcatcttcatggttgctgttgccccttcagttgttgttgttcctctcatgttcttcatcagacccgtcggtggtcacagacagatccgttcttctgatgccaccagcttcaccgtcatctatgccgtctgcattctacttgctgcctatctcatggcagtgatgcttgttgaagatttcattgatcttagccattcaatcatcattgctttcaccgttgtcttgtttgccattcttcttgtacccatcttcataccaatcgcaacgagttgcttcacagcatcaaccgacccctgtgacacgctcgaagaacctctccttggcgatcagcaaggtcaggatccgggacagtccaccacccctgaccatggtcctgagcttatatttagtgaagtggaagacgagaaaccaaaagaagtagatttgcttcctgcagtggagagacataagagaattgctcagttgcaagcaaagctgatgcaagcagctgcagagggtgctgttcgggtcaagagacggaggggccctcacagaggcgaggattttactttaactcaagcactcgttaaagccgatttctggctcatcttcttctccctcttgctcggatctggttcgggtctaacggtcatagataaccttgggcagatgagtcagtctctcggttacgataacactcacgtctttgtgtccatgattagcatttggaacttccttggacgcattggaggcggttatttctccgaactcatcgtcagggactatgcgtacccaagaccggttgctatagcagtggctcagcttgtaatgtcagtaggacacatcttctttgcatacggatggcctggagctatgcacatcggcacactattgattggacttggctatggtgctcactgggccatcgtcccagccactgcctctgagctctttggtctaaagaagtttggagctttatacaatttcctgacgctggccaacccagcgggatccttagtcttttcggggctgatcgcaagttccatttatgaccgcgaagcagagaggcaagcacaaggatccttgttcaatcctgacgatgtcctgagatgccgaggttccatctgttacttcttgacgtcactcataatgtctggattctgcctcattgcggccgccttgagtatgatccttgtgcaacgtacgaagccggtttacacaaatctctacggcaaaacccgcaactgattttaagataccatattacgaaaatatcccaccaagaaaagaagctgggttctttgagtttcatacctatatatatgattgtgttcatcatcttattctttggcttggtcttccacttccccatacatgtgtatttggttatgtaacgattttttgtgtccggtgttgtgtatggattttgaattcgcatttgtaataattgtattcacattattcatattctccagc

SEQ ID NO: 83820 - protein, 584 aa, Arabidopsis thaliana
  peptide (1)..(584): Ceres Seq. ID no. 12671900
MARTTRERVKSFINNRWLVFVAAMWIQSCAGIGYLFGSISPVIKSSLNYNQKQLSRLGVAKDLGDSVGFLAGTLSEILPLWAALLVGSVQNLVGYGWVWLIVTGRAPILPLWAMCILIFVGNNGETYFNTAALVSGVQNFPKSRGPVVGILKGFAGLGGAILSQVYTMIHSSDRASLIFMVAVAPSVVVVPLMFFIRPVGGHRQIRSSDATSFTVIYAVCILLAAYLMAVMLVEDFIDLSHSIIIAFTVVLFAILLVPIFIPIATSCFTASTDPCDTLEEPLLGDQQGQDPGQSTTPDHGPELIFSEVEDEKPKEVDLLPAVERHKRIAQLQAKLMQAAAEGAVRVKRRRGPHRGEDFTLTQALVKADFWLIFFSLLLGSGSGLTVIDNLGQMSQSLGYDNTHVFVSMISIWNFLGRIGGGYFSELIVRDYAYPRPVAIAVAQLVMSVGHIFFAYGWPGAMHIGTLLIGLGYGAHWAIVPATASELFGLKKFGALYNFLTLANPAGSLVFSGLIASSIYDREAERQAQGSLFNPDDVLRCRGSICYFLTSLIMSGFCLIAAALSMILVQRTKPVYTNLYGKTRN

SEQ ID NO: 83821 - protein, 561 aa, Arabidopsis thaliana
  peptide (1)..(561): Ceres Seq. ID no. 12671901
MWIQSCAGIGYLFGSISPVIKSSLNYNQKQLSRLGVAKDLGDSVGFLAGTLSEILPLWAALLVGSVQNLVGYGWVWLIVTGRAPILPLWAMCILIFVGNNGETYFNTAALVSGVQNFPKSRGPVVGILKGFAGLGGAILSQVYTMIHSSDRASLIFMVAVAPSVVVVPLMFFIRPVGGHRQIRSSDATSFTVIYAVCILLAAYLMAVMLVEDFIDLSHSIIIAFTVVLFAILLVPIFIPIATSCFTASTDPCDTLEEPLLGDQQGQDPGQSTTPDHGPELIFSEVEDEKPKEVDLLPAVERHKRIAQLQAKLMQAAAEGAVRVKRRRGPHRGEDFTLTQALVKADFWLIFFSLLLGSGSGLTVIDNLGQMSQSLGYDNTHVFVSMISIWNFLGRIGGGYFSELIVRDYAYPRPVAIAVAQLVMSVGHIFFAYGWPGAMHIGTLLIGLGYGAHWAIVPATASELFGLKKFGALYNFLTLANPAGSLVFSGLIASSIYDREAERQAQGSLFNPDDVLRCRGSICYFLTSLIMSGFCLIAAALSMILVQRTKPVYTNLYGKTRN

SEQ ID NO: 83822 - protein, 471 aa, Arabidopsis thaliana
  peptide (1)..(471): Ceres Seq. ID no. 12671902
MCILIFVGNNGETYFNTAALVSGVQNFPKSRGPVVGILKGFAGLGGAILSQVYTMIHSSDRASLIFMVAVAPSVVVVPLMFFIRPVGGHRQIRSSDATSFTVIYAVCILLAAYLMAVMLVEDFIDLSHSIIIAFTVVLFAILLVPIFIPIATSCFTASTDPCDTLEEPLLGDQQGQDPGQSTTPDHGPELIFSEVEDEKPKEVDLLPAVERHKRIAQLQAKLMQAAAEGAVRVKRRRGPHRGEDFTLTQALVKADFWLIFFSLLLGSGSGLTVIDNLGQMSQSLGYDNTHVFVSMISIWNFLGRIGGGYFSELIVRDYAYPRPVAIAVAQLVMSVGHIFFAYGWPGAMHIGTLLIGLGYGAHWAIVPATASELFGLKKFGALYNFLTLANPAGSLVFSGLIASSIYDREAERQAQGSLFNPDDVLRCRGSICYFLTSLIMSGFCLIAAALSMILVQRTKPVYTNLYGKTRN

SEQ ID NO: 83823 - DNA, 1245 bp, Arabidopsis thaliana
  misc_feature (1)..(1245): Ceres Seq. ID no. 12671915
  misc_feature (1)..(1245): Ortholog of  Ceres SEQ ID NO 14312300 as cited in SEQ ID NO 58632
  misc_feature (1)..(1245): Ortholog of  Ceres SEQ ID NO 13654989 as cited in SEQ ID NO 63117
  misc_feature (1)..(1245): Ortholog of  Ceres SEQ ID NO 13584744 as cited in SEQ ID NO 69137
atgaattgcttttcatgtttttatttccatgaaaagaaaaaggttccaagagattcagacaacagctaccggagaaatggggaggtgaccggtagagacaacaacaaaacacaccctgagaatccaaagactgtaaatgagcagaacaagaacaatgatgaagacaaagaagtgacaaacaacattgctgctcaaacattcagcttcagggagctagctactgcaactaagaatttcagacaagaatgtctgatcggtgaaggcggctttggaagggtttacaaaggcaaactcgagaaaaccggcatgattgtggcagtgaagcaattagatagaaatggattgcaagggaacaaagagttcatagtagaggtcttgatgttaagtcttttgcatcacaagcatctcgtgaatctcattgggtattgtgctgatggagatcagagacttctcgtctatgagtacatgtctcgcggttcactcgaagatcatctcctcgatctaacaccggaccaaataccgttggattgggacacaaggattagaatcgctctaggagccgcaatgggtcttgaatacttgcatgacaaggcaaatcctccagtgatctacagagatctcaaggcagctaatatccttctagacggtgaattcaatgccaagttatccgatttcggtctggcaaagctaggccctgtcggggacaaacaacatgtgtcttccagagttatgggaacttacggatattgtgctccagagtatcagagaaccggtcagttaactacaaaatccgatgtttatagcttcggagttgtgttgttggagttgataactggacgaagagttattgatactaccagacccaaagatgaacagaatctagtaacttgggctcaaccggtgttcaaagaaccgagtagattcccagagttagcggatccgagtctggagggagtgttcccggagaaagctctgaatcaagcggtggcagtggcagcaatgtgtttacaagaagaggcaacggtacggccactcatgagtgacgttgtaaccgctctcggtttcttaggaaccgctcctgacggctcaatctctgttccacactacgatgatcctcctcagccgtcggatgaaacgtccgtggaggattcagtggcagcggaagaacgggaaagagccgtggctgaggcaatggagtggggagttgcttcaagagcacattcccggaacccaagtgcttcttga

SEQ ID NO: 83824 - protein, 414 aa, Arabidopsis thaliana
  peptide (1)..(414): Ceres Seq. ID no. 12671916
MNCFSCFYFHEKKKVPRDSDNSYRRNGEVTGRDNNKTHPENPKTVNEQNKNNDEDKEVTNNIAAQTFSFRELATATKNFRQECLIGEGGFGRVYKGKLEKTGMIVAVKQLDRNGLQGNKEFIVEVLMLSLLHHKHLVNLIGYCADGDQRLLVYEYMSRGSLEDHLLDLTPDQIPLDWDTRIRIALGAAMGLEYLHDKANPPVIYRDLKAANILLDGEFNAKLSDFGLAKLGPVGDKQHVSSRVMGTYGYCAPEYQRTGQLTTKSDVYSFGVVLLELITGRRVIDTTRPKDEQNLVTWAQPVFKEPSRFPELADPSLEGVFPEKALNQAVAVAAMCLQEEATVRPLMSDVVTALGFLGTAPDGSISVPHYDDPPQPSDETSVEDSVAAEERERAVAEAMEWGVASRAHSRNPSAS

SEQ ID NO: 83825 - protein, 312 aa, Arabidopsis thaliana
  peptide (1)..(312): Ceres Seq. ID no. 12671917
MIVAVKQLDRNGLQGNKEFIVEVLMLSLLHHKHLVNLIGYCADGDQRLLVYEYMSRGSLEDHLLDLTPDQIPLDWDTRIRIALGAAMGLEYLHDKANPPVIYRDLKAANILLDGEFNAKLSDFGLAKLGPVGDKQHVSSRVMGTYGYCAPEYQRTGQLTTKSDVYSFGVVLLELITGRRVIDTTRPKDEQNLVTWAQPVFKEPSRFPELADPSLEGVFPEKALNQAVAVAAMCLQEEATVRPLMSDVVTALGFLGTAPDGSISVPHYDDPPQPSDETSVEDSVAAEERERAVAEAMEWGVASRAHSRNPSAS

SEQ ID NO: 83826 - protein, 288 aa, Arabidopsis thaliana
  peptide (1)..(288): Ceres Seq. ID no. 12671918
MLSLLHHKHLVNLIGYCADGDQRLLVYEYMSRGSLEDHLLDLTPDQIPLDWDTRIRIALGAAMGLEYLHDKANPPVIYRDLKAANILLDGEFNAKLSDFGLAKLGPVGDKQHVSSRVMGTYGYCAPEYQRTGQLTTKSDVYSFGVVLLELITGRRVIDTTRPKDEQNLVTWAQPVFKEPSRFPELADPSLEGVFPEKALNQAVAVAAMCLQEEATVRPLMSDVVTALGFLGTAPDGSISVPHYDDPPQPSDETSVEDSVAAEERERAVAEAMEWGVASRAHSRNPSAS

SEQ ID NO: 83827 - DNA, 708 bp, Arabidopsis thaliana
  misc_feature (1)..(708): Ceres Seq. ID no. 12671935
  misc_feature (1)..(708): Ortholog of  Ceres SEQ ID NO 13647678 as cited in SEQ ID NO 20358
atgaactttgtcgtcagacgggtaggctccattttgccgtcgatacgtcacggcggcgtttcccagattcgactcgcgagaacagaggcaggtcagccgagacggcgaaacaagttgccttctcttccgctaaagaagaaggaagagaaatccgagtggtggatagtagacggagagatgcacgagatcggtgatcacgtccctcctcgtgagcgtttcacaatccccagggacaacattccgaacaaacgccgtaagcagctccgtgaccagttcatgcgccgcactcgcctcgtccttaaagaatcggaacatgagccatggtgcaaaaagtatatggaactatataacgagcttagagaaaactgggagaggctttattgggatgaagggtattcaaagaaactcgcaagtgatcatgcaaattatgaatccgctgaagaagacgatgaagattttaatccatacaggaacaggcggtctttcagcgatcaaacaaaggagcaagggtttaatagaactacacaaggtgataattgggagaaagtcagtcaaatcagggataagtttgagtatgatagagaaaggaggatgagagataaagcctttgcaccaatgaatgcagcaccagaatctcaagaatctagggacttgaattggaatgcacaaagacggccatttgatcctgatagattcgcaagggattga

SEQ ID NO: 83828 - protein, 235 aa, Arabidopsis thaliana; identical to SEQ ID NO: 20360
  peptide (1)..(235): Ceres Seq. ID no. 12671936

SEQ ID NO: 83829 - protein, 176 aa, Arabidopsis thaliana; identical to SEQ ID NO: 20361
  peptide (1)..(176): Ceres Seq. ID no. 12671937

SEQ ID NO: 83830 - protein, 143 aa, Arabidopsis thaliana
  peptide (1)..(143): Ceres Seq. ID no. 12671938
MRRTRLVLKESEHEPWCKKYMELYNELRENWERLYWDEGYSKKLASDHANYESAEEDDEDFNPYRNRRSFSDQTKEQGFNRTTQGDNWEKVSQIRDKFEYDRERRMRDKAFAPMNAAPESQESRDLNWNAQRRPFDPDRFARD

SEQ ID NO: 83831 - DNA, 1182 bp, Arabidopsis thaliana
  misc_feature (1)..(1182): Ceres Seq. ID no. 12671947
  misc_feature (1)..(1182): Ortholog of  Ceres SEQ ID NO 15171289 as cited in SEQ ID NO 51570
atggaggcagagatcgtgagacgatcggaggtaacgggattaagaagggaggtggaagaatcgtcaattggtagaggagattgcgatggtgatggcggcgatgtgggagaagatgcggcagggttcgttgggacgagcgggagaggaagaagagatcgagttaaagggccgtggtcgaaggaggaggatgatgtgttgagtgagctcgttaagaggttgggagcgaggaattggagttttatcgctcggagtattcctggtcgttcaggcaagtcttgtcgtcttcgttggtgtaatcagctcaatccaaatcttatacgcaattcatttactgaggtagaggatcaggctatcatcgcagcacatgccatccacggaaacaaatgggctgttatcgcgaagctcctccccggaagaacagataatgctatcaagaaccactggaactctgctttaagacgtcgattcatagactttgaaaaggccaagaatataggaactggaagcttggtcgtggatgattctggatttgacagaacgacaacagtagcctcatcagaagaaactttatcttcaggcggtggttgccatgtaactactccaattgtatctccagaaggcaaagaagctaccacctccatggaaatgtctgaagaacaatgcgtagagaaaacaaacggagaaggtatttctaggcaagatgataaggatcctccaacgcttttccgcccagtgcctcggctcagttcttttaatgcttgcaatcacatggaaggatcaccctctccacatatacaagaccaaaatcagctccaatcatctaaacaagacgcagcaatgctaagattgcttgaaggagcttacagcgaacggtttgtgcctcaaacatgtggaggtggttgttgcagcaacaatcccgatggcagttttcagcaagaatcattgttgggtccagagtttgtggattacttagactcaccaacgtttccgagttccgaactagctgctatagcaacggaaataggcagcctcgcttggctgagaagcggtttagagagtagcagcgtgagggtgatggaagacgcagttggtcggttaaggcctcaaggctccaggggtcatcgagatcattatcttgtatctgaacaggggacgaacataaccaatgtcctgtccacataa

SEQ ID NO: 83832 - protein, 393 aa, Arabidopsis thaliana
  peptide (1)..(393): Ceres Seq. ID no. 12671948
MEAEIVRRSEVTGLRREVEESSIGRGDCDGDGGDVGEDAAGFVGTSGRGRRDRVKGPWSKEEDDVLSELVKRLGARNWSFIARSIPGRSGKSCRLRWCNQLNPNLIRNSFTEVEDQAIIAAHAIHGNKWAVIAKLLPGRTDNAIKNHWNSALRRRFIDFEKAKNIGTGSLVVDDSGFDRTTTVASSEETLSSGGGCHVTTPIVSPEGKEATTSMEMSEEQCVEKTNGEGISRQDDKDPPTLFRPVPRLSSFNACNHMEGSPSPHIQDQNQLQSSKQDAAMLRLLEGAYSERFVPQTCGGGCCSNNPDGSFQQESLLGPEFVDYLDSPTFPSSELAAIATEIGSLAWLRSGLESSSVRVMEDAVGRLRPQGSRGHRDHYLVSEQGTNITNVLST

SEQ ID NO: 83833 - DNA, 1284 bp, Arabidopsis thaliana
  misc_feature (1)..(1284): Ceres Seq. ID no. 12671968
  misc_feature (1)..(1284): Ortholog of  Ceres SEQ ID NO 13659033 as cited in SEQ ID NO 66372
  misc_feature (1)..(1284): Ortholog of  Ceres SEQ ID NO 13655724 as cited in SEQ ID NO 68973
  misc_feature (1)..(1284): Ortholog of  Ceres SEQ ID NO 12625899 as cited in SEQ ID NO 69079
atggatcatcatcaagaatcaaatcctctgaaggagattttctctctatcttcgtctcctttcttctcaacgttgaaaatcaagaaacatatatttgttgggatctctcttctcatcaccttcctaatattctctgttatcgtcgttgatcttgccggcttcgagcctcatctctgtttcggattcttattgtcgccccgaaccctaacgaaggaaagaggaaacgacgacgtatgcgactattcatacggaagatgggttcgtcgacgccgtgatgtggacgaaacctcttattatggagaagagtgtcggtttctggatcctggttttcgttgtctgaataatggaagaaaagattctggttttcgacaatggcgatggcaaccacatggctgcgatcttccacgatttaacgcaagtgattttctggagaggagtcggaatgggaggattgtgttcgtcggagattctatcggaagaaaccaatgggaatctcttctgtgtatgctttcacaagcagtgtctaataaatctgagatatatgaagttaatggaaaccctataagcaagcataagggtttcctttcgatgcgatttccggaacaaaacctaaccgttgaatatcatagaacaccgtttctggttgtggttggtcggcctcctgagaactcaccggtagatgtcaaaatgactgttagagtcgatgagtttaactggcagtccaaaaaatgggtcggctctgatgttctagtcttcaatacagggcattggtggaacgaagacaagacctttatcgcgggttgctattttcaggagggagggaaattgaacaagacgatgggagtaatggagggatttgagaagtctttaaagacatggaagtcatgggttttagagagactagattctgagaggagtcatgtcttcttcagaagcttctctcctgtacactacaggaatgggacatggaacttgggtggtttgtgtgatgcagatacagagccagagactgatatgaagaaaatggaacctgaccctatccacaacaattatatttctcaagcaatccaagaaatgagatatgaacatagtaaggttaagtttctgaacattacatatctgaccgagttcaggaaagatgctcatccttcgcggtatcgagaaccgggaactcctgaagatgctcctcaagactgcagtcactggtgcttacccggagtaccggacacatggaacgagattctctatgcgcagcttttggcaatgaattaccgaacaaagtga

SEQ ID NO: 83834 - protein, 427 aa, Arabidopsis thaliana
  peptide (1)..(427): Ceres Seq. ID no. 12671969
MDHHQESNPLKEIFSLSSSPFFSTLKIKKHIFVGISLLITFLIFSVIVVDLAGFEPHLCFGFLLSPRTLTKERGNDDVCDYSYGRWVRRRRDVDETSYYGEECRFLDPGFRCLNNGRKDSGFRQWRWQPHGCDLPRFNASDFLERSRNGRIVFVGDSIGRNQWESLLCMLSQAVSNKSEIYEVNGNPISKHKGFLSMRFPEQNLTVEYHRTPFLVVVGRPPENSPVDVKMTVRVDEFNWQSKKWVGSDVLVFNTGHWWNEDKTFIAGCYFQEGGKLNKTMGVMEGFEKSLKTWKSWVLERLDSERSHVFFRSFSPVHYRNGTWNLGGLCDADTEPETDMKKMEPDPIHNNYISQAIQEMRYEHSKVKFLNITYLTEFRKDAHPSRYREPGTPEDAPQDCSHWCLPGVPDTWNEILYAQLLAMNYRTK

SEQ ID NO: 83835 - protein, 259 aa, Arabidopsis thaliana
  peptide (1)..(259): Ceres Seq. ID no. 12671970
MLSQAVSNKSEIYEVNGNPISKHKGFLSMRFPEQNLTVEYHRTPFLVVVGRPPENSPVDVKMTVRVDEFNWQSKKWVGSDVLVFNTGHWWNEDKTFIAGCYFQEGGKLNKTMGVMEGFEKSLKTWKSWVLERLDSERSHVFFRSFSPVHYRNGTWNLGGLCDADTEPETDMKKMEPDPIHNNYISQAIQEMRYEHSKVKFLNITYLTEFRKDAHPSRYREPGTPEDAPQDCSHWCLPGVPDTWNEILYAQLLAMNYRTK

SEQ ID NO: 83836 - protein, 231 aa, Arabidopsis thaliana
  peptide (1)..(231): Ceres Seq. ID no. 12671971
MRFPEQNLTVEYHRTPFLVVVGRPPENSPVDVKMTVRVDEFNWQSKKWVGSDVLVFNTGHWWNEDKTFIAGCYFQEGGKLNKTMGVMEGFEKSLKTWKSWVLERLDSERSHVFFRSFSPVHYRNGTWNLGGLCDADTEPETDMKKMEPDPIHNNYISQAIQEMRYEHSKVKFLNITYLTEFRKDAHPSRYREPGTPEDAPQDCSHWCLPGVPDTWNEILYAQLLAMNYRTK

SEQ ID NO: 83837 - DNA, 1895 bp, Arabidopsis thaliana
  misc_feature (1)..(1895): Ceres Seq. ID no. 12672004
  misc_feature (1)..(1895): Ortholog of  Ceres SEQ ID NO 14313366 as cited in SEQ ID NO 67296
aatcttcatctaatctctctctcgtccgtccttggatctctctctccctgaggaaaataatcaggggagcttccgattaatacgagttggttggtttttgctgaattttcgaagctttgtttcttcaatctttgatgctagaaaggtgttttctgcaacaagcaatatgcgacaaagaaatatgatgactggttcagacatggagcagaattctcaaagctttgttccccatcctgaacctcgcattggaactaactatctgtatccagatatcccaccagtgaacactgttcctcatttagaagctcattctctgcaagaaccttatgataacaactcaatgttctacgggcctccacagtaccatcatcaacatgcttcaaatcttggttctggcatgtcaaccgcaccaaatttctatgtcccttatgtgaattatgaagctccaccgagttttctgttgtctcatggaagtaatgatgcagttgttggagttacttccactgaacatgagagaaatgcccattttatggatcacggattcaaaagaaagagttctgaagtaatacctggaaattctcagtatccagttgctccttgttctttccctcaattgaatacatcggagacagcacctttttcattcccacattttggtacttatccacaaccactagatcagagaagtgtgaggaacagagcaggagcagctacaatggatccacttctctctcatggtcataacaacttcagtcaaggaaactatgcagctcatccttttccacctcttggctcaatctggtatgaccaacactgtaatggcaacagatctgatggatcatcttcgctttggtctcaagcacctgccgtaccttatatgcatggtaacattgctactggatctatagaatctggtaatgtttgcttcccaagataccatgaaacatctagtagcagaaaccccacgccatctgtataccaaaggaaccactatattagccatcaccccgtacctcctcctcccatcgtataccctcacatgccttcagcctcatacgctgagactttgcatcctgcttcatacagtcatatgggacaggttcaatcaaccggattcaggataaaccaatatcccggagaagattttgtacctgcagcaattctaagacaccgtgaattgcctcactttagagcaatgcccgcgaatgaaaatgcattttgggaagtaggagacttctacaatgctgttaattatgtcgatcatcatcaagacatgcgcttagacatagaagatatgtcatatgaggagcttcttgctttgagcgaccagattggaactgtgaagacaggcttgtcatcagaagatgttaaagaacttctgaaaagaagaacctcgaccagaattaacctggaagaaggtccatctactgatctagagactgattcttgcacgatatgccaggaaaactacaagaacgaagataagatcgcaacgctggattgcatgcacaaataccatgcagaatgcttgaagaagtggttggttatcaagaacgtttgcccaatctgtaaatcagaggcattggtcatagagaagaagaagaagctaaggttaagtagtagatgagaagaggttgctgctacaacctaaaagaggttatcgctgatggtttttaagacgctttttatctattggttttataagagagaaacagagtcagggtatgtttcagcccccaaattctgtaaatttgtacttttgtgcacattaaagtgacagtctaaagctaagattggcttagtgactataaaaactgtataggctttttttggttctttgtacattctggttgctcctagagttaaactttcttcatctaaaacatctcttttgt

SEQ ID NO: 83838 - protein, 486 aa, Arabidopsis thaliana
  peptide (1)..(486): Ceres Seq. ID no. 12672005
MRQRNMMTGSDMEQNSQSFVPHPEPRIGTNYLYPDIPPVNTVPHLEAHSLQEPYDNNSMFYGPPQYHHQHASNLGSGMSTAPNFYVPYVNYEAPPSFLLSHGSNDAVVGVTSTEHERNAHFMDHGFKRKSSEVIPGNSQYPVAPCSFPQLNTSETAPFSFPHFGTYPQPLDQRSVRNRAGAATMDPLLSHGHNNFSQGNYAAHPFPPLGSIWYDQHCNGNRSDGSSSLWSQAPAVPYMHGNIATGSIESGNVCFPRYHETSSSRNPTPSVYQRNHYISHHPVPPPPIVYPHMPSASYAETLHPASYSHMGQVQSTGFRINQYPGEDFVPAAILRHRELPHFRAMPANENAFWEVGDFYNAVNYVDHHQDMRLDIEDMSYEELLALSDQIGTVKTGLSSEDVKELLKRRTSTRINLEEGPSTDLETDSCTICQENYKNEDKIATLDCMHKYHAECLKKWLVIKNVCPICKSEALVIEKKKKLRLSSR

SEQ ID NO: 83839 - protein, 481 aa, Arabidopsis thaliana
  peptide (1)..(481): Ceres Seq. ID no. 12672006
MMTGSDMEQNSQSFVPHPEPRIGTNYLYPDIPPVNTVPHLEAHSLQEPYDNNSMFYGPPQYHHQHASNLGSGMSTAPNFYVPYVNYEAPPSFLLSHGSNDAVVGVTSTEHERNAHFMDHGFKRKSSEVIPGNSQYPVAPCSFPQLNTSETAPFSFPHFGTYPQPLDQRSVRNRAGAATMDPLLSHGHNNFSQGNYAAHPFPPLGSIWYDQHCNGNRSDGSSSLWSQAPAVPYMHGNIATGSIESGNVCFPRYHETSSSRNPTPSVYQRNHYISHHPVPPPPIVYPHMPSASYAETLHPASYSHMGQVQSTGFRINQYPGEDFVPAAILRHRELPHFRAMPANENAFWEVGDFYNAVNYVDHHQDMRLDIEDMSYEELLALSDQIGTVKTGLSSEDVKELLKRRTSTRINLEEGPSTDLETDSCTICQENYKNEDKIATLDCMHKYHAECLKKWLVIKNVCPICKSEALVIEKKKKLRLSSR

SEQ ID NO: 83840 - protein, 480 aa, Arabidopsis thaliana
  peptide (1)..(480): Ceres Seq. ID no. 12672007
MTGSDMEQNSQSFVPHPEPRIGTNYLYPDIPPVNTVPHLEAHSLQEPYDNNSMFYGPPQYHHQHASNLGSGMSTAPNFYVPYVNYEAPPSFLLSHGSNDAVVGVTSTEHERNAHFMDHGFKRKSSEVIPGNSQYPVAPCSFPQLNTSETAPFSFPHFGTYPQPLDQRSVRNRAGAATMDPLLSHGHNNFSQGNYAAHPFPPLGSIWYDQHCNGNRSDGSSSLWSQAPAVPYMHGNIATGSIESGNVCFPRYHETSSSRNPTPSVYQRNHYISHHPVPPPPIVYPHMPSASYAETLHPASYSHMGQVQSTGFRINQYPGEDFVPAAILRHRELPHFRAMPANENAFWEVGDFYNAVNYVDHHQDMRLDIEDMSYEELLALSDQIGTVKTGLSSEDVKELLKRRTSTRINLEEGPSTDLETDSCTICQENYKNEDKIATLDCMHKYHAECLKKWLVIKNVCPICKSEALVIEKKKKLRLSSR

SEQ ID NO: 83841 - DNA, 1191 bp, Arabidopsis thaliana
  misc_feature (1)..(1191): Ceres Seq. ID no. 12672049
  misc_feature (1)..(1191): Ortholog of  Ceres SEQ ID NO 14316144 as cited in SEQ ID NO 52397
atgagctacactttctttctccttttgctctctcttgtccactccactttctcttcattagctcctacggatcgagccgcgctccaatccatcagagactctttaaccgacatgcccggttcagccttcttctcctcttgggacttcacagttcctgacccttgttcctccttctctggccttacctgctcttctcgcggccgtgtcaccggcttaactcttggccctaatctctcaggctctctctccccttccatctccattctaacccacttaacccaactcattctctaccccggttcagtcaccggtcctctccctcctcggttcgattccctccctctccttcgagtcatttccttaacaagaaaccgtttaaccggtcctatacccgtatctttctcatctctctcaaatctccacactcttgaccttagctataaccaactctctggctctctccctccttttctcaccactcttcctcgactcaaagtccttgttttagcctcaaaccatttctccaacaaccttaagcctgtctctagcccattgttccatttagacctaaagatgaaccaaatctccggccaactcccacccgctttcccgactactctccggtacttatctctatccggaaactcaatgcagggcacaatcaatgccatggagccattaacagagctaatatacatcgatctaagcatgaaccaatttaccggcgcaatccctagctcactctttagtcccacaatctcaacaatgttcctacaacgaaacaacttcacatccattgccacctcaaacgccacgtcattgttacctgagggctccattgttgatctgagccataactcaatctccggagagctaactcccgcgcttgtcggagcagaggctttgttcttgaacaacaaccgtctcactggagacattccagaggaatacgtcaagagcttaatcaacggtacaacaaaacagctcttcttgcaacataactacttcacgagattcccttggaactctggtctccaactaccagactctgtttcgctctgtttgtcatataactgtatggagacagatccagtcgttggtttgtccacgtgtccgatcgaagttgcacctctgctctcaagacctgcttcacaatgttcaagattctataatcacagctccactggttaa

SEQ ID NO: 83842 - protein, 396 aa, Arabidopsis thaliana
  peptide (1)..(396): Ceres Seq. ID no. 12672050
MSYTFFLLLLSLVHSTFSSLAPTDRAALQSIRDSLTDMPGSAFFSSWDFTVPDPCSSFSGLTCSSRGRVTGLTLGPNLSGSLSPSISILTHLTQLILYPGSVTGPLPPRFDSLPLLRVISLTRNRLTGPIPVSFSSLSNLHTLDLSYNQLSGSLPPFLTTLPRLKVLVLASNHFSNNLKPVSSPLFHLDLKMNQISGQLPPAFPTTLRYLSLSGNSMQGTINAMEPLTELIYIDLSMNQFTGAIPSSLFSPTISTMFLQRNNFTSIATSNATSLLPEGSIVDLSHNSISGELTPALVGAEALFLNNNRLTGDIPEEYVKSLINGTTKQLFLQHNYFTRFPWNSGLQLPDSVSLCLSYNCMETDPVVGLSTCPIEVAPLLSRPASQCSRFYNHSSTG

SEQ ID NO: 83843 - protein, 359 aa, Arabidopsis thaliana
  peptide (1)..(359): Ceres Seq. ID no. 12672051
MPGSAFFSSWDFTVPDPCSSFSGLTCSSRGRVTGLTLGPNLSGSLSPSISILTHLTQLILYPGSVTGPLPPRFDSLPLLRVISLTRNRLTGPIPVSFSSLSNLHTLDLSYNQLSGSLPPFLTTLPRLKVLVLASNHFSNNLKPVSSPLFHLDLKMNQISGQLPPAFPTTLRYLSLSGNSMQGTINAMEPLTELIYIDLSMNQFTGAIPSSLFSPTISTMFLQRNNFTSIATSNATSLLPEGSIVDLSHNSISGELTPALVGAEALFLNNNRLTGDIPEEYVKSLINGTTKQLFLQHNYFTRFPWNSGLQLPDSVSLCLSYNCMETDPVVGLSTCPIEVAPLLSRPASQCSRFYNHSSTG

SEQ ID NO: 83844 - protein, 205 aa, Arabidopsis thaliana
  peptide (1)..(205): Ceres Seq. ID no. 12672052
MNQISGQLPPAFPTTLRYLSLSGNSMQGTINAMEPLTELIYIDLSMNQFTGAIPSSLFSPTISTMFLQRNNFTSIATSNATSLLPEGSIVDLSHNSISGELTPALVGAEALFLNNNRLTGDIPEEYVKSLINGTTKQLFLQHNYFTRFPWNSGLQLPDSVSLCLSYNCMETDPVVGLSTCPIEVAPLLSRPASQCSRFYNHSSTG

SEQ ID NO: 83845 - DNA, 972 bp, Arabidopsis thaliana
  misc_feature (1)..(972): Ceres Seq. ID no. 12672056
  misc_feature (1)..(972): Ortholog of  Ceres SEQ ID NO 15176317 as cited in SEQ ID NO 52865
  misc_feature (1)..(972): Ortholog of  Ceres SEQ ID NO 13518893 as cited in SEQ ID NO 58108
  misc_feature (1)..(972): Ortholog of  Ceres SEQ ID NO 12617152 as cited in SEQ ID NO 63555
atgcaggtcaagatctcaaactacggcaccaccatcacctctttgtctgttcccgacaagaacgggaaactgggggatgtagttctcggattcgactcggtggatccatatgtgaaagggcttgcaccatactttgggtgcattgttggtcgtgtggcaaatcggatcaaggagggaaaattcagtctcaatggagttaactacactttgcctatcaacaagcctcctaatagtctccacggtggtaacaagggtttcgataagaagatatgggaagttgcagggcacaagagagacggcgaaaaacctttcatcactttcaaatatcacagtgccgatggagaagaaggttaccctggtgcggtttctgtcacggcgacatacactctcacgtcagccacgacaatgagacttgacatggaagctgttccagagaacaaagatactcccatcaacttagctcaacatacatactggaacttagcaggtcatgactcaggaaacattctagaccataagattcagatatgggggtctcatatcacgccggttgacgaatacacagttcctacaggagagatcttgcctgtaaagggaactcctttcgatttcactgaggagaagcggataggcgagtctattggagaggttggtatcggatacgatcataactacgtgttggactgtcctgatcaagagaaggaggggctgaaacacgcagcgaagctcagtgatgctgctagctcaagggtactgaacttgtggaccaatgtgccgggaatgcagttttataccgggaactatgtgaatggagtggttgggaaagggaatgcggtttacgggaaacatgcgggtgtgtgccttgagacgcagggattcccgaacgcgattaaccagtcgaatttcccgtctgttgtggttaaggctggtgagaagtacaatcacacgatgctgtttgagttttcagcttga

SEQ ID NO: 83846 - protein, 323 aa, Arabidopsis thaliana; identical to SEQ ID NO: 26039
  peptide (1)..(323): Ceres Seq. ID no. 12672057

SEQ ID NO: 83847 - protein, 188 aa, Arabidopsis thaliana; identical to SEQ ID NO: 26040
  peptide (1)..(188): Ceres Seq. ID no. 12672058

SEQ ID NO: 83848 - protein, 184 aa, Arabidopsis thaliana
  peptide (1)..(184): Ceres Seq. ID no. 12672059
MEAVPENKDTPINLAQHTYWNLAGHDSGNILDHKIQIWGSHITPVDEYTVPTGEILPVKGTPFDFTEEKRIGESIGEVGIGYDHNYVLDCPDQEKEGLKHAAKLSDAASSRVLNLWTNVPGMQFYTGNYVNGVVGKGNAVYGKHAGVCLETQGFPNAINQSNFPSVVVKAGEKYNHTMLFEFSA

SEQ ID NO: 83849 - DNA, 1098 bp, Arabidopsis thaliana
  misc_feature (1)..(1098): Ceres Seq. ID no. 12672092
  misc_feature (1)..(1098): Ortholog of  Ceres SEQ ID NO 13495628 as cited in SEQ ID NO 60727
atgaatctcaacgtcgtcgttttactcctactccttctaatctcatccgccacgtgttgtccgccgtcagaccgccgtgcacttctagctttccgatcagctcttcacgagccttacctcggcattttcaactcatggacaggccaagactgttgccacaactggtacggtattagctgcgactcgctcactcaccgagtcgccgacataaatctccgcggcgagtcagaagatccaatcttcgaacgagctcaccgaaccggttacatgaccggacacatctccgcctcgatatgtgagctcactcgtctctccgccattacaatcgccgattggaaaggtatctccggcgaaatccctaaatgtatcactcgtcttccttttctccgtacactcgacttaatcggaaaccaaatctccggtgggattccatacgacatcggaagattaaaccggttagctgttttaaacgtagccgataaccgaatctccggttcaattccaaaatcattaaccaatctctctagcttaatgcatttagatctccgtaacaacttaatctccggtgtaatcccgtcggacgtcggaagattaaaaatgctcagccgtgcgttattatccggtaaccgaataaccggtcggatcccagaatcattaaccaatatctaccggttagctgacgtggatctctccggtaaccaactctacggtacaatcccaccgtctctaggacgtatgtcggtactagccacacttaacctcgacggaaacaaaatctccggcgagatacctcaaactctgatgacgtcgtcggtgatgaatctgaatttgagccggaacttgctacaagggaagatacctgaagggtttggaccaaggtcttacttcacagttcttgatttgtcgtataataatctgaaaggaccaataccgagatcgatctcaggtgcgtcgtttattggtcatttggatcttagccataaccatctctgtgggaggattccggtaggttcaccgtttgatcatcttgaagcggcgtcgtttatgtttaacgactgtctttgtggtaaacctttaagagcttgcttgaaaaattga

SEQ ID NO: 83850 - protein, 365 aa, Arabidopsis thaliana; identical to SEQ ID NO: 39970
  peptide (1)..(365): Ceres Seq. ID no. 12672093

SEQ ID NO: 83851 - protein, 276 aa, Arabidopsis thaliana; identical to SEQ ID NO: 39971
  peptide (1)..(276): Ceres Seq. ID no. 12672094

SEQ ID NO: 83852 - protein, 188 aa, Arabidopsis thaliana
  peptide (1)..(188): Ceres Seq. ID no. 12672095
MHLDLRNNLISGVIPSDVGRLKMLSRALLSGNRITGRIPESLTNIYRLADVDLSGNQLYGTIPPSLGRMSVLATLNLDGNKISGEIPQTLMTSSVMNLNLSRNLLQGKIPEGFGPRSYFTVLDLSYNNLKGPIPRSISGASFIGHLDLSHNHLCGRIPVGSPFDHLEAASFMFNDCLCGKPLRACLKN

SEQ ID NO: 83853 - DNA, 1548 bp, Arabidopsis thaliana
  misc_feature (1)..(1548): Ceres Seq. ID no. 12672152
  misc_feature (1)..(1548): Ortholog of  Ceres SEQ ID NO 12613725 as cited in SEQ ID NO 68196
atgcagattgagatggaagagaagtttgaagattggagaggcaaagaggcaatttctggcaaacatggtgggattaaagctgctttcattgcttgtgttgtagagacgatggagaatatggtgttcttagcatgttcaaccaacttcatgatgtactttacgaaatcaatgaattactcaacacccaaagcagcaaccatggtgactaatttcgtagggacatcgtttttgctcactattttcggtggttttgtcgcggactcttttctcactcgcttcgctgctttcgtcctctttggttccattgaactcctgggtttgatcatgttgacactccaagctcatatcactaagttacaacctcaaggaggtaaaaaaccttcgactcctcaatcaacggttctattcactggactttatgcaatagctattggtgttggaggtgtcaaggggtcgttgcctgctcatggaggcgaccagatcggtactagaaaccagaggctgatctcaggattcttcaattggtatttcttctctgtctgccttggaggtttcttggcagtaacacttatggtttggatcgaggagaacataggatggagctccagcttcactatatctaccgcggttttagcctctgcgatcttcgttttcgttgcgggatgcccgatgtatcgattcaagcgcccagcagggagtcctttgaccagaattgtgaatgtgtttgtttctgccgcaagaaaccgaaataggtttgtaacggatgcagaggtggtgacacagaatcataactctaccgacaaaagcattcatcacaacaagttcaagtttttgaataaagcaaagctcaacaacaagatatcagcaacacaagttgaagaaacaagaacgtttctagctctccttccaatatttgggagcacaattataatgaactgttgtgtcgcacaaatgggaaccttctccgttcaacaaggcatggtgacaaacagaaaactctcgcgttcctttgagatccccgtggcttccctcaatgccattcctctactgtgcatgctctcttctttagctttatacgagcttttcggcaaaaggatcttatccaatagcgaaagatcgtccagcttcaatttgaaacgtataggatacggtttagctctcacctctatttcaatggcggttgcagccatcgtggaggtcaaaagaaaacatgaagcggttcacaacaacatcaagatttctgtgttctggctagagcttcaatttgttatgttgagtctctcggatatgttgactgttggaggaatgttagagttcttctttagagaatctccagcgagtatgaggagcatgagcaccgcgttagggtggtgctccaccgcaatgggtttcttcctcagctcggttcttgtggaggttgttaatggcatcacgggatggctccgcgacgatcttaatgagtccaggctcgaactattttatttggttttatgtgttcttaatacccttaatctttttaattatattttctgggcgaaaagatattag

SEQ ID NO: 83854 - protein, 515 aa, Arabidopsis thaliana
  peptide (1)..(515): Ceres Seq. ID no. 12672153
MQIEMEEKFEDWRGKEAISGKHGGIKAAFIACVVETMENMVFLACSTNFMMYFTKSMNYSTPKAATMVTNFVGTSFLLTIFGGFVADSFLTRFAAFVLFGSIELLGLIMLTLQAHITKLQPQGGKKPSTPQSTVLFTGLYAIAIGVGGVKGSLPAHGGDQIGTRNQRLISGFFNWYFFSVCLGGFLAVTLMVWIEENIGWSSSFTISTAVLASAIFVFVAGCPMYRFKRPAGSPLTRIVNVFVSAARNRNRFVTDAEVVTQNHNSTDKSIHHNKFKFLNKAKLNNKISATQVEETRTFLALLPIFGSTIIMNCCVAQMGTFSVQQGMVTNRKLSRSFEIPVASLNAIPLLCMLSSLALYELFGKRILSNSERSSSFNLKRIGYGLALTSISMAVAAIVEVKRKHEAVHNNIKISVFWLELQFVMLSLSDMLTVGGMLEFFFRESPASMRSMSTALGWCSTAMGFFLSSVLVEVVNGITGWLRDDLNESRLELFYLVLCVLNTLNLFNYIFWAKRY

SEQ ID NO: 83855 - protein, 511 aa, Arabidopsis thaliana
  peptide (1)..(511): Ceres Seq. ID no. 12672154
MEEKFEDWRGKEAISGKHGGIKAAFIACVVETMENMVFLACSTNFMMYFTKSMNYSTPKAATMVTNFVGTSFLLTIFGGFVADSFLTRFAAFVLFGSIELLGLIMLTLQAHITKLQPQGGKKPSTPQSTVLFTGLYAIAIGVGGVKGSLPAHGGDQIGTRNQRLISGFFNWYFFSVCLGGFLAVTLMVWIEENIGWSSSFTISTAVLASAIFVFVAGCPMYRFKRPAGSPLTRIVNVFVSAARNRNRFVTDAEVVTQNHNSTDKSIHHNKFKFLNKAKLNNKISATQVEETRTFLALLPIFGSTIIMNCCVAQMGTFSVQQGMVTNRKLSRSFEIPVASLNAIPLLCMLSSLALYELFGKRILSNSERSSSFNLKRIGYGLALTSISMAVAAIVEVKRKHEAVHNNIKISVFWLELQFVMLSLSDMLTVGGMLEFFFRESPASMRSMSTALGWCSTAMGFFLSSVLVEVVNGITGWLRDDLNESRLELFYLVLCVLNTLNLFNYIFWAKRY

SEQ ID NO: 83856 - protein, 479 aa, Arabidopsis thaliana
  peptide (1)..(479): Ceres Seq. ID no. 12672155
MENMVFLACSTNFMMYFTKSMNYSTPKAATMVTNFVGTSFLLTIFGGFVADSFLTRFAAFVLFGSIELLGLIMLTLQAHITKLQPQGGKKPSTPQSTVLFTGLYAIAIGVGGVKGSLPAHGGDQIGTRNQRLISGFFNWYFFSVCLGGFLAVTLMVWIEENIGWSSSFTISTAVLASAIFVFVAGCPMYRFKRPAGSPLTRIVNVFVSAARNRNRFVTDAEVVTQNHNSTDKSIHHNKFKFLNKAKLNNKISATQVEETRTFLALLPIFGSTIIMNCCVAQMGTFSVQQGMVTNRKLSRSFEIPVASLNAIPLLCMLSSLALYELFGKRILSNSERSSSFNLKRIGYGLALTSISMAVAAIVEVKRKHEAVHNNIKISVFWLELQFVMLSLSDMLTVGGMLEFFFRESPASMRSMSTALGWCSTAMGFFLSSVLVEVVNGITGWLRDDLNESRLELFYLVLCVLNTLNLFNYIFWAKRY

SEQ ID NO: 83857 - DNA, 1302 bp, Arabidopsis thaliana
  misc_feature (1)..(1302): Ceres Seq. ID no. 12672156
  misc_feature (1)..(1302): Ortholog of  Ceres SEQ ID NO 13654989 as cited in SEQ ID NO 63117
  misc_feature (1)..(1302): Ortholog of  Ceres SEQ ID NO 13584744 as cited in SEQ ID NO 69137
atgaagttgcagcacgttgtgtacctggtggctattttcttcgtggtggctattttcgtgattgcatgtatagaagagaataagtacttagtctggattatgattattcttgcaaacaccaccaacattttgagcctcgtgcgtagcattagctatataaaaaatataaggaagcaccagaaggacaccaagatccaacgacaattattctttgagaaaaatggcggtggcatgttgatagagcgactctcgggggcagggtcatcaaacattgatttcaaaatctttacggaggaagacatgaaggaagcaactaatggttatgatgtgagcagaatcttgggtcaaggaggccaatggacagtctacaaagggatattgcctgacaactccatcgttgctataaagaaaactcggctaggagacaacaaccaagtagagcagttcatcaacgaagtgctcgtgctttcacaaattaaccacaggaacgttgtcaagctcttgggttgctgtctagagactgaagttcccttgttggtctatgaattcattaccggtggctcccttttcgatcacttgcacggttccatgtttgtttcttctcttacatgggaacaccgcctggagatagcaatagaagttgctggagctatagcgtatcttcactccggtgcttctattccaatcatccatcgcgatatcaaaactgaaaatattctcttggatgaaaacttaactgcaaaagtagctgactttggcgcttcaaagttgaagccaatggataaagaacagctcaccactatggtgcaaggcactctcggatatttagacccagaatactataccacatggcttctgaacgaaaagagcgatgtttatagctttggggtagtcctcatggaactgatatcaggtcaaaaggcattgtgctttgaaaggccagagacttcaaaacatttggtgagttactttgttttggccacgaaagagaataggttgcatgagattattgacgaccaagtgttgaacgaggaaaaccagagggaaatccatgaagctgcaagagttgctgttgaatgtacaagactaaagggagaggaaaggccaaggatgatagaagtagctgcagagctagaaacgttgagagccaaaacgaccaaacataattggttggatcagtatcctgaagagaatgtacacttgcttggtagtaacatcgtgtcagcacaaggccataccagtagccgtggttatgacaacaacaagaatgtagcaaggtttgacattgaagctggccgctga

SEQ ID NO: 83858 - protein, 433 aa, Arabidopsis thaliana
  peptide (1)..(433): Ceres Seq. ID no. 12672157
MKLQHVVYLVAIFFVVAIFVIACIEENKYLVWIMIILANTTNILSLVRSISYIKNIRKHQKDTKIQRQLFFEKNGGGMLIERLSGAGSSNIDFKIFTEEDMKEATNGYDVSRILGQGGQWTVYKGILPDNSIVAIKKTRLGDNNQVEQFINEVLVLSQINHRNVVKLLGCCLETEVPLLVYEFITGGSLFDHLHGSMFVSSLTWEHRLEIAIEVAGAIAYLHSGASIPIIHRDIKTENILLDENLTAKVADFGASKLKPMDKEQLTTMVQGTLGYLDPEYYTTWLLNEKSDVYSFGVVLMELISGQKALCFERPETSKHLVSYFVLATKENRLHEIIDDQVLNEENQREIHEAARVAVECTRLKGEERPRMIEVAAELETLRAKTTKHNWLDQYPEENVHLLGSNIVSAQGHTSSRGYDNNKNVARFDIEAGR

SEQ ID NO: 83859 - protein, 400 aa, Arabidopsis thaliana
  peptide (1)..(400): Ceres Seq. ID no. 12672158
MIILANTTNILSLVRSISYIKNIRKHQKDTKIQRQLFFEKNGGGMLIERLSGAGSSNIDFKIFTEEDMKEATNGYDVSRILGQGGQWTVYKGILPDNSIVAIKKTRLGDNNQVEQFINEVLVLSQINHRNVVKLLGCCLETEVPLLVYEFITGGSLFDHLHGSMFVSSLTWEHRLEIAIEVAGAIAYLHSGASIPIIHRDIKTENILLDENLTAKVADFGASKLKPMDKEQLTTMVQGTLGYLDPEYYTTWLLNEKSDVYSFGVVLMELISGQKALCFERPETSKHLVSYFVLATKENRLHEIIDDQVLNEENQREIHEAARVAVECTRLKGEERPRMIEVAAELETLRAKTTKHNWLDQYPEENVHLLGSNIVSAQGHTSSRGYDNNKNVARFDIEAGR

SEQ ID NO: 83860 - protein, 356 aa, Arabidopsis thaliana
  peptide (1)..(356): Ceres Seq. ID no. 12672159
MLIERLSGAGSSNIDFKIFTEEDMKEATNGYDVSRILGQGGQWTVYKGILPDNSIVAIKKTRLGDNNQVEQFINEVLVLSQINHRNVVKLLGCCLETEVPLLVYEFITGGSLFDHLHGSMFVSSLTWEHRLEIAIEVAGAIAYLHSGASIPIIHRDIKTENILLDENLTAKVADFGASKLKPMDKEQLTTMVQGTLGYLDPEYYTTWLLNEKSDVYSFGVVLMELISGQKALCFERPETSKHLVSYFVLATKENRLHEIIDDQVLNEENQREIHEAARVAVECTRLKGEERPRMIEVAAELETLRAKTTKHNWLDQYPEENVHLLGSNIVSAQGHTSSRGYDNNKNVARFDIEAGR

SEQ ID NO: 83861 - DNA, 1494 bp, Arabidopsis thaliana
  misc_feature (1)..(1494): Ceres Seq. ID no. 12672178
  misc_feature (1)..(1494): Ortholog of  Ceres SEQ ID NO 14302263 as cited in SEQ ID NO 64701
  misc_feature (1)..(1494): Ortholog of  Ceres SEQ ID NO 13584538 as cited in SEQ ID NO 64739
atggagatgttacttggtggacaagcaaccaatggagctcttcgttcaaagacgaagatagtttgtactcttggaccagcttcaagatcggtggagatgattgagaagcttctcaaggctggtatgaacgtagcccggttcaatttctcccatggttctcactcttaccatcaagaaactctcgataatctcagaaccgccatggacaacactggtatcctctgcgccgtcatgctcgacacaaagagtcctgtgatacgaaccgggtttctcaaagaaggcaaaccgatacagctaaagcaaggtcaagagatcaccatctcaattgattacaagatacaaggagattccaacactatctccatgagctacaagaaacttgcagaggatctcaaacctggtgacgtgatcctttgttcagacggaacaatctctctaaatgtcttgtcctgtgacaagtatctcggtcttgttcgttgccgatgcgagaactctgctcttcttggagaaagaaaaaacgttaatcttcctggaattgtagttgatctcccaacactcactgagaaagataaagaagatattatgcaatggggagttccgaacaaaatcgacattatcgctctctcttttgttcgtaaaggatctgacctaatccaagtaaggaaattacttggagagcactcaaagagcatcatgcttatgtcaaaggtggagaatcaagaaggagtaatgaatttcgataagatcctggagaattctgatgctttcatggtggctagaggagatcttgggatggagataccaatcgaaaagatgtttcttgctcagaaaacaatgatcaacaaggctaatgctcatgggaaaccagtggtcacagccacacagatgcttgaatccatgacagtctctcctcgcccgactagagctgaagctaccgacgtagcaaacgcggttcttgacgggacagattgcgttatgcttagcggagaaactgctgctggagctcaccctgagactgccgtgttaacaatgtcaaggatctgcaaagaagcagaggatttcatagattacgacattctccacaagaaaaccctaggaatggtttcgttaccgttatctccaatcgagagcttagctgcttcagctgtttcgactgcgcggagtgttttcgcgtccgcgatcgttgttctcactagaggcggttacacggcggagcttgtggctaaatacaggccaagcgttccgattctgtcggtgattatgccagagattgctgaatgctcggactcggtagctcatgtggcgagacgtggtttgatttaccgtgggattattccggtggtgggatgttcagctagagattcaacggaggagatgattagattagctataggatttgccaagacgaagggaatttgtaagactggagattccattgtggctttgcacaagattgatggttcatctattgtcaggatagtgagcgtcgagtaa

SEQ ID NO: 83862 - protein, 497 aa, Arabidopsis thaliana
  peptide (1)..(497): Ceres Seq. ID no. 12672179
MEMLLGGQATNGALRSKTKIVCTLGPASRSVEMIEKLLKAGMNVARFNFSHGSHSYHQETLDNLRTAMDNTGILCAVMLDTKSPVIRTGFLKEGKPIQLKQGQEITISIDYKIQGDSNTISMSYKKLAEDLKPGDVILCSDGTISLNVLSCDKYLGLVRCRCENSALLGERKNVNLPGIVVDLPTLTEKDKEDIMQWGVPNKIDIIALSFVRKGSDLIQVRKLLGEHSKSIMLMSKVENQEGVMNFDKILENSDAFMVARGDLGMEIPIEKMFLAQKTMINKANAHGKPVVTATQMLESMTVSPRPTRAEATDVANAVLDGTDCVMLSGETAAGAHPETAVLTMSRICKEAEDFIDYDILHKKTLGMVSLPLSPIESLAASAVSTARSVFASAIVVLTRGGYTAELVAKYRPSVPILSVIMPEIAECSDSVAHVARRGLIYRGIIPVVGCSARDSTEEMIRLAIGFAKTKGICKTGDSIVALHKIDGSSIVRIVSVE

SEQ ID NO: 83863 - protein, 495 aa, Arabidopsis thaliana
  peptide (1)..(495): Ceres Seq. ID no. 12672180
MLLGGQATNGALRSKTKIVCTLGPASRSVEMIEKLLKAGMNVARFNFSHGSHSYHQETLDNLRTAMDNTGILCAVMLDTKSPVIRTGFLKEGKPIQLKQGQEITISIDYKIQGDSNTISMSYKKLAEDLKPGDVILCSDGTISLNVLSCDKYLGLVRCRCENSALLGERKNVNLPGIVVDLPTLTEKDKEDIMQWGVPNKIDIIALSFVRKGSDLIQVRKLLGEHSKSIMLMSKVENQEGVMNFDKILENSDAFMVARGDLGMEIPIEKMFLAQKTMINKANAHGKPVVTATQMLESMTVSPRPTRAEATDVANAVLDGTDCVMLSGETAAGAHPETAVLTMSRICKEAEDFIDYDILHKKTLGMVSLPLSPIESLAASAVSTARSVFASAIVVLTRGGYTAELVAKYRPSVPILSVIMPEIAECSDSVAHVARRGLIYRGIIPVVGCSARDSTEEMIRLAIGFAKTKGICKTGDSIVALHKIDGSSIVRIVSVE

SEQ ID NO: 83864 - protein, 465 aa, Arabidopsis thaliana
  peptide (1)..(465): Ceres Seq. ID no. 12672181
MIEKLLKAGMNVARFNFSHGSHSYHQETLDNLRTAMDNTGILCAVMLDTKSPVIRTGFLKEGKPIQLKQGQEITISIDYKIQGDSNTISMSYKKLAEDLKPGDVILCSDGTISLNVLSCDKYLGLVRCRCENSALLGERKNVNLPGIVVDLPTLTEKDKEDIMQWGVPNKIDIIALSFVRKGSDLIQVRKLLGEHSKSIMLMSKVENQEGVMNFDKILENSDAFMVARGDLGMEIPIEKMFLAQKTMINKANAHGKPVVTATQMLESMTVSPRPTRAEATDVANAVLDGTDCVMLSGETAAGAHPETAVLTMSRICKEAEDFIDYDILHKKTLGMVSLPLSPIESLAASAVSTARSVFASAIVVLTRGGYTAELVAKYRPSVPILSVIMPEIAECSDSVAHVARRGLIYRGIIPVVGCSARDSTEEMIRLAIGFAKTKGICKTGDSIVALHKIDGSSIVRIVSVE

SEQ ID NO: 83865 - DNA, 2204 bp, Arabidopsis thaliana
  misc_feature (1)..(2204): Ceres Seq. ID no. 12672182
  misc_feature (1)..(2204): Ortholog of  Ceres SEQ ID NO 12609304 as cited in SEQ ID NO 51524
gttctctctttctctttctctcttctttgaattcccaaagtgattgaatcaaaaacttcgtttgattacaattcgatttcccccacacaaaaaaagagatcttgttttaatttcgcggcgagggttcggtttggctttcccgttgatcgcgttgttcttcttcttctttggtgattcaatttcttcaattcaatcaaattcgtatctttcttcttctttgataatgtttaggatttaggtttcgtaatttctgaaaaccctagtttagtttttgttcgagaaaaaagaaaaggaaaacaaaaaaaaaaaggaaaaatcaaatttattcaattcattctttttgtgttacccaaattcggttgttaatacgtctcaatttcgaatttcttttctagggttttttagggttccaaggaagctctcaaaatttctggtgcctagtatttttttgttgccatctgaaatcaagagtttcctttttctctccatagatctattaattcatctttcgattatccaaaaaaaaaaataactttttagtttatcttcggatctgatctatcttctttagggggttttgagtttttctagggattgtgtacaaaagagggatttttttggttttgttaggtttaaagtgtatatagagattaatagaaatggctttaaatttttcacatagacctttttcttctcatctatctgaggaaccaatgatgatagccaatgggaattggtgttcaagtttcgataatggaaggaagaatactggaggagatgcttcttctgttgatatacttgatgttttgccatctgatccgtttggtatggatatcaacaatactttcacggctattactggatggcttgaggatttggaggatgattataataaccaatatggaagaagaagaagagatgacatttggattggtgatggaaaccgtcagcagctgtttgctggattgagtttcttttggaacaatgcaatgcagtttcagagtagtggttacagttatggatcagagtcattgtttggtggggcgtttgatgggtctctgttttccacatgtaaattccctgaaagtagtggggaaaataatgggtttggaggggcattagatggtgatggatcttgtcatggtgctttcatatctgctagtagtgttgatgaggtattgagccatgagaatgcgaggaatggtgaagttgtaggaagtagtgatcgctgcaataatggagaagaggatgcgtatgttcatccagcgattggtttttgtctttatcacttgcgagggaaggatcttctttcagttagtatggtttgcaagtctttgcatactactgtttgtgatgacacgttactttggaagcatatccacatttgtcgaccgttgaatgagaagatcacggaagaggctctactgcatttaactgagagggctcagggtactatgcagtgtttgaggatcgtagattgctgtagaattactgatgattgtcttaagcgggtggtggcgcgcaaccgacaagtagtcaagattggtgtgcctggatgcacaaggataactatcgatggtattttgagcgtcttgagggatctgaagtctgcgggaaagcttcaagtgaagcatttacaacttcgtggcctctttggagtgactaaagatcactacgatgaactgattgacttgttgaacattgacaataaagtcaagcagactattcagaagccgcgtttttaccatagaggagaagcttgtgtgtcctgtgatgatgaccgggcactagatattgagatgtgcccaaagtgtcaaaattttaagcttgtgtatgactgtccagcagaagattgtaaagggaaaaagaaaggttctgaggaatgccgtgcttgttctctttgcatacagaggtgttatcattgtggtcggtgcatcattgacactgaatacgaagaaatgttttgtttagagcttttgtgtgctgtttgttcgaagccgacccctaagttaactctctaggtataaaattccatctgagcctttctcttctctatgattgaatgactcagtctccacggttcaatggagatgatcttcaactatctctagaacctttttttttttaaacaataaaaatatgttccatttcatatttgttgaacactcttatctttattattggagatctattaaaagtttgca

SEQ ID NO: 83866 - protein, 453 aa, Arabidopsis thaliana
  peptide (1)..(453): Ceres Seq. ID no. 12672183
MALNFSHRPFSSHLSEEPMMIANGNWCSSFDNGRKNTGGDASSVDILDVLPSDPFGMDINNTFTAITGWLEDLEDDYNNQYGRRRRDDIWIGDGNRQQLFAGLSFFWNNAMQFQSSGYSYGSESLFGGAFDGSLFSTCKFPESSGENNGFGGALDGDGSCHGAFISASSVDEVLSHENARNGEVVGSSDRCNNGEEDAYVHPAIGFCLYHLRGKDLLSVSMVCKSLHTTVCDDTLLWKHIHICRPLNEKITEEALLHLTERAQGTMQCLRIVDCCRITDDCLKRVVARNRQVVKIGVPGCTRITIDGILSVLRDLKSAGKLQVKHLQLRGLFGVTKDHYDELIDLLNIDNKVKQTIQKPRFYHRGEACVSCDDDRALDIEMCPKCQNFKLVYDCPAEDCKGKKKGSEECRACSLCIQRCYHCGRCIIDTEYEEMFCLELLCAVCSKPTPKLTL

SEQ ID NO: 83867 - protein, 435 aa, Arabidopsis thaliana
  peptide (1)..(435): Ceres Seq. ID no. 12672184
MMIANGNWCSSFDNGRKNTGGDASSVDILDVLPSDPFGMDINNTFTAITGWLEDLEDDYNNQYGRRRRDDIWIGDGNRQQLFAGLSFFWNNAMQFQSSGYSYGSESLFGGAFDGSLFSTCKFPESSGENNGFGGALDGDGSCHGAFISASSVDEVLSHENARNGEVVGSSDRCNNGEEDAYVHPAIGFCLYHLRGKDLLSVSMVCKSLHTTVCDDTLLWKHIHICRPLNEKITEEALLHLTERAQGTMQCLRIVDCCRITDDCLKRVVARNRQVVKIGVPGCTRITIDGILSVLRDLKSAGKLQVKHLQLRGLFGVTKDHYDELIDLLNIDNKVKQTIQKPRFYHRGEACVSCDDDRALDIEMCPKCQNFKLVYDCPAEDCKGKKKGSEECRACSLCIQRCYHCGRCIIDTEYEEMFCLELLCAVCSKPTPKLTL

SEQ ID NO: 83868 - protein, 434 aa, Arabidopsis thaliana
  peptide (1)..(434): Ceres Seq. ID no. 12672185
MIANGNWCSSFDNGRKNTGGDASSVDILDVLPSDPFGMDINNTFTAITGWLEDLEDDYNNQYGRRRRDDIWIGDGNRQQLFAGLSFFWNNAMQFQSSGYSYGSESLFGGAFDGSLFSTCKFPESSGENNGFGGALDGDGSCHGAFISASSVDEVLSHENARNGEVVGSSDRCNNGEEDAYVHPAIGFCLYHLRGKDLLSVSMVCKSLHTTVCDDTLLWKHIHICRPLNEKITEEALLHLTERAQGTMQCLRIVDCCRITDDCLKRVVARNRQVVKIGVPGCTRITIDGILSVLRDLKSAGKLQVKHLQLRGLFGVTKDHYDELIDLLNIDNKVKQTIQKPRFYHRGEACVSCDDDRALDIEMCPKCQNFKLVYDCPAEDCKGKKKGSEECRACSLCIQRCYHCGRCIIDTEYEEMFCLELLCAVCSKPTPKLTL

SEQ ID NO: 83869 - DNA, 1509 bp, Arabidopsis thaliana
  misc_feature (1)..(1509): Ceres Seq. ID no. 12672190
  misc_feature (1)..(1509): Ortholog of  Ceres SEQ ID NO 13594209 as cited in SEQ ID NO 59089
  misc_feature (1)..(1509): Ortholog of  Ceres SEQ ID NO 14307995 as cited in SEQ ID NO 63970
  misc_feature (1)..(1509): Ortholog of  Ceres SEQ ID NO 13502874 as cited in SEQ ID NO 66298
  misc_feature (1)..(1509): Ortholog of  Ceres SEQ ID NO 12614124 as cited in SEQ ID NO 68392
atggcaatctctttgctctgtctttttctcatcaccttcgtttcgttaaccattgttggctgcaagatcaaacgctctatatggaatcttcccccaagccctcctaagttaccggtcatcggaaacttacaccaagttggagaattgcctcacaggtcatttcgacgtctagccgaaagaaccggacatgttatgcttcttcacttagggtttgtccctgtaactgttatctcatcgagagaagcagctgaagaagttcttagaactcatgacctagactgttgcagcaggcctaaccttgtggggtctaggctaatctctcggggttttaaagatctcaattttactccatatggtgaagagtggaaggagcgacgtaggttcttggttggtgagcttttctgttctaaaaagcttcagtcttttatatatatcaaagaagtagaatgtaactttctggtcaagaaactgtcggaatcagcagtggatcaatctccagtcgatttgagcaaaacccttttctggctagctgcgagtatcctgtttagagttgcttttggacagagtttccacgagagtgagtttaccgatacagacaagatcgatgaacttgtatttgaaaccgagacagctcaaggtagtttcacttgctctgatttcttccctatcgccggacttggatggcttgttgactggatttccggacaacacaagaggctcaacgatgttttcctcaagctcgatgctctgttacagcatgtgattgatgatcattcaaaccctggaagatcgaaagatcacaaagatattgtcgatgtgatgttggatgtgatgcataaacaaggcaaagatgattctttgaggctcacaatagatcatattaaggggcttctcacgaatataataatcgcagggatagacacaggagctctgaccatgatatggacaatgacagagctcgctagaaaccccgaaataatgaagaaagttcaaggcgagatccgagatcgccttggcaacaatagggagagaattaccaaagaagatcttgataaagttcctttcttgaacttggtgatcaaggaaacattcagattacacccagtagctcctcttttgctcccacgggaaacaatggctcacgtcaaggttcaaggctatgatattcctcccaagagacggatcttggtcaacgcttgggcgataggaagagatcctaaactatggactgacccggaagagtttaagcccgagaggtttatcgatagccctgtggactatagaggacaacattttgagctcttaccgttcgggtctggacgaaggatatgtcccgggatggcgatggggatggctactctggaattgggactcttgaacttactttacttcttcgattggaagttgcctgatgggatgtcacataaagatatcgatactgaagaagctggtactcttacagtcgttaagaaagtacatctaaagcttgttccagttcgagttccatga

SEQ ID NO: 83870 - protein, 502 aa, Arabidopsis thaliana
  peptide (1)..(502): Ceres Seq. ID no. 12672191
MAISLLCLFLITFVSLTIVGCKIKRSIWNLPPSPPKLPVIGNLHQVGELPHRSFRRLAERTGHVMLLHLGFVPVTVISSREAAEEVLRTHDLDCCSRPNLVGSRLISRGFKDLNFTPYGEEWKERRRFLVGELFCSKKLQSFIYIKEVECNFLVKKLSESAVDQSPVDLSKTLFWLAASILFRVAFGQSFHESEFTDTDKIDELVFETETAQGSFTCSDFFPIAGLGWLVDWISGQHKRLNDVFLKLDALLQHVIDDHSNPGRSKDHKDIVDVMLDVMHKQGKDDSLRLTIDHIKGLLTNIIIAGIDTGALTMIWTMTELARNPEIMKKVQGEIRDRLGNNRERITKEDLDKVPFLNLVIKETFRLHPVAPLLLPRETMAHVKVQGYDIPPKRRILVNAWAIGRDPKLWTDPEEFKPERFIDSPVDYRGQHFELLPFGSGRRICPGMAMGMATLELGLLNLLYFFDWKLPDGMSHKDIDTEEAGTLTVVKKVHLKLVPVRVP

SEQ ID NO: 83871 - protein, 438 aa, Arabidopsis thaliana
  peptide (1)..(438): Ceres Seq. ID no. 12672192
MLLHLGFVPVTVISSREAAEEVLRTHDLDCCSRPNLVGSRLISRGFKDLNFTPYGEEWKERRRFLVGELFCSKKLQSFIYIKEVECNFLVKKLSESAVDQSPVDLSKTLFWLAASILFRVAFGQSFHESEFTDTDKIDELVFETETAQGSFTCSDFFPIAGLGWLVDWISGQHKRLNDVFLKLDALLQHVIDDHSNPGRSKDHKDIVDVMLDVMHKQGKDDSLRLTIDHIKGLLTNIIIAGIDTGALTMIWTMTELARNPEIMKKVQGEIRDRLGNNRERITKEDLDKVPFLNLVIKETFRLHPVAPLLLPRETMAHVKVQGYDIPPKRRILVNAWAIGRDPKLWTDPEEFKPERFIDSPVDYRGQHFELLPFGSGRRICPGMAMGMATLELGLLNLLYFFDWKLPDGMSHKDIDTEEAGTLTVVKKVHLKLVPVRVP

SEQ ID NO: 83872 - DNA, 1773 bp, Arabidopsis thaliana
  misc_feature (1)..(1773): Ceres Seq. ID no. 12672193
  misc_feature (1)..(1773): Ortholog of  Ceres SEQ ID NO 13594209 as cited in SEQ ID NO 59089
  misc_feature (1)..(1773): Ortholog of  Ceres SEQ ID NO 13502874 as cited in SEQ ID NO 66298
  misc_feature (1)..(1773): Ortholog of  Ceres SEQ ID NO 12614124 as cited in SEQ ID NO 68392
actccaaaacataaaacaataaccttagaaagaaaaaaaagagaaaaaaacagatcaaatcaagaatgtcgatctctctctatttccttttgctcttgcctctctttttaatcttcttcaaaaagctctcaccttctaaaggaaagcttcctcctggacctctaggtcttccgattatcgggaacttgcaccaacttggaaaatctctccatagatcttttcataaactttctcaaaactatggacccgtgatgtttctacatttcggtgtggtccctgtggttgtggtctccacaagagaagcagctgaagaagttctcaagactcatgatctcgagacttgtacccgaccaaagctaacagcgaccaaattgttttcttacaactacaaagacattggcttcgctcaatacggtgatgactggagagagatgaggaagcttgcgatgctcgagctttttagctcgaaaaagctcaaggctttcaggtatattagagaagaagagagtgaagtcctagtcaataaactctcgaaatctgctgagacacgaactatggtagacttgagaaaagctcttttctcttataccgctagtatcgtatgtagactcgcttttggacagaacttccatgagtgcgattttgtcgatatggataaagttgaagatcttgtgctcgaatctgagaccaatcttggctcattcgcgttcactgacttcttccccgcaggtcttgggtgggttatagaccggatctctggccaacattcggagttgcacaaagcctttgctagacttagtaatttctttcaacatgtgatcgatgatcacttgaagcccgggcaatctcaagatcattcagacatcattggtgtcatgttagatatgatcaataaagagagtaaagtcggttccttccaagtcacctacgaccatcttaaaggagtcatgtcggatgtgtttttagcgggagtgaacgcaggagcgatcacaatgatatgggcgatgacagagctagccagacatccgagagtgatgaagaaacttcaacaagagattcgagaaatactcggagacaacaaagaaaaaatcacggaacaagatctcgaaaaggttcactacttgaaacttgtgatcgaagaaacattcagattacatcctccagctcctctcttgctacctagagagacaatgtctgacttaaagattcaaggctacaatattcccaagaacacgatgatagagatcaatacttattcaataggacgcgatcctaattgctgggaaaaccctaacgatttcaacccggagagatttatcgatagccctgtcgaatataagggtcaacattacgagttgttgccttttggtgctggtcgcaggatttgtccaggaatggctacggggataactatcgtcgagctcggtttacttaatgttctttacttctttgattggagtttgcctgatggaatgaaaattgaagacatagacatggaagaagctggagctttcgtcgtcgccaagaaagtccctcttgagctgattccaactccacatcagtggtgaagttatgaagaggtgtaaataatctaataagatcaagattttctcttgcgatcggtttcatttttattatattgttatttgttacgttcatgagttgttgttatcagtagacatttgtatgttcattatgttttttgtttattttaatgttcattatgtttaattcatgtttgaaataaagaaacgtccgattgtgacattagtt

SEQ ID NO: 83873 - protein, 500 aa, Arabidopsis thaliana
  peptide (1)..(500): Ceres Seq. ID no. 12672194
MSISLYFLLLLPLFLIFFKKLSPSKGKLPPGPLGLPIIGNLHQLGKSLHRSFHKLSQNYGPVMFLHFGVVPVVVVSTREAAEEVLKTHDLETCTRPKLTATKLFSYNYKDIGFAQYGDDWREMRKLAMLELFSSKKLKAFRYIREEESEVLVNKLSKSAETRTMVDLRKALFSYTASIVCRLAFGQNFHECDFVDMDKVEDLVLESETNLGSFAFTDFFPAGLGWVIDRISGQHSELHKAFARLSNFFQHVIDDHLKPGQSQDHSDIIGVMLDMINKESKVGSFQVTYDHLKGVMSDVFLAGVNAGAITMIWAMTELARHPRVMKKLQQEIREILGDNKEKITEQDLEKVHYLKLVIEETFRLHPPAPLLLPRETMSDLKIQGYNIPKNTMIEINTYSIGRDPNCWENPNDFNPERFIDSPVEYKGQHYELLPFGAGRRICPGMATGITIVELGLLNVLYFFDWSLPDGMKIEDIDMEEAGAFVVAKKVPLELIPTPHQW

SEQ ID NO: 83874 - protein, 438 aa, Arabidopsis thaliana
  peptide (1)..(438): Ceres Seq. ID no. 12672195
MFLHFGVVPVVVVSTREAAEEVLKTHDLETCTRPKLTATKLFSYNYKDIGFAQYGDDWREMRKLAMLELFSSKKLKAFRYIREEESEVLVNKLSKSAETRTMVDLRKALFSYTASIVCRLAFGQNFHECDFVDMDKVEDLVLESETNLGSFAFTDFFPAGLGWVIDRISGQHSELHKAFARLSNFFQHVIDDHLKPGQSQDHSDIIGVMLDMINKESKVGSFQVTYDHLKGVMSDVFLAGVNAGAITMIWAMTELARHPRVMKKLQQEIREILGDNKEKITEQDLEKVHYLKLVIEETFRLHPPAPLLLPRETMSDLKIQGYNIPKNTMIEINTYSIGRDPNCWENPNDFNPERFIDSPVEYKGQHYELLPFGAGRRICPGMATGITIVELGLLNVLYFFDWSLPDGMKIEDIDMEEAGAFVVAKKVPLELIPTPHQW

SEQ ID NO: 83875 - protein, 378 aa, Arabidopsis thaliana
  peptide (1)..(378): Ceres Seq. ID no. 12672196
MRKLAMLELFSSKKLKAFRYIREEESEVLVNKLSKSAETRTMVDLRKALFSYTASIVCRLAFGQNFHECDFVDMDKVEDLVLESETNLGSFAFTDFFPAGLGWVIDRISGQHSELHKAFARLSNFFQHVIDDHLKPGQSQDHSDIIGVMLDMINKESKVGSFQVTYDHLKGVMSDVFLAGVNAGAITMIWAMTELARHPRVMKKLQQEIREILGDNKEKITEQDLEKVHYLKLVIEETFRLHPPAPLLLPRETMSDLKIQGYNIPKNTMIEINTYSIGRDPNCWENPNDFNPERFIDSPVEYKGQHYELLPFGAGRRICPGMATGITIVELGLLNVLYFFDWSLPDGMKIEDIDMEEAGAFVVAKKVPLELIPTPHQW

SEQ ID NO: 83876 - DNA, 1506 bp, Arabidopsis thaliana
  misc_feature (1)..(1506): Ceres Seq. ID no. 12672200
  misc_feature (1)..(1506): Ortholog of  Ceres SEQ ID NO 13594209 as cited in SEQ ID NO 59089
  misc_feature (1)..(1506): Ortholog of  Ceres SEQ ID NO 13502874 as cited in SEQ ID NO 66298
  misc_feature (1)..(1506): Ortholog of  Ceres SEQ ID NO 12614124 as cited in SEQ ID NO 68392
atggcgattcttcaatctttcctattgcttctatcccttccctttctcttcacgttaatctacaccaagaagatgaaggaatcgaaacggaatcttcctcctggtccagcaaagcttccgatcgtcggaaacctacaccagctacaagggatggttcacagatgtcttcatgagctctccaagaaacacggaccagtgatgcatctccagctagggtttgtcccactggtcttgatctcatcgagtgaagcagctgaagaggctcttaaaacacatgacattgagtgttgtacgcgacctaacactaacgccgcaagggttttctcccgtaacaacaaaaacatcggccttggggcatacagtgatgaatggagagagctgcgtaaggttgcggttcgtgagtatttcagcgtaaaaaaggtacaatctttcaggtatgttagggaggaagagaatcacttgatggtcaagaaactgagagacttggctttgaagcaatctccggtggatttgagcaaaaccctcttttgcctagctgcaagtaccgtattcagacctgtctttggacagagtttctcagataacaagcatttcagcgaggaaaagatcgaagaactggtgtttgaagctcagaaaagtttaactttcaaattttctgatctttttcctattcctggtcttggatggtttataggctttgtgtcaggccaacataagggccttcacaaagtgttcatcgaggttgataattttcttaatcatatgattgacgatcatcaaaagcagaaccaacctcaagatcgttctgatatcgtcggctccctcttagatatgatacataatcaagaacaagataaatctttcaagctcaccattgatcatctcaagggaatcacccaagatatatttctggctgggatagacacaagtgccattaccatgatttgggcgatggcagaacttgttaacaacccgagagtcatgaagaaagttcaagacgagattcggtcttgcattggaataaaaaaggagagaatcgaggaagaagatgtcggtaagctacagtacttgaagcttgtgatcaaagaaaccttaagactacacccagcagctcctcttttacttccaagggaaacaatggctgatatcaagattcaaggctacgacattcctcgaaaaaccctccttttagttagcgcatggtcgttgggacgagatccgaaatactggaaaaatcctgaggagtttaacccggagaggtttatcgattgtcctgtggattacaaaggacatagctttgagtttttaccatttggttctggtaggaggttttgtccaggaatggcttcggcgattgcgaccattgaattgacgctcttgaatttgctttacttctttgactggaagttgcctgaggagatgaaagatatgaacatggaagaatctggtgatgtcacaattgttaagaaagttcctcttgagctgctcccggttctttatcattga

SEQ ID NO: 83877 - protein, 501 aa, Arabidopsis thaliana
  peptide (1)..(501): Ceres Seq. ID no. 12672201
MAILQSFLLLLSLPFLFTLIYTKKMKESKRNLPPGPAKLPIVGNLHQLQGMVHRCLHELSKKHGPVMHLQLGFVPLVLISSSEAAEEALKTHDIECCTRPNTNAARVFSRNNKNIGLGAYSDEWRELRKVAVREYFSVKKVQSFRYVREEENHLMVKKLRDLALKQSPVDLSKTLFCLAASTVFRPVFGQSFSDNKHFSEEKIEELVFEAQKSLTFKFSDLFPIPGLGWFIGFVSGQHKGLHKVFIEVDNFLNHMIDDHQKQNQPQDRSDIVGSLLDMIHNQEQDKSFKLTIDHLKGITQDIFLAGIDTSAITMIWAMAELVNNPRVMKKVQDEIRSCIGIKKERIEEEDVGKLQYLKLVIKETLRLHPAAPLLLPRETMADIKIQGYDIPRKTLLLVSAWSLGRDPKYWKNPEEFNPERFIDCPVDYKGHSFEFLPFGSGRRFCPGMASAIATIELTLLNLLYFFDWKLPEEMKDMNMEESGDVTIVKKVPLELLPVLYH

SEQ ID NO: 83878 - protein, 477 aa, Arabidopsis thaliana
  peptide (1)..(477): Ceres Seq. ID no. 12672202
MKESKRNLPPGPAKLPIVGNLHQLQGMVHRCLHELSKKHGPVMHLQLGFVPLVLISSSEAAEEALKTHDIECCTRPNTNAARVFSRNNKNIGLGAYSDEWRELRKVAVREYFSVKKVQSFRYVREEENHLMVKKLRDLALKQSPVDLSKTLFCLAASTVFRPVFGQSFSDNKHFSEEKIEELVFEAQKSLTFKFSDLFPIPGLGWFIGFVSGQHKGLHKVFIEVDNFLNHMIDDHQKQNQPQDRSDIVGSLLDMIHNQEQDKSFKLTIDHLKGITQDIFLAGIDTSAITMIWAMAELVNNPRVMKKVQDEIRSCIGIKKERIEEEDVGKLQYLKLVIKETLRLHPAAPLLLPRETMADIKIQGYDIPRKTLLLVSAWSLGRDPKYWKNPEEFNPERFIDCPVDYKGHSFEFLPFGSGRRFCPGMASAIATIELTLLNLLYFFDWKLPEEMKDMNMEESGDVTIVKKVPLELLPVLYH

SEQ ID NO: 83879 - protein, 451 aa, Arabidopsis thaliana
  peptide (1)..(451): Ceres Seq. ID no. 12672203
MVHRCLHELSKKHGPVMHLQLGFVPLVLISSSEAAEEALKTHDIECCTRPNTNAARVFSRNNKNIGLGAYSDEWRELRKVAVREYFSVKKVQSFRYVREEENHLMVKKLRDLALKQSPVDLSKTLFCLAASTVFRPVFGQSFSDNKHFSEEKIEELVFEAQKSLTFKFSDLFPIPGLGWFIGFVSGQHKGLHKVFIEVDNFLNHMIDDHQKQNQPQDRSDIVGSLLDMIHNQEQDKSFKLTIDHLKGITQDIFLAGIDTSAITMIWAMAELVNNPRVMKKVQDEIRSCIGIKKERIEEEDVGKLQYLKLVIKETLRLHPAAPLLLPRETMADIKIQGYDIPRKTLLLVSAWSLGRDPKYWKNPEEFNPERFIDCPVDYKGHSFEFLPFGSGRRFCPGMASAIATIELTLLNLLYFFDWKLPEEMKDMNMEESGDVTIVKKVPLELLPVLYH

SEQ ID NO: 83880 - DNA, 1503 bp, Arabidopsis thaliana
  misc_feature (1)..(1503): Ceres Seq. ID no. 12672204
  misc_feature (1)..(1503): Ortholog of  Ceres SEQ ID NO 15170151 as cited in SEQ ID NO 53069
  misc_feature (1)..(1503): Ortholog of  Ceres SEQ ID NO 13594209 as cited in SEQ ID NO 59089
  misc_feature (1)..(1503): Ortholog of  Ceres SEQ ID NO 14313084 as cited in SEQ ID NO 59183
  misc_feature (1)..(1503): Ortholog of  Ceres SEQ ID NO 13502874 as cited in SEQ ID NO 66298
  misc_feature (1)..(1503): Ortholog of  Ceres SEQ ID NO 12614124 as cited in SEQ ID NO 68392
atggctacgattttgtttctatcacttctctttctctcttgtattcttctagccgccttcacgcacaagaagcggcagcaacatcaacggaaaccaccgtctcctcctggtttcccgataatcggaaacttgcatcagctcggagaattaccacatcaatctctatggagactctccaaaaagtatggtcatgtaatgcttttgaagtttggaagtatcccaacggtcgtagtttcttcctctgaaactgcaaagcaagttctgaaaatccatgacctacattgttgtagccgtccaagcttagcaggaccaagagcgctctcttacaattatctggacattgctttctctccttttgatgattactggaaagaattaaggaggatatgtgtgcaagaactcttcagtgttaaacgagttcaatcttttcaacctatcaaggaagatgaagtcaagaaacttatcgattcagtctcagaatcggcttctcagggaactccggttaacttgagcgagaagtttacttctttaactgtaagagtgacatgcaaggcaacatttggtgtgaacttccaaggaactgtgctcaacagtgacagattcgagaaactaatccatgatacatatttgtttttggggagcttttctgcctcagattattttccaaatggcggctggatcatcgactggctcacagggctacatgggcagagagagagaagcgtgagagctcttgatgcattctatgaacaaatgtttgatctacataaacagggaaacaaagaaggtgttgaagatttcgtggacttgctcttgaggttggagaaagaagaaactgttattggatatggcaagctaacaagaaaccatatcaaagcaatcttgatgaacgtccttattgggggcataggcacttctgcaataacaatgacatgggcaatgacagaacttatgagaaacccgcgagttatgaagaaggtgcaatctgaaatcagaaaccaaattgggaaaaagtcaatgatcaccttggatgatatagatcagctccattacctgaaaatggtgatcaatgaaacatggaggctacatcctccatcaccctttctgattccaagacaagtaatgtctgaatttgagctcaatgactacgtgattccagttaagacacggctttatgtgaatgtctgggctatcgggcgtgatcccgatacatggaaagacccggaggagtttcttccagaaaggtttgttaatagtagcattgatgcgaaaggacaacactttgagctgttaccgtttggaagtggtcgaagaatgtgtcctgccatgtacatggggacaacaatggtggagtttggtcttgccaatatgttgtatcactttgactggaaaataccagtaggcatggtggccgaagatatcgacttggaagaatctcctggacttaatgctagcaagaaaaatgagcttgtacttgttcctctgaagtatttagatcactaa

SEQ ID NO: 83881 - protein, 500 aa, Arabidopsis thaliana
  peptide (1)..(500): Ceres Seq. ID no. 12672205
MATILFLSLLFLSCILLAAFTHKKRQQHQRKPPSPPGFPIIGNLHQLGELPHQSLWRLSKKYGHVMLLKFGSIPTVVVSSSETAKQVLKIHDLHCCSRPSLAGPRALSYNYLDIAFSPFDDYWKELRRICVQELFSVKRVQSFQPIKEDEVKKLIDSVSESASQGTPVNLSEKFTSLTVRVTCKATFGVNFQGTVLNSDRFEKLIHDTYLFLGSFSASDYFPNGGWIIDWLTGLHGQRERSVRALDAFYEQMFDLHKQGNKEGVEDFVDLLLRLEKEETVIGYGKLTRNHIKAILMNVLIGGIGTSAITMTWAMTELMRNPRVMKKVQSEIRNQIGKKSMITLDDIDQLHYLKMVINETWRLHPPSPFLIPRQVMSEFELNDYVIPVKTRLYVNVWAIGRDPDTWKDPEEFLPERFVNSSIDAKGQHFELLPFGSGRRMCPAMYMGTTMVEFGLANMLYHFDWKIPVGMVAEDIDLEESPGLNASKKNELVLVPLKYLDH

SEQ ID NO: 83882 - protein, 435 aa, Arabidopsis thaliana
  peptide (1)..(435): Ceres Seq. ID no. 12672206
MLLKFGSIPTVVVSSSETAKQVLKIHDLHCCSRPSLAGPRALSYNYLDIAFSPFDDYWKELRRICVQELFSVKRVQSFQPIKEDEVKKLIDSVSESASQGTPVNLSEKFTSLTVRVTCKATFGVNFQGTVLNSDRFEKLIHDTYLFLGSFSASDYFPNGGWIIDWLTGLHGQRERSVRALDAFYEQMFDLHKQGNKEGVEDFVDLLLRLEKEETVIGYGKLTRNHIKAILMNVLIGGIGTSAITMTWAMTELMRNPRVMKKVQSEIRNQIGKKSMITLDDIDQLHYLKMVINETWRLHPPSPFLIPRQVMSEFELNDYVIPVKTRLYVNVWAIGRDPDTWKDPEEFLPERFVNSSIDAKGQHFELLPFGSGRRMCPAMYMGTTMVEFGLANMLYHFDWKIPVGMVAEDIDLEESPGLNASKKNELVLVPLKYLDH

SEQ ID NO: 83883 - DNA, 2019 bp, Arabidopsis thaliana
  misc_feature (1)..(2019): Ceres Seq. ID no. 12672217
  misc_feature (1)..(2019): Ortholog of  Ceres SEQ ID NO 13597361 as cited in SEQ ID NO 63638
atcaaaaaaaaagtttcaatttttgaaagctctgagaaatgaatctatcattctctctctctatctctatcttccttttcagatttcgcttcttcaattcatgaaatcctcgtgattctactttaatgcttctctttttttacttttccaagtctctgaatattcaaagtatatatcttttgttttcaaacttttgcagaattgtcttcaagcttccaaatttcagttaaaggtctcaactttgcagaattttcctctaaaggttcagactttggggtaaaggtgtcaactttggcgatgggtcttgacggaaacaatggtggaggggtttggttaaacggtggtggtggagaaagggaagagaacgaggaaggttcatggggaaggaatcaagaagatggttcttctcagtttaagcctatgcttgaaggtgattggtttagtagtaaccaaccacatccacaagatcttcagatgttacagaatcagccagatttcagatactttggtggttttccttttaaccctaatgataatcttcttcttcaacactctattgattcttcttcttcttgttctccttctcaagcttttagtcttgacccttctcagcaaaatcagttcttgtcaactaacaacaacaagggttgtcttctcaatgttccttcttctgcaaacccttttgataatgcttttgagtttggctctgaatctggttttcttaaccaaatccatgctcctatttcgatggggtttggttctttgacacaattggggaacagggatttgagttctgttcctgatttcttgtctgctcggtcacttcttgcgccggaaagcaacaacaacaacacaatgttgtgtggtggtttcacagctccgttggagttggaaggttttggtagtcctgctaatggtggttttgttgggaacagagcgaaagttctgaagcctttagaggtgttagcatcgtctggtgcacagcctactctgttccagaaacgtgcagctatgcgtcagagctctggaagcaaaatgggaaattcggagagttcgggaatgaggaggtttagtgatgatggagatatggatgagactgggattgaggtttctgggttgaactatgagtctgatgagataaatgagagcggtaaagcggctgagagtgttcagattggaggaggaggaaagggtaagaagaaaggtatgcctgctaagaatctgatggctgagaggagaaggaggaagaagcttaatgataggctttatatgcttagatcagttgtccccaagatcagcaaaatggatagagcatcaatacttggagatgcaattgattatctgaaggaacttctacaaaggatcaatgatcttcacaatgaacttgagtcaactcctcctggatctttgcctccaacttcatcaagcttccatccgttgacacctacaccgcaaactctttcttgtcgtgtcaaggaagagttgtgtccctcttctttaccaagtcctaaaggccagcaagctagagttgaggttagattaagggaaggaagagcagtgaacattcatatgttctgtggtcgtagaccgggtctgttgctcgctaccatgaaagctttggataatcttggattggatgttcagcaagctgtgatcagctgttttaatgggtttgccttggatgttttccgcgctgagcaatgccaagaaggacaagagatactgcctgatcaaatcaaagcagtgcttttcgatacagcagggtatgctggtatgatctgatctgatcctgacttcgagtccattaagcatctgttgaagcagagctagaagaactaagtccctttaaatctgcaattttcttctcaactttttttcttatgtcataacttcaatctaagcatgtaatgcaattgcaaatgagagttgtttttaaattaagcttttgagaacttgaggttgttgttgttggatacataacttcaaccttttattagcaatgttaacttccatttatgt

SEQ ID NO: 83884 - protein, 494 aa, Arabidopsis thaliana
  peptide (1)..(494): Ceres Seq. ID no. 12672218
MGLDGNNGGGVWLNGGGGEREENEEGSWGRNQEDGSSQFKPMLEGDWFSSNQPHPQDLQMLQNQPDFRYFGGFPFNPNDNLLLQHSIDSSSSCSPSQAFSLDPSQQNQFLSTNNNKGCLLNVPSSANPFDNAFEFGSESGFLNQIHAPISMGFGSLTQLGNRDLSSVPDFLSARSLLAPESNNNNTMLCGGFTAPLELEGFGSPANGGFVGNRAKVLKPLEVLASSGAQPTLFQKRAAMRQSSGSKMGNSESSGMRRFSDDGDMDETGIEVSGLNYESDEINESGKAAESVQIGGGGKGKKKGMPAKNLMAERRRRKKLNDRLYMLRSVVPKISKMDRASILGDAIDYLKELLQRINDLHNELESTPPGSLPPTSSSFHPLTPTPQTLSCRVKEELCPSSLPSPKGQQARVEVRLREGRAVNIHMFCGRRPGLLLATMKALDNLGLDVQQAVISCFNGFALDVFRAEQCQEGQEILPDQIKAVLFDTAGYAGMI

SEQ ID NO: 83885 - protein, 453 aa, Arabidopsis thaliana
  peptide (1)..(453): Ceres Seq. ID no. 12672219
MLEGDWFSSNQPHPQDLQMLQNQPDFRYFGGFPFNPNDNLLLQHSIDSSSSCSPSQAFSLDPSQQNQFLSTNNNKGCLLNVPSSANPFDNAFEFGSESGFLNQIHAPISMGFGSLTQLGNRDLSSVPDFLSARSLLAPESNNNNTMLCGGFTAPLELEGFGSPANGGFVGNRAKVLKPLEVLASSGAQPTLFQKRAAMRQSSGSKMGNSESSGMRRFSDDGDMDETGIEVSGLNYESDEINESGKAAESVQIGGGGKGKKKGMPAKNLMAERRRRKKLNDRLYMLRSVVPKISKMDRASILGDAIDYLKELLQRINDLHNELESTPPGSLPPTSSSFHPLTPTPQTLSCRVKEELCPSSLPSPKGQQARVEVRLREGRAVNIHMFCGRRPGLLLATMKALDNLGLDVQQAVISCFNGFALDVFRAEQCQEGQEILPDQIKAVLFDTAGYAGMI

SEQ ID NO: 83886 - protein, 435 aa, Arabidopsis thaliana
  peptide (1)..(435): Ceres Seq. ID no. 12672220
MLQNQPDFRYFGGFPFNPNDNLLLQHSIDSSSSCSPSQAFSLDPSQQNQFLSTNNNKGCLLNVPSSANPFDNAFEFGSESGFLNQIHAPISMGFGSLTQLGNRDLSSVPDFLSARSLLAPESNNNNTMLCGGFTAPLELEGFGSPANGGFVGNRAKVLKPLEVLASSGAQPTLFQKRAAMRQSSGSKMGNSESSGMRRFSDDGDMDETGIEVSGLNYESDEINESGKAAESVQIGGGGKGKKKGMPAKNLMAERRRRKKLNDRLYMLRSVVPKISKMDRASILGDAIDYLKELLQRINDLHNELESTPPGSLPPTSSSFHPLTPTPQTLSCRVKEELCPSSLPSPKGQQARVEVRLREGRAVNIHMFCGRRPGLLLATMKALDNLGLDVQQAVISCFNGFALDVFRAEQCQEGQEILPDQIKAVLFDTAGYAGMI

SEQ ID NO: 83887 - DNA, 1482 bp, Arabidopsis thaliana
  misc_feature (1)..(1482): Ceres Seq. ID no. 12672260
  misc_feature (1)..(1482): Ortholog of  Ceres SEQ ID NO 15174599 as cited in SEQ ID NO 53646
  misc_feature (1)..(1482): Ortholog of  Ceres SEQ ID NO 15174646 as cited in SEQ ID NO 54499
atggactccaattgcattcagttcctccatgacaagacgattctcgtcaccggtgttcccggtttcctcgccaaagtgtttgtggagaaaatattgaggattcaaccaaaggtaaagaagcttttccttcttttgagagcagcagacaatgaatcagccatgcaacggtttcacagtgaggttttggagaaagatctttttagagtgttgaaaaacgctttaggtgatgagaatctgaaagctttcataacagaaaaagtcgtacctattcccggtgatatatccgttgataatttgggagtgaagggttctgatctcttacaacatatgtggaatgagattgatatcattgtcaatgtagccgccacaacgaactttgatgaaagatatgatgttggtcttagcgtcaacacatttggaccgctcaatgtcctcaactttgccaagaagtgtgttaaaggacagttgcttcttcatgtttcaaccgcgtatgtgcgcggagagaagtctggacttttacatgagaaaacatttcacatgggggagacattgaacggacatagaaaattagtcattgagaccgaaatggagctaatgaaacaaaaactgaaagagctacagaaacaaaattgttcagaagaagagatttcacagtctatgaaagatcttggaatgtcaagggcaaagcttcatggatggccaaacacatatgtgtttaccaaatcaatgggagagatgcttcttggtaattatagagaaaaccttcccatcgttatcatccgtcccacaatgatcactagcactttttcagaaccatttcccggttggatcgaagggttaagaaccatagacagtgtgattgttgcatatggcaaaggaaggcttaaatgttttcttgcagatccaaactcagtccttgatcttatacctgtggacatggtcgcaaacgcaatggtcacggctgcggcaatacacgcagggaagctaggttcccagaccgtgtaccatgtcggatcatcttgtaaaaacccgatcacattcgaacagattcatgatctcgcggctagctacttcacgaaaaaccctcttgttagacgcgatggttcatctatactagtctccaaaggaactatcttgtccacaatggctcagttcagtttctacatgacccttcgttacaagctacctttgcagatgttgcgattgatatatgtaatttatccttggtggaatggtaataaatataaagacattgaccgcaagattaagctggcgatgcggttggtcgacctctacagaccttatgtcttgtttaagggcatatttgacgatacgaatactgagaaactgcggttgaaaagaaaggagattaataaagaaatgtatggtttgtttgaatttgatccaaagtctattgattgggaggattatatgacgaccattcatattcccggcctcatcacctatgtactcaaaaaataa

SEQ ID NO: 83888 - protein, 493 aa, Arabidopsis thaliana
  peptide (1)..(493): Ceres Seq. ID no. 12672261
MDSNCIQFLHDKTILVTGVPGFLAKVFVEKILRIQPKVKKLFLLLRAADNESAMQRFHSEVLEKDLFRVLKNALGDENLKAFITEKVVPIPGDISVDNLGVKGSDLLQHMWNEIDIIVNVAATTNFDERYDVGLSVNTFGPLNVLNFAKKCVKGQLLLHVSTAYVRGEKSGLLHEKTFHMGETLNGHRKLVIETEMELMKQKLKELQKQNCSEEEISQSMKDLGMSRAKLHGWPNTYVFTKSMGEMLLGNYRENLPIVIIRPTMITSTFSEPFPGWIEGLRTIDSVIVAYGKGRLKCFLADPNSVLDLIPVDMVANAMVTAAAIHAGKLGSQTVYHVGSSCKNPITFEQIHDLAASYFTKNPLVRRDGSSILVSKGTILSTMAQFSFYMTLRYKLPLQMLRLIYVIYPWWNGNKYKDIDRKIKLAMRLVDLYRPYVLFKGIFDDTNTEKLRLKRKEINKEMYGLFEFDPKSIDWEDYMTTIHIPGLITYVLKK

SEQ ID NO: 83889 - protein, 440 aa, Arabidopsis thaliana
  peptide (1)..(440): Ceres Seq. ID no. 12672262
MQRFHSEVLEKDLFRVLKNALGDENLKAFITEKVVPIPGDISVDNLGVKGSDLLQHMWNEIDIIVNVAATTNFDERYDVGLSVNTFGPLNVLNFAKKCVKGQLLLHVSTAYVRGEKSGLLHEKTFHMGETLNGHRKLVIETEMELMKQKLKELQKQNCSEEEISQSMKDLGMSRAKLHGWPNTYVFTKSMGEMLLGNYRENLPIVIIRPTMITSTFSEPFPGWIEGLRTIDSVIVAYGKGRLKCFLADPNSVLDLIPVDMVANAMVTAAAIHAGKLGSQTVYHVGSSCKNPITFEQIHDLAASYFTKNPLVRRDGSSILVSKGTILSTMAQFSFYMTLRYKLPLQMLRLIYVIYPWWNGNKYKDIDRKIKLAMRLVDLYRPYVLFKGIFDDTNTEKLRLKRKEINKEMYGLFEFDPKSIDWEDYMTTIHIPGLITYVLKK

SEQ ID NO: 83890 - protein, 384 aa, Arabidopsis thaliana
  peptide (1)..(384): Ceres Seq. ID no. 12672263
MWNEIDIIVNVAATTNFDERYDVGLSVNTFGPLNVLNFAKKCVKGQLLLHVSTAYVRGEKSGLLHEKTFHMGETLNGHRKLVIETEMELMKQKLKELQKQNCSEEEISQSMKDLGMSRAKLHGWPNTYVFTKSMGEMLLGNYRENLPIVIIRPTMITSTFSEPFPGWIEGLRTIDSVIVAYGKGRLKCFLADPNSVLDLIPVDMVANAMVTAAAIHAGKLGSQTVYHVGSSCKNPITFEQIHDLAASYFTKNPLVRRDGSSILVSKGTILSTMAQFSFYMTLRYKLPLQMLRLIYVIYPWWNGNKYKDIDRKIKLAMRLVDLYRPYVLFKGIFDDTNTEKLRLKRKEINKEMYGLFEFDPKSIDWEDYMTTIHIPGLITYVLKK

SEQ ID NO: 83891 - DNA, 1473 bp, Arabidopsis thaliana
  misc_feature (1)..(1473): Ceres Seq. ID no. 12672303
  misc_feature (1)..(1473): Ortholog of  Ceres SEQ ID NO 13594209 as cited in SEQ ID NO 59089
  misc_feature (1)..(1473): Ortholog of  Ceres SEQ ID NO 14316039 as cited in SEQ ID NO 62062
  misc_feature (1)..(1473): Ortholog of  Ceres SEQ ID NO 14307995 as cited in SEQ ID NO 63970
  misc_feature (1)..(1473): Ortholog of  Ceres SEQ ID NO 14302228 as cited in SEQ ID NO 65061
  misc_feature (1)..(1473): Ortholog of  Ceres SEQ ID NO 15176783 as cited in SEQ ID NO 65590
  misc_feature (1)..(1473): Ortholog of  Ceres SEQ ID NO 15176091 as cited in SEQ ID NO 65733
  misc_feature (1)..(1473): Ortholog of  Ceres SEQ ID NO 14308027 as cited in SEQ ID NO 65826
  misc_feature (1)..(1473): Ortholog of  Ceres SEQ ID NO 15169585 as cited in SEQ ID NO 66076
  misc_feature (1)..(1473): Ortholog of  Ceres SEQ ID NO 13502874 as cited in SEQ ID NO 66298
  misc_feature (1)..(1473): Ortholog of  Ceres SEQ ID NO 12614124 as cited in SEQ ID NO 68392
  misc_feature (1)..(1473): Ortholog of  Ceres SEQ ID NO 15176087 as cited in SEQ ID NO 68692
atgatgatgatgataattctcttgtggtcaataattttcatgaccattctcttcttaaaaaaacagttgagtgggaagaaaggtaagacacctccgtcaccaccgggacttccgttgatcggaaaccttcatcagctcggccgccacactcaccgatcactatgcgatctcagtcgccgttacggtcctctcatgctccttcacttaggtcgtgtccccgttcttatagtctcttccgcggacatggctcaagaaatcttgaagacgcacgaccaagctttcgcaaaccgcccacggtcaaaactctcccagaagcttctttacaacaatcgtgatgtggcctcagctccttatggagagtattggaggcaaatgaagtccgtgtgcgtcattcatctcttaagcaacaaaatggtacgatcttttcgagatgtaagagaagaagaaatcactttgatgatggcaaaaatccggaaatcgagttctttgccgtttaatgtaagcaaggtcttggagtgtttgaccaacgatgtgatatgtagagtcgctttgggacggaaatatggtggtgaaactgactttaagaagttaacggatagactaagcgagctattgggaacgtttagtatagggagttttgtaccgtggctcgcgtgggttgattggatccgcggttgggatgctcagctagataagatgggaaaggatcttgatgacttctttgagaaagttgtgcaagatcatgaagatggtgaccgccgagatgggactgatttgattgatgcattgctcagggttaaaagagaaaagagtcccgggtttgagatagagcgagtcagcataaaggcaatcacgttggatgtttttgtgggtggttcggacacatcgttcacgcttttggaatgggcaatgacagagcttctacgtcatccgaagtctctgaacagactccaagaagaagtccgtacgatttgtaaggggaagtcaagagtatctgaagatgacattcaaggaatgaaatacttaaaagctgtgatcaaagaggcactcaggctacatcctccatttccaatgatggctcctcatgaatcaacagaagatgttaaattaagagactaccacataccagccggtacacaagtgatgatgaatgcttgggcgatcgggagagaggttgccacatggggaccagacgcggaggagttcaaaccggagaggcatttagatacgtctgttgatttccgaggtcaaaactttgagctgcttccatttggagcagggagaaggatttgtccagcagtatcattcgctgtggtattgaatgaggtggttttggctaacttagtgcatgggtttgattggaaactaccggaggaatctaaagaagacaaaactgatgtcgctgaatccagcggtttttcggttcaccgcgagttccctctttatgccgttgcatcaccttacttgacttag

SEQ ID NO: 83892 - protein, 490 aa, Arabidopsis thaliana
  peptide (1)..(490): Ceres Seq. ID no. 12672304
MMMMIILLWSIIFMTILFLKKQLSGKKGKTPPSPPGLPLIGNLHQLGRHTHRSLCDLSRRYGPLMLLHLGRVPVLIVSSADMAQEILKTHDQAFANRPRSKLSQKLLYNNRDVASAPYGEYWRQMKSVCVIHLLSNKMVRSFRDVREEEITLMMAKIRKSSSLPFNVSKVLECLTNDVICRVALGRKYGGETDFKKLTDRLSELLGTFSIGSFVPWLAWVDWIRGWDAQLDKMGKDLDDFFEKVVQDHEDGDRRDGTDLIDALLRVKREKSPGFEIERVSIKAITLDVFVGGSDTSFTLLEWAMTELLRHPKSLNRLQEEVRTICKGKSRVSEDDIQGMKYLKAVIKEALRLHPPFPMMAPHESTEDVKLRDYHIPAGTQVMMNAWAIGREVATWGPDAEEFKPERHLDTSVDFRGQNFELLPFGAGRRICPAVSFAVVLNEVVLANLVHGFDWKLPEESKEDKTDVAESSGFSVHREFPLYAVASPYLT

SEQ ID NO: 83893 - protein, 489 aa, Arabidopsis thaliana
  peptide (1)..(489): Ceres Seq. ID no. 12672305
MMMIILLWSIIFMTILFLKKQLSGKKGKTPPSPPGLPLIGNLHQLGRHTHRSLCDLSRRYGPLMLLHLGRVPVLIVSSADMAQEILKTHDQAFANRPRSKLSQKLLYNNRDVASAPYGEYWRQMKSVCVIHLLSNKMVRSFRDVREEEITLMMAKIRKSSSLPFNVSKVLECLTNDVICRVALGRKYGGETDFKKLTDRLSELLGTFSIGSFVPWLAWVDWIRGWDAQLDKMGKDLDDFFEKVVQDHEDGDRRDGTDLIDALLRVKREKSPGFEIERVSIKAITLDVFVGGSDTSFTLLEWAMTELLRHPKSLNRLQEEVRTICKGKSRVSEDDIQGMKYLKAVIKEALRLHPPFPMMAPHESTEDVKLRDYHIPAGTQVMMNAWAIGREVATWGPDAEEFKPERHLDTSVDFRGQNFELLPFGAGRRICPAVSFAVVLNEVVLANLVHGFDWKLPEESKEDKTDVAESSGFSVHREFPLYAVASPYLT

SEQ ID NO: 83894 - protein, 488 aa, Arabidopsis thaliana
  peptide (1)..(488): Ceres Seq. ID no. 12672306
MMIILLWSIIFMTILFLKKQLSGKKGKTPPSPPGLPLIGNLHQLGRHTHRSLCDLSRRYGPLMLLHLGRVPVLIVSSADMAQEILKTHDQAFANRPRSKLSQKLLYNNRDVASAPYGEYWRQMKSVCVIHLLSNKMVRSFRDVREEEITLMMAKIRKSSSLPFNVSKVLECLTNDVICRVALGRKYGGETDFKKLTDRLSELLGTFSIGSFVPWLAWVDWIRGWDAQLDKMGKDLDDFFEKVVQDHEDGDRRDGTDLIDALLRVKREKSPGFEIERVSIKAITLDVFVGGSDTSFTLLEWAMTELLRHPKSLNRLQEEVRTICKGKSRVSEDDIQGMKYLKAVIKEALRLHPPFPMMAPHESTEDVKLRDYHIPAGTQVMMNAWAIGREVATWGPDAEEFKPERHLDTSVDFRGQNFELLPFGAGRRICPAVSFAVVLNEVVLANLVHGFDWKLPEESKEDKTDVAESSGFSVHREFPLYAVASPYLT

SEQ ID NO: 83895 - DNA, 1473 bp, Arabidopsis thaliana
  misc_feature (1)..(1473): Ceres Seq. ID no. 12672307
  misc_feature (1)..(1473): Ortholog of  Ceres SEQ ID NO 13594209 as cited in SEQ ID NO 59089
  misc_feature (1)..(1473): Ortholog of  Ceres SEQ ID NO 14307995 as cited in SEQ ID NO 63970
  misc_feature (1)..(1473): Ortholog of  Ceres SEQ ID NO 14302228 as cited in SEQ ID NO 65061
  misc_feature (1)..(1473): Ortholog of  Ceres SEQ ID NO 14308027 as cited in SEQ ID NO 65826
  misc_feature (1)..(1473): Ortholog of  Ceres SEQ ID NO 15169585 as cited in SEQ ID NO 66076
  misc_feature (1)..(1473): Ortholog of  Ceres SEQ ID NO 13502874 as cited in SEQ ID NO 66298
  misc_feature (1)..(1473): Ortholog of  Ceres SEQ ID NO 12614124 as cited in SEQ ID NO 68392
  misc_feature (1)..(1473): Ortholog of  Ceres SEQ ID NO 15176087 as cited in SEQ ID NO 68692
atggaatccatgacaatgataattctgcaaagcttaataatctttattaccatcctctttttcaaaaaacagaaaagagggaagaaaagcaacacacctcggtcaccaccgagacttccattgatcggaaaccttcatcaactcggccaccaccctcaccgatcactatgctctctcagccacagatacggccctctcatgctcctccatttaggccgtgtcccagttcttgtagtctcttccgccgacgtggctagagatattttgaagacgcatgatcgcgtttttgctagccgtccacggtcaaaactcttcgagaagctattttatgacgggcgtgatgtggccttcgctccttatggagagtattggaggcaaataaagagtgtgtgcgtcctccggctcctcagcaacaaaatggtcacgtcctttcgaaatgtgagacaagaagagatcagtctgatgatggagaagatccagaaatcaagttctttgcaagtgaatgtaagcgagctcttggggagtttaactaacgatgtgatatctagaattgctttgggacggaaatatagcggtgaaacagattctaaagagttaatgaaaaggctcatgatgctaatgggcgagtttagtgtggggacttatgtaccatggcttggatggattgattggatctctggtttggatggacagctaaataagacaggcaatgatcttgatgaattcttggagaaagttgttcaagatcatgtagatggtgacggacaaaggactgattttgtggatgtgttgctcagaattcagagagagaagagcatcggatttgaaatcgaccggttatgcataaaggctatcgtcttggatgttttagttgctggtacggattcatcgtacgcacttatggattgggcaatgacagagcttctacgtcacccagagtgtctgcgcacactccaggaagaagttcgtacgatttgtaagggtaatttgagtgtatcagaagaagacattcaaaacatgagctacttaaaagctgtaatcaaagagacaacgaggctacatcctccacttccattgttggctcctcacgaatcaatacaagatgttatattaggagattaccacataccagccggtacacaggtaatgatcaatgcttgggcaatcgggagagaggctgcgacgtgggggccagacgcagagaagtttagaccggagagacatttagattcgtctgttgatttccgaggtcacaattttgagctggttccatttggagcagggagaaggatttgtccagcaatatcattcgcagtggtcttgattgaggtggctttggctaactttgtgcatcggtatgattggaaattaccggaggattctaaagaaaatcaaaccaatgtcgctgaatcaaccggtatggtgattcaccgtttattccctctttacgccattgcatcatctactacttga

SEQ ID NO: 83896 - protein, 490 aa, Arabidopsis thaliana
  peptide (1)..(490): Ceres Seq. ID no. 12672308
MESMTMIILQSLIIFITILFFKKQKRGKKSNTPRSPPRLPLIGNLHQLGHHPHRSLCSLSHRYGPLMLLHLGRVPVLVVSSADVARDILKTHDRVFASRPRSKLFEKLFYDGRDVAFAPYGEYWRQIKSVCVLRLLSNKMVTSFRNVRQEEISLMMEKIQKSSSLQVNVSELLGSLTNDVISRIALGRKYSGETDSKELMKRLMMLMGEFSVGTYVPWLGWIDWISGLDGQLNKTGNDLDEFLEKVVQDHVDGDGQRTDFVDVLLRIQREKSIGFEIDRLCIKAIVLDVLVAGTDSSYALMDWAMTELLRHPECLRTLQEEVRTICKGNLSVSEEDIQNMSYLKAVIKETTRLHPPLPLLAPHESIQDVILGDYHIPAGTQVMINAWAIGREAATWGPDAEKFRPERHLDSSVDFRGHNFELVPFGAGRRICPAISFAVVLIEVALANFVHRYDWKLPEDSKENQTNVAESTGMVIHRLFPLYAIASSTT

SEQ ID NO: 83897 - protein, 487 aa, Arabidopsis thaliana
  peptide (1)..(487): Ceres Seq. ID no. 12672309
MTMIILQSLIIFITILFFKKQKRGKKSNTPRSPPRLPLIGNLHQLGHHPHRSLCSLSHRYGPLMLLHLGRVPVLVVSSADVARDILKTHDRVFASRPRSKLFEKLFYDGRDVAFAPYGEYWRQIKSVCVLRLLSNKMVTSFRNVRQEEISLMMEKIQKSSSLQVNVSELLGSLTNDVISRIALGRKYSGETDSKELMKRLMMLMGEFSVGTYVPWLGWIDWISGLDGQLNKTGNDLDEFLEKVVQDHVDGDGQRTDFVDVLLRIQREKSIGFEIDRLCIKAIVLDVLVAGTDSSYALMDWAMTELLRHPECLRTLQEEVRTICKGNLSVSEEDIQNMSYLKAVIKETTRLHPPLPLLAPHESIQDVILGDYHIPAGTQVMINAWAIGREAATWGPDAEKFRPERHLDSSVDFRGHNFELVPFGAGRRICPAISFAVVLIEVALANFVHRYDWKLPEDSKENQTNVAESTGMVIHRLFPLYAIASSTT

SEQ ID NO: 83898 - protein, 485 aa, Arabidopsis thaliana
  peptide (1)..(485): Ceres Seq. ID no. 12672310
MIILQSLIIFITILFFKKQKRGKKSNTPRSPPRLPLIGNLHQLGHHPHRSLCSLSHRYGPLMLLHLGRVPVLVVSSADVARDILKTHDRVFASRPRSKLFEKLFYDGRDVAFAPYGEYWRQIKSVCVLRLLSNKMVTSFRNVRQEEISLMMEKIQKSSSLQVNVSELLGSLTNDVISRIALGRKYSGETDSKELMKRLMMLMGEFSVGTYVPWLGWIDWISGLDGQLNKTGNDLDEFLEKVVQDHVDGDGQRTDFVDVLLRIQREKSIGFEIDRLCIKAIVLDVLVAGTDSSYALMDWAMTELLRHPECLRTLQEEVRTICKGNLSVSEEDIQNMSYLKAVIKETTRLHPPLPLLAPHESIQDVILGDYHIPAGTQVMINAWAIGREAATWGPDAEKFRPERHLDSSVDFRGHNFELVPFGAGRRICPAISFAVVLIEVALANFVHRYDWKLPEDSKENQTNVAESTGMVIHRLFPLYAIASSTT

SEQ ID NO: 83899 - DNA, 804 bp, Arabidopsis thaliana
  misc_feature (1)..(804): Ceres Seq. ID no. 12672334
  misc_feature (1)..(804): Ortholog of  Ceres SEQ ID NO 13638849 as cited in SEQ ID NO 52046
  misc_feature (1)..(804): Ortholog of  Ceres SEQ ID NO 13599613 as cited in SEQ ID NO 0
atgcaaacacaccacatgcagcaacaacaactccatcacttcgtctttgtccacggctcatgtcatggagcatggtgctggttcaaactagctgcaaagctcaagctcgatggtcaccgtgtgacagctatcgaccttggtggctccggtgtcgacacgaggcagctccatgaggttcgtttggtgtcggcgtatctagagcctttgatgagtttcatggagtctctccctgaaaacgagaaagtggttcttgttggtcatagctatggtggcattggaacttctcttgctatggaaaggtttccgaccaaagtctctgtcggaatcttcctctctgcttacatgccgcaccatgactctcctccggcggttttgattcaagagtattttacgagactaccagagggtttcgctatggactgtgagtttacattcgaggaaggattagaacacccaccaagttcagttttgttcggtactagtttcttgaaggagaaggcatatagtaattgccagttagaggatctagaattagccatggcgttgatgaaaccaagctggttatacactaaggaaatgggaggtgaagatctgataacaaaggagaggtatggatctgggaagagagtgtttattgtctgtgaaggcgacaatgtggttccagaggagattcagaagtggatgattagtaactacgagcctcacgaagttaagcggattgaagaagctggtcacatggctatgctcactaagcctcatgaactttctcaactgctacaagaaatagcagcgaaatataactaa

SEQ ID NO: 83900 - protein, 267 aa, Arabidopsis thaliana
  peptide (1)..(267): Ceres Seq. ID no. 12672335
MQTHHMQQQQLHHFVFVHGSCHGAWCWFKLAAKLKLDGHRVTAIDLGGSGVDTRQLHEVRLVSAYLEPLMSFMESLPENEKVVLVGHSYGGIGTSLAMERFPTKVSVGIFLSAYMPHHDSPPAVLIQEYFTRLPEGFAMDCEFTFEEGLEHPPSSVLFGTSFLKEKAYSNCQLEDLELAMALMKPSWLYTKEMGGEDLITKERYGSGKRVFIVCEGDNVVPEEIQKWMISNYEPHEVKRIEEAGHMAMLTKPHELSQLLQEIAAKYN

SEQ ID NO: 83901 - protein, 262 aa, Arabidopsis thaliana
  peptide (1)..(262): Ceres Seq. ID no. 12672336
MQQQQLHHFVFVHGSCHGAWCWFKLAAKLKLDGHRVTAIDLGGSGVDTRQLHEVRLVSAYLEPLMSFMESLPENEKVVLVGHSYGGIGTSLAMERFPTKVSVGIFLSAYMPHHDSPPAVLIQEYFTRLPEGFAMDCEFTFEEGLEHPPSSVLFGTSFLKEKAYSNCQLEDLELAMALMKPSWLYTKEMGGEDLITKERYGSGKRVFIVCEGDNVVPEEIQKWMISNYEPHEVKRIEEAGHMAMLTKPHELSQLLQEIAAKYN

SEQ ID NO: 83902 - protein, 198 aa, Arabidopsis thaliana
  peptide (1)..(198): Ceres Seq. ID no. 12672337
MSFMESLPENEKVVLVGHSYGGIGTSLAMERFPTKVSVGIFLSAYMPHHDSPPAVLIQEYFTRLPEGFAMDCEFTFEEGLEHPPSSVLFGTSFLKEKAYSNCQLEDLELAMALMKPSWLYTKEMGGEDLITKERYGSGKRVFIVCEGDNVVPEEIQKWMISNYEPHEVKRIEEAGHMAMLTKPHELSQLLQEIAAKYN

SEQ ID NO: 83903 - DNA, 2287 bp, Arabidopsis thaliana
  misc_feature (1)..(2287): Ceres Seq. ID no. 12672338
  misc_feature (1)..(2287): Ortholog of  Ceres SEQ ID NO 13659971 as cited in SEQ ID NO 67565
  misc_feature (1)..(2287): Ortholog of  Ceres SEQ ID NO 13500385 as cited in SEQ ID NO 67583
ctttggaattcgccattgacaaagtactcaattccaaaacaaagaataagcaaacaacaacaattttcacttccttcaaaaattataaaaatccagtttttatctttgcaagattcaaaagtttgaatttttacttgttttgatttctgggttttgtttgttttttgatttcggtaatgatacaattgagattttgatttcgtgtgatgttgagagattcttaaatgggtctatgtacttcgaaaccgaattcatctaattccgatcaaactccggcgaggaatagtccacttccggcgtctgaatccgtcaagccttcgagctcttccgttaatggtgaagatcagtgtgtaacaacaacgaacaatgaaggcaaaaagtctccgtttttccctttttatagtccaagtccagctcactatttcttctccaagaagactccggcgagatctccggcgactaattcgactaattcgactccgaagcgattctttaaacggccgtttcctcctccgtctccggctaaacatatcagagctgttttagcgagaaggcatggttctgtgaagcctaattcgtcggcgatccctgaaggtagtgaagctgaaggaggtggtgttggattggataaaagctttggtttttccaagagttttgcgagtaagtatgagcttggtgatgaagttggtcgtggtcattttggttatacttgtgctgctaagtttaagaagggtgataataaaggtcaacaagtcgcggttaaagtcattcccaaagcaaagatgacgacggctattgcaattgaagatgtgagaagggaagtgaagatattgagggctttgtctggtcataacaatcttcctcatttctatgatgcttatgaggatcatgataatgtctatatagtgatggaactatgtgaaggaggagagcttttggatagaatactttcaagaggtgggaagtacacagaggaggatgcaaagaccgttatgatacaaatattgaatgtggttgctttttgtcatctgcaaggcgttgtacacagagatcttaaaccagagaattttctttttacctcaaaagaagacacctctcaattgaaggcaatagatttcggtttgtcagattacgtgagaccagatgagaggctcaatgacattgttggtagtgcatactatgtagcacctgaagttctgcatagatcttacagtacagaagctgatatttggagtgttggtgtgattgtatatattctattgtgtggaagccgaccgttttgggctaggacagaatcaggaatctttcgtgctgttctaaaagctgatccaagttttgatgaccctccttggcctttgttatcttcagaggcaagagattttgtaaagcggttgctaaacaaagatccgcgtaaaagattaacagctgctcaagccttaagtcatccatggataaaggactcaaacgacgcaaaggttccaatggatattctggttttcaaacttatgagagcttatttacgatcatcatctctccgtaaagctgcattaagagctttatcgaaaacacttacggttgatgaactgttttatctgagagagcagtttgctttgttagaacctagtaagaacggaaccataagtctagaaaacatcaaatcagctctgatgaaaatggcaacagatgcgatgaaggactcacgtattccagagttcttaggacaactgagtgctcttcaatatagaagaatggactttgaggaattctgtgcagcggcattgagtgttcaccagctagaagctcttgatcgatgggaacaacacgctcgttgtgcttatgagcttttcgaaaaggaagggaaccgaccaatcatgatcgatgaactcgcttcggaacttggtcttggcccttctgtaccggttcacgcagtgcttcacgattggcttagacataccgatgggaagcttagctttctcggatttgtgaaattgctacatggtgtgtctagccgcacgatcaaagctcattagaagggttttgaaactttgaatgatatgtatgaaatttgtctgagctctaaggtctcattctcctaggagttataatatgtggcttttgacttttgttatgaaagctgagaagcaaagattataaaaaaaaatgagtgtagcaaaaaaagagagaagtgtgttagttttgtagagaatgatatgatattttccccaaatttggtaacttatgacgattgatgatatttctgacatttttagattttgctttttttgac

SEQ ID NO: 83904 - protein, 601 aa, Arabidopsis thaliana
  peptide (1)..(601): Ceres Seq. ID no. 12672339
MGLCTSKPNSSNSDQTPARNSPLPASESVKPSSSSVNGEDQCVTTTNNEGKKSPFFPFYSPSPAHYFFSKKTPARSPATNSTNSTPKRFFKRPFPPPSPAKHIRAVLARRHGSVKPNSSAIPEGSEAEGGGVGLDKSFGFSKSFASKYELGDEVGRGHFGYTCAAKFKKGDNKGQQVAVKVIPKAKMTTAIAIEDVRREVKILRALSGHNNLPHFYDAYEDHDNVYIVMELCEGGELLDRILSRGGKYTEEDAKTVMIQILNVVAFCHLQGVVHRDLKPENFLFTSKEDTSQLKAIDFGLSDYVRPDERLNDIVGSAYYVAPEVLHRSYSTEADIWSVGVIVYILLCGSRPFWARTESGIFRAVLKADPSFDDPPWPLLSSEARDFVKRLLNKDPRKRLTAAQALSHPWIKDSNDAKVPMDILVFKLMRAYLRSSSLRKAALRALSKTLTVDELFYLREQFALLEPSKNGTISLENIKSALMKMATDAMKDSRIPEFLGQLSALQYRRMDFEEFCAAALSVHQLEALDRWEQHARCAYELFEKEGNRPIMIDELASELGLGPSVPVHAVLHDWLRHTDGKLSFLGFVKLLHGVSSRTIKAH

SEQ ID NO: 83905 - protein, 415 aa, Arabidopsis thaliana
  peptide (1)..(415): Ceres Seq. ID no. 12672340
MTTAIAIEDVRREVKILRALSGHNNLPHFYDAYEDHDNVYIVMELCEGGELLDRILSRGGKYTEEDAKTVMIQILNVVAFCHLQGVVHRDLKPENFLFTSKEDTSQLKAIDFGLSDYVRPDERLNDIVGSAYYVAPEVLHRSYSTEADIWSVGVIVYILLCGSRPFWARTESGIFRAVLKADPSFDDPPWPLLSSEARDFVKRLLNKDPRKRLTAAQALSHPWIKDSNDAKVPMDILVFKLMRAYLRSSSLRKAALRALSKTLTVDELFYLREQFALLEPSKNGTISLENIKSALMKMATDAMKDSRIPEFLGQLSALQYRRMDFEEFCAAALSVHQLEALDRWEQHARCAYELFEKEGNRPIMIDELASELGLGPSVPVHAVLHDWLRHTDGKLSFLGFVKLLHGVSSRTIKAH

SEQ ID NO: 83906 - protein, 373 aa, Arabidopsis thaliana
  peptide (1)..(373): Ceres Seq. ID no. 12672341
MELCEGGELLDRILSRGGKYTEEDAKTVMIQILNVVAFCHLQGVVHRDLKPENFLFTSKEDTSQLKAIDFGLSDYVRPDERLNDIVGSAYYVAPEVLHRSYSTEADIWSVGVIVYILLCGSRPFWARTESGIFRAVLKADPSFDDPPWPLLSSEARDFVKRLLNKDPRKRLTAAQALSHPWIKDSNDAKVPMDILVFKLMRAYLRSSSLRKAALRALSKTLTVDELFYLREQFALLEPSKNGTISLENIKSALMKMATDAMKDSRIPEFLGQLSALQYRRMDFEEFCAAALSVHQLEALDRWEQHARCAYELFEKEGNRPIMIDELASELGLGPSVPVHAVLHDWLRHTDGKLSFLGFVKLLHGVSSRTIKAH

SEQ ID NO: 83907 - DNA, 1443 bp, Arabidopsis thaliana
  misc_feature (1)..(1443): Ceres Seq. ID no. 12672357
  misc_feature (1)..(1443): Ortholog of  Ceres SEQ ID NO 12612314 as cited in SEQ ID NO 51420
  misc_feature (1)..(1443): Ortholog of  Ceres SEQ ID NO 14311095 as cited in SEQ ID NO 53197
atgagttcctctagtgaatctcatctagccaccgccaaaacagctctcacagcggttgcatcagttgctgcagccgcaatactagctcgatcagtggttcaagattacatgccaaacgaggttcatgaatatatctctcacggctttcgcagattcttcagctacttctcttatcagatgacagctgtaatagaagaatttggaggttttgaacacaaccaagtgtttgaagctgcagaggcttatctctccaccaagatatctaattccactagaagaatcaaagttaacaaacttgagaaacagagcaattatagtgttactgttgaacgtgatgaggaagttgttgatatttttgatggcgtcaagcttagttggatccttgtatgtcgccatgtcgataaaaaggattttcgtaacccgagagatctcaactccactttgaaatcagaagtgcgtagttacgagcttagtttccgaaagaagttcaagaacatggttcttgaatcttatttaccgtttgttgtggaacaagctgcttctattaaacaaaagtttaaaacattgaagatcttcaccgttgattcttactccgtggagtggacctctgtgactctagatcatccttccacgtttcgcactctcgctctggatcccgaggtgaagaaaaacttggtggaggatcttgatcgattcgtgcagcggaaaggcttttacgggagagttggaaaagcttggaagagaggttatttgttgtatggtcctcccggtactggaaaatcaagcttgatcgcagctatagctaatcatcttaacttcgatatctatgacttagacttgacatcacttaacaacaatgctgagctacggaggttacttatgtctactgcaaatcgttccattctagttgtggaagatatagattgttcaatcgagttaaaagatcggtctactgatcaagaaaacaacgatccgttacataaaacggtgatgcattttgattcactatcagttatgttgttatgtgatcttttgcttattagcattactaatgttttggttagtcattttcaggtcacactctctggtctattgaattttgtagacggactatggtcaagttgtggtaacgagcggattatagtgtttacgactaactacagagaaaaattggatccagcattgttgaggccaggacgtatggacatgcacattcacatgtcgtattgcacaccagctgcttttaaggttttggcttcgaattatctcgagattcaagatcatatacttttcgagcagattgaagaatttatccgagaaattgaagttacaccagcagaagtagctgaacaactgatgaggagtgactctgtggataaagtactccaaggacttgttgagttcttaaaagccaagaagcaaatagataattcaaaagcttag

SEQ ID NO: 83908 - protein, 480 aa, Arabidopsis thaliana
  peptide (1)..(480): Ceres Seq. ID no. 12672358
MSSSSESHLATAKTALTAVASVAAAAILARSVVQDYMPNEVHEYISHGFRRFFSYFSYQMTAVIEEFGGFEHNQVFEAAEAYLSTKISNSTRRIKVNKLEKQSNYSVTVERDEEVVDIFDGVKLSWILVCRHVDKKDFRNPRDLNSTLKSEVRSYELSFRKKFKNMVLESYLPFVVEQAASIKQKFKTLKIFTVDSYSVEWTSVTLDHPSTFRTLALDPEVKKNLVEDLDRFVQRKGFYGRVGKAWKRGYLLYGPPGTGKSSLIAAIANHLNFDIYDLDLTSLNNNAELRRLLMSTANRSILVVEDIDCSIELKDRSTDQENNDPLHKTVMHFDSLSVMLLCDLLLISITNVLVSHFQVTLSGLLNFVDGLWSSCGNERIIVFTTNYREKLDPALLRPGRMDMHIHMSYCTPAAFKVLASNYLEIQDHILFEQIEEFIREIEVTPAEVAEQLMRSDSVDKVLQGLVEFLKAKKQIDNSKA

SEQ ID NO: 83909 - protein, 444 aa, Arabidopsis thaliana
  peptide (1)..(444): Ceres Seq. ID no. 12672359
MPNEVHEYISHGFRRFFSYFSYQMTAVIEEFGGFEHNQVFEAAEAYLSTKISNSTRRIKVNKLEKQSNYSVTVERDEEVVDIFDGVKLSWILVCRHVDKKDFRNPRDLNSTLKSEVRSYELSFRKKFKNMVLESYLPFVVEQAASIKQKFKTLKIFTVDSYSVEWTSVTLDHPSTFRTLALDPEVKKNLVEDLDRFVQRKGFYGRVGKAWKRGYLLYGPPGTGKSSLIAAIANHLNFDIYDLDLTSLNNNAELRRLLMSTANRSILVVEDIDCSIELKDRSTDQENNDPLHKTVMHFDSLSVMLLCDLLLISITNVLVSHFQVTLSGLLNFVDGLWSSCGNERIIVFTTNYREKLDPALLRPGRMDMHIHMSYCTPAAFKVLASNYLEIQDHILFEQIEEFIREIEVTPAEVAEQLMRSDSVDKVLQGLVEFLKAKKQIDNSKA

SEQ ID NO: 83910 - protein, 421 aa, Arabidopsis thaliana
  peptide (1)..(421): Ceres Seq. ID no. 12672360
MTAVIEEFGGFEHNQVFEAAEAYLSTKISNSTRRIKVNKLEKQSNYSVTVERDEEVVDIFDGVKLSWILVCRHVDKKDFRNPRDLNSTLKSEVRSYELSFRKKFKNMVLESYLPFVVEQAASIKQKFKTLKIFTVDSYSVEWTSVTLDHPSTFRTLALDPEVKKNLVEDLDRFVQRKGFYGRVGKAWKRGYLLYGPPGTGKSSLIAAIANHLNFDIYDLDLTSLNNNAELRRLLMSTANRSILVVEDIDCSIELKDRSTDQENNDPLHKTVMHFDSLSVMLLCDLLLISITNVLVSHFQVTLSGLLNFVDGLWSSCGNERIIVFTTNYREKLDPALLRPGRMDMHIHMSYCTPAAFKVLASNYLEIQDHILFEQIEEFIREIEVTPAEVAEQLMRSDSVDKVLQGLVEFLKAKKQIDNSKA

SEQ ID NO: 83911 - DNA, 1494 bp, Arabidopsis thaliana
  misc_feature (1)..(1494): Ceres Seq. ID no. 12672406
  misc_feature (1)..(1494): Ortholog of  Ceres SEQ ID NO 13599322 as cited in SEQ ID NO 0
atgttcaacaaaatcataaaactgggtcagaagaaattcaacaaatcagatcaacatcaccaagataacaacaacaacaacaacaatacctccaccaacaccgtcgttcgcggcagccgtaccaccacacccgctccatcctctgtttcaaatggagaatctcagacaacagctcaatctccttcacagacaccaaaccacccaatgttcacaacaacaccgatcctcgaagtacttccattgttaaaagacgtgtcttcctcagatcgacctcttctcttcatgaagaaagctcacatgtgttcttgccactgcgatttctctgatactttgataatgccacgcgagaaagagatcaaaagacagacactccttgaattggttgatttccttcactcttcttctggtaaagtcaatgagacgatgcagagtgagcttatacgtatggtttctgctaacattttccggtgtctcccaccggcttaccatgagaacactggtgctcctcctgaagggaatgatcctgaagaagaagagccttatcttgagccatggtggcctcatttgcagctcgtttacgagcttcttttgcggtatgtagtctcttccgaaatcgaacctaaaactgcgaaaaagttcatcaatcacacctttgtctcgaggttacttgatttgtttgactctgaggatcctagggagagggagtatttgaaaactgttcttcatagaatctatggcaagtttatatttcaccgaccgtttatcagatgttcgatttataacattttctacaagttcttgtatgagactgaaaggtgtattggcattggagagttattggagatcttaggaagtgtgatcaatggttttacagtacctatgagagaggagcataggctgtatcttgtgaaagctattttgccactacacaagtctaaaggtatctcgatttaccaccagcagttggcgtattgcgtgacacagtttgttgagaaagattataagttggctgatactgtgatccgcgggttgttgaagttttggccgcttaccaattgtcaaaaggaggttctcttcttgggagagttggaagaagtcttggatgctacagagccctctgagtttcagcaatgtgttgttcctctgtttacacagattgggaaatgtcttaatagtgcacacttccaggtggcagagagagcgctcttcttgtggaacaatgaacatatcgtagggctgatagctcagaacaaagacgtgatctttccgataatctttgaagcgttggagaggaacatgaaaggacattggaaccaagcggtgcatggtctctctgagaacgttagaagaatgtttctggagatggacactgagctctttgaggagtgcgagaaacaatatctcgagaacgaagctaaggcatgcgagttgttggaacaaagagaattgacatggaagagacttgaagaagctgcttctctagctgctaactaa

SEQ ID NO: 83912 - protein, 497 aa, Arabidopsis thaliana
  peptide (1)..(497): Ceres Seq. ID no. 12672407
MFNKIIKLGQKKFNKSDQHHQDNNNNNNNTSTNTVVRGSRTTTPAPSSVSNGESQTTAQSPSQTPNHPMFTTTPILEVLPLLKDVSSSDRPLLFMKKAHMCSCHCDFSDTLIMPREKEIKRQTLLELVDFLHSSSGKVNETMQSELIRMVSANIFRCLPPAYHENTGAPPEGNDPEEEEPYLEPWWPHLQLVYELLLRYVVSSEIEPKTAKKFINHTFVSRLLDLFDSEDPREREYLKTVLHRIYGKFIFHRPFIRCSIYNIFYKFLYETERCIGIGELLEILGSVINGFTVPMREEHRLYLVKAILPLHKSKGISIYHQQLAYCVTQFVEKDYKLADTVIRGLLKFWPLTNCQKEVLFLGELEEVLDATEPSEFQQCVVPLFTQIGKCLNSAHFQVAERALFLWNNEHIVGLIAQNKDVIFPIIFEALERNMKGHWNQAVHGLSENVRRMFLEMDTELFEECEKQYLENEAKACELLEQRELTWKRLEEAASLAAN

SEQ ID NO: 83913 - protein, 429 aa, Arabidopsis thaliana
  peptide (1)..(429): Ceres Seq. ID no. 12672408
MFTTTPILEVLPLLKDVSSSDRPLLFMKKAHMCSCHCDFSDTLIMPREKEIKRQTLLELVDFLHSSSGKVNETMQSELIRMVSANIFRCLPPAYHENTGAPPEGNDPEEEEPYLEPWWPHLQLVYELLLRYVVSSEIEPKTAKKFINHTFVSRLLDLFDSEDPREREYLKTVLHRIYGKFIFHRPFIRCSIYNIFYKFLYETERCIGIGELLEILGSVINGFTVPMREEHRLYLVKAILPLHKSKGISIYHQQLAYCVTQFVEKDYKLADTVIRGLLKFWPLTNCQKEVLFLGELEEVLDATEPSEFQQCVVPLFTQIGKCLNSAHFQVAERALFLWNNEHIVGLIAQNKDVIFPIIFEALERNMKGHWNQAVHGLSENVRRMFLEMDTELFEECEKQYLENEAKACELLEQRELTWKRLEEAASLAAN

SEQ ID NO: 83914 - protein, 403 aa, Arabidopsis thaliana
  peptide (1)..(403): Ceres Seq. ID no. 12672409
MKKAHMCSCHCDFSDTLIMPREKEIKRQTLLELVDFLHSSSGKVNETMQSELIRMVSANIFRCLPPAYHENTGAPPEGNDPEEEEPYLEPWWPHLQLVYELLLRYVVSSEIEPKTAKKFINHTFVSRLLDLFDSEDPREREYLKTVLHRIYGKFIFHRPFIRCSIYNIFYKFLYETERCIGIGELLEILGSVINGFTVPMREEHRLYLVKAILPLHKSKGISIYHQQLAYCVTQFVEKDYKLADTVIRGLLKFWPLTNCQKEVLFLGELEEVLDATEPSEFQQCVVPLFTQIGKCLNSAHFQVAERALFLWNNEHIVGLIAQNKDVIFPIIFEALERNMKGHWNQAVHGLSENVRRMFLEMDTELFEECEKQYLENEAKACELLEQRELTWKRLEEAASLAAN

SEQ ID NO: 83915 - DNA, 783 bp, Arabidopsis thaliana
  misc_feature (1)..(783): Ceres Seq. ID no. 12672427
  misc_feature (1)..(783): Ortholog of  Ceres SEQ ID NO 14310616 as cited in SEQ ID NO 55699
  misc_feature (1)..(783): Ortholog of  Ceres SEQ ID NO 13596519 as cited in SEQ ID NO 62572
  misc_feature (1)..(783): Ortholog of  Ceres SEQ ID NO 12625108 as cited in SEQ ID NO 68102
atggcaatcaatccattgattctcttaaccatattcccactcttccttctcttgagcttcaccgacgccggaatccctagagtcttctcaggtggttcttggcaaaccgctcacgccactttctacggtggaaacgatgcttcgggaacaatgggtggcgcgtgtggatacgggaatctgtatagccaaggatacggaacaaacacggcggcgctgagcacatcgttgtttaacagtggtcaaagctgcggcgcatgcttcgaaatcaaatgtgtcaatgatcccaaatggtgtcacccgggtaatccttctgtcttcgtaaccgcaaccaacttttgccctccaaacttagcccagcctagcgacaatggtggctggtgcaacccgccacgctctcatttcgacctcgccatgcccgttttcctcaagatcgctgagtatcgtgccggcattgtccccatctcttaccgcagggtggcatgtaggaagagtggagggataaggttcacgatcaacggtcaccgttacttcaacttggtgctgattacgaacgtggccggagcaggagacatcgcgaggacgagtgtgaaaggttcaaagactggttggatgagtttaactaggaactggggacagaactggcagtctaatgctgttctcgttggtcagtcactttccttccgtgttacatccagcgatcgtagaacctctacttcatggaacatcgctccttcgaactggcagtttggacaaacctttgtcggaaagaatttcagggtctaa

SEQ ID NO: 83916 - protein, 260 aa, Arabidopsis thaliana
  peptide (1)..(260): Ceres Seq. ID no. 12672428
MAINPLILLTIFPLFLLLSFTDAGIPRVFSGGSWQTAHATFYGGNDASGTMGGACGYGNLYSQGYGTNTAALSTSLFNSGQSCGACFEIKCVNDPKWCHPGNPSVFVTATNFCPPNLAQPSDNGGWCNPPRSHFDLAMPVFLKIAEYRAGIVPISYRRVACRKSGGIRFTINGHRYFNLVLITNVAGAGDIARTSVKGSKTGWMSLTRNWGQNWQSNAVLVGQSLSFRVTSSDRRTSTSWNIAPSNWQFGQTFVGKNFRV

SEQ ID NO: 83917 - protein, 210 aa, Arabidopsis thaliana
  peptide (1)..(210): Ceres Seq. ID no. 12672429
MGGACGYGNLYSQGYGTNTAALSTSLFNSGQSCGACFEIKCVNDPKWCHPGNPSVFVTATNFCPPNLAQPSDNGGWCNPPRSHFDLAMPVFLKIAEYRAGIVPISYRRVACRKSGGIRFTINGHRYFNLVLITNVAGAGDIARTSVKGSKTGWMSLTRNWGQNWQSNAVLVGQSLSFRVTSSDRRTSTSWNIAPSNWQFGQTFVGKNFRV

SEQ ID NO: 83918 - DNA, 1328 bp, Arabidopsis thaliana
  misc_feature (1)..(1328): Ceres Seq. ID no. 12672442
  misc_feature (1)..(1328): Ortholog of  Ceres SEQ ID NO 15178083 as cited in SEQ ID NO 56185
  misc_feature (1)..(1328): Ortholog of  Ceres SEQ ID NO 15225046 as cited in SEQ ID NO 57061
  misc_feature (1)..(1328): Ortholog of  Ceres SEQ ID NO 15179881 as cited in SEQ ID NO 66861
aaaaatcctgcaaaagatttgttttcattattttattttatttaggaaactttgtcttttttccttcctctgcgctgtcttcttcaaaaaacaaaatattttgttttttgttctattagtaactttgctttctccacaattcaaagctaatttagttctattcatttttccctctctcttttgcaaagatttggtagaagaagaaaaataaaaagagttataatcaatcagatcttgttttaagtgcagactctttatttctcttcctcacctaagcttcagcatcgtaaatttaaaactaaaatcgcatcaaatcccggagataggaaagaaaataattgattgtttctagtgaagaacaaaaaaaaaaaagtcgaagactttacatctgggttcatcgatttgagataagatcttctttatttgttatcttcaagtttctgcaatgggtatggcagcagaatcgcagtttcatgttttagctgttgatgatagtttatttgatcggaaacttattgagagattgcttcaaaagtcttcgtgtcaagtaacaactgttgattctggctcaaaggctttggagtttctgggtttaagacaaagtactgatagtaacgacccaaatgcgttttctaaggctcctgttaatcaccaggtagttgaagtgaatcttataattacagattattgtatgcctggcatgactggttatgatttgctcaagaaagtcaaggaatcatcagcttttagagatataccagtagttatcatgtcctcagagaacgttcctgcaagaatcagcagatgtttagaagaaggagctgaagagtttttcttgaaaccagtaagattggctgatcttaacaagttgaaacctcatatgatgaaaacaaagttgaagaaccagaagctggaggagattgagacaacttcaaaagtcgaaaatggagtccccactgcagtagctgatccagagattaaagattcaacaaacattgaaattgaaatcttgcctctgcaacaagatctgctattagttcaacaagaggagcaaacattgagtatcaacaacaagaggaagtcagtggaagaagggatttcaactgatagagcacgtcctagattcgacggtatcgcaaccgctgtctgatctaccagctatgatacttcttttttcggtttctgatttagatttttgtagattttcttaggaatgcttctactggtacagtacatggtttcagtagggaatgcagagaggggaatatgatgatgatgttgtatgtggggataatgtttataagtacatcagtaaatcttacatggtt

SEQ ID NO: 83919 - protein, 234 aa, Arabidopsis thaliana
  peptide (1)..(234): Ceres Seq. ID no. 12672443
MGMAAESQFHVLAVDDSLFDRKLIERLLQKSSCQVTTVDSGSKALEFLGLRQSTDSNDPNAFSKAPVNHQVVEVNLIITDYCMPGMTGYDLLKKVKESSAFRDIPVVIMSSENVPARISRCLEEGAEEFFLKPVRLADLNKLKPHMMKTKLKNQKLEEIETTSKVENGVPTAVADPEIKDSTNIEIEILPLQQDLLLVQQEEQTLSINNKRKSVEEGISTDRARPRFDGIATAV

SEQ ID NO: 83920 - protein, 232 aa, Arabidopsis thaliana
  peptide (1)..(232): Ceres Seq. ID no. 12672444
MAAESQFHVLAVDDSLFDRKLIERLLQKSSCQVTTVDSGSKALEFLGLRQSTDSNDPNAFSKAPVNHQVVEVNLIITDYCMPGMTGYDLLKKVKESSAFRDIPVVIMSSENVPARISRCLEEGAEEFFLKPVRLADLNKLKPHMMKTKLKNQKLEEIETTSKVENGVPTAVADPEIKDSTNIEIEILPLQQDLLLVQQEEQTLSINNKRKSVEEGISTDRARPRFDGIATAV

SEQ ID NO: 83921 - protein, 152 aa, Arabidopsis thaliana
  peptide (1)..(152): Ceres Seq. ID no. 12672445
MPGMTGYDLLKKVKESSAFRDIPVVIMSSENVPARISRCLEEGAEEFFLKPVRLADLNKLKPHMMKTKLKNQKLEEIETTSKVENGVPTAVADPEIKDSTNIEIEILPLQQDLLLVQQEEQTLSINNKRKSVEEGISTDRARPRFDGIATAV

SEQ ID NO: 83922 - DNA, 2143 bp, Arabidopsis thaliana
  misc_feature (1)..(2143): Ceres Seq. ID no. 12672458
  misc_feature (1)..(2143): Ortholog of  Ceres SEQ ID NO 13654989 as cited in SEQ ID NO 63117
  misc_feature (1)..(2143): Ortholog of  Ceres SEQ ID NO 13655640 as cited in SEQ ID NO 63844
aaaacacccaccaatgtctcgtgaacttattattctctgccaaccaattcttgttctgttccttactctgttttacaattctcatggctacttcgtctcacaaggatctgtaggaatcggcttcaacggttacttcactttaaccaacaccacaaaacacacattcggtcaagctttcgaaaacgagcacgttgaaatcaagaactcatcgacaggtgtcatctcatctttctcagtcaacttcttctttgcgatcgtccctgaacataaccagcaaggctcacacggtatgactttcgtcatctctcccacaagaggccttcccggagcttcctccgatcaatacctcggaatctttaacaaaacaaacaacggtaaagcctcgaataacgttatagctatcgagttagatattcataaagacgaagagtttggagatattgatgataatcatgttgggattaatattaacggtttgagatctgttgcctctgcttctgctggttactatgatgataaagatggaagctttaaaaaactttctttgatcagcagagaggtaatgaggctttccatcgtttatagtcaacctgatcaacagctcaatgttactttattccctgctgagatccctgttccgccactaaaaccgctcttgtctttgaaccgagatctctcgccgtatttgcttgagaaaatgtatcttggattcactgcatcgacggggtcagttggagcaattcattacttgatgggttggttagttaatggtgtaatcgagtatccgagattggagcttagtataccagtccttcctccatatccaaagaaaacatctaatagaacgaaaactgttttagccgtctgcttaacggtatctgtgtttgctgcgtttgtcgcttcgtggatcggtttcgtcttctatttgaggcataagaaggttaaagaggttcttgaagaatgggagattcaatatggacctcataggtttgcttataaggagcttttcaatgccacaaagggtttcaaggagaaacaacttcttggtaaaggaggctttggtcaagtctataaaggaacacttccgggttctgatgcagagatcgctgtgaagcggacttctcatgattcaagacaagggatgagcgagtttctagccgagatatcgaccattggtcgtctcagacatccaaatttagtcaggcttttaggatactgtaggcataaagagaatctctacttggtgtatgactatatgcctaatggaagccttgacaagtatctaaaccgtagcgagaatcaagaacggcttacttgggaacaacgtttcaggatcatcaaagatgttgcaactgctctactacacctgcatcaagaatgggtacaagtcatcattcatcgagatatcaaaccagctaatgttttaatcgacaatgaaatgaatgcgaggctcggggatttcggactggcgaaactgtatgatcagggattcgatcctgaaacatctaaagtagcgggaacattcggatatatcgcaccagagtttctaagaacaggaagagcaaccacaagcactgatgtttacgcctttgggttggtaatgcttgaagtagtgtgtggtagaaggataattgagagacgtgcagcagaaaatgaagaatatcttgtggattggatcttagagctttgggaaaatgggaaaattttcgatgcagcagaggaaagtatacgtcaagaacaaaacaggggacaagttgagcttgttttgaagctaggtgtgttgtgttcgcatcaagctgcatcgataagaccggctatgagtgtggtaatgaggattttgaatggagtttcacagctaccagataatcttcttgatgttgtaagggctgagaaatttagagaatggcctgagacatcaatggaattactactacttgatgtgaatacatcgagttcattggagttaaccgactcttcttttgtctcccacggccgctgaaattttaagtttaccactgattctttgtttgctatgaagatgtatcacaactgagattattacacattgtaatacacagccgaatgttttttttcctggtatgtacaagaataagaccacaccgcctcctccaaacattttttt

SEQ ID NO: 83923 - protein, 665 aa, Arabidopsis thaliana
  peptide (1)..(665): Ceres Seq. ID no. 12672459
KHPPMSRELIILCQPILVLFLTLFYNSHGYFVSQGSVGIGFNGYFTLTNTTKHTFGQAFENEHVEIKNSSTGVISSFSVNFFFAIVPEHNQQGSHGMTFVISPTRGLPGASSDQYLGIFNKTNNGKASNNVIAIELDIHKDEEFGDIDDNHVGININGLRSVASASAGYYDDKDGSFKKLSLISREVMRLSIVYSQPDQQLNVTLFPAEIPVPPLKPLLSLNRDLSPYLLEKMYLGFTASTGSVGAIHYLMGWLVNGVIEYPRLELSIPVLPPYPKKTSNRTKTVLAVCLTVSVFAAFVASWIGFVFYLRHKKVKEVLEEWEIQYGPHRFAYKELFNATKGFKEKQLLGKGGFGQVYKGTLPGSDAEIAVKRTSHDSRQGMSEFLAEISTIGRLRHPNLVRLLGYCRHKENLYLVYDYMPNGSLDKYLNRSENQERLTWEQRFRIIKDVATALLHLHQEWVQVIIHRDIKPANVLIDNEMNARLGDFGLAKLYDQGFDPETSKVAGTFGYIAPEFLRTGRATTSTDVYAFGLVMLEVVCGRRIIERRAAENEEYLVDWILELWENGKIFDAAEESIRQEQNRGQVELVLKLGVLCSHQAASIRPAMSVVMRILNGVSQLPDNLLDVVRAEKFREWPETSMELLLLDVNTSSSLELTDSSFVSHGR

SEQ ID NO: 83924 - protein, 661 aa, Arabidopsis thaliana
  peptide (1)..(661): Ceres Seq. ID no. 12672460
MSRELIILCQPILVLFLTLFYNSHGYFVSQGSVGIGFNGYFTLTNTTKHTFGQAFENEHVEIKNSSTGVISSFSVNFFFAIVPEHNQQGSHGMTFVISPTRGLPGASSDQYLGIFNKTNNGKASNNVIAIELDIHKDEEFGDIDDNHVGININGLRSVASASAGYYDDKDGSFKKLSLISREVMRLSIVYSQPDQQLNVTLFPAEIPVPPLKPLLSLNRDLSPYLLEKMYLGFTASTGSVGAIHYLMGWLVNGVIEYPRLELSIPVLPPYPKKTSNRTKTVLAVCLTVSVFAAFVASWIGFVFYLRHKKVKEVLEEWEIQYGPHRFAYKELFNATKGFKEKQLLGKGGFGQVYKGTLPGSDAEIAVKRTSHDSRQGMSEFLAEISTIGRLRHPNLVRLLGYCRHKENLYLVYDYMPNGSLDKYLNRSENQERLTWEQRFRIIKDVATALLHLHQEWVQVIIHRDIKPANVLIDNEMNARLGDFGLAKLYDQGFDPETSKVAGTFGYIAPEFLRTGRATTSTDVYAFGLVMLEVVCGRRIIERRAAENEEYLVDWILELWENGKIFDAAEESIRQEQNRGQVELVLKLGVLCSHQAASIRPAMSVVMRILNGVSQLPDNLLDVVRAEKFREWPETSMELLLLDVNTSSSLELTDSSFVSHGR

SEQ ID NO: 83925 - protein, 569 aa, Arabidopsis thaliana
  peptide (1)..(569): Ceres Seq. ID no. 12672461
MTFVISPTRGLPGASSDQYLGIFNKTNNGKASNNVIAIELDIHKDEEFGDIDDNHVGININGLRSVASASAGYYDDKDGSFKKLSLISREVMRLSIVYSQPDQQLNVTLFPAEIPVPPLKPLLSLNRDLSPYLLEKMYLGFTASTGSVGAIHYLMGWLVNGVIEYPRLELSIPVLPPYPKKTSNRTKTVLAVCLTVSVFAAFVASWIGFVFYLRHKKVKEVLEEWEIQYGPHRFAYKELFNATKGFKEKQLLGKGGFGQVYKGTLPGSDAEIAVKRTSHDSRQGMSEFLAEISTIGRLRHPNLVRLLGYCRHKENLYLVYDYMPNGSLDKYLNRSENQERLTWEQRFRIIKDVATALLHLHQEWVQVIIHRDIKPANVLIDNEMNARLGDFGLAKLYDQGFDPETSKVAGTFGYIAPEFLRTGRATTSTDVYAFGLVMLEVVCGRRIIERRAAENEEYLVDWILELWENGKIFDAAEESIRQEQNRGQVELVLKLGVLCSHQAASIRPAMSVVMRILNGVSQLPDNLLDVVRAEKFREWPETSMELLLLDVNTSSSLELTDSSFVSHGR

SEQ ID NO: 83926 - DNA, 1980 bp, Arabidopsis thaliana
  misc_feature (1)..(1980): Ceres Seq. ID no. 12672462
  misc_feature (1)..(1980): Ortholog of  Ceres SEQ ID NO 13654989 as cited in SEQ ID NO 63117
  misc_feature (1)..(1980): Ortholog of  Ceres SEQ ID NO 13655640 as cited in SEQ ID NO 63844
atgtctcataaagtcttacaaatagttctcgttctgttgcttactctgttttcatctactcacaactccaatggcaacttcctcatggaagaagctgcagctgcaggtttaaacggttattgccttttaacaaacaccacgaagcattcctacggtcaagctttcaacaacactcccgttcccatcaagaactcatctttctcattcaacatcatcttcgggatcgtccctgaacataagcagcaaggttcacacggtatggctttcgttttctctcctacaagaggccttcccggagcttcccccgatcaatacctgggaatctttaacgagacaaacaacggtaaagcctcgaataacgttatagctatcgagttagatatacgaaaagacgaagagtttggagatattgatgataatcatgttgggattaacattaatggtttgacatctgttgcctctgcttctgctggttactatgatgatgaagatggaaacttcaaaaagctttctttgatcagcacaaaggtaatgaggctttccatcgtttatagtcacaccgataaacagctcaatgttactttattacctgctgaaatctctgttccgccacaaaaatcgctcttgtctttgaaccgagatctctcgccctattttttggaggagacgtacttgggtttcacggcatcgaccgggtcgatcggagcactctattatgtgatgcaattttcctatgaagaaggagttatatatccagcatgggaccttggcgtaatcccaacccttcctccatatccaaagaagtcgtatgatagaacacggaggattttagcggtctgcttaacgttggccgtgttcactgcattagtcgcttccggaataggttttgtcttttatgtgaggcataagaaggttaaggaggttcttgaagaatgggagattcagaatggacctcataggttttcttataaggagcttttcaatgccacaaagggtttcaaagagaaacaacttcttgggaaaggaggctttggtcaagtctacaaaggaatgcttccgggttccgatgcagagatcgctgtaaaacggacttctcatgattcaagacaagggatgagcgaatttctagccgagatatcgaccattggtcgtctcagacatccaaatctagtcaggcttttgggatattgtaagcataaagagaatctctacttagtttatgactttatgcctaatggaagccttgacaggtgtctaacccgtagcaacacgaatgaaaatcaagaacggcttacttgggaacaacgtttcaagatcatcaaagacgttgcaactgctctactacacctgcatcaagaatgggtacaagtcatcgttcatcgagatataaaaccggctaatgttctactcgaccacggcatgaatgcgaggctcggggatttcggattggcgaagctgtatgatcagggatttgatcctcagacatctagagtagcgggaacattaggttatattgcacctgagctcttaagaacaggaagagcaaccacaagcacagatgtttacgcctttgggttggttatgcttgaagtcgtttgtggtagaagattgattgagagacgtgcagcagaaaatgaagcggttcttgttgattggattttagagctttgggaaagtgggaaacttttcgatgcagctgaggaaagtattcgtcaagaacaaaacagaggagaaattgagcttgttttgaagctaggtctgttgtgtgcacatcacactgaattgattagaccgaacatgagtgcggttttgcagatcttgaatggcgtttcgcatcttcccaataatcttcttgatgttgttagggctgagagattgagaggaattcctgagacatcaatggaagtactacttggtcttgatctgaattcttttggtacaatgacgttgacgaattcttttgtgtcccatggacgctga

SEQ ID NO: 83927 - protein, 659 aa, Arabidopsis thaliana
  peptide (1)..(659): Ceres Seq. ID no. 12672463
MSHKVLQIVLVLLLTLFSSTHNSNGNFLMEEAAAAGLNGYCLLTNTTKHSYGQAFNNTPVPIKNSSFSFNIIFGIVPEHKQQGSHGMAFVFSPTRGLPGASPDQYLGIFNETNNGKASNNVIAIELDIRKDEEFGDIDDNHVGININGLTSVASASAGYYDDEDGNFKKLSLISTKVMRLSIVYSHTDKQLNVTLLPAEISVPPQKSLLSLNRDLSPYFLEETYLGFTASTGSIGALYYVMQFSYEEGVIYPAWDLGVIPTLPPYPKKSYDRTRRILAVCLTLAVFTALVASGIGFVFYVRHKKVKEVLEEWEIQNGPHRFSYKELFNATKGFKEKQLLGKGGFGQVYKGMLPGSDAEIAVKRTSHDSRQGMSEFLAEISTIGRLRHPNLVRLLGYCKHKENLYLVYDFMPNGSLDRCLTRSNTNENQERLTWEQRFKIIKDVATALLHLHQEWVQVIVHRDIKPANVLLDHGMNARLGDFGLAKLYDQGFDPQTSRVAGTLGYIAPELLRTGRATTSTDVYAFGLVMLEVVCGRRLIERRAAENEAVLVDWILELWESGKLFDAAEESIRQEQNRGEIELVLKLGLLCAHHTELIRPNMSAVLQILNGVSHLPNNLLDVVRAERLRGIPETSMEVLLGLDLNSFGTMTLTNSFVSHGR

SEQ ID NO: 83928 - protein, 631 aa, Arabidopsis thaliana
  peptide (1)..(631): Ceres Seq. ID no. 12672464
MEEAAAAGLNGYCLLTNTTKHSYGQAFNNTPVPIKNSSFSFNIIFGIVPEHKQQGSHGMAFVFSPTRGLPGASPDQYLGIFNETNNGKASNNVIAIELDIRKDEEFGDIDDNHVGININGLTSVASASAGYYDDEDGNFKKLSLISTKVMRLSIVYSHTDKQLNVTLLPAEISVPPQKSLLSLNRDLSPYFLEETYLGFTASTGSIGALYYVMQFSYEEGVIYPAWDLGVIPTLPPYPKKSYDRTRRILAVCLTLAVFTALVASGIGFVFYVRHKKVKEVLEEWEIQNGPHRFSYKELFNATKGFKEKQLLGKGGFGQVYKGMLPGSDAEIAVKRTSHDSRQGMSEFLAEISTIGRLRHPNLVRLLGYCKHKENLYLVYDFMPNGSLDRCLTRSNTNENQERLTWEQRFKIIKDVATALLHLHQEWVQVIVHRDIKPANVLLDHGMNARLGDFGLAKLYDQGFDPQTSRVAGTLGYIAPELLRTGRATTSTDVYAFGLVMLEVVCGRRLIERRAAENEAVLVDWILELWESGKLFDAAEESIRQEQNRGEIELVLKLGLLCAHHTELIRPNMSAVLQILNGVSHLPNNLLDVVRAERLRGIPETSMEVLLGLDLNSFGTMTLTNSFVSHGR

SEQ ID NO: 83929 - protein, 573 aa, Arabidopsis thaliana
  peptide (1)..(573): Ceres Seq. ID no. 12672465
MAFVFSPTRGLPGASPDQYLGIFNETNNGKASNNVIAIELDIRKDEEFGDIDDNHVGININGLTSVASASAGYYDDEDGNFKKLSLISTKVMRLSIVYSHTDKQLNVTLLPAEISVPPQKSLLSLNRDLSPYFLEETYLGFTASTGSIGALYYVMQFSYEEGVIYPAWDLGVIPTLPPYPKKSYDRTRRILAVCLTLAVFTALVASGIGFVFYVRHKKVKEVLEEWEIQNGPHRFSYKELFNATKGFKEKQLLGKGGFGQVYKGMLPGSDAEIAVKRTSHDSRQGMSEFLAEISTIGRLRHPNLVRLLGYCKHKENLYLVYDFMPNGSLDRCLTRSNTNENQERLTWEQRFKIIKDVATALLHLHQEWVQVIVHRDIKPANVLLDHGMNARLGDFGLAKLYDQGFDPQTSRVAGTLGYIAPELLRTGRATTSTDVYAFGLVMLEVVCGRRLIERRAAENEAVLVDWILELWESGKLFDAAEESIRQEQNRGEIELVLKLGLLCAHHTELIRPNMSAVLQILNGVSHLPNNLLDVVRAERLRGIPETSMEVLLGLDLNSFGTMTLTNSFVSHGR

SEQ ID NO: 83930 - DNA, 843 bp, Arabidopsis thaliana
  misc_feature (1)..(843): Ceres Seq. ID no. 12672482
  misc_feature (1)..(843): Ortholog of  Ceres SEQ ID NO 13582624 as cited in SEQ ID NO 56287
  misc_feature (1)..(843): Ortholog of  Ceres SEQ ID NO 14307280 as cited in SEQ ID NO 59443
  misc_feature (1)..(843): Ortholog of  Ceres SEQ ID NO 14316536 as cited in SEQ ID NO 60272
  misc_feature (1)..(843): Ortholog of  Ceres SEQ ID NO 13597264 as cited in SEQ ID NO 63897
  misc_feature (1)..(843): Ortholog of  Ceres SEQ ID NO 13598570 as cited in SEQ ID NO 65434
  misc_feature (1)..(843): Ortholog of  Ceres SEQ ID NO 13656452 as cited in SEQ ID NO 65745
  misc_feature (1)..(843): Ortholog of  Ceres SEQ ID NO 13660333 as cited in SEQ ID NO 67464
  misc_feature (1)..(843): Ortholog of  Ceres SEQ ID NO 13596238 as cited in SEQ ID NO 68834
  misc_feature (1)..(843): Ortholog of  Ceres SEQ ID NO 15174329 as cited in SEQ ID NO 0
atggagaaacaaatctctctattgctctgtctactcctcttcatcttctcaatatcatcctctctccatgaaaccgaagctcgaaaacacaataaatataaacccgcaccgatcatgagcctagtcccaagaactctctacgaccaaatcttcatccacaaggacaacaacgcatgccctgcaaaaggtttctacccctatgaagctttcgtggaggctacaagatccttcccgaagttcgggagcgtaggaaacttttggacaaggcgacgcgaagtggctgcgtttttggcgcagatatctcacgagacaacaggtggttgggccacggcaccagacggaccatatgcgtggggattgtgttttaaagaggaagtgagtccacagagtaattattgtgatgcttctaataaggattggccttgtgtttctggcaagtcttacaaaggaagaggtcccattcaactatcttggaattacaattacggacaggcgggtcgagcattgggtttcgacggtttacagaacccagaacttgtagccaacaactccgttttagctttcaagacagctctttggttttggatgaccgaacagactcctaaaccgtcctgccataacgttatggtcaaccgatacagaccgacgaaagcagatagagcagcaaaccggactgtcggttatggtttagtcaccaacatcataaacggcggtttagaatgtgggattccaggagatggacgggtcactgaccgggtcgggtatttccaaagatacgctcagttgtttaaagtcaccacaggacctaatttagactgcgagaaccaaagacccttctcctaa

SEQ ID NO: 83931 - protein, 280 aa, Arabidopsis thaliana
  peptide (1)..(280): Ceres Seq. ID no. 12672483
MEKQISLLLCLLLFIFSISSSLHETEARKHNKYKPAPIMSLVPRTLYDQIFIHKDNNACPAKGFYPYEAFVEATRSFPKFGSVGNFWTRRREVAAFLAQISHETTGGWATAPDGPYAWGLCFKEEVSPQSNYCDASNKDWPCVSGKSYKGRGPIQLSWNYNYGQAGRALGFDGLQNPELVANNSVLAFKTALWFWMTEQTPKPSCHNVMVNRYRPTKADRAANRTVGYGLVTNIINGGLECGIPGDGRVTDRVGYFQRYAQLFKVTTGPNLDCENQRPFS

SEQ ID NO: 83932 - protein, 242 aa, Arabidopsis thaliana
  peptide (1)..(242): Ceres Seq. ID no. 12672484
MSLVPRTLYDQIFIHKDNNACPAKGFYPYEAFVEATRSFPKFGSVGNFWTRRREVAAFLAQISHETTGGWATAPDGPYAWGLCFKEEVSPQSNYCDASNKDWPCVSGKSYKGRGPIQLSWNYNYGQAGRALGFDGLQNPELVANNSVLAFKTALWFWMTEQTPKPSCHNVMVNRYRPTKADRAANRTVGYGLVTNIINGGLECGIPGDGRVTDRVGYFQRYAQLFKVTTGPNLDCENQRPFS

SEQ ID NO: 83933 - DNA, 1826 bp, Arabidopsis thaliana
  misc_feature (1)..(1826): Ceres Seq. ID no. 12672507
  misc_feature (1)..(1826): Ortholog of  Ceres SEQ ID NO 15169264 as cited in SEQ ID NO 55026
gtctgaaaccaaacaaagaaaatacacgaaggaaggaaaagaaaagtaaaaagaaaagctttctgcaaaatccaaacatgtccgccaagatttcaatattccaagctcttgtctttctattctaccggtttatcctccggcgatatcggaactctaaaccaaaataccaaaatggcccttcttctctcctccaatccgacctatcacgccacacattgatcttcaacgtagaaggagctcttctcaaatccgactctctcttcccttacttcatgttagtagcatttgaggcgggaggcgtaataaggtcatttctcctcttcattctctatccattgataagcttgatgagccatgagatgggtgtcaaagtgatggtaatggtgagcttcttcgggatcaaaaaagaaggttttcgagcggggagagcggttttgcctaaatactttctagaagatgtcggactcgagatgttcgaagtgttgaagagaggagggaagaaaatcggagtgagtgatgatcttcctcaagttatgatcgaagggttcttgagagattacttggagattgacgttgtggtcgggagagaaatgaaagtcgttggaggttattatctaggtatcatggaggataaaaccaaacatgatcttgtctttgatgagttagttcgtaaagagagactaaacaccggtcgtgttattggcatcacttccttcaatacatctcttcaccgatatctattctctcagttttgccaggaaatttatttcgtgaagaaatcagacaagcgaagctggcaaaccctaccacgaagccagtaccctaaaccattgattttccatgatggccgtctcgcgatcaaaccaaccctaatgaacactttggtcttgttcatgtggggtcctttcgcagccgcagccgcagcagccagactcttcgtctctctttgcatcccttactctttatcaatcccgatcctcgccttttccggttgcagactaaccgtcactaacgactacgtttcatctcaaaaacaaaaaccaagtcaacgcaaaggttgtctctttgtttgtaaccataggactttattggaccctctctatgttgcattcgctttgagaaagaaaaacatcaaaactgtaacgtatagtttgagtagggtatctgagattttggctccgatcaagacggtgagactgacccgtgatcgggtgagcgacggtcaagccatggagaaattgttaaccgaaggagatctcgttgtttgtcctgaaggaaccacttgtagagaaccttacctgcttaggtttagccctttgttcaccgaggttagtgatgtcatcgttcccgtggctgtgacggtacacgtgaccttcttctacggtacaacggcgagtggtcttaaggcacttgacccgcttttcttcctcttggatccttatcctacctacaccatccaatttctcgaccctgtctccggtgccacgtgccaagatcctgatggaaagttgaagtttgaggtggccaacaatgttcagagtgatattgggaaggcgttggatttcgagtgcacaagtctcactagaaaagacaagtatttgatcttggccggtaataatggagtagttaagaaaaattaaaatttgttttaggatgatgagtgagtgatgagttcggttctttgggtatgtaagtaaccaatcgattatttcatttgtttattaataatgtctacgtaaatgtaactacaatctttttttcttggtaatgtacacatatgttctatatcatatccaaaatctttgtcagacaattttgcctttcat

SEQ ID NO: 83934 - protein, 545 aa, Arabidopsis thaliana
  peptide (1)..(545): Ceres Seq. ID no. 12672508
LKPNKENTRRKEKKSKKKSFLQNPNMSAKISIFQALVFLFYRFILRRYRNSKPKYQNGPSSLLQSDLSRHTLIFNVEGALLKSDSLFPYFMLVAFEAGGVIRSFLLFILYPLISLMSHEMGVKVMVMVSFFGIKKEGFRAGRAVLPKYFLEDVGLEMFEVLKRGGKKIGVSDDLPQVMIEGFLRDYLEIDVVVGREMKVVGGYYLGIMEDKTKHDLVFDELVRKERLNTGRVIGITSFNTSLHRYLFSQFCQEIYFVKKSDKRSWQTLPRSQYPKPLIFHDGRLAIKPTLMNTLVLFMWGPFAAAAAAARLFVSLCIPYSLSIPILAFSGCRLTVTNDYVSSQKQKPSQRKGCLFVCNHRTLLDPLYVAFALRKKNIKTVTYSLSRVSEILAPIKTVRLTRDRVSDGQAMEKLLTEGDLVVCPEGTTCREPYLLRFSPLFTEVSDVIVPVAVTVHVTFFYGTTASGLKALDPLFFLLDPYPTYTIQFLDPVSGATCQDPDGKLKFEVANNVQSDIGKALDFECTSLTRKDKYLILAGNNGVVKKN

SEQ ID NO: 83935 - protein, 520 aa, Arabidopsis thaliana
  peptide (1)..(520): Ceres Seq. ID no. 12672509
MSAKISIFQALVFLFYRFILRRYRNSKPKYQNGPSSLLQSDLSRHTLIFNVEGALLKSDSLFPYFMLVAFEAGGVIRSFLLFILYPLISLMSHEMGVKVMVMVSFFGIKKEGFRAGRAVLPKYFLEDVGLEMFEVLKRGGKKIGVSDDLPQVMIEGFLRDYLEIDVVVGREMKVVGGYYLGIMEDKTKHDLVFDELVRKERLNTGRVIGITSFNTSLHRYLFSQFCQEIYFVKKSDKRSWQTLPRSQYPKPLIFHDGRLAIKPTLMNTLVLFMWGPFAAAAAAARLFVSLCIPYSLSIPILAFSGCRLTVTNDYVSSQKQKPSQRKGCLFVCNHRTLLDPLYVAFALRKKNIKTVTYSLSRVSEILAPIKTVRLTRDRVSDGQAMEKLLTEGDLVVCPEGTTCREPYLLRFSPLFTEVSDVIVPVAVTVHVTFFYGTTASGLKALDPLFFLLDPYPTYTIQFLDPVSGATCQDPDGKLKFEVANNVQSDIGKALDFECTSLTRKDKYLILAGNNGVVKKN

SEQ ID NO: 83936 - protein, 455 aa, Arabidopsis thaliana
  peptide (1)..(455): Ceres Seq. ID no. 12672510
MLVAFEAGGVIRSFLLFILYPLISLMSHEMGVKVMVMVSFFGIKKEGFRAGRAVLPKYFLEDVGLEMFEVLKRGGKKIGVSDDLPQVMIEGFLRDYLEIDVVVGREMKVVGGYYLGIMEDKTKHDLVFDELVRKERLNTGRVIGITSFNTSLHRYLFSQFCQEIYFVKKSDKRSWQTLPRSQYPKPLIFHDGRLAIKPTLMNTLVLFMWGPFAAAAAAARLFVSLCIPYSLSIPILAFSGCRLTVTNDYVSSQKQKPSQRKGCLFVCNHRTLLDPLYVAFALRKKNIKTVTYSLSRVSEILAPIKTVRLTRDRVSDGQAMEKLLTEGDLVVCPEGTTCREPYLLRFSPLFTEVSDVIVPVAVTVHVTFFYGTTASGLKALDPLFFLLDPYPTYTIQFLDPVSGATCQDPDGKLKFEVANNVQSDIGKALDFECTSLTRKDKYLILAGNNGVVKKN

SEQ ID NO: 83937 - DNA, 2124 bp, Arabidopsis thaliana
  misc_feature (1)..(2124): Ceres Seq. ID no. 12672515
  misc_feature (1)..(2124): Ortholog of  Ceres SEQ ID NO 15225226 as cited in SEQ ID NO 58693
  misc_feature (1)..(2124): Ortholog of  Ceres SEQ ID NO 13654989 as cited in SEQ ID NO 63117
  misc_feature (1)..(2124): Ortholog of  Ceres SEQ ID NO 13584744 as cited in SEQ ID NO 69137
atggcgttgaaggcggtggttattgtatattgtgtggtttctctcgtcagtgttcaattagctgatgctcaacatgaaggactgccagtttcaccaacgttatcaccttcaacttcaccagttatcactgatctgcccctaccagctgaatttccgcggtttcacagaaagtatttcgcaccacaacaagcagaagcacctcagcattctcccccttatagtcgtttggtcgcttctgatcatccccctaccagctcacatttctccaaaccttccatgaaaaggaatgctcagtctcctggagccggcttggctgatattgctccagcacaatctagcaatggtgttcttcctgatgccttaactcagccacctttgtcgccctccatttcaaattgttgcaaatcagatatggtgcttaaacgaagaagtattggttgccactgcgtgtatcctataaaactggacatccttctcttgaatgtttcagaaactcctagttggaacatgttcttgaacgaatttgctacccagcttggtctcctacctcaccaaatcgagctgattaacttctatgtgctaagcttatcaaggatgaacatatcgatggatatcacccctcattctggaattagtttctcagctagtcaggcatccgcaataaactcttcccttatcagccacaagattcaatttagccctactttggtgggagattacaaacttctaaaccttacttggtttgaggcccctgcaccttcgcaagcacctctagtggcttcttcacctcataaagcaccatcacaaggatcctcagcaactacgtcagtaagatctccagggaaaaagaggcatcccaatcttattcttatcttttctatagccgctggtgtgcttatacttgccataatcactgtacttgttatttgttcccgcgcactccgagaagagaaagctccagatcctcacaaagaagctgtaaaaccaaggaacctggacgctggttcatttgggggatctcttcctcacccagcaagtacacggtttctgtcatatgaagaactcaaagaggcaactagcaattttgaatctgctagcattctaggagaaggtgggtttggcaaggtttacagaggcatcttagccgatggtactgctgtagcgattaagaagctcacaagtggtgggccacaaggtgataaagaattccaggtggagattgatatgcttagccgtcttcatcatcgtaatcttgtgaaacttgtgggttactatagtagtcgagattcttctcagcacctactttgttatgagcttgttccaaatggcagcctcgaggcttggctccatgggcctctcgggttgaactgtcctcttgattgggacaccagaatgaagattgcacttgatgctgcaagaggacttgcataccttcatgaagactcgcaaccctccgttatacacagagattttaaagcctctaatatactccttgaaaacaacttcaacgccaaagttgcagattttggcctagccaaacaagctcctgaaggcaggggtaatcacttatctactcgtgttatgggcacatttggatatgttgcgcctgaatatgcaatgacgggacacctactcgtcaagagtgatgtttatagttacggtgtggtccttctcgaattgttaactggtagaaaacctgtggatatgtcacaaccttcaggccaagaaaatctcgtcacttggacaaggccagttttaagagacaaagaccggttagaagaactagtcgattcaagacttgaaggaaaatacccgaaagaagatttcataagagtatgcacaatcgctgcagcttgtgttgcacctgaagctagccagagaccaacgatgggcgaagtggttcagtcacttaaaatggttcaacgggtggttgagtatcaagacccggttttaaacacttcaaataaagctcgtcctaaccggagacaatcatcagctacgttcgagtcagaagtaacctcttctatgttctcttctggtccttattctggtctaagcgcttttgatcatgaaaatattacacgaacaactgttttctcagaagatcttcacgaaggccgatga

SEQ ID NO: 83938 - protein, 707 aa, Arabidopsis thaliana; identical to SEQ ID NO: 48791
  peptide (1)..(707): Ceres Seq. ID no. 12672516

SEQ ID NO: 83939 - protein, 615 aa, Arabidopsis thaliana; identical to SEQ ID NO: 48792
  peptide (1)..(615): Ceres Seq. ID no. 12672517

SEQ ID NO: 83940 - protein, 570 aa, Arabidopsis thaliana
  peptide (1)..(570): Ceres Seq. ID no. 12672518
MVLKRRSIGCHCVYPIKLDILLLNVSETPSWNMFLNEFATQLGLLPHQIELINFYVLSLSRMNISMDITPHSGISFSASQASAINSSLISHKIQFSPTLVGDYKLLNLTWFEAPAPSQAPLVASSPHKAPSQGSSATTSVRSPGKKRHPNLILIFSIAAGVLILAIITVLVICSRALREEKAPDPHKEAVKPRNLDAGSFGGSLPHPASTRFLSYEELKEATSNFESASILGEGGFGKVYRGILADGTAVAIKKLTSGGPQGDKEFQVEIDMLSRLHHRNLVKLVGYYSSRDSSQHLLCYELVPNGSLEAWLHGPLGLNCPLDWDTRMKIALDAARGLAYLHEDSQPSVIHRDFKASNILLENNFNAKVADFGLAKQAPEGRGNHLSTRVMGTFGYVAPEYAMTGHLLVKSDVYSYGVVLLELLTGRKPVDMSQPSGQENLVTWTRPVLRDKDRLEELVDSRLEGKYPKEDFIRVCTIAAACVAPEASQRPTMGEVVQSLKMVQRVVEYQDPVLNTSNKARPNRRQSSATFESEVTSSMFSSGPYSGLSAFDHENITRTTVFSEDLHEGR

SEQ ID NO: 83941 - DNA, 1246 bp, Arabidopsis thaliana
  misc_feature (1)..(1246): Ceres Seq. ID no. 12672574
  misc_feature (1)..(1246): Ortholog of  Ceres SEQ ID NO 13656196 as cited in SEQ ID NO 64709
tcgaaaccaaaatctctctctcgtttgactttccctctctcccgtcgtttcaccggaaaaaaacaacagaaaaaaaaccgacgggagagaagaacaaacaataatggggaaaggaggacgtgagaagatatcatcaaacgaagaagaaagagaaggagtcatggctacagatttcttttggtcttacaccgatgagcctcatgcttcgaggagacgtcagattctgtcttgttaccctcagattagacaactctttggtcctgatccatgggctttcctcaagatcacattagtagtaattcttcaactctcaacagctgcaatccttcacaactctggatggctcaagattctatccattgcttacttctttggatcattcctcaaccacaatctcttcttagcaatccatgagctaagtcacaaccttgccttttcaactcctgtctacaatcgttgtctcggtattttcgcaaatctcccaatcggtgtaccaatgtcagtaactttccaaaaataccatctcgagcatcatcggttccaaggagtagatggtattgacatggatgttcctacttacaccgaagctcatttagtaaccaatatctttgccaaaacaatttgggttttcttacaactcttcttttacgctcttcgtcctatcttcatcaaaccaaaaccacctggctactgggagttcatcaacttcttgattcagattgttttagatgtatcagttgttctcttcttcggatggagatctttcgcgtatctaatcttatcgacatttgttggaggcggtatgcatccaatggcgggacattttatctcggaacattatgtttttaacccgaatcaagagacttattcgtattacggtccattgaatctactaacatggagtgttggttaccataacgagcatcacgatttcccgaggataccgggaaataagctgcatttggtgaaggagattgcaggagagtattatgaaggattggagtcgtataagtcatggtcacaagtgatttatatgtatattatggatacaacagttggtccttatagcagaatgaagaggaagctctcaaagtctgactaatttttctttgtttcttacatcaaactcttcttttattctattttagtatttttgttttgagggttgattttttcaactttattggaggacaaatctgtgatcttaggttgcagattttatgatttctcacggaatttaaaccct

SEQ ID NO: 83942 - protein, 332 aa, Arabidopsis thaliana
  peptide (1)..(332): Ceres Seq. ID no. 12672575
MGKGGREKISSNEEEREGVMATDFFWSYTDEPHASRRRQILSCYPQIRQLFGPDPWAFLKITLVVILQLSTAAILHNSGWLKILSIAYFFGSFLNHNLFLAIHELSHNLAFSTPVYNRCLGIFANLPIGVPMSVTFQKYHLEHHRFQGVDGIDMDVPTYTEAHLVTNIFAKTIWVFLQLFFYALRPIFIKPKPPGYWEFINFLIQIVLDVSVVLFFGWRSFAYLILSTFVGGGMHPMAGHFISEHYVFNPNQETYSYYGPLNLLTWSVGYHNEHHDFPRIPGNKLHLVKEIAGEYYEGLESYKSWSQVIYMYIMDTTVGPYSRMKRKLSKSD

SEQ ID NO: 83943 - protein, 313 aa, Arabidopsis thaliana
  peptide (1)..(313): Ceres Seq. ID no. 12672576
MATDFFWSYTDEPHASRRRQILSCYPQIRQLFGPDPWAFLKITLVVILQLSTAAILHNSGWLKILSIAYFFGSFLNHNLFLAIHELSHNLAFSTPVYNRCLGIFANLPIGVPMSVTFQKYHLEHHRFQGVDGIDMDVPTYTEAHLVTNIFAKTIWVFLQLFFYALRPIFIKPKPPGYWEFINFLIQIVLDVSVVLFFGWRSFAYLILSTFVGGGMHPMAGHFISEHYVFNPNQETYSYYGPLNLLTWSVGYHNEHHDFPRIPGNKLHLVKEIAGEYYEGLESYKSWSQVIYMYIMDTTVGPYSRMKRKLSKSD

SEQ ID NO: 83944 - protein, 201 aa, Arabidopsis thaliana
  peptide (1)..(201): Ceres Seq. ID no. 12672577
MSVTFQKYHLEHHRFQGVDGIDMDVPTYTEAHLVTNIFAKTIWVFLQLFFYALRPIFIKPKPPGYWEFINFLIQIVLDVSVVLFFGWRSFAYLILSTFVGGGMHPMAGHFISEHYVFNPNQETYSYYGPLNLLTWSVGYHNEHHDFPRIPGNKLHLVKEIAGEYYEGLESYKSWSQVIYMYIMDTTVGPYSRMKRKLSKSD

SEQ ID NO: 83945 - DNA, 1087 bp, Arabidopsis thaliana
  misc_feature (1)..(1087): Ceres Seq. ID no. 12672593
  misc_feature (1)..(1087): Ortholog of  Ceres SEQ ID NO 15177004 as cited in SEQ ID NO 57554
  misc_feature (1)..(1087): Ortholog of  Ceres SEQ ID NO 13662587 as cited in SEQ ID NO 63275
acttttatcttcactctccttgaacatattttccctcttaatatcttcaaggaaaaaaaaaaaactgcaaagagaagtggtgtgagtgaaaatgggagtggaaggaacgatggagtatatatcagaccttttaaagaagaggaagaggaagaagaagaagcaaatgcaaacagtagctctccgtgttgctcgtatcgactgcgaaggctgtgaacgtaagatcaaacatgtcctctccggtgtcaaaggggtgaagtcagtggacgtggacgtaaagctgcagaaggtaacggtaacgggatatatagacccaaagaaggttttggaggctgccaagtcaacgaagaagaaagtggagttatggccgtacgttccttacacaatggtggcgaatccgtacatatctcaggcgtatgacaagaaggcaccaccaaacatggttcggaaagtccccgacacggcctctgtcaacgagaccaccgtcgatgactcttacactattatgtttagcgacgagaaccctaattcttgcgctatcatgtagaagagtgtgcttttgtaaattaattaagtatatggctatagattatattatactattatatattatcggttttggtaatagtacctacgtaagagtcgtggtgtacgggtttggctttacaactattacgtgagaaaatcgagatttcttaacacttataaggaatttaaataagaggttttatagatagctaaattatgttttgaaatattctgctgatgagtggatgatatataattcattcgtttagagtatattcactttttattttggataacttgggtgtgatccagttcaaaggataccataaactccgagtcaaatcgcggaggcttttttcccaagctggttctcgggtcaacgagtcatgagcagagcgtgcctaggtttttggtggtcttaggcaaataaggaaaaacattttatacatattgtgataaaatgtctgataatgtataattaaatttaacatatttttcaataattcctgaatttttgctttcaccggattatcgggtactcttatgaaatagattttcgatt

SEQ ID NO: 83946 - protein, 150 aa, Arabidopsis thaliana
  peptide (1)..(150): Ceres Seq. ID no. 12672594
MGVEGTMEYISDLLKKRKRKKKKQMQTVALRVARIDCEGCERKIKHVLSGVKGVKSVDVDVKLQKVTVTGYIDPKKVLEAAKSTKKKVELWPYVPYTMVANPYISQAYDKKAPPNMVRKVPDTASVNETTVDDSYTIMFSDENPNSCAIM

SEQ ID NO: 83947 - protein, 144 aa, Arabidopsis thaliana
  peptide (1)..(144): Ceres Seq. ID no. 12672595
MEYISDLLKKRKRKKKKQMQTVALRVARIDCEGCERKIKHVLSGVKGVKSVDVDVKLQKVTVTGYIDPKKVLEAAKSTKKKVELWPYVPYTMVANPYISQAYDKKAPPNMVRKVPDTASVNETTVDDSYTIMFSDENPNSCAIM

SEQ ID NO: 83948 - protein, 126 aa, Arabidopsis thaliana
  peptide (1)..(126): Ceres Seq. ID no. 12672596
MQTVALRVARIDCEGCERKIKHVLSGVKGVKSVDVDVKLQKVTVTGYIDPKKVLEAAKSTKKKVELWPYVPYTMVANPYISQAYDKKAPPNMVRKVPDTASVNETTVDDSYTIMFSDENPNSCAIM

SEQ ID NO: 83949 - DNA, 1659 bp, Arabidopsis thaliana
  misc_feature (1)..(1659): Ceres Seq. ID no. 12672597
  misc_feature (1)..(1659): Ortholog of  Ceres SEQ ID NO 14308413 as cited in SEQ ID NO 55196
atgaaggaatcagatctaaccaccgaaccaatcgcacaaaatctaatcaagctaataagcaatgtctgtttctcagtcttcgttttcacagttctcatcttcacagtaatcgcagtaacttaccaaccaccagatccatggcttgaatctgctccagcactcaccaaactcctaaccgaaaccgaaaacgcaactttcaaaatcgacggttcgattctcaaaaccggcgaagatctcgcttcatctccgtcatcatcacctccgtcgaactccacagagcaagtcacggaggcgacgattgagaaatccgaggcgaaaatcggtaatatgactgtgaagaactctatagattgtgatgaggatttgaagattgtgaattgttctgatccgagagttttagttgctgttgagaggtttaatttgaaggtttttaaatctattgtgttcttagagtacgaaactccggttaacggatcgaaactagacgaatgcgatgtttcttggaggtttaggaataagaaggagaagtcatggaggagatacagagatttcaggaggtttaggtttggatttggtgagaattgtacttataaagtgtttcatactagtggttggcattctggtgttaatgctcgtaggcctaggattagtagaccgagctcgagtcgaggagctcgcggtggtgattcggagattaatgatacgattccgactcttggttcgcagacgagtttccggagagggaagtatttgtattattcgcggggtggtgattattgtaagggtatgaatcagtatatgtggagtttcttgtgtggtttaggtgaagcaatgtatttgaataggacttttgtgatggatttgagtttgtgtttgtcttcgagttatagttctaaggggaaagatgaggaaggtaaggattttcggtattattttgatttcgagcatcttaaggagacggcttcgattgttgaagagggtgagttcttgagagattggaagaaatggaatcggttgcataaacggaaagttcctgttaggaaggttaagacgcatagagtgtcgcctttgcagcttagtaaagataagagtacgattatatggaggcagtttgatactcctgagcctgaaaactattggtatagagtttgtgaagggcaagcatcgaagtatgttgagaggccgtggcatgcgttgtggaagtcgaagaggttgatgaatattgtctctgagattagtgggaaaatggactgggattttgatgctgttcatgtggttagaggcgagaaagcgaagaacaagaagctatggccacatttggatgcagacacatggcctgatgcgatattgaccaaacttaaaggattggttcaggtgtggaggaatttgtacgttgcaactaatgaaccgttttataattactttgacaagttgaggtctcagtacaaggttcacttgcttgatgactatagctacttgtggggaaataagagtgaatggtacaatgagactagtctcttgaacaatgggaaaccagttgagtttgatgggtacatgagagtagctgttgatacagaggtgttttatagaggaaagactcgcgtcgagacgttctataaccttaccacggactgcaaagacgggatcaatacatgctaa

SEQ ID NO: 83950 - protein, 552 aa, Arabidopsis thaliana; identical to SEQ ID NO: 23115
  peptide (1)..(552): Ceres Seq. ID no. 12672598

SEQ ID NO: 83951 - protein, 443 aa, Arabidopsis thaliana; identical to SEQ ID NO: 23116
  peptide (1)..(443): Ceres Seq. ID no. 12672599

SEQ ID NO: 83952 - protein, 290 aa, Arabidopsis thaliana
  peptide (1)..(290): Ceres Seq. ID no. 12672600
MNQYMWSFLCGLGEAMYLNRTFVMDLSLCLSSSYSSKGKDEEGKDFRYYFDFEHLKETASIVEEGEFLRDWKKWNRLHKRKVPVRKVKTHRVSPLQLSKDKSTIIWRQFDTPEPENYWYRVCEGQASKYVERPWHALWKSKRLMNIVSEISGKMDWDFDAVHVVRGEKAKNKKLWPHLDADTWPDAILTKLKGLVQVWRNLYVATNEPFYNYFDKLRSQYKVHLLDDYSYLWGNKSEWYNETSLLNNGKPVEFDGYMRVAVDTEVFYRGKTRVETFYNLTTDCKDGINTC

SEQ ID NO: 83953 - DNA, 2979 bp, Arabidopsis thaliana
  misc_feature (1)..(2979): Ceres Seq. ID no. 12672624
  misc_feature (1)..(2979): Ortholog of  Ceres SEQ ID NO 13622541 as cited in SEQ ID NO 0
tgtgtgcaaaacgtctctctctctgtctcataaaatctcagagaagaaacatcgtcgggtcaggtcgaagaaaggagagaaatgagtggtcacgattcgaaatacttctccacgacgaagaagggagagatccctgagctcaaggaagagcttaattcccagtataaggataagagaaaagatgcagttaagaaggttattgcggcgatgactgttggaaaggatgtttcatcacttttcactgatgtagtcaattgtatgcaaacggaaaatttggagttgaagaagcttgtttacttgtatctcataaattatgcgaaaagccagccagatcttgctattcttgcagtaaatacctttgtaaaggattcacaggatccaaatccgctgattcgtgctttggctgtgcggacaatgggctgcattcgtgttgataaaatcacagaatatctatgtgatcctcttcaaaagtgcctaaaggatgatgacccatatgtcaggaagactgcggctatttgcgtcgctaagcttttcgacataaatgctgaattagttgaggacagaggtttccttgaagccttgaaggatttgatatcagataacaatccaatggttgttgccaatgctgtagcagcccttgcggagattcaagagaacagtagtagccccatctttgagatcaatagtaccactcttacaaagctccttactgctctaaatgaatgcactgagtggggtcaagtttttatactagatgctttatcgaagtataaagcagctgatccccgtgaggctgaaaatattgttgagagagtaacaccaaggttgcaacatgccaactgcgctgttgttctttcagctgttaagatgatccttcaacaaatggaacttattactagtacagacgtgattagaaatctttgtaagaagatggctccaccccttgttacattgctttctgccgaacctgagatacaatatgttgcacttcgtaacattaatcttattgtgcaaaaacgacccactatccttgcccatgaaattaaggttttcttctgcaagtataacgacccaatttatgttaagatggagaagttggagattatgattaaacttgcctctgacagaaacatagaccaggttcttctggaattcaaagagtatgccacagaagtagacgttgattttgttagaaaggctgttcgtgcgataggccgatgtgctatcaaactagagagagcagctgaacggtgcatcagtgttttgctcgagttgatcaagattaaagtgaattatgttgtccaggaggccattattgtcatcaaagatatcttcagaagatatccaaacacgtatgagtccataattgcaacactctgtgagagtttagacactttggatgaaccagaagctaaggcatctatgatatggatcattggtgaatatgctgaaagaattgacaatgccgatgagcttcttgaaagctttctggagaattttcctgaggaaccagcacaggtccagttgcagctcctaactgctactgttaagctattcctgaagaagccaactgaaggccctcaacaaatgattcaggttgtcttgaataatgctactgtggagacggataatcctgatctcagagatcgtgcatacatatactggcgtcttctatccactgatcctgaggctgccaaggatgttgtcttagctgaaaagcccgtgatttctgacgactcaaaccagctagacccatcacttcttgatgagcttcttacaaatatttcgaccttgtcctctgtgtaccacaaacccccagaggcttttgttacccgcttgaaaacgacagttcagaaaacagaagacgaggactttgcggaaggaagcgaagcaggatactcatctagtaatccggttgatagtgcagcttctcctccaggtaatatcccacagccttccggaagacaaccagcaccagcggtcccagctcctgtacctgatctgctaggtgacctgatgggattggataatgccgctattgtcccggttgatgatcccataactcaatctggtcctcctctgcccgttgtcgtcccagcttcaagtggtcaaggtctgcagataagcgctcaattatcccgaaaagatggacaagtattttacagtatgctcttcgagaacaactcgcagtcggttcttgatggtttcatgattcagttcaacaaaaacacattcggccttgcagctgctggatctcttcagattccgcctttgcatcccgcaacatccgccaggacaatgctacctatggtcttgttccaaaacatgtctgctgggcctccaagctcgctcttacaagtcgctgtcaaaaacaaccagcagcccgtgtggtacttcaccgataagattatacttcatgctcttttcggtgaagacggtagaatggaacgtggaaccttccttgagacatggaggtcgttaccggactcaaatgaagtcctgaaagaattccccgggatcaccatcacgagcgtcgaatcaactatcgaattgctcacagcattcaacatgttctttatagcaaagcgcaagaacgggaaccaagacgtgatctacttatcagccaaagatccacgagatgtaccgtttttgatcgagctcactgcaatggtgggccaaccaggtctcaaatgcgcagtgaaaactcccactcccgagattgcgcctctcttcttcgaagctttggagcttctcttcaaggcttgatgattaacgttgttatcaaaaggctaataagaccaagacctgaaaggtttcagagattctttcttgtttcgttatatcccaccttttttcttcttctgagtttagtgtatgtaataaatcccatgtttgtgttacttccggttgcacccttttagtttggtatttgtaatgctcactattttcttataattcttgtatcggaaccacattttt

SEQ ID NO: 83954 - protein, 894 aa, Arabidopsis thaliana
  peptide (1)..(894): Ceres Seq. ID no. 12672625
MSGHDSKYFSTTKKGEIPELKEELNSQYKDKRKDAVKKVIAAMTVGKDVSSLFTDVVNCMQTENLELKKLVYLYLINYAKSQPDLAILAVNTFVKDSQDPNPLIRALAVRTMGCIRVDKITEYLCDPLQKCLKDDDPYVRKTAAICVAKLFDINAELVEDRGFLEALKDLISDNNPMVVANAVAALAEIQENSSSPIFEINSTTLTKLLTALNECTEWGQVFILDALSKYKAADPREAENIVERVTPRLQHANCAVVLSAVKMILQQMELITSTDVIRNLCKKMAPPLVTLLSAEPEIQYVALRNINLIVQKRPTILAHEIKVFFCKYNDPIYVKMEKLEIMIKLASDRNIDQVLLEFKEYATEVDVDFVRKAVRAIGRCAIKLERAAERCISVLLELIKIKVNYVVQEAIIVIKDIFRRYPNTYESIIATLCESLDTLDEPEAKASMIWIIGEYAERIDNADELLESFLENFPEEPAQVQLQLLTATVKLFLKKPTEGPQQMIQVVLNNATVETDNPDLRDRAYIYWRLLSTDPEAAKDVVLAEKPVISDDSNQLDPSLLDELLTNISTLSSVYHKPPEAFVTRLKTTVQKTEDEDFAEGSEAGYSSSNPVDSAASPPGNIPQPSGRQPAPAVPAPVPDLLGDLMGLDNAAIVPVDDPITQSGPPLPVVVPASSGQGLQISAQLSRKDGQVFYSMLFENNSQSVLDGFMIQFNKNTFGLAAAGSLQIPPLHPATSARTMLPMVLFQNMSAGPPSSLLQVAVKNNQQPVWYFTDKIILHALFGEDGRMERGTFLETWRSLPDSNEVLKEFPGITITSVESTIELLTAFNMFFIAKRKNGNQDVIYLSAKDPRDVPFLIELTAMVGQPGLKCAVKTPTPEIAPLFFEALELLFKA

SEQ ID NO: 83955 - protein, 852 aa, Arabidopsis thaliana
  peptide (1)..(852): Ceres Seq. ID no. 12672626
MTVGKDVSSLFTDVVNCMQTENLELKKLVYLYLINYAKSQPDLAILAVNTFVKDSQDPNPLIRALAVRTMGCIRVDKITEYLCDPLQKCLKDDDPYVRKTAAICVAKLFDINAELVEDRGFLEALKDLISDNNPMVVANAVAALAEIQENSSSPIFEINSTTLTKLLTALNECTEWGQVFILDALSKYKAADPREAENIVERVTPRLQHANCAVVLSAVKMILQQMELITSTDVIRNLCKKMAPPLVTLLSAEPEIQYVALRNINLIVQKRPTILAHEIKVFFCKYNDPIYVKMEKLEIMIKLASDRNIDQVLLEFKEYATEVDVDFVRKAVRAIGRCAIKLERAAERCISVLLELIKIKVNYVVQEAIIVIKDIFRRYPNTYESIIATLCESLDTLDEPEAKASMIWIIGEYAERIDNADELLESFLENFPEEPAQVQLQLLTATVKLFLKKPTEGPQQMIQVVLNNATVETDNPDLRDRAYIYWRLLSTDPEAAKDVVLAEKPVISDDSNQLDPSLLDELLTNISTLSSVYHKPPEAFVTRLKTTVQKTEDEDFAEGSEAGYSSSNPVDSAASPPGNIPQPSGRQPAPAVPAPVPDLLGDLMGLDNAAIVPVDDPITQSGPPLPVVVPASSGQGLQISAQLSRKDGQVFYSMLFENNSQSVLDGFMIQFNKNTFGLAAAGSLQIPPLHPATSARTMLPMVLFQNMSAGPPSSLLQVAVKNNQQPVWYFTDKIILHALFGEDGRMERGTFLETWRSLPDSNEVLKEFPGITITSVESTIELLTAFNMFFIAKRKNGNQDVIYLSAKDPRDVPFLIELTAMVGQPGLKCAVKTPTPEIAPLFFEALELLFKA

SEQ ID NO: 83956 - protein, 835 aa, Arabidopsis thaliana
  peptide (1)..(835): Ceres Seq. ID no. 12672627
MQTENLELKKLVYLYLINYAKSQPDLAILAVNTFVKDSQDPNPLIRALAVRTMGCIRVDKITEYLCDPLQKCLKDDDPYVRKTAAICVAKLFDINAELVEDRGFLEALKDLISDNNPMVVANAVAALAEIQENSSSPIFEINSTTLTKLLTALNECTEWGQVFILDALSKYKAADPREAENIVERVTPRLQHANCAVVLSAVKMILQQMELITSTDVIRNLCKKMAPPLVTLLSAEPEIQYVALRNINLIVQKRPTILAHEIKVFFCKYNDPIYVKMEKLEIMIKLASDRNIDQVLLEFKEYATEVDVDFVRKAVRAIGRCAIKLERAAERCISVLLELIKIKVNYVVQEAIIVIKDIFRRYPNTYESIIATLCESLDTLDEPEAKASMIWIIGEYAERIDNADELLESFLENFPEEPAQVQLQLLTATVKLFLKKPTEGPQQMIQVVLNNATVETDNPDLRDRAYIYWRLLSTDPEAAKDVVLAEKPVISDDSNQLDPSLLDELLTNISTLSSVYHKPPEAFVTRLKTTVQKTEDEDFAEGSEAGYSSSNPVDSAASPPGNIPQPSGRQPAPAVPAPVPDLLGDLMGLDNAAIVPVDDPITQSGPPLPVVVPASSGQGLQISAQLSRKDGQVFYSMLFENNSQSVLDGFMIQFNKNTFGLAAAGSLQIPPLHPATSARTMLPMVLFQNMSAGPPSSLLQVAVKNNQQPVWYFTDKIILHALFGEDGRMERGTFLETWRSLPDSNEVLKEFPGITITSVESTIELLTAFNMFFIAKRKNGNQDVIYLSAKDPRDVPFLIELTAMVGQPGLKCAVKTPTPEIAPLFFEALELLFKA

SEQ ID NO: 83957 - DNA, 1961 bp, Arabidopsis thaliana
  misc_feature (1)..(1961): Ceres Seq. ID no. 12672628
  misc_feature (1)..(1961): Ortholog of  Ceres SEQ ID NO 14315455 as cited in SEQ ID NO 56988
atcaatacgttcctctcagaacattctggaacttcacaacataatctctctctctctctatctctagcttcgtgatcatcgtgtgtctctgtgttcaatctggattgtgacaatctctttctttcttggttggtgtagattacgtcaagagagagatagagaagtttttggatttggttctaatgggtctgtgatagacgtttcctttctcttctctgtctagtttctgttttgagatctctatgtttccaactttcttcaaagctcattcccattggtagatttcatcattatcttaatttgggtattgggattaaggaaagtttagatttttgatctataactcatgccgggggaacaaaccggagaaactccgacggtggccggagttggcggcggtggagctggttgtagcgccgggaatagtggtggaagtagtggatgtggtgctggtggtggcggtggtggtagtggtggaggtggtggcggaggaggagattcacagaggtcaattccgacgccgtttttgacgaaaacgtatcagcttgtggaagatccggtttacgacgaattgatctcgtggaacgaagatggaaccacttttattgtgtggcgaccagctgaattcgctagagatcttcttcccaaatacttcaaacataataacttctcgagttttgttcgtcagctcaatacttacggatttcgaaaagtagttccagatcgttgggagttttctaatgattgttttaagagaggtgagaagattctgcttcgggatattcaacggcggaaaatctctcagcctgctatggccgcggctgctgcagcggcggcggcagccgtagcggcttcggctgttacagtagcagctgttcctgttgtagctcatattgtttctccatcgaactctggagaagaacaggttatatcgtctaattcttcgcctgcggctgctgctgctgctataggaggagtggttggtggtggttctttgcagaggacaacgagctgcaccactgcaccagagctggttgaggagaatgagcgattgaggaaagataatgagcgattgaggaaagagatgacaaagcttaaaggattgtatgcgaatatctacacattaatggcgaatttcacaccgggtcaagaagattgtgcgcatttgttacctgaagggaaacctttagatcttttaccggagagacaagagatgagtgaagccattatggcttctgaaatagagacagggattggtctgaaacttggtgaggatttgactccaaggttgtttggggtttctattggggtcaagcgagctagaagagaagaagaattgggtgctgcagaggaagaagatgatgatagacgagaagctgctgcccaagagggagaacaaagttctgatgttaaggcagagccaatggaggagaataactccggtaaccataatgggtcgtggcttgaactcggaaaatgaaaaacacttgccgattcagaggcattgttgaatatgcaagaaactgttactgatccccattgcataggcaagccattgcgctgtcccggacggaaaatggggatgtgttcggtcataagaggacagatgttcattgagttggggtagtacaaaagtatctaaaaacactgattctaccatcctgagttgttcctgatttcagatgttgcctcctgaatcttcttcttgatggaactgaaactattctggcttgctgtgctccagtgagtggatgtgcttctcacgatttcggataaagcaggcagattcaatgttacatcttcatattctgcaacaaatagcaggaatcaatggtttttaagagttatggcaatgttgatacagaatcatttcttttgagttcaaaacaattgtagctctctgacttgtaatgatcttaatgaaatttatctctcttatttaaagatggtccaagttctct

SEQ ID NO: 83958 - protein, 377 aa, Arabidopsis thaliana
  peptide (1)..(377): Ceres Seq. ID no. 12672629
MPGEQTGETPTVAGVGGGGAGCSAGNSGGSSGCGAGGGGGGSGGGGGGGGDSQRSIPTPFLTKTYQLVEDPVYDELISWNEDGTTFIVWRPAEFARDLLPKYFKHNNFSSFVRQLNTYGFRKVVPDRWEFSNDCFKRGEKILLRDIQRRKISQPAMAAAAAAAAAAVAASAVTVAAVPVVAHIVSPSNSGEEQVISSNSSPAAAAAAIGGVVGGGSLQRTTSCTTAPELVEENERLRKDNERLRKEMTKLKGLYANIYTLMANFTPGQEDCAHLLPEGKPLDLLPERQEMSEAIMASEIETGIGLKLGEDLTPRLFGVSIGVKRARREEELGAAEEEDDDRREAAAQEGEQSSDVKAEPMEENNSGNHNGSWLELGK

SEQ ID NO: 83959 - protein, 222 aa, Arabidopsis thaliana
  peptide (1)..(222): Ceres Seq. ID no. 12672630
MAAAAAAAAAAVAASAVTVAAVPVVAHIVSPSNSGEEQVISSNSSPAAAAAAIGGVVGGGSLQRTTSCTTAPELVEENERLRKDNERLRKEMTKLKGLYANIYTLMANFTPGQEDCAHLLPEGKPLDLLPERQEMSEAIMASEIETGIGLKLGEDLTPRLFGVSIGVKRARREEELGAAEEEDDDRREAAAQEGEQSSDVKAEPMEENNSGNHNGSWLELGK

SEQ ID NO: 83960 - DNA, 1483 bp, Arabidopsis thaliana
  misc_feature (1)..(1483): Ceres Seq. ID no. 12672634
  misc_feature (1)..(1483): Ortholog of  Ceres SEQ ID NO 14315138 as cited in SEQ ID NO 53488
aggttaaggatagcagtgggccatctggacgatctagtgatgctcctactattgaagatgtgacagaaacagctcatgttcagggtccagtaactacccaaggaactgttattattgatgaagagagtgatgatgatattccttttgcaccaatgggacgaagtaggcaagacagacctgctggttctgtagccaataataataatcaagattacaatgatatagaagaagaaatgatcagagctgccattgaggcctcaaagaaagaggctgagggatcaagtaaccctttacttgaagagaggccacttcacatggaagatgatgatgacatagcaatagctgttacaatgtcattgaagtcagcggaggaagaagttttgcgcagtcaagggtataaggcctcaacctcggaaataggagcttctgcagtgactgctgctcaaggacctcaggatacccaggccctgaacggaagattggcagcacctagttcaccatttgatgatgactctgatgatgttgatgagcaacctcttgttagacacaggccaagacgtgcagcatccggatctctggctccacctaacgctgatcgttcccggagtgggagtcctgaagaagaacatgcaagtattaatccagcggagcgtggcagtgggtttccttctgagtggggaggcatttcatctgaggaacatgatgaagctgtcatgctcgaggcagccatgtttggtggcattcctgaaactggatataatcatcttccattcttacctcctcagccgagggcccaaccacgtccaccctcaccttcgctgacagctcagaggttgatacgggaacagcaggatgatgagtatgttgcgtccctgcaagctgaccgagataaagaaatgaagtccattagagatgctgaggcacgtcagctagaggaagaaactgcgagaaaggcttttctggaggaagaaaagaaaaaagaggaagaagctcaaagaaaactcgaggaggaacaggagctagaaagacaactagatgcaaaagaagcgtctttacctaaggagcctcaagctgatgaagagaatgccattacccttctaatccggatgccggatggaacacgtcggggccgccggttccttaaatctgacaaactccaaacccttttcaactttatagacattgccagagtggtgaaacccaacacttacagactggtgaggccatatccgaggcatgcgtttggagatggggaaagtgagtcgaccttaaacgatcttggattgaccagcaaacaagaagcattgttccttgagcttatctagttttaagctcttaaatatataagaagaattacatttgtcttctgcttagaaaactctttaattttcaagttattttttttatctttctttatacaaaagaaaaagtatttgttgagggtggaggattatatggtttataaaaccgtcgtcgtttagtc

SEQ ID NO: 83961 - protein, 440 aa, Arabidopsis thaliana
  peptide (1)..(440): Ceres Seq. ID no. 12672635
VKDSSGPSGRSSDAPTIEDVTETAHVQGPVTTQGTVIIDEESDDDIPFAPMGRSRQDRPAGSVANNNNQDYNDIEEEMIRAAIEASKKEAEGSSNPLLEERPLHMEDDDDIAIAVTMSLKSAEEEVLRSQGYKASTSEIGASAVTAAQGPQDTQALNGRLAAPSSPFDDDSDDVDEQPLVRHRPRRAASGSLAPPNADRSRSGSPEEEHASINPAERGSGFPSEWGGISSEEHDEAVMLEAAMFGGIPETGYNHLPFLPPQPRAQPRPPSPSLTAQRLIREQQDDEYVASLQADRDKEMKSIRDAEARQLEEETARKAFLEEEKKKEEEAQRKLEEEQELERQLDAKEASLPKEPQADEENAITLLIRMPDGTRRGRRFLKSDKLQTLFNFIDIARVVKPNTYRLVRPYPRHAFGDGESESTLNDLGLTSKQEALFLELI

SEQ ID NO: 83962 - protein, 390 aa, Arabidopsis thaliana
  peptide (1)..(390): Ceres Seq. ID no. 12672636
MGRSRQDRPAGSVANNNNQDYNDIEEEMIRAAIEASKKEAEGSSNPLLEERPLHMEDDDDIAIAVTMSLKSAEEEVLRSQGYKASTSEIGASAVTAAQGPQDTQALNGRLAAPSSPFDDDSDDVDEQPLVRHRPRRAASGSLAPPNADRSRSGSPEEEHASINPAERGSGFPSEWGGISSEEHDEAVMLEAAMFGGIPETGYNHLPFLPPQPRAQPRPPSPSLTAQRLIREQQDDEYVASLQADRDKEMKSIRDAEARQLEEETARKAFLEEEKKKEEEAQRKLEEEQELERQLDAKEASLPKEPQADEENAITLLIRMPDGTRRGRRFLKSDKLQTLFNFIDIARVVKPNTYRLVRPYPRHAFGDGESESTLNDLGLTSKQEALFLELI

SEQ ID NO: 83963 - protein, 363 aa, Arabidopsis thaliana
  peptide (1)..(363): Ceres Seq. ID no. 12672637
MIRAAIEASKKEAEGSSNPLLEERPLHMEDDDDIAIAVTMSLKSAEEEVLRSQGYKASTSEIGASAVTAAQGPQDTQALNGRLAAPSSPFDDDSDDVDEQPLVRHRPRRAASGSLAPPNADRSRSGSPEEEHASINPAERGSGFPSEWGGISSEEHDEAVMLEAAMFGGIPETGYNHLPFLPPQPRAQPRPPSPSLTAQRLIREQQDDEYVASLQADRDKEMKSIRDAEARQLEEETARKAFLEEEKKKEEEAQRKLEEEQELERQLDAKEASLPKEPQADEENAITLLIRMPDGTRRGRRFLKSDKLQTLFNFIDIARVVKPNTYRLVRPYPRHAFGDGESESTLNDLGLTSKQEALFLELI

SEQ ID NO: 83964 - DNA, 2601 bp, Arabidopsis thaliana
  misc_feature (1)..(2601): Ceres Seq. ID no. 12672641
  misc_feature (1)..(2601): Ortholog of  Ceres SEQ ID NO 14313575 as cited in SEQ ID NO 58703
atggcgtatcatccagtttataacgagactatgtctatgggaggagggtcaagcaacgagtttggccagtggcttgacaagcaactcgtgccgtttgatacaagtagtggctctttgagggttgaattattacatggtaacttagacatttgggttaaggaagctaaacatcttcctaacatggatggtttccataacacccttgttggtgggatgttttttgggttaggtcggaggaatcataaagtggatggtgagaattcttctaagatcacaagtgatccttatgttactgtctctatctctggtgctgtgattggtagaacttttgttattagcaatagtgagaatcctgtgtggatgcagcattttgatgtaccagttgctcatagtgctgcgaaagttcactttgttgtgaaagacagtgatattattggatcacagatcattggagctgttgaaatcccaaccgagcagttgtgttccgggaatagaatcgaagggctgtttccgatacttaacagtagaggaaagccttgtaaacaaggtgctgtgttgagtctgtctattcagtatattccaatggaaagaatgagactttaccaaaagggtgttggttttggtgttgaatgtgtaggagttcccggtacatacttccctttaaggaaaggcggtagggttactctttatcaggatgctcatgttgatgacggtactcttccgagtgtacatcttgatggtgggattcagtatagacatggaaaatgctgggaagatatggctgatgcgatacgacgggcaaggaggttgatttatatcacaggttggtcagttttccatccggttaggctggttcgtcgtaacaatgatccgacccaaggtacattaggagagttgcttaaagtcaaatctcaagaaggtgttagagtgttggttttggtgtgggatgatccaacttcaaggagtcttttgggattcagtacaaaaggacttatgaacacaagcgatgaggagactcgccgttttttcaagcactcatcggtgcaagttctcctttgtcctagatatggagggaaaggtcacagcttcataaaaaaatctgaagttgaaacaatctacacgcatcatcagaaaactatgattgtagatgctgaagcagctcagaaccgaagaaagattgtagcatttgttggagggctagacttgtgcaacggacgatttgatactcccaagcatcctctcttcaggacattaaagacaatccataaagatgacttccataacccaaattttgtgactactgcggatgatggaccaagagaaccatggcatgatctgcacagcaagattgatggtccagctgcatatgatgtgcttgctaattttgaggaacgctggatgaaggcttcaaaacctcgcggaattgggagactaagaacttcttctgatgattctttgcttaggttagacagaattcctgacataatgggactttccgaagcttcttctgctaatgataatgatccagagtcttggcatgttcaggttttccgttcaattgattcgagttcagttaaagggtttccaaaggacccaaaggaagctactggaagaaaccttctatgtgggaagaacattctcatagatatgagcatacatgcagcttatgttaaagccatacgatctgctcagcacttcatttacattgaaaaccaatattttcttggatcatcattcaattgggattcaaacaagaacttgggtgcgaataatctaatcccgatggaaatcgcgctgaagattgctaacaaaattagagcaagggaaaagtttgctgcttatattgtcattccaatgtggccagaaggtgctccaacaagtaatcctattcaaagaattctctactggcagcacaaaaccatgcaaatgatgtatcaaaccatctacaaggcacttgtggaagttggtcttgatggccagcttgagccacaagactttttgaactttttctgtcttggaaccagagaggttggaaccagagaggttcctgatggaactgttagcgtatataatagtcctcggaagccacctcagctaaatgctgcacaggtacaagctttgaagagtcggagattcatgatatatgttcattccaaaggtatggtagtggatgatgagtttgtcttaattggttccgcgaatatcaaccagagatccttggaaggaactagagacactgaaatcgctatgggagggtatcagccacaccattcatgggctaagaaaggttctcgtcctcgtggtcagatctttggatatagaatgtcgttatgggcagaacatctagggtttctagagcaagaattcgaggaaccagagaacatggaatgcgtgagacgagttaggcaattgagtgagctgaattggagacaatatgcagcggaagaagtcacagagatgccaggtcatcttcttaagtatccagttcaagttgatagaacaggcaaagtgagttctcttcctggatacgagacattcccagatctcggtggcaagatcataggatcgttccttgtagtagaagaaaacctcaccatatga

SEQ ID NO: 83965 - protein, 866 aa, Arabidopsis thaliana
  peptide (1)..(866): Ceres Seq. ID no. 12672642
MAYHPVYNETMSMGGGSSNEFGQWLDKQLVPFDTSSGSLRVELLHGNLDIWVKEAKHLPNMDGFHNTLVGGMFFGLGRRNHKVDGENSSKITSDPYVTVSISGAVIGRTFVISNSENPVWMQHFDVPVAHSAAKVHFVVKDSDIIGSQIIGAVEIPTEQLCSGNRIEGLFPILNSRGKPCKQGAVLSLSIQYIPMERMRLYQKGVGFGVECVGVPGTYFPLRKGGRVTLYQDAHVDDGTLPSVHLDGGIQYRHGKCWEDMADAIRRARRLIYITGWSVFHPVRLVRRNNDPTQGTLGELLKVKSQEGVRVLVLVWDDPTSRSLLGFSTKGLMNTSDEETRRFFKHSSVQVLLCPRYGGKGHSFIKKSEVETIYTHHQKTMIVDAEAAQNRRKIVAFVGGLDLCNGRFDTPKHPLFRTLKTIHKDDFHNPNFVTTADDGPREPWHDLHSKIDGPAAYDVLANFEERWMKASKPRGIGRLRTSSDDSLLRLDRIPDIMGLSEASSANDNDPESWHVQVFRSIDSSSVKGFPKDPKEATGRNLLCGKNILIDMSIHAAYVKAIRSAQHFIYIENQYFLGSSFNWDSNKNLGANNLIPMEIALKIANKIRAREKFAAYIVIPMWPEGAPTSNPIQRILYWQHKTMQMMYQTIYKALVEVGLDGQLEPQDFLNFFCLGTREVGTREVPDGTVSVYNSPRKPPQLNAAQVQALKSRRFMIYVHSKGMVVDDEFVLIGSANINQRSLEGTRDTEIAMGGYQPHHSWAKKGSRPRGQIFGYRMSLWAEHLGFLEQEFEEPENMECVRRVRQLSELNWRQYAAEEVTEMPGHLLKYPVQVDRTGKVSSLPGYETFPDLGGKIIGSFLVVEENLTI

SEQ ID NO: 83966 - protein, 856 aa, Arabidopsis thaliana
  peptide (1)..(856): Ceres Seq. ID no. 12672643
MSMGGGSSNEFGQWLDKQLVPFDTSSGSLRVELLHGNLDIWVKEAKHLPNMDGFHNTLVGGMFFGLGRRNHKVDGENSSKITSDPYVTVSISGAVIGRTFVISNSENPVWMQHFDVPVAHSAAKVHFVVKDSDIIGSQIIGAVEIPTEQLCSGNRIEGLFPILNSRGKPCKQGAVLSLSIQYIPMERMRLYQKGVGFGVECVGVPGTYFPLRKGGRVTLYQDAHVDDGTLPSVHLDGGIQYRHGKCWEDMADAIRRARRLIYITGWSVFHPVRLVRRNNDPTQGTLGELLKVKSQEGVRVLVLVWDDPTSRSLLGFSTKGLMNTSDEETRRFFKHSSVQVLLCPRYGGKGHSFIKKSEVETIYTHHQKTMIVDAEAAQNRRKIVAFVGGLDLCNGRFDTPKHPLFRTLKTIHKDDFHNPNFVTTADDGPREPWHDLHSKIDGPAAYDVLANFEERWMKASKPRGIGRLRTSSDDSLLRLDRIPDIMGLSEASSANDNDPESWHVQVFRSIDSSSVKGFPKDPKEATGRNLLCGKNILIDMSIHAAYVKAIRSAQHFIYIENQYFLGSSFNWDSNKNLGANNLIPMEIALKIANKIRAREKFAAYIVIPMWPEGAPTSNPIQRILYWQHKTMQMMYQTIYKALVEVGLDGQLEPQDFLNFFCLGTREVGTREVPDGTVSVYNSPRKPPQLNAAQVQALKSRRFMIYVHSKGMVVDDEFVLIGSANINQRSLEGTRDTEIAMGGYQPHHSWAKKGSRPRGQIFGYRMSLWAEHLGFLEQEFEEPENMECVRRVRQLSELNWRQYAAEEVTEMPGHLLKYPVQVDRTGKVSSLPGYETFPDLGGKIIGSFLVVEENLTI

SEQ ID NO: 83967 - protein, 854 aa, Arabidopsis thaliana
  peptide (1)..(854): Ceres Seq. ID no. 12672644
MGGGSSNEFGQWLDKQLVPFDTSSGSLRVELLHGNLDIWVKEAKHLPNMDGFHNTLVGGMFFGLGRRNHKVDGENSSKITSDPYVTVSISGAVIGRTFVISNSENPVWMQHFDVPVAHSAAKVHFVVKDSDIIGSQIIGAVEIPTEQLCSGNRIEGLFPILNSRGKPCKQGAVLSLSIQYIPMERMRLYQKGVGFGVECVGVPGTYFPLRKGGRVTLYQDAHVDDGTLPSVHLDGGIQYRHGKCWEDMADAIRRARRLIYITGWSVFHPVRLVRRNNDPTQGTLGELLKVKSQEGVRVLVLVWDDPTSRSLLGFSTKGLMNTSDEETRRFFKHSSVQVLLCPRYGGKGHSFIKKSEVETIYTHHQKTMIVDAEAAQNRRKIVAFVGGLDLCNGRFDTPKHPLFRTLKTIHKDDFHNPNFVTTADDGPREPWHDLHSKIDGPAAYDVLANFEERWMKASKPRGIGRLRTSSDDSLLRLDRIPDIMGLSEASSANDNDPESWHVQVFRSIDSSSVKGFPKDPKEATGRNLLCGKNILIDMSIHAAYVKAIRSAQHFIYIENQYFLGSSFNWDSNKNLGANNLIPMEIALKIANKIRAREKFAAYIVIPMWPEGAPTSNPIQRILYWQHKTMQMMYQTIYKALVEVGLDGQLEPQDFLNFFCLGTREVGTREVPDGTVSVYNSPRKPPQLNAAQVQALKSRRFMIYVHSKGMVVDDEFVLIGSANINQRSLEGTRDTEIAMGGYQPHHSWAKKGSRPRGQIFGYRMSLWAEHLGFLEQEFEEPENMECVRRVRQLSELNWRQYAAEEVTEMPGHLLKYPVQVDRTGKVSSLPGYETFPDLGGKIIGSFLVVEENLTI

SEQ ID NO: 83968 - DNA, 390 bp, Arabidopsis thaliana
  misc_feature (1)..(390): Ceres Seq. ID no. 12672668
  misc_feature (1)..(390): Ortholog of  Ceres SEQ ID NO 13598157 as cited in SEQ ID NO 61570
atggcttcaaaaatttcagcctctcttgtcattttcctcacattcaacattctttttttcactttaaccaccgcatgtggcggtggctgcagttccacccctaaacccaaacctaagcccaagtccaccggaagctgccctaaagacactctcaagctcggcgtttgcgccaatgttctcaaggatcttctcaaaattcagttgggaacaccaccagtgaagccttgttgttcgctcctcaatggtttagttgatcttgaggctgccgcttgtctctgcaccgccctaaaggctaaagttttaggcattaatcttaatgttcccgtctctctcagccttcttctcaatgtttgtggcaagaaggttccttctggtttcgtatgtgcttga

SEQ ID NO: 83969 - protein, 129 aa, Arabidopsis thaliana
  peptide (1)..(129): Ceres Seq. ID no. 12672669
MASKISASLVIFLTFNILFFTLTTACGGGCSSTPKPKPKPKSTGSCPKDTLKLGVCANVLKDLLKIQLGTPPVKPCCSLLNGLVDLEAAACLCTALKAKVLGINLNVPVSLSLLLNVCGKKVPSGFVCA

SEQ ID NO: 83970 - DNA, 925 bp, Arabidopsis thaliana
  misc_feature (1)..(925): Ceres Seq. ID no. 12672678
  misc_feature (1)..(925): Ortholog of  Ceres SEQ ID NO 14314851 as cited in SEQ ID NO 54014
  misc_feature (1)..(925): Ortholog of  Ceres SEQ ID NO 14307442 as cited in SEQ ID NO 54239
  misc_feature (1)..(925): Ortholog of  Ceres SEQ ID NO 15227214 as cited in SEQ ID NO 55368
  misc_feature (1)..(925): Ortholog of  Ceres SEQ ID NO 13638897 as cited in SEQ ID NO 55839
  misc_feature (1)..(925): Ortholog of  Ceres SEQ ID NO 14302561 as cited in SEQ ID NO 56543
  misc_feature (1)..(925): Ortholog of  Ceres SEQ ID NO 15177710 as cited in SEQ ID NO 59217
  misc_feature (1)..(925): Ortholog of  Ceres SEQ ID NO 13596958 as cited in SEQ ID NO 63319
  misc_feature (1)..(925): Ortholog of  Ceres SEQ ID NO 12614573 as cited in SEQ ID NO 68344
  misc_feature (1)..(925): Ortholog of  Ceres SEQ ID NO 12614814 as cited in SEQ ID NO 68816
atgaaccttaaggagacggagctttgtcttggcctccccggaggcactgaaaccgttgaaagtccggccaagtcgggtgttgggaacaagagaggcttctccgagaccgttgatctcaaacttaatcttcaatctaacaaacaaggacatgtggatctcaacactaatggagctcccaaggagaagaccttccttaaagacccttctaagcctcctgctaaagcacaagtggtgggttggccaccggtgaggaactaccggaaaaatgttatggctaatcagaagagcggcgaagcagaggaggcaatgagtagtggtggaggaaccgtcgcctttgtgaaggtttccatggatggagctccttatcttcggaaggttgacctcaagatgtacaccagctacaaggatctctctgatgccttggccaaaatgttcagctcctttaccatggggagttatggagcacaagggatgatagatttcatgaacgagagtaaagtgatggatctgttgaacagttctgagtatgttccaagctacgaggacaaagatggtgactggatgctcgttggtgatgtcccctggccgatgtttgtcgagtcatgcaaacgtttgcgcataatgaaaggatccgaagcaattggacttgctccaagagcaatggagaagttcaagaacagatcatgaacaaaaaaaaaagaggacaatatgcattgattttttttttttggtattgttatgatcatgtgtttttaatttaaaatattggaagtatataggaaaatataattgtttacgaaaaaaataactttaaatatgtctttttttttttttttgaaattagtctgtgtttttgttttcatctcttaattagtagaaatcattttttaatatgtaattgtgatagtaaatctatagagttcgt

SEQ ID NO: 83971 - protein, 228 aa, Arabidopsis thaliana
  peptide (1)..(228): Ceres Seq. ID no. 12672679
MNLKETELCLGLPGGTETVESPAKSGVGNKRGFSETVDLKLNLQSNKQGHVDLNTNGAPKEKTFLKDPSKPPAKAQVVGWPPVRNYRKNVMANQKSGEAEEAMSSGGGTVAFVKVSMDGAPYLRKVDLKMYTSYKDLSDALAKMFSSFTMGSYGAQGMIDFMNESKVMDLLNSSEYVPSYEDKDGDWMLVGDVPWPMFVESCKRLRIMKGSEAIGLAPRAMEKFKNRS

SEQ ID NO: 83972 - protein, 138 aa, Arabidopsis thaliana
  peptide (1)..(138): Ceres Seq. ID no. 12672680
MANQKSGEAEEAMSSGGGTVAFVKVSMDGAPYLRKVDLKMYTSYKDLSDALAKMFSSFTMGSYGAQGMIDFMNESKVMDLLNSSEYVPSYEDKDGDWMLVGDVPWPMFVESCKRLRIMKGSEAIGLAPRAMEKFKNRS

SEQ ID NO: 83973 - protein, 126 aa, Arabidopsis thaliana
  peptide (1)..(126): Ceres Seq. ID no. 12672681
MSSGGGTVAFVKVSMDGAPYLRKVDLKMYTSYKDLSDALAKMFSSFTMGSYGAQGMIDFMNESKVMDLLNSSEYVPSYEDKDGDWMLVGDVPWPMFVESCKRLRIMKGSEAIGLAPRAMEKFKNRS

SEQ ID NO: 83974 - DNA, 1545 bp, Arabidopsis thaliana
  misc_feature (1)..(1545): Ceres Seq. ID no. 12672696
  misc_feature (1)..(1545): Ortholog of  Ceres SEQ ID NO 14310886 as cited in SEQ ID NO 54536
  misc_feature (1)..(1545): Ortholog of  Ceres SEQ ID NO 14315515 as cited in SEQ ID NO 57454
atggggaagcaaggaccttgctaccactgtggagttacaaacacacctttgtggagaaatggaccaccagagaagccggtattgtgcaatgcgtgtggatcgcgttggaggacaaagggaacacttgtgaactacacaccgcttcatgctcgtgctgatggtgatgagaatgatgatcatcacaggtttcaaagaatgaagagcatttctttaggcaataagaacaaagagataaagatgctcaagaggaaagcaattcaagaaaacatcatcattaaaagaccggtctttgaattcagttatggtttgaaggcggctgtgatagaggaggatgctagtaatagatcgagttccggttcggctgtatcaaactctgagagctgtgcacagtttagcagtgcagatgggagtgagttaacaggtccatctcaatctaatgcgtgggacacaactgttccttgcaagaggaggacgtgtgtgggccgtcctaagtcctcttctgttgaaaagctcacaaaggacctttacaatattttacaagagcagcaatcgtcatgtctctcagtttcatcagaggaagatcttctttttgagaatgaaatgtcaatggtctcagttgagattggacatgggagtgttctgatgaagaatccccactcgtttgctcgggaagaggagtctgaagccagctcactctcttcgattgagaacaagtcctccatcagtgacgcatactcacattccgtgaagcgtgttgagattggagcagtgagaggttcatattatggtggacaaacaataaagcaagaacaattcaagagaaccaagtctcaaactgaaagagtgcatgtcctggggagtcatggttcaccactatgtagcatagatttgaaggatgttttcaactttgatgagttcatagaacaattcacagaggaagaacagaagaaactgatgaacttgcttcctcagattgactctgatgaccttcctcatagcctcagaatgatgtttgaaagtgctcagttcaaggacaacttctctttgtttcagcagctcattgctgatggtgtctttgatgtgtcttcttcctcgggggcaaaactcgaagaaatcaggacttttaagaagcttgctttgacagattttaacaaatctcgtttggtggaaagctataacctcctcaaggaacgcgaaaaagggaccggagattctgttactacaacttcaaaaagctcaatcccaaatgtacctaaaaatattgtaaccattaagaggcgctatgaaaaccaaatccaagtaaagtcagagtcaagggggctaatgaggagccccaaaagggtgatgaagatgaaagcaagccatgagacagagaacaatgtctcatgcttcagaccaagaagcttggcttctgtgtttgcacaagaaggtggctctgcagtgtttagctatgaaggtaattgcagttctgatcaagatctccttcttctggacttgccgtcaaacgggtcatttcctcaagcagagctacttcaccaactctga

SEQ ID NO: 83975 - protein, 514 aa, Arabidopsis thaliana
  peptide (1)..(514): Ceres Seq. ID no. 12672697
MGKQGPCYHCGVTNTPLWRNGPPEKPVLCNACGSRWRTKGTLVNYTPLHARADGDENDDHHRFQRMKSISLGNKNKEIKMLKRKAIQENIIIKRPVFEFSYGLKAAVIEEDASNRSSSGSAVSNSESCAQFSSADGSELTGPSQSNAWDTTVPCKRRTCVGRPKSSSVEKLTKDLYNILQEQQSSCLSVSSEEDLLFENEMSMVSVEIGHGSVLMKNPHSFAREEESEASSLSSIENKSSISDAYSHSVKRVEIGAVRGSYYGGQTIKQEQFKRTKSQTERVHVLGSHGSPLCSIDLKDVFNFDEFIEQFTEEEQKKLMNLLPQIDSDDLPHSLRMMFESAQFKDNFSLFQQLIADGVFDVSSSSGAKLEEIRTFKKLALTDFNKSRLVESYNLLKEREKGTGDSVTTTSKSSIPNVPKNIVTIKRRYENQIQVKSESRGLMRSPKRVMKMKASHETENNVSCFRPRSLASVFAQEGGSAVFSYEGNCSSDQDLLLLDLPSNGSFPQAELLHQL

SEQ ID NO: 83976 - protein, 449 aa, Arabidopsis thaliana
  peptide (1)..(449): Ceres Seq. ID no. 12672698
MKSISLGNKNKEIKMLKRKAIQENIIIKRPVFEFSYGLKAAVIEEDASNRSSSGSAVSNSESCAQFSSADGSELTGPSQSNAWDTTVPCKRRTCVGRPKSSSVEKLTKDLYNILQEQQSSCLSVSSEEDLLFENEMSMVSVEIGHGSVLMKNPHSFAREEESEASSLSSIENKSSISDAYSHSVKRVEIGAVRGSYYGGQTIKQEQFKRTKSQTERVHVLGSHGSPLCSIDLKDVFNFDEFIEQFTEEEQKKLMNLLPQIDSDDLPHSLRMMFESAQFKDNFSLFQQLIADGVFDVSSSSGAKLEEIRTFKKLALTDFNKSRLVESYNLLKEREKGTGDSVTTTSKSSIPNVPKNIVTIKRRYENQIQVKSESRGLMRSPKRVMKMKASHETENNVSCFRPRSLASVFAQEGGSAVFSYEGNCSSDQDLLLLDLPSNGSFPQAELLHQL

SEQ ID NO: 83977 - protein, 435 aa, Arabidopsis thaliana
  peptide (1)..(435): Ceres Seq. ID no. 12672699
MLKRKAIQENIIIKRPVFEFSYGLKAAVIEEDASNRSSSGSAVSNSESCAQFSSADGSELTGPSQSNAWDTTVPCKRRTCVGRPKSSSVEKLTKDLYNILQEQQSSCLSVSSEEDLLFENEMSMVSVEIGHGSVLMKNPHSFAREEESEASSLSSIENKSSISDAYSHSVKRVEIGAVRGSYYGGQTIKQEQFKRTKSQTERVHVLGSHGSPLCSIDLKDVFNFDEFIEQFTEEEQKKLMNLLPQIDSDDLPHSLRMMFESAQFKDNFSLFQQLIADGVFDVSSSSGAKLEEIRTFKKLALTDFNKSRLVESYNLLKEREKGTGDSVTTTSKSSIPNVPKNIVTIKRRYENQIQVKSESRGLMRSPKRVMKMKASHETENNVSCFRPRSLASVFAQEGGSAVFSYEGNCSSDQDLLLLDLPSNGSFPQAELLHQL

SEQ ID NO: 83978 - DNA, 691 bp, Arabidopsis thaliana
  misc_feature (1)..(691): Ceres Seq. ID no. 12672733
  misc_feature (1)..(691): Ortholog of  Ceres SEQ ID NO 13581804 as cited in SEQ ID NO 51424
  misc_feature (1)..(691): Ortholog of  Ceres SEQ ID NO 13663874 as cited in SEQ ID NO 67003
atggtgaggggcaaaacggagatgaagaggatagagaacgcaacaagcaggcaagtgacgttttcgaagagaagaaatggactcttgaagaaagccttcgaattatcggtcctttgtgatgctgaagttgctttggttatcttctctccaagatccaaactctatgagttctctagctctagtatagcagcaacaattgaacgctatcagagacgaataaaagaaattgggaataatcataagagaaatgataattctcagcaagcgagagacgaaacatctggattgacaaaaaagattgaacagctagagatatctaaacgaaaattgcttggagaaggcattgatgcatgttccatcgaggagctgcaacagttagagaatcagttggaccgaagcttgagcaggataagagccaagaagtaccaattactccgtgaagaaattgagaagttgaaggcagaggagaggaatctcgttaaggaaaataaagatctgaaggagaagtggcttggaatgggaacagcaacaatagcatcatcacaatcaacgttatcatcatcagaagtgaacatagatgacaatatggaagtggagactggtttgttcattggacctcctgagacaagacaatccaaaaaattccctcctcaaaattaatcttacaacttcttcaaaaagaatgttttaa

SEQ ID NO: 83979 - protein, 219 aa, Arabidopsis thaliana
  peptide (1)..(219): Ceres Seq. ID no. 12672734
MVRGKTEMKRIENATSRQVTFSKRRNGLLKKAFELSVLCDAEVALVIFSPRSKLYEFSSSSIAATIERYQRRIKEIGNNHKRNDNSQQARDETSGLTKKIEQLEISKRKLLGEGIDACSIEELQQLENQLDRSLSRIRAKKYQLLREEIEKLKAEERNLVKENKDLKEKWLGMGTATIASSQSTLSSSEVNIDDNMEVETGLFIGPPETRQSKKFPPQN

SEQ ID NO: 83980 - protein, 212 aa, Arabidopsis thaliana
  peptide (1)..(212): Ceres Seq. ID no. 12672735
MKRIENATSRQVTFSKRRNGLLKKAFELSVLCDAEVALVIFSPRSKLYEFSSSSIAATIERYQRRIKEIGNNHKRNDNSQQARDETSGLTKKIEQLEISKRKLLGEGIDACSIEELQQLENQLDRSLSRIRAKKYQLLREEIEKLKAEERNLVKENKDLKEKWLGMGTATIASSQSTLSSSEVNIDDNMEVETGLFIGPPETRQSKKFPPQN

SEQ ID NO: 83981 - DNA, 897 bp, Arabidopsis thaliana
  misc_feature (1)..(897): Ceres Seq. ID no. 12672761
  misc_feature (1)..(897): Ortholog of  Ceres SEQ ID NO 14316404 as cited in SEQ ID NO 57641
  misc_feature (1)..(897): Ortholog of  Ceres SEQ ID NO 12611159 as cited in SEQ ID NO 59821
  misc_feature (1)..(897): Ortholog of  Ceres SEQ ID NO 13584238 as cited in SEQ ID NO 64216
atggcgaagacgaaatatggagagagacataggaaagggttatggtcacctgaagaagacgagaagctaaggagcttcatcctctcttatggccattcttgctggaccactgttcccatcaaagctgggttacaaaggaatgggaagagctgcagattaagatggattaattacctaagaccagggttaaagagggatatgattagtgcagaagaagaagagactatcttgacgtttcattcttccttgggtaacaagtggtcgcaaatagctaaattcttaccgggaagaacagacaatgagataaagaactattggcactctcatttgaaaaagaaatggctcaagtctcagagcttacaagatgcaaaatctatttcccctccttcgtcttcatcatcatcacttgttgcttgtggaaaaagaaatccggaaaccttgatctcgaatcacgtgttctccttccagagacttctagagaacaaatcttcatctccctcacaagaaagcaacggaaataacagccatcaatgttcttctgctcctgagattccaaggcttttcttctctgaatggctttcttcttcatatccccacaccgattattcctctgagtttaccgactctaagcacagtcaagctccaaatgtcgaagagactctctcagcttatgaagaaatgggtgatgttgatcagttccattacaacgaaatgatgatcaacaacagcaactggactcttaacgacattgtgtttggttccaaatgtaagaagcaggagcatcatatttatagagaggcttcagattgtaattcttctgctgaattcttttctccatcaacaacgacgtaaattgcgtttattgtaatgtaaatcaaatttctaaggcaaaaccgg

SEQ ID NO: 83982 - protein, 283 aa, Arabidopsis thaliana
  peptide (1)..(283): Ceres Seq. ID no. 12672762
MAKTKYGERHRKGLWSPEEDEKLRSFILSYGHSCWTTVPIKAGLQRNGKSCRLRWINYLRPGLKRDMISAEEEETILTFHSSLGNKWSQIAKFLPGRTDNEIKNYWHSHLKKKWLKSQSLQDAKSISPPSSSSSSLVACGKRNPETLISNHVFSFQRLLENKSSSPSQESNGNNSHQCSSAPEIPRLFFSEWLSSSYPHTDYSSEFTDSKHSQAPNVEETLSAYEEMGDVDQFHYNEMMINNSNWTLNDIVFGSKCKKQEHHIYREASDCNSSAEFFSPSTTT

SEQ ID NO: 83983 - protein, 217 aa, Arabidopsis thaliana
  peptide (1)..(217): Ceres Seq. ID no. 12672763
MISAEEEETILTFHSSLGNKWSQIAKFLPGRTDNEIKNYWHSHLKKKWLKSQSLQDAKSISPPSSSSSSLVACGKRNPETLISNHVFSFQRLLENKSSSPSQESNGNNSHQCSSAPEIPRLFFSEWLSSSYPHTDYSSEFTDSKHSQAPNVEETLSAYEEMGDVDQFHYNEMMINNSNWTLNDIVFGSKCKKQEHHIYREASDCNSSAEFFSPSTTT

SEQ ID NO: 83984 - DNA, 1893 bp, Arabidopsis thaliana
  misc_feature (1)..(1893): Ceres Seq. ID no. 12672773
  misc_feature (1)..(1893): Ortholog of  Ceres SEQ ID NO 15176298 as cited in SEQ ID NO 58961
atgtacttgtgttgttcgcagatctcagaaaagagggtttttttattttctggaggtaataatattatgaagaggaatttcgagaggaacgatgacgacaagcctgagcgaaagcgtcctgctcttgctagtgtgattgttgaggctctgaaagttgacagtttgcagaagctttgctcgtctttggaacctatcctccgccgagtttacggtattggtgctgagcaggttagtgaggaggtggaacgggctttagcaaaattagtccctactaggcttactacaagttctgtattttctccgaaacgaattggaggtccagatggccggaacttgcagctgcatttcaagtctagattatctctccctttattcactggaggaagagtggaaggagagcaaggtgctactatccatgttgtattgattgatgcaaacacgggtcgtcctgtaacagttggaccagaagcttccctgaagcttgaggttgttgttcttgggggtgactttaacaatgaagatgatgaagattggacccaggaagagtttgaaagtcatgttgtaaaagagcgtgaaggaaagagacctttgcttactggagacttgtttgttgttctcaaggaaggggtaggcactttgggtgagattgttttcacggataattcgagttggattagaagtcgcaagttcaggcttggtttgagggtaccctctgggtactgtgatggcatacgtatacgtgaagcaaaaacagaagctttctctgttaaagatcacaggggcgaattgtacaagaagcattatccacctgctttgaatgatgaggtgtggaggttagagaagattggtaaagatggggcgtttcataagaggctaaccgctgcaggaatagtcactgtggaaggctttctgagacaattggtcagagattctacaaaattacgggctattcttggaagtggcatgtcaaataagatgtgggatttgctagtggagcatgcaaaaacatgtgtcctaagcggtaagctttatatctactatactgaagattcaaggtctgttggcgttgtattcaataacatctacgagttaagtggcctcataactgaagaccaatacttatctgctgattcactctctgaaagccaaaaggtatatgtggatggactggtgaagaaagcgtatgaaaattggaaccaggtcgtggagtatgaaggcgaatctcttttaaacttaaaccagcctgagaggttggatatttctcagactgatcctgtaacagctctggcaagttactctacggtgcctcttagtcagtttcctgaattcgctatagaagggtataatcaaacgctgacaacagccctacctcataacccacaagcacaatttgattttgttccccagcaagatcagtttatcggaatacagcaacctcaaactcaaaccaacatagagaatgaaaatgtaactaggttggttcttggtcctccacaatcatccacaggtgggtaccaagacatcaaatcttctgctgaccaggaaaatcttaatcctttcgaagactggacaaacctaagtgagaatgactttttctcggaggaagagatccggcaaacaagccatgacttgttagcgaatgaggacatgcaacagttgctcttcagcatgggaggtggcaaaggagaagatggttttactttcccatcgtttatgcagaatacaccaatgatgcagggatatgatgaggagggccgtgggcgatcaggaaaagcggttgttggatggctgaaggtaaaagctgctatgagatggggattcttcataaggaggaaagctgctgagaggagagcacagattgtggagcttcatgataataacgatggtaaatga

SEQ ID NO: 83985 - protein, 630 aa, Arabidopsis thaliana
  peptide (1)..(630): Ceres Seq. ID no. 12672774
MYLCCSQISEKRVFLFSGGNNIMKRNFERNDDDKPERKRPALASVIVEALKVDSLQKLCSSLEPILRRVYGIGAEQVSEEVERALAKLVPTRLTTSSVFSPKRIGGPDGRNLQLHFKSRLSLPLFTGGRVEGEQGATIHVVLIDANTGRPVTVGPEASLKLEVVVLGGDFNNEDDEDWTQEEFESHVVKEREGKRPLLTGDLFVVLKEGVGTLGEIVFTDNSSWIRSRKFRLGLRVPSGYCDGIRIREAKTEAFSVKDHRGELYKKHYPPALNDEVWRLEKIGKDGAFHKRLTAAGIVTVEGFLRQLVRDSTKLRAILGSGMSNKMWDLLVEHAKTCVLSGKLYIYYTEDSRSVGVVFNNIYELSGLITEDQYLSADSLSESQKVYVDGLVKKAYENWNQVVEYEGESLLNLNQPERLDISQTDPVTALASYSTVPLSQFPEFAIEGYNQTLTTALPHNPQAQFDFVPQQDQFIGIQQPQTQTNIENENVTRLVLGPPQSSTGGYQDIKSSADQENLNPFEDWTNLSENDFFSEEEIRQTSHDLLANEDMQQLLFSMGGGKGEDGFTFPSFMQNTPMMQGYDEEGRGRSGKAVVGWLKVKAAMRWGFFIRRKAAERRAQIVELHDNNDGK

SEQ ID NO: 83986 - protein, 608 aa, Arabidopsis thaliana
  peptide (1)..(608): Ceres Seq. ID no. 12672775
MKRNFERNDDDKPERKRPALASVIVEALKVDSLQKLCSSLEPILRRVYGIGAEQVSEEVERALAKLVPTRLTTSSVFSPKRIGGPDGRNLQLHFKSRLSLPLFTGGRVEGEQGATIHVVLIDANTGRPVTVGPEASLKLEVVVLGGDFNNEDDEDWTQEEFESHVVKEREGKRPLLTGDLFVVLKEGVGTLGEIVFTDNSSWIRSRKFRLGLRVPSGYCDGIRIREAKTEAFSVKDHRGELYKKHYPPALNDEVWRLEKIGKDGAFHKRLTAAGIVTVEGFLRQLVRDSTKLRAILGSGMSNKMWDLLVEHAKTCVLSGKLYIYYTEDSRSVGVVFNNIYELSGLITEDQYLSADSLSESQKVYVDGLVKKAYENWNQVVEYEGESLLNLNQPERLDISQTDPVTALASYSTVPLSQFPEFAIEGYNQTLTTALPHNPQAQFDFVPQQDQFIGIQQPQTQTNIENENVTRLVLGPPQSSTGGYQDIKSSADQENLNPFEDWTNLSENDFFSEEEIRQTSHDLLANEDMQQLLFSMGGGKGEDGFTFPSFMQNTPMMQGYDEEGRGRSGKAVVGWLKVKAAMRWGFFIRRKAAERRAQIVELHDNNDGK

SEQ ID NO: 83987 - DNA, 1624 bp, Arabidopsis thaliana
  misc_feature (1)..(1624): Ceres Seq. ID no. 12672776
  misc_feature (1)..(1624): Ortholog of  Ceres SEQ ID NO 12612314 as cited in SEQ ID NO 51420
ctctctgacgatgaaagagtattggacatctttggcttctctactcggcgttttagccttttgccaaagcctaatgaattctgtattcccaccagagctccgtttcgccatctcgaaactcttcaacaaattctttaaactcttctccaccttctgttacttcgacataacagagattgacggcgtcaacaccaacgagctttacaatgccgtccagctttacctcagctcctctgtctccatcgcaggtaaccgtctcagcctcacacgcgccgtcaactcctcctccgtcacattcggtctctccaacaacgactccatcgtcgacacgtttaactccgtcaccgtcgtctgggaacacatcgttacacagagacaaactcaaaccttcgcttggagaccaatgccggaagagaaacgtggcttcacgctccggatcaagaagaaagacaagaacttgatccttgattcttacttggattacatcatggagaaagctaacgagattcgtcggttgaatcaagatcggcttctttacacgaattcacgaggtgggtctcttgattctagaggtcttccttgggaatctgttccctttaagcatccgagtactttcgatactctcgctatggatccggttaagaagcaacagatcatggaggatcttaaagatttcgctgagtgtcaatctttttacgagagaactggtcgggcttggaaaagaggttacttgctctatggacctcccggaacagggaagtcgagcatgatcgccgccatggctaactatctccggtacgacatctacgatcttgagctcacggaggtcaaaagcaattctgaactgaggaagcttctgatgaagactagctccaagtcgataattgttatcgaggatattgattgttctatcaatttaacgaatcgtaacaagaaacagagcacagggagctataacgaaccggagatgttaaccgggtccggtttaggtgatgatttgggtgatgggaacactataacgctttcaggtttgttgaatttcactgatggactttggtcttgttgtggtagcgagaggatttttgtgttcacgacgaatcacattgagaagcttgatcctgcattgcttagaagtggaagaatggatatgcatatacacatgagttactgtacgttttcttcggtcaagattttattgaggaattacttggggtttgaggaaggtgatcttaacgacgttgttttgaaggagttagcggaagtggttgatagggctgagattacaccggctgacgtaagtgaggctttgattaagaatcggagggataaagagagagctgtgagggagcttttggttgatttgagaagtagagtggagagaaatgagaagaatgggaaatcgagggttcaaaatgtgagcttggaagagcaagagaatagagctttcgacagtctttacgcagaagagaatggaggagaagaagaagagattgaggataacatttgcaaaagtagtgatgattgttcttaattaggttttctaacgtttctatgttctacacaatgtgaaagttgtgtgacctttcttatgtttctccttttttgggtagttaactttttgaag

SEQ ID NO: 83988 - protein, 509 aa, Arabidopsis thaliana
  peptide (1)..(509): Ceres Seq. ID no. 12672777
SLTMKEYWTSLASLLGVLAFCQSLMNSVFPPELRFAISKLFNKFFKLFSTFCYFDITEIDGVNTNELYNAVQLYLSSSVSIAGNRLSLTRAVNSSSVTFGLSNNDSIVDTFNSVTVVWEHIVTQRQTQTFAWRPMPEEKRGFTLRIKKKDKNLILDSYLDYIMEKANEIRRLNQDRLLYTNSRGGSLDSRGLPWESVPFKHPSTFDTLAMDPVKKQQIMEDLKDFAECQSFYERTGRAWKRGYLLYGPPGTGKSSMIAAMANYLRYDIYDLELTEVKSNSELRKLLMKTSSKSIIVIEDIDCSINLTNRNKKQSTGSYNEPEMLTGSGLGDDLGDGNTITLSGLLNFTDGLWSCCGSERIFVFTTNHIEKLDPALLRSGRMDMHIHMSYCTFSSVKILLRNYLGFEEGDLNDVVLKELAEVVDRAEITPADVSEALIKNRRDKERAVRELLVDLRSRVERNEKNGKSRVQNVSLEEQENRAFDSLYAEENGGEEEEIEDNICKSSDDCS

SEQ ID NO: 83989 - protein, 506 aa, Arabidopsis thaliana
  peptide (1)..(506): Ceres Seq. ID no. 12672778
MKEYWTSLASLLGVLAFCQSLMNSVFPPELRFAISKLFNKFFKLFSTFCYFDITEIDGVNTNELYNAVQLYLSSSVSIAGNRLSLTRAVNSSSVTFGLSNNDSIVDTFNSVTVVWEHIVTQRQTQTFAWRPMPEEKRGFTLRIKKKDKNLILDSYLDYIMEKANEIRRLNQDRLLYTNSRGGSLDSRGLPWESVPFKHPSTFDTLAMDPVKKQQIMEDLKDFAECQSFYERTGRAWKRGYLLYGPPGTGKSSMIAAMANYLRYDIYDLELTEVKSNSELRKLLMKTSSKSIIVIEDIDCSINLTNRNKKQSTGSYNEPEMLTGSGLGDDLGDGNTITLSGLLNFTDGLWSCCGSERIFVFTTNHIEKLDPALLRSGRMDMHIHMSYCTFSSVKILLRNYLGFEEGDLNDVVLKELAEVVDRAEITPADVSEALIKNRRDKERAVRELLVDLRSRVERNEKNGKSRVQNVSLEEQENRAFDSLYAEENGGEEEEIEDNICKSSDDCS

SEQ ID NO: 83990 - protein, 485 aa, Arabidopsis thaliana
  peptide (1)..(485): Ceres Seq. ID no. 12672779
MNSVFPPELRFAISKLFNKFFKLFSTFCYFDITEIDGVNTNELYNAVQLYLSSSVSIAGNRLSLTRAVNSSSVTFGLSNNDSIVDTFNSVTVVWEHIVTQRQTQTFAWRPMPEEKRGFTLRIKKKDKNLILDSYLDYIMEKANEIRRLNQDRLLYTNSRGGSLDSRGLPWESVPFKHPSTFDTLAMDPVKKQQIMEDLKDFAECQSFYERTGRAWKRGYLLYGPPGTGKSSMIAAMANYLRYDIYDLELTEVKSNSELRKLLMKTSSKSIIVIEDIDCSINLTNRNKKQSTGSYNEPEMLTGSGLGDDLGDGNTITLSGLLNFTDGLWSCCGSERIFVFTTNHIEKLDPALLRSGRMDMHIHMSYCTFSSVKILLRNYLGFEEGDLNDVVLKELAEVVDRAEITPADVSEALIKNRRDKERAVRELLVDLRSRVERNEKNGKSRVQNVSLEEQENRAFDSLYAEENGGEEEEIEDNICKSSDDCS

SEQ ID NO: 83991 - DNA, 3924 bp, Arabidopsis thaliana
  misc_feature (1)..(3924): Ceres Seq. ID no. 12672780
  misc_feature (1)..(3924): Ortholog of  Ceres SEQ ID NO 15179695 as cited in SEQ ID NO 193
  misc_feature (1)..(3924): Ortholog of  Ceres SEQ ID NO 15176963 as cited in SEQ ID NO 52894
ctaaccactttcctcccttaatttctatccctatatttattttcctttcattttcctctccaactaattacacacacttgaagctgaaaaaaatgcagccgtccggtgatccggcgccggaaaaggagaaagagatgacgcagccaaaagtgtcactgcttaagctcttctccttcgcagatttctatgattgtgttctaatgactcttggatccgtaggagcgtgcattcatggcgcctcggttccaatctttttcatcttctttggcaaactcatcaatattatcggtcttgcttatcttttcccaaaacaagcctctcacagagtcgccaagtactcgttggattttgtatacttgagtgtggctatactattttcatcatggttagaggttgcatgttggatgcatacgggagagaggcaagcggcgaagatgaggagagcttatctcaggtcaatgttaagccaagacataagcttattcgacaccgaagcttctacaggagaagtcatctccgccatcacctccgacatcctcgtcgtccaagatgctctctccgagaaggtagggaatttcttgcactacataagccggttcatagccggttttgcaattggattcactagtgtatggcaaataagtcttgtcactctatccatagtccccttaatcgctctagctggcggcatctatgcgttcgtcgccatcggacttattgctcgtgtccggaaatcatacatcaaggctggtgagattgcagaagaggtgatcgggaatgtgaggaccgtacaagcattcaccggtgaagaaagggcggtgagattataccgagaagcgctggagaatacgtataagtacgggagaaaagctggtttaaccaaaggattaggtcttggatcgatgcactgtgtcttgtttctatcttgggccttgctcgtatggttcacaagtgttgtggtccacaaggatatcgccgatggtggcaaatcattcactaccatgctcaacgttgtcatcgccggcctgtctcttggacaagcggcgcccgatatttctgcgtttgtacgggcaaaagccgctgcttatccaattttcaagatgattgaacggaacacggtgacaaaaacaagcgcaaaatctggccgtaaactagggaaagtagacgggcacattcaattcaaagacgcgactttcagttacccatctcgccctgatgtggtgatcttcgacaggttaaacctagctatccctgccgggaaaattgtggcacttgttggaggaagcggatcagggaagagcacggtcatatctttgatagagcggttctacgagcctatttctggagcagtgttgctagacgggaacaatatcagtgagctggatattaagtggttaagaggacagattggtttggttaaccaagaaccagctctgtttgcaacaacgattcgtgagaacattctgtatggcaaagacgacgcaactgctgaggagatcacccgtgccgcaaagctctcggaagccatttctttcatcaacaacctccctgaaggatttgagactcaggttggcgagagagggattcaactatctggcggacagaaacaaaggattgctatatcaagagcaattgtgaagaatccatcgatactcttactcgacgaagcaacaagtgctttagacgcagagtcggagaagagcgtgcaagaagcgctggatcgagtgatggttgggagaacaacggtggtggtggctcacagactctcaacggtaagaaatgctgacatcatagcagttgtacacgaaggtaaaatagttgagtttggaaaccacgagaatctcatatctaatcccgacggagcctactcttctcttcttcgtctccaagagactgcctcattgcagcgtaacccttccttgaatcgcacgctaagcagaccacatagtataaaatactcgcgggaactatcaagaacaagatccagcttctgttcagagagggaatcggtaactcgaccggatggggctgatccatccaaaaaagtgaaagtaacggtgggacgtctttactctatgatccgtccggactggatgtatggcgtgtgtggcacgatatgtgcctttatcgctggatctcaaatgccccttttcgcgcttggcgtctcgcaagccttagtttcctattacagtggttgggatgagactcaaaaagagatcaagaagatcgctatcctcttctgctgcgcgtccgttatcactctaattgtctacaccattgagcatatctgctttggcactatgggcgagcgtctcactctccgtgtccgcgaaaatatgttcagagcaatcttgaagaatgaaatcgggtggtttgatgaggtggacaacacaagctcaatgttggcatcgcggcttgagagcgatgcaactttgcttaaaaccatagtggtcgataggtcaacgattctactgcagaacttaggtctagttgtgacctcttttatcatagcatttatactcaactggcgtctcactcttgtcgtcttggccacatacccattggttataagcggacatatcagcgagaaacttttcatgcaaggatatggaggagacttgaacaaagcatacttaaaggccaacatgttggccggtgagtctgttagcaacatccgcacggtcgctgccttctgtgctgaggaaaagattctagaactttattcaagagagcttttagaaccttccaaaagttctttcaggcgtggacaaattgcaggacttttctacggtgtctctcagttcttcattttctcttcctatggcctcgccctctggtacggatcaactttgatggacaaaggattagcgggcttcaaatcagtgatgaaaacattcatggttttgattgtgacggcgttagcgatgggtgagacattggctctagctccggatctgctgaaaggaaaccagatggttgcgtccgtgtttgagatcttggaccggaaaactcagatcgttggagaaaccagcgaggagctgaacaatgtggaaggcacgattgagctcaaaggcgtccactttagctacccttcgagaccagatgttgtaattttccgggactttgatctgatagttcgtgccggaaagagcatggcgctcgttggacagagtggatctgggaaaagttctgttatttcactcattctccggttctatgacccgactgctggaaaagtcatgatagagggaaaagacatcaagaaactagatttgaaagcattgaggaaacacattggtcttgttcaacaagaaccagcacttttcgccacaacaatctacgagaacattttgtatggaaacgaaggagcatctcaatctgaagtcgtcgaatcagctatgctcgcaaatgctcacagcttcattacctctctcccagaaggttactctaccaaagtcggtgaacgtggagttcaaatgtcaggcgggcagagacagaggatcgctatcgctagagccattctcaagaatccagcaattctattacttgacgaagccacaagcgctttggacgttgaatctgagcgtgtggtacaacaagcattggatcggttaatggctaaccggacgactgtggtagttgctcacaggctatcgacgatcaagaacgctgacacgataagtgtattacacggaggtaagatcgtagagcaaggcagccaccgtaagctcgttctaaacaagagtggtccatattttaaacttatcagtcttcagcagcagcaacaaccttaaattaagtactatactttatttattgaaaaactctttttatttttatttttgtggaaaatattgatcatatactcatttgatgtgattatcttaatcttcttgatttaccgttggtaaaaaaaaagttacg

SEQ ID NO: 83992 - protein, 1263 aa, Arabidopsis thaliana
  peptide (1)..(1263): Ceres Seq. ID no. 12672781
NHFPPLISIPIFIFLSFSSPTNYTHLKLKKMQPSGDPAPEKEKEMTQPKVSLLKLFSFADFYDCVLMTLGSVGACIHGASVPIFFIFFGKLINIIGLAYLFPKQASHRVAKYSLDFVYLSVAILFSSWLEVACWMHTGERQAAKMRRAYLRSMLSQDISLFDTEASTGEVISAITSDILVVQDALSEKVGNFLHYISRFIAGFAIGFTSVWQISLVTLSIVPLIALAGGIYAFVAIGLIARVRKSYIKAGEIAEEVIGNVRTVQAFTGEERAVRLYREALENTYKYGRKAGLTKGLGLGSMHCVLFLSWALLVWFTSVVVHKDIADGGKSFTTMLNVVIAGLSLGQAAPDISAFVRAKAAAYPIFKMIERNTVTKTSAKSGRKLGKVDGHIQFKDATFSYPSRPDVVIFDRLNLAIPAGKIVALVGGSGSGKSTVISLIERFYEPISGAVLLDGNNISELDIKWLRGQIGLVNQEPALFATTIRENILYGKDDATAEEITRAAKLSEAISFINNLPEGFETQVGERGIQLSGGQKQRIAISRAIVKNPSILLLDEATSALDAESEKSVQEALDRVMVGRTTVVVAHRLSTVRNADIIAVVHEGKIVEFGNHENLISNPDGAYSSLLRLQETASLQRNPSLNRTLSRPHSIKYSRELSRTRSSFCSERESVTRPDGADPSKKVKVTVGRLYSMIRPDWMYGVCGTICAFIAGSQMPLFALGVSQALVSYYSGWDETQKEIKKIAILFCCASVITLIVYTIEHICFGTMGERLTLRVRENMFRAILKNEIGWFDEVDNTSSMLASRLESDATLLKTIVVDRSTILLQNLGLVVTSFIIAFILNWRLTLVVLATYPLVISGHISEKLFMQGYGGDLNKAYLKANMLAGESVSNIRTVAAFCAEEKILELYSRELLEPSKSSFRRGQIAGLFYGVSQFFIFSSYGLALWYGSTLMDKGLAGFKSVMKTFMVLIVTALAMGETLALAPDLLKGNQMVASVFEILDRKTQIVGETSEELNNVEGTIELKGVHFSYPSRPDVVIFRDFDLIVRAGKSMALVGQSGSGKSSVISLILRFYDPTAGKVMIEGKDIKKLDLKALRKHIGLVQQEPALFATTIYENILYGNEGASQSEVVESAMLANAHSFITSLPEGYSTKVGERGVQMSGGQRQRIAIARAILKNPAILLLDEATSALDVESERVVQQALDRLMANRTTVVVAHRLSTIKNADTISVLHGGKIVEQGSHRKLVLNKSGPYFKLISLQQQQQP

SEQ ID NO: 83993 - protein, 1233 aa, Arabidopsis thaliana
  peptide (1)..(1233): Ceres Seq. ID no. 12672782
MQPSGDPAPEKEKEMTQPKVSLLKLFSFADFYDCVLMTLGSVGACIHGASVPIFFIFFGKLINIIGLAYLFPKQASHRVAKYSLDFVYLSVAILFSSWLEVACWMHTGERQAAKMRRAYLRSMLSQDISLFDTEASTGEVISAITSDILVVQDALSEKVGNFLHYISRFIAGFAIGFTSVWQISLVTLSIVPLIALAGGIYAFVAIGLIARVRKSYIKAGEIAEEVIGNVRTVQAFTGEERAVRLYREALENTYKYGRKAGLTKGLGLGSMHCVLFLSWALLVWFTSVVVHKDIADGGKSFTTMLNVVIAGLSLGQAAPDISAFVRAKAAAYPIFKMIERNTVTKTSAKSGRKLGKVDGHIQFKDATFSYPSRPDVVIFDRLNLAIPAGKIVALVGGSGSGKSTVISLIERFYEPISGAVLLDGNNISELDIKWLRGQIGLVNQEPALFATTIRENILYGKDDATAEEITRAAKLSEAISFINNLPEGFETQVGERGIQLSGGQKQRIAISRAIVKNPSILLLDEATSALDAESEKSVQEALDRVMVGRTTVVVAHRLSTVRNADIIAVVHEGKIVEFGNHENLISNPDGAYSSLLRLQETASLQRNPSLNRTLSRPHSIKYSRELSRTRSSFCSERESVTRPDGADPSKKVKVTVGRLYSMIRPDWMYGVCGTICAFIAGSQMPLFALGVSQALVSYYSGWDETQKEIKKIAILFCCASVITLIVYTIEHICFGTMGERLTLRVRENMFRAILKNEIGWFDEVDNTSSMLASRLESDATLLKTIVVDRSTILLQNLGLVVTSFIIAFILNWRLTLVVLATYPLVISGHISEKLFMQGYGGDLNKAYLKANMLAGESVSNIRTVAAFCAEEKILELYSRELLEPSKSSFRRGQIAGLFYGVSQFFIFSSYGLALWYGSTLMDKGLAGFKSVMKTFMVLIVTALAMGETLALAPDLLKGNQMVASVFEILDRKTQIVGETSEELNNVEGTIELKGVHFSYPSRPDVVIFRDFDLIVRAGKSMALVGQSGSGKSSVISLILRFYDPTAGKVMIEGKDIKKLDLKALRKHIGLVQQEPALFATTIYENILYGNEGASQSEVVESAMLANAHSFITSLPEGYSTKVGERGVQMSGGQRQRIAIARAILKNPAILLLDEATSALDVESERVVQQALDRLMANRTTVVVAHRLSTIKNADTISVLHGGKIVEQGSHRKLVLNKSGPYFKLISLQQQQQP

SEQ ID NO: 83994 - protein, 1219 aa, Arabidopsis thaliana
  peptide (1)..(1219): Ceres Seq. ID no. 12672783
MTQPKVSLLKLFSFADFYDCVLMTLGSVGACIHGASVPIFFIFFGKLINIIGLAYLFPKQASHRVAKYSLDFVYLSVAILFSSWLEVACWMHTGERQAAKMRRAYLRSMLSQDISLFDTEASTGEVISAITSDILVVQDALSEKVGNFLHYISRFIAGFAIGFTSVWQISLVTLSIVPLIALAGGIYAFVAIGLIARVRKSYIKAGEIAEEVIGNVRTVQAFTGEERAVRLYREALENTYKYGRKAGLTKGLGLGSMHCVLFLSWALLVWFTSVVVHKDIADGGKSFTTMLNVVIAGLSLGQAAPDISAFVRAKAAAYPIFKMIERNTVTKTSAKSGRKLGKVDGHIQFKDATFSYPSRPDVVIFDRLNLAIPAGKIVALVGGSGSGKSTVISLIERFYEPISGAVLLDGNNISELDIKWLRGQIGLVNQEPALFATTIRENILYGKDDATAEEITRAAKLSEAISFINNLPEGFETQVGERGIQLSGGQKQRIAISRAIVKNPSILLLDEATSALDAESEKSVQEALDRVMVGRTTVVVAHRLSTVRNADIIAVVHEGKIVEFGNHENLISNPDGAYSSLLRLQETASLQRNPSLNRTLSRPHSIKYSRELSRTRSSFCSERESVTRPDGADPSKKVKVTVGRLYSMIRPDWMYGVCGTICAFIAGSQMPLFALGVSQALVSYYSGWDETQKEIKKIAILFCCASVITLIVYTIEHICFGTMGERLTLRVRENMFRAILKNEIGWFDEVDNTSSMLASRLESDATLLKTIVVDRSTILLQNLGLVVTSFIIAFILNWRLTLVVLATYPLVISGHISEKLFMQGYGGDLNKAYLKANMLAGESVSNIRTVAAFCAEEKILELYSRELLEPSKSSFRRGQIAGLFYGVSQFFIFSSYGLALWYGSTLMDKGLAGFKSVMKTFMVLIVTALAMGETLALAPDLLKGNQMVASVFEILDRKTQIVGETSEELNNVEGTIELKGVHFSYPSRPDVVIFRDFDLIVRAGKSMALVGQSGSGKSSVISLILRFYDPTAGKVMIEGKDIKKLDLKALRKHIGLVQQEPALFATTIYENILYGNEGASQSEVVESAMLANAHSFITSLPEGYSTKVGERGVQMSGGQRQRIAIARAILKNPAILLLDEATSALDVESERVVQQALDRLMANRTTVVVAHRLSTIKNADTISVLHGGKIVEQGSHRKLVLNKSGPYFKLISLQQQQQP

SEQ ID NO: 83995 - DNA, 1572 bp, Arabidopsis thaliana
  misc_feature (1)..(1572): Ceres Seq. ID no. 12672824
  misc_feature (1)..(1572): Ortholog of  Ceres SEQ ID NO 15227091 as cited in SEQ ID NO 60294
  misc_feature (1)..(1572): Ortholog of  Ceres SEQ ID NO 13502874 as cited in SEQ ID NO 66298
  misc_feature (1)..(1572): Ortholog of  Ceres SEQ ID NO 12614124 as cited in SEQ ID NO 68392
atggatacttccctcttttctttatttgttccaatccttgttttcgtttttattgctctttttaagaaatcaaagaaaccaaaacatgtaaaagctcctgcaccaagtggtgcgtggcccatcatcggtcatcttcaccttctcagtggcaaggaacagcttctttaccgaaccttaggaaaaatggctgaccagtacggtccagccatgtcgctacgacttgggagcagtgaaacatttgttgtgagcagttttgaggtggctaaagattgttttactgtgaacgacaaagccttggcttcacgtcctattactgcagccgcaaagcacatgggttacgattgtgctgttttcgggtttgcgccttatagcgctttctggcgtgagatgcgtaaaatcgcaaccctcgagctactttctaaccggcggcttcagatgctcaagcatgtccgtgtttctgagatctcaatggttatgcaagatttgtattccttgtgggtcaagaaaggtggttcagaaccagtaatggttgatctaaagagctggttagaggatatgagtctgaacatgatggtgagaatggtggccggaaagcgatactttggaggcggctcgttatcccctgaagatgccgaagaggcaaggcaatgcagaaagggcgtcgcaaatttctttcacctcgtcggtatattcaccgtgtccgatgcttttccgaaactagggtggtttgattttcaaggacatgagaaggagatgaagcaaacaggaagagaattagatgtgatccttgaaagatggattgaaaaccatcgacaacaacgaaaagtttcaggaacgaaacacaatgattcagacttcgtcgacgttatgctgtcgcttgcagaacaaggcaaattctcgcatcttcaacatgatgcaattactagcattaaatctacctgcctggcactgattcttggaggaagtgagacttcaccatcaacccttacatgggccatttctcttcttctaaacaataaggacatgttaaagaaagcacaagatgagatcgacatccacgtcggcagagacaggaacgtcgaggattcagacatagaaaatctggtgtatattcaagcgattatcaaagaaacattgagattgtatccagctggtcctctcttaggccatcgagaggcgatagaagattgcacggtcgctggttacaacgttcgtcgcggcacaagaatgttagtgaatgtatggaaaatccaaagagatccgagggtttatatggagccaaacgaatttcgaccagagaggtttatcacaggagaagcaaaagagttcgatgtaagaggacaaaactttgagctgatgccatttggttcgggaagaagatcatgcccaggctcttcattggccatgcaagtgcttcatttaggtcttgctcgtttccttcaatcatttgacgtgaaaactgttatggatatgcctgttgatatgactgagagccctggcttaaccattcctaaagccacgcctcttgagattctgatcagtccacgtcttaaggaagggctttatgtgtga

SEQ ID NO: 83996 - protein, 523 aa, Arabidopsis thaliana
  peptide (1)..(523): Ceres Seq. ID no. 12672825
MDTSLFSLFVPILVFVFIALFKKSKKPKHVKAPAPSGAWPIIGHLHLLSGKEQLLYRTLGKMADQYGPAMSLRLGSSETFVVSSFEVAKDCFTVNDKALASRPITAAAKHMGYDCAVFGFAPYSAFWREMRKIATLELLSNRRLQMLKHVRVSEISMVMQDLYSLWVKKGGSEPVMVDLKSWLEDMSLNMMVRMVAGKRYFGGGSLSPEDAEEARQCRKGVANFFHLVGIFTVSDAFPKLGWFDFQGHEKEMKQTGRELDVILERWIENHRQQRKVSGTKHNDSDFVDVMLSLAEQGKFSHLQHDAITSIKSTCLALILGGSETSPSTLTWAISLLLNNKDMLKKAQDEIDIHVGRDRNVEDSDIENLVYIQAIIKETLRLYPAGPLLGHREAIEDCTVAGYNVRRGTRMLVNVWKIQRDPRVYMEPNEFRPERFITGEAKEFDVRGQNFELMPFGSGRRSCPGSSLAMQVLHLGLARFLQSFDVKTVMDMPVDMTESPGLTIPKATPLEILISPRLKEGLYV

SEQ ID NO: 83997 - protein, 462 aa, Arabidopsis thaliana
  peptide (1)..(462): Ceres Seq. ID no. 12672826
MADQYGPAMSLRLGSSETFVVSSFEVAKDCFTVNDKALASRPITAAAKHMGYDCAVFGFAPYSAFWREMRKIATLELLSNRRLQMLKHVRVSEISMVMQDLYSLWVKKGGSEPVMVDLKSWLEDMSLNMMVRMVAGKRYFGGGSLSPEDAEEARQCRKGVANFFHLVGIFTVSDAFPKLGWFDFQGHEKEMKQTGRELDVILERWIENHRQQRKVSGTKHNDSDFVDVMLSLAEQGKFSHLQHDAITSIKSTCLALILGGSETSPSTLTWAISLLLNNKDMLKKAQDEIDIHVGRDRNVEDSDIENLVYIQAIIKETLRLYPAGPLLGHREAIEDCTVAGYNVRRGTRMLVNVWKIQRDPRVYMEPNEFRPERFITGEAKEFDVRGQNFELMPFGSGRRSCPGSSLAMQVLHLGLARFLQSFDVKTVMDMPVDMTESPGLTIPKATPLEILISPRLKEGLYV

SEQ ID NO: 83998 - protein, 454 aa, Arabidopsis thaliana
  peptide (1)..(454): Ceres Seq. ID no. 12672827
MSLRLGSSETFVVSSFEVAKDCFTVNDKALASRPITAAAKHMGYDCAVFGFAPYSAFWREMRKIATLELLSNRRLQMLKHVRVSEISMVMQDLYSLWVKKGGSEPVMVDLKSWLEDMSLNMMVRMVAGKRYFGGGSLSPEDAEEARQCRKGVANFFHLVGIFTVSDAFPKLGWFDFQGHEKEMKQTGRELDVILERWIENHRQQRKVSGTKHNDSDFVDVMLSLAEQGKFSHLQHDAITSIKSTCLALILGGSETSPSTLTWAISLLLNNKDMLKKAQDEIDIHVGRDRNVEDSDIENLVYIQAIIKETLRLYPAGPLLGHREAIEDCTVAGYNVRRGTRMLVNVWKIQRDPRVYMEPNEFRPERFITGEAKEFDVRGQNFELMPFGSGRRSCPGSSLAMQVLHLGLARFLQSFDVKTVMDMPVDMTESPGLTIPKATPLEILISPRLKEGLYV

SEQ ID NO: 83999 - DNA, 761 bp, Arabidopsis thaliana
  misc_feature (1)..(761): Ceres Seq. ID no. 12672828
  misc_feature (1)..(761): Ortholog of  Ceres SEQ ID NO 13663631 as cited in SEQ ID NO 67073
aacacacaacatagaataaaagagcttacagacaactaagaaaaaaaataaaaatgaagatgtttatctctcctcaaaccctagtactattggcattagctcttgtcctagcttttgcagttccactgaaagcccaagaccggcgacaagactaccttgatgtacacaaccatgctcgagacgacgttagtgtgcctcatataaaatggcatgcgggagcagcccgatacgcctggaactatgctcaaagaagaaagcgggactgtcgtctcattcactcaaactcacgcggacgttacggtgaaaacttggcatggagcagtggtgatatgtccggagctgccgcagtgagattgtgggtcagggagaagtctgactacttccacaaatcgaacacatgccgtgctggaaaacaatgtggtcattatactcaagttgtgtggaaaaactcagagtgggttggatgtgccaaagtcaagtgtgacaatggtggaacctttgtgacttgcaactattctcatcctggtaatgttaggggacgtaggccttactaactatatgtgtacgcagacgaaagaaacttgtccatagaggacgtgtgtgttttctataatttggaataaatgatcaccatctatcaggatgtggtggttcctttgtacgtttatagtttgtataatattttgtcatggaataatacttttttcttgtgtgtgcttaaaactgtaattatcattagatgatgcataatgggagttatt

SEQ ID NO: 84000 - protein, 166 aa, Arabidopsis thaliana
  peptide (1)..(166): Ceres Seq. ID no. 12672829
MKMFISPQTLVLLALALVLAFAVPLKAQDRRQDYLDVHNHARDDVSVPHIKWHAGAARYAWNYAQRRKRDCRLIHSNSRGRYGENLAWSSGDMSGAAAVRLWVREKSDYFHKSNTCRAGKQCGHYTQVVWKNSEWVGCAKVKCDNGGTFVTCNYSHPGNVRGRRPY

SEQ ID NO: 84001 - protein, 164 aa, Arabidopsis thaliana
  peptide (1)..(164): Ceres Seq. ID no. 12672830
MFISPQTLVLLALALVLAFAVPLKAQDRRQDYLDVHNHARDDVSVPHIKWHAGAARYAWNYAQRRKRDCRLIHSNSRGRYGENLAWSSGDMSGAAAVRLWVREKSDYFHKSNTCRAGKQCGHYTQVVWKNSEWVGCAKVKCDNGGTFVTCNYSHPGNVRGRRPY

SEQ ID NO: 84002 - DNA, 1635 bp, Arabidopsis thaliana
  misc_feature (1)..(1635): Ceres Seq. ID no. 12672831
  misc_feature (1)..(1635): Ortholog of  Ceres SEQ ID NO 14313288 as cited in SEQ ID NO 67419
atgtgtctagagattccttataaaccacagtacaatggagggatcatcgtgaatcctgatatgcaaaatggttcccaaggctggtcacagttcgaaaatgcaaaagtcaatttcagagaatttggaggcaataagtttgttgttgccacacagagaaatcaatcttctgacagcgtctcacagaaggtttacttggaaaaaggaattctctacacattctctgcttggttacaagtaagcacaggaaaagctcctgtgagtgccgttttcaagaagaatggtgaatataagcatgccggttcggttgttgctgaatccaaatgttggtccatgctgaaaggtggcctcactgttgatgaatctggtcctgctgaactcttcgtcgagagcgaggacacaacagttgagatttgggttgatagtgtctctttgcaaccattcacacaagacgaatggaacgctcaccaggagcagagcattgacaattcaagaaaaggtcctgtcagaatcagagtcgtcaataacaaaggcgagaagataccaaacgcatccattaccatagaacagaagcgactcggattcccattcgggagcgctgtagcacagaacatacttgggaatcaagcataccaaaactggttcactcaaagattcaccgtgactacattcgaaaacgagatgaaatggtacagcacagaatctgtaagaggcatagagaattacacagtcgcggacgcaatgttgagattcttcaaccagcatggcattgctgtacgtggacacaatgttgtatgggaccaccctaagtatcaatctaaatgggttacttctctgtcacgtaacgatctatacaatgcagtaaaacgaagggttttctcggtggtctcgcgatacaaaggccagcttgccggttgggatgttgtgaatgagaatctccatcactccttctttgagagcaagtttggtcctaacgcctctaataacatcttcgcgatggcacatgccattgatccaagcacaacaatgtttatgaatgaattctatacattagaggaccctacagatctgaaagcgagtccagcgaagtatttggagaagcttagggagcttcaatctattcgggttcgcggaaacattccattggggatcggtcttgagtctcatttcagcactcctaacattccgtatatgagatcagctcttgatactcttggtgccactggtttgcctatttggctcactgagatcgacgttaaagctccttccagtgatcaggccaagtattttgagcaagtcctaagagagggacatgcgcatccgcatgtgaaaggaatggtgacgtggacagcttatgcaccaaattgctaccacatgtgcctcaccgatggaaacttcaagaatctaccaactggagatgttgtggacaagcttatacgtgaatggggagggctacgcagccaaactactgaagtcaccgatgctgatggattctttgaagcttcactctttcatggtgactatgatctcaatatttctcatcctctcaccaattcaagcgtttcacacaactttacgttgacttctgatgactcctctttacatacccaaccatcaacttttgtctttcgtgtttga

SEQ ID NO: 84003 - protein, 544 aa, Arabidopsis thaliana
  peptide (1)..(544): Ceres Seq. ID no. 12672832
MCLEIPYKPQYNGGIIVNPDMQNGSQGWSQFENAKVNFREFGGNKFVVATQRNQSSDSVSQKVYLEKGILYTFSAWLQVSTGKAPVSAVFKKNGEYKHAGSVVAESKCWSMLKGGLTVDESGPAELFVESEDTTVEIWVDSVSLQPFTQDEWNAHQEQSIDNSRKGPVRIRVVNNKGEKIPNASITIEQKRLGFPFGSAVAQNILGNQAYQNWFTQRFTVTTFENEMKWYSTESVRGIENYTVADAMLRFFNQHGIAVRGHNVVWDHPKYQSKWVTSLSRNDLYNAVKRRVFSVVSRYKGQLAGWDVVNENLHHSFFESKFGPNASNNIFAMAHAIDPSTTMFMNEFYTLEDPTDLKASPAKYLEKLRELQSIRVRGNIPLGIGLESHFSTPNIPYMRSALDTLGATGLPIWLTEIDVKAPSSDQAKYFEQVLREGHAHPHVKGMVTWTAYAPNCYHMCLTDGNFKNLPTGDVVDKLIREWGGLRSQTTEVTDADGFFEASLFHGDYDLNISHPLTNSSVSHNFTLTSDDSSLHTQPSTFVFRV

SEQ ID NO: 84004 - protein, 524 aa, Arabidopsis thaliana
  peptide (1)..(524): Ceres Seq. ID no. 12672833
MQNGSQGWSQFENAKVNFREFGGNKFVVATQRNQSSDSVSQKVYLEKGILYTFSAWLQVSTGKAPVSAVFKKNGEYKHAGSVVAESKCWSMLKGGLTVDESGPAELFVESEDTTVEIWVDSVSLQPFTQDEWNAHQEQSIDNSRKGPVRIRVVNNKGEKIPNASITIEQKRLGFPFGSAVAQNILGNQAYQNWFTQRFTVTTFENEMKWYSTESVRGIENYTVADAMLRFFNQHGIAVRGHNVVWDHPKYQSKWVTSLSRNDLYNAVKRRVFSVVSRYKGQLAGWDVVNENLHHSFFESKFGPNASNNIFAMAHAIDPSTTMFMNEFYTLEDPTDLKASPAKYLEKLRELQSIRVRGNIPLGIGLESHFSTPNIPYMRSALDTLGATGLPIWLTEIDVKAPSSDQAKYFEQVLREGHAHPHVKGMVTWTAYAPNCYHMCLTDGNFKNLPTGDVVDKLIREWGGLRSQTTEVTDADGFFEASLFHGDYDLNISHPLTNSSVSHNFTLTSDDSSLHTQPSTFVFRV

SEQ ID NO: 84005 - protein, 434 aa, Arabidopsis thaliana
  peptide (1)..(434): Ceres Seq. ID no. 12672834
MLKGGLTVDESGPAELFVESEDTTVEIWVDSVSLQPFTQDEWNAHQEQSIDNSRKGPVRIRVVNNKGEKIPNASITIEQKRLGFPFGSAVAQNILGNQAYQNWFTQRFTVTTFENEMKWYSTESVRGIENYTVADAMLRFFNQHGIAVRGHNVVWDHPKYQSKWVTSLSRNDLYNAVKRRVFSVVSRYKGQLAGWDVVNENLHHSFFESKFGPNASNNIFAMAHAIDPSTTMFMNEFYTLEDPTDLKASPAKYLEKLRELQSIRVRGNIPLGIGLESHFSTPNIPYMRSALDTLGATGLPIWLTEIDVKAPSSDQAKYFEQVLREGHAHPHVKGMVTWTAYAPNCYHMCLTDGNFKNLPTGDVVDKLIREWGGLRSQTTEVTDADGFFEASLFHGDYDLNISHPLTNSSVSHNFTLTSDDSSLHTQPSTFVFRV

SEQ ID NO: 84006 - DNA, 2472 bp, Arabidopsis thaliana
  misc_feature (1)..(2472): Ceres Seq. ID no. 12672842
  misc_feature (1)..(2472): Ortholog of  Ceres SEQ ID NO 12586556 as cited in SEQ ID NO 64667
  misc_feature (1)..(2472): Ortholog of  Ceres SEQ ID NO 13660894 as cited in SEQ ID NO 67475
atgaaatttggaaccttttcacttcccagacaaattccaacctgcaaaggtgggcgctttacacgagttttgcaatctatcggatcagttattagagaattttcagcatctgcaaatgctttgcaagactgttggaaaaatgggaatgaaagtaaagagattgatgatgttcacacacttttcagatattgcactaatttgcaatcagccaaatgtctccacgcacgtctcgttgtctccaaacaaatccaaaatgtttgtatctctgctaaacttgttaatctctattgttaccttggcaatgtcgcattggctaggcacacgtttgatcatatccagaacagagatgtatacgcttggaatttgatgatttctggttatggccgtgcgggaaattcttcagaagtgattaggtgttttagtctctttatgttgagttctggacttacacctgattacaggacttttccttcggttttgaaagcttgtaggactgtgattgatgggaataagattcattgcttggctttgaagtttgggtttatgtgggatgtctatgttgctgcctcgttgattcatttgtactctcgatataaagctgtggggaatgcacgtatactgtttgatgaaatgcctgtaagagatatgggttcttggaatgcaatgatttctgggtattgtcaaagcggaaatgctaaagaggcgttaactctgtctaatgggttgagagctatggattcagttaccgttgtgagtctcctttcggcttgcactgaagccggtgatttcaatagaggagttactattcattcatactcgataaaacatggtctggagtccgaattgtttgtttccaacaagctgattgatttgtatgctgaatttggtaggcttagggattgccagaaggtttttgataggatgtatgtgagggatttgatttcttggaattcgataattaaggcgtacgagctgaatgagcagccgcttagagcgatttcgttgtttcaggagatgcggttgagtagaattcaaccagattgccttactttgattagtttggcttctatactatcacagttaggggacattcgtgcttgtagatctgtgcagggtttcactttgaggaaaggctggttcttggaagatattaccatcgggaatgctgttgtggttatgtatgcaaaactaggccttgtagattcagcaagagcagtgtttaattggcttccgaatacagatgttatttcatggaataccataatctcgggttatgctcaaaacggttttgctagtgaagcaattgaaatgtataacataatggaggaagaaggtgaaatagccgctaaccaagggacttgggtgagtgttttgcccgcttgttcgcaggctggagcgttgcgtcaaggtatgaaactccatggccgtctcttgaagaacggtctttatttggatgtttttgttgttacaagccttgctgatatgtatggaaagtgtggacgactagaggatgccctctctttgttttatcaaatcccaagagtcaactctgtgccatggaacaccctaatagcgtgtcacgggtttcacgggcatggcgagaaagcagtgatgctgttcaaagaaatgctggatgaaggagtgaagccagatcacattacatttgtgactctgttatcggcttgtagccattctgggttagtagacgagggtcaatggtgctttgagatgatgcaaacggattatgggataacaccgagcttgaaacattacggttgtatggtagatatgtatggtcgagctggtcagttagaaaccgcgttgaagtttataaaaagtatgtcgcttcagcctgatgcatccatttggggagctcttctcagcgcttgtagagtccatgggaatgttgatcttggcaagatcgcatctgaacatttgttcgaggttgaacctgagcatgtcgggtatcatgttctattgtcaaacatgtatgctagtgctggaaaatgggaaggagttgatgaaatacgttcaatagcccatggcaaaggtttgaggaagacaccgggttggagctcaatggaagtagacaacaaagtcgaagtcttttacacgggaaaccaaacgcatccaatgtatgaagagatgtacagagaattaacggcattacaagcgaaactgaagatgattgggtatgtaccggaccatagatttgtgttgcaggatgttgaagacgacgagaaagagcatatcctcatgagtcatagtgaaagattagctattgcatttgcacttatcgccactcctgcaaagacaacgattcggatttttaagaatctaagggtatgcggcgattgccatagcgtaaccaagttcatatcgaaaatcactgagagagagatcattgtgagggattcaaaccggtttcatcatttcaagaatggagtctgctcttgcggtgattactggtga

SEQ ID NO: 84007 - protein, 823 aa, Arabidopsis thaliana
  peptide (1)..(823): Ceres Seq. ID no. 12672843
MKFGTFSLPRQIPTCKGGRFTRVLQSIGSVIREFSASANALQDCWKNGNESKEIDDVHTLFRYCTNLQSAKCLHARLVVSKQIQNVCISAKLVNLYCYLGNVALARHTFDHIQNRDVYAWNLMISGYGRAGNSSEVIRCFSLFMLSSGLTPDYRTFPSVLKACRTVIDGNKIHCLALKFGFMWDVYVAASLIHLYSRYKAVGNARILFDEMPVRDMGSWNAMISGYCQSGNAKEALTLSNGLRAMDSVTVVSLLSACTEAGDFNRGVTIHSYSIKHGLESELFVSNKLIDLYAEFGRLRDCQKVFDRMYVRDLISWNSIIKAYELNEQPLRAISLFQEMRLSRIQPDCLTLISLASILSQLGDIRACRSVQGFTLRKGWFLEDITIGNAVVVMYAKLGLVDSARAVFNWLPNTDVISWNTIISGYAQNGFASEAIEMYNIMEEEGEIAANQGTWVSVLPACSQAGALRQGMKLHGRLLKNGLYLDVFVVTSLADMYGKCGRLEDALSLFYQIPRVNSVPWNTLIACHGFHGHGEKAVMLFKEMLDEGVKPDHITFVTLLSACSHSGLVDEGQWCFEMMQTDYGITPSLKHYGCMVDMYGRAGQLETALKFIKSMSLQPDASIWGALLSACRVHGNVDLGKIASEHLFEVEPEHVGYHVLLSNMYASAGKWEGVDEIRSIAHGKGLRKTPGWSSMEVDNKVEVFYTGNQTHPMYEEMYRELTALQAKLKMIGYVPDHRFVLQDVEDDEKEHILMSHSERLAIAFALIATPAKTTIRIFKNLRVCGDCHSVTKFISKITEREIIVRDSNRFHHFKNGVCSCGDYW

SEQ ID NO: 84008 - protein, 701 aa, Arabidopsis thaliana
  peptide (1)..(701): Ceres Seq. ID no. 12672844
MISGYGRAGNSSEVIRCFSLFMLSSGLTPDYRTFPSVLKACRTVIDGNKIHCLALKFGFMWDVYVAASLIHLYSRYKAVGNARILFDEMPVRDMGSWNAMISGYCQSGNAKEALTLSNGLRAMDSVTVVSLLSACTEAGDFNRGVTIHSYSIKHGLESELFVSNKLIDLYAEFGRLRDCQKVFDRMYVRDLISWNSIIKAYELNEQPLRAISLFQEMRLSRIQPDCLTLISLASILSQLGDIRACRSVQGFTLRKGWFLEDITIGNAVVVMYAKLGLVDSARAVFNWLPNTDVISWNTIISGYAQNGFASEAIEMYNIMEEEGEIAANQGTWVSVLPACSQAGALRQGMKLHGRLLKNGLYLDVFVVTSLADMYGKCGRLEDALSLFYQIPRVNSVPWNTLIACHGFHGHGEKAVMLFKEMLDEGVKPDHITFVTLLSACSHSGLVDEGQWCFEMMQTDYGITPSLKHYGCMVDMYGRAGQLETALKFIKSMSLQPDASIWGALLSACRVHGNVDLGKIASEHLFEVEPEHVGYHVLLSNMYASAGKWEGVDEIRSIAHGKGLRKTPGWSSMEVDNKVEVFYTGNQTHPMYEEMYRELTALQAKLKMIGYVPDHRFVLQDVEDDEKEHILMSHSERLAIAFALIATPAKTTIRIFKNLRVCGDCHSVTKFISKITEREIIVRDSNRFHHFKNGVCSCGDYW

SEQ ID NO: 84009 - protein, 680 aa, Arabidopsis thaliana
  peptide (1)..(680): Ceres Seq. ID no. 12672845
MLSSGLTPDYRTFPSVLKACRTVIDGNKIHCLALKFGFMWDVYVAASLIHLYSRYKAVGNARILFDEMPVRDMGSWNAMISGYCQSGNAKEALTLSNGLRAMDSVTVVSLLSACTEAGDFNRGVTIHSYSIKHGLESELFVSNKLIDLYAEFGRLRDCQKVFDRMYVRDLISWNSIIKAYELNEQPLRAISLFQEMRLSRIQPDCLTLISLASILSQLGDIRACRSVQGFTLRKGWFLEDITIGNAVVVMYAKLGLVDSARAVFNWLPNTDVISWNTIISGYAQNGFASEAIEMYNIMEEEGEIAANQGTWVSVLPACSQAGALRQGMKLHGRLLKNGLYLDVFVVTSLADMYGKCGRLEDALSLFYQIPRVNSVPWNTLIACHGFHGHGEKAVMLFKEMLDEGVKPDHITFVTLLSACSHSGLVDEGQWCFEMMQTDYGITPSLKHYGCMVDMYGRAGQLETALKFIKSMSLQPDASIWGALLSACRVHGNVDLGKIASEHLFEVEPEHVGYHVLLSNMYASAGKWEGVDEIRSIAHGKGLRKTPGWSSMEVDNKVEVFYTGNQTHPMYEEMYRELTALQAKLKMIGYVPDHRFVLQDVEDDEKEHILMSHSERLAIAFALIATPAKTTIRIFKNLRVCGDCHSVTKFISKITEREIIVRDSNRFHHFKNGVCSCGDYW

SEQ ID NO: 84010 - DNA, 1703 bp, Arabidopsis thaliana
  misc_feature (1)..(1703): Ceres Seq. ID no. 12672846
  misc_feature (1)..(1703): Ortholog of  Ceres SEQ ID NO 13594345 as cited in SEQ ID NO 58043
  misc_feature (1)..(1703): Ortholog of  Ceres SEQ ID NO 13597574 as cited in SEQ ID NO 64677
  misc_feature (1)..(1703): Ortholog of  Ceres SEQ ID NO 13597678 as cited in SEQ ID NO 65375
  misc_feature (1)..(1703): Ortholog of  Ceres SEQ ID NO 13662880 as cited in SEQ ID NO 65422
  misc_feature (1)..(1703): Ortholog of  Ceres SEQ ID NO 13596180 as cited in SEQ ID NO 67941
  misc_feature (1)..(1703): Ortholog of  Ceres SEQ ID NO 13591190 as cited in SEQ ID NO 68044
  misc_feature (1)..(1703): Ortholog of  Ceres SEQ ID NO 13595961 as cited in SEQ ID NO 68223
actctcttaccttgcctcttgcttcaacctcctaagcacattcttatctctttctgaaacgagttcccaaattagctctacaaaaaccaggatcttgatttctcatcagttaaacatgggaactcctgtcgaagtctctaagctccatttcttgctcttccctttcatggctcatggccatatgataccaactctagacatggctaagctctttgccaccaaaggagctaaatccactatcctcactacacctctcaatgccaagctcttcttcgagaaacccatcaaatcattcaaccaagacaacccgggactcgaagacatcaccatccagatccttaatttcccttgcacagagcttggtttgcctgatggctgtgagaatactgatttcatcttctccacacctgacctaaacgtaggtgacttgagtcaaaagtttttactcgcaatgaaatatttcgaagagccactagaggagctcctcgtgacaatgagaccagactgtcttgtcggtaacatgttcttcccttggtccactaaagttgctgagaagttcggagtaccgagacttgtgttccacggcacaggctacttctctttatgtgcttctcattgcataaggctccctaagaatgtggcaacaagttctgagccctttgtgattcctgatctcccgggagacattttgattacagaggaacaggtcatggagacagaagaagagtctgtaatggggaggtttatgaaggcaataagagactcagagagagatagctttggcgtgttggtgaacagcttctacgagcttgaacaggcttactcagattatttcaagagctttgtggcgaaaagagcgtggcatatcggtccgctttccttaggaaatagaaagttcgaggagaaagcagaaagaggcaaaaaggcaagcattgatgagcatgaatgtttgaaatggctcgactccaagaaatgtgattcagtgatttacatggcctttggaaccatgtctagctttaaaaacgagcagctgatagagattgcagctggtttagatatgtcaggacatgattttgtctgggtggttaacagaaaaggcagccaagttgagaaggaagattggttaccagaggggtttgaagagaagaccaagggaaaaggattgataatccgagggtgggcgccacaagtgctgatacttgagcacaaagcaattggcggatttttgacgcattgtggatggaactcgttattagaaggggtggcagcgggcctgccaatggtgacatggcccgtgggagccgagcagttctacaacgagaaattggtgacacaagtgttgaaaacaggagtgagtgtgggagtgaagaagatgatgcaagtagttggagacttcattagcagagagaaagtggagggagcggtgagggaagtgatggttggagaagagaggaggaaacgggccaaggagttagcagaaatggcgaaaaatgcggtgaaagaaggaggatcttcagatctagaggtagataggttgatggaagagcttacgttagttaaactgcaaaaagagaaggtataaagaagttgaatgtattgcaagttatggaacaataatgtttttgtaattctgatggtttgagttacaacagtaaaagattgtatttgttcattcaaatttacaatggatgatcttttagttt

SEQ ID NO: 84011 - protein, 526 aa, Arabidopsis thaliana
  peptide (1)..(526): Ceres Seq. ID no. 12672847
LSYLASCFNLLSTFLSLSETSSQISSTKTRILISHQLNMGTPVEVSKLHFLLFPFMAHGHMIPTLDMAKLFATKGAKSTILTTPLNAKLFFEKPIKSFNQDNPGLEDITIQILNFPCTELGLPDGCENTDFIFSTPDLNVGDLSQKFLLAMKYFEEPLEELLVTMRPDCLVGNMFFPWSTKVAEKFGVPRLVFHGTGYFSLCASHCIRLPKNVATSSEPFVIPDLPGDILITEEQVMETEEESVMGRFMKAIRDSERDSFGVLVNSFYELEQAYSDYFKSFVAKRAWHIGPLSLGNRKFEEKAERGKKASIDEHECLKWLDSKKCDSVIYMAFGTMSSFKNEQLIEIAAGLDMSGHDFVWVVNRKGSQVEKEDWLPEGFEEKTKGKGLIIRGWAPQVLILEHKAIGGFLTHCGWNSLLEGVAAGLPMVTWPVGAEQFYNEKLVTQVLKTGVSVGVKKMMQVVGDFISREKVEGAVREVMVGEERRKRAKELAEMAKNAVKEGGSSDLEVDRLMEELTLVKLQKEKV

SEQ ID NO: 84012 - protein, 488 aa, Arabidopsis thaliana
  peptide (1)..(488): Ceres Seq. ID no. 12672848
MGTPVEVSKLHFLLFPFMAHGHMIPTLDMAKLFATKGAKSTILTTPLNAKLFFEKPIKSFNQDNPGLEDITIQILNFPCTELGLPDGCENTDFIFSTPDLNVGDLSQKFLLAMKYFEEPLEELLVTMRPDCLVGNMFFPWSTKVAEKFGVPRLVFHGTGYFSLCASHCIRLPKNVATSSEPFVIPDLPGDILITEEQVMETEEESVMGRFMKAIRDSERDSFGVLVNSFYELEQAYSDYFKSFVAKRAWHIGPLSLGNRKFEEKAERGKKASIDEHECLKWLDSKKCDSVIYMAFGTMSSFKNEQLIEIAAGLDMSGHDFVWVVNRKGSQVEKEDWLPEGFEEKTKGKGLIIRGWAPQVLILEHKAIGGFLTHCGWNSLLEGVAAGLPMVTWPVGAEQFYNEKLVTQVLKTGVSVGVKKMMQVVGDFISREKVEGAVREVMVGEERRKRAKELAEMAKNAVKEGGSSDLEVDRLMEELTLVKLQKEKV

SEQ ID NO: 84013 - protein, 471 aa, Arabidopsis thaliana
  peptide (1)..(471): Ceres Seq. ID no. 12672849
MAHGHMIPTLDMAKLFATKGAKSTILTTPLNAKLFFEKPIKSFNQDNPGLEDITIQILNFPCTELGLPDGCENTDFIFSTPDLNVGDLSQKFLLAMKYFEEPLEELLVTMRPDCLVGNMFFPWSTKVAEKFGVPRLVFHGTGYFSLCASHCIRLPKNVATSSEPFVIPDLPGDILITEEQVMETEEESVMGRFMKAIRDSERDSFGVLVNSFYELEQAYSDYFKSFVAKRAWHIGPLSLGNRKFEEKAERGKKASIDEHECLKWLDSKKCDSVIYMAFGTMSSFKNEQLIEIAAGLDMSGHDFVWVVNRKGSQVEKEDWLPEGFEEKTKGKGLIIRGWAPQVLILEHKAIGGFLTHCGWNSLLEGVAAGLPMVTWPVGAEQFYNEKLVTQVLKTGVSVGVKKMMQVVGDFISREKVEGAVREVMVGEERRKRAKELAEMAKNAVKEGGSSDLEVDRLMEELTLVKLQKEKV

SEQ ID NO: 84014 - DNA, 1323 bp, Arabidopsis thaliana
  misc_feature (1)..(1323): Ceres Seq. ID no. 12672859
  misc_feature (1)..(1323): Ortholog of  Ceres SEQ ID NO 13596198 as cited in SEQ ID NO 68488
agagaaactgtttcataagacttttttttcttcttcttcttctctgttaaactaatggagtggattcgtagagaaacgattggtcacggaagcttctccaccgttagtttagcaactacctctggaagttcttctaaagcgtttccatcgttaatggctgtgaaatcttccggagttgtttgctccgccgcgttacgaaacgagagagatgttcttgatgatctcggtgactgttcggagatcgtgcggtgttttggtgaaggaaggacggtggagaacggagaagagatctataatctgtttcttgagtatgcttccggtggtagtttagctgatcggattaaaagctccggtgaagcgttgccggagtttgaagtgaggagattcacgagatcgattgttaaaggattgtgtcatattcatggtaatggtttcactcattgtgatataaagcttgagaatgttttggtttttggtgatggagatgtgaagatatctgatttcgggttagcgaaacggaggagtggtgaggtttgtgttgagattagaggaacaccgttgtatatggcaccggagtctgtgaatcacggcgagtttgaatctccggcggatatttgggctttgggatgctctgttgttgagatgtctagtggtaaaacggcatggtgtttggaggatggtgttatgaataatgttatgtctttattggttcgtattggttccggcgatgaagttccgaggattccggtggaattgtcggaggaaggtaaagatttcgtgagcaagtgttttgttaaaaacgccgcggagagatggacggctgagatgcttttggatcatccattcttagccgttgatgatgagagtggcgaagaagacgaagcttgttcggtttcaccgaggaatccatttgattttcccggttggaattcggttcaatctccggttaatgattcggttatgtttggttcattggtaggttcgccggaggaaaggattagtggtttggtgagtgagaaggtacctgattggtcggtgtcgtgtgattgggtcaacgtcaggtgaatagagtagtttttgttgttgttgtggagaaagaccgagtcattttgtgtggagattattatggagtcatttagaattgacggtcctgattttaatattttgtttaatttagctcgttgactttgtaaatattgaaaattaaaatattcttgtaagaaagaaactgagagttttttttgtgccatatgttacttattctctattcactttgtaacagagatactctcaatttgaaaaaaaaaacaatttggggcctgg

SEQ ID NO: 84015 - protein, 336 aa, Arabidopsis thaliana
  peptide (1)..(336): Ceres Seq. ID no. 12672860
MEWIRRETIGHGSFSTVSLATTSGSSSKAFPSLMAVKSSGVVCSAALRNERDVLDDLGDCSEIVRCFGEGRTVENGEEIYNLFLEYASGGSLADRIKSSGEALPEFEVRRFTRSIVKGLCHIHGNGFTHCDIKLENVLVFGDGDVKISDFGLAKRRSGEVCVEIRGTPLYMAPESVNHGEFESPADIWALGCSVVEMSSGKTAWCLEDGVMNNVMSLLVRIGSGDEVPRIPVELSEEGKDFVSKCFVKNAAERWTAEMLLDHPFLAVDDESGEEDEACSVSPRNPFDFPGWNSVQSPVNDSVMFGSLVGSPEERISGLVSEKVPDWSVSCDWVNVR

SEQ ID NO: 84016 - protein, 303 aa, Arabidopsis thaliana
  peptide (1)..(303): Ceres Seq. ID no. 12672861
MAVKSSGVVCSAALRNERDVLDDLGDCSEIVRCFGEGRTVENGEEIYNLFLEYASGGSLADRIKSSGEALPEFEVRRFTRSIVKGLCHIHGNGFTHCDIKLENVLVFGDGDVKISDFGLAKRRSGEVCVEIRGTPLYMAPESVNHGEFESPADIWALGCSVVEMSSGKTAWCLEDGVMNNVMSLLVRIGSGDEVPRIPVELSEEGKDFVSKCFVKNAAERWTAEMLLDHPFLAVDDESGEEDEACSVSPRNPFDFPGWNSVQSPVNDSVMFGSLVGSPEERISGLVSEKVPDWSVSCDWVNVR

SEQ ID NO: 84017 - DNA, 2744 bp, Arabidopsis thaliana
  misc_feature (1)..(2744): Ceres Seq. ID no. 12672882
  misc_feature (1)..(2744): Ortholog of  Ceres SEQ ID NO 15168900 as cited in SEQ ID NO 217
atctactcgtttcttcggctcactaaagaaagagagagagagagagaaaaaaagaaagtacaatttcataataataaatgaagaagaccgtaacaagaagtgtgtagtcgtattgattatagaattaaagaaactctgcaatatttttgcagagagacagagacacaaagaaagagagagagagagcatttagggagcaggaagtggagtgtttggttacgtgagctgttttctctttctctatctttaactcccttcacacctctccctctctcttcttcatatctctctctgtcacaatagtgtgatgatgcaatgagaatggagttgatttcagtgattttcttcttcttttgctctgttttgagttcctctgctttaaactctgatgggttggttttgatgaagtttaaatcctctgttcttgttgatcctctgtctttattacagacatggaattacaaacacgaaagtccatgttcttggagaggaatctcttgtaataacgattctaaagtcttaactttgtctcttcccaattctcagcttcttggttcgattccttctgatttgggttctctcttaacacttcaaagtctcgatctttccaataattccttcaatgggccattaccggtttctttcttcaacgctagagagcttcgtttccttgatctctctagtaacatgatctccggcgaaatcccttccgcaattggtgatcttcacaatcttctaaccctaaatctctctgataatgccttggcgggaaagttacctacaaatttggcgtcgttgagaaacttaacggtggtttctttggagaataattacttttccggcgagattcccggcggttggagagttgttgagttcttagacctgtcgtcgaatctgatcaatggctcgcttcctccggattttggcggatatagtctccagtacttaaatgtctcgtttaaccaaatctccggcgaaattccaccggagatcggagtcaatttcccaagaaacgtcaccgttgatctctccttcaacaatttaaccggtccaatccctgattctccggttttcttaaaccaggaatcaaatttcttttcaggaaacccgggtctatgcggtgaaccgacccgaaacccgtgtcttatcccttcctcgccgtctatcgtctccgaagccgacgtaccgacgtctacaccagcaatcgccgcaataccgaacacaatcggttcaaacccggttaccgatccaaattcacaacaaaccgacccaaatccccgaaccgggttacgacccggagttataatagggatcgtagtcggagatatcgctggaatcggaatcctcgccgtgattttcctctacatctacagatgcaagaagaacaagatagtggataacaacaacaacgacaagcaaagaacagaaacagacacaattacgttatcaacattttcatcttcttcttcttcaccagaagagtcaagaagattcaggaaatggtcgtgtctacgaaaagatcctgaaacgacaccgtctgaagaagaagatgaagatgatgaagacgaagaaagcggttacaatgcaaatcaacggtcaggagataacaagttagtgaccgttgatggagagaaggagatggagattgagactctgcttaaggcttcagcttatattttaggagccacaggttcgagtataatgtataaagccgttcttgaagacggtagggttttcgcggttcgtcgactcggtgaaaacggtttatctcagcgccggtttaaggattttgagccgcacattcgagccattgggaaattggttcacccgaatttggttagactttgtgggttctattggggtaccgacgagaaactagtcatttacgattttgtccctaacggcagcctcgtcaacccccgttaccgaaaaggaggagggtcttcttcaccgtatcacctaccgtgggaaactcggctcaagatagcaaagggcattgcacgtgggctggcttatctccacgagaagaagcatgtgcatggaaacttgaagcctagcaacatacttttgggccatgacatggaacccaaaataggcgatttcggactcgaaaggcttcttacaggcgaaacaagctacattcgagctggtggatcttctaggattttcagtagtaagcgttacacaacttcctcgcgagaattctcgtctatcgggcctacaccaagcccgagtccgagctcggtgggggcgatgtcaccctactgcgcaccagagtctttccgaagcctaaaaccgagtccgaaatgggacgtttacggctttggagtgatccttctcgagcttctcacgggaaagattgtgtctgttgaagagattgtgctaggaaacggacttacggttgaggacgggcaccgcgcagtgagaatggctgatgtggcgatccgcggcgagttagatggcaaacaagagtttttactcgattgtttcaagttaggctatagctgtgcgtctcctgttcctcaaaagaggccaacgatgaaagaatctttggctgttcttgaaagattccatcctaactcctctgttattaagtcttcatcgttccattacggacattaatatcagtttgatacaactagagtgaactagttagtcaatttgatttcattgctaacttgttttgttgtaaaaaaaaaattgtgtttgctgtttttgtttacaaaactcgatttcccaacatt

SEQ ID NO: 84018 - protein, 768 aa, Arabidopsis thaliana
  peptide (1)..(768): Ceres Seq. ID no. 12672883
MRMELISVIFFFFCSVLSSSALNSDGLVLMKFKSSVLVDPLSLLQTWNYKHESPCSWRGISCNNDSKVLTLSLPNSQLLGSIPSDLGSLLTLQSLDLSNNSFNGPLPVSFFNARELRFLDLSSNMISGEIPSAIGDLHNLLTLNLSDNALAGKLPTNLASLRNLTVVSLENNYFSGEIPGGWRVVEFLDLSSNLINGSLPPDFGGYSLQYLNVSFNQISGEIPPEIGVNFPRNVTVDLSFNNLTGPIPDSPVFLNQESNFFSGNPGLCGEPTRNPCLIPSSPSIVSEADVPTSTPAIAAIPNTIGSNPVTDPNSQQTDPNPRTGLRPGVIIGIVVGDIAGIGILAVIFLYIYRCKKNKIVDNNNNDKQRTETDTITLSTFSSSSSSPEESRRFRKWSCLRKDPETTPSEEEDEDDEDEESGYNANQRSGDNKLVTVDGEKEMEIETLLKASAYILGATGSSIMYKAVLEDGRVFAVRRLGENGLSQRRFKDFEPHIRAIGKLVHPNLVRLCGFYWGTDEKLVIYDFVPNGSLVNPRYRKGGGSSSPYHLPWETRLKIAKGIARGLAYLHEKKHVHGNLKPSNILLGHDMEPKIGDFGLERLLTGETSYIRAGGSSRIFSSKRYTTSSREFSSIGPTPSPSPSSVGAMSPYCAPESFRSLKPSPKWDVYGFGVILLELLTGKIVSVEEIVLGNGLTVEDGHRAVRMADVAIRGELDGKQEFLLDCFKLGYSCASPVPQKRPTMKESLAVLERFHPNSSVIKSSSFHYGH

SEQ ID NO: 84019 - protein, 766 aa, Arabidopsis thaliana; identical to SEQ ID NO: 79346
  peptide (1)..(766): Ceres Seq. ID no. 12672884

SEQ ID NO: 84020 - protein, 739 aa, Arabidopsis thaliana; identical to SEQ ID NO: 79347
  peptide (1)..(739): Ceres Seq. ID no. 12672885

SEQ ID NO: 84021 - DNA, 1628 bp, Arabidopsis thaliana
  misc_feature (1)..(1628): Ceres Seq. ID no. 12672886
  misc_feature (1)..(1628): Ortholog of  Ceres SEQ ID NO 15169611 as cited in SEQ ID NO 65939
  misc_feature (1)..(1628): Ortholog of  Ceres SEQ ID NO 14307960 as cited in SEQ ID NO 66187
  misc_feature (1)..(1628): Ortholog of  Ceres SEQ ID NO 13502874 as cited in SEQ ID NO 66298
  misc_feature (1)..(1628): Ortholog of  Ceres SEQ ID NO 12614124 as cited in SEQ ID NO 68392
atggattgtattttacttattctgactactcttgttgccattttcatcgtcaagattgttctcctagtcactaaacctaacaaaaaccttccaccgtcgccaaatatatgttttccgatcatcggacaccttcacctcctcaaaaagccactgctacaccggactctcagccatctctcccactccctcggccccgtcttttctctacgcctcggctctcgccttgccgttatcatctcatctccaacggcagccgaagaatgcttcttgacgaaaaacgacatcgttttagcaaatcggcctcgtttcatcatgggcaagtatgtggcttatgactacacctccatggttacggctccttacggtgaccactggcgaaacctccgtcgtatcaccgctttagaagtcttctccacaaatcgactcaacgcttcagcggaaatccgacatgacgaagttaagatgcttctccaaaagcttcacgatttatctgtcgaacgcccggctaaagtggagttacgacagttactaacgggtcttaccctaaatgtgataatgagaatgatgaccggaaagagattcttcgaggaagatgatggcggaaaggcggggataagtttggagttccgggaactagtggcggagattctagagctctctgcggcggacaatccagctgattttttgccggctctacggtggtttgactacaaaggtttggtcaagagagcaaagaggattggagaaaggatggatagtttattacaagggtttttggatgagcatagagctaacaaagacagattggagtttaagaacaccatgattgctcatttacttgattctcaagaaaaagagcctcataactacagtgatcaaaccatcaaaggtcttatactgatgatggtagtaggaggcacagatacatcggccttaaccgtggaatgggcaatgtcaaatttattgaatcatccacaaatactagagaccacgagacaaaacattgatactcaaatggaaacatcaagtagtcgtcgtttgttgaaagaagaagatttggtaaacatgaactacttgaaaaatgttgtgtcggagacactaagactttaccctgtggcaccacttatggttcctcatgtgccatcttctgactgtgtaatcggtggattcaacgttccacgtgatacgatcgtgttggttaacttgtgggctatacatcgagatccaagcgtgtgggatgatccaacgtcatttaagccggagagatttgaagggagtgatcagtttggacattacaatggtaaaatgatgccgtttgggttaggaagacgggcttgtcctgggttgagtttggctaaccgggttgttgggttattattgggttcgatgattcagtgctttgagtgggaaagcggctcaggaggtcaggttgatatgactgaaggtccaggacttagtttgcctaaggctgaaccattggttgtcacgtgcagaacacgtgagatggcttccgagttgttgttcttcggatcagagccaagcaataagaatgtctagatttgattttataaatttgtaagttaatacattattacatgcatatatgattcagtgatttattaagcagc

SEQ ID NO: 84022 - protein, 518 aa, Arabidopsis thaliana
  peptide (1)..(518): Ceres Seq. ID no. 12672887
MDCILLILTTLVAIFIVKIVLLVTKPNKNLPPSPNICFPIIGHLHLLKKPLLHRTLSHLSHSLGPVFSLRLGSRLAVIISSPTAAEECFLTKNDIVLANRPRFIMGKYVAYDYTSMVTAPYGDHWRNLRRITALEVFSTNRLNASAEIRHDEVKMLLQKLHDLSVERPAKVELRQLLTGLTLNVIMRMMTGKRFFEEDDGGKAGISLEFRELVAEILELSAADNPADFLPALRWFDYKGLVKRAKRIGERMDSLLQGFLDEHRANKDRLEFKNTMIAHLLDSQEKEPHNYSDQTIKGLILMMVVGGTDTSALTVEWAMSNLLNHPQILETTRQNIDTQMETSSSRRLLKEEDLVNMNYLKNVVSETLRLYPVAPLMVPHVPSSDCVIGGFNVPRDTIVLVNLWAIHRDPSVWDDPTSFKPERFEGSDQFGHYNGKMMPFGLGRRACPGLSLANRVVGLLLGSMIQCFEWESGSGGQVDMTEGPGLSLPKAEPLVVTCRTREMASELLFFGSEPSNKNV

SEQ ID NO: 84023 - protein, 414 aa, Arabidopsis thaliana; identical to SEQ ID NO: 79358
  peptide (1)..(414): Ceres Seq. ID no. 12672888

SEQ ID NO: 84024 - protein, 403 aa, Arabidopsis thaliana; identical to SEQ ID NO: 79359
  peptide (1)..(403): Ceres Seq. ID no. 12672889

SEQ ID NO: 84025 - DNA, 2067 bp, Arabidopsis thaliana
  misc_feature (1)..(2067): Ceres Seq. ID no. 12672890
  misc_feature (1)..(2067): Ortholog of  Ceres SEQ ID NO 12607856 as cited in SEQ ID NO 55419
attctgtttgtgagtgtgtttttttggtctatatgagtaatgatgtttcgtggtattctgaaatctgcaaaggatgagaagaagaagatggagtctcaaggcaatggagctgttgctaattcaggaaaatctctggttaatcgccgacgagctaacaaagaaaagaaaatggatttgctacaagatgttgataagcttaagaggaagctgagacaggaggagaatgttcatagagcattggagagagcttttactagacctttaggagctttacctcgtcttccgtcttacctccctcgacatacattggagcttcttgctgaagtagctgttcttgaagaggaagtggttcggttagaggagcaagttgtaaactttagacaaggtttataccaagaagctgtttacatatcttcaaagaggaatctggagagtcctaataacaacagtttgaatgagaattcgcccgttagaagcactaaacaccagagatcgaaatcaatgtcgcaacacgagttcaattctatgatcactcccactaaaaagcatcaacagtctcttagcagaagcatctcaagtaggaaactcttctcctctgatcaaacagttaatgaccgaagtggtcagagagtggtaagtggcaaacaagcgtcgcctaaatcaaatctaagcagtgttactaatactaagccagtagatgtgagagggaaagagaatcagacctctagtaatgcttcaaaagacaagaaaaataaagaatcacctgagaagaagcttggcagattcttgacatctgtgaagaagaagaaacctttgattaagccggaggctgcagcggataaacactcagaatcaaccaaattgcagctagatgatagattagcagatcaggacaaagctcaagagagtgtgtcaggatcatcttcggaagacaagacactgcaaagtggaaatgtagcaaacagagtttcagaggatttactgaaatgtcttgtgactattatcttgaggattagctcgtccaaggacattgtgttggatccatataataactgctcagagtggagaacaagagaacttggtgcatacaagcatttttcgtcggtcgatacatcttcagttgatcttggacgaagaatcaatgcttcatttctgatccatcgtctcaagttcctgcttaataagctttctgttgtcaatctagacggtcttagccaccagcagaagcttgcattctggataaatacttataattcctgcgttatgaatgcattcttggagcacgggatcccggcgactcctgaaatggttgtagcgctgatgcagaaggcaacaataattgtgggaggacactcgctaaatgcaatcacaatcgaacatttcatcttgagacttccataccacttgaaattcacttgtcccaaaactgcaacacatgaagaaatgagagctcatagcacatttggattggaatggtcagagcccttggtcacattcgctctcgcctgtggaagctggtcctctcctgctgtaagggtctacacagcagctaatgtagaggaagagctagaagctgcaaagagagattatctgcaagcatcagttgggatatcaaagaacaacaaactaatgcttccaaaggtattagattggtacttactcgactttgccaaggatttggaatcgttactggattgggtttgccttcagttacctgataaactaagagaagaagcaactaagtgtatggagagaaagaacaaagaatcactaatggaattggttcaagtagtaccatatgacttcagtttcagattgcttttgcatcaatgaataaaaaaatgttaaacactgtatagatttgggttggggagagagtaaagtagagcgcatgagttcaatttgttattgttttttttggttggctgagagtatatatagattatatggttgtgttcttttactataaagtgatgtaaaattcattcaattgatttttatttgtaatgctatatatgtatatgtctacaccattttttttttgtctgatttgttttttcttgtctc

SEQ ID NO: 84026 - protein, 597 aa, Arabidopsis thaliana
  peptide (1)..(597): Ceres Seq. ID no. 12672891
MMFRGILKSAKDEKKKMESQGNGAVANSGKSLVNRRRANKEKKMDLLQDVDKLKRKLRQEENVHRALERAFTRPLGALPRLPSYLPRHTLELLAEVAVLEEEVVRLEEQVVNFRQGLYQEAVYISSKRNLESPNNNSLNENSPVRSTKHQRSKSMSQHEFNSMITPTKKHQQSLSRSISSRKLFSSDQTVNDRSGQRVVSGKQASPKSNLSSVTNTKPVDVRGKENQTSSNASKDKKNKESPEKKLGRFLTSVKKKKPLIKPEAAADKHSESTKLQLDDRLADQDKAQESVSGSSSEDKTLQSGNVANRVSEDLLKCLVTIILRISSSKDIVLDPYNNCSEWRTRELGAYKHFSSVDTSSVDLGRRINASFLIHRLKFLLNKLSVVNLDGLSHQQKLAFWINTYNSCVMNAFLEHGIPATPEMVVALMQKATIIVGGHSLNAITIEHFILRLPYHLKFTCPKTATHEEMRAHSTFGLEWSEPLVTFALACGSWSSPAVRVYTAANVEEELEAAKRDYLQASVGISKNNKLMLPKVLDWYLLDFAKDLESLLDWVCLQLPDKLREEATKCMERKNKESLMELVQVVPYDFSFRLLLHQ

SEQ ID NO: 84027 - protein, 596 aa, Arabidopsis thaliana; identical to SEQ ID NO: 72146
  peptide (1)..(596): Ceres Seq. ID no. 12672892

SEQ ID NO: 84028 - protein, 581 aa, Arabidopsis thaliana; identical to SEQ ID NO: 72147
  peptide (1)..(581): Ceres Seq. ID no. 12672893

SEQ ID NO: 84029 - DNA, 1656 bp, Arabidopsis thaliana
  misc_feature (1)..(1656): Ceres Seq. ID no. 12672914
  misc_feature (1)..(1656): Ortholog of  Ceres SEQ ID NO 14306857 as cited in SEQ ID NO 60035
  misc_feature (1)..(1656): Ortholog of  Ceres SEQ ID NO 15227091 as cited in SEQ ID NO 60294
  misc_feature (1)..(1656): Ortholog of  Ceres SEQ ID NO 14307960 as cited in SEQ ID NO 66187
  misc_feature (1)..(1656): Ortholog of  Ceres SEQ ID NO 13502874 as cited in SEQ ID NO 66298
  misc_feature (1)..(1656): Ortholog of  Ceres SEQ ID NO 12614124 as cited in SEQ ID NO 68392
accaaaatagatctaaaacatggaaaccaaaaccctaattttctcaattctcttcgttgttctctctctcatttacttaattggaaaactcaagcgaaagccaaatctacctccgagtccggcatggtcattaccggtgattggtcatctccgccttctcaaaccaccgattcatcgcacattcctctccctctctcaatccctaaacaatgctccgatcttctccctccgactcggtaaccgactcgttttcgtgaactcgtcacactcgatcgccgaggaatgtttcaccaaaaacgacgtcgtactggcgaacagaccaaacttcatcctcgctaaacacgttgcgtacgattacacaaccatgatcgcagcttcctacggtgaccactggcgtaacctccgccgcatcggctccgtcgagatattctccaatcaccgtctcaatagctttttgtctattcgtaaagacgagatccgacgacttgtgtttcgtctttctcggaacttttcacaagagtttgtgaaagtggatatgaaatcaatgttatctgacttaacattcaacaacattttaagaatggtggccggaaaacgttactacggagacggtgttgaggatgatccggaggctaaacgtgtccggcagcttatagcggatgtggtggcttgtgctggtgctggaaacgctgttgattacttaccggttttgcggttggtttcagattacgagacacgggttaagaagttggcgggtaggctcgacgagttcttgcaaggattggttgatgagaaacgagaagctaaggagaaaggaaacactatgatcgatcacttgcttactctgcaagaatcccaaccggattacttcacggatcgtatcattaaaggaaacatgctcgctttgatactagcagggaccgacacatcagcggttacgttagaatgggcattgtcgaacgtgttgaaccatccggatgtattgaacaaggcgagagatgaaatcgatagaaagataggtttagacaggcttatggatgaatcagatatctcaaacctgccttatctccaaaacattgtgtctgaaacgttgcgcctttatcctgcggctcccatgcttcttcctcacgttgcctcggaagattgtaaagttgcaggatacgatatgccgcgtggcacgatactattgaccaatgtgtgggctatacacagagatcctcagctatgggatgatccaatgagcttcaagccagagaggtttgagaaagaaggagaagctcagaagctaatgccgtttgggttaggaagaagggcgtgtcctggttctggactggctcatcggcttataaacctgactcttggatcattgattcagtgtttggaatgggagaagattggagaagaagtggatatgagtgaaggcaaaggtgttacaatgcctaaagccaagcctttggaagccatgtgcagagcacgtccctctgttgttaaaatcttcaacgagtccgtttgacgtttagacttttggtaatggctatgtatacattagataactagttatgtttgtatgttttctttttttttggtgaaaatattatgtttgtatgttaatgtatatgtgaatatttaacctatattcctagatgatattttggg

SEQ ID NO: 84030 - protein, 497 aa, Arabidopsis thaliana; identical to SEQ ID NO: 36691
  peptide (1)..(497): Ceres Seq. ID no. 12672915

SEQ ID NO: 84031 - protein, 382 aa, Arabidopsis thaliana; identical to SEQ ID NO: 36692
  peptide (1)..(382): Ceres Seq. ID no. 12672916

SEQ ID NO: 84032 - protein, 325 aa, Arabidopsis thaliana; identical to SEQ ID NO: 36693
  peptide (1)..(325): Ceres Seq. ID no. 12672917

SEQ ID NO: 84033 - DNA, 1596 bp, Arabidopsis thaliana
  misc_feature (1)..(1596): Ceres Seq. ID no. 12672918
  misc_feature (1)..(1596): Ortholog of  Ceres SEQ ID NO 15169533 as cited in SEQ ID NO 67374
actgtacttattgggttttgatctttgatggctccactgagtccaagagtagtggtgaaggtggatttgaagaagaagccatggcagcaggaccagccattgcacaatagatggcatccggagataccaccagtagcagaggtcaaggctggtgagtttttccgggtagaaatgattgatgcaatgggaggtgttatcaaagacaatgactctgcaagcgatatcaagaacctagtcctaactactactcatcacctaagtgggccgattagggttgtagatgaggaaggtgttgcagctaaagcaggtgatcttcttgctgttgagatatgcaacttgggtcctcttccaggagatgaatggggattcactggttcgtttgatagagagaatggtggcggtttcttgactgaccatttcccttgtgcgaccaaagctatttggtactttgaagggatctatgcctactctcctcagattcctggagtacgatttccgggtttgacacacccaggagtcattggcactgcaccatcgaatgaactcttgagaatatggaatgatagggaaagacaattagaagaaagtggtgttgagtccctaacactatgtgaggtagtgcatcagcggccattagcatgcctaccaacaactaaaggatgtctcctcgggaatattgaagaaggaacaccagaatgggaaaggattgcaaacgaggctgcgaggacaataccaggaagagaaaacggaggaaactgtgacattaaaaacctaagcagaggctctaaaatatatcttccagtatttgttgaaggggctaatctaagcacaggagacatgcatttctcacaaggtgatggtgagatctcgttctgcggagccatcgagatgagtggatttctagaactcaagtgtgaaatcataagaaatgggatgcaagagtaccttacgccaatgggacctacccctctccatgtaaacccaatctttgagataggaccagtggaaccgaggttctcagagtggcttgtcttcgaaggtatcagtgtcgatgagagcggaaaacagcattacctagatgcaacagttgcttacaaacgggcagttctcaacgccatagactatcttttcaaatttggttactcaaaagaacaggtacttgtctttgcagcttgatgtttcttccagaatctagttgatcacacaccaaacatccataaattaaaactacaaagacagaagtgatcaagagaatatggtgtgaacaggtgtacctcttactctcatgttgtccatgtgaaggaagactatctgggatagttgattctccgaatgccgttgctacactagcaatacctacagccatctttgatcaggatattaggccaaagaatcggaaggttccagtaggacctcgggttgtgaggaaaccagatgtactgaagagcacatatgatggaaagcttccaattacaaagaatccaagttcttcctcttagcttctacaaaaaaattaaaattaaaatttagaagctaataccaagattgtataatcaagcatatgttccaataataaagcaataacttggtgttttc

SEQ ID NO: 84034 - protein, 382 aa, Arabidopsis thaliana
  peptide (1)..(382): Ceres Seq. ID no. 12672919
MAPLSPRVVVKVDLKKKPWQQDQPLHNRWHPEIPPVAEVKAGEFFRVEMIDAMGGVIKDNDSASDIKNLVLTTTHHLSGPIRVVDEEGVAAKAGDLLAVEICNLGPLPGDEWGFTGSFDRENGGGFLTDHFPCATKAIWYFEGIYAYSPQIPGVRFPGLTHPGVIGTAPSNELLRIWNDRERQLEESGVESLTLCEVVHQRPLACLPTTKGCLLGNIEEGTPEWERIANEAARTIPGRENGGNCDIKNLSRGSKIYLPVFVEGANLSTGDMHFSQGDGEISFCGAIEMSGFLELKCEIIRNGMQEYLTPMGPTPLHVNPIFEIGPVEPRFSEWLVFEGISVDESGKQHYLDATVAYKRAVLNAIDYLFKFGYSKEQVLVFAA

SEQ ID NO: 84035 - protein, 334 aa, Arabidopsis thaliana
  peptide (1)..(334): Ceres Seq. ID no. 12672920
MIDAMGGVIKDNDSASDIKNLVLTTTHHLSGPIRVVDEEGVAAKAGDLLAVEICNLGPLPGDEWGFTGSFDRENGGGFLTDHFPCATKAIWYFEGIYAYSPQIPGVRFPGLTHPGVIGTAPSNELLRIWNDRERQLEESGVESLTLCEVVHQRPLACLPTTKGCLLGNIEEGTPEWERIANEAARTIPGRENGGNCDIKNLSRGSKIYLPVFVEGANLSTGDMHFSQGDGEISFCGAIEMSGFLELKCEIIRNGMQEYLTPMGPTPLHVNPIFEIGPVEPRFSEWLVFEGISVDESGKQHYLDATVAYKRAVLNAIDYLFKFGYSKEQVLVFAA

SEQ ID NO: 84036 - protein, 330 aa, Arabidopsis thaliana
  peptide (1)..(330): Ceres Seq. ID no. 12672921
MGGVIKDNDSASDIKNLVLTTTHHLSGPIRVVDEEGVAAKAGDLLAVEICNLGPLPGDEWGFTGSFDRENGGGFLTDHFPCATKAIWYFEGIYAYSPQIPGVRFPGLTHPGVIGTAPSNELLRIWNDRERQLEESGVESLTLCEVVHQRPLACLPTTKGCLLGNIEEGTPEWERIANEAARTIPGRENGGNCDIKNLSRGSKIYLPVFVEGANLSTGDMHFSQGDGEISFCGAIEMSGFLELKCEIIRNGMQEYLTPMGPTPLHVNPIFEIGPVEPRFSEWLVFEGISVDESGKQHYLDATVAYKRAVLNAIDYLFKFGYSKEQVLVFAA

SEQ ID NO: 84037 - DNA, 1359 bp, Arabidopsis thaliana
  misc_feature (1)..(1359): Ceres Seq. ID no. 12672922
  misc_feature (1)..(1359): Ortholog of  Ceres SEQ ID NO 13595497 as cited in SEQ ID NO 51127
  misc_feature (1)..(1359): Ortholog of  Ceres SEQ ID NO 14306765 as cited in SEQ ID NO 53275
aaacttcaccagaagaaattcttaacaaacaattttcttcataatattaattctcaagatcttaaagattatattaatacgaagagaaaattcaaatgggtcttgatgattcatgcaacacaggtcttgttcttggtttaggcctctcaccaacgcctaataattacaatcatgccatcaagaaatcttcctccactgtggaccatcgtttcatcaggctcgatccgtcgttgactctaagcctatccggtgagagctacaagatcaagactggtgccggcgccggcgaccaaatttgccggcagacctcgtcccacagcggcatctcatctttctcgagcggaagggtaaagagagaaagagaaatctccggcggcgatggagaagaagaggcggaggagacgacggagagagtggtgtgttcgagagtgagtgatgatcatgacgatgaagaaggtgttagtgctcgtaaaaagcttagactcactaaacaacaatctgctcttctcgaagataacttcaaacttcatagcacccttaatcccgtatgatatagttaattatttccttaattaaactaatcagtctcttcttatttacgttaatcatatcgttaattattttttctatgaatttacagaagcaaaaacaagctcttgcgagacagctgaatctaaggcctagacaagttgaagtgtggttccaaaacaggagagctagaacaaaactaaagcaaacagaagtggattgtgagtttttgaagaaatgttgcgagactttaacggatgagaatagaaggcttcaaaaagagcttcaagaccttaaggctttaaaattgtctcaaccgttttacatgcacatgccggcggcgactttgactatgtgcccttcttgtgagagactcggcggtggtggtgtcggaggagatacgacggcggttgatgaagaaacggcgaaaggagctttctccatcgtcacaaagcctcgtttctataaccctttcactaatccttctgcagcatgttagttacttattagttatttaatttctttttgttggttttttttttgtttcttaaatcaaattaggaattagttagaagataaatcccagggaaaaaatattacgttgaaattggggggaaatggggtatagtctttatagataagactcttcaacgattccactttatttttcggtgggattgttggttgatgaagaaaaaaaaatagtttgtaattacaggtttaaatatgtagagaaaaaatgacgaatatgtattatcttgtttttttttccttcgaatatgtattacggtaatataaatttgcttgtaaaaataataaatatattatttg

SEQ ID NO: 84038 - protein, 151 aa, Arabidopsis thaliana
  peptide (1)..(151): Ceres Seq. ID no. 12672923
MGLDDSCNTGLVLGLGLSPTPNNYNHAIKKSSSTVDHRFIRLDPSLTLSLSGESYKIKTGAGAGDQICRQTSSHSGISSFSSGRVKREREISGGDGEEEAEETTERVVCSRVSDDHDDEEGVSARKKLRLTKQQSALLEDNFKLHSTLNPV

SEQ ID NO: 84039 - protein, 132 aa, Arabidopsis thaliana
  peptide (1)..(132): Ceres Seq. ID no. 12672924
MNLQKQKQALARQLNLRPRQVEVWFQNRRARTKLKQTEVDCEFLKKCCETLTDENRRLQKELQDLKALKLSQPFYMHMPAATLTMCPSCERLGGGGVGGDTTAVDEETAKGAFSIVTKPRFYNPFTNPSAAC

SEQ ID NO: 84040 - DNA, 1058 bp, Arabidopsis thaliana
  misc_feature (1)..(1058): Ceres Seq. ID no. 12672956
  misc_feature (1)..(1058): Ortholog of  Ceres SEQ ID NO 13594687 as cited in SEQ ID NO 52069
  misc_feature (1)..(1058): Ortholog of  Ceres SEQ ID NO 15178843 as cited in SEQ ID NO 0
ctctctctctctctctctctctctctctctttcttctatcttctccgtcatcgttctctctctctcctctcccggagatttttactcaggcgttcttctgtggatcagaggtgaaaaagatgaatcattgcaaccttcagcagaacgccttcatgtctcgtgaggagatgatgggatttgacctcaagctgcagccgacttgtgtgattctaaagctggtgctgagcttttggaaatcattcgtagaaaggaggataatggaacaatagggcagttactatcatcatccccaccgtattttcccggttcaccaccgagtagagcggcgaacccattagcccaagatgctcgttttcgagatgagaaactcaatccaatctcaccaaactctcctttccttcagccatattcggcaaccgggtttccatctccatcttcttcctcatcatcgtcgtcttcccgtggttgtgttagaatgaaatttggactcaactcgcctgcagttagagtagaaggatttgattgcttgaaccgtgaccgtcaaaactcgagcatccctgccatggcttagtagacaaacaacaaaaaaacaagtgtacatagagattccggaatcgttcgttcgccaatgcctaacagaggaggatttgattactactgctgcaactattactactaccatttttgaaagtaaatgaatatgtttttgtttttcatcttctcctaagagagagagagagggaagaggaaggaggaagatgaagatcagttaccgtcgccggtcaccgtttaactgttttattcaggttagtgtttgtatataaagatgcagtatttaaaagaagagtcgaatctatgtattcgtttggtgtttttctgggtcgggcggatctttagtactgtttcatatataactaagagggaagattagaagatgaagaagctgtaaaattttcttgggaagaaaactctggtttctatcttctcgttgtaatatagataatcaacttggatttatcttctttcagattcaccattgtatatagtaatgtttattt

SEQ ID NO: 84041 - protein, 88 aa, Arabidopsis thaliana
  peptide (1)..(88): Ceres Seq. ID no. 12672957
LSLSLSLSLFLLSSPSSFSLSPLPEIFTQAFFCGSEVKKMNHCNLQQNAFMSREEMMGFDLKLQPTCVILKLVLSFWKSFVERRIMEQ

SEQ ID NO: 84042 - protein, 53 aa, Arabidopsis thaliana
  peptide (1)..(53): Ceres Seq. ID no. 12672958
SLSLSLSLSLSSIFSVIVLSLSSPGDFYSGVLLWIRGEKDESLQPSAERLHVS

SEQ ID NO: 84043 - protein, 49 aa, Arabidopsis thaliana
  peptide (1)..(49): Ceres Seq. ID no. 12672959
MNHCNLQQNAFMSREEMMGFDLKLQPTCVILKLVLSFWKSFVERRIMEQ

SEQ ID NO: 84044 - DNA, 1152 bp, Arabidopsis thaliana
  misc_feature (1)..(1152): Ceres Seq. ID no. 12672960
  misc_feature (1)..(1152): Ortholog of  Ceres SEQ ID NO 13594687 as cited in SEQ ID NO 52069
  misc_feature (1)..(1152): Ortholog of  Ceres SEQ ID NO 13595561 as cited in SEQ ID NO 59869
  misc_feature (1)..(1152): Ortholog of  Ceres SEQ ID NO 15178843 as cited in SEQ ID NO 0
ctctctctctctctctctctctctctctctttcttctatcttctccgtcatcgttctctctctctcctctcccggagatttttactcaggcgttcttctgtggatcagaggtgaaaaagatgaatcattgcaaccttcagcagaacgccttcatgtctcgtgaggagatgatgggatttgaccgtaaggatcttgttgtttgtcctaagcctcgacgtgttggtttactcgccaacaacgttattcgtcctcttagattacatatgagtcaagctgcagccgacttgtgtgattctaaagctggtgctgagcttttggaaatcattcgtagaaaggaggataatggaacaatagggcagttactatcatcatccccaccgtattttcccggttcaccaccgagtagagcggcgaacccattagcccaagatgctcgttttcgagatgagaaactcaatccaatctcaccaaactctcctttccttcagccatattcggcaaccgggtttccatctccatcttcttcctcatcatcgtcgtcttcccgtggttgtgttagaatgaaatttggactcaactcgcctgcagttagagtagaaggatttgattgcttgaaccgtgaccgtcaaaactcgagcatccctgccatggcttagtagacaaacaacaaaaaaacaagtgtacatagagattccggaatcgttcgttcgccaatgcctaacagaggaggatttgattactactgctgcaactattactactaccatttttgaaagtaaatgaatatgtttttgtttttcatcttctcctaagagagagagagagggaagaggaaggaggaagatgaagatcagttaccgtcgccggtcaccgtttaactgttttattcaggttagtgtttgtatataaagatgcagtatttaaaagaagagtcgaatctatgtattcgtttggtgtttttctgggtcgggcggatctttagtactgtttcatatataactaagagggaagattagaagatgaagaagctgtaaaattttcttgggaagaaaactctggtttctatcttctcgttgtaatatagataatcaacttggatttatcttctttcagattcaccattgtatatagtaatgtttatttttcttggtg

SEQ ID NO: 84045 - protein, 217 aa, Arabidopsis thaliana
  peptide (1)..(217): Ceres Seq. ID no. 12672961
LSLSLSLSLFLLSSPSSFSLSPLPEIFTQAFFCGSEVKKMNHCNLQQNAFMSREEMMGFDRKDLVVCPKPRRVGLLANNVIRPLRLHMSQAAADLCDSKAGAELLEIIRRKEDNGTIGQLLSSSPPYFPGSPPSRAANPLAQDARFRDEKLNPISPNSPFLQPYSATGFPSPSSSSSSSSSRGCVRMKFGLNSPAVRVEGFDCLNRDRQNSSIPAMA

SEQ ID NO: 84046 - protein, 178 aa, Arabidopsis thaliana; identical to SEQ ID NO: 36312
  peptide (1)..(178): Ceres Seq. ID no. 12672962

SEQ ID NO: 84047 - protein, 167 aa, Arabidopsis thaliana; identical to SEQ ID NO: 36313
  peptide (1)..(167): Ceres Seq. ID no. 12672963

SEQ ID NO: 84048 - DNA, 1074 bp, Arabidopsis thaliana
  misc_feature (1)..(1074): Ceres Seq. ID no. 12672964
  misc_feature (1)..(1074): Ortholog of  Ceres SEQ ID NO 14308077 as cited in SEQ ID NO 58566
  misc_feature (1)..(1074): Ortholog of  Ceres SEQ ID NO 15226608 as cited in SEQ ID NO 64190
aagtttcaattcatcttcattccgggagaaaaagtcgcgatacttgagctactcagctttagggtttaacatgttaaggtctctgatttggaaacgatcacaggcatattcttcagtcgtcacgatgtcttcaatcagtcagagaggaaatgaaaggcttttgtctgaagtcgctggttcacattcaagagataataagatattggttttgggaggaaatggttatgtaggttcacacatatgtaaggaggcactgagacaaggtttctctgtatctagtcttagcaggtctggaagatcttctcttcacgattcgtgggtcgatgatgtaacctggcatcaaggtgatttgctttcacccgattctctgaagcctgcactagaaggaattacatctgtgatttcatgtgttggtggttttggttccaactcacaaatggtcagaattaacggtactgcaaacatcaatgctgttaaagctgcagcagaacaaggtgtgaagagatttgtgtatatatcagctgcggattttggtgtcataaataacttgattcgaggatatttcgaagggaagagagcaaccgaagctgagattttggataaatttggaaacagaggttcggttttaaggccaggattcatacatgggactcgtcaggtcggtagcataaagctgccacttagtctcattggagctcctctcgaaatggttttgaagctgttgccaaaagaggtgacgaaaattcctgtgatcgggccacttttaatacctccggtcaatgtcaaatccgttgcagcaacagcggtaaaagctgcagttgatcccgagtttgcttctggagtcatcgatgtgtaccggattcttcaacatggtcactgaaaacaacacctgtcttaacaaagttctcctcaatacggttttaaatgtcaaattcaaatgtaaccaataaccatcgtctctggtcttctgctaccaaataaactatgactttcgcatattacacaataggagaacaaataatgaaatctttttgaaactggaaccaataaccatcgtcattagagattcaactt

SEQ ID NO: 84049 - protein, 292 aa, Arabidopsis thaliana
  peptide (1)..(292): Ceres Seq. ID no. 12672965
SFNSSSFREKKSRYLSYSALGFNMLRSLIWKRSQAYSSVVTMSSISQRGNERLLSEVAGSHSRDNKILVLGGNGYVGSHICKEALRQGFSVSSLSRSGRSSLHDSWVDDVTWHQGDLLSPDSLKPALEGITSVISCVGGFGSNSQMVRINGTANINAVKAAAEQGVKRFVYISAADFGVINNLIRGYFEGKRATEAEILDKFGNRGSVLRPGFIHGTRQVGSIKLPLSLIGAPLEMVLKLLPKEVTKIPVIGPLLIPPVNVKSVAATAVKAAVDPEFASGVIDVYRILQHGH

SEQ ID NO: 84050 - protein, 269 aa, Arabidopsis thaliana; identical to SEQ ID NO: 35416
  peptide (1)..(269): Ceres Seq. ID no. 12672966

SEQ ID NO: 84051 - protein, 251 aa, Arabidopsis thaliana; identical to SEQ ID NO: 35417
  peptide (1)..(251): Ceres Seq. ID no. 12672967

SEQ ID NO: 84052 - DNA, 914 bp, Arabidopsis thaliana
  misc_feature (1)..(914): Ceres Seq. ID no. 12672968
  misc_feature (1)..(914): Ortholog of  Ceres SEQ ID NO 12563124 as cited in SEQ ID NO 57104
  misc_feature (1)..(914): Ortholog of  Ceres SEQ ID NO 13598373 as cited in SEQ ID NO 62185
  misc_feature (1)..(914): Ortholog of  Ceres SEQ ID NO 12617639 as cited in SEQ ID NO 65219
tttcaatggcgtccggtgatgttgagtatcggtgcttcgttggaggtctagcatgggccactgatgacagagctcttgagactgccttcgctcaatacggcgacgttattgattccaaggtctgttacacgccgagatcggactccgagtgatatcgatgatctcatcctcgacggatctgttccgatcttgtgtttctctgttacttgattcgattactctgttactattctcgttctttgttactactactactactactgttacttgtattttcccaaatcgtaacgatcgtgagactggaagatcaaggggattcggattcgtcaccttcaaggatgagaaagccatgaaggatgcgattgagggaatgaacggacaagatctcgatggccgtagcatcactgttaacgaggctcagtcacgaggaagcggtggcggcggaggccaccgtggaggtggtggcggtggataccgcagcggcggtggtggaggttactccggtggaggtggtagctacggaggtggcggcggtagacgcgagggtggaggaggatacagcggcggcggcggcggttactcctcaagaggtggtggtggcggaagctacggtggtggaagacgtgagggaggaggaggatacggtggtggtgaaggaggaggttacggaggaagcggtggtggtggaggatggtaattcctttaattaggtttgggattaccaatgaatgttctctctctcgcttgttatgcttctacttggttttgtgtgttctctattttgttctggttctgctttagatttgatgtaacagttcgtgattaggtattttggtatctggaaacgtaatgttaagtcacttgtcattctctaaataacaaatttcttcggagatattatctctgttgattga

SEQ ID NO: 84053 - protein, 179 aa, Arabidopsis thaliana
  peptide (1)..(179): Ceres Seq. ID no. 12672969
MISSSTDLFRSCVSLLLDSITLLLFSFFVTTTTTTVTCIFPNRNDRETGRSRGFGFVTFKDEKAMKDAIEGMNGQDLDGRSITVNEAQSRGSGGGGGHRGGGGGGYRSGGGGGYSGGGGSYGGGGGRREGGGGYSGGGGGYSSRGGGGGSYGGGRREGGGGYGGGEGGGYGGSGGGGGW

SEQ ID NO: 84054 - protein, 115 aa, Arabidopsis thaliana; identical to SEQ ID NO: 76878
  peptide (1)..(115): Ceres Seq. ID no. 12672970

SEQ ID NO: 84055 - protein, 108 aa, Arabidopsis thaliana; identical to SEQ ID NO: 76879
  peptide (1)..(108): Ceres Seq. ID no. 12672971

SEQ ID NO: 84056 - DNA, 1120 bp, Arabidopsis thaliana
  misc_feature (1)..(1120): Ceres Seq. ID no. 12672999
  misc_feature (1)..(1120): Ortholog of  Ceres SEQ ID NO 15176321 as cited in SEQ ID NO 52814
  misc_feature (1)..(1120): Ortholog of  Ceres SEQ ID NO 12563124 as cited in SEQ ID NO 57104
  misc_feature (1)..(1120): Ortholog of  Ceres SEQ ID NO 13598373 as cited in SEQ ID NO 62185
  misc_feature (1)..(1120): Ortholog of  Ceres SEQ ID NO 12584664 as cited in SEQ ID NO 62232
  misc_feature (1)..(1120): Ortholog of  Ceres SEQ ID NO 12617639 as cited in SEQ ID NO 65219
acacatctcactgctcactactctcactgtaatcccttagatcttcttttcaaatttcaatggcgtccggtgatgttgagtatcggtgcttcgttggaggtctagcatgggccactgatgacagagctcttgagactgccttcgctcaatacggcgacgttattgattccaaggtctgttacacgccgagatcggactccgagtgatatcgatgatctcatcctcgacggatctgttccgatcttgtgtttctctgttacttgattcgattactctgttactattctcgttctttgttactactactactactactgttacttgtattttcccaaatcggtacgttcatcttcctgcttctgtgagcccggagatcgatcggatttttttgtattttgtatatttgttgtagatctaaatgcttttgttcagttttgttggattgttttgctgatctggtttttgtattatttggataacagatcattaacgatcgtgagactggaagatcaaggggattcggattcgtcaccttcaaggatgagaaagccatgaaggatgcgattgagggaatgaacggacaagatctcgatggccgtagcatcactgttaacgaggctcagtcacgaggaagcggtggcggcggaggccaccgtggaggtggtggcggtggataccgcagcggcggtggtggaggttactccggtggaggtggtagctacggaggtggcggcggtagacgcgagggtggaggaggatacagcggcggcggcggcggttactcctcaagaggtggtggtggcggaagctacggtggtggaagacgtgagggaggaggaggatacggtggtggtgaaggaggaggttacggaggaagcggtggtggtggaggatggtaattcctttaattaggtttgggattaccaatgaatgttctctctctcgcttgttatgcttctacttggttttgtgtgttctctattttgttctggttctgctttagatttgatgtaacagttcgtgattaggtattttggtatctggaaacgtaatgttaagtcacttgtcattctctaaataacaaatttcttcggagatattatctctgttgattgattct

SEQ ID NO: 84057 - protein, 115 aa, Arabidopsis thaliana; identical to SEQ ID NO: 76878
  peptide (1)..(115): Ceres Seq. ID no. 12673000

SEQ ID NO: 84058 - protein, 108 aa, Arabidopsis thaliana; identical to SEQ ID NO: 76879
  peptide (1)..(108): Ceres Seq. ID no. 12673001

SEQ ID NO: 84059 - protein, 106 aa, Arabidopsis thaliana
  peptide (1)..(106): Ceres Seq. ID no. 12673002
MAVASLLTRLSHEEAVAAEATVEVVAVDTAAAVVEVTPVEVVATEVAAVDARVEEDTAAAAAVTPQEVVVAEATVVEDVREEEDTVVVKEEVTEEAVVVEDGNSFN

SEQ ID NO: 84060 - DNA, 927 bp, Arabidopsis thaliana
  misc_feature (1)..(927): Ceres Seq. ID no. 12673003
  misc_feature (1)..(927): Ortholog of  Ceres SEQ ID NO 15176321 as cited in SEQ ID NO 52814
  misc_feature (1)..(927): Ortholog of  Ceres SEQ ID NO 12563124 as cited in SEQ ID NO 57104
  misc_feature (1)..(927): Ortholog of  Ceres SEQ ID NO 13598373 as cited in SEQ ID NO 62185
  misc_feature (1)..(927): Ortholog of  Ceres SEQ ID NO 12584664 as cited in SEQ ID NO 62232
  misc_feature (1)..(927): Ortholog of  Ceres SEQ ID NO 12617639 as cited in SEQ ID NO 65219
atctcactgctcactactctcactgtaatcccttagatcttcttttcaaatttcaatggcgtccggtgatgttgagtatcggtgcttcgttggaggtctagcatgggccactgatgacagagctcttgagactgccttcgctcaatacggcgacgttattgattccaaggtctgttacacgccgagatcggactccgagtgatatcgatgatctcatcctcgacggatctgttccgatcttgtgtttctctgttacttgattcgattactctgttactattctcgttctttgttactactactactactactgttacttgtattttcccaaatcgatcattaacgatcgtgagactggaagatcaaggggattcggattcgtcaccttcaaggatgagaaagccatgaaggatgcgattgagggaatgaacggacaagatctcgatggccgtagcatcactgttaacgaggctcagtcacgaggaagcggtggcggcggaggccaccgtggaggtggtggcggtggataccgcagcggcggtggtggaggttactccggtggaggtggtagctacggaggtggcggcggtagacgcgagggtggaggaggatacagcggcggcggcggcggttactcctcaagaggtggtggtggcggaagctacggtggtggaagacgtgagggaggaggaggatacggtggtggtgaaggaggaggttacggaggaagcggtggtggtggaggatggtaattcctttaattaggtttgggattaccaatgaatgttctctctctcgcttgttatgcttctacttggttttgtgtgttctctattttgttctggttctgctttagatttgatgtaacagttcgtgattaggtattttggtatctggaaacgtaatgttaagtcacttgtcattctc

SEQ ID NO: 84061 - protein, 115 aa, Arabidopsis thaliana; identical to SEQ ID NO: 76878
  peptide (1)..(115): Ceres Seq. ID no. 12673004

SEQ ID NO: 84062 - protein, 108 aa, Arabidopsis thaliana; identical to SEQ ID NO: 76879
  peptide (1)..(108): Ceres Seq. ID no. 12673005

SEQ ID NO: 84063 - protein, 106 aa, Arabidopsis thaliana; identical to SEQ ID NO: 84059
  peptide (1)..(106): Ceres Seq. ID no. 12673006

SEQ ID NO: 84064 - DNA, 743 bp, Arabidopsis thaliana
  misc_feature (1)..(743): Ceres Seq. ID no. 12673011
  misc_feature (1)..(743): Ortholog of  Ceres SEQ ID NO 12563124 as cited in SEQ ID NO 57104
  misc_feature (1)..(743): Ortholog of  Ceres SEQ ID NO 13598373 as cited in SEQ ID NO 62185
  misc_feature (1)..(743): Ortholog of  Ceres SEQ ID NO 12584664 as cited in SEQ ID NO 62232
  misc_feature (1)..(743): Ortholog of  Ceres SEQ ID NO 12617639 as cited in SEQ ID NO 65219
acatctcactgctcactactctcactgtaatcccttagatcttcttttcaaatttcaatggcgtccggtgatgttgagtatcggtgcttcgttggaggtctagcatgggccactgatgacagagctcttgagactgccttcgctcaatacggcgacgttattgattccaagatcattaacgatcgtgagactggaagatcaaggggattcggattcgtcaccttcaaggatgagaaagccatgaaggatgcgattgagggaatgaacggacaagatctcgatggccgtagcatcactgttaacgaggctcagtcacgaggaagcggtggcggcggaggccaccgtggaggtggcggcggtagacgcgagggtggaggaggatacagcggcggcggcggcggttactcctcaagaggtggtggtggcggaagctacggtggtggaagacgtgagggaggaggaggatacggtggtggtgaaggaggaggttacggaggaagcggtggtggtggaggatggtaattcctttaattaggtttgggattaccaatgaatgttctctctctcgcttgttatgcttctacttggttttgtgtgttctctattttgttctggttctgctttagatttgatgtaacagttcgtgattaggtattttggtatctggaaacgtaatgttaagtcacttgtcattctctaaataacaaatttcttcggagatattatctctgttgattgattct

SEQ ID NO: 84065 - protein, 154 aa, Arabidopsis thaliana
  peptide (1)..(154): Ceres Seq. ID no. 12673012
MASGDVEYRCFVGGLAWATDDRALETAFAQYGDVIDSKIINDRETGRSRGFGFVTFKDEKAMKDAIEGMNGQDLDGRSITVNEAQSRGSGGGGGHRGGGGGRREGGGGYSGGGGGYSSRGGGGGSYGGGRREGGGGYGGGEGGGYGGSGGGGGW

SEQ ID NO: 84066 - protein, 93 aa, Arabidopsis thaliana; identical to SEQ ID NO: 43293
  peptide (1)..(93): Ceres Seq. ID no. 12673013

SEQ ID NO: 84067 - protein, 86 aa, Arabidopsis thaliana; identical to SEQ ID NO: 43294
  peptide (1)..(86): Ceres Seq. ID no. 12673014

SEQ ID NO: 84068 - DNA, 720 bp, Arabidopsis thaliana
  misc_feature (1)..(720): Ceres Seq. ID no. 12673015
  misc_feature (1)..(720): Ortholog of  Ceres SEQ ID NO 12563124 as cited in SEQ ID NO 57104
  misc_feature (1)..(720): Ortholog of  Ceres SEQ ID NO 13598373 as cited in SEQ ID NO 62185
  misc_feature (1)..(720): Ortholog of  Ceres SEQ ID NO 12617639 as cited in SEQ ID NO 65219
acatctcactgctcactactctcactgtaatcccttagatcttcttttcaaatttcaatggcgtccggtgatgttgagtatcggtgcttcgttggaggtctagcatgggccactgatgacagagctcttgagactgccttcgctcaatacggcgacgttattgattccaagatcattaacgatcgtgagactggaagatcaaggggattcggattcgtcaccttcaaggatgagaaagccatgaaggatgcgattgagggaatgaacggacaagatctcgatggccgtagcatcactgttaacgaggctcagtcacgaggaagcggtggcggcggtagacgcgagggtggaggaggatacagcggcggcggcggcggttactcctcaagaggtggtggtggcggaagctacggtggtggaagacgtgagggaggaggaggatacggtggtggtgaaggaggaggttacggaggaagcggtggtggtggaggatggtaattcctttaattaggtttgggattaccaatgaatgttctctctctcgcttgttatgcttctacttggttttgtgtgttctctattttgttctggttctgctttagatttgatgtaacagttcgtgattaggtattttggtatctggaaacgtaatgttaagtcacttgtcattctctaaataacaaatttcttcggagatattatctctgttgattgattcta

SEQ ID NO: 84069 - protein, 146 aa, Arabidopsis thaliana
  peptide (1)..(146): Ceres Seq. ID no. 12673016
MASGDVEYRCFVGGLAWATDDRALETAFAQYGDVIDSKIINDRETGRSRGFGFVTFKDEKAMKDAIEGMNGQDLDGRSITVNEAQSRGSGGGGRREGGGGYSGGGGGYSSRGGGGGSYGGGRREGGGGYGGGEGGGYGGSGGGGGW

SEQ ID NO: 84070 - protein, 85 aa, Arabidopsis thaliana
  peptide (1)..(85): Ceres Seq. ID no. 12673017
MKDAIEGMNGQDLDGRSITVNEAQSRGSGGGGRREGGGGYSGGGGGYSSRGGGGGSYGGGRREGGGGYGGGEGGGYGGSGGGGGW

SEQ ID NO: 84071 - protein, 78 aa, Arabidopsis thaliana
  peptide (1)..(78): Ceres Seq. ID no. 12673018
MNGQDLDGRSITVNEAQSRGSGGGGRREGGGGYSGGGGGYSSRGGGGGSYGGGRREGGGGYGGGEGGGYGGSGGGGGW

SEQ ID NO: 84072 - DNA, 712 bp, Arabidopsis thaliana
  misc_feature (1)..(712): Ceres Seq. ID no. 12673019
  misc_feature (1)..(712): Ortholog of  Ceres SEQ ID NO 12563124 as cited in SEQ ID NO 57104
  misc_feature (1)..(712): Ortholog of  Ceres SEQ ID NO 12617639 as cited in SEQ ID NO 65219
acacatctcactgctcactactctcactgtaatcccttagatcttcttttcaaatttcaatggcgtccggtgatgttgagtatcggtgcttcgttggaggtctagcatgggccactgatgacagagctcttgagactgccttcgctcaatacggcgacgttattgattccaagatcattaacgatcgtgagactggaagatcaaggggattcggattcgtcaccttcaaggatgagaaagccatgaaggatgcgattgagggaatgaacggacaagatctcgatggccgtagcatcactgttaacgaggctcagtcacgaggaagcggtggcggcggaggccaccgtggaggtggtggcggcggttactcctcaagaggtggtggtggcggaagctacggtggtggaagacgtgagggaggaggaggatacggtggtggtgaaggaggaggttacggaggaagcggtggtggtggaggatggtaattcctttaattaggtttgggattaccaatgaatgttctctctctcgcttgttatgcttctacttggttttgtgtgttctctattttgttctggttctgctttagatttgatgtaacagttcgtgattaggtattttggtatctggaaacgtaatgttaagtcacttgtcattctctaaataacaaatttcttcggagatattatctctgttgattgattctatcatc

SEQ ID NO: 84073 - protein, 141 aa, Arabidopsis thaliana
  peptide (1)..(141): Ceres Seq. ID no. 12673020
MASGDVEYRCFVGGLAWATDDRALETAFAQYGDVIDSKIINDRETGRSRGFGFVTFKDEKAMKDAIEGMNGQDLDGRSITVNEAQSRGSGGGGGHRGGGGGGYSSRGGGGGSYGGGRREGGGGYGGGEGGGYGGSGGGGGW

SEQ ID NO: 84074 - protein, 80 aa, Arabidopsis thaliana
  peptide (1)..(80): Ceres Seq. ID no. 12673021
MKDAIEGMNGQDLDGRSITVNEAQSRGSGGGGGHRGGGGGGYSSRGGGGGSYGGGRREGGGGYGGGEGGGYGGSGGGGGW

SEQ ID NO: 84075 - protein, 73 aa, Arabidopsis thaliana
  peptide (1)..(73): Ceres Seq. ID no. 12673022
MNGQDLDGRSITVNEAQSRGSGGGGGHRGGGGGGYSSRGGGGGSYGGGRREGGGGYGGGEGGGYGGSGGGGGW

SEQ ID NO: 84076 - DNA, 631 bp, Arabidopsis thaliana
  misc_feature (1)..(631): Ceres Seq. ID no. 12673027
  misc_feature (1)..(631): Ortholog of  Ceres SEQ ID NO 12563124 as cited in SEQ ID NO 57104
  misc_feature (1)..(631): Ortholog of  Ceres SEQ ID NO 13598373 as cited in SEQ ID NO 62185
ctacacatctcactgctcactactctcactgtaatcccttagatcttcttttcaaatttcaatggcgtccggtgatgttgagtatcggtgcttcgttggaggtctagcatgggccactgatgacagagctcttgagactgccttcgctcaatacggcgacgttattgattccaagatcattaacgatcgtgagactggaagatcaaggggattcggattcgtcaccttcaaggatgagaaagccatgaaggatgcgattgagggaatgaacggacaagatctcgatggccgtagcatcactgttaacgaggctcagtcacgaggaagcggtggtggtggcggaagctacggtggtggaagacgtgagggaggaggaggatacggtggtggtgaaggaggaggttacggaggaagcggtggtggtggaggatggtaattcctttaattaggtttgggattaccaatgaatgttctctctctcgcttgttatgcttctacttggttttgtgtgttctctattttgttctggttctgctttagatttgatgtaacagttcgtgattaggtattttggtatctggaaacgtaatgttaagtcacttgtcattctctaaataacaaatttcttcgg

SEQ ID NO: 84077 - protein, 124 aa, Arabidopsis thaliana
  peptide (1)..(124): Ceres Seq. ID no. 12673028
MASGDVEYRCFVGGLAWATDDRALETAFAQYGDVIDSKIINDRETGRSRGFGFVTFKDEKAMKDAIEGMNGQDLDGRSITVNEAQSRGSGGGGGSYGGGRREGGGGYGGGEGGGYGGSGGGGGW

SEQ ID NO: 84078 - protein, 63 aa, Arabidopsis thaliana
  peptide (1)..(63): Ceres Seq. ID no. 12673029
MKDAIEGMNGQDLDGRSITVNEAQSRGSGGGGGSYGGGRREGGGGYGGGEGGGYGGSGGGGGW

SEQ ID NO: 84079 - DNA, 653 bp, Arabidopsis thaliana
  misc_feature (1)..(653): Ceres Seq. ID no. 12673030
  misc_feature (1)..(653): Ortholog of  Ceres SEQ ID NO 12563124 as cited in SEQ ID NO 57104
  misc_feature (1)..(653): Ortholog of  Ceres SEQ ID NO 13598373 as cited in SEQ ID NO 62185
acacatctcactgctcactactctcactgtaatcccttagatcttcttttcaaatttcaatggcgtccggtgatgttgagtatcggtgcttcgttggaggtctagcatgggccactgatgacagagctcttgagactgccttcgctcaatacggcgacgttattgattccaagatcattaacgatcgtgagactggaagatcaaggggattcggattcgtcaccttcaaggatgagaaagccatgaaggatgcgattgagggaatgaacggacaagatctcgatggccgtagcatcactgttaacgaggctcagtcacgaggaagcggtggcggcggaggccaccgtggaggtggtggaagacgtgagggaggaggaggatacggtggtggtgaaggaggaggttacggaggaagcggtggtggtggaggatggtaattcctttaattaggtttgggattaccaatgaatgttctctctctcgcttgttatgcttctacttggttttgtgtgttctctattttgttctggttctgctttagatttgatgtaacagttcgtgattaggtattttggtatctggaaacgtaatgttaagtcacttgtcattctctaaataacaaatttcttcggagatattatctctgttgattg

SEQ ID NO: 84080 - protein, 125 aa, Arabidopsis thaliana
  peptide (1)..(125): Ceres Seq. ID no. 12673031
MASGDVEYRCFVGGLAWATDDRALETAFAQYGDVIDSKIINDRETGRSRGFGFVTFKDEKAMKDAIEGMNGQDLDGRSITVNEAQSRGSGGGGGHRGGGGRREGGGGYGGGEGGGYGGSGGGGGW

SEQ ID NO: 84081 - protein, 64 aa, Arabidopsis thaliana
  peptide (1)..(64): Ceres Seq. ID no. 12673032
MKDAIEGMNGQDLDGRSITVNEAQSRGSGGGGGHRGGGGRREGGGGYGGGEGGGYGGSGGGGGW

SEQ ID NO: 84082 - DNA, 559 bp, Arabidopsis thaliana
  misc_feature (1)..(559): Ceres Seq. ID no. 12673033
  misc_feature (1)..(559): Ortholog of  Ceres SEQ ID NO 12563124 as cited in SEQ ID NO 57104
acacatctcactgctcactactctcactgtaatcccttagatcttcttttcaaatttcaatggcgtccggtgatgttgagtatcggtgcttcgttggaggtctagcatgggccactgatgacagagctcttgagactgccttcgctcaatacggcgacgttattgattccaagatcattaacgatcgtgagactggaagatcaaggggattcggattcgtcaccttcaaggatgagaaagccatgaaggatgcgattgagggaatgaacggacaagatctcgatggccgtagcatcactgttaacgaggctcagtcacgaggaagcggtggcggcggaggccaccgtggaggtggtggcggtggataccgcagcgcggtggtggtggaggatggtaattcctttaattaggtttgggattaccaatgaatgttctctctctcgcttgttatgcttctacttggttttgtgtgttctctattttgttctggttctgctttagatttgatgtaacagttcgtgattaggtattttggtatctggaaacgtaatgttaagtc

SEQ ID NO: 84083 - protein, 116 aa, Arabidopsis thaliana
  peptide (1)..(116): Ceres Seq. ID no. 12673034
MASGDVEYRCFVGGLAWATDDRALETAFAQYGDVIDSKIINDRETGRSRGFGFVTFKDEKAMKDAIEGMNGQDLDGRSITVNEAQSRGSGGGGGHRGGGGGGYRSAVVVEDGNSFN

SEQ ID NO: 84084 - protein, 72 aa, Arabidopsis thaliana
  peptide (1)..(72): Ceres Seq. ID no. 12673035
MAVASLLTRLSHEEAVAAEATVEVVAVDTAARWWWRMVIPLIRFGITNECSLSRLLCFYLVLCVLYFVLVLL

SEQ ID NO: 84085 - DNA, 1139 bp, Arabidopsis thaliana
  misc_feature (1)..(1139): Ceres Seq. ID no. 12673054
  misc_feature (1)..(1139): Ortholog of  Ceres SEQ ID NO 13595497 as cited in SEQ ID NO 51127
  misc_feature (1)..(1139): Ortholog of  Ceres SEQ ID NO 14306765 as cited in SEQ ID NO 53275
aggcatatttttttcatttcgactcagatgggttttgatgatacatgcaacacaggtcttgttcttggattaggtccctcaccaattccaaataattacaatagtaccatcagacaatcctccgtttacaagctcgagccgtcgttgactctatgcctctcgggcgatccctcggttaccgtggtgaccggagctgaccagctatgccgtcagacgtcatctcacagcggagtctcttctttctcaagcgggagggtggtgaaaagagagagagacggtggcgaagagtcgccggaggaggaagagatgacggagagagttataagtgattaccatgaagatgaagaaggtattagtgctagaaaaaaacttaggcttacgaaacaacaatctgctcttcttgaggaaagcttcaaggatcatagcacccttaatcccgtaactacatatccttaatcctaattcttttttattatacgttactaatcacttttgataattcttatccaatcagattctttgttgttatattttatttacagaaacaaaagcaagttctggctagacagctgaatctaaggcctagacaagttgaagtatggtttcaaaatagaagagccaggtaaaaaaaattatattataaattatcagaatatttgattttttcatgtgtcaaaatttctttaatagtcagaaaattttgtaggtgaaaatattttctattttttaggtgatatgatttttctttcggttatatatatttaattatttattttatttaatgaatgagcaggacaaagctgaagcaaacagaagtagattgtgagtttttgaagaagtgttgtgaaacattagcagatgagaacataagacttcagaaagagattcaagaactcaaaaccctaaaattgactcagcccttttacatgcacatgcctgcatcgactctaacgaagtgtccttcttgtgagagaatcggcggcggcggcgggggtaatggaggaggaggtggcggcagcggggctaccgcggtgattgtagatggaagtacggccaaaggagctttctctatctcctcaaagcctcacttcttcaacccttttactaacccatctgcagcttgttgaatagttaattcg

SEQ ID NO: 84086 - protein, 151 aa, Arabidopsis thaliana
  peptide (1)..(151): Ceres Seq. ID no. 12673055
RHIFFISTQMGFDDTCNTGLVLGLGPSPIPNNYNSTIRQSSVYKLEPSLTLCLSGDPSVTVVTGADQLCRQTSSHSGVSSFSSGRVVKRERDGGEESPEEEEMTERVISDYHEDEEGISARKKLRLTKQQSALLEESFKDHSTLNPVTTYP

SEQ ID NO: 84087 - protein, 142 aa, Arabidopsis thaliana
  peptide (1)..(142): Ceres Seq. ID no. 12673056
MGFDDTCNTGLVLGLGPSPIPNNYNSTIRQSSVYKLEPSLTLCLSGDPSVTVVTGADQLCRQTSSHSGVSSFSSGRVVKRERDGGEESPEEEEMTERVISDYHEDEEGISARKKLRLTKQQSALLEESFKDHSTLNPVTTYP

SEQ ID NO: 84088 - protein, 113 aa, Arabidopsis thaliana
  peptide (1)..(113): Ceres Seq. ID no. 12673057
MSRTKLKQTEVDCEFLKKCCETLADENIRLQKEIQELKTLKLTQPFYMHMPASTLTKCPSCERIGGGGGGNGGGGGGSGATAVIVDGSTAKGAFSISSKPHFFNPFTNPSAAC

SEQ ID NO: 84089 - DNA, 573 bp, Arabidopsis thaliana
  misc_feature (1)..(573): Ceres Seq. ID no. 12673079
  misc_feature (1)..(573): Ortholog of  Ceres SEQ ID NO 12562293 as cited in SEQ ID NO 20690
atcacttacttaacatactaagagagttattagaacttgcaaaaaatggcttccaaggctttgattctgttaggtctcttctcagttcttctcgtcgtctccgaagtgtctgccgcaaggcaatcgggcatggtgaagccagagagtgaggaaactgtgcaacctgaaggttatggcggtggccacggaggacatggtggtcacggagggggaggaggccacggacatggaggacacaacggaggagggggccacggacttgacggatacggaggaggtggaggacactatggaggaggtggaggacactacggaggaggtggaggacactacggaggtggtggaggaggatacggaggtggaggaggacaccacggaggaggaggccacgggctaaacgaacctgttcagactaagccgggtgtttaaaactatataatatcttcactaccatgcatgattgcatatatatatatacgcttatgtattatctatatgcctataaataaaccatggtgagtttgtaacgcagtgccttcagaaatgttcggaataaatttccataatattagt

SEQ ID NO: 84090 - protein, 127 aa, Arabidopsis thaliana
  peptide (1)..(127): Ceres Seq. ID no. 12673080
MASKALILLGLFSVLLVVSEVSAARQSGMVKPESEETVQPEGYGGGHGGHGGHGGGGGHGHGGHNGGGGHGLDGYGGGGGHYGGGGGHYGGGGGHYGGGGGGYGGGGGHHGGGGHGLNEPVQTKPGV

SEQ ID NO: 84091 - protein, 99 aa, Arabidopsis thaliana; identical to SEQ ID NO: 39252
  peptide (1)..(99): Ceres Seq. ID no. 12673081

SEQ ID NO: 84092 - protein, 74 aa, Arabidopsis thaliana; identical to SEQ ID NO: 39253
  peptide (1)..(74): Ceres Seq. ID no. 12673082

SEQ ID NO: 84093 - DNA, 1339 bp, Arabidopsis thaliana
  misc_feature (1)..(1339): Ceres Seq. ID no. 12673103
  misc_feature (1)..(1339): Ortholog of  Ceres SEQ ID NO 13662937 as cited in SEQ ID NO 64415
  misc_feature (1)..(1339): Ortholog of  Ceres SEQ ID NO 13595984 as cited in SEQ ID NO 68340
  misc_feature (1)..(1339): Ortholog of  Ceres SEQ ID NO 12635014 as cited in SEQ ID NO 0
acacaacaacaacacatccactcgaattttctatttccgaataacaaaaccgatcggcggagacatgacggcggcacaagggaactctaacgagactctgttttcttcttacaagatgggaagattcgatctctctcatcgagtggttctggcgccgatgacgcggtgcagggcgttgaacggagtaccaaacgcggcgttggcagagtattatgctcaacggaccactcccggcggttttctcatctccgaaggcaccatggtctctcccggatccgcaggttcccacatgtgcctggaatctattcagatgaacaagtagaagcatggaagcaagttgtggaagcagttcacgctaagggaggtttcatcttttgtcaattatggcatgttggacgtgcttctcatgcagtgtatcaacctaatggaggatcaccaatatcgtcaacgaacaaaccaatctcggaaaacaggtggcgagttttgttgcccgatggttcccacgtgaagtacccgaaacctcgggctttagaagcttccgagatacctcgggtggtggaggattattgcctttctgctttgaatgcgattcgagctggtttcgatgggattgagatccacggggcgcatggttaccttattgatcagtttttgaaagatgggatcaatgaccgtactgaccaatacggaggatccattgcaaaccgttgtagattcttgaaacaagtagtggaaggtgtagtttcagccataggagctagtaaagttggtgtgagggtatctccggctatagatcacttggacgcaactgattctgacccactatcactcgggctagccgtggttggcatgctcaataagttacaaggtgttaatggctcaaagctcgcttaccttcacgttacacaacctcgctaccacgcctacgggcaaacagagtctggaaggcaagggagtgatgaggaagaagctaagctaatgaagagcttgaggatggcttataatggaacctttatgtctagtggaggattcaataaggaactaggtatgcaagctgttcaacaaggtgatgctgatttggtttcatatggcagactgtttatcgcaaacccggatttggtttcgcggttcaagattgatggagagttgaataaatataatcggaagacgttttacactcaagatccagttgttggctacacggattatcctttcttggctcctttttcccgcctctgagtttgataatcgaggagaaaatgtattgacaatacattgatatgtaaaatgacaatgttattgttatccacttaatatttagtcatgtatcttgttgttt

SEQ ID NO: 84094 - protein, 129 aa, Arabidopsis thaliana
  peptide (1)..(129): Ceres Seq. ID no. 12673104
MLNKLQGVNGSKLAYLHVTQPRYHAYGQTESGRQGSDEEEAKLMKSLRMAYNGTFMSSGGFNKELGMQAVQQGDADLVSYGRLFIANPDLVSRFKIDGELNKYNRKTFYTQDPVVGYTDYPFLAPFSRL

SEQ ID NO: 84095 - protein, 106 aa, Arabidopsis thaliana
  peptide (1)..(106): Ceres Seq. ID no. 12673105
HNNNTSTRIFYFRITKPIGGDMTAAQGNSNETLFSSYKMGRFDLSHRVVLAPMTRCRALNGVPNAALAEYYAQRTTPGGFLISEGTMVSPGSAGSHMCLESIQMNK

SEQ ID NO: 84096 - protein, 86 aa, Arabidopsis thaliana
  peptide (1)..(86): Ceres Seq. ID no. 12673106
MKSLRMAYNGTFMSSGGFNKELGMQAVQQGDADLVSYGRLFIANPDLVSRFKIDGELNKYNRKTFYTQDPVVGYTDYPFLAPFSRL

SEQ ID NO: 84097 - DNA, 961 bp, Arabidopsis thaliana
  misc_feature (1)..(961): Ceres Seq. ID no. 12673125
  misc_feature (1)..(961): Ortholog of  Ceres SEQ ID NO 15226408 as cited in SEQ ID NO 55563
tttctctgtggcctatcccaggtgtctttcaacaatactttgtttatcaagtccagaaaatacgtctccagggttattacagtttcagtcaaaagttgaagcatgttgttcgtctgccatttgcaatcgctgcatatgggactgctgcaatgcttcttgtgatagtgtggaggcctcaaatccacattctttctatttcttctttgcaacggatcatcatgttggttgaagcagtgggcgctggctttttcatgggtttatacatcggttatgtgcaccaatacaattccgtgaattcccggccagatgtcttgaagtcattatattctcctcttcagccgtcaagttctatggaaggtttgaggtattatgaaggccggctttctgatcaacaaacggctttgttacaatatcaacgcgaaaatctccattttctaagcgaggagattctgtgcttgcaagagaaacttagcaaatatgaacaatctgatgatggaagcacacctcaggttgatctcgcacatcttttagctgctcgagatcaagagctgaggacactttcagctgagatgaatcagcttcagtctgagctacggcttgctcgttctttaatagccgagagagatgcagaggtgcagcgtgtcaacagtaccaacaaccagtatatcgaagaaaacgaaagactgagggcaattttgagtgaatggagcatgcgggcagcgaatcttgagagagctttggaagtggaacggatgtcgaactcagaactacagaaggaagtagcaagcacgcgtagaaagcagatgcttgagacaacaacgtctgagcaaccttaattctaatatgggaatcaaagcttatataggtttttaacataatctctaaagtttgatggtgtaactataaagatcatggaatgtgtctacggaaagaagtttgtgtagtaaacggctcttttgtt

SEQ ID NO: 84098 - protein, 277 aa, Arabidopsis thaliana
  peptide (1)..(277): Ceres Seq. ID no. 12673126
SLWPIPGVFQQYFVYQVQKIRLQGYYSFSQKLKHVVRLPFAIAAYGTAAMLLVIVWRPQIHILSISSLQRIIMLVEAVGAGFFMGLYIGYVHQYNSVNSRPDVLKSLYSPLQPSSSMEGLRYYEGRLSDQQTALLQYQRENLHFLSEEILCLQEKLSKYEQSDDGSTPQVDLAHLLAARDQELRTLSAEMNQLQSELRLARSLIAERDAEVQRVNSTNNQYIEENERLRAILSEWSMRAANLERALEVERMSNSELQKEVASTRRKQMLETTTSEQP

SEQ ID NO: 84099 - protein, 228 aa, Arabidopsis thaliana
  peptide (1)..(228): Ceres Seq. ID no. 12673127
MLLVIVWRPQIHILSISSLQRIIMLVEAVGAGFFMGLYIGYVHQYNSVNSRPDVLKSLYSPLQPSSSMEGLRYYEGRLSDQQTALLQYQRENLHFLSEEILCLQEKLSKYEQSDDGSTPQVDLAHLLAARDQELRTLSAEMNQLQSELRLARSLIAERDAEVQRVNSTNNQYIEENERLRAILSEWSMRAANLERALEVERMSNSELQKEVASTRRKQMLETTTSEQP

SEQ ID NO: 84100 - protein, 205 aa, Arabidopsis thaliana
  peptide (1)..(205): Ceres Seq. ID no. 12673128
MLVEAVGAGFFMGLYIGYVHQYNSVNSRPDVLKSLYSPLQPSSSMEGLRYYEGRLSDQQTALLQYQRENLHFLSEEILCLQEKLSKYEQSDDGSTPQVDLAHLLAARDQELRTLSAEMNQLQSELRLARSLIAERDAEVQRVNSTNNQYIEENERLRAILSEWSMRAANLERALEVERMSNSELQKEVASTRRKQMLETTTSEQP

SEQ ID NO: 84101 - DNA, 1000 bp, Arabidopsis thaliana
  misc_feature (1)..(1000): Ceres Seq. ID no. 12673137
  misc_feature (1)..(1000): Ortholog of  Ceres SEQ ID NO 15169849 as cited in SEQ ID NO 53636
  misc_feature (1)..(1000): Ortholog of  Ceres SEQ ID NO 14307300 as cited in SEQ ID NO 54107
aggttaaaacttattgttgattcttctctattcgtcgtcgacctattttcctcagccatggccgtcgggaaaaacaagagaatctctaagggtaggaagggaggaaagaagaaggctgttgatcctttctccaagaaagattggtatgatgttaaggctccttcaatcttcactcacaggaatgttggaaagacacttgtttccagaactcagggtaccaaaattgcctcagaaggcttgaaacacagagtttttgaggtttctcttgctgatcttcaaggtgatgaggataacgcttacaggaagatccgtctcagagctgaagatgtccagggcaggaacgttctgtgccaattctggggcatggacttcaccaccgataaacttaggtcattggttaagaagtggcagactttgattgaggctcatgttgatgttaaaaccaccgacagttacactctcaggctattctgtatcgccttcaccaagagacgtgctaaccaggtcaagaggacttgctacgctcaatccagccaaatccgtcagatccgcaggaagatgagggacatcatggttagggaagcttcctcatgtgaccttaaggatcttgttgctaagttcattcctgaagctattggcagggagattgagaaggcaactcagggcatctaccctcttcagaatgttttcatccgtaaagtcaagatcctcaaggcccctaaattcgaccttggcaagctcatggatgttcacggagattactcagcagaagatgttggtgttaaggtagacaggccggctgatgagatggctgttgaggaacctactgaaatcatcggagcttaagaaatcgagagatgtctttttcttctaaactttagctttttgatgctctgtcgtttcacacactcttttgttcccggtttaattttgctgtattgatgacttttctcagtgtaaacttgcgagtttttgataatttatggaacaccttttctct

SEQ ID NO: 84102 - protein, 281 aa, Arabidopsis thaliana; identical to SEQ ID NO: 30529
  peptide (1)..(281): Ceres Seq. ID no. 12673138

SEQ ID NO: 84103 - protein, 262 aa, Arabidopsis thaliana; identical to SEQ ID NO: 30530
  peptide (1)..(262): Ceres Seq. ID no. 12673139

SEQ ID NO: 84104 - protein, 160 aa, Arabidopsis thaliana; identical to SEQ ID NO: 30531
  peptide (1)..(160): Ceres Seq. ID no. 12673140

SEQ ID NO: 84105 - DNA, 604 bp, Arabidopsis thaliana
  misc_feature (1)..(604): Ceres Seq. ID no. 12673159
  misc_feature (1)..(604): Ortholog of  Ceres SEQ ID NO 15173990 as cited in SEQ ID NO 1070
  misc_feature (1)..(604): Ortholog of  Ceres SEQ ID NO 13594900 as cited in SEQ ID NO 52042
agaaaatcctaactccagtcttgcattctgggaatagtttagagatggggagattgttcttggtgaatttggaaggcaagtcttacagttgtaagcactgcaagaccaatcttgctctctgtgatgatgtcgtctctaagtcttttcagtcccgacatgggaaagcttacctcttcagtaaggtagtgaatgtgtatgctggcaagaaagaagataggatgatgatgacgggaatgcatacggtggtcgatatttactgtgtcaaatgcggctcttatgttggatggaaatatgagtttgcttttgagaagaatcaaaagtacaaggaaggaaaatctgttctcgaaaggtacaaggtctggggtccagatgggaacaattattgggtggctcaagaagttgaagccggagacagcgatactgatgatgcttgattctcatcattcatatctgatttgtacattccctccaactctttcatttttctttattctttttcctcattttgtaaaccatctatcttacattagaacagcttccgagaccaattgtttggtcattgctgcaactactttggacacataagttaaagatctcattatct

SEQ ID NO: 84106 - protein, 143 aa, Arabidopsis thaliana; identical to SEQ ID NO: 37359
  peptide (1)..(143): Ceres Seq. ID no. 12673160

SEQ ID NO: 84107 - protein, 129 aa, Arabidopsis thaliana; identical to SEQ ID NO: 37360
  peptide (1)..(129): Ceres Seq. ID no. 12673161

SEQ ID NO: 84108 - protein, 102 aa, Arabidopsis thaliana
  peptide (1)..(102): Ceres Seq. ID no. 12673162
MLDGNMSLLLRRIKSTRKENLFSKGTRSGVQMGTIIGWLKKLKPETAILMMLDSHHSYLICTFPPTLSFFFILFPHFVNHLSYIRTASETNCLVIAATTLDT

SEQ ID NO: 84109 - DNA, 591 bp, Arabidopsis thaliana
  misc_feature (1)..(591): Ceres Seq. ID no. 12673163
  misc_feature (1)..(591): Ortholog of  Ceres SEQ ID NO 15173990 as cited in SEQ ID NO 1070
  misc_feature (1)..(591): Ortholog of  Ceres SEQ ID NO 13594900 as cited in SEQ ID NO 52042
gcttttatagattctgggaatagtttagagatggggagattgttcttggtgaatttggaaggcaagtcttacagttgtaagcactgcaagaccaatcttgctctctgtgatgatgtcgtctctaagtcttttcagtcccgacatgggaaagcttacctcttcagtaaggtagtgaatgtgtatgctggcaagaaagaagataggatgatgatgacgggaatgcatacggtggtcgatatttactgtgtcaaatgcggctcttatgttggatggaaatatgagtttgcttttgagaagaatcaaaagtacaaggaaggaaaatctgttctcgaaaggtacaaggtctggggtccagatgggaacaattattgggtggctcaagaagttgaagccggagacagcgatactgatgatgcttgattctcatcattcatatctgatttgtacattccctccaactctttcatttttctttattctttttcctcattttgtaaaccatctatcttacattagaacagcttccgagaccaattgtttggtcattgctgcaactactttggacacataagttaaagatctcattatctt

SEQ ID NO: 84110 - protein, 139 aa, Arabidopsis thaliana
  peptide (1)..(139): Ceres Seq. ID no. 12673164
AFIDSGNSLEMGRLFLVNLEGKSYSCKHCKTNLALCDDVVSKSFQSRHGKAYLFSKVVNVYAGKKEDRMMMTGMHTVVDIYCVKCGSYVGWKYEFAFEKNQKYKEGKSVLERYKVWGPDGNNYWVAQEVEAGDSDTDDA

SEQ ID NO: 84111 - protein, 129 aa, Arabidopsis thaliana; identical to SEQ ID NO: 37360
  peptide (1)..(129): Ceres Seq. ID no. 12673165

SEQ ID NO: 84112 - protein, 102 aa, Arabidopsis thaliana; identical to SEQ ID NO: 84108
  peptide (1)..(102): Ceres Seq. ID no. 12673166

SEQ ID NO: 84113 - DNA, 1263 bp, Arabidopsis thaliana
  misc_feature (1)..(1263): Ceres Seq. ID no. 12673184
  misc_feature (1)..(1263): Ortholog of  Ceres SEQ ID NO 15178797 as cited in SEQ ID NO 1152
  misc_feature (1)..(1263): Ortholog of  Ceres SEQ ID NO 15175688 as cited in SEQ ID NO 60465
  misc_feature (1)..(1263): Ortholog of  Ceres SEQ ID NO 13495628 as cited in SEQ ID NO 60727
tgtgaattaaatttatgttgtgaaaagaatattgtacgttgggagtagtgtagaaccctaactgtacaaaatcagtaacattacacagctgtgttccattgaagtctctgcttatatacaagaacttgctcattcctcaaagcatccacacataatcacgatgaagctctttgttcatctctctatcttcttctccatcctcttcatcactctcccatcttcttacagctgcaccgaaaaatgacaagaatgccctccttcaaatcaagaaagcacttggcaatcctccccttctatcctcctggaacccccgaaccgactgttgtaccggctggaccggcgtcgaatgcactaaccgtcgcgttaccggtctcagcgttacctccggcgaagtctccggtcagatctcgtaccagatcggcgacctcgttgacctccgtacactagatttcagctacctgccacacctcaccggaaacatcccacgcaccatcaccaaactcaagaacctcaacactctctacttgaagcacactagtctctccggtccgattcctgattacatcagcgagctcaagagcctcacgttcttggacctttcttttaaccaatttaccggtccaattcccggttcgctatctcagatgccgaagcttgaagccattcaaatcaacgataataagctaaccggttctataccaaactctttcggttcttttgttggcaacgtccctaatctctacttgtctaacaataagctgtcaggaaaaataccggaatcgttgtctaaatacgacttcaacgcagtggatttgtcgggaaatggtttcgaaggagatgcctttatgttcttcggacggaacaaaacaacagtacgagtggatttgtcgagaaacatgtttaatttcgatctcgtcaaggttaagttcgctagaagcatagtttcgttggatctgagccagaaccatatctacgggaagataccaccagcactgactaaactacacctcgagcatttcaacgtgagcgacaaccatctctgcggaaaaatcccaagtggcggtctacttcagacctttgaaccatctgccttcgctcacaacatctgtctttgtggaactccccttaaggcttgttaatttggtttaatcttggcggaagaataaaaataatgttgaatatgttatgatgatgtgttcattatcaccgccaaaccaagtttattgtttctttgttatgaatttaatttaatggcaagaattg

SEQ ID NO: 84114 - protein, 164 aa, Arabidopsis thaliana; identical to SEQ ID NO: 31013
  peptide (1)..(164): Ceres Seq. ID no. 12673185

SEQ ID NO: 84115 - protein, 97 aa, Arabidopsis thaliana
  peptide (1)..(97): Ceres Seq. ID no. 12673186
MFFGRNKTTVRVDLSRNMFNFDLVKVKFARSIVSLDLSQNHIYGKIPPALTKLHLEHFNVSDNHLCGKIPSGGLLQTFEPSAFAHNICLCGTPLKAC

SEQ ID NO: 84116 - DNA, 1764 bp, Arabidopsis thaliana
  misc_feature (1)..(1764): Ceres Seq. ID no. 12673205
  misc_feature (1)..(1764): Ortholog of  Ceres SEQ ID NO 14314480 as cited in SEQ ID NO 52362
  misc_feature (1)..(1764): Ortholog of  Ceres SEQ ID NO 13593854 as cited in SEQ ID NO 53403
  misc_feature (1)..(1764): Ortholog of  Ceres SEQ ID NO 12581680 as cited in SEQ ID NO 55019
agatttgttttctttctctctcgtcatctctcttcctctctgtaatcccaaccggagttacgattccttcttatcgtaactcctgcttccgatctcgatccaattttcacttttgttttgtccgaacggtaaatcatttcgcggctttttttttttaagggaaggaggaataagcaaattttgatttgattccgtttttttgggggtgttagtgatcttttagatgaagtaaagaaattttgattattgaggggattatgtgagttatggtatcatcggcaactatattgcggatggtagcaccatgttggaggcgaccttctgttaaaggagatcattctactagagacgctaatggtcgatgtgatggtcttctttggtataaagattctggtaaccatgttgctggagagttctctatgtctgttattcaagctaataatcttctcgaagatcatagcaagcttgagtctggacctgttagtatgtttgattctggtcctcaagctacttttgttggtgtttatgatggtcatggtggtcctgaagctgcccgtttcgttaataaacacctcttcgacaacatcaggaagtttacatcagagaatcatggaatgtctgccaatgttataactaaagcgtttttagctacggaagaagattttctttctcttgtccggcggcagtggcagattaaaccacagattgcttctgttggagcttgttgtctggtagggatcatatgtagtggattgttgtatattgcaaacgctggagattctcgggttgtgctaggaagactggaaaaagcgtttaaaattgtcaaggccgttcagttatcgtctgagcataatgcaagtcttgaatctgtgagagaggagttgcgctcgttgcatccaaatgatcctcagattgtggtcttgaagcacaaagtttggcgtgtcaaaggtattatacaggtaaaaatactttcacggtaatgcgagttgctgacttctagactcttttcttgcaagtagcttgactgtgaaagatacaactaagtaagccctatgcatgtataagaagaggatttttcgctagatataacccgtggctggttcttgaaggtttcacggtcgattggtgatgcatacttaaagaaagcagaattcaaccgggaaccattgttggcaaagttcagggtccctgaggttttccataagcccatccttagagcagagccggcaattacagtacacaaaatccatccagaagatcagtttcttatatttgcatcagacggcttgtgggagcacttgtccaatcaagaagctgttgacattgtgaacacatgcccgcgcaatgggattgcaaggaagctcataaaaacagctctaagagaggcagcaaagaagagagagatgagatattcggatctaaaaaagatcgatagaggagtgcggagacattttcatgatgatataacagtcatagttgtgtttcttgattcacatctcgtcagtcgcagtacctcacgccgacctctcctctccatctcaggtggtggtgatttagctggaccttctacttgactctactctcaccacatctatatatatcttatatatacattatccactatatataaaaacacattgcaaaacgcaattcaagttccttctttttttttttctctatatataaaaatttcctcttaactctgttttttattcatcccaaaaaaaaatgaagagttgaaatccaatgtataggtcttttggc

SEQ ID NO: 84117 - protein, 237 aa, Arabidopsis thaliana; identical to SEQ ID NO: 43004
  peptide (1)..(237): Ceres Seq. ID no. 12673206

SEQ ID NO: 84118 - protein, 228 aa, Arabidopsis thaliana; identical to SEQ ID NO: 43005
  peptide (1)..(228): Ceres Seq. ID no. 12673207

SEQ ID NO: 84119 - protein, 186 aa, Arabidopsis thaliana; identical to SEQ ID NO: 43006
  peptide (1)..(186): Ceres Seq. ID no. 12673208

SEQ ID NO: 84120 - DNA, 1257 bp, Arabidopsis thaliana
  misc_feature (1)..(1257): Ceres Seq. ID no. 12673209
  misc_feature (1)..(1257): Ortholog of  Ceres SEQ ID NO 14310390 as cited in SEQ ID NO 59715
acggagattgtaacaaggaaaccgccgtcgccggatctgatagtgcatatccatgaagtagaagacgaagaaacttactttctgatcttagaacggagtatatgtacagaagattcgcgtccctcaatttttgatctcaagggtcgggtttacctttttttccttcttatttttggtggctttgcgttttctcattcgacgatttctggatttggggatttcaaaaccatgaggaagaagctcgatactcggttcccagctgctcgtattaaaaagattatgcaagctgatgaggatgttggcaagatagctttggcagtgcctgtcttagtctcaaaatctttggagttgttcttgcaagacctttgtgatcgtacatatgaaattacccttgaaagaggtgccaagactgtgagctcattgcacctaaaacattgtgtggaaagatataacgtgtttgattttctgagggaagttgtgagtaaggtgcctgactatggccattcccaagggcaaggacatggtgatgttaccatggatgatcgcagcatctccaagagaaggaagcccatcagcgatgaagtgaatgacagtgacgaggaatataagaaaagcaaaacgcaagagatagggagtgctaagaccagtggcaggggtggtagaggaagagggcgaggaagaggtcgtggtggacgagctgcaaaagcagccgaaagagagggtctcaaccgcgagatggaagtagaagccgccaattctggacagccaccaccagaagacaatgtcaagatgcatgcgtcagagtcatcaccacaagaggatgagaagaaaggcatcgacggcacagcagcatcgaacgaagacaccaagcaacaccttcaaagtcccaaagaaggcattgactttgatctcaacgctgaatccctcgacctaaacgagaccaaactggcaccagccacaggcacaaccacaaccacaactgcagcaacagactctgaggagtattcgggctggcctatgatggacataagcaaaatggatccagcacagcttgctagtctgggtaagaggatagacgaggatgaggaagattatgacgaagaaggctaagtcataacagcactataggatatatagagtagcagcgtttagcagtttgtctagaaaatgcttcttctgtcatcaaaatcttctcctgtttccatttattgtatgaaccaaagattgcatgcactctatgaaacttaatttattctc

SEQ ID NO: 84121 - protein, 369 aa, Arabidopsis thaliana; identical to SEQ ID NO: 38640
  peptide (1)..(369): Ceres Seq. ID no. 12673210

SEQ ID NO: 84122 - protein, 293 aa, Arabidopsis thaliana; identical to SEQ ID NO: 38641
  peptide (1)..(293): Ceres Seq. ID no. 12673211

SEQ ID NO: 84123 - protein, 276 aa, Arabidopsis thaliana; identical to SEQ ID NO: 38642
  peptide (1)..(276): Ceres Seq. ID no. 12673212

SEQ ID NO: 84124 - DNA, 1641 bp, Arabidopsis thaliana
  misc_feature (1)..(1641): Ceres Seq. ID no. 12673217
  misc_feature (1)..(1641): Ortholog of  Ceres SEQ ID NO 14303770 as cited in SEQ ID NO 53890
attgtgagtcactctctctgtttctcatctcctcatctttttatcttctttgattgatccacatggcttccgctgccgcaagttccgccttttcactccttaagtccaccggcgctgttgcttcctccgccggaactcgcgcacgtgcctcccttctgccaattccctctacctctgtttccgcgcgtcctctaggcttctccgccactctagattcccgtcgtttctctctccacgttgcttccaaagttgaatcggtgcgtgggaagggaagcagaggagtggtttctatggcgaagaagagcgtcggagatctgacctcagctgatttgaaggggaagaaggttttcgtgagagctgatctcaatgtacctctcgatgataatcagactatcactgacgataccagaatccgtgccgccattccaacgatcaagtatttgattgaaaatggtgctaaagttatcctctccactcatctgggaaggccaaagggagtcaccccaaagtttagtttggctcctcttgtccctaggctctccgagcttcttggtattgaggtcacgaaagctgatgattgtattggcccagaagtggaaagcttggtggcttctctacctgaaggtggagttttgcttcttgagaacgtcaggttttacaaggaggaagagaagaacgatcctgagtttgctaagaagcttgcttctctagctgacctttatgtcaatgatgctttcggaactgctcacagagctcatgcttctaccgaaggagtcactaagttcttgaagccttcagttgctggtttccttttgcaaaaggaactggactacctagttggtgctgtttcaaacccaaagagaccatttgcagccatagtgggtggttccaaagtctcatccaagattggagttattgaatcgcttctggagaagtgtgatattcttcttcttggtggtggaatgatcttcacattctacaaggcacagggtctttcagttggttcgtcccttgttgaagaagacaagcttgaattggctacagaactccttgccaaagctaaggccaaaggagtctctcttttgttgccaacagatgttgtagttgctgacaagtttgctcctgatgccaacagcaagattgtgcctgcatcaggcattgaggacggatggatgggactggacattggtccagactctatcaaaactttcaacgaagctctggacacaacacaaacagtcatttggaatggacctatgggagttttcgagatggaaaagtttgcggctggaacagaggcgatagcgaataaactagcagagctaagtgaaaaaggagtgacaacgataataggaggaggagactcagtggctgcagtggagaaagtaggagtagcaggagtcatgagtcacatctccactggtggtggagccagcttggagctgttggaaggaaaagtacttcccggtgtgatcgcccttgatgaagcaatcccagtcactgtttagaaactcttaccatctataaggcaaacgctgtatacttaaaagagtttctttcgctttaaatctacctatgcaaaactttactatgtatcagagtctcattccccggaaaagaaaactcacatattaaaattct

SEQ ID NO: 84125 - protein, 481 aa, Arabidopsis thaliana; identical to SEQ ID NO: 35239
  peptide (1)..(481): Ceres Seq. ID no. 12673218

SEQ ID NO: 84126 - protein, 405 aa, Arabidopsis thaliana; identical to SEQ ID NO: 35240
  peptide (1)..(405): Ceres Seq. ID no. 12673219

SEQ ID NO: 84127 - DNA, 813 bp, Arabidopsis thaliana
  misc_feature (1)..(813): Ceres Seq. ID no. 12673220
  misc_feature (1)..(813): Ortholog of  Ceres SEQ ID NO 12609041 as cited in SEQ ID NO 51310
  misc_feature (1)..(813): Ortholog of  Ceres SEQ ID NO 14312140 as cited in SEQ ID NO 57002
  misc_feature (1)..(813): Ortholog of  Ceres SEQ ID NO 14312224 as cited in SEQ ID NO 57255
  misc_feature (1)..(813): Ortholog of  Ceres SEQ ID NO 13599144 as cited in SEQ ID NO 0
agaatcgtatttgtgggtatctagaagaggcgttaggattgtctccaagctgggtgttttttcatcttgatggccaactaatcgaatctcctactctaaagatatttttgtttatttctgtcatgtgtgatttggtcgcgcgtacgggtcgtctccagcagcggtacgaggatggctctcgtctcgtcgccgggtgtattccgtttaggtatgtaaattctgacaaagatggtaattctgaatctgggaaagtgattcaagtgttgatgatcagctcgtctagtggacctggacttttgtttcccaagggaggatgggagaatgatgagacagtcagggaggctgcagcgagggaagcagtggaagaagcaggatttgttatttttttttggggaattatgagttcaagagcaaatcacaccaagatgagtttagcccagaaggtttatgtaaagcggcaatgtacgcgttgtatgtgaaagaagagctagcgacgtggccggaacatgagacgagaacacgtaaatggctgacaattgaagaagcggtagagagttgcaggcacccttggatgaaggacgcattggtggaaggattctgtaaatggcataaggagaagatggttaaaggagaggagataactggtgaacattgaagcaaatgtgcataaacctctgagcgttggtttcattcctttcgattttgtttttacctttttgtttttgtttttgaagtcttatgcatggataatctcttgtgactgcgaaacgtaatagtttcgaagatttaaagttcaattattgccctattttc

SEQ ID NO: 84128 - protein, 158 aa, Arabidopsis thaliana
  peptide (1)..(158): Ceres Seq. ID no. 12673221
NRICGYLEEALGLSPSWVFFHLDGQLIESPTLKIFLFISVMCDLVARTGRLQQRYEDGSRLVAGCIPFRYVNSDKDGNSESGKVIQVLMISSSSGPGLLFPKGGWENDETVREAAAREAVEEAGFVIFFWGIMSSRANHTKMSLAQKVYVKRQCTRCM

SEQ ID NO: 84129 - protein, 118 aa, Arabidopsis thaliana
  peptide (1)..(118): Ceres Seq. ID no. 12673222
MCDLVARTGRLQQRYEDGSRLVAGCIPFRYVNSDKDGNSESGKVIQVLMISSSSGPGLLFPKGGWENDETVREAAAREAVEEAGFVIFFWGIMSSRANHTKMSLAQKVYVKRQCTRCM

SEQ ID NO: 84130 - DNA, 4497 bp, Arabidopsis thaliana
  misc_feature (1)..(4497): Ceres Seq. ID no. 12673233
  misc_feature (1)..(4497): Ortholog of  Ceres SEQ ID NO 13660487 as cited in SEQ ID NO 60849
atgaaacagagttacgcgatggacaatcctatcgtttttttcctccttgagtccaattattttccaatgttctccattttctttaatcttcttttgttgctagttatgtttggttcctgtgtttacaagaaaaggttgggttgggaaaatagtgatgctttcacgaatgagaggtttaaggatatgtctttaacatacaataaactggtcgttatatgttgtgagactttgtctgccttgaattctgtgttgttgctgttaagttgcttcaacctgcataaaaatggttgggatcgcagcgaactgatgattctcttagatcttttatttacagccctttcttggggtgccatctctttctacatacgtagtcaatttacctattctcatgatcaaaagtttcctattttgcttagagtctggtgggttttgtattttatgttttcttgctaccgtcttttggtagacattgctctatacaagaagcaagaactggtgtcagttcaccttttattgtctgatgtactggccgtaagcgtggggttgtttctctgctattcatgtttgcagaagcaaggacaaggtgaaaggatcaacttattactcgaagaacccctcttgaatggagctgaatctagtgcggctactagtgtgcagttggataaggccgaagatgatgaggttgttacacctttttcgaacgctgggtttctaagccatgtgagtttctcttggatgagtcctttaattgtcttaggaaacgagaaaattatagacagcgaggatgttcctcaagttgacaatagtgacagagccgagaaactattttggatatttaggagtaagcttgaatgggacgatggtgaaagaaggatcaccacgtataagcttattaaggcactcttcttttcagtgtggcgagatattctattgtcaactctgtttgcttttgtctatacagtgtcttgctacgttgcaccgtatctcatggatactttcgttcagtacctgaacggtcaacgacagtattcaaatcaaggggttgttttagtgacaactttttttgttgctaagcttgtagaatgccaagcgcggaggaattggtatttcaggttgcagaaagctgggattggaatgagatcagtcctggtttcaatgatctacgaaaagggcttgacccttccctgttattcaaagcaaggacacaccagtggtgagatcataaatctcatgacagtagatgctgagagaatcagtgcttttagttggtatatgcatgatccatggatacttgtcttacaaatcagtttagcgttattgatcttgtacagaagccttgggctaggatcaattgcagcttttgctgcaacgtttttagttatgctgggaaatattcccttggcaaagttggaagagaagtttcagggaaatttaatggagtctaaagataacaggatgaagaaaacatcggaggccttactgaacatgaggattcttaaacttcaaggatgggagatgaagttccttcataagattcttgaccttagaggcattgaagcaggctggcttaagaaattcgtgtataactctgcggctatcagctctgttctctgggctgcaccttcgttcgtttctgcaacagcttttggagcttgtatgcttctgaagattcctcttgaatcgggaaagataatagctgctcttgcaacttttcgaattctgcaaactccgatatacaaacttcctgatacgatctccatgattgttcagacaaaggtatctcttgataggattgcaacttttctttgccttgatgatttgcagcaagatggtatggagagacttcctagtggaagttcaaaaatggatgtggaagtcagcaatggtgctttctcttgggatgactcttcacccatcccgacgctgaaagacataaggttcaaaatccctcatgggatgaacatcgctatatgtggtactgttggttcagggaaatcaagcttactctcgtccatactaggtgaagttcccaaaatatctggaaatcttaaggtttgtggaagaaaggcatacattgcacagtcgccttggatccagagtggcaaagtcgaagagaacattctgtttggtaagcccatgcaaagagaatggtaccaaagggtgcttgaagcgtgttctttgaataaggacttggaggtatttccgttccgtgatcagacagttattggagaaaggggtatcaatcttagcggtggacagaagcaacggatacagattgcacgtgctctttaccaagacgcagatatctatctgtttgatgacccttttagtgcagtagacgctcatactggatcacatctcttcaaggaagtcctgctggggcttctgagaaacaagacagtcatatatgtcactcatcaacttgaattcctgcctgaagctgatcttatactggtcatgaaagatgggaggatcacgcaagcagggaagtacaatgaaattcttgaatcaggaacagatttcatggaacttgtaggagctcacactgatgccttagctgcagttgattcatatgaaaaaggatctgcttcagcacaatcaacaacaagcaaagaaagcaaagtttccaacgatgaagaaaaacaagaggaagatttgcctagcccgaaaggacaactagttcaagaagaagagcgggagaaaggcaaagttgggttcactgtataccaaaagtatatgaaattggcgtatggaggagcacttgtgcctattatattggttgtacagattctctttcaggttctaaacatcgggagcaactattggatggcttgggtaactcctgtttctaaggatgtgaaacctctagtgagtggctctacattgattctagtctatgtatttctagccactgcgagctccttctgtatacttgtcagagcaatgctgtccgcgatgactggtttcaagatagctactgaactcttcaatcaaatgcattttcgcatttttcgtgcctccatgtcattctttgatgccaccccaattggccgaattttgaatagagcttctacagaccaaagtgccgtggatttgagattaccaagtcaattttcaaatcttgcaattgctgctgtaaacatcttggggattattggagtgatgggacaggttgcttggcaggtccttatcgtcttcatccctgtcatcgctgcatgcacctggtatcggcaatattacatatctgcggctcgggaactagcaagattatctggaataagcagatcgcctttggtgcagcatttttctgaaacactttcagggataacaactataaggagctttgatcaagaaccaagattccgcactgatatcatgagacttaacgattgttattctcggctgaggttccatgccatttctgcaatggagtggctctgcttccgtcttgatctcttatccactgtggcatttgcgctttcgcttgttatcttagtttctgtgcctgaaggagtcattaatccaagctttgcaggattggcggttacatatgcactcaatctaaatagcctgcaagcaactttaatatggacactttgcgatcttgagaacaaaatgatatccgtggagagaatgcttcaatacatagacatccccagtgaaccatctctcgttattgaatcaactaggcctgagaaatcttggccctgtcgcggagagattactatctgtaatctgcaagtacgatatgggccacatctgcctatggtgctgcgtgggctgacatgcacttttcgaggaggcctgaaaacgggaatcgttggaagaacaggatgtggcaaatccactctaattcaaaccctttttaggattgtggaacctgcagctggagaaatcaggatagatggaataaacatcttgaccattgggctgcatgacctgcgttccagactaagtatcatacctcaagaaccaaccatgtttgaaggcacggttcgcagtaacttggaccctcttgaggaatacgctgatgaccaaatctgggaggcactcgacaagtgtcaacttggggatgaaataaggaagaaagaactaaagctagattcccctgtaagtgagaatggacagaactggagtgttggtcagagacaactggtgtgtcttggacgagtcttgctaaagagaagcaaagtattgattcttgatgaagccacagcttctgtagatacagcgactgatactctgatacaggaaacactgagacaacatttctcgggctgtacagtaataacaatcgcacacagaatatcatctgttatagacagtgatatggtactgctcctagaccaagggttaatagaagaacacgattcaccggcgagattgctggaagacaagtcctcgtcattttcaaagcttgtggcagagtacacagcaagttcggattcaagattcaaaagaagttcaatgaaaacaaactagttataataaaattaa

SEQ ID NO: 84131 - protein, 1493 aa, Arabidopsis thaliana
  peptide (1)..(1493): Ceres Seq. ID no. 12673234
MKQSYAMDNPIVFFLLESNYFPMFSIFFNLLLLLVMFGSCVYKKRLGWENSDAFTNERFKDMSLTYNKLVVICCETLSALNSVLLLLSCFNLHKNGWDRSELMILLDLLFTALSWGAISFYIRSQFTYSHDQKFPILLRVWWVLYFMFSCYRLLVDIALYKKQELVSVHLLLSDVLAVSVGLFLCYSCLQKQGQGERINLLLEEPLLNGAESSAATSVQLDKAEDDEVVTPFSNAGFLSHVSFSWMSPLIVLGNEKIIDSEDVPQVDNSDRAEKLFWIFRSKLEWDDGERRITTYKLIKALFFSVWRDILLSTLFAFVYTVSCYVAPYLMDTFVQYLNGQRQYSNQGVVLVTTFFVAKLVECQARRNWYFRLQKAGIGMRSVLVSMIYEKGLTLPCYSKQGHTSGEIINLMTVDAERISAFSWYMHDPWILVLQISLALLILYRSLGLGSIAAFAATFLVMLGNIPLAKLEEKFQGNLMESKDNRMKKTSEALLNMRILKLQGWEMKFLHKILDLRGIEAGWLKKFVYNSAAISSVLWAAPSFVSATAFGACMLLKIPLESGKIIAALATFRILQTPIYKLPDTISMIVQTKVSLDRIATFLCLDDLQQDGMERLPSGSSKMDVEVSNGAFSWDDSSPIPTLKDIRFKIPHGMNIAICGTVGSGKSSLLSSILGEVPKISGNLKVCGRKAYIAQSPWIQSGKVEENILFGKPMQREWYQRVLEACSLNKDLEVFPFRDQTVIGERGINLSGGQKQRIQIARALYQDADIYLFDDPFSAVDAHTGSHLFKEVLLGLLRNKTVIYVTHQLEFLPEADLILVMKDGRITQAGKYNEILESGTDFMELVGAHTDALAAVDSYEKGSASAQSTTSKESKVSNDEEKQEEDLPSPKGQLVQEEEREKGKVGFTVYQKYMKLAYGGALVPIILVVQILFQVLNIGSNYWMAWVTPVSKDVKPLVSGSTLILVYVFLATASSFCILVRAMLSAMTGFKIATELFNQMHFRIFRASMSFFDATPIGRILNRASTDQSAVDLRLPSQFSNLAIAAVNILGIIGVMGQVAWQVLIVFIPVIAACTWYRQYYISAARELARLSGISRSPLVQHFSETLSGITTIRSFDQEPRFRTDIMRLNDCYSRLRFHAISAMEWLCFRLDLLSTVAFALSLVILVSVPEGVINPSFAGLAVTYALNLNSLQATLIWTLCDLENKMISVERMLQYIDIPSEPSLVIESTRPEKSWPCRGEITICNLQVRYGPHLPMVLRGLTCTFRGGLKTGIVGRTGCGKSTLIQTLFRIVEPAAGEIRIDGINILTIGLHDLRSRLSIIPQEPTMFEGTVRSNLDPLEEYADDQIWEALDKCQLGDEIRKKELKLDSPVSENGQNWSVGQRQLVCLGRVLLKRSKVLILDEATASVDTATDTLIQETLRQHFSGCTVITIAHRISSVIDSDMVLLLDQGLIEEHDSPARLLEDKSSSFSKLVAEYTASSDSRFKRSSMKTN

SEQ ID NO: 84132 - protein, 1487 aa, Arabidopsis thaliana
  peptide (1)..(1487): Ceres Seq. ID no. 12673235
MDNPIVFFLLESNYFPMFSIFFNLLLLLVMFGSCVYKKRLGWENSDAFTNERFKDMSLTYNKLVVICCETLSALNSVLLLLSCFNLHKNGWDRSELMILLDLLFTALSWGAISFYIRSQFTYSHDQKFPILLRVWWVLYFMFSCYRLLVDIALYKKQELVSVHLLLSDVLAVSVGLFLCYSCLQKQGQGERINLLLEEPLLNGAESSAATSVQLDKAEDDEVVTPFSNAGFLSHVSFSWMSPLIVLGNEKIIDSEDVPQVDNSDRAEKLFWIFRSKLEWDDGERRITTYKLIKALFFSVWRDILLSTLFAFVYTVSCYVAPYLMDTFVQYLNGQRQYSNQGVVLVTTFFVAKLVECQARRNWYFRLQKAGIGMRSVLVSMIYEKGLTLPCYSKQGHTSGEIINLMTVDAERISAFSWYMHDPWILVLQISLALLILYRSLGLGSIAAFAATFLVMLGNIPLAKLEEKFQGNLMESKDNRMKKTSEALLNMRILKLQGWEMKFLHKILDLRGIEAGWLKKFVYNSAAISSVLWAAPSFVSATAFGACMLLKIPLESGKIIAALATFRILQTPIYKLPDTISMIVQTKVSLDRIATFLCLDDLQQDGMERLPSGSSKMDVEVSNGAFSWDDSSPIPTLKDIRFKIPHGMNIAICGTVGSGKSSLLSSILGEVPKISGNLKVCGRKAYIAQSPWIQSGKVEENILFGKPMQREWYQRVLEACSLNKDLEVFPFRDQTVIGERGINLSGGQKQRIQIARALYQDADIYLFDDPFSAVDAHTGSHLFKEVLLGLLRNKTVIYVTHQLEFLPEADLILVMKDGRITQAGKYNEILESGTDFMELVGAHTDALAAVDSYEKGSASAQSTTSKESKVSNDEEKQEEDLPSPKGQLVQEEEREKGKVGFTVYQKYMKLAYGGALVPIILVVQILFQVLNIGSNYWMAWVTPVSKDVKPLVSGSTLILVYVFLATASSFCILVRAMLSAMTGFKIATELFNQMHFRIFRASMSFFDATPIGRILNRASTDQSAVDLRLPSQFSNLAIAAVNILGIIGVMGQVAWQVLIVFIPVIAACTWYRQYYISAARELARLSGISRSPLVQHFSETLSGITTIRSFDQEPRFRTDIMRLNDCYSRLRFHAISAMEWLCFRLDLLSTVAFALSLVILVSVPEGVINPSFAGLAVTYALNLNSLQATLIWTLCDLENKMISVERMLQYIDIPSEPSLVIESTRPEKSWPCRGEITICNLQVRYGPHLPMVLRGLTCTFRGGLKTGIVGRTGCGKSTLIQTLFRIVEPAAGEIRIDGINILTIGLHDLRSRLSIIPQEPTMFEGTVRSNLDPLEEYADDQIWEALDKCQLGDEIRKKELKLDSPVSENGQNWSVGQRQLVCLGRVLLKRSKVLILDEATASVDTATDTLIQETLRQHFSGCTVITIAHRISSVIDSDMVLLLDQGLIEEHDSPARLLEDKSSSFSKLVAEYTASSDSRFKRSSMKTN

SEQ ID NO: 84133 - protein, 1471 aa, Arabidopsis thaliana
  peptide (1)..(1471): Ceres Seq. ID no. 12673236
MFSIFFNLLLLLVMFGSCVYKKRLGWENSDAFTNERFKDMSLTYNKLVVICCETLSALNSVLLLLSCFNLHKNGWDRSELMILLDLLFTALSWGAISFYIRSQFTYSHDQKFPILLRVWWVLYFMFSCYRLLVDIALYKKQELVSVHLLLSDVLAVSVGLFLCYSCLQKQGQGERINLLLEEPLLNGAESSAATSVQLDKAEDDEVVTPFSNAGFLSHVSFSWMSPLIVLGNEKIIDSEDVPQVDNSDRAEKLFWIFRSKLEWDDGERRITTYKLIKALFFSVWRDILLSTLFAFVYTVSCYVAPYLMDTFVQYLNGQRQYSNQGVVLVTTFFVAKLVECQARRNWYFRLQKAGIGMRSVLVSMIYEKGLTLPCYSKQGHTSGEIINLMTVDAERISAFSWYMHDPWILVLQISLALLILYRSLGLGSIAAFAATFLVMLGNIPLAKLEEKFQGNLMESKDNRMKKTSEALLNMRILKLQGWEMKFLHKILDLRGIEAGWLKKFVYNSAAISSVLWAAPSFVSATAFGACMLLKIPLESGKIIAALATFRILQTPIYKLPDTISMIVQTKVSLDRIATFLCLDDLQQDGMERLPSGSSKMDVEVSNGAFSWDDSSPIPTLKDIRFKIPHGMNIAICGTVGSGKSSLLSSILGEVPKISGNLKVCGRKAYIAQSPWIQSGKVEENILFGKPMQREWYQRVLEACSLNKDLEVFPFRDQTVIGERGINLSGGQKQRIQIARALYQDADIYLFDDPFSAVDAHTGSHLFKEVLLGLLRNKTVIYVTHQLEFLPEADLILVMKDGRITQAGKYNEILESGTDFMELVGAHTDALAAVDSYEKGSASAQSTTSKESKVSNDEEKQEEDLPSPKGQLVQEEEREKGKVGFTVYQKYMKLAYGGALVPIILVVQILFQVLNIGSNYWMAWVTPVSKDVKPLVSGSTLILVYVFLATASSFCILVRAMLSAMTGFKIATELFNQMHFRIFRASMSFFDATPIGRILNRASTDQSAVDLRLPSQFSNLAIAAVNILGIIGVMGQVAWQVLIVFIPVIAACTWYRQYYISAARELARLSGISRSPLVQHFSETLSGITTIRSFDQEPRFRTDIMRLNDCYSRLRFHAISAMEWLCFRLDLLSTVAFALSLVILVSVPEGVINPSFAGLAVTYALNLNSLQATLIWTLCDLENKMISVERMLQYIDIPSEPSLVIESTRPEKSWPCRGEITICNLQVRYGPHLPMVLRGLTCTFRGGLKTGIVGRTGCGKSTLIQTLFRIVEPAAGEIRIDGINILTIGLHDLRSRLSIIPQEPTMFEGTVRSNLDPLEEYADDQIWEALDKCQLGDEIRKKELKLDSPVSENGQNWSVGQRQLVCLGRVLLKRSKVLILDEATASVDTATDTLIQETLRQHFSGCTVITIAHRISSVIDSDMVLLLDQGLIEEHDSPARLLEDKSSSFSKLVAEYTASSDSRFKRSSMKTN

SEQ ID NO: 84134 - DNA, 1319 bp, Arabidopsis thaliana
  misc_feature (1)..(1319): Ceres Seq. ID no. 12673253
  misc_feature (1)..(1319): Ortholog of  Ceres SEQ ID NO 13655660 as cited in SEQ ID NO 63727
aacactccgatccaaaaaaaagaagagaaaaacctttgcatacagctaaaaacgatgtcgtctctctctcgctttctccttcgtggcaacttcagcttcagcacccacacgaatcgccgcttcttctccgccgttaccgctgctgcagccacaccctcgccacccaaaccgtccctcatcaccctcgtaaatgacgaacgcgaccccaaattcatcacggagaagttcaagaaagcctgccaagcagagtggttccggaagaatatagctgtctatgagagaaccgttcgccgtctcgccgcagccaagaagtttgagtgggtcgaggagatcctggaggagcagaacaagtatccaaacatgtcaaaggaaggattcgtggcgaggattatcaatctctatggacgagtcggtatgtttgagaatgcacagaaagtgttcgacgaaatgcctgagagaaactgcaagagaacagcgttgtctttcaacgcattactgaatgcctgtgtgaactccaagaagtttgatttggttgaaggtatcttcaaggagttgccaggtaagctctcgattgaaccagatgttgcatcttacaatactttgatcaagggattgtgtggaaagggttccttcactgaagctgttgcgttgattgatgagattgagaacaagggtttgaaacctgatcatatcaccttcaagaaggagaacagatatgggctagaatggtagagaagaatgttaagcgagacatccgtagttacaatgctcggttgttaggactagccatggagaataaatcagaagagatggttagtctctttgacaaacttaagggtaatgagctcaaacctgatgttttcacattcactgccatgattaaaggatttgtcagtgaaggaaaattagatgaagccataacgtggtacaaggaaatcgagaagaatggttgtcgcccgttgaaatttgtctttaactcattgcttcctgcaatatgtaaggcgggcgatttagagtctgcttatgagctctgcaaggaaatatttgctaagcgtctgctagtcgatgaggctgtcctgcaggaggtagttgatgcattggtgaaagggtccaagcaagacgaagctgaagagattgtcgagctagcaaagacgaatgactatttgcagtgcaagcttcgtctctttcccaaagagtagttaattggcaaggcttattgactagtttttaatttagtctgtgtttccctctttttaatgtcttgttgcaaactgcgagtgcggtgatttaataattgaactatctctatctgtagtgtg

SEQ ID NO: 84135 - protein, 243 aa, Arabidopsis thaliana
  peptide (1)..(243): Ceres Seq. ID no. 12673254
NTPIQKKEEKNLCIQLKTMSSLSRFLLRGNFSFSTHTNRRFFSAVTAAAATPSPPKPSLITLVNDERDPKFITEKFKKACQAEWFRKNIAVYERTVRRLAAAKKFEWVEEILEEQNKYPNMSKEGFVARIINLYGRVGMFENAQKVFDEMPERNCKRTALSFNALLNACVNSKKFDLVEGIFKELPGKLSIEPDVASYNTLIKGLCGKGSFTEAVALIDEIENKGLKPDHITFKKENRYGLEW

SEQ ID NO: 84136 - protein, 225 aa, Arabidopsis thaliana
  peptide (1)..(225): Ceres Seq. ID no. 12673255
MSSLSRFLLRGNFSFSTHTNRRFFSAVTAAAATPSPPKPSLITLVNDERDPKFITEKFKKACQAEWFRKNIAVYERTVRRLAAAKKFEWVEEILEEQNKYPNMSKEGFVARIINLYGRVGMFENAQKVFDEMPERNCKRTALSFNALLNACVNSKKFDLVEGIFKELPGKLSIEPDVASYNTLIKGLCGKGSFTEAVALIDEIENKGLKPDHITFKKENRYGLEW

SEQ ID NO: 84137 - protein, 157 aa, Arabidopsis thaliana
  peptide (1)..(157): Ceres Seq. ID no. 12673256
MVEKNVKRDIRSYNARLLGLAMENKSEEMVSLFDKLKGNELKPDVFTFTAMIKGFVSEGKLDEAITWYKEIEKNGCRPLKFVFNSLLPAICKAGDLESAYELCKEIFAKRLLVDEAVLQEVVDALVKGSKQDEAEEIVELAKTNDYLQCKLRLFPKE

SEQ ID NO: 84138 - DNA, 1309 bp, Arabidopsis thaliana
  misc_feature (1)..(1309): Ceres Seq. ID no. 12673281
  misc_feature (1)..(1309): Ortholog of  Ceres SEQ ID NO 15168464 as cited in SEQ ID NO 59187
aaggtaaaagcaacataagcgtgaagtaccagctaccaaacgaagatcttgacgcgttgatttccgtatcaacggacgaagatgtagagaacatgatggacgaatacgaccgcgtcgcacagaatcaaaacccacgcgcctctcgtcttcgtctttttctcttcaccaaaaacgtcgccggagaagaagataacgatagtcgagctagcagtatcagctctctcctcgatagctctgttaatcgggagcaatggttcctcgacgctcttaacctcggttcttccgccgccgcaaccgcggtatctaacggtgggtccggtagagtctttgagcgagttagatctgaagtctcgtcgattgtttctgaagttcctgattatctctttggattggataatttcgatgaaactgctccgccgcatgagcttcgtgatcgtgatccgagagctaagatccaacgagaagtctcgacgctttcggatcctggttcgcctcgtcgcgatgttccttcgccgtatggttcgacgtcttcggctcctgtgatgcgaatatctacaccggaacttccaccaccagtttttattaaaccggaaagtccagaaccggtttcgactccgaaatccaatcctcaaccggaacaagtaatgcaacagagtaatctcccggttaactcgcaatggcaatatgcccctggcccaggccaacaggttcattaccagggtcataccattcaccaatcaccggtttattacgttcctggttcggttccgggtaatcatatggtccagcaaggaaatcatatggttcaaccgggtaatcatatggtacaaccggttcaaatgccgggtcagtatcttcaacaataccatcatgtaccaatgggataccaccaacctcagactcatcagatggctggtccgggtcaagtatatggtggaacggttaggccggttatgatggcagttgatggaatgaaccggacgggttattatggaatgaaaacacccggtccggttcaaatgtatcagcatcacactggtatggttgttcctggtgtagaagaacaacaacaatacagaaccgaaacggattcggatacgggtcgggcttcttagctgtttgaagaagaaatatgaaaaattatcacatccggggttttcgtcttttcattggagtcgttcttattcgttactgtgtgaactgtgtattattttttgttttacttttgtaaaatttatttttgtgtgtaataattttgtattacaaaatataatgaacagtaaaacccaataataataacattataatc

SEQ ID NO: 84139 - protein, 370 aa, Arabidopsis thaliana
  peptide (1)..(370): Ceres Seq. ID no. 12673282
GKSNISVKYQLPNEDLDALISVSTDEDVENMMDEYDRVAQNQNPRASRLRLFLFTKNVAGEEDNDSRASSISSLLDSSVNREQWFLDALNLGSSAAATAVSNGGSGRVFERVRSEVSSIVSEVPDYLFGLDNFDETAPPHELRDRDPRAKIQREVSTLSDPGSPRRDVPSPYGSTSSAPVMRISTPELPPPVFIKPESPEPVSTPKSNPQPEQVMQQSNLPVNSQWQYAPGPGQQVHYQGHTIHQSPVYYVPGSVPGNHMVQQGNHMVQPGNHMVQPVQMPGQYLQQYHHVPMGYHQPQTHQMAGPGQVYGGTVRPVMMAVDGMNRTGYYGMKTPGPVQMYQHHTGMVVPGVEEQQQYRTETDSDTGRAS

SEQ ID NO: 84140 - protein, 340 aa, Arabidopsis thaliana
  peptide (1)..(340): Ceres Seq. ID no. 12673283
MMDEYDRVAQNQNPRASRLRLFLFTKNVAGEEDNDSRASSISSLLDSSVNREQWFLDALNLGSSAAATAVSNGGSGRVFERVRSEVSSIVSEVPDYLFGLDNFDETAPPHELRDRDPRAKIQREVSTLSDPGSPRRDVPSPYGSTSSAPVMRISTPELPPPVFIKPESPEPVSTPKSNPQPEQVMQQSNLPVNSQWQYAPGPGQQVHYQGHTIHQSPVYYVPGSVPGNHMVQQGNHMVQPGNHMVQPVQMPGQYLQQYHHVPMGYHQPQTHQMAGPGQVYGGTVRPVMMAVDGMNRTGYYGMKTPGPVQMYQHHTGMVVPGVEEQQQYRTETDSDTGRAS

SEQ ID NO: 84141 - protein, 339 aa, Arabidopsis thaliana
  peptide (1)..(339): Ceres Seq. ID no. 12673284
MDEYDRVAQNQNPRASRLRLFLFTKNVAGEEDNDSRASSISSLLDSSVNREQWFLDALNLGSSAAATAVSNGGSGRVFERVRSEVSSIVSEVPDYLFGLDNFDETAPPHELRDRDPRAKIQREVSTLSDPGSPRRDVPSPYGSTSSAPVMRISTPELPPPVFIKPESPEPVSTPKSNPQPEQVMQQSNLPVNSQWQYAPGPGQQVHYQGHTIHQSPVYYVPGSVPGNHMVQQGNHMVQPGNHMVQPVQMPGQYLQQYHHVPMGYHQPQTHQMAGPGQVYGGTVRPVMMAVDGMNRTGYYGMKTPGPVQMYQHHTGMVVPGVEEQQQYRTETDSDTGRAS

SEQ ID NO: 84142 - DNA, 1669 bp, Arabidopsis thaliana
  misc_feature (1)..(1669): Ceres Seq. ID no. 12673366
  misc_feature (1)..(1669): Ortholog of  Ceres SEQ ID NO 13654409 as cited in SEQ ID NO 68534
tttttttgcttcttctaatagacttcttcgtcactgatctcccacgacgatctcccaaactcatttctctacgttcatcgatctctctctttctcgtttgctctacgaaaatcagccatggatgaagagtacgaggttattgttctcggcaccggtctcaaggagtgtatcctcagcggtctcctttccgtcgatggtgtcaaggtgcttcacatggacaggaatgactactatggtggagaatcaacttcccttaatctcaatcagctttggaagaagttcaggggagaagagaaggctcctgagcatttaggcgctagccgggattacaatgttgacatgatgcctaagtttatgatgggaaatggcaagcttgttcgtacccttattcatacagatgttacaaagtatttgtccttcaaagctgttgatggaagctatgttttcgtcaaaggaaaggttcaaaaggtgccagctactcctatggaggccctgaaatcttctctcatgggcatatttgagaaacgtcgagccggcaagtttttcagttttgttcaagaatacgatgagaaggacccaaaaacacacgatggaatggatttgaccagagttacaacaaaggaactgattgcgaaatatggtcttgatggcaacactattgactttattggtcacgcagtggcacttcacacgaatgaccaacatctcgaccaacccgcctttgatactgtaatgagaatgaagctctatgcggaatctcttgcacgtttccaaggaacatctccatatatttatcctctctatgggttgggagaactaccccaggcatttgcacgacttagtgctgtctatggtggcacatatatgttgaacaaacctgagtgcaaggtagagtttgacgagggaggtaaggttattggtgtaacatctgagggagagactgctaaatgcaaaaagattgtgtgtgacccttcatacctgccgaacaaggttaggaagattggcagggttgctcgggccatcgccattatgagccacccgattccgaacaccaatgattctcactcagtgcaggtcatcataccccagaaacagttggcccgcaaatcggatatgtatgtcttctgttgttcgtactcccacaacgttgctcccaagggaaaattcattgcatttgtgtctacagatgcagagactgataaccctcaaaccgaactaaagcctggaactgatcttttgggtcctgttgatgagatattcttcgacatgtatgatagatacgagcctgtcaacgagccagagttggacaactgctttatttcaacgagctatgatgctacaacacactttgagacaactgttgcggatgtgttgaacatgtataccctaatcaccggaaagcaactggacctaagtgttgacctgagtgccgcaagtgctgcagaggaatgaagaatcatcaccagatcgctccctctctagttgattttctaaaagcttgttttgctcatttctctgtttccgactcttgctttcgtgttcttttttggtttgaactttgaatacaaaatcagaatgatccttcatgttttagaaactaacaaccatgtgtctccgtttgatgttggattcctcggttaaagacttataaatgctctttaaaactcaa

SEQ ID NO: 84143 - protein, 444 aa, Arabidopsis thaliana; identical to SEQ ID NO: 26953
  peptide (1)..(444): Ceres Seq. ID no. 12673367

SEQ ID NO: 84144 - protein, 412 aa, Arabidopsis thaliana; identical to SEQ ID NO: 26954
  peptide (1)..(412): Ceres Seq. ID no. 12673368

SEQ ID NO: 84145 - protein, 370 aa, Arabidopsis thaliana; identical to SEQ ID NO: 26955
  peptide (1)..(370): Ceres Seq. ID no. 12673369

SEQ ID NO: 84146 - DNA, 427 bp, Arabidopsis thaliana
  misc_feature (1)..(427): Ceres Seq. ID no. 12673393
  misc_feature (1)..(427): Ortholog of  Ceres SEQ ID NO 13656408 as cited in SEQ ID NO 65810
gctcattagggtttctcatctacgacggcgtggtgttcctccttcctgctctgaaaaatggcgaagagaacgaagaaggttggaatcgtcggcaaatacggaacacgttatggtgcgagtatcaggaagcagattaagaagatggaggtcagccagcacagcaagtacttctgtgagttctatctggggttgcaaggattgtggcaaggtcaaggcaggtggtgcttacacaatgaacaccgccagtgcggtcactgttagaagcacgatcagaaggttgagggagcagatcgagggttaaaagtctgctggctttttatatttggtttccttgttttgacaatttaagttttgcaaactctatgcttgtgattttgaatcaagacttatacattgagcagtttaagcaggtttttattttttgttg

SEQ ID NO: 84147 - protein, 99 aa, Arabidopsis thaliana
  peptide (1)..(99): Ceres Seq. ID no. 12673394
LIRVSHLRRRGVPPSCSEKWRRERRRLESSANTEHVMVRVSGSRLRRWRSASTASTSVSSIWGCKDCGKVKAGGAYTMNTASAVTVRSTIRRLREQIEG

SEQ ID NO: 84148 - protein, 67 aa, Arabidopsis thaliana
  peptide (1)..(67): Ceres Seq. ID no. 12673395
MAKRTKKVGIVGKYGTRYGASIRKQIKKMEVSQHSKYFCEFYLGLQGLWQGQGRWCLHNEHRQCGHC

SEQ ID NO: 84149 - protein, 63 aa, Arabidopsis thaliana
  peptide (1)..(63): Ceres Seq. ID no. 12673396
MVRVSGSRLRRWRSASTASTSVSSIWGCKDCGKVKAGGAYTMNTASAVTVRSTIRRLREQIEG

SEQ ID NO: 84150 - DNA, 532 bp, Arabidopsis thaliana
  misc_feature (1)..(532): Ceres Seq. ID no. 12673416
  misc_feature (1)..(532): Ortholog of  Ceres SEQ ID NO 13581866 as cited in SEQ ID NO 52179
aagtgttagcttttgatctttcttatattcttctctgaaatagtaacacactgtgaagagtttttcctacatctgaattttgtctgatccaggaaaaagaagaaaatggcgtttgtgacaactgcggaagtttgtgacgcgaatcaagagctgattcggagtggtcagctacgagctttgcaacccattttccagatttatggccgtcgacaaatattctcaggaccagttgtcactgtcaaagtttttgaagacaatggcttaatccgtcaattcatcgaggagaaaggaaacggtagagttcttgtggtggatggtggagggagtcaacgatgtgcaatactcggagttgtgatggtgaatggctttatgcagatactgatgggattcttgtctcccaaattgagttatccgtttaataaaaaaggctttgatcagttaccaaaaaaaaaaaaacagaacgtggtttgtgttcatcttcttgttacttaagagattgttgaattataatggaaaataaatttttgttttg

SEQ ID NO: 84151 - protein, 128 aa, Arabidopsis thaliana
  peptide (1)..(128): Ceres Seq. ID no. 12673417
MAFVTTAEVCDANQELIRSGQLRALQPIFQIYGRRQIFSGPVVTVKVFEDNGLIRQFIEEKGNGRVLVVDGGGSQRCAILGVVMVNGFMQILMGFLSPKLSYPFNKKGFDQLPKKKKQNVVCVHLLVT

SEQ ID NO: 84152 - DNA, 1357 bp, Arabidopsis thaliana
  misc_feature (1)..(1357): Ceres Seq. ID no. 12673428
  misc_feature (1)..(1357): Ortholog of  Ceres SEQ ID NO 13596891 as cited in SEQ ID NO 62868
  misc_feature (1)..(1357): Ortholog of  Ceres SEQ ID NO 12617235 as cited in SEQ ID NO 63990
  misc_feature (1)..(1357): Ortholog of  Ceres SEQ ID NO 13655371 as cited in SEQ ID NO 68945
aaaaacgctcgaaagagtttaaaaattgtgaacatattgtgatgaatcatcatgagcagtgacttcatacttgatattacgagtgagaggccactataaaaagcaggcgcgtcctcgaagaagaagaagaagaagtaacaaattggtggaaatcagaagttgaatcggagaataacaacgatgacgacgaacaagcaggtcatattcaaagaccacgtgagtggtttccctaaggaatccgatttcaatttcaccaccaccaccgtcgaacttagggttccggaaggttctaaatcggttcttgtgaagaatctctacctgtcatgcgatccttatatgcggtctcgcatggggaaacctgatccctcctctgctcttgctcaagcttacgctcccggcaagccaatctatgggtatggagtgtctagagtgatagaatctgggcatccagattacaagaaaggtgatttactctggggaatagttggatgggaggagtatagtgttattacaccaatggctcacatgcatttcaagatccaacatacagatgttccattatcctactatactggacttctcggtatgcctggtatgactgcctatgctgggttttatgaagtttgttctccaaagaaaggagagacagtttatgtgtcagctgcatctggtgcggttggtcagcttgtgggacaatttgctaagatgatgggctgttatgttgttggaagcgctggaagtaaagaaaaggttgatctcctgaagaccaagtttgggtttgatgatgcatttaactacaaggaagaatctgaccttagtgctgccctcaaaaggtgttttcccaagggcatcgacatgtactttgagaacgtaggaggcaaaatgctagatgcagtgctcttaaacatgaacccacacgggcgtatcgctgtctgtggaatgatctcacagtacaatcttgaaaatcaagaaggtgtacacaacctatccaatatcatctacaaacgaatacgcattcaaggctttgtagtggctgatttctacgacaaatacccaaagttcttggagttggtgcttccgcgcattaaagaagggaagataacgtatgtggaagatgtagctgatgggctcgagaaagctcctgaagctcttgtggggcttttccatggtaagaacgttgggaaacaagttgttgttattgctcgtgagtgaagaatacttatttgggagtaatgtcttattgcgcgtgagtgaagaatacttatttgggagaaatgttatatttatccaacaagagttggtatgtctgttgaacccaaccgtgagtttttggtttatgaataatactagtaactat

SEQ ID NO: 84153 - protein, 343 aa, Arabidopsis thaliana; identical to SEQ ID NO: 43475
  peptide (1)..(343): Ceres Seq. ID no. 12673429

SEQ ID NO: 84154 - protein, 291 aa, Arabidopsis thaliana; identical to SEQ ID NO: 43476
  peptide (1)..(291): Ceres Seq. ID no. 12673430

SEQ ID NO: 84155 - protein, 287 aa, Arabidopsis thaliana; identical to SEQ ID NO: 43477
  peptide (1)..(287): Ceres Seq. ID no. 12673431

SEQ ID NO: 84156 - DNA, 1396 bp, Arabidopsis thaliana
  misc_feature (1)..(1396): Ceres Seq. ID no. 12673447
  misc_feature (1)..(1396): Ortholog of  Ceres SEQ ID NO 15172792 as cited in SEQ ID NO 52134
  misc_feature (1)..(1396): Ortholog of  Ceres SEQ ID NO 13502622 as cited in SEQ ID NO 56443
  misc_feature (1)..(1396): Ortholog of  Ceres SEQ ID NO 12624901 as cited in SEQ ID NO 62597
attttttcccttttacaattcttaagctagttttatacttttcttcttcctttcatttgggttaagagaagccatggataccgagtttctccgaaccctagatcgtcagattcttttgggtgtcttcgttgctttcgtcgccgttggtgctggtgctgcttattttcttacatcctccaagaaacgcagaggttcgatctctatttcattcaatttgtcttttctggaattcaatccaaatcatgaactttggatagattgaggcaaaagtttctgtttggtaggttggattagtcaacagacaatgaaaaattgaaccttgtttcagctgatctacttgaagatttgagtaaatcttgtgtttttattgttggttttatagtgtgtttggatccagagaatttcaaggagttcaagcttgttaagagacatcagcttagtcacaatgtggccaagttcgtttttgaactcccaacttctacttctgtgttgggtcttcccattggacaacacatcagttgcaggggaaaggatggtcaaggagaggatgttattaagccatacaccccgactacgttagactctgacgttggacgtttcgaacttgtcattaagatgtatccgcaaggacggatgtctcatcatttcagggagatgcgtgttggagaccatcttgccgtaaagggaccaaagggtaggttcaagtatcaaccaggtcagtttagggcatttggaatgcttgctggaggttcaggcatcactcccatgttccaagtggccagagcaattctagaaaacccaacagacaagacaaaggtgcatctcatttacgccaacgtcacatacgacgacattctcttgaaggaagaattggagggtcttactaccaattaccctgaacaatttaaaatcttctatgttttgaaccagcctccggaagtatgggatggtggtgttggatttgtatcaaaggaaatgattcagactcattgccctgcacctgcatctgatattcagatcctaagatgcggaccaccgccaatgaacaaggccatggctgcaaaccttgaagctctgggatactctccggagatgcaattccagttctgatctgaatatcttcttttggttgctctgaaacggaactcataataatttagttacaatcccaactacgagagttgtgtcttaactgagtgagagttgtatttctgttgtgtgtttgttagcccacttgaaagtttccattgattggtttacgaattggttagacattttggttcacctataccggtttggtgcaaacactttgatgcttgatagtgagtggcgacatactgacatgacctaccctatgtgttttggtatgttgctatcaatttttggctactagtct

SEQ ID NO: 84157 - protein, 164 aa, Arabidopsis thaliana; identical to SEQ ID NO: 30341
  peptide (1)..(164): Ceres Seq. ID no. 12673448

SEQ ID NO: 84158 - protein, 158 aa, Arabidopsis thaliana; identical to SEQ ID NO: 30342
  peptide (1)..(158): Ceres Seq. ID no. 12673449

SEQ ID NO: 84159 - protein, 151 aa, Arabidopsis thaliana
  peptide (1)..(151): Ceres Seq. ID no. 12673450
MRVGDHLAVKGPKGRFKYQPGQFRAFGMLAGGSGITPMFQVARAILENPTDKTKVHLIYANVTYDDILLKEELEGLTTNYPEQFKIFYVLNQPPEVWDGGVGFVSKEMIQTHCPAPASDIQILRCGPPPMNKAMAANLEALGYSPEMQFQF

SEQ ID NO: 84160 - DNA, 1378 bp, Arabidopsis thaliana
  misc_feature (1)..(1378): Ceres Seq. ID no. 12673469
  misc_feature (1)..(1378): Ortholog of  Ceres SEQ ID NO 13599003 as cited in SEQ ID NO 0
gttgcaaaccatagtgtatctctgaactgagagtagcaggttgcaattaaaaactaaagattgtgtcagacagacttatgtattaccacaaccagcaccaaggaaagagcatcctctcttcatcgagaatgcccatttcttctgaaaggcatccgttcctcagaggaaatggcacaggagattctggactcattctctccactgatgcaaagccacgactaaaatggactccagatcttcacgagagatttgttgaagcggtcaaccagcttggaggaggagataaggctactcctaagacaatcatgaaagtcatgggcattccaggccttaccttataccatctcaagagtcatcttcagaaatataggctaagcaagaatcttaatggacaagctaacagcagtttaaacaagacaagtgtgatgaccatggtagaagaaaacccccctgaagtagacgaaagtcacagtgagagtttaagcattggaccacagccgagcatgaacttacccataagtgatgcccttcaaatgcaaatagaggtccagagacggctacacgagcaacttgagctcaggatagaggctcaaggaaagtacctgcaatcgattctggagaaagcacaagagactcttggaagacagaacctaggtgcagctgggattgaagcaacaaaagctcaactctcagaattagtatctaaagtatcagcagactatccagactctagtttcctcgaaccgaaagaactgcagaatctacaccatcaacagatgcaaaaaacgtatccacctaactcctccctggacagttgcctaacctcaagtgaaggaactcagaaagccccaaagatgcttgacaacagactgggattaagaacatatattggagattcaacttcagagcagaaagagataatggaagagccattcttccatagaatggagctcacatgggcagaagaagaaagcctcagagagaatcacaacaggccatatctttcaacaatggttaacaacgcagaaccgagaatctcgtcttcaagaagaagtcctggaagattgtcaataggagtgggattacatgaacacagaggaaggagtagcaacaacagtgagtatacagaagaaagattcaacgagaataatgaagattgcaagcttgaaacacacacaagaacagctctagatcttaacacacacgacgaaaactatggcacaacgcgtcctaaacagtttgatttaaatggtttcagctggaattgagaagaacaaataagctttagaagagtgcaacaacctttttatgataatcacacaggaaatgaaaagcctttgatttcctttgttagcttgagggattcgtctaaaaattg

SEQ ID NO: 84161 - protein, 396 aa, Arabidopsis thaliana
  peptide (1)..(396): Ceres Seq. ID no. 12673470
MYYHNQHQGKSILSSSRMPISSERHPFLRGNGTGDSGLILSTDAKPRLKWTPDLHERFVEAVNQLGGGDKATPKTIMKVMGIPGLTLYHLKSHLQKYRLSKNLNGQANSSLNKTSVMTMVEENPPEVDESHSESLSIGPQPSMNLPISDALQMQIEVQRRLHEQLELRIEAQGKYLQSILEKAQETLGRQNLGAAGIEATKAQLSELVSKVSADYPDSSFLEPKELQNLHHQQMQKTYPPNSSLDSCLTSSEGTQKAPKMLDNRLGLRTYIGDSTSEQKEIMEEPFFHRMELTWAEEESLRENHNRPYLSTMVNNAEPRISSSRRSPGRLSIGVGLHEHRGRSSNNSEYTEERFNENNEDCKLETHTRTALDLNTHDENYGTTRPKQFDLNGFSWN

SEQ ID NO: 84162 - protein, 379 aa, Arabidopsis thaliana
  peptide (1)..(379): Ceres Seq. ID no. 12673471
MPISSERHPFLRGNGTGDSGLILSTDAKPRLKWTPDLHERFVEAVNQLGGGDKATPKTIMKVMGIPGLTLYHLKSHLQKYRLSKNLNGQANSSLNKTSVMTMVEENPPEVDESHSESLSIGPQPSMNLPISDALQMQIEVQRRLHEQLELRIEAQGKYLQSILEKAQETLGRQNLGAAGIEATKAQLSELVSKVSADYPDSSFLEPKELQNLHHQQMQKTYPPNSSLDSCLTSSEGTQKAPKMLDNRLGLRTYIGDSTSEQKEIMEEPFFHRMELTWAEEESLRENHNRPYLSTMVNNAEPRISSSRRSPGRLSIGVGLHEHRGRSSNNSEYTEERFNENNEDCKLETHTRTALDLNTHDENYGTTRPKQFDLNGFSWN

SEQ ID NO: 84163 - protein, 320 aa, Arabidopsis thaliana
  peptide (1)..(320): Ceres Seq. ID no. 12673472
MKVMGIPGLTLYHLKSHLQKYRLSKNLNGQANSSLNKTSVMTMVEENPPEVDESHSESLSIGPQPSMNLPISDALQMQIEVQRRLHEQLELRIEAQGKYLQSILEKAQETLGRQNLGAAGIEATKAQLSELVSKVSADYPDSSFLEPKELQNLHHQQMQKTYPPNSSLDSCLTSSEGTQKAPKMLDNRLGLRTYIGDSTSEQKEIMEEPFFHRMELTWAEEESLRENHNRPYLSTMVNNAEPRISSSRRSPGRLSIGVGLHEHRGRSSNNSEYTEERFNENNEDCKLETHTRTALDLNTHDENYGTTRPKQFDLNGFSWN

SEQ ID NO: 84164 - DNA, 761 bp, Arabidopsis thaliana
  misc_feature (1)..(761): Ceres Seq. ID no. 12673485
  misc_feature (1)..(761): Ortholog of  Ceres SEQ ID NO 14313370 as cited in SEQ ID NO 67252
acctaccttctccaatctcttttcgatttcgaattttccatctttcgattctcagtagtttcgtctcaatttcataattccattgtagccgataatgaattccgctttagattttgcttttccggctacatttccggttaaatcgagttctgttggcggacatcggattgcttcccctggattcagttcccgcttaagattgtgctctcttcctccttcttcatctatcaaggctgagtcatgtttaaaaagagacgtgcacaggcaaagaagcagtcttgagtcaatgttctgttatgataaaccaataccagaggaaataatcgaggagccagttggattatccatgtcagagagagagattggtgataatcagcgttgcacttgttgtgaagctaaaggtgcattgctttgttccacttgttctggaactggtctatatgtagattccattatggagagtcaaggcatcattgttaaagtccgttgcttaggttgtggtggaagtggtaatattatgtgcaaactttgtggtgggcgtggtcacgtaggacactgatgactccgtgtttcacttgtttgcactcatggttctgttttacctattcgccactttttctagctctgatcttattgtaaaagcctacttttttgagttccatacatagatttgtgttcttgtactgatgtaatctctagctaaactatgcacaatcttgtcccagactattcattttctgttgttatataaaatggtttcc

SEQ ID NO: 84165 - protein, 154 aa, Arabidopsis thaliana; identical to SEQ ID NO: 30304
  peptide (1)..(154): Ceres Seq. ID no. 12673486

SEQ ID NO: 84166 - protein, 90 aa, Arabidopsis thaliana; identical to SEQ ID NO: 30305
  peptide (1)..(90): Ceres Seq. ID no. 12673487

SEQ ID NO: 84167 - DNA, 1129 bp, Arabidopsis thaliana
  misc_feature (1)..(1129): Ceres Seq. ID no. 12673500
  misc_feature (1)..(1129): Ortholog of  Ceres SEQ ID NO 15227026 as cited in SEQ ID NO 52193
  misc_feature (1)..(1129): Ortholog of  Ceres SEQ ID NO 15177903 as cited in SEQ ID NO 54993
  misc_feature (1)..(1129): Ortholog of  Ceres SEQ ID NO 13595454 as cited in SEQ ID NO 56502
aactgtgtgttttttggcagacacagatcaagaaccttaatcctctatggtatccgttggagagccagagcgtcgagtatttcaggttgggagatttttgggattgtttcgacgagtggagtgcttacggtgcaggtgtccccattgtatcggaaacgggcgaaacattggtccaatactatgttccttacctctctgcaatccagattttcacctctcattctgttatcaatactcttagggaggagacagaatcaggggattcagggagcgagtcgtgtagcgaggagtggagatgggaaggatgttcttcgtctgaagaagggtttgatcatcaagaacctctcgatcgcctcggttactcttacttgcagtatttcgagagatgtacaccttactctagagtccctctcatggataagatcaaagagttgggagaaagatacgtagggttgaggtcattgaggagtgttgatctgtctcctgcgagttggatggctgttgcttggtatccaatctatcacattcccatgaatagaagcataaaagacttgtctacttgcttcctcacttaccacacgctttcttcatctttccaagatgtaaaaagggaagaggagaaggagaggataagtgtgagtgcatttgggatggccacttacaagatgcaagggaggctatgggataatgatagattgctttgctttttgagcgtagcagattcttggctaaagcagctaagggtccaccaccatgacttcacctacttcaccactactactcattatctttgatatatgtagtgttttagatcattacttggttaacagtctatttagctttgttgtttaagagtagcacatatcaataatgttggattgttgttacttgggactctttgggaaggataggtactgactttttcttcacaagacttttatatcataaatttagtttggggtcagattgatgatgatgggctcaatacatttattcttttctaatgttttgtggctttctgtttgtacaaacgcacgttctcttgattttggtatccttctctttttaacaattttctaaatttcataacaaaaaagaagaagatatatacagagatatatattgattt

SEQ ID NO: 84168 - protein, 263 aa, Arabidopsis thaliana
  peptide (1)..(263): Ceres Seq. ID no. 12673501
LCVFWQTQIKNLNPLWYPLESQSVEYFRLGDFWDCFDEWSAYGAGVPIVSETGETLVQYYVPYLSAIQIFTSHSVINTLREETESGDSGSESCSEEWRWEGCSSSEEGFDHQEPLDRLGYSYLQYFERCTPYSRVPLMDKIKELGERYVGLRSLRSVDLSPASWMAVAWYPIYHIPMNRSIKDLSTCFLTYHTLSSSFQDVKREEEKERISVSAFGMATYKMQGRLWDNDRLLCFLSVADSWLKQLRVHHHDFTYFTTTTHYL

SEQ ID NO: 84169 - protein, 149 aa, Arabidopsis thaliana
  peptide (1)..(149): Ceres Seq. ID no. 12673502
NCVFFGRHRSRTLILYGIRWRARASSISGWEIFGIVSTSGVLTVQVSPLYRKRAKHWSNTMFLTSLQSRFSPLILLSILLGRRQNQGIQGASRVARSGDGKDVLRLKKGLIIKNLSIASVTLTCSISRDVHLTLESLSWIRSKSWEKDT

SEQ ID NO: 84170 - DNA, 2053 bp, Arabidopsis thaliana
  misc_feature (1)..(2053): Ceres Seq. ID no. 12673554
  misc_feature (1)..(2053): Ortholog of  Ceres SEQ ID NO 15178931 as cited in SEQ ID NO 1125
  misc_feature (1)..(2053): Ortholog of  Ceres SEQ ID NO 13596648 as cited in SEQ ID NO 63080
  misc_feature (1)..(2053): Ortholog of  Ceres SEQ ID NO 13584744 as cited in SEQ ID NO 69137
aataataatggctttgcttttactctgatgacaagttcaaaaatggaacaaagatcactcctttgcttcctttatctgctcctactattcaatttcactctcagagtcgctggaaacgctgaaggtgatgctttgactcagctgaaaaacagtttgtcatcaggtgaccctgcaaacaatgtactccaaagctgggatgctactcttgttactccatgtacttggtttcatgttacttgcaatcctgagaataaagttactcgtgttgaccttgggaatgcaaaactatctggaaagttggttccagaacttggtcagcttttaaacttgcagtacttggagctttatagcaataacattacaggggagatacctgaggagcttggcgacttggtggaactagtaagcttggatctttacgcaaacagcataagcggtcccatcccttcgtctcttggcaaactaggaaaactccggttcttgcgtcttaacaacaatagcttatcaggggaaattccaatgactttgacttctgtgcagctgcaagttctggatatctcaaacaatcggctcagtggagatattcctgttaatggttctttttcgctcttcactcctatcagttttgcgaataatagcttaacggatcttcccgaacctccgcctacttctacctctcctacgccaccaccaccttcaggggggcaaatgactgcagcaatagcagggggagttgctgcaggtgcagcacttctatttgctgttccagccattgcgtttgcttggtggctcagaagaaaaccacaggaccacttttttgatgtacctgctgaagaagacccagaggttcatttaggacaactcaaaaggtttaccttgcgtgaactgttagttgctactgataactttagcaataaaaatgtattgggtagaggtggttttggtaaagtgtataaaggacgtttagccgatggcaatctagtggctgtcaaaaggctaaaagaagaacgtaccaagggtggggaactgcagtttcaaaccgaagttgagatgatcagtatggccgttcataggaacttgcttcggcttcgtggcttttgcatgactccaactgaaagattacttgtttatccctacatggctaatggaagtgttgcttcttgtttaagagagcgtcctgaaggcaatccagcacttgattggccaaaaagaaagcatattgctctgggatcagcaagggggcttgcgtatttacatgatcattgcgaccaaaaaatcattcaccgggatgttaaagctgctaatatattgttagatgaagagtttgaagctgttgttggagattttgggctcgcaaaattaatgaattataatgactcccatgtgacaactgctgtacgcggtacaattggccatatagcgcccgagtacctctcgacaggaaaatcttctgagaagactgatgtttttgggtacggggtcatgcttctcgagctcatcactggacaaaaggctttcgatcttgctcggcttgcaaatgatgatgatatcatgttactcgactgggtgaaagaggttttgaaagagaagaagttggaaagccttgtggatgcagaactcgaaggaaagtacgtggaaacagaagtggagcagctgatacaaatggctctgctctgcactcaaagttctgcaatggaacgtccaaagatgtcagaagtagtgagaatgctggaaggagatggtttagctgagagatgggaagaatggcaaaaggaggagatgccaatacatgattttaactatcaagcctatcctcatgctggcactgactggctcatcccctattccaattcccttatcgaaaacgattacccctcgggtccaagataaccttttagaaagggtcttttcttgtgggttcttcaacaagtatatatatagattggtgaagttttaagatgcaaaaaaaacccatgcacttttgaatatcaactcctctataagtagttttgtgtctcttgacgaataaagaatatcattactccacttgagc

SEQ ID NO: 84171 - protein, 629 aa, Arabidopsis thaliana
  peptide (1)..(629): Ceres Seq. ID no. 12673555
NNNGFAFTLMTSSKMEQRSLLCFLYLLLLFNFTLRVAGNAEGDALTQLKNSLSSGDPANNVLQSWDATLVTPCTWFHVTCNPENKVTRVDLGNAKLSGKLVPELGQLLNLQYLELYSNNITGEIPEELGDLVELVSLDLYANSISGPIPSSLGKLGKLRFLRLNNNSLSGEIPMTLTSVQLQVLDISNNRLSGDIPVNGSFSLFTPISFANNSLTDLPEPPPTSTSPTPPPPSGGQMTAAIAGGVAAGAALLFAVPAIAFAWWLRRKPQDHFFDVPAEEDPEVHLGQLKRFTLRELLVATDNFSNKNVLGRGGFGKVYKGRLADGNLVAVKRLKEERTKGGELQFQTEVEMISMAVHRNLLRLRGFCMTPTERLLVYPYMANGSVASCLRERPEGNPALDWPKRKHIALGSARGLAYLHDHCDQKIIHRDVKAANILLDEEFEAVVGDFGLAKLMNYNDSHVTTAVRGTIGHIAPEYLSTGKSSEKTDVFGYGVMLLELITGQKAFDLARLANDDDIMLLDWVKEVLKEKKLESLVDAELEGKYVETEVEQLIQMALLCTQSSAMERPKMSEVVRMLEGDGLAERWEEWQKEEMPIHDFNYQAYPHAGTDWLIPYSNSLIENDYPSGPR

SEQ ID NO: 84172 - protein, 620 aa, Arabidopsis thaliana
  peptide (1)..(620): Ceres Seq. ID no. 12673556
MTSSKMEQRSLLCFLYLLLLFNFTLRVAGNAEGDALTQLKNSLSSGDPANNVLQSWDATLVTPCTWFHVTCNPENKVTRVDLGNAKLSGKLVPELGQLLNLQYLELYSNNITGEIPEELGDLVELVSLDLYANSISGPIPSSLGKLGKLRFLRLNNNSLSGEIPMTLTSVQLQVLDISNNRLSGDIPVNGSFSLFTPISFANNSLTDLPEPPPTSTSPTPPPPSGGQMTAAIAGGVAAGAALLFAVPAIAFAWWLRRKPQDHFFDVPAEEDPEVHLGQLKRFTLRELLVATDNFSNKNVLGRGGFGKVYKGRLADGNLVAVKRLKEERTKGGELQFQTEVEMISMAVHRNLLRLRGFCMTPTERLLVYPYMANGSVASCLRERPEGNPALDWPKRKHIALGSARGLAYLHDHCDQKIIHRDVKAANILLDEEFEAVVGDFGLAKLMNYNDSHVTTAVRGTIGHIAPEYLSTGKSSEKTDVFGYGVMLLELITGQKAFDLARLANDDDIMLLDWVKEVLKEKKLESLVDAELEGKYVETEVEQLIQMALLCTQSSAMERPKMSEVVRMLEGDGLAERWEEWQKEEMPIHDFNYQAYPHAGTDWLIPYSNSLIENDYPSGPR

SEQ ID NO: 84173 - protein, 615 aa, Arabidopsis thaliana
  peptide (1)..(615): Ceres Seq. ID no. 12673557
MEQRSLLCFLYLLLLFNFTLRVAGNAEGDALTQLKNSLSSGDPANNVLQSWDATLVTPCTWFHVTCNPENKVTRVDLGNAKLSGKLVPELGQLLNLQYLELYSNNITGEIPEELGDLVELVSLDLYANSISGPIPSSLGKLGKLRFLRLNNNSLSGEIPMTLTSVQLQVLDISNNRLSGDIPVNGSFSLFTPISFANNSLTDLPEPPPTSTSPTPPPPSGGQMTAAIAGGVAAGAALLFAVPAIAFAWWLRRKPQDHFFDVPAEEDPEVHLGQLKRFTLRELLVATDNFSNKNVLGRGGFGKVYKGRLADGNLVAVKRLKEERTKGGELQFQTEVEMISMAVHRNLLRLRGFCMTPTERLLVYPYMANGSVASCLRERPEGNPALDWPKRKHIALGSARGLAYLHDHCDQKIIHRDVKAANILLDEEFEAVVGDFGLAKLMNYNDSHVTTAVRGTIGHIAPEYLSTGKSSEKTDVFGYGVMLLELITGQKAFDLARLANDDDIMLLDWVKEVLKEKKLESLVDAELEGKYVETEVEQLIQMALLCTQSSAMERPKMSEVVRMLEGDGLAERWEEWQKEEMPIHDFNYQAYPHAGTDWLIPYSNSLIENDYPSGPR

SEQ ID NO: 84174 - DNA, 1441 bp, Arabidopsis thaliana
  misc_feature (1)..(1441): Ceres Seq. ID no. 12673569
  misc_feature (1)..(1441): Ortholog of  Ceres SEQ ID NO 14307156 as cited in SEQ ID NO 54069
  misc_feature (1)..(1441): Ortholog of  Ceres SEQ ID NO 15169651 as cited in SEQ ID NO 64156
atggcggtggaatatgaatgctgcgggaccagcttcttcatacacatcgctgtgatagtgttactagtcttgttcgctggactaatgtctggtcttactttgggtcttatgtctatgagtctcgttgatcttgaggttcttgctaaatccggtactcccagagatcgtatccatgctgcaaagattttaccagttgtgaaaaatcagcatcttttgctttgtactttactgatatgtaatgcagctgctatggaggcgcttcctatatttcttgatgctcttgtgacggcttggggtgccattttgatttcagtgacgctaattcttctctttggtgagatcatacctcagtcagtctgttctcgtcatggtttagctattggtgcaacagtggctccatttgttcgtgttctagtttggatctgcttaccagttgcatggccgattagtaagctgctagactttctacttggtcatggtcgtgtagctcttttccgaagagctgagctgaaaacacttgtggatttgcatggaaatgaggctggtaaaggtggagaattgacacatgatgaaacaacaatcattgctggagctcttgaactatctgagaaaatggctaaagatgcaatgacaccaatttctgacacttttgtgattgatatcaatgccaaactagacagggatttgatgaatttgattcttgataaaggtcatagcagagtcccagtatactatgagcaacgtaccaacataattggacttgttttggtgaagaacttattgactatcaatccagatgaagaaatacaagtaaaaaatgtgactatacgaagaatcccaagagttccagaaacgttaccgttatatgatatattaaacgagttccagaaaggacatagccacatggctgttgttgtgagacagtgtgacaaaatccacccgttacagagtaatgatgctgcaaacgagactgtaaatgaagtcagagtggatgtggattatgagagatccccacaggaaacgaagttaaagagaaggagatcattacagaaatggaagagctttccaaaccgagcaaattcgttagggtcgaggagcaagaggtggtccaaagataatgatgctgatattctgcaacttaacgaacatccacttccaaagctagatgaggaggaagatgctgttggtatcattacaatggaagatgtcattgaagaacttttacaggaagagatattcgatgagacggatcatcattttgaagacttgtgacaggccacaacttcgagtgcttaatattagttgtttgaaccatgtacatggtgctatatacctcagaagatccaatttccactggacaagttttgttgcgaaagagtcatgtataaaagtaagatcatatgtcatgtaataacactgcttcgtgtatagttatttccct

SEQ ID NO: 84175 - protein, 423 aa, Arabidopsis thaliana
  peptide (1)..(423): Ceres Seq. ID no. 12673570
MAVEYECCGTSFFIHIAVIVLLVLFAGLMSGLTLGLMSMSLVDLEVLAKSGTPRDRIHAAKILPVVKNQHLLLCTLLICNAAAMEALPIFLDALVTAWGAILISVTLILLFGEIIPQSVCSRHGLAIGATVAPFVRVLVWICLPVAWPISKLLDFLLGHGRVALFRRAELKTLVDLHGNEAGKGGELTHDETTIIAGALELSEKMAKDAMTPISDTFVIDINAKLDRDLMNLILDKGHSRVPVYYEQRTNIIGLVLVKNLLTINPDEEIQVKNVTIRRIPRVPETLPLYDILNEFQKGHSHMAVVVRQCDKIHPLQSNDAANETVNEVRVDVDYERSPQETKLKRRRSLQKWKSFPNRANSLGSRSKRWSKDNDADILQLNEHPLPKLDEEEDAVGIITMEDVIEELLQEEIFDETDHHFEDL

SEQ ID NO: 84176 - protein, 395 aa, Arabidopsis thaliana
  peptide (1)..(395): Ceres Seq. ID no. 12673571
MSGLTLGLMSMSLVDLEVLAKSGTPRDRIHAAKILPVVKNQHLLLCTLLICNAAAMEALPIFLDALVTAWGAILISVTLILLFGEIIPQSVCSRHGLAIGATVAPFVRVLVWICLPVAWPISKLLDFLLGHGRVALFRRAELKTLVDLHGNEAGKGGELTHDETTIIAGALELSEKMAKDAMTPISDTFVIDINAKLDRDLMNLILDKGHSRVPVYYEQRTNIIGLVLVKNLLTINPDEEIQVKNVTIRRIPRVPETLPLYDILNEFQKGHSHMAVVVRQCDKIHPLQSNDAANETVNEVRVDVDYERSPQETKLKRRRSLQKWKSFPNRANSLGSRSKRWSKDNDADILQLNEHPLPKLDEEEDAVGIITMEDVIEELLQEEIFDETDHHFEDL

SEQ ID NO: 84177 - protein, 387 aa, Arabidopsis thaliana
  peptide (1)..(387): Ceres Seq. ID no. 12673572
MSMSLVDLEVLAKSGTPRDRIHAAKILPVVKNQHLLLCTLLICNAAAMEALPIFLDALVTAWGAILISVTLILLFGEIIPQSVCSRHGLAIGATVAPFVRVLVWICLPVAWPISKLLDFLLGHGRVALFRRAELKTLVDLHGNEAGKGGELTHDETTIIAGALELSEKMAKDAMTPISDTFVIDINAKLDRDLMNLILDKGHSRVPVYYEQRTNIIGLVLVKNLLTINPDEEIQVKNVTIRRIPRVPETLPLYDILNEFQKGHSHMAVVVRQCDKIHPLQSNDAANETVNEVRVDVDYERSPQETKLKRRRSLQKWKSFPNRANSLGSRSKRWSKDNDADILQLNEHPLPKLDEEEDAVGIITMEDVIEELLQEEIFDETDHHFEDL

SEQ ID NO: 84178 - DNA, 1218 bp, Arabidopsis thaliana
  misc_feature (1)..(1218): Ceres Seq. ID no. 12673588
  misc_feature (1)..(1218): Ortholog of  Ceres SEQ ID NO 13648488 as cited in SEQ ID NO 20419
  misc_feature (1)..(1218): Ortholog of  Ceres SEQ ID NO 15171378 as cited in SEQ ID NO 51582
atttcgtctttcattatttctatttttgttttgtcggacaaaaaataaaatgaagagcaacacaaacactaatctgattctcttccaccaccactctccactaacttcaaaatcaccctccgccgtcgccgccgcgaatcaccaccgtttcttattcatcttcttcctctctttcttcactctcctcttctctttctctctcttctcctcctcaatccactccaccacatcctctcactctctctcctcatctccctcctcctcctctcttccaccaccagtcctcgccgcacttctccactacacttcctcatcaccaccaaacacatctatgtcctttcttgaactctccaccatctccaacatcattcactctcatggcccagcttgtaacctcttaatctttggactaactcacgaatctcttctctggagatctatcaacttccaaggccgtactgttttcgttgatgagagtccttactctgtttctaaattcgaacagagtaaccctggagttgaagcttacgaggttgtttactcaactaaagtctctcaagctaagaagcttcttggttattacaagacccgacccgagtgtagacccgttcagaatcttttgttctctgattgtaaattgggtattaacgatttgcctaattttgtttatgagattgattgggatgtgattttgattgatgggcctcgtgggtatgcttctgattctccgggaaggatggctccgatctttacttctgcggttttagcaaaaagtaaagattttgggacgaagacgaagaagactgatgttcttgtacatgagtttgggagaaagattgagagagtgtacagtgaggagtttctatgtgaagagaatttgattgaagtggtcggagatttagggcattttgttgtggcggcggcggaggaaagagagagttatggtgatgggttttgtcggaattcgacgagattgtcggagagttttacggcggtgagtggtggcgatgaagaaaaagttggtgttgatgatgagtgaaaagtgggtttggttttttacttttggtggctcttttgtaattaaatttagcttttgaggtcttctttttttttgtttttgtttagtcttttacttcatttggtttttgaatttaggagaacggttacacttgaaagttaatatgtaactaaattccaaaaaaaaacaaatgttactct

SEQ ID NO: 84179 - protein, 345 aa, Arabidopsis thaliana
  peptide (1)..(345): Ceres Seq. ID no. 12673589
FRLSLFLFLFCRTKNKMKSNTNTNLILFHHHSPLTSKSPSAVAAANHHRFLFIFFLSFFTLLFSFSLFSSSIHSTTSSHSLSSSPSSSSLPPPVLAALLHYTSSSPPNTSMSFLELSTISNIIHSHGPACNLLIFGLTHESLLWRSINFQGRTVFVDESPYSVSKFEQSNPGVEAYEVVYSTKVSQAKKLLGYYKTRPECRPVQNLLFSDCKLGINDLPNFVYEIDWDVILIDGPRGYASDSPGRMAPIFTSAVLAKSKDFGTKTKKTDVLVHEFGRKIERVYSEEFLCEENLIEVVGDLGHFVVAAAEERESYGDGFCRNSTRLSESFTAVSGGDEEKVGVDDE

SEQ ID NO: 84180 - protein, 329 aa, Arabidopsis thaliana; identical to SEQ ID NO: 22135
  peptide (1)..(329): Ceres Seq. ID no. 12673590

SEQ ID NO: 84181 - protein, 235 aa, Arabidopsis thaliana; identical to SEQ ID NO: 22136
  peptide (1)..(235): Ceres Seq. ID no. 12673591

SEQ ID NO: 84182 - DNA, 1502 bp, Arabidopsis thaliana
  misc_feature (1)..(1502): Ceres Seq. ID no. 12673622
  misc_feature (1)..(1502): Ortholog of  Ceres SEQ ID NO 15176433 as cited in SEQ ID NO 59539
atgggtcgtgtccgaaaatcagatttcggttccattgttcttgttctgtgttgtgtcctaaatagcttactctgtaatggaggcatcaccagtagatatgtcagaaaattagaagcaaccgttgatatgcctcttgatagcgatgtttttcgtgttccttgtggctacaatgctcctcaacaggtgcatataacacaaggagatgtagaaggaaaggcagtgatagtatcatgggtgacacaagaagcaaaaggatctaacaaagtcatttactggaaagagaatagcaccaaaaagcacaaagctcatggcaaaaccaatacttacaagttctacaattatacttctggttttatccatcattgccctatcagaaacttagaggtccatcatcataatcattttttatttatgtatctcattaccatcatctttggtagtgttgttgttagctgatgttgtggtttttcttattacagtatgacaccaagtactattatgtgttaggtgtgggacaaacggagcgtaagttttggttcttcactcctcctgagatcggtcctgatgttccctacacttttggtctcattggggatcttgggcagagttatgactcaaacataaccttaacacattatgagaataacccaacaaaagggcaagcggttttgttcgtcggcgatatctcatacgctgatacttatccggatcatgacaataggagatgggacagttggggaagatttgctgaaagaagcacagcttatcagccttggatttggactaccggaaaccatgaactcgattttgccccggagattggtgaaaacagaccgtttaagccgttcacgcataggtaccgaactccttaccgatcatcaggcagcaccgaaccattctggtactcgataaagagaggaccggcttacataatcgtgctagcttcatattcagcatatggaaaatacacaccacagtaccaatggctcgaagaggagttcccaaaggttaacagaacggaaactccgtggttgattgttctgatgcattcaccatggtacaacagctatgattaccattacatggaaggtgaaacaatgagggtaatgtatgaggcttggtttgtcaagtacaaagtagatgtagtttttgcaggtcatgtccacgcctacgaaagatcggaacgtgtatcaaacatagcttacaatgttgttaacggcatttgcactccagtcaaagatcaatcagctccagtctatatcaccattggtgatggaggcaatattgagggcttggctaccaaaatgactgagcctcagcctaagtactctgcctttagagaagcaagcttcgggcatgctatattctcgataaagaacaggacgcatgctcactatggatggcataggaaccatgatggttatgctgtggagggtgacagaatgtggttttataacagattttggcatcctgttgatgattctccttcttgtaattcttga

SEQ ID NO: 84183 - protein, 348 aa, Arabidopsis thaliana
  peptide (1)..(348): Ceres Seq. ID no. 12673623
MLWFFLLQYDTKYYYVLGVGQTERKFWFFTPPEIGPDVPYTFGLIGDLGQSYDSNITLTHYENNPTKGQAVLFVGDISYADTYPDHDNRRWDSWGRFAERSTAYQPWIWTTGNHELDFAPEIGENRPFKPFTHRYRTPYRSSGSTEPFWYSIKRGPAYIIVLASYSAYGKYTPQYQWLEEEFPKVNRTETPWLIVLMHSPWYNSYDYHYMEGETMRVMYEAWFVKYKVDVVFAGHVHAYERSERVSNIAYNVVNGICTPVKDQSAPVYITIGDGGNIEGLATKMTEPQPKYSAFREASFGHAIFSIKNRTHAHYGWHRNHDGYAVEGDRMWFYNRFWHPVDDSPSCNS

SEQ ID NO: 84184 - DNA, 2625 bp, Arabidopsis thaliana
  misc_feature (1)..(2625): Ceres Seq. ID no. 12673624
  misc_feature (1)..(2625): Ortholog of  Ceres SEQ ID NO 13600595 as cited in SEQ ID NO 629
gtggattcttgtttaaatttaaaaatcctcaagaagaagaagaagaagaagaagatagtcaaatgaaaatacattcttctgatcattcatggcttttactagccgttctcgtgattctcctctccttctctggagctctctcaagcgatgacaaagagaagaagacgaaatcggtcgataaaaagaaagaagtaacttatgatggaacgtctttgatcatcaatggaaatagagaactcctttactctggctccatacattaccctcgtagcactcctgaaatgtggccaaacatcatcaagagagcgaaacaaggcggtttgaacacgattcagacatacgttttttggaacgttcatgagcctgagcagggaaagttcaatttttcgggtagagccgacttggtgaagttcataaaattaattgagaagaatggtttgtatgtaaccttgaggcttggaccttttattcaagctgaatggactcatggaggacttccttactggctgagggaagttcccgggatcttcttccgtaccgataatgaacctttcaaggaacatacagagagatatgttaaggtggtacttgacatgatgaaggaggagaagctttttgcttcacaaggaggccccattatattaggacagattgagaatgagtatagtgcggttcaacgagcatataaagaagatggattaaactacattaagtgggcatctaaactggtacactcgatggatttggggatcccatgggttatgtgtaagcaaaatgatgctcctgatcctatgatcaacgcttgtaacggaagacattgcggtgatacattccctggtccaaacaaagacaacaagccatctttatggacagagaactggactactcagttccgcgtttttggcgatcccccagcacaaagatctgtagaagatatagcatattctgttgcccggtttttctccaagaatggaacccatgttaactactatatgtatcacggaggtactaactttggaagaacctctgcacattatgtgacaactcgttactacgacgatgcacctcttgatgaattcggactggaaagggagcctaagtacggtcatctaaagcatcttcacaacgcccttaacttgtgcaagaaggcacttctctggggccagcctcgagtcgagaagcctagcaatgaaacagagattcgatactacgagcagcctggaactaaagtttgtgcagcatttttggctaacaataacacagaagctgcagaaaaaatcaaattcagaggcaaggaatatcttatcccgcaccgctccatcagtattctccctgactgcaaaaccgttgtttataacaccggggagatcatctctcatcatacttcaagaaacttcatgaaatcgaaaaaagcgaataagaactttgatttcaaagtgttcaccgagtcagtgccaagtaagatcaagggtgactcttttatacccgttgaactctacggcttgaccaaagatgagtctgattacggatggtacacaacaagctttaaaatagatgacaatgacctctctaagaagaaaggaggtaagcctaatctgaggattgctagtcttggccacgcgttgcatgtatggctcaatggagaataccttggaaacggacatggtagccatgaagagaagagtttcgtctttcagaagccagttactctaaaagaaggagagaaccacttaaccatgctaggtgttttgacgggatttccggatagtggatcttatatggagcatagatacacaggtccacgtagtgtttccatcttaggtttgggctctggaacacttgatctcactgaagaaaacaaatggggaaacaaggtgggtatggaaggcgaaaggcttggtatccacgccgaagaaggattgaagaaggttaaatgggagaaagcttcagggaaagaaccgggaatgacatggtaccagacatacttcgatgcaccagagagccaaagtgcagcagcaattaggatgaacggaatggggaaaggtttgatttgggtgaacggagaaggtgttggtcgatattggatgtcgtttctatcgcctttaggacagcctacgcaaatcgagtatcacatccctaggtctttcttgaagcccaagaaaaatcttctggttatatttgaggaagaaccaaatgtgaagccagagcttatcgactttgtcatcgtcaatagagatacggtgtgttcttatattggagaaaactacactcctagtgtccgtcactggaccaggaagaatgaccaagttcaggccatcactgatgacgtgcatctcacggctaatctcaaatgttccggcacaaagaaaatctccgctgtggaattcgcaagctttgggaatcctaatgggacttgtggcaacttcactcttggaagttgtaatgctcctgtttctaagaaagtcgttgaaaagtactgtttgggtaaagcagagtgtgtgattccggtgaacaagagtacgttcgagcaagacaaaaaggattcatgtcccaaagtcgagaagaagcttgcggtacaagtcaagtgtggccgtgacaagaagaactaaggatatatattttatt

SEQ ID NO: 84185 - protein, 868 aa, Arabidopsis thaliana
  peptide (1)..(868): Ceres Seq. ID no. 12673625
GFLFKFKNPQEEEEEEEDSQMKIHSSDHSWLLLAVLVILLSFSGALSSDDKEKKTKSVDKKKEVTYDGTSLIINGNRELLYSGSIHYPRSTPEMWPNIIKRAKQGGLNTIQTYVFWNVHEPEQGKFNFSGRADLVKFIKLIEKNGLYVTLRLGPFIQAEWTHGGLPYWLREVPGIFFRTDNEPFKEHTERYVKVVLDMMKEEKLFASQGGPIILGQIENEYSAVQRAYKEDGLNYIKWASKLVHSMDLGIPWVMCKQNDAPDPMINACNGRHCGDTFPGPNKDNKPSLWTENWTTQFRVFGDPPAQRSVEDIAYSVARFFSKNGTHVNYYMYHGGTNFGRTSAHYVTTRYYDDAPLDEFGLEREPKYGHLKHLHNALNLCKKALLWGQPRVEKPSNETEIRYYEQPGTKVCAAFLANNNTEAAEKIKFRGKEYLIPHRSISILPDCKTVVYNTGEIISHHTSRNFMKSKKANKNFDFKVFTESVPSKIKGDSFIPVELYGLTKDESDYGWYTTSFKIDDNDLSKKKGGKPNLRIASLGHALHVWLNGEYLGNGHGSHEEKSFVFQKPVTLKEGENHLTMLGVLTGFPDSGSYMEHRYTGPRSVSILGLGSGTLDLTEENKWGNKVGMEGERLGIHAEEGLKKVKWEKASGKEPGMTWYQTYFDAPESQSAAAIRMNGMGKGLIWVNGEGVGRYWMSFLSPLGQPTQIEYHIPRSFLKPKKNLLVIFEEEPNVKPELIDFVIVNRDTVCSYIGENYTPSVRHWTRKNDQVQAITDDVHLTANLKCSGTKKISAVEFASFGNPNGTCGNFTLGSCNAPVSKKVVEKYCLGKAECVIPVNKSTFEQDKKDSCPKVEKKLAVQVKCGRDKKN

SEQ ID NO: 84186 - protein, 848 aa, Arabidopsis thaliana
  peptide (1)..(848): Ceres Seq. ID no. 12673626
MKIHSSDHSWLLLAVLVILLSFSGALSSDDKEKKTKSVDKKKEVTYDGTSLIINGNRELLYSGSIHYPRSTPEMWPNIIKRAKQGGLNTIQTYVFWNVHEPEQGKFNFSGRADLVKFIKLIEKNGLYVTLRLGPFIQAEWTHGGLPYWLREVPGIFFRTDNEPFKEHTERYVKVVLDMMKEEKLFASQGGPIILGQIENEYSAVQRAYKEDGLNYIKWASKLVHSMDLGIPWVMCKQNDAPDPMINACNGRHCGDTFPGPNKDNKPSLWTENWTTQFRVFGDPPAQRSVEDIAYSVARFFSKNGTHVNYYMYHGGTNFGRTSAHYVTTRYYDDAPLDEFGLEREPKYGHLKHLHNALNLCKKALLWGQPRVEKPSNETEIRYYEQPGTKVCAAFLANNNTEAAEKIKFRGKEYLIPHRSISILPDCKTVVYNTGEIISHHTSRNFMKSKKANKNFDFKVFTESVPSKIKGDSFIPVELYGLTKDESDYGWYTTSFKIDDNDLSKKKGGKPNLRIASLGHALHVWLNGEYLGNGHGSHEEKSFVFQKPVTLKEGENHLTMLGVLTGFPDSGSYMEHRYTGPRSVSILGLGSGTLDLTEENKWGNKVGMEGERLGIHAEEGLKKVKWEKASGKEPGMTWYQTYFDAPESQSAAAIRMNGMGKGLIWVNGEGVGRYWMSFLSPLGQPTQIEYHIPRSFLKPKKNLLVIFEEEPNVKPELIDFVIVNRDTVCSYIGENYTPSVRHWTRKNDQVQAITDDVHLTANLKCSGTKKISAVEFASFGNPNGTCGNFTLGSCNAPVSKKVVEKYCLGKAECVIPVNKSTFEQDKKDSCPKVEKKLAVQVKCGRDKKN

SEQ ID NO: 84187 - protein, 775 aa, Arabidopsis thaliana
  peptide (1)..(775): Ceres Seq. ID no. 12673627
MWPNIIKRAKQGGLNTIQTYVFWNVHEPEQGKFNFSGRADLVKFIKLIEKNGLYVTLRLGPFIQAEWTHGGLPYWLREVPGIFFRTDNEPFKEHTERYVKVVLDMMKEEKLFASQGGPIILGQIENEYSAVQRAYKEDGLNYIKWASKLVHSMDLGIPWVMCKQNDAPDPMINACNGRHCGDTFPGPNKDNKPSLWTENWTTQFRVFGDPPAQRSVEDIAYSVARFFSKNGTHVNYYMYHGGTNFGRTSAHYVTTRYYDDAPLDEFGLEREPKYGHLKHLHNALNLCKKALLWGQPRVEKPSNETEIRYYEQPGTKVCAAFLANNNTEAAEKIKFRGKEYLIPHRSISILPDCKTVVYNTGEIISHHTSRNFMKSKKANKNFDFKVFTESVPSKIKGDSFIPVELYGLTKDESDYGWYTTSFKIDDNDLSKKKGGKPNLRIASLGHALHVWLNGEYLGNGHGSHEEKSFVFQKPVTLKEGENHLTMLGVLTGFPDSGSYMEHRYTGPRSVSILGLGSGTLDLTEENKWGNKVGMEGERLGIHAEEGLKKVKWEKASGKEPGMTWYQTYFDAPESQSAAAIRMNGMGKGLIWVNGEGVGRYWMSFLSPLGQPTQIEYHIPRSFLKPKKNLLVIFEEEPNVKPELIDFVIVNRDTVCSYIGENYTPSVRHWTRKNDQVQAITDDVHLTANLKCSGTKKISAVEFASFGNPNGTCGNFTLGSCNAPVSKKVVEKYCLGKAECVIPVNKSTFEQDKKDSCPKVEKKLAVQVKCGRDKKN

SEQ ID NO: 84188 - DNA, 2943 bp, Arabidopsis thaliana
  misc_feature (1)..(2943): Ceres Seq. ID no. 12673630
  misc_feature (1)..(2943): Ortholog of  Ceres SEQ ID NO 13593911 as cited in SEQ ID NO 52935
aaaaactcctaaaccaaattataattgttagtaagttaagtaacagagaacaaaataatactcgtaactcttgtttccaaactataacgtaacttttgttcatcatcttcacagtttctgtttctgtttctaaagattctaaattttgtgtttttcttttcctttttctttcgattatttttgattttctgatggaattccgcaaaccctttaagtctcatagctcgtataaacagattataagcaccggagatcaaaacgagaagacaaagaagaagaagaaactggcgaatcttgacgatggcgacattgctaaaactcagagctctgggtctagtttcgatggaaacagctataagttctggcaagacattgcaacagatgattatacaaagagcgggagtttcgatttcccgcaataccgtgaggagatcacactcgatgtaaacgaagaaacagaggaaacagaggatgtcagcaacaacaacaatttgtccggttctaaagaaacgagagtctttttcaaaataaacagttcaggaactaataatatgtctggttctgtacgttcttgtacatcttcgacttcgttttcatcggccacaatgcggttaaatttagagcagcagttggaggatgaaggagaggtggttgtaagatgttcatcggtgaggaaaacagagctagtttcgagggcgaaggcgagatcgaggttgatagatccgccacaagaagaggaacaacaatactcgagctggatcgggacatcggatcagttaagatcaggtttacttgggagacactccgatgatattgaggaagaagatgattcttcggctgaagaagatgttccagtggaatatcgaaagttgaaaatggatgcgataacgttgcttcaatggatgagcttaatcgcactcgtagttgcgttagtgttgagtctagggcttcatacttggagaaatgcaactctatggagccttcatctgtggaaatgggaagtggtcttgctggttctcatctgtgggaggctggtttcgggatgcggaatccgaatcatcgtcttctttatcgaaagaaacttccttttgaggaaacgggttctttacttcgtatacggtgtgaagactgctgttcagaactgtctctggctcggcctcgtgcttctcgcttggcatttcttgtttgacaagaaagtagaaaaggaaacacaaagcgatgttcttcttcttatgtctaaaatattagtgtgttttttgttgagcacggtcttatggctgatcaagacactggtggtgaaagttctagcctcttcgttccacgttagtacctactttgatcggattcaagaagctctgtttcatcattacttgatcgagacgttatctggacctccaatgcttgagttaagcaggattgaggaagaggaagatcggacgcaagatgagatctacaagatgcagaaaggaggagctgatttatcacctgaactttgttccgctgcgtttcctcaggaaaaaagtggaagtacaatgaacatgaagttctctccaatcattccaaagacgggaagtgataacggaatcacaatggatgatttacacaagatgaatcagaaaaacgtttcagcttggaacatgaagagactgatgaagattgtgagaaatgtttccctgagtacgttggacgaacaagcgcttcaaaacacgtgtgaagatgaatccactcgacagatacggagcgaaaaagaagctaaagcagctgcaaggaagattttcaagaacgtagctcaacctggcacaaaacacatatatctggaggacttgatgagatttttgcgagtagacgaggcgatgaagacaatgtgtctcttcgaaggcgccttagtgaccaaaaagattactaaatcagccttgaagaactggctggtaaatgctttcagagagagaagagcacttgccttaacactcaatgacaccaaaacagcagtgaacaaactccatcacatgattagttttctcactgccattgtcatcatagtcatatggctgatccttcttgaaatcgctacttccaagtatcttttatttctaacttcacaagttgtactcttagccttcatgtttgggaactctctcaagaccgtcttcgagtcaatcatcttcctcttcatcattcacccttacgatgttggtgatcggttactcatcgacactgtagagatggtggtggaggaaatgaacattctcacaacagttttcttgagagctgacaatctgaagattgtgtatccaaatattcttctatggcagaaagcgatccacaattacaaccgtagtccggatatgggagatgaagttacatgctgtgtccacattactactcctcctgaaaagattgctgcaatcaaacaaagaatatcaagctacattgatagcaagccagagtattggtatccaaaagctgatgtcattgtaaaggatgtggaagatttgaacattgtgaggatagcaatatggctatgtcataaaattaaccatcaaaacatgggagagagatttacaagaagagcgttgttgatcgaggaagtaatcaaaatcctcctcgaactcgacattcaataccggtttcatccacttgacatcaatgttaaaaccatgccaacagttgtctcgagcagagttccacctgcctggtcacaaaaccctgatttaaggtaattatagagaagatgtgtgttgtgttatcttaactcttaagtgcatgagagacagcaaactgtgttttagtatgaggttggttgttgtattttttttttctttgttagtaaaccgcttgttgtatatatatgaaggtgaaagcaaagagtgggatcataaacttgtgttatagaaactttatgaaatagaaacaaatgatatttttagtaatgaggtatttttt

SEQ ID NO: 84189 - protein, 842 aa, Arabidopsis thaliana; identical to SEQ ID NO: 75459
  peptide (1)..(842): Ceres Seq. ID no. 12673631

SEQ ID NO: 84190 - protein, 722 aa, Arabidopsis thaliana; identical to SEQ ID NO: 75460
  peptide (1)..(722): Ceres Seq. ID no. 12673632

SEQ ID NO: 84191 - protein, 704 aa, Arabidopsis thaliana; identical to SEQ ID NO: 75461
  peptide (1)..(704): Ceres Seq. ID no. 12673633

SEQ ID NO: 84192 - DNA, 2588 bp, Arabidopsis thaliana
  misc_feature (1)..(2588): Ceres Seq. ID no. 12673634
  misc_feature (1)..(2588): Ortholog of  Ceres SEQ ID NO 13600301 as cited in SEQ ID NO 1010
atgggttgttcaacctcaaagctcgacgatcttccagcggtggcgctttgtcgtgaccgttgtagcttccttgaagcagcgattcatcaacgttacgctttatcagaagctcacgtatcctacacacaatccttaaaagcaatctctcactctcttcaccaattcatcaatcaccaccaccgttacaacgattccgattcacccaaaaaagctaaacccaagatggattctgggtcgggtcatctcgatttcgattcggattctgactctgacgacgatgatgatattgattcgttgcattcatctcctctccatcatcatctagaagatgatgactcgaatccgaaatcgtatttgcatatgaattatatgaagaatagttatatgcctccttctttggtttatgagcagagaccttcgagtcctcagagagttcatttcggtgaatcatcatcatcatcaacctctgagtataatccatatctgaattcgaactacggatcgaaattgcctccgccgccaccgtcgccgccgagggaaaaggtttgggatttcttagacccttttgatacgtattatactccgtatactcctagtcgtgatacgagagagttaagagatgaattgggtgttccggatttagaggaagatgatgtagttgttaaggaagtacatgggaaacagaaatttgtagctgcagtttctgtggaagagccgttaggtaactccggtgctagcactagcggaggaggaggaggaggaggtaaggcttctttgtatcagactaggccaagtgtgtcagttgagaaagaagaaatggagcatgaggttcatattgtggagaaaaaaattgttgaggatagtggtggggatgaggtgaggaagagtaaggctgcggtggcacgtggtggtggcggtgtcagacgtggggttcctgaggttgcgaaagagatagaagctcagttcttgagagctgcagagtcaggaaatgagatcgcagtgatgcttgaagtggggaaacatccatatggtcgcaaaaatgtttcttcgaagaagctatatgaggggaccccatcaccgtctgtggtttcgtcagctcaatcatcaacctccaaaaaagctaaagctgaagcctcttcttcagtgactgctcctacttatgcagacattgaggcagagcttgctttaaagtctcgtaatctttcttcgacattgcacaagctccacctttgggagaagaagctttacgatgaggtcaaggccgaggaaaaaatgcgtgtaaaccatgagaaaaagttaaggaagcttaagcgtatggatgaaagaggtgccgagaatcaaaaagtagattcaacacgaaaattagttagaagtttgtccacaaagataaggattgcgattcaagttgttgacaaaatatcagttacaattaacaagataagagacgaagagctatggctgcaactcaatgaattgatccaagggcttagcaaaatgtggaaatccatgcttgagtgccataaaagtcagtgtgaggctattaaggaagccagaggtttaggccccattagagcaagcaaaaattttggtggggagcatctcgaggtaacaaggacgcttggatatgaacttataaattggattgtgggattttcgagttgggttagtgcgcaaaagggttttgtaagagagctgaatagttggcttatgaagtgtcttttctatgaacctgaggaaactccagatggaatcgttcctttttctcctggtcgtattggggctccaatgattttcgtgatctgtaaccagtgggaacaagctctagatagaatatcagaaaaggaagttatcgaggctatacgccgtttcacaacgagtgtgcttcatctttgggaacaagataggttagcaacccgggagaggattatagggcatggtgatcctaggaatatggaccgagaggaacagagaatacagaaagagattcaagaattggaaatgaaaatggttctggttggtccaggggaagataacattgtctaccaaagcgacactagtaacgagagtttacagggtagtcttcaacgtatatttgaagctatggagaggtttacagaggaatctctgaaagcttatgtagatctcttacatcgtgctgaagaagaagaatgcgactctcgggaaacagatgaagaagactaatggaaaaccgtggaggaaagtatcgcataaccaaaaaaactcatcagagttgtgaggcttaagacagctaattttgtgcttggccatggttgcatgatcagccattactcagctctgcgtggtttatagaccggagtaccgggccagatttatatatgactggtatttaatgggaagttacacataatcttccctaggcacgggcactaactgctccctccggagacattggataaagagatgggtcaaatgctcggttaacggaagaaggtgcttgccctattgaagaactggatggttagttaccatggttggatagaaatgtaagagaatttgccacacatcatgcaagttactggtgtagctcaagctacgataaatacaag

SEQ ID NO: 84193 - protein, 733 aa, Arabidopsis thaliana
  peptide (1)..(733): Ceres Seq. ID no. 12673635
MGCSTSKLDDLPAVALCRDRCSFLEAAIHQRYALSEAHVSYTQSLKAISHSLHQFINHHHRYNDSDSPKKAKPKMDSGSGHLDFDSDSDSDDDDDIDSLHSSPLHHHLEDDDSNPKSYLHMNYMKNSYMPPSLVYEQRPSSPQRVHFGESSSSSTSEYNPYLNSNYGSKLPPPPPSPPREKVWDFLDPFDTYYTPYTPSRDTRELRDELGVPDLEEDDVVVKEVHGKQKFVAAVSVEEPLGNSGASTSGGGGGGGKASLYQTRPSVSVEKEEMEHEVHIVEKKIVEDSGGDEVRKSKAAVARGGGGVRRGVPEVAKEIEAQFLRAAESGNEIAVMLEVGKHPYGRKNVSSKKLYEGTPSPSVVSSAQSSTSKKAKAEASSSVTAPTYADIEAELALKSRNLSSTLHKLHLWEKKLYDEVKAEEKMRVNHEKKLRKLKRMDERGAENQKVDSTRKLVRSLSTKIRIAIQVVDKISVTINKIRDEELWLQLNELIQGLSKMWKSMLECHKSQCEAIKEARGLGPIRASKNFGGEHLEVTRTLGYELINWIVGFSSWVSAQKGFVRELNSWLMKCLFYEPEETPDGIVPFSPGRIGAPMIFVICNQWEQALDRISEKEVIEAIRRFTTSVLHLWEQDRLATRERIIGHGDPRNMDREEQRIQKEIQELEMKMVLVGPGEDNIVYQSDTSNESLQGSLQRIFEAMERFTEESLKAYVDLLHRAEEEECDSRETDEED

SEQ ID NO: 84194 - protein, 659 aa, Arabidopsis thaliana
  peptide (1)..(659): Ceres Seq. ID no. 12673636
MDSGSGHLDFDSDSDSDDDDDIDSLHSSPLHHHLEDDDSNPKSYLHMNYMKNSYMPPSLVYEQRPSSPQRVHFGESSSSSTSEYNPYLNSNYGSKLPPPPPSPPREKVWDFLDPFDTYYTPYTPSRDTRELRDELGVPDLEEDDVVVKEVHGKQKFVAAVSVEEPLGNSGASTSGGGGGGGKASLYQTRPSVSVEKEEMEHEVHIVEKKIVEDSGGDEVRKSKAAVARGGGGVRRGVPEVAKEIEAQFLRAAESGNEIAVMLEVGKHPYGRKNVSSKKLYEGTPSPSVVSSAQSSTSKKAKAEASSSVTAPTYADIEAELALKSRNLSSTLHKLHLWEKKLYDEVKAEEKMRVNHEKKLRKLKRMDERGAENQKVDSTRKLVRSLSTKIRIAIQVVDKISVTINKIRDEELWLQLNELIQGLSKMWKSMLECHKSQCEAIKEARGLGPIRASKNFGGEHLEVTRTLGYELINWIVGFSSWVSAQKGFVRELNSWLMKCLFYEPEETPDGIVPFSPGRIGAPMIFVICNQWEQALDRISEKEVIEAIRRFTTSVLHLWEQDRLATRERIIGHGDPRNMDREEQRIQKEIQELEMKMVLVGPGEDNIVYQSDTSNESLQGSLQRIFEAMERFTEESLKAYVDLLHRAEEEECDSRETDEED

SEQ ID NO: 84195 - protein, 613 aa, Arabidopsis thaliana
  peptide (1)..(613): Ceres Seq. ID no. 12673637
MNYMKNSYMPPSLVYEQRPSSPQRVHFGESSSSSTSEYNPYLNSNYGSKLPPPPPSPPREKVWDFLDPFDTYYTPYTPSRDTRELRDELGVPDLEEDDVVVKEVHGKQKFVAAVSVEEPLGNSGASTSGGGGGGGKASLYQTRPSVSVEKEEMEHEVHIVEKKIVEDSGGDEVRKSKAAVARGGGGVRRGVPEVAKEIEAQFLRAAESGNEIAVMLEVGKHPYGRKNVSSKKLYEGTPSPSVVSSAQSSTSKKAKAEASSSVTAPTYADIEAELALKSRNLSSTLHKLHLWEKKLYDEVKAEEKMRVNHEKKLRKLKRMDERGAENQKVDSTRKLVRSLSTKIRIAIQVVDKISVTINKIRDEELWLQLNELIQGLSKMWKSMLECHKSQCEAIKEARGLGPIRASKNFGGEHLEVTRTLGYELINWIVGFSSWVSAQKGFVRELNSWLMKCLFYEPEETPDGIVPFSPGRIGAPMIFVICNQWEQALDRISEKEVIEAIRRFTTSVLHLWEQDRLATRERIIGHGDPRNMDREEQRIQKEIQELEMKMVLVGPGEDNIVYQSDTSNESLQGSLQRIFEAMERFTEESLKAYVDLLHRAEEEECDSRETDEED

SEQ ID NO: 84196 - DNA, 3182 bp, Arabidopsis thaliana
  misc_feature (1)..(3182): Ceres Seq. ID no. 12673666
  misc_feature (1)..(3182): Ortholog of  Ceres SEQ ID NO 15170741 as cited in SEQ ID NO 58530
acttgtgtccagaagaaaaagaaggaaaaaaagaacacaccattcaagaaagagagaagcttcttgtgataagaaatttcacagattgggttttaacattccaaggagaggactttgtcttgtctctattcatcttcaagacccttatgagtttcggttcttgagtaaacaacagctaagcacagtctctgagaacttgaggatttggtagtatctgttggaggtataaaaacgaatctttagacatggaagatgatggtggtagtgatggaggcgaaggaaatggtgggttttcacctaattctagctttggggcattcgctgacactgccatggatttggatttcatggatgaactcttgtttgatggatgttggctagagacaacagatagtaagagcttgaagcagacagaacaatctccttcagcttctaccgccatgaatgacaatagccctttcctctgctttggtgagaatccatctcaagataatttctctaatgaagaaacagagagaatgtttcctcaggctgaaaagtttctcctagaagaagctgaggtgggaaaaagttggtggattgctccaagtgcaagtgaaggcccgtcttcatctgtgaaggagaggctactacaagctattagtggtcttaacgaggcggtgcaagataaggacttcttggttcagatatgggtgccaattcagcaggaagggaagagctttcttactacttgggctcagccacatttattcaaccaagaatactccagccttgcagaatacagacatgtttcagagacttataatttcccggctgatgagggtatgaaagattttgtgggtcttcccggtcgtgttttcttgcagaagtttcctgagtggactcctgatgtgcgtttctttagaagagatgaatatccacgcatcaaagaagcacaaaagtgtgatgttcgtggttcacttgcccttcctgttttcgaaagaggtagtgggacttgtttgggtgttgttgagatcgtcacaacaactcagaagatgaattaccggcaagaacttgagaagatgtgtaaagctcttgaggccgtcgatctaaggagttcaagtaacttgaacactccaagctctgagtttctgcaggtctatagtgatttctactgtgctgcattacctgaaataaaagatttcctggccacaatctgcagatcatatgattttcctctagctttgtcatgggcgccgtgtgctcggcaagggaaagttggttcccgacattctgatgagaacttctctgagtgtgtttcaacaatcgattctgcttgttctgtccccgacgaacagagcaaaagtttttgggaggcatgctctgaacaccatctgctccagggggaaggcattgttgggaaagcatttgaagccaccaaactcttttttgtgcccgaagtggccacatttagcaagactaactacccccttgcacaccacgccaagatatctggactacatgctgctttagcagttccattaaagagcaaatctggtttggttgagtttgtgttggaatttttctttccgaaagcatgccttgacactgaagcgcaacaggaaatgctcaagtcactatgtgtgacactgcagcaagatttcaggagttcaaatcttttcatcaaagacctagagttagaagtcgtattacctgtaagagagacaatgctcttctcagaaaacctgctatgtggagcagaaaccgtagagtcgttgacagaaattcaaatgcaagaatcctcatggatcgcccacatgataaaggcaaacgagaagggtaaagatgtatcactttcttgggagtaccagaaagaagatcctaaagagctctcatctggccgggagaacagtcagcttgatccagtccccaataatgttcctttagaagctgagcaattacagcaagcatcaactccaggactcagagtcgacatcggtccaagcacagaatcagcttcgactggtgggggaaatatgttaagcagtaggagaccaggggagaaaaaaagagcaaaaacagaaaagaccattggcttggaggttcttcgacaatactttgctggaagcctcaaggatgcagccaagagcattggtgtttgtccaactaccttgaaaaggatatgcaggcaacatggaataatgcgatggccctcccgaaaaatcaagaaggttgggcattcgttgaagaaactccaactagttatggactctgtccaaggtgcgcagggctctatccaactcgattcattctatacaagcttcccagagttgaactccccaaatatgtctagcaatggcccttccttgaagagtaatgaacagccaagtcatttgaatgctcaaaccgataatggtattatggcagaggaaaaccccaggtcaccatcatcttcttgcagcaagagctctggttcaagcaacaataatgagaatactggaaacattctagttgctgaggatgctgatgcggtgttaaagagagctcatagcgaagcacaactgcataatgtgaatcaggaggaaacaaaatgtcttgcaagaacccagagccataaaacattcaaggagcctcttgttcttgataattcatctccattaacaggtagtagcaacacgagtttaagagctagaggtgccatcaaagtgaaagcgacatttggtgaggccagaatacggtttaccttactcccgagttggggcttcgcagagctgaagcaagagattgctaggcgtttcaacatagatgacatttcctggtttgaccttaagtacctggatgatgataaggagtgggttcttctgacatgtgaagcggatctcgtggaatgcattgacatatatagattaacacagacccacacaattaaaataagtctgaacgaagcttctcaagtcaagctaagtggttcttttggcaacactggtctttcctgaaaaacattaaacgaagttttgtaactgcaaagcaccaggaagattctactgatttttttagcttttgtagaaatctcacttaccttttcagcatgggaatcctgtataaacatatttccagttccctgaacaacattttggaagtggcagtagtaactggtctcctgtattgccctagcagatttttgtataaaagagatgaattcc

SEQ ID NO: 84197 - protein, 909 aa, Arabidopsis thaliana
  peptide (1)..(909): Ceres Seq. ID no. 12673667
MEDDGGSDGGEGNGGFSPNSSFGAFADTAMDLDFMDELLFDGCWLETTDSKSLKQTEQSPSASTAMNDNSPFLCFGENPSQDNFSNEETERMFPQAEKFLLEEAEVGKSWWIAPSASEGPSSSVKERLLQAISGLNEAVQDKDFLVQIWVPIQQEGKSFLTTWAQPHLFNQEYSSLAEYRHVSETYNFPADEGMKDFVGLPGRVFLQKFPEWTPDVRFFRRDEYPRIKEAQKCDVRGSLALPVFERGSGTCLGVVEIVTTTQKMNYRQELEKMCKALEAVDLRSSSNLNTPSSEFLQVYSDFYCAALPEIKDFLATICRSYDFPLALSWAPCARQGKVGSRHSDENFSECVSTIDSACSVPDEQSKSFWEACSEHHLLQGEGIVGKAFEATKLFFVPEVATFSKTNYPLAHHAKISGLHAALAVPLKSKSGLVEFVLEFFFPKACLDTEAQQEMLKSLCVTLQQDFRSSNLFIKDLELEVVLPVRETMLFSENLLCGAETVESLTEIQMQESSWIAHMIKANEKGKDVSLSWEYQKEDPKELSSGRENSQLDPVPNNVPLEAEQLQQASTPGLRVDIGPSTESASTGGGNMLSSRRPGEKKRAKTEKTIGLEVLRQYFAGSLKDAAKSIGVCPTTLKRICRQHGIMRWPSRKIKKVGHSLKKLQLVMDSVQGAQGSIQLDSFYTSFPELNSPNMSSNGPSLKSNEQPSHLNAQTDNGIMAEENPRSPSSSCSKSSGSSNNNENTGNILVAEDADAVLKRAHSEAQLHNVNQEETKCLARTQSHKTFKEPLVLDNSSPLTGSSNTSLRARGAIKVKATFGEARIRFTLLPSWGFAELKQEIARRFNIDDISWFDLKYLDDDKEWVLLTCEADLVECIDIYRLTQTHTIKISLNEASQVKLSGSFGNTGLS

SEQ ID NO: 84198 - protein, 880 aa, Arabidopsis thaliana
  peptide (1)..(880): Ceres Seq. ID no. 12673668
MDLDFMDELLFDGCWLETTDSKSLKQTEQSPSASTAMNDNSPFLCFGENPSQDNFSNEETERMFPQAEKFLLEEAEVGKSWWIAPSASEGPSSSVKERLLQAISGLNEAVQDKDFLVQIWVPIQQEGKSFLTTWAQPHLFNQEYSSLAEYRHVSETYNFPADEGMKDFVGLPGRVFLQKFPEWTPDVRFFRRDEYPRIKEAQKCDVRGSLALPVFERGSGTCLGVVEIVTTTQKMNYRQELEKMCKALEAVDLRSSSNLNTPSSEFLQVYSDFYCAALPEIKDFLATICRSYDFPLALSWAPCARQGKVGSRHSDENFSECVSTIDSACSVPDEQSKSFWEACSEHHLLQGEGIVGKAFEATKLFFVPEVATFSKTNYPLAHHAKISGLHAALAVPLKSKSGLVEFVLEFFFPKACLDTEAQQEMLKSLCVTLQQDFRSSNLFIKDLELEVVLPVRETMLFSENLLCGAETVESLTEIQMQESSWIAHMIKANEKGKDVSLSWEYQKEDPKELSSGRENSQLDPVPNNVPLEAEQLQQASTPGLRVDIGPSTESASTGGGNMLSSRRPGEKKRAKTEKTIGLEVLRQYFAGSLKDAAKSIGVCPTTLKRICRQHGIMRWPSRKIKKVGHSLKKLQLVMDSVQGAQGSIQLDSFYTSFPELNSPNMSSNGPSLKSNEQPSHLNAQTDNGIMAEENPRSPSSSCSKSSGSSNNNENTGNILVAEDADAVLKRAHSEAQLHNVNQEETKCLARTQSHKTFKEPLVLDNSSPLTGSSNTSLRARGAIKVKATFGEARIRFTLLPSWGFAELKQEIARRFNIDDISWFDLKYLDDDKEWVLLTCEADLVECIDIYRLTQTHTIKISLNEASQVKLSGSFGNTGLS

SEQ ID NO: 84199 - protein, 875 aa, Arabidopsis thaliana
  peptide (1)..(875): Ceres Seq. ID no. 12673669
MDELLFDGCWLETTDSKSLKQTEQSPSASTAMNDNSPFLCFGENPSQDNFSNEETERMFPQAEKFLLEEAEVGKSWWIAPSASEGPSSSVKERLLQAISGLNEAVQDKDFLVQIWVPIQQEGKSFLTTWAQPHLFNQEYSSLAEYRHVSETYNFPADEGMKDFVGLPGRVFLQKFPEWTPDVRFFRRDEYPRIKEAQKCDVRGSLALPVFERGSGTCLGVVEIVTTTQKMNYRQELEKMCKALEAVDLRSSSNLNTPSSEFLQVYSDFYCAALPEIKDFLATICRSYDFPLALSWAPCARQGKVGSRHSDENFSECVSTIDSACSVPDEQSKSFWEACSEHHLLQGEGIVGKAFEATKLFFVPEVATFSKTNYPLAHHAKISGLHAALAVPLKSKSGLVEFVLEFFFPKACLDTEAQQEMLKSLCVTLQQDFRSSNLFIKDLELEVVLPVRETMLFSENLLCGAETVESLTEIQMQESSWIAHMIKANEKGKDVSLSWEYQKEDPKELSSGRENSQLDPVPNNVPLEAEQLQQASTPGLRVDIGPSTESASTGGGNMLSSRRPGEKKRAKTEKTIGLEVLRQYFAGSLKDAAKSIGVCPTTLKRICRQHGIMRWPSRKIKKVGHSLKKLQLVMDSVQGAQGSIQLDSFYTSFPELNSPNMSSNGPSLKSNEQPSHLNAQTDNGIMAEENPRSPSSSCSKSSGSSNNNENTGNILVAEDADAVLKRAHSEAQLHNVNQEETKCLARTQSHKTFKEPLVLDNSSPLTGSSNTSLRARGAIKVKATFGEARIRFTLLPSWGFAELKQEIARRFNIDDISWFDLKYLDDDKEWVLLTCEADLVECIDIYRLTQTHTIKISLNEASQVKLSGSFGNTGLS

SEQ ID NO: 84200 - DNA, 4243 bp, Arabidopsis thaliana
  misc_feature (1)..(4243): Ceres Seq. ID no. 12673693
  misc_feature (1)..(4243): Ortholog of  Ceres SEQ ID NO 14313636 as cited in SEQ ID NO 64205
gaattcttatattaacttttgttccttcagttttatacatatagtcatatgacattgaaaaaccagcacaaactccttcagttgatcaccaatagaaacaacaaaatacagtataatatttctaatttttagtgaaaatttacgaatattgtggaaacaacttttatagatgtctgagtctgacttatgtcagtattattttttcttcacttatagcagtataacattcattatttcacattaatgccaaaaaaaaattaaaaactttattatcaaatataatattcaaatctcgatattgacaggtttgccctcgtcctttgcctataaatttgacatgatctacgttcattcaaacaaaaaccaagccacaaagaaattaaatacacacaatgaccaaagaagtttgctccaacattggactttggttattgctcacgttacttattggtaactatgtcgtcaatcttgaagcctcgcaccatgtctacaagagacttacccaaagcactaacaccaaatctccttccgtaaaccagccctaccggaccggtttccatttccaaccccccaaaaattggatgaacggtatgaccaaaatgccatatcaacctcaatctcaatgtttgttattttcattactctcttacctttgcttttatttcgttgtggttcgtgcttggacaaaatggattgatcattggtcatgagcagatcctaatggttagtttttctctcttttatctcctatctttttaatttttttctcttagtcaactcttcaaatccaatagacagatcattttccctgaaaactcgtgttttttattattttataaaacattgattacaccaatatatgtcagcatacaactgtacatttgattattgtattgtattggtcgaccttgtgttacgctgcaggatccttttacactatccatatacttaactaataaaaatacacatatttaaaattttaatacagggcctatgatatacaaaggaatatatcatcttttctaccaatggaacccgaaaggagccgtgtggggtaacatcgtgtgggctcattccacgtcaacagacttaatcaattgggatccacatcctccagctatcttcccatctgcacccttcgatatcaacggatgctggtccggttcagctactattctccctaatggaaaaccggttatcctctataccggaatcgaccctaagaaccaacaggtccaaaacatagccgagcctaagaatctctccgatccttatctccgagaatggaaaaagtcgccgttaaatcctctcatggctcctgacgccgttaacggaatcaacgccagctcgttccgtgacccaaccaccgcgtggctaggccaagacaagaaatggagagtgatcatcggaagcaagattcaccgtcgtggactagccattacttacacgagtaaagactttctaaaatgggaaaaatctccagagccgttgcattacgacgacggaagtggaatgtgggaatgtcctgattttttcccggtcacgaggtttggttctaacggcgtggaaacgtcttcgtttggtgaacctaatgagattttgaagcacgtgttgaaaataagtttggacgacacgaaacatgattattacacgattggtacgtacgatcgggttaaagataaattcgtaccggacaatggtttcaagatggacggtacggctccgagatacgattacggaaagtattacgcgtctaaaacgttttttgactcggctaagaaccggagaatcttgtggggttggactaacgagtcatcgtcggttgaggatgatgttgagaaaggctggtccggtattcaggtaattagttacgcttaactgaaactaataatgtgaatataattgttagagattgaatcaattttttgtttctttcttgattagacgattccaaggaaaatatggcttgatagatcagggaaacaattaattcagtggccggttagggaagttgaaagattacgtacaaaacaagtcaaaaacttacgcaacaaagttctaaagtcaggatctaggcttgaagtctatggtgtgacagctgcacaggtttgattattatcatttttttttgaaaaatcagtaggtatgagaaaattagggttttaaaagtcttgtgatttgtacaggcggatgtagaagtattgttcaaagtgagagacttggagaaagcggatgtgatagaaccaagttggactgatccgcagttgatttgtagcaagatgaatgtatcggttaagtctggtttaggtccattcggtttaatggttttggcatctaagaatttggaagagtacacatctgtttattttagaatcttcaaagcccgtcaaaacagcaataagtacgttgtgctcatgtgcagtgaccaaagcaggtacgtttctttgattaagatcgggattaagtatattaatttttataatcttttgtcacaattcacaaatatttatgtttgttttaaacagtcggtcacaaaagatagatctaaaattgggttccctagaaatatccaaaacttgacttataattttgaggactttttggtgatgtggatttgggacagatcttcgctgaaggaagataatgacaaaacgacatacggagcttttgtggatattaatcctcaccaaccactatccctcagagccttggtaattaagtctcccattttgtattttacgtatatagttttatatattaatttatgttcatatgtaaaaacgcttgcaaatatagggaagaaaaacctcctttttaaaacccatgagagtaattatttaacagcttagcctcttgatcaagactatataatcttcaactatcttgttcaagtattaaggcgaatatttaattgtggatttgttaataaaagtttctgttatttgttgttgttggtgtagattgatcattcagtagtggagagtttcggtggaaagggaagagcatgcattacctcaagagtgtatccaaaattggcaataggaaaaagttcacatctctttgcttttaattatggatatcaaagtgttgatgtcttaaacttaaatgcttggagcatgaactctgcccaaatcagttgatcacgtaaagatacacacatgtaaacacattacatctccattgatttagcatttatatgagttgattttggagagatcttatatggtccactttgtttggttgtcaataaaattgtccaatttgtttgtttgaaataattctaaaaggctaatatatatgacattttatttgacttccttatagtatgacttactattataaaaaggacaattctagagtcggtagtcaaaatcttccaagttccaacgaacgtgataatagtggactttcaatgaatataaacgtaaatatgtatacatgtacatactatatgaaacaaattgagtacgatcttaaagtttggccccccaaaaaataactagtatgtgtatgtataggatcattctatgtaaatcagcacacgtaacttttttctaaaatgcccgacggctatattaccacaagtatgaaattgcccaatatgacgtaacgaacctataacactagcgcctatctatccatagcgatgccaacatgatttattatttattacaacggcgttgggtttacattgttttcatctaaacggcccaccgtttcagcatttaagaccaacaacttcacgtcaacgggtctggtcaactaattaaagcgatcaaaccatctccaccgtccgatactaatccaacttcgtctgtcccgcccaagggcaagcccgtaaatatgttcaccagcaatgatgggagtagcatgtgggacataacattgcatggtagtgttttttccaacagcgcgctaaggctaaatcgttgtcgtttagtaaactgctggctctagatttagaatacgtgcgtgagatgtagccagagcccagagggaagttatggttgaatccggtttgtgtccactttaatttggtgtgtagtgattctcgcctgcacatctctctctttcgaaatattcaagtctcaagcaatagtgatgatatggacatgtaagtagcgaccaaatcaggtgcagtttcatttcattttttgcatttaattttatcagaactcagaagttgaaagtacatattttattaagcaaaaaaaccttctcaaattcagattaatcagaattc

SEQ ID NO: 84201 - protein, 294 aa, Arabidopsis thaliana
  peptide (1)..(294): Ceres Seq. ID no. 12673694
MIYKGIYHLFYQWNPKGAVWGNIVWAHSTSTDLINWDPHPPAIFPSAPFDINGCWSGSATILPNGKPVILYTGIDPKNQQVQNIAEPKNLSDPYLREWKKSPLNPLMAPDAVNGINASSFRDPTTAWLGQDKKWRVIIGSKIHRRGLAITYTSKDFLKWEKSPEPLHYDDGSGMWECPDFFPVTRFGSNGVETSSFGEPNEILKHVLKISLDDTKHDYYTIGTYDRVKDKFVPDNGFKMDGTAPRYDYGKYYASKTFFDSAKNRRILWGWTNESSSVEDDVEKGWSGIQVISYA

SEQ ID NO: 84202 - protein, 189 aa, Arabidopsis thaliana
  peptide (1)..(189): Ceres Seq. ID no. 12673695
MNVSVKSGLGPFGLMVLASKNLEEYTSVYFRIFKARQNSNKYVVLMCSDQSRYVSLIKIGIKYINFYNLLSQFTNIYVCFKQSVTKDRSKIGFPRNIQNLTYNFEDFLVMWIWDRSSLKEDNDKTTYGAFVDINPHQPLSLRALVIKSPILYFTYIVLYINLCSYVKTLANIGKKNLLFKTHESNYLTA

SEQ ID NO: 84203 - protein, 188 aa, Arabidopsis thaliana
  peptide (1)..(188): Ceres Seq. ID no. 12673696
MAPDAVNGINASSFRDPTTAWLGQDKKWRVIIGSKIHRRGLAITYTSKDFLKWEKSPEPLHYDDGSGMWECPDFFPVTRFGSNGVETSSFGEPNEILKHVLKISLDDTKHDYYTIGTYDRVKDKFVPDNGFKMDGTAPRYDYGKYYASKTFFDSAKNRRILWGWTNESSSVEDDVEKGWSGIQVISYA

SEQ ID NO: 84204 - DNA, 1667 bp, Arabidopsis thaliana
  misc_feature (1)..(1667): Ceres Seq. ID no. 12673708
  misc_feature (1)..(1667): Ortholog of  Ceres SEQ ID NO 15178909 as cited in SEQ ID NO 0
atcaataaacacaaaaacaaaagaagaagagaataaacaaaagaagaaaaaaaaagtattaaaacaaaatcaataaaaagagaataaaaaatggtgggttctcacaaagcaagcggagtgcttcttgtgctactagtggttatggccaccacaatagcaaacgggacacctgttgtcgatacagcaaaaaatgcagctacagcagttgaagatacagcaaaaaatgcagctacagcagttggcggtgcagctgcatcagttggtgctaaagtaacaggtgccaaaccaggcggtgcatcacttgatgttaaagcatcaggagccaaaggagacggcaaaactgatgatagtgcggcatttgcggctgcatggaaagaagcttgtgcagcagggagcacgattacagtgccaaaaggtgagtatttggtagagagcctagagttcaaaggtccatgcaaaggtccagtcactttggaattgaatggcaattttaaggctccggctacggtcaagaccactaagcctcatgccggatggattgatttcgaaaatctcgctgatttcactttgaatggaaacaaagctatttttgacggtcaagggtccctcgcttggaaggccaatgactgcgccaaaaccggcaaatgcaactctctccctatcaacatccgattcactggtctaacaaactcaaagattaacagtattacatcaacaaacagcaagcttttccacatgaacatccttaactgcaagaacataactcttacggatatcggtattgatgcacctccggagagtctcaacaccgatggtatccacatcggaaggtccaatggagtcaacttaattggggcaaagattaaaaccggagatgactgcgtttccattggagatggtaccgaaaatctcattgttgagaacgtagaatgtggaccaggacacggaatttccattggaagtcttggaagataccctaatgaacaaccagtaaaaggagtcaccgtgaggaaatgcctcatcaagaacactgacaatggtgttcgcatcaagacatggccaggatctccccccggtatcgcctccaacattcttttcgaagatatcacaatggacaatgttagccttcccgttctcatcgaccaagagtactgtccttatggccactgcaaagctggggtaccatcgaaagtgaagttgtcagacgtgactatcaagaacattaagggaacatcagcaacaaaggtagcagtgaagctaatgtgcagcaaaggcgttccttgcaccaatattgctctctctgacatcaacttggtccacaacggcaaagagggaccagctgtctcagcatgttctaacatcaagcctattctcagcggaaagttggttccagcggcttgcactgaagtcgctaaaccgggtccttaaattaaagttgcatgtccaccataaatccatccaatctggtgaagacgctttgattagggtgcgatgaaaaattttgcaatattttttttgagatataaattatataatagataaaacagagtccattcagggttggagtttatcacctgaagagtgacttgtgtgattgggtagtaatgttatgtgattcgcaatatgcgagagttatgtaaattatttttaaaaaaaaatccatggat

SEQ ID NO: 84205 - protein, 445 aa, Arabidopsis thaliana
  peptide (1)..(445): Ceres Seq. ID no. 12673709
MVGSHKASGVLLVLLVVMATTIANGTPVVDTAKNAATAVEDTAKNAATAVGGAAASVGAKVTGAKPGGASLDVKASGAKGDGKTDDSAAFAAAWKEACAAGSTITVPKGEYLVESLEFKGPCKGPVTLELNGNFKAPATVKTTKPHAGWIDFENLADFTLNGNKAIFDGQGSLAWKANDCAKTGKCNSLPINIRFTGLTNSKINSITSTNSKLFHMNILNCKNITLTDIGIDAPPESLNTDGIHIGRSNGVNLIGAKIKTGDDCVSIGDGTENLIVENVECGPGHGISIGSLGRYPNEQPVKGVTVRKCLIKNTDNGVRIKTWPGSPPGIASNILFEDITMDNVSLPVLIDQEYCPYGHCKAGVPSKVKLSDVTIKNIKGTSATKVAVKLMCSKGVPCTNIALSDINLVHNGKEGPAVSACSNIKPILSGKLVPAACTEVAKPGP

SEQ ID NO: 84206 - protein, 428 aa, Arabidopsis thaliana
  peptide (1)..(428): Ceres Seq. ID no. 12673710
MATTIANGTPVVDTAKNAATAVEDTAKNAATAVGGAAASVGAKVTGAKPGGASLDVKASGAKGDGKTDDSAAFAAAWKEACAAGSTITVPKGEYLVESLEFKGPCKGPVTLELNGNFKAPATVKTTKPHAGWIDFENLADFTLNGNKAIFDGQGSLAWKANDCAKTGKCNSLPINIRFTGLTNSKINSITSTNSKLFHMNILNCKNITLTDIGIDAPPESLNTDGIHIGRSNGVNLIGAKIKTGDDCVSIGDGTENLIVENVECGPGHGISIGSLGRYPNEQPVKGVTVRKCLIKNTDNGVRIKTWPGSPPGIASNILFEDITMDNVSLPVLIDQEYCPYGHCKAGVPSKVKLSDVTIKNIKGTSATKVAVKLMCSKGVPCTNIALSDINLVHNGKEGPAVSACSNIKPILSGKLVPAACTEVAKPGP

SEQ ID NO: 84207 - protein, 230 aa, Arabidopsis thaliana
  peptide (1)..(230): Ceres Seq. ID no. 12673711
MNILNCKNITLTDIGIDAPPESLNTDGIHIGRSNGVNLIGAKIKTGDDCVSIGDGTENLIVENVECGPGHGISIGSLGRYPNEQPVKGVTVRKCLIKNTDNGVRIKTWPGSPPGIASNILFEDITMDNVSLPVLIDQEYCPYGHCKAGVPSKVKLSDVTIKNIKGTSATKVAVKLMCSKGVPCTNIALSDINLVHNGKEGPAVSACSNIKPILSGKLVPAACTEVAKPGP

SEQ ID NO: 84208 - DNA, 1601 bp, Arabidopsis thaliana
  misc_feature (1)..(1601): Ceres Seq. ID no. 12673712
  misc_feature (1)..(1601): Ortholog of  Ceres SEQ ID NO 15178909 as cited in SEQ ID NO 0
aaaaaaagtattaaaacaaaatcaataaaaagagaataaaaaatggtgggttctcacaaagcaagcggagtgcttcttgtgctactagtggttatggccaccacaatagcaaacgggacacctgttgtcgatacagcaaaaaatgcagctacagcagttgaagatacagcaaaaaatgcagctacagcagttggcggtgcagctgcatcagttggtgctaaagtaacaggtgccaaaccaggcggtgcatcacttgatgttaaagcatcaggagccaaaggagacggcaaaactgatgatagtgcggcatttgcggctgcatggaaagaagcttgtgcagcagggagcacgattacagtgccaaaaggtgagtatttggtagagagcctagagttcaaaggtccatgcaaaggtccagtcactttggaattgaatggcaattttaaggctccggctacggtcaagaccactaagcctcatgccggatggattgatttcgaaaatctcgctgatttcactttgaatggaaacaaagctatttttgacggtcaagggtccctcgcttggaaggccaatgactgcgccaaaaccggcaaatgcaactctctccctatcaacatccgattcactggtctaacaaactcaaagattaacagtattacatcaacaaacagcaagcttttccacatgaacatccttaactgcaagaacataactcttacggatatcggtattgatgcacctccggagagtctcaacaccgatggtatccacatcggaaggtccaatggagtcaacttaattggggcaaagattaaaaccggagatgactgcgtttccattggagatggtaccgaaaatctcattgttgagaacgtagaatgtggaccaggacacggaatttccattggaagtcttggaagataccctaatgaacaaccagtaaaaggagtcaccgtgaggaaatgcctcatcaagaacactgacaatggtgttcgcatcaagacatggccaggatctccccccggtatcgcctccaacattcttttcgaagatatcacaatggacaatgttagccttcccgttctcatcgaccaagagtactgtccttatggccactgcaaagctggggtaccatcgaaagtgaagttgtcagacgtgactatcaagaacattaagggaacatcagcaacaaaggtagcagtgaagctaatgtgcagcaaaggcgttccttgcaccaatattgctctctctgacatcaacttggtccacaacggcaaagagggaccagctgtctcagcatgttctaacatcaagcctattctcagcggaaagttggttccagcggcttgcactgaagtcgctaaaccgggtccttaaattaaagttgcatgtccaccataaatccatccaatctggtgaagacgctttgattagggtgcgatgaaaaattttgcaatattttttttgagatataaattatataatagataaaacagagtccattcagggttggagtttatcacctgaagagtgacttgtgtgattgggtagtaatgttatgtgattcgcaatatgcgagagttatgtaaattattttt

SEQ ID NO: 84209 - protein, 445 aa, Arabidopsis thaliana; identical to SEQ ID NO: 84205
  peptide (1)..(445): Ceres Seq. ID no. 12673713

SEQ ID NO: 84210 - protein, 428 aa, Arabidopsis thaliana; identical to SEQ ID NO: 84206
  peptide (1)..(428): Ceres Seq. ID no. 12673714

SEQ ID NO: 84211 - protein, 230 aa, Arabidopsis thaliana; identical to SEQ ID NO: 84207
  peptide (1)..(230): Ceres Seq. ID no. 12673715

SEQ ID NO: 84212 - DNA, 510 bp, Arabidopsis thaliana
  misc_feature (1)..(510): Ceres Seq. ID no. 12673731
  misc_feature (1)..(510): Ortholog of  Ceres SEQ ID NO 12556794 as cited in SEQ ID NO 23
  misc_feature (1)..(510): Ortholog of  Ceres SEQ ID NO 13595787 as cited in SEQ ID NO 59785
aaaaaaaaaacagaaagtaacatgagatctctcttattagccgtgtgcctggttcttgctttacactgcggtgaagcagccgtgtcttgcaacacggtgattgcggatctttacccttgcttatcctacgtgactcagggcggaccggtcccaaccctctgctgcaacggtctcacaacactcaagagtcaggctcaaacttctgtggaccgtcagggggtctgtcgttgcatcaaatctgctattggaggactcactctctctcctagaaccatccaaaatgctttggaattgccttctaaatgtggtgtcgatctcccttacaagttcagcccttccactgactgcgacagtatccagtgagacaagcagaaaatcttaaaggaagctactacaagaactataataacctaataattaataaatgagggcattggtttgctagttgctaattgatcagtgatgtattgtcattttgaatgttctaatatcagcaggcacttatctctg

SEQ ID NO: 84213 - protein, 120 aa, Arabidopsis thaliana
  peptide (1)..(120): Ceres Seq. ID no. 12673732
KKKTESNMRSLLLAVCLVLALHCGEAAVSCNTVIADLYPCLSYVTQGGPVPTLCCNGLTTLKSQAQTSVDRQGVCRCIKSAIGGLTLSPRTIQNALELPSKCGVDLPYKFSPSTDCDSIQ

SEQ ID NO: 84214 - protein, 113 aa, Arabidopsis thaliana; identical to SEQ ID NO: 36177
  peptide (1)..(113): Ceres Seq. ID no. 12673733

SEQ ID NO: 84215 - DNA, 1074 bp, Arabidopsis thaliana
  misc_feature (1)..(1074): Ceres Seq. ID no. 12673761
  misc_feature (1)..(1074): Ortholog of  Ceres SEQ ID NO 13594176 as cited in SEQ ID NO 59144
gctttttcgttgctctttctcataaattcgtggagtttttgttatgtgtgttgatcttctttctgaggttgtagctggatcggcagcgtggttaggccgtggcctttcctgtgtttgtgttcagggtagagacggtgaccctcgtccttcatttgatctaacgcctgctcaggaggaatgcctgcagaggttgcaaagccgcattgatgttgcttatgacagctcaatacctcagcatcaggaagctctaaaggatctttggaaacttgcatttcctgaagaagagctacacggaattgtatctgatcagtggaaggaaatgggttggcagggaaaagatccatcgacagattttaggggtggtggttttatttctctcgaaaacttgttgtacttcgctaggaaattcccgaaatctttccacggccttctgcggaaacaggttggcgatcgttctgtgtgggaatacccctttgctgttgctggcatcaatataacattcatgctcatccagatgcttgaccttgaagcagtgaaaccacgaagtattgttggggaaacatttctaagattcctttcggtgaacgagtctgcgtttgaccttctttattgcattgccttcaagctaatggatcagcaatggctatccatgcgtgcttcatacatggagtttaacactgtgatgaaatcaacaaggcggcaactggagagagagattatgattgaagacattacaagtctcgaagatttgccatcatacagtcttctcagtcaatagcaaatagcttaccaaaaactactttgtaagtagaaagatctaacagctcagaaaccctatatcaaagctaaaacaacagcagagcaagtaagcaagcaaaaaagaagacaaggtttctctctctctcgctcttcactccatcttcctcgatattagtgttggttccatgaaatttgggttgttatttctatgaaaccagggtcagattttgtttcttatggggtcagattttctaacttgtggtgcttgtaaaacgttgttggttagttggtgttttgggctaataaatcatttgg

SEQ ID NO: 84216 - protein, 244 aa, Arabidopsis thaliana
  peptide (1)..(244): Ceres Seq. ID no. 12673762
MCVDLLSEVVAGSAAWLGRGLSCVCVQGRDGDPRPSFDLTPAQEECLQRLQSRIDVAYDSSIPQHQEALKDLWKLAFPEEELHGIVSDQWKEMGWQGKDPSTDFRGGGFISLENLLYFARKFPKSFHGLLRKQVGDRSVWEYPFAVAGINITFMLIQMLDLEAVKPRSIVGETFLRFLSVNESAFDLLYCIAFKLMDQQWLSMRASYMEFNTVMKSTRRQLEREIMIEDITSLEDLPSYSLLSQ

SEQ ID NO: 84217 - protein, 152 aa, Arabidopsis thaliana; identical to SEQ ID NO: 39197
  peptide (1)..(152): Ceres Seq. ID no. 12673763

SEQ ID NO: 84218 - DNA, 1296 bp, Arabidopsis thaliana
  misc_feature (1)..(1296): Ceres Seq. ID no. 12673764
  misc_feature (1)..(1296): Ortholog of  Ceres SEQ ID NO 14311579 as cited in SEQ ID NO 51717
aaaatccggtcggcgacgagacttactttcgccgcaaaatttgttctccggtaccggatatttacgtatctgttctcaaattttaccattcccaccactaaaaccctagattaaaagcttcaattaccggaaaaagtctctacttaagagatttatctgtttgttgtcttaaatcacaggaagagaatggattttcttaaggcaacgattatagttgccctaatttgcaatttcgcctcactggcgtcttctgttcctttcatagttctgcatggaattggggataaatgcagtaatgcaggagtgacacaattcacagagcttttaagcgattggtctggttctcaaggatattgcttggagattgggaatggctcatgggactcatggactatgcctctccttgatcagacatcagttgtttgtgagaaggtgaaaagtatgccagagcttagtgacggttacagcattgtggggctttctcagggtaacatgattggtcgagctctcattgagttttgcgatggagcaccacctgttaagagttttgtttcggtagcgggtcctcatgctggcactgcatcgattccgttctgtggtgctacctggatttgcatcatgttggacagtatgatcaaagcagagatctatagcgactatatgcaggaacatttggctcctagcggttttctcaaaatcccaactgacatagcgggttacatggaaggctgtaggtttctcccaaagctaaacaacgaacttccagtcaaaaactcgacttataaggagaggttctcgagtttggagaatcttgtgcttattatgtttgagcatgacacaatattgatacctaaagaaacctcatggtttggatattatcctgatgggtctttcaagaccattcttccgccgcaagagaccaagctatatactgaagactggattggtttgagaaccttagatgaagctggaaaagtgaagttcgttaacgtctctggaaatcatcttcagatatctcatacagacatgaagaagcatatagtgccatacctctgtgataaatcatcgtcgtcatcatccacaacaatggcagtttccggatcatcttcctcacaccagtggcttccaagtgtagggaacattattatggatcttattggtccagaagtggatcagcttcagcttgtgctacgtcatgtgtaaatctgatgtcctgtgttgttgtttgttctcttactaaacacgatcgtctcgtgatatgtttgtaacttgaagataaaacaagaaaactgttcc

SEQ ID NO: 84219 - protein, 338 aa, Arabidopsis thaliana; identical to SEQ ID NO: 41246
  peptide (1)..(338): Ceres Seq. ID no. 12673765

SEQ ID NO: 84220 - protein, 269 aa, Arabidopsis thaliana; identical to SEQ ID NO: 41247
  peptide (1)..(269): Ceres Seq. ID no. 12673766

SEQ ID NO: 84221 - protein, 253 aa, Arabidopsis thaliana; identical to SEQ ID NO: 41248
  peptide (1)..(253): Ceres Seq. ID no. 12673767

SEQ ID NO: 84222 - DNA, 2115 bp, Arabidopsis thaliana
  misc_feature (1)..(2115): Ceres Seq. ID no. 12673792
  misc_feature (1)..(2115): Ortholog of  Ceres SEQ ID NO 15176499 as cited in SEQ ID NO 52857
actttggtctcgttgagcctttcgtctatctctcacctgaaagaaagacgttcagctttctctttccaaaatcaaaagctctccgatcagtttctccggcttaggaaattaattgaaggaaggtgatgagaggtactactgagaatacggatctgttcgatcccaaaacccaaatggatcctgacttcactcgtcatggttcttcctccgacggcgattttggattcgcttttaacgacagtaacttctctgatcgtttgcttcggatcgagatcatgggtggaccttcggattctcggtctgaagttgaagggtgtacgagtatcgctgattgggctcgtcatcgcaagagaagaagagaagatatcaagaaggaatctggtgtcacgatttcagacattgtggcatgtcctgaggagcagattttaactgatgaacaacctgacatggatggatgtcctggtggtgagaatcctgatgatgaaggaggagaggcaatggttgaagaagctttatcaggtgatgaagaggaaacgtctagtgagccaaactggggaatggattgttctacagttgttagggttaaagaacttcatattagttctcctattttagctgccaaaagccctttcttttacaagttgttctccaatggaatgagggaatctgagcaaaggcatgtcacccttaggattaatgcatcagaggaagctgctttgatggagcttttaaactttatgtatagcaatgcggtatctgtcaccacagcacctgccttattagatgtgttgatggctgctgataagtttgaagttgcctcttgtatgaggtactgcagtagacttctccgtaatatgcctatgactccagagtctgccctgctctatctcgagcttccctctagtgttctaatggccaaagctgttcagcctttaactgatgctgcaaaacagttccttgcagcccgctacaaggatattaccaagtttcatgaggaggtaatgtctctacctttggctggaattgaggcaattctatcaagcgatgaactccaaattgcatcagaggatgcagtttatgattttatcttgaagtgggcaagggcgcaatacccttgtttggaagagcgaagagagattctcgggtcacgccttgcactctccatccgcttcccattcatgacatgccgaaagctgaagaaagtgctgacttgcagtgactttgagcatgaaatagcatcaaagcttgttctagaagctcttttcttcaaagcagaagccccacacagacaacgtagcctagcctccgaagaatctgcatccctgaaccgccgcctgatagagagggcttacaaatacagacccgtcaaagtggtcgagtttgagcttcctagaccgcagtgtgtagtctacctagacttgaaaagagaagaatgtgggggactgttcccgtcgggtagagtgtattcgcaggcctttcacttgggaggtcaagggtttttcctgtcagctcactgcaacatggaccaacagagctcgttccactgtttcgggctgttcctagggatgcaggagaaagggtcggtgagtttcggagtggactatgaattctcggcaaggtcaaagcccgcagaggatttcataagcaaatacaaagggaactacacattcacaggagggaaagcagtaggttacagaaacctgtttggggtcccatggacgtcttttatagcggaagatagtcaatacttcatcaatggcattctccatctcagagcagagcttaccatcaaaaggtctacagatccttagtgaccgtttacttctcaattgtcactgtctctctttcctttacctgctgctaaatctctcgctctctctaacttgccttttttttcttttcttttataaggcttgaagaagactaataaagcttataaaagtaaggttaaaaacgtttcgacgacaacgttataagaagaatgtaaatgcgttctttttttctatctacccttactcttttggctttggattataagtttaactcttcaatgaaattcttagcgtagagattcttgtattatgaacgaagttgtgaacagaaaagaacgaacgt

SEQ ID NO: 84223 - protein, 561 aa, Arabidopsis thaliana
  peptide (1)..(561): Ceres Seq. ID no. 12673793
MRGTTENTDLFDPKTQMDPDFTRHGSSSDGDFGFAFNDSNFSDRLLRIEIMGGPSDSRSEVEGCTSIADWARHRKRRREDIKKESGVTISDIVACPEEQILTDEQPDMDGCPGGENPDDEGGEAMVEEALSGDEEETSSEPNWGMDCSTVVRVKELHISSPILAAKSPFFYKLFSNGMRESEQRHVTLRINASEEAALMELLNFMYSNAVSVTTAPALLDVLMAADKFEVASCMRYCSRLLRNMPMTPESALLYLELPSSVLMAKAVQPLTDAAKQFLAARYKDITKFHEEVMSLPLAGIEAILSSDELQIASEDAVYDFILKWARAQYPCLEERREILGSRLALSIRFPFMTCRKLKKVLTCSDFEHEIASKLVLEALFFKAEAPHRQRSLASEESASLNRRLIERAYKYRPVKVVEFELPRPQCVVYLDLKREECGGLFPSGRVYSQAFHLGGQGFFLSAHCNMDQQSSFHCFGLFLGMQEKGSVSFGVDYEFSARSKPAEDFISKYKGNYTFTGGKAVGYRNLFGVPWTSFIAEDSQYFINGILHLRAELTIKRSTDP

SEQ ID NO: 84224 - protein, 545 aa, Arabidopsis thaliana
  peptide (1)..(545): Ceres Seq. ID no. 12673794
MDPDFTRHGSSSDGDFGFAFNDSNFSDRLLRIEIMGGPSDSRSEVEGCTSIADWARHRKRRREDIKKESGVTISDIVACPEEQILTDEQPDMDGCPGGENPDDEGGEAMVEEALSGDEEETSSEPNWGMDCSTVVRVKELHISSPILAAKSPFFYKLFSNGMRESEQRHVTLRINASEEAALMELLNFMYSNAVSVTTAPALLDVLMAADKFEVASCMRYCSRLLRNMPMTPESALLYLELPSSVLMAKAVQPLTDAAKQFLAARYKDITKFHEEVMSLPLAGIEAILSSDELQIASEDAVYDFILKWARAQYPCLEERREILGSRLALSIRFPFMTCRKLKKVLTCSDFEHEIASKLVLEALFFKAEAPHRQRSLASEESASLNRRLIERAYKYRPVKVVEFELPRPQCVVYLDLKREECGGLFPSGRVYSQAFHLGGQGFFLSAHCNMDQQSSFHCFGLFLGMQEKGSVSFGVDYEFSARSKPAEDFISKYKGNYTFTGGKAVGYRNLFGVPWTSFIAEDSQYFINGILHLRAELTIKRSTDP

SEQ ID NO: 84225 - protein, 511 aa, Arabidopsis thaliana
  peptide (1)..(511): Ceres Seq. ID no. 12673795
MGGPSDSRSEVEGCTSIADWARHRKRRREDIKKESGVTISDIVACPEEQILTDEQPDMDGCPGGENPDDEGGEAMVEEALSGDEEETSSEPNWGMDCSTVVRVKELHISSPILAAKSPFFYKLFSNGMRESEQRHVTLRINASEEAALMELLNFMYSNAVSVTTAPALLDVLMAADKFEVASCMRYCSRLLRNMPMTPESALLYLELPSSVLMAKAVQPLTDAAKQFLAARYKDITKFHEEVMSLPLAGIEAILSSDELQIASEDAVYDFILKWARAQYPCLEERREILGSRLALSIRFPFMTCRKLKKVLTCSDFEHEIASKLVLEALFFKAEAPHRQRSLASEESASLNRRLIERAYKYRPVKVVEFELPRPQCVVYLDLKREECGGLFPSGRVYSQAFHLGGQGFFLSAHCNMDQQSSFHCFGLFLGMQEKGSVSFGVDYEFSARSKPAEDFISKYKGNYTFTGGKAVGYRNLFGVPWTSFIAEDSQYFINGILHLRAELTIKRSTDP

SEQ ID NO: 84226 - DNA, 975 bp, Arabidopsis thaliana
  misc_feature (1)..(975): Ceres Seq. ID no. 12673820
  misc_feature (1)..(975): Ortholog of  Ceres SEQ ID NO 14313302 as cited in SEQ ID NO 51621
agaaagaaagaaaaaaaagaaacaaataattccaaaaccttctctcttaatcaaaatcaagaaacttacaagatctggtgaaaaccatggaagaaggagattttttcaactgctgtttcagcgagattagtagtggcatgaccatgaataagaagaagatgaagaagagcaataaccaaaagaggtttagcgaggaacagatcaagtcacttgagcttatatttgagtctgagacgaggcttgagccgaggaagaaggttcaggtagctagagagctagggctgcaaccaagacaagtggctatatggtttcaaaacaagagggctcgatggaaaactaagcaacttgagaaagagtataacactcttagagccaattacaacaatttggcttcacaatttgaaatcatgaagaaagaaaagcaatctctggtctctgagctgcagagactaaacgaagagatgcaaaggcctaaagaagaaaagcatcatgagtgttgtggtgatcaaggactggctctaagcagcagcacagagtcgcataatggaaagagtgagccagaagggaggttagaccaagggagtgttctatgtaatgatggtgattacaacaacaacattaaaacagagtattttgggttcgaggaagagactgatcatgagctgatgaacattgtggagaaagctgatgatagttgcttgacatcttctgagaattggggaggtttcaattctgattctctcttagaccaatctagcagcaattaccctaactggtgggagttttggtcataaaagcatataagaaaaaaacagaacataagcgaagagaaagagtgtgaatagtttgtaaattatgtgttaagaaaaataaatttagtttagtttaaatcttgtttcgatctatgtatctactatgttcaatactctttgtagctaattagtagcttataatgagactagaaaagttttgaag

SEQ ID NO: 84227 - protein, 235 aa, Arabidopsis thaliana; identical to SEQ ID NO: 22083
  peptide (1)..(235): Ceres Seq. ID no. 12673821

SEQ ID NO: 84228 - protein, 218 aa, Arabidopsis thaliana; identical to SEQ ID NO: 22084
  peptide (1)..(218): Ceres Seq. ID no. 12673822

SEQ ID NO: 84229 - protein, 216 aa, Arabidopsis thaliana; identical to SEQ ID NO: 22085
  peptide (1)..(216): Ceres Seq. ID no. 12673823

SEQ ID NO: 84230 - DNA, 2150 bp, Arabidopsis thaliana
  misc_feature (1)..(2150): Ceres Seq. ID no. 12673831
  misc_feature (1)..(2150): Ortholog of  Ceres SEQ ID NO 15225826 as cited in SEQ ID NO 64774
aattttcgttgaacacaagtgacgaatttgagagagaaaaaaaaagaaaatcagagataaagaatttgagtttcttggaattaaaggatcgattttgttgaagtgaaattgaaattgattgtgaaaagagaaagagactgatggtagcagaagcagaggttgtgtttcaacagagtttaccggcggttctggagattgagttgtttgacggagtttcctccgccgttaaatctcccgtttcttctccgaaattgggttttactcagtcaacggcgtcggtttccggaagtttaacgacttctcctgtggtaagtcttgtttaaagtttacatttttattttctgggtgagaatttaagaagctgggttctgaaacgtaattagaaattcgactgaattattggttttagtctattaggaatcatcaaataagatgactttattgtaaatattttgcaaacatatccttggatctcttaggcttagaggacctctagttcatgtgtgtttgcgtgtcgtagcaaatatagatgcttgttgtctataactttgccttaatgaagcaactttaaagctgttggagaagccctttgtagttattgtgtgttgttaactgtcttgtcttcactgcttgtgttttatttgttgctatactcaattgagcatccgtgtataccttttatttagcaggctgatatctttccagagggtgattgcgatcctagtgtcttggattatattccgaccatccggtctggaagctttgctgatattgggccaaagagaaacatggaagatgaacacattcgcatagacgatttatcttctcaagttggttccctttttgagttgccgaagcctagtgctttctatgcggtttttgacgggcatggaggaccagaagcagcagcatacgtacgggaaaatgccattaggtttttctttgaagatgagcagtttccacagacatcggaagtgagtagtgtttatgtggaagaagttgagacttcattgagaaatgcgtttcttcaagctgatctagctttggcagaggattgcagtatcagcgattcttgtggtaccaccgctctgactgctcttatttgtggaaggtacgtgtttcattcagttttgtttagttctcaatctatctttagaatcttaagagatctcttgcgcatatacgaagatgtgcacaaaggtaaataaatctattgttaggatcttaagagagctcttacatatactagattgtaagtatataacctgtgacatgagcaatattggctatggttttatacttttggttactctttctgttgttgtctttggggtttaactgtgattttctcatgggatacttatgttcttgtcttttgcagactcttaatggttgcaaatgccggagactgcagagcggttctatgcaggaaaggcagagcgatagacatgtctgaagaccataaaccgattaatctacttgagagaagaagagtggaggaatccggcggtttcatcactaatgacggttacctaaatgaagtcctagctgtaacccgagctctgggcgactgggatttaaaactgccacacggctctcaatctccactgatctcggaaccagaaatcaagcagataactctaactgaagacgatgagtttcttgtgattgggtgcgatgggatttgggatgtcttgacgagccaagaagcggttagcattgttaggcgtggcttaaaccggcacaacgatccaacaagatgtgcgcgagagctagtgatggaggctctggggcggaactcatttgataatttaactgcggtggtggtatgtttcatgacaatggacagaggggacaagccggtggtgccattggagaagagaaggtgttttagtctttcgcctgaagctttctgtagcttgaggaatctgttggatggctgaaactagtgtgttttctggtgaaaaccgatgattatataattgatgatgacgaataatctctcccacggctgcttttgtatttagagattttacgcagctgagagaactcttttgagatatacttgtgtattaagtgtgtttgttgtgtgcacagtatgcgattacagttttgtgtacatacatactgttagttgtctatgaataacg

SEQ ID NO: 84231 - protein, 184 aa, Arabidopsis thaliana
  peptide (1)..(184): Ceres Seq. ID no. 12673832
MVANAGDCRAVLCRKGRAIDMSEDHKPINLLERRRVEESGGFITNDGYLNEVLAVTRALGDWDLKLPHGSQSPLISEPEIKQITLTEDDEFLVIGCDGIWDVLTSQEAVSIVRRGLNRHNDPTRCARELVMEALGRNSFDNLTAVVVCFMTMDRGDKPVVPLEKRRCFSLSPEAFCSLRNLLDG

SEQ ID NO: 84232 - protein, 164 aa, Arabidopsis thaliana
  peptide (1)..(164): Ceres Seq. ID no. 12673833
MSEDHKPINLLERRRVEESGGFITNDGYLNEVLAVTRALGDWDLKLPHGSQSPLISEPEIKQITLTEDDEFLVIGCDGIWDVLTSQEAVSIVRRGLNRHNDPTRCARELVMEALGRNSFDNLTAVVVCFMTMDRGDKPVVPLEKRRCFSLSPEAFCSLRNLLDG

SEQ ID NO: 84233 - protein, 139 aa, Arabidopsis thaliana
  peptide (1)..(139): Ceres Seq. ID no. 12673834
MEDEHIRIDDLSSQVGSLFELPKPSAFYAVFDGHGGPEAAAYVRENAIRFFFEDEQFPQTSEVSSVYVEEVETSLRNAFLQADLALAEDCSISDSCGTTALTALICGRYVFHSVLFSSQSIFRILRDLLRIYEDVHKGK

SEQ ID NO: 84234 - DNA, 1756 bp, Arabidopsis thaliana
  misc_feature (1)..(1756): Ceres Seq. ID no. 12673864
  misc_feature (1)..(1756): Ortholog of  Ceres SEQ ID NO 13600220 as cited in SEQ ID NO 0
gtggttaccgtttccgcgacaagctacattgatgccttcactagaaacgattttccaaatgatttcctcttcggagccgccacttctgcttaccaatgggaaggagcttttgatgaagacggaaaatctcctagcgtctgggatacaacctcccactgtgatagtggaagtaataatggagatatagcatgtgatgggtatcacaaatacaaggaagatgttatgttgatggcagaaatgggcttagaatcattcagattctctatctcctggtcaagacttatacctaaccctttttgtctgtgtcatgtttcagatggaagaggacgcattaacccaaaaggtctattgttttacaagaatctcatcaaagagctacgaagccatggaattgaaccacaggttacactttaccattatgatcttcctcagtctctggaagatgagtatggaggatggatcaaccgcaaaatcatgtaaaaggacaattaaagattctgatataaaaaatatggctagaaaataaagaatatttgttatattgcagagaagacttcactgcttttgcagatgtatgcttcagagagtttggggaggatgtgaagttatggactaaaatcaacgaagctactttattcgccattggttcttatggcgacggaatgaggtatggacattgtcctcctatgaattactctaccgcaaatgtttgtacggaaacatatattgcaggccataacatgttgctagctcactcctctgcttcaaatttgtataaactgaagtacaagactaagcaaagaggatccgtaggccttagtatatatgcttatgggctatctccttatacggactccaaggacgatgaaaccgcaactgaaagagctgaagctttcctctttggctggatgttaaagcctttggtagttggggattatccggatataatgaagagaaccttggggtcgagattaccggttttctcagaagaagagtcaaaacaagtgaaaggatcatctgactttgtaggagttgtacactacaacacattctatgtcacaaaccgacccgcaccttctctcgttaccagcattaacaaactcttctttgcagacattggcgcatatctgatcggtaagcctagtttcttttcattcgatcgaactcttttagttgatatataactcttcttcattggacagccgctgggaatgcttcattattcgagtttgatgctgttccatggggtctggaaggtattcttcagcatataaagcagagctataacaatcctccaatctacattcttgaaaatggtaaaccgatgaaacatggttcaacgctacaagacacaccaagagctgaattcattcaagcttacattggtgctgtgcacaacgccatcacgaatggatcggacacgagaggttactttgtatggtcgatgattgatttgtatgagttaataggtagatatatgaccagctatggaatgtactatgtgaatttcagtgatcctggtcgcaagaggtctccaaagctctctgcttcttggtacactggtttcctcaatggtactattgatgttgcttctcaagatactattcagttgcagagaaaatgctcaggctcttcgtccttgtaatctatttaactaaatcatcctagttttgtttggttttcatttcatctatcgtatgaaaaaaaactcagtggtttgataagatttggatatgaataatgaaactgtcttgtg

SEQ ID NO: 84235 - protein, 173 aa, Arabidopsis thaliana
  peptide (1)..(173): Ceres Seq. ID no. 12673865
MRYGHCPPMNYSTANVCTETYIAGHNMLLAHSSASNLYKLKYKTKQRGSVGLSIYAYGLSPYTDSKDDETATERAEAFLFGWMLKPLVVGDYPDIMKRTLGSRLPVFSEEESKQVKGSSDFVGVVHYNTFYVTNRPAPSLVTSINKLFFADIGAYLIGKPSFFSFDRTLLVDI

SEQ ID NO: 84236 - protein, 165 aa, Arabidopsis thaliana
  peptide (1)..(165): Ceres Seq. ID no. 12673866
MNYSTANVCTETYIAGHNMLLAHSSASNLYKLKYKTKQRGSVGLSIYAYGLSPYTDSKDDETATERAEAFLFGWMLKPLVVGDYPDIMKRTLGSRLPVFSEEESKQVKGSSDFVGVVHYNTFYVTNRPAPSLVTSINKLFFADIGAYLIGKPSFFSFDRTLLVDI

SEQ ID NO: 84237 - protein, 159 aa, Arabidopsis thaliana
  peptide (1)..(159): Ceres Seq. ID no. 12673867
VVTVSATSYIDAFTRNDFPNDFLFGAATSAYQWEGAFDEDGKSPSVWDTTSHCDSGSNNGDIACDGYHKYKEDVMLMAEMGLESFRFSISWSRLIPNPFCLCHVSDGRGRINPKGLLFYKNLIKELRSHGIEPQVTLYHYDLPQSLEDEYGGWINRKIM

SEQ ID NO: 84238 - DNA, 1002 bp, Arabidopsis thaliana
  misc_feature (1)..(1002): Ceres Seq. ID no. 12673868
  misc_feature (1)..(1002): Ortholog of  Ceres SEQ ID NO 15227018 as cited in SEQ ID NO 0
ctacaaatatatataacaacagccttcaatcttccatatctatctctctccctctgctcggcgagaataatcacttaatcagacatcagaagcagcatgatgaagttcaagttccagtacgaggaggaatacatcaaaaactcgagagacgttgagttgttcgcttgcagatggcttccttcttcttctccccgagctctagtcttcctctgccatggttatggaatggagtgcagtagcttcatgagagaatgcggaatacggctggcatcagcgggatatgcagtgtttgggatggactacgaggggcatggtcggtccaagggtgctcgttgctatataaaaaaattcagtaatatagtaaatgactgctttgactattacacatccatctctgcacaagaagaatacaaagagaaaggtagatttttgtatggagaatcaatgggaggtgcagttgctttgttgcttcacaagaaagatccttctttttggaacggggctcttctcgttgctcccatgtgtaagatatcagagaaggtgaaaccacacccagtagtcataaatctactaacgagagttgaagatattataccaaaatggaagatagttcctacaaaagatgttatcgatgctgccttcaaggatccggtcaagcgcgaagagataaggaacaacaagctgatatatcaagacaagccaagacttaaaaccgcacttgaaatgcttagaacgagcatggaccttgaagacactctccacgagatcacattgcctttctttgtccttcacggtgaagcagacattgtgactgatccagagataagcaaagccttgttcgagaaggcaagcacacgcgacaaaaccattaaactttacccaggaatgtggcatggattaacttctggtgagcctgatgctaacgttgacctcgtttttgctgacattgtcaattggcttgatgctcgtaccggcgactccgcttctctgacagtcactccc

SEQ ID NO: 84239 - protein, 302 aa, Arabidopsis thaliana
  peptide (1)..(302): Ceres Seq. ID no. 12673869
MMKFKFQYEEEYIKNSRDVELFACRWLPSSSPRALVFLCHGYGMECSSFMRECGIRLASAGYAVFGMDYEGHGRSKGARCYIKKFSNIVNDCFDYYTSISAQEEYKEKGRFLYGESMGGAVALLLHKKDPSFWNGALLVAPMCKISEKVKPHPVVINLLTRVEDIIPKWKIVPTKDVIDAAFKDPVKREEIRNNKLIYQDKPRLKTALEMLRTSMDLEDTLHEITLPFFVLHGEADIVTDPEISKALFEKASTRDKTIKLYPGMWHGLTSGEPDANVDLVFADIVNWLDARTGDSASLTVTP

SEQ ID NO: 84240 - protein, 301 aa, Arabidopsis thaliana
  peptide (1)..(301): Ceres Seq. ID no. 12673870
MKFKFQYEEEYIKNSRDVELFACRWLPSSSPRALVFLCHGYGMECSSFMRECGIRLASAGYAVFGMDYEGHGRSKGARCYIKKFSNIVNDCFDYYTSISAQEEYKEKGRFLYGESMGGAVALLLHKKDPSFWNGALLVAPMCKISEKVKPHPVVINLLTRVEDIIPKWKIVPTKDVIDAAFKDPVKREEIRNNKLIYQDKPRLKTALEMLRTSMDLEDTLHEITLPFFVLHGEADIVTDPEISKALFEKASTRDKTIKLYPGMWHGLTSGEPDANVDLVFADIVNWLDARTGDSASLTVTP

SEQ ID NO: 84241 - protein, 259 aa, Arabidopsis thaliana
  peptide (1)..(259): Ceres Seq. ID no. 12673871
MECSSFMRECGIRLASAGYAVFGMDYEGHGRSKGARCYIKKFSNIVNDCFDYYTSISAQEEYKEKGRFLYGESMGGAVALLLHKKDPSFWNGALLVAPMCKISEKVKPHPVVINLLTRVEDIIPKWKIVPTKDVIDAAFKDPVKREEIRNNKLIYQDKPRLKTALEMLRTSMDLEDTLHEITLPFFVLHGEADIVTDPEISKALFEKASTRDKTIKLYPGMWHGLTSGEPDANVDLVFADIVNWLDARTGDSASLTVTP

SEQ ID NO: 84242 - DNA, 1222 bp, Arabidopsis thaliana
  misc_feature (1)..(1222): Ceres Seq. ID no. 12673934
  misc_feature (1)..(1222): Ortholog of  Ceres SEQ ID NO 13582619 as cited in SEQ ID NO 56520
  misc_feature (1)..(1222): Ortholog of  Ceres SEQ ID NO 12616221 as cited in SEQ ID NO 63291
atttgaacatggcatatcttataaagaaaaaaattctcgttatgagattcattaaacttttctatttattttcaataatatcctacaatttttttgttgattaaccaagttaagttttaaaagctaaatgtttctaaacaaaaggacaaaatttatactattgcgagacaaaaaagttggcgctaacatttaatcacatgatcagtttcattatcctgtagtgtataatacaactaagcgtgtttgtgtgtatgtttcaaacaaatgattagaaatggcatgcgtgggagggaaggattggtatttctacagccaaagagaccgaaaatacgcgacggggctgagaactaaccgagcaacggccaccggatattggaaagccaccggcaaagacagaaccattctaagaaagggtaagctagttgggatgaggaagacattggttttctatcaaggtcgagctcctcgaggccgtaaaaccgattgggtcatgcacgaattccgtctccaaggatctcatcatcctcccaatcattctctgagctctccaaaggaagactgggtcttgtgtagggtattccataagaatacggaaggagttatatgtagagacaacatgggaagctgttttgatgagacagcctctgcatcgcttcctccactgatggatccttacatcaactttgaccaagaaccctcttcttatctcagtgatgatcatcactacatcatcaatgagcacgtaccctgcttctccaatttgtcacagaaccaaaccttaaactcgaacctaaccaactcagtctctgaactcaagattccatgcaagaaccctaaccccttgtttactggtggttcagcctcagccacgctcacaggcctcgactcattctgttcttcagatcagatggttctcagagctctactcagtcagctcactaagattgatggaagcctcgggcctaaagaatcacagagttatggagaaggtagctcggagagcctcctgaccgacatcggtattccaagcactgtttggaattgctgatgatcgagtgtaacgagagttactattgctatattcctatccatgattggaacaattcttcggggggaaataacgtgtgcttgtctgattgtacaaacatttcctcactcttgtacccacggtagattcatgtaaaataccacttatgacgctagacatacatatatttcatcg

SEQ ID NO: 84243 - protein, 257 aa, Arabidopsis thaliana; identical to SEQ ID NO: 24899
  peptide (1)..(257): Ceres Seq. ID no. 12673935

SEQ ID NO: 84244 - protein, 206 aa, Arabidopsis thaliana; identical to SEQ ID NO: 24900
  peptide (1)..(206): Ceres Seq. ID no. 12673936

SEQ ID NO: 84245 - protein, 185 aa, Arabidopsis thaliana; identical to SEQ ID NO: 24901
  peptide (1)..(185): Ceres Seq. ID no. 12673937

SEQ ID NO: 84246 - DNA, 1149 bp, Arabidopsis thaliana
  misc_feature (1)..(1149): Ceres Seq. ID no. 12673965
  misc_feature (1)..(1149): Ortholog of  Ceres SEQ ID NO 14305963 as cited in SEQ ID NO 52290
  misc_feature (1)..(1149): Ortholog of  Ceres SEQ ID NO 14307492 as cited in SEQ ID NO 59504
  misc_feature (1)..(1149): Ortholog of  Ceres SEQ ID NO 13597255 as cited in SEQ ID NO 63874
ctctctcctcctaccaagaaatcatcgtcttcttcttcatctattcaggatcgatccggcttgagatttattacaaattcgtccttctatttgctccaaaagttcgacaatttcgtaggggcaaagatggacgctgattccaagagatttctagctacgcttcgatcccgatctgaaatgttaatgggctttgaagaaatagatggagatgatgatttccaggaggagtttgcttgcccgttctgtgcagaatcgtatgatatcatcgggttgtgctgtcacatagatgatgaacatactttagagtcgaagaacgcggtatgccctgtttgttctcttaaagtgggagttgatatcgtagcacacaaacgcttcaccatgggagtttatttaagttgcagcgaaagagaaagtcacgaaaaagcggtaccaattcgacactttcacttcttcggaaagaactaagagaaggagatctacaaaggttgttaggatttacttctcgtaatggttctgttgcgtcaagtgtaactcctgatcctctcctgtcgtcatttatctcacctacacgatcacagagttctcctgcgccacgccaaaccaaaaacgtatccgaggataaacagatagagcgcaagagacaagtgttcatctcaccggtctcgttaaaagatcgggaagagaggaggcacaaatcagagtttgttcagaggctcttgtcatcagccattttcgatgaagtctaatgcacatacaaagattgagaacatggaggaactaattcgaatcagacttgagagaatctggtttcgagaaaaacaatggttgggatgagaagaagacggagaagagcgagatgcagctatgttatcaatatctatatctatctatgtattgtgtctgtttggtgctactaaatacattgcgtagaaatgtgttttcttaagtttattaagcaattgaaaagtaagatataggaagaagaataagtcctcttgtctgtagcataaaccctattggtgttcttgtgttgtgtgtcttatgaaatgaaaaatgttcactcttgtaagctagtaaaagagtgataaaagagtggttgagaaaccacgtacgaagtcatctgtttaagaataattcaacaatattgtt

SEQ ID NO: 84247 - protein, 154 aa, Arabidopsis thaliana
  peptide (1)..(154): Ceres Seq. ID no. 12673966
LSPPTKKSSSSSSSIQDRSGLRFITNSSFYLLQKFDNFVGAKMDADSKRFLATLRSRSEMLMGFEEIDGDDDFQEEFACPFCAESYDIIGLCCHIDDEHTLESKNAVCPVCSLKVGVDIVAHKRFTMGVYLSCSERESHEKAVPIRHFHFFGKN

SEQ ID NO: 84248 - protein, 112 aa, Arabidopsis thaliana
  peptide (1)..(112): Ceres Seq. ID no. 12673967
MDADSKRFLATLRSRSEMLMGFEEIDGDDDFQEEFACPFCAESYDIIGLCCHIDDEHTLESKNAVCPVCSLKVGVDIVAHKRFTMGVYLSCSERESHEKAVPIRHFHFFGKN

SEQ ID NO: 84249 - protein, 95 aa, Arabidopsis thaliana
  peptide (1)..(95): Ceres Seq. ID no. 12673968
MLMGFEEIDGDDDFQEEFACPFCAESYDIIGLCCHIDDEHTLESKNAVCPVCSLKVGVDIVAHKRFTMGVYLSCSERESHEKAVPIRHFHFFGKN

SEQ ID NO: 84250 - DNA, 812 bp, Arabidopsis thaliana
  misc_feature (1)..(812): Ceres Seq. ID no. 12673969
  misc_feature (1)..(812): Ortholog of  Ceres SEQ ID NO 12611082 as cited in SEQ ID NO 55853
  misc_feature (1)..(812): Ortholog of  Ceres SEQ ID NO 13664306 as cited in SEQ ID NO 61670
aaaaccattccctctctcaactctctgaatatttttcttcttacgatttacaaatttccgatgctgtgacattaacgtctgagaacagagaaacacttcaaatctttgaattcgtagtgcgacggagacggaggagccatcagtttcgaaaatggcgtgcgaaggtggaggatctaacgtcagatctagctactacaccattctcgggattcgtaaagatgcctctgtttccgatatccgcactgcttatcgtaagctagctatgaaatggcatccggatagatatgctcgaaatcctggagtcgccggagaagctaaacgtcggtttcaacaaatccaggaagcctattctgttttgaatgatgagaataagaggtcaatgtacgatgttggactatatgatcctcatgaagatgatgacgatgacttctgtgatttcatgcaagagatgatctcaatgatgaacaatgtcaaagacgcgggagagagcttggaagacttgcaacgaatgttcacggatatggttggtggagatggcgtgagctatgactgtaacaataatccaaagggcaacaaaagaccacgtgtcaatatctcgaggagtagtgctgcgatgcgttaaggcttacttcttttgtgtatgagtgtcgtgttgtatcaaaatttcaattccatgttcaattgtctagaccataaaataaattatctgtgaaaaccaactagaactaggtagaatctttggaatcccacatgccccaatcactaatgtatctctcatgatttggttgattttaaagattcgaaaattattc

SEQ ID NO: 84251 - protein, 156 aa, Arabidopsis thaliana; identical to SEQ ID NO: 36014
  peptide (1)..(156): Ceres Seq. ID no. 12673970

SEQ ID NO: 84252 - protein, 119 aa, Arabidopsis thaliana; identical to SEQ ID NO: 36015
  peptide (1)..(119): Ceres Seq. ID no. 12673971

SEQ ID NO: 84253 - protein, 85 aa, Arabidopsis thaliana
  peptide (1)..(85): Ceres Seq. ID no. 12673972
NHSLSQLSEYFSSYDLQISDAVTLTSENRETLQIFEFVVRRRRRSHQFRKWRAKVEDLTSDLATTPFSGFVKMPLFPISALLIVS

SEQ ID NO: 84254 - DNA, 1070 bp, Arabidopsis thaliana
  misc_feature (1)..(1070): Ceres Seq. ID no. 12673988
  misc_feature (1)..(1070): Ortholog of  Ceres SEQ ID NO 12611159 as cited in SEQ ID NO 59821
  misc_feature (1)..(1070): Ortholog of  Ceres SEQ ID NO 15180029 as cited in SEQ ID NO 0
gttcttttccacagcattgcaacatgaagagacattcttgttgttacaaacaaaagctgagaaaaggtctttggtctcctgaagaagatgagaaacttctcaattacattaccaaacatggccatggttgctggagttctgtccctaaactcgcgtctcgagagatgtggaaagagctgtagactcagatggatcaattacttaagacctgatttaaagagaggagctttctcttcagaggaacagaatctcattgtcgagcttcatgctgttcttggaaacagatggtcgcaaattgctgcgaggcttcccgggagaaccgacaacgagataaagaacttgtggaattcgtgcattaagaagaagctgatgaagaaaggcattgaccctattacacataaacccctctccgaggttggtaaagaaacaaacagaagcgacaataacaattccacaagtttttcctcagaaactaatcaagacttgtttgtcaagaaaacgtctgattttgccgagtattctgcgtttcagaaagaagaatccaactctgtttcactcagaaattcgctctcttccatgatcccaacgcaattcaacatcgacgatggttctgtctcaaatgcgggttttgatacacaagtatgcgtgaaaccctcgattattcttcttcctcctccaaacaacacttcaagcactgtctctggacaggatcatgtaaacgtgtcagagcctaattgggaatcaaacagtggaaccacaagccacctcaacaatcccggtatggaagaaatgaaatggtccgaggagtacctaaacgaatcgttattctctacccaagtttacgtgaaatcagagacggatttcaactccaacattgcctttccttggagccaaagccaagcttgtgacgtattccccaaggatcttcagagaatggccttctcttttggtggtcagaccctttagtttctttttcttatcagatttagacatattgatacgtgtaatgaatggatcaaatgttctatttggccatacgttaaaaaaataaaaaagcacaatcctttcct

SEQ ID NO: 84255 - protein, 292 aa, Arabidopsis thaliana
  peptide (1)..(292): Ceres Seq. ID no. 12673989
MRNFSITLPNMAMVAGVLSLNSRLERCGKSCRLRWINYLRPDLKRGAFSSEEQNLIVELHAVLGNRWSQIAARLPGRTDNEIKNLWNSCIKKKLMKKGIDPITHKPLSEVGKETNRSDNNNSTSFSSETNQDLFVKKTSDFAEYSAFQKEESNSVSLRNSLSSMIPTQFNIDDGSVSNAGFDTQVCVKPSIILLPPPNNTSSTVSGQDHVNVSEPNWESNSGTTSHLNNPGMEEMKWSEEYLNESLFSTQVYVKSETDFNSNIAFPWSQSQACDVFPKDLQRMAFSFGGQTL

SEQ ID NO: 84256 - protein, 282 aa, Arabidopsis thaliana
  peptide (1)..(282): Ceres Seq. ID no. 12673990
MAMVAGVLSLNSRLERCGKSCRLRWINYLRPDLKRGAFSSEEQNLIVELHAVLGNRWSQIAARLPGRTDNEIKNLWNSCIKKKLMKKGIDPITHKPLSEVGKETNRSDNNNSTSFSSETNQDLFVKKTSDFAEYSAFQKEESNSVSLRNSLSSMIPTQFNIDDGSVSNAGFDTQVCVKPSIILLPPPNNTSSTVSGQDHVNVSEPNWESNSGTTSHLNNPGMEEMKWSEEYLNESLFSTQVYVKSETDFNSNIAFPWSQSQACDVFPKDLQRMAFSFGGQTL

SEQ ID NO: 84257 - protein, 280 aa, Arabidopsis thaliana
  peptide (1)..(280): Ceres Seq. ID no. 12673991
MVAGVLSLNSRLERCGKSCRLRWINYLRPDLKRGAFSSEEQNLIVELHAVLGNRWSQIAARLPGRTDNEIKNLWNSCIKKKLMKKGIDPITHKPLSEVGKETNRSDNNNSTSFSSETNQDLFVKKTSDFAEYSAFQKEESNSVSLRNSLSSMIPTQFNIDDGSVSNAGFDTQVCVKPSIILLPPPNNTSSTVSGQDHVNVSEPNWESNSGTTSHLNNPGMEEMKWSEEYLNESLFSTQVYVKSETDFNSNIAFPWSQSQACDVFPKDLQRMAFSFGGQTL

SEQ ID NO: 84258 - DNA, 526 bp, Arabidopsis thaliana
  misc_feature (1)..(526): Ceres Seq. ID no. 12673992
  misc_feature (1)..(526): Ortholog of  Ceres SEQ ID NO 13575779 as cited in SEQ ID NO 20515
atgccggcgggacacggagtgagggcgagaacaagagatctgttcgcgagaccattcaggaagaagggttatattccactctccacttacctcagaaccttcaaggtcggcgattacgtcgatgtcaaggttaatggagctatccacaagggtatgcctcataagttctaccatggtcgtactggtcgcatctggaatgtcactaagcgtgccgttggtgttgaagtcaacaaacagattgggaacagaatcataaggaagaggatacatgtgcgtgtggagcatgtgcaacagtcaaggtgtgctgaggagtttaaactcagaaagaagcagaacgatgtgcttaaggctgatgctaaagccagaggagagactatcagcaccaagagacagcctaaaggtcctaaaccgggtttcatggtcgaaggtatgacattggagactgtcactcccattccttacgatgttgtcaacgatctcaagggtggttattgagttttttccattttattatcattctctactc

SEQ ID NO: 84259 - protein, 164 aa, Arabidopsis thaliana; identical to SEQ ID NO: 20517
  peptide (1)..(164): Ceres Seq. ID no. 12673993

SEQ ID NO: 84260 - protein, 113 aa, Arabidopsis thaliana; identical to SEQ ID NO: 20518
  peptide (1)..(113): Ceres Seq. ID no. 12673994

SEQ ID NO: 84261 - DNA, 1071 bp, Arabidopsis thaliana
  misc_feature (1)..(1071): Ceres Seq. ID no. 12674025
  misc_feature (1)..(1071): Ortholog of  Ceres SEQ ID NO 15179676 as cited in SEQ ID NO 52442
  misc_feature (1)..(1071): Ortholog of  Ceres SEQ ID NO 13582807 as cited in SEQ ID NO 67806
agggtttttctctgaggaagaagcgtttcatttctctgaatttcatcgaaaatggcggaaagaggaggagaaggcggcgcagagcgtggcggtgaccgtggtgacttcggacgtggattcggcggtggacgtggaggtggccgtggccgtgatcgtggtccaagaggccgtggaagacgtggaggccgtgcctcggaagaaacgaaatgggttccagtgaccaaactaggtcgtctagtggctgacaataaaataacgaagctagagcagatctatctccattctctcccagtaaaggagtaccaaatcatagatcatcttgttggtcctacgttgaaagacgaggttatgaagatcatgcctgttcagaaacaaaccagagctggtcaaaggactagattcaaggcctttgttgttgttggtgatggtaatggtcatgttggtttgggtgtcaagtgttctaaggaagttgctactgccattagaggagctattattcttgctaagctctctgttgttccggtgaggagaggttactgggggaataagattgggaagccacacactgtgccttgtaaggttactgggaagtgtggctctgttactgtgagaatggttcctgctccgagaggttctggtattgttgctgctagggttcctaagaaggttcttcagttcgctggtattgatgatgtctttacttcttccagaggatctactaaaactcttggaaactttgtcaaggcgacgtttgactgcttacagaagacatatgggttccttacaccagagttctggaaagagactagattctccagatcgccctaccaagagcacactgatttcttgtcgactaaggctgtttctgcaaccaaggttatcacggagggtgaagaccaagcttaagaccttcatgagataagttttggttgttcttaatactaattcctactttgaaaaagagtatttttttttcttgattatctatgagttttgttattggtggtttcgttactgttttggattttgttagatgtttgccttaatgcaaatttcaatgaaatagctttt

SEQ ID NO: 84262 - protein, 284 aa, Arabidopsis thaliana; identical to SEQ ID NO: 38082
  peptide (1)..(284): Ceres Seq. ID no. 12674026

SEQ ID NO: 84263 - protein, 185 aa, Arabidopsis thaliana; identical to SEQ ID NO: 38083
  peptide (1)..(185): Ceres Seq. ID no. 12674027

SEQ ID NO: 84264 - protein, 182 aa, Arabidopsis thaliana; identical to SEQ ID NO: 38084
  peptide (1)..(182): Ceres Seq. ID no. 12674028

SEQ ID NO: 84265 - DNA, 1312 bp, Arabidopsis thaliana
  misc_feature (1)..(1312): Ceres Seq. ID no. 12674047
  misc_feature (1)..(1312): Ortholog of  Ceres SEQ ID NO 14310896 as cited in SEQ ID NO 53480
  misc_feature (1)..(1312): Ortholog of  Ceres SEQ ID NO 13660685 as cited in SEQ ID NO 67678
gagagaaacaatgggagacgctgcgatccgtaccgtcgtcgaagccattcactcatctccgacgcaggccgtcgtctatctttgcggcggtgcctctctggctttaggttggttgatgtcggttcctggagcgtcgaacacgcttctcgagtccgtggttccttattcgagagtatctatggttcaattactcggcagggttccgagccaacactgtagccaagcattggccaaggagatggccttgttagcctacaatcgggcgcttaagctctctaaaccaggatatccggttctcggtgtcgggtttacgggatcattggtaacttctcgtcctaagcgtggagatcacaggttctttttgtctatgagagcatccgaccggattttggaatcttcagtcactctaactaagaacttacggagccgagaagaagaagataaggtgtcaagctgtgcactgatccaggctatggccaaggcatgccaagtttctgggacacttgactctggcttgaccgagtctgaggtgccttatgagtctgaaacccactttactgaagaacaagaactagagcagcttataaatgggcacttgtgctgtaagatttatccattttctggggaagcacacgggtctgatgaagacagaaagattatactacctggctcttttaacccattacatgaaggtcatctcaagctgttagaagttgctatgagtgtttgtgggggcggctacccatgttttgaaatatccgcaataaatgccgacaaaccaccgcttacaattgcacagattaaagatcgtgtcaagcaatttgaagtagttggaaagacgataatagtttcaaatcagccatacttctacaagaaagctgaactcttcccaggaagcagttttgtaattggcgctgacactgcagcgaggcttgtcaatccaaagtactatgaaggaagcatcaaaaggatgttggagatacttggtgattgcaaacggacaggttgcactttccttgttggtggccgcaatgtagatggtgtatttaaggttcttgaagatgttgatattccagaggaaataatcgacatgtttatttcaattccagcagatatattccggatggatatatcctctacagagataagaaaaaaacaagggggtggtacgaactaatgacttctcaacccgcttgaaagtcttggctcgcaagacaatttatttagtgcagttactttttgatttgatatgtattgtgttgcattctgttcttattatggaatccggatcaatggtatgagcatttgcaca

SEQ ID NO: 84266 - protein, 391 aa, Arabidopsis thaliana
  peptide (1)..(391): Ceres Seq. ID no. 12674048
RETMGDAAIRTVVEAIHSSPTQAVVYLCGGASLALGWLMSVPGASNTLLESVVPYSRVSMVQLLGRVPSQHCSQALAKEMALLAYNRALKLSKPGYPVLGVGFTGSLVTSRPKRGDHRFFLSMRASDRILESSVTLTKNLRSREEEDKVSSCALIQAMAKACQVSGTLDSGLTESEVPYESETHFTEEQELEQLINGHLCCKIYPFSGEAHGSDEDRKIILPGSFNPLHEGHLKLLEVAMSVCGGGYPCFEISAINADKPPLTIAQIKDRVKQFEVVGKTIIVSNQPYFYKKAELFPGSSFVIGADTAARLVNPKYYEGSIKRMLEILGDCKRTGCTFLVGGRNVDGVFKVLEDVDIPEEIIDMFISIPADIFRMDISSTEIRKKQGGGTN

SEQ ID NO: 84267 - protein, 388 aa, Arabidopsis thaliana; identical to SEQ ID NO: 39949
  peptide (1)..(388): Ceres Seq. ID no. 12674049

SEQ ID NO: 84268 - protein, 353 aa, Arabidopsis thaliana; identical to SEQ ID NO: 39950
  peptide (1)..(353): Ceres Seq. ID no. 12674050

SEQ ID NO: 84269 - DNA, 828 bp, Arabidopsis thaliana
  misc_feature (1)..(828): Ceres Seq. ID no. 12674057
  misc_feature (1)..(828): Ortholog of  Ceres SEQ ID NO 13595497 as cited in SEQ ID NO 51127
atgataaaactactatttacgtacatatgcacatacacatataaactatatgctctatatcatatggattacgcatgcgtgtgtatgtataaatataaaggcatcgtcacgcttcaagtttgtctcttttatattaaactgagagttttcctctcaaactttaccttttcttcttcgatcctagctcttaagaaccctaataattcattgatcaaaataatggcgattttgccggaaaactcttcaaacttggatcttactatctccgttccaggcttctcttcatcccctctctccgatgaaggaagtggcggaggaagagaccagctaaggctagacatgaatcggttaccgtcgtctgaagacggagacgatgaagaattcagtcacgatgatggctctgctcctccgcgaaagaaactccgtctaaccagagaacagtcacgtcttcttgaagatagtttcagacagaatcatacccttaatcccaaacaaaaggaagtacttgccaagcatttgatgctacggccaagacaaattgaagtttggtttcaaaaccgtagagcaaggagcaaattgaagcaaaccgagatggaatgcgagtatctcaaaaggtggtttggttcattaacggaagaaaaccacaggctccatagagaagtagaagagcttagagccatgaaggttggcccaacaacggtgaactctgcctcgagccttactatgtgtcctcgctgcgagcgagttacccctgccgcgagcccttcgagggcggtggtgccggttccggctaagaaaacgtttccgccgcaagagcgtgatcgttga

SEQ ID NO: 84270 - protein, 275 aa, Arabidopsis thaliana
  peptide (1)..(275): Ceres Seq. ID no. 12674058
MIKLLFTYICTYTYKLYALYHMDYACVCMYKYKGIVTLQVCLFYIKLRVFLSNFTFSSSILALKNPNNSLIKIMAILPENSSNLDLTISVPGFSSSPLSDEGSGGGRDQLRLDMNRLPSSEDGDDEEFSHDDGSAPPRKKLRLTREQSRLLEDSFRQNHTLNPKQKEVLAKHLMLRPRQIEVWFQNRRARSKLKQTEMECEYLKRWFGSLTEENHRLHREVEELRAMKVGPTTVNSASSLTMCPRCERVTPAASPSRAVVPVPAKKTFPPQERDR

SEQ ID NO: 84271 - protein, 254 aa, Arabidopsis thaliana
  peptide (1)..(254): Ceres Seq. ID no. 12674059
MDYACVCMYKYKGIVTLQVCLFYIKLRVFLSNFTFSSSILALKNPNNSLIKIMAILPENSSNLDLTISVPGFSSSPLSDEGSGGGRDQLRLDMNRLPSSEDGDDEEFSHDDGSAPPRKKLRLTREQSRLLEDSFRQNHTLNPKQKEVLAKHLMLRPRQIEVWFQNRRARSKLKQTEMECEYLKRWFGSLTEENHRLHREVEELRAMKVGPTTVNSASSLTMCPRCERVTPAASPSRAVVPVPAKKTFPPQERDR

SEQ ID NO: 84272 - protein, 247 aa, Arabidopsis thaliana
  peptide (1)..(247): Ceres Seq. ID no. 12674060
MYKYKGIVTLQVCLFYIKLRVFLSNFTFSSSILALKNPNNSLIKIMAILPENSSNLDLTISVPGFSSSPLSDEGSGGGRDQLRLDMNRLPSSEDGDDEEFSHDDGSAPPRKKLRLTREQSRLLEDSFRQNHTLNPKQKEVLAKHLMLRPRQIEVWFQNRRARSKLKQTEMECEYLKRWFGSLTEENHRLHREVEELRAMKVGPTTVNSASSLTMCPRCERVTPAASPSRAVVPVPAKKTFPPQERDR

SEQ ID NO: 84273 - DNA, 1357 bp, Arabidopsis thaliana
  misc_feature (1)..(1357): Ceres Seq. ID no. 12674073
  misc_feature (1)..(1357): Ortholog of  Ceres SEQ ID NO 13503476 as cited in SEQ ID NO 61978
  misc_feature (1)..(1357): Ortholog of  Ceres SEQ ID NO 12578438 as cited in SEQ ID NO 62201
  misc_feature (1)..(1357): Ortholog of  Ceres SEQ ID NO 12617675 as cited in SEQ ID NO 64656
atattcactctctcttcttcattagcctttcgtctccttcttctcttctctatctctctttagcttctctacgcaagcttattatctctttctcttaaagctttttctatatacaaacagaagcgtttgatactgtaaaaaagatttagaaatggagactctgagtcgtttattggttttcatgtctctgttttccggtttagtttctggatttgctctgcaaaatcttccaatcacatcttttgaagaaagttacactcaactttttggtgacaagaacttatttgttcatcaagatggcaaatctgtccggttaacgctcgatgaaagaaccggttccggttttgtttcaaatgattattacttgcatggattcttcagtgcttcaattaaattaccttctgattatacagctggagttgttgttgccttttatatgtctaatggagatatgtatgagaagaatcatgatgagatagattttgagtttcttggtaacattagagaaaaagaatggagagttcagacaaacatttacggtaatggaagtactcattcaggaagagaagagagatataatctctggtttgatcctactgaagattttcatcaatacagtatcctctggtctgattctcacatcatattctttgtagacaatgttcctattagagaggtcaaacgtactgcggaaatgggtggtcactttccatcaaagccgatgtctctctacacaacaatatgggacggttctaaatgggcaactaacggtggaaagtacggtgtaaactacaaatatgcgccttacattgcgcggttctcggatctagtcctgcacggctgccccgtggaccctatcgagcagtttccgaggtgcgatgaaggcgcggctgaggatatgcgtgcggcgcaagagattactccttcacaaaggagtaaaatggatgttttcagacggagactcatgacatattcatattgctatgatcgggctaggtacaatgttgctttatcggagtgtgtggtgaatcccgctgaggctcaaaggcttagggtttatgatccggtcagatttggcggcattccgaggcgccaccgcaatggaaagcaccggagcaagagaagccgggttgatggaaccgagtcgatatgataacatatataggcaaaatagtatgggtgagatttgggggttctataataagtccattattttggttatttatgattcaatgcattttcacatatagaggaggcatttttgtcatttgttagttgtatatcattataagaaaagaaaaaataattaatttatttatttgtgatattttttttatatatgataaattgtttcttg

SEQ ID NO: 84274 - protein, 333 aa, Arabidopsis thaliana; identical to SEQ ID NO: 30673
  peptide (1)..(333): Ceres Seq. ID no. 12674074

SEQ ID NO: 84275 - protein, 323 aa, Arabidopsis thaliana; identical to SEQ ID NO: 30674
  peptide (1)..(323): Ceres Seq. ID no. 12674075

SEQ ID NO: 84276 - protein, 238 aa, Arabidopsis thaliana; identical to SEQ ID NO: 30675
  peptide (1)..(238): Ceres Seq. ID no. 12674076

SEQ ID NO: 84277 - DNA, 495 bp, Arabidopsis thaliana
  misc_feature (1)..(495): Ceres Seq. ID no. 12674086
  misc_feature (1)..(495): Ortholog of  Ceres SEQ ID NO 12476115 as cited in SEQ ID NO 107
acttcctcattagcattctacagtctgcacacttatcacttctttcgaaatctctctctatccctctcaaaaatgaagctctctgtgcgttttatctccgctgctcttctcttgttcatggtattcattgccacagggatgggtccagtcaccgtggaggcacgcacgtgtgagtcaaaaagccataggttcaagggtccatgtgtgagcacacacaactgtgcaaacgtgtgccacaacgaaggcttcggcggaggtaaatgccgtggattccgtcgtcgttgctactgcacaagacactgctgatccatccattctcatgactcaaatcttcgatccatcgtcagtgtgttacttctttcttatctaaatcttccgtacggtaccatgtcgtaccgtacatgagtgttttctcgaataagtcattggtttgtgtgtttccggttttaatgtaatgttaaatcaattaatggcttttaatatattgtattatgg

SEQ ID NO: 84278 - protein, 101 aa, Arabidopsis thaliana; identical to SEQ ID NO: 25732
  peptide (1)..(101): Ceres Seq. ID no. 12674087

SEQ ID NO: 84279 - protein, 77 aa, Arabidopsis thaliana; identical to SEQ ID NO: 25733
  peptide (1)..(77): Ceres Seq. ID no. 12674088

SEQ ID NO: 84280 - protein, 62 aa, Arabidopsis thaliana; identical to SEQ ID NO: 25734
  peptide (1)..(62): Ceres Seq. ID no. 12674089

SEQ ID NO: 84281 - DNA, 880 bp, Arabidopsis thaliana
  misc_feature (1)..(880): Ceres Seq. ID no. 12674101
  misc_feature (1)..(880): Ortholog of  Ceres SEQ ID NO 13596116 as cited in SEQ ID NO 62213
aaccctcaaaatcacaatcttctcttacaaaaaactttgaaagatgaagattcttctagcatcattgtgtttgatcagtcttctcgtaatcttgccttctgtcttctctgcttcttcttcctctgaagattttgatttcttctacttcgtccaacaatggccaggatcatactgtgacacacagaagaagtgttgttatccaaattcaggcaaaccagctgctgattttggcattcatggtctttggcctaactacaaagatggaacttatccatctaactgtgatgcctctaaaccattcgatagctcaacgatatcagatcttctcacttcaatgaagaagagctggccaacactggcttgcccaagcggttcaggtgaagcgttttgggagcacgaatgggagaagcatggtacttgctctgaatcggttatcgatcaacatgaatatttccaaaccgctcttaaccttaaacagaaaaccaatctccttggagctctaaccaaagccgggattaatccggatggaaaatcttactctttggagagcataagagattcgataaaagagtcaattggtttcactccttgggttgagtgtaacagagatggttctggtaatagccaattgtaccaagtctatctttgtgttgaccggtctggttccggtttaatcgaatgtccggttttcccacatgggaaatgtggagctgagatcgaattcccttctttttagtttccaatttctaaattcagtctcttgaaccggcatcgatcttttgttcatggagattggtttggtcaaaaagaagatttaatgtaataaaaatttatgggatattggataatgatatagttcaatttcaataatattctacgt

SEQ ID NO: 84282 - protein, 230 aa, Arabidopsis thaliana; identical to SEQ ID NO: 36323
  peptide (1)..(230): Ceres Seq. ID no. 12674102

SEQ ID NO: 84283 - protein, 133 aa, Arabidopsis thaliana; identical to SEQ ID NO: 36324
  peptide (1)..(133): Ceres Seq. ID no. 12674103

SEQ ID NO: 84284 - DNA, 1935 bp, Arabidopsis thaliana
  misc_feature (1)..(1935): Ceres Seq. ID no. 12674114
  misc_feature (1)..(1935): Ortholog of  Ceres SEQ ID NO 13595870 as cited in SEQ ID NO 62101
  misc_feature (1)..(1935): Ortholog of  Ceres SEQ ID NO 13590241 as cited in SEQ ID NO 63878
  misc_feature (1)..(1935): Ortholog of  Ceres SEQ ID NO 13657939 as cited in SEQ ID NO 66349
aaacccctgtaaagccaataacttgttgttccccaaagtttggttcttcatgttggaaaccgaaagcagtgtctgcgacaacatcgccggcaatgagaaatggcgagcggaagctgaaattggtggcaacgagagagctctgcaagcgcttcgagaactcattatcttcccttttcgttaccctctcgaagctcgaactcttggtctcaaatggcctagaggattgcttctctacggtcctcctggaaccggcaagacaagcttggtccgtgctgttgtccaggaatgtgatgcacatttgattgttttaagccctcattctgtacatcgagcacatgctggagaaagcgagaaagtcttaagggaagctttcgctgaggcttcttctcacgctgtttcagacaagccttctgtgatttttattgatgaaatcgatgttctttgtcctcgtcgtgatgctagacgagaacaagatgttcgtattgcttctcaactgtttacacttatggactcaaacaagccttcatcatctgcaccaagagttgttgttgtagcatccacaaatagggtggatgcgattgacccagcgctaagaagagcgggacgatttgatgctttagttgaagtgagcacaccaaatgaggaggatcgtttaaaaatcctgcagctgtacacaaagaaagtcaatttagatcctagtgtcgatcttcaagccattgcaatatcttgcaacggttatgttggagcagatttggaagctttatgtcgtgaagcgacaatatctgcaagtaaaagatcttcagattctcttattctaacatctcaagacttcaagattgcaaaatctgtggttggtccaagtataaacagaggcatcacagttgaaatccctaaagtgacatgggacgatgttggtggtcttaaagacttaaagaaaaagctccagcaagctgttgaatggccaatcaaacattcagctgcatttgtaaaaatgggcatatcgccaatgcgtgggatacttctacatggtcctccaggttgctcaaagacaactcttgctaaagccgctgcaaatgctgctcaagcctccttcttttccttaagctgtgcggagctattttctatgtatgttggagaaggtgaagcattattgcggaatacatttcaaagagctcgacttgcttctccaagtataatattctttgatgaagctgatgtcgttgcctgtaaaagaggtgatgagagctcaagcaatagttctacagttggagaaaggcttctatctacactgttaaccgaaatggacggtcttgaagaagcaaagggaatcctcgtcttggctgccacaaaccgcccgtatgcaattgatgctgctctaatgcgacctggtcgatttgatctcgtgctatacgtgccaccgcctgatctagaagcccggtttgaaatactgcaagtgcatacacgcaacatgacactaggagacgacgttgatctcagaaaaatcgctgaagaaaccgatctcttcacaggtgccgagctcgagggtctatgcagagaaagcggaactgtctcacttagagaaaacatcgcagcaaccgctgtcttcaatcgccatttccaaaccgcaaaaagctcgcttaaaccagcgttaacaatcgaagaagtcgaaacttattcatcattcaggaaggcggcgaaaagatctgattcgaaaccgattccgattaacaaaaagaaggcgacttccaccgtcttcggattctcatggcaattaggtgttttgagcttattgttgcttgctactggaaactattacttcaaccacactaaacatgaattactagtagcttctgctacatgagacttgaaacagctcaaagttaaaaaaagttgctaattttgttttattcataaataccaaaatatcttttgttt

SEQ ID NO: 84285 - protein, 619 aa, Arabidopsis thaliana
  peptide (1)..(619): Ceres Seq. ID no. 12674115
NPCKANNLLFPKVWFFMLETESSVCDNIAGNEKWRAEAEIGGNERALQALRELIIFPFRYPLEARTLGLKWPRGLLLYGPPGTGKTSLVRAVVQECDAHLIVLSPHSVHRAHAGESEKVLREAFAEASSHAVSDKPSVIFIDEIDVLCPRRDARREQDVRIASQLFTLMDSNKPSSSAPRVVVVASTNRVDAIDPALRRAGRFDALVEVSTPNEEDRLKILQLYTKKVNLDPSVDLQAIAISCNGYVGADLEALCREATISASKRSSDSLILTSQDFKIAKSVVGPSINRGITVEIPKVTWDDVGGLKDLKKKLQQAVEWPIKHSAAFVKMGISPMRGILLHGPPGCSKTTLAKAAANAAQASFFSLSCAELFSMYVGEGEALLRNTFQRARLASPSIIFFDEADVVACKRGDESSSNSSTVGERLLSTLLTEMDGLEEAKGILVLAATNRPYAIDAALMRPGRFDLVLYVPPPDLEARFEILQVHTRNMTLGDDVDLRKIAEETDLFTGAELEGLCRESGTVSLRENIAATAVFNRHFQTAKSSLKPALTIEEVETYSSFRKAAKRSDSKPIPINKKKATSTVFGFSWQLGVLSLLLLATGNYYFNHTKHELLVASAT

SEQ ID NO: 84286 - protein, 603 aa, Arabidopsis thaliana; identical to SEQ ID NO: 38725
  peptide (1)..(603): Ceres Seq. ID no. 12674116

SEQ ID NO: 84287 - protein, 451 aa, Arabidopsis thaliana; identical to SEQ ID NO: 38726
  peptide (1)..(451): Ceres Seq. ID no. 12674117

SEQ ID NO: 84288 - DNA, 1277 bp, Arabidopsis thaliana
  misc_feature (1)..(1277): Ceres Seq. ID no. 12674134
  misc_feature (1)..(1277): Ortholog of  Ceres SEQ ID NO 14306970 as cited in SEQ ID NO 53904
  misc_feature (1)..(1277): Ortholog of  Ceres SEQ ID NO 13597320 as cited in SEQ ID NO 63901
atgattttgaaaataagcggccgaaacattatacacttcctccacacgcacaacaatagactcaaagcaaacgcaactcatatccaatcgcttttaaacgccaataatcgcgttacagtaacaactcgaaaaatggtaacactaatcgtggccaccaccgccgatccagcgtcgatcaaccctgcggcggcgcttctcgccatgcccggttggaccgccggacctatcttaccgccggacataaagagttttagtaacaagcaaacgagagtgattcaacacgatagatctatagtaaaagaagacgatctcgatttacgttgggaagaagctaccggtgaagttgttgatgaagtcatcttcctcagccgtcacaccgccgtctcaaatcgtcctgctttaactgttcatccgattggagtgcttcatctaaaggatggagaatcaccgccgcaaggaggaaagcctggatgggcggcgttgccaagcactagaattggtccatggtttcgtcttttgaagaaaatggctgaagctcatggtttagttcctgagtttgagataacattggaagctactcatcatggaccaataactaacaagccaacgatgtttttggagattggtagtaccgaggaatactggaagaggcaagacgcagctcaagtcatggctcttttaatgtgggaaggtcttgggctaggaggcagtgaagaagtagggaagtggaaaagtgaaaccggaaagaggaaagttcttttaggcattggaggtggacattatgctcctcgtcacatggatatagctttgaaagatgatatttgggtaggccatttgctttctggatactcattaccgatggaagatccaactcaaaccaaaacaacgcctggagagaattacattggtggaaattggagacaatcaattaaggcagcatttgaagctactaaagcatcattccccggaggcgagatcttggctcatcttgaccacaagagcttcaaaggatggcaaaagaaggccattacagagtttttagcagaagagagcatcaatgttgggaagccaaacgatttcacatgaactgtgagagacccccttaaaacatatcttgagatctgagtttttggtttattggttcagaatctatcattgatgatgatgggtttagattattttcagctgttacaagtaagtagagattgaaattcatctgtaagctgccctttttaaagttcacattcagatttaagatagaagaagaataaaacatg

SEQ ID NO: 84289 - protein, 361 aa, Arabidopsis thaliana
  peptide (1)..(361): Ceres Seq. ID no. 12674135
MILKISGRNIIHFLHTHNNRLKANATHIQSLLNANNRVTVTTRKMVTLIVATTADPASINPAAALLAMPGWTAGPILPPDIKSFSNKQTRVIQHDRSIVKEDDLDLRWEEATGEVVDEVIFLSRHTAVSNRPALTVHPIGVLHLKDGESPPQGGKPGWAALPSTRIGPWFRLLKKMAEAHGLVPEFEITLEATHHGPITNKPTMFLEIGSTEEYWKRQDAAQVMALLMWEGLGLGGSEEVGKWKSETGKRKVLLGIGGGHYAPRHMDIALKDDIWVGHLLSGYSLPMEDPTQTKTTPGENYIGGNWRQSIKAAFEATKASFPGGEILAHLDHKSFKGWQKKAITEFLAEESINVGKPNDFT

SEQ ID NO: 84290 - protein, 317 aa, Arabidopsis thaliana
  peptide (1)..(317): Ceres Seq. ID no. 12674136
MVTLIVATTADPASINPAAALLAMPGWTAGPILPPDIKSFSNKQTRVIQHDRSIVKEDDLDLRWEEATGEVVDEVIFLSRHTAVSNRPALTVHPIGVLHLKDGESPPQGGKPGWAALPSTRIGPWFRLLKKMAEAHGLVPEFEITLEATHHGPITNKPTMFLEIGSTEEYWKRQDAAQVMALLMWEGLGLGGSEEVGKWKSETGKRKVLLGIGGGHYAPRHMDIALKDDIWVGHLLSGYSLPMEDPTQTKTTPGENYIGGNWRQSIKAAFEATKASFPGGEILAHLDHKSFKGWQKKAITEFLAEESINVGKPNDFT

SEQ ID NO: 84291 - protein, 294 aa, Arabidopsis thaliana
  peptide (1)..(294): Ceres Seq. ID no. 12674137
MPGWTAGPILPPDIKSFSNKQTRVIQHDRSIVKEDDLDLRWEEATGEVVDEVIFLSRHTAVSNRPALTVHPIGVLHLKDGESPPQGGKPGWAALPSTRIGPWFRLLKKMAEAHGLVPEFEITLEATHHGPITNKPTMFLEIGSTEEYWKRQDAAQVMALLMWEGLGLGGSEEVGKWKSETGKRKVLLGIGGGHYAPRHMDIALKDDIWVGHLLSGYSLPMEDPTQTKTTPGENYIGGNWRQSIKAAFEATKASFPGGEILAHLDHKSFKGWQKKAITEFLAEESINVGKPNDFT

SEQ ID NO: 84292 - DNA, 1590 bp, Arabidopsis thaliana
  misc_feature (1)..(1590): Ceres Seq. ID no. 12674217
  misc_feature (1)..(1590): Ortholog of  Ceres SEQ ID NO 13582619 as cited in SEQ ID NO 56520
  misc_feature (1)..(1590): Ortholog of  Ceres SEQ ID NO 12611392 as cited in SEQ ID NO 56826
  misc_feature (1)..(1590): Ortholog of  Ceres SEQ ID NO 13660872 as cited in SEQ ID NO 60830
  misc_feature (1)..(1590): Ortholog of  Ceres SEQ ID NO 12616221 as cited in SEQ ID NO 63291
ctcgccgccatcggcgactgcgcccagtactgctgtgtcggctacctcgcttgctcctggctttcgatttcatccgactgatgaggaactcgtgagctattacttgaagaggaaggttctgggtaaacctgtacgcttcgatgcgattggagaggtagatatctacaagcatgagccctgggatttagcagtgttttcgaagttgaaaactcgggaccaagaatggtacttcttcagtgcgttagataagaagtacggtaatggtgctaggatgaatcgagcaactaacaaagggtactggaaagcaactggaaaagacagagaaatccgccgggatattcagttgctcggtatgaaaaagacgcttgttttccacagcgggcgtgctccagacggccttcggactaattgggtcatgcacgagtatcgccttgtggaatatgaaactgaaactaacggaagcctgctggatgcatatgtgttgtgcagagtgtttcacaagaataacattgggccaccaagtgggaacagatatgcgccattcatggaagaagaatgggctgatggtggaggagctctgattccaggaatagacgttagggtcagggtagaggctctaccacaagccaatggaaacaaccagatggaccaggaaatgcattcagcaagcaaggatctcattaacatcaacgagctaccgagagatgctactccaatggacatcgaacctaaccaacagaatcatcatgagagtgccttcaagccacaggagagtaacaaccatagtggttatgaagaagatgaggacacactcaaacgcgagcacgcagaagaagatgagcgtcctccttctctatgcattctcaacaaagaagctccactacctctcctgcaatacaaacgtagacgccaaaacgagtccaacaacaactcaagcaggaacacacaggaccattgttcgtccacaataacaaccgtcgacaatacaaccaccttaatctcatcatctgctgctgctgctaccaacactgccatctctgcattgcttgagttctcacttatgggtatctccgacaagaaagaaaaccagcagaaagaggaaacttctcctcctagtccaattgcatctcctgaagagaaggttaatgatctccagaaggaggttcaccagatgtctgttgaaagagaaactttcaagcttgagatgatgagtgcagaggctatgatcagcattctccagtcaagaatcgatgcgctgcgtcaggagaacgaggaacttaagaagaagaacgccagtggacaagctagttaaaccaccgcaacatctctccaggtgtcttcttcttcttcttcttcttctttgcctcttagctgtaatcttcttaatagtatgagctatggatgtagcttcttcagacggatcagaaaccttatgaatctctgttgtaaaattaggataaaacggaacggagccaaccaactaggtctttttattttatccttttttactttggatgtttctgcatcttttgggaacattttcaggctgatccattgtcgtatattatcatctatctatctagtcttttc

SEQ ID NO: 84293 - protein, 436 aa, Arabidopsis thaliana
  peptide (1)..(436): Ceres Seq. ID no. 12674218
SPPSATAPSTAVSATSLAPGFRFHPTDEELVSYYLKRKVLGKPVRFDAIGEVDIYKHEPWDLAVFSKLKTRDQEWYFFSALDKKYGNGARMNRATNKGYWKATGKDREIRRDIQLLGMKKTLVFHSGRAPDGLRTNWVMHEYRLVEYETETNGSLLDAYVLCRVFHKNNIGPPSGNRYAPFMEEEWADGGGALIPGIDVRVRVEALPQANGNNQMDQEMHSASKDLININELPRDATPMDIEPNQQNHHESAFKPQESNNHSGYEEDEDTLKREHAEEDERPPSLCILNKEAPLPLLQYKRRRQNESNNNSSRNTQDHCSSTITTVDNTTTLISSSAAAATNTAISALLEFSLMGISDKKENQQKEETSPPSPIASPEEKVNDLQKEVHQMSVERETFKLEMMSAEAMISILQSRIDALRQENEELKKKNASGQAS

SEQ ID NO: 84294 - protein, 346 aa, Arabidopsis thaliana
  peptide (1)..(346): Ceres Seq. ID no. 12674219
MNRATNKGYWKATGKDREIRRDIQLLGMKKTLVFHSGRAPDGLRTNWVMHEYRLVEYETETNGSLLDAYVLCRVFHKNNIGPPSGNRYAPFMEEEWADGGGALIPGIDVRVRVEALPQANGNNQMDQEMHSASKDLININELPRDATPMDIEPNQQNHHESAFKPQESNNHSGYEEDEDTLKREHAEEDERPPSLCILNKEAPLPLLQYKRRRQNESNNNSSRNTQDHCSSTITTVDNTTTLISSSAAAATNTAISALLEFSLMGISDKKENQQKEETSPPSPIASPEEKVNDLQKEVHQMSVERETFKLEMMSAEAMISILQSRIDALRQENEELKKKNASGQAS

SEQ ID NO: 84295 - protein, 319 aa, Arabidopsis thaliana
  peptide (1)..(319): Ceres Seq. ID no. 12674220
MKKTLVFHSGRAPDGLRTNWVMHEYRLVEYETETNGSLLDAYVLCRVFHKNNIGPPSGNRYAPFMEEEWADGGGALIPGIDVRVRVEALPQANGNNQMDQEMHSASKDLININELPRDATPMDIEPNQQNHHESAFKPQESNNHSGYEEDEDTLKREHAEEDERPPSLCILNKEAPLPLLQYKRRRQNESNNNSSRNTQDHCSSTITTVDNTTTLISSSAAAATNTAISALLEFSLMGISDKKENQQKEETSPPSPIASPEEKVNDLQKEVHQMSVERETFKLEMMSAEAMISILQSRIDALRQENEELKKKNASGQAS

SEQ ID NO: 84296 - DNA, 798 bp, Arabidopsis thaliana
  misc_feature (1)..(798): Ceres Seq. ID no. 12674245
  misc_feature (1)..(798): Ortholog of  Ceres SEQ ID NO 14304132 as cited in SEQ ID NO 56475
  misc_feature (1)..(798): Ortholog of  Ceres SEQ ID NO 13664228 as cited in SEQ ID NO 61166
  misc_feature (1)..(798): Ortholog of  Ceres SEQ ID NO 15179439 as cited in SEQ ID NO 0
ctctatctctatctctatctctcttctccttcttcttcagtttcgatcattcttgaatctgattcttctcgagaaaaaagcgtttcaatttcagaaatttcgactacgattgttgctttgttcaattagaagaggcgaaaaaggatggcgacggttaatgggtacacagggaatactccggcggcgactacaccggcagccaccggatcaaagcaatctgctcctccgactaagaccgtcgatagccactccgttctaaaaaggctgcaatctgaactaatgggattgatgatgggagctgatccggggatatctgcgtttccagaggaagacaacatattttgctggaaaggaacaattacaggaagcaaagatactgtgttcgaaggaactgagtacagactctcactcactttctctaacgattatccttttaagtctcccaaagttaagtttgagacatgctgcttccaccccaatgtggatctctatggcaatatttgcttggacattcttcaggataaatggtcatctgcttatgatgtgaggacgatattactctcaattcaaagccttctcggaaccgaacatcagctcaccattgaacaatcaagcggctcagctttggagcaatcaagaagagtacaggaagatggttgagaagctctacaagcctttaaacgcatgattctcaaaaatcactgtaactgattttaaaatctcaactgtattggatcatatctcttttacttttataatctcaatttgagccaatattagcaatcaaactctaccttt

SEQ ID NO: 84297 - protein, 171 aa, Arabidopsis thaliana; identical to SEQ ID NO: 35726
  peptide (1)..(171): Ceres Seq. ID no. 12674246

SEQ ID NO: 84298 - protein, 126 aa, Arabidopsis thaliana; identical to SEQ ID NO: 35727
  peptide (1)..(126): Ceres Seq. ID no. 12674247

SEQ ID NO: 84299 - protein, 123 aa, Arabidopsis thaliana; identical to SEQ ID NO: 35728
  peptide (1)..(123): Ceres Seq. ID no. 12674248

SEQ ID NO: 84300 - DNA, 744 bp, Arabidopsis thaliana
  misc_feature (1)..(744): Ceres Seq. ID no. 12674268
  misc_feature (1)..(744): Ortholog of  Ceres SEQ ID NO 14304132 as cited in SEQ ID NO 56475
  misc_feature (1)..(744): Ortholog of  Ceres SEQ ID NO 13664228 as cited in SEQ ID NO 61166
  misc_feature (1)..(744): Ortholog of  Ceres SEQ ID NO 15179439 as cited in SEQ ID NO 0
tcttcttcagtttcgatcattcttgaatctgattcttctcgagaaaaaagcgtttcaatttcagaaatttcgactacgattgttgctttgttcaattagaagaggcgaaaaaggatggcgacggttaatgggtacacagggaatactccggcggcgactacaccggcagccaccggatcaaagcaatctgctcctccgactaagaccgtcgatagccactccgttctaaaaaggctgcaatctgaactaatgggattgatgatgggagctgatccggggatatctgcgtttccagaggaagacaacatattttgctggaaaggaacaattacaggaagcaaagatactgtgttcgaaggaactgagtacagactctcactcactttctctaacgattatccttttaagtctcccaaagttaagtttgagacatgctgcttccaccccaatgtggatctctatggcaatatttgcttggacattcttcaggataaatggtcatctgcttatgatgtgaggacgatattactctcaattcaaagccttctcggagaaccgaacatcagctcaccattgaacaatcaagcggctcagctttggagcaatcaagaagagtacaggaagatggttgagaagctctacaagcctttaaacgcatgattctcaaaaatcactgtaactgattttaaaatctcaactgtattggatcatatctcttttacttttataatctcaatttgagcc

SEQ ID NO: 84301 - protein, 181 aa, Arabidopsis thaliana
  peptide (1)..(181): Ceres Seq. ID no. 12674269
MATVNGYTGNTPAATTPAATGSKQSAPPTKTVDSHSVLKRLQSELMGLMMGADPGISAFPEEDNIFCWKGTITGSKDTVFEGTEYRLSLTFSNDYPFKSPKVKFETCCFHPNVDLYGNICLDILQDKWSSAYDVRTILLSIQSLLGEPNISSPLNNQAAQLWSNQEEYRKMVEKLYKPLNA

SEQ ID NO: 84302 - protein, 136 aa, Arabidopsis thaliana; identical to SEQ ID NO: 37835
  peptide (1)..(136): Ceres Seq. ID no. 12674270

SEQ ID NO: 84303 - protein, 133 aa, Arabidopsis thaliana; identical to SEQ ID NO: 37836
  peptide (1)..(133): Ceres Seq. ID no. 12674271

SEQ ID NO: 84304 - DNA, 965 bp, Arabidopsis thaliana
  misc_feature (1)..(965): Ceres Seq. ID no. 12674329
  misc_feature (1)..(965): Ortholog of  Ceres SEQ ID NO 12627129 as cited in SEQ ID NO 68657
  misc_feature (1)..(965): Ortholog of  Ceres SEQ ID NO 15179538 as cited in SEQ ID NO 0
aacttcagctcttgaatttttttcgtttcagactaacggatcgaaacttctcagccaaatcagccgcatctaacctcacgcgccgccgcaatggcaactccaccgacgctacctgtcaccaatcagcaagctgttcaatctcagcctccaatcaacacacctgcttttcgtactttcttctcacgtctctccacctcgatccgtgatggcttgtcacagcgtcgtccatggacggagctcatcgatcgtagttccatggcgagacctgaatctctcaccgatgccttgtcccggataaggaagaatctcgcttacttcaaggttaactacgtcgccatcgtctccctcgtactcgccttttcgcttttctctcatcctctctccctccttgtcctcatcggactcctaggcggttggatgtttctctacctcttccgtccctcagatcagccactggtcgtcttcggtcgcactttctctgatcgagagactctgcttgctcttgtgctgtctacgatcgtcgtcgtgtttatgacgagcgttggatctctcttaacctccgcgcttatgattggtgttgcaatcgtttgcgtacacggtgcgtttgtggttccggatgatctcttcttggacgagcaagagcctgcgaatgctggattactctcattccttggaggttctgctacctcagctgctgcagctgtctcagggagagtctaagagctggatttgattcagatctcgtcaattgtggttggtaactccgtactgattttagtgatttgttgttgttgaaatggaatgtagattcgtaacgaagctctacagatttagaactacgaatttttggttgcagtatctgcttcttcttgttgttttatctctttggtggctcgacacttttatgttcagatgtagaaaactcaaagttgatctttctctatcgtttctcctattgtgggatt

SEQ ID NO: 84305 - protein, 209 aa, Arabidopsis thaliana; identical to SEQ ID NO: 28604
  peptide (1)..(209): Ceres Seq. ID no. 12674330

SEQ ID NO: 84306 - protein, 154 aa, Arabidopsis thaliana; identical to SEQ ID NO: 28605
  peptide (1)..(154): Ceres Seq. ID no. 12674331

SEQ ID NO: 84307 - DNA, 1494 bp, Arabidopsis thaliana
  misc_feature (1)..(1494): Ceres Seq. ID no. 12674332
  misc_feature (1)..(1494): Ortholog of  Ceres SEQ ID NO 13600110 as cited in SEQ ID NO 0
aaatctagtttattttttctatttactaaaacctcccaaggaccaaagaacatcgacaaaggaagacgacgaagaagatttcgagcttcgacaaatcatgcggattcttactgctcgcatagctaaccatttttgcagggcacgaaacgcgaatcctcgatctcgaaatttctcctcgtcgaacaagaaagatgaccttacattggaggaagaagctgagaggaaaataggttggtgtctcaaaattttctttgcgggcacagcaacgtatattggataccagtttttcccttacttaggtgataacttaattcatcaatcaatatcgcttttacatgtgaaggatcctttgtttaagagaatgggagcttctcggctttcccgtttcgctattgatgatgaaaggaggatgaaggttgtagagatgggtggggctcaagagctactacatatgttgggaagtgctaaagatgacaagacaaggaaagaagccctaaaggctcttgctgctctctctaaatcaggtgaagctgctaaattcctaggctctaatggagcactctctatcgtcaaatcgactccaaattccttggaagattcagacatttcaacatacaagtcaaacatactcgagaagctagttgagaaaaacctcgctgtctcttccaactgaactacctttttacggacaaggataggtcaagaatcataagagcatgtccattgcagggaccttgcaagttttttaagaaaatccttatgaataatagcaaaaaattaaatcagaatggtgtaataaaccaaggtgcgaaccttgtttaaggtatttttgggtgtattaggtgcgctgacgtggctgtatattattggatgacaacttttcccgtgtttttttttctttcccattcccaaactatttttttctttctctcctctctcctctcctgttttctccgaatttcgacttcgacggatcaaattcttcatcgtctctttttttatcatgtctctcttctcatacgatccacaagattcgtgatcgaagaggtgtcagaaaatccaccggaagagctactcttaccggctttgctgaggtcaacgatgtggcgctgtttttcggtggattggttagaatgttgatgctcataggatcctgcttgtgggttcgtctgctggttgaatttgattgcaagttaaagtctggtgcttttgatctggtaattgcttcttacaagttgatctgtaacaattgatttcgaattcagtatatggatttgtatacagattctgggctttgctttatgttcaaatttgtgtttgatcttttggtttttaagataaaaatgtgactcttttggtgcttattcacttgtatgtcatgttatggtctatgttctctaagtggttttagcttagataacttgtatgtctgttttctttactttaagttcaatatgacttgtatcacttcggctttaatgatattgttgttta

SEQ ID NO: 84308 - protein, 223 aa, Arabidopsis thaliana
  peptide (1)..(223): Ceres Seq. ID no. 12674333
NLVYFFYLLKPPKDQRTSTKEDDEEDFELRQIMRILTARIANHFCRARNANPRSRNFSSSNKKDDLTLEEEAERKIGWCLKIFFAGTATYIGYQFFPYLGDNLIHQSISLLHVKDPLFKRMGASRLSRFAIDDERRMKVVEMGGAQELLHMLGSAKDDKTRKEALKALAALSKSGEAAKFLGSNGALSIVKSTPNSLEDSDISTYKSNILEKLVEKNLAVSSN

SEQ ID NO: 84309 - protein, 191 aa, Arabidopsis thaliana; identical to SEQ ID NO: 38424
  peptide (1)..(191): Ceres Seq. ID no. 12674334

SEQ ID NO: 84310 - DNA, 609 bp, Arabidopsis thaliana
  misc_feature (1)..(609): Ceres Seq. ID no. 12674388
  misc_feature (1)..(609): Ortholog of  Ceres SEQ ID NO 15176141 as cited in SEQ ID NO 0
ctcactttttttctctgttgcatcatcttccaaactcccgaagaagaagaaaataactacaatgagtcaacaacctcctgctgttggtgttcctccttctcatgcttatccggcggaaggaccacccaaggacgcttatccacctccgggacaaccctatcctcagcaaggatatcctcctccgcagggatatcctcaacaaggttatcctcctcaaggttatcctccgcaggggtaccctgaacaaggatatcctcaacaaggttacccacctcagcaacaacagcaacagaaacacagtcctggtatgcttgaaggatgtattgctgctctgtgctgttactgtgtcttggacgcttgcttctgagtggaggtctccgcttgaagctgcaaaattggtttataccgatgatctcatctcattctctttcgtttctctacagacttgactctcttctaagcattttatcttagttactattagattatttggattttgccaaatgggaatgtaaatggttgggtgacccaattcatgttgcacattattggcttttaccctctgctttttcttcctagcttcatctaatgattgcaccctatttattt

SEQ ID NO: 84311 - protein, 121 aa, Arabidopsis thaliana
  peptide (1)..(121): Ceres Seq. ID no. 12674389
SLFFSVASSSKLPKKKKITTMSQQPPAVGVPPSHAYPAEGPPKDAYPPPGQPYPQQGYPPPQGYPQQGYPPQGYPPQGYPEQGYPQQGYPPQQQQQQKHSPGMLEGCIAALCCYCVLDACF

SEQ ID NO: 84312 - protein, 115 aa, Arabidopsis thaliana
  peptide (1)..(115): Ceres Seq. ID no. 12674390
MLIRRKDHPRTLIHLRDNPILSKDILLRRDILNKVILLKVILRRGTLNKDILNKVTHLSNNSNRNTVLVCLKDVLLLCAVTVSWTLASEWRSPLEAAKLVYTDDLISFSFVSLQT

SEQ ID NO: 84313 - protein, 101 aa, Arabidopsis thaliana
  peptide (1)..(101): Ceres Seq. ID no. 12674391
MSQQPPAVGVPPSHAYPAEGPPKDAYPPPGQPYPQQGYPPPQGYPQQGYPPQGYPPQGYPEQGYPQQGYPPQQQQQQKHSPGMLEGCIAALCCYCVLDACF

SEQ ID NO: 84314 - DNA, 1398 bp, Arabidopsis thaliana
  misc_feature (1)..(1398): Ceres Seq. ID no. 12674430
  misc_feature (1)..(1398): Ortholog of  Ceres SEQ ID NO 15177079 as cited in SEQ ID NO 51989
  misc_feature (1)..(1398): Ortholog of  Ceres SEQ ID NO 14315354 as cited in SEQ ID NO 58232
  misc_feature (1)..(1398): Ortholog of  Ceres SEQ ID NO 13596392 as cited in SEQ ID NO 62136
  misc_feature (1)..(1398): Ortholog of  Ceres SEQ ID NO 14313244 as cited in SEQ ID NO 66802
  misc_feature (1)..(1398): Ortholog of  Ceres SEQ ID NO 13654360 as cited in SEQ ID NO 67980
  misc_feature (1)..(1398): Ortholog of  Ceres SEQ ID NO 13596394 as cited in SEQ ID NO 68561
tttgttttgatttcctctctcactctgcacacgaaggcgagagagagagagaaagaaaaaagcgaagaatacgcagaatccatccaatttagggttagggctgcccctaatctggaaacctttgcctcgtttctgatctgttttccggatccgacttgaaggaaagaagacgacgacgcactaccaaaaacatgggcgcgaattcgcttccaacggatgcaaccctcgatctagatgagcagatctcgcagctcatgcagtgcaagcctctctccgagcaacaggtagcattatgtgagaaagctaaggagatcttaatggatgaaagcaacgttcagcctgttaaaagccctgtgacaatctgcggtgatattcatggacagttccatgatcttgcagagcttttccgtattgggggaaagtgtcctgataccaactatctgtttatgggagactatgtcgaccgtggatattattctgtggaaactgttacgctgttggttggcttgaaagtacggtatccacagcgaatcactattcttagaggaaaccatgaaagtcgtcagattactcaggtttatggattttatgatgaatgtctgcgaaagtatggcaatgcaaatgtttggaagatatttacagacctctttgactatttcccactgacagccttggtggagtcggaaatattctgccttcacggtggattatcaccatccatcgagacccttgacaacattaggaactttgatcgggttcaagaagttccacatgaagggcctatgtgtgacttattatggtctgatcctgatgacagatgtggctggggaatctctcctcgtggtgctggatatacatttggtcaggatatttcggaacaattcaatcacactaacaacttaaagctgatcgcccgagcgcatcagctcgttatggatggattcaattgggcacacgagcaaaaagtggttactatattcagtgcaccaaactattgctatcgctgtggaaacatggcctcaattcttgaggtcgatgactgcaggaaccacacgttcattcagtttgaaccagcaccgaggagaggagagccagatgtaacccgaaggacacctgactatttcctttgaagatactcagctcctcctgcagcttccggttgttggtttttgaagatctctgcttattccatttggttcaacgcatttgtgttccaggttgcttctctttaaaatcaatttagccctctcccttggaatagtgtaatataggcaaagaggtcaatgaactttaaaacctctcatgaacatgtgtttggctgaacttattagctcccttctgcatcagaatctgtttattgtgagatattttttcgatttatttcacgtaatttttccc

SEQ ID NO: 84315 - protein, 312 aa, Arabidopsis thaliana
  peptide (1)..(312): Ceres Seq. ID no. 12674431
MGANSLPTDATLDLDEQISQLMQCKPLSEQQVALCEKAKEILMDESNVQPVKSPVTICGDIHGQFHDLAELFRIGGKCPDTNYLFMGDYVDRGYYSVETVTLLVGLKVRYPQRITILRGNHESRQITQVYGFYDECLRKYGNANVWKIFTDLFDYFPLTALVESEIFCLHGGLSPSIETLDNIRNFDRVQEVPHEGPMCDLLWSDPDDRCGWGISPRGAGYTFGQDISEQFNHTNNLKLIARAHQLVMDGFNWAHEQKVVTIFSAPNYCYRCGNMASILEVDDCRNHTFIQFEPAPRRGEPDVTRRTPDYFL

SEQ ID NO: 84316 - protein, 291 aa, Arabidopsis thaliana
  peptide (1)..(291): Ceres Seq. ID no. 12674432
MQCKPLSEQQVALCEKAKEILMDESNVQPVKSPVTICGDIHGQFHDLAELFRIGGKCPDTNYLFMGDYVDRGYYSVETVTLLVGLKVRYPQRITILRGNHESRQITQVYGFYDECLRKYGNANVWKIFTDLFDYFPLTALVESEIFCLHGGLSPSIETLDNIRNFDRVQEVPHEGPMCDLLWSDPDDRCGWGISPRGAGYTFGQDISEQFNHTNNLKLIARAHQLVMDGFNWAHEQKVVTIFSAPNYCYRCGNMASILEVDDCRNHTFIQFEPAPRRGEPDVTRRTPDYFL

SEQ ID NO: 84317 - protein, 270 aa, Arabidopsis thaliana; identical to SEQ ID NO: 23779
  peptide (1)..(270): Ceres Seq. ID no. 12674433

SEQ ID NO: 84318 - DNA, 1509 bp, Arabidopsis thaliana
  misc_feature (1)..(1509): Ceres Seq. ID no. 12674438
  misc_feature (1)..(1509): Ortholog of  Ceres SEQ ID NO 14308698 as cited in SEQ ID NO 58663
atggaacaagtgtttgctgattggaattttgaagataattttcacatgtccactaataaaagatcaatcagaccagaagatgaattagtggagctattgtggagagatggtcaagtggttttacaaagccaagctcgtagagaaccgtcagtccaagtccaaacccacaaacaagaaaccctaagaaaacccaacaatatttttcttgacaaccaagaaacagtacaaaagcctaactacgctgctctagatgatcaagaaaccgtctcctggatacaataccctccggatgacgtcatcgaccctttcgaatccgagttctcctctcatttcttctcttcgatcgatcacctcggaggtcctgagaagccacgaacgatcgaagagacagttaagcatgaggctcaagccatggctcctcctaagtttagatcctcggttataacagtcggaccgagtcattgcggcagcaaccagtcaacaaatattcatcaggccactacacttccggtttctatgagtgatagaagcaagaacgtcgaagaaagacttgacacttcgtcaggtggctcctccggttgcagctatggaaggaacaacaaagaaaccgttagtggaacaagtgtaaccattgaccgtaaaagaaaacatgttatggatgctgatcaagaatctgtgtctcaatcagatataggtttgacctcaaccgatgatcaaaccatgggtaacaaatcgagccaacggtcaggatctactcgaagaagccgtgcagctgaagttcataatctctcagaaaggaggaggagagatcggatcaatgaaagaatgaaagctcttcaagaactcatacctcactgcagcagaacagataaagcttcgatattggatgaagcaattgattacttaaaatcacttcaaatgcaactccaagtgatgtggatgggaagtggaatggcggcggcggcagcagcagcagcaagtccgatgatgtttcccggggtacaatcatctccatacattaatcagatggctatgcaaagtcagatgcaattgtctcaattcccggttatgaaccggtccgctccgcagaaccatcccggtttagtatgtcaaaacccggtacagttgcagctccaagcacagaaccaaatcttatcggagcagctcgctaggtacatgggcgggattccccagatgccgccggcgggaaatcagaccgtgcaacaacaaccagcggacatgttgggatttggatctccggcgggaccgcaaagtcaactgtcggcaccggcgaccaccgacagtcttcatatgggtaaaataggctgacttggcatatagttttcctccgaaattattcttcttacagttggtgattgttatttatttttggtcgcctaagcaagcataaaagctaagtcaaatgtattatagagatctaataagttagtctcatacttataacttatttttaaacagttgaattatagtatcaatcaagtgttggga

SEQ ID NO: 84319 - protein, 442 aa, Arabidopsis thaliana
  peptide (1)..(442): Ceres Seq. ID no. 12674439
MEQVFADWNFEDNFHMSTNKRSIRPEDELVELLWRDGQVVLQSQARREPSVQVQTHKQETLRKPNNIFLDNQETVQKPNYAALDDQETVSWIQYPPDDVIDPFESEFSSHFFSSIDHLGGPEKPRTIEETVKHEAQAMAPPKFRSSVITVGPSHCGSNQSTNIHQATTLPVSMSDRSKNVEERLDTSSGGSSGCSYGRNNKETVSGTSVTIDRKRKHVMDADQESVSQSDIGLTSTDDQTMGNKSSQRSGSTRRSRAAEVHNLSERRRRDRINERMKALQELIPHCSRTDKASILDEAIDYLKSLQMQLQVMWMGSGMAAAAAAAASPMMFPGVQSSPYINQMAMQSQMQLSQFPVMNRSAPQNHPGLVCQNPVQLQLQAQNQILSEQLARYMGGIPQMPPAGNQTVQQQPADMLGFGSPAGPQSQLSAPATTDSLHMGKIG

SEQ ID NO: 84320 - protein, 427 aa, Arabidopsis thaliana
  peptide (1)..(427): Ceres Seq. ID no. 12674440
MSTNKRSIRPEDELVELLWRDGQVVLQSQARREPSVQVQTHKQETLRKPNNIFLDNQETVQKPNYAALDDQETVSWIQYPPDDVIDPFESEFSSHFFSSIDHLGGPEKPRTIEETVKHEAQAMAPPKFRSSVITVGPSHCGSNQSTNIHQATTLPVSMSDRSKNVEERLDTSSGGSSGCSYGRNNKETVSGTSVTIDRKRKHVMDADQESVSQSDIGLTSTDDQTMGNKSSQRSGSTRRSRAAEVHNLSERRRRDRINERMKALQELIPHCSRTDKASILDEAIDYLKSLQMQLQVMWMGSGMAAAAAAAASPMMFPGVQSSPYINQMAMQSQMQLSQFPVMNRSAPQNHPGLVCQNPVQLQLQAQNQILSEQLARYMGGIPQMPPAGNQTVQQQPADMLGFGSPAGPQSQLSAPATTDSLHMGKIG

SEQ ID NO: 84321 - protein, 305 aa, Arabidopsis thaliana
  peptide (1)..(305): Ceres Seq. ID no. 12674441
MAPPKFRSSVITVGPSHCGSNQSTNIHQATTLPVSMSDRSKNVEERLDTSSGGSSGCSYGRNNKETVSGTSVTIDRKRKHVMDADQESVSQSDIGLTSTDDQTMGNKSSQRSGSTRRSRAAEVHNLSERRRRDRINERMKALQELIPHCSRTDKASILDEAIDYLKSLQMQLQVMWMGSGMAAAAAAAASPMMFPGVQSSPYINQMAMQSQMQLSQFPVMNRSAPQNHPGLVCQNPVQLQLQAQNQILSEQLARYMGGIPQMPPAGNQTVQQQPADMLGFGSPAGPQSQLSAPATTDSLHMGKIG

SEQ ID NO: 84322 - DNA, 966 bp, Arabidopsis thaliana
  misc_feature (1)..(966): Ceres Seq. ID no. 12674442
  misc_feature (1)..(966): Ortholog of  Ceres SEQ ID NO 12635696 as cited in SEQ ID NO 0
atgcatcgtagagcagcaattcaagaatcggatgacgaagaagatgagacttacaacgacgtcgttcctgaatctccttcttcttgtgaagactcaaagatctcaaaaccaactccaaagaaaaggaggaacgtagagaagagagttgtctcagttccgatagctgacgtggaaggatctaagagcagaggcgaagtatatccaccgtccgattcatgggcctggagaaagtacggacaaaaaccgatcaaaggctcgccttatcccaggggatattacagatgtagtagctcaaaaggatgtccggcgaggaagcaggtggagagaagccgtgtggacccttctaagcttatgattacttacgcctgcgaccacaatcaccctttcccttcctcctccgctaacaccaaatcccaccaccgctcctccgtcgtcctcaaaaccgcaaagaaagaggaagaatacgaagaggaggaagaagaactaaccgtcaccgccgcagaggaaccaccggcgggacttgatctaagccacgtagactcaccgttgctattaggcggctgctacagcgaaatcggagagttcgggtggttctacgacgcgtcgatctcatcatcatctggttcttcgaatttcctcgacgtaactctagagagaggtttttcagtaggccaagaggaagatgagtctttgttcggtgatctcggtgatttacctgattgcgcctccgtgttccgccgtgggactgttgcgacggaggagcaacatcgaagatgtgattttggcgccattcctttctgtgatagttctagatgagtttgtgtgtgtagccaaaaccaaaagaaaaaaacacaatttttttattttccactgtaaaggtgtatcaatggtggattcatttttttaaaaaaggaaacccaaataataaatttaatatcatttgagagaattcaagtacaattaaag

SEQ ID NO: 84323 - protein, 271 aa, Arabidopsis thaliana
  peptide (1)..(271): Ceres Seq. ID no. 12674443
MHRRAAIQESDDEEDETYNDVVPESPSSCEDSKISKPTPKKRRNVEKRVVSVPIADVEGSKSRGEVYPPSDSWAWRKYGQKPIKGSPYPRGYYRCSSSKGCPARKQVERSRVDPSKLMITYACDHNHPFPSSSANTKSHHRSSVVLKTAKKEEEYEEEEEELTVTAAEEPPAGLDLSHVDSPLLLGGCYSEIGEFGWFYDASISSSSGSSNFLDVTLERGFSVGQEEDESLFGDLGDLPDCASVFRRGTVATEEQHRRCDFGAIPFCDSSR

SEQ ID NO: 84324 - protein, 154 aa, Arabidopsis thaliana; identical to SEQ ID NO: 38751
  peptide (1)..(154): Ceres Seq. ID no. 12674444

SEQ ID NO: 84325 - DNA, 582 bp, Arabidopsis thaliana
  misc_feature (1)..(582): Ceres Seq. ID no. 12674469
  misc_feature (1)..(582): Ortholog of  Ceres SEQ ID NO 14304689 as cited in SEQ ID NO 53265
  misc_feature (1)..(582): Ortholog of  Ceres SEQ ID NO 14307820 as cited in SEQ ID NO 53938
  misc_feature (1)..(582): Ortholog of  Ceres SEQ ID NO 15177137 as cited in SEQ ID NO 55030
  misc_feature (1)..(582): Ortholog of  Ceres SEQ ID NO 13599557 as cited in SEQ ID NO 0
tcaattaacataaccttcgccgtcgatgaagctttcccttcaattcccactaccttcagcgtcgcaacgaaacaacactacgacgtaaaaccaatccaccatgaagtttatgacggagaaaggaagatatacgacatcagccaccagtacacgccggagttgccggtttgggagtcttcagaaggactagggaactttcttagacttgccgtgagtatgaagaatggatccgatgctaatatctcgaagatggaactatctgttcactctggaactcatgttgatgcaccaggccatttccatgaccattattatgagtctggttttgatactgattcacttgatcttcaaatccttaatggtaaacatttttggaactcttttttttttttttttaagtagctagtgatcgtttttgaaattggtttctgtgaatttaatttataggtcctgctttattggttgatgttccaagagataagaacatttcaggtttgttgagagttttctaacattgaaatttttacaaaatcttcattaaatgtttgttacaaaatttttgtgtaatgatttggttgttgt

SEQ ID NO: 84326 - protein, 133 aa, Arabidopsis thaliana
  peptide (1)..(133): Ceres Seq. ID no. 12674470
SINITFAVDEAFPSIPTTFSVATKQHYDVKPIHHEVYDGERKIYDISHQYTPELPVWESSEGLGNFLRLAVSMKNGSDANISKMELSVHSGTHVDAPGHFHDHYYESGFDTDSLDLQILNGKHFWNSFFFFFK

SEQ ID NO: 84327 - DNA, 1458 bp, Arabidopsis thaliana
  misc_feature (1)..(1458): Ceres Seq. ID no. 12674515
  misc_feature (1)..(1458): Ortholog of  Ceres SEQ ID NO 15177414 as cited in SEQ ID NO 57242
  misc_feature (1)..(1458): Ortholog of  Ceres SEQ ID NO 13594151 as cited in SEQ ID NO 58886
aaaaatttcgaaatcggaaaatttacacagagaagcgccatgacctaaaaatctcaaaacttccccaacaaaaatggcgcttttactcaacccatttccttttacctaccttgtacattaccccttttctcaaatctcactttcccactgaaataaccccatggcggagaatcagaactgtgcgaggatgacgagagcggcggcgaaacgaaaagcgtcgtccatggcgttagacgaaaacccagttagtaagaagagagttgttctcggagagcttccgaatatgtccaatgtcgttgctgtacccaatcaagaaagagagacccttaaggctaaaacaagtgttaatacctcgaagaggcagatgaagaaggctttgatgattcctgaagctagcgtactaatcgaatcgagatctgttgatcctcagatgtgtgagccttttgctagtgatatttgtgcttatctccgtgaaatggaggggaagccgaaacatagaccactacctgattatattgaaaaggttcagagtgatttaactccacacatgagagcggttttggtggattggttagtggaggttgctgaggagtacaagcttgtttcggatacgctttatctcactatctcctatgttgatagattcttgtctgtgaagcctattaacaggcagaagcttcagcttgtgggagtttctgcaatgcttattgcgtcgaaatatgaagagataggtcctcctaaagttgaagatttttgttacattacggataatacatttactaaacaagaagtggtgtcgatggaggcggatatacttcttgctctgcagtttgaattaggaagcccaaccatcaaaacattcctaagacggtttacacgggttgcacaagaagatttcaaagactcacaattgcagatagagttcctttgttgctatctatcagaattgagtatgttagattacacctgtgtgaagtatttgccatctcttttgtctgcttcagctgtatttcttgcccggttcatcatccgtccaaaacaacatccttggaatcaaatgctagaagaatacacaaagtacaaagcagctgatctacaagtgtgcgtgggtatcatacatgacttgtatctaagcagaagaggaaacactctagaagctgttagaaataagtacaagcaacacaagtacaagtgcgttgcgaccatgcctgtttcaccggagctacctcttgctttctttgaagatattaccattagaggaatggcgtaaaagaagcttgaagcttatgtattggaagtgttagttacctgaattttgggttgtatatatctgttagaatggcagattagtattgagtattatctcttttagcgtatgttcaatgatttttgctaacactagttaagaaacttttttttttttgcttgaccattttttcaatggtttattagattttt

SEQ ID NO: 84328 - protein, 369 aa, Arabidopsis thaliana; identical to SEQ ID NO: 23843
  peptide (1)..(369): Ceres Seq. ID no. 12674516

SEQ ID NO: 84329 - protein, 360 aa, Arabidopsis thaliana; identical to SEQ ID NO: 23844
  peptide (1)..(360): Ceres Seq. ID no. 12674517

SEQ ID NO: 84330 - protein, 348 aa, Arabidopsis thaliana; identical to SEQ ID NO: 23845
  peptide (1)..(348): Ceres Seq. ID no. 12674518

SEQ ID NO: 84331 - DNA, 1285 bp, Arabidopsis thaliana
  misc_feature (1)..(1285): Ceres Seq. ID no. 12674550
  misc_feature (1)..(1285): Ortholog of  Ceres SEQ ID NO 15178007 as cited in SEQ ID NO 54186
  misc_feature (1)..(1285): Ortholog of  Ceres SEQ ID NO 14314100 as cited in SEQ ID NO 68860
accgttttggtcaatcctttgaatctctcctaataaaaccctaaaagatcatcatcatcatcgtcgtcgtcgtcccgctcaatggatactcgtcgcggagctcttgcggttcctaaagtccgtcgagtaggtttcttcacatcaatcgagccgcctccagaatcatcattacaacgaccaaatcgaagccaatccggtccagtagatgcaaccacctcttcttctcctctctccgattcaccttccggtaacttaatttctccggtcttaattccaccgtcgcgtcaccattccgacaatttaacctctcgcgttgctgctgctgctgctgctcctgtgcccgtccctggacctgccgctttccgccgatacttaactcctgaacggactcttcttcacgttggtagttacaatcctccggattcgcttctcgggacatcatcaccctcgagtaacggagggctttctgaggattcggcttctctgtttgggttccaacggagtgattcgacgaaattatcagcaagcttacctaatggaggctttgatttgactctagctgttagagctcctcaggaatctgaaaccaaaattgcgaccacgtctgcttctcaagggaaaaagaagatcgccgaagtttctggaaagagtgagtctgcgaccacaaaaccccagaaggaaaaggaaccaaaagcattgaaagataaaaccactaaagcagaaagacgtgccatccaagaggcacaacgggcagcaaaagctgctgcaaaaggcgaaggaagcaggcgtgcagatgagtctggtagagctaatcctggcaaggctgccataaagccccaaccaaagaaagaaagacttcccgtcacgtcctctgtttctgaaaaaacagctgtagcagtagaaaaagagaagaggatggatgtccctcagacacaaatgcagtatgatgataaaagccgagtggataaagctaagaggcgagctgtggttgaacagaccgagagcaagaacaaagttgaattatttctccatcttcctcaatacgaacgcagcaatcagcttcccaatttaagctccaattttttcacactcgattccatacaccatgcagtctataaggtgggtttgcaacatttggctggagatatatctggggacaatgcacgatgtattgccatgctccaagcatttcaagaagctatagaagattacagtacacctcctatgaaagacctgaccatggacttgacagccaagataaacggttatgtttcattcttgatag

SEQ ID NO: 84332 - protein, 401 aa, Arabidopsis thaliana; identical to SEQ ID NO: 23368
  peptide (1)..(401): Ceres Seq. ID no. 12674551

SEQ ID NO: 84333 - DNA, 559 bp, Arabidopsis thaliana
  misc_feature (1)..(559): Ceres Seq. ID no. 12674619
  misc_feature (1)..(559): Ortholog of  Ceres SEQ ID NO 14304353 as cited in SEQ ID NO 20380
  misc_feature (1)..(559): Ortholog of  Ceres SEQ ID NO 12562293 as cited in SEQ ID NO 20690
gcaaaaaatggcttccaaggctttgattctgttaggtctcttctcagttcttctcgtcgtctccgaagtgtctgccgcaaggcaatcgggcatggtgaagccagagagtgaggaaactgtgcaacctgaaggttatggcggtggccacggaggacatggtggtcacggagggggaggaggccacggacatggaggacacaacggaggagggggccacggacttgacggatacggaggaggtggaggacactatggaggaggtggaggacactacggaggaggtggaggacactacggaggaggtggaggacactacggaggaggtggtggaggaggatacggaggtggaggaggacaccacggaggaggaggccacgggctaaacgaacctgttcagactaagccgggtgtttaaaactatataatatcttcactaccatgcatgattgcatatatatatatacgcttatgtattatctatatgcctataaataaaccatggtgagtttgtaacgcagtgccttcagaaatgttcggaataaatttccataatattagt

SEQ ID NO: 84334 - protein, 137 aa, Arabidopsis thaliana
  peptide (1)..(137): Ceres Seq. ID no. 12674620
QKMASKALILLGLFSVLLVVSEVSAARQSGMVKPESEETVQPEGYGGGHGGHGGHGGGGGHGHGGHNGGGGHGLDGYGGGGGHYGGGGGHYGGGGGHYGGGGGHYGGGGGGGYGGGGGHHGGGGHGLNEPVQTKPGV

SEQ ID NO: 84335 - protein, 135 aa, Arabidopsis thaliana
  peptide (1)..(135): Ceres Seq. ID no. 12674621
MASKALILLGLFSVLLVVSEVSAARQSGMVKPESEETVQPEGYGGGHGGHGGHGGGGGHGHGGHNGGGGHGLDGYGGGGGHYGGGGGHYGGGGGHYGGGGGHYGGGGGGGYGGGGGHHGGGGHGLNEPVQTKPGV

SEQ ID NO: 84336 - protein, 107 aa, Arabidopsis thaliana
  peptide (1)..(107): Ceres Seq. ID no. 12674622
MVKPESEETVQPEGYGGGHGGHGGHGGGGGHGHGGHNGGGGHGLDGYGGGGGHYGGGGGHYGGGGGHYGGGGGHYGGGGGGGYGGGGGHHGGGGHGLNEPVQTKPGV

SEQ ID NO: 84337 - DNA, 549 bp, Arabidopsis thaliana
  misc_feature (1)..(549): Ceres Seq. ID no. 12674643
  misc_feature (1)..(549): Ortholog of  Ceres SEQ ID NO 12562293 as cited in SEQ ID NO 20690
atcacttacttaacatactaagagagttattagaacttgcaaaaaatggcttccaaggctttgattctgttaggtctcttctcagttcttctcgtcgtctccgaagtgtctgccgcaaggcaatcgggcatggtgaagccagagagtgaggaaactgtgcaacctgaaggttatggcggtggccacggaggacatggtggtcacggagggggaggaggccacggacatggaggacacaacggaggagggggccacggacttgacggatacggaggaggtggaggacactatggaggaggtggaggacactacggaggaggtggaggacactacggaggaggtggaggacactacggaggaggaggccacgggctaaacgaacctgttcagactaagccgggtgtttaaaactatataatatcttcactaccatgcatgattgcatatatatatatacgcttatgtattatctatatgcctataaataaaccatggtgagtttgtaacgcagtgccttcagaaatgttcggaataaatttccataatatt

SEQ ID NO: 84338 - protein, 120 aa, Arabidopsis thaliana
  peptide (1)..(120): Ceres Seq. ID no. 12674644
MASKALILLGLFSVLLVVSEVSAARQSGMVKPESEETVQPEGYGGGHGGHGGHGGGGGHGHGGHNGGGGHGLDGYGGGGGHYGGGGGHYGGGGGHYGGGGGHYGGGGHGLNEPVQTKPGV

SEQ ID NO: 84339 - protein, 92 aa, Arabidopsis thaliana
  peptide (1)..(92): Ceres Seq. ID no. 12674645
MVKPESEETVQPEGYGGGHGGHGGHGGGGGHGHGGHNGGGGHGLDGYGGGGGHYGGGGGHYGGGGGHYGGGGGHYGGGGHGLNEPVQTKPGV

SEQ ID NO: 84340 - protein, 67 aa, Arabidopsis thaliana
  peptide (1)..(67): Ceres Seq. ID no. 12674646
MAVATEDMVVTEGEEATDMEDTTEEGATDLTDTEEVEDTMEEVEDTTEEVEDTTEEVEDTTEEEATG

SEQ ID NO: 84341 - DNA, 952 bp, Arabidopsis thaliana
  misc_feature (1)..(952): Ceres Seq. ID no. 12674651
  misc_feature (1)..(952): Ortholog of  Ceres SEQ ID NO 14304209 as cited in SEQ ID NO 56460
  misc_feature (1)..(952): Ortholog of  Ceres SEQ ID NO 12586351 as cited in SEQ ID NO 64028
  misc_feature (1)..(952): Ortholog of  Ceres SEQ ID NO 15177482 as cited in SEQ ID NO 0
cgagaaagacgaacacttacaaaaaaaaatctctttgtgagctttagcgatcgtaacaatggcgaacgaggtgattcttcttgatttctggccgagtatgttcgggatgaggacaaggatcgcattgagggagaaaggtgttgaatttgagtacagagaagaagatctaaggaacaagagtcctttgcttctccagatgaatccgattcacaagaagattcctgttctcatccacaatggtaaaccggttaacgaatctatcatccaggttcagtacattgacgaggtctggtctcacaagaaccctattcttccttctgatccttacctgagagctcaagctaggttctgggctgatttcattgacaagaagctgtatgatgctcagaggaaggtgtgggcgacaaagggtgaggaacaagaggcagggaagaaggatttcattgagatactcaagactcttgaatctgagcttggagacaaaccttactttagtggcgatgactttggctatgtagacattgcgttgattggattctacacatggtttccagcatacgagaagtttgctaacttcagtatcgaatctgaggttccgaaactgattgcttgggttaagaagtgtttgcagagggagagcgtggctaagtccttgcctgatcctgagaaggttactgaattcgtctctgagctcaggaagaaatttgtacctgagtaaatatgtttctcttgtcatatggttcggacttaagatgctctctgttttactttcgtgtgttgtctttcttaaataatgcagagcatctgtgaggtggtttgagtgtagagaatgtatgtctttgctgtagcagattcctgtgttttctggatttaatggcttgtcctagtttttatgcattgtaactatgagtttaattaatgatcgttaatctataatgattattaatttgtt

SEQ ID NO: 84342 - protein, 219 aa, Arabidopsis thaliana; identical to SEQ ID NO: 21639
  peptide (1)..(219): Ceres Seq. ID no. 12674652

SEQ ID NO: 84343 - protein, 206 aa, Arabidopsis thaliana; identical to SEQ ID NO: 21640
  peptide (1)..(206): Ceres Seq. ID no. 12674653

SEQ ID NO: 84344 - protein, 203 aa, Arabidopsis thaliana; identical to SEQ ID NO: 21641
  peptide (1)..(203): Ceres Seq. ID no. 12674654

SEQ ID NO: 84345 - DNA, 1238 bp, Arabidopsis thaliana
  misc_feature (1)..(1238): Ceres Seq. ID no. 12674724
  misc_feature (1)..(1238): Ortholog of  Ceres SEQ ID NO 13598499 as cited in SEQ ID NO 64013
aaaaaacgagcagctgtttatcttccaacaaagcttcttcgtgcatcttcgctcttctcaactcgtcatcctctccctctgattctcttaagtcgccttgaaaaattaagacaaaacaacaacaaaagaacaagagaagctctaaaatccagcagctatggcgtttcttctccccaatctctctccttctttccttcttccgaccggaaaatcactcaaagagaaacccatttccaaccaagctttatcatcatcatcatcatcgtccaatagctacgagtttgaagaagatagtctctctccactttctctctttagcgtccaggctcctcctcctgttcgaggtgcgcaggttaagaccaaaccaagtgcgcaggataagtaccagcacggcagcaaagatgacttctacatcaatctcggtttagctgtacgtacccttcgcgaagatttgcctctcctcttcaccaaagatctcaattacgacatttacagggatgatataacattagtggatccaatgaacacgttctctgggattgacaactacaaattgatcttctgggcacttagatttcatggcaagattctcttcagggatatctcacttgagatcttcagggtttggcaaccatcagagaacatgattctcatcaggtggaatcttaaaggtgtacctagagtcccatgggaggcaaagggagagtttcagggtacttctcgctataaactcgaccgaaatggcaaaatctatgagcataaggtcgataacttggccttcaacttccctcaccagctcaaacctgccacttctgttttggatatggtcaccgcttgccctgcaagtcccaatccaactttcatgtttggcgccatggattcatactcatcttcttggattgagttctacaaagcagtgcaaaggacactagacaagcaagaagagcaaatgcttgtgcaagaccatttcgtcccatgctcataatgccattaggtcacactcaggtgtatatatatatactgttacattgaagatacaatacatatatctatgtgtgcaggcatatgcatatgagtagatgtggttgacttagatatcaaagagggtagggaaccaagaatactcatgagcttgtacaacttgcctattgaatgtaaacagaattccttacagttgttttgttatgtaaaacacattgatgatttgtctttacgatcaagcgaaattatatcccttg

SEQ ID NO: 84346 - protein, 275 aa, Arabidopsis thaliana; identical to SEQ ID NO: 35228
  peptide (1)..(275): Ceres Seq. ID no. 12674725

SEQ ID NO: 84347 - protein, 154 aa, Arabidopsis thaliana; identical to SEQ ID NO: 35229
  peptide (1)..(154): Ceres Seq. ID no. 12674726

SEQ ID NO: 84348 - DNA, 2501 bp, Arabidopsis thaliana
  misc_feature (1)..(2501): Ceres Seq. ID no. 12674735
  misc_feature (1)..(2501): Ortholog of  Ceres SEQ ID NO 13597044 as cited in SEQ ID NO 63531
acagtcacggagatagatagtaagagagagctatggcggaggagcacttcgacgttctgactaaatccggtgagaagaccggtgtgtccaaacccaggggagaggttcacagagatggagattaccatcgtgctgttcatgtctggatttttgtggagactactcaacagctacttctccaacttcgatctgatgataaagattcttggcctggtcaatgggacatctctagtgctggccatatatcagctggtgatacatcgcttctatctgcacagcgggagcttgaggaagagcttggcgtaaaactcccaaaggatgcatttgaaaagatcttcgtttttctgcaggaatgtgtcacaaacgatggcaaattcataaataatgagttcaatgatgtgtatcttgttactattctgcatccaatcccattagaagcctttactcttcaaaaagaggaagtctctgctgtaaagtacgtaccttacgaagaatacagaaactttctgtctaaggaagatcctgcttatgtgccatatgatgttaatggagagtatggaaaactatttgacataatcagacagaggtgccaagtgaacactgaggcccgtagtttatctctgcagaagcaactccagagatattctccagtcaccctcgaagccaagttgacagaactttctgaagcagatcagaaagcgttgggtctaattgtgaaggctgcaaaaattatggacgatatattctatgagcaggtttggaacagcaatccagccctaagagattggctgaaggatcatgccaatgcatcaaaactggacaaactaaaatgggattacttcacgatcaacaaaagtccatggtcgtctcttgatgaaaatgaagcattcttgagtactgcggattcagctgtaaagttgcttcctggagcaacaaaagccatagctggctggaagggtcttgaatatagagcagcctttccagtgactaaaccacctggtgccaatttctatcctcccgatatggataaaatggagttcaccttatggctcaatggccttacggaagagcaaaagcatgctgcaacaggatttttcagtgttataaaaaggcgaagtgaagctaatttagatgcttctgatcatcttgccagcagcacaaagaagttaccagactctaattccgatctgtatagtattccttattcagagatatatcgacctttcctcaagaaagcttctgaattcttgcagaaagctggggacttggtcagttcgccaagttgaagaagctactgcacagcaaagctgaagccttcctttcaaatgagtattatgagtcagacatcgcatggatggacttggattcaaagttagatattaccattggtccatatgagacgtacgaggatgaaatctttgggtataaggctacatttgaaaccttcatcggtattcgagatgataaagccacagctgatctgaaactctttggtgacaatctaaagctattggaagataatctcccgcttgagagtgtatacaaatcgacagatgtatctgctgctcctattcgggtcatccagttaatttacaattccggggatgtgaagggtcctcagactgttgcttacaatttgccaaacgatgaaaaaatcgtgaaggatagaggaacatcaatggttatgctcaagaacgtccaagaggcaaagtttgaacatattttaaagcctatagctgaaatcaccatcagcaaggaacagagaggattagttgattttgattctttcttcactcacaccatttgccatgaatgttgccatggcattggtccccataccataacccttcctggtggtcaaacctcaacagtgagaaaggaactacaagaagtccattctgcaatggaagaagcaaaggcagatatagttggtctttgggcactgaagtttctcatcactaaggggttgctttcaaagagtatggtggagagtatgtatgtttcgttcctagctggttgctttagatcgatccggtttggtctcacagaagctcatgggaaagggcaagccttgcaattcaactatttatatgaaaaaggagccttcgtgttccacgaggactctacattctcggttgatttcgctaagatcgaaggtgcagttgagagcctgagccatgagatactaactattcaaggaaaaggtgacaaaaacgcagcaacattgcttctaaataagtactgcactatcaccggaccattgaaaaccgctctggagaatctcgaacgcgttaaggtaccggtggatatatctccgacatttccattagcagaagcattgatgaactgaggaaagtttcagtttcagcaagactctggttttaacttttaataaataaataaaactcagatgatccatcatcataaaccaaatttgggatttaaaagagttatctgaatggtgttgtgttcttatcataataaagttgctacctttacat

SEQ ID NO: 84349 - protein, 417 aa, Arabidopsis thaliana
  peptide (1)..(417): Ceres Seq. ID no. 12674736
MAEEHFDVLTKSGEKTGVSKPRGEVHRDGDYHRAVHVWIFVETTQQLLLQLRSDDKDSWPGQWDISSAGHISAGDTSLLSAQRELEEELGVKLPKDAFEKIFVFLQECVTNDGKFINNEFNDVYLVTILHPIPLEAFTLQKEEVSAVKYVPYEEYRNFLSKEDPAYVPYDVNGEYGKLFDIIRQRCQVNTEARSLSLQKQLQRYSPVTLEAKLTELSEADQKALGLIVKAAKIMDDIFYEQVWNSNPALRDWLKDHANASKLDKLKWDYFTINKSPWSSLDENEAFLSTADSAVKLLPGATKAIAGWKGLEYRAAFPVTKPPGANFYPPDMDKMEFTLWLNGLTEEQKHAATGFFSVIKRRSEANLDASDHLASSTKKLPDSNSDLYSIPYSEIYRPFLKKASEFLQKAGDLVSSPS

SEQ ID NO: 84350 - protein, 331 aa, Arabidopsis thaliana
  peptide (1)..(331): Ceres Seq. ID no. 12674737
MDLDSKLDITIGPYETYEDEIFGYKATFETFIGIRDDKATADLKLFGDNLKLLEDNLPLESVYKSTDVSAAPIRVIQLIYNSGDVKGPQTVAYNLPNDEKIVKDRGTSMVMLKNVQEAKFEHILKPIAEITISKEQRGLVDFDSFFTHTICHECCHGIGPHTITLPGGQTSTVRKELQEVHSAMEEAKADIVGLWALKFLITKGLLSKSMVESMYVSFLAGCFRSIRFGLTEAHGKGQALQFNYLYEKGAFVFHEDSTFSVDFAKIEGAVESLSHEILTIQGKGDKNAATLLLNKYCTITGPLKTALENLERVKVPVDISPTFPLAEALMN

SEQ ID NO: 84351 - protein, 223 aa, Arabidopsis thaliana
  peptide (1)..(223): Ceres Seq. ID no. 12674738
MVMLKNVQEAKFEHILKPIAEITISKEQRGLVDFDSFFTHTICHECCHGIGPHTITLPGGQTSTVRKELQEVHSAMEEAKADIVGLWALKFLITKGLLSKSMVESMYVSFLAGCFRSIRFGLTEAHGKGQALQFNYLYEKGAFVFHEDSTFSVDFAKIEGAVESLSHEILTIQGKGDKNAATLLLNKYCTITGPLKTALENLERVKVPVDISPTFPLAEALMN

SEQ ID NO: 84352 - DNA, 1154 bp, Arabidopsis thaliana
  misc_feature (1)..(1154): Ceres Seq. ID no. 12674766
  misc_feature (1)..(1154): Ortholog of  Ceres SEQ ID NO 12612333 as cited in SEQ ID NO 56421
gaaacccaaaccctcattccaaaaaatggggtctcgctctcaaaacctctcctttctcgtcctcctcctccttggcttcgttgccgtctcctatgcttgcgactgtacccctcctaaaccatcaccagcacctcacaaaccaccaaaacatccagtcaaaccgcctaaacctcctgccgtcaaaccacctaaaccaccggcagtaaaaccacctactccaaaacctcccaccgtgaaaccccatcctaaaccaccaaccaaacctcacccccacccaaaacctcccatcgtaaagccaccaaccaagcctcctccgtccacccctaaacctcccaccaaacctcccccgtccacacctaaacctcccacgaccaagcctcctccgtctactccgaaaccaccccaccacaagcctccgcctacaccatgcccaccaccaacaccaacgccgactccaccagttgtaacaccgccaacaccaaccccacccgtcataactccaccaacaccaaccccacccgtcgtaacaccgccaacgccaactccacccgtcattacaccaccaacaccaactccacccgtcattacaccaccaacaccaacaccacccgtcgtgacacctccaacaccaacaccacccgtagtaacaccaccaacaccaactcctcctacgcctattccagagacttgcccaattgacacgctgaagctaggcgcttgtgtggacgttcttggaggtttgattcacatcggacttggaaaaagccacgccaaggcagaatgttgtccggttttaggaggtttacttgacctagacgcagccgtttgtctatgtaccaccattaagctcaaacttctcaacatcgaccttgttctccccattgctcttgagcttcttctcgactgtggaaaaactccaccatctgacttcaaatgtcccgcttaatcgatgtagaacgttgagagtctctggacgactccaaaagtttcgtttcttcaagaaatttgttagtttcatgatctatttggtaatgggaggttaatctgcatatgtgcgacctttagttacatgtttcatttgatacaataaaaggcgttgtaatttgggtttgagatttcaatttctttgggctttcttgttatgttgtactttt

SEQ ID NO: 84353 - protein, 314 aa, Arabidopsis thaliana
  peptide (1)..(314): Ceres Seq. ID no. 12674767
KPKPSFQKMGSRSQNLSFLVLLLLGFVAVSYACDCTPPKPSPAPHKPPKHPVKPPKPPAVKPPKPPAVKPPTPKPPTVKPHPKPPTKPHPHPKPPIVKPPTKPPPSTPKPPTKPPPSTPKPPTTKPPPSTPKPPHHKPPPTPCPPPTPTPTPPVVTPPTPTPPVITPPTPTPPVVTPPTPTPPVITPPTPTPPVITPPTPTPPVVTPPTPTPPVVTPPTPTPPTPIPETCPIDTLKLGACVDVLGGLIHIGLGKSHAKAECCPVLGGLLDLDAAVCLCTTIKLKLLNIDLVLPIALELLLDCGKTPPSDFKCPA

SEQ ID NO: 84354 - protein, 306 aa, Arabidopsis thaliana
  peptide (1)..(306): Ceres Seq. ID no. 12674768
MGSRSQNLSFLVLLLLGFVAVSYACDCTPPKPSPAPHKPPKHPVKPPKPPAVKPPKPPAVKPPTPKPPTVKPHPKPPTKPHPHPKPPIVKPPTKPPPSTPKPPTKPPPSTPKPPTTKPPPSTPKPPHHKPPPTPCPPPTPTPTPPVVTPPTPTPPVITPPTPTPPVVTPPTPTPPVITPPTPTPPVITPPTPTPPVVTPPTPTPPVVTPPTPTPPTPIPETCPIDTLKLGACVDVLGGLIHIGLGKSHAKAECCPVLGGLLDLDAAVCLCTTIKLKLLNIDLVLPIALELLLDCGKTPPSDFKCPA

SEQ ID NO: 84355 - DNA, 1363 bp, Arabidopsis thaliana
  misc_feature (1)..(1363): Ceres Seq. ID no. 12674785
  misc_feature (1)..(1363): Ortholog of  Ceres SEQ ID NO 13654187 as cited in SEQ ID NO 68219
aaagagttctcctacaattttcctaaattcttggatttgagatttcactttttccgatttgaaacaatgatgataactcgcggtggagccaaggcggcgaaatcgctgttagtggcggctggaccacgtttgttctcgacggtccgtacggtttcgtctcacgaggctttatcagcaagccatattttgaagcctggtgttacatctgcttggatatggactagagctccgacgattggaggtatgagattcgctagcacgatcactctgggagagaaaactccgatgaaggaggaggacgcgaatcagaagaaaacagagaacgaatccaccggtggagacgccgccggaggtaataacaagggagataaaggaatcgcgagctattggggtgttgaacctaataagattactaaagaagatggttctgaatggaagtggaactgtttcaggccatgggaaacgtataaagctgatataacgatagatctgaagaagcatcatgttccaacgacgtttcttgatagaatagcttattggactgttaaatctcttcgttggcctaccgatttgttcttccagaggagatatggatgtcgagctatgatgcttgaaactgtagcagcagtacctggaatggttggaggaatgttactacactgcaaatcgcttcgacgttttgagcaaagtggaggatggattaaggctcttcttgaggaagcagagaatgagagaatgcatcttatgacattcatggaagtcgcgaaaccgaaatggtacgagagagcgctcgtgatcactgtgcaaggagtcttcttcaacgcttatttccttggttacttaatctctcccaagtttgctcatcgtatggttgggtaccttgaagaagaagcgatccattcttatactgagtttctcaaggaacttgacaaaggtaacattgagaatgttcctgctccggctattgctattgattactggaggcttcctgctgatgcgacacttcgtgatgttgtgatggttgttcgtgctgacgaggctcatcaccgtgatgtaaaccattttgcatctgatattcactaccaaggtcgtgaactaaaggaagctccagctccaattgggtatcattgattcgattaaaagaagagctttttctcaagtttaaaactttgttctaaagaatttaagttctttgacttgtatatacatcatcacctctgcttaagccatacttggattcggctttctttgaatgttgctacgaatgttctgatttcttctttacttttcctgtcaatgggcttttgggcttatcttttgctattgtatggccttgctatttagaatgagagtaatagtttgt

SEQ ID NO: 84356 - protein, 376 aa, Arabidopsis thaliana
  peptide (1)..(376): Ceres Seq. ID no. 12674786
KEFSYNFPKFLDLRFHFFRFETMMITRGGAKAAKSLLVAAGPRLFSTVRTVSSHEALSASHILKPGVTSAWIWTRAPTIGGMRFASTITLGEKTPMKEEDANQKKTENESTGGDAAGGNNKGDKGIASYWGVEPNKITKEDGSEWKWNCFRPWETYKADITIDLKKHHVPTTFLDRIAYWTVKSLRWPTDLFFQRRYGCRAMMLETVAAVPGMVGGMLLHCKSLRRFEQSGGWIKALLEEAENERMHLMTFMEVAKPKWYERALVITVQGVFFNAYFLGYLISPKFAHRMVGYLEEEAIHSYTEFLKELDKGNIENVPAPAIAIDYWRLPADATLRDVVMVVRADEAHHRDVNHFASDIHYQGRELKEAPAPIGYH

SEQ ID NO: 84357 - protein, 354 aa, Arabidopsis thaliana; identical to SEQ ID NO: 40785
  peptide (1)..(354): Ceres Seq. ID no. 12674787

SEQ ID NO: 84358 - protein, 353 aa, Arabidopsis thaliana; identical to SEQ ID NO: 40786
  peptide (1)..(353): Ceres Seq. ID no. 12674788

SEQ ID NO: 84359 - DNA, 1350 bp, Arabidopsis thaliana
  misc_feature (1)..(1350): Ceres Seq. ID no. 12674797
  misc_feature (1)..(1350): Ortholog of  Ceres SEQ ID NO 13595164 as cited in SEQ ID NO 56222
  misc_feature (1)..(1350): Ortholog of  Ceres SEQ ID NO 13591068 as cited in SEQ ID NO 69043
  misc_feature (1)..(1350): Ortholog of  Ceres SEQ ID NO 13623041 as cited in SEQ ID NO 0
ttttcttatacgtaacttctctgctcttccatagccgatcgacctttgttcacaattcccaccgatttttatttgctagatcgatatattttcagtgagcttgaaacatggcttcagtggctcctaaaatcgctaaagatgtaactgaactaatagggaacactccattagtgtatctaaacaaagtagctaaagattgtgttggtcatgttgctgctaagcttgagatgatggaaccatgttctagcgtcaaagacaggtgcttccgaaaagtttaaaagctctgttttctagtttctctgttagtgacaaaagaaacaaatacttgtactttgttcttttttgttgcaggattggttatagtatgattgctgatgcagaagctaaaggacttattaaaccgggagagagtgtgttgattgagccaacaagtgggaacactggagttggtttagcatttactgcagctgcaaagggctataagcttgttataacaatgccagcttcaatgagtatagagagaagaatcattctcttagcttttggagctgagttgattcttactgatccggctaaaggtatgaaaggtgctgttgcaaaggcggaggagattttggcgaaaacacctaatggttatatgcttcaacagtttgagaatcctgctaatccaaagatccattatgagactactggacctgagatatggaaaggttctggtggaaaagtggatggctttgtttctggtattggtactggtggtacctgaacaggtgctgggaagtatctcaaggaacagaacacaaacataaagctgtatggtgtcgagcctgttgaaagccctattctgtccggtggaaagccaggtccccacaaaattcaaggtataggtgctggttttattccaggcattttggatgttgatcttatagatgaagttgttcaggtttcaagtgaagaatccattgacatggcaaggcttcttgctagggaagagggtctgttagtgggaatctcatctggagcagcagctactgcagcaatcaaacttgcaaagaggccagaaaatgctgggaagcttatagtggcggtgtttccgagtttcggggaaagatatctatcgactgtactgtttgatgcagcaaggaaagaggcagagactatgacctttgagccctgaatctgttcccctttcttcttggtgatacaaataaatgatctttcttccaacatatatatcttcagattctgtctgtatcttgtcatttgtgagaactcaaaagtagtttgtctgctactatgaacaatccatttctagaaagtttctggttgagtttttgctctctctatttg

SEQ ID NO: 84360 - protein, 133 aa, Arabidopsis thaliana
  peptide (1)..(133): Ceres Seq. ID no. 12674798
MIADAEAKGLIKPGESVLIEPTSGNTGVGLAFTAAAKGYKLVITMPASMSIERRIILLAFGAELILTDPAKGMKGAVAKAEEILAKTPNGYMLQQFENPANPKIHYETTGPEIWKGSGGKVDGFVSGIGTGGT

SEQ ID NO: 84361 - protein, 89 aa, Arabidopsis thaliana
  peptide (1)..(89): Ceres Seq. ID no. 12674799
MPASMSIERRIILLAFGAELILTDPAKGMKGAVAKAEEILAKTPNGYMLQQFENPANPKIHYETTGPEIWKGSGGKVDGFVSGIGTGGT

SEQ ID NO: 84362 - protein, 85 aa, Arabidopsis thaliana
  peptide (1)..(85): Ceres Seq. ID no. 12674800
MSIERRIILLAFGAELILTDPAKGMKGAVAKAEEILAKTPNGYMLQQFENPANPKIHYETTGPEIWKGSGGKVDGFVSGIGTGGT

SEQ ID NO: 84363 - DNA, 896 bp, Arabidopsis thaliana
  misc_feature (1)..(896): Ceres Seq. ID no. 12674801
  misc_feature (1)..(896): Ortholog of  Ceres SEQ ID NO 13598160 as cited in SEQ ID NO 61317
  misc_feature (1)..(896): Ortholog of  Ceres SEQ ID NO 13579986 as cited in SEQ ID NO 64562
  misc_feature (1)..(896): Ortholog of  Ceres SEQ ID NO 12614253 as cited in SEQ ID NO 68518
aaaaggagaaagcttgaaacgccgcttcttcttcttcttcttccactgtcgttctctctgtaaatcgcttcttcaatcatctctgtggatttgtctctattcataacttggtgaagaagatgttgacggaagaggagctcaaaagattgtacagaatccagaagacgttgatgcagatgttaagggatcgtggatattttatcgcggattctgaacttacgatgactaaacaacagtttattaggaaacatggtgataacatgaaaagagaggatcttgttactcttaaggctaagcgaaatgataatagtgatcagctctatatattcttccctgatgaggcgaaagttggtgtgaagacgatgaaaatgtacacgaacaggatgaaatcagagaatgtgttcagagctattttggttgtgcaacagaacttgaccccgtttgctcgaacttgcattagtgagatctcttctaagtttcatctggaagttttccaggaggcggaaatgctagtgaacattaaagaacatgttcttgttcctgagcatcaagttcttaccactgaagagaagaaaactttactggagagatacacagtgaaggagacacagcttccaaggatccaagtgactgatccaatcgcaagatactttggactaaaacgtgggcaagtcgtgaagatcattcgtccgagtgaaacggctggtcgttatgttacctatcgttatgttgtataagccaaagcaaaaggcttttgtggattgtaatgcgaattgaacgctgagagttgtgaaacataagagtaatgcttttgtactaaaccaaactgatgactgtgttttatttttgtttgtccgataggagaaattaaagcttgaaacaacttatttgtatta

SEQ ID NO: 84364 - protein, 205 aa, Arabidopsis thaliana; identical to SEQ ID NO: 29287
  peptide (1)..(205): Ceres Seq. ID no. 12674802

SEQ ID NO: 84365 - protein, 188 aa, Arabidopsis thaliana; identical to SEQ ID NO: 29288
  peptide (1)..(188): Ceres Seq. ID no. 12674803

SEQ ID NO: 84366 - protein, 186 aa, Arabidopsis thaliana; identical to SEQ ID NO: 35158
  peptide (1)..(186): Ceres Seq. ID no. 12674804

SEQ ID NO: 84367 - DNA, 891 bp, Arabidopsis thaliana
  misc_feature (1)..(891): Ceres Seq. ID no. 12674863
  misc_feature (1)..(891): Ortholog of  Ceres SEQ ID NO 15224382 as cited in SEQ ID NO 65962
  misc_feature (1)..(891): Ortholog of  Ceres SEQ ID NO 15174380 as cited in SEQ ID NO 0
gacgtgactcttctctctcttcctctccatcaatggcgaccacaaactctctcatctccattgccaatctcacttcggaccaacttctctttccctcaaacaacccacttccgccgcaacattctcactaatctgctctgcttcttccacctcctcctccaccaccgccgtatctgccgtttcaaccacaaacgcctccgccacaactgccgaaaccgcgaccatattcgacgttctggagaaccatctcgtcaatcaaaacttcagacaagccgacgaggagacacggagattactcattcagatatccggagaagccgccgtgaaacgtggctacgttttcttctccgaggtgaaaacaatctcccccgaagatcttcaagctatcgacaatctatggattaaacacagtgatggtagattcggatacagcgtgcaacgcaaaatctggttaaaagtgaagaaagatttcacaagattcttcgttaaagttgagtggatgaagcttcttgacacagaggttgttcaatacaattacagagcgtttcctgacgaattcaagtgggagcttaacgatgaaacgcctttaggacacttaccgctcacaaacgccttgagaggaacgcagcttctgaaatgcgttttaagccatcctgcgtttgcgacagctgatgataacagtggagaaacagaagacgagcttaacagaggtgttgcggtggctaaggaacaggcaggagtaggagcagacaaaagagtgtttaaaacaaattacagcttctgatgtctttctccttcttttttttttttttttaatattgattttctgatattgtgaaagtataaacaaatctctgtaatcatatcattaattaaatcggatttctcttc

SEQ ID NO: 84368 - protein, 134 aa, Arabidopsis thaliana
  peptide (1)..(134): Ceres Seq. ID no. 12674864
DVTLLSLPLHQWRPQTLSSPLPISLRTNFSFPQTTHFRRNILTNLLCFFHLLLHHRRICRFNHKRLRHNCRNRDHIRRSGEPSRQSKLQTSRRGDTEITHSDIRRSRRETWLRFLLRGENNLPRRSSSYRQSMD

SEQ ID NO: 84369 - protein, 94 aa, Arabidopsis thaliana; identical to SEQ ID NO: 30152
  peptide (1)..(94): Ceres Seq. ID no. 12674865

SEQ ID NO: 84370 - DNA, 747 bp, Arabidopsis thaliana
  misc_feature (1)..(747): Ceres Seq. ID no. 12674866
  misc_feature (1)..(747): Ortholog of  Ceres SEQ ID NO 15174142 as cited in SEQ ID NO 64367
atgaagcacaacaatgttatccccaatggtcacttcaaaaagcactggcagaattatgtcaagacatggttcaaccagcctgccaggaaaaccagaagaagaattgcgaggcaaaagaaggctgtgaagatcttccctcgtccaacttctggacctctccgccctgttgtgcatggtcagactcttaagtacaacatgaaggtcagaaccggtaaaggattcactcttgaagagctcaaggctgctggtatcccaaagaagttggcgcctacaattggtattgctgttgaccatcgtcgcaagaaccgatctttggagggtcttcaaacaaatgtccagaggctgaaaacctacaagaccaagttagtcattttcccgcgtcgtgcccgcaaggtcaaggctggtgactctacaccagaagagttggctaatgctacccaagttcaaggagactacttgcctattgtacgtgagaagcctaccatggaactcgtcaagctgacttcagaaatgaagtctttcaaggcttttgacaagatacgccttgagcgcactaacaagaggcatgccggagctagagccaagagagccgcagaggctgagaaagaagagaagaagtgaggtcgttcttcttaggtagaagaaacttttatcttatcaacttttggaactgaattttgtgtatcagactgtcttttctttcatcagtttttatccttaaatctttgattttgctgctaccttgct

SEQ ID NO: 84371 - protein, 206 aa, Arabidopsis thaliana [sequence omitted]

SEQ ID NO: 84372 - protein, 141 aa, Arabidopsis thaliana; identical to SEQ ID NO: 25776
  peptide (1)..(141): Ceres Seq. ID no. 12674868

SEQ ID NO: 84373 - DNA, 712 bp, Arabidopsis thaliana
  misc_feature (1)..(712): Ceres Seq. ID no. 12674891
  misc_feature (1)..(712): Ortholog of  Ceres SEQ ID NO 14305657 as cited in SEQ ID NO 52544
ctcatccccttaaaaaaccctaagagtagagactctctcaatcccggcggcgaagatgaagtacaacccaagagtgacctcttctcgcagaaagaacaggaaggctcatttcacagcttcctccagcgagaggcgtgtgataatgagctctcctctctccaccgatcttcgtcagaagtacaatgtcagatccatgccgatccgtaaagacgacgaggttcagatcgttcgtggtacttacaagggacgtgaaggcaaagttgttcaggtttaccgtcgcaaatgggtgattcacatcgagagaatcacgagggagaaggtgaatggaacaaccgtgaacgttgggattcagccgtcgaaagttgtgataacgaagcttcgtcttgataaagataggaaatcgcttttggagaggaaggctaagggacgtgctgctgctgataaggagaagggtactaagtttacgtctgaggatgttatgcagaacgttgattaagtaagaaggaagaagaaatcttcttgaaaggttttatcttttagagttatcttcaatcgctttttaattttcaagttttggatattttggaatgttgtcagtggatctttatggtgctagacatgagaacttatgttttgattttgagtatttgaagtttggttatggaagtttatctctttgtctcattctttataatgatgtgtttgtttggtt

SEQ ID NO: 84374 - protein, 146 aa, Arabidopsis thaliana; identical to SEQ ID NO: 35384
  peptide (1)..(146): Ceres Seq. ID no. 12674892

SEQ ID NO: 84375 - protein, 117 aa, Arabidopsis thaliana; identical to SEQ ID NO: 35385
  peptide (1)..(117): Ceres Seq. ID no. 12674893

SEQ ID NO: 84376 - protein, 100 aa, Arabidopsis thaliana; identical to SEQ ID NO: 35386
  peptide (1)..(100): Ceres Seq. ID no. 12674894

SEQ ID NO: 84377 - DNA, 3039 bp, Arabidopsis thaliana
  misc_feature (1)..(3039): Ceres Seq. ID no. 12674895
  misc_feature (1)..(3039): Ortholog of  Ceres SEQ ID NO 13600310 as cited in SEQ ID NO 5086
  misc_feature (1)..(3039): Ortholog of  Ceres SEQ ID NO 15172491 as cited in SEQ ID NO 58719
  misc_feature (1)..(3039): Ortholog of  Ceres SEQ ID NO 15180362 as cited in SEQ ID NO 0
attaaatttttatttcccagcttaaattttgaaacggtgaaatttcacagagagagagagaatcttgaaactatcaaacattttgaattctatcctcttagctcagctgaaattttcttcttctcagctcagattttttttgtttaattcttcgctagctgtgagtttctctgatcgttaagagactctgtttcgtttccgagaaagtctgcatagggaaaatttaacctcacattgggaaaattttggctctatactgacgaaatgccaagcattagagctccagctgcgaagaagaccactacactcacggttgctgtgaaatgtagaccgttaatggagaaagaacgtggtagagacattgttcgagtgaataactctaaggaagtggttgtgttagacccagacttatccaaggattatcttgaccgaattcagaatcggactaaagagaagaaatattgttttgatcatgcttttggacctgagagcaccaacaagaatgtgtataggagtatgtcttctgtgatctctagtgttgttcatggactcaatgctacagtttttgcctatggttccactggaagtggcaaaacatatacaatggttggaactcgaagtgatcctggattgatggttctcagcttgaatactatttttgatatgatcaagagtgacaagagctcagatgagtttgaagtgacttgctcatatcttgaagtttacaatgaagttatctacgatctgcttgaaaaatcctctggtcatttagagcttagagaggatccagagcagggaatagtagttgcaggcctgcgatcaataaaggtccattctgctgataggattcttgagctgctgaacttggggaacagtagacgaaaaactgagagcacagagatgaatggaacatcatcaaggtctcatgcagttctagagattgcagtcaaaagaaggcaaaagaatcaaaatcaagtcatgagagggaaactcgcccttgtagatcttgctgggagtgaaagagctgctgagacaaacaatggaggtcaaaaattgagggatggagcaaatatcaatcgctcactccttgcactagcaaattgcataaatgctttggggaagcaacacaaaaagggtcttgcttatgtaccataccgaaacagcaaacttacgcggattctcaaagatggtctgagtgggaactcccagacagtgatggttgcaactatatcacctgctgatagtcagtatcatcatactgtaaacacattgaaatatgctgaccgagcaaaagagattaagacacacatccagaaaaatattggtaccatcgatactcatatgtcagactaccaacgaatgatcgacaatcttcaagtaagttaattacttttatctacttctgttacaaaatgaatatagtaacagtatataactcagagctttgctttcatagagtgaggtttctcagctgaagacacaactagctgaaaaagagtcgcagctaagcatcaaaccttttgaaagaggtgttgaacgtgaactttcttggttggatggtttaagccaccagatcagtgaaaatgttcaagaccgtataaacttacagaaggcgttatttgagcttgaggaaactaacctcagaaatcgcactgaacttcagcatcttgatgatgcaattgcgaaacaggcgacagagaaagatgttgtcgaagctctaagtagcagacgacaagtaatacttgataatatccgcgacaatgatgaagccggtgttaactaccagagggatattgaagaaaatgaaaaacatcgttgcgaactacaggatatgctcaatgaagcaataaataacaatggaaacaaaacgtatctgcatattcttaatcagtataagctcctggggatgggtaatacggaactacagtttgaaatggcaatgagggaccaaattatttacaaccaaagggaagcccagagaaacctatggaatttgctcatgggtttaggagttgaagagaaacaagtgttcgatctcgctgcaaaacaaggaatcacaatcgaagactggagtagtatagcgttgtttccaggacttccttaccggaaacagacaccgagtttcataccagcaaacatccctttcgtgggccactcatattctaaatcctcctgcactttccagagctatcaagacccttcttcgaaaggacaacaatgggctccaactcctactttatgcagagaagaacaccacagctcttactacttcatgagacaggagccaccagcatttgtcaatcttaggaaaagccacgatggttgggttggtggcagcagaccagcttcacggattgacacaggaggcaatcatcgccgagtctcatatccacaaactgtgaacaattcttctcctcggatggcctcaggtcctactttttaccagactcctcaaagggaaatgttgctcaacacaacgagtccttatagtagtccgcgagtgggactcatcaacggggccaccaccccgtccgtgcaacctttctatggaagtcctcgtgccgtgactgtgagaaacggttcatacaacactccactcgcccccgctgcagtttcaactaaaggtgcgagaaaccaacaacgagtgtttggaacgagcccactctcaggaaccaaaggcgtcaagaactcttcatatggacagaacagtcacacaaagttgtacagaggaggaggcactaaaggtcacagtaaaggaaacaatactcaacgccaacaccaatgacatgagaccaaaacatgggttcgaattttcgagtcagttgaggcacagttttttaaacgcctcacactcagtctcactctcacatgactcgattttttgtttgtgtttgtacagctatttccactgtattgatttctttctgatacgattgatgtgtgtatatatatgggaaagaggttggtaaaaagtaagaagacaattgttccgtggtgaaccaaaaaaaaagctcaacaaatcttcagctttgttttcac

SEQ ID NO: 84378 - protein, 373 aa, Arabidopsis thaliana
  peptide (1)..(373): Ceres Seq. ID no. 12674896
MPSIRAPAAKKTTTLTVAVKCRPLMEKERGRDIVRVNNSKEVVVLDPDLSKDYLDRIQNRTKEKKYCFDHAFGPESTNKNVYRSMSSVISSVVHGLNATVFAYGSTGSGKTYTMVGTRSDPGLMVLSLNTIFDMIKSDKSSDEFEVTCSYLEVYNEVIYDLLEKSSGHLELREDPEQGIVVAGLRSIKVHSADRILELLNLGNSRRKTESTEMNGTSSRSHAVLEIAVKRRQKNQNQVMRGKLALVDLAGSERAAETNNGGQKLRDGANINRSLLALANCINALGKQHKKGLAYVPYRNSKLTRILKDGLSGNSQTVMVATISPADSQYHHTVNTLKYADRAKEIKTHIQKNIGTIDTHMSDYQRMIDNLQVS

SEQ ID NO: 84379 - protein, 349 aa, Arabidopsis thaliana
  peptide (1)..(349): Ceres Seq. ID no. 12674897
MEKERGRDIVRVNNSKEVVVLDPDLSKDYLDRIQNRTKEKKYCFDHAFGPESTNKNVYRSMSSVISSVVHGLNATVFAYGSTGSGKTYTMVGTRSDPGLMVLSLNTIFDMIKSDKSSDEFEVTCSYLEVYNEVIYDLLEKSSGHLELREDPEQGIVVAGLRSIKVHSADRILELLNLGNSRRKTESTEMNGTSSRSHAVLEIAVKRRQKNQNQVMRGKLALVDLAGSERAAETNNGGQKLRDGANINRSLLALANCINALGKQHKKGLAYVPYRNSKLTRILKDGLSGNSQTVMVATISPADSQYHHTVNTLKYADRAKEIKTHIQKNIGTIDTHMSDYQRMIDNLQVS

SEQ ID NO: 84380 - protein, 317 aa, Arabidopsis thaliana
  peptide (1)..(317): Ceres Seq. ID no. 12674898
MLNEAINNNGNKTYLHILNQYKLLGMGNTELQFEMAMRDQIIYNQREAQRNLWNLLMGLGVEEKQVFDLAAKQGITIEDWSSIALFPGLPYRKQTPSFIPANIPFVGHSYSKSSCTFQSYQDPSSKGQQWAPTPTLCREEHHSSYYFMRQEPPAFVNLRKSHDGWVGGSRPASRIDTGGNHRRVSYPQTVNNSSPRMASGPTFYQTPQREMLLNTTSPYSSPRVGLINGATTPSVQPFYGSPRAVTVRNGSYNTPLAPAAVSTKGARNQQRVFGTSPLSGTKGVKNSSYGQNSHTKLYRGGGTKGHSKGNNTQRQHQ

SEQ ID NO: 84381 - DNA, 1227 bp, Arabidopsis thaliana
  misc_feature (1)..(1227): Ceres Seq. ID no. 12674899
  misc_feature (1)..(1227): Ortholog of  Ceres SEQ ID NO 13593932 as cited in SEQ ID NO 54078
  misc_feature (1)..(1227): Ortholog of  Ceres SEQ ID NO 12635231 as cited in SEQ ID NO 0
aacaaaactctcgaagtcgcaacagaaaagaaacgagagagatatggtggtaggcggcggaggagaaggagatcagaagagaagcagcggagaaatgatggcgatggcgagtttattcaacgatcagcagaatccaattcaacagtttcaggttaaattcaaagaagtagaaactaatttcaagacatggttgtcgaaacagtcgattccggtggaagccgccgtcgtatccaccatgagcggtgtacaaggagctttcattggtggtctcatgggaacactctctcctgaaatgcctcaagccggcgttgaccctcaagccatagcttcgatgaaacaagctcaggtttcaactctatataaaccctatcctcattcaaatgtttgtaaaattgaggtatgagaattagggtttttgaatctgtaggctcttgtgggtggtccttgggtccaagctcggaattttgctgcaattactggtgtgaatgctggaattgcttctgttatgaagcggattagaggcaaagaggatattgaatctgcagtggtggcagcgttaggatctggatttgcatactcattggtgagccaaggattgcaaggacaacctatgaatgcaatcactactgctgctggttttgctgtttttcaaggagtgttttttaaattgggagaaagattctctaaaccgagtactgaagatccatttttcacaagaggaaggacaatgctagtgaagctaggtttggagaaatacgagaagaacttcaagaaaggacttttaactgatcccacattgccattgctcactgatagcgcgctgaaagatgcgaacatcccaccagggccaagacttatgatactagatcatatccagagggacccggagataaagggcaaacgaaagtaggagccatgttgtttaatcaaatatgttttgatggtaacgatcttcaaacacatatgtaatgccttttacttttagctgctattgccatgaagagctcttgttagatacttctgtttctattaccaatgtttgattatctttaaaaaaattgagtagttcgtctcaaatcaaattggattataggttctgaataaaacgaaaatgaaatatgctttgtatgagaataagatgtttatattatgtatagttgattggcttaagatcaagactcgataaaattttggttcatacaattggccaatcaccaaagtgattcg

SEQ ID NO: 84382 - protein, 134 aa, Arabidopsis thaliana
  peptide (1)..(134): Ceres Seq. ID no. 12674900
MKRIRGKEDIESAVVAALGSGFAYSLVSQGLQGQPMNAITTAAGFAVFQGVFFKLGERFSKPSTEDPFFTRGRTMLVKLGLEKYEKNFKKGLLTDPTLPLLTDSALKDANIPPGPRLMILDHIQRDPEIKGKRK

SEQ ID NO: 84383 - protein, 133 aa, Arabidopsis thaliana; identical to SEQ ID NO: 40470
  peptide (1)..(133): Ceres Seq. ID no. 12674901

SEQ ID NO: 84384 - protein, 119 aa, Arabidopsis thaliana; identical to SEQ ID NO: 40471
  peptide (1)..(119): Ceres Seq. ID no. 12674902

SEQ ID NO: 84385 - DNA, 1114 bp, Arabidopsis thaliana
  misc_feature (1)..(1114): Ceres Seq. ID no. 12674903
  misc_feature (1)..(1114): Ortholog of  Ceres SEQ ID NO 13593932 as cited in SEQ ID NO 54078
  misc_feature (1)..(1114): Ortholog of  Ceres SEQ ID NO 12635231 as cited in SEQ ID NO 0
aagactgagaagcagagaaccgaaagaagaaaacaaaactctcgaagtcgcaacagaaaagaaacgagagagatatggtggtaggcggcggaggagaaggagatcagaagagaagcagcggagaaatgatggcgatggcgagtttattcaacgatcagcagaatccaattcaacagtttcaggttaaattcaaagaagtagaaactaatttcaagacatggttgtcgaaacagtcgattccggtggaagccgccgtcgtatccaccatgagcggtgtacaaggagctttcattggtggtctcatgggaacactctctcctgaaatgcctcaagccggcgttgaccctcaagccatagcttcgatgaaacaagctcaggctcttgtgggtggtccttgggtccaagctcggaattttgctgcaattactggtgtgaatgctggaattgcttctgttatgaagcggattagaggcaaagaggatattgaatctgcagtggtggcagcgttaggatctggatttgcatactcattggtgagccaaggattgcaaggacaacctatgaatgcaatcactactgctgctggttttgctgtttttcaaggagtgttttttaaattgggagaaagattctctaaaccgagtactgaagatccatttttcacaagaggaaggacaatgctagtgaagctaggtttggagaaatacgagaagaacttcaagaaaggacttttaactgatcccacattgccattgctcactgatagcgcgctgaaagatgcgaacatcccaccagggccaagacttatgatactagatcatatccagagggacccggagataaagggcaaacgaaagtaggagccatgttgtttaatcaaatatgttttgatggtaacgatcttcaaacacatatgtaatgccttttacttttagctgctattgccatgaagagctcttgttagatacttctgtttctattaccaatgtttgattatctttaaaaaaattgagtagttcgtctcaaatcaaattggattataggttctgaataaaacgaaaatgaaatatgctttgtatgagaataagatgtttatattatgtatagttgattg

SEQ ID NO: 84386 - protein, 261 aa, Arabidopsis thaliana; identical to SEQ ID NO: 29883
  peptide (1)..(261): Ceres Seq. ID no. 12674904

SEQ ID NO: 84387 - protein, 244 aa, Arabidopsis thaliana; identical to SEQ ID NO: 29884
  peptide (1)..(244): Ceres Seq. ID no. 12674905

SEQ ID NO: 84388 - protein, 243 aa, Arabidopsis thaliana; identical to SEQ ID NO: 29885
  peptide (1)..(243): Ceres Seq. ID no. 12674906

SEQ ID NO: 84389 - DNA, 1142 bp, Arabidopsis thaliana
  misc_feature (1)..(1142): Ceres Seq. ID no. 12674919
  misc_feature (1)..(1142): Ortholog of  Ceres SEQ ID NO 13581579 as cited in SEQ ID NO 58361
  misc_feature (1)..(1142): Ortholog of  Ceres SEQ ID NO 13598714 as cited in SEQ ID NO 62656
  misc_feature (1)..(1142): Ortholog of  Ceres SEQ ID NO 13596969 as cited in SEQ ID NO 63375
  misc_feature (1)..(1142): Ortholog of  Ceres SEQ ID NO 14302240 as cited in SEQ ID NO 64162
  misc_feature (1)..(1142): Ortholog of  Ceres SEQ ID NO 13597519 as cited in SEQ ID NO 64759
  misc_feature (1)..(1142): Ortholog of  Ceres SEQ ID NO 13597870 as cited in SEQ ID NO 64982
  misc_feature (1)..(1142): Ortholog of  Ceres SEQ ID NO 13595926 as cited in SEQ ID NO 67778
  misc_feature (1)..(1142): Ortholog of  Ceres SEQ ID NO 12567001 as cited in SEQ ID NO 0
ggctcaatttatatacaacactctctctctctcggttttgtccatacaatggctcgcttcgatattgttctactcataggtctttgcctcataatctctgtctttcccgatacaaccaccgcacaactaagccgcggtttctactccaaaacttgccccaatgtcgaacaaatcgtgagaaatgctgtccaaaagaaaataaagaagacattcgtcgccgtccctgccactctccgtctcttcttccacgactgctttgtcaatggttgtgatgcatctgtcatgatccaatcaacgcctaagaacaaggcagagaaggatcatccagataacatttcgctagctggagatggatttgatgtggtgatccaagctaagaaagcccttgactctaaccctagttgccggaacaaggtctcatgtgccgatattcttactttggccacccgagatgttgttgttgcggctggaggaccgtcctatgaagttgaacttggtaggttcgatggtttggtatcaaccgcgtcaagtgtcgaagggaacttaccaggaccttcggacaatgtagacaaacttaatgctcttttcacgaaaaacaaacttacccaagaagatatgattgctctttcagcggctcacacccttggattcgcacattgtggcaaggtctttaaaagaatccacaaattcaacggcatcaactccgtggacccaactttaaacaaggcttacgctattgagcttcaaaaggcttgtcctaagaatgtggacccaagaattgcaatcaacatggacccagtcacgcccaagacgtttgacaacacttacttcaagaatcttcaacaaggcaaaggtctcttcacctccgatcaagttctcttcacggatggtcgctctaggcccaccgttaatgcttgggcctcaaactctacggcctttaaccgcgcttttgtgatagccatgaccaaacttggccgtgttggagttaagaatagcagcaatggaaacatccgtcgtgattgtggtgcgtttaactagagctggtaatgggaaaatataagttgtcttatctcctattttcctttcgttttattaatgtttgaatgttcattttgacgatgagaagatattattggtttttc

SEQ ID NO: 84390 - protein, 345 aa, Arabidopsis thaliana
  peptide (1)..(345): Ceres Seq. ID no. 12674920
GSIYIQHSLSLGFVHTMARFDIVLLIGLCLIISVFPDTTTAQLSRGFYSKTCPNVEQIVRNAVQKKIKKTFVAVPATLRLFFHDCFVNGCDASVMIQSTPKNKAEKDHPDNISLAGDGFDVVIQAKKALDSNPSCRNKVSCADILTLATRDVVVAAGGPSYEVELGRFDGLVSTASSVEGNLPGPSDNVDKLNALFTKNKLTQEDMIALSAAHTLGFAHCGKVFKRIHKFNGINSVDPTLNKAYAIELQKACPKNVDPRIAINMDPVTPKTFDNTYFKNLQQGKGLFTSDQVLFTDGRSRPTVNAWASNSTAFNRAFVIAMTKLGRVGVKNSSNGNIRRDCGAFN

SEQ ID NO: 84391 - protein, 329 aa, Arabidopsis thaliana; identical to SEQ ID NO: 21898
  peptide (1)..(329): Ceres Seq. ID no. 12674921

SEQ ID NO: 84392 - protein, 251 aa, Arabidopsis thaliana; identical to SEQ ID NO: 21899
  peptide (1)..(251): Ceres Seq. ID no. 12674922

SEQ ID NO: 84393 - DNA, 2290 bp, Arabidopsis thaliana
  misc_feature (1)..(2290): Ceres Seq. ID no. 12674923
  misc_feature (1)..(2290): Ortholog of  Ceres SEQ ID NO 12612314 as cited in SEQ ID NO 51420
  misc_feature (1)..(2290): Ortholog of  Ceres SEQ ID NO 14306493 as cited in SEQ ID NO 53170
  misc_feature (1)..(2290): Ortholog of  Ceres SEQ ID NO 14311095 as cited in SEQ ID NO 53197
caaggacgttttaagaatctggtggaattgatttgatagtagtatacaattgtgatgtatatatacatacaaatattaactgttcttggatttattgaaaggaaatgactttaaattacaagaagcgtgacccacacgttaagtcagtctttctttactaatattcttttcgattagtcaaataaacctcatgaacaagtcattggagcccacttaaactctacttttctattcttcttctttctttttgttattctatatattagttagcaacttccacgttgtagcgatggaaggatccaagctacttccttgcgtccataagtctccggttcccacctcccaccaattatatataaattatgagattttgggtttaacaaaactcaaaaaacacaaatacacccaaaacaagatgagctcctctgactcttcttccgccgaatcccgtctagccacggctaagacggttctcaccaccgcggcttcggtggctgcgaccgcaatgctagctcgatctttagtccaagattatttgcctgacgaggtgcatcactacatttcctatggattccgttccatctttggttacttctcatcccaaatgacgataatcatcgaagaatttgaaggttttgctcacaatgaagtctttgaagctgcagaggcctatctagccaccaagatctctccttctaacaaaagaatcaaagtgagtaaacatgagaaagaaaacaactacaatgtcaccgtggagcgtgacgaagaagttgttgacacctacaatggcgtcaaattccagtggatcctccattgtcgtcatgtcgagtccaagcacttccacaacccacgggatctaaactccacactgagatctgaggtccgatcattcgaactcaacttccacaagaaattcaaagacgtagctcttgaatcttacttgccattcatggtgaaaagagccacgttgatgaagcaagagaagaaaacactcaagatcttcactctctccccagaaaacatgtatgggaactactctgacgcgtggacctctgttactcttgaccatccttctaccttcaaaactctagcaatggattcagatgtcaagacaagtgtgatggaagatctagacaaattcgtaaagcgaagagacttctataaaagggttggtaaagcttggaagagaggttacttgctgtacggtccaccaggcacagggaagtcaagcttgatcgcagccatggccaatcatctcaactttgatatatacgacctagagttgaccgcggttaacaacaattctgagctccggcgattattgattgccactgctaatcgttcgattcttatcgtagaagatatcgattgttcactagaattgaaagataggactagcgatgaacctcctcgggaatctgacgatatagaagatccacggtataaaaaagtgacactctctggactgttgaatttcatagatggtctatggtcaagctgcggtgacgaaaggatcataatcttcacaaccaattacaaagagaaactcgacgcggccttgctgagaccaggacgtatggatatgcacatccacatgtcgtattgcacaccaagtactttcaaagctcttgctttgaactatcttgagatcaaagagcaccgccttttcagcaagatcgaggaaggtattgaggcgacagaggtcactccagcagaagtagctgaacagcttatgagaaatgactctgtagacaaggttcttgagggtttgattgagttcttgaaagtcaagaagatcgaaaacgaacaagataaggccaaaacagagaagcaagagttggagaacaagaaaaagaccaaggagggaacagattccgtagtcaagaaagaggttgatgaacagctagtgaggaatgaccgtgttgataaggttcttgagggtttggtcgagttgttaaaagccaagaagatcgaggacgaccaagataaagccaaacatgaggaggttgaacaacattaacttgtgagatatcaatacctaaatcattaaatcgccagttactgtctataatctacagattcatttataaacctagtcctaagataaaataatcttagagagattgagaccaaaaaagggaaaaaattgaggagatcagataaaacacctctgcatccgagtggtagctgtaaagagaagagcacgtgtatttatacaaaactatgcgtttagcttgttttttctctctgttttttttctaactttttttagcacaatttgttttaagct

SEQ ID NO: 84394 - protein, 576 aa, Arabidopsis thaliana; identical to SEQ ID NO: 22005
  peptide (1)..(576): Ceres Seq. ID no. 12674924

SEQ ID NO: 84395 - protein, 534 aa, Arabidopsis thaliana; identical to SEQ ID NO: 22006
  peptide (1)..(534): Ceres Seq. ID no. 12674925

SEQ ID NO: 84396 - protein, 504 aa, Arabidopsis thaliana; identical to SEQ ID NO: 22007
  peptide (1)..(504): Ceres Seq. ID no. 12674926

SEQ ID NO: 84397 - DNA, 1147 bp, Arabidopsis thaliana
  misc_feature (1)..(1147): Ceres Seq. ID no. 12674979
  misc_feature (1)..(1147): Ortholog of  Ceres SEQ ID NO 14312594 as cited in SEQ ID NO 58686
ttataaagaaaaacacggatcttggaattatctttaaaatcatcttgtgaatacagcaaattgggaaatatgagaaaaggattctctcaagaagaagcttctcctcgtctagacagacttatgttcgataagataaaagaagcattaggaggaagagctcatatgttgttatcaggagcagcgcctctacctcgtcatgtagaggagttcttgagaatcattcctgcctctaatctctctcaaggttatggattgactgagagttgtgggggaagcttcacgaccttagccggagtattttctatggtggggacagtgggtgtgccaatgcccacggtggaggcaaggctagtgtccgtaccagagatgggttacgacgccttttccgctgacgtgccgagaggagagatttgtcttagaggaaattcaatgttttctggttaccataaaagacaagatctaactgatcaagtcctaatcgatggatggttccacacaggagatattggagaatggcaagaagatggatcaatgaagatcatcgataggaagaagaacatcttcaagttgtctcaaggtgaatatgttgctgttgaaaacctcgaaaacacttactcaagatgtcccctcattgctcagatatgggtctatggcaacagcttcgagtcatttttggtaggtgtggttgtacctgatagaaaagctattgaagattgggctaaactcaattaccaatctcccaatgatttcgaatctctatgtcaaaatctcaaagctcaaaaatacttcttggatgagcttaactctaccgcaaagcaatatcaacttaaaggatttgaaatgttaaaagctattcatttagaaccaaacccttttgatattgaaagagatcttattactccaactttcaagctgaaaaggccacagctcctccaacattacaagggcatagttgatcaactttattcagaagcaaagaggtccatggcatagataattagataccgatcggctattcattttctgatgctatttgggtttgtatgatatgttacaaaattgtgttcggatcctctcatcatgtgattcttgttacactaaatttatagtttggaaactatatatatactattaagcaacgtttact

SEQ ID NO: 84398 - protein, 307 aa, Arabidopsis thaliana; identical to SEQ ID NO: 25258
  peptide (1)..(307): Ceres Seq. ID no. 12674980

SEQ ID NO: 84399 - protein, 290 aa, Arabidopsis thaliana; identical to SEQ ID NO: 25259
  peptide (1)..(290): Ceres Seq. ID no. 12674981

SEQ ID NO: 84400 - protein, 276 aa, Arabidopsis thaliana; identical to SEQ ID NO: 25260
  peptide (1)..(276): Ceres Seq. ID no. 12674982

SEQ ID NO: 84401 - DNA, 1217 bp, Arabidopsis thaliana
  misc_feature (1)..(1217): Ceres Seq. ID no. 12675002
  misc_feature (1)..(1217): Ortholog of  Ceres SEQ ID NO 13654187 as cited in SEQ ID NO 68219
acatatgaacataacccaatctgaagatcaatcataaccttaaaccatctctcataattttagtatttctattctcaccaccaaaactcgttgatacatcacaccccaactgttgttactcatgtcctacagatcgatttaccgcactcttcgaccggtactatcatcttcggtacaatcctccggtttaggaattggaggattcaggggacatctcattagccacttgcccaatgttcggctattgagctctgacacgtcatctccggtaagtgggaataaccagccagaaaatcctatccgaacggccgatggtaaagttatatccacttattggggtatacctcctactaagatcactaaaccggacggttcagcttggaagtggaattgttttcagccatgggattcatacaaaccggatgtgtccattgatgtaactaaacatcataaaccctccaatttcactgacaaattcgcatattggaccgttcaaactctgaaaataccggttcaactattttttcagaggaagcacatgtgccatgcgatgttgctagagacggtggctgcggtgccgggaatggtcggggggatgcttttgcacttgaaatctctccggaggttcgaacatagcgggggatggatcaaagctttgctcgaagaggctgagaacgagcgtatgcatctcatgactttcatcgaactttcacaacccaaatggtacgaacgagcgattgtgttcacggtccaaggcgttttcttcaacgcatatttcctggcttatgtaatttcacccaaacttgctcatcgtatcactggatacttagaagaagaggctgtaaattcttacactgaatttctcaaagacattgatgccggaaaattcgaaaactcgccagctccagccatcgcaatcgattactggcggttgcctaaagatgcaacgcttagggatgtggtttatgttatacgagctgacgaagctcaccaccgtgatattaaccactatgcttcggatatacaattcaaaggacatgaactcaaggaagctccggctcctattggatatcattaaagattatgtgacaaagtcacaaagctgtgtatacatctatgaacatatgttgttgtggatctccatgatatttttattttatgttttcgatttatttaaaactgttattcgtttttattagctcaatatggatatttaa

SEQ ID NO: 84402 - protein, 318 aa, Arabidopsis thaliana
  peptide (1)..(318): Ceres Seq. ID no. 12675003
MSYRSIYRTLRPVLSSSVQSSGLGIGGFRGHLISHLPNVRLLSSDTSSPVSGNNQPENPIRTADGKVISTYWGIPPTKITKPDGSAWKWNCFQPWDSYKPDVSIDVTKHHKPSNFTDKFAYWTVQTLKIPVQLFFQRKHMCHAMLLETVAAVPGMVGGMLLHLKSLRRFEHSGGWIKALLEEAENERMHLMTFIELSQPKWYERAIVFTVQGVFFNAYFLAYVISPKLAHRITGYLEEEAVNSYTEFLKDIDAGKFENSPAPAIAIDYWRLPKDATLRDVVYVIRADEAHHRDINHYASDIQFKGHELKEAPAPIGYH

SEQ ID NO: 84403 - protein, 179 aa, Arabidopsis thaliana
  peptide (1)..(179): Ceres Seq. ID no. 12675004
MCHAMLLETVAAVPGMVGGMLLHLKSLRRFEHSGGWIKALLEEAENERMHLMTFIELSQPKWYERAIVFTVQGVFFNAYFLAYVISPKLAHRITGYLEEEAVNSYTEFLKDIDAGKFENSPAPAIAIDYWRLPKDATLRDVVYVIRADEAHHRDINHYASDIQFKGHELKEAPAPIGYH

SEQ ID NO: 84404 - protein, 175 aa, Arabidopsis thaliana
  peptide (1)..(175): Ceres Seq. ID no. 12675005
MLLETVAAVPGMVGGMLLHLKSLRRFEHSGGWIKALLEEAENERMHLMTFIELSQPKWYERAIVFTVQGVFFNAYFLAYVISPKLAHRITGYLEEEAVNSYTEFLKDIDAGKFENSPAPAIAIDYWRLPKDATLRDVVYVIRADEAHHRDINHYASDIQFKGHELKEAPAPIGYH

SEQ ID NO: 84405 - DNA, 1187 bp, Arabidopsis thaliana
  misc_feature (1)..(1187): Ceres Seq. ID no. 12675006
  misc_feature (1)..(1187): Ortholog of  Ceres SEQ ID NO 14314252 as cited in SEQ ID NO 57492
  misc_feature (1)..(1187): Ortholog of  Ceres SEQ ID NO 12608276 as cited in SEQ ID NO 57871
  misc_feature (1)..(1187): Ortholog of  Ceres SEQ ID NO 13598492 as cited in SEQ ID NO 63882
  misc_feature (1)..(1187): Ortholog of  Ceres SEQ ID NO 13657914 as cited in SEQ ID NO 66230
  misc_feature (1)..(1187): Ortholog of  Ceres SEQ ID NO 13595877 as cited in SEQ ID NO 67702
aaaggctcactccaactccaactccaactccaactaacaacactcttcttcattcttcttcaatcaatggaatctgaaatcgcctccgagtttcttcctttctgccggatttacaaagacggtcgtgtagaacgactcatcggcaccgataccatcccggcctctctagatccaacatacgacgtcgtttcaaaagacgttatatactcaccggagaataacctctccgttcgtctcttcctccctcacaaatcaacaaaactcaccgccggtaacaagctccctctacttatctacatccacggcggagcttggatcatcgagtcacctttctccccactctaccacaattacctcactgaagtagtcaaatccgctaactgcctcgctgtctctgttcagtatcgccgtgcaccggaagatcctgttccggcggcttatgaagatgtatggtccgcgattcagtggatttttgctcattctaatggatctggtcctgtagattggattaacaaacacgccgatttcggtaaagttttcctcggcggagatagcgcaggcggtaacatatcgcatcacatggcgatgaaagctggtaaagagaagaagctagatctcaaaatcaaaggtattgctgttgttcatccagctttctggggaacagatccggttgatgaatacgatgtgcaagataaagaaacgagaagcggaatcgcggaaatttgggagaagattgcgagtccgaatagtgttaatgggacggatgatccgttgtttaatgtaaacggatccgggtcggatttttctgggttgggatgtgataaggttttggttgcggtagctgggaaagatgtgtttgttaggcaaggattggcttatgcggcgaagctggagaagtgtgagtgggaaggtactgttgaggtggttgaggaagaaggtgaggaccatgtgtttcatttgcagaatcctaaatctgataaggctttgaaattcttgaagaagtttgtcgagtttattattggttgaaacttgaaagaatgttttttgtgtaaatgttcttcatgatcatgtaatcttgtttttaagaaataaaatacatgaatttcagactgtgtgagagttatatgaacctgttaaatgtgtgttattattttcttcaacatgagaaaaaaatatgtgtaaaatat

SEQ ID NO: 84406 - protein, 341 aa, Arabidopsis thaliana
  peptide (1)..(341): Ceres Seq. ID no. 12675007
KGSLQLQLQLQLTTLFFILLQSMESEIASEFLPFCRIYKDGRVERLIGTDTIPASLDPTYDVVSKDVIYSPENNLSVRLFLPHKSTKLTAGNKLPLLIYIHGGAWIIESPFSPLYHNYLTEVVKSANCLAVSVQYRRAPEDPVPAAYEDVWSAIQWIFAHSNGSGPVDWINKHADFGKVFLGGDSAGGNISHHMAMKAGKEKKLDLKIKGIAVVHPAFWGTDPVDEYDVQDKETRSGIAEIWEKIASPNSVNGTDDPLFNVNGSGSDFSGLGCDKVLVAVAGKDVFVRQGLAYAAKLEKCEWEGTVEVVEEEGEDHVFHLQNPKSDKALKFLKKFVEFIIG

SEQ ID NO: 84407 - protein, 319 aa, Arabidopsis thaliana; identical to SEQ ID NO: 75050
  peptide (1)..(319): Ceres Seq. ID no. 12675008

SEQ ID NO: 84408 - DNA, 768 bp, Arabidopsis thaliana
  misc_feature (1)..(768): Ceres Seq. ID no. 12675017
  misc_feature (1)..(768): Ortholog of  Ceres SEQ ID NO 12587236 as cited in SEQ ID NO 67904
ctcttatcttcttcaacctctcgactagtaaaagccgcgaaaatcaaaatcctccaaaactatggctctgattttgccctgtacattttgtacttcgcttcagaagaagaattttccgattaatcggagatatattacgaatttccgtcgaggagctacgactgcgacgtgtgagttccggattcctgtagaagtttccactccatcagatagaggatcgttggttgttccttcgcacaaagtcactgttcacgatcgacaacgaggagtggttcacgaattcgaggttccagaggatcagtatatattgcattcagctgaatctcagaacattagtcttccgtttgcttgcaggcatggttgttgtactagttgtgctgtacgtgtaaaatctggagagctgaggcagcctcaagcattgggaatatcagcagaactgaagtcccaggggtatgcacttctttgtgtgggtttccccacatctgaccttgaagtagaaacacaagacgaggacgaggtctactggctacaatttggaagatactttgctcgtggaccaattgaaagagacgattacgctcttgaactcgccatgggagatgaatagaaaccaaaagaagcatgtaaactgtaaagtggcagactttctgtattagaggtgactagtgagttcaactttcttagtcctgaatatcgtggtgcatcctcgtaaatctcttactgaactcaacgatattccgattaaacttctcaacaattcaacatttc

SEQ ID NO: 84409 - protein, 181 aa, Arabidopsis thaliana; identical to SEQ ID NO: 49924
  peptide (1)..(181): Ceres Seq. ID no. 12675018

SEQ ID NO: 84410 - DNA, 2010 bp, Arabidopsis thaliana
  misc_feature (1)..(2010): Ceres Seq. ID no. 12675039
  misc_feature (1)..(2010): Ortholog of  Ceres SEQ ID NO 13594100 as cited in SEQ ID NO 58827
tcttcctcctgcaacctcttcttccctctctcagtttgatttgaccggagtatatggcggaagtacgatcacgatcacggagaacggagagcaattgggctacaatatgctgctcagctttctcgtgtctccagctctactgggcacgtattgttctccgtaaatggttcaatgtttctgcttctgaatcagattatagtgctgatagtgacgatgactacgaagatagatcacaagaatttgatccaattagctctggagttaccaatcctcgtgttgatactgacggtaatgtgatatataggcctaagcttagaagacgaaattctgaaactttcaggatgcagtatatagataccaaagcaatcagaatctgtgctgggacatggaatgttggagggagagttccttcatctgacttggatattgatggttggctagacactcttgaacctgctgacatttatgttcttggtcttcaggaaatcgttcccttaaatgctggaaacatttttggtatggaggatgaccagcctgctttggaatgggagaacttgatacgtgatgccttaaaccgagttcaacctagaaagctgaagattaaaagtcacagtgatcccccttctccatcaaagtttaagcaacccgaagaggttccttatagtgtagaagatatgtttgttgaaaccagtcatgatgcttgcgatggaattagttcaatggataacaaactcaactctgttgaaagcacggacgtaccaatcgtaagcgaagattcacttactaatatagacgttttgggttctaccaatgacaatgcgtcttgcttaccaatacaagaatatctacagagacaattttcaacaccaaatacgccagaccgctctctgtcgatgcagattaatagtgattccaaaagggaagaaagatttagttacactgaaagggtaggtttgagctggccagagcctccattaaggctcctaaatcaatatgtttccgaaagacgtggttccttcaagtcagtgaatctgactatcacgaatctgagaaaaccatcgtatgttcggattgtgagcaaacagatggttggagtgtttctcaccatttgggttcggaggaacttgcgcaagcacataagcaacctttgtgtgtctactgttggtgttggtattatgggctacattggtaacaaggggtctgtatctgtgagcatgtcaatctatcaaacaccattttgtttcttgtgcacgcatctgtcatctggagaaaaggatacagatcaagagaaaagaaacgatgatgtacgtgaaatccacagaagaacgcagtttcttcctcattctttaaatgccaatgagcttccaagaagcatctgtaatcatgaaagaataatctggctgggagatctgaactatcggattaacttgtcgtatgagaagacacatgaacttattgcaagaaaggaatggcaaaggttggtagagtacgaccagctttcaagagaaatgacaaaagggaacctattcgagggatggtcagagggaactttagattttgcaccaacatataaatacgaaatcgattcagaaaattacatcggagatgacccggaatccgggaaacgtagaccggcctggtgtgaccgcatcatttggaacggaaagggaatgaagctcttcaattacagaagaaacgagattaaactatcggatcaccggcctgtcacagccacgttcttggccgaggttgaggttttgtctccacggaaacttcaacatgcgcttacacttacatatgctgagattcaaggccttgacgcctaaacaaccacttccgtcagatcccatttgtgtatagtaatttaacgatttgtatgcccttcatgtataatagtgttcacgtacacagaaatattgtagatagaaatactgactgaaaacaaagaccgtatctttgatgatataaacattggcaattgagttgagatgtaaactatagtgttagtgt

SEQ ID NO: 84411 - protein, 590 aa, Arabidopsis thaliana
  peptide (1)..(590): Ceres Seq. ID no. 12675040
MAEVRSRSRRTESNWATICCSAFSCLQLYWARIVLRKWFNVSASESDYSADSDDDYEDRSQEFDPISSGVTNPRVDTDGNVIYRPKLRRRNSETFRMQYIDTKAIRICAGTWNVGGRVPSSDLDIDGWLDTLEPADIYVLGLQEIVPLNAGNIFGMEDDQPALEWENLIRDALNRVQPRKLKIKSHSDPPSPSKFKQPEEVPYSVEDMFVETSHDACDGISSMDNKLNSVESTDVPIVSEDSLTNIDVLGSTNDNASCLPIQEYLQRQFSTPNTPDRSLSMQINSDSKREERFSYTERVGLSWPEPPLRLLNQYVSERRGSFKSVNLTITNLRKPSYVRIVSKQMVGVFLTIWVRRNLRKHISNLCVSTVGVGIMGYIGNKGSVSVSMSIYQTPFCFLCTHLSSGEKDTDQEKRNDDVREIHRRTQFLPHSLNANELPRSICNHERIIWLGDLNYRINLSYEKTHELIARKEWQRLVEYDQLSREMTKGNLFEGWSEGTLDFAPTYKYEIDSENYIGDDPESGKRRPAWCDRIIWNGKGMKLFNYRRNEIKLSDHRPVTATFLAEVEVLSPRKLQHALTLTYAEIQGLDA

SEQ ID NO: 84412 - protein, 494 aa, Arabidopsis thaliana
  peptide (1)..(494): Ceres Seq. ID no. 12675041
MQYIDTKAIRICAGTWNVGGRVPSSDLDIDGWLDTLEPADIYVLGLQEIVPLNAGNIFGMEDDQPALEWENLIRDALNRVQPRKLKIKSHSDPPSPSKFKQPEEVPYSVEDMFVETSHDACDGISSMDNKLNSVESTDVPIVSEDSLTNIDVLGSTNDNASCLPIQEYLQRQFSTPNTPDRSLSMQINSDSKREERFSYTERVGLSWPEPPLRLLNQYVSERRGSFKSVNLTITNLRKPSYVRIVSKQMVGVFLTIWVRRNLRKHISNLCVSTVGVGIMGYIGNKGSVSVSMSIYQTPFCFLCTHLSSGEKDTDQEKRNDDVREIHRRTQFLPHSLNANELPRSICNHERIIWLGDLNYRINLSYEKTHELIARKEWQRLVEYDQLSREMTKGNLFEGWSEGTLDFAPTYKYEIDSENYIGDDPESGKRRPAWCDRIIWNGKGMKLFNYRRNEIKLSDHRPVTATFLAEVEVLSPRKLQHALTLTYAEIQGLDA

SEQ ID NO: 84413 - protein, 435 aa, Arabidopsis thaliana
  peptide (1)..(435): Ceres Seq. ID no. 12675042
MEDDQPALEWENLIRDALNRVQPRKLKIKSHSDPPSPSKFKQPEEVPYSVEDMFVETSHDACDGISSMDNKLNSVESTDVPIVSEDSLTNIDVLGSTNDNASCLPIQEYLQRQFSTPNTPDRSLSMQINSDSKREERFSYTERVGLSWPEPPLRLLNQYVSERRGSFKSVNLTITNLRKPSYVRIVSKQMVGVFLTIWVRRNLRKHISNLCVSTVGVGIMGYIGNKGSVSVSMSIYQTPFCFLCTHLSSGEKDTDQEKRNDDVREIHRRTQFLPHSLNANELPRSICNHERIIWLGDLNYRINLSYEKTHELIARKEWQRLVEYDQLSREMTKGNLFEGWSEGTLDFAPTYKYEIDSENYIGDDPESGKRRPAWCDRIIWNGKGMKLFNYRRNEIKLSDHRPVTATFLAEVEVLSPRKLQHALTLTYAEIQGLDA

SEQ ID NO: 84414 - DNA, 1368 bp, Arabidopsis thaliana
  misc_feature (1)..(1368): Ceres Seq. ID no. 12675051
  misc_feature (1)..(1368): Ortholog of  Ceres SEQ ID NO 13596030 as cited in SEQ ID NO 62043
gaaaaatgaagggtttaaggaaatttcagcaaatggccaacgatcagaagaatagtgagtcttttccagcgaaggaagatcataagaaggatgatgcggcagctccagcagaagtagaccataaggatgaattctcggcatcacagccacatccggtcgaaaacatagttttagttgggcgtacagggaacggcaaaagcgccacggggaacagcatcgtcagatcaaaggtgtttaagtcgaaaacaaaatcatcaggtgttacgatggaatgccatgcagttaaagcagtgacaccagaaggccctatactcaatgtgattgacactcctggtctatttgatttgtcggtatctgctgaatttatcggtaaagaaatagttaaatgcctaactctagcggatggagggctacacgctgtgctcttagttttatctgtaaggactcgaattagtcaagaggaagagatggtacttagtaccttgcaggttcttttcggtagtaagattgttgattaccttatcgttgttttcacggggggagatgtattggaagatgacggtatgacattggaggattacttgggtgataacatgccggacttcctaaagagagttctcatattgtgtggccaacgaatgattctgtttgataacaaaaccaaggatgatgagaaaaagacaaagcaagtccatgaacttctcaaacttatcgacttggtcagaaagcagaacaacaatattccgtataccgatgagatgtaccatatgataaaggaagaaaatgaaaggcacaagaaagaacaagaggagctagaatcaaaagggcattcagaagagcagctcgcagcattgatgaaggagttacagataatgaatgaacgaaacctcaaggcaatggcagagatgatggagaaaaatatgaaaatagctatggaggcgcaggagaagctctttgagcaaagagaaaaagctcaggagatgagctaccagcaaaaaatggaaatgcaggagaagttaaagcagatggaaggacgtatgcgtgctgaaatggaagcgcaaatgctcagccgtcagcagtgcagcattctctgatcattcactgtgcgctcttccaccctcacactttgccttcttaatgacaaatagagaaccattgcctagactttgtgtttctaacgcggaacattttctatgttcctcgtttgagcatgctcttggacttttggcctgttatgagtcagcttttgcttttctttcattttcatttatgttatttatctaaattgattaggccagtcgtagcctaatctttgtttgatttgctacgtatttttagtgtaataaatatgtgtgtaagtgttatgtg

SEQ ID NO: 84415 - protein, 363 aa, Arabidopsis thaliana
  peptide (1)..(363): Ceres Seq. ID no. 12675052
KMKGLRKFQQMANDQKNSESFPAKEDHKKDDAAAPAEVDHKDEFSASQPHPVENIVLVGRTGNGKSATGNSIVRSKVFKSKTKSSGVTMECHAVKAVTPEGPILNVIDTPGLFDLSVSAEFIGKEIVKCLTLADGGLHAVLLVLSVRTRISQEEEMVLSTLQVLFGSKIVDYLIVVFTGGDVLEDDGMTLEDYLGDNMPDFLKRVLILCGQRMILFDNKTKDDEKKTKQVHELLKLIDLVRKQNNNIPYTDEMYHMIKEENERHKKEQEELESKGHSEEQLAALMKELQIMNERNLKAMAEMMEKNMKIAMEAQEKLFEQREKAQEMSYQQKMEMQEKLKQMEGRMRAEMEAQMLSRQQCSIL

SEQ ID NO: 84416 - protein, 362 aa, Arabidopsis thaliana
  peptide (1)..(362): Ceres Seq. ID no. 12675053
MKGLRKFQQMANDQKNSESFPAKEDHKKDDAAAPAEVDHKDEFSASQPHPVENIVLVGRTGNGKSATGNSIVRSKVFKSKTKSSGVTMECHAVKAVTPEGPILNVIDTPGLFDLSVSAEFIGKEIVKCLTLADGGLHAVLLVLSVRTRISQEEEMVLSTLQVLFGSKIVDYLIVVFTGGDVLEDDGMTLEDYLGDNMPDFLKRVLILCGQRMILFDNKTKDDEKKTKQVHELLKLIDLVRKQNNNIPYTDEMYHMIKEENERHKKEQEELESKGHSEEQLAALMKELQIMNERNLKAMAEMMEKNMKIAMEAQEKLFEQREKAQEMSYQQKMEMQEKLKQMEGRMRAEMEAQMLSRQQCSIL

SEQ ID NO: 84417 - protein, 353 aa, Arabidopsis thaliana
  peptide (1)..(353): Ceres Seq. ID no. 12675054
MANDQKNSESFPAKEDHKKDDAAAPAEVDHKDEFSASQPHPVENIVLVGRTGNGKSATGNSIVRSKVFKSKTKSSGVTMECHAVKAVTPEGPILNVIDTPGLFDLSVSAEFIGKEIVKCLTLADGGLHAVLLVLSVRTRISQEEEMVLSTLQVLFGSKIVDYLIVVFTGGDVLEDDGMTLEDYLGDNMPDFLKRVLILCGQRMILFDNKTKDDEKKTKQVHELLKLIDLVRKQNNNIPYTDEMYHMIKEENERHKKEQEELESKGHSEEQLAALMKELQIMNERNLKAMAEMMEKNMKIAMEAQEKLFEQREKAQEMSYQQKMEMQEKLKQMEGRMRAEMEAQMLSRQQCSIL

SEQ ID NO: 84418 - DNA, 968 bp, Arabidopsis thaliana
  misc_feature (1)..(968): Ceres Seq. ID no. 12675094
  misc_feature (1)..(968): Ortholog of  Ceres SEQ ID NO 15172430 as cited in SEQ ID NO 59207
gaggtttctctctctctgaaaaagtgcttttgctgcgtttccatgctctcggaaggaacttggctgaatcgttggagaattatcgatctggcgtcgttggtgcatctctagctgcgccaattcatcggatccggtttgatttctccctttcgcgaatctagccttccgtgatcttagcagccatgttctatggcacagctgtatgggacccttggcttatcgttggccagattatttgcctccaatgctcttactatctcactcttggactcttcaccatggtctttcttggccttcgtgttcctcgccttagtcttgtctacttcttcgattacgctactctcactacttccaccttcaccggttggtctgttattgcctcattcctcttctcttcactcgctggggctgtgtacatgatatttttggtggagcgagcacggaaatgcttagatttctctgcaactctctacatcatacatctcttcttttgcatcatgtatggaggatggccttcctctatggcgtggtgggttgttaatggaaccggactcgctgttatggctttgctagctgagtacttgtgcattaaacgcgaacagcgagagatccctatggatcgcttccactcaagggtttgaagattggtgaaagaacaagtgatgaagattcttgtgggttagcagcgcgactcgtagagcctagtagagcctagtactcttaacaattgtgatgtacagagatgaaatcagaggagtagaatgggcgaaaggaagttcagctagccaagcaacaatgttggacactggtgcaccaactctgactgcaatttttagtgacttcaaatactaagactttggaatacgtttcaatttgttcttttgtatgaaaaaaacattagactcgaataggttattgatttcatgttgcttcttttttttgtttatactggattttctcttctatcc

SEQ ID NO: 84419 - protein, 152 aa, Arabidopsis thaliana; identical to SEQ ID NO: 27739
  peptide (1)..(152): Ceres Seq. ID no. 12675095

SEQ ID NO: 84420 - protein, 120 aa, Arabidopsis thaliana; identical to SEQ ID NO: 27740
  peptide (1)..(120): Ceres Seq. ID no. 12675096

SEQ ID NO: 84421 - protein, 76 aa, Arabidopsis thaliana; identical to SEQ ID NO: 27741
  peptide (1)..(76): Ceres Seq. ID no. 12675097

SEQ ID NO: 84422 - DNA, 1177 bp, Arabidopsis thaliana
  misc_feature (1)..(1177): Ceres Seq. ID no. 12675118
  misc_feature (1)..(1177): Ortholog of  Ceres SEQ ID NO 13582388 as cited in SEQ ID NO 56812
  misc_feature (1)..(1177): Ortholog of  Ceres SEQ ID NO 14305353 as cited in SEQ ID NO 57710
aattttaataatcttgaatttagagaaaaagggtaaagcttgtcatcaacttattcgacagtttatataaaaaccgagtcatctttcatcggaagtacttccctccggcccattttctgacgccggcgatactctctttcacctctttctttctttcttctctgtcttttttgctttgtttctctccagtgaggaaaatggcggagtcattacgattctccgactgaaaaaagaagttaaaacctttgaaagaagaggaagaatttgaaagaaaggaaaatgctttgccggaaaaactcaagcttggtggacagaggaaatgttccggtttatctgaatgtctacgatcttactcccattaatggctatgcttactggcttggtcttggcgtttaccattctggtgttgaagttcatggtatagagtatgcttatggagctcatgaatatccaagcactgggatattcgaaggggagccgaagcaatgtgaaggctttacgtttaggaaatcgattttgattggtaaaacggatcttggtcctttggaagtcagagctactatggagcaacttgctgacaactacaaaggaagttcttacaatcttatcaccaagaactgcaaccatttctgcgatgaaacttgtattaagttaactgggaatccaattcctagttgggttaaccgccttgcccgaatcggcttcatgtgcaactgtgtgcttcctgcgactataaacgcgaccaggtttggaaacaacagagtcaatcaagacaaatcatgtgaagcagaaaatgagaagaagaaactgacgagtgtatcgagcagagagaggtctaccattgctactccttcgtcgtcttcttcgtctccttcagttcaagttcgcggtcgaagcaggaaaaggcgtcctcgtgctctgcaaccttcatcgccattgactctcggatcttcctccgtttgactataagtaaaatgaaatttggctttgtttggtaaatccatttttgatctctcaactagagagaccactctgtatttcttctattaattgcgagtgtgctctgtaatcttgttaatatgcaaacctttttcttttcttttttttgtaatcttatttgcattttcttttcagattttggactttatttttacagtcagatatcaaattctcggtc

SEQ ID NO: 84423 - protein, 227 aa, Arabidopsis thaliana; identical to SEQ ID NO: 25172
  peptide (1)..(227): Ceres Seq. ID no. 12675119

SEQ ID NO: 84424 - protein, 133 aa, Arabidopsis thaliana; identical to SEQ ID NO: 25173
  peptide (1)..(133): Ceres Seq. ID no. 12675120

SEQ ID NO: 84425 - DNA, 1826 bp, Arabidopsis thaliana
  misc_feature (1)..(1826): Ceres Seq. ID no. 12675121
  misc_feature (1)..(1826): Ortholog of  Ceres SEQ ID NO 15226493 as cited in SEQ ID NO 59078
gcttctaaaattttctggtagatctgagtccacaatcatcagaaatcaactttgtgaattgaaggccgatcactcctttgactttgttcttagggttcatcctcaaaggtgtttaatgagctcttagaagctatgggaatggcgtccatgagctctggtactgaaagccttcgtctttgcgtgtttgacttaagaagaggccaacacgaaggacaggaactggacaagatcttgttcttctatcctcctgatctaaccttctccactcagctatcggttataggtctcagtgaagggcttatcacgttcacgagacttttctccccggaggcagcttgtgaggtaattgaagcagagagacattcccatgttttctatgaggccgagcccgatatctggatggtcatgattgtagagaaaaataaggagattgaagctgtatggaggattgatgcattgcggagagtgcttaaggaagtgcactctctctttgttatgtttcaagggtcaattagggcattgcttgagaaagaaccaactggaggacttgtaagatcgcacttgtatccattcatcacagactatttaaatgatcttttcgttgggaaaaaacaacagttaccttccttccgtgacactttgaaagagcgtggaacagttcagatgctaactttagctagagatgcggcacttgaagttcagtctctcgtcggagtgctagattcatgtgctgggaccgttcgatgccactctgtgattctatttcatgatctactggtgtcaacaactctctcacctgatgataccgtcgacttgtttgcattttctgtcatgagattaaccacaaacgcgctatcatctggcacaagttcctggtcatatctacgcaaaggatccggttcacctcaaatatcttctagatctactacggtgccccctcttggttcaggtggtacattgccttcgggaaatggtagtagcacaggtcgtgttattagacctttgcagcacgataagtggtcgaaggggaaagatgggtttcttgtaactgatatttggggtttagatgccaccccgacaattttgatacagaagacacaggaaagtttttaccttttgacttatcagtacaagagtctcaccttggttcttctcgtgcctatcgctgcaattgttaatggagagctagacatctcattcgtgaagcagcaagttattgaaaacgcatcgaccaaaatcttgaaagtcgaagagaagctatcgaaagggtggggcggtgagaatgcttaccatgtaagcggttaccgttacttactagttgataatgacatggaagtttccagagcttctccaccaggaaaggtagcaacactagcaaaggagtctttgcttgcactaaacaagctaagggaagaagtggatacagaaaaaaaccgctcgaagcaagagaaagacatggaaatatgcattcgagcgaagaacaacacatgggtcatcgcgcgtctaaacagaggtaaagagctttacatggctttagagaaagcaagtgaaactcttcttgatgctacagactctgtccaaagattcagcaacaggtactgcagcggggcattccccatggattagattctgcaattgtttgttttgatagaagttgcaaaggaaagtgtttttgaagtgttttgagatatgttttagattttcaattataagatataaaagaaaccgttacaaagaatgagaatttggtgacttttgtatccacaactaaaagtaaacgtggaacttgacccttgacggtttgaataaaaccttcgcttaatctc

SEQ ID NO: 84426 - protein, 497 aa, Arabidopsis thaliana; identical to SEQ ID NO: 76743
  peptide (1)..(497): Ceres Seq. ID no. 12675122

SEQ ID NO: 84427 - protein, 495 aa, Arabidopsis thaliana; identical to SEQ ID NO: 76744
  peptide (1)..(495): Ceres Seq. ID no. 12675123

SEQ ID NO: 84428 - protein, 492 aa, Arabidopsis thaliana; identical to SEQ ID NO: 76745
  peptide (1)..(492): Ceres Seq. ID no. 12675124

SEQ ID NO: 84429 - DNA, 1206 bp, Arabidopsis thaliana
  misc_feature (1)..(1206): Ceres Seq. ID no. 12675174
  misc_feature (1)..(1206): Ortholog of  Ceres SEQ ID NO 12635167 as cited in SEQ ID NO 0
aagaagacgatagacagcaaaaagcgttgggcgagaagaagatgacgtgcttctcttctgctactcctcatcgccatcatcttctactttcttctccatctacttccaaatccctgcttcgatttccctcatcttatctgaaacctagccccagtcttctcttccatggctcatctcgctctctcctctcctgttcagacggcagcaacaaccgtcctcctccctccggtgacaccgtcccaaataacttctgtatcattgagggatcagagacagttcaagactttgtgcagatgcagcttcaggaaatccaagataacataaggagtagacgcaataagatatttctcctcatggaggaagtgaggaggttacgtgtgcagcaacgtatcaagagtgttaaagccatcaatgaggacagtgagctcgaggctaccgagatgcctgagatcacatcttctattcctttcctccctaatgtgacaccaaagactttgaaacaactctattcgaccagcgttgcattgatatcgggaattatcttctttggtggtctcattgcacctaatctggaactgaaggtaggacttggaggaacctcttatgaagattttataaggagcttacatctacccttgcaattaagccaggtagatccaattgtggcatctttttctggcggggccgtgggagtcatttcaaccttgatgctaatcgaagttaacaatgttaaacaacaagagaagaagaggtgcaaatactgccttgggactggatacttgccatgcgctcgatgctcagctagtggtgtgtgtttgagcattgatcccatcacaagacctagagctacaaaccagcttatgcaggtcgcgaccacaaaaagatgtctaaattgttccggcgcaggaaaggtgatgtgtccgacatgtctttgcaccgggatggtaacagctagcgagcatgacccccgctttgaccctttcgattagaaaacaatggcctcctttgaaattggtccttgcaaaagctaagccaagcctatgagaactgaggagagccaaacctcgtcatataaatgttttacataataaaagtaattacataataaaagtaacattagaatttttaacttttgtctatagtaaacatgggaaagtatcggttatgtaaagtacttcttcacaaactaaaaaaattcaccagatg

SEQ ID NO: 84430 - protein, 328 aa, Arabidopsis thaliana
  peptide (1)..(328): Ceres Seq. ID no. 12675175
EDDRQQKALGEKKMTCFSSATPHRHHLLLSSPSTSKSLLRFPSSYLKPSPSLLFHGSSRSLLSCSDGSNNRPPPSGDTVPNNFCIIEGSETVQDFVQMQLQEIQDNIRSRRNKIFLLMEEVRRLRVQQRIKSVKAINEDSELEATEMPEITSSIPFLPNVTPKTLKQLYSTSVALISGIIFFGGLIAPNLELKVGLGGTSYEDFIRSLHLPLQLSQVDPIVASFSGGAVGVISTLMLIEVNNVKQQEKKRCKYCLGTGYLPCARCSASGVCLSIDPITRPRATNQLMQVATTKRCLNCSGAGKVMCPTCLCTGMVTASEHDPRFDPFD

SEQ ID NO: 84431 - protein, 315 aa, Arabidopsis thaliana; identical to SEQ ID NO: 41300
  peptide (1)..(315): Ceres Seq. ID no. 12675176

SEQ ID NO: 84432 - protein, 231 aa, Arabidopsis thaliana; identical to SEQ ID NO: 41301
  peptide (1)..(231): Ceres Seq. ID no. 12675177

SEQ ID NO: 84433 - DNA, 1434 bp, Arabidopsis thaliana
  misc_feature (1)..(1434): Ceres Seq. ID no. 12675226
  misc_feature (1)..(1434): Ortholog of  Ceres SEQ ID NO 14304573 as cited in SEQ ID NO 53242
  misc_feature (1)..(1434): Ortholog of  Ceres SEQ ID NO 15171148 as cited in SEQ ID NO 58167
gaatcacaattaaacccaattcaggaaaaagatttcatctttgagtttttcattcatctatcggttgtttccattctcaggttttgattgataatcatagattggtagtgatttgggagtttcttgattgtgtaatcatggcggaggctattggtgctgtatctttggtgggtcatcgaccttcaattgtgaggattacagtgaagaatgaattgaaaacgcagaaatcacagagcattgttcgctttccggtgaaggtagattatagtgcgaaaggtgttctctctcatttgatgacgcagagtgtgaaaaagaatcgaatgtcggtgtttccgatcagggctcttgctatggaattgacgaaagagaagaagaaagacgatcggttaccgaaaacttggaattatcttgattctggtgctgatgataagcctagtttatggcctcctgagaacaaagctgataagccttcattgcataatcctttacttaggcaagagcggatgggttgtggttggttaggtgctatatttgagtgggaaggagtattgattgaagacaatcctgacttggataaccaatcatggcttactttagctcaagaagaagggaaatctcctcctccggcttttatgctcagacgtgtcgaagggatgaagaacgagcaggccatatctgaggttctgtgttggtcgagagatcctgttcaagtgagaaggatggctaagcgtaaagaagagatctttaaagctctacatggaggagtgtatagactaagagatgggtcgcaggaatttgtcaatgtcttgatgaataataagatccctatggctttggtatcgactcgtcctcgggaaacattggagaatgcagttggatcgataggtatcagaaagttcttcagtgtgatagttgcatcggaagatgtttacagaggtaaaccagatcctgagatgttcatttacgcagcacagcttcttgatttcataccggaacgttgcattgtatttggaaactcaaaccagaccatagaggcagctcacgatgggaggatgaaatgtgtggctgtggcgagtaaacacccgatttatgagcttggtgcagctgagctggtggtaagaagactagacgagttatcgattatcgatttgaagaaacttgctgataccgatttgacagagttcgaaccggaattggagatggaaaaggaagatgagcgtgagctgccttcatcggctgtagcagttgatgatttctgatggaagtgatcttctgtaatgttgtacagttttatggatttggattcttcctcgtgtaattcacaaaatgttatagtttctgtgtataattggaacaagttaaacgagggataaatataaaatgtatactcctagttttaatgttgtgtacgttatatatcatttgatttgaaca

SEQ ID NO: 84434 - protein, 373 aa, Arabidopsis thaliana; identical to SEQ ID NO: 38131
  peptide (1)..(373): Ceres Seq. ID no. 12675227

SEQ ID NO: 84435 - protein, 321 aa, Arabidopsis thaliana; identical to SEQ ID NO: 38132
  peptide (1)..(321): Ceres Seq. ID no. 12675228

SEQ ID NO: 84436 - protein, 312 aa, Arabidopsis thaliana; identical to SEQ ID NO: 38133
  peptide (1)..(312): Ceres Seq. ID no. 12675229

SEQ ID NO: 84437 - DNA, 1132 bp, Arabidopsis thaliana
  misc_feature (1)..(1132): Ceres Seq. ID no. 12675230
  misc_feature (1)..(1132): Ortholog of  Ceres SEQ ID NO 13596108 as cited in SEQ ID NO 68591
gaactatctctttttgctttacaaagataggtgtgtcaataataaaggagtgaatatgataagttcaaaatgtagcacggattgtgatgctgaggtttcttcttcagggaataacttagacgaagactgcttatctatcgttgaaaataaacagttgcttgagaaagatagaaatgacaaagagactgaagtttgtttgtcctctccagaaacgactacttacgcttttgctaaacagagacatgcttttgctggtgcgttggcaggcataagcgtcagtctttgtcttcatccacttgataccgttaagacaatgattcagtcatgccgcttggaggagaagtctctatgcaatactgggagatcaattatatcagaaagaggtttttctggactttatcgagggattgctagcaacattgcctcatcagctcctatctctgccctctatacgttcacttatgaaaccgttaaaggaactctgcttcctctttttcctaaggaatattgctccctagcccactgcttagctggtggttctgcaagcattgcaacttcttttatcttcacgcctagtgagcgcataaaacagcagatgcaagtcagttcacattatcgcaattgctggaccgcattggttggaatcatccaaaagggtggtctgctttctttatatgctggatggactgcagtgctatgtagaaatatcccgcactcaatcattaagttctatgtctatgaaaacatgaagcaaatggtattaccatccccaggcccttgtggtgaaatggctcaacccacaacattacaaacgcttacctgtggaggactagcgggatctgctgctgctttcttcacaaccccatttgatgtagtaaaaacaagattacaaactcagattcccggatctagaaaccaacatcctagtgtctatcaaactcttcaatcaatacgaaggcaagaaggtctgagagggctatacagaggcttgatccccagactagtgatgtacatgtcgcaaggagctatattctttgcttcgtatgaattttacaagagcgtactctctctagcagcggcgcagcctaatacgtcagctctctctggcacaaaacaaaagatggagatagcc

SEQ ID NO: 84438 - protein, 377 aa, Arabidopsis thaliana
  peptide (1)..(377): Ceres Seq. ID no. 12675231
NYLFLLYKDRCVNNKGVNMISSKCSTDCDAEVSSSGNNLDEDCLSIVENKQLLEKDRNDKETEVCLSSPETTTYAFAKQRHAFAGALAGISVSLCLHPLDTVKTMIQSCRLEEKSLCNTGRSIISERGFSGLYRGIASNIASSAPISALYTFTYETVKGTLLPLFPKEYCSLAHCLAGGSASIATSFIFTPSERIKQQMQVSSHYRNCWTALVGIIQKGGLLSLYAGWTAVLCRNIPHSIIKFYVYENMKQMVLPSPGPCGEMAQPTTLQTLTCGGLAGSAAAFFTTPFDVVKTRLQTQIPGSRNQHPSVYQTLQSIRRQEGLRGLYRGLIPRLVMYMSQGAIFFASYEFYKSVLSLAAAQPNTSALSGTKQKMEIA

SEQ ID NO: 84439 - protein, 359 aa, Arabidopsis thaliana
  peptide (1)..(359): Ceres Seq. ID no. 12675232
MISSKCSTDCDAEVSSSGNNLDEDCLSIVENKQLLEKDRNDKETEVCLSSPETTTYAFAKQRHAFAGALAGISVSLCLHPLDTVKTMIQSCRLEEKSLCNTGRSIISERGFSGLYRGIASNIASSAPISALYTFTYETVKGTLLPLFPKEYCSLAHCLAGGSASIATSFIFTPSERIKQQMQVSSHYRNCWTALVGIIQKGGLLSLYAGWTAVLCRNIPHSIIKFYVYENMKQMVLPSPGPCGEMAQPTTLQTLTCGGLAGSAAAFFTTPFDVVKTRLQTQIPGSRNQHPSVYQTLQSIRRQEGLRGLYRGLIPRLVMYMSQGAIFFASYEFYKSVLSLAAAQPNTSALSGTKQKMEIA

SEQ ID NO: 84440 - protein, 273 aa, Arabidopsis thaliana
  peptide (1)..(273): Ceres Seq. ID no. 12675233
MIQSCRLEEKSLCNTGRSIISERGFSGLYRGIASNIASSAPISALYTFTYETVKGTLLPLFPKEYCSLAHCLAGGSASIATSFIFTPSERIKQQMQVSSHYRNCWTALVGIIQKGGLLSLYAGWTAVLCRNIPHSIIKFYVYENMKQMVLPSPGPCGEMAQPTTLQTLTCGGLAGSAAAFFTTPFDVVKTRLQTQIPGSRNQHPSVYQTLQSIRRQEGLRGLYRGLIPRLVMYMSQGAIFFASYEFYKSVLSLAAAQPNTSALSGTKQKMEIA

SEQ ID NO: 84441 - DNA, 2030 bp, Arabidopsis thaliana
  misc_feature (1)..(2030): Ceres Seq. ID no. 12675234
  misc_feature (1)..(2030): Ortholog of  Ceres SEQ ID NO 14315138 as cited in SEQ ID NO 53488
attgcaattttcacataacaaatctttttctttccccttgctcactccaagtctccaagcccccaaattttttcacaatcaatcatttctttgttgcgaaccaaacttgtgatatggcgacaccgaatcaggaagcaatcgacactttcatcagcatcaccggcgcttctgacgccgtcgcccttcagaaactcgaggagcatcgtggtgatcttaatcaagcagtgaatgcatatttcagcgaaggagatcgaaatgtagtacgtgaagcgccggttaatgatgatgatgaaatggatatagatgatgtgattccggctccacaatctcctctctctatgttcaatgcagctagaacaattggccgtcctcccttttcgcttttggattcggactttgctagacgtgtatttgatagcgatcctcttatgccacgccctccgtttgttagtcatcctagagaggttaggcagatacctatagaggttaaggatagcagtgggccatctggacgatctagtgatgctcctactattgaagatgtgacagaaacagctcatgttcagggtccagtaactacccaaggaactgttattattgatgaagagagtgatgatgatattccttttgcaccaatgggacgaagtaggcaagacagacctgctggttctgtagccaataataataatcaagattacaatgatatagaagaagaaatgatcagagctgccattgaggcctcaaagaaagaggctgagggatcaagtaaccctttacttgaagagaggccacttcacatggaagatgatgatgacatagcaatagctgttacaatgtcattgaagtcagcggaggaagaagttttgcgcagtcaagggtataaggcctcaacctcggaaataggagcttctgcagtgactgctgctcaaggacctcaggatacccaggccctgaacggaagattggcagcacctagttcaccatttgatgatgactctgatgatgttgatgagcaacctcttgttagacacaggccaagacgtgcagcatccggatctctggctccacctaacgctgatcgttcccggagtgggagtcctgaagaagaacatgcaagtattaatccagcggagcgtggcagtgggtttccttctgagtggggaggcatttcatctgaggaacatgatgaagctgtcatgctcgaggcagccatgtttggtggcattcctgaaactggatataatcatcttccattcttacctcctcagccgagggcccaaccacgtccaccctcaccttcgctgacagctcagaggttgatacgggaacagcaggatgatgagtatgttgcgtccctgcaagctgaccgagataaagaaatgaagtccattagagatgctgaggcacgtcagctagaggaagaaactgcgagaaaggcttttctggaggaagaaaagaaaaaagaggaagaagctcaaagaaaactcgaggaggaacaggcttctgctagtggatagagaaagatcagccaaaacacctgcagctttattacatcagaaaaatgagctagaaagacaactagatgcaaaagaagcgtctttacctaaggagcctcaagctgatgaagagaatgccattacccttctaatccggatgccggatggaacacgtcggggccgccggttccttaaatctgacaaactccaaacccttttcaactttatagacattgccagagtggtgaaacccaacacttacagactggtgaggccatatccgaggcatgcgtttggagatggggaaagtgagtcgaccttaaacgatcttggattgaccagcaaacaagaagcattgttccttgagcttatctagttttaagctcttaaatatataagaagaattacatttgtcttctgcttagaaaactctttaattttcaagttattttttttatctttctttatacaaaagaaaaagtatttgttgagggtggaggattatatggtttataaaaccgtcgtcgtttagtc

SEQ ID NO: 84442 - protein, 504 aa, Arabidopsis thaliana
  peptide (1)..(504): Ceres Seq. ID no. 12675235
CNFHITNLFLSPCSLQVSKPPNFFTINHFFVANQTCDMATPNQEAIDTFISITGASDAVALQKLEEHRGDLNQAVNAYFSEGDRNVVREAPVNDDDEMDIDDVIPAPQSPLSMFNAARTIGRPPFSLLDSDFARRVFDSDPLMPRPPFVSHPREVRQIPIEVKDSSGPSGRSSDAPTIEDVTETAHVQGPVTTQGTVIIDEESDDDIPFAPMGRSRQDRPAGSVANNNNQDYNDIEEEMIRAAIEASKKEAEGSSNPLLEERPLHMEDDDDIAIAVTMSLKSAEEEVLRSQGYKASTSEIGASAVTAAQGPQDTQALNGRLAAPSSPFDDDSDDVDEQPLVRHRPRRAASGSLAPPNADRSRSGSPEEEHASINPAERGSGFPSEWGGISSEEHDEAVMLEAAMFGGIPETGYNHLPFLPPQPRAQPRPPSPSLTAQRLIREQQDDEYVASLQADRDKEMKSIRDAEARQLEEETARKAFLEEEKKKEEEAQRKLEEEQASASG

SEQ ID NO: 84443 - protein, 467 aa, Arabidopsis thaliana
  peptide (1)..(467): Ceres Seq. ID no. 12675236
MATPNQEAIDTFISITGASDAVALQKLEEHRGDLNQAVNAYFSEGDRNVVREAPVNDDDEMDIDDVIPAPQSPLSMFNAARTIGRPPFSLLDSDFARRVFDSDPLMPRPPFVSHPREVRQIPIEVKDSSGPSGRSSDAPTIEDVTETAHVQGPVTTQGTVIIDEESDDDIPFAPMGRSRQDRPAGSVANNNNQDYNDIEEEMIRAAIEASKKEAEGSSNPLLEERPLHMEDDDDIAIAVTMSLKSAEEEVLRSQGYKASTSEIGASAVTAAQGPQDTQALNGRLAAPSSPFDDDSDDVDEQPLVRHRPRRAASGSLAPPNADRSRSGSPEEEHASINPAERGSGFPSEWGGISSEEHDEAVMLEAAMFGGIPETGYNHLPFLPPQPRAQPRPPSPSLTAQRLIREQQDDEYVASLQADRDKEMKSIRDAEARQLEEETARKAFLEEEKKKEEEAQRKLEEEQASASG

SEQ ID NO: 84444 - protein, 407 aa, Arabidopsis thaliana
  peptide (1)..(407): Ceres Seq. ID no. 12675237
MDIDDVIPAPQSPLSMFNAARTIGRPPFSLLDSDFARRVFDSDPLMPRPPFVSHPREVRQIPIEVKDSSGPSGRSSDAPTIEDVTETAHVQGPVTTQGTVIIDEESDDDIPFAPMGRSRQDRPAGSVANNNNQDYNDIEEEMIRAAIEASKKEAEGSSNPLLEERPLHMEDDDDIAIAVTMSLKSAEEEVLRSQGYKASTSEIGASAVTAAQGPQDTQALNGRLAAPSSPFDDDSDDVDEQPLVRHRPRRAASGSLAPPNADRSRSGSPEEEHASINPAERGSGFPSEWGGISSEEHDEAVMLEAAMFGGIPETGYNHLPFLPPQPRAQPRPPSPSLTAQRLIREQQDDEYVASLQADRDKEMKSIRDAEARQLEEETARKAFLEEEKKKEEEAQRKLEEEQASASG

SEQ ID NO: 84445 - DNA, 2401 bp, Arabidopsis thaliana
  misc_feature (1)..(2401): Ceres Seq. ID no. 12675246
  misc_feature (1)..(2401): Ortholog of  Ceres SEQ ID NO 13600216 as cited in SEQ ID NO 569
acacgtctgagaaaacaactcattcaaagtttgaaaactcatgggctcgctggagccgacccaggaacggcaaaaatctagaagcgccaagttttcttcaactctttaacgtcgttgttgtcttcgtcaccaagtaaaccctagatccacaatttcaacggaaatttcattcttcttcttcttcctcgcgaatctgtttttttttttgatattcgattctactttccctttccatcaaaaaacatttcgtcgacgatttcacgcgatgtccttctccgattctggatcgtcctcttatggcggagagtacaagaatttcagacaaatcaccagagaaagattactttgtgaaatgcttaggccagaaagaaatggaagctctaaattaacttggaaggtacttgtaatggacaagttcactgtgaagataatgtcatctgcttgcaaaatgtctgagatcacacaagaaggcatttctttggttgaggttataactaaacataggcaacctatgacagcaatggaagtcatatactttattcaaccgaccgaagagaatgtcactgcgtttttatcagatatgactggaaaatcaccactttacaagaaggcttttgttttctttagttctcctgtttcgagaagcttagttaatctcattaagaaggacatgagagcaatgaaacgaattgggggattgaaagagatgaacttggagtatattagcatggacatccagggctttgttacaaataatgaaaatgctttagaagagcttttctgtgacgacgaaaaccatcaaagagcagatgcttgcttaaatgtggtagctaaaagaattgctacagttttggcctcactaaaggaatatccctttgttcgctaccgcggagccaaagctcttgatgccacaacaatgacaacttaccgagagttgattcctacaaagcttgctgctagtgtatggaattgtcttgcaagatacaaacagacaatcgaagattttcctcagactgaaacatgcgaactacttatcttggatcgatccatagaccagatcgcacctctcattcatgagtggacatatgatgcgatgtgccacgatttgcttaatatggaaggaaataaatacacacacgagtgtataggttccgagtaaaactggtgataaacctgagaagaaagaggttcttctagatgaggaagattccatttgggtggagcttcgtgatgctcatattgcagatgcaagtgaaagattgcatgaaaagatgacaaacttcgtgtcgaagaacaaagctgcgcaattgaaacacagttcaaaagactttggtgacctttcatcaaaagacttgcagaagatggttcacgctttgcctcagtacagtgagcaaattgacaagctttctctacatgttgagatcgctagaacaataaacagaactatcatggaacaaggtctaagagatctcgggcagctcgagcaggaccttgtttttggggatgctggaagaaaggacgttatcaaatttctgagcaccaaccatattataagccacgaaagcaagctgaggttaattatgattgttgctgcaatatatccgaagaagttcgaaggtgaaaagggacgtaagatgatggagctagcaaaattgtcgggcgatgatgtagtagctgtgaacaatatgagattacttggaccagtacatacggagtgcaaaaagagcacaacaggatcttttcctctcaagtttgatgtccttaagacgaagcgagctgctcgaagagaccgagttggtgaaactcaaacatggcaactgtctcgtttttacccgattgttgaggaacttgttgagaaacttagcaaaggtcatttgccaaaacaagattacccttgtatgaatgaaccaaagccaaccttttattctggctctctgtctccatcagcgagtccggtattgcctcattcaagacgaacaccaacatgggcaagacgccatctttctgatgatggatatttcagtgactcggttctaggacgagcatctagtgggttcaagagaaagggacagcggattttcgtgttcatagtaggaggagcaacgagatcagagttaagggtttgccacaaacttacggagaagctcgacagagaagtgatcttaggctcctccagcttccttgatcccctaactttcctcactaaaatgaaacaactaaacgaagaagaggagatctcacttgatgatattgtcatttgattagcaacttggtatcgaattttgttttggtaataaaatgatgggacggacatatgttccctatgtaaataaatacaatttatttgttcctttggtttgactaactaacggggttgctttatttaattgaatacttcatg

SEQ ID NO: 84446 - protein, 329 aa, Arabidopsis thaliana
  peptide (1)..(329): Ceres Seq. ID no. 12675247
MTNFVSKNKAAQLKHSSKDFGDLSSKDLQKMVHALPQYSEQIDKLSLHVEIARTINRTIMEQGLRDLGQLEQDLVFGDAGRKDVIKFLSTNHIISHESKLRLIMIVAAIYPKKFEGEKGRKMMELAKLSGDDVVAVNNMRLLGPVHTECKKSTTGSFPLKFDVLKTKRAARRDRVGETQTWQLSRFYPIVEELVEKLSKGHLPKQDYPCMNEPKPTFYSGSLSPSASPVLPHSRRTPTWARRHLSDDGYFSDSVLGRASSGFKRKGQRIFVFIVGGATRSELRVCHKLTEKLDREVILGSSSFLDPLTFLTKMKQLNEEEEISLDDIVI

SEQ ID NO: 84447 - protein, 299 aa, Arabidopsis thaliana
  peptide (1)..(299): Ceres Seq. ID no. 12675248
MVHALPQYSEQIDKLSLHVEIARTINRTIMEQGLRDLGQLEQDLVFGDAGRKDVIKFLSTNHIISHESKLRLIMIVAAIYPKKFEGEKGRKMMELAKLSGDDVVAVNNMRLLGPVHTECKKSTTGSFPLKFDVLKTKRAARRDRVGETQTWQLSRFYPIVEELVEKLSKGHLPKQDYPCMNEPKPTFYSGSLSPSASPVLPHSRRTPTWARRHLSDDGYFSDSVLGRASSGFKRKGQRIFVFIVGGATRSELRVCHKLTEKLDREVILGSSSFLDPLTFLTKMKQLNEEEEISLDDIVI

SEQ ID NO: 84448 - protein, 297 aa, Arabidopsis thaliana
  peptide (1)..(297): Ceres Seq. ID no. 12675249
MSFSDSGSSSYGGEYKNFRQITRERLLCEMLRPERNGSSKLTWKVLVMDKFTVKIMSSACKMSEITQEGISLVEVITKHRQPMTAMEVIYFIQPTEENVTAFLSDMTGKSPLYKKAFVFFSSPVSRSLVNLIKKDMRAMKRIGGLKEMNLEYISMDIQGFVTNNENALEELFCDDENHQRADACLNVVAKRIATVLASLKEYPFVRYRGAKALDATTMTTYRELIPTKLAASVWNCLARYKQTIEDFPQTETCELLILDRSIDQIAPLIHEWTYDAMCHDLLNMEGNKYTHECIGSE

SEQ ID NO: 84449 - DNA, 687 bp, Arabidopsis thaliana
  misc_feature (1)..(687): Ceres Seq. ID no. 12675253
  misc_feature (1)..(687): Ortholog of  Ceres SEQ ID NO 13598157 as cited in SEQ ID NO 61570
accaatctcaaagcaaattaaatacactactacttcttgagcttttaaactacacaaacaaatggctccaagaaccccccttgcactcttcgtttctctcaacctcctcttcttcacttacacctctgcaaccacagggacttgtcctaaaaattccatagagatcggtacttgtgtcactgtgctcaatctagtggacctaacattgggaaacccacctgtaaagccatgttgctcgctcatccaaggcttggctgaccttgaggccgcggtctgcctttgcactgcagtcaaggctagcattcttggaattgtcaatattaaccttcctatcaatctcagcgtactcctcaatgtttgtagtaggaatgctccaaagagtttccagtgcgcgtaagttgaatacctatgacatacctatgaaacaaacgaatcataccgatgcttgaacatgttttcttacctacttgttgttgttctaagatgtttgttttttctttctttcttggattgttaataatgaacgtacgacgttctgatgcaaaataatggaaaatggggttgtgtgtacaatcgacaagtttgtatatactcctttactttgttgttcctttgttttgttgttcctcttctttgtaactgtgtatttcaaatttgcttaataaaaatataaattgatgttgtagc

SEQ ID NO: 84450 - protein, 111 aa, Arabidopsis thaliana
  peptide (1)..(111): Ceres Seq. ID no. 12675254
MAPRTPLALFVSLNLLFFTYTSATTGTCPKNSIEIGTCVTVLNLVDLTLGNPPVKPCCSLIQGLADLEAAVCLCTAVKASILGIVNINLPINLSVLLNVCSRNAPKSFQCA

SEQ ID NO: 84451 - DNA, 1323 bp, Arabidopsis thaliana
  misc_feature (1)..(1323): Ceres Seq. ID no. 12675270
  misc_feature (1)..(1323): Ortholog of  Ceres SEQ ID NO 12593058 as cited in SEQ ID NO 63090
ataagactcctctccaaatgctaccacacaattcctctatcaaagccgcccaatcctccacccaaaaatggcttatctccggcgagcagccaccgcattggttctcattttccagctccatctctttctctctctctcaaatgcacataacataacccgtcgataactcagcaatgtcctccatcctctctaacggatactcactctaccaaatccgcaacattctctctctccacgtcctggtcgattacttcggcaccaagaaacttcaccagatcaccgacggctccacctccactgcctccatgtttcaatccaccggatccgccaccggaacttctggatacatcaacatcaccgatataaaaggcggtaaagtcgcttttggtgtccaagacgacgatagcaagctcacagctcactacgtcaaatccgtctttgaaaagccttacaacatctctgttcttcacatcagccaagtcttaacctcgccggaagcagaagctcccacggcgagtcccagcgacctcatcctcaccacaatcctcgaaaaacaagggtgcaaagctttctccgacatcttgaagtcaaccggcgccgacaaaacgttccaagataccgtagacggaggcttaacggtgttctgtccctccgacagcgctgtcggtaagttcatgccgaaattcaaatccctttctccggcgaacaagactgcgttagtgctttaccacggcatgccggtttaccagtcgttacaaatgcttagatcaggtaacggcgccgttaacacgttagcgacggaaggtaacaacaagtttgatttcaccgttcaaaatgacggagaagacgtgacgctggagacggacgttgtgacggcgaaggtaatggggacgttaaaggatcaagagccattgatagtttacaagatcgataaagtgttgttgcctagagaaatctacaaggccgttaagacgtccgctccagctcctaagtcgagtaagaaaaagcctaagaacgcggaggctgacgccgacggacctagcgccgatgctccgtcagatgatgatgttgaggtggctgacgataaaaacggcgccgtatcagcgatgattactcgaacaagtaatgtcgtaacggccattgtcgggctctgtttcggagtttggcttatgtgaagtgacgtggcatttacctcgctttgggaatcttgttttcctttttctttgtgatctgtcggtttaatttattttacatattcttttttttgttcacgttgatacttggtgtggagatttggaataattaattgttccacttgtgttg

SEQ ID NO: 84452 - protein, 333 aa, Arabidopsis thaliana; identical to SEQ ID NO: 26961
  peptide (1)..(333): Ceres Seq. ID no. 12675271

SEQ ID NO: 84453 - protein, 289 aa, Arabidopsis thaliana; identical to SEQ ID NO: 26962
  peptide (1)..(289): Ceres Seq. ID no. 12675272

SEQ ID NO: 84454 - protein, 166 aa, Arabidopsis thaliana
  peptide (1)..(166): Ceres Seq. ID no. 12675273
MPKFKSLSPANKTALVLYHGMPVYQSLQMLRSGNGAVNTLATEGNNKFDFTVQNDGEDVTLETDVVTAKVMGTLKDQEPLIVYKIDKVLLPREIYKAVKTSAPAPKSSKKKPKNAEADADGPSADAPSDDDVEVADDKNGAVSAMITRTSNVVTAIVGLCFGVWLM

SEQ ID NO: 84455 - DNA, 1292 bp, Arabidopsis thaliana
  misc_feature (1)..(1292): Ceres Seq. ID no. 12675281
  misc_feature (1)..(1292): Ortholog of  Ceres SEQ ID NO 15171943 as cited in SEQ ID NO 54306
  misc_feature (1)..(1292): Ortholog of  Ceres SEQ ID NO 13655812 as cited in SEQ ID NO 64743
  misc_feature (1)..(1292): Ortholog of  Ceres SEQ ID NO 15178828 as cited in SEQ ID NO 0
tctgaaagttcttaagtggttccacgatgtttccattttgttctgacttccgaggccaacgagatgagtccaataaacaaagggcacggaaacattctttttaaattaggtttgtttttttatttttggtttttggtttttcccggaaattgtatgaagtcttcgttacagtttctctctctcaccttctctgtataaagtcttcttgagatcgaaggataacttcaattcaattctctccaaggtacacacagctgatttttgtgataagaagattgattgagatgggtactagagctcagcagattcctttacttgaaggtgagactgataattacgatggtgttactgtaaccatggtggaacctatggattctgaggtttttactgaaagtcttagggcttctctttcgcattggagagaagaggggaagaagggaatttggataaagctgcctcttggattggctaatcttgtggaggctgcagttagtgaaggatttagatatcaccacgcggagcctgagtacttgatgcttgtatcttggatctctgaaactcctgatacaatcccagccaatgcttctcatgttgtaggtgctggtgctttggtcatcaacaaaaatactaaagaggtcctcgttgtccaggagaggagtgggtttttcaaagataaaaatgtgtggaagctgcctactggtgttatcaacgagggcgaggatatatggactggagtagctagggaagtggaagaagaaactggaattattgcagattttgtcgaagtactggctttcaggcaaagccacaaagccatcttaaaaaagaaaacagatatgtttttcctgtgtgtcttaagtccgcgctcttacgatattactgaacaaaaatctgagatcttgcaagctaagtggatgccgatccaagagtatgtagaccaaccatggaacaagaagaacgagatgttcaagttcatggctaacatttgccaaaagaagtgtgaggaagaatacttgggattcgccattgtgccaactaccacatcatctggtaaagagagctttatctactgcaatgcggatcatgccaagcgccttaaagtatcgcgtgaccaagcctctgcttctctctgaaaacattctcatctgattctgtttgatctcggcatgtgtgtgtccagtgtgtacaaaacaggaaactttcttctatattattccgattctacaaaattgcgtctaaatatttaagtttataccatctctatgagccactgtaaaacttgccatcgactt

SEQ ID NO: 84456 - protein, 282 aa, Arabidopsis thaliana; identical to SEQ ID NO: 42540
  peptide (1)..(282): Ceres Seq. ID no. 12675282

SEQ ID NO: 84457 - protein, 258 aa, Arabidopsis thaliana; identical to SEQ ID NO: 21781
  peptide (1)..(258): Ceres Seq. ID no. 12675283

SEQ ID NO: 84458 - protein, 254 aa, Arabidopsis thaliana; identical to SEQ ID NO: 21782
  peptide (1)..(254): Ceres Seq. ID no. 12675284

SEQ ID NO: 84459 - DNA, 1931 bp, Arabidopsis thaliana
  misc_feature (1)..(1931): Ceres Seq. ID no. 12675285
  misc_feature (1)..(1931): Ortholog of  Ceres SEQ ID NO 14303201 as cited in SEQ ID NO 67304
atggaagttcccaaaggattctttgagaaactgtggagttttgtctcttttcttccttacttcttcctcttgctgctccttggcgtcaccaaggccctgattattggtccaatatcatctgctataattttggttggcaattcatgtgtcatcattggcctttggccagcacatttcatttggacctactactgtttggcaaggtgtatacccatcaaatttgaaatactttgtttcttgtttcatctccttttaatttccactaaatatcttgtttttgtaacctctagaaccaagagaatagggctggttttgaagaccttggcattggtattatttccactgcctttgctcctctggccagttgctggtatagtaggaagtctcttcggtggaatcgcctacgggtttttcacgcctcttatggctacattcgaggctgtaggagagtctgttactagcaaatgctaccattgctttgttgatgacttcacagatttctgcttccattcttacttctcctacatggatgagttaagagaaatggtttcggccgatgttgaacccttagagataaagttgtctcggctacctagttgtctccttgctagtctcataggtgtgatggtagatgttcttctaataacagctgtcgctgtttacaaaagcccatacatgttactcaaaggatggaagaggctattggaagaccttgttggtagagagggcccattcctagagagtgtctgtgttccatttgcaggtcttgccatattgctatggccactggctgtcgcgggagctgtaatagcttcagttttatccagcttctttcttggactgtacagtggagtcatcgttcatcaggaggactctttcagaatgggacttaactatataattgctgcggtctcactgtttgacgaatatgtaaatgatttactctatttgagagaaggaactagcctgccgaggccttgctataggacgaaaacagagactgttcatgggaaaagaatattaggagagagtaagaacgttgatctcaagagcaaaagaagcagctccctgggttcaaagcttgtttcagaacagtcgaggacactgaaaaaagcaattacactatataaaccagttcaggtatgggaatggttgtttaagtcgtgtgaggtgaatgggaggatacttcttcgcgatggcttgatagatgtgaaggatgtagaggagtgtcttgtcaagggtaattctaagaagctctatatcaaactacccgcgtggacggtgttacagtgtctccttgcatcggctaaatcgaactcatctgggttggtgatcactgatggcgtggagcttacagaactaaacagcccaagagataaagtatttgtgtggctagttggacccttactgataatgaaggagcagataaaaaacctgaagcttactgaggatgaagagttttgtctgaggaaattggtaatggtatgcaaaaatgaaagaaccgaggactgggacaacaccgggttcccgtcaagtgatacagtaagaaaagcacaattgcaagccataatcagaaggctgcaaggaatggtagcatcaatgtctagaataccaacgtttcgacgcagattcatgaacttggttaaagtgttgtacatagaagctcttgaaatgggtgcatcaggtaatcgagctggtgggatactcaaacccaacagcgaccaaacaggaaatctggatcggactgaaacaccggacatggatgttgtctaagtagttatgatatcttgtctttttccttcttccctctgtctaagcggtttcagtagtattttaggatttgttttatattccaatatgtatgttaattaaatcctcaaaaagagcactctttgtcaagaataacatatattcataactttactttaatc

SEQ ID NO: 84460 - protein, 590 aa, Arabidopsis thaliana
  peptide (1)..(590): Ceres Seq. ID no. 12675286
MEVPKGFFEKLWSFVSFLPYFFLLLLLGVTKALIIGPISSAIILVGNSCVIIGLWPAHFIWTYYCLARCIPIKFEILCFLFHLLLISTKYLVFVTSRTKRIGLVLKTLALVLFPLPLLLWPVAGIVGSLFGGIAYGFFTPLMATFEAVGESVTSKCYHCFVDDFTDFCFHSYFSYMDELREMVSADVEPLEIKLSRLPSCLLASLIGVMVDVLLITAVAVYKSPYMLLKGWKRLLEDLVGREGPFLESVCVPFAGLAILLWPLAVAGAVIASVLSSFFLGLYSGVIVHQEDSFRMGLNYIIAAVSLFDEYVNDLLYLREGTSLPRPCYRTKTETVHGKRILGESKNVDLKSKRSSSLGSKLVSEQSRTLKKAITLYKPVQVWEWLFKSCEVNGRILLRDGLIDVKDVEECLVKGNSKKLYIKLPAWTVLQCLLASAKSNSSGLVITDGVELTELNSPRDKVFVWLVGPLLIMKEQIKNLKLTEDEEFCLRKLVMVCKNERTEDWDNTGFPSSDTVRKAQLQAIIRRLQGMVASMSRIPTFRRRFMNLVKVLYIEALEMGASGNRAGGILKPNSDQTGNLDRTETPDMDVV

SEQ ID NO: 84461 - protein, 449 aa, Arabidopsis thaliana
  peptide (1)..(449): Ceres Seq. ID no. 12675287
MATFEAVGESVTSKCYHCFVDDFTDFCFHSYFSYMDELREMVSADVEPLEIKLSRLPSCLLASLIGVMVDVLLITAVAVYKSPYMLLKGWKRLLEDLVGREGPFLESVCVPFAGLAILLWPLAVAGAVIASVLSSFFLGLYSGVIVHQEDSFRMGLNYIIAAVSLFDEYVNDLLYLREGTSLPRPCYRTKTETVHGKRILGESKNVDLKSKRSSSLGSKLVSEQSRTLKKAITLYKPVQVWEWLFKSCEVNGRILLRDGLIDVKDVEECLVKGNSKKLYIKLPAWTVLQCLLASAKSNSSGLVITDGVELTELNSPRDKVFVWLVGPLLIMKEQIKNLKLTEDEEFCLRKLVMVCKNERTEDWDNTGFPSSDTVRKAQLQAIIRRLQGMVASMSRIPTFRRRFMNLVKVLYIEALEMGASGNRAGGILKPNSDQTGNLDRTETPDMDVV

SEQ ID NO: 84462 - protein, 415 aa, Arabidopsis thaliana
  peptide (1)..(415): Ceres Seq. ID no. 12675288
MDELREMVSADVEPLEIKLSRLPSCLLASLIGVMVDVLLITAVAVYKSPYMLLKGWKRLLEDLVGREGPFLESVCVPFAGLAILLWPLAVAGAVIASVLSSFFLGLYSGVIVHQEDSFRMGLNYIIAAVSLFDEYVNDLLYLREGTSLPRPCYRTKTETVHGKRILGESKNVDLKSKRSSSLGSKLVSEQSRTLKKAITLYKPVQVWEWLFKSCEVNGRILLRDGLIDVKDVEECLVKGNSKKLYIKLPAWTVLQCLLASAKSNSSGLVITDGVELTELNSPRDKVFVWLVGPLLIMKEQIKNLKLTEDEEFCLRKLVMVCKNERTEDWDNTGFPSSDTVRKAQLQAIIRRLQGMVASMSRIPTFRRRFMNLVKVLYIEALEMGASGNRAGGILKPNSDQTGNLDRTETPDMDVV

SEQ ID NO: 84463 - DNA, 2335 bp, Arabidopsis thaliana
  misc_feature (1)..(2335): Ceres Seq. ID no. 12675297
  misc_feature (1)..(2335): Ortholog of  Ceres SEQ ID NO 14303348 as cited in SEQ ID NO 59561
aaagtctctctctctctctctctgcaaacactgattcaacaaagaagaatcaaaatctccagaaattcgatcgtcgttgaagattcgtctcagtttgtgtagtttctagcttagtgttttggaatcgaaaatggcgggtcgagttaaagaagacgagaagaacgagaagattattaggagtcttcttaaacttcctgagaataagaggtgtataaactgtaacagccttggaccacaatatgtttgcactactttctggacttttgtttgtaccaactgcagtggaatacatcgtgagtttacacatcgtgttaaatcgatatcaatggcgaaatttacctcacaagaagttactgctttgaaagaaggtggaaatcagcatgctaaggatatttattttaaaggattggatcaacagcggcaatcagtgcctgacggaagtaatgttgagcggttaagggacttcatcagacatgtgtatgtaaataaaaggtatacgaatgagaagaatgatgataagtctccaagtgagacacgtagttctagtggttctcggagtccaccttatgaagatggatatgaccgtcgttacggcgacagatcaagtcctggtgggagaagtccagggttcgagacgggtagtaggaatgctgttaataacagaaaaagccctgctcgtcctgagatcctgaatgattggcgcagagaggataggtttgggggtagaaaaacatcagaagagggctcccagtcacctgagcaagtaaaagacttgggttcagctagccctcctgtagctcgacctgttagggaaattttgggtgacagtgttattcctcttcgtgtgggagagcctccaaaaccccctgtcagtagaaataccgatgcttcagcacatgcaaagtcaggtacatcattgagtagtttaatgtccacaaatgagaagccaccagaagtgaagctggagactgctttaagcctgattgattttgatactgattttgaaactcctgctccatctgttgcaattcaagcaccactatcgaccacatctcagcctgctccacagccaacaacttcatctaatgataactgggcatctttcgatgctgcacccagtgcccctagtttaaatgtatcgcaaccaccacccagtggaaacacactggattcacttctctcccagttggcagtgacttcttctgtgccaggtcaggcgtctacaccatctaacggacctgtgaatcttggtcattccacgtcacaaatctttgcaccctttcagaatgagcattcgagtgaacagccatggaacacagcacttgcatctaatgtacagaggtcaatgagtgcaccgtcattgcaacctcttcaaggagtcccttctggtggcctgcagtcttctgaagttaaaccttcgggaagatcagaattacctgcggatttattcgctgtaaactacccatcataccatgcaccagtgcctggatggcaagctggtccacctcatgctatgcactatggcatgcagcagtataataaccccgtgccgtatcagaatgttccgcagccaggcaagtcaatgaacccttttgacttcagccctgggccgccatcacaaacacaaacggaaaatatgttcccttccatggctcctctgcaaggtgcattacctccttcaggcatgatgccttctcaaggagtacacaatcaattcaatataccttctcaaggctcagcccatccatctgcaatgccaccaaggtacatgccttctcaaataccaggaagcatgccacctagcaatgtaaacccaattggcgacataaacacgtcatatgacactcaacaaacatatcaaaattttggaagctcgtttgctgctgcagttcctttgaacccaccttctttccaatcaggaggaaacccatttgggtaagaaagagcgagaatattagctcacgagagctatgttatgcatgaggattgcgtttgtgttctaaggtgtagtataagactataaggaggtattaaatcgaatacaaacatgggttaaatagggtgaacgagggaaggtacgggccatgaacctgaagaagaattgggtttgtgagagtgttagattactgtattttttataagcatcaaaatgatttgaaataggtttgatatttattctttggtgtttctatattccatttccattttgttgtttgtccttcagaaaatcttcaggctcctcctgtgttgtatgattttgtataacagtttacacattgaccataaagtcttgtcaaaattgaataaggtaatttagaattgcttttatgagact

SEQ ID NO: 84464 - protein, 602 aa, Arabidopsis thaliana; identical to SEQ ID NO: 28386
  peptide (1)..(602): Ceres Seq. ID no. 12675298

SEQ ID NO: 84465 - protein, 537 aa, Arabidopsis thaliana; identical to SEQ ID NO: 28387
  peptide (1)..(537): Ceres Seq. ID no. 12675299

SEQ ID NO: 84466 - protein, 336 aa, Arabidopsis thaliana; identical to SEQ ID NO: 28388
  peptide (1)..(336): Ceres Seq. ID no. 12675300

SEQ ID NO: 84467 - DNA, 724 bp, Arabidopsis thaliana
  misc_feature (1)..(724): Ceres Seq. ID no. 12675301
  misc_feature (1)..(724): Ortholog of  Ceres SEQ ID NO 14309339 as cited in SEQ ID NO 0
ggtttcagttcagagtaagagagacagagagagagatgagtagcttcacgattccatctccttcctccttctctctttccaattcatataatcaaacctctcctcattccttcactctccgcaattctcgttccaattttgagttccaccggttacgattagatgtggagtctcgaagaagaagcacttctttacggtccaattgctccaccaaaggtacagattcaggtgaaaatgagaacaaaagtgtgttagatgctttctttttggggaaagcattagctgaggttatcaatgagagaattgagtctactgttggagaagtgttgagtactattggaaagtttcaagctgagcaacagaaacaagttcaagagattcaggaagaggttcttgaaagagctaagaaagctaaggaaagagcagctcgagaaactatggaggaacaaggacttgttgcttccaaaccagtagccattactcgaaatccggatgctgttgttgttgcctctgtaacttctacatcgaccgttgagagcaagactataatggttgatgtagaggaaagctcgagttccagtgatgaagactgaacgatggtttcaagggtttaagttgaagatttggtaatagcagcagagacttgtctaaaagggttaagatatatgtacttgaaaaaacgatgtaaacaatgtaagttgatataaatcaaggttaaaccagc

SEQ ID NO: 84468 - protein, 196 aa, Arabidopsis thaliana; identical to SEQ ID NO: 30508
  peptide (1)..(196): Ceres Seq. ID no. 12675302

SEQ ID NO: 84469 - protein, 185 aa, Arabidopsis thaliana; identical to SEQ ID NO: 30509
  peptide (1)..(185): Ceres Seq. ID no. 12675303

SEQ ID NO: 84470 - DNA, 1348 bp, Arabidopsis thaliana
  misc_feature (1)..(1348): Ceres Seq. ID no. 12675309
  misc_feature (1)..(1348): Ortholog of  Ceres SEQ ID NO 15171549 as cited in SEQ ID NO 59640
aaaataaataaaaatagtcaattgcttccagttctaagaactccggtctgccgccgatttcgtttctctttcaccggttctcgcctaccgacgtcttccttccattctttctctcatctgataaccaacctccacatgtctctctcgtcggactccaccgttcctactgtttccacggtcaccatatcctactcagagctcaaggagagcaacatagatttgtctgcaaggattgaagaaggatttggacctaatggacttggaatcctctctgttaaagatgttcctggatattctgctttaagacagaatctacttcagcttgcacctaggttagctggtcttcctgaagaggtgaagagggagcttgaagatcctcatagtaggtataattttggttggagtcatggcaaggagaaacttgaatccgggaagcttgacatgctgaagggttcttactatgctaatcctctacaagatgtacctacgagtaattcatatgaaatacagcggtatccatcgtattgtggatcaaatatatggccaaggaattctttaccggaacttgaaggaggtaactagctttcaaagctcttggtaaactgatgttcgaagttgggctaatggtagcttaccactgtgatcaatatgtgtcaaagggtataaaacaacatgaaaagcaaaatcttgaaaagatactacttggctctcggtgtcacaaaggacggctgctttattatttccctgcacaagagagctctacgcatgacaacgattccatctcatcttggtgtggatggcatacagaccatggttcactcacaggtcttactcgagcaatattttctagagattcagttgaagtaccttgcccagatcctgcttctggcttatacatacaaacacgatcaggtcagatcgttaaggttgtgtatggggaagatgaaatagcataccaaataggcgagacaacatcaattctgtctagtggttatctttgtgctacacctcattgtgttcgggcgccacaaggagaagaggcgcgtggtctagagcgatcgacattcgcgttgttcatgcaacctgactgggaccagaagcttacattcccaaaagaagttacaatacatgaagagttatgtctctctgatgaagtcttgacgtttggagaatatacagagaaactgctcaacaaatactatgatacaaaaccttagtagccttttaagttatatgtgtaaatgacgattccattggtgtaagaaaaatctcaccaaattagtacgttagaagtgaaatttggtttcagtttaaaccatatagaaattacagaagtacaattattggt

SEQ ID NO: 84471 - protein, 203 aa, Arabidopsis thaliana
  peptide (1)..(203): Ceres Seq. ID no. 12675310
MFEVGLMVAYHCDQYVSKGIKQHEKQNLEKILLGSRCHKGRLLYYFPAQESSTHDNDSISSWCGWHTDHGSLTGLTRAIFSRDSVEVPCPDPASGLYIQTRSGQIVKVVYGEDEIAYQIGETTSILSSGYLCATPHCVRAPQGEEARGLERSTFALFMQPDWDQKLTFPKEVTIHEELCLSDEVLTFGEYTEKLLNKYYDTKP

SEQ ID NO: 84472 - protein, 197 aa, Arabidopsis thaliana
  peptide (1)..(197): Ceres Seq. ID no. 12675311
MVAYHCDQYVSKGIKQHEKQNLEKILLGSRCHKGRLLYYFPAQESSTHDNDSISSWCGWHTDHGSLTGLTRAIFSRDSVEVPCPDPASGLYIQTRSGQIVKVVYGEDEIAYQIGETTSILSSGYLCATPHCVRAPQGEEARGLERSTFALFMQPDWDQKLTFPKEVTIHEELCLSDEVLTFGEYTEKLLNKYYDTKP

SEQ ID NO: 84473 - protein, 193 aa, Arabidopsis thaliana
  peptide (1)..(193): Ceres Seq. ID no. 12675312
KINKNSQLLPVLRTPVCRRFRFSFTGSRLPTSSFHSFSHLITNLHMSLSSDSTVPTVSTVTISYSELKESNIDLSARIEEGFGPNGLGILSVKDVPGYSALRQNLLQLAPRLAGLPEEVKRELEDPHSRYNFGWSHGKEKLESGKLDMLKGSYYANPLQDVPTSNSYEIQRYPSYCGSNIWPRNSLPELEGGN

SEQ ID NO: 84474 - DNA, 2341 bp, Arabidopsis thaliana
  misc_feature (1)..(2341): Ceres Seq. ID no. 12675317
  misc_feature (1)..(2341): Ortholog of  Ceres SEQ ID NO 12778278 as cited in SEQ ID NO 63035
atccttttctcttctcttcccactctctctctctctctatctatcttcttcatctttgtttcagcttctcctttgaaactagattatctccgttaatggcgcctcagatctaaccttgggagttatatatatatacttgttcaactcttcttcgaacgctgtccaacttcttcctctggttcgatcatcgagatctcgaggttatttggccgcaatgcagaagcgaatagccttgtcgtttccagaagaggtactagagcatgtgttctcgtttattcagctggataaggataggaactcagtctctctggtgtgcaagtcatggtacgagatcgagcggtggtgcaggaggaaagtcttcatcgggaactgctacgccgtgagtccagcgacggtgattaggaggttcccgaaagtgagatccgtggagcttaaaggaaaacctcactttgctgactttaatttggtacctgacggatggggaggttacgtgtatccatggattgaggccatgtcttcgtcttacacgtggcttgaagagataaggctgaagaggatggtggtcaccgacgattgcttggagctcatagccaagtcttttaagaattttaaggttcttgtgctttcttcctgcgaaggcttctccaccgatggtctcgctgctatcgctgccacttgcaggaatctgaaagagcttgacttacgagagagtgatgttgacgacgttagtggccactggcttagccatttcccagatacatacacttctttggtatcactcaatatatcttgcttagcatctgaggtcagtttctctgctctggaaaggctggtgactaggtgtcccaatctcaagtctctcaagcttaaccgagctgttccacttgaaaaattggctactttacttcaaagagcacctcaattggaggaattgggcactggtgggtacactgcagaagtgcgaccagatgtttactctggtttatctgtagcgctctctgggtgcaaggaattgaggtgcttatctggattttgggatgctgttcctgcctatcttccagcagtttattcggtttgcagtcggcttacaactttgaatctgagttatgcaacagtccagagctatgatcttgtcaagcttctttgtcaatgccctaaactgcagcgcctctggtgcttgactacatcgaggatgctggtcttgaggtgcttgcttcaacctgcaaggacctacgcgagctgagagtgtttccgtccgagccttttgtcatggaaccaaatgtggcattgacggaacaggggcttgtctccgtctccatgggctgtccaaaactcgagtcggttctctacttctgccgtcaaatgaccaatgctgcattgataaccattgctaggaaccgtcccaacatgactcgcttccgtttgtgcatcattgagccaaaagccccagactatctgactctagagccactggatattggatttggagccatagtagagcactgcaaggatctccgtcgcctctctctatctggcctcttgaccgacaaggtttttgaatacattgggacatatgccaagaagatggaaatgctctcagtggcatttgcaggagacagtgacttaggcatgcatcatgttttgtccgggtgcgatagcttgaggaaactagagataagggactgcccgtttggagacaaggcgcttttggccaatgcttcaaagctggagacaatgcgatccctttggatgtcttcttgttccgtgagttttggagcctgcaagttactaggacagaagatgccaaagctgaatgtggaagtcatcgatgaacggggtgcaccggactcgagaccagagagctgccctgttgagagagtcttcatataccgaacagtggctggtcctcgatttgacatgcctggcttcgtctggaacatggaccaagactcaacaatgaggttttccaggcaaatcattactactaacggattataagacaaagaaacgaggtacatttttcattaatccttgttcatcatcccatataatcgtgttccggtttaggaacatgagagagctcggtcgccaataatttgaatctcggctgcttcatataaccatcaagctcatgagcaatgaataagtggagagagagaaagagagatctaagagagctttgttttatttatgtaagaattattgattgttgtatgtttatttggctacttacactgagagatcctggtggggtatttttcttaagaggataagagatttttttaaaagacaatgtcaaaaatgtaactgttctacttgttttgtttggactcttttatcc

SEQ ID NO: 84475 - protein, 342 aa, Arabidopsis thaliana
  peptide (1)..(342): Ceres Seq. ID no. 12675318
MQKRIALSFPEEVLEHVFSFIQLDKDRNSVSLVCKSWYEIERWCRRKVFIGNCYAVSPATVIRRFPKVRSVELKGKPHFADFNLVPDGWGGYVYPWIEAMSSSYTWLEEIRLKRMVVTDDCLELIAKSFKNFKVLVLSSCEGFSTDGLAAIAATCRNLKELDLRESDVDDVSGHWLSHFPDTYTSLVSLNISCLASEVSFSALERLVTRCPNLKSLKLNRAVPLEKLATLLQRAPQLEELGTGGYTAEVRPDVYSGLSVALSGCKELRCLSGFWDAVPAYLPAVYSVCSRLTTLNLSYATVQSYDLVKLLCQCPKLQRLWCLTTSRMLVLRCLLQPARTYAS

SEQ ID NO: 84476 - protein, 243 aa, Arabidopsis thaliana
  peptide (1)..(243): Ceres Seq. ID no. 12675319
MSSSYTWLEEIRLKRMVVTDDCLELIAKSFKNFKVLVLSSCEGFSTDGLAAIAATCRNLKELDLRESDVDDVSGHWLSHFPDTYTSLVSLNISCLASEVSFSALERLVTRCPNLKSLKLNRAVPLEKLATLLQRAPQLEELGTGGYTAEVRPDVYSGLSVALSGCKELRCLSGFWDAVPAYLPAVYSVCSRLTTLNLSYATVQSYDLVKLLCQCPKLQRLWCLTTSRMLVLRCLLQPARTYAS

SEQ ID NO: 84477 - protein, 242 aa, Arabidopsis thaliana
  peptide (1)..(242): Ceres Seq. ID no. 12675320
MEPNVALTEQGLVSVSMGCPKLESVLYFCRQMTNAALITIARNRPNMTRFRLCIIEPKAPDYLTLEPLDIGFGAIVEHCKDLRRLSLSGLLTDKVFEYIGTYAKKMEMLSVAFAGDSDLGMHHVLSGCDSLRKLEIRDCPFGDKALLANASKLETMRSLWMSSCSVSFGACKLLGQKMPKLNVEVIDERGAPDSRPESCPVERVFIYRTVAGPRFDMPGFVWNMDQDSTMRFSRQIITTNGL

SEQ ID NO: 84478 - DNA, 1494 bp, Arabidopsis thaliana
  misc_feature (1)..(1494): Ceres Seq. ID no. 12675341
  misc_feature (1)..(1494): Ortholog of  Ceres SEQ ID NO 14312769 as cited in SEQ ID NO 55493
  misc_feature (1)..(1494): Ortholog of  Ceres SEQ ID NO 13639300 as cited in SEQ ID NO 56701
gggactgagaaagtagcagcttcgtttgcttcctctgatatttttctacactctctgtctctctctaaagatgaattgtcttcagaatcttcccagatgttcagtctcacctctgctgggattcgggtgcattcaaagagatcattcttcttcttcttcttctttgaagatgctaatatcgcctccgatcaaagccaatgatccaaaatctcgacttgttttacattatcagagtcaaaatccagctcagagatgagtggtgttgcaaaggatgaagagaaatctgatgaatatagccaagacatgactcaagctatgggtgctgttctaacttacaggcacgagttaggaatgaactacaactttattcgtccagatctaattgttggatcctgcttacagacccctgaagatgttgacaagcttcgtaaaattggagttaaaaccatattttgcttgcaacaagatccagacctggatgcagaatgccttgaccaatccttccagatattttggagtagacataagcagcatccaagcctatgctaagaaatatagtgatattcagcatattcgctgtgaaattagagactttgatgcatttgatttgagaatgcgtcttccagccgtggttggtactctttacaaagctgttaagcgaaatggaggagttacatatgtgcactgcactgctggaatgggaagggctcctgctgttgcgttgacatacatgttctgggtgcaaggctataagcttatggaagctcataaattacttatgagcaaaaggtcgtgctttccgaagctggatgctatcagaaatgcaacaattgatattcttacaggactcaagaggaagactgttactctgacactgaaagataaggggttctccagagtagaaatttctggccttgacattggatggggacagaggatacctctaacactggacaagggaacaggattctggatcctaaagagagaactgcctgaaggacagtttgaatataaatacatcatagatggtgaatggacacacaatgaggccgaaccgtttataggacctaacaaagacggccataccaacaattacgctaaagtaaaaatgtctctgtctcttaacatatagctgaacaagttttgatgaatgagttaatgctgtaatgttgttgtgtactaatgaattaggtagtggacgatccaacaagtgtggatggtacaactcgggagagactatcgagcgaagaccctgagctgttggaggaagaacgctcgaaactaatccagttcttggagacttgttctgaggcagaagtttgagagttgagagcatccgactagactatgtgaatgtacaacttactagtaacaataaaatgcttcatgttagtaatacatacagttacgcttatagcagcaaaagaaaaaaacatgaagttagtagtactatgttcaagtataatatatagtttaaaatctttgttttttctt

SEQ ID NO: 84479 - protein, 239 aa, Arabidopsis thaliana
  peptide (1)..(239): Ceres Seq. ID no. 12675342
MLTSFVKLELKPYFACNKIQTWMQNALTNPSRYFGVDISSIQAYAKKYSDIQHIRCEIRDFDAFDLRMRLPAVVGTLYKAVKRNGGVTYVHCTAGMGRAPAVALTYMFWVQGYKLMEAHKLLMSKRSCFPKLDAIRNATIDILTGLKRKTVTLTLKDKGFSRVEISGLDIGWGQRIPLTLDKGTGFWILKRELPEGQFEYKYIIDGEWTHNEAEPFIGPNKDGHTNNYAKVKMSLSLNI

SEQ ID NO: 84480 - protein, 217 aa, Arabidopsis thaliana
  peptide (1)..(217): Ceres Seq. ID no. 12675343
MQNALTNPSRYFGVDISSIQAYAKKYSDIQHIRCEIRDFDAFDLRMRLPAVVGTLYKAVKRNGGVTYVHCTAGMGRAPAVALTYMFWVQGYKLMEAHKLLMSKRSCFPKLDAIRNATIDILTGLKRKTVTLTLKDKGFSRVEISGLDIGWGQRIPLTLDKGTGFWILKRELPEGQFEYKYIIDGEWTHNEAEPFIGPNKDGHTNNYAKVKMSLSLNI

SEQ ID NO: 84481 - protein, 172 aa, Arabidopsis thaliana
  peptide (1)..(172): Ceres Seq. ID no. 12675344
MRLPAVVGTLYKAVKRNGGVTYVHCTAGMGRAPAVALTYMFWVQGYKLMEAHKLLMSKRSCFPKLDAIRNATIDILTGLKRKTVTLTLKDKGFSRVEISGLDIGWGQRIPLTLDKGTGFWILKRELPEGQFEYKYIIDGEWTHNEAEPFIGPNKDGHTNNYAKVKMSLSLNI

SEQ ID NO: 84482 - DNA, 2243 bp, Arabidopsis thaliana
  misc_feature (1)..(2243): Ceres Seq. ID no. 12675353
  misc_feature (1)..(2243): Ortholog of  Ceres SEQ ID NO 13594536 as cited in SEQ ID NO 51382
  misc_feature (1)..(2243): Ortholog of  Ceres SEQ ID NO 15172549 as cited in SEQ ID NO 57185
tcaaaccctgctctcttttctccaagtgctctcatggtgcttccgctcttccggcgcgctgcgatcgcccggacttcctcgcttctcagagctcgtcttttcgctcctgcctccgaattccattctcgcttttctaatggactataccacttggacgacaaaattagtagcagtaatggtgtgaggtctgcctctatagacttgattacaagaatggatgatagttctccaaagcccattctgcgatttggcgtgcaaaacttttcatctacaggacccatatcacagacggttcttgcaatgccagccttgtctcctactatgagtcatggaaatgttgtaaaatggatgaagaaagaaggtgacaaggtagaggtgggtgatgtactatgtgagatagagacagacaaagccactgtagaatttgagagtcaagaggaaggatttctggccaagattttagtcactgaaggatcaaaggatatccctgttaatgaaccgattgcaataatggttgaggaggaagacgacattaaaaacgttcctgctaccatagagggtggacgagatggtaaagaggaaacatcagctcatcaagtgatgaaacctgacgaaagcacacaacaaaaaagttccattcagcccgatgcatcagatcttcccccacatgtcgtcttagaaatgccagcactttctcctacaatgaaccaaggtaatattgccaaatggtggaaaaaagagggtgacaagattgaagtgggtgatgtcataggtgagatcgagactgacaaagccactctggaatttgaaagccttgaagaggggtacttagctaagattctaattcctgaaggttccaaggatgtggcggtgggaaagccgattgccctaatagttgaagatgctgaaagtattgaagccatcaagtcttcttccgcaggtagttctgaggttgatacagttaaagaagtccctgacagtgttgtagataaacctacagagaggaaagcaggcttcacaaagatcagtcctgctgcaaagctattgattttagaacatggattggaggcatcatcaattgaggcatcgggtccctatggtacattattgaaatcagacgttgtggccgcaattgcttctggaaaagcttctaaatcatctgcgtctacgaagaagaagcaaccatcaaaggagaccccgtctaaatcctcctccacatcgaagccttctgtgacacagtcagataataattatgaagattttccaaatagtcaaattcgcaagattatagcaaaacgtttattggaatcaaaacagaagataccccatttgtatttacaatcagatgttgtattggatcctcttcttgcatttagaaaagaacttcaagaaaaccatggcgttaaagtgtctgtcaatgacatagttattaaagcagtggcagtcgcactgaggaatgtacgacaagctaatgctttctgggatgctgagaaaggagatatcgttatgtgtgacagtgttgacatatcaattgcagttgcaactgagaagggcttaatgactccaattatcaagaatgcagaccagaaatctatttctgctatttccttagaggttaaggagctggcacaaaaggctcgatctggaaagcttgctcctcatgagtttcaaggagggacattcagcatatcaaatctaggaatgtatcctgtggataatttctgcgcaatcattaacccccctcaggctgggattctagcagttggtagaggaaacaaagtggttgagccagttattggactagatggaattgagaagccttctgttgtgacaaaaatgaatgtaacgttatccgctgatcatcggatctttgatggacaagttggagcttcgtttatgtctgaattgcgttcaaactttgaggatgttcgaagacttcttctgtgagaaagatccaactgtttaccaaatgaatcttggattactacataataaacctcggaccaacccacgtgcacatccagaaccagaactgctggtctacattgttaactctgatcacatgtttcatttttttccatttggttcatatacttaccaaaatttgttttggtctttaacaattcgtcttatagattggtaacttcctgaggtattttttgtctggtctgtcctctgcaaaataaataatttcagctgtcaatccgcaactggtgaaataatttaaaaagtattttaccctc

SEQ ID NO: 84483 - protein, 648 aa, Arabidopsis thaliana
  peptide (1)..(648): Ceres Seq. ID no. 12675354
SNPALFSPSALMVLPLFRRAAIARTSSLLRARLFAPASEFHSRFSNGLYHLDDKISSSNGVRSASIDLITRMDDSSPKPILRFGVQNFSSTGPISQTVLAMPALSPTMSHGNVVKWMKKEGDKVEVGDVLCEIETDKATVEFESQEEGFLAKILVTEGSKDIPVNEPIAIMVEEEDDIKNVPATIEGGRDGKEETSAHQVMKPDESTQQKSSIQPDASDLPPHVVLEMPALSPTMNQGNIAKWWKKEGDKIEVGDVIGEIETDKATLEFESLEEGYLAKILIPEGSKDVAVGKPIALIVEDAESIEAIKSSSAGSSEVDTVKEVPDSVVDKPTERKAGFTKISPAAKLLILEHGLEASSIEASGPYGTLLKSDVVAAIASGKASKSSASTKKKQPSKETPSKSSSTSKPSVTQSDNNYEDFPNSQIRKIIAKRLLESKQKIPHLYLQSDVVLDPLLAFRKELQENHGVKVSVNDIVIKAVAVALRNVRQANAFWDAEKGDIVMCDSVDISIAVATEKGLMTPIIKNADQKSISAISLEVKELAQKARSGKLAPHEFQGGTFSISNLGMYPVDNFCAIINPPQAGILAVGRGNKVVEPVIGLDGIEKPSVVTKMNVTLSADHRIFDGQVGASFMSELRSNFEDVRRLLL

SEQ ID NO: 84484 - protein, 637 aa, Arabidopsis thaliana; identical to SEQ ID NO: 39890
  peptide (1)..(637): Ceres Seq. ID no. 12675355

SEQ ID NO: 84485 - protein, 577 aa, Arabidopsis thaliana; identical to SEQ ID NO: 39891
  peptide (1)..(577): Ceres Seq. ID no. 12675356

SEQ ID NO: 84486 - DNA, 1451 bp, Arabidopsis thaliana
  misc_feature (1)..(1451): Ceres Seq. ID no. 12675441
  misc_feature (1)..(1451): Ortholog of  Ceres SEQ ID NO 13495628 as cited in SEQ ID NO 60727
aacacaactcaaccatgaactcttgttgcttccctctcttcatctttgcattcgttatctttctccggtgtttaagtcccattgaagctgccacgtgtcatcctgatgacgaggcgggtcttttagcttttaaatcgggtataactcaagatcctacgggtattctcagctcttggaagaaaggtactgactgctgttcatggaagggtgtcggttgtctcaccaaccgcgtcaccggactcactatcaacggacaatctgatgttactggaagctttctttctggcactatctcgccgtcattggccaaactccaacaccttgttggtatttacttcaccaatcttcgaaacatcactggttcttttcctcaattccttttccaattaccaaatgtaaaacaagtctacttcacgaatagccgtctctccggtcctcttccagctaacattggtgcgctaagcgagttaggagaactaagtctcgacggaaacctgtttactggtccgatcccgagttccatttccaatttaacccggttatatctgctcaatcttggagataatctcttaaccggaactatacctttaggtcttgctaatctcaagatcttgttgtcactcaactttggcaacaatcgtctctctgaaaccataccggatattttcaaatccatgcagaagctccaatctctaaccctctcccgcaacaaattctctggaaatcttcctccgtccattgcatcactcaaaccaattctcaattacctcgatctaagccagaataatctctctgggacaatcccgacctttttatcaaacttcaaggtactagactcattggatctttctagaaataggttctctggggttgttccgaagagtttagccaatatgcctaaacttttccatctcaatctctcccacaattttctaactggtccactccctgccatgaagaacgttgatggccttgccactctagatctttcatacaaccaatttcacctcaaaacgataccgaaatgggtgacctcgtcgccgtccatgtactcgttgaagctggtaaaatgcgggatcaatatgagcttagacaattggaagccagtgagacccaatatttacttttacatcgatctgtcagaaaacgagatctcagggagtctaacatggttcttcaacctagcgcataacctatatgagtttcaagcgtcagggaacaaacttcgattcgacatggggaagctgaatttaagtgagagactagaaagcctcgatctatcaaggaatttgatatttgggaaggtaccaatgaccgtggctaaactgcaaaaattgaacttgagtcataaccatctttgtggaaagcttccagtgactaaattcccggccagcgcgtttgtcggtaatgactgtctctgcggctctccgctttctccttgtaaaatttag

SEQ ID NO: 84487 - protein, 482 aa, Arabidopsis thaliana
  peptide (1)..(482): Ceres Seq. ID no. 12675442
HNSTMNSCCFPLFIFAFVIFLRCLSPIEAATCHPDDEAGLLAFKSGITQDPTGILSSWKKGTDCCSWKGVGCLTNRVTGLTINGQSDVTGSFLSGTISPSLAKLQHLVGIYFTNLRNITGSFPQFLFQLPNVKQVYFTNSRLSGPLPANIGALSELGELSLDGNLFTGPIPSSISNLTRLYLLNLGDNLLTGTIPLGLANLKILLSLNFGNNRLSETIPDIFKSMQKLQSLTLSRNKFSGNLPPSIASLKPILNYLDLSQNNLSGTIPTFLSNFKVLDSLDLSRNRFSGVVPKSLANMPKLFHLNLSHNFLTGPLPAMKNVDGLATLDLSYNQFHLKTIPKWVTSSPSMYSLKLVKCGINMSLDNWKPVRPNIYFYIDLSENEISGSLTWFFNLAHNLYEFQASGNKLRFDMGKLNLSERLESLDLSRNLIFGKVPMTVAKLQKLNLSHNHLCGKLPVTKFPASAFVGNDCLCGSPLSPCKI

SEQ ID NO: 84488 - protein, 478 aa, Arabidopsis thaliana
  peptide (1)..(478): Ceres Seq. ID no. 12675443
MNSCCFPLFIFAFVIFLRCLSPIEAATCHPDDEAGLLAFKSGITQDPTGILSSWKKGTDCCSWKGVGCLTNRVTGLTINGQSDVTGSFLSGTISPSLAKLQHLVGIYFTNLRNITGSFPQFLFQLPNVKQVYFTNSRLSGPLPANIGALSELGELSLDGNLFTGPIPSSISNLTRLYLLNLGDNLLTGTIPLGLANLKILLSLNFGNNRLSETIPDIFKSMQKLQSLTLSRNKFSGNLPPSIASLKPILNYLDLSQNNLSGTIPTFLSNFKVLDSLDLSRNRFSGVVPKSLANMPKLFHLNLSHNFLTGPLPAMKNVDGLATLDLSYNQFHLKTIPKWVTSSPSMYSLKLVKCGINMSLDNWKPVRPNIYFYIDLSENEISGSLTWFFNLAHNLYEFQASGNKLRFDMGKLNLSERLESLDLSRNLIFGKVPMTVAKLQKLNLSHNHLCGKLPVTKFPASAFVGNDCLCGSPLSPCKI

SEQ ID NO: 84489 - protein, 258 aa, Arabidopsis thaliana
  peptide (1)..(258): Ceres Seq. ID no. 12675444
MQKLQSLTLSRNKFSGNLPPSIASLKPILNYLDLSQNNLSGTIPTFLSNFKVLDSLDLSRNRFSGVVPKSLANMPKLFHLNLSHNFLTGPLPAMKNVDGLATLDLSYNQFHLKTIPKWVTSSPSMYSLKLVKCGINMSLDNWKPVRPNIYFYIDLSENEISGSLTWFFNLAHNLYEFQASGNKLRFDMGKLNLSERLESLDLSRNLIFGKVPMTVAKLQKLNLSHNHLCGKLPVTKFPASAFVGNDCLCGSPLSPCKI

SEQ ID NO: 84490 - DNA, 1518 bp, Arabidopsis thaliana
  misc_feature (1)..(1518): Ceres Seq. ID no. 12675449
  misc_feature (1)..(1518): Ortholog of  Ceres SEQ ID NO 13502874 as cited in SEQ ID NO 66298
  misc_feature (1)..(1518): Ortholog of  Ceres SEQ ID NO 12614124 as cited in SEQ ID NO 68392
atggacatcatctcaggacaacctatgtttctccttttctgctttatcttatcatgttttcttttcttcactgccgcaagatcccgacggagccctactcaagtactatccaagtcacctccgggtcctccacgattacccataatcggaaacattcatctagtcggaaagaacccacaccactcattcacggacctctcaaaaacatatggaccagtcatgagtcttaagcttggatatttaaactcagtggtcataacttcacgagatgctgcgagagaagtactaaaagcacacgatcaaatcttgtctggacggtacataactcaagcgaccaaatccaacaatcatcatgagttttccgttggctggatacatccgtcgtcacctcgtttcaggaaagttgaggaaatgacgtttactcagctgttctcaccgcagcgtatcgaggctactaaagctctgagaatgaagaaggtgcaagaacttgtcaactttttgagtgaaagcagtgagagaggagaagctgttgacatttctcgtgcatctttcgtcacagctctcaatatcatatcgaatattttgttttcagtcaatctcggtagctacgattcgaaaaattcaagtgcgtttcaggagatggtgattggttacatggaatctatcggaaatccagacgtttctaacttcttcccatttatgaggttacttgacttacaaggtaatagtaagaagatgaaagagtactcgggtaaattgcttcaggtatttagagagttttacgatgctaggattttggaaaactcatcgcgtatagatgagaaagatgtttcgagcagagacttcttggatgcactaatcgatctccaacaaggagatgaatctgaaatcaacattgacgagatcgaacacctacttctcgatatgtttctagcaggcacagatacaaactctagtaccgtggaatgggcaatgacagagttacttggaaaccctaaaacgatgacaaaagttcaagacgagatcaatcgtgtgataaggcaaaacggcgacgttcaagagtctcatatctcaaaactgccgtatttacaagcggtcataaaagaaactttccgattacacccggctgctccatttctcctcccaagaaaagcggaaagggacgtagatattcttggattccatgtgcctaaagactctcatgttcttgtgaacgtgtgggccataggacgagacccaaatgtatgggaaaatccgactcagtttgagccagagaggtttttagggaaagatattgatgtaaaaggtacaaattatgagcttacaccatttggggccgggcgtagaatttgtccgggactgcctttagctttgaaaacagtgcatctcatgcttgcttctcttctctatacctttgagtggaagcttccaaacggtgtcggttcagaggatttagacatgggagagacctttggtctcacagtgcacaagacaaacccgttacttgcgtgcctctga

SEQ ID NO: 84491 - protein, 505 aa, Arabidopsis thaliana
  peptide (1)..(505): Ceres Seq. ID no. 12675450
MDIISGQPMFLLFCFILSCFLFFTAARSRRSPTQVLSKSPPGPPRLPIIGNIHLVGKNPHHSFTDLSKTYGPVMSLKLGYLNSVVITSRDAAREVLKAHDQILSGRYITQATKSNNHHEFSVGWIHPSSPRFRKVEEMTFTQLFSPQRIEATKALRMKKVQELVNFLSESSERGEAVDISRASFVTALNIISNILFSVNLGSYDSKNSSAFQEMVIGYMESIGNPDVSNFFPFMRLLDLQGNSKKMKEYSGKLLQVFREFYDARILENSSRIDEKDVSSRDFLDALIDLQQGDESEINIDEIEHLLLDMFLAGTDTNSSTVEWAMTELLGNPKTMTKVQDEINRVIRQNGDVQESHISKLPYLQAVIKETFRLHPAAPFLLPRKAERDVDILGFHVPKDSHVLVNVWAIGRDPNVWENPTQFEPERFLGKDIDVKGTNYELTPFGAGRRICPGLPLALKTVHLMLASLLYTFEWKLPNGVGSEDLDMGETFGLTVHKTNPLLACL

SEQ ID NO: 84492 - protein, 497 aa, Arabidopsis thaliana
  peptide (1)..(497): Ceres Seq. ID no. 12675451
MFLLFCFILSCFLFFTAARSRRSPTQVLSKSPPGPPRLPIIGNIHLVGKNPHHSFTDLSKTYGPVMSLKLGYLNSVVITSRDAAREVLKAHDQILSGRYITQATKSNNHHEFSVGWIHPSSPRFRKVEEMTFTQLFSPQRIEATKALRMKKVQELVNFLSESSERGEAVDISRASFVTALNIISNILFSVNLGSYDSKNSSAFQEMVIGYMESIGNPDVSNFFPFMRLLDLQGNSKKMKEYSGKLLQVFREFYDARILENSSRIDEKDVSSRDFLDALIDLQQGDESEINIDEIEHLLLDMFLAGTDTNSSTVEWAMTELLGNPKTMTKVQDEINRVIRQNGDVQESHISKLPYLQAVIKETFRLHPAAPFLLPRKAERDVDILGFHVPKDSHVLVNVWAIGRDPNVWENPTQFEPERFLGKDIDVKGTNYELTPFGAGRRICPGLPLALKTVHLMLASLLYTFEWKLPNGVGSEDLDMGETFGLTVHKTNPLLACL

SEQ ID NO: 84493 - protein, 432 aa, Arabidopsis thaliana
  peptide (1)..(432): Ceres Seq. ID no. 12675452
MSLKLGYLNSVVITSRDAAREVLKAHDQILSGRYITQATKSNNHHEFSVGWIHPSSPRFRKVEEMTFTQLFSPQRIEATKALRMKKVQELVNFLSESSERGEAVDISRASFVTALNIISNILFSVNLGSYDSKNSSAFQEMVIGYMESIGNPDVSNFFPFMRLLDLQGNSKKMKEYSGKLLQVFREFYDARILENSSRIDEKDVSSRDFLDALIDLQQGDESEINIDEIEHLLLDMFLAGTDTNSSTVEWAMTELLGNPKTMTKVQDEINRVIRQNGDVQESHISKLPYLQAVIKETFRLHPAAPFLLPRKAERDVDILGFHVPKDSHVLVNVWAIGRDPNVWENPTQFEPERFLGKDIDVKGTNYELTPFGAGRRICPGLPLALKTVHLMLASLLYTFEWKLPNGVGSEDLDMGETFGLTVHKTNPLLACL

SEQ ID NO: 84494 - DNA, 1216 bp, Arabidopsis thaliana
  misc_feature (1)..(1216): Ceres Seq. ID no. 12675460
  misc_feature (1)..(1216): Ortholog of  Ceres SEQ ID NO 13648488 as cited in SEQ ID NO 20419
  misc_feature (1)..(1216): Ortholog of  Ceres SEQ ID NO 15171378 as cited in SEQ ID NO 51582
atcttcctcattcatagatccaaaaacccaaatcgaaaaatcgattctttagtcagaaaaaatgaggaccaaatctccatcttctcttaatctcaaggtcatattcataggttcctcaatcttgatcttgatcatcatctacttagcaagatcaaacatctcttcttcctcttcaaagccaatctccaaaacaaatctctcccaagaagaagaagaaactcagcataaacaagaaggatgtccaacaacacaacaatgcacaaagatgccactttctttatccgatgcattggttcattacgtcactagtaacgtcactccacaacaaacatttgatgaagtctctgtctcaaagagagtcttggacaagaagtctccttgtaacttccttgtctttggcttaggtcacgacagtttaatgtgggcatctcttaaccatggtggtcgtaccttgtttattgaagaagaccaagcttggattgcgatagtaactaagaagttcccaaacttagaatcttaccacgtagtttacgacacaaaagtcaaagattcagacaagctgatggaactaggaagatcagaagagtgtagatctgtgtctgatccgagaaactccaaatgtgatcttgcgttgaaagatttcccggcggacttttacgagacgaaatgggatctgatcatggttgatgcaccaactggttaccatgaagaagctccggggaggatgagtgctatttacacggcggggcttttggctcgtaaccgtgaagatggtgaaactgacgtttttgttcacgacgttaaccgtccggtggaagatgagttctcggcgactttcttgtgtaaaggttatatgagggagcaaaatgggagacttagacattttactattcctagtcatcgggctcgtgctggacgacctttttgtccggtggaagttgatcgccgccgttaattttgtggtgggagatttatttagttcaccgtcgttggtcggtcaacggactcagggctggtaaattgttttacctagtggacattgaaggacttgcttagctggcattttgtatttgttttgttttgtttttgcttgatttaaatacgtttttcaagattttagtgcatttactgaaatcgatacatactagtattcgcatgattatttgtgatttcattatcccttttgattaatgaatacaaataaggaatttatctg

SEQ ID NO: 84495 - protein, 297 aa, Arabidopsis thaliana; identical to SEQ ID NO: 40458
  peptide (1)..(297): Ceres Seq. ID no. 12675461

SEQ ID NO: 84496 - protein, 229 aa, Arabidopsis thaliana; identical to SEQ ID NO: 40459
  peptide (1)..(229): Ceres Seq. ID no. 12675462

SEQ ID NO: 84497 - protein, 178 aa, Arabidopsis thaliana; identical to SEQ ID NO: 40460
  peptide (1)..(178): Ceres Seq. ID no. 12675463

SEQ ID NO: 84498 - DNA, 684 bp, Arabidopsis thaliana
  misc_feature (1)..(684): Ceres Seq. ID no. 12675476
  misc_feature (1)..(684): Ortholog of  Ceres SEQ ID NO 13661928 as cited in SEQ ID NO 61155
atgcagcagccctatgagtaccgttacccacaaggcactggcccttcggctcctccgccgcctccaaaagccggagtgatagtggatccaaagtactgctctctgcaccctgtagatttggcgatcgtacggaaggtgttgaagataacggacggtaacttcgtgataacgaatgcggaaggaaacttgttgttcaaggtgaaggatcctttttttagtcttcacgagaagaggatcttgatggatggttttggaactaaggtcttgactttgaaagggaagataatgaccatgcatgacaggtggctagtgtttagaggagggagtacggaggaggttgatctgctatacacggtgaaaagatcaaacatggttcagataaccaccaaacttgatgtgtttttggctgataacatagagcagaagaaatgtgattacagactcgaaggggtttggctcgagacttcttgttttgtctacgctggcgattctgacatcattcttgcccaaatgcgcgagaagaaaacgatgcagagcgttctctttggaaaggacaatttctgcctcactgttaatccaaatgttgattatgccttcattgcctctctcattgtcatcctttacacagaaagctcaagtttgagtcagttcacaacaacactccttgaccagctgttcttttga

SEQ ID NO: 84499 - protein, 227 aa, Arabidopsis thaliana
  peptide (1)..(227): Ceres Seq. ID no. 12675477
MQQPYEYRYPQGTGPSAPPPPPKAGVIVDPKYCSLHPVDLAIVRKVLKITDGNFVITNAEGNLLFKVKDPFFSLHEKRILMDGFGTKVLTLKGKIMTMHDRWLVFRGGSTEEVDLLYTVKRSNMVQITTKLDVFLADNIEQKKCDYRLEGVWLETSCFVYAGDSDIILAQMREKKTMQSVLFGKDNFCLTVNPNVDYAFIASLIVILYTESSSLSQFTTTLLDQLFF

SEQ ID NO: 84500 - protein, 147 aa, Arabidopsis thaliana
  peptide (1)..(147): Ceres Seq. ID no. 12675478
MDGFGTKVLTLKGKIMTMHDRWLVFRGGSTEEVDLLYTVKRSNMVQITTKLDVFLADNIEQKKCDYRLEGVWLETSCFVYAGDSDIILAQMREKKTMQSVLFGKDNFCLTVNPNVDYAFIASLIVILYTESSSLSQFTTTLLDQLFF

SEQ ID NO: 84501 - protein, 132 aa, Arabidopsis thaliana
  peptide (1)..(132): Ceres Seq. ID no. 12675479
MTMHDRWLVFRGGSTEEVDLLYTVKRSNMVQITTKLDVFLADNIEQKKCDYRLEGVWLETSCFVYAGDSDIILAQMREKKTMQSVLFGKDNFCLTVNPNVDYAFIASLIVILYTESSSLSQFTTTLLDQLFF

SEQ ID NO: 84502 - DNA, 879 bp, Arabidopsis thaliana
  misc_feature (1)..(879): Ceres Seq. ID no. 12675490
  misc_feature (1)..(879): Ortholog of  Ceres SEQ ID NO 13596030 as cited in SEQ ID NO 62043
atggctgaagatcagaacacaactgaccgttgggagttgccttcagcgtcagagcccgtcaaaaacgttgaccgttgggagttgccttcagcgtcagagcccgtcaaaaacgtagttctggtaggccgtactgggaatggaaaaagcgccactggaaattccatcatcggaagaaaggttttcgagtcaaaatatcaagctgttggtgttaccacaagatgtaagacatttagagctgtgacaccggatggccccataatcaatgtgattgacactcctggtctcttcgacctggccgtgtccgctgagtttattagtaaggaaatcgtcaactgccttattcttgctagagaagggctacatgctgtggtgttagttctatccttgtcgactcggatttcacaagaggaagaaaacgcactttgtacgttacagatgttgttcgggggtaaaatcgttgactatttgatcgttgtattcacttgtggtgatatgttggaagatcgaaatatgactttagaagattatttgtccaatggttgccctgaatttctaaagaatgttctcagactatgtggaggcagaagggttgtatttgataaccgaacgaaagatgaaggtgtgaaggctaagcaagtccagcagcttctggtccatgtcgcagcgattgaaaaggaaactggtgggaatccctttacggacacgatgcaccgtaggatacaggaagaggctgcaagggttaaaagggaagagaaggaaattgaagaaaaaaacattgcagacgaagagaaagcagcgttgaagaagcagttagacatgtcgtatagccaaaacatgaacatgatggcattgatgattgatgtagtgaatttgctgtag

SEQ ID NO: 84503 - protein, 292 aa, Arabidopsis thaliana
  peptide (1)..(292): Ceres Seq. ID no. 12675491
MAEDQNTTDRWELPSASEPVKNVDRWELPSASEPVKNVVLVGRTGNGKSATGNSIIGRKVFESKYQAVGVTTRCKTFRAVTPDGPIINVIDTPGLFDLAVSAEFISKEIVNCLILAREGLHAVVLVLSLSTRISQEEENALCTLQMLFGGKIVDYLIVVFTCGDMLEDRNMTLEDYLSNGCPEFLKNVLRLCGGRRVVFDNRTKDEGVKAKQVQQLLVHVAAIEKETGGNPFTDTMHRRIQEEAARVKREEKEIEEKNIADEEKAALKKQLDMSYSQNMNMMALMIDVVNLL

SEQ ID NO: 84504 - protein, 147 aa, Arabidopsis thaliana
  peptide (1)..(147): Ceres Seq. ID no. 12675492
MLFGGKIVDYLIVVFTCGDMLEDRNMTLEDYLSNGCPEFLKNVLRLCGGRRVVFDNRTKDEGVKAKQVQQLLVHVAAIEKETGGNPFTDTMHRRIQEEAARVKREEKEIEEKNIADEEKAALKKQLDMSYSQNMNMMALMIDVVNLL

SEQ ID NO: 84505 - DNA, 1161 bp, Arabidopsis thaliana
  misc_feature (1)..(1161): Ceres Seq. ID no. 12675507
  misc_feature (1)..(1161): Ortholog of  Ceres SEQ ID NO 13596030 as cited in SEQ ID NO 62043
atgaagaagaagaagaagaaaagtgaaacacatcaatacgctaattttgccctaatttttgtttcctctcttccctttcctctgggaaaagaaaaaattaaaatacccgtagacaaatcaatcttcgggtatatgagtttgttggacatgggtggagatatgatggaagatgattgggaatttgcgtcatcatcaaaccctaaaagaaccctagttcttgtgggccgtactggaaacggaaagagtgcgacaggtaacagtatccttgggaggaaagcttttaggtcaagagctagaactgtaggagtgacaagcacgtgcgagtcacagagagttgttcaagaagatggtgatatcattaatgttgttgatactcctggtttgtttgatttgtctactgcagctgattttattggtaaagagattgtgaggtgtataagtttggcagaagatgggattcatgcgatcttgttggtattctctgtgaggcggcttgctgaagaggagcaaactgtgcttagtttcttgcaagcgctattcggcagtaagatcgctgactatatgatcgttgtttttaccggtggcgatgagttggaagagaatgaggagacattggaggagtatttggctgactattgccctgagtttcttaaagaaattcttgggatatgtgacaatcggttggtgttgtttaataacaagactactgataaggtgaagaaagctgagcaagttcagaagcttctctcacttgttgaatctgttgttaaacagaacaatggaaaaccgtattcagatgagttgttccatgagctacaggaagaggctatcaagctaagggaccagaaaaaggaggttgagttacttcagggttactctaataatgagatagatgagttcaagaagcaaatcgatatgtcctatgataggcagcttagccgcatcaccgagatggtggagactaagctgagagacactgctaagagactagagcagcaactaggtgaagagcaagctgcaagacttgaagcggagaagagggcaaacgaagttcagaagcggtcgagcgatgagattaagaagctcagagagaatctggagagggcggaaaaagagacgaaggaacttcagaaaaaactgggaaagtgcatcaatctatga

SEQ ID NO: 84506 - protein, 386 aa, Arabidopsis thaliana
  peptide (1)..(386): Ceres Seq. ID no. 12675508
MKKKKKKSETHQYANFALIFVSSLPFPLGKEKIKIPVDKSIFGYMSLLDMGGDMMEDDWEFASSSNPKRTLVLVGRTGNGKSATGNSILGRKAFRSRARTVGVTSTCESQRVVQEDGDIINVVDTPGLFDLSTAADFIGKEIVRCISLAEDGIHAILLVFSVRRLAEEEQTVLSFLQALFGSKIADYMIVVFTGGDELEENEETLEEYLADYCPEFLKEILGICDNRLVLFNNKTTDKVKKAEQVQKLLSLVESVVKQNNGKPYSDELFHELQEEAIKLRDQKKEVELLQGYSNNEIDEFKKQIDMSYDRQLSRITEMVETKLRDTAKRLEQQLGEEQAARLEAEKRANEVQKRSSDEIKKLRENLERAEKETKELQKKLGKCINL

SEQ ID NO: 84507 - protein, 342 aa, Arabidopsis thaliana; identical to SEQ ID NO: 23839
  peptide (1)..(342): Ceres Seq. ID no. 12675509

SEQ ID NO: 84508 - protein, 337 aa, Arabidopsis thaliana; identical to SEQ ID NO: 23840
  peptide (1)..(337): Ceres Seq. ID no. 12675510

SEQ ID NO: 84509 - DNA, 1032 bp, Arabidopsis thaliana
  misc_feature (1)..(1032): Ceres Seq. ID no. 12675541
  misc_feature (1)..(1032): Ortholog of  Ceres SEQ ID NO 13596108 as cited in SEQ ID NO 68591
atgacgaaagctctctctggcttctgttgctctctcagtctctctaccttgatggatagtgacattgtttccagtagcatagatcgatctcagacagcaatgcctgatgctttagcattcaagagtatcaatgatcctatcaagaaccagatcaatagttgtgctgcaatctgtgttaagcaagatgatccatgccatttcttgcgtgtcctttatgagtctctgataacaggagggttagctggtgttgtggtggaagctgctttgtatccaattgatacaatcaaaactcgaatacaggtagctcgggatggtggaaagataatatggaaggattatactctggtcttggtggaaatcttgtcggtgtcttaccgtaatgcttcggctctattttttggtgtatatgaaccaaccaaacagaagctgctaaaggttttaccagataatcttagtgcggttgcacatttggctgcaggtgcgttaggaggtgctgtttcatctattgttcgggtaccaacagaagttgtgaaacagcggatgcagactggtcaatttgtttcggcccctgacgctgttcgccttattatagccaaggagggctttggaggcatgtatgcggcacaccttgagggttatggatccttcttattgcgagatttgccttttgacgcgctccagttttgtgtttatgagcaattacgaattggatacaagttggctgcaagaagagatctaaatgatccagagaatgcgatgattggtgcttttgctggtgctgtcactggagttttgaccactcctcttgatgttatcaaaaccagattaatggttcagggctcaggaactcagtataaaggagtttcggattgcattaagacgataataagagaagaaggttcatcagctttgtggaagggaatgggtccaagggtattgtggataggtattggaggttcaattttctttggtgttttggaaaagacaaagcagattctttcagagagaagccaaaagagtcacaatgcttaa

SEQ ID NO: 84510 - protein, 343 aa, Arabidopsis thaliana
  peptide (1)..(343): Ceres Seq. ID no. 12675542
MTKALSGFCCSLSLSTLMDSDIVSSSIDRSQTAMPDALAFKSINDPIKNQINSCAAICVKQDDPCHFLRVLYESLITGGLAGVVVEAALYPIDTIKTRIQVARDGGKIIWKDYTLVLVEILSVSYRNASALFFGVYEPTKQKLLKVLPDNLSAVAHLAAGALGGAVSSIVRVPTEVVKQRMQTGQFVSAPDAVRLIIAKEGFGGMYAAHLEGYGSFLLRDLPFDALQFCVYEQLRIGYKLAARRDLNDPENAMIGAFAGAVTGVLTTPLDVIKTRLMVQGSGTQYKGVSDCIKTIIREEGSSALWKGMGPRVLWIGIGGSIFFGVLEKTKQILSERSQKSHNA

SEQ ID NO: 84511 - protein, 326 aa, Arabidopsis thaliana
  peptide (1)..(326): Ceres Seq. ID no. 12675543
MDSDIVSSSIDRSQTAMPDALAFKSINDPIKNQINSCAAICVKQDDPCHFLRVLYESLITGGLAGVVVEAALYPIDTIKTRIQVARDGGKIIWKDYTLVLVEILSVSYRNASALFFGVYEPTKQKLLKVLPDNLSAVAHLAAGALGGAVSSIVRVPTEVVKQRMQTGQFVSAPDAVRLIIAKEGFGGMYAAHLEGYGSFLLRDLPFDALQFCVYEQLRIGYKLAARRDLNDPENAMIGAFAGAVTGVLTTPLDVIKTRLMVQGSGTQYKGVSDCIKTIIREEGSSALWKGMGPRVLWIGIGGSIFFGVLEKTKQILSERSQKSHNA

SEQ ID NO: 84512 - protein, 310 aa, Arabidopsis thaliana
  peptide (1)..(310): Ceres Seq. ID no. 12675544
MPDALAFKSINDPIKNQINSCAAICVKQDDPCHFLRVLYESLITGGLAGVVVEAALYPIDTIKTRIQVARDGGKIIWKDYTLVLVEILSVSYRNASALFFGVYEPTKQKLLKVLPDNLSAVAHLAAGALGGAVSSIVRVPTEVVKQRMQTGQFVSAPDAVRLIIAKEGFGGMYAAHLEGYGSFLLRDLPFDALQFCVYEQLRIGYKLAARRDLNDPENAMIGAFAGAVTGVLTTPLDVIKTRLMVQGSGTQYKGVSDCIKTIIREEGSSALWKGMGPRVLWIGIGGSIFFGVLEKTKQILSERSQKSHNA

SEQ ID NO: 84513 - DNA, 1830 bp, Arabidopsis thaliana
  misc_feature (1)..(1830): Ceres Seq. ID no. 12675602
  misc_feature (1)..(1830): Ortholog of  Ceres SEQ ID NO 15176685 as cited in SEQ ID NO 58334
atgggtgggctttgttcaaggagttcatctgtaaataatgctcctggtggaacctttgcacatgttaatggtcatcatctcaataacaatgcctctgacttgaattctcattctggtgaaagtggacttaaagatgatccttctcctgttaccgagaatgttgatgataataagcatacatcggaatcgttttcgtttcctatagtctctagtggatctcatcctcaaaatatcgaggatgggattcctcggttatcgagggttttatctcagaaatctagatccactaagtctagacaagctgctgttgctaaggtttcggaagtaagctctcttttgggtagggctggtactatgggacttggtaaagctgtggatgtgttggatacactcgggagtagtatgacgaatctgaatcttagtggggggttttcttctgcgacgacggtgaaagggaataagatatcaatcttgtcttttgaagttgctaatactattgttaaaggcgccaatcttatgcattctctttcgaaagatagcattactcatttgaaagaggttgtgttaccttcagaaggtgttcagaacctgatatcgaaagacatggatgaactgttgagaattgctgctgctgataaaaggttccaacatgatcctgtcactttggtggtcacacaacgggacttgtatcatgaactccatgcgctggataggtttgaacaagattaccaacgtaagatccaggaagaagagaacccaagcacagcacaacgaggtgtgggagataccctcgctatcttgagaactgaattaaagagtcagaagaagcatgttagaaacttaaagaaaaagtctctttggtctaggatcttggaagaggtgatggagaaactagtagatgttgtccatttcttgcatttagagattcacgaagcctttggtggtgcggatcctgataagcctgcaaatgacccgccaatcaatcataaaaaactgggctctgctggtcttgccttgcattacgcaaacatcattactcaaattgatactcttgtgtcccggtctagcactatgcctgcaagcacaagagatgctttgtaccaaggtttacccccaagcataaaatctgctttacgctccagaatacagtccttccaggttaaagaagagctcactgttcctcaaataaaagctgaaatggaaaaaacattgcagtggcttgttcctgttgctacaaacaccaccaaagcgcatcatggttttggatgggttggagaatgggcaagttccgggtcggaggcgaaccagagacctgcaggtcaaaccatactaaggatagatactcttcaccatgcagataaagaaaaaaccgaggcttacatattagacctggtggtgtggctccatcatctcgttacccaagtcagggccactacaggttatggcctaagatctcctgttaagtctccaatcagatcacctaaccagaaaacgatccaactctccagcggttcacacaacccgagtatgggtttgccattgctgactacggaggatcaagagatgcttagagatgtaagcaagcggagaaagacgccaggaataagcaagagccaagagtttgaaacggtggctaaagcacgtctttgtaagcaccataggctaagcaaaagcagtagccactcaccaatgatgggcgagatgatgaagaataagaaggatactttctcaaccagaagaccttcttctgttcccatcattgattttgacattgatcgcatgaaagctctcgatgtgattgatcgcgtggacaccattcgaagcttgtag

SEQ ID NO: 84514 - protein, 609 aa, Arabidopsis thaliana
  peptide (1)..(609): Ceres Seq. ID no. 12675603
MGGLCSRSSSVNNAPGGTFAHVNGHHLNNNASDLNSHSGESGLKDDPSPVTENVDDNKHTSESFSFPIVSSGSHPQNIEDGIPRLSRVLSQKSRSTKSRQAAVAKVSEVSSLLGRAGTMGLGKAVDVLDTLGSSMTNLNLSGGFSSATTVKGNKISILSFEVANTIVKGANLMHSLSKDSITHLKEVVLPSEGVQNLISKDMDELLRIAAADKRFQHDPVTLVVTQRDLYHELHALDRFEQDYQRKIQEEENPSTAQRGVGDTLAILRTELKSQKKHVRNLKKKSLWSRILEEVMEKLVDVVHFLHLEIHEAFGGADPDKPANDPPINHKKLGSAGLALHYANIITQIDTLVSRSSTMPASTRDALYQGLPPSIKSALRSRIQSFQVKEELTVPQIKAEMEKTLQWLVPVATNTTKAHHGFGWVGEWASSGSEANQRPAGQTILRIDTLHHADKEKTEAYILDLVVWLHHLVTQVRATTGYGLRSPVKSPIRSPNQKTIQLSSGSHNPSMGLPLLTTEDQEMLRDVSKRRKTPGISKSQEFETVAKARLCKHHRLSKSSSHSPMMGEMMKNKKDTFSTRRPSSVPIIDFDIDRMKALDVIDRVDTIRSL

SEQ ID NO: 84515 - protein, 491 aa, Arabidopsis thaliana
  peptide (1)..(491): Ceres Seq. ID no. 12675604
MGLGKAVDVLDTLGSSMTNLNLSGGFSSATTVKGNKISILSFEVANTIVKGANLMHSLSKDSITHLKEVVLPSEGVQNLISKDMDELLRIAAADKRFQHDPVTLVVTQRDLYHELHALDRFEQDYQRKIQEEENPSTAQRGVGDTLAILRTELKSQKKHVRNLKKKSLWSRILEEVMEKLVDVVHFLHLEIHEAFGGADPDKPANDPPINHKKLGSAGLALHYANIITQIDTLVSRSSTMPASTRDALYQGLPPSIKSALRSRIQSFQVKEELTVPQIKAEMEKTLQWLVPVATNTTKAHHGFGWVGEWASSGSEANQRPAGQTILRIDTLHHADKEKTEAYILDLVVWLHHLVTQVRATTGYGLRSPVKSPIRSPNQKTIQLSSGSHNPSMGLPLLTTEDQEMLRDVSKRRKTPGISKSQEFETVAKARLCKHHRLSKSSSHSPMMGEMMKNKKDTFSTRRPSSVPIIDFDIDRMKALDVIDRVDTIRSL

SEQ ID NO: 84516 - protein, 475 aa, Arabidopsis thaliana
  peptide (1)..(475): Ceres Seq. ID no. 12675605
MTNLNLSGGFSSATTVKGNKISILSFEVANTIVKGANLMHSLSKDSITHLKEVVLPSEGVQNLISKDMDELLRIAAADKRFQHDPVTLVVTQRDLYHELHALDRFEQDYQRKIQEEENPSTAQRGVGDTLAILRTELKSQKKHVRNLKKKSLWSRILEEVMEKLVDVVHFLHLEIHEAFGGADPDKPANDPPINHKKLGSAGLALHYANIITQIDTLVSRSSTMPASTRDALYQGLPPSIKSALRSRIQSFQVKEELTVPQIKAEMEKTLQWLVPVATNTTKAHHGFGWVGEWASSGSEANQRPAGQTILRIDTLHHADKEKTEAYILDLVVWLHHLVTQVRATTGYGLRSPVKSPIRSPNQKTIQLSSGSHNPSMGLPLLTTEDQEMLRDVSKRRKTPGISKSQEFETVAKARLCKHHRLSKSSSHSPMMGEMMKNKKDTFSTRRPSSVPIIDFDIDRMKALDVIDRVDTIRSL

SEQ ID NO: 84517 - DNA, 828 bp, Arabidopsis thaliana
  misc_feature (1)..(828): Ceres Seq. ID no. 12675606
  misc_feature (1)..(828): Ortholog of  Ceres SEQ ID NO 13594727 as cited in SEQ ID NO 52169
  misc_feature (1)..(828): Ortholog of  Ceres SEQ ID NO 13596474 as cited in SEQ ID NO 62169
  misc_feature (1)..(828): Ortholog of  Ceres SEQ ID NO 13596969 as cited in SEQ ID NO 63375
  misc_feature (1)..(828): Ortholog of  Ceres SEQ ID NO 13597519 as cited in SEQ ID NO 64759
  misc_feature (1)..(828): Ortholog of  Ceres SEQ ID NO 13597870 as cited in SEQ ID NO 64982
  misc_feature (1)..(828): Ortholog of  Ceres SEQ ID NO 13595926 as cited in SEQ ID NO 67778
atgagggcaatcacagcttcgtttttcattttctgcttccttgttccctctgttttcgggaagctccgacgtgggttttatgacagttcatgccctctcgctgaatctaccgtgtctagagttgttgccaaacatcactcccttaaccaaaccgttactgcagcgttgcttcgtatgcagtttcatgattgctttgtcaacggttgtgatgcttccctcttgatcgactcaacgcccgaaaggccatctgagaaaagcgcggaggcaaacgtaagcgtgagaggcttcgagatcatcgatgaggttaagaaagagcttgagatagtttgcccaaaaacagtctcatgcgcagacattgtaactctagccacaaaagactcgattgcattagcgggtgattttgaaggtaaaggtttgaatgtcaccaacatggttgcacttattggtggtggtcacagcgtcggtgttgcacattgcagtctttttcaggataggcttaaggatcctaaaatggacagcaaactgaaagctaagttacagaacacatgtcgtggtccaaatgacccatcagtggtcttggaccaaatgacgccacttgaggtagacaatcaaatctataaacagataaaaagtcaaagaggaatccttagaattgatcaaaacttgggtctcgatgactcaaccagtaggatcgtatcaaattttgcattaaatgaaacattattcggagaaagatttgctgaagcaatgcagataatgggtgaaataaaagttcttacgggaaattctggagagatcaggacaaactgcatagtcgtcagccactga

SEQ ID NO: 84518 - protein, 275 aa, Arabidopsis thaliana
  peptide (1)..(275): Ceres Seq. ID no. 12675607
MRAITASFFIFCFLVPSVFGKLRRGFYDSSCPLAESTVSRVVAKHHSLNQTVTAALLRMQFHDCFVNGCDASLLIDSTPERPSEKSAEANVSVRGFEIIDEVKKELEIVCPKTVSCADIVTLATKDSIALAGDFEGKGLNVTNMVALIGGGHSVGVAHCSLFQDRLKDPKMDSKLKAKLQNTCRGPNDPSVVLDQMTPLEVDNQIYKQIKSQRGILRIDQNLGLDDSTSRIVSNFALNETLFGERFAEAMQIMGEIKVLTGNSGEIRTNCIVVSH

SEQ ID NO: 84519 - protein, 217 aa, Arabidopsis thaliana
  peptide (1)..(217): Ceres Seq. ID no. 12675608
MQFHDCFVNGCDASLLIDSTPERPSEKSAEANVSVRGFEIIDEVKKELEIVCPKTVSCADIVTLATKDSIALAGDFEGKGLNVTNMVALIGGGHSVGVAHCSLFQDRLKDPKMDSKLKAKLQNTCRGPNDPSVVLDQMTPLEVDNQIYKQIKSQRGILRIDQNLGLDDSTSRIVSNFALNETLFGERFAEAMQIMGEIKVLTGNSGEIRTNCIVVSH

SEQ ID NO: 84520 - DNA, 1566 bp, Arabidopsis thaliana
  misc_feature (1)..(1566): Ceres Seq. ID no. 12675647
  misc_feature (1)..(1566): Ortholog of  Ceres SEQ ID NO 14302216 as cited in SEQ ID NO 66456
gctagagaaatcttttacctttttcgtaaatttagatgcttcttcatcactacaatttctctcctgtcactctcttcttctacgctcttgtctttatatccgatctacctcgttccctctcaaatccctaaatcgtctcctatatcctttcgcaaatggacaaacccaagatctgaaaaagtttttgtcttttctctcccaatcgcctgattcaagcctaaagctcggtttttttcttctgggtatttaggggttaagtgtattgtagaaaagcatggcgagtttgagtgggagttggagagatgcgtataaaggaatgtcatcggataatataaagggtttagtattggctttatcttcaagcttattcattggtgctagtttcattgttaagaagaaaggtctcaagagagctggtgcttctggtctcagagcaggttctggaggttattcttacctgcttgagcctctctggtgggtaggcatgataacgatgattgtaggggaaattgccaattttgctgcttatgcctttgcgcctgccattttagtaactcctcttggtgctctcagcataattatcagtgctgctcttgctcatgtcatcctacacgaaaagttgcatactttcgggcttcttggttgtgtcttatgtgttgttggttcgataactattgtcttacatgctcctcaagaacaagagattgattctgtgttacaagtatggaatcttgcgacagaacctgcttttcttctctacgctgcagcagtagtaggagcagccattatactcatagttcagtttgtaccacagtacggtcagtcacatgtcatggtatatatcggggtttgttctcttgttggatcattgtcggtcatgagcgtcaaagcgctcgggatagcattaaagcttacgttttcaggaatgaatcagttaatttaccctcagacatgggtcttcacgctgatagttctcacctgcgtgataacccaaatgaactatctaaacaaggcgcttgacactttcaacacggctgtagtttcacctatatactatgttatgttcacatcattgaccatcctagctagtgtcatcatgtttaaggactgggatcgacaggacggaactcagatagtgacggagttgtgtgggtttgtgacaatcctttcaggaacctttttgcttcacaaaacaaaggatatggttgatggttcttcgtccttgggaaatttggctcttcgccttcctaaacaattggaagatagtaatgggtttgagcaagaagggatcccactcactctcagacgccacgagtgtaccaagtcgccaaggccaatgcgtcaattcattctaccgcaagacggtcctgaagctgtgtaaggagatacaaagtagattcaatatatgtaaaccacgcggcttcagagacagcatgaagaaaaagagaagatagattattggtacaaattgcatagggaatttttcacatattcatttgttatgctttctctagagatgtgaaaatgtgtctgacagattgatttaactgttatataaacacatat

SEQ ID NO: 84521 - protein, 368 aa, Arabidopsis thaliana
  peptide (1)..(368): Ceres Seq. ID no. 12675648
MASLSGSWRDAYKGMSSDNIKGLVLALSSSLFIGASFIVKKKGLKRAGASGLRAGSGGYSYLLEPLWWVGMITMIVGEIANFAAYAFAPAILVTPLGALSIIISAALAHVILHEKLHTFGLLGCVLCVVGSITIVLHAPQEQEIDSVLQVWNLATEPAFLLYAAAVVGAAIILIVQFVPQYGQSHVMVYIGVCSLVGSLSVMSVKALGIALKLTFSGMNQLIYPQTWVFTLIVLTCVITQMNYLNKALDTFNTAVVSPIYYVMFTSLTILASVIMFKDWDRQDGTQIVTELCGFVTILSGTFLLHKTKDMVDGSSSLGNLALRLPKQLEDSNGFEQEGIPLTLRRHECTKSPRPMRQFILPQDGPEAV

SEQ ID NO: 84522 - protein, 354 aa, Arabidopsis thaliana
  peptide (1)..(354): Ceres Seq. ID no. 12675649
MSSDNIKGLVLALSSSLFIGASFIVKKKGLKRAGASGLRAGSGGYSYLLEPLWWVGMITMIVGEIANFAAYAFAPAILVTPLGALSIIISAALAHVILHEKLHTFGLLGCVLCVVGSITIVLHAPQEQEIDSVLQVWNLATEPAFLLYAAAVVGAAIILIVQFVPQYGQSHVMVYIGVCSLVGSLSVMSVKALGIALKLTFSGMNQLIYPQTWVFTLIVLTCVITQMNYLNKALDTFNTAVVSPIYYVMFTSLTILASVIMFKDWDRQDGTQIVTELCGFVTILSGTFLLHKTKDMVDGSSSLGNLALRLPKQLEDSNGFEQEGIPLTLRRHECTKSPRPMRQFILPQDGPEAV

SEQ ID NO: 84523 - protein, 298 aa, Arabidopsis thaliana
  peptide (1)..(298): Ceres Seq. ID no. 12675650
MITMIVGEIANFAAYAFAPAILVTPLGALSIIISAALAHVILHEKLHTFGLLGCVLCVVGSITIVLHAPQEQEIDSVLQVWNLATEPAFLLYAAAVVGAAIILIVQFVPQYGQSHVMVYIGVCSLVGSLSVMSVKALGIALKLTFSGMNQLIYPQTWVFTLIVLTCVITQMNYLNKALDTFNTAVVSPIYYVMFTSLTILASVIMFKDWDRQDGTQIVTELCGFVTILSGTFLLHKTKDMVDGSSSLGNLALRLPKQLEDSNGFEQEGIPLTLRRHECTKSPRPMRQFILPQDGPEAV

SEQ ID NO: 84524 - DNA, 2109 bp, Arabidopsis thaliana
  misc_feature (1)..(2109): Ceres Seq. ID no. 12675654
  misc_feature (1)..(2109): Ortholog of  Ceres SEQ ID NO 15180156 as cited in SEQ ID NO 0
atgtgtatatatatgttcgggtataaaaaatactcacggatatcgggttctgttcgggtaatacccgatacccacaattatttgaaaacagaatccgatcaggtaattagttggaaccgaagtagaacggattcagatatttcaggtcagattcgagtgctcatcgacgacgacaatgctaaaatggctcaatttagacaatcgggaacagatagatttagtgttcgcggcaacggcggaggagcttcttctgatcacgtaacgatcgggatccgaaacggcgtcggtggagctactaaaggtaacaacaacaggtggcgaagatccgtgagagctgataagattcgtcgacttggaatcggttctgttgtgtttgttctttgctttgtgcttcttgttactgttctcgcttactgttatatctctgggtttacttataatagctacgatgataaaggatttgttgattcatatgagggtgattttttgacgaatgtgactagattagatccttcgaaagtgcttgagtttggtcaaggttcagtgattcatggacgagattcgaggtattgggataaagatgatagaagaagagatgatgattataatgaggatgaagtgaaaaaggatgtacaacaagttcataatcctgtgaaggggattggtttgtataatgaagctggaaggaatgagttgaagatgtatgaagctgagtataaagctacgcttgggaaaggtggtcatgagaaaaacaatgagggagttgatagggatcgtgaggatgatgatgcgattgattctcatgatggggatgaatatgttgattctgggcatgaggatgataatgaagaggtgcataaagagaaggttgttcatttggtgaccaagcaagagaatgtggacaaggatgatggaggtgtttcaaaaatgtcacttggggattcttctcttgttagtaagggtggtaagtctgggaaaacatcacgatctgatactaaaagaagaggtcgtcgcagatcttcaggttcatgtgaaatgaagctattgaattctagtcaaccaatagtggagcccttgaatactcgaaaatctgctagattttctttacagtacatagagaaggaagataagcctgatgaagaagaacagtgggagcctagatttgcaggtcatcagagtttacaggagcgagaagattccttcgtggctcaagacaagaaaattcattgcggctttgtcaaaggtcccaaaggatcttcaagcactgggtttgacctgacagaagatgatactaattatatcagtagatgccacatcgctgttagctcatgcatctttggcaattctgatcgtttgaggcctcctgccaacaaaatgataagtcggttgtcgagaaaaaatgtatgcttcattgtgttcgtggacgagattaccatgcaaacactttctgcagaaggacatgccccagacagagcaggattcattggtctgtggaagttggttgtcgtgaagaatcttccttacgcagatatgcggagggtaggaaaaataccaaaaatgttgccacaccgacttttcccatcagcaaggtactcaatctggttggacagcaagttacgacttcagttggacccactactcattctggagtacttcctatggcgtaaaggtcacgagtatgctatatccaatcactatgaccgtcattgtttatgggaagaggttgcacaaaacaagaagctgaacaagtataaccatactgttattaatcaacagtttcagttttacaaggctgatgggctgaccagattcaatgcttcggatccgttcaagcttcttcctagcaatgttccagaggggtctttcatagtacgagctcatactcccatgtcgaacctattctcatgtctttggttcaatgaagtggaacgcttcactccccgggaccagctgagctttgcctatacttaccagaaactaagaaggatgaatcctgataaaccatttaatcttcacatgttcaaggactgtgagagaagaaaaattgcaaagttgttccgtcacagatcagacgagaagcgaaaccttatacaagcagcaatacaataa

SEQ ID NO: 84525 - protein, 702 aa, Arabidopsis thaliana
  peptide (1)..(702): Ceres Seq. ID no. 12675655
MCIYMFGYKKYSRISGSVRVIPDTHNYLKTESDQVISWNRSRTDSDISGQIRVLIDDDNAKMAQFRQSGTDRFSVRGNGGGASSDHVTIGIRNGVGGATKGNNNRWRRSVRADKIRRLGIGSVVFVLCFVLLVTVLAYCYISGFTYNSYDDKGFVDSYEGDFLTNVTRLDPSKVLEFGQGSVIHGRDSRYWDKDDRRRDDDYNEDEVKKDVQQVHNPVKGIGLYNEAGRNELKMYEAEYKATLGKGGHEKNNEGVDRDREDDDAIDSHDGDEYVDSGHEDDNEEVHKEKVVHLVTKQENVDKDDGGVSKMSLGDSSLVSKGGKSGKTSRSDTKRRGRRRSSGSCEMKLLNSSQPIVEPLNTRKSARFSLQYIEKEDKPDEEEQWEPRFAGHQSLQEREDSFVAQDKKIHCGFVKGPKGSSSTGFDLTEDDTNYISRCHIAVSSCIFGNSDRLRPPANKMISRLSRKNVCFIVFVDEITMQTLSAEGHAPDRAGFIGLWKLVVVKNLPYADMRRVGKIPKMLPHRLFPSARYSIWLDSKLRLQLDPLLILEYFLWRKGHEYAISNHYDRHCLWEEVAQNKKLNKYNHTVINQQFQFYKADGLTRFNASDPFKLLPSNVPEGSFIVRAHTPMSNLFSCLWFNEVERFTPRDQLSFAYTYQKLRRMNPDKPFNLHMFKDCERRKIAKLFRHRSDEKRNLIQAAIQ

SEQ ID NO: 84526 - protein, 698 aa, Arabidopsis thaliana
  peptide (1)..(698): Ceres Seq. ID no. 12675656
MFGYKKYSRISGSVRVIPDTHNYLKTESDQVISWNRSRTDSDISGQIRVLIDDDNAKMAQFRQSGTDRFSVRGNGGGASSDHVTIGIRNGVGGATKGNNNRWRRSVRADKIRRLGIGSVVFVLCFVLLVTVLAYCYISGFTYNSYDDKGFVDSYEGDFLTNVTRLDPSKVLEFGQGSVIHGRDSRYWDKDDRRRDDDYNEDEVKKDVQQVHNPVKGIGLYNEAGRNELKMYEAEYKATLGKGGHEKNNEGVDRDREDDDAIDSHDGDEYVDSGHEDDNEEVHKEKVVHLVTKQENVDKDDGGVSKMSLGDSSLVSKGGKSGKTSRSDTKRRGRRRSSGSCEMKLLNSSQPIVEPLNTRKSARFSLQYIEKEDKPDEEEQWEPRFAGHQSLQEREDSFVAQDKKIHCGFVKGPKGSSSTGFDLTEDDTNYISRCHIAVSSCIFGNSDRLRPPANKMISRLSRKNVCFIVFVDEITMQTLSAEGHAPDRAGFIGLWKLVVVKNLPYADMRRVGKIPKMLPHRLFPSARYSIWLDSKLRLQLDPLLILEYFLWRKGHEYAISNHYDRHCLWEEVAQNKKLNKYNHTVINQQFQFYKADGLTRFNASDPFKLLPSNVPEGSFIVRAHTPMSNLFSCLWFNEVERFTPRDQLSFAYTYQKLRRMNPDKPFNLHMFKDCERRKIAKLFRHRSDEKRNLIQAAIQ

SEQ ID NO: 84527 - protein, 641 aa, Arabidopsis thaliana
  peptide (1)..(641): Ceres Seq. ID no. 12675657
MAQFRQSGTDRFSVRGNGGGASSDHVTIGIRNGVGGATKGNNNRWRRSVRADKIRRLGIGSVVFVLCFVLLVTVLAYCYISGFTYNSYDDKGFVDSYEGDFLTNVTRLDPSKVLEFGQGSVIHGRDSRYWDKDDRRRDDDYNEDEVKKDVQQVHNPVKGIGLYNEAGRNELKMYEAEYKATLGKGGHEKNNEGVDRDREDDDAIDSHDGDEYVDSGHEDDNEEVHKEKVVHLVTKQENVDKDDGGVSKMSLGDSSLVSKGGKSGKTSRSDTKRRGRRRSSGSCEMKLLNSSQPIVEPLNTRKSARFSLQYIEKEDKPDEEEQWEPRFAGHQSLQEREDSFVAQDKKIHCGFVKGPKGSSSTGFDLTEDDTNYISRCHIAVSSCIFGNSDRLRPPANKMISRLSRKNVCFIVFVDEITMQTLSAEGHAPDRAGFIGLWKLVVVKNLPYADMRRVGKIPKMLPHRLFPSARYSIWLDSKLRLQLDPLLILEYFLWRKGHEYAISNHYDRHCLWEEVAQNKKLNKYNHTVINQQFQFYKADGLTRFNASDPFKLLPSNVPEGSFIVRAHTPMSNLFSCLWFNEVERFTPRDQLSFAYTYQKLRRMNPDKPFNLHMFKDCERRKIAKLFRHRSDEKRNLIQAAIQ

SEQ ID NO: 84528 - DNA, 1102 bp, Arabidopsis thaliana
  misc_feature (1)..(1102): Ceres Seq. ID no. 12675661
  misc_feature (1)..(1102): Ortholog of  Ceres SEQ ID NO 14311572 as cited in SEQ ID NO 51713
  misc_feature (1)..(1102): Ortholog of  Ceres SEQ ID NO 14308664 as cited in SEQ ID NO 55450
  misc_feature (1)..(1102): Ortholog of  Ceres SEQ ID NO 15226673 as cited in SEQ ID NO 66997
  misc_feature (1)..(1102): Ortholog of  Ceres SEQ ID NO 14302998 as cited in SEQ ID NO 67440
aaaacatttcatctctctccaacaactattcaccacattcaatggagtcaccaccactatacgagatatcctcaagctcttcttctgaaaaacctagacaccatttccaatcccttgatctcttccctaacctcaaccaaaactcttgtatcaacaataccctaattgagcctttaccgcttattgatcgcataaacttgaactcaaacctagacctaaaccctaatcccttgtatgcggaagaaggagagcaagaggaggaagaagaagaagaagaagaccgtgaagtggacgtggacttacacatcggccttcctggttttggtaaaccaagcaatgatgctaaacagctgaagaagagaaatgggaaggagatcgccacatatgacgccggaaaaggcatcgagaatgaactttccggaaaggcatactggatcccggcgccggagcaaattctcatagggttcactcatttttcttgccatgtatgcttcaagacattcaatcgctacaacaatcttcagatgcacatgtggggacatggttcacaatacaggaaaggaccggagtcactgaaaggcacacagccacgagccatgttagggatcccttgttactgctgcgttgaagggtgcaggaaccacattgaccatcctcgttccaagccactgaaagactttaggacgctccaaacgcactacaaacgcaaacacggacacaaacccttctcgtgtcgcctttgcggtaagcttttggctgtcaagggcgattggcgaacacatgagaagaattgtggaaaacgttgggtttgcgtttgcggttctgattttaaacacaaacgttctcttaaggaccatgttaaggcgtttgggtctggtcatgggccttatccaactggtttgtttgaagagcaggcttctaattcatctgtctccgagactttgtttttttaaatttgggcatctttttctttcgcttatgaaatatctatttactttagaaaaataataatgtggtatctaattgttccaaattaggaacacgaagtgtaccattatatttttcatcactacaaatgttattcagagaaaattatcattaa

SEQ ID NO: 84529 - protein, 316 aa, Arabidopsis thaliana
  peptide (1)..(316): Ceres Seq. ID no. 12675662
NISSLSNNYSPHSMESPPLYEISSSSSSEKPRHHFQSLDLFPNLNQNSCINNTLIEPLPLIDRINLNSNLDLNPNPLYAEEGEQEEEEEEEEDREVDVDLHIGLPGFGKPSNDAKQLKKRNGKEIATYDAGKGIENELSGKAYWIPAPEQILIGFTHFSCHVCFKTFNRYNNLQMHMWGHGSQYRKGPESLKGTQPRAMLGIPCYCCVEGCRNHIDHPRSKPLKDFRTLQTHYKRKHGHKPFSCRLCGKLLAVKGDWRTHEKNCGKRWVCVCGSDFKHKRSLKDHVKAFGSGHGPYPTGLFEEQASNSSVSETLFF

SEQ ID NO: 84530 - protein, 303 aa, Arabidopsis thaliana
  peptide (1)..(303): Ceres Seq. ID no. 12675663
MESPPLYEISSSSSSEKPRHHFQSLDLFPNLNQNSCINNTLIEPLPLIDRINLNSNLDLNPNPLYAEEGEQEEEEEEEEDREVDVDLHIGLPGFGKPSNDAKQLKKRNGKEIATYDAGKGIENELSGKAYWIPAPEQILIGFTHFSCHVCFKTFNRYNNLQMHMWGHGSQYRKGPESLKGTQPRAMLGIPCYCCVEGCRNHIDHPRSKPLKDFRTLQTHYKRKHGHKPFSCRLCGKLLAVKGDWRTHEKNCGKRWVCVCGSDFKHKRSLKDHVKAFGSGHGPYPTGLFEEQASNSSVSETLFF

SEQ ID NO: 84531 - DNA, 1021 bp, Arabidopsis thaliana
  misc_feature (1)..(1021): Ceres Seq. ID no. 12675664
  misc_feature (1)..(1021): Ortholog of  Ceres SEQ ID NO 14311572 as cited in SEQ ID NO 51713
  misc_feature (1)..(1021): Ortholog of  Ceres SEQ ID NO 14308664 as cited in SEQ ID NO 55450
  misc_feature (1)..(1021): Ortholog of  Ceres SEQ ID NO 15226673 as cited in SEQ ID NO 66997
  misc_feature (1)..(1021): Ortholog of  Ceres SEQ ID NO 14302998 as cited in SEQ ID NO 67440
aaaacatttcatctctctccaacaactattcaccacattcaatggagtcaccaccactatacgagatatcctcaagctcttcttctgaaaaacctagacaccatttccaatcccttgatctcttccctaacctcaaccaaaactcttgtatcaacaataccctaattgagcctttaccgcttattgatcgcataaacttgaactcaaacctagacctaaaccctaatcccttgtatgcggaagaaggagagcaagaggaggaagaagaagaagaagaagaccgtgaagtggacgtggacttacacatcggccttcctggttttggtaaaccaagcaatgatgctaaacagctgaagaagagaaatgggaaggagatcgccacatatgacgccggaaaaggcatcgagaatgaactttccggaaaggcatactggatcccggcgccggagcaaattctcatagggttcactcatttttcttgccatgtatgcttcaagacattcaatcgctacaacaatcttcaggaaaggaccggagtcactgaaaggcacacagccacgagccatgttagggatcccttgttactgctgcgttgaagggtgcaggaaccacattgaccatcctcgttccaagccactgaaagactttaggacgctccaaacgcactacaaacgcaaacacggacacaaacccttctcgtgtcgcctttgcggtaagcttttggctgtcaagggcgattggcgaacacatgagaagaattgtggaaaacgttgggtttgcgtttgcggttctgattttaaacacaaacgttctcttaaggaccatgttaaggcgtttgggtctggtcatgggccttatccaactggtttgtttgaagagcaggcttctaattcatctgtctccgagactttgtttttttaaatttgggcatctttttctttcgcttatgaaatatctatttactttagaaaaataataatgtggtatctaattgttccaaattaggaacacgaagtgtacc

SEQ ID NO: 84532 - protein, 197 aa, Arabidopsis thaliana
  peptide (1)..(197): Ceres Seq. ID no. 12675665
NISSLSNNYSPHSMESPPLYEISSSSSSEKPRHHFQSLDLFPNLNQNSCINNTLIEPLPLIDRINLNSNLDLNPNPLYAEEGEQEEEEEEEEDREVDVDLHIGLPGFGKPSNDAKQLKKRNGKEIATYDAGKGIENELSGKAYWIPAPEQILIGFTHFSCHVCFKTFNRYNNLQERTGVTERHTATSHVRDPLLLLR

SEQ ID NO: 84533 - protein, 184 aa, Arabidopsis thaliana
  peptide (1)..(184): Ceres Seq. ID no. 12675666
MESPPLYEISSSSSSEKPRHHFQSLDLFPNLNQNSCINNTLIEPLPLIDRINLNSNLDLNPNPLYAEEGEQEEEEEEEEDREVDVDLHIGLPGFGKPSNDAKQLKKRNGKEIATYDAGKGIENELSGKAYWIPAPEQILIGFTHFSCHVCFKTFNRYNNLQERTGVTERHTATSHVRDPLLLLR

SEQ ID NO: 84534 - protein, 145 aa, Arabidopsis thaliana
  peptide (1)..(145): Ceres Seq. ID no. 12675667
MYASRHSIATTIFRKGPESLKGTQPRAMLGIPCYCCVEGCRNHIDHPRSKPLKDFRTLQTHYKRKHGHKPFSCRLCGKLLAVKGDWRTHEKNCGKRWVCVCGSDFKHKRSLKDHVKAFGSGHGPYPTGLFEEQASNSSVSETLFF

SEQ ID NO: 84535 - DNA, 1324 bp, Arabidopsis thaliana
  misc_feature (1)..(1324): Ceres Seq. ID no. 12675668
  misc_feature (1)..(1324): Ortholog of  Ceres SEQ ID NO 13598527 as cited in SEQ ID NO 64914
acaagctagctgatatgtcgggacggctgcaattccttttttattagtggagaaaaaaacaaaaaaaatacccgaaagagaaaaaaaagatagagatggagaatcacacgaccatgaaagtttcatctcttaattgtatcgatctagccaacgacgatcttaatcattctgttgtttccctcaaacaggcatgtttggattgtggatttttctatgtgatcaatcatgggataagcgaagagttcatggacgatgttttcgagcagagcaagaagctttttgctcttcctttagaagaaaagatgaaagtgttgagaaacgaaaagcatcgaggctatacacctgttcttgatgaacttttagatcccaagaatcaaatcaatggggatcacaaagagggttattacattggaattgaagttcctaaagatgatcctcattgggataagccattctatggtcctaacccttggcctgatgctgatgttttacctggttggcgagaaacaatggagaaatatcatcaagaagcattgagggtttctatggctattgcaagacttttggcgttagcacttgacttggatgtgggatactttgataggacggagatgcttggaaaacctattgcaactatgcgactgttgcggtatcaagggatttctgatccttcgaaaggaatatatgcatgtggagcacattctgacttcggaatgatgactctgttagccactgatggtgtaatgggactccagatatgcaaagataagaacgcgatgccgcagaagtgggaatatgtaccgccgattaaaggagcatttatagtgaatcttggcgatatgctggaacgttggagcaatggcttttttaaatccacgttgcatcgggttcttggaaacggtcaggaacgatattctattccattctttgtggaaccaaatcatgactgtctcgtggagtgtctcccaacctgcaagtcggaaagcgagcttcctaaatatccaccgatcaaatgttcgacatacctcacccagcgttacgaggaaacacatgcgaatttaagcatctaccaccaacaaacatgaatgctctttgtgagatcgacactaggagggagtctacaaaagtaaattttatgtaagttcgttgttagctcaaagcaaagtaaaagatattgtaagaatgtaaggtaagtgaagtttacggccacaccctcccttacttattgggagggatacacatacttatgtcttgtttcaatctatgtatctgtacgaattgacagtctctttaacgtttagaatctacacgggctagacttgtt

SEQ ID NO: 84536 - protein, 329 aa, Arabidopsis thaliana
  peptide (1)..(329): Ceres Seq. ID no. 12675669
MENHTTMKVSSLNCIDLANDDLNHSVVSLKQACLDCGFFYVINHGISEEFMDDVFEQSKKLFALPLEEKMKVLRNEKHRGYTPVLDELLDPKNQINGDHKEGYYIGIEVPKDDPHWDKPFYGPNPWPDADVLPGWRETMEKYHQEALRVSMAIARLLALALDLDVGYFDRTEMLGKPIATMRLLRYQGISDPSKGIYACGAHSDFGMMTLLATDGVMGLQICKDKNAMPQKWEYVPPIKGAFIVNLGDMLERWSNGFFKSTLHRVLGNGQERYSIPFFVEPNHDCLVECLPTCKSESELPKYPPIKCSTYLTQRYEETHANLSIYHQQT

SEQ ID NO: 84537 - protein, 323 aa, Arabidopsis thaliana
  peptide (1)..(323): Ceres Seq. ID no. 12675670
MKVSSLNCIDLANDDLNHSVVSLKQACLDCGFFYVINHGISEEFMDDVFEQSKKLFALPLEEKMKVLRNEKHRGYTPVLDELLDPKNQINGDHKEGYYIGIEVPKDDPHWDKPFYGPNPWPDADVLPGWRETMEKYHQEALRVSMAIARLLALALDLDVGYFDRTEMLGKPIATMRLLRYQGISDPSKGIYACGAHSDFGMMTLLATDGVMGLQICKDKNAMPQKWEYVPPIKGAFIVNLGDMLERWSNGFFKSTLHRVLGNGQERYSIPFFVEPNHDCLVECLPTCKSESELPKYPPIKCSTYLTQRYEETHANLSIYHQQT

SEQ ID NO: 84538 - protein, 279 aa, Arabidopsis thaliana
  peptide (1)..(279): Ceres Seq. ID no. 12675671
MDDVFEQSKKLFALPLEEKMKVLRNEKHRGYTPVLDELLDPKNQINGDHKEGYYIGIEVPKDDPHWDKPFYGPNPWPDADVLPGWRETMEKYHQEALRVSMAIARLLALALDLDVGYFDRTEMLGKPIATMRLLRYQGISDPSKGIYACGAHSDFGMMTLLATDGVMGLQICKDKNAMPQKWEYVPPIKGAFIVNLGDMLERWSNGFFKSTLHRVLGNGQERYSIPFFVEPNHDCLVECLPTCKSESELPKYPPIKCSTYLTQRYEETHANLSIYHQQT

SEQ ID NO: 84539 - DNA, 1987 bp, Arabidopsis thaliana
  misc_feature (1)..(1987): Ceres Seq. ID no. 12675672
  misc_feature (1)..(1987): Ortholog of  Ceres SEQ ID NO 12623695 as cited in SEQ ID NO 61286
tctcctataaatctctccgtcttctctcttctctcatttcacgtcggagatcattttctcctcctccgcctccgcctccaccgccaccgccaccgccgccgccgacgacttttctcacttactcaacaccagagatcttggtttagtgttataatggaaggtgttggactaagagctgtaggatcacactgttctttatctgagatggatgatcttgatttgactcgagctttggataaaccaagattgaagatcgaaaggaagagatcgtttgatgaaagatcgatgagtgagctatcgactggttacagtagacatgacggtatacacgattcgccgcgaggtagatcggtgcttgatacgcctctttcttctgctagaaactcctttgagcctcatcctatgatggctgaagcttgggaggctttaagaaggtcaatggtcttcttccgtggtcaacctgttggtactcttgccgcggttgataatactaccgatgaagtcttgaactatgatcaggtgtttgtgagggattttgtaccgagtgcgttggcgtttctgatgaatggagaaccggatatagtgaagcattttttgcttaagacacttcagctgcaaggttgggagaaacgtgtggatcggtttaagttaggagaaggtgtgatgcctgcaagtttcaaggtgcttcatgatcctatccgtgaaacggataacattgttgcggatttcggtgagagtgctattggacgtgtggctcctgtagattcagggttctggtggattattcttcttcgtgcttataccaaatctactggagatttgactctctctgagacaccagagtgtcaaaagggaatgaaactgatcttgtctttgtgcttagctgaagggtttgacacgtttcctacactgctttgtgctgatggatgttccatgattgatcgaagaatgggtgtttatgggtatcccattgagatccaagcgttgttcttcatggctttgagatctgctttgtcgatgttaaagcccgatggagatggcagagaggtcattgagaggatcgttaagcgacttcatgccttgagcttccatatgcgcaattacttctggcttgatcatcagaacctcaatgacatttacaggttcaagactgaggaatactctcacacggcggtgaacaagttcaatgtgatgcctgattctatacccgagtgggttttcgacttcatgcctctccgtggaggctactttgtgggaaacgtaggacctgcccatatggatttccggtggttcgcactcggtaattgtgtctccatactttcttcattggccactccagatcaatccatggccattatggacctccttgagcaccggtgggcagagcttgtaggtgagatgcctctcaagatttgttatccatgcctcgagggccatgagtggcgcatcgttactggctgtgaccccaagaacacacggtggagctaccacaatggtggatcttggccagttttgctgtggcagctaacagcagcgtgcattaagacagggagaccgcagatcgcaagacgcgcggttgacctcatagaatcgcgtcttcaccgagactgttggccagagtattacgacggtaagctcggaaggtacgttggaaaacaggcaaggaaataccagacttggtcaatcgcaggttacttagtggcgaaaatgttgctagaagatccttcacacattggtatgatctctcttgaagaagacaaactcatgaaaccagtcatcaagcgatctgcgtcttggccacaactctgaaaaaccgctttaggtttttgttccggttctaatatttgccacgatatgattttttgttgttgttgtttgtatgataatgttattgaaaacttgtgcggggacatagactttttattgattgctttctttcttgctttgcaagtaaggaaaaagaaaatgggaaaagctcgtttgccgt

SEQ ID NO: 84540 - protein, 602 aa, Arabidopsis thaliana
  peptide (1)..(602): Ceres Seq. ID no. 12675673
SPINLSVFSLLSFHVGDHFLLLRLRLHRHRHRRRRRLFSLTQHQRSWFSVIMEGVGLRAVGSHCSLSEMDDLDLTRALDKPRLKIERKRSFDERSMSELSTGYSRHDGIHDSPRGRSVLDTPLSSARNSFEPHPMMAEAWEALRRSMVFFRGQPVGTLAAVDNTTDEVLNYDQVFVRDFVPSALAFLMNGEPDIVKHFLLKTLQLQGWEKRVDRFKLGEGVMPASFKVLHDPIRETDNIVADFGESAIGRVAPVDSGFWWIILLRAYTKSTGDLTLSETPECQKGMKLILSLCLAEGFDTFPTLLCADGCSMIDRRMGVYGYPIEIQALFFMALRSALSMLKPDGDGREVIERIVKRLHALSFHMRNYFWLDHQNLNDIYRFKTEEYSHTAVNKFNVMPDSIPEWVFDFMPLRGGYFVGNVGPAHMDFRWFALGNCVSILSSLATPDQSMAIMDLLEHRWAELVGEMPLKICYPCLEGHEWRIVTGCDPKNTRWSYHNGGSWPVLLWQLTAACIKTGRPQIARRAVDLIESRLHRDCWPEYYDGKLGRYVGKQARKYQTWSIAGYLVAKMLLEDPSHIGMISLEEDKLMKPVIKRSASWPQL

SEQ ID NO: 84541 - protein, 551 aa, Arabidopsis thaliana
  peptide (1)..(551): Ceres Seq. ID no. 12675674
MEGVGLRAVGSHCSLSEMDDLDLTRALDKPRLKIERKRSFDERSMSELSTGYSRHDGIHDSPRGRSVLDTPLSSARNSFEPHPMMAEAWEALRRSMVFFRGQPVGTLAAVDNTTDEVLNYDQVFVRDFVPSALAFLMNGEPDIVKHFLLKTLQLQGWEKRVDRFKLGEGVMPASFKVLHDPIRETDNIVADFGESAIGRVAPVDSGFWWIILLRAYTKSTGDLTLSETPECQKGMKLILSLCLAEGFDTFPTLLCADGCSMIDRRMGVYGYPIEIQALFFMALRSALSMLKPDGDGREVIERIVKRLHALSFHMRNYFWLDHQNLNDIYRFKTEEYSHTAVNKFNVMPDSIPEWVFDFMPLRGGYFVGNVGPAHMDFRWFALGNCVSILSSLATPDQSMAIMDLLEHRWAELVGEMPLKICYPCLEGHEWRIVTGCDPKNTRWSYHNGGSWPVLLWQLTAACIKTGRPQIARRAVDLIESRLHRDCWPEYYDGKLGRYVGKQARKYQTWSIAGYLVAKMLLEDPSHIGMISLEEDKLMKPVIKRSASWPQL

SEQ ID NO: 84542 - protein, 534 aa, Arabidopsis thaliana
  peptide (1)..(534): Ceres Seq. ID no. 12675675
MDDLDLTRALDKPRLKIERKRSFDERSMSELSTGYSRHDGIHDSPRGRSVLDTPLSSARNSFEPHPMMAEAWEALRRSMVFFRGQPVGTLAAVDNTTDEVLNYDQVFVRDFVPSALAFLMNGEPDIVKHFLLKTLQLQGWEKRVDRFKLGEGVMPASFKVLHDPIRETDNIVADFGESAIGRVAPVDSGFWWIILLRAYTKSTGDLTLSETPECQKGMKLILSLCLAEGFDTFPTLLCADGCSMIDRRMGVYGYPIEIQALFFMALRSALSMLKPDGDGREVIERIVKRLHALSFHMRNYFWLDHQNLNDIYRFKTEEYSHTAVNKFNVMPDSIPEWVFDFMPLRGGYFVGNVGPAHMDFRWFALGNCVSILSSLATPDQSMAIMDLLEHRWAELVGEMPLKICYPCLEGHEWRIVTGCDPKNTRWSYHNGGSWPVLLWQLTAACIKTGRPQIARRAVDLIESRLHRDCWPEYYDGKLGRYVGKQARKYQTWSIAGYLVAKMLLEDPSHIGMISLEEDKLMKPVIKRSASWPQL

SEQ ID NO: 84543 - DNA, 1732 bp, Arabidopsis thaliana
  misc_feature (1)..(1732): Ceres Seq. ID no. 12675680
  misc_feature (1)..(1732): Ortholog of  Ceres SEQ ID NO 13596509 as cited in SEQ ID NO 62004
  misc_feature (1)..(1732): Ortholog of  Ceres SEQ ID NO 13500385 as cited in SEQ ID NO 67583
tcttcttcttcttcaaatcgagatcgaagaagaaccaacaaaaaaccaaaaatggagacgaagccaaaccctagacgtccttcaaacacagttctaccatatcaaacaccacgattaagagatcattaccttctgggaaaaaagctaggccaaggccaatttggaacaacctatctctgcacagagaaatcaacctccgctaattacgcctgcaaatcgatcccgaagcgaaagctcgtgtgtcgcgaggattacgaagatgtatggcgtgagattcagatcatgcatcatctctctgagcatccaaatgttgttaggatcaaagggacttatgaagattcggtgtttgttcatattgttatggaggtttgtgaaggtggtgagctttttgatcggattgtttctaaaggtcattttagtgagcgtgaagctgtcaagcttattaagacgattcttggtgttgttgaggcttgtcattctcttggtgttatgcatagagatctcaaacctgagaatttcttgtttgatagtcctaaagatgatgctaagcttaaggctaccgattttggtttgtctgtcttctataagccaggacaatatttatatgacgtagttggaagtccgtactatgttgcaccagaggtgctaaagaaatgttatggacctgaaatagatgtgtggagtgctggtgttatcctctacattttactcagcggtgttcctcccttctgggcagagactgagtctggaatctttagacagatattgcaagggaagttagatttcaaatctgacccgtggcctactatctcagaagctgctaaagatttgatctataaaatgctcgaaaggagccccaagaaacgcatttctgctcatgaagccttgtgtcacccatggattgtcgatgaacaagcagcaccagacaagcctcttgatccagcagtcttatctcgtctaaagcagttttctcaaatgaataagattaagaaaatggcattacgggtaattgctgagagactttcagaggaagaaattggaggtctgaaggaattgttcaagatgatagacacagacaacagcggaacgattacttttgaagagctcaaagcgggtttgaagagagtcggatctgaactgatggaatcagaaatcaagtctctcatggatgcggctgatatcgacaacagtggtacaatagactacggagaattcctagcagcaaccttacacatgaacaagatggagagagaggagaatctggtggctgcattttcgtactttgacaaagacggaagcggttatatcaccatcgatgagcttcagtcagcttgcacagagtttggtctatgtgatacacctctggacgacatgatcaaggagattgatcttgacaatgacgggaagatcgatttctcggagtttacagcaatgatgaggaaaggagatggagttgggagaagcagaaccatgatgaagaacttgaacttcaacattgctgatgcttttggagttgatggtgaaaaatctgatgactgactcatcattcttccacaatttctgttttttttctctttaatttcgtttatattttgaattctaatttctaaggatacaaaaatatattctggcttgttttttgctttcctttttatttttgtacatgagcaactttctaaatttttatcctcatatggataatttttgcttcatataaaagtttttgaattcc

SEQ ID NO: 84544 - protein, 512 aa, Arabidopsis thaliana
  peptide (1)..(512): Ceres Seq. ID no. 12675681
SSSSSNRDRRRTNKKPKMETKPNPRRPSNTVLPYQTPRLRDHYLLGKKLGQGQFGTTYLCTEKSTSANYACKSIPKRKLVCREDYEDVWREIQIMHHLSEHPNVVRIKGTYEDSVFVHIVMEVCEGGELFDRIVSKGHFSEREAVKLIKTILGVVEACHSLGVMHRDLKPENFLFDSPKDDAKLKATDFGLSVFYKPGQYLYDVVGSPYYVAPEVLKKCYGPEIDVWSAGVILYILLSGVPPFWAETESGIFRQILQGKLDFKSDPWPTISEAAKDLIYKMLERSPKKRISAHEALCHPWIVDEQAAPDKPLDPAVLSRLKQFSQMNKIKKMALRVIAERLSEEEIGGLKELFKMIDTDNSGTITFEELKAGLKRVGSELMESEIKSLMDAADIDNSGTIDYGEFLAATLHMNKMEREENLVAAFSYFDKDGSGYITIDELQSACTEFGLCDTPLDDMIKEIDLDNDGKIDFSEFTAMMRKGDGVGRSRTMMKNLNFNIADAFGVDGEKSDD

SEQ ID NO: 84545 - protein, 495 aa, Arabidopsis thaliana; identical to SEQ ID NO: 83026
  peptide (1)..(495): Ceres Seq. ID no. 12675682

SEQ ID NO: 84546 - protein, 418 aa, Arabidopsis thaliana; identical to SEQ ID NO: 83027
  peptide (1)..(418): Ceres Seq. ID no. 12675683

SEQ ID NO: 84547 - DNA, 2430 bp, Arabidopsis thaliana
  misc_feature (1)..(2430): Ceres Seq. ID no. 12675688
  misc_feature (1)..(2430): Ortholog of  Ceres SEQ ID NO 13587235 as cited in SEQ ID NO 0
cagcttccgaagtcttcatctttctcgacaatatctaaaccttgtctgagaatcatttgaagaagatctttcatcatcaccgatccactttctgatttaggtcaatggaacagacaaaggatgattctgattttgaggatgattgtgaaacgaagaagatggagactgatacatcagctcaagaggcaaggaatggtaaagacatacaagggattcagtgggaagggtttaagtataatagagacgagtttcgtgagactaggttgaaacaatatgataactttgttaatatcttaaggcctagctctcgagaaaagcttgataaggaacatgggcaagtagttgagaaaggaaagaacttttatgacttccaattcaatacaaggcttgtcacttccactattgtgcattttcaggtagagattttgtgtctgctgattcattaccaaccactatgtaaaagatgaatctttcttcaaatttaagagtttataggcagatcatttgcatcattattggattaagttaatattttgttcaatattggtttagttggtagataattaaagcataggttaaattgcatctcatttgaaaaatctatgaatttcaaaatggtttcgatgaggtataacaaatatatgagcaggtagcttttgtctaagaaagtgcttcaggttgactaaattgttctctgagtacagttcatgactaccagcatccatggtgatactatcctctttccattttctttttgaatttattaactttatgctttcagaaatcgaaggcctgcgctcgggttttctattcgctgtaatcctttttctgcagaggtctcggcggatgcttgtatagttgtatttatattttgcttttctaaaatgtttcttaaatgttaagttcatcatatcagactgcatcaagtgactttatcagccaatatcgaacaaaatcacagacttaagtatgaaactagagtcgggctttaaagttgttatgcacgttgtatgaataaagtgagggttggaacaatcatatactacatcgtttttgcactgtactttgcatatatcctcttctgcagatctgcggtgtgtttattctaatttgaacatggcttatcaacatattactcaataatttgtggcacttagggatattttcctctaatttcaacctctgatgcagttgggagtactgtctgagcagccagcagcataacgatatggcttcggaatttggtatgggcgacatctaagcatgatgtatatctaatgcaaaattattcactcatgcactggtcatctctactccagagagggaaagaagtacttaatgtcgccagatcagttacccccactcagaaactacctggattgttttctgagccactctctagggtgcaagttagcagcatggcagtcaaagaaaatctgatccttttaggagggttcgacggggagcttctctgcaagtgtgtaaatcagcctggggttgctttttgcacaagattatcaacggaagataatgccatcacaaacacagttgatatataccgagacccaagtggctcccttaggcttataaccgcaaataacgactgtaaaattcgtgtattcgatgctcagagctttacacgtgtcagtgaatttgctttagattggtctgtcaataatacctcagttagcccggatgggaagctactcgctgtagtcggggacagtacagaatgcttgatctctgattcccattctggaaaagttatttcaagcctcagaggccacaaagactactcatttgcatctgcttggcacccgaatggtctaatcttagcaacgggaaaccaagacacggcatgccgtctctgggacattcgtaacccgtcagaatcattcgctgtcctgaaaggaaacatgggagccatcagaggactgaagttcacaccagaagggcggtttcttgcaatggctgagcctgcagactttgttcacatcttcgacacgcagtccgggtttctacagtcccaagagattgatctgtttggagaaatagccgggatctcgttcagccccgatacagaggcactatatgtaggggtcgcagaccgcacttatggaagtttgctggagtataagaggagaaaggataatcactatatggactccttttactgagaaaaggtaaatgaaaagtaaaaagcatctaatatgttgtcacaagatgggtttaaccctattagtgtgtatatgtagacagaattggtagtttctttggtaatatctgttatgtacccataatatatcttaccaaactttaagtatgttttgttaattgtgattgtttttactatttaggggtccgagacttgtagattaaacaggccatatacggcattgtgcttgggtttgagactccacatttgtcaac

SEQ ID NO: 84548 - protein, 299 aa, Arabidopsis thaliana; identical to SEQ ID NO: 74702
  peptide (1)..(299): Ceres Seq. ID no. 12675689

SEQ ID NO: 84549 - protein, 293 aa, Arabidopsis thaliana; identical to SEQ ID NO: 74703
  peptide (1)..(293): Ceres Seq. ID no. 12675690

SEQ ID NO: 84550 - protein, 252 aa, Arabidopsis thaliana; identical to SEQ ID NO: 74704
  peptide (1)..(252): Ceres Seq. ID no. 12675691

SEQ ID NO: 84551 - DNA, 2448 bp, Arabidopsis thaliana
  misc_feature (1)..(2448): Ceres Seq. ID no. 12675692
  misc_feature (1)..(2448): Ortholog of  Ceres SEQ ID NO 13597732 as cited in SEQ ID NO 64810
acagaaccaaaaaagcgaattaggtcaaaaaaacaaatcccaaatcttcatcatcttcaacgtttatggatttgagtcgttctcaaacaaattttcaattagggtttggttgttcacacgcatcaatgactccaacaccaacaccaagagctccaatcgcagacgattcgattaatctacaagtcgatcaaagtttccgatcattaccaacaactttctctccgattccgttacaattactcgaacaaaaagccgagaagaccaccaccgttgatgagccaaagaaagatggaggaggaggaggagatcaaaaggaagacgagcatttcagaatcttaggtcaccatatgtgtctcaaaaggcaaagagattgtccacttttgttaacgcaatcaaagcatccgaagagaagttccatcggtgattcagatctggaatcgcgacgtgctgctgtacgagcttggggtgatcaaccgattcatttggcggatcctgatattcatgagcttatggagaaagagaagcaacgacaagtaagaggaattgaattgattgcttctgagaatttcgtgtgtagagctgtaatggaagctttaggtagtcatttaacgaataaatactctgaaggtatgcctggagctagatactatactgggaatcaatatattgatcagattgagaatctctgtattgagcgtgctcttactgcgtttggtcttgaatctgataaatggggtgttaatgttcagccttattcttgtacttctgctaacttcgcggtgtataccggacttttattgcccggtgaacggattatggggcttgattcgccttctggtggtcatatgagtcatggttattgtactcctggtgggaagaagatttcggctgcttccatcttctttgagagttttccttataaagtgaatcctcaaactgggtatattgattatgataagcttgaagataaggcgcttgattaccgtcctaagattcttatttgtggtgggagttcttatcctagggattgggattttgcaagggttagacagattgcagataagtgtggagctgttttgatgtgtgatatggctcatattagcggtcttgttgcaactaaggttcgaatcttctactactatacttttattgatatgttgattagttctgagatttttaatggtttaggttgcatgtctagttattgaatgtcagaggtagcagtattagatagtttcaatttggttaggccatgtattgatataatgtgtttgtgttatgattgttctatgttctattgaaaccttagattgtttgattactttctatgcaaagtctttttctgtggtgactttgaaataatatgatgaatgagtttttggtgtgtcagtcaatattgtttgaaactattcgtatatgtagacttttgttatgattctgttccaggaaatattgtttctgaatttggtttggtatttttgttatctacaggaatgttcaaatccatttgatcactgtgacatagtaacctccactactcacaaaggtctacgtggtcctagaggaggtatcatcttctacaggagaggcccaaagataagaaagcagggccatcactctagccattgtgacacttccacgcattacgatctagaggaaaagatcaactttgctgtttttccatctctacaaggaggtccacacaacaaccatatcgctgctcttgccattgcattgaaacaagtggccactccagagtacaaagcttacatacaacagatgaagaaaaacgcccaagctttagcagcagctcttcttagaagaaaatgcagactggttactggtggtacagacaaccatttgttgctgtgggatctcactcctatgggcttaacagggaaagtctacgagaaagtgtgtgagatgtgccatatcactttaaacaagacggctatattcggggacaatggtacaatatctcctggaggtgtaagaataggtaagcacagatagattggtttgcatattgtttttgagttagcgacatgtcacattcgtattcacatcgatccttttatcaatagggacacccgcaatgacaacccgaggctgtatagagtctgatttcgagacaatggcggattttctgataaaggcggctcagataacaagtgcgttgcagagagagcatggaaagtcacacaaggagtttgtgaaaagtttatgcaccaacaaagacatagctgagcttagaaaccgagtcgaagcatttgctttgcagtatgagatgcctgcttctcttattcgaattgaatgaaagaaaactccacacaacagctttatttacagttgaattttatcttatctctgggtcaatttttttttttttttttggagttctatcttgtaaattagagtaaatatatatttatattgggattgatttgc

SEQ ID NO: 84552 - protein, 380 aa, Arabidopsis thaliana
  peptide (1)..(380): Ceres Seq. ID no. 12675693
MDLSRSQTNFQLGFGCSHASMTPTPTPRAPIADDSINLQVDQSFRSLPTTFSPIPLQLLEQKAEKTTTVDEPKKDGGGGGDQKEDEHFRILGHHMCLKRQRDCPLLLTQSKHPKRSSIGDSDLESRRAAVRAWGDQPIHLADPDIHELMEKEKQRQVRGIELIASENFVCRAVMEALGSHLTNKYSEGMPGARYYTGNQYIDQIENLCIERALTAFGLESDKWGVNVQPYSCTSANFAVYTGLLLPGERIMGLDSPSGGHMSHGYCTPGGKKISAASIFFESFPYKVNPQTGYIDYDKLEDKALDYRPKILICGGSSYPRDWDFARVRQIADKCGAVLMCDMAHISGLVATKVRIFYYYTFIDMLISSEIFNGLGCMSSY

SEQ ID NO: 84553 - protein, 360 aa, Arabidopsis thaliana
  peptide (1)..(360): Ceres Seq. ID no. 12675694
MTPTPTPRAPIADDSINLQVDQSFRSLPTTFSPIPLQLLEQKAEKTTTVDEPKKDGGGGGDQKEDEHFRILGHHMCLKRQRDCPLLLTQSKHPKRSSIGDSDLESRRAAVRAWGDQPIHLADPDIHELMEKEKQRQVRGIELIASENFVCRAVMEALGSHLTNKYSEGMPGARYYTGNQYIDQIENLCIERALTAFGLESDKWGVNVQPYSCTSANFAVYTGLLLPGERIMGLDSPSGGHMSHGYCTPGGKKISAASIFFESFPYKVNPQTGYIDYDKLEDKALDYRPKILICGGSSYPRDWDFARVRQIADKCGAVLMCDMAHISGLVATKVRIFYYYTFIDMLISSEIFNGLGCMSSY

SEQ ID NO: 84554 - protein, 286 aa, Arabidopsis thaliana
  peptide (1)..(286): Ceres Seq. ID no. 12675695
MCLKRQRDCPLLLTQSKHPKRSSIGDSDLESRRAAVRAWGDQPIHLADPDIHELMEKEKQRQVRGIELIASENFVCRAVMEALGSHLTNKYSEGMPGARYYTGNQYIDQIENLCIERALTAFGLESDKWGVNVQPYSCTSANFAVYTGLLLPGERIMGLDSPSGGHMSHGYCTPGGKKISAASIFFESFPYKVNPQTGYIDYDKLEDKALDYRPKILICGGSSYPRDWDFARVRQIADKCGAVLMCDMAHISGLVATKVRIFYYYTFIDMLISSEIFNGLGCMSSY

SEQ ID NO: 84555 - DNA, 1107 bp, Arabidopsis thaliana
  misc_feature (1)..(1107): Ceres Seq. ID no. 12675733
  misc_feature (1)..(1107): Ortholog of  Ceres SEQ ID NO 15170617 as cited in SEQ ID NO 52614
aatttgcaaaatcgaatttgtgtggagaaagaagctcgtcaccaagactgaatttgtggctacgtctaaaacacattcttccacatctcttctctgtttctcaagacaaaaaaagaaaaaatggtggaagatgaacaatgacgaagaatcattgttattgttcatgcattaaccttgttgttatgttcctccatggcctgttacatcgttccttattaccaccatcctgttttgtctcatcccaatagagaaatcttcagtcaccgtcaccaccaccaccaccgtttctgcaacaatctcttgaatagaagaattagtgttcctcgaagctccgctattagtgacggtggtgtctcctacaatactctagtctccgaggcggtgaggcttttggttccacaagcaaactttgattcttcaaagcttaaagttgagttcttaggagagttattggagaacaagagtaacggaggaattattacgccgcggacttatattctttcgcattgtgacttcactgctaacttaacgttaacaatctcaaacgttatcaatctggatcaactagaaggctggtacaagaaagatgatgtggttgctgagtggaagaaggtgaatgatgagctgcgtttacatattcattgttgtgtgagtggtatgagtttattgcaggatgttgctgctgagcttaggtatcatattttctccaaggaattgcctttggtacttaaagctgtggtgcatggagattcagttatgtttagagagaatcctgagctaatggatgcttatgtatgggtttatttccattcaagcacacctaagtacaatcggatcgagtgttggggacctcttaaggatgctgcgaagggaaagcagcagggcaatcatcaaggcttcttgagttcgacgacttcgaggaaattgattcgacataagtctatcttccataccttatttacgtttcttctgtgagacaaagttgtacattctcctgtgtttttttttgcaaatgatgtagatttcttaatgagcatctgacacaagtgcaatttgccaacattcaaatgttcatacttgggaaatttatgagagcctagttttctt

SEQ ID NO: 84556 - protein, 260 aa, Arabidopsis thaliana; identical to SEQ ID NO: 28193
  peptide (1)..(260): Ceres Seq. ID no. 12675734

SEQ ID NO: 84557 - DNA, 429 bp, Arabidopsis thaliana
  misc_feature (1)..(429): Ceres Seq. ID no. 12675771
  misc_feature (1)..(429): Ortholog of  Ceres SEQ ID NO 15178884 as cited in SEQ ID NO 0
atatcactaacccaaaaacaaaacaaaaaatgggtttcattggtaagagtgtattagtgagtctcgtagcactttggtgcttcacttcctctgtcttcactgaagaagtgaaccataagactcaaaccccttctctagctcctgctcctgctccttaccaccacggccaccaccacccacaccctcctcatcaccaccaccctcaccctcaccctcacccccacccaccggccaaatctcctgttaaacccccggttaaggcaccagtgtctccaccagccaaacctccggttaagcccccggtttacccacccaccaaagccccggtgaaacccccaactaaacccccggtcaagccacctgtttccccaccagccaaacctccggttaagccaccagtttaccctccaaccaaagctccagttaagc

SEQ ID NO: 84558 - protein, 142 aa, Arabidopsis thaliana
  peptide (1)..(142): Ceres Seq. ID no. 12675772
ITNPKTKQKMGFIGKSVLVSLVALWCFTSSVFTEEVNHKTQTPSLAPAPAPYHHGHHHPHPPHHHHPHPHPHPHPPAKSPVKPPVKAPVSPPAKPPVKPPVYPPTKAPVKPPTKPPVKPPVSPPAKPPVKPPVYPPTKAPVK

SEQ ID NO: 84559 - protein, 133 aa, Arabidopsis thaliana
  peptide (1)..(133): Ceres Seq. ID no. 12675773
MGFIGKSVLVSLVALWCFTSSVFTEEVNHKTQTPSLAPAPAPYHHGHHHPHPPHHHHPHPHPHPHPPAKSPVKPPVKAPVSPPAKPPVKPPVYPPTKAPVKPPTKPPVKPPVSPPAKPPVKPPVYPPTKAPVK

SEQ ID NO: 84560 - DNA, 2001 bp, Arabidopsis thaliana
  misc_feature (1)..(2001): Ceres Seq. ID no. 12675775
  misc_feature (1)..(2001): Ortholog of  Ceres SEQ ID NO 14301920 as cited in SEQ ID NO 69277
tttcttcattactcttctttttattttccggagatttttctctttgcctttgttatttgctgcttttgctgcatttgctgcttctacttcagaatcttgtgtttttgtggtggggaggtgagatttcttatgacggggaagcgatcaaagactaattgcagatctgcttctcacaagctcttcaaggataaggctaagaaccgtgttgatgatttgcaaggcatgcttttggatcttcagtttgcgaggaaagagagtaggcctactgatgttactcttcttgaggagcaagtgaatcagatgcttcgtgagtggaaatctgagctcaatgagccttctccagcttcatccttgcaacaaggtggtactctggggtctttctcatcagatatttgtcggctgctgcagctctgtgatgaggaagatgatgctaccagcaaattagctgcccccaagcccgagcctgctgatcagaatctcgaagctggcaaagctgctgtcttccaaaggggatacaatttggttcaggggaagtcagaacatggattaccattggttgataattgcaaagatttgtccttagcagctggtaacaatttcgatggaacggctcctttggagtatcatcagcagtatgatctgcaacaagagtttgaaccaaacttcaatggtggtttcaacaattgtcccagttatggtgtagtagagggtcctatacatatctctaattttatcccgactatttgtcctccaccctctgcattcttgggtccaaaatgtgctctttgggattgccctaggccagctcagggatttgattggttccaggattactgcagcagcttccacgctgcactggctttcaatgaagggccaccaggtatgaatccggtggtgcgtcctggaggtatcggcctaaaagacggtctgctttttgctgctcttagtgcaaaggctggagggaaagatgttggtattcccgaatgtgaaggagctgcaactgctaaatctccatggaatgctccagagctctttgatctcacggttctggagagtgagacactaagggagtggctattctttgacaagccaaggagggcctttgagagcgggaacagaaagcaaagatctttaccagactacaatggtcgtggttggcacgagtcacgtaaacagatcatggtcgagtttggagggctgaagagatcttactacatggatccacagcctctgcaccatttcgaatggcatctttacgaatatgagatcaacaagtgtgatgcttgtgccttgtacaggctcgagctcaagcttgttgacgggaagaagacttcaaaaggcaaagtctcaaacgactcagtggctgatctgcagaagcagatgggaagactcacagctgagttccctccagaaaacaataccactaacaccaccaacaacaacaaacgctgcatcaaaggaagaccaaaagtgagcacaaaagtcgccaccgggaatgttcagaacacagtagagcaggcaaatgactatggagtaggtgaagagtttaactatctggtcggaaatctaagcgactattatatcccctgagacgaatgtggaaaaactcaggtttaaaaagctgtttgcttaccatttaattaggcagcagcagaagaagcttctacatatcgtagggcaaagtaatggattttcatgactcgtatcttttttttctcttatataatagttctctgtctatctatggagattatgtatatataacaagaagtggatgctgaagactgtcctggagttaggaatagtaaatgtgacgaaggagactgctttttaagattcagtctatggaggtgaagacatatttactgacattccggtttatatattttgatgcattttcgactctcttctgcgatataatgcagatgacaaattatgtaaccgatggggaaatacggttttgagtatcagtgttgttcttatagaatcaggaccttgttc

SEQ ID NO: 84561 - protein, 529 aa, Arabidopsis thaliana
  peptide (1)..(529): Ceres Seq. ID no. 12675776
FLHYSSFYFPEIFLFAFVICCFCCICCFYFRILCFCGGEVRFLMTGKRSKTNCRSASHKLFKDKAKNRVDDLQGMLLDLQFARKESRPTDVTLLEEQVNQMLREWKSELNEPSPASSLQQGGTLGSFSSDICRLLQLCDEEDDATSKLAAPKPEPADQNLEAGKAAVFQRGYNLVQGKSEHGLPLVDNCKDLSLAAGNNFDGTAPLEYHQQYDLQQEFEPNFNGGFNNCPSYGVVEGPIHISNFIPTICPPPSAFLGPKCALWDCPRPAQGFDWFQDYCSSFHAALAFNEGPPGMNPVVRPGGIGLKDGLLFAALSAKAGGKDVGIPECEGAATAKSPWNAPELFDLTVLESETLREWLFFDKPRRAFESGNRKQRSLPDYNGRGWHESRKQIMVEFGGLKRSYYMDPQPLHHFEWHLYEYEINKCDACALYRLELKLVDGKKTSKGKVSNDSVADLQKQMGRLTAEFPPENNTTNTTNNNKRCIKGRPKVSTKVATGNVQNTVEQANDYGVGEEFNYLVGNLSDYYIP

SEQ ID NO: 84562 - protein, 486 aa, Arabidopsis thaliana; identical to SEQ ID NO: 22584
  peptide (1)..(486): Ceres Seq. ID no. 12675777

SEQ ID NO: 84563 - protein, 455 aa, Arabidopsis thaliana; identical to SEQ ID NO: 22585
  peptide (1)..(455): Ceres Seq. ID no. 12675778

SEQ ID NO: 84564 - DNA, 831 bp, Arabidopsis thaliana
  misc_feature (1)..(831): Ceres Seq. ID no. 12675783
  misc_feature (1)..(831): Ortholog of  Ceres SEQ ID NO 13624608 as cited in SEQ ID NO 0
ataacaaactcatcaaacttcctcagcgtttctttttcttacataaacaatttttcttacataaacaaatcttgttgtttgttgttgtcatggcaccgacagttaaaacggcggccgtcaaaaccaacgaaggtaacggagtccgttacagaggagtgaggaagagaccatggggacgttacgcagccgagatcagagatcctttcaagaagtcacgtgtctggctcggtactttcgacactcctgaagaagccgctcgtgcctacgacaaacgtgctattgagtttcgtggagctaaagccaaaaccaacttcccttgttacaacatcaacgcccactgcttgagtttgacacagagcctgagccagagcagcaccgtggaatcatcgtttcctaatctcaacctcggatctgactctgttagttcgagattcccttttcctaagattcaggttaaggctgggatgatggtgttcgatgaaaggagtgaatcggattcttcgtcggtggtgatggatgtcgttagatatgaaggacgacgtgtggttttggacttggatcttaatttccctcctccacctgagaactgattaagatttaattatgattattagatataattaaatgtttctgaattgagtattatttgatcatcatctaagtagaagctttaagtttaagtggtgccaataatttttttttttttttttggtcatcagcagatagttttaaagaattttttagtgttgagatcgtgtttcgttcagatctgctgatgttcttttaaatatcattaatgataatcctgatcaactaaaatgatactttgtt

SEQ ID NO: 84565 - protein, 195 aa, Arabidopsis thaliana
  peptide (1)..(195): Ceres Seq. ID no. 12675784
NKLIKLPQRFFFLHKQFFLHKQILLFVVVMAPTVKTAAVKTNEGNGVRYRGVRKRPWGRYAAEIRDPFKKSRVWLGTFDTPEEAARAYDKRAIEFRGAKAKTNFPCYNINAHCLSLTQSLSQSSTVESSFPNLNLGSDSVSSRFPFPKIQVKAGMMVFDERSESDSSSVVMDVVRYEGRRVVLDLDLNFPPPPEN

SEQ ID NO: 84566 - protein, 166 aa, Arabidopsis thaliana; identical to SEQ ID NO: 20881
  peptide (1)..(166): Ceres Seq. ID no. 12675785

SEQ ID NO: 84567 - DNA, 1530 bp, Arabidopsis thaliana
  misc_feature (1)..(1530): Ceres Seq. ID no. 12675796
  misc_feature (1)..(1530): Ortholog of  Ceres SEQ ID NO 13662745 as cited in SEQ ID NO 66320
  misc_feature (1)..(1530): Ortholog of  Ceres SEQ ID NO 13660029 as cited in SEQ ID NO 67353
ttcttcttcttatttcttctataccgtcgtcgaaaagctttaccaaaatctcacgcccccgacgattcatcgtttcatagggatttgagtttgcactaaacccacaatggtttcctatcgtgctaccacagagacgatttccctggctttagaagccaacagctcggaggctattacgatactgtaccaggttttggaagacccttcttcatctcctgaggctatacggatcaaggagcaagcgattacaaacctttgtgatcgattgactgaagagaagagaggtgaggatctccggaaactgttgaccaagttgaggcctttcttttccttaatccccaaggcgaaaactgcgaaaatcgtcagaggaatcattgatgctgtggcaaagattcctggaacaactgatctccagatcactctctgcaaagagatggtcgaatggacccgcgctgagaagcgtactttcctcaggcagcgagtagaggctaggcttgcagctcttttgatggagaacaaggagtatgttgaagctttggcgttgttgagtactttggtaaaagaggttaggagattagatgataagctccttctggtcgacatagacttgctggagagcaaacttcacttctcattgagaaacttacccaaggcaaaagctgcactcactgcagctaggacagctgctaacgctatatatgtcccaccagctcaacaaggcacgatagatctgcagagtgggattcttcatgctgaagagaaagactacaaaaccggatacagttacttctttgaagcctttgagtccttcaacgctctcggagatccgagagcggttttcagtttgaagtacatgttactgtgcaagatcatggttagccaagctgatgatgttgcaggaataatctcctcaaaggctggactacagtacgttggccctgacctggatgccatgaaagcagtcgctgatgctcactcgaagaggtccttgaagttgtttgagaacgcactccgtgactacaaagcacagcttgaagatgacccaattgtccacaggcatctctcttctctctatgacacgcttctggagcaaaatctgtgtcgtttgatcgagcccttctcaagagttgagatagctcacattgctgagctcattggattgccgctcgaccatgtggaaaagaagctatctcagatgatactcgacaagaaatttgcaggtaccttggatcaaggagctggatgcctcatcatcttcgaagacccaaaggcagatgctatctactcggctaccctcgaaaccattgcaaacatggggaaggtcgtcgacagcctttatgtccggtctgccaaaatcatgtcctgagagagtgagtgagttggtcgtatgaatctcattctatcgttctttctttctggttttagatatcgtttggactcaaagaaactgatgtttctcaatggagaaagtaaacttgtctgaattgttcacattactcgttttgcttatgatcttattatgtcatggtt

SEQ ID NO: 84568 - protein, 419 aa, Arabidopsis thaliana
  peptide (1)..(419): Ceres Seq. ID no. 12675797
MVSYRATTETISLALEANSSEAITILYQVLEDPSSSPEAIRIKEQAITNLCDRLTEEKRGEDLRKLLTKLRPFFSLIPKAKTAKIVRGIIDAVAKIPGTTDLQITLCKEMVEWTRAEKRTFLRQRVEARLAALLMENKEYVEALALLSTLVKEVRRLDDKLLLVDIDLLESKLHFSLRNLPKAKAALTAARTAANAIYVPPAQQGTIDLQSGILHAEEKDYKTGYSYFFEAFESFNALGDPRAVFSLKYMLLCKIMVSQADDVAGIISSKAGLQYVGPDLDAMKAVADAHSKRSLKLFENALRDYKAQLEDDPIVHRHLSSLYDTLLEQNLCRLIEPFSRVEIAHIAELIGLPLDHVEKKLSQMILDKKFAGTLDQGAGCLIIFEDPKADAIYSATLETIANMGKVVDSLYVRSAKIMS

SEQ ID NO: 84569 - protein, 310 aa, Arabidopsis thaliana
  peptide (1)..(310): Ceres Seq. ID no. 12675798
MVEWTRAEKRTFLRQRVEARLAALLMENKEYVEALALLSTLVKEVRRLDDKLLLVDIDLLESKLHFSLRNLPKAKAALTAARTAANAIYVPPAQQGTIDLQSGILHAEEKDYKTGYSYFFEAFESFNALGDPRAVFSLKYMLLCKIMVSQADDVAGIISSKAGLQYVGPDLDAMKAVADAHSKRSLKLFENALRDYKAQLEDDPIVHRHLSSLYDTLLEQNLCRLIEPFSRVEIAHIAELIGLPLDHVEKKLSQMILDKKFAGTLDQGAGCLIIFEDPKADAIYSATLETIANMGKVVDSLYVRSAKIMS

SEQ ID NO: 84570 - protein, 285 aa, Arabidopsis thaliana
  peptide (1)..(285): Ceres Seq. ID no. 12675799
MENKEYVEALALLSTLVKEVRRLDDKLLLVDIDLLESKLHFSLRNLPKAKAALTAARTAANAIYVPPAQQGTIDLQSGILHAEEKDYKTGYSYFFEAFESFNALGDPRAVFSLKYMLLCKIMVSQADDVAGIISSKAGLQYVGPDLDAMKAVADAHSKRSLKLFENALRDYKAQLEDDPIVHRHLSSLYDTLLEQNLCRLIEPFSRVEIAHIAELIGLPLDHVEKKLSQMILDKKFAGTLDQGAGCLIIFEDPKADAIYSATLETIANMGKVVDSLYVRSAKIMS

SEQ ID NO: 84571 - DNA, 1483 bp, Arabidopsis thaliana
  misc_feature (1)..(1483): Ceres Seq. ID no. 12675804
  misc_feature (1)..(1483): Ortholog of  Ceres SEQ ID NO 14314363 as cited in SEQ ID NO 52272
acttgagtttcgtcttccattcctgttttttttcagagaccggcaaaataaaaaaaaagaagatcgtacaactaaaaatacctcaaagaaggaagatacaaaagtagtaacctttgttggtgattgatactatatctgttgtgggttttagacaaagaccacgtctttgcagttgtagattggaattttccggatctttctctaaatcgctttttctccgagcaacttttgtttggggttaagctcaaagaatccgttcttttcagtctttactccatctagggtaccacgattggatcggtttttatctgatgatttagtaacagagattttgaagaaaaagaaaaatgggagatactagtccaagaacatcagtctcaacagatggagacactgatcataataacctaatgttcgatgaagggcatttgggtatcggtgcttctgattctagtgaccgttcaaagagtaaaatggatcaaaagacgcttcgtaggctcgctcaaaaccgtgaggctgcaaggaaaagcagattgaggaagaaagcatatgttcagcagctagagaacagtcgattgaagctaacacaacttgagcaggagctacaaagagcacggcaacagggtgtctttatctcaagctctggagaccaagcccattctaccgctggagatggggcaatggcatttgatgtagaatacagacgatggcaggaagataaaaacagacagatgaaggagctgagttctgctatagattctcacgcgactgattctgagcttcggataattgtagatggagtaatagctcactatgaggagctttacaggataaaaggcaacgcagctaagagtgatgtcttccatttattatcagggatgtggaaaaccccagctgagagatgtttcttgtggctcggcggtttccgttcatcagaacttctcaagcgagtcagttggagcccttgacagaacaacaatcgctagacataaataacttgcaacagtcttctcagcaagcagaagatgctttgtctcaagggatggacaacttacagcaatcactcgctgatactttatcgagtgggactctcggttcaagttcatcagggaatgtagctagctacatgggtcagatggccatggcgatggggaagttaggtacccttgaaggatttatccgccaggctgataacttaaggctacaaacatatcaacagatggtgagactattaacaacccgacaatcggctcgtgctctccttgcagtacacaattatacattgcggttacgtgctcttagctctctatggcttgccagaccaagagagtgaaccatgactctattatacttcaacgaaggtccagaaaatttgagattcttagcataagatttgacgactttagacacgtagctcgtatacaagattatgattatactgttttgtgttgtaatgtttgtgtgtaatgaatgtatcttgaaa

SEQ ID NO: 84572 - protein, 206 aa, Arabidopsis thaliana; identical to SEQ ID NO: 42265
  peptide (1)..(206): Ceres Seq. ID no. 12675805

SEQ ID NO: 84573 - protein, 185 aa, Arabidopsis thaliana; identical to SEQ ID NO: 42266
  peptide (1)..(185): Ceres Seq. ID no. 12675806

SEQ ID NO: 84574 - protein, 164 aa, Arabidopsis thaliana; identical to SEQ ID NO: 42267
  peptide (1)..(164): Ceres Seq. ID no. 12675807

SEQ ID NO: 84575 - DNA, 1684 bp, Arabidopsis thaliana
  misc_feature (1)..(1684): Ceres Seq. ID no. 12675808
  misc_feature (1)..(1684): Ortholog of  Ceres SEQ ID NO 15175898 as cited in SEQ ID NO 57344
atcacaacaaatcaaaaactccaagttcttacctttttcccatttacaatcggtaaatttctccgatcacgagatacaaatttcactttctgatatcttggatcttccgatcactttgaattttttggtttgttgattttttttttttttttgttccataaagttcgaattttttatagagaagaaaccatgaatgctttagctgcaacaaacagaaacttccgtcatgcatctcgaatcctgggtttggattcgaagatcgagagaagtcttatgatcccatttagagaaatcaaggttgagtgtacgattcctaaagacgatggcactctggtttcatacatcggatttagggttcaacatgacaatgctcgtggacccatgaaaggtggaatcagatatcatcctgaggttgatccagatgaagttaacgcactagctcagctgatgacttggaagactgctgtagcagatattccatatggtggtgctaaaggtggaattggatgtagtcctcgtgacttgagtttgagcgagcttgagaggttgactcgtgtgtttacacagaagattcatgatcttatcggtattcataccgatgtgcctgctcctgatatgggcactaacgctcaaaccatggcttggattcttgatgagtactccaagtttcatggtcattcccctgctgttgtcactggaaagcccattgatcttggtggttcattaggtagggaagctgccacaggtcgtggtgtagtatttgccaccgaagctcttcttgctgagtacgggaaatcgattcagggtttgacatttgttattcaagtaaaaccattatcagctaatctcagatctcaagctttattgtgtatatgatataagacagaaatgttgagagatttggatgatatgtgacagggttttgggaatgttggaacatgggctgcgaagctgatccacgagaaaggcggtaaagtggttgcagtaagcgacattactggtgcaatcaggaaccctgaaggtatcgacatcaacgctctcataaaacacaaggacgcaactggaagtctcaatgatttcaatggtggagacgctatgaattcagatgaattgctcattcatgagtgtgatgttctcattccatgcgctcttggtggtgtcctgaacaaggaaaatgctggagatgtgaaggcaaagtttatagtagaggcagctaaccatccaacagatccagatgctgatgagattctgtcgaagaaaggagtgattatacttccagatatctacgcaaacgcaggaggagtgacagtgagttacttcgagtgggtgcagaacattcaaggattcatgtgggaagaggaaaaagtgaacttggagctgcaaaaatacatgactcgagcctttcacaacatcaagacaatgtgccatactcattcttgcaacctccgtatgggagctttcactcttggagttaaccgagtcgctcgagccacccagttgcgtggttgggaagcttaattcagttgaatcccccttatatactctgtttcttgcttgctctgttttccatttttttttttttggtttcattgttactgaaaatcattgagctttccgaaatggaaaaggaaacaaatggattgaataaaaactaacaaattggaataaaatatatgattggatt

SEQ ID NO: 84576 - protein, 228 aa, Arabidopsis thaliana
  peptide (1)..(228): Ceres Seq. ID no. 12675809
MNALAATNRNFRHASRILGLDSKIERSLMIPFREIKVECTIPKDDGTLVSYIGFRVQHDNARGPMKGGIRYHPEVDPDEVNALAQLMTWKTAVADIPYGGAKGGIGCSPRDLSLSELERLTRVFTQKIHDLIGIHTDVPAPDMGTNAQTMAWILDEYSKFHGHSPAVVTGKPIDLGGSLGREAATGRGVVFATEALLAEYGKSIQGLTFVIQVKPLSANLRSQALLCI

SEQ ID NO: 84577 - protein, 200 aa, Arabidopsis thaliana
  peptide (1)..(200): Ceres Seq. ID no. 12675810
MIPFREIKVECTIPKDDGTLVSYIGFRVQHDNARGPMKGGIRYHPEVDPDEVNALAQLMTWKTAVADIPYGGAKGGIGCSPRDLSLSELERLTRVFTQKIHDLIGIHTDVPAPDMGTNAQTMAWILDEYSKFHGHSPAVVTGKPIDLGGSLGREAATGRGVVFATEALLAEYGKSIQGLTFVIQVKPLSANLRSQALLCI

SEQ ID NO: 84578 - protein, 164 aa, Arabidopsis thaliana
  peptide (1)..(164): Ceres Seq. ID no. 12675811
MKGGIRYHPEVDPDEVNALAQLMTWKTAVADIPYGGAKGGIGCSPRDLSLSELERLTRVFTQKIHDLIGIHTDVPAPDMGTNAQTMAWILDEYSKFHGHSPAVVTGKPIDLGGSLGREAATGRGVVFATEALLAEYGKSIQGLTFVIQVKPLSANLRSQALLCI

SEQ ID NO: 84579 - DNA, 1999 bp, Arabidopsis thaliana
  misc_feature (1)..(1999): Ceres Seq. ID no. 12675826
  misc_feature (1)..(1999): Ortholog of  Ceres SEQ ID NO 14310920 as cited in SEQ ID NO 54622
aaaagaattcaaaaaccgtcgaagctctgtcgttcatggagcttcctcaacctcgtcccttcaaaacccaagtcattcaaccgtccacccagatccaaagccaacaccaccaccttcttctcaaggtagtcacttgaaaacccatgattttcttcaaccgttagaatgtgttggtgctaaagaagacgtaagtaggattaactctaccactacagcgtccgagaagccaccgccccctgctccacctccaccgttgcagcacgtgcttcccggtggtatagggacttatacgattagccccattccttacttccatcatcatcatcagagaattcctaagccggagttgtcaccaccaatgatgttcaatgctaatgagagaaacgttttggatgagaattctaactctaattgcagctcgtacgccgctgcatcaagcgggttcactctgtgggatgaatctgcttctgggaagaagggacagacaaggaaggagaatagtgttggggagagagtaaacatgagagctgatgttgcagcaactgtgggacaatggccagtggcggagagacggtcccagtctttgacaaacaaccatatgagcggtttcagttctctctcttcctctcaagggtctgtgcttaagagccagagcttcatggacatgataaggtcagcaaaaggaagttcacaggaagatgatttagatgatgaagaagattttatcatgaagaaagaaagctcctcgactagccagagccatagagtggatttgagggtaaaagcagatgtgagaggctctcctaacgatcaaaagctgaacacacctaggtctaaacattctgctacagagcaacggagaaggagcaagatcaatgatagatttcagatgttgagacaactaatacctaacagcgaccaaaagcgggataaggcctccttcttactagaggttatcgagtatattcaattcttacaagagaaagcagacaagtatgtgacctcttaccaaggatggaatcacgaacctgcgaagctattgaattggcagagtaacaacaaccaacagctagtacctgaaggagttgcttttgctccaaaattggaagaagagaaaaacaacattccggtttcggtccttgcaactgcacaaggtgttgttattgatcatccaacaaccgcgacgacctctccatttccattgtcgattcaaagcaacagttttttctctcctgtgattgcgggtaatcccgtaccccagttccacgcaagagtcgcatcatcagaggctgtagagccaagtccgagttcccggagtcaaaaagaagaagaagatgaggaagttcttgagggtaacatcagaatttcaagtgtttactcacaaggattagtgaaaacactgagagaagcattggagaattcaggagtggacttaacgaaagcaagcatctccgttgaaatcgagctcgctaaacaatcctcgtcttcttccttcaaggatcatgaagttcgtgaaccggtttctcgaaccagaaacgacaatgtcaagcaaactcggaaaccaaaacggctcaagacgggacagtagaagttataaaaacaaaacccaaacacacaatccggtaaaagttaaacaccaaaattgattcctctgtttttttctttaaatcattttatctcaaaaagggattataatttattattatagttatatctttgatttttttcttttgtacatccgaaatcctgttatatatatctcgtgggtccataatcgtatgagacctaagaagactagggcgacccggttatgctaaccgcattttagaacatactcttttgaggaatatatcgttaaggaaggctttcaaagttttctggaagcgtccagtgttaagtgaaaacatttttcactctcttatatacttgatcatctcacactttttatatttgtttcttcctcttactttgttctatggttttcaatgtaattccctgg

SEQ ID NO: 84580 - protein, 528 aa, Arabidopsis thaliana
  peptide (1)..(528): Ceres Seq. ID no. 12675827
KEFKNRRSSVVHGASSTSSLQNPSHSTVHPDPKPTPPPSSQGSHLKTHDFLQPLECVGAKEDVSRINSTTTASEKPPPPAPPPPLQHVLPGGIGTYTISPIPYFHHHHQRIPKPELSPPMMFNANERNVLDENSNSNCSSYAAASSGFTLWDESASGKKGQTRKENSVGERVNMRADVAATVGQWPVAERRSQSLTNNHMSGFSSLSSSQGSVLKSQSFMDMIRSAKGSSQEDDLDDEEDFIMKKESSSTSQSHRVDLRVKADVRGSPNDQKLNTPRSKHSATEQRRRSKINDRFQMLRQLIPNSDQKRDKASFLLEVIEYIQFLQEKADKYVTSYQGWNHEPAKLLNWQSNNNQQLVPEGVAFAPKLEEEKNNIPVSVLATAQGVVIDHPTTATTSPFPLSIQSNSFFSPVIAGNPVPQFHARVASSEAVEPSPSSRSQKEEEDEEVLEGNIRISSVYSQGLVKTLREALENSGVDLTKASISVEIELAKQSSSSSFKDHEVREPVSRTRNDNVKQTRKPKRLKTGQ

SEQ ID NO: 84581 - protein, 409 aa, Arabidopsis thaliana
  peptide (1)..(409): Ceres Seq. ID no. 12675828
MMFNANERNVLDENSNSNCSSYAAASSGFTLWDESASGKKGQTRKENSVGERVNMRADVAATVGQWPVAERRSQSLTNNHMSGFSSLSSSQGSVLKSQSFMDMIRSAKGSSQEDDLDDEEDFIMKKESSSTSQSHRVDLRVKADVRGSPNDQKLNTPRSKHSATEQRRRSKINDRFQMLRQLIPNSDQKRDKASFLLEVIEYIQFLQEKADKYVTSYQGWNHEPAKLLNWQSNNNQQLVPEGVAFAPKLEEEKNNIPVSVLATAQGVVIDHPTTATTSPFPLSIQSNSFFSPVIAGNPVPQFHARVASSEAVEPSPSSRSQKEEEDEEVLEGNIRISSVYSQGLVKTLREALENSGVDLTKASISVEIELAKQSSSSSFKDHEVREPVSRTRNDNVKQTRKPKRLKTGQ

SEQ ID NO: 84582 - protein, 408 aa, Arabidopsis thaliana
  peptide (1)..(408): Ceres Seq. ID no. 12675829
MFNANERNVLDENSNSNCSSYAAASSGFTLWDESASGKKGQTRKENSVGERVNMRADVAATVGQWPVAERRSQSLTNNHMSGFSSLSSSQGSVLKSQSFMDMIRSAKGSSQEDDLDDEEDFIMKKESSSTSQSHRVDLRVKADVRGSPNDQKLNTPRSKHSATEQRRRSKINDRFQMLRQLIPNSDQKRDKASFLLEVIEYIQFLQEKADKYVTSYQGWNHEPAKLLNWQSNNNQQLVPEGVAFAPKLEEEKNNIPVSVLATAQGVVIDHPTTATTSPFPLSIQSNSFFSPVIAGNPVPQFHARVASSEAVEPSPSSRSQKEEEDEEVLEGNIRISSVYSQGLVKTLREALENSGVDLTKASISVEIELAKQSSSSSFKDHEVREPVSRTRNDNVKQTRKPKRLKTGQ

SEQ ID NO: 84583 - DNA, 1298 bp, Arabidopsis thaliana
  misc_feature (1)..(1298): Ceres Seq. ID no. 12675854
  misc_feature (1)..(1298): Ortholog of  Ceres SEQ ID NO 14302514 as cited in SEQ ID NO 65814
tccatttccgtcttcacacagtttagggttcacaacttgattcggatcgaaagcaccgagaagaagaagccaatcaatcatgtctagacaagtggcaaggcttatcggatctctgtcatcaaaagctcgccgttgttctaccggcggctcagaggtttttccgtcatgccagtctctcacttcgttgacccaatctcgctccttcgcgtcggatcctcatcctcctgcggcggttttcgttgacaaaaacacacgagtcctctgtcaaggcatcaccggaaagaacggcactttccacactgaacaagccattgagtacggcaccaaaatggtggcaggagtgacaccgaagaagggtggaacagaacacttgggtctcccagttttcaactctgttgctgaagctaaggctgacaccaaagccaatgcctctgtgatttatgttcctgctccttttgctgctgctgctattatggagggtattgaggctgagttagatcttattgtgtgtatcaccgaaggaatccctcaacatgacatggtacgtgtaaagcatgctcttaacagtcaatcgaaaactaggctgattggtccaaactgccctgggattatcaagcctggtgaatgcaaaattggaattatgccgggatacatccacaagcctgggaagattggaattgtctcacgatctggaaccttgacatatgaagctgttttccaaacaactgcagtgggtctaggccaatctacttgtgtaggaatcggtggggatccttttaacgggacaaactttgtcgactgcttggagaaattctttgttgatcctcaaacagaaggtatcgttctcattggagaaatcggaggcactgcagaagaagatgctgcagcattgataaaggcaagtggtactgagaagcctgttgttgcttttattgctggacttactgcaccaccgggtcgtcgaatgggtcatgccggagccattgtttccggtggtaaaggtacggctcaggacaaaattaagagtttgaatgatgctggagtgaaggttgttgaatctccggctaagattggatcagcgatgtatgagctctttcaagaaagaggtcttttgaagcagtgaagtgaatttcactagctttcgcttctttttttccatcttgaaaccttcaagaaaaaagaaaagaaaaaaaccctaattccacgccattgatggctgcacacttttttggggtttgttttgctatattgatatgatttttccaattgaacagtgataattaaaagagattcaaatc

SEQ ID NO: 84584 - protein, 347 aa, Arabidopsis thaliana; identical to SEQ ID NO: 28445
  peptide (1)..(347): Ceres Seq. ID no. 12675855

SEQ ID NO: 84585 - protein, 264 aa, Arabidopsis thaliana; identical to SEQ ID NO: 28446
  peptide (1)..(264): Ceres Seq. ID no. 12675856

SEQ ID NO: 84586 - protein, 216 aa, Arabidopsis thaliana; identical to SEQ ID NO: 28447
  peptide (1)..(216): Ceres Seq. ID no. 12675857

SEQ ID NO: 84587 - DNA, 1592 bp, Arabidopsis thaliana
  misc_feature (1)..(1592): Ceres Seq. ID no. 12675858
  misc_feature (1)..(1592): Ortholog of  Ceres SEQ ID NO 12626078 as cited in SEQ ID NO 69113
ttacctaatgccatggaaaatgctggtgcagcgcttattcgtgaggttgcgagtaagactaatgactctgctggtgatgggacaaccactgcgtctatccttgctcgggagataatcaaacatggattgttgagcgtcacttctggtgcgaatcccgtttcactcaagaggggaattgataagactgttcaaggtctgatcgaagagcttcagaagaaagctaggcccgtgaaaggtcgtgatgacatcagagctgtggcttctatctctgctggaaatgatgaccttatagggtcaatgattgctgatgccatcgacaaagttggacctgatggtgttttgtccattgaatcttcatcttcttttgagaccacggtcgaagttgaagaagggatggagattgacagaggttacatctcgcctcagtttgttacaaaccctgagaaactactagctgagtttgagaatgctagggtattgatcactgatcagaagatcactgcgatcaaagacatcatccctattttggagaagaccactcagcttcgtgctccgttgttgattattgcagaggatgttactggtgaagccttagctacccttgtcgtgaacaagcttcgtggtgtcctcaatgttgttgccgttaaagcgccaggatttggagaaagaagaaaagccatgcttcaagatattgcaatcttgacaggagctgagtacctagccatggacatgagcttactggttgaaaacgcaaccatagatcaattgggtattgcccgaaaagtcacgattagcaaagattcgactaccctcattgcagatgcagcttccaaggacgaattacaagctcggattgctcagctgaagaaagaactattcgagactgattctgtgtatgactcagagaagctcgctgagagaattgcgaagctatctggaggtgttgctgtcattaaagtcggagcagcaactgaaactgagcttgaggaccgtaagcttcgtatcgaggatgcaaagaacgcaacatttgctgctatcgaggaaggcatagttccaggtggtggtgctgctttggtgcatctctccactgttattcccgccattaaggagacttttgaggatgctgatgaacgtttgggagctgacatagtacaaaaggcattgctgtcaccagctgctcttattgctcagaacgctggagttgaaggagaagttgttgtggaaaagattatgttcagcgattgggagaatgggtacaacgcaatgactgatacatatgagaatctgttcgaagctggagtgattgatccggctaaagtgacaagatgtgcgctacagaacgctgcttccgtagcaggaatggtactgaccactcaggccattgttgttgacaaaccgaaacccaaggctcctgctgctgctgctcctgagggtctcatggtgtaatcaaaacacaacatcttatcatcacaatggcatctttgtctttttgcacatttgtcatccccatttatctgcaatgtttttcttttttgggggaatatgagtagtttgttaacagtatcgagaaataattatcatcttttttgtcc

SEQ ID NO: 84588 - protein, 481 aa, Arabidopsis thaliana
  peptide (1)..(481): Ceres Seq. ID no. 12675859
LPNAMENAGAALIREVASKTNDSAGDGTTTASILAREIIKHGLLSVTSGANPVSLKRGIDKTVQGLIEELQKKARPVKGRDDIRAVASISAGNDDLIGSMIADAIDKVGPDGVLSIESSSSFETTVEVEEGMEIDRGYISPQFVTNPEKLLAEFENARVLITDQKITAIKDIIPILEKTTQLRAPLLIIAEDVTGEALATLVVNKLRGVLNVVAVKAPGFGERRKAMLQDIAILTGAEYLAMDMSLLVENATIDQLGIARKVTISKDSTTLIADAASKDELQARIAQLKKELFETDSVYDSEKLAERIAKLSGGVAVIKVGAATETELEDRKLRIEDAKNATFAAIEEGIVPGGGAALVHLSTVIPAIKETFEDADERLGADIVQKALLSPAALIAQNAGVEGEVVVEKIMFSDWENGYNAMTDTYENLFEAGVIDPAKVTRCALQNAASVAGMVLTTQAIVVDKPKPKAPAAAAPEGLMV

SEQ ID NO: 84589 - protein, 477 aa, Arabidopsis thaliana; identical to SEQ ID NO: 22384
  peptide (1)..(477): Ceres Seq. ID no. 12675860

SEQ ID NO: 84590 - protein, 382 aa, Arabidopsis thaliana
  peptide (1)..(382): Ceres Seq. ID no. 12675861
MIADAIDKVGPDGVLSIESSSSFETTVEVEEGMEIDRGYISPQFVTNPEKLLAEFENARVLITDQKITAIKDIIPILEKTTQLRAPLLIIAEDVTGEALATLVVNKLRGVLNVVAVKAPGFGERRKAMLQDIAILTGAEYLAMDMSLLVENATIDQLGIARKVTISKDSTTLIADAASKDELQARIAQLKKELFETDSVYDSEKLAERIAKLSGGVAVIKVGAATETELEDRKLRIEDAKNATFAAIEEGIVPGGGAALVHLSTVIPAIKETFEDADERLGADIVQKALLSPAALIAQNAGVEGEVVVEKIMFSDWENGYNAMTDTYENLFEAGVIDPAKVTRCALQNAASVAGMVLTTQAIVVDKPKPKAPAAAAPEGLMV

SEQ ID NO: 84591 - DNA, 651 bp, Arabidopsis thaliana
  misc_feature (1)..(651): Ceres Seq. ID no. 12675862
  misc_feature (1)..(651): Ortholog of  Ceres SEQ ID NO 14309011 as cited in SEQ ID NO 0
accgagccatttcttctgtaagcggatttcatcagcattcagcagccagacgaaacttttaacgatctaccatcgaaccaggatacttcttcattaccatggcaacaagaaatgctttgagaattgtgtctcgtaggttctctagtggcaaagttcttagcgaagaggagagagccgctgagaatgttttcattaagaaaatggagcaggagaagcttcagaagttagctcgacagggtcctggagaacaagcagcagggtcagcaagcgaagcaaaggttgctggtgcaacagcatctgcatcagctgagtcgggcccaaaggtgtcagaagacaagaacagaaactatgcggttgtggcaggtgtggttgctattgtcggttcgattggttggtacttgaaagcaggtggaaagaagcagccagaggtccaagagtaaagagatagattgattgatggacttgtgatgagtgaataaaacagggagtagcattactcattcctcccttgtgagacactttggaatcaaatcttacgttgctgctactctctttgagtcttttcttttgtttttgttacttgacacagtttttttttgtttccggtttgttgacatttagtttctcaatctaaactccagagacttattt

SEQ ID NO: 84592 - protein, 113 aa, Arabidopsis thaliana; identical to SEQ ID NO: 26661
  peptide (1)..(113): Ceres Seq. ID no. 12675863

SEQ ID NO: 84593 - protein, 79 aa, Arabidopsis thaliana; identical to SEQ ID NO: 26662
  peptide (1)..(79): Ceres Seq. ID no. 12675864

SEQ ID NO: 84594 - DNA, 583 bp, Arabidopsis thaliana
  misc_feature (1)..(583): Ceres Seq. ID no. 12675873
  misc_feature (1)..(583): Ortholog of  Ceres SEQ ID NO 15169443 as cited in SEQ ID NO 58785
acttcttcatcgccgtctgcacaaaaccctaatctcacaatctcctacgagatctatcagtctccacgatgaaggttgttgccgcatacttgctcgctgttttgagcggaaaagcttcaccaaccagtgccgatatcaagactatccttggatcagttggtgctgagacagaggattctcagattgagcttttgttgaaggaagtgaaaggaaaagatttggctgagttgattgctgctggaagggagaagttagcttcagtgccgtctggtggcggaggtggtgttgcggttgcttctgctacatctggaggtggaggaggtggtggtgcttctgctgctgagtccaagaaagaagagaagaaggaagaaaaggaagaatccgatgatgacatgggtttcagtctattcgagtaagctggtagtagcatgaaaagtccggttttgttgtcctcttttaatattgtaaccttttgaaatctatatgttgttgttgtttagtttgtattcgatcatcttttttagacattgctgaaattctcaagagtttttgacccgaatgtcatttgcactttgttgttagc

SEQ ID NO: 84595 - protein, 115 aa, Arabidopsis thaliana; identical to SEQ ID NO: 23308
  peptide (1)..(115): Ceres Seq. ID no. 12675874

SEQ ID NO: 84596 - DNA, 1806 bp, Arabidopsis thaliana
  misc_feature (1)..(1806): Ceres Seq. ID no. 12675945
  misc_feature (1)..(1806): Ortholog of  Ceres SEQ ID NO 14310016 as cited in SEQ ID NO 20753
atcctgcgaagaccaaccagtctgttaattttgtataaacaatgaaacgaagaagatcttccgagaatattctctccttctcacgcataccctagaatattgtttcgtctctcttccttctacgtttgcttatttgccccaactcgacgcgaatcatcagcttttataaattctgtcaactcaaagattgtttctgaattggaatcttacaggagcaacacattgcgatatttacaacagctagtattccatggcttacgggaactgctgttaatcctctcttccgtgctgcctaccttgcaaatgatggggaaagacgggtcacgttggtgattccatggctgactttgaagcaccaaaagcttgtctacccaaatagcatcacttttagttccccgtcagagcaagaagcttatgtccgccagtggcttgaggagagagtctcttttcgtttagcctttgagatacgtttctatcctggaaagtttgctattgacaaaaggagtattcttcctgttggggatatatctgatgccattcctgatgaagaggcagacattgctgtcctcgaggagcctgagcatctcacatggtttcatcatggccaaaaatggaaaactaagttcaactacgtcataggaatcgtacacactaactacttggaatacgttaaaagagagaaacaaggccgtgtcaaagcatttttcctcaaatacttaaatagttgggttgttggcatttactgccacaaggtaatcaggttatctgctgcgactcaagaataccctaaatctatagtctgcaatgttcatggcgtcaaccctaaatttctcgaaattgggttgagaaaactagaacagcagaagctccaggagcagcccttcactaaaggcgcatactacattggtaagatggtctggagcaaagggtacaaggagcttcttaaactacttgagaaacaccaaaaggaacttgccgagttagaggttgatttatacggtgatggagaggactctgaagagatcaaagaagcagcccgaaaactcgacttgacggttaatgtttacccaggacgtgatcacgctgactcgctatttcacaactataaagtgtttctcaaccccagcacgacagacgttgtgtgtacaacaactgcagaagccttggcgatgggaaaaatagtagtatgcgcgaatcacatatcgaacaagttcttcaaacagtttcccaactgcagaacctatgacgatggacaaggttttgtaagagccacgctcaaggctcttggggaacaaccatcgcaacttacagagcaacaaaggcatgaactatcatgggaagctgctacacaacggtttataaaagtctctgatctgaaccggttatcaagagctgattcgaacttgtcaaagagaagtgtgtttgcgtcatcttcgattagtgtggggaaaaacttggaggatatgtcagcgtatattcatttcttggcgtctggatttgaagcttccagaacagcttttggtgctatacctggaagcttgcagcccgatgaagagttatgtagagatcttggtttgtctctcaacactccttccccaaatactcgcaagcaagattgacctgttttttaatttatctttgtctgcatatcattgggatatttttgtgtataaatcaatgtatactatctgaatcattctatagcagctttggtgtaatattgatgatgaaagttagatttttcatcttgtggaacatgtatgatgacacgagtctgaattataaaatttagtatatgattccatt

SEQ ID NO: 84597 - protein, 235 aa, Arabidopsis thaliana; identical to SEQ ID NO: 20756
  peptide (1)..(235): Ceres Seq. ID no. 12675946

SEQ ID NO: 84598 - protein, 149 aa, Arabidopsis thaliana
  peptide (1)..(149): Ceres Seq. ID no. 12675947
MGKIVVCANHISNKFFKQFPNCRTYDDGQGFVRATLKALGEQPSQLTEQQRHELSWEAATQRFIKVSDLNRLSRADSNLSKRSVFASSSISVGKNLEDMSAYIHFLASGFEASRTAFGAIPGSLQPDEELCRDLGLSLNTPSPNTRKQD

SEQ ID NO: 84599 - DNA, 1331 bp, Arabidopsis thaliana
  misc_feature (1)..(1331): Ceres Seq. ID no. 12675948
  misc_feature (1)..(1331): Ortholog of  Ceres SEQ ID NO 13593831 as cited in SEQ ID NO 53828
atggaaggcaaagaagaagatgtacgagtgggagctaacaagttcccggagaggcaacccatcggtacatcggctcagtccaccgacaaggactacaaagagccacctcctgcgccactgttcgagcccggcgagctcagctcatggtctttctacagagccggaatagctgagtttatcgctactttcttgtttctctacatcactgttttgactgtaatgggagttaagagagcaccaaacatgtgtgcttctgttggaatccaaggtatcgcttgggcttttggtggcatgatctttgctcttgtctactgtactgctggaatttcaggtggacacatcaaccctgctgtaacattcggtctgttcttggctcggaagttatctctgaccagagcagtgttctacatgattatgcaatgtcttggagccatctgtggtgccggagtcgtcaaaggtttccagccaacgccgtaccagactctcggtggtggtgctaacaccgttgctcatggctacaccaaaggttctggccttggtgctgaaatcatcggaacattcgttctcgtctacactgtcttctccgccaccgacgccaagagaagcgcccgtgactcacacgtcccgattttggcgccgctcccaatcggatttgcagtgttcttggtacacttggcaacaataccgatcaccgggaccggaatcaacccagctagaagtcttggagccgcaattatctacaacaaggaccactcttgggatgaccattggattttctgggttggaccattcattggagcagctctagcagcactatatcaccagattgtcatcagagcgattcctttcaagagcaagagttagagacacacagaaagattccacggtccagaatttgttctttagtagtttctttgcttatctatctaatgtagcttgtgttttgcaatgtaatgagcctttcaagaatatgtatttgggatttctaatcagcttttgtctatgtaaaaactatgtgtttcttttttcttcctatactcgtctcagatgctttatggcaaagggtctctgaagtctaaggtgattagtgctccggttattgatgttttgaatagtttgttcgacgaatataaaataaacatagtcaaccctcattctgtatcaacatcaagttctcgggttggttttgagagacatgattatgaagatgatcatgacttcgtgaatgtgggggttgaaggattggcctctgtttatgacaagatggtgaatgaagagcttgactattgtgtacttgcaagaaagtgttgaaaacacaagggccaatacat

SEQ ID NO: 84600 - protein, 287 aa, Arabidopsis thaliana; identical to SEQ ID NO: 29005
  peptide (1)..(287): Ceres Seq. ID no. 12675949

SEQ ID NO: 84601 - protein, 214 aa, Arabidopsis thaliana; identical to SEQ ID NO: 29006
  peptide (1)..(214): Ceres Seq. ID no. 12675950

SEQ ID NO: 84602 - protein, 206 aa, Arabidopsis thaliana; identical to SEQ ID NO: 29007
  peptide (1)..(206): Ceres Seq. ID no. 12675951

SEQ ID NO: 84603 - DNA, 1083 bp, Arabidopsis thaliana
  misc_feature (1)..(1083): Ceres Seq. ID no. 12675956
  misc_feature (1)..(1083): Ortholog of  Ceres SEQ ID NO 13593831 as cited in SEQ ID NO 53828
agctacacacgagaaagaaaaagctcacaactttaacctttctggagagagaagaacaaaagagggagagggagagaaatggaaggcaaagaagaagatgtacgagtgggagctaacaagttcccggagaggcaacccatcggtacatcggctcagtccaccgacaaggactacaaagagccacctcctgcgccactgttcgagcccggcgagctcagctcatggtctttctacagagccggaatagctgagtttatcgctactttcttgtttctctacatcactgttttgactgtaatgggagttaagagagcaccaaacatgtgtgcttctgttggaatccaaggtatcgcttgggcttttggtggcatgatctttgctcttgtctactgtactgctggaatttcaggtggacacatcaaccctgctgtaacattcggtctgttcttggctcggaagttatctctgaccagagcagtgttctacatgattatgcaatgtcttggagccatctgtggtgccggagtcgtcaaaggtttccagccaacgccgtaccagactctcggtggtggtgctaacaccgttgctcatggctacaccaaaggttctggccttggtgctgaaatcatcggaacattcgttctcgtctacactgtcttctccgccaccgacgccaagagaagcgcccgtgactcacacgtcccgattttggcgccgctcccaatcggatttgcagtgttcttggtacacttggcaacaataccgatcaccgggaccggaatcaacccagctagaagtcttggagccgcaattatctacaacaaggaccactcttgggatgaccattggattttctgggttggaccattcattggagcagctctagcagcactatatcaccagattgtcatcagagcgattcctttcaagagcaagagttagagacacacagaaagattccacggtccagaatttgttctttagtagtttctttgcttatctatctaatgtagcttgtgttttgcaatgtaatgagcctttcaagaatatgtatttgggatttctaatcagcttttgtctatg

SEQ ID NO: 84604 - protein, 287 aa, Arabidopsis thaliana; identical to SEQ ID NO: 29005
  peptide (1)..(287): Ceres Seq. ID no. 12675957

SEQ ID NO: 84605 - protein, 214 aa, Arabidopsis thaliana; identical to SEQ ID NO: 29006
  peptide (1)..(214): Ceres Seq. ID no. 12675958

SEQ ID NO: 84606 - protein, 206 aa, Arabidopsis thaliana; identical to SEQ ID NO: 29007
  peptide (1)..(206): Ceres Seq. ID no. 12675959

SEQ ID NO: 84607 - DNA, 1500 bp, Arabidopsis thaliana
  misc_feature (1)..(1500): Ceres Seq. ID no. 12675960
  misc_feature (1)..(1500): Ortholog of  Ceres SEQ ID NO 14303301 as cited in SEQ ID NO 66956
aacgtttcgacagtctctacaccgtcatgaacactgaatcagttgtcgagttccttgggaatgtgaccttgttgcagcggttacctagttcctctctgaagagaatctccgaagtcgttgtcttcaaaggttatgacagaggtgattatgtggttcgtgaaaatcaaaatgtggatggagtttattttctcttgcaaggacaggctcaggttctgagatcagccggagaggaaaactatcaagagttccctttgaaacgatatgatttcttcggccatggtattttcggggatgtttactcagcagatgttgttgctgtgacagagcttacctgcttgctgttgatgtctgatcatcgtgctttacttgaaataaagtcagtctcggattcagataaggaacgctgtcttgtggaagacatactatatctagaaccattagatttgaatgtataccgggggttcaccccacctaatgctccaacctatggaaaggtttatggagggcaattagttggacaggcacttgccgcagcatcaaaaactgttgaaactatgaagatagtccataattttcattgctatttccttcttgttggagatataaatattcccatcatatatgatgttaaccgcttacgtgacggcaacaactttgccaccagaagtgtagatgctagacagaaaggaaaaactatattcaccttgttcgcgtcatttcagaaaaagcaacaaggttttattcaccaggagtcgaccatgcctcatacaccagctcctgaaacgcttctaccaagggaggagatgcttgaacggcttgttactgagcctctgctacctagggattaccgaaaccaagttgcaactgaaattagtgttccattccctatagatattcgattttgtgagccaaatcgttccactaaacagaataagtctcctccaagactaaaatattggtttagagcaaagggaaaactttctgatgatgatcaagctttgcacagatgtgtggttgcatttgcttccgatttgatattcgccactatcagtttaaaccctcaccggagagagggcatgagtgtagctgctcttagcctggaccactcgatgtggttccaccgacctgtaagagcagatgattggttgttgtttgtgtgagtccaactgcgaccgaaagccgcggttttgcaactggcaaaatgttcaacagaaagggagagctggtggtatcattgacgcaagaagctgtgttaagagaagctgtgactattaagccatccttcggggccaagctatgaagccataggattttgatagtgagagaattgctgcatctgttactcctcacggtcacattccaaagagtcgtcacttatactacatttgcatatgtttttcgatccacaattattattttcccctctaaaagggtctacacatatgtttgtttgtaaccacgataatgtttcaacagcaatgaaaaagcaaacagtggttc

SEQ ID NO: 84608 - protein, 385 aa, Arabidopsis thaliana
  peptide (1)..(385): Ceres Seq. ID no. 12675961
RFDSLYTVMNTESVVEFLGNVTLLQRLPSSSLKRISEVVVFKGYDRGDYVVRENQNVDGVYFLLQGQAQVLRSAGEENYQEFPLKRYDFFGHGIFGDVYSADVVAVTELTCLLLMSDHRALLEIKSVSDSDKERCLVEDILYLEPLDLNVYRGFTPPNAPTYGKVYGGQLVGQALAAASKTVETMKIVHNFHCYFLLVGDINIPIIYDVNRLRDGNNFATRSVDARQKGKTIFTLFASFQKKQQGFIHQESTMPHTPAPETLLPREEMLERLVTEPLLPRDYRNQVATEISVPFPIDIRFCEPNRSTKQNKSPPRLKYWFRAKGKLSDDDQALHRCVVAFASDLIFATISLNPHRREGMSVAALSLDHSMWFHRPVRADDWLLFV

SEQ ID NO: 84609 - protein, 377 aa, Arabidopsis thaliana
  peptide (1)..(377): Ceres Seq. ID no. 12675962
MNTESVVEFLGNVTLLQRLPSSSLKRISEVVVFKGYDRGDYVVRENQNVDGVYFLLQGQAQVLRSAGEENYQEFPLKRYDFFGHGIFGDVYSADVVAVTELTCLLLMSDHRALLEIKSVSDSDKERCLVEDILYLEPLDLNVYRGFTPPNAPTYGKVYGGQLVGQALAAASKTVETMKIVHNFHCYFLLVGDINIPIIYDVNRLRDGNNFATRSVDARQKGKTIFTLFASFQKKQQGFIHQESTMPHTPAPETLLPREEMLERLVTEPLLPRDYRNQVATEISVPFPIDIRFCEPNRSTKQNKSPPRLKYWFRAKGKLSDDDQALHRCVVAFASDLIFATISLNPHRREGMSVAALSLDHSMWFHRPVRADDWLLFV

SEQ ID NO: 84610 - protein, 271 aa, Arabidopsis thaliana; identical to SEQ ID NO: 22843
  peptide (1)..(271): Ceres Seq. ID no. 12675963

SEQ ID NO: 84611 - DNA, 2497 bp, Arabidopsis thaliana
  misc_feature (1)..(2497): Ceres Seq. ID no. 12675968
  misc_feature (1)..(2497): Ortholog of  Ceres SEQ ID NO 13654989 as cited in SEQ ID NO 63117
  misc_feature (1)..(2497): Ortholog of  Ceres SEQ ID NO 14313228 as cited in SEQ ID NO 67057
acacccattaaaatatttcatcaacttgtcggtaaaattaattcttggcttattctatctttctttctctgtcttcttctttcaatttttcaataacaataatacagatgtgtatacattagatacacgtatactagtactaaacttcactgtgtgatctgatctagagtttttatactatcagaataaataatagtcgacaatttgggatttgtttatggtttacttcacatgaatcacatacgttcatgtcgattcctttgagatactgtctcgatttcgtttttttctcttgtttaatttaaaattattgtaaagcacgtggatttgcttgtcttggttttgttttctccttcgacctctttgatgaaatcgaggaacctacaatttcttcgtcgatccaaatggtagcttagtggtggtgataataggtttctcctcttgattggctccagctttaggtttttttttttatctttgtttctgcttcgattcccaaaatttaccctttcgattttgagtctaactagtcgagttgactcagtagagtcgaaagcttctgggtttacgaagagacatctcctaattgaaacaaaacctttcctttccattgggctgagaaaaaagcaagagtctttgaatattttttggagcgtggttttatttagatgggaggtcaatgctctagcctgagttgttgcaggaacacttcacacaagacagctgttcttgaagctcctgatgttgataatggagagagtagtgagatcactgatgttcctaatttccgggagtatactttagaacagcttaaggcagctacttctggttttgccgtggagtatattgtatctgaacatggagaaaaggctccaaatgttgtctataaagggaaattggagaaccaaaagaagattgctgtcaagcgttttactagaatggcctggcctgattcacgacagttcttggaggaagcgaggtcggttggtcagctacggagtgagagaatggccaatttactcggatgttgctgcgaaggtgacgagaggttacttgtagcagagtttatgcctaatgaaacactagccaaacacctttttcactgggaaactcaacctatgaaatggactatgaggctacgagttgttttatatctagcacaagctcttgaatactgcaccagcaaaggccgtactctttaccacgacctcaatgcttaccgggttttgtttgatgaggaatgcaatccaagactatctacttttggcttgatgaagaatagtcgggatggaaaaagttacagcactaatcttgctttcacccctcctgaatatctacgaactgggagaattactccagagagtgtaatatacagctttggcactcttctgcttgatcttctcagcggaaaacatatacctcctagccatgcccttgatctgattagagacagaaatctccagacgctaactgattcttgcctagatgggcagttttctgatagtgatggtacagagctagtacgcctagcttctcgttgtcttcagtatgaagctcgtgagcggccaaacaccaaatctttagtgactgccttgacacctcttcagaaggagacagaggtcctgtctcatgttctaatgggtctacctcacagtggttcagtctctcctctgtcccctcttggtgaggcttgttcaagaagggacctgaccgctatgcttgagatcctggagaaacttggatacaaagacgacgagggtgtcaccaatgagctctcgtttcatatgtggacagaccagatgcaagagtctttgaactcgaagaagaagggtgatgtggctttcaggcaaaaagactttagagaggccatcgagtgttacacacagtttattgatggaggaatgatctctccaacagtgtgtgctcggcgtagtctgtgttacctaatgagtgacatgccgaaagaagctttagatgatgcaattcaggctcaagtgatctctcccgtgtggcatgtcgcatcatatctgcagtctgcttcccttggtatcctgggaatggagaaggaatctcaaatcgcactgaaagagggctcgaaccttgaagcaaagatgaatggagttccccgagtgaagtaagatatatagcatttaagatttttcttgttgggaaagatgaaagaacatcttaccaagtaaaaggggtatgaatcttttgagcacaatgatgggaaaacactcaagagcaatgcaaaactatagaccctcttcttctggttgtatgaggtgttttgcccttcttgtgcctctttttatgggcattgaattgaaggagtcatttcctttattagctttgaaatccatttcctgaaactttattgtactaaaaaacccattattgcagaaaccaaaagagggttttgtttcttttgatctataggtcacacagactaaacatgtatgaactcttgtcttttgactaaagagatattcgacag

SEQ ID NO: 84612 - protein, 489 aa, Arabidopsis thaliana; identical to SEQ ID NO: 21116
  peptide (1)..(489): Ceres Seq. ID no. 12675969

SEQ ID NO: 84613 - protein, 399 aa, Arabidopsis thaliana; identical to SEQ ID NO: 21117
  peptide (1)..(399): Ceres Seq. ID no. 12675970

SEQ ID NO: 84614 - protein, 376 aa, Arabidopsis thaliana; identical to SEQ ID NO: 21118
  peptide (1)..(376): Ceres Seq. ID no. 12675971

SEQ ID NO: 84615 - DNA, 1187 bp, Arabidopsis thaliana
  misc_feature (1)..(1187): Ceres Seq. ID no. 12675997
  misc_feature (1)..(1187): Ortholog of  Ceres SEQ ID NO 12611159 as cited in SEQ ID NO 59821
  misc_feature (1)..(1187): Ortholog of  Ceres SEQ ID NO 15180029 as cited in SEQ ID NO 0
atcttctcacttcaaactctctctatctttctctctcacctcatattatgaactaaagatttctctgaaagctgacttcataaactttttctgaagaagaaacacacaaaaacgatcgatcttgaattgattctttgtagtattttatttacatatatatatagatgggaagacattcatgttgttacaaacagaaactgaggaaaggactttggtctcctgaagaagatgagaagcttcttcgttacatcactaagtatggtcatggttgctggagctctgtccctaaacaagctggtttacagagatgtggaaaaagttgtagattaagatggataaattatttaagaccagatttgaagagaggagcattttctcaagatgaagaaaatctcattattgaacttcatgccgttcttggcaatagatggtctcagatagctgcacagcttcctggaagaaccgacaatgaaatcaagaatctttggaattcttgtttgaagaagaaattgaggctgagaggaattgacccggttacacacaagctcttaaccgaaatcgaaaccggtacagatgacaaaacaaaaccggttgagaagagtcaacagacctacctcgttgagactgatggctcctctagtaccactacttgtagtactaaccaaaacaacaacactgatcatctttataccggaaatttcggttttcaacggttaagtctagaaaacggttcaagaatcgcagccggttctgacctcggtatctggattccccaaaccggaagaaaccatcatcatcatgtcgatgaaaccatccctagtgcagtgagcatcagcaaattcaagagagtaactacaacaattcaacattctttggaaatgggaatctgaattggggattaacaatggaggaaaatcaaaatccattcacaatatcgaatcattcaaattcgtccttatacagtgatataaaatcagagaccaatttttttggcacagaggctacaaatgttggtatgtggccatgtaaccagctccagcctcagcaacatgcatatggccatatataaatcttcttgtatattataaggtgtgtgaatcttcttttttttttttctcaaatatggttttttttttttttaatgggttgtgtatatagtttgtgttatatatcatttaatttaacag

SEQ ID NO: 84616 - protein, 241 aa, Arabidopsis thaliana
  peptide (1)..(241): Ceres Seq. ID no. 12675998
MGRHSCCYKQKLRKGLWSPEEDEKLLRYITKYGHGCWSSVPKQAGLQRCGKSCRLRWINYLRPDLKRGAFSQDEENLIIELHAVLGNRWSQIAAQLPGRTDNEIKNLWNSCLKKKLRLRGIDPVTHKLLTEIETGTDDKTKPVEKSQQTYLVETDGSSSTTTCSTNQNNNTDHLYTGNFGFQRLSLENGSRIAAGSDLGIWIPQTGRNHHHHVDETIPSAVSISKFKRVTTTIQHSLEMGI

SEQ ID NO: 84617 - DNA, 1085 bp, Arabidopsis thaliana
  misc_feature (1)..(1085): Ceres Seq. ID no. 12676009
  misc_feature (1)..(1085): Ortholog of  Ceres SEQ ID NO 14311467 as cited in SEQ ID NO 51230
tttcccaaaattggattcaaagttctttctttttgtcttcctcgtacatcacagcatcaagggttttcgacattaccagctattatgcttgaattcgaggacgcaaggagttaaaagagcaagtcttttgagttgaggaagcttctgtagaggattattatttcaggggaaatttaagggtttgatcagcttttgtgtgttgtgcgggatggatcaaattgtttcaggagaagaagaagatcttgatgtagatattgaagatggtagattcaatgagacacaagagataacgacgaatcttgtttcagcggaaggggattcagagaatgttttgaatcatgtttggagtggacgtttgagttttgatgggtctgaaaagagtgctgatgatctagtagaccctttaatgggagagggaaagcggagagaaagaagcagtcaaagtttggatctttcggatatgaagtttgataatgataagtttaagaagacgagaaaaccttcaaagccaccgaggcctccaaaaggtccgttactgagtgctaatgaccagaagttgatgagggaaatcacggagcttgctatgagaaagcgtgctcggattgaacggatgaaaacactcagaagattgaaagcagcaaagtcctcgtctccctgcagtagcattttcgccatgatagtgacggttatattcttcgtcttcttaatctttcaagggttcttcacaagcaatgcgagtttgaattctgacaattcacctgcaccaaataattcagctaataaccgtatggtctctgttcagttctacaatgagtttgctcctcgtgagagaatcgatcccagccctactacttctttcaggtataagagagtctcaggtgcagacaatgaagaaaacacaagagaagttaccagatgagtttcttctctttggattcttgtaaaatgtaaccaaaaacactacttatgtttttgtttgttcgtaaattcttgacatcactctattgttcctttgatctgtttgtgttcacatgtttgtctctctgttactcttcttgtaaatattcttatggatgaatctgctc

SEQ ID NO: 84618 - protein, 236 aa, Arabidopsis thaliana; identical to SEQ ID NO: 29151
  peptide (1)..(236): Ceres Seq. ID no. 12676010

SEQ ID NO: 84619 - protein, 170 aa, Arabidopsis thaliana; identical to SEQ ID NO: 29152
  peptide (1)..(170): Ceres Seq. ID no. 12676011

SEQ ID NO: 84620 - protein, 152 aa, Arabidopsis thaliana; identical to SEQ ID NO: 29153
  peptide (1)..(152): Ceres Seq. ID no. 12676012

SEQ ID NO: 84621 - DNA, 1041 bp, Arabidopsis thaliana
  misc_feature (1)..(1041): Ceres Seq. ID no. 12676013
  misc_feature (1)..(1041): Ortholog of  Ceres SEQ ID NO 13583137 as cited in SEQ ID NO 60857
attccgcaatttattgattcttctttatcgtgcttctgattgttttggttaacggatcaaattatcgaacgatgatggcttctctcgcgacttccataagtggaagcttcagaattctggttaaatcatcttcgacgaggaatgggtttcctgtaatctctgatcaaaacccgagtttcgtcttgtttgcgaataaacgcagacatatctctagaacggcgatttttcaccgatctgcgataagtggttcgagtcaaggagaaaagatatcacctttagcatctggtgtatcttcaggtttatattcagctcagacttttgatttgacgcctcaaaacgttgatttggtgcttgaggatgttagaccgttcttgatctctgatggtggaaacgtcgacgttgtctccgttgaagatggggtagtctctcttaagctccaaggagcatgtaccagctgtccaagttcttcaacaactatgacaatgggaatagagagggtactcaaggaaaagtttggagatgcattgaaagatattcgacaagtttttgatgaagaagtaaaacagataaccgtggaggcagtgaatgctcatctagatatactgaggccagctatcaagaactatggcggaagtgttgaagttttatcggttgaaggcgaggactgcgttgtaaaatatgttggaccggagtcgattggaatgggaatacaggcagcgattaaagaaaagtttaaggacatatctaatgtaacctttacaagctagaaagcatgaagaaagccactatattatgtaaaaacattattgctctttgtttgagctaatgtccacttcaatagtcgtcctctccataactgtccttagccatcttgccaggttgatcaagaacggtgtgtagacaaagtagcaagttgttgtccacgtaaccagtcccttcaccagcaaacaaaacaagaaagaaacagagtcatgtgtatgtttttgtttgatgatgtctgtataaacacttattacctggccaaagatttctatgtttgct

SEQ ID NO: 84622 - protein, 231 aa, Arabidopsis thaliana; identical to SEQ ID NO: 34911
  peptide (1)..(231): Ceres Seq. ID no. 12676014

SEQ ID NO: 84623 - protein, 230 aa, Arabidopsis thaliana; identical to SEQ ID NO: 34912
  peptide (1)..(230): Ceres Seq. ID no. 12676015

SEQ ID NO: 84624 - DNA, 851 bp, Arabidopsis thaliana
  misc_feature (1)..(851): Ceres Seq. ID no. 12676016
  misc_feature (1)..(851): Ortholog of  Ceres SEQ ID NO 13594918 as cited in SEQ ID NO 55747
  misc_feature (1)..(851): Ortholog of  Ceres SEQ ID NO 12587066 as cited in SEQ ID NO 63204
aaaaaaaaaaaaaaaacagagccacgaagaaatttacagaaaattcaaaaccatcgataaagatgggagatgtgattttgttcattgatgatacgaaatcgaaagtgagaatcacgcgttgcagaatttgccatgaagaagaagaagaaagtttcttcgaagttccatgtgcttgttcaggcaccgttaagttcgcacatagaaactgcatacaacgttggtgtaatgaaaaaggaaacacaacttgtgaaatctgtcttcaggtgtataaagatggatatacagcagttttaaaacaatcgaaattgattgaacaagaagtcacaatcagagtaaatggacgaagaagaagaagaagtagaagattagtgtctatagctgaatccgatatttctcagtgtaattctgttgctgatagaggagcttcgttttgcagatcattaacttttactctttcagtatttttgctgatgaaacatacattcgatgtgatttacggaaccgaagaatatccattctctgtatttacggtactaacattaaaggccattgggatactattgccaatgttcattataattcgaacaatctcaactattcagaaaactcttcgtcgtcgtcatcaatatcctgaatctgaagaagaagataggttgagctctgacgacgacgatgacttggaagaagaagatgaagagcaacaacaacatttggcttaaaccttcaaattaacgaacttaacgaaattttttctttctttctttctaattctttctttttttaaacgaaaagcatctatttgatgctcatggtcatttttactcacaaagtcaaataaaaaacgtaaattt

SEQ ID NO: 84625 - protein, 238 aa, Arabidopsis thaliana
  peptide (1)..(238): Ceres Seq. ID no. 12676017
KKKKNRATKKFTENSKPSIKMGDVILFIDDTKSKVRITRCRICHEEEEESFFEVPCACSGTVKFAHRNCIQRWCNEKGNTTCEICLQVYKDGYTAVLKQSKLIEQEVTIRVNGRRRRRSRRLVSIAESDISQCNSVADRGASFCRSLTFTLSVFLLMKHTFDVIYGTEEYPFSVFTVLTLKAIGILLPMFIIIRTISTIQKTLRRRHQYPESEEEDRLSSDDDDDLEEEDEEQQQHLA

SEQ ID NO: 84626 - protein, 218 aa, Arabidopsis thaliana; identical to SEQ ID NO: 42033
  peptide (1)..(218): Ceres Seq. ID no. 12676018

SEQ ID NO: 84627 - DNA, 1026 bp, Arabidopsis thaliana
  misc_feature (1)..(1026): Ceres Seq. ID no. 12676213
  misc_feature (1)..(1026): Ortholog of  Ceres SEQ ID NO 14315430 as cited in SEQ ID NO 57618
  misc_feature (1)..(1026): Ortholog of  Ceres SEQ ID NO 13623344 as cited in SEQ ID NO 0
atggcagaaacaaaaaactggtataacacaagagaagcgatagaaaaaacctctccatcgagacttgacggtatcaacttaaaggaagagacgttccaacgttggtcttacacttcattcctacaagagcttggccagagactaaacaatcctcaaaaaactatagccactgcgattgtcttgtgtcaacgattcttcactcgtcaatcactcacaaagaacgacccgaaaacagtcgccatcatctgtatgtttatagccggaaaagtcgaagggtctccaaggccggccggtgacgtcgtctttgtctcgtacagggttttattcaataaggagccgttgagagacgtgttcgagagattgaagatgactgtgttaaccggtgagaagcttgtgctctctactttagaatgtgatcttgaaatcgaacacccttataaactagtgatggattgggttaagagatcggttaagaccgaggatggtaggcggttatgtcaggctgcatttaatttcgttaatgacagtctgaggacgtcgctttgcttgcagtttgggcctagtcagatcgcatcggctgctatatatatcggtttgagcatgtgtaagatgacgttaccgtgtgatggagataaagcgtggtggcgagagtttgatgtcacgaaacgtcaattgtgggagatttgtgaccagatgcttgatctttatgaacaaaccatattggaacgtctttgttgggtttgtagtcacactaacaacattgacgaggaacatcgtgtggttgagctcgaaggagctctaatcctcatccttgttgccacgagcattaaaatttccgaagcagtccacaaacctcaagaaagactgcatacagcttctccgaaaactaacgccaaaacaagattgctaaagagacctaaccgcacccgacggcatgggagtgtcaaagatgaccagagaagccgcaacaaggccatttctacttgttgcggcttcatcccgttaattagatttttagctagttag

SEQ ID NO: 84628 - protein, 341 aa, Arabidopsis thaliana
  peptide (1)..(341): Ceres Seq. ID no. 12676214
MAETKNWYNTREAIEKTSPSRLDGINLKEETFQRWSYTSFLQELGQRLNNPQKTIATAIVLCQRFFTRQSLTKNDPKTVAIICMFIAGKVEGSPRPAGDVVFVSYRVLFNKEPLRDVFERLKMTVLTGEKLVLSTLECDLEIEHPYKLVMDWVKRSVKTEDGRRLCQAAFNFVNDSLRTSLCLQFGPSQIASAAIYIGLSMCKMTLPCDGDKAWWREFDVTKRQLWEICDQMLDLYEQTILERLCWVCSHTNNIDEEHRVVELEGALILILVATSIKISEAVHKPQERLHTASPKTNAKTRLLKRPNRTRRHGSVKDDQRSRNKAISTCCGFIPLIRFLAS

SEQ ID NO: 84629 - protein, 258 aa, Arabidopsis thaliana
  peptide (1)..(258): Ceres Seq. ID no. 12676215
MFIAGKVEGSPRPAGDVVFVSYRVLFNKEPLRDVFERLKMTVLTGEKLVLSTLECDLEIEHPYKLVMDWVKRSVKTEDGRRLCQAAFNFVNDSLRTSLCLQFGPSQIASAAIYIGLSMCKMTLPCDGDKAWWREFDVTKRQLWEICDQMLDLYEQTILERLCWVCSHTNNIDEEHRVVELEGALILILVATSIKISEAVHKPQERLHTASPKTNAKTRLLKRPNRTRRHGSVKDDQRSRNKAISTCCGFIPLIRFLAS

SEQ ID NO: 84630 - protein, 219 aa, Arabidopsis thaliana
  peptide (1)..(219): Ceres Seq. ID no. 12676216
MTVLTGEKLVLSTLECDLEIEHPYKLVMDWVKRSVKTEDGRRLCQAAFNFVNDSLRTSLCLQFGPSQIASAAIYIGLSMCKMTLPCDGDKAWWREFDVTKRQLWEICDQMLDLYEQTILERLCWVCSHTNNIDEEHRVVELEGALILILVATSIKISEAVHKPQERLHTASPKTNAKTRLLKRPNRTRRHGSVKDDQRSRNKAISTCCGFIPLIRFLAS

SEQ ID NO: 84631 - DNA, 1099 bp, Arabidopsis thaliana
  misc_feature (1)..(1099): Ceres Seq. ID no. 12676217
  misc_feature (1)..(1099): Ortholog of  Ceres SEQ ID NO 14304457 as cited in SEQ ID NO 53555
cttacaatggctgcatcgttagcctctctttcctccttagctaaagccggagcaccacggtcactgttcaaccgccatggcagccaccgccttcctcctccacaaatcatacctcttgcttcctctatcaagaaacatatcacgacgagcttctataggagaggaagttctctgaagaacatttatgccctcgagacctctgacggcgccattaacgtggaggtcgatgatgatgaggaagaagaagcgtgtgagcttgttaacggaacagaagtgtccgttgacggtgttgaaggttatcttttaacggcggtgaagaacaataacggaactggattgcttctactctctgatgtctttggctttcaagattcagctacacgcgatttcgcttaccgtgtggcttgcaatggctataacgttcttgtcccggacttgtttcgtggagatccatggtcgaaaaaccgaccaaagtccgaatacgaggaatggagaagaggacatgaccctaaccgtatcagacaagacactactaccttcacaaaatggatggttgaggaatttgcagcggctggaatctccaagaagctaggagtgatggggttctgttttggcggtggacgtgtggttgacgtgttagccacggatgagagcggttactttagcaccggtgtctcgttctacggtacgagaatagactcggcggtggcgggagatgtgaaagtgccagtcttgtttattgctggagatagagacccgctttgtgaagtgaagggtttgtatgaaattgaggagaagattggtgaaggttcaaaggttgttgtgtatgaaggaagaggtcacggctttgttcaccggcccgagacacccgaagatgatcgagacgctgaggaagcgtttgctctcatgagaaattggttacatcatcatttgatttgaagccaattgtttttctctactctttgtacatccaagttaaaataaaactcggattctagtaaatatccaaataaatgttacttaataatataactaatgaagaggaatgtcgagaaaaccatataaaagttcaatctctaatcaaatcatgttttccttc

SEQ ID NO: 84632 - protein, 312 aa, Arabidopsis thaliana
  peptide (1)..(312): Ceres Seq. ID no. 12676218
LTMAASLASLSSLAKAGAPRSLFNRHGSHRLPPPQIIPLASSIKKHITTSFYRRGSSLKNIYALETSDGAINVEVDDDEEEEACELVNGTEVSVDGVEGYLLTAVKNNNGTGLLLLSDVFGFQDSATRDFAYRVACNGYNVLVPDLFRGDPWSKNRPKSEYEEWRRGHDPNRIRQDTTTFTKWMVEEFAAAGISKKLGVMGFCFGGGRVVDVLATDESGYFSTGVSFYGTRIDSAVAGDVKVPVLFIAGDRDPLCEVKGLYEIEEKIGEGSKVVVYEGRGHGFVHRPETPEDDRDAEEAFALMRNWLHHHLI

SEQ ID NO: 84633 - protein, 310 aa, Arabidopsis thaliana
  peptide (1)..(310): Ceres Seq. ID no. 12676219
MAASLASLSSLAKAGAPRSLFNRHGSHRLPPPQIIPLASSIKKHITTSFYRRGSSLKNIYALETSDGAINVEVDDDEEEEACELVNGTEVSVDGVEGYLLTAVKNNNGTGLLLLSDVFGFQDSATRDFAYRVACNGYNVLVPDLFRGDPWSKNRPKSEYEEWRRGHDPNRIRQDTTTFTKWMVEEFAAAGISKKLGVMGFCFGGGRVVDVLATDESGYFSTGVSFYGTRIDSAVAGDVKVPVLFIAGDRDPLCEVKGLYEIEEKIGEGSKVVVYEGRGHGFVHRPETPEDDRDAEEAFALMRNWLHHHLI

SEQ ID NO: 84634 - DNA, 1019 bp, Arabidopsis thaliana
  misc_feature (1)..(1019): Ceres Seq. ID no. 12676277
  misc_feature (1)..(1019): Ortholog of  Ceres SEQ ID NO 13595072 as cited in SEQ ID NO 55971
actctcactcacaagttagtcaccaaaaaaaaaaaaaaacacaaaaagtttcaatggccgcctccacaatggctctctcctcccctgccttcgccggaaaggctgtgaacctttcccccgcggcatctgaagtcctcggaagcggccgtgtgacaatgaggaagactgttgccaagccaaagggtccatcaggcagcccatggtacggatccgaccgagtcaagtacttgggtccattctctggcgagtcaccgagctaccttaccggagagttccccggagactacggatgggacaccgctggactttcagctgatcccgagacattcgcaaggaaccgtgagctagaagttatccacagcaggtgggctatgctcggagccctaggctgcgtcttccctgagcttttggctaggaacggagtcaagttcggagaggcggtttggttcaaggccggttcacagatctttagcgatggaggactcgattacttgggaaaccctagcttggtccacgctcagagcattttggccatttgggccactcaagttatcttgatgggagctgttgaaggctacagagtcgcaggaaatgggccgttgggagaggccgaggacttgctttaccccggtggcagcttcgacccattgggtcttgctaccgacccagaggctttcgcggagttgaaggtgaaggagctcaagaacggaagattggctatgttctctatgtttggattcttcgttcaagccattgtcactggtaagggaccgatagagaaccttgctgaccatttggccgatccagtcaacaacaacgcatgggccttcgcaaccaactttgttcccggaaagtgagccaagttttatcagtttgtattttgcttttctttcagtcttttgaattcgagtgagagacatgaggagaaagagaaggttgtatgtgatggtttgagactttcagatgtaaatttgcaagactttgtatgatttgtcattaatcaaactcaattttctctc

SEQ ID NO: 84635 - protein, 284 aa, Arabidopsis thaliana
  peptide (1)..(284): Ceres Seq. ID no. 12676278
SHSQVSHQKKKKTQKVSMAASTMALSSPAFAGKAVNLSPAASEVLGSGRVTMRKTVAKPKGPSGSPWYGSDRVKYLGPFSGESPSYLTGEFPGDYGWDTAGLSADPETFARNRELEVIHSRWAMLGALGCVFPELLARNGVKFGEAVWFKAGSQIFSDGGLDYLGNPSLVHAQSILAIWATQVILMGAVEGYRVAGNGPLGEAEDLLYPGGSFDPLGLATDPEAFAELKVKELKNGRLAMFSMFGFFVQAIVTGKGPIENLADHLADPVNNNAWAFATNFVPGK

SEQ ID NO: 84636 - protein, 267 aa, Arabidopsis thaliana; identical to SEQ ID NO: 21212
  peptide (1)..(267): Ceres Seq. ID no. 12676279

SEQ ID NO: 84637 - protein, 262 aa, Arabidopsis thaliana; identical to SEQ ID NO: 21213
  peptide (1)..(262): Ceres Seq. ID no. 12676280

SEQ ID NO: 84638 - DNA, 870 bp, Arabidopsis thaliana
  misc_feature (1)..(870): Ceres Seq. ID no. 12676281
  misc_feature (1)..(870): Ortholog of  Ceres SEQ ID NO 13595072 as cited in SEQ ID NO 55971
atggccgcctccacaatggctctctcctcccctgccttcgccggaaaggctgtgaacctttcccccgcggcatctgaagtcctcggaagcggccgtgtgacaatgaggaagactgttgccaagccaaagggtccatcaggcagcccatggtacggatccgaccgagtcaagtacttgggtccattctctggcgagtcaccgagctaccttaccggagagttccccggagactacggatgggacaccgctggactttcagctgatcccgagacattcgcaaggaaccgtgagctagaagttatccacagcaggtgggctatgctcggagccctaggctgcgtcttccctgagcttttggctaggaacggagtcaagttcggagaggcggtttggttcaaggccggttcacagatctttagcgatggaggactcgattacttgggaaaccctagcttggtccacgctcagagcattttggccatttgggccactcaagttatcttgatgggagctgttgaaggctacagagtcgcaggaaatgggccgttgggagaggccgaggacttgctttaccccggtggcagcttcgacccattgggtcttgctaccgacccagaggctttcgcggagttgaaggtgaaggagctcaagaacggaagattggctatgttctctatgtttggattcttcgttcaagccattgtcactggtaagggaccgatagagaaccttgctgaccatttggccgatccagtcaacaacaacgcatgggccttcgcaaccaactttgttcccggaaagtgagccaagttttatcagtttgtattttgcttttctttcagtcttttgaattcgagtgagagacatgag

SEQ ID NO: 84639 - protein, 267 aa, Arabidopsis thaliana; identical to SEQ ID NO: 21212
  peptide (1)..(267): Ceres Seq. ID no. 12676282

SEQ ID NO: 84640 - protein, 262 aa, Arabidopsis thaliana; identical to SEQ ID NO: 21213
  peptide (1)..(262): Ceres Seq. ID no. 12676283

SEQ ID NO: 84641 - protein, 233 aa, Arabidopsis thaliana; identical to SEQ ID NO: 21214
  peptide (1)..(233): Ceres Seq. ID no. 12676284

SEQ ID NO: 84642 - DNA, 1557 bp, Arabidopsis thaliana
  misc_feature (1)..(1557): Ceres Seq. ID no. 12676299
  misc_feature (1)..(1557): Ortholog of  Ceres SEQ ID NO 13596816 as cited in SEQ ID NO 62287
acaagcactttctccctcagtctttatctccctctttctctcttctccatgtctaacatgtttagcagaattgccatgaccaactctatcgttcttcttctattttccttgactttcttagaacatggattgttgtttcaaagggtctcctctcttggcatcaactatggtcaagtcggcgacaatcttcctccaccggacaaagttctacaactcttgagttcactccatatcaataagacaagaatctatgacacaaaccctcgagtgttaacctcatttgccaattccaatatcgagctctttgtcaccgtcgaaaatgaaatgcttcccagcttagtagaccctcaacaagctctccaatgggtcactacccgtatcaaaccctactttccggccaccaagatcggtggtatcgccgtcggcaacgaactatacactgacgatgactcaagccttatagggtatcttatgcctgcaatgatgagcattcatggggctttggtccaaaccggactagacaagtacattcaagtatcgactccgaactcactatccgtccttcaagaatcttaccctccatccgccggatgttttaggccggaagtagctggcgtaatgacacagctactaggtttcttgcgtaacacgaattcccccttctggatcaacgcttacccttacttcgcttacaaggattccccaacaaagatcccattagactacgtcctcttcaaccctaaccctggaatggttgacccctataccaagtaccgctatgacaacatgctctacgctcaagtagacgctgtgatctttgccatggcgaggcttggcttcaaagacatcgaagttggggtctcggagactggatggccgtctaaaggcgatggagatgaggttggagccactgtggccaacgcagccgtttataacaaaaatattctaaggagacaacttcaaaatgaaggaacgccattgagaccaaacttgagttttgatgtttatctatttgctcttttcaatgaagaccttaaaccaggaccaacctctgagaggaattatggattgtatcagcctgatgagaccatgacttacaatgtaggtttattatcgtcgtcatcattaacatcaacatcaactacttcttcaacttctattatttccctcacttcctctgcctccacggctttaaagaagggaaagcaacggttgatgtattggacatgcgtttatttgttggccattcacatgctaattagaagatcgtactagaagcaaaaacaaattgagagagcttctaagtgtaaatagagagtccactaatgcggtccaatttttcaacgagaagaattaaattattctcgaaagtgtctcagatgattctttaaaaggggaaaaaaacactcagaaaaattgagaagggaatgcagtactgcaaagcgaatcctatgtataaaaaactgacgattcatattatagaactttatttgtatttgtcttactaacgtgttaattactttcgttgtctaaataaaaagtgactaaaattaatca

SEQ ID NO: 84643 - protein, 424 aa, Arabidopsis thaliana
  peptide (1)..(424): Ceres Seq. ID no. 12676300
TSTFSLSLYLPLSLFSMSNMFSRIAMTNSIVLLLFSLTFLEHGLLFQRVSSLGINYGQVGDNLPPPDKVLQLLSSLHINKTRIYDTNPRVLTSFANSNIELFVTVENEMLPSLVDPQQALQWVTTRIKPYFPATKIGGIAVGNELYTDDDSSLIGYLMPAMMSIHGALVQTGLDKYIQVSTPNSLSVLQESYPPSAGCFRPEVAGVMTQLLGFLRNTNSPFWINAYPYFAYKDSPTKIPLDYVLFNPNPGMVDPYTKYRYDNMLYAQVDAVIFAMARLGFKDIEVGVSETGWPSKGDGDEVGATVANAAVYNKNILRRQLQNEGTPLRPNLSFDVYLFALFNEDLKPGPTSERNYGLYQPDETMTYNVGLLSSSSLTSTSTTSSTSIISLTSSASTALKKGKQRLMYWTCVYLLAIHMLIRRSY

SEQ ID NO: 84644 - protein, 408 aa, Arabidopsis thaliana
  peptide (1)..(408): Ceres Seq. ID no. 12676301
MSNMFSRIAMTNSIVLLLFSLTFLEHGLLFQRVSSLGINYGQVGDNLPPPDKVLQLLSSLHINKTRIYDTNPRVLTSFANSNIELFVTVENEMLPSLVDPQQALQWVTTRIKPYFPATKIGGIAVGNELYTDDDSSLIGYLMPAMMSIHGALVQTGLDKYIQVSTPNSLSVLQESYPPSAGCFRPEVAGVMTQLLGFLRNTNSPFWINAYPYFAYKDSPTKIPLDYVLFNPNPGMVDPYTKYRYDNMLYAQVDAVIFAMARLGFKDIEVGVSETGWPSKGDGDEVGATVANAAVYNKNILRRQLQNEGTPLRPNLSFDVYLFALFNEDLKPGPTSERNYGLYQPDETMTYNVGLLSSSSLTSTSTTSSTSIISLTSSASTALKKGKQRLMYWTCVYLLAIHMLIRRSY

SEQ ID NO: 84645 - protein, 405 aa, Arabidopsis thaliana
  peptide (1)..(405): Ceres Seq. ID no. 12676302
MFSRIAMTNSIVLLLFSLTFLEHGLLFQRVSSLGINYGQVGDNLPPPDKVLQLLSSLHINKTRIYDTNPRVLTSFANSNIELFVTVENEMLPSLVDPQQALQWVTTRIKPYFPATKIGGIAVGNELYTDDDSSLIGYLMPAMMSIHGALVQTGLDKYIQVSTPNSLSVLQESYPPSAGCFRPEVAGVMTQLLGFLRNTNSPFWINAYPYFAYKDSPTKIPLDYVLFNPNPGMVDPYTKYRYDNMLYAQVDAVIFAMARLGFKDIEVGVSETGWPSKGDGDEVGATVANAAVYNKNILRRQLQNEGTPLRPNLSFDVYLFALFNEDLKPGPTSERNYGLYQPDETMTYNVGLLSSSSLTSTSTTSSTSIISLTSSASTALKKGKQRLMYWTCVYLLAIHMLIRRSY

SEQ ID NO: 84646 - DNA, 723 bp, Arabidopsis thaliana
  misc_feature (1)..(723): Ceres Seq. ID no. 12676303
  misc_feature (1)..(723): Ortholog of  Ceres SEQ ID NO 14315684 as cited in SEQ ID NO 53131
  misc_feature (1)..(723): Ortholog of  Ceres SEQ ID NO 13583037 as cited in SEQ ID NO 67953
atctgcgagttttcaataaaccaccggagtgaggaagaagcagacgacgacgacgaagatgagttcatcgactgttcgtgatttgcagagagacctagaaaacaaggctaatgatctcggcaaaatccagaaagatatcgggaagaatcatcagctgagaaagaagtatacgatccaactcggtgagaatgagctcgtgcttaaggagttagatttgctggaagaagatgctaacgtctacaaattgattggtccggtgttagtgaagcaggatttggctgaagctaatgcaaatgttcgtaaacgaattgagtacatctctgctgaattgaaacggcttgatgcaattcttcaagatatggaagaaaaacaaaacaacaagagagaaacgataatgaagttacaacaaaggctacaaactatccaggcaggaaaagcaaaggcttgattgagctactcagttgcaaccacacttgttaaaccctttccactgtgctcggccttgtctcaatggtgtcatattcagttactgagggttcttgtggtttcagtttattgggtgattgatgtctctttgtgtcactaatctttttttgttgacaactagacttaagtgtgtaacttatacatgatcttgtcgccctttatgaagttatgagtttggagatttacaaaaaaatattgtgtgtgtgcgcctaatttggtcttcatacatacttcaag

SEQ ID NO: 84647 - protein, 129 aa, Arabidopsis thaliana; identical to SEQ ID NO: 26856
  peptide (1)..(129): Ceres Seq. ID no. 12676304

SEQ ID NO: 84648 - DNA, 1802 bp, Arabidopsis thaliana
  misc_feature (1)..(1802): Ceres Seq. ID no. 12676349
  misc_feature (1)..(1802): Ortholog of  Ceres SEQ ID NO 13593955 as cited in SEQ ID NO 54278
  misc_feature (1)..(1802): Ortholog of  Ceres SEQ ID NO 13597380 as cited in SEQ ID NO 64054
  misc_feature (1)..(1802): Ortholog of  Ceres SEQ ID NO 12625474 as cited in SEQ ID NO 64169
  misc_feature (1)..(1802): Ortholog of  Ceres SEQ ID NO 13597502 as cited in SEQ ID NO 64681
  misc_feature (1)..(1802): Ortholog of  Ceres SEQ ID NO 14305939 as cited in SEQ ID NO 0
gacagtggcaaacacttgaattaaaactgtttttttactacttgtagtaaaaccatgaagcgatcatccttggtcgattcttgttcatattcgagaatatttcgcagtattttctgtctcttatccttttgtatcttcttcttgacaacgaccaatgctcaggtaatgcatagacggctctggccttggccattgtggccacggccgtatccacagccgtggccaatgaatccaccaacacctgacccatcaccaaagcctgtcgcaccacctggcccatcatcaaaacctgtcgcaccaccaggcccatctccatgcccgtcaccaccaccaaagcctcaacccaagcccccaccagcacctagcccatctccatgcccatcaccaccacctaagcctcaaccaaagccagtgccaccaccagcatgcccaccaacacctcctaaacctcaaccgaagccagcaccaccgccagaaccaaagccagcgccaccaccagcaccaaagccagtcccatgtccatcaccacctaagccaccagccccaactccaaagcctgtcccaccacatggtccacctccaaaacctgctccagcaccaacgcctgccccttccccaaaacctgccccatcaccacctaagccagagaacaaaactataccggccgtgtttttctttggcgattcagtctttgacacaggaaataacaataatctagaaacaaagataaaaagtaattatcgtccctatggtatggactttaaattcagagttgcaactggtagattcagcaatggaatggttgcttccgattatttagccaaatacatgggagtaaaagaaattgtaccggcatatttagacccgaaaatacaaccaaacgatcttcttacgggagtatcttttgcatcgggtggtgctggctacaatcctactacatccgaagcagcgaatgcaatcccaatgctggaccaactgacatatttccaagactatatagagaaagtaaataggttagtaagacaagagaagagccaatataagttggcaggtttagagaagaccaatcagctaatatccaaaggagtggcaattgtcgtcgggggaagcaatgatctgatcattacatattttggaagtggtgctcaacgactcaaaaatgacatcgactcttataccactatcattgctgattctgccgccagtttcgttttgcaattgtatggatatggagcaagacgtataggagtgatcggaacaccaccacttggatgtgtaccatcacaaagactaaagaaaaagaaaatatgcaatgaagagctaaactatgcttctcagcttttcaattctaagctcctccttattttgggtcaattgtcaaaaaccctaccaaattctacattcgtttatatggacatctacactatcatcagtcagatgctagaaactcctgcggcttatggatttgaggagacaaagaaaccgtgttgcaaaacaggattattaagcgcaggtgccctctgcaagaagtctacatcgaaaatctgtcccaatacatcgtcttacttgttttgggacggtgtgcatcctactcaaagagcttataaaactataaacaaagtacttataaaagaataccttcatgttttatctaaataatagtattacattatttatctcatgcgaaaataaagacttttgctatgtactaatgatgtagaagatgtgggcccgtttctgtgactaaaaatgtagttaagcaaacaacatttgagatagtaatgtaagatttttcttttgtg

SEQ ID NO: 84649 - protein, 534 aa, Arabidopsis thaliana
  peptide (1)..(534): Ceres Seq. ID no. 12676350
MKRSSLVDSCSYSRIFRSIFCLLSFCIFFLTTTNAQVMHRRLWPWPLWPRPYPQPWPMNPPTPDPSPKPVAPPGPSSKPVAPPGPSPCPSPPPKPQPKPPPAPSPSPCPSPPPKPQPKPVPPPACPPTPPKPQPKPAPPPEPKPAPPPAPKPVPCPSPPKPPAPTPKPVPPHGPPPKPAPAPTPAPSPKPAPSPPKPENKTIPAVFFFGDSVFDTGNNNNLETKIKSNYRPYGMDFKFRVATGRFSNGMVASDYLAKYMGVKEIVPAYLDPKIQPNDLLTGVSFASGGAGYNPTTSEAANAIPMLDQLTYFQDYIEKVNRLVRQEKSQYKLAGLEKTNQLISKGVAIVVGGSNDLIITYFGSGAQRLKNDIDSYTTIIADSAASFVLQLYGYGARRIGVIGTPPLGCVPSQRLKKKKICNEELNYASQLFNSKLLLILGQLSKTLPNSTFVYMDIYTIISQMLETPAAYGFEETKKPCCKTGLLSAGALCKKSTSKICPNTSSYLFWDGVHPTQRAYKTINKVLIKEYLHVLSK

SEQ ID NO: 84650 - protein, 497 aa, Arabidopsis thaliana
  peptide (1)..(497): Ceres Seq. ID no. 12676351
MHRRLWPWPLWPRPYPQPWPMNPPTPDPSPKPVAPPGPSSKPVAPPGPSPCPSPPPKPQPKPPPAPSPSPCPSPPPKPQPKPVPPPACPPTPPKPQPKPAPPPEPKPAPPPAPKPVPCPSPPKPPAPTPKPVPPHGPPPKPAPAPTPAPSPKPAPSPPKPENKTIPAVFFFGDSVFDTGNNNNLETKIKSNYRPYGMDFKFRVATGRFSNGMVASDYLAKYMGVKEIVPAYLDPKIQPNDLLTGVSFASGGAGYNPTTSEAANAIPMLDQLTYFQDYIEKVNRLVRQEKSQYKLAGLEKTNQLISKGVAIVVGGSNDLIITYFGSGAQRLKNDIDSYTTIIADSAASFVLQLYGYGARRIGVIGTPPLGCVPSQRLKKKKICNEELNYASQLFNSKLLLILGQLSKTLPNSTFVYMDIYTIISQMLETPAAYGFEETKKPCCKTGLLSAGALCKKSTSKICPNTSSYLFWDGVHPTQRAYKTINKVLIKEYLHVLSK

SEQ ID NO: 84651 - protein, 477 aa, Arabidopsis thaliana
  peptide (1)..(477): Ceres Seq. ID no. 12676352
MNPPTPDPSPKPVAPPGPSSKPVAPPGPSPCPSPPPKPQPKPPPAPSPSPCPSPPPKPQPKPVPPPACPPTPPKPQPKPAPPPEPKPAPPPAPKPVPCPSPPKPPAPTPKPVPPHGPPPKPAPAPTPAPSPKPAPSPPKPENKTIPAVFFFGDSVFDTGNNNNLETKIKSNYRPYGMDFKFRVATGRFSNGMVASDYLAKYMGVKEIVPAYLDPKIQPNDLLTGVSFASGGAGYNPTTSEAANAIPMLDQLTYFQDYIEKVNRLVRQEKSQYKLAGLEKTNQLISKGVAIVVGGSNDLIITYFGSGAQRLKNDIDSYTTIIADSAASFVLQLYGYGARRIGVIGTPPLGCVPSQRLKKKKICNEELNYASQLFNSKLLLILGQLSKTLPNSTFVYMDIYTIISQMLETPAAYGFEETKKPCCKTGLLSAGALCKKSTSKICPNTSSYLFWDGVHPTQRAYKTINKVLIKEYLHVLSK

SEQ ID NO: 84652 - DNA, 1150 bp, Arabidopsis thaliana
  misc_feature (1)..(1150): Ceres Seq. ID no. 12676353
  misc_feature (1)..(1150): Ortholog of  Ceres SEQ ID NO 13596519 as cited in SEQ ID NO 62572
  misc_feature (1)..(1150): Ortholog of  Ceres SEQ ID NO 12625108 as cited in SEQ ID NO 68102
atcatcatctctttcttcttccaaaagtcataatcatgtcaaagtctctagctggattggcggttttggccgctctttttattgcggttgatgcgtttaggccttctggtttaactaatggtcacgctacattctatggaggaagtgacgcttctggaacaatgggtaatttcacactttagtttcattatgatctgactctaatggatttgttcaaataacgaaattatttttgttgtttttttccaggtggagcttgtggttacggagatctttactcggcggggtacgggacaatgacggcggcgttaagcacggctctgttcaacgacggagcttcttgcggagaatgctataggataacgtgtgatcacgcggcggactcacggtggtgcttgaaaggagcttctgtggttattacagccactaacttttgcccaccaaactttgctttgcctaacaacaacggtggttggtgcaatccgccgcttaaacatttcgacatggcacaacccgcttgggaaaagatcggaatttacagaggaggaatcgttcccgtcgttttccaaagagtaagctgttacaagaaaggaggagttagattcagaataaacggaagagactacttcgagctagtgaatattcaaaatgtaggaggagcaggttctattaaatctgtatccatcaaaggatcaaagactggttggttagccatgtctcgtaactggggagctaattggcaatcgaatgcttatctagatggtcaagctctctctttctccattaccactactgatggtgctactagagtctttctcaatgttgttccttcttcttggtcttttggacagatttattcttccaacgttcagttttaagtttttttttttgttttgtatgaaatatcattggcagtggtcgcgctttgagtctgtttcttttctccctgagcgacccgccctctttgttttttttatcttatggtatgatgggtctgttaatacaaaagacccgatatgatttgagggtatatgattatatgaagtgtattgtatttgaatgtttcagactcgaaaaagattctgtagcaaaaggagttttaacacatttgtacttggttttgtttatatgaagtttgttttagtttttt

SEQ ID NO: 84653 - protein, 193 aa, Arabidopsis thaliana; identical to SEQ ID NO: 28574
  peptide (1)..(193): Ceres Seq. ID no. 12676354

SEQ ID NO: 84654 - protein, 124 aa, Arabidopsis thaliana; identical to SEQ ID NO: 28575
  peptide (1)..(124): Ceres Seq. ID no. 12676355

SEQ ID NO: 84655 - DNA, 1056 bp, Arabidopsis thaliana
  misc_feature (1)..(1056): Ceres Seq. ID no. 12676387
  misc_feature (1)..(1056): Ortholog of  Ceres SEQ ID NO 15170458 as cited in SEQ ID NO 52842
  misc_feature (1)..(1056): Ortholog of  Ceres SEQ ID NO 13597679 as cited in SEQ ID NO 65073
atcgtcgtaggttgatatttaacaaggaatggcaaaggaagggggcttgggagagaactcaagatggagtcttggaggcatgaccgctcttgtcactggtggctctaaaggcatcggggaagctgtggtggaggaactagccatgttgggagcaaaagtccacacgtgtgccagagacgaaactcagcttcaagaacgcttacgtgaatggcaagcaaaagggtttcaggtcaccacttctgtctgcgacgtctcttctcgtgaccaacgagtgaaactcatggaaactgtttcctctctctaccaaggaaaactcaacatcctcgtcaacaatgtgggaacgtcaatattcaagccgaccacagagtatacagcagaagatttctcttttgtaatggctacaaatctcgagtcagctttccatctctcacagcttgcccacccattgttaaaagcctctggctcagggagcatcgtgctcatatcctctgctgctggagtcgtgcatgtcaatgttggatccatctatggagcaaccaaaggagccatgaatcagctggctagaaacttagcttgcgaatgggcgagcgacaacataaggacgaactctgtttgtccttggtatatcacaactcctttaagtaacgattttttcgatgaagagtttaagaaagaagcggtgcgtacgacaccaatggggcgtgttggagaagcaaatgaagtctcaccgcttgtggcatttctttgtcttccttcagcttcttatattactggtcagaccatttgcgttgacggcggtgccactgttaacggtttttccttcaagactatgccataaaacacatatgcatgtgtttggatcatattttcaataatttaaacttacgggttatatacatcgtcaatatgtaataaatgtaatttagatgtgtccacatgttctgtttctaagagattcttagatatttatgcttgcgtggtgaacaagagttcactctccggatggaccgcatccataatctatgaatttgggaattatattaccaatttgacggc

SEQ ID NO: 84656 - protein, 269 aa, Arabidopsis thaliana; identical to SEQ ID NO: 29594
  peptide (1)..(269): Ceres Seq. ID no. 12676388

SEQ ID NO: 84657 - protein, 252 aa, Arabidopsis thaliana; identical to SEQ ID NO: 29595
  peptide (1)..(252): Ceres Seq. ID no. 12676389

SEQ ID NO: 84658 - protein, 231 aa, Arabidopsis thaliana; identical to SEQ ID NO: 29596
  peptide (1)..(231): Ceres Seq. ID no. 12676390

SEQ ID NO: 84659 - DNA, 815 bp, Arabidopsis thaliana
  misc_feature (1)..(815): Ceres Seq. ID no. 12676406
  misc_feature (1)..(815): Ortholog of  Ceres SEQ ID NO 15172729 as cited in SEQ ID NO 56037
  misc_feature (1)..(815): Ortholog of  Ceres SEQ ID NO 13584899 as cited in SEQ ID NO 64830
  misc_feature (1)..(815): Ortholog of  Ceres SEQ ID NO 13654441 as cited in SEQ ID NO 67814
  misc_feature (1)..(815): Ortholog of  Ceres SEQ ID NO 13596128 as cited in SEQ ID NO 67831
  misc_feature (1)..(815): Ortholog of  Ceres SEQ ID NO 12585194 as cited in SEQ ID NO 68878
  misc_feature (1)..(815): Ortholog of  Ceres SEQ ID NO 12589186 as cited in SEQ ID NO 0
aagaaacagagaaaaagagagagagacccctaatggctgagaaagaagaagtgaagcttttggggatatgggcgagcccttttagccgtcgggtcgagatggctctcaaactcaaaggcataccgtacgagtacgtggaagagatactggagaacaaaagccctttgcttcttgctcttaaccctattcacaagaaagtccctgttcttgtccacaatggtaaaaccattctcgagtctcatgtgattcttgaatacatcgatgagacttggccacaaaatccaattctccctcaagatccttatgaaagatccaaagctcgtttctttgctaaactcgtcgatgaacagattatgaacgtggggtttatatcaatggcaagagcagacgagaaaggaagagaagttttagccgagcaggtaagagaactgattatgtatctcgagaaagaacttgtcggaaaagattacttcggaggcaagactgtcggattcttggactttgtcgccggaagtttaattccgttttgtttggagagaggttgggaaggaataggattggaagtgattacagaggagaagtttccagagttcaagagatgggttaggaatttggagaaggttgagattgttaaagattgtgttccaccaagagaggaacatgtagaacacatgaactatatggcagagagagtgagatcttcttaagaaaacaaatcatgtttagttcttgatcatgcaatgtttgtatggttatgttgttgtttattttattgaatatctttgtatgttgtgtggttgagaagtgaggtttta

SEQ ID NO: 84660 - protein, 234 aa, Arabidopsis thaliana
  peptide (1)..(234): Ceres Seq. ID no. 12676407
ETEKKRERPLMAEKEEVKLLGIWASPFSRRVEMALKLKGIPYEYVEEILENKSPLLLALNPIHKKVPVLVHNGKTILESHVILEYIDETWPQNPILPQDPYERSKARFFAKLVDEQIMNVGFISMARADEKGREVLAEQVRELIMYLEKELVGKDYFGGKTVGFLDFVAGSLIPFCLERGWEGIGLEVITEEKFPEFKRWVRNLEKVEIVKDCVPPREEHVEHMNYMAERVRSS

SEQ ID NO: 84661 - protein, 224 aa, Arabidopsis thaliana; identical to SEQ ID NO: 27461
  peptide (1)..(224): Ceres Seq. ID no. 12676408

SEQ ID NO: 84662 - protein, 202 aa, Arabidopsis thaliana; identical to SEQ ID NO: 27462
  peptide (1)..(202): Ceres Seq. ID no. 12676409

SEQ ID NO: 84663 - DNA, 1003 bp, Arabidopsis thaliana
  misc_feature (1)..(1003): Ceres Seq. ID no. 12676410
  misc_feature (1)..(1003): Ortholog of  Ceres SEQ ID NO 15172729 as cited in SEQ ID NO 56037
  misc_feature (1)..(1003): Ortholog of  Ceres SEQ ID NO 12615635 as cited in SEQ ID NO 63133
  misc_feature (1)..(1003): Ortholog of  Ceres SEQ ID NO 13584899 as cited in SEQ ID NO 64830
  misc_feature (1)..(1003): Ortholog of  Ceres SEQ ID NO 13654441 as cited in SEQ ID NO 67814
  misc_feature (1)..(1003): Ortholog of  Ceres SEQ ID NO 13596128 as cited in SEQ ID NO 67831
  misc_feature (1)..(1003): Ortholog of  Ceres SEQ ID NO 12585194 as cited in SEQ ID NO 68878
  misc_feature (1)..(1003): Ortholog of  Ceres SEQ ID NO 12589186 as cited in SEQ ID NO 0
atttgtgtatagaatatagtaaactcaagtaatcaagcaagtaaacgaaacataaaaaagaaaagtagtgcaagaaacagaggagttagataccaaaaagtgagagatatcgaatggcggagaaagaagagagtgtgaagcttctagggttttgggcaagcccttttagtcgtcgagtcgagatggctctcaaactcaaaggcgtgccatacgaatacttggaagaagatttgcccaacaagacccctttgcttctggagctaaacccgcttcacaagaaagttccggttcttgtccacaatgacaaaatattactcgagtcacatctgattctcgaatacatcgatcagacgtggaagaacagtccaattcttcctcaagatccttacgagaaggccatggctcgattttgggccaagttcatcgatgaccagatcctaacactagggtttaggtcccttgtaaaagcagagaaaggaagagaggttgctattgaagagactcgggaactgcttatgtttcttgagaaagaagtcactggaaaagatttcttcggtggcaagacaatcggattcttggacatgatcgcaggaagtatgatcccattttgtctagctagactttggaaaggtattggaattgatatgattccagaggagaagtttccggaattaaatagatggatcaagaatttggaagaagttgaggcagtgaggggatgtattcctccaagagagaaacaaattgagcgcatgaccaaaattgcagagacaattaagtctgcctaaattaaagatacttcttgcctacgaaaatatttgatttatatgcttgcatcgttttttatttatatttttattttttaaagtttttcgaaaaatagaatgacctaatatttaagtaaaaagatcaaaaacctatttgaaagttacagcaatcaaataacgtggtgtgtctggagattgtaaaagccaagactagaaggaaataagaataaaataac

SEQ ID NO: 84664 - protein, 224 aa, Arabidopsis thaliana; identical to SEQ ID NO: 77136
  peptide (1)..(224): Ceres Seq. ID no. 12676411

SEQ ID NO: 84665 - protein, 201 aa, Arabidopsis thaliana; identical to SEQ ID NO: 77137
  peptide (1)..(201): Ceres Seq. ID no. 12676412

SEQ ID NO: 84666 - protein, 129 aa, Arabidopsis thaliana; identical to SEQ ID NO: 77138
  peptide (1)..(129): Ceres Seq. ID no. 12676413

SEQ ID NO: 84667 - DNA, 1640 bp, Arabidopsis thaliana
  misc_feature (1)..(1640): Ceres Seq. ID no. 12676428
  misc_feature (1)..(1640): Ortholog of  Ceres SEQ ID NO 13599900 as cited in SEQ ID NO 531
  misc_feature (1)..(1640): Ortholog of  Ceres SEQ ID NO 15171402 as cited in SEQ ID NO 51174
  misc_feature (1)..(1640): Ortholog of  Ceres SEQ ID NO 13659971 as cited in SEQ ID NO 67565
  misc_feature (1)..(1640): Ortholog of  Ceres SEQ ID NO 13500385 as cited in SEQ ID NO 67583
attccataaaaagtaaattcacaacaaaaccaaaaaaaaaaaaagagaagaagaattagcttacgtgttcatcacatctgcattacgcgcaaacgaaacagattcaaattctccggcgaagttttcttattcatcaatcaatctctggattcatcaatcatgccagagatcgagattgccgccggcagcggcgacaacaacgacgccttattcggtaaatatgagctcggaaagcttctcggatgcggcgcattcgccaaagtcttccacgcacgtgatcgtcgtaccggccaaagcgtcgccgtgaaaatcctcaacaagaaaaaactcctcacaaatccagctctagccaacaacatcaaacgcgagatctcaatcatgagaagattatctcatccaaacatcgtcaagctccacgaagtaatggcgacaaaatcaaagatcttcttcgcaatggagtttgttaaaggaggagaactattcaacaaaatctcaaaacatggacgtcttagcgaagatttaagccggagatatttccagcaactgatctccgccgttggttattgccacgctcgcggtgtttaccaccgcgatctcaaaccagagaatctattaatagacgaaaacggaaacttaaaagtttccgatttcggtctaagcgcgttaacggatcagatccgacccgatgggttgttacataccttgtgtggtactccggcgtacgttgcgccggagattctatctaaaaaaggatatgaaggtgctaaagttgatgtatggtcttgtggaatcgtcttgttcgttctcgtcgccggttatttaccgtttaacgatccgaatgtgatgaatatgtataagaagatttataaaggagagtatcgttttcctcgttggatgtctccagatctgaaacgattcgtttctcgtcttttagatattaatcctgagactagaatcaccattgatgagattttgaaagatccttggtttgttagaggaggttttaaacagatcaagttccacgatgacgagatcgaagatcagaaagtggaatcgtcactagaagctgtgaagagtttaaacgcgtttgatttgatttcttactcgtcgggattggatttgtcgggattgtttgctggttgtagtaattcgagtggtgaatcggagaggtttttatcggaaaagtcgccggagatgttggcggaggaagtggaggggtttgcgagagaggagaatctgaggatgaagaagaagaaggaggaagagtatgggtttgagatggaggggcaaaatgggaaatttggtatcgggatttgtatttcgcggttgaatgatttgcttgtggtggtggaggcacggcggagaggtggtgatggtgattgttataaggagatgtggaatggtaaactcagggttcaacttattcgcgtttgcgatcagacgtcgtcaacaaacgcggctatttaaaagaacgctatgaagttttctaccgtgctttcaattttaaaacgccaatcgcgtttcgttggttggatttggtttctactacttttgtttcggaattaaaaacagagaaaaaataataaaaattaatgtatgtatttaaatactgtaccaaattgtaggtatctattttgtgc

SEQ ID NO: 84668 - protein, 435 aa, Arabidopsis thaliana; identical to SEQ ID NO: 40184
  peptide (1)..(435): Ceres Seq. ID no. 12676429

SEQ ID NO: 84669 - protein, 362 aa, Arabidopsis thaliana; identical to SEQ ID NO: 40185
  peptide (1)..(362): Ceres Seq. ID no. 12676430

SEQ ID NO: 84670 - protein, 347 aa, Arabidopsis thaliana; identical to SEQ ID NO: 40186
  peptide (1)..(347): Ceres Seq. ID no. 12676431

SEQ ID NO: 84671 - DNA, 1761 bp, Arabidopsis thaliana
  misc_feature (1)..(1761): Ceres Seq. ID no. 12676432
  misc_feature (1)..(1761): Ortholog of  Ceres SEQ ID NO 14303831 as cited in SEQ ID NO 52976
  misc_feature (1)..(1761): Ortholog of  Ceres SEQ ID NO 12619453 as cited in SEQ ID NO 65952
ctctctactcgccaagaagtttcctttcctttgattgcacaactaatctcaaactaaaagatcttctctttaggcatacccagatctttctctctctaaagtctccacctttcacggttttttgcttctcacctgaatccaatcaatctcgccggagtgaattcaccttcctccggttgactcgtcggacttagtccgacctttcaattcgtagattctgtttacaattcactgatcgtttgattagaaatgggttacttgttcttctaagtctctctttagctgaaagtttgttgctttacgactcttcgatttacccttacttgttcaagttcttcatcaaattcgtagttatggcgataagaatcactttcacttactccacccatgttgctcggaatctcgtcgggacccgtgttggtcccggtggttactgctttgaatccttggttcgtcctagattcttctcccacaagcgtgatttcgatagatctcctcggaatcgacctgcatcgatgtatggtagcatcgcgagggagctcatcggagaaggaagtcaaagcccgcttgtgatgggtttgatctcgatattgaagtcaacgacgggtcatgagtcgtcaacgatgaatgttctgggggtttcatctttcaaggcttcttctattattccgtttcttcaagggtcgaaatggattaagaatccaccggtgattgatgacgtggataaaggaggaacagtttgtgatgatgatgatgataaggaatcgaggaatggaggaagtggatgggttaataagcttttgagtgtttgttctgaggatgctaaggctgctttcacggcggttactgtttctatcctttttagatcagctcttgcggagccaaagtcgattccttcaacgtctatgtaccctaccttggacaagggtgatcgcgttatggcggagaaggtctcatactttttcaggaagccagaggtttcagatatagtaatcttcaaggctcctccaattttgctggaatatccggaatatggctacagttccaatgatgtattcataaaaaggatagtggcaagtgaaggtgactgggttgaagttcgtgatgggaagctctttgtgaatgacattgtgcaagaagaagattttgtcttagaaccaatgtcatatgaaatggaaccaatgtttgtccccaaaggttatgtctttgtccttggtgataaccgcaacaaaagctttgactctcataactggggtccacttccaatagagaacatcgttggaagatctgtgttccggtactggccaccgagcaaagtatcagacaccatataccacgaccaagctatcacaaggggacctgttgcagtttcatgacaaaagaaagttggatttttcttaggattaaagcacaagattgtgcaaaaccagtctggtcagaattgggtagacttggaattgaaactcaaaaccgttatgatatctgcagatacatactgtatcatcgttatggatcgcatctggttcttagctgatggtcgggaagccggagatgttacgtgtacaaaaggaatggaagatgcaaagaaaaggaaacgatttactgtgattgttatgtgtgaaaaccctggacaagatactgtagtaaagccataaaggcaactgttaaacaaaagtgtgattttttgttgttatgagtttgtactatagaatcgtgtaaaacctcctttgtgttgttgtatgtaaattgggatattgttat

SEQ ID NO: 84672 - protein, 340 aa, Arabidopsis thaliana
  peptide (1)..(340): Ceres Seq. ID no. 12676433
MAIRITFTYSTHVARNLVGTRVGPGGYCFESLVRPRFFSHKRDFDRSPRNRPASMYGSIARELIGEGSQSPLVMGLISILKSTTGHESSTMNVLGVSSFKASSIIPFLQGSKWIKNPPVIDDVDKGGTVCDDDDDKESRNGGSGWVNKLLSVCSEDAKAAFTAVTVSILFRSALAEPKSIPSTSMYPTLDKGDRVMAEKVSYFFRKPEVSDIVIFKAPPILLEYPEYGYSSNDVFIKRIVASEGDWVEVRDGKLFVNDIVQEEDFVLEPMSYEMEPMFVPKGYVFVLGDNRNKSFDSHNWGPLPIENIVGRSVFRYWPPSKVSDTIYHDQAITRGPVAVS

SEQ ID NO: 84673 - protein, 286 aa, Arabidopsis thaliana
  peptide (1)..(286): Ceres Seq. ID no. 12676434
MYGSIARELIGEGSQSPLVMGLISILKSTTGHESSTMNVLGVSSFKASSIIPFLQGSKWIKNPPVIDDVDKGGTVCDDDDDKESRNGGSGWVNKLLSVCSEDAKAAFTAVTVSILFRSALAEPKSIPSTSMYPTLDKGDRVMAEKVSYFFRKPEVSDIVIFKAPPILLEYPEYGYSSNDVFIKRIVASEGDWVEVRDGKLFVNDIVQEEDFVLEPMSYEMEPMFVPKGYVFVLGDNRNKSFDSHNWGPLPIENIVGRSVFRYWPPSKVSDTIYHDQAITRGPVAVS

SEQ ID NO: 84674 - protein, 267 aa, Arabidopsis thaliana
  peptide (1)..(267): Ceres Seq. ID no. 12676435
MGLISILKSTTGHESSTMNVLGVSSFKASSIIPFLQGSKWIKNPPVIDDVDKGGTVCDDDDDKESRNGGSGWVNKLLSVCSEDAKAAFTAVTVSILFRSALAEPKSIPSTSMYPTLDKGDRVMAEKVSYFFRKPEVSDIVIFKAPPILLEYPEYGYSSNDVFIKRIVASEGDWVEVRDGKLFVNDIVQEEDFVLEPMSYEMEPMFVPKGYVFVLGDNRNKSFDSHNWGPLPIENIVGRSVFRYWPPSKVSDTIYHDQAITRGPVAVS

SEQ ID NO: 84675 - DNA, 1479 bp, Arabidopsis thaliana
  misc_feature (1)..(1479): Ceres Seq. ID no. 12676436
  misc_feature (1)..(1479): Ortholog of  Ceres SEQ ID NO 14306949 as cited in SEQ ID NO 54919
  misc_feature (1)..(1479): Ortholog of  Ceres SEQ ID NO 15175723 as cited in SEQ ID NO 57875
ggtctctcccattttctgttctcttttgtattctgagtgaaagttttgttttctgggggaaaaaattagggttcttagatggaggagatagaaggaacaaacagagcagctgttgagagttgtcatagagttcttaatcttttacatagatcacagcaacaagatcatgttggttttgaaaagaatttagtatctgaaactagagaagctgtgattaggttcaagagagttgggagtttgttaagcagtagtgttggtcatgctaggtttagaagagctaagaaacttcagagtcatgtctctcaaagtctcttacttgatccatgtcaacaaaggacaacagaagttccatcatcatcttctcagaaaacaccggtactccggtctggtttccaggaattgagcttgagacaaccttcagattcactcactttagggactcgctcttttagtttaaactcaaatgctaaagctcctctccttcagcttaatcagcagacaatgcctccttcgaattatcctactttgtttccagtacaacaacaacaacaacaacaacaacaacaacaacagcaggagcagcagcagcagcagcagcagcaacagcaacagtttcatgaacggttacaagctcaccatcttcatcagcaacagcagctacagaaacatcaagctgagcttatgcttaggaaatgcaatggtgggataagtttgagtttcgataactctagttgtactccaactatgtcatccactaggtcctttgtttcttcacttagcatagatggtagtgttgctaatatagagggaaagaactccttccattttggggttcctagttcaactgatcagaattcactacattctaagaggaaatgccccttgaaaggagatgaacatggaagcttaaaatgcgggagctctagccgatgccactgcgctaagaagaggaaacatcgggttaggagatcgattagagtaccggctataagtaacaaggttgcagatatccctcctgatgattattcatggcgaaaatatggtcagaagcccatcaagggctctccttatcccagaggatattacaaatgtagtagcatgagaggttgtccagcgaggaagcatgttgagagatgtttggaagatccggcaatgcttattgttacttatgaagcagagcataaccacccgaaattgccatctcaagctataacaacttaactctcgtttatctttgcggtccagcataaaccttctcatgtatgttgttctcttttgtgcgcgatgatcggctttggggttgctgcaatgttgtgatatatggatcggggtaagtgcttttgttggggtggatttgcttgtgagagtttgctgcaattgttggattttgagctatatatggggtaaatgtaggattggtcaagactctttttctgtttctcaagtttattggtcttaatgattaaaagtttaatggtt

SEQ ID NO: 84676 - protein, 380 aa, Arabidopsis thaliana; identical to SEQ ID NO: 75997
  peptide (1)..(380): Ceres Seq. ID no. 12676437

SEQ ID NO: 84677 - protein, 239 aa, Arabidopsis thaliana; identical to SEQ ID NO: 75998
  peptide (1)..(239): Ceres Seq. ID no. 12676438

SEQ ID NO: 84678 - DNA, 1768 bp, Arabidopsis thaliana
  misc_feature (1)..(1768): Ceres Seq. ID no. 12676443
  misc_feature (1)..(1768): Ortholog of  Ceres SEQ ID NO 14313714 as cited in SEQ ID NO 54084
aaatccaaatcgttgcgttaaggtttcttcaagtttcaatctttttgcaatgaattgcccagccatgactgcttctccttcttcttcctcttcttcttcctactcaacgtttcgtcctcctcctccactcttgccacaattgagtaacgattcacaaagatctgttgttatgcactgcacaagattaccctttgaagcatttgctgctacttcatcaaaccggcttcttgggaaacattcattgcctttgagagcagctttggttacttcgaaccctttaaacatttcatcttcctcagttatctctgatgccatttcatcttcctctgttatcactgatgatgccaaaattggtgtcttgttattaaaccttggaggtcctgagactttagatgatgtacaaccctttttgtttaacctcttcgccgacccggacattatacggttgccgccggtattccagtttcttcagaagccattagcacagtttatatcagtagcaagagcacccaaaagcaaggaaggatatgcatctattggtggaggttctcctcttcgccacataactgatgcacaggctgaagaattaagaaaatgcctttgggaaaaaaatgtaccagcaaaggtatatgttggtatgcggtattggcatccattcactgaggaagccattgaacagataaaaagagatggaattacaaaactagttgttctaccactttatcctcaattttctatatcaactagtggttcaagcctaagactcttggagagaatatttcgagaggacgagtatcttgttaacatgcaacatactgttataccatcgtggtatcagcgggagggatatataaaggcaatggcaaatctaatccaaagcgagttgggaaaatttggttctcctaatcagtgcacatggcgtgcctcttgcatatgtcgaagaagccggtgatccttacaaggcagagatggaagaatgtgttgatctaatcatggaggaattagacaagagaaagataactaatgcttacactcttgcttatcagagcagagttggaccagttgaatggctgaaaccatacactgaagaagccattactgaacttggtaaaaaaggtgttgaaaatcttctggctgtacccataagttttgtgagcgagcacattgaaactctggaggagatagatgttgagtataaagagttggctttgaagtctggtatcaaaaactgggggcgagtacctgctctaggaacagaacctatgtttatatctgacttggcagatgctgttgtggaaagtcttccatacgttggtgctatggctgtctcaaaccttgaagctcgacagtcgttagttccgctcgggagtgtagaagaattattagcaacgtatgattcacagagaagggagttaccagcaccggtgacaatgtgggaatggggatggacaaaaagtgcagaaacatggaacggaagagcagcaatgttagcggtgctagcactcttggtgctcgaagtcaccaccggaaaagggtttctgcatcagtggggcatcttgccttcattataataaagataacgtatagtctttttctctatgaaaacccaatccaagaatccaaatgtgagctttcacatgtggaataaggccagctatgttattatgctctcttcttctctgttgtagaaatgttgacatttaaatacttcatactgtatcttcataaaacattaaatgttgacattttaatcggcatgctttttcgc

SEQ ID NO: 84679 - protein, 316 aa, Arabidopsis thaliana
  peptide (1)..(316): Ceres Seq. ID no. 12676444
NPNRCVKVSSSFNLFAMNCPAMTASPSSSSSSSYSTFRPPPPLLPQLSNDSQRSVVMHCTRLPFEAFAATSSNRLLGKHSLPLRAALVTSNPLNISSSSVISDAISSSSVITDDAKIGVLLLNLGGPETLDDVQPFLFNLFADPDIIRLPPVFQFLQKPLAQFISVARAPKSKEGYASIGGGSPLRHITDAQAEELRKCLWEKNVPAKVYVGMRYWHPFTEEAIEQIKRDGITKLVVLPLYPQFSISTSGSSLRLLERIFREDEYLVNMQHTVIPSWYQREGYIKAMANLIQSELGKFGSPNQCTWRASCICRRSR

SEQ ID NO: 84680 - protein, 300 aa, Arabidopsis thaliana
  peptide (1)..(300): Ceres Seq. ID no. 12676445
MNCPAMTASPSSSSSSSYSTFRPPPPLLPQLSNDSQRSVVMHCTRLPFEAFAATSSNRLLGKHSLPLRAALVTSNPLNISSSSVISDAISSSSVITDDAKIGVLLLNLGGPETLDDVQPFLFNLFADPDIIRLPPVFQFLQKPLAQFISVARAPKSKEGYASIGGGSPLRHITDAQAEELRKCLWEKNVPAKVYVGMRYWHPFTEEAIEQIKRDGITKLVVLPLYPQFSISTSGSSLRLLERIFREDEYLVNMQHTVIPSWYQREGYIKAMANLIQSELGKFGSPNQCTWRASCICRRSR

SEQ ID NO: 84681 - protein, 295 aa, Arabidopsis thaliana
  peptide (1)..(295): Ceres Seq. ID no. 12676446
MTASPSSSSSSSYSTFRPPPPLLPQLSNDSQRSVVMHCTRLPFEAFAATSSNRLLGKHSLPLRAALVTSNPLNISSSSVISDAISSSSVITDDAKIGVLLLNLGGPETLDDVQPFLFNLFADPDIIRLPPVFQFLQKPLAQFISVARAPKSKEGYASIGGGSPLRHITDAQAEELRKCLWEKNVPAKVYVGMRYWHPFTEEAIEQIKRDGITKLVVLPLYPQFSISTSGSSLRLLERIFREDEYLVNMQHTVIPSWYQREGYIKAMANLIQSELGKFGSPNQCTWRASCICRRSR

SEQ ID NO: 84682 - DNA, 1121 bp, Arabidopsis thaliana
  misc_feature (1)..(1121): Ceres Seq. ID no. 12676467
  misc_feature (1)..(1121): Ortholog of  Ceres SEQ ID NO 15169316 as cited in SEQ ID NO 54821
  misc_feature (1)..(1121): Ortholog of  Ceres SEQ ID NO 13598294 as cited in SEQ ID NO 61982
attttttgatatgtaaaatttatcgaaaacgttccatttcaatatgtagacaaagcggagaagtatattgtggaggcggcaagcaagggagcagagctagtgttgttcccggaggggtttatcggtggctatcctcgaggttttaggttcggtttagcggttggcgttcataacgaagaagggcgtgatgagtttcggaagtaccatgcttctgctattcatgttcctggccctgaagtagcaagattggctgacgtggctaggaaaaaccatgtgtacttggtaatgggagccatagagaaggaagggtataccctctattgcacagttcttttctttagtccacagggtcagttcttgggcaagcaccgtaaactcatgcccacaagtttggaacgttgcatttggggccaaggggacggatcaaccatccccgtttacgacactcccattggaaaactcggtgctgctatttgctgggagaataggatgcccctctacagaactgcattgtacgccaaaggcattgagctttattgtgcacctactgctgatggttcgaaagaatggcaatcgtcgatgcttcacattgcgatcgaaggtggatgtttcgtcttgtcggcttgccaattctgccagcgtaaacatttccctgatcatcctgactacttgtttaccgattggtacgacgacaaagaacatgattctattgtctcccaaggtggaagtgtcattatttcacctttgggacaagttctcgccggaccaaactttgaatcagagggtctcgtcacagctgatattgatcttggtgatatagcaagagccaagttatacttcgattcggttggacattactcgagaccagatgttttacacttgaccgtaaatgagcacccgaggaaatcggttacattcgtgacgaaggtggagaaagctgaggatgactcaaacaaatagtaagagacttgaagttcgtatctgctggagttatgtcaatcgtatggagtcaagtccaaaatgttctgttgcgttttcattttatgttcaagtttatttatctttctcttcaatggtaagatctatggagtcaagtaataatggtaagacttatgttgttg

SEQ ID NO: 84683 - protein, 224 aa, Arabidopsis thaliana; identical to SEQ ID NO: 43871
  peptide (1)..(224): Ceres Seq. ID no. 12676468

SEQ ID NO: 84684 - protein, 193 aa, Arabidopsis thaliana
  peptide (1)..(193): Ceres Seq. ID no. 12676469
MPTSLERCIWGQGDGSTIPVYDTPIGKLGAAICWENRMPLYRTALYAKGIELYCAPTADGSKEWQSSMLHIAIEGGCFVLSACQFCQRKHFPDHPDYLFTDWYDDKEHDSIVSQGGSVIISPLGQVLAGPNFESEGLVTADIDLGDIARAKLYFDSVGHYSRPDVLHLTVNEHPRKSVTFVTKVEKAEDDSNK

SEQ ID NO: 84685 - protein, 156 aa, Arabidopsis thaliana; identical to SEQ ID NO: 40302
  peptide (1)..(156): Ceres Seq. ID no. 12676470

SEQ ID NO: 84686 - DNA, 1002 bp, Arabidopsis thaliana
  misc_feature (1)..(1002): Ceres Seq. ID no. 12676475
  misc_feature (1)..(1002): Ortholog of  Ceres SEQ ID NO 12333459 as cited in SEQ ID NO 20477
  misc_feature (1)..(1002): Ortholog of  Ceres SEQ ID NO 15176155 as cited in SEQ ID NO 0
acattttcagctgctcataaaccctaaaaatcctctctttttctcaaccttgattcttagccatggagttctggggaattgaagttaaatcaggaaagccagttacagtgactcctgaagaaggcattcttatccacgtttctcaggcatcgcttggagaatgtaaaaacaagaagggagagtttgtgcctttacatgtaaaggttgggaaccagaacttggttctgggaactctatcgactgagaacatccctcagcttttctgtgatttggtattcgacaaggagtttgagctttctcacacttggggaaaaggaagtgtttactttgttggatacaaaactcccaacattgagccacaaggctattctggtgattcagaggaagaagaggaagaagaggaagaagttcctgctgggaatgctgccaaggctgtagctaaaccaaaggctaagcctgcagaagtgaagccagctgttgatgatgaagaggatgagtctgattctgacggaatggatgaagatgattctgatggtgaggattctgaggaagaagagcctacacctaagaagcctgcatcaagcaagaagagagctaatgaaactacccctaaagcacctgtgtcagcaaagaaggcgaaagtagcagttactcctcagaaaacagatgagaagaagaaagggggaaaggctgcaaaccagagcccaaagtcggccagtcaagtctcatgtggttcatgcaagaagactttcaactcagggaatgcacttgagtctcacaacaaggccaagcacgctgctgccaagtgaagtggtttcttattagagcttgtgatttctatggaattttgcctgtagtctttatgaaaccttcggattttcttatattttcttttgataacaagagtcttaatgaaagagagccagttggagtcttattaccactatatttcaacattctatcttggctcaaatgtgttaattttagattcacgttttcacc

SEQ ID NO: 84687 - protein, 248 aa, Arabidopsis thaliana
  peptide (1)..(248): Ceres Seq. ID no. 12676476
MEFWGIEVKSGKPVTVTPEEGILIHVSQASLGECKNKKGEFVPLHVKVGNQNLVLGTLSTENIPQLFCDLVFDKEFELSHTWGKGSVYFVGYKTPNIEPQGYSGDSEEEEEEEEEVPAGNAAKAVAKPKAKPAEVKPAVDDEEDESDSDGMDEDDSDGEDSEEEEPTPKKPASSKKRANETTPKAPVSAKKAKVAVTPQKTDEKKKGGKAANQSPKSASQVSCGSCKKTFNSGNALESHNKAKHAAAK

SEQ ID NO: 84688 - DNA, 2149 bp, Arabidopsis thaliana
  misc_feature (1)..(2149): Ceres Seq. ID no. 12676482
  misc_feature (1)..(2149): Ortholog of  Ceres SEQ ID NO 13599900 as cited in SEQ ID NO 531
acaaattccacatttctcagttctcacgcacgacgtctctgagccctagcgtccggcgaatccttttttttctcttttcttcatttccttttgcttcatttcgaatcaaattcaattttatatgtgagattttcattcttattcatatgagtttttgttagatttcttccagttggtgaatcgtggtactcatttcttctcatgtgccatggatattgaaattagggtttttttttacgtctagagtcaattgggtttgtgatttattggggtttactcgaaattgccgttattgggtttcttaaagtcttcgtcttttgatgttcttcatcagttcaaatttacgatttttgtgagggttttggatacaaatgttgatttctatgtggattgatcatatggattatgtaaagtttatccctttcttcgaaagatttgatctttaatgtgtatcaattcttgtttgctgacttttgttacattaccctgttttgcagaagcttggagtttatctttgactttattgttggatgttaaagctatcttatcttatagtataaagtggagtttcgacatgttgcgattcagttgtagtggttttgatatctcaagttgttttattcatcttgctgaatggcatcctttggaataacgaagcttaccgggctttgaagcccctctttttgcagagtttcgttattgttagcttgtggtctacttgagaaattcataaattttggagtagataatgttttgtgatagttttgcatttgcccaagtgatgagttgcttcgggtgttttggtggctctgagagatcaagacattcaccaaatccatatgatgatgatacatattcccatgatagtggtgaaaccagcaatccgggaggagatgatgaagaaggagaagaggaagaggaagtagaggagctaagtcgttccaaacgatctgaagaaattttgaaatgtaaactacaaaatggactagtctgcaggcagtttccagtcaaggaaactaataaacttacacgcggagaggatgaagatggaaacaagacaataaatgagtttgttcgtgagcgtaaaattggatctggtagttatgggaaagtggttctctatcgaagcactgtcgatgacaagcattatgctattaaggcttttcacaagtcacatttatcgaggctacgggttgcaccttcagaaactgctatgggtgatgttcttcgtgaggttatgattatgaaaaccctggagcatcctaatatcgttaatctcattgaggtgattgatgaccctgagtttgatgatttttacatggttctcgaatatgttgatggaaaatgggcctatgatgattctggaccaccgggtgctctcggagaaattactgctagaaagtacttgcgcgatgtagttgccggcctcatgtaccttcatgctcataatgtaattcatggtgacatcaaacctgacaatttactggttactagtaccgggagagtgaaaataggagatttcagtgtcagccaagtattcaaagatgatgatgatcaactccgtagatcacccggcactcctgtctttactgccccagaatgttgtttaggtataacatacagtggaagatctgcagatacgtgggcagtaggagttactttgtattgtatgattttaggacaatacccatttctgggtgatacacttcaagatacttatgacaagattgttcacaacccgttgataataccggaaggactcaatcctcgtctaagggacttgatcgaaggtctcctttgcaaagatccaaaccagaggatgacgttgaaagctgtggcggagcatccatggatcacaggagaagacggggctatttcggaatactgttgttggtgcaaacgcaaagctgaagaagaagaagatcaaaaccatagctgaaagctagtacgggtatatacttgattgaacatagcaatcatctcgttgcatgttggcgattagaagcgtttgcgtttgaagtttgttataagttttttggtatttgacgcaataccgttgttttgagcctctcttgattgtgtgtctcggtctgtcggtcatgtattgagaagactcttgatagtcttttttctctttgttttcttcact

SEQ ID NO: 84689 - protein, 396 aa, Arabidopsis thaliana
  peptide (1)..(396): Ceres Seq. ID no. 12676483
MFCDSFAFAQVMSCFGCFGGSERSRHSPNPYDDDTYSHDSGETSNPGGDDEEGEEEEEVEELSRSKRSEEILKCKLQNGLVCRQFPVKETNKLTRGEDEDGNKTINEFVRERKIGSGSYGKVVLYRSTVDDKHYAIKAFHKSHLSRLRVAPSETAMGDVLREVMIMKTLEHPNIVNLIEVIDDPEFDDFYMVLEYVDGKWAYDDSGPPGALGEITARKYLRDVVAGLMYLHAHNVIHGDIKPDNLLVTSTGRVKIGDFSVSQVFKDDDDQLRRSPGTPVFTAPECCLGITYSGRSADTWAVGVTLYCMILGQYPFLGDTLQDTYDKIVHNPLIIPEGLNPRLRDLIEGLLCKDPNQRMTLKAVAEHPWITGEDGAISEYCCWCKRKAEEEEDQNHS

SEQ ID NO: 84690 - protein, 385 aa, Arabidopsis thaliana
  peptide (1)..(385): Ceres Seq. ID no. 12676484
MSCFGCFGGSERSRHSPNPYDDDTYSHDSGETSNPGGDDEEGEEEEEVEELSRSKRSEEILKCKLQNGLVCRQFPVKETNKLTRGEDEDGNKTINEFVRERKIGSGSYGKVVLYRSTVDDKHYAIKAFHKSHLSRLRVAPSETAMGDVLREVMIMKTLEHPNIVNLIEVIDDPEFDDFYMVLEYVDGKWAYDDSGPPGALGEITARKYLRDVVAGLMYLHAHNVIHGDIKPDNLLVTSTGRVKIGDFSVSQVFKDDDDQLRRSPGTPVFTAPECCLGITYSGRSADTWAVGVTLYCMILGQYPFLGDTLQDTYDKIVHNPLIIPEGLNPRLRDLIEGLLCKDPNQRMTLKAVAEHPWITGEDGAISEYCCWCKRKAEEEEDQNHS

SEQ ID NO: 84691 - protein, 241 aa, Arabidopsis thaliana
  peptide (1)..(241): Ceres Seq. ID no. 12676485
MGDVLREVMIMKTLEHPNIVNLIEVIDDPEFDDFYMVLEYVDGKWAYDDSGPPGALGEITARKYLRDVVAGLMYLHAHNVIHGDIKPDNLLVTSTGRVKIGDFSVSQVFKDDDDQLRRSPGTPVFTAPECCLGITYSGRSADTWAVGVTLYCMILGQYPFLGDTLQDTYDKIVHNPLIIPEGLNPRLRDLIEGLLCKDPNQRMTLKAVAEHPWITGEDGAISEYCCWCKRKAEEEEDQNHS

SEQ ID NO: 84692 - DNA, 1480 bp, Arabidopsis thaliana
  misc_feature (1)..(1480): Ceres Seq. ID no. 12676486
  misc_feature (1)..(1480): Ortholog of  Ceres SEQ ID NO 13592852 as cited in SEQ ID NO 20709
  misc_feature (1)..(1480): Ortholog of  Ceres SEQ ID NO 13532807 as cited in SEQ ID NO 53012
  misc_feature (1)..(1480): Ortholog of  Ceres SEQ ID NO 14313425 as cited in SEQ ID NO 54973
  misc_feature (1)..(1480): Ortholog of  Ceres SEQ ID NO 13663060 as cited in SEQ ID NO 60964
  misc_feature (1)..(1480): Ortholog of  Ceres SEQ ID NO 13656849 as cited in SEQ ID NO 65764
  misc_feature (1)..(1480): Ortholog of  Ceres SEQ ID NO 13500573 as cited in SEQ ID NO 67431
  misc_feature (1)..(1480): Ortholog of  Ceres SEQ ID NO 13655298 as cited in SEQ ID NO 68914
  misc_feature (1)..(1480): Ortholog of  Ceres SEQ ID NO 13656501 as cited in SEQ ID NO 69206
accgcgaaaactcatctctgctcaatcctcaatctcagtctctctgttgactccgactgttatataaaaccatacaaataccttcagattcactacttcaaacctcaaagcaaccactgaatctcgactttgatcaattgagagagaaatgaacaccggcggtggccaatacacggattttccggcggtggaaactcacggaggacagttcataagttacgatatcttcggtagtttattcgagatcacatctaagtatcgtcctccgattataccaattggtcgtggagcttatggaatcgtttgctctgtgttggatacggagacgaacgagctagtagcgatgaagaagatagctaatgcttttgataatcatatggatgctaagcgtacgcttcgtgagatcaagcttcttcgtcatcttgatcatgaaaacattatagctataagagatgttgttccaccaccactaagaagacagttcagtgatgtttatatctctactgaattaatggatactgatcttcatcaaatcatcagatctaaccagagtttatcagaagaacactgtcagtacttcttgtaccagctacttcgaggactgaagtatatccactcagctaacattattcatagggatttaaagccgagcaatcttctgttgaacgcgaattgcgatttaaagatttgtgatttcggtcttgctagacctacttcagagaatgattttatgactgagtatgttgttacgagatggtatagagcacctgagcttctgttgaactcttcagattacacagctgctattgatgtttggtctgttggttgtatctttatggagcttatgaatagaaagcctttgttccctggtaaagaccatgttcatcaaatgcgcttattgacagagttgcttggcacaccgacagaatctgatctcggttttactcacaatgaggatgcgaaaagatacatccggcaacttcccaacttcccacgtcagcccttagctaaacttttctctcatgttaacccaatggccattgatcttgttgacagaatgttgacgtttgaccccaacagaagaatcactgttgaacaagctctgaatcaccagtaccttgctaaattgcacgacccgaatgatgagccaatctgtcaaaagccattctcttttgagttcgaacaacagcctctggatgaggaacagataaaagagatgatctaccaagaagccatagcactcaatccaacatacggttagaagtgcagcagccccgtgaatgcctggtattacccaataaccatccgaatggctacttagtatctttgcctgttcttttattcatgtacttcttccacatatgtaatcttgtaacttttatttgtttgttcatgttatttactgctagtgattaagtgtagctccaatgtaaagtactccagttattaaagaatatctatagacttttttacttcacat

SEQ ID NO: 84693 - protein, 370 aa, Arabidopsis thaliana
  peptide (1)..(370): Ceres Seq. ID no. 12676487
MNTGGGQYTDFPAVETHGGQFISYDIFGSLFEITSKYRPPIIPIGRGAYGIVCSVLDTETNELVAMKKIANAFDNHMDAKRTLREIKLLRHLDHENIIAIRDVVPPPLRRQFSDVYISTELMDTDLHQIIRSNQSLSEEHCQYFLYQLLRGLKYIHSANIIHRDLKPSNLLLNANCDLKICDFGLARPTSENDFMTEYVVTRWYRAPELLLNSSDYTAAIDVWSVGCIFMELMNRKPLFPGKDHVHQMRLLTELLGTPTESDLGFTHNEDAKRYIRQLPNFPRQPLAKLFSHVNPMAIDLVDRMLTFDPNRRITVEQALNHQYLAKLHDPNDEPICQKPFSFEFEQQPLDEEQIKEMIYQEAIALNPTYG

SEQ ID NO: 84694 - protein, 305 aa, Arabidopsis thaliana
  peptide (1)..(305): Ceres Seq. ID no. 12676488
MKKIANAFDNHMDAKRTLREIKLLRHLDHENIIAIRDVVPPPLRRQFSDVYISTELMDTDLHQIIRSNQSLSEEHCQYFLYQLLRGLKYIHSANIIHRDLKPSNLLLNANCDLKICDFGLARPTSENDFMTEYVVTRWYRAPELLLNSSDYTAAIDVWSVGCIFMELMNRKPLFPGKDHVHQMRLLTELLGTPTESDLGFTHNEDAKRYIRQLPNFPRQPLAKLFSHVNPMAIDLVDRMLTFDPNRRITVEQALNHQYLAKLHDPNDEPICQKPFSFEFEQQPLDEEQIKEMIYQEAIALNPTYG

SEQ ID NO: 84695 - protein, 294 aa, Arabidopsis thaliana
  peptide (1)..(294): Ceres Seq. ID no. 12676489
MDAKRTLREIKLLRHLDHENIIAIRDVVPPPLRRQFSDVYISTELMDTDLHQIIRSNQSLSEEHCQYFLYQLLRGLKYIHSANIIHRDLKPSNLLLNANCDLKICDFGLARPTSENDFMTEYVVTRWYRAPELLLNSSDYTAAIDVWSVGCIFMELMNRKPLFPGKDHVHQMRLLTELLGTPTESDLGFTHNEDAKRYIRQLPNFPRQPLAKLFSHVNPMAIDLVDRMLTFDPNRRITVEQALNHQYLAKLHDPNDEPICQKPFSFEFEQQPLDEEQIKEMIYQEAIALNPTYG

SEQ ID NO: 84696 - DNA, 1983 bp, Arabidopsis thaliana
  misc_feature (1)..(1983): Ceres Seq. ID no. 12676532
  misc_feature (1)..(1983): Ortholog of  Ceres SEQ ID NO 14315146 as cited in SEQ ID NO 52929
  misc_feature (1)..(1983): Ortholog of  Ceres SEQ ID NO 13584538 as cited in SEQ ID NO 64739
  misc_feature (1)..(1983): Ortholog of  Ceres SEQ ID NO 15169643 as cited in SEQ ID NO 64826
  misc_feature (1)..(1983): Ortholog of  Ceres SEQ ID NO 15169647 as cited in SEQ ID NO 64930
gtcttccgttgcgtgagatattattgaacggtgtttgttattcggagaagaagaagaagaagaactgaagaagcatattcgacggtcaccaccaaacctcttccgtcggattttcactctccgtttatcgaacatctgagatctctctccacttccgtcaccgaagatgcattccagtcatcttcttctcgaggagccgatcaggatggcttcaatcctcgagccttccaaatctagtttcttcccggcattgactaagatcgtcggaactctaggtcctaaatcccgatccgtcgaggctctctccggctgtctcaaagccggcatgtctgtggctcgatttgatttctcgtggggagatgctgattatcaccaggagacacttgataatttgaaagttgctgtgaggagcactaagaagctttgtgctgttatgcttgatactgttggacctgagctacaagttattaacaaatctgagaaagctattactttgaaagctgatggccttgtaactttgacaccgaatcaagatcaagaagcttcttctgaagttcttcccattaatttcaatggacttgccaaggcagtgaagaaaggagacaccatcttcgttgggcaatacctattcactggtagtgaaacaacttcagtttggctcgaggttgatgaagttaaaggagatgatgtcatttgcctttcaaggaatgctgctactctggctggttctttgttcactttacactcctctcaagttcacattgatctcccaacgcttacagagaaggataaggaggttataagcacatggggagttcaaaataaaatcgattttctctcattgtcttattgtcgtcatgctgaggatgttcgccagacccgtgaaatgcttaaaaagttgggcgacctctctcaaacacaaatatttgctaagattgagaacgtagagggactaacccacttcgatgagattctacaagaagctgatggcattattctttctcgtgggaatttgggtatagatttacccccggaaaaggtgtttttgtttcaaaaggctgctctttacaagtgcaacatggctggaaagccagctgttcttacccgtgttgttgacagtatgactgacaacttgcgaccaactcgtgctgaggccacggatgttgctaatgctgttttagatggaagtgatgcaattcttcttggtgctgagacccttcgtggattgtaccctgttgagacaatatcaactgttggtaggatctgtgctgaggcagaaaaggttttcaatcaagatttgtactttaagaagactgtcaagtatgttggagaaccaatgactcacttggaatcgattgcttcttcagctgtacgggcagccattaaggttaaggcatccgtaattatatgcttcacctcttctggaagagcagccagattgattgccaaatacaggccaacgatgccggttatttctgttgtcattccccgggttaagacaaatcaactgaaatggagctttagtggagcttttgaggcgaggcagtcacttattgtcagaggcctcttccctatgcttgctgaccctcgtcaccctgcggaatctacaagtgcgacaaacgagtcagtcctgaaggttgctctagaccatgggaagcatgctggagtaatcaagtcgcatgacagagtagtggtgtgtcagaaagttggtgatgcatctgtggttaagatcattgagcttgaggattaacttttgcctcgcaaaaacattatataattggctgcattttgggttgccttgaattgatgataactcccaatgccggagtgaaaatattatctccgggacttctggtttctttttgtatacttaggagatttgatgtctctaaggtttcagctatatttgattaccttcaaatgtacgcatatgataaaagtatacaatgcctagcaattttataataagctgttacattccct

SEQ ID NO: 84697 - protein, 527 aa, Arabidopsis thaliana; identical to SEQ ID NO: 28911
  peptide (1)..(527): Ceres Seq. ID no. 12676533

SEQ ID NO: 84698 - protein, 514 aa, Arabidopsis thaliana; identical to SEQ ID NO: 28912
  peptide (1)..(514): Ceres Seq. ID no. 12676534

SEQ ID NO: 84699 - protein, 474 aa, Arabidopsis thaliana; identical to SEQ ID NO: 28913
  peptide (1)..(474): Ceres Seq. ID no. 12676535

SEQ ID NO: 84700 - DNA, 1434 bp, Arabidopsis thaliana
  misc_feature (1)..(1434): Ceres Seq. ID no. 12676536
  misc_feature (1)..(1434): Ortholog of  Ceres SEQ ID NO 13593955 as cited in SEQ ID NO 54278
  misc_feature (1)..(1434): Ortholog of  Ceres SEQ ID NO 14314092 as cited in SEQ ID NO 62788
  misc_feature (1)..(1434): Ortholog of  Ceres SEQ ID NO 13655302 as cited in SEQ ID NO 63307
  misc_feature (1)..(1434): Ortholog of  Ceres SEQ ID NO 13597380 as cited in SEQ ID NO 64054
  misc_feature (1)..(1434): Ortholog of  Ceres SEQ ID NO 12625474 as cited in SEQ ID NO 64169
  misc_feature (1)..(1434): Ortholog of  Ceres SEQ ID NO 13597502 as cited in SEQ ID NO 64681
atttctttctctctgcttctctctcttctctatttgtcctaacgacctgattgcattagacaggaacgaaaaggaatgcaaaagatgagagtttcggggtttagagttcttctcttggtttcttgtttcttctgcaaatccaaaggagctgttgttcctgcactcatcatgtttggcgactccattgttgacgttggcaacaacaataacttactcagcattgtcaaatccaactttcttccttacggtagagacttcatcgaccaaagacccaccggaagattctgcaacggaaaactcgctgtagatttctcagccgagtaccttggtttctcttcatacccacctgcattcctaagccgggaagcaagcaacgagaatatcctgatcggtgccaactttgcatcagcttcttcaggatactatgatgccacatctgttccatttggctcgatctccttaacacgacagctgagctattacagggcgtatcaaaatagagtaacgagaatgatcgggagggggaacgcgcgcatactgttctctagaggtatccacattttgagtgcgggatctagcgactttcttcagaattattacatcaatcctctactcaacatcctaaatacacctgatcagttcgctgacattctcctgagatccttctcagaattcatccagaatctgtatgaactaggagcaaggagaatcggagtgatatcgctaccgccgatgggttgcctgcctgcagctatcactcttttcggtgcaggaaacaaaagttgtgttgagagactgaacaatgatgctatcatgttcaatactaaacttgagaacacaacccggttactgatgaatagacactcaggcctcagactcgtcgcctttaatgtctaccaacctttcctggacatcatcaccaacccaactgacaatggattctttgaaacaaaaagggcatgctgcggaacagggacaatagaaacatcgttcctttgcaattctctatccttcggaacgtgtgtaaatgccacaggatatgtgttttgggatggatttcatcccacagaggctgtaaacgagctgttggctggtcaactactgggtcaagggatttctctaatcaattgaattgagcttcattccagttggattgaattcaaactgtatacctacaaatagctaccaaagtttgtctctctctctctatctctctctcttctctctttctctttctctctctatatatgtaactcacaaataagagacagattgtgtgtgcgtgtgtgtgactgaatgtagaaactaccaatctggtctgtgtcactgtgtgatggcctgatgggtctataggtccaagatttgtttgagaagatcacaatctttggtattttatttttgttccgaatctacctctttaacatttctaaggtt

SEQ ID NO: 84701 - protein, 351 aa, Arabidopsis thaliana; identical to SEQ ID NO: 70245
  peptide (1)..(351): Ceres Seq. ID no. 12676537

SEQ ID NO: 84702 - protein, 348 aa, Arabidopsis thaliana; identical to SEQ ID NO: 70246
  peptide (1)..(348): Ceres Seq. ID no. 12676538

SEQ ID NO: 84703 - protein, 320 aa, Arabidopsis thaliana; identical to SEQ ID NO: 70247
  peptide (1)..(320): Ceres Seq. ID no. 12676539

SEQ ID NO: 84704 - DNA, 490 bp, Arabidopsis thaliana
  misc_feature (1)..(490): Ceres Seq. ID no. 12676582
  misc_feature (1)..(490): Ortholog of  Ceres SEQ ID NO 14302474 as cited in SEQ ID NO 60589
aaaaccattcggcaaaatcaaataatctttttcttagttcgaatttaatttcccaagagaaaaatgtcaggccgaggaaagggaggaaaaggattaggaaagggaggagccaagagacatcggaaagtactcagagacaacatccaagggattaccaaacctgcgattcgtcgtctcgcgagaagaggaggcgtgaagcgtatcagtggtttgatctatgaagagactcgcggcgttctcaagatctttctcgagaacgtgattcgtgacgccgttacttacacggagcacgctcgccggaaaactgttacggcgatggacgtcgtttacgctctcaagagacaaggacgaactttgtatggattcggcggctaaatcgttcggattgcaatttcggattttgtaaactcttcaatttcagcatctagggatttcagatttgtaatttctcagttaaacgatgaatgaattgaaaaaaaaagaattgtct

SEQ ID NO: 84705 - protein, 103 aa, Arabidopsis thaliana; identical to SEQ ID NO: 7737
  peptide (1)..(103): Ceres Seq. ID no. 12676583

SEQ ID NO: 84706 - protein, 72 aa, Arabidopsis thaliana
  peptide (1)..(72): Ceres Seq. ID no. 12676584
NHSAKSNNLFLSSNLISQEKNVRPRKGRKRIRKGRSQETSESTQRQHPRDYQTCDSSSREKRRREAYQWFDL

SEQ ID NO: 84707 - DNA, 2058 bp, Arabidopsis thaliana
  misc_feature (1)..(2058): Ceres Seq. ID no. 12676585
  misc_feature (1)..(2058): Ortholog of  Ceres SEQ ID NO 15171212 as cited in SEQ ID NO 56899
  misc_feature (1)..(2058): Ortholog of  Ceres SEQ ID NO 12613725 as cited in SEQ ID NO 68196
aagtcttttttataagctcatgctcattattactccgacaagtgccgtgtaattcctcgccctcggctactcttttctcttcttgcctctcgtctccgccgctgattcagctgccgccgacaaaggaatatggaagaaaaagatgtgtatacgcaagatggaactgttgatattcacaaaaatcctgcaaacaaggagaaaaccggaaattggaaagcttgccgcttcattctcggaaatgagtgctgtgaaagattggcctactatggcatgggcactaaccttgtgaattatcttgagagccgtctgaatcaaggcaatgctacggctgcaaataacgtcacgaattggtctggaacatgttatataactcctttgattggagcctttatagctgatgcttaccttggacgatattggactattgcaacttttgttttcatctatgtctccggtatgactcttttgacattatcagcttcagttcctggacttaaaccaggtaactgcaatgctgatacttgtcatccaaattctagtcagactgctgttttctttgtcgcgctttatatgattgctcttggaactggcggtataaagccgtgtgtttcgtcctttggagctgatcagtttgatgagaatgatgagaatgagaagatcaagaaaagttctttcttcaactggttttacttctccattaatgttggagctctcattgctgcaactgttctcgtctggatacaaatgaatgttggttggggatggggtttcggtgttccaacagtcgcgatggttatcgcggtttgctttttcttcttcggaagccgtttttacagacttcagagacctggagggagtccacttactaggatctttcaggttatagtagcggcttttcggaagataagtgttaaggttccagaggacaagtctctgctctttgaaactgcagatgatgagagtaacatcaaaggtagccggaaacttgtgcacacagataacttaaagttttttgacaaggcagcggttgagagtcaatctgatagcatcaaagacggggaagtcaatccatggagactatgttctgttactcaagttgaagaacttaagtcaataatcacacttcttccagtttgggccacaggaatagtcttcgccacagtgtacagccaaatgagcacaatgtttgtgttacaaggaaacacaatggaccaacacatgggaaaaaactttgaaatcccatcagcttcactctcacttttcgacactgtcagtgtactcttctggactcctgtctatgaccagttcattatcccgctggcaagaaagttcacacgcaatgaacgaggcttcactcagcttcaacgtatgggtataggtcttgtggtctccatctttgccatgatcactgcaggagtcttggaggttgtcaggcttgattatgtcaaaactcacaatgcatatgaccaaaaacagatccatatgtcgatattctggcagataccgcagtatttacttatcggttgtgcagaagttttcacctttataggtcagcttgagtttttctatgatcaggctcctgatgccatgagaagtctctgctctgctttgtcgttgaccacggttgcgttggggaactatttgagcacagttcttgtgacggttgtgatgaagataacgaagaagaacggtaaaccgggttggataccggataacttgaaccgaggccatcttgattactttttctacttgttggcaactctcagtttcctcaacttcttagtgtacctctggatttcaaaacgctacaaatacaagaaagctgttggtcgagcacattgatcaagaaactggtgtggaagatatttggagttaacagtatttgtttgaaaagtgttttgcttgtaaatgttttttgtatgtggtctagttgttgttggtgtgttaggtttgttttggttttgcttatgtatttctgaatacttccagtcttccacttatatgtaaaaggctattggtaactattttatgagctttttgcttaaagctttttgaccg

SEQ ID NO: 84708 - protein, 570 aa, Arabidopsis thaliana; identical to SEQ ID NO: 40911
  peptide (1)..(570): Ceres Seq. ID no. 12676586

SEQ ID NO: 84709 - protein, 523 aa, Arabidopsis thaliana; identical to SEQ ID NO: 40912
  peptide (1)..(523): Ceres Seq. ID no. 12676587

SEQ ID NO: 84710 - protein, 461 aa, Arabidopsis thaliana; identical to SEQ ID NO: 40913
  peptide (1)..(461): Ceres Seq. ID no. 12676588

SEQ ID NO: 84711 - DNA, 952 bp, Arabidopsis thaliana
  misc_feature (1)..(952): Ceres Seq. ID no. 12676597
  misc_feature (1)..(952): Ortholog of  Ceres SEQ ID NO 13593920 as cited in SEQ ID NO 54151
  misc_feature (1)..(952): Ortholog of  Ceres SEQ ID NO 15225313 as cited in SEQ ID NO 58628
aacaaaaagattaaacaaagagagaagaatatggcgagagggaagatccagatcaagaggatagagaaccagacaaacagacaagtgacgtattcaaagagaagaaatggtttattcaagaaagcacatgagctcacggttttgtgtgatgctagggtttcgattatcatgttctctagctccaacaagcttcatgagtatatcagccctaacaccacaacgaaggagatcgtagatctgtaccaaactatttctgatgtcgatgtttgggccactcaatatgagcgaatgcaagaaaccaagaggaaactgttggagacaaatagaaatctccggactcagatcaagcagaggctaggtgagtgtttggacgagcttgacattcaggagctgcgtcgtcttgaggatgaaatggaaaacactttcaaactcgttcgcgagcgcaagttcaaatctcttgggaatcagatcgagaccaccaagaaaaagaacaaaagtcaacaagacatacaaaagaatctcatacatgagctgactaagagctgaagatcctcactatggactagtagacaatggaggagattacgactcagttcttggataccaaatcgaagggtcacgtgcttacgctcttcgtttccaccagaaccatcaccactattaccccaaccatggccttcatgcaccctctgcctctgacatcattaccttccatcttcttgaataattaaaggctaaaaggtttgctggtgccatcattgtctatctaattatttagtaactacttaaaacataaggcatggtgttgctaaaaccttaaactgtcatgtttcttagttatgtattttaaagcctaaagaaatatggattgtgtgatcagtagtgcttaggcttattgtgtgtggaatgttttcaagacttttatcatgtatcgtattattatattgaccac

SEQ ID NO: 84712 - protein, 181 aa, Arabidopsis thaliana
  peptide (1)..(181): Ceres Seq. ID no. 12676598
NKKIKQREKNMARGKIQIKRIENQTNRQVTYSKRRNGLFKKAHELTVLCDARVSIIMFSSSNKLHEYISPNTTTKEIVDLYQTISDVDVWATQYERMQETKRKLLETNRNLRTQIKQRLGECLDELDIQELRRLEDEMENTFKLVRERKFKSLGNQIETTKKKNKSQQDIQKNLIHELTKS

SEQ ID NO: 84713 - protein, 171 aa, Arabidopsis thaliana
  peptide (1)..(171): Ceres Seq. ID no. 12676599
MARGKIQIKRIENQTNRQVTYSKRRNGLFKKAHELTVLCDARVSIIMFSSSNKLHEYISPNTTTKEIVDLYQTISDVDVWATQYERMQETKRKLLETNRNLRTQIKQRLGECLDELDIQELRRLEDEMENTFKLVRERKFKSLGNQIETTKKKNKSQQDIQKNLIHELTKS

SEQ ID NO: 84714 - protein, 125 aa, Arabidopsis thaliana
  peptide (1)..(125): Ceres Seq. ID no. 12676600
MFSSSNKLHEYISPNTTTKEIVDLYQTISDVDVWATQYERMQETKRKLLETNRNLRTQIKQRLGECLDELDIQELRRLEDEMENTFKLVRERKFKSLGNQIETTKKKNKSQQDIQKNLIHELTKS

SEQ ID NO: 84715 - DNA, 1380 bp, Arabidopsis thaliana
  misc_feature (1)..(1380): Ceres Seq. ID no. 12676620
  misc_feature (1)..(1380): Ortholog of  Ceres SEQ ID NO 14310350 as cited in SEQ ID NO 20670
  misc_feature (1)..(1380): Ortholog of  Ceres SEQ ID NO 15177648 as cited in SEQ ID NO 58917
agagagagagagaaaaaagaagaagaagaatttgaggcgattgggtaagcgatgcacatcgtcttctctgtcgatgatttgaccgaatccttctggcctgttcccgctccggcgccgtcgccgggatcgtcatcgactccgtcaccgacgcagaacgtggcggatgggatgactcgaagtcaatcggagtgggcgttccacaggcttatcaatgagttgtctggttccgattcgagccctacgactaacacaatcgagagatcacctccaccggttcagtctctttcgagattagaagaaaccgttgacgaaaccgaagatgttgttgagattcagaaaccgcagaatcatcgacggctccctgttgatgatcaagggaagaatcggaatcgtgctccgtcgtctgatccggttgattcttcagctcctgttgttgttgatcctaatcagtatcatgcgattcttaagagcaagctcgagcttgcttgcgctgctgttgctcgtcgtgtgggaactgtgaaaccggaagattcgagtgcttcagctagcaatcaaaaacaagctcaaggctccattgtggcacaaacctcacctggtgcttcatctgttagattttctcccacaacaagcacgcaaaagaaacctgatgttccagccagacaaactagtatttcatcacgagatgattctgatgacgatgatcttgatggagacgcagataatggagatcctactgatgtgaagcgtgctaggaggatgctctcaaaccgagaatccgctaggcgctctaggagaagaaagcaagaacaaatgaatgaatttgatacacaggtaggccaattaagagccgagcattcaactttaattaatcgtcttagtgacatgaatcataagtatgatgcagctgctgttgacaacagaattctaagagctgatatcgaaactttgagaacaaaggttaagatggcagaggaaactgtgaaaagagtgacaggagtgaaccctttgcattggtcaagaccaaacatgggcataccattcagcaacacaccgagtgcttcctctagtattccgccaaactctaaccacattttgaaaccagcaaattcaagtaccaacaccagtgctggtttagcacaaaatcagagagtggagacggcaaatttcttgccggaacaggtgaaccgtgaaggcatgcagaatccatttgctcctgattctaatctgtatgaaaccctaccccattggaatcacaagcattaaccagaaaaagagtcattggttttgtgattttgattgaggtaactattgtctgtatttttatttactgtatgactcagcgacggtaaactcttaatattatatatatgattggacatg

SEQ ID NO: 84716 - protein, 403 aa, Arabidopsis thaliana
  peptide (1)..(403): Ceres Seq. ID no. 12676621
MHIVFSVDDLTESFWPVPAPAPSPGSSSTPSPTQNVADGMTRSQSEWAFHRLINELSGSDSSPTTNTIERSPPPVQSLSRLEETVDETEDVVEIQKPQNHRRLPVDDQGKNRNRAPSSDPVDSSAPVVVDPNQYHAILKSKLELACAAVARRVGTVKPEDSSASASNQKQAQGSIVAQTSPGASSVRFSPTTSTQKKPDVPARQTSISSRDDSDDDDLDGDADNGDPTDVKRARRMLSNRESARRSRRRKQEQMNEFDTQVGQLRAEHSTLINRLSDMNHKYDAAAVDNRILRADIETLRTKVKMAEETVKRVTGVNPLHWSRPNMGIPFSNTPSASSSIPPNSNHILKPANSSTNTSAGLAQNQRVETANFLPEQVNREGMQNPFAPDSNLYETLPHWNHKH

SEQ ID NO: 84717 - protein, 364 aa, Arabidopsis thaliana
  peptide (1)..(364): Ceres Seq. ID no. 12676622
MTRSQSEWAFHRLINELSGSDSSPTTNTIERSPPPVQSLSRLEETVDETEDVVEIQKPQNHRRLPVDDQGKNRNRAPSSDPVDSSAPVVVDPNQYHAILKSKLELACAAVARRVGTVKPEDSSASASNQKQAQGSIVAQTSPGASSVRFSPTTSTQKKPDVPARQTSISSRDDSDDDDLDGDADNGDPTDVKRARRMLSNRESARRSRRRKQEQMNEFDTQVGQLRAEHSTLINRLSDMNHKYDAAAVDNRILRADIETLRTKVKMAEETVKRVTGVNPLHWSRPNMGIPFSNTPSASSSIPPNSNHILKPANSSTNTSAGLAQNQRVETANFLPEQVNREGMQNPFAPDSNLYETLPHWNHKH

SEQ ID NO: 84718 - DNA, 1294 bp, Arabidopsis thaliana
  misc_feature (1)..(1294): Ceres Seq. ID no. 12676636
  misc_feature (1)..(1294): Ortholog of  Ceres SEQ ID NO 13502952 as cited in SEQ ID NO 62271
  misc_feature (1)..(1294): Ortholog of  Ceres SEQ ID NO 13502973 as cited in SEQ ID NO 68052
  misc_feature (1)..(1294): Ortholog of  Ceres SEQ ID NO 13596000 as cited in SEQ ID NO 68188
agggactcagtaaggccacctcaaaacaagacccatcgataacagcgatcatggtggctaaagccttagcacagctgataacatgcatcatcttattctgccacgttgtagcttccgtagaagacctcaccatacgccaagtcacggccgacaatcggcgaattcgcccgaatcttctcgggactcacacagagagtaaattccggcttttcatgtccgattacggcaagaactactccacgagggaggagtacatccaccgcctcggaatatttgccaaaaacgtccttaaggccgcagagcaccagatgatggacccctccgccgtccacggagtcacacagttctctgacctcacggaagaggagttcaagcggatgtacactggagtagccgatgttggcggcagccgtggcggtacggttggagcggaggcacctatggttgaggttgatggattgcctgaagattttgactggagggagaagggtggagttactgaggttaagaatcaaggtgcatgtggatcgtgctgggcttttagcacaacgggagcagctgaaggagcccatttcgtctccaccgggaagctcctcagtcttagcgaacaacaacttgtcgattgtgatcaagcgtcgatccaaaggacaagaaagcatgcgacaatggatgtggcgggggactgatgacaaatgcctacgagtatttgatggaggcaggaggattagaagaagaaagatcatatccttacactggtaaacgaggccattgcaagtttgatcctgagaaggttgcggtaagagtactgaacttcacgactataccactggatgagaaccaaatcgcagcaaacttagttcggcatggtcccttagcagtgggattaaacgccgtgttcatgcaaacatatataggaggagtgtcatgtccgcttatatgcagcaagcgaaacgttaaccacggagtacttcttgttgggtacggatcaaaagggttttcgatcttgcggcttagtaataaaccttattggattatcaaaaactcgtgggggaaaaagtggggagagaatggatactacaagctgtgtcgtgggcacgatatatgtgggattaactcgatggtatctgcagtagccacccaagtttcctcgtagatgggtcttgtctttcctctgctctcttgttttctaatctagggtttgatcatgttttaggagtggagtttggggtttgaatattgggttgtttctttccgtgaccgttcttgtagtaaaagtgggtgattatttccgttt

SEQ ID NO: 84719 - protein, 227 aa, Arabidopsis thaliana
  peptide (1)..(227): Ceres Seq. ID no. 12676637
GLSKATSKQDPSITAIMVAKALAQLITCIILFCHVVASVEDLTIRQVTADNRRIRPNLLGTHTESKFRLFMSDYGKNYSTREEYIHRLGIFAKNVLKAAEHQMMDPSAVHGVTQFSDLTEEEFKRMYTGVADVGGSRGGTVGAEAPMVEVDGLPEDFDWREKGGVTEVKNQGACGSCWAFSTTGAAEGAHFVSTGKLLSLSEQQLVDCDQASIQRTRKHATMDVAGD

SEQ ID NO: 84720 - protein, 211 aa, Arabidopsis thaliana
  peptide (1)..(211): Ceres Seq. ID no. 12676638
MVAKALAQLITCIILFCHVVASVEDLTIRQVTADNRRIRPNLLGTHTESKFRLFMSDYGKNYSTREEYIHRLGIFAKNVLKAAEHQMMDPSAVHGVTQFSDLTEEEFKRMYTGVADVGGSRGGTVGAEAPMVEVDGLPEDFDWREKGGVTEVKNQGACGSCWAFSTTGAAEGAHFVSTGKLLSLSEQQLVDCDQASIQRTRKHATMDVAGD

SEQ ID NO: 84721 - protein, 157 aa, Arabidopsis thaliana
  peptide (1)..(157): Ceres Seq. ID no. 12676639
MSDYGKNYSTREEYIHRLGIFAKNVLKAAEHQMMDPSAVHGVTQFSDLTEEEFKRMYTGVADVGGSRGGTVGAEAPMVEVDGLPEDFDWREKGGVTEVKNQGACGSCWAFSTTGAAEGAHFVSTGKLLSLSEQQLVDCDQASIQRTRKHATMDVAGD

SEQ ID NO: 84722 - DNA, 3046 bp, Arabidopsis thaliana
  misc_feature (1)..(3046): Ceres Seq. ID no. 12676644
  misc_feature (1)..(3046): Ortholog of  Ceres SEQ ID NO 15171708 as cited in SEQ ID NO 60063
  misc_feature (1)..(3046): Ortholog of  Ceres SEQ ID NO 14313449 as cited in SEQ ID NO 62735
agatttatagcagaggaaagtgaaatcatgaaagggattctagggtttgaatacgggatagttcaggcgccattaggaccagatatctccggaccagagcttgtagccgccgtcgctaatgcaggagggattggtcttctcagatgtcctgattgggagtgtcctgattacttgagagagcttataagaaagacaaagacattgacagagaaaccatttgggatcggtgttgttcttgcgtttcctcatgatttgaacattaagacaatcttagaagagaaagtggctgtcttgcagctttattggggtgattgttcacaggagcttgtggatgatgctcactttgccggtgtcaaagttattcctcagttaacttttgaaaggtggggaatgtcgaagaagctagaaaggctgttgctgtaggagtagacgccattattgtccaagggcgtgaagcaggtgggcatgttattggcaaggatggtctcttttcattgttgccaagagtggtggatttagttggggaacgcgatattcccgttattgctgctggaggaattgtggatggacgcggttatgttgcagctttgtcacttggggctcaaggggtctgtctaggcacaagatttgtggcgactcatgaaagctatgcacacccaatatacaaaaggaagttgattgaatatgaaaaaaccgaatacacggatgtatttggaagagcaaggtggcctggtgcgcctcaacgtgttctggagacgcctttctttgatgactggaggtctcttccggctcatgagaatgaagttaaccaacctattattggacgttccaccatacatggcgttgaaaaggagataagaagattttcaggaacagtaccaaacatgacgacaacaggcgacttagagagtatggctatgtatgcaggccaaagcgtaggccttatcaaggagattttaccggctggagaggtagtgaaaagtcttgtggaagaagctcaggctctgatcctccaaaagttcaacaatgctactactacatgatgcagtcccagcctcaaatcatgagaaaacataaactttactgcttttggaatcgggatgaaaatagtctcatctaatgtaaataaggtacataaacttctgtatctctcgtgttgttttcaactagaaaaattgtgtccatcatgtgtaatccagcaatagaccttgtgtattggattaagtatacttcttatggttgtttgtttcctgtgaaactttccacacatttcatttcattttaaatttcttagcgaatcaattatttcatagctttattgctcgtaagaagagagaggctatgcaacataatcattacatgatacatacacatagaaacgtttccgagctatttgcagcatcatatgtacagcattcagagtacaaactttgtcgcgtacacgtcaaattcctcagatgatgttagcagtggctcctgggagatacgatattcaatcattcagaatgtaagtttcagataatacaagttgtttattaacttaccgcggatgcatcagagcttgtgtagtccccgttaaaggcgaggcgagactgggcctctcgtattgcagaacacataaggttaagcaggtggccatacgtgggtgctggtccagctgtcttcaccgcctttatgaagctataagtcatggctcctgtgttcttccccgtgaacacctgaaacagcacgaaatgatccagttaacatacggagaggtatgtgtgcttagttgcatgatgatgaatgatataatggaagcatacaggagtgtaaccactggattcatcatcgtcacaagcactgaaacagaaagctgctccaccatctgttcctttgtaagctctgactgatctatggtcttcccattcataagaaccattcctgatttttcacaaacgcaccacaagtttctttttcagattcagtctaagtagaagtgagcagaatgatttataagtttacctctccatcctgcaaatgaagggtaaatcaaggacagtcccgctgttacaggcgtcgatgacagcgtgaagcttagctccatggacgagaggcctcacgagtatccggttaatctcgtcatcaatgatttttccttctgtttcatggtctaaagggcacaaggcttcatcttgaccatcgatctcgtctccgttgtagtcattctgctgagatccatgaccagagaaatggaacactagtgagtcccttgctctgttcccttcaactaaccatctcatcgccttcctaatgtttctcttcgtcggtattctctgcgggctggcttcatcttctgcaacaataacacaacactcatcatcaggaagaaagaaacagagagttttaattagagaaatggaaaacaaacaaaaaacgaaaaacctgtgagcatgagaatagagtcaatagggaaacccatttgttgaaccaataaagatctcatggacttagcatcactgatgcaacctttcaagctataactttttcccttatagttcacgccgcataaaactgctctcttcttcccaaacggcgagggaagaggctcaagcagccgtggtggcggttgagccatcatttgttgttgttgttgttcatgatgttgcggttggtgttgtctaagtagctgttgaaacccatgaattatgcggtttgcaccgcgagctatgtccactagcgagtagagctgcgtgacggtgtggcaggttgagcattggacggtacgggcgtctggttgaacccacatccgtctgccgcaccggcaccgtacttctctccgactagccatgattgagctttgttttggttttctttttgcaattgcaacaaatgcatttgagtgatgagtttataaagagaatgatattattcgttcttatctacgaaaagaataaaatgtggaatgttgatttgtccacgttattaagcttccatgcatgttgttatgtgaatcaattcggaacggaatttgattctttgaaagtttttattttattttattatt

SEQ ID NO: 84723 - protein, 140 aa, Arabidopsis thaliana
  peptide (1)..(140): Ceres Seq. ID no. 12676645
RFIAEESEIMKGILGFEYGIVQAPLGPDISGPELVAAVANAGGIGLLRCPDWECPDYLRELIRKTKTLTEKPFGIGVVLAFPHDLNIKTILEEKVAVLQLYWGDCSQELVDDAHFAGVKVIPQLTFERWGMSKKLERLLL

SEQ ID NO: 84724 - protein, 131 aa, Arabidopsis thaliana
  peptide (1)..(131): Ceres Seq. ID no. 12676646
MKGILGFEYGIVQAPLGPDISGPELVAAVANAGGIGLLRCPDWECPDYLRELIRKTKTLTEKPFGIGVVLAFPHDLNIKTILEEKVAVLQLYWGDCSQELVDDAHFAGVKVIPQLTFERWGMSKKLERLLL

SEQ ID NO: 84725 - DNA, 1382 bp, Arabidopsis thaliana
  misc_feature (1)..(1382): Ceres Seq. ID no. 12676651
  misc_feature (1)..(1382): Ortholog of  Ceres SEQ ID NO 13598714 as cited in SEQ ID NO 62656
  misc_feature (1)..(1382): Ortholog of  Ceres SEQ ID NO 13596969 as cited in SEQ ID NO 63375
  misc_feature (1)..(1382): Ortholog of  Ceres SEQ ID NO 13597519 as cited in SEQ ID NO 64759
  misc_feature (1)..(1382): Ortholog of  Ceres SEQ ID NO 13597870 as cited in SEQ ID NO 64982
  misc_feature (1)..(1382): Ortholog of  Ceres SEQ ID NO 13656123 as cited in SEQ ID NO 65212
cacacacttcatcttctctaaaaccctaaaatttaaacacaagatgggtttggttagatcattgtgcttattaataaccttccttaattgtctcatcatctcggttcatggccaagccaccgcaaggcctggtcctgtttccggcactaggattgggttttacttaactacgtgtcctagagctgagactattgtccgaaacgccgtgaatgctggtttcagttctgaccccagaatcgcacccggaatactgagaatgcatttccacgactgttttgtccaaggttgtgacggttcgatccttatatccggagctaacaccgagagaaccgccggtccgaacctcaatctccaaggatttgaagtcatagacaacgccaaaacgcagctcgaagccgcgtgtcctggagttgtctcttgtgctgatattttagcattagccgctcgtgacacagtcattctcgtaagccttaattatttcataaacgttatacgtaattaatgcattatcattacttttataagtttacatgtatataacgttatacatgcatgggttattgtgcatgcagactcaaggaacaggctggcaagtaccaacgggacgtagagatggtagagtttctttggcttcgaatgctaacaatctccctggtccccgtgactccgttgccgttcaacaacagaaattctccgccttgggactcaatactcgtgatctcgtcgtcctcgtcggaggacacacgatcggaacagcaggatgtggtgtattcaggaacaggctattcaataccaccggacaaaccgcagatccaaccatcgacccaacatttttggcgcagcttcaaacacaatgtccccaaaacggcgacggttcagtgcgcgtggatctcgacaccggaagcggaagcacttgggacacttcttactacaacaacctaagccgtgggcgtggagttctccaatccgatcaagtcctttggaccgatccagccactagacccatagtgcaacaattgatggctcctagaagcaccttcaacgttgagtttgcgaggtcaatggtcagaatgagtaatatcggtgtggttaccggagctaatggggaaatccgtagggtttgctctgcggttaattaattaaccgattagaatctgtcgtgataaactttcatgacgcaaagtacttgtttcgagtgtggttttaatctgaacaataaataaaccaatagaaaacgacatacaaagaaaaaacccaaaagtgggttgatgaaaattgtatctataaggtgttggtattcgatttcttttggttttagttaaaaaaaactgtaatgtcttcacaaaaatattataatgagtttggtcctagtttggattctt

SEQ ID NO: 84726 - protein, 202 aa, Arabidopsis thaliana
  peptide (1)..(202): Ceres Seq. ID no. 12676652
MYITLYMHGLLCMQTQGTGWQVPTGRRDGRVSLASNANNLPGPRDSVAVQQQKFSALGLNTRDLVVLVGGHTIGTAGCGVFRNRLFNTTGQTADPTIDPTFLAQLQTQCPQNGDGSVRVDLDTGSGSTWDTSYYNNLSRGRGVLQSDQVLWTDPATRPIVQQLMAPRSTFNVEFARSMVRMSNIGVVTGANGEIRRVCSAVN

SEQ ID NO: 84727 - protein, 196 aa, Arabidopsis thaliana
  peptide (1)..(196): Ceres Seq. ID no. 12676653
MHGLLCMQTQGTGWQVPTGRRDGRVSLASNANNLPGPRDSVAVQQQKFSALGLNTRDLVVLVGGHTIGTAGCGVFRNRLFNTTGQTADPTIDPTFLAQLQTQCPQNGDGSVRVDLDTGSGSTWDTSYYNNLSRGRGVLQSDQVLWTDPATRPIVQQLMAPRSTFNVEFARSMVRMSNIGVVTGANGEIRRVCSAVN

SEQ ID NO: 84728 - protein, 190 aa, Arabidopsis thaliana
  peptide (1)..(190): Ceres Seq. ID no. 12676654
MQTQGTGWQVPTGRRDGRVSLASNANNLPGPRDSVAVQQQKFSALGLNTRDLVVLVGGHTIGTAGCGVFRNRLFNTTGQTADPTIDPTFLAQLQTQCPQNGDGSVRVDLDTGSGSTWDTSYYNNLSRGRGVLQSDQVLWTDPATRPIVQQLMAPRSTFNVEFARSMVRMSNIGVVTGANGEIRRVCSAVN

SEQ ID NO: 84729 - DNA, 1236 bp, Arabidopsis thaliana
  misc_feature (1)..(1236): Ceres Seq. ID no. 12676655
  misc_feature (1)..(1236): Ortholog of  Ceres SEQ ID NO 13596474 as cited in SEQ ID NO 62169
  misc_feature (1)..(1236): Ortholog of  Ceres SEQ ID NO 13598714 as cited in SEQ ID NO 62656
  misc_feature (1)..(1236): Ortholog of  Ceres SEQ ID NO 13597870 as cited in SEQ ID NO 64982
acacaacaaacacaacttctacaagactcaaatagtttctatttaattactaaaaagaaaaatgggtcgtggttacaatttgctattcgttctagtaacgtttttagtattggttgcagctgtaaccgcacaagggaaccgtggctcaaacagcggtggtggtcgaagaccacatgttgggttttatgggaatagatgccgaaacgtagagtctattgtgagatctgtagttcagtctcatgtccggtctatcccggctaatgcacctggaattttgcgaatgcatttccacgattgctttgtccatggctgcgatggctcggttctcctcgctggtaacacctcagagagaaccgcagttccgaaccgttcattgagagggttcgaagttattgaagaagctaaggctcggcttgagaaggcttgtcctcgtaccgtttcttgtgctgatattctcacccttgcagcccgagacgccgtcgtttaccggtggacaacgctgggaagtgcccttgggacgtctcgacggccgaatctcgcaagcctcagacgtgaacttgcccggaccaagcgactccgttgctaagcagaagcaagacttcgctgctaaaactctcaacacattagacctcgtgactcttgttggcggacacacaataggaactgctggctgcggtctagtaaggggaaggttcgttaacttcaacggcacaggacaacctgacccatcaatcgacccgagttttgtgccgctgattctggctcagtgccctcaaaatggaggcacccgagtggagttagacgagggaagtgttgacaagtttgacacatcgttcctaaggaaggtgacgtcaagtcgcgtggttctccaatccgatctagtcctatggaaggatcccgagacccgagccatcattgaacgtttattaggattacgccgaccatccttgaggttcggaaccgagttcgggaagtcgatggtcaaaatgagtctcatagaagttaagactggatcagatggggagattcgtcgggtttgttccgccatcaactaagatttaaaaaaacacaaatgtgagctttgtttttcatttatgaattcgttaattaataatcacttgttttaaataaaagcttgctacagcattttgtggtcgatggttacgttttgattttcaagtgtaagattgtacttgtaaacaaaaaatgtattatataaaagtgttatttgtttct

SEQ ID NO: 84730 - protein, 174 aa, Arabidopsis thaliana
  peptide (1)..(174): Ceres Seq. ID no. 12676656
MGRGYNLLFVLVTFLVLVAAVTAQGNRGSNSGGGRRPHVGFYGNRCRNVESIVRSVVQSHVRSIPANAPGILRMHFHDCFVHGCDGSVLLAGNTSERTAVPNRSLRGFEVIEEAKARLEKACPRTVSCADILTLAARDAVVYRWTTLGSALGTSRRPNLASLRRELARTKRLRC

SEQ ID NO: 84731 - protein, 101 aa, Arabidopsis thaliana
  peptide (1)..(101): Ceres Seq. ID no. 12676657
MHFHDCFVHGCDGSVLLAGNTSERTAVPNRSLRGFEVIEEAKARLEKACPRTVSCADILTLAARDAVVYRWTTLGSALGTSRRPNLASLRRELARTKRLRC

SEQ ID NO: 84732 - DNA, 1389 bp, Arabidopsis thaliana
  misc_feature (1)..(1389): Ceres Seq. ID no. 12676658
  misc_feature (1)..(1389): Ortholog of  Ceres SEQ ID NO 13596497 as cited in SEQ ID NO 68669
atggatcatatgatatcagaaaacggagaaacaagtgccgaaggatcgatttgcggctatgattcgctgcatcaactcttatcagcgaatcttaagcccgagctctatcaggaggtaaaccggttgctccttggacgtaactgtgggagatcgcttgaacagattgttctgccggagtctgctaaagccttgtcttcaaaacatgattttgatctccaggctgctagcttttcagctgataaagagcaaatgagaaatcctcgagtggtcagagttggtctcattcaaaactccattgctcttccaaccactgctccattctcggaccaaacaagaggaatattcgacaagttgaagccgataatcgatgctgcgggtgttgctggtgttaacatactgtgcttgcaggaagcttggaccatgccatttgcattttgcactagggagaggagatggtgtgagtttgcagagcctgttgatggcgaatcgacaaagtttcttcaagaactcgctaaaaagtataacatggtgattgttagtcctattctcgaaagagatattgatcacggtgaagtgctttggaataccgctgtgattatagggaataatggaaatatcattggcaagcatcgaaagaaccatatacctagggtaggagatttcaacgagagcacctattacatggaaggagacacaggccatcctgtgtttgagacggtgtttgggaaaattgcggttaatatatgttatggcagacaccatcctctgaattggttagcttttggtctaaatggtgcagagattgtcttcaacccttcagcaactgttggtgaactcagtgaaccaatgtggcctattgaggcacgaaatgccgcaatagcaaacagttactttgttggatccattaaccgagttggaaccgaagtattccccaatccttttacgtcaggtgatggaaaaccgcaacacaatgatttcgggcatttctatgggtcaagccatttttctgcaccagatgcttcttgcacaccgtctttgtcccgttacaaagatggtttattgatctcggacatggatctcaatctctgccggcaatacaaggacaagtggggatttagaatgactgcaagatacgaagtctatgccgatcttttggcaaagtacataaagccagacttcaagcctcaagtcgtctctgacccattgctccacaagaattctacataagaagaaaatttcactctgtgaatcttcaaagaagaaaagtccaataatcaatgttcaatcatttgtgtaaatgtaacggtaactgaaaatctgtttgtagctgaatatatgttgatgccaaaaggcagctcctttgcttttataatcgaaccggtttataat

SEQ ID NO: 84733 - protein, 408 aa, Arabidopsis thaliana
  peptide (1)..(408): Ceres Seq. ID no. 12676659
MDHMISENGETSAEGSICGYDSLHQLLSANLKPELYQEVNRLLLGRNCGRSLEQIVLPESAKALSSKHDFDLQAASFSADKEQMRNPRVVRVGLIQNSIALPTTAPFSDQTRGIFDKLKPIIDAAGVAGVNILCLQEAWTMPFAFCTRERRWCEFAEPVDGESTKFLQELAKKYNMVIVSPILERDIDHGEVLWNTAVIIGNNGNIIGKHRKNHIPRVGDFNESTYYMEGDTGHPVFETVFGKIAVNICYGRHHPLNWLAFGLNGAEIVFNPSATVGELSEPMWPIEARNAAIANSYFVGSINRVGTEVFPNPFTSGDGKPQHNDFGHFYGSSHFSAPDASCTPSLSRYKDGLLISDMDLNLCRQYKDKWGFRMTARYEVYADLLAKYIKPDFKPQVVSDPLLHKNST

SEQ ID NO: 84734 - protein, 405 aa, Arabidopsis thaliana
  peptide (1)..(405): Ceres Seq. ID no. 12676660
MISENGETSAEGSICGYDSLHQLLSANLKPELYQEVNRLLLGRNCGRSLEQIVLPESAKALSSKHDFDLQAASFSADKEQMRNPRVVRVGLIQNSIALPTTAPFSDQTRGIFDKLKPIIDAAGVAGVNILCLQEAWTMPFAFCTRERRWCEFAEPVDGESTKFLQELAKKYNMVIVSPILERDIDHGEVLWNTAVIIGNNGNIIGKHRKNHIPRVGDFNESTYYMEGDTGHPVFETVFGKIAVNICYGRHHPLNWLAFGLNGAEIVFNPSATVGELSEPMWPIEARNAAIANSYFVGSINRVGTEVFPNPFTSGDGKPQHNDFGHFYGSSHFSAPDASCTPSLSRYKDGLLISDMDLNLCRQYKDKWGFRMTARYEVYADLLAKYIKPDFKPQVVSDPLLHKNST

SEQ ID NO: 84735 - protein, 325 aa, Arabidopsis thaliana
  peptide (1)..(325): Ceres Seq. ID no. 12676661
MRNPRVVRVGLIQNSIALPTTAPFSDQTRGIFDKLKPIIDAAGVAGVNILCLQEAWTMPFAFCTRERRWCEFAEPVDGESTKFLQELAKKYNMVIVSPILERDIDHGEVLWNTAVIIGNNGNIIGKHRKNHIPRVGDFNESTYYMEGDTGHPVFETVFGKIAVNICYGRHHPLNWLAFGLNGAEIVFNPSATVGELSEPMWPIEARNAAIANSYFVGSINRVGTEVFPNPFTSGDGKPQHNDFGHFYGSSHFSAPDASCTPSLSRYKDGLLISDMDLNLCRQYKDKWGFRMTARYEVYADLLAKYIKPDFKPQVVSDPLLHKNST

SEQ ID NO: 84736 - DNA, 942 bp, Arabidopsis thaliana
  misc_feature (1)..(942): Ceres Seq. ID no. 12676669
  misc_feature (1)..(942): Ortholog of  Ceres SEQ ID NO 14302154 as cited in SEQ ID NO 0
atgtcgcacttcggaaggtcaggtccaccggatatcagcgacacctactcacttctcgtccttaacatcaccttccgtacgactgctgatgatctctatcctctattcgcaaagtatggaaaggtcgttgatgtgtttattcccagagatcgaaggactggtgattcgcgtggttttgcgtttgttcggtataagtataaagacgaagctcacaaagcagtggaaaggcttgatggaagagttgttgatggcagagaaataactgttcagtttgcgaaatatgggccaaatgctgaaaaaatttccaaaggaagagttgtggaaccaccgccgaagtcacgaagatctagaagccgtagtcctaggcggagtcgtagtcctaggaggagccgtagcccgcctagacgtcgtagtcccagaagaagccgcagtcctcgtaggaggtcccgagatgactatagggaaaaagactaccggaagcggagcaggagcagaagctatgacaggcgtgaaaggcatgaggagaaggatagagatcatcgtcgtcgcactaggtctcgtagtgccagcccagatgaaaaacgcagagtcagaggccgttatgataatgagagccgcagtcacagtcgttccttgagtgcatctcctgctcgccgcagccctagaagttcctccccacagaaaacctctcctgctagagaagtttctcctgataagcgtagcaatgagaggtctccatctcctcgtcgcagcctcagcccaagaagccctgctttgcaaaaggcctctccttctaaggagatgtctcctgaaaggcgtagcaatgagaggtccccatctcctggtagccctgctcctctgcgcaaagttgatgctgcttctcgaagtcaatctccttatgctgcggaatgactgcagccacttgtgaaagtgatacggtgt

SEQ ID NO: 84737 - protein, 303 aa, Arabidopsis thaliana; identical to SEQ ID NO: 35347
  peptide (1)..(303): Ceres Seq. ID no. 12676670

SEQ ID NO: 84738 - DNA, 1078 bp, Arabidopsis thaliana
  misc_feature (1)..(1078): Ceres Seq. ID no. 12676710
  misc_feature (1)..(1078): Ortholog of  Ceres SEQ ID NO 14303446 as cited in SEQ ID NO 59378
gtttcaggcgagagagatgagcgcgacggagctgccgacgaaggaggcacacatacttaaaggccacgagggggcggttttagcggcgaggtttaacggtgacggaaactacgctctcacctgtggcaaggatcgaactatccgcctctggaacccgcaccgtggaatcttaatcaagacctacaaatctcatggccgcgaagtccgcgacgttcatgttacttcagacaatgccaaattttgctcatgtggtggtgatcggcaagtttactactgggatgtttcaactggacgtgtaatccgtaaattccgtggtcatgatggagaggtcaatgcagtgaagttcaatgattcgtcgtctgtggttgtatcagctgggttcgatcgttcgctacgtgtatgggactgcagatctcacagtgttgagccagtacagatcattgatacatttttggatacagtcatgtctgttgttttaacaaagactgagattattggtggtagtgtcgatggaacagttcgcacatttgacatgcgtatcggtagggagatgtcagataacctaggccaaccggttaactgtatatcgatatcaaatgatggaaactgcgttttagctggttgcttggattctactctgcgtctacttgacaggaccacaggagagctactccaagtctataaaggtcatatttccaagtcatttaaaacggattgttgcctcacgaattcggatgcacatgtgattggaggatcagaggatggattggttttcttttgggatttggtagatgcaaaagtgctatcgaaatttagagctcacgatttagtggtgacaagcgtgagttaccacccgaaggaagactgtatgttgacttcttcggtcgatggtacaattcgtgtctggaaaaaatgaagaaacaacaaatcttgacttcgattgattttgttatttacgtctcaaactcacctttcttcttctactataggctatagctggttttttggagttggaaagttgaaatattttgtagagtacttgtatcattgtatgtgaaggaaaactttttttaggcct

SEQ ID NO: 84739 - protein, 304 aa, Arabidopsis thaliana; identical to SEQ ID NO: 23166
  peptide (1)..(304): Ceres Seq. ID no. 12676711

SEQ ID NO: 84740 - protein, 299 aa, Arabidopsis thaliana; identical to SEQ ID NO: 23167
  peptide (1)..(299): Ceres Seq. ID no. 12676712

SEQ ID NO: 84741 - DNA, 2693 bp, Arabidopsis thaliana
  misc_feature (1)..(2693): Ceres Seq. ID no. 12676720
  misc_feature (1)..(2693): Ortholog of  Ceres SEQ ID NO 15179672 as cited in SEQ ID NO 0
actgtcataattgcgatttgtttcgaaagacttttccatctaacaacagctccaacaaatgtaaacgaagaaagaaaatcaaaagtttggtttttctttgtaaaagacagagttttacagttttactttctcttcctaaagagttttcaactagccgaagtggaaccatccaagcctaagtattgttggttttattcgtcgagtgaatctttcttgctggaattattctctttccctttttggattttcttctccgcatcgatttttttttttgttgggcactttctttttctttttgctgttcccaaatctgagtttctcaaattttcttgagatttggggtcaatatctctgtttttccgtgaaaactgaagaattctctgagttatttggatttttatcttttgggtaactgaaaaaagttcgtttttttattactattgtagaattttgaatttagaaagtctcggattcctatagtaaatccactctatctaatctacaaacttaaaaatatgttttaacttttgtttcaaaggtttcttgtagatgtcacaatttcttagagaatccaacgttttcaattttggtagctcttagaaaaatggctctgcttattatcactgccttagtttttagtagtttatggtcatctgtgtcaccagatgctcaaggggatgcattatttgcgttgaggagctcgttacgtgcatctcctgaacagcttagtgattggaaccagaatcaagtcgatccttgtacttggtctcaagttatttgtgatgacaagaaacatgttacttctgtaaccttgtcttacatgaacttctcctcgggaacactgtcttcaggaataggaatcttgacaactctcaagactcttacattgaagggaaatggaataatgggtggaataccagaatccattggaaatctgtctagcttgaccagcttagatttggaggataatcacttaactgatcgcattccatccactctcggtaatctcaagaatctacagttcttgaccttgagtaggaataaccttaatggttctatcccggattcacttacaggtctatcaaaactgataaatattctgctcgactcaaataatctcagtggtgagattcctcagagtttattcaaaatcccaaaatacaatctttcaaatttatagtttcacagcaaacaacttgagctgtggtggcactttcccgcaaccttgtgtaaccgagtccagtccttcaggtgattcaagcagtagaaaaactggaatcatcgctggagttgttagcggaatagcggttattctactaggattcttcttctttttcttctgcaaggataaacataaaggatataaacgagacgtatttgtggatgttgcaggtgaagtggacagaaggattgcttttggacagttgagaagatttgcatggagagagcttcagttggctacagatgagttcagtgaaaagaatgttctcggacaaggaggctttgggaaagtttacaaaggattgctttcggatggcaccaaagtcgctgtaaaaagattgactgattttgaacgtccaggaggagatgaagctttccagagagaagttgagatgataagtgtagctgttcataggaatctgcttcgccttatcggcttttgtacaacacaaactgaacgacttttggtgtatcctttcatgcagaatctaagtgttgcatattgcttaagagagattaaacccggggatccagttctggattggttcaggaggaaacagattgcgttaggtgcagcacgaggactcgaatatcttcatgaacattgcaacccgaagatcatacacagagatgtgaaagctgcaaatgtgttactagatgaagactttgaagcagtggttggtgattttggtttagccaagttggtagatgttagaaggactaatgtaaccactcaggtccgaggaacaatgggtcatattgcaccagaatgtatatccacagggaaatcgtcagagaaaaccgatgttttcgggtacggaattatgcttctggagcttgtaactggacaaagagcaattgatttctcgcggttagaggaagaagatgatgtcttattgctagaccatgtgaagaaactggaaagagagaagagattagaagacatagtagataagaagcttgatgaggattatataaaggaagaagttgaaatgatgatacaagtagctctgctatgcacacaagcagcaccggaagaacgaccagcgatgtcggaagtagtaagaatgctagaaggagaagggcttgcagagagatgggaagagtggcagaatcttgaagtgacgagacaagaagagtttcagaggttgcagaggagatttgattggggtgaagattccattaataatcaagatgctattgaattatctggtggaagatagaaacaaaaaatacttttgattcaaaagatagaagaatcacacactgtaaagtagaagaagaaacaactagttttggtttcaaacatgaatgaagttttggtttcgcagtttatatgtatcggcgaatgaatcacgcgccattataatgttcacttgtgtatttatgttgtaacgttttcgatccaaatgtttgaaactttgtgacagaacataataatgtcctttgtaacttgtatcaatgaaattttc

SEQ ID NO: 84742 - protein, 276 aa, Arabidopsis thaliana; identical to SEQ ID NO: 79231
  peptide (1)..(276): Ceres Seq. ID no. 12676721

SEQ ID NO: 84743 - protein, 247 aa, Arabidopsis thaliana; identical to SEQ ID NO: 79232
  peptide (1)..(247): Ceres Seq. ID no. 12676722

SEQ ID NO: 84744 - protein, 191 aa, Arabidopsis thaliana
  peptide (1)..(191): Ceres Seq. ID no. 12676723
MALLIITALVFSSLWSSVSPDAQGDALFALRSSLRASPEQLSDWNQNQVDPCTWSQVICDDKKHVTSVTLSYMNFSSGTLSSGIGILTTLKTLTLKGNGIMGGIPESIGNLSSLTSLDLEDNHLTDRIPSTLGNLKNLQFLTLSRNNLNGSIPDSLTGLSKLINILLDSNNLSGEIPQSLFKIPKYNLSNL

SEQ ID NO: 84745 - DNA, 887 bp, Arabidopsis thaliana
  misc_feature (1)..(887): Ceres Seq. ID no. 12676728
  misc_feature (1)..(887): Ortholog of  Ceres SEQ ID NO 14308640 as cited in SEQ ID NO 60489
  misc_feature (1)..(887): Ortholog of  Ceres SEQ ID NO 12619999 as cited in SEQ ID NO 66123
  misc_feature (1)..(887): Ortholog of  Ceres SEQ ID NO 13656436 as cited in SEQ ID NO 69154
aaaagcttaaaacagaggatttagcaagagaggatttagcgagagagagacgttgaagaagatgactagtggaggaggatacggagatccgtcgcagaagattgattatgtgttcaaagtggtgttgatcggcgattccgcggttgggaaatcacagatactggctcgttatgctagagacgaattcagtttggattctaaggccaccatcggcgttgagtttcagactcggacgcttgttatcgatcacaagagtgttaaggctcagatctgggataccgccggccaagaacgatacagagcagtaacaagtgcatattaccgaggagcggttggggcgatgttggtgtatgacataaccagacgccaaacctttgaccatatcccaagatggttagaagaactacgtgctcatgcagataagaacattgtgataatccttattgggaacaagtcagatcttgtggatcaacgagctataccgacagaagatgcgaaagaatttgcggagaaagaaggtttgttcttcttggagacatctgcatttaacgcaaccaatgttgagagcgctttctccacggttttgactgagatcttcaacattgtgaacaagaaaagtctggctgcgagtgaagatcaagagaatggtaatcccgggtcgcttgctggtaagaagattgatattgttccaggtcctggtcaagtgataccaaacaagagtaacatgtgttgtaactcttagataaaccaattcaattcttgaatgttacttgataacaacaatatatagatgttttaaagactctgattgggatatttctcctatctagagctgtgtgattcatttgttgcttaatgagcagtttttgtggggttttggggtgttg

SEQ ID NO: 84746 - protein, 226 aa, Arabidopsis thaliana; identical to SEQ ID NO: 21570
  peptide (1)..(226): Ceres Seq. ID no. 12676729

SEQ ID NO: 84747 - protein, 133 aa, Arabidopsis thaliana; identical to SEQ ID NO: 21571
  peptide (1)..(133): Ceres Seq. ID no. 12676730

SEQ ID NO: 84748 - DNA, 1120 bp, Arabidopsis thaliana
  misc_feature (1)..(1120): Ceres Seq. ID no. 12676731
  misc_feature (1)..(1120): Ortholog of  Ceres SEQ ID NO 13657872 as cited in SEQ ID NO 66357
aaactatctcgtctcttcgaacacttcaaaaaacatagcaacttcacttcttcctcctccttcctagtttctcgtttggtctcattctctttaattacctcctcctctgttctgctcatcccctgtttttatagttttatataaaatggtgagccaaaacgtcgtcgtatcagacgccaagaccgggatcataacggtctctacagtctctaactcctctgtctttactcctaccgctcaaaaaccaccgactgctcctggttacatctcagtttccaagaaaaaactcctcaaaaaccttgaaatcaatggagctgatcaaagtcaaagacttaactcttgggttgactccatgagagcttcttctcctacccatctcaaatcactttcctctttctcttccgaagaagaacacaattcttggatcaaacgacatccatcagcacttaacatgttcgaacgaatcatcgaagaagcaagaggaaaacaaatcgtcatgtttcttgattatgacggtactctttctccgatcgtggatgatccagacagagctttcatgactagcaagatgagaagaacagtgaaaaaaatggctaagtgttttccaacttccatagttactggtagatgcatcgacaaggtttatagctttgtgaagctagcagaactgtattatgctggaagccatgggatggatattaaaggcccaactaaaggtttctcaagatacaataaggataaaccatccgttctttaccaaccagccggcgactttcttcccatgatcgatgaggtttataaacaattagtggagaaaaccaaatctacaccaggagccaaagtggagaacaacaagttctgtctttctgtgcacttccgttgtgttgacgagaagaaatggagcgagctggcttcaaaagttcggtcggtggtaaagaactatccgacgttgaaactgtctcaaggtcgaaaggtttttgaaatccgacctataattaaatggaacaaaggcaaggctcttgagtttttgttagagtcactcggtgagactctctttggtcgtttgttgaattttatttttgcttatttaaactctttcatcaacaataatattagctcg

SEQ ID NO: 84749 - protein, 325 aa, Arabidopsis thaliana; identical to SEQ ID NO: 21321
  peptide (1)..(325): Ceres Seq. ID no. 12676732

SEQ ID NO: 84750 - protein, 256 aa, Arabidopsis thaliana; identical to SEQ ID NO: 21322
  peptide (1)..(256): Ceres Seq. ID no. 12676733

SEQ ID NO: 84751 - protein, 223 aa, Arabidopsis thaliana; identical to SEQ ID NO: 21323
  peptide (1)..(223): Ceres Seq. ID no. 12676734

SEQ ID NO: 84752 - DNA, 1028 bp, Arabidopsis thaliana
  misc_feature (1)..(1028): Ceres Seq. ID no. 12676735
  misc_feature (1)..(1028): Ortholog of  Ceres SEQ ID NO 13638643 as cited in SEQ ID NO 52149
agagaatgtcgtctgtcttgcggttgttggggcggagaatctgtaatccagcggcggagaaagtgcgtttgagcagtagcctaagcggtggtggagattttccaatcttaaatggacataaagcggctcaagacttatccaaagatactctaaaatcccaagacataacgaaagagaaagaaggccaacacaaagaagttaagaaggagttcaagatttatagatggaatcctgacaagcctaactctaaaccatttcttcaatctttcttcgttgatctttcctcttgtggtcccatggttttggacgtgctgcagaagataaaagcagaggatgatgccagtttgagttacagaagatcatgtagagaagggatatgtggatcttgttcaatgaacattgacggtactaacactgtcgcatgtcttaaacccataaacccaaacacgtcaaagcccaccataattactccattgcctcacatgtacgtcatcaaagacctagtcgtcgacctcactaatttttaccaacaatacaaatcaatggagccatggttaaagacgaggaagcctccaaaagacggacgcgaacaccggcaatcaccaaaagacaggaagaaactagacgggctatacgaatgcatattgtgcgcgtgttgtaccacatcatgtccttcttattggtggaaccccgaggagtttccaggacctgcggctttactacaagcgtaccgttggatcagcgatagccgcgatgaatacagagaagagaggctacaggcaataactgagagtgaaaccaaagtatatagatgcagagcaatcaagaactgtacggccacttgtcctaaaggacttaacccagctagtgccattttgaaaatgaagtctaagcatttgctctccgatccgttagtgagaacagagagtgtctagcttcaacatgacttggaccggtcatatatattatgtaaaagctctctctctctctctggatactcattgcaataagaatcaatgtttaaaact

SEQ ID NO: 84753 - protein, 310 aa, Arabidopsis thaliana
  peptide (1)..(310): Ceres Seq. ID no. 12676736
RMSSVLRLLGRRICNPAAEKVRLSSSLSGGGDFPILNGHKAAQDLSKDTLKSQDITKEKEGQHKEVKKEFKIYRWNPDKPNSKPFLQSFFVDLSSCGPMVLDVLQKIKAEDDASLSYRRSCREGICGSCSMNIDGTNTVACLKPINPNTSKPTIITPLPHMYVIKDLVVDLTNFYQQYKSMEPWLKTRKPPKDGREHRQSPKDRKKLDGLYECILCACCTTSCPSYWWNPEEFPGPAALLQAYRWISDSRDEYREERLQAITESETKVYRCRAIKNCTATCPKGLNPASAILKMKSKHLLSDPLVRTESV

SEQ ID NO: 84754 - protein, 309 aa, Arabidopsis thaliana
  peptide (1)..(309): Ceres Seq. ID no. 12676737
MSSVLRLLGRRICNPAAEKVRLSSSLSGGGDFPILNGHKAAQDLSKDTLKSQDITKEKEGQHKEVKKEFKIYRWNPDKPNSKPFLQSFFVDLSSCGPMVLDVLQKIKAEDDASLSYRRSCREGICGSCSMNIDGTNTVACLKPINPNTSKPTIITPLPHMYVIKDLVVDLTNFYQQYKSMEPWLKTRKPPKDGREHRQSPKDRKKLDGLYECILCACCTTSCPSYWWNPEEFPGPAALLQAYRWISDSRDEYREERLQAITESETKVYRCRAIKNCTATCPKGLNPASAILKMKSKHLLSDPLVRTESV

SEQ ID NO: 84755 - protein, 212 aa, Arabidopsis thaliana
  peptide (1)..(212): Ceres Seq. ID no. 12676738
MVLDVLQKIKAEDDASLSYRRSCREGICGSCSMNIDGTNTVACLKPINPNTSKPTIITPLPHMYVIKDLVVDLTNFYQQYKSMEPWLKTRKPPKDGREHRQSPKDRKKLDGLYECILCACCTTSCPSYWWNPEEFPGPAALLQAYRWISDSRDEYREERLQAITESETKVYRCRAIKNCTATCPKGLNPASAILKMKSKHLLSDPLVRTESV

SEQ ID NO: 84756 - DNA, 1379 bp, Arabidopsis thaliana
  misc_feature (1)..(1379): Ceres Seq. ID no. 12676753
  misc_feature (1)..(1379): Ortholog of  Ceres SEQ ID NO 13598387 as cited in SEQ ID NO 62757
  misc_feature (1)..(1379): Ortholog of  Ceres SEQ ID NO 13662984 as cited in SEQ ID NO 64419
aaaaacggcaaaaaaaaaaaaaggggagcagcaacctttttccaattttgcgtgaagcagcagtgaagaaaaaaaggaaaaaaagtgagtgagagaagaagattagaaacgacgatatatacggagaatctcaggatttcgatcctgtttttgttttttctacttttggtactctccatggcgacggagcgtcatcattttgagcttgctaaaggcatcaatggccttgataagatcgttctccgcgagtctcgcggccgctctgcagaggtatacttgtatggaagtcatgtaacttcttggaagaatgagaacggagaggagttacttcacctcagtagcaaggccatattcaagcccccgaaaccaatacgtggagggattcccctatgttttccacaattcagtaactttggtacactcgaatcacatggctttgctagaaataggatctgggaagtcgaggctaacccacctccgttgccattaaattcttgttctagtgcttttgttgacctgatcctaaggccaactgaagacgatctgaaaatctggcctaacaattttgagttcaggctgaggatagccttggggaccgaaggagaattaactctgacatctcgtatcaggaacaccaactctgatggaaagccgtttacattcacatttgcttatcacacctatttctctgtctcagacatcagtgaagtacgggttgaaggattggaaacgttggattatcttgacaacttgaaggacagagaacgttttaccgaacaaggcgatgcgataacttttgaatccgaagttgacaagatttatctaagcacgccaacaaagattgctattttggatcacgagaaaaagaggactttcgttattcgcaaggacgggcttgctgatgctgtggtgtggaatccttgggataagaaatcaaagacgatctctgacttgggagatgaagactataagcatatgctttgtgtggaagctgcggctatcgagagaccgatcacattgaaacccggtgaagaatggaaaggaagactcgaactctctgcagttccttctagttactccagtggacagcttgaccccaagaaagtccttgagtgactctttcaaactccaaaaacagcatctttctcccctctttaattgcagtactataaagaaacgagtgaaggagagcttaaagatcatcggatatactatttaaagaaactgagatattgaataaaaattgttgcttcttagttctcttttgtaaccacagacaataacgatttgcgaactgcgaaccaagcatgcctggtctagcatttgtctggtcagagtccaaaaggaattacaacttataaaatttgtaggttaaactt

SEQ ID NO: 84757 - protein, 312 aa, Arabidopsis thaliana; identical to SEQ ID NO: 43102
  peptide (1)..(312): Ceres Seq. ID no. 12676754

SEQ ID NO: 84758 - DNA, 1238 bp, Arabidopsis thaliana
  misc_feature (1)..(1238): Ceres Seq. ID no. 12676801
  misc_feature (1)..(1238): Ortholog of  Ceres SEQ ID NO 13597715 as cited in SEQ ID NO 65577
  misc_feature (1)..(1238): Ortholog of  Ceres SEQ ID NO 15178668 as cited in SEQ ID NO 68301
cttagggcgtataaaatcagaaacagaaacgagacaagaattaattctctcgtccaaatttcttctgggcagaaaccaacatttatccttatccgattcttctagggtttcggaagatctaaccagaaccttcgcaacaagatggataagtatcagagagttgagaagccgaaggcggatacgccgattgctgagaatgagattcgtatcaccagtatgggtagggcacggaactacatcacctatgcgatggctcttcttcaggaaaacaaatcgaatgaagttatcttcaaggctatgggaagagctatcaacaagagtgtgaccatagttgagctgattaagagaaggattcctggtcttcatcagatcacatctattggatcaacggacattacagatacctgggaacctacagaggaaggccttcaaacaattgagaccacgaggcatgtgtcgatgataaccataacactttccaaggagcagttgaacacatcctcagttgggtaccagtgtccgattcctattgagatggtgaagccattggctgagattgactacgaagggcaagacggatctcctagaggcagaggaggaagaagaggtagaggaggaagaggaaggggaaggggaagaggtggtagaggaaatggacctgcgaatgttgagtatgatgatggaggaaggggaagaggtggcagaggaaacggatatgtgaacaatgagtatgatgatggaggaaggggaagaggcggcagaggtagaagaagtggatatgtgaacaatgagtataatgatggaggtatggagcaggaccggtcatatggcagaggacgcgggcgtgggagaggaggtggacgtggtggtcgaggaagaggaggttacaatggccccccaccaccttactatgaagctcaacaagatggaggagactatggatacaacaatgttgctcctccagcagaccatggatatgatggtcctccgcctcagggacgtggacgtggccgtggaaggggaggtcgtggaagaggaggaggccgtggtggattcaacagatcaaatggagcacctatccaggctgctgcatgagcgaccagggtcattgaatgaagttggatctttcttacattctcatgtttttgtctctgttcttcaaagcaacttgttgccgtagaataatctttcgttcatgtcgctttaggttatatatatcctcatttattttatcatgg

SEQ ID NO: 84759 - protein, 317 aa, Arabidopsis thaliana
  peptide (1)..(317): Ceres Seq. ID no. 12676802
MDKYQRVEKPKADTPIAENEIRITSMGRARNYITYAMALLQENKSNEVIFKAMGRAINKSVTIVELIKRRIPGLHQITSIGSTDITDTWEPTEEGLQTIETTRHVSMITITLSKEQLNTSSVGYQCPIPIEMVKPLAEIDYEGQDGSPRGRGGRRGRGGRGRGRGRGGRGNGPANVEYDDGGRGRGGRGNGYVNNEYDDGGRGRGGRGRRSGYVNNEYNDGGMEQDRSYGRGRGRGRGGGRGGRGRGGYNGPPPPYYEAQQDGGDYGYNNVAPPADHGYDGPPPQGRGRGRGRGGRGRGGGRGGFNRSNGAPIQAAA

SEQ ID NO: 84760 - protein, 292 aa, Arabidopsis thaliana
  peptide (1)..(292): Ceres Seq. ID no. 12676803
MGRARNYITYAMALLQENKSNEVIFKAMGRAINKSVTIVELIKRRIPGLHQITSIGSTDITDTWEPTEEGLQTIETTRHVSMITITLSKEQLNTSSVGYQCPIPIEMVKPLAEIDYEGQDGSPRGRGGRRGRGGRGRGRGRGGRGNGPANVEYDDGGRGRGGRGNGYVNNEYDDGGRGRGGRGRRSGYVNNEYNDGGMEQDRSYGRGRGRGRGGGRGGRGRGGYNGPPPPYYEAQQDGGDYGYNNVAPPADHGYDGPPPQGRGRGRGRGGRGRGGGRGGFNRSNGAPIQAAA

SEQ ID NO: 84761 - protein, 281 aa, Arabidopsis thaliana
  peptide (1)..(281): Ceres Seq. ID no. 12676804
MALLQENKSNEVIFKAMGRAINKSVTIVELIKRRIPGLHQITSIGSTDITDTWEPTEEGLQTIETTRHVSMITITLSKEQLNTSSVGYQCPIPIEMVKPLAEIDYEGQDGSPRGRGGRRGRGGRGRGRGRGGRGNGPANVEYDDGGRGRGGRGNGYVNNEYDDGGRGRGGRGRRSGYVNNEYNDGGMEQDRSYGRGRGRGRGGGRGGRGRGGYNGPPPPYYEAQQDGGDYGYNNVAPPADHGYDGPPPQGRGRGRGRGGRGRGGGRGGFNRSNGAPIQAAA

SEQ ID NO: 84762 - DNA, 3249 bp, Arabidopsis thaliana
  misc_feature (1)..(3249): Ceres Seq. ID no. 12676857
  misc_feature (1)..(3249): Ortholog of  Ceres SEQ ID NO 13600310 as cited in SEQ ID NO 5086
aataaattcatttacagaattgttttgtaaccaattagatagcagtactttaatatctgaggctattttcgtcattttcaaattatggtgtgtttttttggagggagtgggaaaaaaaaaatcgatacatgaatgacgtgacctccattgatttcggcgaacgagcttcttcttcttccctctctctctctctttggctccatctcttacagtaactgtctcttggaaccatttcctcttcactagtatcttctaacaatgtctgctactaggtcacagagatcatccacgatctcgccggctcgtcctcgtagatcgccggcgactattccgatgaaacgtccggaaactccttcttcctctcacttttctgcttctccggttacttcttctagtccattactacgttctagtcctagtccgtctacttcctccgccgccgcctctagtacggctgttgcttccacgaaactgaaggagaatattacagtcacgattcggtttcgtcctctcagtccacgagaggtcaataatggagatgagattgcgtggtatgcagatggagactatactattaggaatgagtataatccatctctttgttatggatttgatagagtatttggtccaccaacaactactcggcgtgtttatgacattgctgctcaacaagttgttagtggggcaatgtcagggattaatggtactgtgtttgcttatggagttactagcagtgggaagactcatacaatgcatggggagcaaaggtcacctggaataattccgttggctgtaaaggatgtatttagcattattcaggagacaccagaacgggaatttcttcttcgtgtttcgtatctagagatatacaatgaggtcatcaatgacttactagatccaacagggcaaaatctaagaatacgagaggattctcagggcacatatgttgaaggtataaaagatgaggttgtcttatcccctgcccatgctctatccctaatagcatctggagaagaacacaggcatgttggttcaaataatgtcaatcttttcagcagtcggagccacacaatgttcaccttgactatagaaagcagtccacatggaaagggagatgacggcgaagatgttagtctctcacaattgcaccttattgatcttgctgggtctgaaagttctaaaactgaaataactggacagcgaaggaaagagggctcttctatcaataaaagtttactcactcttggcactgttatatctaaattgacagacaccaaggcagctcatataccctacagggattctaaacttacgcgtctcttgcagtcaacactaagtggtcatggacgagtgtcacttatttgcactatcacacctgcatccagcacaagtgaagagacgcacaacacactgaaattcgctcagaggtgcaagcatgttgaaatcaaagcttcacgaaataagattatggatgagaagtcccttataaaaaagtatcagaaagaaatatcgtgtttacaagaagaacttacgcaattgaggcacggaaaccaagatgatttggctgatcgaaaacttcaggttaaacttcagtcaaggttggaggatgatgaagaagccaaagcagctctgatgggaagaattcagcgattgacaaagttaatcttggtttcaacaaaaagttcactccaagctgcttctgtaaaacctgaccatatatggaggcaagcttttggagaggatgagctagcatacttgcccgatagaagacgggagaacatggctgatgatggtgctgtaagcacagtttctgaacatttaaaggagccaagagatggcaatagtagtctggacgagatgacaaaggacaggagaaagaacaagactcgtggaatgcttggctggctaaaactgaaaaaatctgatggtgtggccgggacattgccgactgatggtaaccagagccaagcaagtggatctccttcatcttcctccaagtatacacaaacaaaaacaactagaagagaaaatgcagcggctattaagtctattccggaaaaaactgttgctggagacttgttcagtgctactgttggaccagaagactcgtctccgactggaactactattgcggatcaaatggatcttcttcacgagcagacaaaaatacttgttggagaagtagccttacgtaccagttcattaaatcggctttccgaacaagctgctcgcaaccctgaggattttcacatcagagatcaaatacagaaattagaagatgaaatcagcgaaaagaaggatcaaatacgtgttctcgagcaacaaattattgagattttcggaatgactccctatgcctcagattctcttggaatgccccaggttctgtcaaagctcacgatgcaactaaatgagaaaatatttgaacatgagataaagtctgcagacaataggatacttcaggagcagctgcagatgactaaatcagaaaacgctgagatgcaagagacaatcattctactaagacaacaactagattcgttagccgagagacaatcaacacagcaaatcgcaggagacgaatcatcagggaagaatattcacaacagaaatggtgaagagtcagaaatatactctggagcaggaacaccgaccagcgtgatgagtttaaatagagtatttgctcaggaagagactaaagagatctacaacgaaacagctctcaactctcaggcattggaaatagagaatctgaagaaggagaagatgcgattaattgaggaaaaagatgagcttggaaaacttaacaagaaactcactgaagaagcttcatatgctaaagaattggcgtctgctgcagcagtagaacttcagaatttggctgaagaagttaccagactctgcaatgaaaacgcgaaactcagcaggtgaaaaagtttcaggtctctctgttgttgctcggagactcccagcttcaagataatgctgcaaagtaaatcatcttcgttgacatataatgcaaatctcagactctacttggaaggtaatgatgttgatccatcaaagggaacaagagatcatgatgctcccaaaggcattcaatccagaaaaaatggtttgtattgcttggatagtattttgattacgtctgatgacaaacacatgatgtaaatattcctcacaaatttgttttcttgttctcagtgaccactatttttgtatgttcttaggttgaatcaatgatgttgc

SEQ ID NO: 84763 - protein, 890 aa, Arabidopsis thaliana
  peptide (1)..(890): Ceres Seq. ID no. 12676858
MSATRSQRSSTISPARPRRSPATIPMKRPETPSSSHFSASPVTSSSPLLRSSPSPSTSSAAASSTAVASTKLKENITVTIRFRPLSPREVNNGDEIAWYADGDYTIRNEYNPSLCYGFDRVFGPPTTTRRVYDIAAQQVVSGAMSGINGTVFAYGVTSSGKTHTMHGEQRSPGIIPLAVKDVFSIIQETPEREFLLRVSYLEIYNEVINDLLDPTGQNLRIREDSQGTYVEGIKDEVVLSPAHALSLIASGEEHRHVGSNNVNLFSSRSHTMFTLTIESSPHGKGDDGEDVSLSQLHLIDLAGSESSKTEITGQRRKEGSSINKSLLTLGTVISKLTDTKAAHIPYRDSKLTRLLQSTLSGHGRVSLICTITPASSTSEETHNTLKFAQRCKHVEIKASRNKIMDEKSLIKKYQKEISCLQEELTQLRHGNQDDLADRKLQVKLQSRLEDDEEAKAALMGRIQRLTKLILVSTKSSLQAASVKPDHIWRQAFGEDELAYLPDRRRENMADDGAVSTVSEHLKEPRDGNSSLDEMTKDRRKNKTRGMLGWLKLKKSDGVAGTLPTDGNQSQASGSPSSSSKYTQTKTTRRENAAAIKSIPEKTVAGDLFSATVGPEDSSPTGTTIADQMDLLHEQTKILVGEVALRTSSLNRLSEQAARNPEDFHIRDQIQKLEDEISEKKDQIRVLEQQIIEIFGMTPYASDSLGMPQVLSKLTMQLNEKIFEHEIKSADNRILQEQLQMTKSENAEMQETIILLRQQLDSLAERQSTQQIAGDESSGKNIHNRNGEESEIYSGAGTPTSVMSLNRVFAQEETKEIYNETALNSQALEIENLKKEKMRLIEEKDELGKLNKKLTEEASYAKELASAAAVELQNLAEEVTRLCNENAKLSR

SEQ ID NO: 84764 - protein, 865 aa, Arabidopsis thaliana
  peptide (1)..(865): Ceres Seq. ID no. 12676859
MKRPETPSSSHFSASPVTSSSPLLRSSPSPSTSSAAASSTAVASTKLKENITVTIRFRPLSPREVNNGDEIAWYADGDYTIRNEYNPSLCYGFDRVFGPPTTTRRVYDIAAQQVVSGAMSGINGTVFAYGVTSSGKTHTMHGEQRSPGIIPLAVKDVFSIIQETPEREFLLRVSYLEIYNEVINDLLDPTGQNLRIREDSQGTYVEGIKDEVVLSPAHALSLIASGEEHRHVGSNNVNLFSSRSHTMFTLTIESSPHGKGDDGEDVSLSQLHLIDLAGSESSKTEITGQRRKEGSSINKSLLTLGTVISKLTDTKAAHIPYRDSKLTRLLQSTLSGHGRVSLICTITPASSTSEETHNTLKFAQRCKHVEIKASRNKIMDEKSLIKKYQKEISCLQEELTQLRHGNQDDLADRKLQVKLQSRLEDDEEAKAALMGRIQRLTKLILVSTKSSLQAASVKPDHIWRQAFGEDELAYLPDRRRENMADDGAVSTVSEHLKEPRDGNSSLDEMTKDRRKNKTRGMLGWLKLKKSDGVAGTLPTDGNQSQASGSPSSSSKYTQTKTTRRENAAAIKSIPEKTVAGDLFSATVGPEDSSPTGTTIADQMDLLHEQTKILVGEVALRTSSLNRLSEQAARNPEDFHIRDQIQKLEDEISEKKDQIRVLEQQIIEIFGMTPYASDSLGMPQVLSKLTMQLNEKIFEHEIKSADNRILQEQLQMTKSENAEMQETIILLRQQLDSLAERQSTQQIAGDESSGKNIHNRNGEESEIYSGAGTPTSVMSLNRVFAQEETKEIYNETALNSQALEIENLKKEKMRLIEEKDELGKLNKKLTEEASYAKELASAAAVELQNLAEEVTRLCNENAKLSR

SEQ ID NO: 84765 - protein, 747 aa, Arabidopsis thaliana
  peptide (1)..(747): Ceres Seq. ID no. 12676860
MSGINGTVFAYGVTSSGKTHTMHGEQRSPGIIPLAVKDVFSIIQETPEREFLLRVSYLEIYNEVINDLLDPTGQNLRIREDSQGTYVEGIKDEVVLSPAHALSLIASGEEHRHVGSNNVNLFSSRSHTMFTLTIESSPHGKGDDGEDVSLSQLHLIDLAGSESSKTEITGQRRKEGSSINKSLLTLGTVISKLTDTKAAHIPYRDSKLTRLLQSTLSGHGRVSLICTITPASSTSEETHNTLKFAQRCKHVEIKASRNKIMDEKSLIKKYQKEISCLQEELTQLRHGNQDDLADRKLQVKLQSRLEDDEEAKAALMGRIQRLTKLILVSTKSSLQAASVKPDHIWRQAFGEDELAYLPDRRRENMADDGAVSTVSEHLKEPRDGNSSLDEMTKDRRKNKTRGMLGWLKLKKSDGVAGTLPTDGNQSQASGSPSSSSKYTQTKTTRRENAAAIKSIPEKTVAGDLFSATVGPEDSSPTGTTIADQMDLLHEQTKILVGEVALRTSSLNRLSEQAARNPEDFHIRDQIQKLEDEISEKKDQIRVLEQQIIEIFGMTPYASDSLGMPQVLSKLTMQLNEKIFEHEIKSADNRILQEQLQMTKSENAEMQETIILLRQQLDSLAERQSTQQIAGDESSGKNIHNRNGEESEIYSGAGTPTSVMSLNRVFAQEETKEIYNETALNSQALEIENLKKEKMRLIEEKDELGKLNKKLTEEASYAKELASAAAVELQNLAEEVTRLCNENAKLSR

SEQ ID NO: 84766 - DNA, 619 bp, Arabidopsis thaliana
  misc_feature (1)..(619): Ceres Seq. ID no. 12676902
  misc_feature (1)..(619): Ortholog of  Ceres SEQ ID NO 13599881 as cited in SEQ ID NO 1319
  misc_feature (1)..(619): Ortholog of  Ceres SEQ ID NO 13600163 as cited in SEQ ID NO 0
aaggaaacttcggcaagctccagagaaacgagagttccgtaatcattttctcttgttgttcctgatcgcgtagctcaagcgaaaaaaatggcgtcgtttgatgaagcaccaccaggaaacgccaaggccggtgagaagatcttcaggaccaagtgtgctcagtgtcacaccgtcgaagcaggcgccggtcacaaacaaggacccaatctaaacggtctatttggaagacaatctggtacaactgctggttactcttactctgctgctaacaagaacaaagctgtggaatgggaagagaaggccttgtacgattacttgctcaaccccaagaagtacataccaggtaccaagatggtgttccctgggctaaagaagccgcaagaccgtgctgatctcatcgcctacttgaaggaatctactgcgcctaagtgaatctgatggtggattgattctgagttgttaagtctctctcagatgaggcttttttactttgctatattcttttgccaaataaaatctcaaactttttttgtttatcatcaattacgttcttggtgggaatttggctgtaatgtgtgctgaggctcactttatcgagtacatttgattttctgaggct

SEQ ID NO: 84767 - protein, 114 aa, Arabidopsis thaliana [sequence omitted]

SEQ ID NO: 84768 - DNA, 671 bp, Arabidopsis thaliana
  misc_feature (1)..(671): Ceres Seq. ID no. 12676937
  misc_feature (1)..(671): Ortholog of  Ceres SEQ ID NO 12612272 as cited in SEQ ID NO 55946
  misc_feature (1)..(671): Ortholog of  Ceres SEQ ID NO 15169960 as cited in SEQ ID NO 57591
attcgaagagagttctagcaaaacaaaacaaaacagagcaaacagagtaagcgaaacgatgtctctagttccgagcttttttggaggccgaagaacaaacgtgttcgacccattttcactagacgtatgggatccgttcgaaggattcttgacgcccgggttgacaaacgcacctgccaaggacgtggcagcgttcacaaacgctaaagtggactggagggagacacctgaagcgcatgtgttcaaggcggacgtgcctgggcttaagaaggaagaggtgaaggtggaggttgaagatggtaacatacttcagataagcggtgagaggagcagtgagaatgaagagaagagtgacacatggcaccgtgtggagcggtcaagtgggaagttcatgaggaggtttcggttgccagagaatgcaaaggtggaggaagtaaaggcgagtatggagaatggggtgttgtcggttacggtgccgaaagttcaggagagtaagccggaggtcaagtccgttgatatctctggttaagaggaactctgaagttggaaagcttaagacagtaatatgtgatagtgtgaaataaatggtgcgactttcctttcttctttttcttgtaatcaccaatctcgttgtatcaatataagtaatcgtaataaaagagtgttttgat

SEQ ID NO: 84769 - protein, 175 aa, Arabidopsis thaliana
  peptide (1)..(175): Ceres Seq. ID no. 12676938
FEESSSKTKQNRANRVSETMSLVPSFFGGRRTNVFDPFSLDVWDPFEGFLTPGLTNAPAKDVAAFTNAKVDWRETPEAHVFKADVPGLKKEEVKVEVEDGNILQISGERSSENEEKSDTWHRVERSSGKFMRRFRLPENAKVEEVKASMENGVLSVTVPKVQESKPEVKSVDISG

SEQ ID NO: 84770 - protein, 156 aa, Arabidopsis thaliana; identical to SEQ ID NO: 74103
  peptide (1)..(156): Ceres Seq. ID no. 12676939

SEQ ID NO: 84771 - DNA, 748 bp, Arabidopsis thaliana
  misc_feature (1)..(748): Ceres Seq. ID no. 12676957
  misc_feature (1)..(748): Ortholog of  Ceres SEQ ID NO 15173608 as cited in SEQ ID NO 57605
aacaattcgacctcaattgaaattagggtttctctgcaactccacaaacagactcttaacaaaacttcgattcccaatttcaacaatggcttgcgtaaacgaaccatcacctaaactccaaaagctcgaccgaaacggaatccatggcgattcatcaccatcaccattcttcaaagtgaagaaactctccgagaaagctgttataccaacacgcggctcaccactctccgctggatacgatctctcaagtgcggtggattcaaaagttccagcgagaggtaaagcgcttatcccaacggatctaagtatcgctgttcccgaaggaacttacgcgagaattgcgccgagatctggtttggcttggaaacattcgattgatgttggtgctggtgtgattgatgctgattatagaggacctgttggtgtgattttgtttaatcattctgatgctgattttgaggttaagttcggtgatcgaatcgcgcagttgattatcgagaagattgtgactcctgatgttgttgaggttgatgatttggatgagactgttcgtggtgatggtggttttggttctactggtgtctaagtgataatcatcttcttcgtttatgaatgtgttttggtttttaatttcgtcgaacagtttgtgggcattattattgtactatctctttgcttcatctttagactattcaaacaaactctcactgttttttttctttgttgggctacaaaatgaatcaattac

SEQ ID NO: 84772 - protein, 194 aa, Arabidopsis thaliana
  peptide (1)..(194): Ceres Seq. ID no. 12676958
TIRPQLKLGFLCNSTNRLLTKLRFPISTMACVNEPSPKLQKLDRNGIHGDSSPSPFFKVKKLSEKAVIPTRGSPLSAGYDLSSAVDSKVPARGKALIPTDLSIAVPEGTYARIAPRSGLAWKHSIDVGAGVIDADYRGPVGVILFNHSDADFEVKFGDRIAQLIIEKIVTPDVVEVDDLDETVRGDGGFGSTGV

SEQ ID NO: 84773 - protein, 166 aa, Arabidopsis thaliana; identical to SEQ ID NO: 30604
  peptide (1)..(166): Ceres Seq. ID no. 12676959

SEQ ID NO: 84774 - DNA, 1576 bp, Arabidopsis thaliana
  misc_feature (1)..(1576): Ceres Seq. ID no. 12676960
  misc_feature (1)..(1576): Ortholog of  Ceres SEQ ID NO 13596392 as cited in SEQ ID NO 62136
  misc_feature (1)..(1576): Ortholog of  Ceres SEQ ID NO 13654360 as cited in SEQ ID NO 67980
  misc_feature (1)..(1576): Ortholog of  Ceres SEQ ID NO 13596394 as cited in SEQ ID NO 68561
tttatctaaaacgaaaaaaaagaaaagaagagaagcttttttagttctctctgcccaatggagaaaagaagaaccagagattgccaaatcatcttctgcaaaagcacccatcaaagaaattacttgtaaatagaaaacaaatcatcaaatctggaagacaaatcattaaaaaaggcgacaactttttttggttcagattttgaaaatttgattttttatttttcttatcttggcgatcgaatcctatccgaaagattgaaacttgggaggtgggtaagtgagtgaatggcgcaacaagggcagggaagcatggaccctgctgttctcgacgacatcattcgtcgtttacttgattaccgaaaccctaaagctgggaccaaacaagctatgctcaacgattctgagatccgacagctttgctttgtctctagagagatatttcttcaacagccttgtcttcttgagctcgctgcccctgttaagatctgcggtgatattcatggtcaatactcagatttattgaggcttttcgagtatggaggtttccctcctgcagcaaactacttattcttaggagattacgttgaccgcggaaagcagagtttggagactatttgtcttctgcttgcttacaagatcaaataccctgaaaacttttttctcttaagaggaaaccatgagtgtgcatctattaacagaatttacggattctatgacgaatgtaaacgaagattcaacgtgaagctctggaaagtgtttaccgatacttttaactgtctccctgtggctgctgtcatagatgaaaagatactttgtatgcatggtggactatctcctgagttgatcaatgtggaacaaattaagaacatagagcgtccaactgatgttccagacgctggtttgctctgtgaccttctttggtctgatcctagtaaagatgtcaaaggctgggggatgaatgatcgtggtgtctcctacacttttggtgctgacaaagttgctgagtttttaataaagaatgatatggatttagtctgtcgtgcccaccaggttgtagaggatgggtatgagttctttgctgatagacagcttgtgactatgttttctgctccaaactactgtggtgaatttgacaatgcgggtgcattgatgagtgtcgacgaaagtttaatgtgctctttccaaattcttaagcctgtggatcggaggtcgcggttcttttgaagagaaagagtccttcttaagttataaccctgattcaaatcttatgggaagaatgggaggagaaaaagcgacgacggatgttggtggcggataattctgaacctccacgagtagtctccgaagttgcaaaagcaacaatatatatatttacatggttatatcatctctgccacttcttttgaatatgatcttgtttcttcaactcaattttttgctctgtttccttctctgttctttcacatgtcagagatacaaatcctctaagtgtatataatactttatatgtatgtatcagaacctcactgcaggatgcttcagttcatgattcttattaaaacagagggttctctag

SEQ ID NO: 84775 - protein, 312 aa, Arabidopsis thaliana; identical to SEQ ID NO: 22169
  peptide (1)..(312): Ceres Seq. ID no. 12676961

SEQ ID NO: 84776 - protein, 304 aa, Arabidopsis thaliana; identical to SEQ ID NO: 22170
  peptide (1)..(304): Ceres Seq. ID no. 12676962

SEQ ID NO: 84777 - protein, 278 aa, Arabidopsis thaliana; identical to SEQ ID NO: 22171
  peptide (1)..(278): Ceres Seq. ID no. 12676963

SEQ ID NO: 84778 - DNA, 3130 bp, Arabidopsis thaliana
  misc_feature (1)..(3130): Ceres Seq. ID no. 12676972
  misc_feature (1)..(3130): Ortholog of  Ceres SEQ ID NO 14311477 as cited in SEQ ID NO 51390
  misc_feature (1)..(3130): Ortholog of  Ceres SEQ ID NO 14302840 as cited in SEQ ID NO 62295
  misc_feature (1)..(3130): Ortholog of  Ceres SEQ ID NO 13596892 as cited in SEQ ID NO 62900
aaaaaaacagcgacgtcttctctctcacggcgataaaaacagagaaccttccatttgtttctttgagcgcgtgaccggcgcgtggcggcttagttagcgccggcgtcggtcctccagtctggttttctttagggtttcattctctacttagtctggttcgtttttagatcctgatttgatgttggcaaggtgaagaatttttggatcttagatctgtaagagccatcgttgtgggctttgattcgtcgaaggttttgtgcgatcggaactcccttttctctgttttgagaaaattatgggtttctcctttgttcttgcagatcttgtttccgacgaaggttgcaaacgaaagttatgacggcggctaatgttattggtggtctggctccttctttgggatagggtggcaacggtacaccggtattttagtgttagttgtctcataattgggttttgcgctttcgttaaccttgttctcttcatttctcttttgggttcctatcctttagtcttcattgttggcttgttggtagcgtttatggaatcaactttattctcagtcttttgtggtctagtatcttgaactcttgcctattctatgtcctgccgagtttgcttgtttctcgatccgattcgttctcttgccgtctccagtcttcggtttgttgcgaattgtatgggctcggtccttgtctctacggtttagacttgatcgaggtctctcttttgcattggtgtcttactaggcgtgaaccaatcttggttttgtttgcttcgatttcgccgtttccagaagttgtgtgggatttctagtcgtctcccattcttgctggtatggatgctttggttctctttatttgtgaggtagtcttcatttggtataggaagagtcgctatccggtgtcgtggattttctcgtctccattggctagccactaattcaagcgtttctcgtttttggattgataatttgcaagatgtttggtgctagattctgagttatgagttttaattccctctgatgtttgctttcttagccgtcagtgttttgacttgtttcttttgtagtgttgttatttgctccccattttcttggacttagtttcctaggatatcttgttatccttcgggttagttttcgggatcatgtattgatcgtcgactccttgtatttcacctagtactcatcaatgaaaattaatcttccagtgaaaaaaaaaaaatgtatataattgttatggaatttctgtgtccagtccatattaagctttttacatatatatatagcatcgaccgcgaagtccgtaacaccatctcttctagaagactcggatttcattggcagaggcgtatgctcctttggatctgatagttaaaacaccaaatcttgtgtaactttcttgtatataatgctctgtttaactttcatttttttttagtaatatttacattcctagcaacaaatatttatttatagcaattaatatatatttttagtaataattacattcctagcaacaaatatatatttattttttaacaaatacacaaatatatttttagtagcaattaacctattttcctaacaagatacaacagaagaataagaaaatagtagacagatagatccacttgctaccatttcctctccctgtagccttctgtgtctattaaaatagacttcacttgtaaagtaaaagtttgaacattttaacatataaaaaaaaaaaccaagtagagaggtaagtggtggtattggttctgcaaaagaacattatggatatacttaccaccattctcaatcttcttcttcctcctcttactatcatctttctcttcctgttttacccattttatcttttgatcaaacttgtgctttgtcttcgtaagaaccttcacttcgaaaacgtagccagaaaagtagttctaatcaccggagcttcctctggcatcggagaggttagttagctttggatgctatgcccttttgttagttagtatattttttttaccaatactaagtaactgagtagatttagtctattatactattactgattcaaatatatgtgtgtatatacataatatagatccgacattggtgatagtgtttatggttttgttttcgaggtcctattttgtcgtggaatctcttgcaactatatgtgtgctatttgatctatttgataatagacgactaaaaataactaaatgtatagatccacataaattgatatgatatttggttgagaacttgagattgttaatgttcttgtcttgtttggttggaaaaaaattaaaaagcatgtggcatacgaatacgcaaagaaaggagcatatttggctcttgttgctcgaagaagggatcgtctagagattgtagcagaaacatcacgtcaattaggatctggtaatgtcatcatcatacctggtgatgtttctaatgttgaggactgcaagaagttcatcgatgagacgattcgtcatttcggaaaactagaccacctgatcaataatgctggtgtatttcaaactgttcttttcgaagatttcacacaaattcaagacgcaaatcctataatggacatcaacttttggggtacaacatacatcacctattttgcaattcctcatcttcgaaagagtaaaggaaaaatcgtcgcgattacatcgggttcagcaaatatacctttgccattggcaagcatctatgcagcaagcaaagcagccttattaagattctttgagacattaagaatagagctaagtcctgatatcaaaataacaattgttctcccaggagttgtatcaacagatatgaccactcctcactgtatagagaagtatggttcggattttattctatcggaatcagtgagtaaatgcgcaaaggcaatcttcagaggtattggcagaggagagacatacatagaagaaccatcttggatgaaatggctgtttataatgaaaaatgtatgtcccgaaatcgttgattacggacttaactatctatttgttagttatctaaaaccttatttcaagcgtgattgatcataacaatcaatcccaaatctataatctttttaataagggttgtgtacttgtcttcctatgatgactatttttcaat

SEQ ID NO: 84779 - protein, 156 aa, Arabidopsis thaliana
  peptide (1)..(156): Ceres Seq. ID no. 12676973
MDINFWGTTYITYFAIPHLRKSKGKIVAITSGSANIPLPLASIYAASKAALLRFFETLRIELSPDIKITIVLPGVVSTDMTTPHCIEKYGSDFILSESVSKCAKAIFRGIGRGETYIEEPSWMKWLFIMKNVCPEIVDYGLNYLFVSYLKPYFKRD

SEQ ID NO: 84780 - DNA, 857 bp, Arabidopsis thaliana
  misc_feature (1)..(857): Ceres Seq. ID no. 12677022
  misc_feature (1)..(857): Ortholog of  Ceres SEQ ID NO 15174142 as cited in SEQ ID NO 64367
atacttcagtctagagccgcgcaagaagacgattctctctcttgagttgaagaaatgaagcacaacaatgttatccccaatggtcacttcaaaaagcactggcagaattatgtcaagacatggttcaaccagcctgccaggaaaaccagaagaagaattgcgaggcaaaagaaggctgtgaagatcttccctcgtccaacttctggacctctccgccctgttgtgcatggtcagactcttaagtacaacatgaaggtcagaaccggtaaaggattcactcttgaagagctcaaggctgctggtatcccaaagaagttggcgcctacaattggtattgctgttgaccatcgtcgcaagaaccgatctttggagggtcttcaaacaaatgtccagaggctgaaaacctacaagaccaagttagtcattttcccgcgtcgtgcccgcaaggtcaaggctggtgactctacaccagaagagttggctaatgctacccaagttcaaggagactacttgcctattgtacgtgagaagcctaccatggaactcgtcaagctgacttcagaaatgaagtctttcaaggcttttgacaagatacgccttgagcgcactaacaagaggcatgccggagctagagccaagagagccgcagaggctgagaaagaagagaagaagtgaggtcgttcttcttaggtagaagaaacttttatcttatcaacttttggaactgaattttgtgtatcagactgtcttttctttcatcagtttttatccttaaatctttgattttgctgctaccttgcttctcttgatttatggaaaagaccgtatctcacatctctacttgctatagtttcctc

SEQ ID NO: 84781 - protein, 206 aa, Arabidopsis thaliana [sequence omitted]

SEQ ID NO: 84782 - protein, 141 aa, Arabidopsis thaliana; identical to SEQ ID NO: 25776
  peptide (1)..(141): Ceres Seq. ID no. 12677024

SEQ ID NO: 84783 - DNA, 1538 bp, Arabidopsis thaliana
  misc_feature (1)..(1538): Ceres Seq. ID no. 12677036
  misc_feature (1)..(1538): Ortholog of  Ceres SEQ ID NO 15171430 as cited in SEQ ID NO 51500
  misc_feature (1)..(1538): Ortholog of  Ceres SEQ ID NO 13654989 as cited in SEQ ID NO 63117
  misc_feature (1)..(1538): Ortholog of  Ceres SEQ ID NO 13655640 as cited in SEQ ID NO 63844
  misc_feature (1)..(1538): Ortholog of  Ceres SEQ ID NO 13584744 as cited in SEQ ID NO 69137
atttcgctttaatgagttttatctgatagaatctgctccacccaaaaacagcataagaagaaattcattgtcagagaaaagtgcaaaaaaaaaaaacgatcttcttcatcattctactaaatgggttcttgtctcagttctcgtgtccttaataagagcagtagtggtctcgatgatcttcatctctcgagctgtaaatcttcatcatcagctacagctcataagacagaaggagaaatccttagctcaacgaccgtcaaaagctttagctttaatgaacttaaactcgctactagaaacttcagatcggactctgttgttggagaaggtggctttggttgtgtctttagaggttggcttgatgagactactcttactcctaccaaatctagctctggtcttgttattgctgttaaacgacttaaccctgatggttttcaaggtcaccgagaatggctgacagagattaactatttggggcagttaagtcacccgaatttggttaaattgattggttattgcttggaagatgaacaacggcttcttgtgtatgagtttatgcacaagggtagtcttgagaatcatctgtttgcaaatggaaataaggattttaagccgctatcttggattctacggattaaggttgcacttgatgcagctaaaggtcttgcatttcttcatagtgatcccgtcaaagtcatttacagagacatcaaggcgtcaaacatcttactggactcggacttcaacgcaaagctttcagactttggtttagcgagagacggtccaatgggagaacaaagttatgttagtacaagggtcatgggtacttttgggtacgcagctcctgagtatgtctcaacaggccacttaaatgctagaagcgacgtatacagtttcggggttgttctgctagaactactatgtggaaggcaagcactagaccataaccgcccggccaaggagcaaaaccttgtggattgggctcgaccatacctcacaagcaggcgaaaggttctactaattgtggacactcggcttaactcacagtacaaacccgaaggagcagtgagactggcaagcattgctgtgcaatgcctatcattcgaacccaaatcacgtccgaccatggaccaagtggttcgagccttggtacagctgcaagacagcgtggttaaaccggccaatgttgacccgcttaaggttaaggataccaagaaacttgtgggattgaaaacagaagacaagtaccagagaaacggtttaaacaaaaaaaccgttggattgtagtaggtagagggaaatataaggttacttggttaggtactcttcatgtcttcttcttgtgtattgtaatattgtgcgaagtgattttgacattttgtaacactgcttatagttttgctcctgaaatattcgatttggagatacttgttttctctctatctatagtttggtgatatatgccaaaatgtggtagtgatcaattccactctcttctaacattttagtttactatatatgtaactaatttctgt

SEQ ID NO: 84784 - protein, 389 aa, Arabidopsis thaliana
  peptide (1)..(389): Ceres Seq. ID no. 12677037
MGSCLSSRVLNKSSSGLDDLHLSSCKSSSSATAHKTEGEILSSTTVKSFSFNELKLATRNFRSDSVVGEGGFGCVFRGWLDETTLTPTKSSSGLVIAVKRLNPDGFQGHREWLTEINYLGQLSHPNLVKLIGYCLEDEQRLLVYEFMHKGSLENHLFANGNKDFKPLSWILRIKVALDAAKGLAFLHSDPVKVIYRDIKASNILLDSDFNAKLSDFGLARDGPMGEQSYVSTRVMGTFGYAAPEYVSTGHLNARSDVYSFGVVLLELLCGRQALDHNRPAKEQNLVDWARPYLTSRRKVLLIVDTRLNSQYKPEGAVRLASIAVQCLSFEPKSRPTMDQVVRALVQLQDSVVKPANVDPLKVKDTKKLVGLKTEDKYQRNGLNKKTVGL

SEQ ID NO: 84785 - protein, 243 aa, Arabidopsis thaliana; identical to SEQ ID NO: 72442
  peptide (1)..(243): Ceres Seq. ID no. 12677038

SEQ ID NO: 84786 - DNA, 1454 bp, Arabidopsis thaliana
  misc_feature (1)..(1454): Ceres Seq. ID no. 12677052
  misc_feature (1)..(1454): Ortholog of  Ceres SEQ ID NO 15172093 as cited in SEQ ID NO 54938
aaatatattcatcaaataaacaaaaatctctgtatttttttttaaaaaagatggctgatttggatttacagaggaagatggtatctccgaagctccacgtcaccattcctgagccgtgtaagctctcctccgtctcttctccaatctcctcctcttcttccgccgcttgctctgcttacgagctttacctccgtttgcctgaacttagaaacctctggtcctctctctatttccctcactggatctccgagcccgttctcaaaccagctcttcaagctcttgagatcactttccggttaatcctcaccgttgcttctgacacacgtccttacatcaaccgccgcgaatggatccgacggttggattccctcactaccagccagataaaaatcgtggcggctatctgcggagatgaagacaactacgaagagaacgtatcggcggctccggtcagcaatggctggagctcgttgagtttgctttcggagatcgccacgtgtcgtacatcggagagtgttggacagaagatcttgtctacgatcgagaatgagatgcgttggtgtaagtatacgctcggtttaggagaaccaaacctcgccggaaaaccgtatcttcaatacgacgccgtttgtctcccggaggagctacatagcctcaagaacaatccttacgcagatcacatcgagaaccaagagaatcaaatgctctacactagtcatcagattcttgaatcgtggatttacgtttctgtgaatcttttatatagaatcgaatcgagaatcgaagagggaaaattcgaaaaagcttcttcagacgtctacttgttggagagaatctggaagcttctatcagagattgaagatttacacattcttatggatcctgaagatttcttgaaggtgaagaaacagttacaaatcaaatcgacgtttccaaacgacgcattttgttttaggtcaaagggcttagtagagatggcgaagatgtccaaagagctgagacagaaagtgccagctgttcttgaggtggaggtggatcccaccggaggtccgaggttgcaagaggcggcgatgaagctttactcgaggaaaacagagtacgagaagatacatttgcttcagggaatgcaggccgtggagtctgcagccaagagattcttcttcggataccagaagttggttgcagcgatgattgggaatgcagaggcgaatgcaaatagaacggtggcgaatcacgagtcctatgattcactgactcaggtgtttatggagccaccgtattacccgagcctagacgccgcaaagacatttctgggagagttctggagccaattgtgatgcaatggaagatattgacacaactacttaacaaacactatcaacagatgtaacactactgaaatttttggaagcatctaacgatcagtgtatgaatatatgtaactcatttttttt

SEQ ID NO: 84787 - protein, 444 aa, Arabidopsis thaliana; identical to SEQ ID NO: 42618
  peptide (1)..(444): Ceres Seq. ID no. 12677053

SEQ ID NO: 84788 - protein, 428 aa, Arabidopsis thaliana; identical to SEQ ID NO: 42619
  peptide (1)..(428): Ceres Seq. ID no. 12677054

SEQ ID NO: 84789 - protein, 419 aa, Arabidopsis thaliana; identical to SEQ ID NO: 42620
  peptide (1)..(419): Ceres Seq. ID no. 12677055

SEQ ID NO: 84790 - DNA, 1145 bp, Arabidopsis thaliana
  misc_feature (1)..(1145): Ceres Seq. ID no. 12677060
  misc_feature (1)..(1145): Ortholog of  Ceres SEQ ID NO 14312711 as cited in SEQ ID NO 1401
  misc_feature (1)..(1145): Ortholog of  Ceres SEQ ID NO 13586635 as cited in SEQ ID NO 14217
  misc_feature (1)..(1145): Ortholog of  Ceres SEQ ID NO 15170220 as cited in SEQ ID NO 55383
  misc_feature (1)..(1145): Ortholog of  Ceres SEQ ID NO 14304198 as cited in SEQ ID NO 56479
  misc_feature (1)..(1145): Ortholog of  Ceres SEQ ID NO 14316543 as cited in SEQ ID NO 57118
  misc_feature (1)..(1145): Ortholog of  Ceres SEQ ID NO 12616285 as cited in SEQ ID NO 63483
acacatcttaaaaagtaaaaacacattcatctatccaacaaaaaaaaagaaaggagaaatggaaggaatcgatcatagaatggtgagtgtcaatggcataacaatgcacattgccgagaaaggtcccaaagaaggacctgtggtgcttctcctccatggattccctgatctctggtacacgtggcgtcaccagattagtgggttatcatctctaggttaccgcgctgtagctccagacctccgaggctacggagactctgattcgccggagtctttctccgagtacacgtgtcttaacgtcgttggggacctcgtagctcttctggacagtgttgctggaaatcaagagaaggtgtttctggtcggtcatgattggggagccattatcggatggtttctctgtttgtttcgacctgaaaagattaacggctttgtgtgtttgagtgtgccgtatagatcaagaaaccctaaagtcaagcccgttcaagggttcaaggctgtatttggagatgattactacatttgtagatttcaggaaccggggaagattgaaggagagattgcaagtgcagatccaagaatatttctgaggaacctcttcacagggaggacactcggtccgccgattttacctaaggataatccctttggggaaaaacctaaccctaatagcgaaaacattgaattgcctgaatggttttctaagaaagatctcgatttctatgtctccaaattcgagaaggcaggatttaccggtggattgaactactacagagccatggatctgaattgggagctcactgcaccatggaccggagctaagattcaagttccagtgaagttcatgacaggtgacttcgacatggtgtacaccacaccagggatgaaagagtacattcacggtggtggatttgctgcagatgttccaactcttcaagagatagtggtgattgaagatgctggtcacttcgttaaccaagagaaacctcaagaggtcactgctcacatcaatgacttcttcaccaagcttcgggacaacaacaaaagcttttagagttctcgtttggttctattatgttggctctcaaaacaagttggttcttgcatgtgttgtttcgacaagattttgaataagacttggcatt

SEQ ID NO: 84791 - protein, 350 aa, Arabidopsis thaliana; identical to SEQ ID NO: 26920
  peptide (1)..(350): Ceres Seq. ID no. 12677061

SEQ ID NO: 84792 - protein, 331 aa, Arabidopsis thaliana; identical to SEQ ID NO: 21476
  peptide (1)..(331): Ceres Seq. ID no. 12677062

SEQ ID NO: 84793 - protein, 324 aa, Arabidopsis thaliana; identical to SEQ ID NO: 21477
  peptide (1)..(324): Ceres Seq. ID no. 12677063

SEQ ID NO: 84794 - DNA, 1290 bp, Arabidopsis thaliana
  misc_feature (1)..(1290): Ceres Seq. ID no. 12677064
  misc_feature (1)..(1290): Ortholog of  Ceres SEQ ID NO 14312711 as cited in SEQ ID NO 1401
  misc_feature (1)..(1290): Ortholog of  Ceres SEQ ID NO 13586635 as cited in SEQ ID NO 14217
  misc_feature (1)..(1290): Ortholog of  Ceres SEQ ID NO 15170220 as cited in SEQ ID NO 55383
  misc_feature (1)..(1290): Ortholog of  Ceres SEQ ID NO 14304198 as cited in SEQ ID NO 56479
  misc_feature (1)..(1290): Ortholog of  Ceres SEQ ID NO 14316543 as cited in SEQ ID NO 57118
  misc_feature (1)..(1290): Ortholog of  Ceres SEQ ID NO 12616285 as cited in SEQ ID NO 63483
acacatcttaaaaagtaaaaacacattcatctatccaacaaaaaaaaagaaaggagaaatggaaggaatcgatcatagaatggtgagtgtcaatggcataacaatgcacattgccgagaaaggtcccaaagaaggacctgtggtgcttctcctccatggattccctgatctctggtacacgtggcgtcaccagattagtgggttatcatctctaggttaccgcgctgtagctccagacctccgaggctacggagactctgattcgccggagtctttctccgagtacacgtgtcttaacgtcgttggggacctcgtagctcttctggacagtgttgctggaaatcaagagaaggtgtttctggtcggtcatgattggggagccattatcggatggtttctctgtttgtttcgacctgaaaagattaacggctttgtgtgtttgagtgtgccgtatagatcaagaaaccctaaagtcaagcccgttcaagggttcaaggctgtatttggagatgattactacatttgtagatttcaggaaccggggaagattgaaggagagattgcaagtgcagatccaagaatatttctgaggaacctcttcacagggaggacactcggtccgccgattttacctaaggataatccctttggggaaaaacctaaccctaatagcgaaaacattgaattgcctgaatggttttctaagaaagatctcgatttctatgtctccaaattcgagaaggcaggatttaccggtggattgaactactacagagccatggatctgaattgggagctcactgcaccatggaccggagctaagattcaagttccagtgaagttcatgacaggtgacttcgacatggtgtacaccacaccagggatgaaagagtacattcacggtggtggatttgctgcagatgttccaactcttcaagagatagtggtgattgaagatgctggtcacttcgttaaccaagagaaacctcaagaggtcactgctcacatcaatgacttcttcaccaagcttcgggacaacaacaaaagcttttagagttctcgtttggttctattatgttggctctcaaaacaagttggttcttgcatgtgttgtttcgacaagattttgaataagacttggcattatgaagctcaacgtgtgtaggaacaatcgattctggcgaaaatagttagaaggctggattgaagatttcaaaagaaaaccaattttttttatagatttcacaatgattttataagcaaactaaatgaaccagaaataaccaagtg

SEQ ID NO: 84795 - protein, 350 aa, Arabidopsis thaliana; identical to SEQ ID NO: 26920
  peptide (1)..(350): Ceres Seq. ID no. 12677065

SEQ ID NO: 84796 - protein, 331 aa, Arabidopsis thaliana; identical to SEQ ID NO: 21476
  peptide (1)..(331): Ceres Seq. ID no. 12677066

SEQ ID NO: 84797 - protein, 324 aa, Arabidopsis thaliana; identical to SEQ ID NO: 21477
  peptide (1)..(324): Ceres Seq. ID no. 12677067

SEQ ID NO: 84798 - DNA, 2261 bp, Arabidopsis thaliana
  misc_feature (1)..(2261): Ceres Seq. ID no. 12677084
  misc_feature (1)..(2261): Ortholog of  Ceres SEQ ID NO 14312594 as cited in SEQ ID NO 58686
  misc_feature (1)..(2261): Ortholog of  Ceres SEQ ID NO 13597706 as cited in SEQ ID NO 65326
cctctgattccgaatcgggtaaattattatggattcttcttcttcgtcttcctccgccgccgcacgccgccgtatcaacgctatccactctcacctcgtcacctcttctcgctcttcccctctcctccgctccaatcccaccgccggcgagttctgtcttgataatggctatagtgttgttcttcccgagaaactgaatactggcagttggaacgtctacagatctgcaaaatctccgttcaagctcgttagcagattcccagatcatcctgacatcgctactctccatgacaattttgagcatgctgttcatgattttcgagattacaagtatttaggaactcgtgttcgtgtcgacggaactgttggagactacaaatggatgacatatggagaagctggtacagcaagaactgctttaggttctggtttggttcatcacggaatccccatgggatcttctgttggaatttacttcatcaatcgcccagagtggctcattgttgatcatgcttgttcttcttattcttatgtgtctgttcctttgtatgatactcttggtcctgatgctgtgaaatttattgtcaatcatgcaactgtgcaagccatattttgtgtggcagagactttaaactctttacttagctgtttgtctgagatgccaagtgtacgcctggtggtggttgttggagggttaattgaatctttaccctcgcttccctcatcatcaggagtgaaagttgtatcctattcggtgttactgaatcagggtcgtagtaaccctcagcgattttttccaccaaaacccgatgatgttgcaaccatatgctatacaagcggaacaactgggacacccaagggagtcgtattaactcatgcaaacttgattgccaatgttgctggctccagctttagtgtgaagtttttctcttcagatgtttacatttcgtatcttccacttgctcacatttacgaacgagctaatcagatcctaacagtgtactttggagttgctgttggattctaccaaggggacaatatgaaactactggatgatttggctgctctgagacctactgtatttagcagtgtccctcgattatacaatagaatatatgctggtatcattaatgcagtaaaaacctctggtggtctgaaagagagactcttcaatgctgcctataatgcaaagaagcaggctctcttgaatgggaaagagtgcttctcccatatgggacaggttggtatttaataaaataaaggacagacttggagggcgggttcgttttatgacgtctggtgcttcacctctctctcctgaagtgatggaatttttgaaagtatgctttggaggaagggtaacagagggatatggaatgactgaaacatcttgtgttataagtggaatggacgagggtgataacctcactggacatgttggctctcctaatccagcttgtgaagtaaagcttgtggatgtcccagaaatgaactatacatcagcggatcagccccatccccgtggcgaaatatgtgttaggggtcctatcatttttacaggctattacaaagatgaaattcaaacgaaagaggtgattgatgaagatggatggcttcacactggagatataggtctgtggctgccgggaggacgtctaaaaattattgacagaaagaagaacatcttcaaattggcgcagggggagtatatagctccagagaaaattgaaaacgtctatgccaaatgcaaatttgtgggccagtgcttcatatatggtgatagctttaattcatcattggtagctgttgtatcggttgatccagatgtgctgaaaagctgggcagcttcagaaggcattaagggaggagatctgagagaattgtgtaataatccgagagtgaaagcagcagtactatctgacatggacactgttggaagagaagctcagttgagaggcttcgagtttgcaaaggctgtgacattggtgctggaaccatttactctggaaaatggcttgttgactccgacgttcaagattaagagaccacaagcaaaggaatatttcgcagaagcaataacaaacatgtacaaggagcttggtgcttctgatccctctgctaatagaggtttgtgatgatggtataatcgtgtgattaataaaaagcctacgcaaaagttgtttctcccacaaattgtattcttttttgttttcttgctacatatttattgaatagtaaaggtaataaaggtgctacattac

SEQ ID NO: 84799 - protein, 407 aa, Arabidopsis thaliana
  peptide (1)..(407): Ceres Seq. ID no. 12677085
MDSSSSSSSAAARRRINAIHSHLVTSSRSSPLLRSNPTAGEFCLDNGYSVVLPEKLNTGSWNVYRSAKSPFKLVSRFPDHPDIATLHDNFEHAVHDFRDYKYLGTRVRVDGTVGDYKWMTYGEAGTARTALGSGLVHHGIPMGSSVGIYFINRPEWLIVDHACSSYSYVSVPLYDTLGPDAVKFIVNHATVQAIFCVAETLNSLLSCLSEMPSVRLVVVVGGLIESLPSLPSSSGVKVVSYSVLLNQGRSNPQRFFPPKPDDVATICYTSGTTGTPKGVVLTHANLIANVAGSSFSVKFFSSDVYISYLPLAHIYERANQILTVYFGVAVGFYQGDNMKLLDDLAALRPTVFSSVPRLYNRIYAGIINAVKTSGGLKERLFNAAYNAKKQALLNGKECFSHMGQVGI

SEQ ID NO: 84800 - protein, 308 aa, Arabidopsis thaliana
  peptide (1)..(308): Ceres Seq. ID no. 12677086
MGKSASPIWDRLVFNKIKDRLGGRVRFMTSGASPLSPEVMEFLKVCFGGRVTEGYGMTETSCVISGMDEGDNLTGHVGSPNPACEVKLVDVPEMNYTSADQPHPRGEICVRGPIIFTGYYKDEIQTKEVIDEDGWLHTGDIGLWLPGGRLKIIDRKKNIFKLAQGEYIAPEKIENVYAKCKFVGQCFIYGDSFNSSLVAVVSVDPDVLKSWAASEGIKGGDLRELCNNPRVKAAVLSDMDTVGREAQLRGFEFAKAVTLVLEPFTLENGLLTPTFKIKRPQAKEYFAEAITNMYKELGASDPSANRGL

SEQ ID NO: 84801 - protein, 289 aa, Arabidopsis thaliana
  peptide (1)..(289): Ceres Seq. ID no. 12677087
MTYGEAGTARTALGSGLVHHGIPMGSSVGIYFINRPEWLIVDHACSSYSYVSVPLYDTLGPDAVKFIVNHATVQAIFCVAETLNSLLSCLSEMPSVRLVVVVGGLIESLPSLPSSSGVKVVSYSVLLNQGRSNPQRFFPPKPDDVATICYTSGTTGTPKGVVLTHANLIANVAGSSFSVKFFSSDVYISYLPLAHIYERANQILTVYFGVAVGFYQGDNMKLLDDLAALRPTVFSSVPRLYNRIYAGIINAVKTSGGLKERLFNAAYNAKKQALLNGKECFSHMGQVGI

SEQ ID NO: 84802 - DNA, 917 bp, Arabidopsis thaliana
  misc_feature (1)..(917): Ceres Seq. ID no. 12677099
  misc_feature (1)..(917): Ortholog of  Ceres SEQ ID NO 14304678 as cited in SEQ ID NO 53747
aacatagtcctgaagatgtcaaattcacgattgacgtaaatcttgttgggagcttcaatgtgattaaagccgctttgcctgccatgaaagcaaggaaagatcgtggacctgcttccatcagtctcgtctcctctcaagctggtcaggttggtgtctatggttatgctgcatattcagcaagcaagtttggtcttcagggtttagcgcaagcattgcaacaggaagttatatctgatgatattcatgtcactcttatttttcctcctgacactaatacacccggctttgaagaagaacagaagagcagacctgaagtcactgccataatagctgcatcctctggttcaatggaaacagaagaagtagcaaaaaaggctatggatggcataaaagcaggaaacttcaccgtctcatgcaactttgagggattcttactgtctctcgcgacaaccggcatgtcccctcaaagatcattttggcttgcttttcttgaagttataaccgcagggcctataagattaatcgctctcttctttcaatgggattggtataaagccattgaaaaatggagcaaaaccaaaaccaaatgacagcccgacaatgtatcttgaagtgcttttggcagaagcttaaacattgatgggtattctcaaaccttcttctcagtccggtaccacgccagctagtcgactataccaattcagaatatcgacattgctgatagttttgtagaaactcgtcaagattcatgtttccggtctttgaacaagctctgttttttctttttttttatagagaaatcaaagaactcatttgaatgtattttttacttggtcaagaagtgaatgtttttcacaagatgaaatgtaaatgatgtatttgaaagaagtaaaaacttcaaaaccaaaatttgagtg

SEQ ID NO: 84803 - protein, 195 aa, Arabidopsis thaliana
  peptide (1)..(195): Ceres Seq. ID no. 12677100
HSPEDVKFTIDVNLVGSFNVIKAALPAMKARKDRGPASISLVSSQAGQVGVYGYAAYSASKFGLQGLAQALQQEVISDDIHVTLIFPPDTNTPGFEEEQKSRPEVTAIIAASSGSMETEEVAKKAMDGIKAGNFTVSCNFEGFLLSLATTGMSPQRSFWLAFLEVITAGPIRLIALFFQWDWYKAIEKWSKTKTK

SEQ ID NO: 84804 - protein, 168 aa, Arabidopsis thaliana
  peptide (1)..(168): Ceres Seq. ID no. 12677101
MKARKDRGPASISLVSSQAGQVGVYGYAAYSASKFGLQGLAQALQQEVISDDIHVTLIFPPDTNTPGFEEEQKSRPEVTAIIAASSGSMETEEVAKKAMDGIKAGNFTVSCNFEGFLLSLATTGMSPQRSFWLAFLEVITAGPIRLIALFFQWDWYKAIEKWSKTKTK

SEQ ID NO: 84805 - DNA, 662 bp, Arabidopsis thaliana
  misc_feature (1)..(662): Ceres Seq. ID no. 12677114
  misc_feature (1)..(662): Ortholog of  Ceres SEQ ID NO 15173986 as cited in SEQ ID NO 1074
  misc_feature (1)..(662): Ortholog of  Ceres SEQ ID NO 13586102 as cited in SEQ ID NO 0
gaaacactatcgaacctcaaaatctctgttgccggaaattttcttcaccgaaactgaaagaagtcgaaagagagaagagaagaaattgaagcaatggagggagcagaggaagctggggctgagatagcggttgattcaaaggacttgcagcaacaaagcaaagctttcgacaagctcaccgatcgtgtcgaggatcgccagctcgattcctctcgtgttcaatcggctatggcttcgattgctgcttctagggaggctgatctgaatgctaagaggttgagggagaaagaactggcctctgtgaagatcaatcctgcagatgttgagtttattgtaaacgaacttgagatagaaaagaatgtggcggaaagaactctaagggagcacaaaggtgatgcggttgctgcgactaggcaattgctttcacgatatcctctatgatggagcaggaccattctttacttccaaggttttttgtatgtttgagaggttgagagcaagtctcctaatatttaaccgagttaaaattgtctattgctgaaccgatctctctgagaagccctgaatacagttacaatcgattctggggtggtgttttgtggttctacctgaagtttgaagttcaatcttattatcaagatataagaatgtgttcttcgttt

SEQ ID NO: 84806 - protein, 115 aa, Arabidopsis thaliana; identical to SEQ ID NO: 26995
  peptide (1)..(115): Ceres Seq. ID no. 12677115

SEQ ID NO: 84807 - protein, 70 aa, Arabidopsis thaliana; identical to SEQ ID NO: 26996
  peptide (1)..(70): Ceres Seq. ID no. 12677116

SEQ ID NO: 84808 - DNA, 918 bp, Arabidopsis thaliana
  misc_feature (1)..(918): Ceres Seq. ID no. 12677117
  misc_feature (1)..(918): Ortholog of  Ceres SEQ ID NO 14302082 as cited in SEQ ID NO 64529
aagaaatctttcagatttgcgcatatcgacaattttccgagcggccagtttacgtattttgtttgtagttaacgtgtttcaaggactttgacaatggctgaggaagcgcataaggtaacattgaatgtctatgatttaagccaaggcttggcacgccagctctcacaatcactcctgggaaaggttattgaaggtgtatggcatacaggaatagttgtctatgggaatgagtacttttttggaggagggatacaacatttaccagttggaagaactccatatggaacaccaattcgaacgatagagttgggtctatcacatgtgcctaaagatgtattcgagatgtacttggaagaaatcagtcctcgttacactgctgaatcctacaatttacttactcacaactgcaacaacttcagcaacgaggtcgctcagtttttggtgggtaaagggattcctgactacattctccagcttcctaatgatgttctaaacagtcccatgggtggtcttataatgcctatgttgcaaggcctcgaaacaactctaaaggctggtgctgttcctcaagttccacagtttaggccacagccacaaccttttggagcttttagtaaagatgatggcccacaaattgtgatagctcctaagctcgaggcagcagaaacctcaactgcaactgagaaagtgccacctgttattcaaccatcagctagtaaagagaaggtcaaggacgacccgttgggtgatgctagggccaagattcaggaagagattacaagcgaatttgcagctctaatggcacaaggcacattacgagcaagtgaagcagctgctatggcgacaaaaagagtcatgcaaaagtacggacatctcaatgtaaacgcttagtgcaataacagagagatgaaacatttt

SEQ ID NO: 84809 - protein, 265 aa, Arabidopsis thaliana; identical to SEQ ID NO: 38015
  peptide (1)..(265): Ceres Seq. ID no. 12677118

SEQ ID NO: 84810 - protein, 182 aa, Arabidopsis thaliana; identical to SEQ ID NO: 38016
  peptide (1)..(182): Ceres Seq. ID no. 12677119

SEQ ID NO: 84811 - DNA, 2589 bp, Arabidopsis thaliana
  misc_feature (1)..(2589): Ceres Seq. ID no. 12677120
  misc_feature (1)..(2589): Ortholog of  Ceres SEQ ID NO 13565116 as cited in SEQ ID NO 0
aattccgaaaattttgactcgcaaaatctcaacgaagctcgaaaatggattcacgaaccaaggggaagacggtgatggaagttggtggcgatggcgttgccgtcataacactcatcaatcctcccgtcaattctctatccttcgacgtgctatacaatctcaaaagtaattacgaggaggccttgagcaggaatgatgttaaagctattgttattactggtgcaaaggggaggttctctggtggctttgatatatctggttttggtgaaatgcagaaggggaatgtcaaagagccaaaggctggttacatttcgattgacatcataaccgacttgcttgaagctgctaggaaaccgtctgtcgctgccattgatggacttgccttgggaggaggattagaacttgctatggcttgtcatgctaggatatcagctcctgctgcacagttaggcttgcctgagctgcaacttggtgttattcctggttttggaggaacgcagcgtctcccgcgtcttgttggtctcaccaaagcccttgaaatgattttgacatctaagccagttaaagctgaggaaggtcattctttgggtcttattgatgctgtggtgccacctgcggagttagtaaccactgctcgtcgctgggcccttgacatagtcgggaggagaaaaccatgggtatctagtgtttccaagactgataagttacctcctcttggagaggcaagggagatactgacgtttgccaaggcacagacactcaagcgtgcccccaatatgaaacaccctttaatgtgccttgacgctattgaagtaggtattgtttctggtccaagggctggtttagaaaaggaagctgaagtcgcctcacaagtggtaaaactggataccaccaaaggcttgatccacgtcttcttttctcagcgaggaactgctaaggttcctggagttactgatcgtgggttggtgccaaggaagattaagaaggtagccataattggaggcgggttgatgggatctggaatagctactgcgttgatcctaagtaactatccagtgattctcaaggaggtaaatgagaaattcctggaggctggaattggcagagttaaagctaatctccagagccgtgtaaggaagggaagcatgtctcaggaaaagtttgagaaaaccatgtctctccttaagggttctcttgattatgaaagctttagagatgtggacatggtcattgaggtaaggatgaacataacaagctgaagtgttgtttttttattgggttacatgatctaagtgaattgatttcttatgatgtctttttggtggcttgaacaggctgttattgagaatatatctttgaagcaacaaatttttgctgatctggagaaatactgtcctcagcattgtatccttgctagcaacacatcgaccattgacttgaacaaaattggggagcggaccaagtctcaggatcgaattgttggagcacattttttcagtccagcacatatcatgccgctacttgaaatagttcggaccaatcatacctctgcccaagtaattgttgacctgttagatgttgggaagaagattaagaaaacaccagttgtggtgggaaactgcacagggtttgcagtgaataggatgttcttcccttacacacaggcagctatgttccttgttgagtgtggagcagatccatatctaatcgacagggcaatcagcaagtttggaatgccaatgggtcccttcagactgtgtgacctggttggatttggtgtggcgattgcaaccgcaacgcagtttatcgagaacttctcagaacggacttacaaatcaatgattattccacttatgcaagaggacaagagagctggtgaagccactcgcaaaggtttctatttgtatgatgataagcgcaaggcgaaacctgatcctgagctaaagaaatatatcgaaaaggcaagaagcatatctggagtaaagcttgaccctaagttggcgaatttgtcggagaaggacattattgaaatgacattcttcccagtagtaaacgaggcgtgtagggtttttgctgaaggtatcgctgtcaaagcagcagaccttgacattgctggcataatgggaatgggttttccaccttacagaggaggaatcatgttctgggctgattccatcggatcgaaatacatttactcgaggctggatgagtggtcgaaggcttatggtgaattcttcaagccttgtgcttttttggctgagaggggatctaaaggagttcttttgagcgctcccgtgaaacaagccagctcacggttgtaaggtcagcgtttcagtggaaccatttctccattggtgcatcttctgtgttttctttatgttcacattttacttagccgggaagtgggtatcttttggcctcagaagcttttaaataaagtctcatctcagacatatgaatctgggaggaagtagggattaagttgtagtagcaataagatttgttttatgttgtgctttgtcatacaacaaagttgtcagatacatttgttgttataaagctatatggagtaagttctatgatttaatg

SEQ ID NO: 84812 - protein, 404 aa, Arabidopsis thaliana
  peptide (1)..(404): Ceres Seq. ID no. 12677121
MDSRTKGKTVMEVGGDGVAVITLINPPVNSLSFDVLYNLKSNYEEALSRNDVKAIVITGAKGRFSGGFDISGFGEMQKGNVKEPKAGYISIDIITDLLEAARKPSVAAIDGLALGGGLELAMACHARISAPAAQLGLPELQLGVIPGFGGTQRLPRLVGLTKALEMILTSKPVKAEEGHSLGLIDAVVPPAELVTTARRWALDIVGRRKPWVSSVSKTDKLPPLGEAREILTFAKAQTLKRAPNMKHPLMCLDAIEVGIVSGPRAGLEKEAEVASQVVKLDTTKGLIHVFFSQRGTAKVPGVTDRGLVPRKIKKVAIIGGGLMGSGIATALILSNYPVILKEVNEKFLEAGIGRVKANLQSRVRKGSMSQEKFEKTMSLLKGSLDYESFRDVDMVIEVRMNITS

SEQ ID NO: 84813 - protein, 394 aa, Arabidopsis thaliana
  peptide (1)..(394): Ceres Seq. ID no. 12677122
MEVGGDGVAVITLINPPVNSLSFDVLYNLKSNYEEALSRNDVKAIVITGAKGRFSGGFDISGFGEMQKGNVKEPKAGYISIDIITDLLEAARKPSVAAIDGLALGGGLELAMACHARISAPAAQLGLPELQLGVIPGFGGTQRLPRLVGLTKALEMILTSKPVKAEEGHSLGLIDAVVPPAELVTTARRWALDIVGRRKPWVSSVSKTDKLPPLGEAREILTFAKAQTLKRAPNMKHPLMCLDAIEVGIVSGPRAGLEKEAEVASQVVKLDTTKGLIHVFFSQRGTAKVPGVTDRGLVPRKIKKVAIIGGGLMGSGIATALILSNYPVILKEVNEKFLEAGIGRVKANLQSRVRKGSMSQEKFEKTMSLLKGSLDYESFRDVDMVIEVRMNITS

SEQ ID NO: 84814 - protein, 337 aa, Arabidopsis thaliana
  peptide (1)..(337): Ceres Seq. ID no. 12677123
MMSFWWLEQAVIENISLKQQIFADLEKYCPQHCILASNTSTIDLNKIGERTKSQDRIVGAHFFSPAHIMPLLEIVRTNHTSAQVIVDLLDVGKKIKKTPVVVGNCTGFAVNRMFFPYTQAAMFLVECGADPYLIDRAISKFGMPMGPFRLCDLVGFGVAIATATQFIENFSERTYKSMIIPLMQEDKRAGEATRKGFYLYDDKRKAKPDPELKKYIEKARSISGVKLDPKLANLSEKDIIEMTFFPVVNEACRVFAEGIAVKAADLDIAGIMGMGFPPYRGGIMFWADSIGSKYIYSRLDEWSKAYGEFFKPCAFLAERGSKGVLLSAPVKQASSRL

SEQ ID NO: 84815 - DNA, 1157 bp, Arabidopsis thaliana
  misc_feature (1)..(1157): Ceres Seq. ID no. 12677140
  misc_feature (1)..(1157): Ortholog of  Ceres SEQ ID NO 14307004 as cited in SEQ ID NO 59551
  misc_feature (1)..(1157): Ortholog of  Ceres SEQ ID NO 12617197 as cited in SEQ ID NO 63406
  misc_feature (1)..(1157): Ortholog of  Ceres SEQ ID NO 13597804 as cited in SEQ ID NO 64182
  misc_feature (1)..(1157): Ortholog of  Ceres SEQ ID NO 13598565 as cited in SEQ ID NO 65250
  misc_feature (1)..(1157): Ortholog of  Ceres SEQ ID NO 13598597 as cited in SEQ ID NO 65496
  misc_feature (1)..(1157): Ortholog of  Ceres SEQ ID NO 13596284 as cited in SEQ ID NO 68273
  misc_feature (1)..(1157): Ortholog of  Ceres SEQ ID NO 13596227 as cited in SEQ ID NO 68750
  misc_feature (1)..(1157): Ortholog of  Ceres SEQ ID NO 15178902 as cited in SEQ ID NO 0
agagagacagagagagagaaagctcaaattcaatcatcaatgttaacggacgagagagaagtagtctgtgtcaccggcgccagtggctgcatcggctcgtggctggtccatcagctcctcctccgcggctactccgtccacgccaccgtgaaaaacctccaggatgagaaagagacgaaacatctagaaggtctcgaaggtgcagccacacgcctccatctattcgagatggatctcctacaatacgacaccgtttccgccgccatcaatggttgctccggcgtattccacctcgcatcaccttgtatcgtcgatgaagtccaagatccccagaagcaactacttgacccggcggttaaaggaaccataaatgttctgacggcggcaaaagaagccagtgttaagagagttgttgtgacgtcttcgatatcggcgattactccaagtcccaactggcctgctgataagatcaagaatgaggaatgttgggctgctgaagactactgcaggcaaaatggattgtggtatccactgtcgaagacgcttgctgagaaggcagcttgggaatttgcagaggagaaaggattggatgtggttgtggtgaatccaggcactgtcatggggcctgtgattcctccgtctcttaacgctagcatgcacatgcttctacgccttcttcaggggtgcacggagacatacgagaacttctttatggggtctgtgcatttcaaggatgtggctttagctcatattcttgtatacgaggatccatattcgaaaggaaggcacttgtgcgttgaggctatctctcactacggtgattttgtagccaaagttgctgagctctatcccaattacaatgtccccaagttaccgagagagactcaaccgggtttacttcgagataagaatgcatcaaagaagctcatagatttggggttaaagttcatttccatggaggaaatcatcaaggaaggtgtggagagtcttaaaagcaaaggatttatctcttaatacctacctctgtaactctgtttgattgagcaattaacacaatctctaggcagcagaaacatttcatatgatatacgattttgcacttttgtaataaataagctggcctatggtatggtatgaacatccaattaatatttatt

SEQ ID NO: 84816 - protein, 337 aa, Arabidopsis thaliana
  peptide (1)..(337): Ceres Seq. ID no. 12677141
RETEREKAQIQSSMLTDEREVVCVTGASGCIGSWLVHQLLLRGYSVHATVKNLQDEKETKHLEGLEGAATRLHLFEMDLLQYDTVSAAINGCSGVFHLASPCIVDEVQDPQKQLLDPAVKGTINVLTAAKEASVKRVVVTSSISAITPSPNWPADKIKNEECWAAEDYCRQNGLWYPLSKTLAEKAAWEFAEEKGLDVVVVNPGTVMGPVIPPSLNASMHMLLRLLQGCTETYENFFMGSVHFKDVALAHILVYEDPYSKGRHLCVEAISHYGDFVAKVAELYPNYNVPKLPRETQPGLLRDKNASKKLIDLGLKFISMEEIIKEGVESLKSKGFIS

SEQ ID NO: 84817 - protein, 324 aa, Arabidopsis thaliana; identical to SEQ ID NO: 21487
  peptide (1)..(324): Ceres Seq. ID no. 12677142

SEQ ID NO: 84818 - protein, 261 aa, Arabidopsis thaliana; identical to SEQ ID NO: 21488
  peptide (1)..(261): Ceres Seq. ID no. 12677143

SEQ ID NO: 84819 - DNA, 1150 bp, Arabidopsis thaliana
  misc_feature (1)..(1150): Ceres Seq. ID no. 12677164
  misc_feature (1)..(1150): Ortholog of  Ceres SEQ ID NO 14307004 as cited in SEQ ID NO 59551
  misc_feature (1)..(1150): Ortholog of  Ceres SEQ ID NO 12617197 as cited in SEQ ID NO 63406
  misc_feature (1)..(1150): Ortholog of  Ceres SEQ ID NO 13597804 as cited in SEQ ID NO 64182
  misc_feature (1)..(1150): Ortholog of  Ceres SEQ ID NO 13598565 as cited in SEQ ID NO 65250
  misc_feature (1)..(1150): Ortholog of  Ceres SEQ ID NO 13598597 as cited in SEQ ID NO 65496
  misc_feature (1)..(1150): Ortholog of  Ceres SEQ ID NO 13596284 as cited in SEQ ID NO 68273
  misc_feature (1)..(1150): Ortholog of  Ceres SEQ ID NO 13596227 as cited in SEQ ID NO 68750
  misc_feature (1)..(1150): Ortholog of  Ceres SEQ ID NO 15178902 as cited in SEQ ID NO 0
gaaacttagagagacagagagagagaaagctcaaattcaatcatcaatgttaacggacgagagagaagtagtctgtgtcaccggcgccagtggctgcatcggctcgtggctggtccatcagctcctcctccgcggctactccgtccacgccaccgtgaaaaacctccaggatgagaaagagacgaaacatctagaaggtctcgaaggtgcagccacacgcctccatctattcgagatggatctcctacaatacgacaccgtttccgccgccatcaatggttgctccggcgtattccacctcgcatcaccttgtatcgtcgatgaagtccaagatccccagaagcaactacttgacccggcggttaaaggaaccataaatgttctgacggcggcaaaagaagccagtgttaagagagttgttgtgacgtcttcgatatcggcgattactccaagtcccaactggcctgctgataagatcaagaatgaggaatgttgggctgctgaagactactgcaggcaaaatggattgtggtatccactgtcgaagacgcttgctgagaaggcagcttgggaatttgcagaggagaaaggattggatgtggttgtggtgaatccaggcactgtcatggggcctgtgattcctccgtctcttaacgctagcatgcacatgcttctacgccttcttcaggggtgcacggagacatacgagaacttctttatggggtctgtgcatttcaaggatgtggctttagctcatattcttgtatacgaggatccatattcgaaaggaaggcacttgtgcgttgaggctatctctcactacggtgattttgtagccaaagttgctgagctctatcccaattacaatgtccccaagttaccgagagagactcaaccgggtttacttcgagataagaatgcatcaaagaagctcatagatttggggttaaagttcatttccatggaggaaatcatcaaggaaggtgtggagagtcttaaaagcaaaggatttatctcttaatacctacctctgtaactctgtttgattgagcaattaacacaatctctaggcagcagaaacatttcatatgatatacgattttgcacttttgtaataaataagctggcctatggtatggtatgaacatcc

SEQ ID NO: 84820 - protein, 339 aa, Arabidopsis thaliana; identical to SEQ ID NO: 21486
  peptide (1)..(339): Ceres Seq. ID no. 12677165

SEQ ID NO: 84821 - protein, 324 aa, Arabidopsis thaliana; identical to SEQ ID NO: 21487
  peptide (1)..(324): Ceres Seq. ID no. 12677166

SEQ ID NO: 84822 - protein, 261 aa, Arabidopsis thaliana; identical to SEQ ID NO: 21488
  peptide (1)..(261): Ceres Seq. ID no. 12677167

SEQ ID NO: 84823 - DNA, 2616 bp, Arabidopsis thaliana
  misc_feature (1)..(2616): Ceres Seq. ID no. 12677182
  misc_feature (1)..(2616): Ortholog of  Ceres SEQ ID NO 14307817 as cited in SEQ ID NO 54722
gaaactttattgagtatttgtctatttgagtttctctcatcttcttttgttttgcttcacatcgttcacatcaattagtttctatcagctccagcaaatggttagtgtgttcatcagctaaaatcattaaggattgcgttacttcttcttcaggaaggactagaaatgagaaagagttgattactccatattgagtgtgaagatgacgaggtggtctatgtctatgcactgcacattgttcttgctatttctgttgaggctcacttgtatattctcagattccgattatttgatgggtcttggaagctatgacatcacaggacctgcagctgatgttaacatgatgggttatgctaacatggaacaagtagcatctggtgttcacttcaggctcagagctcgtgcgttcatcgtggctgagccatacaagaaaaggattgcttttgttaatcttgatgctggtatggcctcacagcttgtgaccatcaaagtgattgaaagattgaaacagaggtacggtgagctttatacggaggaaaatgttgcaattagtggaactcatactcatgctggtccagggggttatctccaatacattttgtacttagttacatctctcgggtttgttcatcaatctttcaatgctcttgtggacggtatagagcaaagtattatacaagctcatgaaaatcttcgtcccgggtccattttaatcaacaaaggggagctcttggatgctggtgtgaaccgtagtcccagtgcttaccttaacaatccggcacatgaacgtagtaaatatgaatatgatgtagataaagagatgacacttgtcaaattcgttgatgatcaatggggtccagtgggtagtttcaattggtttgcaactcatggcacttcgatgagccgtacaaatgccttgaatcagcggggacaataaaggcactgcagcacgtatcatggaagactggtttgaacgagaaaacggttgtagatcagttgatgttgaatctcctagaagagtctcaagcataatcagtgatccttatgatcaagatttgatggaaatggcatcctcgttactgtctaccggcggtaaaaccgttacaaggatgtcaagcgttgctagacgggtcagaagtagatttagacacgctgacaaacctagatttgtctctgccttctgtcaaactaactgcggtgatgttagtccgaatgtgttgggagccttctgtatagacacaggccttccttgtgaattcaaccaaagtacttgtggtggaaagaatgagcaatgctacggccgtggaccaggctaccctgatgaatttgagagtacccgcattattggagagaggcagttcaagaaggctgcggatcttttcactaaagcctctgaggagatacaaggaaaagttgactatcgtcatgcatatgttgatttctctcagcttgaagtgacgattaatggacaaaatggaggttccgaagtggtgaaaacatgtccagctgcaatgggttttggtttcgctgcaggaacaactgatggacctggagcatttgactttaaacaaggagatgatcaggtaaaacccaaattctccttctaacttggtaatgaaagatgtttagtactatactttatgttgtgactttgtgtaagggaaatcctttctggaggcttgtaaggaaccttctcaagaatccaactgaggaacaagtacgatgccaacgacctaaacccatattgcttgataccggtgaaatgaaacaaccatacgactgggcgccgtcgatattaccagttcagatcctccgcattggccagctagtgattctctgcgtccccggagaattcacaacaatggcagggaggcgactacgtgatgccgtgaaaacagtgcttaaagaaggcagcaatggaagagaattcagcgtggtaatagccgggctaaccaattcgtattcgcagtatattgccacatttgaggaataccaagttcagagatatgagggtgcatcgactttgtatggacctcacacgctaagcggatacattcaagaattcaagaaactagcaaatgatcttctatctgctcaaaccactgacccgggtccccaaccacctgacttacttcacaagcaaataagcttactaacacctgttgttgcggatatgacaccaattggaactgcattcggagatgttacatcggatgttcctcggttatccaaattcaggaagggagctgacatagtgagggttcaattccggtcagctaacccgagaaacgatctgatgacggaaggaactttcgcgcttgttgagaggtggctcgaaggaagagagacatgggtacctgtttatgatgatgatgacttttgcctccggtttaagtggtcaagaccgtttaaactcagcacgcagagcacagcaactatcgaatggagaatccctgaaaccgcatcacctggtgtttatagaatcactcactttggttcagctaaaactcctataagctccattcaccatttctctggttcatctagtgcctttgttgtatattgaaatgtacacgtgaatagtctttatacgtatccctagcaacaccatccagt

SEQ ID NO: 84824 - protein, 314 aa, Arabidopsis thaliana
  peptide (1)..(314): Ceres Seq. ID no. 12677183
MFSTILYVVTLCKGNPFWRLVRNLLKNPTEEQVRCQRPKPILLDTGEMKQPYDWAPSILPVQILRIGQLVILCVPGEFTTMAGRRLRDAVKTVLKEGSNGREFSVVIAGLTNSYSQYIATFEEYQVQRYEGASTLYGPHTLSGYIQEFKKLANDLLSAQTTDPGPQPPDLLHKQISLLTPVVADMTPIGTAFGDVTSDVPRLSKFRKGADIVRVQFRSANPRNDLMTEGTFALVERWLEGRETWVPVYDDDDFCLRFKWSRPFKLSTQSTATIEWRIPETASPGVYRITHFGSAKTPISSIHHFSGSSSAFVVY

SEQ ID NO: 84825 - protein, 267 aa, Arabidopsis thaliana
  peptide (1)..(267): Ceres Seq. ID no. 12677184
MKQPYDWAPSILPVQILRIGQLVILCVPGEFTTMAGRRLRDAVKTVLKEGSNGREFSVVIAGLTNSYSQYIATFEEYQVQRYEGASTLYGPHTLSGYIQEFKKLANDLLSAQTTDPGPQPPDLLHKQISLLTPVVADMTPIGTAFGDVTSDVPRLSKFRKGADIVRVQFRSANPRNDLMTEGTFALVERWLEGRETWVPVYDDDDFCLRFKWSRPFKLSTQSTATIEWRIPETASPGVYRITHFGSAKTPISSIHHFSGSSSAFVVY

SEQ ID NO: 84826 - protein, 244 aa, Arabidopsis thaliana
  peptide (1)..(244): Ceres Seq. ID no. 12677185
MTRWSMSMHCTLFLLFLLRLTCIFSDSDYLMGLGSYDITGPAADVNMMGYANMEQVASGVHFRLRARAFIVAEPYKKRIAFVNLDAGMASQLVTIKVIERLKQRYGELYTEENVAISGTHTHAGPGGYLQYILYLVTSLGFVHQSFNALVDGIEQSIIQAHENLRPGSILINKGELLDAGVNRSPSAYLNNPAHERSKYEYDVDKEMTLVKFVDDQWGPVGSFNWFATHGTSMSRTNALNQRGQ

SEQ ID NO: 84827 - DNA, 1386 bp, Arabidopsis thaliana
  misc_feature (1)..(1386): Ceres Seq. ID no. 12677204
  misc_feature (1)..(1386): Ortholog of  Ceres SEQ ID NO 13654468 as cited in SEQ ID NO 68094
acgttctcagagttagttacacagctttcaacgatgaatcagctcgcgctttcaagatccggttacaccgccgccgtgaggtttctccctatgctttccgcagctgttccgaagatcttatcatctctcgccgccgcatccaccgtccgcaacttcagctctaccggaagtcctctcaccagctaccaaatcaataaaccttcgccgtcaaaatccttcacttccaggcttctccaccaatcctcctccgccggtactcctccgcaacaacttttcggcgcccgtagcttctcatctcccagcagtgatttcaacagctaccacattaatccgccgtctaactggggaatccgaatcgtgccggagaggaaagcttgtgtgattgagcggtttggtaaattccacacgactttgccggcggggattcacttccttgttccgtttgtggatcgtatcgcttatgttcattctctaaaggaagaagcgattcctattggtaatcagactgcgattacaaaggataacgttagcatccacatcgatggtgttctctacgttaagattgtggatcctaagttggcttcttatggcgttgagaatccgatctatgctgttatgcagttggctcagactacaatgcgtagtgagctcggtaaaattactcttgacaagacttttgaggaacgggacactctcaatgagaagattgtggaagccatcaatgttgctgcaaaagattggggtcttcagtgccttcgttatgagatcagggatatcatgcctcctaatggagtgagagttgctatggaaatgcaagctgaagctgaacgtaaaaagagagcccagattcttgagtctgaaggagaacgtcaagcccatatcaatagagctgatggtaagaaaagttctgtaatcttggaatcagaagctgcaatgatggaccaagtcaatcgtgcacaaggtgaggctgaagcaatattagctagagcacaagcaacagccaagggactggccatggtatctcaatccctcaaggaagctggtggagaggaggctgcgagtttgagagttgcggagcaatacattcaagcttttggcaaaattgctaaggagggtacaacaatgctgcttccgagtaatgtcgacaatcctgctagcatgatcgctcaagctttaggaatgtacaaagggttgtcaacaaaggtcccaacagtggtttcagggaaacttctggagtagaatcctctactaacgtggttgttgccaaacttgaatagaagctataatgtagctgaacctagggaacaactattcttttgatttgtccaggctttttagccattttcagtttgtttatttcttcatatgagaaacagttatcttacc

SEQ ID NO: 84828 - protein, 412 aa, Arabidopsis thaliana
  peptide (1)..(412): Ceres Seq. ID no. 12677205
TFSELVTQLSTMNQLALSRSGYTAAVRFLPMLSAAVPKILSSLAAASTVRNFSSTGSPLTSYQINKPSPSKSFTSRLLHQSSSAGTPPQQLFGARSFSSPSSDFNSYHINPPSNWGIRIVPERKACVIERFGKFHTTLPAGIHFLVPFVDRIAYVHSLKEEAIPIGNQTAITKDNVSIHIDGVLYVKIVDPKLASYGVENPIYAVMQLAQTTMRSELGKITLDKTFEERDTLNEKIVEAINVAAKDWGLQCLRYEIRDIMPPNGVRVAMEMQAEAERKKRAQILESEGERQAHINRADGKKSSVILESEAAMMDQVNRAQGEAEAILARAQATAKGLAMVSQSLKEAGGEEAASLRVAEQYIQAFGKIAKEGTTMLLPSNVDNPASMIAQALGMYKGLSTKVPTVVSGKLLE

SEQ ID NO: 84829 - protein, 401 aa, Arabidopsis thaliana; identical to SEQ ID NO: 43480
  peptide (1)..(401): Ceres Seq. ID no. 12677206

SEQ ID NO: 84830 - protein, 382 aa, Arabidopsis thaliana; identical to SEQ ID NO: 43481
  peptide (1)..(382): Ceres Seq. ID no. 12677207

SEQ ID NO: 84831 - DNA, 2067 bp, Arabidopsis thaliana
  misc_feature (1)..(2067): Ceres Seq. ID no. 12677246
  misc_feature (1)..(2067): Ortholog of  Ceres SEQ ID NO 13598582 as cited in SEQ ID NO 65294
  misc_feature (1)..(2067): Ortholog of  Ceres SEQ ID NO 15176114 as cited in SEQ ID NO 67627
  misc_feature (1)..(2067): Ortholog of  Ceres SEQ ID NO 15176145 as cited in SEQ ID NO 0
atgaacaaaaacatcctctgtttctctcttttcatatttttctccacatttcctcatctgggtcatctccaaaaatgatttgatgataacccaaattcgcaatttgattaggacaacaacaacaactttatttatctgattccgtctttgattttcagacaagaaaaaaaaaaaaaagatggaatcggatctggggaagctcttcattggtgggatttcgtgggatacagacgaagaaaggttaagagactactttagcaactatggtgatgttgttgaagctgtgatcatgagagatcgtgccacaggtcgtgcacgtggcttcggcttcattgtctttgcagacccctgtgtctcagagagagtgatcatggataaacacatcatcgatggccgcacggttgaggcgaagaaggctgtgcctcgagatgatcagcaggtgctaaagcgacacgctagtcctatccaccttatgtcacctgtccatggtggtggtggaaggacaaagaagatcttcgttggaggtttaccgtctagcattaccgaggaggagttcaagaactactttgatcagtttggtactattgctgatgttgttgtaatgtatgatcataacacgcagaggccaagaggttttggcttcatcacatttgattcagatgatgctgttgatagagttcttcacaagaccttccatgagctcaatgggaaactagttgaggtcaaaagagctgtacctaaggagatttcccctgtttctaatatccgaagcccgcttgctagcggtgttaactatggaggcgggtctaataggatgcctgctaatagctactttaacaactttgctcctggtcctggtttttataacagtctaggtcctgttggtcgtcggtttagtcctgttattggtagtggtagaaatgcggtttctgcttttggcctcggtttgaatcatgacttgagtttgaatttgaatccaagctgcgatgggacaagttctacgtttggttataaccgtattccaagcaacccttacttcaacggtgcttccccgaaccgttacacctctccaatcgggcacaatagaactgagtctccttacaattcgaacaatagagacttatggggaaacagaaccgacactgcaggtcccggttggaacttgaatgtctcgaatggaaacaacagaggaaattggggacttccttcttcttctgctgttagtaatgataacaatggctttggaaggaactatgggacaagttctggactttcctcgtccccatttaatggttttgaaggttctataggggaactgtacagaggcggctcagtctacagcgactcaacgtggcagcaacagcagctaccatctcagtcttctcacgagctagacaatttgtctcgcgcttacggttatgatattgacaatgtaggttcagacccatctgcaaatgacccagaaacttacaatggaagctacaatgttggaaatagacaaactaatagaggtattgctgcataggttatcaaaaaccaagaaaacaaaaaaaaaagttgagagatttgtagattgaaagcaaccaaatttcagttgcagagtttgaacaggttctcatgacaaagaaaccaactttgttgatcacagtgccaaagattatggtttgctttctcttttgttagaccaaaaaaaaaaaaaaaaaagagaaaaacaaagaaccgtttttgtttttcttcttcttacataaagatcagatcgtagcagccagacaaccaaagatactacaaggtggatttagatttgcttctcaaaaaagtttttttttttctttcatagaataaccaaacaaagatcgtagaattttcgatcaaagattcttcagagttctgtgctctgttttgtaattgtactttttttttcttgtttacaaaatgaattgttcatgaaaactttgttttcttaaaaaaaaaattagcgtgggagaaatattgtgtaagagagggatatgactattttgttgcatgtatccctaatgagatatatatatatatatatttttttaaagc

SEQ ID NO: 84832 - protein, 448 aa, Arabidopsis thaliana
  peptide (1)..(448): Ceres Seq. ID no. 12677247
MESDLGKLFIGGISWDTDEERLRDYFSNYGDVVEAVIMRDRATGRARGFGFIVFADPCVSERVIMDKHIIDGRTVEAKKAVPRDDQQVLKRHASPIHLMSPVHGGGGRTKKIFVGGLPSSITEEEFKNYFDQFGTIADVVVMYDHNTQRPRGFGFITFDSDDAVDRVLHKTFHELNGKLVEVKRAVPKEISPVSNIRSPLASGVNYGGGSNRMPANSYFNNFAPGPGFYNSLGPVGRRFSPVIGSGRNAVSAFGLGLNHDLSLNLNPSCDGTSSTFGYNRIPSNPYFNGASPNRYTSPIGHNRTESPYNSNNRDLWGNRTDTAGPGWNLNVSNGNNRGNWGLPSSSAVSNDNNGFGRNYGTSSGLSSSPFNGFEGSIGELYRGGSVYSDSTWQQQQLPSQSSHELDNLSRAYGYDIDNVGSDPSANDPETYNGSYNVGNRQTNRGIAA

SEQ ID NO: 84833 - protein, 411 aa, Arabidopsis thaliana
  peptide (1)..(411): Ceres Seq. ID no. 12677248
MRDRATGRARGFGFIVFADPCVSERVIMDKHIIDGRTVEAKKAVPRDDQQVLKRHASPIHLMSPVHGGGGRTKKIFVGGLPSSITEEEFKNYFDQFGTIADVVVMYDHNTQRPRGFGFITFDSDDAVDRVLHKTFHELNGKLVEVKRAVPKEISPVSNIRSPLASGVNYGGGSNRMPANSYFNNFAPGPGFYNSLGPVGRRFSPVIGSGRNAVSAFGLGLNHDLSLNLNPSCDGTSSTFGYNRIPSNPYFNGASPNRYTSPIGHNRTESPYNSNNRDLWGNRTDTAGPGWNLNVSNGNNRGNWGLPSSSAVSNDNNGFGRNYGTSSGLSSSPFNGFEGSIGELYRGGSVYSDSTWQQQQLPSQSSHELDNLSRAYGYDIDNVGSDPSANDPETYNGSYNVGNRQTNRGIAA

SEQ ID NO: 84834 - protein, 384 aa, Arabidopsis thaliana
  peptide (1)..(384): Ceres Seq. ID no. 12677249
MDKHIIDGRTVEAKKAVPRDDQQVLKRHASPIHLMSPVHGGGGRTKKIFVGGLPSSITEEEFKNYFDQFGTIADVVVMYDHNTQRPRGFGFITFDSDDAVDRVLHKTFHELNGKLVEVKRAVPKEISPVSNIRSPLASGVNYGGGSNRMPANSYFNNFAPGPGFYNSLGPVGRRFSPVIGSGRNAVSAFGLGLNHDLSLNLNPSCDGTSSTFGYNRIPSNPYFNGASPNRYTSPIGHNRTESPYNSNNRDLWGNRTDTAGPGWNLNVSNGNNRGNWGLPSSSAVSNDNNGFGRNYGTSSGLSSSPFNGFEGSIGELYRGGSVYSDSTWQQQQLPSQSSHELDNLSRAYGYDIDNVGSDPSANDPETYNGSYNVGNRQTNRGIAA

SEQ ID NO: 84835 - DNA, 1651 bp, Arabidopsis thaliana
  misc_feature (1)..(1651): Ceres Seq. ID no. 12677250
  misc_feature (1)..(1651): Ortholog of  Ceres SEQ ID NO 13598582 as cited in SEQ ID NO 65294
  misc_feature (1)..(1651): Ortholog of  Ceres SEQ ID NO 15176114 as cited in SEQ ID NO 67627
atatttttctccacatttcctcatctgggtcatctccaaaaatgatttgatgataacccaaattcgcaatttgattaggacaacaacaacaactttatttatctgattccgtctttgattttcagacaagaaaagaaaaaaaaaagatggaatcggatctggggaagctcttcattggtgggatttcgtgggatacagacgaagaaaggttaagagactactttagcaactatggtgatgttgttgaagctgtgatcatgagagatcgtgccacaggtcgtgcacgtggcttcggcttcattgtctttgcagacccctgtgtctcagagagagtgatcatggataaacacatcatcgatggccgcacggttgaggcgaagaaggctgtgcctcgagatgatcagcaggtgctaaagcgacacgctagtcctatccaccttatgtcacctgtccatggtggtggtggaaggacaaagaagatcttcgttggaggtttaccgtctagcattaccgaggaggagttcaagaactactttgatcagtttggtactattgctgatgttgttgtaatgtatgatcataacacgcagaggccaagaggttttggcttcatcacatttgattcagatgatgctgttgatagagttcttcacaagaccttccatgagctcaatgggaaactagttgaggtcaaaagagctgtacctaaggagatttcccctgtttctaatatccgaagcccgcttgctagcggtgttaactatggaggcgggtctaataggatgcctgctaatagctactttaacaactttgctcctggtcctggtttttataacagtctaggtcctgttggtcgtcggtttagtcctgttattggtagtggtagaaatgcggtttctgcttttggcctcggtttgaatcatgacttgagtttgaatttgaatccaagctgcgatgggacaagttctacgtttggttataaccgtattccaagcaacccttacttcaacggtgcttccccgaaccgttacacctctccaatcgggcacaatagaactgagtctccttacaattcgaacaatagagacttatggggaaacagaaccgacactgcaggtcccggttggaacttgaatgtctcgaatggaaacaacagaggaaattggggacttccttcttcttctgctgttagtaatgataacaatggctttggaaggaactatgggacaagttctggactttcctcgtccccatttaatggttttgaaggttctataggggaactgtacagaggcggctcagtctacagcgactcaacgtggcagcaacagcagctaccatctcagtcttctcacgagctagacaatttgtctcgcgcttacggttatgatattgacaatgtaggttcagacccatctgcaaatgacccagaaacttacaatggaagctacaatgttggaaatagacaaactaatagaggtattgctgcataggttatcaaaaaccaagaaaacaaaaaaaaaagttgagagatttgtagattgaaagcaaccaaatttcagttgcagagtttgaacaggttctcatgacaaagaaaccaactttgttgatcacagtgccaaagattatggtttgctttctcttttgttag

SEQ ID NO: 84836 - protein, 448 aa, Arabidopsis thaliana; identical to SEQ ID NO: 84832
  peptide (1)..(448): Ceres Seq. ID no. 12677251

SEQ ID NO: 84837 - protein, 411 aa, Arabidopsis thaliana; identical to SEQ ID NO: 84833
  peptide (1)..(411): Ceres Seq. ID no. 12677252

SEQ ID NO: 84838 - protein, 384 aa, Arabidopsis thaliana; identical to SEQ ID NO: 84834
  peptide (1)..(384): Ceres Seq. ID no. 12677253

SEQ ID NO: 84839 - DNA, 1395 bp, Arabidopsis thaliana
  misc_feature (1)..(1395): Ceres Seq. ID no. 12677258
  misc_feature (1)..(1395): Ortholog of  Ceres SEQ ID NO 14315874 as cited in SEQ ID NO 59983
  misc_feature (1)..(1395): Ortholog of  Ceres SEQ ID NO 13589000 as cited in SEQ ID NO 60876
  misc_feature (1)..(1395): Ortholog of  Ceres SEQ ID NO 14302787 as cited in SEQ ID NO 65398
gttgcgaagaccagactctcagactcagactcgggagatggcagtccactactggacagccctgtttctattgttgccatgccttttctgtatttcaaatgctagtgctggcgatgctgatccagattacagaatgtgagataagcggttgtgttggacaactttgctttcctcagtgcaattcttcatccgatggtggtccatggtacatccaagaacctttgtatttacaatggaaaaaatggggttgtcaaggtgattgccgttatcaatgtatggttaatagagagactgaacgggaaactctcggtcaagccccagtcaagtaccatggtaaatggcccttcaagcgtgtacttgggattcaggagcctgcttctgttgctttctctgtactcaacctagcaatgcatttccatggttggctttcctttttcatcatgatctactataagttgcctctgaaacaagataggacagcgtactatgaatacgttggtttgtggcatatctacggtctcctgtccatgaactcttggttctggagtgctgttttccacagccggtaaatcatctacacattactctattatccacaatctgcatcatatattcatatgtgattttctggtaatccgtctctgtggttctcagggatgttgaccttacagagaggttggactactcatccgcagtagcgattctcggattctcactcatcttagccattttacgaacatttgatattcgggttgaggctgcaagggtcatggtatccgctccaatactagcttttgtaaccacccacatactctacataaacttctacaaactcgactatggctggaacatgattgtgtgtgtggcaatgggagtctcacagcttttcctatgggcaagatgggccgctgtctcaagccacccttctaattggaaactttgggtggttgtgatagctggaggattagccatgcttctagagatatatgattttcctccatatgaaggctacttcgatgctcactcgatctggcacgctgccacaattcccttaaccattctctggtggagcttcattagagacgatgctgagttcagaacttccagcctcctcaagaaaactaagacgaaggcaaagtgagtctctttgctaagttttacaaggatttttatccgaccatacgagtatgcagacacgagggaaaaacaaaagatggaaatggatttaaacatcacgaagaaggcagagtcttttgtttaaagctagctggtttatggattcacaggtttcttcagttttttttattttatattgttacattaactgttgaatttgctttgagcctttcagtgtttttctttggccttacttttggttaagaaagattttgatat

SEQ ID NO: 84840 - protein, 188 aa, Arabidopsis thaliana
  peptide (1)..(188): Ceres Seq. ID no. 12677259
CEDQTLRLRLGRWQSTTGQPCFYCCHAFSVFQMLVLAMLIQITECEISGCVGQLCFPQCNSSSDGGPWYIQEPLYLQWKKWGCQGDCRYQCMVNRETERETLGQAPVKYHGKWPFKRVLGIQEPASVAFSVLNLAMHFHGWLSFFIMIYYKLPLKQDRTAYYEYVGLWHIYGLLSMNSWFWSAVFHSR

SEQ ID NO: 84841 - protein, 156 aa, Arabidopsis thaliana
  peptide (1)..(156): Ceres Seq. ID no. 12677260
MLVLAMLIQITECEISGCVGQLCFPQCNSSSDGGPWYIQEPLYLQWKKWGCQGDCRYQCMVNRETERETLGQAPVKYHGKWPFKRVLGIQEPASVAFSVLNLAMHFHGWLSFFIMIYYKLPLKQDRTAYYEYVGLWHIYGLLSMNSWFWSAVFHSR

SEQ ID NO: 84842 - protein, 151 aa, Arabidopsis thaliana
  peptide (1)..(151): Ceres Seq. ID no. 12677261
MLIQITECEISGCVGQLCFPQCNSSSDGGPWYIQEPLYLQWKKWGCQGDCRYQCMVNRETERETLGQAPVKYHGKWPFKRVLGIQEPASVAFSVLNLAMHFHGWLSFFIMIYYKLPLKQDRTAYYEYVGLWHIYGLLSMNSWFWSAVFHSR

SEQ ID NO: 84843 - DNA, 1278 bp, Arabidopsis thaliana
  misc_feature (1)..(1278): Ceres Seq. ID no. 12677262
  misc_feature (1)..(1278): Ortholog of  Ceres SEQ ID NO 12784228 as cited in SEQ ID NO 66111
gagaatctggaagtagcaaaatttggcggctttaactcagcaatttgttctgtacatggtattttgagaagagagcattcagctcacagttacgctctgcctatccagcttctaaatctactcactttggtcgagtcatggcttcttctggatctgaggcaaaagctaattacgcacccatatctaccaatgaacctgttgtgtctgttgattggctccactctaatcttggagatgctgatataaaggttttggatgcctcatggtacatggcacatgagcaaagaaatccaatccaagagtatcaagttgctcatattccaggtgctctcttctttgatttgaatggaatagcagatcgaaaaacaaatttacgacacatgctaccatctgaggaagcttttgctgctggttgttctgctcttggaatcgagaacaacgatggagtggttgtgtatgatggaatggggctctttagtgcagctcgtgtatggtggatgtttagagtctttggacatgacaaagtatgggtacttgatggaggcttgccgaaatggcgtgcttcaggctatgacgttgaatccagtgtttcaaatgatgccattttgaaagccagtgcagcaactgaggctatagagaagatctatcaaggacaaacaattagcccaataacttttcagacgaagttccggccacatcttgtattggcacttgatcaggtgaaggaaaacatcgaggataagacttatcagcacatcgatgcgcgttcaaaggctagatttgacggtattgctccagaaccttggaagggtttaccgagtggtcatatacccggtagcaagtgtgtcccttttcccctaatgtttgattcctctcaaacactgttaccagcagaggagctgaagaagcagtttgaacaggaagacatatctctggacagtccgattgcggcctcatgtggaaccggtgtaacagcttgtattttggcattgggactttatcgtctgggaaaaactaatgtggcaatctatgatgggtcttggactgaatgggcaactgcaccaaacttgcccatagtgggttcttcttcataagaaagtccaagaaaaagctacaagatcacaagccagtggatatatatttataagcttagcttggttcaatccatttctgtgttaaactttaacaaattgctgggagggttgtattagtattatacatcagtattcaggattcttgagtttggtctcatctttgtggagattgattaaaagtctt

SEQ ID NO: 84844 - protein, 318 aa, Arabidopsis thaliana; identical to SEQ ID NO: 24974
  peptide (1)..(318): Ceres Seq. ID no. 12677263

SEQ ID NO: 84845 - protein, 274 aa, Arabidopsis thaliana; identical to SEQ ID NO: 24975
  peptide (1)..(274): Ceres Seq. ID no. 12677264

SEQ ID NO: 84846 - protein, 237 aa, Arabidopsis thaliana; identical to SEQ ID NO: 24976
  peptide (1)..(237): Ceres Seq. ID no. 12677265

SEQ ID NO: 84847 - DNA, 1195 bp, Arabidopsis thaliana
  misc_feature (1)..(1195): Ceres Seq. ID no. 12677269
  misc_feature (1)..(1195): Ortholog of  Ceres SEQ ID NO 13623012 as cited in SEQ ID NO 994
  misc_feature (1)..(1195): Ortholog of  Ceres SEQ ID NO 15179471 as cited in SEQ ID NO 0
agcattatccaaaactcaaaattacagcgttgaaacagaaaccgatctcgtcgctgattctcttttcttcggatccttctagataatggctcgatctttctctcgttcactttctctatccaaaggccgtttcgccgccgcgtcatcctctctcctcccttcgtcgcaccttgtttcattccgatctcaatcttccgatcgtcggggagatctgtacgagattgatacctccgcggcttctcaatcgccgtcggatcctttaatacagaagctagaagacgccgttcaccggatttttgtgcgccgagctcagcctgattggctcccttttgttcctggtgcgtcttattgggtccctcctcctggatctggatctcagtctcatggaatcgctcagctcgttgtgaaactcgcgaatccgttaacacacgaagaatctttatctaccaattcttctcatggatggccttcctccgattatttccttaaaggttcttattggtcattctctctctggttttttatggataaagcttggattggaatcttcaatatgttactcatgctttagctaccaactaaattgattttgaaattgatcaaatttttgttgaatgtaagcattcatatgatttaactagtggcaggtttttgatatgttgataatgctatgtcaatcgtaaagttagtcattgctcgatgctgttacaggttctgaatgggagatcattaatatgtgattaacatttttgagaatctttaatcatataggcagtactagcgtctttggtggaacaggttcttaactagttgtggtgtatgagaattgtttgattgttggtcattcgttgacatatggtttttgtttattgggtttaggtgttcaacctcaattgatggagaccaagaccgagacaacttcaaattccgagtctcactctgaggacgaggaagtgtaaaaatgacactgcttgtttggcttgcaggctcttcaggatctcttgtcaagaccaagagctgccgaattcggacaaccaagagcaagtgaaaagacgtgaaatagaacgaccatatttctatacctgataccaaaatgtggaatatcgaataagactagtgttgtaggcttgtgtagcatgtcccgctgtttctcttttaaacagttgttgtatatatatatctctgtttccttgct

SEQ ID NO: 84848 - protein, 161 aa, Arabidopsis thaliana
  peptide (1)..(161): Ceres Seq. ID no. 12677270
MARSFSRSLSLSKGRFAAASSSLLPSSHLVSFRSQSSDRRGDLYEIDTSAASQSPSDPLIQKLEDAVHRIFVRRAQPDWLPFVPGASYWVPPPGSGSQSHGIAQLVVKLANPLTHEESLSTNSSHGWPSSDYFLKGSYWSFSLWFFMDKAWIGIFNMLLML

SEQ ID NO: 84849 - DNA, 2830 bp, Arabidopsis thaliana
  misc_feature (1)..(2830): Ceres Seq. ID no. 12677305
  misc_feature (1)..(2830): Ortholog of  Ceres SEQ ID NO 14310729 as cited in SEQ ID NO 53317
aaaaatgttaatcttaggacaaaaaatatttggttggaagttggaattgaggttccagagatgaatgatggctaatcccagagtttctcttcctctcttatttttgacttgtccttgttcttctacactgacatgaacaacttcaacgcctcgaatctttctcctccttttgcttccttctctcaccacatttcctcgccaccagaggacggtttcagagcttccgggagatgttttcgtttgtgggtttcgtggtgttcctctctggatttttcctgggaattctcgccgtcttatccgctgaagctgcgggatttatgtatctcctgaagcgattgaatcgcaagagagatcgtattgagtcaaaacccgtctctgatccatctatcaaggattttaatcctcgcgaatccatcgatttctgtatcaacaaacagggagtggtatggattttggaattggatgaaggtctgaagaactggatgaaggaaaagttaccaaaagagcagaagaggaagagaggcttattggagattcatccacttcgaaagttcgctcgaatcaaagatcacaagcttatcttgtcagatgctgatagcactcagagtgagactaccgtttctttaataggttgcagtattgaggctgtttcaggctctgatctccctacaagaaaatgggccaaaaggtttccaataaaagttgaaagcaagatttctccagccttatacaagggaaaccaggtgttttacatctatctggagacttcttgggaaaaggaatcatggtgtaaagcccttcgtcttgcttcttgtgaaaatcaggaaaggtttatttggtactccaccaaattgaaagaagatttccgtaattatgtgacttctcttaatgttgcatatccttcatttatgaaaccatcacttggctttagttttgagacacttgacaaagggaacagaacggatggttcatcctcaaaggttcgcttgttcttgaagaaattttctagaaagcgatcaaatcgtgaagacaggaaaacctattcacatcatggaagtagctcagggaagtgctttccaggaaagaataatatgacagatgatactgatgtgcctattttttcacgttctgtgagccatagcagtcatatttctggggtcagtcatctttctggggtttcagatggagactctgaagaaaaggttgacatggatgaaggaacattagcgttgaacttgctcatttctaggctatttttcgatctcaaacggaaaacaggagtgaagaattcagtgcaagcacgaattcagcggttgttatctaacatgaggactccgagctacataggcgaactaatctgctccgatgttgacactggaaatctcccacctcatatacatgctacacgggttcttccaatggagatgagtggtgtgtgggcattcgaactagatattgaatactctggtgacgtggtgattgacgttgaaacacgggttgacatccgtgaggtggatctgcaacaaggcataaccgatacaaggttgcagccaaggtcttcaggggtagtcccgtcaaattttgctgaaggtgttgaagattttgaaaagcaattagtcttccctgtggaaactgttaatgcaggagaagtgaaaaatggtggagccaataaagcagatgaatccaagagctcaagaggtacgaaggcagctccaaatggtgtatccaggtggaagtctattcttaaaacaattgctgaacaagtttctcaggtgcctatctctttgtcaatacgggtgtcttctcttcgagggacactgcgggtacacatgaagccgcctccttctgatcaattatggtttggattcacgagcatgccggatatcgaattcgatctcgcatcttctgttggggaacacaaaatcaccaacagccatgttgcaatgttcttgatcaaccggtttaagacggcaatacgagaagcggtggttcttcccaactgtgaaagcctaacgattccttggatgattgctgaaaaagatgattgggttcaacgcaaagccgctccattcatgtggctgaatcaagaaaacgatcacaatacctcccatgcaacagaagcgagatctaaatctgacaagccaccgacttcgttctcatgtcttcaagctgagcaaatgcagagaactgcaaacgccacccagaagattatttctgaaatagggacattggcttcttcctcctgtgctcagtctgagcaagtgcagaaagcggccactgctttccagaaacagaatactgaagcagaagctattatgtctacgccattgtcaaactccacaactgtaacaatagagaatgataaatccttggaagaactgaaaactccactactggtacccagcagcagtaacaagcaggagacgaactcaagagggagtagcagagaggtttctgctgttcagtcaccatctaggtctgtagcttcaagcgaagaagatgattcaagggggaaaaaacagggaagaagagcaagaatgttggatcttgggaagaaaatgggggagaaattggaggagaagaggcgtcacatggaggagaagagtagacagattgttgaaaagatgagaggaccttcttaacatgagaaggaagaagcttttgcaggtttcagatgcaaaaactgatttatagaaacagaggaagttaggcattgttacatatgtacagagatgtgagagaaagccatagatgtccccatatttatccgatcattgaaaatctttattattctgtaagatatacaatacaagaaaacagattttggtgt

SEQ ID NO: 84850 - protein, 803 aa, Arabidopsis thaliana
  peptide (1)..(803): Ceres Seq. ID no. 12677306
MFSFVGFVVFLSGFFLGILAVLSAEAAGFMYLLKRLNRKRDRIESKPVSDPSIKDFNPRESIDFCINKQGVVWILELDEGLKNWMKEKLPKEQKRKRGLLEIHPLRKFARIKDHKLILSDADSTQSETTVSLIGCSIEAVSGSDLPTRKWAKRFPIKVESKISPALYKGNQVFYIYLETSWEKESWCKALRLASCENQERFIWYSTKLKEDFRNYVTSLNVAYPSFMKPSLGFSFETLDKGNRTDGSSSKVRLFLKKFSRKRSNREDRKTYSHHGSSSGKCFPGKNNMTDDTDVPIFSRSVSHSSHISGVSHLSGVSDGDSEEKVDMDEGTLALNLLISRLFFDLKRKTGVKNSVQARIQRLLSNMRTPSYIGELICSDVDTGNLPPHIHATRVLPMEMSGVWAFELDIEYSGDVVIDVETRVDIREVDLQQGITDTRLQPRSSGVVPSNFAEGVEDFEKQLVFPVETVNAGEVKNGGANKADESKSSRGTKAAPNGVSRWKSILKTIAEQVSQVPISLSIRVSSLRGTLRVHMKPPPSDQLWFGFTSMPDIEFDLASSVGEHKITNSHVAMFLINRFKTAIREAVVLPNCESLTIPWMIAEKDDWVQRKAAPFMWLNQENDHNTSHATEARSKSDKPPTSFSCLQAEQMQRTANATQKIISEIGTLASSSCAQSEQVQKAATAFQKQNTEAEAIMSTPLSNSTTVTIENDKSLEELKTPLLVPSSSNKQETNSRGSSREVSAVQSPSRSVASSEEDDSRGKKQGRRARMLDLGKKMGEKLEEKRRHMEEKSRQIVEKMRGPS

SEQ ID NO: 84851 - protein, 774 aa, Arabidopsis thaliana
  peptide (1)..(774): Ceres Seq. ID no. 12677307
MYLLKRLNRKRDRIESKPVSDPSIKDFNPRESIDFCINKQGVVWILELDEGLKNWMKEKLPKEQKRKRGLLEIHPLRKFARIKDHKLILSDADSTQSETTVSLIGCSIEAVSGSDLPTRKWAKRFPIKVESKISPALYKGNQVFYIYLETSWEKESWCKALRLASCENQERFIWYSTKLKEDFRNYVTSLNVAYPSFMKPSLGFSFETLDKGNRTDGSSSKVRLFLKKFSRKRSNREDRKTYSHHGSSSGKCFPGKNNMTDDTDVPIFSRSVSHSSHISGVSHLSGVSDGDSEEKVDMDEGTLALNLLISRLFFDLKRKTGVKNSVQARIQRLLSNMRTPSYIGELICSDVDTGNLPPHIHATRVLPMEMSGVWAFELDIEYSGDVVIDVETRVDIREVDLQQGITDTRLQPRSSGVVPSNFAEGVEDFEKQLVFPVETVNAGEVKNGGANKADESKSSRGTKAAPNGVSRWKSILKTIAEQVSQVPISLSIRVSSLRGTLRVHMKPPPSDQLWFGFTSMPDIEFDLASSVGEHKITNSHVAMFLINRFKTAIREAVVLPNCESLTIPWMIAEKDDWVQRKAAPFMWLNQENDHNTSHATEARSKSDKPPTSFSCLQAEQMQRTANATQKIISEIGTLASSSCAQSEQVQKAATAFQKQNTEAEAIMSTPLSNSTTVTIENDKSLEELKTPLLVPSSSNKQETNSRGSSREVSAVQSPSRSVASSEEDDSRGKKQGRRARMLDLGKKMGEKLEEKRRHMEEKSRQIVEKMRGPS

SEQ ID NO: 84852 - protein, 719 aa, Arabidopsis thaliana
  peptide (1)..(719): Ceres Seq. ID no. 12677308
MKEKLPKEQKRKRGLLEIHPLRKFARIKDHKLILSDADSTQSETTVSLIGCSIEAVSGSDLPTRKWAKRFPIKVESKISPALYKGNQVFYIYLETSWEKESWCKALRLASCENQERFIWYSTKLKEDFRNYVTSLNVAYPSFMKPSLGFSFETLDKGNRTDGSSSKVRLFLKKFSRKRSNREDRKTYSHHGSSSGKCFPGKNNMTDDTDVPIFSRSVSHSSHISGVSHLSGVSDGDSEEKVDMDEGTLALNLLISRLFFDLKRKTGVKNSVQARIQRLLSNMRTPSYIGELICSDVDTGNLPPHIHATRVLPMEMSGVWAFELDIEYSGDVVIDVETRVDIREVDLQQGITDTRLQPRSSGVVPSNFAEGVEDFEKQLVFPVETVNAGEVKNGGANKADESKSSRGTKAAPNGVSRWKSILKTIAEQVSQVPISLSIRVSSLRGTLRVHMKPPPSDQLWFGFTSMPDIEFDLASSVGEHKITNSHVAMFLINRFKTAIREAVVLPNCESLTIPWMIAEKDDWVQRKAAPFMWLNQENDHNTSHATEARSKSDKPPTSFSCLQAEQMQRTANATQKIISEIGTLASSSCAQSEQVQKAATAFQKQNTEAEAIMSTPLSNSTTVTIENDKSLEELKTPLLVPSSSNKQETNSRGSSREVSAVQSPSRSVASSEEDDSRGKKQGRRARMLDLGKKMGEKLEEKRRHMEEKSRQIVEKMRGPS

SEQ ID NO: 84853 - DNA, 1408 bp, Arabidopsis thaliana
  misc_feature (1)..(1408): Ceres Seq. ID no. 12677384
  misc_feature (1)..(1408): Ortholog of  Ceres SEQ ID NO 13596803 as cited in SEQ ID NO 62267
aagcgaacaagtctttgcctctttggtttactttcctctgttttcgatccatttagaaaatgttattcacgaggagtgttgctcggatttcttctaagtttctgagaaaccgtagcttctatggctcctctcaatctctcgcctctcatcggttcgcaatcattcccgatcagggtcactcttgttctgactctccacacaagtagggttacgtttgcagaacaacttattcattgaaatctccggtttttggtggatttagtcatcaactctatcaccagagtagctccttggttgaggaggagcttgacccattttcgcttgttgccgatgagctgtcacttcttagtaataagttgagagagatggtacttgccgaggttccaaagcttgcctctgctgctgagtacttcttcaaaaggggtgtgcaaggaaaacagtttcgttcaactattttgctgctgatggcgacagctctgaatgtacgagttccagaagcattgattggggaatcaacagatatagtcacatcagaattacgcgtaaggcaacggggtattgctgaaatcactgaaatgatacacgtcgcaagtctactgcacgatgatgtcttggatgatgccgatacaaggcgtggtgttggttccttaaatgttgtaatgggtaacaagatgtcggtattagcaggagacttcttgctctcccgggcttgtggggctctcgctgctttaaagaacacagaggttgtagcattacttgcaactgctgtagaacatcttgttaccggtgaaaccatggagataactagttcaaccgagcagcgttatagtatggactactacatgcagaagacatattataagacagcatcgctaatctctaacagctgcaaagctgttgccgttctcactggacaaacagcagaagttgccgtgttagcttttgagtatgggaggaatctgggtttagcattccaattaatagacgacattcttgatttcacgggcacatctgcctctctcggaaagggatcgttgtcagatattcgccatggagtcataacagccccaatcctctttgccatggaagagtttcctcaactacgcgaagttgttgatcaagttgaaaaagatcctaggaatgttgacattgctttagagtatcttgggaagagcaagggaatacagagggcaagagaattagccatggaacatgcgaatctagcagcagctgcaatcgggtctctacctgaaacagacaatgaagatgtcaaaagatcgaggcgggcacttattgacttgacccatagagtcatcaccagaaacaagtgagattaagtaatgtttctctctatacaccaaaacattcctcatttcatttgtaggattttgttggtccaattcgtttc

SEQ ID NO: 84854 - protein, 321 aa, Arabidopsis thaliana; identical to SEQ ID NO: 40928
  peptide (1)..(321): Ceres Seq. ID no. 12677385

SEQ ID NO: 84855 - protein, 288 aa, Arabidopsis thaliana; identical to SEQ ID NO: 40929
  peptide (1)..(288): Ceres Seq. ID no. 12677386

SEQ ID NO: 84856 - protein, 251 aa, Arabidopsis thaliana
  peptide (1)..(251): Ceres Seq. ID no. 12677387
MIHVASLLHDDVLDDADTRRGVGSLNVVMGNKMSVLAGDFLLSRACGALAALKNTEVVALLATAVEHLVTGETMEITSSTEQRYSMDYYMQKTYYKTASLISNSCKAVAVLTGQTAEVAVLAFEYGRNLGLAFQLIDDILDFTGTSASLGKGSLSDIRHGVITAPILFAMEEFPQLREVVDQVEKDPRNVDIALEYLGKSKGIQRARELAMEHANLAAAAIGSLPETDNEDVKRSRRALIDLTHRVITRNK

SEQ ID NO: 84857 - DNA, 922 bp, Arabidopsis thaliana
  misc_feature (1)..(922): Ceres Seq. ID no. 12677396
  misc_feature (1)..(922): Ortholog of  Ceres SEQ ID NO 15179445 as cited in SEQ ID NO 0
aaacattagttacagtcggaatttcgaaaaaccctaattcagctaaagtttgatcgttgatctaaaagctcgagtgatgaagggaaattggtcgatcgtacgaaaggttcttcatcgccagttctccactctccgttcctcgacaccatcgtcgcgattatctacttccatccgaccgcttgttctggccccaaactcgatatcgtcgctaatcgctagaaattcgttgttcactgcctccaacattggtccatccatcgattttaacttctccaacacttcgcttcctcatcggagaagcctctgttcggaagctggaggtgaaaatggtgttgttctagtgaaatcagaggaagagttcatcaatgcaatgagcaaagctcaagatggatctttaccatcggtcttctatttcactgccgcctggtgtggaccatgcaggtttatctctcctgtaatcgtggagcttagtaaacaatatcccgatgtaactacgtataaagtcgacattgatgagggcgggatttcgaacactatcagcaagttgaatatcacggctgtgccaacactgcatttcttcaaaggaggctcgaagaaaggggaggttgtgggtgcagatgtcacgaagctgaagaatctcatggaacagctctacaagtgaagacctaatccgttctagtaaagaacgtgttgaatagctgctagttagctttatactcacaatttgagatcaatctagaaataatgaatgcgctgaatcagtttcgtctttgttcccccttgttgttcaggattgtaattgcccttttgttttgtttgttttctccatttcctttgggcttagtttccggaaatttgtttgtgtccgtcggtgacaacttcaaaaaatatcgacaagtcataactttttatcaaaattttg

SEQ ID NO: 84858 - protein, 194 aa, Arabidopsis thaliana
  peptide (1)..(194): Ceres Seq. ID no. 12677397
MKGNWSIVRKVLHRQFSTLRSSTPSSRLSTSIRPLVLAPNSISSLIARNSLFTASNIGPSIDFNFSNTSLPHRRSLCSEAGGENGVVLVKSEEEFINAMSKAQDGSLPSVFYFTAAWCGPCRFISPVIVELSKQYPDVTTYKVDIDEGGISNTISKLNITAVPTLHFFKGGSKKGEVVGADVTKLKNLMEQLYK

SEQ ID NO: 84859 - DNA, 1306 bp, Arabidopsis thaliana
  misc_feature (1)..(1306): Ceres Seq. ID no. 12677468
  misc_feature (1)..(1306): Ortholog of  Ceres SEQ ID NO 13637685 as cited in SEQ ID NO 53978
aagtttctttatcttttagtttcccggtaaaaaatctctctgtcatgtcttatgttcttccacgtcgttcctaatctcccaagacagaatctctaaacttcattttgctccttttccacacaaaactttctctccctccaaagaccacaaaaaatgttcttccttccttcaacttcaagtatctctctttattcacacgtatagcatccaaaaccaaaaatctataaccttttcctctgtaaagtttcttcctttctaaccttcccgagaaaaaaacaaaccctttctgttagaaaaccatgagaggtctcgcggcttgttacagtgaacacgccattaaagtatcagatacatattgttcaggtccatcgaatcattcctatatatctccgacattacctccttcaatccccgacacagtaaccaccacttatagatccaatctcccatcttccgacaaacccgtctctgtttcactcacctggtcggataatctcaccgtcgtcatctcaacgccgccgaaatcatactctgtttcactcagaaaacctaaaggatcaagaaagttgacttcttcctccggttcactcaacgccgagatcctctgggatctatcggaagcagagtacgaaaacaacggacctgaaccaataagaagattcttcgtcgtcgtcgttgtaaattccgagattaccctcggagtcggcgacgttgaccacgagcgagacacgtcatcatcgtcgtcgtggcgagtctcaaaaacggagagattctctggaacttgttggctcacgacgaaagctcaattctccgacgtcggaaggaaacacgagatacagattcaatgcggcggaggaggaggaggaggaggagaggaagggtatttatggaaagtgaaaagtcctgaaacgatgtcggtttatgttgataagaggaaagtgttttcggtgaagaagcttaagtggaactttagagggaatcaaaccatgtttttcgatggaatgcttatagacatgatgtgggatttacacgactggttctacaaagaaacgttgtcgtctgtttcgactagttcatcgtctaaaacggcgtcgtcgtcatcgtcttcttcaacttcatcgtctactcctccgtgtgctgtgtttatgtttaggaggaggagtggtttggatagtagattatggattgatgaagatgaacaagagagtgagatgaagaagaatattggttctagagatgagaaacattcgttttcacttatcatttgtgcctctaaaaagtgaccaaataaacaaataaacatttt

SEQ ID NO: 84860 - protein, 327 aa, Arabidopsis thaliana; identical to SEQ ID NO: 78632
  peptide (1)..(327): Ceres Seq. ID no. 12677469

SEQ ID NO: 84861 - DNA, 1534 bp, Arabidopsis thaliana
  misc_feature (1)..(1534): Ceres Seq. ID no. 12677489
  misc_feature (1)..(1534): Ortholog of  Ceres SEQ ID NO 14303604 as cited in SEQ ID NO 62525
aatttctcatatcgcgccatcggaactgtgctaaattacacgttccgacacataattaatgtaggattctttcttctgctttcctcagtttcgtccgaaagaggcaaaattcaaatcgaattctcgaagaagctcatctgcattaagtttgaaagatctcttcggaagaagtaataatgtctctgacatgcgtaaatatgtcggaggatgtctggttgacttgcctcactcacgcattatccaccgagaccgaagaaatcatgggtctccttctcggcgacatcgagtactcaaagaacggcgaaagtgccacagctatgatctggggagcatcgcctcagccacgatctgatcggcagaaggatcgagttgaaaccaatcctgaacaattggctgctgcttctgctcaggctgatataatgacgatatcaacgggcagaactacacgggtcattggatggtaccactcccatcctcatattaccgttcttccttcccatgtcgatgttcggacacaagctatgtatcagcttttagattctggttttattggcctcatattttcctgttttagtgaagatgctaacaaggttggtagaatccaagttatcgctttccagtcttctgatggaaagccgaatagtattcctaaatcaatgagcctggttcttgctaataaagattctgtcatcgatatagaatcttcatctagttcttcggactcgatataccagcgatcctcttcttctaagcccgagctagacacaattgatactgctacaacttccggatctaagggtggaggacgggtttcagattttgggcctttctttacaaacaatattgaggccaatatcaccggcagagatgaaactcacaaatcaggcaatctcagcagcacaactataggaattgactcgatggacatgtctgaaagtatgcaagaggcaatgctccgttcaaatttagataccagtggtgcggggtatgttagaaaagaagtcccacttcatgttttgccaacttcatcccttcttccagtcaattcacctttagcatcttttaaaagcctgcaacgagtactgtacgaggaggaacgagcagcgtactaccaatcagtgcagcaaaacatgagagatgggcgagttcatcctcttgctttcattcacaacacatcaacatatcaagcctccatgtgcaagttgatcgaatactgcttgagtcctgccattaacgcacttcaagataggcagaaggagaacaagatccggttagcaatgctgatggatgaagctgaggttttggaggcacaaaaacttaaaggagcagagacaagccggagaccatctcatctggttcacggttctggcagccgaagcagaagaggatcgtagaaagacctgcaactaaagacacatgcccgtcttctttgtgtatatttctatttggacatttgttttcttacattgtattattttgaccagactccatcgctttgttgttgtttagaatctgatccacttttggaagaacc

SEQ ID NO: 84862 - protein, 405 aa, Arabidopsis thaliana
  peptide (1)..(405): Ceres Seq. ID no. 12677490
MSLTCVNMSEDVWLTCLTHALSTETEEIMGLLLGDIEYSKNGESATAMIWGASPQPRSDRQKDRVETNPEQLAAASAQADIMTISTGRTTRVIGWYHSHPHITVLPSHVDVRTQAMYQLLDSGFIGLIFSCFSEDANKVGRIQVIAFQSSDGKPNSIPKSMSLVLANKDSVIDIESSSSSSDSIYQRSSSSKPELDTIDTATTSGSKGGGRVSDFGPFFTNNIEANITGRDETHKSGNLSSTTIGIDSMDMSESMQEAMLRSNLDTSGAGYVRKEVPLHVLPTSSLLPVNSPLASFKSLQRVLYEEERAAYYQSVQQNMRDGRVHPLAFIHNTSTYQASMCKLIEYCLSPAINALQDRQKENKIRLAMLMDEAEVLEAQKLKGAETSRRPSHLVHGSGSRSRRGS

SEQ ID NO: 84863 - protein, 398 aa, Arabidopsis thaliana
  peptide (1)..(398): Ceres Seq. ID no. 12677491
MSEDVWLTCLTHALSTETEEIMGLLLGDIEYSKNGESATAMIWGASPQPRSDRQKDRVETNPEQLAAASAQADIMTISTGRTTRVIGWYHSHPHITVLPSHVDVRTQAMYQLLDSGFIGLIFSCFSEDANKVGRIQVIAFQSSDGKPNSIPKSMSLVLANKDSVIDIESSSSSSDSIYQRSSSSKPELDTIDTATTSGSKGGGRVSDFGPFFTNNIEANITGRDETHKSGNLSSTTIGIDSMDMSESMQEAMLRSNLDTSGAGYVRKEVPLHVLPTSSLLPVNSPLASFKSLQRVLYEEERAAYYQSVQQNMRDGRVHPLAFIHNTSTYQASMCKLIEYCLSPAINALQDRQKENKIRLAMLMDEAEVLEAQKLKGAETSRRPSHLVHGSGSRSRRGS

SEQ ID NO: 84864 - protein, 377 aa, Arabidopsis thaliana
  peptide (1)..(377): Ceres Seq. ID no. 12677492
MGLLLGDIEYSKNGESATAMIWGASPQPRSDRQKDRVETNPEQLAAASAQADIMTISTGRTTRVIGWYHSHPHITVLPSHVDVRTQAMYQLLDSGFIGLIFSCFSEDANKVGRIQVIAFQSSDGKPNSIPKSMSLVLANKDSVIDIESSSSSSDSIYQRSSSSKPELDTIDTATTSGSKGGGRVSDFGPFFTNNIEANITGRDETHKSGNLSSTTIGIDSMDMSESMQEAMLRSNLDTSGAGYVRKEVPLHVLPTSSLLPVNSPLASFKSLQRVLYEEERAAYYQSVQQNMRDGRVHPLAFIHNTSTYQASMCKLIEYCLSPAINALQDRQKENKIRLAMLMDEAEVLEAQKLKGAETSRRPSHLVHGSGSRSRRGS

SEQ ID NO: 84865 - DNA, 1071 bp, Arabidopsis thaliana
  misc_feature (1)..(1071): Ceres Seq. ID no. 12677517
  misc_feature (1)..(1071): Ortholog of  Ceres SEQ ID NO 14302082 as cited in SEQ ID NO 64529
aagaaatctttcagatttgcgcatatcgacaattttccgagcggccagtttacgtattttgtttgtagttaacgtgtttcaaggactttgacaatggctgaggaagcgcataaggtaacattgaatgtctatgatttaagccaaggcttggcacgccagctctcacaatcactcctgggaaaggttattgaaggtgtatggcatacaggaatagttgtctatgggaatgagtacttttttggaggagggatacaacatttaccagttggaagaactccatatggaacaccaattcgaacgatagagttgggtctatcacatgtgcctaaagatgtattcgagatgtacttggaagaaatcagtcctcgttacactgctgaatcctacaatttacttactcacaactgcaacaacttcagcaacgaggtcgctcagtttttggtgggtaaagggattcctgactacattctccagcttcctaatgatgttctaaacagtcccatgggtggtcttataatgcctatgttgcaaggcctcgaaacaactctaaaggctggtgctgttcctcaagttccacagtttaggccacagccacaaccttttggagcttttagtaaagatgatggcccacaaattgtgatagctcctaagctcgaggcagcagaaacctcaactgcaactgagaaagtgccacctgttattcaaccatcagctagtaaagagaaggtcaaggacgacccgttgggtgatgctagggccaagattcaggaagagattacaagcgaatttgcagctctaatggcacaaggcacattacgagcaagtgaagcagctgctatggcgacaaaaagagtcatgcaaaagtacggacatctcaatgtaaacgcttagtgcaataacagagagatgaaacattttatttttactgtcttgaaactaagtccagaatcttgaacgatttcattacactattgccttcagctgtatttcgtgtattatgttcaacgatctacaaattaattatcataaaagaggaaaagagcagtaaacaagagaaaaaaaaaagatttt

SEQ ID NO: 84866 - protein, 265 aa, Arabidopsis thaliana; identical to SEQ ID NO: 38015
  peptide (1)..(265): Ceres Seq. ID no. 12677518

SEQ ID NO: 84867 - protein, 182 aa, Arabidopsis thaliana; identical to SEQ ID NO: 38016
  peptide (1)..(182): Ceres Seq. ID no. 12677519

SEQ ID NO: 84868 - DNA, 1915 bp, Arabidopsis thaliana
  misc_feature (1)..(1915): Ceres Seq. ID no. 12677550
  misc_feature (1)..(1915): Ortholog of  Ceres SEQ ID NO 14311305 as cited in SEQ ID NO 53731
  misc_feature (1)..(1915): Ortholog of  Ceres SEQ ID NO 13501807 as cited in SEQ ID NO 67558
ataaaaattcgaactatcaaactccaccccataacaaaattctccaaactagtgaaaattttgtcgccaccgtcgcagagtgttaaaaaactattggaagatgggttctggtcaatggcatatggagaagaggtctactttaaagaatgattcgtttgtaaaagaatacaatccagtcacggaaactgggagtctctctatcattgttcttggtgcttctggtgatcttgctaagaagaagacttttcctgcacttttcaatctatttcatcagggatttcttaatccagatgaagttcatatatttggatatgcaaggagtaagattactgatgaggagcttagagataaaatccgcggatatcttgttgatgagaagaatgcatctaagaaaacagaagctttgtccaagtttctaaagctgattaagtatgtgagtggaccttatgattctgaggaagggtttaagagattagacaaggcgattttggagcacgagatatctaaaaagactgctgaaggatcttcgaggagattgttttatcttgcacttcctccgtctgtataccctcctgtaagcaagatgatcaaggcatggtgcactaacaaatctgatcttggtggatggactaggattgttgttgagaaaccatttggaaaggatttggaatctgcagagcagctgagttctcagattggagccttgtttgaagaaccacagatttatcgtattgatcactatctgggaaaagagttagttcaaaacatgttggttcttcggtttgccaatcgcttgtttttgccactatggaaccgcgacaatattgcaaacgtacagatcgttttcagagaagattttggaactgaaggtcgcggtggatattttgatgaatacggaatcattcgtgatattattcaaaaccacttgctccaggttctttgccttgtcgccatggagaaaccaatctctcttaaacccgagcacatccgggatgagaaagtgaaggttcttcaatctgtgattcccataaaagatgaagaggtggttcttggacaatatgaaggatatagagatgatccaactgttccaaatgactcaaacactccaacgtttgccacaacaattcttcgcattaacaatgaaagatgggaaggtgttccttttatactgaaggccggaaaggcaatgagttcaaagaaggcagatattcgcattcagtttaaagatgttcctggcgacatattcaaatgtcaaaaccaagggaggaacgagtttgttatacgcttgcagccttcagaggccatgtacatgaagctaactgtgaagcaaccgggtctggagatgcaaaccgtgcagagtgaactagacctatcgtacaagcagcgttaccaagatgtctcaattccagaggcttacgaacgccttattcttgacacaatcagaggcgaccaacaacactttgttcgcagagacgaattaaaggcagcttgggaaatcttcactccactgcttcacaggatcgacaagggagaagtgaaatcggtcccatacaaacaaggtagccgtggcccagcggaagcagatcagctacttaagaaagctggttatatgcagactcatggctacatttggatccctcctacattgtaaatggtataatcatagagatgatgatgatgagtacacacaaaataagagggttttttttcttttttttccttgcttgctgaataaaaactcttcaccagtttggagtttgtttaagtgaatcttatgtatactagtgatcttcactaggacattgtttgtttatgccttgtagtttttgttgtactagtcccttgttttctttttttacataatgcaaaacagctttgtggaaaagctaattaaattaagagatcttattctgct

SEQ ID NO: 84869 - protein, 516 aa, Arabidopsis thaliana; identical to SEQ ID NO: 77428
  peptide (1)..(516): Ceres Seq. ID no. 12677551

SEQ ID NO: 84870 - protein, 509 aa, Arabidopsis thaliana; identical to SEQ ID NO: 77429
  peptide (1)..(509): Ceres Seq. ID no. 12677552

SEQ ID NO: 84871 - protein, 355 aa, Arabidopsis thaliana
  peptide (1)..(355): Ceres Seq. ID no. 12677553
MIKAWCTNKSDLGGWTRIVVEKPFGKDLESAEQLSSQIGALFEEPQIYRIDHYLGKELVQNMLVLRFANRLFLPLWNRDNIANVQIVFREDFGTEGRGGYFDEYGIIRDIIQNHLLQVLCLVAMEKPISLKPEHIRDEKVKVLQSVIPIKDEEVVLGQYEGYRDDPTVPNDSNTPTFATTILRINNERWEGVPFILKAGKAMSSKKADIRIQFKDVPGDIFKCQNQGRNEFVIRLQPSEAMYMKLTVKQPGLEMQTVQSELDLSYKQRYQDVSIPEAYERLILDTIRGDQQHFVRRDELKAAWEIFTPLLHRIDKGEVKSVPYKQGSRGPAEADQLLKKAGYMQTHGYIWIPPTL

SEQ ID NO: 84872 - DNA, 943 bp, Arabidopsis thaliana
  misc_feature (1)..(943): Ceres Seq. ID no. 12677570
  misc_feature (1)..(943): Ortholog of  Ceres SEQ ID NO 13648511 as cited in SEQ ID NO 179
gtgacttaaaaagctcctaggcaccgaaatcgagacactctcgacaaccatgctctctgacgccgggggtggttccgattgccggcgtcgggacttatcaactcccatcaaccttcatgtgttctatataagctttatcttcattgaatcttcctccgttatctcaaatctctcaaaatatctaaatctccttttttatgtgagcttcttcactgaaagttttctttgtgacggaagagtatatcgatgctctattggctccgatctgactcagatcttggatgcatctctgtcttcgaacccaaaacaagaaaattcacaacagtccaacagctcctcttctcaaacatcagagcaagacttcatcaacttatcaaaaagctctagatctggactagcaccaacaccacctttggtttcttctcaccggttttcgttgatggcaggagtatctcttggaccatcagatgtgcttcttccgctgggaacgtcgacggcacacgacgagctcaaacgctggcaatggtcaccctatatgattcacagtcgcccatcattccaattcttcagaatgacggaggcgctttccttatcccgacaacatcaaccctagggtttgattggatgagcctcatctttcattaaagcccaatatctcccatgtggcccatatccaggtctgatttccctatcaatttgcatagtctctctttgctttgtttctcgacaaaggatggtcgtcgactccattcagctttaggaacaatgcatctagaggggatttgcttattcaattatcgaaaccttatgattaaccaattggttcttaaccttgcatcttcacaattgtttaaattaaaattttgaaacatgacatgtaagaagcaaatcttagtttttaattcataaaaacttcttagatatgaagcaaatcttagttttt

SEQ ID NO: 84873 - protein, 187 aa, Arabidopsis thaliana
  peptide (1)..(187): Ceres Seq. ID no. 12677571
MLSDAGGGSDCRRRDLSTPINLHVFYISFIFIESSSVISNLSKYLNLLFYVSFFTESFLCDGRVYRCSIGSDLTQILDASLSSNPKQENSQQSNSSSSQTSEQDFINLSKSSRSGLAPTPPLVSSHRFSLMAGVSLGPSDVLLPLGTSTAHDELKRWQWSPYMIHSRPSFQFFRMTEALSLSRQHQP

SEQ ID NO: 84874 - DNA, 1276 bp, Arabidopsis thaliana
  misc_feature (1)..(1276): Ceres Seq. ID no. 12677581
  misc_feature (1)..(1276): Ortholog of  Ceres SEQ ID NO 14313666 as cited in SEQ ID NO 54618
  misc_feature (1)..(1276): Ortholog of  Ceres SEQ ID NO 13639645 as cited in SEQ ID NO 57488
accaatgccaataatggccggaaccgcaagtccttggcggagagaggccgtgttcttgacggcaatgctggtggtcgaaaccagcgtcgtcggaataagtactttgtttaaatttgcaacttcaaagggactcaacatttatcctttcctcggctattcttatcttcttgcttctcttcttcttcttccttctcttttcttcactaacaggtcaagttcacttcctccactaagtgtctcaatactttcaaaaattggacttcttggatttctaggatcaatgtatgtgatcacaggatacataggcatcgaatacagcagcccaaccttagcctccgccataaacaatatcactcctgctcttaccttcatcctcgccattatcttcagaatggaaaaagtatctttcaaagagaggagtagtctagccaaattgatggggacgatattgtcactgataggtgcacttgtggtgattttctaccacggtccacgtgtcttcctcgcatcttctccgccctatgtaaacttccgtcagttttctccaccgttgtcatcttcaaactccgattggctcatcggtggagctcttctaaccatgcaaggcatattcgtttctgtttctttcattcttcaggcacatataatgagtgtatatccagcagcattcagagtctcctttctttacactgtatgtgtttcaatcgtgacctcgacgattggactagtagttgaaaagaacaacccaagcgtttggatcattcatttcgatattactttgattacaattgttaccatggcaatagtaacttcagtatactatgtgattcattcatggacagtacgacataaaggacctctgtacttagccatatttaaacctttgtccattttaatagcagtggttatgggggccatttttctcaatgattctctctatctcggatgtttgatcggaggaattttgataacattaggcttttacgctgtgatgtggggcaaagcaaacgaagagaaggatcagttatcattttcagaaaaagagaaaacgcctcttctattaaaccgcaaaaacgaccaagtttaaaaagaaaaagaatatagacaataaaactactaatagttaacaaatactgttattaataccatatttataaaattgtcttatgtctctatgaacctaggagttggaaaaaaatgtgtgtatttagatttttttttcaaaatactccaacatttataaatacgagttaacatttttccttgactcctttgg

SEQ ID NO: 84875 - protein, 361 aa, Arabidopsis thaliana
  peptide (1)..(361): Ceres Seq. ID no. 12677582
PMPIMAGTASPWRREAVFLTAMLVVETSVVGISTLFKFATSKGLNIYPFLGYSYLLASLLLLPSLFFTNRSSSLPPLSVSILSKIGLLGFLGSMYVITGYIGIEYSSPTLASAINNITPALTFILAIIFRMEKVSFKERSSLAKLMGTILSLIGALVVIFYHGPRVFLASSPPYVNFRQFSPPLSSSNSDWLIGGALLTMQGIFVSVSFILQAHIMSVYPAAFRVSFLYTVCVSIVTSTIGLVVEKNNPSVWIIHFDITLITIVTMAIVTSVYYVIHSWTVRHKGPLYLAIFKPLSILIAVVMGAIFLNDSLYLGCLIGGILITLGFYAVMWGKANEEKDQLSFSEKEKTPLLLNRKNDQV

SEQ ID NO: 84876 - protein, 360 aa, Arabidopsis thaliana
  peptide (1)..(360): Ceres Seq. ID no. 12677583
MPIMAGTASPWRREAVFLTAMLVVETSVVGISTLFKFATSKGLNIYPFLGYSYLLASLLLLPSLFFTNRSSSLPPLSVSILSKIGLLGFLGSMYVITGYIGIEYSSPTLASAINNITPALTFILAIIFRMEKVSFKERSSLAKLMGTILSLIGALVVIFYHGPRVFLASSPPYVNFRQFSPPLSSSNSDWLIGGALLTMQGIFVSVSFILQAHIMSVYPAAFRVSFLYTVCVSIVTSTIGLVVEKNNPSVWIIHFDITLITIVTMAIVTSVYYVIHSWTVRHKGPLYLAIFKPLSILIAVVMGAIFLNDSLYLGCLIGGILITLGFYAVMWGKANEEKDQLSFSEKEKTPLLLNRKNDQV

SEQ ID NO: 84877 - protein, 357 aa, Arabidopsis thaliana; identical to SEQ ID NO: 74239
  peptide (1)..(357): Ceres Seq. ID no. 12677584

SEQ ID NO: 84878 - DNA, 1237 bp, Arabidopsis thaliana
  misc_feature (1)..(1237): Ceres Seq. ID no. 12677585
  misc_feature (1)..(1237): Ortholog of  Ceres SEQ ID NO 13639645 as cited in SEQ ID NO 57488
aacaccaaacctttctaccatttccaatggccggagcagtaagcctttggcggagagaggccgtgttcttgacggcgatgctggcaggcgaaaccagcatcgtcggactaagtactctgtttaaggtagcaacttcaaagggactcaacatttaccctttcctcagctattcttatcttcttgcttctcttctccttcttccttctctgttcttcaccaacagtgcctcaatactctctaagattggacttcttggctttctaggatcaatgtatgttattacaggaggcataggcatcgaatacagcaacccaaccttagcctccgccataggcaatattgttcctgctcttaccttcatcctcgctgttatcttcaggatggagaaagtatcattcaaagaaaggagcagtgtagccaaagtgatggggacgatactgtcactaataggcgcatttgtggtgattttctaccacggtccacgtgtctttgtcgcatcttctccaccatatctaaacttccgtcagctttctccaccgttgtcatcgtcaaagtctgattggctcatcggaggagctattcttaccatacaaggcatcttcgtttctgtttcttttattctccagacacatataatgagagaatatcctgaagcattcacagtctccattctctacattctatgtatttcaatcgtgacctcaatgattggactagtagtcgaaaagaacaacccaagcatttggatcattcatttcgatattacattgtttacaattgttactacgggaataataacttcagtatactatgtgattcattcatgggcaatacgtcacaaaagacctctatacttagcgatatttaagcctctgtctattttgatagcagtggttatggggaccatttttctcaacgattctctctatctcggatgtttgattggaggaattttgataacattaggcttttatgttgtgatgtggggcaaagcaaacgaagagaagaacaagttgttatcattttcaggaaaagagaaaacccctcttctattgagcggcaaaaacgaccaaatttaaatgaaaaaaaatttataatcaaaggagttacaaactctgaaatagtctcttatatacatagcgtgcaaactattagtgtatactgtgtattgctttgtatataacttagaaaatgactatctaattgttttttaagttacgggtacgtaacgactatc

SEQ ID NO: 84879 - protein, 358 aa, Arabidopsis thaliana
  peptide (1)..(358): Ceres Seq. ID no. 12677586
HQTFLPFPMAGAVSLWRREAVFLTAMLAGETSIVGLSTLFKVATSKGLNIYPFLSYSYLLASLLLLPSLFFTNSASILSKIGLLGFLGSMYVITGGIGIEYSNPTLASAIGNIVPALTFILAVIFRMEKVSFKERSSVAKVMGTILSLIGAFVVIFYHGPRVFVASSPPYLNFRQLSPPLSSSKSDWLIGGAILTIQGIFVSVSFILQTHIMREYPEAFTVSILYILCISIVTSMIGLVVEKNNPSIWIIHFDITLFTIVTTGIITSVYYVIHSWAIRHKRPLYLAIFKPLSILIAVVMGTIFLNDSLYLGCLIGGILITLGFYVVMWGKANEEKNKLLSFSGKEKTPLLLSGKNDQI

SEQ ID NO: 84880 - protein, 350 aa, Arabidopsis thaliana
  peptide (1)..(350): Ceres Seq. ID no. 12677587
MAGAVSLWRREAVFLTAMLAGETSIVGLSTLFKVATSKGLNIYPFLSYSYLLASLLLLPSLFFTNSASILSKIGLLGFLGSMYVITGGIGIEYSNPTLASAIGNIVPALTFILAVIFRMEKVSFKERSSVAKVMGTILSLIGAFVVIFYHGPRVFVASSPPYLNFRQLSPPLSSSKSDWLIGGAILTIQGIFVSVSFILQTHIMREYPEAFTVSILYILCISIVTSMIGLVVEKNNPSIWIIHFDITLFTIVTTGIITSVYYVIHSWAIRHKRPLYLAIFKPLSILIAVVMGTIFLNDSLYLGCLIGGILITLGFYVVMWGKANEEKNKLLSFSGKEKTPLLLSGKNDQI

SEQ ID NO: 84881 - protein, 333 aa, Arabidopsis thaliana
  peptide (1)..(333): Ceres Seq. ID no. 12677588
MLAGETSIVGLSTLFKVATSKGLNIYPFLSYSYLLASLLLLPSLFFTNSASILSKIGLLGFLGSMYVITGGIGIEYSNPTLASAIGNIVPALTFILAVIFRMEKVSFKERSSVAKVMGTILSLIGAFVVIFYHGPRVFVASSPPYLNFRQLSPPLSSSKSDWLIGGAILTIQGIFVSVSFILQTHIMREYPEAFTVSILYILCISIVTSMIGLVVEKNNPSIWIIHFDITLFTIVTTGIITSVYYVIHSWAIRHKRPLYLAIFKPLSILIAVVMGTIFLNDSLYLGCLIGGILITLGFYVVMWGKANEEKNKLLSFSGKEKTPLLLSGKNDQI

SEQ ID NO: 84882 - DNA, 703 bp, Arabidopsis thaliana
  misc_feature (1)..(703): Ceres Seq. ID no. 12677589
  misc_feature (1)..(703): Ortholog of  Ceres SEQ ID NO 13661143 as cited in SEQ ID NO 61139
  misc_feature (1)..(703): Ortholog of  Ceres SEQ ID NO 13597234 as cited in SEQ ID NO 64118
atagaacaacaacaacaacaacaagaagaacacacgaagaagaagaagagaagcttatggcaggaggaggaacagaagcgtttcctgatcttggagagcattgccaagaccctgattgcaaattactcgattttctcccttttacttgcgacggctgcaaattggtgttttgtttggagcatagatcatacaagtcacataactgtccgaaatccgatcatgggagcagaacggtttccatctgtgaaacatgttcaatagcgattgaaacaactggttttgatgaaaaaggaatcaaatctttgcttgagaaacacgaaagatccggagattgtgatccaaacaagaaaaagaaaccaacgtgtcctgtaaaacgttgcaaagagattctgacttttgcgaataaccttacttgcaaatattgtggagtcaagttctgtttgaaacaccggtttccgacagatcatgtctgtaacaagaagatcattaataccgcgggaacaagctcgaggtggaacgagaggtttatggaagctttgagtttaagaaaccagaaagggtgtggaagagggagctctgtttcatcaaaatcttcaccatcagttagatcgttttagtttcttctcttgtaacaatagtttgcatcaaccaattccttctttatgttctcatgtattttccattgtttgcaagaaagaagatt

SEQ ID NO: 84883 - protein, 204 aa, Arabidopsis thaliana
  peptide (1)..(204): Ceres Seq. ID no. 12677590
RTTTTTTRRTHEEEEEKLMAGGGTEAFPDLGEHCQDPDCKLLDFLPFTCDGCKLVFCLEHRSYKSHNCPKSDHGSRTVSICETCSIAIETTGFDEKGIKSLLEKHERSGDCDPNKKKKPTCPVKRCKEILTFANNLTCKYCGVKFCLKHRFPTDHVCNKKIINTAGTSSRWNERFMEALSLRNQKGCGRGSSVSSKSSPSVRSF

SEQ ID NO: 84884 - protein, 186 aa, Arabidopsis thaliana; identical to SEQ ID NO: 77756
  peptide (1)..(186): Ceres Seq. ID no. 12677591

SEQ ID NO: 84885 - DNA, 966 bp, Arabidopsis thaliana
  misc_feature (1)..(966): Ceres Seq. ID no. 12677596
  misc_feature (1)..(966): Ortholog of  Ceres SEQ ID NO 15169607 as cited in SEQ ID NO 69301
atggcgggaatagctttagttttagatctactgaagaaatctcaatctaagaacactctccactcatcttccttctattccgccgcctctgctccttttgcgtctaggtttctcttcggttcttttgagcctagagttgcgtattgtgatgctgctgctgcaatagatgatgattaccttggtgctatacggaaaatgtctgcggatgttttgcagcgtcaaccccttgcgtatatttctaggtccaaggaatacaatatccagccaaaaccagttctctcggcctttgagttcagggcacttgcaatgactacagtgagatcccttttgatgttttatttgcctcttttggagcctaaaacggcttcagaggatgatgatgatttcctaaacaatgctgcagaagaaaaccgccacacagacttgattgttcctcttaaaaagtcagcaaagcaaattgcccgtgagaccacagttgtgaccactcggagagtccttgaaaggctggctctgagttatgtctcacagcgtatggcatggaaacttctaaaggatgtgcctcagtcggctttacgcaaggctcagagagggttgccgacacatgtatatatctttaaagtcagccaaacaactcttagaggtcacttcctgggaatcgcagcatcatgggtagttcaagtaggcattgaaatctacagatgtgtgttcccgaatgttaaacccgaggaagaagaagaagaggagaaagtcgagatatcacagcaagctaaggatctcggaaacaaagttgtgggtatcacagtacgatgtggcgcgtccttagtatttgctgccattggagccgggatatgttcttgccttatccgtccctccacgggccaatggatcggttgcgcgctgggagacttggctggtccgatggttgtttcggtttgcctgcagaagactcttcaagctgattattaa

SEQ ID NO: 84886 - protein, 321 aa, Arabidopsis thaliana
  peptide (1)..(321): Ceres Seq. ID no. 12677597
MAGIALVLDLLKKSQSKNTLHSSSFYSAASAPFASRFLFGSFEPRVAYCDAAAAIDDDYLGAIRKMSADVLQRQPLAYISRSKEYNIQPKPVLSAFEFRALAMTTVRSLLMFYLPLLEPKTASEDDDDFLNNAAEENRHTDLIVPLKKSAKQIARETTVVTTRRVLERLALSYVSQRMAWKLLKDVPQSALRKAQRGLPTHVYIFKVSQTTLRGHFLGIAASWVVQVGIEIYRCVFPNVKPEEEEEEEKVEISQQAKDLGNKVVGITVRCGASLVFAAIGAGICSCLIRPSTGQWIGCALGDLAGPMVVSVCLQKTLQADY

SEQ ID NO: 84887 - protein, 256 aa, Arabidopsis thaliana; identical to SEQ ID NO: 49027
  peptide (1)..(256): Ceres Seq. ID no. 12677598

SEQ ID NO: 84888 - protein, 219 aa, Arabidopsis thaliana; identical to SEQ ID NO: 49028
  peptide (1)..(219): Ceres Seq. ID no. 12677599

SEQ ID NO: 84889 - DNA, 1145 bp, Arabidopsis thaliana
  misc_feature (1)..(1145): Ceres Seq. ID no. 12677668
  misc_feature (1)..(1145): Ortholog of  Ceres SEQ ID NO 14312176 as cited in SEQ ID NO 59203
  misc_feature (1)..(1145): Ortholog of  Ceres SEQ ID NO 14302780 as cited in SEQ ID NO 65368
gcttcatttttttctccgaccaaacaagttccgggtgttttgaaagaaccccgacaatggcgtggaacgtgttcaagttctgcacagcacttcgcgccttgggttcgatcatgatcttaattgttatcgggatcatcggattcacatactacgccgttgtcgtcgttaattacggacctgctctactgatcggtggtgtcgattcattactatctgttctcgtcttagcgttcttccactttctgcttataatgctactgtggagttatttctctgttgttgtgacggaccctggtggtgttccaacgggttggaggccagaattagacatagagaaaagcgagggaaaccaagctttgattggagaagcttcggttggagattcctcgtctcatggtgtaagatattgtagaaagtgcaatcaatataaaccgcctcgttctcaccattgttcagtctgtggaagatgcatactaaagatggaccatcactgtgtttgggtggtgaattgtgttggtgcaaataactacaaatcatttctcctattcttgttttacacatttcttgagacaacggtggttgcagtatcactattgccaattttcctcgtattcttcagcgatggagatggtgatataaccgtatcaccaggaagcctagcagccagctttgttgcatttgtattgaacatagcatttgccctaagtgtcctaggcttcctaataatgcacataatgttggtcgctcgtaacaccacaactattgaggcgtatgagaagcatacagtgaactggccatacaacgttggtcgtaagacaaactttgaacaggtttttggaagtgataaaatgtattggttcgtgccattgtacacggaagacgataagaagaagttgccagcacttggagggttagactttacgagcaggtcggagtccgagacagagccgcttcagtctctatgaccttacaaacttgaaatttttggaagtgtgtcttctgctttgtgtatgtatcaatcaaatattatatcaaacattgtcttgtgtattataaagattagtgcctattgtggaatttgtatctttttatttcgtgaaaagaaatttctcaaacttcttaaatataccattttcacatttgct

SEQ ID NO: 84890 - protein, 320 aa, Arabidopsis thaliana; identical to SEQ ID NO: 24443
  peptide (1)..(320): Ceres Seq. ID no. 12677669

SEQ ID NO: 84891 - protein, 302 aa, Arabidopsis thaliana; identical to SEQ ID NO: 24444
  peptide (1)..(302): Ceres Seq. ID no. 12677670

SEQ ID NO: 84892 - protein, 284 aa, Arabidopsis thaliana; identical to SEQ ID NO: 24445
  peptide (1)..(284): Ceres Seq. ID no. 12677671

SEQ ID NO: 84893 - DNA, 2011 bp, Arabidopsis thaliana
  misc_feature (1)..(2011): Ceres Seq. ID no. 12677711
  misc_feature (1)..(2011): Ortholog of  Ceres SEQ ID NO 13655237 as cited in SEQ ID NO 62892
  misc_feature (1)..(2011): Ortholog of  Ceres SEQ ID NO 15180683 as cited in SEQ ID NO 0
atgtcttctctcttccctttcatattccttttccttttctcattcctcactagcttcagagcttctgctcaagatcctcgtttcctagcctattattgtccaaatgcaacaacttactcaagtaacagcacttacttgaccaatcttaaaacccttttgtcctctctctcttcccgcaacgcctcttactccaccggattccaaaacgccacggtgggacaagcccttgacagggtcaccggacttttcctttgccggggagacgtctcgccggaagtttgccgtaactgcgtcacctttgccgtcaacaacacctttagtaggtgtccgaatcagagagaagctgtgttctattacgaggagtgcatactcagatactctcacaagaatattctatcgacggccattacaaacgaaggagaatttatcttgaggaaccccaatcatatttctcctattcaaaatcaaataaaccagtttactaatttggtgttatctaatatgaaccaaattgccatcgaagcagccgacaatcctagaaaattctctacgataaagaccgaattgaccgcactccagactttctacgggcttgttcaatgcactcctgatctttcaagacaaaactgcatgaactgtctgacaagttccatcaatagaatgccattttctagaattggagcaagacagttttggccaagttgtaattcaaggtacgagctttacgatttctacaacgaaaccgccattggtacaccaccaccgccgctgcctccgttggcatctccttcactatctgataaaagtgggaattcaaatgtggtcgtggtagccgttgttgtgcctatcatagtcgctgttctgattttcatagctggttattgtttctttgcaaagagggcaaagaagacttatggcacaacacctgctttagatgaagatgataaaacaaccatagagtcgctgcaacttgattatagagcaattcaagctgcaacaaatgatttttcagagaataataaaattggtcgaggaggttttggtgacgtttacaagggtacattttcaaatggaaccgaagttgcagtgaagagactgtcgaaaacatcagaacaaggtgacacagaattcaagaacgaggttgtagttgttgcaaatcttcggcacaaaaatcttgttaggattctcggattttctatagaacgagaagaaaggatattggtctacgagtatgtagaaaataaaagccttgataacttcctatttgatcctgcaaagaaaggtcagttgtactggacacagcgataccatatcattggtgggattgctagagggatcctatatcttcatcaagattcacgactcacaatcatacaccgtgaccttaaagcgagtaacattctcctggatgctgatatgaatcctaaaattgctgattttggaatggcaaggatctttggaatggatcaaacccagcagaacacaagcagaatagttggtacctacggttacatgtctcctgaatatgcgatgcgtggccagttctcaatgaaatctgatgtctatagtttcggagtgttagttcttgagattataagcggtaggaagaacaacagctttatcgagacagatgacgcacaggacttggtgacacatgcttggaggctttggagaaacggaacagcgttagacctcgtggatccattcattgcagatagttgccggaagagtgaagtggttcgatgcacccatatcggtcttttatgtgttcaagaagatcctgtaaaacgtccagccatgtcaaccatttccgtgatgctcactagtaatacaatggctttaccagcgcctcagcaaccagggttttttgttaggagtagacctggaacaaaccggcttgattcagatcaatcaacgaccaacaagtctgttacagtatctattgacgataagtcaatgtctgatttagatcctcgttgaatatggtgttattaaaccttacgattgaaat

SEQ ID NO: 84894 - protein, 659 aa, Arabidopsis thaliana
  peptide (1)..(659): Ceres Seq. ID no. 12677712
MSSLFPFIFLFLFSFLTSFRASAQDPRFLAYYCPNATTYSSNSTYLTNLKTLLSSLSSRNASYSTGFQNATVGQALDRVTGLFLCRGDVSPEVCRNCVTFAVNNTFSRCPNQREAVFYYEECILRYSHKNILSTAITNEGEFILRNPNHISPIQNQINQFTNLVLSNMNQIAIEAADNPRKFSTIKTELTALQTFYGLVQCTPDLSRQNCMNCLTSSINRMPFSRIGARQFWPSCNSRYELYDFYNETAIGTPPPPLPPLASPSLSDKSGNSNVVVVAVVVPIIVAVLIFIAGYCFFAKRAKKTYGTTPALDEDDKTTIESLQLDYRAIQAATNDFSENNKIGRGGFGDVYKGTFSNGTEVAVKRLSKTSEQGDTEFKNEVVVVANLRHKNLVRILGFSIEREERILVYEYVENKSLDNFLFDPAKKGQLYWTQRYHIIGGIARGILYLHQDSRLTIIHRDLKASNILLDADMNPKIADFGMARIFGMDQTQQNTSRIVGTYGYMSPEYAMRGQFSMKSDVYSFGVLVLEIISGRKNNSFIETDDAQDLVTHAWRLWRNGTALDLVDPFIADSCRKSEVVRCTHIGLLCVQEDPVKRPAMSTISVMLTSNTMALPAPQQPGFFVRSRPGTNRLDSDQSTTNKSVTVSIDDKSMSDLDPR

SEQ ID NO: 84895 - protein, 492 aa, Arabidopsis thaliana
  peptide (1)..(492): Ceres Seq. ID no. 12677713
MNQIAIEAADNPRKFSTIKTELTALQTFYGLVQCTPDLSRQNCMNCLTSSINRMPFSRIGARQFWPSCNSRYELYDFYNETAIGTPPPPLPPLASPSLSDKSGNSNVVVVAVVVPIIVAVLIFIAGYCFFAKRAKKTYGTTPALDEDDKTTIESLQLDYRAIQAATNDFSENNKIGRGGFGDVYKGTFSNGTEVAVKRLSKTSEQGDTEFKNEVVVVANLRHKNLVRILGFSIEREERILVYEYVENKSLDNFLFDPAKKGQLYWTQRYHIIGGIARGILYLHQDSRLTIIHRDLKASNILLDADMNPKIADFGMARIFGMDQTQQNTSRIVGTYGYMSPEYAMRGQFSMKSDVYSFGVLVLEIISGRKNNSFIETDDAQDLVTHAWRLWRNGTALDLVDPFIADSCRKSEVVRCTHIGLLCVQEDPVKRPAMSTISVMLTSNTMALPAPQQPGFFVRSRPGTNRLDSDQSTTNKSVTVSIDDKSMSDLDPR

SEQ ID NO: 84896 - protein, 449 aa, Arabidopsis thaliana
  peptide (1)..(449): Ceres Seq. ID no. 12677714
MNCLTSSINRMPFSRIGARQFWPSCNSRYELYDFYNETAIGTPPPPLPPLASPSLSDKSGNSNVVVVAVVVPIIVAVLIFIAGYCFFAKRAKKTYGTTPALDEDDKTTIESLQLDYRAIQAATNDFSENNKIGRGGFGDVYKGTFSNGTEVAVKRLSKTSEQGDTEFKNEVVVVANLRHKNLVRILGFSIEREERILVYEYVENKSLDNFLFDPAKKGQLYWTQRYHIIGGIARGILYLHQDSRLTIIHRDLKASNILLDADMNPKIADFGMARIFGMDQTQQNTSRIVGTYGYMSPEYAMRGQFSMKSDVYSFGVLVLEIISGRKNNSFIETDDAQDLVTHAWRLWRNGTALDLVDPFIADSCRKSEVVRCTHIGLLCVQEDPVKRPAMSTISVMLTSNTMALPAPQQPGFFVRSRPGTNRLDSDQSTTNKSVTVSIDDKSMSDLDPR

SEQ ID NO: 84897 - DNA, 982 bp, Arabidopsis thaliana
  misc_feature (1)..(982): Ceres Seq. ID no. 12677723
  misc_feature (1)..(982): Ortholog of  Ceres SEQ ID NO 15169372 as cited in SEQ ID NO 58778
atgtggttttttggatcgaaaggagcatctggattctcttctcgttccacagcagaggaagtcacacatggtgttgatgggactggtctcactgccattgtcacaggagcatcaagtggtataggtgtagaaacagctcgtgttcttgcactgcgtggtgtgcatgtggttatggcggtgagaaacactggcgccggtgctaaagttaaggaagatattgtcaagcaagtccctggagctaaagttgatgtcatggagttagaactcagctcaatggaatctgtcaggaaatttgcatctgagtacaaatctgctggtcttccactcaacctcttgatcaacaatgccgggattatggcatgtccttttatgctctctaaggacaacatcgagctgcaattcgcaaccaaccatttaggacattttctgcttaccaaacttctgttagatacaatgaagaacacatcacgtgaaagcaaaagagaaggaaggattgttaacgtatcatcagaagctcatcgttactcgtacccagaaggagtccgctttgataagatcaacgacgagtcaagttacagtagtatacgtgcttatggacaatctaaactctgcaatgtattgcacgccaacgagcttgcaaagcaactgaaggaagatggagtcaatataacagcaaattcacttcatccaggagccattatgacaaatctatggggctacttcaactcctatttggctggagctgttggtgcagtggctaaatatatggtcaagtctgttccgcagggggcggcaacaacttgctatgtggcattgaatccacaggttgcaggagttacaggggaatacttctcagatagcaacattgctaaaccaatagaacttgtcaaagatacagaattggcgaagaagctttgggatttcagcactaagcttactgattcgcaatgatgattaccgttgcagtagatagttgttcagg

SEQ ID NO: 84898 - protein, 316 aa, Arabidopsis thaliana
  peptide (1)..(316): Ceres Seq. ID no. 12677724
MWFFGSKGASGFSSRSTAEEVTHGVDGTGLTAIVTGASSGIGVETARVLALRGVHVVMAVRNTGAGAKVKEDIVKQVPGAKVDVMELELSSMESVRKFASEYKSAGLPLNLLINNAGIMACPFMLSKDNIELQFATNHLGHFLLTKLLLDTMKNTSRESKREGRIVNVSSEAHRYSYPEGVRFDKINDESSYSSIRAYGQSKLCNVLHANELAKQLKEDGVNITANSLHPGAIMTNLWGYFNSYLAGAVGAVAKYMVKSVPQGAATTCYVALNPQVAGVTGEYFSDSNIAKPIELVKDTELAKKLWDFSTKLTDSQ

SEQ ID NO: 84899 - protein, 259 aa, Arabidopsis thaliana
  peptide (1)..(259): Ceres Seq. ID no. 12677725
MAVRNTGAGAKVKEDIVKQVPGAKVDVMELELSSMESVRKFASEYKSAGLPLNLLINNAGIMACPFMLSKDNIELQFATNHLGHFLLTKLLLDTMKNTSRESKREGRIVNVSSEAHRYSYPEGVRFDKINDESSYSSIRAYGQSKLCNVLHANELAKQLKEDGVNITANSLHPGAIMTNLWGYFNSYLAGAVGAVAKYMVKSVPQGAATTCYVALNPQVAGVTGEYFSDSNIAKPIELVKDTELAKKLWDFSTKLTDSQ

SEQ ID NO: 84900 - protein, 232 aa, Arabidopsis thaliana
  peptide (1)..(232): Ceres Seq. ID no. 12677726
MELELSSMESVRKFASEYKSAGLPLNLLINNAGIMACPFMLSKDNIELQFATNHLGHFLLTKLLLDTMKNTSRESKREGRIVNVSSEAHRYSYPEGVRFDKINDESSYSSIRAYGQSKLCNVLHANELAKQLKEDGVNITANSLHPGAIMTNLWGYFNSYLAGAVGAVAKYMVKSVPQGAATTCYVALNPQVAGVTGEYFSDSNIAKPIELVKDTELAKKLWDFSTKLTDSQ

SEQ ID NO: 84901 - DNA, 1324 bp, Arabidopsis thaliana
  misc_feature (1)..(1324): Ceres Seq. ID no. 12677733
  misc_feature (1)..(1324): Ortholog of  Ceres SEQ ID NO 13659033 as cited in SEQ ID NO 66372
  misc_feature (1)..(1324): Ortholog of  Ceres SEQ ID NO 13655724 as cited in SEQ ID NO 68973
atgaagttgaagttgtcatcaatctccatgaatcataagaatgtgcttctcatcaagctcatctccgctattctgatatcttttttcgcgttccgtctcttcattctccactccagcgagttttctccaatctttgcgtcggtcaccggaaaattcgaagctcggtttctgccgccggagattatcgtaccggaaaatgaagatctgattcctcaagatattgaagtagagaagtgtgatcttttcgccggaaaatggatcccagattcagtaggaccaatctacacaaacaaatcatgcggatcactcattgacggtcaccaaaattgtatcaccaatggccggcctgacttagattttctctactggaaatggaaacctcatgactgtttgttaccacgttttgaccctagaagatttcttcaacttatgaggcataaatcttgggcatttattggtgactccatatctcgtaaccacgtcgaatcactgctttgtatgctctctacgattgaagaaccggttgaagtataccatgacatggagtacaaatcaaaacgttggcatttccctttacataaccttactgtatccaacatatggtcgccatttcttgttcaagccgctattttcgaagattctaacggtgtctcgaccgcttctgttcagctacatcttgatagactcgatgagacatggaccagtctcatgcctagcttcgactatgcgatcatctcaaccggtaaatggtttcttaaatccgcaatttaccacgaaaatgcaaaactcgtcggttgccataactgtcaggaaaaacctcacatagaagagttaggattcgactatgcttataacgcatcgctgcataatgtcatggactttctagcagctgaagataacagtaaaggcacggttttctttcggacttcgactcccgatcatttccaaaacggggaatggcatagtggcgggacgtgtaagcaaacagagccggtgagcgatgaggagattgagattaaggatgtacataagatactaaaagatattgagattgatcagttcaagagggcggttagagagaagactaaccaggacggtgggaatctaaagcttttggatttcacccggatgttgctgacccgaccggacggtcatccgggtgagtaccgacagttcaggccgtttgataaagacaaaaatgcaaaggtacagaacgattgtttgcattggtgcttgcctggtccgtttgattacttgaatgatgttatattggagactatagtaaatggctgagaggcacacaaaatgtgattggtacatggcc

SEQ ID NO: 84902 - protein, 430 aa, Arabidopsis thaliana
  peptide (1)..(430): Ceres Seq. ID no. 12677734
MKLKLSSISMNHKNVLLIKLISAILISFFAFRLFILHSSEFSPIFASVTGKFEARFLPPEIIVPENEDLIPQDIEVEKCDLFAGKWIPDSVGPIYTNKSCGSLIDGHQNCITNGRPDLDFLYWKWKPHDCLLPRFDPRRFLQLMRHKSWAFIGDSISRNHVESLLCMLSTIEEPVEVYHDMEYKSKRWHFPLHNLTVSNIWSPFLVQAAIFEDSNGVSTASVQLHLDRLDETWTSLMPSFDYAIISTGKWFLKSAIYHENAKLVGCHNCQEKPHIEELGFDYAYNASLHNVMDFLAAEDNSKGTVFFRTSTPDHFQNGEWHSGGTCKQTEPVSDEEIEIKDVHKILKDIEIDQFKRAVREKTNQDGGNLKLLDFTRMLLTRPDGHPGEYRQFRPFDKDKNAKVQNDCLHWCLPGPFDYLNDVILETIVNG

SEQ ID NO: 84903 - protein, 421 aa, Arabidopsis thaliana; identical to SEQ ID NO: 82848
  peptide (1)..(421): Ceres Seq. ID no. 12677735

SEQ ID NO: 84904 - protein, 287 aa, Arabidopsis thaliana; identical to SEQ ID NO: 82849
  peptide (1)..(287): Ceres Seq. ID no. 12677736

SEQ ID NO: 84905 - DNA, 1720 bp, Arabidopsis thaliana
  misc_feature (1)..(1720): Ceres Seq. ID no. 12677749
  misc_feature (1)..(1720): Ortholog of  Ceres SEQ ID NO 13659971 as cited in SEQ ID NO 67565
ctctctcgattgactttattgactgagagaaagcttttgacaatgggccacagacacagcaagtccaaatcctccgatccgccaccgtcctcctcctcctcttcctccggcaacgtagtccaccatgttaaacctgccggagaacgccgcggatcatccggttccggaaccgtcggatcgtcaggctccggaacaggcggatctcgttccaccacatctactcagcagaatggtcggatcttaggtcggccgatggaggaagtacggagaacctatgagtttggtcgtgagcttggtcgtggccagtttggtgtcacgtacctcgtaactcacaaagagacgaaacaacaggtcgcttgcaagtcaatccctacgcgccgccttgttcacaaagacgacattgaagatgttcgccgtgaagtccagattatgcaccatctcagcggtcaccggaacatagtggacttgaagggagcctacgaggacagacactctgtgaatctgataatggagttgtgtgaaggaggggaattgttcgataggatcatttctaaaggtctttactcagagagagctgctgcggatttgtgtaggcagatggtgatggttgtgcatagttgtcattctatgggtgtaatgcaccgagacttgaagcccgaaaactttctctttcttagtaaagatgagaactcaccattgaaagctacagactttggtctctctgtcttcttcaagccaggtgataagtttaaggatcttgttggaagtgcatactatgttgccccagaagttctaaaacggaactatggaccagaggctgatatctggagtgctggtgtgattctatacatccttctcagtggtgttccgcctttctggggagaaaatgaaacggggatctttgatgccattcttcaagggcaacttgatttttcagctgatccatggccagcactatcagatggtgccaaagatcttgtgaggaaaatgttaaaatatgaccctaaagatcggcttacagctgcggaagtgctaaatcatccgtggattagagaagatggggaggcatcagacaaaccgcttgacaatgcggtgttatccaggatgaaacaattccgggcgatgaacaaactaaaaaaaatggccctgaaggttatcgctgagaacctttctgaagaagaaatcattggtcttaaagagatgttcaaatctctagacactgataacaatggaatagtcaccttggaggaattgagaaccggtctcccaaaacttggttcaaagatctctgaagctgaaataaggcagttaatggaagcagctgatatggatggagatggatcaattgattacttggagtttatatcagccacaatgcatatgaacagaatcgaacgtgaggatcacttgtacaccgcattccagttctttgacaatgacaacagcggctacataacaatggaagagctagagctagccatgaagaaatacaacatgggtgatgataaatccatcaaagagatcattgctgaagtagacaccgatcgtgacggaaaaatcaactacgaagaatttgtagcgatgatgaagaagggaaatccagaattggtgccaaaccgacgcagaatgtgagagatcttttgatgttgtttgtttgtttttggttatcactttactcaaactttgtgtttctgttacaatcaattattttgtttcctgc

SEQ ID NO: 84906 - protein, 543 aa, Arabidopsis thaliana; identical to SEQ ID NO: 23895
  peptide (1)..(543): Ceres Seq. ID no. 12677750

SEQ ID NO: 84907 - protein, 529 aa, Arabidopsis thaliana; identical to SEQ ID NO: 23896
  peptide (1)..(529): Ceres Seq. ID no. 12677751

SEQ ID NO: 84908 - protein, 459 aa, Arabidopsis thaliana; identical to SEQ ID NO: 23897
  peptide (1)..(459): Ceres Seq. ID no. 12677752

SEQ ID NO: 84909 - DNA, 1392 bp, Arabidopsis thaliana
  misc_feature (1)..(1392): Ceres Seq. ID no. 12677814
  misc_feature (1)..(1392): Ortholog of  Ceres SEQ ID NO 13662654 as cited in SEQ ID NO 66150
aaatgtcaaaaacgtaaaagttccattgtggccattaacgtgcgttctcgccatcctcgtatatcgctaatgaaatctaaaccaataaaaaaacttcaatcttttttttcttcacaattatcgatccaaatcaagattttcttgatttgaattccttgcgatgaaactccttccgaatccatcactaaccttgttccctttcttcactccctatacttcaaagcatattttcagacccatcaaagtctccgtctccgttcaaactcctccgccggatttcgatttccgcaacgacatcgcgtcggaatcacgcgccgcaatcgcgaaaacttacccggagttgcttgacctcgctgataacgggactctgattcttctccagaaacagagtttcggtcctgttccagcttggcgcaaagagttcgttgagccggaagcgatttggcttgtgggcacttctcatatctcgccggaatctgcttccatcgttgaacgcgtcgtccgtactgtgaagcctgataatgtcgccgttgaactctgtcgtagcagagctgggattatgtacacttcaagtgttggaggagaggttgaccaaaacttaaaatccggagagttgtcgttgaccgggactggctttctcggtgctgttggccggagtttagacttgggagggcaaactgcgttggcattgcgacttctattggcggttttctcttctaagttatcttctgttgctgaccgccctttcggggatgagtttcgtgctgctcggaaagcatctgaggaagttggtgcgcagctggttcttggagatcgacccatcgaaataactctccaaagggcttggaactctttgaaatggggagagaagtttaatctggtgatggctgtgactcgggtaatcacatcgtcatcgggtatatccgcagcggagcttaaggaacaagagaccgatgaaaacagtggaagtttgcagctttacgaacggctaagtttctcatacccggcactcctaatgcctcttatacacgaaagagatacctatcttgcttggtcattgaagagaagtaaggcagtgaatgggtgtaaaacagtggtgggagtgatcgggaaaggacacatgaatggtgtcatctacgcgttggtgtcagactctggggatctccggtttagagatttggtgggaagaggagattcatataatggtggtactggtactacatcgaacggttggattcaaaaggttttaaagagcttcgtaagagacacaattatagggttcttgctatgggagttatatgaacagtatctgatgatgaatcaaaacctttcatgatataactaaaaaaacaagttgttgcatatttaaaaaggaaactggaaaaagaatct

SEQ ID NO: 84910 - protein, 391 aa, Arabidopsis thaliana
  peptide (1)..(391): Ceres Seq. ID no. 12677815
MKLLPNPSLTLFPFFTPYTSKHIFRPIKVSVSVQTPPPDFDFRNDIASESRAAIAKTYPELLDLADNGTLILLQKQSFGPVPAWRKEFVEPEAIWLVGTSHISPESASIVERVVRTVKPDNVAVELCRSRAGIMYTSSVGGEVDQNLKSGELSLTGTGFLGAVGRSLDLGGQTALALRLLLAVFSSKLSSVADRPFGDEFRAARKASEEVGAQLVLGDRPIEITLQRAWNSLKWGEKFNLVMAVTRVITSSSGISAAELKEQETDENSGSLQLYERLSFSYPALLMPLIHERDTYLAWSLKRSKAVNGCKTVVGVIGKGHMNGVIYALVSDSGDLRFRDLVGRGDSYNGGTGTTSNGWIQKVLKSFVRDTIIGFLLWELYEQYLMMNQNLS

SEQ ID NO: 84911 - protein, 258 aa, Arabidopsis thaliana
  peptide (1)..(258): Ceres Seq. ID no. 12677816
MYTSSVGGEVDQNLKSGELSLTGTGFLGAVGRSLDLGGQTALALRLLLAVFSSKLSSVADRPFGDEFRAARKASEEVGAQLVLGDRPIEITLQRAWNSLKWGEKFNLVMAVTRVITSSSGISAAELKEQETDENSGSLQLYERLSFSYPALLMPLIHERDTYLAWSLKRSKAVNGCKTVVGVIGKGHMNGVIYALVSDSGDLRFRDLVGRGDSYNGGTGTTSNGWIQKVLKSFVRDTIIGFLLWELYEQYLMMNQNLS

SEQ ID NO: 84912 - DNA, 1274 bp, Arabidopsis thaliana
  misc_feature (1)..(1274): Ceres Seq. ID no. 12677875
  misc_feature (1)..(1274): Ortholog of  Ceres SEQ ID NO 14316124 as cited in SEQ ID NO 50904
  misc_feature (1)..(1274): Ortholog of  Ceres SEQ ID NO 13585382 as cited in SEQ ID NO 63889
atgtattcttctccttgtccttccttactctctatatttttctcaattctccgatttgatccaacgatttcacagatctctgatctaaatggcatccaacggtgataaaggactgatcgttagcttcggcgagatgctaatcgatttcgtccctaccgaatcaggcgtctctctcgccgaagctcctggattcctcaaagctccaggcggtgctcccgctaacgtcgcaatcgctgtttctcgtctcggtggacgatctgctttcgtcggaaaacttggagacgacgagttcggtcatatgttggctgggattttgaggaagaacggtgttgatgatcaggggattaacttcgatactggagctagaactgctttagctttcgttacgttacgtgctgatggagatcgtgagtttatgttttaccgcaatcctagcgccgatatgcttcttcgtcctgatgaactcaatctcgacctcatcagatccgcgaaagtgtttcactatggatcaataagtttgatagtggagccgtgtaggtcagctcatttgaaggccatggaagtggcgaaagaagcaggagctcttctttcctatgacccaaacctcagggagcctctgtggccatcaaaagaagaagccaaaacacagatcatgagcatttgggacaaagctgagatcatcaaggtgagcgatgttgagcttgagtttctaactggaagcaacaagattgatgatgagaccgcgttgaccttgtggcatcccaacttgaagctgttgttagtcactcttggtgaaaagggctgtcggtattacaccaagactttcaaaggagccgttgaccctttccatgtgaacgctgtggacacaaccggagctggagattcctttgtcggtgctcttctaaaccagattgtcgatgatcgatccgttctcgaggacgaagagagattgaggaaagtgctgagattcgcaaatgcttgtggagcaatcacaacgaccaaaaaaggagccattccagctcttccctcagatgctgaagttcggagctttctcgaaaagaaatagaaacaaaacaactcaagcttctattacgtaatctgtttccgcgattatcttctctttttgtattcttgttttcggatggttgaatcgagaagagaaacaaattcggcattccgctctgtttttgtttctcttcttcaaatgtaatgatttagaaaagacgtatgttgcaatttaaggcttcacttgctaataaaatgataaggttttt

SEQ ID NO: 84913 - protein, 325 aa, Arabidopsis thaliana; identical to SEQ ID NO: 30388
  peptide (1)..(325): Ceres Seq. ID no. 12677876

SEQ ID NO: 84914 - protein, 310 aa, Arabidopsis thaliana; identical to SEQ ID NO: 30389
  peptide (1)..(310): Ceres Seq. ID no. 12677877

SEQ ID NO: 84915 - protein, 255 aa, Arabidopsis thaliana; identical to SEQ ID NO: 30390
  peptide (1)..(255): Ceres Seq. ID no. 12677878

SEQ ID NO: 84916 - DNA, 1365 bp, Arabidopsis thaliana
  misc_feature (1)..(1365): Ceres Seq. ID no. 12677899
  misc_feature (1)..(1365): Ortholog of  Ceres SEQ ID NO 12581709 as cited in SEQ ID NO 54052
  misc_feature (1)..(1365): Ortholog of  Ceres SEQ ID NO 13662854 as cited in SEQ ID NO 64786
atacgaggaaccataatgatttcatcgtcagagatgatggcgacggagaaggctccggaatttgtaacagccatggcaactgaaactgaacggatagggaattcgagggaagtagatgaggagaaaataagccgcaagaagaatcctgaagaagaagctcttgaagctaaatgtcttcccggaatcatcagtgcttatctcaattatcccaaggctgcggaagaaaatctgaaaaaatgcgaaagatcatatcagaagctgtctcctgcgcacaaggcattggtaacccatttccctatgaagttgcagagattaagaaggtgtatattgatgaattcacatttcatatataatatgcttcaggcttttgagccccctatagacttgagtaaacacatgcgcgagccaataacaggagcactgtctatggaggagctccaaagggaggaacatcatcatgatcattccctcaagaatgcagagataagactcaataacaagacatgtgaatttgatggaggccacttaaatcatgaccatggcagtgcgcatgttcctctggttgatgtaaataaggttcgttgggtaataaggaatatagttcgagactggggagcagagggtcagagagaacgagatgaatgctacaagcctatccttgaagagcttgattccttgtttcctgatcgtcacaaggagagcactcgtccagcctgtttagtccctggtgctggacttgggcggctggcccttgaaatttcttgtctaggtttcagaagccaaggcaatgaagtttcatactacatgatgttatgctcaagttttattcttaattatacacaattgcctggtgagtggacaatatacccctggatacacactaactgcaattcactctcggatgatgatcaactacgccctatttctattcctgatattcatcctgcaagtgcaggagtaacagaaagtttctcaatgtgtcgtggtgattttgttgaagtattcaatgaatcaagtcaagcaggaatgtgggatgcagttgtgacttgctttttcattgacacggctcataacatcatcgagtacatcgaaaccatatccaagattttaaaggatggaggagttttgataaatctaggacctctgttgtatcactttgcagacgagcagggccttgaaaatgaaatgtcgattgagctaagtttggaggatgtaaagagagttgcttcacattatgggtttgagatggagaaagaaaaaacaatagaaacaacgtactctacaaacccccggtctatgatgaagaaccgatactatcctgtcttctggacaatgaggaagaagtgtgctataacaacaacttaa

SEQ ID NO: 84917 - protein, 454 aa, Arabidopsis thaliana
  peptide (1)..(454): Ceres Seq. ID no. 12677900
IRGTIMISSSEMMATEKAPEFVTAMATETERIGNSREVDEEKISRKKNPEEEALEAKCLPGIISAYLNYPKAAEENLKKCERSYQKLSPAHKALVTHFPMKLQRLRRCILMNSHFIYNMLQAFEPPIDLSKHMREPITGALSMEELQREEHHHDHSLKNAEIRLNNKTCEFDGGHLNHDHGSAHVPLVDVNKVRWVIRNIVRDWGAEGQRERDECYKPILEELDSLFPDRHKESTRPACLVPGAGLGRLALEISCLGFRSQGNEVSYYMMLCSSFILNYTQLPGEWTIYPWIHTNCNSLSDDDQLRPISIPDIHPASAGVTESFSMCRGDFVEVFNESSQAGMWDAVVTCFFIDTAHNIIEYIETISKILKDGGVLINLGPLLYHFADEQGLENEMSIELSLEDVKRVASHYGFEMEKEKTIETTYSTNPRSMMKNRYYPVFWTMRKKCAITTT

SEQ ID NO: 84918 - protein, 449 aa, Arabidopsis thaliana
  peptide (1)..(449): Ceres Seq. ID no. 12677901
MISSSEMMATEKAPEFVTAMATETERIGNSREVDEEKISRKKNPEEEALEAKCLPGIISAYLNYPKAAEENLKKCERSYQKLSPAHKALVTHFPMKLQRLRRCILMNSHFIYNMLQAFEPPIDLSKHMREPITGALSMEELQREEHHHDHSLKNAEIRLNNKTCEFDGGHLNHDHGSAHVPLVDVNKVRWVIRNIVRDWGAEGQRERDECYKPILEELDSLFPDRHKESTRPACLVPGAGLGRLALEISCLGFRSQGNEVSYYMMLCSSFILNYTQLPGEWTIYPWIHTNCNSLSDDDQLRPISIPDIHPASAGVTESFSMCRGDFVEVFNESSQAGMWDAVVTCFFIDTAHNIIEYIETISKILKDGGVLINLGPLLYHFADEQGLENEMSIELSLEDVKRVASHYGFEMEKEKTIETTYSTNPRSMMKNRYYPVFWTMRKKCAITTT

SEQ ID NO: 84919 - protein, 443 aa, Arabidopsis thaliana
  peptide (1)..(443): Ceres Seq. ID no. 12677902
MMATEKAPEFVTAMATETERIGNSREVDEEKISRKKNPEEEALEAKCLPGIISAYLNYPKAAEENLKKCERSYQKLSPAHKALVTHFPMKLQRLRRCILMNSHFIYNMLQAFEPPIDLSKHMREPITGALSMEELQREEHHHDHSLKNAEIRLNNKTCEFDGGHLNHDHGSAHVPLVDVNKVRWVIRNIVRDWGAEGQRERDECYKPILEELDSLFPDRHKESTRPACLVPGAGLGRLALEISCLGFRSQGNEVSYYMMLCSSFILNYTQLPGEWTIYPWIHTNCNSLSDDDQLRPISIPDIHPASAGVTESFSMCRGDFVEVFNESSQAGMWDAVVTCFFIDTAHNIIEYIETISKILKDGGVLINLGPLLYHFADEQGLENEMSIELSLEDVKRVASHYGFEMEKEKTIETTYSTNPRSMMKNRYYPVFWTMRKKCAITTT

SEQ ID NO: 84920 - DNA, 2384 bp, Arabidopsis thaliana
  misc_feature (1)..(2384): Ceres Seq. ID no. 12677907
  misc_feature (1)..(2384): Ortholog of  Ceres SEQ ID NO 13658778 as cited in SEQ ID NO 66511
accctatataaacatatccaaaaaccgcaagaaagctcacaagaaatctcctcccatggcagattcaagttcttctctccctcctctttgcgagaagatctcatacaaaaactattttctaagagttgtggatctcacgattctaggctttctcttttctcttctcttgtaccgaattctacttatgaaccaaaacaactccgtttgggttgtggctttcctctgtgaatcctttttctctttcatatggcttcttattaccagcataaaatggagtcctgcttcatataaatcatatcctgaaagacttgatgaaagggttcatgaccttccatcggtagatatgtttgtgactactgcggatcctgttcgggagccgccgattcttgtagcaaacacgttgctttcgctgttagcagtgaattatccagcgaataaacttgcttgttatgtatcggatgatggatgctcacctctcacttacttctctctcaaggaagcttctaagttcgccaagatttgggttcccttctgcaaaaaatataacattaaagttagagctccttttagatattttttgaaccctccagccgcaacagaaagttctgaattcagtaaagactgggaaataaccaagagggagtacgagaaattaagcaggagggtggaagatgccactggagattcccattggttggatgcagaagatgactttgaagatttctcgaatacaaaaccaaatgatcattcaactatagtaaaggtggtatgggagaacaagggaggtgtcggagtcgagaacgaggttcctcattttgtatacatttcaagagagaaaagaccaaattatcttcatcattacaaagctggagccatgaactttctggtaagagtgtcagggttgatgacaaatgcaccatacatgttgaacgtagactgtgacatgtatgctaatgaagcagatgtggtgcgccaagcaatgtgtatatttctacaaaaatcaatgaattcaaaccattgtgcttttgttcaattccctcaagagttctatgattctaacgccgacgaactcaccgtcttacaatcatatttgggacgaggaattgcgggaatccaaggacctacatatgcaggttcaggatgcttccacactagaagagttatgtacggtctatcaatagatgatttagaagatgatggaagtctttcttcacttgcaacaaggaagtatttggctgaagagaatttagctagagaatttgggaactctaacgagatggtgacatcggtggtcgaggcattacaaagaaaaccaaatccgcaaaatacccttgcaaactccctcgaagcggctcaagaagtgggacattgtcattttgagtaccaaactagctggggcaaaactattggttggttatacgaatcaacagcggaagatgcaaacacgagtatcggaatccattcgagagggtggactagctcatatatatctccgaaaccaccagcgtttcttggggctatgccaccgggaggtccggaagcgatgctccagcagcggcgatgggccacaggactgctcgaagtccttttcaacaaacaaagtccgttgatcggaatgttttgtaggaaaataagatttcgacaaagcttggcttatttatacattttcacttggggtctaaggtcaatccctgagcttatttattgtctcttgcctgcttattgcctactccacaacgctgccttatttcccaagggagtttatttaggtatagtcgtcacacttgtgggaatgcattgtctttactctctatgggaatttatgagccttggtttctcagtacaatcgtggtttgcctcccaatcattttggaggataaaaaccacttgcagttggttatttagcatccctgatatcatactcaagctacttggaatctcgaaaactgttttcatagtcactaaaaagactatgcccaagacaatgtcaggatctggatccgaaaaatctcaacgagaagttgattgtccaaaccaagattccggtaaatttgaatttgatggctcgctttatttcttgcctggcacatttatccttttagtgaatctagccgctctagccggttgttcggtgggtctacaacgtcacagaggaggtggttcgggtttagcagaagcttgtggatgtattttggtggttatattgtttcttccatttctaaagggtatgtttgagaagggaaaatatggtatcccatggtctactctttctaaagctgcctttttagcagttttatttgttgttttctctgtgggaaactagtatactgatatggctttaatttgtagctaaaaactgctaatatgaaaataattattctcta

SEQ ID NO: 84921 - protein, 773 aa, Arabidopsis thaliana
  peptide (1)..(773): Ceres Seq. ID no. 12677908
PYINISKNRKKAHKKSPPMADSSSSLPPLCEKISYKNYFLRVVDLTILGFLFSLLLYRILLMNQNNSVWVVAFLCESFFSFIWLLITSIKWSPASYKSYPERLDERVHDLPSVDMFVTTADPVREPPILVANTLLSLLAVNYPANKLACYVSDDGCSPLTYFSLKEASKFAKIWVPFCKKYNIKVRAPFRYFLNPPAATESSEFSKDWEITKREYEKLSRRVEDATGDSHWLDAEDDFEDFSNTKPNDHSTIVKVVWENKGGVGVENEVPHFVYISREKRPNYLHHYKAGAMNFLVRVSGLMTNAPYMLNVDCDMYANEADVVRQAMCIFLQKSMNSNHCAFVQFPQEFYDSNADELTVLQSYLGRGIAGIQGPTYAGSGCFHTRRVMYGLSIDDLEDDGSLSSLATRKYLAEENLAREFGNSNEMVTSVVEALQRKPNPQNTLANSLEAAQEVGHCHFEYQTSWGKTIGWLYESTAEDANTSIGIHSRGWTSSYISPKPPAFLGAMPPGGPEAMLQQRRWATGLLEVLFNKQSPLIGMFCRKIRFRQSLAYLYIFTWGLRSIPELIYCLLPAYCLLHNAALFPKGVYLGIVVTLVGMHCLYSLWEFMSLGFSVQSWFASQSFWRIKTTCSWLFSIPDIILKLLGISKTVFIVTKKTMPKTMSGSGSEKSQREVDCPNQDSGKFEFDGSLYFLPGTFILLVNLAALAGCSVGLQRHRGGGSGLAEACGCILVVILFLPFLKGMFEKGKYGIPWSTLSKAAFLAVLFVVFSVGN

SEQ ID NO: 84922 - protein, 755 aa, Arabidopsis thaliana
  peptide (1)..(755): Ceres Seq. ID no. 12677909
MADSSSSLPPLCEKISYKNYFLRVVDLTILGFLFSLLLYRILLMNQNNSVWVVAFLCESFFSFIWLLITSIKWSPASYKSYPERLDERVHDLPSVDMFVTTADPVREPPILVANTLLSLLAVNYPANKLACYVSDDGCSPLTYFSLKEASKFAKIWVPFCKKYNIKVRAPFRYFLNPPAATESSEFSKDWEITKREYEKLSRRVEDATGDSHWLDAEDDFEDFSNTKPNDHSTIVKVVWENKGGVGVENEVPHFVYISREKRPNYLHHYKAGAMNFLVRVSGLMTNAPYMLNVDCDMYANEADVVRQAMCIFLQKSMNSNHCAFVQFPQEFYDSNADELTVLQSYLGRGIAGIQGPTYAGSGCFHTRRVMYGLSIDDLEDDGSLSSLATRKYLAEENLAREFGNSNEMVTSVVEALQRKPNPQNTLANSLEAAQEVGHCHFEYQTSWGKTIGWLYESTAEDANTSIGIHSRGWTSSYISPKPPAFLGAMPPGGPEAMLQQRRWATGLLEVLFNKQSPLIGMFCRKIRFRQSLAYLYIFTWGLRSIPELIYCLLPAYCLLHNAALFPKGVYLGIVVTLVGMHCLYSLWEFMSLGFSVQSWFASQSFWRIKTTCSWLFSIPDIILKLLGISKTVFIVTKKTMPKTMSGSGSEKSQREVDCPNQDSGKFEFDGSLYFLPGTFILLVNLAALAGCSVGLQRHRGGGSGLAEACGCILVVILFLPFLKGMFEKGKYGIPWSTLSKAAFLAVLFVVFSVGN

SEQ ID NO: 84923 - protein, 712 aa, Arabidopsis thaliana
  peptide (1)..(712): Ceres Seq. ID no. 12677910
MNQNNSVWVVAFLCESFFSFIWLLITSIKWSPASYKSYPERLDERVHDLPSVDMFVTTADPVREPPILVANTLLSLLAVNYPANKLACYVSDDGCSPLTYFSLKEASKFAKIWVPFCKKYNIKVRAPFRYFLNPPAATESSEFSKDWEITKREYEKLSRRVEDATGDSHWLDAEDDFEDFSNTKPNDHSTIVKVVWENKGGVGVENEVPHFVYISREKRPNYLHHYKAGAMNFLVRVSGLMTNAPYMLNVDCDMYANEADVVRQAMCIFLQKSMNSNHCAFVQFPQEFYDSNADELTVLQSYLGRGIAGIQGPTYAGSGCFHTRRVMYGLSIDDLEDDGSLSSLATRKYLAEENLAREFGNSNEMVTSVVEALQRKPNPQNTLANSLEAAQEVGHCHFEYQTSWGKTIGWLYESTAEDANTSIGIHSRGWTSSYISPKPPAFLGAMPPGGPEAMLQQRRWATGLLEVLFNKQSPLIGMFCRKIRFRQSLAYLYIFTWGLRSIPELIYCLLPAYCLLHNAALFPKGVYLGIVVTLVGMHCLYSLWEFMSLGFSVQSWFASQSFWRIKTTCSWLFSIPDIILKLLGISKTVFIVTKKTMPKTMSGSGSEKSQREVDCPNQDSGKFEFDGSLYFLPGTFILLVNLAALAGCSVGLQRHRGGGSGLAEACGCILVVILFLPFLKGMFEKGKYGIPWSTLSKAAFLAVLFVVFSVGN

SEQ ID NO: 84924 - DNA, 627 bp, Arabidopsis thaliana
  misc_feature (1)..(627): Ceres Seq. ID no. 12677923
  misc_feature (1)..(627): Ortholog of  Ceres SEQ ID NO 14307526 as cited in SEQ ID NO 58875
tctctctcgaatctctctctataatccgatctgagaaatttcgccggagctaggttttgttgtttaccgatcaatcctttaacttgactcatatgagattgaaggtggggaaacaaagggagaaatattgcagaatctggccgagttccaattctcttgtgtgatgttcaatgcggttctggagaatgcatgtagtgagatgggagcaagaatgtctgccatggacagctcaagcagaaacgcaggagaaatgctcgaccgtctcaccctcacatacaacaggactcgtcaagcttctattacaacagagcttattgagattatctctggagcttctgctcttgaagctgctaaataagcccatccgtgttagttctcttttcttcgctttgatatttacccccaccttgaaggagaagagtgtgttaaaattttactgaatcagtttcctttgctggcttcttgttgagacctaccaatgtttgctcaacgatttttaataaacatacctgtaatttccagcaggatttcgaataattgcattaacattttgttctgattcagactcgcttcctccagagtctgtagtgttgttttgtgcaaacaccatgtactccggtttatttg

SEQ ID NO: 84925 - protein, 89 aa, Arabidopsis thaliana
  peptide (1)..(89): Ceres Seq. ID no. 12677924
MRFWRMHVVRWEQECLPWTAQAETQEKCSTVSPSHTTGLVKLLLQQSLLRLSLELLLLKLLNKPIRVSSLFFALIFTPTLKEKSVLKFY

SEQ ID NO: 84926 - protein, 84 aa, Arabidopsis thaliana
  peptide (1)..(84): Ceres Seq. ID no. 12677925
MHVVRWEQECLPWTAQAETQEKCSTVSPSHTTGLVKLLLQQSLLRLSLELLLLKLLNKPIRVSSLFFALIFTPTLKEKSVLKFY

SEQ ID NO: 84927 - protein, 64 aa, Arabidopsis thaliana; identical to SEQ ID NO: 43383
  peptide (1)..(64): Ceres Seq. ID no. 12677926

SEQ ID NO: 84928 - DNA, 2971 bp, Arabidopsis thaliana
  misc_feature (1)..(2971): Ceres Seq. ID no. 12677927
  misc_feature (1)..(2971): Ortholog of  Ceres SEQ ID NO 13600595 as cited in SEQ ID NO 629
  misc_feature (1)..(2971): Ortholog of  Ceres SEQ ID NO 13593379 as cited in SEQ ID NO 20573
ttttacttcaatggcagagtcaattcgaactttttcgcttcaatggcggatactgtcactgatcatcgctttacttgtgtactttccgattctgtcgggaagttactttaaaccgttcaatgtgagctacgatcaccgggctttaatcatcgccggcaagaggcgcatgctcgtctcagctggaattcactaccctcgagccactcctgagatgtggtctgatctcatcgcaaagagtaaagaaggtggagctgatgtggttcaaacttatgtgttttggaatgggcacgagcctgtaaagggtcagtataactttgaaggaagatatgaccttgtcaaatttgtgaagcttattggatcaagtggtctttatctccatctacggataggtccttatgtttgtgctgagtggaactttggggggttcccagtgtggctgcgggatattcctggcattgagtttcgaacagataatgaaccttttaagaaagagatgcaaaagtttgtaacaaagattgtggatttgatgcgagaagcaaagctcttctgttggcaaggaggtcccataatcatgctgcagatcgagaatgaatatggggatgttgaaaaatcttacgggcagaagggaaaggattacgtcaaatgggcagctagcatggctctagggcttggtgctggagttccgtgggttatgtgcaaacaaacggacgctccagagaatattattgatgcatgcaatggatactattgtgatggttttaaaccaaattcgcggacgaagccagtactttggacagaggattgggatggatggctgactttttgaaggtacacgaagtggggtggaagtttgcctcaccgacctgctgaagatcttgcatttgcagttgcaagattttatcagcgtggaggaagctttcaaaattattatatgtattttggtggaacaaactttggtcgaacttctggtggtcctttctacattacaagctatgattatgatgctcctcttgatgaatatggtctgaggagcgagccaaaatgggggcatctaaaggaccttcatgctgccataaaactttgtgaacctgctcttgtcgcggcggatgcacctcaatatagaaaattgggatcaaagcaggaggcacacatttatcatggagatggtgagactggaggaaaggtgtgcgctgcatttctcgcaaacattgatgagcataaatctgcacatgtgaaatttaatggccagtcatatactttaccaccttggtcagtgagtatattgccagactgtcgacatgtggccttcaacactgccaaggtaggagcacaaacttctgttaaaacggttgagtctgcaaggccatctttaggtagtatgtctatactgcaaaaagtcgtgaggcaggataatgtttcttatatctcaaaatcatggatggctctgaaagaacctattggcatatggggtgaaaacaatttcactttccaaggattattggagcatttgaatgttacaaaagaccggtctgattacctgtggcataagacaagaataagcgtatctgaagatgatatctcgttctggaagaaaaatggacctaactcaacagtgtcgattgatagcatgagggatgtgttacgtgtgtttgttaacaaacaactcgcaggcagtattgttggtcactgggtgaaggcagtgcagcctgtacgatttatacagggaaacaatgatttacttctgttgactcaaacagttggtttacagaattatggtgctttcttggagaaggatggagccggttttagaggcaaagctaagcttactggattcaagaatggagatttagacctgtcaaaatcgtcatggacgtatcaggtgggattgaagggcgaggctgataaaatatatactgttgaacacaatgaaaaagctgagtggagtactttggagaccgatgcttcaccttcgatcttcatgtggtacaagacatactttgaccccccggccggaacagatcctgttgttcttaatctggaaagtatgggaagggggcaagcttgggtcaatggacaacatattggaaggtattggaatatcatttcccaaaaggatggatgtgacagaacctgtgattatcgtggagcctacaattcagataagtgcacaacaaattgtggaaagcctacacaaaccaggtaccatgtaccgcgttcgtggttaaagccgtcaagtaatctacttgtgctctttgaagagactgggggaaacccatttaagatatcggttaagacagttactgctgggattctgtgcggtcaagtctcggaatcgcattatccacctctgcggaaatggtccacaccagattacataaacggaacaatgtcgataaacagtgtggcaccagaagtgcatctgcattgtgaagatggacatgtcatatcctccatagaatttgctagctatgggactccaagaggtagctgcgacgggttttctatcgggaaatgtcatgcatccaactcattatcaatcgtctctgaggcttgtaaaggacgcaacagctgcttcatcgaggtatcaaatactgcttttatcagtgacccatgtagcggaactttaaagactttagcggttatgtcacgatgttccccgtctcaaaacatgagtgacctcagtttttagacaccaggaagcggctcagaacgatgaacagctgtttctctaagaaacaagagaccattgatattgattaaagaagtgtatgtcccatcacaagctttctttgacctttatatttcaaagtctgaactctgaacaattgtgtttgctcttgttcattggtgtatccaaactctacctggaaccaattaacagactcaaaaccatctctaaggtttcttaccgtatgtaatgatttagatctcagtggttttaaatgcaaataatatttatgtttatccttgc

SEQ ID NO: 84929 - protein, 585 aa, Arabidopsis thaliana
  peptide (1)..(585): Ceres Seq. ID no. 12677928
MYFGGTNFGRTSGGPFYITSYDYDAPLDEYGLRSEPKWGHLKDLHAAIKLCEPALVAADAPQYRKLGSKQEAHIYHGDGETGGKVCAAFLANIDEHKSAHVKFNGQSYTLPPWSVSILPDCRHVAFNTAKVGAQTSVKTVESARPSLGSMSILQKVVRQDNVSYISKSWMALKEPIGIWGENNFTFQGLLEHLNVTKDRSDYLWHKTRISVSEDDISFWKKNGPNSTVSIDSMRDVLRVFVNKQLAGSIVGHWVKAVQPVRFIQGNNDLLLLTQTVGLQNYGAFLEKDGAGFRGKAKLTGFKNGDLDLSKSSWTYQVGLKGEADKIYTVEHNEKAEWSTLETDASPSIFMWYKTYFDPPAGTDPVVLNLESMGRGQAWVNGQHIGRYWNIISQKDGCDRTCDYRGAYNSDKCTTNCGKPTQTRYHVPRSWLKPSSNLLVLFEETGGNPFKISVKTVTAGILCGQVSESHYPPLRKWSTPDYINGTMSINSVAPEVHLHCEDGHVISSIEFASYGTPRGSCDGFSIGKCHASNSLSIVSEACKGRNSCFIEVSNTAFISDPCSGTLKTLAVMSRCSPSQNMSDLSF

SEQ ID NO: 84930 - protein, 436 aa, Arabidopsis thaliana
  peptide (1)..(436): Ceres Seq. ID no. 12677929
MSILQKVVRQDNVSYISKSWMALKEPIGIWGENNFTFQGLLEHLNVTKDRSDYLWHKTRISVSEDDISFWKKNGPNSTVSIDSMRDVLRVFVNKQLAGSIVGHWVKAVQPVRFIQGNNDLLLLTQTVGLQNYGAFLEKDGAGFRGKAKLTGFKNGDLDLSKSSWTYQVGLKGEADKIYTVEHNEKAEWSTLETDASPSIFMWYKTYFDPPAGTDPVVLNLESMGRGQAWVNGQHIGRYWNIISQKDGCDRTCDYRGAYNSDKCTTNCGKPTQTRYHVPRSWLKPSSNLLVLFEETGGNPFKISVKTVTAGILCGQVSESHYPPLRKWSTPDYINGTMSINSVAPEVHLHCEDGHVISSIEFASYGTPRGSCDGFSIGKCHASNSLSIVSEACKGRNSCFIEVSNTAFISDPCSGTLKTLAVMSRCSPSQNMSDLSF

SEQ ID NO: 84931 - protein, 416 aa, Arabidopsis thaliana
  peptide (1)..(416): Ceres Seq. ID no. 12677930
MALKEPIGIWGENNFTFQGLLEHLNVTKDRSDYLWHKTRISVSEDDISFWKKNGPNSTVSIDSMRDVLRVFVNKQLAGSIVGHWVKAVQPVRFIQGNNDLLLLTQTVGLQNYGAFLEKDGAGFRGKAKLTGFKNGDLDLSKSSWTYQVGLKGEADKIYTVEHNEKAEWSTLETDASPSIFMWYKTYFDPPAGTDPVVLNLESMGRGQAWVNGQHIGRYWNIISQKDGCDRTCDYRGAYNSDKCTTNCGKPTQTRYHVPRSWLKPSSNLLVLFEETGGNPFKISVKTVTAGILCGQVSESHYPPLRKWSTPDYINGTMSINSVAPEVHLHCEDGHVISSIEFASYGTPRGSCDGFSIGKCHASNSLSIVSEACKGRNSCFIEVSNTAFISDPCSGTLKTLAVMSRCSPSQNMSDLSF

SEQ ID NO: 84932 - DNA, 671 bp, Arabidopsis thaliana
  misc_feature (1)..(671): Ceres Seq. ID no. 12677931
  misc_feature (1)..(671): Ortholog of  Ceres SEQ ID NO 14307526 as cited in SEQ ID NO 58875
gtgtagactgagaaataaagaagcccttgattttgcccattgcagtcatctctctcgaatctctctctataatccgatctgagaaatttcgccggagctaggttttgttgtttaccgatcaatcctttaatcaatggcaatggctgttttccgtcgcgaagggaggcgtctcctcccttcaatcgccgctcgcccaatcgctgctatccgatctcctctctcttctgaccaggaggaaggacttcttggagttcgatctatctcaactcaagtggtgcgtaaccgcatgaagagtgttaagaacatccaaaagatcacaaaggcaatgaagatggttgctgcttccaagcttagagcagttcaaggccgagctgagaactcccgtggactttggcagccatttactgcacttctaggagataatcccagcattgatgtaaagaagatgtgttaaaattttactgaatcagtttcctttgctggcttcttgttgagacctaccaatgtttgctcaacgatttttaataaacatacctgtaatttccagcaggatttcgaataattgcattaacattttgttctgattcagactcgcttcctccagagtctgtagtgttgttttgtgcaaacaccatgtactccggtttatttgatatttttttacctgagcc

SEQ ID NO: 84933 - protein, 106 aa, Arabidopsis thaliana
  peptide (1)..(106): Ceres Seq. ID no. 12677932
MAMAVFRREGRRLLPSIAARPIAAIRSPLSSDQEEGLLGVRSISTQVVRNRMKSVKNIQKITKAMKMVAASKLRAVQGRAENSRGLWQPFTALLGDNPSIDVKKMC

SEQ ID NO: 84934 - protein, 104 aa, Arabidopsis thaliana
  peptide (1)..(104): Ceres Seq. ID no. 12677933
MAVFRREGRRLLPSIAARPIAAIRSPLSSDQEEGLLGVRSISTQVVRNRMKSVKNIQKITKAMKMVAASKLRAVQGRAENSRGLWQPFTALLGDNPSIDVKKMC

SEQ ID NO: 84935 - protein, 55 aa, Arabidopsis thaliana
  peptide (1)..(55): Ceres Seq. ID no. 12677934
MKSVKNIQKITKAMKMVAASKLRAVQGRAENSRGLWQPFTALLGDNPSIDVKKMC

SEQ ID NO: 84936 - DNA, 1702 bp, Arabidopsis thaliana
  misc_feature (1)..(1702): Ceres Seq. ID no. 12677941
  misc_feature (1)..(1702): Ortholog of  Ceres SEQ ID NO 14301765 as cited in SEQ ID NO 61955
  misc_feature (1)..(1702): Ortholog of  Ceres SEQ ID NO 12618205 as cited in SEQ ID NO 65153
attcgcgtcgtttttgagtaaaaaaaatggcgcaacaatcgttgatctacagtttcgtcgctcgtggtaccgttatcctcgttgagttcacagatttcaaaggcaatttcacatcaatcgctgctcagtgccttcagaagcttccttcttctaacaacaagtttacctacaactgcgatggtcacacgttcaattacctcgtcgaaaatggattcagtgagtcaaaatattgctcgatctgtaagcgtagcttgtttgtgttttgatttatccattgtttgaattagattttttgcctaattgagaaatatgaatcgagttcttatgtttggtatagtttccagtaataattatgtattggcgttgataattaattgatgttagatctatggtaatcagtgatatttttggtggatctatcaatgaatatttgcaatttttgttctggatctattgattctttgcttatttgcgtgtagctttcgatatcatgaagtttttggcattagtgtattgtgttctttatgtaactctgttttactaaacctaattgggttttgggtgatgttgatggcggatatggtctctttatgatagtgttaactttcttatcagcgatatattgatgaatctattgctttatctcttaatatagagtttaaaatggaccggttttgttttcgtttgtgcagcctattgtgttgttgcagttgattctgctgggaggcagattcctatggctttcttggaacgagttaaggaggatttcaacaagagatatggtggtggaaaggctgcaactgctcaagcaaacagcttgaataaagaatttgggtcgaaactgaaagagcatatgcagtattgcatggatcatcctgatgagattagcaagcttgctaaggttaaagctcaagtgtctgaagttaaaggtgttatgatggaaaacattgagaaggtttgattctgacccttttttctttttatcgatatagttttatgttgtaaaccttttcgaacagagttcagcttgtatgactttagtaccaggatcttatgattcgtaaagcataaactgtagagaggaatgttttattctcggttgtgaagacatattctgttgttaactcgtttatgcattcgtttgcaggttcttgaccgtggtgagaagattgagcttttggttgacaaaacagaaaaccttcgctcacaggtttgttttctaaatggttcaaagtcaatagacccacacagagacatgcaagagtttgcagctttctcttactgattgttgtttcttgggtttctaactttaaatttgaactcgactttatcacaggcgcaagattttagaacacaaggaactcaaatgagaagaaagatgtggtttcagaacatgaagataaagctcattgtccttgcaattatcattgccttgattctcatcatcatcctctcaatttgtgggggattcaactgcggtaaataagtctggaacatttcttcccggcgttatcgactgcgctctgtgcttcccaagatctctgagaatatcttcattcagttcgttgtgctacctttttgttttgtttttgtttttgtgatttctatattctcatactatatgtttcttcttagattgtacttcttgaaatttgttttgtataggctatatatattatacatatatgtatgcatgttcgac

SEQ ID NO: 84937 - protein, 79 aa, Arabidopsis thaliana; identical to SEQ ID NO: 25204
  peptide (1)..(79): Ceres Seq. ID no. 12677942

SEQ ID NO: 84938 - protein, 74 aa, Arabidopsis thaliana
  peptide (1)..(74): Ceres Seq. ID no. 12677943
MAFLERVKEDFNKRYGGGKAATAQANSLNKEFGSKLKEHMQYCMDHPDEISKLAKVKAQVSEVKGVMMENIEKV

SEQ ID NO: 84939 - protein, 39 aa, Arabidopsis thaliana
  peptide (1)..(39): Ceres Seq. ID no. 12677944
MRRKMWFQNMKIKLIVLAIIIALILIIILSICGGFNCGK

SEQ ID NO: 84940 - DNA, 1138 bp, Arabidopsis thaliana
  misc_feature (1)..(1138): Ceres Seq. ID no. 12677993
  misc_feature (1)..(1138): Ortholog of  Ceres SEQ ID NO 14309328 as cited in SEQ ID NO 0
tttcttgagagatccaaaaaaagaatcagaaagaagaagaagaagactccaaaaacgatgccgtattacaccaacgacgacaatgacgtcgacgatttcaccgaatacgatccgatgccttatagtggaggctacgacatcaccgtgacatacggccgttcaattccaccgtccgacgagacttgttaccctctctcctctctctccggcgacgcctttgagtatcagcgacctaatttctcttctaaccacgattcttctgcttatgacgaccaagctcttaaaaccgagtacagtagctatgcacgacccggacccgttggatctggatctgattttggccggaaacctaattctggatatggagggagaacggaggttgagtatggccggaaaactgaatcggagcatggatctggctatggtggaagaattgagagcgattacgtgaagcctagctatggcggtcacgaggatgatggtgacgatggtcacaaaaaacatagtggtaaggattatgatgatggagatgagaagagtaagaagaaggagaaggagaagaagaaggataagaagaaagatggtaataactctgaagatgatgagtttaagaagaagaagaagaaagagcagtacaaggagcatcatgatgatgatgattatgatgagaagaagaagaagaagaaagactataatgatgatgatgagaagaagaagaagaagcattataatgatgatgatgatgagaagaagaagaagcataattacaatgatgatgatgatgagaagaagaagaagaaggagtatcatgatgatgaggataagaagaagaagaagcactatgataatgatgatgatgagaagaagaagaagaaggatcatcgtgatgatgatgatgagaagaagaagaagaaggataagcaccacaagggacatgactaaaaaagctttatgatttgggatttgcattcttatgactaaataagtaacaataacaacctaagcacactgctctctacgtttatgtcaattgttgttttgtttttgctttgtgtttttgcttcgtgtttttgctaactttagtgagatcttcataagtcatatatgttaagtgtgtcttctagtgatgtcctttggt

SEQ ID NO: 84941 - protein, 313 aa, Arabidopsis thaliana
  peptide (1)..(313): Ceres Seq. ID no. 12677994
FLERSKKRIRKKKKKTPKTMPYYTNDDNDVDDFTEYDPMPYSGGYDITVTYGRSIPPSDETCYPLSSLSGDAFEYQRPNFSSNHDSSAYDDQALKTEYSSYARPGPVGSGSDFGRKPNSGYGGRTEVEYGRKTESEHGSGYGGRIESDYVKPSYGGHEDDGDDGHKKHSGKDYDDGDEKSKKKEKEKKKDKKKDGNNSEDDEFKKKKKKEQYKEHHDDDDYDEKKKKKKDYNDDDEKKKKKHYNDDDDEKKKKHNYNDDDDEKKKKKEYHDDEDKKKKKHYDNDDDEKKKKKDHRDDDDEKKKKKDKHHKGHD

SEQ ID NO: 84942 - protein, 294 aa, Arabidopsis thaliana
  peptide (1)..(294): Ceres Seq. ID no. 12677995
MPYYTNDDNDVDDFTEYDPMPYSGGYDITVTYGRSIPPSDETCYPLSSLSGDAFEYQRPNFSSNHDSSAYDDQALKTEYSSYARPGPVGSGSDFGRKPNSGYGGRTEVEYGRKTESEHGSGYGGRIESDYVKPSYGGHEDDGDDGHKKHSGKDYDDGDEKSKKKEKEKKKDKKKDGNNSEDDEFKKKKKKEQYKEHHDDDDYDEKKKKKKDYNDDDEKKKKKHYNDDDDEKKKKHNYNDDDDEKKKKKEYHDDEDKKKKKHYDNDDDEKKKKKDHRDDDDEKKKKKDKHHKGHD

SEQ ID NO: 84943 - protein, 275 aa, Arabidopsis thaliana
  peptide (1)..(275): Ceres Seq. ID no. 12677996
MPYSGGYDITVTYGRSIPPSDETCYPLSSLSGDAFEYQRPNFSSNHDSSAYDDQALKTEYSSYARPGPVGSGSDFGRKPNSGYGGRTEVEYGRKTESEHGSGYGGRIESDYVKPSYGGHEDDGDDGHKKHSGKDYDDGDEKSKKKEKEKKKDKKKDGNNSEDDEFKKKKKKEQYKEHHDDDDYDEKKKKKKDYNDDDEKKKKKHYNDDDDEKKKKHNYNDDDDEKKKKKEYHDDEDKKKKKHYDNDDDEKKKKKDHRDDDDEKKKKKDKHHKGHD

SEQ ID NO: 84944 - DNA, 1793 bp, Arabidopsis thaliana
  misc_feature (1)..(1793): Ceres Seq. ID no. 12678017
  misc_feature (1)..(1793): Ortholog of  Ceres SEQ ID NO 15226950 as cited in SEQ ID NO 68649
  misc_feature (1)..(1793): Ortholog of  Ceres SEQ ID NO 13502947 as cited in SEQ ID NO 69257
atcattgtccctcagacaaatttcactcgctcatctctgtctgaatctcacaagaagaagtgaaagatggtgaagatatgttgtattggagctgggtatgttggtggaccaacaatggcagtgattgcattgaaatgtccagacgttgaagtagcggttgttgatatctctgtaccacgtatcaacgcttggaacagtgacacgcttccgatttacgagcctggtcttgatgatgttgtgaagcaatgccgtggcaagaaccttttctttagtactgatgttgagaaacatgttagggaagctgatattgtgtttgtttctgtcaacacaccgactaagactagaggtcttggtgctggtaaagctgcggatcttacgtactgggagagcgctgcgcgtatgatcgctgatgtttcggtatcggataagattgtcgttgagaaatcgactgttccggttaaaacagctgaagctattgagaagattttgacacataacagtaaagggattaagtttcagattctttcgaatcccgagtttttggcggaaggaaccgcgattaaggacctatttaatccggaccgtgttcttatcggagggcgggaaaccccagaagggtttaaagcggtgcagactctcaagaatgtgtatgcacactgggttcctgaaggccaaatcataacaaccaatctctggtctgctgagctgtccaagcttgcggcaaacgctttcttggctcaaaggatttcatcagtgaatgctatgtcggctctgtgtgaagccacaggcgcagatgtcacgcaagtgtcttacgcggttggtacagactcaaggattggtcccaagttcttgaactcgagtgttggattcggtggttcgtgtttccagaaggacattctgaatcttgtctacatctgtgagtgcaacggactcccggaagtggcagagtactggaagcaagtcatcaagatcaatgactaccagaagagccggttcgtgaaccgtgttgtttcctccatgttcaactctgtatcaaacaagaagattgcggttctcggtttcgcattcaagaaagacaccggtgacacaagggagactccagccatcgatgtgtgcaagggtcttttagaagacaaagcaaggctaagcatttacgacccacaagtgactgaggatcagatccagagggatttatccatgaacaagttcgactgggaccatcctctacatttgcagccaatgagcccaacaacagtgaaacaagtgaccgttacttgggacgcatacgaagcaactaaggacgctcacggtatctgcatcatgaccgagtgggatgagttcaagaaccttgatttccagaagatctttgacaacatgcagaaaccagctttcgtgttcgatggaagaaacattatgaatctgcaaaagctaagggagattggtttcattgtttactccattggtaagcctctcgacgactggctcaaggacatgcctgccgttgcctaatgatgttcattgctgactctttcgtcctccatcatttgtgcttttcttcttcttgtggtttgtctttaagacttgttatatttcttacaatatgtttgttatgttctctggtgtgtgttttgttttttttggtattactttcatatttttttggtcgaagaggacttgtattcgacaatgtcgcttcaattttgttgtttccttagaaactaaataaatattggtttatattggagtaaaatgtgtttgtactttgtagttaatcgttgaaagttttgccactt

SEQ ID NO: 84945 - protein, 480 aa, Arabidopsis thaliana
  peptide (1)..(480): Ceres Seq. ID no. 12678018
MVKICCIGAGYVGGPTMAVIALKCPDVEVAVVDISVPRINAWNSDTLPIYEPGLDDVVKQCRGKNLFFSTDVEKHVREADIVFVSVNTPTKTRGLGAGKAADLTYWESAARMIADVSVSDKIVVEKSTVPVKTAEAIEKILTHNSKGIKFQILSNPEFLAEGTAIKDLFNPDRVLIGGRETPEGFKAVQTLKNVYAHWVPEGQIITTNLWSAELSKLAANAFLAQRISSVNAMSALCEATGADVTQVSYAVGTDSRIGPKFLNSSVGFGGSCFQKDILNLVYICECNGLPEVAEYWKQVIKINDYQKSRFVNRVVSSMFNSVSNKKIAVLGFAFKKDTGDTRETPAIDVCKGLLEDKARLSIYDPQVTEDQIQRDLSMNKFDWDHPLHLQPMSPTTVKQVTVTWDAYEATKDAHGICIMTEWDEFKNLDFQKIFDNMQKPAFVFDGRNIMNLQKLREIGFIVYSIGKPLDDWLKDMPAVA

SEQ ID NO: 84946 - protein, 464 aa, Arabidopsis thaliana
  peptide (1)..(464): Ceres Seq. ID no. 12678019
MAVIALKCPDVEVAVVDISVPRINAWNSDTLPIYEPGLDDVVKQCRGKNLFFSTDVEKHVREADIVFVSVNTPTKTRGLGAGKAADLTYWESAARMIADVSVSDKIVVEKSTVPVKTAEAIEKILTHNSKGIKFQILSNPEFLAEGTAIKDLFNPDRVLIGGRETPEGFKAVQTLKNVYAHWVPEGQIITTNLWSAELSKLAANAFLAQRISSVNAMSALCEATGADVTQVSYAVGTDSRIGPKFLNSSVGFGGSCFQKDILNLVYICECNGLPEVAEYWKQVIKINDYQKSRFVNRVVSSMFNSVSNKKIAVLGFAFKKDTGDTRETPAIDVCKGLLEDKARLSIYDPQVTEDQIQRDLSMNKFDWDHPLHLQPMSPTTVKQVTVTWDAYEATKDAHGICIMTEWDEFKNLDFQKIFDNMQKPAFVFDGRNIMNLQKLREIGFIVYSIGKPLDDWLKDMPAVA

SEQ ID NO: 84947 - protein, 369 aa, Arabidopsis thaliana
  peptide (1)..(369): Ceres Seq. ID no. 12678020
MIADVSVSDKIVVEKSTVPVKTAEAIEKILTHNSKGIKFQILSNPEFLAEGTAIKDLFNPDRVLIGGRETPEGFKAVQTLKNVYAHWVPEGQIITTNLWSAELSKLAANAFLAQRISSVNAMSALCEATGADVTQVSYAVGTDSRIGPKFLNSSVGFGGSCFQKDILNLVYICECNGLPEVAEYWKQVIKINDYQKSRFVNRVVSSMFNSVSNKKIAVLGFAFKKDTGDTRETPAIDVCKGLLEDKARLSIYDPQVTEDQIQRDLSMNKFDWDHPLHLQPMSPTTVKQVTVTWDAYEATKDAHGICIMTEWDEFKNLDFQKIFDNMQKPAFVFDGRNIMNLQKLREIGFIVYSIGKPLDDWLKDMPAVA

SEQ ID NO: 84948 - DNA, 1934 bp, Arabidopsis thaliana
  misc_feature (1)..(1934): Ceres Seq. ID no. 12678032
  misc_feature (1)..(1934): Ortholog of  Ceres SEQ ID NO 14310547 as cited in SEQ ID NO 55132
  misc_feature (1)..(1934): Ortholog of  Ceres SEQ ID NO 13596261 as cited in SEQ ID NO 67817
  misc_feature (1)..(1934): Ortholog of  Ceres SEQ ID NO 13662360 as cited in SEQ ID NO 68830
atagtgtcgtacacaatcacaatttccatcgtcagcaaaaccaaaatcgtgaggcctataatttcccttcatctccaaaatcatttctcctcaaatttcttctttagaagattaaaaatcttctctctaatctctccactctttcataaatattttcctaattcttctaccttggtgtctgattctagcaccaaaccattttctcctaccaaaatctgggtttcgatcaattttaggtcttttgattcctacttgtctaatcgtcttgcaatttcaaagatgacagttgttggagatgttgctccaattccaaggaggaacagttctacttgctctaatgatatcgctgctccgttattaccagagtgtcatggagatgaagttgctcatgatgaattcaatggagcttcttttagtggcgcggtttttaacctcgccacgactataattggtgctggtatcatggctttgcctgctacaatgaagattcttggacttggacttggaatcacgatgattgttgttatggctttcttgactgatgcgtcgattgagttcttgcttaggtttagtaaagctgggaagaatcgatcttacggtggtttaatgggtggttcttttggtaatcctggaaggattttgcttcaagtcgcggttttagttaataacatcggtgttttgattgtatacatgatcattataggtgatgtgttggctggaaagacggaagatggtatccatcatttcggtgttctcgaaggatggtttggtcaccattggtggaatggaagagctgctattcttctgattactactcttggtgtgtttgctccattggcttgcttcaagcgaatcgattctttgaaatttacatcggccttatccgtggctctggcggttgtgtttctcattattactgcgggaatttcaattatgaagttgatcagtggcggtgtggcgatgccaagattgttaccagatgttactgacttaacatctttctggaatctcttcacagtcgtacctgttcttgtcacagcattcatttgccattacaatgttcacagtatacagaacgagctcgaagacccctctcagataagacctgttgttcgatcagcacttatgctctgctcatctgtttacataatgacaagtattttcgggttcctcttgtttggtgatgatactcttgatgatgtccttgcaaactttgacactgatcttggaatcccttttggttctatccttaatgatgcggttcgagttagctacgcgcttcatttgatgctcgtgttcccgattgttttctaccctcttcggattaacattgacgggctcttgttcccttccgctcgatcattatctacctcaaatgtgaggttcggttgcctcactgccggtctcatctctgtaatcttcttgggtgcaaacttcatcccaagcatttgggatgctttccaattcactggagcaaccgccgctgtttgtctcggcttcatcttcccagcttctatcatactaaaggatcgtcatgacaaagcaacaaacagggacacaaccttagctattttcatgattgttcttgcggtattgtccaatgcaatcgccatttacagcgatgcttatgcgctattcaagaagaacgctcctcgtgagtaaatcccggtatgagaaaatgtgcagtttggtgtttagcttttgctttttcttctatgtgaaatcaaataatgaagaagacaagacttctcttctcttatatgtttgtacttttgtcgttgagtgttctaagcggacttttgcttcggtgttatataccaccatgagtgttgtttgtaaaaaaactctgtataaaaattgtaatgcagatacatattttgccttttcatgactcttagctattgcttcatatctatatacatatttggttttaa

SEQ ID NO: 84949 - protein, 553 aa, Arabidopsis thaliana
  peptide (1)..(553): Ceres Seq. ID no. 12678033
IVSYTITISIVSKTKIVRPIISLHLQNHFSSNFFFRRLKIFSLISPLFHKYFPNSSTLVSDSSTKPFSPTKIWVSINFRSFDSYLSNRLAISKMTVVGDVAPIPRRNSSTCSNDIAAPLLPECHGDEVAHDEFNGASFSGAVFNLATTIIGAGIMALPATMKILGLGLGITMIVVMAFLTDASIEFLLRFSKAGKNRSYGGLMGGSFGNPGRILLQVAVLVNNIGVLIVYMIIIGDVLAGKTEDGIHHFGVLEGWFGHHWWNGRAAILLITTLGVFAPLACFKRIDSLKFTSALSVALAVVFLIITAGISIMKLISGGVAMPRLLPDVTDLTSFWNLFTVVPVLVTAFICHYNVHSIQNELEDPSQIRPVVRSALMLCSSVYIMTSIFGFLLFGDDTLDDVLANFDTDLGIPFGSILNDAVRVSYALHLMLVFPIVFYPLRINIDGLLFPSARSLSTSNVRFGCLTAGLISVIFLGANFIPSIWDAFQFTGATAAVCLGFIFPASIILKDRHDKATNRDTTLAIFMIVLAVLSNAIAIYSDAYALFKKNAPRE

SEQ ID NO: 84950 - protein, 460 aa, Arabidopsis thaliana
  peptide (1)..(460): Ceres Seq. ID no. 12678034
MTVVGDVAPIPRRNSSTCSNDIAAPLLPECHGDEVAHDEFNGASFSGAVFNLATTIIGAGIMALPATMKILGLGLGITMIVVMAFLTDASIEFLLRFSKAGKNRSYGGLMGGSFGNPGRILLQVAVLVNNIGVLIVYMIIIGDVLAGKTEDGIHHFGVLEGWFGHHWWNGRAAILLITTLGVFAPLACFKRIDSLKFTSALSVALAVVFLIITAGISIMKLISGGVAMPRLLPDVTDLTSFWNLFTVVPVLVTAFICHYNVHSIQNELEDPSQIRPVVRSALMLCSSVYIMTSIFGFLLFGDDTLDDVLANFDTDLGIPFGSILNDAVRVSYALHLMLVFPIVFYPLRINIDGLLFPSARSLSTSNVRFGCLTAGLISVIFLGANFIPSIWDAFQFTGATAAVCLGFIFPASIILKDRHDKATNRDTTLAIFMIVLAVLSNAIAIYSDAYALFKKNAPRE

SEQ ID NO: 84951 - protein, 399 aa, Arabidopsis thaliana
  peptide (1)..(399): Ceres Seq. ID no. 12678035
MALPATMKILGLGLGITMIVVMAFLTDASIEFLLRFSKAGKNRSYGGLMGGSFGNPGRILLQVAVLVNNIGVLIVYMIIIGDVLAGKTEDGIHHFGVLEGWFGHHWWNGRAAILLITTLGVFAPLACFKRIDSLKFTSALSVALAVVFLIITAGISIMKLISGGVAMPRLLPDVTDLTSFWNLFTVVPVLVTAFICHYNVHSIQNELEDPSQIRPVVRSALMLCSSVYIMTSIFGFLLFGDDTLDDVLANFDTDLGIPFGSILNDAVRVSYALHLMLVFPIVFYPLRINIDGLLFPSARSLSTSNVRFGCLTAGLISVIFLGANFIPSIWDAFQFTGATAAVCLGFIFPASIILKDRHDKATNRDTTLAIFMIVLAVLSNAIAIYSDAYALFKKNAPRE

SEQ ID NO: 84952 - DNA, 1718 bp, Arabidopsis thaliana
  misc_feature (1)..(1718): Ceres Seq. ID no. 12678036
  misc_feature (1)..(1718): Ortholog of  Ceres SEQ ID NO 15170127 as cited in SEQ ID NO 62181
gattcttaaaaaaaaaaacaatctgtcattgatgctcaagagttacattctttgaattgaagatcatttctctgtttctcagattacccatttgatcaaagaaaaaaaatggaacaagatcatgtaaaagtcaaaaagagagtagcttttgttctaatcgatggtttaggagatgtaacaataccaaaactaggttacaaaactccattacaagcagcaaacatacctaatctcgacgcaattgcatcagctggtatcaacggtttaatggatccagtagaagttggtttaggttgtggtagtgacactgctcatctttctctcatgggttatgatccaagagtatattaccgtggacgtggtgcttttgagtctatgggtgcaggtttagctatgtcacctggtgatatagctttcaagtctaattttgcaactttggatgagaaatctggagttgttgttagtcgaagagctgatcgacatttcgaagaagaaggtcctatactttgtgcagctcttgatgggttaaagcttcaatctttccctgagtatgaagtgagagtcagatatgcgacggaacatcggtgtggtgttgttgttaaagggccaagacttagtgggaatatatctggcactgatccgttgaaagataatcgtttgcttcttgaagctaaacctttagatgaatcagaagaagctactcacactgctaaagttgttaacgaattatcaagagagatatcgcgtattcttgtttctcacccggttaacgcagagagagctgcacaaggcaagaatattgcaaatctcgttcttttacgtggttgtggtattcgaatcgaggtacctccttttcatgagaagcatggcttgtggccatgtatggtagcaccaacaaagattatagctggacttggtatgtcgctcggtattgacattttagaagctccgggagctactggagattaccggacgcttctgacatcgaaagcaactgctatagctaatgctctctcagctcctttgaatccctgccctaatgtctttgtaccgggagaggacgggcataaaccaggaaggtcagatggttatgatttcgggttccttcacataaaggctatagatgatgcaggtcatgataaggcgacaatgttcaaagttcgaggtttagaagctgttgataaggcgatacgtcagcttgctaagcttttatggcaagctgagtcttctacacattaccagtatttcttgtgtgtgaccggtgatcattcaactcctgttgagtatggagaccacagctttgagcctgtcccattcacaatgtgccggttaagggactttgtgagcgcggtgggaggagaatcagccgtactagagacgtctttggacccttttccacttccaacggttgtggaatcaggtgaagatgttaccaaacaagaggaagagagtgggaggagggaagctcctctggcaattggtggagatttagttgcagagttgaatgaggttgcagctgcaagaggatgtcttggccgtttccatggcggtgaaatgatgggagtcatcactaactttcttaatctagaggtatgagttacttaaaagttttgcatttttctttgagaatttggatattgaaaagtgtaataaaaataccaaaagctgaaagtgtaacacaaacctagttttcgtaacaaattgaataattgattatc

SEQ ID NO: 84953 - protein, 495 aa, Arabidopsis thaliana
  peptide (1)..(495): Ceres Seq. ID no. 12678037
MEQDHVKVKKRVAFVLIDGLGDVTIPKLGYKTPLQAANIPNLDAIASAGINGLMDPVEVGLGCGSDTAHLSLMGYDPRVYYRGRGAFESMGAGLAMSPGDIAFKSNFATLDEKSGVVVSRRADRHFEEEGPILCAALDGLKLQSFPEYEVRVRYATEHRCGVVVKGPRLSGNISGTDPLKDNRLLLEAKPLDESEEATHTAKVVNELSREISRILVSHPVNAERAAQGKNIANLVLLRGCGIRIEVPPFHEKHGLWPCMVAPTKIIAGLGMSLGIDILEAPGATGDYRTLLTSKATAIANALSAPLNPCPNVFVPGEDGHKPGRSDGYDFGFLHIKAIDDAGHDKATMFKVRGLEAVDKAIRQLAKLLWQAESSTHYQYFLCVTGDHSTPVEYGDHSFEPVPFTMCRLRDFVSAVGGESAVLETSLDPFPLPTVVESGEDVTKQEEESGRREAPLAIGGDLVAELNEVAAARGCLGRFHGGEMMGVITNFLNLEV

SEQ ID NO: 84954 - protein, 442 aa, Arabidopsis thaliana
  peptide (1)..(442): Ceres Seq. ID no. 12678038
MDPVEVGLGCGSDTAHLSLMGYDPRVYYRGRGAFESMGAGLAMSPGDIAFKSNFATLDEKSGVVVSRRADRHFEEEGPILCAALDGLKLQSFPEYEVRVRYATEHRCGVVVKGPRLSGNISGTDPLKDNRLLLEAKPLDESEEATHTAKVVNELSREISRILVSHPVNAERAAQGKNIANLVLLRGCGIRIEVPPFHEKHGLWPCMVAPTKIIAGLGMSLGIDILEAPGATGDYRTLLTSKATAIANALSAPLNPCPNVFVPGEDGHKPGRSDGYDFGFLHIKAIDDAGHDKATMFKVRGLEAVDKAIRQLAKLLWQAESSTHYQYFLCVTGDHSTPVEYGDHSFEPVPFTMCRLRDFVSAVGGESAVLETSLDPFPLPTVVESGEDVTKQEEESGRREAPLAIGGDLVAELNEVAAARGCLGRFHGGEMMGVITNFLNLEV

SEQ ID NO: 84955 - protein, 423 aa, Arabidopsis thaliana
  peptide (1)..(423): Ceres Seq. ID no. 12678039
MGYDPRVYYRGRGAFESMGAGLAMSPGDIAFKSNFATLDEKSGVVVSRRADRHFEEEGPILCAALDGLKLQSFPEYEVRVRYATEHRCGVVVKGPRLSGNISGTDPLKDNRLLLEAKPLDESEEATHTAKVVNELSREISRILVSHPVNAERAAQGKNIANLVLLRGCGIRIEVPPFHEKHGLWPCMVAPTKIIAGLGMSLGIDILEAPGATGDYRTLLTSKATAIANALSAPLNPCPNVFVPGEDGHKPGRSDGYDFGFLHIKAIDDAGHDKATMFKVRGLEAVDKAIRQLAKLLWQAESSTHYQYFLCVTGDHSTPVEYGDHSFEPVPFTMCRLRDFVSAVGGESAVLETSLDPFPLPTVVESGEDVTKQEEESGRREAPLAIGGDLVAELNEVAAARGCLGRFHGGEMMGVITNFLNLEV

SEQ ID NO: 84956 - DNA, 1953 bp, Arabidopsis thaliana
  misc_feature (1)..(1953): Ceres Seq. ID no. 12678060
  misc_feature (1)..(1953): Ortholog of  Ceres SEQ ID NO 13594037 as cited in SEQ ID NO 55666
  misc_feature (1)..(1953): Ortholog of  Ceres SEQ ID NO 13657707 as cited in SEQ ID NO 66407
actcttcacaaagatattatagagtgtgagagagagacactcttgtttcatcttcaacttccactacctttgcaagattctacctgagatagatggcgaagttccgacaaatgggttcatcaatcttcttcctctttcttatcataatctcattatgttccgcccacaaagaagcgttttcttcaactgatcttgttcaaatggagtgcttgagagtcccaccgttagagtttgctgaagcggccaaaaccgtcgtcgacgctataacaaaagcggtagctatagtgtccaagttcgacaagaaagccgggaagtcgcgagtctccaatgcgattgttgattgtgttgatcttcttgattctgccgccgaagagctttcttggatcatctctgcctctcaatcccccaacggtaaagacaatagcacaggagacgtgggttcggatctaaggacatggataagcgccgcactttctaaccaggacacatgtcttgacggtttcgagggtactaatggaattatcaaaaagatagtggccggtggtcttagcaaggttggtacgaccgttcggaatttactaacgatggttcactctcctccctctaagcccaaacctaagcccattaaggcccagacaatgacgaaagctcatagtggcttcagtaagttcccctcatgggttaaacccggtgatcggaagttgttgcaaactgataacataacggttgctgacgcggttgtagccgcagacgggaccggaaatttcacgacgataagtgacgcggtgttggctgcaccggactatagtaccaaaagatatgtcatacatgtaaaaagaggtgtgtatgtagagaatgtggagattaaaaagaagaaatggaacattatgatggttggtgacggcatcgatgccaccgtgatcacgggtaaccggagtttcatcgacggctggactactttccgatctgctacatttgctgtgagcggtagaggatttattgcacgcgatatcaccttccaaaacacagcaggaccggaaaaacaccaagcggtcgcaatccgatccgatacggatctcggggtcttttatcgatgcgcgatgagaggttaccaagacactctctatgcccactcaatgcgtcaattctttagagaatgcattataacaggcactgtagactttatattcggagacgccacagcagtattccaaagctgccaaatcaaagccaaacaaggccttccaaaccagaagaatagcatcacggctcaaggacgtaaggatccaaatgagccaaccggtttcacaatccaattcagcaatatagcagctgataccgacctacttctaaacttaaatactacggctacttacttaggtcggccgtggaaactatattctaggacggtgttcatgcaaaactacatgagtgatgcaatcaaccccgtaggatggcttgaatggaatggaaattttgcgttggatacattatattatggtgagtatatgaatagcggaccgggggctagtcttgaccgccgtgttaagtggccaggataccatgtgttgaatacttcggccgaggctaataattttacagtatctcaactcatacaagggaacttgtggttaccatcaactggtatcacgttcattgctggtctagtctcgtaaattaatcatgtttgatcgaattctaatattatcatttgatatatcatttctattatactaaacgttataattatgtttcttgatgttttctattttgtatatggttttggttaaattattattattattattattttggtgatattgaactacaagttctctacgtttgatatgtatttaatgagttattttactcgtagaattaaagtcatatgtcaaccacatttttctaccattgatcttcaaacaatggattttatacataatattcttttcc

SEQ ID NO: 84957 - protein, 527 aa, Arabidopsis thaliana
  peptide (1)..(527): Ceres Seq. ID no. 12678061
MAKFRQMGSSIFFLFLIIISLCSAHKEAFSSTDLVQMECLRVPPLEFAEAAKTVVDAITKAVAIVSKFDKKAGKSRVSNAIVDCVDLLDSAAEELSWIISASQSPNGKDNSTGDVGSDLRTWISAALSNQDTCLDGFEGTNGIIKKIVAGGLSKVGTTVRNLLTMVHSPPSKPKPKPIKAQTMTKAHSGFSKFPSWVKPGDRKLLQTDNITVADAVVAADGTGNFTTISDAVLAAPDYSTKRYVIHVKRGVYVENVEIKKKKWNIMMVGDGIDATVITGNRSFIDGWTTFRSATFAVSGRGFIARDITFQNTAGPEKHQAVAIRSDTDLGVFYRCAMRGYQDTLYAHSMRQFFRECIITGTVDFIFGDATAVFQSCQIKAKQGLPNQKNSITAQGRKDPNEPTGFTIQFSNIAADTDLLLNLNTTATYLGRPWKLYSRTVFMQNYMSDAINPVGWLEWNGNFALDTLYYGEYMNSGPGASLDRRVKWPGYHVLNTSAEANNFTVSQLIQGNLWLPSTGITFIAGLVS

SEQ ID NO: 84958 - protein, 521 aa, Arabidopsis thaliana
  peptide (1)..(521): Ceres Seq. ID no. 12678062
MGSSIFFLFLIIISLCSAHKEAFSSTDLVQMECLRVPPLEFAEAAKTVVDAITKAVAIVSKFDKKAGKSRVSNAIVDCVDLLDSAAEELSWIISASQSPNGKDNSTGDVGSDLRTWISAALSNQDTCLDGFEGTNGIIKKIVAGGLSKVGTTVRNLLTMVHSPPSKPKPKPIKAQTMTKAHSGFSKFPSWVKPGDRKLLQTDNITVADAVVAADGTGNFTTISDAVLAAPDYSTKRYVIHVKRGVYVENVEIKKKKWNIMMVGDGIDATVITGNRSFIDGWTTFRSATFAVSGRGFIARDITFQNTAGPEKHQAVAIRSDTDLGVFYRCAMRGYQDTLYAHSMRQFFRECIITGTVDFIFGDATAVFQSCQIKAKQGLPNQKNSITAQGRKDPNEPTGFTIQFSNIAADTDLLLNLNTTATYLGRPWKLYSRTVFMQNYMSDAINPVGWLEWNGNFALDTLYYGEYMNSGPGASLDRRVKWPGYHVLNTSAEANNFTVSQLIQGNLWLPSTGITFIAGLVS

SEQ ID NO: 84959 - protein, 491 aa, Arabidopsis thaliana
  peptide (1)..(491): Ceres Seq. ID no. 12678063
MECLRVPPLEFAEAAKTVVDAITKAVAIVSKFDKKAGKSRVSNAIVDCVDLLDSAAEELSWIISASQSPNGKDNSTGDVGSDLRTWISAALSNQDTCLDGFEGTNGIIKKIVAGGLSKVGTTVRNLLTMVHSPPSKPKPKPIKAQTMTKAHSGFSKFPSWVKPGDRKLLQTDNITVADAVVAADGTGNFTTISDAVLAAPDYSTKRYVIHVKRGVYVENVEIKKKKWNIMMVGDGIDATVITGNRSFIDGWTTFRSATFAVSGRGFIARDITFQNTAGPEKHQAVAIRSDTDLGVFYRCAMRGYQDTLYAHSMRQFFRECIITGTVDFIFGDATAVFQSCQIKAKQGLPNQKNSITAQGRKDPNEPTGFTIQFSNIAADTDLLLNLNTTATYLGRPWKLYSRTVFMQNYMSDAINPVGWLEWNGNFALDTLYYGEYMNSGPGASLDRRVKWPGYHVLNTSAEANNFTVSQLIQGNLWLPSTGITFIAGLVS

SEQ ID NO: 84960 - DNA, 3193 bp, Arabidopsis thaliana
  misc_feature (1)..(3193): Ceres Seq. ID no. 12678064
  misc_feature (1)..(3193): Ortholog of  Ceres SEQ ID NO 13600310 as cited in SEQ ID NO 5086
caaagtaaaaagaagaagaagacgaagaagaagaaagtagcaagaaaatagtttccgttacacattctctgctttcgattttgcctctgcgaaaacaaatccctaatcatctccaccatcttctcatcgatttgattttctccggcgaatcatccgtccgtcgtcgaccaccaccgccgcgttttctttctccgacgtgttccctctgttaagtcccttcttctctaagatgatgggacctccgagaactccgttaagtaagatagataagtccaatccttatactccatgtggttccaaagttacagaggagaagattcttgtcactgttcggatgagaccattaaattggagggaacatgccaaatatgatctcattgcttgggaatgtcccgatgatgagactatcgtctttaagaatccgaatcctgacaaggctccaacaaaatattcatttgataaagtttttgagccaacttgtgcaactcaagaggtgtatgaaggtggttctagggacgttgcactatctgcattagcaggaacaaatgcaactatttttgcttatggtcagactagtagtggcaagacgtttacaatgaggggggttactgaaagtgttgttaaagatatatacgaacatataagaaaaactcaagaaaggagctttgtcttgaaagtatctgctttggagatttataacgagaccgtggttgaccttttaaatcgtgatactgggccccttagactgttagatgatccagagaaaggaaccattgtggaaaatctggtggaggaagtggtagaaagcaggcaacatttacagcatttaattagcatttgtgaagatcaaaggcaagtaggtgaaactgctttaaacgacaaaagttcaagatcgcatcagattattcggctgaccatccatagcagtctcagggaaatagcaggctgtgtgcagtctttcatggcaactctgaatcttgttgatcttgctggaagcgaacgtgcttttcaaacaaacgcagatggtctaagattgaaggaaggaagccacattaaccgtagtttattgacacttactacagtgatcagaaaactgagttctggaagaaaaagggatcacgtgccgtatagagactcaaagctgacaagaattttgcaaaattcacttggcgggaatgctagaacagcaattatatgtacgattagtccggcactgagtcatgttgaacagacaaaaaagacactttcttttgccatgagtgcgaaggaagtcaccaattgcgctaaagtaaacatggttgtctcagaaaaaaagctgctgaaacatctgcagcaaaaagtagctaaactcgagtcagagttaagaagcccggagcccagttcatccacctgcttaaagtctctgttaattgagaaagagatgaaaatccaacagatggaatccgaaatgaaagagctaaagcgtcagagagacattgcacagtctgaacttgatctagaaagaaaagcaaaggagcggaagggatcaagtgagtgtgaacctttttctcaagtggcaaggtgtctctcataccatacaaaggaggaatccattccaagcaaatctgttccgtcaagccgcagaacagctcgtgataggagaaaggataatgtgaggcagtctttaacttcggcggatccaacagcgctagtccaagaaattcgtttgcttgaaaaacatcaaaagaagttgggtgaagaagcaaaccaagcactggatctaattcacaaagaagtgacatcccataaactgggtgatcaacaagctgcagaaaaagttgcgaaaatgctgtcagaaatcagggacatgcagaagagcaaccttttaactgaggaaattgtagttggtgataaagccaacctgaaggaagaaataaatcggttgaattctcaagaaattgcagctttggagaagaagctagagtgtgttcagaacactattgacatgcttgtctcgtcttttcagacagatgaacagactccagatttcaggacccaggtgaaaaagaagagacttcttcccttcggcttaagtaatagtcctaacctacagcatatgatccggggaccatgttcacctctttctgggactgaaaataaggatcctgagagcaatgttgtgtctgctaattcagccccagtgtcttttggagctactccaccaaagagggatgataaccgatgtcgtacacagtcaagggaaggaacgcctgtatcacgacaagcaaattcagtcgatattaagagaatgaatcgaatgtataagaatgctgccgaagagaatatacgtaatatcaaatcttatgttactggattgaaagaacgtgtggcgaagcttcaataccagaagcagctgcttgtttgccaggtgttagaactggaggcaaacgagacaggcgctgcttcggagtacgatgcaaccgatgaatctcagatggattggccattgtgttttgaagagcagagaaagcaaatcataatgttatggcatctgtgccacatttcaatcattcacagaacacaattctacatgttattcaaaggagacccagctgatcaaatctacatggaggttgagctccgcaggctgacatggctcgaacagcacttggctgagcttgggaatgcgagtcctgcattgcttggtgatgaaccagcaagctacgtagcatcgagtataagagctttgaagcaggagagagagtatttggcgaaacgggtaaacacaaagctaggagcagaggaaagagagatgctatacctgaaatgggatgtcccgccggtgggaaaacagaggagacaacagttcatcaacaaactctggacagatcctcacaacatgcaacacgtgagagagagtgcggagatcgtggctaagcttgtcggattctgtgactcgggagagaccataaggaaagaaatgtttgagctcaactttgcatctccttcagataagaagacttggatgatgggttggaacttcatatccaacttgttgcatctctagctgttgtaccctcctataaatcctacacgtctacttttctctgtttgtaaatcgttaacttcaaaactcttttgatgctgaatagagagtgtgattcacacgacctgtgaaaaccctctttttaaaatcctaaccatatgatcatct

SEQ ID NO: 84961 - protein, 938 aa, Arabidopsis thaliana
  peptide (1)..(938): Ceres Seq. ID no. 12678065
MMGPPRTPLSKIDKSNPYTPCGSKVTEEKILVTVRMRPLNWREHAKYDLIAWECPDDETIVFKNPNPDKAPTKYSFDKVFEPTCATQEVYEGGSRDVALSALAGTNATIFAYGQTSSGKTFTMRGVTESVVKDIYEHIRKTQERSFVLKVSALEIYNETVVDLLNRDTGPLRLLDDPEKGTIVENLVEEVVESRQHLQHLISICEDQRQVGETALNDKSSRSHQIIRLTIHSSLREIAGCVQSFMATLNLVDLAGSERAFQTNADGLRLKEGSHINRSLLTLTTVIRKLSSGRKRDHVPYRDSKLTRILQNSLGGNARTAIICTISPALSHVEQTKKTLSFAMSAKEVTNCAKVNMVVSEKKLLKHLQQKVAKLESELRSPEPSSSTCLKSLLIEKEMKIQQMESEMKELKRQRDIAQSELDLERKAKERKGSSECEPFSQVARCLSYHTKEESIPSKSVPSSRRTARDRRKDNVRQSLTSADPTALVQEIRLLEKHQKKLGEEANQALDLIHKEVTSHKLGDQQAAEKVAKMLSEIRDMQKSNLLTEEIVVGDKANLKEEINRLNSQEIAALEKKLECVQNTIDMLVSSFQTDEQTPDFRTQVKKKRLLPFGLSNSPNLQHMIRGPCSPLSGTENKDPESNVVSANSAPVSFGATPPKRDDNRCRTQSREGTPVSRQANSVDIKRMNRMYKNAAEENIRNIKSYVTGLKERVAKLQYQKQLLVCQVLELEANETGAASEYDATDESQMDWPLCFEEQRKQIIMLWHLCHISIIHRTQFYMLFKGDPADQIYMEVELRRLTWLEQHLAELGNASPALLGDEPASYVASSIRALKQEREYLAKRVNTKLGAEEREMLYLKWDVPPVGKQRRQQFINKLWTDPHNMQHVRESAEIVAKLVGFCDSGETIRKEMFELNFASPSDKKTWMMGWNFISNLLHL

SEQ ID NO: 84962 - protein, 937 aa, Arabidopsis thaliana
  peptide (1)..(937): Ceres Seq. ID no. 12678066
MGPPRTPLSKIDKSNPYTPCGSKVTEEKILVTVRMRPLNWREHAKYDLIAWECPDDETIVFKNPNPDKAPTKYSFDKVFEPTCATQEVYEGGSRDVALSALAGTNATIFAYGQTSSGKTFTMRGVTESVVKDIYEHIRKTQERSFVLKVSALEIYNETVVDLLNRDTGPLRLLDDPEKGTIVENLVEEVVESRQHLQHLISICEDQRQVGETALNDKSSRSHQIIRLTIHSSLREIAGCVQSFMATLNLVDLAGSERAFQTNADGLRLKEGSHINRSLLTLTTVIRKLSSGRKRDHVPYRDSKLTRILQNSLGGNARTAIICTISPALSHVEQTKKTLSFAMSAKEVTNCAKVNMVVSEKKLLKHLQQKVAKLESELRSPEPSSSTCLKSLLIEKEMKIQQMESEMKELKRQRDIAQSELDLERKAKERKGSSECEPFSQVARCLSYHTKEESIPSKSVPSSRRTARDRRKDNVRQSLTSADPTALVQEIRLLEKHQKKLGEEANQALDLIHKEVTSHKLGDQQAAEKVAKMLSEIRDMQKSNLLTEEIVVGDKANLKEEINRLNSQEIAALEKKLECVQNTIDMLVSSFQTDEQTPDFRTQVKKKRLLPFGLSNSPNLQHMIRGPCSPLSGTENKDPESNVVSANSAPVSFGATPPKRDDNRCRTQSREGTPVSRQANSVDIKRMNRMYKNAAEENIRNIKSYVTGLKERVAKLQYQKQLLVCQVLELEANETGAASEYDATDESQMDWPLCFEEQRKQIIMLWHLCHISIIHRTQFYMLFKGDPADQIYMEVELRRLTWLEQHLAELGNASPALLGDEPASYVASSIRALKQEREYLAKRVNTKLGAEEREMLYLKWDVPPVGKQRRQQFINKLWTDPHNMQHVRESAEIVAKLVGFCDSGETIRKEMFELNFASPSDKKTWMMGWNFISNLLHL

SEQ ID NO: 84963 - protein, 903 aa, Arabidopsis thaliana
  peptide (1)..(903): Ceres Seq. ID no. 12678067
MRPLNWREHAKYDLIAWECPDDETIVFKNPNPDKAPTKYSFDKVFEPTCATQEVYEGGSRDVALSALAGTNATIFAYGQTSSGKTFTMRGVTESVVKDIYEHIRKTQERSFVLKVSALEIYNETVVDLLNRDTGPLRLLDDPEKGTIVENLVEEVVESRQHLQHLISICEDQRQVGETALNDKSSRSHQIIRLTIHSSLREIAGCVQSFMATLNLVDLAGSERAFQTNADGLRLKEGSHINRSLLTLTTVIRKLSSGRKRDHVPYRDSKLTRILQNSLGGNARTAIICTISPALSHVEQTKKTLSFAMSAKEVTNCAKVNMVVSEKKLLKHLQQKVAKLESELRSPEPSSSTCLKSLLIEKEMKIQQMESEMKELKRQRDIAQSELDLERKAKERKGSSECEPFSQVARCLSYHTKEESIPSKSVPSSRRTARDRRKDNVRQSLTSADPTALVQEIRLLEKHQKKLGEEANQALDLIHKEVTSHKLGDQQAAEKVAKMLSEIRDMQKSNLLTEEIVVGDKANLKEEINRLNSQEIAALEKKLECVQNTIDMLVSSFQTDEQTPDFRTQVKKKRLLPFGLSNSPNLQHMIRGPCSPLSGTENKDPESNVVSANSAPVSFGATPPKRDDNRCRTQSREGTPVSRQANSVDIKRMNRMYKNAAEENIRNIKSYVTGLKERVAKLQYQKQLLVCQVLELEANETGAASEYDATDESQMDWPLCFEEQRKQIIMLWHLCHISIIHRTQFYMLFKGDPADQIYMEVELRRLTWLEQHLAELGNASPALLGDEPASYVASSIRALKQEREYLAKRVNTKLGAEEREMLYLKWDVPPVGKQRRQQFINKLWTDPHNMQHVRESAEIVAKLVGFCDSGETIRKEMFELNFASPSDKKTWMMGWNFISNLLHL

SEQ ID NO: 84964 - DNA, 2833 bp, Arabidopsis thaliana
  misc_feature (1)..(2833): Ceres Seq. ID no. 12678068
  misc_feature (1)..(2833): Ortholog of  Ceres SEQ ID NO 13600310 as cited in SEQ ID NO 5086
attttgtgtgtagaagatgatgggacctccgagaactccgttaagtaagatagataagtccaatccttatactccatgtggttccaaagttacagaggagaagattcttgtcactgttcggatgagaccattaaattggagggaacatgccaaatatgatctcattgcttgggaatgtcccgatgatgagactatcgtctttaagaatccgaatcctgacaaggctccaacaaaatattcatttgataaagtttttgagccaacttgtgcaactcaagaggtgtatgaaggtggttctagggacgttgcactatctgcattagcaggaacaaatgcaactatttttgcttatggtcagactagtagtggcaagacgtttacaatgaggggggttactgaaagtgttgttaaagatatatacgaacatataagaaaaactcaagaaaggagctttgtcttgaaagtatctgctttggagatttataacgagaccgtggttgaccttttaaatcgtgatactgggccccttagactgttagatgatccagagaaaggaaccattgtggaaaatctggtggaggaagtggtagaaagcaggcaacatttacagcatttaattagcatttgtgaagatcaaaggcaagtaggtgaaactgctttaaacgacaaaagttcaagatcgcatcagattattcggctgaccatccatagcagtctcagggaaatagcaggctgtgtgcagtctttcatggcaactctgaatcttgttgatcttgctggaagcgaacgtgcttttcaaacaaacgcagatggtctaagattgaaggaaggaagccacattaaccgtagtttattgacacttactacagtgatcagaaaactgagttctggaagaaaaagggatcacgtgccgtatagagactcaaagctgacaagaattttgcaaaattcacttggcgggaatgctagaacagcaattatatgtacgattagtccggcactgagtcatgttgaacagacaaaaaagacactttcttttgccatgagtgcgaaggaagtcaccaattgcgctaaagtaaacatggttgtctcagaaaaaaagctgctgaaacatctgcagcaaaaagtagctaaactcgagtcagagttaagaagcccggagcccagttcatccacctgcttaaagtctctgttaattgagaaagagatgaaaatccaacagatggaatccgaaatgaaagagctaaagcgtcagagagacattgcacagtctgaacttgatctagaaagaaaagcaaaggagcggaagggatcaagtgagtgtgaacctttttctcaagtggcaaggtgtctctcataccatacaaaggaggaatccattccaagcaaatctgttccgtcaagccgcagaacagctcgtgataggagaaaggataatgtgaggcagtctttaacttcggcggatccaacagcgctagtccaagaaattcgtttgcttgaaaaacatcaaaagaagttgggtgaagaagcaaaccaagcactggatctaattcacaaagaagtgacatcccataaactgggtgatcaacaagctgcagaaaaagttgcgaaaatgctgtcagaaatcagggacatgcagaagagcaaccttttaactgaggaaattgtagttggtgataaagccaacctgaaggaagaaataaatcggttgaattctcaagaaattgcagctttggagaagaagctagagtgtgttcagaacactattgacatgcttgtctcgtcttttcagacagatgaacagactccagatttcaggacccaggtgaaaaagaagagacttcttcccttcggcttaagtaatagtcctaacctacagcatatgatccggggaccatgttcacctctttctgggactgaaaataaggatcctgagagcaatgttgtgtctgctaattcagccccagtgtcttttggagctactccaccaaagagggatgataaccgatgtcgtacacagtcaagggaaggaacgcctgtatcacgacaagcaaattcagtcgatattaagagaatgaatcgaatgtataagaatgctgccgaagagaatatacgtaatatcaaatcttatgttactggattgaaagaacgtgtggcgaagcttcaataccagaagcagctgcttgtttgccaggtgttagaactggaggcaaacgagacaggcgctgcttcggagtacgatgcaaccgatgaatctcagatggattggccattgtgttttgaagagcagagaaagcaaatcataatgttatggcatctgtgccacatttcaatcattcacagaacacaattctacatgttattcaaaggagacccagctgatcaaatctacatggaggttgagctccgcaggctgacatggctcgaacagcacttggctgagcttgggaatgcgagtcctgcattgcttggtgatgaaccagcaagctacgtagcatcgagtataagagctttgaagcaggagagagagtatttggcgaaacgggtaaacacaaagctaggagcagaggaaagagagatgctatacctgaaatgggatgtcccgccggtgggaaaacagaggagacaacagttcatcaacaaactctggacagatcctcacaacatgcaacacgtgagagagagtgcggagatcgtggctaagcttgtcggattctgtgactcgggagagaccataaggaaagaaatgtttgagctcaactttgcatctccttcagataagaagacttggatgatgggttggaacttcatatccaacttgttgcatctctag

SEQ ID NO: 84965 - protein, 938 aa, Arabidopsis thaliana; identical to SEQ ID NO: 84961
  peptide (1)..(938): Ceres Seq. ID no. 12678069

SEQ ID NO: 84966 - protein, 937 aa, Arabidopsis thaliana; identical to SEQ ID NO: 84962
  peptide (1)..(937): Ceres Seq. ID no. 12678070

SEQ ID NO: 84967 - protein, 903 aa, Arabidopsis thaliana; identical to SEQ ID NO: 84963
  peptide (1)..(903): Ceres Seq. ID no. 12678071

SEQ ID NO: 84968 - DNA, 960 bp, Arabidopsis thaliana
  misc_feature (1)..(960): Ceres Seq. ID no. 12678121
  misc_feature (1)..(960): Ortholog of  Ceres SEQ ID NO 13584275 as cited in SEQ ID NO 63905
agaagtggaaagccaacggatgactcatatcgcggtcgaaagaaaccgtaggaagcaaatgaatgagcatcttcgtgtccttagatctctcatgcctggctcctacgttcaaaggggagaccaagcgtcaatcataggaggagcaatagagtttgtgagagagctcgagcaactcctacaatgtcttgaatcacagaagcgtcgaagaatcttaggagaaaccggtagggacatgacaacgacaacgacttcttcttcttctcccataactacggtagcgaaccaagcacaaccgctcattattacgggaaatgtaaccgagctagagggcggaggagggcttcgggaggagactgcggagaacaagtcgtgcttggctgacgtggaggtgaagctgctagggtttgacgccatgatcaagatactttcaagaagaaggccgggacagctgattaagactatagctgctttggaggatcttcatctctctattcttcacactaacatcactaccatggaacaaaccgtcctctactcctttaatgtcaagataacaagtgaaacgaggtttacggcagaagacatagcaagttccatccaacagatatttagtttcattcatgcaaataccaacatatctggaagctctaacctgggaaatattgtgtttacttgaaaatcatcacacggcgacaactttgtacactggtgaagattacagtacgtaataatctctacatattgggttttattctccaagcatttggaagagtgtttaagttaaagggagtgcttactttatttttttggggcttttttcatgcaatttaaattttagtgatgattgtgtcgcttgtaatgttagaactcgttgttgtgatttctgctgctttgatttgtaggttttgaacaagcggtttagaatgctaaaccacttatttacttgaaataacttttttc

SEQ ID NO: 84969 - protein, 224 aa, Arabidopsis thaliana
  peptide (1)..(224): Ceres Seq. ID no. 12678122
EVESQRMTHIAVERNRRKQMNEHLRVLRSLMPGSYVQRGDQASIIGGAIEFVRELEQLLQCLESQKRRRILGETGRDMTTTTTSSSSPITTVANQAQPLIITGNVTELEGGGGLREETAENKSCLADVEVKLLGFDAMIKILSRRRPGQLIKTIAALEDLHLSILHTNITTMEQTVLYSFNVKITSETRFTAEDIASSIQQIFSFIHANTNISGSSNLGNIVFT

SEQ ID NO: 84970 - protein, 218 aa, Arabidopsis thaliana
  peptide (1)..(218): Ceres Seq. ID no. 12678123
MTHIAVERNRRKQMNEHLRVLRSLMPGSYVQRGDQASIIGGAIEFVRELEQLLQCLESQKRRRILGETGRDMTTTTTSSSSPITTVANQAQPLIITGNVTELEGGGGLREETAENKSCLADVEVKLLGFDAMIKILSRRRPGQLIKTIAALEDLHLSILHTNITTMEQTVLYSFNVKITSETRFTAEDIASSIQQIFSFIHANTNISGSSNLGNIVFT

SEQ ID NO: 84971 - protein, 205 aa, Arabidopsis thaliana
  peptide (1)..(205): Ceres Seq. ID no. 12678124
MNEHLRVLRSLMPGSYVQRGDQASIIGGAIEFVRELEQLLQCLESQKRRRILGETGRDMTTTTTSSSSPITTVANQAQPLIITGNVTELEGGGGLREETAENKSCLADVEVKLLGFDAMIKILSRRRPGQLIKTIAALEDLHLSILHTNITTMEQTVLYSFNVKITSETRFTAEDIASSIQQIFSFIHANTNISGSSNLGNIVFT

SEQ ID NO: 84972 - DNA, 1820 bp, Arabidopsis thaliana
  misc_feature (1)..(1820): Ceres Seq. ID no. 12678129
  misc_feature (1)..(1820): Ortholog of  Ceres SEQ ID NO 15171040 as cited in SEQ ID NO 55332
acaatcatttgattatttcctcctctccgtatctgtgtctctcttctcttgatcttttagtgttcttgctttgtcgcttcaacgcttaagtttggatttgtgtgagtctgcataatcatggcgaggaagatgcttgttgatggtgagattgataaggtggcggctgatgaagccaacgcgacgcactatgattttgatttgtttgtcatcggtgccgggagtggcggtgttcgtgctgctaggttttcggctaatcatggcgctaaggttggtatttgtgagcttccatttcaccctattagctctgaggagattggaggcgttggtggaacctgtgttatccgtggttgtgttcctaaaaagattctcgtctatggagctacttacggtggtgaacttgaggatgctaaaaattatgggtgggaaataaatgagaaagtcgacttcacatggaagaagcttttgcaaaagaagactgatgagatactaagactgaataatatctacaagcggttattggcaaatgctgcggtgaaattgtatgaaggtgaaggaagagtagttggtcccaacgaagtggaggtgagacaaatagatggcacaaaaataagttataccgcaaagcacatattgattgccactggcagtcgggcgcaaaagcctaatattcctggacatgagctggctattacatctgatgaagctttgagcttggaagaatttcccaagcgtgctatagtgcttggaggagggtatattgctgtggagtttgcatcaatatggcgtggaatgggtgctactgtagatttattcttcaggaaggaacttccgctaaggggttttgatgacgaaatgagggcactagttgctagaaatcttgaaggaaggggcgttaatctgcatccacaaacaagtttgactcagttgacaaaaacagaccaggggatcaaagtcatatcgtcccatggggaggaattcgtggcagatgtcgtcctatttgctactggcagaagtcctaataccaaaagattgaatttagaagctgttggtgttgaacttgatcaggctggagctgtgaaggttgacgagtattcacgaactaatatacctagcatatgggctgtaggagatgccacaaaccgaattaaccttacacctgttgcgttaatggaggccacctgttttgcgaacactgcttttggtggaaagcctactaaagcagaatacagcaatgtcgcctgtgctgtattttgcataccaccactagctgtagtgggtctcagcgaagaagaagcagtagaacaagcaaccggtgatattctggtcttcacctcaggctttaatccaatgaagaacaccatttctggacgccaggaaaagacattgatgaagctaatagttgatgagaagagtgataaggttattggagcatccatgtgcggtcctgatgcagctgagatcatgcaggggattgcaattgcgctcaagtgtggagcaaccaaagcacaatttgatagcacggtaagttgggatacatccatcttctgcagaggaatttgtgacaatgcgcagtgtgaccagacgcattgcccacaaacccaaacctaagacaaatctatgaaccgcaaaatataaagagctatatagcatgaaaactcggtacacttaatttgatcaaagagtcagacaacgatgagtttaatcatactcgtgtcccaataaaggatttgtaatttttgtttgtttgtatgatgcttctcttcttacttacttgagaaaacatcaaggtttcttctcttattgcttagtggaactttatt

SEQ ID NO: 84973 - protein, 496 aa, Arabidopsis thaliana
  peptide (1)..(496): Ceres Seq. ID no. 12678130
MARKMLVDGEIDKVAADEANATHYDFDLFVIGAGSGGVRAARFSANHGAKVGICELPFHPISSEEIGGVGGTCVIRGCVPKKILVYGATYGGELEDAKNYGWEINEKVDFTWKKLLQKKTDEILRLNNIYKRLLANAAVKLYEGEGRVVGPNEVEVRQIDGTKISYTAKHILIATGSRAQKPNIPGHELAITSDEALSLEEFPKRAIVLGGGYIAVEFASIWRGMGATVDLFFRKELPLRGFDDEMRALVARNLEGRGVNLHPQTSLTQLTKTDQGIKVISSHGEEFVADVVLFATGRSPNTKRLNLEAVGVELDQAGAVKVDEYSRTNIPSIWAVGDATNRINLTPVALMEATCFANTAFGGKPTKAEYSNVACAVFCIPPLAVVGLSEEEAVEQATGDILVFTSGFNPMKNTISGRQEKTLMKLIVDEKSDKVIGASMCGPDAAEIMQGIAIALKCGATKAQFDSTVSWDTSIFCRGICDNAQCDQTHCPQTQT

SEQ ID NO: 84974 - protein, 492 aa, Arabidopsis thaliana
  peptide (1)..(492): Ceres Seq. ID no. 12678131
MLVDGEIDKVAADEANATHYDFDLFVIGAGSGGVRAARFSANHGAKVGICELPFHPISSEEIGGVGGTCVIRGCVPKKILVYGATYGGELEDAKNYGWEINEKVDFTWKKLLQKKTDEILRLNNIYKRLLANAAVKLYEGEGRVVGPNEVEVRQIDGTKISYTAKHILIATGSRAQKPNIPGHELAITSDEALSLEEFPKRAIVLGGGYIAVEFASIWRGMGATVDLFFRKELPLRGFDDEMRALVARNLEGRGVNLHPQTSLTQLTKTDQGIKVISSHGEEFVADVVLFATGRSPNTKRLNLEAVGVELDQAGAVKVDEYSRTNIPSIWAVGDATNRINLTPVALMEATCFANTAFGGKPTKAEYSNVACAVFCIPPLAVVGLSEEEAVEQATGDILVFTSGFNPMKNTISGRQEKTLMKLIVDEKSDKVIGASMCGPDAAEIMQGIAIALKCGATKAQFDSTVSWDTSIFCRGICDNAQCDQTHCPQTQT

SEQ ID NO: 84975 - protein, 272 aa, Arabidopsis thaliana
  peptide (1)..(272): Ceres Seq. ID no. 12678132
MGATVDLFFRKELPLRGFDDEMRALVARNLEGRGVNLHPQTSLTQLTKTDQGIKVISSHGEEFVADVVLFATGRSPNTKRLNLEAVGVELDQAGAVKVDEYSRTNIPSIWAVGDATNRINLTPVALMEATCFANTAFGGKPTKAEYSNVACAVFCIPPLAVVGLSEEEAVEQATGDILVFTSGFNPMKNTISGRQEKTLMKLIVDEKSDKVIGASMCGPDAAEIMQGIAIALKCGATKAQFDSTVSWDTSIFCRGICDNAQCDQTHCPQTQT

SEQ ID NO: 84976 - DNA, 1531 bp, Arabidopsis thaliana
  misc_feature (1)..(1531): Ceres Seq. ID no. 12678133
  misc_feature (1)..(1531): Ortholog of  Ceres SEQ ID NO 15171040 as cited in SEQ ID NO 55332
atggcgaggaagatgcttgttgatggtgagattgataaggtggcggctgatgaagccaacgcgacgcactatgattttgatttgtttgtcatcggtgccgggagtggcggtgttcgtgctgctaggttttcggctaatcatggcgctaaggttggtatttgtgagcttccatttcaccctattagctctgaggagattggaggcgttggtggaacctgtgttatccgtggttgtgttcctaaaaagattctcgtctatggagctacttacggtggtgaacttgaggatgctaaaaattatgggtgggaaataaatgagaaagtcgacttcacatggaagaagcttttgcaaaagaagactgatgagatactaagactgaataatatctacaagcggttattggcaaatgctgcggtgaaattgtatgaaggtgaaggaagagtagttggtcccaacgaagtggaggtgagacaaatagatggcacaaaaataagttataccgcaaagcacatattgattgccactggcagtcgggcgcaaaagcctaatattcctggacatgagctggctattacatctgatgaagctttgagcttggaagaatttcccaagcgtgctatagtgcttggaggagggtatattgctgtggagtttgcatcaatatggcgtggaatgggtgctactgtagatttattcttcaggaaggaacttccgctaaggggttttgatgacgaaatgagggcactagttgctagaaatcttgaaggaaggggcgttaatctgcatccacaaacaagtttgactcagttgacaaaaacagaccaggggatcaaagtcatatcgtcccatggggaggaattcgtggcagatgtcgtcctatttgctactggcagaagtcctaataccaaaagattgaatttagaagctgttggtgttgaacttgatcaggctggagctgtgaaggttgacgagtattcacgaactaatatacctagcatatgggctgtaggagatgccacaaaccgaattaaccttacacctgttgcgttaatggaggccacctgttttgcgaacactgcttttggtggaaagcctactaaagcagaatacagcaatgtcgcctgtgctgtattttgcataccaccactagctgtagtgggtctcagcgaagaagaagcagtagaacaagcaaccggtgatattctggtcttcacctcaggctttaatccaatgaagaacaccatttctggacgccaggaaaagacattgatgaagctaatagttgatgagaagagtgataaggttattggagcatccatgtgcggtcctgatgcagctgagatcatgcaggggattgcaattgcgctcaagtgtggagcaaccaaagcacaatttgatagcacggttgggatacatccatcttctgcagaggaatttgtgacaatgcgcagtgtgaccagacgcattgcccacaaacccaaacctaagacaaatctatgaaccgcaaaatataaagagctatatagcatga

SEQ ID NO: 84977 - protein, 499 aa, Arabidopsis thaliana; identical to SEQ ID NO: 24219
  peptide (1)..(499): Ceres Seq. ID no. 12678134

SEQ ID NO: 84978 - protein, 495 aa, Arabidopsis thaliana; identical to SEQ ID NO: 24220
  peptide (1)..(495): Ceres Seq. ID no. 12678135

SEQ ID NO: 84979 - protein, 275 aa, Arabidopsis thaliana; identical to SEQ ID NO: 24221
  peptide (1)..(275): Ceres Seq. ID no. 12678136

SEQ ID NO: 84980 - DNA, 1945 bp, Arabidopsis thaliana
  misc_feature (1)..(1945): Ceres Seq. ID no. 12678139
  misc_feature (1)..(1945): Ortholog of  Ceres SEQ ID NO 14308095 as cited in SEQ ID NO 55286
aaagattcccactcggaatgttttaataatcttttatcatacaatttgttctctctctctctctctctctctctaccataaagcaaatgtgatcagagacaaagcatacaaagaagttcctcattcaaaaaagatttctcagccatcaaaattctctttctcttcatccaacaaaaaaaaagcatacctctttttcttccatatagataagttaattaagaaaacgaattatcaggttttgtttcggctgatctgaggaagttcatctatggatacggctcagtggccacaggtactatacacaaacatttacatatttatatattcgtacaattcaatatgtatgtgttgatgtagtttagatcatctgatttatctatctactagatcttgacttagaattttaatgttttcggatcttcttctttttgatgttactcttctcttcaacagtttttagatcttctcctttaattttaaatatatggttttttttttcactttaccctttattaatttgctttttcttttatgtttttagttaaagcttctctcaaatatctcaattatcattttgatcttgatgaaaatccattaatttgttgatagacagtacatatatatgtcaattatgtcttctatacttgtatataggcaaaggtttttgtgctaacgtttggaagagatgtatttttttattttgatgatcaggagattgtagtgaagcccttggaagaaatagtaacaaacacatgcccaaagccgcaaccgcaaccgcttcaaccgcagcagccaccgtcggtgggtggagagaggaaggcaaggccagaaaaggatcaagctgtaaactgtccgagatgtaactcaaccaacacaaagttttgttactacaacaattatagtttgacgcagccaagatacttctgcaaaggttgtagaaggtattggaccgaaggcggttcgcttaggaacattcctgttggcggtggctcaagaaagaacaagagatctcactcttcttcttctgatattagtaacaatcactcggattctacacaaccagctacaaagaagcatctctctgatcatcaccaccacctcatgagcatgtctcaacaaggtttgaccggtcaaaaccctaaattccttgagacgacccaacaagatctcaatttaggtttttcaccacatgggatgattaggaccaacttcactgacctcatccacaacattggcaacaacaccaacaagagcaacaacaataacaatccattgattgtttcttcatgttctgccatggctacttcttctctggatctcataagaaacaatagtaacaatgggaattcttcaaattcttccttcatgggatttccagttcataatcaagatccagcatcaggagggttttcaatgcaagatcattacaagccttgcaacacaaacaccacactgctagggttttcattagatcatcatcataataatggatttcatggagggtttcaaggaggagaagaaggtggagaaggtggtgatgatgtgaatggaaggcacttgtttccttttgaggatttgaaattgccagtttcttcttcatcagcaacaattaatgtcgacattaatgaacatcagaagcgaggaagcggtagtgatgcagctgctacgtctggtgggtattggactgggatgttgagtggaggatcatggtgctaattaatttctcggtttggttgatgaagatagtactattagtggttaattattgctatttatttaattaatcaatatgttcttaatttcactttgaattttcttattggtgggtttttcctttttttttgttaacttggatttttaaggatactattgggggtgcatgcatattgaatgactttaatttgttatccctaacacagattataaatgatacattggttggtct

SEQ ID NO: 84981 - protein, 204 aa, Arabidopsis thaliana
  peptide (1)..(204): Ceres Seq. ID no. 12678140
MSMSQQGLTGQNPKFLETTQQDLNLGFSPHGMIRTNFTDLIHNIGNNTNKSNNNNNPLIVSSCSAMATSSLDLIRNNSNNGNSSNSSFMGFPVHNQDPASGGFSMQDHYKPCNTNTTLLGFSLDHHHNNGFHGGFQGGEEGGEGGDDVNGRHLFPFEDLKLPVSSSSATINVDINEHQKRGSGSDAAATSGGYWTGMLSGGSWC

SEQ ID NO: 84982 - protein, 202 aa, Arabidopsis thaliana
  peptide (1)..(202): Ceres Seq. ID no. 12678141
MSQQGLTGQNPKFLETTQQDLNLGFSPHGMIRTNFTDLIHNIGNNTNKSNNNNNPLIVSSCSAMATSSLDLIRNNSNNGNSSNSSFMGFPVHNQDPASGGFSMQDHYKPCNTNTTLLGFSLDHHHNNGFHGGFQGGEEGGEGGDDVNGRHLFPFEDLKLPVSSSSATINVDINEHQKRGSGSDAAATSGGYWTGMLSGGSWC

SEQ ID NO: 84983 - protein, 173 aa, Arabidopsis thaliana
  peptide (1)..(173): Ceres Seq. ID no. 12678142
MIRTNFTDLIHNIGNNTNKSNNNNNPLIVSSCSAMATSSLDLIRNNSNNGNSSNSSFMGFPVHNQDPASGGFSMQDHYKPCNTNTTLLGFSLDHHHNNGFHGGFQGGEEGGEGGDDVNGRHLFPFEDLKLPVSSSSATINVDINEHQKRGSGSDAAATSGGYWTGMLSGGSWC

SEQ ID NO: 84984 - DNA, 2407 bp, Arabidopsis thaliana
  misc_feature (1)..(2407): Ceres Seq. ID no. 12678151
  misc_feature (1)..(2407): Ortholog of  Ceres SEQ ID NO 14311156 as cited in SEQ ID NO 54767
  misc_feature (1)..(2407): Ortholog of  Ceres SEQ ID NO 14303524 as cited in SEQ ID NO 59500
  misc_feature (1)..(2407): Ortholog of  Ceres SEQ ID NO 13658778 as cited in SEQ ID NO 66511
atcaatagttcaatactaagaaaccggcctatatatatatatttgtggtcactaatttctccaaaaaccagttgccttccgtaaaaagatggaacctcagagaaaacactcgacagccctccacacgtgtcatccctgccggcgaaccattccatacagaatctacgccgtatttcacacgtgtggcatcatagctctcatgtatcaccatgtacactcaattgtcaacgcaaacaacactctaataacatgtcttcttctcctctccgatattgttctcgccttcatgtgggcaaccacaacttccctccggttaaacccgattcatcggaccgagtaccctgaaaaatatgctgctaaaccggaggactttccaaagctggacgtttttatatgcacggctgatccgtacaaggagcctccgatgatggtggttaacaccgctttatcggtgatggcttacgagtatccgtctcataagatctcagtgtacgtatcggacgatggaggatcttccttgactttgtttgctcttatggaggctgccaagttctctaagcattggttgcccttttgcaagaataacaatgttcaagatcgctctcctgaagtttatttttcttcaaagtcacattcttcgagtgatgaagctgaaaatcttaagatgatgtacgaagacatgaagagtagagtcgaacatgtggtcgagagcggaaaagttgagactgcgtttatcgcatgcgatcaatttagttgtgtgttcgatctgtggacagataaattcactcgtcatgaccatcctaccattattatggtgctacaacataacgaaacagagatgatgccaaaccttatatatgtttcaagagaaaagagtaaagtttcaccacatcatttcaaagccggtgctcttaatactttgttacgtgtatctgccgtgatgacaaactcaccaatcattctaacactagattgtgacatgtactcaaacaatcctacaacaccacttcatgctctgtgctatttgtcagaccctaaaatcaattttgatttaggatttgtgcaatttcctcaaaaatttcaaggagtaaacaaaaatgatatttatgcatccgagctcaaacgcccatttgacatcaacacggttgggtttgatggacttatgggaccagttcatatgggaactgggtgtttcttcaatcgacgggcgttttatgggcctccgactactttgattttgcctgagatagaaacatttgggccaaatcggattgccgataagcccattaaagcccaagatattttggcgttggcacacgatgtagcaggatgtaactacgagtgcaacaccaattggggatccaagataggtttcagatatgggtcattagtagaagactacttcacaggatttatgctccattgtgaaggatggagatcaattttttgcagcccgacaaaagctgcattttatggagactccccaaaatgcctaacggatgtaataggccaacaaatccgatggtccgttggacttcttgaagtagctttttcaagatacaatccacttacctatggaatcaagccattgagcctattaatgagcttaggttattgccactatgcattttggccattttggtgtattcctctcgttgtctatggaattttaccccaagttgccctcatacatggagttagcgtctttcccaaggcatcggatccatggttttggctttacattatcttgtttctcggtgggtacgcgcaagatctatcagactttttattagaaggaggaacttatcggaaatggtggaacgatcaaagaatgtggatggtgagaggactctcttctttcttctttggttttacagagttcactctcaaaaccctaaacctctccactcaaggatataatgtcacgagtaaatccaacgacgataatgaacaaatgaagcggtatgagcaagagatcttcgattttgggccctcttcgtccatgttcttgcccattactacggtcgccatcatgaatctgctagcttttatgcgtggcctatatggtattttcacttggggagaaggacccgtccttgaactgatgctagcgagtttcgcggtggtgaattgcttaccgatctatgaagccatggtgttgaggatcgatgacggaaaattaccaaaaaggatttgtttcttagctgggctcctcagttttgttcttaccgggtcaggctacttcttcctcaagtaacttcaccattaggccattgtaaaaaaaaaaaaaacacttcaccatgagggttaattttcaacaagaatgatatgaattaatgcatcttgctcaagctgaagcaagagagaataatgtaatgaatccttcttaatatttacttttttatct

SEQ ID NO: 84985 - protein, 722 aa, Arabidopsis thaliana
  peptide (1)..(722): Ceres Seq. ID no. 12678152
MEPQRKHSTALHTCHPCRRTIPYRIYAVFHTCGIIALMYHHVHSIVNANNTLITCLLLLSDIVLAFMWATTTSLRLNPIHRTEYPEKYAAKPEDFPKLDVFICTADPYKEPPMMVVNTALSVMAYEYPSHKISVYVSDDGGSSLTLFALMEAAKFSKHWLPFCKNNNVQDRSPEVYFSSKSHSSSDEAENLKMMYEDMKSRVEHVVESGKVETAFIACDQFSCVFDLWTDKFTRHDHPTIIMVLQHNETEMMPNLIYVSREKSKVSPHHFKAGALNTLLRVSAVMTNSPIILTLDCDMYSNNPTTPLHALCYLSDPKINFDLGFVQFPQKFQGVNKNDIYASELKRPFDINTVGFDGLMGPVHMGTGCFFNRRAFYGPPTTLILPEIETFGPNRIADKPIKAQDILALAHDVAGCNYECNTNWGSKIGFRYGSLVEDYFTGFMLHCEGWRSIFCSPTKAAFYGDSPKCLTDVIGQQIRWSVGLLEVAFSRYNPLTYGIKPLSLLMSLGYCHYAFWPFWCIPLVVYGILPQVALIHGVSVFPKASDPWFWLYIILFLGGYAQDLSDFLLEGGTYRKWWNDQRMWMVRGLSSFFFGFTEFTLKTLNLSTQGYNVTSKSNDDNEQMKRYEQEIFDFGPSSSMFLPITTVAIMNLLAFMRGLYGIFTWGEGPVLELMLASFAVVNCLPIYEAMVLRIDDGKLPKRICFLAGLLSFVLTGSGYFFLK

SEQ ID NO: 84986 - protein, 685 aa, Arabidopsis thaliana
  peptide (1)..(685): Ceres Seq. ID no. 12678153
MYHHVHSIVNANNTLITCLLLLSDIVLAFMWATTTSLRLNPIHRTEYPEKYAAKPEDFPKLDVFICTADPYKEPPMMVVNTALSVMAYEYPSHKISVYVSDDGGSSLTLFALMEAAKFSKHWLPFCKNNNVQDRSPEVYFSSKSHSSSDEAENLKMMYEDMKSRVEHVVESGKVETAFIACDQFSCVFDLWTDKFTRHDHPTIIMVLQHNETEMMPNLIYVSREKSKVSPHHFKAGALNTLLRVSAVMTNSPIILTLDCDMYSNNPTTPLHALCYLSDPKINFDLGFVQFPQKFQGVNKNDIYASELKRPFDINTVGFDGLMGPVHMGTGCFFNRRAFYGPPTTLILPEIETFGPNRIADKPIKAQDILALAHDVAGCNYECNTNWGSKIGFRYGSLVEDYFTGFMLHCEGWRSIFCSPTKAAFYGDSPKCLTDVIGQQIRWSVGLLEVAFSRYNPLTYGIKPLSLLMSLGYCHYAFWPFWCIPLVVYGILPQVALIHGVSVFPKASDPWFWLYIILFLGGYAQDLSDFLLEGGTYRKWWNDQRMWMVRGLSSFFFGFTEFTLKTLNLSTQGYNVTSKSNDDNEQMKRYEQEIFDFGPSSSMFLPITTVAIMNLLAFMRGLYGIFTWGEGPVLELMLASFAVVNCLPIYEAMVLRIDDGKLPKRICFLAGLLSFVLTGSGYFFLK

SEQ ID NO: 84987 - protein, 656 aa, Arabidopsis thaliana
  peptide (1)..(656): Ceres Seq. ID no. 12678154
MWATTTSLRLNPIHRTEYPEKYAAKPEDFPKLDVFICTADPYKEPPMMVVNTALSVMAYEYPSHKISVYVSDDGGSSLTLFALMEAAKFSKHWLPFCKNNNVQDRSPEVYFSSKSHSSSDEAENLKMMYEDMKSRVEHVVESGKVETAFIACDQFSCVFDLWTDKFTRHDHPTIIMVLQHNETEMMPNLIYVSREKSKVSPHHFKAGALNTLLRVSAVMTNSPIILTLDCDMYSNNPTTPLHALCYLSDPKINFDLGFVQFPQKFQGVNKNDIYASELKRPFDINTVGFDGLMGPVHMGTGCFFNRRAFYGPPTTLILPEIETFGPNRIADKPIKAQDILALAHDVAGCNYECNTNWGSKIGFRYGSLVEDYFTGFMLHCEGWRSIFCSPTKAAFYGDSPKCLTDVIGQQIRWSVGLLEVAFSRYNPLTYGIKPLSLLMSLGYCHYAFWPFWCIPLVVYGILPQVALIHGVSVFPKASDPWFWLYIILFLGGYAQDLSDFLLEGGTYRKWWNDQRMWMVRGLSSFFFGFTEFTLKTLNLSTQGYNVTSKSNDDNEQMKRYEQEIFDFGPSSSMFLPITTVAIMNLLAFMRGLYGIFTWGEGPVLELMLASFAVVNCLPIYEAMVLRIDDGKLPKRICFLAGLLSFVLTGSGYFFLK

SEQ ID NO: 84988 - DNA, 1484 bp, Arabidopsis thaliana
  misc_feature (1)..(1484): Ceres Seq. ID no. 12678155
  misc_feature (1)..(1484): Ortholog of  Ceres SEQ ID NO 13658778 as cited in SEQ ID NO 66511
atagtgtgtatattcagaaaagttatcaatagttcaatactaagaaaccggcctatatatatatatttgtggtcactaatttctccaaaaaccagttgccttccgtaaaaagatggaacctcagagaaaacactcgacagccctccacacgtgtcatccctgccggcgaaccattccatacagaatctacgccgtatttcacacgtgtggcatcatagctctcatgtatcaccatgtacactcaattgtcaacgcaaacaacactctaataacatgtcttcttctcctctccgatattgttctcgccttcatgtgggcaaccacaacttccctccggttaaacccgattcatcggaccgagtaccctgaaaaatatgctgctaaaccggaggactttccaaagctggacgtttttatatgcacggctgatccgtacaaggagcctccgatgatggtggttaacaccgctttatcggtgatggcttacgagtatccgtctcataagatctcagtgtacgtatcggacgatggaggatcttccttgactttgtttgctcttatggaggctgccaagttctctaagcattggttgcccttttgcaagaataacaatgttcaagatcgctctcctgaagtttatttttcttcaaagtcacattcttcgagtgatgaagctgaaaatcttaagatgatgtacgaagacatgaagagtagagtcgaacatgtggtcgagagcggaaaagttgagactgcgtttatcgcatgcgatcaatttagttgtgtgttcgatctgtggacagataaattcactcgtcatgaccatcctaccattattatggtgctacaacataacgaaacagagatgatgccaaaccttatatatgtttcaagagaaaagagtaaagtttcaccacatcatttcaaagccggtgctcttaatactttgttacgtgtatctgccgtgatgacaaactcaccaatcattctaacactagattgtgacatgtactcaaacaatcctacaacaccacttcatgctctgtgctatttgtcagaccctaaaatcaattttgatttaggatttgtgcaatttcctcaaaaatttcaaggagtaaacaaaaatgatatttatgcatccgagctcaaacgcccatttgacatcaacacggttgggtttgatggacttatgggaccagttcatatgggaactgggtgtttcttcaatcgacgggcgttttatgggcctccgactactttgattttgcctgagatagaaacatttgggccaaatcggattgccgataagcccattaaagcccaagatattttggcgttggcacacgatgtagcaggatgtaactacgagtgcaacaccaattggggatccaaggtaagattaaaatgaactttagctttcttttatgtatgttgattttttggttatgtttacagattttgtttcttttacatcaactagtcttctc

SEQ ID NO: 84989 - protein, 430 aa, Arabidopsis thaliana; identical to SEQ ID NO: 40164
  peptide (1)..(430): Ceres Seq. ID no. 12678156

SEQ ID NO: 84990 - protein, 393 aa, Arabidopsis thaliana; identical to SEQ ID NO: 40165
  peptide (1)..(393): Ceres Seq. ID no. 12678157

SEQ ID NO: 84991 - protein, 364 aa, Arabidopsis thaliana; identical to SEQ ID NO: 40166
  peptide (1)..(364): Ceres Seq. ID no. 12678158

SEQ ID NO: 84992 - DNA, 1837 bp, Arabidopsis thaliana
  misc_feature (1)..(1837): Ceres Seq. ID no. 12678249
  misc_feature (1)..(1837): Ortholog of  Ceres SEQ ID NO 13582285 as cited in SEQ ID NO 59817
tttcatttgcttcgtctctccggttgttaccaccacacaacgccatggaagctgctcttgctgcatgcgctcttccatcgctccgaattctcaatacgaaacctcgtttcagatgttccttctccaatccaagcctacccatttctcctaattcccttatcacccgcaaatcaagtcgattcacaaccgcagtatcatcaccaccatcatcatcagccgctacgtcaacgaattctccaccggaacctgaagccctattcgaacccgggtcggataagttcgattggtacgctaattggtacccagtgatgccaatttgcgatcttgacaagaaggttcctcatgggaagaaagttatggggattgatttggttgtttggtgggataggaacgagaagcaatggaaagtgatggatgacacgtgtcctcatcgtcttgctcctttgtctgatggaaggattgatcaatgggggaggttgcaatgtgtttatcatggatggtgctttaatggttccggtgactgtaaactcattcctcaagctcctcctgatggtcctccggtccacactttcaagcaagcttgtgtagctgtttacccgagtactgtgcagcatgagatcatttggttttggccaaacagtgatccaaagtacaaaaacattattgaaaccaacaagcctccttacattccagagttagaagacccatcattcactaagttgatggggaatcgtgatattccttacgggtacgatgtcttggtggaaaacctcatggacccggctcatgttccttatgcacattatggactgatgcggtttcctaaaccaaaaggcaaatacataatttgtatttcaaatagttgttttaatccttttaccaaccttcagattcttcttgcagagaagattgacagagaaggggggaaaccactcgaaatcaacgttaaaaaactagacaacaaagggttcttttcaaaacaagaatggggttattctaattttattgcaccatgtgtgtatcgctcttccacagaccctctaccagagcaggaacatgagtatcccgcaccagctgcttctgacaaggcggcattgtcaaagcggagattgtctttgatctttatatgtattccggtcagtccaggtcgtagtaggctgatatggacgttcccgaggaattttggtgtatttattgataagattgtccctagatgggtgtttcacattggtcaaaatacgattctagactcagatttgcacctccttcatgtagaggagcggaagatactggagagaggccctgaaaactggcaaaaagcttgctttatcccaacaaaatcagacgctaatgtggttacattcaggagatggtttaacaagtacagcgaggctcgagtcgattggagaggaaagtttgatccatttcttcttcctcctacgcctccccgagaacagctcttcgacaggtattggtcgcatgttgagaactgcagcagctgcaagaaagctcacaaatatctcaatgcgctagaggtgatcttacaaatcgcatccgttgctatgatcggagtcatggcggtgttgaagcaaacgacaatgtcgaatgtggctagaattgcagtgcttgtggcggctgttttaagttttgcagcttcaaagtggctatcacacttcatctacaagacattccattaccatgactacaaccatgctgttgtttgaaatgtatattggtgtttgtacttcgtatatatactcatcggatgtattcagtccacatggtgttgtacataacagttatacagaaactaattcttgaatctataccgtttact

SEQ ID NO: 84993 - protein, 573 aa, Arabidopsis thaliana
  peptide (1)..(573): Ceres Seq. ID no. 12678250
SFASSLRLLPPHNAMEAALAACALPSLRILNTKPRFRCSFSNPSLPISPNSLITRKSSRFTTAVSSPPSSSAATSTNSPPEPEALFEPGSDKFDWYANWYPVMPICDLDKKVPHGKKVMGIDLVVWWDRNEKQWKVMDDTCPHRLAPLSDGRIDQWGRLQCVYHGWCFNGSGDCKLIPQAPPDGPPVHTFKQACVAVYPSTVQHEIIWFWPNSDPKYKNIIETNKPPYIPELEDPSFTKLMGNRDIPYGYDVLVENLMDPAHVPYAHYGLMRFPKPKGKYIICISNSCFNPFTNLQILLAEKIDREGGKPLEINVKKLDNKGFFSKQEWGYSNFIAPCVYRSSTDPLPEQEHEYPAPAASDKAALSKRRLSLIFICIPVSPGRSRLIWTFPRNFGVFIDKIVPRWVFHIGQNTILDSDLHLLHVEERKILERGPENWQKACFIPTKSDANVVTFRRWFNKYSEARVDWRGKFDPFLLPPTPPREQLFDRYWSHVENCSSCKKAHKYLNALEVILQIASVAMIGVMAVLKQTTMSNVARIAVLVAAVLSFAASKWLSHFIYKTFHYHDYNHAVV

SEQ ID NO: 84994 - protein, 559 aa, Arabidopsis thaliana
  peptide (1)..(559): Ceres Seq. ID no. 12678251
MEAALAACALPSLRILNTKPRFRCSFSNPSLPISPNSLITRKSSRFTTAVSSPPSSSAATSTNSPPEPEALFEPGSDKFDWYANWYPVMPICDLDKKVPHGKKVMGIDLVVWWDRNEKQWKVMDDTCPHRLAPLSDGRIDQWGRLQCVYHGWCFNGSGDCKLIPQAPPDGPPVHTFKQACVAVYPSTVQHEIIWFWPNSDPKYKNIIETNKPPYIPELEDPSFTKLMGNRDIPYGYDVLVENLMDPAHVPYAHYGLMRFPKPKGKYIICISNSCFNPFTNLQILLAEKIDREGGKPLEINVKKLDNKGFFSKQEWGYSNFIAPCVYRSSTDPLPEQEHEYPAPAASDKAALSKRRLSLIFICIPVSPGRSRLIWTFPRNFGVFIDKIVPRWVFHIGQNTILDSDLHLLHVEERKILERGPENWQKACFIPTKSDANVVTFRRWFNKYSEARVDWRGKFDPFLLPPTPPREQLFDRYWSHVENCSSCKKAHKYLNALEVILQIASVAMIGVMAVLKQTTMSNVARIAVLVAAVLSFAASKWLSHFIYKTFHYHDYNHAVV

SEQ ID NO: 84995 - protein, 471 aa, Arabidopsis thaliana
  peptide (1)..(471): Ceres Seq. ID no. 12678252
MPICDLDKKVPHGKKVMGIDLVVWWDRNEKQWKVMDDTCPHRLAPLSDGRIDQWGRLQCVYHGWCFNGSGDCKLIPQAPPDGPPVHTFKQACVAVYPSTVQHEIIWFWPNSDPKYKNIIETNKPPYIPELEDPSFTKLMGNRDIPYGYDVLVENLMDPAHVPYAHYGLMRFPKPKGKYIICISNSCFNPFTNLQILLAEKIDREGGKPLEINVKKLDNKGFFSKQEWGYSNFIAPCVYRSSTDPLPEQEHEYPAPAASDKAALSKRRLSLIFICIPVSPGRSRLIWTFPRNFGVFIDKIVPRWVFHIGQNTILDSDLHLLHVEERKILERGPENWQKACFIPTKSDANVVTFRRWFNKYSEARVDWRGKFDPFLLPPTPPREQLFDRYWSHVENCSSCKKAHKYLNALEVILQIASVAMIGVMAVLKQTTMSNVARIAVLVAAVLSFAASKWLSHFIYKTFHYHDYNHAVV

SEQ ID NO: 84996 - DNA, 1516 bp, Arabidopsis thaliana
  misc_feature (1)..(1516): Ceres Seq. ID no. 12678266
  misc_feature (1)..(1516): Ortholog of  Ceres SEQ ID NO 14301482 as cited in SEQ ID NO 63355
gttcgtcattcttcctctaagctttatctttctgatctctgaccttgtgtctctgtgcatgtgtgtttatctgctactgtgttttgtcggtttgatctccaaaaaccagacatgaacagaggaagcttatgccctaatcccatctgtctccctcctcttgagcaatccatctccaaattcttaacacagagtggaacgtttaaagatggagatcttcgagtgaacaaagatggaatccagaccgtgtctctgtccgaaccaggagctccacctcctattgagccattggacaaccaattgagtttggcagatttagaagtgatcaaagtcattggcaaaggaagtagtggtaatgtccagttggtcaaacacaaactcactcaacagtttttcgctcttaaggtcattcaattgaacacagaagaatcaacatgtcgggcgatttctcaggagctgagaataaacttgagctcgcaatgtccatatcttgtctcatgttatcaatctttctaccacaacggtcttgtttcaatcatattggaattcatggatggtggatcccttgcagacttgttaaagaaagtcggaaaagttcctgaaaacatgctatctgccatctgcaagcgagttcttcgaggtctttgttatattcatcatgagaggcgaatcattcatcgggacttaaagccttcaaacttgctaatcaatcatagaggtgaagtcaagatcacagactttggtgtcagcaagatcttgacaagcacaagtagtcttgctaattctttcgtgggcacatacccttatatgtctccagagagaatcagcgggagtttgtacagtaacaagagcgatatttggagcttgggactggttttgctcgaatgtgcaacgggtaaattcccgtatactcctccagaacacaagaaaggatggagtagcgtgtacgagcttgtggacgccattgttgaaaacccgcctccttgtgcaccttccaatctcttttctccagagttttgctccttcatctcgcaatggtgagacagatttcgaccagttgtcatgtcatttttgttgctataacgagtaggcatttgaaatggtgctttaacttgtgtagtgtacaaaaagatccaagggacagaaaatcagcaaaggagcttctggtgcgttaatcatataagactctgagtctttcaccttgtactgtcttggactacttttaacgatcttttttctggttccatcttggtgaataggaacacaagttcgtaaagatgtttgaagattcggatacaaatctctcggcttacttcaccgacgcaggatctttgattcccccacttgctaactagaaccgagtttgaacaatcttttaacctccaagttattatttcatatccactagaagagattttatgaaagataaatttacgagatgttatgacttaagagacttgtctacaaaatttgatttaatgtgtgtacttttcacatcactattataaacacaactatc

SEQ ID NO: 84997 - protein, 308 aa, Arabidopsis thaliana
  peptide (1)..(308): Ceres Seq. ID no. 12678267
MNRGSLCPNPICLPPLEQSISKFLTQSGTFKDGDLRVNKDGIQTVSLSEPGAPPPIEPLDNQLSLADLEVIKVIGKGSSGNVQLVKHKLTQQFFALKVIQLNTEESTCRAISQELRINLSSQCPYLVSCYQSFYHNGLVSIILEFMDGGSLADLLKKVGKVPENMLSAICKRVLRGLCYIHHERRIIHRDLKPSNLLINHRGEVKITDFGVSKILTSTSSLANSFVGTYPYMSPERISGSLYSNKSDIWSLGLVLLECATGKFPYTPPEHKKGWSSVYELVDAIVENPPPCAPSNLFSPEFCSFISQW

SEQ ID NO: 84998 - protein, 163 aa, Arabidopsis thaliana
  peptide (1)..(163): Ceres Seq. ID no. 12678268
MDGGSLADLLKKVGKVPENMLSAICKRVLRGLCYIHHERRIIHRDLKPSNLLINHRGEVKITDFGVSKILTSTSSLANSFVGTYPYMSPERISGSLYSNKSDIWSLGLVLLECATGKFPYTPPEHKKGWSSVYELVDAIVENPPPCAPSNLFSPEFCSFISQW

SEQ ID NO: 84999 - DNA, 2075 bp, Arabidopsis thaliana
  misc_feature (1)..(2075): Ceres Seq. ID no. 12678269
  misc_feature (1)..(2075): Ortholog of  Ceres SEQ ID NO 13599900 as cited in SEQ ID NO 531
  misc_feature (1)..(2075): Ortholog of  Ceres SEQ ID NO 13596509 as cited in SEQ ID NO 62004
  misc_feature (1)..(2075): Ortholog of  Ceres SEQ ID NO 13659971 as cited in SEQ ID NO 67565
  misc_feature (1)..(2075): Ortholog of  Ceres SEQ ID NO 13500385 as cited in SEQ ID NO 67583
aagctatttggcatatacttgtcttcgcttttcgtagctctttcgcgcataataataactgaggttgttgtttaatcaagaagagtgtgcaaaaattggaaggccagggaatgcagaaacatgtatttgaaagctgaactcaattgctctacaccaccctctcagatcctttgtccctttgggcccttgttctccctcatcccttatgtggacacccattttctaaacccctgcttccacaccttccagccttcctctcacaatgctagaaaaaacgccacttggaagcatgatctttgcgaagacggttgatccgacactaacagcctcctcctgagttcctcctctaccctttatgttgtctgcgttttagtatattctagggtggtctttttatttagtggtattagtagtgctctaagctaaccagttagtcaatggagaagaaaggatctgtgttgatgctccgttatgaggttgggaagtttctcggtcaaggtacctttgctaaggtataccatgctaggcatttgaaaactggtgatagtgtagcgattaaggtcatcgacaaagaaagaatcctcaaagttggcatgaccgagcagattaagcgagagatctctgccatgagactcttgaggcatcccaacatcgttgagctccatgaagtcatggccaccaaatctaaaatctacttcgtcatggaacatgttaagggtggtgagctcttcaacaaagtgtcaactgggaagctgagagaagacgttgcgagaaagtactttcagcagcttgtacgcgctgttgacttctgtcacagccgtggagtatgccacagggacctgaagccggagaatctcttgttggatgagcatgggaatcttaagatctctgattttggtctcagcgctctttctgactctagaaggcaagacgggttgctgcatactacatgcgggacccctgcatatgttgcaccggaggtgataagcaggaacgggtatgatgggtttaaagcggatgtgtggtcctgtggagtgatattgttcgtcttgctcgctggatatcttcctttccgtgattccaatctgatggagctgtataagaagataggcaaagctgaagtcaagttccccaactggcttgctccgggggcaaagagattgctcaagaggatcttggatcctaaccccaacacaagggtatcaactgagaaaataatgaagagctcttggttccgtaaaggcctacaagaggaggtgaaagaatcagttgaggaagagacagaagtggacgcagaggcagagggaaacgcaagtgcagagaaggaaaagaagcggtgtatcaacctgaacgcgtttgagatcatatctctgtccacggggtttgatctctcgggactgttcgagaagggagaggagaaggaggagatgaggtttacatcaaacagagaggcatctgagataacagagaagctggtggagattgggaaggaccttaagatgaaagtgaggaagaaggaacacgaatggagggtgaaaatgtcggctgaggctacagtggtggaagcggaagtgtttgagattgcgccgagctatcacatggtggtgctaaagaagagcggtggagatactgctgagtataagagagtcatgaaggagagtataagaccggctttgatcgactttgtattagcttggcactgaaacatattctatcctttttatgtgtcttcttcttttagaatgtttttcttgttttgttttgccaatgtgtttagtttatgtattttctcttgagtctcatcttaagacgtgtttcgtatttttctaggtgtcagtgtaacaataataatatgtgaggaccaattatatagtttgagacaaaataagtagatttctttatcagataaaataaaataaattgagccttaatgaaataagccaatagaccgacaacggttttaggaagcattatactactattttgtagttatttcgtattattgtagtcttttggatgatctttttgtgtattaacaaagtcaaaacaaatttataatttaacttacgttacag

SEQ ID NO: 85000 - protein, 421 aa, Arabidopsis thaliana
  peptide (1)..(421): Ceres Seq. ID no. 12678270
MEKKGSVLMLRYEVGKFLGQGTFAKVYHARHLKTGDSVAIKVIDKERILKVGMTEQIKREISAMRLLRHPNIVELHEVMATKSKIYFVMEHVKGGELFNKVSTGKLREDVARKYFQQLVRAVDFCHSRGVCHRDLKPENLLLDEHGNLKISDFGLSALSDSRRQDGLLHTTCGTPAYVAPEVISRNGYDGFKADVWSCGVILFVLLAGYLPFRDSNLMELYKKIGKAEVKFPNWLAPGAKRLLKRILDPNPNTRVSTEKIMKSSWFRKGLQEEVKESVEEETEVDAEAEGNASAEKEKKRCINLNAFEIISLSTGFDLSGLFEKGEEKEEMRFTSNREASEITEKLVEIGKDLKMKVRKKEHEWRVKMSAEATVVEAEVFEIAPSYHMVVLKKSGGDTAEYKRVMKESIRPALIDFVLAWH

SEQ ID NO: 85001 - protein, 413 aa, Arabidopsis thaliana
  peptide (1)..(413): Ceres Seq. ID no. 12678271
MLRYEVGKFLGQGTFAKVYHARHLKTGDSVAIKVIDKERILKVGMTEQIKREISAMRLLRHPNIVELHEVMATKSKIYFVMEHVKGGELFNKVSTGKLREDVARKYFQQLVRAVDFCHSRGVCHRDLKPENLLLDEHGNLKISDFGLSALSDSRRQDGLLHTTCGTPAYVAPEVISRNGYDGFKADVWSCGVILFVLLAGYLPFRDSNLMELYKKIGKAEVKFPNWLAPGAKRLLKRILDPNPNTRVSTEKIMKSSWFRKGLQEEVKESVEEETEVDAEAEGNASAEKEKKRCINLNAFEIISLSTGFDLSGLFEKGEEKEEMRFTSNREASEITEKLVEIGKDLKMKVRKKEHEWRVKMSAEATVVEAEVFEIAPSYHMVVLKKSGGDTAEYKRVMKESIRPALIDFVLAWH

SEQ ID NO: 85002 - protein, 369 aa, Arabidopsis thaliana
  peptide (1)..(369): Ceres Seq. ID no. 12678272
MTEQIKREISAMRLLRHPNIVELHEVMATKSKIYFVMEHVKGGELFNKVSTGKLREDVARKYFQQLVRAVDFCHSRGVCHRDLKPENLLLDEHGNLKISDFGLSALSDSRRQDGLLHTTCGTPAYVAPEVISRNGYDGFKADVWSCGVILFVLLAGYLPFRDSNLMELYKKIGKAEVKFPNWLAPGAKRLLKRILDPNPNTRVSTEKIMKSSWFRKGLQEEVKESVEEETEVDAEAEGNASAEKEKKRCINLNAFEIISLSTGFDLSGLFEKGEEKEEMRFTSNREASEITEKLVEIGKDLKMKVRKKEHEWRVKMSAEATVVEAEVFEIAPSYHMVVLKKSGGDTAEYKRVMKESIRPALIDFVLAWH

SEQ ID NO: 85003 - DNA, 1732 bp, Arabidopsis thaliana
  misc_feature (1)..(1732): Ceres Seq. ID no. 12678273
  misc_feature (1)..(1732): Ortholog of  Ceres SEQ ID NO 13593889 as cited in SEQ ID NO 53305
  misc_feature (1)..(1732): Ortholog of  Ceres SEQ ID NO 13581959 as cited in SEQ ID NO 56156
agaagattaaacattcctctcgccggagaactaactgctcgatagatagagatagagagagagctctgataactgccattctgtctctatctgcttcctctagatacacgttagtttttttttctttgaaaggggctaaatttcgtacacacgacctatttcttcttcttattggattttgtagagaaaactttattatataggtttctggggaatcttctgagccgtttagaacaaggatttaggcaaaaatatggtcagttagtttcttgtgctagcaattttgaatgggagattgcgacgacgacgactagtctctcctcgaatcagggtttatagttgttgttgatagagatattgaattggaaccaaaagaactcaatgatagagtagtgaattttggatgtagtgtttttctcatcaacggagtaataataacaataataatgagtagcgatgatacgattgaggagagtttgcttgtggatcccaaattgttgttcatcggctccaagattggtgaaggcgctcacggcaaagtctaccaaggaaggtatggtcgtcagattgttgcaatcaaagttgtcaaccggggctccaaacctgaccagcaatcttctctcgagagccgtttcgtccgtgaggtcaatatgatgtcccgcgttcaacaccataaccttgtcaagtttattggagcgtgcaaagatcctttaatggtaatagtaacagagcttctcccagggatgtctctccgtaaatatctcaccagcatccgtcctcagttgctccatctccctcttgctctctcctttgcccttgacatcgcccgtgccttgcactgcttacacgccaatggtatcattcacagagacctcaaacctgacaacttattgctcacggagaatcacaaatccgtcaagcttgctgatttcgggcttgctagggaagaatccgtgactgagatgatgactgctgagactgggacttaccgttggatggctcctgagctctacagtacagtgaccctgcgtcaaggagagaagaagcattacaacaacaaagttgatgtctacagctttggaatcgtgctttgggagcttctcactaatcgtatgccattcgagggcatgtccaatctgcaagccgcctacgcagcagcattcaagcaggagaggcccgtaatgccagaggggatatctccgagtctggcgttcatagtgcagtcttgttgggtggaggacccaaacatgaggccaagcttcagtcaaattatcagactgctcaatgagttcctccttaccctgactcctccgcctcctcagcctctgcctgagactgccaccaacaggaccaatggccgagccatcactgagttctccatccgtccaaaagggaaatttgccttcattcgccagcttttcgctgccaagaggaacataaactcttaggtacaagaaggggtcttctttgtctttgccactgccactgctttggtggataaatgacattagcagagagagagaagtagaaagttagacttacttaaagtctatagcgtagttaagtactcaatcttcttcttgtcaagtgattaactggtagtatcacacgccaaactaattggttaaatgttataacttaaagcctatgttttatcctttatcaatacttgaaacaaaacttaggagatcaactaactatgtatattatcgattatataagttttatgttt

SEQ ID NO: 85004 - protein, 333 aa, Arabidopsis thaliana
  peptide (1)..(333): Ceres Seq. ID no. 12678274
MSSDDTIEESLLVDPKLLFIGSKIGEGAHGKVYQGRYGRQIVAIKVVNRGSKPDQQSSLESRFVREVNMMSRVQHHNLVKFIGACKDPLMVIVTELLPGMSLRKYLTSIRPQLLHLPLALSFALDIARALHCLHANGIIHRDLKPDNLLLTENHKSVKLADFGLAREESVTEMMTAETGTYRWMAPELYSTVTLRQGEKKHYNNKVDVYSFGIVLWELLTNRMPFEGMSNLQAAYAAAFKQERPVMPEGISPSLAFIVQSCWVEDPNMRPSFSQIIRLLNEFLLTLTPPPPQPLPETATNRTNGRAITEFSIRPKGKFAFIRQLFAAKRNINS

SEQ ID NO: 85005 - protein, 265 aa, Arabidopsis thaliana
  peptide (1)..(265): Ceres Seq. ID no. 12678275
MMSRVQHHNLVKFIGACKDPLMVIVTELLPGMSLRKYLTSIRPQLLHLPLALSFALDIARALHCLHANGIIHRDLKPDNLLLTENHKSVKLADFGLAREESVTEMMTAETGTYRWMAPELYSTVTLRQGEKKHYNNKVDVYSFGIVLWELLTNRMPFEGMSNLQAAYAAAFKQERPVMPEGISPSLAFIVQSCWVEDPNMRPSFSQIIRLLNEFLLTLTPPPPQPLPETATNRTNGRAITEFSIRPKGKFAFIRQLFAAKRNINS

SEQ ID NO: 85006 - protein, 264 aa, Arabidopsis thaliana
  peptide (1)..(264): Ceres Seq. ID no. 12678276
MSRVQHHNLVKFIGACKDPLMVIVTELLPGMSLRKYLTSIRPQLLHLPLALSFALDIARALHCLHANGIIHRDLKPDNLLLTENHKSVKLADFGLAREESVTEMMTAETGTYRWMAPELYSTVTLRQGEKKHYNNKVDVYSFGIVLWELLTNRMPFEGMSNLQAAYAAAFKQERPVMPEGISPSLAFIVQSCWVEDPNMRPSFSQIIRLLNEFLLTLTPPPPQPLPETATNRTNGRAITEFSIRPKGKFAFIRQLFAAKRNINS

SEQ ID NO: 85007 - DNA, 856 bp, Arabidopsis thaliana
  misc_feature (1)..(856): Ceres Seq. ID no. 12678277
  misc_feature (1)..(856): Ortholog of  Ceres SEQ ID NO 13661928 as cited in SEQ ID NO 61155
acggcataataagaccaagaagaaaaagaaaacattaatttcaaccaaagcaaaacagagagaaaaaaatagagagagtgaatcaatttcggtggagaaagagaagaatggagcagccgtacgtgtacgcatacccgcaaggtagtggcccctcgggagctccgactccacaagccggaggagtggtagtggatccaaagtactgcgctccttaccctatagatatggcgatcgtacggaagatgatgtcgttaacggacggcaatttcgtgataacggacgtcaacggaaacctgctgttcaaggtgaaggaaccggtgtttggtctccacgacaagagggtcttgctggatggttctggtactccggtcgtcactttgagagaaaagatggtgagcatgcatgacaggtggcaagtgtttagaggagggagtacggatcagcgtgatctgctgtacacggtgaaaagatcgtcgatgcttcagctaaagaccaaactcgatgtgtttttgggacacaacaaagatgagaagagatgtgatttcagagtcaaagggagttggctcgagcgttcttgtgttgtttacgccggcgaatctgacgccattgttgcccaagtatactatctctaactctctttccttcattaagggcccatccatctcatttatcaatgcatctcacatgtctctacacagtacacattaattagcaatgttttaatctggttttggtctactgctttagaatccggttttgatggacaggtttaggtagtttttgatttcggtttagatcaaaagatacatttatcttagcccatatattgtatgtttgatgaaattgggaagatttg

SEQ ID NO: 85008 - protein, 174 aa, Arabidopsis thaliana
  peptide (1)..(174): Ceres Seq. ID no. 12678278
MEQPYVYAYPQGSGPSGAPTPQAGGVVVDPKYCAPYPIDMAIVRKMMSLTDGNFVITDVNGNLLFKVKEPVFGLHDKRVLLDGSGTPVVTLREKMVSMHDRWQVFRGGSTDQRDLLYTVKRSSMLQLKTKLDVFLGHNKDEKRCDFRVKGSWLERSCVVYAGESDAIVAQVYYL

SEQ ID NO: 85009 - protein, 135 aa, Arabidopsis thaliana
  peptide (1)..(135): Ceres Seq. ID no. 12678279
MAIVRKMMSLTDGNFVITDVNGNLLFKVKEPVFGLHDKRVLLDGSGTPVVTLREKMVSMHDRWQVFRGGSTDQRDLLYTVKRSSMLQLKTKLDVFLGHNKDEKRCDFRVKGSWLERSCVVYAGESDAIVAQVYYL

SEQ ID NO: 85010 - protein, 129 aa, Arabidopsis thaliana
  peptide (1)..(129): Ceres Seq. ID no. 12678280
MMSLTDGNFVITDVNGNLLFKVKEPVFGLHDKRVLLDGSGTPVVTLREKMVSMHDRWQVFRGGSTDQRDLLYTVKRSSMLQLKTKLDVFLGHNKDEKRCDFRVKGSWLERSCVVYAGESDAIVAQVYYL

SEQ ID NO: 85011 - DNA, 1343 bp, Arabidopsis thaliana
  misc_feature (1)..(1343): Ceres Seq. ID no. 12678322
  misc_feature (1)..(1343): Ortholog of  Ceres SEQ ID NO 14307296 as cited in SEQ ID NO 53966
  misc_feature (1)..(1343): Ortholog of  Ceres SEQ ID NO 15175368 as cited in SEQ ID NO 60071
  misc_feature (1)..(1343): Ortholog of  Ceres SEQ ID NO 15225423 as cited in SEQ ID NO 64689
  misc_feature (1)..(1343): Ortholog of  Ceres SEQ ID NO 15179340 as cited in SEQ ID NO 0
aaatgagtttaaggtcctgcaaaaactgggtttttcctcgtgtacttgttcatcttatctcctctgcataaacttcattgaagaaaaagtcttttttattttgttgatctcttttaattaagatccttttgggttttaatttattaatctccaagaaaaaaaatggatatgagaagccatgaaatgatagagagaagaagagaagacaatggcaacaacaatggtggtgttgttattagtaacatcattagtactaatattgatgataattgcaatggtaataacaacaacactcgtgtctcttgcaactctcaaaccctagatcaccaccaatccaagtctccctcttcgttttccatctccgccgcagctaaacccaccgtaagataccgtgagtgtctaaagaatcatgcggcgagcgtcggcggaagtgttcacgacggatgcggcgagtttatgccgagtggtgaagaaggaacaatcgaagctctcagatgcgctgcttgtgattgtcaccgtaatttccaccggaaagaaatggacggcgttggaagctcggatttgatctctcaccaccgtcatcaccactaccaccataaccaatacggtggaggaggagggagaagacctccgccgccgaatatgatgcttaacccactcatgcttcctccgccaccgaattatcagccgattcaccaccacaagtatggaatgagtcctcccggaggaggaggaatggtgacgccgatgagcgttgcttacggcggtggaggaggaggagctgagtcgtctagtgaagatctgaatctgtacggacaatcaagcggagaaggagctggtgcggcggcgggacaaatggcgttttcgatgtcgtcgtctaagaaaagattcaggacaaagttcacgacggatcagaaggagaggatgatggactttgcggagaagctagggtggaggatgaacaagcaagacgaagaagagcttaagagattctgcggcgagatcggagtgaagagacaagtcttcaaagtttggatgcataacaacaagaacaatgctaagaaaccaccaacaccaacaactactctctaatcagtgatcatatgattaattgagagattatgtaagagattttcttttaatctacttttgttgttgttgtttatttaatgttttccttcttctaggtttttgtagtttgtacgatctttggatcaatcaatggatcttttgtttgcttagttaatgtttttaattttggtttgccttttttttttagtctttttattttattttgtttgtcttttacccggatcgtacttgtaatcagcttctgttgcttc

SEQ ID NO: 85012 - protein, 309 aa, Arabidopsis thaliana; identical to SEQ ID NO: 28543
  peptide (1)..(309): Ceres Seq. ID no. 12678323

SEQ ID NO: 85013 - protein, 307 aa, Arabidopsis thaliana; identical to SEQ ID NO: 28544
  peptide (1)..(307): Ceres Seq. ID no. 12678324

SEQ ID NO: 85014 - protein, 302 aa, Arabidopsis thaliana; identical to SEQ ID NO: 28545
  peptide (1)..(302): Ceres Seq. ID no. 12678325

SEQ ID NO: 85015 - DNA, 1134 bp, Arabidopsis thaliana
  misc_feature (1)..(1134): Ceres Seq. ID no. 12678354
  misc_feature (1)..(1134): Ortholog of  Ceres SEQ ID NO 15178142 as cited in SEQ ID NO 1163
gggatcgtaagaacagaggatttttctcggccaagttttctctagctcaggtgtttgatgtgaattttttgagggaggggaatgagttcaatgagcagaagcagaagtcgaagtagaagtcgtagtcgggatcggtttcgtagtcggagtccgagagacaggagaatgagatctgaacgagtttcttaccatgatgctccttctagaagggagagggagccacgtcgtgccttcagccaaggaaatctctgcaacaactgcaagcgacctggtcactttgcaagagactgttctaatgtttccgtctgtaacaactgtggtcttccagggcacattgcagcagaatgcactgcggaatcacgttgttggaactgtagagaaccgggccacgtagcctcaaactgttcaaacgaaggaatctgccactcctgtggtaaatctggacatcgagccagagactgctctaattcggattctcgtgcaggagacttaaggctctgcaacaactgcttcaaacagggacatcttgccgctgactgcacaaatgacaaggcgtgcaagaactgcaggacttcaggtcacatagctcgcgattgcaggaacgatccagtttgtaacatctgcagtatctcggggcatgttgctagacactgcccaaagggtgacagcaattactctgacagaggaagcagggttcgagatggtggtatgcaaagaggtggtttgagcagaatgagcagagacagagaaggcgttagtgctatgataatatgtcacaattgtggtggccgaggacacagggcgtacgagtgtccgtctgctcgagtcgctgaccgtggattccgccggtactgaggctcttaaatttaccaattgaagttccattcatcttcacctttacccttttagcttctgcactcttgtttttgttgagctacattgttgttttctaatctcatggtttttgtctattggagtgaatcaaggatggttttagttttggtttgttttcggaaaatttgagacattgcttgtgttgtatgaagtattgaacagattagtgtgatgcagagttctgagttttcagaactcaatattatattaaaaacaaattttaatggtttgctttctccc

SEQ ID NO: 85016 - protein, 257 aa, Arabidopsis thaliana; identical to SEQ ID NO: 39512
  peptide (1)..(257): Ceres Seq. ID no. 12678355

SEQ ID NO: 85017 - protein, 254 aa, Arabidopsis thaliana; identical to SEQ ID NO: 39513
  peptide (1)..(254): Ceres Seq. ID no. 12678356

SEQ ID NO: 85018 - protein, 229 aa, Arabidopsis thaliana; identical to SEQ ID NO: 39514
  peptide (1)..(229): Ceres Seq. ID no. 12678357

SEQ ID NO: 85019 - DNA, 1128 bp, Arabidopsis thaliana
  misc_feature (1)..(1128): Ceres Seq. ID no. 12678360
  misc_feature (1)..(1128): Ortholog of  Ceres SEQ ID NO 14303263 as cited in SEQ ID NO 1224
  misc_feature (1)..(1128): Ortholog of  Ceres SEQ ID NO 13593955 as cited in SEQ ID NO 54278
  misc_feature (1)..(1128): Ortholog of  Ceres SEQ ID NO 13597380 as cited in SEQ ID NO 64054
  misc_feature (1)..(1128): Ortholog of  Ceres SEQ ID NO 12625474 as cited in SEQ ID NO 64169
  misc_feature (1)..(1128): Ortholog of  Ceres SEQ ID NO 13597502 as cited in SEQ ID NO 64681
atggaacgatgtcgttctggtcatcatcgcatcatttcttattatctctcttcttcgttgatactattttggtgtattttcgttctcgtgctgttatctacgacaagtactacaaatgctttagtgaaaatcccgaaaaacacgaccgttccggcggtaatagtgttcggtgattcaattgtcgatgccgggaataacgacgacatgataacagaagctagatgcgattatgctccctacggcattgattttgacggtggagttgctacgggaagattctctaatggcaaagtccctggtgatattgtagcggaagagctagggattaaacccaatataccggcatatcgaaatccgaatttaaaaccagaagagctcttaaccggtgtaacatttgcttctggtggtgctggttatgttcctttgacaaccaaaatagcggtaggaggaatacctttaccacagcaattgatatattttgaggaatatatagagaaattgaagcaaatggttggagaaaagaggacaaagttcataatcaagaatagcttgttcgttgttatatgtggtagtaacgatatcgccaacgacttctttactctccccccggtccggctacactacaccgtcgcttctttcaccgctcttatggccgacaatgctcgttcttttgctcagacactctatggatatggagcaagaagaatacttgtatttggtgcaccaccaataggatgtgttccttcgcagagaaccgtagcaggaggacctacaagagattgtgttgctaggtttaatgatgcagcaaaacttttcaatactaagctctctgcaaatattgatgtcttgtcaaggactctacaagacccaacaataatctatattgacatctatagtcctcttcttgatctcattttaaaccctcatcaatatggatttaaggtggccaataaaggatgttgcggaaccggattaatagaagttactgcgctatgcaacaactatacagcttctgtatgtcccataagatctgattatgtgttttgggacagttttcatcctactgaaaaagcttacagaattatagttgcaaagcttttggatagatacctcaacagattcttctaa

SEQ ID NO: 85020 - protein, 375 aa, Arabidopsis thaliana
  peptide (1)..(375): Ceres Seq. ID no. 12678361
MERCRSGHHRIISYYLSSSLILFWCIFVLVLLSTTSTTNALVKIPKNTTVPAVIVFGDSIVDAGNNDDMITEARCDYAPYGIDFDGGVATGRFSNGKVPGDIVAEELGIKPNIPAYRNPNLKPEELLTGVTFASGGAGYVPLTTKIAVGGIPLPQQLIYFEEYIEKLKQMVGEKRTKFIIKNSLFVVICGSNDIANDFFTLPPVRLHYTVASFTALMADNARSFAQTLYGYGARRILVFGAPPIGCVPSQRTVAGGPTRDCVARFNDAAKLFNTKLSANIDVLSRTLQDPTIIYIDIYSPLLDLILNPHQYGFKVANKGCCGTGLIEVTALCNNYTASVCPIRSDYVFWDSFHPTEKAYRIIVAKLLDRYLNRFF

SEQ ID NO: 85021 - protein, 307 aa, Arabidopsis thaliana
  peptide (1)..(307): Ceres Seq. ID no. 12678362
MITEARCDYAPYGIDFDGGVATGRFSNGKVPGDIVAEELGIKPNIPAYRNPNLKPEELLTGVTFASGGAGYVPLTTKIAVGGIPLPQQLIYFEEYIEKLKQMVGEKRTKFIIKNSLFVVICGSNDIANDFFTLPPVRLHYTVASFTALMADNARSFAQTLYGYGARRILVFGAPPIGCVPSQRTVAGGPTRDCVARFNDAAKLFNTKLSANIDVLSRTLQDPTIIYIDIYSPLLDLILNPHQYGFKVANKGCCGTGLIEVTALCNNYTASVCPIRSDYVFWDSFHPTEKAYRIIVAKLLDRYLNRFF

SEQ ID NO: 85022 - protein, 206 aa, Arabidopsis thaliana; identical to SEQ ID NO: 22929
  peptide (1)..(206): Ceres Seq. ID no. 12678363

SEQ ID NO: 85023 - DNA, 1516 bp, Arabidopsis thaliana
  misc_feature (1)..(1516): Ceres Seq. ID no. 12678379
  misc_feature (1)..(1516): Ortholog of  Ceres SEQ ID NO 13593955 as cited in SEQ ID NO 54278
  misc_feature (1)..(1516): Ortholog of  Ceres SEQ ID NO 13597380 as cited in SEQ ID NO 64054
attttcgatatgtttaggggaaaaatatttgtgttatcattattttctatttacgtcctctcatcagcggctgaaaaaaatacatcattttctgcgctttttgcttttggtgattcagtcttagatacgggaaacaataattttcttcttactcttctcaaaggaaattattggccatatggtttgagttttgactataaatttccgacgggaagattcggaaatggaagagttttcaccgatatagttgccgaaggtttacagatcaaaagacttgtaccagcttatagcaagattcgtcgcatcagttctgaagaccttaagactggcgtttgttttgcatcaggtggttcaggaattgacgatcttacatcccgaacactggtgaaagaaaaaaaaaacttaattgttatttcgataaacactatatattatatatctcaaacaatgttttcttataataattggatggttgtgggtggttttgtcagagagttttatcggcaggtgaccaagtaaaagactttaaagactatttgaagaaactaagaagagtagtgaaacgtaagaaaaaagtaaaagaaatagtttcaaacgctgtgtttcttatttctgaaggaaataatgatcttggatactttgtcgctcccgctcttcttcgattacagtccacaacaacatacaccagtaaaatggttgtttggaccagaaagtttctaaaagatttatacgatcttggagcgagaaaatttgcggtgatgggagtgatgcctgtgggatgtttgcctatccatcgagcctcattcggtggggtattcggatggtgtaacttcctcttgaatagaattacggaggacttcaacatgaaattgcagaaaggtcttacaagttacgcagtagaatatgatttcaaagatgcaaagtttgtttacgtcgacatatacggtactcttatggatcttgtcaaaaatcctatggcctatggtacgtatatacacactccctatataaatatatgcatgacgtaaccaagtgatagtaatatgtcatttgttttatcttttaaaggattgtgcatcctaacaattaatgttttttttttctttctttgtgatcaaatttatatccgaatcataacactataagatgatcaagatcatgattctaattacaacaatacatatacttgcagggtttacagaagcgaaaaaagcttgttgttgtatgccgaatgcaataataccatgcttccatccagataaatacgtcttctatgactttgctcacccttcccagaaagcctacgaagtaatatctaaacctattgtctatcagatagcgaaaggccttgcctagctaattccttatttcctacaatgttttattataatctttgaaaattatcaccatatcgataaatatatgtaaatgtataagattcatgacaatctattcgtttttcttatagtaaacaatgtataattcaaattacaggcttttaaatattgtccatttt

SEQ ID NO: 85024 - protein, 172 aa, Arabidopsis thaliana; identical to SEQ ID NO: 40418
  peptide (1)..(172): Ceres Seq. ID no. 12678380

SEQ ID NO: 85025 - protein, 169 aa, Arabidopsis thaliana; identical to SEQ ID NO: 40419
  peptide (1)..(169): Ceres Seq. ID no. 12678381

SEQ ID NO: 85026 - protein, 111 aa, Arabidopsis thaliana
  peptide (1)..(111): Ceres Seq. ID no. 12678382
MVVWTRKFLKDLYDLGARKFAVMGVMPVGCLPIHRASFGGVFGWCNFLLNRITEDFNMKLQKGLTSYAVEYDFKDAKFVYVDIYGTLMDLVKNPMAYGTYIHTPYINICMT

SEQ ID NO: 85027 - DNA, 837 bp, Arabidopsis thaliana
  misc_feature (1)..(837): Ceres Seq. ID no. 12678389
  misc_feature (1)..(837): Ortholog of  Ceres SEQ ID NO 15168904 as cited in SEQ ID NO 20611
  misc_feature (1)..(837): Ortholog of  Ceres SEQ ID NO 15172900 as cited in SEQ ID NO 51859
agggattgttttatatataaagagagacgcatctctttatttcattcatcgcttctccaaaattttcttcaaagaacaaatctcccaaatctaaaatctttctcttctctcttcgtttccataaccatgtctgcgaagaagattgtgttgaagagttccgatggtgaatctttcgaggttgaggaggcggtggctctcgagtcacaaaccatagcgcatatggttgaagacgactgcgtcgacaacggagtccctcttcctaacgtcacgagcaagatcctcgccaaggtgatcgagtattgcaagaggcacgtcgaggctgctgcctctaaggccgaggccgtcgagggtgctgctacctccgatgacgatcttaaggcctgggacgctgattttatgaagatcgatcaagctactctctttgaactcattctggctgctaattacctgaatatcaagaacttgcttgatctaacatgtcagacagttgcggatatgatcaaaggaaagactccagaagagatccgcacaacgttcaacattaagaacgacttcacaccagaggaagaggaagaggttcgcagagagaaccaatgggcttttgaatgattgatcttcagagagaagaatcaaaagcagcaagcaaccagtttcttcttccttatgtttattgccgttttcaagtgttgttgatgacttgctttttaatattcttcatgaatcatgactatcttcttcctcttctttctttcttatcaagaaccaatgtttcttactctttgtgggatggataatttgtgcttttagataatcttcaagagtgatgttggtttgtct

SEQ ID NO: 85028 - protein, 202 aa, Arabidopsis thaliana
  peptide (1)..(202): Ceres Seq. ID no. 12678390
RDCFIYKERRISLFHSSLLQNFLQRTNLPNLKSFSSLFVSITMSAKKIVLKSSDGESFEVEEAVALESQTIAHMVEDDCVDNGVPLPNVTSKILAKVIEYCKRHVEAAASKAEAVEGAATSDDDLKAWDADFMKIDQATLFELILAANYLNIKNLLDLTCQTVADMIKGKTPEEIRTTFNIKNDFTPEEEEEVRRENQWAFE

SEQ ID NO: 85029 - protein, 160 aa, Arabidopsis thaliana; identical to SEQ ID NO: 44533
  peptide (1)..(160): Ceres Seq. ID no. 12678391

SEQ ID NO: 85030 - protein, 129 aa, Arabidopsis thaliana; identical to SEQ ID NO: 44534
  peptide (1)..(129): Ceres Seq. ID no. 12678392

SEQ ID NO: 85031 - DNA, 1205 bp, Arabidopsis thaliana
  misc_feature (1)..(1205): Ceres Seq. ID no. 12678401
  misc_feature (1)..(1205): Ortholog of  Ceres SEQ ID NO 13593955 as cited in SEQ ID NO 54278
  misc_feature (1)..(1205): Ortholog of  Ceres SEQ ID NO 13597380 as cited in SEQ ID NO 64054
  misc_feature (1)..(1205): Ortholog of  Ceres SEQ ID NO 12625474 as cited in SEQ ID NO 64169
  misc_feature (1)..(1205): Ortholog of  Ceres SEQ ID NO 13597502 as cited in SEQ ID NO 64681
attcagaaaaattttggacttattttcgatatgtttaggggaaaaatatttgtgttatcattattttctatttacgtcctctcatcagcggctgaaaaaaatacatcattttctgcgctttttgcttttggtgattcagtcttagatacgggaaacaataattttcttcttactcttctcaaaggaaattattggccatatggtttgagttttgactataaatttccgacgggaagattcggaaatggaagagttttcaccgatatagttgccgaaggtttacagatcaaaagacttgtaccagcttatagcaagattcgtcgcatcagttctgaagaccttaagactggcgtttgttttgcatcaggtggttcaggaattgacgatcttacatcccgaacactgagagttttatcggcaggtgaccaagtaaaagactttaaagactatttgaagaaactaagaagagtagtgaaacgtaagaaaaaagtaaaagaaatagtttcaaacgctgtgtttcttatttctgaaggaaataatgatcttggatactttgtcgctcccgctcttcttcgattacagtccacaacaacatacaccagtaaaatggttgtttggaccagaaagtttctaaaagatttatacgatcttggagcgagaaaatttgcggtgatgggagtgatgcctgtgggatgtttgcctatccatcgagcctcattcggtggggtattcggatggtgtaacttcctcttgaatagaattacggaggacttcaacatgaaattgcagaaaggtcttacaagttacgcagtagaatatgatttcaaagatgcaaagtttgtttacgtcgacatatacggtactcttatggatcttgtcaaaaatcctatggcctatgggtttacagaagcgaaaaaagcttgttgttgtatgccgaatgcaataataccatgcttccatccagataaatacgtcttctatgactttgctcacccttcccagaaagcctacgaagtaatatctaaacctattgtctatcagatagcgaaaggccttgcctagctaattccttatttcctacaatgttttattataatctttgaaaattatcaccatatcgataaatatatgtaaatgtataagattcatgacaatctattcgtttttcttatagtaaacaatgtataattcaaattacaggcttt

SEQ ID NO: 85032 - protein, 353 aa, Arabidopsis thaliana
  peptide (1)..(353): Ceres Seq. ID no. 12678402
IQKNFGLIFDMFRGKIFVLSLFSIYVLSSAAEKNTSFSALFAFGDSVLDTGNNNFLLTLLKGNYWPYGLSFDYKFPTGRFGNGRVFTDIVAEGLQIKRLVPAYSKIRRISSEDLKTGVCFASGGSGIDDLTSRTLRVLSAGDQVKDFKDYLKKLRRVVKRKKKVKEIVSNAVFLISEGNNDLGYFVAPALLRLQSTTTYTSKMVVWTRKFLKDLYDLGARKFAVMGVMPVGCLPIHRASFGGVFGWCNFLLNRITEDFNMKLQKGLTSYAVEYDFKDAKFVYVDIYGTLMDLVKNPMAYGFTEAKKACCCMPNAIIPCFHPDKYVFYDFAHPSQKAYEVISKPIVYQIAKGLA

SEQ ID NO: 85033 - protein, 343 aa, Arabidopsis thaliana
  peptide (1)..(343): Ceres Seq. ID no. 12678403
MFRGKIFVLSLFSIYVLSSAAEKNTSFSALFAFGDSVLDTGNNNFLLTLLKGNYWPYGLSFDYKFPTGRFGNGRVFTDIVAEGLQIKRLVPAYSKIRRISSEDLKTGVCFASGGSGIDDLTSRTLRVLSAGDQVKDFKDYLKKLRRVVKRKKKVKEIVSNAVFLISEGNNDLGYFVAPALLRLQSTTTYTSKMVVWTRKFLKDLYDLGARKFAVMGVMPVGCLPIHRASFGGVFGWCNFLLNRITEDFNMKLQKGLTSYAVEYDFKDAKFVYVDIYGTLMDLVKNPMAYGFTEAKKACCCMPNAIIPCFHPDKYVFYDFAHPSQKAYEVISKPIVYQIAKGLA

SEQ ID NO: 85034 - DNA, 1087 bp, Arabidopsis thaliana
  misc_feature (1)..(1087): Ceres Seq. ID no. 12678428
  misc_feature (1)..(1087): Ortholog of  Ceres SEQ ID NO 13597338 as cited in SEQ ID NO 64272
atatgtcaggaccggtccgcaggacaagcatgtaataaaactgtgtgttttctacattttctatgaaatgggtgtaattgaaagatactaaatgttagggcttttcagaaacttccgttacgttttaggcgtttaacacaattattattttctaaaacgagagccgtttaaagagaaagagaaatttctaactccagagagcgaagaacacaatcccagagtagcagaatctgatccatcccacctttttcaattctcaggcaaagataagtcaaacttgaaaaaatggaagggactgtgttcacgccttgtttggaaggaatgaagcatgtcaaatctgatcaaggcgagatgcttactaagccatttttagagctttgcaagaccatcttgcctgttatagataaatttggagctgctatgactctcgtgaaatctgacattggtggcaacataacgaggttggagaagaactacttatctgatcccgacaagttcaagtacttgtacacctttgttcaagtcgaaattgagtctaagatagcaaaaggatcgtctagctgtacaaacggtcttctctggttaaccagagcaatggatttcttagtggagctgttccgaaacttggtagcacatcaagactggtcaatgccacaagcttgtgctgactcataccaaaaaacactcaagaaatggcacggatggctcgccagctctaccttctctatggctttaaagctagctccggacaggaagaagttcatggatgtcatatctggttctggtaacatccaagccgacatggaaaggttttgtgctgagtttggtccgtttcttcatgataatcataagtttctggctagcgtcggtatggatgacatgaaagcttcttaagtcatcatatgattatcgccggtatcaaatcttctttgccggaatctttgtctgttttaacttttctccttccaattatagaacctccaaaaagaaacagaataatgtgttggtttctatctgaatgttcactttatattacaagttataacatacgaatcaatcttatcaactcttcttgttaatgtttgtt

SEQ ID NO: 85035 - protein, 202 aa, Arabidopsis thaliana; identical to SEQ ID NO: 24242
  peptide (1)..(202): Ceres Seq. ID no. 12678429

SEQ ID NO: 85036 - protein, 190 aa, Arabidopsis thaliana; identical to SEQ ID NO: 24243
  peptide (1)..(190): Ceres Seq. ID no. 12678430

SEQ ID NO: 85037 - protein, 180 aa, Arabidopsis thaliana; identical to SEQ ID NO: 24244
  peptide (1)..(180): Ceres Seq. ID no. 12678431

SEQ ID NO: 85038 - DNA, 1017 bp, Arabidopsis thaliana
  misc_feature (1)..(1017): Ceres Seq. ID no. 12678438
  misc_feature (1)..(1017): Ortholog of  Ceres SEQ ID NO 13596519 as cited in SEQ ID NO 62572
  misc_feature (1)..(1017): Ortholog of  Ceres SEQ ID NO 12625108 as cited in SEQ ID NO 68102
ccatattattcacgattctcatcaaatcatctccgatactcacaaccgaaataactaacccctcctcaacaaaaaacaacaaaacatgtacactccatcatacttaaaatattcaataatctcaattatatccgtattattcctccaaggaactcatggagacgacggaggttggcaaggtggtcacgccacgttttacggcggcgaagatgcttccggcaccatgggcggagcttgtggctatggaaatttgtatggccaaggttacgggacgaacacggcggctttaagtacggctctattcaacaacggactcacgtgtggcgcgtgctatgagatgaagtgtaacgatgacccgaggtggtgtctcgggtcaaccatcaccgtcacagctacaaacttttgcccacctaaccctggcctctccaacgataatggaggttggtgcaatcctcctcttcagcatttcgacctcgccgagccagcttttcttcagatcgctcagtatcgtgccggcattgttcctgtctctttccgaagagtaccatgtatgaagaaaggaggaataaggtttacgatcaacggacactcatacttcaacctcgttctgatctccaacgtaggaggagcaggagacgtacacgccgtctcaatcaaaggctcaaaaacacagtcgtggcaagcgatgtctagaaactggggacaaaactggcagagcaattcatacatgaacgaccaaagcctttccttccaggtaacgaccagcgatggtcgcacactcgttagcaacgacgtggctccttctaattggcagttcggacaaacctaccaaggtggtcagttctgatccaaaccatcatccacatctctctgttttgggtgctgacgtggctgcatattgctgaggtggctcgtaagcacccgcttaattagcttagccttttttttctcttatttacgaattattgcttcaatggttgtattttcattgtgcctacaaaaaagcaaggttttttt

SEQ ID NO: 85039 - protein, 253 aa, Arabidopsis thaliana; identical to SEQ ID NO: 20852
  peptide (1)..(253): Ceres Seq. ID no. 12678439

SEQ ID NO: 85040 - protein, 207 aa, Arabidopsis thaliana; identical to SEQ ID NO: 20853
  peptide (1)..(207): Ceres Seq. ID no. 12678440

SEQ ID NO: 85041 - protein, 169 aa, Arabidopsis thaliana; identical to SEQ ID NO: 20854
  peptide (1)..(169): Ceres Seq. ID no. 12678441

SEQ ID NO: 85042 - DNA, 567 bp, Arabidopsis thaliana
  misc_feature (1)..(567): Ceres Seq. ID no. 12678481
  misc_feature (1)..(567): Ortholog of  Ceres SEQ ID NO 13595433 as cited in SEQ ID NO 56659
atggcgatggtatcaggaagacgatctactctaaaccccgacgcacctctttttattccggcagctgtacgacaagtggaagatttctcaccggagtggtggcaattggtgacaacttcgacttggtaccctgattactggatcagtcagcagcagcaaggcgcggatggtttctatgacaacggagagaatgagaatggtggaggtcatatcgatgtagctgatcttcttccagaatcatttgattttgatgatatggaagatttctttgacactgatgctgctgagtttgatcaaggattcgatggaagaatgtattaccaagcaccttccgaatttggctttggaaagaatggtgagatggttaagaaatcaagtggaaacaggagcccgagatcgattgtggaaccagctaagtatgcggaaaagccagcgaaatggggaaaccagagggttgctgctgctccgagaaacatccaccagcctcgctgaagagatatgttgttaactagtcagagaagtcagagcagttcggtctgtgtatctttagccaccactgtacctttg

SEQ ID NO: 85043 - protein, 163 aa, Arabidopsis thaliana; identical to SEQ ID NO: 20801
  peptide (1)..(163): Ceres Seq. ID no. 12678482

SEQ ID NO: 85044 - protein, 161 aa, Arabidopsis thaliana; identical to SEQ ID NO: 20802
  peptide (1)..(161): Ceres Seq. ID no. 12678483

SEQ ID NO: 85045 - protein, 85 aa, Arabidopsis thaliana; identical to SEQ ID NO: 20803
  peptide (1)..(85): Ceres Seq. ID no. 12678484

SEQ ID NO: 85046 - DNA, 1313 bp, Arabidopsis thaliana
  misc_feature (1)..(1313): Ceres Seq. ID no. 12678501
  misc_feature (1)..(1313): Ortholog of  Ceres SEQ ID NO 15171386 as cited in SEQ ID NO 51479
  misc_feature (1)..(1313): Ortholog of  Ceres SEQ ID NO 13654928 as cited in SEQ ID NO 62546
gagtaaaaccctttctgtctgagtaagaggaaaccaacatggagatgggttccaactcgggtccgggtcatggtccgggtcaggcagagtcgggtggttcctccactgagtcatcctctttcagtggagggctcatgtttggccagaagatctacttcgaggacggtggtggtggatccgggtcttcttcctcaggtggtcgttcaaacagacgtgtccgtggaggcgggtcgggtcagtcgggtcagataccaaggtgccaagtggaaggttgtgggatggatctaaccaatgcaaaaggttattactcgagacaccgagtttgtggagtgcactctaaaacacctaaagtcactgtggctggtatcgaacagaggttttgtcaacagtgcagcaggtttcatcagcttccggaatttgacctagagaaaaggagttgccgcaggagactcgctggtcataatgagcgacgaaggaagccacagcctgcgtctctctctgtgttagcttctcgttacgggaggatcgcaccttcgctttacgaaaatggtgatgctggaatgaatggaagctttcttgggaaccaagagataggatggccaagttcaagaacattggatacaagagtgatgaggcggccagtgtcgtcaccgtcatggcagatcaatccaatgaatgtatttagtcaaggttcagttggtggaggagggacaagcttctcatctccagagattatggacactaaactagagagctacaagggaattggcgactcaaactgtgctctctctcttctgtcaaatccacatcaaccacatgacaacaacaacaacaacaacaacaacaacaacaacaacaacaatacatggcgagcttcttcaggttttggcccgatgacggttacaatggctcaaccaccacctgcacctagccagcatcagtatctgaacccgccttgggtattcaaggacaatgataatgatatgtctcctgttttgaatttaggtcagataagtagtggcacggcaatgggtgagttcgagttatctgatcaccatcatcaaagtaggagacagtacatggaagatgagaacacaagggcttatgactcttcttctcaccataccaactggtctctctgacttgtctttgcatcagagaatcttcttacaatgaacgattctgcaatatcttatctttttgcttctttgtttattctgttatctgctatcaataaaccagacaattgttgccagataatggcttttgattttgatttgttgttttatctccatgaaaatccaagttatgag

SEQ ID NO: 85047 - protein, 367 aa, Arabidopsis thaliana
  peptide (1)..(367): Ceres Seq. ID no. 12678502
MEMGSNSGPGHGPGQAESGGSSTESSSFSGGLMFGQKIYFEDGGGGSGSSSSGGRSNRRVRGGGSGQSGQIPRCQVEGCGMDLTNAKGYYSRHRVCGVHSKTPKVTVAGIEQRFCQQCSRFHQLPEFDLEKRSCRRRLAGHNERRRKPQPASLSVLASRYGRIAPSLYENGDAGMNGSFLGNQEIGWPSSRTLDTRVMRRPVSSPSWQINPMNVFSQGSVGGGGTSFSSPEIMDTKLESYKGIGDSNCALSLLSNPHQPHDNNNNNNNNNNNNNNTWRASSGFGPMTVTMAQPPPAPSQHQYLNPPWVFKDNDNDMSPVLNLGQISSGTAMGEFELSDHHHQSRRQYMEDENTRAYDSSSHHTNWSL

SEQ ID NO: 85048 - protein, 365 aa, Arabidopsis thaliana
  peptide (1)..(365): Ceres Seq. ID no. 12678503
MGSNSGPGHGPGQAESGGSSTESSSFSGGLMFGQKIYFEDGGGGSGSSSSGGRSNRRVRGGGSGQSGQIPRCQVEGCGMDLTNAKGYYSRHRVCGVHSKTPKVTVAGIEQRFCQQCSRFHQLPEFDLEKRSCRRRLAGHNERRRKPQPASLSVLASRYGRIAPSLYENGDAGMNGSFLGNQEIGWPSSRTLDTRVMRRPVSSPSWQINPMNVFSQGSVGGGGTSFSSPEIMDTKLESYKGIGDSNCALSLLSNPHQPHDNNNNNNNNNNNNNNTWRASSGFGPMTVTMAQPPPAPSQHQYLNPPWVFKDNDNDMSPVLNLGQISSGTAMGEFELSDHHHQSRRQYMEDENTRAYDSSSHHTNWSL

SEQ ID NO: 85049 - protein, 335 aa, Arabidopsis thaliana
  peptide (1)..(335): Ceres Seq. ID no. 12678504
MFGQKIYFEDGGGGSGSSSSGGRSNRRVRGGGSGQSGQIPRCQVEGCGMDLTNAKGYYSRHRVCGVHSKTPKVTVAGIEQRFCQQCSRFHQLPEFDLEKRSCRRRLAGHNERRRKPQPASLSVLASRYGRIAPSLYENGDAGMNGSFLGNQEIGWPSSRTLDTRVMRRPVSSPSWQINPMNVFSQGSVGGGGTSFSSPEIMDTKLESYKGIGDSNCALSLLSNPHQPHDNNNNNNNNNNNNNNTWRASSGFGPMTVTMAQPPPAPSQHQYLNPPWVFKDNDNDMSPVLNLGQISSGTAMGEFELSDHHHQSRRQYMEDENTRAYDSSSHHTNWSL

SEQ ID NO: 85050 - DNA, 2013 bp, Arabidopsis thaliana
  misc_feature (1)..(2013): Ceres Seq. ID no. 12678525
  misc_feature (1)..(2013): Ortholog of  Ceres SEQ ID NO 13596392 as cited in SEQ ID NO 62136
  misc_feature (1)..(2013): Ortholog of  Ceres SEQ ID NO 15226223 as cited in SEQ ID NO 65500
  misc_feature (1)..(2013): Ortholog of  Ceres SEQ ID NO 13596394 as cited in SEQ ID NO 68561
aatctaatctagggtttctagtcacttgaagcttctcttaaaaaacctgtctcactcctcgtcaacctcttcctctcccgctgtcgccaagattgaatcttttttcagttgtggcttcaccggataataaggaattcagtaagagataagttcatcctgacaacatggagaccaagaatgagaattctgatgtttcacgggcagaggagtttaaaagtcaggccaacgaagcttttaaaggtcacaaatactccagtgctattgatctatatacaaaagctattgaactcaacagcaacaacgctgtgtattgggcaaatcgtgcatttgctcacacaaaactggaggaatatggcagtgcaatacaggatgcatcgaaggccattgaagttgattcaagatactctaagggctattacaggcgtggtgctgcgtatcttgccatgggaaaatttaaggatgccttgaaggacttccaacaggtaaaaaggctttctcctaatgaccctgatgccacaagaaagctaaaggaatgtgagaaagcagtgatgaaactcaaatttgaagaagcaatctctgtgccagtatctgaaaggcgttcagtagctgagtccattgacttccatacaatagaggttgagccacaatattctggtgctagaattgagggagaggaagttaccttagattttgtgaaaacgatgatggaggattttaagaaccaaaaaacattgcataaacggtatgcctatcaaatcgtcttacagactaggcaaatcttgctagcactgccttctcttgttgatataagtgttccacatggcaaacatatcactgtttgcggtgacgttcatggtcagttctacgatcttctcaatatctttgagcttaatggcctcccttcggaggagaacccatacctatttaatggcgactttgtggacagaggctcattctccgttgagatcatcctcactttgtttgctttcaagtgcatgtgcccatcatccatatatctagccagaggaaaccatgaaagcaagagcatgaacaaaatttatggttttgagggtgaggttcggtccaagttgagtgaaaaattcgtggatctctttgctgaagttttctgttacctcccgttggctcatgttataaatgggaaggtcttcgtggtacatggaggtcttttcagtgttgacggcgtgaaactctcagacatcagagccattgacagattctgtgagccaccagaggaaggactaatgtgtgaactattgtggagtgatcctcaacctctccctggaagaggcccaagcaagcgaggagttggtctatcatttggtggagatgtgacaaagaggtttttgcaagataacaatttagatttgttggtccggtcacatgaagtaaaagatgaaggttatgaggttgaacatgacggtaaactcataactgtcttctctgcgccaaattactgtgatcagatgggtaataagggagccttcattcgttttgaagctcctgatatgaagccaaacattgttacattctcagcagtgcctcatccggatgtgaagcctatggcatatgcaaacaactttctcaggatgttcaactaaccagcaaaaagcttcttctactcaaaatgctattctaaagactcaagaccagaagtggttcagaaacataatgatataagtttttttttccctttatcttctgcagttttttcatgttgttccagaaaagggaggccatgataattaaaggtacagtatccggatttgatcgttttttttcttcttccttcttttctgataaagattttcactcttcctttaagcttatccagcaacttttgtcccttttgtcttatgttgtaagagggggtaatgtatcattcttattttagatgaaaatcttgtgattactcaacaaaagagtgaccaaatgaccccccaaaactttgtacttaaaatggtttcttgaatcaaaaatcaaaaggtgtttctt

SEQ ID NO: 85051 - protein, 484 aa, Arabidopsis thaliana; identical to SEQ ID NO: 76043
  peptide (1)..(484): Ceres Seq. ID no. 12678526

SEQ ID NO: 85052 - protein, 391 aa, Arabidopsis thaliana; identical to SEQ ID NO: 76044
  peptide (1)..(391): Ceres Seq. ID no. 12678527

SEQ ID NO: 85053 - protein, 356 aa, Arabidopsis thaliana; identical to SEQ ID NO: 76045
  peptide (1)..(356): Ceres Seq. ID no. 12678528

SEQ ID NO: 85054 - DNA, 1240 bp, Arabidopsis thaliana
  misc_feature (1)..(1240): Ceres Seq. ID no. 12678568
  misc_feature (1)..(1240): Ortholog of  Ceres SEQ ID NO 13597638 as cited in SEQ ID NO 65448
  misc_feature (1)..(1240): Ortholog of  Ceres SEQ ID NO 14302772 as cited in SEQ ID NO 69055
acacatatacattcacattactaatctctcaagatttcacaattttcttgtgattttctctcagtttcttatttcgtttcataacatggatgccatgagtagcgtagacgagagctctacaactacagattccattccggcgagaaagtcatcgtctccggcgagtttactatatagaatgggaagcggaacaagcgtggtacttgattcagagaacggtgtcgaagtcgaagtcgaagccgaatcaagaaagcttccttcttcaagattcaaaggtgttgttcctcaaccaaatggaagatggggagctcagatttacgagaaacatcaacgcgtgtggcttggtactttcaacgaggaagacgaagcagctcgtgcttacgacgtcgcggctcaccgtttccgtggccgcgatgccgttactaatttcaaagacacgacgttcgaagaagaggttgagttcttaaacgcgcattcgaaatcagagatcgtagatatgttgagaaaacacacttacaaagaagagttagaccaaaggaaacgtaaccgtgacggtaacggaaaagagacgacggcgtttgctttggcttcgatggtggttatgacggggtttaaaacggcggagttactgtttgagaaaacggtaacgccaagtgacgtcgggaaactaaaccgtttagttataccaaaacaccaagcggagaaacattttccgttaccgttaggtaataataacgtctccgttaaaggtatgctgttgaatttcgaagacgttaacgggaaagtgtggaggttccgttactcttattggaatagtagtcaaagttatgtgttgaccaaaggttggagtagattcgttaaagagaagagactttgtgctggtgatttgatcagttttaaaagatccaacgatcaagatcaaaaattctttatcgggtggaaatcgaaatccgggttggatctagagacgggtcgggttatgagattgtttggggttgatatttctttaaacgccgtcgttgtagtgaaggaaacaacggaggtgttaatgtcgtcgttaaggtgtaagaagcaacgagttttgtaataacaatttaacaacttgggaaagaaaaaaaagctttttgattttaatttctcttcaacgttaatcttgctgagattatttatgttgtaagttgtaacaagtggaaaaaattaattaggtgtcaaacaaatcttgtgttaatattctttgtat

SEQ ID NO: 85055 - protein, 361 aa, Arabidopsis thaliana
  peptide (1)..(361): Ceres Seq. ID no. 12678569
HIYIHITNLSRFHNFLVIFSQFLISFHNMDAMSSVDESSTTTDSIPARKSSSPASLLYRMGSGTSVVLDSENGVEVEVEAESRKLPSSRFKGVVPQPNGRWGAQIYEKHQRVWLGTFNEEDEAARAYDVAAHRFRGRDAVTNFKDTTFEEEVEFLNAHSKSEIVDMLRKHTYKEELDQRKRNRDGNGKETTAFALASMVVMTGFKTAELLFEKTVTPSDVGKLNRLVIPKHQAEKHFPLPLGNNNVSVKGMLLNFEDVNGKVWRFRYSYWNSSQSYVLTKGWSRFVKEKRLCAGDLISFKRSNDQDQKFFIGWKSKSGLDLETGRVMRLFGVDISLNAVVVVKETTEVLMSSLRCKKQRVL

SEQ ID NO: 85056 - protein, 333 aa, Arabidopsis thaliana
  peptide (1)..(333): Ceres Seq. ID no. 12678570
MDAMSSVDESSTTTDSIPARKSSSPASLLYRMGSGTSVVLDSENGVEVEVEAESRKLPSSRFKGVVPQPNGRWGAQIYEKHQRVWLGTFNEEDEAARAYDVAAHRFRGRDAVTNFKDTTFEEEVEFLNAHSKSEIVDMLRKHTYKEELDQRKRNRDGNGKETTAFALASMVVMTGFKTAELLFEKTVTPSDVGKLNRLVIPKHQAEKHFPLPLGNNNVSVKGMLLNFEDVNGKVWRFRYSYWNSSQSYVLTKGWSRFVKEKRLCAGDLISFKRSNDQDQKFFIGWKSKSGLDLETGRVMRLFGVDISLNAVVVVKETTEVLMSSLRCKKQRVL

SEQ ID NO: 85057 - protein, 330 aa, Arabidopsis thaliana
  peptide (1)..(330): Ceres Seq. ID no. 12678571
MSSVDESSTTTDSIPARKSSSPASLLYRMGSGTSVVLDSENGVEVEVEAESRKLPSSRFKGVVPQPNGRWGAQIYEKHQRVWLGTFNEEDEAARAYDVAAHRFRGRDAVTNFKDTTFEEEVEFLNAHSKSEIVDMLRKHTYKEELDQRKRNRDGNGKETTAFALASMVVMTGFKTAELLFEKTVTPSDVGKLNRLVIPKHQAEKHFPLPLGNNNVSVKGMLLNFEDVNGKVWRFRYSYWNSSQSYVLTKGWSRFVKEKRLCAGDLISFKRSNDQDQKFFIGWKSKSGLDLETGRVMRLFGVDISLNAVVVVKETTEVLMSSLRCKKQRVL

SEQ ID NO: 85058 - DNA, 816 bp, Arabidopsis thaliana
  misc_feature (1)..(816): Ceres Seq. ID no. 12678588
  misc_feature (1)..(816): Ortholog of  Ceres SEQ ID NO 13599401 as cited in SEQ ID NO 0
tactacatgctctaatcacgtccttgtagaggaaaagaaaaaaaatggctgcttcatcttcctctttcactctctgtaatcacaccacacttcgtactctccctctgagaaagacccttgtcaccaaaacccaattttcagttcccacaaaatcatcagaatctaacttctttggctccacactcactcactcatcgtatatctccccagtctcttcctcttctctcaaaggcttaatctttgccaaggttaacaagggtcaggctgcaccagacttcacactaaaggatcaaaacggaaagccggtgagcctcaaaaagtataaagggaagcctgttgttctctacttctaccctgcagatgaaacccctggctgcaccaagcaggcttgtgctttcagagactcttatgagaaattcaagaaagctggtgcagaggtcattggcattagtggagatgactctgcttctcacaaggcgtttgcaagcaaatacaaactaccgtatacattgttaagcgacgaagggaataaggtgagaaaagattggggagtgcctggagacctgtttggagcattgccagggagacagacttacgttcttgacaaaaacggtgttgttcagctcatctacaacaaccagttccagcctgagaaacacatcgacgagaccttgaagtttctcaaagctgcttgatcattctctctttctcttctttctcttctttcatgcatgtctcatgtctgtctccatgagaccatgaccttcttatattgtttctgttgagtatgaattttcaataataccatgttatacc

SEQ ID NO: 85059 - protein, 216 aa, Arabidopsis thaliana; identical to SEQ ID NO: 77633
  peptide (1)..(216): Ceres Seq. ID no. 12678589

SEQ ID NO: 85060 - DNA, 1387 bp, Arabidopsis thaliana
  misc_feature (1)..(1387): Ceres Seq. ID no. 12678593
  misc_feature (1)..(1387): Ortholog of  Ceres SEQ ID NO 12611314 as cited in SEQ ID NO 56535
  misc_feature (1)..(1387): Ortholog of  Ceres SEQ ID NO 13661438 as cited in SEQ ID NO 61414
tttttgtgcagttcaaatagtaagaaaccgaatgacggtatgatgctcgtaatatcgattttcgcgggaatagttatcggatttttattaggcatatctttccctacattgtcactaactaagatgaattttccatcaagcattcttccttctgttgctactgtctacatagaaaatgagaaaccggagaaatcatctaagacgagttcacaaaacgaaagtgatgcatcacatcatcataagatttgggttccatcgaatcctcgaggtgcagagatgttacctccaagttttgttgcagccgaatcggatttttacttacgaagattgtggggattgcctaaagatgatttaccagtggtgaagcctaagtatcttgttgcttttactgtttcttatgaacaaagaaaaaacatcgatgcttgtgtcaaaaaattctcagataacttcaccattgttctgtttcattacgatggaaaaacctcggagtatgatgaatttgaatggtctaaacgggcgatacacgtcagtgtacctaagcaaaccaagtggtggtatgctaaaaggtttctgcatcctgatatcatagcaccatatgaatatatattcatttgggatgaagatcttggcgttgaaaacttcgacgcagaagagtacatcaagattgtgaataagcatggtctagaaatatcgcaacccgctgtggaatcaagaaaatcaatcacatggaagataacaaagagaatacccggaatcgaagttcacaaagaagtcgaagagaaaccaggccgctgcaatgaccctcacctacctccttgtgcagggtttatagagattatggctccagttttctctagagaggcatggcgttgtgtgtggcatatgattcagaatgacttggttcacggttggggtcttgactttgcgctaagaaaatgcgtcgagcctgcacatgagaagattggtgttgtggattctcaatggatcattcatcaaaagattccttctttaggcagccagggaaccgcgcaggaagggaaaaccgcgttccaaggggtaagagagagatgtaaacgggaatggacaatgtttcagaaaagaatgacccgatcagagcagaagtatctgaaagaaattgcatctgcctcttcaaactctacacgtacttaaaccaaaagagtagaggaactgaataacaacctttagtgttcagatagcactttcagtaagaaaaaaagagaaatagaatgttgatatgataagcacataagcaagcatacacacacaagacacattctttgaaaagagcaatatagctctgttctagaaacagttatactgtagtaacaaaacagttaataaagttcttaataaactcttcatttct

SEQ ID NO: 85061 - protein, 389 aa, Arabidopsis thaliana
  peptide (1)..(389): Ceres Seq. ID no. 12678594
FLCSSNSKKPNDGMMLVISIFAGIVIGFLLGISFPTLSLTKMNFPSSILPSVATVYIENEKPEKSSKTSSQNESDASHHHKIWVPSNPRGAEMLPPSFVAAESDFYLRRLWGLPKDDLPVVKPKYLVAFTVSYEQRKNIDACVKKFSDNFTIVLFHYDGKTSEYDEFEWSKRAIHVSVPKQTKWWYAKRFLHPDIIAPYEYIFIWDEDLGVENFDAEEYIKIVNKHGLEISQPAVESRKSITWKITKRIPGIEVHKEVEEKPGRCNDPHLPPCAGFIEIMAPVFSREAWRCVWHMIQNDLVHGWGLDFALRKCVEPAHEKIGVVDSQWIIHQKIPSLGSQGTAQEGKTAFQGVRERCKREWTMFQKRMTRSEQKYLKEIASASSNSTRT

SEQ ID NO: 85062 - protein, 376 aa, Arabidopsis thaliana
  peptide (1)..(376): Ceres Seq. ID no. 12678595
MMLVISIFAGIVIGFLLGISFPTLSLTKMNFPSSILPSVATVYIENEKPEKSSKTSSQNESDASHHHKIWVPSNPRGAEMLPPSFVAAESDFYLRRLWGLPKDDLPVVKPKYLVAFTVSYEQRKNIDACVKKFSDNFTIVLFHYDGKTSEYDEFEWSKRAIHVSVPKQTKWWYAKRFLHPDIIAPYEYIFIWDEDLGVENFDAEEYIKIVNKHGLEISQPAVESRKSITWKITKRIPGIEVHKEVEEKPGRCNDPHLPPCAGFIEIMAPVFSREAWRCVWHMIQNDLVHGWGLDFALRKCVEPAHEKIGVVDSQWIIHQKIPSLGSQGTAQEGKTAFQGVRERCKREWTMFQKRMTRSEQKYLKEIASASSNSTRT

SEQ ID NO: 85063 - protein, 375 aa, Arabidopsis thaliana
  peptide (1)..(375): Ceres Seq. ID no. 12678596
MLVISIFAGIVIGFLLGISFPTLSLTKMNFPSSILPSVATVYIENEKPEKSSKTSSQNESDASHHHKIWVPSNPRGAEMLPPSFVAAESDFYLRRLWGLPKDDLPVVKPKYLVAFTVSYEQRKNIDACVKKFSDNFTIVLFHYDGKTSEYDEFEWSKRAIHVSVPKQTKWWYAKRFLHPDIIAPYEYIFIWDEDLGVENFDAEEYIKIVNKHGLEISQPAVESRKSITWKITKRIPGIEVHKEVEEKPGRCNDPHLPPCAGFIEIMAPVFSREAWRCVWHMIQNDLVHGWGLDFALRKCVEPAHEKIGVVDSQWIIHQKIPSLGSQGTAQEGKTAFQGVRERCKREWTMFQKRMTRSEQKYLKEIASASSNSTRT

SEQ ID NO: 85064 - DNA, 2081 bp, Arabidopsis thaliana
  misc_feature (1)..(2081): Ceres Seq. ID no. 12678624
aatcatctctctccttttttcaaacatacacagagaatggtggattcgaaaacccctgcgaaaaccaaattgttagattcgtcttcgatttctaatgtcagagtcgtccttagggttcgtccttttcttccccgggagatttcggacgagagttgtgacgggagatcgtgcgtttccgtaatcggcggcgatggaggagataccagcgaagtggcggtttacctcaaagatccagatagctgtcgtaacgaaagctatcagctggatgcgttttacgggagagaggatgataatgtgaagcatatattcgatagagaagtaagccctttgattcctgggatctttcatggtttcaatgctactgtgcttgcttatggagccaccggaagcggaaagacttttacgatgcagggaatcgatgagctaccaggtctgatgccattgaccatgtccaccattctgtctatgtgcgagaagacaaggagtagggctgagatttcatattatgaagtttacatggacagatgttgggatcttctagaagttaaagacaacgagattgctgtttgggatgataaagatggacaagttcatcttaagggactttctagtgtccctgttaagtccatgtctgagtttcaagaggcgtatttgtgtggcgttcagaggaggaaagttgcacacactggtttaaatgatgtctctagtagaagccatggagtgcttgtgatctcagtaacctcacaagggcttgtcactggtaaaatcaatctgattgatcttgcaggtaacgaagacaatagaaggacaggcaatgaagggatccgtttacaagagagtgccaagattaatcagtcattatttgcattgtccaatgtggtttatgcactgaataataacctccctagagtgccatacagggaaaccaaattgactagaatactgcaggattcacttggtggaacaagtagggctctcatggtcgcatgtctgaatcctggagaataccaagaatctcttcgcaccgttagcctggctgcaaggtcaaggcacatctcaaacaatgtttctctgaatcccaaggtagagacccccaaggttaagatagacatggaagcaaaactgcaagcttggcttgaatcaaaaggcaagatgaagagcgcgcatagaatgatggcaatacggtctccattgatgggtacaaaccagacttcaatttctcaaagctcagtcaagaaattactctgtcatagatcagccattgcagaaagtgctaagcttgccggcacaggacagagggacgcatttgtgaccgcaagaaacttatttggtgtggaaactcttgctgcttcacatttatgggaacctatacggaatctgcagttagcttctccaaccaaagaagatgagagagacacatctggcgaagagaatctattggtatcagaagcaagcttgagagataacacattggatgtcgagaagaaatatactgaactgagtcctcttcgagaagctctatctccaatagactccaatgcaaaaccaaattcagcacacggaagctctccttttctgaagccaatgaccccaaaaacaccttttctttctacaaaccctgaaattatgcagatggaaggcacttgccagaagttcaatgcatggagcaataatttaaagacctctctcataaaagagtacattcacttcttgaacacagccaacagagaggagctaagggaattaaagggaattgggcagaagatggctgagtacatcattgaactcagagaaacaagccctttaaaatcgcttaccgacttagaaaagatcggtttcacctcaagacaggtacataacctattcaaaaaagccactgaaggagtcctcgagaagccagtttctgcttcaacaacaccttagttgttgtctctagcaaacaacaacacttgtgtattatatcagttctatctcgtgtaatttcattattgtctgttcttgtatgtttaagctttataaccagagagacaatgggcttgaatcttaattgtgtagtgagcaagaaagaagcaaactttaat

SEQ ID NO: 85065 - protein, 640 aa, Arabidopsis thaliana
  peptide (1)..(640): Ceres Seq. ID no. 12678625
NHLSPFFKHTQRMVDSKTPAKTKLLDSSSISNVRVVLRVRPFLPREISDESCDGRSCVSVIGGDGGDTSEVAVYLKDPDSCRNESYQLDAFYGREDDNVKHIFDREVSPLIPGIFHGFNATVLAYGATGSGKTFTMQGIDELPGLMPLTMSTILSMCEKTRSRAEISYYEVYMDRCWDLLEVKDNEIAVWDDKDGQVHLKGLSSVPVKSMSEFQEAYLCGVQRRKVAHTGLNDVSSRSHGVLVISVTSQGLVTGKINLIDLAGNEDNRRTGNEGIRLQESAKINQSLFALSNVVYALNNNLPRVPYRETKLTRILQDSLGGTSRALMVACLNPGEYQESLRTVSLAARSRHISNNVSLNPKVETPKVKIDMEAKLQAWLESKGKMKSAHRMMAIRSPLMGTNQTSISQSSVKKLLCHRSAIAESAKLAGTGQRDAFVTARNLFGVETLAASHLWEPIRNLQLASPTKEDERDTSGEENLLVSEASLRDNTLDVEKKYTELSPLREALSPIDSNAKPNSAHGSSPFLKPMTPKTPFLSTNPEIMQMEGTCQKFNAWSNNLKTSLIKEYIHFLNTANREELRELKGIGQKMAEYIIELRETSPLKSLTDLEKIGFTSRQVHNLFKKATEGVLEKPVSASTTP

SEQ ID NO: 85066 - protein, 628 aa, Arabidopsis thaliana
  peptide (1)..(628): Ceres Seq. ID no. 12678626
MVDSKTPAKTKLLDSSSISNVRVVLRVRPFLPREISDESCDGRSCVSVIGGDGGDTSEVAVYLKDPDSCRNESYQLDAFYGREDDNVKHIFDREVSPLIPGIFHGFNATVLAYGATGSGKTFTMQGIDELPGLMPLTMSTILSMCEKTRSRAEISYYEVYMDRCWDLLEVKDNEIAVWDDKDGQVHLKGLSSVPVKSMSEFQEAYLCGVQRRKVAHTGLNDVSSRSHGVLVISVTSQGLVTGKINLIDLAGNEDNRRTGNEGIRLQESAKINQSLFALSNVVYALNNNLPRVPYRETKLTRILQDSLGGTSRALMVACLNPGEYQESLRTVSLAARSRHISNNVSLNPKVETPKVKIDMEAKLQAWLESKGKMKSAHRMMAIRSPLMGTNQTSISQSSVKKLLCHRSAIAESAKLAGTGQRDAFVTARNLFGVETLAASHLWEPIRNLQLASPTKEDERDTSGEENLLVSEASLRDNTLDVEKKYTELSPLREALSPIDSNAKPNSAHGSSPFLKPMTPKTPFLSTNPEIMQMEGTCQKFNAWSNNLKTSLIKEYIHFLNTANREELRELKGIGQKMAEYIIELRETSPLKSLTDLEKIGFTSRQVHNLFKKATEGVLEKPVSASTTP

SEQ ID NO: 85067 - protein, 505 aa, Arabidopsis thaliana
  peptide (1)..(505): Ceres Seq. ID no. 12678627
MQGIDELPGLMPLTMSTILSMCEKTRSRAEISYYEVYMDRCWDLLEVKDNEIAVWDDKDGQVHLKGLSSVPVKSMSEFQEAYLCGVQRRKVAHTGLNDVSSRSHGVLVISVTSQGLVTGKINLIDLAGNEDNRRTGNEGIRLQESAKINQSLFALSNVVYALNNNLPRVPYRETKLTRILQDSLGGTSRALMVACLNPGEYQESLRTVSLAARSRHISNNVSLNPKVETPKVKIDMEAKLQAWLESKGKMKSAHRMMAIRSPLMGTNQTSISQSSVKKLLCHRSAIAESAKLAGTGQRDAFVTARNLFGVETLAASHLWEPIRNLQLASPTKEDERDTSGEENLLVSEASLRDNTLDVEKKYTELSPLREALSPIDSNAKPNSAHGSSPFLKPMTPKTPFLSTNPEIMQMEGTCQKFNAWSNNLKTSLIKEYIHFLNTANREELRELKGIGQKMAEYIIELRETSPLKSLTDLEKIGFTSRQVHNLFKKATEGVLEKPVSASTTP

SEQ ID NO: 85068 - DNA, 783 bp, Arabidopsis thaliana
  misc_feature (1)..(783): Ceres Seq. ID no. 12678628
  misc_feature (1)..(783): Ortholog of  Ceres SEQ ID NO 15179153 as cited in SEQ ID NO 1066
  misc_feature (1)..(783): Ortholog of  Ceres SEQ ID NO 15176047 as cited in SEQ ID NO 55988
  misc_feature (1)..(783): Ortholog of  Ceres SEQ ID NO 13582167 as cited in SEQ ID NO 56203
  misc_feature (1)..(783): Ortholog of  Ceres SEQ ID NO 13658295 as cited in SEQ ID NO 66515
acaatggcgaatcttcccaccgttctcgtcaccggcgctagtggcagaacaggccagattgtgtataagaagctgaaggaggggtcagacaagtttgtagcaaagggtttagttagaagtgctcaaggaaaagagaaaattggaggagaagctgatgttttcattggggatataacagatgctgatagcattaaccctgcgtttcaaggaatcgatgcgcttgtgattctcactagtgctgtgcctaaaatgaaacctggttttgatcccactaaaggtggaagacctgagttcattttcgaagatggacaaccaatccggatcatcctttgaacaaactgggaaatgggaatatactggtttggaagagaaaggctgaacagtaccttgctgattctggaactccttacacaattatcagagctggaggacttctagataaggaaggcggtgtacgagagctgctagttggtaaagacgatgagctacttcagacagacacgaaaaccgtccccagggctgatgttgcagaagtctgcattcaggcattgctgttcgaggaggccaagaacaaagctttcgatctcggctcaaagccagagggaaccagtaccccaaccaaagacttcaaggctctcttctctcaagtcacctctcgtttttaaatcattatctttgttgccaataagaacatttgggatcaaaccttctaaaataaattctgtagtgtctatttgaaaggatacgttctttcaattcaatgagaatattggggttgaatgt

SEQ ID NO: 85069 - protein, 110 aa, Arabidopsis thaliana
  peptide (1)..(110): Ceres Seq. ID no. 12678629
TMANLPTVLVTGASGRTGQIVYKKLKEGSDKFVAKGLVRSAQGKEKIGGEADVFIGDITDADSINPAFQGIDALVILTSAVPKMKPGFDPTKGGRPEFIFEDGQPIRIIL

SEQ ID NO: 85070 - protein, 109 aa, Arabidopsis thaliana
  peptide (1)..(109): Ceres Seq. ID no. 12678630
MANLPTVLVTGASGRTGQIVYKKLKEGSDKFVAKGLVRSAQGKEKIGGEADVFIGDITDADSINPAFQGIDALVILTSAVPKMKPGFDPTKGGRPEFIFEDGQPIRIIL

SEQ ID NO: 85071 - protein, 85 aa, Arabidopsis thaliana
  peptide (1)..(85): Ceres Seq. ID no. 12678631
MSYFRQTRKPSPGLMLQKSAFRHCCSRRPRTKLSISAQSQREPVPQPKTSRLSSLKSPLVFKSLSLLPIRTFGIKPSKINSVVSI

SEQ ID NO: 85072 - DNA, 630 bp, Arabidopsis thaliana
  misc_feature (1)..(630): Ceres Seq. ID no. 12678644
  misc_feature (1)..(630): Ortholog of  Ceres SEQ ID NO 12609890 as cited in SEQ ID NO 51792
  misc_feature (1)..(630): Ortholog of  Ceres SEQ ID NO 12597253 as cited in SEQ ID NO 62959
  misc_feature (1)..(630): Ortholog of  Ceres SEQ ID NO 15173341 as cited in SEQ ID NO 63800
  misc_feature (1)..(630): Ortholog of  Ceres SEQ ID NO 12635416 as cited in SEQ ID NO 0
  misc_feature (1)..(630): Ortholog of  Ceres SEQ ID NO 12635564 as cited in SEQ ID NO 0
  misc_feature (1)..(630): Ortholog of  Ceres SEQ ID NO 12636917 as cited in SEQ ID NO 0
  misc_feature (1)..(630): Ortholog of  Ceres SEQ ID NO 14309430 as cited in SEQ ID NO 0
agatcaaaatcagaatcagaatcaaatttctcgtcgtgtcggagtaaatcaagccatggattccggaaccaaagtgaagaaaggagccgctggaagaagaagtggtggaggtcctaagaagaaaccggtttcccgttcggttaaatccggtctacagtttcctgtcggtaggatcggtcggtatcttaagaaaggtcgttattcgaagcgtgtcggaaccggagctccggtctatctcgccgccgtcctcgagtatcttgctgctgaggttctcgagcttgctggtaacgctgcaagagataacaaaaagaaccgtattataccacgccatgttctattagcggtgaggaacgacgaggagctagggacactactcaaaggcgtaaccattgcacacggcggtgttttaccaaacataaacccaatactcctcccaaagaagtctgagaaagcagcttcaactacaaaaacacccaaatcaccatcaaaggcaaccaaatcccctaagaaatcttagtacttctttcttcattcctctgtataacctactgtttctatctctctgtacgtttctctgtaaagacagaacagaatatctctttgttgttgtgagaaagcttagtttctctg

SEQ ID NO: 85073 - protein, 171 aa, Arabidopsis thaliana; identical to SEQ ID NO: 26064
  peptide (1)..(171): Ceres Seq. ID no. 12678645

SEQ ID NO: 85074 - protein, 153 aa, Arabidopsis thaliana; identical to SEQ ID NO: 26065
  peptide (1)..(153): Ceres Seq. ID no. 12678646

SEQ ID NO: 85075 - DNA, 2979 bp, Arabidopsis thaliana
  misc_feature (1)..(2979): Ceres Seq. ID no. 12678718
  misc_feature (1)..(2979): Ortholog of  Ceres SEQ ID NO 13657677 as cited in SEQ ID NO 66119
agggaaagatagagaatggataatggagggagcgtgttgtcgctctctgctccacacttcccttactccgccaccattctccgacgtcactctccggtggcttccatatctttctcccttaagcaaccaccaccgcaaccaccagaacctcctgagagtcctcctgacctccgccgcccggagaaatctattggttcttcttcatcttcttcctctccttcccctatcccttctcctaaaacccctcttaagattaatccactcaagggtttaaccaatcgctcttctgtgtctcctcttgttcaatcagaggtttcgagtaaagtttcttcctttggctcctctctagcatccaagctacgtttgtccagcaagctctctcctcctcctcctcctccacctccgcctcctgttgaggaaaccacccaattccgagatgagtttcggagtgacacgaaaccaccggaagaagaaactcgaaacccgcaacaggaattccgacaagaagggaagatattcgttggtaatttaccgacatggataaagaaaccagagtttgaagagttcttccgacagttcggaccgatagagaatgtgattctaatcaaaggacatcacgaggtcgagaaaaacgcgggatttgggttcattatttacgcggcagagaagtctgcaatgaaagctgtggagttcgacggcgttgagtttcacggcaggatattgacggtgaagctagacgacggaaagaggctgaaaacaaaggctgaacagagagtgaggtgggtagaggaaggagaagaagacacgaaaatgtctaataagtcgtcgtggcatcaagagagagaagggtctcgaaagtcactacagaggattttagataccaatggagataactggcaagctgttatttcagctttcgagaagatcagcaagccttcgaggacagagtttggtttgatggtgaagttctatggaagaagaggggatatgcatcgtgcacgtgagacttttgagagaatgcgcgcgaggggtatcacaccaacatcacgtatatacacaagccttattcacgcttatgcagttggtagagacatggacgaagcactgtcttgtgttcgtaaaatgaaggaagaaggaattgagatgagtttggtgacttatagtgtaatcgttggaggattctctaaagcgggacatgccgaagctgcagattactggtttgacgaggccaaacggatacacaaaacccttaatgccagtatatatggaaaaatcatatatgcacactgtcagacgtgcaatatggagcgggcagaggcattggtgagggagatggaagaagaaggtattgatgctcctattgctatctaccacaccatgatggatggttatacaatggtcgctgatgagaagaaaggcttagttgttttcaaaagacttaaggaatgtggatttactccaacagttgttacttatgggtgcctcattaatctttatactaaggttggaaagatttcaaaagccttggaagttagtagagtgatgaaggaagagggcgtaaagcataatttaaagacttattcgatgatgattaacggatttgtaaaactaaaagattgggccaatgcgtttgctgtatttgaagatatggtaaaagaaggcatgaaaccagatgttatactatacaacaacatcatctcagcattctgcgggatgggtaacatggatcgagcgatccagactgttaaggagatgcaaaagctgaggcatagaccaaccacacggacatttatgcctatcatacatggatatgcgaaatccggagacatgaggagatcactagaagtttttgatatgatgagacgatgtgggtgtgttccaaccgttcatactttcaatggtttgattaatggtttagttgagaaacgtcagatggaaaaggcggttgagatattagacgagatgacattggcgggtgtaagtgcaaacgaacatacttacacaaagatcatgcaaggctatgcatcagtcggtgataccggaaaagcctttgagtattttacaaggcttcaaaacgaaggtttggatgttgacattttcacttacgaggcgttacttaaagcttgctgcaaatcaggaagaatgcagagcgcattagctgtcacgaaagaaatgagtgcacggaatatcccgcgcaattccttcgtctataacatattaatcgacggatgggcacgaagaggcgatgtatgggaagccgcggatttgatacagcagatgaaaaaagaaggtgttaaacccgacattcatacttacacatccttcattagcgcttgttctaaggccggcgacatgaatagagctacacaaacaatcgaagaaatggaagcactaggtgtgaaacctaacatcaagacatacacgaccttaataaaaggatgggcgagagcatctcttccagagaaagccttaagttgctacgaggaaatgaaggcgatggggataaaacccgacaaagctgtgtatcattgccttctgacttcgcttctgtcgcgtgcttcaatcgcagaagcttacatttactcaggagtgatgactatctgcaaggaaatggtggaggcaggcttgattgttgatatgggaactgcggttcactggtctaaatgtctgtgtaagattgaagcttcaggtggtgagctcactgagacgttgcagaagactttcccacctgattggagctcgcatcatcatcaccatggcttcttagatcaagtttctgatgttgactccgatgaagatgatgttgatggtgaagatggtgaggacgatgaagatgttaactctgtttcggatttattatcaccttacaagtaagaaaaaactgatattgtaacaacttaaggaaagagcaatatcagcatatttttgtaattttgttttcttgtgttttacgtttttgcaaaataaaccttattgaac

SEQ ID NO: 85076 - protein, 952 aa, Arabidopsis thaliana
  peptide (1)..(952): Ceres Seq. ID no. 12678719
MDNGGSVLSLSAPHFPYSATILRRHSPVASISFSLKQPPPQPPEPPESPPDLRRPEKSIGSSSSSSSPSPIPSPKTPLKINPLKGLTNRSSVSPLVQSEVSSKVSSFGSSLASKLRLSSKLSPPPPPPPPPPVEETTQFRDEFRSDTKPPEEETRNPQQEFRQEGKIFVGNLPTWIKKPEFEEFFRQFGPIENVILIKGHHEVEKNAGFGFIIYAAEKSAMKAVEFDGVEFHGRILTVKLDDGKRLKTKAEQRVRWVEEGEEDTKMSNKSSWHQEREGSRKSLQRILDTNGDNWQAVISAFEKISKPSRTEFGLMVKFYGRRGDMHRARETFERMRARGITPTSRIYTSLIHAYAVGRDMDEALSCVRKMKEEGIEMSLVTYSVIVGGFSKAGHAEAADYWFDEAKRIHKTLNASIYGKIIYAHCQTCNMERAEALVREMEEEGIDAPIAIYHTMMDGYTMVADEKKGLVVFKRLKECGFTPTVVTYGCLINLYTKVGKISKALEVSRVMKEEGVKHNLKTYSMMINGFVKLKDWANAFAVFEDMVKEGMKPDVILYNNIISAFCGMGNMDRAIQTVKEMQKLRHRPTTRTFMPIIHGYAKSGDMRRSLEVFDMMRRCGCVPTVHTFNGLINGLVEKRQMEKAVEILDEMTLAGVSANEHTYTKIMQGYASVGDTGKAFEYFTRLQNEGLDVDIFTYEALLKACCKSGRMQSALAVTKEMSARNIPRNSFVYNILIDGWARRGDVWEAADLIQQMKKEGVKPDIHTYTSFISACSKAGDMNRATQTIEEMEALGVKPNIKTYTTLIKGWARASLPEKALSCYEEMKAMGIKPDKAVYHCLLTSLLSRASIAEAYIYSGVMTICKEMVEAGLIVDMGTAVHWSKCLCKIEASGGELTETLQKTFPPDWSSHHHHHGFLDQVSDVDSDEDDVDGEDGEDDEDVNSVSDLLSPYK

SEQ ID NO: 85077 - protein, 732 aa, Arabidopsis thaliana
  peptide (1)..(732): Ceres Seq. ID no. 12678720
MKAVEFDGVEFHGRILTVKLDDGKRLKTKAEQRVRWVEEGEEDTKMSNKSSWHQEREGSRKSLQRILDTNGDNWQAVISAFEKISKPSRTEFGLMVKFYGRRGDMHRARETFERMRARGITPTSRIYTSLIHAYAVGRDMDEALSCVRKMKEEGIEMSLVTYSVIVGGFSKAGHAEAADYWFDEAKRIHKTLNASIYGKIIYAHCQTCNMERAEALVREMEEEGIDAPIAIYHTMMDGYTMVADEKKGLVVFKRLKECGFTPTVVTYGCLINLYTKVGKISKALEVSRVMKEEGVKHNLKTYSMMINGFVKLKDWANAFAVFEDMVKEGMKPDVILYNNIISAFCGMGNMDRAIQTVKEMQKLRHRPTTRTFMPIIHGYAKSGDMRRSLEVFDMMRRCGCVPTVHTFNGLINGLVEKRQMEKAVEILDEMTLAGVSANEHTYTKIMQGYASVGDTGKAFEYFTRLQNEGLDVDIFTYEALLKACCKSGRMQSALAVTKEMSARNIPRNSFVYNILIDGWARRGDVWEAADLIQQMKKEGVKPDIHTYTSFISACSKAGDMNRATQTIEEMEALGVKPNIKTYTTLIKGWARASLPEKALSCYEEMKAMGIKPDKAVYHCLLTSLLSRASIAEAYIYSGVMTICKEMVEAGLIVDMGTAVHWSKCLCKIEASGGELTETLQKTFPPDWSSHHHHHGFLDQVSDVDSDEDDVDGEDGEDDEDVNSVSDLLSPYK

SEQ ID NO: 85078 - protein, 687 aa, Arabidopsis thaliana
  peptide (1)..(687): Ceres Seq. ID no. 12678721
MSNKSSWHQEREGSRKSLQRILDTNGDNWQAVISAFEKISKPSRTEFGLMVKFYGRRGDMHRARETFERMRARGITPTSRIYTSLIHAYAVGRDMDEALSCVRKMKEEGIEMSLVTYSVIVGGFSKAGHAEAADYWFDEAKRIHKTLNASIYGKIIYAHCQTCNMERAEALVREMEEEGIDAPIAIYHTMMDGYTMVADEKKGLVVFKRLKECGFTPTVVTYGCLINLYTKVGKISKALEVSRVMKEEGVKHNLKTYSMMINGFVKLKDWANAFAVFEDMVKEGMKPDVILYNNIISAFCGMGNMDRAIQTVKEMQKLRHRPTTRTFMPIIHGYAKSGDMRRSLEVFDMMRRCGCVPTVHTFNGLINGLVEKRQMEKAVEILDEMTLAGVSANEHTYTKIMQGYASVGDTGKAFEYFTRLQNEGLDVDIFTYEALLKACCKSGRMQSALAVTKEMSARNIPRNSFVYNILIDGWARRGDVWEAADLIQQMKKEGVKPDIHTYTSFISACSKAGDMNRATQTIEEMEALGVKPNIKTYTTLIKGWARASLPEKALSCYEEMKAMGIKPDKAVYHCLLTSLLSRASIAEAYIYSGVMTICKEMVEAGLIVDMGTAVHWSKCLCKIEASGGELTETLQKTFPPDWSSHHHHHGFLDQVSDVDSDEDDVDGEDGEDDEDVNSVSDLLSPYK

SEQ ID NO: 85079 - DNA, 1831 bp, Arabidopsis thaliana
  misc_feature (1)..(1831): Ceres Seq. ID no. 12678733
  misc_feature (1)..(1831): Ortholog of  Ceres SEQ ID NO 14307257 as cited in SEQ ID NO 54628
aaagatcaactctttcaaacacttactctgcatgtaacttcatagattgaacgaagaaccaaaaaaacagagcaaaacaaacaaaagatggttcaaaaccaccaaacagttctcgccgtcgatatgccacaaaccggcggctccaagtacttggacgacgacgggaaaaacaaaagaactgggagtgtttggacggcgagtgcacacataataacggcagtgataggttcgggagttttgtcactagcgtgggctacggcgcagctaggttggctcgccggaccggtggtgatgttgctcttctctgccgtcacttatttcacttcttctcttcttgctgcttgttaccgctccggcgaccctatctccggcaagaggaactacacttatatggatgctgtccgatcaaatctcggtggcgtgaaggtgacgctatgtgggattgttcagtatcttaatatctttggtgttgctattggctacacaattgcttcagctataagcatgatggcaataaagagatcaaactgtttccacaagagtggagggaaagatccatgtcacatgaacagtaatccttacatgatagcttttggattagtccagattctattctctcagattccagattttgatcaactttggtggctctcaatcctcgccgccgttatgtccttcacttattcctcagccggtctcgccctcggcatagcccaagttgtcgttaatgggaaggtgaagggaagtctcactgggattagcataggagcagtaacagagacacagaagatatggaggacctttcaagctcttggagacattgcttttgcttactcttactccattatcctcatcgagattcaggacacagtgaagtcaccaccatcagaagagaagacgatgaagaaggcaacacttgtgagcgtcagtgtaacgactatgttctatatgttgtgtggatgtatgggatatgcagcctttggagacttgtctccgggaaatctcttaaccggtttcgggttttataatccttattggcttcttgacattgcaaatgcagccattgtgattcaccttattggtgcataccaagtctattgccaacctctgtttgctttcatcgagaagcaagcttccattcaattccctgatagtgagttcattgcaaaagatatcaaaattccaattcctggtttcaagcctctccgcttgaatgtcttcaggttgatatggaggacagtgtttgtgatcataacgacagttatctcaatgcttcttccgtttttcaacgacgttgtgggtctgctcggggcactagggttttggccattgacggtgtattttccagtggaaatgtacatcgcgcagaagaagatacctagatggagcaccagatgggtttgccttcaagtcttcagcttagggtgtctagtagttagcattgctgcagctgcagggtccatagctggagtacttcttgatctaaagtcctacaagccatttcgaagcgaatactgatcaacttgaatagtagccaattcaaagcgatgactaagtcagttttaaacacaatggatttatcaagaacagtcaagagaaccaagaaccatgaatttgggaattttgatcagcttttttttatatagatagaagcaataatgctgttagttcttctctataatcttctctgtaccctgaaggcaagaattgtagtcctaatgagtaaatcttcgattaatgacagagtcatgtgctgcaacagaatcatgaactagcaccataatagtatattaccattgtggtaaaatttcaataacaagttcttgtactt

SEQ ID NO: 85080 - protein, 476 aa, Arabidopsis thaliana
  peptide (1)..(476): Ceres Seq. ID no. 12678734
MVQNHQTVLAVDMPQTGGSKYLDDDGKNKRTGSVWTASAHIITAVIGSGVLSLAWATAQLGWLAGPVVMLLFSAVTYFTSSLLAACYRSGDPISGKRNYTYMDAVRSNLGGVKVTLCGIVQYLNIFGVAIGYTIASAISMMAIKRSNCFHKSGGKDPCHMNSNPYMIAFGLVQILFSQIPDFDQLWWLSILAAVMSFTYSSAGLALGIAQVVVNGKVKGSLTGISIGAVTETQKIWRTFQALGDIAFAYSYSIILIEIQDTVKSPPSEEKTMKKATLVSVSVTTMFYMLCGCMGYAAFGDLSPGNLLTGFGFYNPYWLLDIANAAIVIHLIGAYQVYCQPLFAFIEKQASIQFPDSEFIAKDIKIPIPGFKPLRLNVFRLIWRTVFVIITTVISMLLPFFNDVVGLLGALGFWPLTVYFPVEMYIAQKKIPRWSTRWVCLQVFSLGCLVVSIAAAAGSIAGVLLDLKSYKPFRSEY

SEQ ID NO: 85081 - protein, 464 aa, Arabidopsis thaliana
  peptide (1)..(464): Ceres Seq. ID no. 12678735
MPQTGGSKYLDDDGKNKRTGSVWTASAHIITAVIGSGVLSLAWATAQLGWLAGPVVMLLFSAVTYFTSSLLAACYRSGDPISGKRNYTYMDAVRSNLGGVKVTLCGIVQYLNIFGVAIGYTIASAISMMAIKRSNCFHKSGGKDPCHMNSNPYMIAFGLVQILFSQIPDFDQLWWLSILAAVMSFTYSSAGLALGIAQVVVNGKVKGSLTGISIGAVTETQKIWRTFQALGDIAFAYSYSIILIEIQDTVKSPPSEEKTMKKATLVSVSVTTMFYMLCGCMGYAAFGDLSPGNLLTGFGFYNPYWLLDIANAAIVIHLIGAYQVYCQPLFAFIEKQASIQFPDSEFIAKDIKIPIPGFKPLRLNVFRLIWRTVFVIITTVISMLLPFFNDVVGLLGALGFWPLTVYFPVEMYIAQKKIPRWSTRWVCLQVFSLGCLVVSIAAAAGSIAGVLLDLKSYKPFRSEY

SEQ ID NO: 85082 - protein, 408 aa, Arabidopsis thaliana
  peptide (1)..(408): Ceres Seq. ID no. 12678736
MLLFSAVTYFTSSLLAACYRSGDPISGKRNYTYMDAVRSNLGGVKVTLCGIVQYLNIFGVAIGYTIASAISMMAIKRSNCFHKSGGKDPCHMNSNPYMIAFGLVQILFSQIPDFDQLWWLSILAAVMSFTYSSAGLALGIAQVVVNGKVKGSLTGISIGAVTETQKIWRTFQALGDIAFAYSYSIILIEIQDTVKSPPSEEKTMKKATLVSVSVTTMFYMLCGCMGYAAFGDLSPGNLLTGFGFYNPYWLLDIANAAIVIHLIGAYQVYCQPLFAFIEKQASIQFPDSEFIAKDIKIPIPGFKPLRLNVFRLIWRTVFVIITTVISMLLPFFNDVVGLLGALGFWPLTVYFPVEMYIAQKKIPRWSTRWVCLQVFSLGCLVVSIAAAAGSIAGVLLDLKSYKPFRSEY

SEQ ID NO: 85083 - DNA, 2253 bp, Arabidopsis thaliana
  misc_feature (1)..(2253): Ceres Seq. ID no. 12678739
  misc_feature (1)..(2253): Ortholog of  Ceres SEQ ID NO 13600301 as cited in SEQ ID NO 1010
ttttccaaccggagaatcatcgagtggaggagaacgcgcaatggccgtcggattctggatttagaaacacaggagtgcaacggagatcgccgtctccgttacctcctccgtcaccacctacggtttcaacttgggattttttgaatgtgtttgatacttatgattacagcaacgcccgttctcgtgcttcgggatattatccgatgggaatggcgtcaatctcaagcagtcctgattcgaaggaagttagagaaagagaagggattcctgagctagaagaagtaacagagcaagaagttatcaagcaagtgtatagacgtcccaagagaccaggattggagaaggttaaagaacacagagacgagcacaagcacaacgtttttcctgagaggaacattaacaaaagggaagttccaatgccagaacaagtcactgagagctcattggattcagagacaatttcgtctttttcaggaagtgatgtagaatcggagtttcactatgttaatggtggtgaaggaaagagtagcagcatcagttcaatcagtcatggggctgggacaaagagctcgagagaagtagaagaacagtatgggaggaaaaaaggagtgagctttgagttggaggaaacaacgagcacttcgtcttttgatgttgaatcttccaagataagtagcttatccagtttgtcgattcatgccactagggatctcagagaagttgttaaggagatcaagagtgagttcgagattgcttcttcttgtgggaaggaggttgctttgttacttgaagtcggcaagttgccttatcagcataaaaacaatggcgttaaagttatcttatccaggatcatgtatctggtagcaccatccacacggtcatcgcactctcagcccagactatcaatacgtttaacatctagaactcgaaaaatggcgaaatcatacaatggacaagatgttaatggaggcttcaatggaaacctctcatcaaccttagagaaactgtatgcgtgggaaaagaaactgtacaaggaagtcaaggacgaagaaaagcttcgtgctatctatgaagagaagtgcaggagactaaaaaaaatggatagtcatggagcagaatctatcaagatcgatgctactcgggcagccattaggaagcttctgaccaaaatcgatgtttgtataagatcagttgattcgatttccagcagaatccataaacttagagatgaagagttgcagccacagttgatacagttaattcacgggttgataagaatgtggaggtcaatgctgaggtgccaccagaaacagtttcaggcgatcagggagagcaaggttcgatctctaaaggcgaacacaaccttacaaaatgactctggctctacagcaattcttgatcttgagatagagcttagagaatggtgcatcagcttcaacaactgggtcaacacccagaaatcatacgtccagttcctaagcggatggctcacgaaatgccttcactatgaacccgaggcaaccgatgacggaatcgctcctttctctcctagccagatcggtgcaccgcccatctttatcatttgcaaagattggcaagaagcaatgtgtagaatatctggagagaatgtgaccaatgcaatgcaaggttttgcttcaagcctacacgagctatgggagaagcaagaagaagagcaaagggtaaaagcgcaatctgagcagcgagatgcagagtcagagagaagtgtggtttcgaaaggtcggtcagagagcgggatatcagctttggatgatttgaaagtggatttagattcaatgaggaagaggctagtcgaggagagaggtaagggtaaagaaaccattaagcttgtgaacaacgcgtcttcgagcagcttaaaagctggtttagttcccattttcggggcactgagaaaattcacatcagaagttgtgaaagctcatgaaattgttaggcttcaacatcctcagacctcttcttgagtagagagtgtggacttaccacatttttgcaccgttttgaagttttgttacttgcaaattagacataggtctatatagaaggaaattgttgtatagatgagttcatattcaattattggttggttagtttcccttgtaaaccgtttttaaatggtgaagaagaagatatctagtttgccttgtaagccgttacttgctgaattaaaaagaatgtaatatgactgttcctggttgagattaaaaggaaaatagg

SEQ ID NO: 85084 - protein, 665 aa, Arabidopsis thaliana
  peptide (1)..(665): Ceres Seq. ID no. 12678740
FQPENHRVEENAQWPSDSGFRNTGVQRRSPSPLPPPSPPTVSTWDFLNVFDTYDYSNARSRASGYYPMGMASISSSPDSKEVREREGIPELEEVTEQEVIKQVYRRPKRPGLEKVKEHRDEHKHNVFPERNINKREVPMPEQVTESSLDSETISSFSGSDVESEFHYVNGGEGKSSSISSISHGAGTKSSREVEEQYGRKKGVSFELEETTSTSSFDVESSKISSLSSLSIHATRDLREVVKEIKSEFEIASSCGKEVALLLEVGKLPYQHKNNGVKVILSRIMYLVAPSTRSSHSQPRLSIRLTSRTRKMAKSYNGQDVNGGFNGNLSSTLEKLYAWEKKLYKEVKDEEKLRAIYEEKCRRLKKMDSHGAESIKIDATRAAIRKLLTKIDVCIRSVDSISSRIHKLRDEELQPQLIQLIHGLIRMWRSMLRCHQKQFQAIRESKVRSLKANTTLQNDSGSTAILDLEIELREWCISFNNWVNTQKSYVQFLSGWLTKCLHYEPEATDDGIAPFSPSQIGAPPIFIICKDWQEAMCRISGENVTNAMQGFASSLHELWEKQEEEQRVKAQSEQRDAESERSVVSKGRSESGISALDDLKVDLDSMRKRLVEERGKGKETIKLVNNASSSSLKAGLVPIFGALRKFTSEVVKAHEIVRLQHPQTSS

SEQ ID NO: 85085 - protein, 598 aa, Arabidopsis thaliana
  peptide (1)..(598): Ceres Seq. ID no. 12678741
MGMASISSSPDSKEVREREGIPELEEVTEQEVIKQVYRRPKRPGLEKVKEHRDEHKHNVFPERNINKREVPMPEQVTESSLDSETISSFSGSDVESEFHYVNGGEGKSSSISSISHGAGTKSSREVEEQYGRKKGVSFELEETTSTSSFDVESSKISSLSSLSIHATRDLREVVKEIKSEFEIASSCGKEVALLLEVGKLPYQHKNNGVKVILSRIMYLVAPSTRSSHSQPRLSIRLTSRTRKMAKSYNGQDVNGGFNGNLSSTLEKLYAWEKKLYKEVKDEEKLRAIYEEKCRRLKKMDSHGAESIKIDATRAAIRKLLTKIDVCIRSVDSISSRIHKLRDEELQPQLIQLIHGLIRMWRSMLRCHQKQFQAIRESKVRSLKANTTLQNDSGSTAILDLEIELREWCISFNNWVNTQKSYVQFLSGWLTKCLHYEPEATDDGIAPFSPSQIGAPPIFIICKDWQEAMCRISGENVTNAMQGFASSLHELWEKQEEEQRVKAQSEQRDAESERSVVSKGRSESGISALDDLKVDLDSMRKRLVEERGKGKETIKLVNNASSSSLKAGLVPIFGALRKFTSEVVKAHEIVRLQHPQTSS

SEQ ID NO: 85086 - protein, 596 aa, Arabidopsis thaliana
  peptide (1)..(596): Ceres Seq. ID no. 12678742
MASISSSPDSKEVREREGIPELEEVTEQEVIKQVYRRPKRPGLEKVKEHRDEHKHNVFPERNINKREVPMPEQVTESSLDSETISSFSGSDVESEFHYVNGGEGKSSSISSISHGAGTKSSREVEEQYGRKKGVSFELEETTSTSSFDVESSKISSLSSLSIHATRDLREVVKEIKSEFEIASSCGKEVALLLEVGKLPYQHKNNGVKVILSRIMYLVAPSTRSSHSQPRLSIRLTSRTRKMAKSYNGQDVNGGFNGNLSSTLEKLYAWEKKLYKEVKDEEKLRAIYEEKCRRLKKMDSHGAESIKIDATRAAIRKLLTKIDVCIRSVDSISSRIHKLRDEELQPQLIQLIHGLIRMWRSMLRCHQKQFQAIRESKVRSLKANTTLQNDSGSTAILDLEIELREWCISFNNWVNTQKSYVQFLSGWLTKCLHYEPEATDDGIAPFSPSQIGAPPIFIICKDWQEAMCRISGENVTNAMQGFASSLHELWEKQEEEQRVKAQSEQRDAESERSVVSKGRSESGISALDDLKVDLDSMRKRLVEERGKGKETIKLVNNASSSSLKAGLVPIFGALRKFTSEVVKAHEIVRLQHPQTSS

SEQ ID NO: 85087 - DNA, 725 bp, Arabidopsis thaliana
  misc_feature (1)..(725): Ceres Seq. ID no. 12678754
  misc_feature (1)..(725): Ortholog of  Ceres SEQ ID NO 13597740 as cited in SEQ ID NO 64482
  misc_feature (1)..(725): Ortholog of  Ceres SEQ ID NO 13596056 as cited in SEQ ID NO 68307
aatatgctatgtttagatgctggacctccttcaccagctgatcatttgagagatgttttctacagaatgggacttgatgacaaggaaatagttgccttgtctggtgcacataccttagggagagccagaccagaccgtagtggttggggaaaacctgagacaaagtacacgaaaactggacctggagaagcaggaggacagtcatggacagtgaaatggctcaagttcgacaactcttatttcaaggatatcaaagaaaagagggacgacgatcttctggtgttacccactgatgcggcgctatttgaagatccttcattcaagaactatgcagagaagtatgctgaagatgtggctgcatttttcaaggactacgctgaagcccatgccaagcttagcaatctcggtgcaaaatttgatcctcccgagggcatagtcattgaaaacgttccagagaagttcgtagctgcaaagtattctacgggaaagaaggagctttcggattcgatgaaaaagaagataagagcagagtatgaagcaattggaggaagcccagataagccattacccacaaattacttcctcaacatcataattgccattggcgttttggtcctcttgtccactctctttggtggtaataacaactccgatttctctggtttctaattgacaaattatatattttgatttctcttacctacatacataattacgtggtgatc

SEQ ID NO: 85088 - protein, 222 aa, Arabidopsis thaliana
  peptide (1)..(222): Ceres Seq. ID no. 12678755
NMLCLDAGPPSPADHLRDVFYRMGLDDKEIVALSGAHTLGRARPDRSGWGKPETKYTKTGPGEAGGQSWTVKWLKFDNSYFKDIKEKRDDDLLVLPTDAALFEDPSFKNYAEKYAEDVAAFFKDYAEAHAKLSNLGAKFDPPEGIVIENVPEKFVAAKYSTGKKELSDSMKKKIRAEYEAIGGSPDKPLPTNYFLNIIIAIGVLVLLSTLFGGNNNSDFSGF

SEQ ID NO: 85089 - protein, 221 aa, Arabidopsis thaliana
  peptide (1)..(221): Ceres Seq. ID no. 12678756
MLCLDAGPPSPADHLRDVFYRMGLDDKEIVALSGAHTLGRARPDRSGWGKPETKYTKTGPGEAGGQSWTVKWLKFDNSYFKDIKEKRDDDLLVLPTDAALFEDPSFKNYAEKYAEDVAAFFKDYAEAHAKLSNLGAKFDPPEGIVIENVPEKFVAAKYSTGKKELSDSMKKKIRAEYEAIGGSPDKPLPTNYFLNIIIAIGVLVLLSTLFGGNNNSDFSGF

SEQ ID NO: 85090 - protein, 200 aa, Arabidopsis thaliana
  peptide (1)..(200): Ceres Seq. ID no. 12678757
MGLDDKEIVALSGAHTLGRARPDRSGWGKPETKYTKTGPGEAGGQSWTVKWLKFDNSYFKDIKEKRDDDLLVLPTDAALFEDPSFKNYAEKYAEDVAAFFKDYAEAHAKLSNLGAKFDPPEGIVIENVPEKFVAAKYSTGKKELSDSMKKKIRAEYEAIGGSPDKPLPTNYFLNIIIAIGVLVLLSTLFGGNNNSDFSGF

SEQ ID NO: 85091 - DNA, 774 bp, Arabidopsis thaliana
  misc_feature (1)..(774): Ceres Seq. ID no. 12678798
  misc_feature (1)..(774): Ortholog of  Ceres SEQ ID NO 14315388 as cited in SEQ ID NO 54357
  misc_feature (1)..(774): Ortholog of  Ceres SEQ ID NO 14312886 as cited in SEQ ID NO 57142
atctttaaaccaacaaaaaaaagttatcattcgggttaagatggagaaaccgggtcatgaaacggatattgcgggttcaagacgaacccatctgaagaaatcattcaaatccactcttcgacatcttctcactgcttgctccaaacaggattttgttgatattttctcgaaattcagtggggctgagcaagaactgctttttcagttgtatactcgggttgttgtgaatttgcatcagacaatagaggaagagtttgatgaacaatgtcacgaaactcaggtcggaccaattcttgatacagtcgaggagctggtcgaagaacagagtttggatcccttgttttctgataagactgatgtaatggcaatagcatatgatcttacaacatctaagaagaacgagatacaaaagttaacagttttgctccaaagggctgaagaacagaatcgccagaaggaagcccggatcagcatgctcaaaaaacaaacacaagatctctcaggcacagcggacagaatcgaaaagctgaatgccggggtctccggctactttgaaggaaaagacaagctacctccaatatagtttcgagaaaattgcaatgaagaagcgtgtcatttccattccctgcatttgtatatactttattatagagtcttaacaatctagtcagtagtcacaataacttgcttcatgtgtaaaccactgagaatctgaatgagtttgtactttggtattggtttgacgacaattcatgcaaaatattttccaaggtt

SEQ ID NO: 85092 - protein, 193 aa, Arabidopsis thaliana
  peptide (1)..(193): Ceres Seq. ID no. 12678799
SLNQQKKVIIRVKMEKPGHETDIAGSRRTHLKKSFKSTLRHLLTACSKQDFVDIFSKFSGAEQELLFQLYTRVVVNLHQTIEEEFDEQCHETQVGPILDTVEELVEEQSLDPLFSDKTDVMAIAYDLTTSKKNEIQKLTVLLQRAEEQNRQKEARISMLKKQTQDLSGTADRIEKLNAGVSGYFEGKDKLPPI

SEQ ID NO: 85093 - protein, 180 aa, Arabidopsis thaliana; identical to SEQ ID NO: 24742
  peptide (1)..(180): Ceres Seq. ID no. 12678800

SEQ ID NO: 85094 - DNA, 836 bp, Arabidopsis thaliana
  misc_feature (1)..(836): Ceres Seq. ID no. 12678842
  misc_feature (1)..(836): Ortholog of  Ceres SEQ ID NO 13594762 as cited in SEQ ID NO 51909
aattttcgtcttgagaaagaaaaacaaaatggcttcgatgggtggattacacggtgcatctccggcggttcttgaaggaagcttaaagatcaatggctccagccgtctgaatggctctggaagagtggcggtggctcaaaggtctagacttgtcgtcagagctcagcagagtgaggagacttctcgccggtccgtgattgggcttgttgctgctggtttagctggtggctcgtttgttcaggctgtcctcgccgatgctatttcgatcaaagttggccctcctccagctccttccggtggccttcctgggacagataactcagaccaagcaagagactttgcattggcattgaaagacaggttttacttacagccattgccaccaacagaagctgcagctagagccaaagaatctgcaaaggatatcataaatgtgaagccattgatcgacaggaaagcttggccatatgttcaaaacgatcttcgttccaaggcttcttatcttcgttatgatcttaacacaatcatttcctccaaacccaaggatgagaagaagtcactcaaggatctcaccaccaagctcttcgataccatcgacaatctggattatgcggcgaagaagaagagtccttcgcaggctgagaagtactatgctgagacagtctctgctttgaacgaagttcttgccaagcttggttaagcattttaatttctgcatttttcttgtaaattattattcttggtttttgttcttgagtactttagactcaaattcgtgaatctgaatttatgtttcacgttttcaccaagtaatggcaatttcttgagtatgcgtt

SEQ ID NO: 85095 - protein, 232 aa, Arabidopsis thaliana
  peptide (1)..(232): Ceres Seq. ID no. 12678843
IFVLRKKNKMASMGGLHGASPAVLEGSLKINGSSRLNGSGRVAVAQRSRLVVRAQQSEETSRRSVIGLVAAGLAGGSFVQAVLADAISIKVGPPPAPSGGLPGTDNSDQARDFALALKDRFYLQPLPPTEAAARAKESAKDIINVKPLIDRKAWPYVQNDLRSKASYLRYDLNTIISSKPKDEKKSLKDLTTKLFDTIDNLDYAAKKKSPSQAEKYYAETVSALNEVLAKLG

SEQ ID NO: 85096 - protein, 223 aa, Arabidopsis thaliana; identical to SEQ ID NO: 27183
  peptide (1)..(223): Ceres Seq. ID no. 12678844

SEQ ID NO: 85097 - protein, 220 aa, Arabidopsis thaliana; identical to SEQ ID NO: 27184
  peptide (1)..(220): Ceres Seq. ID no. 12678845

SEQ ID NO: 85098 - DNA, 1687 bp, Arabidopsis thaliana
  misc_feature (1)..(1687): Ceres Seq. ID no. 12678863
  misc_feature (1)..(1687): Ortholog of  Ceres SEQ ID NO 14308698 as cited in SEQ ID NO 58663
tgtttctcaacaattttctggtctcttagagtgagaggagagagatagagagttgtgttgggcgtggaacttggactagttccacatatcaggttatatagatcttctctttcaacttctgattcgtccagaagctttcctaatctgagatctgacatggaacaccaaggttggagttttgaggagaattatagtttgtccactaatagaagatctatcaggccacaagatgaactagtggagttattatggcgagatggacaagtggttctgcagagccaaactcatagagaacaaacccaaacccagaaacaagatcatcatgaagaagccctaagatccagcacctttcttgaagatcaagaaactgtctcttggatccaataccctccagatgaagacccattcgaacccgacgacttctcctcccacttcttctcaaccatggatcccctccagagaccaacctcagagacggttaagcctaagtccagtcctgaacctcctcaagtcatggttaagcctaaggcctgtcctgaccctcctcctcaagtcatgcctcctccaaaatttaggttaacaaattcatcatcggggattagggaaacagaaatggaacagtactcggtaacgaccgttggacctagccattgcggaagcaacccatcacagaacgatctcgatgtctcaatgagtcatgatcgaagcaaaaacatagaagaaaagcttaatccgaacgcaagttcctcatcaggtggctcctctggttgcagctttggcaaagatatcaaagaaatggctagtggaagatgcatcacaaccgaccgtaagagaaaacgtataaatcacactgacgaatctgtatctctatcagatgcaatcggtaacaagtcgaaccaacgatcaggatcaaaccgaaggagtcgagcagctgaagttcataatctctccgaaaggaggaggagagataggatcaatgagagaatgaaggctttgcaagaactaatacctcactgcagtaaaactgataaagcttcgattttagacgaagccatagattatttgaaatcacttcagttacagcttcaagtgatgtggatggggagtggaatggcggcggcggcggcttcggctccgatgatgttccccggagttcaacctcagcagttcatacgtcagatacagagcccggtacagttacctcgatttccggttatggatcagtctgcaattcagaacaatcccggtttagtttgccaaaacccggtacaaaaccagatcatctccgaccggtttgctagatacatcggtgggttcccacacatgcaggccgcgactcagatgcagccgatggagatgttgagatttagttcaccggcgggacagcaaagtcaacaaccgtcgtctgtgccgacgaagaccaccgacggttctcgtttggaccactaggttggtgagccacttttttacttccttatttttggtatgtttcttttttatatctatctttctgaacatacttaaaacgttcaaggatgtattattatagagtaaacgtgcaacttcattacgttattttctgtatatgtgagtttatgtatgtcaaaatgacatgatgagattttttgtaaacaacatcttaaaaacaggacatgtgatttttgtaatcgtaaaaaaaaaggtaaat

SEQ ID NO: 85099 - protein, 430 aa, Arabidopsis thaliana
  peptide (1)..(430): Ceres Seq. ID no. 12678864
MEHQGWSFEENYSLSTNRRSIRPQDELVELLWRDGQVVLQSQTHREQTQTQKQDHHEEALRSSTFLEDQETVSWIQYPPDEDPFEPDDFSSHFFSTMDPLQRPTSETVKPKSSPEPPQVMVKPKACPDPPPQVMPPPKFRLTNSSSGIRETEMEQYSVTTVGPSHCGSNPSQNDLDVSMSHDRSKNIEEKLNPNASSSSGGSSGCSFGKDIKEMASGRCITTDRKRKRINHTDESVSLSDAIGNKSNQRSGSNRRSRAAEVHNLSERRRRDRINERMKALQELIPHCSKTDKASILDEAIDYLKSLQLQLQVMWMGSGMAAAAASAPMMFPGVQPQQFIRQIQSPVQLPRFPVMDQSAIQNNPGLVCQNPVQNQIISDRFARYIGGFPHMQAATQMQPMEMLRFSSPAGQQSQQPSSVPTKTTDGSRLDH

SEQ ID NO: 85100 - protein, 334 aa, Arabidopsis thaliana
  peptide (1)..(334): Ceres Seq. ID no. 12678865
MDPLQRPTSETVKPKSSPEPPQVMVKPKACPDPPPQVMPPPKFRLTNSSSGIRETEMEQYSVTTVGPSHCGSNPSQNDLDVSMSHDRSKNIEEKLNPNASSSSGGSSGCSFGKDIKEMASGRCITTDRKRKRINHTDESVSLSDAIGNKSNQRSGSNRRSRAAEVHNLSERRRRDRINERMKALQELIPHCSKTDKASILDEAIDYLKSLQLQLQVMWMGSGMAAAAASAPMMFPGVQPQQFIRQIQSPVQLPRFPVMDQSAIQNNPGLVCQNPVQNQIISDRFARYIGGFPHMQAATQMQPMEMLRFSSPAGQQSQQPSSVPTKTTDGSRLDH

SEQ ID NO: 85101 - protein, 311 aa, Arabidopsis thaliana
  peptide (1)..(311): Ceres Seq. ID no. 12678866
MVKPKACPDPPPQVMPPPKFRLTNSSSGIRETEMEQYSVTTVGPSHCGSNPSQNDLDVSMSHDRSKNIEEKLNPNASSSSGGSSGCSFGKDIKEMASGRCITTDRKRKRINHTDESVSLSDAIGNKSNQRSGSNRRSRAAEVHNLSERRRRDRINERMKALQELIPHCSKTDKASILDEAIDYLKSLQLQLQVMWMGSGMAAAAASAPMMFPGVQPQQFIRQIQSPVQLPRFPVMDQSAIQNNPGLVCQNPVQNQIISDRFARYIGGFPHMQAATQMQPMEMLRFSSPAGQQSQQPSSVPTKTTDGSRLDH

SEQ ID NO: 85102 - DNA, 1962 bp, Arabidopsis thaliana
  misc_feature (1)..(1962): Ceres Seq. ID no. 12678880
  misc_feature (1)..(1962): Ortholog of  Ceres SEQ ID NO 14308709 as cited in SEQ ID NO 55376
  misc_feature (1)..(1962): Ortholog of  Ceres SEQ ID NO 15175785 as cited in SEQ ID NO 56970
  misc_feature (1)..(1962): Ortholog of  Ceres SEQ ID NO 15178157 as cited in SEQ ID NO 57481
  misc_feature (1)..(1962): Ortholog of  Ceres SEQ ID NO 13597407 as cited in SEQ ID NO 64106
  misc_feature (1)..(1962): Ortholog of  Ceres SEQ ID NO 12637747 as cited in SEQ ID NO 0
gtcgtctttttaaaaacgttttactttccacggcgaattttggtctgattccaaattcttccctagtttgaaaaatcttctgtattctgaaaagagattttatgcgtatcgctgaaataggaagaaaacagattcctttccatttcccaaattttgtcattgagtcttggcatttcaaccaatcgcaatttattgaaattccggcgagtcattagatttttttggattccgtttcaaggtacggtgctttttcgcagattgagaagagcttaataagaaagatgacattgacgatcccaaacgcacctgggagctccgggtacttggatatgttcccagagagaaggatgtcgtattttgggaattcttacattctgggtttgactgtcactgccggaatcggtggccttctgttcggttatgatacaggtgtaatttccggtgcccttttgtacattaaggatgatttcgaagttgttaagcagagcagtttcttacaggaaactattgtaagtatggctttagttggtgccatgattggtgctgcagctggaggttggatcaatgactactacggtcgtaaaaaggcgactctttttgcagatgttgtctttgcagctggagctatcgttatggctgctgctcctgatccgtatgttttgatatcgggtcgtctcttggtcggtttaggagttggtgttgcttctgtgactgctccggtttatatagcggaagcatctccatcggaagttagaggtggacttgtgagcaccaacgtattgatgatcactggtggacagtttctttcatatctcgttaattctgctttcacacaggttccaggaacatggagatggatgcttggtgtttcaggcgttcccgctgtgattcagttcatcctcatgcttttcatgccagaatcccctcgatggcttttcatgaaaaatcgtaaagcggaagccatccaagtgctcgccagaacctatgacatctcgcggttagaagacgagattgatcatctttcagcggctgaagaggaagaaaaacaaaggaagcgcactgttggctacttggatgttttcagatccaaagaattgagacttgcatttcttgccggagcaggacttcaggcgtttcagcagttcactggtatcaatacagttatgtactacagccctacgatagtccaaatggctggatttcactcaaaccagctcgctttgttcctgtctctcattgttgctgccatgaatgctgctggaacagtcgtggggatttacttcatcgatcattgtggaaggaaaaagctagctctctcaagtttatttggcgtcattatatcactcttaatcctctcagtctcgtttttcaaacaatctgagacatcatctgatggagggctctatggttggctcgctgtgcttggcttagctctatacattgttttctttgcaccgggaatgggaccagtcccatggacggtgaactcagagatataccctcaacaataccgaggcatatgcggaggcatgtcagctacagttaactggatcagcaatttgattgtggcacaaacattcttgacaatcgcggaagctgctggaacaggaatgactttcttgattttggcgggaattgcggttcttgctgtaatctttgtgattgtgtttgtccctgagactcaagggctaacgttttcggaagttgaacagatttggaaagaaagagcttatggaaatatcagtggctggggcagtagcagtgatagcaacaacatggaagggttactcgagcagggatctcaatcttaaagatcttggatggctcatgagtcatgcatgacttacacattgtgaaatcacatagtagtaaaccgggattggttccggtttagcaatgtgagatgtatgtgatgttggaattgtaatgttcttaggaactgtgattgtaaataaatacatt

SEQ ID NO: 85103 - protein, 509 aa, Arabidopsis thaliana; identical to SEQ ID NO: 49279
  peptide (1)..(509): Ceres Seq. ID no. 12678881

SEQ ID NO: 85104 - protein, 493 aa, Arabidopsis thaliana; identical to SEQ ID NO: 49280
  peptide (1)..(493): Ceres Seq. ID no. 12678882

SEQ ID NO: 85105 - protein, 487 aa, Arabidopsis thaliana; identical to SEQ ID NO: 49281
  peptide (1)..(487): Ceres Seq. ID no. 12678883

SEQ ID NO: 85106 - DNA, 1852 bp, Arabidopsis thaliana
  misc_feature (1)..(1852): Ceres Seq. ID no. 12678886
  misc_feature (1)..(1852): Ortholog of  Ceres SEQ ID NO 13664013 as cited in SEQ ID NO 67686
ggtggcgttaagtcgttaactgcgtctgatctactcgtagcttcttcgttcttcagcatttgatcggagtagtgacctttttgattgacagatggaagctctgtcttctcttacgttcaagggttctcttccagaagccatatttgaagccaaagggaagaagaagctttttgttgtctacatttctggagaggatgaagagtcggataagttgaacagattgacttggactgatgcatcggtggcagattcgttgtcgaagtattgtattttagtgcatatccaagctggaagtgttgacgccacaaacttctctgcaatatacccatattcatctgttccttgtatagctgccattggattcagtggtacacaagtttggagaaccgaaggatttatcactgctgaagaccttgcatccagtttagagaaagcgtggttaggacttcatatccaggaaacaactgcaagtatcttttcagcagcacttgcatcacagaactcagagacacctgtttctagtgcttcgagtgttgtcttgcctcccggaagtgttcctttagatgcagcggttgcatctccatcgacggcttctagtgttcaaccctcagagacaaagtcaacggtaacatctgcatcaacaacagaaaacaatgatggcacagttgcagttaagggcaaagaatctgctgaacccagtaatttgtgtgatactactaaaaaccagccagcaccctctgttgatggaactaaggccaatgttgaacatgaagcgacagagacccctttgcgtgttcaggcagaaaaggagccaattcgtcctacagccccaggaacaaatgataatacatccagggttcgatcttctgttgatagaaaaaggaaacagggaactgtgataaatgaagaggatagtggtgtaggtgttagtggaagggacattaatctaacaaaatctgtcgatacaaaagagaccatgaagccaaaggatgaaggaggagaggaagaggatggagaaaaatccaaaaaagcatctgacgttcatttaaacattcgattacctgatggtagtagccttcaggagaagttttctgtgacaagtatattgagaatggtcaaggattatgtgaacagtaatcaaacaatcggactgggtgcttatgatcttgcggttccttacccacgtaaggtgtatactgaccaagatctggataagtctctatccgagttgagattgttcgatagacaagcacttgtagtagttccgcgaaaaagagcaaccgtctatcaaagaggaacatcttactcggagtctaacaacaacacagaccctaatagtggcggttactttgcttatgttagaagagtactgtcttatgcaaacccgttttcatattttggcggtggtactgccaacgcatcaagctctgttccagaacgtcaaacaagaccaaatacggaggtgagaaacaatctggggcaagtagggacgtcctttcaagatccatcagaaggtaggagcaacgttaggaataggagaccaaccacttctcggattggaagtaacatccatacgttgaatcacaatgaagatgaggctccgtttggtgatggaaacgctttttggaacggaaactccacacagtacggtggtggaagcggtggagacagtaatgatagacgatgaaataagagaagttgaaatctgtgtggatagatacagaaacagctcgggtgtttactttttatacttgactctttatgaaccatttaagagaccagctgcaaaatgtatcctgatgcgtttccgttttttcggttgctcgtattaaatttaaatctaaaaaaacta

SEQ ID NO: 85107 - protein, 531 aa, Arabidopsis thaliana; identical to SEQ ID NO: 28835
  peptide (1)..(531): Ceres Seq. ID no. 12678887

SEQ ID NO: 85108 - DNA, 1052 bp, Arabidopsis thaliana
  misc_feature (1)..(1052): Ceres Seq. ID no. 12678888
  misc_feature (1)..(1052): Ortholog of  Ceres SEQ ID NO 13596969 as cited in SEQ ID NO 63375
  misc_feature (1)..(1052): Ortholog of  Ceres SEQ ID NO 13597519 as cited in SEQ ID NO 64759
  misc_feature (1)..(1052): Ortholog of  Ceres SEQ ID NO 13597870 as cited in SEQ ID NO 64982
  misc_feature (1)..(1052): Ortholog of  Ceres SEQ ID NO 13656123 as cited in SEQ ID NO 65212
  misc_feature (1)..(1052): Ortholog of  Ceres SEQ ID NO 13595926 as cited in SEQ ID NO 67778
ccttgagatggttatgattcatatcttcctcaccgtgatggtggttggaggcgtcagtctcttcccggagacggcagaagcgatcgtgatgggaccgtcgatgcagaagctgacgtggcattactataaagtttacaacacttgcgagaatgcagagaattttgtgaggcaccaagttgagatattttacaagaacgataaaagtattgctcctaagctccttcgtctcctctactcagactgctttgtttccggatgcgatgcatcagttcttctagaaggtccaaactcagagaaaatggcgccacaaaacagaggacttggaggattcgttctcatagacaaaatcaaaatagtcttggaacagagatgtcctggtgttgtctcttgcgccgacattcttaatcttgcaactcgtgatgctgttcatttggcgggtgcaccatcttatcctgtgttcacaggcaggagagatggtttgacgtctgataagcaaaccgtggacctaccatcgccatccatctcatgggaccaagccatgtcttatttcaaatccagaggcttgaatgttcttgacatggctacacttctaggatcacattcaatggggagaacacattgcagctatgttgttgatcgactctacaattacaacaagaccggtaaaccaagccctactatgaacaagtatttcctatctgaaatggcaaagcaatgtcctccaagaacgaggaaaggccagaccgatccgctcgtgtacctaaacccggactcaggctcaaaccacagcttcacaagctcattttactcaagaattctatcaaacaaatctgtacttgaagtagatcaacaactgctttacaatgatgacaccaagcaaatatctaaggaattctcagagggtttcgaggattttcggaaatcatttgctctttcgatgagcaagatgggagcgataaatgtgttaactaaaacggaaggtgagatacgaaaagattgcaggcatataaactaaacacaaaagcacaatctctctctcaccactgtgatac

SEQ ID NO: 85109 - protein, 337 aa, Arabidopsis thaliana
  peptide (1)..(337): Ceres Seq. ID no. 12678889
LEMVMIHIFLTVMVVGGVSLFPETAEAIVMGPSMQKLTWHYYKVYNTCENAENFVRHQVEIFYKNDKSIAPKLLRLLYSDCFVSGCDASVLLEGPNSEKMAPQNRGLGGFVLIDKIKIVLEQRCPGVVSCADILNLATRDAVHLAGAPSYPVFTGRRDGLTSDKQTVDLPSPSISWDQAMSYFKSRGLNVLDMATLLGSHSMGRTHCSYVVDRLYNYNKTGKPSPTMNKYFLSEMAKQCPPRTRKGQTDPLVYLNPDSGSNHSFTSSFYSRILSNKSVLEVDQQLLYNDDTKQISKEFSEGFEDFRKSFALSMSKMGAINVLTKTEGEIRKDCRHIN

SEQ ID NO: 85110 - protein, 335 aa, Arabidopsis thaliana
  peptide (1)..(335): Ceres Seq. ID no. 12678890
MVMIHIFLTVMVVGGVSLFPETAEAIVMGPSMQKLTWHYYKVYNTCENAENFVRHQVEIFYKNDKSIAPKLLRLLYSDCFVSGCDASVLLEGPNSEKMAPQNRGLGGFVLIDKIKIVLEQRCPGVVSCADILNLATRDAVHLAGAPSYPVFTGRRDGLTSDKQTVDLPSPSISWDQAMSYFKSRGLNVLDMATLLGSHSMGRTHCSYVVDRLYNYNKTGKPSPTMNKYFLSEMAKQCPPRTRKGQTDPLVYLNPDSGSNHSFTSSFYSRILSNKSVLEVDQQLLYNDDTKQISKEFSEGFEDFRKSFALSMSKMGAINVLTKTEGEIRKDCRHIN

SEQ ID NO: 85111 - protein, 333 aa, Arabidopsis thaliana
  peptide (1)..(333): Ceres Seq. ID no. 12678891
MIHIFLTVMVVGGVSLFPETAEAIVMGPSMQKLTWHYYKVYNTCENAENFVRHQVEIFYKNDKSIAPKLLRLLYSDCFVSGCDASVLLEGPNSEKMAPQNRGLGGFVLIDKIKIVLEQRCPGVVSCADILNLATRDAVHLAGAPSYPVFTGRRDGLTSDKQTVDLPSPSISWDQAMSYFKSRGLNVLDMATLLGSHSMGRTHCSYVVDRLYNYNKTGKPSPTMNKYFLSEMAKQCPPRTRKGQTDPLVYLNPDSGSNHSFTSSFYSRILSNKSVLEVDQQLLYNDDTKQISKEFSEGFEDFRKSFALSMSKMGAINVLTKTEGEIRKDCRHIN

SEQ ID NO: 85112 - DNA, 1876 bp, Arabidopsis thaliana
  misc_feature (1)..(1876): Ceres Seq. ID no. 12678904
  misc_feature (1)..(1876): Ortholog of  Ceres SEQ ID NO 14307871 as cited in SEQ ID NO 67222
gaagctctcacgtgacaaaaacacgcacaaaattattcaagttaccacgtttattaagcaaaacgattgagccaaaaaaaacgcatcagaatctggaacctggatcagatctagtcaggggtcagatcggagagccggcaatataatggcagcggcgagacgattacggacgctccaatctcagccggagaacaaggtctgtgtcgattgctcccagaagaatccacaatgggcatcgatttcatatggaatcttcatgtgcttggaatgctccggtaagcaccgtggtttaggtgttcacatctcattcgtcagatccgtcaccatggattcatggtccgagatccagatcaagaaaatggacgctggaggcaacgagcgtctcaacaattttctcgctcagtacgggatctcgaaagagactgatatcatctccaagtacaattccaacgccgcgtctgtgtatcgagatcggatccaagctttagctgagggaagacaatggagagatccgccgattgttaaggaatcggttggtggtggattgatgaataagaagcctccgttgtctcaaggcggtggtagagattctggtaatggtggatgggataattgggataacgatgattcgtttagatctacggatatgaggaggaatcaatcggcgggtgattttaggtcatcgggaggtcgtggtgctccggcgaagtcgaaatcgtctgaggatatatattcacggtctcagctggaggcgtcggcggcgaataaggagagtttctttgcgaaaaggatggctgagaatgagtctaagcctgagggacttcctccttcacaaggtggtaagtatgttgggtttggatctagtccaggtccagctccgagaagcaatcaacagagtggtggtggtgatgttttctctgttatgtctgagggttttggaagattgtctcttgttgctgcatcagctgcaaatgttgttcagactggaaccatggagtttacttccaaggtcaaagaaggtggcttagatcagacggtcagtgagactgttaatgttgttgcgagtaagacaacagagataggacagaggacatgggggatcatgaaaggagtgatggcaattgcctcacaaaaggttgaagagttcactaaagaagaagcatcaacttggaatcaacagaataaaactgagggcaacggttactaccagaactctgggattggaaacaaaacagcaaattcatcttttggaggatcacaatcatcatcaagtggtcacaacaacagttatcgtaactcgaattcttgggatgactggggagaagagaacaatagcaaaaaggaagcagcaccaaaggtgtcgacttctaatgatgatgacgacggcggttgggctggttgggatgataatgatgctaaagatgatgatttctattatcagcctgcaagcgataagaaatctgtaggtcacaatgggaaatcagacactgcttggaccggtggaggttttctctaacggtgttacaggataatggtgaatgaagtttgtacaattaaggaatagcagagcctgtggtcttctcgtgctctgtcacaagagagagcagagtggtcatctcaaccattaagccaccactggtctttcttttcacatatcaattgcttggcgttcaatcaaatcgatcgtcactatttgttcttctacaatatatatagtttttttttttatttgtacaagtttcacagtcacagaggattgcttgctaaactattcgggttagtcttcagctctttttttgagattcaaacttttatttttcttgaaatttgtaatgatcacaaaagacaaattttccgttttattgtcttctttctc

SEQ ID NO: 85113 - protein, 456 aa, Arabidopsis thaliana; identical to SEQ ID NO: 47114
  peptide (1)..(456): Ceres Seq. ID no. 12678905

SEQ ID NO: 85114 - protein, 419 aa, Arabidopsis thaliana; identical to SEQ ID NO: 47115
  peptide (1)..(419): Ceres Seq. ID no. 12678906

SEQ ID NO: 85115 - protein, 396 aa, Arabidopsis thaliana; identical to SEQ ID NO: 47116
  peptide (1)..(396): Ceres Seq. ID no. 12678907

SEQ ID NO: 85116 - DNA, 2541 bp, Arabidopsis thaliana
  misc_feature (1)..(2541): Ceres Seq. ID no. 12678912
  misc_feature (1)..(2541): Ortholog of  Ceres SEQ ID NO 13599900 as cited in SEQ ID NO 531
  misc_feature (1)..(2541): Ortholog of  Ceres SEQ ID NO 15171402 as cited in SEQ ID NO 51174
  misc_feature (1)..(2541): Ortholog of  Ceres SEQ ID NO 13659971 as cited in SEQ ID NO 67565
  misc_feature (1)..(2541): Ortholog of  Ceres SEQ ID NO 13500385 as cited in SEQ ID NO 67583
aaaagattcctctttctcagctcaatttccaaaagctccgacctttacgatcctctagattctcggcgccggtttctcggagtaaataatggctcagttcacgggtcgggtcgttggagactacttggtgggtcgtcaaatcgggtcgggttcgttctctgttgtttgggaagcgaggcaccgcgttgacggtactgaggttgctatcaaagagatcgccatggacaggcttaacaagaagctgcaggaaagtctcatgtctgagatttttatcttgaggaggatcaatcatcctaacatcatccgtctgatcgacatgatcaagtctcctgggaaagtacatttggtgttggagtactgcaaaggaggtgacttgtctgtgtatgtccaaagacatgggattgtccctgaagctactgctaagcatttcatgcagcagttagcggccggcttacaagttcttcgtgacaataatattattcaccgagatttaaagcctcagaatcttcttctatccacaaatgaaaatgatgcagatctgaagattgctgattttggatttgcaagatcgttgcaacctagggggctcgcagagactttatgtggttcaccattgtatatggccccagagatcatgcaactccagaagtatgatgcaaaggcagatctctggagtgttggtgctattttatttcaacttgtgacaggcagaaccccttttacaggaaacagccaaattcagttgctccaaaacattataagatcaaccgaattacattttccaggggactgtagagatttaagcttggactgcatagacctgtgtcagaagttactgcgccgtaatccagtggaacgtttgacatttgaagagttctttaatcaccctttcctttcggacaggcagtcatatgatttctccaggagtagattggggttaagaacaatggacggttttctttcgtctggaagcagtccctcgagaaacatggaagaaagttctcaagaagactgtttgccgttccttctagatgatgattctagtggacctgaggggagcccttcatatttaaaaaagacatcctcaatgaagtcgtcctctggaattaaagtcgatacgagaattgagaggaaggaggtggaatctagtcctttaaaacatacagaacttacttctggatatagtagtttcaaccaaaaagtggaaaacgatagatttagatttgaaactcaaataaattcagataggagaaaccgcagggaaccgacaggattgactgattctagatcacttattgctccaggaagagtagatgattctcaagactccatggatcaagacttcgttctcgtatctggaccaccagtagatatgccatcatcttcatcaagttcttcgaagccttataattttccattcaagtctcagtctcctcctgtagagttattcaacagaagcataagttcaacggctcccatgccaataattggtgctactagcaacagcattggtcagtttgggagccttgacagtcagtattctgccccgagcacttctcatgggtctctggatcttggtgatgcttttgaacagccatcaactcacagcctgacaagaatcaggtctctgagaaaatatgcagcaacaattgcagaactagtttatgaaaggattgaatctgacaaacatctagaagctttctcgatccaattggcgattctggcaatttggaaacaggcactgcacatatgtcatactcaggcaatttcaggtttggaaggaagcccaagccaagacattaacaaactaagaagtagcagcctgaaacacgatactcacagttctaataaagtcactgatctcagccatgatggatcggaggagatatcctctcagattcagaggcaatttatacaggagattgagcttgctgaagaacttgccaagagtattgaacctggaaatacaaaaatgccagatgcaatggagacgatatttgaagcagcacttgatcttggaaaacttggaggagttaaggaggttatgggagatacagagaacgccggaaaccaatattcgaaagcagtgcgtttgctggtattccttttagtagaagcaccaatgctgattctgaatccgccactgtctctcacaaactcagtcaggtatcgtctcaggacatatattgatttcctcagcagaagattaaaacatctgcagtcacatagaagaagttcagctggtcagatgcaaggatcatcgttagctatgatgaacagacaatcataaatccattcacttgggttgggttctcttgtttcttgtgttcttttatgaaaaaaaaaaaaaaatctaaaagagaaaaatgtatatgtttttgtacagcaacatcatatattcttattcttttggggttaatctggagggacgttggggaaatgatctgtgtgatggatgttgtaacttgtaacattttcttgttctattttgatcttaatcctatgttttttacttgactttatgcaaaaatatatgttatg

SEQ ID NO: 85117 - protein, 733 aa, Arabidopsis thaliana
  peptide (1)..(733): Ceres Seq. ID no. 12678913
MAQFTGRVVGDYLVGRQIGSGSFSVVWEARHRVDGTEVAIKEIAMDRLNKKLQESLMSEIFILRRINHPNIIRLIDMIKSPGKVHLVLEYCKGGDLSVYVQRHGIVPEATAKHFMQQLAAGLQVLRDNNIIHRDLKPQNLLLSTNENDADLKIADFGFARSLQPRGLAETLCGSPLYMAPEIMQLQKYDAKADLWSVGAILFQLVTGRTPFTGNSQIQLLQNIIRSTELHFPGDCRDLSLDCIDLCQKLLRRNPVERLTFEEFFNHPFLSDRQSYDFSRSRLGLRTMDGFLSSGSSPSRNMEESSQEDCLPFLLDDDSSGPEGSPSYLKKTSSMKSSSGIKVDTRIERKEVESSPLKHTELTSGYSSFNQKVENDRFRFETQINSDRRNRREPTGLTDSRSLIAPGRVDDSQDSMDQDFVLVSGPPVDMPSSSSSSSKPYNFPFKSQSPPVELFNRSISSTAPMPIIGATSNSIGQFGSLDSQYSAPSTSHGSLDLGDAFEQPSTHSLTRIRSLRKYAATIAELVYERIESDKHLEAFSIQLAILAIWKQALHICHTQAISGLEGSPSQDINKLRSSSLKHDTHSSNKVTDLSHDGSEEISSQIQRQFIQEIELAEELAKSIEPGNTKMPDAMETIFEAALDLGKLGGVKEVMGDTENAGNQYSKAVRLLVFLLVEAPMLILNPPLSLTNSVRYRLRTYIDFLSRRLKHLQSHRRSSAGQMQGSSLAMMNRQS

SEQ ID NO: 85118 - protein, 689 aa, Arabidopsis thaliana
  peptide (1)..(689): Ceres Seq. ID no. 12678914
MDRLNKKLQESLMSEIFILRRINHPNIIRLIDMIKSPGKVHLVLEYCKGGDLSVYVQRHGIVPEATAKHFMQQLAAGLQVLRDNNIIHRDLKPQNLLLSTNENDADLKIADFGFARSLQPRGLAETLCGSPLYMAPEIMQLQKYDAKADLWSVGAILFQLVTGRTPFTGNSQIQLLQNIIRSTELHFPGDCRDLSLDCIDLCQKLLRRNPVERLTFEEFFNHPFLSDRQSYDFSRSRLGLRTMDGFLSSGSSPSRNMEESSQEDCLPFLLDDDSSGPEGSPSYLKKTSSMKSSSGIKVDTRIERKEVESSPLKHTELTSGYSSFNQKVENDRFRFETQINSDRRNRREPTGLTDSRSLIAPGRVDDSQDSMDQDFVLVSGPPVDMPSSSSSSSKPYNFPFKSQSPPVELFNRSISSTAPMPIIGATSNSIGQFGSLDSQYSAPSTSHGSLDLGDAFEQPSTHSLTRIRSLRKYAATIAELVYERIESDKHLEAFSIQLAILAIWKQALHICHTQAISGLEGSPSQDINKLRSSSLKHDTHSSNKVTDLSHDGSEEISSQIQRQFIQEIELAEELAKSIEPGNTKMPDAMETIFEAALDLGKLGGVKEVMGDTENAGNQYSKAVRLLVFLLVEAPMLILNPPLSLTNSVRYRLRTYIDFLSRRLKHLQSHRRSSAGQMQGSSLAMMNRQS

SEQ ID NO: 85119 - protein, 677 aa, Arabidopsis thaliana
  peptide (1)..(677): Ceres Seq. ID no. 12678915
MSEIFILRRINHPNIIRLIDMIKSPGKVHLVLEYCKGGDLSVYVQRHGIVPEATAKHFMQQLAAGLQVLRDNNIIHRDLKPQNLLLSTNENDADLKIADFGFARSLQPRGLAETLCGSPLYMAPEIMQLQKYDAKADLWSVGAILFQLVTGRTPFTGNSQIQLLQNIIRSTELHFPGDCRDLSLDCIDLCQKLLRRNPVERLTFEEFFNHPFLSDRQSYDFSRSRLGLRTMDGFLSSGSSPSRNMEESSQEDCLPFLLDDDSSGPEGSPSYLKKTSSMKSSSGIKVDTRIERKEVESSPLKHTELTSGYSSFNQKVENDRFRFETQINSDRRNRREPTGLTDSRSLIAPGRVDDSQDSMDQDFVLVSGPPVDMPSSSSSSSKPYNFPFKSQSPPVELFNRSISSTAPMPIIGATSNSIGQFGSLDSQYSAPSTSHGSLDLGDAFEQPSTHSLTRIRSLRKYAATIAELVYERIESDKHLEAFSIQLAILAIWKQALHICHTQAISGLEGSPSQDINKLRSSSLKHDTHSSNKVTDLSHDGSEEISSQIQRQFIQEIELAEELAKSIEPGNTKMPDAMETIFEAALDLGKLGGVKEVMGDTENAGNQYSKAVRLLVFLLVEAPMLILNPPLSLTNSVRYRLRTYIDFLSRRLKHLQSHRRSSAGQMQGSSLAMMNRQS

SEQ ID NO: 85120 - DNA, 1033 bp, Arabidopsis thaliana
  misc_feature (1)..(1033): Ceres Seq. ID no. 12678936
  misc_feature (1)..(1033): Ortholog of  Ceres SEQ ID NO 15172402 as cited in SEQ ID NO 59160
aattaaagttctccaattggagttgattctgcccttattagagagatctgatctttccccaattccataacccgaaaaatggaagaaatcgccgataaaaccttcttccgatactgtctcctcactcttattttcgccggcccaccaaccgccgtccttctgaaattcctccaagctccttacggtaaacacaaccgtaccggatggggtcccaccgtatctccaccgattgcttggttcgtcatggagagcccaaccttgtggctcactctcctcctcttcccctttggtcgtcacgctctcaaccctaaatctctacttctattctctccttatctcattcattacttccaccgcaccatcatttaccctcttcgcctcttccgcagctccttccccgccggtaaaaacggatttccgatcaccatcgccgccttggctttcacctttaatctcctcaatggttatatccaggcgaggtgggtttcgcattacaaggatgactacgaagacggaaactggttctggtggcggtttgttatcggtatggtggttttcataaccggcatgtatataaatatcacgtcggaccggactttggtacgattgaagaaagagaaccggggaggttatgtgataccgagaggaggctggttcgagttggtaagctgtccgaattattttggagaggcgattgagtggttgggctgggctgttatgacttggtcttgggccggtattggattttttctgtacacgtgttccaatttgtttccgcgtgcacgtgcgagtcacaagtggtacattgccaagttcaaggaagagtatcccaagactcgtaaagctgttattccttttgtgtactgagaattgagaaagttgaaaactagtttatcatatgttatgtgtcaatttgtttccaaactacctttgtcaaaatttccagtaaccggtttaattccaacacggtttagatcttatgttggtatcttcaacaatgcacaacaaactgtgtattctttagacaaatttt

SEQ ID NO: 85121 - protein, 262 aa, Arabidopsis thaliana; identical to SEQ ID NO: 39193
  peptide (1)..(262): Ceres Seq. ID no. 12678937

SEQ ID NO: 85122 - protein, 207 aa, Arabidopsis thaliana; identical to SEQ ID NO: 39194
  peptide (1)..(207): Ceres Seq. ID no. 12678938

SEQ ID NO: 85123 - DNA, 1241 bp, Arabidopsis thaliana
  misc_feature (1)..(1241): Ceres Seq. ID no. 12678949
  misc_feature (1)..(1241): Ortholog of  Ceres SEQ ID NO 12484482 as cited in SEQ ID NO 53324
  misc_feature (1)..(1241): Ortholog of  Ceres SEQ ID NO 13594048 as cited in SEQ ID NO 58604
acagaaaccaaaccaagagccggaaatcaaaaacagtaataaaagatcaactgcaagaaaatggctcttcctctcgagctcgaaagcctcactgaagccatctcagctgggatgggaatgggagttgatgagaatgcattgataagcacactggggaaatcgcaaaaggaacatagaaaattgtttaggaaagcaagcaaaagtttctttgttgaagatgaggaaagagcttttgagaaatgtcatgatcacttcgtcagacacctcaagcttgagttctcccgcttcaatactgcggtggtgatgtgggcaatgcatccatgggagagagatgcaaggttggtgaagaaagctttgaagaaaggagaagaagcttacaacctcatcgttgaggtctcatgcacacgctctgctgaggatctcctcggtgcacgtaaagcttaccactctctcttcgaccaatcaatggaagaagacattgcctctcacgtccacggtcctcagcgcaagttgcttgtggggctcgtgagtgcttatagatacgaaggaaataaggtgaaggatgattctgccaaatccgatgctaagattctagccgaagcagtggcttcttcaggcgaagaagccgtggagaaggatgaggttgttaggattttgaccacaagaagcaaacttcatctccaacatctctacaaacactttaacgaaatcaaaggctctgatcttcttgggggtgtatctaagtcttctcttctcaatgaagcattgatttgtttgctcaaaccggctctgtatttcagcaagattttggatgcgtctctgaacaaagacgcagacaagactaccaagaaatggttgacaagagtgttcgttacaagagcagatcatagtgatgagatgaatgagatcaaagaagagtacaataacctttatggtgagactttggctcaaagaatccaagagaagataaaagggaactacagagatttcttgctcacacttctctccaaatccgattgatttcgtgttgagaaacctattaccaatacttttggttattgaagatttatgatttccctttttatggttttatgtttctaattcctaaatttgcgttttctctaccgtttggtaataaagacatgaaaatttgatgaactcggtgaatcgagagtaagagttttgcgattgtgacaatgagtgattaatacaaggattaagctccaataaaaaaatgttgc

SEQ ID NO: 85124 - protein, 319 aa, Arabidopsis thaliana; identical to SEQ ID NO: 22126
  peptide (1)..(319): Ceres Seq. ID no. 12678950

SEQ ID NO: 85125 - protein, 302 aa, Arabidopsis thaliana; identical to SEQ ID NO: 22127
  peptide (1)..(302): Ceres Seq. ID no. 12678951

SEQ ID NO: 85126 - protein, 300 aa, Arabidopsis thaliana; identical to SEQ ID NO: 22128
  peptide (1)..(300): Ceres Seq. ID no. 12678952

SEQ ID NO: 85127 - DNA, 1193 bp, Arabidopsis thaliana
  misc_feature (1)..(1193): Ceres Seq. ID no. 12678960
  misc_feature (1)..(1193): Ortholog of  Ceres SEQ ID NO 15225786 as cited in SEQ ID NO 68277
aagccatgtggtaattctaattttgtgtatttattattttctgttaagacgaatcggacagagagaactccggcggcggattgcacttccggcaagatctcgtggggataaataagatggcggatgagaggtataatcggaagaatccggcggtgaagaggattttgcaggaggttaaggagatgcaagctaatccgtctgatgattttatgtctcttcctcttgaggagaatatctttgagtggcaattcgccatccgaggtcctggtgatactgaattcgagggcgggatttatcatgggagaattcagttgcctgcagattatccattcaaacctccttcattcatgttattgacccctaacgggcgctttgaaactaacaccaagatttgcttgagcatttcaaactaccaccctgagcattggcaaccttcatggagtgttcggactgctttggtggctctcattgcatttatgcccacaagtcccaatggagcactgggctcagtagattatccaaaggatgagagacgtacactagccattaaatcacgtgagacaccacctaagtatggctctcctgaacggcaaaaaattattgatgagattcatcagtacatccttagcaaagcaaccgtggttccaaaacctcttcctctggaatgtagccaagcaccttccatcgtatcagaagctcactcccaagttgagccacaggaagcgataactgtagtagaagagcggtccatcgctacaacagacaccatagttgatgatcaaatcatagaagagacagctgaagcagtcaatacagcagctagtgtggttcccgctgcagcacctttaccagcggttgaagttgtggtcaaagcttctgtaagtggtgagcaaaggatggccagaagagcggctcagaagccagtcgatgacagactcttcacgtgggcggcggttgggctcacaatcgctatcatggttcttcttctgaagaagttcataaaatcaaatggttacagtactgggtttatggatgatcagtcttgaactctgatgaaagtcaatgctgcgtttaagaaatggggttgtgttgtttaatattttataaatataattaaagtgcataatggcgtaaataatttctgtgtgacattgtcttgcaacttagttgatagattggattatagcttgtga

SEQ ID NO: 85128 - protein, 309 aa, Arabidopsis thaliana; identical to SEQ ID NO: 49516
  peptide (1)..(309): Ceres Seq. ID no. 12678961

SEQ ID NO: 85129 - protein, 287 aa, Arabidopsis thaliana; identical to SEQ ID NO: 49517
  peptide (1)..(287): Ceres Seq. ID no. 12678962

SEQ ID NO: 85130 - protein, 278 aa, Arabidopsis thaliana; identical to SEQ ID NO: 49518
  peptide (1)..(278): Ceres Seq. ID no. 12678963

SEQ ID NO: 85131 - DNA, 1289 bp, Arabidopsis thaliana
  misc_feature (1)..(1289): Ceres Seq. ID no. 12678968
  misc_feature (1)..(1289): Ortholog of  Ceres SEQ ID NO 13594037 as cited in SEQ ID NO 55666
  misc_feature (1)..(1289): Ortholog of  Ceres SEQ ID NO 13657707 as cited in SEQ ID NO 66407
aaaagaaaagtagaaaccccaagaaaaaataaaaaaaataatgggtcatcgacaatgcaaaagacgaaattcgacgccccacttttgactgaaaaaatcgcgacaaatagatcgataattgtagatatcgaaggcaaaggagactacacttcggttcagaaagccatcgatgctgtccctgttggtaactctaattggattattgtccatgtccgtaaaggaatctacaaggagagagtgcacattccggagaacaagccgttcatattcatgaggggtaatggaaaaggaaaaacggtgatcgaatcttcgcaaagttcggtcgacaatgttgcttcagctactttcaaagtcgaggctaatcactttgtcgcttttggtatcagcatccgaaatgatgcacctgtcggaatggcattcacatctgagaaccaatcggtggcagcgtttgtggctgctgacaaagtagcgttttaccattgtgcgttctacagcttacacaacactttgtttgataacaaaggtagacattactaccatgagtgttacatccaaggctccatagacttcatcttcggtcgcgcaacttccattttcaacaattgtgagatatttgtgatatcagacaagagggtgaaaccgtatgggtcaatcacagcacaccatagggaaagcgcagaggaaaaaacgggttacgtgttcataagaggcaaagtgtacggaattgatgaggtttacttgggccgagccaaaggaccttattctcgagtcatctttgccaagacttacttgtccaagaccgttgtgcctgatggttggacaaactggagttaccatggctcgacccagaatctataccatggggagtataaatgtcatggaccaggagctgagaggcaaaagagatctgactgggccaaagatcttaccaaacaagaagttgagtctttcttgtccattgattttattgatggcacttcttggctccctgtttggcttcaggaaaagttttagagttccttatgctgtcgcgtttggcttttgacatttcgcgttttggtgtggcttggaaaaaaaacatatgaagaaagaagagtacttcatcctttcttcgacggtatactatacgaaatagttttctctcttttttttttgtgtacttctactctaaaatgttcttagagtgattggaaactcttatgttgtttgcaaacattatataagattgtttccatcttaataatatatgtaacctaaatttaaatcctataaatttaaaatattttccc

SEQ ID NO: 85132 - protein, 337 aa, Arabidopsis thaliana
  peptide (1)..(337): Ceres Seq. ID no. 12678969
KRKVETPRKNKKNNGSSTMQKTKFDAPLLTEKIATNRSIIVDIEGKGDYTSVQKAIDAVPVGNSNWIIVHVRKGIYKERVHIPENKPFIFMRGNGKGKTVIESSQSSVDNVASATFKVEANHFVAFGISIRNDAPVGMAFTSENQSVAAFVAADKVAFYHCAFYSLHNTLFDNKGRHYYHECYIQGSIDFIFGRATSIFNNCEIFVISDKRVKPYGSITAHHRESAEEKTGYVFIRGKVYGIDEVYLGRAKGPYSRVIFAKTYLSKTVVPDGWTNWSYHGSTQNLYHGEYKCHGPGAERQKRSDWAKDLTKQEVESFLSIDFIDGTSWLPVWLQEKF

SEQ ID NO: 85133 - protein, 319 aa, Arabidopsis thaliana
  peptide (1)..(319): Ceres Seq. ID no. 12678970
MQKTKFDAPLLTEKIATNRSIIVDIEGKGDYTSVQKAIDAVPVGNSNWIIVHVRKGIYKERVHIPENKPFIFMRGNGKGKTVIESSQSSVDNVASATFKVEANHFVAFGISIRNDAPVGMAFTSENQSVAAFVAADKVAFYHCAFYSLHNTLFDNKGRHYYHECYIQGSIDFIFGRATSIFNNCEIFVISDKRVKPYGSITAHHRESAEEKTGYVFIRGKVYGIDEVYLGRAKGPYSRVIFAKTYLSKTVVPDGWTNWSYHGSTQNLYHGEYKCHGPGAERQKRSDWAKDLTKQEVESFLSIDFIDGTSWLPVWLQEKF

SEQ ID NO: 85134 - protein, 247 aa, Arabidopsis thaliana; identical to SEQ ID NO: 23532
  peptide (1)..(247): Ceres Seq. ID no. 12678971

SEQ ID NO: 85135 - DNA, 639 bp, Arabidopsis thaliana
  misc_feature (1)..(639): Ceres Seq. ID no. 12678973
  misc_feature (1)..(639): Ortholog of  Ceres SEQ ID NO 13654054 as cited in SEQ ID NO 67735
tttgcagggatgcatgaaaagacatggtttcagtggaatgccggcatcacatggtgcttcattgtcccatcgaagcgggggttccacagggcaaagagatgctcctggaaaggtgttcaagggcagaaagatggctgggagaatgggtgcagatcagaggacagtaaagaacgtttgggtctacaagatcgatcctgcgaggaacctcatgtgggtgagaggacaagttcctggtgcagaaggaaactttgtgttcataaaagatgcatggtgcaagaaaccagacatctcaaagcttccgtttccaacttacttagctccagaagatgaagatccatcagaattagaaccgttggttgcagatcttggagaagttgacccatttatgttggcagagtgatgaaaacagcatgatcttgatctttatttgggcttttacaatgattagagaccagaaagaagctgtggaagtgaaggaatcacagagctaaagctttttgcagatgaatttgtctttttcttattttagttgtttggatgtatgatttgaaaacgattaaatagaggaatttaggcttgctcgcatttgttatatcacaatgcttaagagtttgcaataagcaatgaggaaaacacaag

SEQ ID NO: 85136 - protein, 132 aa, Arabidopsis thaliana
  peptide (1)..(132): Ceres Seq. ID no. 12678974
LQGCMKRHGFSGMPASHGASLSHRSGGSTGQRDAPGKVFKGRKMAGRMGADQRTVKNVWVYKIDPARNLMWVRGQVPGAEGNFVFIKDAWCKKPDISKLPFPTYLAPEDEDPSELEPLVADLGEVDPFMLAE

SEQ ID NO: 85137 - protein, 128 aa, Arabidopsis thaliana
  peptide (1)..(128): Ceres Seq. ID no. 12678975
MKRHGFSGMPASHGASLSHRSGGSTGQRDAPGKVFKGRKMAGRMGADQRTVKNVWVYKIDPARNLMWVRGQVPGAEGNFVFIKDAWCKKPDISKLPFPTYLAPEDEDPSELEPLVADLGEVDPFMLAE

SEQ ID NO: 85138 - protein, 120 aa, Arabidopsis thaliana
  peptide (1)..(120): Ceres Seq. ID no. 12678976
MPASHGASLSHRSGGSTGQRDAPGKVFKGRKMAGRMGADQRTVKNVWVYKIDPARNLMWVRGQVPGAEGNFVFIKDAWCKKPDISKLPFPTYLAPEDEDPSELEPLVADLGEVDPFMLAE

SEQ ID NO: 85139 - DNA, 1911 bp, Arabidopsis thaliana
  misc_feature (1)..(1911): Ceres Seq. ID no. 12678996
  misc_feature (1)..(1911): Ortholog of  Ceres SEQ ID NO 15179554 as cited in SEQ ID NO 1174
  misc_feature (1)..(1911): Ortholog of  Ceres SEQ ID NO 15177814 as cited in SEQ ID NO 55489
acactcttttcgctctcagatctgaaaccttatctgaattacatttccccgattcgacgttgtgcgaattgatgcagcagagaggacgatccgtcaaccgcagatcacgaagcttctctagatccagactcgccgtcgaaggccactgaattactctctcccctctcttggcagatcttcttcttcgttttttcccgacaaacgacatttccgaaatggctgcatcgtacgaagaagagcgtgatattcagaagaattactggatagagcattccgctgatctgactgttgaagctatgatgcttgactcgagagcttctgatctcgacaaggaagaacgtcctgaggtactctctttgctccctccatatgaaggcaaatcagtgttggaacttggagctggtattggtcgtttcactggtgaattagctcaaaaggctggtgaactcattgctcttgacttcattgataacgttatcaagaagaatgaaagtatcaatgggcattacaagaatgtcaagtttatgtgtgctgatgttacatcccctgacctcaagatcactgatggatctcttgacttgattttctccaactggctgctcatgtatctttctgacaaagaggtggagcttttggcagaaaggatggtcggttggatcaaggttggaggatacattttcttccgtgaatcttgcttccaccaatcaggggacagtaagcggaaatccaaccccactcactaccgtgaaccccgtttctattccaaggtctttcaagagtgtcagactcgggatgctgctggaaattcatttgagctctctatgatcggatgcaagtgcattggagcttatgtcaagaacaagaagaatcagaatcagatttgttggatatggcagaaggtcagctcagaaaatgacagaggcttccaacgtttcttggacaatgtccaatacaaatccagtggaatcctacgctatgagcgtgtctttggccaagggtttgtgagcactggtggacttgagacaaccaaagaatttgtggagaaaatgaatctgaaaccaggacagaaagtcttagatgttgggtgtggcattggtggaggtgacttctacatggctgagaagtttgatgttcacgttgttggtatcgatctttctgtcaacatgatctctttcgcattggaacgtgctattggactcagctgctcggttgagtttgaggttgctgattgcaccacaaaacactacccagataattcgtttgatgtcatttacagccgtgacactattctgcacatccaagacaaaccagccttgtttaggactttcttcaaatggcttaaaccgggaggtaaagttctcatcagcgactactgtagaagccccaaaactccatctgctgagttttcagagtacatcaaacagagaggatatgatctccatgacgttcaagcttatggacagatgctaaaagacgctggcttcactgatgtgatcgcagaggaccgtactgatcagtttatgcaagtcctgaaacgtgaattagacagggtggagaaagaaaaggaaaaattcatctccgacttctccaaagaggattacgatgacattgttggaggatggaagtcaaagctggagaggtgtgcatcggatgagcagaaatggggacttttcatcgccaacaagaattaagcaaatcgaaatctactacttctatgttttcttctttctttgtttgttcaataaaaatgtcatttccgctaggtgatgatatatgcctgtagtgtgttatgtggacttgttgagtggtgttaaatcttgtttcccttatgtgatatgtaaaccgaattatgtttggtcttagtttatactctttgatttgaagaattttctaaatgcatttgtgttatgc

SEQ ID NO: 85140 - protein, 491 aa, Arabidopsis thaliana
  peptide (1)..(491): Ceres Seq. ID no. 12678997
MAASYEEERDIQKNYWIEHSADLTVEAMMLDSRASDLDKEERPEVLSLLPPYEGKSVLELGAGIGRFTGELAQKAGELIALDFIDNVIKKNESINGHYKNVKFMCADVTSPDLKITDGSLDLIFSNWLLMYLSDKEVELLAERMVGWIKVGGYIFFRESCFHQSGDSKRKSNPTHYREPRFYSKVFQECQTRDAAGNSFELSMIGCKCIGAYVKNKKNQNQICWIWQKVSSENDRGFQRFLDNVQYKSSGILRYERVFGQGFVSTGGLETTKEFVEKMNLKPGQKVLDVGCGIGGGDFYMAEKFDVHVVGIDLSVNMISFALERAIGLSCSVEFEVADCTTKHYPDNSFDVIYSRDTILHIQDKPALFRTFFKWLKPGGKVLISDYCRSPKTPSAEFSEYIKQRGYDLHDVQAYGQMLKDAGFTDVIAEDRTDQFMQVLKRELDRVEKEKEKFISDFSKEDYDDIVGGWKSKLERCASDEQKWGLFIANKN

SEQ ID NO: 85141 - protein, 464 aa, Arabidopsis thaliana
  peptide (1)..(464): Ceres Seq. ID no. 12678998
MMLDSRASDLDKEERPEVLSLLPPYEGKSVLELGAGIGRFTGELAQKAGELIALDFIDNVIKKNESINGHYKNVKFMCADVTSPDLKITDGSLDLIFSNWLLMYLSDKEVELLAERMVGWIKVGGYIFFRESCFHQSGDSKRKSNPTHYREPRFYSKVFQECQTRDAAGNSFELSMIGCKCIGAYVKNKKNQNQICWIWQKVSSENDRGFQRFLDNVQYKSSGILRYERVFGQGFVSTGGLETTKEFVEKMNLKPGQKVLDVGCGIGGGDFYMAEKFDVHVVGIDLSVNMISFALERAIGLSCSVEFEVADCTTKHYPDNSFDVIYSRDTILHIQDKPALFRTFFKWLKPGGKVLISDYCRSPKTPSAEFSEYIKQRGYDLHDVQAYGQMLKDAGFTDVIAEDRTDQFMQVLKRELDRVEKEKEKFISDFSKEDYDDIVGGWKSKLERCASDEQKWGLFIANKN

SEQ ID NO: 85142 - protein, 463 aa, Arabidopsis thaliana
  peptide (1)..(463): Ceres Seq. ID no. 12678999
MLDSRASDLDKEERPEVLSLLPPYEGKSVLELGAGIGRFTGELAQKAGELIALDFIDNVIKKNESINGHYKNVKFMCADVTSPDLKITDGSLDLIFSNWLLMYLSDKEVELLAERMVGWIKVGGYIFFRESCFHQSGDSKRKSNPTHYREPRFYSKVFQECQTRDAAGNSFELSMIGCKCIGAYVKNKKNQNQICWIWQKVSSENDRGFQRFLDNVQYKSSGILRYERVFGQGFVSTGGLETTKEFVEKMNLKPGQKVLDVGCGIGGGDFYMAEKFDVHVVGIDLSVNMISFALERAIGLSCSVEFEVADCTTKHYPDNSFDVIYSRDTILHIQDKPALFRTFFKWLKPGGKVLISDYCRSPKTPSAEFSEYIKQRGYDLHDVQAYGQMLKDAGFTDVIAEDRTDQFMQVLKRELDRVEKEKEKFISDFSKEDYDDIVGGWKSKLERCASDEQKWGLFIANKN

SEQ ID NO: 85143 - DNA, 1544 bp, Arabidopsis thaliana
  misc_feature (1)..(1544): Ceres Seq. ID no. 12679004
  misc_feature (1)..(1544): Ortholog of  Ceres SEQ ID NO 15171275 as cited in SEQ ID NO 51428
  misc_feature (1)..(1544): Ortholog of  Ceres SEQ ID NO 14307678 as cited in SEQ ID NO 59456
  misc_feature (1)..(1544): Ortholog of  Ceres SEQ ID NO 13586716 as cited in SEQ ID NO 0
aggaaaactaaaccaaagtctgtttaccagtaatatcaatcgatcgccattctcgacatttctctctctcaagctagtctaaagtttcttcttatctccttcctccgaccaaaacttcgacttctctcttattttcaccctcagagagtaaccatggatgccttgacctcgagtttggttcgatctcccatcgtaccatcgagaacttccgacaacggttctggatctatgttccttaccgccagtggccctggattcacgcgttctggttcttcaagacttcaacttcgtttaaggcaaaacgcgtctgctagatcctcaagatcattacagagcttaacaacgactgctaaaactcggagaagttttgtggttagagcttcttcagcgtctaatgatgcttcatctggttcttcccccaaaccgatcgctccgctccagctgcaatcgcctgctggtcagtttctgtctcagattttggtgagccatcctcatcttgtgcctgcagctgttgaacagcagcttgagcagcttcaaactgatcgggactctcagggacagaacaaagattcagcgtctgtacctggaaccgacatcgttctctacaggagaattgcggagttgaaggaaaacgagagaagaagaacattggaagagattttgtatgcattggtggttcaaaagttcatggaagctaacgtatcacttgtaccttcagtaagcccatcttcagatccgtctggtcgggttgatacttggccgaccaaagtggagaaactcgagcggcttcactcgcccgagatgtacgagatgattcacaaccatcttgccttgattcttggaagcagaatgggtgatctgaactctgttgcacagataagcaagctcagagttggccaagtttacgctgcttctgtgatgtatggatatttcttgaagagggtggaccaaaggtttcagcttgagaagacgatgaagattcttccgggtgggtcggatgaaagtaaaacaagcgttgagcaagccgaggggacggcaacatatcaggcggctgtatcgtctcacccagaggttggtgcatttgcgggcggagttagtgctaagggcttcggcagcgagattaaaccatcccgattaaggtcatatgtgatgtcatttgatgcggagacgctgcagagatacgccactataagatcaagagaagcagttggaatcatcgagaagcacacagaggcattgtttggtaagcctgagattgtaataacaccggagggcacagtcgattcatcgaaggacgaacagataaagatcagcttcggtggaatgaagaggctcgtcttggaggcagttactttcgggtcgttcctttgggatgttgagagccatgtagatgcgaggtaccactttgtattgaactaaaaacatggtctgtaatgcagttgactaacttatgtagcattaagaagatacccattaagggtatcattacacttgtatcaaaaatttgaggaaaagatcgtacattatatatgttattgtgatgg

SEQ ID NO: 85144 - protein, 421 aa, Arabidopsis thaliana; identical to SEQ ID NO: 39462
  peptide (1)..(421): Ceres Seq. ID no. 12679005

SEQ ID NO: 85145 - protein, 396 aa, Arabidopsis thaliana; identical to SEQ ID NO: 39463
  peptide (1)..(396): Ceres Seq. ID no. 12679006

SEQ ID NO: 85146 - protein, 243 aa, Arabidopsis thaliana; identical to SEQ ID NO: 39464
  peptide (1)..(243): Ceres Seq. ID no. 12679007

SEQ ID NO: 85147 - DNA, 1332 bp, Arabidopsis thaliana
  misc_feature (1)..(1332): Ceres Seq. ID no. 12679044
  misc_feature (1)..(1332): Ortholog of  Ceres SEQ ID NO 15174842 as cited in SEQ ID NO 53054
  misc_feature (1)..(1332): Ortholog of  Ceres SEQ ID NO 14310917 as cited in SEQ ID NO 53231
  misc_feature (1)..(1332): Ortholog of  Ceres SEQ ID NO 15170037 as cited in SEQ ID NO 55447
  misc_feature (1)..(1332): Ortholog of  Ceres SEQ ID NO 13582350 as cited in SEQ ID NO 56734
  misc_feature (1)..(1332): Ortholog of  Ceres SEQ ID NO 12476493 as cited in SEQ ID NO 58163
  misc_feature (1)..(1332): Ortholog of  Ceres SEQ ID NO 12615466 as cited in SEQ ID NO 62761
  misc_feature (1)..(1332): Ortholog of  Ceres SEQ ID NO 13597295 as cited in SEQ ID NO 63743
  misc_feature (1)..(1332): Ortholog of  Ceres SEQ ID NO 12617090 as cited in SEQ ID NO 64005
  misc_feature (1)..(1332): Ortholog of  Ceres SEQ ID NO 13597439 as cited in SEQ ID NO 64081
  misc_feature (1)..(1332): Ortholog of  Ceres SEQ ID NO 13598327 as cited in SEQ ID NO 68040
  misc_feature (1)..(1332): Ortholog of  Ceres SEQ ID NO 13599438 as cited in SEQ ID NO 0
aaagtccaaacacagcataaaagtagctctattgactttttttcttcctccaaactctttttacgtcaagcaatggaggatcttgatccaacctacatccaagcaccagagcatagatcagattcgaatttcatccctaaccaaccagaagaaatacccgtgattgatctctcgcgcctcgatgaccccgaagatgtccaaaacgttatctcagagatcggtgatgcttgtgaaaaatggggattttttcaggtgcttaatcatggtgtgccttctgacgcaaggcaacgtgtggagaagactgtgaagatgtttttcgatttgcctatggaagagaagataaaggtgaagagagacgatgtgaatcctgtagggtatcatgatggagaacacaccaagaacgttaaagattggaaagaagtgtttgatatttatttcaaagatccaatggtcattccttcaaccactgatcctgaagatgaaggcttaagacttgtttacaacaagtggcctcaatctccttctgatttcagggaagcatgtgaagtatatgcgagacacgctgaaaaattagcgttcaagctcttggaactgatttcgttaagcttaggcttgccaaaagagcgttttcatgactacttcaaagaacaaatgagttttttcaggataaatcgttatccaccatgtccaagacctgacctagctttaggtgttggtcaccacaaagatgccgacgttattagtctattggctcaagatgatgttggaggattacaagttagtcgtagatcggacggtgtttggtttccgattagacccgtccctaatgctcttgtcatcaatataggcaattgtatggaggtaataatatccttgaacttatgtcatattcttttgttatacataacattaaaagattctttcataattaatgagtattactatatcataaatatgataatgtagatatggacgaatgacaagtattggagtgctgaacatagagtggtggtgaacacaacaagagagagatactcgataccattcttcttgttgccttcacacgatgtggaagtgaagccattagaagaacttgtgagtcctgaaaaccctccaaaatacaaaggctataaatggggtaagttctacgtcagtaggaatagaagcgattttcgaaaactggaaatcgaaaacatccaaatcgatgacttcaaagttaaaacttaatatactatgtatcggctttttttttgtttaccaagctatgatattaatcaaataatgtgtgtgggacttaatttgtgtcggaaagaataaatttgattacttttg

SEQ ID NO: 85148 - protein, 321 aa, Arabidopsis thaliana
  peptide (1)..(321): Ceres Seq. ID no. 12679045
KVQTQHKSSSIDFFSSSKLFLRQAMEDLDPTYIQAPEHRSDSNFIPNQPEEIPVIDLSRLDDPEDVQNVISEIGDACEKWGFFQVLNHGVPSDARQRVEKTVKMFFDLPMEEKIKVKRDDVNPVGYHDGEHTKNVKDWKEVFDIYFKDPMVIPSTTDPEDEGLRLVYNKWPQSPSDFREACEVYARHAEKLAFKLLELISLSLGLPKERFHDYFKEQMSFFRINRYPPCPRPDLALGVGHHKDADVISLLAQDDVGGLQVSRRSDGVWFPIRPVPNALVINIGNCMEVIISLNLCHILLLYITLKDSFIINEYYYIINMIM

SEQ ID NO: 85149 - protein, 297 aa, Arabidopsis thaliana
  peptide (1)..(297): Ceres Seq. ID no. 12679046
MEDLDPTYIQAPEHRSDSNFIPNQPEEIPVIDLSRLDDPEDVQNVISEIGDACEKWGFFQVLNHGVPSDARQRVEKTVKMFFDLPMEEKIKVKRDDVNPVGYHDGEHTKNVKDWKEVFDIYFKDPMVIPSTTDPEDEGLRLVYNKWPQSPSDFREACEVYARHAEKLAFKLLELISLSLGLPKERFHDYFKEQMSFFRINRYPPCPRPDLALGVGHHKDADVISLLAQDDVGGLQVSRRSDGVWFPIRPVPNALVINIGNCMEVIISLNLCHILLLYITLKDSFIINEYYYIINMIM

SEQ ID NO: 85150 - protein, 218 aa, Arabidopsis thaliana
  peptide (1)..(218): Ceres Seq. ID no. 12679047
MFFDLPMEEKIKVKRDDVNPVGYHDGEHTKNVKDWKEVFDIYFKDPMVIPSTTDPEDEGLRLVYNKWPQSPSDFREACEVYARHAEKLAFKLLELISLSLGLPKERFHDYFKEQMSFFRINRYPPCPRPDLALGVGHHKDADVISLLAQDDVGGLQVSRRSDGVWFPIRPVPNALVINIGNCMEVIISLNLCHILLLYITLKDSFIINEYYYIINMIM

SEQ ID NO: 85151 - DNA, 1713 bp, Arabidopsis thaliana
  misc_feature (1)..(1713): Ceres Seq. ID no. 12679064
  misc_feature (1)..(1713): Ortholog of  Ceres SEQ ID NO 15177320 as cited in SEQ ID NO 52645
  misc_feature (1)..(1713): Ortholog of  Ceres SEQ ID NO 15171359 as cited in SEQ ID NO 57279
  misc_feature (1)..(1713): Ortholog of  Ceres SEQ ID NO 14313840 as cited in SEQ ID NO 59568
  misc_feature (1)..(1713): Ortholog of  Ceres SEQ ID NO 15168502 as cited in SEQ ID NO 60095
  misc_feature (1)..(1713): Ortholog of  Ceres SEQ ID NO 13662245 as cited in SEQ ID NO 62708
  misc_feature (1)..(1713): Ortholog of  Ceres SEQ ID NO 14314084 as cited in SEQ ID NO 63256
  misc_feature (1)..(1713): Ortholog of  Ceres SEQ ID NO 14303091 as cited in SEQ ID NO 66369
gagagaagcaagacaccaaaaacttagtctgacatcaaaacccaaaatccaagaagaaagaaagagagagtcttcacgctcacactggctttggctttggctctggcgttgtaaacaatgctcctccctctcttcttcttctttctccatctccatctccatctctcttcttcttcttcaatctccttccctgattttcaaatcatcgacgttttacaacctcctctcaccgtcactgcaactcttcccgatttcaacaacacccatttctccgatgaatccagttctaagtacactctccgtcttctccaccgcgacagattcccttcagtcacttaccgtaaccaccaccaccgtctccatgctcgtatgcgcagagacacagacagagtctccgccattctccgccgcatttctgggaaagttataccttcttccgattctagatacgaggttaacgattttgggtccgatattgtttccggtatggatcaaggaagtggtgagtatttcgtcagaatcggcgtcggaagtcctccgagagatcagtacatggtcattgattccggtagcgatatggtttgggttcaatgtcagccttgtaagctctgttacaaacaatccgacccggtttttgacccggctaaatccgggtcttacactggagtctcttgtggctcttccgtctgtgaccggattgaaaactccggttgtcactccggtgggtgccgttacgaggtcatgtacggagacgggtcttacacgaagggaacgttagctctcgaaacgctgacgtttgctaagacggtggttagaaacgttgcgatgggatgtggtcaccggaatagaggaatgtttattggagctgccggtttattgggtatcggaggcggttcaatgtcgtttgtgggtcaattaagcggtcaaaccggtggtgcgttcggttattgtttagtgagtcgtggcactgactcgaccggttcattggtattcgggcgggaagcgttgcccgttggtgcctcgtgggtcccgttggtccggaacccgcgggctccaagtttttactacgttgggctcaagggccttggagtaggaggcgtccggattccgttaccggatggtgtttttgacctgactgaaaccggtgacggtggtgtggttatggataccggaacagccgtcacaagacttcccacggcggcttacgtcgcttttcgagatggattcaagtcgcagacagcgaatttgccgcgggcttccggtgtatcgatattcgacacgtgttatgatctgtcagggtttgtttcggtacgagtcccgaccgtgtcgttctatttcacggaaggtccggttttgacattaccggcgaggaattttctgatgccggtggatgattcgggaacgtattgttttgcgtttgcggcgtctccgacgggtttgtcaataatagggaacatacaacaagaagggattcaagtatctttcgacggagccaatggctttgttggttttggccccaacgtttgctagcggttaagatagagaaattacgatttttgtttgctagtaagtaaaaagcttttgtctcaaaactatatatgtatttgtctctttttttctttcttattagtttggtttgagtttttaataaatctgattagtatagagagataacaaaaatgtatatgttttgaccaaatttgtcttttgatt

SEQ ID NO: 85152 - protein, 470 aa, Arabidopsis thaliana
  peptide (1)..(470): Ceres Seq. ID no. 12679065
MLLPLFFFFLHLHLHLSSSSSISFPDFQIIDVLQPPLTVTATLPDFNNTHFSDESSSKYTLRLLHRDRFPSVTYRNHHHRLHARMRRDTDRVSAILRRISGKVIPSSDSRYEVNDFGSDIVSGMDQGSGEYFVRIGVGSPPRDQYMVIDSGSDMVWVQCQPCKLCYKQSDPVFDPAKSGSYTGVSCGSSVCDRIENSGCHSGGCRYEVMYGDGSYTKGTLALETLTFAKTVVRNVAMGCGHRNRGMFIGAAGLLGIGGGSMSFVGQLSGQTGGAFGYCLVSRGTDSTGSLVFGREALPVGASWVPLVRNPRAPSFYYVGLKGLGVGGVRIPLPDGVFDLTETGDGGVVMDTGTAVTRLPTAAYVAFRDGFKSQTANLPRASGVSIFDTCYDLSGFVSVRVPTVSFYFTEGPVLTLPARNFLMPVDDSGTYCFAFAASPTGLSIIGNIQQEGIQVSFDGANGFVGFGPNVC

SEQ ID NO: 85153 - protein, 386 aa, Arabidopsis thaliana
  peptide (1)..(386): Ceres Seq. ID no. 12679066
MRRDTDRVSAILRRISGKVIPSSDSRYEVNDFGSDIVSGMDQGSGEYFVRIGVGSPPRDQYMVIDSGSDMVWVQCQPCKLCYKQSDPVFDPAKSGSYTGVSCGSSVCDRIENSGCHSGGCRYEVMYGDGSYTKGTLALETLTFAKTVVRNVAMGCGHRNRGMFIGAAGLLGIGGGSMSFVGQLSGQTGGAFGYCLVSRGTDSTGSLVFGREALPVGASWVPLVRNPRAPSFYYVGLKGLGVGGVRIPLPDGVFDLTETGDGGVVMDTGTAVTRLPTAAYVAFRDGFKSQTANLPRASGVSIFDTCYDLSGFVSVRVPTVSFYFTEGPVLTLPARNFLMPVDDSGTYCFAFAASPTGLSIIGNIQQEGIQVSFDGANGFVGFGPNVC

SEQ ID NO: 85154 - protein, 347 aa, Arabidopsis thaliana
  peptide (1)..(347): Ceres Seq. ID no. 12679067
MDQGSGEYFVRIGVGSPPRDQYMVIDSGSDMVWVQCQPCKLCYKQSDPVFDPAKSGSYTGVSCGSSVCDRIENSGCHSGGCRYEVMYGDGSYTKGTLALETLTFAKTVVRNVAMGCGHRNRGMFIGAAGLLGIGGGSMSFVGQLSGQTGGAFGYCLVSRGTDSTGSLVFGREALPVGASWVPLVRNPRAPSFYYVGLKGLGVGGVRIPLPDGVFDLTETGDGGVVMDTGTAVTRLPTAAYVAFRDGFKSQTANLPRASGVSIFDTCYDLSGFVSVRVPTVSFYFTEGPVLTLPARNFLMPVDDSGTYCFAFAASPTGLSIIGNIQQEGIQVSFDGANGFVGFGPNVC

SEQ ID NO: 85155 - DNA, 3738 bp, Arabidopsis thaliana
  misc_feature (1)..(3738): Ceres Seq. ID no. 12679127
  misc_feature (1)..(3738): Ortholog of  Ceres SEQ ID NO 13596509 as cited in SEQ ID NO 62004
  misc_feature (1)..(3738): Ortholog of  Ceres SEQ ID NO 13657677 as cited in SEQ ID NO 66119
  misc_feature (1)..(3738): Ortholog of  Ceres SEQ ID NO 14307904 as cited in SEQ ID NO 66440
  misc_feature (1)..(3738): Ortholog of  Ceres SEQ ID NO 13500385 as cited in SEQ ID NO 67583
atgaaggctttgagattgattcagcctcatctcttgaagacaggtagtcttagaactgatttgctctgtaccatttcgagtttcttttctagctgcgaacgagacttttcaagtattagcaatgggaatgtctgtttcagagagagattgagaagtggtattgttgatattaagaaagatgatgctattgctctgttccaagaaatgattaggtctcgtcctcttcctagtcttgttgatttcagtagattctttagtgccattgccagaacaaaacagttcaatctcgtgttagatttctgcaagcaactggaattgaatgggattgctcataacatctacactttgaatatcatgatcaactgcttttgccggtgttgtaaaacttgttttgcttattctgttttgggaaaagtaatgaagcttgggtatgagcctgacacaaccacgtttaacactctgatcaaaggactctttcttgagggtaaagtgtctgaagctgtggttttagtcgataggatggtggaaaacggatgtcaacctgatgtggttacttataattcgattgtaaatgggatatgtagatcaggagatacttctttggccttggatttgctcagaaagatggaagaaagaaatgttaaggctgatgtgtttacttacagtacaatcattgatagtctttgtagagatggttgcatagacgctgcaattagccttttcaaggaaatggagacgaaagggattaaatctagtgttgttacgtataattctcttgtgagaggtctttgtaaagccggtaaatggaatgatggggcactgttgttgaaggatatggtgagtagggaaatcgtccctaatgtcatcactttcaatgtattacttgatgtttttgtcaaagaagggaagcttcaggaggctaatgaattgtacaaagagatgatcacaagaggtatatcacctaatattattacttataataccttgatggatgggtattgtatgcagaaccgtcttagtgaggccaacaatatgttggatcttatggttaggaataagtgcagtcctgatatcgtgacttttacaagtctcatcaaaggatattgtatggtgaaaagagttgacgatggtatgaaggtcttccgcaatatttctaagagaggcttggttgccaatgcagttacttatagcattcttgtccaagggttttgtcaatccgggaaaataaagctcgcagaggaacttttccaagaaatggtttcacacggtgttcttcctgatgttatgacgtatggtattttgcttgatggcttgtgtgacaatgggaagcttgaaaaggcattggaaatttttgaggatttacaaaagagtaagatggatcttggtattgttatgtatacaaccatcatcgaggggatgtgcaagggtggaaaagtggaagatgcctggaatttattctgtagcctaccttgtaaaggagtgaagcctaatgttatgacatacaccgtgatgatttcaggattatgtaagaaagggtcactgtctgaagcaaacatcttgcttagaaaaatggaggaagatgggaatgcgccaaatgattgtacatacaacacactaatccgggcacatctccgagatggtgacttaactgcatcagctaaacttattgaagaaatgaagagttgtgggttctcagcagatgcttccagtattaagatggttatcgatatgttattgagtgcaatgaaaaggttaacactcagatattgtcttagcaaaggttcaaagagccgacaagatctcctggagttaagcggttcagagaaaatcaggcttagtagcttaacctttgttaaaatgtttccctgcaacactattactacatctctaaacgtcaacacaatcgaagctcgtggtatgaattccgcagaactgaatagagatctcaggaagctaaggagatcatcggttctaaagaagttcaagaacagggatgttagggtacttgtgactaacgagctcttgacttggggtttggaagatgcggaatgtgatctcatggtcgatcttgagcttccaacagatgctgttcactatgctcatcgagctggaagaatgagaaggccgggaaggaaaatgacggtggttacagccgaagaactacacaaggagatgattcaacgaggtatagctcctaatactattacatatagttccttgatagatgggttttgcaaggagaatcgcctagatgaggccaaccagatgttggatctgatggttaccaaaggtgattctgatattcgttatctgttggctggtttgatgaggaagaagcggaaaggtagtgaaactgagggttgggagaatttaccagatgatttatcatgttcaactgcatcacgatcatccaacttcaggtcgcacttttcactagagggttatgctagacttaagaaacggtgtaaggagactgaagctgtcgagtctgttggttcctttaagagacgaattgctggtgttgctactgcacctccttgtggtgcatcatctttggtttcgtcaggaagaggtttgaagaggaagatagggtgcatagatgtttccacacagactggtaggaagaataaaatagacgatgactatgtttttggtcgaaatattgggaaagggaaatttgggtcagtcaggatctgtaagtctaggaagaatgggactgagtttgcttgtaaaactctgaagaagggggaggagactgttcaccgggaagttgagataatgcaacatttgtctggtcatcctcgggttgtcacattgcatgctgtgtatgaagagtcagactgtttccatcttgtgatggagctgtgttcagggggacgtttgattgatcagatggtaaaggtgggcaggtattctgagcaacgagcagctaatatattcaaggaccttatgctagtgatcaattattgccatgagatgggagttgtgcatagagatataaaacctgagaatattctcctaacagctgctgggaagatacagctggctgattttggcctcgccatgagaattgcaaaaggtcaaacactgtcaggattggcaggaagtcctgcttatgttgcacctgaagttctttccgaaaattattcagagaaggttgacgtttggagtgcaggtgtcctcttatacgctctcttgtctggtgtactcccttttaagggagactcattggatgctattttcgaagcaatcaaaaacgtgaagcttgatttcaacacgggagtgtgggagtctgtgtccaaacctgcccgtgatctcttggcgagaatgctaacaagggaagaatctgccagaatcacagcggatgaagtgctaaggcatccatggatactcttttacacagaccggacactcaagaccatgtgtatcaagtcgaagcacaagagtcaagcaggatcttctacgtgtctccagaatcgcagtcccacagagaaaactgacctaaacagagctgacagggaaaagaagataccatctgattcaccgactgattcattctccaacacagaggaggaagaagatgagagcggtgtggtcgatgtgcttgttgttgcaatcgccaacgtgaggatctcagaaccaaagagaagcagagtctgtagtcccaccaataaccccattgagcagcaacactcttctaacttgacctcgactagtacactctgtcgagctttctga

SEQ ID NO: 85156 - protein, 1245 aa, Arabidopsis thaliana
  peptide (1)..(1245): Ceres Seq. ID no. 12679128
MKALRLIQPHLLKTGSLRTDLLCTISSFFSSCERDFSSISNGNVCFRERLRSGIVDIKKDDAIALFQEMIRSRPLPSLVDFSRFFSAIARTKQFNLVLDFCKQLELNGIAHNIYTLNIMINCFCRCCKTCFAYSVLGKVMKLGYEPDTTTFNTLIKGLFLEGKVSEAVVLVDRMVENGCQPDVVTYNSIVNGICRSGDTSLALDLLRKMEERNVKADVFTYSTIIDSLCRDGCIDAAISLFKEMETKGIKSSVVTYNSLVRGLCKAGKWNDGALLLKDMVSREIVPNVITFNVLLDVFVKEGKLQEANELYKEMITRGISPNIITYNTLMDGYCMQNRLSEANNMLDLMVRNKCSPDIVTFTSLIKGYCMVKRVDDGMKVFRNISKRGLVANAVTYSILVQGFCQSGKIKLAEELFQEMVSHGVLPDVMTYGILLDGLCDNGKLEKALEIFEDLQKSKMDLGIVMYTTIIEGMCKGGKVEDAWNLFCSLPCKGVKPNVMTYTVMISGLCKKGSLSEANILLRKMEEDGNAPNDCTYNTLIRAHLRDGDLTASAKLIEEMKSCGFSADASSIKMVIDMLLSAMKRLTLRYCLSKGSKSRQDLLELSGSEKIRLSSLTFVKMFPCNTITTSLNVNTIEARGMNSAELNRDLRKLRRSSVLKKFKNRDVRVLVTNELLTWGLEDAECDLMVDLELPTDAVHYAHRAGRMRRPGRKMTVVTAEELHKEMIQRGIAPNTITYSSLIDGFCKENRLDEANQMLDLMVTKGDSDIRYLLAGLMRKKRKGSETEGWENLPDDLSCSTASRSSNFRSHFSLEGYARLKKRCKETEAVESVGSFKRRIAGVATAPPCGASSLVSSGRGLKRKIGCIDVSTQTGRKNKIDDDYVFGRNIGKGKFGSVRICKSRKNGTEFACKTLKKGEETVHREVEIMQHLSGHPRVVTLHAVYEESDCFHLVMELCSGGRLIDQMVKVGRYSEQRAANIFKDLMLVINYCHEMGVVHRDIKPENILLTAAGKIQLADFGLAMRIAKGQTLSGLAGSPAYVAPEVLSENYSEKVDVWSAGVLLYALLSGVLPFKGDSLDAIFEAIKNVKLDFNTGVWESVSKPARDLLARMLTREESARITADEVLRHPWILFYTDRTLKTMCIKSKHKSQAGSSTCLQNRSPTEKTDLNRADREKKIPSDSPTDSFSNTEEEEDESGVVDVLVVAIANVRISEPKRSRVCSPTNNPIEQQHSSNLTSTSTLCRAF

SEQ ID NO: 85157 - protein, 1177 aa, Arabidopsis thaliana
  peptide (1)..(1177): Ceres Seq. ID no. 12679129
MIRSRPLPSLVDFSRFFSAIARTKQFNLVLDFCKQLELNGIAHNIYTLNIMINCFCRCCKTCFAYSVLGKVMKLGYEPDTTTFNTLIKGLFLEGKVSEAVVLVDRMVENGCQPDVVTYNSIVNGICRSGDTSLALDLLRKMEERNVKADVFTYSTIIDSLCRDGCIDAAISLFKEMETKGIKSSVVTYNSLVRGLCKAGKWNDGALLLKDMVSREIVPNVITFNVLLDVFVKEGKLQEANELYKEMITRGISPNIITYNTLMDGYCMQNRLSEANNMLDLMVRNKCSPDIVTFTSLIKGYCMVKRVDDGMKVFRNISKRGLVANAVTYSILVQGFCQSGKIKLAEELFQEMVSHGVLPDVMTYGILLDGLCDNGKLEKALEIFEDLQKSKMDLGIVMYTTIIEGMCKGGKVEDAWNLFCSLPCKGVKPNVMTYTVMISGLCKKGSLSEANILLRKMEEDGNAPNDCTYNTLIRAHLRDGDLTASAKLIEEMKSCGFSADASSIKMVIDMLLSAMKRLTLRYCLSKGSKSRQDLLELSGSEKIRLSSLTFVKMFPCNTITTSLNVNTIEARGMNSAELNRDLRKLRRSSVLKKFKNRDVRVLVTNELLTWGLEDAECDLMVDLELPTDAVHYAHRAGRMRRPGRKMTVVTAEELHKEMIQRGIAPNTITYSSLIDGFCKENRLDEANQMLDLMVTKGDSDIRYLLAGLMRKKRKGSETEGWENLPDDLSCSTASRSSNFRSHFSLEGYARLKKRCKETEAVESVGSFKRRIAGVATAPPCGASSLVSSGRGLKRKIGCIDVSTQTGRKNKIDDDYVFGRNIGKGKFGSVRICKSRKNGTEFACKTLKKGEETVHREVEIMQHLSGHPRVVTLHAVYEESDCFHLVMELCSGGRLIDQMVKVGRYSEQRAANIFKDLMLVINYCHEMGVVHRDIKPENILLTAAGKIQLADFGLAMRIAKGQTLSGLAGSPAYVAPEVLSENYSEKVDVWSAGVLLYALLSGVLPFKGDSLDAIFEAIKNVKLDFNTGVWESVSKPARDLLARMLTREESARITADEVLRHPWILFYTDRTLKTMCIKSKHKSQAGSSTCLQNRSPTEKTDLNRADREKKIPSDSPTDSFSNTEEEEDESGVVDVLVVAIANVRISEPKRSRVCSPTNNPIEQQHSSNLTSTSTLCRAF

SEQ ID NO: 85158 - protein, 1127 aa, Arabidopsis thaliana
  peptide (1)..(1127): Ceres Seq. ID no. 12679130
MINCFCRCCKTCFAYSVLGKVMKLGYEPDTTTFNTLIKGLFLEGKVSEAVVLVDRMVENGCQPDVVTYNSIVNGICRSGDTSLALDLLRKMEERNVKADVFTYSTIIDSLCRDGCIDAAISLFKEMETKGIKSSVVTYNSLVRGLCKAGKWNDGALLLKDMVSREIVPNVITFNVLLDVFVKEGKLQEANELYKEMITRGISPNIITYNTLMDGYCMQNRLSEANNMLDLMVRNKCSPDIVTFTSLIKGYCMVKRVDDGMKVFRNISKRGLVANAVTYSILVQGFCQSGKIKLAEELFQEMVSHGVLPDVMTYGILLDGLCDNGKLEKALEIFEDLQKSKMDLGIVMYTTIIEGMCKGGKVEDAWNLFCSLPCKGVKPNVMTYTVMISGLCKKGSLSEANILLRKMEEDGNAPNDCTYNTLIRAHLRDGDLTASAKLIEEMKSCGFSADASSIKMVIDMLLSAMKRLTLRYCLSKGSKSRQDLLELSGSEKIRLSSLTFVKMFPCNTITTSLNVNTIEARGMNSAELNRDLRKLRRSSVLKKFKNRDVRVLVTNELLTWGLEDAECDLMVDLELPTDAVHYAHRAGRMRRPGRKMTVVTAEELHKEMIQRGIAPNTITYSSLIDGFCKENRLDEANQMLDLMVTKGDSDIRYLLAGLMRKKRKGSETEGWENLPDDLSCSTASRSSNFRSHFSLEGYARLKKRCKETEAVESVGSFKRRIAGVATAPPCGASSLVSSGRGLKRKIGCIDVSTQTGRKNKIDDDYVFGRNIGKGKFGSVRICKSRKNGTEFACKTLKKGEETVHREVEIMQHLSGHPRVVTLHAVYEESDCFHLVMELCSGGRLIDQMVKVGRYSEQRAANIFKDLMLVINYCHEMGVVHRDIKPENILLTAAGKIQLADFGLAMRIAKGQTLSGLAGSPAYVAPEVLSENYSEKVDVWSAGVLLYALLSGVLPFKGDSLDAIFEAIKNVKLDFNTGVWESVSKPARDLLARMLTREESARITADEVLRHPWILFYTDRTLKTMCIKSKHKSQAGSSTCLQNRSPTEKTDLNRADREKKIPSDSPTDSFSNTEEEEDESGVVDVLVVAIANVRISEPKRSRVCSPTNNPIEQQHSSNLTSTSTLCRAF

SEQ ID NO: 85159 - DNA, 1419 bp, Arabidopsis thaliana
  misc_feature (1)..(1419): Ceres Seq. ID no. 12679137
  misc_feature (1)..(1419): Ortholog of  Ceres SEQ ID NO 15176532 as cited in SEQ ID NO 58184
  misc_feature (1)..(1419): Ortholog of  Ceres SEQ ID NO 13597546 as cited in SEQ ID NO 65017
  misc_feature (1)..(1419): Ortholog of  Ceres SEQ ID NO 14308015 as cited in SEQ ID NO 65798
  misc_feature (1)..(1419): Ortholog of  Ceres SEQ ID NO 14307912 as cited in SEQ ID NO 66380
  misc_feature (1)..(1419): Ortholog of  Ceres SEQ ID NO 14308045 as cited in SEQ ID NO 67444
  misc_feature (1)..(1419): Ortholog of  Ceres SEQ ID NO 13654353 as cited in SEQ ID NO 68318
atgtgggcattgctcatttgggtttctttgcttctcataagtatcacacattgggtttatagttggagaaatcctaaatgcagagggaaacttccacctggttccatgggtttccctttactcggcgagagtatccaattcttcaagccaaacaaaacttcagacatccctccttttatcaaagagagagttaagaagtatggcccaattttcaagaccaatctggtggggagaccagttattgtatcaacagatgctgatttgagttattttgtgtttaaccaagagggacgttgtttccagagttggtatccagacacttttacacacatctttgggaagaagaatgtgggttcattacatggtttcatgtacaagtaccttaaaaacatggttttgactctctttggccatgatggtctcaagaagatgcttcctcaagtagaaatgactgccaataagaggttggagctttggtcaaatcaagattcagtagaactcaaagatgcaaccgcaagcatgatatttgatctcaccgcgaagaagttgatcagccatgatccagacaagtcatcagagaatctaagggcaaactttgttgctttcatacagggattgatctctttcccttttgatatcccaggcacagcttatcacaaatgtctacagggtagggcaaaggcaatgaaaatgttgaggaatatgcttcaagagaggcgtgagaaccctcggaagaatccaagtgatttctttgattatgttattgaagagattcagaaagaagggacaattctgacagaagagattgcactggatttgatgtttgtcttgctatttgccagctttgaaacaacttctttggctctaactttagctatcaagtttctctcagatgaccctgaagtcctaaagcgtttaacggaagaacatgagacaattctgagaaaccgggaagatgcagactctggacttacatgggaagaatacaagtcaatgacttacacatttcagttcataaacgaaaccgcgagactagcaaatatagttcctgcaatcttcagaaaggcgttgagagatataaaattcaaagattatacgattccagccggctgggcggtgatggtctgtccaccagctgtacatttgaatcccgaaatgtataaagatcctttagtctttaatccatcaagatgggagggatcaaaagttacaaacgcatcaaagcacttcatggcgtttggtggaggtatgaggttctgcgttggaaccgacttcacaaaattgcagatggctgcgtttcttcacagcttggtaacaaaatacaggtgggaggagataaaaggagggaatataactcgaacgcctggattacagtttccaaatggttaccatgtcaaactccataagaagagagactag

SEQ ID NO: 85160 - protein, 472 aa, Arabidopsis thaliana
  peptide (1)..(472): Ceres Seq. ID no. 12679138
MWALLIWVSLLLISITHWVYSWRNPKCRGKLPPGSMGFPLLGESIQFFKPNKTSDIPPFIKERVKKYGPIFKTNLVGRPVIVSTDADLSYFVFNQEGRCFQSWYPDTFTHIFGKKNVGSLHGFMYKYLKNMVLTLFGHDGLKKMLPQVEMTANKRLELWSNQDSVELKDATASMIFDLTAKKLISHDPDKSSENLRANFVAFIQGLISFPFDIPGTAYHKCLQGRAKAMKMLRNMLQERRENPRKNPSDFFDYVIEEIQKEGTILTEEIALDLMFVLLFASFETTSLALTLAIKFLSDDPEVLKRLTEEHETILRNREDADSGLTWEEYKSMTYTFQFINETARLANIVPAIFRKALRDIKFKDYTIPAGWAVMVCPPAVHLNPEMYKDPLVFNPSRWEGSKVTNASKHFMAFGGGMRFCVGTDFTKLQMAAFLHSLVTKYRWEEIKGGNITRTPGLQFPNGYHVKLHKKRD

SEQ ID NO: 85161 - protein, 437 aa, Arabidopsis thaliana
  peptide (1)..(437): Ceres Seq. ID no. 12679139
MGFPLLGESIQFFKPNKTSDIPPFIKERVKKYGPIFKTNLVGRPVIVSTDADLSYFVFNQEGRCFQSWYPDTFTHIFGKKNVGSLHGFMYKYLKNMVLTLFGHDGLKKMLPQVEMTANKRLELWSNQDSVELKDATASMIFDLTAKKLISHDPDKSSENLRANFVAFIQGLISFPFDIPGTAYHKCLQGRAKAMKMLRNMLQERRENPRKNPSDFFDYVIEEIQKEGTILTEEIALDLMFVLLFASFETTSLALTLAIKFLSDDPEVLKRLTEEHETILRNREDADSGLTWEEYKSMTYTFQFINETARLANIVPAIFRKALRDIKFKDYTIPAGWAVMVCPPAVHLNPEMYKDPLVFNPSRWEGSKVTNASKHFMAFGGGMRFCVGTDFTKLQMAAFLHSLVTKYRWEEIKGGNITRTPGLQFPNGYHVKLHKKRD

SEQ ID NO: 85162 - protein, 349 aa, Arabidopsis thaliana
  peptide (1)..(349): Ceres Seq. ID no. 12679140
MYKYLKNMVLTLFGHDGLKKMLPQVEMTANKRLELWSNQDSVELKDATASMIFDLTAKKLISHDPDKSSENLRANFVAFIQGLISFPFDIPGTAYHKCLQGRAKAMKMLRNMLQERRENPRKNPSDFFDYVIEEIQKEGTILTEEIALDLMFVLLFASFETTSLALTLAIKFLSDDPEVLKRLTEEHETILRNREDADSGLTWEEYKSMTYTFQFINETARLANIVPAIFRKALRDIKFKDYTIPAGWAVMVCPPAVHLNPEMYKDPLVFNPSRWEGSKVTNASKHFMAFGGGMRFCVGTDFTKLQMAAFLHSLVTKYRWEEIKGGNITRTPGLQFPNGYHVKLHKKRD

SEQ ID NO: 85163 - DNA, 1418 bp, Arabidopsis thaliana
  misc_feature (1)..(1418): Ceres Seq. ID no. 12679153
  misc_feature (1)..(1418): Ortholog of  Ceres SEQ ID NO 14312844 as cited in SEQ ID NO 55601
  misc_feature (1)..(1418): Ortholog of  Ceres SEQ ID NO 13597376 as cited in SEQ ID NO 64002
  misc_feature (1)..(1418): Ortholog of  Ceres SEQ ID NO 13503573 as cited in SEQ ID NO 65402
  misc_feature (1)..(1418): Ortholog of  Ceres SEQ ID NO 13659615 as cited in SEQ ID NO 67248
ccactcatttttcctatttttcgctttgcgtgccttcttatcaacttgtaaacaaagctacaaatatctttaaataaggacccaactctttttcaattcctcccatcaatcttcttcatttgttcttctgttggtggtggtgatctagttttcaaagaatcgattttgccaagtgggttcttcttgataacctttcttcttctttgaaatgggttcttctgtggagcagaacattcttgttactggtggtgctggctttatcgggacgcatactgttgttcaacttctcaaagatggttttaaggtttcgatcatcgataattttgataactctgttatcgaagctgttgatagagttagggagcttgttggtcctgatctctccaagaagctcgacttcaatctgggtgatctaagaaacaaaggggacattgagaaactattctccaagcagagatttgatgctgtgattcattttgcgggtcttaaagctgtgggtgagagtgttgaaaaccctcgccgctactttgacaataacttggttggaacaatcaatctatatgagaccatggcaaagtacaactgcaaaatgatggtgttttcatcttctgccactgtttatggacaacctgaaaagattccatgcatggaagactttgaattaaaggctatgaatccttatggtcgtactaagctctttcttgaagaaatagctagagatattcaaaaggcagaaccggaatggagaattattctgctgaggtacttcaatcctgtaggagcacatgagagtggcagtattggtgaggatccaaaaggcatccccaataacctcatgccttacatccaacaagtggccgttggacgtttaccggaactcaatgtctatggacatgactatcccaccgaggatggtagtgcggtaagagactacatccatgtgatggatttagcagatggccatatcgctgcgctcaggaagctatttgctgatccaaagattggttgtactgcttacaatctagggactggtcaaggaacgtctgtgttagaaatggttgcagcttttgaaaaagcttccggcaagaaaatcccgattaagctctgtccgagaaggtcaggagatgcaacagcagtttatgcttcaacagagaaggctgagaaagaacttggctggaaggcaaaatatggagtggatgagatgtgcagagatcagtggaaatgggcaaacaataatccatggggttaccagaataagctttgaatttacttcttttgtttggagttaccatttctaattactcaaatctaaaagaaagaaatatacatacatatgatgatatagttgtgctttatattccacatgtatcgaactgatctcttacttcgatgaataaaatggaaagttgatttgattg

SEQ ID NO: 85164 - protein, 351 aa, Arabidopsis thaliana; identical to SEQ ID NO: 44133
  peptide (1)..(351): Ceres Seq. ID no. 12679154

SEQ ID NO: 85165 - protein, 231 aa, Arabidopsis thaliana; identical to SEQ ID NO: 44134
  peptide (1)..(231): Ceres Seq. ID no. 12679155

SEQ ID NO: 85166 - protein, 224 aa, Arabidopsis thaliana; identical to SEQ ID NO: 44135
  peptide (1)..(224): Ceres Seq. ID no. 12679156

SEQ ID NO: 85167 - DNA, 1116 bp, Arabidopsis thaliana
  misc_feature (1)..(1116): Ceres Seq. ID no. 12679188
  misc_feature (1)..(1116): Ortholog of  Ceres SEQ ID NO 12611314 as cited in SEQ ID NO 56535
  misc_feature (1)..(1116): Ortholog of  Ceres SEQ ID NO 13661438 as cited in SEQ ID NO 61414
atggctaaccgaacagacaactcgaatcgctgttcgaatggtaaaaagccaaatgatggaatgagactcattatagcgacattcgtaggaatagttgtcggtttcttcttggggatatctttccctacactatcactaacaaaaatttgggttccatcgaatccccgaggtgcagagatgctgactcctggtatcattgcacctgaatcagattactacttacgcagactttggggattacctgaggaggatgttcctgtgaagccaaagtatctcattgcgtttactgtcggttttggtcagaaagtgaacgttgatgcttgtgtcaagaagttttcaaaagattttacaattgttctattccactacgacggacgaaccacagaatgggaagaattagaatggtccaaacgcgcaatacacgtgagcgtgccaaagcaaaccaaatggtggtatgctaaaaggtttctgcatcctgacattgtggcaccttatgactatgtattcatctgggatgaagacctcggccttgaaaacttcgatgtagaagagtacatcaggcttataaagaaacacggtctagagatatcgcagcctgctgttgagtctaagaaaaagatcacatgggagataacaaagagaaaaaccaaaggagaagttcacaaagatgcgaaggagaaaccaggtcgatgcaatgaccctcacttgcctccctgtgcagcgtacgtagtctcaaatgttcattacaaaaacatagatctatacagtactcttgattccatgtttatagagattatggctccagtattctcaagagatgcatggcgttgcgtgtggcatatgattcagaacgatttggttcacggttggggtcttgatttcgcactccgtaaatgcgttgagcctgcacatgagaagataggagttgtggattctcaatggatcatacatcaatctcttccttctttaggcagccagggagaggcacaagacggtaaagcagggtggcaaggggtgagagacagatgtaaacgggaatggacaatgttccaaagccgaatggctagttccgagaagcagtatctcaaggaaatcgcaaactcaacgattcattag

SEQ ID NO: 85168 - protein, 371 aa, Arabidopsis thaliana
  peptide (1)..(371): Ceres Seq. ID no. 12679189
MANRTDNSNRCSNGKKPNDGMRLIIATFVGIVVGFFLGISFPTLSLTKIWVPSNPRGAEMLTPGIIAPESDYYLRRLWGLPEEDVPVKPKYLIAFTVGFGQKVNVDACVKKFSKDFTIVLFHYDGRTTEWEELEWSKRAIHVSVPKQTKWWYAKRFLHPDIVAPYDYVFIWDEDLGLENFDVEEYIRLIKKHGLEISQPAVESKKKITWEITKRKTKGEVHKDAKEKPGRCNDPHLPPCAAYVVSNVHYKNIDLYSTLDSMFIEIMAPVFSRDAWRCVWHMIQNDLVHGWGLDFALRKCVEPAHEKIGVVDSQWIIHQSLPSLGSQGEAQDGKAGWQGVRDRCKREWTMFQSRMASSEKQYLKEIANSTIH

SEQ ID NO: 85169 - protein, 351 aa, Arabidopsis thaliana
  peptide (1)..(351): Ceres Seq. ID no. 12679190
MRLIIATFVGIVVGFFLGISFPTLSLTKIWVPSNPRGAEMLTPGIIAPESDYYLRRLWGLPEEDVPVKPKYLIAFTVGFGQKVNVDACVKKFSKDFTIVLFHYDGRTTEWEELEWSKRAIHVSVPKQTKWWYAKRFLHPDIVAPYDYVFIWDEDLGLENFDVEEYIRLIKKHGLEISQPAVESKKKITWEITKRKTKGEVHKDAKEKPGRCNDPHLPPCAAYVVSNVHYKNIDLYSTLDSMFIEIMAPVFSRDAWRCVWHMIQNDLVHGWGLDFALRKCVEPAHEKIGVVDSQWIIHQSLPSLGSQGEAQDGKAGWQGVRDRCKREWTMFQSRMASSEKQYLKEIANSTIH

SEQ ID NO: 85170 - protein, 312 aa, Arabidopsis thaliana
  peptide (1)..(312): Ceres Seq. ID no. 12679191
MLTPGIIAPESDYYLRRLWGLPEEDVPVKPKYLIAFTVGFGQKVNVDACVKKFSKDFTIVLFHYDGRTTEWEELEWSKRAIHVSVPKQTKWWYAKRFLHPDIVAPYDYVFIWDEDLGLENFDVEEYIRLIKKHGLEISQPAVESKKKITWEITKRKTKGEVHKDAKEKPGRCNDPHLPPCAAYVVSNVHYKNIDLYSTLDSMFIEIMAPVFSRDAWRCVWHMIQNDLVHGWGLDFALRKCVEPAHEKIGVVDSQWIIHQSLPSLGSQGEAQDGKAGWQGVRDRCKREWTMFQSRMASSEKQYLKEIANSTIH

SEQ ID NO: 85171 - DNA, 1425 bp, Arabidopsis thaliana
  misc_feature (1)..(1425): Ceres Seq. ID no. 12679196
  misc_feature (1)..(1425): Ortholog of  Ceres SEQ ID NO 13594209 as cited in SEQ ID NO 59089
  misc_feature (1)..(1425): Ortholog of  Ceres SEQ ID NO 13502874 as cited in SEQ ID NO 66298
  misc_feature (1)..(1425): Ortholog of  Ceres SEQ ID NO 12614124 as cited in SEQ ID NO 68392
atggcgatcttgttctgtttcttcttggtttcgcttgttactctcgtatcatcaatcttttttaaacagatcaaaaacacaaaatttaatcttcctccgagccctcctagtcttccgataattggaaacttacaccatcttacaggattgcctcacagatgttatcataagctctccatcaaatacggtcccgtgatacttcttcatctcggctttgttccagttgttgtgatctcattgagcgaagcagctgaagcagtactcaaaacacatgatttggaatgttgcagccgaccaaagacggtggggaccggaaaactctcttacggttttaaagacatcagttttgtgccatacagtgagtattggcgggaaatgcgaaaactcgcggttaccgaactttttagccttaaaaaggttcaatcttataggtatataagaggggaagagatcgaatttatggtgaagaaattaatcagctttgaagcaatctcctgtggatctaccttcttctccctcaccgcaagcataatttttagagtagccttagggcggaatttccacgagagcggctccattatcgatcaggaggggattgaagaacttgttaccgcggctacaacagctataggaagttttactttctcggacttcttcccaagtggacttggaagattcttagattgcttgtttcgtacgcaaacaaatataaacaaagtctcggagaagcttgatgctttttaccagcatgtgattgatgatcacttgaagccatcaactttggattcctccggagatattgttgccttgatgttagatatgataaagaaaaaaggacataaagatgatttcaagctcaatgtggataacatcaaagcagtcctcatgaatatatttctcgcggggatagacacaggcgccataacaatgatttgggcgatgaccgagctcgttaaaaaacccttagtgatgaagagagctcaagaaaatatccgaggcgtcctcgggctcaaaagagatagaatcactgaagaagacctatgcaaatttgattgcttgaaacatattgtcaaggaaacattaagattacacccaccagttccatttttggtcccaagggaaacaatatctcacatcaagattcaaggctacgatattccaccaaaaacgcaaatccaagttaacgtattacattttagaggacaacactttgactttctaccgtttggttctggtcgaaggatctgtcccgcgatatcaatggcgattgctaccgtggagctaggactgatgaatttgcttgactttttcgattggagattgcctgatgggatgaaagttgaagacattgatatagaagaagctggtaatgtcacggtagtcaagaaactacttatttaccttgtgccccttcaacgtcattga

SEQ ID NO: 85172 - protein, 474 aa, Arabidopsis thaliana
  peptide (1)..(474): Ceres Seq. ID no. 12679197
MAILFCFFLVSLVTLVSSIFFKQIKNTKFNLPPSPPSLPIIGNLHHLTGLPHRCYHKLSIKYGPVILLHLGFVPVVVISLSEAAEAVLKTHDLECCSRPKTVGTGKLSYGFKDISFVPYSEYWREMRKLAVTELFSLKKVQSYRYIRGEEIEFMVKKLISFEAISCGSTFFSLTASIIFRVALGRNFHESGSIIDQEGIEELVTAATTAIGSFTFSDFFPSGLGRFLDCLFRTQTNINKVSEKLDAFYQHVIDDHLKPSTLDSSGDIVALMLDMIKKKGHKDDFKLNVDNIKAVLMNIFLAGIDTGAITMIWAMTELVKKPLVMKRAQENIRGVLGLKRDRITEEDLCKFDCLKHIVKETLRLHPPVPFLVPRETISHIKIQGYDIPPKTQIQVNVLHFRGQHFDFLPFGSGRRICPAISMAIATVELGLMNLLDFFDWRLPDGMKVEDIDIEEAGNVTVVKKLLIYLVPLQRH

SEQ ID NO: 85173 - protein, 349 aa, Arabidopsis thaliana
  peptide (1)..(349): Ceres Seq. ID no. 12679198
MRKLAVTELFSLKKVQSYRYIRGEEIEFMVKKLISFEAISCGSTFFSLTASIIFRVALGRNFHESGSIIDQEGIEELVTAATTAIGSFTFSDFFPSGLGRFLDCLFRTQTNINKVSEKLDAFYQHVIDDHLKPSTLDSSGDIVALMLDMIKKKGHKDDFKLNVDNIKAVLMNIFLAGIDTGAITMIWAMTELVKKPLVMKRAQENIRGVLGLKRDRITEEDLCKFDCLKHIVKETLRLHPPVPFLVPRETISHIKIQGYDIPPKTQIQVNVLHFRGQHFDFLPFGSGRRICPAISMAIATVELGLMNLLDFFDWRLPDGMKVEDIDIEEAGNVTVVKKLLIYLVPLQRH

SEQ ID NO: 85174 - protein, 321 aa, Arabidopsis thaliana
  peptide (1)..(321): Ceres Seq. ID no. 12679199
MVKKLISFEAISCGSTFFSLTASIIFRVALGRNFHESGSIIDQEGIEELVTAATTAIGSFTFSDFFPSGLGRFLDCLFRTQTNINKVSEKLDAFYQHVIDDHLKPSTLDSSGDIVALMLDMIKKKGHKDDFKLNVDNIKAVLMNIFLAGIDTGAITMIWAMTELVKKPLVMKRAQENIRGVLGLKRDRITEEDLCKFDCLKHIVKETLRLHPPVPFLVPRETISHIKIQGYDIPPKTQIQVNVLHFRGQHFDFLPFGSGRRICPAISMAIATVELGLMNLLDFFDWRLPDGMKVEDIDIEEAGNVTVVKKLLIYLVPLQRH

SEQ ID NO: 85175 - DNA, 1401 bp, Arabidopsis thaliana
  misc_feature (1)..(1401): Ceres Seq. ID no. 12679236
  misc_feature (1)..(1401): Ortholog of  Ceres SEQ ID NO 14304871 as cited in SEQ ID NO 54194
atggggaagaagcttgacgctttgcttggtcgcagtttcaagaccaacaagttcaagtctcttatcaccttagctctcacaaggctctctattctcaagaaccagcgtcaagccagactctctcaagccatctctgatgtcaccgagcttcttaagctcggccaacatgagcacgcttaccatagagtcgatcaagtcgtcaaagaccaaaacactctcgacgttctcttcttcatccatggctacttcactctctgtctcgatcgtattcacctctttgaacacaacagagattgtcctgaagagcttctagaagctgtttcgggtttgctatttgcagcttctagaatcggtgaattccctgagcttcaagagattcgtaatgttttgatttcgcgttttggcaaagatctcgcggctcggtctattgagttgcgcagtaattgtggggttgatcccaaaataattcagaagttgtcgacaagacctccaccgaaagaagttagaatgaaggctttgaaggagattgctgcagagaataacattgttctgaaactagaccaagcttctacgtccactgagggaacaacaaatatgcagggaacatcagatgttagtaagactaagctaacaagtaaagatggcagaggagaaggttatggtttatctgattcggtcaagagaggaaagaagaagtacaaagatgtggctgatgctgcacaagcagcgtttgagtcagcagctcatgcagcagaggctgcacaagcggctgtggagctttctcagttttctcctcgtggacatgacagtccgggtaacattggtggggaaaattcatttcatggttctgaaaacaaagagtcagaacaagaacaagaaggtaatgatgattcttcagaaggggaaggggatgtgatgtcagaatctaaaaggtcgatgtcagattcagaagatattattgatgtcccagtgatgtcattcagagaagaccctgtgaagctattggagaaggatactattatctacgatagtgaagaagaaacccaacctagtgttgagactattactattagtaagtctaaagatgagcaaaatcgtatggttggttcgaatagagcggatacaagacatgtggaccacatggttcgttcaattgaagatcctattatgcgtaaagcaggtttgaagggtccagtttcagtcaggacaagacaggttcgtggatactaagtacaaatgttataagtttttcaggtgcatctacggtgtaatcactcagttttgtacttttctatgttctttttgtggtcaaagatgtaagattattgtgttctttatggatataagctttcaatgatgttgtacagttgcatatgtgtgtgtttatacaagaaacgtttc

SEQ ID NO: 85176 - protein, 409 aa, Arabidopsis thaliana; identical to SEQ ID NO: 43156
  peptide (1)..(409): Ceres Seq. ID no. 12679237

SEQ ID NO: 85177 - protein, 240 aa, Arabidopsis thaliana; identical to SEQ ID NO: 43157
  peptide (1)..(240): Ceres Seq. ID no. 12679238

SEQ ID NO: 85178 - protein, 211 aa, Arabidopsis thaliana; identical to SEQ ID NO: 43158
  peptide (1)..(211): Ceres Seq. ID no. 12679239

SEQ ID NO: 85179 - DNA, 1224 bp, Arabidopsis thaliana
  misc_feature (1)..(1224): Ceres Seq. ID no. 12679247
  misc_feature (1)..(1224): Ortholog of  Ceres SEQ ID NO 15174863 as cited in SEQ ID NO 51281
  misc_feature (1)..(1224): Ortholog of  Ceres SEQ ID NO 12614972 as cited in SEQ ID NO 61986
  misc_feature (1)..(1224): Ortholog of  Ceres SEQ ID NO 14302317 as cited in SEQ ID NO 63244
  misc_feature (1)..(1224): Ortholog of  Ceres SEQ ID NO 12625706 as cited in SEQ ID NO 64144
  misc_feature (1)..(1224): Ortholog of  Ceres SEQ ID NO 13584933 as cited in SEQ ID NO 65009
  misc_feature (1)..(1224): Ortholog of  Ceres SEQ ID NO 12634984 as cited in SEQ ID NO 0
  misc_feature (1)..(1224): Ortholog of  Ceres SEQ ID NO 13599377 as cited in SEQ ID NO 0
acaacactcgacacaaaagcaaaaacaaaaatgggtgagaaagatattccaaggaacttgaaggaagaagaagaagaagaagaagaaaaccaaagtgaagaaaccaaaagtttgatctcttcacttccttcagacatagattgctcagggaccaagttgtacaagtaccaaggatgttggtacgacaaagatattctccaagcaatcctcaatttcaacaaaaactttcagccacaagaaacggatataattgttgcttctttccccaaatcgggtacgacttggctcaaggcactcacattcgcactcgcgcaaagatcaaaacacacttcagacaatcatcctctgctaactcataatcctcatgagctagtgccgtacctcgagctcgatctttatctcaaaagctcgaaaccggatttgaccaagttgccatcatcatctccgagattgttctcaacccacatgtcctttgatgcgcttaaagtaccgttgaaagagtctccttgcaagatcgtgtacgtgtgcaggaacgtgaaagacgtattggtatcactttggtgtttcgaaaactccatgagtggagaaaacaatttaagtctcgaggctttgttcgagtctttatgtagcggagttaacttatgcggtcccttatgggaaaatgtgttaggctattggagaggaagcttggaagatcctaagcatgtgcttttcttgaggtacgaggagttgaagacggagcctcgtgtgcaaatcaagagacttgcagagttcttagattgtccattcacaaaggaagaagaagatagtggaggtgtagacaagatcttggaactttgttctctaagaaaccttagcggtttggagatcaacaaaacaggaagcttgtcggaaggagtaagtttcaagagttttttccgtaaaggggaagttggtgattggaagagttatatgactcctgaaatggaaaacaaaatcgacatgattgttgaggagaaacttcaaggctctggtttgaaattgtagagttcatatctctatgtatatgtgtgggaacaggtttaatctcaaacctaataatgctggtttgttcttttcttgtatgcaatgtaataaaagttactttgatgtaaggttaagagtttaagattcttagtgatgtgttgttgtttttgtttcgtttgataatgaataaagctagcggcttttcttcttcgccaaggc

SEQ ID NO: 85180 - protein, 341 aa, Arabidopsis thaliana
  peptide (1)..(341): Ceres Seq. ID no. 12679248
TTLDTKAKTKMGEKDIPRNLKEEEEEEEENQSEETKSLISSLPSDIDCSGTKLYKYQGCWYDKDILQAILNFNKNFQPQETDIIVASFPKSGTTWLKALTFALAQRSKHTSDNHPLLTHNPHELVPYLELDLYLKSSKPDLTKLPSSSPRLFSTHMSFDALKVPLKESPCKIVYVCRNVKDVLVSLWCFENSMSGENNLSLEALFESLCSGVNLCGPLWENVLGYWRGSLEDPKHVLFLRYEELKTEPRVQIKRLAEFLDCPFTKEEEDSGGVDKILELCSLRNLSGLEINKTGSLSEGVSFKSFFRKGEVGDWKSYMTPEMENKIDMIVEEKLQGSGLKL

SEQ ID NO: 85181 - protein, 331 aa, Arabidopsis thaliana
  peptide (1)..(331): Ceres Seq. ID no. 12679249
MGEKDIPRNLKEEEEEEEENQSEETKSLISSLPSDIDCSGTKLYKYQGCWYDKDILQAILNFNKNFQPQETDIIVASFPKSGTTWLKALTFALAQRSKHTSDNHPLLTHNPHELVPYLELDLYLKSSKPDLTKLPSSSPRLFSTHMSFDALKVPLKESPCKIVYVCRNVKDVLVSLWCFENSMSGENNLSLEALFESLCSGVNLCGPLWENVLGYWRGSLEDPKHVLFLRYEELKTEPRVQIKRLAEFLDCPFTKEEEDSGGVDKILELCSLRNLSGLEINKTGSLSEGVSFKSFFRKGEVGDWKSYMTPEMENKIDMIVEEKLQGSGLKL

SEQ ID NO: 85182 - protein, 186 aa, Arabidopsis thaliana
  peptide (1)..(186): Ceres Seq. ID no. 12679250
MSFDALKVPLKESPCKIVYVCRNVKDVLVSLWCFENSMSGENNLSLEALFESLCSGVNLCGPLWENVLGYWRGSLEDPKHVLFLRYEELKTEPRVQIKRLAEFLDCPFTKEEEDSGGVDKILELCSLRNLSGLEINKTGSLSEGVSFKSFFRKGEVGDWKSYMTPEMENKIDMIVEEKLQGSGLKL

SEQ ID NO: 85183 - DNA, 897 bp, Arabidopsis thaliana
  misc_feature (1)..(897): Ceres Seq. ID no. 12679287
  misc_feature (1)..(897): Ortholog of  Ceres SEQ ID NO 15174737 as cited in SEQ ID NO 52912
  misc_feature (1)..(897): Ortholog of  Ceres SEQ ID NO 13624551 as cited in SEQ ID NO 0
atgtataaggcaagtcctaaaagaaaagagattgtagagaaaagcaagagtgtaagagagaaggagattaaacaaaactcaaatttctttgccaaacacttaaagaggatttacccaatcacgcttcaacgaagcacttcttcttcattttcactctcttctatatctctatcactctctcagaactcgaccgattctgtttccacggattcaaattcgacgttggaacaaaagatctctctggcactcggtttaatctcatctccccacagaagagaaatatttgttccaaaaagtatcccacaacaactatgtcaggatttcaatagtagtgatgaaccaaagaggtgcaactggatcaccaagaaaagtgacgaagtctacgtaatgtttcatgaccagcaatggggagtccctgtctatgatgataacctgctttttgagttccttgccatgtcggggatgttaatggactataactggaccgagattctaaaacgcaaagaacactttagagaggcattttgtgagtttgacccaaatcgggtggccaaaatgggagagaaagagatcgcagagattgcatcaaataaagcaataatgttacaagagagtagagtggtcaatgaatttggatcattcagcagcttcgtttgggggtttatggattacaaacctatcattaacaaattcaagtattcaagaaatgtaccattgagatctcctaaggctgagataattagcaaagatatgatcaaacgagggtttcgatttgtcggtccagtgatcgtacattcgttcatgcaggctgcagggttaacaattgatcacctcgtcgattgttttagacatggtgattgtgtgagcctcgctgagaggccatggaggcatatatga

SEQ ID NO: 85184 - protein, 298 aa, Arabidopsis thaliana
  peptide (1)..(298): Ceres Seq. ID no. 12679288
MYKASPKRKEIVEKSKSVREKEIKQNSNFFAKHLKRIYPITLQRSTSSSFSLSSISLSLSQNSTDSVSTDSNSTLEQKISLALGLISSPHRREIFVPKSIPQQLCQDFNSSDEPKRCNWITKKSDEVYVMFHDQQWGVPVYDDNLLFEFLAMSGMLMDYNWTEILKRKEHFREAFCEFDPNRVAKMGEKEIAEIASNKAIMLQESRVVNEFGSFSSFVWGFMDYKPIINKFKYSRNVPLRSPKAEIISKDMIKRGFRFVGPVIVHSFMQAAGLTIDHLVDCFRHGDCVSLAERPWRHI

SEQ ID NO: 85185 - protein, 169 aa, Arabidopsis thaliana
  peptide (1)..(169): Ceres Seq. ID no. 12679289
MFHDQQWGVPVYDDNLLFEFLAMSGMLMDYNWTEILKRKEHFREAFCEFDPNRVAKMGEKEIAEIASNKAIMLQESRVVNEFGSFSSFVWGFMDYKPIINKFKYSRNVPLRSPKAEIISKDMIKRGFRFVGPVIVHSFMQAAGLTIDHLVDCFRHGDCVSLAERPWRHI

SEQ ID NO: 85186 - DNA, 1756 bp, Arabidopsis thaliana
  misc_feature (1)..(1756): Ceres Seq. ID no. 12679358
  misc_feature (1)..(1756): Ortholog of  Ceres SEQ ID NO 14303197 as cited in SEQ ID NO 66883
aaatcttagctctcaccaacgacgaaactcgtctccctccatcttgctatggatcgtcagccggagagggagaatgatgaactaccatctccggcgataatttccgaccgagttctggtaaatggtgttgtcacgccgttaacgttgaccgccgagggagagctacgatcgacggaatctggacggcggaaatcgacgttggcaaaagaaatcctgagtttcgtcgtggaaggtaacaaggttagagtaaagaccttggttgagaaaggaggaggaatttgctgtagaggaagtgctggagattatgcgaggaacgatttcgttttcgagcctctctctgatgaatctagaaagctttggtccgataagttccatcaacacctcgtctctctcggtcggccaaagaaattgcttgtgtttgtgaatccgtttggcgggaagaaaacagcgagaaagatatttcaagaggaagtaaagccattgtttgaagatgcaaatattcaacttgagattcaagaaaccaagtatcagttgcatgcaaaggaaattgttaggtccatggatgtatcaaaatacgatggtattgtttgtgttagcggtgacggtatccttgttgaggttgtaaatggactgcttgaaagagaagactggaagactgccataaaattgccgatcggaatggtccctgcaggaagtggtaatggcatgattaaatcattgttggaaccggtagggcttccttgtagtgcaacaagtgctactatttcgataatccgaggtcgtacacgttctctagatgtagcaactatctcacaagggactaccaaattcttcagtgtcttgatgcttgcttggggtttagtggctgatatagacatcgagtcagagaaattcagatggatgggtagtgctcgctttgatatctatggtcttcagaggataatatgcttaagacaataccatggacgaattctatttgtgccagctcctgggttcgaaagctatgggcaacgagccagttgcagtatagataaagagccatctggtagtgataagacactcgtataccaaggacctgatagtaaacttgaaaatctggattggagagaaatgaaaggcccatttgtttcagtatggcttcataatgttccctggggtgctgagaacactttggctgctcctgacgctaagttttctgatggcttcctggatttgattgtcatgaaagactgtcctaaactagccttgctatcacttatgacaaagttgagtgatggaacccatgtccaatcaccatatgcatcatatctgaaggtgaaggcattcgtactggagccaggtgcacgcatagacgaaccagacaaggaaggaatcatagattcagatggagaagttttggcaagaggaagaaaatcgtacaaatgtgatcaaaaggctttgatgtcttacgacaagcttcaaataagtgttgatcaaggtttagccactctcttctctcctgaataattctgactgatacatgagatgtgatgagatgagatgaagttgtcccttgtggctataatttgattgatggacattacaatacaaaaaatgagaagatgattcgagttatatagtaaatccctaaagattaccattgagtgtattgtttattgttgtattgctgttgtattgcagttttgagttttttgttagaaagttgtgtgaactaagatattgagaagaccataaatactaaatgtgagattttttt

SEQ ID NO: 85187 - protein, 485 aa, Arabidopsis thaliana
  peptide (1)..(485): Ceres Seq. ID no. 12679359
MDRQPERENDELPSPAIISDRVLVNGVVTPLTLTAEGELRSTESGRRKSTLAKEILSFVVEGNKVRVKTLVEKGGGICCRGSAGDYARNDFVFEPLSDESRKLWSDKFHQHLVSLGRPKKLLVFVNPFGGKKTARKIFQEEVKPLFEDANIQLEIQETKYQLHAKEIVRSMDVSKYDGIVCVSGDGILVEVVNGLLEREDWKTAIKLPIGMVPAGSGNGMIKSLLEPVGLPCSATSATISIIRGRTRSLDVATISQGTTKFFSVLMLAWGLVADIDIESEKFRWMGSARFDIYGLQRIICLRQYHGRILFVPAPGFESYGQRASCSIDKEPSGSDKTLVYQGPDSKLENLDWREMKGPFVSVWLHNVPWGAENTLAAPDAKFSDGFLDLIVMKDCPKLALLSLMTKLSDGTHVQSPYASYLKVKAFVLEPGARIDEPDKEGIIDSDGEVLARGRKSYKCDQKALMSYDKLQISVDQGLATLFSPE

SEQ ID NO: 85188 - protein, 315 aa, Arabidopsis thaliana
  peptide (1)..(315): Ceres Seq. ID no. 12679360
MDVSKYDGIVCVSGDGILVEVVNGLLEREDWKTAIKLPIGMVPAGSGNGMIKSLLEPVGLPCSATSATISIIRGRTRSLDVATISQGTTKFFSVLMLAWGLVADIDIESEKFRWMGSARFDIYGLQRIICLRQYHGRILFVPAPGFESYGQRASCSIDKEPSGSDKTLVYQGPDSKLENLDWREMKGPFVSVWLHNVPWGAENTLAAPDAKFSDGFLDLIVMKDCPKLALLSLMTKLSDGTHVQSPYASYLKVKAFVLEPGARIDEPDKEGIIDSDGEVLARGRKSYKCDQKALMSYDKLQISVDQGLATLFSPE

SEQ ID NO: 85189 - protein, 275 aa, Arabidopsis thaliana
  peptide (1)..(275): Ceres Seq. ID no. 12679361
MVPAGSGNGMIKSLLEPVGLPCSATSATISIIRGRTRSLDVATISQGTTKFFSVLMLAWGLVADIDIESEKFRWMGSARFDIYGLQRIICLRQYHGRILFVPAPGFESYGQRASCSIDKEPSGSDKTLVYQGPDSKLENLDWREMKGPFVSVWLHNVPWGAENTLAAPDAKFSDGFLDLIVMKDCPKLALLSLMTKLSDGTHVQSPYASYLKVKAFVLEPGARIDEPDKEGIIDSDGEVLARGRKSYKCDQKALMSYDKLQISVDQGLATLFSPE

SEQ ID NO: 85190 - DNA, 1424 bp, Arabidopsis thaliana
  misc_feature (1)..(1424): Ceres Seq. ID no. 12679362
  misc_feature (1)..(1424): Ortholog of  Ceres SEQ ID NO 14316522 as cited in SEQ ID NO 58267
accatgagaggagctctgttcagaaatgcatctctctgcgctcgcagaatcattctttcttctaggatctcccccaatgttccctttctcactccaatcgccgctccggctcctcccaaattcagatttttcagttccgaatccggtgagaactcgactactgccactgagtcttcgccgactgattcatccgataagaaggatctcgttgtaaaggatgtcagcaacaaagagcttaaaagccgtatagacaagtctttcaatgagggtaatgaagatgctttacctggagttattgaagcacttctacagagaagacttgtagacaaacacgcagagactgatgatgaattgatggaaaaaatcgagagtctacctttcaaagatgatgtcaaggatgaagattttgaatccgatttcgaagaagcgcattctactgacgaagaacttgaggatttgtacaactctcccgagtatgtagctgaaaagatgaggaagaaagaatttttcaacatggacgataacaagtgggatcacatgattagagaaggtatccaacatggctgtcttaccgatactaaacaatgcgaggagattctcgaggatatgctcaaatgggaccagcttcttcctgatgacttgaagaaaaaagttgaagcaaagtttaatgagctcggggatatgtgtgaaagaggtgaaattgaggccgaagcagcttatgagcttttcaaggaatttgaagatgagatggtaattcagtatggggatcagatggaagctgagggtcctccccaatttggtgaaacagatacttctgacaggaatactgacttggatgatccctccggtaaaggcccaatcctcaggtggcaatcaaggatagtttttgctcctggaggtgatgcgtggcatccaaagaacaggaaagttaaaatgtctgttacagtgaaagagcttgggctctcaaatcatcaggctaaaaggctaagggaacttgtgggaaaaagataccattcagggaaagatgagcttacaatcacctgcgagaggtttgaacaccgagaagaaaacaggaaagactgcttgagaactctttacgggttgatagaggaagctgggaaagccaacaagatcgctgaagacataagaacttcatatgtaaaacagagactccgagccagtccagcttttatgcagaaactacaagccaagatcataaggtctaaagaatcaaatgccatcaacgcttgaaaaaaacttttcccggttcgcgcctttcttcttgtctcaccaaataatctgtggatcgtcttcttaatctttgatgaatgcaatgttggtaaaaatagacaatgaatgaaactttttcatgtataaaaaatatggaaacttggggttgataatgaattgttcatgttaagact

SEQ ID NO: 85191 - protein, 416 aa, Arabidopsis thaliana
  peptide (1)..(416): Ceres Seq. ID no. 12679363
TMRGALFRNASLCARRIILSSRISPNVPFLTPIAAPAPPKFRFFSSESGENSTTATESSPTDSSDKKDLVVKDVSNKELKSRIDKSFNEGNEDALPGVIEALLQRRLVDKHAETDDELMEKIESLPFKDDVKDEDFESDFEEAHSTDEELEDLYNSPEYVAEKMRKKEFFNMDDNKWDHMIREGIQHGCLTDTKQCEEILEDMLKWDQLLPDDLKKKVEAKFNELGDMCERGEIEAEAAYELFKEFEDEMVIQYGDQMEAEGPPQFGETDTSDRNTDLDDPSGKGPILRWQSRIVFAPGGDAWHPKNRKVKMSVTVKELGLSNHQAKRLRELVGKRYHSGKDELTITCERFEHREENRKDCLRTLYGLIEEAGKANKIAEDIRTSYVKQRLRASPAFMQKLQAKIIRSKESNAINA

SEQ ID NO: 85192 - protein, 415 aa, Arabidopsis thaliana
  peptide (1)..(415): Ceres Seq. ID no. 12679364
MRGALFRNASLCARRIILSSRISPNVPFLTPIAAPAPPKFRFFSSESGENSTTATESSPTDSSDKKDLVVKDVSNKELKSRIDKSFNEGNEDALPGVIEALLQRRLVDKHAETDDELMEKIESLPFKDDVKDEDFESDFEEAHSTDEELEDLYNSPEYVAEKMRKKEFFNMDDNKWDHMIREGIQHGCLTDTKQCEEILEDMLKWDQLLPDDLKKKVEAKFNELGDMCERGEIEAEAAYELFKEFEDEMVIQYGDQMEAEGPPQFGETDTSDRNTDLDDPSGKGPILRWQSRIVFAPGGDAWHPKNRKVKMSVTVKELGLSNHQAKRLRELVGKRYHSGKDELTITCERFEHREENRKDCLRTLYGLIEEAGKANKIAEDIRTSYVKQRLRASPAFMQKLQAKIIRSKESNAINA

SEQ ID NO: 85193 - protein, 298 aa, Arabidopsis thaliana
  peptide (1)..(298): Ceres Seq. ID no. 12679365
MEKIESLPFKDDVKDEDFESDFEEAHSTDEELEDLYNSPEYVAEKMRKKEFFNMDDNKWDHMIREGIQHGCLTDTKQCEEILEDMLKWDQLLPDDLKKKVEAKFNELGDMCERGEIEAEAAYELFKEFEDEMVIQYGDQMEAEGPPQFGETDTSDRNTDLDDPSGKGPILRWQSRIVFAPGGDAWHPKNRKVKMSVTVKELGLSNHQAKRLRELVGKRYHSGKDELTITCERFEHREENRKDCLRTLYGLIEEAGKANKIAEDIRTSYVKQRLRASPAFMQKLQAKIIRSKESNAINA

SEQ ID NO: 85194 - DNA, 1560 bp, Arabidopsis thaliana
  misc_feature (1)..(1560): Ceres Seq. ID no. 12679397
  misc_feature (1)..(1560): Ortholog of  Ceres SEQ ID NO 13647016 as cited in SEQ ID NO 20325
  misc_feature (1)..(1560): Ortholog of  Ceres SEQ ID NO 13657872 as cited in SEQ ID NO 66357
gacaaaagagttggataaagtgtgtttagaagaagccgtcgaatttcttagtttgaagcattttattgtttggagagttcgatggatttgaatataaacaagacgacccctgttcttagtgaccctactacaccagtaagtaaaacaagacttggatcatccttcccttcagggagattcatgatgaattctagaaagaagattcctaaactcgatgatgttcgatctaacggttggttggacgcgatgatatcttcgtctccaccgcgtaaaaggcttgtcaaggatttcaatattgagattgctcctgaagatgatttttctcaacgggcctggatggtatgttaataatatctaatggtttcattcacaaatgttttgatctctcttttgttttcttagtcctactcatttcattctttaatcttgacagctcaagtatccttcagcgattacctcgtttgcgcatattgcagctcaagcaaagaacaagaagatagctgtgtttctagattatgatggaacactttctccaatagtcgatgaccctgatcgcgccatcatgtctgatgcgatgcgtgctgctgtgaaagatgtcgccaagtacttcccaacagcaataattagtggtagaagccgtgacaaggtttaccaattggtagggctaaccgaactctattacgcgggtagtcacgggatggacattatgactcctgtaaatccaaatggatcccctgaagaccctaattgtataaaaaccactgaccaacagggtgaggaggtaaacctctttcagcctgctaaagagttcatacccgtcattgaagaggtttataataacctcgttgagataactaaatgtatcaaaggtgcaaaagtagagaaccataagttttgtacttctgtacattaccgtaatgttgacgagaaggactggccacttgttgctcaacgcgttcatgaccacctgaaacgataccctcgtttgcgtataactcacggtagaaaggttttagaggtgcgtcctgtgattgagtggaacaaaggaaaagcagtagagtttctgttagagtctctcggattaagcaacaacgatgagttcctcccaatcttcatcggagatgacaagaccgatgaagatgcattcaaggtactgagggaagggaacagaggatttggaatattggtatcgtctgtaccaaaagaaagcaatgcattttactctcttagagacccttccgaggtacaaattttatattatctaagtcatcatctatgctatgttatatatgtaaatttgtaatgtatgagtttggtcggtaacaccgtaatggtgtttcaggtgaagaagtttctcaagactttggtgaaatgggggaagatggaaagttcaaaaacaagtttttgatgattgtgtaggagaatcagaagcttcattctgcactgctttttaatttcttattttttttccttttttaaagtttgtacttctatatattatcatttttccatattatccattaagcaaacgggaaaaacaagaatataacgattgtcttg

SEQ ID NO: 85195 - protein, 246 aa, Arabidopsis thaliana
  peptide (1)..(246): Ceres Seq. ID no. 12679398
MSDAMRAAVKDVAKYFPTAIISGRSRDKVYQLVGLTELYYAGSHGMDIMTPVNPNGSPEDPNCIKTTDQQGEEVNLFQPAKEFIPVIEEVYNNLVEITKCIKGAKVENHKFCTSVHYRNVDEKDWPLVAQRVHDHLKRYPRLRITHGRKVLEVRPVIEWNKGKAVEFLLESLGLSNNDEFLPIFIGDDKTDEDAFKVLREGNRGFGILVSSVPKESNAFYSLRDPSEVQILYYLSHHLCYVIYVNL

SEQ ID NO: 85196 - protein, 242 aa, Arabidopsis thaliana
  peptide (1)..(242): Ceres Seq. ID no. 12679399
MRAAVKDVAKYFPTAIISGRSRDKVYQLVGLTELYYAGSHGMDIMTPVNPNGSPEDPNCIKTTDQQGEEVNLFQPAKEFIPVIEEVYNNLVEITKCIKGAKVENHKFCTSVHYRNVDEKDWPLVAQRVHDHLKRYPRLRITHGRKVLEVRPVIEWNKGKAVEFLLESLGLSNNDEFLPIFIGDDKTDEDAFKVLREGNRGFGILVSSVPKESNAFYSLRDPSEVQILYYLSHHLCYVIYVNL

SEQ ID NO: 85197 - protein, 201 aa, Arabidopsis thaliana
  peptide (1)..(201): Ceres Seq. ID no. 12679400
MDIMTPVNPNGSPEDPNCIKTTDQQGEEVNLFQPAKEFIPVIEEVYNNLVEITKCIKGAKVENHKFCTSVHYRNVDEKDWPLVAQRVHDHLKRYPRLRITHGRKVLEVRPVIEWNKGKAVEFLLESLGLSNNDEFLPIFIGDDKTDEDAFKVLREGNRGFGILVSSVPKESNAFYSLRDPSEVQILYYLSHHLCYVIYVNL

SEQ ID NO: 85198 - DNA, 1883 bp, Arabidopsis thaliana
  misc_feature (1)..(1883): Ceres Seq. ID no. 12679405
  misc_feature (1)..(1883): Ortholog of  Ceres SEQ ID NO 14306420 as cited in SEQ ID NO 53854
  misc_feature (1)..(1883): Ortholog of  Ceres SEQ ID NO 14306410 as cited in SEQ ID NO 53870
attcttctccgtctgccaaaatccccacttcacgaatcgcaaaagatcaaggtttattgatctattgcgaaattagggtttgtgaattcgaatcggagattaataatagattttgtgatggagtgttcatcacgcatagaagaatcttgatttcgatctcgatgaaattaggaatcgagggattttatttataattgagatggtgaatattaaaagccctttacggctattcatagaggagtcgattaaggaattaattaggggtttcaggagacaaaggatcaaatggagaaatgcgtttcttcttggttctataatgactaccattgttgttctgcttcatacaccaacgttttcagtcttctctgatgaagaagaaaccgagtcttcttcttcttcgcctatttacttgaatggttctctgcatttgaatatccatattgttagtagtgaagcaaaagttgaaaattttcatactcttagaacaagaactcctattgtgcaattgaatgcttctgaagcaagtgaagctgttctttcgagaaaaaggcgaaaaaggaagaaaagaaagaagacaaaagatgatctgattctcactgatcctccaccagcaccacgacatgttctatcttcctcagagagacgtgctctttccttgccaccgaagaaagctcttacttatgcaaaactggagattcagcgtgccccggaggtcataaatgatacagatctgtttgccccattgtttcgaaatctctctgttttcaaaaggagctatgagcttatggaactaatactaaaggtctacatatatcctgacggagacaaacccatcttccacgaaccgcatttaaatggtatatatgcttcagaaggttggtttatgaagctaatggagtcaaacaaacagtttgtcacaaagaaccctgagagggctcacttgttctacatgccatatagtgtgaaacagcttcagaaaagtatctttgttcctggatcacataacatcaaacctttatcgatctttcttagagactacgtcaacatgctctccatcaaataccccttctggaaccgcactcatgggtcagatcatttccttgtcgcttgccacgattggggtccttacacagtgaacgagcacccagagctaaaacgaaacgctattaaagctctctgcaatgcagacttatcagatggaatcttcgtcccggggaaagacgtttctctccctgaaacatccataagaaacgcaggtagaccactacgcaacataggaaacggaaacagagtttctcaacgtcccatcctcgctttcttcgctggaaacctccacggtcgtgtccgtccaaagcttctaaaacactggagaaacaaagacgaggacatgaaaatctacggtccgcttccacacaacgtagctaggaaaatgacttacgtacaacacatgaaatcaagcaagtactgtctttgtccaatgggttacgaagtgaacagtccacgtatcgttgaagctatatactatgaatgcgtccctgtagtgatcgctgataacttcatgttaccgttcagcgatgtgctagattggtcagcgttctcagtggttgtaccggagaaggagattccacggctgaaggagatactattggagattcctatgaggagatatttgaagatgcagagtaacgtgaagatggttcagagacatttcttgtggagccctaaacctagaaagtacgatgtgtttcatatgatacttcactccatttggtttaaccttctcaatcaaaaccaaacttcttttgatgatcatattcccgattcctgacatcatccttaattatgtctgtacattatatatattaagaaaactatttccattg

SEQ ID NO: 85199 - protein, 542 aa, Arabidopsis thaliana
  peptide (1)..(542): Ceres Seq. ID no. 12679406
MVNIKSPLRLFIEESIKELIRGFRRQRIKWRNAFLLGSIMTTIVVLLHTPTFSVFSDEEETESSSSSPIYLNGSLHLNIHIVSSEAKVENFHTLRTRTPIVQLNASEASEAVLSRKRRKRKKRKKTKDDLILTDPPPAPRHVLSSSERRALSLPPKKALTYAKLEIQRAPEVINDTDLFAPLFRNLSVFKRSYELMELILKVYIYPDGDKPIFHEPHLNGIYASEGWFMKLMESNKQFVTKNPERAHLFYMPYSVKQLQKSIFVPGSHNIKPLSIFLRDYVNMLSIKYPFWNRTHGSDHFLVACHDWGPYTVNEHPELKRNAIKALCNADLSDGIFVPGKDVSLPETSIRNAGRPLRNIGNGNRVSQRPILAFFAGNLHGRVRPKLLKHWRNKDEDMKIYGPLPHNVARKMTYVQHMKSSKYCLCPMGYEVNSPRIVEAIYYECVPVVIADNFMLPFSDVLDWSAFSVVVPEKEIPRLKEILLEIPMRRYLKMQSNVKMVQRHFLWSPKPRKYDVFHMILHSIWFNLLNQNQTSFDDHIPDS

SEQ ID NO: 85200 - protein, 503 aa, Arabidopsis thaliana
  peptide (1)..(503): Ceres Seq. ID no. 12679407
MTTIVVLLHTPTFSVFSDEEETESSSSSPIYLNGSLHLNIHIVSSEAKVENFHTLRTRTPIVQLNASEASEAVLSRKRRKRKKRKKTKDDLILTDPPPAPRHVLSSSERRALSLPPKKALTYAKLEIQRAPEVINDTDLFAPLFRNLSVFKRSYELMELILKVYIYPDGDKPIFHEPHLNGIYASEGWFMKLMESNKQFVTKNPERAHLFYMPYSVKQLQKSIFVPGSHNIKPLSIFLRDYVNMLSIKYPFWNRTHGSDHFLVACHDWGPYTVNEHPELKRNAIKALCNADLSDGIFVPGKDVSLPETSIRNAGRPLRNIGNGNRVSQRPILAFFAGNLHGRVRPKLLKHWRNKDEDMKIYGPLPHNVARKMTYVQHMKSSKYCLCPMGYEVNSPRIVEAIYYECVPVVIADNFMLPFSDVLDWSAFSVVVPEKEIPRLKEILLEIPMRRYLKMQSNVKMVQRHFLWSPKPRKYDVFHMILHSIWFNLLNQNQTSFDDHIPDS

SEQ ID NO: 85201 - protein, 347 aa, Arabidopsis thaliana
  peptide (1)..(347): Ceres Seq. ID no. 12679408
MELILKVYIYPDGDKPIFHEPHLNGIYASEGWFMKLMESNKQFVTKNPERAHLFYMPYSVKQLQKSIFVPGSHNIKPLSIFLRDYVNMLSIKYPFWNRTHGSDHFLVACHDWGPYTVNEHPELKRNAIKALCNADLSDGIFVPGKDVSLPETSIRNAGRPLRNIGNGNRVSQRPILAFFAGNLHGRVRPKLLKHWRNKDEDMKIYGPLPHNVARKMTYVQHMKSSKYCLCPMGYEVNSPRIVEAIYYECVPVVIADNFMLPFSDVLDWSAFSVVVPEKEIPRLKEILLEIPMRRYLKMQSNVKMVQRHFLWSPKPRKYDVFHMILHSIWFNLLNQNQTSFDDHIPDS

SEQ ID NO: 85202 - DNA, 2617 bp, Arabidopsis thaliana
  misc_feature (1)..(2617): Ceres Seq. ID no. 12679420
  misc_feature (1)..(2617): Ortholog of  Ceres SEQ ID NO 14314423 as cited in SEQ ID NO 52352
agtttccatgaagtcttcttcttctcagagctacgatgttttccccaacttcagaggggaagatgtccgccactcattagtcagccaccttcgtaaggaacttgatcgcaaattcatcaatacattcaacgacaacaggatcgaaagaagccgcaaaataaccccagagctgttattggctatagaaaactcaaggatctcacttgtcgtcttctctaaaaactatgcttcttccacgtggtgcttagatgaattggtgaagatccaagagtgctatgagaaattggatcaaatggtgattcctattttctacaaagtagatccttctcatgttagaaaacagaccggagagtttggcatggtctttggggagacctgcaagggcagaacagagaatgagaagcgaaaatggatgcgagctctagcagaggtagcacatctagccggagaagatcttcggaactggcgtagcgaagcagaaatgcttgaaaatatcgccaaggatgtttcaaacaaactcttccccccatcaaataatttcagtgacttcgtcgggattgaagctcatatagaggcattgatatcaatgttgcgcttcgactccaagaaagcgcgaatgatagggatttgtgggccttctgaaactggtaagactactataggaagagctttatacagcagactcaaaagcgacttccaccatcgggctttcgtagcatataagagaaaaatacggagcgactatgaccagaagctgtattgggaagaacaatttctatcagaaattctttgtcagaaggatataaagatagaggaatgtggtgcggtggaacaacgactaaagcacacgaaagttcttattgttcttgatgatgttgatgatatagagctactaaaaacgttggtaggacgtatcagatggtttggatctgagagcaaaattgttgtgattactcaaaaaagggaacttctcaaggctcacaacattgcacatgtttatgaagtgggattcccatcagaagaactggctcatcaaatgttttgtcgatatgcttttgggaaaaactctccacctcatggtttcaacgagcttgcagatgaagctgcaaagattgccggtaatcgtcctaaagctctcaagtacgttggttcgtcttttagaagactagacaaggaacaatgggtgaagatgctatcggagttccgtagtaatgggaataaactaaaaatcagctatgatgagttagatggtaaaggtcaagattacgttgcgtgtttaaccaatggttcaaattcccaggtgaaggcagagtggatccacttggcactaggcgtgtctatattacttaacatccgcagtgacggaacgacaattctcaaacatttgagctacaatcgaagcatggcgcaacaagcaaaaatatggtggtatgaaaatttggaaagagtgtgcaagaagtacaatatatgtggcatagatagctcaactgatggtggtggttcaacgtatggacaatgttcaaattcccaatttcaaagaaacatggacgcaagccccgggggaaacaaaaccagtaatcaatccacaaaagattcaccgagagcttctcaagtagagaaggaaaagatcgagtactgtgagccacatgtatatataacacctgccatcttcagtgacggaaccagagctcccaaatacgtggagtctagtagccgaagagtaacccaagtgcaccacgccaaaacatggtggccggagaattgtgaaaaagtgtacgagaaccacaacaacatatatggcatagatagatcaattgacggtggtgataagtttgagggaaaaagtaaagttagtgacggtgggttagacggcaaagatcaaggttcaatgtatggacaaagttcaaattccgagcttcaaataaacatggacgcagacaataggagatgtgaacctgtgagtgagatgcttttcaaaaattacaatgtgtgttcgcctaatggtttaaccgatgtaaactgttcaaatccccagtctcaaagaaaattggacgcaagcctaaagaaagacaaaattgtgcatgagtggattcgaaccggtagtggcttcttttttgattttcagggcccaaaatctatagtgagtgctgctcaagtggacgagaaaaatttcgagtactgtgaacaaggtgtgtatataacacttggcatcctcagtggcggaattatagttctcaaacatttggagttcagccgaagaatggcgcaacaagcaaaagtttggtggtcggaaaattggataaaagtgtaccaggagcacaacatatgtggcatagataaatcatttgatggtaggtttgatgatagacgtgtcattcgtcaattaagaccaaactgaagcacggcctggcccttgtaaaagtcaggacttgagctagatacttaagccaagcagatctgtttggctaagtctggtcgggttagcgcgaaattgtcgaaatctgtttaataattgcattcagtgcaagtctttaatttgtacttcatggctttaatacactaattaaacattggatcatttttagttttttcttcttttcaaaatacatatttttct

SEQ ID NO: 85203 - protein, 798 aa, Arabidopsis thaliana
  peptide (1)..(798): Ceres Seq. ID no. 12679421
VSMKSSSSQSYDVFPNFRGEDVRHSLVSHLRKELDRKFINTFNDNRIERSRKITPELLLAIENSRISLVVFSKNYASSTWCLDELVKIQECYEKLDQMVIPIFYKVDPSHVRKQTGEFGMVFGETCKGRTENEKRKWMRALAEVAHLAGEDLRNWRSEAEMLENIAKDVSNKLFPPSNNFSDFVGIEAHIEALISMLRFDSKKARMIGICGPSETGKTTIGRALYSRLKSDFHHRAFVAYKRKIRSDYDQKLYWEEQFLSEILCQKDIKIEECGAVEQRLKHTKVLIVLDDVDDIELLKTLVGRIRWFGSESKIVVITQKRELLKAHNIAHVYEVGFPSEELAHQMFCRYAFGKNSPPHGFNELADEAAKIAGNRPKALKYVGSSFRRLDKEQWVKMLSEFRSNGNKLKISYDELDGKGQDYVACLTNGSNSQVKAEWIHLALGVSILLNIRSDGTTILKHLSYNRSMAQQAKIWWYENLERVCKKYNICGIDSSTDGGGSTYGQCSNSQFQRNMDASPGGNKTSNQSTKDSPRASQVEKEKIEYCEPHVYITPAIFSDGTRAPKYVESSSRRVTQVHHAKTWWPENCEKVYENHNNIYGIDRSIDGGDKFEGKSKVSDGGLDGKDQGSMYGQSSNSELQINMDADNRRCEPVSEMLFKNYNVCSPNGLTDVNCSNPQSQRKLDASLKKDKIVHEWIRTGSGFFFDFQGPKSIVSAAQVDEKNFEYCEQGVYITLGILSGGIIVLKHLEFSRRMAQQAKVWWSENWIKVYQEHNICGIDKSFDGRFDDRRVIRQLRPN

SEQ ID NO: 85204 - protein, 796 aa, Arabidopsis thaliana
  peptide (1)..(796): Ceres Seq. ID no. 12679422
MKSSSSQSYDVFPNFRGEDVRHSLVSHLRKELDRKFINTFNDNRIERSRKITPELLLAIENSRISLVVFSKNYASSTWCLDELVKIQECYEKLDQMVIPIFYKVDPSHVRKQTGEFGMVFGETCKGRTENEKRKWMRALAEVAHLAGEDLRNWRSEAEMLENIAKDVSNKLFPPSNNFSDFVGIEAHIEALISMLRFDSKKARMIGICGPSETGKTTIGRALYSRLKSDFHHRAFVAYKRKIRSDYDQKLYWEEQFLSEILCQKDIKIEECGAVEQRLKHTKVLIVLDDVDDIELLKTLVGRIRWFGSESKIVVITQKRELLKAHNIAHVYEVGFPSEELAHQMFCRYAFGKNSPPHGFNELADEAAKIAGNRPKALKYVGSSFRRLDKEQWVKMLSEFRSNGNKLKISYDELDGKGQDYVACLTNGSNSQVKAEWIHLALGVSILLNIRSDGTTILKHLSYNRSMAQQAKIWWYENLERVCKKYNICGIDSSTDGGGSTYGQCSNSQFQRNMDASPGGNKTSNQSTKDSPRASQVEKEKIEYCEPHVYITPAIFSDGTRAPKYVESSSRRVTQVHHAKTWWPENCEKVYENHNNIYGIDRSIDGGDKFEGKSKVSDGGLDGKDQGSMYGQSSNSELQINMDADNRRCEPVSEMLFKNYNVCSPNGLTDVNCSNPQSQRKLDASLKKDKIVHEWIRTGSGFFFDFQGPKSIVSAAQVDEKNFEYCEQGVYITLGILSGGIIVLKHLEFSRRMAQQAKVWWSENWIKVYQEHNICGIDKSFDGRFDDRRVIRQLRPN

SEQ ID NO: 85205 - protein, 701 aa, Arabidopsis thaliana
  peptide (1)..(701): Ceres Seq. ID no. 12679423
MVIPIFYKVDPSHVRKQTGEFGMVFGETCKGRTENEKRKWMRALAEVAHLAGEDLRNWRSEAEMLENIAKDVSNKLFPPSNNFSDFVGIEAHIEALISMLRFDSKKARMIGICGPSETGKTTIGRALYSRLKSDFHHRAFVAYKRKIRSDYDQKLYWEEQFLSEILCQKDIKIEECGAVEQRLKHTKVLIVLDDVDDIELLKTLVGRIRWFGSESKIVVITQKRELLKAHNIAHVYEVGFPSEELAHQMFCRYAFGKNSPPHGFNELADEAAKIAGNRPKALKYVGSSFRRLDKEQWVKMLSEFRSNGNKLKISYDELDGKGQDYVACLTNGSNSQVKAEWIHLALGVSILLNIRSDGTTILKHLSYNRSMAQQAKIWWYENLERVCKKYNICGIDSSTDGGGSTYGQCSNSQFQRNMDASPGGNKTSNQSTKDSPRASQVEKEKIEYCEPHVYITPAIFSDGTRAPKYVESSSRRVTQVHHAKTWWPENCEKVYENHNNIYGIDRSIDGGDKFEGKSKVSDGGLDGKDQGSMYGQSSNSELQINMDADNRRCEPVSEMLFKNYNVCSPNGLTDVNCSNPQSQRKLDASLKKDKIVHEWIRTGSGFFFDFQGPKSIVSAAQVDEKNFEYCEQGVYITLGILSGGIIVLKHLEFSRRMAQQAKVWWSENWIKVYQEHNICGIDKSFDGRFDDRRVIRQLRPN

SEQ ID NO: 85206 - DNA, 1412 bp, Arabidopsis thaliana
  misc_feature (1)..(1412): Ceres Seq. ID no. 12679432
  misc_feature (1)..(1412): Ortholog of  Ceres SEQ ID NO 13639243 as cited in SEQ ID NO 56820
  misc_feature (1)..(1412): Ortholog of  Ceres SEQ ID NO 13496409 as cited in SEQ ID NO 65697
cctttctacccatttcgtctccttcattttgacgttttctttagatctgttaataatcccatccatggcttggtctagtcactagtggtgttatctctctgtgtggaataaaaagcaaggttttttaatcacttggattgttttaagatatggcaactttgaacccttttgatttgttggatgatgatgctgaggatccaagccagctcgctgttgccatcgagaagattgataagtccaagaaatctggacaggtttcgagcttgcctgctaagtcagctcctaagcttccatcgaagccacttcctcctgctcaagccgtgagagaggcaaggagtgatgctccacgtggtggtggaggccgtggaggatttaaccgtggtcgtggtggttacaaccgtgatgatggtaacaatggatattcagggggatacactaaaccctcaggtgaaggagatgtttcaaagtcttcttacgagaggcgtggcggtggtgatggggaacgtcctcgaagggcctttgagcgtcgtagtggaactggcagagggagtgacttcaagcgtgacggatctggtcgtgggaattggggaactccaggggaagagatagctgctgagactgaagcagtagctggtgttgagactgagaaggatgttggagagaagccagctgttgatgatgtagctgctgatgctaacaaggaggatactgttgttgaggagaaagagcctgaggataaggaaatgactcttgatgagtatgagaaaatactcgaggagaagaaaaaggcacttcaatcattaactacctctgagaggaaagttgatacgaaagtgtttgaatcaatgcaacaactgtcaaacaagaagtctaatgatgaaatcttcatcaagctgggttctgataaggacaaacgcaaagatgacaaagaagagaaggctaagaaggctgtgagcatcaatgagtttctgaagccagcagagggtgggaactactaccgaggaggtcgtggtggccgtggacgtggtggtcgtggccgtggaggtgtttctagtggcgaatctggtggttaccgtaatgaagctgcaccggcaattggagatgctgctcagttcccatctcttgggggcaagtaagatccatccatgataacgtccacactcgtgcatcctcctttaggattttgtgcgaggatttactgtttactggtctctcgttgtcagatgtaaataattaggtgtcgtcgtcagtttttagattttatgcaaaactttacacttgttggtgttctttacttttgaaacagtacactcttcttaattttaccattttactcgttttgtgtttgttgttttcttatttatgaaacatgttttgagacggacatatctaatgttatcgggtttgagtct

SEQ ID NO: 85207 - protein, 328 aa, Arabidopsis thaliana
  peptide (1)..(328): Ceres Seq. ID no. 12679433
MATLNPFDLLDDDAEDPSQLAVAIEKIDKSKKSGQVSSLPAKSAPKLPSKPLPPAQAVREARSDAPRGGGGRGGFNRGRGGYNRDDGNNGYSGGYTKPSGEGDVSKSSYERRGGGDGERPRRAFERRSGTGRGSDFKRDGSGRGNWGTPGEEIAAETEAVAGVETEKDVGEKPAVDDVAADANKEDTVVEEKEPEDKEMTLDEYEKILEEKKKALQSLTTSERKVDTKVFESMQQLSNKKSNDEIFIKLGSDKDKRKDDKEEKAKKAVSINEFLKPAEGGNYYRGGRGGRGRGGRGRGGVSSGESGGYRNEAAPAIGDAAQFPSLGGK

SEQ ID NO: 85208 - DNA, 1400 bp, Arabidopsis thaliana
  misc_feature (1)..(1400): Ceres Seq. ID no. 12679452
  misc_feature (1)..(1400): Ortholog of  Ceres SEQ ID NO 15226533 as cited in SEQ ID NO 59723
atctgtcgtgttctgtttgttctcacttctcacttctcagatttttataaacatgaatgaaacctgaattgttccactaactctcagcaaaaatgcgatcactttacttaatcgtcttcatcgttattagtcttgttaaagcttcgaaaagcgatgatgggttttgttcagcgccttcgattgttgaatcggatgagaagacgaaccccatttattggaaagccacgaatccaacactctctccttcacacctccaagacttgcctggtttcacacgaagtgtatacaaacgagatcatgcgttaataacaccggaaagtcatgtatacagccctttacctgactggacaaacacattaggggcgtatttgatcacaccggcaacgggttcccattttgtcatgtacttggcgaaaatgaaagaaatgtcaagttcaggtttgcctccacaagacatagagcggtattattacttatatgagctctatctttaacatatgcttgcacttatgatctataatctgctttttaactcctttcaatattctgaatctttttcaagtcttatattcgtggtcgagggtgctgtgacactcactaacacatccagttcttcaaaaaaattgacggtatgatttgtacaaaggaaaatttaccacagtattcttctggttacatcacgttctgcccagatttgatggtgaaatggttgcaagatttctccattagttttatcattttctgctgataatccatttttcctgtaggttgattcatatgcgtacctacctccaaactttcaccattccttggactgtgttgagtctgcaacacttgttgtcttcgagcggaggtatgaatatctaggaagtcacaccacagagcttattgttggctccacagacaagcaaccactactcgagactcctggtgaggtttttgaactgcggaaacttcttccgatgtccgttgcttatgacttcaacatccatactatggattttcagcctggagagtttctgaatgttaaggaagttcattataaccagcatggtttgttgcttctggaggggcaaggcatttatcgcttgggtgataactggtatccagttcaggctggtgatgtcatatggatggctccttttgtccctcaatggtatgctgcactcggaaagactaggtctcggtatttgttgtacaaagatgtgaatcgaaatccattgtgatcaaagattgatatgactttgcagtaaaagtcagaatcttgttgttcagcttcttgtcttataaacgccatgtccactctaagcactagctacgtgagacttagttgtatgaatcttataacaattgtgaaaagaaacacattgataaatgatgaaatgactctctctctctcc

SEQ ID NO: 85209 - protein, 133 aa, Arabidopsis thaliana
  peptide (1)..(133): Ceres Seq. ID no. 12679453
MRSLYLIVFIVISLVKASKSDDGFCSAPSIVESDEKTNPIYWKATNPTLSPSHLQDLPGFTRSVYKRDHALITPESHVYSPLPDWTNTLGAYLITPATGSHFVMYLAKMKEMSSSGLPPQDIERYYYLYELYL

SEQ ID NO: 85210 - protein, 87 aa, Arabidopsis thaliana
  peptide (1)..(87): Ceres Seq. ID no. 12679454
MSVAYDFNIHTMDFQPGEFLNVKEVHYNQHGLLLLEGQGIYRLGDNWYPVQAGDVIWMAPFVPQWYAALGKTRSRYLLYKDVNRNPL

SEQ ID NO: 85211 - protein, 76 aa, Arabidopsis thaliana; identical to SEQ ID NO: 40476
  peptide (1)..(76): Ceres Seq. ID no. 12679455

SEQ ID NO: 85212 - DNA, 967 bp, Arabidopsis thaliana
  misc_feature (1)..(967): Ceres Seq. ID no. 12679464
  misc_feature (1)..(967): Ortholog of  Ceres SEQ ID NO 14302764 as cited in SEQ ID NO 67753
  misc_feature (1)..(967): Ortholog of  Ceres SEQ ID NO 14302291 as cited in SEQ ID NO 68180
attcacaccggacattttgaaatctcaacaagaaccaaaccaaacaacaaaaaaacattcttaataattatctttctgttatgtcgatgacggcggattctcaatctgattatgcttttcttgagtccatacgacgacacttactaggaggaatcggagccgatactcagtgagtcgacagcgagttcggttactcaatcttgtgtaaccggtcagagcattaaaccggtgtacggacgaaaccctagctttagcaaactgtatccttgcttcaccgagagctggggagatttgccgttgaaagaaaacgattctgaggatatgttagtttacggtatcctcaacgacgcctttcacggcggttgggagccgtcttcttcgtcttccgacgaagatcgtagctctttcccgagtgttaagatcgagactccggagagtttcgcggcggtggattctgttccggtcaagaaggagaagacgagtcctgtttcggcggcggtgacggcggcgaagggaaagcattatagaggagtgagacaaaggccgtgggggaaatttgcggcggagattagagacccggcgaagaacggagctagggtttggttaggaacgtttgagacggcggaggacgcggcgttggcttacgacagagctgctttcaggatgcgtggttcccgcgctttgttgaattttccgttgagagttaattcaggagaacccgacccggttcgaatcaagtccaagagatcttctttttcttcttctaacgagaacggagctccgaagaagaggagaacggtggccgccggtggtggaatggataagggattgacggtgaagtgcgaggttgttgaagtggcacgtggcgatcgtttattggttttataattttgatttttctttgttggatgattatatgattcttcaaaaaagaagaacgttaataaaaaaattcgtttattattat

SEQ ID NO: 85213 - protein, 188 aa, Arabidopsis thaliana; identical to SEQ ID NO: 27258
  peptide (1)..(188): Ceres Seq. ID no. 12679465

SEQ ID NO: 85214 - DNA, 1208 bp, Arabidopsis thaliana
  misc_feature (1)..(1208): Ceres Seq. ID no. 12679490
  misc_feature (1)..(1208): Ortholog of  Ceres SEQ ID NO 14311229 as cited in SEQ ID NO 53262
atcatcgacaaaacataaatactaatggagcaccaccaccagcatcaccgtcaccaccaacgcgacgacggagaagacgatcgtcaatcctttggagtaccaccgccacacgtcgatgctccgccacaacctcatggtctttaccagtcacagcctcattttgatccttacgcgcctactcctcaagctccggcgccttaccgatcagaaactcaattcgaaccccacgcgcctccgccttaccgatcagagccttactttgaaactccggcaccaccgccttcatttggtcatgtgagtcatgttggtcaccaatcacccaacgaatcttacccaccggaacaccaccgttacggaggttatcaacagccgtctaattccttactggaaagtcatggagatcacagtggagtcacgcacgtggctcaccatagctcaaatcagccccaatcgtcttctggtgtctaccacaagcctgatgagaatcgtctacctgataatcttgctggactcgccggaagagcaacggtgaaggtgtattccaaggcggagcctaactataatttgacgatcagagatggtaaggttattctcgccccagcggatccatctgatgaagcacagcattggtacaaagacgagaagtatagtactaaagtgaaggacgcagacggtcatccttgttttgctcttgtaaacaaagctactggtgaagcaatgaagcattctgtgggagctactcatcccgtgcatctgattcgatatgtgcctgataagcttgacgagtcagtactatggacagagagcaaggattttggcgatggatatcgcacaataagaatggtaaacaatacgaggctaaacgtggatgcatatcatggtgacagcaaatctggtggtgtacgtgatggcacgactatcgtcctctgggactggaacaaaggcgacaaccagctctggaagatctttcctttctgaaaattggcgtctggagtggtaaaaagttcctttgtgtgtgctgtatgaataagaaagaaacaaaactcagatttattcattgtttgtgtcttgtaaagacttgagtttgtgctgttggcatctgtaatctatcttacttgtattccaagtatgtttttacagatacattacatacactgtctatatgtgtatacttttttcctaatctattttgagatctttctttttcc

SEQ ID NO: 85215 - protein, 317 aa, Arabidopsis thaliana; identical to SEQ ID NO: 24994
  peptide (1)..(317): Ceres Seq. ID no. 12679491

SEQ ID NO: 85216 - DNA, 1533 bp, Arabidopsis thaliana
  misc_feature (1)..(1533): Ceres Seq. ID no. 12679518
  misc_feature (1)..(1533): Ortholog of  Ceres SEQ ID NO 15173990 as cited in SEQ ID NO 1070
atccacattttcttgcttaactgcagaacaacaccaaattcgaccctatcaagttttgattcgtgtctacatagaaagagtctcaattgttctgtccctggacttttttttgtttcgtttttcttgttaagatcgaaaactctgttttggtagatttttgtgttcttgattttgattcaagatggggaggctgtttgtggtgaatcttgaagggaagatctatagctgcaaacactgtaagactcatcttgctacttatgaagacatcatctccaaggttttgtcccttttccaatttcttgacttttctggagattattctaatgggtttgtgattaatctgtttttgttgtttttctgcatgctcctaaaatttgaaatatataatgatagatggttctctagaagatgttgtatgttgataagatgtggttgtatgacttatagaaatacttcaactttcttaacattctttttgttgtgtatttctcttctgcttggaatagggtcatgttatgtagacgagactgttaataaaacccctagatcactttcgaaattttcattttgagttactacattgttgaagtcatggatcagtacttgtattttgcccacttgccattaagcagataatgattacaaccacatagttttgaacattgagctcccctttagctgatcagaccacatagttttgtctttttgattctctctgtggtctaagatggattatctttatgcttcttgagaataacagagagttgagctattgagctttccctgattctgcatttgttgtttcttgagctaagactgtagtgtgttgtgtttttatgtttccttgttcagtcttttcactgcaagcatgggaaagcttatctcttcaataaggtgtaagtgtttcttatttctaaggaatacttgctaaattgggctggcttatctgatgatgattgatctggtttagtgccaatgtttccattggagagactgaagaaagactgatgatgactggtaaacatactgtggctgatattttctgtgtctcgtgtggatcaatcgttggctggaaatacgtaagcaaggcagacatcaaatgttcttaaagaacctatccgtgttcgattctttgggtgttaagttgtatgttctgttttatcaggagactgctcatgagaagaaccagaagtacaaagaaggaaaatcagtgcttgaaaggttttatttccaacatttcaggacttagttatgaattctactagcgtttgatcttgagattgttgtgacagatttaagatatcgggtcctgatgggagcaactattgggtgagtagccatggaaggcatataggtggaagtgatgcagatgatgcttgaatcatctctctctctctctattctctgatttgaccatttcatgtaaatgtaaattattcaacctccattccaatttcttgtaataagactaaccaatactctttcttctcttgacttattatgtctcagtaaataaaaaatctgattctgtct

SEQ ID NO: 85217 - protein, 129 aa, Arabidopsis thaliana
  peptide (1)..(129): Ceres Seq. ID no. 12679519
MGRLFVVNLEGKIYSCKHCKTHLATYEDIISKVLSLFQFLDFSGDYSNGFVINLFLLFFCMLLKFEIYNDRWFSRRCCMLIRCGCMTYRNTSTFLTFFLLCISLLLGIGSCYVDETVNKTPRSLSKFSF

SEQ ID NO: 85218 - protein, 69 aa, Arabidopsis thaliana
  peptide (1)..(69): Ceres Seq. ID no. 12679520
MLLKFEIYNDRWFSRRCCMLIRCGCMTYRNTSTFLTFFLLCISLLLGIGSCYVDETVNKTPRSLSKFSF

SEQ ID NO: 85219 - DNA, 1211 bp, Arabidopsis thaliana
  misc_feature (1)..(1211): Ceres Seq. ID no. 12679521
  misc_feature (1)..(1211): Ortholog of  Ceres SEQ ID NO 13593955 as cited in SEQ ID NO 54278
  misc_feature (1)..(1211): Ortholog of  Ceres SEQ ID NO 13597380 as cited in SEQ ID NO 64054
  misc_feature (1)..(1211): Ortholog of  Ceres SEQ ID NO 12625474 as cited in SEQ ID NO 64169
  misc_feature (1)..(1211): Ortholog of  Ceres SEQ ID NO 13597502 as cited in SEQ ID NO 64681
ggactcggactctctctctagtctctatatatatttatgcaattcccggaaaatctgttttttttttctttctctattgtcatcaacacactaaccaaaccatgaaccgtaatcaacacaaaccaatgtttgttacattcctcatcaatattcttctcctccaacttctaaaccttaccaatgcatcaccatccccaccaataacagccctatacgccttcggcgactccacagtggactccggtaacaacaattacattcccactcttttccagagcaaccatcctccctatggtaaatcctttccgtccaaactctccaccggaaggttctccgacggaaaactcgccaccgacttcatagtctcctctctaggactcaaacccactctaccagcttacctcaacccttcggtcaaacctgtagatcttttgaccggcgttagtttcgcctcggccggaggtggtttagatgatcggacggcaaagtcatcattgactattaccatggacaagcaatggagttacttcgaagaggcgctgggtaaaatgaagagtttggttggagactcggagactaatcgggtgattaagaatgctgtgttcgtcattagtgcggggactaatgatatgatctttaatgtttacgatcatgttcttgggagtttgatctccgtttcggattatcaagattctctactaaccaaagtcgaagtttttgtccagagactatacgaggcaggagcacgaaggattacaatagctggactaccaccaatcggatgccttccggtgcaagtaacacttactagcatcaatactcctcgcatcttccatcatcggatctgtacggaacatcagaacgatgattctcgggtttacaatcaaaagctacagaagctaatcttcggtctcagtcagaggtttcgaggttccaaagttctttaccttgatatctactctccgttaatagacatgatcaaacatcctcgtaaatacggactagaggaaacattgagaggatgttgtgggacagggctacttgaggcaggacctctatgccaaccattgtctcggacttgtgacgatgtttccaagtatttattctttgattctgtgcatccttcacagacggcttattctgtcatcgctagtttcgccttacaaaaattgtttcctctcctctaatttattatttttatttacaagact

SEQ ID NO: 85220 - protein, 394 aa, Arabidopsis thaliana
  peptide (1)..(394): Ceres Seq. ID no. 12679522
TRTLSLVSIYIYAIPGKSVFFFFLYCHQHTNQTMNRNQHKPMFVTFLINILLLQLLNLTNASPSPPITALYAFGDSTVDSGNNNYIPTLFQSNHPPYGKSFPSKLSTGRFSDGKLATDFIVSSLGLKPTLPAYLNPSVKPVDLLTGVSFASAGGGLDDRTAKSSLTITMDKQWSYFEEALGKMKSLVGDSETNRVIKNAVFVISAGTNDMIFNVYDHVLGSLISVSDYQDSLLTKVEVFVQRLYEAGARRITIAGLPPIGCLPVQVTLTSINTPRIFHHRICTEHQNDDSRVYNQKLQKLIFGLSQRFRGSKVLYLDIYSPLIDMIKHPRKYGLEETLRGCCGTGLLEAGPLCQPLSRTCDDVSKYLFFDSVHPSQTAYSVIASFALQKLFPLL

SEQ ID NO: 85221 - protein, 361 aa, Arabidopsis thaliana; identical to SEQ ID NO: 36696
  peptide (1)..(361): Ceres Seq. ID no. 12679523

SEQ ID NO: 85222 - protein, 353 aa, Arabidopsis thaliana; identical to SEQ ID NO: 36697
  peptide (1)..(353): Ceres Seq. ID no. 12679524

SEQ ID NO: 85223 - DNA, 1418 bp, Arabidopsis thaliana
  misc_feature (1)..(1418): Ceres Seq. ID no. 12679541
  misc_feature (1)..(1418): Ortholog of  Ceres SEQ ID NO 13594037 as cited in SEQ ID NO 55666
  misc_feature (1)..(1418): Ortholog of  Ceres SEQ ID NO 13657707 as cited in SEQ ID NO 66407
atgattggaaaagttgtggtctcggtggcctccatcctcttaatagtcggagttgccataggagtcgttgccttcataaacaaaaatggcgatgctaatctgtctccccaaatgaaagcggttcaaggaatttgccagtcgacatccgacaaagcctcatgtgtcaaaactctcgagccggtcaagagcgaggacccaaacaagctgatcaaggctttcatgctcgctacaaaagacgaattaaccaaatcgtctaacttcacgggtcaaaccgaagtaaacatgggctcgagcatctcgccaaacaacaaagccgttcttgattactgcaagagagttttcatgtacgctcttgaggatctcgctaccattattgaagaaatgggtgaagatcttagccagatcgggagcaaaatcgaccagctcaaacaatggttaatcggtgtttacaattaccaaactgattgtcttgacgatatcgaagaagatgatttaagaaaggcgattggtgagggcattgcaaactccaagattctcactaccaacgctattgacatcttccacactgtcgttagcgccatggccaagattaacaacaaggttgacgacttgaagaacatgacaggcggaatccccactcccggagcccctcctgttgttgatgaatctcccgtggccgacccagatggtcctgctcgtcgtcttcttgaagacattgacgagaccggaatcccaacatgggtttcaggtgctgacaggaagctcatggctaaggctggacgtggccgtagaggcggccgcggaggcggtgctagggtcagaacgaactttgtggtggctaaggatggaagcggacagtttaagacggttcaacaagccgttgatgcttgtcctgagaataaccgaggccgatgcatcatctacatcaaggccggtctctacagagagcaagtaatcatccctaagaagaagaacaacatcttcatgtttggagatggtgcaagaaagaccgtcatttcttacaacagaagtgttgctctcagccgtggaaccaccacatccctcagtgccacagttcaggttgaatcggaaggattcatggcgaaatggatgggattcaagaacaccgccggtccaatgggacaccaagccgcggctatccgagtgaacggagaccgtgccgtgatcttcaactgcagattcgacggttatcaagacacattgtacgttaacaacggtcgtcagttctacagaaactgtgtggtctcgggaacagtagacttcatcttcggcaaatccgcaaccgtgatccaaaacacactaattgttgtccgtaaaggaagcaagggacaatacaacacggtcacagccgatggaaacgaattgggcttagggatgaaaattggtgtatgaaattg

SEQ ID NO: 85224 - protein, 470 aa, Arabidopsis thaliana
  peptide (1)..(470): Ceres Seq. ID no. 12679542
MIGKVVVSVASILLIVGVAIGVVAFINKNGDANLSPQMKAVQGICQSTSDKASCVKTLEPVKSEDPNKLIKAFMLATKDELTKSSNFTGQTEVNMGSSISPNNKAVLDYCKRVFMYALEDLATIIEEMGEDLSQIGSKIDQLKQWLIGVYNYQTDCLDDIEEDDLRKAIGEGIANSKILTTNAIDIFHTVVSAMAKINNKVDDLKNMTGGIPTPGAPPVVDESPVADPDGPARRLLEDIDETGIPTWVSGADRKLMAKAGRGRRGGRGGGARVRTNFVVAKDGSGQFKTVQQAVDACPENNRGRCIIYIKAGLYREQVIIPKKKNNIFMFGDGARKTVISYNRSVALSRGTTTSLSATVQVESEGFMAKWMGFKNTAGPMGHQAAAIRVNGDRAVIFNCRFDGYQDTLYVNNGRQFYRNCVVSGTVDFIFGKSATVIQNTLIVVRKGSKGQYNTVTADGNELGLGMKIGV

SEQ ID NO: 85225 - protein, 433 aa, Arabidopsis thaliana
  peptide (1)..(433): Ceres Seq. ID no. 12679543
MKAVQGICQSTSDKASCVKTLEPVKSEDPNKLIKAFMLATKDELTKSSNFTGQTEVNMGSSISPNNKAVLDYCKRVFMYALEDLATIIEEMGEDLSQIGSKIDQLKQWLIGVYNYQTDCLDDIEEDDLRKAIGEGIANSKILTTNAIDIFHTVVSAMAKINNKVDDLKNMTGGIPTPGAPPVVDESPVADPDGPARRLLEDIDETGIPTWVSGADRKLMAKAGRGRRGGRGGGARVRTNFVVAKDGSGQFKTVQQAVDACPENNRGRCIIYIKAGLYREQVIIPKKKNNIFMFGDGARKTVISYNRSVALSRGTTTSLSATVQVESEGFMAKWMGFKNTAGPMGHQAAAIRVNGDRAVIFNCRFDGYQDTLYVNNGRQFYRNCVVSGTVDFIFGKSATVIQNTLIVVRKGSKGQYNTVTADGNELGLGMKIGV

SEQ ID NO: 85226 - protein, 397 aa, Arabidopsis thaliana
  peptide (1)..(397): Ceres Seq. ID no. 12679544
MLATKDELTKSSNFTGQTEVNMGSSISPNNKAVLDYCKRVFMYALEDLATIIEEMGEDLSQIGSKIDQLKQWLIGVYNYQTDCLDDIEEDDLRKAIGEGIANSKILTTNAIDIFHTVVSAMAKINNKVDDLKNMTGGIPTPGAPPVVDESPVADPDGPARRLLEDIDETGIPTWVSGADRKLMAKAGRGRRGGRGGGARVRTNFVVAKDGSGQFKTVQQAVDACPENNRGRCIIYIKAGLYREQVIIPKKKNNIFMFGDGARKTVISYNRSVALSRGTTTSLSATVQVESEGFMAKWMGFKNTAGPMGHQAAAIRVNGDRAVIFNCRFDGYQDTLYVNNGRQFYRNCVVSGTVDFIFGKSATVIQNTLIVVRKGSKGQYNTVTADGNELGLGMKIGV

SEQ ID NO: 85227 - DNA, 5221 bp, Arabidopsis thaliana
  misc_feature (1)..(5221): Ceres Seq. ID no. 12679557
  misc_feature (1)..(5221): Ortholog of  Ceres SEQ ID NO 15170434 as cited in SEQ ID NO 52810
  misc_feature (1)..(5221): Ortholog of  Ceres SEQ ID NO 14307069 as cited in SEQ ID NO 54322
attctcaaatttgtattttccagattttccagaaaaatctcacagcggtaagaaaaaaagaaaaagaagagtcagtggtcttgttgtttcgttcttccttgttcgctcgacctggccgatgtctaaccaggaccaggagacgcgcacacaattcgcagaatgtaacgttgttgctactcttcttctctcgtttctgtgacctaagaaccattcgaattcgctgctccgtctctctggtttcgtccttgaaaaatcgtctactcgagattcctttctctagccacccatctcaactgctgagtagcaagctgtatttttgttgacctaactaaaccctagcttcttcgagtggcatttttttgacgagtgcttctcttccttatcatggactggatacacaaatctactccttttatggaaccttcgaatttggcaaaactggttcaaggaaatgttcctcttcagccacatgacagccattcttcgctaactgatctagatatggaccttagagaagtctatttcctgattttacattttctttctattggcccctgcgaacgaacctttggccacttgagagacgaaattttggaaaaagggcttttaccccgtagatatcattcctggtggtcaagaagtggcatttatagcgggcgtgctgatgatgatggcatctccctccccttgagttatgataatttgatagagaggtatcctcatatcgaaaaggatcacttggtgaagcttctcaaacaactaattttaaacccgtctttcccttcacacatgagagttgaaggaaatgctcctaatgctgctgatgttccaacactattgggatctggcaccttttcacttgtggatcgtagtaacaatatagagtctcagaaagctaggcatgttgcgtcatacttacgctggccgcatatgcatgccgatcaagtgcgtggcctaagtctcagagaaattggaggaggtttcaggaaacaccaccgtgctccgtccattctttcagcatgtcatgctattgcaaaaccatcaacaatggttcaaaagatgcaaaatataaagaagctcagaggacatcgtaatgctgtctactgcgctatatttgatcgttctggaagatatgttatcactggctccgatgaccggcttgtcaaaatttggtcaatggaaactgcgctttgcttggctagctgccgtgggcatgaaggtgacattacagacttggccgttagttcaaacaatgctttggttgcttcagcttcaaacgattttgtgattcgagtgtggcggttgcctgatggaatgccaatttctgtattgcggggacacactggagctgttaccgcaattgcattcagtcccagacaggcgtctgtttaccaacttttatcgtcatcagatgatggaacctgtcgtatctgggatgctaggtattctcagtggctcccacgaatctatgttccaagtccttcagatgctaacactggatccacgagcaatgcatctcagagtcatcaaatattatgttgtgcatacaatgctaatggaaccattttcgtcacgggtagctctgacagcaatgcaagggtttggagtgcctcaaaacctaacttggatgatgctgaacagccgactcatgagctggatgttctacggggccatgagaatgatgtcaactatgtgcaatttagtggttgtgctgtggctccaaaatcttcaacagctgatgctctgaaggaagatagctacccaaagtttaagaattcctggttttgtcatgacaatatagtaacctgctctcgcgatggtagtgcaattatatggactccaagatcacgtaaattccatgggaaatctggacgctggatgaaaggatatcatctgaaggttccacctcctccacttcctccacaacctcctcgaggaggcccacgtcaaaggtttcttccaacaccacggggtgttaatatgattatatggagcttggataatcgttttgtacttgccgctatcatggattgcaggatttgtgtttggaatgctgctgatggtagcttagtgcattgtttaactggtcacagtgaatcgtcttatgtcttggatgtccatcctttcaatcctcggattgctatgagcgctggctatgatgggaaaacaatcatctgggatatatgggagggtataccaatcaaagtgtacgaaatcgggagatttaagttggttgatggaaagttttcacaagatgggacatctattgtgctttcagatgatgttggccagatatattttctaaacacaggacaaggagagtctcaaaagaatgcaaaatacgaccagttcttccttggtgattatcgtcctcttattcgagataccaatggacatgttcttgatcaggagacgcagctacttcctcatcggaggaaccttcaggatcttctttgtgattcaagtatgattccgtatccagaacctgaccagacaatgtttcagcaacgcagacttggtgcattaggagttgaatggcgtccttcctcgataaagttttctgttggccctgattttagtttaggtcaagattatataatgcctcctttggctgatctggatagactgattgagccattgcctgagtttatagatgctatgtactgggaaccagaacacgaagttctgagtgacgacaatgattcagagtataatgctgaagtttcctctgatggggctagggcaagcccatgttccaactcttcaaatgaacttgagtgcagctccgaggacagtgacgttgaaaatattcacgaaagtagctatcattggaaaagaagaagaaaacatcctaaggtcaacgtctctacttcatctggaagacgtgataagaggattttggatgagaatgatagctcgaattctggaattaagagaaccaagaaccgaagaattgtcgtgaaggcttcaaaaagaaaacattctgatgtcaaagcatcacggccgcagagagcagcagctcaaaatgctcgatccttgctttctaaaatttctggaagctcttcggatgaagttgatgatgataatgattcatccaacagtgaatctgatagaagcatacccactttgcgacagttggacaaaccatctcagatgctggaatctctttcaaatgacaaacagaagaaaagattgattgtaaagatctctgttaagaagccagcagagtctatgggaagcaagggagatgtgataaatcaggctgatttagagcaactatcttccaaacctttggaggagaatcacagagtgattggtatatattccagagaacccgggtcaagttctgtagatgcaaaaggtgattcagggtgtcagagtattccctactctatgaatacgccacagagagaaaaggccgataatcagttgataagatcttcagatcaagaccagaatatgtgcaagtggagggaagagattcctgtttgtgaacctaccgaattaactgcgcctgagaacatagaagaagcccaaccattttatggggatgaagctgatgagattcttccaaagaaagttcgacgactgaggttaaagcttcggcatcccaacagtcctcgaaaactagaacctgatgaggtggcagatgatttggcagatggtggagatgggtttgcatccatagctccctctttcatgaatccgattatggattctgaacctgtgatagatagcgttagagattcttctgcacataactttgagtttggagaagctacagctgatgtgatacgtaggaaaagatccataagaagtgaatctagtacaagaaatagcgcattacgcataaggttgggctctggatctgtagacaaaataaagaaacaagggattccttccacaagcgtgtatgatgatgcatcacttgaagaatggccttctacctcaaaagctgggtccaggtctagatctgcaagcgtcagcaaaccaagtcttcatactgggataaggttgaatagtgtctcaggaaaaatctcatggttattgttgtctgaacacgaggaaggctgccgttatatacctcagctaggggatgaagttatttacttcaagcagggtcatcaagagttccttaaaactaaagaattaaatgacagggaccgatcaaggtaccttccccgaaacctaggagcagtagagatttgcaaagtcgagaaacttaactatgatacatatcctggttctggagatagctgctgcaaaatgaccctcagggttctggattcttcttcatcacatgcctcccgcaaagagtttcaactgacacttcctgagctcattaatttccctgattttattgtggagaagactcgatacgacgctgcaattcaaacaaactggaaaattggtaatgagtgccgtgtgtggtggagagacgcaaccggtgaaggcggggcttggtgggaaggtaggattgagtcttcacaagtaaaatccactgacttcccagagagtccatgggaaagatacagagttgtctatgaaacaggggaaacgagtcttcacagcccgtgggagtttgacaatcccgagtttccctgggaaaaatctaccatcgaagatgagagaagagagaaactgctttcattatttgctggactagtaaaatcaatcagcaagcatcaggatagttacgggatccaaaagctaaacgaagcagctcaaaagatggatttctgcaataggttcccggttccattataccctgagctgattcacgaaagactagagaatcagtactacagaagtattgaatcgtttaaacacgacgtggatgcaatgctctcaaatgcggagttgtatttcgttagaagtgcacatatgctttcgaagataaagcgactgcgagataaattgacaaaaacgttaagaaagctgatctgaggataaggcaacaccggtatgcttcttttggtcctttcttgatcttgtaaacacgttaggctgcggcagttttttcattatatagcgaagagagtgttaaaaagaaaatttaaaagttttcactctaaacaaaagaagtcggttttgtttgtagtaacccgacacaggtttcatgtatagttttagtaccacatgtctgtaaccgaaatttactctgttgtcacaaaaatgacatcataagtctaattttattacaagaagattattatcattt

SEQ ID NO: 85228 - protein, 1520 aa, Arabidopsis thaliana
  peptide (1)..(1520): Ceres Seq. ID no. 12679558
MDWIHKSTPFMEPSNLAKLVQGNVPLQPHDSHSSLTDLDMDLREVYFLILHFLSIGPCERTFGHLRDEILEKGLLPRRYHSWWSRSGIYSGRADDDGISLPLSYDNLIERYPHIEKDHLVKLLKQLILNPSFPSHMRVEGNAPNAADVPTLLGSGTFSLVDRSNNIESQKARHVASYLRWPHMHADQVRGLSLREIGGGFRKHHRAPSILSACHAIAKPSTMVQKMQNIKKLRGHRNAVYCAIFDRSGRYVITGSDDRLVKIWSMETALCLASCRGHEGDITDLAVSSNNALVASASNDFVIRVWRLPDGMPISVLRGHTGAVTAIAFSPRQASVYQLLSSSDDGTCRIWDARYSQWLPRIYVPSPSDANTGSTSNASQSHQILCCAYNANGTIFVTGSSDSNARVWSASKPNLDDAEQPTHELDVLRGHENDVNYVQFSGCAVAPKSSTADALKEDSYPKFKNSWFCHDNIVTCSRDGSAIIWTPRSRKFHGKSGRWMKGYHLKVPPPPLPPQPPRGGPRQRFLPTPRGVNMIIWSLDNRFVLAAIMDCRICVWNAADGSLVHCLTGHSESSYVLDVHPFNPRIAMSAGYDGKTIIWDIWEGIPIKVYEIGRFKLVDGKFSQDGTSIVLSDDVGQIYFLNTGQGESQKNAKYDQFFLGDYRPLIRDTNGHVLDQETQLLPHRRNLQDLLCDSSMIPYPEPDQTMFQQRRLGALGVEWRPSSIKFSVGPDFSLGQDYIMPPLADLDRLIEPLPEFIDAMYWEPEHEVLSDDNDSEYNAEVSSDGARASPCSNSSNELECSSEDSDVENIHESSYHWKRRRKHPKVNVSTSSGRRDKRILDENDSSNSGIKRTKNRRIVVKASKRKHSDVKASRPQRAAAQNARSLLSKISGSSSDEVDDDNDSSNSESDRSIPTLRQLDKPSQMLESLSNDKQKKRLIVKISVKKPAESMGSKGDVINQADLEQLSSKPLEENHRVIGIYSREPGSSSVDAKGDSGCQSIPYSMNTPQREKADNQLIRSSDQDQNMCKWREEIPVCEPTELTAPENIEEAQPFYGDEADEILPKKVRRLRLKLRHPNSPRKLEPDEVADDLADGGDGFASIAPSFMNPIMDSEPVIDSVRDSSAHNFEFGEATADVIRRKRSIRSESSTRNSALRIRLGSGSVDKIKKQGIPSTSVYDDASLEEWPSTSKAGSRSRSASVSKPSLHTGIRLNSVSGKISWLLLSEHEEGCRYIPQLGDEVIYFKQGHQEFLKTKELNDRDRSRYLPRNLGAVEICKVEKLNYDTYPGSGDSCCKMTLRVLDSSSSHASRKEFQLTLPELINFPDFIVEKTRYDAAIQTNWKIGNECRVWWRDATGEGGAWWEGRIESSQVKSTDFPESPWERYRVVYETGETSLHSPWEFDNPEFPWEKSTIEDERREKLLSLFAGLVKSISKHQDSYGIQKLNEAAQKMDFCNRFPVPLYPELIHERLENQYYRSIESFKHDVDAMLSNAELYFVRSAHMLSKIKRLRDKLTKTLRKLI

SEQ ID NO: 85229 - protein, 1510 aa, Arabidopsis thaliana
  peptide (1)..(1510): Ceres Seq. ID no. 12679559
MEPSNLAKLVQGNVPLQPHDSHSSLTDLDMDLREVYFLILHFLSIGPCERTFGHLRDEILEKGLLPRRYHSWWSRSGIYSGRADDDGISLPLSYDNLIERYPHIEKDHLVKLLKQLILNPSFPSHMRVEGNAPNAADVPTLLGSGTFSLVDRSNNIESQKARHVASYLRWPHMHADQVRGLSLREIGGGFRKHHRAPSILSACHAIAKPSTMVQKMQNIKKLRGHRNAVYCAIFDRSGRYVITGSDDRLVKIWSMETALCLASCRGHEGDITDLAVSSNNALVASASNDFVIRVWRLPDGMPISVLRGHTGAVTAIAFSPRQASVYQLLSSSDDGTCRIWDARYSQWLPRIYVPSPSDANTGSTSNASQSHQILCCAYNANGTIFVTGSSDSNARVWSASKPNLDDAEQPTHELDVLRGHENDVNYVQFSGCAVAPKSSTADALKEDSYPKFKNSWFCHDNIVTCSRDGSAIIWTPRSRKFHGKSGRWMKGYHLKVPPPPLPPQPPRGGPRQRFLPTPRGVNMIIWSLDNRFVLAAIMDCRICVWNAADGSLVHCLTGHSESSYVLDVHPFNPRIAMSAGYDGKTIIWDIWEGIPIKVYEIGRFKLVDGKFSQDGTSIVLSDDVGQIYFLNTGQGESQKNAKYDQFFLGDYRPLIRDTNGHVLDQETQLLPHRRNLQDLLCDSSMIPYPEPDQTMFQQRRLGALGVEWRPSSIKFSVGPDFSLGQDYIMPPLADLDRLIEPLPEFIDAMYWEPEHEVLSDDNDSEYNAEVSSDGARASPCSNSSNELECSSEDSDVENIHESSYHWKRRRKHPKVNVSTSSGRRDKRILDENDSSNSGIKRTKNRRIVVKASKRKHSDVKASRPQRAAAQNARSLLSKISGSSSDEVDDDNDSSNSESDRSIPTLRQLDKPSQMLESLSNDKQKKRLIVKISVKKPAESMGSKGDVINQADLEQLSSKPLEENHRVIGIYSREPGSSSVDAKGDSGCQSIPYSMNTPQREKADNQLIRSSDQDQNMCKWREEIPVCEPTELTAPENIEEAQPFYGDEADEILPKKVRRLRLKLRHPNSPRKLEPDEVADDLADGGDGFASIAPSFMNPIMDSEPVIDSVRDSSAHNFEFGEATADVIRRKRSIRSESSTRNSALRIRLGSGSVDKIKKQGIPSTSVYDDASLEEWPSTSKAGSRSRSASVSKPSLHTGIRLNSVSGKISWLLLSEHEEGCRYIPQLGDEVIYFKQGHQEFLKTKELNDRDRSRYLPRNLGAVEICKVEKLNYDTYPGSGDSCCKMTLRVLDSSSSHASRKEFQLTLPELINFPDFIVEKTRYDAAIQTNWKIGNECRVWWRDATGEGGAWWEGRIESSQVKSTDFPESPWERYRVVYETGETSLHSPWEFDNPEFPWEKSTIEDERREKLLSLFAGLVKSISKHQDSYGIQKLNEAAQKMDFCNRFPVPLYPELIHERLENQYYRSIESFKHDVDAMLSNAELYFVRSAHMLSKIKRLRDKLTKTLRKLI

SEQ ID NO: 85230 - protein, 1481 aa, Arabidopsis thaliana
  peptide (1)..(1481): Ceres Seq. ID no. 12679560
MDLREVYFLILHFLSIGPCERTFGHLRDEILEKGLLPRRYHSWWSRSGIYSGRADDDGISLPLSYDNLIERYPHIEKDHLVKLLKQLILNPSFPSHMRVEGNAPNAADVPTLLGSGTFSLVDRSNNIESQKARHVASYLRWPHMHADQVRGLSLREIGGGFRKHHRAPSILSACHAIAKPSTMVQKMQNIKKLRGHRNAVYCAIFDRSGRYVITGSDDRLVKIWSMETALCLASCRGHEGDITDLAVSSNNALVASASNDFVIRVWRLPDGMPISVLRGHTGAVTAIAFSPRQASVYQLLSSSDDGTCRIWDARYSQWLPRIYVPSPSDANTGSTSNASQSHQILCCAYNANGTIFVTGSSDSNARVWSASKPNLDDAEQPTHELDVLRGHENDVNYVQFSGCAVAPKSSTADALKEDSYPKFKNSWFCHDNIVTCSRDGSAIIWTPRSRKFHGKSGRWMKGYHLKVPPPPLPPQPPRGGPRQRFLPTPRGVNMIIWSLDNRFVLAAIMDCRICVWNAADGSLVHCLTGHSESSYVLDVHPFNPRIAMSAGYDGKTIIWDIWEGIPIKVYEIGRFKLVDGKFSQDGTSIVLSDDVGQIYFLNTGQGESQKNAKYDQFFLGDYRPLIRDTNGHVLDQETQLLPHRRNLQDLLCDSSMIPYPEPDQTMFQQRRLGALGVEWRPSSIKFSVGPDFSLGQDYIMPPLADLDRLIEPLPEFIDAMYWEPEHEVLSDDNDSEYNAEVSSDGARASPCSNSSNELECSSEDSDVENIHESSYHWKRRRKHPKVNVSTSSGRRDKRILDENDSSNSGIKRTKNRRIVVKASKRKHSDVKASRPQRAAAQNARSLLSKISGSSSDEVDDDNDSSNSESDRSIPTLRQLDKPSQMLESLSNDKQKKRLIVKISVKKPAESMGSKGDVINQADLEQLSSKPLEENHRVIGIYSREPGSSSVDAKGDSGCQSIPYSMNTPQREKADNQLIRSSDQDQNMCKWREEIPVCEPTELTAPENIEEAQPFYGDEADEILPKKVRRLRLKLRHPNSPRKLEPDEVADDLADGGDGFASIAPSFMNPIMDSEPVIDSVRDSSAHNFEFGEATADVIRRKRSIRSESSTRNSALRIRLGSGSVDKIKKQGIPSTSVYDDASLEEWPSTSKAGSRSRSASVSKPSLHTGIRLNSVSGKISWLLLSEHEEGCRYIPQLGDEVIYFKQGHQEFLKTKELNDRDRSRYLPRNLGAVEICKVEKLNYDTYPGSGDSCCKMTLRVLDSSSSHASRKEFQLTLPELINFPDFIVEKTRYDAAIQTNWKIGNECRVWWRDATGEGGAWWEGRIESSQVKSTDFPESPWERYRVVYETGETSLHSPWEFDNPEFPWEKSTIEDERREKLLSLFAGLVKSISKHQDSYGIQKLNEAAQKMDFCNRFPVPLYPELIHERLENQYYRSIESFKHDVDAMLSNAELYFVRSAHMLSKIKRLRDKLTKTLRKLI

SEQ ID NO: 85231 - DNA, 1890 bp, Arabidopsis thaliana
  misc_feature (1)..(1890): Ceres Seq. ID no. 12679571
  misc_feature (1)..(1890): Ortholog of  Ceres SEQ ID NO 13594080 as cited in SEQ ID NO 55001
  misc_feature (1)..(1890): Ortholog of  Ceres SEQ ID NO 13587495 as cited in SEQ ID NO 0
gatatgtgtgatatctctttgtcccccatctattaatctcctcctccgcatcgtcgccgtgcacttccccacctcttccggcggatatgatgagcattgtatcaagtcatcatcactgtcaacaatctgttatacacgaacgtagcggtataggaacaatatctaaggtttcttgttcgagatattgcggtccgtgtttctctggacgactggctttctctcatagcctctgcttgaagactacttatgggaaaactgataggagaaagttttcaagaatttgcagtattgtggatgatgaggggaatctagataattcggatgacgaggaaaaggaatcactcgatgataaaactaaaagggtatgtatgagaaatctataagctttgtaaactccggccattttttgctgtcctctaaggtgaagtcatgacttgacctttaagaactgagacttggtttccctgtgctttatacactagaattatattaaacagtcaatgtggttttaatccttgttgtacatgaaagcctcaaactctctagttcgtgagattacttagaatgttgatctactcctgcttgatcctggaaaaagtgcgtaactaatttgatttcttgagtccttttgatgtctaaatgtttgtccatctctgtcatggcttagtgacacagcaagtaaacaagcgttttgtttaaatttattggttgcttgatatcatctaatcatttagaattactttttttttctttttctttagcaagcgaatgatatgaatcgggctaatcttgaaagaatggttgggtcagatgattctgcatttaacggcttagatcttgcaaccctcatcagacagaagtatggaaaatcttatgatgttcaactcatcaagaaggtatgcccttctgtattcaagtgtgtttgtgattctgtatcgtagaaagaagttaagacctccaatcatcttcatttcattgcatgaatacagaatcagcttttacgaaattcagttgatcattttccttttcattttgagatttttggtgtgagctttattttatcaatgtggaaagatttgtcgctttagaagctaaaaatataaatcatagttcttagatgtgattaatgtaggagttcatggggaagaatcttcttgcaatgaatgtcatgtggaagtacagagaacaggtaagagaatcctttgctgtatacttgatcacagaagcctaatgatatgatagttcaattgattttagtgtacttgtttggactttagataattatgatcttcgttttccatatcattcagatttggtatgagaatctttgccacatagaaagatgaagtgtatatccatattttgttggtatagttcttgcttttgcaagtcaatccttgtaagctaattcacctttatatatttcttgcttcttcttcaacgcctagaggtcttttcctctaaccgaagaagaatatatacttagacttgacgatgtagccaacatgttgaaatgctggggagcagtctcacatatccgtagcagcctagcaaagtcgaaggagcgacctcggatagggaaggctgtcagcattttcatagacatggattcgacagggggaagagcaaatgaatggatttacaagtaaaaatcgaccggtttgcagctgctaaaccaagaaatcaaaaggttttgtctctacgtttatcgtcatcaattcattttgaaggctcttcagtgatggttgcctgcagaaaccgaggtttttgctatatttgatgtccaaatcaggtagtatatatgtacatgtgtgtattaagtagacacaaatctttacttgaactctctgtgtaaaatatctccatgtgttgaaattcaatcatctttgt

SEQ ID NO: 85232 - protein, 98 aa, Arabidopsis thaliana; identical to SEQ ID NO: 37964
  peptide (1)..(98): Ceres Seq. ID no. 12679572

SEQ ID NO: 85233 - protein, 97 aa, Arabidopsis thaliana; identical to SEQ ID NO: 37965
  peptide (1)..(97): Ceres Seq. ID no. 12679573

SEQ ID NO: 85234 - protein, 62 aa, Arabidopsis thaliana; identical to SEQ ID NO: 37966
  peptide (1)..(62): Ceres Seq. ID no. 12679574

SEQ ID NO: 85235 - DNA, 1696 bp, Arabidopsis thaliana
  misc_feature (1)..(1696): Ceres Seq. ID no. 12679575
  misc_feature (1)..(1696): Ortholog of  Ceres SEQ ID NO 13502874 as cited in SEQ ID NO 66298
  misc_feature (1)..(1696): Ortholog of  Ceres SEQ ID NO 12614124 as cited in SEQ ID NO 68392
aggaaaccaaaggaacctcgacttcactatgatttacctccgagccctccgactcttcccatcattggtcatcttcaccttcttctctctgttctagtccacagatctttacagacactctccaccaagtatgggtctattctctatcttcgcgtcttcagtttccctgtagccctcgtctcctcagcatctattgcttatgagatcttcagggaacacgacgtgaacatctcgtctcgtggtttccctcctaccgatgattccctttttgctggatctttcagcttcacctctgctccctatggagattactggaagttcatgaagaagctcctggtcacgaacttgcttggaccccaggcactcgagcggtcacgaggattccgtgcagatgagctagatctgttttacgagaacctgttggataaagcgatgaagaaggagagcgtggatatctgtgtggaggcgttgaagctcagtaacaacagcatctgcaagatgatcatggggaggagttgttcagaggagaatggtgaggcagagagagttagggctttggctacccagttagatggcttgacgaagaagatcttattggcgaacatgttgcgtgcggggtttaaaaagcttgttgtctcactgtttagaaaggaaatgatggatgtttccagcagatttgatgagctgctcgaaaggatccttgtggaacatgaagataaactggacatgcatcatcaaggtacagacttagtggacgcgttgttggcagcttgtcgggacaaaaatgcagagtataagatctctaggaaccatatcaagtcgtttttcgcggatctcttatttgcaagcactgacacctttgtgcaaacaacacagtggacagtggcggagatcattaataaccctaatgttcttgagagattgagaggagaaatcgattccgtggtcgggaaagcaaggttgattcaagaaactgatttgccaaacctcccttatttgcaagcggtggtcaaggaagggctaagactgcatccgccggggcctctctttgcaaggttctcccaagaagggtgtaggatcggagggttctatgtaccggagaaaacaacattaatgattaatgcttatgctgtgatgagagattctgattcttgggaagatcctgatgagtttaaaccagagaggtttctagcttcgtcaagatcagagcaggaaaaggagagaagagagcaagcaattaagtacattgctttcggaagcggacgaagaagctgtcctggagaaaatctagcatatatctttttaggaactgcaattggagtgatggtacagggatttgagtggagaatcaaagaagagaaagttaacatggaagaggctaatgtaggactgagcttgaccatggcttatcctcttaaggtcactcctgttcctcgaaccctagtccccttaactcagaatccactgaaccggagttcatgaatctttggtaagtaattaggtagccttgtttttacgttaccgtgtctgagtttactggtttagtttggctaatgtgtgaaaccgtaaacaattgtgttgttattcggatttatttgtggattggttcatatatggggttatcttgaaagcagcaaactttagcttcttcatgttacttggttcaatggatttgaaggatgccagttggagtagc

SEQ ID NO: 85236 - protein, 493 aa, Arabidopsis thaliana
  peptide (1)..(493): Ceres Seq. ID no. 12679576
RKPKEPRLHYDLPPSPPTLPIIGHLHLLLSVLVHRSLQTLSTKYGSILYLRVFSFPVALVSSASIAYEIFREHDVNISSRGFPPTDDSLFAGSFSFTSAPYGDYWKFMKKLLVTNLLGPQALERSRGFRADELDLFYENLLDKAMKKESVDICVEALKLSNNSICKMIMGRSCSEENGEAERVRALATQLDGLTKKILLANMLRAGFKKLVVSLFRKEMMDVSSRFDELLERILVEHEDKLDMHHQGTDLVDALLAACRDKNAEYKISRNHIKSFFADLLFASTDTFVQTTQWTVAEIINNPNVLERLRGEIDSVVGKARLIQETDLPNLPYLQAVVKEGLRLHPPGPLFARFSQEGCRIGGFYVPEKTTLMINAYAVMRDSDSWEDPDEFKPERFLASSRSEQEKERREQAIKYIAFGSGRRSCPGENLAYIFLGTAIGVMVQGFEWRIKEEKVNMEEANVGLSLTMAYPLKVTPVPRTLVPLTQNPLNRSS

SEQ ID NO: 85237 - protein, 386 aa, Arabidopsis thaliana; identical to SEQ ID NO: 42471
  peptide (1)..(386): Ceres Seq. ID no. 12679577

SEQ ID NO: 85238 - protein, 349 aa, Arabidopsis thaliana
  peptide (1)..(349): Ceres Seq. ID no. 12679578
MKKESVDICVEALKLSNNSICKMIMGRSCSEENGEAERVRALATQLDGLTKKILLANMLRAGFKKLVVSLFRKEMMDVSSRFDELLERILVEHEDKLDMHHQGTDLVDALLAACRDKNAEYKISRNHIKSFFADLLFASTDTFVQTTQWTVAEIINNPNVLERLRGEIDSVVGKARLIQETDLPNLPYLQAVVKEGLRLHPPGPLFARFSQEGCRIGGFYVPEKTTLMINAYAVMRDSDSWEDPDEFKPERFLASSRSEQEKERREQAIKYIAFGSGRRSCPGENLAYIFLGTAIGVMVQGFEWRIKEEKVNMEEANVGLSLTMAYPLKVTPVPRTLVPLTQNPLNRSS

SEQ ID NO: 85239 - DNA, 1271 bp, Arabidopsis thaliana
  misc_feature (1)..(1271): Ceres Seq. ID no. 12679585
  misc_feature (1)..(1271): Ortholog of  Ceres SEQ ID NO 15170768 as cited in SEQ ID NO 52641
gtagtcagcgacacggaactcattaactttactcttctcactggtcaatcgtcggagataatcgggtgatcggcgatggagaatacggacgtcttcttggggctgcatgatttcctggagcggatgcgcaaaccctccgccggcgatttcgtcaaatccattaaaagtttcattgtttcattctcgaacaatgcaccagacccggaaaaagattgtgctatggttcaggagttcttttctaagatggaggctgctttcagggctcatccactttggtctggttgttctgaggaggaattggatagtgctggagatggcctggagaagtatgttatgacaaagctatttactcgggtgtttgcttcaaacactgaggaggttatagctgatgagaagctatttcagaagatgtcattggttcaacaattcatttctcccgagaatttggatatacaaccaacttttcaaaatgaatcgtcatggctgctagctcaaaaagagctccagaagataaacatgtacaaagctcctcgtgataagcttgtgtgtatccttaactgttgcaaagtgattaataacttactgctaaatgcttcaattgcttcaaacgagaatgcacctggagcagacgaatttcttcctgttttgatatatgtaacaataaaggctaaccctccacaacttcactcaaacttgttgtatatacaaagctgagtttgaaaagaacatggaatctgcacgggcacgaatttctggtttggacagccagacttatcaaactggtcatggctctgcaccaccccctcgtgatgagtccactcttcagaaaactcaaagtctgaatcccaagagggaaaacactcttttccaatcaaaatcgtctgatagtctttctgggaccaacgaattactgaatataaacagtgaaacaccaatgaagaaagctgaatccatttcagatttggaaaataagggtgcgacgcttctgaaggataccgagccaagcaaagtctttcaagaatatccttacatatttgccagtgctggtgatttgaggataggagatgttgaaggcttgttaaatagttataaacagctcgttttcaaatatgtgtgccttaccaaaggattgggtgatggaacatctttagctccatccagttcacccttgcaagcgtcgtccggttttaatacgtctaaggaatctgaggatcatagaagatcgtcttcagatgtacaaatgacaaaggaaactgacaggagtgttgatg

SEQ ID NO: 85240 - protein, 212 aa, Arabidopsis thaliana; identical to SEQ ID NO: 42951
  peptide (1)..(212): Ceres Seq. ID no. 12679586

SEQ ID NO: 85241 - protein, 196 aa, Arabidopsis thaliana; identical to SEQ ID NO: 42952
  peptide (1)..(196): Ceres Seq. ID no. 12679587

SEQ ID NO: 85242 - protein, 181 aa, Arabidopsis thaliana
  peptide (1)..(181): Ceres Seq. ID no. 12679588
MESARARISGLDSQTYQTGHGSAPPPRDESTLQKTQSLNPKRENTLFQSKSSDSLSGTNELLNINSETPMKKAESISDLENKGATLLKDTEPSKVFQEYPYIFASAGDLRIGDVEGLLNSYKQLVFKYVCLTKGLGDGTSLAPSSSPLQASSGFNTSKESEDHRRSSSDVQMTKETDRSVD

SEQ ID NO: 85243 - DNA, 1726 bp, Arabidopsis thaliana
  misc_feature (1)..(1726): Ceres Seq. ID no. 12679611
  misc_feature (1)..(1726): Ortholog of  Ceres SEQ ID NO 13657789 as cited in SEQ ID NO 66154
cctcgagattaaacagcatcaagacaacatccaaaaattacccaggtttttgtgtttgaaactcgaagattgttgcggattcctgaaagattaaggcttttagctccaagtttccaagagtgctgtgaatcagctcccactctgtctctgcatattgcaagacaccggttttgtttcagaagtttgtttcttcttgtctcatgatcactagttttcagcaatggggtatgtaaacgtggagaagagatgggtttttcctcttgtcatcacatctctcgtctgcgttttccttcttgcaacttctttcaacatgggactagtctcttccctccgaacaatcaacgggattttctccatcataccttcccgtctcgtcaagaaccaaacgagacttgattttgcagagtctaaagttgctagacaaacccgtgttttgcctcatgaagacaagcttccccgttttgcataccttgtttccgggtctaaaggggatgtagaaaagctttggagaacacttagagcagtgtaccatccaagaaaccagtatgttgttcacttggatcttgaatcacctgtgaatgagagattagagctggcctctcggattaataacgatcctatgtactctaaaaccgggaatgtatatatgataaccaaggctaaccttgtgacatataaaggaccaacgatggtggcaaatactcttcacgcttgtgctgttcttctcaagagaaatgcgaactgggattggtttattaaccttagtgcttcagattatcctctggtgacccaagatgatctgcttcatacgttttcaacattggaccggaacctcaactttatcgaacacacaagtcaactgggatggaaagaggagaagcgagcacagccattaatgattgatcctggactctacttgttgaacaaatctgatatttactgggtcacacctcgccgaagtttgccaactgcctttaagttattcactggatcagcttggatggctctatcacgcccgtttgtagagtattgcatatggggatgggacaatttaccacgaactctcctaatgtattacaccaacttcgtttcatcgcccgaaggttacttccagaccgtgatttgcaacgtgcctgagtttgcaaaaactgcagtaaaccatgacctacactacatttcctgggacaatccgccgcagcagcacccacacgtgttgtcactcaacgacacaatgccgatgatatggagcggtgctgcgtttgctaggaaattcagaagagatgatgaagtacttaataagatcgataaggaattacttaaacggaggaatgataaagatagttttactcctggtggatggtgcagtgggaaaccaaaatgctccagggtcggtaatgtggctaagattgttcctagctttggagctcagaggcttcaaggacttgtgaccaggttagtcaacgaagctaatacaggagttagtcagtgtaaatagaaagaattcgaagaaaaaaagaaccattatcgaagtaatggagagcgactgtcatgatatatatatttatacaacatatagagaatcttgcagttgcaggctttagataagactattagacattgtttgcattgagtagagatgccttgtaatgccacgacctactgggattcatttttgtttgtttgaagtcatctccttcaaaatccaataaaattataaccttttttt

SEQ ID NO: 85244 - protein, 424 aa, Arabidopsis thaliana
  peptide (1)..(424): Ceres Seq. ID no. 12679612
MGYVNVEKRWVFPLVITSLVCVFLLATSFNMGLVSSLRTINGIFSIIPSRLVKNQTRLDFAESKVARQTRVLPHEDKLPRFAYLVSGSKGDVEKLWRTLRAVYHPRNQYVVHLDLESPVNERLELASRINNDPMYSKTGNVYMITKANLVTYKGPTMVANTLHACAVLLKRNANWDWFINLSASDYPLVTQDDLLHTFSTLDRNLNFIEHTSQLGWKEEKRAQPLMIDPGLYLLNKSDIYWVTPRRSLPTAFKLFTGSAWMALSRPFVEYCIWGWDNLPRTLLMYYTNFVSSPEGYFQTVICNVPEFAKTAVNHDLHYISWDNPPQQHPHVLSLNDTMPMIWSGAAFARKFRRDDEVLNKIDKELLKRRNDKDSFTPGGWCSGKPKCSRVGNVAKIVPSFGAQRLQGLVTRLVNEANTGVSQCK

SEQ ID NO: 85245 - protein, 394 aa, Arabidopsis thaliana
  peptide (1)..(394): Ceres Seq. ID no. 12679613
MGLVSSLRTINGIFSIIPSRLVKNQTRLDFAESKVARQTRVLPHEDKLPRFAYLVSGSKGDVEKLWRTLRAVYHPRNQYVVHLDLESPVNERLELASRINNDPMYSKTGNVYMITKANLVTYKGPTMVANTLHACAVLLKRNANWDWFINLSASDYPLVTQDDLLHTFSTLDRNLNFIEHTSQLGWKEEKRAQPLMIDPGLYLLNKSDIYWVTPRRSLPTAFKLFTGSAWMALSRPFVEYCIWGWDNLPRTLLMYYTNFVSSPEGYFQTVICNVPEFAKTAVNHDLHYISWDNPPQQHPHVLSLNDTMPMIWSGAAFARKFRRDDEVLNKIDKELLKRRNDKDSFTPGGWCSGKPKCSRVGNVAKIVPSFGAQRLQGLVTRLVNEANTGVSQCK

SEQ ID NO: 85246 - protein, 291 aa, Arabidopsis thaliana
  peptide (1)..(291): Ceres Seq. ID no. 12679614
MYSKTGNVYMITKANLVTYKGPTMVANTLHACAVLLKRNANWDWFINLSASDYPLVTQDDLLHTFSTLDRNLNFIEHTSQLGWKEEKRAQPLMIDPGLYLLNKSDIYWVTPRRSLPTAFKLFTGSAWMALSRPFVEYCIWGWDNLPRTLLMYYTNFVSSPEGYFQTVICNVPEFAKTAVNHDLHYISWDNPPQQHPHVLSLNDTMPMIWSGAAFARKFRRDDEVLNKIDKELLKRRNDKDSFTPGGWCSGKPKCSRVGNVAKIVPSFGAQRLQGLVTRLVNEANTGVSQCK

SEQ ID NO: 85247 - DNA, 855 bp, Arabidopsis thaliana
  misc_feature (1)..(855): Ceres Seq. ID no. 12679615
  misc_feature (1)..(855): Ortholog of  Ceres SEQ ID NO 12473409 as cited in SEQ ID NO 104
  misc_feature (1)..(855): Ortholog of  Ceres SEQ ID NO 15170477 as cited in SEQ ID NO 52825
  misc_feature (1)..(855): Ortholog of  Ceres SEQ ID NO 13595055 as cited in SEQ ID NO 55744
  misc_feature (1)..(855): Ortholog of  Ceres SEQ ID NO 13662009 as cited in SEQ ID NO 61951
aaccactcaaaaaaatatctctgctctgctccaatggcgtcgttactcgattccgtcaccgtgacccgcgtgttttctctgccgattgcggcttcggtctcgtcttcttcagctgctccgtcggtttcacgacgccggatttctcccgccaggtttctggaattcagaggtttgaagtcttcgcggagtttggtgactcagtcggccagtctgggtgcgaatcgtagaaccagaatcgctcgcggtggacgaatcgcctgtgaggctcaggacaccactgccgccgccgtcgaagtaccaaatctgtctgattcagaatggcaaacaaaggttctggaatcagatgtcccagttctggtcgagttctgggcaccatggtgtggaccttgccgtatgattcaccccatagttgaccagctagccaaagatttcgcagggaagttcaaattctacaaaatcaacactgacgagagcccaaatacagcaaaccgttacgggatacgaagcgttccaacagtaatcatcttcaaaggcggtgagaagaaagatagcatcattggagctgtgcctagagagacgttggagaaaactatagaaagattcttggtcgagtaacaaaatttgactcttttgtcactctgaaccattttaccttatcttctctcttgtaatctctgtaaagtcttttaagtttttgactattatgttatcgtgggtcctctttgtcttcttcaataaaaaaaatggaaacaaagtaatccaccgacgcatgagaagcataactccacgttgaaccacatgccattgttcttcctaattcaccgtacaatctatatacatacatatgttttgagt

SEQ ID NO: 85248 - protein, 204 aa, Arabidopsis thaliana
  peptide (1)..(204): Ceres Seq. ID no. 12679616
NHSKKYLCSAPMASLLDSVTVTRVFSLPIAASVSSSSAAPSVSRRRISPARFLEFRGLKSSRSLVTQSASLGANRRTRIARGGRIACEAQDTTAAAVEVPNLSDSEWQTKVLESDVPVLVEFWAPWCGPCRMIHPIVDQLAKDFAGKFKFYKINTDESPNTANRYGIRSVPTVIIFKGGEKKDSIIGAVPRETLEKTIERFLVE

SEQ ID NO: 85249 - protein, 193 aa, Arabidopsis thaliana; identical to SEQ ID NO: 37672
  peptide (1)..(193): Ceres Seq. ID no. 12679617

SEQ ID NO: 85250 - DNA, 780 bp, Arabidopsis thaliana
  misc_feature (1)..(780): Ceres Seq. ID no. 12679722
  misc_feature (1)..(780): Ortholog of  Ceres SEQ ID NO 13596643 as cited in SEQ ID NO 62565
  misc_feature (1)..(780): Ortholog of  Ceres SEQ ID NO 13597550 as cited in SEQ ID NO 65037
atgatgagtttcgtgatttcagatgaatttctggggacatttgtgccgattctggtgtattgggtgtattcagggatgtacatttgcttaggatctttggataaatatagattgcattcgaagatagatgaggatgagaagaatctcgtttctaaatctgccgtcgttaagggcgttcttcttcaacagactcttcaggctattatctccgttattctcttcaagataacaggaagtgatgcagatgctgctacgacacagcaattttccattctacttctggctaggcagtttatcatcgctatgcttgtaattgacacttggcaatatttcattcatcgatatatgcacctcaacaagttcttatacaagcacatccactctcagcatcatcgccttattgtgccttattcgtatggagctctatacaaccatccactagaaggtcttctcttggacactattggtggtgctttgtctttcctcttctctggtatgtccccaagaacagccatctttttcttctccttcgctaccatcaaaacagtagatgatcattgtggactatggcttccgggaaatccatttcacatcttcttcagtaataactctgcttaccatgatgttcaccaccaactctatggaaccaaatacaacttctcgcagccattctttgttatgtgggataggattctcggcacttacttgccttattcattggagaaaagagccaatggaggatttgaaacacggccaatcaaagtatccaaagatgagtaa

SEQ ID NO: 85251 - protein, 259 aa, Arabidopsis thaliana; identical to SEQ ID NO: 77395
  peptide (1)..(259): Ceres Seq. ID no. 12679723

SEQ ID NO: 85252 - protein, 258 aa, Arabidopsis thaliana; identical to SEQ ID NO: 77396
  peptide (1)..(258): Ceres Seq. ID no. 12679724

SEQ ID NO: 85253 - protein, 234 aa, Arabidopsis thaliana; identical to SEQ ID NO: 77397
  peptide (1)..(234): Ceres Seq. ID no. 12679725

SEQ ID NO: 85254 - DNA, 972 bp, Arabidopsis thaliana
  misc_feature (1)..(972): Ceres Seq. ID no. 12679726
  misc_feature (1)..(972): Ortholog of  Ceres SEQ ID NO 14312204 as cited in SEQ ID NO 54547
  misc_feature (1)..(972): Ortholog of  Ceres SEQ ID NO 13597633 as cited in SEQ ID NO 65444
atggtgacggagctggaagagcttgtcgaatttttgtcatctccttcaccgcctgtgaagaaagctgcggtggaaattgttagtggtttaactggttccgaggaaggtttacaatctctatcaaagtattccgagattcttcttccatcattgtctcagcttctaaatgaaagcaaggaggtatcagagccagcagctcaagctcttgttaatctttctcagaagtgtgaattggcaaagaagatgattcaaatgggtttgattaaagtggccatggacatgttgtataagccagagtcttgtattaccagattacttgttatgcttctagtgaatcttactcagttggatgatggggtttcttctttgcttcagattgacgatgagaagatgcatggactacatatcatgaagcttgttaggtcattttgcaggtcttctggtgaaactgctgatgatcagtttgagcatgttggttcgatccttgtcaacatatcaaaaacagaagatgggaggaaattgttactggagccaaagagacgactattaaaacagatcattaggcagtttgattcaacaaatcaattgcgaaagaaaggggttgctgggactattcgtaactgttgttttgaagccaaaaaccaactccagaatatactcttgatatcagagtttctttggcccgctctgctcctaccagttgcaggcagcaagacatacagtgagcaagatgtcgcaaaaatgccacctgagcttggaagtgcactgtccattgagcgagaaccagttactgatcctgacattcgcgttcagacactcgaagctatatatttgatcatcttagaggaggcaggtcgaagggcattttggtcagtcaacggcccacggattctacaattgggatacgaatatgaagaagatccgaaagcaatgagagcctatgagcaagtcggttctttggacttaagatag

SEQ ID NO: 85255 - protein, 323 aa, Arabidopsis thaliana
  peptide (1)..(323): Ceres Seq. ID no. 12679727
MVTELEELVEFLSSPSPPVKKAAVEIVSGLTGSEEGLQSLSKYSEILLPSLSQLLNESKEVSEPAAQALVNLSQKCELAKKMIQMGLIKVAMDMLYKPESCITRLLVMLLVNLTQLDDGVSSLLQIDDEKMHGLHIMKLVRSFCRSSGETADDQFEHVGSILVNISKTEDGRKLLLEPKRRLLKQIIRQFDSTNQLRKKGVAGTIRNCCFEAKNQLQNILLISEFLWPALLLPVAGSKTYSEQDVAKMPPELGSALSIEREPVTDPDIRVQTLEAIYLIILEEAGRRAFWSVNGPRILQLGYEYEEDPKAMRAYEQVGSLDLR

SEQ ID NO: 85256 - protein, 242 aa, Arabidopsis thaliana
  peptide (1)..(242): Ceres Seq. ID no. 12679728
MIQMGLIKVAMDMLYKPESCITRLLVMLLVNLTQLDDGVSSLLQIDDEKMHGLHIMKLVRSFCRSSGETADDQFEHVGSILVNISKTEDGRKLLLEPKRRLLKQIIRQFDSTNQLRKKGVAGTIRNCCFEAKNQLQNILLISEFLWPALLLPVAGSKTYSEQDVAKMPPELGSALSIEREPVTDPDIRVQTLEAIYLIILEEAGRRAFWSVNGPRILQLGYEYEEDPKAMRAYEQVGSLDLR

SEQ ID NO: 85257 - protein, 239 aa, Arabidopsis thaliana
  peptide (1)..(239): Ceres Seq. ID no. 12679729
MGLIKVAMDMLYKPESCITRLLVMLLVNLTQLDDGVSSLLQIDDEKMHGLHIMKLVRSFCRSSGETADDQFEHVGSILVNISKTEDGRKLLLEPKRRLLKQIIRQFDSTNQLRKKGVAGTIRNCCFEAKNQLQNILLISEFLWPALLLPVAGSKTYSEQDVAKMPPELGSALSIEREPVTDPDIRVQTLEAIYLIILEEAGRRAFWSVNGPRILQLGYEYEEDPKAMRAYEQVGSLDLR

SEQ ID NO: 85258 - DNA, 2148 bp, Arabidopsis thaliana
  misc_feature (1)..(2148): Ceres Seq. ID no. 12679822
  misc_feature (1)..(2148): Ortholog of  Ceres SEQ ID NO 13654989 as cited in SEQ ID NO 63117
  misc_feature (1)..(2148): Ortholog of  Ceres SEQ ID NO 13584744 as cited in SEQ ID NO 69137
atggacaaagtccagcaacaagcagatttattcggtaagacgatatctccgtttgtagcttcacaaccaacaaatgtcggaggattcactgatcagaaaatcattggcggttctgagacgacacaacctccagccacctcacctccttctcctccatcccctgacacacaaacatctcccccgccggcaacagctgctcaaccaccaccgaatcagcctcctaatacaactccacctccaacgcctccttcttcccctccaccttctataactccacctccttcacctcctcagcctcaacctccgcctcaatccaccccaactggagattctccggtggtgattccttttccaaagcctcaattacctcctccttctctttttcctcccccctccttagttaatcagctaccggatccaagacctaatgataataacatacttgaacccatcaacaaccctatttctcttccgtctccgccttctactcccttttcgccaccgtctcaggaaaattccggcagtcaagggtctcctccgttgtcatctttattgcctccgatgcttccgctaaaccctaattctcctggaaaccctttacagcccttggattcacctctgggaggagaatcaaatcgtgtaccctcgtcgtcttcttccccatctcctccttccctctccggatcaaataaccattccggaggctctaatagacataatgccaatagtaacggggatggtggtactagccaacaaagtaatgagtctaattacaccgagaagacagtgattggtattgggatcgcaggtgtgttggtcatattgttcatcgctggcgttttctttgttaggaggaaacaaaagaaaggctcttcttccccgcgctctaaccagtatttgccaccggctaatgtctctgtaaatacagaaggattcatccattacagacagaaacccgggaatgggaacagctcggcgcagaactcttcaccggatactaacagtcttgggaacccaaaacatggtagaggaacccctgactccgcagtaatagggacttcaaagatccatttcacctacgaagagctaagtcagataactgaaggattttgcaagagctttgtggtaggagaaggcgggttcgggtgtgtctacaagggcatcctattcgagggaaagccagtagcgatcaaacagctgaagtcggtcagcgcagaaggatatagagagttcaaagctgaagtagagatcataagcagagtgcatcataggcacttggtgtctcttgtgggttattgcatctctgaacaacacagattcctcatctatgagtttgtccccaacaatactttggattaccatttacatggtacgtacttctttttacagtctctctttgttactaaattaggattctatatagaatatatgtgcaaaaacttaccggttttggaatggagtagaagagtcaggattgcaataggcgcagccaaaggacttgcttatctacatgaagattgccacccaaagattatccatagggacatcaaatcgtcaaacattctgctggatgatgaattcgaagctcaggcaaagtatctagcaccagaatatgcgtcaagcggaaagctaacggatagatcagatgtgttttcatttggagttgtgcttctcgaactcatcaccggtcgcaaacctgttgatacctctcaacctttgggtgaagaaagtctcgtcgaatgggcacgtccaaggctaatcgaggccattgaaaaaggtgacatcagcgaagtagtggatccacggctagagaatgattacgtcgaaagtgaagtctataaaatgattgaaacggcagcgtcttgtgttagacattccgctttaaaacgacctcgtatggttcaggttgttagagctctggacacgagagatgacttgtcggatctgacaaacggagttaaagtgggtcaaagtagggtctacgactccggtcaatacagtaatgagattcgaattttcagacgagcctctgaagattcctcggatcttggtactaatactggctactaccctagccaagactacgccactagccatgaatatgaatctgagagccgagccttcaacacaagtcaccggaaccattga

SEQ ID NO: 85259 - protein, 715 aa, Arabidopsis thaliana
  peptide (1)..(715): Ceres Seq. ID no. 12679823
MDKVQQQADLFGKTISPFVASQPTNVGGFTDQKIIGGSETTQPPATSPPSPPSPDTQTSPPPATAAQPPPNQPPNTTPPPTPPSSPPPSITPPPSPPQPQPPPQSTPTGDSPVVIPFPKPQLPPPSLFPPPSLVNQLPDPRPNDNNILEPINNPISLPSPPSTPFSPPSQENSGSQGSPPLSSLLPPMLPLNPNSPGNPLQPLDSPLGGESNRVPSSSSSPSPPSLSGSNNHSGGSNRHNANSNGDGGTSQQSNESNYTEKTVIGIGIAGVLVILFIAGVFFVRRKQKKGSSSPRSNQYLPPANVSVNTEGFIHYRQKPGNGNSSAQNSSPDTNSLGNPKHGRGTPDSAVIGTSKIHFTYEELSQITEGFCKSFVVGEGGFGCVYKGILFEGKPVAIKQLKSVSAEGYREFKAEVEIISRVHHRHLVSLVGYCISEQHRFLIYEFVPNNTLDYHLHGTYFFLQSLFVTKLGFYIEYMCKNLPVLEWSRRVRIAIGAAKGLAYLHEDCHPKIIHRDIKSSNILLDDEFEAQAKYLAPEYASSGKLTDRSDVFSFGVVLLELITGRKPVDTSQPLGEESLVEWARPRLIEAIEKGDISEVVDPRLENDYVESEVYKMIETAASCVRHSALKRPRMVQVVRALDTRDDLSDLTNGVKVGQSRVYDSGQYSNEIRIFRRASEDSSDLGTNTGYYPSQDYATSHEYESESRAFNTSHRNH

SEQ ID NO: 85260 - protein, 528 aa, Arabidopsis thaliana
  peptide (1)..(528): Ceres Seq. ID no. 12679824
MLPLNPNSPGNPLQPLDSPLGGESNRVPSSSSSPSPPSLSGSNNHSGGSNRHNANSNGDGGTSQQSNESNYTEKTVIGIGIAGVLVILFIAGVFFVRRKQKKGSSSPRSNQYLPPANVSVNTEGFIHYRQKPGNGNSSAQNSSPDTNSLGNPKHGRGTPDSAVIGTSKIHFTYEELSQITEGFCKSFVVGEGGFGCVYKGILFEGKPVAIKQLKSVSAEGYREFKAEVEIISRVHHRHLVSLVGYCISEQHRFLIYEFVPNNTLDYHLHGTYFFLQSLFVTKLGFYIEYMCKNLPVLEWSRRVRIAIGAAKGLAYLHEDCHPKIIHRDIKSSNILLDDEFEAQAKYLAPEYASSGKLTDRSDVFSFGVVLLELITGRKPVDTSQPLGEESLVEWARPRLIEAIEKGDISEVVDPRLENDYVESEVYKMIETAASCVRHSALKRPRMVQVVRALDTRDDLSDLTNGVKVGQSRVYDSGQYSNEIRIFRRASEDSSDLGTNTGYYPSQDYATSHEYESESRAFNTSHRNH

SEQ ID NO: 85261 - DNA, 3897 bp, Arabidopsis thaliana
  misc_feature (1)..(3897): Ceres Seq. ID no. 12679840
  misc_feature (1)..(3897): Ortholog of  Ceres SEQ ID NO 15176963 as cited in SEQ ID NO 52894
atgcaaccgtcaaatgatccagcaatcgtggacatggcagcggcggagaaggagaagaagcggccaagtgtatcatttcttaagctcttctcatttgctgatttttacgattgcgttctgatggctcttggatccattggtgcttgcattcacggagcctccgttccagttttcttcatcttctttggcaaactcatcaacatcatcggtcttgcttacctcttcccacaagaagcttctcacaaagtcgccaagtactcgttggattttgtatatctgagtgtggtgatactcttttcatcatggttagaggttgcatgttggatgcatacgggagagagacaagcagcgaagattagaaaagcttatttgcggtcaatgttaagccaagacataagcttattcgacaccgagatttccaccggagaagtcatctccgccatcacctccgagatccttgttgtccaagacgctatctccgagaaggtacgctataccaagatcaaaccggtattggtcttaaattttggatgttggatttttaattttcctatagcaagcatgcatcttgtagggaatttcatgcacttcataagccggttcatagccggttttgcgatcgggttcgcgagcgtatggcaaataagtctcgtcactctctccatagtcccattcattgctctcgccggcggaatttacgcttttgtcagcagcggacttatcgtccgtgtccggaaatcatacgtcaaggccaacgagatcgcagaagaggtgatcgggaatgtgaggaccgtacaagcgtttacgggagaagaaaaggcggtgagttcgtaccaaggagctttgaggaacacttacaattacgggagaaaagccggtttagccaaaggactagggcttggttcgttgcattttgtcctgtttttgtcttgggctttgctcatttggttcacaagcatcgttgttcacaagggaatcgctaatggtggcgaatctttcacgaccatgctcaatgttgtcatcgctggcttgtctcttggtcaggcggctcctgacatttccacattcatgcgagccagtgctgctgcgtatccgatttttcagatgattgaacggaacacggaggataaaacaggtcgtaaactcgggaatgtaaacggagacattctattcaaagacgtgactttcacatacccctctcgccctgatgtggtgatctttgacaagctaaacttcgtgatccctgcggggaaagtcgtggctcttgttggaggaagcgggtctgggaaaagcaccatgatatccttaattgaacgattctacgagcctaccgatggagcggtgatgctggatgggaacgatatcagatacttggatcttaagtggttaagaggtcatattggtttggttaatcaagagcctgtcctgtttgcaaccacgattcgcgagaacattatgtatggtaaagacgatgccacctctgaggaaattaccaatgctgcaaagctctcggaagccatctcattcatcaacaacctaccggaaggattcgaaactcaggtatgtcgaacatcagatagcttagaacacaagaaattaacaactgtaaaccctagattttgcttgttattcggtttacaggtaggtgagagaggaattcagctatctggcgggcagaagcagaggatcagtatttctagggcgatagtgaagaatccatcgatcctcttactcgatgaggcaacaagcgcactagatgcagagtcagagaaaatcgtgcaggaagctttggacagggtgatggttgggagaacaacggtcgtggtggctcatagactctccactgtaagaaacgctgacatcatagccgttgttggaggagggaagatcattgagtccggaagccacgacgaactcatatctaaccctgatggagcttattcttctcttcttcgtatccaagaagctgccagccctaacttgaaccacactccaagcttaccagtcagtacaaaacccttgccggaactaccaatcacggagacgacctcgtccattcatcaatcagtaaaccaaccagatacgaccaaacaggccaaagtaacggtgggacgtctttactctatgatccgtccggattggaaatacggattatgtgggacgttaggttcctttattgcgggatctcaaatgccgcttttcgcgcttggtatcgcacaggctttagtatcttattacatggactgggagacaactcaaaacgaggtcaaaagaatctctatcctcttctgttgtggctccgtcatcactgtcatcgtacataccattgagcataccacctttggtattatgggtgagcgtctcactctccgagtccgacaaaagatgttttcagcgatcttgaggaatgaaatcgggtggtttgataaggttgataacactagttcgatgttggcatcgcggcttgaaagtgatgcgactttgcttagaaccatcgtggtcgatagatcgacaattctacttgagaatttaggtcttgttgtgactgctttcatcatttcttttatactcaactggcgtctcactcttgttgtcttggccacataccccttgattataagcggtcatatcagcgaggtaaaacgcagctttttgcgtttttacatacttttttttggtcgtcaaaaaattttcatgcaaggctatggaggaaacttgagtaaagcgtatttaaaggctaacatgttggctggagagtctattagcaacatccgaaccgtggtcgccttttgtgcagaggagaaggttttagacctttattccaaagagcttctagaaccttcagaacgttctttcaggcgtggacagatggccgggattttgtacggtgtttctcaattcttcatcttctcctcctacggccttgccctctggtacggatcgattttgatggagaaaggattatcaagtttcgaatctgtgatgaaaacattcatggttttgatagtaacggcgttagtgatgggtgaagtgttggctctagccccagatcttcttaaaggaaaccagatggttgtttcggttttcgagctattggatcgaagaacacaggttgttggtgatactggtgaggagctgagtaatgtggaaggcactatagagctcaaaggtgttcatttcagttatccttcacggcctgatgtgactattttcagcgatttcaatctactagttccttctggcaaaagcatggcgcttgtgggacaaagcggatctggaaaaagttcggttctttcgcttgttctccggttctacgatcctacagccggaataatcatgatagacgggcaagacatcaagaaactgaagttgaaatcactgcgaagacacattggtctggttcaacaagaaccggctctgtttgcaacgactatctatgagaacatcttgtatggtaaagaaggagcttctgaatctgaagtcatggaagcagctaagcttgcaaatgctcacagtttcatcagctctctccctgaaggttactcaaccaaagtcggtgaacgtggcattcagatgtcaggcggccagagacagagaattgctatagctagagccgtcctcaagaacccagagattctgcttcttgatgaagccacaagcgccttagatgttgaatcagagcgtgtggtacaacaagcattggatcggctaatgagagaccgaaccacggtggtggtggctcaccggctatcgacgatcaagaactcagatatgataagtgtaatacaagacggtaagatcatagagcaaggcagccacaatatcctcgttgagaacaagaatggtccctactctaaacttatcagtcttcagcagcggcagcgccatcatccttaa

SEQ ID NO: 85262 - protein, 1298 aa, Arabidopsis thaliana
  peptide (1)..(1298): Ceres Seq. ID no. 12679841
MQPSNDPAIVDMAAAEKEKKRPSVSFLKLFSFADFYDCVLMALGSIGACIHGASVPVFFIFFGKLINIIGLAYLFPQEASHKVAKYSLDFVYLSVVILFSSWLEVACWMHTGERQAAKIRKAYLRSMLSQDISLFDTEISTGEVISAITSEILVVQDAISEKVRYTKIKPVLVLNFGCWIFNFPIASMHLVGNFMHFISRFIAGFAIGFASVWQISLVTLSIVPFIALAGGIYAFVSSGLIVRVRKSYVKANEIAEEVIGNVRTVQAFTGEEKAVSSYQGALRNTYNYGRKAGLAKGLGLGSLHFVLFLSWALLIWFTSIVVHKGIANGGESFTTMLNVVIAGLSLGQAAPDISTFMRASAAAYPIFQMIERNTEDKTGRKLGNVNGDILFKDVTFTYPSRPDVVIFDKLNFVIPAGKVVALVGGSGSGKSTMISLIERFYEPTDGAVMLDGNDIRYLDLKWLRGHIGLVNQEPVLFATTIRENIMYGKDDATSEEITNAAKLSEAISFINNLPEGFETQVCRTSDSLEHKKLTTVNPRFCLLFGLQVGERGIQLSGGQKQRISISRAIVKNPSILLLDEATSALDAESEKIVQEALDRVMVGRTTVVVAHRLSTVRNADIIAVVGGGKIIESGSHDELISNPDGAYSSLLRIQEAASPNLNHTPSLPVSTKPLPELPITETTSSIHQSVNQPDTTKQAKVTVGRLYSMIRPDWKYGLCGTLGSFIAGSQMPLFALGIAQALVSYYMDWETTQNEVKRISILFCCGSVITVIVHTIEHTTFGIMGERLTLRVRQKMFSAILRNEIGWFDKVDNTSSMLASRLESDATLLRTIVVDRSTILLENLGLVVTAFIISFILNWRLTLVVLATYPLIISGHISEVKRSFLRFYILFFGRQKIFMQGYGGNLSKAYLKANMLAGESISNIRTVVAFCAEEKVLDLYSKELLEPSERSFRRGQMAGILYGVSQFFIFSSYGLALWYGSILMEKGLSSFESVMKTFMVLIVTALVMGEVLALAPDLLKGNQMVVSVFELLDRRTQVVGDTGEELSNVEGTIELKGVHFSYPSRPDVTIFSDFNLLVPSGKSMALVGQSGSGKSSVLSLVLRFYDPTAGIIMIDGQDIKKLKLKSLRRHIGLVQQEPALFATTIYENILYGKEGASESEVMEAAKLANAHSFISSLPEGYSTKVGERGIQMSGGQRQRIAIARAVLKNPEILLLDEATSALDVESERVVQQALDRLMRDRTTVVVAHRLSTIKNSDMISVIQDGKIIEQGSHNILVENKNGPYSKLISLQQRQRHHP

SEQ ID NO: 85263 - protein, 1287 aa, Arabidopsis thaliana
  peptide (1)..(1287): Ceres Seq. ID no. 12679842
MAAAEKEKKRPSVSFLKLFSFADFYDCVLMALGSIGACIHGASVPVFFIFFGKLINIIGLAYLFPQEASHKVAKYSLDFVYLSVVILFSSWLEVACWMHTGERQAAKIRKAYLRSMLSQDISLFDTEISTGEVISAITSEILVVQDAISEKVRYTKIKPVLVLNFGCWIFNFPIASMHLVGNFMHFISRFIAGFAIGFASVWQISLVTLSIVPFIALAGGIYAFVSSGLIVRVRKSYVKANEIAEEVIGNVRTVQAFTGEEKAVSSYQGALRNTYNYGRKAGLAKGLGLGSLHFVLFLSWALLIWFTSIVVHKGIANGGESFTTMLNVVIAGLSLGQAAPDISTFMRASAAAYPIFQMIERNTEDKTGRKLGNVNGDILFKDVTFTYPSRPDVVIFDKLNFVIPAGKVVALVGGSGSGKSTMISLIERFYEPTDGAVMLDGNDIRYLDLKWLRGHIGLVNQEPVLFATTIRENIMYGKDDATSEEITNAAKLSEAISFINNLPEGFETQVCRTSDSLEHKKLTTVNPRFCLLFGLQVGERGIQLSGGQKQRISISRAIVKNPSILLLDEATSALDAESEKIVQEALDRVMVGRTTVVVAHRLSTVRNADIIAVVGGGKIIESGSHDELISNPDGAYSSLLRIQEAASPNLNHTPSLPVSTKPLPELPITETTSSIHQSVNQPDTTKQAKVTVGRLYSMIRPDWKYGLCGTLGSFIAGSQMPLFALGIAQALVSYYMDWETTQNEVKRISILFCCGSVITVIVHTIEHTTFGIMGERLTLRVRQKMFSAILRNEIGWFDKVDNTSSMLASRLESDATLLRTIVVDRSTILLENLGLVVTAFIISFILNWRLTLVVLATYPLIISGHISEVKRSFLRFYILFFGRQKIFMQGYGGNLSKAYLKANMLAGESISNIRTVVAFCAEEKVLDLYSKELLEPSERSFRRGQMAGILYGVSQFFIFSSYGLALWYGSILMEKGLSSFESVMKTFMVLIVTALVMGEVLALAPDLLKGNQMVVSVFELLDRRTQVVGDTGEELSNVEGTIELKGVHFSYPSRPDVTIFSDFNLLVPSGKSMALVGQSGSGKSSVLSLVLRFYDPTAGIIMIDGQDIKKLKLKSLRRHIGLVQQEPALFATTIYENILYGKEGASESEVMEAAKLANAHSFISSLPEGYSTKVGERGIQMSGGQRQRIAIARAVLKNPEILLLDEATSALDVESERVVQQALDRLMRDRTTVVVAHRLSTIKNSDMISVIQDGKIIEQGSHNILVENKNGPYSKLISLQQRQRHHP

SEQ ID NO: 85264 - protein, 1258 aa, Arabidopsis thaliana
  peptide (1)..(1258): Ceres Seq. ID no. 12679843
MALGSIGACIHGASVPVFFIFFGKLINIIGLAYLFPQEASHKVAKYSLDFVYLSVVILFSSWLEVACWMHTGERQAAKIRKAYLRSMLSQDISLFDTEISTGEVISAITSEILVVQDAISEKVRYTKIKPVLVLNFGCWIFNFPIASMHLVGNFMHFISRFIAGFAIGFASVWQISLVTLSIVPFIALAGGIYAFVSSGLIVRVRKSYVKANEIAEEVIGNVRTVQAFTGEEKAVSSYQGALRNTYNYGRKAGLAKGLGLGSLHFVLFLSWALLIWFTSIVVHKGIANGGESFTTMLNVVIAGLSLGQAAPDISTFMRASAAAYPIFQMIERNTEDKTGRKLGNVNGDILFKDVTFTYPSRPDVVIFDKLNFVIPAGKVVALVGGSGSGKSTMISLIERFYEPTDGAVMLDGNDIRYLDLKWLRGHIGLVNQEPVLFATTIRENIMYGKDDATSEEITNAAKLSEAISFINNLPEGFETQVCRTSDSLEHKKLTTVNPRFCLLFGLQVGERGIQLSGGQKQRISISRAIVKNPSILLLDEATSALDAESEKIVQEALDRVMVGRTTVVVAHRLSTVRNADIIAVVGGGKIIESGSHDELISNPDGAYSSLLRIQEAASPNLNHTPSLPVSTKPLPELPITETTSSIHQSVNQPDTTKQAKVTVGRLYSMIRPDWKYGLCGTLGSFIAGSQMPLFALGIAQALVSYYMDWETTQNEVKRISILFCCGSVITVIVHTIEHTTFGIMGERLTLRVRQKMFSAILRNEIGWFDKVDNTSSMLASRLESDATLLRTIVVDRSTILLENLGLVVTAFIISFILNWRLTLVVLATYPLIISGHISEVKRSFLRFYILFFGRQKIFMQGYGGNLSKAYLKANMLAGESISNIRTVVAFCAEEKVLDLYSKELLEPSERSFRRGQMAGILYGVSQFFIFSSYGLALWYGSILMEKGLSSFESVMKTFMVLIVTALVMGEVLALAPDLLKGNQMVVSVFELLDRRTQVVGDTGEELSNVEGTIELKGVHFSYPSRPDVTIFSDFNLLVPSGKSMALVGQSGSGKSSVLSLVLRFYDPTAGIIMIDGQDIKKLKLKSLRRHIGLVQQEPALFATTIYENILYGKEGASESEVMEAAKLANAHSFISSLPEGYSTKVGERGIQMSGGQRQRIAIARAVLKNPEILLLDEATSALDVESERVVQQALDRLMRDRTTVVVAHRLSTIKNSDMISVIQDGKIIEQGSHNILVENKNGPYSKLISLQQRQRHHP

SEQ ID NO: 85265 - DNA, 2109 bp, Arabidopsis thaliana
  misc_feature (1)..(2109): Ceres Seq. ID no. 12679907
  misc_feature (1)..(2109): Ortholog of  Ceres SEQ ID NO 13654989 as cited in SEQ ID NO 63117
  misc_feature (1)..(2109): Ortholog of  Ceres SEQ ID NO 13584744 as cited in SEQ ID NO 69137
atgtttcggcgattaataacttgtatatcactttgggagcaccatctctacatcattggcttgcttttggaggagacccttgtggagaaaagtggcaaggtgtggtgtgtgactcctcaaacatcacagaaatggacaattccgcaggctttgccttcttccatccgaaacctatctctctcaagcaatcgcttcactgggaacattccctttacattgtcctttctatccgatttgtctgaactgtcattgggaagcaatcttctatcaggagagataccagattactttcagcagctatcaaaactgacaaaactggacttatcgtctaacatactggaggggcatttaccttcttccatgggagacttagcttctcttaagatattaggatcttttcttaaccgatttgaatgtagaaaacaacttattctcgggacctataccgccaaatctattgaaaattccaaacttcaaccattcatgttacattgtcattataaccgcagaaaagatggaactccgttcaatacatcgattataacaccaccgcctccgcctgtggttgatcctcctcccgctactcaccgtgctcctcctgttccccgtatccctcctgtttctggtgttcccccagcaccttttgctccttttgctccactgcaaccacaacaacatccaccaccatcaccacctctggtctggtcaccaccttcttctgataatggaggaggagatccctggaactctgtgtcagggcaacctaccttgcaaatatcacctccttcaggttcaggatcaggaaaattctggtccactcaaagaatcattctagtagtttcttcagtggccataattgttcttgtatccggtttgtgtgttacactttggagatgttgcagaagtaaaatatataaccgatattacagtggagctcgtaaagatttacaacgaccatacttcaataagcctccatctcaaccaacccccactatgggaaaagtttctcgggagcctatggttaagcctttcgatggatatggagctggagacaggaaatatgggtatccaatgccacagcgggctgaagagagccggagagcaatgcctcctacttcatattataataaggatgttaatacacctcaaaagccgctgcaacaaccaccgaggcagttccagtccaatgatactgcttcaaagagagcggctcatttccccccgggcttgaattcctcatcttctgctactgttttcaccattgcttcacttcagcaatacacaaataatttctcagaagagaatataatcggggaagggtcgattggtaatgtctacagagctgagcttcgtcatggaaagtttcttgcggtgaagaagctgagcaataccatcaacagaacacagagtgacggcgaattcctcaatctagtctccaatgtgttgaagcttaaacgcggtcatatattggagcttcttggttactgtaacgagtttggtcaaaggttacttgtgtatgagtactgtcctaatggatcacttcaagatgcactacatttggatcgcaagttgcacaagaagctcacttggaatgtacgtataaatattgcattaggagcttcaaaggcattgcagtttcttcatgaggtatgtcaaccgccggttgttcaccagaatttcaagtcttccaaggttcttcttgatggaaagctctcagtacgtgttgcagacagcggtttggcttatatgttaccaccacgcccaacgagtcagatggcgggttatgccgctcctgaggttgagtatggaagctacacttgtcagagcgacgtatttagccttggggttgtaatgttagaactgctcactggacgcagaccatttgacaggacaaggccgaggggacatcaaacactagctcagtgggcgattcctcggcttcatgacatcgatgcgttgacaagaatggttgatccgtcattacacggagcgtatccaatgaaatcattgtcacgttttgcagatatcatatcacgttcactgcagatggaaccaggatttagaccgccgatatcagaaatagtccaagatcttcaacatatgatctaa

SEQ ID NO: 85266 - protein, 702 aa, Arabidopsis thaliana
  peptide (1)..(702): Ceres Seq. ID no. 12679908
MFRRLITCISLWEHHLYIIGLLLEETLVEKSGKVWCVTPQTSQKWTIPQALPSSIRNLSLSSNRFTGNIPFTLSFLSDLSELSLGSNLLSGEIPDYFQQLSKLTKLDLSSNILEGHLPSSMGDLASLKILGSFLNRFECRKQLILGTYTAKSIENSKLQPFMLHCHYNRRKDGTPFNTSIITPPPPPVVDPPPATHRAPPVPRIPPVSGVPPAPFAPFAPLQPQQHPPPSPPLVWSPPSSDNGGGDPWNSVSGQPTLQISPPSGSGSGKFWSTQRIILVVSSVAIIVLVSGLCVTLWRCCRSKIYNRYYSGARKDLQRPYFNKPPSQPTPTMGKVSREPMVKPFDGYGAGDRKYGYPMPQRAEESRRAMPPTSYYNKDVNTPQKPLQQPPRQFQSNDTASKRAAHFPPGLNSSSSATVFTIASLQQYTNNFSEENIIGEGSIGNVYRAELRHGKFLAVKKLSNTINRTQSDGEFLNLVSNVLKLKRGHILELLGYCNEFGQRLLVYEYCPNGSLQDALHLDRKLHKKLTWNVRINIALGASKALQFLHEVCQPPVVHQNFKSSKVLLDGKLSVRVADSGLAYMLPPRPTSQMAGYAAPEVEYGSYTCQSDVFSLGVVMLELLTGRRPFDRTRPRGHQTLAQWAIPRLHDIDALTRMVDPSLHGAYPMKSLSRFADIISRSLQMEPGFRPPISEIVQDLQHMI

SEQ ID NO: 85267 - protein, 582 aa, Arabidopsis thaliana
  peptide (1)..(582): Ceres Seq. ID no. 12679909
MGDLASLKILGSFLNRFECRKQLILGTYTAKSIENSKLQPFMLHCHYNRRKDGTPFNTSIITPPPPPVVDPPPATHRAPPVPRIPPVSGVPPAPFAPFAPLQPQQHPPPSPPLVWSPPSSDNGGGDPWNSVSGQPTLQISPPSGSGSGKFWSTQRIILVVSSVAIIVLVSGLCVTLWRCCRSKIYNRYYSGARKDLQRPYFNKPPSQPTPTMGKVSREPMVKPFDGYGAGDRKYGYPMPQRAEESRRAMPPTSYYNKDVNTPQKPLQQPPRQFQSNDTASKRAAHFPPGLNSSSSATVFTIASLQQYTNNFSEENIIGEGSIGNVYRAELRHGKFLAVKKLSNTINRTQSDGEFLNLVSNVLKLKRGHILELLGYCNEFGQRLLVYEYCPNGSLQDALHLDRKLHKKLTWNVRINIALGASKALQFLHEVCQPPVVHQNFKSSKVLLDGKLSVRVADSGLAYMLPPRPTSQMAGYAAPEVEYGSYTCQSDVFSLGVVMLELLTGRRPFDRTRPRGHQTLAQWAIPRLHDIDALTRMVDPSLHGAYPMKSLSRFADIISRSLQMEPGFRPPISEIVQDLQHMI

SEQ ID NO: 85268 - protein, 541 aa, Arabidopsis thaliana; identical to SEQ ID NO: 69499
  peptide (1)..(541): Ceres Seq. ID no. 12679910

SEQ ID NO: 85269 - DNA, 1903 bp, Arabidopsis thaliana
  misc_feature (1)..(1903): Ceres Seq. ID no. 12679922
  misc_feature (1)..(1903): Ortholog of  Ceres SEQ ID NO 13594380 as cited in SEQ ID NO 58039
  misc_feature (1)..(1903): Ortholog of  Ceres SEQ ID NO 13597407 as cited in SEQ ID NO 64106
  misc_feature (1)..(1903): Ortholog of  Ceres SEQ ID NO 15180690 as cited in SEQ ID NO 0
atctaatatctctttctcaatttcggttccactttcctttcgtttgcaaaaacccatcccatcaaaaataaacaagagggcctaaagaagaatcctaaagactttacgggtcttgtttaggataaaagaaatgcctgccggtggattcgtcgtcggggatggccaaaaggcttatcccggcaaactcactccctttgttctcttcacttgcgttgttgctgccatgggcggtctcatcttcggatacgatatcggaatctccggtggtgtgacgtctatgccgtctttcctcaagcgattcttcccgtcggtgtatcggaaacaacaagaggacgcgtcaacgaaccagtactgtcagtacgatagcccgacgctaacgatgttcacatcgtctctatatctagcggcgctaatttcgtcgctggtggcttccaccgtgacaagaaagttcggacggcggctctcgatgctcttcggcggcatactcttctgcgccggagctctcatcaatggtttcgccaaacatgtttggatgctcatcgtcggtcgtatcttgcttggtttcggtatcggtttcgctaatcaggctgtgccactgtacctctctgagatggctccatacaaatacagaggagctttaaacattggtttccagctctcaattacaatcggaatcctcgtcgccgaagtgctaaactacttcttcgccaagatcaaaggcggttggggatggcggctcagtctcggaggcgcggtggttcctgccttgatcataaccatcggctccctcgtcctccctgacactcccaattcaatgatcgagcgtggccaacacgaagaagccaaaaccaagctcagacgaatccgtggtgtcgatgacgtcagccaagagtttgacgatttggtcgccgctagtaaagagtcgcagtcgatagagcacccgtggagaaacctcctccgccgcaagtaccgaccacatctcacaatggccgttatgattccgttctttcaacagctaaccggaatcaatgtgattatgttttacgctccggttttgttcaacaccattggtttcacgaccgatgcttctctcatgtccgctgtggtcactggctcggttaacgtggccgctacgcttgtttctatctacggtgttgacagatggggacgtcggtttctctttcttgaaggtggtacacaaatgcttatatgccaggctgtggttgcagcttgcataggggccaagtttggggtagacgggacccctggtgagctaccaaagtggtatgctatagtggttgtaacgttcatttgcatctatgtggcgggttttgcgtggtcgtggggcccactagggtggttagtaccgagtgaaatcttcccgttggagataaggtcggcggcgcagagtatcaccgtgtccgtgaacatgatcttcacgttcattatcgcgcaaatcttcttgacgatgctttgtcatttgaagtttgggttattccttgttttcgcctttttcgtggtggtgatgtcgatctttgtatacattttcttgccggagacgaaagggattccgatagaggagatgggtcaagtgtggaggtcacactggtattggtcaaggtttgtggaggatggtgagtatgggaatgcgcttgagatgggcaagaacagtaaccaagctggaacgaagcatgtttgatttatcattgtttttaatgagagttttaagaaagaaagaaaaaagatttgtaatttctaatgtcgtaaaggaaaaagtgtattagcctagatatttattggtgtttatataattcaataccacatgaagaaattatgcatatgattcttcgttaattgtctgtaattgttatactctttacttaaaccaagtgttttctctttg

SEQ ID NO: 85270 - protein, 522 aa, Arabidopsis thaliana; identical to SEQ ID NO: 22534
  peptide (1)..(522): Ceres Seq. ID no. 12679923

SEQ ID NO: 85271 - protein, 491 aa, Arabidopsis thaliana; identical to SEQ ID NO: 22535
  peptide (1)..(491): Ceres Seq. ID no. 12679924

SEQ ID NO: 85272 - protein, 473 aa, Arabidopsis thaliana; identical to SEQ ID NO: 22536
  peptide (1)..(473): Ceres Seq. ID no. 12679925

SEQ ID NO: 85273 - DNA, 2526 bp, Arabidopsis thaliana
  misc_feature (1)..(2526): Ceres Seq. ID no. 12679926
  misc_feature (1)..(2526): Ortholog of  Ceres SEQ ID NO 13582534 as cited in SEQ ID NO 57409
atggtttttcaaaacaaaattttattcatacattcagatctgaaggagaactcttttgaacacatgggaatacacttgggagagattggtattgttctctttccttggtttctgtggttaagtttattcctaagttgtggctatgcagctataactatttcaagtcctttgacattgggacaaactctgagttcccctggtggattttatgagttaggattcttcagtcctaacaactctcagaatcagtatgtagggatctggttcaagaaaattacaccacgggtggttgtgtgggtggctaacagagaaaagccgatcacaacccctgtggcaaatcttactatcagcagaaatggtagtcttattttgctagacagtagtaaaaatgttgtttggtcaaccagaagaccttccatatctaataagtgtcatgcaaagctcttagatacaggaaatcttgtcatagtagatgatgtttcagaaaatcttttgtggcaaagttttgagaatcctggtgatactatgctgccttactcatcgctgatgtacaaccttgccactggggagaagcgagtattatcttcgtggaaaagccacactgatccatcccctggtgatttcgtagttcgactaacaccacaagtgccagcacagatcgttactatgagaggctcatcggtttataagagaagcggtccatgggctaagaccggtttcactggcgtaccactaatggatgaatcatacacaagtcctttcagcctttcccaagatgtaggaaatggaacagggctcttctcttatttacagagaagttctgaacttacacgagttatcataacatcagagggatatctaaagacttttcggtacaatgggacaggctgggttctggactttatcactccagcaaatttatgtgatttgtatggtgcatgtggaccttttgggctgtgtgtgacgtccaatcccacaaagtgtaaatgcatgaaagggtttgtaccaaaatacaaggaggagtggaagcgcgggaacatgacttctggatgtatgcgacgtacagaattatcttgtcaggcaaacttatctacaaagacacaaggaaaaggtgtagacgtcttctatcgtctggccaatgtaaagcctccggatctctacgaatatgcaagctttgtggatgcagatcaatgccaccagggttgtctcagcaattgctcttgctctgcttttgcgtatattactggaattggttgtttgctttggaatcatgagctaatagacacaattagatattccgttggaggagagtttctttccattcgtcttgcaagttcagaactggctggaagcaggaggaccaagattattgttggtagtatcagcctttccatttttgtgattttggcctttggctcatataagtactggagatacagagcaaaacaaaatgttgggccaacttgggcattcttcaacaattcacaagattcatggaaaaatggtttggaaccacaagaaatctcaggtttaacattctttgagatgaataccatacgagctgctaccaataacttcaatgtctcaaacaaactcggtcaaggtggatttggtccagtttataagggaacactgtcagacaagaaggatatagccgttaaacgcctttctagcagctctgggcagggtacagaagagttcatgaacgaaataaaactcatctcaaaattacaacacagaaacttggttcgacttttgggatgctgcattgatggagaagaaaaactactaatttatgagtttctagtgaacaaaagcctcgacacttttctctttgatttgacgctaaagcttcagattgattggcctaagaggttcaacatcattcaaggtgtttcacgtgggcttctctatctccatcgtgactcttgcatgagggtcatacatcgagatctgaaggtcagcaacattctcttggacgacaaaatgaacccaaaaatatcagatttcggattggctcggatgtttcaaggaacccaacatcaagacaacactcgtaaggttgttggaactctaggatacatgtctcctgagtatgcatggacaggaatgttctcagagaagtccgacatatatgcttttggagttctcctgttagaaatcataagtgggaagaagatttcaagcttttgctgtggagaggaaggcaaaacccttcttggacatgcatgggaatgttggctcgagaccggtggagtggatctattggatgaagatattagcagctcgtgttctccagttgaagttgaagtcgctcgatgtgttcagattggtctactctgcatccaacagcaagctgttgacagaccaaacatagcacaagtagtgaccatgatgacaagtgcaacagatcttccgagaccaaaacaaccactctttgcattgcagattcaagatcaagagagtgttgtgtcagtctcaaagtctgtgaatcatgttacacaaactgagatatatgggcgataa

SEQ ID NO: 85274 - protein, 841 aa, Arabidopsis thaliana
  peptide (1)..(841): Ceres Seq. ID no. 12679927
MVFQNKILFIHSDLKENSFEHMGIHLGEIGIVLFPWFLWLSLFLSCGYAAITISSPLTLGQTLSSPGGFYELGFFSPNNSQNQYVGIWFKKITPRVVVWVANREKPITTPVANLTISRNGSLILLDSSKNVVWSTRRPSISNKCHAKLLDTGNLVIVDDVSENLLWQSFENPGDTMLPYSSLMYNLATGEKRVLSSWKSHTDPSPGDFVVRLTPQVPAQIVTMRGSSVYKRSGPWAKTGFTGVPLMDESYTSPFSLSQDVGNGTGLFSYLQRSSELTRVIITSEGYLKTFRYNGTGWVLDFITPANLCDLYGACGPFGLCVTSNPTKCKCMKGFVPKYKEEWKRGNMTSGCMRRTELSCQANLSTKTQGKGVDVFYRLANVKPPDLYEYASFVDADQCHQGCLSNCSCSAFAYITGIGCLLWNHELIDTIRYSVGGEFLSIRLASSELAGSRRTKIIVGSISLSIFVILAFGSYKYWRYRAKQNVGPTWAFFNNSQDSWKNGLEPQEISGLTFFEMNTIRAATNNFNVSNKLGQGGFGPVYKGTLSDKKDIAVKRLSSSSGQGTEEFMNEIKLISKLQHRNLVRLLGCCIDGEEKLLIYEFLVNKSLDTFLFDLTLKLQIDWPKRFNIIQGVSRGLLYLHRDSCMRVIHRDLKVSNILLDDKMNPKISDFGLARMFQGTQHQDNTRKVVGTLGYMSPEYAWTGMFSEKSDIYAFGVLLLEIISGKKISSFCCGEEGKTLLGHAWECWLETGGVDLLDEDISSSCSPVEVEVARCVQIGLLCIQQQAVDRPNIAQVVTMMTSATDLPRPKQPLFALQIQDQESVVSVSKSVNHVTQTEIYGR

SEQ ID NO: 85275 - protein, 820 aa, Arabidopsis thaliana; identical to SEQ ID NO: 77556
  peptide (1)..(820): Ceres Seq. ID no. 12679928

SEQ ID NO: 85276 - protein, 666 aa, Arabidopsis thaliana
  peptide (1)..(666): Ceres Seq. ID no. 12679929
MLPYSSLMYNLATGEKRVLSSWKSHTDPSPGDFVVRLTPQVPAQIVTMRGSSVYKRSGPWAKTGFTGVPLMDESYTSPFSLSQDVGNGTGLFSYLQRSSELTRVIITSEGYLKTFRYNGTGWVLDFITPANLCDLYGACGPFGLCVTSNPTKCKCMKGFVPKYKEEWKRGNMTSGCMRRTELSCQANLSTKTQGKGVDVFYRLANVKPPDLYEYASFVDADQCHQGCLSNCSCSAFAYITGIGCLLWNHELIDTIRYSVGGEFLSIRLASSELAGSRRTKIIVGSISLSIFVILAFGSYKYWRYRAKQNVGPTWAFFNNSQDSWKNGLEPQEISGLTFFEMNTIRAATNNFNVSNKLGQGGFGPVYKGTLSDKKDIAVKRLSSSSGQGTEEFMNEIKLISKLQHRNLVRLLGCCIDGEEKLLIYEFLVNKSLDTFLFDLTLKLQIDWPKRFNIIQGVSRGLLYLHRDSCMRVIHRDLKVSNILLDDKMNPKISDFGLARMFQGTQHQDNTRKVVGTLGYMSPEYAWTGMFSEKSDIYAFGVLLLEIISGKKISSFCCGEEGKTLLGHAWECWLETGGVDLLDEDISSSCSPVEVEVARCVQIGLLCIQQQAVDRPNIAQVVTMMTSATDLPRPKQPLFALQIQDQESVVSVSKSVNHVTQTEIYGR

SEQ ID NO: 85277 - DNA, 4092 bp, Arabidopsis thaliana
  misc_feature (1)..(4092): Ceres Seq. ID no. 12679930
  misc_feature (1)..(4092): Ortholog of  Ceres SEQ ID NO 13582534 as cited in SEQ ID NO 57409
atgagacttcatgagagctcgagtccttttgtttgtattcttgtactgtcttgcttcttcttgagcgtgtctctggctcaggaaagagctttcttttctggcaagctcaatgattccgagacgattgtctctagctttcggacattcaggttcggtttcttcagccctgttaattccacaagtcgatatgctggtatatggtataacagtgtttctgtacaaactgtgatatgggttgctaacaaagataagccgatcaatgattcctctggagttatttcggtttctcaagatggaaatcttgtagttacggatggacagaggcgtgttctatggtcaactaacgtctctactcaagccagtgccaattctactgtcgctgagcttcttgattccgggaatctggtgctaaaagaggcgagtagtgacgcgtatctttgggagagcttcaagtatcctactgattcttggttgccaaatatgttggttgggacaaacgcaagaattggaggaggaaacgtcacgataacttcttggaaatccccttcggatccttcgcctgggagctacactgctgcactcgttcttgctgcatatccagagctcttcattatgaacaataataataataacagtacggtgtggcgaagtggcccgtggaatggccagatgtttaatggtttaccagatgtttatgcgggtgtttttctttatagattcatagttaatgatgacaccaatggatctgtcaccatgtcatatgctaatgattcaaccttgagatacttctacatggattatagaggatctgtgatccgaagagattggagtgagactaggagaaactggacggtcgggttacaagttccagcaaccgagtgtgacaactacaggcgatgtggcgaattcgctacttgcaatccacggaaaaacccgctttgttcttgcattagagggtttaggccaaggaacctaatagagtggaacaatggaaactggagtggtggatgcacaagaagggttcctttgcagtgtgaaagacagaacaataatgggagtgctgatgggtttttgaggctgcggcgaatgaaactgcctgactttgcaagaagatccgaagcaagcgaaccagaatgcttaaggacttgtttgcagacatgttcttgtatagctgctgctcatggcttaggatatggctgcatgatttggaatggaagcttagttgattcgcaggagttgtctgctagtggattggatctttatatccgtcttgcacattcagaaatcagcgcttgtgttcttctggcacgacgaattgtcatgaagaaaagagcgaaaaagaaaggaagagatgcagagcagatttttgagagagtggaagccttagctggtggtaataaaggaaagttgaaagagctaccattgtttgagtttcaagtgctagcagcagcaactaataatttctcgctgagaaataagcttggacaaggtggctttggtcctgtttacaaagggaagttgcaagaggggcaagagattgctgtgaagaggctgtcacgagcatcaggacaagggcttgaggagcttgttaacgaagtggttgtaatttctaagttgcagcatcggaatctggtgaaattacttggttgttgcattgcaggagaagagaggatgttagtctatgagttcatgcccaagaaaagcttagactattatctctttgactcaaggagggcaaaacttcttgattggaagacccggaccttccgaacgttcaggttcggtttcttcagccctgttaattccaccaaccgatatgctggtatatggtataacagcattcctgtacaaactgtgatatgggttgctaacaaagatacgccgatcaatgactcctctggagtgatttcaatatctgaagatggaaatctggtagttactgatggtcagaggcgtgttttgtggtcaactaacgtttctactcgagccagtgccaattctactgtcgctgagcttttggagtccgggaacctcgtgctaaaagatgccaataccgatgcatatctttgggagagcttcaagtatcctactgattcttggttgccaaatatgttggttgggacaaacgcaagaaccggaggaggaaacatcacaataacttcttggacaaacccttcggatccttcgccggggagctacactgctgcactcgttcttgctccatatccagagctttttattttcaacaataatgacaacaatgctacggtgtggcgcagtggcccttggaacggactgatgtttaacggtttaccagatgtatatccggggctctttctttatagatttaaagttaatgatgacaccaatggttcagccaccatgtcatatgctaatgattcaactttgagacacctctacttggattatagaggatttgctatccggagagattggagtgaggctaggagaaactggacgttagggtcacaagttccggcaaccgagtgtgacatttacagccgatgtggtcaatacactacctgcaatcctcggaaaaacccgcattgttcttgcattaaagggtttaggccaaggaaccttatagagtggaacaatggaaactggagtggtggatgcataagaaagctccctttgcagtgtgaaagacagaacaataaggggagtgctgataggtttttgaagctgcagcgaatgaaaatgcctgactttgcaagaagatccgaagccagcgaaccagaatgctttatgacttgtttgcagtcatgttcttgtatagcttttgctcatggattaggatatggctgcatgatttggaatagaagcttagttgattcacaagtgttgtctgctagtggaatggatctttctatccgtcttgcacattcagaattcaaaacacaggacaggcgacctattttgatcggtacatcattggcaggaggcatttttgttgtggcgacttgtgtccttctggcacgacgtattgtcatgaagaaaagagctaaaaagaaaggaacagatgcagagcaaatttttaagagagtagaagctttagctggtggtagtagagaaaagttgaaagagctacctttgtttgagtttcaagtgttagctactgcaaccgataacttctctcttagcaataagctcggacaaggcggttttggtccggtttacaaggggatgttgctagaaggtcaagagattgctgtgaagagactgtcacaagcatcaggacaagggcttgaggaacttgtcactgaagtggttgtgatttctaagttgcaacatcgaaatctggtgaaattatttggttgctgcattgcaggggaagaaaggatgttagtctatgagttcatgcccaagaaaagcttagacttttatatatttgatccaagggaagcaaaacttcttgactggaacacgcggtttgaaataatcaatggaatatgtagaggtctcctgtaccttcacagagattctaggctgagaatcattcacagagatctgaaagcaagcaacatcttgctagatgagaatctgattccgaaaatatctgattttgggttggccaggatattcccggggaatgaagatgaagcaaacaccagaagggtcgttggaacatatggctatatggcacctgaatatgcaatgggaggactgttttcagagaaatctgatgttttcagcttaggagtgatactcttagagattatcagtggaagaagaaactcacattcaactcttttggctcatgtgtggtcaatctggaacgaaggggagattaatggtatggtagatcctgagatttttgaccaactttttgagaaagaaatacgaaaatgcgttcacattgcgcttttgtgtgtgcaagacgctgctaatgataggccaagtgtttctacagtgtgtatgatgcttagcagtgaggttgcagacattccagaaccgaaacagcctgcttttatgcctagaaacgttggtttagaagctgagttctctgagagcattgctcttaaagcctctatcaacaatgtcaccatcactgatgtctcaggacgttaa

SEQ ID NO: 85278 - protein, 1363 aa, Arabidopsis thaliana
  peptide (1)..(1363): Ceres Seq. ID no. 12679931
MRLHESSSPFVCILVLSCFFLSVSLAQERAFFSGKLNDSETIVSSFRTFRFGFFSPVNSTSRYAGIWYNSVSVQTVIWVANKDKPINDSSGVISVSQDGNLVVTDGQRRVLWSTNVSTQASANSTVAELLDSGNLVLKEASSDAYLWESFKYPTDSWLPNMLVGTNARIGGGNVTITSWKSPSDPSPGSYTAALVLAAYPELFIMNNNNNNSTVWRSGPWNGQMFNGLPDVYAGVFLYRFIVNDDTNGSVTMSYANDSTLRYFYMDYRGSVIRRDWSETRRNWTVGLQVPATECDNYRRCGEFATCNPRKNPLCSCIRGFRPRNLIEWNNGNWSGGCTRRVPLQCERQNNNGSADGFLRLRRMKLPDFARRSEASEPECLRTCLQTCSCIAAAHGLGYGCMIWNGSLVDSQELSASGLDLYIRLAHSEISACVLLARRIVMKKRAKKKGRDAEQIFERVEALAGGNKGKLKELPLFEFQVLAAATNNFSLRNKLGQGGFGPVYKGKLQEGQEIAVKRLSRASGQGLEELVNEVVVISKLQHRNLVKLLGCCIAGEERMLVYEFMPKKSLDYYLFDSRRAKLLDWKTRTFRTFRFGFFSPVNSTNRYAGIWYNSIPVQTVIWVANKDTPINDSSGVISISEDGNLVVTDGQRRVLWSTNVSTRASANSTVAELLESGNLVLKDANTDAYLWESFKYPTDSWLPNMLVGTNARTGGGNITITSWTNPSDPSPGSYTAALVLAPYPELFIFNNNDNNATVWRSGPWNGLMFNGLPDVYPGLFLYRFKVNDDTNGSATMSYANDSTLRHLYLDYRGFAIRRDWSEARRNWTLGSQVPATECDIYSRCGQYTTCNPRKNPHCSCIKGFRPRNLIEWNNGNWSGGCIRKLPLQCERQNNKGSADRFLKLQRMKMPDFARRSEASEPECFMTCLQSCSCIAFAHGLGYGCMIWNRSLVDSQVLSASGMDLSIRLAHSEFKTQDRRPILIGTSLAGGIFVVATCVLLARRIVMKKRAKKKGTDAEQIFKRVEALAGGSREKLKELPLFEFQVLATATDNFSLSNKLGQGGFGPVYKGMLLEGQEIAVKRLSQASGQGLEELVTEVVVISKLQHRNLVKLFGCCIAGEERMLVYEFMPKKSLDFYIFDPREAKLLDWNTRFEIINGICRGLLYLHRDSRLRIIHRDLKASNILLDENLIPKISDFGLARIFPGNEDEANTRRVVGTYGYMAPEYAMGGLFSEKSDVFSLGVILLEIISGRRNSHSTLLAHVWSIWNEGEINGMVDPEIFDQLFEKEIRKCVHIALLCVQDAANDRPSVSTVCMMLSSEVADIPEPKQPAFMPRNVGLEAEFSESIALKASINNVTITDVSGR

SEQ ID NO: 85279 - protein, 1203 aa, Arabidopsis thaliana
  peptide (1)..(1203): Ceres Seq. ID no. 12679932
MLVGTNARIGGGNVTITSWKSPSDPSPGSYTAALVLAAYPELFIMNNNNNNSTVWRSGPWNGQMFNGLPDVYAGVFLYRFIVNDDTNGSVTMSYANDSTLRYFYMDYRGSVIRRDWSETRRNWTVGLQVPATECDNYRRCGEFATCNPRKNPLCSCIRGFRPRNLIEWNNGNWSGGCTRRVPLQCERQNNNGSADGFLRLRRMKLPDFARRSEASEPECLRTCLQTCSCIAAAHGLGYGCMIWNGSLVDSQELSASGLDLYIRLAHSEISACVLLARRIVMKKRAKKKGRDAEQIFERVEALAGGNKGKLKELPLFEFQVLAAATNNFSLRNKLGQGGFGPVYKGKLQEGQEIAVKRLSRASGQGLEELVNEVVVISKLQHRNLVKLLGCCIAGEERMLVYEFMPKKSLDYYLFDSRRAKLLDWKTRTFRTFRFGFFSPVNSTNRYAGIWYNSIPVQTVIWVANKDTPINDSSGVISISEDGNLVVTDGQRRVLWSTNVSTRASANSTVAELLESGNLVLKDANTDAYLWESFKYPTDSWLPNMLVGTNARTGGGNITITSWTNPSDPSPGSYTAALVLAPYPELFIFNNNDNNATVWRSGPWNGLMFNGLPDVYPGLFLYRFKVNDDTNGSATMSYANDSTLRHLYLDYRGFAIRRDWSEARRNWTLGSQVPATECDIYSRCGQYTTCNPRKNPHCSCIKGFRPRNLIEWNNGNWSGGCIRKLPLQCERQNNKGSADRFLKLQRMKMPDFARRSEASEPECFMTCLQSCSCIAFAHGLGYGCMIWNRSLVDSQVLSASGMDLSIRLAHSEFKTQDRRPILIGTSLAGGIFVVATCVLLARRIVMKKRAKKKGTDAEQIFKRVEALAGGSREKLKELPLFEFQVLATATDNFSLSNKLGQGGFGPVYKGMLLEGQEIAVKRLSQASGQGLEELVTEVVVISKLQHRNLVKLFGCCIAGEERMLVYEFMPKKSLDFYIFDPREAKLLDWNTRFEIINGICRGLLYLHRDSRLRIIHRDLKASNILLDENLIPKISDFGLARIFPGNEDEANTRRVVGTYGYMAPEYAMGGLFSEKSDVFSLGVILLEIISGRRNSHSTLLAHVWSIWNEGEINGMVDPEIFDQLFEKEIRKCVHIALLCVQDAANDRPSVSTVCMMLSSEVADIPEPKQPAFMPRNVGLEAEFSESIALKASINNVTITDVSGR

SEQ ID NO: 85280 - protein, 1159 aa, Arabidopsis thaliana
  peptide (1)..(1159): Ceres Seq. ID no. 12679933
MNNNNNNSTVWRSGPWNGQMFNGLPDVYAGVFLYRFIVNDDTNGSVTMSYANDSTLRYFYMDYRGSVIRRDWSETRRNWTVGLQVPATECDNYRRCGEFATCNPRKNPLCSCIRGFRPRNLIEWNNGNWSGGCTRRVPLQCERQNNNGSADGFLRLRRMKLPDFARRSEASEPECLRTCLQTCSCIAAAHGLGYGCMIWNGSLVDSQELSASGLDLYIRLAHSEISACVLLARRIVMKKRAKKKGRDAEQIFERVEALAGGNKGKLKELPLFEFQVLAAATNNFSLRNKLGQGGFGPVYKGKLQEGQEIAVKRLSRASGQGLEELVNEVVVISKLQHRNLVKLLGCCIAGEERMLVYEFMPKKSLDYYLFDSRRAKLLDWKTRTFRTFRFGFFSPVNSTNRYAGIWYNSIPVQTVIWVANKDTPINDSSGVISISEDGNLVVTDGQRRVLWSTNVSTRASANSTVAELLESGNLVLKDANTDAYLWESFKYPTDSWLPNMLVGTNARTGGGNITITSWTNPSDPSPGSYTAALVLAPYPELFIFNNNDNNATVWRSGPWNGLMFNGLPDVYPGLFLYRFKVNDDTNGSATMSYANDSTLRHLYLDYRGFAIRRDWSEARRNWTLGSQVPATECDIYSRCGQYTTCNPRKNPHCSCIKGFRPRNLIEWNNGNWSGGCIRKLPLQCERQNNKGSADRFLKLQRMKMPDFARRSEASEPECFMTCLQSCSCIAFAHGLGYGCMIWNRSLVDSQVLSASGMDLSIRLAHSEFKTQDRRPILIGTSLAGGIFVVATCVLLARRIVMKKRAKKKGTDAEQIFKRVEALAGGSREKLKELPLFEFQVLATATDNFSLSNKLGQGGFGPVYKGMLLEGQEIAVKRLSQASGQGLEELVTEVVVISKLQHRNLVKLFGCCIAGEERMLVYEFMPKKSLDFYIFDPREAKLLDWNTRFEIINGICRGLLYLHRDSRLRIIHRDLKASNILLDENLIPKISDFGLARIFPGNEDEANTRRVVGTYGYMAPEYAMGGLFSEKSDVFSLGVILLEIISGRRNSHSTLLAHVWSIWNEGEINGMVDPEIFDQLFEKEIRKCVHIALLCVQDAANDRPSVSTVCMMLSSEVADIPEPKQPAFMPRNVGLEAEFSESIALKASINNVTITDVSGR

SEQ ID NO: 85281 - DNA, 2451 bp, Arabidopsis thaliana
  misc_feature (1)..(2451): Ceres Seq. ID no. 12679938
  misc_feature (1)..(2451): Ortholog of  Ceres SEQ ID NO 13582534 as cited in SEQ ID NO 57409
atgattattgttggtgttcttttagttagtttcacacttttaagtcacatgaatcagttcttacatctttttgaaagtccaacctttgagatatatccggaactggggcgtgactcacagttaatgactgatccacttggttttcaatacttacacagcatttatacattttcactaaatccttgctctgaaacaaacacaaatatgaaggttgtcttcgttatcttctttttcttcctcttccaattttgtatctctgtggatacaattatgagaagacagtccttgagagatggtgaggttatactctccgcagggaagagattcgcgtttggattcttcagtcttggggattcagagctccggtatgttgggatttggtatgctcaaatctctcaacagactattgtttgggttgcaaacagagaccatcctattaatgacacctctgggatggtaaagttcagcaacagaggcaatctctctgtctatgcatctgacaatgaaacagagcttatctggtcaacaaatgtttcagatagtatgttggaaccaactttagttgctacactctctgatttaggcaaccttgttctgtttgatccagtcacagggagaagtttctgggagagctttgatcaccctacagacacgtttcttccgtttatgagattgggattcacacgaaaagacggtttggatcgctctctaacatcatggaagtctcatggtgaccctggttctggagacttaatactgcggatggaacgtagagggtttccacagttgattctgtacaaaggtgtaaccccatggtggcgtatggggtcatggaccgggcataggtggagcggggtgcctgaaatgccaatagggtacatcttcaataactcatttgtgaataatgaggacgaagtatccttcacttacggtgtgacagatgcttcggtcataacaagaaccatggtgaacgagactggaaccatgcaccggtttacatggattgcgagggacaagagatggaatgatttctggtcagttcctaaagagcagtgcgataactacgctcattgtggccctaacggttactgtgattcccctagctcaaaaacgtttgagtgcacatgcctacctggttttgagcccaagtttccccggcattggttcttgagggactcttctggcgggtgtacaaagaaaaagagagcttcaatatgcagtgagaaagacgggtttgtgaagttaaagcgcatgaagattcccgacacatcagatgcaagtgtggatatgaacataacattgaaggagtgcaaacagaggtgcttgaagaactgctcttgtgtcgcttacgcaagtgcttaccacgagagtaaaagaggagcaataggatgcttgaaatggcatggtggtatgttggatgcaaggacatacttgaactcgggacaagatttctacatacgtgtagacaaggaagagttagcaacaaataacttctcttcccaaaacaagcttggagcaggtggtttcggacctgtttataagggcgtgttacaaaaccgtatggagatagcggtgaagaggttgtcgagaaactcgggacaaggaatggaagagttcaagaacgaggtcaagctgatatcaaagttgcagcatcgaaatctcgtgaggatcttaggatgttgcgttgaattggaagagaagatgttggtatacgagtatttaccaaacaagagcctagactatttcatattccatgaagagcagagagcagagttggattggccaaaaagaatggagatagtccgagggattgctcgtggaatcttatatcttcatcaagattcaagactgagaatcatccacagagatctcaaggccagcaatatacttcttgacagtgaaatgatcccaaagatttcagatttcggcatggctagaatctttgggggcaaccaaatggaaggatgcacaagtagggtcgtcggaacattcggatatatggcaccggagtatgcaatggagggacagttctccattaaatccgacgtctatagctttggagtattgatgttagagatcataaccggaaagaaaaacagtgctttccacgaggaatcatctaacttagtcggacatatttgggatctatgggaaaacggtgaagcaacagagatcatagacaatttaatggaccaagagacttatgatgagagagaagtgatgaagtgcatacaaattgggttgctctgtgtgcaagaaaacgcttcggacagagtagacatgtcctctgttgtcatcatgttgggtcataacgccactaatcttccgaatccaaagcatcctgcgtttacttccgcgagaaggagaggcggtgaaaatggtgcttgtcttaagggacaaaccggtatttctgttaatgacgttaccttcagcgacattcaaggtcgttaa

SEQ ID NO: 85282 - protein, 816 aa, Arabidopsis thaliana
  peptide (1)..(816): Ceres Seq. ID no. 12679939
MIIVGVLLVSFTLLSHMNQFLHLFESPTFEIYPELGRDSQLMTDPLGFQYLHSIYTFSLNPCSETNTNMKVVFVIFFFFLFQFCISVDTIMRRQSLRDGEVILSAGKRFAFGFFSLGDSELRYVGIWYAQISQQTIVWVANRDHPINDTSGMVKFSNRGNLSVYASDNETELIWSTNVSDSMLEPTLVATLSDLGNLVLFDPVTGRSFWESFDHPTDTFLPFMRLGFTRKDGLDRSLTSWKSHGDPGSGDLILRMERRGFPQLILYKGVTPWWRMGSWTGHRWSGVPEMPIGYIFNNSFVNNEDEVSFTYGVTDASVITRTMVNETGTMHRFTWIARDKRWNDFWSVPKEQCDNYAHCGPNGYCDSPSSKTFECTCLPGFEPKFPRHWFLRDSSGGCTKKKRASICSEKDGFVKLKRMKIPDTSDASVDMNITLKECKQRCLKNCSCVAYASAYHESKRGAIGCLKWHGGMLDARTYLNSGQDFYIRVDKEELATNNFSSQNKLGAGGFGPVYKGVLQNRMEIAVKRLSRNSGQGMEEFKNEVKLISKLQHRNLVRILGCCVELEEKMLVYEYLPNKSLDYFIFHEEQRAELDWPKRMEIVRGIARGILYLHQDSRLRIIHRDLKASNILLDSEMIPKISDFGMARIFGGNQMEGCTSRVVGTFGYMAPEYAMEGQFSIKSDVYSFGVLMLEIITGKKNSAFHEESSNLVGHIWDLWENGEATEIIDNLMDQETYDEREVMKCIQIGLLCVQENASDRVDMSSVVIMLGHNATNLPNPKHPAFTSARRRGGENGACLKGQTGISVNDVTFSDIQGR

SEQ ID NO: 85283 - protein, 800 aa, Arabidopsis thaliana
  peptide (1)..(800): Ceres Seq. ID no. 12679940
MNQFLHLFESPTFEIYPELGRDSQLMTDPLGFQYLHSIYTFSLNPCSETNTNMKVVFVIFFFFLFQFCISVDTIMRRQSLRDGEVILSAGKRFAFGFFSLGDSELRYVGIWYAQISQQTIVWVANRDHPINDTSGMVKFSNRGNLSVYASDNETELIWSTNVSDSMLEPTLVATLSDLGNLVLFDPVTGRSFWESFDHPTDTFLPFMRLGFTRKDGLDRSLTSWKSHGDPGSGDLILRMERRGFPQLILYKGVTPWWRMGSWTGHRWSGVPEMPIGYIFNNSFVNNEDEVSFTYGVTDASVITRTMVNETGTMHRFTWIARDKRWNDFWSVPKEQCDNYAHCGPNGYCDSPSSKTFECTCLPGFEPKFPRHWFLRDSSGGCTKKKRASICSEKDGFVKLKRMKIPDTSDASVDMNITLKECKQRCLKNCSCVAYASAYHESKRGAIGCLKWHGGMLDARTYLNSGQDFYIRVDKEELATNNFSSQNKLGAGGFGPVYKGVLQNRMEIAVKRLSRNSGQGMEEFKNEVKLISKLQHRNLVRILGCCVELEEKMLVYEYLPNKSLDYFIFHEEQRAELDWPKRMEIVRGIARGILYLHQDSRLRIIHRDLKASNILLDSEMIPKISDFGMARIFGGNQMEGCTSRVVGTFGYMAPEYAMEGQFSIKSDVYSFGVLMLEIITGKKNSAFHEESSNLVGHIWDLWENGEATEIIDNLMDQETYDEREVMKCIQIGLLCVQENASDRVDMSSVVIMLGHNATNLPNPKHPAFTSARRRGGENGACLKGQTGISVNDVTFSDIQGR

SEQ ID NO: 85284 - protein, 775 aa, Arabidopsis thaliana
  peptide (1)..(775): Ceres Seq. ID no. 12679941
MTDPLGFQYLHSIYTFSLNPCSETNTNMKVVFVIFFFFLFQFCISVDTIMRRQSLRDGEVILSAGKRFAFGFFSLGDSELRYVGIWYAQISQQTIVWVANRDHPINDTSGMVKFSNRGNLSVYASDNETELIWSTNVSDSMLEPTLVATLSDLGNLVLFDPVTGRSFWESFDHPTDTFLPFMRLGFTRKDGLDRSLTSWKSHGDPGSGDLILRMERRGFPQLILYKGVTPWWRMGSWTGHRWSGVPEMPIGYIFNNSFVNNEDEVSFTYGVTDASVITRTMVNETGTMHRFTWIARDKRWNDFWSVPKEQCDNYAHCGPNGYCDSPSSKTFECTCLPGFEPKFPRHWFLRDSSGGCTKKKRASICSEKDGFVKLKRMKIPDTSDASVDMNITLKECKQRCLKNCSCVAYASAYHESKRGAIGCLKWHGGMLDARTYLNSGQDFYIRVDKEELATNNFSSQNKLGAGGFGPVYKGVLQNRMEIAVKRLSRNSGQGMEEFKNEVKLISKLQHRNLVRILGCCVELEEKMLVYEYLPNKSLDYFIFHEEQRAELDWPKRMEIVRGIARGILYLHQDSRLRIIHRDLKASNILLDSEMIPKISDFGMARIFGGNQMEGCTSRVVGTFGYMAPEYAMEGQFSIKSDVYSFGVLMLEIITGKKNSAFHEESSNLVGHIWDLWENGEATEIIDNLMDQETYDEREVMKCIQIGLLCVQENASDRVDMSSVVIMLGHNATNLPNPKHPAFTSARRRGGENGACLKGQTGISVNDVTFSDIQGR

SEQ ID NO: 85285 - DNA, 2613 bp, Arabidopsis thaliana
  misc_feature (1)..(2613): Ceres Seq. ID no. 12679942
  misc_feature (1)..(2613): Ortholog of  Ceres SEQ ID NO 15176130 as cited in SEQ ID NO 1136
  misc_feature (1)..(2613): Ortholog of  Ceres SEQ ID NO 13594037 as cited in SEQ ID NO 55666
  misc_feature (1)..(2613): Ortholog of  Ceres SEQ ID NO 15171728 as cited in SEQ ID NO 57131
  misc_feature (1)..(2613): Ortholog of  Ceres SEQ ID NO 14308198 as cited in SEQ ID NO 59072
  misc_feature (1)..(2613): Ortholog of  Ceres SEQ ID NO 13654213 as cited in SEQ ID NO 60614
  misc_feature (1)..(2613): Ortholog of  Ceres SEQ ID NO 12617527 as cited in SEQ ID NO 64697
  misc_feature (1)..(2613): Ortholog of  Ceres SEQ ID NO 13657707 as cited in SEQ ID NO 66407
atggcgatgaccagtaccatgcagctcttagtattgagttttctcgtaatagcctcactgtttcttggggcaacggtggctcctccagcaagtttgatctccacgcccgatcaggcattgaaggataaagccgacttgattgtcgccaaggatggcagcggcaacttcaccacggtgaatgaagcggttgcagcagctccagagaatggtgtgaagccttttgtcatctacatcaaagaagggttatacaaggaagttattcgtatcgggaagaagaaaactaacttaaccctcgttggcgacggcagagacttgacggtcctcagcggcgatttgaacggcgttgatggcatcaagactttcgactccgcaacacttgctgtagatgagagtggatttatggctcaagatttgtgtattcggaacacagctgggccagagaagcggcaggccgtggctctccgtattagcactgatatgacgatcatttatcgttgcaggatcgacgcgtatcaagacaccctttatgcatattcgggtagacaattctaccgagattgttatattacgggaaccgtcgatttcattttcggacgggcagctgcggtatttcaatattgccaaatcgaggcacgtaaaccggggataggacaaaccaacatcttgactgctcaatctcgcgaggaagatactgcaacttcgggattttcgttccagaaatgcaacatcagtgcaagttctgacctcactccaattaaaggaactgtaaagacgtttctgggacgtccgtggcgtgcattctcgagagtagtattcatggagtcgtttatagacgatgtcatcgatcgagcgggagcagatacaagtaaaagagtcggttggaaaggatatcacacaatcacccttaatgaagctacaagttttacagtggaaaaacttctacagggacatttgtggattaacgctatattctttcttgtttttgttgtttcagcatctgcaagatttagcacggaggttacaaaaagcgaaatcaacagtatctgcacacatacagatgtcgatgcttcattgtgctttgagttcttgaactcatctcctcaaattgcagcactggatttttatggccttaccaaatatttaattacttatgaatctcgaaaattttcagatatgttgaaacaattccagtcactcgtaaacagcactacggatcctagtgctaaaggttcctatcatgtatgcgtaggaacgtttgacaaaggtactggttgttttgatgacgccttcagacatttggcatccaaggactatatcactttggaatggagtgttgaatgtacgtttgacatggcagctggttttttttttcttgtttttgttgtttcatcatctgcaagatttagtacggagattacaaaaagtgaaatcaacagtatctgcacacatacagaagccaataccaatgcttcattgtgctttgagttcctgaactcatcccctgaaattgcatcactggatttctatggccttaccaaatatatacttacttataattctcgaaaaacttcagatatgctgaaacaattccaggcactcgtaagaagcacaacggatcccaacgctaaaggttcctaccatgtatgtgcagaaatgttcgacaaagctactgattgttttgatgacgccttcacaactttggcatccaaggactatatcactttagaacaaagggttgtttgtacgtttgacatgggggatgggtgtaaagaagagctgttaactttcactcctagcccacaactcttcaaagatgtttctattgtcaaaaatctttcttctatgagtcaattgaagaaaccgagagagagagtgagcggaatcatgacttctccgggaaaatctccgagatccgaccggaaatcaccgacggttgtcaccgtccagccgtcttctcccagattcccgatcagcacacctactgctggagctcaacgtaagatcgggatcgctgtcgatctaagcgacgagagtgcgtacgcagttcaatgggctgttcagaactatctccgatcaggtgacgccgttgttctccttcatgttcaaccgacgagtgtactttacggcgccgattggggcgctatggatttgtcgccgcagtgggatccaaataacgaagagtcgcagaggaagcttgaggacgatttcgacattgtcactaataagaaagcgagcgacgttgctcagcctttggttgaggcggatattccgtttaagatccatatcgtcaaggatcacgatatgaaggagaggctttgtttggaggtggagaggttagggctaagtactttgattatgggtagtagaggatttggtgctacgaagaggagtagtaaagggagattagggagtgtcagtgattactcagttcaccattgtgcttgtccggtggttgttgttagatttcctgatgataaggatggagaagatgagaaatccggcgacagtggtggggagaatctgatggacagtgataaacttcatacagtgcctgaggtggctgaagaagagggagataaggatgagtaccatgatgcttcggataagcagtag

SEQ ID NO: 85286 - protein, 870 aa, Arabidopsis thaliana
  peptide (1)..(870): Ceres Seq. ID no. 12679943
MAMTSTMQLLVLSFLVIASLFLGATVAPPASLISTPDQALKDKADLIVAKDGSGNFTTVNEAVAAAPENGVKPFVIYIKEGLYKEVIRIGKKKTNLTLVGDGRDLTVLSGDLNGVDGIKTFDSATLAVDESGFMAQDLCIRNTAGPEKRQAVALRISTDMTIIYRCRIDAYQDTLYAYSGRQFYRDCYITGTVDFIFGRAAAVFQYCQIEARKPGIGQTNILTAQSREEDTATSGFSFQKCNISASSDLTPIKGTVKTFLGRPWRAFSRVVFMESFIDDVIDRAGADTSKRVGWKGYHTITLNEATSFTVEKLLQGHLWINAIFFLVFVVSASARFSTEVTKSEINSICTHTDVDASLCFEFLNSSPQIAALDFYGLTKYLITYESRKFSDMLKQFQSLVNSTTDPSAKGSYHVCVGTFDKGTGCFDDAFRHLASKDYITLEWSVECTFDMAAGFFFLVFVVSSSARFSTEITKSEINSICTHTEANTNASLCFEFLNSSPEIASLDFYGLTKYILTYNSRKTSDMLKQFQALVRSTTDPNAKGSYHVCAEMFDKATDCFDDAFTTLASKDYITLEQRVVCTFDMGDGCKEELLTFTPSPQLFKDVSIVKNLSSMSQLKKPRERVSGIMTSPGKSPRSDRKSPTVVTVQPSSPRFPISTPTAGAQRKIGIAVDLSDESAYAVQWAVQNYLRSGDAVVLLHVQPTSVLYGADWGAMDLSPQWDPNNEESQRKLEDDFDIVTNKKASDVAQPLVEADIPFKIHIVKDHDMKERLCLEVERLGLSTLIMGSRGFGATKRSSKGRLGSVSDYSVHHCACPVVVVRFPDDKDGEDEKSGDSGGENLMDSDKLHTVPEVAEEEGDKDEYHDASDKQ

SEQ ID NO: 85287 - protein, 868 aa, Arabidopsis thaliana
  peptide (1)..(868): Ceres Seq. ID no. 12679944
MTSTMQLLVLSFLVIASLFLGATVAPPASLISTPDQALKDKADLIVAKDGSGNFTTVNEAVAAAPENGVKPFVIYIKEGLYKEVIRIGKKKTNLTLVGDGRDLTVLSGDLNGVDGIKTFDSATLAVDESGFMAQDLCIRNTAGPEKRQAVALRISTDMTIIYRCRIDAYQDTLYAYSGRQFYRDCYITGTVDFIFGRAAAVFQYCQIEARKPGIGQTNILTAQSREEDTATSGFSFQKCNISASSDLTPIKGTVKTFLGRPWRAFSRVVFMESFIDDVIDRAGADTSKRVGWKGYHTITLNEATSFTVEKLLQGHLWINAIFFLVFVVSASARFSTEVTKSEINSICTHTDVDASLCFEFLNSSPQIAALDFYGLTKYLITYESRKFSDMLKQFQSLVNSTTDPSAKGSYHVCVGTFDKGTGCFDDAFRHLASKDYITLEWSVECTFDMAAGFFFLVFVVSSSARFSTEITKSEINSICTHTEANTNASLCFEFLNSSPEIASLDFYGLTKYILTYNSRKTSDMLKQFQALVRSTTDPNAKGSYHVCAEMFDKATDCFDDAFTTLASKDYITLEQRVVCTFDMGDGCKEELLTFTPSPQLFKDVSIVKNLSSMSQLKKPRERVSGIMTSPGKSPRSDRKSPTVVTVQPSSPRFPISTPTAGAQRKIGIAVDLSDESAYAVQWAVQNYLRSGDAVVLLHVQPTSVLYGADWGAMDLSPQWDPNNEESQRKLEDDFDIVTNKKASDVAQPLVEADIPFKIHIVKDHDMKERLCLEVERLGLSTLIMGSRGFGATKRSSKGRLGSVSDYSVHHCACPVVVVRFPDDKDGEDEKSGDSGGENLMDSDKLHTVPEVAEEEGDKDEYHDASDKQ

SEQ ID NO: 85288 - protein, 864 aa, Arabidopsis thaliana
  peptide (1)..(864): Ceres Seq. ID no. 12679945
MQLLVLSFLVIASLFLGATVAPPASLISTPDQALKDKADLIVAKDGSGNFTTVNEAVAAAPENGVKPFVIYIKEGLYKEVIRIGKKKTNLTLVGDGRDLTVLSGDLNGVDGIKTFDSATLAVDESGFMAQDLCIRNTAGPEKRQAVALRISTDMTIIYRCRIDAYQDTLYAYSGRQFYRDCYITGTVDFIFGRAAAVFQYCQIEARKPGIGQTNILTAQSREEDTATSGFSFQKCNISASSDLTPIKGTVKTFLGRPWRAFSRVVFMESFIDDVIDRAGADTSKRVGWKGYHTITLNEATSFTVEKLLQGHLWINAIFFLVFVVSASARFSTEVTKSEINSICTHTDVDASLCFEFLNSSPQIAALDFYGLTKYLITYESRKFSDMLKQFQSLVNSTTDPSAKGSYHVCVGTFDKGTGCFDDAFRHLASKDYITLEWSVECTFDMAAGFFFLVFVVSSSARFSTEITKSEINSICTHTEANTNASLCFEFLNSSPEIASLDFYGLTKYILTYNSRKTSDMLKQFQALVRSTTDPNAKGSYHVCAEMFDKATDCFDDAFTTLASKDYITLEQRVVCTFDMGDGCKEELLTFTPSPQLFKDVSIVKNLSSMSQLKKPRERVSGIMTSPGKSPRSDRKSPTVVTVQPSSPRFPISTPTAGAQRKIGIAVDLSDESAYAVQWAVQNYLRSGDAVVLLHVQPTSVLYGADWGAMDLSPQWDPNNEESQRKLEDDFDIVTNKKASDVAQPLVEADIPFKIHIVKDHDMKERLCLEVERLGLSTLIMGSRGFGATKRSSKGRLGSVSDYSVHHCACPVVVVRFPDDKDGEDEKSGDSGGENLMDSDKLHTVPEVAEEEGDKDEYHDASDKQ

SEQ ID NO: 85289 - DNA, 1287 bp, Arabidopsis thaliana
  misc_feature (1)..(1287): Ceres Seq. ID no. 12679946
  misc_feature (1)..(1287): Ortholog of  Ceres SEQ ID NO 15180386 as cited in SEQ ID NO 0
atggggctggttgtggaatcatgtgggcctcgttttaggaaaatatggcttgagatggtccatcgaactctggaaagagcaggtcctgcttttatcaaatggggtcaatgggcagccacgcgacctgatctattccccaaggatttgtgttcacagctctcaaagcttcacagtaatgctcctgagcatagcttcgcctacactaagaaaactatcgagaaggcatttggtcgtaaactttctgagatatttgaggagtttgatgaggtgccagtggcatctgggagtattgcccaagtacatagagcttctttaaggtttcagtatccaggacaaaagtccaagtcttcgctggttgcggttaaagttagacatccgggtgttggtgaatcgattaggagagattttgtgataattaatttggtggcaaagatatcgactttaattccagctttgaaatggttgagattggacgagagtgtgcaacagtttggtgtcttcatgttgtctcaagttgatctcgcgagggaagcttcacatttgagtcggttcatatataacttccgtagatggaaggatgtctctttccctaaacctgtgtatcctcttgtacatcctgctgttttggtggagacatatgagcatggagaaagtgtggcacgttatgttgatggaatggaaggacatgaatggattaagactagattggctcacatcgggacccatgccctcttgaagatgctcttggttgataactttattcacgctgacatgcatccgggaaatatccttgtccggaaaaaggcttcccgtggaggccttttcaaaacgaagaagcctcacattgttttccttgatgtgggaatgactgcagaacttgcaaagaatgaccgagagaacttacttgactttttcaaggcggttgcgcgtagagatggccggactgctgctgaacgaacacttaaattatcaagaaagcagaattgtcccaatccagaggcttttatcgaggaagtagaggaagcattcaaattctggggaacccctgagggagatttagtacatccagcagattgtatgcacgaattacttgagaaagtaagacgtcatagagtaaatattgatgggaatgtgtgcactgttatggtgacaacattagttctcgagggttggcaacggaaacttgacccaggatatgatgtgatgcacacgttgcaaacaatggtgttgaaaaccgactgggctaagtctctttcttatacggtggatggtctgatggcgccgtag

SEQ ID NO: 85290 - protein, 428 aa, Arabidopsis thaliana
  peptide (1)..(428): Ceres Seq. ID no. 12679947
MGLVVESCGPRFRKIWLEMVHRTLERAGPAFIKWGQWAATRPDLFPKDLCSQLSKLHSNAPEHSFAYTKKTIEKAFGRKLSEIFEEFDEVPVASGSIAQVHRASLRFQYPGQKSKSSLVAVKVRHPGVGESIRRDFVIINLVAKISTLIPALKWLRLDESVQQFGVFMLSQVDLAREASHLSRFIYNFRRWKDVSFPKPVYPLVHPAVLVETYEHGESVARYVDGMEGHEWIKTRLAHIGTHALLKMLLVDNFIHADMHPGNILVRKKASRGGLFKTKKPHIVFLDVGMTAELAKNDRENLLDFFKAVARRDGRTAAERTLKLSRKQNCPNPEAFIEEVEEAFKFWGTPEGDLVHPADCMHELLEKVRRHRVNIDGNVCTVMVTTLVLEGWQRKLDPGYDVMHTLQTMVLKTDWAKSLSYTVDGLMAP

SEQ ID NO: 85291 - protein, 410 aa, Arabidopsis thaliana
  peptide (1)..(410): Ceres Seq. ID no. 12679948
MVHRTLERAGPAFIKWGQWAATRPDLFPKDLCSQLSKLHSNAPEHSFAYTKKTIEKAFGRKLSEIFEEFDEVPVASGSIAQVHRASLRFQYPGQKSKSSLVAVKVRHPGVGESIRRDFVIINLVAKISTLIPALKWLRLDESVQQFGVFMLSQVDLAREASHLSRFIYNFRRWKDVSFPKPVYPLVHPAVLVETYEHGESVARYVDGMEGHEWIKTRLAHIGTHALLKMLLVDNFIHADMHPGNILVRKKASRGGLFKTKKPHIVFLDVGMTAELAKNDRENLLDFFKAVARRDGRTAAERTLKLSRKQNCPNPEAFIEEVEEAFKFWGTPEGDLVHPADCMHELLEKVRRHRVNIDGNVCTVMVTTLVLEGWQRKLDPGYDVMHTLQTMVLKTDWAKSLSYTVDGLMAP

SEQ ID NO: 85292 - protein, 261 aa, Arabidopsis thaliana
  peptide (1)..(261): Ceres Seq. ID no. 12679949
MLSQVDLAREASHLSRFIYNFRRWKDVSFPKPVYPLVHPAVLVETYEHGESVARYVDGMEGHEWIKTRLAHIGTHALLKMLLVDNFIHADMHPGNILVRKKASRGGLFKTKKPHIVFLDVGMTAELAKNDRENLLDFFKAVARRDGRTAAERTLKLSRKQNCPNPEAFIEEVEEAFKFWGTPEGDLVHPADCMHELLEKVRRHRVNIDGNVCTVMVTTLVLEGWQRKLDPGYDVMHTLQTMVLKTDWAKSLSYTVDGLMAP

SEQ ID NO: 85293 - DNA, 2349 bp, Arabidopsis thaliana
  misc_feature (1)..(2349): Ceres Seq. ID no. 12679950
  misc_feature (1)..(2349): Ortholog of  Ceres SEQ ID NO 13582534 as cited in SEQ ID NO 57409
  misc_feature (1)..(2349): Ortholog of  Ceres SEQ ID NO 13660544 as cited in SEQ ID NO 67401
atgaagttcttctttatctttttcattttcttgttctccttcttgattcaatcttgttactctgacaacacaatcttgagaagtcagtctttgaaagatggtgatgttatatactctgaaggaaagagatttgcttttggattcttcagcttggggaattcaaagctcaggtatgttgggatttggtatgctcaagtctctgagcagactattgtatgggttgcaaatagagatcatcctattaatgacacatctggtctgataaagttcagtaccagagggaatctttgtgtgtatgcatctggcaatggaacagagcctatttggtctactgatgttattgatatgatccaagaacctgctttagttgcgaagctatctgatttaggcaaccttgttctacttgatcctgtcacagggaaaagtttctgggagagctttaatcatcctacaaacactttgcttccctttatgaagtttggattcactcgtcaaagcggtgtggatcgtattatgacgtcttggagatctcctggtgacccgggttctggaaacattacataccggatagaacgtagagggtttccgcagatgatgatgtacaagggtctgactctttggtggcgtactgggtcatggacagggcaaagatggagtggtgtgcctgaaatgacaaacaagtttatcttcaatatctcgtttgtgaataatccagatgaagtatcaatcacttatggagtgttagatgcttcggttacaacaagaatggtgctaaacgagacaggaactctgcaacggtttcgctggaacgggagagataagaaatggatcgggttctggtcagctcccgaagataagtgtgacatctacaaccactgtggctttaacggttactgtgattccaccagtacagagaagtttgagtgctcttgcttaccggggtacgagcctaagacacctcgagattggttcttgagagatgcttcggatgggtgcacgaggataaaagcagattcgatatgtaatgggaaagaagggtttgcaaagttgaagcgagtgaagattcccaatacatcagctgttaatgtggatatgaacataacactgaaggaatgtgaacagaggtgcttgaagaactgctcatgtgttgcttatgcgagtgcttaccacgagagtcaagatggagctaaagggtgcttgacatggcacggcaatatgttggatactaggacatacttgagctcaggacaggatttctatttacgcgtagataagtcagagttagactcattcatacttgaagagcttgaggacaaatcaagaagccgggagttgcctctctttgagcttagcacgattgctacagcaacgaataattttgcttttcaaaacaagcttggagcaggtggttttggacctgtttataaaggtgtgttacaaaatggtatggaaatagcagtgaagaggttgtcaaaaagctcaggtcaaggaatggaagagttcaagaacgaggtcaagttgatatcgaagctgcagcatcgaaatctcgtgaggatcttaggatgttgtgttgaatttgaagagaagatgttggtatacgagtatttaccaaacaagagcctagactatttcatattccatgaagagcaaagagcagagttggattggccaaaaagaatggggataatccgcgggattggtcgtggaatcttataccttcatcaagattcaaggctgaggatcatccacagagaccttaaggccagcaatgtacttcttgacaatgaaatgataccgaagattgcggatttcggcctggctagaatcttcggaggcaaccaaatcgaaggaagcacaaatcgagtcgtcggaacatatggatacatgtcaccagagtatgcaatggacggccagttctctattaaatccgatgtatacagctttggagtattgatcttagagatcataaccggaaagagaaacagtgctttttatgaggaatctttgaatctagtcaaacatatttgggatcgatgggaaaatggtgaagctatagagatcatagacaaattaatgggtgaagagacgtatgatgagggcgaagtaatgaagtgcttacacattgggttactttgcgtgcaagaaaactcttcagacagaccagacatgtcctctgttgtcttcatgttaggtcataacgccattgatcttccatctccgaagcatcctgcatttacggcgggaaggaggagaaacaccaaaactggcggcagctcagataattggcccagcggagaaaccagcagtactattaacgacgttactctcaccgatgttcaaggtcgttaa

SEQ ID NO: 85294 - protein, 782 aa, Arabidopsis thaliana
  peptide (1)..(782): Ceres Seq. ID no. 12679951
MKFFFIFFIFLFSFLIQSCYSDNTILRSQSLKDGDVIYSEGKRFAFGFFSLGNSKLRYVGIWYAQVSEQTIVWVANRDHPINDTSGLIKFSTRGNLCVYASGNGTEPIWSTDVIDMIQEPALVAKLSDLGNLVLLDPVTGKSFWESFNHPTNTLLPFMKFGFTRQSGVDRIMTSWRSPGDPGSGNITYRIERRGFPQMMMYKGLTLWWRTGSWTGQRWSGVPEMTNKFIFNISFVNNPDEVSITYGVLDASVTTRMVLNETGTLQRFRWNGRDKKWIGFWSAPEDKCDIYNHCGFNGYCDSTSTEKFECSCLPGYEPKTPRDWFLRDASDGCTRIKADSICNGKEGFAKLKRVKIPNTSAVNVDMNITLKECEQRCLKNCSCVAYASAYHESQDGAKGCLTWHGNMLDTRTYLSSGQDFYLRVDKSELDSFILEELEDKSRSRELPLFELSTIATATNNFAFQNKLGAGGFGPVYKGVLQNGMEIAVKRLSKSSGQGMEEFKNEVKLISKLQHRNLVRILGCCVEFEEKMLVYEYLPNKSLDYFIFHEEQRAELDWPKRMGIIRGIGRGILYLHQDSRLRIIHRDLKASNVLLDNEMIPKIADFGLARIFGGNQIEGSTNRVVGTYGYMSPEYAMDGQFSIKSDVYSFGVLILEIITGKRNSAFYEESLNLVKHIWDRWENGEAIEIIDKLMGEETYDEGEVMKCLHIGLLCVQENSSDRPDMSSVVFMLGHNAIDLPSPKHPAFTAGRRRNTKTGGSSDNWPSGETSSTINDVTLTDVQGR

SEQ ID NO: 85295 - protein, 667 aa, Arabidopsis thaliana
  peptide (1)..(667): Ceres Seq. ID no. 12679952
MIQEPALVAKLSDLGNLVLLDPVTGKSFWESFNHPTNTLLPFMKFGFTRQSGVDRIMTSWRSPGDPGSGNITYRIERRGFPQMMMYKGLTLWWRTGSWTGQRWSGVPEMTNKFIFNISFVNNPDEVSITYGVLDASVTTRMVLNETGTLQRFRWNGRDKKWIGFWSAPEDKCDIYNHCGFNGYCDSTSTEKFECSCLPGYEPKTPRDWFLRDASDGCTRIKADSICNGKEGFAKLKRVKIPNTSAVNVDMNITLKECEQRCLKNCSCVAYASAYHESQDGAKGCLTWHGNMLDTRTYLSSGQDFYLRVDKSELDSFILEELEDKSRSRELPLFELSTIATATNNFAFQNKLGAGGFGPVYKGVLQNGMEIAVKRLSKSSGQGMEEFKNEVKLISKLQHRNLVRILGCCVEFEEKMLVYEYLPNKSLDYFIFHEEQRAELDWPKRMGIIRGIGRGILYLHQDSRLRIIHRDLKASNVLLDNEMIPKIADFGLARIFGGNQIEGSTNRVVGTYGYMSPEYAMDGQFSIKSDVYSFGVLILEIITGKRNSAFYEESLNLVKHIWDRWENGEAIEIIDKLMGEETYDEGEVMKCLHIGLLCVQENSSDRPDMSSVVFMLGHNAIDLPSPKHPAFTAGRRRNTKTGGSSDNWPSGETSSTINDVTLTDVQGR

SEQ ID NO: 85296 - protein, 625 aa, Arabidopsis thaliana
  peptide (1)..(625): Ceres Seq. ID no. 12679953
MKFGFTRQSGVDRIMTSWRSPGDPGSGNITYRIERRGFPQMMMYKGLTLWWRTGSWTGQRWSGVPEMTNKFIFNISFVNNPDEVSITYGVLDASVTTRMVLNETGTLQRFRWNGRDKKWIGFWSAPEDKCDIYNHCGFNGYCDSTSTEKFECSCLPGYEPKTPRDWFLRDASDGCTRIKADSICNGKEGFAKLKRVKIPNTSAVNVDMNITLKECEQRCLKNCSCVAYASAYHESQDGAKGCLTWHGNMLDTRTYLSSGQDFYLRVDKSELDSFILEELEDKSRSRELPLFELSTIATATNNFAFQNKLGAGGFGPVYKGVLQNGMEIAVKRLSKSSGQGMEEFKNEVKLISKLQHRNLVRILGCCVEFEEKMLVYEYLPNKSLDYFIFHEEQRAELDWPKRMGIIRGIGRGILYLHQDSRLRIIHRDLKASNVLLDNEMIPKIADFGLARIFGGNQIEGSTNRVVGTYGYMSPEYAMDGQFSIKSDVYSFGVLILEIITGKRNSAFYEESLNLVKHIWDRWENGEAIEIIDKLMGEETYDEGEVMKCLHIGLLCVQENSSDRPDMSSVVFMLGHNAIDLPSPKHPAFTAGRRRNTKTGGSSDNWPSGETSSTINDVTLTDVQGR

SEQ ID NO: 85297 - DNA, 1385 bp, Arabidopsis thaliana
  misc_feature (1)..(1385): Ceres Seq. ID no. 12679981
  misc_feature (1)..(1385): Ortholog of  Ceres SEQ ID NO 14301676 as cited in SEQ ID NO 67423
atgacgatcaatttagtccctcttctcctctccctaatcaccatcttcaccatcttcaatccatccgcccttgcagaccagagtcaaatccgcagcacaacaagccaatggctccatttctcggaggacctcagccaatcaactattgaagtctccatccccaccataatcgccgccgttctctcgttcttcgccgcctctatctccagcgccggaggaatcggcggcggtggactcttcctctcgataatgacaatcatcgccggtctcgaaatgaaaacagcttcaagcttctcagcgttcatggtaaccggcgtctctttcgctaacgtgggatgcaatcttttcctgagaaaccctaaatcaagagacaaaaccctaatcgacttcgatttagctcttactattcagccatgtctacttctcggagtaagtattggtgtgatctgtaaccgtatgttcccaaattggcttgtgttgtttctcttcgctgtgttcctcgcctggtcaacgatgaagacttgtaaaaagggagtttcttactggaatttggagtcggaaagagcgaagattaagagtccaagagacgttgatggcatcgaggtagcgagatcgccgcttctgagtgaagaaagagaagatgtgagacagagagggatgattaggtttccatggatgaagcttggagttttagtgatcatttggttattgttcttctctattaatcttttccgcggaaacaaatacggtcagggaatcatatcgatcaagccatgtggagctctctactggttcctctcctcgcttcaaatacctctcactatcttctttactctctgcatttacttcagtgacaatgttcaaagcaaccacacatcgcatagtaaccaaaactctgaacaggagactggagttggaggaagacaaaacaagttgatgctccctgtaatggctctcttggctggagttttgggtggcctctttggtattggtggtggaatgctcattagtcctcttcttctccaaatcggtattgctccagaggtaactgcagctacatgttcgttcatggttttgttttcttcatcaatgtctgcaatccagtacctactactaggcatggaacatgctggaaccgctgcgatatttgctctggtctgtttcgtggcatcactggttggactaatggtggttaagaaggttatagccaagtatgggagggcttcgatcattgtgtttgcagttggtatcgtcatggcacttagcactgtactgatgacaacccatggagcttttaatgtttggaatgattttgtctctggtcgctacatgggtttcaaattaccctgttaagaaccaaaattaaataaatccagttcttgttt

SEQ ID NO: 85298 - protein, 450 aa, Arabidopsis thaliana
  peptide (1)..(450): Ceres Seq. ID no. 12679982
MTINLVPLLLSLITIFTIFNPSALADQSQIRSTTSQWLHFSEDLSQSTIEVSIPTIIAAVLSFFAASISSAGGIGGGGLFLSIMTIIAGLEMKTASSFSAFMVTGVSFANVGCNLFLRNPKSRDKTLIDFDLALTIQPCLLLGVSIGVICNRMFPNWLVLFLFAVFLAWSTMKTCKKGVSYWNLESERAKIKSPRDVDGIEVARSPLLSEEREDVRQRGMIRFPWMKLGVLVIIWLLFFSINLFRGNKYGQGIISIKPCGALYWFLSSLQIPLTIFFTLCIYFSDNVQSNHTSHSNQNSEQETGVGGRQNKLMLPVMALLAGVLGGLFGIGGGMLISPLLLQIGIAPEVTAATCSFMVLFSSSMSAIQYLLLGMEHAGTAAIFALVCFVASLVGLMVVKKVIAKYGRASIIVFAVGIVMALSTVLMTTHGAFNVWNDFVSGRYMGFKLPC

SEQ ID NO: 85299 - protein, 367 aa, Arabidopsis thaliana; identical to SEQ ID NO: 35325
  peptide (1)..(367): Ceres Seq. ID no. 12679983

SEQ ID NO: 85300 - protein, 359 aa, Arabidopsis thaliana; identical to SEQ ID NO: 35326
  peptide (1)..(359): Ceres Seq. ID no. 12679984

SEQ ID NO: 85301 - DNA, 930 bp, Arabidopsis thaliana
  misc_feature (1)..(930): Ceres Seq. ID no. 12679985
  misc_feature (1)..(930): Ortholog of  Ceres SEQ ID NO 13594298 as cited in SEQ ID NO 57803
  misc_feature (1)..(930): Ortholog of  Ceres SEQ ID NO 13503476 as cited in SEQ ID NO 61978
  misc_feature (1)..(930): Ortholog of  Ceres SEQ ID NO 12578438 as cited in SEQ ID NO 62201
  misc_feature (1)..(930): Ortholog of  Ceres SEQ ID NO 12617675 as cited in SEQ ID NO 64656
atggagacggaaaggaggatcataacgagctgttctgccatgacggctctgttcttgttcatgacggctctaatggcgtcgtcctctatcgcagcaacaccgacacaatcgtttgaagataatttcaacattatgtggtctgaaaatcacttcacgacttccgatgatggagagatctggaatctttccttagataacgacaccggtacgttcaaatccagtttgcttccgacaaagcacatgtatagattcggatggtttagtatgaagctaaagctcgtcggaggcgactccgccggcgtcgtcaccgcttactacatgtgttcggagaatggggcaggaccggagagagacgagatagatttcgaatttctagggaaccgaaccggacagccttacattattcagaccaatgtgtataagaacggaaccgggaatcgggagatgcgacattccctctggttcgacccgaccaaggattatcacacctactcaattctttggaataaccaccagcttgtgttcttcgtggatagggtaccaattcgagtatacaagaacagtgataaggtaccaaacaacgacttcttcccgaaccagaagccgatgtacttgttctccagcatttggaacgctgacgattgggctacacgtggtggtctggagaagactgactggaaaaaagctccattcgtctcttcttacaaggacttcgccgtcgaaggctgccgttggaaggatccattccctgcatgcgtctctaccacaacagagaattggtgggatcagtacgacgcgtggcatttgtccaagacacagaagatggattatgcgtgggtgcagcgtaatctcgtcgtatacgattattgcaaagacagtgagaggttccctactcttccttgggagtgttccattagcccttgggcttaa

SEQ ID NO: 85302 - protein, 309 aa, Arabidopsis thaliana
  peptide (1)..(309): Ceres Seq. ID no. 12679986
METERRIITSCSAMTALFLFMTALMASSSIAATPTQSFEDNFNIMWSENHFTTSDDGEIWNLSLDNDTGTFKSSLLPTKHMYRFGWFSMKLKLVGGDSAGVVTAYYMCSENGAGPERDEIDFEFLGNRTGQPYIIQTNVYKNGTGNREMRHSLWFDPTKDYHTYSILWNNHQLVFFVDRVPIRVYKNSDKVPNNDFFPNQKPMYLFSSIWNADDWATRGGLEKTDWKKAPFVSSYKDFAVEGCRWKDPFPACVSTTTENWWDQYDAWHLSKTQKMDYAWVQRNLVVYDYCKDSERFPTLPWECSISPWA

SEQ ID NO: 85303 - protein, 296 aa, Arabidopsis thaliana
  peptide (1)..(296): Ceres Seq. ID no. 12679987
MTALFLFMTALMASSSIAATPTQSFEDNFNIMWSENHFTTSDDGEIWNLSLDNDTGTFKSSLLPTKHMYRFGWFSMKLKLVGGDSAGVVTAYYMCSENGAGPERDEIDFEFLGNRTGQPYIIQTNVYKNGTGNREMRHSLWFDPTKDYHTYSILWNNHQLVFFVDRVPIRVYKNSDKVPNNDFFPNQKPMYLFSSIWNADDWATRGGLEKTDWKKAPFVSSYKDFAVEGCRWKDPFPACVSTTTENWWDQYDAWHLSKTQKMDYAWVQRNLVVYDYCKDSERFPTLPWECSISPWA

SEQ ID NO: 85304 - protein, 289 aa, Arabidopsis thaliana
  peptide (1)..(289): Ceres Seq. ID no. 12679988
MTALMASSSIAATPTQSFEDNFNIMWSENHFTTSDDGEIWNLSLDNDTGTFKSSLLPTKHMYRFGWFSMKLKLVGGDSAGVVTAYYMCSENGAGPERDEIDFEFLGNRTGQPYIIQTNVYKNGTGNREMRHSLWFDPTKDYHTYSILWNNHQLVFFVDRVPIRVYKNSDKVPNNDFFPNQKPMYLFSSIWNADDWATRGGLEKTDWKKAPFVSSYKDFAVEGCRWKDPFPACVSTTTENWWDQYDAWHLSKTQKMDYAWVQRNLVVYDYCKDSERFPTLPWECSISPWA

SEQ ID NO: 85305 - DNA, 1212 bp, Arabidopsis thaliana
  misc_feature (1)..(1212): Ceres Seq. ID no. 12680011
  misc_feature (1)..(1212): Ortholog of  Ceres SEQ ID NO 14315626 as cited in SEQ ID NO 52943
  misc_feature (1)..(1212): Ortholog of  Ceres SEQ ID NO 14302742 as cited in SEQ ID NO 66899
  misc_feature (1)..(1212): Ortholog of  Ceres SEQ ID NO 14313536 as cited in SEQ ID NO 67925
atgcacaccaccacccggaggtatccttccacatcacgctcctcctccttctgcgcaacaacagtacggttaccaacaaccttacgggattgctggagctgctccaccaccaccacagatgtggaatcctcaagcggcggcgccgccatcagttcacctacgaccgctgacgagatccggactctttggatcggggacttacagtattggatggatgagaatttcctctacggttgctttgctcataccggagagatggtttctgctaaagtgattcgtaacaagcaaaccggtcaagttgaaggatacggtttcattgaattcgcatctcatgctgctgctgaaagagttctacaaacattcaacaacgctcctatcccgagctttcctgatcagctctttagactgaactgggcatcattgagttcaggagataaacgagacgattcaccggactacacgatatttgtcggtgatctggctgctgatgttacggattatatcttacttgagacgttcagagcctcttatccgtcagtgaagggtgcaaaggttgttattgacagagtcactggacgtacaaaaggatatgggtttgttaggttttctgatgaaagtgaacagatccgtgctatgacggagatgaatggcgttccttgttctactagacctatgagaattggtcccgctgctagcaagaaaggtgtaactggtcaaagagattcataccagagctctgctgcaggggtaacaactgataatgatccaaataacacaactgtttttgttggtggattagatgcatctgtcacggatgatcatctgaagaatgtctttagccaatatggtgagattgtgcatgtgaaaatacccgctggaaagcgctgtggattcgttcagttttccgagaagagctgtgcagaggaagctcttagaatgctgaatggagtgcaattaggcggaacaaccgtcaggctctcatggggccgaagtccttcgaacaaacagtcgggggatccgagccagttttactacggtgggtatggacaaggacaggagcagtatgggtacacgatgcctcaagaccctaatgcatattacggaggctactctggtggaggatacagcggtggttaccagcagacaccacaggcaggacagcaaccaccacaacagccaccacagcagcaacaagtcgggtttagctactaa

SEQ ID NO: 85306 - protein, 403 aa, Arabidopsis thaliana
  peptide (1)..(403): Ceres Seq. ID no. 12680012
MHTTTRRYPSTSRSSSFCATTVRLPTTLRDCWSCSTTTTDVESSSGGAAISSPTTADEIRTLWIGDLQYWMDENFLYGCFAHTGEMVSAKVIRNKQTGQVEGYGFIEFASHAAAERVLQTFNNAPIPSFPDQLFRLNWASLSSGDKRDDSPDYTIFVGDLAADVTDYILLETFRASYPSVKGAKVVIDRVTGRTKGYGFVRFSDESEQIRAMTEMNGVPCSTRPMRIGPAASKKGVTGQRDSYQSSAAGVTTDNDPNNTTVFVGGLDASVTDDHLKNVFSQYGEIVHVKIPAGKRCGFVQFSEKSCAEEALRMLNGVQLGGTTVRLSWGRSPSNKQSGDPSQFYYGGYGQGQEQYGYTMPQDPNAYYGGYSGGGYSGGYQQTPQAGQQPPQQPPQQQQVGFSY

SEQ ID NO: 85307 - protein, 333 aa, Arabidopsis thaliana
  peptide (1)..(333): Ceres Seq. ID no. 12680013
MDENFLYGCFAHTGEMVSAKVIRNKQTGQVEGYGFIEFASHAAAERVLQTFNNAPIPSFPDQLFRLNWASLSSGDKRDDSPDYTIFVGDLAADVTDYILLETFRASYPSVKGAKVVIDRVTGRTKGYGFVRFSDESEQIRAMTEMNGVPCSTRPMRIGPAASKKGVTGQRDSYQSSAAGVTTDNDPNNTTVFVGGLDASVTDDHLKNVFSQYGEIVHVKIPAGKRCGFVQFSEKSCAEEALRMLNGVQLGGTTVRLSWGRSPSNKQSGDPSQFYYGGYGQGQEQYGYTMPQDPNAYYGGYSGGGYSGGYQQTPQAGQQPPQQPPQQQQVGFSY

SEQ ID NO: 85308 - protein, 318 aa, Arabidopsis thaliana
  peptide (1)..(318): Ceres Seq. ID no. 12680014
MVSAKVIRNKQTGQVEGYGFIEFASHAAAERVLQTFNNAPIPSFPDQLFRLNWASLSSGDKRDDSPDYTIFVGDLAADVTDYILLETFRASYPSVKGAKVVIDRVTGRTKGYGFVRFSDESEQIRAMTEMNGVPCSTRPMRIGPAASKKGVTGQRDSYQSSAAGVTTDNDPNNTTVFVGGLDASVTDDHLKNVFSQYGEIVHVKIPAGKRCGFVQFSEKSCAEEALRMLNGVQLGGTTVRLSWGRSPSNKQSGDPSQFYYGGYGQGQEQYGYTMPQDPNAYYGGYSGGGYSGGYQQTPQAGQQPPQQPPQQQQVGFSY

SEQ ID NO: 85309 - DNA, 2292 bp, Arabidopsis thaliana
  misc_feature (1)..(2292): Ceres Seq. ID no. 12680015
  misc_feature (1)..(2292): Ortholog of  Ceres SEQ ID NO 12465083 as cited in SEQ ID NO 68239
atgagtgtagtgggatttgatgttgggaatgagaactgtgttatcgcagttgcaaagcaacgagggatcgacgttttgttgaacgatgaatcgaaccgagaaaatcctgctatggtttcctttggtgagaagcagagattcatgggtgctgctgctgctgcctctgctactatgcatcccaagtcaaccatttctcagttaaagagattgatcggtaggaaattcagggagcctgatgttcagaatgatctgaggttgtttccttttgaaacttctgaagactctgatggtggaattcaaattcggcttcggtatatgggtgagatacagagcttcagtccggtgcagatattaggcatgttgctttcacatttgaagcagattgcagagaagagtctcaaaacgcctgtttcagactgtgtcattgggattccatcctactttacaaactcacaaagacttgcctatttggatgctgcagccattgctggcctgaggccattgagattgatgcatgattctaccgccactgcacttggatatggtatatacaagacagatttggtagctaactcgagccctacttacattgtgtttatcgatatcggtcactgtgatacacaagtgtgtgtggcatcgtttgagtctggaagcatgagagtccgttctcatgcttttgatagaaacttgggcgggagagattttgatgaggttctcttcaaccactttgcccttgaatttaaggagaaatacaacatagatgtatatacaaataccaaggcgtgtgttaggttaagggcatcgtgtgagaaagttaaaaaggtcttgagtgcaaatgctgaggcacagctgaatattgaatgtctgatggaggagaaggacgtgaggagcttcatcaagagagaagagtttgagcagttgtcagcaggcttgttggagagattaattgtaccgtgtcaaaaggctttggctgactctggtctaagtttggatcaaatccactctgtggagctagttggttcagggtcccgcattccagctatatctaagatgctaagctcgttgtttaagagggagctaggcaggactgtgaatgcaagtgagtgcgtagctcgaggatgtgcgcttcaatgtgcaatgctcagtccagtttttcgagttagagattatgaggttcaagattcttaccctttcgcaatcggcttttcatctgataaaggtcccataaacacaccatcgaatgaattgctctttccgaaaggccagatcttcccaagtgtaaaggttcttactctacatagggaaaacactttccagttggaagccttttatgcaaaccataatgaactatcaccagatataccaacacagataagcagttttatgattgggccttttcatatatcgcacggagaagcggcacgtgtcaaagtaagagttcagctaaatctccacgggattgtcacgattgattcagctacgctaatagaatatcataaggagaatataacttctgaagagatgatatctgaagagaatcatcaatcttctgctatgaaggatggctctttggacccttcgtcaggttctattggtaatgagcctaaggctatcaaaagaatggaaattccagttgttgcgaacgtgtctggtgcattgacgaaggatgagttatcggaggccaaacagagagagaactctttagtggagcaagatctgaagatggaatcgacaaaggataagaaaaatgctcttgaatcttttgtctatgagatgcgtgataagatgttaaatacatatcggaacactgcaaccgagtcagaacgggaatgcatagctagaaatcttcaggaaacagaggaatggctatatgaagatggtgatgatgaatctgaaaatgcgtacatcgagaagttgaatgatgtcaaaaagctcatcgatcctattgaaaaccggttcaaagatggagaagagcgagttcaagcatcaaaagatcttctgaaaactattgcagataaccgaatggctgcagagtctcttcctcctccaagaaagaatgcggttctcgatgaatgccataaagctgagaggtggctccacgagaaaaccacagaacaggaatctttacccaaagacgctaatccagagctgcaatctgctgaaatcaggagaaaagctgatgctctaaacgcgacatgcaagtacattgggaaatcaaactctccccccgcgaaaccggaacataacggatcatacggaagtagaaaatcagatgatatggagcttgattga

SEQ ID NO: 85310 - protein, 763 aa, Arabidopsis thaliana
  peptide (1)..(763): Ceres Seq. ID no. 12680016
MSVVGFDVGNENCVIAVAKQRGIDVLLNDESNRENPAMVSFGEKQRFMGAAAAASATMHPKSTISQLKRLIGRKFREPDVQNDLRLFPFETSEDSDGGIQIRLRYMGEIQSFSPVQILGMLLSHLKQIAEKSLKTPVSDCVIGIPSYFTNSQRLAYLDAAAIAGLRPLRLMHDSTATALGYGIYKTDLVANSSPTYIVFIDIGHCDTQVCVASFESGSMRVRSHAFDRNLGGRDFDEVLFNHFALEFKEKYNIDVYTNTKACVRLRASCEKVKKVLSANAEAQLNIECLMEEKDVRSFIKREEFEQLSAGLLERLIVPCQKALADSGLSLDQIHSVELVGSGSRIPAISKMLSSLFKRELGRTVNASECVARGCALQCAMLSPVFRVRDYEVQDSYPFAIGFSSDKGPINTPSNELLFPKGQIFPSVKVLTLHRENTFQLEAFYANHNELSPDIPTQISSFMIGPFHISHGEAARVKVRVQLNLHGIVTIDSATLIEYHKENITSEEMISEENHQSSAMKDGSLDPSSGSIGNEPKAIKRMEIPVVANVSGALTKDELSEAKQRENSLVEQDLKMESTKDKKNALESFVYEMRDKMLNTYRNTATESERECIARNLQETEEWLYEDGDDESENAYIEKLNDVKKLIDPIENRFKDGEERVQASKDLLKTIADNRMAAESLPPPRKNAVLDECHKAERWLHEKTTEQESLPKDANPELQSAEIRRKADALNATCKYIGKSNSPPAKPEHNGSYGSRKSDDMELD

SEQ ID NO: 85311 - protein, 726 aa, Arabidopsis thaliana
  peptide (1)..(726): Ceres Seq. ID no. 12680017
MVSFGEKQRFMGAAAAASATMHPKSTISQLKRLIGRKFREPDVQNDLRLFPFETSEDSDGGIQIRLRYMGEIQSFSPVQILGMLLSHLKQIAEKSLKTPVSDCVIGIPSYFTNSQRLAYLDAAAIAGLRPLRLMHDSTATALGYGIYKTDLVANSSPTYIVFIDIGHCDTQVCVASFESGSMRVRSHAFDRNLGGRDFDEVLFNHFALEFKEKYNIDVYTNTKACVRLRASCEKVKKVLSANAEAQLNIECLMEEKDVRSFIKREEFEQLSAGLLERLIVPCQKALADSGLSLDQIHSVELVGSGSRIPAISKMLSSLFKRELGRTVNASECVARGCALQCAMLSPVFRVRDYEVQDSYPFAIGFSSDKGPINTPSNELLFPKGQIFPSVKVLTLHRENTFQLEAFYANHNELSPDIPTQISSFMIGPFHISHGEAARVKVRVQLNLHGIVTIDSATLIEYHKENITSEEMISEENHQSSAMKDGSLDPSSGSIGNEPKAIKRMEIPVVANVSGALTKDELSEAKQRENSLVEQDLKMESTKDKKNALESFVYEMRDKMLNTYRNTATESERECIARNLQETEEWLYEDGDDESENAYIEKLNDVKKLIDPIENRFKDGEERVQASKDLLKTIADNRMAAESLPPPRKNAVLDECHKAERWLHEKTTEQESLPKDANPELQSAEIRRKADALNATCKYIGKSNSPPAKPEHNGSYGSRKSDDMELD

SEQ ID NO: 85312 - protein, 716 aa, Arabidopsis thaliana
  peptide (1)..(716): Ceres Seq. ID no. 12680018
MGAAAAASATMHPKSTISQLKRLIGRKFREPDVQNDLRLFPFETSEDSDGGIQIRLRYMGEIQSFSPVQILGMLLSHLKQIAEKSLKTPVSDCVIGIPSYFTNSQRLAYLDAAAIAGLRPLRLMHDSTATALGYGIYKTDLVANSSPTYIVFIDIGHCDTQVCVASFESGSMRVRSHAFDRNLGGRDFDEVLFNHFALEFKEKYNIDVYTNTKACVRLRASCEKVKKVLSANAEAQLNIECLMEEKDVRSFIKREEFEQLSAGLLERLIVPCQKALADSGLSLDQIHSVELVGSGSRIPAISKMLSSLFKRELGRTVNASECVARGCALQCAMLSPVFRVRDYEVQDSYPFAIGFSSDKGPINTPSNELLFPKGQIFPSVKVLTLHRENTFQLEAFYANHNELSPDIPTQISSFMIGPFHISHGEAARVKVRVQLNLHGIVTIDSATLIEYHKENITSEEMISEENHQSSAMKDGSLDPSSGSIGNEPKAIKRMEIPVVANVSGALTKDELSEAKQRENSLVEQDLKMESTKDKKNALESFVYEMRDKMLNTYRNTATESERECIARNLQETEEWLYEDGDDESENAYIEKLNDVKKLIDPIENRFKDGEERVQASKDLLKTIADNRMAAESLPPPRKNAVLDECHKAERWLHEKTTEQESLPKDANPELQSAEIRRKADALNATCKYIGKSNSPPAKPEHNGSYGSRKSDDMELD

SEQ ID NO: 85313 - DNA, 934 bp, Arabidopsis thaliana
  misc_feature (1)..(934): Ceres Seq. ID no. 12680023
  misc_feature (1)..(934): Ortholog of  Ceres SEQ ID NO 15174883 as cited in SEQ ID NO 53894
atgagttcgtcctcgtcgccggcgattgaaccagacacaccggacctgatttgccagctcgataatgttcaaggaatggtcgatgcactcacttgcgtccgatggaaacgccaccaggatgctttagtagaattatctgaacacggaatagttttgattgttgaagaatcaggttgtcttcaagccaaagtttatcttcaacgcgagctattcacgaaatacgagtatggagctcaaggtaggccgagattcggaatcagcttagggcttcttgttgattgcttgaacacattttcatcacctggacattctaatactatagaaatcaagtatccaggacctgatatggagcttcttctcaaatctgttgataccttaaactcttgcatctactctgagataagaactagaattcccgaaactgttacttgggactacaactttgagcaggcgggaatcgcgccacttacttttacagtaaagtcagcggcgttgaaggaagcaatagatgatcttgaatggcctggttcaagtgtacagatcagtcttcaaaaggaacccccttgtgtaatctttagaggagaaggacatggagacttgcagatagacttcatgtattatgccaacacagatcttctccttgcctttcattgtgataccgaagtctcttacgggtacaaatacaagtttttgaaagcaacaacggcaaacataccgggaaacgtagtgagagaaaacaggggaagcaaactaacaataggaagaggaggaatgttgaaagttcagcacttggtttcagtttctaaagctttagctccacaagtggaatccgcagggtatcagccaccgagtcggattgcttatatagagttctttgtgaagcctgaagagcctgctgattaatagattttctccttcagttactttatctttg

SEQ ID NO: 85314 - protein, 300 aa, Arabidopsis thaliana
  peptide (1)..(300): Ceres Seq. ID no. 12680024
MSSSSSPAIEPDTPDLICQLDNVQGMVDALTCVRWKRHQDALVELSEHGIVLIVEESGCLQAKVYLQRELFTKYEYGAQGRPRFGISLGLLVDCLNTFSSPGHSNTIEIKYPGPDMELLLKSVDTLNSCIYSEIRTRIPETVTWDYNFEQAGIAPLTFTVKSAALKEAIDDLEWPGSSVQISLQKEPPCVIFRGEGHGDLQIDFMYYANTDLLLAFHCDTEVSYGYKYKFLKATTANIPGNVVRENRGSKLTIGRGGMLKVQHLVSVSKALAPQVESAGYQPPSRIAYIEFFVKPEEPAD

SEQ ID NO: 85315 - protein, 275 aa, Arabidopsis thaliana
  peptide (1)..(275): Ceres Seq. ID no. 12680025
MVDALTCVRWKRHQDALVELSEHGIVLIVEESGCLQAKVYLQRELFTKYEYGAQGRPRFGISLGLLVDCLNTFSSPGHSNTIEIKYPGPDMELLLKSVDTLNSCIYSEIRTRIPETVTWDYNFEQAGIAPLTFTVKSAALKEAIDDLEWPGSSVQISLQKEPPCVIFRGEGHGDLQIDFMYYANTDLLLAFHCDTEVSYGYKYKFLKATTANIPGNVVRENRGSKLTIGRGGMLKVQHLVSVSKALAPQVESAGYQPPSRIAYIEFFVKPEEPAD

SEQ ID NO: 85316 - protein, 185 aa, Arabidopsis thaliana; identical to SEQ ID NO: 83088
  peptide (1)..(185): Ceres Seq. ID no. 12680026

SEQ ID NO: 85317 - DNA, 1237 bp, Arabidopsis thaliana
  misc_feature (1)..(1237): Ceres Seq. ID no. 12680027
  misc_feature (1)..(1237): Ortholog of  Ceres SEQ ID NO 15171228 as cited in SEQ ID NO 56948
  misc_feature (1)..(1237): Ortholog of  Ceres SEQ ID NO 13654728 as cited in SEQ ID NO 62302
  misc_feature (1)..(1237): Ortholog of  Ceres SEQ ID NO 13597134 as cited in SEQ ID NO 64501
  misc_feature (1)..(1237): Ortholog of  Ceres SEQ ID NO 15174333 as cited in SEQ ID NO 0
  misc_feature (1)..(1237): Ortholog of  Ceres SEQ ID NO 15179047 as cited in SEQ ID NO 0
gaccagagatttttctttcctttgatttttcgtttcgtttcgtttcaaatattgttcctcctgtgtgaaggaaaaacaatcttccatttcaatccgcgtcaacgcgattttcttcatgacgatgacaacagttaaagtgagcaatgtttctctaggagcaaccgatagagatctcaaggagttcttttccttttctggcgatattctgtaccttgagacgcagagcgagactgagcggactaaactggcatatgtcacttttaaggatctacaaggagctgaaactgcggttcttctctcgggagcaacgattgttgattcttcagtcattgtctctatggctcctgattaccaactgtcccctgaggctttagcttccttggaacccaaggacagcaataaatctcccaaggcaggtgactccgtgttgagaaaagccgaagatgttgtgagcagcatgcttgcaaagggctttatcctgggaaaagatgccatagctaaagccaaaagtgttgacgagaagcaccagctaacatctacagcatcagccaaagtcgcatcttttgacaagaaaattggtttcactgataagatcaacacaggcacggtggtagtgggagaaaaggtcagggaagttgatcagaagtaccaagtctcagagaaaaccaaatcagcaatcgctgcagcggagcagacagtgagcaatgcaggttcagctataatgaagaaccggtatgttctcacaggtgccacgtgggttactggagcattcaacaaagttgctaaagctgcagaagaagttggacaaaaggctaaagagaaagttggtatggctgaggaagaggataagaggaaagtggttgatgagtttgctagagttcacttgtctgaatcaccaaaggcagcttcatcaacgcaagaagccgaacgtgaatcaaaactctctgaatctcctgaagcaaagaaagattctgaacatcttgagccacaatcgaaaccattgcagcaacaatctcctccacctatggcttcagctcctgctccggctcaaccttgagatatgcaatcaaagacctttctgattcttgttgtaaacggtaaaacttggaactaatctctctcagattgttgaagatgaagattgaacttgttatttaggacgaagacttgtgttcttgtaacattggattcatggtcgatttggtaattagaccttaaaaagaaaacaattttgttc

SEQ ID NO: 85318 - protein, 313 aa, Arabidopsis thaliana; identical to SEQ ID NO: 25134
  peptide (1)..(313): Ceres Seq. ID no. 12680028

SEQ ID NO: 85319 - protein, 311 aa, Arabidopsis thaliana; identical to SEQ ID NO: 25135
  peptide (1)..(311): Ceres Seq. ID no. 12680029

SEQ ID NO: 85320 - protein, 239 aa, Arabidopsis thaliana; identical to SEQ ID NO: 25136
  peptide (1)..(239): Ceres Seq. ID no. 12680030

SEQ ID NO: 85321 - DNA, 1639 bp, Arabidopsis thaliana
  misc_feature (1)..(1639): Ceres Seq. ID no. 12680066
  misc_feature (1)..(1639): Ortholog of  Ceres SEQ ID NO 14314659 as cited in SEQ ID NO 56868
actctcttagattctcagggttttgtgttttttggatggtggagatgatgagatcagagaatcatctaagacaagcttcgaagcatcggaacaacaattttccggtgaagttagagatcattgaagattctcttgaagaagaacacgctcctctcaacaaacgatccaagctatggagcaatggaacaagtgtctctaagtttagtctacttgaagagccaagtcctttggggttgagtttaaaaaagagcccatcttttcaagaactgattgagatgaaactttctcaaagtggtgatgactcaaattcggttaagaaagaaagttttggttttggtggtgtaggaaccgttgagaagcttaaagcttctaactttcctgctactattctcaggattggtcaatgggagtataagtcaaggtatgaaggtgatttggtggcgaaatgttactttgcaaaacataaacttgtgtgggaagtgttggaacaaggtcttaagagcaagattgagattcagtggtctgatattatggctttgaaggctaatttgccagaggatgaacctggaaccctgactattgtgctggctaggcggccattgtttttcagagaaactaatccgcagcctagaaaacatactttgtggcaggcgacatcggattttactgatggtcaagctagcatgaacaggcaacattttctgcagtgtcccccagggattatgaacaaacattttgagaagcttgttcaatgtgatcatcgcttgttctgtctaagccggcagccagagataaacttggccgcaccgttctttgattcacgactatctatatttgaggatccctcagtgtctggatctcataatattgcatctcctgttggggctcagtcatcatcagaacatgtgtctctatctcatgacgcactatcgcctagctcagtgatggatgctcgtgcaatcgaaggagttggtggttccattgattcgaggaatacaaacggttggagtcagataaaaatgcctggactacaccaatctatctcgatgaacgatttccttacgtttttgtcagatcaagcttgtgaaaacaaccaagagtttgaggaaatgaaacagttactgctaagtgacaacactcaaaccgatccatctgatgagaagtctgtcatgtcaaaggtgaattctttctgcaacctcttgcaatctgctgcaaactcacagctcaatatcgaaactgctgataccgaaagagttgttggggtcgataacaatagacacatgcccgaaggaggcaaaagagttgttgaccctgcttcaagcagcaagccactacaagggatgtcaaggaaagactcattcagtgatttgctggtgcaccttcctcgaatcacatcactcccaaagttcttgttcaacatttcagaagaagactagtagatagtgaaccgaaaagttcttgttctaggaatcttgaacaagtagctgtaaatcaaattatctctctcgttcttaaggatttggaggaacttttgtgtttgatgatgaatccttgtaaagaaatgcttttgtgatggcgttttctaaaagccatttctttttttgaaacattaacaaaactttattattgctttcatcct

SEQ ID NO: 85322 - protein, 477 aa, Arabidopsis thaliana
  peptide (1)..(477): Ceres Seq. ID no. 12680067
SLRFSGFCVFWMVEMMRSENHLRQASKHRNNNFPVKLEIIEDSLEEEHAPLNKRSKLWSNGTSVSKFSLLEEPSPLGLSLKKSPSFQELIEMKLSQSGDDSNSVKKESFGFGGVGTVEKLKASNFPATILRIGQWEYKSRYEGDLVAKCYFAKHKLVWEVLEQGLKSKIEIQWSDIMALKANLPEDEPGTLTIVLARRPLFFRETNPQPRKHTLWQATSDFTDGQASMNRQHFLQCPPGIMNKHFEKLVQCDHRLFCLSRQPEINLAAPFFDSRLSIFEDPSVSGSHNIASPVGAQSSSEHVSLSHDALSPSSVMDARAIEGVGGSIDSRNTNGWSQIKMPGLHQSISMNDFLTFLSDQACENNQEFEEMKQLLLSDNTQTDPSDEKSVMSKVNSFCNLLQSAANSQLNIETADTERVVGVDNNRHMPEGGKRVVDPASSSKPLQGMSRKDSFSDLLVHLPRITSLPKFLFNISEED

SEQ ID NO: 85323 - protein, 466 aa, Arabidopsis thaliana
  peptide (1)..(466): Ceres Seq. ID no. 12680068
MVEMMRSENHLRQASKHRNNNFPVKLEIIEDSLEEEHAPLNKRSKLWSNGTSVSKFSLLEEPSPLGLSLKKSPSFQELIEMKLSQSGDDSNSVKKESFGFGGVGTVEKLKASNFPATILRIGQWEYKSRYEGDLVAKCYFAKHKLVWEVLEQGLKSKIEIQWSDIMALKANLPEDEPGTLTIVLARRPLFFRETNPQPRKHTLWQATSDFTDGQASMNRQHFLQCPPGIMNKHFEKLVQCDHRLFCLSRQPEINLAAPFFDSRLSIFEDPSVSGSHNIASPVGAQSSSEHVSLSHDALSPSSVMDARAIEGVGGSIDSRNTNGWSQIKMPGLHQSISMNDFLTFLSDQACENNQEFEEMKQLLLSDNTQTDPSDEKSVMSKVNSFCNLLQSAANSQLNIETADTERVVGVDNNRHMPEGGKRVVDPASSSKPLQGMSRKDSFSDLLVHLPRITSLPKFLFNISEED

SEQ ID NO: 85324 - protein, 463 aa, Arabidopsis thaliana
  peptide (1)..(463): Ceres Seq. ID no. 12680069
MMRSENHLRQASKHRNNNFPVKLEIIEDSLEEEHAPLNKRSKLWSNGTSVSKFSLLEEPSPLGLSLKKSPSFQELIEMKLSQSGDDSNSVKKESFGFGGVGTVEKLKASNFPATILRIGQWEYKSRYEGDLVAKCYFAKHKLVWEVLEQGLKSKIEIQWSDIMALKANLPEDEPGTLTIVLARRPLFFRETNPQPRKHTLWQATSDFTDGQASMNRQHFLQCPPGIMNKHFEKLVQCDHRLFCLSRQPEINLAAPFFDSRLSIFEDPSVSGSHNIASPVGAQSSSEHVSLSHDALSPSSVMDARAIEGVGGSIDSRNTNGWSQIKMPGLHQSISMNDFLTFLSDQACENNQEFEEMKQLLLSDNTQTDPSDEKSVMSKVNSFCNLLQSAANSQLNIETADTERVVGVDNNRHMPEGGKRVVDPASSSKPLQGMSRKDSFSDLLVHLPRITSLPKFLFNISEED

SEQ ID NO: 85325 - DNA, 1153 bp, Arabidopsis thaliana
  misc_feature (1)..(1153): Ceres Seq. ID no. 12680070
  misc_feature (1)..(1153): Ortholog of  Ceres SEQ ID NO 14316539 as cited in SEQ ID NO 57567
ggataagagcttcgtgatggtttgaaacctctgagtgaagaagaagcgccatggctgggattaccagcagcaccgttggattcaacgccgtcttcaccggaataaccaaaacagtatcatcacattcactcttctctgttgattccaaactctgtagtcttcgtctctccaaaaccgaactgtctttcactaatctcactccttctcctcgccgtgctttcgccgtcacttgccgcttcggcggtggtggtggaggttatcgattctctggagacaatagaagaggtaggccgaaagaagctgaaattgatgaagctcttgatatctcctcaattaggtcagctactgttaggcttatcgatgggcaacaaaacatgcttggtttagtgtctaaagacgaagccgttcgaatggctgatgatgctgaacttgatctggttatactatcgcctgatgcagatcctccggttgttaaaatgatggactacagtaaatacagatacgaacagcaaaagaggaaaaaagatcagcaaaagaaaacaactcgcatggatttaaaggagcttaaaatgggttataatattgatcagcatgattattccgttcgtctaagggctgcccaaaagttcttgcaagatggtgacaaggttaaggtgattgtgagcatgaaaggacgagaaaacgagttcagaaatatcgctattgaactcctcagacgtttccaaaccgaaataggggagcttgcaactgaagagagcaaaaacttcagggacagaaatatgttcattatcttggtcccaaacaaagaaatgattcggaaaccacaagaaccacccacaagaaagaagaaaaaaacagcggaaaacgaagcttcagcttcagctgcagaaataacagctgagcctgagcctgagcctgagcctgagcctgaacctgagcctgagcctgagcctgagcctgagccagagcctctacagatcgattcttgagtttaaaatcttgtggtaggattttcagagctaaagtaaagttttgtatatttacttttctaccatgtctcaagagagccaagagctgtataacaaatagagttagtcctatttgaatgatgttcttcgtttgtagatcttttctctaatctatttttttgttt

SEQ ID NO: 85326 - protein, 312 aa, Arabidopsis thaliana; identical to SEQ ID NO: 37566
  peptide (1)..(312): Ceres Seq. ID no. 12680071

SEQ ID NO: 85327 - protein, 204 aa, Arabidopsis thaliana; identical to SEQ ID NO: 37567
  peptide (1)..(204): Ceres Seq. ID no. 12680072

SEQ ID NO: 85328 - protein, 192 aa, Arabidopsis thaliana; identical to SEQ ID NO: 37568
  peptide (1)..(192): Ceres Seq. ID no. 12680073

SEQ ID NO: 85329 - DNA, 1154 bp, Arabidopsis thaliana
  misc_feature (1)..(1154): Ceres Seq. ID no. 12680098
  misc_feature (1)..(1154): Ortholog of  Ceres SEQ ID NO 13594671 as cited in SEQ ID NO 51800
  misc_feature (1)..(1154): Ortholog of  Ceres SEQ ID NO 12784099 as cited in SEQ ID NO 66784
actttgatcacttttcaacttcctaaatctcttcacagttactttcgattttccgatttcgtagcttcgaaaatgttctccagcagccaattcgagcctaattccggcttctccggcggcggattcatgtcttctcaaccttctcaagcctacgaatcctcctcctccaccgctaagaatcgtgattttcaaggtcttgttccagtgacggtgaagcaaatcaccgaatgtttccaatccagtggtgaaaaatctggtctcgtcatcaatggaatctcactaacaaacgtttcacttgttggattagtgtgtgacaaagatgaatctaaagtcacagaagttagattcactcttgatgatggaacaggacgaattgactgtaaaagatgggtgagtgaaactttcgacgctagagaaatggagtctgtgcgagatggaacttatgtgcgcctcagtggtcatttgaagacttttcagggcaaaactcagcttcttgttttctctgtgaggcctattatggacttcaatgaggttacttttcactacattgagtgtatacacttctactcccagaactctgaatcacagagacaacaagtcggtgatgtcactcagtcagttaacaccacatttcaaggtggatcaaacacaaaccaggcaacactattgaaccctgtggtttcttctcaaaacaatgatggcaatgggcgcaagaacttggatgatatgattctagactatctaaagcaacctgcttgcactgcaagacaacaggggatacatatcgatgaaattgctcagcagttgaagatcccaaaaaacaagctagagggcgttgttcaatcactggaaggagatggtctaatatactcgacaatcgatgagtatcacttcaagcacgtggagctttgatctatctaatagtcatctagagtttggttaatccgtagatagagtcattagtattgtctggtgatttaaaagatgtttcaatatccagaactattaggatcacgtctagttcacttctgaaactttggtagtgtcatgcttaattctggtgttggattgtttccttgtttctttcaatttggtaagccaacttcaaaagttcaaagttgattttttgtttaatctgaaactatatttggttt

SEQ ID NO: 85330 - protein, 303 aa, Arabidopsis thaliana; identical to SEQ ID NO: 27810
  peptide (1)..(303): Ceres Seq. ID no. 12680099

SEQ ID NO: 85331 - protein, 279 aa, Arabidopsis thaliana; identical to SEQ ID NO: 27811
  peptide (1)..(279): Ceres Seq. ID no. 12680100

SEQ ID NO: 85332 - protein, 261 aa, Arabidopsis thaliana; identical to SEQ ID NO: 27812
  peptide (1)..(261): Ceres Seq. ID no. 12680101

SEQ ID NO: 85333 - DNA, 1452 bp, Arabidopsis thaliana
  misc_feature (1)..(1452): Ceres Seq. ID no. 12680106
  misc_feature (1)..(1452): Ortholog of  Ceres SEQ ID NO 15177947 as cited in SEQ ID NO 60308
aagtgatttcaagtggttggttctgttccttttctcgtccccgatcaagtttcttctcctaaactccagaatttggtcttgaagatctctaaaggctcttcctttttgttcatttctctacccagatatcgatgggtacatacctaagttctccgaaaactgaaaagttatcagaagatggtgagaatgataagctcagatttggtttatcgtctatgcaaggttggcgcgctaccatggaagacgcgcatgctgcaattcttgatcttgatgataagacatcgttcttcggtgtgtatgatggccatggaggtaaagtcgttgcaaagttctgtgccaagtatctacaccagcaggttatcagtaatgaagcgtataaaactggagacgtcgaaacatctcttcgaagagcattctttagaatggatgacatgatgcaaggacaaagaggatggcgagagttagctgtacttggcgacaagatgaacaaatttagcggcatgattgaaggatttatatggtcaccaagaagcggtgacaccaataaccaacccgatagttggcctcttgaagatggtcctcattctgatttcacgggacctacctcggggtgcacagcgtgtgtagctcttattaaagataagaagctctttgttgcaaatgccggtgactcacgttgtgtgatatcaagaaagagtcaggcttacaatctttctaaagatcacaagcctgatcttgaagttgaaaaagaaaggatattgaaagctggtggctttattcacgctgggagaatcaatggaagcttgaatctgacaagagccattggtgatatggagttcaagcagaataagtttttaccatctgaaaagcaaatggttactgctgatccagatataaacactattgacctatgtgatgatgatgactttcttgttgttgcttgcgatggaatatgggattgtatgtcaagccaggaactagttgattttatccatgaacagttaaaatctgaaacaaaactttcaacagtatgtgaaaaggttgttgatagatgtttggctccagatacagcgactggtgaaggttgtgataatatgaccatcatcttggttcagttcaagaagcctaacccatctgagactgaaccagaagattccaaaccagaaccaagcgaagatgagccgagctcatcaagctagatatctttaaagagccaagaggaagaagatttgtgaaagtgtctcttttatcattgactttttgttcaacattgtaaatccttttgaatgtggcttagattcaagaagctggctttttcccagtttagcttcaagaagtctgagatgtcacagagtttggtttaatcttaaaaggacctttgtatagatatttcttgtgattgatgttttcagctatagtttaaaaaattcacaaggacaagctttttgtacc

SEQ ID NO: 85334 - protein, 355 aa, Arabidopsis thaliana; identical to SEQ ID NO: 28678
  peptide (1)..(355): Ceres Seq. ID no. 12680107

SEQ ID NO: 85335 - protein, 327 aa, Arabidopsis thaliana; identical to SEQ ID NO: 28679
  peptide (1)..(327): Ceres Seq. ID no. 12680108

SEQ ID NO: 85336 - protein, 320 aa, Arabidopsis thaliana; identical to SEQ ID NO: 28680
  peptide (1)..(320): Ceres Seq. ID no. 12680109

SEQ ID NO: 85337 - DNA, 893 bp, Arabidopsis thaliana
  misc_feature (1)..(893): Ceres Seq. ID no. 12680126
  misc_feature (1)..(893): Ortholog of  Ceres SEQ ID NO 13599287 as cited in SEQ ID NO 338
  misc_feature (1)..(893): Ortholog of  Ceres SEQ ID NO 15172934 as cited in SEQ ID NO 51783
gacgaacataaactcgtctccggtaaccaaaaatggtttccatgactacttcatcttcttcgtacggaacattctctacagtcgtcaacagttctagacctaattcctcagcaacctttctcgtcccttccttgaaattctccaccggaatatcgaatttcgcgaatctgagtaatgggttttctctaaaatctccaattaatcctgggtttctcttcaagtctcgtcctttcactgtccaagctagagctgctgcagaaaaaaccgttcacgatttcaccgttaaggacattgatgggaaggatgttgctttgaacaaattcaaggggaaagttatgttgattgtcaatgttgcttcaagatgtggtttgacatcatcaaattactcagagctttcacatctgtacgagaaatacaaaactcaaggatttgagattctagcttttccctgcaatcagtttggtttccaagagcccgggtcaaactccgagatcaaacaattcgcttgcacccggtttaaagcagagttccctatatttgataaggttgacgtgaatggaccaagcacagcgccgatctacgagttcttgaaatcaaacgcaggaggattcttgggtggtctcattaaatggaactttgagaagttcttgattgataaaaagggaaaggtcgttgagaggtaccctcccaccacatcccctttccaaatcgagaaagacatccagaagttgcttgccgcttaaaaacttttgctcatgagtgagcatatagagactgatggttaaagtaaccgtaaattgtgacataaagtttccggttattgcttgtataccttcttacattctaagttgtactaatcgcttaataatttgcgtataatggtaatgttatat

SEQ ID NO: 85338 - protein, 236 aa, Arabidopsis thaliana [sequence omitted]

SEQ ID NO: 85339 - protein, 233 aa, Arabidopsis thaliana
  peptide (1)..(233): Ceres Seq. ID no. 12680128
MTTSSSSYGTFSTVVNSSRPNSSATFLVPSLKFSTGISNFANLSNGFSLKSPINPGFLFKSRPFTVQARAAAEKTVHDFTVKDIDGKDVALNKFKGKVMLIVNVASRCGLTSSNYSELSHLYEKYKTQGFEILAFPCNQFGFQEPGSNSEIKQFACTRFKAEFPIFDKVDVNGPSTAPIYEFLKSNAGGFLGGLIKWNFEKFLIDKKGKVVERYPPTTSPFQIEKDIQKLLAA

SEQ ID NO: 85340 - protein, 135 aa, Arabidopsis thaliana; identical to SEQ ID NO: 29401
  peptide (1)..(135): Ceres Seq. ID no. 12680129

SEQ ID NO: 85341 - DNA, 2722 bp, Arabidopsis thaliana
  misc_feature (1)..(2722): Ceres Seq. ID no. 12680130
  misc_feature (1)..(2722): Ortholog of  Ceres SEQ ID NO 12609146 as cited in SEQ ID NO 52118
  misc_feature (1)..(2722): Ortholog of  Ceres SEQ ID NO 13638136 as cited in SEQ ID NO 58644
  misc_feature (1)..(2722): Ortholog of  Ceres SEQ ID NO 15177947 as cited in SEQ ID NO 60308
  misc_feature (1)..(2722): Ortholog of  Ceres SEQ ID NO 12585640 as cited in SEQ ID NO 63164
  misc_feature (1)..(2722): Ortholog of  Ceres SEQ ID NO 15225826 as cited in SEQ ID NO 64774
  misc_feature (1)..(2722): Ortholog of  Ceres SEQ ID NO 13599119 as cited in SEQ ID NO 0
ctccgccggcgaacagttttattatctctctctttctgcgtgttccaatttcttccacaaaaccctaattttctcttaaaccctgaaattcgtgtaacctttcaacaatctcttcaattttgttttcgattctgaatccattgtttacgaatctctcatctaaagctacattcttcgttaaatcgtttttaatcgactcgctcactcgtgagttgactcgtcagctgtttccataattgcttattgaatttttatacgatgatgtttcaatatggaagaaactagaggaatttctgatccagagaatgggagttcgagttacggcggtaaaccgccgaatccactctccttctcttcttcctccgccgctgctgccgtttacaggcaaaccttcgacggcgagcgatcgttggcgccgtgtaataagaggtcactggttcgacactcatctctcgtgaagacaatggtgtcagatatatctgttgagaatgagtttactatagagaagaacaagtctgagtttgttcctgctacgcgttctggagcttggtctgatattggctccaggtcaagcatggaagatgcttatctatgcgttgataatttcatggatagctttggccttctgaattctgaggctggtccaagtgccttctatggggtatttgatggacatggtgggaagcatgccgctgagtttgcatgtcaccatataccgaggtacattgttgaagatcaagagtttcctagtgaaatcaataaggtgttatcttcagcatttcttcaaacagacactgccttcttagaggcgtgttcattggatgggagccttgcttcaggaactactgctttggcagctattctttttggaaggtcgttggtggtagcaaacgctggagattgcagagcagtcttatcccgtcagggaaaagccattgaaatgtcaagagaccacaaacccatgagcagtaaggaaaggagacgcattgaagcatcgggtggacatgtattcgatggctatctaaatggacaacttaatgtggctcgagcgctaggtgactttcatatggaaggcatgaagaagaagaaagatggttctgattgtggacctctaattgcagagcctgagctcatgacaacaaaactaacagaagaggatgagttccttataattgggtgtgacggggtttgggatgtgttcatgagccagaatgctgtagattttgccagaaggagactacaggagcacaatgacccggtcatgtgtagtaaggagctggttgaggaagctttgaagaggaagagtgctgataatgtgacggcagtggttgtgtgtcttcagccacagccaccaccgaacttggtagcgccgaggttgagagttcacagaagcttctcggcggagggtttaaaagatttacagagctacttggatggcttgggaaactaattgggggacatgaggatggtgacgaatgattgatttctctgtttttgttttgtcttttcttacaattttatagtttggggtttggaggttttgttctgttaaattctcgcaatttgagtaagttataacatgaggcggcatacaataatttattgtttggtaggatatatttttttgtcacttttgcataataataattctgcttcagtctcatttgttttgtaactagaaagttattccaattcctgcgtttaccgaatatgttgtgttcttgcagaatgacgtatgttagatatgcagtaaactcgagggtcggctttgaccacatcgccacttatcggtttgcggatgctggaaaagtcagtctagtgatgaggctgagtgagccatcgtcagttactattttatcgtgaaactctgaacaacgagattgtcccggatattcaaatgaggaacaaggcccaatagtccgatcaaagtgggctattcgtatcgcttacgaggcctatacgatggtaattgaattcacgcgcattcatcagcgcgtgatttggagttgctcaatttcagatcgcacaggctctgttaatcatctcctcctccgaaagacagagaaagagacaaatcaaattcattcatatcaaagagatagagagaaaatgtccggtgtggctattcatgcgagttcatggggcgcggctctggtgagaatctccccgtacactttctccgccatcggaatcgccatctccatcggcgtctctgttcttggtgctgcctggggaatttacattaccggaagtagtttgatcggtgccgccattgaagctcctcgaatcacttccaagaatctcatcagtgtaatcttctgtgaagccgtggctatatacggtgttattgtggcaatcatattacaaacgaagttggagagtgtaccatcatcaaagatgtatgatgctgagtctctaagagctggatatgcaatctttgcttctggaatcattgttggattcgcaaaccttgtatgcgggttatgtgtaggaatcattggaagcagttgcgcattgtctgatgctcagaactcgacgctctttgttaagattcttgtgattgagatctttgggagtgctctcgggttatttggagttatcgttgggattattatgtcagctcaagctacatggcctacaaaatagagatatataaactggtaacttatggacttgtactctatagtctatacattctatgatctatttttcaaagttccgg

SEQ ID NO: 85342 - protein, 392 aa, Arabidopsis thaliana; identical to SEQ ID NO: 28597
  peptide (1)..(392): Ceres Seq. ID no. 12680131

SEQ ID NO: 85343 - protein, 328 aa, Arabidopsis thaliana; identical to SEQ ID NO: 28598
  peptide (1)..(328): Ceres Seq. ID no. 12680132

SEQ ID NO: 85344 - protein, 291 aa, Arabidopsis thaliana; identical to SEQ ID NO: 28599
  peptide (1)..(291): Ceres Seq. ID no. 12680133

SEQ ID NO: 85345 - DNA, 1550 bp, Arabidopsis thaliana
  misc_feature (1)..(1550): Ceres Seq. ID no. 12680150
  misc_feature (1)..(1550): Ortholog of  Ceres SEQ ID NO 14316165 as cited in SEQ ID NO 52560
  misc_feature (1)..(1550): Ortholog of  Ceres SEQ ID NO 13597076 as cited in SEQ ID NO 63571
aaacaaaaaaacacagcctttgttctgtttctctgcgatttcttcgatgttcctcttcttcgttttgattttcagatttgtttaactcggtcgttgcgttgacttcaaatttcttaaaagagagagagagagagagaggagatagttcagaaaatctgtcagacttgggatctttctcggcaatgcgacgcttgttcgccgcgaaatccctctcccgagaggatacaacctttttgtcattctcttcttcttcggtgacgcgtttcctcaaggctcttcttcctctccgttcagatccaagagatgtccgctaattctcatcctcctaattccaaaaacgtcctctgtaatgcagccgccggtgccgccgccggggttgttgcggctacgtttgtgtgtcctcttgatgttataaaaacgaggtttcaggttcatgggctgcctaagctcggtgatgcaaacatcaaaggtagtctaattgttggcagtcttgagcagatcttcaagagagaagggatgcgtggcttataccgcggtctttcccctactgtcatggctcttctctccaattgggccatttattttacaatgtatgaccagctcaagagctttctttgttcaaatgatcacaaactcagcgttggagctaacgtattggctgcttcgggagctggagctgcaactaccattgccacaaatcctctttgggtcgtcaagactagacttcagacacaaggaatgagagtgggtatagtgccatacaaaagcacattttctgctttaaggagaatagcttatgaggagggaattcgcggattgtacagtggtcttgtccctgcactagctggtatcagtcatgttgccattcagtttcccacatatgagatgatcaaagtgtacttggccaagaaaggtgataaatcagtcgataacctcaatgctcgtgatgtagcagttgcctcttcgattgcaaagatatttgcatccacattaacttacccgcacgaggtagtacgagctaggcttcaagagcaagggcaccacagtgagaaacgttactcaggagtaagagattgcatcaagaaagtgtttgagaaagatgggttccctggtttttacagaggctgcgccacgaatctactgagaacaactcctgcagcagttataactttcactagcttcgaaatggtgcatcgtttcctcgtcactcatataccttctgagcaaagctctatactttaaatccggtttttttttttgatgatgatgacgattaaaagttatttttacacaggtaaaaaaaagtttccccttttgggaaatgattcaaaatagaagttcttttctggtgacttattatgtctctctgttggagaaatcagaatctgagaatgggttgaaacttgagagacccaaaaaagcagaatattttagtgtaaaaaactgactcttttatttctctgttttttgggccttcatgttactgaaaggaaacatatattatcttcaagaaatgattatactattattctggttttcagagtgttatg

SEQ ID NO: 85346 - protein, 312 aa, Arabidopsis thaliana; identical to SEQ ID NO: 41374
  peptide (1)..(312): Ceres Seq. ID no. 12680151

SEQ ID NO: 85347 - protein, 241 aa, Arabidopsis thaliana; identical to SEQ ID NO: 41375
  peptide (1)..(241): Ceres Seq. ID no. 12680152

SEQ ID NO: 85348 - protein, 229 aa, Arabidopsis thaliana; identical to SEQ ID NO: 41376
  peptide (1)..(229): Ceres Seq. ID no. 12680153

SEQ ID NO: 85349 - DNA, 659 bp, Arabidopsis thaliana
  misc_feature (1)..(659): Ceres Seq. ID no. 12680174
  misc_feature (1)..(659): Ortholog of  Ceres SEQ ID NO 14301506 as cited in SEQ ID NO 61159
  misc_feature (1)..(659): Ortholog of  Ceres SEQ ID NO 12780602 as cited in SEQ ID NO 65695
gttctttcgattctcagagaagacttttcagaacatcctccaactttctcagataagcaacaatggtgaaaggtcccggtctctacaccgaaatcggcaaaaaggccagagatcttctgtacaaagaccacaacagtgaccagaaattcagtatcaccactttctctcctgccggtgttgccatcacctcaaccggaactaagaaaggtgacttattgttgggagatgtcgcttttcagtcgaggcgaaagaacattactactgatttgaaagtttgcactgattctacttttctgatcaccgctaccgttgatgaggctgcacccggactgaggtcaatcttcagcttcaaggttcctgaccaaaattctggcaaggttgagctgcaatacttgcatgagtacgccggtatcagcacaagcatgggattgactcagaacccaacttcaattgacaagagtgctaaagttggattggctctcgcactcaagccttgaaactgagatggaagaagaagttgcaatagtttttttaaactagtttctttctacgtactctgttttttctctgcttggttcatggtttgagtgggcaactactgatctttcccattttcctgccggatttgtagaagaataaaaaggttgaaaatgatcatc

SEQ ID NO: 85350 - protein, 144 aa, Arabidopsis thaliana
  peptide (1)..(144): Ceres Seq. ID no. 12680175
MVKGPGLYTEIGKKARDLLYKDHNSDQKFSITTFSPAGVAITSTGTKKGDLLLGDVAFQSRRKNITTDLKVCTDSTFLITATVDEAAPGLRSIFSFKVPDQNSGKVELQYLHEYAGISTSMGLTQNPTSIDKSAKVGLALALKP

SEQ ID NO: 85351 - DNA, 1734 bp, Arabidopsis thaliana
  misc_feature (1)..(1734): Ceres Seq. ID no. 12680178
  misc_feature (1)..(1734): Ortholog of  Ceres SEQ ID NO 13593889 as cited in SEQ ID NO 53305
  misc_feature (1)..(1734): Ortholog of  Ceres SEQ ID NO 13581959 as cited in SEQ ID NO 56156
gagaagtctaatcacagagaagagagaagcgagagttagcctcttctttagttgtttgttgcaataaacacaaacacaacttccctattttctgcttctttttgttcaactcctacacactccaatcacacaattcacaacccattgagaaaccaataaaataacctcaatcaaaaaaaaaaaaaaaaaaaaaaaaaagatgaaaatctcaatttagtaaaggagaaaaaagccatttcgaataacttgaaaaggttttggttttgcagaagaaaatgaaggagaaggcggagagtggtggaggagtaggatacgtgagagcagatcagatagatttaaagagtctggacgagcaattgcagagacacttaagtaaagcatggacgatggagaagaggaagagtttgagtgatggtgaagataacgtcaataacacccgacataaccagaacaacttcggacatcgacagcttgtgtttcagaggccgcttcttggtggtggatatagcaacaacaacaacagcagcaagaacgacataattaggtcgaccgaggttgagaagtcgaggagagagtgggagattgatccttctaagcttataatcaaaagtgtgattgctagaggtacttttggtacggttcaccgtggaatctacgatggtcaagatgtcgccgtaaaactactagactggggagaagaggggcacaggtcagacgcagagatagcttcgcttagagctgctttcactcaagaagttgctgtgtggcataagctcgaccatcccaatgtcaccaagttcataggagcggcgatggggacatcggagatgagcatacaaacggaaaacgggcaaatgggaatgccgagtaacgtttgctgtgtcgtggttgagtattgccccggcggcgctctcaagtcattcctcatcaaaactcgccgccgcaaactcgccttcaaagtcgttatccaactctcccttgatcttgctcgcgggttgagttacttgcactctcagaagattgtgcatagagacgtgaaaacggagaacatgcttttagataagtcacgcaccttaaagattgcagattttggtgtggctcgtctagaggcttcaaaccctaacgacatgaccggtgagaccggaaccttgggctatatggctcctgaggtgctaaacgggagtccctacaacagaaagtgcgatgtgtatagctttgggatatgtctttgggagatttactgttgcgacatgccttatcctgacctcagcttctccgaagtaacctccgccgtcgtccgccagaatttgagaccagagatacctagatgttgtccaagctcgctggcgaacgtgatgaagaggtgttgggatgcgaatccggagaagcggccggagatggaggaagttgtggctatgttggaggctattgatacttccaaaggcggaggaatgattcctcctgaccaacaacaaggctgtttctgtttccgccgacaccgaggcccatgaagtacacacacatgcactacgttcccattattattataattaactcttactattttggaagaagagagattatttttaaaagttaattgtggggtaattaaaatgttttaattagtttggtgtttgatttataggatgaatgtcgtacctatttcaaacgatcatctcatacgttatacataacacacaacaaaaccttattcttgatcttcgcttgttttat

SEQ ID NO: 85352 - protein, 411 aa, Arabidopsis thaliana; identical to SEQ ID NO: 36421
  peptide (1)..(411): Ceres Seq. ID no. 12680179

SEQ ID NO: 85353 - protein, 374 aa, Arabidopsis thaliana; identical to SEQ ID NO: 36422
  peptide (1)..(374): Ceres Seq. ID no. 12680180

SEQ ID NO: 85354 - protein, 232 aa, Arabidopsis thaliana; identical to SEQ ID NO: 36423
  peptide (1)..(232): Ceres Seq. ID no. 12680181

SEQ ID NO: 85355 - DNA, 1543 bp, Arabidopsis thaliana
  misc_feature (1)..(1543): Ceres Seq. ID no. 12680182
  misc_feature (1)..(1543): Ortholog of  Ceres SEQ ID NO 13598387 as cited in SEQ ID NO 62757
  misc_feature (1)..(1543): Ortholog of  Ceres SEQ ID NO 13662984 as cited in SEQ ID NO 64419
agagccttattcaagagaacaccaaggtcagcattttcttctactctctcgatctcaatttctctctttatccttgtgatctatttctctctcgtctacaatttgagctacttttcttgttattatcgtcacgttgtgtgtcgcgtagtggatttgagtgattggttgattgattgatggattttttcacgaaacgcgtagagtttggtggaagttgttgaaattcgaagccgatcgcggactcgtttgctcttgattacgtcgcaatccgtacgattttccgatcaaacttaagagtgaaggagatagatttgtagaaaaaggaagagaataagagtgagcttgtggccaaaaaagggatgcctttgaacttaggcaacgatggcgatgggtcttcccggattattttgactgagcctcgcggatctactgctgaggtgcttctatttggaggacaagtcatttcttggaaaaatgaaaggagggaagaactgctttatatgagcagcaaggctcaatataagccacccaaggcgatcagaggaggaatacctgtttgctttccacagtttggaaactttggtggacttgagcgacatggatttgcccggaacaaattctggtcacatgatgaagatccttcgcctctacctcctgctaacaaacaatcatctgttgatctgatattgaagtccacagaagatgacttgaagacctggccgcatagttttgaactccgtattcgcatttctattagccctgggaagcttactttgatccctcgtgtgaggaacattgactcaaaggcattctcctttatgtttgcactgcgaaactacttatatgtatctgacataagtgaagttcgagttgagggtttggagacactggattatctagacaacttgattggtaaagaaagattcactgagcaagcagacgcgattacctttgacggggaggtcgatagagtgtacttgaacacaccaacaaagattgcggtcatagatcatgagcgaaagaggaccatcgagttgcgaaaggaaggcatgcccaatgcagttgtgtggaacccctgggacaaaaaggcaaagaccatagctgatatgggagatgaagattacaaaacaatgctttgtgtagattctggagtaatcgaacctctggtattgttaaagcctcgtgaagagtggaaaggcagacaagaactatccatcgtctcatcaagttactgcagcggacagcttgatccacgcaaggttctttacggagatatctgatccttttgggggtttatcttacttagtaaaaaaacagtaataagccatgatctcattatcactaccacccagaaacaactctctaagagtcttgtcttgaacttggagattttatccttttgacttgtgttttgagtgagttctgattgttgttgttacacagagaggtcacggtaatattttgtaacgttgactctgtgtttgaccgtcaaacagtgtatcggtttctttgttcggaaatttagtagaatatatcatcaatt

SEQ ID NO: 85356 - protein, 306 aa, Arabidopsis thaliana; identical to SEQ ID NO: 37477
  peptide (1)..(306): Ceres Seq. ID no. 12680183

SEQ ID NO: 85357 - protein, 259 aa, Arabidopsis thaliana; identical to SEQ ID NO: 37478
  peptide (1)..(259): Ceres Seq. ID no. 12680184

SEQ ID NO: 85358 - protein, 153 aa, Arabidopsis thaliana; identical to SEQ ID NO: 37479
  peptide (1)..(153): Ceres Seq. ID no. 12680185

SEQ ID NO: 85359 - DNA, 1305 bp, Arabidopsis thaliana
  misc_feature (1)..(1305): Ceres Seq. ID no. 12680186
  misc_feature (1)..(1305): Ortholog of  Ceres SEQ ID NO 13595414 as cited in SEQ ID NO 56539
  misc_feature (1)..(1305): Ortholog of  Ceres SEQ ID NO 14314396 as cited in SEQ ID NO 60048
ataaatacacatatctcactctctctgatctccgcttctcttcgccaacaaatgtcgaccgctcctctctccggcttctttctcacttcactttctccttctcaatcttctctccagaaactctctcttcgtacttcttccaccgtcgcttgcctcccacccgcctcttcttcttcctcatcttcctcctcctcgtcttcccgttccgttccaacgcttatccgtaacgagccagtttttgccgctcctgctcctatcattgccccttattggagtgaagagatgggaaccgaagcatacgacgaggctattgaagctctcaagaagcttctcatcgagaaggaagagctaaagacggttgcagcggcaaaggtggagcagatcacagcggctcttcagacaggtacttcatccgacaagaaagctttcgaccccgtcgaaaccattaagcagggcttcatcaaattcaagaaggagaaatacgaaaccaaccctgctttgtacggtgagctcgcaaagggtcaaagtcctaagtacatggtgtttgcttgttcagactcacgtgtgtgtccatcacacgttctggactttcagccaggagatgccttcgtggtccgtaacatagccaacatggttcctcctttcgacaaggtcaaatacggtggcgttggagcagccattgaatacgcggtcttacaccttaaggtggagaacattgtggtgataggacacagtgcatgtggtgggatcaaagggcttatgtctttccccttagatggaaacaactccactgacttcatagaggactgggtcaaaatctgtttaccagccaagtcaaaggttatatcagaacttggagattcagcctttgaagatcaatgtggccgatgtgaaagggaggcggtgaatgtttcactagcaaacctattgacatatccatttgtgagagaaggacttgtgaagggaacacttgctttgaagggaggctactatgacttcgtcaagggtgcttttgagctttggggacttgaatttggcctctccgaaactagctctgtatgaaccaatccatcatcatcatcatcatcatgaccatccatcatcatcatcattattatcatcgtatataatatatatctaccccatatgtaatttgtaatgtgcctttgactgtgatgagttatctctccctctctaccaactttcttcatatatataaaacaaaaaggaaaagcagatgatatagatctttcgtggtttaattatgaacaattgtctttattatttgtgtatcaaatcggttgt

SEQ ID NO: 85360 - protein, 353 aa, Arabidopsis thaliana
  peptide (1)..(353): Ceres Seq. ID no. 12680187
INTHISLSLISASLRQQMSTAPLSGFFLTSLSPSQSSLQKLSLRTSSTVACLPPASSSSSSSSSSSSRSVPTLIRNEPVFAAPAPIIAPYWSEEMGTEAYDEAIEALKKLLIEKEELKTVAAAKVEQITAALQTGTSSDKKAFDPVETIKQGFIKFKKEKYETNPALYGELAKGQSPKYMVFACSDSRVCPSHVLDFQPGDAFVVRNIANMVPPFDKVKYGGVGAAIEYAVLHLKVENIVVIGHSACGGIKGLMSFPLDGNNSTDFIEDWVKICLPAKSKVISELGDSAFEDQCGRCEREAVNVSLANLLTYPFVREGLVKGTLALKGGYYDFVKGAFELWGLEFGLSETSSV

SEQ ID NO: 85361 - protein, 336 aa, Arabidopsis thaliana; identical to SEQ ID NO: 35085
  peptide (1)..(336): Ceres Seq. ID no. 12680188

SEQ ID NO: 85362 - protein, 259 aa, Arabidopsis thaliana; identical to SEQ ID NO: 35086
  peptide (1)..(259): Ceres Seq. ID no. 12680189

SEQ ID NO: 85363 - DNA, 1096 bp, Arabidopsis thaliana
  misc_feature (1)..(1096): Ceres Seq. ID no. 12680190
  misc_feature (1)..(1096): Ortholog of  Ceres SEQ ID NO 12585444 as cited in SEQ ID NO 62814
ccctctctttaagctctctctctttctgtggctattctctttctctctttctctctgaatccgccgccacgccttcaccatggcctggcttagccgcgtgagaggagtttcgccggtgacaaggctcgcagcgattcgtcgatcttttggatcagcggccgcgttggagtttgactacgactccgatgacgagtacttgtacggagatgatcgccgcctcgcggaaccgaggcttgggttggatggatcggggccggatagaggagtgcagtgggtgcttatgggagcccctggagcatggaggcacgtcttcgccgagaggctctccaaactgcttgaagttcctcacatttccatggggtcccttgtccgtcaagaactcaaccctagatcttctctctacaaggagattgcaagtgctgtaaatgaacgaaagctggttccaaagagtgttgtgtttgcgttgctatcaaagaggctcgaagaaggctatgcaagaggggaaactggtttcattcttcatggcattcctcgcactcgttttcaagccgaaactcttgatcaaatcgctcagattgacctcgttgtcaatctcaaatgctctgaagaccatctggtaaaccggaatgaaacagctctgcctcagcaggagttcctcggctctatgttacactcacctgttgcaatcaatgctcggagggagagtgtcggtgtctacgcacaggaggtggaagaatactataggaagcagaggaaactgctagactttcatgttggcggtgccacatcagcagacacatggcagggcttgttggcagctttacatctgaagcaggtgaatttgacgacttcacagaagctaactctgtgatgatgaactacaaaacagagctttgctttataaattttgatctttctctctcattttatgggtcttcttaacccctaatatgcaactttttttttgttttctttttctgtaattcaaagttttgcgagagatcaaacgtgatgaggatgataccactaaagcttgtaatgagtctattatatatacaacaaagattttccatctatgaaaaatagttcctatatc

SEQ ID NO: 85364 - protein, 263 aa, Arabidopsis thaliana
  peptide (1)..(263): Ceres Seq. ID no. 12680191
MAWLSRVRGVSPVTRLAAIRRSFGSAAALEFDYDSDDEYLYGDDRRLAEPRLGLDGSGPDRGVQWVLMGAPGAWRHVFAERLSKLLEVPHISMGSLVRQELNPRSSLYKEIASAVNERKLVPKSVVFALLSKRLEEGYARGETGFILHGIPRTRFQAETLDQIAQIDLVVNLKCSEDHLVNRNETALPQQEFLGSMLHSPVAINARRESVGVYAQEVEEYYRKQRKLLDFHVGGATSADTWQGLLAALHLKQVNLTTSQKLTL

SEQ ID NO: 85365 - protein, 196 aa, Arabidopsis thaliana
  peptide (1)..(196): Ceres Seq. ID no. 12680192
MGAPGAWRHVFAERLSKLLEVPHISMGSLVRQELNPRSSLYKEIASAVNERKLVPKSVVFALLSKRLEEGYARGETGFILHGIPRTRFQAETLDQIAQIDLVVNLKCSEDHLVNRNETALPQQEFLGSMLHSPVAINARRESVGVYAQEVEEYYRKQRKLLDFHVGGATSADTWQGLLAALHLKQVNLTTSQKLTL

SEQ ID NO: 85366 - protein, 171 aa, Arabidopsis thaliana
  peptide (1)..(171): Ceres Seq. ID no. 12680193
MGSLVRQELNPRSSLYKEIASAVNERKLVPKSVVFALLSKRLEEGYARGETGFILHGIPRTRFQAETLDQIAQIDLVVNLKCSEDHLVNRNETALPQQEFLGSMLHSPVAINARRESVGVYAQEVEEYYRKQRKLLDFHVGGATSADTWQGLLAALHLKQVNLTTSQKLTL

SEQ ID NO: 85367 - DNA, 2415 bp, Arabidopsis thaliana
  misc_feature (1)..(2415): Ceres Seq. ID no. 12680194
  misc_feature (1)..(2415): Ortholog of  Ceres SEQ ID NO 13656177 as cited in SEQ ID NO 64997
ggacatccttgcttttggtctaactttctctctcttgcttctacgcttcttcttgtggcgtagattgttatagagagggaaaccaaaaaagggaatctcaaaagctcgagttcacagatttgacccgagtctttaatccaatctgctggttcgttttccacattcaaactcgactcttgaatatcaaatcagaagtctttgctatggctgctaccgctgctgcttctgttgtccgttacgcacctgaggatcatactcttcccaagccctggaaaggccttatcgatgatagaactggttacttgtacttttggaatcctgagaccaatgttactcagtacgagaaaccaaccccctctctacctcctaagttttctcccgccgtttctgttagctcttccgttcaggttcaacaaactgatgcctatgctcctcccaaggatgacgataagtactccagaggctctgaacgtgtgtccaggttttctgagggtggcaggagtggaccgccttattcgaacggtgctgctaatggagttggggattctgcttatggtgcagcatctaccagagttcctcttccttcatcagctccagcaagtgaactatcccctgaggcctattcccgccgtcatgaaattactgtcagtgggggccaagtaccaccacctctaatgtcctttgaagctactggttttccacctgagcttctgcgggaggtgcgatgtttgctcctgggaggagccaatgtcgtacactgtgccacttctttgaggtccttgcaaattatttggagtgccctatatggtggaccaaattttttggaaagggcttcccaaatcatccaagcttgtggcagggcctgttaatggtgtgatgattcatttcaccaccgggtccagacagaagaagaggcgtcctcctgctgcaggtttcatcagtaaccttttgccacctgcaaatgggggatggtactcagtgcaggtttctctgctccaactccaattcaagctcagtcatggcccattgctatgcaaggtagggacatagtagccattgctaaaactggctcgggaaaaactttgggttacttgattcctggatttttgcatcttcaacgtatccgaaatgattcgcgaatgggcccaacaatcttggtattgtctccaacgagagagctggccacacaaatccaagaagaagctgttaaatttgggaggtcatcaagaatttcgttgtttgtatggtggtgcaccaaagggccctcagttgagggatttagaaagaggagcagatatcgtggttgcaactcctgggagattgaatgatatccttgaaatgaggaggattagtctgcgtcagatatcttatcttgtgctagatgaggcagatagaatgttggacatgggttttgaacctcagataaggaagattgtgaaagaaattcccactaagcgtcaaacccttatgtacacagctacatggccaaagggagttaggaaaattgcagctgacttgcttgttaaccctgctcaagtcaacattggcaatgttgacgagcttgtggctaacaagtcaatcacacagcatattgaagtggtagcaccaatggagaaacagaggaggttagagcagatcttgcggtctcaggaaccaggctcaaaggtgataatattctgctcaaccaaaaggatgtgtgatcaactaacacgcaatctaacccgccaatttggagctgctgctatacatggagacaagtcccagcctgagagagacaatgttcttaatcaattccgcagtggcagaactccggttcttgtagcaaccgatgttgctgctcgtggtctggacgttaaggacatcagggcggtcgtaaactatgatttccccaatggagtggaagactatgttcatagaatcggaagaacaggaagagctggagcgactggtcaggcattcacattctttggtgatcaagattcgaaacatgcttcggatctgatcaagattttggaaggagcaaaccagcgagttcctcctcagatccgcgaaatggctacacgtggtggtgggggaatgaacaaattcagtcgttggggacctccttccggcggccgtggtcgtggtggcgactctggttatggtggcagaggtagctttgcttcccgtgacagtagaagcagcaatggatggggaagagagcgagaaaggagccgtagccctgagagattcaacagagctccaccaccgtcttccaccggatctcctcctcgcagcttccacgagacgatgatgatgaaacacagatgaaaagagagatacaaagctctgataaagccaagtgacagaagattgtgttgtgggggatttcccttatcattgtgacattatatattttttggccgatgaagaaac

SEQ ID NO: 85368 - protein, 393 aa, Arabidopsis thaliana
  peptide (1)..(393): Ceres Seq. ID no. 12680195
MIREWAQQSWYCLQRESWPHKSKKKLLNLGGHQEFRCLYGGAPKGPQLRDLERGADIVVATPGRLNDILEMRRISLRQISYLVLDEADRMLDMGFEPQIRKIVKEIPTKRQTLMYTATWPKGVRKIAADLLVNPAQVNIGNVDELVANKSITQHIEVVAPMEKQRRLEQILRSQEPGSKVIIFCSTKRMCDQLTRNLTRQFGAAAIHGDKSQPERDNVLNQFRSGRTPVLVATDVAARGLDVKDIRAVVNYDFPNGVEDYVHRIGRTGRAGATGQAFTFFGDQDSKHASDLIKILEGANQRVPPQIREMATRGGGGMNKFSRWGPPSGGRGRGGDSGYGGRGSFASRDSRSSNGWGRERERSRSPERFNRAPPPSSTGSPPRSFHETMMMKHR

SEQ ID NO: 85369 - protein, 323 aa, Arabidopsis thaliana
  peptide (1)..(323): Ceres Seq. ID no. 12680196
MRRISLRQISYLVLDEADRMLDMGFEPQIRKIVKEIPTKRQTLMYTATWPKGVRKIAADLLVNPAQVNIGNVDELVANKSITQHIEVVAPMEKQRRLEQILRSQEPGSKVIIFCSTKRMCDQLTRNLTRQFGAAAIHGDKSQPERDNVLNQFRSGRTPVLVATDVAARGLDVKDIRAVVNYDFPNGVEDYVHRIGRTGRAGATGQAFTFFGDQDSKHASDLIKILEGANQRVPPQIREMATRGGGGMNKFSRWGPPSGGRGRGGDSGYGGRGSFASRDSRSSNGWGRERERSRSPERFNRAPPPSSTGSPPRSFHETMMMKHR

SEQ ID NO: 85370 - protein, 304 aa, Arabidopsis thaliana
  peptide (1)..(304): Ceres Seq. ID no. 12680197
MLDMGFEPQIRKIVKEIPTKRQTLMYTATWPKGVRKIAADLLVNPAQVNIGNVDELVANKSITQHIEVVAPMEKQRRLEQILRSQEPGSKVIIFCSTKRMCDQLTRNLTRQFGAAAIHGDKSQPERDNVLNQFRSGRTPVLVATDVAARGLDVKDIRAVVNYDFPNGVEDYVHRIGRTGRAGATGQAFTFFGDQDSKHASDLIKILEGANQRVPPQIREMATRGGGGMNKFSRWGPPSGGRGRGGDSGYGGRGSFASRDSRSSNGWGRERERSRSPERFNRAPPPSSTGSPPRSFHETMMMKHR

SEQ ID NO: 85371 - DNA, 1244 bp, Arabidopsis thaliana
  misc_feature (1)..(1244): Ceres Seq. ID no. 12680198
  misc_feature (1)..(1244): Ortholog of  Ceres SEQ ID NO 13595414 as cited in SEQ ID NO 56539
  misc_feature (1)..(1244): Ortholog of  Ceres SEQ ID NO 14314396 as cited in SEQ ID NO 60048
attattcacttaagtatatagtagcttccataagagtcttagttctaactataaatacacatatctcactctctctgatctccgcttctcttcgccaacaaatgtcgaccgctcctctctccggcttctttctcacttcactttctccttctcaatcttctctccagaaactctctcttcgtacttcttccaccgtcgcttgcctcccacccgcctcttcttcttcctcatcttcctcctcctcgtcttcccgttccgttccaacgcttatccgtaacgagccagtttttgccgctcctgctcctatcattgccccttattggagtgaagagatgggaaccgaagcatacgacgaggctattgaagctctcaagaagcttctcatcgagaaggaagagctaaagacggttgcagcggcaaaggtggagcagatcacagcggctcttcagacaggtacttcatccgacaagaaagctttcgaccccgtcgaaaccattaagcagggcttcatcaaattcaagaaggagaaatacgaaaccaaccctgctttgtacggtgagctcgcaaagggtcaaagtcctaagtacatggtgtttgcttgttcagactcacgtgtgtgtccatcacacgttctggactttcagccaggagatgccttcgtggtccgtaacatagccaacatggttcctcctttcgacaaggtcaaatacggtggcgttggagcagccattgaatacgcggtcttacaccttaaggtggagaacattgtggtgataggacacagtgcatgtggtgggatcaaagggcttatgtctttccccttagatggaaacaactccactgacttcatagaggactgggtcaaaatctgtttaccagccaagtcaaaggttatatcagaacttggagattcagcctttgaagatcaatgtggccgatgtgaaagggaggcggtgaatgtttcactagcaaacctattgacatatccatttgtgagagaaggacttgtgaagggaacacttgctttgaagggaggctactatgacttcgtcaagggtgcttttgagctttggggacttgaatttggcctctccgaaactagctctgttaaagatgtggctaccatactacattggaagctgtaggaaactctttgaagccttacccgatttcacattgtcaattcaataacaccaagttgttgtttacatgcagatcttgatgaaactggtttttgattttac

SEQ ID NO: 85372 - protein, 380 aa, Arabidopsis thaliana
  peptide (1)..(380): Ceres Seq. ID no. 12680199
YSLKYIVASIRVLVLTINTHISLSLISASLRQQMSTAPLSGFFLTSLSPSQSSLQKLSLRTSSTVACLPPASSSSSSSSSSSSRSVPTLIRNEPVFAAPAPIIAPYWSEEMGTEAYDEAIEALKKLLIEKEELKTVAAAKVEQITAALQTGTSSDKKAFDPVETIKQGFIKFKKEKYETNPALYGELAKGQSPKYMVFACSDSRVCPSHVLDFQPGDAFVVRNIANMVPPFDKVKYGGVGAAIEYAVLHLKVENIVVIGHSACGGIKGLMSFPLDGNNSTDFIEDWVKICLPAKSKVISELGDSAFEDQCGRCEREAVNVSLANLLTYPFVREGLVKGTLALKGGYYDFVKGAFELWGLEFGLSETSSVKDVATILHWKL

SEQ ID NO: 85373 - protein, 347 aa, Arabidopsis thaliana; identical to SEQ ID NO: 77839
  peptide (1)..(347): Ceres Seq. ID no. 12680200

SEQ ID NO: 85374 - protein, 270 aa, Arabidopsis thaliana; identical to SEQ ID NO: 77840
  peptide (1)..(270): Ceres Seq. ID no. 12680201

SEQ ID NO: 85375 - DNA, 1844 bp, Arabidopsis thaliana
  misc_feature (1)..(1844): Ceres Seq. ID no. 12680210
  misc_feature (1)..(1844): Ortholog of  Ceres SEQ ID NO 13656177 as cited in SEQ ID NO 64997
aatccacctttcgatcggaaaatccttctgtttgcgaatctattgggtatatatctctccttgatgatttgatttgattctattgcattgagattgatatcttgttgcaggggaactctggttccatgtgttaggtattttcctttcgtcgacctgattcatcttgtgcatgtcgattctgaataatgaacgaagaaggctgcgtcccgcacaactctggttagtctgtgtacctaatagtaattcgtaaccctccacagagcttactcatccgccgcttttgtattctctttgttgtagatgttgttaaacaaaagtctatagatcaaagagcccctctttccggggaacctaaatgtgttatctgcagtcgttatggtgagtacatatgtgacgagaccaatgatgacgtctgcagcctcgagtgtaagcaagcactcctgagaagggttgacagcgctagagtttttcctgccacagatgagtgcttctatgttagagacccaggatcttcttcccacgatgctcaactacttagaagaaagcttgatattcatgtccaaggacaaggatcagcagtccctccacctgtcttgactttcacttcatgtggacttcctcctaagcttcttctcaacttagaaacggctggctatgactttcctactcctatccagatgcaagcaattccagctgctttaaccggcaaaagtctgctcgcctcagccgacaccggctctgggaaaacagcttcttttcttgttcctattatttctcgttgcacaacgtatcactctgagcatccctcagaccagaggaggaaccccttggctatggttttggctccaacgagagagctctgtgtccaagttgaagatcaggcaaaaatgctcggaaagggactgccatttaagactgcactcgttgtaggtggtgatcccatgtctggacaactctaccgcattcagcaaggtgttgaattgatcattggtaccccaggccgggtggtggaccttctatcaaagcacaccattgaactagataacatcatgacgtttgtgctggatgaagttgactgcatgcttcagagaggcttcagagatcaggtgatgcagatatttcaggccttgtcacaaccacaggtcttgctgttctctgcgacgatctcaagagaggtggagaaggtgggagggtctctagccaaggaaatcattttggtatccataggtaatcccaacaagcctaacaaggctgtcaaccaattggccatctgggtagatgcaaagcaaaagaaacagaagctgtttgatatactcagaagtcaaaaccatttcaagccccccgctgttgtttatgtgagttcgagagttggagcagatctcctggctaatgccataactgttgtcacgggggtaaaagctctatcgatccatggggagaagccaatgaaggagaggagagacgtaatgggatcgtttttgggtggagaggtgccagttcttgtatcaacgggagttctaggccgaggagttgacctattggtggtaaggcaggtgatagtgtttgacatgcctagtaccatcaaggagtacatacatgtaattggcagggcctctaggatgggagagaagggcactgccattgtgtttgtgaatgaggacgacaggaacctattccctgatttagttgccgctttaaaaagtagtggagcagccatacctaaggaacttatcaatttgacatccagggaaatgcacaacaagaagagaagggttgggtactgagatgtatgacctggatccgaatgttgttgtaaattaagaaagaaaggaagacttgagagc

SEQ ID NO: 85376 - protein, 368 aa, Arabidopsis thaliana; identical to SEQ ID NO: 39212
  peptide (1)..(368): Ceres Seq. ID no. 12680211

SEQ ID NO: 85377 - protein, 316 aa, Arabidopsis thaliana; identical to SEQ ID NO: 39213
  peptide (1)..(316): Ceres Seq. ID no. 12680212

SEQ ID NO: 85378 - protein, 298 aa, Arabidopsis thaliana
  peptide (1)..(298): Ceres Seq. ID no. 12680213
MLGKGLPFKTALVVGGDPMSGQLYRIQQGVELIIGTPGRVVDLLSKHTIELDNIMTFVLDEVDCMLQRGFRDQVMQIFQALSQPQVLLFSATISREVEKVGGSLAKEIILVSIGNPNKPNKAVNQLAIWVDAKQKKQKLFDILRSQNHFKPPAVVYVSSRVGADLLANAITVVTGVKALSIHGEKPMKERRDVMGSFLGGEVPVLVSTGVLGRGVDLLVVRQVIVFDMPSTIKEYIHVIGRASRMGEKGTAIVFVNEDDRNLFPDLVAALKSSGAAIPKELINLTSREMHNKKRRVGY

SEQ ID NO: 85379 - DNA, 1075 bp, Arabidopsis thaliana
  misc_feature (1)..(1075): Ceres Seq. ID no. 12680226
  misc_feature (1)..(1075): Ortholog of  Ceres SEQ ID NO 14308209 as cited in SEQ ID NO 58800
aatcgtcatttcctcggtatctcctcctcgaaagaagaatgcctggaattagaggtccttcggaatactcgcaggaaccacctcgtcacccttctctcaaggtcaacgccaaggaacctttcaacgccgagcctccccgctcggccttagtctcatcttatgtcactcccgtcgaccttttctacaagaattgttgatctgggggcccttataaggcgtcaatcactctaagtcaagccacaaatcctgaagcggatgttctactcgcttatgagatgaatggagagaccctgaacagggatcacggatttccgttaagggtggttgtccctggtgtgattggtgctcgttcggtcaaatggcttgattccatcaatgtcatcgctgaagaaagccagggattcttcatgcaaaaagattacaaaatgtttccaccctctgtcaattgggataatatcaactggtcctctaggagaccgcaaatggatttccctgttcagagtgcaatctgctctgtggaggatgtgcaaatggtgaagcctggaaaggtaagtatcaaaggatatgcggtttcaggaggtggacgcgggatagaaagagtggacatatccctggatggaggcaaaaactgggtggaagcttctagaacgcaggaaccaggaaagcagtacatctcagaacacagctccagtgacaaatgggcatgggtgttgtttgaagccaccattgatgtttcacagactacagaggtcatcgccaaagcggttgattcggcggcgaatgttcaaccggaaaatgtggagtcggtgtggaacctaagaggggttctcaacacttcgtggcaccgtgtccttctccggcttggccactctaacttgtagaccaagttaccactatgcgtctggtctctctttatcttttctttaagaactaaaacatccttgaatatgcttgtccttgtggatctgtgagagcaaaatactgtttatagttaaataaaatgggaaaacccatctgttgtcatgtggtggattataaattatttatttatatgatagaactgttattcattatt

SEQ ID NO: 85380 - protein, 201 aa, Arabidopsis thaliana; identical to SEQ ID NO: 26546
  peptide (1)..(201): Ceres Seq. ID no. 12680227

SEQ ID NO: 85381 - protein, 157 aa, Arabidopsis thaliana; identical to SEQ ID NO: 37425
  peptide (1)..(157): Ceres Seq. ID no. 12680228

SEQ ID NO: 85382 - protein, 151 aa, Arabidopsis thaliana; identical to SEQ ID NO: 37426
  peptide (1)..(151): Ceres Seq. ID no. 12680229

SEQ ID NO: 85383 - DNA, 1940 bp, Arabidopsis thaliana
  misc_feature (1)..(1940): Ceres Seq. ID no. 12680234
  misc_feature (1)..(1940): Ortholog of  Ceres SEQ ID NO 15176822 as cited in SEQ ID NO 1160
tgaggttttttgagaatttgcgtaaaggaagaaactttttcaaaacttttttttgcatcaatggagaacataaccgcgcagctcaaacgaggtatctcaagacaattctcaactggttcgattcgtcgaacattgagccgacagttcacgcgtcagtcatctcttgaccctcgtaggaccaacatgaggtttagtttcggtcgtcagtcttctctcgatccgatcaggaggagtcctgattcttccaagagtgatgacgagccacatatgtcggtaccggagaatctcgattcgacgatgcagcttctctttatggctagcaaaggtgatgtcagaggaatcgaggagcttcttgacgaaggaattgatgttaatagcatcgatcttgatggccggacggcgcttcacatcgccgcttgtgagggacatcttggtgtcgttaaggctcttcttagccggagagctaacattgatgctcgtgatcgatggggaagtacggcggctgctgatgcaaagtactatgggaatttagatgtttacaatctcttgaaggctcgaggagctaaagttccgaaaactaggaagactccgatgactgtgtcgaatccacgagaagttcctgagtatgagcttaatccacttgaggttcaagtcaggaaatctgatggcatctcaaagggagcatatcaagtagctaaatggaatggcacgcgggtttcagtcaaaatacttgataaagatagttactcagacccggaacgcataaacgcatttagacatgaattgacgttgctagaaaaagtccggcatccaaatgttatccagtttgttggagctgtcactcagaatataccgatgatgattgtagtcgagtataatccgaaaggagatttaagtgtatatctccaaaagaaaggacgtctttctccatccaaggcacttagatttgctcttgatattgccagaggcatgaactacctccatgaatgtaaaccagatccaatcattcactgtgatctaaagccaaagtaagagaattaaaggcatatgtcgattagatacgttaaaagcttttggtacatactcattgagatgtttcttttcgtttaatttttcgaaatttttcgtaaggtgtcagaaatattttgctggatagaggagggcaattaaagatctcaggatttggtatgataagattgtcgaaaatttcacaagacaaggcgaaagtagcaaaccacaaagcacatatagatctctctaattactacattgcaccagaggtttataaagacgaaatattcgacctaagggttgatgcacactcctttggtgtcattttatacgagataacagagggagtaccagttttccatccgagacctcctgaagaagttgcgagaatgatgtgcttagaaggaaagagacctgtattcaaaactaagtcaagaagttaccctccagatataaaagagttgatcgagaaatgttggcatccagaagcgggtattagaccgacattctctgaaattattattcgacttgacaaaatagtagcaaattgctctaaacaaggatggtggaaagacacattcaagttcccttggaaataaaaggggaagaagaaggagggagaaacaagaagagcgtgagatttgtggacaaaatccgattcagtgtttctcagtcatatgaacatggacaaactcacttgctatgtatattttttgtgtagaacaaaaaacagaagataatttcttctttttgtcattccacatctttatggggctgtatgcataagtttgtatagtttataaacgcgttactgtataacaaacacaagaactccggctcgttgcaattagaggatgaacaaacaacagatgaagaatcattttgaaaggttttattgaaatatccatcaagagatataaaatctttgc

SEQ ID NO: 85384 - protein, 323 aa, Arabidopsis thaliana
  peptide (1)..(323): Ceres Seq. ID no. 12680235
MENITAQLKRGISRQFSTGSIRRTLSRQFTRQSSLDPRRTNMRFSFGRQSSLDPIRRSPDSSKSDDEPHMSVPENLDSTMQLLFMASKGDVRGIEELLDEGIDVNSIDLDGRTALHIAACEGHLGVVKALLSRRANIDARDRWGSTAAADAKYYGNLDVYNLLKARGAKVPKTRKTPMTVSNPREVPEYELNPLEVQVRKSDGISKGAYQVAKWNGTRVSVKILDKDSYSDPERINAFRHELTLLEKVRHPNVIQFVGAVTQNIPMMIVVEYNPKGDLSVYLQKKGRLSPSKALRFALDIARGMNYLHECKPDPIIHCDLKPK

SEQ ID NO: 85385 - protein, 282 aa, Arabidopsis thaliana
  peptide (1)..(282): Ceres Seq. ID no. 12680236
MRFSFGRQSSLDPIRRSPDSSKSDDEPHMSVPENLDSTMQLLFMASKGDVRGIEELLDEGIDVNSIDLDGRTALHIAACEGHLGVVKALLSRRANIDARDRWGSTAAADAKYYGNLDVYNLLKARGAKVPKTRKTPMTVSNPREVPEYELNPLEVQVRKSDGISKGAYQVAKWNGTRVSVKILDKDSYSDPERINAFRHELTLLEKVRHPNVIQFVGAVTQNIPMMIVVEYNPKGDLSVYLQKKGRLSPSKALRFALDIARGMNYLHECKPDPIIHCDLKPK

SEQ ID NO: 85386 - protein, 254 aa, Arabidopsis thaliana
  peptide (1)..(254): Ceres Seq. ID no. 12680237
MSVPENLDSTMQLLFMASKGDVRGIEELLDEGIDVNSIDLDGRTALHIAACEGHLGVVKALLSRRANIDARDRWGSTAAADAKYYGNLDVYNLLKARGAKVPKTRKTPMTVSNPREVPEYELNPLEVQVRKSDGISKGAYQVAKWNGTRVSVKILDKDSYSDPERINAFRHELTLLEKVRHPNVIQFVGAVTQNIPMMIVVEYNPKGDLSVYLQKKGRLSPSKALRFALDIARGMNYLHECKPDPIIHCDLKPK

SEQ ID NO: 85387 - DNA, 1125 bp, Arabidopsis thaliana
  misc_feature (1)..(1125): Ceres Seq. ID no. 12680238
  misc_feature (1)..(1125): Ortholog of  Ceres SEQ ID NO 13593889 as cited in SEQ ID NO 53305
gcgggtttcagtcaaaatacttgataaagatagttactcagacccggaacgcataaacgcatttagacatgaattgacgttgctagaaaaagtccggcatccaaatgttatccagtttgttggagctgtcactcagaatataccgatgatgattgtagtcgagtataatccgaaaggagatttaagtgtatatctccaaaagaaaggacgtctttctccatccaaggcacttagatttgctcttgatattgccagaggcatgaactacctccatgaatgtaaaccagatccaatcattcactgtgatctaaagccaaaaaatattttgctggatagaggagggcaattaaagatctcaggatttggtatgataagattgtcgaaaatttcacaagacaaggcgaaagtagcaaaccacaaagcacatatagatctctctaattactacattgcaccagaggtttataaagacgaaatattcgacctaagggttgatgcacactcctttggtgtcattttatacgagataacagagggagtaccagttttccatccgagacctcctgaagaagttgcgagaatgatgtgcttagaaggaaagagacctgtattcaaaactaagtcaagaagttaccctccagatataaaagagttgatcgagaaatgttggcatccagaagcgggtattagaccgacattctctgaaattattattcgacttgacaaaatagtagcaaattgctctaaacaaggatggtggaaagacacattcaagttcccttggaaataaaaggggaagaagaaggagggagaaacaagaagagcgtgagatttgtggacaaaatccgattcagtgtttctcagtcatatgaacatggacaaactcacttgctatgtatattttttgtgtagaacaaaaaacagaagataatttcttctttttgtcattccacatctttatggggctgtatgcataagtttgtatagtttataaacgcgttactgtataacaaacacaagaactccggctcgttgcaattagaggatgaacaaacaacagatgaagaatcattttgaaaggttttattgaaatatccatcaagagatataaaatctttgctactt

SEQ ID NO: 85388 - protein, 262 aa, Arabidopsis thaliana
  peptide (1)..(262): Ceres Seq. ID no. 12680239
RVSVKILDKDSYSDPERINAFRHELTLLEKVRHPNVIQFVGAVTQNIPMMIVVEYNPKGDLSVYLQKKGRLSPSKALRFALDIARGMNYLHECKPDPIIHCDLKPKNILLDRGGQLKISGFGMIRLSKISQDKAKVANHKAHIDLSNYYIAPEVYKDEIFDLRVDAHSFGVILYEITEGVPVFHPRPPEEVARMMCLEGKRPVFKTKSRSYPPDIKELIEKCWHPEAGIRPTFSEIIIRLDKIVANCSKQGWWKDTFKFPWK

SEQ ID NO: 85389 - protein, 214 aa, Arabidopsis thaliana
  peptide (1)..(214): Ceres Seq. ID no. 12680240
MMIVVEYNPKGDLSVYLQKKGRLSPSKALRFALDIARGMNYLHECKPDPIIHCDLKPKNILLDRGGQLKISGFGMIRLSKISQDKAKVANHKAHIDLSNYYIAPEVYKDEIFDLRVDAHSFGVILYEITEGVPVFHPRPPEEVARMMCLEGKRPVFKTKSRSYPPDIKELIEKCWHPEAGIRPTFSEIIIRLDKIVANCSKQGWWKDTFKFPWK

SEQ ID NO: 85390 - protein, 213 aa, Arabidopsis thaliana
  peptide (1)..(213): Ceres Seq. ID no. 12680241
MIVVEYNPKGDLSVYLQKKGRLSPSKALRFALDIARGMNYLHECKPDPIIHCDLKPKNILLDRGGQLKISGFGMIRLSKISQDKAKVANHKAHIDLSNYYIAPEVYKDEIFDLRVDAHSFGVILYEITEGVPVFHPRPPEEVARMMCLEGKRPVFKTKSRSYPPDIKELIEKCWHPEAGIRPTFSEIIIRLDKIVANCSKQGWWKDTFKFPWK

SEQ ID NO: 85391 - DNA, 607 bp, Arabidopsis thaliana
  misc_feature (1)..(607): Ceres Seq. ID no. 12680249
  misc_feature (1)..(607): Ortholog of  Ceres SEQ ID NO 12610648 as cited in SEQ ID NO 56246
gatctgcaaaagatatccatctgcggtttaacaatggttctattacagttggatccattcctcaatgaactcacgagcatgtttgagaaaagcaaagagaagggttctgtgtgggttactttgaaaagatcatctctcaagtctaaggtgcagaagaggaaactgagctcagttggagaatccattgaatacagatgccttattcgagcaaccgatggaaagaaaactgtttctacttcggttggtgctaaggatcaccagagatttcaagcatcatatgccaccattcttaaggcccacatgactgctttgaagaagagggaaaggaaagaccggaagaaatcgacagaggcagagaagaaagaaagcacttcaaccactaaatctaagaaactttgatttctccttttgtgtttctcattgatttgcaattgctgcttaagagttgaattttgaaagctattgaaagatctaaaagattttgacttgtgttataatagagattttggtttgcatttgcttttccctcgagaatgttcatcgtgtataaataaaccaattccatacaaatgtacgaacataaatccaattcaaagaaactgattct

SEQ ID NO: 85392 - protein, 132 aa, Arabidopsis thaliana
  peptide (1)..(132): Ceres Seq. ID no. 12680250
DLQKISICGLTMVLLQLDPFLNELTSMFEKSKEKGSVWVTLKRSSLKSKVQKRKLSSVGESIEYRCLIRATDGKKTVSTSVGAKDHQRFQASYATILKAHMTALKKRERKDRKKSTEAEKKESTSTTKSKKL

SEQ ID NO: 85393 - protein, 121 aa, Arabidopsis thaliana; identical to SEQ ID NO: 38394
  peptide (1)..(121): Ceres Seq. ID no. 12680251

SEQ ID NO: 85394 - protein, 106 aa, Arabidopsis thaliana; identical to SEQ ID NO: 38395
  peptide (1)..(106): Ceres Seq. ID no. 12680252

SEQ ID NO: 85395 - DNA, 2068 bp, Arabidopsis thaliana
  misc_feature (1)..(2068): Ceres Seq. ID no. 12680253
  misc_feature (1)..(2068): Ortholog of  Ceres SEQ ID NO 12613725 as cited in SEQ ID NO 68196
  misc_feature (1)..(2068): Ortholog of  Ceres SEQ ID NO 14301486 as cited in SEQ ID NO 69222
cacaaagacaaagatcttctcctccttctcttctctttttcacttttctctcttcccctctctcgaagcttgaaaggtaacaacaatggagaaccctccggatcaaacagagtcaaaggagactcttcaacaacccattacaagaagaagaacaaagggtggtcttctcactatgcccttcatcattgcaaacgaggggttcgagaaagtggcgagctatggattattacagaacatgattctttatctgatgagtgattacagattgggacttgttaaaggacaaactgtcttgttcatgtgggttgctgctactaatttcatgcctctcgttggagcttttctctcagattcatatttgggtcgctttctcaccattgtcattgcttctctctccagtctcctggggatggtggttctatggctaacggcgatgttgccgcaagtaaaaccatcaccgtgtgtagcaacagccggaaccaactgcagttccgcgacatcttctcaattggctctcttgtataccgcattcgcattaatatcgattggatcaggaggaatcaggccatgttctttagcctttggtgctgatcaattggacaacaaagagaatcctaagaacgagagagttcttgagagtttctttggttggtactacgcttcttcatcagttgctgtcttgatcgctttcaccgtcattgtttacattcaagatcatctaggatggaaaatcgggtttggaatacccgcgattctcatgctgctcgcgggtttcttgtttgttttcgcgtctcctctctacgttaagcgcgatgtgagcaagagtctgttcactggtttagctcaagtggttgctgcagcttacgtgaagagaaacttaactttgccggatcatcatgactccagagattgttattaccgtttgaaagattctgaactcaaagctccaagtgacaaattgaggtttttaaacaaagcttgtgccataagtaaccgcgatgaagaccttggttctgatggtttggccttaaaccagtggaggctatgcacaacggaccaagttgagaaactcaaggcgttggtcaaggtgataccggtatggtccacggggataatgatgtcgataaacgttagccagaactcttttcagttgcttcaagctaaatcaatggacagacgtttaagcagcaattcgaccttccaaatcccagctggatcgtttggtatgttcacaatcatagccttaatctcatgggttgttctgtacgaccgcgcaattctccctttagcttcaaagatccgaggcagaccagttagagtcaatgtcaagattcgaatgggattagggctattcatatcattcttagcaatggcggtttccgcaactgttgaacattacagaaggaaaaccgcgataagccaaggactcgcaaacgatgccaactcaacagtgagcatctcagcaatgtggcttgtaccacagtatgtactacacggtttagcagaggccttgaccgggataggacagaccgagtttttctataccgagtttcctaaaagcatgtcgagtatcgcagcttcgttgttcggtctaggaatggcagtggctaatatcttggctagtgtgatcctaaatgcggtaaagaatagctcaaagcagggcaatgtgagctggattgaagataacatcaacaagggtcactatgactattactattgggttttagcgatcttgagcttcgttaatgtcatctactacgttgtgtgtagctggtcctatggtcctacggtggatcaggtgaggaatgataaggttaatggtatgagaaaagaagaagaggaagttattaaattaaactaagaccaattggttgatcataattaaatggtgtacgtgtgttataaaattctatatatttgtatgtaattagattattatatcatggatttggattttcttaggatgtagaggttgatgttaattaatgggtcgtgtgtttatttaattattacaaaaaaaaaaaaaacattgtgtgtatgatatttgattgaagagaatcaaattttc

SEQ ID NO: 85396 - protein, 591 aa, Arabidopsis thaliana; identical to SEQ ID NO: 23568
  peptide (1)..(591): Ceres Seq. ID no. 12680254

SEQ ID NO: 85397 - protein, 562 aa, Arabidopsis thaliana; identical to SEQ ID NO: 23569
  peptide (1)..(562): Ceres Seq. ID no. 12680255

SEQ ID NO: 85398 - protein, 541 aa, Arabidopsis thaliana; identical to SEQ ID NO: 23570
  peptide (1)..(541): Ceres Seq. ID no. 12680256

SEQ ID NO: 85399 - DNA, 745 bp, Arabidopsis thaliana
  misc_feature (1)..(745): Ceres Seq. ID no. 12680257
  misc_feature (1)..(745): Ortholog of  Ceres SEQ ID NO 14301998 as cited in SEQ ID NO 52093
  misc_feature (1)..(745): Ortholog of  Ceres SEQ ID NO 12619783 as cited in SEQ ID NO 69210
atttcctacacaaaattcccactcaccacacacaacaaaagaatagtgatcgaagctcatggcgtctcttgcaaccgtcgccgctgtgaaaccatccgccgccataaaaggactcggcggcagctcactcgccggagctaagctctccatcaagccttcccgcctgagctttaaacccaaatccatccgggctaatggtgtggtggctaagtatggagacaaaagtgtctactttgacttagaagatttgggtaacacaacaggtcaatgggacgtatacggctctgatgctccttctccttacaatcctcttcaggtttcttcatctcataacctaacttgacttttctacttcaatcaaacactattctgagaagagattctcttctactttcgttacttgtagagcaagttctttgagacattcgctgccccattcacaaagagaggattgctcctcaagttcttgatccttggaggaggctctttgcttacttatgtcagcgctacctctaccggcgaagttcttcccatcaagagaggtcctcaggagccgcctaagctcggtcctcgcggcaagctctgatctatattcatgttacctttctcttcttccttctaaaactcatcaacatttctcaatactgcaaacccttttaagtaattttatgtatattctgtttatctgttacatttgaaacgttttttcttcccctaattttacaaaagaaatattttttttttc

SEQ ID NO: 85400 - protein, 94 aa, Arabidopsis thaliana
  peptide (1)..(94): Ceres Seq. ID no. 12680258
MASLATVAAVKPSAAIKGLGGSSLAGAKLSIKPSRLSFKPKSIRANGVVAKYGDKSVYFDLEDLGNTTGQWDVYGSDAPSPYNPLQVSSSHNLT

SEQ ID NO: 85401 - protein, 66 aa, Arabidopsis thaliana
  peptide (1)..(66): Ceres Seq. ID no. 12680259
MSALPLPAKFFPSREVLRSRLSSVLAASSDLYSCYLSLLPSKTHQHFSILQTLLSNFMYILFICYI

SEQ ID NO: 85402 - DNA, 1747 bp, Arabidopsis thaliana
  misc_feature (1)..(1747): Ceres Seq. ID no. 12680270
  misc_feature (1)..(1747): Ortholog of  Ceres SEQ ID NO 15225465 as cited in SEQ ID NO 53147
ggaagatgttcgcttacaggactctgtttaggattgaccgtgtatttgggtttacgagtagatgttttcaatcgaaaccggaatcttttagtatcctgagctttaggggaagtgagaagagtgccatggatggatataagaagcagaagatggtaaatttagtgtggagacccatctccactcaaacctcttcagttattgctgaagctggaaatgaagtccaagaagtagctcagtgtagcaaatcaagtgatgtttctaaggaagttattgaaggagagacagcttcagttgtttcagctggaaagcattcagtttctcttgaggttggggcttctttgattaagttcattagagggaaagaaggaacgacgcagatgaaacttgaagaggaaatgggagtgaagatcattcttccatcatcaaggaacaaagatcatatcagtaagagtttttggaaccaactgtaatgcattgaaggcggttcagtggattgtgtgactaaagcttcaaaaagaatagcaaccattatcgatgaggttgtaaggagtccaagtctcgactactcacactttgtatcacttccattagccatacatcctgagttagtggacaagctagtgaattttcagaattctatcctcgggatccatagcatagctagtgataagcaagacgaccaagctaatagagcaaccacaagtgtggcagttgatctaaaagctaatagtgaaacaaaccaggtcaatgtgggtatcaagagcataccaattgtcagttacccgcctaaggccaaatcaaagtcatctactttattggacttaggaattgaaaagtccatatttattaagccaagtacttttcacttgactgtggttatgctgaagttatggaacaaagatcgtgtcaatgcagcgtgtgatgttctgaagagtatatttcctagtgtgatggatgctttggataacaaaccagtattcattagacttaaaggattggattgtatgagaggaccattagacaagactcgtgttctctatgctcctgttgaagaaattggtgatgaaggccggcttttacgtgcttgtcaagttattactgatgcatttgtgaaagctgggcttgttctcgagaaagatgcaaagcaaagcttgaaggtaaaagctttctgagtatgacgagattgttgcagtcacttaacgttagccaaaggctcagaactaatggaattggaagtagtgaatcgtgcttctgtttcatactttttcctttctttgcagctgcatgtgaccgtgatgaatgcgaggcacaggaaaaggagaaagaacaataagaagaagatggagacgtttgatgcaagagagatacacaaacagtttggaaacgaagactggggagaatatctgatccaagaagctcatctctcacagcgttttgtgttcgaccagaacggttattaccgttgctgtggttcaataccatttccaggagaacagagagcctgagaagaatcatctaaccagcggccacagtctcaaatctcaagcatcttcacaggttttggtcccgtggtatgagcacttacaactttgagaagagaacctgataaaattgtaaagttgtaccggtcatcttgtgttaaccaaatagttgtcttcggtttggttctttcttggtctttgttcaataaaccgagccaaaacgttcttgtactctttctacaaggtaataaaaaggttcttagtac

SEQ ID NO: 85403 - protein, 155 aa, Arabidopsis thaliana
  peptide (1)..(155): Ceres Seq. ID no. 12680271
KMFAYRTLFRIDRVFGFTSRCFQSKPESFSILSFRGSEKSAMDGYKKQKMVNLVWRPISTQTSSVIAEAGNEVQEVAQCSKSSDVSKEVIEGETASVVSAGKHSVSLEVGASLIKFIRGKEGTTQMKLEEEMGVKIILPSSRNKDHISKSFWNQL

SEQ ID NO: 85404 - protein, 154 aa, Arabidopsis thaliana
  peptide (1)..(154): Ceres Seq. ID no. 12680272
MFAYRTLFRIDRVFGFTSRCFQSKPESFSILSFRGSEKSAMDGYKKQKMVNLVWRPISTQTSSVIAEAGNEVQEVAQCSKSSDVSKEVIEGETASVVSAGKHSVSLEVGASLIKFIRGKEGTTQMKLEEEMGVKIILPSSRNKDHISKSFWNQL

SEQ ID NO: 85405 - protein, 114 aa, Arabidopsis thaliana
  peptide (1)..(114): Ceres Seq. ID no. 12680273
MDGYKKQKMVNLVWRPISTQTSSVIAEAGNEVQEVAQCSKSSDVSKEVIEGETASVVSAGKHSVSLEVGASLIKFIRGKEGTTQMKLEEEMGVKIILPSSRNKDHISKSFWNQL

SEQ ID NO: 85406 - DNA, 993 bp, Arabidopsis thaliana
  misc_feature (1)..(993): Ceres Seq. ID no. 12680288
  misc_feature (1)..(993): Ortholog of  Ceres SEQ ID NO 15174082 as cited in SEQ ID NO 61896
  misc_feature (1)..(993): Ortholog of  Ceres SEQ ID NO 13655598 as cited in SEQ ID NO 64077
  misc_feature (1)..(993): Ortholog of  Ceres SEQ ID NO 15179351 as cited in SEQ ID NO 0
  misc_feature (1)..(993): Ortholog of  Ceres SEQ ID NO 15180408 as cited in SEQ ID NO 0
atcatcttcttcactaaacaaaaaaaaacccttcaaaacatttccttattctttcttcttcatctacaacaatggctggagttgcctttggttcctttgatgattcattcagcttggcttctctaagagcttacctcgctgagttcatctccactttactctttgttttcgctggtgttggctctgccattgcctacgcaaagctgacgtcggacgctgctcttgatacaccgggactagtggccatcgcggtttgtcatggttttgctctcttcgtggccgttgcaatcggagccaacatctccggtggccatgtgaacccagccgtcacttttggtcttgctgtcggtggtcaaatcacagtcatcaccggagttttctactggatcgctcagcttctcggctccaccgccgcttgtttcctccttaaatacgtcaccggtggattggcggttccaacccacagcgttgcggctggactaggatcgatagaaggagtagtgatggagatcatcatcaccttcgctttggtctacactgtctacgccaccgccgctgatcccaagaagggttctctcggaaccatcgctcctctcgccattggtcttatcgttggtgccaacatcctcgccgccggtccattctccggtggatccatgaacccagcacgttcctttggaccagctgttgctgccggagacttctctggtcactgggtctactgggttggaccactcatcggtggtggacttgccggacttatctacggaaatgtcttcatgggttcttccgaacatgttcctcttgcttctgctgatttctaaggaaacaagtgatgattcttgattcatgtttctgtgtttggttactttgcctcgatctttcttgttttgtttggagtttggtccggtttcgttgtaatttttatccaatttgtatgaatattatttaatggatggctgttttggttataaattaactaatggatgtatg

SEQ ID NO: 85407 - protein, 250 aa, Arabidopsis thaliana; identical to SEQ ID NO: 30966
  peptide (1)..(250): Ceres Seq. ID no. 12680289

SEQ ID NO: 85408 - DNA, 1709 bp, Arabidopsis thaliana
  misc_feature (1)..(1709): Ceres Seq. ID no. 12680308
  misc_feature (1)..(1709): Ortholog of  Ceres SEQ ID NO 13594209 as cited in SEQ ID NO 59089
  misc_feature (1)..(1709): Ortholog of  Ceres SEQ ID NO 13502874 as cited in SEQ ID NO 66298
  misc_feature (1)..(1709): Ortholog of  Ceres SEQ ID NO 12614124 as cited in SEQ ID NO 68392
aaaagtagtaacaactaagaatggaagatatcatcatcggcgtggtggctctcgccgcggttctccttttcttcctctaccaaaaaccgaaaaccaaacggtacaagctacctccagggccatcaccacttccggtgatcggaaacctccttcagcttcagaagcttaacccacaacgcttcttcgctggatgggccaaaaaatacggtccaatcttgtcatacaggataggaagcagaacaatggtggtgatatcttcagctgagctagctaaagagcttctcaagacgcaagatgtcaactttgcggaccggcctccacatcgtggccatgagttcatatcctacggcaggcgtgacatggcattaaaccactacacaccgtattaccgagagataaggaagatggggatgaaccacttgttctcaccaacacgtgtggccacctttaagcatgtacgagaggaagaggctaggaggatgatggataagatcaacaaggccgcggataaatccgaagtagtcgatataagtgagcttatgttgaccttcacgaactcggttgtgtgtagacaagcgttcgggaagaagtacaatgaagatggagaagagatgaagaggttcatcaagattctttatgggactcaaagcgttttggggaagatctttttctctgattttttcccatattgtggctttcttgatgatttatcaggcctcacagcttatatgaaagagtgtttcgaaagacaagacacttatattcaagaggttgtcaatgagacgcttgatcctaagagagtcaagcccgaaaccgagagcatgattgatctcttgatggggatctacaaagaacaacctttcgcttctgagtttactgtagataatgtcaaagccgtcatcttggtaagtataaatatgttttaaatcgttgcttgcgcttcaagaaaccgtttgcttgtctttcaccttcttttctttttttttggctccaaaaggatattgtagtggcgggaacagatactgcagctgcggcggttgtgtgggggatgacgtatctaatgaagtacccacaagtgttgaagaaagctcaagcagaagtgagagagtatatgaaagagaaaggttcaacgttcgttactgaagacgatgtcaagaaccttccttacttcagagccttagttaaagaaaccctaaggatcgaaccagtgattcctctccttatccctcgtgcttgcattcaagataccaagatcgccggttacgacatccccgcaggaacaacggtcaacgtcaacgcgtgggccgtgtcacgtgacgagaaagaatggggaccgaaccctgatgagtttaggcccgagaggtttcttgagaaggaagttgacttcaaaggcacggactacgagtttataccgttcgggtcaggccggagaatgtgcccgggaatgcgtcttggggccgcgatgcttgaggttccttatgcgaaccttctcctcagcttcaactttaaacttcctaatgggatgaaaccagatgatatcaatatggatgtcatgactggtcttgctatgcacaagtcgcagcatctcaagcttgttccagagaaagtgaacaagtattagctaatatatatcaaataaatctaccttctctgattatatagtatatgttcctccagtgtattctgtttcaatgtttggtttctttctt

SEQ ID NO: 85409 - protein, 301 aa, Arabidopsis thaliana
  peptide (1)..(301): Ceres Seq. ID no. 12680309
MEDIIIGVVALAAVLLFFLYQKPKTKRYKLPPGPSPLPVIGNLLQLQKLNPQRFFAGWAKKYGPILSYRIGSRTMVVISSAELAKELLKTQDVNFADRPPHRGHEFISYGRRDMALNHYTPYYREIRKMGMNHLFSPTRVATFKHVREEEARRMMDKINKAADKSEVVDISELMLTFTNSVVCRQAFGKKYNEDGEEMKRFIKILYGTQSVLGKIFFSDFFPYCGFLDDLSGLTAYMKECFERQDTYIQEVVNETLDPKRVKPETESMIDLLMGIYKEQPFASEFTVDNVKAVILVSINMF

SEQ ID NO: 85410 - protein, 227 aa, Arabidopsis thaliana
  peptide (1)..(227): Ceres Seq. ID no. 12680310
MVVISSAELAKELLKTQDVNFADRPPHRGHEFISYGRRDMALNHYTPYYREIRKMGMNHLFSPTRVATFKHVREEEARRMMDKINKAADKSEVVDISELMLTFTNSVVCRQAFGKKYNEDGEEMKRFIKILYGTQSVLGKIFFSDFFPYCGFLDDLSGLTAYMKECFERQDTYIQEVVNETLDPKRVKPETESMIDLLMGIYKEQPFASEFTVDNVKAVILVSINMF

SEQ ID NO: 85411 - protein, 190 aa, Arabidopsis thaliana
  peptide (1)..(190): Ceres Seq. ID no. 12680311
MTYLMKYPQVLKKAQAEVREYMKEKGSTFVTEDDVKNLPYFRALVKETLRIEPVIPLLIPRACIQDTKIAGYDIPAGTTVNVNAWAVSRDEKEWGPNPDEFRPERFLEKEVDFKGTDYEFIPFGSGRRMCPGMRLGAAMLEVPYANLLLSFNFKLPNGMKPDDINMDVMTGLAMHKSQHLKLVPEKVNKY

SEQ ID NO: 85412 - DNA, 1679 bp, Arabidopsis thaliana
  misc_feature (1)..(1679): Ceres Seq. ID no. 12680312
  misc_feature (1)..(1679): Ortholog of  Ceres SEQ ID NO 13594209 as cited in SEQ ID NO 59089
  misc_feature (1)..(1679): Ortholog of  Ceres SEQ ID NO 13502874 as cited in SEQ ID NO 66298
  misc_feature (1)..(1679): Ortholog of  Ceres SEQ ID NO 12614124 as cited in SEQ ID NO 68392
caaaagtagtaacaactaagaatggaagatatcatcatcggcgtggtggctctcgccgcggttctccttttcttcctctaccaaaaaccgaaaaccaaacggtacaagctacctccagggccatcaccacttccggtgatcggaaacctccttcagcttcagaagcttaacccacaacgcttcttcgctggatgggccaaaaaatacggtccaatcttgtcatacaggataggaagcagaacaatggtggtgatatcttcagctgagctagctaaagagcttctcaagacgcaagatgtcaactttgcggaccggcctccacatcgtggccatgagttcatatcctacggcaggcgtgacatggcattaaaccactacacaccgtattaccgagagataaggaagatggggatgaaccacttgttctcaccaacacgtgtggccacctttaagcatgtacgagaggaagaggctaggaggatgatggataagatcaacaaggccgcggataaatccgaagtagtcgatataagtgagcttatgttgaccttcacgaactcggttgtgtgtagacaagcgttcgggaagaagtacaatgaagatggagaagagatgaagaggttcatcaagattctttatgggactcaaagcgttttggggaagatctttttctctgattttttcccatattgtggctttcttgatgatttatcaggcctcacagcttatatgaaagagtgtttcgaaagacaagacacttatattcaagaggttgtcaatgagacgcttgatcctaagagagtcaagcccgaaaccgagagcatgattgatctcttgatggggatctacaaagaacaacctttcgcttctgagtttactgtagataatgtcaaagccgtcatcttggatattgtagtggcgggaacagatactgcagctgcggcggttgtgtgggggatgacgtatctaatgaagtacccacaagtgttgaagaaagctcaagcagaagtgagagagtatatgaaagagaaaggttcaacgttcgttactgaagacgatgtcaagaaccttccttacttcagagccttagttaaagaaaccctaaggatcgaaccagtgattcctctccttatccctcgtgcttgcattcaagataccaagatcgccggttacgacatccccgcaggaacaacggtcaacgtcaacgcgtgggccgtgtcacgtgacgagaaagaatggggaccgaaccctgatgagtttaggcccgagaggtttcttgagaaggaagttgacttcaaaggcacggactacgagtttataccgttcgggtcaggccggagaatgtgcccgggaatgcgtcttggggccgcgatgcttgaggttccttatgcgaaccttctcctcagcttcaactttaaacttcctaatgggatgaaaccagatgatatcaatatggatgtcatgactggtcttgctatgcacaagtcgcagcatctcaagcttgttccagagaaagtgaacaagtattagctaatatatatcaaataaatctaccttctctgattatatagtatatgttcctccagtgtattctgtttcaatgtttggtttctttcttaaatggcaatcgtctctctatctttctcttcacattttgatatgaaggaagcaaattcaca

SEQ ID NO: 85413 - protein, 502 aa, Arabidopsis thaliana
  peptide (1)..(502): Ceres Seq. ID no. 12680313
MEDIIIGVVALAAVLLFFLYQKPKTKRYKLPPGPSPLPVIGNLLQLQKLNPQRFFAGWAKKYGPILSYRIGSRTMVVISSAELAKELLKTQDVNFADRPPHRGHEFISYGRRDMALNHYTPYYREIRKMGMNHLFSPTRVATFKHVREEEARRMMDKINKAADKSEVVDISELMLTFTNSVVCRQAFGKKYNEDGEEMKRFIKILYGTQSVLGKIFFSDFFPYCGFLDDLSGLTAYMKECFERQDTYIQEVVNETLDPKRVKPETESMIDLLMGIYKEQPFASEFTVDNVKAVILDIVVAGTDTAAAAVVWGMTYLMKYPQVLKKAQAEVREYMKEKGSTFVTEDDVKNLPYFRALVKETLRIEPVIPLLIPRACIQDTKIAGYDIPAGTTVNVNAWAVSRDEKEWGPNPDEFRPERFLEKEVDFKGTDYEFIPFGSGRRMCPGMRLGAAMLEVPYANLLLSFNFKLPNGMKPDDINMDVMTGLAMHKSQHLKLVPEKVNKY

SEQ ID NO: 85414 - protein, 428 aa, Arabidopsis thaliana
  peptide (1)..(428): Ceres Seq. ID no. 12680314
MVVISSAELAKELLKTQDVNFADRPPHRGHEFISYGRRDMALNHYTPYYREIRKMGMNHLFSPTRVATFKHVREEEARRMMDKINKAADKSEVVDISELMLTFTNSVVCRQAFGKKYNEDGEEMKRFIKILYGTQSVLGKIFFSDFFPYCGFLDDLSGLTAYMKECFERQDTYIQEVVNETLDPKRVKPETESMIDLLMGIYKEQPFASEFTVDNVKAVILDIVVAGTDTAAAAVVWGMTYLMKYPQVLKKAQAEVREYMKEKGSTFVTEDDVKNLPYFRALVKETLRIEPVIPLLIPRACIQDTKIAGYDIPAGTTVNVNAWAVSRDEKEWGPNPDEFRPERFLEKEVDFKGTDYEFIPFGSGRRMCPGMRLGAAMLEVPYANLLLSFNFKLPNGMKPDDINMDVMTGLAMHKSQHLKLVPEKVNKY

SEQ ID NO: 85415 - protein, 389 aa, Arabidopsis thaliana
  peptide (1)..(389): Ceres Seq. ID no. 12680315
MALNHYTPYYREIRKMGMNHLFSPTRVATFKHVREEEARRMMDKINKAADKSEVVDISELMLTFTNSVVCRQAFGKKYNEDGEEMKRFIKILYGTQSVLGKIFFSDFFPYCGFLDDLSGLTAYMKECFERQDTYIQEVVNETLDPKRVKPETESMIDLLMGIYKEQPFASEFTVDNVKAVILDIVVAGTDTAAAAVVWGMTYLMKYPQVLKKAQAEVREYMKEKGSTFVTEDDVKNLPYFRALVKETLRIEPVIPLLIPRACIQDTKIAGYDIPAGTTVNVNAWAVSRDEKEWGPNPDEFRPERFLEKEVDFKGTDYEFIPFGSGRRMCPGMRLGAAMLEVPYANLLLSFNFKLPNGMKPDDINMDVMTGLAMHKSQHLKLVPEKVNKY

SEQ ID NO: 85416 - DNA, 702 bp, Arabidopsis thaliana
  misc_feature (1)..(702): Ceres Seq. ID no. 12680320
  misc_feature (1)..(702): Ortholog of  Ceres SEQ ID NO 13594809 as cited in SEQ ID NO 51847
  misc_feature (1)..(702): Ortholog of  Ceres SEQ ID NO 15226273 as cited in SEQ ID NO 64934
  misc_feature (1)..(702): Ortholog of  Ceres SEQ ID NO 12617639 as cited in SEQ ID NO 65219
  misc_feature (1)..(702): Ortholog of  Ceres SEQ ID NO 15173998 as cited in SEQ ID NO 0
  misc_feature (1)..(702): Ortholog of  Ceres SEQ ID NO 15178333 as cited in SEQ ID NO 0
ttcattctacatttcctctgcctctttctcagatcacaaaaccctaatttcgaatctttattcttcagaatggctttctgtaacaaactcggtggtctattgagacagaacatttcttctaacggaaatgttccggttacgtctatgctcggatctctccggttgatgtctaccaagcttttcatcggaggtctctcatggggaaccgatgacgcatccttaagggatgcttttgctcacttcggtgacgttgttgatgctaaagttatcgttgatagagagacaggaagatcaagggggtttggatttgtcaacttcaatgatgagggtgctgcaactgctgccatatcagagatggacggaaaggaactgaatggtcgtcacatccgagtgaatcctgctaatgatagaccaagtgctccacgggcttatggaggtggtggtggatacagtggtggaggtggaggctacggaggaggtggtggtgggtacggaggaggaggtggtggctatggaggaggtggtgatggtggtggtggtttctaaacagaggaggtgcttgtgaagaagaagagttaatggttctgtttagttggtttcttctattgaatcttatgttagtacaaaacctgaatgggatttgctgaaaactctttactctttttttggttaccaatcaattcggtttaatattttattgcc

SEQ ID NO: 85417 - protein, 181 aa, Arabidopsis thaliana
  peptide (1)..(181): Ceres Seq. ID no. 12680321
FILHFLCLFLRSQNPNFESLFFRMAFCNKLGGLLRQNISSNGNVPVTSMLGSLRLMSTKLFIGGLSWGTDDASLRDAFAHFGDVVDAKVIVDRETGRSRGFGFVNFNDEGAATAAISEMDGKELNGRHIRVNPANDRPSAPRAYGGGGGYSGGGGGYGGGGGGYGGGGGGYGGGGDGGGGF

SEQ ID NO: 85418 - protein, 158 aa, Arabidopsis thaliana; identical to SEQ ID NO: 30013
  peptide (1)..(158): Ceres Seq. ID no. 12680322

SEQ ID NO: 85419 - protein, 133 aa, Arabidopsis thaliana; identical to SEQ ID NO: 30014
  peptide (1)..(133): Ceres Seq. ID no. 12680323

SEQ ID NO: 85420 - DNA, 1692 bp, Arabidopsis thaliana
  misc_feature (1)..(1692): Ceres Seq. ID no. 12680327
  misc_feature (1)..(1692): Ortholog of  Ceres SEQ ID NO 14311535 as cited in SEQ ID NO 51559
  misc_feature (1)..(1692): Ortholog of  Ceres SEQ ID NO 15176200 as cited in SEQ ID NO 55188
atatacacacaattcaatatttgacttcacatagagagagatagagagatggcgacggaaacggaagttgtagctccggtaacggtaagcaacggcggaagcaaaggatgttgcaagtacggtggtcctggttacgcgactcctctcgccgctatgtctggtccatcggagaaacttatctacgtaaccgccgtctacaccggaactggaatagataaaccggattatttggcgacggtggatgtagatccaagctcgccttcgtattcaagtgttattcatagattaccaatgccttttgttggtgatgagcttcatcattctggttggaactcttgtagttcttgccatggtgatgcttctgttgatagacgttatctcgtgttaccgtctcttatatctggtcgcatttatgcgattgatactaaggaaaacccgagggctccgtctttgtataagtatgttgatcctaaagagattgctgataagactggattggcgtttcctcacacggctcattgcctcgccacgggcgagatcttggtgtcctgtcttggagatgaagaggggaatgctaaggggaatgggtttcttcttcttgactctgattttaacatcaagaataggtgggagaaaccaggacatagtcctttgtatgggtatgatttttggtaccaacctcggcacaagaccatgatcagcacatcttggggagcacctaaagccttctctaaaggtttcaatcttcagcacgttgctgatggcttgtatggaagtcatctacatgtttatagttggccaggaggtgaaataaaacaattaattgaccttggaccgactggtctcttacctttggagattagattcttgcatgatccatctaaagatacagggtttgttgggagtgccttgtcgagtaatatgataagatttttcaagaacagtgatgaaacatggagccatgaggttgttatatcggttaaaccgttgaaagtcgaaaactggatacttccagaaatgccggggctaatcaccgacttcttgatctccctcgatgaccgatttatttactttgtgaactggctccatggagacattcgtcagtacaacatagaggaccctaaaaaccctgtattaacagggcaaatttgggttggaggattactacaaaagggcagtcctgttaaggcggttggagaagacggaaacactttccaattcgaggttcctcagatcaaggggaaatctttacgaggtggacctcaaatgattcagctgagcctcgatgggaaacgattgtatgcaacaaactcgctgtttagcgcatgggatcgtcagttttatcctgaaatcatggagaaaggctcacacataattcagattgatgttgatacagaaaaaggtggtctcaccataaaccctgatttctttgtggactttggtgatgaaccagacggtccttcactagcccacgagatgagatatccaggtggagactgcacttccgatatctggatttgaatttggctttgtttagagtgtgttttgtgttaagtttaaattgagttttattatttgttgtgtgtttagtagagttgaataaaaaagggagtaagatgactcagacaattaacacttgtttgtacattttgactcctatgtgtcttaagtaataaaactttctacaattcg

SEQ ID NO: 85421 - protein, 490 aa, Arabidopsis thaliana; identical to SEQ ID NO: 77463
  peptide (1)..(490): Ceres Seq. ID no. 12680328

SEQ ID NO: 85422 - protein, 455 aa, Arabidopsis thaliana; identical to SEQ ID NO: 77464
  peptide (1)..(455): Ceres Seq. ID no. 12680329

SEQ ID NO: 85423 - protein, 409 aa, Arabidopsis thaliana; identical to SEQ ID NO: 77465
  peptide (1)..(409): Ceres Seq. ID no. 12680330

SEQ ID NO: 85424 - DNA, 2422 bp, Arabidopsis thaliana
  misc_feature (1)..(2422): Ceres Seq. ID no. 12680335
  misc_feature (1)..(2422): Ortholog of  Ceres SEQ ID NO 14310556 as cited in SEQ ID NO 54965
gtctctgtctttgtgtctgcgtttttgtctcaccatgttgtgttcctaatctgacgcttcttcttcatgttcttcatttcaagcttcgttgagatcgagcttttttgtttcaattgtggtttgttgcattttcgctgactcacaaatagggcttcttgtttgatttcgtatttcccccaattttggtgtacatttggggttttcctctgatttcagatctattaggttttgtgttctactctgaaatgatcatgtgtgagaagcagtatcagtcactagatgcatgacatttgaaagttggagtggaacttgttcttagcgcgtattgaactgtctggtcgcttgtacataaagcttgtaactaaaaatatctggtctgaggggtaagctaaaggggagagaaatggagactgccaaagcttggctgagtaagttaaaatctaaagacaaggtgaaatcttcgaaaaagaaggaagccacaagtaatgtaaaggaaggaccgaaaacagctggaggtgaagaagcactttcaaatataactaaggagaaggctgctgctgcaaaactgtatattgaaaaccattacaaaatgcaaatgcagagtctgcaggaaagaaaggagcgacgcaaaatgctagagaaaaaattagctgctgcagaagtctctgaggaagagcaaaataacttgctaaaggatttggagatgaaggaaactgaatatatgcgccgtcagaggcataaaatgggagctgatgactttgagccattgacaatgattgggaagggtgcattcggagaggttaggatctgtagggagaagggaacaggcaatgtctatgcaatgaagaagcttaagaaatctgagatgcttcgcagaggccaggtggaacatgtaaaagcagagagaaatttacttgcagaagttgatagcaattgcattgtcaaactgtattgttctttccaagatgaagagtacttgtatctcataatggagtatttacctggtggggatatgatgactttacttatgaggaaagacaccctcactgaagacgaggccaggttttatattggggaaactgtcctggctattgagtccattcataagcacaactacattcacagagatatcaagcctgataatctgctacttgacaaagacggccacatgaaattgtcagattttggattatgtaaaccattagactgtagtaatcttcaagagaaagactttacagttgcaagaaacgttagtggggctttacaaagtgatggtcgccctgtggcgacaagacgcacccaacaagagcaattactaaactggcagagaaatagaaggatgcttgcttattccacagttggcactcctgactatattgccccagaagttctgttgaaaaaaggatatggaatggaatgtgattggtggtctcttggcgccattatgtatgaaatgcttgtggggtttccgcccttttattcagatgacccaatgacaacttgtaggaagatagtaaattggagaaattacttgaaattcccagatgaggttagactatcaccagaagccaaggatcttatttgtaggcttttatgcaatgttgaacaaaggcttggaacaaaaggagcagatgaaattaagggtcacccttggtttagaggcacagaatggggaaaattgtatcaaatgaaagctgcctttattccccaagttaatgatgagttggacacccaaaattttgagaaatttgaagagactgacaagcaagttccaaagtcagccaagtcaggtccatggagaaagatgctctcatccaaagacattaactttgttggttatacttacaagaacgtagaaatcgtaaatgatgaccaaataccagggatagctgagttgaagaagaagagcaataagccaaaaaggccgtctattaaatctctctttgaagacgaaacatctggtgggacaacaacccaccaaggaagctttttgaatctactaccgacgcagattgaagatccagagaaagaaggtagtaagtcgagctcatccgggtgaatttcatttgacacattgcacagcctgaaccagaagactcttgttatattaacatgtgtgttgttgatttcgttgaaagccttttgctttctctaaacgactgttaaaagttggagttagcaggggtttttcaacaaagtacagtctctccagtggaagcgaaggctctcccagaggagaaagatggatttgtttaattgttttcaacatagaaaagtgaaaaagtaaatattcttttcggaattggcttgtttatttattttcacagggagagaaggtgagctttggtatttgatttttttttttttggttaatcaaaacttggttgtactactaaacctcaagatgaaatcttcaccctct

SEQ ID NO: 85425 - protein, 551 aa, Arabidopsis thaliana
  peptide (1)..(551): Ceres Seq. ID no. 12680336
METAKAWLSKLKSKDKVKSSKKKEATSNVKEGPKTAGGEEALSNITKEKAAAAKLYIENHYKMQMQSLQERKERRKMLEKKLAAAEVSEEEQNNLLKDLEMKETEYMRRQRHKMGADDFEPLTMIGKGAFGEVRICREKGTGNVYAMKKLKKSEMLRRGQVEHVKAERNLLAEVDSNCIVKLYCSFQDEEYLYLIMEYLPGGDMMTLLMRKDTLTEDEARFYIGETVLAIESIHKHNYIHRDIKPDNLLLDKDGHMKLSDFGLCKPLDCSNLQEKDFTVARNVSGALQSDGRPVATRRTQQEQLLNWQRNRRMLAYSTVGTPDYIAPEVLLKKGYGMECDWWSLGAIMYEMLVGFPPFYSDDPMTTCRKIVNWRNYLKFPDEVRLSPEAKDLICRLLCNVEQRLGTKGADEIKGHPWFRGTEWGKLYQMKAAFIPQVNDELDTQNFEKFEETDKQVPKSAKSGPWRKMLSSKDINFVGYTYKNVEIVNDDQIPGIAELKKKSNKPKRPSIKSLFEDETSGGTTTHQGSFLNLLPTQIEDPEKEGSKSSSSG

SEQ ID NO: 85426 - protein, 489 aa, Arabidopsis thaliana
  peptide (1)..(489): Ceres Seq. ID no. 12680337
MQMQSLQERKERRKMLEKKLAAAEVSEEEQNNLLKDLEMKETEYMRRQRHKMGADDFEPLTMIGKGAFGEVRICREKGTGNVYAMKKLKKSEMLRRGQVEHVKAERNLLAEVDSNCIVKLYCSFQDEEYLYLIMEYLPGGDMMTLLMRKDTLTEDEARFYIGETVLAIESIHKHNYIHRDIKPDNLLLDKDGHMKLSDFGLCKPLDCSNLQEKDFTVARNVSGALQSDGRPVATRRTQQEQLLNWQRNRRMLAYSTVGTPDYIAPEVLLKKGYGMECDWWSLGAIMYEMLVGFPPFYSDDPMTTCRKIVNWRNYLKFPDEVRLSPEAKDLICRLLCNVEQRLGTKGADEIKGHPWFRGTEWGKLYQMKAAFIPQVNDELDTQNFEKFEETDKQVPKSAKSGPWRKMLSSKDINFVGYTYKNVEIVNDDQIPGIAELKKKSNKPKRPSIKSLFEDETSGGTTTHQGSFLNLLPTQIEDPEKEGSKSSSSG

SEQ ID NO: 85427 - protein, 487 aa, Arabidopsis thaliana
  peptide (1)..(487): Ceres Seq. ID no. 12680338
MQSLQERKERRKMLEKKLAAAEVSEEEQNNLLKDLEMKETEYMRRQRHKMGADDFEPLTMIGKGAFGEVRICREKGTGNVYAMKKLKKSEMLRRGQVEHVKAERNLLAEVDSNCIVKLYCSFQDEEYLYLIMEYLPGGDMMTLLMRKDTLTEDEARFYIGETVLAIESIHKHNYIHRDIKPDNLLLDKDGHMKLSDFGLCKPLDCSNLQEKDFTVARNVSGALQSDGRPVATRRTQQEQLLNWQRNRRMLAYSTVGTPDYIAPEVLLKKGYGMECDWWSLGAIMYEMLVGFPPFYSDDPMTTCRKIVNWRNYLKFPDEVRLSPEAKDLICRLLCNVEQRLGTKGADEIKGHPWFRGTEWGKLYQMKAAFIPQVNDELDTQNFEKFEETDKQVPKSAKSGPWRKMLSSKDINFVGYTYKNVEIVNDDQIPGIAELKKKSNKPKRPSIKSLFEDETSGGTTTHQGSFLNLLPTQIEDPEKEGSKSSSSG

SEQ ID NO: 85428 - DNA, 1154 bp, Arabidopsis thaliana
  misc_feature (1)..(1154): Ceres Seq. ID no. 12680339
  misc_feature (1)..(1154): Ortholog of  Ceres SEQ ID NO 14311568 as cited in SEQ ID NO 51732
  misc_feature (1)..(1154): Ortholog of  Ceres SEQ ID NO 14303877 as cited in SEQ ID NO 53500
  misc_feature (1)..(1154): Ortholog of  Ceres SEQ ID NO 15169781 as cited in SEQ ID NO 54829
  misc_feature (1)..(1154): Ortholog of  Ceres SEQ ID NO 15173757 as cited in SEQ ID NO 57537
  misc_feature (1)..(1154): Ortholog of  Ceres SEQ ID NO 13654231 as cited in SEQ ID NO 68285
aatgtatccttctctcgacgatgatttcgtctctgatttgttttgcttcgatcaaagggggaaaggttgtgtcttttgatgataatttgacgaaccctaatgtatctgaaagctgttaaattgaataggagaagaagtagctttatggatgttgttgtttatatttactcctattgatggatgtgaatctttttggtcatgatgactcttgtagcaatggagcagaacttgatgattacacacagtttggtgtaaatttgcagactgatcaagaggatacctttccagattttgtgtcatatggtgtgaatttgcagcaggagccagatgaagtctttagtattggagcttctcaattggatttgtcctcgtataatggagttttgtcgctagagccagaacaggtggggcaacaagattgtgaagttgtgcaggaagaagaagtagagatcaattctggttcatctggtggagctgttaaggaagaacaggaacatttagatgacgattgctccagaaagcgggcaaggactggatcgtgtagcagaggaggaggaactaaagcgtgtcgtgaaaggttgaggagggagaagctaaatgagaggtttatggatttgagctcggttttggagcctgggaggactcctaagactgataaaccggctatactcgatgatgcaatccgtatattgaatcaacttagagatgaagctcttaagcttgaagaaactaaccagaagcttttagaggagatcaagagtctcaaggcggagaagaacgagctgagggaggaaaagctggtgttgaaggcggataaagagaagacagaacaacagttaaagtctatgacggctccatcttcagggttcatacctcatattccagctgcatttaaccacaacaaaatggctgtttatccaagttacggttacatgccaatgtggcattatatgcctcaatccgttcgtgacacatctcgtgatcaagaactcaggcctcctgctgcttaaactctcaattgtttttttttggtacccatagggaactcatagagatttctgaatcacttggtttaggattcttccgtttggcaagtgtaaaagctttactcttgatcttgggttgtatttttcttataaaataaatataactcc

SEQ ID NO: 85429 - protein, 277 aa, Arabidopsis thaliana
  peptide (1)..(277): Ceres Seq. ID no. 12680340
MDVNLFGHDDSCSNGAELDDYTQFGVNLQTDQEDTFPDFVSYGVNLQQEPDEVFSIGASQLDLSSYNGVLSLEPEQVGQQDCEVVQEEEVEINSGSSGGAVKEEQEHLDDDCSRKRARTGSCSRGGGTKACRERLRREKLNERFMDLSSVLEPGRTPKTDKPAILDDAIRILNQLRDEALKLEETNQKLLEEIKSLKAEKNELREEKLVLKADKEKTEQQLKSMTAPSSGFIPHIPAAFNHNKMAVYPSYGYMPMWHYMPQSVRDTSRDQELRPPAA

SEQ ID NO: 85430 - DNA, 1309 bp, Arabidopsis thaliana
  misc_feature (1)..(1309): Ceres Seq. ID no. 12680341
  misc_feature (1)..(1309): Ortholog of  Ceres SEQ ID NO 13584646 as cited in SEQ ID NO 60715
agagaaatcgaaacgaaaagataatatttttcaagaaagagctacatatacaccttttgaccttgtaaagttggaaccctagaggcctttcaagcaaatcatcagggtaacaatttcttgatctttctttttagcgaatttccagtttttggtcaatcatggcaaacccttggtggacgaaccagagtggtttagcgggcatggtggaccattcggtctcctcaggccatcaccaaaaccatcaccaccaaagtcttcttaccaaaggagatcttggaatagccatgaatcagagccaagacaacgaccaagacgaagaagatgatcctagagaaggagccgttgaggtggtcaaccgtagaccaagaggtagaccaccaggatccaaaaacaaacccaaagctccaatctttgtgacaagagacagccccaacgcactccgtagccatgtcttggagatctccgacggcagtgacgtcgccgacacaatcgctcacttctcaagacgcaggcaacgcggcgtttgcgttctcagcgggacaggctcagtcgctaacgtcaccctccgccaagccgccgcaccaggaggtgtggtctctctccaaggcaggtttgaaatcttatctttaaccggtgctttcctccctggaccttccccacccgggtcaaccggtttaacggtttacttagccggggtccagggtcaggtcgttggaggtagcgttgtaggcccactcttagccatagggtcggtcatggtgattgctgctactttctctaacgctacttatgagagattgcccatggaagaagaggaagacggtggcggctcaagacagattcacggaggcggtgactcaccgcccagaatcggtagtaacctgcctgatctatcagggatggccgggccaggctacaatatgccgccgcatctgattccaaatggggctggtcagctagggcacgaaccatatacatgggtccacgcaagaccaccttactgactcagtgagccatttctatatataatggtctatataaataaatatatagatgaatataagcaagcaatttgaggtagtctattacaaagcttttgctctggttggaaaaataaataagtatcaaagctttgtttgttcttaatggaaatatagagcttgggaaggtagaaagagacgacattaagggactttcagattttcagtattactactccacgaaattattgaaataaataaacattgtactgtaaattagaatgtttgtctttttgtttttgtgtagtagtatttaactacaatatttg

SEQ ID NO: 85431 - protein, 281 aa, Arabidopsis thaliana; identical to SEQ ID NO: 23662
  peptide (1)..(281): Ceres Seq. ID no. 12680342

SEQ ID NO: 85432 - protein, 267 aa, Arabidopsis thaliana; identical to SEQ ID NO: 23663
  peptide (1)..(267): Ceres Seq. ID no. 12680343

SEQ ID NO: 85433 - protein, 239 aa, Arabidopsis thaliana; identical to SEQ ID NO: 23664
  peptide (1)..(239): Ceres Seq. ID no. 12680344

SEQ ID NO: 85434 - DNA, 1000 bp, Arabidopsis thaliana
  misc_feature (1)..(1000): Ceres Seq. ID no. 12680379
  misc_feature (1)..(1000): Ortholog of  Ceres SEQ ID NO 12557432 as cited in SEQ ID NO 92
aatcaagcaccaagttctcagcgaaatcaaggaatcgaaaacccagaagaggactcagtgaacaaatttcttcagctgtttcaaaatgtctcggaggtatgatagtcgcaccacgatcttctcaccggaaggtcgtctctaccaggttgaatatgctatggaagctattggcaatgctggttctgccattggaattcttggcaaaagacggagtggtgttggttggtgagaagaaagtcacttctaaacttcttcaaacctcttcatccatggagaaaatgtacaagatcgatgaccatgtggcttgtgcagttgctggtataatgtctgatgccaacattctgattaacactgctcgagttcaagctcagcgttacacctttatgtaccaagagccaatgcccgtttagcagctggttcagtctctttgtgacaccaagcaaggatacacccagtttggtggtctccgcccgtttggagtttcctttctttttgcaggctgggacaggaaccacgggtttcagctgtatatgagtgacccaagtggaaactatggtggatggcaagctgcagctgttggagcaaataatcaagcggctcagtctattcttaagcaagactataaggatgatgcaacgagggaagaagtggttcagctcgctatcaaggttttgagcaagacgatgacagcacgacttgacagctgaaaaactcgagcttgctgagttgtatctgactccttcaaaatgtgttaagtaccatgttcactcgcctgactcgctcactaagctcttggttaagcatggtgtgactcaaccagccgcagaaacttcctaagctagaaactggtgacagttttacctgacccgcctggttactgtagatgtccatttgctttctttccctttggagatatcgtatcagaatcaatttaccactctgattatgtcatgtgattcatttgggttgactatcttttatcttgagattgatcttcttc

SEQ ID NO: 85435 - protein, 135 aa, Arabidopsis thaliana
  peptide (1)..(135): Ceres Seq. ID no. 12680380
SSTKFSAKSRNRKPRRGLSEQISSAVSKCLGGMIVAPRSSHRKVVSTRLNMLWKLLAMLVLPLEFLAKDGVVLVGEKKVTSKLLQTSSSMEKMYKIDDHVACAVAGIMSDANILINTARVQAQRYTFMYQEPMPV

SEQ ID NO: 85436 - protein, 103 aa, Arabidopsis thaliana
  peptide (1)..(103): Ceres Seq. ID no. 12680381
MIVAPRSSHRKVVSTRLNMLWKLLAMLVLPLEFLAKDGVVLVGEKKVTSKLLQTSSSMEKMYKIDDHVACAVAGIMSDANILINTARVQAQRYTFMYQEPMPV

SEQ ID NO: 85437 - protein, 85 aa, Arabidopsis thaliana
  peptide (1)..(85): Ceres Seq. ID no. 12680382
MLWKLLAMLVLPLEFLAKDGVVLVGEKKVTSKLLQTSSSMEKMYKIDDHVACAVAGIMSDANILINTARVQAQRYTFMYQEPMPV

SEQ ID NO: 85438 - DNA, 2316 bp, Arabidopsis thaliana
  misc_feature (1)..(2316): Ceres Seq. ID no. 12680433
  misc_feature (1)..(2316): Ortholog of  Ceres SEQ ID NO 15169142 as cited in SEQ ID NO 58748
atggcaacactaggagatattggagtagcagcagcaatcaacatactcactgcaatcatcttccttttggcatttgcaatcttgaggattcaaccattcaacgatagggtttatttccctaaatggtatctcaaaggtataagaagcagccctttgcattcaggtgctcttgtcagcaagtttgtcaatgttaacttaggctcatacctccggttcttgaactggatgcccgcggctctaaagatgcctgagcctgagcttattgatcatgctggattggattctgctgtctacttgaggatttacttgatagggcttaagatctttgtaccgatagcgttacttgcttggtcgattcttgtacctgtcaattggactagtcatggtctgcaactagctaagcttcgtaatgtgacatctagtgatattgataagttatccatctcgaatatcgaaaatggatcagacaggttttggactcaccttgtgatggcttacgcattcacattctggacttgctatgttcttatgaaagagtatgagaaagtagctgctatgcgtttggcatttctccagaacgagcaacggcgccctgatcagttcacggttttggttaggaacgtaccagcggacccagatgagtccattagtgacagtgtggaacatttctttctagttaaccatccggaccattatcttacgcatcaggttgtgtacaatgcaaacgatttggcagcattagtagagcagaagaagagcacacagaactggcttgactattaccaattgaagtatacaaggaaccaggaacataagccgaggataaagacgggttttctcgggctatggggaaagaaagttgacgcaatcgatcattatatagctgaaatcgagaaattaaacgagcaaataatggaggagaggaaaaaagtgaagaaagatgatacaagtgtaatgccagccgcttttgtctcgtttaaaacacggtggggtgctgcggttagtgcacagactcaacagtcgagtgatccgactgaatggttaactgaatgggctcccgaggcacgagaagtgttttggtcgaaccttgcaataccttatgtctctttaacagtaagaagacttataatgcacattgcattcttcttcctcactttcttcttcatgattccaatagcctttgttcaatcccttgcaagcatcgaaggcattgagaaaaatgctcctttcctgaaatccatcatcgagaacgatcttttcaaatcggttatccaaggttttcttccgggtatcgtgttaaagctctttctaatatttctgccaagcattttgatggtaatgtcgaagttcgaagggtttgtatcgttatcatcgttagagagaagagcggcttttcgatattatatctttaatctcatcaatgtcttcctcggaagcgtaatcaccggctctgcatttgaacagcttgattctttcctaaaacaatccgcaaaggagattcctaagacggttggggtagcgataccgataaaagcaacgttttttatcacatatataatggtggacggttgggctggtattgcaggggagattctgaggctgaaacctcttatctttttccatataaagaactccttattggtgaaaaccgaaaaggatagagaagaagcaatgaacccgggacagatcaattatcatgcgacagagcctcggattcaactctacttcctcctcggtcttgtctacgctcctgtgactccagttctactccctttcattatcatcttcttcgcattggcttaccttgtctttcgtcatcagatcataaatgtgtataatcaggaatatgaaagcgcggctaggttctggccagatgttcatggtcgtataatatcagcattgatcatcgcacaaatccttttgatgggactattaagcactaagggagctgctcagtccacgcctttcctactcttcttaccgatcataacctttttcttccaccggtactgcaaaggccggtatgaaccagcattcctccgtcaccccttgaaggaagctatggtcaaagatacattggaacgagcaagagaacccaattttaatctgaaaccgtatcttcaaaaagcatacattcatccggttttcaaagacaacgactatgaagatagccggtttgatgaaatatccggttattgcatcgaagattcggatgaagagtgtgttactgtaccgaccaaacgtcagtcccggataaatacgcctgctgttagccatgcaagccgcggttcttcgcgttcaccaccctcaaagtaa

SEQ ID NO: 85439 - protein, 771 aa, Arabidopsis thaliana
  peptide (1)..(771): Ceres Seq. ID no. 12680434
MATLGDIGVAAAINILTAIIFLLAFAILRIQPFNDRVYFPKWYLKGIRSSPLHSGALVSKFVNVNLGSYLRFLNWMPAALKMPEPELIDHAGLDSAVYLRIYLIGLKIFVPIALLAWSILVPVNWTSHGLQLAKLRNVTSSDIDKLSISNIENGSDRFWTHLVMAYAFTFWTCYVLMKEYEKVAAMRLAFLQNEQRRPDQFTVLVRNVPADPDESISDSVEHFFLVNHPDHYLTHQVVYNANDLAALVEQKKSTQNWLDYYQLKYTRNQEHKPRIKTGFLGLWGKKVDAIDHYIAEIEKLNEQIMEERKKVKKDDTSVMPAAFVSFKTRWGAAVSAQTQQSSDPTEWLTEWAPEAREVFWSNLAIPYVSLTVRRLIMHIAFFFLTFFFMIPIAFVQSLASIEGIEKNAPFLKSIIENDLFKSVIQGFLPGIVLKLFLIFLPSILMVMSKFEGFVSLSSLERRAAFRYYIFNLINVFLGSVITGSAFEQLDSFLKQSAKEIPKTVGVAIPIKATFFITYIMVDGWAGIAGEILRLKPLIFFHIKNSLLVKTEKDREEAMNPGQINYHATEPRIQLYFLLGLVYAPVTPVLLPFIIIFFALAYLVFRHQIINVYNQEYESAARFWPDVHGRIISALIIAQILLMGLLSTKGAAQSTPFLLFLPIITFFFHRYCKGRYEPAFLRHPLKEAMVKDTLERAREPNFNLKPYLQKAYIHPVFKDNDYEDSRFDEISGYCIEDSDEECVTVPTKRQSRINTPAVSHASRGSSRSPPSK

SEQ ID NO: 85440 - protein, 696 aa, Arabidopsis thaliana
  peptide (1)..(696): Ceres Seq. ID no. 12680435
MPAALKMPEPELIDHAGLDSAVYLRIYLIGLKIFVPIALLAWSILVPVNWTSHGLQLAKLRNVTSSDIDKLSISNIENGSDRFWTHLVMAYAFTFWTCYVLMKEYEKVAAMRLAFLQNEQRRPDQFTVLVRNVPADPDESISDSVEHFFLVNHPDHYLTHQVVYNANDLAALVEQKKSTQNWLDYYQLKYTRNQEHKPRIKTGFLGLWGKKVDAIDHYIAEIEKLNEQIMEERKKVKKDDTSVMPAAFVSFKTRWGAAVSAQTQQSSDPTEWLTEWAPEAREVFWSNLAIPYVSLTVRRLIMHIAFFFLTFFFMIPIAFVQSLASIEGIEKNAPFLKSIIENDLFKSVIQGFLPGIVLKLFLIFLPSILMVMSKFEGFVSLSSLERRAAFRYYIFNLINVFLGSVITGSAFEQLDSFLKQSAKEIPKTVGVAIPIKATFFITYIMVDGWAGIAGEILRLKPLIFFHIKNSLLVKTEKDREEAMNPGQINYHATEPRIQLYFLLGLVYAPVTPVLLPFIIIFFALAYLVFRHQIINVYNQEYESAARFWPDVHGRIISALIIAQILLMGLLSTKGAAQSTPFLLFLPIITFFFHRYCKGRYEPAFLRHPLKEAMVKDTLERAREPNFNLKPYLQKAYIHPVFKDNDYEDSRFDEISGYCIEDSDEECVTVPTKRQSRINTPAVSHASRGSSRSPPSK

SEQ ID NO: 85441 - protein, 690 aa, Arabidopsis thaliana
  peptide (1)..(690): Ceres Seq. ID no. 12680436
MPEPELIDHAGLDSAVYLRIYLIGLKIFVPIALLAWSILVPVNWTSHGLQLAKLRNVTSSDIDKLSISNIENGSDRFWTHLVMAYAFTFWTCYVLMKEYEKVAAMRLAFLQNEQRRPDQFTVLVRNVPADPDESISDSVEHFFLVNHPDHYLTHQVVYNANDLAALVEQKKSTQNWLDYYQLKYTRNQEHKPRIKTGFLGLWGKKVDAIDHYIAEIEKLNEQIMEERKKVKKDDTSVMPAAFVSFKTRWGAAVSAQTQQSSDPTEWLTEWAPEAREVFWSNLAIPYVSLTVRRLIMHIAFFFLTFFFMIPIAFVQSLASIEGIEKNAPFLKSIIENDLFKSVIQGFLPGIVLKLFLIFLPSILMVMSKFEGFVSLSSLERRAAFRYYIFNLINVFLGSVITGSAFEQLDSFLKQSAKEIPKTVGVAIPIKATFFITYIMVDGWAGIAGEILRLKPLIFFHIKNSLLVKTEKDREEAMNPGQINYHATEPRIQLYFLLGLVYAPVTPVLLPFIIIFFALAYLVFRHQIINVYNQEYESAARFWPDVHGRIISALIIAQILLMGLLSTKGAAQSTPFLLFLPIITFFFHRYCKGRYEPAFLRHPLKEAMVKDTLERAREPNFNLKPYLQKAYIHPVFKDNDYEDSRFDEISGYCIEDSDEECVTVPTKRQSRINTPAVSHASRGSSRSPPSK

SEQ ID NO: 85442 - DNA, 2202 bp, Arabidopsis thaliana
  misc_feature (1)..(2202): Ceres Seq. ID no. 12680474
  misc_feature (1)..(2202): Ortholog of  Ceres SEQ ID NO 13600216 as cited in SEQ ID NO 569
atgtcgtactctgactccgattcgtcgtctcatggtggcgagtacaagaatttccgacagattacgcgtgaacgtgagagttcaatggctaagacttgtcgcggaattgcattgggacagttgtttgatgtaatattggggaaatccgttgcttgttacactggtttggtttctaaggactcttgtatgagatgcttagatctgcaaagacagggagctcaaaatccacctggaaggtatgttttccttgtactaatcatggacaaacttactgtcaagataatgtcgtacgcctgcaaaatggctgatatcacacaagaaggagtttcattggttgaagacatatttagacgaagacaaccacttccttcaatggatgcaatatacttcatccagccaactaaagagaatgtcatcatgttcttgtcagacatgtctgggaaatcacccttgtacaagaattcaccggtttccaaggaactggttggtcacatcaagaaagattcgagtgtattacctcggattggagcattgagagagatgaatttggagttttttgccattgatagccagggtttcataaccgatcatgagcgagctttagaggatctttttggtgatgaggaaacttctcgaaaaggcgatgcgtgcttgaatgtgatggcttctcgaattgctacagtctttgcttcgttgcgggaattcccagcagtacgataccgagctgcaaagtcacttgatgcatcgacaatgacaactttgcgcgatttaattccaacaaagcttgcagctggaatctggaattgtctggcaaaacataagcagtcgattgaaaattttcctcaaactgaaacatgcgagctactcatccttgacagatccatagaccagattgcccctgttatacatgagtggacatatgatgctatgtgccatgatttactgaacatggaaggaaacaaatatgtacatgtgattccaagcaaatcaggcggacaaccagagaagaaagatgtgctcttagaggaacatgatcctatttggctagagcttcgacatgcacatatagcagatgctagtgaaagattgcatgacaagatgaccaatttcttatcgaaaaacaaagctgctcagcttcagggtaagagagatggagctgagctttctacaagagatttgcagaagatggttcaagcattgccacagtacagtgaacaaattgacaagctctctctccacgtagagattgctagaaaactcaacgaccttatcagagagcaaggacttcgggagcttggacaacttgaacaagaccttgtttttggtgatgctggaatgaaggatgtgattaaatatttgagtactcaagaggaggcaagccgtgaaggtaagttacgcctgttgatgatcctcgcaacaatttaccctgaaaagtttgaaggtgaaaaaggtcaaaatctaatgaagttggccaaactctcatctgatgacatgaccgctgtaaataatatgagcttacttggttcagccgtcgatgctaaaaagaataccccgggaggtttcactttgaaatttgaccttcacaagaaaaaacgagctgtcaggaaagagcgccaagaggaagcagcatggcagttatctcgtttttaccccatgattgaggaactcatcgaaaaacttagcaaaggagaattgccaaaagaggatttcccatgtatgaacgacccaagcccaagtttccacggatcaacctcactttcatcagcagcaagtagtagtcaaggtcaagctgctcagtccatgagatcaagacgcacaccaacatgggctaaacctcgaggttcagatgatggatattcaagtgattcggtattgagacatgcgtcaagcgatttcaggaagatgggacagcgaatatttgtgttcatcgtcggtggagcgactagatcagaggtaagaagctatggaaaaaggctttcattgttggaaataaattcacatcatagaatcatgatatatgtgctgatctcttttcctggtatctttgatttccagttaaaagtatgccacaaactatccacaaaactcaaaagagaagtaatcctcggttccacgagcctggacgatcctccacagttcataacgaaattgaagcttttgactgcaaatgatgatttatctttagacgatctccaaatatga

SEQ ID NO: 85443 - protein, 733 aa, Arabidopsis thaliana
  peptide (1)..(733): Ceres Seq. ID no. 12680475
MSYSDSDSSSHGGEYKNFRQITRERESSMAKTCRGIALGQLFDVILGKSVACYTGLVSKDSCMRCLDLQRQGAQNPPGRYVFLVLIMDKLTVKIMSYACKMADITQEGVSLVEDIFRRRQPLPSMDAIYFIQPTKENVIMFLSDMSGKSPLYKNSPVSKELVGHIKKDSSVLPRIGALREMNLEFFAIDSQGFITDHERALEDLFGDEETSRKGDACLNVMASRIATVFASLREFPAVRYRAAKSLDASTMTTLRDLIPTKLAAGIWNCLAKHKQSIENFPQTETCELLILDRSIDQIAPVIHEWTYDAMCHDLLNMEGNKYVHVIPSKSGGQPEKKDVLLEEHDPIWLELRHAHIADASERLHDKMTNFLSKNKAAQLQGKRDGAELSTRDLQKMVQALPQYSEQIDKLSLHVEIARKLNDLIREQGLRELGQLEQDLVFGDAGMKDVIKYLSTQEEASREGKLRLLMILATIYPEKFEGEKGQNLMKLAKLSSDDMTAVNNMSLLGSAVDAKKNTPGGFTLKFDLHKKKRAVRKERQEEAAWQLSRFYPMIEELIEKLSKGELPKEDFPCMNDPSPSFHGSTSLSSAASSSQGQAAQSMRSRRTPTWAKPRGSDDGYSSDSVLRHASSDFRKMGQRIFVFIVGGATRSEVRSYGKRLSLLEINSHHRIMIYVLISFPGIFDFQLKVCHKLSTKLKREVILGSTSLDDPPQFITKLKLLTANDDLSLDDLQI

SEQ ID NO: 85444 - protein, 705 aa, Arabidopsis thaliana
  peptide (1)..(705): Ceres Seq. ID no. 12680476
MAKTCRGIALGQLFDVILGKSVACYTGLVSKDSCMRCLDLQRQGAQNPPGRYVFLVLIMDKLTVKIMSYACKMADITQEGVSLVEDIFRRRQPLPSMDAIYFIQPTKENVIMFLSDMSGKSPLYKNSPVSKELVGHIKKDSSVLPRIGALREMNLEFFAIDSQGFITDHERALEDLFGDEETSRKGDACLNVMASRIATVFASLREFPAVRYRAAKSLDASTMTTLRDLIPTKLAAGIWNCLAKHKQSIENFPQTETCELLILDRSIDQIAPVIHEWTYDAMCHDLLNMEGNKYVHVIPSKSGGQPEKKDVLLEEHDPIWLELRHAHIADASERLHDKMTNFLSKNKAAQLQGKRDGAELSTRDLQKMVQALPQYSEQIDKLSLHVEIARKLNDLIREQGLRELGQLEQDLVFGDAGMKDVIKYLSTQEEASREGKLRLLMILATIYPEKFEGEKGQNLMKLAKLSSDDMTAVNNMSLLGSAVDAKKNTPGGFTLKFDLHKKKRAVRKERQEEAAWQLSRFYPMIEELIEKLSKGELPKEDFPCMNDPSPSFHGSTSLSSAASSSQGQAAQSMRSRRTPTWAKPRGSDDGYSSDSVLRHASSDFRKMGQRIFVFIVGGATRSEVRSYGKRLSLLEINSHHRIMIYVLISFPGIFDFQLKVCHKLSTKLKREVILGSTSLDDPPQFITKLKLLTANDDLSLDDLQI

SEQ ID NO: 85445 - protein, 671 aa, Arabidopsis thaliana
  peptide (1)..(671): Ceres Seq. ID no. 12680477
MRCLDLQRQGAQNPPGRYVFLVLIMDKLTVKIMSYACKMADITQEGVSLVEDIFRRRQPLPSMDAIYFIQPTKENVIMFLSDMSGKSPLYKNSPVSKELVGHIKKDSSVLPRIGALREMNLEFFAIDSQGFITDHERALEDLFGDEETSRKGDACLNVMASRIATVFASLREFPAVRYRAAKSLDASTMTTLRDLIPTKLAAGIWNCLAKHKQSIENFPQTETCELLILDRSIDQIAPVIHEWTYDAMCHDLLNMEGNKYVHVIPSKSGGQPEKKDVLLEEHDPIWLELRHAHIADASERLHDKMTNFLSKNKAAQLQGKRDGAELSTRDLQKMVQALPQYSEQIDKLSLHVEIARKLNDLIREQGLRELGQLEQDLVFGDAGMKDVIKYLSTQEEASREGKLRLLMILATIYPEKFEGEKGQNLMKLAKLSSDDMTAVNNMSLLGSAVDAKKNTPGGFTLKFDLHKKKRAVRKERQEEAAWQLSRFYPMIEELIEKLSKGELPKEDFPCMNDPSPSFHGSTSLSSAASSSQGQAAQSMRSRRTPTWAKPRGSDDGYSSDSVLRHASSDFRKMGQRIFVFIVGGATRSEVRSYGKRLSLLEINSHHRIMIYVLISFPGIFDFQLKVCHKLSTKLKREVILGSTSLDDPPQFITKLKLLTANDDLSLDDLQI

SEQ ID NO: 85446 - DNA, 840 bp, Arabidopsis thaliana
  misc_feature (1)..(840): Ceres Seq. ID no. 12680486
  misc_feature (1)..(840): Ortholog of  Ceres SEQ ID NO 13597333 as cited in SEQ ID NO 63974
  misc_feature (1)..(840): Ortholog of  Ceres SEQ ID NO 13599307 as cited in SEQ ID NO 0
atggcggtctcgtttaatacaacgcttcaccagccttctctgagtccgagctgtagcatcaagctttattctgggttaaagcctcaatctgcaagctttttggcaagtgggtatcagaatttgaacaaggagttctatggaagagtttataagagtctgcaatctgggactgggaaagcgagcaggtcacgggtaaagatgatgccaataggaacaccgagagtaccctacagaaaccgagaagaagggacttggcaatgggttgatatatggaatgccctttatcgagagcgtgtaatcttcattggacaaaacattgatgaagagtttagcaaccagatattagcaaccatgttgtaccttgatactcttgatgactcgaggaggatttatatgtacctaaatggtccgggtggtgatcttactccaagtctagccatctatgatacaatgaagagcttgaaaagtccggttgggacacattgcgttgggcttgcttacaaccttgcaggttttcttcttgcggctggagaaaagggtcaccgatttgcgatgccattatcaagaatcgccctccagtcaccagctggtgcagcccgtggtcaggctgatgatatccaaaatgaagcaaaagagctttcaaggataagagactacctcttcaatgaactagccaagaatacaggccagcctgcggaaagggtcttcaaagacttgagccgggtgaaaaggttcaatgcagaggaagcaatcgagtatggacttattgataagattgttagaccaccgcgcatcaaagaagacgctcctcgccaagacgaaagcgcagggctaggctag

SEQ ID NO: 85447 - protein, 279 aa, Arabidopsis thaliana; identical to SEQ ID NO: 26212
  peptide (1)..(279): Ceres Seq. ID no. 12680487

SEQ ID NO: 85448 - protein, 213 aa, Arabidopsis thaliana; identical to SEQ ID NO: 26213
  peptide (1)..(213): Ceres Seq. ID no. 12680488

SEQ ID NO: 85449 - protein, 212 aa, Arabidopsis thaliana; identical to SEQ ID NO: 27066
  peptide (1)..(212): Ceres Seq. ID no. 12680489

SEQ ID NO: 85450 - DNA, 1277 bp, Arabidopsis thaliana
  misc_feature (1)..(1277): Ceres Seq. ID no. 12680525
  misc_feature (1)..(1277): Ortholog of  Ceres SEQ ID NO 15172846 as cited in SEQ ID NO 51978
  misc_feature (1)..(1277): Ortholog of  Ceres SEQ ID NO 13585156 as cited in SEQ ID NO 68122
atattcatcactttcgttgttaagacggaaaaaaaaaaaaaagaggcagaaccaaaaaactttagggttcgatttcgctccttggtaatcaccatgtccggagaagaagaagagaacgccgccgaactcaagatcggagatggtacttctctattctcttcgccatatcccccgctgtgtacctcaaaattagggtttctttgcctcatcgaattgatcttaattcaatacgatttaattgagcttaactgtatcgaaaatcccttaattatttgagatttatcatcgaaattgatgggttttattctctttgacaaaagagtttttgaaggcaaagtgcttaatgaactgtgaagtctctttgattcttgagcacaagtttgaacagcttcagcaaatctcagaggatcctatgaatcaagtttctcaagtgtttgagaagtccttgcaatatgtgaagcgattcagccgctacaagaatccagatgctgttagacaagttcgagagtatcctttttctgaattagtttgattcaaagtttttaagtaatcgttgctttgacatgcttccttcttgatgagtgagattttacagtcactggtttaattctatagttttgtgagaatatgctattccttaactcaacttttgcagaatactaagcagacatcaactcactgagtttgaggtacaatgttaaatctcttgagattggatttttgtttatcaattaagtcgtttcggtagaagacttaaaacattgcattgttcattattgaacagctatgtgttcttggcaatctctgtcctgaaactgttgaagaagcagtggcaatggttccttctcttaaggtaaataaagattctactttttctattcagtggagataataagataacctcaaaaggacaaattgtattgttatgtaagtggacttttgagatgatgtaagcttctcttttgtgtagacaaaaggaagagctcatgatgatgaagctattgagaagatgctcaatgatctctcacttgtcaagagattcgagtagtgcagaagattctcaagatctaagattctgaacatttagcaggatgctttacttgccttctagctgatctggagttaattcgccacgtctgaaattataaagctttaatgcctagaatttctggaatgataccttcatgttaaatgaatgtaatttacaacggatgatccaagcttttaatgaaatataccatctctttttcactaaatcaagtaagggatgacactat

SEQ ID NO: 85451 - protein, 91 aa, Arabidopsis thaliana
  peptide (1)..(91): Ceres Seq. ID no. 12680526
IFITFVVKTEKKKKEAEPKNFRVRFRSLVITMSGEEEENAAELKIGDGTSLFSSPYPPLCTSKLGFLCLIELILIQYDLIELNCIENPLII

SEQ ID NO: 85452 - protein, 62 aa, Arabidopsis thaliana
  peptide (1)..(62): Ceres Seq. ID no. 12680527
MNCEVSLILEHKFEQLQQISEDPMNQVSQVFEKSLQYVKRFSRYKNPDAVRQVREYPFSELV

SEQ ID NO: 85453 - protein, 60 aa, Arabidopsis thaliana
  peptide (1)..(60): Ceres Seq. ID no. 12680528
MSGEEEENAAELKIGDGTSLFSSPYPPLCTSKLGFLCLIELILIQYDLIELNCIENPLII

SEQ ID NO: 85454 - DNA, 654 bp, Arabidopsis thaliana
  misc_feature (1)..(654): Ceres Seq. ID no. 12680604
  misc_feature (1)..(654): Ortholog of  Ceres SEQ ID NO 14305967 as cited in SEQ ID NO 1343
accaacgttgattcttcttcttcttcttcttctctctttctcatctaaaccaaaaaatggcagatcagctcaccgatgatcagatctctgagttcaaggaagcttttagccttttcgacaaagacggagatggttgcatcacaacgaaagagctaggaacagtgatgagatcattaggtcaaaatccaacagaagcagagttacaagatatgataaacgaagtagatgctgatggtaacggaaccatagacttccctgagtttctgaacctaatggctaggaagatgaaggacactgactctgaagaagagctcaaagaagctttcagggttttcgataaggaccagaacggtttcatctcggcagctgagttaagacatgtaatgacaaatcttggtgagaagttaactgatgaagaagttgatgagatgatcaaagaagctgatgttgatggagatggtcagatcaattatgaagagtttgtcaaagttatgatggcaaagtgaggaaactattctcatatcttttctctctttttctttctttctttttttgaattgaacaactctgattattgctttattctatgtttgactgttcattattatgcattcgtcccaaatttcatgttatgaactattttgtgactttggg

SEQ ID NO: 85455 - protein, 149 aa, Arabidopsis thaliana; identical to SEQ ID NO: 29417
  peptide (1)..(149): Ceres Seq. ID no. 12680605

SEQ ID NO: 85456 - protein, 113 aa, Arabidopsis thaliana; identical to SEQ ID NO: 29418
  peptide (1)..(113): Ceres Seq. ID no. 12680606

SEQ ID NO: 85457 - protein, 98 aa, Arabidopsis thaliana; identical to SEQ ID NO: 29419
  peptide (1)..(98): Ceres Seq. ID no. 12680607

SEQ ID NO: 85458 - DNA, 1691 bp, Arabidopsis thaliana
  misc_feature (1)..(1691): Ceres Seq. ID no. 12680616
  misc_feature (1)..(1691): Ortholog of  Ceres SEQ ID NO 13595870 as cited in SEQ ID NO 62101
  misc_feature (1)..(1691): Ortholog of  Ceres SEQ ID NO 13590241 as cited in SEQ ID NO 63878
  misc_feature (1)..(1691): Ortholog of  Ceres SEQ ID NO 13657939 as cited in SEQ ID NO 66349
  misc_feature (1)..(1691): Ortholog of  Ceres SEQ ID NO 13660597 as cited in SEQ ID NO 67655
atcgctttgcataatccattccttcttctctcttctccatctccttcctccgatcttcgtctccaattcggaatcttcctatcacaatttcaaggctcctttaacccttgatcatcaccgattcaatcaattcggaatcacaatttcaaatcgagagaatttcaatttctcttgtaaaaccctaaattatgtacagcaatttcaaggaacaagcgatcgagtacgtgaagcaagcggttcatgaagacaatgctgggaattacaataaagctttccctctatacatgaacgcgcttgagtacttcaaaactcatctcaagtatgagaagaaccctaagatcagagaagctattacccagaaattcaccgagtatctccgtcgtgctgaggagatccgtgctgttctcgatgaaggtggatcgggtccaggatctaacggtgatgcagccgtcgcaacgaggcccaaaactaagcctaaagatggagaaggtggtggtaaagatggagaagatcctgaacaatcaaagcttcgagctgggttaaactctgcgattgttagagagaaacctaatatcaagtggtcagatgttgctgggcttgaaagtgctaaacaagctctgcaggaagctgtgattttgcctgtcaagtttccacagttcttcactggaaagagacggccttggagagcttttctgttgtatgggcctcctggaacaggaaaatcgtatttggctaaggctgttgccactgaagctgactctaccttttttagcgtgtcttcatcagaccttgtctcgaagtggatgggtgaaagtgagaagctagtatcaaaccttttcgagatggcccgtgaaagtgctccctcgattatttttgttgatgagatagattctttgtgtggtacacgtggagaaggaaacgagagtgaagcttcaagacgtatcaaaacagagcttctagtgcagatgcagggtgttggacacaatgatgagaaagtacttgtacttgcagcaaccaatacaccctatgctcttgatcaggctatccggcgacgttttgacaagcgtatctatattcctctcccagaggccaaggctcggcagcacatgttcaaagtccacttgggagatacacctcataatttaactgaacctgattttgaatatttaggccaaaagacagaagggttttctggttcagatgtgtctgtttgtgtaaaagatgttctgtttgaacctgttcgtaaaacacaagatgcaatgttctttttcaagtctcctgatggtacatggatgccatgtgggcctaggcaccctggtgccatccagactacaatgcaagatctagcaacaaaagggcttgccgaaattattccaccaccaatcaccagaacagatttcgagaaggtacttgcaagacaaaggccaacagtgagcaagtctgaccttgatgtccacgagagattcacacaggagtttggagaagaaggttgatagatttgacattcccatcaagcatctttcacaatcatattattattagtctcttcaccatctccttatgtatgtactgagaagcaaaacaaaatctcaaacccatgtttgatttcttcccaaaacattgaatttgctttatttctcgaattgtgtaaaaaaaaaatgttctgaacaatgttttctatttattatgtc

SEQ ID NO: 85459 - protein, 434 aa, Arabidopsis thaliana; identical to SEQ ID NO: 26747
  peptide (1)..(434): Ceres Seq. ID no. 12680617

SEQ ID NO: 85460 - protein, 402 aa, Arabidopsis thaliana; identical to SEQ ID NO: 26748
  peptide (1)..(402): Ceres Seq. ID no. 12680618

SEQ ID NO: 85461 - protein, 229 aa, Arabidopsis thaliana; identical to SEQ ID NO: 26749
  peptide (1)..(229): Ceres Seq. ID no. 12680619

SEQ ID NO: 85462 - DNA, 839 bp, Arabidopsis thaliana
  misc_feature (1)..(839): Ceres Seq. ID no. 12680620
  misc_feature (1)..(839): Ortholog of  Ceres SEQ ID NO 12610385 as cited in SEQ ID NO 55938
  misc_feature (1)..(839): Ortholog of  Ceres SEQ ID NO 13661939 as cited in SEQ ID NO 61170
gtcgtcgttagttttcccatttcctcataattcttcatctctttcctttctcatctctcgattcctttctttctttccatattccattgatttctctcttcttataaaaatacagattctctcttcttagaaccatcaccgattcgaacagatctaataaatcgtttttttcaccagatttttttcgccggagtttgttttgatccattctgttatggcggaagaacacagacttcaagaaccacgattatgtgctaacaattgtggcttcttcggaagcacagctacacaaaatctctgttccaaatgttttcgagatcttcaacatcaagaacaaaactcttccaccgccaaacatgctcttacccaatccttagccgccgttggcgctgctgcgtcttcctccgtgtcgccaccgcctccgcctccagctgattcgaaagaaatcgttgaagcgaaatcagagaaacgagcggcggctgaaccggaggaggcggatggtccgccgcaagatccgaagcggtgtttgacttgtcggcggcgcgtgggaatcacggggtttcggtgtaggtgtggtttcgttttctgcgggacgcataggtacgcggagcaacatgaatgttcgtttgatttcaagcggatggggaaggataagatcgctaaagcgaatccgattgtgaaagctgataagcttgagaagatttgactttgttgtttgttgtttgttgttgttgctttggttttgtgcgtttgaatgaaacacacatgaagaagaaagagcaagaaacaaacatgtcaatgtaaatttaagctttatttgatgatttcttcagtttggt

SEQ ID NO: 85463 - protein, 163 aa, Arabidopsis thaliana; identical to SEQ ID NO: 29477
  peptide (1)..(163): Ceres Seq. ID no. 12680621

SEQ ID NO: 85464 - DNA, 1164 bp, Arabidopsis thaliana
  misc_feature (1)..(1164): Ceres Seq. ID no. 12680656
  misc_feature (1)..(1164): Ortholog of  Ceres SEQ ID NO 13596474 as cited in SEQ ID NO 62169
  misc_feature (1)..(1164): Ortholog of  Ceres SEQ ID NO 13598714 as cited in SEQ ID NO 62656
  misc_feature (1)..(1164): Ortholog of  Ceres SEQ ID NO 13596969 as cited in SEQ ID NO 63375
  misc_feature (1)..(1164): Ortholog of  Ceres SEQ ID NO 13597519 as cited in SEQ ID NO 64759
  misc_feature (1)..(1164): Ortholog of  Ceres SEQ ID NO 14302388 as cited in SEQ ID NO 65655
  misc_feature (1)..(1164): Ortholog of  Ceres SEQ ID NO 13587054 as cited in SEQ ID NO 0
aaatttgacaatggcaagaatcggaagctttctcattattctttacctcatttacgctcttactctctgcatctgcgacgacgacgagagtaactatggcggcgacaaagggaacctcttcccaggtttctacagaagctcgtgccctagagccgaggagatcgtgaggtcagttgtagccaaagctgttgcaagggaggctccatttccacgattgtttcgttcagggttgtgatggatcgttgcttctagacaccagtgggagtatagttactgagaagaactctaacccgaacagcagatcggctcgcgggtttgaagttgttgacgagatcaaggcagcattagagaacgaatgccctaacactgtttcttgtgctgatgccttaactctagccgctagagactcctctgttcttactggtggaccaagctggatggttcctttgggaagaagagattcgacaagtgcaagcttgagtggatcaaacaacaacattcctgcacccaacaacactttcaacacaattgtcacgagatttaacaaccaaggtctcgatctcaccgacgttgttgctctctccgggagccacaccattggattttcaagatgcactagtttcagacagagactgtacaaccaatccggaaacggaagtcccgacagaaccttagagcaatcctacgctgctaacttgcgccaaaggtgccctagatcgggtggggaccagaacctgtcagagcttgacatcaacagcgctggaagatttgataacagctacttcaagaacttgatcgagaacatgggactgttgaattccgacgaggtcttgttctctagcaatgagcaatcaagagagctcgtcaagaagtatgcagaggatcaagaagagttcttcgagcagttcgcggagtcgatgatcaagatggggaatatctctcccttgacaggttcgagtggtgagatcagaaagaattgcaggaaaattaataactcttgatttcctagtatcggatgggagaaatagaaatgtgacatgttttggaggaaggaatttatgtttatgtttttttttatattgtatgagtctgtatttctttgtgtcaagaatttgaattttgtaagtttaaatgattgaaactatctataattaaaatgttatt

SEQ ID NO: 85465 - protein, 187 aa, Arabidopsis thaliana
  peptide (1)..(187): Ceres Seq. ID no. 12680657
MVPLGRRDSTSASLSGSNNNIPAPNNTFNTIVTRFNNQGLDLTDVVALSGSHTIGFSRCTSFRQRLYNQSGNGSPDRTLEQSYAANLRQRCPRSGGDQNLSELDINSAGRFDNSYFKNLIENMGLLNSDEVLFSSNEQSRELVKKYAEDQEEFFEQFAESMIKMGNISPLTGSSGEIRKNCRKINNS

SEQ ID NO: 85466 - DNA, 532 bp, Arabidopsis thaliana
  misc_feature (1)..(532): Ceres Seq. ID no. 12680658
  misc_feature (1)..(532): Ortholog of  Ceres SEQ ID NO 15175022 as cited in SEQ ID NO 62436
tgcttctcaaagaaacgaaattaagagaaggagaaggttttacgccggagttggagactgatctagatccgccggcgaaaaagcagagccgtcacattcatcgtcggaaatcaagaaagggtaattctctgtaggatagagagacatggaagccaagtttttccggttcttgaagattgttggagttggatacaaagctagagctgaggaagcagggcgtttcttatacctcaaattgggttacagtcacgaagtcgaacttgcggttcctccagcggttcgagtcttttgtttcaagaacaatgtggtttgctgcactggaatcgacaagcaaagagtgcatcagtttgctgcaacggtaaggagttgcaaaccccctgaaccttataagggcaaaggcataatgtacactgatgaagtcgtcaagaagaaacaaggaaagaagtccaaatgatctctctttgtatgcttcttcttccttcttactctgcagagacaactttcatctatctgtggtagattatggttggat

SEQ ID NO: 85467 - protein, 102 aa, Arabidopsis thaliana; identical to SEQ ID NO: 25804
  peptide (1)..(102): Ceres Seq. ID no. 12680659

SEQ ID NO: 85468 - DNA, 808 bp, Arabidopsis thaliana
  misc_feature (1)..(808): Ceres Seq. ID no. 12680664
  misc_feature (1)..(808): Ortholog of  Ceres SEQ ID NO 13599631 as cited in SEQ ID NO 0
aatctataatcattttgtgactcttggagcactctcttctctttgtctctgtgactcacatggagaagaaactgtgaagataccattgacgttgatctatgatgacatcaagagcacttacaacgatatcaaccccgggatgatcataccttacagaatcaaggttgatctgattgtggatgtgccagtattgggaagactgacattgccgctggagaaatgtggagagatcccaattccaaagaaacctgatgttgatatcgagaagattaagttccagaagttctctttggaggaaaccgtggcgattctccatgtgaggcttcagaacatgaatgatttcgacttggggctcaatgacttggactgtgaagtttggctgtgtgatgtaagcattgggaaagcagagatcgcggactcgatcaagcttgacaaaaacggaagcggattgattaatgtgccgatgacattccgaccaaaggactttggttctgcgctttgggatatgattcgtggtaaaggaacagggtacacaatcaaaggtaatattgatgttgatacaccatttggagctatgaagcttcctattatcaaggaaggtggagagacccgtctgaagaaggaagatgatgatgacgacgatgaggaataaggaaacaaagtgctgcagagacagaatggtcatagttactaaatctccgatcttgaaatgtctatttaaaattaaaaaaaaagaaagacttgttttgtgtgctttttgataactgatggatcagacttttgaatagagccgtctttttattggact

SEQ ID NO: 85469 - protein, 216 aa, Arabidopsis thaliana; identical to SEQ ID NO: 35557
  peptide (1)..(216): Ceres Seq. ID no. 12680665

SEQ ID NO: 85470 - protein, 170 aa, Arabidopsis thaliana; identical to SEQ ID NO: 35558
  peptide (1)..(170): Ceres Seq. ID no. 12680666

SEQ ID NO: 85471 - DNA, 1651 bp, Arabidopsis thaliana
  misc_feature (1)..(1651): Ceres Seq. ID no. 12680674
  misc_feature (1)..(1651): Ortholog of  Ceres SEQ ID NO 15168908 as cited in SEQ ID NO 20765
ctcgatctccgtgaagctctcgaatctctggttttgagttttggagaatggtgtttttccgcagcgtatcggcctttactaggctgaggtctcgcgtccagggccaacaatcttcactcagcaattctgtcagatggattcagatgcagagctctaccgacctggacctgaagtcgcagctgcaagagttaattccggaacagcaggaccgtctgaagaaactgaagtcagaacatgggaaggtccaactgggaaacatcactgttgatatggttattggtggaatgagagggatgactggattgctttgggaaacctcattgcttgacccggaagaggtattcgctttaggggattgtcgattcctgagtgccagaaagtattacctactgcccagtctggagctgaaccattaccggagggtcttttgtggcttctcttaactggaaaggtacctagcaaagagcaagttgaagcactgtcgaaagacttggcgaaccgtgctgctgtgccagattatgtgtacaatgccatcgatgctctgccttccacagctcatccaatgactcaatttgctagcggtgttatggccctccaggtgcaaagtgagtttcaaaaggcatatgagaatggaattcataagtcaaagttctgggagccaacatatgaggattgcctcaacctgattgctcgtgttcctgttgtagctgcatatgtttatcgaaggatgtataagaatggtgattccattccctcagataaatctttggattatggtgcaaatttttcccacatgttgggatttgatgatgaaaaggtgaaagagctcatgaggctttacatcaccatccacagtgatcatgaaggtggaaatgttagtgctcacactggtcacctggttggtagtgcactttcagacccatatctgtcatttgcagctgcattaaatggtttagctgggccactccatggtttggctaatcaggaagttttgctttggatcaaatcagtcgtagaggaatgtggagaagatatatcaaaagaacagttgaaagaatatgtttggaaaacattaaacagtggcaaggttattccgggatatggtcacggtgttctgcgcaatactgatccaagatatgtatgccaaagagaatttgccttgaagcatctacctgacgaccctcttttccagtgtcaaagctttatgaagttgtgcctcctgttctcactgagcttggaagtgaagaacccgtggccaaatgttgatgctcacagtggggtcttgctgaaccactatggtctaaccgaagcaaggtactacaccgtgctctttggtgtttcaaggagtcttggcatctgctctcagcttatatgggaccgagctcttggacttgcacttgagaggccaaagagtgttaccatggactggcttgaagcccattgtaagaaagcttcatctgcttaagtcaccaccgagtcctgagttgtcgcactctctcgtgtttcaacaaaagtcattctcttccacactggatagctttttttgtttttaccttctattgacagaagaaacatttgttcatgtagaaattgttcctgagaaacacatgcttggtgcaaatttgcatttccgggaaactcgtgataataa

SEQ ID NO: 85472 - protein, 300 aa, Arabidopsis thaliana
  peptide (1)..(300): Ceres Seq. ID no. 12680675
MTQFASGVMALQVQSEFQKAYENGIHKSKFWEPTYEDCLNLIARVPVVAAYVYRRMYKNGDSIPSDKSLDYGANFSHMLGFDDEKVKELMRLYITIHSDHEGGNVSAHTGHLVGSALSDPYLSFAAALNGLAGPLHGLANQEVLLWIKSVVEECGEDISKEQLKEYVWKTLNSGKVIPGYGHGVLRNTDPRYVCQREFALKHLPDDPLFQCQSFMKLCLLFSLSLEVKNPWPNVDAHSGVLLNHYGLTEARYYTVLFGVSRSLGICSQLIWDRALGLALERPKSVTMDWLEAHCKKASSA

SEQ ID NO: 85473 - protein, 292 aa, Arabidopsis thaliana
  peptide (1)..(292): Ceres Seq. ID no. 12680676
MALQVQSEFQKAYENGIHKSKFWEPTYEDCLNLIARVPVVAAYVYRRMYKNGDSIPSDKSLDYGANFSHMLGFDDEKVKELMRLYITIHSDHEGGNVSAHTGHLVGSALSDPYLSFAAALNGLAGPLHGLANQEVLLWIKSVVEECGEDISKEQLKEYVWKTLNSGKVIPGYGHGVLRNTDPRYVCQREFALKHLPDDPLFQCQSFMKLCLLFSLSLEVKNPWPNVDAHSGVLLNHYGLTEARYYTVLFGVSRSLGICSQLIWDRALGLALERPKSVTMDWLEAHCKKASSA

SEQ ID NO: 85474 - protein, 245 aa, Arabidopsis thaliana
  peptide (1)..(245): Ceres Seq. ID no. 12680677
MYKNGDSIPSDKSLDYGANFSHMLGFDDEKVKELMRLYITIHSDHEGGNVSAHTGHLVGSALSDPYLSFAAALNGLAGPLHGLANQEVLLWIKSVVEECGEDISKEQLKEYVWKTLNSGKVIPGYGHGVLRNTDPRYVCQREFALKHLPDDPLFQCQSFMKLCLLFSLSLEVKNPWPNVDAHSGVLLNHYGLTEARYYTVLFGVSRSLGICSQLIWDRALGLALERPKSVTMDWLEAHCKKASSA

SEQ ID NO: 85475 - DNA, 1697 bp, Arabidopsis thaliana
  misc_feature (1)..(1697): Ceres Seq. ID no. 12680678
  misc_feature (1)..(1697): Ortholog of  Ceres SEQ ID NO 13654409 as cited in SEQ ID NO 68534
gattttctctatagacgcaatcaccgccgattctctctctctctctctcgagtctctcgacggtcgcatatcaaaagtccatttctttcttctctttggaggatcagcaactatggatgaagagtacgaagtcatagttctgggtactggtctcaaggagtgcatccttagtggtcttctctccgtcgatggtcttaaggtacttcacatggacaggaatgactactacggtggagagtcaacttctcttaatctcaatcagctgtggaagaagttcaggggagaagagaaggctcctgctcatttaggttctagcagagactacaatgttgacatgatgccaaagtttatgatggctaacggaaagcttgttcgtgtccttattcatacggatgtgaccaagtacttgtcttttaaagctgttgatggaagctatgtttttgtccaaggcaaggtccaaaaagtgccagcaactcccatggaggccctcaaatctcctcttatgggtatttttgagaaacgtcgagctggaaagtttttcagctatgttcaagaatacgacgagaaggacccaaaaacacatgatggaatggatttgaggagagttacaactaaggatttgattgcgaaattcggtcttaaagaagatactattgactttattggtcatgcagtggcacttcactgtaatgacaatcatctccatcaacctgcctatgatactgtaatgagaatgaagctctacgcagagtcccttgcacgttttcaaggaggttcaccatatatctatcctctctatgggttgggagaattgcctcaggcatttgcacgacttagtgctgtctatggtgggacgtatatgttgaacaaacctgagtgcaaggtagagtttgacgaggagggtaaggtttctggtgttacatctgagggagagactgccaaatgcaagaaagttgtctgcgatccttcttacctaaccaacaaggtcaggaagattggcagggttgctcgggcgattgccattatgagccaccctattccaaacaccaatgattctcagtcggtgcaagtcattctaccccaaaaacaattgggccgcaaatcagacatgtatgtcttctgttgttcatattcacacaacgttgctcccaagggaaagttcatagcatttgtgtcaacagacgctgaaactgataaccctcaaaccgagctccagcctggaatcgaccttcttggtcctgttgatgagctgttcttcgacatctatgatagatatgagcctgtcaacgaacccactttggacaactgcttcatatcaacgagttatgatgctacaacacactttgacacaactgttgttgatgtgttgaacatgtataaattgatcaccggaaaggaactggatctaagtgtggatcttaacgcagctagtgctgcagaggaggaatgatggaaaatattgcaagctctgtctctctctgttagtcaccaaatgatgtaaccggttctctttctccctcttcttaaaagttgtctcaccaaatgttctgttaaaatactaaatcaaaccgatctcatcatgcgtacctattcccggttatcgcagtctgtttttttcttctcaaaaaactaaaatgttggatttcgtggtttttgtttggagtgtctaatatatcatcatgctcttccgtttgaac

SEQ ID NO: 85476 - protein, 482 aa, Arabidopsis thaliana
  peptide (1)..(482): Ceres Seq. ID no. 12680679
IFSIDAITADSLSLSLESLDGRISKVHFFLLFGGSATMDEEYEVIVLGTGLKECILSGLLSVDGLKVLHMDRNDYYGGESTSLNLNQLWKKFRGEEKAPAHLGSSRDYNVDMMPKFMMANGKLVRVLIHTDVTKYLSFKAVDGSYVFVQGKVQKVPATPMEALKSPLMGIFEKRRAGKFFSYVQEYDEKDPKTHDGMDLRRVTTKDLIAKFGLKEDTIDFIGHAVALHCNDNHLHQPAYDTVMRMKLYAESLARFQGGSPYIYPLYGLGELPQAFARLSAVYGGTYMLNKPECKVEFDEEGKVSGVTSEGETAKCKKVVCDPSYLTNKVRKIGRVARAIAIMSHPIPNTNDSQSVQVILPQKQLGRKSDMYVFCCSYSHNVAPKGKFIAFVSTDAETDNPQTELQPGIDLLGPVDELFFDIYDRYEPVNEPTLDNCFISTSYDATTHFDTTVVDVLNMYKLITGKELDLSVDLNAASAAEEE

SEQ ID NO: 85477 - protein, 445 aa, Arabidopsis thaliana; identical to SEQ ID NO: 21269
  peptide (1)..(445): Ceres Seq. ID no. 12680680

SEQ ID NO: 85478 - protein, 413 aa, Arabidopsis thaliana; identical to SEQ ID NO: 21270
  peptide (1)..(413): Ceres Seq. ID no. 12680681

SEQ ID NO: 85479 - DNA, 992 bp, Arabidopsis thaliana
  misc_feature (1)..(992): Ceres Seq. ID no. 12680696
  misc_feature (1)..(992): Ortholog of  Ceres SEQ ID NO 12608945 as cited in SEQ ID NO 51209
  misc_feature (1)..(992): Ortholog of  Ceres SEQ ID NO 14316444 as cited in SEQ ID NO 59233
  misc_feature (1)..(992): Ortholog of  Ceres SEQ ID NO 13656436 as cited in SEQ ID NO 69154
acgggatctctctccggtaaatatcggaaacttttattctcagcaaagcgagatctcgacgtttctcagatccgtccggcgagttagatccttgagaaatcatggctccggtctcggcactcgctaagtataagctggtgtttctgggagatcaatccgtcggcaaaaccagtatcattactcgattcatgtacgacaaattcgacaacacttaccaggccacaattggtattgattttctatcaaagacaatgtaccttgaagatcgaacggtcagacttcagttgtgggatacagctgggcaagagcgattcaggagtctaattccgagctatatcagggattcctccgttgctgttattgtgtatgatgttgcaagcaggcagtccttcctaaacactactaagtggatcgatgaggttaggacagaacgtggtagtgatgtcatagtcgtgcttgtgggaaacaaaactgatctagtggacaaaaggcaagtgtcaatagaggaagcagaagctaaggcacgcgaacttaatgtaatgttcatcgaaaccagtgccaaagcgggcttcaacattaaggcgctcttccgcaagatagcagcagctttgccgggaatggagacattgtcttcaacaaagcaagaggatatggttgatgtcaatctcaagtcttccaatgcaaatgcatctctcgctcagcagcaatcaggaggatgctcttgttagatttggcaacaacaacacaacaacaaatcgatagagaacaacaaaacacactactaaaaaatgtcctcaagcccctttgcatgattcgatcagttatcgtcttccatctgtaaaatttttgcctgtttttcaactttttttcttcatcggattgtttttaaagaagactctgttttagctatggtttgtccctaactgtgatcttttgtggtctttggagtttcaaatgctcgctgcttcagtacttttgtttacttatttctc

SEQ ID NO: 85480 - protein, 208 aa, Arabidopsis thaliana; identical to SEQ ID NO: 24978
  peptide (1)..(208): Ceres Seq. ID no. 12680697

SEQ ID NO: 85481 - protein, 179 aa, Arabidopsis thaliana; identical to SEQ ID NO: 24979
  peptide (1)..(179): Ceres Seq. ID no. 12680698

SEQ ID NO: 85482 - protein, 158 aa, Arabidopsis thaliana; identical to SEQ ID NO: 24980
  peptide (1)..(158): Ceres Seq. ID no. 12680699

SEQ ID NO: 85483 - DNA, 1276 bp, Arabidopsis thaliana
  misc_feature (1)..(1276): Ceres Seq. ID no. 12680700
  misc_feature (1)..(1276): Ortholog of  Ceres SEQ ID NO 14302146 as cited in SEQ ID NO 0
atctgaaaccaatctgttcatatgatgaagaagtttctctcgttctcctccaacgcgtagaaaattctgacggcttaacgatgtggcgaagatctgttgtttatcgtttctcttcaagaatctctgtttcttcttcgttaccaaaccctagactgattccttggtcccgcgaattatgtgccgttaatagcttctcccagcctccggtctcgacggaatcaactgctaagttagggatcactggtgttagatctgatgccaatcgagtttttgccactgctactgccgccgctacagctacagctaccaccggtgagatttcgtctagagttgcggctttggctggattagggcatcactacgctcgttgttattgggagctttctaaagctaaacttagtatgcttgtggttgcaacttctggaactgggtatattctgggtacgggaaatgctgcaattagcttcccggggctttgttacacatgtgcaggaaccatgatgattgctgcatctgctaattccttgaatcagatttttgagataagcaatgattctaagatgaaaagaacgatgctaaggccattgccttcaggacgtattagtgttccacacgctgttgcatgggctactattgctggtgcttctggtgcttgtttgttggccagcaagactaatatgttggctgctggacttgcatctgccaatcttgtactttatgcgtttgtttatactccgttgaagcaacttcaccctatcaatacatgggttggcgctgttgttggtgctatcccacccttgcttgggtgggcggcagcgtctggtcagatttcatacaattcgatgattcttccagctgctctttacttttggcagatacctcattttatggcccttgcacatctctgccgcaatgattatgcagctggaggttacaagatgttgtcactctttgatccgtcagggaagagaatagcagcagtggctctaaggaactgcttttacatgatccctctcggtttcatcgcctatgactgggggttaacctcaagttggttttgcctcgaatcaacacttctcacactagcaatcgctgcaacagcattttcattctactctccatgataacctttaagcaagctattgaatttttggaaacagaaattaaaaaaaaaatctgaaaagttcttaagtttaatctttggttaataatgaagtggagaacgcatacaagtttatgtattttttctcatctccacataattgtattttttctc

SEQ ID NO: 85484 - protein, 373 aa, Arabidopsis thaliana
  peptide (1)..(373): Ceres Seq. ID no. 12680701
LKPICSYDEEVSLVLLQRVENSDGLTMWRRSVVYRFSSRISVSSSLPNPRLIPWSRELCAVNSFSQPPVSTESTAKLGITGVRSDANRVFATATAAATATATTGEISSRVAALAGLGHHYARCYWELSKAKLSMLVVATSGTGYILGTGNAAISFPGLCYTCAGTMMIAASANSLNQIFEISNDSKMKRTMLRPLPSGRISVPHAVAWATIAGASGACLLASKTNMLAAGLASANLVLYAFVYTPLKQLHPINTWVGAVVGAIPPLLGWAAASGQISYNSMILPAALYFWQIPHFMALAHLCRNDYAAGGYKMLSLFDPSGKRIAAVALRNCFYMIPLGFIAYDWGLTSSWFCLESTLLTLAIAATAFSFYSP

SEQ ID NO: 85485 - protein, 347 aa, Arabidopsis thaliana
  peptide (1)..(347): Ceres Seq. ID no. 12680702
MWRRSVVYRFSSRISVSSSLPNPRLIPWSRELCAVNSFSQPPVSTESTAKLGITGVRSDANRVFATATAAATATATTGEISSRVAALAGLGHHYARCYWELSKAKLSMLVVATSGTGYILGTGNAAISFPGLCYTCAGTMMIAASANSLNQIFEISNDSKMKRTMLRPLPSGRISVPHAVAWATIAGASGACLLASKTNMLAAGLASANLVLYAFVYTPLKQLHPINTWVGAVVGAIPPLLGWAAASGQISYNSMILPAALYFWQIPHFMALAHLCRNDYAAGGYKMLSLFDPSGKRIAAVALRNCFYMIPLGFIAYDWGLTSSWFCLESTLLTLAIAATAFSFYSP

SEQ ID NO: 85486 - protein, 240 aa, Arabidopsis thaliana; identical to SEQ ID NO: 22918
  peptide (1)..(240): Ceres Seq. ID no. 12680703

SEQ ID NO: 85487 - DNA, 2142 bp, Arabidopsis thaliana
  misc_feature (1)..(2142): Ceres Seq. ID no. 12680704
  misc_feature (1)..(2142): Ortholog of  Ceres SEQ ID NO 13590691 as cited in SEQ ID NO 66290
atattgaaaacgcccgctctctgttttttctcgtttctcctcccttcgttctcgggtccatctgcgttcgtatcaagtccttgcactcttcttcttcgtatctggattgtttcgaagttctctaacgaacgacaatggagagtttgatcgtgttgattaatacgatacaaagagcatgcaccgtagtcggcgatcatggcggcgatagcaacgctctatcttctctatgggaagctcttccttccgtcgccgtcgttggtggccagagttctggtaaatcttcggttctagagagtatcgtcgggagagattttcttcccagaggatccggtattgttacgagacggcctttggttttacaacttcataagactgaaaatggaacagaggataacgcagagtttctccaccttaccaataaaaaattcaccaatttctctttggttagaaaggagattgaggatgagactgatagaatcactgggaagaacaaacagatttcttcaattcctattcacctcagtattttctctcccaatgttgtgaatcttactctcattgatttacctggtttgactaaagttgctgttgaaggacagccagaaactattgttgaggatatcgaatccatggttcgctcatacgtcgaaaagcctaactgtcttatactggcaatatctcctgctaatcaagacatagctacatccgacgcgatgaagctcgcgaaagaagtggatccaataggtgatagaacgtttggagttttgacaaagttagacttaatggacaagggaactaatgcattggacgttatcaacggaagatcttacaagctgaaatatccttgggttgggatagtgaaccgttcacaagccgacattaataagaatgtcgacatgatggttgcaagaaggaaagagcgagagtactttgaaaccagtcctgactatggtcacttagccacaagaatgggctcagaatatcttgcaaagctcctctctaagctcttagaatctgttataaggtcacgtattccaagtatcctatccttgataaacaacaacatcgaggaactcgaaagagagttagaccaattgggcaggcctatcgctattgatgctggagctcaactatacactatcttgggaatgtgtagagcattcgaaaagatattcaaagagcatttggatggcgggcgtcccggaggtgcacggatctatggaatctttgactacaatcttccaacagccataaaaaaacttccatttgatcgtcatctttcattgcaaagtgttaagagaattgtctcagaatctgatggctatcaacctcacttgatagcaccagaattaggttatcgtcgtcttattgaaggatccctaaatcattttagaggtccagctgaagcttctgtgaatgctattcaccttatcttaaaagagcttgtaaggaaagcaatcgcagaaactgaggagctaaaacgtttcccttcactacaaattgagttagttgctgcagcaaactcatcattagacaagtttcgtgaagaaagcatgaagtcagttcttagattagtcgacatggaatcttcatatctaacggttgacttctttcgcaagcttcatgtagaaagccaaaacatgtctctttcttcaccaacatcagcaatagaccaatacggtgatgggcatttcagaaagatagcttcaaatgtagctgcttatatcaagatggttgcagagacacttgttaacactattcctaaggctgttgttcattgccaagtcagacaagcgaaactctctttgcttaattacttctatgcacagattagtcagagtcaggggaaacgattgggacagttgctagatgagaacccggcattgatggaaaggagaatgcaatgtgcaaagaggctcgagctatacaagaaggctagagatgagattgatgcagcggtttgggttcgatgaacgaagccggtttgattttattggttgacatattaaaccttttaagttgataaacagacaactattgtagtacttgtggttatctccggtataatcgttgctatttcttgcacacacaaaattaacttaagttttttacttggtaataaaatttccttttctttgaccc

SEQ ID NO: 85488 - protein, 612 aa, Arabidopsis thaliana
  peptide (1)..(612): Ceres Seq. ID no. 12680705
MESLIVLINTIQRACTVVGDHGGDSNALSSLWEALPSVAVVGGQSSGKSSVLESIVGRDFLPRGSGIVTRRPLVLQLHKTENGTEDNAEFLHLTNKKFTNFSLVRKEIEDETDRITGKNKQISSIPIHLSIFSPNVVNLTLIDLPGLTKVAVEGQPETIVEDIESMVRSYVEKPNCLILAISPANQDIATSDAMKLAKEVDPIGDRTFGVLTKLDLMDKGTNALDVINGRSYKLKYPWVGIVNRSQADINKNVDMMVARRKEREYFETSPDYGHLATRMGSEYLAKLLSKLLESVIRSRIPSILSLINNNIEELERELDQLGRPIAIDAGAQLYTILGMCRAFEKIFKEHLDGGRPGGARIYGIFDYNLPTAIKKLPFDRHLSLQSVKRIVSESDGYQPHLIAPELGYRRLIEGSLNHFRGPAEASVNAIHLILKELVRKAIAETEELKRFPSLQIELVAAANSSLDKFREESMKSVLRLVDMESSYLTVDFFRKLHVESQNMSLSSPTSAIDQYGDGHFRKIASNVAAYIKMVAETLVNTIPKAVVHCQVRQAKLSLLNYFYAQISQSQGKRLGQLLDENPALMERRMQCAKRLELYKKARDEIDAAVWVR

SEQ ID NO: 85489 - protein, 447 aa, Arabidopsis thaliana
  peptide (1)..(447): Ceres Seq. ID no. 12680706
MVRSYVEKPNCLILAISPANQDIATSDAMKLAKEVDPIGDRTFGVLTKLDLMDKGTNALDVINGRSYKLKYPWVGIVNRSQADINKNVDMMVARRKEREYFETSPDYGHLATRMGSEYLAKLLSKLLESVIRSRIPSILSLINNNIEELERELDQLGRPIAIDAGAQLYTILGMCRAFEKIFKEHLDGGRPGGARIYGIFDYNLPTAIKKLPFDRHLSLQSVKRIVSESDGYQPHLIAPELGYRRLIEGSLNHFRGPAEASVNAIHLILKELVRKAIAETEELKRFPSLQIELVAAANSSLDKFREESMKSVLRLVDMESSYLTVDFFRKLHVESQNMSLSSPTSAIDQYGDGHFRKIASNVAAYIKMVAETLVNTIPKAVVHCQVRQAKLSLLNYFYAQISQSQGKRLGQLLDENPALMERRMQCAKRLELYKKARDEIDAAVWVR

SEQ ID NO: 85490 - protein, 419 aa, Arabidopsis thaliana
  peptide (1)..(419): Ceres Seq. ID no. 12680707
MKLAKEVDPIGDRTFGVLTKLDLMDKGTNALDVINGRSYKLKYPWVGIVNRSQADINKNVDMMVARRKEREYFETSPDYGHLATRMGSEYLAKLLSKLLESVIRSRIPSILSLINNNIEELERELDQLGRPIAIDAGAQLYTILGMCRAFEKIFKEHLDGGRPGGARIYGIFDYNLPTAIKKLPFDRHLSLQSVKRIVSESDGYQPHLIAPELGYRRLIEGSLNHFRGPAEASVNAIHLILKELVRKAIAETEELKRFPSLQIELVAAANSSLDKFREESMKSVLRLVDMESSYLTVDFFRKLHVESQNMSLSSPTSAIDQYGDGHFRKIASNVAAYIKMVAETLVNTIPKAVVHCQVRQAKLSLLNYFYAQISQSQGKRLGQLLDENPALMERRMQCAKRLELYKKARDEIDAAVWVR

SEQ ID NO: 85491 - DNA, 2091 bp, Arabidopsis thaliana
  misc_feature (1)..(2091): Ceres Seq. ID no. 12680708
  misc_feature (1)..(2091): Ortholog of  Ceres SEQ ID NO 13590691 as cited in SEQ ID NO 66290
atattgaaaacgcccgctctctgttttttctcgtttctcctcccttcgttctcgggtccatctgcgttcgtatcaagtccttgcactcttcttcttcgtatctggattgtttcgaagttctctaacgaacgacaatggagagtttgatcgtgttgattaatacgatacaaagagcatgcaccgtagtcggcgatcatggcggcgatagcaacgctctatcttctctatgggaagctcttccttccgtcgccgtcgttggtggccagagttctggtaaatcttcggttctagagagtatcgtcgggagagattttcttcccagaggatccggtattgttacgagacggcctttggttttacaacttcataagactgaaaatggaacagaggataacgcagagtttctccaccttaccaataaaaaattcaccaatttctctttggttagaaaggagattgaggatgagactgatagaatcactgggaagaacaaacagatttcttcaattcctattcacctcagtattttctctcccaatgaaggacagccagaaactattgttgaggatatcgaatccatggttcgctcatacgtcgaaaagcctaactgtcttatactggcaatatctcctgctaatcaagacatagctacatccgacgcgatgaagctcgcgaaagaagtggatccaataggtgatagaacgtttggagttttgacaaagttagacttaatggacaagggaactaatgcattggacgttatcaacggaagatcttacaagctgaaatatccttgggttgggatagtgaaccgttcacaagccgacattaataagaatgtcgacatgatggttgcaagaaggaaagagcgagagtactttgaaaccagtcctgactatggtcacttagccacaagaatgggctcagaatatcttgcaaagctcctctctaagctcttagaatctgttataaggtcacgtattccaagtatcctatccttgataaacaacaacatcgaggaactcgaaagagagttagaccaattgggcaggcctatcgctattgatgctggagctcaactatacactatcttgggaatgtgtagagcattcgaaaagatattcaaagagcatttggatggcgggcgtcccggaggtgcacggatctatggaatctttgactacaatcttccaacagccataaaaaaacttccatttgatcgtcatctttcattgcaaagtgttaagagaattgtctcagaatctgatggctatcaacctcacttgatagcaccagaattaggttatcgtcgtcttattgaaggatccctaaatcattttagaggtccagctgaagcttctgtgaatgctattcaccttatcttaaaagagcttgtaaggaaagcaatcgcagaaactgaggagctaaaacgtttcccttcactacaaattgagttagttgctgcagcaaactcatcattagacaagtttcgtgaagaaagcatgaagtcagttcttagattagtcgacatggaatcttcatatctaacggttgacttctttcgcaagcttcatgtagaaagccaaaacatgtctctttcttcaccaacatcagcaatagaccaatacggtgatgggcatttcagaaagatagcttcaaatgtagctgcttatatcaagatggttgcagagacacttgttaacactattcctaaggctgttgttcattgccaagtcagacaagcgaaactctctttgcttaattacttctatgcacagattagtcagagtcaggggaaacgattgggacagttgctagatgagaacccggcattgatggaaaggagaatgcaatgtgcaaagaggctcgagctatacaagaaggctagagatgagattgatgcagcggtttgggttcgatgaacgaagccggtttgattttattggttgacatattaaaccttttaagttgataaacagacaactattgtagtacttgtggttatctccggtataatcgttgctatttcttgcacacacaaaattaacttaagttttttacttggtaataaaatttccttttctttgaccc

SEQ ID NO: 85492 - protein, 595 aa, Arabidopsis thaliana
  peptide (1)..(595): Ceres Seq. ID no. 12680709
MESLIVLINTIQRACTVVGDHGGDSNALSSLWEALPSVAVVGGQSSGKSSVLESIVGRDFLPRGSGIVTRRPLVLQLHKTENGTEDNAEFLHLTNKKFTNFSLVRKEIEDETDRITGKNKQISSIPIHLSIFSPNEGQPETIVEDIESMVRSYVEKPNCLILAISPANQDIATSDAMKLAKEVDPIGDRTFGVLTKLDLMDKGTNALDVINGRSYKLKYPWVGIVNRSQADINKNVDMMVARRKEREYFETSPDYGHLATRMGSEYLAKLLSKLLESVIRSRIPSILSLINNNIEELERELDQLGRPIAIDAGAQLYTILGMCRAFEKIFKEHLDGGRPGGARIYGIFDYNLPTAIKKLPFDRHLSLQSVKRIVSESDGYQPHLIAPELGYRRLIEGSLNHFRGPAEASVNAIHLILKELVRKAIAETEELKRFPSLQIELVAAANSSLDKFREESMKSVLRLVDMESSYLTVDFFRKLHVESQNMSLSSPTSAIDQYGDGHFRKIASNVAAYIKMVAETLVNTIPKAVVHCQVRQAKLSLLNYFYAQISQSQGKRLGQLLDENPALMERRMQCAKRLELYKKARDEIDAAVWVR

SEQ ID NO: 85493 - protein, 447 aa, Arabidopsis thaliana; identical to SEQ ID NO: 85489
  peptide (1)..(447): Ceres Seq. ID no. 12680710

SEQ ID NO: 85494 - protein, 419 aa, Arabidopsis thaliana; identical to SEQ ID NO: 85490
  peptide (1)..(419): Ceres Seq. ID no. 12680711

SEQ ID NO: 85495 - DNA, 1200 bp, Arabidopsis thaliana
  misc_feature (1)..(1200): Ceres Seq. ID no. 12680725
  misc_feature (1)..(1200): Ortholog of  Ceres SEQ ID NO 14313170 as cited in SEQ ID NO 20674
agaaagagagagagacagagtcagagtcttcgtctgcaagagagaacaataccactcaatcataatctataacaatggacgtctatggcttatcttcaccagacttacttcgaatcgacgaccttcttgatttctccaacgaagacatcttctccgcttcttcttccggtggttccaccgccgctacttcctcttcttctttccctcctcctcaaaaccctagtttccaccaccaccatctcccttcctccgccgatcatcactccttcctccacgacatttgcgttcccgtataatctctctccctctctctttctccaatcaaagtttcgactttgaaataaagattgtgttttgatttttgttgtattttttgtgtgcagagtgatgacgcagctcatcttgaatggctttcgcaattcgtggacgattctttcgctgattttccggcgaatccattaggaggaactatgacttctgtcaaaactgaaacttcctttccggggaaaccaagaagcaaacgatcaagagctcctgctcctttcgccggaacatggtctccgatgccactggaatccgagcatcagcagcttcactccgccgccaaattcaagccaaagaaagaacaatccggcggaggaggaggaggaggaggaagacatcagtcatcgtcatcggagactacggaaggaggaggaatgaggagatgtactcactgtgcatcggagaaaacgccacagtggaggacaggaccacttggacctaaaacactatgtaacgcttgtggagtccggtttaaatccggtagacttgtaccggaatatagaccggcttcgagtcctacttttgttttgactcagcattcaaactctcaccggaaagtgatggagcttcgacggcagaaagaagttatgagacaaccacaacaagttcaacttcatcaccaccaccacccgttttagttttcacttttcactgcctcgtccgtcgtcactcttttttttgtttttctttttggttcttggggttgggttttgggtaacgtcacgtgatgatgacgtgtcgcgatcctagcggcgttaatcacgtgaccgacgacgacgggagcctaaaatttttagtgaacgttggaaaatcaaacctcatttaattgttaattattaaaaaaaaattatatctttgggctttgccttttctcct

SEQ ID NO: 85496 - protein, 163 aa, Arabidopsis thaliana
  peptide (1)..(163): Ceres Seq. ID no. 12680726
MTSVKTETSFPGKPRSKRSRAPAPFAGTWSPMPLESEHQQLHSAAKFKPKKEQSGGGGGGGGRHQSSSSETTEGGGMRRCTHCASEKTPQWRTGPLGPKTLCNACGVRFKSGRLVPEYRPASSPTFVLTQHSNSHRKVMELRRQKEVMRQPQQVQLHHHHHPF

SEQ ID NO: 85497 - protein, 132 aa, Arabidopsis thaliana
  peptide (1)..(132): Ceres Seq. ID no. 12680727
MPLESEHQQLHSAAKFKPKKEQSGGGGGGGGRHQSSSSETTEGGGMRRCTHCASEKTPQWRTGPLGPKTLCNACGVRFKSGRLVPEYRPASSPTFVLTQHSNSHRKVMELRRQKEVMRQPQQVQLHHHHHPF

SEQ ID NO: 85498 - protein, 87 aa, Arabidopsis thaliana
  peptide (1)..(87): Ceres Seq. ID no. 12680728
MRRCTHCASEKTPQWRTGPLGPKTLCNACGVRFKSGRLVPEYRPASSPTFVLTQHSNSHRKVMELRRQKEVMRQPQQVQLHHHHHPF

SEQ ID NO: 85499 - DNA, 3287 bp, Arabidopsis thaliana
  misc_feature (1)..(3287): Ceres Seq. ID no. 12680729
  misc_feature (1)..(3287): Ortholog of  Ceres SEQ ID NO 15176777 as cited in SEQ ID NO 58368
actcttgtttttgtttctgtgagtgctgtgtgtgttctcggtttgtaatatctaagtcgcacaaagatcagacaaagtctgtttgcgtttgatagcattagagtctgatcgaatttggaagacctgtgagattagggtttctttttgtttgtttttttttattccgaaggagagctgcggagcaattggaattacctcggttaaagcaatcacgtagctttggatcgtttagggttttctcattgggtttgggggatttgtattcgagcttcctcaaactcaatctgatggtgatgtgagacaaggcttaatcctgttaattggcgattctagggtttttcaatggcgagcacaggcgagcctgaccgtaaaaggcgtcactttagctccatatcaccttctgaagctgcagccgccgtaaagaaacagcctttcttttggccctcctccgaggacaagcttgatactgcagttcttcagttccaaaatcttaagctatcacaaaagctagaggctcagcaggttgagtgttctattcttgaggataaactctctcagatcaaggaaaaacaattaccatacaactccagtttgaagactgtccataagtcttgggaaaagcttacagcttcagtggaatcatgctctgttcgtgtgagtgattcaagcagcggagctcataggtttgtaaacaaggaggatgggtcttctccagccgtgaaaaacgatttcatcaaccggctacttgaaactggtgctactgagagctcctcatccaatatctgctcgaatcagatggaagaaaatggagtgaatacgtcaagccagatgacgcaaaccttgtataatctagtagccgcgacagaggatttgaggtgtctgaaggatgaattatatcccacagttctcagaaccaatcttggtaaagatttgtgcggtcagctagctctgagtgagttggaatcagaaattaaaagtttcagaggggatctagatgatgtacttgtgaagttcaaatcactttctagagaattgcagagtcatcgcgatgctgatgctaaagttagagtagacctcaaacgaataagaggggagctagaggatgaggttgtggagcttcagcagtgtaatggtgacttgtcagcattgagagcagaaagggatgcaacagctggggcgtttttcccagtgttgagtcttggaaataagcttgctaccagtgatcgggagagggataaacaaagggatctgcaagacatggaaacagttctgaaagagttaacggtcctggcttcaggcaggctacaacagctaaaaaatcttcatgaggagaggacaaagatgcttggaaaaatgagtaatttacagaacaagtcaaagtctgtgaggtgcatctcatcttctcaagcctgcctttctttgaaagaccagctagaaaaatccaaagaagcagttttccagtatatggctttacttgagaaactgcaggttgaaaaagatagtatagtctggaaggaaagggagataaatataaaaaatgaactaggtgatgtttctcgaaagacgtctgctgttactgattctagaatggcttctttggattcggagatacagaaacaactggatgaaaaaatgcgaatcaagactaggctgggaaatatatcaagagagcgaggtagaaaagaaatctttgcagatatgaaggcattaatttcttcgttccccgaggaaatgagttccatgcgtagtcaattaaacaattataaagagactgctggaggtattcattctctgcgggctgatgtccagtccctctctggggttctatgtaggaagacaaaagagtatgaagcattgcaattgagatcagctgattatgcttctcagttaggtgacctgaatgctacggtttgtgatttgaagaacagtcatgaggagttaaagttgtttctggacatgtataaacgtgagtccactgatgcgagggacatagctgaagccaaggaacaggagtacagggcttgggctcatgttcagagtttgaaatcatcccttgatgagcaaaatctggagttgcgcgttaaggcagcaaatgaagctgaagccgtttcccaacaaatgttggctgctgcggaagcagagattgctgatttaaggcagaaaatggatgattgtaaaagggatgtcgccaagcattctgatatcttgaaatctaaacatgaagaacatggaacatatctttctgaaatacagacaattggaagtgcctatgaggacattgtaccgcaaaaccaacagcttttgcttcaagttacagagagggatgactataacatcaagcttttcttggaaggcataacttctaggcagatgcaagatactctgcttatcgataaatacatcatggataaggatatacagcaaggcagtgcatatgccagtttcctatccaagaaatcatcaagaattgaagatcagttgaggttctgcacagatcagtttcagaaactagcggaagataaatatcaaaagtctgtttctcttgaaaatctgcaaaagaaacgtgcagacatcgggaatggcttggaacaagctaggtcaaggctggaggagtcccattctaaagttgagcaaagtcggctggattatggggcattagaactggaactggagattgaaaggttcaataggagaaggatagaggaggaaatggaaatagccaaaaagaaagtttctcgtcttcggtctctcatagaaggatcatcggccattcaaaagctccgacaagaactcagtgaatttaaagaaattctgaagtgtaaggcctgcaacgatcgcccaaaagaggtggtgattacgaagtgctaccatttgttctgcaacccatgtgtgcaaaagctcacaggaactcgacaaaagaagtgtccaacatgctcagcaagttttggaccaaatgatattaaacctatctacatatgaccgcaccaaaacactctgagcatgatgatgtatgatgaaactgtgaaacacacacaggtactttttctcatataggataaacattagatctctctgtaattattactctcttttattgggaaaggtcatgaagaataattggatatggcaaatcagagtttttgaggaaccattttgggattttgataatgtgatagagaataggtaacactgttagggtttatgtctttggtgatacttcctttttgtttgtaatttggaacatggtttccgcaattgatttttcaattaaatcttcttttttgttc

SEQ ID NO: 85500 - protein, 878 aa, Arabidopsis thaliana
  peptide (1)..(878): Ceres Seq. ID no. 12680730
MASTGEPDRKRRHFSSISPSEAAAAVKKQPFFWPSSEDKLDTAVLQFQNLKLSQKLEAQQVECSILEDKLSQIKEKQLPYNSSLKTVHKSWEKLTASVESCSVRVSDSSSGAHRFVNKEDGSSPAVKNDFINRLLETGATESSSSNICSNQMEENGVNTSSQMTQTLYNLVAATEDLRCLKDELYPTVLRTNLGKDLCGQLALSELESEIKSFRGDLDDVLVKFKSLSRELQSHRDADAKVRVDLKRIRGELEDEVVELQQCNGDLSALRAERDATAGAFFPVLSLGNKLATSDRERDKQRDLQDMETVLKELTVLASGRLQQLKNLHEERTKMLGKMSNLQNKSKSVRCISSSQACLSLKDQLEKSKEAVFQYMALLEKLQVEKDSIVWKEREINIKNELGDVSRKTSAVTDSRMASLDSEIQKQLDEKMRIKTRLGNISRERGRKEIFADMKALISSFPEEMSSMRSQLNNYKETAGGIHSLRADVQSLSGVLCRKTKEYEALQLRSADYASQLGDLNATVCDLKNSHEELKLFLDMYKRESTDARDIAEAKEQEYRAWAHVQSLKSSLDEQNLELRVKAANEAEAVSQQMLAAAEAEIADLRQKMDDCKRDVAKHSDILKSKHEEHGTYLSEIQTIGSAYEDIVPQNQQLLLQVTERDDYNIKLFLEGITSRQMQDTLLIDKYIMDKDIQQGSAYASFLSKKSSRIEDQLRFCTDQFQKLAEDKYQKSVSLENLQKKRADIGNGLEQARSRLEESHSKVEQSRLDYGALELELEIERFNRRRIEEEMEIAKKKVSRLRSLIEGSSAIQKLRQELSEFKEILKCKACNDRPKEVVITKCYHLFCNPCVQKLTGTRQKKCPTCSASFGPNDIKPIYI

SEQ ID NO: 85501 - protein, 727 aa, Arabidopsis thaliana
  peptide (1)..(727): Ceres Seq. ID no. 12680731
MEENGVNTSSQMTQTLYNLVAATEDLRCLKDELYPTVLRTNLGKDLCGQLALSELESEIKSFRGDLDDVLVKFKSLSRELQSHRDADAKVRVDLKRIRGELEDEVVELQQCNGDLSALRAERDATAGAFFPVLSLGNKLATSDRERDKQRDLQDMETVLKELTVLASGRLQQLKNLHEERTKMLGKMSNLQNKSKSVRCISSSQACLSLKDQLEKSKEAVFQYMALLEKLQVEKDSIVWKEREINIKNELGDVSRKTSAVTDSRMASLDSEIQKQLDEKMRIKTRLGNISRERGRKEIFADMKALISSFPEEMSSMRSQLNNYKETAGGIHSLRADVQSLSGVLCRKTKEYEALQLRSADYASQLGDLNATVCDLKNSHEELKLFLDMYKRESTDARDIAEAKEQEYRAWAHVQSLKSSLDEQNLELRVKAANEAEAVSQQMLAAAEAEIADLRQKMDDCKRDVAKHSDILKSKHEEHGTYLSEIQTIGSAYEDIVPQNQQLLLQVTERDDYNIKLFLEGITSRQMQDTLLIDKYIMDKDIQQGSAYASFLSKKSSRIEDQLRFCTDQFQKLAEDKYQKSVSLENLQKKRADIGNGLEQARSRLEESHSKVEQSRLDYGALELELEIERFNRRRIEEEMEIAKKKVSRLRSLIEGSSAIQKLRQELSEFKEILKCKACNDRPKEVVITKCYHLFCNPCVQKLTGTRQKKCPTCSASFGPNDIKPIYI

SEQ ID NO: 85502 - protein, 716 aa, Arabidopsis thaliana
  peptide (1)..(716): Ceres Seq. ID no. 12680732
MTQTLYNLVAATEDLRCLKDELYPTVLRTNLGKDLCGQLALSELESEIKSFRGDLDDVLVKFKSLSRELQSHRDADAKVRVDLKRIRGELEDEVVELQQCNGDLSALRAERDATAGAFFPVLSLGNKLATSDRERDKQRDLQDMETVLKELTVLASGRLQQLKNLHEERTKMLGKMSNLQNKSKSVRCISSSQACLSLKDQLEKSKEAVFQYMALLEKLQVEKDSIVWKEREINIKNELGDVSRKTSAVTDSRMASLDSEIQKQLDEKMRIKTRLGNISRERGRKEIFADMKALISSFPEEMSSMRSQLNNYKETAGGIHSLRADVQSLSGVLCRKTKEYEALQLRSADYASQLGDLNATVCDLKNSHEELKLFLDMYKRESTDARDIAEAKEQEYRAWAHVQSLKSSLDEQNLELRVKAANEAEAVSQQMLAAAEAEIADLRQKMDDCKRDVAKHSDILKSKHEEHGTYLSEIQTIGSAYEDIVPQNQQLLLQVTERDDYNIKLFLEGITSRQMQDTLLIDKYIMDKDIQQGSAYASFLSKKSSRIEDQLRFCTDQFQKLAEDKYQKSVSLENLQKKRADIGNGLEQARSRLEESHSKVEQSRLDYGALELELEIERFNRRRIEEEMEIAKKKVSRLRSLIEGSSAIQKLRQELSEFKEILKCKACNDRPKEVVITKCYHLFCNPCVQKLTGTRQKKCPTCSASFGPNDIKPIYI

SEQ ID NO: 85503 - DNA, 1843 bp, Arabidopsis thaliana
  misc_feature (1)..(1843): Ceres Seq. ID no. 12680769
  misc_feature (1)..(1843): Ortholog of  Ceres SEQ ID NO 14308803 as cited in SEQ ID NO 55038
  misc_feature (1)..(1843): Ortholog of  Ceres SEQ ID NO 13595437 as cited in SEQ ID NO 56562
cattaggattttgaatttccaaatacattttcagaaaaaaaagaattaaaagatcccattgttgttatcctcacagtaaatgcttttgcttgagagagagtctgttagaggttttttgtttgtttctgtttccttctgtcacccagaaaactaaaaagcaaacaaattcaagaagagagagagagagagatagcctcaaaaccaagtcctaaccattgttgatagaagagaaagcttttcttttcttgttgcttatggtgaaagaatgaaagagagagaggaggagaagtaagaagcagagaaagtgtttagagctttgcatgttcctttctctccaagtttatatcttcatcggtttcacaagttcacttaaaaagttgaaaagagtctttcttcttcaactattgtaaatgcgaaatggatcgaagagatgcaatgggattatccgggtcaggttcttactatatccatagaggattatccgggtcgggtcctccaacgtttcatggatcaccacagcaacagcaaggtcttcgtcacttacctaatcaaaactctccattcgggtcaggctccactggtttcggatctccttctttacacggtgatccttctctggcaacagcagccggaggagccggagctcttcctcatcatatcggcgttaatatgattgctcctcctccacctcccagtgaaactccgatgaaacgaaagagaggacggcctagaaaatacggtcaagacggctctgtttctttggctctgtcgtcttcctctgtttcgaccattactcccaacaactctaacaaacgcggccgtggtcgacctccgggctccggcaagaaacagagaatggcttccgttggtgaactgatgccttcatcttctggaatgagcttcacgccacatgttatcgcggtttcaataggagaagatattgcatcaaaggttatagctttctctcaacaaggtccgagagccatttgcgttttatctgcaagtggtgcagtctctactgcaacacttattcaaccatcagcatctcccggagccattaaatacgagggccggtttgaaatcctagcgttatcaacatcttatatagtggcaactgatggaagcttccgtaaccgaactggaaacttatcggtttcgcttgctagccccgatgggcgtgtgattggcggtgccattggtgggcctttaatagctgcaagtcctgttcaggttattgtagggagctttatatgggcagctccaaagatcaagagcaagaaacgagaagaagaagcttctgaagttgttcaagaaactgatgatcaccacgttctggacaataataacaacacgatttcgcctgtccctcagcagcagccaaaccaaaacctgatttggtcaacaggttcaaggcaaatggatatgcgtcatgctcatgctgatattgatttaatgcgcggttgatgatagcgagaaagaactctgtgtatataaagcatggaatctaggaagaagaagaaggaatataagctaacctctgaacaaaagtatgtggaaatgttagggaaaaagattaactctattagtgtacctctcatatctctaagcttgtttggttttactgtttctgtgactctgaagatttgcagagttcctttctttctctgttttagattgttcagtctttatgtaatttgcttgcaattctgattctacagcttagattcagtacattgtgtagaagtttacatgggaacctgaaaattgggcatttcatgggccttcatatgatccaatttattttcatcaaatttgtattagtacataattaattttgtttttt

SEQ ID NO: 85504 - protein, 348 aa, Arabidopsis thaliana; identical to SEQ ID NO: 36793
  peptide (1)..(348): Ceres Seq. ID no. 12680770

SEQ ID NO: 85505 - protein, 342 aa, Arabidopsis thaliana; identical to SEQ ID NO: 36794
  peptide (1)..(342): Ceres Seq. ID no. 12680771

SEQ ID NO: 85506 - protein, 264 aa, Arabidopsis thaliana; identical to SEQ ID NO: 36795
  peptide (1)..(264): Ceres Seq. ID no. 12680772

SEQ ID NO: 85507 - DNA, 866 bp, Arabidopsis thaliana
  misc_feature (1)..(866): Ceres Seq. ID no. 12680773
  misc_feature (1)..(866): Ortholog of  Ceres SEQ ID NO 13656177 as cited in SEQ ID NO 64997
gttttatctattgcagctccaaataaaccaatccattatcttttgcaactctgttaatcgtgttgagctgttggccaagaaaattacagaacttggttactcatgcttctatatccatgcaaagatggttcaagaccatcggaacagggttttccatgatttccgcaatggtgcatgcagaaatcttgtttgcactgatttgtttacacgtgggattgacattcaagctgtgaatgtggtgataaatttcgattttcctaggacttctgagtcgtatctacatagggtaggcagatcaggacgatttggacaccttgggttggctgtgaatttggtaacttatgaggaccgcttcaaaatgtatcagacagagcaagaacttggaactgaaatcaagcccataccttcacttatcgacaaggcaatctactgtcagtaacttctacctggtgtacattctctacccggcaaggcattgatggactaaccggtgtagtgaggaggcaaatcattcagctttggcagccactagctcgttctagagatgaaggcaacacatagagtactgtactgaggcaagaagagacagtataggtggttgatggcgatggaagcggttgattgtgtctaaacctttaaagcagtaccggcttgatttggtttgaattgaagacttcttctgctgcatgatatgaaccttaaagttgtcttctctcatctctaattttcatgttcttagaaaccttttcaccttttcattttgatgttctctcatcttgaagacttgagaggaatttccgagtagtgagatcaaaccgaagaagacattttaacttcattcgcttgtttattgcttttagatctcc

SEQ ID NO: 85508 - protein, 145 aa, Arabidopsis thaliana
  peptide (1)..(145): Ceres Seq. ID no. 12680774
FYLLQLQINQSIIFCNSVNRVELLAKKITELGYSCFYIHAKMVQDHRNRVFHDFRNGACRNLVCTDLFTRGIDIQAVNVVINFDFPRTSESYLHRVGRSGRFGHLGLAVNLVTYEDRFKMYQTEQELGTEIKPIPSLIDKAIYCQ

SEQ ID NO: 85509 - protein, 104 aa, Arabidopsis thaliana
  peptide (1)..(104): Ceres Seq. ID no. 12680775
MVQDHRNRVFHDFRNGACRNLVCTDLFTRGIDIQAVNVVINFDFPRTSESYLHRVGRSGRFGHLGLAVNLVTYEDRFKMYQTEQELGTEIKPIPSLIDKAIYCQ

SEQ ID NO: 85510 - DNA, 3516 bp, Arabidopsis thaliana
  misc_feature (1)..(3516): Ceres Seq. ID no. 12680789
  misc_feature (1)..(3516): Ortholog of  Ceres SEQ ID NO 15224874 as cited in SEQ ID NO 55015
aatttatagcctcacctttcttcttcttcttcttcttcttctgtgtgtttttgaatttgctttcttcaagaggtttcttctccacaccgcttcggtgtatgatctgattgtgatctctctcgatatctgggatcttcggggtatggaggctgtagattattattattattacgtgtggtgctgatgcaatgagtgttgatgcctgttatggaaagagtagctgaagaaactgtggcgactaacaacatacaattgaaagcacgagtggatgatgttccttgtaataagcttgatgctcgtcataacgatatggtgattcaatcagaaactgcaaacagtgattgtcctggaagctcagctcacaggaatgttgatttgactaagccgccgcctcctgaggaagccgcaggagctaagctttctgttgaagagttgacattggggaactacaggattgttcaagggagtaataatactaatgtggatagtcctagggctggcaagtttgagcatctttatcgtttggctagagggtctgcttttagggcaggagatggggatcttgattctcaacctcgtgatatggatcaaatgttgtccagaatcagacaacagcttgctggagctccttctgagaggcaaaacttgaaaccttttatgtctaggaggagcgatcagaatcttgaagctttttctgaacgtctaagagcagctggtgagaatagtattatgaatgctcctgcattgatcagtgaaggtgtccaaatgaaaacgccggtgagttcttcgaatttttctcagttgttacttaaaagagctatgaaagggaaaggggtagtaggaaagaaccaggaaactcctcctgaatttgtctctgatcaagatttaggaagcaaggaaaaaaagttggatattagcaagtcgcctactcctcacgatgtgttacctctaaaatcaagtcccaaaggaaatggtatggtatcacatggtgatgggaatcatagtaaatcttctattggaatcagtttgagggagtttcttagatcaagttatgctaaaagagaaaaaagacatggcctttgtctatttaggcagctggtggaactggttgactcagcccattcaaaaagattattcttgctagacttgagaccatcccttttcactttagttccatcaaagaaacttagatatattggtaattttggaaagaacgatctagaatcagatgttgacgaagatttgaataggaggaggcctgttgttgaggaatcatctagtggaggtagggattcgaagaaaagaaaaatggacttgcatttgaattctccagggaatcaacttcaggccacttcaaccgggcgacctttcaaaaggaaaagccctgtgattgatttaaacatggttgatgcacgtaatccagacagttgcgagcttcaacagcaagactacataaaaaatttaagcgtgtcttcagtgtcgagaaaacagtctatgtccacatggctagaagagcaatggtatacttgtccagaggagataaatggagaagatattggagaaaaatcaaatatttatgcccttggtgttcttctgtttgagttgctatgccattgcgagtcaggcgagatgcatgctgcaatgatggcagatttacgccatcggattctcccaccaacatttctctcgaaatacccgaaggaagctggattttgtctttggcttctacatcctgaaccctcctcccgaccatcagctagagatatactaaagtcagagttgatatgcgaggatgattcagttaaatcgactgctgctgctgaggagatatctgagctgttacttcattttttgtcttcattagaagtgcagaagaagaaaaaagcatctaaacttttgcaagatatccagaccttagaggatgatattaaggaggccgagcgaagatattcttcaaatgtatctctggtgagatctcatggagctattgaaaaaagggtgcaatcatctcccctagacgagcactgtacaacttccagtgccttgtttgtaccaactgctaatacagacaggctgatgagtaatatccgtcaacttgaagatgcatattttttcatgcgatcacaaatcaacttatcgagttctgctgctactgcccgttctgacaaaacactaaaggacagggacagatgctctgaaaaccaaaatgaaaatcaggatatgagtaccaaaggaaaatcttcagatcaactcgaagtgtttttcgaggggttgtgcaaatttgctcggtatagcaagttcgaaacctgtgggacaataagaagtggggaccttttaaactctgcaagtgtggtctgctcgttgagttttgaccctgatgaagaacacatagcagcagctgggatatcaaagaagatcaagatttttgacttcaatgcatttatgaatgaatctgtcggtgttcattatccactagtagagatggtcaacaaatctaaattaagctgtgtttgctggaatagctacatcaaaaactacttggcctcgactgactacgatggtgtagttcagatatgggatgccggcactggacaaggattttcgcagtacacagaacaccagaagagagcctggtcagttgatttttctccatctgacccgacaaaatttgttagtggaagtgatgactgctcggtgaagctttggagcatcaatgagaaacgttcattaggcacaatctggagtccagcaaatgtgtgttgcgtgcaattctcttcttattccaatcacttattggcatttgggtcagctgattacaaggtctattgctatgaccttcggtatgtcaaaacaccttggtgcacattggctggtcatgagaaagcggtgagttatgttaaatttatggattcagaaaccattgtttctgcttccactgataactctctcaagctttggaatcttaacaagacaaattcctctggtttatctcctggtgcttgttcattgacatataaaggacatacaaatcagaagaatttcgttggattgtcggttttggacggatacatagcttgtggttcagagaccaatgaggtatatagttactataaatctttaccgatgccaatgacttcatacaagtttggatccgtcgatcccatttctggaaacgaatactttgatgacaatggacagtttgtgtcgagcgtctgttggaggaaaaaatcgaatatgcttgtagctgcaaactctactggaaacatgaagctactaaaacttgtttgacaacttggccttttcgctactactgcgggcattggactttttgagtctgaaactaggacaaagcaggtctgactttgaagcaaacgtttttgtcctggaaactatgatcccatatgaccagaagagaaaaaaagttcgaaatcttggagaagttgaagaagcaaaactgtctgtgataatatattatttgattcttcttcctgtaattctatatatatgagatataat

SEQ ID NO: 85511 - protein, 1029 aa, Arabidopsis thaliana
  peptide (1)..(1029): Ceres Seq. ID no. 12680790
MPVMERVAEETVATNNIQLKARVDDVPCNKLDARHNDMVIQSETANSDCPGSSAHRNVDLTKPPPPEEAAGAKLSVEELTLGNYRIVQGSNNTNVDSPRAGKFEHLYRLARGSAFRAGDGDLDSQPRDMDQMLSRIRQQLAGAPSERQNLKPFMSRRSDQNLEAFSERLRAAGENSIMNAPALISEGVQMKTPVSSSNFSQLLLKRAMKGKGVVGKNQETPPEFVSDQDLGSKEKKLDISKSPTPHDVLPLKSSPKGNGMVSHGDGNHSKSSIGISLREFLRSSYAKREKRHGLCLFRQLVELVDSAHSKRLFLLDLRPSLFTLVPSKKLRYIGNFGKNDLESDVDEDLNRRRPVVEESSSGGRDSKKRKMDLHLNSPGNQLQATSTGRPFKRKSPVIDLNMVDARNPDSCELQQQDYIKNLSVSSVSRKQSMSTWLEEQWYTCPEEINGEDIGEKSNIYALGVLLFELLCHCESGEMHAAMMADLRHRILPPTFLSKYPKEAGFCLWLLHPEPSSRPSARDILKSELICEDDSVKSTAAAEEISELLLHFLSSLEVQKKKKASKLLQDIQTLEDDIKEAERRYSSNVSLVRSHGAIEKRVQSSPLDEHCTTSSALFVPTANTDRLMSNIRQLEDAYFFMRSQINLSSSAATARSDKTLKDRDRCSENQNENQDMSTKGKSSDQLEVFFEGLCKFARYSKFETCGTIRSGDLLNSASVVCSLSFDPDEEHIAAAGISKKIKIFDFNAFMNESVGVHYPLVEMVNKSKLSCVCWNSYIKNYLASTDYDGVVQIWDAGTGQGFSQYTEHQKRAWSVDFSPSDPTKFVSGSDDCSVKLWSINEKRSLGTIWSPANVCCVQFSSYSNHLLAFGSADYKVYCYDLRYVKTPWCTLAGHEKAVSYVKFMDSETIVSASTDNSLKLWNLNKTNSSGLSPGACSLTYKGHTNQKNFVGLSVLDGYIACGSETNEVYSYYKSLPMPMTSYKFGSVDPISGNEYFDDNGQFVSSVCWRKKSNMLVAANSTGNMKLLKLV

SEQ ID NO: 85512 - protein, 1026 aa, Arabidopsis thaliana
  peptide (1)..(1026): Ceres Seq. ID no. 12680791
MERVAEETVATNNIQLKARVDDVPCNKLDARHNDMVIQSETANSDCPGSSAHRNVDLTKPPPPEEAAGAKLSVEELTLGNYRIVQGSNNTNVDSPRAGKFEHLYRLARGSAFRAGDGDLDSQPRDMDQMLSRIRQQLAGAPSERQNLKPFMSRRSDQNLEAFSERLRAAGENSIMNAPALISEGVQMKTPVSSSNFSQLLLKRAMKGKGVVGKNQETPPEFVSDQDLGSKEKKLDISKSPTPHDVLPLKSSPKGNGMVSHGDGNHSKSSIGISLREFLRSSYAKREKRHGLCLFRQLVELVDSAHSKRLFLLDLRPSLFTLVPSKKLRYIGNFGKNDLESDVDEDLNRRRPVVEESSSGGRDSKKRKMDLHLNSPGNQLQATSTGRPFKRKSPVIDLNMVDARNPDSCELQQQDYIKNLSVSSVSRKQSMSTWLEEQWYTCPEEINGEDIGEKSNIYALGVLLFELLCHCESGEMHAAMMADLRHRILPPTFLSKYPKEAGFCLWLLHPEPSSRPSARDILKSELICEDDSVKSTAAAEEISELLLHFLSSLEVQKKKKASKLLQDIQTLEDDIKEAERRYSSNVSLVRSHGAIEKRVQSSPLDEHCTTSSALFVPTANTDRLMSNIRQLEDAYFFMRSQINLSSSAATARSDKTLKDRDRCSENQNENQDMSTKGKSSDQLEVFFEGLCKFARYSKFETCGTIRSGDLLNSASVVCSLSFDPDEEHIAAAGISKKIKIFDFNAFMNESVGVHYPLVEMVNKSKLSCVCWNSYIKNYLASTDYDGVVQIWDAGTGQGFSQYTEHQKRAWSVDFSPSDPTKFVSGSDDCSVKLWSINEKRSLGTIWSPANVCCVQFSSYSNHLLAFGSADYKVYCYDLRYVKTPWCTLAGHEKAVSYVKFMDSETIVSASTDNSLKLWNLNKTNSSGLSPGACSLTYKGHTNQKNFVGLSVLDGYIACGSETNEVYSYYKSLPMPMTSYKFGSVDPISGNEYFDDNGQFVSSVCWRKKSNMLVAANSTGNMKLLKLV

SEQ ID NO: 85513 - protein, 992 aa, Arabidopsis thaliana
  peptide (1)..(992): Ceres Seq. ID no. 12680792
MVIQSETANSDCPGSSAHRNVDLTKPPPPEEAAGAKLSVEELTLGNYRIVQGSNNTNVDSPRAGKFEHLYRLARGSAFRAGDGDLDSQPRDMDQMLSRIRQQLAGAPSERQNLKPFMSRRSDQNLEAFSERLRAAGENSIMNAPALISEGVQMKTPVSSSNFSQLLLKRAMKGKGVVGKNQETPPEFVSDQDLGSKEKKLDISKSPTPHDVLPLKSSPKGNGMVSHGDGNHSKSSIGISLREFLRSSYAKREKRHGLCLFRQLVELVDSAHSKRLFLLDLRPSLFTLVPSKKLRYIGNFGKNDLESDVDEDLNRRRPVVEESSSGGRDSKKRKMDLHLNSPGNQLQATSTGRPFKRKSPVIDLNMVDARNPDSCELQQQDYIKNLSVSSVSRKQSMSTWLEEQWYTCPEEINGEDIGEKSNIYALGVLLFELLCHCESGEMHAAMMADLRHRILPPTFLSKYPKEAGFCLWLLHPEPSSRPSARDILKSELICEDDSVKSTAAAEEISELLLHFLSSLEVQKKKKASKLLQDIQTLEDDIKEAERRYSSNVSLVRSHGAIEKRVQSSPLDEHCTTSSALFVPTANTDRLMSNIRQLEDAYFFMRSQINLSSSAATARSDKTLKDRDRCSENQNENQDMSTKGKSSDQLEVFFEGLCKFARYSKFETCGTIRSGDLLNSASVVCSLSFDPDEEHIAAAGISKKIKIFDFNAFMNESVGVHYPLVEMVNKSKLSCVCWNSYIKNYLASTDYDGVVQIWDAGTGQGFSQYTEHQKRAWSVDFSPSDPTKFVSGSDDCSVKLWSINEKRSLGTIWSPANVCCVQFSSYSNHLLAFGSADYKVYCYDLRYVKTPWCTLAGHEKAVSYVKFMDSETIVSASTDNSLKLWNLNKTNSSGLSPGACSLTYKGHTNQKNFVGLSVLDGYIACGSETNEVYSYYKSLPMPMTSYKFGSVDPISGNEYFDDNGQFVSSVCWRKKSNMLVAANSTGNMKLLKLV

SEQ ID NO: 85514 - DNA, 1554 bp, Arabidopsis thaliana
  misc_feature (1)..(1554): Ceres Seq. ID no. 12680828
  misc_feature (1)..(1554): Ortholog of  Ceres SEQ ID NO 13597546 as cited in SEQ ID NO 65017
  misc_feature (1)..(1554): Ortholog of  Ceres SEQ ID NO 14308045 as cited in SEQ ID NO 67444
  misc_feature (1)..(1554): Ortholog of  Ceres SEQ ID NO 13654353 as cited in SEQ ID NO 68318
aatcaatatctccaaaaagagttagaaagaaaaaaaataacttaagatggtagatctttatgagttctgggctgtgatagtttcactcatagtggtgaagctgtgtcactcgatctatcagtggaggaatccaaaaagtaatggagaacttcctccaggatctatgggttatccaatcattggagagactttcgagttcatgaagcctcatgacgctattcagttaccaacattcgtgaaggagaaagtactcagacatggaccagtttttaggacaagcttatttggaggaaaagttataatttcgactgatattgggttgaacatggagatagcaaagacaaatcatattcctggtatgccgaagagcttagcgcggctatttggggcaaacaacttgttcgtgaataaggatactcataaacatgcccgcagcttgacaaaccagtttttaggttcgcaagctttgaaattaagaatgcttcaagacatcgatttcttggttcgcacacacctgaaggaaggagctaggaaaggcagccttgacatcaaggaaacgacaagcaagatcattattgaatgtcttgcgaagaaagtaatgggggagatggaaccagatgcagcaaaagaactcacactctgttggacatttttcccaagggaatggtttggattcgcttggaatatcccggggactggtgtctatcgaatggtgaaggcaagaaatcggatgatgaaggtactaaaggagacggtacttaagaaaagagcatcaggagaggaattgggggactttttcaagactatctttggagatactgaaagaggcgtgaaaactataagtttagagagtgccaccgagtacatatttactctgtttttgcttgctaacgaaacaacaccagcggtccttgcggctacaataaagctcataagtgaccatcctaaagtgatgcaagagttacagagagagcatgaaggaattgtccgagataagattgagaaaaatgagaaagctgacctaacatgggaagactacaaatcaatgacttttacccagatggtgataaatgagtcgcttaggatcacaagcacggtaccgacggtgcttagaataattgatcatgagtttcaatttggtgagtatacaattccagcaggttggatctttatgggttatccttatgtgcatttcaatgcagaaaagtatgatgaccctttagcatttaatccatggcgctggaagggaaaagacttgagcgcgattgtctccaggacttacattccctttggctcgggttctagactatgtgtaggagctgaatttgttaagttgaagatggccatttttatccatcatttgtctagatacaggtggtcaatgaagacagagactactttacttcgaagatttgtacttatacttccacgtggatcagatgttcaaatcttagaagacaccaaagctaaataactttgttggttacttggttattagaatgattgtattacattgtactatgttatgcgataataataaaattcagtttaaaa

SEQ ID NO: 85515 - protein, 475 aa, Arabidopsis thaliana
  peptide (1)..(475): Ceres Seq. ID no. 12680829
MVDLYEFWAVIVSLIVVKLCHSIYQWRNPKSNGELPPGSMGYPIIGETFEFMKPHDAIQLPTFVKEKVLRHGPVFRTSLFGGKVIISTDIGLNMEIAKTNHIPGMPKSLARLFGANNLFVNKDTHKHARSLTNQFLGSQALKLRMLQDIDFLVRTHLKEGARKGSLDIKETTSKIIIECLAKKVMGEMEPDAAKELTLCWTFFPREWFGFAWNIPGTGVYRMVKARNRMMKVLKETVLKKRASGEELGDFFKTIFGDTERGVKTISLESATEYIFTLFLLANETTPAVLAATIKLISDHPKVMQELQREHEGIVRDKIEKNEKADLTWEDYKSMTFTQMVINESLRITSTVPTVLRIIDHEFQFGEYTIPAGWIFMGYPYVHFNAEKYDDPLAFNPWRWKGKDLSAIVSRTYIPFGSGSRLCVGAEFVKLKMAIFIHHLSRYRWSMKTETTLLRRFVLILPRGSDVQILEDTKAK

SEQ ID NO: 85516 - protein, 436 aa, Arabidopsis thaliana
  peptide (1)..(436): Ceres Seq. ID no. 12680830
MGYPIIGETFEFMKPHDAIQLPTFVKEKVLRHGPVFRTSLFGGKVIISTDIGLNMEIAKTNHIPGMPKSLARLFGANNLFVNKDTHKHARSLTNQFLGSQALKLRMLQDIDFLVRTHLKEGARKGSLDIKETTSKIIIECLAKKVMGEMEPDAAKELTLCWTFFPREWFGFAWNIPGTGVYRMVKARNRMMKVLKETVLKKRASGEELGDFFKTIFGDTERGVKTISLESATEYIFTLFLLANETTPAVLAATIKLISDHPKVMQELQREHEGIVRDKIEKNEKADLTWEDYKSMTFTQMVINESLRITSTVPTVLRIIDHEFQFGEYTIPAGWIFMGYPYVHFNAEKYDDPLAFNPWRWKGKDLSAIVSRTYIPFGSGSRLCVGAEFVKLKMAIFIHHLSRYRWSMKTETTLLRRFVLILPRGSDVQILEDTKAK

SEQ ID NO: 85517 - protein, 424 aa, Arabidopsis thaliana
  peptide (1)..(424): Ceres Seq. ID no. 12680831
MKPHDAIQLPTFVKEKVLRHGPVFRTSLFGGKVIISTDIGLNMEIAKTNHIPGMPKSLARLFGANNLFVNKDTHKHARSLTNQFLGSQALKLRMLQDIDFLVRTHLKEGARKGSLDIKETTSKIIIECLAKKVMGEMEPDAAKELTLCWTFFPREWFGFAWNIPGTGVYRMVKARNRMMKVLKETVLKKRASGEELGDFFKTIFGDTERGVKTISLESATEYIFTLFLLANETTPAVLAATIKLISDHPKVMQELQREHEGIVRDKIEKNEKADLTWEDYKSMTFTQMVINESLRITSTVPTVLRIIDHEFQFGEYTIPAGWIFMGYPYVHFNAEKYDDPLAFNPWRWKGKDLSAIVSRTYIPFGSGSRLCVGAEFVKLKMAIFIHHLSRYRWSMKTETTLLRRFVLILPRGSDVQILEDTKAK

SEQ ID NO: 85518 - DNA, 1357 bp, Arabidopsis thaliana
  misc_feature (1)..(1357): Ceres Seq. ID no. 12680840
  misc_feature (1)..(1357): Ortholog of  Ceres SEQ ID NO 15176325 as cited in SEQ ID NO 52802
  misc_feature (1)..(1357): Ortholog of  Ceres SEQ ID NO 15176313 as cited in SEQ ID NO 52831
tattaaaacaactccccaaacaaaactttagatctgaaaatctcagctttgaaatggaggaaatcggaatagttatcgtcggcggcggaatcgctggtctcgccacttccattgctcttcataggaaaggaataaagagtgtggtgttggagagagcagagaaagtgagatcggaaggagctggaatcggaactctctccaatggttggagagcccttgatacagcttggcgttggtgatcgccttcgtctcaattcttctcttattcacaaggcacggaccatgttgattgagaatggaaaaaaacgagaattcgtttcaaatatagtagacgaagctcgttgtattaaaaggaacgatcttgttgaggccttatccgatgcccttccgaaaggaaccatccggttcggttctcatattgtttctattgagcaggacaaaactacgttgtttccggttgttcacttagccaatggaaatagcatcaaagccaaggtcctgattggatgcgatggtgccaattctatcgtcagtgattatttgcagttaaacccgaaaaaggcgtttgcttgtcgtgcggtgagagggtttactaagtacccaaacggccatggatttccacaagaggttctaaggataaagcaaggaaatgtcttaataggaaggcttcctttgacggataatcaagtcttttggtttctagtacatatgcaagacaataatcacaatggtaaagatcaagaatcgattgcgaatctgtgtcgaaaatgggccgatgacttgtctgaagattggaaagaaatggtaaaaatatgcaatgtggagtcattaacactcacacacttaaggtaccgagcgccatcggaaatcatgttagggaaatttcgtcgtgggacagtgactgtagccggcgatgcgatgcacgtgatgggtccgttcttggcacagggcggctcagcggcgctagaggatgcggttgttttagctaggtgtctagctaggaaagttggtccggaccacggagacttgttaaaggattgttcgatgaaaaacattgaagaagctattgatgagtatgtggatgaacgtaggatgagattactcgggctttcggtgcagacttatttgaccggacgttcgctacaaacgtcatcaaaggttctgaggctaatgtttatagctttgttgttacttttgtttggtcgtgatcaaattcgtcatactaggtacgactgtggccgtctctagagatttgatggacattttgtattttttagtgtgaggttgtgtgctttaaactttttttgtgtgtttctttttcttataacatcctcctttctcaatataacaagagttt

SEQ ID NO: 85519 - protein, 348 aa, Arabidopsis thaliana
  peptide (1)..(348): Ceres Seq. ID no. 12680841
MVGEPLIQLGVGDRLRLNSSLIHKARTMLIENGKKREFVSNIVDEARCIKRNDLVEALSDALPKGTIRFGSHIVSIEQDKTTLFPVVHLANGNSIKAKVLIGCDGANSIVSDYLQLNPKKAFACRAVRGFTKYPNGHGFPQEVLRIKQGNVLIGRLPLTDNQVFWFLVHMQDNNHNGKDQESIANLCRKWADDLSEDWKEMVKICNVESLTLTHLRYRAPSEIMLGKFRRGTVTVAGDAMHVMGPFLAQGGSAALEDAVVLARCLARKVGPDHGDLLKDCSMKNIEEAIDEYVDERRMRLLGLSVQTYLTGRSLQTSSKVLRLMFIALLLLLFGRDQIRHTRYDCGRL

SEQ ID NO: 85520 - protein, 321 aa, Arabidopsis thaliana
  peptide (1)..(321): Ceres Seq. ID no. 12680842
MLIENGKKREFVSNIVDEARCIKRNDLVEALSDALPKGTIRFGSHIVSIEQDKTTLFPVVHLANGNSIKAKVLIGCDGANSIVSDYLQLNPKKAFACRAVRGFTKYPNGHGFPQEVLRIKQGNVLIGRLPLTDNQVFWFLVHMQDNNHNGKDQESIANLCRKWADDLSEDWKEMVKICNVESLTLTHLRYRAPSEIMLGKFRRGTVTVAGDAMHVMGPFLAQGGSAALEDAVVLARCLARKVGPDHGDLLKDCSMKNIEEAIDEYVDERRMRLLGLSVQTYLTGRSLQTSSKVLRLMFIALLLLLFGRDQIRHTRYDCGRL

SEQ ID NO: 85521 - protein, 179 aa, Arabidopsis thaliana
  peptide (1)..(179): Ceres Seq. ID no. 12680843
MQDNNHNGKDQESIANLCRKWADDLSEDWKEMVKICNVESLTLTHLRYRAPSEIMLGKFRRGTVTVAGDAMHVMGPFLAQGGSAALEDAVVLARCLARKVGPDHGDLLKDCSMKNIEEAIDEYVDERRMRLLGLSVQTYLTGRSLQTSSKVLRLMFIALLLLLFGRDQIRHTRYDCGRL

SEQ ID NO: 85522 - DNA, 1255 bp, Arabidopsis thaliana
  misc_feature (1)..(1255): Ceres Seq. ID no. 12680896
  misc_feature (1)..(1255): Ortholog of  Ceres SEQ ID NO 14303446 as cited in SEQ ID NO 59378
ctccactctgctaaatccgacgagagacgacgatgccaagcggtggtaacggaacaagtaacggagtcgctaacgcgaattccaccggtaacgcaggaacaagcggaaacgttccgatatataagccataccgtcacctgaaaaccctagaaggtcacacggcggcgatctcttgcgtcaaattctccaacgacggcaatcttctcgcttccgcttccgtagacaaaaccatgatcctctggtcagcaacaaactactctctcattcatcgttacgaaggtcactctagtggtatctccgatctagcttggtcttctgattcgcattacacttgctctgcttctgatgattgtacgcttcgaatctgggacgctagatctccttatgaatgtcttaaggttcttagaggtcatacgaatttcgtcttctgtgttaatttcaatcctccttcgaatttgattgtgtctggatcgttcgatgagacgattcgtatttgggaggttaagactgggaagtgtgttaggatgattaaagctcattcgatgccgatttcgagtgtgcattttaatagagatggatcgttgattgtttcggcaagtcatgatggttcttgtaagatttgggatgctaaagaaggaacttgcttgaagactcttattgatgataaatctccggctgtttctttcgctaagttctcgcccaatggcaagtttatactcgttgctactctcgatagtactctcaagctgtcgaactatgcgacggggaagtttttgaaagtgtatacaggacatactaacaaagtgttctgtatcacatcggcgttttctgtaacgaatgggaagtacattgtgagtggatcagaggataattgtgtgtatctgtgggatcttcaagcgagaaatatactgcagagactagaaggccacacagacgcagtgatctcagtgagttgccatccggttcagaacgagatatcttcatcgggtaatcatttggataaaactatcaggatttggaaacaggatgcttgaaaaacatgaatatatgtgtatggaattaatggtaacaacaatagttgagattgtgaatctgtttgatctgaacacactattttgatgtttcggaatgggatgaaatctcttgcaagttggtgttaatatttatgacagagatatcatctatgttctctccccaatatgtggatgatacttactttaaaactaaagctttttaataagagctactaaactaa

SEQ ID NO: 85523 - protein, 333 aa, Arabidopsis thaliana; identical to SEQ ID NO: 37530
  peptide (1)..(333): Ceres Seq. ID no. 12680897

SEQ ID NO: 85524 - protein, 267 aa, Arabidopsis thaliana; identical to SEQ ID NO: 37531
  peptide (1)..(267): Ceres Seq. ID no. 12680898

SEQ ID NO: 85525 - protein, 169 aa, Arabidopsis thaliana; identical to SEQ ID NO: 37532
  peptide (1)..(169): Ceres Seq. ID no. 12680899

SEQ ID NO: 85526 - DNA, 1397 bp, Arabidopsis thaliana
  misc_feature (1)..(1397): Ceres Seq. ID no. 12680908
  misc_feature (1)..(1397): Ortholog of  Ceres SEQ ID NO 14310350 as cited in SEQ ID NO 20670
  misc_feature (1)..(1397): Ortholog of  Ceres SEQ ID NO 15177648 as cited in SEQ ID NO 58917
ttgacgatttctccgatcctttctgggaaactcctccgattcctctcaatcccgactcttctaagcctgttacggcggatgaagttagccagagtcaaccggaatggactttcgagatgtttctcgaagagatttcttcgtcggcggtgagctctgagccacttggtaacaacaacaacgcgatcgtcggtgtttcttcggcgcaatctcttccttctgtttccggacagaatgatttcgaggatgatagtcgatttcgtgatcgcgattcgggaaatttggattgtgctgctcccatgacgacgaagacggtgattgttgattccgatgattatcgtcgtgttcttaagaacaagcttgagactgagtgcgctactgttgtttctcttcgggttgggtctgtgaagcctgaagattcgactagttctccagaaactcaacttcaaccagttcaatccagtcctcttactcaaggagaacttggtgttacttcttccttaccagctgaggtgaaaaaaactggtgtatcaatgaagcaggttactagtggatcgtcgagagaatattctgatgacgaggaccttgatgaagagaatgaaaccaccggttccttgaagccagaggacgttaaaaaatctagaaggatgctgtcaaatcgtgagtcagctaggcgatctagaaggagaaagcaggagcaaacaagtgacctcgaaacacaggttaatgatctaaaaggtgagcattcatcacttcttaaacaactgagcaacatgaatcacaagtatgacgaggctgctgttggcaatagaatactaaaggctgacattgagacattaagagctaaggtgaaaatggcggaagaaaccgtgaagagagtaacaggaatgaatccgatgcttctcggaagatcaagtggacataacaacaacaacagaatgccaataactggtaacaacaggatggattcttctagcattattccagcttatcaaccacactcaaacctaaaccatatgtcaaaccaaaacatcgggatcccaaccattctacctccaagactcggaaacaatttcgctgctcctccatcccaaaccagctctcccttgcagagaattagaaatgggcaaaatcaccatgttactccaagcgccaacccgtatggctggaataccgaacctcagaacgattcagcatggccgaaaaaatgcgtggactgatcaaacaagaagcgggtttcgcactatattaatgtctatgcatctgtaatttgtaagtgttattaagttacgaatcatgagaaaacatcttgtgaaaatacagtctcatggcttatatatatatataagctctgtcttataacattacaagattcttatttgagaatcgtctttctattt

SEQ ID NO: 85527 - protein, 404 aa, Arabidopsis thaliana
  peptide (1)..(404): Ceres Seq. ID no. 12680909
DDFSDPFWETPPIPLNPDSSKPVTADEVSQSQPEWTFEMFLEEISSSAVSSEPLGNNNNAIVGVSSAQSLPSVSGQNDFEDDSRFRDRDSGNLDCAAPMTTKTVIVDSDDYRRVLKNKLETECATVVSLRVGSVKPEDSTSSPETQLQPVQSSPLTQGELGVTSSLPAEVKKTGVSMKQVTSGSSREYSDDEDLDEENETTGSLKPEDVKKSRRMLSNRESARRSRRRKQEQTSDLETQVNDLKGEHSSLLKQLSNMNHKYDEAAVGNRILKADIETLRAKVKMAEETVKRVTGMNPMLLGRSSGHNNNNRMPITGNNRMDSSSIIPAYQPHSNLNHMSNQNIGIPTILPPRLGNNFAAPPSQTSSPLQRIRNGQNHHVTPSANPYGWNTEPQNDSAWPKKCVD

SEQ ID NO: 85528 - protein, 366 aa, Arabidopsis thaliana; identical to SEQ ID NO: 27487
  peptide (1)..(366): Ceres Seq. ID no. 12680910

SEQ ID NO: 85529 - protein, 306 aa, Arabidopsis thaliana
  peptide (1)..(306): Ceres Seq. ID no. 12680911
MTTKTVIVDSDDYRRVLKNKLETECATVVSLRVGSVKPEDSTSSPETQLQPVQSSPLTQGELGVTSSLPAEVKKTGVSMKQVTSGSSREYSDDEDLDEENETTGSLKPEDVKKSRRMLSNRESARRSRRRKQEQTSDLETQVNDLKGEHSSLLKQLSNMNHKYDEAAVGNRILKADIETLRAKVKMAEETVKRVTGMNPMLLGRSSGHNNNNRMPITGNNRMDSSSIIPAYQPHSNLNHMSNQNIGIPTILPPRLGNNFAAPPSQTSSPLQRIRNGQNHHVTPSANPYGWNTEPQNDSAWPKKCVD

SEQ ID NO: 85530 - DNA, 1820 bp, Arabidopsis thaliana
  misc_feature (1)..(1820): Ceres Seq. ID no. 12680912
  misc_feature (1)..(1820): Ortholog of  Ceres SEQ ID NO 15224473 as cited in SEQ ID NO 66479
gtagagagagaaaaaaaaaactcagaggagagaaagagaagacgacgaagacgaccattttttttttttttgtcaagagagaagacggagacaacaatggcggaagcgaaggaggagaatagggagaaaaacgaagaagaagagagcgtaaagcttttcgtcggacaaattccgaaacatatgtcggaatctcaactcttaacattgtttcaagagttcgctgtcgttgacgaggtcaatatcatcaaggacaagattacacgcgcctctcgaggatgttgttttctgctatgtccatcgagagaagaagcagataagttggtcaatgcttgccataacaagaagacattgcctggggctaacagtctattgcaagtaaagtatgcagatggcgaattagaaaggctagagcataagctatttgttggtatgcttccaaagaatgtctctgaagctgaagttcaatctttattctccaagtacgggaccataaaggatctacagattctaagaggtgctcaacaaacgagcaaaggctgtgcatttctgaagtatgagacaaaagaacaagctgtttccgccatggaatctatcaacggaaaacataaaatggagggttcaactgttcctttagttgtcaaatgggcagacacagaacgagaaagacacacaagaagacttcaaaaggctcaatctcacatcgcccgactagggaacggtgatccaacaaatccctcattgtttggagcattacctatgggttatgtaccaccatataatggatatggttatcatcctcctggaacttatggttacatgctaccaccaattcagaaccaagctgcattttccaatatgattgcacaaccaaaccaaggtaataacaatgcattgcaaggaacatcgcctgactctgtgccgcctcgtttggcccgtagaaactttcctatgcctcctggaaactacatgggatctggttatcctgctatgcgaggtcatccttttccatttgcttatcccagaggaattgttagtcctcgccctctaagtagctctcctggatctatatcacctggcatgtcaacacctttaggcattggtttgagttctgtggttcaaaccgaaggtccagaaggtgcaaatctgtttatctataacatacctcgggagttcggggatcaagaactcgcggctgcatttcaatctttcggtattgttctgagtgccaaggtttttgtagacaaagccactggtgtaagcaaatgtttcggtaagctctcttttgatctagtttttcctcttttaaaactggttcattgtgaaggtagaaagaaagcattcttttgctgttgctgttggttgcaggttttgttagctatgactcacaagccgcggcgcagaacgctattgacatgatgaatggtcgccatttaggcggtaagaaattgaaagtccagcttaagagagacagcaacaatggccaaccgagtagtaatccttccttaatctcctgaaagtgctaaaactcctcctctcttcaacttgaaagttcataacagaaaaaaacaaaaaacatattcgggcttatgggtcgacccggttcaaagatttggaccgatcttgaatggatgcatctgtatagatccaaatctcattgtgggtcaaaatgtcccatcaactcaaaagctccaaactggatcatctcttttctttttttttttaatctgcaaataacaatttgtaatttatgtttattattgaaactcatgtagaaattttatgatttattaacattaaattcattgaattcttcttctatc

SEQ ID NO: 85531 - protein, 471 aa, Arabidopsis thaliana
  peptide (1)..(471): Ceres Seq. ID no. 12680913
VEREKKNSEERKRRRRRRPFFFFLSREKTETTMAEAKEENREKNEEEESVKLFVGQIPKHMSESQLLTLFQEFAVVDEVNIIKDKITRASRGCCFLLCPSREEADKLVNACHNKKTLPGANSLLQVKYADGELERLEHKLFVGMLPKNVSEAEVQSLFSKYGTIKDLQILRGAQQTSKGCAFLKYETKEQAVSAMESINGKHKMEGSTVPLVVKWADTERERHTRRLQKAQSHIARLGNGDPTNPSLFGALPMGYVPPYNGYGYHPPGTYGYMLPPIQNQAAFSNMIAQPNQGNNNALQGTSPDSVPPRLARRNFPMPPGNYMGSGYPAMRGHPFPFAYPRGIVSPRPLSSSPGSISPGMSTPLGIGLSSVVQTEGPEGANLFIYNIPREFGDQELAAAFQSFGIVLSAKVFVDKATGVSKCFGKLSFDLVFPLLKLVHCEGRKKAFFCCCCWLQVLLAMTHKPRRRTLLT

SEQ ID NO: 85532 - protein, 439 aa, Arabidopsis thaliana
  peptide (1)..(439): Ceres Seq. ID no. 12680914
MAEAKEENREKNEEEESVKLFVGQIPKHMSESQLLTLFQEFAVVDEVNIIKDKITRASRGCCFLLCPSREEADKLVNACHNKKTLPGANSLLQVKYADGELERLEHKLFVGMLPKNVSEAEVQSLFSKYGTIKDLQILRGAQQTSKGCAFLKYETKEQAVSAMESINGKHKMEGSTVPLVVKWADTERERHTRRLQKAQSHIARLGNGDPTNPSLFGALPMGYVPPYNGYGYHPPGTYGYMLPPIQNQAAFSNMIAQPNQGNNNALQGTSPDSVPPRLARRNFPMPPGNYMGSGYPAMRGHPFPFAYPRGIVSPRPLSSSPGSISPGMSTPLGIGLSSVVQTEGPEGANLFIYNIPREFGDQELAAAFQSFGIVLSAKVFVDKATGVSKCFGKLSFDLVFPLLKLVHCEGRKKAFFCCCCWLQVLLAMTHKPRRRTLLT

SEQ ID NO: 85533 - protein, 411 aa, Arabidopsis thaliana
  peptide (1)..(411): Ceres Seq. ID no. 12680915
MSESQLLTLFQEFAVVDEVNIIKDKITRASRGCCFLLCPSREEADKLVNACHNKKTLPGANSLLQVKYADGELERLEHKLFVGMLPKNVSEAEVQSLFSKYGTIKDLQILRGAQQTSKGCAFLKYETKEQAVSAMESINGKHKMEGSTVPLVVKWADTERERHTRRLQKAQSHIARLGNGDPTNPSLFGALPMGYVPPYNGYGYHPPGTYGYMLPPIQNQAAFSNMIAQPNQGNNNALQGTSPDSVPPRLARRNFPMPPGNYMGSGYPAMRGHPFPFAYPRGIVSPRPLSSSPGSISPGMSTPLGIGLSSVVQTEGPEGANLFIYNIPREFGDQELAAAFQSFGIVLSAKVFVDKATGVSKCFGKLSFDLVFPLLKLVHCEGRKKAFFCCCCWLQVLLAMTHKPRRRTLLT

SEQ ID NO: 85534 - DNA, 3209 bp, Arabidopsis thaliana
  misc_feature (1)..(3209): Ceres Seq. ID no. 12680920
  misc_feature (1)..(3209): Ortholog of  Ceres SEQ ID NO 13596392 as cited in SEQ ID NO 62136
  misc_feature (1)..(3209): Ortholog of  Ceres SEQ ID NO 13654360 as cited in SEQ ID NO 67980
  misc_feature (1)..(3209): Ortholog of  Ceres SEQ ID NO 13596394 as cited in SEQ ID NO 68561
ttttttcttctcttttaattcaaaaacaaaaaatagtctctgaaaaaaaaagaaaggtttttactttgtggagaagacagagtccgtccgtcgtaactcgccaccgttctccgccgtgaattcttcttactccttcgatctgaactttctacctagttctttcgtccagtgccgtagtctttccttctttgattcgctttctaggtttcgtcttctcatttctctgcttctggttcagtattttggctgttgcgggatcgatttatacccgtaaagtggtttccaatgggctcgaagccttggctacatccagctcctcagtataaaaccctagaaaccttttgggatgatgaagacgatgctcctggtcctagatgcgctcatacacttacggctgttgcagctactaagactcacggtcctcgtcttattctcttcggcggcgccaccgctattgagggagggagttcttccgttcctgggatcaggttagctggtgttaccaatacggtgcattcttatgatattctcactaggaagtggacaaggcttaaaccggctggtgagcctccgtctcctagggctgctcacgccgcagctgcagttggcaccatggtcgtttttcagggtggcattggaccggcggggcattctactgatgatctttacgttcttgacatgactaatgataagttcaagtggcacagggtggtggttcaaggggatggtccaggccctcgctatggccatgttatggatttagtttctcagaggtatcttgttacagtcaccggaaatgatgggaaacgagctctttctgacgcttgggcactggatacagctcagaaaccatatgtatggcagagattgaacccagatggtgaccgaccaagtgctagaatgtatgcttctggcagtgctcgttctgatggcatgtttttgctctgcgggggaagagacaccttgggggcgccgttgggagatgcttatgggctactgatgcatagaaatggtcagtgggagtggactctggctccaggtgtagctccttctccaagatatcaacatgcagcggtttttgtaggtgcaagattacatgtcagtggtggtgtgctgagaggaggccgtgtaatagacgctgaagcatctgttgcagtgcttgatactgctgccggtgtatggttggatagaaatgggcaagttacttctgcacgtggaagtaagggacaaatcgatcaagatccgtcttttgaacttatgcgacgctgtcgccatggcgcggcatcagttggtatccggatctatgtgcatggtggtctaagaggagatgtgttacttgacgattttctagttgctgaaaattcaacattccagtcagacatcagttctcctttgctagcatcagatagaacccaacaaagttctactcccaggttttcttatgccgcacgacctccttcaggctctgaaccaagcttctccatgtctgagggactgagcttggatgaaaattcgttggagaaattgacggaggcttctgcagctgaagcagaggtagctagttctgtttggcgagctgcacaactaggagctggtactctggatgaagaaccctctacctctgatgccagctcgccaattgtagaatctactactgatggtaccgcaaatgaaggagatgtcaggcttcatccgagagctgttgtggtagcaaaagagacggttggtagtctgggcggcatggtaagacagctaagcttggatcagtttcagaatgagagccgacggatggttcccatgaacaatagcgatgtgccacaacctaccaagaagttcacgagacagaagtctccgcaaggcctgcataaaaaggtcattgctgctttgttaagacctcgaaactggaaacctcctggcaataggaaatttttcttggattcttacgaagttggggaactctgttatgctgccgaacaaatatttatgcatgaacaaacggttcttcagctaaaggctcctatcaaagtatttggcgatctccatgggcaatttggcgatttaatgcgtttatttgatgaatatggatttccctcaacagctggagacatcacgtatattgactatttattcttgggagattacgttgaccggggacaacacagcctggagactataacgttgctgcttgcattgaagattgaatatccggagaatgttcacttgattcgtggaaaccacgaggctgctgacattaatgcactatttggtttccgtcttgaatgcatagaaagaatgggagagaatgatggcatctgggcgtggacaagatttaatcaactttttaattatcttcctcttgctgcactaatcgagaacaaaattatatgtatgcatggtggaattgggaggtcaatcagtacagtggaacagattgaaaagattgaaagacccataacaatggatgctggatcccttgttctaatggatttattatggtctgatcctacagagaacgatagtatcgagggtttaagaccaaacgccagaggacctggccttgtcacgtttgggcctgatagagtcacagaattctgtaagaggaataaactacagctaattatcagggcccatgaatgtgtgatggatggattcgaaagatttgcacagggacagttgattacgcttttctccgccacaaattactgcggaactgcgaacaatgcaggagctatattggtggttggcagaggattggtgattgttcccaagttaattcatcctcttccacctcccatcttatctccagagaactctccagaacattctggagacgacgcttggatgcaggagctgaatatccagagaccgccgactccaacacgaggcaggccacaaccagattttgacagaagctcgcttgcatacatctgaatctgattgcattcccggtttctgcctgcaactcatgaagtcaaccaatattggattttggtacaactttatacaagtatagtaagattttatgtttcaaaatttgcagtgttcatatactctgccgcacatgtgtaatataatccactataccaccagagagtgagaatggtatagtactatttttttgcttttcttctaaaaaactctttagtgagagatgatttatatttcttcaaacatagatttggtttttggaatgttaaaactacaacaca

SEQ ID NO: 85535 - protein, 881 aa, Arabidopsis thaliana
  peptide (1)..(881): Ceres Seq. ID no. 12680921
MGSKPWLHPAPQYKTLETFWDDEDDAPGPRCAHTLTAVAATKTHGPRLILFGGATAIEGGSSSVPGIRLAGVTNTVHSYDILTRKWTRLKPAGEPPSPRAAHAAAAVGTMVVFQGGIGPAGHSTDDLYVLDMTNDKFKWHRVVVQGDGPGPRYGHVMDLVSQRYLVTVTGNDGKRALSDAWALDTAQKPYVWQRLNPDGDRPSARMYASGSARSDGMFLLCGGRDTLGAPLGDAYGLLMHRNGQWEWTLAPGVAPSPRYQHAAVFVGARLHVSGGVLRGGRVIDAEASVAVLDTAAGVWLDRNGQVTSARGSKGQIDQDPSFELMRRCRHGAASVGIRIYVHGGLRGDVLLDDFLVAENSTFQSDISSPLLASDRTQQSSTPRFSYAARPPSGSEPSFSMSEGLSLDENSLEKLTEASAAEAEVASSVWRAAQLGAGTLDEEPSTSDASSPIVESTTDGTANEGDVRLHPRAVVVAKETVGSLGGMVRQLSLDQFQNESRRMVPMNNSDVPQPTKKFTRQKSPQGLHKKVIAALLRPRNWKPPGNRKFFLDSYEVGELCYAAEQIFMHEQTVLQLKAPIKVFGDLHGQFGDLMRLFDEYGFPSTAGDITYIDYLFLGDYVDRGQHSLETITLLLALKIEYPENVHLIRGNHEAADINALFGFRLECIERMGENDGIWAWTRFNQLFNYLPLAALIENKIICMHGGIGRSISTVEQIEKIERPITMDAGSLVLMDLLWSDPTENDSIEGLRPNARGPGLVTFGPDRVTEFCKRNKLQLIIRAHECVMDGFERFAQGQLITLFSATNYCGTANNAGAILVVGRGLVIVPKLIHPLPPPILSPENSPEHSGDDAWMQELNIQRPPTPTRGRPQPDFDRSSLAYI

SEQ ID NO: 85536 - protein, 772 aa, Arabidopsis thaliana
  peptide (1)..(772): Ceres Seq. ID no. 12680922
MVVFQGGIGPAGHSTDDLYVLDMTNDKFKWHRVVVQGDGPGPRYGHVMDLVSQRYLVTVTGNDGKRALSDAWALDTAQKPYVWQRLNPDGDRPSARMYASGSARSDGMFLLCGGRDTLGAPLGDAYGLLMHRNGQWEWTLAPGVAPSPRYQHAAVFVGARLHVSGGVLRGGRVIDAEASVAVLDTAAGVWLDRNGQVTSARGSKGQIDQDPSFELMRRCRHGAASVGIRIYVHGGLRGDVLLDDFLVAENSTFQSDISSPLLASDRTQQSSTPRFSYAARPPSGSEPSFSMSEGLSLDENSLEKLTEASAAEAEVASSVWRAAQLGAGTLDEEPSTSDASSPIVESTTDGTANEGDVRLHPRAVVVAKETVGSLGGMVRQLSLDQFQNESRRMVPMNNSDVPQPTKKFTRQKSPQGLHKKVIAALLRPRNWKPPGNRKFFLDSYEVGELCYAAEQIFMHEQTVLQLKAPIKVFGDLHGQFGDLMRLFDEYGFPSTAGDITYIDYLFLGDYVDRGQHSLETITLLLALKIEYPENVHLIRGNHEAADINALFGFRLECIERMGENDGIWAWTRFNQLFNYLPLAALIENKIICMHGGIGRSISTVEQIEKIERPITMDAGSLVLMDLLWSDPTENDSIEGLRPNARGPGLVTFGPDRVTEFCKRNKLQLIIRAHECVMDGFERFAQGQLITLFSATNYCGTANNAGAILVVGRGLVIVPKLIHPLPPPILSPENSPEHSGDDAWMQELNIQRPPTPTRGRPQPDFDRSSLAYI

SEQ ID NO: 85537 - protein, 750 aa, Arabidopsis thaliana
  peptide (1)..(750): Ceres Seq. ID no. 12680923
MTNDKFKWHRVVVQGDGPGPRYGHVMDLVSQRYLVTVTGNDGKRALSDAWALDTAQKPYVWQRLNPDGDRPSARMYASGSARSDGMFLLCGGRDTLGAPLGDAYGLLMHRNGQWEWTLAPGVAPSPRYQHAAVFVGARLHVSGGVLRGGRVIDAEASVAVLDTAAGVWLDRNGQVTSARGSKGQIDQDPSFELMRRCRHGAASVGIRIYVHGGLRGDVLLDDFLVAENSTFQSDISSPLLASDRTQQSSTPRFSYAARPPSGSEPSFSMSEGLSLDENSLEKLTEASAAEAEVASSVWRAAQLGAGTLDEEPSTSDASSPIVESTTDGTANEGDVRLHPRAVVVAKETVGSLGGMVRQLSLDQFQNESRRMVPMNNSDVPQPTKKFTRQKSPQGLHKKVIAALLRPRNWKPPGNRKFFLDSYEVGELCYAAEQIFMHEQTVLQLKAPIKVFGDLHGQFGDLMRLFDEYGFPSTAGDITYIDYLFLGDYVDRGQHSLETITLLLALKIEYPENVHLIRGNHEAADINALFGFRLECIERMGENDGIWAWTRFNQLFNYLPLAALIENKIICMHGGIGRSISTVEQIEKIERPITMDAGSLVLMDLLWSDPTENDSIEGLRPNARGPGLVTFGPDRVTEFCKRNKLQLIIRAHECVMDGFERFAQGQLITLFSATNYCGTANNAGAILVVGRGLVIVPKLIHPLPPPILSPENSPEHSGDDAWMQELNIQRPPTPTRGRPQPDFDRSSLAYI

SEQ ID NO: 85538 - DNA, 1629 bp, Arabidopsis thaliana
  misc_feature (1)..(1629): Ceres Seq. ID no. 12680924
  misc_feature (1)..(1629): Ortholog of  Ceres SEQ ID NO 14308813 as cited in SEQ ID NO 55485
  misc_feature (1)..(1629): Ortholog of  Ceres SEQ ID NO 13655744 as cited in SEQ ID NO 64032
  misc_feature (1)..(1629): Ortholog of  Ceres SEQ ID NO 13590394 as cited in SEQ ID NO 66581
gtgttcgcctttctctcgtacaagtcaaaatggcgtccgttgttcttcgaaaccctagctcgaagcgccttgttccattctcttcccagatctactctcgctgtggtgcttccgttacttcctcttactcgatctctcattctatcggtggagatgatctctcttcctctaccttcggaacctcctccttctggagatccatggccacttttactcgaaataaacctcatgtaaatgttggaactattgggcatgttgatcatggcaagaccactttaactgctgcaatcacaaaggttcttgctgaggagggcaaagctaaagctattgcctttgatgaaattgataaagctcctgaagagaagaagagaggaattactattgccacggctcatgtggagtatgaaactgcaaagcgtcactatgctcatgtggattgccctggacacgcagattatgttaaaaatatgattactggagctgcgcaaatggatggcggaattcttgtggtttcaggaccagatggacccatgccgcagacaaaggaacatattctacttgcacgccaggttggtgttccctcacttgtgtgcttcttgaacaaagttgatgtggtggatgaccctgagctcttggagcttgtcgagatggaactacgtgagctcctcagcttctacaagtttcctggggatgatattcccatcatccgaggatctgctctgtccgcattacagggcaccaatgatgaaattggaaggcaagctatattaaagctgatggatgctgttgatgaatatatacctgaccctgttcgcgtccttgacaagcctttcttgatgccaattgaagatgttttctcaattcaaggacgtggaactgttgcaaccggtcgtatcgaacagggagtcattaaagtgggtgaagaagttgagatattgggtttacgtgaggggggtgttccactgaaatcgactgtaactggggttgagatgttcaagaagattttggataatggacaggctggtgataatgtaggacttcttctgcgtgggctaaagagagaagacattcagcgtggaatggtgattgctaagcctggttcatgcaagacatacaagaagtttgaagcagagatttacgtgctcacaaaggatgaaggtggacgtcacactgcatttttctctaactacaggcctcagttttacttgaggactgcagatatcactggcaaagtggaattacccgaaaacgtgaagatggttatgcctggtgacaatgtcacagctgttttcgagttaatcatgcctgtcccactcgaaacaggtcaaagatttgccttaagggaaggaggtagaacagttggagctggtgttgtatcaaaagtgatgacctaaactactcaaaagcacattcttctccttcgttctctaggaatccatcaatttcgagatttttctttttgtctttttgctgctttgagatttctttgggtagatcaaataaacagagagaaacttaatttatgtttccaatgagaaagattagggcagagggcacgaaacgtctatttctttttgatgcttcctactttgtgaaactttcaaaaagccacttccaattctttctcac

SEQ ID NO: 85539 - protein, 463 aa, Arabidopsis thaliana; identical to SEQ ID NO: 22001
  peptide (1)..(463): Ceres Seq. ID no. 12680925

SEQ ID NO: 85540 - protein, 454 aa, Arabidopsis thaliana; identical to SEQ ID NO: 22002
  peptide (1)..(454): Ceres Seq. ID no. 12680926

SEQ ID NO: 85541 - protein, 397 aa, Arabidopsis thaliana; identical to SEQ ID NO: 22003
  peptide (1)..(397): Ceres Seq. ID no. 12680927

SEQ ID NO: 85542 - DNA, 1057 bp, Arabidopsis thaliana
  misc_feature (1)..(1057): Ceres Seq. ID no. 12680936
  misc_feature (1)..(1057): Ortholog of  Ceres SEQ ID NO 15226343 as cited in SEQ ID NO 61627
gccttatctgcttctctctctccagtggtctcaaatctctctgtgtgatcccacttgtcatcctcctccacaacataaagcttgagaccataaccctttagcgttttcggctaaagctttcgctgactactacaacaatggcgtcctcatccctttcccctgctactcaggttcactcttgatcgttcgaatcgaaacaatcgggtctcttcgtataggaatttgggtttttgaaagtttggtttttttttttggtggcagcttggttctagcagaagtgctttgatggcgatgtcaagtgggttgtttgtgaagccaacgaagatgaatcatcaaatggttagaaaagagaagattggattgagaatttcttgtcaagcgtcgagtattccagcagacagagttccagatatggaaaagaggaagactttgaatcttcttcttcttggggctctttctctacctactggctacatgcttgtcccttacgctaccttctttgttcctcctggaaccggaggtggaggtggtggtactccagccaaggatgcccttggaaacgatgtagttgcagcggaatggcttaagactcatggtcccggtgaccgaaccttgacccaaggattaaagggagatccgacttacctagttgtagagaacgacaagactctagcgacatacggtatcaacgcagtgtgcactcatcttggatgtgttgtgccatggaacaaagctgagaacaagtttctatgtccttgccatggatcccaatacaacgcccaaggaagagtcgttagaggtccagccccattgtcgctagcgttggctcacgcggatatagatgaagctgggaaggttctttttgttccatgggtggaaactgacttcaggactggtgatgctccatggtggtcttaagactcttcaacaagaaaaagagaaagatttggtctttttgtgtaagacttgtttgaatgttcttataatgtataagctacatttcatcgcaattactctgtgaattcttgcctcttatatgaaatattatgttcattca

SEQ ID NO: 85543 - protein, 210 aa, Arabidopsis thaliana; identical to SEQ ID NO: 38000
  peptide (1)..(210): Ceres Seq. ID no. 12680937

SEQ ID NO: 85544 - protein, 208 aa, Arabidopsis thaliana; identical to SEQ ID NO: 38001
  peptide (1)..(208): Ceres Seq. ID no. 12680938

SEQ ID NO: 85545 - protein, 197 aa, Arabidopsis thaliana
  peptide (1)..(197): Ceres Seq. ID no. 12680939
MNHQMVRKEKIGLRISCQASSIPADRVPDMEKRKTLNLLLLGALSLPTGYMLVPYATFFVPPGTGGGGGGTPAKDALGNDVVAAEWLKTHGPGDRTLTQGLKGDPTYLVVENDKTLATYGINAVCTHLGCVVPWNKAENKFLCPCHGSQYNAQGRVVRGPAPLSLALAHADIDEAGKVLFVPWVETDFRTGDAPWWS

SEQ ID NO: 85546 - DNA, 604 bp, Arabidopsis thaliana
  misc_feature (1)..(604): Ceres Seq. ID no. 12680942
  misc_feature (1)..(604): Ortholog of  Ceres SEQ ID NO 12473409 as cited in SEQ ID NO 104
  misc_feature (1)..(604): Ortholog of  Ceres SEQ ID NO 15170477 as cited in SEQ ID NO 52825
  misc_feature (1)..(604): Ortholog of  Ceres SEQ ID NO 13595055 as cited in SEQ ID NO 55744
  misc_feature (1)..(604): Ortholog of  Ceres SEQ ID NO 13662009 as cited in SEQ ID NO 61951
attggttggatcatacacattgtgacaagaaacagttatttggctcatgagagaagaatgttgctttttgtgctttagagtaaacatatcttgattctctataccagcagataacgattttggttatcactagcattgatattctacgattttagatagttcaagtggtcaatgactcgacatgggactctctagttcttaaagcaactgggcctgtagttgtcgacttttgggcaccatggtgtggaccttgcaagatgattgatccgcttgtaaacgatctagcacagcattacactgggaagatcaagttctacaaattaaacactgatgaatctcctaatactcccggccagtacggagttagaagcatcccaacgatcatgatctttgtcggtggcgagaagaaggatacaatcataggtgcagtgcccaaaaccacactcacatctagcctcgacaagttcttgccatgaaatatcacttgtggagtctgtaagatctcgtatctctctgtctctcgttcttgttctcattatctctgtaactcattatcactgaacatctagacctggataaataatatgatgtcatgtcttatgtc

SEQ ID NO: 85547 - protein, 72 aa, Arabidopsis thaliana; identical to SEQ ID NO: 36471
  peptide (1)..(72): Ceres Seq. ID no. 12680943

SEQ ID NO: 85548 - DNA, 1693 bp, Arabidopsis thaliana
  misc_feature (1)..(1693): Ceres Seq. ID no. 12681009
  misc_feature (1)..(1693): Ortholog of  Ceres SEQ ID NO 13656177 as cited in SEQ ID NO 64997
gattcattctcttcagtcagagatttcgaaaccctagtcgatttcgagatccaaccaactctgctccttatctcagcttgttgaatttgcgaagtatgggagacgctagagacaacgaagcctacgaggaggagctcttggactatgaagaagaagacgagaaggtcccagattctggaaacaaagttaacggtgaagccgtgaaaaaagggtacgtgggaatacacagttctggattcagagacttccttttaaaaccggagcttctcagagctattgttgactctggatttgaacatccatctgaagtgcaacatgaatgtatccctcaagctatcttgggcatggatgtcatctgccaagcaaagtctggtatggggaagactgctgtgtttgtcctgtctactctacaacagattgaaccatctcctggccaggtttctgcacttgtcttgtgccatacaagagagctagcttaccagatctgcaatgagtttgtgcgattcagtacctatctgcctgatacaaaggtttcggtgttctatggtggagtcaacattaaaattcacaaagacttgctgaagaatgaatgtcctcacattgttgttggtacccctggtcgggtgcttgcacttgccagggagaaagatctctctttgaagaatgtgaggcattttattcttgatgaatgtgataaaatgctcgagtcacttgacatgcgaagggatgtgcaggagattttcaagatgactcctcatgacaaacaagtaatgatgttctcagcaacgctcagcaaagagatacgcccagtctgcaaaaaatttatgcaagatccaatggaaatatatgtcgatgatgaagccaagttgactcttcatgggcttgtccagcactatatcaaactgagcgagatggagaaaacccggaagttgaatgaccttcttgatgcgttggacttcaatcaagttgtcatttttgtgaagagcgtgagcagggctgctgagctgaacaagttactggtggaatgcaatttcccctcaatatgcatccactctggaatgtctcaagaagagaggttgactcgatacaaaagtttcaaggaagggcacaaaaggatccttgtggcgactgacttggtaggaagagggattgacattgagcgtgtcaacattgtcatcaactatgacatgccagattctgctgatacctatcttcacagggttggcagagctggtagatttggaaccaagggtcttgcaatcacatttgttgcatctgcttcagattcagaggttcttaaccaggtacaagagaggtttgaggttgatataaaggaacttccggagcagattgatacttcaacctacatgccttcttaaacaagtagcacgtccctcaggaaagaagctcttcagatttcaaccttgtaggtgttcaaagggtcatgggggttcacaactatctctcgctccgtttgttttagtgttttctatgacgacatttttttccatatgtttagaacgtctgttgtactctttaaaggagattcgagtcactctccaaatcgcacagttaaaagctgtccagttttttgtacaagagattattatgtttgaaatatcaggatttagtctcgacctgattactgtgttccttaggaatcgatctattatcaatttatcatggtgttgct

SEQ ID NO: 85549 - protein, 458 aa, Arabidopsis thaliana
  peptide (1)..(458): Ceres Seq. ID no. 12681010
FILFSQRFRNPSRFRDPTNSAPYLSLLNLRSMGDARDNEAYEEELLDYEEEDEKVPDSGNKVNGEAVKKGYVGIHSSGFRDFLLKPELLRAIVDSGFEHPSEVQHECIPQAILGMDVICQAKSGMGKTAVFVLSTLQQIEPSPGQVSALVLCHTRELAYQICNEFVRFSTYLPDTKVSVFYGGVNIKIHKDLLKNECPHIVVGTPGRVLALAREKDLSLKNVRHFILDECDKMLESLDMRRDVQEIFKMTPHDKQVMMFSATLSKEIRPVCKKFMQDPMEIYVDDEAKLTLHGLVQHYIKLSEMEKTRKLNDLLDALDFNQVVIFVKSVSRAAELNKLLVECNFPSICIHSGMSQEERLTRYKSFKEGHKRILVATDLVGRGIDIERVNIVINYDMPDSADTYLHRVGRAGRFGTKGLAITFVASASDSEVLNQVQERFEVDIKELPEQIDTSTYMPS

SEQ ID NO: 85550 - protein, 427 aa, Arabidopsis thaliana
  peptide (1)..(427): Ceres Seq. ID no. 12681011
MGDARDNEAYEEELLDYEEEDEKVPDSGNKVNGEAVKKGYVGIHSSGFRDFLLKPELLRAIVDSGFEHPSEVQHECIPQAILGMDVICQAKSGMGKTAVFVLSTLQQIEPSPGQVSALVLCHTRELAYQICNEFVRFSTYLPDTKVSVFYGGVNIKIHKDLLKNECPHIVVGTPGRVLALAREKDLSLKNVRHFILDECDKMLESLDMRRDVQEIFKMTPHDKQVMMFSATLSKEIRPVCKKFMQDPMEIYVDDEAKLTLHGLVQHYIKLSEMEKTRKLNDLLDALDFNQVVIFVKSVSRAAELNKLLVECNFPSICIHSGMSQEERLTRYKSFKEGHKRILVATDLVGRGIDIERVNIVINYDMPDSADTYLHRVGRAGRFGTKGLAITFVASASDSEVLNQVQERFEVDIKELPEQIDTSTYMPS

SEQ ID NO: 85551 - protein, 344 aa, Arabidopsis thaliana
  peptide (1)..(344): Ceres Seq. ID no. 12681012
MDVICQAKSGMGKTAVFVLSTLQQIEPSPGQVSALVLCHTRELAYQICNEFVRFSTYLPDTKVSVFYGGVNIKIHKDLLKNECPHIVVGTPGRVLALAREKDLSLKNVRHFILDECDKMLESLDMRRDVQEIFKMTPHDKQVMMFSATLSKEIRPVCKKFMQDPMEIYVDDEAKLTLHGLVQHYIKLSEMEKTRKLNDLLDALDFNQVVIFVKSVSRAAELNKLLVECNFPSICIHSGMSQEERLTRYKSFKEGHKRILVATDLVGRGIDIERVNIVINYDMPDSADTYLHRVGRAGRFGTKGLAITFVASASDSEVLNQVQERFEVDIKELPEQIDTSTYMPS

SEQ ID NO: 85552 - DNA, 2770 bp, Arabidopsis thaliana
  misc_feature (1)..(2770): Ceres Seq. ID no. 12681035
  misc_feature (1)..(2770): Ortholog of  Ceres SEQ ID NO 14313575 as cited in SEQ ID NO 58703
gtaaccatggcggagaaagtatcggaggacgttatgcttctacacggtgacctcgatttgaaaattgttaaggctaggaggttacctaacatggatatgttctcagaacatttgcgccgtctcttcaccgcctgtaacgcctgtgctagacccaccgataccgatgatgtcgatcccagagataaaggcgaattcggtgataaaaacatccgtagccaccgtaaggttatcaccagcgatccttacgtcaccgtcgtcgttcctcaagcgactctagctcgaacacgtgttttgaaaaactcacaagagcctctttgggacgagaaattcaacatttctatagcgcatccgtttgcttatctcgagttccaggtcaaagacgacgatgttttcggtgctcaaatcattggcacggctaagatcccggttcgagacatcgcatcgggagaacgcatttctggttggtttcctgtactcggtgcttcgggaaaaccgcctaaggcagaaactgctattttcatcgatatgaaatttactccgtttgaccagatccatagctaccgatgtggaatcgccggagatccggagcgtaggggtgttagacggacttatttccctgtgaggaaaggaagtcaggtgaggctttaccaggacgctcatgttatggacggaacgttgccggcgattgggttagataacgggaaagtttatgagcatgggaagtgttgggaagatatatgttatgctatatctgaggctcaccatatgatttacattgttggttggtctatcttccataagattaagcttgttagggaaacaaaagttccaagagataaggatatgacgcttggggaattgctcaaatacaaatcccaggaaggtgttcgagttttgctacttgtatgggatgataagacttctcatgataagtttgggataaaaacgcctggagttatggggacacatgatgaggagactaggaagttcttcaagcattcttctgtgatatgcgttttgtcaccccggtatgccagcagtaagcttgggttgttcaaacaacaggttgttggaactctcttcacgcaccatcaaaagtgtgttcttgtagacactcaggctgttggtaataatcgcaaggtcaccgcttttattggaggtctagatctttgtgatggccgttatgacacacctgagcataggatactccacgatcttgacactgtatttaaggatgatttccacaatcctacatttccagctggtaccaaggccccaagacaaccttggcacgatttgcactgtaggatagatgggcctgcggcatatgatgttctcataaactttgagcagcgatggagaaaggcaacacgatggaaggagtttagcttacgtttaaaggggaaaactcactggcaagatgatgctttgatccggatagggcgtatatcatggattctgagtccagtgtttaaatttctgaaggatggtacttcgataattccagaggacgatccatgtgtttgggtttctaaagaagatgatccagagaactggcatgttcagatattccgttctatcgactcaggatccgtgaaaggatttccaaaatatgaagatgaggctgaggcccagcatctggaatgtgccaagcgtcttgttgtagataaaagcatccagactgcatacatccagacaatcagatctgctcagcatttcatatatatcgagaatcagtatttcctgggttcttcttatgcttggccttcttatagagacgcaggagctgacaatcttattcctatggagttggcactaaagattgttagcaaaatcagagctaaggaaagatttgccgtatatgttgtcataccattgtggcctgaaggcgacccaaagtctggccctgtgcaagaaattctatattggcagagccaaactatgcagatgatgtatgatgttatagcaaaagaactgaaagcggtgcaatcagatgctcatcctctcgattaccttaacttttactgccttggtaaacgagagcagcttccagatgatatgccagccaccaatggcagtgtggtatcagattcttataatttccagcgtttcatgatttacgtgcacgcaaaagggatgatagtagatgatgagtatgtactcatgggatctgctaatatcaaccaaagatctatggcaggcaccaaagatactgaaatcgccatgggcgcataccaacctaatcatacatgggctcacaagggaagacacccacgtggccaggtgtatggatacagaatgtcactatgggcagagcatttaggcaaaactggagatgagtttgtggagccatcagatctggaatgtctgaagaaggtgaacacaatctctgaagaaaactggaaaagattcatagacccgaaattctcagagctacaaggtcacttaataaagtatcctctacaagtagacgttgatggtaaagtaagccctcttcctgattacgagaccttcccagatgttggtggtaagatcattggagctcattccatggctcttcctgacactttaaccacgtaatgtgaatgttcaatgtaaatttcagcatttgttttggggtttcttttgatcctgaataatattagctgaaagtgttgtttgagttgttgtacatttaactgtgttgtttcttttttatacattcttttgtgattgtcgtcaaatatttgttggggtgcaaaatgtagagatcgtgagtgagtgaagaggc

SEQ ID NO: 85553 - protein, 859 aa, Arabidopsis thaliana
  peptide (1)..(859): Ceres Seq. ID no. 12681036
VTMAEKVSEDVMLLHGDLDLKIVKARRLPNMDMFSEHLRRLFTACNACARPTDTDDVDPRDKGEFGDKNIRSHRKVITSDPYVTVVVPQATLARTRVLKNSQEPLWDEKFNISIAHPFAYLEFQVKDDDVFGAQIIGTAKIPVRDIASGERISGWFPVLGASGKPPKAETAIFIDMKFTPFDQIHSYRCGIAGDPERRGVRRTYFPVRKGSQVRLYQDAHVMDGTLPAIGLDNGKVYEHGKCWEDICYAISEAHHMIYIVGWSIFHKIKLVRETKVPRDKDMTLGELLKYKSQEGVRVLLLVWDDKTSHDKFGIKTPGVMGTHDEETRKFFKHSSVICVLSPRYASSKLGLFKQQVVGTLFTHHQKCVLVDTQAVGNNRKVTAFIGGLDLCDGRYDTPEHRILHDLDTVFKDDFHNPTFPAGTKAPRQPWHDLHCRIDGPAAYDVLINFEQRWRKATRWKEFSLRLKGKTHWQDDALIRIGRISWILSPVFKFLKDGTSIIPEDDPCVWVSKEDDPENWHVQIFRSIDSGSVKGFPKYEDEAEAQHLECAKRLVVDKSIQTAYIQTIRSAQHFIYIENQYFLGSSYAWPSYRDAGADNLIPMELALKIVSKIRAKERFAVYVVIPLWPEGDPKSGPVQEILYWQSQTMQMMYDVIAKELKAVQSDAHPLDYLNFYCLGKREQLPDDMPATNGSVVSDSYNFQRFMIYVHAKGMIVDDEYVLMGSANINQRSMAGTKDTEIAMGAYQPNHTWAHKGRHPRGQVYGYRMSLWAEHLGKTGDEFVEPSDLECLKKVNTISEENWKRFIDPKFSELQGHLIKYPLQVDVDGKVSPLPDYETFPDVGGKIIGAHSMALPDTLTT

SEQ ID NO: 85554 - protein, 857 aa, Arabidopsis thaliana; identical to SEQ ID NO: 41444
  peptide (1)..(857): Ceres Seq. ID no. 12681037

SEQ ID NO: 85555 - protein, 848 aa, Arabidopsis thaliana; identical to SEQ ID NO: 41445
  peptide (1)..(848): Ceres Seq. ID no. 12681038

SEQ ID NO: 85556 - DNA, 651 bp, Arabidopsis thaliana
  misc_feature (1)..(651): Ceres Seq. ID no. 12681039
  misc_feature (1)..(651): Ortholog of  Ceres SEQ ID NO 13585437 as cited in SEQ ID NO 65262
atcacgatcgcaacaatggcggctgctgcgaaggagatcctacggcgaccagtggcggcaacaataaggctaaccgttccggcgggaggagcgaggccagccccaccggtaggtccggcgctaggtcagtacaggcttaacctgatggctttctgcaaagacttcaacgctaggactcaaaagtacaaaccagacactccgatggccgtgacgataacggcgttcaaggacaactctttcgaattcaccgtcaagtctccgacggtgtcgtggtacatcaagaaagcagctggagtcgataaaggaagcacacgcccgggtcatttgtcggtgacgacgctatcggtgagacacgtgtacgagatcgcgaaggtgaagcagacggatccgttttgtcagtatatgccgttggaatcgatttgcaaatccatcattggtactgctaattctatgggtatcaagatcgttcaggatttggagtgattttagggtttctgatgaaagagtggaatcaatttgcttctggtaaacgtctttgctttgagtagtaaagtataaaccatgaatgaatttcacagattgttttgtgttttggtgttacttccattgtgttgtttgtttcaatggataattgagctccaaaagctttcc

SEQ ID NO: 85557 - protein, 160 aa, Arabidopsis thaliana; identical to SEQ ID NO: 38269
  peptide (1)..(160): Ceres Seq. ID no. 12681040

SEQ ID NO: 85558 - protein, 155 aa, Arabidopsis thaliana; identical to SEQ ID NO: 38270
  peptide (1)..(155): Ceres Seq. ID no. 12681041

SEQ ID NO: 85559 - protein, 112 aa, Arabidopsis thaliana; identical to SEQ ID NO: 38271
  peptide (1)..(112): Ceres Seq. ID no. 12681042

SEQ ID NO: 85560 - DNA, 2247 bp, Arabidopsis thaliana
  misc_feature (1)..(2247): Ceres Seq. ID no. 12681095
  misc_feature (1)..(2247): Ortholog of  Ceres SEQ ID NO 14310556 as cited in SEQ ID NO 54965
acttattttcgttctcgcaatcatattgttctcacaattgaccaaggaaagagaaatgcgagagattctctgaatttagagagaagcaaaagagtttttttttttttcgagaaccaaaaatggagaatcaagaggaagatgaggtggtgctggcgaaggtgacgtcggaggttgaggataattttgaggatgaagggttggtttcaaattcaacattggagaaagttgctgcagcgaagaagtatattgaaaaccattacaatagacgcatgagacacattcaacaacgtaaagaaaggcgttgggtgctagaacaaaagattgcatctttagatgtatcagaaaaagaacaactcgagttgctggaggatttgcagaggaaagagacagagtatactagattaatgaggaacaggctttgcgttgacgattttgatcttctgagtattatcgggagaggagcttttggtgaggtaagactctgccgtgagaaaaagacaggcaacatttatgctatgaagaagcttaagaagtctgaaatgcttagtagggggcaagttgaacatgttagagctgagaggaacttgctagccgaagttgctagtgactgtattgtgaagctttattattcgttccaagatccagaatatttgtaccttatcatggagtatctgtctggtggtgatgtgatgactttgcttatgagggaagagactttgacggaaactgtggctcggttttacattgcccaaagtgttttggctattgagtccatacataagcataattatgttcacagggatataaaaccagacaatcttctgttggacaagtatggtcatatgaagctgtcggattttggtctttgtaagcctctcgattgtagaaatatttcggctatgaacgtaaatgaacctttgaatgatgagaatataaatgaatcaatcgatggtgatgagaactgctcgataggacgtcgtggaaggcgttggaagagcccactggaacagctgcagcattggcagataaacagaagaaaactggcatattctacggtaggtaccccagattatattgcaccagaggtgttgctgaagaagggatacggtgtagagtgtgactggtggtctttgggggccattatgtatgagatgctcgttggttatccaccattttactccgatgaccctgtaacaacatgtagaaaggtctacttgtaactaaatttacagtagtttccactttgctcttatatcattttgaatattcttgttgatggtaaaatgagattttaagacggtggaagctttctgtgttgggtctgtttttcttaggatctttcacatcttcttttatatctctaaattgacatttgatggaatttagattgtgagctggagaactcatttagtattccccgagggtgcaaggttgacacctgaggcaagagatctcatttgtaggttgctttgtgattctgagcacaggcttggttctcatggagccggagccgagcaaatcaaagctcatacttggttcaaagatgtggaatgggaaaaactctatgagatggatgcagcttttaagccagtggtcaatggagaacttgatacccagaattttatgaaattcgatgaggtggagtgtccaaaaccagcaagaacaggatctggaccgtcatggaaggtgagcataacccctcaaaatatcaattttgtgggctatacgtacagaaactttgacgctgttcgtggttctcgccattctttagatatcaaaggaagcgtttcacctccacgctcatcaactgactctacccgaagtgactctgcaattgattacacaaaactctcaactggtggcgatggctcacaacaataattatcttgcttctaatacttgagacaccaaagctgattcttcaatccagacatcgctttattctacaaagaaaatcctctgtaactatttttttttgatccatgaaacttttttgtttgtttgtcaatgtacagtcataattgcagttgcagagagaagagaagacgttgagaaatctctctgtctcctttttctgcagctgtgttttttgttttgtacgtttttgttgcatctgcccagaattggcgttcatgtatttttctacggcctttttcctagtggcagtttccaaccgtttgttcccgccattggtggttacttagttattgttattagcaacatctaaataaacctatttttatattc

SEQ ID NO: 85561 - protein, 366 aa, Arabidopsis thaliana
  peptide (1)..(366): Ceres Seq. ID no. 12681096
MENQEEDEVVLAKVTSEVEDNFEDEGLVSNSTLEKVAAAKKYIENHYNRRMRHIQQRKERRWVLEQKIASLDVSEKEQLELLEDLQRKETEYTRLMRNRLCVDDFDLLSIIGRGAFGEVRLCREKKTGNIYAMKKLKKSEMLSRGQVEHVRAERNLLAEVASDCIVKLYYSFQDPEYLYLIMEYLSGGDVMTLLMREETLTETVARFYIAQSVLAIESIHKHNYVHRDIKPDNLLLDKYGHMKLSDFGLCKPLDCRNISAMNVNEPLNDENINESIDGDENCSIGRRGRRWKSPLEQLQHWQINRRKLAYSTVGTPDYIAPEVLLKKGYGVECDWWSLGAIMYEMLVGYPPFYSDDPVTTCRKVYL

SEQ ID NO: 85562 - protein, 316 aa, Arabidopsis thaliana
  peptide (1)..(316): Ceres Seq. ID no. 12681097
MRHIQQRKERRWVLEQKIASLDVSEKEQLELLEDLQRKETEYTRLMRNRLCVDDFDLLSIIGRGAFGEVRLCREKKTGNIYAMKKLKKSEMLSRGQVEHVRAERNLLAEVASDCIVKLYYSFQDPEYLYLIMEYLSGGDVMTLLMREETLTETVARFYIAQSVLAIESIHKHNYVHRDIKPDNLLLDKYGHMKLSDFGLCKPLDCRNISAMNVNEPLNDENINESIDGDENCSIGRRGRRWKSPLEQLQHWQINRRKLAYSTVGTPDYIAPEVLLKKGYGVECDWWSLGAIMYEMLVGYPPFYSDDPVTTCRKVYL

SEQ ID NO: 85563 - protein, 271 aa, Arabidopsis thaliana
  peptide (1)..(271): Ceres Seq. ID no. 12681098
MRNRLCVDDFDLLSIIGRGAFGEVRLCREKKTGNIYAMKKLKKSEMLSRGQVEHVRAERNLLAEVASDCIVKLYYSFQDPEYLYLIMEYLSGGDVMTLLMREETLTETVARFYIAQSVLAIESIHKHNYVHRDIKPDNLLLDKYGHMKLSDFGLCKPLDCRNISAMNVNEPLNDENINESIDGDENCSIGRRGRRWKSPLEQLQHWQINRRKLAYSTVGTPDYIAPEVLLKKGYGVECDWWSLGAIMYEMLVGYPPFYSDDPVTTCRKVYL

SEQ ID NO: 85564 - DNA, 1425 bp, Arabidopsis thaliana
  misc_feature (1)..(1425): Ceres Seq. ID no. 12681102
  misc_feature (1)..(1425): Ortholog of  Ceres SEQ ID NO 14302734 as cited in SEQ ID NO 66748
aaaaatctagggttttaaggtttcttatccttcctcttcctccgccagattcttttcttgcgaagatgagcaacgacaaggacagcatgaacatgtccgatctctccaccgctcttaacgaggaggatcgtgccgggcttgttaatgctcttaagaacaagttgcagaatttggctggacaacactctgatgtccttgaaaacttgactccaccagtcaggaagcgtgtcgagtttctaagagagattcagaaccaatatgatgagatggaagcaaaattctttgaggagagagcagctcttgaagctaagtatcaaaagttatatcagcctttatataccaagcgatatgagattgtgaatggtgtggtcgaagttgaaggtgcagctgaagaagtaaaatccgaacaaggagaagataaatcagctgaagagaaaggagtaccagatttctggcttattgcattgaagaacaatgaaattactgcggaagagataactgagcgagatgaaggggctctcaagtatctcaaagatatcaagtggagtagggttgaagaaccaaaagggttcaagcttgagtttttctttgatcagaatccttacttcaagaacactgtcttgaccaagacatatcacatgattgatgaagatgagcctatccttgagaaggccctcgggacggagattgagtggtatcctggaaagtgtttgacacagaagattctaaaaaagaagccaaagaaaggatccaaaaacacaaagccgatcactaagactgaggactgtgagagtttcttcaactttttcagtccacctcaagttcctgacgatgatgaggatcttgatgatgacatggctgatgaactccaaggacaaatggagcatgattatgatatcggttcaacaatcaaagagaaaatcatctcgcatgctgtgtcatggttcactggtgaagctgttgaggcagatgaccttgatattgaggacgacgatgatgagattgatgaagatgatgatgaagaggacgaggaagatgatgaggatgacgaggaggaggatgatgaggatgatgacgaggaggaagaagcagatcaaggaaagaagagcaaaaagaagaaggctggaagaagtcaacttgcggaaggtcaagcaggtgagaggccaccggaatgtaagcagcagtgaagaagtgaagaatcttggcttagttatgatgaagaagaagagtgaagagtgtctttgagccgaggttgtgtttctttaatttgcagagtcatggtccggtttattatatatcagttttgggtgattggtttgctatttaaaaaaaaaaaatgggttctttggtttggtttgtgtctcttgatttttccttttgtaatgatcttatgaatttgtttcgagttaatgtcgttctctggtc

SEQ ID NO: 85565 - protein, 394 aa, Arabidopsis thaliana
  peptide (1)..(394): Ceres Seq. ID no. 12681103
KSRVLRFLILPLPPPDSFLAKMSNDKDSMNMSDLSTALNEEDRAGLVNALKNKLQNLAGQHSDVLENLTPPVRKRVEFLREIQNQYDEMEAKFFEERAALEAKYQKLYQPLYTKRYEIVNGVVEVEGAAEEVKSEQGEDKSAEEKGVPDFWLIALKNNEITAEEITERDEGALKYLKDIKWSRVEEPKGFKLEFFFDQNPYFKNTVLTKTYHMIDEDEPILEKALGTEIEWYPGKCLTQKILKKKPKKGSKNTKPITKTEDCESFFNFFSPPQVPDDDEDLDDDMADELQGQMEHDYDIGSTIKEKIISHAVSWFTGEAVEADDLDIEDDDDEIDEDDDEEDEEDDEDDEEEDDEDDDEEEEADQGKKSKKKKAGRSQLAEGQAGERPPECKQQ

SEQ ID NO: 85566 - protein, 373 aa, Arabidopsis thaliana
  peptide (1)..(373): Ceres Seq. ID no. 12681104
MSNDKDSMNMSDLSTALNEEDRAGLVNALKNKLQNLAGQHSDVLENLTPPVRKRVEFLREIQNQYDEMEAKFFEERAALEAKYQKLYQPLYTKRYEIVNGVVEVEGAAEEVKSEQGEDKSAEEKGVPDFWLIALKNNEITAEEITERDEGALKYLKDIKWSRVEEPKGFKLEFFFDQNPYFKNTVLTKTYHMIDEDEPILEKALGTEIEWYPGKCLTQKILKKKPKKGSKNTKPITKTEDCESFFNFFSPPQVPDDDEDLDDDMADELQGQMEHDYDIGSTIKEKIISHAVSWFTGEAVEADDLDIEDDDDEIDEDDDEEDEEDDEDDEEEDDEDDDEEEEADQGKKSKKKKAGRSQLAEGQAGERPPECKQQ

SEQ ID NO: 85567 - protein, 366 aa, Arabidopsis thaliana
  peptide (1)..(366): Ceres Seq. ID no. 12681105
MNMSDLSTALNEEDRAGLVNALKNKLQNLAGQHSDVLENLTPPVRKRVEFLREIQNQYDEMEAKFFEERAALEAKYQKLYQPLYTKRYEIVNGVVEVEGAAEEVKSEQGEDKSAEEKGVPDFWLIALKNNEITAEEITERDEGALKYLKDIKWSRVEEPKGFKLEFFFDQNPYFKNTVLTKTYHMIDEDEPILEKALGTEIEWYPGKCLTQKILKKKPKKGSKNTKPITKTEDCESFFNFFSPPQVPDDDEDLDDDMADELQGQMEHDYDIGSTIKEKIISHAVSWFTGEAVEADDLDIEDDDDEIDEDDDEEDEEDDEDDEEEDDEDDDEEEEADQGKKSKKKKAGRSQLAEGQAGERPPECKQQ

SEQ ID NO: 85568 - DNA, 1031 bp, Arabidopsis thaliana
  misc_feature (1)..(1031): Ceres Seq. ID no. 12681106
  misc_feature (1)..(1031): Ortholog of  Ceres SEQ ID NO 15171856 as cited in SEQ ID NO 55120
agggaaaggtgaaatgttgacatgctcgcgacagctaaacccagaattgttctatggagtgttaggaggtttgggtcaatttggaattataacgagagccagaattgttttggaccatgcacctaaacgggccaaatggtttcggatgctctacagtgatttcacaacttttacaaaggaccaagaacgtttgatatcaatggcaaacgatattggagtcgactatttagaaggtcaaatatttctatcaaacggtgtcgttgacacctcttttttcccaccttcagatcaatctaaagtcgctgatctagtcaagcaacacggtatcatctatgttcttgaagtagccaagtattatgatgatcccaatctccccatcatcagcaaggttattgacacattaacgaaaacattaagttacttgcccgggttcatatcaatgcacgacgtggcctacttcgatttcttgaaccgtgtacatgtcgaagaaaataaactcagatctttgggattatgggaacttcctcatccttggcttaacctctacgttcctaaatctcggattctcgattttcataacggtgttgtcaaagacattcttcttaagcaaaaatcagcttcgggactcgctcttctctatccaacaaaccggaataaatgggacaatcgtatgtcggcgatgataccagagatcgatgaagatgttatatatattatcggactactacaatccgctaccccaaaggatcttccagaagtggagagcgttaacgagaagataattaggttttgcaaggattcaggtattaagattaagcaatatctaatgcattatactagtaaagaagattggattgagcattttggatcaaaatgggatgatttttcgaagaggaaagatctatttgatcccaagaaactgttatctccagggcaagacatcttttgattaacttaatgtgatatgtcatttgtgaggtctaatatctaaaactataatatagttactatataataatagcattttggtg

SEQ ID NO: 85569 - protein, 315 aa, Arabidopsis thaliana
  peptide (1)..(315): Ceres Seq. ID no. 12681107
GKGEMLTCSRQLNPELFYGVLGGLGQFGIITRARIVLDHAPKRAKWFRMLYSDFTTFTKDQERLISMANDIGVDYLEGQIFLSNGVVDTSFFPPSDQSKVADLVKQHGIIYVLEVAKYYDDPNLPIISKVIDTLTKTLSYLPGFISMHDVAYFDFLNRVHVEENKLRSLGLWELPHPWLNLYVPKSRILDFHNGVVKDILLKQKSASGLALLYPTNRNKWDNRMSAMIPEIDEDVIYIIGLLQSATPKDLPEVESVNEKIIRFCKDSGIKIKQYLMHYTSKEDWIEHFGSKWDDFSKRKDLFDPKKLLSPGQDIF

SEQ ID NO: 85570 - protein, 311 aa, Arabidopsis thaliana
  peptide (1)..(311): Ceres Seq. ID no. 12681108
MLTCSRQLNPELFYGVLGGLGQFGIITRARIVLDHAPKRAKWFRMLYSDFTTFTKDQERLISMANDIGVDYLEGQIFLSNGVVDTSFFPPSDQSKVADLVKQHGIIYVLEVAKYYDDPNLPIISKVIDTLTKTLSYLPGFISMHDVAYFDFLNRVHVEENKLRSLGLWELPHPWLNLYVPKSRILDFHNGVVKDILLKQKSASGLALLYPTNRNKWDNRMSAMIPEIDEDVIYIIGLLQSATPKDLPEVESVNEKIIRFCKDSGIKIKQYLMHYTSKEDWIEHFGSKWDDFSKRKDLFDPKKLLSPGQDIF

SEQ ID NO: 85571 - protein, 267 aa, Arabidopsis thaliana
  peptide (1)..(267): Ceres Seq. ID no. 12681109
MLYSDFTTFTKDQERLISMANDIGVDYLEGQIFLSNGVVDTSFFPPSDQSKVADLVKQHGIIYVLEVAKYYDDPNLPIISKVIDTLTKTLSYLPGFISMHDVAYFDFLNRVHVEENKLRSLGLWELPHPWLNLYVPKSRILDFHNGVVKDILLKQKSASGLALLYPTNRNKWDNRMSAMIPEIDEDVIYIIGLLQSATPKDLPEVESVNEKIIRFCKDSGIKIKQYLMHYTSKEDWIEHFGSKWDDFSKRKDLFDPKKLLSPGQDIF

SEQ ID NO: 85572 - DNA, 4778 bp, Arabidopsis thaliana
  misc_feature (1)..(4778): Ceres Seq. ID no. 12681110
  misc_feature (1)..(4778): Ortholog of  Ceres SEQ ID NO 12618306 as cited in SEQ ID NO 65538
  misc_feature (1)..(4778): Ortholog of  Ceres SEQ ID NO 13658673 as cited in SEQ ID NO 66630
acacacagaacacaacacactctctctctctctctctctctacgattctcgctcactgttcatcgaatccgtcattggatcgattcgaatttggtgtgtgttttctttccaatacctctgattagagatttcagcagatctgaacggaggagcgtcagatcggaatcgtccgtcggtggtttggtaaaaaaaaaaatggaggaagctttagaaatggcgagagccaaggatacaaaagagcgcatggctgctgttgaaaggctgcatcaacttctcgaagcttctaggaagagtttgagtcctgcggaagtgacgtcacttgttgattcttgtttggatctccttaaggatagtaattttagagtctctcaaggtgctcttcaagctcttgcttctgctgctgtcctcgctggtgagcatttgaagcttcatttgaatgctcttgttcctgctgttgtcgagcggcttggtgatagtaagcaacctgttagagatgctgcgaggcgtctgttgacgactctcatggaggtttcatctccgacgattatagtggagagagctggttcgtatgcttggatgcataagagttggagagttagggaagagtttgcgcgtactgttacatcggcgattggtcttttcgcatctacggaacttcctcttcagcgtgttatacttgctccgatacttcagatgttaaatgaccctaatcaagcagttagggaagctgctattttgtgcattgaggagatgtatatgcaaggtgggtctcaatttcgagaagagcttcaacgtcaccatcttccatcgtatatggtgaaggacattaatgctagactagaacgtattgagccacaactgcgttctacagatggccgtagtgcccaccatgttgttaatgaggtgaaggcatcaagtgtcaatcccaaaaagagcagtcccagggcaaaggctcctacgagggagaactctttatttgggggagatgccgacatcactgaaaaacccattgagccaatcaaagtgtactcagagaaggagttaatacgagaatttgagaaaattgctgcaacactcgtcccagagaaagactggtcaatgcgtatttcagctatgcggagggttgaaggacttgttgcaggaggtgcgactgattactcctgctttcgaggtctcctgaagcaacttgttggtcctttaagtactcaattagctgaccggagatctaccattgttaagcaggcctgtcatctcttgtgtctcttatcaaaagagctactgggagattttgaggcatgcgctgagacgtttattccagtgcttttcaagctggttgtgattactgtgcttgtaattgcagaatctgctgataactgcataaaaacgatgctgcgtaactgcaaagctgcccgtgtacttcctcgcatagctgaatcagcaaaacatgaccgtaatgcaattctgcgagcaagatgttgtgaatatgcattgttaacacttgaacattggcctgatgctccagaaattcaacgatcagttgatttatatgaagatctgattagatgctgtgttgcagatgctatgagtgaggtgcgggcaactgctagaatgtgctacagaatgtttgcaaaaacttggccggatcgttctcgccggttgttttcgtcctttgaccctgtcattcaaaggctaataaatgaagaagatggtggaattcataggagacacgcctcaccatctgtccgtgagagacattcccagccttcattttctcagacgtctgctccttctaacctacctggctatggaacatcagctatagtcgctatggatagaagttcaaatttatcatctggaggatctctttcttctgggttactcctttcgcaatcaaaggatgtcaataaaggttctgaacgtagtctggaaagtgtgttacaatcaagcaagcagaaggtcagtgcaattgaaagtatgctccgaggactgcatatatctgatagacaaaatcctgcagcccttcgttcaagtagtttggatctaggagttgaccctccatcgtctcgtgatcctcctttccatgctgttgctccagcatccaatagtcacacaagtagcgcagctgctgaatcaacacatagtatcaacaaaggcagtaatcgcaatggtggccttggtttgtcagatatcatcacccaaattcaagcttcaaaggactcaggaagatcatcttaccgtggcaatctgttgtccgagtctcatcctactttttcatccttgaccgctaaacggggctcagagagaaatgagagaagttctcttgaggaaagcaatgatgccagagaggtgaggcggtttatggctggtcattttgaccgacagcagatggatactgcttatagagatttgactttcagggaatcaaacgctagccatgttcccaatttccagaggccacttttgaggaagaatgtagggggaagaatgtctgcaggccggaggaggagttttgatgatagccaactgcaaattggtgacatatcaaattttgttgatggtccagcttccctgaacgaggcccttaacgacggactgaactcaagttctgattggtgtgccagagttgcagcttttaattttctccaaactctgctgcagcaaggcccaaaaggtgctcaagaagtaattcaaagttttgagaaagtaatgaaactatttctccggcatttggatgatcctcaccacaaggtcgcacaagcagcactgtcgacacttgcagatcttataccatcttgccgaaagccttttgagagctacatggaaagagtcctaccccatgtgttttcacggctaattgaccctaaagaagtagttagacaaccttgctcctcaaccttggaaattgtcagcaaaacctacagtgtggattcccttttacctgcattgcttcgttcactggatgaacagagatcaccaaaggctaaattagctgtgattgaatttgccatcaactccttcaacaggtacgctggtaaccctgaaatttcgggtaatagtggcatcttaaagttgtggctggcaaagttgacgccattaacccgcgacaaaaataccaagttgaaagaagcttccattacttgcatcatatctgtttacaatcattatgattctgcgggactgctaaattacattcttagtttgtcggttgaggagcaaaactctctgagaagagccctcaaacaatatactccccgcatcgaggtggacctgttaaactatatgcagagtaaaaaggaaaaacagagaattaagtcttatgacccatctgatgccattgggacatcatctgaggaaggatatgctggtgcctccaagaagaatatattccttggccggtattctgggggttctattgacagtgatagtggcaggaagtggagttcttcccaggagccaacaatgatcactggtggtgttggtcaaaatgtttccagtggaacccaggaaaagctgtatcagaacgttagaactgggatcagttcagctagtgatctgttgaaccccaaggattctgattacacatttgcttcagctggtcagaattcgatatcaagaactagccccaatggaagctcagaaaacatcgaaatcttggatgacttatctccaccacatttggagaaaaatggtctaaatctgacaagcgttgattccttggaaggaagacatgaaaatgaggtctcccgcgaattagatttaggtcactacatgctcacatctattaaggtcaacacaacaccggaatctggacctagcattcctcagattctacatatgatcaacgggagtgatggaagcccttcttctagcaagaaatctggactccagcaattaattgaagcctctgtagctaacgaggaatcagtttggaccaagtacttcaatcaaattttgacggttgttcttgaagtgctcgatgacgaagatttttcaatcaaagagcttgctctttcattgatttctgaaatgctaaagagccagaaagatgccatggaagactctgttgaaatagtgatcgaaaagctgcttcatgtctcaaaggacaccgttccaaaagtttccactgaagctgagcaatgtttgaccacagtcttgtcccaatacgatcctttcagatgcttaagcgttattgtcccattattggtgacggaagatgagaaaactcttgtcgcttgcataaattgtttaacgaagcttgtgggtaggctctcgcaagaggaattaatggatcaattgtcgtcttttttgcctgcggtttttgaagcatttgggagccaaagcgcggatgtccgcaagacagtggtgttctgtctagtagacatatatataatgcttgggaaagcatttttgccgtatttggaaggtctaaacagcacgcaggttcgtctagtgaccatctatgcaaaccggatctcgcaggctagaaacggtgcccctatcgacgcagacacctgacgagccgcttgtacttatggttcagtgggtttatcttgtgtcttggggtcatattcattattgtttattttgtatatgggtgtgttttccgcgtttcaattttttgggtgtaattttgcaaattggtttttccatttgttgttgcagtgtgtggtctattttgagttgttttgggggaatgtatttattgctttcctctcgtaggacaaaaaaaaaaaatgtattttgacctcgcaactgatgattaaatacctttattagtg

SEQ ID NO: 85573 - protein, 1504 aa, Arabidopsis thaliana
  peptide (1)..(1504): Ceres Seq. ID no. 12681111
THRTQHTLSLSLSLRFSLTVHRIRHWIDSNLVCVFFPIPLIRDFSRSERRSVRSESSVGGLVKKKMEEALEMARAKDTKERMAAVERLHQLLEASRKSLSPAEVTSLVDSCLDLLKDSNFRVSQGALQALASAAVLAGEHLKLHLNALVPAVVERLGDSKQPVRDAARRLLTTLMEVSSPTIIVERAGSYAWMHKSWRVREEFARTVTSAIGLFASTELPLQRVILAPILQMLNDPNQAVREAAILCIEEMYMQGGSQFREELQRHHLPSYMVKDINARLERIEPQLRSTDGRSAHHVVNEVKASSVNPKKSSPRAKAPTRENSLFGGDADITEKPIEPIKVYSEKELIREFEKIAATLVPEKDWSMRISAMRRVEGLVAGGATDYSCFRGLLKQLVGPLSTQLADRRSTIVKQACHLLCLLSKELLGDFEACAETFIPVLFKLVVITVLVIAESADNCIKTMLRNCKAARVLPRIAESAKHDRNAILRARCCEYALLTLEHWPDAPEIQRSVDLYEDLIRCCVADAMSEVRATARMCYRMFAKTWPDRSRRLFSSFDPVIQRLINEEDGGIHRRHASPSVRERHSQPSFSQTSAPSNLPGYGTSAIVAMDRSSNLSSGGSLSSGLLLSQSKDVNKGSERSLESVLQSSKQKVSAIESMLRGLHISDRQNPAALRSSSLDLGVDPPSSRDPPFHAVAPASNSHTSSAAAESTHSINKGSNRNGGLGLSDIITQIQASKDSGRSSYRGNLLSESHPTFSSLTAKRGSERNERSSLEESNDAREVRRFMAGHFDRQQMDTAYRDLTFRESNASHVPNFQRPLLRKNVGGRMSAGRRRSFDDSQLQIGDISNFVDGPASLNEALNDGLNSSSDWCARVAAFNFLQTLLQQGPKGAQEVIQSFEKVMKLFLRHLDDPHHKVAQAALSTLADLIPSCRKPFESYMERVLPHVFSRLIDPKEVVRQPCSSTLEIVSKTYSVDSLLPALLRSLDEQRSPKAKLAVIEFAINSFNRYAGNPEISGNSGILKLWLAKLTPLTRDKNTKLKEASITCIISVYNHYDSAGLLNYILSLSVEEQNSLRRALKQYTPRIEVDLLNYMQSKKEKQRIKSYDPSDAIGTSSEEGYAGASKKNIFLGRYSGGSIDSDSGRKWSSSQEPTMITGGVGQNVSSGTQEKLYQNVRTGISSASDLLNPKDSDYTFASAGQNSISRTSPNGSSENIEILDDLSPPHLEKNGLNLTSVDSLEGRHENEVSRELDLGHYMLTSIKVNTTPESGPSIPQILHMINGSDGSPSSSKKSGLQQLIEASVANEESVWTKYFNQILTVVLEVLDDEDFSIKELALSLISEMLKSQKDAMEDSVEIVIEKLLHVSKDTVPKVSTEAEQCLTTVLSQYDPFRCLSVIVPLLVTEDEKTLVACINCLTKLVGRLSQEELMDQLSSFLPAVFEAFGSQSADVRKTVVFCLVDIYIMLGKAFLPYLEGLNSTQVRLVTIYANRISQARNGAPIDADT

SEQ ID NO: 85574 - protein, 1439 aa, Arabidopsis thaliana
  peptide (1)..(1439): Ceres Seq. ID no. 12681112
MEEALEMARAKDTKERMAAVERLHQLLEASRKSLSPAEVTSLVDSCLDLLKDSNFRVSQGALQALASAAVLAGEHLKLHLNALVPAVVERLGDSKQPVRDAARRLLTTLMEVSSPTIIVERAGSYAWMHKSWRVREEFARTVTSAIGLFASTELPLQRVILAPILQMLNDPNQAVREAAILCIEEMYMQGGSQFREELQRHHLPSYMVKDINARLERIEPQLRSTDGRSAHHVVNEVKASSVNPKKSSPRAKAPTRENSLFGGDADITEKPIEPIKVYSEKELIREFEKIAATLVPEKDWSMRISAMRRVEGLVAGGATDYSCFRGLLKQLVGPLSTQLADRRSTIVKQACHLLCLLSKELLGDFEACAETFIPVLFKLVVITVLVIAESADNCIKTMLRNCKAARVLPRIAESAKHDRNAILRARCCEYALLTLEHWPDAPEIQRSVDLYEDLIRCCVADAMSEVRATARMCYRMFAKTWPDRSRRLFSSFDPVIQRLINEEDGGIHRRHASPSVRERHSQPSFSQTSAPSNLPGYGTSAIVAMDRSSNLSSGGSLSSGLLLSQSKDVNKGSERSLESVLQSSKQKVSAIESMLRGLHISDRQNPAALRSSSLDLGVDPPSSRDPPFHAVAPASNSHTSSAAAESTHSINKGSNRNGGLGLSDIITQIQASKDSGRSSYRGNLLSESHPTFSSLTAKRGSERNERSSLEESNDAREVRRFMAGHFDRQQMDTAYRDLTFRESNASHVPNFQRPLLRKNVGGRMSAGRRRSFDDSQLQIGDISNFVDGPASLNEALNDGLNSSSDWCARVAAFNFLQTLLQQGPKGAQEVIQSFEKVMKLFLRHLDDPHHKVAQAALSTLADLIPSCRKPFESYMERVLPHVFSRLIDPKEVVRQPCSSTLEIVSKTYSVDSLLPALLRSLDEQRSPKAKLAVIEFAINSFNRYAGNPEISGNSGILKLWLAKLTPLTRDKNTKLKEASITCIISVYNHYDSAGLLNYILSLSVEEQNSLRRALKQYTPRIEVDLLNYMQSKKEKQRIKSYDPSDAIGTSSEEGYAGASKKNIFLGRYSGGSIDSDSGRKWSSSQEPTMITGGVGQNVSSGTQEKLYQNVRTGISSASDLLNPKDSDYTFASAGQNSISRTSPNGSSENIEILDDLSPPHLEKNGLNLTSVDSLEGRHENEVSRELDLGHYMLTSIKVNTTPESGPSIPQILHMINGSDGSPSSSKKSGLQQLIEASVANEESVWTKYFNQILTVVLEVLDDEDFSIKELALSLISEMLKSQKDAMEDSVEIVIEKLLHVSKDTVPKVSTEAEQCLTTVLSQYDPFRCLSVIVPLLVTEDEKTLVACINCLTKLVGRLSQEELMDQLSSFLPAVFEAFGSQSADVRKTVVFCLVDIYIMLGKAFLPYLEGLNSTQVRLVTIYANRISQARNGAPIDADT

SEQ ID NO: 85575 - protein, 1433 aa, Arabidopsis thaliana
  peptide (1)..(1433): Ceres Seq. ID no. 12681113
MARAKDTKERMAAVERLHQLLEASRKSLSPAEVTSLVDSCLDLLKDSNFRVSQGALQALASAAVLAGEHLKLHLNALVPAVVERLGDSKQPVRDAARRLLTTLMEVSSPTIIVERAGSYAWMHKSWRVREEFARTVTSAIGLFASTELPLQRVILAPILQMLNDPNQAVREAAILCIEEMYMQGGSQFREELQRHHLPSYMVKDINARLERIEPQLRSTDGRSAHHVVNEVKASSVNPKKSSPRAKAPTRENSLFGGDADITEKPIEPIKVYSEKELIREFEKIAATLVPEKDWSMRISAMRRVEGLVAGGATDYSCFRGLLKQLVGPLSTQLADRRSTIVKQACHLLCLLSKELLGDFEACAETFIPVLFKLVVITVLVIAESADNCIKTMLRNCKAARVLPRIAESAKHDRNAILRARCCEYALLTLEHWPDAPEIQRSVDLYEDLIRCCVADAMSEVRATARMCYRMFAKTWPDRSRRLFSSFDPVIQRLINEEDGGIHRRHASPSVRERHSQPSFSQTSAPSNLPGYGTSAIVAMDRSSNLSSGGSLSSGLLLSQSKDVNKGSERSLESVLQSSKQKVSAIESMLRGLHISDRQNPAALRSSSLDLGVDPPSSRDPPFHAVAPASNSHTSSAAAESTHSINKGSNRNGGLGLSDIITQIQASKDSGRSSYRGNLLSESHPTFSSLTAKRGSERNERSSLEESNDAREVRRFMAGHFDRQQMDTAYRDLTFRESNASHVPNFQRPLLRKNVGGRMSAGRRRSFDDSQLQIGDISNFVDGPASLNEALNDGLNSSSDWCARVAAFNFLQTLLQQGPKGAQEVIQSFEKVMKLFLRHLDDPHHKVAQAALSTLADLIPSCRKPFESYMERVLPHVFSRLIDPKEVVRQPCSSTLEIVSKTYSVDSLLPALLRSLDEQRSPKAKLAVIEFAINSFNRYAGNPEISGNSGILKLWLAKLTPLTRDKNTKLKEASITCIISVYNHYDSAGLLNYILSLSVEEQNSLRRALKQYTPRIEVDLLNYMQSKKEKQRIKSYDPSDAIGTSSEEGYAGASKKNIFLGRYSGGSIDSDSGRKWSSSQEPTMITGGVGQNVSSGTQEKLYQNVRTGISSASDLLNPKDSDYTFASAGQNSISRTSPNGSSENIEILDDLSPPHLEKNGLNLTSVDSLEGRHENEVSRELDLGHYMLTSIKVNTTPESGPSIPQILHMINGSDGSPSSSKKSGLQQLIEASVANEESVWTKYFNQILTVVLEVLDDEDFSIKELALSLISEMLKSQKDAMEDSVEIVIEKLLHVSKDTVPKVSTEAEQCLTTVLSQYDPFRCLSVIVPLLVTEDEKTLVACINCLTKLVGRLSQEELMDQLSSFLPAVFEAFGSQSADVRKTVVFCLVDIYIMLGKAFLPYLEGLNSTQVRLVTIYANRISQARNGAPIDADT

SEQ ID NO: 85576 - DNA, 1313 bp, Arabidopsis thaliana
  misc_feature (1)..(1313): Ceres Seq. ID no. 12681133
  misc_feature (1)..(1313): Ortholog of  Ceres SEQ ID NO 13639663 as cited in SEQ ID NO 57850
  misc_feature (1)..(1313): Ortholog of  Ceres SEQ ID NO 15224330 as cited in SEQ ID NO 58808
aaaagactatcaaaagaagaaacagagcaaatttcattctctcagaacaaatatatacatattaatcagaatcaggaaaagtgaagaagcgaaagagagaagaagatcggatgggagtggattactacaaagtcctccaagtcgatcgcagcgcaagcgacgatgatctcaagaaagcttatcgtaaacttgccatgaaatggcatcccgacaaaaatcccaacaacaaaaaggatgccgaagctatgttcaaacaaatatccgaagcttacgaggtactaagtgatcctcagaagaaagctgtgtatgatcaatatggtgaggaaggtttgaaagggaacgtgccacctccggatgcaggtggagctacttacttctctaccggggatggtccaacgtccttcaggttcaacccgagaaatgcggatgatatatttgctgagttctttggcttctctagcccatttggcggcggaagaggtggtacaagattctctagcagcatgtttggtgataatatgtttgcttctttcggcgaaggaggaggcggtggtggtggctcgatgcatcacggtggagctaggaaggctgctcctatcgaaaacaagttgccttgtagccttgaagatctttacaaaggaaccaccaaaaagatgaggatttctagggagattgctgatgtcagtggcaagacgatgcaggtggaagagattttgaccattgatgtgaaaccaggatggaagaaaggcacaaagatcacgttcccagagaaaggcaatgagcaacccggtgtgattccagcggatttagtcttcataatcgacgagaagcctcacccggttttcactcgagagggtaacgacctcatagtcacacagaagatctcacttgttgaggccttgactggttacacagtgaacctgactactcttgatggtcggagactgacaattccagtcaccaacgtggtccatcccgagtacgaggaagtggtaccgaaggaagggatgccattgcaaaaagaccagactaagagaggtaacttgaggatcaaatttaacatcaagttccctacaaggttaacctcagagcagaagacaggagtgaagaaacttctcggatgaaatgagttatagtcagcacatttcagacaaaacaatgttgaacagaagaggaacaagaaaatcatgttgcagaccacagggattgtgattaaatactgttgtgacctttttgatcgatttgtaacatatgtacgattggatacctcctaataaatttgttactttctctataatcaaaacgcttctaaa

SEQ ID NO: 85577 - protein, 337 aa, Arabidopsis thaliana; identical to SEQ ID NO: 35916
  peptide (1)..(337): Ceres Seq. ID no. 12681134

SEQ ID NO: 85578 - protein, 309 aa, Arabidopsis thaliana; identical to SEQ ID NO: 35917
  peptide (1)..(309): Ceres Seq. ID no. 12681135

SEQ ID NO: 85579 - protein, 292 aa, Arabidopsis thaliana; identical to SEQ ID NO: 35918
  peptide (1)..(292): Ceres Seq. ID no. 12681136

SEQ ID NO: 85580 - DNA, 1198 bp, Arabidopsis thaliana
  misc_feature (1)..(1198): Ceres Seq. ID no. 12681145
  misc_feature (1)..(1198): Ortholog of  Ceres SEQ ID NO 13599444 as cited in SEQ ID NO 517
  misc_feature (1)..(1198): Ortholog of  Ceres SEQ ID NO 15169431 as cited in SEQ ID NO 60449
  misc_feature (1)..(1198): Ortholog of  Ceres SEQ ID NO 12615444 as cited in SEQ ID NO 62593
aaaatcctgatttctgagctttaaaccctaacccctctcttctctcttctccacgccatttccagaattttcagctaatttgcagattatctttgtctctttttcgttgatccaagttttccttgggtgttcgtgaaaagatgaattttaagaatgtcaaagttcccaaaggtcctggtggtggtgttatagctgcggtggttattggggggctcagtctttacggtgctacgcacactctctacaatgtcgatggaggtcatcgagccattgtctttaaccggcttgttggtatcaaagacaaggtctaccctgagggtactcaccttatgattccatggttcgaaaggccaatcatctatgacgttcgtgcaaagccttatctagttgagagcacatctgggagccgtgatctccagatggttaagattgggcttcgggttctcacccgtcctatggctgaccaattaccagaggtataccggtcccttggtgagaattaccgcgagagagtcttgccttctatcatccacgagaccttgaaagctgtggttgctcagtacaacgcaagccaacttattactcagagagagtcggtgagtagagaaatcaggaaaatcctaactctaagagccgcaaacttccacattgcactggatgatgtgtccatcacaggcttgacattcggaaaggagttcacggcagccatagaaggaaagcaggtcgctgctcaagaggccgaacgggctaagttcattgtcgagaaagctgaacaggacaagagaagtgctgttatccgcgccgagggagaagccaagagtgctcagctcattggtcaagcaatcgcaaacaaccaagcgttcttaacactgaggaagatcgaagcagctagagagatcgcacagaccatctctaggtcggcgaacaaggtttacttgagctctaacgatctgttgcttaacctacaggctatggaccttgatgtgaagccgaagaagtagagaatgatatgattaaaccacaccagagctcttcttccataatcgtattttcaattcacggattcttagaccaaaagctatgagttctatcttgtgaatttcagacactatcgtgcgtttgtagtctttcttttgtgagatcaagaagaaaagaaaagatttatgtttttacaagttgtttacatttggtaataatg

SEQ ID NO: 85581 - protein, 286 aa, Arabidopsis thaliana; identical to SEQ ID NO: 27300
  peptide (1)..(286): Ceres Seq. ID no. 12681146

SEQ ID NO: 85582 - protein, 223 aa, Arabidopsis thaliana; identical to SEQ ID NO: 27301
  peptide (1)..(223): Ceres Seq. ID no. 12681147

SEQ ID NO: 85583 - protein, 193 aa, Arabidopsis thaliana; identical to SEQ ID NO: 27302
  peptide (1)..(193): Ceres Seq. ID no. 12681148

SEQ ID NO: 85584 - DNA, 1159 bp, Arabidopsis thaliana
  misc_feature (1)..(1159): Ceres Seq. ID no. 12681176
  misc_feature (1)..(1159): Ortholog of  Ceres SEQ ID NO 12474685 as cited in SEQ ID NO 88
  misc_feature (1)..(1159): Ortholog of  Ceres SEQ ID NO 13638574 as cited in SEQ ID NO 51223
  misc_feature (1)..(1159): Ortholog of  Ceres SEQ ID NO 12610790 as cited in SEQ ID NO 56123
  misc_feature (1)..(1159): Ortholog of  Ceres SEQ ID NO 13655636 as cited in SEQ ID NO 63519
  misc_feature (1)..(1159): Ortholog of  Ceres SEQ ID NO 13655896 as cited in SEQ ID NO 64970
  misc_feature (1)..(1159): Ortholog of  Ceres SEQ ID NO 12627322 as cited in SEQ ID NO 67162
gagcagatatttacccaatcagggattcaggaagagaagcagagaaagaaatggagataacactgaacagtggcttcaagatgccgatcgtcggcttaggagtatggagaatggagaaggaagggattcgagaccttatcctcaatgccatcaagatcggctatcgccatctcgactgtgctgctgattataggaatgagaccgaagttggtgatgctcttacagaagcattcaagactggtctggttaagagggaggatctcttcattacaaccaagctatggaattcagaccatggccatgtcattgaggcctgcaaagacagtctcaagaaacttcaacttgattacctcgatctcttcctcgttcattttcccgtagcaacgaaacacaccggagtagggacaaccgatagtgctttgggcgatgacggggtattggacatagacacgaccatctctctggaaactacatggcacgacatggaaaagcttgtttctatgggtttagtccgcagcattggaatcagtaactatgatgtctttctaacgagagattgcttggcttactccaagatcaaacctgctgtgaatcagatcgagacacatccttacttccaacgtgattctcttgtcaaattctgccagaaacatggtatctgtgtcactgctcatactcctctcggaggtgccacagccaatgccgagtggtttggcaccgtgtcatgcctggatgatccagttctcaaagatgtggccgagaagtacaaaaagacagtggcacaagttgtcctgaggtggggaatccagagaaaaacggtggtgataccaaagacatcaaagcctgcgagattggaagagaactttcaggttttcgacttcgaactatcgaaagaggacatggaagtgatcaaaagcatggagaggaaataccgcacgaaccaaccagccaagttttggaacattgatctctacgcttgatcacactctctctatctacatgaataaatgaagcttaagaagataaacaacgagaagaagccatagctttacctgaaacattctcaaatgtttgtgagcctatctttcatacataaactcatgttgttaaacagattatgatttcttaagtactacaatatcacacattgatggaaagt

SEQ ID NO: 85585 - protein, 325 aa, Arabidopsis thaliana
  peptide (1)..(325): Ceres Seq. ID no. 12681177
ADIYPIRDSGREAEKEMEITLNSGFKMPIVGLGVWRMEKEGIRDLILNAIKIGYRHLDCAADYRNETEVGDALTEAFKTGLVKREDLFITTKLWNSDHGHVIEACKDSLKKLQLDYLDLFLVHFPVATKHTGVGTTDSALGDDGVLDIDTTISLETTWHDMEKLVSMGLVRSIGISNYDVFLTRDCLAYSKIKPAVNQIETHPYFQRDSLVKFCQKHGICVTAHTPLGGATANAEWFGTVSCLDDPVLKDVAEKYKKTVAQVVLRWGIQRKTVVIPKTSKPARLEENFQVFDFELSKEDMEVIKSMERKYRTNQPAKFWNIDLYA

SEQ ID NO: 85586 - protein, 309 aa, Arabidopsis thaliana; identical to SEQ ID NO: 25625
  peptide (1)..(309): Ceres Seq. ID no. 12681178

SEQ ID NO: 85587 - protein, 299 aa, Arabidopsis thaliana; identical to SEQ ID NO: 25626
  peptide (1)..(299): Ceres Seq. ID no. 12681179

SEQ ID NO: 85588 - DNA, 1244 bp, Arabidopsis thaliana
  misc_feature (1)..(1244): Ceres Seq. ID no. 12681180
  misc_feature (1)..(1244): Ortholog of  Ceres SEQ ID NO 14309314 as cited in SEQ ID NO 0
gatccaaccagagccatcatcatccttccaatggctattacttgagaactcttctgattaaacatagcaacaacaacaactcttcttctcctctctttctcacttcaatttagcgatggctgcaactgcaatctcttctctttccttcccagctttgggtcaatcggacaagatctccaatttcgcatcttctcgtcctctcgcctccgcaattcgcatctgcacaaagttttctcgcctttctttgaattcgcgttccacttcgaaatctcttattcactgcatgtccaatgttaccgccgatgtgcctcctgtatcagagacaaagtcgaaattcctaaaagcttacaagcgacccatcccgagtatctacaacacggttttgcaggagctcattgtccagcagcatttgatgaggtataagaagacttatcgttatgatcctgtttttgcccttggatttgtcactgtatatgatcagctcatggaaggatatccgagtgatcaagaccgagatgccatttttaaggcttacattgaagccttgaatgaggatcctaagcaataccgaattgatgctcagaagatggaggaatgggcacgaagtcagacttctgcttcactagttgacttttcctctaaagaaggagatattgaagcagttcttaaggacattgcaggaagagctggtagtaaggaggggtttagttacagcaggttcttcgctgttgggctctttcgtttgcttgagcttgcaagtgctactgatccaactgtcttggacaagctttgtgcatccctaaatatcaacaagaaaagcgtggatcgggacctggatgtgtatcgtaacctgctttcaaagcttgtccaagccaaggaattgcttaaggagtatgtcgagagggagaagaagaagcaaggagaaagagcccaatctcagaaggctaacgaaacaatctccaagtgtctgggagatactctatataacccatctttcttggttgaacggaaatcttagaaaatcatttgtgacttctttttttgttttcttagcaacaactatgcccaagaacatatatatctcatttctaagaacatttcagacgtgtatatgtttgctttttttcctttcaattacatgagtttacataatgttgattcatgtagtattttatacattgatgaggttactgttgtgctgttactagtatatgacaagtttctttaagatttaggcactgtct

SEQ ID NO: 85589 - protein, 300 aa, Arabidopsis thaliana; identical to SEQ ID NO: 50262
  peptide (1)..(300): Ceres Seq. ID no. 12681181

SEQ ID NO: 85590 - protein, 244 aa, Arabidopsis thaliana; identical to SEQ ID NO: 50263
  peptide (1)..(244): Ceres Seq. ID no. 12681182

SEQ ID NO: 85591 - protein, 201 aa, Arabidopsis thaliana; identical to SEQ ID NO: 50264
  peptide (1)..(201): Ceres Seq. ID no. 12681183

SEQ ID NO: 85592 - DNA, 1094 bp, Arabidopsis thaliana
  misc_feature (1)..(1094): Ceres Seq. ID no. 12681184
  misc_feature (1)..(1094): Ortholog of  Ceres SEQ ID NO 15172553 as cited in SEQ ID NO 57496
atggagcttctctgctcaccaacgtctctttcctcctccttcgctctctcttctgctcttttagtccctcgttcgttctccatgccagggacaaggagattcatggttctgtgtagttcccagaaggaaagtcagatgacagtgtcagtaactggagcaactggattcatagggagacgattggttcagagacttcgtgctgataaccacgctatccgggtcttaacacgctctaaatccaaagctgagcaaatatttcctgccaaggacttcccaggtattgtgattgcagaagaatcggagtggaagaactgtgtacaaggctctactgctgttgtgaacttggcaggactgcctattagtacaaggtggtctcccgagatcaagaaagagattaagggcagccggatccgtgtcacctccaaagttgttgacttaatcaataattcaccagcagaagctaggcctaccgttctagttagcgccacggctgttggttactatggtactagtgagacaggagtattcgacgaaaatagtccatcagggaaggactatcttgcagaggtttgcagagaatgggaaggaactgcattgaaagcaaataaggatgttagagtggcacttatccgcattggtgttgttcttggcaaagacggtggagctttggccatgatgataccctttttccaaatgtttgctggaggacctctgggttccggacaacaatggttctcttggattcacgtggatgacttggtgaacttaatttacgaggccctcactaatccatcttataaaggagttattaatgggactgcgccgaatccggttaggcttggggaaatgtgccagcagctaggcagtgttcttagccgaccatcgtggctaccagttcctgactttgcactcaaagctttgctcggagaaggtgccactgtagttctggagggacagaaggtattacctgtaagagccaaagagcttggttttgaattcaagtataaatacgtgaaggatgcactcagagccattatgcaataaggtgacacacataagcatctttgtaaaattggttttgatcacagaaaatc

SEQ ID NO: 85593 - protein, 347 aa, Arabidopsis thaliana; identical to SEQ ID NO: 40612
  peptide (1)..(347): Ceres Seq. ID no. 12681185

SEQ ID NO: 85594 - protein, 320 aa, Arabidopsis thaliana; identical to SEQ ID NO: 40613
  peptide (1)..(320): Ceres Seq. ID no. 12681186

SEQ ID NO: 85595 - protein, 313 aa, Arabidopsis thaliana
  peptide (1)..(313): Ceres Seq. ID no. 12681187
MVLCSSQKESQMTVSVTGATGFIGRRLVQRLRADNHAIRVLTRSKSKAEQIFPAKDFPGIVIAEESEWKNCVQGSTAVVNLAGLPISTRWSPEIKKEIKGSRIRVTSKVVDLINNSPAEARPTVLVSATAVGYYGTSETGVFDENSPSGKDYLAEVCREWEGTALKANKDVRVALIRIGVVLGKDGGALAMMIPFFQMFAGGPLGSGQQWFSWIHVDDLVNLIYEALTNPSYKGVINGTAPNPVRLGEMCQQLGSVLSRPSWLPVPDFALKALLGEGATVVLEGQKVLPVRAKELGFEFKYKYVKDALRAIMQ

SEQ ID NO: 85596 - DNA, 1039 bp, Arabidopsis thaliana
  misc_feature (1)..(1039): Ceres Seq. ID no. 12681188
  misc_feature (1)..(1039): Ortholog of  Ceres SEQ ID NO 14307424 as cited in SEQ ID NO 54228
  misc_feature (1)..(1039): Ortholog of  Ceres SEQ ID NO 13664279 as cited in SEQ ID NO 61603
  misc_feature (1)..(1039): Ortholog of  Ceres SEQ ID NO 13584254 as cited in SEQ ID NO 63465
attcattcgcaaattcgttgaccatatttgatagaatcaagcgatgatgaatcttagggttttgttcctcgctctccttctccttgcatctcctctgcttcaagttgctagatgtcaatcggatgccgaggatcattcaagtcttgttgacgatgttgtgggagaaaacactgatgatgcggttgaggaagatgaccatgatttggatatgaacttgtcctcatttccaggagttgagactgtttgtgttttccccaaaaacagtgccaaattggttccagctggagaagagactgagctccttgttggtcttaaaaatgaagggaaaactagagtaggtgtgatgggaattagggccagcgttcatcttccttatgatcataagttgttggttcagaatctaaccatgttgagacttaacaatgcatccatcccaacgtctcttcaagcaacattcccatacatctttgcagtcagccagtacttgcagcctggagcatttgatctggtgggttatatcatatacgatgtggaaggaaagccataccagagtgtcttctacaatggaaccatagaggtagttgaatctggaggtcttctcagcggcgaatctgttttccttttaacactcggaatcggtctcctcctcctcctcggtctatgggcatacagccaagttcagcgtctcaccaagaaaaccaaaaaggtttccaaggtggaagtaggaactaggtctaccgaggcatcactcgatgaatggctcgagggaactactttggccaagacatcgtctgggaaaacaaagaacaagaagaactaaagtagagctgttttgctccttccagttgttatagactcagcttcggcgttttgaaagagtttccaagtttaaagttcagtcttgaggaaatttagggttttaaacgacactttttttgttccagcattgtactctttagacaatctttacttcttgtcataaatattctcctcatgaaacaagttaacttataaatggtttagatctgtttttcgttgc

SEQ ID NO: 85597 - protein, 258 aa, Arabidopsis thaliana; identical to SEQ ID NO: 20928
  peptide (1)..(258): Ceres Seq. ID no. 12681189

SEQ ID NO: 85598 - protein, 257 aa, Arabidopsis thaliana; identical to SEQ ID NO: 20929
  peptide (1)..(257): Ceres Seq. ID no. 12681190

SEQ ID NO: 85599 - protein, 203 aa, Arabidopsis thaliana; identical to SEQ ID NO: 20930
  peptide (1)..(203): Ceres Seq. ID no. 12681191

SEQ ID NO: 85600 - DNA, 2769 bp, Arabidopsis thaliana
  misc_feature (1)..(2769): Ceres Seq. ID no. 12681246
  misc_feature (1)..(2769): Ortholog of  Ceres SEQ ID NO 13493393 as cited in SEQ ID NO 53713
atgttgacgagtcccagtaacgcacttcacagtagtactccacaattctggccacttcgccggagcaagctttgccgttcccggaatttccctcgttttcactccggcgaacgcagcagcggcggaggaggaaaattgtgctcgctctctcttctctccggaagtggcgccggtaaattcagtgtcagagctctagttaggcctgatgataccgacgacgctgactccgtcggcgatgggtctctggcttttcctaaccacgtttctgtcaaaattccattcggaaatagagagattttagttgagactggtctcatggggagacaagcaagttctgcagtcacggtcacagatggagaaactattgtctacacatccgtttgtctagctgatgttccgagtgagccatcagattttcttcccctttatgttcactatcaggagcgattctcagctgtaggtcgaactagtggtggattttttaagcgagaagggagaaccaaagatcacgaggttctgatttgtaggttgatcgatagacctctacgccccactatgcccaaaggtttctacaatgaaactcagattttatcctgggttttgagctacgatggattacacgcacctgatgctttagctgttacatctgctggaattgctgtagctctttcagaagtaccaaatgcgaaagcgattgcaggagttcgggttggtcttattgggggtgaattcattgtcaatccaaccgtgaaggagatggaagaatcacagctagatttgtttctagctggaacagatactgcaattctaacgatagagggatacagtaattttcttcctgaggaaatgcttctccaagctgttaaagttggacaggatgctgtacaggctacatgcattgctattgaagttttagcaaagaaatatggaaagcctaaaatgcttgacgctatcagattaccacctccagagctatacaagcatgtgaaagaacttgctggtgaggaattgacaaaagcgttacaaattaagagtaaaatatcgagaaggaaagccatatcgtccctggaagaaaaggtcttgacaatactgacagagaagggatatgttattgatgaggtagcttttggaaccatagaagcacaaccggatctgttggaggatgaagacgaggatgaggaagttgttcctgaaggtgaggtggaccaaggcgatgttcacattagacccatccctcggaaacctattcctttactattttctgaagtagatgtcaagctagtcttcaaagaagtatcgtcgaagcttctacgtaggcgaattgttgagggaggtaaaagaagtgatggtcggactctggatgagattcgtccaattaattcaagatgtggactgcttcccagggcacatggaagtactctgttcacacgtggggaaacacaggcactggcagttgttacgcttggtgataaacaaatggcgcagagaattgacaaccttgagggttctgatgaatacaagaggttctatcttcagtacacttttcctccatcgtctgttggtgaagttggacgaattggtgcacccagtagaagagaaataggtcatgggacactagcagagcgagcattggagaccattctacctagtgatgatgactttccttacacaatacgtgttgaaagtacagtaattgaaagcaatggttcttcaagtatggcatctgtttgtggcggttgcttggctttgcaagatgctggagttccagtcaaatgttctgttgctgggatagcaatgggaatggtttgggatactgaagaatttggaggtgatggatctccccttatcctttctgacatcactggagctgaagatgcatctggtgatatggactttaaggttgctgggaatgaagatggcgttaccgcctttcagatggacatcaaggtaggaggaattactttagagataatggaaaaggctctaatacaggcaaaagctgggcgtcgccatattcttgctgaaatggcaaagtgctcaccgcctcccacgctaagcctctcaaaatatgctccattgatacttattatgaaggttcatccaagcaaagtatactctcttattggttctggaggtaagaaagtaaagagcatcattgaagaatctggagttgaggccattgacatgcaagatgatggaactgtcaaaattatggcaattgatgtagcgagtctagaaagggcgaaagcgattattagtggattgacaatggttccctctgttggtgatatctacaggaattgtgaaatcaagtcaatggctccttatggtgcatttgtagagatagcgcctgggcgggaaggtctttgccatatcagtgagctgagtgctgaatggcttgcaaaaccagaggatgcctataaagtaggagaccgcattgacgtcaaattaatagaggtaaatgaaaagggtcagcttcgacttagtgtacgggctttacttcccgaatcagagacagacaaagacagtcagaaacaacagccggcaggtgattctaccaaagacaagagttcgcaaaggaaatatgtaaatacttcgtcaaaggaccgtgcagctgcaggagcatcaaaggtttcatctggggatgaacttgtcctgaagaagaaagatgtaaggagagcaactggtggtagtagtgacaagacaatgaatagcaatagcagtaccaacgaagaaagtttagtcaacggtgaagctacaatcagctag

SEQ ID NO: 85601 - protein, 922 aa, Arabidopsis thaliana
  peptide (1)..(922): Ceres Seq. ID no. 12681247
MLTSPSNALHSSTPQFWPLRRSKLCRSRNFPRFHSGERSSGGGGKLCSLSLLSGSGAGKFSVRALVRPDDTDDADSVGDGSLAFPNHVSVKIPFGNREILVETGLMGRQASSAVTVTDGETIVYTSVCLADVPSEPSDFLPLYVHYQERFSAVGRTSGGFFKREGRTKDHEVLICRLIDRPLRPTMPKGFYNETQILSWVLSYDGLHAPDALAVTSAGIAVALSEVPNAKAIAGVRVGLIGGEFIVNPTVKEMEESQLDLFLAGTDTAILTIEGYSNFLPEEMLLQAVKVGQDAVQATCIAIEVLAKKYGKPKMLDAIRLPPPELYKHVKELAGEELTKALQIKSKISRRKAISSLEEKVLTILTEKGYVIDEVAFGTIEAQPDLLEDEDEDEEVVPEGEVDQGDVHIRPIPRKPIPLLFSEVDVKLVFKEVSSKLLRRRIVEGGKRSDGRTLDEIRPINSRCGLLPRAHGSTLFTRGETQALAVVTLGDKQMAQRIDNLEGSDEYKRFYLQYTFPPSSVGEVGRIGAPSRREIGHGTLAERALETILPSDDDFPYTIRVESTVIESNGSSSMASVCGGCLALQDAGVPVKCSVAGIAMGMVWDTEEFGGDGSPLILSDITGAEDASGDMDFKVAGNEDGVTAFQMDIKVGGITLEIMEKALIQAKAGRRHILAEMAKCSPPPTLSLSKYAPLILIMKVHPSKVYSLIGSGGKKVKSIIEESGVEAIDMQDDGTVKIMAIDVASLERAKAIISGLTMVPSVGDIYRNCEIKSMAPYGAFVEIAPGREGLCHISELSAEWLAKPEDAYKVGDRIDVKLIEVNEKGQLRLSVRALLPESETDKDSQKQQPAGDSTKDKSSQRKYVNTSSKDRAAAGASKVSSGDELVLKKKDVRRATGGSSDKTMNSNSSTNEESLVNGEATIS

SEQ ID NO: 85602 - protein, 817 aa, Arabidopsis thaliana; identical to SEQ ID NO: 71781
  peptide (1)..(817): Ceres Seq. ID no. 12681248

SEQ ID NO: 85603 - protein, 737 aa, Arabidopsis thaliana; identical to SEQ ID NO: 71782
  peptide (1)..(737): Ceres Seq. ID no. 12681249

SEQ ID NO: 85604 - DNA, 1464 bp, Arabidopsis thaliana
  misc_feature (1)..(1464): Ceres Seq. ID no. 12681265
  misc_feature (1)..(1464): Ortholog of  Ceres SEQ ID NO 12364737 as cited in SEQ ID NO 51089
  misc_feature (1)..(1464): Ortholog of  Ceres SEQ ID NO 14306553 as cited in SEQ ID NO 53121
  misc_feature (1)..(1464): Ortholog of  Ceres SEQ ID NO 12581561 as cited in SEQ ID NO 53617
  misc_feature (1)..(1464): Ortholog of  Ceres SEQ ID NO 14316263 as cited in SEQ ID NO 55294
  misc_feature (1)..(1464): Ortholog of  Ceres SEQ ID NO 15176751 as cited in SEQ ID NO 59719
  misc_feature (1)..(1464): Ortholog of  Ceres SEQ ID NO 13597380 as cited in SEQ ID NO 64054
  misc_feature (1)..(1464): Ortholog of  Ceres SEQ ID NO 12625474 as cited in SEQ ID NO 64169
  misc_feature (1)..(1464): Ortholog of  Ceres SEQ ID NO 13597502 as cited in SEQ ID NO 64681
atatcatacgtcaatttataaacgtttcttctcattcgtcatctagtcccattctctgtccataacaatgaatatcaattgttctccattagggtttctaatttcactcttcttcattgttacttttcttgcaccacaagtcaaatctagggctttctttgtctttggtgactctctcgtcgacaatggaaacaacgactacctcgtcaccactgcccgtgccgacaattacccgtatggtatcgactacccgacccgtagacccaccggacgtttctctaacggccttaacattcccgacattatcagtgaggctataggcatgccgtcgactttgccgtaccttagcccgcatctcaccggagaaaatcttctagtcggtgctaattttgcctccgcaggaattggaatcctcaacgacactggaattcaattcgtaaacataattagaatttctaaacagatggaatacttcgaacagtaccagctacgagtgagtgcattgatcggaccagaagctacacaacagctagttaaccaagctcttgtcctaattacactcggtggtaatgatttcgtcaacaattattatctaattccgttttcagctcgttctcgccaatacgcgttaccagactacgttgtgtatctcatttccgaatacggaaagattctcagaaaactctacgaactgggtgcaagacgagttttggtaactggaactggtgcaatgggatgtgctcccgcggagctggctcagcatagccgcaatggcgagtgctatggcgccctccaaacagcagccgctttgttcaatccgcaattagttgatttgatcgcatcagtcaatgctgaaattggtcaagacgtgtttgtagcagccaatgcctatcaaatgaacatggattatctatctaatcctgaacaatttgggtttgtgacatcgaaggtggcatgttgtggacaaggaccgtacaatggcataggactatgcacaccagtctcgaatttgtgtccgaatagagacttatatgcgttttgggatgcgtttcatccgacagagaaagccaataggatcatcgttaatcagatcctgactggttcctccaagtatatgcaccctatgaatcttagcacggccatgctattggattcttctaaaatctagtttaagtgatttctgtcaactaaatgtcaggtcattccttctgtactttgcattgttgttaatgtgttgattaataagttcaatggctacaattagtttaagcatgcaagagagtttttattgtcggtcgtctagtttgatgtctttgcttgttgtatcttgttattttttttattttataaaagaaccgttgtatcttggttagcttagtttagtcttttttggtttgtatgccaattatatcatgtaatatttgaaaacttgtagtgattgatatatgattttcttttctattc

SEQ ID NO: 85605 - protein, 366 aa, Arabidopsis thaliana; identical to SEQ ID NO: 25979
  peptide (1)..(366): Ceres Seq. ID no. 12681266

SEQ ID NO: 85606 - protein, 281 aa, Arabidopsis thaliana; identical to SEQ ID NO: 25980
  peptide (1)..(281): Ceres Seq. ID no. 12681267

SEQ ID NO: 85607 - protein, 234 aa, Arabidopsis thaliana; identical to SEQ ID NO: 25981
  peptide (1)..(234): Ceres Seq. ID no. 12681268

SEQ ID NO: 85608 - DNA, 1131 bp, Arabidopsis thaliana
  misc_feature (1)..(1131): Ceres Seq. ID no. 12681368
  misc_feature (1)..(1131): Ortholog of  Ceres SEQ ID NO 15170760 as cited in SEQ ID NO 52747
  misc_feature (1)..(1131): Ortholog of  Ceres SEQ ID NO 14314335 as cited in SEQ ID NO 57305
  misc_feature (1)..(1131): Ortholog of  Ceres SEQ ID NO 15177588 as cited in SEQ ID NO 60367
acaagccctacaacaaccacaaagcaaaacacttacttagaaagtccagaaacatccattaacacatatggctaaagacgtggaaggacctgatggatttcagacgagagattacgaagatcctccgccaacaccgtttttcgacgcagaggagcttaccaagtggtctttatacagagcagtcatcgccgagttcgtagccactctcctcttcttgtacgtcaccgttttaactgtcattggttacaagattcagtccgacacaaaagccggtggagttgactgcggcggcgtcggaatccttggcatcgcgtgggcttttggtggcatgatcttcatccttgtctactgcaccgccggtatctcaggtggtcacataaaccctgcggtgacgtttggtttgttcttagcccggaaggtatcgctgattagggcggtgctttacatggtggctcagtgtttgggtgctatttgtggagttgggtttgtgaaggcatttcaaagctctcactatgttaattacggtggaggagccaactttctagctgacggctacaatacaggcaccggactcgcggcagagatcatcggaacattcgtgcttgtctacacagtcttctccgctactgatcccaaacgcaacgctagagactcccacgttccggttttggcgccacttccgattgggtttgcggtgtttatggtacatttggccactattccgatcaccggaaccggtatcaacccggctaggagtttcggagccgccgtaatctttaacaagagcaagccatgggatgaccactggatattctgggtgggaccattcattggagctacgatagctgcattttatcaccaattcgttctaagggcctcaggctccaagtccctcggttcattcagaagtgcagccaacgtttaaacttagccacgaaagaaaaaaagtgtgcctacaattatgtagaaacatatcctcttttccactcgtatcttagcttcttcctattttctatttctaactgtgtgattccatattaaatcgagtgaaatgtttttcaattcatctttgcaacgtatgtaagtttggtgtattgagaaaaaaaatcgagaaagacaactttttcttcg

SEQ ID NO: 85609 - protein, 285 aa, Arabidopsis thaliana; identical to SEQ ID NO: 28819
  peptide (1)..(285): Ceres Seq. ID no. 12681369

SEQ ID NO: 85610 - protein, 198 aa, Arabidopsis thaliana; identical to SEQ ID NO: 28820
  peptide (1)..(198): Ceres Seq. ID no. 12681370

SEQ ID NO: 85611 - protein, 159 aa, Arabidopsis thaliana; identical to SEQ ID NO: 28821
  peptide (1)..(159): Ceres Seq. ID no. 12681371

SEQ ID NO: 85612 - DNA, 1197 bp, Arabidopsis thaliana
  misc_feature (1)..(1197): Ceres Seq. ID no. 12681384
  misc_feature (1)..(1197): Ortholog of  Ceres SEQ ID NO 12586556 as cited in SEQ ID NO 64667
  misc_feature (1)..(1197): Ortholog of  Ceres SEQ ID NO 13660894 as cited in SEQ ID NO 67475
atgctggaggattcttcaagctctgtcaagcgagatggatggagtttcgatgcttatggtttatcatccgccgtgagatcttgtgggttgaatcgagactttagaaccggttctgggtttcattgtttagcgttgaaaggtgggtttatctcagatgtctacttaggaagttctctggtcgttttgtacagagattctggtgaagtagagaatgcatataaagtgtttgaagaaatgcctgagaggaatgtggtttcatggacggctatgatttcagggtttgcgcaagaatggcgagttgatatctgcttgaagctttattcaaagatgagaaagtcaacctctgatccgaatgattacacattcacggctctcttgagcgcttgcacgggaagcggagccctagggcaaggaagaagtgttcattgtcagacactccacatgggattgaagtcgtatctacatatctcaaactctctcatctcgatgtactgcaaatgcggtgatttgaaggatgcttttcgtatctttgaccagttttcaaacaaagacgttgtttcttggaactctatgattgctggttacgcgcagcacggccttgcaatgcaagcaatcgagctctttgaattaatgatgcctaaaagcggaacaaagccagatgcaatcacatatctaggagttttgtcatcgtgtagacacgcaggtcttgtaaaagaaggaagaaagttcttcaatttgatggcggaacacggcctgaaaccagaactcaaccattactcttgtctagtcgatcttctcgggagatttggtctgttgcaagaagccctggaactgatcgagaacatgccaatgaaaccaaactcagtcatatggggatctctgctattctcttgccgtgttcacggcgatgtctggaccggaatcagagctgcagaggaacgactaatgcttgaacctgattgcgcagccacgcatgtccagctggcaaatctttacgccagtgtagggtactggaaagaagcggcgacagtgaggaagctgatgaaagataaaggactgaagacgaatccgggttgcagttggatcgagatcaataactatgttttcatgtttaaagctgaagatggtagcaactgtagaatgctagagattgttcatgttcttcattgtctcattgatcacatggagttcctctaa

SEQ ID NO: 85613 - protein, 398 aa, Arabidopsis thaliana; identical to SEQ ID NO: 70580
  peptide (1)..(398): Ceres Seq. ID no. 12681385

SEQ ID NO: 85614 - protein, 320 aa, Arabidopsis thaliana; identical to SEQ ID NO: 70581
  peptide (1)..(320): Ceres Seq. ID no. 12681386

SEQ ID NO: 85615 - protein, 309 aa, Arabidopsis thaliana
  peptide (1)..(309): Ceres Seq. ID no. 12681387
MISGFAQEWRVDICLKLYSKMRKSTSDPNDYTFTALLSACTGSGALGQGRSVHCQTLHMGLKSYLHISNSLISMYCKCGDLKDAFRIFDQFSNKDVVSWNSMIAGYAQHGLAMQAIELFELMMPKSGTKPDAITYLGVLSSCRHAGLVKEGRKFFNLMAEHGLKPELNHYSCLVDLLGRFGLLQEALELIENMPMKPNSVIWGSLLFSCRVHGDVWTGIRAAEERLMLEPDCAATHVQLANLYASVGYWKEAATVRKLMKDKGLKTNPGCSWIEINNYVFMFKAEDGSNCRMLEIVHVLHCLIDHMEFL

SEQ ID NO: 85616 - DNA, 1155 bp, Arabidopsis thaliana
  misc_feature (1)..(1155): Ceres Seq. ID no. 12681440
  misc_feature (1)..(1155): Ortholog of  Ceres SEQ ID NO 12625899 as cited in SEQ ID NO 69079
  misc_feature (1)..(1155): Ortholog of  Ceres SEQ ID NO 15180366 as cited in SEQ ID NO 0
atgtatggtggaaaaagttacatactcaaagggagtgtatcactttccttgatcatcctcattcttttggtgacaacactcctggtttccgcaaaaaaccagcctcgcatttctctgattgaagtaaaaacttgtaacttggcaaagggggaatgggttgaagacaagaagcggccattgtattctggttttgaatgtaaacaatggttatcaaacatattttcctgcagggtaatgggcagacccgacttctcatttgagggttaccggtggcagccagaaggttgcaacataccagagtttaacagagtcaacttcttgagaagaatgcagaacaagactatagcatttataggagactccttgggaagggaacaatttcaatccctgatgtgtatggccactggaggtaaagagagtccggaggttcaaaacgtgggatcggagtatggtcttgtgatacctaaaggagctcctcgtcctggtggttgggcttataggtttccgaccacaaacacaacggttttgtcttattggtcagctagtttaacagatttggtaccgatgaacaatacagatccacctcatcttattgcaatgcatcttgaccgtccaccagcattcataagaaactaccttcaccgtttccatgtattggttctaaacaccggtcaccattggagcagagataagatagaaaaaaatcattgggtgatgcacgtaaatggaacacgtgtcgaaggcggatatttcaagaacgttgaaaacgctaaaatttttacaatacacagcctggtgaagtggcttgatgcacaacttccattgcatccacggttgaaagctttctttacgacgatttcccctaggcatgaaaagtgtaacaatactatccctttgtctagaggaagcaaaatcacaggcgaaggtggatcgctcgatacaatagttgagagtgctgtgaatgggacaagggtcaagattcttgacataactgcactttctaaactaagagatgaagctcatatcgcagggtgtaaactcaaaccgaaaaaggcgagtaacgtgacttcagctccaacgttcaacgattgcttgcattggtgcttacccgggatcccggatacttggaatgaacttctcatagcacagctttga

SEQ ID NO: 85617 - protein, 384 aa, Arabidopsis thaliana; identical to SEQ ID NO: 70547
  peptide (1)..(384): Ceres Seq. ID no. 12681441

SEQ ID NO: 85618 - protein, 306 aa, Arabidopsis thaliana
  peptide (1)..(306): Ceres Seq. ID no. 12681442
MGRPDFSFEGYRWQPEGCNIPEFNRVNFLRRMQNKTIAFIGDSLGREQFQSLMCMATGGKESPEVQNVGSEYGLVIPKGAPRPGGWAYRFPTTNTTVLSYWSASLTDLVPMNNTDPPHLIAMHLDRPPAFIRNYLHRFHVLVLNTGHHWSRDKIEKNHWVMHVNGTRVEGGYFKNVENAKIFTIHSLVKWLDAQLPLHPRLKAFFTTISPRHEKCNNTIPLSRGSKITGEGGSLDTIVESAVNGTRVKILDITALSKLRDEAHIAGCKLKPKKASNVTSAPTFNDCLHWCLPGIPDTWNELLIAQL

SEQ ID NO: 85619 - protein, 275 aa, Arabidopsis thaliana
  peptide (1)..(275): Ceres Seq. ID no. 12681443
MQNKTIAFIGDSLGREQFQSLMCMATGGKESPEVQNVGSEYGLVIPKGAPRPGGWAYRFPTTNTTVLSYWSASLTDLVPMNNTDPPHLIAMHLDRPPAFIRNYLHRFHVLVLNTGHHWSRDKIEKNHWVMHVNGTRVEGGYFKNVENAKIFTIHSLVKWLDAQLPLHPRLKAFFTTISPRHEKCNNTIPLSRGSKITGEGGSLDTIVESAVNGTRVKILDITALSKLRDEAHIAGCKLKPKKASNVTSAPTFNDCLHWCLPGIPDTWNELLIAQL

SEQ ID NO: 85620 - DNA, 1299 bp, Arabidopsis thaliana
  misc_feature (1)..(1299): Ceres Seq. ID no. 12681452
  misc_feature (1)..(1299): Ortholog of  Ceres SEQ ID NO 14312320 as cited in SEQ ID NO 59385
atggcaggatgtgcaatgaatcttcagttctcaagtgttgtgaaagtgagaaacgagatctcttcttttgggatttgtaatcgagactttgtatttagagatttagccaaggcaatgaaagtgcctgttttgcggattagaggtggttcaggtaggcaaaggtcgaggcttttcgtggttaatatgtctcaatctcccattgagccacaatctggtggttttgcggctactgaacaaattaaaggagaaggtgataatagtatcttagggaaagacaatgttagaaacttaggaactgatcagcttgagaatttggatattgatggtaatgttggagatggttttaatggtagtgatggtaatgggggtggtggaggaggtggaaatggaggagaaggtgatggtgaaggtgaagactacgaagaaaaagagtttggaccgatattgaaatttgaagaggtcatgaaggagactgaagctagaggagctactcttccatctgatatgttggaagctgctaagaactatgggatccgcaaagtgcttctccttaggtacttggatttgcagagctcagcagggcttcttgggtttgctataagatcatgggctatgcttcgtaacagaatgttggctgatccatctttcctcttcaaaataggggctgagatagtcattgattcttgctgtgccactgttgctgaagttcaaaagagagggaaagatttctgggcggagtttgagttgtatgttgctgatcttttagttggaactgtggttaacattgctctggtcggtatgttggcgccttatgttcgttttggacaaccttccgcatcacctggcttcttaggacgcatggtttttgcatataatgcgcttcctagcagtgtttttgaagctgaaaggccaggatgtagattttccgctcaacagagacttgctacatacttctacaagggtataatgtatggtgcagttggatttggatgtggcattgtaggtcaaggcattgcaaatcttatcatgactgccaaacgaaacataaataaatcagaagagaacatcccggtaccaccgctaatcaagagtgcagctctctggggtgtattcttgagtgtttcttcgaatactcgttatcaaatcatcaatggtctagaaagagtggtcgaagcatcaccttttgccaagaaattccctccggcggctatggccttcacagttggtgtacggttggccaataacatctacggcggaatgcagtttgtggattgggcaagattgagcggttgtcagtga

SEQ ID NO: 85621 - protein, 432 aa, Arabidopsis thaliana
  peptide (1)..(432): Ceres Seq. ID no. 12681453
MAGCAMNLQFSSVVKVRNEISSFGICNRDFVFRDLAKAMKVPVLRIRGGSGRQRSRLFVVNMSQSPIEPQSGGFAATEQIKGEGDNSILGKDNVRNLGTDQLENLDIDGNVGDGFNGSDGNGGGGGGGNGGEGDGEGEDYEEKEFGPILKFEEVMKETEARGATLPSDMLEAAKNYGIRKVLLLRYLDLQSSAGLLGFAIRSWAMLRNRMLADPSFLFKIGAEIVIDSCCATVAEVQKRGKDFWAEFELYVADLLVGTVVNIALVGMLAPYVRFGQPSASPGFLGRMVFAYNALPSSVFEAERPGCRFSAQQRLATYFYKGIMYGAVGFGCGIVGQGIANLIMTAKRNINKSEENIPVPPLIKSAALWGVFLSVSSNTRYQIINGLERVVEASPFAKKFPPAAMAFTVGVRLANNIYGGMQFVDWARLSGCQ

SEQ ID NO: 85622 - protein, 427 aa, Arabidopsis thaliana
  peptide (1)..(427): Ceres Seq. ID no. 12681454
MNLQFSSVVKVRNEISSFGICNRDFVFRDLAKAMKVPVLRIRGGSGRQRSRLFVVNMSQSPIEPQSGGFAATEQIKGEGDNSILGKDNVRNLGTDQLENLDIDGNVGDGFNGSDGNGGGGGGGNGGEGDGEGEDYEEKEFGPILKFEEVMKETEARGATLPSDMLEAAKNYGIRKVLLLRYLDLQSSAGLLGFAIRSWAMLRNRMLADPSFLFKIGAEIVIDSCCATVAEVQKRGKDFWAEFELYVADLLVGTVVNIALVGMLAPYVRFGQPSASPGFLGRMVFAYNALPSSVFEAERPGCRFSAQQRLATYFYKGIMYGAVGFGCGIVGQGIANLIMTAKRNINKSEENIPVPPLIKSAALWGVFLSVSSNTRYQIINGLERVVEASPFAKKFPPAAMAFTVGVRLANNIYGGMQFVDWARLSGCQ

SEQ ID NO: 85623 - protein, 394 aa, Arabidopsis thaliana
  peptide (1)..(394): Ceres Seq. ID no. 12681455
MKVPVLRIRGGSGRQRSRLFVVNMSQSPIEPQSGGFAATEQIKGEGDNSILGKDNVRNLGTDQLENLDIDGNVGDGFNGSDGNGGGGGGGNGGEGDGEGEDYEEKEFGPILKFEEVMKETEARGATLPSDMLEAAKNYGIRKVLLLRYLDLQSSAGLLGFAIRSWAMLRNRMLADPSFLFKIGAEIVIDSCCATVAEVQKRGKDFWAEFELYVADLLVGTVVNIALVGMLAPYVRFGQPSASPGFLGRMVFAYNALPSSVFEAERPGCRFSAQQRLATYFYKGIMYGAVGFGCGIVGQGIANLIMTAKRNINKSEENIPVPPLIKSAALWGVFLSVSSNTRYQIINGLERVVEASPFAKKFPPAAMAFTVGVRLANNIYGGMQFVDWARLSGCQ

SEQ ID NO: 85624 - DNA, 2274 bp, Arabidopsis thaliana
  misc_feature (1)..(2274): Ceres Seq. ID no. 12681468
  misc_feature (1)..(2274): Ortholog of  Ceres SEQ ID NO 14307817 as cited in SEQ ID NO 54722
atggctgtttcactaccattgtttcaatttatactctttcttcttcttcttcttctttcaagaacggtttatgcatacttaatcggagtcggaagctatgacatcactggtcctgccgctgatgtcaacatgatgggctacgcaaactcagatcaaatcgcttccggtattcatttccggttacgagctcgtgccttcatcgtcgctgagcctcaaggtaaccgcgtcgtgtttgtcaatctcgacgcttgtatggcttctcaaatcgttacaatcaaagttcttgagcgtctcaaagcaaggtatggtgagctttacacagagaagaatgtagcaataagtggaattcacacacatgctggaccaggaggatatcttcaatacgtcacatatattgtgacgtctcttggatttgttcgtcaatcttttgacgttgttgttaacggcattgagcaaagcattgtccaagcacacgaaagcctacgtcctggttctgcttttgttaacaaaggggatcttttggatgctggtgtgaatcgaagtccgagttcttatctgaacaatcctgcagctgagaggagtaaatataagtatgatgttgataaggaaatgactcttgttaagtttgttgattctcagttgggacctactggtagttttaactggtttgctactcatgggacttccatgagtcggactaactcgttgattagtggagataacaaaggcgctgcagctcggtttatggaggattggtttgagaatggacagaagaattctgttagctctagaaacatccctcggagagtatcaaccattgtttctgatttcagtagaaaccagagtagacttttggatattgcggctacttataagtcatctagaggacattctgtggataagtcccttgatgttaaaacccgagtaagaaacggttcgaagcgtaaatttgtctctgccttctgtcaatcaaactgtggtgatgtgagtccaaatactcttggtaccttttgcattgacactggactgccttgtgatttcaatcacagtacctgcaatggacagaacgagttgtgctatggccgtggtccgggctaccctgatgaatttgagagtacacgtatcattggagaaaagcaattcaaaatggctgtggaactttttaacaaagctacagagaagctgcaggggaaaattggttaccaacatgcgtatctagatttctcgaatcttgatgtcacagttcctaaagcaggcggtggctctgagacggttaagacatgtccagctgcaatggggtttggttttgctgctggaacaactgatggtccaggtgcttttgatttcaaacaaggagatgatcagggtaatgtgttttggagactagtgaggaatgtgttaagaactcctggtccagaacaggtccaatgccaaaaaccaaaacccattttacttgacactggtgagatgaaagaaccatatgactgggcgccttcaattcttccgattcagatacttcgcattggccaattagtcatcctcagtgttcccggagagttcacaacaatggctggaagacgtctccgtgacgctatcaagtcttttctcatttcttcggaccccaaggaattcagcaacaacatgcatgtcgtaatcgcaggtctcaccaacacctattctcagtacatcgccactttcgaagagtacgaggttcaaagatacgagggcgcctcaacgttatacggacgacacacactcactgcttatatccaagagttcaagaaactagccacagctttagttaacggtctaacactcccacgtggtccgcaacctcctgaccttttagacaaacagatcagtttactatcccctgtggttgtagactcaactcctctaggagtcaaattcggtgacgtcaaagctgatgtacctccaaagtcaacgttcaggagaggtcaacaagttaacgcaacgttttggtcaggatgtcctcgaaatgatttgatgactgaaggatcattcgctgtggtggagacgctgcgtgagggagggaaatgggctccggtgtatgatgacgatgacttcagtttgaagttcaagtggtcgagaccggcaaagctgagttcggagagccaagccacgattgagtggagggtaccggaatctgcggtagccggagtttatagaataagacattatggagcttctaagtcgttgtttggatccattagtagcttctctggttcttctagtgcctttgtagttgtatga

SEQ ID NO: 85625 - protein, 757 aa, Arabidopsis thaliana
  peptide (1)..(757): Ceres Seq. ID no. 12681469
MAVSLPLFQFILFLLLLLLSRTVYAYLIGVGSYDITGPAADVNMMGYANSDQIASGIHFRLRARAFIVAEPQGNRVVFVNLDACMASQIVTIKVLERLKARYGELYTEKNVAISGIHTHAGPGGYLQYVTYIVTSLGFVRQSFDVVVNGIEQSIVQAHESLRPGSAFVNKGDLLDAGVNRSPSSYLNNPAAERSKYKYDVDKEMTLVKFVDSQLGPTGSFNWFATHGTSMSRTNSLISGDNKGAAARFMEDWFENGQKNSVSSRNIPRRVSTIVSDFSRNQSRLLDIAATYKSSRGHSVDKSLDVKTRVRNGSKRKFVSAFCQSNCGDVSPNTLGTFCIDTGLPCDFNHSTCNGQNELCYGRGPGYPDEFESTRIIGEKQFKMAVELFNKATEKLQGKIGYQHAYLDFSNLDVTVPKAGGGSETVKTCPAAMGFGFAAGTTDGPGAFDFKQGDDQGNVFWRLVRNVLRTPGPEQVQCQKPKPILLDTGEMKEPYDWAPSILPIQILRIGQLVILSVPGEFTTMAGRRLRDAIKSFLISSDPKEFSNNMHVVIAGLTNTYSQYIATFEEYEVQRYEGASTLYGRHTLTAYIQEFKKLATALVNGLTLPRGPQPPDLLDKQISLLSPVVVDSTPLGVKFGDVKADVPPKSTFRRGQQVNATFWSGCPRNDLMTEGSFAVVETLREGGKWAPVYDDDDFSLKFKWSRPAKLSSESQATIEWRVPESAVAGVYRIRHYGASKSLFGSISSFSGSSSAFVVV

SEQ ID NO: 85626 - protein, 714 aa, Arabidopsis thaliana
  peptide (1)..(714): Ceres Seq. ID no. 12681470
MMGYANSDQIASGIHFRLRARAFIVAEPQGNRVVFVNLDACMASQIVTIKVLERLKARYGELYTEKNVAISGIHTHAGPGGYLQYVTYIVTSLGFVRQSFDVVVNGIEQSIVQAHESLRPGSAFVNKGDLLDAGVNRSPSSYLNNPAAERSKYKYDVDKEMTLVKFVDSQLGPTGSFNWFATHGTSMSRTNSLISGDNKGAAARFMEDWFENGQKNSVSSRNIPRRVSTIVSDFSRNQSRLLDIAATYKSSRGHSVDKSLDVKTRVRNGSKRKFVSAFCQSNCGDVSPNTLGTFCIDTGLPCDFNHSTCNGQNELCYGRGPGYPDEFESTRIIGEKQFKMAVELFNKATEKLQGKIGYQHAYLDFSNLDVTVPKAGGGSETVKTCPAAMGFGFAAGTTDGPGAFDFKQGDDQGNVFWRLVRNVLRTPGPEQVQCQKPKPILLDTGEMKEPYDWAPSILPIQILRIGQLVILSVPGEFTTMAGRRLRDAIKSFLISSDPKEFSNNMHVVIAGLTNTYSQYIATFEEYEVQRYEGASTLYGRHTLTAYIQEFKKLATALVNGLTLPRGPQPPDLLDKQISLLSPVVVDSTPLGVKFGDVKADVPPKSTFRRGQQVNATFWSGCPRNDLMTEGSFAVVETLREGGKWAPVYDDDDFSLKFKWSRPAKLSSESQATIEWRVPESAVAGVYRIRHYGASKSLFGSISSFSGSSSAFVVV

SEQ ID NO: 85627 - protein, 713 aa, Arabidopsis thaliana
  peptide (1)..(713): Ceres Seq. ID no. 12681471
MGYANSDQIASGIHFRLRARAFIVAEPQGNRVVFVNLDACMASQIVTIKVLERLKARYGELYTEKNVAISGIHTHAGPGGYLQYVTYIVTSLGFVRQSFDVVVNGIEQSIVQAHESLRPGSAFVNKGDLLDAGVNRSPSSYLNNPAAERSKYKYDVDKEMTLVKFVDSQLGPTGSFNWFATHGTSMSRTNSLISGDNKGAAARFMEDWFENGQKNSVSSRNIPRRVSTIVSDFSRNQSRLLDIAATYKSSRGHSVDKSLDVKTRVRNGSKRKFVSAFCQSNCGDVSPNTLGTFCIDTGLPCDFNHSTCNGQNELCYGRGPGYPDEFESTRIIGEKQFKMAVELFNKATEKLQGKIGYQHAYLDFSNLDVTVPKAGGGSETVKTCPAAMGFGFAAGTTDGPGAFDFKQGDDQGNVFWRLVRNVLRTPGPEQVQCQKPKPILLDTGEMKEPYDWAPSILPIQILRIGQLVILSVPGEFTTMAGRRLRDAIKSFLISSDPKEFSNNMHVVIAGLTNTYSQYIATFEEYEVQRYEGASTLYGRHTLTAYIQEFKKLATALVNGLTLPRGPQPPDLLDKQISLLSPVVVDSTPLGVKFGDVKADVPPKSTFRRGQQVNATFWSGCPRNDLMTEGSFAVVETLREGGKWAPVYDDDDFSLKFKWSRPAKLSSESQATIEWRVPESAVAGVYRIRHYGASKSLFGSISSFSGSSSAFVVV

SEQ ID NO: 85628 - DNA, 1614 bp, Arabidopsis thaliana
  misc_feature (1)..(1614): Ceres Seq. ID no. 12681472
  misc_feature (1)..(1614): Ortholog of  Ceres SEQ ID NO 13594317 as cited in SEQ ID NO 57796
atggcgacagtaggatccctgaaacctctgcaccattcctcatgttcatcgagtttccctcggaatccgatcgtaaaccggaaagcccttcttggttttgtgtttgattctgcccggaaaaaccagattcgatgtgagaatttacgatattcatcggaaagcgatgggaagagaagaaatgcggcggcgaagaagaggaatcaatccccggaaagatgtgcggcggagggagtactgaccggaggaggggggtcggaggcgattgcggaggtgaggacgatgatgcctgagaggattaaggtagtgatattgacggcgtgcatgatgtgtctatgtaacgccgacagagttgttatgtccgtcgcggtggttccactcgccgataagcttggctggtcgagttctttcttaggggtagttcagtcctccttcctatggggttacattttttcatccgttatcggaggggcattggtggatcggtatggaggaaaaagagtgttggcttggggtgtggcattgtggtccttagccactctactcactccttgggcagctgcacactcgaccttagccttattgtgtgtccgcgccttttttggcctcgctgaaggcgttgcaatgccctccatgaccaccctactctctcggtggtttccaatggatgaacgagcgagtgcggttggtatatctatggccgggtttcacatgggaaatgttgtgggacttctgttgacgccactcatgttatcttccataggaatctctggtccatttattctttttgcatccttaggtctattgtgggtatccacttggtcaagcggagttacaaacaaccctcaggacagtcctttcatcactaggtcagaactcaggcttatccaggctggaaaaccagttcaaccgtcaaccatttcgccgaaaccaaacccatctttgcgacttcttttgtcgaaattgcctacttgggcgatcatttttgctaatgtgactaacaactggggatactttgttcttctctcatggatgcctgtttacttccagacggtgtttaatgtgaatttgaagcaagcagcttggtttagcgctcttccatgggcgacaatggcgatctcaggttactatgcaggagcagcatcggacttcttgataagaactggtcactctgtaacctcagtacgaaagatcatgcaatctattggatttatgggtcccgggctgtctctgctctgcctcaacttcgcaaagtcgccttcttgtgcagcggttttcatgaccattgcattgagcttgagttcctttagccaagctggatttctcctcaatatgcaagacatcgcaccgcaatatgctgatggtggatcttttcttcttcttcttttgcatcgattttgtttcttgctgaaaaagttagggtttgtatatctggtgtgcgagacaggtatttcgaattgtgcgggtacgttggctgcgatcgtaagtacaatagggacgggatattttgtgcagtggctcggctcttttcaggcgttcttgacggttacggcctttctttactttgcaaccaccgtgttttggctcctctttgcaaccggagaacgagtcttctag

SEQ ID NO: 85629 - protein, 537 aa, Arabidopsis thaliana
  peptide (1)..(537): Ceres Seq. ID no. 12681473
MATVGSLKPLHHSSCSSSFPRNPIVNRKALLGFVFDSARKNQIRCENLRYSSESDGKRRNAAAKKRNQSPERCAAEGVLTGGGGSEAIAEVRTMMPERIKVVILTACMMCLCNADRVVMSVAVVPLADKLGWSSSFLGVVQSSFLWGYIFSSVIGGALVDRYGGKRVLAWGVALWSLATLLTPWAAAHSTLALLCVRAFFGLAEGVAMPSMTTLLSRWFPMDERASAVGISMAGFHMGNVVGLLLTPLMLSSIGISGPFILFASLGLLWVSTWSSGVTNNPQDSPFITRSELRLIQAGKPVQPSTISPKPNPSLRLLLSKLPTWAIIFANVTNNWGYFVLLSWMPVYFQTVFNVNLKQAAWFSALPWATMAISGYYAGAASDFLIRTGHSVTSVRKIMQSIGFMGPGLSLLCLNFAKSPSCAAVFMTIALSLSSFSQAGFLLNMQDIAPQYADGGSFLLLLLHRFCFLLKKLGFVYLVCETGISNCAGTLAAIVSTIGTGYFVQWLGSFQAFLTVTAFLYFATTVFWLLFATGERVF

SEQ ID NO: 85630 - protein, 444 aa, Arabidopsis thaliana
  peptide (1)..(444): Ceres Seq. ID no. 12681474
MMPERIKVVILTACMMCLCNADRVVMSVAVVPLADKLGWSSSFLGVVQSSFLWGYIFSSVIGGALVDRYGGKRVLAWGVALWSLATLLTPWAAAHSTLALLCVRAFFGLAEGVAMPSMTTLLSRWFPMDERASAVGISMAGFHMGNVVGLLLTPLMLSSIGISGPFILFASLGLLWVSTWSSGVTNNPQDSPFITRSELRLIQAGKPVQPSTISPKPNPSLRLLLSKLPTWAIIFANVTNNWGYFVLLSWMPVYFQTVFNVNLKQAAWFSALPWATMAISGYYAGAASDFLIRTGHSVTSVRKIMQSIGFMGPGLSLLCLNFAKSPSCAAVFMTIALSLSSFSQAGFLLNMQDIAPQYADGGSFLLLLLHRFCFLLKKLGFVYLVCETGISNCAGTLAAIVSTIGTGYFVQWLGSFQAFLTVTAFLYFATTVFWLLFATGERVF

SEQ ID NO: 85631 - protein, 443 aa, Arabidopsis thaliana
  peptide (1)..(443): Ceres Seq. ID no. 12681475
MPERIKVVILTACMMCLCNADRVVMSVAVVPLADKLGWSSSFLGVVQSSFLWGYIFSSVIGGALVDRYGGKRVLAWGVALWSLATLLTPWAAAHSTLALLCVRAFFGLAEGVAMPSMTTLLSRWFPMDERASAVGISMAGFHMGNVVGLLLTPLMLSSIGISGPFILFASLGLLWVSTWSSGVTNNPQDSPFITRSELRLIQAGKPVQPSTISPKPNPSLRLLLSKLPTWAIIFANVTNNWGYFVLLSWMPVYFQTVFNVNLKQAAWFSALPWATMAISGYYAGAASDFLIRTGHSVTSVRKIMQSIGFMGPGLSLLCLNFAKSPSCAAVFMTIALSLSSFSQAGFLLNMQDIAPQYADGGSFLLLLLHRFCFLLKKLGFVYLVCETGISNCAGTLAAIVSTIGTGYFVQWLGSFQAFLTVTAFLYFATTVFWLLFATGERVF

SEQ ID NO: 85632 - DNA, 1137 bp, Arabidopsis thaliana
  misc_feature (1)..(1137): Ceres Seq. ID no. 12681499
  misc_feature (1)..(1137): Ortholog of  Ceres SEQ ID NO 15174875 as cited in SEQ ID NO 56464
atggggtcaattcgtggtgaccttcagccgctctttgtcatgccaccacctcccctcgatgaagattgtgatgatatcttcaattctgacgaatcttcatgggggttgttgagcttgtcctgcttcgcgtcggtttgtctgatttttggtgtttacggtagtgaaactgtctggcttggacctaactcgtccattcttgttaaaccaagttccatctttgtcaaaagcattaaggtgaaggagcttgatttttcaaagcctggacttcagctatatggattcaatggtcaatctactcctagtggttattttggatggccatactacttaaatagaggaacgcatatgaatatatcttataacattttacctaaaggttctgcagttcggcttgtgatcactgaaggctctcaagttataggaatgccattcttctatcggtcgtcgctgaaggatattgcatttcgtgacaccgcttggtcatggaatctaattcaggggagtggtatgattcaattggatataagtaagtctaaaggttattatcttactgtggctaacttgaagaggaaggacatagaggtggaactggatattgatgtgaaggctgtcttgtatgatactaaacaatcatcctacaattgttccttcagcaatggcgagtgctcattcaaaatgaatgaaaggtaccctgttgaaaattatgctgtcgtaacttcaccagcactgggtcagggagtatccatcgatgatgaatggtatatcgagttgtcatatcaacctagattgattgcatatggaagcttcacaggtgtgttgctttccttcatgctggtagctatacacttctgcaacaagttaaagtgctgtggtggagagggatttttatccggagatgattcagtgagaacatgtctacttgcagacaaaggtgacaatgattgttgtaatgatgtcgaagcaagtaacaaaagtctctgtgccatttgttttgatgctccaagagattgttgtttcctcccgtgtggccattgcgtctcctgttaccaatgcggaacaaagataaaaagaaccaaggggaggtgtccaatatgtcgaaagaaaatgatacatgtgaagcgaatctatacagcttaa

SEQ ID NO: 85633 - protein, 378 aa, Arabidopsis thaliana
  peptide (1)..(378): Ceres Seq. ID no. 12681500
MGSIRGDLQPLFVMPPPPLDEDCDDIFNSDESSWGLLSLSCFASVCLIFGVYGSETVWLGPNSSILVKPSSIFVKSIKVKELDFSKPGLQLYGFNGQSTPSGYFGWPYYLNRGTHMNISYNILPKGSAVRLVITEGSQVIGMPFFYRSSLKDIAFRDTAWSWNLIQGSGMIQLDISKSKGYYLTVANLKRKDIEVELDIDVKAVLYDTKQSSYNCSFSNGECSFKMNERYPVENYAVVTSPALGQGVSIDDEWYIELSYQPRLIAYGSFTGVLLSFMLVAIHFCNKLKCCGGEGFLSGDDSVRTCLLADKGDNDCCNDVEASNKSLCAICFDAPRDCCFLPCGHCVSCYQCGTKIKRTKGRCPICRKKMIHVKRIYTA

SEQ ID NO: 85634 - protein, 365 aa, Arabidopsis thaliana
  peptide (1)..(365): Ceres Seq. ID no. 12681501
MPPPPLDEDCDDIFNSDESSWGLLSLSCFASVCLIFGVYGSETVWLGPNSSILVKPSSIFVKSIKVKELDFSKPGLQLYGFNGQSTPSGYFGWPYYLNRGTHMNISYNILPKGSAVRLVITEGSQVIGMPFFYRSSLKDIAFRDTAWSWNLIQGSGMIQLDISKSKGYYLTVANLKRKDIEVELDIDVKAVLYDTKQSSYNCSFSNGECSFKMNERYPVENYAVVTSPALGQGVSIDDEWYIELSYQPRLIAYGSFTGVLLSFMLVAIHFCNKLKCCGGEGFLSGDDSVRTCLLADKGDNDCCNDVEASNKSLCAICFDAPRDCCFLPCGHCVSCYQCGTKIKRTKGRCPICRKKMIHVKRIYTA

SEQ ID NO: 85635 - protein, 263 aa, Arabidopsis thaliana
  peptide (1)..(263): Ceres Seq. ID no. 12681502
MNISYNILPKGSAVRLVITEGSQVIGMPFFYRSSLKDIAFRDTAWSWNLIQGSGMIQLDISKSKGYYLTVANLKRKDIEVELDIDVKAVLYDTKQSSYNCSFSNGECSFKMNERYPVENYAVVTSPALGQGVSIDDEWYIELSYQPRLIAYGSFTGVLLSFMLVAIHFCNKLKCCGGEGFLSGDDSVRTCLLADKGDNDCCNDVEASNKSLCAICFDAPRDCCFLPCGHCVSCYQCGTKIKRTKGRCPICRKKMIHVKRIYTA

SEQ ID NO: 85636 - DNA, 1530 bp, Arabidopsis thaliana
  misc_feature (1)..(1530): Ceres Seq. ID no. 12681521
  misc_feature (1)..(1530): Ortholog of  Ceres SEQ ID NO 15176922 as cited in SEQ ID NO 55251
atggcggcggtcgctacctccttctgtttctctccccatcgatcgccgtcacgttttggaaaccctaattcatccattcgaagaacaatcgtctgtaaatcatctcctcgcgatgaatctccagccgtctccacttcttctcagcgaccggaaaagcagcagaatcctctgacttcacagaataaaccggatcatgatcacaaaccggatcctgggattggtaaaattggaatggagataatgtcaattgcattacctgctgcattagctttagctgctgatcctataacatctcttgtcgacactgccttcgttggccatattggttctgcggaattagctgcagtaggagtgtcagtttctgtattcaatttggtgtcgaagctcttcaatgttcctttactaaatgtcacaacatcgtttgttgcggaggagcaagcaattgctgctaaggatgataatgattctatagaaacaagcaagaaagtgctgccttcggtttcaacttcattagttcttgctgctggagttggtattgcagaggccattgcgctatctctcgggtctgatttcttgatggatgtcatggctataccttttgattcaccaatgcggataccagcagagcagttcctcagacttcgagcgtatggtgcaccaccaattgttgttgcattggctgcgcaaggagcttttcgagttgcggggaatgtacttaatgcggtattggatccaatcctgatatttgtccttggttttggtatctctggtgctgcggctgctactgtgatttctgaatacttgattgcatttattcttctatggaagttgaatgagaatgtagttttgctctctcctcaaatcaaagtgggaagagccaaccagtacctcaaatcaggtgggcttctcattggtagaacggtggctttgcttgtgccattcacattagctacttcgttagcagctcaaaatggacccactcaaatggctggccatcaaatcgtcttggaaatctggttggctgtctctttactcaccgatgctttagccattgctgcacagagtcttcttgccaccacttactctcaaggagaatacaaacaagcccgggaagttctcttcggagtccttcaagtaggtttagcaactggaactggtttggctgctgtattgttcatcactttcgaaccattttcaagcttattcacaacggattcagaagttttaaagattgctttgtcagggaccttatttgtggctggatctcaaccggtgaatgctctagcgtttgttttggatgggctctattatggtgtctctgacttcggatttgccgcttattctatggtgattgtcggattcatatcttccttgttcatgcttgtggctgcaccaacgtttggccttgccgggatctggactggtttgttcctcttcatggcgttgcggttggttgctggagcctggagattggggacaagaaccggtccatggaaaatgctatggtctgctccagagaagccagaatga

SEQ ID NO: 85637 - protein, 509 aa, Arabidopsis thaliana
  peptide (1)..(509): Ceres Seq. ID no. 12681522
MAAVATSFCFSPHRSPSRFGNPNSSIRRTIVCKSSPRDESPAVSTSSQRPEKQQNPLTSQNKPDHDHKPDPGIGKIGMEIMSIALPAALALAADPITSLVDTAFVGHIGSAELAAVGVSVSVFNLVSKLFNVPLLNVTTSFVAEEQAIAAKDDNDSIETSKKVLPSVSTSLVLAAGVGIAEAIALSLGSDFLMDVMAIPFDSPMRIPAEQFLRLRAYGAPPIVVALAAQGAFRVAGNVLNAVLDPILIFVLGFGISGAAAATVISEYLIAFILLWKLNENVVLLSPQIKVGRANQYLKSGGLLIGRTVALLVPFTLATSLAAQNGPTQMAGHQIVLEIWLAVSLLTDALAIAAQSLLATTYSQGEYKQAREVLFGVLQVGLATGTGLAAVLFITFEPFSSLFTTDSEVLKIALSGTLFVAGSQPVNALAFVLDGLYYGVSDFGFAAYSMVIVGFISSLFMLVAAPTFGLAGIWTGLFLFMALRLVAGAWRLGTRTGPWKMLWSAPEKPE

SEQ ID NO: 85638 - protein, 432 aa, Arabidopsis thaliana
  peptide (1)..(432): Ceres Seq. ID no. 12681523
MEIMSIALPAALALAADPITSLVDTAFVGHIGSAELAAVGVSVSVFNLVSKLFNVPLLNVTTSFVAEEQAIAAKDDNDSIETSKKVLPSVSTSLVLAAGVGIAEAIALSLGSDFLMDVMAIPFDSPMRIPAEQFLRLRAYGAPPIVVALAAQGAFRVAGNVLNAVLDPILIFVLGFGISGAAAATVISEYLIAFILLWKLNENVVLLSPQIKVGRANQYLKSGGLLIGRTVALLVPFTLATSLAAQNGPTQMAGHQIVLEIWLAVSLLTDALAIAAQSLLATTYSQGEYKQAREVLFGVLQVGLATGTGLAAVLFITFEPFSSLFTTDSEVLKIALSGTLFVAGSQPVNALAFVLDGLYYGVSDFGFAAYSMVIVGFISSLFMLVAAPTFGLAGIWTGLFLFMALRLVAGAWRLGTRTGPWKMLWSAPEKPE

SEQ ID NO: 85639 - protein, 429 aa, Arabidopsis thaliana
  peptide (1)..(429): Ceres Seq. ID no. 12681524
MSIALPAALALAADPITSLVDTAFVGHIGSAELAAVGVSVSVFNLVSKLFNVPLLNVTTSFVAEEQAIAAKDDNDSIETSKKVLPSVSTSLVLAAGVGIAEAIALSLGSDFLMDVMAIPFDSPMRIPAEQFLRLRAYGAPPIVVALAAQGAFRVAGNVLNAVLDPILIFVLGFGISGAAAATVISEYLIAFILLWKLNENVVLLSPQIKVGRANQYLKSGGLLIGRTVALLVPFTLATSLAAQNGPTQMAGHQIVLEIWLAVSLLTDALAIAAQSLLATTYSQGEYKQAREVLFGVLQVGLATGTGLAAVLFITFEPFSSLFTTDSEVLKIALSGTLFVAGSQPVNALAFVLDGLYYGVSDFGFAAYSMVIVGFISSLFMLVAAPTFGLAGIWTGLFLFMALRLVAGAWRLGTRTGPWKMLWSAPEKPE

SEQ ID NO: 85640 - DNA, 612 bp, Arabidopsis thaliana
  misc_feature (1)..(612): Ceres Seq. ID no. 12681538
  misc_feature (1)..(612): Ortholog of  Ceres SEQ ID NO 15174406 as cited in SEQ ID NO 0
atcatccatcacatctcctcttgcaaaccaacgtaaaacactaactaagagatcaatatggctggagtgatgaagttggcatgcatggtcttggcttgcatgattgtggccggtccaatcacagcgaacgcgcttatgagttgtggcaccgtcaacggcaacctggcagggtgcattgcctacttgacccgaggtgctccacttacccaagggtgctgcaacggcgttactaaccttaaaaacatggccagtacaaccccagaccgtcagcaagcttgccgttgccttcaatctgccgctaaagccgttggtcccggtctcaacactgcccgtgcagctggacttcctagcgcatgcaaagtcaatattccttacaaaatcagcgccagcaccaactgcaacaccgtgaggtgatgagcgacggtcaaatgaagctactagcggatgtttcgaatattatataatcgatgagataatattaaataaagatgttcgaatggctgtactcttttcaatttcctgtctttttttatcgtggcgtttctattatgtgatcgtctgtactatgttcgcaaacaacgttctttgaatttcagacttgaagtttaagtt

SEQ ID NO: 85641 - protein, 118 aa, Arabidopsis thaliana; identical to SEQ ID NO: 30562
  peptide (1)..(118): Ceres Seq. ID no. 12681539

SEQ ID NO: 85642 - protein, 114 aa, Arabidopsis thaliana; identical to SEQ ID NO: 30563
  peptide (1)..(114): Ceres Seq. ID no. 12681540

SEQ ID NO: 85643 - protein, 109 aa, Arabidopsis thaliana; identical to SEQ ID NO: 30564
  peptide (1)..(109): Ceres Seq. ID no. 12681541

SEQ ID NO: 85644 - DNA, 1031 bp, Arabidopsis thaliana
  misc_feature (1)..(1031): Ceres Seq. ID no. 12681550
  misc_feature (1)..(1031): Ortholog of  Ceres SEQ ID NO 15173410 as cited in SEQ ID NO 61812
gatatatctctagtctagacattatttgtctacaaacgttttgtattgacttggccatctcattccaacaagatacaactcatcactccaaacattcaacttccatataaaccattcccttccgatctcactttccaaatcactcttcacactttaactaagcaaaccaataatggctaccactcgtctaactctagctcctctcctcctcatcgcagccgtactactcgcaaccaaggcaacggctcagccggcagcccccgctccagagcctgctggtcccatcaacctcactgcgatcctcgaaaaaggtggtcaattcactactttcatccatcttctaaacatcactcaagtcggtagtcaagtgaacattcaagtcaatagttcatccgaaggtatgacggtgttcgcaccaacagacaatgcttttcaaaaccttaaacccggaaccctaaaccagttaagccctgacgatcaagttaaactcattctctaccacgttagccccaaatattacagtatggatgatctcctctccgtgagtaacccggttaggactcaagcttctggccgagacaacggtgtttacgggcttaacttcaccggccaaacaaaccaaatcaatgtctctactggttatgtggagacacgtattagcaattcgttgaggcaacaacgtcctctcgcagtttatgttgtcgacatggttttgttgcccggtgagatgttcggagagcacaagctttcgccgattgctcctgcccctaaatctaaatccggtggggttaccgatgactccggctccactaagaaggcagcgtcaccgtcggataagtcaggctccggtgagaagaaagtcggactagggtttggtcttggacttattgtcttatgtttgaaatttctcttttgaaaatttaatagcaaagatttgttttgctttctattgattttatcctgcgatgtgaggtataaatatgaaatttgttgattaagttccgtgaaataaaatgtgagatttttaataa

SEQ ID NO: 85645 - protein, 247 aa, Arabidopsis thaliana
  peptide (1)..(247): Ceres Seq. ID no. 12681551
MATTRLTLAPLLLIAAVLLATKATAQPAAPAPEPAGPINLTAILEKGGQFTTFIHLLNITQVGSQVNIQVNSSSEGMTVFAPTDNAFQNLKPGTLNQLSPDDQVKLILYHVSPKYYSMDDLLSVSNPVRTQASGRDNGVYGLNFTGQTNQINVSTGYVETRISNSLRQQRPLAVYVVDMVLLPGEMFGEHKLSPIAPAPKSKSGGVTDDSGSTKKAASPSDKSGSGEKKVGLGFGLGLIVLCLKFLF

SEQ ID NO: 85646 - protein, 171 aa, Arabidopsis thaliana; identical to SEQ ID NO: 25079
  peptide (1)..(171): Ceres Seq. ID no. 12681552

SEQ ID NO: 85647 - protein, 130 aa, Arabidopsis thaliana; identical to SEQ ID NO: 25080
  peptide (1)..(130): Ceres Seq. ID no. 12681553

SEQ ID NO: 85648 - DNA, 1380 bp, Arabidopsis thaliana
  misc_feature (1)..(1380): Ceres Seq. ID no. 12681615
  misc_feature (1)..(1380): Ortholog of  Ceres SEQ ID NO 13595900 as cited in SEQ ID NO 69289
atggatcgtgtggttggtggtaagttcaagctcggacgaaagcttggaagtggctcatttggtgaaattttcctaggagtgaatgtacaaactggagaagaagtggctgttaagcttgaacctctccgagctaggcatcctcagcttcattacgagtcaaagctttatatgcttctccaaggaggaactggtattcctcacctcaaatggtttggtgttgagggtgaattcaactgtatggtgatcgaccttctcggtcctagtatggaagaatttttcaactattgcagtcgatccttctctcttaagacagttctaatgctcgcagatcaaatgataaatagagtggagtatatgcatgttaaaggcttccttcatcgtgatattaagccagataactttttgatgggtcttggacgcaaagcaaaccaggtgtacatcattgactatgggcttgccaagaagtatagagatcttcaaacacacaagcatattccatacagggaaaacaagaaccttactggaacagctcgatatgcaagtgttaacacccatcttggaattggtgagtctttttttatcgcttctcatattttccctagccttccttggcaaggccttcgtgcaggtaccaaaaagcagaagtatgacaagatcagtgaaaagaaaagactaacaccagtggaggtcctctgtaaaaactttccacctgagttcacatcgtattttctctatgtgcgttcactacggtttgaagacaaaccagattattcatacctaaagaggcttttcagagacctatttatccgagaaggttatcagtttgactatgtatttgattggacaatattgaggtatccacagttcggctccagttccagctcgaattccaaaccaagaccaactttaagaccagctatgaatattccagtaccatctgccgacaaagcggaaaagcctccaattggacaggacagccgtgagaggttctcaggtgttttcgaggcatacaccagaagaaatggctcaggaaccggcgttcaagctgatcagtctagtagaccaagaacctcagagaatgttcttgcatccaaggacacgcaaaaccaggagagaccaaactctttatctaggaacctgagttcgtcaagaaaagcaattgctgggtcaagtgttcgagccacttcctcagctgatttcacagagaatcgattaagcagactcatcccaaacaatgatcggtcttctacaactctgaggacccagttcgctccttcgtcctcctcagtagccacaaaagctgcaccaacgagagccgctcgtgacattaccctccagagccttgagctcctcagtattgggaacagcaagaggaagtga

SEQ ID NO: 85649 - protein, 459 aa, Arabidopsis thaliana
  peptide (1)..(459): Ceres Seq. ID no. 12681616
MDRVVGGKFKLGRKLGSGSFGEIFLGVNVQTGEEVAVKLEPLRARHPQLHYESKLYMLLQGGTGIPHLKWFGVEGEFNCMVIDLLGPSMEEFFNYCSRSFSLKTVLMLADQMINRVEYMHVKGFLHRDIKPDNFLMGLGRKANQVYIIDYGLAKKYRDLQTHKHIPYRENKNLTGTARYASVNTHLGIGESFFIASHIFPSLPWQGLRAGTKKQKYDKISEKKRLTPVEVLCKNFPPEFTSYFLYVRSLRFEDKPDYSYLKRLFRDLFIREGYQFDYVFDWTILRYPQFGSSSSSNSKPRPTLRPAMNIPVPSADKAEKPPIGQDSRERFSGVFEAYTRRNGSGTGVQADQSSRPRTSENVLASKDTQNQERPNSLSRNLSSSRKAIAGSSVRATSSADFTENRLSRLIPNNDRSSTTLRTQFAPSSSSVATKAAPTRAARDITLQSLELLSIGNSKRK

SEQ ID NO: 85650 - protein, 403 aa, Arabidopsis thaliana
  peptide (1)..(403): Ceres Seq. ID no. 12681617
MLLQGGTGIPHLKWFGVEGEFNCMVIDLLGPSMEEFFNYCSRSFSLKTVLMLADQMINRVEYMHVKGFLHRDIKPDNFLMGLGRKANQVYIIDYGLAKKYRDLQTHKHIPYRENKNLTGTARYASVNTHLGIGESFFIASHIFPSLPWQGLRAGTKKQKYDKISEKKRLTPVEVLCKNFPPEFTSYFLYVRSLRFEDKPDYSYLKRLFRDLFIREGYQFDYVFDWTILRYPQFGSSSSSNSKPRPTLRPAMNIPVPSADKAEKPPIGQDSRERFSGVFEAYTRRNGSGTGVQADQSSRPRTSENVLASKDTQNQERPNSLSRNLSSSRKAIAGSSVRATSSADFTENRLSRLIPNNDRSSTTLRTQFAPSSSSVATKAAPTRAARDITLQSLELLSIGNSKRK

SEQ ID NO: 85651 - protein, 380 aa, Arabidopsis thaliana
  peptide (1)..(380): Ceres Seq. ID no. 12681618
MVIDLLGPSMEEFFNYCSRSFSLKTVLMLADQMINRVEYMHVKGFLHRDIKPDNFLMGLGRKANQVYIIDYGLAKKYRDLQTHKHIPYRENKNLTGTARYASVNTHLGIGESFFIASHIFPSLPWQGLRAGTKKQKYDKISEKKRLTPVEVLCKNFPPEFTSYFLYVRSLRFEDKPDYSYLKRLFRDLFIREGYQFDYVFDWTILRYPQFGSSSSSNSKPRPTLRPAMNIPVPSADKAEKPPIGQDSRERFSGVFEAYTRRNGSGTGVQADQSSRPRTSENVLASKDTQNQERPNSLSRNLSSSRKAIAGSSVRATSSADFTENRLSRLIPNNDRSSTTLRTQFAPSSSSVATKAAPTRAARDITLQSLELLSIGNSKRK

SEQ ID NO: 85652 - DNA, 1155 bp, Arabidopsis thaliana
  misc_feature (1)..(1155): Ceres Seq. ID no. 12681669
  misc_feature (1)..(1155): Ortholog of  Ceres SEQ ID NO 14301765 as cited in SEQ ID NO 61955
  misc_feature (1)..(1155): Ortholog of  Ceres SEQ ID NO 12618205 as cited in SEQ ID NO 65153
  misc_feature (1)..(1155): Ortholog of  Ceres SEQ ID NO 12620986 as cited in SEQ ID NO 66720
gttttgttctttcatagtcttctagatctgtagtttttttccgcgaccgcccaaaaaattctctgatcagacggtcgattggatcggagatttaaggtaaagaaaaaatggcgcaacaatcgttgatctacagtttcgtagctcgcggcacggtgatcctcgttgagttcactgatttcaaaggtaatttcacctcaatcgctgctcagtgcctccagaagcttccgtcttcgaacaacaagttcacctacaactgcgacggtcataccttcaattaccttgtcgaagatggattcacctattgtgttgttgcggttgattctgctgggaggcaaattcccatgtcctttttggaaagagtaaaagaagattttaacaagcgatatggtggtggaaaggctgcaactgctcaagcaaacagcttgaataaggagtttggctctaaactgaaagagcatatgcagtattgcatggatcatcctgatgagattagcaagcttgctaaggtgaaggcgcaagtgtcagaagttaagggtgtaatgatggaaaacattgagaaggttcttgaccgtggtgagaaaattgagcttttggtggacaaaaccgaaaatcttcgctcacaggcacaagatttcagaacaacaggaacgcagatgagaagaaagatgtggcttcagaacatgaagataaaactcatagtgctcgccatcattatcgcactgattctcatcatcgtgctctcagtttgccatgggtttaagtgttaagcccagaaaattcaaaacttctgagatctttctcactcggtacatcgtagtgccttctcttttattgttcgatcttcaatctaatgtttctgcttgaattggttttgtatagatagacatatatgtatgctactcatttgctatattgcttgcatctgatgacattgatcccttgcgaaccagtcagtacttgacaagagatccgaaactattaaatgattttgttgactgaagattgcattgtggtggtgatgataaaaatttgagattgtattgacgattatacggcgtgatgtgtgctggttactttaaatttagataagagtagtgccctctctatatcgttactagggatggtagtacatatatatacgtacgtcatattccg

SEQ ID NO: 85653 - protein, 219 aa, Arabidopsis thaliana; identical to SEQ ID NO: 23487
  peptide (1)..(219): Ceres Seq. ID no. 12681670

SEQ ID NO: 85654 - protein, 141 aa, Arabidopsis thaliana; identical to SEQ ID NO: 23488
  peptide (1)..(141): Ceres Seq. ID no. 12681671

SEQ ID NO: 85655 - DNA, 1332 bp, Arabidopsis thaliana
  misc_feature (1)..(1332): Ceres Seq. ID no. 12681693
  misc_feature (1)..(1332): Ortholog of  Ceres SEQ ID NO 12612090 as cited in SEQ ID NO 58429
atgataactggatacagcacgccaagtgcacatgttctaatgagctctcgggcattcaagtcatcatcatatagagctgcagcaggacagactcaacattatcttgctcgaagttcattgcctgtcgtaaagaactcgtggggatcaccaccttcacctttcaatgagcttccgagagtgtcaagaggcatgtgtgcctctgtcatatctctcagcctcgtcttctctgcttctgaatggagaacaaggttccatgtagtgatgggtatgctgcttgaaatcgcactccaggttatagggaccgttagcaagtggatgcctcttggagtctattggggtaagtttgggatgcatttctggactgctgttgcgtttgcttatctgtttaccgtccttgaaagcatacggtgtgcacttgcggactacaatatgcttgaggaaacaaaaagagtagccgagtctgctctgagaaggagaagtcaattatgcaaaaatcattattcttataagttaccctatcttcttaagagccttcaaagtgctgcttatagccgcagaactaagctatggtatctccctagtggaatgttaaagagggaaaataatcagtccagatacgataataggagcaagtgtatctcgtggacaatagagtggcggtttcactctacagatgtcattcttgttgaccatgggttagtattactctctagggctgaaaatcatatttgtttattgagacatgtgggtgcaaaggctcctttcaaggagctggacatcaaagctcctttgaggaaacagcttgccaaagttgttatattagagtacccggtgatccatgtatatctaccttcacagagctatgaatttaaagttatcaaagactttaacacgacacctaatcctaatgattcgttatacgatggtcatggatgcacaaatggtataaccttccgagaagaagaaatagaagaagacgacattgactcctttgagccagaggttcttggtcttatgaaacaaatgaactataacccgtgtctgcgagtctcagagaaaagcaaggcagagggcgttggtaccaacaactcaaatcctcaggttgataccacagaacaagaagatgccggtaacatggagcttgaatttgagcaagggttaatagacacatactcagatctttttgcggagatgaacccaggtgactatttcaactttgaatgtgaatttgcaaaggggttggattcggatgataattgcaatctccaaaatttagatactgatttcatcgctgatggactagatttagaagaaggggaaatcgtcgaatga

SEQ ID NO: 85656 - protein, 443 aa, Arabidopsis thaliana
  peptide (1)..(443): Ceres Seq. ID no. 12681694
MITGYSTPSAHVLMSSRAFKSSSYRAAAGQTQHYLARSSLPVVKNSWGSPPSPFNELPRVSRGMCASVISLSLVFSASEWRTRFHVVMGMLLEIALQVIGTVSKWMPLGVYWGKFGMHFWTAVAFAYLFTVLESIRCALADYNMLEETKRVAESALRRRSQLCKNHYSYKLPYLLKSLQSAAYSRRTKLWYLPSGMLKRENNQSRYDNRSKCISWTIEWRFHSTDVILVDHGLVLLSRAENHICLLRHVGAKAPFKELDIKAPLRKQLAKVVILEYPVIHVYLPSQSYEFKVIKDFNTTPNPNDSLYDGHGCTNGITFREEEIEEDDIDSFEPEVLGLMKQMNYNPCLRVSEKSKAEGVGTNNSNPQVDTTEQEDAGNMELEFEQGLIDTYSDLFAEMNPGDYFNFECEFAKGLDSDDNCNLQNLDTDFIADGLDLEEGEIVE

SEQ ID NO: 85657 - protein, 430 aa, Arabidopsis thaliana
  peptide (1)..(430): Ceres Seq. ID no. 12681695
MSSRAFKSSSYRAAAGQTQHYLARSSLPVVKNSWGSPPSPFNELPRVSRGMCASVISLSLVFSASEWRTRFHVVMGMLLEIALQVIGTVSKWMPLGVYWGKFGMHFWTAVAFAYLFTVLESIRCALADYNMLEETKRVAESALRRRSQLCKNHYSYKLPYLLKSLQSAAYSRRTKLWYLPSGMLKRENNQSRYDNRSKCISWTIEWRFHSTDVILVDHGLVLLSRAENHICLLRHVGAKAPFKELDIKAPLRKQLAKVVILEYPVIHVYLPSQSYEFKVIKDFNTTPNPNDSLYDGHGCTNGITFREEEIEEDDIDSFEPEVLGLMKQMNYNPCLRVSEKSKAEGVGTNNSNPQVDTTEQEDAGNMELEFEQGLIDTYSDLFAEMNPGDYFNFECEFAKGLDSDDNCNLQNLDTDFIADGLDLEEGEIVE

SEQ ID NO: 85658 - protein, 380 aa, Arabidopsis thaliana
  peptide (1)..(380): Ceres Seq. ID no. 12681696
MCASVISLSLVFSASEWRTRFHVVMGMLLEIALQVIGTVSKWMPLGVYWGKFGMHFWTAVAFAYLFTVLESIRCALADYNMLEETKRVAESALRRRSQLCKNHYSYKLPYLLKSLQSAAYSRRTKLWYLPSGMLKRENNQSRYDNRSKCISWTIEWRFHSTDVILVDHGLVLLSRAENHICLLRHVGAKAPFKELDIKAPLRKQLAKVVILEYPVIHVYLPSQSYEFKVIKDFNTTPNPNDSLYDGHGCTNGITFREEEIEEDDIDSFEPEVLGLMKQMNYNPCLRVSEKSKAEGVGTNNSNPQVDTTEQEDAGNMELEFEQGLIDTYSDLFAEMNPGDYFNFECEFAKGLDSDDNCNLQNLDTDFIADGLDLEEGEIVE

SEQ ID NO: 85659 - DNA, 1002 bp, Arabidopsis thaliana
  misc_feature (1)..(1002): Ceres Seq. ID no. 12681715
  misc_feature (1)..(1002): Ortholog of  Ceres SEQ ID NO 12636774 as cited in SEQ ID NO 372
  misc_feature (1)..(1002): Ortholog of  Ceres SEQ ID NO 12562215 as cited in SEQ ID NO 20489
  misc_feature (1)..(1002): Ortholog of  Ceres SEQ ID NO 13595548 as cited in SEQ ID NO 51024
  misc_feature (1)..(1002): Ortholog of  Ceres SEQ ID NO 13582350 as cited in SEQ ID NO 56734
  misc_feature (1)..(1002): Ortholog of  Ceres SEQ ID NO 12476493 as cited in SEQ ID NO 58163
  misc_feature (1)..(1002): Ortholog of  Ceres SEQ ID NO 14313459 as cited in SEQ ID NO 62395
  misc_feature (1)..(1002): Ortholog of  Ceres SEQ ID NO 13597295 as cited in SEQ ID NO 63743
  misc_feature (1)..(1002): Ortholog of  Ceres SEQ ID NO 12617090 as cited in SEQ ID NO 64005
  misc_feature (1)..(1002): Ortholog of  Ceres SEQ ID NO 13597439 as cited in SEQ ID NO 64081
  misc_feature (1)..(1002): Ortholog of  Ceres SEQ ID NO 13597233 as cited in SEQ ID NO 64370
  misc_feature (1)..(1002): Ortholog of  Ceres SEQ ID NO 13623850 as cited in SEQ ID NO 0
atggagagtttcccgatcatcaatctcgagaagcttaatggagaagagagagcaatcactatggagaagatcaaagacgcttgtgaaaactggggcttctttgagtgtgtgaaccatgggatttcactcgagcttttggacaaagtggagaagatgaccaaggaacattacaagaagtgcatggaagagagattcaaggaatcgattaagaacagaggtcttgactctcttcgctctgaagtcaacgacgttgactgggaatccactttctacctcaagcaccttcccgtctctaatatctccgatgtccctgatctcgacgacgattacagaacgttaatgaaagacttcgccggaaagatagagaagttgtcggaggagctactggatctgctgtgcgagaatctcggtttagagaagggttatttaaaaaaggtgttttacgggtcgaaaagaccgacttttggaaccaaagtcagcaattatccaccttgtcctaatccggacctagtcaagggtctccgagcccacaccgacgccggcggcatcatcctcctcttccaagacgacaaagtcagtggacttcagcttcttaaagacggcgagtgggtcgatgttcctccggttaagcattcaatcgtcgttaatctcggcgatcaacttgaggtgataaccaatgggaagtacaagagtgtggaacatagagtgctatctcagacagacggagaaggaagaatgtcgatcgcatcattctataatccgggaagcgactctgttatttttccggcgccggagctgatcggaaaagaagcagagaaggagaagaaagagaactatccgagatttgtgtttgaagattacatgaaactctactctgctgtcaagtttcaggccaaggaaccaaggtttgaagccatgaaagctatggagacaactgtggccaacaatgttggaccattggccactgcgtgaatgatatgtaactggttaataaatatatat

SEQ ID NO: 85660 - protein, 323 aa, Arabidopsis thaliana; identical to SEQ ID NO: 25991
  peptide (1)..(323): Ceres Seq. ID no. 12681716

SEQ ID NO: 85661 - protein, 303 aa, Arabidopsis thaliana; identical to SEQ ID NO: 25992
  peptide (1)..(303): Ceres Seq. ID no. 12681717

SEQ ID NO: 85662 - protein, 272 aa, Arabidopsis thaliana
  peptide (1)..(272): Ceres Seq. ID no. 12681718
MTKEHYKKCMEERFKESIKNRGLDSLRSEVNDVDWESTFYLKHLPVSNISDVPDLDDDYRTLMKDFAGKIEKLSEELLDLLCENLGLEKGYLKKVFYGSKRPTFGTKVSNYPPCPNPDLVKGLRAHTDAGGIILLFQDDKVSGLQLLKDGEWVDVPPVKHSIVVNLGDQLEVITNGKYKSVEHRVLSQTDGEGRMSIASFYNPGSDSVIFPAPELIGKEAEKEKKENYPRFVFEDYMKLYSAVKFQAKEPRFEAMKAMETTVANNVGPLATA

SEQ ID NO: 85663 - DNA, 984 bp, Arabidopsis thaliana
  misc_feature (1)..(984): Ceres Seq. ID no. 12681747
  misc_feature (1)..(984): Ortholog of  Ceres SEQ ID NO 15168537 as cited in SEQ ID NO 57100
  misc_feature (1)..(984): Ortholog of  Ceres SEQ ID NO 13579918 as cited in SEQ ID NO 64644
  misc_feature (1)..(984): Ortholog of  Ceres SEQ ID NO 13654122 as cited in SEQ ID NO 68192
atgagaatcacacaaaacgtcaagctcttactcttcttcttcttcttcatctccttcctcttcatcgccgtatccgccggcgagtctaaatgcgagtgttcacacgaagacgacgaggcaaacaaagccggagcaaaaaaatacaagatcgccgcaattccttccgttctggccgccggagttatcggcgttatgtttccgttactaggcaagttcttcccgtcgcttaaaccggagacgactttcttcttcgtgacgaaagccttcgccgccggcgtaatcctcgcaacggggtttatgcatgtgttgcctgaaggttacgagaagctgacgtcaccgtgtctgaaaggagaagcctgggagtttccgttcacaggctttatcgcgatggtcgctgcgattttgactctttccgttgactcttttgccacgtcgtatttccataaagcgcattttaaaacgtctaagaggattggtgacggtgaggaacaagacgttcagcttcaccggactcgagttgttgcacaggtgttggaagtgggaataatagtacattcagtggtaataggaatatcactgggagcatcacaaagtccagacactgccaaagctctctttgctgctttaatgtttcatcaatgcttcgagggtcttggtcttggtggttgcatcgcccagggaaatttcaattgtatgtcaattacaataatgtcgatctttttctctgtaacgacgccggtaggaatcgcggttggaatggcaatttcaagctcttatgatgattcgagtccaacggctctgatcgtacagggagtccttaacgctgcatctgcaggcatcctcatctatatgtctctagtggactttctcgcagcagattttatgcaccctaagatgcagtctaacactagacttcaaatcatggctcatatctctcttcttgttggagcaggggttatgtcacttttagctaaatgggcttaa

SEQ ID NO: 85664 - protein, 327 aa, Arabidopsis thaliana
  peptide (1)..(327): Ceres Seq. ID no. 12681748
MRITQNVKLLLFFFFFISFLFIAVSAGESKCECSHEDDEANKAGAKKYKIAAIPSVLAAGVIGVMFPLLGKFFPSLKPETTFFFVTKAFAAGVILATGFMHVLPEGYEKLTSPCLKGEAWEFPFTGFIAMVAAILTLSVDSFATSYFHKAHFKTSKRIGDGEEQDVQLHRTRVVAQVLEVGIIVHSVVIGISLGASQSPDTAKALFAALMFHQCFEGLGLGGCIAQGNFNCMSITIMSIFFSVTTPVGIAVGMAISSSYDDSSPTALIVQGVLNAASAGILIYMSLVDFLAADFMHPKMQSNTRLQIMAHISLLVGAGVMSLLAKWA

SEQ ID NO: 85665 - protein, 263 aa, Arabidopsis thaliana
  peptide (1)..(263): Ceres Seq. ID no. 12681749
MFPLLGKFFPSLKPETTFFFVTKAFAAGVILATGFMHVLPEGYEKLTSPCLKGEAWEFPFTGFIAMVAAILTLSVDSFATSYFHKAHFKTSKRIGDGEEQDVQLHRTRVVAQVLEVGIIVHSVVIGISLGASQSPDTAKALFAALMFHQCFEGLGLGGCIAQGNFNCMSITIMSIFFSVTTPVGIAVGMAISSSYDDSSPTALIVQGVLNAASAGILIYMSLVDFLAADFMHPKMQSNTRLQIMAHISLLVGAGVMSLLAKWA

SEQ ID NO: 85666 - protein, 228 aa, Arabidopsis thaliana
  peptide (1)..(228): Ceres Seq. ID no. 12681750
MHVLPEGYEKLTSPCLKGEAWEFPFTGFIAMVAAILTLSVDSFATSYFHKAHFKTSKRIGDGEEQDVQLHRTRVVAQVLEVGIIVHSVVIGISLGASQSPDTAKALFAALMFHQCFEGLGLGGCIAQGNFNCMSITIMSIFFSVTTPVGIAVGMAISSSYDDSSPTALIVQGVLNAASAGILIYMSLVDFLAADFMHPKMQSNTRLQIMAHISLLVGAGVMSLLAKWA

SEQ ID NO: 85667 - DNA, 1014 bp, Arabidopsis thaliana
  misc_feature (1)..(1014): Ceres Seq. ID no. 12681800
  misc_feature (1)..(1014): Ortholog of  Ceres SEQ ID NO 12611971 as cited in SEQ ID NO 53205
  misc_feature (1)..(1014): Ortholog of  Ceres SEQ ID NO 12615976 as cited in SEQ ID NO 62440
atggcgataggagaccgcaagaagattatcatcgatactgatcctggaatcgagagctatcatgagtttattctcactggatttgatgatgttgtagatgatgcaatggcgatattcgtagctttaaattcacctgaagttgatgtcattggcctcactactatctttggaaacgtgtataccactctcgccactcgaaacgccttgcatttgttggaggttgcgggtaggaccgatattccggtggctgaaggaacacataaaaccttcttgaacgatacgaagcttcgaatagctgactttgttcatggaaaagatgggcttggcaaccaaaacttccctccacctaaaggaaaaccaattgaaaagtctggacctgagtttttagttgaacaagcaaagctttgccctggtgaaatcacggttgttgctttgggaccactaacaaatctcgcgttggctgttcagcttgatccagagttttcgaaaaatgtcggacaaattgttcttcttggtggagcatttgcagtaaacggaaatgtaaatccagcttcggaagctaatatttttggcgatcccgaagctgcagatattgtgttcacatgtggggccgatataattgctgtgggaatcaatgtgacccatcaagttattatgacagctgatgacaaggacaaactagcatcatcgaaggggaaattagctcaatatctctgtaaaatccttgatgtgtactatgattatcatctcacggcttacgaaatcaaaggtgtgtaccttcatgatcctgcgacgatccttgcggctttccttccttctctattcacttatacagaaggagttgctagagtgcagacaagtggtatcactaggggactcactttactgtacaacaatcttaagaggtttgaggaagcgaacgagtggtcagacaaaccaacggtaaaagtggcagtgacggttgatgctcctgcagtcgtgaagctcataatggataggcttatggagtcttaa

SEQ ID NO: 85668 - protein, 337 aa, Arabidopsis thaliana
  peptide (1)..(337): Ceres Seq. ID no. 12681801
MAIGDRKKIIIDTDPGIESYHEFILTGFDDVVDDAMAIFVALNSPEVDVIGLTTIFGNVYTTLATRNALHLLEVAGRTDIPVAEGTHKTFLNDTKLRIADFVHGKDGLGNQNFPPPKGKPIEKSGPEFLVEQAKLCPGEITVVALGPLTNLALAVQLDPEFSKNVGQIVLLGGAFAVNGNVNPASEANIFGDPEAADIVFTCGADIIAVGINVTHQVIMTADDKDKLASSKGKLAQYLCKILDVYYDYHLTAYEIKGVYLHDPATILAAFLPSLFTYTEGVARVQTSGITRGLTLLYNNLKRFEEANEWSDKPTVKVAVTVDAPAVVKLIMDRLMES

SEQ ID NO: 85669 - protein, 302 aa, Arabidopsis thaliana; identical to SEQ ID NO: 25008
  peptide (1)..(302): Ceres Seq. ID no. 12681802

SEQ ID NO: 85670 - DNA, 1362 bp, Arabidopsis thaliana
  misc_feature (1)..(1362): Ceres Seq. ID no. 12681815
  misc_feature (1)..(1362): Ortholog of  Ceres SEQ ID NO 14315063 as cited in SEQ ID NO 52256
  misc_feature (1)..(1362): Ortholog of  Ceres SEQ ID NO 13594345 as cited in SEQ ID NO 58043
  misc_feature (1)..(1362): Ortholog of  Ceres SEQ ID NO 14308594 as cited in SEQ ID NO 60384
  misc_feature (1)..(1362): Ortholog of  Ceres SEQ ID NO 12614112 as cited in SEQ ID NO 60891
  misc_feature (1)..(1362): Ortholog of  Ceres SEQ ID NO 13597574 as cited in SEQ ID NO 64677
  misc_feature (1)..(1362): Ortholog of  Ceres SEQ ID NO 14302832 as cited in SEQ ID NO 64926
  misc_feature (1)..(1362): Ortholog of  Ceres SEQ ID NO 13597678 as cited in SEQ ID NO 65375
  misc_feature (1)..(1362): Ortholog of  Ceres SEQ ID NO 13662880 as cited in SEQ ID NO 65422
  misc_feature (1)..(1362): Ortholog of  Ceres SEQ ID NO 12779098 as cited in SEQ ID NO 67698
  misc_feature (1)..(1362): Ortholog of  Ceres SEQ ID NO 13596180 as cited in SEQ ID NO 67941
  misc_feature (1)..(1362): Ortholog of  Ceres SEQ ID NO 13591190 as cited in SEQ ID NO 68044
  misc_feature (1)..(1362): Ortholog of  Ceres SEQ ID NO 13596089 as cited in SEQ ID NO 68373
atgagagaaggatctcatgttattgttttgcctttcccagcacaaggccacataactccaatgtcccaattctgtaaacgcttagcctcaaaaagtcttaagatcactcttgtcctcgtctccgacaagccctctccgccgtacaaaacagagcacgacacaatcactgtcgtccccatctccaatggtttccaagaaggccaggaacgatcagaagacctagatgagtacatggaaagagtagaatccagcatcaaaaaccgcttaccgaagttgatagaagacatgaaactatcgggaaatcctcctagggctcttgtgtacgactccaccatgccgtggcttctggatgtagctcatagttatggtttgagcggtgccgtgtttttcacgcagccttggcttgtctcagctatttactatcatgtattcaagggctcgttctctgtaccgtctacaaagtatggtcactcgacgttagcatctttcccttcgttaccgattctgaatgcgaatgatttgccgtctttcctctgtgaatcttcctcttacccatatattctaaggactgtgatcgatcagctctcaaacattgatcgagttgatatagttttgtgcaacactttcgataaattggaagaaaagttgctgaaatggattaaaagcgtgtggcctgtcctgaacataggaccaactgttccatcaatgtatttagataagcgactggctgaagacaaaaactacggattcagcctcttcggtgcgaaaatcgctgaatgcatggagtggctcaactcaaagcagcctagttcagttgtttatgtatcatttgggagcttggtggttctaaaaaaagatcaactgatagaactagcggcgggtctgaaacagagcggacatttctttttgtgggttgtgagagagacggagagaagaaaacttccagaaaactatatagaggaaattggtgagaaaggactgaccgtgagctggagtccacaacttgaagttcttacacataaatcgatcggttgtttcgtgacacattgtggatggaactcgacgttagagggattgagtttgggagttccaatgattggtatgcctcattgggcagatcagcctacaaatgctaagttcatggaggatgtgtggaaagttggagttagggttaaagcagacagtgatgggttcgtgagaagagaagagtttgtgagacgtgtggaagaagttatggaggcagagcaaggtaaagagattagaaagaatgctgagaaatggaaagtgttggctcaagaggctgtttctgaaggaggtagttctgataagaacatcaatgagtttgtttctatgttttgttga

SEQ ID NO: 85671 - protein, 453 aa, Arabidopsis thaliana
  peptide (1)..(453): Ceres Seq. ID no. 12681816
MREGSHVIVLPFPAQGHITPMSQFCKRLASKSLKITLVLVSDKPSPPYKTEHDTITVVPISNGFQEGQERSEDLDEYMERVESSIKNRLPKLIEDMKLSGNPPRALVYDSTMPWLLDVAHSYGLSGAVFFTQPWLVSAIYYHVFKGSFSVPSTKYGHSTLASFPSLPILNANDLPSFLCESSSYPYILRTVIDQLSNIDRVDIVLCNTFDKLEEKLLKWIKSVWPVLNIGPTVPSMYLDKRLAEDKNYGFSLFGAKIAECMEWLNSKQPSSVVYVSFGSLVVLKKDQLIELAAGLKQSGHFFLWVVRETERRKLPENYIEEIGEKGLTVSWSPQLEVLTHKSIGCFVTHCGWNSTLEGLSLGVPMIGMPHWADQPTNAKFMEDVWKVGVRVKADSDGFVRREEFVRRVEEVMEAEQGKEIRKNAEKWKVLAQEAVSEGGSSDKNINEFVSMFC

SEQ ID NO: 85672 - protein, 433 aa, Arabidopsis thaliana
  peptide (1)..(433): Ceres Seq. ID no. 12681817
MSQFCKRLASKSLKITLVLVSDKPSPPYKTEHDTITVVPISNGFQEGQERSEDLDEYMERVESSIKNRLPKLIEDMKLSGNPPRALVYDSTMPWLLDVAHSYGLSGAVFFTQPWLVSAIYYHVFKGSFSVPSTKYGHSTLASFPSLPILNANDLPSFLCESSSYPYILRTVIDQLSNIDRVDIVLCNTFDKLEEKLLKWIKSVWPVLNIGPTVPSMYLDKRLAEDKNYGFSLFGAKIAECMEWLNSKQPSSVVYVSFGSLVVLKKDQLIELAAGLKQSGHFFLWVVRETERRKLPENYIEEIGEKGLTVSWSPQLEVLTHKSIGCFVTHCGWNSTLEGLSLGVPMIGMPHWADQPTNAKFMEDVWKVGVRVKADSDGFVRREEFVRRVEEVMEAEQGKEIRKNAEKWKVLAQEAVSEGGSSDKNINEFVSMFC

SEQ ID NO: 85673 - protein, 376 aa, Arabidopsis thaliana
  peptide (1)..(376): Ceres Seq. ID no. 12681818
MERVESSIKNRLPKLIEDMKLSGNPPRALVYDSTMPWLLDVAHSYGLSGAVFFTQPWLVSAIYYHVFKGSFSVPSTKYGHSTLASFPSLPILNANDLPSFLCESSSYPYILRTVIDQLSNIDRVDIVLCNTFDKLEEKLLKWIKSVWPVLNIGPTVPSMYLDKRLAEDKNYGFSLFGAKIAECMEWLNSKQPSSVVYVSFGSLVVLKKDQLIELAAGLKQSGHFFLWVVRETERRKLPENYIEEIGEKGLTVSWSPQLEVLTHKSIGCFVTHCGWNSTLEGLSLGVPMIGMPHWADQPTNAKFMEDVWKVGVRVKADSDGFVRREEFVRRVEEVMEAEQGKEIRKNAEKWKVLAQEAVSEGGSSDKNINEFVSMFC

SEQ ID NO: 85674 - DNA, 3339 bp, Arabidopsis thaliana
  misc_feature (1)..(3339): Ceres Seq. ID no. 12681880
  misc_feature (1)..(3339): Ortholog of  Ceres SEQ ID NO 14312333 as cited in SEQ ID NO 54757
  misc_feature (1)..(3339): Ortholog of  Ceres SEQ ID NO 15168584 as cited in SEQ ID NO 57127
atgacgatgatgtccgacctttcacttgatttagtcgaagagatattgtgtagggttccgataacttctcttaaagcagtgagatctagttgcaaactatggaacgttctttccaagaaccggattttatgtaaaacagaagctagaaatcagtttttagggttcacgataatgaatcataggctttattccatgagattcaatctccatggaatcggcctcaatgaaaacagtgaagagttcattgatccatctataaagccaataggtaatttacttaatcaagtcgagatatctaaagtgttttattgcgaaggtttattgttatgcgtcacaaggaaccactcaagcaagctcgtagtttggaacccgtatttgggagaaattcgttggatcaaaactaggaatgattaccacataggcgttacatatgctctcgggtacgacaacaacaagaaccacatgatcttgaggtttttttctgaacaaggctactacgagatttacgacatgaactcttctgactcatgggattgtttttatggcattcccaacaaggggttaaaatgttatcagcccggcgcgtcgttaaatggaaatgcttattttttgactgagggaagagaagtaatggaagggtatgattgcttactcggttttgattttacaacaaagaaatttggaccacttctttctttgtcgttttcgcatgattttatagagactgggagactatcttgtgttaaaggagagaaacttgcggtcttatatcagcgctgctatacctatgagatggaggtatgggtgacaactaagatagagccgaatgcggtgtcatggagcaaattcttagcagttgaaatggaaccactcactagtctaaagtttaacgatgattctggcagtttcttcattgacgaagagaagaaaatcgtcgtggtttttgatatagacgaatctgaacgcaacaatacggcttacatcattggagattatggatgcttgaaagaagttgatcttgatgaagttgtgaacccacaagaatctgtggaggtcggagaccgcatttattctttttcaccatttgtgtgctcttgctcttatgttccaagtttagtgaaatttaaagaagatgcagaacatgaaaggaaagataagaagaggaagagtaagaggaagcgaaccaacaaggatggatatgattttatactgtgttttgattttacaaccgagagatttggacagattcttcctctgccgtttaaacattcttttagggatacttggactctatcttctgttaaagaagagaaacttgcagtcgcagtgttatactggaaaaatacatgtgtgatgatagagatatggatgacaattaagattgatcctaatgtcgagtcgtggagcaaattcttaagagttgataggaaaccatgcattgatcttcgctttgatgatcgtaatgacagttttttcattgacgaagagaagaaagttgtcgtgttttttagttcagacaaagttaaaacctctacggcttacgtcattggagataatagatatttgagaacagtggatcttgaaaaagctgcaaactcccaagaatctgtggaggtcggagaacgcgtgtattgtttttcgccgcttgtgtgctcttgctcttattatgttccaagtttggtgaaaatcaaccacaatgcaggacgcaaaaggaaagagaagaagacgaagcgcaaaagtaaagacaagcagatgaaactaagcaacaaggaacctggattttgctttccacaatgctatgtattaattagttccaacacttggtaccgtgatgtagatggagagccaatagtggactttgatgattttgggaatgatcgcgagccatctacagagccacttcaggattttgatgaagatctggctgatgatattggagattgggatggtgaaggatcacaaacgcctgtttatgataatgataaagtagctaaaccaaggaagagattggtgaagaaatcttctagtgaacgtgtgactattgatgttccggaattgattgatgaggatgtggatgatgctgagtttgatgagtttatgggaggaagaggtggtggtagtactgattatgatgataaggttggtaggaagaggaagaaggagaaagagagaagtagtagtggtagtgggaaggagaagaggcataagtttccgaatcgtggcgaaaggaagtcagaagagattgatgagatgtggaaatctattgctcataacccagagaatgatgaagaaggtgttaggactatggatgatgataatttcattgacgatactggtttggatccttctgagaggtatggaggtgacgctggagaccgttctccaactcattatcctcaggcagaagagggtgaggatgaagatgaggtaaataaccttttcaaaatggggaagaaaaagaaaaagactgaaagaaatcctgcggaaattgcgcttttggttgagaatgtgatggctgagcttgaggttactgctgaggaagatgcagaacttaatagacaggggaagcctgctatcaacaagcttaagaaactttcgcttcttaccgatgtacttggaaagaagcagcttcaaacagaattcctggaccatggagttttaaccctgttgaagaattggcttgagcctcttccagatggaagcttgccaaatataaacatccgtgcagctattctaagagttcttactgattttccgattgacttggaccagtatgatagaagggagcaattgaaaaagagtgggcttggaaaggtcattatgttcttatcaaagtccgacgaggaaactaattccaacagacgacttgctaaggatttggttgataaatggtctcgtccaattttcaacaagagtactaggtttgaggacatgagaaatctcgatgaagatagggttccctatagaagaccaccagtgaagaacttctcttcttgttctactggggatagacctagcaacaaagcgacaatggagtccagagatggtgactttgacttggaaattcgggaacgtaaaactggtctgacttcgggtcagagttcaaggggagacaggcaaatgacgatgaggccggaagcaaccccattggactttttgatccgtcctcaatccaagattgatccagatgagatcatagcccgtgcaaaacaggtttctcaggaccagcgtcgggtcaagatgaacaagaaacttcagcagctaaaaggaacaaagaagaagcggctacaagctacgaaagtgagcgttgaaggtcggggtatgatcaagtacctctag

SEQ ID NO: 85675 - protein, 1112 aa, Arabidopsis thaliana
  peptide (1)..(1112): Ceres Seq. ID no. 12681881
MTMMSDLSLDLVEEILCRVPITSLKAVRSSCKLWNVLSKNRILCKTEARNQFLGFTIMNHRLYSMRFNLHGIGLNENSEEFIDPSIKPIGNLLNQVEISKVFYCEGLLLCVTRNHSSKLVVWNPYLGEIRWIKTRNDYHIGVTYALGYDNNKNHMILRFFSEQGYYEIYDMNSSDSWDCFYGIPNKGLKCYQPGASLNGNAYFLTEGREVMEGYDCLLGFDFTTKKFGPLLSLSFSHDFIETGRLSCVKGEKLAVLYQRCYTYEMEVWVTTKIEPNAVSWSKFLAVEMEPLTSLKFNDDSGSFFIDEEKKIVVVFDIDESERNNTAYIIGDYGCLKEVDLDEVVNPQESVEVGDRIYSFSPFVCSCSYVPSLVKFKEDAEHERKDKKRKSKRKRTNKDGYDFILCFDFTTERFGQILPLPFKHSFRDTWTLSSVKEEKLAVAVLYWKNTCVMIEIWMTIKIDPNVESWSKFLRVDRKPCIDLRFDDRNDSFFIDEEKKVVVFFSSDKVKTSTAYVIGDNRYLRTVDLEKAANSQESVEVGERVYCFSPLVCSCSYYVPSLVKINHNAGRKRKEKKTKRKSKDKQMKLSNKEPGFCFPQCYVLISSNTWYRDVDGEPIVDFDDFGNDREPSTEPLQDFDEDLADDIGDWDGEGSQTPVYDNDKVAKPRKRLVKKSSSERVTIDVPELIDEDVDDAEFDEFMGGRGGGSTDYDDKVGRKRKKEKERSSSGSGKEKRHKFPNRGERKSEEIDEMWKSIAHNPENDEEGVRTMDDDNFIDDTGLDPSERYGGDAGDRSPTHYPQAEEGEDEDEVNNLFKMGKKKKKTERNPAEIALLVENVMAELEVTAEEDAELNRQGKPAINKLKKLSLLTDVLGKKQLQTEFLDHGVLTLLKNWLEPLPDGSLPNINIRAAILRVLTDFPIDLDQYDRREQLKKSGLGKVIMFLSKSDEETNSNRRLAKDLVDKWSRPIFNKSTRFEDMRNLDEDRVPYRRPPVKNFSSCSTGDRPSNKATMESRDGDFDLEIRERKTGLTSGQSSRGDRQMTMRPEATPLDFLIRPQSKIDPDEIIARAKQVSQDQRRVKMNKKLQQLKGTKKKRLQATKVSVEGRGMIKYL

SEQ ID NO: 85676 - protein, 1110 aa, Arabidopsis thaliana
  peptide (1)..(1110): Ceres Seq. ID no. 12681882
MMSDLSLDLVEEILCRVPITSLKAVRSSCKLWNVLSKNRILCKTEARNQFLGFTIMNHRLYSMRFNLHGIGLNENSEEFIDPSIKPIGNLLNQVEISKVFYCEGLLLCVTRNHSSKLVVWNPYLGEIRWIKTRNDYHIGVTYALGYDNNKNHMILRFFSEQGYYEIYDMNSSDSWDCFYGIPNKGLKCYQPGASLNGNAYFLTEGREVMEGYDCLLGFDFTTKKFGPLLSLSFSHDFIETGRLSCVKGEKLAVLYQRCYTYEMEVWVTTKIEPNAVSWSKFLAVEMEPLTSLKFNDDSGSFFIDEEKKIVVVFDIDESERNNTAYIIGDYGCLKEVDLDEVVNPQESVEVGDRIYSFSPFVCSCSYVPSLVKFKEDAEHERKDKKRKSKRKRTNKDGYDFILCFDFTTERFGQILPLPFKHSFRDTWTLSSVKEEKLAVAVLYWKNTCVMIEIWMTIKIDPNVESWSKFLRVDRKPCIDLRFDDRNDSFFIDEEKKVVVFFSSDKVKTSTAYVIGDNRYLRTVDLEKAANSQESVEVGERVYCFSPLVCSCSYYVPSLVKINHNAGRKRKEKKTKRKSKDKQMKLSNKEPGFCFPQCYVLISSNTWYRDVDGEPIVDFDDFGNDREPSTEPLQDFDEDLADDIGDWDGEGSQTPVYDNDKVAKPRKRLVKKSSSERVTIDVPELIDEDVDDAEFDEFMGGRGGGSTDYDDKVGRKRKKEKERSSSGSGKEKRHKFPNRGERKSEEIDEMWKSIAHNPENDEEGVRTMDDDNFIDDTGLDPSERYGGDAGDRSPTHYPQAEEGEDEDEVNNLFKMGKKKKKTERNPAEIALLVENVMAELEVTAEEDAELNRQGKPAINKLKKLSLLTDVLGKKQLQTEFLDHGVLTLLKNWLEPLPDGSLPNINIRAAILRVLTDFPIDLDQYDRREQLKKSGLGKVIMFLSKSDEETNSNRRLAKDLVDKWSRPIFNKSTRFEDMRNLDEDRVPYRRPPVKNFSSCSTGDRPSNKATMESRDGDFDLEIRERKTGLTSGQSSRGDRQMTMRPEATPLDFLIRPQSKIDPDEIIARAKQVSQDQRRVKMNKKLQQLKGTKKKRLQATKVSVEGRGMIKYL

SEQ ID NO: 85677 - protein, 1109 aa, Arabidopsis thaliana
  peptide (1)..(1109): Ceres Seq. ID no. 12681883
MSDLSLDLVEEILCRVPITSLKAVRSSCKLWNVLSKNRILCKTEARNQFLGFTIMNHRLYSMRFNLHGIGLNENSEEFIDPSIKPIGNLLNQVEISKVFYCEGLLLCVTRNHSSKLVVWNPYLGEIRWIKTRNDYHIGVTYALGYDNNKNHMILRFFSEQGYYEIYDMNSSDSWDCFYGIPNKGLKCYQPGASLNGNAYFLTEGREVMEGYDCLLGFDFTTKKFGPLLSLSFSHDFIETGRLSCVKGEKLAVLYQRCYTYEMEVWVTTKIEPNAVSWSKFLAVEMEPLTSLKFNDDSGSFFIDEEKKIVVVFDIDESERNNTAYIIGDYGCLKEVDLDEVVNPQESVEVGDRIYSFSPFVCSCSYVPSLVKFKEDAEHERKDKKRKSKRKRTNKDGYDFILCFDFTTERFGQILPLPFKHSFRDTWTLSSVKEEKLAVAVLYWKNTCVMIEIWMTIKIDPNVESWSKFLRVDRKPCIDLRFDDRNDSFFIDEEKKVVVFFSSDKVKTSTAYVIGDNRYLRTVDLEKAANSQESVEVGERVYCFSPLVCSCSYYVPSLVKINHNAGRKRKEKKTKRKSKDKQMKLSNKEPGFCFPQCYVLISSNTWYRDVDGEPIVDFDDFGNDREPSTEPLQDFDEDLADDIGDWDGEGSQTPVYDNDKVAKPRKRLVKKSSSERVTIDVPELIDEDVDDAEFDEFMGGRGGGSTDYDDKVGRKRKKEKERSSSGSGKEKRHKFPNRGERKSEEIDEMWKSIAHNPENDEEGVRTMDDDNFIDDTGLDPSERYGGDAGDRSPTHYPQAEEGEDEDEVNNLFKMGKKKKKTERNPAEIALLVENVMAELEVTAEEDAELNRQGKPAINKLKKLSLLTDVLGKKQLQTEFLDHGVLTLLKNWLEPLPDGSLPNINIRAAILRVLTDFPIDLDQYDRREQLKKSGLGKVIMFLSKSDEETNSNRRLAKDLVDKWSRPIFNKSTRFEDMRNLDEDRVPYRRPPVKNFSSCSTGDRPSNKATMESRDGDFDLEIRERKTGLTSGQSSRGDRQMTMRPEATPLDFLIRPQSKIDPDEIIARAKQVSQDQRRVKMNKKLQQLKGTKKKRLQATKVSVEGRGMIKYL

SEQ ID NO: 85678 - DNA, 1212 bp, Arabidopsis thaliana
  misc_feature (1)..(1212): Ceres Seq. ID no. 12681884
  misc_feature (1)..(1212): Ortholog of  Ceres SEQ ID NO 14316553 as cited in SEQ ID NO 20761
  misc_feature (1)..(1212): Ortholog of  Ceres SEQ ID NO 13502573 as cited in SEQ ID NO 60342
atgggtagcagtgagatggaaaaatcaggtaaagagaaagaacctaagactacaccgccttcgacttcttcatctgctcctgctactgttgtttcacaggaaccttcttctgctgtgagtgctggagtggctgttactcaagattggtctggcttccaggcttattctcctatgccgcctcatggttatgtagcatcaagtcctcaacctcatccttatatgtggggcgttcagcatatgatgccgccttatggaacaccgcctcatccgtatgttacgatgtatcctccaggtggcatgtatgctcatccttcattacctccgtttctgttaacatgttccgtgctgcaacaggggtcttatccatatagtccctatgcaatgccttctcctaatggaatggctgaagcttctggtaatactggaagtgttattgagggtgatggtaaaccatctgatgggaaggaaaaattgccaatcaaaagatcaaaaggaagcttgggaagtttgaatatgattataggaaagaacaatgaagctggaaaaaactcaggagcatcagctaatggagcttgttctaaaaggcatgtgacttcatattttgctgagagcggttctgatggatcaagtgacggaagtgatgcaaattcacaaaacgactctggctctagacacaacgggaaggatggtgaaacagcttcagagagtggtggttctgctcatggaccaccccgtaatggaagtaatctaccagtgaaccagaccgtcgctatcatgccagtgtcggctacaggtgttccaggcccaccaacaaatctaaatatcggaatggattattggagcggtcatgggaatgtttctggagcagttcctggagttgtagtagatggttcccaatcacagccatggttacaggatgagagagagattaagcgacagagacggaagcaatccaatagggaatctgctcgtagatccaggttgcgtaaacaggcggagtgtgatgagctagcacaacgagcagaggttttgaatggagagaactcaagtcttagagcagaaattaacaagcttaaaagccaatatgaagagcttcttgctgaaaatagctctctcaagaataagttctcgtcagccccgtcactggaaggtggagacttggacaagaacgagcaagaaccacagagaagtacacgtcaggatgttgcgtag

SEQ ID NO: 85679 - protein, 403 aa, Arabidopsis thaliana
  peptide (1)..(403): Ceres Seq. ID no. 12681885
MGSSEMEKSGKEKEPKTTPPSTSSSAPATVVSQEPSSAVSAGVAVTQDWSGFQAYSPMPPHGYVASSPQPHPYMWGVQHMMPPYGTPPHPYVTMYPPGGMYAHPSLPPFLLTCSVLQQGSYPYSPYAMPSPNGMAEASGNTGSVIEGDGKPSDGKEKLPIKRSKGSLGSLNMIIGKNNEAGKNSGASANGACSKRHVTSYFAESGSDGSSDGSDANSQNDSGSRHNGKDGETASESGGSAHGPPRNGSNLPVNQTVAIMPVSATGVPGPPTNLNIGMDYWSGHGNVSGAVPGVVVDGSQSQPWLQDEREIKRQRRKQSNRESARRSRLRKQAECDELAQRAEVLNGENSSLRAEINKLKSQYEELLAENSSLKNKFSSAPSLEGGDLDKNEQEPQRSTRQDVA

SEQ ID NO: 85680 - protein, 398 aa, Arabidopsis thaliana
  peptide (1)..(398): Ceres Seq. ID no. 12681886
MEKSGKEKEPKTTPPSTSSSAPATVVSQEPSSAVSAGVAVTQDWSGFQAYSPMPPHGYVASSPQPHPYMWGVQHMMPPYGTPPHPYVTMYPPGGMYAHPSLPPFLLTCSVLQQGSYPYSPYAMPSPNGMAEASGNTGSVIEGDGKPSDGKEKLPIKRSKGSLGSLNMIIGKNNEAGKNSGASANGACSKRHVTSYFAESGSDGSSDGSDANSQNDSGSRHNGKDGETASESGGSAHGPPRNGSNLPVNQTVAIMPVSATGVPGPPTNLNIGMDYWSGHGNVSGAVPGVVVDGSQSQPWLQDEREIKRQRRKQSNRESARRSRLRKQAECDELAQRAEVLNGENSSLRAEINKLKSQYEELLAENSSLKNKFSSAPSLEGGDLDKNEQEPQRSTRQDVA

SEQ ID NO: 85681 - protein, 346 aa, Arabidopsis thaliana
  peptide (1)..(346): Ceres Seq. ID no. 12681887
MPPHGYVASSPQPHPYMWGVQHMMPPYGTPPHPYVTMYPPGGMYAHPSLPPFLLTCSVLQQGSYPYSPYAMPSPNGMAEASGNTGSVIEGDGKPSDGKEKLPIKRSKGSLGSLNMIIGKNNEAGKNSGASANGACSKRHVTSYFAESGSDGSSDGSDANSQNDSGSRHNGKDGETASESGGSAHGPPRNGSNLPVNQTVAIMPVSATGVPGPPTNLNIGMDYWSGHGNVSGAVPGVVVDGSQSQPWLQDEREIKRQRRKQSNRESARRSRLRKQAECDELAQRAEVLNGENSSLRAEINKLKSQYEELLAENSSLKNKFSSAPSLEGGDLDKNEQEPQRSTRQDVA

SEQ ID NO: 85682 - DNA, 2613 bp, Arabidopsis thaliana
  misc_feature (1)..(2613): Ceres Seq. ID no. 12681957
  misc_feature (1)..(2613): Ortholog of  Ceres SEQ ID NO 15174712 as cited in SEQ ID NO 52965
  misc_feature (1)..(2613): Ortholog of  Ceres SEQ ID NO 15175476 as cited in SEQ ID NO 53735
atgggttgtactgtgagggagaagcacgtgaaaccgacccgtaggatcaaagccgctgcatttagatccgacccaccgttatgttgggtcgagaagattgctatgtcacaatcaattgttgagaaccttgtttatcatcctggtcttactgattccggttctgtcaatttgaattccgttactgagaatcctgaggagaatttttgggcatattgtacagaggagcatttggaagagattttgctgaaacatttggagtttttgtataatcaagctgtttctaagcttcttgaattgggctatgaggaacgtgttgcgttgaaagcggttttgagtaatggacactgttatggtgaattggatgtgttgactaatatagtgaataattcattatcttatttgaatagtggtggaggtggaggtgggagtaatgggaacggtgaggatcgaacggagactggttttacggatttgagagatttggaggagtattcgcttgcgggtatgatttacttgttgcaacaagttaagcctaatttgagtaaaggtgatgcaatgtggtgtttgttaatgagtgagctccatgttggtagggcaagtactctggatgtcccaacgaataggtctagttgttgtactaaggaagatagcaatgtagaagatgttggtacgggtggtactctagatattgctggttttatggcaccagcgttgtgtcgattccatggaggttggggttttgggaatgggggaggacctgagttttctggtaatgggttttctatgaaaggtgctgagttgaagttgcagagagagattgattgtcctaaaaggtttaatctttcgccatccatgaagtccttgttgaagcggaatgttgcagcgtttgctgctgggtatcgtgctagtatgaagcagaagcaaatacagtcgtctgatactattggtgatagcaaagcttgtaatgatcctgcaattgtgaagagttgtgggcagcaaccacgtaagtcagggagtgaagaaagtgttagtacggtgttggagaaatttcgtgatctgaaccttgatgataatctggaatcggtgggtgtggatgataaggattgtgtgatagtcgatctgcttcatcaggttaaggatttcgagaagaaagtaaaggaaaggaaagagtgggctcagaagaacgcaatgcaagccgcacaaaaggtcagcgaggaattagctgagcttaaaacattgagtagtgaaagagaaggaatccaactgctgaaaaaggggaaacaggctgttgaagaatcaactgcgaaaagatttactgacaaggaaattgaactcagaaaagcttgcagtcaaaatgacagggccaatgtaattgtaagaaagcttgagaatcaaaatgcagagattcgagcagagcgggagggatccaaattaagtgcatcagaatcgcttaaagcgtgcatggaagcatcaaagaaggagaaaaaatgcttgaagaagcttgtggcatgggagaaacagatattgaagttgcaggatgagattacagctgaaaaagaaaagattaaggccctatataagactttagctcaaatcacagagtatgaaaaggagattgaggcgaaatggaggcaagagcagaaggcaaaagaggaggctctggctcaaatggaggaagaacaacgctcaaaagaagcagctgagggtcacaacaagagaaagcttgagactttacgactcaaaattgaactagacttccaaagacacaaagacgatcaccaaagactggagcaagaactcggtcgactcaaagcctcttcagatagtgactcaagccacatatccaacaacgcttggaaacccaaaaaatctcaaggagaaaacattgctaagctgcttgaagaaattgataagcttgaagggtcttatgacaatgaagcaaactatgatcgagaatgcataatctgtatgaaagatgaagtctctgtggtgtttcttccttgtgcgcatcaagttgtgtgtggtagttgcagtgatagcttcttcgcgagcaacaacggcggaagcaaagtcacttgtccttgttgccgaggaagagagttaaaatgttgctacaaggcaagcattgatgggtttggtgcaacaaagttccacgagcgttgtgacttcaaaggtccatgtgttatcatagcttacactaaagacaagtctttcaagtttggtggatttagtccggaaggatatagaagtactgatgattattacgatacatttgatgctttcctcttctattggctcgaggattgtgatgacccaatcgtccttcctaaggttggaggaagtggagcagcactatttgattatgctcgcggagggcctcaatttggagctgacgggcttcttatcggaccgcctttagctcccgtgatgggcggatttgcgggtccggatacgaactcggggattggtgatttgagggtggctaaatcaagattgggattgtcatatgctaagaggaaagatggaaaagaatctatatttggagatgaaaataaggttagtcttgatgatgtattggtcttttgtagtccttatattgcttccttgtattaa

SEQ ID NO: 85683 - protein, 870 aa, Arabidopsis thaliana
  peptide (1)..(870): Ceres Seq. ID no. 12681958
MGCTVREKHVKPTRRIKAAAFRSDPPLCWVEKIAMSQSIVENLVYHPGLTDSGSVNLNSVTENPEENFWAYCTEEHLEEILLKHLEFLYNQAVSKLLELGYEERVALKAVLSNGHCYGELDVLTNIVNNSLSYLNSGGGGGGSNGNGEDRTETGFTDLRDLEEYSLAGMIYLLQQVKPNLSKGDAMWCLLMSELHVGRASTLDVPTNRSSCCTKEDSNVEDVGTGGTLDIAGFMAPALCRFHGGWGFGNGGGPEFSGNGFSMKGAELKLQREIDCPKRFNLSPSMKSLLKRNVAAFAAGYRASMKQKQIQSSDTIGDSKACNDPAIVKSCGQQPRKSGSEESVSTVLEKFRDLNLDDNLESVGVDDKDCVIVDLLHQVKDFEKKVKERKEWAQKNAMQAAQKVSEELAELKTLSSEREGIQLLKKGKQAVEESTAKRFTDKEIELRKACSQNDRANVIVRKLENQNAEIRAEREGSKLSASESLKACMEASKKEKKCLKKLVAWEKQILKLQDEITAEKEKIKALYKTLAQITEYEKEIEAKWRQEQKAKEEALAQMEEEQRSKEAAEGHNKRKLETLRLKIELDFQRHKDDHQRLEQELGRLKASSDSDSSHISNNAWKPKKSQGENIAKLLEEIDKLEGSYDNEANYDRECIICMKDEVSVVFLPCAHQVVCGSCSDSFFASNNGGSKVTCPCCRGRELKCCYKASIDGFGATKFHERCDFKGPCVIIAYTKDKSFKFGGFSPEGYRSTDDYYDTFDAFLFYWLEDCDDPIVLPKVGGSGAALFDYARGGPQFGADGLLIGPPLAPVMGGFAGPDTNSGIGDLRVAKSRLGLSYAKRKDGKESIFGDENKVSLDDVLVFCSPYIASLY

SEQ ID NO: 85684 - protein, 836 aa, Arabidopsis thaliana
  peptide (1)..(836): Ceres Seq. ID no. 12681959
MSQSIVENLVYHPGLTDSGSVNLNSVTENPEENFWAYCTEEHLEEILLKHLEFLYNQAVSKLLELGYEERVALKAVLSNGHCYGELDVLTNIVNNSLSYLNSGGGGGGSNGNGEDRTETGFTDLRDLEEYSLAGMIYLLQQVKPNLSKGDAMWCLLMSELHVGRASTLDVPTNRSSCCTKEDSNVEDVGTGGTLDIAGFMAPALCRFHGGWGFGNGGGPEFSGNGFSMKGAELKLQREIDCPKRFNLSPSMKSLLKRNVAAFAAGYRASMKQKQIQSSDTIGDSKACNDPAIVKSCGQQPRKSGSEESVSTVLEKFRDLNLDDNLESVGVDDKDCVIVDLLHQVKDFEKKVKERKEWAQKNAMQAAQKVSEELAELKTLSSEREGIQLLKKGKQAVEESTAKRFTDKEIELRKACSQNDRANVIVRKLENQNAEIRAEREGSKLSASESLKACMEASKKEKKCLKKLVAWEKQILKLQDEITAEKEKIKALYKTLAQITEYEKEIEAKWRQEQKAKEEALAQMEEEQRSKEAAEGHNKRKLETLRLKIELDFQRHKDDHQRLEQELGRLKASSDSDSSHISNNAWKPKKSQGENIAKLLEEIDKLEGSYDNEANYDRECIICMKDEVSVVFLPCAHQVVCGSCSDSFFASNNGGSKVTCPCCRGRELKCCYKASIDGFGATKFHERCDFKGPCVIIAYTKDKSFKFGGFSPEGYRSTDDYYDTFDAFLFYWLEDCDDPIVLPKVGGSGAALFDYARGGPQFGADGLLIGPPLAPVMGGFAGPDTNSGIGDLRVAKSRLGLSYAKRKDGKESIFGDENKVSLDDVLVFCSPYIASLY

SEQ ID NO: 85685 - protein, 702 aa, Arabidopsis thaliana
  peptide (1)..(702): Ceres Seq. ID no. 12681960
MIYLLQQVKPNLSKGDAMWCLLMSELHVGRASTLDVPTNRSSCCTKEDSNVEDVGTGGTLDIAGFMAPALCRFHGGWGFGNGGGPEFSGNGFSMKGAELKLQREIDCPKRFNLSPSMKSLLKRNVAAFAAGYRASMKQKQIQSSDTIGDSKACNDPAIVKSCGQQPRKSGSEESVSTVLEKFRDLNLDDNLESVGVDDKDCVIVDLLHQVKDFEKKVKERKEWAQKNAMQAAQKVSEELAELKTLSSEREGIQLLKKGKQAVEESTAKRFTDKEIELRKACSQNDRANVIVRKLENQNAEIRAEREGSKLSASESLKACMEASKKEKKCLKKLVAWEKQILKLQDEITAEKEKIKALYKTLAQITEYEKEIEAKWRQEQKAKEEALAQMEEEQRSKEAAEGHNKRKLETLRLKIELDFQRHKDDHQRLEQELGRLKASSDSDSSHISNNAWKPKKSQGENIAKLLEEIDKLEGSYDNEANYDRECIICMKDEVSVVFLPCAHQVVCGSCSDSFFASNNGGSKVTCPCCRGRELKCCYKASIDGFGATKFHERCDFKGPCVIIAYTKDKSFKFGGFSPEGYRSTDDYYDTFDAFLFYWLEDCDDPIVLPKVGGSGAALFDYARGGPQFGADGLLIGPPLAPVMGGFAGPDTNSGIGDLRVAKSRLGLSYAKRKDGKESIFGDENKVSLDDVLVFCSPYIASLY

SEQ ID NO: 85686 - DNA, 363 bp, Arabidopsis thaliana
  misc_feature (1)..(363): Ceres Seq. ID no. 12682055
  misc_feature (1)..(363): Ortholog of  Ceres SEQ ID NO 15178329 as cited in SEQ ID NO 52153
atgaacttggctgttgatacccagaagaagaatcggattcaagtttccaacactaagaaaccattgttcttctacgtcaatctcgccaagaggtacatgcagcagtacactgatgtcgaattgtctgcactaggaatggctattgccactgttgttacggtcgctgagatattgaagaacaatggctttgctgttgaaaagaagatcatgacatcgactgtggatatcaaggatgattcaaggggtcgtcctgtgcagaaagctaagattgagatcacgcttgccaagtctgagaagtttgatgaactaatggctgcagctaatgaagagaaggaggctgcagaagcccaagagcaaaactag

SEQ ID NO: 85687 - protein, 120 aa, Arabidopsis thaliana; identical to SEQ ID NO: 30535
  peptide (1)..(120): Ceres Seq. ID no. 12682056

SEQ ID NO: 85688 - protein, 88 aa, Arabidopsis thaliana
  peptide (1)..(88): Ceres Seq. ID no. 12682057
MQQYTDVELSALGMAIATVVTVAEILKNNGFAVEKKIMTSTVDIKDDSRGRPVQKAKIEITLAKSEKFDELMAAANEEKEAAEAQEQN

SEQ ID NO: 85689 - protein, 75 aa, Arabidopsis thaliana
  peptide (1)..(75): Ceres Seq. ID no. 12682058
MAIATVVTVAEILKNNGFAVEKKIMTSTVDIKDDSRGRPVQKAKIEITLAKSEKFDELMAAANEEKEAAEAQEQN

SEQ ID NO: 85690 - DNA, 723 bp, Arabidopsis thaliana
  misc_feature (1)..(723): Ceres Seq. ID no. 12682113
  misc_feature (1)..(723): Ortholog of  Ceres SEQ ID NO 13638917 as cited in SEQ ID NO 56018
  misc_feature (1)..(723): Ortholog of  Ceres SEQ ID NO 13663116 as cited in SEQ ID NO 60731
  misc_feature (1)..(723): Ortholog of  Ceres SEQ ID NO 14316029 as cited in SEQ ID NO 67234
atggtggttatggattctccagtttcggggagaatggctgatcagaacatcgatcctaacaccacgacgagccctagtcctatagagaagcatgtttcggcgattaaggctatctccggcgacgagaaagctccgtcgaaggagaaaaagaactacgcgtcgaagaaatcaactaccgtaatccagaaatcgcactgtttccagaattcttggacattttggttcgataatccttcctccaaatcgaatcaagtcatatggggaagctctttgagatctttgtatacattcgctaccatcgaagagttctggagtctttacaataacattcatcctccaaccaagtgggtgtcagggtcggatctctactgcttcaaagataagattgaaccaaaatgggaagatcctatctgtgccaatggaggaaaatggactatgtttttccctagagctacactagaatctaattggcttaacacgttacttgcgttggttggtgagcaatttgaccaaggagatgagatctgtggagcagttttgaacttcagaacgagaggggacaggatctctctatggacaaagaaagctgcaaatgaggaggctcagctaagcattgggaagcagtggaaggaacttcttggctacaatgacacaatcggatttatagttcatgaggatgcaaagactcttgatcgtgatgctaaacgtcgatatactgtatga

SEQ ID NO: 85691 - protein, 240 aa, Arabidopsis thaliana; identical to SEQ ID NO: 71716
  peptide (1)..(240): Ceres Seq. ID no. 12682114

SEQ ID NO: 85692 - protein, 237 aa, Arabidopsis thaliana; identical to SEQ ID NO: 71717
  peptide (1)..(237): Ceres Seq. ID no. 12682115

SEQ ID NO: 85693 - protein, 229 aa, Arabidopsis thaliana
  peptide (1)..(229): Ceres Seq. ID no. 12682116
MADQNIDPNTTTSPSPIEKHVSAIKAISGDEKAPSKEKKNYASKKSTTVIQKSHCFQNSWTFWFDNPSSKSNQVIWGSSLRSLYTFATIEEFWSLYNNIHPPTKWVSGSDLYCFKDKIEPKWEDPICANGGKWTMFFPRATLESNWLNTLLALVGEQFDQGDEICGAVLNFRTRGDRISLWTKKAANEEAQLSIGKQWKELLGYNDTIGFIVHEDAKTLDRDAKRRYTV

SEQ ID NO: 85694 - DNA, 1905 bp, Arabidopsis thaliana
  misc_feature (1)..(1905): Ceres Seq. ID no. 12682569
  misc_feature (1)..(1905): Ortholog of  Ceres SEQ ID NO 14307904 as cited in SEQ ID NO 66440
  misc_feature (1)..(1905): Ortholog of  Ceres SEQ ID NO 13659971 as cited in SEQ ID NO 67565
atgggaaacacatgcgtgggtccgaatctgaaccctaatggattccttcaatccgttagtgctgccgtgtggcggaatcagaaaccagacgatagcattaagagcagcaaggacgagagcagtcgaaaaaagaacgataaaagcgttaatggcgacgacagtaacggtcacgtttcctccaccgtggatccagcaccatccacgttgccaacaccgagcacaccaccacctccggtgaaaatggccaacgaagaaccaccaccaaaacctatcacagagaacaaagaagatccgaattcgaaaccgcagaagaaagaagcgcacatgaaacgtatggcaagcgcaggtctacaaatagactcagttcttgggagaaaaacagagaatctcaaagatatatacagtgttgggagaaaattaggtcaaggacaatttggaacaacgtttctttgcgtggataagaagacaggtaaagagttcgcttgtaaaacgatagctaagaggaaattaacaacacctgaggatgttgaagatgtgagaagagagattcagataatgcatcatttgtctggtcatccaaacgtgattcagatcgttggtgcgtatgaagatgcagtagctgttcatgttgtgatggagatttgtgcaggtggagagttatttgataggattatacagagagggcattatactgagaaaaaagctgctgagcttgctaggatcattgttggtgttatagaagcttgtcattctttaggtgtaatgcaccgtgatcttaagcctgagaattttttatttgttagtggagatgaagaagctgctctcaagactattgattttggcctctctgttttctttaaaccaggagaaacattcactgatgtcgttggtagtccttattatgtggcaccagaagttttaaggaaacattatagtcatgaatgtgatgtttggagtgccggagttattatttacattttactaagtggcgtccctccgttttgggatgaaacggaacaggggatctttgagcaggttttgaaaggtgaccttgattttatatcagaaccatggcctagtgtatcagaaagtgccaaggatttggtccgtcggatgctaatcagagaccctaagaagcgaatgactactcatgaagttctctgtcatccatgggccagagtagatggtgttgctcttgataaacctcttgattctgctgtcctaagtcgtttgcaacaattttcagccatgaacaagctcaagaaaatagctatcaaggtaatagcagaaagcttgtcagaggaagaaatagcaggattgaaggaaatgttcaagatgatagatacagataatagtggacacatcactctcgaagaactcaagaaaggtttggacagagttggtgctgaccttaaagattcagaaatactaggattaatgcaagcagcggatatagataacagtgggacaatagactatggagagtttatagcagcaatggtgcatttgaacaaaatagagaaagaagaccatttgttcacagcattctcttactttgaccaagatggaagtggttatataaccagagacgagctccaacaagcttgcaagcaatttggcttagcggatgttcatttagacgacattttacgcgaagtcgataaagacaacgatggaagaatagactacagcgagtttgtggatatgataaactttcttggaaattattctggcgattcttctacctcccgtcggcgttttccttcgatatggttgtggggtagagttctggatctgtctcttgttgacgatactgggttacatccctgggatcatctatgctatctacgttcttgtcggatgatgaccaaattctcttgtaaatttttcataatctttatttag

SEQ ID NO: 85695 - protein, 634 aa, Arabidopsis thaliana
  peptide (1)..(634): Ceres Seq. ID no. 12682570
MGNTCVGPNLNPNGFLQSVSAAVWRNQKPDDSIKSSKDESSRKKNDKSVNGDDSNGHVSSTVDPAPSTLPTPSTPPPPVKMANEEPPPKPITENKEDPNSKPQKKEAHMKRMASAGLQIDSVLGRKTENLKDIYSVGRKLGQGQFGTTFLCVDKKTGKEFACKTIAKRKLTTPEDVEDVRREIQIMHHLSGHPNVIQIVGAYEDAVAVHVVMEICAGGELFDRIIQRGHYTEKKAAELARIIVGVIEACHSLGVMHRDLKPENFLFVSGDEEAALKTIDFGLSVFFKPGETFTDVVGSPYYVAPEVLRKHYSHECDVWSAGVIIYILLSGVPPFWDETEQGIFEQVLKGDLDFISEPWPSVSESAKDLVRRMLIRDPKKRMTTHEVLCHPWARVDGVALDKPLDSAVLSRLQQFSAMNKLKKIAIKVIAESLSEEEIAGLKEMFKMIDTDNSGHITLEELKKGLDRVGADLKDSEILGLMQAADIDNSGTIDYGEFIAAMVHLNKIEKEDHLFTAFSYFDQDGSGYITRDELQQACKQFGLADVHLDDILREVDKDNDGRIDYSEFVDMINFLGNYSGDSSTSRRRFPSIWLWGRVLDLSLVDDTGLHPWDHLCYLRSCRMMTKFSCKFFIIFI

SEQ ID NO: 85696 - protein, 554 aa, Arabidopsis thaliana
  peptide (1)..(554): Ceres Seq. ID no. 12682571
MANEEPPPKPITENKEDPNSKPQKKEAHMKRMASAGLQIDSVLGRKTENLKDIYSVGRKLGQGQFGTTFLCVDKKTGKEFACKTIAKRKLTTPEDVEDVRREIQIMHHLSGHPNVIQIVGAYEDAVAVHVVMEICAGGELFDRIIQRGHYTEKKAAELARIIVGVIEACHSLGVMHRDLKPENFLFVSGDEEAALKTIDFGLSVFFKPGETFTDVVGSPYYVAPEVLRKHYSHECDVWSAGVIIYILLSGVPPFWDETEQGIFEQVLKGDLDFISEPWPSVSESAKDLVRRMLIRDPKKRMTTHEVLCHPWARVDGVALDKPLDSAVLSRLQQFSAMNKLKKIAIKVIAESLSEEEIAGLKEMFKMIDTDNSGHITLEELKKGLDRVGADLKDSEILGLMQAADIDNSGTIDYGEFIAAMVHLNKIEKEDHLFTAFSYFDQDGSGYITRDELQQACKQFGLADVHLDDILREVDKDNDGRIDYSEFVDMINFLGNYSGDSSTSRRRFPSIWLWGRVLDLSLVDDTGLHPWDHLCYLRSCRMMTKFSCKFFIIFI

SEQ ID NO: 85697 - protein, 526 aa, Arabidopsis thaliana
  peptide (1)..(526): Ceres Seq. ID no. 12682572
MKRMASAGLQIDSVLGRKTENLKDIYSVGRKLGQGQFGTTFLCVDKKTGKEFACKTIAKRKLTTPEDVEDVRREIQIMHHLSGHPNVIQIVGAYEDAVAVHVVMEICAGGELFDRIIQRGHYTEKKAAELARIIVGVIEACHSLGVMHRDLKPENFLFVSGDEEAALKTIDFGLSVFFKPGETFTDVVGSPYYVAPEVLRKHYSHECDVWSAGVIIYILLSGVPPFWDETEQGIFEQVLKGDLDFISEPWPSVSESAKDLVRRMLIRDPKKRMTTHEVLCHPWARVDGVALDKPLDSAVLSRLQQFSAMNKLKKIAIKVIAESLSEEEIAGLKEMFKMIDTDNSGHITLEELKKGLDRVGADLKDSEILGLMQAADIDNSGTIDYGEFIAAMVHLNKIEKEDHLFTAFSYFDQDGSGYITRDELQQACKQFGLADVHLDDILREVDKDNDGRIDYSEFVDMINFLGNYSGDSSTSRRRFPSIWLWGRVLDLSLVDDTGLHPWDHLCYLRSCRMMTKFSCKFFIIFI

SEQ ID NO: 85698 - DNA, 1080 bp, Arabidopsis thaliana
  misc_feature (1)..(1080): Ceres Seq. ID no. 12682598
  misc_feature (1)..(1080): Ortholog of  Ceres SEQ ID NO 13599231 as cited in SEQ ID NO 984
atgaaatggaagagagatccttatttcgacaacatcgaacacatcctccgatcatctcagctcaaatccgtcgtctctcttaagaactgtatcgtccaggaacctaatcgctgcattccgatctctgccatctccaagaagactcgtcaattcgatgtatcaaccaaaatcgctcacttcttaaggaagtttccttcaatctttgaagagttcgttggtccagagtataatctcccatggtttagattgacaccagaagcaacagaactagataggcaagagagagtcgtataccaaacttctgcagatgatttgcgtgataggttgaagaaattgattctgatgagtaaagataatgttttgccactaagtatagttcaaggaatgaaatggtatttaggtttacctgatgattacttgcagtttccagatatgaatttagattcttcgtttaggtttgtggatatggaagatggagttaaaggtttagcagtagattataatggaggagataaggttttgtctgtgttgcagaagaatgcaatgaagaagagaagaggagaagtgagtttagaagagattgagtttcctctgtttccatcaaaaggttgtagattgagagtcaagattgaagattggttaatggagtttcaaaagcttccttatgtatcaccatatgatgattattcatgtttggatccaagtagtgatatagcagagaagagagttgttggttttcttcatgaattgctttgtcttttcgttgagcattctgctgagaggaagaagttgttatgtctcaagaagcattttggattgccgcaaaaggttcataaggcgtttgagagacatccgcagattttctacttgtctatgaagaataaaacttgtacagctattcttagagagccttatagagataaagctagtgttgaaacacatcctgtgttgggggtaaggaagaaatacatccagttgatgaagaattcagagttgattctgaagagtcgaaggaatagtttcgggtttagggacgaaggggttgtagataaagatttggatttggattttgaaggctaa

SEQ ID NO: 85699 - protein, 359 aa, Arabidopsis thaliana; identical to SEQ ID NO: 72255
  peptide (1)..(359): Ceres Seq. ID no. 12682599

SEQ ID NO: 85700 - protein, 245 aa, Arabidopsis thaliana; identical to SEQ ID NO: 72256
  peptide (1)..(245): Ceres Seq. ID no. 12682600

SEQ ID NO: 85701 - protein, 231 aa, Arabidopsis thaliana
  peptide (1)..(231): Ceres Seq. ID no. 12682601
MKWYLGLPDDYLQFPDMNLDSSFRFVDMEDGVKGLAVDYNGGDKVLSVLQKNAMKKRRGEVSLEEIEFPLFPSKGCRLRVKIEDWLMEFQKLPYVSPYDDYSCLDPSSDIAEKRVVGFLHELLCLFVEHSAERKKLLCLKKHFGLPQKVHKAFERHPQIFYLSMKNKTCTAILREPYRDKASVETHPVLGVRKKYIQLMKNSELILKSRRNSFGFRDEGVVDKDLDLDFEG

SEQ ID NO: 85702 - DNA, 696 bp, Arabidopsis thaliana
  misc_feature (1)..(696): Ceres Seq. ID no. 12682602
  misc_feature (1)..(696): Ortholog of  Ceres SEQ ID NO 15177803 as cited in SEQ ID NO 54174
  misc_feature (1)..(696): Ortholog of  Ceres SEQ ID NO 13596550 as cited in SEQ ID NO 62777
atgcatgagttctctactgttgatggttttgcggagataaacgagagcttagcggagatgataaagtacattgcaaatgaaccctcagtggggctttactacattcaacagcacatccgaaacgcagcaccgaatgttattaatctcaacaacaacgttttggagaagtcccgtgaaacaggcttgcataccgaagacttggaagattctatagccatggtgaaatctatgaaagactgtggttcacctattgctgatgagatgataggagacattaagaactctttagcgataatgtcttcgaaacaaccgaggagaggggtcatcctcaactccacaagtccttggagcagatccagcagtataacaacaagaacgcgtggttctgataacagccaggataatagtgaaagcagcaactatttcacatcagtcttcatgacggctaaggagaaggcaagcaacatcaaatggccacaacttgatttcaaagaacaaaagtcagaggctgaccccaatgtgcaaagcaatgagttaaaagaagaagaagaagaggactcagggaaaggtgaacatattgtggagacaacaaagtttgaggagttcaaggcaggtaaagaagcgagtctcaaggcatggcttggagatatggatgggaatgtggatgttggtggtcgtgttgccgagagaatttag

SEQ ID NO: 85703 - protein, 231 aa, Arabidopsis thaliana; identical to SEQ ID NO: 44612
  peptide (1)..(231): Ceres Seq. ID no. 12682603

SEQ ID NO: 85704 - protein, 212 aa, Arabidopsis thaliana; identical to SEQ ID NO: 44613
  peptide (1)..(212): Ceres Seq. ID no. 12682604

SEQ ID NO: 85705 - protein, 159 aa, Arabidopsis thaliana; identical to SEQ ID NO: 44614
  peptide (1)..(159): Ceres Seq. ID no. 12682605

SEQ ID NO: 85706 - DNA, 2259 bp, Arabidopsis thaliana
  misc_feature (1)..(2259): Ceres Seq. ID no. 12682606
  misc_feature (1)..(2259): Ortholog of  Ceres SEQ ID NO 13654989 as cited in SEQ ID NO 63117
  misc_feature (1)..(2259): Ortholog of  Ceres SEQ ID NO 13584744 as cited in SEQ ID NO 69137
atgcaacccaattctcacatcttcgtcatcatcaccatttcatcactcatcattacagtttctgcgtatggctcaacaggcacaatcgcagcagctttcggcgaaaacggattcttctgcgccattgacgcaagtgggaagcaagaagtcatctgttgggatagaggaaacactaaccgatcattaaaccgacccccaggtgaaatctccggttattctcctccaatgacttctctttccggtggtgaaggttttctctgcgccattacgtcgaacacttcgcgtgcgttttgttggaaccttgaagatccttctgagaatctcgttcctcgagcttttcagtataattcttacttacagattgcttctggtaacaatcatgtttgtgctattagtggattgtattactcaggtcctgattatggtcctgttcattgttgggagtatagtgataacactaatttcacttctgatgggttttcttgtggtgttactaaagatggagacttggtttgttggggaccaaaatcaaaccttttgaatttctccaataatgaagaattcgaggttttagcttctgggaggaactctgtttgtggtgtctctaaagattcaggtcaacttcattgctttggagatgaaacagagtttggttcgttaccaaaccggcctcggtttattgctctttcagctggtgctaatcattattgtggtatacgtgaggatgatcatggagttgagtgttggggaaggaacttgaattcttcttcatcatcttcagctcctaatacttcagggtttgtggcgatttcgtcttcggattcaacaacttgtggagttagagagcttgatttagttcttgattgttggagagttcatgattcttcgaaagcggattatagtcctcctttggagttatgtagccccgggatgtgttcgcctcgcggtaattgtggtgatggttggtttgctttcaatgcaagtatcttgaaagaatctgagcttactagcttgtgctcgtttcataacctcaacatttgtttacgttgtggaatcagttgcttggaagggtatttcccttccagcacttgtaatccaaacgcggaccgggtctgtactccttgttcgctatgtcagaatagttcttgttacggtatctgtaagattcgggctacgaaatcgaaggagcatgagcagaaagagcagagagaggtacggagattggtgatcatcatagggtgctctgttttagggttcttggtgatgttgattggtttgtctttcattccaaagatgacaaaaggtagtaaacgagatgatgaagagaggagtaagatgacttgttgcttctgtttcgataagaattctgtagaagctgatcctgatcctgtccctcatcagtcggttcttctaccaaccgctgtatctctcggggaaaccaagatcttccgtctatcagaacttaaagacgcgactcacgggttcaaagaattcaacgagctcgggagaggtagcttcgggtttgtctataaagctgttttatctgatgggatacatgttgcggtcaaaagagcgaatgctgcaacgatcattcactctaataaccgaggtttcgagtccgagctagagattctttgcaaaatcagacacaacaatattgtgaatttgttaggatactgctcagagatgggggaaaggcttttggtttatgagtacatgccgcacggtacgcttcatgatcatctccatggagatctttcacaactggactggagcatgagactgaagatcatgttgcaggctgcaagaggacttgattacttacacaacgaagtagatcctccgataattcacagagatgtgaaaacgtccaacatcttgttagacggtgaaatgtgcgcaagaattgcggatttcggattggtaagctcgaatgaaagggattcaagcaatagtgatagagaaggtgatgtgtatgactttggtattgttctacttgagatactaagcgggcgaaaagctatcgatagagagtctgatcctgcggggattgcggaatgggcggttcctttgatcaggaaaggaaaagcagcggcgataatcgataggaacatttgtttgccaagaaatgtagagcctttgcttaaattggctgagttagctgagcttgctgtgagggaaaattcgaatgaacgaccaaatatcagaaatattctgtgttttcttgatctcatcgtcaagtctggcctcactttttaa

SEQ ID NO: 85707 - protein, 752 aa, Arabidopsis thaliana
  peptide (1)..(752): Ceres Seq. ID no. 12682607
MQPNSHIFVIITISSLIITVSAYGSTGTIAAAFGENGFFCAIDASGKQEVICWDRGNTNRSLNRPPGEISGYSPPMTSLSGGEGFLCAITSNTSRAFCWNLEDPSENLVPRAFQYNSYLQIASGNNHVCAISGLYYSGPDYGPVHCWEYSDNTNFTSDGFSCGVTKDGDLVCWGPKSNLLNFSNNEEFEVLASGRNSVCGVSKDSGQLHCFGDETEFGSLPNRPRFIALSAGANHYCGIREDDHGVECWGRNLNSSSSSSAPNTSGFVAISSSDSTTCGVRELDLVLDCWRVHDSSKADYSPPLELCSPGMCSPRGNCGDGWFAFNASILKESELTSLCSFHNLNICLRCGISCLEGYFPSSTCNPNADRVCTPCSLCQNSSCYGICKIRATKSKEHEQKEQREVRRLVIIIGCSVLGFLVMLIGLSFIPKMTKGSKRDDEERSKMTCCFCFDKNSVEADPDPVPHQSVLLPTAVSLGETKIFRLSELKDATHGFKEFNELGRGSFGFVYKAVLSDGIHVAVKRANAATIIHSNNRGFESELEILCKIRHNNIVNLLGYCSEMGERLLVYEYMPHGTLHDHLHGDLSQLDWSMRLKIMLQAARGLDYLHNEVDPPIIHRDVKTSNILLDGEMCARIADFGLVSSNERDSSNSDREGDVYDFGIVLLEILSGRKAIDRESDPAGIAEWAVPLIRKGKAAAIIDRNICLPRNVEPLLKLAELAELAVRENSNERPNIRNILCFLDLIVKSGLTF

SEQ ID NO: 85708 - protein, 677 aa, Arabidopsis thaliana
  peptide (1)..(677): Ceres Seq. ID no. 12682608
MTSLSGGEGFLCAITSNTSRAFCWNLEDPSENLVPRAFQYNSYLQIASGNNHVCAISGLYYSGPDYGPVHCWEYSDNTNFTSDGFSCGVTKDGDLVCWGPKSNLLNFSNNEEFEVLASGRNSVCGVSKDSGQLHCFGDETEFGSLPNRPRFIALSAGANHYCGIREDDHGVECWGRNLNSSSSSSAPNTSGFVAISSSDSTTCGVRELDLVLDCWRVHDSSKADYSPPLELCSPGMCSPRGNCGDGWFAFNASILKESELTSLCSFHNLNICLRCGISCLEGYFPSSTCNPNADRVCTPCSLCQNSSCYGICKIRATKSKEHEQKEQREVRRLVIIIGCSVLGFLVMLIGLSFIPKMTKGSKRDDEERSKMTCCFCFDKNSVEADPDPVPHQSVLLPTAVSLGETKIFRLSELKDATHGFKEFNELGRGSFGFVYKAVLSDGIHVAVKRANAATIIHSNNRGFESELEILCKIRHNNIVNLLGYCSEMGERLLVYEYMPHGTLHDHLHGDLSQLDWSMRLKIMLQAARGLDYLHNEVDPPIIHRDVKTSNILLDGEMCARIADFGLVSSNERDSSNSDREGDVYDFGIVLLEILSGRKAIDRESDPAGIAEWAVPLIRKGKAAAIIDRNICLPRNVEPLLKLAELAELAVRENSNERPNIRNILCFLDLIVKSGLTF

SEQ ID NO: 85709 - protein, 442 aa, Arabidopsis thaliana
  peptide (1)..(442): Ceres Seq. ID no. 12682609
MCSPRGNCGDGWFAFNASILKESELTSLCSFHNLNICLRCGISCLEGYFPSSTCNPNADRVCTPCSLCQNSSCYGICKIRATKSKEHEQKEQREVRRLVIIIGCSVLGFLVMLIGLSFIPKMTKGSKRDDEERSKMTCCFCFDKNSVEADPDPVPHQSVLLPTAVSLGETKIFRLSELKDATHGFKEFNELGRGSFGFVYKAVLSDGIHVAVKRANAATIIHSNNRGFESELEILCKIRHNNIVNLLGYCSEMGERLLVYEYMPHGTLHDHLHGDLSQLDWSMRLKIMLQAARGLDYLHNEVDPPIIHRDVKTSNILLDGEMCARIADFGLVSSNERDSSNSDREGDVYDFGIVLLEILSGRKAIDRESDPAGIAEWAVPLIRKGKAAAIIDRNICLPRNVEPLLKLAELAELAVRENSNERPNIRNILCFLDLIVKSGLTF

SEQ ID NO: 85710 - DNA, 933 bp, Arabidopsis thaliana
  misc_feature (1)..(933): Ceres Seq. ID no. 12682659
  misc_feature (1)..(933): Ortholog of  Ceres SEQ ID NO 13598735 as cited in SEQ ID NO 64586
atgacccaaaaaccacgaactgtgatctgcgtcggagacatccatggaaacatatcaaagctcaataaactctggcttaatcttcaatccgatatccaaaactcagatttcagctcagctctcgtcatcttcctcggcgactactgcgatcgtggaccggagactcgaaaagtcatcgacttcttgatctctttgccggagaaacatcccgatcagacccatgtctttcttgccggaaaccacgactttgcttttgctggcttcttgggtttgttacctcgcccttcagatgggtctgagtttaaggaaacgtggaaagagtactcaaaaagtgaggagagagaaggatggtataaaggtgaagggtttgagaatatgcatctccaaagcaggagatgggcgggaaagattagggttcagttcgattattccgcatatggagtgttgtataatggatcaatatacgatgcggcgtctacttttgaatcttatggcgttcctcatggatcttctgatttgataaaggcagtacctgagagtcacaagaaattcttgaccaatatggtttgggtacataaagaggatgatgtttgtatagaaacagaggaaggccttacgcattgtaagttgattgccgtacatgctggtctagagacaaagaataacgtagaagaacagcttaaactattgagagataaagacacaagcatcccaagaatacaacctctaactggtcggaaaaccgtttgggggatcccacaggaactggatgataaaaagactattgttgttagcggccaccatgggaaacttcacatcgatggcttgagattgatcatcgatgaaggtggtggatataccgatacacctttggctgcaattgttcttccttctaagaagattatccgcgacaccgataatttttccaattaa

SEQ ID NO: 85711 - protein, 310 aa, Arabidopsis thaliana; identical to SEQ ID NO: 43054
  peptide (1)..(310): Ceres Seq. ID no. 12682660

SEQ ID NO: 85712 - protein, 185 aa, Arabidopsis thaliana
  peptide (1)..(185): Ceres Seq. ID no. 12682661
MHLQSRRWAGKIRVQFDYSAYGVLYNGSIYDAASTFESYGVPHGSSDLIKAVPESHKKFLTNMVWVHKEDDVCIETEEGLTHCKLIAVHAGLETKNNVEEQLKLLRDKDTSIPRIQPLTGRKTVWGIPQELDDKKTIVVSGHHGKLHIDGLRLIIDEGGGYTDTPLAAIVLPSKKIIRDTDNFSN

SEQ ID NO: 85713 - DNA, 1161 bp, Arabidopsis thaliana
  misc_feature (1)..(1161): Ceres Seq. ID no. 12682678
  misc_feature (1)..(1161): Ortholog of  Ceres SEQ ID NO 13599990 as cited in SEQ ID NO 0
atgccgcaaaatccaccaaatccccaaaattcaattcagttccagcatcctcatccttacaccacctccggcgaccaacaaactcagccgccgataaaatccttatacccatacgcctcaaaacccaaacaaatgtcacccattagcggtggcggttgcgacgacgaggatcgcgggtcgggttccggatccggttgcaaccctgaagacagcgcgggaactgacgggaagaggaaattgtcacaatggcatagaatgaaatggacggatacaatggttaggcttttgatcatggcggttttctacatcggtgacgaaaagaaagggaagtggaaatcagtgtcgagagctatggtggagaaaggtttctctgtgtcaccacaacaatgtgaagacaagttcaatgatttgaacaagaggtacaagagagttaacgatattcttggtaaaggaatcgcttgtcgtgtcgttgagaatcaaggattgttagagagtatggatcatttgactccgaagttgaaagatgaagtcaagaagttgcttaattctaagcatcttttctttagagagatgtgtgcttatcataatagttgtggtcatcttggtggtcatgaccaacaaccaccgcaacagaatcctatttcgattccgattccgagtcagcagcagaactgttttcacgcggcggaagcagggaaaatggcgagaattgcggagagggtggaggtggaggaggaagtagagtctgatatggcggaggattcggagtcagagatggaggaatcagaggaagaagagacgaggaagaagcggaggatatcgacggcggtgaagaggttgagggaagaagcggcaagtgtagtggaagatgttgggaagagtgtgtgggagaagaaagagtggataaggagaaagatgttggagattgaggagaagaagattgggtatgagtgggaaggagtggagatggagaagcagagagtgaagtggatgagatataggagcaagaaagagagagagatggagaaggctaagcttgacaatcagagacggaggcttgagacggagaggatgattctcatgttacggcggagtgaaattgagttgaatgagttacagtcttcgggtacacgggttgacccgagttccgctaaggggtga

SEQ ID NO: 85714 - protein, 386 aa, Arabidopsis thaliana
  peptide (1)..(386): Ceres Seq. ID no. 12682679
MPQNPPNPQNSIQFQHPHPYTTSGDQQTQPPIKSLYPYASKPKQMSPISGGGCDDEDRGSGSGSGCNPEDSAGTDGKRKLSQWHRMKWTDTMVRLLIMAVFYIGDEKKGKWKSVSRAMVEKGFSVSPQQCEDKFNDLNKRYKRVNDILGKGIACRVVENQGLLESMDHLTPKLKDEVKKLLNSKHLFFREMCAYHNSCGHLGGHDQQPPQQNPISIPIPSQQQNCFHAAEAGKMARIAERVEVEEEVESDMAEDSESEMEESEEEETRKKRRISTAVKRLREEAASVVEDVGKSVWEKKEWIRRKMLEIEEKKIGYEWEGVEMEKQRVKWMRYRSKKEREMEKAKLDNQRRRLETERMILMLRRSEIELNELQSSGTRVDPSSAKG

SEQ ID NO: 85715 - protein, 342 aa, Arabidopsis thaliana
  peptide (1)..(342): Ceres Seq. ID no. 12682680
MSPISGGGCDDEDRGSGSGSGCNPEDSAGTDGKRKLSQWHRMKWTDTMVRLLIMAVFYIGDEKKGKWKSVSRAMVEKGFSVSPQQCEDKFNDLNKRYKRVNDILGKGIACRVVENQGLLESMDHLTPKLKDEVKKLLNSKHLFFREMCAYHNSCGHLGGHDQQPPQQNPISIPIPSQQQNCFHAAEAGKMARIAERVEVEEEVESDMAEDSESEMEESEEEETRKKRRISTAVKRLREEAASVVEDVGKSVWEKKEWIRRKMLEIEEKKIGYEWEGVEMEKQRVKWMRYRSKKEREMEKAKLDNQRRRLETERMILMLRRSEIELNELQSSGTRVDPSSAKG

SEQ ID NO: 85716 - protein, 301 aa, Arabidopsis thaliana
  peptide (1)..(301): Ceres Seq. ID no. 12682681
MKWTDTMVRLLIMAVFYIGDEKKGKWKSVSRAMVEKGFSVSPQQCEDKFNDLNKRYKRVNDILGKGIACRVVENQGLLESMDHLTPKLKDEVKKLLNSKHLFFREMCAYHNSCGHLGGHDQQPPQQNPISIPIPSQQQNCFHAAEAGKMARIAERVEVEEEVESDMAEDSESEMEESEEEETRKKRRISTAVKRLREEAASVVEDVGKSVWEKKEWIRRKMLEIEEKKIGYEWEGVEMEKQRVKWMRYRSKKEREMEKAKLDNQRRRLETERMILMLRRSEIELNELQSSGTRVDPSSAKG

SEQ ID NO: 85717 - DNA, 5532 bp, Arabidopsis thaliana
  misc_feature (1)..(5532): Ceres Seq. ID no. 12682712
  misc_feature (1)..(5532): Ortholog of  Ceres SEQ ID NO 13600310 as cited in SEQ ID NO 5086
  misc_feature (1)..(5532): Ortholog of  Ceres SEQ ID NO 13639469 as cited in SEQ ID NO 54825
  misc_feature (1)..(5532): Ortholog of  Ceres SEQ ID NO 15179301 as cited in SEQ ID NO 0
atggagagaatccatgtctcagtcagagcgcgaccgctttcgtcggaggacgcgaagacaagtccctggaagatctcttccgactcaattttcatgcccaatcactcttctctcgcttttgaatttgatcgaatttttagagaagattgtaaaactgtccaagtgtatgaggcgcggacgaaggagattgtttctgccgctgttcgtggattcaacggaaccgtatttgcttacgggcaaactaacagtggcaagacgcatacaatgcgaggctcacctattgaacctggagttattcctctcgctgtacatgatttgtttgacactatatatcaggatgcaagtagagagtttctgttgcgtatgtcgtacctggagatttataatgaagatattaacgatttgctggcccctgagcacagaaaactacagattcatgaaaatctagagaaaggaatatttgttgctggattacgagaagagattgtcgcttcccctcaacaagtccttgaaatgatggaatttggagaatctcatcggcatattggggagacaaatatgaatctttacagtagcagatctcacactatttttcgcatgattatagaaagtagacagaagatgcaagatgaaggtgttggaaattcctgtgatgcagttcgtgtttctgttctgaatttggtggatctagctggttcagaacgggctgcaaaaaccggtgcagagggtgttaggttgaaggagggctcacatataaacaaaagcttgatgacactcgggactgtcataaaaaaactgagtgaaggagtagaaactcaaggtggtcatgtcccgtaccgagacagcaagcttacaaggatcttgcagcctgccttaggtgggaatgccaacacagctattatatgcaatatcacacttgcaccgattcatgcagatgaaaccaagagcagtcttcagttcgctagccgagcactgcgtgtcactaactgtgcccatgtcaatgagattttgactgatgctgctctattaaagcgccagaagaaggagatagaggagctcagatccaaactaaagacttctcactctgaccattcagaagaagagattcttaacttgcgtaacaccttgttgaagtctgaattagagagagagcgaatagcacttgagttagaagaggagaagaaggcacaagctcagagggaaagagttttgcaggagcaagccaaaaaaatcaagaacttgagttcaatggttcttctttcgaatagagatgagaagcgtgagcaggatcactttaagaagggaaaaaggagggatacatggtgtattggtaagctttcacgagactccacatcagaggatcagtctaatgttttgtcaaggggatcctctcttgaatctgcaagatccgagcgtgagactggtccactacttccattttcagaactagtaaatgaacctttatataacattaacgaggaagatgaagatagtatcgagggaacccttgaagattctgtacttccagatccatgtgcattagtgaatgtgacaagcagaaagaaaccatcaattaagcagaaaaatcctgtagtggttgaaaacgaattagatagaattcaaagggaatatgaggctcttctcttgcaatatgaaaccgaggtgaaattgggtgaagatggtttatctggtgatgcaaaatgcaagcaatcagaagtcgttggcaacgtgcattgcgaagaacatgttgtaaacttaagagatccagaagctattcttctcatcaagcaactacaagagaagataaacatgctagaattggagaagtcttcaagcaaccgaaatcttgatgatcttgttatggtagctactgagcagaatatatgtgccagggaaaaatttgctgagattcaagaagagattcatgctgctagagaagaggcccaggttgctcgtgaacaacttgtgtctaaggagtctgaagttattgatgtgattaatgagaatttcaactcactggtcaacgtagcaaccgaaattgaagtcttagagtctgaatttcaaaaatataaagcatcagtagaaaccatatcatcagttatgaatgagggtctccaagattttgctttcttctctccgttgatacatgatttcacattgtttgtgcgccaaagttctgagcaacatgattcacttatcaacagctaccaaactgtccaatctagtctaaaaaaaaaagttcttgatgttgagaatgagaagcttcttttgcaagagcagtgtgctggtctgcagagccaaatagaagaactaaatcaggaagcccaaaagcatgaaacttccttaaagatgctctcagaacaccatgagtcggagaggtcagatctactctctcacatagaatgtcttgaaaaggatatagggagtctgtcatcctcttccttggccaaagagaaggagaacctaagaaaagattttgagaagacgaaaacaaagctaaaagacactgaatccaagctaaagaattccatgcaagataaaaccaagctagaggccgagaaagcatctgctgaaagagagttaaaacgcttgcatagccagaaggccctactcgagagagacatcagcaaacaggagtcctttgctggtaaaagacgcgactctcttcttgttgagagaagtgctaaccagtcgttgcaggaagaatttaaacagcttgaagtgcttgcttttgaaatggaaaccacaattgcttcactggaggaagagctggccgctgaacgtggagaaaaagaggaggcactctgtagaaatgacggtttaggctcagaaattacagatctgacagagaaactggagcactcaaatactaaactagaacatcttcaaaacgatgtcacggagcttaaaacgagacttgaagtctcatcttctgatcagcagcaactggaaaccaatgttaaacagttgcttgaagaaaaggaagagctagcaatgcatctggcgaactcacttttggaaatggaggaggagaaagcaatatggagctcgaaagaaaaagctttgacagaggctgtggaggaaaagatcagactatataaaaatatacaaattgagtcactatccaaagaaatgtcagaggaaaagaaggagctggaatcttgtcgacttgaatgcgttactcttgctgataggcttagatgttctgaggagaatgctaagcaggacaaagaaagcagcctggagaagtctttggagattgatagactgggtgatgaacttcgatcagctgatgctgtgagtaagcaatctcaagaggttctcaagtctgatatcgacatactaaagtccgaagttcaacatgcttgcaagatgtcggatacatttcagagagagatggattatgtcacaagtgagcgccagggtttgctagctcgcatagaggagttgagtaaggagcttgcttcatcaaatcgttggcaggatgcagctgcagaaaacaaggagaaggcaaagctaaaaatgagactcaggggtatgcaagcacgcttagatgcaatcagtctacggtacaagcagtctgtgcaagaatcagaacttatgaacaggaagttcaaagaggcatctgctaagctaaaggagaagttagcatcaaaagcactcgaagttctcgacctcaagaagcaactctctgcttcttcaagaacaattgatgaaccgagaaactcacttgagagttattgtgatgcggcagttgtggttgcgactgtggtggttgtggttgtcgagcaggagattccaaatcttaggtactcaagcaattcaatagaagttgtggagaaagctgccattaatatgggttcaaaggaagacaaggcagataatccagctttatcttcatatgatgatgccatggaagctctgtcgactcttatttctcgtcgaaaccgtggggatcgcacacctactaaaggaaatcgtgacaagcttgaacaagtcgtcacatatctcaagattttggacctggaagacaaaataaaagaactaaaagttattcatgtcgcaggaacaaaaggaaagggttcaacatgtgtcttcagtgaggcaattttacgtaattgtgggtttcgaaccggaatgtttacatctcctcacttgattgatgtgagggaaagattccgaatagatggcttggatatatctgaggaaaagtttctacagtacttctgggaatgttggaagttattgaaggagaaagctgtagatggtcttaccatgcctcctctttttcagtttctcacagtattggcatttaagatttttgtttgtgaaaaggttgatgttgctgtcattgaagttggacttgggggaaaacttgactcgacaaatgtgattcaaaaacctgttgtctgtggcattgcttctcttgggatggatcatatggacatattgggaaatacgctagctgatattgcctttcataaggctgggattttcaagcctcaaatccccgccttcacagtaccacaactctctgaagcaatggatgttcttcagaaaacagctaataatctcgaggttcctctagaagtagtagcgcctcttgaacctaaaaagttggacggagttacgcttggcttgtctggggatcatcagctagtaaatgcaggtcttgctgtttctctttcaagatgctggcttcaaagaaccgggaattggaagaagatatttccaaatgaaagcaaggaaactgagattcccgtggcattttgtcgtggtcttgcaacggcacgtcttcatgggagagctcaagttgttcatgatgtagtttcagatccgcaggactcatcagactcgatggaaactccatgcggtgatctgatcttttacttggatggtgctcacagtccagagagcatggaggcttgtggtcgatggttctcttctgcagtcagaggagacaaaagcttatccactgctgtcaatggttacatgagacatggggagtatggtacagacttaaacagagtctccaaacagattcttctgttcaactgcatggaagtgagagaccctcaagtcttacttccaaagctggtcaccacttgcgcttcctcaggcactcatttctcaagagcgctttttgtcccgagcatgtctacttacaacaaagtcatttcgggtgcatcagcgattccttcagatacacgtagaaaggatttgacttggcaattcagactacaaagactatgggagaaatcaatccaagggactgatgcggggcttgaccatacactgaaacccgatggaataaccgccttaccacctcatgatttcctgtgcggagatgcacctcaatgtggtggacctgcagggacaccggtcacttccagtgccgtaatgccttcacttccattgactataaactggctaagagactgcgtacgccgaaacccttcactgaaactagaggttctggtcacaggatcgctacatcttgttggagatgtgctcaggttgctaaagagatga

SEQ ID NO: 85718 - protein, 1843 aa, Arabidopsis thaliana
  peptide (1)..(1843): Ceres Seq. ID no. 12682713
MERIHVSVRARPLSSEDAKTSPWKISSDSIFMPNHSSLAFEFDRIFREDCKTVQVYEARTKEIVSAAVRGFNGTVFAYGQTNSGKTHTMRGSPIEPGVIPLAVHDLFDTIYQDASREFLLRMSYLEIYNEDINDLLAPEHRKLQIHENLEKGIFVAGLREEIVASPQQVLEMMEFGESHRHIGETNMNLYSSRSHTIFRMIIESRQKMQDEGVGNSCDAVRVSVLNLVDLAGSERAAKTGAEGVRLKEGSHINKSLMTLGTVIKKLSEGVETQGGHVPYRDSKLTRILQPALGGNANTAIICNITLAPIHADETKSSLQFASRALRVTNCAHVNEILTDAALLKRQKKEIEELRSKLKTSHSDHSEEEILNLRNTLLKSELERERIALELEEEKKAQAQRERVLQEQAKKIKNLSSMVLLSNRDEKREQDHFKKGKRRDTWCIGKLSRDSTSEDQSNVLSRGSSLESARSERETGPLLPFSELVNEPLYNINEEDEDSIEGTLEDSVLPDPCALVNVTSRKKPSIKQKNPVVVENELDRIQREYEALLLQYETEVKLGEDGLSGDAKCKQSEVVGNVHCEEHVVNLRDPEAILLIKQLQEKINMLELEKSSSNRNLDDLVMVATEQNICAREKFAEIQEEIHAAREEAQVAREQLVSKESEVIDVINENFNSLVNVATEIEVLESEFQKYKASVETISSVMNEGLQDFAFFSPLIHDFTLFVRQSSEQHDSLINSYQTVQSSLKKKVLDVENEKLLLQEQCAGLQSQIEELNQEAQKHETSLKMLSEHHESERSDLLSHIECLEKDIGSLSSSSLAKEKENLRKDFEKTKTKLKDTESKLKNSMQDKTKLEAEKASAERELKRLHSQKALLERDISKQESFAGKRRDSLLVERSANQSLQEEFKQLEVLAFEMETTIASLEEELAAERGEKEEALCRNDGLGSEITDLTEKLEHSNTKLEHLQNDVTELKTRLEVSSSDQQQLETNVKQLLEEKEELAMHLANSLLEMEEEKAIWSSKEKALTEAVEEKIRLYKNIQIESLSKEMSEEKKELESCRLECVTLADRLRCSEENAKQDKESSLEKSLEIDRLGDELRSADAVSKQSQEVLKSDIDILKSEVQHACKMSDTFQREMDYVTSERQGLLARIEELSKELASSNRWQDAAAENKEKAKLKMRLRGMQARLDAISLRYKQSVQESELMNRKFKEASAKLKEKLASKALEVLDLKKQLSASSRTIDEPRNSLESYCDAAVVVATVVVVVVEQEIPNLRYSSNSIEVVEKAAINMGSKEDKADNPALSSYDDAMEALSTLISRRNRGDRTPTKGNRDKLEQVVTYLKILDLEDKIKELKVIHVAGTKGKGSTCVFSEAILRNCGFRTGMFTSPHLIDVRERFRIDGLDISEEKFLQYFWECWKLLKEKAVDGLTMPPLFQFLTVLAFKIFVCEKVDVAVIEVGLGGKLDSTNVIQKPVVCGIASLGMDHMDILGNTLADIAFHKAGIFKPQIPAFTVPQLSEAMDVLQKTANNLEVPLEVVAPLEPKKLDGVTLGLSGDHQLVNAGLAVSLSRCWLQRTGNWKKIFPNESKETEIPVAFCRGLATARLHGRAQVVHDVVSDPQDSSDSMETPCGDLIFYLDGAHSPESMEACGRWFSSAVRGDKSLSTAVNGYMRHGEYGTDLNRVSKQILLFNCMEVRDPQVLLPKLVTTCASSGTHFSRALFVPSMSTYNKVISGASAIPSDTRRKDLTWQFRLQRLWEKSIQGTDAGLDHTLKPDGITALPPHDFLCGDAPQCGGPAGTPVTSSAVMPSLPLTINWLRDCVRRNPSLKLEVLVTGSLHLVGDVLRLLKR

SEQ ID NO: 85719 - protein, 1812 aa, Arabidopsis thaliana
  peptide (1)..(1812): Ceres Seq. ID no. 12682714
MPNHSSLAFEFDRIFREDCKTVQVYEARTKEIVSAAVRGFNGTVFAYGQTNSGKTHTMRGSPIEPGVIPLAVHDLFDTIYQDASREFLLRMSYLEIYNEDINDLLAPEHRKLQIHENLEKGIFVAGLREEIVASPQQVLEMMEFGESHRHIGETNMNLYSSRSHTIFRMIIESRQKMQDEGVGNSCDAVRVSVLNLVDLAGSERAAKTGAEGVRLKEGSHINKSLMTLGTVIKKLSEGVETQGGHVPYRDSKLTRILQPALGGNANTAIICNITLAPIHADETKSSLQFASRALRVTNCAHVNEILTDAALLKRQKKEIEELRSKLKTSHSDHSEEEILNLRNTLLKSELERERIALELEEEKKAQAQRERVLQEQAKKIKNLSSMVLLSNRDEKREQDHFKKGKRRDTWCIGKLSRDSTSEDQSNVLSRGSSLESARSERETGPLLPFSELVNEPLYNINEEDEDSIEGTLEDSVLPDPCALVNVTSRKKPSIKQKNPVVVENELDRIQREYEALLLQYETEVKLGEDGLSGDAKCKQSEVVGNVHCEEHVVNLRDPEAILLIKQLQEKINMLELEKSSSNRNLDDLVMVATEQNICAREKFAEIQEEIHAAREEAQVAREQLVSKESEVIDVINENFNSLVNVATEIEVLESEFQKYKASVETISSVMNEGLQDFAFFSPLIHDFTLFVRQSSEQHDSLINSYQTVQSSLKKKVLDVENEKLLLQEQCAGLQSQIEELNQEAQKHETSLKMLSEHHESERSDLLSHIECLEKDIGSLSSSSLAKEKENLRKDFEKTKTKLKDTESKLKNSMQDKTKLEAEKASAERELKRLHSQKALLERDISKQESFAGKRRDSLLVERSANQSLQEEFKQLEVLAFEMETTIASLEEELAAERGEKEEALCRNDGLGSEITDLTEKLEHSNTKLEHLQNDVTELKTRLEVSSSDQQQLETNVKQLLEEKEELAMHLANSLLEMEEEKAIWSSKEKALTEAVEEKIRLYKNIQIESLSKEMSEEKKELESCRLECVTLADRLRCSEENAKQDKESSLEKSLEIDRLGDELRSADAVSKQSQEVLKSDIDILKSEVQHACKMSDTFQREMDYVTSERQGLLARIEELSKELASSNRWQDAAAENKEKAKLKMRLRGMQARLDAISLRYKQSVQESELMNRKFKEASAKLKEKLASKALEVLDLKKQLSASSRTIDEPRNSLESYCDAAVVVATVVVVVVEQEIPNLRYSSNSIEVVEKAAINMGSKEDKADNPALSSYDDAMEALSTLISRRNRGDRTPTKGNRDKLEQVVTYLKILDLEDKIKELKVIHVAGTKGKGSTCVFSEAILRNCGFRTGMFTSPHLIDVRERFRIDGLDISEEKFLQYFWECWKLLKEKAVDGLTMPPLFQFLTVLAFKIFVCEKVDVAVIEVGLGGKLDSTNVIQKPVVCGIASLGMDHMDILGNTLADIAFHKAGIFKPQIPAFTVPQLSEAMDVLQKTANNLEVPLEVVAPLEPKKLDGVTLGLSGDHQLVNAGLAVSLSRCWLQRTGNWKKIFPNESKETEIPVAFCRGLATARLHGRAQVVHDVVSDPQDSSDSMETPCGDLIFYLDGAHSPESMEACGRWFSSAVRGDKSLSTAVNGYMRHGEYGTDLNRVSKQILLFNCMEVRDPQVLLPKLVTTCASSGTHFSRALFVPSMSTYNKVISGASAIPSDTRRKDLTWQFRLQRLWEKSIQGTDAGLDHTLKPDGITALPPHDFLCGDAPQCGGPAGTPVTSSAVMPSLPLTINWLRDCVRRNPSLKLEVLVTGSLHLVGDVLRLLKR

SEQ ID NO: 85720 - protein, 1755 aa, Arabidopsis thaliana
  peptide (1)..(1755): Ceres Seq. ID no. 12682715
MRGSPIEPGVIPLAVHDLFDTIYQDASREFLLRMSYLEIYNEDINDLLAPEHRKLQIHENLEKGIFVAGLREEIVASPQQVLEMMEFGESHRHIGETNMNLYSSRSHTIFRMIIESRQKMQDEGVGNSCDAVRVSVLNLVDLAGSERAAKTGAEGVRLKEGSHINKSLMTLGTVIKKLSEGVETQGGHVPYRDSKLTRILQPALGGNANTAIICNITLAPIHADETKSSLQFASRALRVTNCAHVNEILTDAALLKRQKKEIEELRSKLKTSHSDHSEEEILNLRNTLLKSELERERIALELEEEKKAQAQRERVLQEQAKKIKNLSSMVLLSNRDEKREQDHFKKGKRRDTWCIGKLSRDSTSEDQSNVLSRGSSLESARSERETGPLLPFSELVNEPLYNINEEDEDSIEGTLEDSVLPDPCALVNVTSRKKPSIKQKNPVVVENELDRIQREYEALLLQYETEVKLGEDGLSGDAKCKQSEVVGNVHCEEHVVNLRDPEAILLIKQLQEKINMLELEKSSSNRNLDDLVMVATEQNICAREKFAEIQEEIHAAREEAQVAREQLVSKESEVIDVINENFNSLVNVATEIEVLESEFQKYKASVETISSVMNEGLQDFAFFSPLIHDFTLFVRQSSEQHDSLINSYQTVQSSLKKKVLDVENEKLLLQEQCAGLQSQIEELNQEAQKHETSLKMLSEHHESERSDLLSHIECLEKDIGSLSSSSLAKEKENLRKDFEKTKTKLKDTESKLKNSMQDKTKLEAEKASAERELKRLHSQKALLERDISKQESFAGKRRDSLLVERSANQSLQEEFKQLEVLAFEMETTIASLEEELAAERGEKEEALCRNDGLGSEITDLTEKLEHSNTKLEHLQNDVTELKTRLEVSSSDQQQLETNVKQLLEEKEELAMHLANSLLEMEEEKAIWSSKEKALTEAVEEKIRLYKNIQIESLSKEMSEEKKELESCRLECVTLADRLRCSEENAKQDKESSLEKSLEIDRLGDELRSADAVSKQSQEVLKSDIDILKSEVQHACKMSDTFQREMDYVTSERQGLLARIEELSKELASSNRWQDAAAENKEKAKLKMRLRGMQARLDAISLRYKQSVQESELMNRKFKEASAKLKEKLASKALEVLDLKKQLSASSRTIDEPRNSLESYCDAAVVVATVVVVVVEQEIPNLRYSSNSIEVVEKAAINMGSKEDKADNPALSSYDDAMEALSTLISRRNRGDRTPTKGNRDKLEQVVTYLKILDLEDKIKELKVIHVAGTKGKGSTCVFSEAILRNCGFRTGMFTSPHLIDVRERFRIDGLDISEEKFLQYFWECWKLLKEKAVDGLTMPPLFQFLTVLAFKIFVCEKVDVAVIEVGLGGKLDSTNVIQKPVVCGIASLGMDHMDILGNTLADIAFHKAGIFKPQIPAFTVPQLSEAMDVLQKTANNLEVPLEVVAPLEPKKLDGVTLGLSGDHQLVNAGLAVSLSRCWLQRTGNWKKIFPNESKETEIPVAFCRGLATARLHGRAQVVHDVVSDPQDSSDSMETPCGDLIFYLDGAHSPESMEACGRWFSSAVRGDKSLSTAVNGYMRHGEYGTDLNRVSKQILLFNCMEVRDPQVLLPKLVTTCASSGTHFSRALFVPSMSTYNKVISGASAIPSDTRRKDLTWQFRLQRLWEKSIQGTDAGLDHTLKPDGITALPPHDFLCGDAPQCGGPAGTPVTSSAVMPSLPLTINWLRDCVRRNPSLKLEVLVTGSLHLVGDVLRLLKR

SEQ ID NO: 85721 - DNA, 906 bp, Arabidopsis thaliana
  misc_feature (1)..(906): Ceres Seq. ID no. 12682719
  misc_feature (1)..(906): Ortholog of  Ceres SEQ ID NO 13504447 as cited in SEQ ID NO 57609
aggaatattccggtgatggctgaagatttttcggtggttgtgttggcttctgatctaggaattgacgctagacccttcttgacgagaagcgatgacgttgatgaacaagaaaactggcatgattgtccccaatacttaggagatgaagatttctctgatctcgatcttctccagttctttactctccagggcttggataggtccggtaaccggattttccgcatcgtcggaaagtatttccctgctcgtgtagtgagtgcggagcggctgaagaagtatatatcccagaagataagcaaccaatgtcctgagggacctttgtgcttggtttacatgcatagcacagtccaaaaggacgacaattcaccgggaattaccatcttacggtggatttacgaggaccttccttcagatatcaaagacaggcttcaacttgtttatttcatccaccctggtcttcgttcaagacttgtcattgccactcttggccgccttcttttaagtggaggactgtactggaagattaagtacgtgagcaggttgcagtacctttgggaggacataaagaaaggcgaggtggaaattcccgactttgtgaagaaccatgacaatgtgctcgagcatagaccattaacggactatggaatcgaaccggatcctttccagttaagcgaggttcaatcttcatcgttctctctcaaccgctacgagaacagatgggtctcatagtacaattgctctttgttgagctagaacctctatatgtttgtgtctgttgtatagagtaatctaatgtattaaacactcgtgtatcatcaatctggtttttgattgattttggaccgaaccagtaccagtattagatttgttttcgaaagcgggtcgaattttactctttgttgagct

SEQ ID NO: 85722 - protein, 242 aa, Arabidopsis thaliana; identical to SEQ ID NO: 44670
  peptide (1)..(242): Ceres Seq. ID no. 12682720

SEQ ID NO: 85723 - protein, 237 aa, Arabidopsis thaliana; identical to SEQ ID NO: 44671
  peptide (1)..(237): Ceres Seq. ID no. 12682721

SEQ ID NO: 85724 - protein, 131 aa, Arabidopsis thaliana; identical to SEQ ID NO: 44672
  peptide (1)..(131): Ceres Seq. ID no. 12682722

SEQ ID NO: 85725 - DNA, 1317 bp, Arabidopsis thaliana
  misc_feature (1)..(1317): Ceres Seq. ID no. 12682737
  misc_feature (1)..(1317): Ortholog of  Ceres SEQ ID NO 14307288 as cited in SEQ ID NO 54318
  misc_feature (1)..(1317): Ortholog of  Ceres SEQ ID NO 13597393 as cited in SEQ ID NO 63453
atggcgactctgtcttcctatctgttatcttctcctcctctatgcaaatcccgattctcggcaacaagtctcgtctcaggaattgatttcatctctttctctcctcgaacaactctctcctcgtcatccactgtcttgccggcgattctttctctttccgttaaacataatcgccggagaaactcgcttcaaggttcgaattctaaagttttcctttttcttaatctgaaacaggattggattagcttagcttctcttgattttgattttgatttctgggtttcagtgaaatcagtagctagcccaacggagacgatttcagaattcgatgagatggtctccggcacgaaacgaaagtattacatgctcggtgggaaaggaggagtgggcaaaactagttgtgctgcttctttagctgtgagattcgccaacaatggacacccaactctggttgtatctacagatccagcacattccttgagcgattcttttgctcaggacttgactggaggaatgcttgtccctgtagaaggacccgaagctcctttatttgctttagaaataaaccctgagaaggctagggaagagtttcgtagtgcctcgcagatgaatggaggaactggggtgaaagattttatggatggtatgggacttggaatgcttgtagaacagttgggggagcttaaacttggagaattgctcgacacaccgcctcctggattggatgaagccatagtcattcaattcttggaatcaccagagtataacatgttcaccagaatcgtatttgatactgcaccaacgggtcatacgctaaggctactctctttacctgatttcttggatgcatccattggtaaaatcttgaagcttagacagaaaataacctcggctacttcagcgatcaaatcagtttttgggaaagaagaaaaggggcctgatgctgccgacaaattggaaaaactaagagaaaggatggttaaagttcgcgagcttttccgtgacacagagtcaacagaattcgtcattgtcactatcccaacggtaatggctgtcagcgagtcttctaggttaagtgcttccttgaagaaggaaagtgttcccgtcaaaagactcattgttaatcagcttctcccgccatcctcctcagattgcaaattttgctctattaagagaaaggaccaaatgcgggctcttgatatgatccgggaggattcagaactctctgctttgacactgatggaggctccgctggttgatatggagatcagaggtgtccctgctctgcgcttcttgggcgatatcatttggaaataa

SEQ ID NO: 85726 - protein, 438 aa, Arabidopsis thaliana
  peptide (1)..(438): Ceres Seq. ID no. 12682738
MATLSSYLLSSPPLCKSRFSATSLVSGIDFISFSPRTTLSSSSTVLPAILSLSVKHNRRRNSLQGSNSKVFLFLNLKQDWISLASLDFDFDFWVSVKSVASPTETISEFDEMVSGTKRKYYMLGGKGGVGKTSCAASLAVRFANNGHPTLVVSTDPAHSLSDSFAQDLTGGMLVPVEGPEAPLFALEINPEKAREEFRSASQMNGGTGVKDFMDGMGLGMLVEQLGELKLGELLDTPPPGLDEAIVIQFLESPEYNMFTRIVFDTAPTGHTLRLLSLPDFLDASIGKILKLRQKITSATSAIKSVFGKEEKGPDAADKLEKLRERMVKVRELFRDTESTEFVIVTIPTVMAVSESSRLSASLKKESVPVKRLIVNQLLPPSSSDCKFCSIKRKDQMRALDMIREDSELSALTLMEAPLVDMEIRGVPALRFLGDIIWK

SEQ ID NO: 85727 - protein, 327 aa, Arabidopsis thaliana
  peptide (1)..(327): Ceres Seq. ID no. 12682739
MVSGTKRKYYMLGGKGGVGKTSCAASLAVRFANNGHPTLVVSTDPAHSLSDSFAQDLTGGMLVPVEGPEAPLFALEINPEKAREEFRSASQMNGGTGVKDFMDGMGLGMLVEQLGELKLGELLDTPPPGLDEAIVIQFLESPEYNMFTRIVFDTAPTGHTLRLLSLPDFLDASIGKILKLRQKITSATSAIKSVFGKEEKGPDAADKLEKLRERMVKVRELFRDTESTEFVIVTIPTVMAVSESSRLSASLKKESVPVKRLIVNQLLPPSSSDCKFCSIKRKDQMRALDMIREDSELSALTLMEAPLVDMEIRGVPALRFLGDIIWK

SEQ ID NO: 85728 - protein, 317 aa, Arabidopsis thaliana
  peptide (1)..(317): Ceres Seq. ID no. 12682740
MLGGKGGVGKTSCAASLAVRFANNGHPTLVVSTDPAHSLSDSFAQDLTGGMLVPVEGPEAPLFALEINPEKAREEFRSASQMNGGTGVKDFMDGMGLGMLVEQLGELKLGELLDTPPPGLDEAIVIQFLESPEYNMFTRIVFDTAPTGHTLRLLSLPDFLDASIGKILKLRQKITSATSAIKSVFGKEEKGPDAADKLEKLRERMVKVRELFRDTESTEFVIVTIPTVMAVSESSRLSASLKKESVPVKRLIVNQLLPPSSSDCKFCSIKRKDQMRALDMIREDSELSALTLMEAPLVDMEIRGVPALRFLGDIIWK

SEQ ID NO: 85729 - DNA, 405 bp, Arabidopsis thaliana
  misc_feature (1)..(405): Ceres Seq. ID no. 12682807
  misc_feature (1)..(405): Ortholog of  Ceres SEQ ID NO 13598758 as cited in SEQ ID NO 61555
atggatcgcatggcagttgcggaagagcaaatcctattggagagggttaggagaaaaatcgaagaagtaaatgcatctggtcagtcgcagctctctcctattcaagaacatatcagtttcacccttctgcaagcttatttcaaatgctcaaacgagtgctttgagaaaagaagaaagccagaagtgacaactaactgtgttgagctctgtcgtgttcccgttgctaaatctcaacagcaattcgatagcgatatggccaagtttcaggataggatgaacagatctctcatggtatgtcaagacaaattcgaggctgcaaagctactgaatatgaacaggattgatgccgccaaagatatggagggttgcgtaaacgatgcagctgcagcattacttggcggctaa

SEQ ID NO: 85730 - protein, 134 aa, Arabidopsis thaliana
  peptide (1)..(134): Ceres Seq. ID no. 12682808
MDRMAVAEEQILLERVRRKIEEVNASGQSQLSPIQEHISFTLLQAYFKCSNECFEKRRKPEVTTNCVELCRVPVAKSQQQFDSDMAKFQDRMNRSLMVCQDKFEAAKLLNMNRIDAAKDMEGCVNDAAAALLGG

SEQ ID NO: 85731 - protein, 131 aa, Arabidopsis thaliana
  peptide (1)..(131): Ceres Seq. ID no. 12682809
MAVAEEQILLERVRRKIEEVNASGQSQLSPIQEHISFTLLQAYFKCSNECFEKRRKPEVTTNCVELCRVPVAKSQQQFDSDMAKFQDRMNRSLMVCQDKFEAAKLLNMNRIDAAKDMEGCVNDAAAALLGG

SEQ ID NO: 85732 - DNA, 1584 bp, Arabidopsis thaliana
  misc_feature (1)..(1584): Ceres Seq. ID no. 12682852
  misc_feature (1)..(1584): Ortholog of  Ceres SEQ ID NO 13594345 as cited in SEQ ID NO 58043
  misc_feature (1)..(1584): Ortholog of  Ceres SEQ ID NO 13597574 as cited in SEQ ID NO 64677
  misc_feature (1)..(1584): Ortholog of  Ceres SEQ ID NO 13597678 as cited in SEQ ID NO 65375
  misc_feature (1)..(1584): Ortholog of  Ceres SEQ ID NO 13596180 as cited in SEQ ID NO 67941
  misc_feature (1)..(1584): Ortholog of  Ceres SEQ ID NO 13591190 as cited in SEQ ID NO 68044
cattgtcggcagtaaaactaaaaataaaaggagttccacttttcaatttttctccactccaaaaccagaaagaaagaaaaaaacatcaatcatgacaacaacaacaacgaagaagccgcacgttctggtgataccgtttccacaatccggtcacatggttccacatcttgacctcacgcatcagattcttctccgtggagccaccgtcactgtcctcgtcacacccaaaaactcttcctatctcgatgctctccgttctcttcactccccggaacacttcaaaaccctaatccttccttttccttctcacccttgtataccttccggtgtcgaatctctccagcaacttcctctcgaagctatagttcacatgtttgatgctctctctcgtctccacgaccctctcgttgactttctcagccgtcaaccaccgtcggatctccccgacgccatcctaggaagctcatttctcagcccttggattaacaaagtagctgatgctttctctattaagtccattagtttcttacccatcaatgctcattcgatctccgtcatgtgggctcaagaagatagaagcttcttcaacgatctcgagactgccacaacggaaagctacgggctcgtcatcaacagtttctacgacctcgagcctgagtttgtagaaactgttaaaacacgtttcctgaatcaccaccgtatatggaccgtcggaccgttgctcccctttaaagctggcgttgaccgtggcggacaaagctcaatcccgccggcgaaagtctcggcttggttagattcgtgccccgaggataactccgtcgtatacgtcggttttggaagccagatccggctcacggcggagcaaacagctgctttagcggcggcgttggagaaaagcagtgtgcgtttcatatgggcggtgagagacgcagctaagaaggtgaactccagcgataactccgttgaggaagatgtgatcccggcgggatttgaagagagagtgaaggagaaaggactcgtgataagaggatgggccccacaaactatgattcttgagcatcgagccgttggatcttacctaactcatttgggttggggttcggttctggaaggaatggtcggaggagttatgttgctagcgtggccgatgcaagcagaccatttctttaacacgacgctcatcgttgataaactaagagccgcagtgcgagttggagagaacagagactcggttcctgactcggacaagctcgctaggattttggctgagtcggcgagagaggacttgccggagagagttacgttgatgaagctgagggagaaagctatggaggccattaaagaaggtgggagctcttacaagaacttggatgagctcgttgcagagatgtgtttgtaataaatatcctcttctcttgctttttaagatttgtttgtttaagagagtcaataagcaaatggggtaagaaaattgttatttattttcctgttatttttctttcttaatttgatatgacaacgattaactcgatttagagttcgttagtcaatgttttctagtatgatgatggcaataatactaag

SEQ ID NO: 85733 - protein, 465 aa, Arabidopsis thaliana; identical to SEQ ID NO: 25896
  peptide (1)..(465): Ceres Seq. ID no. 12682853

SEQ ID NO: 85734 - protein, 435 aa, Arabidopsis thaliana; identical to SEQ ID NO: 25897
  peptide (1)..(435): Ceres Seq. ID no. 12682854

SEQ ID NO: 85735 - protein, 414 aa, Arabidopsis thaliana; identical to SEQ ID NO: 25898
  peptide (1)..(414): Ceres Seq. ID no. 12682855

SEQ ID NO: 85736 - DNA, 1158 bp, Arabidopsis thaliana
  misc_feature (1)..(1158): Ceres Seq. ID no. 12682883
  misc_feature (1)..(1158): Ortholog of  Ceres SEQ ID NO 15175690 as cited in SEQ ID NO 55466
  misc_feature (1)..(1158): Ortholog of  Ceres SEQ ID NO 15171197 as cited in SEQ ID NO 56892
  misc_feature (1)..(1158): Ortholog of  Ceres SEQ ID NO 14306381 as cited in SEQ ID NO 58812
atgcctttgtcacggtccctcctttcgcggaggatctcgaactcttttaggtttcatcagggagagacaacgacggcaccggaatccgaatcgattcctccgccgtcgaatatggccggttcttcgtcatggtcggcgatgctccctgaattattaggcgagatcattcgtcgcgtggaggagactgaggaccgttggcctcaacgtcgtgatgtagttacttgcgcttgcgtttctaagaaatggagagaaatcactcacgatttcgctagatcctctcttaactctggcaaaattactttcccttcttgcctcaaattgccaggtcctagagacttttctaatcagtgcttgataaagaggaacaagaagacatcaacgttttacttgtatcttgctctaacaccatcattcactgataagggaaagtttcttctggcggcgcggaggtttaggaccggtgcttacactgagtacatcatatcacttgatgctgatgatttctctcaaggaagtaatgcctacgtcggaaaattaagatcagattttcttgggaccaactttacagtatacgatagccaaccaccacacaacggagcaaaaccttcaaatggcaaagccagtcgcagatttgcatcaaagcagataagccctcaagttccagcaggcaactttgaagtcggtcatgtttcttataaattcaaccttttgaaatcaagaggtccaagaagaatggtaagcacactccgatgcccatcaccatcaccttcatcatcatccgctggactctcgtctgaccaaaagccatgtgatgtaaccaagataatgaaaaaacccaacaaggatggttccagcttgacaatactaaagaacaaagctcctagatggcacgagcacttgcagtgctggtgtctgaacttccatggacgagttactgttgcttcggtcaagaactttcagctggttgcgaccgttgaccaaagtcaaccgagcggtaaaggcgatgaagaaacagttcttctacagtttggtaaagtgggagatgacactttcactatggattatagacagcctctctctgcatttcaggcttttgctatctgtctcacaagtttcggcactaaacttgcctgcgagtgaaacccaacaaaaggcaac

SEQ ID NO: 85737 - protein, 379 aa, Arabidopsis thaliana; identical to SEQ ID NO: 22139
  peptide (1)..(379): Ceres Seq. ID no. 12682884

SEQ ID NO: 85738 - protein, 342 aa, Arabidopsis thaliana; identical to SEQ ID NO: 22140
  peptide (1)..(342): Ceres Seq. ID no. 12682885

SEQ ID NO: 85739 - protein, 333 aa, Arabidopsis thaliana
  peptide (1)..(333): Ceres Seq. ID no. 12682886
MLPELLGEIIRRVEETEDRWPQRRDVVTCACVSKKWREITHDFARSSLNSGKITFPSCLKLPGPRDFSNQCLIKRNKKTSTFYLYLALTPSFTDKGKFLLAARRFRTGAYTEYIISLDADDFSQGSNAYVGKLRSDFLGTNFTVYDSQPPHNGAKPSNGKASRRFASKQISPQVPAGNFEVGHVSYKFNLLKSRGPRRMVSTLRCPSPSPSSSSAGLSSDQKPCDVTKIMKKPNKDGSSLTILKNKAPRWHEHLQCWCLNFHGRVTVASVKNFQLVATVDQSQPSGKGDEETVLLQFGKVGDDTFTMDYRQPLSAFQAFAICLTSFGTKLACE

SEQ ID NO: 85740 - DNA, 2973 bp, Arabidopsis thaliana
  misc_feature (1)..(2973): Ceres Seq. ID no. 12682904
  misc_feature (1)..(2973): Ortholog of  Ceres SEQ ID NO 14313336 as cited in SEQ ID NO 55501
atgggtttcatcttctcgaccgagaaagttgtgtatgttcttcttctcatcttcgtttgcttggaaaatttcggatcaaatgctcaacttttgcctgaagatgaagttcaaacattgcgaacgatctttagaaagcttcaaaaccaaacagtgaacatcgaaagaacttcttgttcggaccaaaactggaactttgttgtcgagtcagcctccaactcaccaaccagtaacattacctgcgactgtactttcaacgccagctcagtctgtcgtgtcacaaacatagatctttcgcggaactttctcaatggaacaatacctacgacattgtctcaaattccacttgaaatcttgtctgtaatcggaaaccgtctctcaggaccatttcctcctcaacttggagatattactacacttactgatgtgaatttggaaactaatttattcacaggaccacttcctcgaaacctagggaacttaagaagcttgaaagagttacttctctctgcaaacaacttcacgggtcaaatccctgagtccttaagtaatctcaagaatttgactgaatttcggattgatggaaactctctatctgggaaaatacctgattttattggaaactggactctgctggagaggctagaccttcaaggcacatcaatggaaggtccaattccaccttcaatatcaaacttgacgaacttgactgaattgaggataaccgatttgcgtggacaagcggccttttcttttccggacctgcgaaatctaatgaaaatgaaacgattggtactaagaaattgtttgataaggggacctatcccggaatacattggttccatgagtgagctgaagacactgtttttgaataataactcattgactggtccagttcctcagttcatcatcaacagtaaagaaaacctagatttatctgacaacaatttcactcagccacctactttaagctgtaatcagcttgatgtgaacttgatctccagctacccttcagtaaccgataactctgttcaatggtgcttgagagagggtcttccatgtccagaagatgctaaacagtcttccctgttcatcaactgtggaggaagcagactcaagattggaaaagacacttatacagatgacttgaacagtagaggacaatcaacattctcttctgtctctgaaagatggggatacagtagttctggagtttggttaggcaaggaggatgctggctacttagcaacagacagatttaacttgatcaatggatcaactccagagtattacaaaacagcccgtctctctccacagtcactcaagtactatggactatgcttgagaagaggaagttacaaactgcagctacattttgcagagataatgttctcaaatgaccagacttttaatagcttagggcggcgaatattcgacatttatgtccaagggaacttgttggagagggactttaacatagcagagagagcaggtggagttggtaaaccgttcataaggcaaattgatggagttcaagtgaatggaagtacgttagagattcatttgcagtggacagggaaaggcacaaacgtaataccaacaagaggtgtttacgggcctctcatatctgccataaccattacaccaaatttcaaggttgataccggaaaaccattgtccaatggagcagttgcaggcattgtaatcgcagcgtgtgcggttttcgggttgctggtacttgtaatcttgaggcttacaggttacttaggtggaaaagaagtagatgagaatgaagagcttcggggacttgatttgcagacaggatcgttcacattgaaacaaataaaacgtgctactaataactttgatccagaaaacaagattggtgaaggaggatttggaccggtttataagggtgttctcgctgatgggatgaccatagcggtgaagcagctttcatcaaaatctaagcaaggaaaccgagaatttgtgactgagatcggtatgatatctgcgctgcaacaccctaatcttgtgaaactttatggttgttgcatcgaagggaaagagctcttgcttgtgtatgagtacttagagaacaacagtctcgctcgcgcactctttggcacagagaaacagaggcttcacttggattggtcaacaaggaacaagatttgcatagggattgcgaaaggattggcctatctacacgaggaatcaaggctgaagattgttcatagagacataaaagcgacaaatgtgcttcttgatctgtctctaaacgctaagatctctgattttggtctagctaaactcaacgatgacgagaatacacatatcagcacaaggattgaacaatgtgaaggttacatggctcctgagtatgcaatgagaggttacttgacagacaaggcagatgtttacagctttggtgttgtctgtttagagattgttagtggaaagagcaacacaaattacagaccaaaggaagagtttgtttaccttctggattgggcatatgtcttgcaagaacaaggtagtcttctagaactcgttgatccggatctcggcacaagcttttcgaagaaagaagcgatgaggatgttgaacatagcattactctgcacgaacccatctccaacattgagaccaccaatgtcatctgttgtaagtatgttagaaggaaaaatcaaagtccaaccaccattggtgaaacgtgaagcagatccaagtggttcagcagcaatgaggtttaaggccttagagcttttgtcacaagacagtgagtcacaagtctcgacatatgcaagaaacagagagcaagacataagctcctcatcgatggacggtccttgggtagattcttccttctctgagcctgggaaagatgttagcctgcaacagcaagaagaaggacgttcatcatcttcgtcgaggaaacttttagatgatcttaccgatgtgaagattgagtaa

SEQ ID NO: 85741 - protein, 990 aa, Arabidopsis thaliana
  peptide (1)..(990): Ceres Seq. ID no. 12682905
MGFIFSTEKVVYVLLLIFVCLENFGSNAQLLPEDEVQTLRTIFRKLQNQTVNIERTSCSDQNWNFVVESASNSPTSNITCDCTFNASSVCRVTNIDLSRNFLNGTIPTTLSQIPLEILSVIGNRLSGPFPPQLGDITTLTDVNLETNLFTGPLPRNLGNLRSLKELLLSANNFTGQIPESLSNLKNLTEFRIDGNSLSGKIPDFIGNWTLLERLDLQGTSMEGPIPPSISNLTNLTELRITDLRGQAAFSFPDLRNLMKMKRLVLRNCLIRGPIPEYIGSMSELKTLFLNNNSLTGPVPQFIINSKENLDLSDNNFTQPPTLSCNQLDVNLISSYPSVTDNSVQWCLREGLPCPEDAKQSSLFINCGGSRLKIGKDTYTDDLNSRGQSTFSSVSERWGYSSSGVWLGKEDAGYLATDRFNLINGSTPEYYKTARLSPQSLKYYGLCLRRGSYKLQLHFAEIMFSNDQTFNSLGRRIFDIYVQGNLLERDFNIAERAGGVGKPFIRQIDGVQVNGSTLEIHLQWTGKGTNVIPTRGVYGPLISAITITPNFKVDTGKPLSNGAVAGIVIAACAVFGLLVLVILRLTGYLGGKEVDENEELRGLDLQTGSFTLKQIKRATNNFDPENKIGEGGFGPVYKGVLADGMTIAVKQLSSKSKQGNREFVTEIGMISALQHPNLVKLYGCCIEGKELLLVYEYLENNSLARALFGTEKQRLHLDWSTRNKICIGIAKGLAYLHEESRLKIVHRDIKATNVLLDLSLNAKISDFGLAKLNDDENTHISTRIEQCEGYMAPEYAMRGYLTDKADVYSFGVVCLEIVSGKSNTNYRPKEEFVYLLDWAYVLQEQGSLLELVDPDLGTSFSKKEAMRMLNIALLCTNPSPTLRPPMSSVVSMLEGKIKVQPPLVKREADPSGSAAMRFKALELLSQDSESQVSTYARNREQDISSSSMDGPWVDSSFSEPGKDVSLQQQEEGRSSSSSRKLLDDLTDVKIE

SEQ ID NO: 85742 - protein, 770 aa, Arabidopsis thaliana
  peptide (1)..(770): Ceres Seq. ID no. 12682906
MEGPIPPSISNLTNLTELRITDLRGQAAFSFPDLRNLMKMKRLVLRNCLIRGPIPEYIGSMSELKTLFLNNNSLTGPVPQFIINSKENLDLSDNNFTQPPTLSCNQLDVNLISSYPSVTDNSVQWCLREGLPCPEDAKQSSLFINCGGSRLKIGKDTYTDDLNSRGQSTFSSVSERWGYSSSGVWLGKEDAGYLATDRFNLINGSTPEYYKTARLSPQSLKYYGLCLRRGSYKLQLHFAEIMFSNDQTFNSLGRRIFDIYVQGNLLERDFNIAERAGGVGKPFIRQIDGVQVNGSTLEIHLQWTGKGTNVIPTRGVYGPLISAITITPNFKVDTGKPLSNGAVAGIVIAACAVFGLLVLVILRLTGYLGGKEVDENEELRGLDLQTGSFTLKQIKRATNNFDPENKIGEGGFGPVYKGVLADGMTIAVKQLSSKSKQGNREFVTEIGMISALQHPNLVKLYGCCIEGKELLLVYEYLENNSLARALFGTEKQRLHLDWSTRNKICIGIAKGLAYLHEESRLKIVHRDIKATNVLLDLSLNAKISDFGLAKLNDDENTHISTRIEQCEGYMAPEYAMRGYLTDKADVYSFGVVCLEIVSGKSNTNYRPKEEFVYLLDWAYVLQEQGSLLELVDPDLGTSFSKKEAMRMLNIALLCTNPSPTLRPPMSSVVSMLEGKIKVQPPLVKREADPSGSAAMRFKALELLSQDSESQVSTYARNREQDISSSSMDGPWVDSSFSEPGKDVSLQQQEEGRSSSSSRKLLDDLTDVKIE

SEQ ID NO: 85743 - protein, 733 aa, Arabidopsis thaliana
  peptide (1)..(733): Ceres Seq. ID no. 12682907
MKMKRLVLRNCLIRGPIPEYIGSMSELKTLFLNNNSLTGPVPQFIINSKENLDLSDNNFTQPPTLSCNQLDVNLISSYPSVTDNSVQWCLREGLPCPEDAKQSSLFINCGGSRLKIGKDTYTDDLNSRGQSTFSSVSERWGYSSSGVWLGKEDAGYLATDRFNLINGSTPEYYKTARLSPQSLKYYGLCLRRGSYKLQLHFAEIMFSNDQTFNSLGRRIFDIYVQGNLLERDFNIAERAGGVGKPFIRQIDGVQVNGSTLEIHLQWTGKGTNVIPTRGVYGPLISAITITPNFKVDTGKPLSNGAVAGIVIAACAVFGLLVLVILRLTGYLGGKEVDENEELRGLDLQTGSFTLKQIKRATNNFDPENKIGEGGFGPVYKGVLADGMTIAVKQLSSKSKQGNREFVTEIGMISALQHPNLVKLYGCCIEGKELLLVYEYLENNSLARALFGTEKQRLHLDWSTRNKICIGIAKGLAYLHEESRLKIVHRDIKATNVLLDLSLNAKISDFGLAKLNDDENTHISTRIEQCEGYMAPEYAMRGYLTDKADVYSFGVVCLEIVSGKSNTNYRPKEEFVYLLDWAYVLQEQGSLLELVDPDLGTSFSKKEAMRMLNIALLCTNPSPTLRPPMSSVVSMLEGKIKVQPPLVKREADPSGSAAMRFKALELLSQDSESQVSTYARNREQDISSSSMDGPWVDSSFSEPGKDVSLQQQEEGRSSSSSRKLLDDLTDVKIE

SEQ ID NO: 85744 - DNA, 683 bp, Arabidopsis thaliana
  misc_feature (1)..(683): Ceres Seq. ID no. 12682928
  misc_feature (1)..(683): Ortholog of  Ceres SEQ ID NO 12612272 as cited in SEQ ID NO 55946
  misc_feature (1)..(683): Ortholog of  Ceres SEQ ID NO 15169960 as cited in SEQ ID NO 57591
aacaaggagcaaagagttcatagcaaagcaaagcttcaaaacagagcaaacgcaaagagtagcaatcacaagaggaagtgaaacgatgtctctaattccaagcatcttcggaggaagaagaacaaacgttttcgatccgttctcgctggatgttttcgatccgttcgaaggtttcttgacgccgtcaggattggcaaacgcacccgctatggatgtggcagcgttcacaaacgctaaagtggattggagggagacacctgaggcgcacgtgttcaaggcggatttaccgggactgaggaaggaagaggtgaaagtggaggttgaggatggcaacatacttcagataagtggagagaggagcaatgagaatgaagagaagaatgacaagtggcaccgtgtggagcggtcgagtgggaagttcacgaggaggtttaggctgccggagaatgctaagatggaggaaatcaaagccagtatggaaaatggtgtgttgtcggttaccgtgcccaaggtgccagagaaaaagccagaggttaagtccattgatatctctggttaaagggaattgtttaagaccaaaaatgtgtgatggtagtgaaataattggtgtgtgatgtgtttttcttgtaatcatgaatctcgttgtatcattatcataaaatcttaataagagtgtgctttgt

SEQ ID NO: 85745 - protein, 185 aa, Arabidopsis thaliana; identical to SEQ ID NO: 44122
  peptide (1)..(185): Ceres Seq. ID no. 12682929

SEQ ID NO: 85746 - protein, 157 aa, Arabidopsis thaliana; identical to SEQ ID NO: 44123
  peptide (1)..(157): Ceres Seq. ID no. 12682930

SEQ ID NO: 85747 - protein, 116 aa, Arabidopsis thaliana; identical to SEQ ID NO: 44124
  peptide (1)..(116): Ceres Seq. ID no. 12682931

SEQ ID NO: 85748 - DNA, 1081 bp, Arabidopsis thaliana
  misc_feature (1)..(1081): Ceres Seq. ID no. 12682936
  misc_feature (1)..(1081): Ortholog of  Ceres SEQ ID NO 14315973 as cited in SEQ ID NO 57637
atggtgatgacacatttttcacgtctccgacaacttcttcttctccaacccaaattcctctcttctcaacctcgtcctctccgttctcctcctccaacatttctccgatcagtgatgggttcgtcttcttctttctcctcttcttcctcgaagcttctctttcgtcaactctttgagaacgaatcttccacctttacttatcttctcgccgacgtttctcatcctgataaacctgctttgttgattgatccggtggacaagactgtggatagagacttgaaactgattgatgagttaggactaaagcttatctatgctatgaacactcatgttcatgctgatcatgtcactggtactggacttcttaagacgaagctcccgggtgtgaaatccgttatttcgaaagcaagtggttccaaagctgatttgtttcttgaacctggtgacaaagtatctattggtgatatataccttgaggttcgtgctacacctggacacactgcaggatgtgttacatatgtgactggtgaaggagctgatcagccccaaccaagaatggcttttaccggggatgctgtactcatccgtggttgtgggaggactgactttcaggaaggaagctcagatcaactctacgagtctgtacattcacagatatttacattgccaaaggacacattgatctatcctgctcacgactacaaaggtttcgaggtaagtacagttggagaagagatgcaacacaacccgcgtctaactaaagataaagaaacattcaaaaccattatgtcaaatctgaatctgtcgtatccgaagatgattgatgttgcagtaccagcaaatatggtctgtgggttacaagatgtgccttctcaagccaactaaaaaaaactcttacatataatgtttgtctttttatcgatgtcattctatatttaccaaagccaataaaaactcttgagagtaatttctacaataagatttgcttccgttgtagataagttcattagaaaattgtgtaaattagattgaacatgtggaatttgttatgaagatgaagacagtatttgcgtgttcgact

SEQ ID NO: 85749 - protein, 294 aa, Arabidopsis thaliana; identical to SEQ ID NO: 28788
  peptide (1)..(294): Ceres Seq. ID no. 12682937

SEQ ID NO: 85750 - protein, 292 aa, Arabidopsis thaliana; identical to SEQ ID NO: 28789
  peptide (1)..(292): Ceres Seq. ID no. 12682938

SEQ ID NO: 85751 - protein, 256 aa, Arabidopsis thaliana; identical to SEQ ID NO: 28790
  peptide (1)..(256): Ceres Seq. ID no. 12682939

SEQ ID NO: 85752 - DNA, 633 bp, Arabidopsis thaliana
  misc_feature (1)..(633): Ceres Seq. ID no. 12682961
  misc_feature (1)..(633): Ortholog of  Ceres SEQ ID NO 13655262 as cited in SEQ ID NO 62944
atggcttcttctactagattaactattatacaatcaagcttcgtctccgcaagaacaagactcaattacgtctccaagacaaatcattctgggttcgcttgtcgttctctttcaaaacccagaaacttgagtctctctgtttattctatgggttcttctagttcttctccgaaaccagacaacgtccaagaggctgagaagaatgagtttgcttctctaagtgaaaatgaatggaagaaacggctaacaccagaacagtactacatcactagacagaagggcacagagagagctttcactggggagtattggaactcaaagacccctggagtatataattgtgtatgttgcgacacacctctatttgattcatcaacaaagtttgatagtggaacagggtggccatcttactaccaaccaattggaaacaatgtgaagacaaagctagacctctctatcatcttcatgcctagacaagaagttgtctgtgctgtttgtaacgcccatcttggtcatgtctttgacgacggtccacgcccaaccggaaaacgatattgcctcaacaggtttatcattcatcctgatctatttattaaatttgcaaaaagagtatcagaacatcgttacttgtga

SEQ ID NO: 85753 - protein, 210 aa, Arabidopsis thaliana
  peptide (1)..(210): Ceres Seq. ID no. 12682962
MASSTRLTIIQSSFVSARTRLNYVSKTNHSGFACRSLSKPRNLSLSVYSMGSSSSSPKPDNVQEAEKNEFASLSENEWKKRLTPEQYYITRQKGTERAFTGEYWNSKTPGVYNCVCCDTPLFDSSTKFDSGTGWPSYYQPIGNNVKTKLDLSIIFMPRQEVVCAVCNAHLGHVFDDGPRPTGKRYCLNRFIIHPDLFIKFAKRVSEHRYL

SEQ ID NO: 85754 - protein, 161 aa, Arabidopsis thaliana
  peptide (1)..(161): Ceres Seq. ID no. 12682963
MGSSSSSPKPDNVQEAEKNEFASLSENEWKKRLTPEQYYITRQKGTERAFTGEYWNSKTPGVYNCVCCDTPLFDSSTKFDSGTGWPSYYQPIGNNVKTKLDLSIIFMPRQEVVCAVCNAHLGHVFDDGPRPTGKRYCLNRFIIHPDLFIKFAKRVSEHRYL

SEQ ID NO: 85755 - DNA, 1929 bp, Arabidopsis thaliana
  misc_feature (1)..(1929): Ceres Seq. ID no. 12682973
  misc_feature (1)..(1929): Ortholog of  Ceres SEQ ID NO 13584744 as cited in SEQ ID NO 69137
atgagggagaattgggcggtggtggctctgtttacactatgcattgtagggtttgagcttagattcatccatggagctactgatgcatcagacacttcagcattgaacacattgttcagtggtatgcattctccagctcagctaacacaatggactgcagcagctggtgatccttgtggccagaattggagaggcgtcacttgttccggctcacgagttactcaaataaagttgtcaggtcttgagctctctggaactcttggaggatacatgcttgataaattgacttctcttaccgagcttgatctaagcagcaataatcttggaggtgatttaccatatcagtttcctccaaatctgcaacgattgaaccttgcgaataatcaattcactggagctgcttcgtactcactttctcagattacaccacttaagtatctcaatcttggtcacaatcagtttaaggggcagatagctatcgacttctccaagctcgactctctcacaaccttggacttctctttcaattctttcacgaactctttaccggcaacgttttcctctctaacaagtttaaaatcactataccttcagaacaatcagttctcaggcacagtcgatgtcttagccggtcttcctcttgagactctgaacattgcgaacaatgacttcacggggtggatccccagttctttaaagggcatcacattaataagaaaaaaatcaaagaggtcatcacccatggacattgagaaaaccgataaccagcctttcactcttgcttcaaacgactttcacgaaaacaattccattcagagttcttcatcagttgagacaaagaaactggacacttcattgtctattaatcttcgacctccaccaattgatagaaacaaatcatttgatgatgaagattcgacaagaaagcctattgctgtcaagaaatccacagtggtggttccttcaaatgtgagactctattcagttgcagatctccaaattgctactggcagtttcagcgtagataatcttcttggagaagggacttttggacgagtatacagagctgagtttgatgatggaaaggttcttgctgtgaagaaaattgattcgtctgctctcccacatggcatgaccgatgatttcattgaaatggtatcgaaaatagccaatttggatcatccaaatgtgaccaagcttgttggttactgtgctgagcacggacaacatctcgtggtctatgaattccacaaaaatggatcattacatgacttcttacacttatcagaagaggaaagtaaagcattggtgtggaattcacgagtcaagatcgctcttgggactgcacgcgcattggagtatctgcatgaagtttgctcaccgtctatagtggacaagaatatcaaatcagctaatattttactcgattcagagctgaatcctcacttatcagattctggtctcgcaagcttccttcccacagctaatgagttattaaaccaaaccgatgaagggtatagcgcacctgaagtatcaatgtcaggccaatattctttgaagagtgacatttacagttttggagtagtgatgcttgaacttttaactgggagaaaaccatttgacagcacaaggtcaagatctgagcagtcactggttcgatgggcgacaccacaacttcacgacattgatgctttagccaaaatggttgatccagctcttaaagggctttatcctgtcaaatccctttctcgatttgcagatgttatcgctctctgtgtccagccggagccggagtttagaccaccaatgtctgaagttgtgcaggctctagttgtgttagtgcagagagctaacatgagcaagagaactgtcggagttgatccatcgcaacgtgctggtagtgccgacacgaccagtgattacatgtaa

SEQ ID NO: 85756 - protein, 642 aa, Arabidopsis thaliana
  peptide (1)..(642): Ceres Seq. ID no. 12682974
MRENWAVVALFTLCIVGFELRFIHGATDASDTSALNTLFSGMHSPAQLTQWTAAAGDPCGQNWRGVTCSGSRVTQIKLSGLELSGTLGGYMLDKLTSLTELDLSSNNLGGDLPYQFPPNLQRLNLANNQFTGAASYSLSQITPLKYLNLGHNQFKGQIAIDFSKLDSLTTLDFSFNSFTNSLPATFSSLTSLKSLYLQNNQFSGTVDVLAGLPLETLNIANNDFTGWIPSSLKGITLIRKKSKRSSPMDIEKTDNQPFTLASNDFHENNSIQSSSSVETKKLDTSLSINLRPPPIDRNKSFDDEDSTRKPIAVKKSTVVVPSNVRLYSVADLQIATGSFSVDNLLGEGTFGRVYRAEFDDGKVLAVKKIDSSALPHGMTDDFIEMVSKIANLDHPNVTKLVGYCAEHGQHLVVYEFHKNGSLHDFLHLSEEESKALVWNSRVKIALGTARALEYLHEVCSPSIVDKNIKSANILLDSELNPHLSDSGLASFLPTANELLNQTDEGYSAPEVSMSGQYSLKSDIYSFGVVMLELLTGRKPFDSTRSRSEQSLVRWATPQLHDIDALAKMVDPALKGLYPVKSLSRFADVIALCVQPEPEFRPPMSEVVQALVVLVQRANMSKRTVGVDPSQRAGSADTTSDYM

SEQ ID NO: 85757 - protein, 601 aa, Arabidopsis thaliana
  peptide (1)..(601): Ceres Seq. ID no. 12682975
MHSPAQLTQWTAAAGDPCGQNWRGVTCSGSRVTQIKLSGLELSGTLGGYMLDKLTSLTELDLSSNNLGGDLPYQFPPNLQRLNLANNQFTGAASYSLSQITPLKYLNLGHNQFKGQIAIDFSKLDSLTTLDFSFNSFTNSLPATFSSLTSLKSLYLQNNQFSGTVDVLAGLPLETLNIANNDFTGWIPSSLKGITLIRKKSKRSSPMDIEKTDNQPFTLASNDFHENNSIQSSSSVETKKLDTSLSINLRPPPIDRNKSFDDEDSTRKPIAVKKSTVVVPSNVRLYSVADLQIATGSFSVDNLLGEGTFGRVYRAEFDDGKVLAVKKIDSSALPHGMTDDFIEMVSKIANLDHPNVTKLVGYCAEHGQHLVVYEFHKNGSLHDFLHLSEEESKALVWNSRVKIALGTARALEYLHEVCSPSIVDKNIKSANILLDSELNPHLSDSGLASFLPTANELLNQTDEGYSAPEVSMSGQYSLKSDIYSFGVVMLELLTGRKPFDSTRSRSEQSLVRWATPQLHDIDALAKMVDPALKGLYPVKSLSRFADVIALCVQPEPEFRPPMSEVVQALVVLVQRANMSKRTVGVDPSQRAGSADTTSDYM

SEQ ID NO: 85758 - protein, 552 aa, Arabidopsis thaliana
  peptide (1)..(552): Ceres Seq. ID no. 12682976
MLDKLTSLTELDLSSNNLGGDLPYQFPPNLQRLNLANNQFTGAASYSLSQITPLKYLNLGHNQFKGQIAIDFSKLDSLTTLDFSFNSFTNSLPATFSSLTSLKSLYLQNNQFSGTVDVLAGLPLETLNIANNDFTGWIPSSLKGITLIRKKSKRSSPMDIEKTDNQPFTLASNDFHENNSIQSSSSVETKKLDTSLSINLRPPPIDRNKSFDDEDSTRKPIAVKKSTVVVPSNVRLYSVADLQIATGSFSVDNLLGEGTFGRVYRAEFDDGKVLAVKKIDSSALPHGMTDDFIEMVSKIANLDHPNVTKLVGYCAEHGQHLVVYEFHKNGSLHDFLHLSEEESKALVWNSRVKIALGTARALEYLHEVCSPSIVDKNIKSANILLDSELNPHLSDSGLASFLPTANELLNQTDEGYSAPEVSMSGQYSLKSDIYSFGVVMLELLTGRKPFDSTRSRSEQSLVRWATPQLHDIDALAKMVDPALKGLYPVKSLSRFADVIALCVQPEPEFRPPMSEVVQALVVLVQRANMSKRTVGVDPSQRAGSADTTSDYM

SEQ ID NO: 85759 - DNA, 1581 bp, Arabidopsis thaliana
  misc_feature (1)..(1581): Ceres Seq. ID no. 12682977
  misc_feature (1)..(1581): Ortholog of  Ceres SEQ ID NO 13595870 as cited in SEQ ID NO 62101
  misc_feature (1)..(1581): Ortholog of  Ceres SEQ ID NO 13590241 as cited in SEQ ID NO 63878
  misc_feature (1)..(1581): Ortholog of  Ceres SEQ ID NO 13657939 as cited in SEQ ID NO 66349
aaattagaacttctttaccctttcgagaaaaaagaaaagaaaaaagaacttgttttcctcttcagcaagacacataaatcgtaatccattttctctcaactttaggaatctcaaatctccgatttggaaatccggcgacaatggtgagagatattgaagatgagattagagacgagaagaatcctcgtcctcttgatgaagatgatatcgctctcctcaagacttatgggttagggccttactctgcacctatcaagaaagtggagaaagaaattaaggatctcgccaagaagatcaacgatctatgtggtatcaaggagtctgatactggtttagctcctcccagtcaatgggatcttgtatctgataagcaaatgatgcaagaagagcaacctctgcaggttgcgagatgcacaaagattataagtccaaacactgaagacgccaaatacgtcataaatgtcaaacaaattgctaagtttgttgttggacttggcgataaagtttctcccactgatattgaggaaggcatgcgtgttggagttgatcggaataaatatcagattcagattcctctacctcccaaaatcgatcctagcgtgaccatgatgactgtcgaagagaaacctgatgtaacttacaatgatgttggtggatgcaaggagcagattgagaagatgcgagaggttgttgaactgccaatgcttcatccagagaaatttgtgaagcttggaatagatcctcccaagggtgttctctgctacggacctcctggtactggtaaaactcttctggctagagctgtggccaacagaaccgatgcttgctttatcagggttattggaagtgagcttgttcagaagtatgttggtgaaggagctaggatggttcgtgaactgtttcagatggcacggtccaagaaagcctgcattgtgttctttgacgaagttgatgccattggtggtgcaagatttgatgatggtgttggtggtgataacgaagtccaacgtactatgcttgagattgtgaatcagcttgatgggtttgacgcacgtggtaacatcaaggttcttatggcaacaaacaggcctgacacactagacccagctcttttacgtcctggacgtcttgaccgtaaggttgagtttggtctacctgacctggagagcagaacacagatcttcaagattcacacaagaaccatgaactgcgaaagagacatccgtttcgaactccttgctcgcctctgcccaaactcaacgggagctgatattcgaagtgtatgcactgaagcaggaatgtacgcaatcagagctaggagaaagactgtgactgagaaagactttctagacgcagtgaacaaagtcattaaaggttaccaaaagttcagtgccactcccaagtatatggtctacaattagagagattgagacagatagaagaactccgaaataaaactccgaaacactctttgttctttgtttgtgtctcttcccttcaagctcttttgtagtacttgtttcacaacttattccagtaactcgggtttatcttcttcaatgtctactacttttggattca

SEQ ID NO: 85760 - protein, 426 aa, Arabidopsis thaliana; identical to SEQ ID NO: 23448
  peptide (1)..(426): Ceres Seq. ID no. 12682978

SEQ ID NO: 85761 - protein, 348 aa, Arabidopsis thaliana; identical to SEQ ID NO: 23449
  peptide (1)..(348): Ceres Seq. ID no. 12682979

SEQ ID NO: 85762 - protein, 347 aa, Arabidopsis thaliana; identical to SEQ ID NO: 23450
  peptide (1)..(347): Ceres Seq. ID no. 12682980

SEQ ID NO: 85763 - DNA, 1437 bp, Arabidopsis thaliana
  misc_feature (1)..(1437): Ceres Seq. ID no. 12682984
  misc_feature (1)..(1437): Ortholog of  Ceres SEQ ID NO 13595870 as cited in SEQ ID NO 62101
  misc_feature (1)..(1437): Ortholog of  Ceres SEQ ID NO 13590241 as cited in SEQ ID NO 63878
  misc_feature (1)..(1437): Ortholog of  Ceres SEQ ID NO 13657939 as cited in SEQ ID NO 66349
atggctagttttggagaaaatctcaatgcttcccagttttatatcacactttgtgatgatctagactgtcttgatgggaaatacactgtgtttgggaagattaccagcgggtttgaaactttgacttgtatagccaaagcttctgttgatgcgaagaacagaccaaataaagatatcaggatacgacacacatatatacttacagatccatttgatgatcccccacaactggctaagatgataccagacgagccttactctgcacgcataaagaaagtagagaaagaaatcaatgagctcgccgagaagatctgcaatcttggtatcaaggagtccgatactggtttagctcctcccaatcaatgggatcttgtatctgataagcaaatgatgcaagaggagcaacctctgcttgttgcgacatgcacacagataatcagtccaaacactgaagatgcaaagtatgtcgttgatatcaaaaagataggcaagtatgttgttggacttggcgataaagcttctcccactgacatagaagcaggaatgcgtgtgggagttgatcagaagaaatatcagatacagattcctctacctccaaagattgatcctagtgtgaccatgatgacggttgaagagaaacctgatgcaacttacagtgatatcggtggctgcaaggagcagattgagaagattagagaggtcgttgaactgccaatgcttcatccagagaaatttgtgaggcttggaatagatcctcccaagggtgttctttgctatggtcctcctggtagcggaaaaacccttgtcgctagagctgtggcgaatagaactggtgcttgctttatcagggttgttggcagtgagctcgttcagaagtacattggtgaaggagctaggatggttcgtgaactgtttcagatggcacggtcaaagaaagcttgcattttgttctttgacgaaattgatgccattggcggtgcaagatttgatgacggtgtaggcagtgataatgaagtccaacgtaccatgcttgagattttgtatcagcttgatgggtttgacgcacgtggtaacatcaaggttcttatggcaacaaacaggcctgacatactagacccagctcttttacgtcctggacgtcttgaccgcaaggttgagttttgtctgcctgatctggagggcagaacacagatcttcaagattcacacacgaacaatgagttgtgaaagagacatccggtttgaactccttgctggcctctgcccaaactcaaccggagctgatatcagaagtgtatgcatagaagccggaatgtatgcaatcggagctaggagaaagtctgtgactgagaaggactttctggacgcagtgaacaaagttgttaaaggttatcaaaagttcagtgcaacacccaagtatatggcctactacatttag

SEQ ID NO: 85764 - protein, 478 aa, Arabidopsis thaliana
  peptide (1)..(478): Ceres Seq. ID no. 12682985
MASFGENLNASQFYITLCDDLDCLDGKYTVFGKITSGFETLTCIAKASVDAKNRPNKDIRIRHTYILTDPFDDPPQLAKMIPDEPYSARIKKVEKEINELAEKICNLGIKESDTGLAPPNQWDLVSDKQMMQEEQPLLVATCTQIISPNTEDAKYVVDIKKIGKYVVGLGDKASPTDIEAGMRVGVDQKKYQIQIPLPPKIDPSVTMMTVEEKPDATYSDIGGCKEQIEKIREVVELPMLHPEKFVRLGIDPPKGVLCYGPPGSGKTLVARAVANRTGACFIRVVGSELVQKYIGEGARMVRELFQMARSKKACILFFDEIDAIGGARFDDGVGSDNEVQRTMLEILYQLDGFDARGNIKVLMATNRPDILDPALLRPGRLDRKVEFCLPDLEGRTQIFKIHTRTMSCERDIRFELLAGLCPNSTGADIRSVCIEAGMYAIGARRKSVTEKDFLDAVNKVVKGYQKFSATPKYMAYYI

SEQ ID NO: 85765 - protein, 399 aa, Arabidopsis thaliana
  peptide (1)..(399): Ceres Seq. ID no. 12682986
MIPDEPYSARIKKVEKEINELAEKICNLGIKESDTGLAPPNQWDLVSDKQMMQEEQPLLVATCTQIISPNTEDAKYVVDIKKIGKYVVGLGDKASPTDIEAGMRVGVDQKKYQIQIPLPPKIDPSVTMMTVEEKPDATYSDIGGCKEQIEKIREVVELPMLHPEKFVRLGIDPPKGVLCYGPPGSGKTLVARAVANRTGACFIRVVGSELVQKYIGEGARMVRELFQMARSKKACILFFDEIDAIGGARFDDGVGSDNEVQRTMLEILYQLDGFDARGNIKVLMATNRPDILDPALLRPGRLDRKVEFCLPDLEGRTQIFKIHTRTMSCERDIRFELLAGLCPNSTGADIRSVCIEAGMYAIGARRKSVTEKDFLDAVNKVVKGYQKFSATPKYMAYYI

SEQ ID NO: 85766 - protein, 349 aa, Arabidopsis thaliana
  peptide (1)..(349): Ceres Seq. ID no. 12682987
MMQEEQPLLVATCTQIISPNTEDAKYVVDIKKIGKYVVGLGDKASPTDIEAGMRVGVDQKKYQIQIPLPPKIDPSVTMMTVEEKPDATYSDIGGCKEQIEKIREVVELPMLHPEKFVRLGIDPPKGVLCYGPPGSGKTLVARAVANRTGACFIRVVGSELVQKYIGEGARMVRELFQMARSKKACILFFDEIDAIGGARFDDGVGSDNEVQRTMLEILYQLDGFDARGNIKVLMATNRPDILDPALLRPGRLDRKVEFCLPDLEGRTQIFKIHTRTMSCERDIRFELLAGLCPNSTGADIRSVCIEAGMYAIGARRKSVTEKDFLDAVNKVVKGYQKFSATPKYMAYYI

SEQ ID NO: 85767 - DNA, 1566 bp, Arabidopsis thaliana
  misc_feature (1)..(1566): Ceres Seq. ID no. 12683013
  misc_feature (1)..(1566): Ortholog of  Ceres SEQ ID NO 12625120 as cited in SEQ ID NO 67706
  misc_feature (1)..(1566): Ortholog of  Ceres SEQ ID NO 13595999 as cited in SEQ ID NO 68173
aaaacaacaaagcaaagcgttgaagagagaagaagaagcaaagatataacccccaaaagtatcaattagtttccattttcgccgctaagattctgttttcgaacatttacaccctcaagaatcgccgccatgtgtggaggagctataatatccgatttcattccaccgccgaggtctcgccgtgttactagcgagtttatttggccggatctgaagaagaatttgaaaggatcgaagaaaagctcgaagaatcgttcgaatttcttcgattttgacgctgagttcgaagctgatttccaaggtttcaaagatgattcgtctatcgattgcgatgatgatttcgacgtcggtgatgttttcgccgatgtgaaaccattcgttttcacttcgactccaaaacccgccgtctccgccgctgcggaaggttcagtttttggtaagaaagttactggcttggatggggacgctgagaaatctgcaaataggaagaggaagaatcagtaccgagggattaggcaacgtccttggggaaaatgggctgctgagatacgtgatccaagggaaggtgctagaatctggcttggaacgttcaagacagctgaggaagctgctagagcttacgatgctgcagcgcggagaatccgtggatctaaagctaaggtgaatttccctgaagaaaacatgaaggctaattctcagaaacgctctgtgaaggctaatcttcagaaaccagtggctaaacctaaccctaacccaagtccagctttggttcagaactcgaacatctcctttgaaaatatgtgtttcatggaggagaaacaccaagtgagcaacaacaacaacaaccagtttgggatgacaaactccgttgatgctggatgtaatgggtatcagtatttcagctctgaccagggtagtaattctttcgattgttcggagtttggttggagcgatcaagctccgataactcccgacatctcttctgcggttatcaacaacaacaactcagctctgttctttgaggaagccaatccagctaagaagctcaagtctatggatttcgagacaccttacaacaacactgaatgggacgcttcactggatttcctcaacgaagatgctgtaacgactcaggacaatggtgcaaaccctatggacctatggagtattgatgaaattcattccatgattggaggagtcttctgaagagatccagtttcatgtaaataaggctgcatgtttgtgagtttcccgcatcgttcgtttatcaacctccaaaactttctaatgtctgttacttgcatcttcttctgctgtctctgtctgtctctctcaggagttcctgtttgcattgcgagaagccatgagcctctatcttgagggtagttgtgatgaagttaagtagaggcttatttttaggggttgtggtagtttttgttttagtgaatcttttgaattcgtttgtgttttgtttttgttactttatgccccaaaactcctttaacatttgtcataatgtgtttgaacctctcatctgtttaatcaaataaatcttctttgtatgct

SEQ ID NO: 85768 - protein, 358 aa, Arabidopsis thaliana; identical to SEQ ID NO: 37879
  peptide (1)..(358): Ceres Seq. ID no. 12683014

SEQ ID NO: 85769 - DNA, 1179 bp, Arabidopsis thaliana
  misc_feature (1)..(1179): Ceres Seq. ID no. 12683040
  misc_feature (1)..(1179): Ortholog of  Ceres SEQ ID NO 13582301 as cited in SEQ ID NO 56509
atggcgattctcaaatctcacttcttcttactcttccctcttcttcttctccactttcacactgtctcctttgctcagacgctctttgtgttcggagatggtctttacgacgccggaaacaaacagtttctctctcagaaccgagttgacgcaagctttcctccttatggagtcactgtaggacaagccaccggacggtggtccgatggttctatcgttcctgattatcttgctaaattcatgggaattcctaaaatctctccgattctcctaaccacggcggatttttctcacggagctaatttcgccatcgccgacgctaccgttcttggctctcctccggagacgatgactttgtcacaacaagtgaagaaattctcggaaaacaagaataagtggacaaatcaaacacgttctgaagctatctacttgatctacattggttctgatgattacttgagctatgctaagagtaatccaagtccatcagatactcagaaacaagcttttgttgatcaagtcatcactaccataaaagcagaaataaaggtggtttacgggtctggcggaaggaaattcgcattccagaacttggcaccgttaggttgcttaccggccgtgaaacaagcaagcggaaatgttcaagaatgtgtgaaattgccttcggaaatggctgctttgcataacaagaaacttttgcagctcttggttgaactatcaagagaactaaatggtttccagtactcgttttacgacttctttagctcgatccaaaacagagttatcaagtctaagacttatacattcgagacaggaaacgctgcttgttgtggaactggctctatcaacgggagtaattgctcagctaaaaatgtatgcgccaagcctgaagagtatatcttctttgatggtaagcatttgacgcaagaagccaaccttcaggtcgggcatttgatgtggggagcagatccggaagtgattggaccgaacaatatcagggagcttatggtccttcctctagacattacagtcatcttagctggtatacaagaagctatggctgccatgagaccgagacagagcaacattgagagtctctatgatatcaagaagatggagtcagagatggataatcattggctttatcaagttgacaaagctatctcctttatgatataa

SEQ ID NO: 85770 - protein, 392 aa, Arabidopsis thaliana; identical to SEQ ID NO: 25251
  peptide (1)..(392): Ceres Seq. ID no. 12683041

SEQ ID NO: 85771 - protein, 312 aa, Arabidopsis thaliana; identical to SEQ ID NO: 25252
  peptide (1)..(312): Ceres Seq. ID no. 12683042

SEQ ID NO: 85772 - protein, 276 aa, Arabidopsis thaliana
  peptide (1)..(276): Ceres Seq. ID no. 12683043
MTLSQQVKKFSENKNKWTNQTRSEAIYLIYIGSDDYLSYAKSNPSPSDTQKQAFVDQVITTIKAEIKVVYGSGGRKFAFQNLAPLGCLPAVKQASGNVQECVKLPSEMAALHNKKLLQLLVELSRELNGFQYSFYDFFSSIQNRVIKSKTYTFETGNAACCGTGSINGSNCSAKNVCAKPEEYIFFDGKHLTQEANLQVGHLMWGADPEVIGPNNIRELMVLPLDITVILAGIQEAMAAMRPRQSNIESLYDIKKMESEMDNHWLYQVDKAISFMI

SEQ ID NO: 85773 - DNA, 1344 bp, Arabidopsis thaliana
  misc_feature (1)..(1344): Ceres Seq. ID no. 12683135
  misc_feature (1)..(1344): Ortholog of  Ceres SEQ ID NO 12364737 as cited in SEQ ID NO 51089
  misc_feature (1)..(1344): Ortholog of  Ceres SEQ ID NO 14311515 as cited in SEQ ID NO 51680
  misc_feature (1)..(1344): Ortholog of  Ceres SEQ ID NO 14306553 as cited in SEQ ID NO 53121
  misc_feature (1)..(1344): Ortholog of  Ceres SEQ ID NO 14315035 as cited in SEQ ID NO 56880
  misc_feature (1)..(1344): Ortholog of  Ceres SEQ ID NO 13594276 as cited in SEQ ID NO 57728
  misc_feature (1)..(1344): Ortholog of  Ceres SEQ ID NO 13594147 as cited in SEQ ID NO 58975
  misc_feature (1)..(1344): Ortholog of  Ceres SEQ ID NO 13655302 as cited in SEQ ID NO 63307
  misc_feature (1)..(1344): Ortholog of  Ceres SEQ ID NO 13597380 as cited in SEQ ID NO 64054
  misc_feature (1)..(1344): Ortholog of  Ceres SEQ ID NO 12625474 as cited in SEQ ID NO 64169
  misc_feature (1)..(1344): Ortholog of  Ceres SEQ ID NO 13597502 as cited in SEQ ID NO 64681
cacatttcaccacaacgaccaccactcctacactaacacttatatcaccaacacattgtgttctactatacataaaattcagttcctaagtatttttgttttgttttgtgagatcgatggagagttacttgaggaaatggtgtttagtttctgtgtgggttttgcttttaggtttagggtttaaggtaaaagcagagcctcaagttccatgttacttcatctttggtgattctttggttgacaatggaaacaacaatcgtcttagatctattgcaagagccgattatttcccttacggcatcgatttcggcggccccaccggccgtttttccaacggcagaaccaccgtcgacgttctcactgagctacttggatttgataactacattcctgcgtatagtactgtgagtggccaagagatacttcaaggagtcaactacgcatctgcagctgctggaatcagagaagaaaccggtgcacaattgggacaaaggataacatttagtgggcaagtagagaattataagaacacagtggcacaagtggtggagattcttggagacgagtacactgcagcagattaccttaagagatgcatttactctgttggtatgggaagcaatgactatcttaataactacttcatgcctcagttctactccactagcagacagtacactcccgaacagtatgctgacgatcttatcagtcgttacagggaccagcttaatgcactgtacaactatggagctagaaagtttgcattggtaggaattggagccattggatgtagtccgaatgcgctcgcacagggcagccaagacggaacaacttgtgtggagcgtatcaactcggccaaccgaatcttcaacaacaggctcatatctatggtccaacaactaaacaacgctcattccgatgctagtttcacttacatcaatgcttatggcgcttttcaggatataatcgccaatccctctgcttatgggtttacgaatacgaacactgcgtgttgcggaattggaaggaacggaggtcagctaacatgtttaccgggagaacccccgtgcttgaaccgagatgagtacgtgttttgggatgcatttcatccttcggctgctgcaaacacggccattgcaaaaagatcttacaatgcacaaagatcttccgacgtttatccgattgatatctcgcaattagcacagctttgaaaggacagagaataggagagttttacaacaattgtatgcttttcaggttataaattgaattattggaaatgattctgatgttatgtgtgtacccaaagtgttcaactttataaaaaaaaatagggattgcatt

SEQ ID NO: 85774 - protein, 364 aa, Arabidopsis thaliana; identical to SEQ ID NO: 27554
  peptide (1)..(364): Ceres Seq. ID no. 12683136

SEQ ID NO: 85775 - protein, 199 aa, Arabidopsis thaliana; identical to SEQ ID NO: 27555
  peptide (1)..(199): Ceres Seq. ID no. 12683137

SEQ ID NO: 85776 - protein, 188 aa, Arabidopsis thaliana; identical to SEQ ID NO: 27556
  peptide (1)..(188): Ceres Seq. ID no. 12683138

SEQ ID NO: 85777 - DNA, 1288 bp, Arabidopsis thaliana
  misc_feature (1)..(1288): Ceres Seq. ID no. 12683139
  misc_feature (1)..(1288): Ortholog of  Ceres SEQ ID NO 14311515 as cited in SEQ ID NO 51680
  misc_feature (1)..(1288): Ortholog of  Ceres SEQ ID NO 14315035 as cited in SEQ ID NO 56880
  misc_feature (1)..(1288): Ortholog of  Ceres SEQ ID NO 13594276 as cited in SEQ ID NO 57728
  misc_feature (1)..(1288): Ortholog of  Ceres SEQ ID NO 13594147 as cited in SEQ ID NO 58975
  misc_feature (1)..(1288): Ortholog of  Ceres SEQ ID NO 13655302 as cited in SEQ ID NO 63307
  misc_feature (1)..(1288): Ortholog of  Ceres SEQ ID NO 13597380 as cited in SEQ ID NO 64054
  misc_feature (1)..(1288): Ortholog of  Ceres SEQ ID NO 12625474 as cited in SEQ ID NO 64169
  misc_feature (1)..(1288): Ortholog of  Ceres SEQ ID NO 13597502 as cited in SEQ ID NO 64681
acattcactcatatcactacactttccattaattaccaatatatttttactacttaaaaaagatattggtcttgaaatggagagttacttaacgaaatggtgtgtagtgcttgtgttgttgtgtttcgggtttagtgtagtaaaagcacaagcacaagctcaagttccatgtttctttgtttttggtgactctttggttgacaatggaaacaacaacggtcttatttctattgcaagatccaattacttcccttacggtatcgatttcggcggccctaccggccgtttctccaacggcaagactactgttgatgtgatcgctgagctacttggatttaatggctacattcctgcgtacaatactgtgagtggtcggcaaatactctccggagttaactacgcttccgcagctgctggaatccgagaagaaaccggtcgacaattgggacaaaggataagctttagtggacaagttaggaactaccagaccacagtatcgcaagttgtgcagcttctaggagacgagactcgtgcagctgattacctcaagagatgtatttactctgttggtttaggaagcaacgactatctcaacaactacttcatgcctacgttttactcttctagcagacaattcacacccgaacaatacgctaacgatctcatcagtcgctacagcacccagctcaatgcattatacaactatggggctcgaaagtttgcattgagtggaattggagcagttggttgtagtcctaacgcgctcgcaggcagtcccgacggtaggacttgcgtagaccgcatcaactcagcaaaccagatcttcaacaacaagctaagatctcttgttgatcagctcaacaacaatcaccctgatgcaaagttcatctacatcaatgcttatggcattttccaggacatgatcacaaatcctgccagatttgggtttagagtgacgaacgcgggatgttgcggtattgggaggaatgctggacagatcacatgtttaccgggacagagaccgtgtagagaccgcaatgcgtacgtgttctgggacgcatttcaccctactgaagccgcaaatgtgatcatcgcaaggagatcgtacaatgcacaatcggcttcagacgcttaccctatggatatttcaaggctggcacagctttgaagaaacatagtaaaataagaactaaagaagttccacaaaccaatgtgtgatcttgttgtgtaccgtaccgctatttaagattttcttgacgtaattgaaatcgagtaaaacattattcta

SEQ ID NO: 85778 - protein, 388 aa, Arabidopsis thaliana; identical to SEQ ID NO: 35500
  peptide (1)..(388): Ceres Seq. ID no. 12683140

SEQ ID NO: 85779 - protein, 363 aa, Arabidopsis thaliana; identical to SEQ ID NO: 35501
  peptide (1)..(363): Ceres Seq. ID no. 12683141

SEQ ID NO: 85780 - DNA, 474 bp, Arabidopsis thaliana
  misc_feature (1)..(474): Ceres Seq. ID no. 12683191
  misc_feature (1)..(474): Ortholog of  Ceres SEQ ID NO 13661089 as cited in SEQ ID NO 61053
atggcgttaagagagatgataatagatgagagtgatgacatagagagctacagtgatcaatctctttgtcttgataaagccaaggagcttcttgctctcatcaaactacccacgggattgttgccattgaaggatatgacggaagttgggtacaacaaaacaaaagggtttgtgtggatgaggatgagaagcaagattgagcatacattccgtgagataggtcgcagagttttatatgacacggagataactgcgtttgttgaggaccgccgtatgaggagacttaccggagtcaaaagcaaagagctcatgatctgggttcctgtgaatgatatcttcataaagagaaagatcctgagaagatcacctttgctaataccaccggcctgtcacgaacatttaaagtttcagcatttcaatgtgagggttgataaattaaaagaaaagaggagtaaccagacttccttgatgtaa

SEQ ID NO: 85781 - protein, 157 aa, Arabidopsis thaliana
  peptide (1)..(157): Ceres Seq. ID no. 12683192
MALREMIIDESDDIESYSDQSLCLDKAKELLALIKLPTGLLPLKDMTEVGYNKTKGFVWMRMRSKIEHTFREIGRRVLYDTEITAFVEDRRMRRLTGVKSKELMIWVPVNDIFIKRKILRRSPLLIPPACHEHLKFQHFNVRVDKLKEKRSNQTSLM

SEQ ID NO: 85782 - protein, 152 aa, Arabidopsis thaliana
  peptide (1)..(152): Ceres Seq. ID no. 12683193
MIIDESDDIESYSDQSLCLDKAKELLALIKLPTGLLPLKDMTEVGYNKTKGFVWMRMRSKIEHTFREIGRRVLYDTEITAFVEDRRMRRLTGVKSKELMIWVPVNDIFIKRKILRRSPLLIPPACHEHLKFQHFNVRVDKLKEKRSNQTSLM

SEQ ID NO: 85783 - protein, 112 aa, Arabidopsis thaliana
  peptide (1)..(112): Ceres Seq. ID no. 12683194
MTEVGYNKTKGFVWMRMRSKIEHTFREIGRRVLYDTEITAFVEDRRMRRLTGVKSKELMIWVPVNDIFIKRKILRRSPLLIPPACHEHLKFQHFNVRVDKLKEKRSNQTSLM

SEQ ID NO: 85784 - DNA, 1530 bp, Arabidopsis thaliana
  misc_feature (1)..(1530): Ceres Seq. ID no. 12683214
  misc_feature (1)..(1530): Ortholog of  Ceres SEQ ID NO 14308709 as cited in SEQ ID NO 55376
  misc_feature (1)..(1530): Ortholog of  Ceres SEQ ID NO 15178157 as cited in SEQ ID NO 57481
  misc_feature (1)..(1530): Ortholog of  Ceres SEQ ID NO 13597407 as cited in SEQ ID NO 64106
  misc_feature (1)..(1530): Ortholog of  Ceres SEQ ID NO 12637747 as cited in SEQ ID NO 0
atggagggaggaataatacatggaggagcagatgaatcagctttcaaagaatgtttctctctaacatggaagaatccttatgttcttcgtcttgctttctctgccggaatcggtggtcttctctttggttacgacaccggagtgatatcaggtgctctgctttatatcagagatgatttcaagtctgttgacagaaatacttggttacaggagatgatagtgagcatggcagttgcaggagccatcgttggagccgccataggaggttgggcgaacgacaaattagggaggagaagcgcgattctcatggcggatttcctctttttattaggagctatcattatggcggctgctcctaacccgtccctccttgtcgttggccgtgtttttgtgggcctcggggtcgggatggcctcgatgaccgctcctctatacatctcagaagcttcgcctgctaagatcagaggagctttggtcagtactaatgggtttctcattaccggaggacagttcttgtcttacctcataaacttagcctttactgatgtgaccggaacgtggagatggatgctcggaatcgccggaattccagctcttttacagtttgtcttaatgtttacactcccggagtcacctcgatggttataccgcaagggaagagaagaagaggctaaagcgattctaagaagaatatactcagcagaagatgtagaacaagagatacgtgcacttaaagactcagttgaaacagagatacttgaagaagggtcttccgagaaaatcaacatgatcaaactatgcaaagctaaaaccgttagacgaggactaatagctggtgttggtctccaagtgtttcaacagttcgttgggatcaacacagttatgtattacagtccaaccattgttcagcttgccggtttcgcttcaaacagaacagctcttctcttgtctctagttaccgcaggacttaatgcatttggttctataattagcatttacttcattgatagaatcggaaggaaaaagcttttgatcattagccttttcggagtcattatctcgctaggaatactaaccggtgttttttatgaagcggctactcacgctcctgcgattagctcactcgagacacaaagcaattttggttggtttgctcttcttggattgggactttatatcatcttcttctctcctggaatggggactgttccatggatagttaactcagagatttatccattgagattcagaggaatatgtggaggaatagctgcaactgcaaattggatatcaaatttgattgtggctcaatcttttttgtcattgaccgaagctattgggacttcttggacttttctcatctttggagtgatctcagtcattgctcttctctttgttatggtttgtgttccggagacaaaaggaatgccaatggaggagattgagaagatgcttgaacgaagatcgatggagtttaagttttggaagaaaaaatcaaaacttgttgagaaacaaaaccagagtgcatga

SEQ ID NO: 85785 - protein, 509 aa, Arabidopsis thaliana
  peptide (1)..(509): Ceres Seq. ID no. 12683215
MEGGIIHGGADESAFKECFSLTWKNPYVLRLAFSAGIGGLLFGYDTGVISGALLYIRDDFKSVDRNTWLQEMIVSMAVAGAIVGAAIGGWANDKLGRRSAILMADFLFLLGAIIMAAAPNPSLLVVGRVFVGLGVGMASMTAPLYISEASPAKIRGALVSTNGFLITGGQFLSYLINLAFTDVTGTWRWMLGIAGIPALLQFVLMFTLPESPRWLYRKGREEEAKAILRRIYSAEDVEQEIRALKDSVETEILEEGSSEKINMIKLCKAKTVRRGLIAGVGLQVFQQFVGINTVMYYSPTIVQLAGFASNRTALLLSLVTAGLNAFGSIISIYFIDRIGRKKLLIISLFGVIISLGILTGVFYEAATHAPAISSLETQSNFGWFALLGLGLYIIFFSPGMGTVPWIVNSEIYPLRFRGICGGIAATANWISNLIVAQSFLSLTEAIGTSWTFLIFGVISVIALLFVMVCVPETKGMPMEEIEKMLERRSMEFKFWKKKSKLVEKQNQSA

SEQ ID NO: 85786 - protein, 438 aa, Arabidopsis thaliana
  peptide (1)..(438): Ceres Seq. ID no. 12683216
MIVSMAVAGAIVGAAIGGWANDKLGRRSAILMADFLFLLGAIIMAAAPNPSLLVVGRVFVGLGVGMASMTAPLYISEASPAKIRGALVSTNGFLITGGQFLSYLINLAFTDVTGTWRWMLGIAGIPALLQFVLMFTLPESPRWLYRKGREEEAKAILRRIYSAEDVEQEIRALKDSVETEILEEGSSEKINMIKLCKAKTVRRGLIAGVGLQVFQQFVGINTVMYYSPTIVQLAGFASNRTALLLSLVTAGLNAFGSIISIYFIDRIGRKKLLIISLFGVIISLGILTGVFYEAATHAPAISSLETQSNFGWFALLGLGLYIIFFSPGMGTVPWIVNSEIYPLRFRGICGGIAATANWISNLIVAQSFLSLTEAIGTSWTFLIFGVISVIALLFVMVCVPETKGMPMEEIEKMLERRSMEFKFWKKKSKLVEKQNQSA

SEQ ID NO: 85787 - protein, 434 aa, Arabidopsis thaliana
  peptide (1)..(434): Ceres Seq. ID no. 12683217
MAVAGAIVGAAIGGWANDKLGRRSAILMADFLFLLGAIIMAAAPNPSLLVVGRVFVGLGVGMASMTAPLYISEASPAKIRGALVSTNGFLITGGQFLSYLINLAFTDVTGTWRWMLGIAGIPALLQFVLMFTLPESPRWLYRKGREEEAKAILRRIYSAEDVEQEIRALKDSVETEILEEGSSEKINMIKLCKAKTVRRGLIAGVGLQVFQQFVGINTVMYYSPTIVQLAGFASNRTALLLSLVTAGLNAFGSIISIYFIDRIGRKKLLIISLFGVIISLGILTGVFYEAATHAPAISSLETQSNFGWFALLGLGLYIIFFSPGMGTVPWIVNSEIYPLRFRGICGGIAATANWISNLIVAQSFLSLTEAIGTSWTFLIFGVISVIALLFVMVCVPETKGMPMEEIEKMLERRSMEFKFWKKKSKLVEKQNQSA

SEQ ID NO: 85788 - DNA, 1524 bp, Arabidopsis thaliana
  misc_feature (1)..(1524): Ceres Seq. ID no. 12683224
  misc_feature (1)..(1524): Ortholog of  Ceres SEQ ID NO 14302458 as cited in SEQ ID NO 66127
atggattacgagaggatacagaaagtgcagaagagtataatctcgccaacgaagctgagaatgaagctaatgggtccactcaataacatgaagcgagaaggatccaagtccaacagtaactcttcaagaacatctccttctcgtcttcagattccagatgactccgagttctccaagaacagcttgttagcttctaactcttattcagacgacgatgctacaactacggatatagaagtagctaagctgccaaatgagccggttttgtatccaaccgagaacgataatcaaggctcaaaagatcggtgtgaaggtgttgttccaagggaaaatgatcagcctagactgcagcaatttaggaaaggggacttgaatatggcttctcctcatataatgagacctcaagaagatgaaaaccttgattatgacagtaacgctagctcttcaagcttcgagtttcaccgagctcgtggtgagcgttcgaatcagaatcatggctcaagaggatatccttcaagacaaatgccatctaaatggaatgatgctgagaagtggataatgagcagacagaacatggtgatgaggaagaacggtcaagggaaccgaatacctgtgagaattgtgcctgataatgcaggttacgagcataacaaatctaggatggatctgtgccaatcctcacaagttgatgggtttgagaagttccctaatgttgttccctcggcgccacatcctattctaactcaagagtatggaggagactcgttgattgaccaatccacacaaagcaatgatcttgcggattcatcacatgatcatacaacaggtggtcctgcgattcgttcggtatgtatgagagatatgggaaccgaaatgacacctataccgagtcaagaaccttcaagatctgtgacaccagttggtgcaacaactcctcttcgtagcccgacttcatctctcccttctactcctagaggtggccaaccagaggaatcttctatgtcgaaaaacacaagaagagaactatctgaggaggaagagaaagcgaagacgcgaagagagattgtagctcttggagttcagctagggaagatgaacatcgccgcttgggcaagtaaagaagaagaggagaacaagaaaaacaatggagatgcagaggaggcacagaagattgagtttgaaaaacgagcgactgcatgggaagaagcagagaaatccaaacataatgcgaggtataagcgtgaggaaatcagaatccaagcttgggaaagtcaggagaaagccaaactcgaagcagaaatgcgacgtatagaggctaaagttgagcagatgaaagctgaagctgaagcaaagataatgaagaaaattgcgttggctaagcaaaggtcagaagagaaacgggctttggcggaagctagaaaaacccgtgatgctgagaaggcagtggctgaagcccaatatattcgggaaactggtagaataccggcatcaagttacaagatatgttgtggttggttctcatga

SEQ ID NO: 85789 - protein, 507 aa, Arabidopsis thaliana
  peptide (1)..(507): Ceres Seq. ID no. 12683225
MDYERIQKVQKSIISPTKLRMKLMGPLNNMKREGSKSNSNSSRTSPSRLQIPDDSEFSKNSLLASNSYSDDDATTTDIEVAKLPNEPVLYPTENDNQGSKDRCEGVVPRENDQPRLQQFRKGDLNMASPHIMRPQEDENLDYDSNASSSSFEFHRARGERSNQNHGSRGYPSRQMPSKWNDAEKWIMSRQNMVMRKNGQGNRIPVRIVPDNAGYEHNKSRMDLCQSSQVDGFEKFPNVVPSAPHPILTQEYGGDSLIDQSTQSNDLADSSHDHTTGGPAIRSVCMRDMGTEMTPIPSQEPSRSVTPVGATTPLRSPTSSLPSTPRGGQPEESSMSKNTRRELSEEEEKAKTRREIVALGVQLGKMNIAAWASKEEEENKKNNGDAEEAQKIEFEKRATAWEEAEKSKHNARYKREEIRIQAWESQEKAKLEAEMRRIEAKVEQMKAEAEAKIMKKIALAKQRSEEKRALAEARKTRDAEKAVAEAQYIRETGRIPASSYKICCGWFS

SEQ ID NO: 85790 - protein, 487 aa, Arabidopsis thaliana
  peptide (1)..(487): Ceres Seq. ID no. 12683226
MKLMGPLNNMKREGSKSNSNSSRTSPSRLQIPDDSEFSKNSLLASNSYSDDDATTTDIEVAKLPNEPVLYPTENDNQGSKDRCEGVVPRENDQPRLQQFRKGDLNMASPHIMRPQEDENLDYDSNASSSSFEFHRARGERSNQNHGSRGYPSRQMPSKWNDAEKWIMSRQNMVMRKNGQGNRIPVRIVPDNAGYEHNKSRMDLCQSSQVDGFEKFPNVVPSAPHPILTQEYGGDSLIDQSTQSNDLADSSHDHTTGGPAIRSVCMRDMGTEMTPIPSQEPSRSVTPVGATTPLRSPTSSLPSTPRGGQPEESSMSKNTRRELSEEEEKAKTRREIVALGVQLGKMNIAAWASKEEEENKKNNGDAEEAQKIEFEKRATAWEEAEKSKHNARYKREEIRIQAWESQEKAKLEAEMRRIEAKVEQMKAEAEAKIMKKIALAKQRSEEKRALAEARKTRDAEKAVAEAQYIRETGRIPASSYKICCGWFS

SEQ ID NO: 85791 - protein, 484 aa, Arabidopsis thaliana
  peptide (1)..(484): Ceres Seq. ID no. 12683227
MGPLNNMKREGSKSNSNSSRTSPSRLQIPDDSEFSKNSLLASNSYSDDDATTTDIEVAKLPNEPVLYPTENDNQGSKDRCEGVVPRENDQPRLQQFRKGDLNMASPHIMRPQEDENLDYDSNASSSSFEFHRARGERSNQNHGSRGYPSRQMPSKWNDAEKWIMSRQNMVMRKNGQGNRIPVRIVPDNAGYEHNKSRMDLCQSSQVDGFEKFPNVVPSAPHPILTQEYGGDSLIDQSTQSNDLADSSHDHTTGGPAIRSVCMRDMGTEMTPIPSQEPSRSVTPVGATTPLRSPTSSLPSTPRGGQPEESSMSKNTRRELSEEEEKAKTRREIVALGVQLGKMNIAAWASKEEEENKKNNGDAEEAQKIEFEKRATAWEEAEKSKHNARYKREEIRIQAWESQEKAKLEAEMRRIEAKVEQMKAEAEAKIMKKIALAKQRSEEKRALAEARKTRDAEKAVAEAQYIRETGRIPASSYKICCGWFS

SEQ ID NO: 85792 - DNA, 489 bp, Arabidopsis thaliana
  misc_feature (1)..(489): Ceres Seq. ID no. 12683254
  misc_feature (1)..(489): Ortholog of  Ceres SEQ ID NO 15177478 as cited in SEQ ID NO 1121
atgccggtaatgaatccatcattgtgtattggtacacaaacatcggtgtacctcgctcctcgtgagaaatcttttacgagtaatggaaactctcaaaggcgttatcctacaagcgtttctatgcaacgccagccttggagccaaagtaaattcccttctctccaggatgcagtgcaaccagttgtcgtctctaagaataaaagaccagtctttgcatgtaactctgcgctgaattcaaaatgcagtcaaggacaaacacagaccgttacacggcaatcaccaacaatcacacaagctcctactcatggaaaagttaaatccccaaagcttgatgacggtggaaacgggttcccacctcgggatgatggtggtggtggtggtggcggaggcggtggagggagctcttcaggtggattcttccttttcgggtttcttttgttcatgggatacttgaaagatttggagggcgaacatgaaaacaaccattaa

SEQ ID NO: 85793 - protein, 162 aa, Arabidopsis thaliana
  peptide (1)..(162): Ceres Seq. ID no. 12683255
MPVMNPSLCIGTQTSVYLAPREKSFTSNGNSQRRYPTSVSMQRQPWSQSKFPSLQDAVQPVVVSKNKRPVFACNSALNSKCSQGQTQTVTRQSPTITQAPTHGKVKSPKLDDGGNGFPPRDDGGGGGGGGGGGSSSGGFFLFGFLLFMGYLKDLEGEHENNH

SEQ ID NO: 85794 - protein, 159 aa, Arabidopsis thaliana
  peptide (1)..(159): Ceres Seq. ID no. 12683256
MNPSLCIGTQTSVYLAPREKSFTSNGNSQRRYPTSVSMQRQPWSQSKFPSLQDAVQPVVVSKNKRPVFACNSALNSKCSQGQTQTVTRQSPTITQAPTHGKVKSPKLDDGGNGFPPRDDGGGGGGGGGGGSSSGGFFLFGFLLFMGYLKDLEGEHENNH

SEQ ID NO: 85795 - protein, 122 aa, Arabidopsis thaliana
  peptide (1)..(122): Ceres Seq. ID no. 12683257
MQRQPWSQSKFPSLQDAVQPVVVSKNKRPVFACNSALNSKCSQGQTQTVTRQSPTITQAPTHGKVKSPKLDDGGNGFPPRDDGGGGGGGGGGGSSSGGFFLFGFLLFMGYLKDLEGEHENNH

SEQ ID NO: 85796 - DNA, 699 bp, Arabidopsis thaliana
  misc_feature (1)..(699): Ceres Seq. ID no. 12683377
  misc_feature (1)..(699): Ortholog of  Ceres SEQ ID NO 13639514 as cited in SEQ ID NO 55736
  misc_feature (1)..(699): Ortholog of  Ceres SEQ ID NO 13595560 as cited in SEQ ID NO 56738
atgatgatgatggcaacgaaacctgcatggcttgaaggtttaatggcggagactttcttctcaagctgtggaatccacgaaactcgccgtaaaagtgaaaagaacgttttttgcttactctgttgtctcagtgtttgtcctcactgtctcccttctcatcgctctcatcctcttcttcaggtgagacgatacgtataccacgacgtcgttcggttgagtgatcttgagaagctcatagattgttcatatgttcagccatatacaattaatggagccaaagtgatattcttaaaccaaagacaacaatcacgagctaaggtttcttcaaatgtttgcttcacttgtgatagaatccttcaagaaccattccacttttgttccctctcttgcaaggtggattatttatcatatcaaggagatgatttatcaagcattctctatagaattgatgaatcagattttacgttcgagggtttgagaatggacggacatgatcagctcggagagatatcgacgatggaggatggggaggatatactggtaatttcagatgaatctgagcaaggtaacaatagtcataagaaagagaagaagaagagcaagaagaagaagccagagagcaattacttgcctgggatggttctttcatcacttggtaatagaagaaaaggtgctcctcatagggctcctttttcataa

SEQ ID NO: 85797 - protein, 232 aa, Arabidopsis thaliana
  peptide (1)..(232): Ceres Seq. ID no. 12683378
MMMMATKPAWLEGLMAETFFSSCGIHETRRKSEKNVFCLLCCLSVCPHCLPSHRSHPLLQVRRYVYHDVVRLSDLEKLIDCSYVQPYTINGAKVIFLNQRQQSRAKVSSNVCFTCDRILQEPFHFCSLSCKVDYLSYQGDDLSSILYRIDESDFTFEGLRMDGHDQLGEISTMEDGEDILVISDESEQGNNSHKKEKKKSKKKKPESNYLPGMVLSSLGNRRKGAPHRAPFS

SEQ ID NO: 85798 - protein, 231 aa, Arabidopsis thaliana
  peptide (1)..(231): Ceres Seq. ID no. 12683379
MMMATKPAWLEGLMAETFFSSCGIHETRRKSEKNVFCLLCCLSVCPHCLPSHRSHPLLQVRRYVYHDVVRLSDLEKLIDCSYVQPYTINGAKVIFLNQRQQSRAKVSSNVCFTCDRILQEPFHFCSLSCKVDYLSYQGDDLSSILYRIDESDFTFEGLRMDGHDQLGEISTMEDGEDILVISDESEQGNNSHKKEKKKSKKKKPESNYLPGMVLSSLGNRRKGAPHRAPFS

SEQ ID NO: 85799 - protein, 230 aa, Arabidopsis thaliana
  peptide (1)..(230): Ceres Seq. ID no. 12683380
MMATKPAWLEGLMAETFFSSCGIHETRRKSEKNVFCLLCCLSVCPHCLPSHRSHPLLQVRRYVYHDVVRLSDLEKLIDCSYVQPYTINGAKVIFLNQRQQSRAKVSSNVCFTCDRILQEPFHFCSLSCKVDYLSYQGDDLSSILYRIDESDFTFEGLRMDGHDQLGEISTMEDGEDILVISDESEQGNNSHKKEKKKSKKKKPESNYLPGMVLSSLGNRRKGAPHRAPFS

SEQ ID NO: 85800 - DNA, 762 bp, Arabidopsis thaliana
  misc_feature (1)..(762): Ceres Seq. ID no. 12683878
  misc_feature (1)..(762): Ortholog of  Ceres SEQ ID NO 13590699 as cited in SEQ ID NO 65085
atggcgacttctcagcaatttttaaaccctacactcttcaaatccttagcttcctcaaacaaaaactcatgtactctctgcccatctcctttcttgcaactcaagtccgcctccacaattttcaattacaaaccacttacttcctcctccgccacgatcatcacacgcgtcgctgcatcatcctccgattcaggcgagtcaataaccagagagactttccacggcctctgcttcgtcttgaaagacaacatcgacaccgatcaaataatccccgccgagtacggcactctcatcccttcgattccagaagatcgcgagaaactcggctctttcgcgcttaacggcttaccaaaattctacaacgaacgtttcgttgttccaggagagatgaaatcaaagtactcagtcatcatcggcggcgataatttcggttgcggatcttcccgcgaacacgctccagtttgtctcggcgcggcgggagctaaagctgtggtggcggaatcgtacgctaggatctttttcaggaactgtgtagctacaggtgagattttcccgttggaatcggaggttaggatttgcgacgagtgcaaaacaggggatgtggtgacaatcgaacacaaggaagacggtagtagtttgctgatcaatcatacgacgaggaaagaatacaaactgaaaccgctcggtgatgccggtccggtgatcgacgccggtggaatcttcgcttatgcaagaaaagccggcatgattccttctgcttga

SEQ ID NO: 85801 - protein, 253 aa, Arabidopsis thaliana
  peptide (1)..(253): Ceres Seq. ID no. 12683879
MATSQQFLNPTLFKSLASSNKNSCTLCPSPFLQLKSASTIFNYKPLTSSSATIITRVAASSSDSGESITRETFHGLCFVLKDNIDTDQIIPAEYGTLIPSIPEDREKLGSFALNGLPKFYNERFVVPGEMKSKYSVIIGGDNFGCGSSREHAPVCLGAAGAKAVVAESYARIFFRNCVATGEIFPLESEVRICDECKTGDVVTIEHKEDGSSLLINHTTRKEYKLKPLGDAGPVIDAGGIFAYARKAGMIPSA

SEQ ID NO: 85802 - DNA, 1621 bp, Arabidopsis thaliana
  misc_feature (1)..(1621): Ceres Seq. ID no. 12683902
  misc_feature (1)..(1621): Ortholog of  Ceres SEQ ID NO 13595900 as cited in SEQ ID NO 69289
gaagtaaaaaagccctaaattgatatctctatcccttgcgcatgatccagattcggttgtgatcggagctgccatggaacgtatcatcggcggcaagtacaagctcggacggaagattggcggtggttcctttggagagattttcctagctacgcacatcgataccttcgagattgtagctgttaagatcgagaacagtaaaacaaaacatcctcagcttctctatgaagctaagctatatagaactcttgaaggaggaagtggaattccgcgcataagatggtttggagttgatggaacagagaatgctttagtgatggatttgctcggtccaagtctcgaagatcttttcgtctactgtgggagaaaattttcaccaaagacggtcttgatgttggctgatcaaatgctaactagaatagaatatgtacattccaaaggatatctgcatagagatataaaaccagataactttctcatgggcctaggccgcaaagcgaatcaggtttatctaattgactttggactggccaaaagatatcgtgatgccaacaccaaccgccacatcccttatagggaaaacaagaatttaacaggaactgcacgatatgcaagttgcaatacacatcttggtattgagcaaggtagacgggatgacctagagtctcttggatatgtgcttctgtacttcttaagaggaagccttccatggcagggtcttaaggctgttgacaagaagcaaaagtatgacaaaatttgtgagaagaagatatcaactcctattgaggttctatgcaaaagccaccccgtggagtttgcttcatattttcattattgccacacactgacatttgatcaacgccctgattatggattcttgaagcggctttttcgtgatttattctcacgggaaggatatgagtttgactatatatatgactggactattataaagtatcagcaatcacagaaaactagaagtcagtctcaggccgttcctgggtctagtaatgctcgtgcaataccaatggacacaagcaatcatcgaggaggaactaagatttcacatgaagcccaagtctctgaccgtgtcagaccggctaatgccagtggtccaagcccacagattaataccgctgtagggaggagtctgggttttgatcaagtccacaagaatatgaacatgccatcatccacttcattatctcctgcgggtacctcaaaaagaaatgtcagacccgaaacctcaaattctgggtttgggagcgggaataaaaccggcggttggacttcaccattcatgtcaccggggaaatgatgcaaaaaaagttggagtatatcattcatctgatctgctgagcaagattatgtgtgcctttgggtctaaactgtgatttctgcagtgaaaagctctagactgaggttgaagatctgaatggagtttttccatgaacagcttactgtttgacaaaaggcatgaagattatgtttgctttccttcaagattctcacaaatgactgacttcaacctttgtataaaatcttgcaaccgggcgtgtaatttggttcttgtgattcattctcccaagttttcttctataaaactttgttcgtatttctg

SEQ ID NO: 85803 - protein, 414 aa, Arabidopsis thaliana; identical to SEQ ID NO: 49202
  peptide (1)..(414): Ceres Seq. ID no. 12683903

SEQ ID NO: 85804 - protein, 333 aa, Arabidopsis thaliana; identical to SEQ ID NO: 49203
  peptide (1)..(333): Ceres Seq. ID no. 12683904

SEQ ID NO: 85805 - protein, 308 aa, Arabidopsis thaliana; identical to SEQ ID NO: 49204
  peptide (1)..(308): Ceres Seq. ID no. 12683905

SEQ ID NO: 85806 - DNA, 608 bp, Arabidopsis thaliana
  misc_feature (1)..(608): Ceres Seq. ID no. 12683910
  misc_feature (1)..(608): Ortholog of  Ceres SEQ ID NO 13595226 as cited in SEQ ID NO 56331
  misc_feature (1)..(608): Ortholog of  Ceres SEQ ID NO 13661903 as cited in SEQ ID NO 61722
  misc_feature (1)..(608): Ortholog of  Ceres SEQ ID NO 15173940 as cited in SEQ ID NO 61934
aaaacaatcaagaaccactctttcgtgtcgcaataacaataagaaagaaagaaaaagaaaaccagagatggcgatgacgacagcatctacggtatttgttctaccggccaatgtcacctcggtcgccggcgcttcgtcgtccaggagctccgtgtctttcttgccgatgagaaacgccggttctaggctcgtagtcagggcagccgaagatcctgctccggcttcctcttcttcaaaagattctccggcagctgccgctgctccggatggagctactgccaccaaacccaagccaccaccgattggtcctaagagagggtctaaggtcaagattctaaggagagaatcctattggttcaagaacgttggatcagttgttgccgttgatcaggaccctaagactcgatacccggttgtggtccggttcgcaaaagtcaattacgccaacatatcgaccaacaactatgcattggatgaggtcgaagaagttgcagcttaaatgggagaattcaaaaactctgtgtattctataccggtttatccgtttgtaacttgacccaaaccgtatgtaccgcaaaagtttaccaattatttctcctcatctgaat

SEQ ID NO: 85807 - protein, 165 aa, Arabidopsis thaliana; identical to SEQ ID NO: 43772
  peptide (1)..(165): Ceres Seq. ID no. 12683911

SEQ ID NO: 85808 - protein, 143 aa, Arabidopsis thaliana; identical to SEQ ID NO: 43773
  peptide (1)..(143): Ceres Seq. ID no. 12683912

SEQ ID NO: 85809 - protein, 141 aa, Arabidopsis thaliana; identical to SEQ ID NO: 43774
  peptide (1)..(141): Ceres Seq. ID no. 12683913

SEQ ID NO: 85810 - DNA, 1368 bp, Arabidopsis thaliana
  misc_feature (1)..(1368): Ceres Seq. ID no. 12683926
  misc_feature (1)..(1368): Ortholog of  Ceres SEQ ID NO 15170501 as cited in SEQ ID NO 52774
aaaaccctttcctctcttccttcttgtgtgagaccgagaaaaaaagatgactaagaacagtaaccacgacgagaatgagttcatcagctttgaaccaaatcagaacacgaagatacgctttgaagatgctgatgaagacgaagttgctgaagggtctggtgttgccggcgaggaaactccccaagatgagtccatgttcgacgccggagagagcgccgacaccgctgaagtaactgatgataccaccagtgccgattactacttcgattcttactctcactttggaatccatgaagagatgttgaaggatgttgtgagaacaaagacttatcagaatgttatttatcagaacaagtttcttatcaaggacaaaattgttcttgatgttggagctggaaccggaattttgtctctgttctgtgccaaggcaggagctgctcatgtctacgctgttgagtgttctcaaatggctgacatggcaaaggagattgttaaagctaatggattttctgatgttattacggtattgaaagggaagattgaggagatagagcttcccactcctaaagtggatgtgattatatcggaatggatgggttactttttgttgtttgaaaatatgttggacagtgtcttgtatgctcgtgataaatggcttgttgaaggtggagttgtgctaccagacaaagcctctctgcatcttacagccatagaggattcagagtacaaagaagacaaaatcgaattttggaacagtgtgtatggttttgacatgtcatgtattaagaaaaaagctatgatggaaccacttgttgacacagtcgaccaaaaccaaatcgtcaccgatagtaggcttctaaagacgatggatatctcaaagatgtcctctggtgatgcttccttcacagctccctttaagcttgttgcacaacgcaatgactacatccacgcccttgtagcctactttgatgtatcgtttaccatgtgccacaagctgctgggcttctcaacaggaccgaaatcccgagctacacactggaaacaaacagttctgtatctagaagatgtgttaaccatatgtgagggtgagacaatcactggaactatgtccgtttctcctaacaagaagaatcctcgagacattgacataaagctaagctattctttgaatggccagcattgcaagatctcaaggacccaacactacaaaatgcgttaaagttctctcataagaagcagaacttcagaagatacaattctcatattgtgatttagtttttatatttctttttctccagattacaactttccatttgcttcacattgcaacatttgcttcatctcaagttaaattaatgattttgctct

SEQ ID NO: 85811 - protein, 390 aa, Arabidopsis thaliana; identical to SEQ ID NO: 80602
  peptide (1)..(390): Ceres Seq. ID no. 12683927

SEQ ID NO: 85812 - protein, 341 aa, Arabidopsis thaliana; identical to SEQ ID NO: 80603
  peptide (1)..(341): Ceres Seq. ID no. 12683928

SEQ ID NO: 85813 - protein, 306 aa, Arabidopsis thaliana; identical to SEQ ID NO: 80604
  peptide (1)..(306): Ceres Seq. ID no. 12683929

SEQ ID NO: 85814 - DNA, 1296 bp, Arabidopsis thaliana
  misc_feature (1)..(1296): Ceres Seq. ID no. 12683938
  misc_feature (1)..(1296): Ortholog of  Ceres SEQ ID NO 14316532 as cited in SEQ ID NO 57093
  misc_feature (1)..(1296): Ortholog of  Ceres SEQ ID NO 14301482 as cited in SEQ ID NO 63355
agcgaagaacgaagtagacgaagacgatgaagaaaggtggattcagcaataatctcaagctcgcaattcctgttgctggcgagcaatccatcaccaaattcctgactcaaagcggtacgtttaaggatggagatctacgtgttaacaaggatggagttcgaatcatttctcaattggagcctgaagtcctgtctccaattaagccagctgatgatcagctgagcttgtcggatttggatatggttaaagtcattggcaaaggaagtagtggtgttgttcagctggttcaacacaaatggactggccaatttttcgccttgaaggtcattcaactaaatattgatgaagcaattcgcaaggcaattgcacaagagctcaaaataaatcaatcgtcacagtgtccaaatcttgttacctcgtaccagtcattttatgacaatggcgcaatctcactaatcttggagtacatggacggaggatctctagcagactttctcaagtcagttaaagccatccctgactcctatctttctgccatctttagacaagtgcttcaaggattaatctatcttcatcacgataggcatatcatccatcgtgacttgaaaccatccaatctgttgatcaaccacagaggagaagtcaaaataactgactttggtgtgagtaccgttatgacaaacaccgcaggtttagcaaacacatttgtggggacttacaattatatgtctccagagagaatcgttggaaacaagtacggaaataaaagtgatatatggagcttgggtttagtagtactcgaatgtgcaacaggaaagttcccttatgcacctccgaatcaagaggaaacatggaccagtgttttcgagttgatggaagccattgttgaccaaccgccacccgctcttccttcaggaaatttctcccctgagttatcttcattcatctccacatgtttgcagaaggatccaaacagtcgaagctctgcaaaggaactgatggaacatcctttcttgaacaaatacgactactcggggatcaatctcgcgtcctacttcacagatgcaggatcgccacttgcaacacttgggaacctgtctggtacgttctccgtgtaaactacaagggagacataatatcaccatctggttcctgttatcatctgaagatttcttgttttaccttccagtgataaaatgatctttataatacatatagatatattaaattgctgtattttaagattatagatatataaggtacatgagagtgtttatttaaaaaaattcacttgga

SEQ ID NO: 85815 - protein, 363 aa, Arabidopsis thaliana; identical to SEQ ID NO: 44141
  peptide (1)..(363): Ceres Seq. ID no. 12683939

SEQ ID NO: 85816 - protein, 292 aa, Arabidopsis thaliana; identical to SEQ ID NO: 44142
  peptide (1)..(292): Ceres Seq. ID no. 12683940

SEQ ID NO: 85817 - protein, 216 aa, Arabidopsis thaliana; identical to SEQ ID NO: 44143
  peptide (1)..(216): Ceres Seq. ID no. 12683941

SEQ ID NO: 85818 - DNA, 1469 bp, Arabidopsis thaliana
  misc_feature (1)..(1469): Ceres Seq. ID no. 12683960
  misc_feature (1)..(1469): Ortholog of  Ceres SEQ ID NO 15169053 as cited in SEQ ID NO 53926
gaagaaagcaaagaaatatcgaagaatttaaggaataaaaaataaaaacagaaagctggaggaagaaaaaataaaaattccttctttcctcctgaaggcaaaaaaggaagagaagagaagagaagagaaggaagcagaatctaattttggattataatcggagagagaatctattccgacgaatcttttcgggttgattttttggtctttaatttgaagggtttaggtgtggtttcgaagatgatggtagcgaatagtttcgatctatggcaaaaggatgtttttttctctgcagctgaggaggttcaagaatctgctgatataatggaatctgcgtataggttgtggtttaaagagaagagagacggtcgagtatccgtagaatcagacgagctctgcaaagaactccaagctgctttgagcactgctaaatggcagttggaagagtttgagagggcagtgagcttaagccatggaaattgtcgagatgacactaccttaactaggcataaacagtttgttaccgctattgaaaaccagatttatcaagtggaatctactctgctagagtcgttaagcgagaatgggaaacaacctttgcgttgggtggatcttaacaaagaagagcgtgatgatctcgccatgtttctatctggatcttctcagacgtcagagagtttaaacagtgatagcatcaacttgagagattcctcaacgagttctgtagctgagaatccacgtgggatcaatggcagaagagagggtagatgttatggcgacagtcctgattgtgtgatagacattgacgacataggaagtccggaaagtgcagataaaaaaggcggtacaagaagaacatggagttcaccaaatgtaccaaatatcagtgcgttgaggattaatgtccctgttaatgcaaaagaagaagagagggagaagttcctatcacatattgaagacactcctaaagagaaaggagctaaacctatgttttggctgcagagatgtcgtgattataaccagctctttgacagagtcaaggtttatcaaagacgatttcgcgttccattgagccgccctattaagctcattctttccttaacgctaatcttgattcttctattattcatcttgagaacttaaaaccgcggtttcagaaactctcaagaaacattgacaggttttttcacagattcttgcgtattgggttacacactcgttagatgctacatgattcaacatccttcgagggaaggaggagagattaaaagactttgtcaagattcaaatgaaggacaaagcctgatttattactctctcttaatcctcagggaacatataggaacctgtaaatttgtaagatcaatttgtaaaacttgaagctacgacgtttcgttaaactttagacgtgtacctaaaggaaaccaatgcgtgtttgtgctcaatgatatctccagtgtttgtttgtc

SEQ ID NO: 85819 - protein, 300 aa, Arabidopsis thaliana; identical to SEQ ID NO: 40352
  peptide (1)..(300): Ceres Seq. ID no. 12683961

SEQ ID NO: 85820 - protein, 299 aa, Arabidopsis thaliana; identical to SEQ ID NO: 40353
  peptide (1)..(299): Ceres Seq. ID no. 12683962

SEQ ID NO: 85821 - protein, 272 aa, Arabidopsis thaliana; identical to SEQ ID NO: 40354
  peptide (1)..(272): Ceres Seq. ID no. 12683963

SEQ ID NO: 85822 - DNA, 1367 bp, Arabidopsis thaliana
  misc_feature (1)..(1367): Ceres Seq. ID no. 12683987
  misc_feature (1)..(1367): Ortholog of  Ceres SEQ ID NO 13582619 as cited in SEQ ID NO 56520
  misc_feature (1)..(1367): Ortholog of  Ceres SEQ ID NO 13660872 as cited in SEQ ID NO 60830
  misc_feature (1)..(1367): Ortholog of  Ceres SEQ ID NO 12616221 as cited in SEQ ID NO 63291
aaataagcttatcattcttacaaaaatatttctgggtttctgatattgttcttgttctcttgaatctttattacttgaaaaacatataaagtgatggcggttgtggttgaagaaggtgtggtgttgaatcatggaggtgaagagcttgtggatttgccacctggtttcaggtttcatccaacagacgaagagatcataacatgttaccttaaggagaaggttttaaacagccgattcacggctgtggccatgggagaagctgatctcaacaagtgtgagccttgggatttgccaagagggcaaagatgggggagaaagagttctacttcttctgtcaaagggacaggaagtatccgactgggatgaggacgaaccgtgcgacggagtcaggatactggaaagccaccgggaaggataaggagatcttcaaaggcaaaggttgtctcgttgggatgaagaaaacacttgtgttttatagaggaagagctccaaaaggtgaaaagactaattgggtcatgcatgaatatcgtcttgaaggcaaatattcgtattacaatctcccaaaatctgcaagggacgaatgggtcgtgtgtagggtttttcacaagaacaatccttctaccacaacccaaccaatgacgagaatacccgttgaagatttcacaaggatggattctctagagaacattgatcatctcctagacttctcatctcttcctcctctcatagacccgagtttcatgagtcaaaccgaacaaccaaacttcaaacccatcaaccctccaacttacgatatctcatcaccaatccaaccccatcatttcaattcttaccaatcaatctttaaccaccaggtttttggttctgcttcgggctctacgtacaacaacaacaacgagatgatcaagatggagcaatcacttgttagtgtatctcaagaaacatgcctaagctcagatgtgaacgcgaacatgactacaaccacggaggtatcttcgggtcctgtaatgaaacaagaaatggggatgatgggaatggtgaatggtagcaagtcgtatgaagatctatgtgacttgaggggggacttgtgggacttctaattaatcatttgactgtggtgaaagagtatatttgttgggatttaaatcatgttagttaatacatatacatataggatttactagaggcttaatcctagttaactattttcacttcattgatattatttaattagttgattgtttaattagtttatactttatagtgtggttaaaaaagaaaagaaaggattgtgataatttgggattttagtgcataagttatatctcaatgtaaactgtatttgtatacatataattagtcttctc

SEQ ID NO: 85823 - protein, 264 aa, Arabidopsis thaliana; identical to SEQ ID NO: 42737
  peptide (1)..(264): Ceres Seq. ID no. 12683988

SEQ ID NO: 85824 - protein, 245 aa, Arabidopsis thaliana
  peptide (1)..(245): Ceres Seq. ID no. 12683989
MRTNRATESGYWKATGKDKEIFKGKGCLVGMKKTLVFYRGRAPKGEKTNWVMHEYRLEGKYSYYNLPKSARDEWVVCRVFHKNNPSTTTQPMTRIPVEDFTRMDSLENIDHLLDFSSLPPLIDPSFMSQTEQPNFKPINPPTYDISSPIQPHHFNSYQSIFNHQVFGSASGSTYNNNNEMIKMEQSLVSVSQETCLSSDVNANMTTTTEVSSGPVMKQEMGMMGMVNGSKSYEDLCDLRGDLWDF

SEQ ID NO: 85825 - protein, 215 aa, Arabidopsis thaliana
  peptide (1)..(215): Ceres Seq. ID no. 12683990
MKKTLVFYRGRAPKGEKTNWVMHEYRLEGKYSYYNLPKSARDEWVVCRVFHKNNPSTTTQPMTRIPVEDFTRMDSLENIDHLLDFSSLPPLIDPSFMSQTEQPNFKPINPPTYDISSPIQPHHFNSYQSIFNHQVFGSASGSTYNNNNEMIKMEQSLVSVSQETCLSSDVNANMTTTTEVSSGPVMKQEMGMMGMVNGSKSYEDLCDLRGDLWDF

SEQ ID NO: 85826 - DNA, 1398 bp, Arabidopsis thaliana
  misc_feature (1)..(1398): Ceres Seq. ID no. 12684066
  misc_feature (1)..(1398): Ortholog of  Ceres SEQ ID NO 13656177 as cited in SEQ ID NO 64997
atgagtcgctacgatagccggaccggcgattccacctcgtaccgtgaccgtcgaagtgactcagggtttggtgggacttcatcatatggaagctcaggtagtcatacatctagcaaaaaggataacgatggcaatgaatctccaaggaagctagatttagatggtttgactccttttgagaagaatttttatgtcgagtctcccgctgtggcggctatgacagacacagaagtagaggaatatcgaaagctaagggaaattactgttgaaggcaaagatattccaaaacctgtcaagagttttcgtgatgttggctttcctgattatgttttggaagaggttaagaaggctggttttactgaacctacgcctatacaatctcaggggtggccaatggctatgaagggacgtgatcttatcggcattgctgaaactggttctggaaagactctttcttacttactacctgctattgtccatgttaatgcccaaccaatgttagctcatggtgacggcccaatcgtcttggttcttgctcccactcgtgaactggctgtgcagatacagcaagaggcatctaaatttggttcatcctcaaaaattaagaccacttgcatttatggtggggttccaaaagggcctcaagtgcgtgatctccagaaaggtgtggagatcgttatagctactcctgggaggttaatagacatgatggagtcgaacaacacaaacctacgaagggttacttatcttgttttggatgaggctgatcgaatgcttgatatggggtttgaccctcagatccggaaaattgtttcacatattcggccagaccgtcaaactttgtactggagtgccacttggcctaaggaggtggaacaactatcgaagaagttggtgaaactgcttgaggacataatggatggaagcagaattcttgtcttcctcgatacaaaaaagggctgtgaccaaatcactcgtcagcttcgcatggatggttggcctgctttgtcaatacatggagataaaagtcaagcggaaagagattgggttctctcggagtttagatcaggcaaaagccctataatgactgctacagacgttgcagctcgtggattagacgtgaaagatgtgaagtatgtgataaactatgacttccctggatcactggaggattatgttcacaggattggacgaacaggtagagccggggctaaaggaacagcttacactttcttcacagttgcaaatgcgagattcgccaaggaacttaccaacatactacaagaagctggacagaaagtgagtcccgaattggcttcaatgggtcgcagtaccgctcctcctcctccagggcttggaggattcagagaccgtgggagcagaagagggtggagctga

SEQ ID NO: 85827 - protein, 465 aa, Arabidopsis thaliana
  peptide (1)..(465): Ceres Seq. ID no. 12684067
MSRYDSRTGDSTSYRDRRSDSGFGGTSSYGSSGSHTSSKKDNDGNESPRKLDLDGLTPFEKNFYVESPAVAAMTDTEVEEYRKLREITVEGKDIPKPVKSFRDVGFPDYVLEEVKKAGFTEPTPIQSQGWPMAMKGRDLIGIAETGSGKTLSYLLPAIVHVNAQPMLAHGDGPIVLVLAPTRELAVQIQQEASKFGSSSKIKTTCIYGGVPKGPQVRDLQKGVEIVIATPGRLIDMMESNNTNLRRVTYLVLDEADRMLDMGFDPQIRKIVSHIRPDRQTLYWSATWPKEVEQLSKKLVKLLEDIMDGSRILVFLDTKKGCDQITRQLRMDGWPALSIHGDKSQAERDWVLSEFRSGKSPIMTATDVAARGLDVKDVKYVINYDFPGSLEDYVHRIGRTGRAGAKGTAYTFFTVANARFAKELTNILQEAGQKVSPELASMGRSTAPPPPGLGGFRDRGSRRGWS

SEQ ID NO: 85828 - protein, 393 aa, Arabidopsis thaliana
  peptide (1)..(393): Ceres Seq. ID no. 12684068
MTDTEVEEYRKLREITVEGKDIPKPVKSFRDVGFPDYVLEEVKKAGFTEPTPIQSQGWPMAMKGRDLIGIAETGSGKTLSYLLPAIVHVNAQPMLAHGDGPIVLVLAPTRELAVQIQQEASKFGSSSKIKTTCIYGGVPKGPQVRDLQKGVEIVIATPGRLIDMMESNNTNLRRVTYLVLDEADRMLDMGFDPQIRKIVSHIRPDRQTLYWSATWPKEVEQLSKKLVKLLEDIMDGSRILVFLDTKKGCDQITRQLRMDGWPALSIHGDKSQAERDWVLSEFRSGKSPIMTATDVAARGLDVKDVKYVINYDFPGSLEDYVHRIGRTGRAGAKGTAYTFFTVANARFAKELTNILQEAGQKVSPELASMGRSTAPPPPGLGGFRDRGSRRGWS

SEQ ID NO: 85829 - protein, 334 aa, Arabidopsis thaliana
  peptide (1)..(334): Ceres Seq. ID no. 12684069
MAMKGRDLIGIAETGSGKTLSYLLPAIVHVNAQPMLAHGDGPIVLVLAPTRELAVQIQQEASKFGSSSKIKTTCIYGGVPKGPQVRDLQKGVEIVIATPGRLIDMMESNNTNLRRVTYLVLDEADRMLDMGFDPQIRKIVSHIRPDRQTLYWSATWPKEVEQLSKKLVKLLEDIMDGSRILVFLDTKKGCDQITRQLRMDGWPALSIHGDKSQAERDWVLSEFRSGKSPIMTATDVAARGLDVKDVKYVINYDFPGSLEDYVHRIGRTGRAGAKGTAYTFFTVANARFAKELTNILQEAGQKVSPELASMGRSTAPPPPGLGGFRDRGSRRGWS

SEQ ID NO: 85830 - DNA, 1149 bp, Arabidopsis thaliana
  misc_feature (1)..(1149): Ceres Seq. ID no. 12684120
  misc_feature (1)..(1149): Ortholog of  Ceres SEQ ID NO 13597574 as cited in SEQ ID NO 64677
  misc_feature (1)..(1149): Ortholog of  Ceres SEQ ID NO 12617417 as cited in SEQ ID NO 65089
  misc_feature (1)..(1149): Ortholog of  Ceres SEQ ID NO 13597678 as cited in SEQ ID NO 65375
  misc_feature (1)..(1149): Ortholog of  Ceres SEQ ID NO 12779098 as cited in SEQ ID NO 67698
atgccgcagccgcgaccggaaactatacgtggcagtttaaaacctcacatcatggtgtttccatatccagcacaaggccacttgcttcctcttctcgacttaacccatcaactctgtcttcgtggcctcacagtctccatcatcgtcactcctaaaaaccttccttacctctctcctcttctctccgctcatccatccgctgtttccgtcgtcactttacctttccctcaccatcctttaatcccttccggggttgaaaacgttaaagatctaggtggttacggaaatcccttgatcatggcttctcttcgtcagcttcgagagcctatcgtcaactggttaagttctcatccaaatccaccggtcgctctcatttctgatttcttccttggatggaccaaagatcttgagcatctcccgtctttaatccctcagtctccattatcgcaagatcttgaaagtgttaaagacagtaccatgaatttttcgagttatggttgtattttcaatacttgtgagtgtctggaagaggattacatggagtatgtgaagcagaaagtgagtgagaaccgcgttttcggtgttggtccgctttcttcagtcgggttaagtaaggaagattccgtatccaatgtagacgcaaaggcattgttgagttggctagatggatgtccagatgattcagtgctctacatctgcttcggaagtcaaaaggtgttaaccaaagagcagtgtgatgatctggctcttggtctcgagaagagtatgacccgattcgtatgggtggttaagaaagacccgataccggatgggtttgaggatcgggtcgcaggtcgaggaatgattgtgagagggtgggctcctcaagtggctatgttgagtcatgtggcggttggcgggttcttaatccattgtggatggaactcggtgctggaagcgatggctagcggaacaatgatcttggcatggccaatggaagcagaccagtttgtagatgcgaggttggtagtggagcatatgggtgtggcggttagtgtatgtgaagggggtaagactgtgcctgacccgtatgagatgggtcggattatcgctgacacaatgggtgagagtggaggcgaggcgcgtgctcgggctaaggagatgggatag

SEQ ID NO: 85831 - protein, 382 aa, Arabidopsis thaliana
  peptide (1)..(382): Ceres Seq. ID no. 12684121
MPQPRPETIRGSLKPHIMVFPYPAQGHLLPLLDLTHQLCLRGLTVSIIVTPKNLPYLSPLLSAHPSAVSVVTLPFPHHPLIPSGVENVKDLGGYGNPLIMASLRQLREPIVNWLSSHPNPPVALISDFFLGWTKDLEHLPSLIPQSPLSQDLESVKDSTMNFSSYGCIFNTCECLEEDYMEYVKQKVSENRVFGVGPLSSVGLSKEDSVSNVDAKALLSWLDGCPDDSVLYICFGSQKVLTKEQCDDLALGLEKSMTRFVWVVKKDPIPDGFEDRVAGRGMIVRGWAPQVAMLSHVAVGGFLIHCGWNSVLEAMASGTMILAWPMEADQFVDARLVVEHMGVAVSVCEGGKTVPDPYEMGRIIADTMGESGGEARARAKEMG

SEQ ID NO: 85832 - protein, 365 aa, Arabidopsis thaliana
  peptide (1)..(365): Ceres Seq. ID no. 12684122
MVFPYPAQGHLLPLLDLTHQLCLRGLTVSIIVTPKNLPYLSPLLSAHPSAVSVVTLPFPHHPLIPSGVENVKDLGGYGNPLIMASLRQLREPIVNWLSSHPNPPVALISDFFLGWTKDLEHLPSLIPQSPLSQDLESVKDSTMNFSSYGCIFNTCECLEEDYMEYVKQKVSENRVFGVGPLSSVGLSKEDSVSNVDAKALLSWLDGCPDDSVLYICFGSQKVLTKEQCDDLALGLEKSMTRFVWVVKKDPIPDGFEDRVAGRGMIVRGWAPQVAMLSHVAVGGFLIHCGWNSVLEAMASGTMILAWPMEADQFVDARLVVEHMGVAVSVCEGGKTVPDPYEMGRIIADTMGESGGEARARAKEMG

SEQ ID NO: 85833 - protein, 283 aa, Arabidopsis thaliana
  peptide (1)..(283): Ceres Seq. ID no. 12684123
MASLRQLREPIVNWLSSHPNPPVALISDFFLGWTKDLEHLPSLIPQSPLSQDLESVKDSTMNFSSYGCIFNTCECLEEDYMEYVKQKVSENRVFGVGPLSSVGLSKEDSVSNVDAKALLSWLDGCPDDSVLYICFGSQKVLTKEQCDDLALGLEKSMTRFVWVVKKDPIPDGFEDRVAGRGMIVRGWAPQVAMLSHVAVGGFLIHCGWNSVLEAMASGTMILAWPMEADQFVDARLVVEHMGVAVSVCEGGKTVPDPYEMGRIIADTMGESGGEARARAKEMG

SEQ ID NO: 85834 - DNA, 1287 bp, Arabidopsis thaliana
  misc_feature (1)..(1287): Ceres Seq. ID no. 12684146
  misc_feature (1)..(1287): Ortholog of  Ceres SEQ ID NO 13600220 as cited in SEQ ID NO 0
atggcaattccaaaagctcactactctttagcagttcttgtccttctctttgtcgtcgtttcgagtagccaaaaaattgaaggtgcagcacatagagcacttaatggatgggactatttcacgcatagatatccagaaaaagtaccggatcgtagttcagcagatcttgcttgtgattcgtatgatctttataaggatgatgtcaaactgctaaaaagaatgaatgttcaagcataccgtctctcgatagcatggtcaagggtcttaccaaagggaagactgactgggggagtggacgagaatgggataacatactacaacaatctcattaacgagttgaaagcaaatggcatagaaccatatgttactatatttcattgggatgttccccagactttagaagacgaatatggaggcttcttaagcacacgtatagtggaggactacacaaactacgctgagcttctattccaaagattcggagacagggtcaaattttggatcactttaaatcagcctctctctcttgcactcaaaggctatggaaatggatcttatccaccaggacggtgcaccggctgtgaacttggaggagattctggagttgaaccttatacagttgcacataaccaacttctagctcatgcaaaaactgtctctttatacagaaaaagatatcagaaatttcaaggtggtaagataggaacaaccttgatcgggagatggttcgtcccgctaaatgaatttagtgaactcgacaaggctgctgcaaaacgagcattcgacttttttgttggatggttcttggatccattggtgtacggaaaatatccaacaataatgagagagatggtaggagatagattgccagaattcacacctgaggaatcagctttagttaaaggatcacttgattttctagggttgaactattacgtttcacaatatgcaactgacgcacctcctccgacacaacctaatgcaataacggatgcacgagttactcttggattttaccgcaatggaagtcctattggtgttgcttctagcttcgtctactatcctccaggattccgtcagattctaaactacatcaaagacaactacaaaaatccacttacctacatcaccgaaaacggatattttgcatggtcattgatggacaattacgaattcggaaatggttacaccctccggtttggtatgaattgggtcaacttcactaatcctgctgatcgtaaagagaaagcttctggaaaatggttctctaagttcctcgcaaaataa

SEQ ID NO: 85835 - protein, 428 aa, Arabidopsis thaliana
  peptide (1)..(428): Ceres Seq. ID no. 12684147
MAIPKAHYSLAVLVLLFVVVSSSQKIEGAAHRALNGWDYFTHRYPEKVPDRSSADLACDSYDLYKDDVKLLKRMNVQAYRLSIAWSRVLPKGRLTGGVDENGITYYNNLINELKANGIEPYVTIFHWDVPQTLEDEYGGFLSTRIVEDYTNYAELLFQRFGDRVKFWITLNQPLSLALKGYGNGSYPPGRCTGCELGGDSGVEPYTVAHNQLLAHAKTVSLYRKRYQKFQGGKIGTTLIGRWFVPLNEFSELDKAAAKRAFDFFVGWFLDPLVYGKYPTIMREMVGDRLPEFTPEESALVKGSLDFLGLNYYVSQYATDAPPPTQPNAITDARVTLGFYRNGSPIGVASSFVYYPPGFRQILNYIKDNYKNPLTYITENGYFAWSLMDNYEFGNGYTLRFGMNWVNFTNPADRKEKASGKWFSKFLAK

SEQ ID NO: 85836 - protein, 355 aa, Arabidopsis thaliana
  peptide (1)..(355): Ceres Seq. ID no. 12684148
MNVQAYRLSIAWSRVLPKGRLTGGVDENGITYYNNLINELKANGIEPYVTIFHWDVPQTLEDEYGGFLSTRIVEDYTNYAELLFQRFGDRVKFWITLNQPLSLALKGYGNGSYPPGRCTGCELGGDSGVEPYTVAHNQLLAHAKTVSLYRKRYQKFQGGKIGTTLIGRWFVPLNEFSELDKAAAKRAFDFFVGWFLDPLVYGKYPTIMREMVGDRLPEFTPEESALVKGSLDFLGLNYYVSQYATDAPPPTQPNAITDARVTLGFYRNGSPIGVASSFVYYPPGFRQILNYIKDNYKNPLTYITENGYFAWSLMDNYEFGNGYTLRFGMNWVNFTNPADRKEKASGKWFSKFLAK

SEQ ID NO: 85837 - DNA, 3309 bp, Arabidopsis thaliana
  misc_feature (1)..(3309): Ceres Seq. ID no. 12684160
  misc_feature (1)..(3309): Ortholog of  Ceres SEQ ID NO 13648101 as cited in SEQ ID NO 169
  misc_feature (1)..(3309): Ortholog of  Ceres SEQ ID NO 13600617 as cited in SEQ ID NO 0
atggattcaagtaaagagagtagcttgattgaaacccattttctaaaaccctatgtaacctccattgatggtgctgtagcagagcttcctcgtcaccgtctctctgtttcttcatcagacctaaatgagtcgttttctaggatttctttcaatgggttttggtctgcacaacccaatttcaaatcatgggctaaaaaaatggaagctttgcacgaacccatttggagaaaagctgggatttttgaggcaataaaggcatcgatgtacaaaatccgtaaaaatcagtctttgcttctagctcttgttgagaaatggtgtcctgaaaccaaatctttcctcttcccttggggtgaagcaacgataacgcttgaggatgtgcttgtgcttttagggttttctgttcagggttctcctgtttttgcccctttagaaagctcagagatgagagattccgtagagaaactggagaaagctagattggagaatagaggccaggatgggctagtgagacaaaacttatgggtttcgagcttcttgggtagaggtgatcaaatggagcatgaagcttttcttgcattttggctttcgcagttcgtttttccggatatgtgtcgtcgttctatttcgacaaaagttctccctatggctgttcgtttagctagaggcgaaaggattgcttttgctcctgctgttctagctagactatacagagatttgggtcaaattcaagcgtctgctagagaaaagtccactccaaatgtcactctgaaatcactgtttaagttagtccaactctgggcatgggagagattcaagagtaccagtccaaaagctagagtgataccaaaaggtgaacctaggatatctcggtggcactcacaaacatctaagaatgtgagattgaatcttgttgattttgattggcgtccttacactaaacctttacagatttggaaccctcctcggttttaccctgaagaagctatgtggatgactgttgatgacaatcttgatgatggattcgtttcctttgctcgatgtatgagagtttctcagcttgttggggttggtattgtggaggattactatccaaaccgagtggcaatgcagttcgggctggctcaagatcttcctggtttggttactgatcatagcagcttcacagaaaaagaagcatgggatggttacaataagtctcttgatggtttaatgctttacataccttctcgtgtcgctacgacttctgttactgaaagatatcgtgactggtggttgaaatctatttcaaagttttttctggattcttcagaatcaactgaaacgtttgatgcaagtaacacaattgatcattatgataataatgatgaggatgatgagctactgcctttgggtcaagtgcttcagaattttggagagagctttcttaagaaactcgaaagatgtagggcgcgtaggctagctaaaaatcatcgattcaagataaataaagacaagattggtgatggtggtgcatcagcttcaacagaattaccacttagtcagttgtttaaaaaggaggtgatgaagagaacaagtgagcatttgaaaaacaagggacggaagcgagctcgtgaggatgatgtaagttctatggatcacaaagatgatgacgttaccatcgctcagatgatcaaatctagaaggaatgatgaatgtggaagcaaaggaaagaagagtagtatggttcaaagaccatctaacgaaaacaactcttcagatcctcttgttgattctaatggaggtataattgacatttctgtgtcaccatcagagacaaggcaaacgtgtgatgatgagcttcatgtagatagaagcaagaaagaagagttggtccatgaagatgaagaaaagcaaagaagcaatgagaatttgtgcagtgaagctgagaaagaagaagatattgatgaaagattgaaacagagaaagcttgctatagaggagatagcattgaagctggagacacgtgttatggaggttgagaagaggttatgtcaaggtagaagagacagaacaaagatagatatggtaaggaagcagaagtacgggaaggtagtgttggtttcttgcatcgcgcttctagcaaccggactcattgccgactttctctgggctacttctcatcgattctcctccgccgcaatctccgccggattatctctaccttcttcacttaccaccgtaatcgttcctggccaggagaaagatacaaagaagaagaaggatagtgtgaaggaaaggaaactgtctaatacgtttcaagatttgcctgctcctgaattgaaatgggagaagatggcagcttcacctgtacctcgtctagacggagctgcaattcagattagggatcttctttatgtatttgctggatatggaaccattgatcttgtgcattcacatgtcgatatctacaatttcactgataactcgtggggaggaagattcaatatgccaaaagatatggcgcattctcatttagggatggtaacggatgggcgatacatttatattgttactggtcagtttggtccacaatgcagaggtcctacagctaaaacatttgtgcttgatactgatacaaatacatggaaggactttgttcctttaccagttcctaggtatgcaccagctactcagctttggagaggaagacttcatgtgatgggtggaagcaaagagaatcgatttacaccaggacttgaacattggagcatcgcagtgaaagatggcaaatctttggaaaatgagtggagaagtgaaatcccgatccctcgtggaggacctcacagggcatgtgtagtagttgatgaccgactatttgtaattggtggtcaagaaggtgatttcatggctaaacctggatctccaatcttcaaatgctcacgccgtatggaggtggtattcagtgatgtctacatgttggatgaggaaatgaaatggaaagttatgccgccgatgccaaaaccggactcccatatcgaatttgcttggaaagtcgttaataactccattgtaatcgttggaggcacaacagagaaacatcctgaaaccaaaaagatggttctcgttggtgaaatcttccagttcaacttaaatacactgaaatggtatgtgattgggaaattaccataccgtgtgaagacaacgctggctgggtattgggatggacagttatacttcacctcaggacaaagagacaaaggtccagatgatcccgccccgaggaaggtcatggcagagatgtggagaaccaaattgatactcaacccatga

SEQ ID NO: 85838 - protein, 1102 aa, Arabidopsis thaliana
  peptide (1)..(1102): Ceres Seq. ID no. 12684161
MDSSKESSLIETHFLKPYVTSIDGAVAELPRHRLSVSSSDLNESFSRISFNGFWSAQPNFKSWAKKMEALHEPIWRKAGIFEAIKASMYKIRKNQSLLLALVEKWCPETKSFLFPWGEATITLEDVLVLLGFSVQGSPVFAPLESSEMRDSVEKLEKARLENRGQDGLVRQNLWVSSFLGRGDQMEHEAFLAFWLSQFVFPDMCRRSISTKVLPMAVRLARGERIAFAPAVLARLYRDLGQIQASAREKSTPNVTLKSLFKLVQLWAWERFKSTSPKARVIPKGEPRISRWHSQTSKNVRLNLVDFDWRPYTKPLQIWNPPRFYPEEAMWMTVDDNLDDGFVSFARCMRVSQLVGVGIVEDYYPNRVAMQFGLAQDLPGLVTDHSSFTEKEAWDGYNKSLDGLMLYIPSRVATTSVTERYRDWWLKSISKFFLDSSESTETFDASNTIDHYDNNDEDDELLPLGQVLQNFGESFLKKLERCRARRLAKNHRFKINKDKIGDGGASASTELPLSQLFKKEVMKRTSEHLKNKGRKRAREDDVSSMDHKDDDVTIAQMIKSRRNDECGSKGKKSSMVQRPSNENNSSDPLVDSNGGIIDISVSPSETRQTCDDELHVDRSKKEELVHEDEEKQRSNENLCSEAEKEEDIDERLKQRKLAIEEIALKLETRVMEVEKRLCQGRRDRTKIDMVRKQKYGKVVLVSCIALLATGLIADFLWATSHRFSSAAISAGLSLPSSLTTVIVPGQEKDTKKKKDSVKERKLSNTFQDLPAPELKWEKMAASPVPRLDGAAIQIRDLLYVFAGYGTIDLVHSHVDIYNFTDNSWGGRFNMPKDMAHSHLGMVTDGRYIYIVTGQFGPQCRGPTAKTFVLDTDTNTWKDFVPLPVPRYAPATQLWRGRLHVMGGSKENRFTPGLEHWSIAVKDGKSLENEWRSEIPIPRGGPHRACVVVDDRLFVIGGQEGDFMAKPGSPIFKCSRRMEVVFSDVYMLDEEMKWKVMPPMPKPDSHIEFAWKVVNNSIVIVGGTTEKHPETKKMVLVGEIFQFNLNTLKWYVIGKLPYRVKTTLAGYWDGQLYFTSGQRDKGPDDPAPRKVMAEMWRTKLILNP

SEQ ID NO: 85839 - protein, 1036 aa, Arabidopsis thaliana; identical to SEQ ID NO: 71539
  peptide (1)..(1036): Ceres Seq. ID no. 12684162

SEQ ID NO: 85840 - protein, 1015 aa, Arabidopsis thaliana; identical to SEQ ID NO: 71540
  peptide (1)..(1015): Ceres Seq. ID no. 12684163

SEQ ID NO: 85841 - DNA, 1343 bp, Arabidopsis thaliana
  misc_feature (1)..(1343): Ceres Seq. ID no. 12684172
  misc_feature (1)..(1343): Ortholog of  Ceres SEQ ID NO 14313955 as cited in SEQ ID NO 54407
gtctctttagcccccactggttcgtctctttcttcgatttctctttctatctggtttccattttcgtctcgttggtgttctggtgggtttggtttgtctctgttcttctatttgtggcgttatccatcggttcaattgtcatcttcatcgtttccgtcgtgttatttggtgtttctcgtttgggtctttcgaacatctttcattcttctctttttggtgttgctccccacgaacaggtagattgatgaaaagcaaccatggatgacctacatggaagcaatgctcgaatgcacattagagaagctcaagatccaatgcatgtgcaatttgaacatcatgctttgcatcacatccacaatggaagcggtatggttgatgaccaggctgatgatggcaatgctggtgggatgagtgagggtgtggaaacagacattccttctcaccctggaaatgtaactgacaatcgtggtgaagtggtcgaccgtggtagtgaacaaggagatcagttaacattgtcttttcagggccaagtctacgtttttgacagtgtcttgcctgagaaggttcaagctgtgcttctattattgggtggtcgtgaattacctcaggcagcccctcctggcctaggatcacctcatcagaacaacagagtatcgagtttacctggtactcctcaaaggtttagtattccgcagcgattagcttctttggtcagatttcgagagaaacggaaaggaaggaattttgataagaagattcggtatacagtccgcaaggaggtagctttgaggatgcaacgcaataaaggtcagttcacatctgccaagtcaaacaatgatgaagctgcatctgctggatctagctgggggtcgaatcaaacctgggccatagaaagtagtgaggctcagcatcaagagatctcatgtcggcactgtggaattggcgagaagtcaactccaatgatgcgacgtggacctgccgggccaagaacactttgcaatgcatgtggacttatgtgggcaaacaagggtgcttttagggacttatccaaagcctctcctcaaacagcccagaatcttcctttaaataagaatgaagatgcaaatcttgagactgatcatcaaataatgataacagtggccaatgacataagcaactcacagtgaggacatgttggctcttgccattacaagcaagagaaagatcccaacagagtttgaatcgcctcaggttctgtagctttatcattccctttgaaagaatctgactcgatttaggttatcaggatttgatctatgacaatgtaatctgagtgataatgatctgcaatgttttgcttcttc

SEQ ID NO: 85842 - protein, 302 aa, Arabidopsis thaliana; identical to SEQ ID NO: 41929
  peptide (1)..(302): Ceres Seq. ID no. 12684173

SEQ ID NO: 85843 - protein, 292 aa, Arabidopsis thaliana; identical to SEQ ID NO: 41930
  peptide (1)..(292): Ceres Seq. ID no. 12684174

SEQ ID NO: 85844 - protein, 283 aa, Arabidopsis thaliana; identical to SEQ ID NO: 41931
  peptide (1)..(283): Ceres Seq. ID no. 12684175

SEQ ID NO: 85845 - DNA, 2814 bp, Arabidopsis thaliana
  misc_feature (1)..(2814): Ceres Seq. ID no. 12684196
  misc_feature (1)..(2814): Ortholog of  Ceres SEQ ID NO 13654989 as cited in SEQ ID NO 63117
  misc_feature (1)..(2814): Ortholog of  Ceres SEQ ID NO 13584744 as cited in SEQ ID NO 69137
atgacatcgaaggcgaaggcgcttacgttcatttgttgtgtggctcttctcaatcttgccattgcccaggatcaatcagggttcattagcatagattgcgggttacaaccagaaaattccagctacacggaaacatcgaccgatattaagtatgtttcggattcaagttatacggatacagggacaagctatttcgttgcgcctgaaaatagacaaaatatgaagcagagcatgtggtccgtcagaagttttccagagggaatcagaaactgttacactattgctgttaatagcagcaccaagtatctgatccgggcggattttatgtacggtaactacgattcgagaaacgagataccgggtttcgatcttcacttaggtccaaacaaatgggacactgttgaattggtgtctcctctgcaaacagtgtccaaggagatcatatattatgtgttgacagatacaatacaagtgtgtttagtgaatacaggaaatggtacgccttttatatcggtattggaacttagacagttgccgaattcttcctatgcagctcaatctgaatcacttcaactatttcaacggttggattttggatcaacgacaaatctaacggttaggtatccaaacgatgtttttgatcggatttggtttcccgccacgccaaatgggacgaagccgttaagtgacccgtcgacttctctcacaagcaacagtaccggtaatttccgtcttccacaagttgtaatgagaactggaattgtaccagataatccaagaggatttgtagattttggatggattccagatgatccgtctcttgagtttttcttttacttgtatttcacggaacttcaacaacctaattccggaaccgtagaaacaagagaattcgtgatcttgttgaacgggaagtcttttggggaaccgttaagtcttaactacttccggaccttagccttgttcacttcaaaccctttgaaagcagagagcttccagttttctcttcgtcagactcagagttcatctcttccacctctgatcaatgctatggagacttactttgtaaacaaacttccacaatcatcaacggatccaaacgacctttctgctatgaggaatattaagtctgcatataaagtcaagagaaactgggaaggagacgtgtgtgtgcctcaagcttacacatgggaaggtctgaattgtagcttcaatggcacaaacatgccaagaaagttattagctctatgcaacagaaacttatcgtccgccggattgactggagagataacgtctgatatatcgcgtctttcgcagttgcaaattctggacttatcaaataacaatttgagtggacctgcagtaccagctttcttagcgcaactccaattcctgagagtcctacatttggcgaacaaccagcttagtggtcctataccctctagtctcatagagagactagactcgtttagtatcagtgggaatccaagtatttgttctgcaaatgcgtgtgaagaggtctcacaaaatagatcaaagaagaataaacttcccagctttgtcattcctttagttgcatcacttgcagggctgcttcttctttttatcatatctgcagctatatttttaatcctcatgagaaaaaagaaacaaggtcgaacgattaaccggacagttacagctacgagtaatggaccgtcattacagaggagagatactggttcaatgcgtccatctatgcagcgaagagaaaccggtttttcaacaagaccatctttacagagaatagagagcggaatgacagactacggagggaatgaaacagcggttgatgcgtttgatttggaaccatcaaataggaagtttacatatgcagagattgtgaacattacaaatgggtttgatagagatcaagggaaggtaggatttggaagaaactaccttggaaagttagatggtaaagaagtaactgtcaagcttgtttcttcactatcttctcaaggctacaaacaactcagagcagaggtcaaacatcttttcagaattcatcataaaaaccttataaccatgcttggttactgcaacgaaggcgataaaatggcggttatatacgagtacatggctaatggaaacttgaaacaacatatctcagagaacagtacaactgtttttagctgggaagataggctcggtatcgcggttgatgtcgcgcaaggacttgagtatttgcatactggttgcaagccgccgatcattcatagaaacgtcaagtgtacaaatgtattcttagatgaaagtttcaatgcgaagttaggcggttttggcctttcgagagcgtttgatgcagccgagggaagtcatttgaatacagctattgctgggactcctggatatgttgaccccgagtattacacatcaaacatgttaacagagaagagtgatgtgtacagtttcggtgtagttctattagagatcgttactgcgaaacccgctatcataaagaatgaggaaaggatgcatataagtcaatgggttgagtctttgctttcaagagaaaatattgtagagattcttgacccgagtctttgcggagactatgacccaaactcggcattcaagaccgtggaaatagccgtggcttgcgtttgtcgaaattcgggcgacagacctgggatgagtcaagtggtgacggctcttaaggagagtttagctgtagaagttgagaggaaaaagcatttgccggttggatcaacagattcacttgaagagcttgcacttggctttggatctaatccacctcctcgtttgagatga

SEQ ID NO: 85846 - protein, 937 aa, Arabidopsis thaliana
  peptide (1)..(937): Ceres Seq. ID no. 12684197
MTSKAKALTFICCVALLNLAIAQDQSGFISIDCGLQPENSSYTETSTDIKYVSDSSYTDTGTSYFVAPENRQNMKQSMWSVRSFPEGIRNCYTIAVNSSTKYLIRADFMYGNYDSRNEIPGFDLHLGPNKWDTVELVSPLQTVSKEIIYYVLTDTIQVCLVNTGNGTPFISVLELRQLPNSSYAAQSESLQLFQRLDFGSTTNLTVRYPNDVFDRIWFPATPNGTKPLSDPSTSLTSNSTGNFRLPQVVMRTGIVPDNPRGFVDFGWIPDDPSLEFFFYLYFTELQQPNSGTVETREFVILLNGKSFGEPLSLNYFRTLALFTSNPLKAESFQFSLRQTQSSSLPPLINAMETYFVNKLPQSSTDPNDLSAMRNIKSAYKVKRNWEGDVCVPQAYTWEGLNCSFNGTNMPRKLLALCNRNLSSAGLTGEITSDISRLSQLQILDLSNNNLSGPAVPAFLAQLQFLRVLHLANNQLSGPIPSSLIERLDSFSISGNPSICSANACEEVSQNRSKKNKLPSFVIPLVASLAGLLLLFIISAAIFLILMRKKKQGRTINRTVTATSNGPSLQRRDTGSMRPSMQRRETGFSTRPSLQRIESGMTDYGGNETAVDAFDLEPSNRKFTYAEIVNITNGFDRDQGKVGFGRNYLGKLDGKEVTVKLVSSLSSQGYKQLRAEVKHLFRIHHKNLITMLGYCNEGDKMAVIYEYMANGNLKQHISENSTTVFSWEDRLGIAVDVAQGLEYLHTGCKPPIIHRNVKCTNVFLDESFNAKLGGFGLSRAFDAAEGSHLNTAIAGTPGYVDPEYYTSNMLTEKSDVYSFGVVLLEIVTAKPAIIKNEERMHISQWVESLLSRENIVEILDPSLCGDYDPNSAFKTVEIAVACVCRNSGDRPGMSQVVTALKESLAVEVERKKHLPVGSTDSLEELALGFGSNPPPRLR

SEQ ID NO: 85847 - protein, 864 aa, Arabidopsis thaliana
  peptide (1)..(864): Ceres Seq. ID no. 12684198
MKQSMWSVRSFPEGIRNCYTIAVNSSTKYLIRADFMYGNYDSRNEIPGFDLHLGPNKWDTVELVSPLQTVSKEIIYYVLTDTIQVCLVNTGNGTPFISVLELRQLPNSSYAAQSESLQLFQRLDFGSTTNLTVRYPNDVFDRIWFPATPNGTKPLSDPSTSLTSNSTGNFRLPQVVMRTGIVPDNPRGFVDFGWIPDDPSLEFFFYLYFTELQQPNSGTVETREFVILLNGKSFGEPLSLNYFRTLALFTSNPLKAESFQFSLRQTQSSSLPPLINAMETYFVNKLPQSSTDPNDLSAMRNIKSAYKVKRNWEGDVCVPQAYTWEGLNCSFNGTNMPRKLLALCNRNLSSAGLTGEITSDISRLSQLQILDLSNNNLSGPAVPAFLAQLQFLRVLHLANNQLSGPIPSSLIERLDSFSISGNPSICSANACEEVSQNRSKKNKLPSFVIPLVASLAGLLLLFIISAAIFLILMRKKKQGRTINRTVTATSNGPSLQRRDTGSMRPSMQRRETGFSTRPSLQRIESGMTDYGGNETAVDAFDLEPSNRKFTYAEIVNITNGFDRDQGKVGFGRNYLGKLDGKEVTVKLVSSLSSQGYKQLRAEVKHLFRIHHKNLITMLGYCNEGDKMAVIYEYMANGNLKQHISENSTTVFSWEDRLGIAVDVAQGLEYLHTGCKPPIIHRNVKCTNVFLDESFNAKLGGFGLSRAFDAAEGSHLNTAIAGTPGYVDPEYYTSNMLTEKSDVYSFGVVLLEIVTAKPAIIKNEERMHISQWVESLLSRENIVEILDPSLCGDYDPNSAFKTVEIAVACVCRNSGDRPGMSQVVTALKESLAVEVERKKHLPVGSTDSLEELALGFGSNPPPRLR

SEQ ID NO: 85848 - protein, 860 aa, Arabidopsis thaliana
  peptide (1)..(860): Ceres Seq. ID no. 12684199
MWSVRSFPEGIRNCYTIAVNSSTKYLIRADFMYGNYDSRNEIPGFDLHLGPNKWDTVELVSPLQTVSKEIIYYVLTDTIQVCLVNTGNGTPFISVLELRQLPNSSYAAQSESLQLFQRLDFGSTTNLTVRYPNDVFDRIWFPATPNGTKPLSDPSTSLTSNSTGNFRLPQVVMRTGIVPDNPRGFVDFGWIPDDPSLEFFFYLYFTELQQPNSGTVETREFVILLNGKSFGEPLSLNYFRTLALFTSNPLKAESFQFSLRQTQSSSLPPLINAMETYFVNKLPQSSTDPNDLSAMRNIKSAYKVKRNWEGDVCVPQAYTWEGLNCSFNGTNMPRKLLALCNRNLSSAGLTGEITSDISRLSQLQILDLSNNNLSGPAVPAFLAQLQFLRVLHLANNQLSGPIPSSLIERLDSFSISGNPSICSANACEEVSQNRSKKNKLPSFVIPLVASLAGLLLLFIISAAIFLILMRKKKQGRTINRTVTATSNGPSLQRRDTGSMRPSMQRRETGFSTRPSLQRIESGMTDYGGNETAVDAFDLEPSNRKFTYAEIVNITNGFDRDQGKVGFGRNYLGKLDGKEVTVKLVSSLSSQGYKQLRAEVKHLFRIHHKNLITMLGYCNEGDKMAVIYEYMANGNLKQHISENSTTVFSWEDRLGIAVDVAQGLEYLHTGCKPPIIHRNVKCTNVFLDESFNAKLGGFGLSRAFDAAEGSHLNTAIAGTPGYVDPEYYTSNMLTEKSDVYSFGVVLLEIVTAKPAIIKNEERMHISQWVESLLSRENIVEILDPSLCGDYDPNSAFKTVEIAVACVCRNSGDRPGMSQVVTALKESLAVEVERKKHLPVGSTDSLEELALGFGSNPPPRLR

SEQ ID NO: 85849 - DNA, 2601 bp, Arabidopsis thaliana
  misc_feature (1)..(2601): Ceres Seq. ID no. 12684200
  misc_feature (1)..(2601): Ortholog of  Ceres SEQ ID NO 15226720 as cited in SEQ ID NO 58707
  misc_feature (1)..(2601): Ortholog of  Ceres SEQ ID NO 13584744 as cited in SEQ ID NO 69137
atggcgttttcttcttgttttctcttagttcttctgcaaatcttctcagctttacttctttgtcttgctcaagatcagtcaggattcatcagtttggattgcggttcgcctagagaaactagctttcgtgagaaaacaacaaacattacttacatttccgatgcgaatttcatcaataccggtgttggtggaagcatcaaacaaggataccggactcagtttcagcaacaaacatggaacctacggagttttccacaaggcataagaaactgctataccttaaacctaaccataggcgacgaatatctaatcagagccaatttccttcacggcggttatgacgacaaaccctcaacgcaattcgagctctacctcggacctaatctttggtctacagttacaaccacgaacgagaccgaagcatcaatctttgagatgattcatatcttgaccactgatcgtttacaaatctgtctggtcaagacaggaaacgcaacgccttttatctccgctttagagcttcgtaaactcatgaacacaacttacttgactcgacaaggttccttgtacggaatcgatgtgtttgatcgtgtctggactccgtataatttcggaaactggtcacagattagtaccaatcagtcagtgaatataaacaatgactatcaaccaccagagattgctatggtcacagcctctgttccaacagacccggacgcagctatgaacatttcgctagtcggggtggaacgtactgtgcagttctacgtttttatgcattttgcagagattcaagagctcaaatccaatgatacaagagagttcaacatcatgtacaataacaagcatatctatggaccttttagaccacttaatttcaccacgtcttccgtatttacacctaccgaagttgtcgccgatgcaaatgggcagtacatattttcgcttcaaagaacaggaaattcgactttacctcctctgctcaacgctatggagatttattcggttaacttgttgccgcaacaggaaactgatagaaaagaagttgatgcaatgatgaacatcaagtcggcttacggcgtgaacaagattgactgggaaggagatccttgcgtgccgctggattacaagtggtctggtgttaattgcacttatgttgacaatgagaccccaaagatcatttctttggatctgtctacaagtggcttgaccggagagatcttagaatttatatcagaccttaccagtttagaagttcttgacttgtctaacaattctttaactggttcagtcccagaaaatctatctggaaatgagctaaatggctctatccctgcaactctccttgataaagaacgacgaggatctattacgttaagtatcgaaggaaataccgggctttgttcatctacatcatgcgctaccacgaaaaagaagaagaaaaacactgttattgcacctgttgcagcatcacttgtttcagtattcctcattggagctggaatcgttactttccttatcctcaagaggaagaagagaaccaagcttggtttgaatcctaattcaggaactggtacaacaccgttacattcgaggtctcaccacggttttgaacctcccgttatagcgaaaaaccggaaattgacttacattgatgttgttaagatcacaaacaactttgagagggttcttggtaggggtggttttggtgtggtttattacggcgtcttgaataatgaaccagttgcggtaaagatgctcactgagtccactgcacttggttacaaacagtttaaagccgaggttgagttgcttcttagagttcatcacaaagatctcacatgtcttgttggatattgtgaagaaggagataaaatgtctctaatctatgagttcatggcgaatggtgacttgaaagagcacttatcagggaagcgtggaccgtcgatactaacttgggaaggaaggcttcgtatagcagcggaatcagcgcaaggattggaatatttgcacaatggatgcaaaccgcaaatagttcaccgcgacattaagactactaacatcttattaaacgagaaatttcaagctaagcttgcggatttcgggctttcacggtcttttccacttggaactgaaactcacgtctcaaccatagttgctggaactcccggatatcttgatcctgaatactacagaactaattggttgaccgagaaaagtgatgtgttcagctttggtgttgttctactagagctagtaacaaaccaacccgtgatagacatgaaaagagaaaaatcacacatagctgaatgggtaggtttgatgctatcaagaggagacattaacagcattgtagatcctaagcttcaaggagactttgatccaaacacgatatggaaagttgttgagaccgcaatgacttgcctgaatccgtcttcttcacggagaccgacaatgactcaagtcgtaatggatctgaaagaatgtctgaacatggagatggcaagaaacatgggaagccgtatgacggattcaactaatgattcttcaattgagctgtccatgaatttcacaacagagcttaatccaggagctagatga

SEQ ID NO: 85850 - protein, 866 aa, Arabidopsis thaliana
  peptide (1)..(866): Ceres Seq. ID no. 12684201
MAFSSCFLLVLLQIFSALLLCLAQDQSGFISLDCGSPRETSFREKTTNITYISDANFINTGVGGSIKQGYRTQFQQQTWNLRSFPQGIRNCYTLNLTIGDEYLIRANFLHGGYDDKPSTQFELYLGPNLWSTVTTTNETEASIFEMIHILTTDRLQICLVKTGNATPFISALELRKLMNTTYLTRQGSLYGIDVFDRVWTPYNFGNWSQISTNQSVNINNDYQPPEIAMVTASVPTDPDAAMNISLVGVERTVQFYVFMHFAEIQELKSNDTREFNIMYNNKHIYGPFRPLNFTTSSVFTPTEVVADANGQYIFSLQRTGNSTLPPLLNAMEIYSVNLLPQQETDRKEVDAMMNIKSAYGVNKIDWEGDPCVPLDYKWSGVNCTYVDNETPKIISLDLSTSGLTGEILEFISDLTSLEVLDLSNNSLTGSVPENLSGNELNGSIPATLLDKERRGSITLSIEGNTGLCSSTSCATTKKKKKNTVIAPVAASLVSVFLIGAGIVTFLILKRKKRTKLGLNPNSGTGTTPLHSRSHHGFEPPVIAKNRKLTYIDVVKITNNFERVLGRGGFGVVYYGVLNNEPVAVKMLTESTALGYKQFKAEVELLLRVHHKDLTCLVGYCEEGDKMSLIYEFMANGDLKEHLSGKRGPSILTWEGRLRIAAESAQGLEYLHNGCKPQIVHRDIKTTNILLNEKFQAKLADFGLSRSFPLGTETHVSTIVAGTPGYLDPEYYRTNWLTEKSDVFSFGVVLLELVTNQPVIDMKREKSHIAEWVGLMLSRGDINSIVDPKLQGDFDPNTIWKVVETAMTCLNPSSSRRPTMTQVVMDLKECLNMEMARNMGSRMTDSTNDSSIELSMNFTTELNPGAR

SEQ ID NO: 85851 - protein, 721 aa, Arabidopsis thaliana
  peptide (1)..(721): Ceres Seq. ID no. 12684202
MIHILTTDRLQICLVKTGNATPFISALELRKLMNTTYLTRQGSLYGIDVFDRVWTPYNFGNWSQISTNQSVNINNDYQPPEIAMVTASVPTDPDAAMNISLVGVERTVQFYVFMHFAEIQELKSNDTREFNIMYNNKHIYGPFRPLNFTTSSVFTPTEVVADANGQYIFSLQRTGNSTLPPLLNAMEIYSVNLLPQQETDRKEVDAMMNIKSAYGVNKIDWEGDPCVPLDYKWSGVNCTYVDNETPKIISLDLSTSGLTGEILEFISDLTSLEVLDLSNNSLTGSVPENLSGNELNGSIPATLLDKERRGSITLSIEGNTGLCSSTSCATTKKKKKNTVIAPVAASLVSVFLIGAGIVTFLILKRKKRTKLGLNPNSGTGTTPLHSRSHHGFEPPVIAKNRKLTYIDVVKITNNFERVLGRGGFGVVYYGVLNNEPVAVKMLTESTALGYKQFKAEVELLLRVHHKDLTCLVGYCEEGDKMSLIYEFMANGDLKEHLSGKRGPSILTWEGRLRIAAESAQGLEYLHNGCKPQIVHRDIKTTNILLNEKFQAKLADFGLSRSFPLGTETHVSTIVAGTPGYLDPEYYRTNWLTEKSDVFSFGVVLLELVTNQPVIDMKREKSHIAEWVGLMLSRGDINSIVDPKLQGDFDPNTIWKVVETAMTCLNPSSSRRPTMTQVVMDLKECLNMEMARNMGSRMTDSTNDSSIELSMNFTTELNPGAR

SEQ ID NO: 85852 - protein, 689 aa, Arabidopsis thaliana
  peptide (1)..(689): Ceres Seq. ID no. 12684203
MNTTYLTRQGSLYGIDVFDRVWTPYNFGNWSQISTNQSVNINNDYQPPEIAMVTASVPTDPDAAMNISLVGVERTVQFYVFMHFAEIQELKSNDTREFNIMYNNKHIYGPFRPLNFTTSSVFTPTEVVADANGQYIFSLQRTGNSTLPPLLNAMEIYSVNLLPQQETDRKEVDAMMNIKSAYGVNKIDWEGDPCVPLDYKWSGVNCTYVDNETPKIISLDLSTSGLTGEILEFISDLTSLEVLDLSNNSLTGSVPENLSGNELNGSIPATLLDKERRGSITLSIEGNTGLCSSTSCATTKKKKKNTVIAPVAASLVSVFLIGAGIVTFLILKRKKRTKLGLNPNSGTGTTPLHSRSHHGFEPPVIAKNRKLTYIDVVKITNNFERVLGRGGFGVVYYGVLNNEPVAVKMLTESTALGYKQFKAEVELLLRVHHKDLTCLVGYCEEGDKMSLIYEFMANGDLKEHLSGKRGPSILTWEGRLRIAAESAQGLEYLHNGCKPQIVHRDIKTTNILLNEKFQAKLADFGLSRSFPLGTETHVSTIVAGTPGYLDPEYYRTNWLTEKSDVFSFGVVLLELVTNQPVIDMKREKSHIAEWVGLMLSRGDINSIVDPKLQGDFDPNTIWKVVETAMTCLNPSSSRRPTMTQVVMDLKECLNMEMARNMGSRMTDSTNDSSIELSMNFTTELNPGAR

SEQ ID NO: 85853 - DNA, 2670 bp, Arabidopsis thaliana
  misc_feature (1)..(2670): Ceres Seq. ID no. 12684208
  misc_feature (1)..(2670): Ortholog of  Ceres SEQ ID NO 13584744 as cited in SEQ ID NO 69137
atgaagtctcttcatttttgtttgctctttatgatcgtatcttttacagtttcgagacccgtcgaagctcaagatcaagcaggattcatcagcttggattgtgggttggtgcctaaggaaaccacttatgtggaaacgtcgacgaatataacatacaaatcagacgcaaattacaccgacagcggattggtcgggaagatcaatgatgcacacaagacactggttcaacaaccgctttgggccttgagaagcttccctgagggtgaaagaaactgttacaacttcaaccttaccgtgaacagcacatatttgatcagaggaacttttttgtatgggaattatgacggcttgaatcaatccccaagctttgaccttcacattggtgctagcaaatggacctctgttaacatagtaggagtaacagataccgtaatgcccgagataatccatgtcttaacacaaaaacgtcttcaagtctgtcttgttaagacaggaaagacgacaccgttcatttcgtcattggaattgcgtccgttgataaataacatttacatcgcggaaagtggatcaatggtcttgcaaaatagagtatattttccatctgattcaacatctatcgtcaggtacgatgaggacatacacgaccgagtatggaatccagtttcagatgatgattcctcatcgataagcacggacctccaggtccaaacaaataacttatatgacgtgcctcaattcgtaatgaagactgctgctatccctaaagatgctagtgcgccatggagcttagtgtggactatagataacaccactgctctgtcatatgtatatatgcatttcgcagaaattcaggatttaaaagccaatgaccttagagaattcgacattacttacaatggtggcaagctttggttttcccagtttaggcctaacaaactcagcattctaacgatgttcagtcaagtccccttgacttcatcaaatggcgagtataatttcactttcgaaatgactagtaactcaactcttccaccccttatcaacgccctcgagatatatacaggtctagaaattctacagcttcagacagacaaggatgaagtttctgctatgatgaacatcaaaacgacttatgatttgagcaaaaagataagctggcagggagatccatgtgctcctcagctgtatcggtgggaaggtctagattgtagttatccggacaccgaggcatcacggattatatccttgaacttgaatgcgagcgggttgaacggtaccataacatctgacataaccaagctaacacagttgagcgagctagatttatcaaataatgatttatcaggagagattccggaattttttacggatatgaagttgttgaaactcataaacttaagcggaaatccgaagctcaatctcacagttccagactctcttcagcaaagggtaaacaacaaatctttaacactaattttgggtgaaaaggttaaaatgaatcccacagccaaaaaagagagtaaaaaggttcccatagttcctatcgcagcatcagtggctggcgtgtttgctctgatagttatattggccatctttttcattgttaaaggaaaaaaagggaaaagtgctgaaggaccacccttatcagtcactagtggtacagctaaaagtgagacaagatcatccaatccatcaatcatgagaaaagatcgcaagatcacatatcctcaggtattgaagatgactaataacttcgagagagttcttggtaaaggagggtttggaacagtatatcatggaaacatggaagatgctcaagtagctgtgaaaatgctctcgcactcatcggctcaaggttataaagagttcaaagcagaggttgaacttcttttaagagttcaccacagacatttggtgggacttgtgggttactgtgatgatggagataacttggctctgatttatgaatatatggcaaatggagacctgagggagaatatgttaggaaaacgtggaggcaatgtccttacctgggaaaacaggatgcaaatagctgtagaggctgcacaaggactggagtatctgcacaatggatgtacgcctccaatggtccatagagatgttaaaactactaacatcttattgaatgcacagtgtggagcgaaactagccgactttgggctctctagatcttttccaatcgatggtgaatgtcatgtctcaacagtcgttgcgggtacacctgggtacctagaccctgagtattacagaacaaactggctaagcgagaagagtgacgtgtacagcttcggtgtagtgctattagagatagtcacaaaccagcctgttataaatcaaacaagagagagacctcacatcaatgaatgggttggcttcatgctcagtaaaggagacatcaagagcatcgtcgacccaaaactgatgggggactatgacacaaacggtgcatggaagattgtggagctgggtcttgcctgtgtgaacccgtcttcgaacctaagaccaacaatggcacacgttgtgattgagctaaacgagtgtgtggcctttgaaaatgcaaggcgacaaggtagtgaagagatgtacacaagaagttctactaactttagtcacacgtctgcttccgaattttcccccggggcaagataa

SEQ ID NO: 85854 - protein, 889 aa, Arabidopsis thaliana
  peptide (1)..(889): Ceres Seq. ID no. 12684209
MKSLHFCLLFMIVSFTVSRPVEAQDQAGFISLDCGLVPKETTYVETSTNITYKSDANYTDSGLVGKINDAHKTLVQQPLWALRSFPEGERNCYNFNLTVNSTYLIRGTFLYGNYDGLNQSPSFDLHIGASKWTSVNIVGVTDTVMPEIIHVLTQKRLQVCLVKTGKTTPFISSLELRPLINNIYIAESGSMVLQNRVYFPSDSTSIVRYDEDIHDRVWNPVSDDDSSSISTDLQVQTNNLYDVPQFVMKTAAIPKDASAPWSLVWTIDNTTALSYVYMHFAEIQDLKANDLREFDITYNGGKLWFSQFRPNKLSILTMFSQVPLTSSNGEYNFTFEMTSNSTLPPLINALEIYTGLEILQLQTDKDEVSAMMNIKTTYDLSKKISWQGDPCAPQLYRWEGLDCSYPDTEASRIISLNLNASGLNGTITSDITKLTQLSELDLSNNDLSGEIPEFFTDMKLLKLINLSGNPKLNLTVPDSLQQRVNNKSLTLILGEKVKMNPTAKKESKKVPIVPIAASVAGVFALIVILAIFFIVKGKKGKSAEGPPLSVTSGTAKSETRSSNPSIMRKDRKITYPQVLKMTNNFERVLGKGGFGTVYHGNMEDAQVAVKMLSHSSAQGYKEFKAEVELLLRVHHRHLVGLVGYCDDGDNLALIYEYMANGDLRENMLGKRGGNVLTWENRMQIAVEAAQGLEYLHNGCTPPMVHRDVKTTNILLNAQCGAKLADFGLSRSFPIDGECHVSTVVAGTPGYLDPEYYRTNWLSEKSDVYSFGVVLLEIVTNQPVINQTRERPHINEWVGFMLSKGDIKSIVDPKLMGDYDTNGAWKIVELGLACVNPSSNLRPTMAHVVIELNECVAFENARRQGSEEMYTRSSTNFSHTSASEFSPGAR

SEQ ID NO: 85855 - protein, 879 aa, Arabidopsis thaliana
  peptide (1)..(879): Ceres Seq. ID no. 12684210
MIVSFTVSRPVEAQDQAGFISLDCGLVPKETTYVETSTNITYKSDANYTDSGLVGKINDAHKTLVQQPLWALRSFPEGERNCYNFNLTVNSTYLIRGTFLYGNYDGLNQSPSFDLHIGASKWTSVNIVGVTDTVMPEIIHVLTQKRLQVCLVKTGKTTPFISSLELRPLINNIYIAESGSMVLQNRVYFPSDSTSIVRYDEDIHDRVWNPVSDDDSSSISTDLQVQTNNLYDVPQFVMKTAAIPKDASAPWSLVWTIDNTTALSYVYMHFAEIQDLKANDLREFDITYNGGKLWFSQFRPNKLSILTMFSQVPLTSSNGEYNFTFEMTSNSTLPPLINALEIYTGLEILQLQTDKDEVSAMMNIKTTYDLSKKISWQGDPCAPQLYRWEGLDCSYPDTEASRIISLNLNASGLNGTITSDITKLTQLSELDLSNNDLSGEIPEFFTDMKLLKLINLSGNPKLNLTVPDSLQQRVNNKSLTLILGEKVKMNPTAKKESKKVPIVPIAASVAGVFALIVILAIFFIVKGKKGKSAEGPPLSVTSGTAKSETRSSNPSIMRKDRKITYPQVLKMTNNFERVLGKGGFGTVYHGNMEDAQVAVKMLSHSSAQGYKEFKAEVELLLRVHHRHLVGLVGYCDDGDNLALIYEYMANGDLRENMLGKRGGNVLTWENRMQIAVEAAQGLEYLHNGCTPPMVHRDVKTTNILLNAQCGAKLADFGLSRSFPIDGECHVSTVVAGTPGYLDPEYYRTNWLSEKSDVYSFGVVLLEIVTNQPVINQTRERPHINEWVGFMLSKGDIKSIVDPKLMGDYDTNGAWKIVELGLACVNPSSNLRPTMAHVVIELNECVAFENARRQGSEEMYTRSSTNFSHTSASEFSPGAR

SEQ ID NO: 85856 - protein, 745 aa, Arabidopsis thaliana
  peptide (1)..(745): Ceres Seq. ID no. 12684211
MPEIIHVLTQKRLQVCLVKTGKTTPFISSLELRPLINNIYIAESGSMVLQNRVYFPSDSTSIVRYDEDIHDRVWNPVSDDDSSSISTDLQVQTNNLYDVPQFVMKTAAIPKDASAPWSLVWTIDNTTALSYVYMHFAEIQDLKANDLREFDITYNGGKLWFSQFRPNKLSILTMFSQVPLTSSNGEYNFTFEMTSNSTLPPLINALEIYTGLEILQLQTDKDEVSAMMNIKTTYDLSKKISWQGDPCAPQLYRWEGLDCSYPDTEASRIISLNLNASGLNGTITSDITKLTQLSELDLSNNDLSGEIPEFFTDMKLLKLINLSGNPKLNLTVPDSLQQRVNNKSLTLILGEKVKMNPTAKKESKKVPIVPIAASVAGVFALIVILAIFFIVKGKKGKSAEGPPLSVTSGTAKSETRSSNPSIMRKDRKITYPQVLKMTNNFERVLGKGGFGTVYHGNMEDAQVAVKMLSHSSAQGYKEFKAEVELLLRVHHRHLVGLVGYCDDGDNLALIYEYMANGDLRENMLGKRGGNVLTWENRMQIAVEAAQGLEYLHNGCTPPMVHRDVKTTNILLNAQCGAKLADFGLSRSFPIDGECHVSTVVAGTPGYLDPEYYRTNWLSEKSDVYSFGVVLLEIVTNQPVINQTRERPHINEWVGFMLSKGDIKSIVDPKLMGDYDTNGAWKIVELGLACVNPSSNLRPTMAHVVIELNECVAFENARRQGSEEMYTRSSTNFSHTSASEFSPGAR

SEQ ID NO: 85857 - DNA, 2577 bp, Arabidopsis thaliana
  misc_feature (1)..(2577): Ceres Seq. ID no. 12684212
  misc_feature (1)..(2577): Ortholog of  Ceres SEQ ID NO 13584744 as cited in SEQ ID NO 69137
atgaagtctattcatgggtttttgctcttcttgatcacagcttatgtcattttggaatcagttcaagctcaagatcaattaggattcatcagtttggattgtgggttagtccctaagaacgcaacttatacggagaagacgacaaatataacatacaaatcagatgcaaattacatcgatagtggattggtcgggaggatcagtgctgagtacaaagcgcagcttcagcaacaaacttggaccgtaagaagcttccctgagggtgaaagaaactgttacaacttcaaccttaccgctaaaagcagatatctcatcagagcaacctttacgtatgggaattacgatggtttgagacaagtccccaagtttgatattcacattggtcctagcaaatggacttctgttaagttggatggagtaggaaatggtgcagtcctcgagatgattcatgtcttaacacaagaccgtcttcaaatttgtcttgttaagacaggaaaagggataccatttatttcgtcgctggaacttcgtccgttgaacaataatacttacctcacgcaaagtggatcgttgattgggtatgatgaggatatccatgatcgagtctgggttcgacagtttggtaatggattgaaatcgataagcacagaccttttggtcgatacaagtaacccctatgatgtgccacaagctgtggcaaagactgcatgtgtaccttcaaatgctagtcagcctctgatctttgattggactcttgacaacatcacttcacaatcatatgtatacatgcatttcgctgaaatccagactcttaaggataatgacatcagagaattcaacattacttataatggtggtcagaatgtgtactcctatttgaggcctgaaaaattcgagatatcaactctattcgattcaaagcctttgagttctccggatggcagtttcagtttgtctttcacgaagaccggtaactcaactcttcctcctcttatcaacggcctcgagatttataaagtcttagaccttctagaactcgagacagatcaagatgaagtttctgctatgataaacatcaaggcaacgtatgatttgagcaaaaaggttagctggcaaggagatccatgtgctcctaagtcttatcagtgggaaggtttaaactgcagttatccaaactctgatcaacctcggatcatatccttgaacttggcagagaacaagttgaccggtaccataacacctgaaatatccaagctaacacagttgatagagctagatttgtcaaaaaacgatttatcaggagagataccggagttttttgcagatatgaagttattaaaacttataaacttaagtggaaatctaggtctcaacagcacaattccagactctattcaacaaagattagatagcaaatctctaatactaattttgagtaagactgttactaaaactgtcaccctgaaaggcaaaagtaaaaaggttccaatgattcctatcgtagcgtcagtggctggtgtgttcgctctgctagttatcttggccatctttttcgtcgttagaaggaaaaacggggaaagtaataagggtacgaatccatcaatcataacaaaggaacgcaggatcacgtatcccgaggtactaaagatgactaataactttgagagagttcttggtaaaggaggatttggaacagtgtaccatggaaacttggaggatactcaagtagctgtgaaaatgctctctcattcgtcagctcaagggtataaagagttcaaagcagaggttgaacttcttttaagagttcaccatagaaatttggtgggacttgtgggttactgtgatgatggagataacttggctttgatttatgaatacatggctaatggagatctcaaggagaatatgtcaggaaaacgtggaggcaatgtccttacctgggaaaacaggatgcaaatagctgtagaggctgcacaaggattggagtatcttcacaatggatgtacgcctcctatggtccatagagatgttaaaactaccaacatcttattgaatgagcggtatggagcaaaactagccgactttgggctctcaagatctttcccagttgatggcgaaagtcatgtctcgacagtggttgcgggcacacctggttaccttgaccctgagtactacagaacaaactggctaagcgagaagagtgatgtgtacagcttcggtgtagtcctattagagatagtcacaaaccagcctgtgacagataaaacaagagagagaactcacatcaatgaatgggttgggtccatgctcactaaaggggacatcaagagcatccttgacccaaaactgatgggggactatgacacaaacggtgcctggaagattgttgagctggctcttgcatgtgtgaacccgtcttcaaaccggagaccaacaatggcacacgtcgtgactgagctaaacgaatgtgtggccttagaaaatgcaaggcgacaaggtcgtgaagagatgcacacaagtggttatgttgactttagtcgctcttctgcttccgaattttcccctggagccagataa

SEQ ID NO: 85858 - protein, 858 aa, Arabidopsis thaliana
  peptide (1)..(858): Ceres Seq. ID no. 12684213
MKSIHGFLLFLITAYVILESVQAQDQLGFISLDCGLVPKNATYTEKTTNITYKSDANYIDSGLVGRISAEYKAQLQQQTWTVRSFPEGERNCYNFNLTAKSRYLIRATFTYGNYDGLRQVPKFDIHIGPSKWTSVKLDGVGNGAVLEMIHVLTQDRLQICLVKTGKGIPFISSLELRPLNNNTYLTQSGSLIGYDEDIHDRVWVRQFGNGLKSISTDLLVDTSNPYDVPQAVAKTACVPSNASQPLIFDWTLDNITSQSYVYMHFAEIQTLKDNDIREFNITYNGGQNVYSYLRPEKFEISTLFDSKPLSSPDGSFSLSFTKTGNSTLPPLINGLEIYKVLDLLELETDQDEVSAMINIKATYDLSKKVSWQGDPCAPKSYQWEGLNCSYPNSDQPRIISLNLAENKLTGTITPEISKLTQLIELDLSKNDLSGEIPEFFADMKLLKLINLSGNLGLNSTIPDSIQQRLDSKSLILILSKTVTKTVTLKGKSKKVPMIPIVASVAGVFALLVILAIFFVVRRKNGESNKGTNPSIITKERRITYPEVLKMTNNFERVLGKGGFGTVYHGNLEDTQVAVKMLSHSSAQGYKEFKAEVELLLRVHHRNLVGLVGYCDDGDNLALIYEYMANGDLKENMSGKRGGNVLTWENRMQIAVEAAQGLEYLHNGCTPPMVHRDVKTTNILLNERYGAKLADFGLSRSFPVDGESHVSTVVAGTPGYLDPEYYRTNWLSEKSDVYSFGVVLLEIVTNQPVTDKTRERTHINEWVGSMLTKGDIKSILDPKLMGDYDTNGAWKIVELALACVNPSSNRRPTMAHVVTELNECVALENARRQGREEMHTSGYVDFSRSSASEFSPGAR

SEQ ID NO: 85859 - protein, 711 aa, Arabidopsis thaliana
  peptide (1)..(711): Ceres Seq. ID no. 12684214
MIHVLTQDRLQICLVKTGKGIPFISSLELRPLNNNTYLTQSGSLIGYDEDIHDRVWVRQFGNGLKSISTDLLVDTSNPYDVPQAVAKTACVPSNASQPLIFDWTLDNITSQSYVYMHFAEIQTLKDNDIREFNITYNGGQNVYSYLRPEKFEISTLFDSKPLSSPDGSFSLSFTKTGNSTLPPLINGLEIYKVLDLLELETDQDEVSAMINIKATYDLSKKVSWQGDPCAPKSYQWEGLNCSYPNSDQPRIISLNLAENKLTGTITPEISKLTQLIELDLSKNDLSGEIPEFFADMKLLKLINLSGNLGLNSTIPDSIQQRLDSKSLILILSKTVTKTVTLKGKSKKVPMIPIVASVAGVFALLVILAIFFVVRRKNGESNKGTNPSIITKERRITYPEVLKMTNNFERVLGKGGFGTVYHGNLEDTQVAVKMLSHSSAQGYKEFKAEVELLLRVHHRNLVGLVGYCDDGDNLALIYEYMANGDLKENMSGKRGGNVLTWENRMQIAVEAAQGLEYLHNGCTPPMVHRDVKTTNILLNERYGAKLADFGLSRSFPVDGESHVSTVVAGTPGYLDPEYYRTNWLSEKSDVYSFGVVLLEIVTNQPVTDKTRERTHINEWVGSMLTKGDIKSILDPKLMGDYDTNGAWKIVELALACVNPSSNRRPTMAHVVTELNECVALENARRQGREEMHTSGYVDFSRSSASEFSPGAR

SEQ ID NO: 85860 - protein, 596 aa, Arabidopsis thaliana
  peptide (1)..(596): Ceres Seq. ID no. 12684215
MHFAEIQTLKDNDIREFNITYNGGQNVYSYLRPEKFEISTLFDSKPLSSPDGSFSLSFTKTGNSTLPPLINGLEIYKVLDLLELETDQDEVSAMINIKATYDLSKKVSWQGDPCAPKSYQWEGLNCSYPNSDQPRIISLNLAENKLTGTITPEISKLTQLIELDLSKNDLSGEIPEFFADMKLLKLINLSGNLGLNSTIPDSIQQRLDSKSLILILSKTVTKTVTLKGKSKKVPMIPIVASVAGVFALLVILAIFFVVRRKNGESNKGTNPSIITKERRITYPEVLKMTNNFERVLGKGGFGTVYHGNLEDTQVAVKMLSHSSAQGYKEFKAEVELLLRVHHRNLVGLVGYCDDGDNLALIYEYMANGDLKENMSGKRGGNVLTWENRMQIAVEAAQGLEYLHNGCTPPMVHRDVKTTNILLNERYGAKLADFGLSRSFPVDGESHVSTVVAGTPGYLDPEYYRTNWLSEKSDVYSFGVVLLEIVTNQPVTDKTRERTHINEWVGSMLTKGDIKSILDPKLMGDYDTNGAWKIVELALACVNPSSNRRPTMAHVVTELNECVALENARRQGREEMHTSGYVDFSRSSASEFSPGAR

SEQ ID NO: 85861 - DNA, 2631 bp, Arabidopsis thaliana
  misc_feature (1)..(2631): Ceres Seq. ID no. 12684216
  misc_feature (1)..(2631): Ortholog of  Ceres SEQ ID NO 13654989 as cited in SEQ ID NO 63117
  misc_feature (1)..(2631): Ortholog of  Ceres SEQ ID NO 13584744 as cited in SEQ ID NO 69137
atgaggtttttgtctttcttgatcttcgttttcgcagttcttggattggttcaagctcaagaccaatcaggattcataagcttagattgtggtttggtgcctacggaaattacttatgtggaaaagtcgacgaatataacatacagatcagacgcaacttacatcgacagtggagttcccgggaagatcaatgaagtgtacagaacacagtttcagcaacaaatttgggccttgagaagcttccctgagggtcaaagaaattgttacaacttcagtctcaccgcaaaacgtaagtatctaatcagaggaacctttatctatgggaattatgacggtttgaatcaactcccgagctttgatctttacatcggtccaaacaaatggacctctgtttcgatccccggagtgagaaatggttcagtctccgagatgatccatgtcttaagacaagaccatcttcaaatttgtcttgtgaaaacaggagaaactacaccgtttatttcttcattggaacttcgtcctttgaacaataatacatacgtcacaaaaagtggatcgcttattgtggtcgcaagactttacttttcacccactccaccatttctcaggtatgatgaggacgtccatgaccgaatttggattccattcttagataacaaaaattccttgttaagcacggaactctctgttgatacaagtaacttctacaatgtgcctcaaactgtagcgaaaactgctgctgtccctttaaatgctactcagcctctgaaaataaattggagtctcgacgacatcacttcacagtcatatatatacatgcatttcgctgaaatcgagaatcttgaagctaatgagaccagagaattcaatattacttacaatggtggcgaaaattggttctcctattttagacctccaaagtttcgtataacaactgtatacaatccagcagctgtgagttctctagatgggaatttcaacttcactttctcgatgaccggtaactctactcatcctcctcttatcaacggccttgagatttatcaagttctagagcttccacagcttgatacataccaagatgaagtttccgctatgatgaatatcaagacaatatatggattgagcaaaaggtctagctggcaaggagatccatgtgctcctgagttatatagatgggaaggtttaaactgtagttatccaaactttgcgccaccgcagatcatatccttgaacttgagtggaagcaatttgagtggtaccataacatctgatatatccaagctaacacatttgagagaactagatttatcaaacaatgacttatcaggagatattccatttgttttttctgatatgaagaatttgacactcataaacttgagtggaaacaagaatctaaatcgctcagttccagagactcttcagaagaggatagataacaaatctttaacactaattagagatgaaaccggaaaaaatagtacaaatgtagttgctatcgcagcatcagtggctagcgtgtttgctgtgctagttatcttggctatcgtttttgtcgtcataaggaaaaaacagagaactaatgaagcttcaggaccccgatcattcactactggcacggttaagagtgatgcaagatcatcgagttcatcaatcataacaaaggaacgcaagttcacttattcggaggtactaaagatgactaaaaactttgagagagttcttggtaaaggagggtttggaacagtgtatcatggtaacttggatgatactcaagtagctgtgaaaatgctttctcattcatcagctcaaggttataaagagttcaaagcagaggttgaacttcttttaagagttcatcacagacatttggtgggacttgttggttactgtgatgatggagacaacttagctctgatctatgaatatatggaaaaaggagacctgagggaaaatatgtcaggaaaacacagtgtcaatgtcctaagctgggaaacaagaatgcaaatagctgtagaggcagcacaaggattggagtatttgcataacggatgtaggcctcctatggtacatagagatgtgaaaccaaccaacattttattaaatgagcggtctcaagcaaaactagccgactttgggctatcgagatcttttcctgttgatggtgaatctcatgtcatgacagtcgttgcaggaacacctggttacttagatcctgagtattacagaacaaactggctaagcgagaagagtgatgtgtacagctttggtgtagtgcttttagagatagtcacaaaccagcctgtgatgaataaaaaccgagagagacctcatatcaatgaatgggttatgttcatgcttaccaatggggatatcaagagtattgtcgacccgaaactgaatgaagactatgacacaaacggtgtgtggaaggttgtagagttggctttagcttgtgtaaacccgtcttcaagccgtagaccgacaatgccacacgtggtgatggagctaaacgaatgtcttgctttggaaatagaaaggaaacaaggtagtcaagcgacgtacataaaggaatctgttgagtttagtccatcttctgcttctgatttttcccctttagctaggtaa

SEQ ID NO: 85862 - protein, 876 aa, Arabidopsis thaliana
  peptide (1)..(876): Ceres Seq. ID no. 12684217
MRFLSFLIFVFAVLGLVQAQDQSGFISLDCGLVPTEITYVEKSTNITYRSDATYIDSGVPGKINEVYRTQFQQQIWALRSFPEGQRNCYNFSLTAKRKYLIRGTFIYGNYDGLNQLPSFDLYIGPNKWTSVSIPGVRNGSVSEMIHVLRQDHLQICLVKTGETTPFISSLELRPLNNNTYVTKSGSLIVVARLYFSPTPPFLRYDEDVHDRIWIPFLDNKNSLLSTELSVDTSNFYNVPQTVAKTAAVPLNATQPLKINWSLDDITSQSYIYMHFAEIENLEANETREFNITYNGGENWFSYFRPPKFRITTVYNPAAVSSLDGNFNFTFSMTGNSTHPPLINGLEIYQVLELPQLDTYQDEVSAMMNIKTIYGLSKRSSWQGDPCAPELYRWEGLNCSYPNFAPPQIISLNLSGSNLSGTITSDISKLTHLRELDLSNNDLSGDIPFVFSDMKNLTLINLSGNKNLNRSVPETLQKRIDNKSLTLIRDETGKNSTNVVAIAASVASVFAVLVILAIVFVVIRKKQRTNEASGPRSFTTGTVKSDARSSSSSIITKERKFTYSEVLKMTKNFERVLGKGGFGTVYHGNLDDTQVAVKMLSHSSAQGYKEFKAEVELLLRVHHRHLVGLVGYCDDGDNLALIYEYMEKGDLRENMSGKHSVNVLSWETRMQIAVEAAQGLEYLHNGCRPPMVHRDVKPTNILLNERSQAKLADFGLSRSFPVDGESHVMTVVAGTPGYLDPEYYRTNWLSEKSDVYSFGVVLLEIVTNQPVMNKNRERPHINEWVMFMLTNGDIKSIVDPKLNEDYDTNGVWKVVELALACVNPSSSRRPTMPHVVMELNECLALEIERKQGSQATYIKESVEFSPSSASDFSPLAR

SEQ ID NO: 85863 - protein, 733 aa, Arabidopsis thaliana
  peptide (1)..(733): Ceres Seq. ID no. 12684218
MIHVLRQDHLQICLVKTGETTPFISSLELRPLNNNTYVTKSGSLIVVARLYFSPTPPFLRYDEDVHDRIWIPFLDNKNSLLSTELSVDTSNFYNVPQTVAKTAAVPLNATQPLKINWSLDDITSQSYIYMHFAEIENLEANETREFNITYNGGENWFSYFRPPKFRITTVYNPAAVSSLDGNFNFTFSMTGNSTHPPLINGLEIYQVLELPQLDTYQDEVSAMMNIKTIYGLSKRSSWQGDPCAPELYRWEGLNCSYPNFAPPQIISLNLSGSNLSGTITSDISKLTHLRELDLSNNDLSGDIPFVFSDMKNLTLINLSGNKNLNRSVPETLQKRIDNKSLTLIRDETGKNSTNVVAIAASVASVFAVLVILAIVFVVIRKKQRTNEASGPRSFTTGTVKSDARSSSSSIITKERKFTYSEVLKMTKNFERVLGKGGFGTVYHGNLDDTQVAVKMLSHSSAQGYKEFKAEVELLLRVHHRHLVGLVGYCDDGDNLALIYEYMEKGDLRENMSGKHSVNVLSWETRMQIAVEAAQGLEYLHNGCRPPMVHRDVKPTNILLNERSQAKLADFGLSRSFPVDGESHVMTVVAGTPGYLDPEYYRTNWLSEKSDVYSFGVVLLEIVTNQPVMNKNRERPHINEWVMFMLTNGDIKSIVDPKLNEDYDTNGVWKVVELALACVNPSSSRRPTMPHVVMELNECLALEIERKQGSQATYIKESVEFSPSSASDFSPLAR

SEQ ID NO: 85864 - protein, 604 aa, Arabidopsis thaliana
  peptide (1)..(604): Ceres Seq. ID no. 12684219
MHFAEIENLEANETREFNITYNGGENWFSYFRPPKFRITTVYNPAAVSSLDGNFNFTFSMTGNSTHPPLINGLEIYQVLELPQLDTYQDEVSAMMNIKTIYGLSKRSSWQGDPCAPELYRWEGLNCSYPNFAPPQIISLNLSGSNLSGTITSDISKLTHLRELDLSNNDLSGDIPFVFSDMKNLTLINLSGNKNLNRSVPETLQKRIDNKSLTLIRDETGKNSTNVVAIAASVASVFAVLVILAIVFVVIRKKQRTNEASGPRSFTTGTVKSDARSSSSSIITKERKFTYSEVLKMTKNFERVLGKGGFGTVYHGNLDDTQVAVKMLSHSSAQGYKEFKAEVELLLRVHHRHLVGLVGYCDDGDNLALIYEYMEKGDLRENMSGKHSVNVLSWETRMQIAVEAAQGLEYLHNGCRPPMVHRDVKPTNILLNERSQAKLADFGLSRSFPVDGESHVMTVVAGTPGYLDPEYYRTNWLSEKSDVYSFGVVLLEIVTNQPVMNKNRERPHINEWVMFMLTNGDIKSIVDPKLNEDYDTNGVWKVVELALACVNPSSSRRPTMPHVVMELNECLALEIERKQGSQATYIKESVEFSPSSASDFSPLAR

SEQ ID NO: 85865 - DNA, 2619 bp, Arabidopsis thaliana
  misc_feature (1)..(2619): Ceres Seq. ID no. 12684220
  misc_feature (1)..(2619): Ortholog of  Ceres SEQ ID NO 13584744 as cited in SEQ ID NO 69137
atgaagtctattcatgggtttttgctcttcttgatcacagcttatgtcattttggaatcagttcaagctcaagatcaattaggattcatcagtttggattgtgggttagtccctaagaacgcaacttatacggagaagacgacaaatataacatacaaatcagatgcaaattacatcgatagtggattggtcgggaggatcagtgctgagtacaaagcgcagcttcagcaacaaacttggaccgtaagaagcttccctgagggtgaaagaaactgttacaacttcaaccttaccgctaaaagcagatatctcatcagagcaacctttacgtatgggaattacgatggtttgagacaagtccccaagtttgatattcacattggtcctagcaaatggacttctgttaagttggatggagtaggaaatggtgcagtcctcgagatgattcatgtcttaacacaagaccgtcttcaaatttgtcttgttaagacaggaaaagggataccatttatttcgtcgctggaacttcgtccgttgaacaataatacttacctcacgcaaagtggatcgttgattgggttcgcaagagttttcttttcagccactccaacattcataaggtatgatgaggatatccatgatcgagtctgggttcgacagtttggtaatggattgaaatcgataagcacagaccttttggtcgatacaagtaacccctatgatgtgccacaagctgtggcaaagactgcatgtgtaccttcaaatgctagtcagcctctgatctttgattggactcttgacaacatcacttcacaatcatatgtatacatgcatttcgctgaaatccagactcttaaggataatgacatcagagaattcaacattacttataatggtggtcagaatgtgtactcctatttgaggcctgaaaaattcgagatatcaactctattcgattcaaagcctttgagttctccggatggcagtttcagtttgtctttcacgaagaccggtaactcaactcttcctcctcttatcaacggcctcgagatttataaagtcttagaccttctagaactcgagacagatcaagatgaagtttctgctatgataaacatcaaggcaacgtatgatttgagcaaaaaggttagctggcaaggagatccatgtgctcctaagtcttatcagtgggaaggtttaaactgcagttatccaaactctgatcaacctcggatcatatccttgaacttggcagagaacaagttgaccggtaccataacacctgaaatatccaagctaacacagttgatagagctagatttgtcaaaaaacgatttatcaggagagataccggagttttttgcagatatgaagttattaaaacttataaacttaagtggaaatctaggtctcaacagcacaattccagactctattcaacaaagattagatagcaaatctctaatactaattttgagtaagactgttactaaaactgtcaccctgaaaggcaaaagtaaaaaggttccaatgattcctatcgtagcgtcagtggctggtgtgttcgctctgctagttatcttggccatctttttcgtcgttagaaggaaaaacggggaaagtaataagggtacgaatccatcaatcataacaaaggaacgcaggatcacgtatcccgaggtactaaagatgactaataactttgagagagttcttggtaaaggaggatttggaacagtgtaccatggaaacttggaggatactcaagtagctgtgaaaatgctctctcattcgtcagctcaagggtataaagagttcaaagcagaggttgaacttcttttaagagttcaccatagaaatttggtgggacttgtgggttactgtgatgatggagataacttggctttgatttatgaatacatggctaatggagatctcaaggagaatatgtcaggaaaacgtggaggcaatgtccttacctgggaaaacaggatgcaaatagctgtagaggctgcacaaggattggagtatcttcacaatggatgtacgcctcctatggtccatagagatgttaaaactaccaacatcttattgaatgagcggtatggagcaaaactagccgactttgggctctcaagatctttcccagttgatggcgaaagtcatgtctcgacagtggttgcgggcacacctggttaccttgaccctgagtactacagaacaaactggctaagcgagaagagtgatgtgtacagcttcggtgtagtcctattagagatagtcacaaaccagcctgtgacagataaaacaagagagagaactcacatcaatgaatgggttgggtccatgctcactaaaggggacatcaagagcatccttgacccaaaactgatgggggactatgacacaaacggtgcctggaagattgttgagctggctcttgcatgtgtgaacccgtcttcaaaccggagaccaacaatggcacacgtcgtgactgagctaaacgaatgtgtggccttagaaaatgcaaggcgacaaggtcgtgaagagatgcacacaagtggttatgttgactttagtcgctcttctgcttccgaattttcccctggagccagataa

SEQ ID NO: 85866 - protein, 872 aa, Arabidopsis thaliana
  peptide (1)..(872): Ceres Seq. ID no. 12684221
MKSIHGFLLFLITAYVILESVQAQDQLGFISLDCGLVPKNATYTEKTTNITYKSDANYIDSGLVGRISAEYKAQLQQQTWTVRSFPEGERNCYNFNLTAKSRYLIRATFTYGNYDGLRQVPKFDIHIGPSKWTSVKLDGVGNGAVLEMIHVLTQDRLQICLVKTGKGIPFISSLELRPLNNNTYLTQSGSLIGFARVFFSATPTFIRYDEDIHDRVWVRQFGNGLKSISTDLLVDTSNPYDVPQAVAKTACVPSNASQPLIFDWTLDNITSQSYVYMHFAEIQTLKDNDIREFNITYNGGQNVYSYLRPEKFEISTLFDSKPLSSPDGSFSLSFTKTGNSTLPPLINGLEIYKVLDLLELETDQDEVSAMINIKATYDLSKKVSWQGDPCAPKSYQWEGLNCSYPNSDQPRIISLNLAENKLTGTITPEISKLTQLIELDLSKNDLSGEIPEFFADMKLLKLINLSGNLGLNSTIPDSIQQRLDSKSLILILSKTVTKTVTLKGKSKKVPMIPIVASVAGVFALLVILAIFFVVRRKNGESNKGTNPSIITKERRITYPEVLKMTNNFERVLGKGGFGTVYHGNLEDTQVAVKMLSHSSAQGYKEFKAEVELLLRVHHRNLVGLVGYCDDGDNLALIYEYMANGDLKENMSGKRGGNVLTWENRMQIAVEAAQGLEYLHNGCTPPMVHRDVKTTNILLNERYGAKLADFGLSRSFPVDGESHVSTVVAGTPGYLDPEYYRTNWLSEKSDVYSFGVVLLEIVTNQPVTDKTRERTHINEWVGSMLTKGDIKSILDPKLMGDYDTNGAWKIVELALACVNPSSNRRPTMAHVVTELNECVALENARRQGREEMHTSGYVDFSRSSASEFSPGAR

SEQ ID NO: 85867 - protein, 725 aa, Arabidopsis thaliana
  peptide (1)..(725): Ceres Seq. ID no. 12684222
MIHVLTQDRLQICLVKTGKGIPFISSLELRPLNNNTYLTQSGSLIGFARVFFSATPTFIRYDEDIHDRVWVRQFGNGLKSISTDLLVDTSNPYDVPQAVAKTACVPSNASQPLIFDWTLDNITSQSYVYMHFAEIQTLKDNDIREFNITYNGGQNVYSYLRPEKFEISTLFDSKPLSSPDGSFSLSFTKTGNSTLPPLINGLEIYKVLDLLELETDQDEVSAMINIKATYDLSKKVSWQGDPCAPKSYQWEGLNCSYPNSDQPRIISLNLAENKLTGTITPEISKLTQLIELDLSKNDLSGEIPEFFADMKLLKLINLSGNLGLNSTIPDSIQQRLDSKSLILILSKTVTKTVTLKGKSKKVPMIPIVASVAGVFALLVILAIFFVVRRKNGESNKGTNPSIITKERRITYPEVLKMTNNFERVLGKGGFGTVYHGNLEDTQVAVKMLSHSSAQGYKEFKAEVELLLRVHHRNLVGLVGYCDDGDNLALIYEYMANGDLKENMSGKRGGNVLTWENRMQIAVEAAQGLEYLHNGCTPPMVHRDVKTTNILLNERYGAKLADFGLSRSFPVDGESHVSTVVAGTPGYLDPEYYRTNWLSEKSDVYSFGVVLLEIVTNQPVTDKTRERTHINEWVGSMLTKGDIKSILDPKLMGDYDTNGAWKIVELALACVNPSSNRRPTMAHVVTELNECVALENARRQGREEMHTSGYVDFSRSSASEFSPGAR

SEQ ID NO: 85868 - protein, 596 aa, Arabidopsis thaliana; identical to SEQ ID NO: 85860
  peptide (1)..(596): Ceres Seq. ID no. 12684223

SEQ ID NO: 85869 - DNA, 2607 bp, Arabidopsis thaliana
  misc_feature (1)..(2607): Ceres Seq. ID no. 12684224
  misc_feature (1)..(2607): Ortholog of  Ceres SEQ ID NO 13584744 as cited in SEQ ID NO 69137
atgaggtttttgtctttcttgatcttcgttttcgcagttcttggattggttcaagctcaagaccaatcaggattcataagcttagattgtggtttggtgcctacggaaattacttatgtggaaaagtcgacgaatataacatacagatcagacgcaacttacatcgacagtggagttcccgggaagatcaatgaagtgtacagaacacagtttcagcaacaaatttgggccttgagaagcttccctgagggtcaaagaaattgttacaacttcagtctcaccgcaaaacgtaagtatctaatcagaggaacctttatctatgggaattatgacggtttgaatcaactcccgagctttgatctttacatcggtccaaacaaatggacctctgtttcgatccccggagtgagaaatggttcagtctccgagatgatccatgtcttaagacaagaccatcttcaaatttgtcttgtgaaaacaggagaaactacaccgtttatttcttcattggaacttcgtcctttgaacaataatacatacgtcacaaaaagtggatcgcttattgtggtcgcaagactttacttttcacccactccaccatttctcaggtatgatgaggacgtccatgaccgaatttggattccattcttagataacaaaaattccttgttaagcacggaactctctgttgatacaagtaacttctacaatgtgcctcaaactgtagcgaaaactgctgctgtccctttaaatgctactcagcctctgaaaataaattggagtctcgacgacatcacttcacagtcatatatatacatgcatttcgctgaaatcgagaatcttgaagctaatgagaccagagaattcaatattacttacaatggtggcgaaaattggttctcctattttagacctccaaagtttcgtataacaactgtatacaatccagcagctgtgagttctctagatgggaatttcaacttcactttctcgatgaccggtaactctactcatcctcctcttatcaacggccttgagatttatcaagttctagagcttccacagcttgatacataccaagatgaagtttccgctatgatgaatatcaagacaatatatggattgagcaaaaggtctagctggcaaggagatccatgtgctcctgagttatatagatgggaagttctaacttttggactctctattaggaacttgagtggaagcaatttgagtggtaccataacatctgatatatccaagctaacacatttgagagaactagatttatcaaacaatgacttatcaggagatattccatttgttttttctgatatgaagaatttgacactcataaacttgagtggaaacaagaatctaaatcgctcagttccagagactcttcagaagaggatagataacaaatctttaacactaattagagatgaaaccggaaaaaatagtacaaatgtagttgctatcgcagcatcagtggctagcgtgtttgctgtgctagttatcttggctatcgtttttgtcgtcataaggaaaaaacagagaactaatgaagcttcaggaccccgatcattcactactggcacggttaagagtgatgcaagatcatcgagttcatcaatcataacaaaggaacgcaagttcacttattcggaggtactaaagatgactaaaaactttgagagagttcttggtaaaggagggtttggaacagtgtatcatggtaacttggatgatactcaagtagctgtgaaaatgctttctcattcatcagctcaaggttataaagagttcaaagcagaggttgaacttcttttaagagttcatcacagacatttggtgggacttgttggttactgtgatgatggagacaacttagctctgatctatgaatatatggaaaaaggagacctgagggaaaatatgtcaggaaaacacagtgtcaatgtcctaagctgggaaacaagaatgcaaatagctgtagaggcagcacaaggattggagtatttgcataacggatgtaggcctcctatggtacatagagatgtgaaaccaaccaacattttattaaatgagcggtctcaagcaaaactagccgactttgggctatcgagatcttttcctgttgatggtgaatctcatgtcatgacagtcgttgcaggaacacctggttacttagatcctgagtattacagaacaaactggctaagcgagaagagtgatgtgtacagctttggtgtagtgcttttagagatagtcacaaaccagcctgtgatgaataaaaaccgagagagacctcatatcaatgaatgggttatgttcatgcttaccaatggggatatcaagagtattgtcgacccgaaactgaatgaagactatgacacaaacggtgtgtggaaggttgtagagttggctttagcttgtgtaaacccgtcttcaagccgtagaccgacaatgccacacgtggtgatggagctaaacgaatgtcttgctttggaaatagaaaggaaacaaggtagtcaagcgacgtacataaaggaatctgttgagtttagtccatcttctgcttctgatttttcccctttagctaggtaa

SEQ ID NO: 85870 - protein, 868 aa, Arabidopsis thaliana
  peptide (1)..(868): Ceres Seq. ID no. 12684225
MRFLSFLIFVFAVLGLVQAQDQSGFISLDCGLVPTEITYVEKSTNITYRSDATYIDSGVPGKINEVYRTQFQQQIWALRSFPEGQRNCYNFSLTAKRKYLIRGTFIYGNYDGLNQLPSFDLYIGPNKWTSVSIPGVRNGSVSEMIHVLRQDHLQICLVKTGETTPFISSLELRPLNNNTYVTKSGSLIVVARLYFSPTPPFLRYDEDVHDRIWIPFLDNKNSLLSTELSVDTSNFYNVPQTVAKTAAVPLNATQPLKINWSLDDITSQSYIYMHFAEIENLEANETREFNITYNGGENWFSYFRPPKFRITTVYNPAAVSSLDGNFNFTFSMTGNSTHPPLINGLEIYQVLELPQLDTYQDEVSAMMNIKTIYGLSKRSSWQGDPCAPELYRWEVLTFGLSIRNLSGSNLSGTITSDISKLTHLRELDLSNNDLSGDIPFVFSDMKNLTLINLSGNKNLNRSVPETLQKRIDNKSLTLIRDETGKNSTNVVAIAASVASVFAVLVILAIVFVVIRKKQRTNEASGPRSFTTGTVKSDARSSSSSIITKERKFTYSEVLKMTKNFERVLGKGGFGTVYHGNLDDTQVAVKMLSHSSAQGYKEFKAEVELLLRVHHRHLVGLVGYCDDGDNLALIYEYMEKGDLRENMSGKHSVNVLSWETRMQIAVEAAQGLEYLHNGCRPPMVHRDVKPTNILLNERSQAKLADFGLSRSFPVDGESHVMTVVAGTPGYLDPEYYRTNWLSEKSDVYSFGVVLLEIVTNQPVMNKNRERPHINEWVMFMLTNGDIKSIVDPKLNEDYDTNGVWKVVELALACVNPSSSRRPTMPHVVMELNECLALEIERKQGSQATYIKESVEFSPSSASDFSPLAR

SEQ ID NO: 85871 - protein, 725 aa, Arabidopsis thaliana
  peptide (1)..(725): Ceres Seq. ID no. 12684226
MIHVLRQDHLQICLVKTGETTPFISSLELRPLNNNTYVTKSGSLIVVARLYFSPTPPFLRYDEDVHDRIWIPFLDNKNSLLSTELSVDTSNFYNVPQTVAKTAAVPLNATQPLKINWSLDDITSQSYIYMHFAEIENLEANETREFNITYNGGENWFSYFRPPKFRITTVYNPAAVSSLDGNFNFTFSMTGNSTHPPLINGLEIYQVLELPQLDTYQDEVSAMMNIKTIYGLSKRSSWQGDPCAPELYRWEVLTFGLSIRNLSGSNLSGTITSDISKLTHLRELDLSNNDLSGDIPFVFSDMKNLTLINLSGNKNLNRSVPETLQKRIDNKSLTLIRDETGKNSTNVVAIAASVASVFAVLVILAIVFVVIRKKQRTNEASGPRSFTTGTVKSDARSSSSSIITKERKFTYSEVLKMTKNFERVLGKGGFGTVYHGNLDDTQVAVKMLSHSSAQGYKEFKAEVELLLRVHHRHLVGLVGYCDDGDNLALIYEYMEKGDLRENMSGKHSVNVLSWETRMQIAVEAAQGLEYLHNGCRPPMVHRDVKPTNILLNERSQAKLADFGLSRSFPVDGESHVMTVVAGTPGYLDPEYYRTNWLSEKSDVYSFGVVLLEIVTNQPVMNKNRERPHINEWVMFMLTNGDIKSIVDPKLNEDYDTNGVWKVVELALACVNPSSSRRPTMPHVVMELNECLALEIERKQGSQATYIKESVEFSPSSASDFSPLAR

SEQ ID NO: 85872 - protein, 596 aa, Arabidopsis thaliana
  peptide (1)..(596): Ceres Seq. ID no. 12684227
MHFAEIENLEANETREFNITYNGGENWFSYFRPPKFRITTVYNPAAVSSLDGNFNFTFSMTGNSTHPPLINGLEIYQVLELPQLDTYQDEVSAMMNIKTIYGLSKRSSWQGDPCAPELYRWEVLTFGLSIRNLSGSNLSGTITSDISKLTHLRELDLSNNDLSGDIPFVFSDMKNLTLINLSGNKNLNRSVPETLQKRIDNKSLTLIRDETGKNSTNVVAIAASVASVFAVLVILAIVFVVIRKKQRTNEASGPRSFTTGTVKSDARSSSSSIITKERKFTYSEVLKMTKNFERVLGKGGFGTVYHGNLDDTQVAVKMLSHSSAQGYKEFKAEVELLLRVHHRHLVGLVGYCDDGDNLALIYEYMEKGDLRENMSGKHSVNVLSWETRMQIAVEAAQGLEYLHNGCRPPMVHRDVKPTNILLNERSQAKLADFGLSRSFPVDGESHVMTVVAGTPGYLDPEYYRTNWLSEKSDVYSFGVVLLEIVTNQPVMNKNRERPHINEWVMFMLTNGDIKSIVDPKLNEDYDTNGVWKVVELALACVNPSSSRRPTMPHVVMELNECLALEIERKQGSQATYIKESVEFSPSSASDFSPLAR

SEQ ID NO: 85873 - DNA, 2487 bp, Arabidopsis thaliana
  misc_feature (1)..(2487): Ceres Seq. ID no. 12684285
  misc_feature (1)..(2487): Ortholog of  Ceres SEQ ID NO 13582534 as cited in SEQ ID NO 57409
atgggaaagattggtattgttttctttgcttcgttgctcttcttgctaattatattcccaagttgtgcctttgcagctataaccagagcaagtcctttgtcaataggacaaactctgagctcccctaatggaacttatgagttagggttcttcagtccaaacaactctcggaatcagtatgttgggatctggttcaagaacatcacccctcgggttgttgtctgggtggctaacagagataagccagttacaaacaacgcagcgaatctcactatcaacagcaatgggagccttatcttggttgagagagaacaaaatgttgtttggtcaataggagaaactttctcttctaacgagcttcgtgctgagctattagaaaacggaaatcttgtactcattgatggagtttcagaaagaaacttatgggaaagtttcgagcatcttggtgatactatgttacttgaatcatctgtgatgtatgatgttccgaataacaagaaacgtgttttatcttcttggaaaaatcccaccgatccttcacctggagaattcgtagctgagcttacgacacaagtacctccgcaaggctttataatgagaggatccaggccttactggagaggtggtccatgggcaagggtaaggttcaccggcataccagaaatggatggatcacatgtaagcaaattcgacatttcccaagatgttgcagccggcacaggatctttgacttattcattagaacgaagaaattcgaacctgtcgtacactacgctcacatcagcgggatcgttaaagatcatttggaataatggctctggttgggttactgacttggaggcccctgtaagctcatgtgatgtttataatacatgtggaccttttggcttgtgtataagatctaatcccccaaagtgtgaatgcttgaaaggctttgtaccaaaatcagatgaggagtggaataaaaggaattggactggtggttgtatgagaagaacaaatttatcttgtgatgtgaactcttctgcaacagcacaagccaataatggagacatcttcgacatagttgcaaatgtgaagcctccagacttttatgaatatctaagtttgatcaatgaagaggattgccaacaacgttgtcttggaaactgttcttgcacggcattttcctatattgaacaaattggatgtttggtatggaatcgagagcttgtggatgtaatgcagtttgttgctggaggagaaactctttccattcgtcttgcaagttctgagttagctggaagcaatcgagtgaagattattgttgctagcattgtcagcatttctgttttcatgatcttggtttttgcctcttattggtactggagatacaaagccaaacaaaatgattcaaatcctataccattggagacatcacaagatgcatggagggaacaactgaaaccacaagatgtaaatttctttgatatgcaaaccatattaactatcaccaataactttagcatggaaaataagcttggtcaaggtggattcggtccagtgtataagggaaatctacaagatgggaaagaaatagccataaaacgcctttcgagcacctctggacagggtctagaggagttcatgaatgaaataatactcatctcgaaactccaacacagaaacttggtccgccttttgggatgttgcattgaaggagaagaaaagctattgatttatgagtttatggcgaacaaaagcctcaatacctttatctttggtcagtcccttattctgaccaatctgtttttaatttggctagattcgacgaaaaagcttgagcttgattggcccaagcggtttgaaatcattcaaggtattgcttgcggacttctttatcttcaccgcgactcatgtcttagggttgtacaccgagatatgaaggtcagcaacatccttttagacgaggaaatgaacccaaaaatatcagattttggattggctcggatgtttcaaggaacccaacatcaagccaacactcgcagggttgttggaacgctcggatacatgtctccagagtatgcttggacaggcatgttctctgagaaatccgacatctacgcatttggagttctgctattggaaatcataaccggcaagaggatttcaagtttcaccattggagaggaaggcaaaactcttcttgaatttgcatgggattcttggtgcgaaagcggtggatcggatctactggaccaagatatctctagctcgggttctgaatccgaagtagcgagatgtgttcagattggtttgctctgtattcaacaacaagccggggatagacccaacattgcacaagtaatgtcaatgcttacaaccacaatggatcttccgaaaccaaaacaacccgtattcgcaatgcaagtccaagagagtgattcagagtctaagactatgtactctgtcaataatataacacaaactgctatagttggtcgataa

SEQ ID NO: 85874 - protein, 828 aa, Arabidopsis thaliana
  peptide (1)..(828): Ceres Seq. ID no. 12684286
MGKIGIVFFASLLFLLIIFPSCAFAAITRASPLSIGQTLSSPNGTYELGFFSPNNSRNQYVGIWFKNITPRVVVWVANRDKPVTNNAANLTINSNGSLILVEREQNVVWSIGETFSSNELRAELLENGNLVLIDGVSERNLWESFEHLGDTMLLESSVMYDVPNNKKRVLSSWKNPTDPSPGEFVAELTTQVPPQGFIMRGSRPYWRGGPWARVRFTGIPEMDGSHVSKFDISQDVAAGTGSLTYSLERRNSNLSYTTLTSAGSLKIIWNNGSGWVTDLEAPVSSCDVYNTCGPFGLCIRSNPPKCECLKGFVPKSDEEWNKRNWTGGCMRRTNLSCDVNSSATAQANNGDIFDIVANVKPPDFYEYLSLINEEDCQQRCLGNCSCTAFSYIEQIGCLVWNRELVDVMQFVAGGETLSIRLASSELAGSNRVKIIVASIVSISVFMILVFASYWYWRYKAKQNDSNPIPLETSQDAWREQLKPQDVNFFDMQTILTITNNFSMENKLGQGGFGPVYKGNLQDGKEIAIKRLSSTSGQGLEEFMNEIILISKLQHRNLVRLLGCCIEGEEKLLIYEFMANKSLNTFIFGQSLILTNLFLIWLDSTKKLELDWPKRFEIIQGIACGLLYLHRDSCLRVVHRDMKVSNILLDEEMNPKISDFGLARMFQGTQHQANTRRVVGTLGYMSPEYAWTGMFSEKSDIYAFGVLLLEIITGKRISSFTIGEEGKTLLEFAWDSWCESGGSDLLDQDISSSGSESEVARCVQIGLLCIQQQAGDRPNIAQVMSMLTTTMDLPKPKQPVFAMQVQESDSESKTMYSVNNITQTAIVGR

SEQ ID NO: 85875 - protein, 677 aa, Arabidopsis thaliana
  peptide (1)..(677): Ceres Seq. ID no. 12684287
MLLESSVMYDVPNNKKRVLSSWKNPTDPSPGEFVAELTTQVPPQGFIMRGSRPYWRGGPWARVRFTGIPEMDGSHVSKFDISQDVAAGTGSLTYSLERRNSNLSYTTLTSAGSLKIIWNNGSGWVTDLEAPVSSCDVYNTCGPFGLCIRSNPPKCECLKGFVPKSDEEWNKRNWTGGCMRRTNLSCDVNSSATAQANNGDIFDIVANVKPPDFYEYLSLINEEDCQQRCLGNCSCTAFSYIEQIGCLVWNRELVDVMQFVAGGETLSIRLASSELAGSNRVKIIVASIVSISVFMILVFASYWYWRYKAKQNDSNPIPLETSQDAWREQLKPQDVNFFDMQTILTITNNFSMENKLGQGGFGPVYKGNLQDGKEIAIKRLSSTSGQGLEEFMNEIILISKLQHRNLVRLLGCCIEGEEKLLIYEFMANKSLNTFIFGQSLILTNLFLIWLDSTKKLELDWPKRFEIIQGIACGLLYLHRDSCLRVVHRDMKVSNILLDEEMNPKISDFGLARMFQGTQHQANTRRVVGTLGYMSPEYAWTGMFSEKSDIYAFGVLLLEIITGKRISSFTIGEEGKTLLEFAWDSWCESGGSDLLDQDISSSGSESEVARCVQIGLLCIQQQAGDRPNIAQVMSMLTTTMDLPKPKQPVFAMQVQESDSESKTMYSVNNITQTAIVGR

SEQ ID NO: 85876 - protein, 670 aa, Arabidopsis thaliana
  peptide (1)..(670): Ceres Seq. ID no. 12684288
MYDVPNNKKRVLSSWKNPTDPSPGEFVAELTTQVPPQGFIMRGSRPYWRGGPWARVRFTGIPEMDGSHVSKFDISQDVAAGTGSLTYSLERRNSNLSYTTLTSAGSLKIIWNNGSGWVTDLEAPVSSCDVYNTCGPFGLCIRSNPPKCECLKGFVPKSDEEWNKRNWTGGCMRRTNLSCDVNSSATAQANNGDIFDIVANVKPPDFYEYLSLINEEDCQQRCLGNCSCTAFSYIEQIGCLVWNRELVDVMQFVAGGETLSIRLASSELAGSNRVKIIVASIVSISVFMILVFASYWYWRYKAKQNDSNPIPLETSQDAWREQLKPQDVNFFDMQTILTITNNFSMENKLGQGGFGPVYKGNLQDGKEIAIKRLSSTSGQGLEEFMNEIILISKLQHRNLVRLLGCCIEGEEKLLIYEFMANKSLNTFIFGQSLILTNLFLIWLDSTKKLELDWPKRFEIIQGIACGLLYLHRDSCLRVVHRDMKVSNILLDEEMNPKISDFGLARMFQGTQHQANTRRVVGTLGYMSPEYAWTGMFSEKSDIYAFGVLLLEIITGKRISSFTIGEEGKTLLEFAWDSWCESGGSDLLDQDISSSGSESEVARCVQIGLLCIQQQAGDRPNIAQVMSMLTTTMDLPKPKQPVFAMQVQESDSESKTMYSVNNITQTAIVGR

SEQ ID NO: 85877 - DNA, 2316 bp, Arabidopsis thaliana
  misc_feature (1)..(2316): Ceres Seq. ID no. 12684293
  misc_feature (1)..(2316): Ortholog of  Ceres SEQ ID NO 13582534 as cited in SEQ ID NO 57409
atggggaagaagagggtcgtgttgctttggcttagcatctttataagttttagctctgcagagataacggaagagagccctttgtcaataggacaaactctcagctcctccaatggagtttatgaactgggcttcttcagttttaataactcccaaaatcagtatgtcggaatctccttcaagggtatcattccccgggtggttgtgtgggtggcaaatagagaaaagcctgttacagactctgcggcaaatctggttatcagcagcaacggaagtcttcagttatttaatggcaaacatggtgttgtgtggtccagtggaaaagctcttgcatctaacgggtctcgtgtagagcttttagacagtggaaatctagttgtcatagaaaaagtttcgggaagaactctatgggaaagttttgagcatcttggtgatactctgctccctcactcaactatcatgtataatgtccacaccggtgagaagcgagggttgacttcttggaaaagttacactgatccatcgcctggtgactttgtcgttctgattacaccgcaagtgccatcacaggggtttcttatgagaggctcgaccccttattttagatctggtccatgggctaaaacaaagttcaccgggttacctcaaatggatgaatcatacacaagtccattcagcttaacacaggatgtaaatgggtcaggatactattcgtattttgatagagacaacaaacgttcacgtattaggttaacaccagatggatcaatgaaggcgttacggtataatggaatggactgggacacaacctacgagggtcctgccaattcatgtgatatttatggcgtatgtggaccttttggtttttgtgttatctcagttcctccaaagtgtaaatgcttcaaaggttttattcctaaatccattgaggagtggaaaacaggaaactggactagtggttgtgtgaggcgtagcgaactacattgtcaaggaaactctactggcaaagatgcaaatgtcttccatactgttcccaacataaagcctccagacttttacgaatacgcagattctgtggatgcggaagaatgccaacaaaattgcctcaacaattgttcttgcttggccttcgcttatattcctggaatagggtgcttaatgtggagcaaggacctaatggacacagttcaatttgctgcaggaggagaacttctttccattcgtcttgcacgttctgagctagacgtaaataagcgcaagaagaccatcattgctattacagtgagccttaccctttttgtgatcttgggctttactgcgtttggtttctggagacgcagagtggaacaaaatgctcttatatcagaagatgcatggaggaatgatctgcaaacacaagacgtcccaggtctagaatattttgagatgaataccatacaaactgccaccaataatttcagtctatcaaacaaactcggtcatggtggatttggttcagtttacaaggcgagaaacggaaaactgcaagatggaagggaaattgcggtaaaacgcctttctagcagctctgagcagggcaaacaggagttcatgaatgaaatagtactgatatcaaaactccaacacagaaacttagtccgggttttgggatgctgcgtcgaaggaacagagaagctattgatttatgagtttatgaaaaacaaaagccttgatacttttgtctttgattcaaaaaaaaggcttgagatagattggccaaagagatttgatatcattcaaggtattgcacgtggacttctctatctccatcgtgactcacgcctcagaataattcaccgagacctgaaggtcagcaacattcttctggacgagaaaatgaacccgaaaatatcagattttgggttggctcggatgtttcatggaaccgaatatcaggataaaactcgcagggttgtcggaactctaggttatatgtctcctgagtatgcatgggctggagtattctctgagaaatcagacatctacagcttcggagttctactgctagaaatcatcagcggagagaagatctcgaggttcagctatggcgaagaaggaaaaacacttcttgcatatattggtttgctttgtgttcaataccagcctgcagacagaccaaacacacttgagttgctttctatgcttaccacaacatcagatcttcctctgccaaaacaacctacatttgtagtgcacacgagagatggcaaatctccgtcaaatgattcgatgatcactgtcaatgagatgacagagtctgtgatccatggacgttga

SEQ ID NO: 85878 - protein, 771 aa, Arabidopsis thaliana
  peptide (1)..(771): Ceres Seq. ID no. 12684294
MGKKRVVLLWLSIFISFSSAEITEESPLSIGQTLSSSNGVYELGFFSFNNSQNQYVGISFKGIIPRVVVWVANREKPVTDSAANLVISSNGSLQLFNGKHGVVWSSGKALASNGSRVELLDSGNLVVIEKVSGRTLWESFEHLGDTLLPHSTIMYNVHTGEKRGLTSWKSYTDPSPGDFVVLITPQVPSQGFLMRGSTPYFRSGPWAKTKFTGLPQMDESYTSPFSLTQDVNGSGYYSYFDRDNKRSRIRLTPDGSMKALRYNGMDWDTTYEGPANSCDIYGVCGPFGFCVISVPPKCKCFKGFIPKSIEEWKTGNWTSGCVRRSELHCQGNSTGKDANVFHTVPNIKPPDFYEYADSVDAEECQQNCLNNCSCLAFAYIPGIGCLMWSKDLMDTVQFAAGGELLSIRLARSELDVNKRKKTIIAITVSLTLFVILGFTAFGFWRRRVEQNALISEDAWRNDLQTQDVPGLEYFEMNTIQTATNNFSLSNKLGHGGFGSVYKARNGKLQDGREIAVKRLSSSSEQGKQEFMNEIVLISKLQHRNLVRVLGCCVEGTEKLLIYEFMKNKSLDTFVFDSKKRLEIDWPKRFDIIQGIARGLLYLHRDSRLRIIHRDLKVSNILLDEKMNPKISDFGLARMFHGTEYQDKTRRVVGTLGYMSPEYAWAGVFSEKSDIYSFGVLLLEIISGEKISRFSYGEEGKTLLAYIGLLCVQYQPADRPNTLELLSMLTTTSDLPLPKQPTFVVHTRDGKSPSNDSMITVNEMTESVIHGR

SEQ ID NO: 85879 - protein, 618 aa, Arabidopsis thaliana
  peptide (1)..(618): Ceres Seq. ID no. 12684295
MYNVHTGEKRGLTSWKSYTDPSPGDFVVLITPQVPSQGFLMRGSTPYFRSGPWAKTKFTGLPQMDESYTSPFSLTQDVNGSGYYSYFDRDNKRSRIRLTPDGSMKALRYNGMDWDTTYEGPANSCDIYGVCGPFGFCVISVPPKCKCFKGFIPKSIEEWKTGNWTSGCVRRSELHCQGNSTGKDANVFHTVPNIKPPDFYEYADSVDAEECQQNCLNNCSCLAFAYIPGIGCLMWSKDLMDTVQFAAGGELLSIRLARSELDVNKRKKTIIAITVSLTLFVILGFTAFGFWRRRVEQNALISEDAWRNDLQTQDVPGLEYFEMNTIQTATNNFSLSNKLGHGGFGSVYKARNGKLQDGREIAVKRLSSSSEQGKQEFMNEIVLISKLQHRNLVRVLGCCVEGTEKLLIYEFMKNKSLDTFVFDSKKRLEIDWPKRFDIIQGIARGLLYLHRDSRLRIIHRDLKVSNILLDEKMNPKISDFGLARMFHGTEYQDKTRRVVGTLGYMSPEYAWAGVFSEKSDIYSFGVLLLEIISGEKISRFSYGEEGKTLLAYIGLLCVQYQPADRPNTLELLSMLTTTSDLPLPKQPTFVVHTRDGKSPSNDSMITVNEMTESVIHGR

SEQ ID NO: 85880 - protein, 578 aa, Arabidopsis thaliana
  peptide (1)..(578): Ceres Seq. ID no. 12684296
MRGSTPYFRSGPWAKTKFTGLPQMDESYTSPFSLTQDVNGSGYYSYFDRDNKRSRIRLTPDGSMKALRYNGMDWDTTYEGPANSCDIYGVCGPFGFCVISVPPKCKCFKGFIPKSIEEWKTGNWTSGCVRRSELHCQGNSTGKDANVFHTVPNIKPPDFYEYADSVDAEECQQNCLNNCSCLAFAYIPGIGCLMWSKDLMDTVQFAAGGELLSIRLARSELDVNKRKKTIIAITVSLTLFVILGFTAFGFWRRRVEQNALISEDAWRNDLQTQDVPGLEYFEMNTIQTATNNFSLSNKLGHGGFGSVYKARNGKLQDGREIAVKRLSSSSEQGKQEFMNEIVLISKLQHRNLVRVLGCCVEGTEKLLIYEFMKNKSLDTFVFDSKKRLEIDWPKRFDIIQGIARGLLYLHRDSRLRIIHRDLKVSNILLDEKMNPKISDFGLARMFHGTEYQDKTRRVVGTLGYMSPEYAWAGVFSEKSDIYSFGVLLLEIISGEKISRFSYGEEGKTLLAYIGLLCVQYQPADRPNTLELLSMLTTTSDLPLPKQPTFVVHTRDGKSPSNDSMITVNEMTESVIHGR

SEQ ID NO: 85881 - DNA, 2325 bp, Arabidopsis thaliana
  misc_feature (1)..(2325): Ceres Seq. ID no. 12684301
  misc_feature (1)..(2325): Ortholog of  Ceres SEQ ID NO 13582534 as cited in SEQ ID NO 57409
atggggaagaagaggatagtgttctttgcttatttgcccttttttaccatctttatgagttttagctttgcagggataaccaaagagagtcccttttcaattggacaaactctcagctcctctaatggtgtttatgaattgggattcttcagtcttaataactcccaaaatcagtatctcggaatttggttcaagagtatcattccccaggtggttgtgtgggtggctaatagagaaaagcctgttacagactctgcggcaaatctcggtatcagcagcaatggtagtcttctgttatctaatggcaaacatggcgttgtgtggtctaccggagatatttttgcatctaatgggtctcgtgcagagcttacagaccatggaaatcttgttttcatagacaaagtttcgggaaggactctatggcaaagctttgagcatcttggtaatactctgctccctacgtcaattatgatgtataatctcgtcgctggtgagaagcgaggattgactgcttggaaaagttacaccgatccatcgcctggcgaatttgtggctctgattacaccgcaagtgccatcacaggggattattatgagaggctcgacacgttattatagaaccggtccatgggctaaaacaaggttcactggatcaccacaaatggatgaatcatacacaagtccattcatcttaacacaggatgtaaatgggtcaggatacttttcatttgttgaaagaggcaaaccttcacgcatgattttaacatcagagggaacaatgaaggtcttagtgcataatggaatggactgggaatcaacctacgagggtccagccaattcatgtgatatatatggcgtatgtggaccttttgggctttgtgttgtatcaattcctccaaaatgtaaatgcttcaaaggttttgttcctaaattcgctaaggagtggaagaaaggaaactggactagtggttgtgtgaggcgtaccgaactacattgtcaaggaaactccagtggcaaagatgcaaatgtcttctatactgttcccaacataaagcctccagacttttacgagtatgcaaattctcagaatgctgaagaatgccaccaaaattgcctccacaattgttcttgcttggcgttttcttatattcctggaatagggtgcttaatgtggagcaaggatctaatggacacaaggcaattttctgcagcaggagaacttctttccattcgtcttgcacgttctgagctagatgtaaataagcgcaagatgaccattgttgctagtacagtgagcctgaccctattcgtgatctttggatttgctgcatttggtttctggagatgcagagtggaacataatgctcatatatcaaacgatgcatggaggaattttctgcaatcacaagacgtcccaggtttagaattttttgagatgaatgccatacaaactgccaccaataatttcagtctatcaaacaaactcggtcctggtggatttggttctgtttacaaggcgagaaacggaaaactgcaagatggaagagaaattgcggtaaaacgtctttctagcagctctgggcagggcaaacaggagttcatgaatgaaatagtactgatatcaaaactccaacacagaaacttagtccgggttttgggatgctgcgtcgaaggaacagagaagctattgatttatgggttcttgaaaaacaaaagcctggatacttttgtctttgatgcaagaaaaaagctcgaacttgattggccaaagagatttgagatcattgaaggtattgcacgtggacttctctatctccaccgtgactcacgcctcagagtaattcaccgagacctgaaggtcagcaacattcttctggatgagaaaatgaacccgaaaatatcagattttggtttggctcggatgtttcagggaacccaatatcaggaaaaaactcgcagggttgtcggaactctaggatatatgtctcctgagtatgcatggactggcgtattctctgagaaatccgatatctacagtttcggagttctgttgttagaaatcatcagcggaaagaagatctcaagtttcagctatggcgaggagggaaaagcacttcttgcatatattggtttgctctgtgttcaacacgagcctgcagacagaccaaacacacttgagttgctgtctatgcttaccacaacatcagatcttcctctgcccaaaaaacccacatttgtagtgcacactagaaaagacgaatcaccgtcaaatgattcgatgatcactgtcaatgagatgacagagtctgtgatccaaggacgttga

SEQ ID NO: 85882 - protein, 774 aa, Arabidopsis thaliana
  peptide (1)..(774): Ceres Seq. ID no. 12684302
MGKKRIVFFAYLPFFTIFMSFSFAGITKESPFSIGQTLSSSNGVYELGFFSLNNSQNQYLGIWFKSIIPQVVVWVANREKPVTDSAANLGISSNGSLLLSNGKHGVVWSTGDIFASNGSRAELTDHGNLVFIDKVSGRTLWQSFEHLGNTLLPTSIMMYNLVAGEKRGLTAWKSYTDPSPGEFVALITPQVPSQGIIMRGSTRYYRTGPWAKTRFTGSPQMDESYTSPFILTQDVNGSGYFSFVERGKPSRMILTSEGTMKVLVHNGMDWESTYEGPANSCDIYGVCGPFGLCVVSIPPKCKCFKGFVPKFAKEWKKGNWTSGCVRRTELHCQGNSSGKDANVFYTVPNIKPPDFYEYANSQNAEECHQNCLHNCSCLAFSYIPGIGCLMWSKDLMDTRQFSAAGELLSIRLARSELDVNKRKMTIVASTVSLTLFVIFGFAAFGFWRCRVEHNAHISNDAWRNFLQSQDVPGLEFFEMNAIQTATNNFSLSNKLGPGGFGSVYKARNGKLQDGREIAVKRLSSSSGQGKQEFMNEIVLISKLQHRNLVRVLGCCVEGTEKLLIYGFLKNKSLDTFVFDARKKLELDWPKRFEIIEGIARGLLYLHRDSRLRVIHRDLKVSNILLDEKMNPKISDFGLARMFQGTQYQEKTRRVVGTLGYMSPEYAWTGVFSEKSDIYSFGVLLLEIISGKKISSFSYGEEGKALLAYIGLLCVQHEPADRPNTLELLSMLTTTSDLPLPKKPTFVVHTRKDESPSNDSMITVNEMTESVIQGR

SEQ ID NO: 85883 - protein, 756 aa, Arabidopsis thaliana
  peptide (1)..(756): Ceres Seq. ID no. 12684303
MSFSFAGITKESPFSIGQTLSSSNGVYELGFFSLNNSQNQYLGIWFKSIIPQVVVWVANREKPVTDSAANLGISSNGSLLLSNGKHGVVWSTGDIFASNGSRAELTDHGNLVFIDKVSGRTLWQSFEHLGNTLLPTSIMMYNLVAGEKRGLTAWKSYTDPSPGEFVALITPQVPSQGIIMRGSTRYYRTGPWAKTRFTGSPQMDESYTSPFILTQDVNGSGYFSFVERGKPSRMILTSEGTMKVLVHNGMDWESTYEGPANSCDIYGVCGPFGLCVVSIPPKCKCFKGFVPKFAKEWKKGNWTSGCVRRTELHCQGNSSGKDANVFYTVPNIKPPDFYEYANSQNAEECHQNCLHNCSCLAFSYIPGIGCLMWSKDLMDTRQFSAAGELLSIRLARSELDVNKRKMTIVASTVSLTLFVIFGFAAFGFWRCRVEHNAHISNDAWRNFLQSQDVPGLEFFEMNAIQTATNNFSLSNKLGPGGFGSVYKARNGKLQDGREIAVKRLSSSSGQGKQEFMNEIVLISKLQHRNLVRVLGCCVEGTEKLLIYGFLKNKSLDTFVFDARKKLELDWPKRFEIIEGIARGLLYLHRDSRLRVIHRDLKVSNILLDEKMNPKISDFGLARMFQGTQYQEKTRRVVGTLGYMSPEYAWTGVFSEKSDIYSFGVLLLEIISGKKISSFSYGEEGKALLAYIGLLCVQHEPADRPNTLELLSMLTTTSDLPLPKKPTFVVHTRKDESPSNDSMITVNEMTESVIQGR

SEQ ID NO: 85884 - protein, 618 aa, Arabidopsis thaliana
  peptide (1)..(618): Ceres Seq. ID no. 12684304
MMYNLVAGEKRGLTAWKSYTDPSPGEFVALITPQVPSQGIIMRGSTRYYRTGPWAKTRFTGSPQMDESYTSPFILTQDVNGSGYFSFVERGKPSRMILTSEGTMKVLVHNGMDWESTYEGPANSCDIYGVCGPFGLCVVSIPPKCKCFKGFVPKFAKEWKKGNWTSGCVRRTELHCQGNSSGKDANVFYTVPNIKPPDFYEYANSQNAEECHQNCLHNCSCLAFSYIPGIGCLMWSKDLMDTRQFSAAGELLSIRLARSELDVNKRKMTIVASTVSLTLFVIFGFAAFGFWRCRVEHNAHISNDAWRNFLQSQDVPGLEFFEMNAIQTATNNFSLSNKLGPGGFGSVYKARNGKLQDGREIAVKRLSSSSGQGKQEFMNEIVLISKLQHRNLVRVLGCCVEGTEKLLIYGFLKNKSLDTFVFDARKKLELDWPKRFEIIEGIARGLLYLHRDSRLRVIHRDLKVSNILLDEKMNPKISDFGLARMFQGTQYQEKTRRVVGTLGYMSPEYAWTGVFSEKSDIYSFGVLLLEIISGKKISSFSYGEEGKALLAYIGLLCVQHEPADRPNTLELLSMLTTTSDLPLPKKPTFVVHTRKDESPSNDSMITVNEMTESVIQGR

SEQ ID NO: 85885 - DNA, 2262 bp, Arabidopsis thaliana
  misc_feature (1)..(2262): Ceres Seq. ID no. 12684309
  misc_feature (1)..(2262): Ortholog of  Ceres SEQ ID NO 13582534 as cited in SEQ ID NO 57409
atgaggatcacgttctttgcttctttgctcttatttaccaataccatctttataagttttagctttgcaattgcagggataaacaaagagagtcctttgtcaataggacaaactctcagctcctctaatggagtttatgaattgggtttcttcagttttaataactcggaaaatcattatcttggaatctggttcaagggaatcattccccgggtggttgtgtgggtggccaatagagaaaatcctgttacagattccacagcaaatctcgctatcagcagcaacgcaagtcttctgttatataatggaaaacatggcgttgcatggtccagtggtgaaactcttgcttctaacgggtctcgtgcagagctttcagacaccggaaatcttattgtcatagacaatttttcgggaagaactctttggcaaagctttgaccatcttggtgatactatgcttcctttctcagctctgatgtataacctcgccactggcgagaagcaggtcttgacttcttggaaaagttacactaatccagcggttggtgactttgtgcttcagattacaacgcaagtgccaacacaagctttaactatgagaggctcgaagccttattggagaagcggtccatgggctaaaacaagaaacttcaaacttccacgtatagtgataacatcgaagggttcactggagatttctaggcatagtgggactgattgggtattgaactttgtggctccagcgcactcatgtgattattacggtgtatgtggaccttttgggatttgtgtcaagtcagtgtgtaaatgcttcaaagggtttataccaaaatatattgaggagtggaaaagaggaaattggactgatggttgtgtgaggcgtaccaaactacattgtcaggaaaactcaactaaaaaagatgcaaacttcttccatccagttgccaacataaagcctccagacttttacgaatttgcaagtgctgtggatgcagaaggatgctacaaaatttgcctccacaactgttcttgcttggccttttcttatattcatggaattgggtgcttaatatggaaccaagacttcatggacacagtgcaattttctgcaggaggagagattctttccattcgtcttgcacgttctgaattaggtgggaataagcgcaagaagaccattactgctagtattgtcagcctttctctttttctgatattgggttctactgcgtttggtttctggagatacagagttaaacataatgcttcacaagatgcaccgaaatatgatttggaaccacaagatgtctcaggttcatatttgtttgagatgaacaccattcaaactgccaccaataatttcagtctctcaaataaactgggacaaggtggatttggttcagtttacaagggaaagctgcaagatgggaaagaaattgctgtaaaacggctttctagcagctcagggcagggcaaagaggagttcatgaatgaaatagtactcatctcaaaactacaacacaaaaacttagttcggattttaggatgttgcattgaaggagaagagaggctgttgatttatgagtttatgttgaacaaaagccttgatacttttctcttcgattcaagaaaaaggcttgagattgactggccaaagagatttgatatcattcaaggtattgcgcgtggaattcactatctccatcgtgactcatgcctcaaggtaattcaccgtgatctgaaggtcagcaatattcttcttgacgagaagatgaatccaaagatatcagattttggattggctcggatgtatcagggaaccgaatatcaggacaatactcgcagggtcgtaggaactctaggatatatgtctccagaggatatattagaaatcataagcggagagaagatctcaagattcagctatggcaaagaagaaaaaacccttattgcatatatcaaacaacaggcatgggaatcttggtgtgaaactggaggagttgatcttttggataaagatgttgctgattcatgtcgcccattagaagttgagagatgtattcagattggtcttctctgtgttcaacaccaacctgcagacagaccaaacacacttgagttgatgtctatgctcacgacaacatcagatcttccatcaccaaaacaacccacatttgtagtgcactggagagatgacgaatcatcgtctaaggatttgatcactgtgaatgagatgacaaagtctgtgatcttagggcgttga

SEQ ID NO: 85886 - protein, 753 aa, Arabidopsis thaliana
  peptide (1)..(753): Ceres Seq. ID no. 12684310
MRITFFASLLLFTNTIFISFSFAIAGINKESPLSIGQTLSSSNGVYELGFFSFNNSENHYLGIWFKGIIPRVVVWVANRENPVTDSTANLAISSNASLLLYNGKHGVAWSSGETLASNGSRAELSDTGNLIVIDNFSGRTLWQSFDHLGDTMLPFSALMYNLATGEKQVLTSWKSYTNPAVGDFVLQITTQVPTQALTMRGSKPYWRSGPWAKTRNFKLPRIVITSKGSLEISRHSGTDWVLNFVAPAHSCDYYGVCGPFGICVKSVCKCFKGFIPKYIEEWKRGNWTDGCVRRTKLHCQENSTKKDANFFHPVANIKPPDFYEFASAVDAEGCYKICLHNCSCLAFSYIHGIGCLIWNQDFMDTVQFSAGGEILSIRLARSELGGNKRKKTITASIVSLSLFLILGSTAFGFWRYRVKHNASQDAPKYDLEPQDVSGSYLFEMNTIQTATNNFSLSNKLGQGGFGSVYKGKLQDGKEIAVKRLSSSSGQGKEEFMNEIVLISKLQHKNLVRILGCCIEGEERLLIYEFMLNKSLDTFLFDSRKRLEIDWPKRFDIIQGIARGIHYLHRDSCLKVIHRDLKVSNILLDEKMNPKISDFGLARMYQGTEYQDNTRRVVGTLGYMSPEDILEIISGEKISRFSYGKEEKTLIAYIKQQAWESWCETGGVDLLDKDVADSCRPLEVERCIQIGLLCVQHQPADRPNTLELMSMLTTTSDLPSPKQPTFVVHWRDDESSSKDLITVNEMTKSVILGR

SEQ ID NO: 85887 - protein, 602 aa, Arabidopsis thaliana
  peptide (1)..(602): Ceres Seq. ID no. 12684311
MLPFSALMYNLATGEKQVLTSWKSYTNPAVGDFVLQITTQVPTQALTMRGSKPYWRSGPWAKTRNFKLPRIVITSKGSLEISRHSGTDWVLNFVAPAHSCDYYGVCGPFGICVKSVCKCFKGFIPKYIEEWKRGNWTDGCVRRTKLHCQENSTKKDANFFHPVANIKPPDFYEFASAVDAEGCYKICLHNCSCLAFSYIHGIGCLIWNQDFMDTVQFSAGGEILSIRLARSELGGNKRKKTITASIVSLSLFLILGSTAFGFWRYRVKHNASQDAPKYDLEPQDVSGSYLFEMNTIQTATNNFSLSNKLGQGGFGSVYKGKLQDGKEIAVKRLSSSSGQGKEEFMNEIVLISKLQHKNLVRILGCCIEGEERLLIYEFMLNKSLDTFLFDSRKRLEIDWPKRFDIIQGIARGIHYLHRDSCLKVIHRDLKVSNILLDEKMNPKISDFGLARMYQGTEYQDNTRRVVGTLGYMSPEDILEIISGEKISRFSYGKEEKTLIAYIKQQAWESWCETGGVDLLDKDVADSCRPLEVERCIQIGLLCVQHQPADRPNTLELMSMLTTTSDLPSPKQPTFVVHWRDDESSSKDLITVNEMTKSVILGR

SEQ ID NO: 85888 - protein, 595 aa, Arabidopsis thaliana
  peptide (1)..(595): Ceres Seq. ID no. 12684312
MYNLATGEKQVLTSWKSYTNPAVGDFVLQITTQVPTQALTMRGSKPYWRSGPWAKTRNFKLPRIVITSKGSLEISRHSGTDWVLNFVAPAHSCDYYGVCGPFGICVKSVCKCFKGFIPKYIEEWKRGNWTDGCVRRTKLHCQENSTKKDANFFHPVANIKPPDFYEFASAVDAEGCYKICLHNCSCLAFSYIHGIGCLIWNQDFMDTVQFSAGGEILSIRLARSELGGNKRKKTITASIVSLSLFLILGSTAFGFWRYRVKHNASQDAPKYDLEPQDVSGSYLFEMNTIQTATNNFSLSNKLGQGGFGSVYKGKLQDGKEIAVKRLSSSSGQGKEEFMNEIVLISKLQHKNLVRILGCCIEGEERLLIYEFMLNKSLDTFLFDSRKRLEIDWPKRFDIIQGIARGIHYLHRDSCLKVIHRDLKVSNILLDEKMNPKISDFGLARMYQGTEYQDNTRRVVGTLGYMSPEDILEIISGEKISRFSYGKEEKTLIAYIKQQAWESWCETGGVDLLDKDVADSCRPLEVERCIQIGLLCVQHQPADRPNTLELMSMLTTTSDLPSPKQPTFVVHWRDDESSSKDLITVNEMTKSVILGR

SEQ ID NO: 85889 - DNA, 2454 bp, Arabidopsis thaliana
  misc_feature (1)..(2454): Ceres Seq. ID no. 12684317
  misc_feature (1)..(2454): Ortholog of  Ceres SEQ ID NO 13582534 as cited in SEQ ID NO 57409
atggggaagaagaggatcatgttctttgcttccttgctcttaattaccatctttttaagtttcagctatgcagggataacgagagaaagtcctctgtcaataggaaaaactctcagctcctctaatggagtttatgaattgggattcttcagttttaataactcccaaaatcagtatgttggaatctggttcaagggtatcattccccgggtggttgtgtgggtggccaatagagaaaagcctgttacagactctgcagcaaatttaactatcagcagcaatggaagtcttctgttgtttaatgaaaatcatagcgttgtgtggtccattggagaaacttttgcatctaacgggtctcgtgcggagcttacagacaacggaaatttagttgtcatagacaataattcgggaagaactctatgggaaagctttgagcattttggtgacactatgctacctttctcaaacctgatgtataatcttgccacaggtgagaagcgggtgttgacttcttggaaaagtcacactgatccatcgcctggcgattttacggttcagattacaccgcaagttccatcccaggcgtgtactatgagaggctcaaagacttattggagaagcggtccatgggctaaaacaaggttcaccgggatacctgtaatggatgacacatatacaagtccattcagccttcagcaagatacaaacgggtcaggatccttcacttattttgaaagaaacttcaaactttcatatataatgataacatcagaaggctcactgaagatttttcagcataatggaatggactgggaattaaacttcgaggctccagaaaattcatgcgatatttacggcttttgtggaccttttggaatttgtgttatgtcagtacctccaaagtgtaaatgcttcaaagggtttgtaccaaaatccattgaggagtggaaaagaggaaactggactgatggttgtgtgaggcatactgaactacattgccaaggaaacactaatggtaaaactgtaaacggcttctatcacgttgccaacataaagcctccagacttttacgaatttgcaagttttgtggatgctgaaggatgctaccaaatttgcctccacaattgttcttgcttggcctttgcttatatcaatggaataggttgcttaatgtggaaccaagacctaatggacgcagtgcaattttctgcagggggagaaattctttccattcgccttgcaagttctgaactaggtggaaataagcgcaacaaaatcattgttgctagtattctaatgcatggtaacacactgactattattgaaagtctagtttcagcgaagatatcaaagattgcttcaaaagaggcatggaataatgatctagagccacaagatgtctcaggtttaaagttctttgagatgaataccattcaaactgccactgataatttcagtctctcaaataaactaggacaaggtggatttggctcagtttacaagggaaagctgcaagatgggaaagaaattgctgtaaaacggctttctagcagctccggacagggaaaagaggagttcatgaatgaaatagtactcatctcgaaactacaacataaaaacttggttaggattctgggatgttgcattgaaggagaagagaggctgttggtatatgagtttttgctgaacaaaagccttgatacttttctcttcgttctgatcgtttctatacggtattattgcttagattcaagaaaaaggcttgagattgactggcctaagagatttaatatcattgaaggcattgcgcgtgggcttcactatctccaccgtgactcatgcctcagggtcattcaccgtgatcttaaggttagcaatattcttctggatgagaagatgaacccaaaaatatcagactttggattggctcggatgtatcagggaaccgaatatcaggacaacactcgtagggttgcaggaactctaggatatatggctcccgagtatgcatggactgggatgttctctgagaaatcagatatctacagttttggagttatactgttggaaatcatcaccggggagaagatctcaagattcagctatggtagacaaggaaaaacccttcttgcatatgtaaacctgaaacctaaacaacaggcatgggaatcttggtgtgaaagtggaggaatcgatcttttggataaagatgttgctgattcatgtcacccattagaagttgagagatgtgtgcagattggtttgctatgtgttcaacaccaacctgctgatagaccaaacacaatggagttgttgtctatgctcaccacaacatcagatcttacatcaccaaaacagcccacatttgtagtgcacacgagagatgaagaatctctgtctcagggtttgatcaccgtcaatgagatgacccaatctgtgatccttgggcgttaa

SEQ ID NO: 85890 - protein, 817 aa, Arabidopsis thaliana
  peptide (1)..(817): Ceres Seq. ID no. 12684318
MGKKRIMFFASLLLITIFLSFSYAGITRESPLSIGKTLSSSNGVYELGFFSFNNSQNQYVGIWFKGIIPRVVVWVANREKPVTDSAANLTISSNGSLLLFNENHSVVWSIGETFASNGSRAELTDNGNLVVIDNNSGRTLWESFEHFGDTMLPFSNLMYNLATGEKRVLTSWKSHTDPSPGDFTVQITPQVPSQACTMRGSKTYWRSGPWAKTRFTGIPVMDDTYTSPFSLQQDTNGSGSFTYFERNFKLSYIMITSEGSLKIFQHNGMDWELNFEAPENSCDIYGFCGPFGICVMSVPPKCKCFKGFVPKSIEEWKRGNWTDGCVRHTELHCQGNTNGKTVNGFYHVANIKPPDFYEFASFVDAEGCYQICLHNCSCLAFAYINGIGCLMWNQDLMDAVQFSAGGEILSIRLASSELGGNKRNKIIVASILMHGNTLTIIESLVSAKISKIASKEAWNNDLEPQDVSGLKFFEMNTIQTATDNFSLSNKLGQGGFGSVYKGKLQDGKEIAVKRLSSSSGQGKEEFMNEIVLISKLQHKNLVRILGCCIEGEERLLVYEFLLNKSLDTFLFVLIVSIRYYCLDSRKRLEIDWPKRFNIIEGIARGLHYLHRDSCLRVIHRDLKVSNILLDEKMNPKISDFGLARMYQGTEYQDNTRRVAGTLGYMAPEYAWTGMFSEKSDIYSFGVILLEIITGEKISRFSYGRQGKTLLAYVNLKPKQQAWESWCESGGIDLLDKDVADSCHPLEVERCVQIGLLCVQHQPADRPNTMELLSMLTTTSDLTSPKQPTFVVHTRDEESLSQGLITVNEMTQSVILGR

SEQ ID NO: 85891 - protein, 811 aa, Arabidopsis thaliana
  peptide (1)..(811): Ceres Seq. ID no. 12684319
MFFASLLLITIFLSFSYAGITRESPLSIGKTLSSSNGVYELGFFSFNNSQNQYVGIWFKGIIPRVVVWVANREKPVTDSAANLTISSNGSLLLFNENHSVVWSIGETFASNGSRAELTDNGNLVVIDNNSGRTLWESFEHFGDTMLPFSNLMYNLATGEKRVLTSWKSHTDPSPGDFTVQITPQVPSQACTMRGSKTYWRSGPWAKTRFTGIPVMDDTYTSPFSLQQDTNGSGSFTYFERNFKLSYIMITSEGSLKIFQHNGMDWELNFEAPENSCDIYGFCGPFGICVMSVPPKCKCFKGFVPKSIEEWKRGNWTDGCVRHTELHCQGNTNGKTVNGFYHVANIKPPDFYEFASFVDAEGCYQICLHNCSCLAFAYINGIGCLMWNQDLMDAVQFSAGGEILSIRLASSELGGNKRNKIIVASILMHGNTLTIIESLVSAKISKIASKEAWNNDLEPQDVSGLKFFEMNTIQTATDNFSLSNKLGQGGFGSVYKGKLQDGKEIAVKRLSSSSGQGKEEFMNEIVLISKLQHKNLVRILGCCIEGEERLLVYEFLLNKSLDTFLFVLIVSIRYYCLDSRKRLEIDWPKRFNIIEGIARGLHYLHRDSCLRVIHRDLKVSNILLDEKMNPKISDFGLARMYQGTEYQDNTRRVAGTLGYMAPEYAWTGMFSEKSDIYSFGVILLEIITGEKISRFSYGRQGKTLLAYVNLKPKQQAWESWCESGGIDLLDKDVADSCHPLEVERCVQIGLLCVQHQPADRPNTMELLSMLTTTSDLTSPKQPTFVVHTRDEESLSQGLITVNEMTQSVILGR

SEQ ID NO: 85892 - protein, 667 aa, Arabidopsis thaliana
  peptide (1)..(667): Ceres Seq. ID no. 12684320
MLPFSNLMYNLATGEKRVLTSWKSHTDPSPGDFTVQITPQVPSQACTMRGSKTYWRSGPWAKTRFTGIPVMDDTYTSPFSLQQDTNGSGSFTYFERNFKLSYIMITSEGSLKIFQHNGMDWELNFEAPENSCDIYGFCGPFGICVMSVPPKCKCFKGFVPKSIEEWKRGNWTDGCVRHTELHCQGNTNGKTVNGFYHVANIKPPDFYEFASFVDAEGCYQICLHNCSCLAFAYINGIGCLMWNQDLMDAVQFSAGGEILSIRLASSELGGNKRNKIIVASILMHGNTLTIIESLVSAKISKIASKEAWNNDLEPQDVSGLKFFEMNTIQTATDNFSLSNKLGQGGFGSVYKGKLQDGKEIAVKRLSSSSGQGKEEFMNEIVLISKLQHKNLVRILGCCIEGEERLLVYEFLLNKSLDTFLFVLIVSIRYYCLDSRKRLEIDWPKRFNIIEGIARGLHYLHRDSCLRVIHRDLKVSNILLDEKMNPKISDFGLARMYQGTEYQDNTRRVAGTLGYMAPEYAWTGMFSEKSDIYSFGVILLEIITGEKISRFSYGRQGKTLLAYVNLKPKQQAWESWCESGGIDLLDKDVADSCHPLEVERCVQIGLLCVQHQPADRPNTMELLSMLTTTSDLTSPKQPTFVVHTRDEESLSQGLITVNEMTQSVILGR

SEQ ID NO: 85893 - DNA, 2319 bp, Arabidopsis thaliana
  misc_feature (1)..(2319): Ceres Seq. ID no. 12684321
  misc_feature (1)..(2319): Ortholog of  Ceres SEQ ID NO 13582534 as cited in SEQ ID NO 57409
atggggaagaagaggattgtgttctttgcttgtttgctcttgtttaccgtcctattacgttttagctatgcagggataacgacagaaagtcctttgtcagtcgaacaaacactcagctcctctaatggaatttatgaattggggtttttcagtcctaataactcccaaaatctgtatgtgggaatctggttcaagggtatcattccccgggtggttgtgtgggtggcaaatagagaaacacctactacagacacatcggcaaatcttgctatcagcagcaatggtagtcttctattgtttaatggcaaacatggtgttgtgtggtccatcggagaaaattttgcatctaatgggtctcgtgcagagcttacagacaacggaaatctagttgtcatagacaatgcttcgggaagaactttatgggaaagctttgagcactttggtgacactatgctacctttctcaagcctgatgtataatctcgccacaggtgagaagcgggtgttgacttcttggaaaactgacactgatccatcgcctggcgtatttgtgggtcagattacaccacaagtgccatcacaggtgcttattatgagaggctcgacgcgttattatagaaccggtccatgggctaaaacaaggttcacagggataccactaatggatgacacatatgcaagtccattcagccttcagcaggatgctaacgggtcaggattctttacttattttgatagaagtttcaaactttcacgtataattatatcatcagaaggatcaatgaaaaggtttcggcataatggaacggactgggaattaagctacatggctccagccaattcatgcgatatttacggtgtatgtggaccatttgggttgtgtattgtgtcagtacctttaaagtgcaaatgcttgaaaggatttgttcctcattccactgaggaatggaaaagaggaaactggactggtggttgtgcgaggcttacggaactacattgtcaaggaaactctactggcaaagatgtaaatatcttccatcctgttaccaacgtaaagcttccagacttttacgaatatgaaagttctgtggatgctgaagaatgccaccaaagttgcctccacaattgttcttgcttggcctttgcttatatccatggaatagggtgcttaatctggaaccagaacctaatggacgctgtgcaattttctgctggaggagaaattctgtccattcgtcttgcacactctgaactaggtggaaataagcgcaacaaaatcattgttgctagtactgtgagcctttctctgtttgtgatattgacttctgctgcatttggtttctggagatacagagtgaaacataaagcctatacgttaaaggatgcctggaggaatgatctgaaatcaaaggaggtcccaggtttagaattttttgagatgaataccatacaaactgccaccaataatttcagtctatcaaacaaactcggacaaggtggatttggttctgtttacaagggaaagttacaagatgggaaagaaattgctgtaaaacagctttctagcagctccggacagggaaaagaggagttcatgaatgaaatagtactgatatcaaaactccaacacagaaacttagtccgggttttgggatgttgcatcgaaggagaagagaaactactgatctatgagtttatgttgaacaaaagccttgatacttttgtctttgatgcaagaaaaaagctcgaggttgattggccaaagagatttgatatcgttcaaggtattgcacgtggacttctttatcttcaccgtgactcacgcctcaaggtaattcaccgagacctgaaggtcagcaacattcttctggatgagaaaatgaacccgaaaatatcagattttggattggctcggatgtatgagggaacccaatgtcaggacaaaactcgcagggttgtaggaactctaggatatatgtctcctgagtatgcatggaccggagtattctctgagaaatcagacatttacagcttcggagttctactgctagaaattatcatcggagagaagatctcaaggttcagctatggcgaagaaggaaaaacacttctcgcatatattggtctgctctgtgtacaacaccaacctgcagacagaccaaacacacttgagttgctggctatgctcacgacaacatcagatcttccatcaccaaaacaacccacatttgtagtgcactctagggatgatgaatcatctctgtctaaggatttgtttaccgtcaatgagatgacacaatctatgatccttgggcgttaa

SEQ ID NO: 85894 - protein, 772 aa, Arabidopsis thaliana
  peptide (1)..(772): Ceres Seq. ID no. 12684322
MGKKRIVFFACLLLFTVLLRFSYAGITTESPLSVEQTLSSSNGIYELGFFSPNNSQNLYVGIWFKGIIPRVVVWVANRETPTTDTSANLAISSNGSLLLFNGKHGVVWSIGENFASNGSRAELTDNGNLVVIDNASGRTLWESFEHFGDTMLPFSSLMYNLATGEKRVLTSWKTDTDPSPGVFVGQITPQVPSQVLIMRGSTRYYRTGPWAKTRFTGIPLMDDTYASPFSLQQDANGSGFFTYFDRSFKLSRIIISSEGSMKRFRHNGTDWELSYMAPANSCDIYGVCGPFGLCIVSVPLKCKCLKGFVPHSTEEWKRGNWTGGCARLTELHCQGNSTGKDVNIFHPVTNVKLPDFYEYESSVDAEECHQSCLHNCSCLAFAYIHGIGCLIWNQNLMDAVQFSAGGEILSIRLAHSELGGNKRNKIIVASTVSLSLFVILTSAAFGFWRYRVKHKAYTLKDAWRNDLKSKEVPGLEFFEMNTIQTATNNFSLSNKLGQGGFGSVYKGKLQDGKEIAVKQLSSSSGQGKEEFMNEIVLISKLQHRNLVRVLGCCIEGEEKLLIYEFMLNKSLDTFVFDARKKLEVDWPKRFDIVQGIARGLLYLHRDSRLKVIHRDLKVSNILLDEKMNPKISDFGLARMYEGTQCQDKTRRVVGTLGYMSPEYAWTGVFSEKSDIYSFGVLLLEIIIGEKISRFSYGEEGKTLLAYIGLLCVQHQPADRPNTLELLAMLTTTSDLPSPKQPTFVVHSRDDESSLSKDLFTVNEMTQSMILGR

SEQ ID NO: 85895 - protein, 622 aa, Arabidopsis thaliana
  peptide (1)..(622): Ceres Seq. ID no. 12684323
MLPFSSLMYNLATGEKRVLTSWKTDTDPSPGVFVGQITPQVPSQVLIMRGSTRYYRTGPWAKTRFTGIPLMDDTYASPFSLQQDANGSGFFTYFDRSFKLSRIIISSEGSMKRFRHNGTDWELSYMAPANSCDIYGVCGPFGLCIVSVPLKCKCLKGFVPHSTEEWKRGNWTGGCARLTELHCQGNSTGKDVNIFHPVTNVKLPDFYEYESSVDAEECHQSCLHNCSCLAFAYIHGIGCLIWNQNLMDAVQFSAGGEILSIRLAHSELGGNKRNKIIVASTVSLSLFVILTSAAFGFWRYRVKHKAYTLKDAWRNDLKSKEVPGLEFFEMNTIQTATNNFSLSNKLGQGGFGSVYKGKLQDGKEIAVKQLSSSSGQGKEEFMNEIVLISKLQHRNLVRVLGCCIEGEEKLLIYEFMLNKSLDTFVFDARKKLEVDWPKRFDIVQGIARGLLYLHRDSRLKVIHRDLKVSNILLDEKMNPKISDFGLARMYEGTQCQDKTRRVVGTLGYMSPEYAWTGVFSEKSDIYSFGVLLLEIIIGEKISRFSYGEEGKTLLAYIGLLCVQHQPADRPNTLELLAMLTTTSDLPSPKQPTFVVHSRDDESSLSKDLFTVNEMTQSMILGR

SEQ ID NO: 85896 - protein, 615 aa, Arabidopsis thaliana
  peptide (1)..(615): Ceres Seq. ID no. 12684324
MYNLATGEKRVLTSWKTDTDPSPGVFVGQITPQVPSQVLIMRGSTRYYRTGPWAKTRFTGIPLMDDTYASPFSLQQDANGSGFFTYFDRSFKLSRIIISSEGSMKRFRHNGTDWELSYMAPANSCDIYGVCGPFGLCIVSVPLKCKCLKGFVPHSTEEWKRGNWTGGCARLTELHCQGNSTGKDVNIFHPVTNVKLPDFYEYESSVDAEECHQSCLHNCSCLAFAYIHGIGCLIWNQNLMDAVQFSAGGEILSIRLAHSELGGNKRNKIIVASTVSLSLFVILTSAAFGFWRYRVKHKAYTLKDAWRNDLKSKEVPGLEFFEMNTIQTATNNFSLSNKLGQGGFGSVYKGKLQDGKEIAVKQLSSSSGQGKEEFMNEIVLISKLQHRNLVRVLGCCIEGEEKLLIYEFMLNKSLDTFVFDARKKLEVDWPKRFDIVQGIARGLLYLHRDSRLKVIHRDLKVSNILLDEKMNPKISDFGLARMYEGTQCQDKTRRVVGTLGYMSPEYAWTGVFSEKSDIYSFGVLLLEIIIGEKISRFSYGEEGKTLLAYIGLLCVQHQPADRPNTLELLAMLTTTSDLPSPKQPTFVVHSRDDESSLSKDLFTVNEMTQSMILGR

SEQ ID NO: 85897 - DNA, 1173 bp, Arabidopsis thaliana
  misc_feature (1)..(1173): Ceres Seq. ID no. 12684351
  misc_feature (1)..(1173): Ortholog of  Ceres SEQ ID NO 13645078 as cited in SEQ ID NO 51158
atgtctcacagaaagtttgagcatccaagacatggttctttgggtttccttccaaggaaaagagctagccgacaccgtgggaaagtgaaggccttccctaaggatgatccaactaagccttgcagactcacctccttcttgggatacaaagctgggatgactcacattgtgagagatgttgaaaaacctggatcaaaactacacaagaaggaaacatgtgaagctgtgacgatcattgagacacctccaatggtggttgttggtgtggttggttatgtaaagacacctcgtggtctgcggtctctatgcactgtgtgggctcagcatctgagcgaagaattgagaaggaggttctacaagaactgggccaagtcaaagaagaaggctttcactagatattctaagaaacatgaaactgaagaagggaaaaaagatattcaaagtcaattggagaagatgaagaagtactgctctgtcatcagagttcttgctcacactcagataaggaaaatgaaagggctgaagcagaagaaggcacatctgaatgagattcagatcaatggtggagatatagcaaagaaagttgactatgcctgcagtttatttgaaaaacaagtcccagttgatgccatcttccagaaagatgaaatgattgatatcattggtgtcaccaaaggaaaaggttatgaaggtgtggttacaagatggggagtgacccgacttccaagaaagactcatcgtggtcttcgcaaggttgcttgtatcggtgcttggcatccagctagagtctcctacacggtggctagagctggacaaaacggttaccatcaccgtactgaaatgaacaagaaggtataccgggttgggaaagttggccaggagactcactcagccatgaccgagtatgacagaaccgagaaggatatcacaccaatgggaggatttccccactatgggatagtgaaggaagattatttgatgatcaagggatgttgcgtggggcctaagaaacgtgtggtgactttaagacagactttgcttaagcagacgtctaggcttgctatggaggagatcaagcttaagttcattgacgctgcttccaatgggggacacggtcgtttccagacttctcaagagaaggccaagttctatggtagaaccatcaaagcttag

SEQ ID NO: 85898 - protein, 390 aa, Arabidopsis thaliana; identical to SEQ ID NO: 23529
  peptide (1)..(390): Ceres Seq. ID no. 12684352

SEQ ID NO: 85899 - protein, 338 aa, Arabidopsis thaliana; identical to SEQ ID NO: 23530
  peptide (1)..(338): Ceres Seq. ID no. 12684353

SEQ ID NO: 85900 - protein, 307 aa, Arabidopsis thaliana
  peptide (1)..(307): Ceres Seq. ID no. 12684354
MVVVGVVGYVKTPRGLRSLCTVWAQHLSEELRRRFYKNWAKSKKKAFTRYSKKHETEEGKKDIQSQLEKMKKYCSVIRVLAHTQIRKMKGLKQKKAHLNEIQINGGDIAKKVDYACSLFEKQVPVDAIFQKDEMIDIIGVTKGKGYEGVVTRWGVTRLPRKTHRGLRKVACIGAWHPARVSYTVARAGQNGYHHRTEMNKKVYRVGKVGQETHSAMTEYDRTEKDITPMGGFPHYGIVKEDYLMIKGCCVGPKKRVVTLRQTLLKQTSRLAMEEIKLKFIDAASNGGHGRFQTSQEKAKFYGRTIKA

SEQ ID NO: 85901 - DNA, 1710 bp, Arabidopsis thaliana
  misc_feature (1)..(1710): Ceres Seq. ID no. 12684370
  misc_feature (1)..(1710): Ortholog of  Ceres SEQ ID NO 14310592 as cited in SEQ ID NO 55379
atggccttaatagctaccaaaataagttcacgttcttgttttgtttctgcttatccaaacaattctccaacgtttctgatatccaaatttcccaatacggtcgattctttgtcgcctgcaaatactgctaaaagatcgatcttgagaaacgtccatgcttcagtttctaacccttcgaagcagtttcataataagacatccttagaatatttacacgagttgaatatcaagaagatcaagaatatactaagtgcaaacgtagatgttccatccgagaacctggagatgatcgatgtcattcaaagtttaggcattgatctccattttcgacaagagatcgagcaaacccttcacatgatttacaaagaaggcctccaattcaacggtgatctccatgagatagcgcttcgctttcgattgctgagacaagagggtcactatgttcaagaaattattttcaaaaacatcctagacaagaagggtggatttaaagacgtagtaaaaaatgacgtcaagggtctaacagaattgtttgaagcttctgagctccgtgtagaaggtgaagaaacactcgacggtgcgagagaattcacatatagccgccttaatgaactttgctcaggtagagaaagtcatcaaaagcaagagataatgaagtctttggcgcaacctcgccacaaaaccgtaagaggattaacgtccaagaggttcacaagcatgatcaaaatcgcgggtcaagaagatccagaatggttacagtctctattacgagtggcggagatcgattccattaggctaaagtcattgactcaaggagaaatgtctcaaacatttaaatggtggacagaacttggtttagaaaaagatgtggagaaggcaagaagccagccgttaaaatggcatacgtggtccatgaaaattcttcaagatccgaccttaaccgaacaaaggcttgatcttaccaaaccaatatcgcttgtttatgttatagatgacattttcgatgtctatggggagctagaagaactaaccatcttcacacgagttgttgagagatgggatcataaggggcttaagacgctacccaaatacatgagggtttgttttgaagctctagatatgatcacaacggagattagcatgaagatctacaaatcacatggttggaacccgacatacgctcttcgacaatcgtgggcaagtttgtgtaaagcattcttggtagaagcaaagtggtttaattcgggttacttacccaccactgaagagtatatgaagaatggggttgtgagttcaggtgttcatttagtgatgcttcatgcctatatcttgttaggcgaagaactaacaaaagagaaagtcgaactaatagagagtaacccggggattgtatcatctgcagctacaattctcaggctctgggatgatctcggaagtgccaaggatgagaaccaagatggaactgatggatcatatgtagagtgttacctgaacgagtacaagggatcaactgttgatgaagcaagaacacatgttgcccagaagatatctagagcatggaaacgcttgaacagggagtgtctgaatccatgtccattctcaagatcattctcaaaagcttgtctcaacattgcaagaacagttcctttaatgtacagctatgatgatgatcaacgacttcccgacgaatatctcaagtctctaatgtaa

SEQ ID NO: 85902 - protein, 569 aa, Arabidopsis thaliana
  peptide (1)..(569): Ceres Seq. ID no. 12684371
MALIATKISSRSCFVSAYPNNSPTFLISKFPNTVDSLSPANTAKRSILRNVHASVSNPSKQFHNKTSLEYLHELNIKKIKNILSANVDVPSENLEMIDVIQSLGIDLHFRQEIEQTLHMIYKEGLQFNGDLHEIALRFRLLRQEGHYVQEIIFKNILDKKGGFKDVVKNDVKGLTELFEASELRVEGEETLDGAREFTYSRLNELCSGRESHQKQEIMKSLAQPRHKTVRGLTSKRFTSMIKIAGQEDPEWLQSLLRVAEIDSIRLKSLTQGEMSQTFKWWTELGLEKDVEKARSQPLKWHTWSMKILQDPTLTEQRLDLTKPISLVYVIDDIFDVYGELEELTIFTRVVERWDHKGLKTLPKYMRVCFEALDMITTEISMKIYKSHGWNPTYALRQSWASLCKAFLVEAKWFNSGYLPTTEEYMKNGVVSSGVHLVMLHAYILLGEELTKEKVELIESNPGIVSSAATILRLWDDLGSAKDENQDGTDGSYVECYLNEYKGSTVDEARTHVAQKISRAWKRLNRECLNPCPFSRSFSKACLNIARTVPLMYSYDDDQRLPDEYLKSLM

SEQ ID NO: 85903 - protein, 474 aa, Arabidopsis thaliana; identical to SEQ ID NO: 80766
  peptide (1)..(474): Ceres Seq. ID no. 12684372

SEQ ID NO: 85904 - protein, 451 aa, Arabidopsis thaliana; identical to SEQ ID NO: 80767
  peptide (1)..(451): Ceres Seq. ID no. 12684373

SEQ ID NO: 85905 - DNA, 1377 bp, Arabidopsis thaliana
  misc_feature (1)..(1377): Ceres Seq. ID no. 12684397
  misc_feature (1)..(1377): Ortholog of  Ceres SEQ ID NO 14301676 as cited in SEQ ID NO 67423
atgagaaacaatttcgtccctataattctctccttcatcatcttcttgactccatcaatcgcagaacaagaaccttcaattctttctcccgtcgatcaactcctcaacaaaacaagctcatacctcgatttttcaacaaaattcaaccaaccaagaatcgaactaacaacatcaacgatcatcgccggcttactctctttcctagcttcatcaatctcaagcgccggtggaatcggcggtggaggtttatatgttccgataatgacaatcgtggccggtctcgatctaaagacagcttcaagcttctcagcttttatggttactggtggatctatagctaacgtgggatgcaatctattcgttagaaaccctaaatctggtggcaaaaccctaatcgacttcgatttagctcttttattggaaccatgtatgcttcttggagttagtattggtgtgatctgtaatcttgtttttccgaactggttgattacgagtctcttcgctgtgtttcttgcgtggtcgacgttgaagacttttggaaatggactttattattggagattggaatcggagatggtgaagattagagaatcgaatagaattgaagaagatgatgaagaagataagattgagagtctaaagttgcctctcttggaggattatcagagaccaaagaggtttccatggattaagcttggagttttggtcattatttggctttcttacttcgcagtttatcttcttcgaggaaacaaatatggcgagggaatcatatcgatcgagccatgtggaaacgcctactggctcatttcatcgtctcaaataccactaactctcttcttcactctctggatctgcttcagtgacaatgttcaaagccaacaacaatcagattaccatgtctcagtaaaggatgtagaagatttgagatcaaatgatggagcaagatcaaacaagtgtatgttccctgtaatggctctattagctggagttttgggtggtgtttttggtattggaggtggaatgctcattagtcctcttcttctccaagttggtatcgctcccgaggtaactgcagcgacatgttctttcatggttcttttttcatcaacgatgtctgcgattcaatacttattactaggcatggaacataccggaaccgcaagtatatttgcggttatatgttttgtggcatcactcgtgggactaaaggtggttcaaaaggtaataaccgagtatggaagggcttcgatcattgtgttctcggttggtatcgtcatggcattgagtattgtgttgatgacaagctatggagctcttgatgtttggaatgattatgtctctggtcgttacatgggtttcaagttaccttgttga

SEQ ID NO: 85906 - protein, 458 aa, Arabidopsis thaliana
  peptide (1)..(458): Ceres Seq. ID no. 12684398
MRNNFVPIILSFIIFLTPSIAEQEPSILSPVDQLLNKTSSYLDFSTKFNQPRIELTTSTIIAGLLSFLASSISSAGGIGGGGLYVPIMTIVAGLDLKTASSFSAFMVTGGSIANVGCNLFVRNPKSGGKTLIDFDLALLLEPCMLLGVSIGVICNLVFPNWLITSLFAVFLAWSTLKTFGNGLYYWRLESEMVKIRESNRIEEDDEEDKIESLKLPLLEDYQRPKRFPWIKLGVLVIIWLSYFAVYLLRGNKYGEGIISIEPCGNAYWLISSSQIPLTLFFTLWICFSDNVQSQQQSDYHVSVKDVEDLRSNDGARSNKCMFPVMALLAGVLGGVFGIGGGMLISPLLLQVGIAPEVTAATCSFMVLFSSTMSAIQYLLLGMEHTGTASIFAVICFVASLVGLKVVQKVITEYGRASIIVFSVGIVMALSIVLMTSYGALDVWNDYVSGRYMGFKLPC

SEQ ID NO: 85907 - protein, 371 aa, Arabidopsis thaliana; identical to SEQ ID NO: 77763
  peptide (1)..(371): Ceres Seq. ID no. 12684399

SEQ ID NO: 85908 - protein, 353 aa, Arabidopsis thaliana; identical to SEQ ID NO: 77764
  peptide (1)..(353): Ceres Seq. ID no. 12684400

SEQ ID NO: 85909 - DNA, 1041 bp, Arabidopsis thaliana
  misc_feature (1)..(1041): Ceres Seq. ID no. 12684403
  misc_feature (1)..(1041): Ortholog of  Ceres SEQ ID NO 13600220 as cited in SEQ ID NO 0
atgcagaaagatttcgggtacttagctgatatatgtttcaaacattttggagaccgagttaaacactggatcacgattaacgaaccaaaccaacatataagcttagcatatcgaagtggtttgtttccaccagcgcggtgctccatgccatacggaaattgtactcacgggaactcagaaactgagccttttatagccgctcataatatgatcctcgcacatgcaaaggcgattcaaatataccgaaccaaatatcaaagagaacaaaagggaatcattggcattgtggtacaaacatcatggtttgaacccataagcgattcgattgctgataaaaatgctgccgagagagctcaatcattttattcaaattggattctagatcccgttgtgtatgggaaatatccggaagaaatggtgaatctacttggatcagctttgccaaaattttcgagcaatgaaatgaacagcctaatgagctataaatcagactttttgggtattaatcactatacaagttacttcatacaagattgtttgatcactgcttgtaattctggagacggagcttctaaaagcgaaggattagccctcaaattggaccggaaaggaaatgtttccatcggagaactgaccgacgtaaattggcagcatattgatcctaacggattcagaaagatgttgaattacctaaaaaataggtaccacaacataccaatgtacatcaccgaaaatggtttcggacagttgcaaaaaccagagacaacagttgaagaacttctgcatgatacaaaaaggatacaatacttgagtggatatttggatgctttgaaagcagcaatgagggatggagcaaatgtgaagggatatttcgcatggtcactattagataattttgaatggttgtacggatacaaggttcgatttgggctattccacgttgattttacaactttgaaaaggacaccaaagcaatcagctacatggtacaagaacttcattgaacagaacgtgaatatagaagatcaaatagataaataa

SEQ ID NO: 85910 - protein, 346 aa, Arabidopsis thaliana
  peptide (1)..(346): Ceres Seq. ID no. 12684404
MQKDFGYLADICFKHFGDRVKHWITINEPNQHISLAYRSGLFPPARCSMPYGNCTHGNSETEPFIAAHNMILAHAKAIQIYRTKYQREQKGIIGIVVQTSWFEPISDSIADKNAAERAQSFYSNWILDPVVYGKYPEEMVNLLGSALPKFSSNEMNSLMSYKSDFLGINHYTSYFIQDCLITACNSGDGASKSEGLALKLDRKGNVSIGELTDVNWQHIDPNGFRKMLNYLKNRYHNIPMYITENGFGQLQKPETTVEELLHDTKRIQYLSGYLDALKAAMRDGANVKGYFAWSLLDNFEWLYGYKVRFGLFHVDFTTLKRTPKQSATWYKNFIEQNVNIEDQIDK

SEQ ID NO: 85911 - protein, 298 aa, Arabidopsis thaliana
  peptide (1)..(298): Ceres Seq. ID no. 12684405
MPYGNCTHGNSETEPFIAAHNMILAHAKAIQIYRTKYQREQKGIIGIVVQTSWFEPISDSIADKNAAERAQSFYSNWILDPVVYGKYPEEMVNLLGSALPKFSSNEMNSLMSYKSDFLGINHYTSYFIQDCLITACNSGDGASKSEGLALKLDRKGNVSIGELTDVNWQHIDPNGFRKMLNYLKNRYHNIPMYITENGFGQLQKPETTVEELLHDTKRIQYLSGYLDALKAAMRDGANVKGYFAWSLLDNFEWLYGYKVRFGLFHVDFTTLKRTPKQSATWYKNFIEQNVNIEDQIDK

SEQ ID NO: 85912 - protein, 277 aa, Arabidopsis thaliana
  peptide (1)..(277): Ceres Seq. ID no. 12684406
MILAHAKAIQIYRTKYQREQKGIIGIVVQTSWFEPISDSIADKNAAERAQSFYSNWILDPVVYGKYPEEMVNLLGSALPKFSSNEMNSLMSYKSDFLGINHYTSYFIQDCLITACNSGDGASKSEGLALKLDRKGNVSIGELTDVNWQHIDPNGFRKMLNYLKNRYHNIPMYITENGFGQLQKPETTVEELLHDTKRIQYLSGYLDALKAAMRDGANVKGYFAWSLLDNFEWLYGYKVRFGLFHVDFTTLKRTPKQSATWYKNFIEQNVNIEDQIDK

SEQ ID NO: 85913 - DNA, 1142 bp, Arabidopsis thaliana
  misc_feature (1)..(1142): Ceres Seq. ID no. 12684488
  misc_feature (1)..(1142): Ortholog of  Ceres SEQ ID NO 12562215 as cited in SEQ ID NO 20489
  misc_feature (1)..(1142): Ortholog of  Ceres SEQ ID NO 13595548 as cited in SEQ ID NO 51024
  misc_feature (1)..(1142): Ortholog of  Ceres SEQ ID NO 13582350 as cited in SEQ ID NO 56734
  misc_feature (1)..(1142): Ortholog of  Ceres SEQ ID NO 12476493 as cited in SEQ ID NO 58163
  misc_feature (1)..(1142): Ortholog of  Ceres SEQ ID NO 14313459 as cited in SEQ ID NO 62395
  misc_feature (1)..(1142): Ortholog of  Ceres SEQ ID NO 13597295 as cited in SEQ ID NO 63743
  misc_feature (1)..(1142): Ortholog of  Ceres SEQ ID NO 12617090 as cited in SEQ ID NO 64005
  misc_feature (1)..(1142): Ortholog of  Ceres SEQ ID NO 13597439 as cited in SEQ ID NO 64081
  misc_feature (1)..(1142): Ortholog of  Ceres SEQ ID NO 13597233 as cited in SEQ ID NO 64370
  misc_feature (1)..(1142): Ortholog of  Ceres SEQ ID NO 13599438 as cited in SEQ ID NO 0
  misc_feature (1)..(1142): Ortholog of  Ceres SEQ ID NO 13623850 as cited in SEQ ID NO 0
  misc_feature (1)..(1142): Ortholog of  Ceres SEQ ID NO 14309162 as cited in SEQ ID NO 0
atggagaagaacatgaagtttccagtagtagacttgtccaagctcaatggggaagagagagaccaaaccatggctctaatcaatgaagcttgtgagaattggggcttctttgagatagtgaaccatggattaccacatgacttaatggacaagatcgagaagatgacaaaggaccattacaagacatgccaagaacaaaagttcaatgacatgctcaagtccaaaggtttggataatcttgagacagaagtcgaagatgtcgattgggaaagcactttctacgttcgtcacctccctcaatccaatctcaatgacatttcagatgtgtctgatgaatacaggacggccatgaaagactttggtaagagactggagaatcttgctgaggatttgttggatctactgtgtgagaatctagggttagagaaagggtatttgaagaaagtgtttcatggaacaaaaggcccaacctttgggacaaaggtgagcaattatccaccatgtcctaaaccagagatgatcaaaggtcttagggcccacactgatgcaggaggcatcatcttgttgtttcaagacgacaaggtcagtggtctccagcttcttaaagatggtgactggattgatgttcctcctctcaaccactctattgtcatcaatcttggtgaccaacttgaggtgataaccaacgggaagtataagagtgtgctgcaccgtgtggtgactcaacaagaaggaaacaggatgtcggttgcatcgttttacaacccgggaagcgatgcggagatctcaccagctacttcgcttgtcgagaaagattccgagtacccgagtttcgtctttgatgactacatgaagctttatgcaggggtcaagtttcagcccaaggagccacggttcgcagcaatgaagaatgcttctgcagttacagaactgaatcctacagcagccgtagagactttctaaaaatggatttgagattcaagtgaagcagagaaagaaagatgagtttgtgttgtgtgttatggcaataagttaaaacttgtattagtgttgattaattgttggtcaattggtgtgttttaaagtgtggggtgtttatgtttatggaagatgataataattataaaaatctaaattctaag

SEQ ID NO: 85914 - protein, 320 aa, Arabidopsis thaliana; identical to SEQ ID NO: 21706
  peptide (1)..(320): Ceres Seq. ID no. 12684489

SEQ ID NO: 85915 - protein, 316 aa, Arabidopsis thaliana; identical to SEQ ID NO: 21707
  peptide (1)..(316): Ceres Seq. ID no. 12684490

SEQ ID NO: 85916 - protein, 297 aa, Arabidopsis thaliana; identical to SEQ ID NO: 21708
  peptide (1)..(297): Ceres Seq. ID no. 12684491

SEQ ID NO: 85917 - DNA, 1632 bp, Arabidopsis thaliana
  misc_feature (1)..(1632): Ceres Seq. ID no. 12684549
  misc_feature (1)..(1632): Ortholog of  Ceres SEQ ID NO 13637473 as cited in SEQ ID NO 53391
  misc_feature (1)..(1632): Ortholog of  Ceres SEQ ID NO 15170670 as cited in SEQ ID NO 68165
atggctaagtcttgctatttcagaccagctcttcttcttctgttagttcttttggttcatgccgagtcacgcggtcggttcgagccaaagattcttatgccgacagaggaagctaacccggctgaccaagacgaagatggtgtcggtacaagatgggcggttctcgtcgctggttcttctggatatggaaactacagacaccaggctgacgtgtgtcacgcatatcaaatactaagaaaaggaggtttaaaggaagaaaacatagtcgttttgatgtatgatgatatcgcaaaccacccacttaatcctcgtccgggtactctcatcaaccatcctgacggtgacgatgtttacgccggagtccctaaggcactacacaacaattatagtgatagcgactgtagagacatttgctatggtaaaccaaactttatgtgtggacctttcattggtatcgctcctagatttcttatagccactagttgttttccctttttaatagtttgttcggttatttacgttttgaaatatctttttcaggactatactggtagtagcgttacggctgcaaacttctacgctgtactcctaggcgaccagaaggctgttaaaggtggaagcggtaaggtcatcgctagcaagcccaacgatcacattttcgtatattatgcggatcatggtggtcccggagttcttgggatgccaaatacgcctcacatatatgcagctgattttattgaaacgcttaagaagaagcatgcttccggaacatacaaagagatggttatatacgtagaagcgtgtgaaagtgggagtattttcgaagggataatgccaaaggacttgaacatttacgtaacaacggcttcaaatgcacaagagagtagttatggaacatattgtcctggcatgaatccgtcacccccatctgaatatatcacttgcttaggggatttatatagtgttgcttggatggaagatagtgagactcacaatttaaagaaagagaccataaagcaacaataccacacggtgaagatgaggacatcaaactacaatacctactcaggtggctctcatgtgatggaatacggtaacaatagtattaagtcggagaagctttatctttaccaagggtttgatccagccaccgttaatctcccactaaacgaattaccggtcaagtcaaaaataggagtcgttaaccaacgcgacgcggaccttctcttcctttggcatatgtatcggacatcggaagatgggtcaaggaagaaggatgacacattgaaggaattaactgagacaacaaggcataggaaacatttagatgcaagcgtcgaattgatagccacaattttgtttggtccgacgatgaatgttcttaacttggttagagaacccggtttgcctttggttgacgattgggaatgtcttaaatcgatggtacgtgtatttgaagagcattgtggatcactaacgcaatatgggatgaaacatatgcgagcgtttgcaaacgtttgtaacaacggtgtgtccaaagagctgatggaggaagcttctactgcggcatgcggtggttatagtgaggctcgctacacggtgcatccatcaatcttaggctatagcgcctga

SEQ ID NO: 85918 - protein, 543 aa, Arabidopsis thaliana
  peptide (1)..(543): Ceres Seq. ID no. 12684550
MAKSCYFRPALLLLLVLLVHAESRGRFEPKILMPTEEANPADQDEDGVGTRWAVLVAGSSGYGNYRHQADVCHAYQILRKGGLKEENIVVLMYDDIANHPLNPRPGTLINHPDGDDVYAGVPKALHNNYSDSDCRDICYGKPNFMCGPFIGIAPRFLIATSCFPFLIVCSVIYVLKYLFQDYTGSSVTAANFYAVLLGDQKAVKGGSGKVIASKPNDHIFVYYADHGGPGVLGMPNTPHIYAADFIETLKKKHASGTYKEMVIYVEACESGSIFEGIMPKDLNIYVTTASNAQESSYGTYCPGMNPSPPSEYITCLGDLYSVAWMEDSETHNLKKETIKQQYHTVKMRTSNYNTYSGGSHVMEYGNNSIKSEKLYLYQGFDPATVNLPLNELPVKSKIGVVNQRDADLLFLWHMYRTSEDGSRKKDDTLKELTETTRHRKHLDASVELIATILFGPTMNVLNLVREPGLPLVDDWECLKSMVRVFEEHCGSLTQYGMKHMRAFANVCNNGVSKELMEEASTAACGGYSEARYTVHPSILGYSA

SEQ ID NO: 85919 - protein, 511 aa, Arabidopsis thaliana
  peptide (1)..(511): Ceres Seq. ID no. 12684551
MPTEEANPADQDEDGVGTRWAVLVAGSSGYGNYRHQADVCHAYQILRKGGLKEENIVVLMYDDIANHPLNPRPGTLINHPDGDDVYAGVPKALHNNYSDSDCRDICYGKPNFMCGPFIGIAPRFLIATSCFPFLIVCSVIYVLKYLFQDYTGSSVTAANFYAVLLGDQKAVKGGSGKVIASKPNDHIFVYYADHGGPGVLGMPNTPHIYAADFIETLKKKHASGTYKEMVIYVEACESGSIFEGIMPKDLNIYVTTASNAQESSYGTYCPGMNPSPPSEYITCLGDLYSVAWMEDSETHNLKKETIKQQYHTVKMRTSNYNTYSGGSHVMEYGNNSIKSEKLYLYQGFDPATVNLPLNELPVKSKIGVVNQRDADLLFLWHMYRTSEDGSRKKDDTLKELTETTRHRKHLDASVELIATILFGPTMNVLNLVREPGLPLVDDWECLKSMVRVFEEHCGSLTQYGMKHMRAFANVCNNGVSKELMEEASTAACGGYSEARYTVHPSILGYSA

SEQ ID NO: 85920 - protein, 452 aa, Arabidopsis thaliana
  peptide (1)..(452): Ceres Seq. ID no. 12684552
MYDDIANHPLNPRPGTLINHPDGDDVYAGVPKALHNNYSDSDCRDICYGKPNFMCGPFIGIAPRFLIATSCFPFLIVCSVIYVLKYLFQDYTGSSVTAANFYAVLLGDQKAVKGGSGKVIASKPNDHIFVYYADHGGPGVLGMPNTPHIYAADFIETLKKKHASGTYKEMVIYVEACESGSIFEGIMPKDLNIYVTTASNAQESSYGTYCPGMNPSPPSEYITCLGDLYSVAWMEDSETHNLKKETIKQQYHTVKMRTSNYNTYSGGSHVMEYGNNSIKSEKLYLYQGFDPATVNLPLNELPVKSKIGVVNQRDADLLFLWHMYRTSEDGSRKKDDTLKELTETTRHRKHLDASVELIATILFGPTMNVLNLVREPGLPLVDDWECLKSMVRVFEEHCGSLTQYGMKHMRAFANVCNNGVSKELMEEASTAACGGYSEARYTVHPSILGYSA

SEQ ID NO: 85921 - DNA, 1272 bp, Arabidopsis thaliana
  misc_feature (1)..(1272): Ceres Seq. ID no. 12684583
  misc_feature (1)..(1272): Ortholog of  Ceres SEQ ID NO 14308698 as cited in SEQ ID NO 58663
atggaacaagtgtttgctgattggaattttgaagataattttcacatgtccactaataaaagatcaatcagaccagaagatgaattagtggagctattgtggagagatggtcaagtggttttacaaagccaagctcgtagagaaccgtcagtccaagtccaaacccacaaacaagaaaccctaagaaaacccaacaatatttttcttgacaaccaagaaacagtacaaaagcctaactacgctgctctagatgatcaagaaaccgtctcctggatacaataccctccggatgacgtcatcgaccctttcgaatccgagttctcctctcatttcttctcttcgatcgatcacctcggaggtcctgagaagccacgaacgatcgaagagacagttaagcatgaggctcaagccatggctcctcctaagtttagatcctcggttataacagtcggaccgagtcattgcggcagcaaccagtcaacaaatattcatcaggccactacacttccggtttctatgagtgatagaagcaagaacgtcgaagaaagacttgacacttcgtcaggtggctcctccggttgcagctatggaaggaacaacaaagaaaccgttagtggaacaagtgtaaccattgaccgtaaaagaaaacatgttatggatgctgatcaagaatctgtgtctcaatcagatataggtttgacctcaaccgatgatcaaaccatgggtaacaaatcgagccaacggtcaggatctactcgaagaagccgtgcagctgaagttcataatctctcagaaaggaggaggagagatcggatcaatgaaagaatgaaagctcttcaagaactcatacctcactgcagcagaacagataaagcttcgatattggatgaagcaattgattacttaaaatcacttcaaatgcaactccaagtgatgtggatgggaagtggaatggcggcggcggcagcagcagcagcaagtccgatgatgtttcccggggtacaatcatctccatacattaatcagatggctatgcaaagtcagatgcaattgtctcaattcccggttatgaaccggtccgctccgcagaaccatcccggtttagtatgtcaaaacccggtacagttgcagctccaagcacagaaccaaatcttatcggagcagctcgctaggtacatgggcgggattccccagatgccgccggcgggaaatcaggtcagttgcagacggcatcgttttgaagaaagacaaatatatttatttaatatctga

SEQ ID NO: 85922 - protein, 423 aa, Arabidopsis thaliana
  peptide (1)..(423): Ceres Seq. ID no. 12684584
MEQVFADWNFEDNFHMSTNKRSIRPEDELVELLWRDGQVVLQSQARREPSVQVQTHKQETLRKPNNIFLDNQETVQKPNYAALDDQETVSWIQYPPDDVIDPFESEFSSHFFSSIDHLGGPEKPRTIEETVKHEAQAMAPPKFRSSVITVGPSHCGSNQSTNIHQATTLPVSMSDRSKNVEERLDTSSGGSSGCSYGRNNKETVSGTSVTIDRKRKHVMDADQESVSQSDIGLTSTDDQTMGNKSSQRSGSTRRSRAAEVHNLSERRRRDRINERMKALQELIPHCSRTDKASILDEAIDYLKSLQMQLQVMWMGSGMAAAAAAAASPMMFPGVQSSPYINQMAMQSQMQLSQFPVMNRSAPQNHPGLVCQNPVQLQLQAQNQILSEQLARYMGGIPQMPPAGNQVSCRRHRFEERQIYLFNI

SEQ ID NO: 85923 - protein, 408 aa, Arabidopsis thaliana
  peptide (1)..(408): Ceres Seq. ID no. 12684585
MSTNKRSIRPEDELVELLWRDGQVVLQSQARREPSVQVQTHKQETLRKPNNIFLDNQETVQKPNYAALDDQETVSWIQYPPDDVIDPFESEFSSHFFSSIDHLGGPEKPRTIEETVKHEAQAMAPPKFRSSVITVGPSHCGSNQSTNIHQATTLPVSMSDRSKNVEERLDTSSGGSSGCSYGRNNKETVSGTSVTIDRKRKHVMDADQESVSQSDIGLTSTDDQTMGNKSSQRSGSTRRSRAAEVHNLSERRRRDRINERMKALQELIPHCSRTDKASILDEAIDYLKSLQMQLQVMWMGSGMAAAAAAAASPMMFPGVQSSPYINQMAMQSQMQLSQFPVMNRSAPQNHPGLVCQNPVQLQLQAQNQILSEQLARYMGGIPQMPPAGNQVSCRRHRFEERQIYLFNI

SEQ ID NO: 85924 - protein, 286 aa, Arabidopsis thaliana
  peptide (1)..(286): Ceres Seq. ID no. 12684586
MAPPKFRSSVITVGPSHCGSNQSTNIHQATTLPVSMSDRSKNVEERLDTSSGGSSGCSYGRNNKETVSGTSVTIDRKRKHVMDADQESVSQSDIGLTSTDDQTMGNKSSQRSGSTRRSRAAEVHNLSERRRRDRINERMKALQELIPHCSRTDKASILDEAIDYLKSLQMQLQVMWMGSGMAAAAAAAASPMMFPGVQSSPYINQMAMQSQMQLSQFPVMNRSAPQNHPGLVCQNPVQLQLQAQNQILSEQLARYMGGIPQMPPAGNQVSCRRHRFEERQIYLFNI

SEQ ID NO: 85925 - DNA, 2766 bp, Arabidopsis thaliana
  misc_feature (1)..(2766): Ceres Seq. ID no. 12684612
  misc_feature (1)..(2766): Ortholog of  Ceres SEQ ID NO 14316546 as cited in SEQ ID NO 60020
atgaagaaagcatttggtcaaactgtcagagacctcaagagaggggtcaacaagaaagtgcttaaagtacctggaatagaacagaaggttctagatgctaccagcaatgagtcctggggtccgcatggatcacttcttgcggacattgcacatgcttcgagaaattaccatgaataccagattactatgggagtgttatggaaacgtcttagtgactctggaaaaaattggcggcatgtctataaggcattgacagtcttggagtacatggtaggccatggatcagaacgtgtcatagaagaggttaaagaacatgcatatcaaattacgacattatctggttttcagtatattgattccagcggtaaagatcaaggtagcaatgtcaggaagaaggcgcagagccttgtggctttggttaatgacaaagaaagaataacggaggtcagagagaaggctgctgctaacagagataagtatcataactcaatgcataggccgtcaggaggatatggggacaaatatgattacgaaggccgctatggagacagagatgaagggcgaagtagttatgggaaagagagagaatatggttacagggatgatgatagaaatagtcgtgatggcgatcgttattctagagactctgaagaccgatatggaagagatggtaacacggatgacgaataccgtggaaggagcagaagtgttgataattacaatggatcaagaggtaggagctcggacagggaacggcctattgaggatgatggccaatcctcatcgcgggatagtggtgcgccagctgatgatcattctcaagatgggagaggggggctagagagaaagttctctgaacaaaatattggtgctgctccacctagttatgaagaagctgtgagtgaatcacggagccctgtatacagtgaaagggatggtggagagaccccacaagttgctcctccaggagctgctgcttctcctcttgctgaaaacatcagcgtggacaacaaagctgctgattttgttaatgaatcatctcctcagcaagttgaggcttttgatgaatttgatccacgaggttcagtttcagcagcatgtgcacctacagctggtgcttcggttcctgcacctatcccaccaacagtggtttctacgcctgccccgcctgcctcaattaatgcagaaatggatttgcttggctctctttcagatgtattttcaccaaatcccttggctattgtaacatctgattccacttctgttgaaaccaatggacaagcaaacactggtttagctccatcgttttctacttctcagtcatctactcagccttttgatgatccatttggtgactctcctttcaaagccatcacttctgctgacactgagacaagccaacatcagagttttggagttccttttcagccaacaccaccaacttcaaatcctaacaatgaacataactttggttttggggaagcattttcagctgttaccgattctgaacctggcgttcaaaatatgcaagctccaccgaacttatccgtctttcctcaagagcagtttgatacatcgcagagcgaaatcgatattcttgccggcattctcccaccatctggaccgccagtttctctgtctccacaaccagattccactatgccaacatcccaatttcatcccaatggtaactcctatgaaagctatcatcatcaagccgcgcctacagatctaaacatgcaaggacaaacaccgtttggtcaagcttcacaacaatttaacatggtttcacattcacaaaatcatcatgaaggtatgcaattcaacaatggggatatgcaccaacctggttctaccccctcatcaagctcgcaaactccttaccctactacgcccaatgcaccaagtggtcagtttgatggtggaaattttatgacacaacaaccttatggtgtgataccgcaagttcatggcgtcccttcccatataccacagcgaactcaatctggacctgttgcagcgcacgggaatagtaacaatgttgttggggatatgttttcaccagctggactaagttccttggagacatcagcatcgcaaccatctctcacacctttaacaggagcaattgaaattgttccccaaaatcagaagaagtttgagccaaaatcaacaatttgggctgatacattaagtagagggctagttaacttcaacatttctggaccgaaaacaaatccattggcggatataggagttgacttcgaggcaatcaacaggaaagagaaacggctagagaaaccaactatcacacaacaacaagtaacatcaactatcaacatggggaaagccatgggatctggtactggcttaggtcgcgctggtgcaggtgctatgagacctccaacaaattcaatggtaggctcaagcatgcccacgggcatgaatgttggtggctatggaggcatgaaccaacaccaacccataggcatgaaccaaaaccatcccatgggcatgaaccaaaacctttccatgggaatgaaccagaactatcccatgggaatgaaccaaaactatccaatgggaatgggcatgaacatgaacatgggcgggtatggacaagggtatccgatgcaaccacaacaaggaatgggcatggctcctcctggtgcaccacaaggcatgaccggtgcctataatccaatgatgggtcaaggcggttacaaccctcagcagcagcaaccatatggtggaggttaccggtaa

SEQ ID NO: 85926 - protein, 921 aa, Arabidopsis thaliana
  peptide (1)..(921): Ceres Seq. ID no. 12684613
MKKAFGQTVRDLKRGVNKKVLKVPGIEQKVLDATSNESWGPHGSLLADIAHASRNYHEYQITMGVLWKRLSDSGKNWRHVYKALTVLEYMVGHGSERVIEEVKEHAYQITTLSGFQYIDSSGKDQGSNVRKKAQSLVALVNDKERITEVREKAAANRDKYHNSMHRPSGGYGDKYDYEGRYGDRDEGRSSYGKEREYGYRDDDRNSRDGDRYSRDSEDRYGRDGNTDDEYRGRSRSVDNYNGSRGRSSDRERPIEDDGQSSSRDSGAPADDHSQDGRGGLERKFSEQNIGAAPPSYEEAVSESRSPVYSERDGGETPQVAPPGAAASPLAENISVDNKAADFVNESSPQQVEAFDEFDPRGSVSAACAPTAGASVPAPIPPTVVSTPAPPASINAEMDLLGSLSDVFSPNPLAIVTSDSTSVETNGQANTGLAPSFSTSQSSTQPFDDPFGDSPFKAITSADTETSQHQSFGVPFQPTPPTSNPNNEHNFGFGEAFSAVTDSEPGVQNMQAPPNLSVFPQEQFDTSQSEIDILAGILPPSGPPVSLSPQPDSTMPTSQFHPNGNSYESYHHQAAPTDLNMQGQTPFGQASQQFNMVSHSQNHHEGMQFNNGDMHQPGSTPSSSSQTPYPTTPNAPSGQFDGGNFMTQQPYGVIPQVHGVPSHIPQRTQSGPVAAHGNSNNVVGDMFSPAGLSSLETSASQPSLTPLTGAIEIVPQNQKKFEPKSTIWADTLSRGLVNFNISGPKTNPLADIGVDFEAINRKEKRLEKPTITQQQVTSTINMGKAMGSGTGLGRAGAGAMRPPTNSMVGSSMPTGMNVGGYGGMNQHQPIGMNQNHPMGMNQNLSMGMNQNYPMGMNQNYPMGMGMNMNMGGYGQGYPMQPQQGMGMAPPGAPQGMTGAYNPMMGQGGYNPQQQQPYGGGYR

SEQ ID NO: 85927 - protein, 859 aa, Arabidopsis thaliana
  peptide (1)..(859): Ceres Seq. ID no. 12684614
MGVLWKRLSDSGKNWRHVYKALTVLEYMVGHGSERVIEEVKEHAYQITTLSGFQYIDSSGKDQGSNVRKKAQSLVALVNDKERITEVREKAAANRDKYHNSMHRPSGGYGDKYDYEGRYGDRDEGRSSYGKEREYGYRDDDRNSRDGDRYSRDSEDRYGRDGNTDDEYRGRSRSVDNYNGSRGRSSDRERPIEDDGQSSSRDSGAPADDHSQDGRGGLERKFSEQNIGAAPPSYEEAVSESRSPVYSERDGGETPQVAPPGAAASPLAENISVDNKAADFVNESSPQQVEAFDEFDPRGSVSAACAPTAGASVPAPIPPTVVSTPAPPASINAEMDLLGSLSDVFSPNPLAIVTSDSTSVETNGQANTGLAPSFSTSQSSTQPFDDPFGDSPFKAITSADTETSQHQSFGVPFQPTPPTSNPNNEHNFGFGEAFSAVTDSEPGVQNMQAPPNLSVFPQEQFDTSQSEIDILAGILPPSGPPVSLSPQPDSTMPTSQFHPNGNSYESYHHQAAPTDLNMQGQTPFGQASQQFNMVSHSQNHHEGMQFNNGDMHQPGSTPSSSSQTPYPTTPNAPSGQFDGGNFMTQQPYGVIPQVHGVPSHIPQRTQSGPVAAHGNSNNVVGDMFSPAGLSSLETSASQPSLTPLTGAIEIVPQNQKKFEPKSTIWADTLSRGLVNFNISGPKTNPLADIGVDFEAINRKEKRLEKPTITQQQVTSTINMGKAMGSGTGLGRAGAGAMRPPTNSMVGSSMPTGMNVGGYGGMNQHQPIGMNQNHPMGMNQNLSMGMNQNYPMGMNQNYPMGMGMNMNMGGYGQGYPMQPQQGMGMAPPGAPQGMTGAYNPMMGQGGYNPQQQQPYGGGYR

SEQ ID NO: 85928 - protein, 832 aa, Arabidopsis thaliana
  peptide (1)..(832): Ceres Seq. ID no. 12684615
MVGHGSERVIEEVKEHAYQITTLSGFQYIDSSGKDQGSNVRKKAQSLVALVNDKERITEVREKAAANRDKYHNSMHRPSGGYGDKYDYEGRYGDRDEGRSSYGKEREYGYRDDDRNSRDGDRYSRDSEDRYGRDGNTDDEYRGRSRSVDNYNGSRGRSSDRERPIEDDGQSSSRDSGAPADDHSQDGRGGLERKFSEQNIGAAPPSYEEAVSESRSPVYSERDGGETPQVAPPGAAASPLAENISVDNKAADFVNESSPQQVEAFDEFDPRGSVSAACAPTAGASVPAPIPPTVVSTPAPPASINAEMDLLGSLSDVFSPNPLAIVTSDSTSVETNGQANTGLAPSFSTSQSSTQPFDDPFGDSPFKAITSADTETSQHQSFGVPFQPTPPTSNPNNEHNFGFGEAFSAVTDSEPGVQNMQAPPNLSVFPQEQFDTSQSEIDILAGILPPSGPPVSLSPQPDSTMPTSQFHPNGNSYESYHHQAAPTDLNMQGQTPFGQASQQFNMVSHSQNHHEGMQFNNGDMHQPGSTPSSSSQTPYPTTPNAPSGQFDGGNFMTQQPYGVIPQVHGVPSHIPQRTQSGPVAAHGNSNNVVGDMFSPAGLSSLETSASQPSLTPLTGAIEIVPQNQKKFEPKSTIWADTLSRGLVNFNISGPKTNPLADIGVDFEAINRKEKRLEKPTITQQQVTSTINMGKAMGSGTGLGRAGAGAMRPPTNSMVGSSMPTGMNVGGYGGMNQHQPIGMNQNHPMGMNQNLSMGMNQNYPMGMNQNYPMGMGMNMNMGGYGQGYPMQPQQGMGMAPPGAPQGMTGAYNPMMGQGGYNPQQQQPYGGGYR

SEQ ID NO: 85929 - DNA, 1101 bp, Arabidopsis thaliana
  misc_feature (1)..(1101): Ceres Seq. ID no. 12684624
  misc_feature (1)..(1101): Ortholog of  Ceres SEQ ID NO 13654989 as cited in SEQ ID NO 63117
  misc_feature (1)..(1101): Ortholog of  Ceres SEQ ID NO 13657138 as cited in SEQ ID NO 65923
  misc_feature (1)..(1101): Ortholog of  Ceres SEQ ID NO 13584744 as cited in SEQ ID NO 69137
atgcgtaggtggttgtgctgtgcttgccacgttgaagaaccttaccattcttctgaaaatgaacacctcagaagccctaagcaccacaatgattttgggcatcacactagaaaaccacaggcggctgtgaagcctgatgctttgaaggagcctccatctattgatgtgcctgcattgtcattggatgagttgaaagaaaagaccgataactttggatcaaagtcattgattggtgaaggatcttacggcagagcctattatgcaaccttgaaagatggaaaggctgtcgcggtgaagaagcttgacaatgcagcggaacctgaatcaaatgttgagttcttgactcaggtctctagggtttccaagctgaagcacgataattttgttgagctcttcggttattgtgttgaagggaatttccgcattcttgcgtatgagtttgctactatgggatctttacatgacatcttacacgggaggaaaggagtccaaggagcacaaccaggtcctacgcttgactggatccaacgggtcagaatagcagttgatgcagctagaggacttgagtatttgcatgagaaagttcaacctgcagtaatacacagagatattcgatctagcaatgtgcttctctttgaagattttaaagccaagatcgctgattttaatctatcgaaccaatctcctgatatggctgctcgtcttcattctaccagagttttgggaaccttcggttaccacgcaccagagtatgcgatgactggtcaactgacacagaagagtgatgtttatagttttggtgtggtgcttttggagctcttgactggtaggaaacccgtcgatcatacgatgcctcgtggtcaacaaagtcttgttacttgggctactccaaggctaagtgaagacaaagtgaagcaatgtgttgatccaaaactaaagggagaatatcctcctaaagctgttgcaaagctcgctgcagtagcagcattgtgtgtgcaatatgaatcagagtttaggccaaacatgagcattgtggtaaaagctcttcaaccattgttgaggtcatcaacagcagcagctgtaccagtccaggaagcctga

SEQ ID NO: 85930 - protein, 366 aa, Arabidopsis thaliana; identical to SEQ ID NO: 77587
  peptide (1)..(366): Ceres Seq. ID no. 12684625

SEQ ID NO: 85931 - protein, 217 aa, Arabidopsis thaliana; identical to SEQ ID NO: 22807
  peptide (1)..(217): Ceres Seq. ID no. 12684626

SEQ ID NO: 85932 - DNA, 690 bp, Arabidopsis thaliana
  misc_feature (1)..(690): Ceres Seq. ID no. 12684677
  misc_feature (1)..(690): Ortholog of  Ceres SEQ ID NO 13638510 as cited in SEQ ID NO 51436
atgaaaagaatctccatcttcttctctatctcttggctatctctctctctaaactattcactcacacagtcattcttcgtcttcttctgtttcatgcaagattcaaaggcctcacctgcaagaaaaccttggtaccagagagctatggcggttgccagattcgcaacgaattggagaacaatccctaaatcatcatcacaacaacaaccagagaattttcgtccgtctcgaaaccctagcgtcaacagcaagtcatccaatcataaccaaatttatcaccagctgagaaaatgctcgtctctcaaggtagctgcgaattctttcactagggtttgcctctgcgctccgattggtccatacgacgacgtttttcggattcacgtcccgccgagaagaagttcaagctatcctccgtcgaagcctcttcctatggagacggcagtggcggtggcgacggcgaggatgagtgtggattcagggaggaggatatttagagggaagtcgttgagggaaaacgcgttgatgaggagattcgtggtggcggaagaagaagcgataatggagaatagaaagagagatcaaatggagattgtgaggaagagaaatcagatgaggaggaagaagaagcttggacctagtcctcttagtcgtatggttatcgctgaagatcaagaagtttgtcttctttga

SEQ ID NO: 85933 - protein, 229 aa, Arabidopsis thaliana
  peptide (1)..(229): Ceres Seq. ID no. 12684678
MKRISIFFSISWLSLSLNYSLTQSFFVFFCFMQDSKASPARKPWYQRAMAVARFATNWRTIPKSSSQQQPENFRPSRNPSVNSKSSNHNQIYHQLRKCSSLKVAANSFTRVCLCAPIGPYDDVFRIHVPPRRSSSYPPSKPLPMETAVAVATARMSVDSGRRIFRGKSLRENALMRRFVVAEEEAIMENRKRDQMEIVRKRNQMRRKKKLGPSPLSRMVIAEDQEVCLL

SEQ ID NO: 85934 - protein, 198 aa, Arabidopsis thaliana
  peptide (1)..(198): Ceres Seq. ID no. 12684679
MQDSKASPARKPWYQRAMAVARFATNWRTIPKSSSQQQPENFRPSRNPSVNSKSSNHNQIYHQLRKCSSLKVAANSFTRVCLCAPIGPYDDVFRIHVPPRRSSSYPPSKPLPMETAVAVATARMSVDSGRRIFRGKSLRENALMRRFVVAEEEAIMENRKRDQMEIVRKRNQMRRKKKLGPSPLSRMVIAEDQEVCLL

SEQ ID NO: 85935 - protein, 181 aa, Arabidopsis thaliana; identical to SEQ ID NO: 70852
  peptide (1)..(181): Ceres Seq. ID no. 12684680

SEQ ID NO: 85936 - DNA, 1699 bp, Arabidopsis thaliana
  misc_feature (1)..(1699): Ceres Seq. ID no. 12684720
  misc_feature (1)..(1699): Ortholog of  Ceres SEQ ID NO 13654409 as cited in SEQ ID NO 68534
aaaaaatttattagccattcgagaaacaaggcatctctatttttttgcttcttctaatagacttcttcgtcactgatctcccacgacgatctcccaaactcatttctctacgttcatcgatctctctctttctcgtttgctctacgaaaatcagccatggatgaagagtacgaggttattgttctcggcaccggtctcaaggagtgtatcctcagcggtctcctttccgtcgatggtgtcaaggtgcttcacatggacaggaatgactactatggtggagaatcaacttcccttaatctcaatcagctttggaagaagttcaggggagaagagaaggctcctgagcatttaggcgctagccgggattacaatgttgacatgatgcctaagtttatgatgggaaatggcaagcttgttcgtacccttattcatacagatgttacaaagtatttgtccttcaaagctgttgatggaagctatgttttcgtcaaaggaaaggttcaaaaggtgccagctactcctatggaggccctgaaatcttctctcatgggcatatttgagaaacgtcgagccggcaagtttttcagttttgttcaagaatacgatgagaaggacccaaaaacacacgatggaatggatttgaccagagttacaacaaaggaactgattgcgaaatatggtcttgatggcaacactattgactttattggtcacgcagtggcacttcacacgaatgaccaacatctcgaccaacccgcctttgatactgtaatgagaatgaagctctatgcggaatctcttgcacgtttccaaggaacatctccatatatttatcctctctatgggttgggagaactaccccaggcatttgcacgacttagtgctgtctatggtggcacatatatgttgaacaaacctgagtgcaaggtagagtttgacgagggaggtaaggttattggtgtaacatctgagggagagactgctaaatgcaaaaagattgtgtgtgacccttcatacctgccgaacaaggttaggaagattggcagggttgctcgggccatcgccattatgagccacccgattccgaacaccaatgattctcactcagtgcaggtcatcataccccagaaacagttggcccgcaaatcggatatgtatgtcttctgttgttcgtactcccacaacgttgctcccaagggaaaattcattgcatttgtgtctacagatgcagagactgataaccctcaaaccgaactaaagcctggaactgatcttttgggtcctgttgatgagatattcttcgacatgtatgatagatacgagcctgtcaacgagccagagttggacaactgctttatttcaacgagctatgatgctacaacacactttgagacaactgttgcggatgtgttgaacatgtataccctaatcaccggaaagcaactggacctaagtgttgacctgagtgccgcaagtgctgcagaggaatgaagaatcatcaccagatcgctccctctctagttgattttctaaaagcttgttttgctcatttctctgtttccgactcttgctttcgtgttcttttttggtttgaactttgaatacaaaatcagaatgatccttcatgttttagaaactaacaaccatgtgtctccgtttgatgttggattcctcggttaaagacttataaatgctcttt

SEQ ID NO: 85937 - protein, 444 aa, Arabidopsis thaliana; identical to SEQ ID NO: 26953
  peptide (1)..(444): Ceres Seq. ID no. 12684721

SEQ ID NO: 85938 - protein, 412 aa, Arabidopsis thaliana; identical to SEQ ID NO: 26954
  peptide (1)..(412): Ceres Seq. ID no. 12684722

SEQ ID NO: 85939 - protein, 370 aa, Arabidopsis thaliana; identical to SEQ ID NO: 26955
  peptide (1)..(370): Ceres Seq. ID no. 12684723

SEQ ID NO: 85940 - DNA, 1074 bp, Arabidopsis thaliana
  misc_feature (1)..(1074): Ceres Seq. ID no. 12684753
  misc_feature (1)..(1074): Ortholog of  Ceres SEQ ID NO 12636774 as cited in SEQ ID NO 372
  misc_feature (1)..(1074): Ortholog of  Ceres SEQ ID NO 13582350 as cited in SEQ ID NO 56734
  misc_feature (1)..(1074): Ortholog of  Ceres SEQ ID NO 13596470 as cited in SEQ ID NO 62158
  misc_feature (1)..(1074): Ortholog of  Ceres SEQ ID NO 12615466 as cited in SEQ ID NO 62761
  misc_feature (1)..(1074): Ortholog of  Ceres SEQ ID NO 12615907 as cited in SEQ ID NO 62860
  misc_feature (1)..(1074): Ortholog of  Ceres SEQ ID NO 13597295 as cited in SEQ ID NO 63743
  misc_feature (1)..(1074): Ortholog of  Ceres SEQ ID NO 12617090 as cited in SEQ ID NO 64005
  misc_feature (1)..(1074): Ortholog of  Ceres SEQ ID NO 13597439 as cited in SEQ ID NO 64081
  misc_feature (1)..(1074): Ortholog of  Ceres SEQ ID NO 13597233 as cited in SEQ ID NO 64370
  misc_feature (1)..(1074): Ortholog of  Ceres SEQ ID NO 13600370 as cited in SEQ ID NO 0
atggaggaaacaaataagagtgtggttaatgattactttaccagtgctatggaacttacagagtcaggtgaccctcacgtgcctacccgttacattcttccaccttcacaacgaccaatgctcggtccaagcattggcaccagtaccatcaatcttcctgtcattgatctctccttcttacacgatcctttgcttagactatgtgtcatccatgagattgaattggcctgcaagggatttggtttctttcaggttataaaccatggaatatcatcagcagtggtgaaagatgcacaagattcagctacaaggttctttgacttacctgccgatgagaagatgcatctggtttctgataattttcaggagccagtaaggtatggtaccagcataaaccattcaacagacagagttcattactggagagatttcataaaacattactcccatcctctctcaaactggatcaatttgtggccttccaatcctccctgctacaaggaaaaggtggggaaatacgcagaagcaacgcatgttttacataagcaactaattgaagctatctcagaaagtctaggactggagaaaaattacttacaggaagaaatagaagaaggctcacaagtcatggcggtaaactgctatccagcttgtcctgaacccgagattgccttgggaatgccaccacactcggactatggctcgctgacaatcttactccagagtagcgaagggctgcagataaaggactgcaacaacaactgggtttgtgtgccgtatattgaaggagctctgatagtccagttgggagatcaggtagaagtgatgagcaatggcatatacaagagtgtggttcatcgtgtaacagtgaacaaagattacaagcggctctcttttgcaagtcttcacagtctacctatgcacaagaaaataagtccagcaactcagctcgtcaatgaaaataaaccagctgcatatggagaattcagcttcaacgattttcttgattatatatccagaaacgatattacacagaaaagattcattgatacactcagaaagaaaaacctctga

SEQ ID NO: 85941 - protein, 357 aa, Arabidopsis thaliana
  peptide (1)..(357): Ceres Seq. ID no. 12684754
MEETNKSVVNDYFTSAMELTESGDPHVPTRYILPPSQRPMLGPSIGTSTINLPVIDLSFLHDPLLRLCVIHEIELACKGFGFFQVINHGISSAVVKDAQDSATRFFDLPADEKMHLVSDNFQEPVRYGTSINHSTDRVHYWRDFIKHYSHPLSNWINLWPSNPPCYKEKVGKYAEATHVLHKQLIEAISESLGLEKNYLQEEIEEGSQVMAVNCYPACPEPEIALGMPPHSDYGSLTILLQSSEGLQIKDCNNNWVCVPYIEGALIVQLGDQVEVMSNGIYKSVVHRVTVNKDYKRLSFASLHSLPMHKKISPATQLVNENKPAAYGEFSFNDFLDYISRNDITQKRFIDTLRKKNL

SEQ ID NO: 85942 - protein, 341 aa, Arabidopsis thaliana
  peptide (1)..(341): Ceres Seq. ID no. 12684755
MELTESGDPHVPTRYILPPSQRPMLGPSIGTSTINLPVIDLSFLHDPLLRLCVIHEIELACKGFGFFQVINHGISSAVVKDAQDSATRFFDLPADEKMHLVSDNFQEPVRYGTSINHSTDRVHYWRDFIKHYSHPLSNWINLWPSNPPCYKEKVGKYAEATHVLHKQLIEAISESLGLEKNYLQEEIEEGSQVMAVNCYPACPEPEIALGMPPHSDYGSLTILLQSSEGLQIKDCNNNWVCVPYIEGALIVQLGDQVEVMSNGIYKSVVHRVTVNKDYKRLSFASLHSLPMHKKISPATQLVNENKPAAYGEFSFNDFLDYISRNDITQKRFIDTLRKKNL

SEQ ID NO: 85943 - protein, 318 aa, Arabidopsis thaliana
  peptide (1)..(318): Ceres Seq. ID no. 12684756
MLGPSIGTSTINLPVIDLSFLHDPLLRLCVIHEIELACKGFGFFQVINHGISSAVVKDAQDSATRFFDLPADEKMHLVSDNFQEPVRYGTSINHSTDRVHYWRDFIKHYSHPLSNWINLWPSNPPCYKEKVGKYAEATHVLHKQLIEAISESLGLEKNYLQEEIEEGSQVMAVNCYPACPEPEIALGMPPHSDYGSLTILLQSSEGLQIKDCNNNWVCVPYIEGALIVQLGDQVEVMSNGIYKSVVHRVTVNKDYKRLSFASLHSLPMHKKISPATQLVNENKPAAYGEFSFNDFLDYISRNDITQKRFIDTLRKKNL

SEQ ID NO: 85944 - DNA, 1254 bp, Arabidopsis thaliana
  misc_feature (1)..(1254): Ceres Seq. ID no. 12684761
  misc_feature (1)..(1254): Ortholog of  Ceres SEQ ID NO 13594176 as cited in SEQ ID NO 59144
aaacccaaagaaagaaaaaaaagaagagaaacggccgaatcttcataaattccgccatctgttaagctcaatcgccgcctaaactccggcgactctctcgaagatatttggtgattgaggtgactcggaagagagtgagagagagagatggatgatagaggaggatcgttcgtagcagtgagaaggatttcacaaggtctagaacgaggaagtgtttatcattcttcttctgctgaggttgtagctggatcggcagcgtggttaggccgtggcctttcctgtgtttgtgttcagggtagagacggtgaccctcgtccttcatttgatctaacgcctgctcaggaggaatgcctgcagaggttgcaaagccgcattgatgttgcttatgacagctcaatacctcagcatcaggaagctctaaaggatctttggaaacttgcatttcctgaagaagagctacacggaattgtatctgatcagtggaaggaaatgggttggcagggaaaagatccatcgacagattttaggggtggtggttttatttctctcgaaaacttgttgtacttcgctaggaaattcccgaaatctttccacggccttctgcggaaacaggttggcgatcgttctgtgtgggaatacccctttgctgttgctggcatcaatataacattcatgctcatccagatgcttgaccttgaagcagtgaaaccacgaagtattgttggggaaacatttctaagattcctttcggtgaacgagtctgcgtttgaccttctttattgcattgccttcaagctaatggatcagcaatggctatccatgcgtgcttcatacatggagtttaacactgtgatgaaatcaacaaggcggcaactggagagagagattatgattgaagacattacaagtctcgaagatttgccatcatacagtcttctcagtcaatagcaaatagcttaccaaaaactactttgtaagtagaaagatctaacagctcagaaaccctatatcaaagctaaaacaacagcagagcaagtaagcaagcaaaaaagaagacaaggtttctctctctctcgctcttcactccatcttcctcgatattagtgttggttccatgaaatttgggttgttatttctatgaaaccagggtcagattttgtttcttatggggtcagattttctaacttgtggtgcttgtaaaacgttgttggttagttggtgttttgggctaataaatcatttggttacatttcc

SEQ ID NO: 85945 - protein, 266 aa, Arabidopsis thaliana; identical to SEQ ID NO: 39196
  peptide (1)..(266): Ceres Seq. ID no. 12684762

SEQ ID NO: 85946 - protein, 152 aa, Arabidopsis thaliana; identical to SEQ ID NO: 39197
  peptide (1)..(152): Ceres Seq. ID no. 12684763

SEQ ID NO: 85947 - DNA, 1344 bp, Arabidopsis thaliana
  misc_feature (1)..(1344): Ceres Seq. ID no. 12684787
  misc_feature (1)..(1344): Ortholog of  Ceres SEQ ID NO 12618197 as cited in SEQ ID NO 64478
atggaggggagattggctaatatgtggaggttgactgttaacgaaagtaaattcgtggaaactgcgttgcaatctgagctcagagtagatggtcgtggcctttatgattatcgcaagcttactattaagtttggcaaagaatatggtagctcggaagttcaacttggtcagactcatgtaatgggtttcgtgactgctcagttggtacaaccttacaaagacagacctaatgaagggtctctctcgatcttcacggaattttctccaatggctgatccgtcttttgagcctggtcgtcctggcgaatctgcagtggagttgggacgcattatcgatcgtggtctaagagaaagccgtgcagtagatacagagtcactctgcgttctagctggaaagatggtttggtctgttcgcattgaccttcatatcttggacaatggagggaacttagttgatgctgcaaatattgctgctttagcagctctcatgacatttaggagacccgactgcactgtaggaggagagaatggtcaagaagtgatcatacatccactagaggaaagggaaccacttccattgataatacatcatctcccaatagccttcacgtttggattttttaataaaggcaacattgtggtgatggacccaacttatgttgaagaagcagttatgtgtgggagaatgactgtgacagttaatgccaatggcgatatatgcgcaatccaaaaaccgggggaagaaggcgtgaaccagagtgtaatccttcattgcctgcgtcttgcttcttcaagagctgctgcaacaacaaagatcattagagaagaagttgaagcatataactgtgagagaagcttacagaaggtgaagcgacatcccactttggctaaatctgaagtttctggacctactgtagctgtgaaggaggaacataggaagtcctcagatcaggaaagagctgcagagatatctcgagaacatgttgaaagactaaagctctctacggaggaagtaagaagcagtaaggaagaagaagctgccaatttcaaaggcggtccctcaaattggtatagtcttgaatgtttcactctctgggacccttactcagaagctatggatgttgattcactgaaagtttctcttgcttcaagaggggatcccgttactaagtcatcgagcacgaagaaaatgaacggctctggaaatgcgcagaaggttggtgttgagatttcagttgaggaagtaaccggagaattagggaagaaggatacaaaacacaaggatggagaaatgacacttaaagatgctgtcaaacctaaaaagaagcggaaaaacaaaagctga

SEQ ID NO: 85948 - protein, 447 aa, Arabidopsis thaliana
  peptide (1)..(447): Ceres Seq. ID no. 12684788
MEGRLANMWRLTVNESKFVETALQSELRVDGRGLYDYRKLTIKFGKEYGSSEVQLGQTHVMGFVTAQLVQPYKDRPNEGSLSIFTEFSPMADPSFEPGRPGESAVELGRIIDRGLRESRAVDTESLCVLAGKMVWSVRIDLHILDNGGNLVDAANIAALAALMTFRRPDCTVGGENGQEVIIHPLEEREPLPLIIHHLPIAFTFGFFNKGNIVVMDPTYVEEAVMCGRMTVTVNANGDICAIQKPGEEGVNQSVILHCLRLASSRAAATTKIIREEVEAYNCERSLQKVKRHPTLAKSEVSGPTVAVKEEHRKSSDQERAAEISREHVERLKLSTEEVRSSKEEEAANFKGGPSNWYSLECFTLWDPYSEAMDVDSLKVSLASRGDPVTKSSSTKKMNGSGNAQKVGVEISVEEVTGELGKKDTKHKDGEMTLKDAVKPKKKRKNKS

SEQ ID NO: 85949 - protein, 440 aa, Arabidopsis thaliana
  peptide (1)..(440): Ceres Seq. ID no. 12684789
MWRLTVNESKFVETALQSELRVDGRGLYDYRKLTIKFGKEYGSSEVQLGQTHVMGFVTAQLVQPYKDRPNEGSLSIFTEFSPMADPSFEPGRPGESAVELGRIIDRGLRESRAVDTESLCVLAGKMVWSVRIDLHILDNGGNLVDAANIAALAALMTFRRPDCTVGGENGQEVIIHPLEEREPLPLIIHHLPIAFTFGFFNKGNIVVMDPTYVEEAVMCGRMTVTVNANGDICAIQKPGEEGVNQSVILHCLRLASSRAAATTKIIREEVEAYNCERSLQKVKRHPTLAKSEVSGPTVAVKEEHRKSSDQERAAEISREHVERLKLSTEEVRSSKEEEAANFKGGPSNWYSLECFTLWDPYSEAMDVDSLKVSLASRGDPVTKSSSTKKMNGSGNAQKVGVEISVEEVTGELGKKDTKHKDGEMTLKDAVKPKKKRKNKS

SEQ ID NO: 85950 - protein, 387 aa, Arabidopsis thaliana
  peptide (1)..(387): Ceres Seq. ID no. 12684790
MGFVTAQLVQPYKDRPNEGSLSIFTEFSPMADPSFEPGRPGESAVELGRIIDRGLRESRAVDTESLCVLAGKMVWSVRIDLHILDNGGNLVDAANIAALAALMTFRRPDCTVGGENGQEVIIHPLEEREPLPLIIHHLPIAFTFGFFNKGNIVVMDPTYVEEAVMCGRMTVTVNANGDICAIQKPGEEGVNQSVILHCLRLASSRAAATTKIIREEVEAYNCERSLQKVKRHPTLAKSEVSGPTVAVKEEHRKSSDQERAAEISREHVERLKLSTEEVRSSKEEEAANFKGGPSNWYSLECFTLWDPYSEAMDVDSLKVSLASRGDPVTKSSSTKKMNGSGNAQKVGVEISVEEVTGELGKKDTKHKDGEMTLKDAVKPKKKRKNKS

SEQ ID NO: 85951 - DNA, 1281 bp, Arabidopsis thaliana
  misc_feature (1)..(1281): Ceres Seq. ID no. 12684791
  misc_feature (1)..(1281): Ortholog of  Ceres SEQ ID NO 15177328 as cited in SEQ ID NO 52523
  misc_feature (1)..(1281): Ortholog of  Ceres SEQ ID NO 13655881 as cited in SEQ ID NO 64426
atgcataacgcgaagggattgttgggacgaatcgttcgagataagctatggagatttggttatcggaggagcttgtgctcgcttaaattgacttccgaggatcttgattaccaggttctcgttgaaggaagtggttgttcccgtactgcgattctcaatagaccacctgctctcaatgcactcaccactcacatgggatataggttgcagaaactttataagaattgggaagaagatccaaatattgggtttgtgatgatgaaggggagtggaagggcattttgtgctggtggtgatattgtgtctctctaccatttaagaacgagaggtagcccggatgctattagggagtttttctcgagtttgtatagttttatatacttgctaggcacatatctaaagccacatgtggcaattcttaacggtgttactatgggaggcggaactggagtttcgatacctgggacatttcgtgtagctactgatagaactatttttgctacccctgaaacaatcatcggttttcatcctgatgctggtgcttcttttaacctctcccacttacctggtcgcttaggggagtatctgggtctgactgggttaaagctcagtggggcagaaatgttggcatgtggccttgctacacattatattagaagtgaggaggttcctgtaatggaagaacagctcaagaagctgctcactgatgatccttctgttgttgagtcatgcttagaaaaatgtgcagaagttgcccatccggaaaagactggtgttattcgtaggatcgatttacttgaaaaatgctttagccatgacacagtagaagaaattattgattctttggtaagtttctttacgaatgattctgcgagtatgaccatctcggtcactagaagtaacagtgttttgggtcaccaggaaatcgaggctagtagaagaaaagatacatggtgcattacgactctacgtagacttaaagaaagctcaccgttatctttgaaggtggcattgagatctatccgggaaggaagattacaaacacttgaccaatgcttaatccgagagtacagaatgtcgctacaaggattaatcgggccaatgtccggcaatttttgtgagggagtacgagctcgattgatagacaaggatgaagcaccaaagtgggatccaccgagcttggagaaagtatcagaggacatggttgatgattacttctgtgccttgactcccacggaacctgatcttgaccttcctgtcaaactcagagaaagcatttag

SEQ ID NO: 85952 - protein, 426 aa, Arabidopsis thaliana
  peptide (1)..(426): Ceres Seq. ID no. 12684792
MHNAKGLLGRIVRDKLWRFGYRRSLCSLKLTSEDLDYQVLVEGSGCSRTAILNRPPALNALTTHMGYRLQKLYKNWEEDPNIGFVMMKGSGRAFCAGGDIVSLYHLRTRGSPDAIREFFSSLYSFIYLLGTYLKPHVAILNGVTMGGGTGVSIPGTFRVATDRTIFATPETIIGFHPDAGASFNLSHLPGRLGEYLGLTGLKLSGAEMLACGLATHYIRSEEVPVMEEQLKKLLTDDPSVVESCLEKCAEVAHPEKTGVIRRIDLLEKCFSHDTVEEIIDSLVSFFTNDSASMTISVTRSNSVLGHQEIEASRRKDTWCITTLRRLKESSPLSLKVALRSIREGRLQTLDQCLIREYRMSLQGLIGPMSGNFCEGVRARLIDKDEAPKWDPPSLEKVSEDMVDDYFCALTPTEPDLDLPVKLRESI

SEQ ID NO: 85953 - protein, 362 aa, Arabidopsis thaliana
  peptide (1)..(362): Ceres Seq. ID no. 12684793
MGYRLQKLYKNWEEDPNIGFVMMKGSGRAFCAGGDIVSLYHLRTRGSPDAIREFFSSLYSFIYLLGTYLKPHVAILNGVTMGGGTGVSIPGTFRVATDRTIFATPETIIGFHPDAGASFNLSHLPGRLGEYLGLTGLKLSGAEMLACGLATHYIRSEEVPVMEEQLKKLLTDDPSVVESCLEKCAEVAHPEKTGVIRRIDLLEKCFSHDTVEEIIDSLVSFFTNDSASMTISVTRSNSVLGHQEIEASRRKDTWCITTLRRLKESSPLSLKVALRSIREGRLQTLDQCLIREYRMSLQGLIGPMSGNFCEGVRARLIDKDEAPKWDPPSLEKVSEDMVDDYFCALTPTEPDLDLPVKLRESI

SEQ ID NO: 85954 - protein, 341 aa, Arabidopsis thaliana
  peptide (1)..(341): Ceres Seq. ID no. 12684794
MMKGSGRAFCAGGDIVSLYHLRTRGSPDAIREFFSSLYSFIYLLGTYLKPHVAILNGVTMGGGTGVSIPGTFRVATDRTIFATPETIIGFHPDAGASFNLSHLPGRLGEYLGLTGLKLSGAEMLACGLATHYIRSEEVPVMEEQLKKLLTDDPSVVESCLEKCAEVAHPEKTGVIRRIDLLEKCFSHDTVEEIIDSLVSFFTNDSASMTISVTRSNSVLGHQEIEASRRKDTWCITTLRRLKESSPLSLKVALRSIREGRLQTLDQCLIREYRMSLQGLIGPMSGNFCEGVRARLIDKDEAPKWDPPSLEKVSEDMVDDYFCALTPTEPDLDLPVKLRESI

SEQ ID NO: 85955 - DNA, 1890 bp, Arabidopsis thaliana
  misc_feature (1)..(1890): Ceres Seq. ID no. 12684844
  misc_feature (1)..(1890): Ortholog of  Ceres SEQ ID NO 14303680 as cited in SEQ ID NO 66019
atgggagagactgaggatgaaaaagatgcttctttggctgatatcgagaaggagtgtctctcggtttataagcgaaaggtcgaggaggctagtcggggtaaagcgaatttgctgaaagaaatcgctgttggcagagcagaaattgcagctattggctcttctatgggtggacaagagattcattctaacagcaggttaggagaaaacttgaaagaggagcttgagaatgttaatgtgcaattggatggactgcgcaaaaggaaagctgagagaatgattcggtttaatgaagttatcgatcagttactgaagttgtcactgcaacttggaaatccaacagattatctgaagaagtttgctgctgaagagaccgatctttcgcttcagaggttggaggaattgcgtagccagttgggtgagctccaaaatgaaaagagcaaaagattggaagaggtagagtgtttgctgaaaacgcttaactcgttgtgctcggttcttggtgaagatttcaaaggcatgataagagggatacattcatctctggttgattccaacactagggatgtgagcagaagtactcttgataagttggatatgatgattgtgaatttacgagaggccaagttacagcgaatgcagaaggttcaagatcttgcagtgtccttgttggagctctggaatctgctggacacgcctgcggaagagcaaaagatatttcacaatgtcacatgtagcatcgctttgactgagtctgaaataactgaggccaacatactttctgttgcttccattaaacgcgttgaggatgaagtcattaggcttagcaagatcaaaataactaagatcaaagaggtgatactgaggaagaggcttgagcttgaggaaatatcaaggaagatgcacatggccaccgaagttcttaaatcagaaaacttttcagttgaagctatagaatctggtgtcaaggatcctgagcagttgttagagcaaattgattccgagattgcaaaggtcaaagaggaagcttcaagcaggaaggagattcttgaaaaagtggagaaatggatgtcagcttgtgaagaagagtcttggctggaagagtacaatcgggatgataaccggtacaacgctggaagaggagctcatcttacattgaagcgtgcagaaaaagcccgtttacttgtcaataaacttcctgggatggtggaagctttgaccgccaaagtcactgcttgggagaatgaaagaggaaatgaattcttatatgatggggtccgagtcttatcgatgcttggtcagtacaagactgtatgggaagagaaagagcatgaaaaacagagacagagagatatgaagaaacttcatggacaactcataacagagcaagaagctctttatgggtctaaaccaagcccaaataaaagcggaaagaaaccactgagaacaccagtaaatgctgccatgaacagaaaactctcccttggtggtgccatgcttcatcaaagcttaaagcatgagaaggcaacactcaatagcaaaaggacgaagtactatgaccagaacgctactagtagaagagattcagctcttccaactctttcaggaaaagctgcgagatctccaatgcttaggaagcctctttcacctgtcacttccaatatcttgaattccccagaagatcatcacaaggatgcttacacaacaaaggagagaatcttgacacctaaaaccaacgaagaaaagaaaagagctgttccaacaactcctgcagcttcagtcgctatgacagaggcaacaacgccgttcactcctgctgtggagaagagaatggatgaggaagacgttattgttgagtattcgtttgaagaggttagggccggtttttgctaa

SEQ ID NO: 85956 - protein, 629 aa, Arabidopsis thaliana
  peptide (1)..(629): Ceres Seq. ID no. 12684845
MGETEDEKDASLADIEKECLSVYKRKVEEASRGKANLLKEIAVGRAEIAAIGSSMGGQEIHSNSRLGENLKEELENVNVQLDGLRKRKAERMIRFNEVIDQLLKLSLQLGNPTDYLKKFAAEETDLSLQRLEELRSQLGELQNEKSKRLEEVECLLKTLNSLCSVLGEDFKGMIRGIHSSLVDSNTRDVSRSTLDKLDMMIVNLREAKLQRMQKVQDLAVSLLELWNLLDTPAEEQKIFHNVTCSIALTESEITEANILSVASIKRVEDEVIRLSKIKITKIKEVILRKRLELEEISRKMHMATEVLKSENFSVEAIESGVKDPEQLLEQIDSEIAKVKEEASSRKEILEKVEKWMSACEEESWLEEYNRDDNRYNAGRGAHLTLKRAEKARLLVNKLPGMVEALTAKVTAWENERGNEFLYDGVRVLSMLGQYKTVWEEKEHEKQRQRDMKKLHGQLITEQEALYGSKPSPNKSGKKPLRTPVNAAMNRKLSLGGAMLHQSLKHEKATLNSKRTKYYDQNATSRRDSALPTLSGKAARSPMLRKPLSPVTSNILNSPEDHHKDAYTTKERILTPKTNEEKKRAVPTTPAASVAMTEATTPFTPAVEKRMDEEDVIVEYSFEEVRAGFC

SEQ ID NO: 85957 - protein, 575 aa, Arabidopsis thaliana
  peptide (1)..(575): Ceres Seq. ID no. 12684846
MGGQEIHSNSRLGENLKEELENVNVQLDGLRKRKAERMIRFNEVIDQLLKLSLQLGNPTDYLKKFAAEETDLSLQRLEELRSQLGELQNEKSKRLEEVECLLKTLNSLCSVLGEDFKGMIRGIHSSLVDSNTRDVSRSTLDKLDMMIVNLREAKLQRMQKVQDLAVSLLELWNLLDTPAEEQKIFHNVTCSIALTESEITEANILSVASIKRVEDEVIRLSKIKITKIKEVILRKRLELEEISRKMHMATEVLKSENFSVEAIESGVKDPEQLLEQIDSEIAKVKEEASSRKEILEKVEKWMSACEEESWLEEYNRDDNRYNAGRGAHLTLKRAEKARLLVNKLPGMVEALTAKVTAWENERGNEFLYDGVRVLSMLGQYKTVWEEKEHEKQRQRDMKKLHGQLITEQEALYGSKPSPNKSGKKPLRTPVNAAMNRKLSLGGAMLHQSLKHEKATLNSKRTKYYDQNATSRRDSALPTLSGKAARSPMLRKPLSPVTSNILNSPEDHHKDAYTTKERILTPKTNEEKKRAVPTTPAASVAMTEATTPFTPAVEKRMDEEDVIVEYSFEEVRAGFC

SEQ ID NO: 85958 - protein, 538 aa, Arabidopsis thaliana
  peptide (1)..(538): Ceres Seq. ID no. 12684847
MIRFNEVIDQLLKLSLQLGNPTDYLKKFAAEETDLSLQRLEELRSQLGELQNEKSKRLEEVECLLKTLNSLCSVLGEDFKGMIRGIHSSLVDSNTRDVSRSTLDKLDMMIVNLREAKLQRMQKVQDLAVSLLELWNLLDTPAEEQKIFHNVTCSIALTESEITEANILSVASIKRVEDEVIRLSKIKITKIKEVILRKRLELEEISRKMHMATEVLKSENFSVEAIESGVKDPEQLLEQIDSEIAKVKEEASSRKEILEKVEKWMSACEEESWLEEYNRDDNRYNAGRGAHLTLKRAEKARLLVNKLPGMVEALTAKVTAWENERGNEFLYDGVRVLSMLGQYKTVWEEKEHEKQRQRDMKKLHGQLITEQEALYGSKPSPNKSGKKPLRTPVNAAMNRKLSLGGAMLHQSLKHEKATLNSKRTKYYDQNATSRRDSALPTLSGKAARSPMLRKPLSPVTSNILNSPEDHHKDAYTTKERILTPKTNEEKKRAVPTTPAASVAMTEATTPFTPAVEKRMDEEDVIVEYSFEEVRAGFC

SEQ ID NO: 85959 - DNA, 1777 bp, Arabidopsis thaliana
  misc_feature (1)..(1777): Ceres Seq. ID no. 12684856
  misc_feature (1)..(1777): Ortholog of  Ceres SEQ ID NO 13597407 as cited in SEQ ID NO 64106
atctctttctctctctttccttgcaaattttcagctctcaaagagttaagagttagagagagagaggatggccattagggaaatcaaagatgtagagaggggtgaaatagtgaataaggtagaagatcttgggaaaccatttttgactcatgaagatgatgaaaaagagagtgagaataatgaatcatatttgatggttctcttcagtacttttgttgctgtctgtggctcctttgagtttggctcttgtgttggatactcagcgcctactcagtcatctataagacaagatctcaatctctcccttgcagagttctccatgtttggatccatcttaactatcggtgcaatgcttggtgctgttatgagtgggaaaatttcagatttctccggccgaaaaggggcaatgaggacatcagcttgcttctgcattacaggttggctcgctgtcttcttcaccaagggggcattgttacttgatgtaggaaggttctttacaggatatggaattggagttttttcttatgtggtccctgtgtacattgctgagatatctcccaagaatctccgaggtggactcacaacactgaaccaactcatgattgtgatcggctcatcggtttctttcttgatcggatctctcatttcttggaaaactcttgccctaaccggacttgctccctgcattgttttgctctttggcttgtgcttcatacccgaatctcctcgatggctggcaaaagcaggccatgagaaagagtttcgcgtagccctgcaaaagctgcgaggaaaagatgcagatatcacaaatgaagcagacggtattcaagtctcgattcaagctctagagattcttccaaaagcaagaatccaagaccttgtgtccaagaaatatggtcgatctgtcatcattggtgtttccctgatggtattccaacagtttgttggaatcaatgggatcggattctacgcaagtgaaacgtttgtaaaagccggatttacctctgggaaactaggaacaatcgctatcgcttgtgttcaggtgccaataactgttcttggaacaatcttgatagataaatctggacgaaggccactaattatgatttcagctggtggtatcttcttgggatgcatactcacaggcacatctttcttactcaagggacagagcttgttgcttgaatgggtcccttccttagccgttggaggtgtacttatctatgtagctgctttctccatcggaatgggacctgttccttgggtgataatgtctgagatatttccgataaacgtaaagggaatcgcaggaagcttagtggtactagtgaattggtctggtgcttgggctgtttcttacactttcaacttcctcatgagctggagctctccaggtacattctatttgtactcggcttttgcagctgcgacgataatatttgtggcgaagatggtgccagagacgaaagggaagacactggaagagatccaagcttgtattcgaagagaaacataagaagaaagatacaatcaatgttatgggaatgttatcaaatgaaaagactcgaactattcccgttggtgagctcaaagtggagtagagtaaaaattatcgccgggagataacgttgaaagtccgatgatgaggcataagggttttgcatgaatgttatgagaataggtttacttttatgtatttgttcacgttttaagttttcatcaaataggtttttgattggtatacagtatgtggaatattaatagaatggagtggcag

SEQ ID NO: 85960 - protein, 482 aa, Arabidopsis thaliana; identical to SEQ ID NO: 26636
  peptide (1)..(482): Ceres Seq. ID no. 12684857

SEQ ID NO: 85961 - protein, 440 aa, Arabidopsis thaliana; identical to SEQ ID NO: 26637
  peptide (1)..(440): Ceres Seq. ID no. 12684858

SEQ ID NO: 85962 - protein, 398 aa, Arabidopsis thaliana; identical to SEQ ID NO: 26638
  peptide (1)..(398): Ceres Seq. ID no. 12684859

SEQ ID NO: 85963 - DNA, 580 bp, Arabidopsis thaliana
  misc_feature (1)..(580): Ceres Seq. ID no. 12684868
  misc_feature (1)..(580): Ortholog of  Ceres SEQ ID NO 12422485 as cited in SEQ ID NO 20557
gtcggactcagtggagaagaagaagaagatccaaatcgatccgttgaaaaggaatttcgaatttgctgtgcgatgtcgagtgcggtggacgctacgggaaacccgatccctacttcggcggttttaacggcgtcagcgaagcatataggtatgaggtgtatgccggagaatgttgcgttcctcaaatgcaagaagaatgatccaaacccagagaagtgtctcgacaaaggtcgtgacgtcactcgctgcgtgcttggcttcaaaaggagatggatgattatgttgggtgtatgtattactacacaaacgagtttgatctgtgtaggaaagagcaagaagccttcgagaaagtgtgtcccttgaaatgagaatcacaagttcttgtcatgttttgatttgtatctcataataaagcaaaatgttcatttttgaatgagctttactctctccatctcttgtttgttgtcatcccatttatttcctctcagatgctttcgtagtgagttccaaagacaactaaatgactcagttttattgttcgatggttcactaatcagcacagaatggaacaattgttttt

SEQ ID NO: 85964 - protein, 120 aa, Arabidopsis thaliana
  peptide (1)..(120): Ceres Seq. ID no. 12684869
VGLSGEEEEDPNRSVEKEFRICCAMSSAVDATGNPIPTSAVLTASAKHIGMRCMPENVAFLKCKKNDPNPEKCLDKGRDVTRCVLGFKRRWMIMLGVCITTQTSLICVGKSKKPSRKCVP

SEQ ID NO: 85965 - protein, 96 aa, Arabidopsis thaliana
  peptide (1)..(96): Ceres Seq. ID no. 12684870
MSSAVDATGNPIPTSAVLTASAKHIGMRCMPENVAFLKCKKNDPNPEKCLDKGRDVTRCVLGFKRRWMIMLGVCITTQTSLICVGKSKKPSRKCVP

SEQ ID NO: 85966 - protein, 70 aa, Arabidopsis thaliana
  peptide (1)..(70): Ceres Seq. ID no. 12684871
MRCMPENVAFLKCKKNDPNPEKCLDKGRDVTRCVLGFKRRWMIMLGVCITTQTSLICVGKSKKPSRKCVP

SEQ ID NO: 85967 - DNA, 1660 bp, Arabidopsis thaliana
  misc_feature (1)..(1660): Ceres Seq. ID no. 12684872
  misc_feature (1)..(1660): Ortholog of  Ceres SEQ ID NO 13599520 as cited in SEQ ID NO 633
  misc_feature (1)..(1660): Ortholog of  Ceres SEQ ID NO 13595142 as cited in SEQ ID NO 56671
  misc_feature (1)..(1660): Ortholog of  Ceres SEQ ID NO 15168569 as cited in SEQ ID NO 58123
  misc_feature (1)..(1660): Ortholog of  Ceres SEQ ID NO 15226382 as cited in SEQ ID NO 63295
  misc_feature (1)..(1660): Ortholog of  Ceres SEQ ID NO 13598460 as cited in SEQ ID NO 63382
atgatcgctttcgttatattcattctctcttttctctttccattttggctcccaccgacgtcatcaatctctaccggagacttccgccgattctcacaccgttcttcttctctccttccgattccggattccaatttcgttccttttttgttttctctcaaaacccctaaattttcttcctttcttcgatctggattttttgtgttccccaaatttcaagactttgatctgattccttctaagatttctccaaagcaaagatcttttttttgttttttgggatctctgtattgttgatgggcacaactagggtctgctcggaggtttcttctggatcttcgaaatcgcttagccaatctctcacggtatcgacctctaccacagaaacagtcaatggtttccatgaattcaagatctgtgggtactctctcgctaaaggtgttggtgtcggcaaatacgtcgcttccgatacgtttatggtcggtggttactcgtgggcaatctacttttatccagatgggaagagtccggaggataactcgtcttacgtttctttgttcatagctcttgctagcgaaggagctgatgttagggctttgtttgagctcacgcttgtggatcagagtggtaatgggaagcataaggttcatagccattttggtagagctctcgatagcggtccctatactctcaagtatcgtggaagcatgtggggatacaagcggtttttcaggaggtccagtctagaatcgtcggattatttgaaggagaatagtctcttggttaggtgccgtgtgggtgtggtgaagtcagttacggagggaccgaggtattacaatatccctgtgccagtttctaacttgggacaacagttgggaaatttattggagagtgggaaaggctgtgatgttgttttccaagttgatggagaaaccttcaacgcacacaaattggttcttgcaacgcgttccccggttttcaacgcacagctttttggccctttaggagaccgaaataccaaatgcataacgatagaagacatggaagcacccattttcaaggtattgctccattttatctactgggacgaattgcctgatatgcaagagttaataggaacagactctacattggcgtctactcttgtggctcagcatctactagcagcggcagaccgttatgctcttgagcggcttaaagcaatctgtgagtcaaaactctgtgaaggggttgccataaacacggttgcaactactttggccctagcagagcagcatcattgtttgcagctaaaagcagtgtgtctcaaattcgtggcactgccagagaacctgaaagctgtgatgcaaacagatgggtttgattatctgaaagagagttgcccatctttactaacggagctattgcagtatgtggcgaggctaagtgaacactctgttatagtatctggacatcgaaaagaaatatttgccgatggttgtgacgcgagtggaagacgagtgaagccccggttgcactgaatgggagagaaagaagaaagatttgtgcattgtataatctctgttatggataatggctgatctaatcggatctagcaagtacaatgaatcgttttcaacgcgttttctcataaatcaaagatccaatgaaatttggggtt

SEQ ID NO: 85968 - protein, 407 aa, Arabidopsis thaliana
  peptide (1)..(407): Ceres Seq. ID no. 12684873
MGTTRVCSEVSSGSSKSLSQSLTVSTSTTETVNGFHEFKICGYSLAKGVGVGKYVASDTFMVGGYSWAIYFYPDGKSPEDNSSYVSLFIALASEGADVRALFELTLVDQSGNGKHKVHSHFGRALDSGPYTLKYRGSMWGYKRFFRRSSLESSDYLKENSLLVRCRVGVVKSVTEGPRYYNIPVPVSNLGQQLGNLLESGKGCDVVFQVDGETFNAHKLVLATRSPVFNAQLFGPLGDRNTKCITIEDMEAPIFKVLLHFIYWDELPDMQELIGTDSTLASTLVAQHLLAAADRYALERLKAICESKLCEGVAINTVATTLALAEQHHCLQLKAVCLKFVALPENLKAVMQTDGFDYLKESCPSLLTELLQYVARLSEHSVIVSGHRKEIFADGCDASGRRVKPRLH

SEQ ID NO: 85969 - protein, 347 aa, Arabidopsis thaliana
  peptide (1)..(347): Ceres Seq. ID no. 12684874
MVGGYSWAIYFYPDGKSPEDNSSYVSLFIALASEGADVRALFELTLVDQSGNGKHKVHSHFGRALDSGPYTLKYRGSMWGYKRFFRRSSLESSDYLKENSLLVRCRVGVVKSVTEGPRYYNIPVPVSNLGQQLGNLLESGKGCDVVFQVDGETFNAHKLVLATRSPVFNAQLFGPLGDRNTKCITIEDMEAPIFKVLLHFIYWDELPDMQELIGTDSTLASTLVAQHLLAAADRYALERLKAICESKLCEGVAINTVATTLALAEQHHCLQLKAVCLKFVALPENLKAVMQTDGFDYLKESCPSLLTELLQYVARLSEHSVIVSGHRKEIFADGCDASGRRVKPRLH

SEQ ID NO: 85970 - protein, 270 aa, Arabidopsis thaliana
  peptide (1)..(270): Ceres Seq. ID no. 12684875
MWGYKRFFRRSSLESSDYLKENSLLVRCRVGVVKSVTEGPRYYNIPVPVSNLGQQLGNLLESGKGCDVVFQVDGETFNAHKLVLATRSPVFNAQLFGPLGDRNTKCITIEDMEAPIFKVLLHFIYWDELPDMQELIGTDSTLASTLVAQHLLAAADRYALERLKAICESKLCEGVAINTVATTLALAEQHHCLQLKAVCLKFVALPENLKAVMQTDGFDYLKESCPSLLTELLQYVARLSEHSVIVSGHRKEIFADGCDASGRRVKPRLH

SEQ ID NO: 85971 - DNA, 1187 bp, Arabidopsis thaliana
  misc_feature (1)..(1187): Ceres Seq. ID no. 12684876
  misc_feature (1)..(1187): Ortholog of  Ceres SEQ ID NO 12583421 as cited in SEQ ID NO 56410
  misc_feature (1)..(1187): Ortholog of  Ceres SEQ ID NO 15176407 as cited in SEQ ID NO 59620
  misc_feature (1)..(1187): Ortholog of  Ceres SEQ ID NO 13596876 as cited in SEQ ID NO 62696
  misc_feature (1)..(1187): Ortholog of  Ceres SEQ ID NO 13655442 as cited in SEQ ID NO 64359
accgttgaacactttcccgagaaaagctctctcatcttttattttcccggaaaaaaataattaaacttttactctcttccgatctcctttccttgtacatctagatccaagcggtatcgatggctcgacgtggattattgatttcgttcttcgctatcttctccgtcctgcttcaatcttccacttctctgatcagttcttctagcgtcttcgtcaatccttccaaagtcaagcaggtttcatcgaaacccagggcgtttgtgtatgaagggtttctcacggaattggaatgtgatcatatggtctcccttgcaaaagcgagcctgaagagatctgctgttgctgataatgatagtggagagagcaaattcagcgaggttcgaaccagctctggcacctttatctccaaaggaaaggatcccattgtttctggtatagaagataagatctccacttggacatttcttccaaaagaaaacggggaagacattcaggtattgagatacgagcacggccaaaaatacgatgctcactttgattactttcatgacaaagtcaacattgtccgtggtggacatcgcatggcaacaattcttatgtatctatccaatgtgacgaaaggtggagaaactgtattccctgatgcagagataccttctcgccgagtactatctgaaaataaagaagacctttctgattgtgccaagagaggaattgctgtgaaaccaaggaaaggggatgctttgttgttcttcaacctccacccagacgcaatcccggacccattgagccttcacggtggatgtcctgtgatagaaggagagaaatggtcggcaaccaagtggatccacgtagactcatttgataggatcgtgacaccaagcggaaactgcacggatatgaacgagagctgtgagagatgggcagttcttggggaatgcacaaagaatccagagtacatggttggaactacagagcttcctggctattgcaggcgaagctgtaaggcttgctagactttattttacctcttctttgtcttattatgtgcctttactctcaaagttttctgtttttttccgagtttctcttagagttgttgtcgttgatgaaatttgttctaaggggagttctgtaaaactatactgttcctgaaaagaatataatgtaaacacatagattcagtc

SEQ ID NO: 85972 - protein, 298 aa, Arabidopsis thaliana; identical to SEQ ID NO: 24186
  peptide (1)..(298): Ceres Seq. ID no. 12684877

SEQ ID NO: 85973 - protein, 238 aa, Arabidopsis thaliana; identical to SEQ ID NO: 24187
  peptide (1)..(238): Ceres Seq. ID no. 12684878

SEQ ID NO: 85974 - DNA, 1166 bp, Arabidopsis thaliana
  misc_feature (1)..(1166): Ceres Seq. ID no. 12684892
  misc_feature (1)..(1166): Ortholog of  Ceres SEQ ID NO 13599328 as cited in SEQ ID NO 1002
  misc_feature (1)..(1166): Ortholog of  Ceres SEQ ID NO 14302544 as cited in SEQ ID NO 56628
  misc_feature (1)..(1166): Ortholog of  Ceres SEQ ID NO 14302529 as cited in SEQ ID NO 59789
  misc_feature (1)..(1166): Ortholog of  Ceres SEQ ID NO 13584819 as cited in SEQ ID NO 64536
  misc_feature (1)..(1166): Ortholog of  Ceres SEQ ID NO 13663748 as cited in SEQ ID NO 67516
  misc_feature (1)..(1166): Ortholog of  Ceres SEQ ID NO 12635897 as cited in SEQ ID NO 0
acagctcaggatatactcttttaggtttcaacagcagcttagtctctctgatctctctacctccctcacaccctaaaactcagcaacaatggccgttaccttttcagatctacacacagaggagggtgtcaaatccgtggaggagcacctcgccggaaaaacctacatctccggagatcaattgtctgtggatgatgtcaaggtttacgctgccgttccagtgaaacccagcgatgccttccccaatgctagcaagtggtacgagtccgtggcttcccaacttgctaaaagtttccctggaaaggccgttggagtacaattcggtggctctgctgctgctgctccagctgttgaagctgaggtacctttacttgaatgctttattctttattaccatagtcgtagaccttagaaaaagggtaatgaatgtagtttggaactatgatttgaaaggtgatatttccaatcttgtattagggatcacgagctatgtttggtaggggaattgattggagtttggtttggaatgttgtgtgtgtgtgtgtgtgtttacgctatcttgcataattgtcaacaggcacctgcagctgcagctgatgatgatgatgacatggatctctttggtgacgagaccgaagaagaaaagaaagctgcagaggagagggaggctgctaagaaggacaccaagaagcctaaagagagtggaaagtcttctgtgctcatggatgttaagccatgggatgatgaaaccgacatgaagaaactggaagaggctgttcgtggtgttgagatgcctggtcttttctggggagcctcaaaacttgtaccagttggttatgggatcaagaaactcacaattatgttcacgattgttgatgacctcgtgtccccggacaacctcattgaagacttcctcacctcagagcctaacaacgagtacatccagagttgtgacattgtcgctttcaacaagatttagagacttcaaatttctccttaccgaaacatatctgaatttcaagttttgttttcgtttgtgttgtttaccgaaatgtttctttcctagttgcaagaccgctttcatgttacaataacactaaattttcaatggttactattccgttgcatcattgttaagaaacatttagatactttgacaaattctc

SEQ ID NO: 85975 - protein, 150 aa, Arabidopsis thaliana
  peptide (1)..(150): Ceres Seq. ID no. 12684893
MLCVCVCVYAILHNCQQAPAAAADDDDDMDLFGDETEEEKKAAEEREAAKKDTKKPKESGKSSVLMDVKPWDDETDMKKLEEAVRGVEMPGLFWGASKLVPVGYGIKKLTIMFTIVDDLVSPDNLIEDFLTSEPNNEYIQSCDIVAFNKI

SEQ ID NO: 85976 - protein, 122 aa, Arabidopsis thaliana; identical to SEQ ID NO: 36256
  peptide (1)..(122): Ceres Seq. ID no. 12684894

SEQ ID NO: 85977 - protein, 107 aa, Arabidopsis thaliana
  peptide (1)..(107): Ceres Seq. ID no. 12684895
MAVTFSDLHTEEGVKSVEEHLAGKTYISGDQLSVDDVKVYAAVPVKPSDAFPNASKWYESVASQLAKSFPGKAVGVQFGGSAAAAPAVEAEVPLLECFILYYHSRRP

SEQ ID NO: 85978 - DNA, 1515 bp, Arabidopsis thaliana
  misc_feature (1)..(1515): Ceres Seq. ID no. 12684896
  misc_feature (1)..(1515): Ortholog of  Ceres SEQ ID NO 12625388 as cited in SEQ ID NO 63299
  misc_feature (1)..(1515): Ortholog of  Ceres SEQ ID NO 15179860 as cited in SEQ ID NO 66716
caagattaaaaagacgacttctcttttaacttattcctcctctgcttcttcaagatccattgtctgcaatttcaatcccttgtctcgtcatggattccgtcttctctaacgttgctcgtgctcccgaagatcctattctcggtgtaactgttgcttacaacaatgatcctagtcctgttaagatcaatttgggtgtcggtgcctaccgaactgaggaagggaagcctcttgttcttgatgtggtgcgtaaggcagagcaacagctagtgaacgatccgtctcgggtcaaggaatacattcccattgttggtatttccgattttaacaagttaagcgccaagctcatcttaggtgctgacagtcctgcgattacagaaagtagagttactacagtccagtgcttgtctggtactggttcgttgagagttggggctgagtttctcaaaacacactaccaccaaagtgtcatttacattccaaaaccaacttgggggaaccatcccaaagttttcaacttggcaggcttgtctgtggagtatttccgctactatgatcctgcaacccgtggtcttgacttcaaaggcttgctcgaggatcttggcgctgcaccatctggagctattgtcttacttcatgcatgtgcacacaatcccactggagttgacccaacctctgaacagtgggaacagattcgacagctgatgagatctaaaagcttattacccttttttgatagtgcatatcagggttttgctagtggtagccttgacacagatgcacaatctgtccgtacatttgttgctgatggcggtgaatgcttgatagctcaaagttacgccaaaaatatgggactttatggggagcgtgttggtgcccttagcattgtctgcaagtcagcagatgtggctagtaaggttgagagccaggtgaagcttgttgtgcggcccatgtattcgagcccccctattcatggagcatcaattgttgccaccattctaaaaagcagtgatatgtacaacaactggaccatcgagctgaaagaaatggctgaccgtataaagagcatgcgccaacagttatttgaagctatacaagctagaggtacacctggtgactggagtcatattatcaaacagattgggatgtttacatttactggattgaacaaggagcaagttgaattcatgaccaaagagttccacatttacatgacctctgatgggagaataagcatggcaggtctaagttcgaagacagtgcctcaccttgccgatgctatgcatgctgcagtgacccgcctcggctaaactagcgaccatacatttttttgctgtttctacaaataaaatgggacaaaaaaaaagaacaccgtttttgttggcttatatactatggtttttttctgatggtaccatatgtttcctcatgtcttttgactaaagatggttgaaccaaaaccaaagtgaggattgtgacattgagatctaccgtttctaagaaaatattggttacttt

SEQ ID NO: 85979 - protein, 405 aa, Arabidopsis thaliana; identical to SEQ ID NO: 28643
  peptide (1)..(405): Ceres Seq. ID no. 12684897

SEQ ID NO: 85980 - DNA, 1808 bp, Arabidopsis thaliana
  misc_feature (1)..(1808): Ceres Seq. ID no. 12684929
  misc_feature (1)..(1808): Ortholog of  Ceres SEQ ID NO 13594317 as cited in SEQ ID NO 57796
attttccattttgcttcttcttccttcttctcctctctctgacaccaacaatggcgagacttaccttgagaccccacaatcacttcttctcatctcctatctacgcacataaacaacctttcctctccgtatacaccatcttcccccaccaccaccaaaatcctcttatcaaatcaagggttaagtgctccgccagtggtactgaacgagtcagagagagtaagaagcttcctccaaaggatcctatcgaagaccctaaaccccagcttccgattcctgaagttctcagtacggaaacgggttttgaacagaattggcctccatggaaaaatatacctcagagatataagcttatcggcgctacttctctcgcctttgttatctgcaatatggacaaggtgaacttgagtattgctataataccaatgtcacaccagtttggatggagctcatctgtggctgggttggtccagtcttccttcttttggggttatgccttgagccagttgcctggaggttggctttccaagatttttggcggaagaaaagtgcttgagattggtgtctttacatggtctttcgctacagctcttgttccactacttgctggatttatgcccggtttgatcttttctcgaattttgagatttgtaactccaggtgggaataggagaaggtgtttccccatcggctgcgacagaccttattgccaggacaatacctgttaaggagcgctcaagagcggtaggctttgtttttggaggactgagtttggggagtgtaatggggcttctcttggctcctcccatcatcgaaacctttaattgggaatctgtcttttacttgtttggtctccttggtgttggctggttcgtcgggtttcagtttcttaatgaagaagaagtttcatataaaggtaatgagatctctacttcgcataaatcagaaaacgctacaaaggaagagttggggagctcattgaaggagattccatggaagtcatttttccaaagcccggctgtttgggcaatgatatacactcacttttgtggaagttggggtcactatacctgtttatcttggctaccaacttatttcagtgaggctctgagtctaaatttgacagaagctgcttgggtttccatccttcctccactggcttcgattgtcgtgacaagtcttgcttcacaatttgctgattacttaattacaaatggagttgatactaccacggtccgaaagatttgtcaaacgattgcgtttgtggcaccagcgatctgcatgacactttcatctgtggacattggattgccaccatgggaaattgtaggaattttgacagcaggcttggccctatcaagttttgctttatcaggactttattgtactcatcaggacatttcacccgaatatgcaagcatactcctgggtattacaaacacagtcggggcagtacctggaattgtaggagtggccctaactggttttctcctagactcgacccattcctggactatgtctctattcgtgccatcaatattcttctacttgacggggacggttgtatggttggcatttgcaagcagtgagcctcagacgttcagaaaggaagactcataagttttgttattgaggcacaaaaacatggagaaacttttgttattgtataggtaaaaaagaaatggtaaaaaattttctgttgtgaaagcaaaaacaaagagcagtggtaattttgttcactgccttatcctggtttttgcatagatgcaaattaaactcagtgttaatgggtaaaaggtggagtattg

SEQ ID NO: 85981 - protein, 278 aa, Arabidopsis thaliana
  peptide (1)..(278): Ceres Seq. ID no. 12684930
MGLLLAPPIIETFNWESVFYLFGLLGVGWFVGFQFLNEEEVSYKGNEISTSHKSENATKEELGSSLKEIPWKSFFQSPAVWAMIYTHFCGSWGHYTCLSWLPTYFSEALSLNLTEAAWVSILPPLASIVVTSLASQFADYLITNGVDTTTVRKICQTIAFVAPAICMTLSSVDIGLPPWEIVGILTAGLALSSFALSGLYCTHQDISPEYASILLGITNTVGAVPGIVGVALTGFLLDSTHSWTMSLFVPSIFFYLTGTVVWLAFASSEPQTFRKEDS

SEQ ID NO: 85982 - protein, 241 aa, Arabidopsis thaliana
  peptide (1)..(241): Ceres Seq. ID no. 12684931
FPFCFFFLLLLSLTPTMARLTLRPHNHFFSSPIYAHKQPFLSVYTIFPHHHQNPLIKSRVKCSASGTERVRESKKLPPKDPIEDPKPQLPIPEVLSTETGFEQNWPPWKNIPQRYKLIGATSLAFVICNMDKVNLSIAIIPMSHQFGWSSSVAGLVQSSFFWGYALSQLPGGWLSKIFGGRKVLEIGVFTWSFATALVPLLAGFMPGLIFSRILRFVTPGGNRRRCFPIGCDRPYCQDNTC

SEQ ID NO: 85983 - protein, 225 aa, Arabidopsis thaliana
  peptide (1)..(225): Ceres Seq. ID no. 12684932
MARLTLRPHNHFFSSPIYAHKQPFLSVYTIFPHHHQNPLIKSRVKCSASGTERVRESKKLPPKDPIEDPKPQLPIPEVLSTETGFEQNWPPWKNIPQRYKLIGATSLAFVICNMDKVNLSIAIIPMSHQFGWSSSVAGLVQSSFFWGYALSQLPGGWLSKIFGGRKVLEIGVFTWSFATALVPLLAGFMPGLIFSRILRFVTPGGNRRRCFPIGCDRPYCQDNTC

SEQ ID NO: 85984 - DNA, 958 bp, Arabidopsis thaliana
  misc_feature (1)..(958): Ceres Seq. ID no. 12684933
  misc_feature (1)..(958): Ortholog of  Ceres SEQ ID NO 13594549 as cited in SEQ ID NO 51707
  misc_feature (1)..(958): Ortholog of  Ceres SEQ ID NO 13595294 as cited in SEQ ID NO 55998
  misc_feature (1)..(958): Ortholog of  Ceres SEQ ID NO 14302012 as cited in SEQ ID NO 56618
  misc_feature (1)..(958): Ortholog of  Ceres SEQ ID NO 12598102 as cited in SEQ ID NO 61029
  misc_feature (1)..(958): Ortholog of  Ceres SEQ ID NO 12625361 as cited in SEQ ID NO 62928
  misc_feature (1)..(958): Ortholog of  Ceres SEQ ID NO 13599424 as cited in SEQ ID NO 0
atctaactctctctctactgcaatttttagggttttatcctccgaaagtctcaacctttttcttatcctcaacaaggagaaatggcggcgactcaacttacagcgtcaccagtgactatgtcagcaaggagcttagcctcgctggatggtctcagagcttcgagtgtcaagttttcatctttgaaaccagggacccttagacagagccagttccgtcgtttggttgtcaaagctgcttctgttgttgcccctaagtatacttcaattaagccattgggagatcgagttttggtgaagatcaaggaggcagaggagaagactttaggtggtatcttacttccatccactgctcaatcaaaacctcaaggaggtgaagtcgttgccgtgggtgaaggaagaactattgggaagaacaaaattgatatcactgtccctactggagcacaaattatctactccaaatacgcaggaactgaggtggagttcaatgatgtgaagcatcttatcctcaaggaagatgatattgttggcattcttgagacagaggacatcaaagatctcaaacctttgaatgaccgagtctttattaaggttgctgaggcggaggagaaaacagctggagggttgttgttaaccgagactaccaaagagaagccttctattggcacggtgatagcagttggaccgggttccctagacgaggaaggtaaaattacgcctctaccagtatcaaccggaagcacagtactttactccaagtatgctggtaacgacttcaagggcaaagatggttccaactacattgccctcagagcttcagatgtgatggctatactttcttagttatgttatatctttgtaatctgcaacttgtatcccaattgtggaaattttttccgtaaacggcctgagcataatctggaataaagacttgagtttgaaaatgtgattttattgc

SEQ ID NO: 85985 - protein, 253 aa, Arabidopsis thaliana; identical to SEQ ID NO: 24239
  peptide (1)..(253): Ceres Seq. ID no. 12684934

SEQ ID NO: 85986 - protein, 241 aa, Arabidopsis thaliana; identical to SEQ ID NO: 24240
  peptide (1)..(241): Ceres Seq. ID no. 12684935

SEQ ID NO: 85987 - DNA, 1311 bp, Arabidopsis thaliana
  misc_feature (1)..(1311): Ceres Seq. ID no. 12685004
  misc_feature (1)..(1311): Ortholog of  Ceres SEQ ID NO 13654989 as cited in SEQ ID NO 63117
  misc_feature (1)..(1311): Ortholog of  Ceres SEQ ID NO 13657138 as cited in SEQ ID NO 65923
  misc_feature (1)..(1311): Ortholog of  Ceres SEQ ID NO 13584744 as cited in SEQ ID NO 69137
atgaattcttctacctcaggtttccgttggagctggtctgatcctaagactcctcaatggaaccaatccatgtttcctaaagttccaattcgcacccgctgtggcaatggcaacggcagttcatcgtgtcgtgctaatatatgtatagccgtgacaaatggttcatcatcaatattcggtgaaagatgtaatgcgtctcatgcttttgtttgcgctgttgattctgatatcaaatgtcgcaattgtcacaaatatctagttatcctcgctgttgtcagcggtttgattctcttcacgacattcgccattatattatggctccttgtctataagcgaagcaagaaacgccgaaaatcacgaaaagtatctaatccagcttcatcatcatcagtagttcctccttcatggaagatcttcactagtgaagaactgagatcaatgacgaagaacttcagtgaagcaaaccgtctagctggggacgcgaaaaccggtggaacctatagcggtggtttatcagacgggactaaagtggcggttaagagattgaaaaggtctagttttcagaggaagaaagagttctactccgagattagaagagcagctaaactttatcacccgaatgtagttgctataaaaggttgttgctatgatcatggagaacgtttcattgtttatgagttcatagctagtggacctctcgatagatggctacaccatgtgcctagaggtggtagaagcttggactggaacatgagattgaacatcgccacaactcttgctcaaggaatcgcgtttctacacgacaaggtcaagccacaagtggtgcaccgcgacatccgagctagcaacgtgctacttgatgaggagtttggagctcatttaatgggtgttggtctctcaaaattcgttccttgggaagtaatgcaagagagaaccgtaatggcgggtggaacctacggttacctcgcacccgaatacgtttacagaaacgagctaaccacgaagagcgatgtctacagtttcggagtccttttgcttgagattgtgagcggtcgtagaccaactcaggctgttaattcttcagttgggtggcagagcatattcgaatgggcaacaccattggttcaagctaaccgttggttagagattcttgatccggttattacatgcggtttaccggaagcatgtgtggttcagaaagttgttgacttggtttattcttgtactcagaatgtgccatcaatgcgtccaaggatgtcacatgtggttcatcagcttcagcaattggtccaacctttagaggttaagtag

SEQ ID NO: 85988 - protein, 436 aa, Arabidopsis thaliana
  peptide (1)..(436): Ceres Seq. ID no. 12685005
MNSSTSGFRWSWSDPKTPQWNQSMFPKVPIRTRCGNGNGSSSCRANICIAVTNGSSSIFGERCNASHAFVCAVDSDIKCRNCHKYLVILAVVSGLILFTTFAIILWLLVYKRSKKRRKSRKVSNPASSSSVVPPSWKIFTSEELRSMTKNFSEANRLAGDAKTGGTYSGGLSDGTKVAVKRLKRSSFQRKKEFYSEIRRAAKLYHPNVVAIKGCCYDHGERFIVYEFIASGPLDRWLHHVPRGGRSLDWNMRLNIATTLAQGIAFLHDKVKPQVVHRDIRASNVLLDEEFGAHLMGVGLSKFVPWEVMQERTVMAGGTYGYLAPEYVYRNELTTKSDVYSFGVLLLEIVSGRRPTQAVNSSVGWQSIFEWATPLVQANRWLEILDPVITCGLPEACVVQKVVDLVYSCTQNVPSMRPRMSHVVHQLQQLVQPLEVK

SEQ ID NO: 85989 - protein, 413 aa, Arabidopsis thaliana
  peptide (1)..(413): Ceres Seq. ID no. 12685006
MFPKVPIRTRCGNGNGSSSCRANICIAVTNGSSSIFGERCNASHAFVCAVDSDIKCRNCHKYLVILAVVSGLILFTTFAIILWLLVYKRSKKRRKSRKVSNPASSSSVVPPSWKIFTSEELRSMTKNFSEANRLAGDAKTGGTYSGGLSDGTKVAVKRLKRSSFQRKKEFYSEIRRAAKLYHPNVVAIKGCCYDHGERFIVYEFIASGPLDRWLHHVPRGGRSLDWNMRLNIATTLAQGIAFLHDKVKPQVVHRDIRASNVLLDEEFGAHLMGVGLSKFVPWEVMQERTVMAGGTYGYLAPEYVYRNELTTKSDVYSFGVLLLEIVSGRRPTQAVNSSVGWQSIFEWATPLVQANRWLEILDPVITCGLPEACVVQKVVDLVYSCTQNVPSMRPRMSHVVHQLQQLVQPLEVK

SEQ ID NO: 85990 - protein, 290 aa, Arabidopsis thaliana
  peptide (1)..(290): Ceres Seq. ID no. 12685007
MTKNFSEANRLAGDAKTGGTYSGGLSDGTKVAVKRLKRSSFQRKKEFYSEIRRAAKLYHPNVVAIKGCCYDHGERFIVYEFIASGPLDRWLHHVPRGGRSLDWNMRLNIATTLAQGIAFLHDKVKPQVVHRDIRASNVLLDEEFGAHLMGVGLSKFVPWEVMQERTVMAGGTYGYLAPEYVYRNELTTKSDVYSFGVLLLEIVSGRRPTQAVNSSVGWQSIFEWATPLVQANRWLEILDPVITCGLPEACVVQKVVDLVYSCTQNVPSMRPRMSHVVHQLQQLVQPLEVK

SEQ ID NO: 85991 - DNA, 768 bp, Arabidopsis thaliana
  misc_feature (1)..(768): Ceres Seq. ID no. 12685049
  misc_feature (1)..(768): Ortholog of  Ceres SEQ ID NO 14311713 as cited in SEQ ID NO 51356
  misc_feature (1)..(768): Ortholog of  Ceres SEQ ID NO 14303126 as cited in SEQ ID NO 67219
atgagttactctcatcaaagcatgggttctggtagtagaaatgcaaggggatatgaatttggaaggacttatgttgtgaggcctaaaggaaagcatcaagccactctagtctggcttcatggtcttggtgacaatggctctagttcatctcagctcatggacagcttgcatcttccaaatataaaatggatttgtccaaccgctccttcgcgtcctgttacaagtcttggtggatttacatgcactgcttggtttgacgttggggaaatttctgaagatggtcatgatgatttggaaggtttagatgcctcagcttcacatattgctaaccttttgtcctctgaaccagcagatgttaaagtaggcataggaggttttagcatgggagcagcaatatctctctactccgcgacttgttatgctcttggacgttatggaactggccatgcgtatcctataaacctacaagctgttgtaggactcagcggctggcttcctggttggaagagcttaaggagcaaaatagaatgttcatttgaggctgcaaggcgtgctgcatcgttaccaattatacttacacatggaacttccgatgatgtggttccttataggtttggagagaaatctgcgcagtctcttggcatggctggatttcgactagccatgtttaaaccatacgaaggacttggtcattataccgttcccagagaaatggatgaggtcgttcactggctcacaacgatgctcggacttgagggctcgcgctaa

SEQ ID NO: 85992 - protein, 255 aa, Arabidopsis thaliana
  peptide (1)..(255): Ceres Seq. ID no. 12685050
MSYSHQSMGSGSRNARGYEFGRTYVVRPKGKHQATLVWLHGLGDNGSSSSQLMDSLHLPNIKWICPTAPSRPVTSLGGFTCTAWFDVGEISEDGHDDLEGLDASASHIANLLSSEPADVKVGIGGFSMGAAISLYSATCYALGRYGTGHAYPINLQAVVGLSGWLPGWKSLRSKIECSFEAARRAASLPIILTHGTSDDVVPYRFGEKSAQSLGMAGFRLAMFKPYEGLGHYTVPREMDEVVHWLTTMLGLEGSR

SEQ ID NO: 85993 - protein, 248 aa, Arabidopsis thaliana
  peptide (1)..(248): Ceres Seq. ID no. 12685051
MGSGSRNARGYEFGRTYVVRPKGKHQATLVWLHGLGDNGSSSSQLMDSLHLPNIKWICPTAPSRPVTSLGGFTCTAWFDVGEISEDGHDDLEGLDASASHIANLLSSEPADVKVGIGGFSMGAAISLYSATCYALGRYGTGHAYPINLQAVVGLSGWLPGWKSLRSKIECSFEAARRAASLPIILTHGTSDDVVPYRFGEKSAQSLGMAGFRLAMFKPYEGLGHYTVPREMDEVVHWLTTMLGLEGSR

SEQ ID NO: 85994 - protein, 203 aa, Arabidopsis thaliana
  peptide (1)..(203): Ceres Seq. ID no. 12685052
MDSLHLPNIKWICPTAPSRPVTSLGGFTCTAWFDVGEISEDGHDDLEGLDASASHIANLLSSEPADVKVGIGGFSMGAAISLYSATCYALGRYGTGHAYPINLQAVVGLSGWLPGWKSLRSKIECSFEAARRAASLPIILTHGTSDDVVPYRFGEKSAQSLGMAGFRLAMFKPYEGLGHYTVPREMDEVVHWLTTMLGLEGSR

SEQ ID NO: 85995 - DNA, 873 bp, Arabidopsis thaliana
  misc_feature (1)..(873): Ceres Seq. ID no. 12685102
  misc_feature (1)..(873): Ortholog of  Ceres SEQ ID NO 15179055 as cited in SEQ ID NO 0
atgtcggtgtgttcttcgtcttcttcttctcagaaaacatggattgttaacgggatcttggccggaacagcgattgcagccgcaatcggcgcacgtgcttatctgggtcgatccaagaaattccggagccgggtcgtcggaatcattcccgcacgttacgcttcctctcgattcgagggtaagcctctcgtgcaaatcctcggcaaacccatgatccagagaacttgggagaggtcgaagttagctactacgcttgatcatattgttgtagccactgatgatgaaagaatcgcggagtgttgtcgtggatttggtgccgatgttatcatgacttcagagtcttgcagaaatggcactgagaggtgcaacgaagcgctagaaaagctggagaagaagtatgatgtcgttgttaacattcaaggagatgaaccacttattgagcctgagattatagacggtgtagtcaaagcacttcaggtaacaccggatgcagtgtttagcacagcggtgacatcattgaaaccagaagacgggcttgatcctaaccgagttaaatgtgtggtggacaatcgtggctatgctatctatttctcaaggggtttgattccttataacaagagtggtaaagtcaatccagattttccgtacatgcttcatcttggaattcagagctttgattcgaagtttctgaaggtatattcagagcttcaaccaacgccattgcagcaagaagaggatctagaacagctcaaagttcttgagaatggctacaaaatgaaggttataaaggtagatcatgaagctcatggagttgacacacccgatgatgtcgaaaagattgaatctttaatgcgcgaaagaaacatgtcctag

SEQ ID NO: 85996 - protein, 290 aa, Arabidopsis thaliana
  peptide (1)..(290): Ceres Seq. ID no. 12685103
MSVCSSSSSSQKTWIVNGILAGTAIAAAIGARAYLGRSKKFRSRVVGIIPARYASSRFEGKPLVQILGKPMIQRTWERSKLATTLDHIVVATDDERIAECCRGFGADVIMTSESCRNGTERCNEALEKLEKKYDVVVNIQGDEPLIEPEIIDGVVKALQVTPDAVFSTAVTSLKPEDGLDPNRVKCVVDNRGYAIYFSRGLIPYNKSGKVNPDFPYMLHLGIQSFDSKFLKVYSELQPTPLQQEEDLEQLKVLENGYKMKVIKVDHEAHGVDTPDDVEKIESLMRERNMS

SEQ ID NO: 85997 - protein, 220 aa, Arabidopsis thaliana
  peptide (1)..(220): Ceres Seq. ID no. 12685104
MIQRTWERSKLATTLDHIVVATDDERIAECCRGFGADVIMTSESCRNGTERCNEALEKLEKKYDVVVNIQGDEPLIEPEIIDGVVKALQVTPDAVFSTAVTSLKPEDGLDPNRVKCVVDNRGYAIYFSRGLIPYNKSGKVNPDFPYMLHLGIQSFDSKFLKVYSELQPTPLQQEEDLEQLKVLENGYKMKVIKVDHEAHGVDTPDDVEKIESLMRERNMS

SEQ ID NO: 85998 - protein, 181 aa, Arabidopsis thaliana
  peptide (1)..(181): Ceres Seq. ID no. 12685105
MTSESCRNGTERCNEALEKLEKKYDVVVNIQGDEPLIEPEIIDGVVKALQVTPDAVFSTAVTSLKPEDGLDPNRVKCVVDNRGYAIYFSRGLIPYNKSGKVNPDFPYMLHLGIQSFDSKFLKVYSELQPTPLQQEEDLEQLKVLENGYKMKVIKVDHEAHGVDTPDDVEKIESLMRERNMS

SEQ ID NO: 85999 - DNA, 1623 bp, Arabidopsis thaliana
  misc_feature (1)..(1623): Ceres Seq. ID no. 12685118
  misc_feature (1)..(1623): Ortholog of  Ceres SEQ ID NO 15180156 as cited in SEQ ID NO 0
atgctcacttctaattctaaagagaaggaaaggtctctctccttcttatgttgctggtacttaggtcgtcgacgagttgctatgcttctacttctcagccttgcttttgttgtctttgtgttgggttcctacactatcaacaaagagagcaatagtccaaatattcatcagagtattgagacgatggattttggaagcaaccaaacaccgataagtagagaattgacttctttctatacaaaggagtctgataatgatcatgttagagatccttttttgtggaatggcattggaggaagtgatgtagacgtcaaccatcctcctccattcttaccttcatggcatcaccatccgtgtgatagtttttcttttcctcctcctccaccacctggaatgagaaggcctggtccacgcccttgtccggtatgctacctacctccagaagaggccttagcacatatgccaaagtatccatttgaatctcccttgctcaagaatttgacatatatacgtgaagagagtcctgtaaaacctgaagaaagtgaaggaggctctgaattcggaggttatccttctctcgagcataggactaactcttttgacataaaagagtccatgacagtgcattgcgggtttattaaaggaacaaaaccgggccaccaaactggatttgacatcgatgaggatatccttcatgagttggaccagtcccatgatgtgattgtcgcgtcagcgatatttggaaagtatgacataattcaagaaccggtgaacatcagtgaaatggcgaggaagaacatcccattctacatgtttgttgatgaagaaacacatttataccttaagaacacgtcgagttatacagacgataacaagagagtgggattgtggaggatcattgttgtacataatgtcccttataccgatgcacggcgtaatggaaaggttccgaagcttttattgcatagattattcccaaatgtccggtactctatatgggttgatgcaaagctccagcttgttgtagatccatatcaaatccttgaaaggttcttgtggagaacgaattctagttttgcaatctcgagacattaccgacgttttgatgtgtttgtagaggctgaagcgaataaggccgcaagaaagtacgacaatgcctcaatagattaccaagtagagttctacaagaaggaaggtttaacaccttatacggaggctaagcttccaataacaagtgatgtccctgaaggttgtaccatcataagagaacacataccgatcacaaaccttttcacatgtgtatggttcaacgaggtagatcggtttacttcaagagatcagctaagctttgcaattgcgagagacaaaataagagagaaagttgattggagcatcaatatgttcttggactgtgaaagacgcaactttgtgaaacaggtatatcatagagacgttttgctgaccatgaaacctcctcgagcttcttctagagttcttcccgagccactggttttaccacgtggaagattagccggtggtagagccacgccgggtaagaagactccgggacaacgcgggaaaaggcgtcaccggaaagtttcagccggtggcagaaacatgtga

SEQ ID NO: 86000 - protein, 540 aa, Arabidopsis thaliana
  peptide (1)..(540): Ceres Seq. ID no. 12685119
MLTSNSKEKERSLSFLCCWYLGRRRVAMLLLLSLAFVVFVLGSYTINKESNSPNIHQSIETMDFGSNQTPISRELTSFYTKESDNDHVRDPFLWNGIGGSDVDVNHPPPFLPSWHHHPCDSFSFPPPPPPGMRRPGPRPCPVCYLPPEEALAHMPKYPFESPLLKNLTYIREESPVKPEESEGGSEFGGYPSLEHRTNSFDIKESMTVHCGFIKGTKPGHQTGFDIDEDILHELDQSHDVIVASAIFGKYDIIQEPVNISEMARKNIPFYMFVDEETHLYLKNTSSYTDDNKRVGLWRIIVVHNVPYTDARRNGKVPKLLLHRLFPNVRYSIWVDAKLQLVVDPYQILERFLWRTNSSFAISRHYRRFDVFVEAEANKAARKYDNASIDYQVEFYKKEGLTPYTEAKLPITSDVPEGCTIIREHIPITNLFTCVWFNEVDRFTSRDQLSFAIARDKIREKVDWSINMFLDCERRNFVKQVYHRDVLLTMKPPRASSRVLPEPLVLPRGRLAGGRATPGKKTPGQRGKRRHRKVSAGGRNM

SEQ ID NO: 86001 - protein, 513 aa, Arabidopsis thaliana
  peptide (1)..(513): Ceres Seq. ID no. 12685120
MLLLLSLAFVVFVLGSYTINKESNSPNIHQSIETMDFGSNQTPISRELTSFYTKESDNDHVRDPFLWNGIGGSDVDVNHPPPFLPSWHHHPCDSFSFPPPPPPGMRRPGPRPCPVCYLPPEEALAHMPKYPFESPLLKNLTYIREESPVKPEESEGGSEFGGYPSLEHRTNSFDIKESMTVHCGFIKGTKPGHQTGFDIDEDILHELDQSHDVIVASAIFGKYDIIQEPVNISEMARKNIPFYMFVDEETHLYLKNTSSYTDDNKRVGLWRIIVVHNVPYTDARRNGKVPKLLLHRLFPNVRYSIWVDAKLQLVVDPYQILERFLWRTNSSFAISRHYRRFDVFVEAEANKAARKYDNASIDYQVEFYKKEGLTPYTEAKLPITSDVPEGCTIIREHIPITNLFTCVWFNEVDRFTSRDQLSFAIARDKIREKVDWSINMFLDCERRNFVKQVYHRDVLLTMKPPRASSRVLPEPLVLPRGRLAGGRATPGKKTPGQRGKRRHRKVSAGGRNM

SEQ ID NO: 86002 - protein, 479 aa, Arabidopsis thaliana
  peptide (1)..(479): Ceres Seq. ID no. 12685121
MDFGSNQTPISRELTSFYTKESDNDHVRDPFLWNGIGGSDVDVNHPPPFLPSWHHHPCDSFSFPPPPPPGMRRPGPRPCPVCYLPPEEALAHMPKYPFESPLLKNLTYIREESPVKPEESEGGSEFGGYPSLEHRTNSFDIKESMTVHCGFIKGTKPGHQTGFDIDEDILHELDQSHDVIVASAIFGKYDIIQEPVNISEMARKNIPFYMFVDEETHLYLKNTSSYTDDNKRVGLWRIIVVHNVPYTDARRNGKVPKLLLHRLFPNVRYSIWVDAKLQLVVDPYQILERFLWRTNSSFAISRHYRRFDVFVEAEANKAARKYDNASIDYQVEFYKKEGLTPYTEAKLPITSDVPEGCTIIREHIPITNLFTCVWFNEVDRFTSRDQLSFAIARDKIREKVDWSINMFLDCERRNFVKQVYHRDVLLTMKPPRASSRVLPEPLVLPRGRLAGGRATPGKKTPGQRGKRRHRKVSAGGRNM

SEQ ID NO: 86003 - DNA, 1317 bp, Arabidopsis thaliana
  misc_feature (1)..(1317): Ceres Seq. ID no. 12685248
  misc_feature (1)..(1317): Ortholog of  Ceres SEQ ID NO 14312293 as cited in SEQ ID NO 58744
  misc_feature (1)..(1317): Ortholog of  Ceres SEQ ID NO 15177596 as cited in SEQ ID NO 59731
ctctctctctctctttttctaatcatacgaacacaatctgcttcaagaattagggttttgatcagacacaaaaagtatctctctccggtcttgtgtcaaggttatgcaagaagcggcactaggtatgatgggagccaccgtaggcggagacggagacaccgcggtcgtggcggagcagaatagacagttgaaaggtgagatagcgacacatccgatgtatgagcaattattagccgcacacgtggcgtgtttaagagtagctactccaatagatcaacttccgatcattgaagctcagctttctcaatctcatcatcttctccgttcttacgcttccacggccgttggataccatcatgatcgtcacgagctcgataatttcttggcacaatatgtaatggtgttgtgtagcttcaaagaacagctgcaacagcacgtgagggttcatgccgtcgaagctgttatggcttgccgtgaaattgagaacaaccttcattctcttacaggagcaactttaggagaagggtcgggtgcgactatgtcggaggatgaggatgatcttccgatggatttctcgtcagataattccggcgttgattttagcggcggccacgatatgacgggatttggtccgttgctaccgactgaatcggaaagatcccttatggaaagagtcagacaagaactcaaactagaactcaaacagggttttaaatcgagaatcgaagatgtaagagaagagataatgaggaagagaagggctgggaaattgccaggagacacaactactgtcttgaaaaattggtggcaacaacattgcaaatggccttaccctacggaagatgacaaggcaaaattggtggaggagacaggattgcagttgaagcaaatcaacaattggttcattaaccaacgcaagaggaattggcacaacaactctcactccctcacttccttgaagtccaagcgcaaacactaatctcttcttactatattagttactacctctacatatattcatactaattacactgctaagacatgcatgatacatacgtaattcatgttactgataataacgaggtgtgatcattaatatcatgtacttacttagcttattagatccaccgactactatatgatttgtgcgttgcgtgattactggttgttactagattgtaattcattttgtttgtattgtgcattcaaatttatctttttggtaagaacactgattttgtaacgtgttttccgtggatgactagaccatcatttggaaatataaagtaatgatgccgacaaaaaaggcagtgtttt

SEQ ID NO: 86004 - protein, 291 aa, Arabidopsis thaliana
  peptide (1)..(291): Ceres Seq. ID no. 12685249
MQEAALGMMGATVGGDGDTAVVAEQNRQLKGEIATHPMYEQLLAAHVACLRVATPIDQLPIIEAQLSQSHHLLRSYASTAVGYHHDRHELDNFLAQYVMVLCSFKEQLQQHVRVHAVEAVMACREIENNLHSLTGATLGEGSGATMSEDEDDLPMDFSSDNSGVDFSGGHDMTGFGPLLPTESERSLMERVRQELKLELKQGFKSRIEDVREEIMRKRRAGKLPGDTTTVLKNWWQQHCKWPYPTEDDKAKLVEETGLQLKQINNWFINQRKRNWHNNSHSLTSLKSKRKH

SEQ ID NO: 86005 - protein, 284 aa, Arabidopsis thaliana; identical to SEQ ID NO: 39455
  peptide (1)..(284): Ceres Seq. ID no. 12685250

SEQ ID NO: 86006 - protein, 283 aa, Arabidopsis thaliana; identical to SEQ ID NO: 39456
  peptide (1)..(283): Ceres Seq. ID no. 12685251

SEQ ID NO: 86007 - DNA, 1845 bp, Arabidopsis thaliana
  misc_feature (1)..(1845): Ceres Seq. ID no. 12685271
  misc_feature (1)..(1845): Ortholog of  Ceres SEQ ID NO 13657677 as cited in SEQ ID NO 66119
atgagtttggcgaagagatttgttcacctgaggaaagcttctccatcgttttgccttcgaggtatctatttctctggtttgagttatgatggctacagagagaaattgagtagaaatgcgttactccatttgaagttagatgaagctgttgatctgttcggtgaaatggtcaaatctcgcccctttccttccattgttgagttcagtaaattgttgagtgctattgctaagatgaagaagttcgatcttgtcatctccttcggggagaagatggagattttaggagtttcacataatctctatacttacaatattatgattaactgtttatgccgccgctctcaactctcatttgctttagcaattcttggcaagatgatgaaacttggctatgggcccagcattgttaccctgaactcgcttctcaatggtttctgtcacgggaataggatatccgaggctgttgctttggttgatcagatggtggaaatgggatatcaacctgataccgtcacatttacaactttggttcatgggctttttcaacacaacaaagcttccgaagctgtggctttagttgaacggatggttgtgaaaggttgtcaaccagatctggttacttatggtgcggtaattaatggattatgtaagagaggtgaacctgatttggctttaaatctgctcaacaagatggagaaagggaaaatagaggctgatgttgtgatctacagcacagtcatagatagtctctgcaaatatagacatgtggatgatgcactcaatctgttcactgaaatggataacaaaggtattagaccagatgtttttacctacagctccctcataagttgcctttgtaattacggaagatggagtgatgcttctcgactactcagtgatatgcttgagaggaaaatcaatccaaatgtagtcactttcaactcattgatcgatgcgtttgcgaaggaggggaagcttatagaggctgagaaattgtttgatgagatgatccaaaggtctatagatcctaatattgtcacttacaattcattgatcaacgggttttgtatgcatgatcgtctagatgaggcccagcagatttttactttgatggttagcaaagattgtctgccagacgtagtaacttataatacacttataaatggattttgtaaggctaagaaagtggtggatggtatggaacttttccgggacatgtctcgaagaggattggttggcaacacagtcacttacaccactcttatccatggattttttcaagctagtgattgtgataatgcccaaatggttttcaaacagatggtttctgatggtgtgcatcccaatattatgacatacaacactctgttagatggactttgtaaaaatgggaagctagagaaagcaatggttgtattcgagtatctgcaaaagagtaaaatggaacctgatatttacacatataatattatgagtgaagggatgtgcaaggcagggaaggtggaagatgggtgggatctattttgtagcctcagccttaaaggagtgaaacctgatgttatagcctacaatacaatgatctcaggattctgtaagaaaggtttaaaggaggaagcatataccttgttcataaagatgaaagaagacgggcctcttccagatagtggtacatataatacgcttatcagggcacatctgagagatggtgacaaagcagcatcagctgaactcatcaaagaaatgaggagttgcaggtttgctggcgatgcttcaacttatggcttggtcacagatatgttgcatgatgggagattggacaaaggatttttggaagtgctttcttaa

SEQ ID NO: 86008 - protein, 614 aa, Arabidopsis thaliana
  peptide (1)..(614): Ceres Seq. ID no. 12685272
MSLAKRFVHLRKASPSFCLRGIYFSGLSYDGYREKLSRNALLHLKLDEAVDLFGEMVKSRPFPSIVEFSKLLSAIAKMKKFDLVISFGEKMEILGVSHNLYTYNIMINCLCRRSQLSFALAILGKMMKLGYGPSIVTLNSLLNGFCHGNRISEAVALVDQMVEMGYQPDTVTFTTLVHGLFQHNKASEAVALVERMVVKGCQPDLVTYGAVINGLCKRGEPDLALNLLNKMEKGKIEADVVIYSTVIDSLCKYRHVDDALNLFTEMDNKGIRPDVFTYSSLISCLCNYGRWSDASRLLSDMLERKINPNVVTFNSLIDAFAKEGKLIEAEKLFDEMIQRSIDPNIVTYNSLINGFCMHDRLDEAQQIFTLMVSKDCLPDVVTYNTLINGFCKAKKVVDGMELFRDMSRRGLVGNTVTYTTLIHGFFQASDCDNAQMVFKQMVSDGVHPNIMTYNTLLDGLCKNGKLEKAMVVFEYLQKSKMEPDIYTYNIMSEGMCKAGKVEDGWDLFCSLSLKGVKPDVIAYNTMISGFCKKGLKEEAYTLFIKMKEDGPLPDSGTYNTLIRAHLRDGDKAASAELIKEMRSCRFAGDASTYGLVTDMLHDGRLDKGFLEVLS

SEQ ID NO: 86009 - protein, 559 aa, Arabidopsis thaliana
  peptide (1)..(559): Ceres Seq. ID no. 12685273
MVKSRPFPSIVEFSKLLSAIAKMKKFDLVISFGEKMEILGVSHNLYTYNIMINCLCRRSQLSFALAILGKMMKLGYGPSIVTLNSLLNGFCHGNRISEAVALVDQMVEMGYQPDTVTFTTLVHGLFQHNKASEAVALVERMVVKGCQPDLVTYGAVINGLCKRGEPDLALNLLNKMEKGKIEADVVIYSTVIDSLCKYRHVDDALNLFTEMDNKGIRPDVFTYSSLISCLCNYGRWSDASRLLSDMLERKINPNVVTFNSLIDAFAKEGKLIEAEKLFDEMIQRSIDPNIVTYNSLINGFCMHDRLDEAQQIFTLMVSKDCLPDVVTYNTLINGFCKAKKVVDGMELFRDMSRRGLVGNTVTYTTLIHGFFQASDCDNAQMVFKQMVSDGVHPNIMTYNTLLDGLCKNGKLEKAMVVFEYLQKSKMEPDIYTYNIMSEGMCKAGKVEDGWDLFCSLSLKGVKPDVIAYNTMISGFCKKGLKEEAYTLFIKMKEDGPLPDSGTYNTLIRAHLRDGDKAASAELIKEMRSCRFAGDASTYGLVTDMLHDGRLDKGFLEVLS

SEQ ID NO: 86010 - protein, 537 aa, Arabidopsis thaliana
  peptide (1)..(537): Ceres Seq. ID no. 12685274
MKKFDLVISFGEKMEILGVSHNLYTYNIMINCLCRRSQLSFALAILGKMMKLGYGPSIVTLNSLLNGFCHGNRISEAVALVDQMVEMGYQPDTVTFTTLVHGLFQHNKASEAVALVERMVVKGCQPDLVTYGAVINGLCKRGEPDLALNLLNKMEKGKIEADVVIYSTVIDSLCKYRHVDDALNLFTEMDNKGIRPDVFTYSSLISCLCNYGRWSDASRLLSDMLERKINPNVVTFNSLIDAFAKEGKLIEAEKLFDEMIQRSIDPNIVTYNSLINGFCMHDRLDEAQQIFTLMVSKDCLPDVVTYNTLINGFCKAKKVVDGMELFRDMSRRGLVGNTVTYTTLIHGFFQASDCDNAQMVFKQMVSDGVHPNIMTYNTLLDGLCKNGKLEKAMVVFEYLQKSKMEPDIYTYNIMSEGMCKAGKVEDGWDLFCSLSLKGVKPDVIAYNTMISGFCKKGLKEEAYTLFIKMKEDGPLPDSGTYNTLIRAHLRDGDKAASAELIKEMRSCRFAGDASTYGLVTDMLHDGRLDKGFLEVLS

SEQ ID NO: 86011 - DNA, 954 bp, Arabidopsis thaliana
  misc_feature (1)..(954): Ceres Seq. ID no. 12685275
  misc_feature (1)..(954): Ortholog of  Ceres SEQ ID NO 15225703 as cited in SEQ ID NO 59527
  misc_feature (1)..(954): Ortholog of  Ceres SEQ ID NO 12615972 as cited in SEQ ID NO 62455
  misc_feature (1)..(954): Ortholog of  Ceres SEQ ID NO 13596229 as cited in SEQ ID NO 68800
  misc_feature (1)..(954): Ortholog of  Ceres SEQ ID NO 15179393 as cited in SEQ ID NO 0
atggcgaacagagatgtggagagagtagggaagaaaaacagaggagctaataacaattatttctacgaggagtcttctggtgaaactcattggacttcatggctgattccggcgattgtagtggcaaatctcgctgtctttatcgctgttatgttcgttaatgattgtcctaagaaaatcaccggacctaacaaagagtgtgttgctagattcctcggaagattctcgtttcaaccacttaaagagaatcctctctttggtccttcttcttcaacattggagaaaatgggagcattggaatggaggaaagtagtacatgaacatcaaggatggagacttctctcttgtatgtggcttcacgctggtatcattcatcttcttacaaacatgttgagtttgatcttcattggtatccgccttgagcagcaatttggcttcataagagtcgggttgatatacttaatatcgggtctcggtggaagcatactttcgtcgcttttccttcaagaaagtatctctgttggtgcttcgggtgctctctttggacttcttggagcaatgttatctgaacttcttaccaattggactatctatgccaacaaggcggctgctctgatcacacttctgttcatcatcgcaatcaacttagcattaggcatgcttcctcgggttgacaactttgcacacattggagggtttttaaccggattctgcctcgggtttgtcctccttgtccgacctcagtacggttgggaagcttcccgcaccaacacttcgcgaaccaaacgaaagtatagcatgtaccagtacgtgctgtttgtagtttcagtggtgctacttgtggttgggctaacggttgcattagtgatgcttttcaaaggagagaatgggaacaaacattgcaaatggtgtcattaccttagctgtttcccaacttctaaatggacctgctaa

SEQ ID NO: 86012 - protein, 317 aa, Arabidopsis thaliana; identical to SEQ ID NO: 22106
  peptide (1)..(317): Ceres Seq. ID no. 12685276

SEQ ID NO: 86013 - protein, 267 aa, Arabidopsis thaliana; identical to SEQ ID NO: 22107
  peptide (1)..(267): Ceres Seq. ID no. 12685277

SEQ ID NO: 86014 - protein, 222 aa, Arabidopsis thaliana; identical to SEQ ID NO: 22108
  peptide (1)..(222): Ceres Seq. ID no. 12685278

SEQ ID NO: 86015 - DNA, 1146 bp, Arabidopsis thaliana
  misc_feature (1)..(1146): Ceres Seq. ID no. 12685279
  misc_feature (1)..(1146): Ortholog of  Ceres SEQ ID NO 14304148 as cited in SEQ ID NO 57313
  misc_feature (1)..(1146): Ortholog of  Ceres SEQ ID NO 13598513 as cited in SEQ ID NO 64102
atggagaaccatcttcaacattccttaaccatcattcctaaaccggatctaatcaaagaagaacaacgttatcacgaagatacggtgagcttgcaagcggagaggattttgcatgccatgaccttccccatggttctcaaaactgctttggagcttggcgttatcgacatgatcacttctgtagatgacggcgtgtggctctcgccttctgagatcgctcttggtctcccaaccaagcccaccaatccggaggcaccagtattgctggaccggatgctagttttgttagccagccactcaatcttgaagtaccgtacggtagaaaccggagataacattggaagtagaaagaccgagagggtctatgcagctgaaccggtttgcacgtttttcttgaaccgcggagatggcttgggctctctcgccactttgttcatggtactccaaggggaagtctgtatgaagccttgggaacatctcaaagacatgatattagaaggaaaagatgcattcacctctgctcatggcatgaggtttttcgaactcattggttcgaacgaacaattcgctgaaatgtttaaccgggcaatgtcggaagcttccacattgattatgaagaaggttttagaagtttacaaaggattcgaagatgtaaatactttggtggatgtgggaggaggaattggaacaatcataggtcaagtgacttccaagtatcctcatattaaaggcatcaatttcgatctagcatcggttttagcccatgctccttttaataaaggagtggagcatgtttcaggagatatgtttaaagaaattccaaaaggagatgccatcttcatgaaatggatactacatgattggactgacgaagattgtgtaaagatcctaaaaaattattggaaaagtcttcccgagaaaggaaaagtgataatagtcgaggtggttacgcccgaggaaccaaagattaacgacatttcttctaacattgtgttcggtatggacatgctgatgttagcagtaagctcaggtggtaaggagaggtctctttcccaattcgagactctagcctctgattcgggttttcttcgttgtgaaatcatttgtcatgccttctcatatagtgttatcgaattacacaaatag

SEQ ID NO: 86016 - protein, 381 aa, Arabidopsis thaliana
  peptide (1)..(381): Ceres Seq. ID no. 12685280
MENHLQHSLTIIPKPDLIKEEQRYHEDTVSLQAERILHAMTFPMVLKTALELGVIDMITSVDDGVWLSPSEIALGLPTKPTNPEAPVLLDRMLVLLASHSILKYRTVETGDNIGSRKTERVYAAEPVCTFFLNRGDGLGSLATLFMVLQGEVCMKPWEHLKDMILEGKDAFTSAHGMRFFELIGSNEQFAEMFNRAMSEASTLIMKKVLEVYKGFEDVNTLVDVGGGIGTIIGQVTSKYPHIKGINFDLASVLAHAPFNKGVEHVSGDMFKEIPKGDAIFMKWILHDWTDEDCVKILKNYWKSLPEKGKVIIVEVVTPEEPKINDISSNIVFGMDMLMLAVSSGGKERSLSQFETLASDSGFLRCEIICHAFSYSVIELHK

SEQ ID NO: 86017 - protein, 342 aa, Arabidopsis thaliana
  peptide (1)..(342): Ceres Seq. ID no. 12685281
MTFPMVLKTALELGVIDMITSVDDGVWLSPSEIALGLPTKPTNPEAPVLLDRMLVLLASHSILKYRTVETGDNIGSRKTERVYAAEPVCTFFLNRGDGLGSLATLFMVLQGEVCMKPWEHLKDMILEGKDAFTSAHGMRFFELIGSNEQFAEMFNRAMSEASTLIMKKVLEVYKGFEDVNTLVDVGGGIGTIIGQVTSKYPHIKGINFDLASVLAHAPFNKGVEHVSGDMFKEIPKGDAIFMKWILHDWTDEDCVKILKNYWKSLPEKGKVIIVEVVTPEEPKINDISSNIVFGMDMLMLAVSSGGKERSLSQFETLASDSGFLRCEIICHAFSYSVIELHK

SEQ ID NO: 86018 - protein, 338 aa, Arabidopsis thaliana
  peptide (1)..(338): Ceres Seq. ID no. 12685282
MVLKTALELGVIDMITSVDDGVWLSPSEIALGLPTKPTNPEAPVLLDRMLVLLASHSILKYRTVETGDNIGSRKTERVYAAEPVCTFFLNRGDGLGSLATLFMVLQGEVCMKPWEHLKDMILEGKDAFTSAHGMRFFELIGSNEQFAEMFNRAMSEASTLIMKKVLEVYKGFEDVNTLVDVGGGIGTIIGQVTSKYPHIKGINFDLASVLAHAPFNKGVEHVSGDMFKEIPKGDAIFMKWILHDWTDEDCVKILKNYWKSLPEKGKVIIVEVVTPEEPKINDISSNIVFGMDMLMLAVSSGGKERSLSQFETLASDSGFLRCEIICHAFSYSVIELHK

SEQ ID NO: 86019 - DNA, 1734 bp, Arabidopsis thaliana
  misc_feature (1)..(1734): Ceres Seq. ID no. 12685322
  misc_feature (1)..(1734): Ortholog of  Ceres SEQ ID NO 13657677 as cited in SEQ ID NO 66119
atgaggatctcaatttcgagtgtagtttcatcgacgacgagtagatttgttcatcggaatcttcaggggaaaggtaatcctcgaattgctccttcttccattgatctttgcgggatgtgttactggggacgagctttttctagtggcagtggtgattacagagagatattgagaaatgggttacatagtatgaagttagatgatgcaattggtttgttcggtggcatggtcaagtcacgtcctttaccttccatttttgagttcaataaactgttgagtgccattgctaagatgaaaaagtttgatcttgtcatctctctaggtgagaagatgcagaggttaggaatttcacataatctatatacttacaatattttgatcaactgtttctgccgacgctctcaaatctctcttgctttagctcttcttggcaagatgatgaaactcggctatgagcccagcattgtcacgctttcttctcttctcaatggatactgtcacggtaagaggatttcagatgctgtagctttggttgatcaaatggtggaaatggggtatagacctgacacaatcacatttacaactttgattcatgggctttttctccacaacaaagcttctgaagctgtggcgttagttgatcgaatggttcaaagaggctgtcaaccaaatctggttacttatggagtggtagtaaatggattatgtaagagaggtgatattgatttggcttttaatctgctcaacaagatggaagctgcgaaaatagaggccaatgttgtgatctacagcacagtcatagatagtctctgcaaatatagacatgaggatgatgcactcaacttgttcactgaaatggaaaacaaaggagttagaccaaatgttattacctacagctccctcataagttgcctttgtaattacgaaagatggagtgatgcttctcgactactcagtgatatgattgagaggaaaatcaatccaaatgtagtcactttcaacgcattgattgatgcatttgtgaaggaggggaagcttgtagaggctgagaaattgtacgacgagatgatcaaaaggtctatagatcctgatattttcacttatagttcactgatcaatgggttttgtatgcacgatcgtttagacgaggccaagcacatgtttgagttgatgattagcaaggactgtttcccaaacgtagtgacttacaatactcttattaacggattttgtaaggctaagagaatagacgaaggtgtggaactcttccgcgagatgtctcaaagaggattggttggcaacacagtcacttacaccactcttatccatggattttttcaagctagagattgtgataatgcccaaatggtgttcaaacagatggtttctgatggtgtgcatcccaatattatgacatacaacactctgttagatggactttgtaaaaatgggaagctagagaaagcaatggttgtattcgagtatctgcaaaggagtaaaatggaacctactatttacacatataatattatgattgaagggatgtgcaaggcagggaaggtggaagatgggtgggatctattttgtagcctcagccttaaaggagtgaaacctgatgtaataatttacaatactatgatctcaggattttgtaggaaaggtttaaaggaagaagcagatgccttgttcagaaaaatgagagaagatgggcctcttccagatagcggtacataa

SEQ ID NO: 86020 - protein, 577 aa, Arabidopsis thaliana
  peptide (1)..(577): Ceres Seq. ID no. 12685323
MRISISSVVSSTTSRFVHRNLQGKGNPRIAPSSIDLCGMCYWGRAFSSGSGDYREILRNGLHSMKLDDAIGLFGGMVKSRPLPSIFEFNKLLSAIAKMKKFDLVISLGEKMQRLGISHNLYTYNILINCFCRRSQISLALALLGKMMKLGYEPSIVTLSSLLNGYCHGKRISDAVALVDQMVEMGYRPDTITFTTLIHGLFLHNKASEAVALVDRMVQRGCQPNLVTYGVVVNGLCKRGDIDLAFNLLNKMEAAKIEANVVIYSTVIDSLCKYRHEDDALNLFTEMENKGVRPNVITYSSLISCLCNYERWSDASRLLSDMIERKINPNVVTFNALIDAFVKEGKLVEAEKLYDEMIKRSIDPDIFTYSSLINGFCMHDRLDEAKHMFELMISKDCFPNVVTYNTLINGFCKAKRIDEGVELFREMSQRGLVGNTVTYTTLIHGFFQARDCDNAQMVFKQMVSDGVHPNIMTYNTLLDGLCKNGKLEKAMVVFEYLQRSKMEPTIYTYNIMIEGMCKAGKVEDGWDLFCSLSLKGVKPDVIIYNTMISGFCRKGLKEEADALFRKMREDGPLPDSGT

SEQ ID NO: 86021 - protein, 539 aa, Arabidopsis thaliana
  peptide (1)..(539): Ceres Seq. ID no. 12685324
MCYWGRAFSSGSGDYREILRNGLHSMKLDDAIGLFGGMVKSRPLPSIFEFNKLLSAIAKMKKFDLVISLGEKMQRLGISHNLYTYNILINCFCRRSQISLALALLGKMMKLGYEPSIVTLSSLLNGYCHGKRISDAVALVDQMVEMGYRPDTITFTTLIHGLFLHNKASEAVALVDRMVQRGCQPNLVTYGVVVNGLCKRGDIDLAFNLLNKMEAAKIEANVVIYSTVIDSLCKYRHEDDALNLFTEMENKGVRPNVITYSSLISCLCNYERWSDASRLLSDMIERKINPNVVTFNALIDAFVKEGKLVEAEKLYDEMIKRSIDPDIFTYSSLINGFCMHDRLDEAKHMFELMISKDCFPNVVTYNTLINGFCKAKRIDEGVELFREMSQRGLVGNTVTYTTLIHGFFQARDCDNAQMVFKQMVSDGVHPNIMTYNTLLDGLCKNGKLEKAMVVFEYLQRSKMEPTIYTYNIMIEGMCKAGKVEDGWDLFCSLSLKGVKPDVIIYNTMISGFCRKGLKEEADALFRKMREDGPLPDSGT

SEQ ID NO: 86022 - protein, 514 aa, Arabidopsis thaliana
  peptide (1)..(514): Ceres Seq. ID no. 12685325
MKLDDAIGLFGGMVKSRPLPSIFEFNKLLSAIAKMKKFDLVISLGEKMQRLGISHNLYTYNILINCFCRRSQISLALALLGKMMKLGYEPSIVTLSSLLNGYCHGKRISDAVALVDQMVEMGYRPDTITFTTLIHGLFLHNKASEAVALVDRMVQRGCQPNLVTYGVVVNGLCKRGDIDLAFNLLNKMEAAKIEANVVIYSTVIDSLCKYRHEDDALNLFTEMENKGVRPNVITYSSLISCLCNYERWSDASRLLSDMIERKINPNVVTFNALIDAFVKEGKLVEAEKLYDEMIKRSIDPDIFTYSSLINGFCMHDRLDEAKHMFELMISKDCFPNVVTYNTLINGFCKAKRIDEGVELFREMSQRGLVGNTVTYTTLIHGFFQARDCDNAQMVFKQMVSDGVHPNIMTYNTLLDGLCKNGKLEKAMVVFEYLQRSKMEPTIYTYNIMIEGMCKAGKVEDGWDLFCSLSLKGVKPDVIIYNTMISGFCRKGLKEEADALFRKMREDGPLPDSGT

SEQ ID NO: 86023 - DNA, 1524 bp, Arabidopsis thaliana
  misc_feature (1)..(1524): Ceres Seq. ID no. 12685418
  misc_feature (1)..(1524): Ortholog of  Ceres SEQ ID NO 13596465 as cited in SEQ ID NO 62133
atgtcagaagaaataaacggaaaagttaaaaagatgatagctcgacgattcgcaatagtacgttactttcgttcaaggatgaatccaaagatgactatacaaaaactttgcacatcgtctaaaacagcagatctttctctccgaaagatggatccgaaccgaagaacgcaaaaattcagcaaaccacaagtcattgcaagtccctctctgcgagaagcaatgaagaagcgaaacgacgatttggtccttacggaacaaaaattaaaaggaagaaccaaaaacttagcacatcagaaatcgcagagcccttctctagcactcaacacgaagaaaaagcaaaagatggattctttgcaagaacttcttgacaagaagcaatacgacgaagaagcaaaacgtccatgtcaagaagcgatgaagaagcaaaacgacgttgctcttttccttgcgggggaagtaatctctgccgcagacaaaaactctaacgtcgtcttctctcctgcatctatcaactccgttctcaccatggccgctgctacctccgacagtgaagcactaaaatcttgcatcctctccttccttaggtcttcttccaccgacgagctcaacgacatcttccgcgaaatagcttccgtcgtcctcgtcgacggaagcaaaacaggtggccccaaaatcacggtggttaatggagtgtggagagagcaatcacttccgtgtagtcccgagtcgaaagatctctttgagaatttctacaagtctgctttcgctcaagttgatttccgatccaagtttgaagaagtgcgtgaggaggtgaattcttgggcattacgtcacaccaatggtatcatcaaagatcttctacctcctggatccgttacaagcgaaaccttgtggatttatggaaacgcattgtacttcaaaggagcctgggaagacaaattctataagtcaatgacgaaacacaaacctttctaccttgtcaatggcaaacaagtacatgtgccattcatgcaaagctcacaaagtcaatatgttaaggcttacgatggtttcaaggtccttagacaaccataccgacaaggcgttaatgatacaagtcgccaattctcaatgtgtacctatctcccggacgagaaagatggattggataatcttgtggagaaaatgacatctactgatggattcttggacagtcacattccgagttggagagttgaagttggtgaattcagaattccaaagtttaagattgaattcggttttgaagcttcaagcgttttcaatgactttgcgcttgatgtatcattataccaaaaagctatgattgagattgatgaagaaggtactgaagctgcggctgctactgctctagttggtgcttgtggctgcagcctttataggcctcctcctcccatagattttgtggcagatcatccattttttttctttattagagaagacaaaaccggaactgttttgttcgctggtcaaatcttcgatccttccttatcttcttctgcttaa

SEQ ID NO: 86024 - protein, 507 aa, Arabidopsis thaliana
  peptide (1)..(507): Ceres Seq. ID no. 12685419
MSEEINGKVKKMIARRFAIVRYFRSRMNPKMTIQKLCTSSKTADLSLRKMDPNRRTQKFSKPQVIASPSLREAMKKRNDDLVLTEQKLKGRTKNLAHQKSQSPSLALNTKKKQKMDSLQELLDKKQYDEEAKRPCQEAMKKQNDVALFLAGEVISAADKNSNVVFSPASINSVLTMAAATSDSEALKSCILSFLRSSSTDELNDIFREIASVVLVDGSKTGGPKITVVNGVWREQSLPCSPESKDLFENFYKSAFAQVDFRSKFEEVREEVNSWALRHTNGIIKDLLPPGSVTSETLWIYGNALYFKGAWEDKFYKSMTKHKPFYLVNGKQVHVPFMQSSQSQYVKAYDGFKVLRQPYRQGVNDTSRQFSMCTYLPDEKDGLDNLVEKMTSTDGFLDSHIPSWRVEVGEFRIPKFKIEFGFEASSVFNDFALDVSLYQKAMIEIDEEGTEAAAATALVGACGCSLYRPPPPIDFVADHPFFFFIREDKTGTVLFAGQIFDPSLSSSA

SEQ ID NO: 86025 - protein, 496 aa, Arabidopsis thaliana
  peptide (1)..(496): Ceres Seq. ID no. 12685420
MIARRFAIVRYFRSRMNPKMTIQKLCTSSKTADLSLRKMDPNRRTQKFSKPQVIASPSLREAMKKRNDDLVLTEQKLKGRTKNLAHQKSQSPSLALNTKKKQKMDSLQELLDKKQYDEEAKRPCQEAMKKQNDVALFLAGEVISAADKNSNVVFSPASINSVLTMAAATSDSEALKSCILSFLRSSSTDELNDIFREIASVVLVDGSKTGGPKITVVNGVWREQSLPCSPESKDLFENFYKSAFAQVDFRSKFEEVREEVNSWALRHTNGIIKDLLPPGSVTSETLWIYGNALYFKGAWEDKFYKSMTKHKPFYLVNGKQVHVPFMQSSQSQYVKAYDGFKVLRQPYRQGVNDTSRQFSMCTYLPDEKDGLDNLVEKMTSTDGFLDSHIPSWRVEVGEFRIPKFKIEFGFEASSVFNDFALDVSLYQKAMIEIDEEGTEAAAATALVGACGCSLYRPPPPIDFVADHPFFFFIREDKTGTVLFAGQIFDPSLSSSA

SEQ ID NO: 86026 - protein, 481 aa, Arabidopsis thaliana
  peptide (1)..(481): Ceres Seq. ID no. 12685421
MNPKMTIQKLCTSSKTADLSLRKMDPNRRTQKFSKPQVIASPSLREAMKKRNDDLVLTEQKLKGRTKNLAHQKSQSPSLALNTKKKQKMDSLQELLDKKQYDEEAKRPCQEAMKKQNDVALFLAGEVISAADKNSNVVFSPASINSVLTMAAATSDSEALKSCILSFLRSSSTDELNDIFREIASVVLVDGSKTGGPKITVVNGVWREQSLPCSPESKDLFENFYKSAFAQVDFRSKFEEVREEVNSWALRHTNGIIKDLLPPGSVTSETLWIYGNALYFKGAWEDKFYKSMTKHKPFYLVNGKQVHVPFMQSSQSQYVKAYDGFKVLRQPYRQGVNDTSRQFSMCTYLPDEKDGLDNLVEKMTSTDGFLDSHIPSWRVEVGEFRIPKFKIEFGFEASSVFNDFALDVSLYQKAMIEIDEEGTEAAAATALVGACGCSLYRPPPPIDFVADHPFFFFIREDKTGTVLFAGQIFDPSLSSSA

SEQ ID NO: 86027 - DNA, 3591 bp, Arabidopsis thaliana
  misc_feature (1)..(3591): Ceres Seq. ID no. 12685472
  misc_feature (1)..(3591): Ortholog of  Ceres SEQ ID NO 12586556 as cited in SEQ ID NO 64667
  misc_feature (1)..(3591): Ortholog of  Ceres SEQ ID NO 13660894 as cited in SEQ ID NO 67475
atggcctcgcagacgcagttacgtttgattatctatgagttcacgaggaaaattcaaacgagattgaatacccagaagctgcatagctttgttaccaagtccaaactcgcgcgcgacccatatttcgcgacgcaacttgccagattctatgcgttaaacgatgatcttatatctgctcgcaaactgttcgacgtatttcctgagagaagtgttttcctttggaactctattattcgagcttatgctaaagctcatcaatttactactgttttgtcactcttctctcaaatactgcgttctgatacaagacctgataacttcacctatgcgtgcttagctcgtggcttttcagagagttttgatacaaagggactgagatgtattcatgggattgcaattgtgtctggtcttggttttgatcaaatttgtggcagtgcaattgttaaagcttattcaaaagctggacttatcgttgaagcaagtaagttgttttgttcaataccagatccagatcttgctctttggaatgttatgattcttggatatggatgctgtggattttgggataaaggaatcaatttgtttaacttgatgcaacatcgaggacaccaacctaattgttatacaatggtagccctaacaagtggtttgattgatcctagtttgttactcgttgcttggtctgttcatgcattttgcttgaaaatcaatttagattctcattcttatgttggttgtgctttagtgaacatgtactcgagatgcatgtgcattgcttctgcttgtagtgtgtttaatagcatctctgagcctgatttagttgcgtgttcttctttgataactggttattcgagatgcgggaatcacaaggaggctttgcatctgtttgctgagctgagaatgagtggtaagaagccagattgtgttcttgtggcgattgtattggggtcttgtgctgagttatcggattcagtctccggaaaagaagtgcacagttatgttattcgactaggactagaacttgatataaaggtttgctctgctcttatagacatgtactcaaaatgtgggcttctaaaatgcgcgatgagtcttttcgcaggaattccagagaaaaacattgtttctttcaactcccttattttgggtcttggcttgcacggttttgcttccactgcgtttgaaaagttcactgagatccttgagatgggattgataccggacgagatcactttctctgctcttctttgtacttgttgccattcaggtcttttaaacaaaggtcaagagatctttgagaggatgaagagtgagtttggtattgagccgcaaacagagcattatgtttacatggttaagctaatgggaatggcaggaaaactagaagaagcatttgagtttgtaatgtcattacaaaaaccaattgattcaggaattttgggagcactattgtcatgttgcgaagttcatgagaacactcatttggctgaagttgtagcagagaatatacacaagaatggagaagagagaagaagtgtttacaaagtgatgctctctaatgtgtatgcaagatatgggagatgggatgaagtagaaaggcttagagatggaatatcagaaagctatggagggaaattgccaggcattagttgctttccaaggaaggcgaagaaacaactattcgatctcacacctgaggcgagaacgaggatcgtaagaatggagcgagcaaaaacagaagtggagaagaaagtttcaagacttttaaagttcatccaaaacaaaaacaggattccaagggattcaaagagagagcttctagggattgttaacgatcttcaagagcagtgtcagtctctctattctctatgtgataatttccaacaagatttagatccgaaaagtggtggcagaagaaaagggatatcacgtgttgcttcatcgagttcggatttggaatattactcttcagaggaaatagataatgttgttgaggaaggaaatgatatttgtgagcttcaaagcaagattgaggcattgaggaatgaggctgaagagaaacaacgagaattgactttgcgtgtgaaggagctagaacgagagctaggtaatgcaaaagctgagtgtgatcggaaaggaaatttagaagaagagattgcgatgaaagctactgaaagtaagcaattaggagagaagaacaaagggctaagatctcagatctccggtttggaatcggttttgaaagagaaaggggatgagatctcaacacttgtgaacaagtttgggaatagtgagttgggtttaacatcaagaatcgaagatttgaaatgccaactaaaaaatttagaacaagaaatcggtttccttcgtgctcgaaatgcgggtttggctggaaatttagaagttacgaaagttgaagagaaagaacgcgttaagggattaatggatcaggtaaatggtatgaaacatgagcttgaatcattgcggagccagaaagacgaatctgaagcaaagttggagaagaaagtagaagaagttacagagacgaagatgcaattgaaaagtctgaaagaagaaacagaggaagagaggaatagactgagtgaagagattgaccaacttaaaggagaaaatcagatgctgcatagaagaatctcagagcttgattcattacatatggagatgaagacgaagagcgctcatgaaatggaagatgcgagcaagaaattggacactgaagtttctgatcagaagaaattggtcaaggaacaagatgatataattcgcaggctatcggcaaaaatcaaggatcagcagaggcttctcaaagaacaaaaagacaccatagacaagttcgctgaagatcagaagcaatcgaaacgttggtcatttggttcgagcagggatttgaaactgaatccaaatgcgttagagaggaaaatggaagaattagctgaagatttccggatgaagatagaagatcatattaggatactatacaggaggatccatgtagctgaacaaatacacttagagagcaagaacgagtatatcaaaacacgagacatgcttaaagaaaacaaggaaaacagagaaagtttgatgtttttcgaaacccaattcaataaaatgaaagacgcattggaaaaagggtacacaggatccgaaaccgcgatgaagaaactagaagaagcagaggaagtcacgaaccgagttgctagaatagggaaagagatggagtcagcgaagctttgggtgagtgagaagaagagcgaagtagagactctaaccgcaaagctagaatgcagcgaagctcaagagacattgttgaaggagaagttatcaaagctagagaagaagcttgcggaagaaggaacagagaaactgaaactagcaaaggttttgagcaaatttgaaacgagaataaaagagctagaggtgaaggtgaagggaagagaagtagaattgttgagtttaggagaagagaagagagaagccataagacaactctgtattcttgttgattatcatcaagatcgatacaatcaactcaagaaatcaatcttaaaggttgatgatcttaaaacctaa

SEQ ID NO: 86028 - protein, 1196 aa, Arabidopsis thaliana
  peptide (1)..(1196): Ceres Seq. ID no. 12685473
MASQTQLRLIIYEFTRKIQTRLNTQKLHSFVTKSKLARDPYFATQLARFYALNDDLISARKLFDVFPERSVFLWNSIIRAYAKAHQFTTVLSLFSQILRSDTRPDNFTYACLARGFSESFDTKGLRCIHGIAIVSGLGFDQICGSAIVKAYSKAGLIVEASKLFCSIPDPDLALWNVMILGYGCCGFWDKGINLFNLMQHRGHQPNCYTMVALTSGLIDPSLLLVAWSVHAFCLKINLDSHSYVGCALVNMYSRCMCIASACSVFNSISEPDLVACSSLITGYSRCGNHKEALHLFAELRMSGKKPDCVLVAIVLGSCAELSDSVSGKEVHSYVIRLGLELDIKVCSALIDMYSKCGLLKCAMSLFAGIPEKNIVSFNSLILGLGLHGFASTAFEKFTEILEMGLIPDEITFSALLCTCCHSGLLNKGQEIFERMKSEFGIEPQTEHYVYMVKLMGMAGKLEEAFEFVMSLQKPIDSGILGALLSCCEVHENTHLAEVVAENIHKNGEERRSVYKVMLSNVYARYGRWDEVERLRDGISESYGGKLPGISCFPRKAKKQLFDLTPEARTRIVRMERAKTEVEKKVSRLLKFIQNKNRIPRDSKRELLGIVNDLQEQCQSLYSLCDNFQQDLDPKSGGRRKGISRVASSSSDLEYYSSEEIDNVVEEGNDICELQSKIEALRNEAEEKQRELTLRVKELERELGNAKAECDRKGNLEEEIAMKATESKQLGEKNKGLRSQISGLESVLKEKGDEISTLVNKFGNSELGLTSRIEDLKCQLKNLEQEIGFLRARNAGLAGNLEVTKVEEKERVKGLMDQVNGMKHELESLRSQKDESEAKLEKKVEEVTETKMQLKSLKEETEEERNRLSEEIDQLKGENQMLHRRISELDSLHMEMKTKSAHEMEDASKKLDTEVSDQKKLVKEQDDIIRRLSAKIKDQQRLLKEQKDTIDKFAEDQKQSKRWSFGSSRDLKLNPNALERKMEELAEDFRMKIEDHIRILYRRIHVAEQIHLESKNEYIKTRDMLKENKENRESLMFFETQFNKMKDALEKGYTGSETAMKKLEEAEEVTNRVARIGKEMESAKLWVSEKKSEVETLTAKLECSEAQETLLKEKLSKLEKKLAEEGTEKLKLAKVLSKFETRIKELEVKVKGREVELLSLGEEKREAIRQLCILVDYHQDRYNQLKKSILKVDDLKT

SEQ ID NO: 86029 - protein, 1019 aa, Arabidopsis thaliana
  peptide (1)..(1019): Ceres Seq. ID no. 12685474
MILGYGCCGFWDKGINLFNLMQHRGHQPNCYTMVALTSGLIDPSLLLVAWSVHAFCLKINLDSHSYVGCALVNMYSRCMCIASACSVFNSISEPDLVACSSLITGYSRCGNHKEALHLFAELRMSGKKPDCVLVAIVLGSCAELSDSVSGKEVHSYVIRLGLELDIKVCSALIDMYSKCGLLKCAMSLFAGIPEKNIVSFNSLILGLGLHGFASTAFEKFTEILEMGLIPDEITFSALLCTCCHSGLLNKGQEIFERMKSEFGIEPQTEHYVYMVKLMGMAGKLEEAFEFVMSLQKPIDSGILGALLSCCEVHENTHLAEVVAENIHKNGEERRSVYKVMLSNVYARYGRWDEVERLRDGISESYGGKLPGISCFPRKAKKQLFDLTPEARTRIVRMERAKTEVEKKVSRLLKFIQNKNRIPRDSKRELLGIVNDLQEQCQSLYSLCDNFQQDLDPKSGGRRKGISRVASSSSDLEYYSSEEIDNVVEEGNDICELQSKIEALRNEAEEKQRELTLRVKELERELGNAKAECDRKGNLEEEIAMKATESKQLGEKNKGLRSQISGLESVLKEKGDEISTLVNKFGNSELGLTSRIEDLKCQLKNLEQEIGFLRARNAGLAGNLEVTKVEEKERVKGLMDQVNGMKHELESLRSQKDESEAKLEKKVEEVTETKMQLKSLKEETEEERNRLSEEIDQLKGENQMLHRRISELDSLHMEMKTKSAHEMEDASKKLDTEVSDQKKLVKEQDDIIRRLSAKIKDQQRLLKEQKDTIDKFAEDQKQSKRWSFGSSRDLKLNPNALERKMEELAEDFRMKIEDHIRILYRRIHVAEQIHLESKNEYIKTRDMLKENKENRESLMFFETQFNKMKDALEKGYTGSETAMKKLEEAEEVTNRVARIGKEMESAKLWVSEKKSEVETLTAKLECSEAQETLLKEKLSKLEKKLAEEGTEKLKLAKVLSKFETRIKELEVKVKGREVELLSLGEEKREAIRQLCILVDYHQDRYNQLKKSILKVDDLKT

SEQ ID NO: 86030 - protein, 999 aa, Arabidopsis thaliana
  peptide (1)..(999): Ceres Seq. ID no. 12685475
MQHRGHQPNCYTMVALTSGLIDPSLLLVAWSVHAFCLKINLDSHSYVGCALVNMYSRCMCIASACSVFNSISEPDLVACSSLITGYSRCGNHKEALHLFAELRMSGKKPDCVLVAIVLGSCAELSDSVSGKEVHSYVIRLGLELDIKVCSALIDMYSKCGLLKCAMSLFAGIPEKNIVSFNSLILGLGLHGFASTAFEKFTEILEMGLIPDEITFSALLCTCCHSGLLNKGQEIFERMKSEFGIEPQTEHYVYMVKLMGMAGKLEEAFEFVMSLQKPIDSGILGALLSCCEVHENTHLAEVVAENIHKNGEERRSVYKVMLSNVYARYGRWDEVERLRDGISESYGGKLPGISCFPRKAKKQLFDLTPEARTRIVRMERAKTEVEKKVSRLLKFIQNKNRIPRDSKRELLGIVNDLQEQCQSLYSLCDNFQQDLDPKSGGRRKGISRVASSSSDLEYYSSEEIDNVVEEGNDICELQSKIEALRNEAEEKQRELTLRVKELERELGNAKAECDRKGNLEEEIAMKATESKQLGEKNKGLRSQISGLESVLKEKGDEISTLVNKFGNSELGLTSRIEDLKCQLKNLEQEIGFLRARNAGLAGNLEVTKVEEKERVKGLMDQVNGMKHELESLRSQKDESEAKLEKKVEEVTETKMQLKSLKEETEEERNRLSEEIDQLKGENQMLHRRISELDSLHMEMKTKSAHEMEDASKKLDTEVSDQKKLVKEQDDIIRRLSAKIKDQQRLLKEQKDTIDKFAEDQKQSKRWSFGSSRDLKLNPNALERKMEELAEDFRMKIEDHIRILYRRIHVAEQIHLESKNEYIKTRDMLKENKENRESLMFFETQFNKMKDALEKGYTGSETAMKKLEEAEEVTNRVARIGKEMESAKLWVSEKKSEVETLTAKLECSEAQETLLKEKLSKLEKKLAEEGTEKLKLAKVLSKFETRIKELEVKVKGREVELLSLGEEKREAIRQLCILVDYHQDRYNQLKKSILKVDDLKT

SEQ ID NO: 86031 - DNA, 989 bp, Arabidopsis thaliana
  misc_feature (1)..(989): Ceres Seq. ID no. 12685603
  misc_feature (1)..(989): Ortholog of  Ceres SEQ ID NO 15226238 as cited in SEQ ID NO 68840
  misc_feature (1)..(989): Ortholog of  Ceres SEQ ID NO 12635175 as cited in SEQ ID NO 0
  misc_feature (1)..(989): Ortholog of  Ceres SEQ ID NO 14306100 as cited in SEQ ID NO 0
acatgtaaattcacatatctctctctcttatttgatcataaagatattattgcttcttcaagtaaacaaaaaatgggaagctttctcttcctcatcgtagtcatcttcctcttctcttcatccgttaacgcttgtgatcgatgtcttcaccgttctaaagcagcttatttctcctctgcctctgctctctcttctggagcttgtgcttatggctctatggctacgagtttcttcgccggacatatcgctgcagctatcccttctatctacaaagacggtgctggctgtggagcttgctttcaagtcagatgcaagaaccctaagctgtgtagcactaaaggaaccattgtgatgatcacagacttaaacaagagtaaccaaaccgatcttgtccttagtagcagagcttttagagctatggctaaacctattgttggtgctgacaaagaccttctcaaacaaggcattgtcgacatcgaataccaaagagttccttgcgattacggcaacaagaacatgaacgtgagagtagaagaagcaagcaagaaaccaaactacttagagataaagcttttataccaaggaggtcaaacagaagtagtatccatcgacattgctcaagtcggttcatcgccaaattggggttacatgacaagaagccacggagctgtttgggtaactgacaaagtacccaccggagctatccagttcaggttcgtagtaaccggtggatacgacggtaaaatgatttggtcacagagtgttcttccatccaattgggaagctgggaaaatttacgacgccggtgttcaaatcactgacattgctcaagaaggttgtgatccttgcgatgctcacatctggaactaagttatttagtggcacacaaacaaacatctttcataggtttatatataatgtgtgacagaggttattaatgaacatagttaaagaatgcttaatctaatgattctcatgattctacattg

SEQ ID NO: 86032 - protein, 289 aa, Arabidopsis thaliana; identical to SEQ ID NO: 20845
  peptide (1)..(289): Ceres Seq. ID no. 12685604

SEQ ID NO: 86033 - protein, 265 aa, Arabidopsis thaliana; identical to SEQ ID NO: 20846
  peptide (1)..(265): Ceres Seq. ID no. 12685605

SEQ ID NO: 86034 - protein, 217 aa, Arabidopsis thaliana; identical to SEQ ID NO: 20847
  peptide (1)..(217): Ceres Seq. ID no. 12685606

SEQ ID NO: 86035 - DNA, 1839 bp, Arabidopsis thaliana
  misc_feature (1)..(1839): Ceres Seq. ID no. 12685671
  misc_feature (1)..(1839): Ortholog of  Ceres SEQ ID NO 12612272 as cited in SEQ ID NO 55946
  misc_feature (1)..(1839): Ortholog of  Ceres SEQ ID NO 15169960 as cited in SEQ ID NO 57591
atgggtgctgctttgctttgtcttctctactttctttccttcctaaccctctctctatccagcgtaaacatagactgtggaacgtcattgccaggcgtagacaacaacaacctaaaatgggtcggagaccaagacttcatcacatccggagactcggctactatttcgtccaccaccgttgagaaatccctcaccacacttcggtactttcccacgggcgactccaattgctactccaacattccggttacaaaaggcggaaaagttctagtgagaaccatgttttactacgggaattacgacgggaagtcctcaaccccatccttcagcgtagtgtttgaagggaaacaccgaggcaccctatcgatatcctcagcattcgaaccttaccttctggagttgatattttccccggccggtggagagaccagcgtctgttttgtacgtacttcttcatcatcaaacccttttgtgtcttccattgaagttgtcgacttggatgatggcatgtatgccgagcttggtcctggtgaaggtttattttaccaacaacgacgtgcgtatggtgcaacagaatttctaagatcggatcttcaaggtaggttttggcttccatccgagataaacatattggtgacgggaatacagtccacggctgtatccattgatacctctggtgcatcaaacaagccgcctgagtccgtcctccgtaactcttggaccggggaaggcttatcattagtcgaccctactcttccttcagcaggagttccggtgtacttggctatgtatttctcggagcctctagagtcaagtttacgatcgttcaacattttctttggtggtaagcaagttggtaggggtcctgttgtgcctttgtttggaaaagcaactcaagtggtcgtgagagatgtggtggccagttcaagcaccctactgacgctctggtccacttctagtgcgcttttaccgcccatgataaatgcggccgagctttatgtaattagtaagggtacaagcgaaagcacaggcggaaacgaaactggttccggttcaggatcaggatccggtggaagtggaggaggaggatctgggagcagtggatccggatctggtgggactagcaaaggaggaactggaggtagcaatgaagtgagtccaggtggatcaaccaatggaaagagcagtaaactgccaattatactcggtgtagtgtcaccggttgcgtttgttcttgtcgcatatgtgttcatcgctataatcttagctaatcgtcgcaaagtgaggctgcaagccttggctatgcctacgtccacagagagttctagcaaaacaaaacaaaacagagcaaacagagtaagcgaaacgatgtctctagttccgagcttttttggaggccgaagaacaaacgtgttcgacccattttcactagacgtatgggatccgttcgaaggattcttgacgcccgggttgacaaacgcacctgccaaggacgtggcagcgttcacaaacgctaaagtggactggagggagacacctgaagcgcatgtgttcaaggcggacgtgcctgggcttaagaaggaagaggtgaaggtggaggttgaagatggtaacatacttcagataagcggtgagaggagcagtgagaatgaagagaagagtgacacatggcaccgtgtggagcggtcaagtgggaagttcatgaggaggtttcggttgccagagaatgcaaaggtggaggaagtaaaggcgagtatggagaatggggtgttgtcggttacggtgccgaaagttcaggagagtaagccggaggtcaagtccgttgatatctctggttaa

SEQ ID NO: 86036 - protein, 612 aa, Arabidopsis thaliana
  peptide (1)..(612): Ceres Seq. ID no. 12685672
MGAALLCLLYFLSFLTLSLSSVNIDCGTSLPGVDNNNLKWVGDQDFITSGDSATISSTTVEKSLTTLRYFPTGDSNCYSNIPVTKGGKVLVRTMFYYGNYDGKSSTPSFSVVFEGKHRGTLSISSAFEPYLLELIFSPAGGETSVCFVRTSSSSNPFVSSIEVVDLDDGMYAELGPGEGLFYQQRRAYGATEFLRSDLQGRFWLPSEINILVTGIQSTAVSIDTSGASNKPPESVLRNSWTGEGLSLVDPTLPSAGVPVYLAMYFSEPLESSLRSFNIFFGGKQVGRGPVVPLFGKATQVVVRDVVASSSTLLTLWSTSSALLPPMINAAELYVISKGTSESTGGNETGSGSGSGSGGSGGGGSGSSGSGSGGTSKGGTGGSNEVSPGGSTNGKSSKLPIILGVVSPVAFVLVAYVFIAIILANRRKVRLQALAMPTSTESSSKTKQNRANRVSETMSLVPSFFGGRRTNVFDPFSLDVWDPFEGFLTPGLTNAPAKDVAAFTNAKVDWRETPEAHVFKADVPGLKKEEVKVEVEDGNILQISGERSSENEEKSDTWHRVERSSGKFMRRFRLPENAKVEEVKASMENGVLSVTVPKVQESKPEVKSVDISG

SEQ ID NO: 86037 - protein, 519 aa, Arabidopsis thaliana
  peptide (1)..(519): Ceres Seq. ID no. 12685673
MFYYGNYDGKSSTPSFSVVFEGKHRGTLSISSAFEPYLLELIFSPAGGETSVCFVRTSSSSNPFVSSIEVVDLDDGMYAELGPGEGLFYQQRRAYGATEFLRSDLQGRFWLPSEINILVTGIQSTAVSIDTSGASNKPPESVLRNSWTGEGLSLVDPTLPSAGVPVYLAMYFSEPLESSLRSFNIFFGGKQVGRGPVVPLFGKATQVVVRDVVASSSTLLTLWSTSSALLPPMINAAELYVISKGTSESTGGNETGSGSGSGSGGSGGGGSGSSGSGSGGTSKGGTGGSNEVSPGGSTNGKSSKLPIILGVVSPVAFVLVAYVFIAIILANRRKVRLQALAMPTSTESSSKTKQNRANRVSETMSLVPSFFGGRRTNVFDPFSLDVWDPFEGFLTPGLTNAPAKDVAAFTNAKVDWRETPEAHVFKADVPGLKKEEVKVEVEDGNILQISGERSSENEEKSDTWHRVERSSGKFMRRFRLPENAKVEEVKASMENGVLSVTVPKVQESKPEVKSVDISG

SEQ ID NO: 86038 - protein, 443 aa, Arabidopsis thaliana
  peptide (1)..(443): Ceres Seq. ID no. 12685674
MYAELGPGEGLFYQQRRAYGATEFLRSDLQGRFWLPSEINILVTGIQSTAVSIDTSGASNKPPESVLRNSWTGEGLSLVDPTLPSAGVPVYLAMYFSEPLESSLRSFNIFFGGKQVGRGPVVPLFGKATQVVVRDVVASSSTLLTLWSTSSALLPPMINAAELYVISKGTSESTGGNETGSGSGSGSGGSGGGGSGSSGSGSGGTSKGGTGGSNEVSPGGSTNGKSSKLPIILGVVSPVAFVLVAYVFIAIILANRRKVRLQALAMPTSTESSSKTKQNRANRVSETMSLVPSFFGGRRTNVFDPFSLDVWDPFEGFLTPGLTNAPAKDVAAFTNAKVDWRETPEAHVFKADVPGLKKEEVKVEVEDGNILQISGERSSENEEKSDTWHRVERSSGKFMRRFRLPENAKVEEVKASMENGVLSVTVPKVQESKPEVKSVDISG

SEQ ID NO: 86039 - DNA, 825 bp, Arabidopsis thaliana
  misc_feature (1)..(825): Ceres Seq. ID no. 12685728
  misc_feature (1)..(825): Ortholog of  Ceres SEQ ID NO 13598527 as cited in SEQ ID NO 64914
atggagaacaaaactcaagaggaagcttcgaccatcaaagtttcatcccttacttgcatagatcttgccaacccgaactttcaacaatcagcggtttctcttaaacaggcatgtctagattgtggatttttctatgtcacaaatcatggtataagtgaggagttgaaggacgaggcttttgagcagagcaagaagttctttgctcttcctttggaggagaaaatgaaagtcttgagaaatgaaaagcatcgaggctattcacccgtccttgatcaaattttagatcctgagaatcaagtcgacgttgttttgccgggatggcgggcgaccatggagaaatatcatcaagaagcattgagggtttgcaaggctattgctagattattagcattggcgctcgacttggacacaaattactttgataaaccggaaatgctgggaaatcctatcgcagttatgcgtttgcttcgttacgaagggatgtctgatcccttgaaaggaatatttggatgtggagctcattctgattacggaatgctgactctcttagcaaccgatagtgtaaccgggctccagatatgcaaggataaggacgtgaagcctaggaagtgggaatatgtaccatctattaaaggagcatatatcgtcaatcttggagacttgttggagcgttggagcaacggcatttttaaatccacattgcatcgggtacttgggaatggtcaagaccgatattccattccattcttcatagaaccgagtcacgactgtctagtagaatgtctacctacctgccagtccgaaaacaaccttcccaaaagttaa

SEQ ID NO: 86040 - protein, 274 aa, Arabidopsis thaliana
  peptide (1)..(274): Ceres Seq. ID no. 12685729
MENKTQEEASTIKVSSLTCIDLANPNFQQSAVSLKQACLDCGFFYVTNHGISEELKDEAFEQSKKFFALPLEEKMKVLRNEKHRGYSPVLDQILDPENQVDVVLPGWRATMEKYHQEALRVCKAIARLLALALDLDTNYFDKPEMLGNPIAVMRLLRYEGMSDPLKGIFGCGAHSDYGMLTLLATDSVTGLQICKDKDVKPRKWEYVPSIKGAYIVNLGDLLERWSNGIFKSTLHRVLGNGQDRYSIPFFIEPSHDCLVECLPTCQSENNLPKS

SEQ ID NO: 86041 - protein, 200 aa, Arabidopsis thaliana
  peptide (1)..(200): Ceres Seq. ID no. 12685730
MKVLRNEKHRGYSPVLDQILDPENQVDVVLPGWRATMEKYHQEALRVCKAIARLLALALDLDTNYFDKPEMLGNPIAVMRLLRYEGMSDPLKGIFGCGAHSDYGMLTLLATDSVTGLQICKDKDVKPRKWEYVPSIKGAYIVNLGDLLERWSNGIFKSTLHRVLGNGQDRYSIPFFIEPSHDCLVECLPTCQSENNLPKS

SEQ ID NO: 86042 - protein, 164 aa, Arabidopsis thaliana
  peptide (1)..(164): Ceres Seq. ID no. 12685731
MEKYHQEALRVCKAIARLLALALDLDTNYFDKPEMLGNPIAVMRLLRYEGMSDPLKGIFGCGAHSDYGMLTLLATDSVTGLQICKDKDVKPRKWEYVPSIKGAYIVNLGDLLERWSNGIFKSTLHRVLGNGQDRYSIPFFIEPSHDCLVECLPTCQSENNLPKS

SEQ ID NO: 86043 - DNA, 861 bp, Arabidopsis thaliana
  misc_feature (1)..(861): Ceres Seq. ID no. 12685743
  misc_feature (1)..(861): Ortholog of  Ceres SEQ ID NO 13598527 as cited in SEQ ID NO 64914
atggagaacaaaactcaagaggaagcttcgaccatcaaagtttcatcccttacttgcatagatcttgccaacccgaactttcaacaatcagcggtttctcttaaacaggcatgtctagattgtggatttttctatgtcacaaatcatggtataagtgaggagttgaaggacgaggcttttgagcagagcaagaagttctttgctcttcctttggaggagaaaatgaaagtcttgagaaatgaaaagcatcgaggctattcacccgtccttgatcaaattttagatcctgagaatcaagtcgacggtgattacaaagaaagttttttcattggaatcgaagttgttttgccgggatggcgggcgaccatggagaaatatcatcaagaagcattgagggtttgcaaggctattgctagattattagcattggcgctcgacttggacacaaattactttgataaaccggaaatgctgggaaatcctatcgcagttatgcgtttgcttcgttacgaagggatgtctgatcccttgaaaggaatatttggatgtggagctcattctgattacggaatgctgactctcttagcaaccgatagtgtaaccgggctccagatatgcaaggataaggacgtgaagcctaggaagtgggaatatgtaccatctattaaaggagcatatatcgtcaatcttggagacttgttggagcgttggagcaacggcatttttaaatccacattgcatcgggtacttgggaatggtcaagaccgatattccattccattcttcatagaaccgagtcacgactgtctagtagaatgtctacctacctgccagtccgaaaacaaccttcccaaaagttaa

SEQ ID NO: 86044 - protein, 286 aa, Arabidopsis thaliana
  peptide (1)..(286): Ceres Seq. ID no. 12685744
MENKTQEEASTIKVSSLTCIDLANPNFQQSAVSLKQACLDCGFFYVTNHGISEELKDEAFEQSKKFFALPLEEKMKVLRNEKHRGYSPVLDQILDPENQVDGDYKESFFIGIEVVLPGWRATMEKYHQEALRVCKAIARLLALALDLDTNYFDKPEMLGNPIAVMRLLRYEGMSDPLKGIFGCGAHSDYGMLTLLATDSVTGLQICKDKDVKPRKWEYVPSIKGAYIVNLGDLLERWSNGIFKSTLHRVLGNGQDRYSIPFFIEPSHDCLVECLPTCQSENNLPKS

SEQ ID NO: 86045 - protein, 212 aa, Arabidopsis thaliana
  peptide (1)..(212): Ceres Seq. ID no. 12685745
MKVLRNEKHRGYSPVLDQILDPENQVDGDYKESFFIGIEVVLPGWRATMEKYHQEALRVCKAIARLLALALDLDTNYFDKPEMLGNPIAVMRLLRYEGMSDPLKGIFGCGAHSDYGMLTLLATDSVTGLQICKDKDVKPRKWEYVPSIKGAYIVNLGDLLERWSNGIFKSTLHRVLGNGQDRYSIPFFIEPSHDCLVECLPTCQSENNLPKS

SEQ ID NO: 86046 - protein, 164 aa, Arabidopsis thaliana; identical to SEQ ID NO: 86042
  peptide (1)..(164): Ceres Seq. ID no. 12685746

SEQ ID NO: 86047 - DNA, 900 bp, Arabidopsis thaliana
  misc_feature (1)..(900): Ceres Seq. ID no. 12685757
  misc_feature (1)..(900): Ortholog of  Ceres SEQ ID NO 13598527 as cited in SEQ ID NO 64914
atggagaacaaaactcaagaggaagcttcgaccattaatgtttcatcccttgcttgtatagatctcgccaactccaatcttcatcgatcagctgcttcgcttaagcaggcatgtctagattgtggatttttctatgtcacaaatcatggtataagtgaggagttaaaggacgaggctttcgagcaaagcaagaagttctttgctcttcctttggacgagaagatgaaagtcttgaaaaacgaaaaacatcaaggctattcacccgtccttagtcaaatctctgataaccaaatccatggggattacaaagaaagttttttcattggaatcgaaggctccaacgatacaccattctgtcgcgctaacatttggcctaaccctgatgttttgtcgggatggcaggcgaccatggagaaatatcatcaagaagcattgagggtttgtaaggctattgctagagtattggcattggcgctcaacgtggatggagattactttgatacaccggaaatgcttggaaatcccctcacatttatgcgcttgcttcactatgaagggatgtctgatccctcaaaaggaatatatggctgcgggccacattctgattttggtatgatgactctcttaggaacggatagtgtaatggggctccagatatgcaaggatagagacgtgaagcctaggaagtgggaatatatactatcgataaaaggggcatatatcgtgaatattggtgacttgctagagcgttggagcaatggcatttttaaatccacattgcatcgggtacttgggaatggtcaagaccgatattccattgcattctttctgcaacctagtcacgactgtatagtagaatgtcttcctacctgccagtctgaaaacaaccctcccaagtaa

SEQ ID NO: 86048 - protein, 299 aa, Arabidopsis thaliana
  peptide (1)..(299): Ceres Seq. ID no. 12685758
MENKTQEEASTINVSSLACIDLANSNLHRSAASLKQACLDCGFFYVTNHGISEELKDEAFEQSKKFFALPLDEKMKVLKNEKHQGYSPVLSQISDNQIHGDYKESFFIGIEGSNDTPFCRANIWPNPDVLSGWQATMEKYHQEALRVCKAIARVLALALNVDGDYFDTPEMLGNPLTFMRLLHYEGMSDPSKGIYGCGPHSDFGMMTLLGTDSVMGLQICKDRDVKPRKWEYILSIKGAYIVNIGDLLERWSNGIFKSTLHRVLGNGQDRYSIAFFLQPSHDCIVECLPTCQSENNPPK

SEQ ID NO: 86049 - protein, 225 aa, Arabidopsis thaliana
  peptide (1)..(225): Ceres Seq. ID no. 12685759
MKVLKNEKHQGYSPVLSQISDNQIHGDYKESFFIGIEGSNDTPFCRANIWPNPDVLSGWQATMEKYHQEALRVCKAIARVLALALNVDGDYFDTPEMLGNPLTFMRLLHYEGMSDPSKGIYGCGPHSDFGMMTLLGTDSVMGLQICKDRDVKPRKWEYILSIKGAYIVNIGDLLERWSNGIFKSTLHRVLGNGQDRYSIAFFLQPSHDCIVECLPTCQSENNPPK

SEQ ID NO: 86050 - protein, 163 aa, Arabidopsis thaliana
  peptide (1)..(163): Ceres Seq. ID no. 12685760
MEKYHQEALRVCKAIARVLALALNVDGDYFDTPEMLGNPLTFMRLLHYEGMSDPSKGIYGCGPHSDFGMMTLLGTDSVMGLQICKDRDVKPRKWEYILSIKGAYIVNIGDLLERWSNGIFKSTLHRVLGNGQDRYSIAFFLQPSHDCIVECLPTCQSENNPPK

SEQ ID NO: 86051 - DNA, 1329 bp, Arabidopsis thaliana
  misc_feature (1)..(1329): Ceres Seq. ID no. 12685798
  misc_feature (1)..(1329): Ortholog of  Ceres SEQ ID NO 13597843 as cited in SEQ ID NO 64850
  misc_feature (1)..(1329): Ortholog of  Ceres SEQ ID NO 13662880 as cited in SEQ ID NO 65422
  misc_feature (1)..(1329): Ortholog of  Ceres SEQ ID NO 12779098 as cited in SEQ ID NO 67698
  misc_feature (1)..(1329): Ortholog of  Ceres SEQ ID NO 13596180 as cited in SEQ ID NO 67941
  misc_feature (1)..(1329): Ortholog of  Ceres SEQ ID NO 13591190 as cited in SEQ ID NO 68044
  misc_feature (1)..(1329): Ortholog of  Ceres SEQ ID NO 13595961 as cited in SEQ ID NO 68223
  misc_feature (1)..(1329): Ortholog of  Ceres SEQ ID NO 13596089 as cited in SEQ ID NO 68373
atggagaaaagggtagagaagagaaggattgtgttagttccggttgctgcacaaggacatgtaaccccaatgatgcagcttgggaaagcccttcaatcaaagggcttcttaattactgttgctcagagacagttcaatcaaataggctcatcattgcaacactttcctggttttgactttgtcaccataccagaaagcttacctcagtctgaatctaagaaactaggaccagctgagtatcttatgaatctcaacaaaacaagcgaggcaagcttcaaggagtgtataagtcagttatcgatgcaacaaggcaatgatatagcatgtatcatctatgacaagcttatgtacttctgtgaagcagcagctaaggagtttaagattcctagtgttatcttcagcactagcagtgctacaattcaagtttgctactgtgttttaagtgaactcagtgccgagaagttcttgatcgacatgaaaggtttgcatcctttaaggtacaaagacctaccaacttcaggatttggaccattagagccacttttggagatgtgtagggaagtagttaacaaaagaacagcttccgctgttatcatcaacacggcgagctgtctagagagcttgtctctgtcatggctgcaacaagaacttggaattccagtgtatccattaggccctcttcacattacagcttcatcgccgggacctagtttactgcaagaggacatgagctgcattgaatggctgaacaagcagaaaccaaggtcagtcatatacataagcttgggaaccaaagctcacatggagaccaaggagatgttagagatggcctggggattgttgaatagcaaccaacctttcttatgggtcatccgacctggctctgttgcaggcttcgagtggatagagttattaccagaggaagtcattaagatggtaacagaaagaggatacatagcgaaatgggcaccgcagatagaagtacttggacatcctgcagtgggaggattctggagccactgtggatggaactcaacactcgagagtattgtggaaggagtcccaatgatttgcaggcctttacaaggcgaacaaaagttaaatgcgatgtatatagaaagtgtttggaaaatagggattcaacttgaaggtgaagtggaaagggaaggtgtagagagagctgtgaagaggttgatcatagatgaagaaggtgcagccatgagggagagggctcttgatttaaaagagaagctcaatgcctcggtaagaagtggaggctcctcatacaacgcactggatgagcttgtcaagttcttgaatacagagtga

SEQ ID NO: 86052 - protein, 442 aa, Arabidopsis thaliana
  peptide (1)..(442): Ceres Seq. ID no. 12685799
MEKRVEKRRIVLVPVAAQGHVTPMMQLGKALQSKGFLITVAQRQFNQIGSSLQHFPGFDFVTIPESLPQSESKKLGPAEYLMNLNKTSEASFKECISQLSMQQGNDIACIIYDKLMYFCEAAAKEFKIPSVIFSTSSATIQVCYCVLSELSAEKFLIDMKGLHPLRYKDLPTSGFGPLEPLLEMCREVVNKRTASAVIINTASCLESLSLSWLQQELGIPVYPLGPLHITASSPGPSLLQEDMSCIEWLNKQKPRSVIYISLGTKAHMETKEMLEMAWGLLNSNQPFLWVIRPGSVAGFEWIELLPEEVIKMVTERGYIAKWAPQIEVLGHPAVGGFWSHCGWNSTLESIVEGVPMICRPLQGEQKLNAMYIESVWKIGIQLEGEVEREGVERAVKRLIIDEEGAAMRERALDLKEKLNASVRSGGSSYNALDELVKFLNTE

SEQ ID NO: 86053 - protein, 419 aa, Arabidopsis thaliana
  peptide (1)..(419): Ceres Seq. ID no. 12685800
MMQLGKALQSKGFLITVAQRQFNQIGSSLQHFPGFDFVTIPESLPQSESKKLGPAEYLMNLNKTSEASFKECISQLSMQQGNDIACIIYDKLMYFCEAAAKEFKIPSVIFSTSSATIQVCYCVLSELSAEKFLIDMKGLHPLRYKDLPTSGFGPLEPLLEMCREVVNKRTASAVIINTASCLESLSLSWLQQELGIPVYPLGPLHITASSPGPSLLQEDMSCIEWLNKQKPRSVIYISLGTKAHMETKEMLEMAWGLLNSNQPFLWVIRPGSVAGFEWIELLPEEVIKMVTERGYIAKWAPQIEVLGHPAVGGFWSHCGWNSTLESIVEGVPMICRPLQGEQKLNAMYIESVWKIGIQLEGEVEREGVERAVKRLIIDEEGAAMRERALDLKEKLNASVRSGGSSYNALDELVKFLNTE

SEQ ID NO: 86054 - protein, 418 aa, Arabidopsis thaliana
  peptide (1)..(418): Ceres Seq. ID no. 12685801
MQLGKALQSKGFLITVAQRQFNQIGSSLQHFPGFDFVTIPESLPQSESKKLGPAEYLMNLNKTSEASFKECISQLSMQQGNDIACIIYDKLMYFCEAAAKEFKIPSVIFSTSSATIQVCYCVLSELSAEKFLIDMKGLHPLRYKDLPTSGFGPLEPLLEMCREVVNKRTASAVIINTASCLESLSLSWLQQELGIPVYPLGPLHITASSPGPSLLQEDMSCIEWLNKQKPRSVIYISLGTKAHMETKEMLEMAWGLLNSNQPFLWVIRPGSVAGFEWIELLPEEVIKMVTERGYIAKWAPQIEVLGHPAVGGFWSHCGWNSTLESIVEGVPMICRPLQGEQKLNAMYIESVWKIGIQLEGEVEREGVERAVKRLIIDEEGAAMRERALDLKEKLNASVRSGGSSYNALDELVKFLNTE

SEQ ID NO: 86055 - DNA, 1962 bp, Arabidopsis thaliana
  misc_feature (1)..(1962): Ceres Seq. ID no. 12685802
  misc_feature (1)..(1962): Ortholog of  Ceres SEQ ID NO 13655640 as cited in SEQ ID NO 63844
atgtcgcgtcaactagaccccgtcgctgagctcgaaagcttaaaaacacatgttgatcattctggaaatcctagcttctcaacacttagccagcgtcaccaatctggtgaagcttcaaagcggtcaccttctggttcaccaagaaaagaaaatgatggagaacattctcaccataagaaatctttgttctctaaaatgaaggataaggcgaaaaaactgcagcacagtctcagcaccaagaagagacatgatgaagaaggtgatgcaaccatgtcaccgttttgcagatccgaagatcatgaagttagagaagttggttatgcgtcattgtcaccacgtgacaagtcaaaagaccgtaaagtcagagaagaaggaggagaagaagaagaagaagatcctgaatatcttggagccccaatgtatgaatcaaagaaggcacctgaagagttaaaggagacagcaaggcagcatccccgagagaatcctgtgatcactgagacaaatgtcttgtctgttctcccagccaaacaggacgctgaacaagaacaaaaagattgtaatggttccaaaacagaacatcctgtgatctctgagaagaatgttttatctgatgtcaagcaagagaagcctgctgattctgacacaacaacaatagtaacagaatcgtctgagaagacaaggaaagagtgcacgagccagcaggaacctattagtccaagcaagacagtaacagaaactgtgacagagaagctagcacctggttatgctaaagtctctgacgcaactcaagctataactaagaagattcaagatatggcttttccagaaccaacagagcgagaagaagaggtaaatgatgttgcagaaatcaacactgccggaactaaccagcccactggcttcaataccaaggtatgggacaaaggcgtatcaatgaaggaatacatatcgcagaagtttgagcctagcgaagacgatagagaactttctcgagtgatatctaaagctatcagtcctcgtaaaggttcttctcagacttctagttttggtgcagccacaaacatggcacctgcttcaaattcagcagacaacaaagctcctcttgtagccaacacaaatgaaaaggctaacgggacagtctacaaaggaaagctctcttctaatgcacagattgctgtaaagagagtttctttagatgcagaacaagataccaaacaccttgtttctcagattgttggtattgggaagttaaggcacaagaaccttgtgcagctcttaggatactgcagaagaaaaggtgaattactcttggtctatgattatatgccttatggaaatcttgatgatttcttgtttaatgaggaaaggcctaatctaagttggtcacaaaggtttcatataatcaaaggagttgcttcagctcttctttatttgcatgaacagatcgttcttcaccgagatgtaaaagccgcaaatgtactcttggatgaggatttaaacgggcgactagattacggtctagcaagatttggtacaaacaggaacccaatgctaggaagcgtaggttatgtggctccagagctaataataacaggaatgccgacaaccaaagccgatgtttattcattcggagcattactacttgagtttgcttgtggaagaatgttcattgagtatccagggaagcctgaagagtttaacttaatcagctgggtgtgtcaatgctggaaaagagggaacttggttggcgcccgagacgctagattggaaggagactacgtctgcaaggagatagagatggtactaaagcttggtctactatgtgcacagtacaatccagaggataggcctagtatgtcccaagtggtaaactatcttgaaggaaatgatgttttgcctgagatgcctccagacactcctgggatcagtattccaacaccgtaccatgaagttcttgcgtag

SEQ ID NO: 86056 - protein, 653 aa, Arabidopsis thaliana
  peptide (1)..(653): Ceres Seq. ID no. 12685803
MSRQLDPVAELESLKTHVDHSGNPSFSTLSQRHQSGEASKRSPSGSPRKENDGEHSHHKKSLFSKMKDKAKKLQHSLSTKKRHDEEGDATMSPFCRSEDHEVREVGYASLSPRDKSKDRKVREEGGEEEEEDPEYLGAPMYESKKAPEELKETARQHPRENPVITETNVLSVLPAKQDAEQEQKDCNGSKTEHPVISEKNVLSDVKQEKPADSDTTTIVTESSEKTRKECTSQQEPISPSKTVTETVTEKLAPGYAKVSDATQAITKKIQDMAFPEPTEREEEVNDVAEINTAGTNQPTGFNTKVWDKGVSMKEYISQKFEPSEDDRELSRVISKAISPRKGSSQTSSFGAATNMAPASNSADNKAPLVANTNEKANGTVYKGKLSSNAQIAVKRVSLDAEQDTKHLVSQIVGIGKLRHKNLVQLLGYCRRKGELLLVYDYMPYGNLDDFLFNEERPNLSWSQRFHIIKGVASALLYLHEQIVLHRDVKAANVLLDEDLNGRLDYGLARFGTNRNPMLGSVGYVAPELIITGMPTTKADVYSFGALLLEFACGRMFIEYPGKPEEFNLISWVCQCWKRGNLVGARDARLEGDYVCKEIEMVLKLGLLCAQYNPEDRPSMSQVVNYLEGNDVLPEMPPDTPGISIPTPYHEVLA

SEQ ID NO: 86057 - protein, 588 aa, Arabidopsis thaliana
  peptide (1)..(588): Ceres Seq. ID no. 12685804
MKDKAKKLQHSLSTKKRHDEEGDATMSPFCRSEDHEVREVGYASLSPRDKSKDRKVREEGGEEEEEDPEYLGAPMYESKKAPEELKETARQHPRENPVITETNVLSVLPAKQDAEQEQKDCNGSKTEHPVISEKNVLSDVKQEKPADSDTTTIVTESSEKTRKECTSQQEPISPSKTVTETVTEKLAPGYAKVSDATQAITKKIQDMAFPEPTEREEEVNDVAEINTAGTNQPTGFNTKVWDKGVSMKEYISQKFEPSEDDRELSRVISKAISPRKGSSQTSSFGAATNMAPASNSADNKAPLVANTNEKANGTVYKGKLSSNAQIAVKRVSLDAEQDTKHLVSQIVGIGKLRHKNLVQLLGYCRRKGELLLVYDYMPYGNLDDFLFNEERPNLSWSQRFHIIKGVASALLYLHEQIVLHRDVKAANVLLDEDLNGRLDYGLARFGTNRNPMLGSVGYVAPELIITGMPTTKADVYSFGALLLEFACGRMFIEYPGKPEEFNLISWVCQCWKRGNLVGARDARLEGDYVCKEIEMVLKLGLLCAQYNPEDRPSMSQVVNYLEGNDVLPEMPPDTPGISIPTPYHEVLA

SEQ ID NO: 86058 - protein, 563 aa, Arabidopsis thaliana
  peptide (1)..(563): Ceres Seq. ID no. 12685805
MSPFCRSEDHEVREVGYASLSPRDKSKDRKVREEGGEEEEEDPEYLGAPMYESKKAPEELKETARQHPRENPVITETNVLSVLPAKQDAEQEQKDCNGSKTEHPVISEKNVLSDVKQEKPADSDTTTIVTESSEKTRKECTSQQEPISPSKTVTETVTEKLAPGYAKVSDATQAITKKIQDMAFPEPTEREEEVNDVAEINTAGTNQPTGFNTKVWDKGVSMKEYISQKFEPSEDDRELSRVISKAISPRKGSSQTSSFGAATNMAPASNSADNKAPLVANTNEKANGTVYKGKLSSNAQIAVKRVSLDAEQDTKHLVSQIVGIGKLRHKNLVQLLGYCRRKGELLLVYDYMPYGNLDDFLFNEERPNLSWSQRFHIIKGVASALLYLHEQIVLHRDVKAANVLLDEDLNGRLDYGLARFGTNRNPMLGSVGYVAPELIITGMPTTKADVYSFGALLLEFACGRMFIEYPGKPEEFNLISWVCQCWKRGNLVGARDARLEGDYVCKEIEMVLKLGLLCAQYNPEDRPSMSQVVNYLEGNDVLPEMPPDTPGISIPTPYHEVLA

SEQ ID NO: 86059 - DNA, 3513 bp, Arabidopsis thaliana
  misc_feature (1)..(3513): Ceres Seq. ID no. 12685813
  misc_feature (1)..(3513): Ortholog of  Ceres SEQ ID NO 12586556 as cited in SEQ ID NO 64667
atggaaaaggtagagttaccagttcacgagcatcctttgttcatctttgatcggatttgtatggacacttgtaaaggatgcagtgtttttggttatttttacggtggctatgtttgcaatgaggtaggttgtgataccctcttccataaggagtgcgtcgagtcggtaccagagatcaaacacccttcccatcctcaacatcctctcaagctcaacctgaaatgtggacggttttgttgtagtttgtgtataagtggattgcaagttggttatcattgttcaatatgcgacttcaatgtgcatttggtttgtgcaagaagacctccatcctcaacttcatcctcatcctcatcttcgccgctacctactagtgttgataattccaaagtgcatcagcatccacttctactctctaagaacgtggagacgttcttactaaaggaagggcgcaattgcaacatgtgcaacacgaatatcaaaatcaatgaaaaacaactttgtgaatgtcgtctgtgcaatatccttttccatttggattgtgtcgggctcattccaaacgtataccaaacttctcatccgaaacaccctctcaagtttctccaatacggagcaccagagtatgctcacgagaaatgccttctttgcaagaagaagttcaaaaagttatctaacaactatgatcgagtttaccactgcgatgtttgtaatgtcaccatttgcaaggattactgtatggcgaaaccaccgccagtttctgttgtgagtcctacgacccatgagcatcaactccaccttgttccaagactagtcaattttacttgcaacgcttgtgggacggctggtgatcgaagtccttatttttgtcttcaatgcaatttcatgatccatcgagcttgtattgatttaccccgcgtgataaatatcaatcgtcataatcatcgcatctcttacactagtcttcttggacacgggaattggacatgtggagtttgtcgtaagaaagtagatgggttttatggggcttattcttgctcgaaatgtcctagctatgctgttcatgcaagatgcgcgacgagaaaggatgtatggtacaaagttgaactagaaggaacaccggaagaggaggaaattgcgccattcgaggtggtcgatgagaatctgatcaagcacttcatccatggccataatttaagactcaacaaggatggtaaccacgaaagcaaattttgtgaagcatgtgcctccaaaatcaataacgatccgttttatggttgtgagcaatgcgactttattctacatgaaacatgtgctagtctgcctagaaagataaggcatgtatccaacaataaacctttaattctatcgacagatacatatttgaaagattctccacgccaaagaagacattgttctgcttgtttccagaatttcagcggttttaggtacgaaactcagtctcgtaatttgtttggttccgctactctagatgttcgttgtagttcgatatatgaaccatttctccatgaaagccatccacatcctttatacttcagtcttgagggggatacaaaatgttctgcatgtgacatcacatatagcgccagggatatgttgtgttgtgatgagtgtgaatttcggttggacttccgctgcgctactttacctagaaaggtaatgaatcagaggtacgacgatcatcctctctacttgtcttacggtgaaaataaggaagatggtcaactttggtgtgaggtatgtgaaacaaaagtagatccaaaggaatggttgtatacatttaacttcttacctcgctctcctctgaagccaccgtcgtgttccgttgctttaaacaatccttcaatttcctccggcgccggagctaaaatctctaataatcagctaattcaatcattgtgcaaagagggtaaacttaaacaagcgattcgcgtcttgtctcaggaatctagcccaagtcaacagacttacgagcttctgattctctgctgcggtcatggagaagaagtgttgggtttgtattggaagatgaataggattggagttgagtcagataggttcacatacacttatgttctcaaggcttgtgttgcatcggaatgcacggtgaatcatctgatgaaagggaaagagattcatgcacatcttactcgacgaggttacagttctcatgtttacattatgactacgttggtggacatgtatgctagatttggctgtgtggattatgccagctatgtgtttgggggaatgccggtgaggaacgttgtttcttggagcgctatgatcgcctgctatgcaaagaacgggaaagcttttgaagctctgaggactttccgtgaaatgatgagagaaaccaaagattcatctccgaattctgtgactatggttagtgtgcttcaagcttgtgcttcgcttgcggctttagagcaagggaaattgattcatgggtacatactcagacgggggcttgactccatattgccagtgatcagtgctcttgtgacgatgtatggtagatgcggtaagcttgaagtgggacaaagagtatttgatcgaatgcatgaccgggatgttgtgtcctggaattccttgatatcaagctatggcgttcacgggtatggaaaaaaagcaattcagatatttgaagagatgctcgccaacggggcttccccaactcccgtaacatttgtcagcgttttgggagcttgcagccacgagggtcttgttgaagaaggaaagagactgtttgaaacaatgtggagagaccatgggataaaaccacaaatcgaacattatgcttgtatggttgatctgttaggtcgggcgaataggttagacgaggcagcaaagatggtacaagacatgaggactgaaccagggcctaaggtttggggttcccttcttggttcttgtagaattcacggtaatgttgagcttgcagagcgggcgagtagaaggctctttgcgcttgaaccaaaaaatgcagggaactatgtgttgttggcagacatttacgcggaagctcagatgtgggatgaggttaagagagtgaagaagcttctagaacacaggggactgcagaagctgcctggtcgatgctggatggaagtgaggaggaaaatgtactcgtttgtctcggttgatgagtttaaccctcttatggaacagattcatgctttcttggttaagttagccgaagatatgaaggagaaagggtacataccacagaccaaaggagttctgtatgagcttgaaacagaagaaaaagagaggatagtgttgggacacagtgagaaacttgcgttggcgtttgggctgataaatacatcgaaaggagaaccaatcagaatcacgaagaacttgcgtttgtgcgaggactgtcacttgtttacaaagttcatctcgaagtttatggagaaagagattctagtcagagatgtgaaccggtttcatcgattcaagaatggagtgtgttcttgtggagattactggtaa

SEQ ID NO: 86060 - protein, 1170 aa, Arabidopsis thaliana
  peptide (1)..(1170): Ceres Seq. ID no. 12685814
MEKVELPVHEHPLFIFDRICMDTCKGCSVFGYFYGGYVCNEVGCDTLFHKECVESVPEIKHPSHPQHPLKLNLKCGRFCCSLCISGLQVGYHCSICDFNVHLVCARRPPSSTSSSSSSSPLPTSVDNSKVHQHPLLLSKNVETFLLKEGRNCNMCNTNIKINEKQLCECRLCNILFHLDCVGLIPNVYQTSHPKHPLKFLQYGAPEYAHEKCLLCKKKFKKLSNNYDRVYHCDVCNVTICKDYCMAKPPPVSVVSPTTHEHQLHLVPRLVNFTCNACGTAGDRSPYFCLQCNFMIHRACIDLPRVININRHNHRISYTSLLGHGNWTCGVCRKKVDGFYGAYSCSKCPSYAVHARCATRKDVWYKVELEGTPEEEEIAPFEVVDENLIKHFIHGHNLRLNKDGNHESKFCEACASKINNDPFYGCEQCDFILHETCASLPRKIRHVSNNKPLILSTDTYLKDSPRQRRHCSACFQNFSGFRYETQSRNLFGSATLDVRCSSIYEPFLHESHPHPLYFSLEGDTKCSACDITYSARDMLCCDECEFRLDFRCATLPRKVMNQRYDDHPLYLSYGENKEDGQLWCEVCETKVDPKEWLYTFNFLPRSPLKPPSCSVALNNPSISSGAGAKISNNQLIQSLCKEGKLKQAIRVLSQESSPSQQTYELLILCCGHGEEVLGLYWKMNRIGVESDRFTYTYVLKACVASECTVNHLMKGKEIHAHLTRRGYSSHVYIMTTLVDMYARFGCVDYASYVFGGMPVRNVVSWSAMIACYAKNGKAFEALRTFREMMRETKDSSPNSVTMVSVLQACASLAALEQGKLIHGYILRRGLDSILPVISALVTMYGRCGKLEVGQRVFDRMHDRDVVSWNSLISSYGVHGYGKKAIQIFEEMLANGASPTPVTFVSVLGACSHEGLVEEGKRLFETMWRDHGIKPQIEHYACMVDLLGRANRLDEAAKMVQDMRTEPGPKVWGSLLGSCRIHGNVELAERASRRLFALEPKNAGNYVLLADIYAEAQMWDEVKRVKKLLEHRGLQKLPGRCWMEVRRKMYSFVSVDEFNPLMEQIHAFLVKLAEDMKEKGYIPQTKGVLYELETEEKERIVLGHSEKLALAFGLINTSKGEPIRITKNLRLCEDCHLFTKFISKFMEKEILVRDVNRFHRFKNGVCSCGDYW

SEQ ID NO: 86061 - protein, 1150 aa, Arabidopsis thaliana
  peptide (1)..(1150): Ceres Seq. ID no. 12685815
MDTCKGCSVFGYFYGGYVCNEVGCDTLFHKECVESVPEIKHPSHPQHPLKLNLKCGRFCCSLCISGLQVGYHCSICDFNVHLVCARRPPSSTSSSSSSSPLPTSVDNSKVHQHPLLLSKNVETFLLKEGRNCNMCNTNIKINEKQLCECRLCNILFHLDCVGLIPNVYQTSHPKHPLKFLQYGAPEYAHEKCLLCKKKFKKLSNNYDRVYHCDVCNVTICKDYCMAKPPPVSVVSPTTHEHQLHLVPRLVNFTCNACGTAGDRSPYFCLQCNFMIHRACIDLPRVININRHNHRISYTSLLGHGNWTCGVCRKKVDGFYGAYSCSKCPSYAVHARCATRKDVWYKVELEGTPEEEEIAPFEVVDENLIKHFIHGHNLRLNKDGNHESKFCEACASKINNDPFYGCEQCDFILHETCASLPRKIRHVSNNKPLILSTDTYLKDSPRQRRHCSACFQNFSGFRYETQSRNLFGSATLDVRCSSIYEPFLHESHPHPLYFSLEGDTKCSACDITYSARDMLCCDECEFRLDFRCATLPRKVMNQRYDDHPLYLSYGENKEDGQLWCEVCETKVDPKEWLYTFNFLPRSPLKPPSCSVALNNPSISSGAGAKISNNQLIQSLCKEGKLKQAIRVLSQESSPSQQTYELLILCCGHGEEVLGLYWKMNRIGVESDRFTYTYVLKACVASECTVNHLMKGKEIHAHLTRRGYSSHVYIMTTLVDMYARFGCVDYASYVFGGMPVRNVVSWSAMIACYAKNGKAFEALRTFREMMRETKDSSPNSVTMVSVLQACASLAALEQGKLIHGYILRRGLDSILPVISALVTMYGRCGKLEVGQRVFDRMHDRDVVSWNSLISSYGVHGYGKKAIQIFEEMLANGASPTPVTFVSVLGACSHEGLVEEGKRLFETMWRDHGIKPQIEHYACMVDLLGRANRLDEAAKMVQDMRTEPGPKVWGSLLGSCRIHGNVELAERASRRLFALEPKNAGNYVLLADIYAEAQMWDEVKRVKKLLEHRGLQKLPGRCWMEVRRKMYSFVSVDEFNPLMEQIHAFLVKLAEDMKEKGYIPQTKGVLYELETEEKERIVLGHSEKLALAFGLINTSKGEPIRITKNLRLCEDCHLFTKFISKFMEKEILVRDVNRFHRFKNGVCSCGDYW

SEQ ID NO: 86062 - protein, 1017 aa, Arabidopsis thaliana
  peptide (1)..(1017): Ceres Seq. ID no. 12685816
MCNTNIKINEKQLCECRLCNILFHLDCVGLIPNVYQTSHPKHPLKFLQYGAPEYAHEKCLLCKKKFKKLSNNYDRVYHCDVCNVTICKDYCMAKPPPVSVVSPTTHEHQLHLVPRLVNFTCNACGTAGDRSPYFCLQCNFMIHRACIDLPRVININRHNHRISYTSLLGHGNWTCGVCRKKVDGFYGAYSCSKCPSYAVHARCATRKDVWYKVELEGTPEEEEIAPFEVVDENLIKHFIHGHNLRLNKDGNHESKFCEACASKINNDPFYGCEQCDFILHETCASLPRKIRHVSNNKPLILSTDTYLKDSPRQRRHCSACFQNFSGFRYETQSRNLFGSATLDVRCSSIYEPFLHESHPHPLYFSLEGDTKCSACDITYSARDMLCCDECEFRLDFRCATLPRKVMNQRYDDHPLYLSYGENKEDGQLWCEVCETKVDPKEWLYTFNFLPRSPLKPPSCSVALNNPSISSGAGAKISNNQLIQSLCKEGKLKQAIRVLSQESSPSQQTYELLILCCGHGEEVLGLYWKMNRIGVESDRFTYTYVLKACVASECTVNHLMKGKEIHAHLTRRGYSSHVYIMTTLVDMYARFGCVDYASYVFGGMPVRNVVSWSAMIACYAKNGKAFEALRTFREMMRETKDSSPNSVTMVSVLQACASLAALEQGKLIHGYILRRGLDSILPVISALVTMYGRCGKLEVGQRVFDRMHDRDVVSWNSLISSYGVHGYGKKAIQIFEEMLANGASPTPVTFVSVLGACSHEGLVEEGKRLFETMWRDHGIKPQIEHYACMVDLLGRANRLDEAAKMVQDMRTEPGPKVWGSLLGSCRIHGNVELAERASRRLFALEPKNAGNYVLLADIYAEAQMWDEVKRVKKLLEHRGLQKLPGRCWMEVRRKMYSFVSVDEFNPLMEQIHAFLVKLAEDMKEKGYIPQTKGVLYELETEEKERIVLGHSEKLALAFGLINTSKGEPIRITKNLRLCEDCHLFTKFISKFMEKEILVRDVNRFHRFKNGVCSCGDYW

SEQ ID NO: 86063 - DNA, 3426 bp, Arabidopsis thaliana
  misc_feature (1)..(3426): Ceres Seq. ID no. 12685836
  misc_feature (1)..(3426): Ortholog of  Ceres SEQ ID NO 13593889 as cited in SEQ ID NO 53305
atggcacatgaacccagtagcccaagttcgaatcttgtttctaatccggccaatctttcagcttctgggttagattatagctctgatttgagtaataagcgtgtctctgatggaattatttctgggtttgggagtgagcaggtaagtattgatgctacgaatagaaacaatccaaatttaggcaataaaagaagtgatatggatgatgaagaattggaaaaggtgaagtttttatgtagctacaatggaaagataatccctagaccaagtgatggcatgttacgttacgttggtggtcaaacaaggatcgttagtgttaaaaagaatgtgagatttgatgaatttgagcaaaagatgattcaggtttatggtcaccctgttgttgttaagtatcagcttcctgatgaggatcttgatgctttggtttctgtttcatctagtgaagatattgataatatgatggaggagtttgagaagttggtagagagatcttctgatgggtcagggaagttgagagtttttttgtttgatgcttcttcgtctgaggtggatgattctttcggaatattggagtatggtgatggagttgatattgggcagagatatgtagaggctgtgaatggtgttgttgtgagtaaggaaagtgtagctagtggtagttctaatccgaattctgattttagtggcgtggatgttgttgatagcttgggcgttggtcagagtgattttgtcgcaactacttggacctcgagtaatttttcacctcagacttatcatagtaatgtatcaagacttgttcctcctgatccacgctcttctgcttatgttgtgccaatgactgtccacgccgatccgcctcattcttttcagcttgagactgtttcagagaaaccaatagttggtaagatgcagcagcaacaacaggggtatactacaccatctgaacatcatccaccggcctatgttgaatctcgccaagaagctttaagacaaccagatattgttcattcacctatccagcttttgccaagtagtacttctttgttctcccaacaaccttttcaagatagtcctttaagtgtctcatcccaccagttccttcctgctgctcacatgtcaatggctcccttgaattctcagattagttccacaccagttttgattaacccggtaatgcaaacccaagaaaatctgttggggaactatcatgctgctcaaaagttagtaccgcttcctacagagccaagaaacactgcatatcaaggtacgatttctcctggtataccatttgatggttatggcgggtctcaagttccaccatctaaccatgttgttctccccgatggaagtttctatcaacaagtaactatggctgaaagttttcaaagggtaaatgattgtcatatgtgccagacatcttttcctcatatgcattctgatccgattatgcgggagggaaatgatggttctacaatgtatgtgccatatgtgagctcagctttctatgcttctcgtccagatgatatcatgagaatccaacaaacggataagtttacgggtcaacaaagcttcctcaatcattcaaatcatcaagaaagagatactttacataacgccaatcttgccactgctcaggtcgagactactgaaccttttgtcaatgagatagtaagagatgttccgataaaagttcaagtaactaggcagcagcaacatcccgtagacccttcagtagcatatgcacaatgccgagaactaagtggattggtggataatgttaacatacatgctcctgaaatatatagcaattgtcagaatttcatctcaccagttgacaaaattgggaaagaagatattatgggtaccagttctcaacaaatggcaaggaagaatatgttcttacatgacacctctggtcagtctccagtaagtccaaacatagatcacactgattcagctaagaggctaacaagagtagttcttccaggccatgaatctcagcctaaggaatcatgtgtgccaacacagtctcccttattaggcaatcctggtttgtatctacaatcattggttggaggtcagcagttcgattcagcggaagcgcagtccagcaatcccgcttatgacgttgttgaatctacatttgatgctgcaaacttaccatcatccttatcatcaaatcctgatgctgctaatttaccatcatccttgtcatctagtgttggtggtgcagaccacaaagaatcatcaaaatcactttttagtaaccaggacccatggaatttgcaaactaactcaaacgaggatgtcaaacctgatctacttaattcttcgaaagttatccttgagaatgatctgttgattggtctttggttctctctgaaaggctccgaggaggagcacatcaaacaagaacttcagaatgttgctgaaggagtcgccgcttctgtgttacagtcaagcacaccttcatatcatgaacctccaattaaggtggatgagtatgcttttaattcgaaaggagaagtttcacgtaatgatgaaatgaaacagcagtctacacacttcaaggatatcaggaaccaacttctagaaagactgaatttcggatattctggttctgattcgctggatcagttgcagattataaaggacagcgaccttgaggaattgcgagaactaggatctggcacatttggcacagtttatcatgggaaatggcgaggcactgatgttgcaatcaaaaggatcaatgatcgatgttttgctggcaaaccatctgagcaagaacgaatgatcgatgacttttggaatgaggcacagaacctagctggcttgcaccatcctaacgtcgttgctttttatggggttgtgctggattcacctggaggttctgtggcaacagttacagagtatatggtcaatggttctttacgaaatgcgttgcagaagaatgttaggaattttgataggtgcaagcgtcaactgatcgctatggacattgcttttgggatggagtatttgcatggaaagaagatagtacactttgatcttaaaagtgacaacctgctcgtcaatctcagggatcctcatcgcccaatttgcaaggttggggatttgggtctctcaaaggtgaaatgtcagacattaatatcaggtggtgttcggggaacacttccatggatggcacccgagcttctaaatggaaccagtagccttgtttctgagaaggtcgatgtgttttcattcggaattgtcctctgggaacttttcaccggtgaagaaccttacgccgacttgcactatggagcgatcatagaaccatcagagaggccaagcttcactgagatcgtgaacgaactacggaccatggctacaaagcttccttccaaagaacaaggctcaacacagggaccacaatcttaa

SEQ ID NO: 86064 - protein, 1141 aa, Arabidopsis thaliana
  peptide (1)..(1141): Ceres Seq. ID no. 12685837
MAHEPSSPSSNLVSNPANLSASGLDYSSDLSNKRVSDGIISGFGSEQVSIDATNRNNPNLGNKRSDMDDEELEKVKFLCSYNGKIIPRPSDGMLRYVGGQTRIVSVKKNVRFDEFEQKMIQVYGHPVVVKYQLPDEDLDALVSVSSSEDIDNMMEEFEKLVERSSDGSGKLRVFLFDASSSEVDDSFGILEYGDGVDIGQRYVEAVNGVVVSKESVASGSSNPNSDFSGVDVVDSLGVGQSDFVATTWTSSNFSPQTYHSNVSRLVPPDPRSSAYVVPMTVHADPPHSFQLETVSEKPIVGKMQQQQQGYTTPSEHHPPAYVESRQEALRQPDIVHSPIQLLPSSTSLFSQQPFQDSPLSVSSHQFLPAAHMSMAPLNSQISSTPVLINPVMQTQENLLGNYHAAQKLVPLPTEPRNTAYQGTISPGIPFDGYGGSQVPPSNHVVLPDGSFYQQVTMAESFQRVNDCHMCQTSFPHMHSDPIMREGNDGSTMYVPYVSSAFYASRPDDIMRIQQTDKFTGQQSFLNHSNHQERDTLHNANLATAQVETTEPFVNEIVRDVPIKVQVTRQQQHPVDPSVAYAQCRELSGLVDNVNIHAPEIYSNCQNFISPVDKIGKEDIMGTSSQQMARKNMFLHDTSGQSPVSPNIDHTDSAKRLTRVVLPGHESQPKESCVPTQSPLLGNPGLYLQSLVGGQQFDSAEAQSSNPAYDVVESTFDAANLPSSLSSNPDAANLPSSLSSSVGGADHKESSKSLFSNQDPWNLQTNSNEDVKPDLLNSSKVILENDLLIGLWFSLKGSEEEHIKQELQNVAEGVAASVLQSSTPSYHEPPIKVDEYAFNSKGEVSRNDEMKQQSTHFKDIRNQLLERLNFGYSGSDSLDQLQIIKDSDLEELRELGSGTFGTVYHGKWRGTDVAIKRINDRCFAGKPSEQERMIDDFWNEAQNLAGLHHPNVVAFYGVVLDSPGGSVATVTEYMVNGSLRNALQKNVRNFDRCKRQLIAMDIAFGMEYLHGKKIVHFDLKSDNLLVNLRDPHRPICKVGDLGLSKVKCQTLISGGVRGTLPWMAPELLNGTSSLVSEKVDVFSFGIVLWELFTGEEPYADLHYGAIIEPSERPSFTEIVNELRTMATKLPSKEQGSTQGPQS

SEQ ID NO: 86065 - protein, 1075 aa, Arabidopsis thaliana
  peptide (1)..(1075): Ceres Seq. ID no. 12685838
MDDEELEKVKFLCSYNGKIIPRPSDGMLRYVGGQTRIVSVKKNVRFDEFEQKMIQVYGHPVVVKYQLPDEDLDALVSVSSSEDIDNMMEEFEKLVERSSDGSGKLRVFLFDASSSEVDDSFGILEYGDGVDIGQRYVEAVNGVVVSKESVASGSSNPNSDFSGVDVVDSLGVGQSDFVATTWTSSNFSPQTYHSNVSRLVPPDPRSSAYVVPMTVHADPPHSFQLETVSEKPIVGKMQQQQQGYTTPSEHHPPAYVESRQEALRQPDIVHSPIQLLPSSTSLFSQQPFQDSPLSVSSHQFLPAAHMSMAPLNSQISSTPVLINPVMQTQENLLGNYHAAQKLVPLPTEPRNTAYQGTISPGIPFDGYGGSQVPPSNHVVLPDGSFYQQVTMAESFQRVNDCHMCQTSFPHMHSDPIMREGNDGSTMYVPYVSSAFYASRPDDIMRIQQTDKFTGQQSFLNHSNHQERDTLHNANLATAQVETTEPFVNEIVRDVPIKVQVTRQQQHPVDPSVAYAQCRELSGLVDNVNIHAPEIYSNCQNFISPVDKIGKEDIMGTSSQQMARKNMFLHDTSGQSPVSPNIDHTDSAKRLTRVVLPGHESQPKESCVPTQSPLLGNPGLYLQSLVGGQQFDSAEAQSSNPAYDVVESTFDAANLPSSLSSNPDAANLPSSLSSSVGGADHKESSKSLFSNQDPWNLQTNSNEDVKPDLLNSSKVILENDLLIGLWFSLKGSEEEHIKQELQNVAEGVAASVLQSSTPSYHEPPIKVDEYAFNSKGEVSRNDEMKQQSTHFKDIRNQLLERLNFGYSGSDSLDQLQIIKDSDLEELRELGSGTFGTVYHGKWRGTDVAIKRINDRCFAGKPSEQERMIDDFWNEAQNLAGLHHPNVVAFYGVVLDSPGGSVATVTEYMVNGSLRNALQKNVRNFDRCKRQLIAMDIAFGMEYLHGKKIVHFDLKSDNLLVNLRDPHRPICKVGDLGLSKVKCQTLISGGVRGTLPWMAPELLNGTSSLVSEKVDVFSFGIVLWELFTGEEPYADLHYGAIIEPSERPSFTEIVNELRTMATKLPSKEQGSTQGPQS

SEQ ID NO: 86066 - protein, 1049 aa, Arabidopsis thaliana
  peptide (1)..(1049): Ceres Seq. ID no. 12685839
MLRYVGGQTRIVSVKKNVRFDEFEQKMIQVYGHPVVVKYQLPDEDLDALVSVSSSEDIDNMMEEFEKLVERSSDGSGKLRVFLFDASSSEVDDSFGILEYGDGVDIGQRYVEAVNGVVVSKESVASGSSNPNSDFSGVDVVDSLGVGQSDFVATTWTSSNFSPQTYHSNVSRLVPPDPRSSAYVVPMTVHADPPHSFQLETVSEKPIVGKMQQQQQGYTTPSEHHPPAYVESRQEALRQPDIVHSPIQLLPSSTSLFSQQPFQDSPLSVSSHQFLPAAHMSMAPLNSQISSTPVLINPVMQTQENLLGNYHAAQKLVPLPTEPRNTAYQGTISPGIPFDGYGGSQVPPSNHVVLPDGSFYQQVTMAESFQRVNDCHMCQTSFPHMHSDPIMREGNDGSTMYVPYVSSAFYASRPDDIMRIQQTDKFTGQQSFLNHSNHQERDTLHNANLATAQVETTEPFVNEIVRDVPIKVQVTRQQQHPVDPSVAYAQCRELSGLVDNVNIHAPEIYSNCQNFISPVDKIGKEDIMGTSSQQMARKNMFLHDTSGQSPVSPNIDHTDSAKRLTRVVLPGHESQPKESCVPTQSPLLGNPGLYLQSLVGGQQFDSAEAQSSNPAYDVVESTFDAANLPSSLSSNPDAANLPSSLSSSVGGADHKESSKSLFSNQDPWNLQTNSNEDVKPDLLNSSKVILENDLLIGLWFSLKGSEEEHIKQELQNVAEGVAASVLQSSTPSYHEPPIKVDEYAFNSKGEVSRNDEMKQQSTHFKDIRNQLLERLNFGYSGSDSLDQLQIIKDSDLEELRELGSGTFGTVYHGKWRGTDVAIKRINDRCFAGKPSEQERMIDDFWNEAQNLAGLHHPNVVAFYGVVLDSPGGSVATVTEYMVNGSLRNALQKNVRNFDRCKRQLIAMDIAFGMEYLHGKKIVHFDLKSDNLLVNLRDPHRPICKVGDLGLSKVKCQTLISGGVRGTLPWMAPELLNGTSSLVSEKVDVFSFGIVLWELFTGEEPYADLHYGAIIEPSERPSFTEIVNELRTMATKLPSKEQGSTQGPQS

SEQ ID NO: 86067 - DNA, 996 bp, Arabidopsis thaliana
  misc_feature (1)..(996): Ceres Seq. ID no. 12685862
  misc_feature (1)..(996): Ortholog of  Ceres SEQ ID NO 15175492 as cited in SEQ ID NO 56277
atgagcaactcggagtcttatccaccagagtttcgacctctaatgagcgaaaaatccactgaaacgggtctagaccggagcaaagatatcgatatcccggttatcgatatggagcatttggacatggagaaactgagagaagcatgcaaagactgggggatcttccatttggagaatactgggatacccttaacgtttatgtcacaggtgaaagagataacggagtcagtgttgagtctgccgtttgaagagaaacggacgttgttcggcgttaactctccgttatcgtattactggggaacacatacggtaagtccatcgggaaaagccgtaacgagagccccacaagaatctagtggtcacttgttcgaaggcatcaatattcctcttgcatctctctctcggcttcttgcactttcttgtactgatcccaagcttgagtctttccgagtggtgatggaggaatatgggaagcacgtaactaggattattgtgaccctatttgaagctataatagaaaccttgtcccttgaattatccggtgaccaaaaaatgggctacttatcagagtcaacaggtgtgatacgtgttcaacggtatcctcagtgtaccgaatcccccggactcgaagctcatacggacagttcggtgatatcgatcataaaccaagacgatgttggtgggctagagttcatgaaagatggggaatggttcaatgtcaaacctcttgccagttcttttgtcgtcggtcttggggatatgatgcaggtgataagtgatgaggaatacaagagtgtgttgcataaagtaggaaagaggatgaggaagaaagagagatactcgatagttaactttgtgttcccggacaaagactgtatgtttaactctactcgctataagccattcaaattctcggagtttgaagctcaagttaagcttgatgttgagacccatggtagcaaagtcggcctttctaggttcctgagcaacccctag

SEQ ID NO: 86068 - protein, 331 aa, Arabidopsis thaliana
  peptide (1)..(331): Ceres Seq. ID no. 12685863
MSNSESYPPEFRPLMSEKSTETGLDRSKDIDIPVIDMEHLDMEKLREACKDWGIFHLENTGIPLTFMSQVKEITESVLSLPFEEKRTLFGVNSPLSYYWGTHTVSPSGKAVTRAPQESSGHLFEGINIPLASLSRLLALSCTDPKLESFRVVMEEYGKHVTRIIVTLFEAIIETLSLELSGDQKMGYLSESTGVIRVQRYPQCTESPGLEAHTDSSVISIINQDDVGGLEFMKDGEWFNVKPLASSFVVGLGDMMQVISDEEYKSVLHKVGKRMRKKERYSIVNFVFPDKDCMFNSTRYKPFKFSEFEAQVKLDVETHGSKVGLSRFLSNP

SEQ ID NO: 86069 - protein, 317 aa, Arabidopsis thaliana
  peptide (1)..(317): Ceres Seq. ID no. 12685864
MSEKSTETGLDRSKDIDIPVIDMEHLDMEKLREACKDWGIFHLENTGIPLTFMSQVKEITESVLSLPFEEKRTLFGVNSPLSYYWGTHTVSPSGKAVTRAPQESSGHLFEGINIPLASLSRLLALSCTDPKLESFRVVMEEYGKHVTRIIVTLFEAIIETLSLELSGDQKMGYLSESTGVIRVQRYPQCTESPGLEAHTDSSVISIINQDDVGGLEFMKDGEWFNVKPLASSFVVGLGDMMQVISDEEYKSVLHKVGKRMRKKERYSIVNFVFPDKDCMFNSTRYKPFKFSEFEAQVKLDVETHGSKVGLSRFLSNP

SEQ ID NO: 86070 - protein, 295 aa, Arabidopsis thaliana
  peptide (1)..(295): Ceres Seq. ID no. 12685865
MEHLDMEKLREACKDWGIFHLENTGIPLTFMSQVKEITESVLSLPFEEKRTLFGVNSPLSYYWGTHTVSPSGKAVTRAPQESSGHLFEGINIPLASLSRLLALSCTDPKLESFRVVMEEYGKHVTRIIVTLFEAIIETLSLELSGDQKMGYLSESTGVIRVQRYPQCTESPGLEAHTDSSVISIINQDDVGGLEFMKDGEWFNVKPLASSFVVGLGDMMQVISDEEYKSVLHKVGKRMRKKERYSIVNFVFPDKDCMFNSTRYKPFKFSEFEAQVKLDVETHGSKVGLSRFLSNP

SEQ ID NO: 86071 - DNA, 973 bp, Arabidopsis thaliana
  misc_feature (1)..(973): Ceres Seq. ID no. 12685888
  misc_feature (1)..(973): Ortholog of  Ceres SEQ ID NO 13593910 as cited in SEQ ID NO 53081
gtatctgtattctcttatcagacaaaaagttccaagatttttctaatagcgatggattgtgttgaatcttatttatccggagataattctgatgaatctccggtgatgcatacttggttttctccgtctccgtctccgtctgactcttcctcttctccttcatcttctgcttcttcttccattgggaggaatagcgacgacggtgagaaatcgtcggaggacggtggagatgacgccggagagaatgaagttgagtctccgtataaaggtcctcttgaaatgatggaatctctcgaacaagtcttacctgttaggaaagggatatcgaagtattacagtggaaagtcaaagtcttttactaatttaacggcggaggcagcttcggcgttgacttcttcttcgtcgatgaaagatttagcgaagccggagaatccttacagtaggaggaggaggaatctcctctgccatcagatttgggaaaataacaagacgactccacgtggtgggatctcgaagaaacacgttatgagttctagcagaagcgctttgacgctagctatggctgttgcggctggtgtgatgaccggagaaggatcttcttccggaggtgactcgtcgccgggatcaagtccgacgacttctggatctcctccgaggcagctacatcatcatcaacatcagatgaagaagcttcctccgttgtatcctaggagtcaagggtcttttggtaatttgacttcgtctcagtcgtcgttgggtttttgtgcctggagatcgttttcggtggctgattttccgaggtgttttccggcgacggcgagtgggattgggtttaatgactcgtaggaaatgatgataacaattgttttgttaaatttttatattttgaagttagtaacaaccacatccggagaatgtatgtgtatagaagagtttcaaaacttttgaatggatcatccacatcttttttttc

SEQ ID NO: 86072 - protein, 281 aa, Arabidopsis thaliana
  peptide (1)..(281): Ceres Seq. ID no. 12685889
VSVFSYQTKSSKIFLIAMDCVESYLSGDNSDESPVMHTWFSPSPSPSDSSSSPSSSASSSIGRNSDDGEKSSEDGGDDAGENEVESPYKGPLEMMESLEQVLPVRKGISKYYSGKSKSFTNLTAEAASALTSSSSMKDLAKPENPYSRRRRNLLCHQIWENNKTTPRGGISKKHVMSSSRSALTLAMAVAAGVMTGEGSSSGGDSSPGSSPTTSGSPPRQLHHHQHQMKKLPPLYPRSQGSFGNLTSSQSSLGFCAWRSFSVADFPRCFPATASGIGFNDS

SEQ ID NO: 86073 - protein, 264 aa, Arabidopsis thaliana; identical to SEQ ID NO: 28373
  peptide (1)..(264): Ceres Seq. ID no. 12685890

SEQ ID NO: 86074 - protein, 246 aa, Arabidopsis thaliana; identical to SEQ ID NO: 28374
  peptide (1)..(246): Ceres Seq. ID no. 12685891

SEQ ID NO: 86075 - DNA, 1247 bp, Arabidopsis thaliana
  misc_feature (1)..(1247): Ceres Seq. ID no. 12685895
  misc_feature (1)..(1247): Ortholog of  Ceres SEQ ID NO 12611829 as cited in SEQ ID NO 56771
  misc_feature (1)..(1247): Ortholog of  Ceres SEQ ID NO 15171735 as cited in SEQ ID NO 57234
  misc_feature (1)..(1247): Ortholog of  Ceres SEQ ID NO 13597018 as cited in SEQ ID NO 64288
  misc_feature (1)..(1247): Ortholog of  Ceres SEQ ID NO 14305124 as cited in SEQ ID NO 0
gtaattaacttctaacttgaggggcgtttcattatctcctcctcgtcgtcctccctccatttttcttcacgtctggttttctctctcttttcctctatctctctcctctctttgtctctctcgcttctgtgatttgggctttttcagatgggaaatgcgaacggcaaagacgaagacgccgccgccggtagcggtggtgcagatgttacctcgtcctcggcgagatctaatggcggcgatccttctgcacgcagtcgtcaccgtcgtccttcttcagactctatgagcagttctcctcccggaagtcctgctcgatctccatctcctttcttattcgctcctcaggttcccgtggctccattgcagagagcaaacgcccctcctcctaataacatccaatggaaccaatcacagagagtttttgataatcccccagagcaaggaatccctaccatcattacatggaaccaaggaggtaatgatgtggcggtggaaggatcatgggacaattggagatcaaggaagaagctgcagaaatcagggaaagaccactcgattctctttgtccttccatctggcatataccactacaaggtgattgtggacggtgaatccaaatacatcccagatttaccctttgtagcagacgaagttggcaatgtctgtaacattctcgatgttcataactttgtgccagaaaacccagaaagcatagtggagtttgaggcgccaccatcacctgatcatagctacggtcaaaccctaccagccgcagaagattacgcgaaagagccactggcggtgccacctcagcttcatctaacacttcttggcactactgaagagacagccatagccacaaagcctcaacatgtggtgcttaaccatgtgttcatagagcaaggatggactcctcaatccatagtagctttgggtttaacccacaggttcgagtctaagtacataactgttgtcctctacaaaccgctcacacggtaaccctaaaaattcagtgccacattgttctctctctttctttctttttcatctctcaattatgtgaaaacatgttctttgttcatagtgactagtgagtgcccaacatttgagtttattaacctctttcttacctggtttgtggtgcttgtgtacaaagcttctctcattgtaacgattgttgttttattttctgcaaaaactgtaaaatacattcgctaataatggctataacaagcttatctgctagc

SEQ ID NO: 86076 - protein, 283 aa, Arabidopsis thaliana
  peptide (1)..(283): Ceres Seq. ID no. 12685896
MGNANGKDEDAAAGSGGADVTSSSARSNGGDPSARSRHRRPSSDSMSSSPPGSPARSPSPFLFAPQVPVAPLQRANAPPPNNIQWNQSQRVFDNPPEQGIPTIITWNQGGNDVAVEGSWDNWRSRKKLQKSGKDHSILFVLPSGIYHYKVIVDGESKYIPDLPFVADEVGNVCNILDVHNFVPENPESIVEFEAPPSPDHSYGQTLPAAEDYAKEPLAVPPQLHLTLLGTTEETAIATKPQHVVLNHVFIEQGWTPQSIVALGLTHRFESKYITVVLYKPLTR

SEQ ID NO: 86077 - protein, 238 aa, Arabidopsis thaliana
  peptide (1)..(238): Ceres Seq. ID no. 12685897
MSSSPPGSPARSPSPFLFAPQVPVAPLQRANAPPPNNIQWNQSQRVFDNPPEQGIPTIITWNQGGNDVAVEGSWDNWRSRKKLQKSGKDHSILFVLPSGIYHYKVIVDGESKYIPDLPFVADEVGNVCNILDVHNFVPENPESIVEFEAPPSPDHSYGQTLPAAEDYAKEPLAVPPQLHLTLLGTTEETAIATKPQHVVLNHVFIEQGWTPQSIVALGLTHRFESKYITVVLYKPLTR

SEQ ID NO: 86078 - DNA, 1467 bp, Arabidopsis thaliana
  misc_feature (1)..(1467): Ceres Seq. ID no. 12685956
  misc_feature (1)..(1467): Ortholog of  Ceres SEQ ID NO 13660287 as cited in SEQ ID NO 67316
  misc_feature (1)..(1467): Ortholog of  Ceres SEQ ID NO 14307892 as cited in SEQ ID NO 67490
atgcaagacgcggagagaaccaccaatgatccggtagacagaattgagaaagtgacatggagagatctgcaagacggatctttcaccgcagaactcaagaggcttatctgctttgcggctcctatggctgccgtggttatcattcagttcatgatacagataatctcaatggtgatggtgggtcacctcggtagactctccctcgctagcgcttccttcgcagtctccttctgtaacgtcactggcttcagcttcattataggattgtcatgtgccttagatactttgagtggtcaagcttatggagctaagctatatcggaaactaggtgttcaggcttacacagctatgttctgtcttactttagtgtgtctccctctctctctcctatggttcaacatgggaaagcttattgtgatccttggccaagaccctgctattgctcacgaagctggtagatatgccgcttggctcatcccaggactgttcgcttacgccgttcttcagccgctcattcgctacttcaaaaaccagagcttgatcacacctctcctcgtcacctcttctgttgtgttttgtatccacgttcctctctgctggcttttggtttataagtcagggcttggtcatattggaggagccttggctctcagcttgtcatactggctctatgccattttccttggatctttcatgtactactcctctgcctgttctgagacacgcgcgccgcttaccatggagatattcgagggcgttagagagtttatcaaatatgctcttccttctgcggctatgctttgcctggagtggtggtcatatgaactcataatattactttctggtctgttacccaacccacagctggagacttctgtgctctctatctgtttcgaaacactttcaataacttattcaataccactagcgatcgcggctgcagcaagcacaagaatctcaaatgagttaggagctggaaactctcgagcagcacatattgtggtctatgcggcaatgtctcttgcagtaatggatgcattgatggtgagtatgtctctattagccggcaggcatgttttcggccatgttttcagcagtgacaagaaaaccatcgaatatgttgcaaagatggctccgttggtctctatttctatcatactggacagtttacaaggggttctctcaggtgttgcaagcggatgcgggtggcagcatataggggcttacataaacttcggagctttctatctctgggggatacccattgcagcatctttagccttctgggttcatctgaaaggtgttggcctttggattggaatactagccggtgcagttctgcagactcttctgctggctcttgtcacaggctgcacaaactggaaaacccagctcgcttatacctgtaacacagtagttgcgagtcaggaaatagatgtgggagctgcttctgagtcttggagctag

SEQ ID NO: 86079 - protein, 488 aa, Arabidopsis thaliana
  peptide (1)..(488): Ceres Seq. ID no. 12685957
MQDAERTTNDPVDRIEKVTWRDLQDGSFTAELKRLICFAAPMAAVVIIQFMIQIISMVMVGHLGRLSLASASFAVSFCNVTGFSFIIGLSCALDTLSGQAYGAKLYRKLGVQAYTAMFCLTLVCLPLSLLWFNMGKLIVILGQDPAIAHEAGRYAAWLIPGLFAYAVLQPLIRYFKNQSLITPLLVTSSVVFCIHVPLCWLLVYKSGLGHIGGALALSLSYWLYAIFLGSFMYYSSACSETRAPLTMEIFEGVREFIKYALPSAAMLCLEWWSYELIILLSGLLPNPQLETSVLSICFETLSITYSIPLAIAAAASTRISNELGAGNSRAAHIVVYAAMSLAVMDALMVSMSLLAGRHVFGHVFSSDKKTIEYVAKMAPLVSISIILDSLQGVLSGVASGCGWQHIGAYINFGAFYLWGIPIAASLAFWVHLKGVGLWIGILAGAVLQTLLLALVTGCTNWKTQLAYTCNTVVASQEIDVGAASESWS

SEQ ID NO: 86080 - protein, 447 aa, Arabidopsis thaliana
  peptide (1)..(447): Ceres Seq. ID no. 12685958
MAAVVIIQFMIQIISMVMVGHLGRLSLASASFAVSFCNVTGFSFIIGLSCALDTLSGQAYGAKLYRKLGVQAYTAMFCLTLVCLPLSLLWFNMGKLIVILGQDPAIAHEAGRYAAWLIPGLFAYAVLQPLIRYFKNQSLITPLLVTSSVVFCIHVPLCWLLVYKSGLGHIGGALALSLSYWLYAIFLGSFMYYSSACSETRAPLTMEIFEGVREFIKYALPSAAMLCLEWWSYELIILLSGLLPNPQLETSVLSICFETLSITYSIPLAIAAAASTRISNELGAGNSRAAHIVVYAAMSLAVMDALMVSMSLLAGRHVFGHVFSSDKKTIEYVAKMAPLVSISIILDSLQGVLSGVASGCGWQHIGAYINFGAFYLWGIPIAASLAFWVHLKGVGLWIGILAGAVLQTLLLALVTGCTNWKTQLAYTCNTVVASQEIDVGAASESWS

SEQ ID NO: 86081 - protein, 438 aa, Arabidopsis thaliana
  peptide (1)..(438): Ceres Seq. ID no. 12685959
MIQIISMVMVGHLGRLSLASASFAVSFCNVTGFSFIIGLSCALDTLSGQAYGAKLYRKLGVQAYTAMFCLTLVCLPLSLLWFNMGKLIVILGQDPAIAHEAGRYAAWLIPGLFAYAVLQPLIRYFKNQSLITPLLVTSSVVFCIHVPLCWLLVYKSGLGHIGGALALSLSYWLYAIFLGSFMYYSSACSETRAPLTMEIFEGVREFIKYALPSAAMLCLEWWSYELIILLSGLLPNPQLETSVLSICFETLSITYSIPLAIAAAASTRISNELGAGNSRAAHIVVYAAMSLAVMDALMVSMSLLAGRHVFGHVFSSDKKTIEYVAKMAPLVSISIILDSLQGVLSGVASGCGWQHIGAYINFGAFYLWGIPIAASLAFWVHLKGVGLWIGILAGAVLQTLLLALVTGCTNWKTQLAYTCNTVVASQEIDVGAASESWS

SEQ ID NO: 86082 - DNA, 1785 bp, Arabidopsis thaliana
  misc_feature (1)..(1785): Ceres Seq. ID no. 12686008
  misc_feature (1)..(1785): Ortholog of  Ceres SEQ ID NO 14313943 as cited in SEQ ID NO 54725
  misc_feature (1)..(1785): Ortholog of  Ceres SEQ ID NO 12465428 as cited in SEQ ID NO 68898
atgtttgctctttccaaggttttgcggagaagtcagagtctccgcctaggagcttgcaatgctgtctactctaagctagatataccattgggagaaagaaacattgctattgaatcaaacgctttgattcatgataaacacgaagctttgcctagattttatgagctctcttggtcttcctctaccggaagacgttcactttcctcggacgctggagctaaaactaccggagatgacgatgacctcgaagacaagaatgtagaccttgcaactccagacgagactagtagtgatagtgaagatggtgaggagttttccggtgatgaaggggatattgaaggagcagagctggaactacatgtcccggaaagcaagagaccatcggagatgtttaaggccattgtttctgtctcaggtctgtctgtagggagtgctcttgataagtgggttgaacaaggaaaggataccaaccgtaaagagtttgaaagtgcgatgctacaactccgtaaacgtcggatgtttgggagagcattgcagatgacagaatggttagacgaaaataagcagtttgaaatggaggagagagattatgcttgtcggcttgatctgatttccaaggtacgtggctggtacaagggagaagcttatatcaaaacaatcccggaatctttcagaggggaattggtctaccgaaccctcctggcgaatcatgtggcaactagcaatgtgagaacagctgaagcagttttcaacaaaatgaaggacttgggattccctctgtcaacattcacctgtaatcagatgcttattctttacaaaagggtcgacaagaagaaaatagccgatgtgttattgctgttggagaaggaaaatctgaagccgaatcttaacacatacaaaatcctgattgataccaaaggatcatcaaatgacataactgggatggaacaaattgtggagacaatgaaaagtgaaggtgttgagcttgaccttcgtgcacgagctctcattgcaagacactatgcatcagctgggcttaaagagaaggctgagaaagtgctgaaagagatggaaggtgaaagcttggaggaaaatcggcatatgtgcaaggatttgctttccgtctatggctatctccagagggaggatgaagtgcgcagagtttggaagatctgtgaagaaaacccccgttataacgaggtccttgctgcaatcttggcttttggaaagatcgataaagtcaaagatgcagaggcggtttttgagaaggtgttgaagatgtcccatagagtttcttctaatgtttactccgttctcttgagggtttacgtggatcacaagatggtctcagagggtaaggatcttgttaagcagatgtcagacagcgggtgcaatattggggccttaacatgggatgcagtgatcaagctctatgtggaagccggggaagtagaaaaggctgagtcttcactgagcaaggcaatacagtcgaaacagattaaaccgttgatgagctccttcatgtacttaatgcacgagtatgtgagaaggggtgatgttcataacacagagaaaatcttccagaggatgaagcaagctggctatcaatctcgcttctgggcgtaccaaacccttatccaagcttatgtcaatgccaaagctccagcttatggaatgaaggaaagaatgaaagctgataacatcttcccaaataaaagattagctgctcaactcgctaaagccgatcccttcaagaagacccctctctcggatctccttgattga

SEQ ID NO: 86083 - protein, 594 aa, Arabidopsis thaliana
  peptide (1)..(594): Ceres Seq. ID no. 12686009
MFALSKVLRRSQSLRLGACNAVYSKLDIPLGERNIAIESNALIHDKHEALPRFYELSWSSSTGRRSLSSDAGAKTTGDDDDLEDKNVDLATPDETSSDSEDGEEFSGDEGDIEGAELELHVPESKRPSEMFKAIVSVSGLSVGSALDKWVEQGKDTNRKEFESAMLQLRKRRMFGRALQMTEWLDENKQFEMEERDYACRLDLISKVRGWYKGEAYIKTIPESFRGELVYRTLLANHVATSNVRTAEAVFNKMKDLGFPLSTFTCNQMLILYKRVDKKKIADVLLLLEKENLKPNLNTYKILIDTKGSSNDITGMEQIVETMKSEGVELDLRARALIARHYASAGLKEKAEKVLKEMEGESLEENRHMCKDLLSVYGYLQREDEVRRVWKICEENPRYNEVLAAILAFGKIDKVKDAEAVFEKVLKMSHRVSSNVYSVLLRVYVDHKMVSEGKDLVKQMSDSGCNIGALTWDAVIKLYVEAGEVEKAESSLSKAIQSKQIKPLMSSFMYLMHEYVRRGDVHNTEKIFQRMKQAGYQSRFWAYQTLIQAYVNAKAPAYGMKERMKADNIFPNKRLAAQLAKADPFKKTPLSDLLD

SEQ ID NO: 86084 - protein, 465 aa, Arabidopsis thaliana; identical to SEQ ID NO: 69543
  peptide (1)..(465): Ceres Seq. ID no. 12686010

SEQ ID NO: 86085 - protein, 430 aa, Arabidopsis thaliana; identical to SEQ ID NO: 69544
  peptide (1)..(430): Ceres Seq. ID no. 12686011

SEQ ID NO: 86086 - DNA, 788 bp, Arabidopsis thaliana
  misc_feature (1)..(788): Ceres Seq. ID no. 12686065
  misc_feature (1)..(788): Ortholog of  Ceres SEQ ID NO 13662949 as cited in SEQ ID NO 64276
atggatgtgcctagctcttgggatgctttacggaaacaggctagaaagattgaagctcagcttgacgagcagatgcattcatatcgtagacttgtttccacaaaggctttatcaaaatcagatggtaatgagagtgatcttgaagctgggattgacttacttcttaggcaactgcaacaagttaatgctcagatgcaagcatgggtatcttctggtgggtcagaaatggtctcccatactttaactcgacatcaagagatccttcaagatctgacacaggagttttatcgacaccgctccagtcttagagcaaaacaagagcatgcttcacttcttgaggactttagagaatttgatcggactagattagatttagaagatggatatgggtctgaacaagccctgatcaaggaacatatgggaatcaaccgcaatacagctcagatggacggtgtcatttcacaagctcaggcaacactcggtacgcttgtgtttcaacgttcaacttttggaggcatcaactcaaagcttagcaatgtcgccagccgtctacctacggtgaacactattctggcagcgataaagaggaaaaagtcgatggatacaatcattctttcactcgttgcggctgtatgcacatttctcatattcatttactggataaccaagtagaatttgcccatttctttcgtttcatctttatgttgggccacgtctggttttcccatgatgtcaatttgttctgcaattatcggtgttctagtaaagaatctaaagatcaaaaacat

SEQ ID NO: 86087 - protein, 223 aa, Arabidopsis thaliana
  peptide (1)..(223): Ceres Seq. ID no. 12686066
MDVPSSWDALRKQARKIEAQLDEQMHSYRRLVSTKALSKSDGNESDLEAGIDLLLRQLQQVNAQMQAWVSSGGSEMVSHTLTRHQEILQDLTQEFYRHRSSLRAKQEHASLLEDFREFDRTRLDLEDGYGSEQALIKEHMGINRNTAQMDGVISQAQATLGTLVFQRSTFGGINSKLSNVASRLPTVNTILAAIKRKKSMDTIILSLVAAVCTFLIFIYWITK

SEQ ID NO: 86088 - protein, 199 aa, Arabidopsis thaliana
  peptide (1)..(199): Ceres Seq. ID no. 12686067
MHSYRRLVSTKALSKSDGNESDLEAGIDLLLRQLQQVNAQMQAWVSSGGSEMVSHTLTRHQEILQDLTQEFYRHRSSLRAKQEHASLLEDFREFDRTRLDLEDGYGSEQALIKEHMGINRNTAQMDGVISQAQATLGTLVFQRSTFGGINSKLSNVASRLPTVNTILAAIKRKKSMDTIILSLVAAVCTFLIFIYWITK

SEQ ID NO: 86089 - protein, 159 aa, Arabidopsis thaliana
  peptide (1)..(159): Ceres Seq. ID no. 12686068
MQAWVSSGGSEMVSHTLTRHQEILQDLTQEFYRHRSSLRAKQEHASLLEDFREFDRTRLDLEDGYGSEQALIKEHMGINRNTAQMDGVISQAQATLGTLVFQRSTFGGINSKLSNVASRLPTVNTILAAIKRKKSMDTIILSLVAAVCTFLIFIYWITK

SEQ ID NO: 86090 - DNA, 4128 bp, Arabidopsis thaliana
  misc_feature (1)..(4128): Ceres Seq. ID no. 12686104
  misc_feature (1)..(4128): Ortholog of  Ceres SEQ ID NO 14304565 as cited in SEQ ID NO 53297
  misc_feature (1)..(4128): Ortholog of  Ceres SEQ ID NO 15172170 as cited in SEQ ID NO 58957
  misc_feature (1)..(4128): Ortholog of  Ceres SEQ ID NO 13654989 as cited in SEQ ID NO 63117
  misc_feature (1)..(4128): Ortholog of  Ceres SEQ ID NO 13584744 as cited in SEQ ID NO 69137
atgcagcccttgcaaaattttggatcagcaacacctccacctccaattagcaattcttcaacgtcttgtaacaaaacctgtggaggaatctcgatcccgttcccattcggaattggcgggaaagattgttatctcaacggttggtacgaggttatctgcaacacaaccacttccgattctaacacaactgttcctttactctctatgatcaatcgggaagtggtgaatatctctctcccagacagtaacgaaccatacggacttgttcaaatcaaaggtcctgtgacatcgttgggttgttctagtaatactagtgaaggaccccaaaactcgctcccggttttgaatgtcacaggtaagggcagcccatatttcctgaccgacgagaaccgtcttgtggcggttggttgtggtataaaggcattgatgacagatacagaatcagagatcttgggttgtgaatcgagctgcgaacacagaaagagtggtgaagaagtaacaaatttgatctgtactggttacagatgctgccaggcgaggctaccggtggggcgtcctcaggctataaccgtaaatatagagaactctagtggaggagaagaaacgtgcaaagttgcgttcttgacggacaagaggtattcgccgtctaatgttacagagccagaacagtttcataacaatggatatgtggtgctagagttaggatggtactttgccacttcgaactctcgctttaagagcctcttgggttgtacaaatatgagccgaaaaggttctgggttctcggatgataattgcagttgcgagtatgattacttctccgggatgagttataggaattgttattgcgactatggctacacagggaacccataccttcgaggtggctgcgtaggcattcttataggtttgtcaggattagtattttttgttgggctattctggctatttaaactcataaagaagcgaaggaacatcaaccgcagcaagaagtttttcaaacggaacggaggcttgctgttgaaacaacaattaactacaaaggacggaaatgtagaaatgtctaagattttcagttcaaaggagttaagaaaagccactgataacttcagcatagatagagtgcttgggcaaggcggtcaaggcactgtgtacaaaggaatgttggtagatgggagcatcgttgcggttaaaagatccaaagttgtggatgaagacaaaatggaagagtttatcaatgagattgttcttctgtcacaaatcaatcaccgcaacattgtgaaactcttgggatgttgcttggagacagaagttccaatcttggtgtacgaatatattcccaatggagatctgttcaagcggcttcatgatgaatctgatgattacaccatgacttgggaagtgcggcttcgcatagccatagagatagcaggagctcttacatacatgcactcagctgcaagttttccaatattccatagagatattaagactaccaatatcctactggacgagaaataccgagccaaagtgtctgactttggaacttcaagatcagtaaccttagatcaaactcacttgacaacattagttgcaggaacttttggttacatggatccagagtacttcttgtcaagccaatacactcacaagagcgatgtttatagtttcggggtcgtcttggtggagctcataaccggagaaaaaccattgtcccgtgtccggtctgaagaaggtagaggcttggcaactcatttcctcgaggccatgaaagagaacagagtgattgacataattgatattcggatcaaagacgaaagcaaactggagcaagtaatggcggtagcaaaactcgccagaaaatgtcttaaccggaaagggaagaaccggccaaacatgaaagaggtttcaaatgagctagagaggatccgttcatcacccgaagatttagatgtccattgctatctaaacccgtggtacgaggttgtctgtaacagcacaaactctgttccgttcctctcaaggatcaacagagaattggtgaacatctctctcaatggagttgtccacatcaaagctcccgtaacttcctccggctgttctacaggaacatctcagccacttacaccgccgcctttaaacgttgctggccaaggcagcccctatttcctcacggacaagaacctactcgtggcggttggttgcaaattcaaggctgttatggcgggtattacatcgcagatcaccagttgtgagtcgagttgtaacgagagaaacagtagcagccaagaaggaagaaacaaaatctgcaatggttataaatgttgccagacgaggataccagaagggcagccgcaagtaatcagtgtggatatagagatccctcaaggtaacaacacaacaggagaaggaggatgcagagttgcgtttttgacgagcgacaagtattcaagtttaaatgttacagagccagaaaagtttcatggtcatggatacgcggcggtcgagcttggatggttctttgatacttccgattctcgtgatacacaacccataagttgtaaaaatgcgtcagatacaacaccgtacacttccgatacgaggtgtagttgctcatacggctacttttctggattcagctatagggactgctactgtaactccccaggttataaagggaatccgttccttccaggtggttgtgtagacgtggatgaatgtaaactagatataggacgcaaccagtgtaaagatcaaagctgtgtgaatctgcccggttggtttgactgccagcccaagaaaccagagcagctcaagcgggtgattcaaggtaaaattgaactggattttattactatcttgagcgtcttgcaaaacgttctgttatttactgtttggttttttggtggtgcaggtgttcttataggttcagcactgttgcttttcgccttcggaatcttcgggttgtacaagttcgtacagaagcggaggaaactaatccgaatgaggaagttcttcagacgtaatggaggtatgttgttaaaacaacagttagctagaaaagaaggcaatgtagagatgtcaagaatattcagctcacatgagttggagaaagctactgataacttcaacaagaatagggttcttgggcaaggaggtcaaggtacagtgtataagggaatgctcgttgatggtagaatcgtcgcagtaaaaaggtcgaaagctgtggatgaagatagggtagaagagttcatcaatgaagttgttgttcttgcgcagatcaatcatagaaatattgttaaacttttggggtgttgtcttgaaacggaagttccagtcttagtttatgagtttgttccaaatggagacttatgcaagcgtcttcatgatgaatctgatgattacacaatgacatgggaggtgcgtcttcacattgctatagagattgcaggagcactttcttatttgcattctgctgcatctttccccatatatcatagagatatcaagactactaatatactcttagatgagagaaaccgagctaaggtgtcggatttcggaacttcaagatcagtaactatagatcaaactcacttgacaactcaagttgcaggcacttttggatatgtggatccagagtactttcaatcaagcaagtttacggaaaaaagtgatgtttatagttttggagttgtccttgtggagctcttaaccggagaaaaaccttcctcccgtgtccggtctgaagaaaacaggggccttgcagctcactttgtcgaagccgtgaaagagaacagagtgcttgacatagttgatgatcggatcaaagatgaatgcaacatggaccaagtaatgtcagtggcaaatctagctagaaggtgtttaaaccgaaaagggaagaagaggccaaacatgagagaggtttcaattgagctggagatgattcgttcatcacattatgattcaggaattcatatagaggacgacgatgaggaagatgatcaagccatggaactcaactttaacgacacttgggaggttggtgcgactgctccagcctccatgtttaacaatgcatcccccacgtctgatgctgagcctctggtgcctttacgaacatggtaa

SEQ ID NO: 86091 - protein, 1375 aa, Arabidopsis thaliana
  peptide (1)..(1375): Ceres Seq. ID no. 12686105
MQPLQNFGSATPPPPISNSSTSCNKTCGGISIPFPFGIGGKDCYLNGWYEVICNTTTSDSNTTVPLLSMINREVVNISLPDSNEPYGLVQIKGPVTSLGCSSNTSEGPQNSLPVLNVTGKGSPYFLTDENRLVAVGCGIKALMTDTESEILGCESSCEHRKSGEEVTNLICTGYRCCQARLPVGRPQAITVNIENSSGGEETCKVAFLTDKRYSPSNVTEPEQFHNNGYVVLELGWYFATSNSRFKSLLGCTNMSRKGSGFSDDNCSCEYDYFSGMSYRNCYCDYGYTGNPYLRGGCVGILIGLSGLVFFVGLFWLFKLIKKRRNINRSKKFFKRNGGLLLKQQLTTKDGNVEMSKIFSSKELRKATDNFSIDRVLGQGGQGTVYKGMLVDGSIVAVKRSKVVDEDKMEEFINEIVLLSQINHRNIVKLLGCCLETEVPILVYEYIPNGDLFKRLHDESDDYTMTWEVRLRIAIEIAGALTYMHSAASFPIFHRDIKTTNILLDEKYRAKVSDFGTSRSVTLDQTHLTTLVAGTFGYMDPEYFLSSQYTHKSDVYSFGVVLVELITGEKPLSRVRSEEGRGLATHFLEAMKENRVIDIIDIRIKDESKLEQVMAVAKLARKCLNRKGKNRPNMKEVSNELERIRSSPEDLDVHCYLNPWYEVVCNSTNSVPFLSRINRELVNISLNGVVHIKAPVTSSGCSTGTSQPLTPPPLNVAGQGSPYFLTDKNLLVAVGCKFKAVMAGITSQITSCESSCNERNSSSQEGRNKICNGYKCCQTRIPEGQPQVISVDIEIPQGNNTTGEGGCRVAFLTSDKYSSLNVTEPEKFHGHGYAAVELGWFFDTSDSRDTQPISCKNASDTTPYTSDTRCSCSYGYFSGFSYRDCYCNSPGYKGNPFLPGGCVDVDECKLDIGRNQCKDQSCVNLPGWFDCQPKKPEQLKRVIQGKIELDFITILSVLQNVLLFTVWFFGGAGVLIGSALLLFAFGIFGLYKFVQKRRKLIRMRKFFRRNGGMLLKQQLARKEGNVEMSRIFSSHELEKATDNFNKNRVLGQGGQGTVYKGMLVDGRIVAVKRSKAVDEDRVEEFINEVVVLAQINHRNIVKLLGCCLETEVPVLVYEFVPNGDLCKRLHDESDDYTMTWEVRLHIAIEIAGALSYLHSAASFPIYHRDIKTTNILLDERNRAKVSDFGTSRSVTIDQTHLTTQVAGTFGYVDPEYFQSSKFTEKSDVYSFGVVLVELLTGEKPSSRVRSEENRGLAAHFVEAVKENRVLDIVDDRIKDECNMDQVMSVANLARRCLNRKGKKRPNMREVSIELEMIRSSHYDSGIHIEDDDEEDDQAMELNFNDTWEVGATAPASMFNNASPTSDAEPLVPLRTW

SEQ ID NO: 86092 - protein, 1307 aa, Arabidopsis thaliana
  peptide (1)..(1307): Ceres Seq. ID no. 12686106
MINREVVNISLPDSNEPYGLVQIKGPVTSLGCSSNTSEGPQNSLPVLNVTGKGSPYFLTDENRLVAVGCGIKALMTDTESEILGCESSCEHRKSGEEVTNLICTGYRCCQARLPVGRPQAITVNIENSSGGEETCKVAFLTDKRYSPSNVTEPEQFHNNGYVVLELGWYFATSNSRFKSLLGCTNMSRKGSGFSDDNCSCEYDYFSGMSYRNCYCDYGYTGNPYLRGGCVGILIGLSGLVFFVGLFWLFKLIKKRRNINRSKKFFKRNGGLLLKQQLTTKDGNVEMSKIFSSKELRKATDNFSIDRVLGQGGQGTVYKGMLVDGSIVAVKRSKVVDEDKMEEFINEIVLLSQINHRNIVKLLGCCLETEVPILVYEYIPNGDLFKRLHDESDDYTMTWEVRLRIAIEIAGALTYMHSAASFPIFHRDIKTTNILLDEKYRAKVSDFGTSRSVTLDQTHLTTLVAGTFGYMDPEYFLSSQYTHKSDVYSFGVVLVELITGEKPLSRVRSEEGRGLATHFLEAMKENRVIDIIDIRIKDESKLEQVMAVAKLARKCLNRKGKNRPNMKEVSNELERIRSSPEDLDVHCYLNPWYEVVCNSTNSVPFLSRINRELVNISLNGVVHIKAPVTSSGCSTGTSQPLTPPPLNVAGQGSPYFLTDKNLLVAVGCKFKAVMAGITSQITSCESSCNERNSSSQEGRNKICNGYKCCQTRIPEGQPQVISVDIEIPQGNNTTGEGGCRVAFLTSDKYSSLNVTEPEKFHGHGYAAVELGWFFDTSDSRDTQPISCKNASDTTPYTSDTRCSCSYGYFSGFSYRDCYCNSPGYKGNPFLPGGCVDVDECKLDIGRNQCKDQSCVNLPGWFDCQPKKPEQLKRVIQGKIELDFITILSVLQNVLLFTVWFFGGAGVLIGSALLLFAFGIFGLYKFVQKRRKLIRMRKFFRRNGGMLLKQQLARKEGNVEMSRIFSSHELEKATDNFNKNRVLGQGGQGTVYKGMLVDGRIVAVKRSKAVDEDRVEEFINEVVVLAQINHRNIVKLLGCCLETEVPVLVYEFVPNGDLCKRLHDESDDYTMTWEVRLHIAIEIAGALSYLHSAASFPIYHRDIKTTNILLDERNRAKVSDFGTSRSVTIDQTHLTTQVAGTFGYVDPEYFQSSKFTEKSDVYSFGVVLVELLTGEKPSSRVRSEENRGLAAHFVEAVKENRVLDIVDDRIKDECNMDQVMSVANLARRCLNRKGKKRPNMREVSIELEMIRSSHYDSGIHIEDDDEEDDQAMELNFNDTWEVGATAPASMFNNASPTSDAEPLVPLRTW

SEQ ID NO: 86093 - protein, 1233 aa, Arabidopsis thaliana
  peptide (1)..(1233): Ceres Seq. ID no. 12686107
MTDTESEILGCESSCEHRKSGEEVTNLICTGYRCCQARLPVGRPQAITVNIENSSGGEETCKVAFLTDKRYSPSNVTEPEQFHNNGYVVLELGWYFATSNSRFKSLLGCTNMSRKGSGFSDDNCSCEYDYFSGMSYRNCYCDYGYTGNPYLRGGCVGILIGLSGLVFFVGLFWLFKLIKKRRNINRSKKFFKRNGGLLLKQQLTTKDGNVEMSKIFSSKELRKATDNFSIDRVLGQGGQGTVYKGMLVDGSIVAVKRSKVVDEDKMEEFINEIVLLSQINHRNIVKLLGCCLETEVPILVYEYIPNGDLFKRLHDESDDYTMTWEVRLRIAIEIAGALTYMHSAASFPIFHRDIKTTNILLDEKYRAKVSDFGTSRSVTLDQTHLTTLVAGTFGYMDPEYFLSSQYTHKSDVYSFGVVLVELITGEKPLSRVRSEEGRGLATHFLEAMKENRVIDIIDIRIKDESKLEQVMAVAKLARKCLNRKGKNRPNMKEVSNELERIRSSPEDLDVHCYLNPWYEVVCNSTNSVPFLSRINRELVNISLNGVVHIKAPVTSSGCSTGTSQPLTPPPLNVAGQGSPYFLTDKNLLVAVGCKFKAVMAGITSQITSCESSCNERNSSSQEGRNKICNGYKCCQTRIPEGQPQVISVDIEIPQGNNTTGEGGCRVAFLTSDKYSSLNVTEPEKFHGHGYAAVELGWFFDTSDSRDTQPISCKNASDTTPYTSDTRCSCSYGYFSGFSYRDCYCNSPGYKGNPFLPGGCVDVDECKLDIGRNQCKDQSCVNLPGWFDCQPKKPEQLKRVIQGKIELDFITILSVLQNVLLFTVWFFGGAGVLIGSALLLFAFGIFGLYKFVQKRRKLIRMRKFFRRNGGMLLKQQLARKEGNVEMSRIFSSHELEKATDNFNKNRVLGQGGQGTVYKGMLVDGRIVAVKRSKAVDEDRVEEFINEVVVLAQINHRNIVKLLGCCLETEVPVLVYEFVPNGDLCKRLHDESDDYTMTWEVRLHIAIEIAGALSYLHSAASFPIYHRDIKTTNILLDERNRAKVSDFGTSRSVTIDQTHLTTQVAGTFGYVDPEYFQSSKFTEKSDVYSFGVVLVELLTGEKPSSRVRSEENRGLAAHFVEAVKENRVLDIVDDRIKDECNMDQVMSVANLARRCLNRKGKKRPNMREVSIELEMIRSSHYDSGIHIEDDDEEDDQAMELNFNDTWEVGATAPASMFNNASPTSDAEPLVPLRTW

SEQ ID NO: 86094 - DNA, 1458 bp, Arabidopsis thaliana
  misc_feature (1)..(1458): Ceres Seq. ID no. 12686108
  misc_feature (1)..(1458): Ortholog of  Ceres SEQ ID NO 13584744 as cited in SEQ ID NO 69137
atggctcatgagcagcaacacctccaaatagtaattcttcaagctcttgtaacagaacctttggaggaatctcaatcccgttcccatttggaatcggcgggaaggattgctatctcaatagttggtacgaggttgtctgtaacagcaccacttccgggtcctgcaaaacttggctacagaggaaacccatacatacgaggtggatgcatcgacattgatgaatgcgaagtacccaacaagtgtggagaagacacttgtgtgaacatggctggaaggtacagttgcgtgccaaagataaccaagcctgccaaactcgctcatgtgcttcgaggggttcttataggtttgttgggacttctgttttttgttatagggatttttgggttatacaaatttatcagaaagcgaaggcggatcatccgtagcatgaagttcttcaaacgtaatggaggcctattgttgaaacaacagttaacaacaaaggacggcagtgtcgagatgtcaaaaatattcagctcgagagagttggagaaagccactgataacttcagcatagatagagtgcttgggcaaggcggtcaaggcactgtgtacaaaagaatgcttgtagatgggagtattgttgcggttaaaagatccaaagttgtggatgaagacaaaatggaagagtttatcaatgagattgttcttctgtcacaaatcaatcaccgcaacattgtgaaactcttgggatgttgcttggagacagaagttccaatcttggtgtacgaatatattcccaatggagatctgttcaagcggcttcatgatgaatatgatgattacatgatgacttgggaagtgcgacttcgcatagccgtagagatagcaggagctctttcgtacatgcactcagctgcatcttttccaatattccatagagatatcaaaactaccaatatactgttggatgagaaatacagagcaaaaatatctgatttcggaacttcaagatcggtagcgactgatcaaactcacttaacaacattagttgcaggaacttttgggtacatggatccagagtacttcctgtcgagccaatacactcacaaaagcgatgtatatagtttcggtgttgtgttggtggagctcataacgggagaaaaaccaatgtcacgtgtccggtctgaagaaggcataggtttggcaacttatttcctcgaggcaatgaaagagaacagagctgttgacataattgatattaggatcaaagacgaaagcaagcaagtaatggcggtagcaaaactcgccagaagatgtcttaatcgaaaagggaataagcggccaaacatgagagaggtttcaataaagctagagaggatccgttcatcacccaaagatttagatgtccataccgaaaacgaagaagaagaagaagaggatcaacttatggaaatcaatagaatatatgattcttga

SEQ ID NO: 86095 - protein, 485 aa, Arabidopsis thaliana
  peptide (1)..(485): Ceres Seq. ID no. 12686109
MAHEQQHLQIVILQALVTEPLEESQSRSHLESAGRIAISIVGTRLSVTAPLPGPAKLGYRGNPYIRGGCIDIDECEVPNKCGEDTCVNMAGRYSCVPKITKPAKLAHVLRGVLIGLLGLLFFVIGIFGLYKFIRKRRRIIRSMKFFKRNGGLLLKQQLTTKDGSVEMSKIFSSRELEKATDNFSIDRVLGQGGQGTVYKRMLVDGSIVAVKRSKVVDEDKMEEFINEIVLLSQINHRNIVKLLGCCLETEVPILVYEYIPNGDLFKRLHDEYDDYMMTWEVRLRIAVEIAGALSYMHSAASFPIFHRDIKTTNILLDEKYRAKISDFGTSRSVATDQTHLTTLVAGTFGYMDPEYFLSSQYTHKSDVYSFGVVLVELITGEKPMSRVRSEEGIGLATYFLEAMKENRAVDIIDIRIKDESKQVMAVAKLARRCLNRKGNKRPNMREVSIKLERIRSSPKDLDVHTENEEEEEEDQLMEINRIYDS

SEQ ID NO: 86096 - protein, 397 aa, Arabidopsis thaliana
  peptide (1)..(397): Ceres Seq. ID no. 12686110
MAGRYSCVPKITKPAKLAHVLRGVLIGLLGLLFFVIGIFGLYKFIRKRRRIIRSMKFFKRNGGLLLKQQLTTKDGSVEMSKIFSSRELEKATDNFSIDRVLGQGGQGTVYKRMLVDGSIVAVKRSKVVDEDKMEEFINEIVLLSQINHRNIVKLLGCCLETEVPILVYEYIPNGDLFKRLHDEYDDYMMTWEVRLRIAVEIAGALSYMHSAASFPIFHRDIKTTNILLDEKYRAKISDFGTSRSVATDQTHLTTLVAGTFGYMDPEYFLSSQYTHKSDVYSFGVVLVELITGEKPMSRVRSEEGIGLATYFLEAMKENRAVDIIDIRIKDESKQVMAVAKLARRCLNRKGNKRPNMREVSIKLERIRSSPKDLDVHTENEEEEEEDQLMEINRIYDS

SEQ ID NO: 86097 - protein, 343 aa, Arabidopsis thaliana
  peptide (1)..(343): Ceres Seq. ID no. 12686111
MKFFKRNGGLLLKQQLTTKDGSVEMSKIFSSRELEKATDNFSIDRVLGQGGQGTVYKRMLVDGSIVAVKRSKVVDEDKMEEFINEIVLLSQINHRNIVKLLGCCLETEVPILVYEYIPNGDLFKRLHDEYDDYMMTWEVRLRIAVEIAGALSYMHSAASFPIFHRDIKTTNILLDEKYRAKISDFGTSRSVATDQTHLTTLVAGTFGYMDPEYFLSSQYTHKSDVYSFGVVLVELITGEKPMSRVRSEEGIGLATYFLEAMKENRAVDIIDIRIKDESKQVMAVAKLARRCLNRKGNKRPNMREVSIKLERIRSSPKDLDVHTENEEEEEEDQLMEINRIYDS

SEQ ID NO: 86098 - DNA, 1243 bp, Arabidopsis thaliana
  misc_feature (1)..(1243): Ceres Seq. ID no. 12686201
  misc_feature (1)..(1243): Ortholog of  Ceres SEQ ID NO 15171438 as cited in SEQ ID NO 51665
  misc_feature (1)..(1243): Ortholog of  Ceres SEQ ID NO 14303083 as cited in SEQ ID NO 66573
atgcctcgatccgacctaacccgcggatactctgatggagacagcctggtcggagaaattgtccgagaggaaggtcacatttactcgttagcggcaacaaatgatcttttgtacacgggatcggacaataattacattagggtttggaaaaacttaaacgagtttagtgggtttaaatcgaacagcggattggttaaagcgatagtgataagtcgggaggctaaggtatttacgggtcatcaagacggtaagatccgggtttggaaaacctcgtccaaaaacccgcgagtgtacacacgcgccgggagcttgccggctttgaaagacgttttgaagagttcagtgaaaccgagtaactacgtggaggtgagaagatgtcgtacggccttatggatcaagcattccgacgccgtttcgtgtttgagcttagcggaagatcaagggctgttgtactccgcttcatgggatcggacggtcaaggtttggcgtatccatgacttgaaatgtatcgagtctattaaagctcatgatgacgctgtgaattctgtaacgaccgccgagagccttgtgttcacgggatcggcggatggaacggttaaggtttggaaacgtgagatcagagggaagcgtacggcgcactctttgttccaaactttgctaaagcaagaatcagcggtcacggctttggtcacgagccacatggcagtgtatagtggttcaagcgacggagctgtgaatttttgggagatgggagacaagaaactcttgaagcattgtgaagttttcaagaagcataggcttgctgtcctctgtatcgcggcagccggaaaattgttgtttagcggtgcggcggataagaagatatgcgtgtggaggagggaagggaaggtacacacgtgtgtctctgtgttaaccggtcataccggaccagttaagtgtttggcggtggtggagccatcgggaggtgaagaagaagacggaggagatgggaggttggttttgtatagtggaagtcttgacaaatcggtcaaagtgtggagggtaccacgtcattaaatgtaggattttattcggtgcttaagagatttgggatgtatgtaggtaagtaagaacaaaaacccaagtcaaatgatgaattatgaggttcgtaatatatgatatttattagtaatttaatatatctttgatacatgtataattgaactagggttatcgtttacggtgaatatcaaatatcaatatt

SEQ ID NO: 86099 - protein, 351 aa, Arabidopsis thaliana
  peptide (1)..(351): Ceres Seq. ID no. 12686202
MPRSDLTRGYSDGDSLVGEIVREEGHIYSLAATNDLLYTGSDNNYIRVWKNLNEFSGFKSNSGLVKAIVISREAKVFTGHQDGKIRVWKTSSKNPRVYTRAGSLPALKDVLKSSVKPSNYVEVRRCRTALWIKHSDAVSCLSLAEDQGLLYSASWDRTVKVWRIHDLKCIESIKAHDDAVNSVTTAESLVFTGSADGTVKVWKREIRGKRTAHSLFQTLLKQESAVTALVTSHMAVYSGSSDGAVNFWEMGDKKLLKHCEVFKKHRLAVLCIAAAGKLLFSGAADKKICVWRREGKVHTCVSVLTGHTGPVKCLAVVEPSGGEEEDGGDGRLVLYSGSLDKSVKVWRVPRH

SEQ ID NO: 86100 - DNA, 1260 bp, Arabidopsis thaliana
  misc_feature (1)..(1260): Ceres Seq. ID no. 12686275
  misc_feature (1)..(1260): Ortholog of  Ceres SEQ ID NO 15169244 as cited in SEQ ID NO 58988
atggctcctctccctttcataccggaacaaacccgttcgcaaacgcgtttatcttcagacacaaagaagaagaacagaaacaagaaaacgtcccaaccaccgcctcaaacgcaaaagataaagcagaagacggtaccatcaacatcatcatcgtcgtcatggagccagataaagaaccttttgagttgcaaacaaatcgaagggccacgagtgcacgaaccatcaaagattacgtcatcatcttgtggctcctctctttgtaagtttagtgatgttatttacggtaatgcccgtgtgattcaccgctccgatcactcccctgagagtagcaatcttggacaagatacccggttgttgacccgaaaacccattagtacccgtggatcttcttcatcggttagatccaacggttgtggcgcttacacgtcatattcaacttccaaagctatgcacttcagaaacctctcaggttgctatgagtgtcacatgattgttgatccaagcaggtatccaatagcaccaagaatatgtgcatgtccacagtgtggggaggtcttccctaagcttgaatcattggagcatcatcaagcagttcgtcacgctgtgtcggagttggggccagaggattcagggagaaacatagtggacatcatcttcaaatctagctggttacgtaaagacagtcccatctacaagatcgaacggatattaaaagtccacaacactcaacgaacgatccaacggtttgaagattgtcgcgacgcagtcaagtcccatgcacatgcctctaccagaaaagaggctcggtccgccgccgacggcaacgagcttctccgcttccactgcaccacagtttcttgctccctcggctcacgcggctcgacctccatttgctccgccatccctggctgccgcgtttgcaccattatccgccatggcttccacgccaaaacggtacgtgtaggcaatggtgaaggaaaagaggagattaagggcgtgaggaccactgcaagcagtggaagagcacacgatgcgttgaggtgttttgaccagcggagggcgatgcttgtttgccgtgtgatcgcgggaagagtgaggcgcgtgcagagtgatgtgccggaagatgaaagtggttctggctcgtatgattcggttgcgggggccgctggggtctacacaaaccttgacgacttggttgtgtataatccaaaagctatacttccttgctttgtagttatctacaaagtctccgagccttaa

SEQ ID NO: 86101 - protein, 419 aa, Arabidopsis thaliana
  peptide (1)..(419): Ceres Seq. ID no. 12686276
MAPLPFIPEQTRSQTRLSSDTKKKNRNKKTSQPPPQTQKIKQKTVPSTSSSSSWSQIKNLLSCKQIEGPRVHEPSKITSSSCGSSLCKFSDVIYGNARVIHRSDHSPESSNLGQDTRLLTRKPISTRGSSSSVRSNGCGAYTSYSTSKAMHFRNLSGCYECHMIVDPSRYPIAPRICACPQCGEVFPKLESLEHHQAVRHAVSELGPEDSGRNIVDIIFKSSWLRKDSPIYKIERILKVHNTQRTIQRFEDCRDAVKSHAHASTRKEARSAADGNELLRFHCTTVSCSLGSRGSTSICSAIPGCRVCTIIRHGFHAKTVRVGNGEGKEEIKGVRTTASSGRAHDALRCFDQRRAMLVCRVIAGRVRRVQSDVPEDESGSGSYDSVAGAAGVYTNLDDLVVYNPKAILPCFVVIYKVSEP

SEQ ID NO: 86102 - protein, 270 aa, Arabidopsis thaliana
  peptide (1)..(270): Ceres Seq. ID no. 12686277
MHFRNLSGCYECHMIVDPSRYPIAPRICACPQCGEVFPKLESLEHHQAVRHAVSELGPEDSGRNIVDIIFKSSWLRKDSPIYKIERILKVHNTQRTIQRFEDCRDAVKSHAHASTRKEARSAADGNELLRFHCTTVSCSLGSRGSTSICSAIPGCRVCTIIRHGFHAKTVRVGNGEGKEEIKGVRTTASSGRAHDALRCFDQRRAMLVCRVIAGRVRRVQSDVPEDESGSGSYDSVAGAAGVYTNLDDLVVYNPKAILPCFVVIYKVSEP

SEQ ID NO: 86103 - protein, 257 aa, Arabidopsis thaliana
  peptide (1)..(257): Ceres Seq. ID no. 12686278
MIVDPSRYPIAPRICACPQCGEVFPKLESLEHHQAVRHAVSELGPEDSGRNIVDIIFKSSWLRKDSPIYKIERILKVHNTQRTIQRFEDCRDAVKSHAHASTRKEARSAADGNELLRFHCTTVSCSLGSRGSTSICSAIPGCRVCTIIRHGFHAKTVRVGNGEGKEEIKGVRTTASSGRAHDALRCFDQRRAMLVCRVIAGRVRRVQSDVPEDESGSGSYDSVAGAAGVYTNLDDLVVYNPKAILPCFVVIYKVSEP

SEQ ID NO: 86104 - DNA, 2334 bp, Arabidopsis thaliana
  misc_feature (1)..(2334): Ceres Seq. ID no. 12686397
  misc_feature (1)..(2334): Ortholog of  Ceres SEQ ID NO 14307631 as cited in SEQ ID NO 20399
  misc_feature (1)..(2334): Ortholog of  Ceres SEQ ID NO 14307261 as cited in SEQ ID NO 53982
atggttgtttatcccaacgaagaagctgaaaatggttcacttcgcttcgtagatttcgtaaacaagacatttgctctgttaggcaattctcccatcaaaaagttctctctgcgtcatgagcctagactttactgtgtagatgcatacttacgttggattttcactgcaatggaacaagaacgtggtttactggaactacacttgtacgcggatcgatattattatcctgttggtatagagagagagctgttcacgagcaacacactggttaagctcacactatccggtagatatgattttcaagttgagactgtgtttctccctgcccttaaatcactttccctctcatcttctttcgagattggttttgacaaatattgtaacctcctcgatggcttccctgcattggaagagttatacattcgtgaagctgtatctgaactttctaatgctttactatctagcggtacgtttgtgaaatgtgcatccatcaagagacttgtggtttttaccgattgtccaaagtttaaagaggatgaggatcaccaagaaccttgttttatagcaccaagtcttgtctaccttgactattctagttatctctccgaaaattatgaccttattgatttgaattcgcttgttgaagccaggctgaatctcagactattggagtcatttaacaattatggttcgtctgataatgatggtgatgtttatggttgggattttaatgttccttttgattattatggtgatgttacaaatctagttgcgggtataaccaacattacaacccttcacttgtctcctgattcccttgaggtatttcatttccgctgtaaatccataccggtgttcaacaatctcctccttaatttatctattgagagtaacaagcgaaatggttggcaagtaatgccacttttgatcaggagttgtccaaatctgcacactttagtcatcaagggttttgtccacagagtaacaagtaaatgcggagacgcatgtgcttgcatccctaagaagcagaggaagattggaaagaaagaggagatttcagagtatggaggttcttttcaagagctggaacagatgagacatttcttgggcaagttggaacgtcttgaaactgtgaaagttggtgttcacgcagaaaacaataacaacaatgagttcttgcgagctaatctactgactctccccagactctcatcaaaaagaattttcgaagaaaaattagagagagtagaagaagcagaagcagtaatggtacgagcttcatcgtcgaagaaaggaggatcaaaaggaggagacaaagacgacgcagagtcaaaacagaggaagagattaaaaaccctagctctcgataaccaattgctctctgattctccggcgaaatctcattcctctctcaaaccttcaaagcaagttctcaaacaccatggcaccgacatcatccgcaaatctcagcgcaagaatcgctttctcttctccttccctggtcttctcgctcctatctccgccgctaccatcggcgatctcgatcgattatctaccaaaaaccctgtcctctaccttaatttcccacagggtcgtatgaaactttttggaacgattttgtatccgaagaacagatacttgactcttcaattctctagaggaggcaaaaatgtcttatgtgatgattattttgataacatgattgtgttctctgagtcatggtggattgggacaaaagaggagaatccagaagaagctcgtcttgatttccctaaagaactagctcaggcagagaatactgagtttgatttccaaggcggtgctggaggagcagcttcggtgaagaagctggcgagtcctgaaattggtagccaaccaacagagacagactcacctgaagttgacaacgaggatgttttgtctgaggatggagaattcttggacgataagatccaagtaacaccaccagttcaattaacaccaccagtccaagtaactccggtccgacagtctcagagaaattctgggaagaaattcaactttgcagaaacttcctcagaggcctcctctggtgaaagtgaaggcaatacatctgatgaagatgagaaacctctgttggaacctgaatcttcaacaagaagtcgtgaggaatctcaagatggtaatggtattactgcatctgcaagcaagttgcctgaagaacttccggctaaaagggaaaaactaaagagcaaagacagtaagctcgttcaagctactttgtctaaccttttcaagaaagctgaggagaaaacagctggaacttccaaggctaaatcatcctcaaaagcttaa

SEQ ID NO: 86105 - protein, 777 aa, Arabidopsis thaliana
  peptide (1)..(777): Ceres Seq. ID no. 12686398
MVVYPNEEAENGSLRFVDFVNKTFALLGNSPIKKFSLRHEPRLYCVDAYLRWIFTAMEQERGLLELHLYADRYYYPVGIERELFTSNTLVKLTLSGRYDFQVETVFLPALKSLSLSSSFEIGFDKYCNLLDGFPALEELYIREAVSELSNALLSSGTFVKCASIKRLVVFTDCPKFKEDEDHQEPCFIAPSLVYLDYSSYLSENYDLIDLNSLVEARLNLRLLESFNNYGSSDNDGDVYGWDFNVPFDYYGDVTNLVAGITNITTLHLSPDSLEVFHFRCKSIPVFNNLLLNLSIESNKRNGWQVMPLLIRSCPNLHTLVIKGFVHRVTSKCGDACACIPKKQRKIGKKEEISEYGGSFQELEQMRHFLGKLERLETVKVGVHAENNNNNEFLRANLLTLPRLSSKRIFEEKLERVEEAEAVMVRASSSKKGGSKGGDKDDAESKQRKRLKTLALDNQLLSDSPAKSHSSLKPSKQVLKHHGTDIIRKSQRKNRFLFSFPGLLAPISAATIGDLDRLSTKNPVLYLNFPQGRMKLFGTILYPKNRYLTLQFSRGGKNVLCDDYFDNMIVFSESWWIGTKEENPEEARLDFPKELAQAENTEFDFQGGAGGAASVKKLASPEIGSQPTETDSPEVDNEDVLSEDGEFLDDKIQVTPPVQLTPPVQVTPVRQSQRNSGKKFNFAETSSEASSGESEGNTSDEDEKPLLEPESSTRSREESQDGNGITASASKLPEELPAKREKLKSKDSKLVQATLSNLFKKAEEKTAGTSKAKSSSKA

SEQ ID NO: 86106 - protein, 721 aa, Arabidopsis thaliana
  peptide (1)..(721): Ceres Seq. ID no. 12686399
MEQERGLLELHLYADRYYYPVGIERELFTSNTLVKLTLSGRYDFQVETVFLPALKSLSLSSSFEIGFDKYCNLLDGFPALEELYIREAVSELSNALLSSGTFVKCASIKRLVVFTDCPKFKEDEDHQEPCFIAPSLVYLDYSSYLSENYDLIDLNSLVEARLNLRLLESFNNYGSSDNDGDVYGWDFNVPFDYYGDVTNLVAGITNITTLHLSPDSLEVFHFRCKSIPVFNNLLLNLSIESNKRNGWQVMPLLIRSCPNLHTLVIKGFVHRVTSKCGDACACIPKKQRKIGKKEEISEYGGSFQELEQMRHFLGKLERLETVKVGVHAENNNNNEFLRANLLTLPRLSSKRIFEEKLERVEEAEAVMVRASSSKKGGSKGGDKDDAESKQRKRLKTLALDNQLLSDSPAKSHSSLKPSKQVLKHHGTDIIRKSQRKNRFLFSFPGLLAPISAATIGDLDRLSTKNPVLYLNFPQGRMKLFGTILYPKNRYLTLQFSRGGKNVLCDDYFDNMIVFSESWWIGTKEENPEEARLDFPKELAQAENTEFDFQGGAGGAASVKKLASPEIGSQPTETDSPEVDNEDVLSEDGEFLDDKIQVTPPVQLTPPVQVTPVRQSQRNSGKKFNFAETSSEASSGESEGNTSDEDEKPLLEPESSTRSREESQDGNGITASASKLPEELPAKREKLKSKDSKLVQATLSNLFKKAEEKTAGTSKAKSSSKA

SEQ ID NO: 86107 - protein, 472 aa, Arabidopsis thaliana
  peptide (1)..(472): Ceres Seq. ID no. 12686400
MPLLIRSCPNLHTLVIKGFVHRVTSKCGDACACIPKKQRKIGKKEEISEYGGSFQELEQMRHFLGKLERLETVKVGVHAENNNNNEFLRANLLTLPRLSSKRIFEEKLERVEEAEAVMVRASSSKKGGSKGGDKDDAESKQRKRLKTLALDNQLLSDSPAKSHSSLKPSKQVLKHHGTDIIRKSQRKNRFLFSFPGLLAPISAATIGDLDRLSTKNPVLYLNFPQGRMKLFGTILYPKNRYLTLQFSRGGKNVLCDDYFDNMIVFSESWWIGTKEENPEEARLDFPKELAQAENTEFDFQGGAGGAASVKKLASPEIGSQPTETDSPEVDNEDVLSEDGEFLDDKIQVTPPVQLTPPVQVTPVRQSQRNSGKKFNFAETSSEASSGESEGNTSDEDEKPLLEPESSTRSREESQDGNGITASASKLPEELPAKREKLKSKDSKLVQATLSNLFKKAEEKTAGTSKAKSSSKA

SEQ ID NO: 86108 - DNA, 668 bp, Arabidopsis thaliana
  misc_feature (1)..(668): Ceres Seq. ID no. 12686404
  misc_feature (1)..(668): Ortholog of  Ceres SEQ ID NO 13596504 as cited in SEQ ID NO 60622
ataaggcaaaaaggatttgcttttacgaacagagagcgagccagagagagtgagtaagagagaatgacgagcgtgagtgggtgtggttcagtgagtctgataactaaccgcagtgcgttcttgggaaacggacttcaacaccgtgccgttttccttaaaccatggtcgtcttcttcgcttcagtctcggtccatggttgtcgaagccaaaaccaaaaccagcagcgaagacagaatcgcccgccactctcgtatccgtaagaaggttaatggtacaacggagaggccaaggctatgtgttttccgatcaaacaagcatctttatgttcaagtgattgatgataccaagatgcacaccttagcttcagcttccactaagcagaaaccaatctctgaagagttcgactacacctctggaccaaccattgaggtagcgaagaaagttggggaagtgatagcaaaatcttgcttggagaaaggtatcacaaaggtagcctttgaccgtggtggttacccttaccatggacgtattgaggctcttgctgctgcagcacgtgaacacggtcttcagttttaaccgtcgttttctttccttgtttctttccgatgaacagcagtgtatgaatgtagagaacccattttccccaattgaaatgttgagatttttct

SEQ ID NO: 86109 - protein, 170 aa, Arabidopsis thaliana; identical to SEQ ID NO: 35246
  peptide (1)..(170): Ceres Seq. ID no. 12686405

SEQ ID NO: 86110 - protein, 127 aa, Arabidopsis thaliana; identical to SEQ ID NO: 35247
  peptide (1)..(127): Ceres Seq. ID no. 12686406

SEQ ID NO: 86111 - DNA, 1202 bp, Arabidopsis thaliana
  misc_feature (1)..(1202): Ceres Seq. ID no. 12686452
  misc_feature (1)..(1202): Ortholog of  Ceres SEQ ID NO 12613953 as cited in SEQ ID NO 68388
ttttgccctctcccatttttgtcgccgaaaccctaaatctcgacctcaaaccctgaaccatggctgaaggactcgtgttgaaaggcacaatgtgtgcccacactgatatggtcaccgccattgctacaccggtcgataactccgacgtgattgtaacttcgtcgcgtgacaaatcaatcatcctctggaaactcacaaaggaagacaagtcatacggtgttgctcagcggaggatgactggtcactctcacttcgttcaagacgttgttctctcctccgatggacaattcgctctctccggatcttgggacggtgagcttcgtctctgggatctcgctaccggagaatctactcgtcgtttcgttggtcacacgaaagatgttctctctgttgctttctctaccgataaccgtcagatcgtctctgcttctcgtgatcgtacgattaagctttggaacacgcttggtgagtgtaagtataccatctctgaagctgatggtcacaaggaatgggttagttgtgttaggtttagtcctaatactcttgtgccaactattgtatctgcttcttgggataaaactgtgaaggtctggaatcttcagaattgtaagcttaggaacactcttgctggtcactctggttacttgaacactgtggctgtgtcacctgatggttcgttgtgtgccagtggtggcaaagatggtgtgatcttgctttgggatttggctgaagggaagaagttgtattctcttgaagctggctctattattcattcactttgcttcagtcccaataggtactggttgtgtgcagcaacagagaatagcattaggatttgggatctcgagagtaagtctgttgttgaggatttgaaggttgatcttaaggctgaggctgaaaagactgatggttctactggaatcggaaacaagaccaaggtgatctactgcacaagcttgaactggagtgcagatggaaacactttgttcagtggatacactgatggagttatcagggtttggggtattggtcgttactagagagacaagaagtttctttattctctccaaatttttccatcgactctaaagtcttctcttctgaattagtgttttgaggatttattttttgttcttttctattttcagaatccacaaatgtgatattttgatacattgattttgtttcatatttgttttctt

SEQ ID NO: 86112 - protein, 326 aa, Arabidopsis thaliana [sequence omitted]

SEQ ID NO: 86113 - protein, 316 aa, Arabidopsis thaliana; identical to SEQ ID NO: 26607
  peptide (1)..(316): Ceres Seq. ID no. 12686454

SEQ ID NO: 86114 - protein, 310 aa, Arabidopsis thaliana; identical to SEQ ID NO: 26608
  peptide (1)..(310): Ceres Seq. ID no. 12686455

SEQ ID NO: 86115 - DNA, 1731 bp, Arabidopsis thaliana
  misc_feature (1)..(1731): Ceres Seq. ID no. 12686456
  misc_feature (1)..(1731): Ortholog of  Ceres SEQ ID NO 15177463 as cited in SEQ ID NO 0
atgagtttaagcgttgagctcaaggatttggaggtcttaacaacgaacgcaaagcaaatacaagatgatgtattgaaggagatactcacacttaacgccaacacagagtatctcaaacgttttctcgatggaagctctgataaagagttgttcaagaagaacgtaccggtggtgagctacaatgatgtcaagccttatatcgaacgtgttgcgaatggagagccctcggatgtgatttcaggtggaaccattacaagattcgtccaaagcacgggaacttcaggagggatacataaaatatttccagtgaacgataagtacatagagaatcttggataccttttggctgtatcctctctcattacttccaaacatttcagtgacaaggtagatgagaaaggaaagaaaatggcgtttctttacaacagattagaatccaaaactccctccggattagccctttcttcatcatttacaagctatttcatgagcgattacttcaaaaaccggtcatcaaaatgtaattctgagtacacaagccccgaccaagtcatattgtgccccgacaacaaccaaagtgtgtattgtcatcttctatgtgggctttcccagagagaaaaggttgtgggagttagtgcaacatttgctcatgccttaatcaaagcaataaatgctcttcaaatttactggaaggaattgtctagtaatatccggtcaggtcatgttagtgagtggatcactgaccttgactgcaaaaatgctgtctcagccattcttggaggacctgaccctgaattggctgatgtgattgaacaagaatgcagccacaagtcatgggaaggtatcatcacacgactttggcccaaagcaaagtttattgaatgcattgttacaggacaaatggcccaatacattccaacattggacttctattccaacaagcttcctatagtttccatggtatatgggtcttctgaaagtatatttggggtgaatgtggatcctttatccaaaccacaagatgtgtcctacacatttctgcccaatatctcctactttgagtttctacctattgatcatgaggaagatatgaacaccattgttgatcttgtcggtgtcaagctagggtgctattatgaaaccgtggttactagttattttggtctacacaggtatcttattggagatattctacaggtgactggattctacaataacacacctcaatttagattcgtacgcagaaagaatattgtgttaagcgtcaatagtgaagcaacaactgaacaggacattttaaaggggttggctagtgcgacccttgttcttgagtcttcaaattcaatgttgacgggtttcacatgttatgcggatatctccagttttccaggtcactacgtcttttactgggaactcaaagcaaaagatgttgacgatgttgttgagcttgatgaaaatgtattggaagaatgttgctatgcgttagaggaatcgtttgatgctctttataaaagactaaggagtaaagaagggtcaattggagctctagagataaaagtggtgcaacaaggaacatttgattctctcatggaatatttcatctccaaaggtggttcggttgctcaatacaagacacctatgtgtatcaactcttcggaaaccttagcagttcttgaagataaggttattgctcgattctacagccaaaaatctcctcctcttaacttatag

SEQ ID NO: 86116 - protein, 576 aa, Arabidopsis thaliana
  peptide (1)..(576): Ceres Seq. ID no. 12686457
MSLSVELKDLEVLTTNAKQIQDDVLKEILTLNANTEYLKRFLDGSSDKELFKKNVPVVSYNDVKPYIERVANGEPSDVISGGTITRFVQSTGTSGGIHKIFPVNDKYIENLGYLLAVSSLITSKHFSDKVDEKGKKMAFLYNRLESKTPSGLALSSSFTSYFMSDYFKNRSSKCNSEYTSPDQVILCPDNNQSVYCHLLCGLSQREKVVGVSATFAHALIKAINALQIYWKELSSNIRSGHVSEWITDLDCKNAVSAILGGPDPELADVIEQECSHKSWEGIITRLWPKAKFIECIVTGQMAQYIPTLDFYSNKLPIVSMVYGSSESIFGVNVDPLSKPQDVSYTFLPNISYFEFLPIDHEEDMNTIVDLVGVKLGCYYETVVTSYFGLHRYLIGDILQVTGFYNNTPQFRFVRRKNIVLSVNSEATTEQDILKGLASATLVLESSNSMLTGFTCYADISSFPGHYVFYWELKAKDVDDVVELDENVLEECCYALEESFDALYKRLRSKEGSIGALEIKVVQQGTFDSLMEYFISKGGSVAQYKTPMCINSSETLAVLEDKVIARFYSQKSPPLNL

SEQ ID NO: 86117 - protein, 440 aa, Arabidopsis thaliana; identical to SEQ ID NO: 71536
  peptide (1)..(440): Ceres Seq. ID no. 12686458

SEQ ID NO: 86118 - protein, 414 aa, Arabidopsis thaliana; identical to SEQ ID NO: 71537
  peptide (1)..(414): Ceres Seq. ID no. 12686459

SEQ ID NO: 86119 - DNA, 1896 bp, Arabidopsis thaliana
  misc_feature (1)..(1896): Ceres Seq. ID no. 12686496
  misc_feature (1)..(1896): Ortholog of  Ceres SEQ ID NO 12586556 as cited in SEQ ID NO 64667
  misc_feature (1)..(1896): Ortholog of  Ceres SEQ ID NO 13660894 as cited in SEQ ID NO 67475
atgacattggcgattacgtcacggctcaggcgcaatttcgtgttccgtcgtaggaatcttgaatcgttgttgtctccacaatgtcagaaacttatcaacgatctaaggtcttgcagagacaccgtcgaagtttctcgaattcatggttacatggtgaaaacgggactcgacaaggacgatttcgcagtgagcaagcttcttgctttttcctctgtacttgacattcgatacgcttcgtcgatcttcgagcatgtctccaacactaatctctttatgttcaacactatgatcagaggttactcgattagcgatgagccggagcgagcattttctgttttcaaccaattgagagctaaaggtttgaccttggaccgattctcgtttatcacgactcttaaatcatgttctcgtgaattgtgtgtttcaattggtgagggattgcatgggattgctttgagatctgggtttatggtttttactgatttgaggaatgctcttatacatttttactgtgtttgtggaaagattagtgatgctcggaaagtgttcgacgaaatgccgcagagtgttgatgctgttacgtttagtactttgatgaatgggtatcttcaggtttctaagaaagcgttggctttggatttgtttaggattatgagaaaaagtgaggtggtcgttaatgtcagtacgttgcttagctttctttcggctattagtgatctaggagatttgtctggagcagaatctgctcatgtgttatgcatcaagattggccttgatttagacttgcatttaatcacagctttgatagggatgtacggcaaaactgggggtatcagttcagcacgcaggatctttgattgcgccattcgaaaggatgttgttacatggaactgtatgatagaccaatatgccaaaacgggtctccttgaagagtgtgtatggctactgaggcagatgaagtatgaaaaaatgaaaccgaattcatctacatttgttgggctgttgtcttcctgtgcgtacagtgaagcagcattcgtaggacgtactgttgctgatctattggaagaggaaagaatagctttggatgcaatacttggaactgcactcgttgatatgtatgcaaaagtaggattgcttgaaaaagctgttgagattttcaatagaatgaaggataaggatgtaaagtcctggaccgcgatgatctcgggttatggagctcatggactagcaagagaagcagtaacactattcaataagatggaggaagagaactgcaaagtgagacccaatgagattaccttcttggttgtgctgaatgcttgtagccatggagggttggtaatggaaggaatcagatgctttaagaggatggttgaggcttacagcttcacgcccaaagttgaacattatggttgtgtggttgatcttttaggtcgagcggggcagttagaggaagcgtatgagttaataaggaacttaccgatcacaagtgattcaacggcttggcgtgctctgctagctgcttgtagagtatacgggaatgcagatttgggggaaagtgtgatgatgagattggctgaaatgggtgagactcatccggcagatgcaattcttctagctgggacacacgctgttgcagggaacccagaaaaatcattagataatgagttgaataaagggagaaaagaagctggatacagcgccattgaaatagaatagagtagacaatctctggcgttcattcacctctgacctttttgttgaaaactatatcagcaaaatgttgttcaataaggtaaacccctgtatttactctttctttatgctttaaaacagtaacttatgtataaagaaaggagacaattgatcttaatgaaacagttttgatggattgtg

SEQ ID NO: 86120 - protein, 572 aa, Arabidopsis thaliana
  peptide (1)..(572): Ceres Seq. ID no. 12686497
MTLAITSRLRRNFVFRRRNLESLLSPQCQKLINDLRSCRDTVEVSRIHGYMVKTGLDKDDFAVSKLLAFSSVLDIRYASSIFEHVSNTNLFMFNTMIRGYSISDEPERAFSVFNQLRAKGLTLDRFSFITTLKSCSRELCVSIGEGLHGIALRSGFMVFTDLRNALIHFYCVCGKISDARKVFDEMPQSVDAVTFSTLMNGYLQVSKKALALDLFRIMRKSEVVVNVSTLLSFLSAISDLGDLSGAESAHVLCIKIGLDLDLHLITALIGMYGKTGGISSARRIFDCAIRKDVVTWNCMIDQYAKTGLLEECVWLLRQMKYEKMKPNSSTFVGLLSSCAYSEAAFVGRTVADLLEEERIALDAILGTALVDMYAKVGLLEKAVEIFNRMKDKDVKSWTAMISGYGAHGLAREAVTLFNKMEEENCKVRPNEITFLVVLNACSHGGLVMEGIRCFKRMVEAYSFTPKVEHYGCVVDLLGRAGQLEEAYELIRNLPITSDSTAWRALLAACRVYGNADLGESVMMRLAEMGETHPADAILLAGTHAVAGNPEKSLDNELNKGRKEAGYSAIEIE

SEQ ID NO: 86121 - protein, 522 aa, Arabidopsis thaliana
  peptide (1)..(522): Ceres Seq. ID no. 12686498
MVKTGLDKDDFAVSKLLAFSSVLDIRYASSIFEHVSNTNLFMFNTMIRGYSISDEPERAFSVFNQLRAKGLTLDRFSFITTLKSCSRELCVSIGEGLHGIALRSGFMVFTDLRNALIHFYCVCGKISDARKVFDEMPQSVDAVTFSTLMNGYLQVSKKALALDLFRIMRKSEVVVNVSTLLSFLSAISDLGDLSGAESAHVLCIKIGLDLDLHLITALIGMYGKTGGISSARRIFDCAIRKDVVTWNCMIDQYAKTGLLEECVWLLRQMKYEKMKPNSSTFVGLLSSCAYSEAAFVGRTVADLLEEERIALDAILGTALVDMYAKVGLLEKAVEIFNRMKDKDVKSWTAMISGYGAHGLAREAVTLFNKMEEENCKVRPNEITFLVVLNACSHGGLVMEGIRCFKRMVEAYSFTPKVEHYGCVVDLLGRAGQLEEAYELIRNLPITSDSTAWRALLAACRVYGNADLGESVMMRLAEMGETHPADAILLAGTHAVAGNPEKSLDNELNKGRKEAGYSAIEIE

SEQ ID NO: 86122 - protein, 481 aa, Arabidopsis thaliana
  peptide (1)..(481): Ceres Seq. ID no. 12686499
MFNTMIRGYSISDEPERAFSVFNQLRAKGLTLDRFSFITTLKSCSRELCVSIGEGLHGIALRSGFMVFTDLRNALIHFYCVCGKISDARKVFDEMPQSVDAVTFSTLMNGYLQVSKKALALDLFRIMRKSEVVVNVSTLLSFLSAISDLGDLSGAESAHVLCIKIGLDLDLHLITALIGMYGKTGGISSARRIFDCAIRKDVVTWNCMIDQYAKTGLLEECVWLLRQMKYEKMKPNSSTFVGLLSSCAYSEAAFVGRTVADLLEEERIALDAILGTALVDMYAKVGLLEKAVEIFNRMKDKDVKSWTAMISGYGAHGLAREAVTLFNKMEEENCKVRPNEITFLVVLNACSHGGLVMEGIRCFKRMVEAYSFTPKVEHYGCVVDLLGRAGQLEEAYELIRNLPITSDSTAWRALLAACRVYGNADLGESVMMRLAEMGETHPADAILLAGTHAVAGNPEKSLDNELNKGRKEAGYSAIEIE

SEQ ID NO: 86123 - DNA, 1362 bp, Arabidopsis thaliana
  misc_feature (1)..(1362): Ceres Seq. ID no. 12686500
  misc_feature (1)..(1362): Ortholog of  Ceres SEQ ID NO 13654989 as cited in SEQ ID NO 63117
  misc_feature (1)..(1362): Ortholog of  Ceres SEQ ID NO 13584744 as cited in SEQ ID NO 69137
atgggaaattgctttgggttttccgcaaaagtaggtaatagagaaagtccttatcgtggttcgtcaagaatctctgccaaaagaagtcaatcgtctcggctttcaagcttaacaatacaatcatcatcttacaacgatgacacgagtgtggcgtctcttcaaacgcctagaagtgaaggagagctcttagcatcgcccacgctaaaggcatttacgtttaacgagctaaagacagccactaggaatttcagacccgatagtgttatcggtgaaggcggtttcggttatgtctacaaaggatggatcgatgaacgcactttatcgccttcaaaaccagggtcaggcatggtcgttgctgtcaaaaagcttaaagaagaagggtttcaaggacacaggcagtggttggcggaggttgattgtcttgggaggcttcaccatatgaatcttgtgaaactaattggatattgctcgaagggtgatcatattcggcttttggtgtatgagtacatgccaaagggaagcttggagaatcatctctttagacgtaagaaaacttgtctctcaagtaaagatcaatgctcaaattatctcgagagcctttgcgaatgtgatagcaagattcaaatgtatagttgttattgtataacagatttagaaaatttagttggtggggcagaaccgattccgtggagaacaaggattaaagtggctatcggtgcggcgagagggcttgctttccttcatgaagctcaagtcatatacagagacttcaaggcctccaatattctacttgattcggaattcaatgcaaagctttctgattttggattggcgaaagtaggaccaaccggagacagaacacacgtatcaacccaagtgatgggaactcaaggctatgcagcacctgaatacgttgccactggtcggataacagccaaaagtgacgtctacagcttcggtgtggtcttgctagagttactgtcgggacgtctgaccgtagacaaaacgaaagtaggagtggaacgaaatctggttgattgggcaataccttacttaggagacaaaaggaaagtgtttaggataatggacacaaagcttgggggacaatatcctcacaaaggagcttgtttgactgctaatactgcgttgcaatgtcttaatcaagaacctaagttgaggccaaagatgtctgatgtgttatctactcttgaagagttggagatgacgttgaagtcgggttctatttcaaactcggttatgaaattgacatcttcttcctcttctttcacggcgaaacagagagtaagaactccggttgctgatccggtgttgtctagtagacgatgtcgacgtgttcggtga

SEQ ID NO: 86124 - protein, 453 aa, Arabidopsis thaliana
  peptide (1)..(453): Ceres Seq. ID no. 12686501
MGNCFGFSAKVGNRESPYRGSSRISAKRSQSSRLSSLTIQSSSYNDDTSVASLQTPRSEGELLASPTLKAFTFNELKTATRNFRPDSVIGEGGFGYVYKGWIDERTLSPSKPGSGMVVAVKKLKEEGFQGHRQWLAEVDCLGRLHHMNLVKLIGYCSKGDHIRLLVYEYMPKGSLENHLFRRKKTCLSSKDQCSNYLESLCECDSKIQMYSCYCITDLENLVGGAEPIPWRTRIKVAIGAARGLAFLHEAQVIYRDFKASNILLDSEFNAKLSDFGLAKVGPTGDRTHVSTQVMGTQGYAAPEYVATGRITAKSDVYSFGVVLLELLSGRLTVDKTKVGVERNLVDWAIPYLGDKRKVFRIMDTKLGGQYPHKGACLTANTALQCLNQEPKLRPKMSDVLSTLEELEMTLKSGSISNSVMKLTSSSSSFTAKQRVRTPVADPVLSSRRCRRVR

SEQ ID NO: 86125 - protein, 338 aa, Arabidopsis thaliana
  peptide (1)..(338): Ceres Seq. ID no. 12686502
MVVAVKKLKEEGFQGHRQWLAEVDCLGRLHHMNLVKLIGYCSKGDHIRLLVYEYMPKGSLENHLFRRKKTCLSSKDQCSNYLESLCECDSKIQMYSCYCITDLENLVGGAEPIPWRTRIKVAIGAARGLAFLHEAQVIYRDFKASNILLDSEFNAKLSDFGLAKVGPTGDRTHVSTQVMGTQGYAAPEYVATGRITAKSDVYSFGVVLLELLSGRLTVDKTKVGVERNLVDWAIPYLGDKRKVFRIMDTKLGGQYPHKGACLTANTALQCLNQEPKLRPKMSDVLSTLEELEMTLKSGSISNSVMKLTSSSSSFTAKQRVRTPVADPVLSSRRCRRVR

SEQ ID NO: 86126 - protein, 307 aa, Arabidopsis thaliana
  peptide (1)..(307): Ceres Seq. ID no. 12686503
MNLVKLIGYCSKGDHIRLLVYEYMPKGSLENHLFRRKKTCLSSKDQCSNYLESLCECDSKIQMYSCYCITDLENLVGGAEPIPWRTRIKVAIGAARGLAFLHEAQVIYRDFKASNILLDSEFNAKLSDFGLAKVGPTGDRTHVSTQVMGTQGYAAPEYVATGRITAKSDVYSFGVVLLELLSGRLTVDKTKVGVERNLVDWAIPYLGDKRKVFRIMDTKLGGQYPHKGACLTANTALQCLNQEPKLRPKMSDVLSTLEELEMTLKSGSISNSVMKLTSSSSSFTAKQRVRTPVADPVLSSRRCRRVR

SEQ ID NO: 86127 - DNA, 1326 bp, Arabidopsis thaliana
  misc_feature (1)..(1326): Ceres Seq. ID no. 12686516
  misc_feature (1)..(1326): Ortholog of  Ceres SEQ ID NO 12625335 as cited in SEQ ID NO 63326
atggccgaacacggtgagactcaagctgatgaagaagaagaagaacaagtatggagctggggtgctggtacggacggacagttagggacgacaaagctgcaagacgagcttcttccgcagcttctctctctgacatcacttccttccatatcaatgctcgcttgtggcggcgctcacgtcatcgctttgacttctggtaaacctcccaaaatctctctgatcaaaggaatgttgttggttttagtccaagtaaacattttaattatgctttttgcaggtggtaaagtcttcacatggggaagaggaagctctggtcagttaggacatggagacatcctcaacattactttgccaaagcttgtatctttctttgacgactctgttattactcaagctgctgctggatggagtcattctggttttgtttcagattctggttgtattttcacatgtggcaatggctcgtttgggcagcttggtcatggtgataccttgtcattaagcactccagctaaagtctctcactttaacaatgacagtgtgaagatggtagcttgtggtatgcgccactcacttgttttgtttgcagggaatcaagtgtgtggatttggatctggaaaacgtggacagttaggtttctcatcagacagaataaaatcagtaaatcttccttgtgttgtctctggattaaaagatgttgaggttgttcgtatatcagctaatggagatcatagtgcagctatatccgctgatggacagttcttcagttggggaagaggattctgcggcggccctgatgttcatgcccctcagagcttgccttcacctctatctttcagagaagttgctgtaggatggaatcatgctttactactgaccgtcgatggtgaggtgttcaagcttggtagcactcttaataaacaacctgagaagcaacaactgcaaatagattcctctgaagctctctttgagaaagttccggattttgatggagttaaagttatgcagatagcagcaggagcagagcattctgctgccgtaacaggtaaaaggggaggggcaattctgttatttctttcttctttacactcagctaatataaaacaaacaacctttgaatgtcttgcagagaatggagaagttaagacatggggatggggagaacatggtcagctaggccttggaaataccaatgaccaaaccagtcctgaattggtgagcttaggaagtatagacctgcgaacgaaagagatcaaagtatattgcggaagtggatttacttatgcagtaaaacgaaaacaagagctttcaccaacctcgtcatag

SEQ ID NO: 86128 - protein, 441 aa, Arabidopsis thaliana
  peptide (1)..(441): Ceres Seq. ID no. 12686517
MAEHGETQADEEEEEQVWSWGAGTDGQLGTTKLQDELLPQLLSLTSLPSISMLACGGAHVIALTSGKPPKISLIKGMLLVLVQVNILIMLFAGGKVFTWGRGSSGQLGHGDILNITLPKLVSFFDDSVITQAAAGWSHSGFVSDSGCIFTCGNGSFGQLGHGDTLSLSTPAKVSHFNNDSVKMVACGMRHSLVLFAGNQVCGFGSGKRGQLGFSSDRIKSVNLPCVVSGLKDVEVVRISANGDHSAAISADGQFFSWGRGFCGGPDVHAPQSLPSPLSFREVAVGWNHALLLTVDGEVFKLGSTLNKQPEKQQLQIDSSEALFEKVPDFDGVKVMQIAAGAEHSAAVTGKRGGAILLFLSSLHSANIKQTTFECLAENGEVKTWGWGEHGQLGLGNTNDQTSPELVSLGSIDLRTKEIKVYCGSGFTYAVKRKQELSPTSS

SEQ ID NO: 86129 - protein, 390 aa, Arabidopsis thaliana
  peptide (1)..(390): Ceres Seq. ID no. 12686518
MLACGGAHVIALTSGKPPKISLIKGMLLVLVQVNILIMLFAGGKVFTWGRGSSGQLGHGDILNITLPKLVSFFDDSVITQAAAGWSHSGFVSDSGCIFTCGNGSFGQLGHGDTLSLSTPAKVSHFNNDSVKMVACGMRHSLVLFAGNQVCGFGSGKRGQLGFSSDRIKSVNLPCVVSGLKDVEVVRISANGDHSAAISADGQFFSWGRGFCGGPDVHAPQSLPSPLSFREVAVGWNHALLLTVDGEVFKLGSTLNKQPEKQQLQIDSSEALFEKVPDFDGVKVMQIAAGAEHSAAVTGKRGGAILLFLSSLHSANIKQTTFECLAENGEVKTWGWGEHGQLGLGNTNDQTSPELVSLGSIDLRTKEIKVYCGSGFTYAVKRKQELSPTSS

SEQ ID NO: 86130 - protein, 365 aa, Arabidopsis thaliana
  peptide (1)..(365): Ceres Seq. ID no. 12686519
MLLVLVQVNILIMLFAGGKVFTWGRGSSGQLGHGDILNITLPKLVSFFDDSVITQAAAGWSHSGFVSDSGCIFTCGNGSFGQLGHGDTLSLSTPAKVSHFNNDSVKMVACGMRHSLVLFAGNQVCGFGSGKRGQLGFSSDRIKSVNLPCVVSGLKDVEVVRISANGDHSAAISADGQFFSWGRGFCGGPDVHAPQSLPSPLSFREVAVGWNHALLLTVDGEVFKLGSTLNKQPEKQQLQIDSSEALFEKVPDFDGVKVMQIAAGAEHSAAVTGKRGGAILLFLSSLHSANIKQTTFECLAENGEVKTWGWGEHGQLGLGNTNDQTSPELVSLGSIDLRTKEIKVYCGSGFTYAVKRKQELSPTSS

SEQ ID NO: 86131 - DNA, 2103 bp, Arabidopsis thaliana
  misc_feature (1)..(2103): Ceres Seq. ID no. 12686528
  misc_feature (1)..(2103): Ortholog of  Ceres SEQ ID NO 12613725 as cited in SEQ ID NO 68196
atgggagttgttgagaatcggaaaattttgccagagaaaaaacttggaggctggagagccattacgttcatcctaggtatgttctttctttccatttcgtttcttccaataatgtttttttctttgaagagaattattaatcttccatttgcctcaaatattcatatgataacaaacagtcaatcaaagttaaaaatatatacgtttcataactatgattctctaaatttaaatttcattgacaatacctacaatgatatgccatcacttttttctttcctaatcggtagttgtgtccaacaccatgctaatatcatgactcatgagcacactaaacttcttttgcgagtcatgcaattcaataatctaagaaaatatatagtagcaatagaaatggaatcagaaatcaaattatctgatttcaagtttatattttcgaccgtttcaagtaatgagacgttggagaagttaggatcgattggagtatcagcaaattttatgttgtatttgaggaatgtgtttcacatggagccagtagaagcttttaacgtatactacttgtggatgggtctcactaactttgctccactcctcggcgcattaatctccgacgcctacattggccgtttcaagaccatcgcttacgcatccctcttctcaattctaggactaatgacggtgacactcaccgcctgcctgcctcaactccacccaccaccgtgcaacaaccctcatccagacgaatgcgacgatccgaacaagctccagctcgggattctattcctcggtctcggctttctctccatcggtagcggcggaatccggccttgcagcattccattcggagttgatcagtttgaccaacgaacagagcaaggccttaaaggagtggccagtttctttaattggtactacttgaccttaactatggttctcatcttttcgcataccgttgtggtctacttacagactgtcagttgggtcatcgggtttagcatcccgactagtttaatggcttgtgcagtggttctgttctttgtcggtatgcggttttacgtatatgtcaaaccggaaggtagtgtattctctggtattgctcgggtcatcgtggcagctcgtaagaaacgggacctcaaaatttcgcttgtggacgatgggactgaggagtattatgagccgccggtgaaacctggcgtgttatccaagttacctcttactgaccaattcaagtttctggacaaagctgcggtgatactagacggtgatcttacatctgaaggagttccggcaaataagtggcggctatgtagcatccaagaagttgaagaggtcaagtgcctgatcagagttgttccggtttggtctgctggaataatttcaatcgttgcaatgaccacgcaagcaactttcatggtctttcaagctacaaaaatggatcgacacatgggtccacactttgagatcccggccgcctccataaccgtcatttcttacatcactataggcatttgggtgcctatctacgaacacctcttagtcccgttcctttggcgaatgagaaagttcagggtcactctccttcaacggatggggatagggatcgtcttcgccattctctccatgttcactgcagggtttgtagagggagtgaggcggacacgggctactgaaatgactcaaatgtcggtgttttggctggctttgccactgattctgatggggctctgcgagtcatttaatttcattggactgatcgagttcttcaacagtcagtttccagagcacatgagaagcatagcgaattcgctatttccactctcatttgctgcagctaattatctgagcagtctgctggtgaccaccgtgcataaagtctcaggcacaaaagaccaccctgactggctgaacaaggaccttgatagagggaagttggactacttctactatctgattgccgttttgggtgtggttaaccttgtgtatttctggtactgtgcccatagataccagtataaagccggttcgcaaattgaagatttcaatgaggagaagtctcttctagacatcgaaccaaaccagagacacgatcaatctccaagttag

SEQ ID NO: 86132 - protein, 700 aa, Arabidopsis thaliana
  peptide (1)..(700): Ceres Seq. ID no. 12686529
MGVVENRKILPEKKLGGWRAITFILGMFFLSISFLPIMFFSLKRIINLPFASNIHMITNSQSKLKIYTFHNYDSLNLNFIDNTYNDMPSLFSFLIGSCVQHHANIMTHEHTKLLLRVMQFNNLRKYIVAIEMESEIKLSDFKFIFSTVSSNETLEKLGSIGVSANFMLYLRNVFHMEPVEAFNVYYLWMGLTNFAPLLGALISDAYIGRFKTIAYASLFSILGLMTVTLTACLPQLHPPPCNNPHPDECDDPNKLQLGILFLGLGFLSIGSGGIRPCSIPFGVDQFDQRTEQGLKGVASFFNWYYLTLTMVLIFSHTVVVYLQTVSWVIGFSIPTSLMACAVVLFFVGMRFYVYVKPEGSVFSGIARVIVAARKKRDLKISLVDDGTEEYYEPPVKPGVLSKLPLTDQFKFLDKAAVILDGDLTSEGVPANKWRLCSIQEVEEVKCLIRVVPVWSAGIISIVAMTTQATFMVFQATKMDRHMGPHFEIPAASITVISYITIGIWVPIYEHLLVPFLWRMRKFRVTLLQRMGIGIVFAILSMFTAGFVEGVRRTRATEMTQMSVFWLALPLILMGLCESFNFIGLIEFFNSQFPEHMRSIANSLFPLSFAAANYLSSLLVTTVHKVSGTKDHPDWLNKDLDRGKLDYFYYLIAVLGVVNLVYFWYCAHRYQYKAGSQIEDFNEEKSLLDIEPNQRHDQSPS

SEQ ID NO: 86133 - protein, 674 aa, Arabidopsis thaliana
  peptide (1)..(674): Ceres Seq. ID no. 12686530
MFFLSISFLPIMFFSLKRIINLPFASNIHMITNSQSKLKIYTFHNYDSLNLNFIDNTYNDMPSLFSFLIGSCVQHHANIMTHEHTKLLLRVMQFNNLRKYIVAIEMESEIKLSDFKFIFSTVSSNETLEKLGSIGVSANFMLYLRNVFHMEPVEAFNVYYLWMGLTNFAPLLGALISDAYIGRFKTIAYASLFSILGLMTVTLTACLPQLHPPPCNNPHPDECDDPNKLQLGILFLGLGFLSIGSGGIRPCSIPFGVDQFDQRTEQGLKGVASFFNWYYLTLTMVLIFSHTVVVYLQTVSWVIGFSIPTSLMACAVVLFFVGMRFYVYVKPEGSVFSGIARVIVAARKKRDLKISLVDDGTEEYYEPPVKPGVLSKLPLTDQFKFLDKAAVILDGDLTSEGVPANKWRLCSIQEVEEVKCLIRVVPVWSAGIISIVAMTTQATFMVFQATKMDRHMGPHFEIPAASITVISYITIGIWVPIYEHLLVPFLWRMRKFRVTLLQRMGIGIVFAILSMFTAGFVEGVRRTRATEMTQMSVFWLALPLILMGLCESFNFIGLIEFFNSQFPEHMRSIANSLFPLSFAAANYLSSLLVTTVHKVSGTKDHPDWLNKDLDRGKLDYFYYLIAVLGVVNLVYFWYCAHRYQYKAGSQIEDFNEEKSLLDIEPNQRHDQSPS

SEQ ID NO: 86134 - protein, 663 aa, Arabidopsis thaliana
  peptide (1)..(663): Ceres Seq. ID no. 12686531
MFFSLKRIINLPFASNIHMITNSQSKLKIYTFHNYDSLNLNFIDNTYNDMPSLFSFLIGSCVQHHANIMTHEHTKLLLRVMQFNNLRKYIVAIEMESEIKLSDFKFIFSTVSSNETLEKLGSIGVSANFMLYLRNVFHMEPVEAFNVYYLWMGLTNFAPLLGALISDAYIGRFKTIAYASLFSILGLMTVTLTACLPQLHPPPCNNPHPDECDDPNKLQLGILFLGLGFLSIGSGGIRPCSIPFGVDQFDQRTEQGLKGVASFFNWYYLTLTMVLIFSHTVVVYLQTVSWVIGFSIPTSLMACAVVLFFVGMRFYVYVKPEGSVFSGIARVIVAARKKRDLKISLVDDGTEEYYEPPVKPGVLSKLPLTDQFKFLDKAAVILDGDLTSEGVPANKWRLCSIQEVEEVKCLIRVVPVWSAGIISIVAMTTQATFMVFQATKMDRHMGPHFEIPAASITVISYITIGIWVPIYEHLLVPFLWRMRKFRVTLLQRMGIGIVFAILSMFTAGFVEGVRRTRATEMTQMSVFWLALPLILMGLCESFNFIGLIEFFNSQFPEHMRSIANSLFPLSFAAANYLSSLLVTTVHKVSGTKDHPDWLNKDLDRGKLDYFYYLIAVLGVVNLVYFWYCAHRYQYKAGSQIEDFNEEKSLLDIEPNQRHDQSPS

SEQ ID NO: 86135 - DNA, 1413 bp, Arabidopsis thaliana
  misc_feature (1)..(1413): Ceres Seq. ID no. 12686544
  misc_feature (1)..(1413): Ortholog of  Ceres SEQ ID NO 12611884 as cited in SEQ ID NO 51018
  misc_feature (1)..(1413): Ortholog of  Ceres SEQ ID NO 12609093 as cited in SEQ ID NO 52008
  misc_feature (1)..(1413): Ortholog of  Ceres SEQ ID NO 12609839 as cited in SEQ ID NO 52022
  misc_feature (1)..(1413): Ortholog of  Ceres SEQ ID NO 13638885 as cited in SEQ ID NO 55803
  misc_feature (1)..(1413): Ortholog of  Ceres SEQ ID NO 12615635 as cited in SEQ ID NO 63133
  misc_feature (1)..(1413): Ortholog of  Ceres SEQ ID NO 12586351 as cited in SEQ ID NO 64028
  misc_feature (1)..(1413): Ortholog of  Ceres SEQ ID NO 13584899 as cited in SEQ ID NO 64830
  misc_feature (1)..(1413): Ortholog of  Ceres SEQ ID NO 14301603 as cited in SEQ ID NO 67721
  misc_feature (1)..(1413): Ortholog of  Ceres SEQ ID NO 13654441 as cited in SEQ ID NO 67814
  misc_feature (1)..(1413): Ortholog of  Ceres SEQ ID NO 12585194 as cited in SEQ ID NO 68878
  misc_feature (1)..(1413): Ortholog of  Ceres SEQ ID NO 12589186 as cited in SEQ ID NO 0
  misc_feature (1)..(1413): Ortholog of  Ceres SEQ ID NO 12635608 as cited in SEQ ID NO 0
atggctcagaacgatacagtgaagctgataggttcttggtctagcccttattcccttagggcacgtgtggctctacacttgaaatctgtcaagtacgagtacttagacgaacctgatgttcttaaagaaaagagtgaactccttctcaaatctaaccccatccacaagaaagtccctgtcctcctccatggtgacctctccatctctgagtccctcaacgttgttcaatacgtcgacgaggcttggccctccgttccttcaatccttccttctgatgcctatgatcgcgcatctgctcggttttgggctcagtacatcgatgacaagtgttttgcggcggtggatgcggtggtcggagcaaaagacgacgaagggaaaatggcggcggtgggaaagctgatggagtgtttggcgatacttgaagaaacgtttcagaagagcagcaaaggattagggttctttggaggagagaccatcggctaccttgacattgcttgttcggctcttttaggtccgatctctgtgatcgaggcgttttccggcgtcaagtttctccggcaagagacaacacctgggttgatcaaatgggccgagaggtttagggcccatgaagctgttaagccctacatgccaaccgtcgaagaggtcgttgcattcgcaaagcaaaagttcaatgttcagccacgagtggctctacacttgaaatctatcaagtacgagtacttagaagaacctgatgatgatcttggggaaaagagccaactccttctcaaatctaaccctatccacaagaaaacccctgtcctcattcatggtgaccttgcaatctgtgagtccctcaacatcgttcaatacctcgacgaggcttggccttctgatccatccatccttccttctaatgcctatgatcgtgcgtctgctcggttctgggctcagtacatcgacgacaagtctctgttattaataaatctgtttagattagtcaaatcaagagttatgtgtctgaaacagtgcttcgaggcggcgaatgcgctgaccggagcaaacaacgacgaagagagaatagcggcgacgggaaagctgacggagtgtttggcgatactagaagagacgtttcagaagagcagcaaagggttagggtttttcggaggagaaaccatcggctaccttgacattgcatgtgcggctcttttgggtccgatctctgtgatcgagatgttttccgccgacaagtttgtccgggaagagacaacacctgggttgatccaatgggccgtgaggtttagggcccatgaagctgttaggccttacatgccaaccgtcgaagaggtcactgaattagtaaagcaaaggattgaggagggttttaagcgaaacttcaaaagcaatgtttcgacttcggaatatgaatag

SEQ ID NO: 86136 - protein, 470 aa, Arabidopsis thaliana
  peptide (1)..(470): Ceres Seq. ID no. 12686545
MAQNDTVKLIGSWSSPYSLRARVALHLKSVKYEYLDEPDVLKEKSELLLKSNPIHKKVPVLLHGDLSISESLNVVQYVDEAWPSVPSILPSDAYDRASARFWAQYIDDKCFAAVDAVVGAKDDEGKMAAVGKLMECLAILEETFQKSSKGLGFFGGETIGYLDIACSALLGPISVIEAFSGVKFLRQETTPGLIKWAERFRAHEAVKPYMPTVEEVVAFAKQKFNVQPRVALHLKSIKYEYLEEPDDDLGEKSQLLLKSNPIHKKTPVLIHGDLAICESLNIVQYLDEAWPSDPSILPSNAYDRASARFWAQYIDDKSLLLINLFRLVKSRVMCLKQCFEAANALTGANNDEERIAATGKLTECLAILEETFQKSSKGLGFFGGETIGYLDIACAALLGPISVIEMFSADKFVREETTPGLIQWAVRFRAHEAVRPYMPTVEEVTELVKQRIEEGFKRNFKSNVSTSEYE

SEQ ID NO: 86137 - protein, 344 aa, Arabidopsis thaliana
  peptide (1)..(344): Ceres Seq. ID no. 12686546
MAAVGKLMECLAILEETFQKSSKGLGFFGGETIGYLDIACSALLGPISVIEAFSGVKFLRQETTPGLIKWAERFRAHEAVKPYMPTVEEVVAFAKQKFNVQPRVALHLKSIKYEYLEEPDDDLGEKSQLLLKSNPIHKKTPVLIHGDLAICESLNIVQYLDEAWPSDPSILPSNAYDRASARFWAQYIDDKSLLLINLFRLVKSRVMCLKQCFEAANALTGANNDEERIAATGKLTECLAILEETFQKSSKGLGFFGGETIGYLDIACAALLGPISVIEMFSADKFVREETTPGLIQWAVRFRAHEAVRPYMPTVEEVTELVKQRIEEGFKRNFKSNVSTSEYE

SEQ ID NO: 86138 - protein, 337 aa, Arabidopsis thaliana
  peptide (1)..(337): Ceres Seq. ID no. 12686547
MECLAILEETFQKSSKGLGFFGGETIGYLDIACSALLGPISVIEAFSGVKFLRQETTPGLIKWAERFRAHEAVKPYMPTVEEVVAFAKQKFNVQPRVALHLKSIKYEYLEEPDDDLGEKSQLLLKSNPIHKKTPVLIHGDLAICESLNIVQYLDEAWPSDPSILPSNAYDRASARFWAQYIDDKSLLLINLFRLVKSRVMCLKQCFEAANALTGANNDEERIAATGKLTECLAILEETFQKSSKGLGFFGGETIGYLDIACAALLGPISVIEMFSADKFVREETTPGLIQWAVRFRAHEAVRPYMPTVEEVTELVKQRIEEGFKRNFKSNVSTSEYE

SEQ ID NO: 86139 - DNA, 666 bp, Arabidopsis thaliana
  misc_feature (1)..(666): Ceres Seq. ID no. 12686718
  misc_feature (1)..(666): Ortholog of  Ceres SEQ ID NO 14311717 as cited in SEQ ID NO 51255
  misc_feature (1)..(666): Ortholog of  Ceres SEQ ID NO 13503606 as cited in SEQ ID NO 65005
atgcaggactctactggagctaatggactattgtttcgcttccgaaacccgcaagcaagtatatgtacggaagctcgtccaaagaacatcaactcatcttactttaccagatcttttgcatcaagaacttcaaaagaacctgggaatcagcagaataaggctaagaaagaggtgacgactgtggaggatccttttgattctcctacataccacatcccggagaagccggtgacctttacagaaggtgcgtcctacagtcttgttattctggctgggcttggtgtcgctggagctgctggctacggtgtgtttaaagagctcatttttcaaccaaaagagtacaaggtctttgacaaagccttgaagagaattcaagatgatggtcaggtgagggttaggattggatcccccatcaaaggctatggacaagaaactagaaaccgagctgctcgtcaacgtatacccaacagagtatttacagatgaagacggagtggagcatgttgaggtaaacttctacatccgtgggcctcaaggagcagggaaagtgtacacggagatgtttaaagacaaggcagagaaggaatggaaatacacgtacctgatcgtagagattttaacaccttccccagccaaattgatgctggagtcttatttgcctgcctaa

SEQ ID NO: 86140 - protein, 221 aa, Arabidopsis thaliana
  peptide (1)..(221): Ceres Seq. ID no. 12686719
MQDSTGANGLLFRFRNPQASICTEARPKNINSSYFTRSFASRTSKEPGNQQNKAKKEVTTVEDPFDSPTYHIPEKPVTFTEGASYSLVILAGLGVAGAAGYGVFKELIFQPKEYKVFDKALKRIQDDGQVRVRIGSPIKGYGQETRNRAARQRIPNRVFTDEDGVEHVEVNFYIRGPQGAGKVYTEMFKDKAEKEWKYTYLIVEILTPSPAKLMLESYLPA

SEQ ID NO: 86141 - DNA, 981 bp, Arabidopsis thaliana
  misc_feature (1)..(981): Ceres Seq. ID no. 12686851
  misc_feature (1)..(981): Ortholog of  Ceres SEQ ID NO 12582251 as cited in SEQ ID NO 55724
atggctcttgtacccaagattcgcaatcgcaccatctcggacaaaccagtctcttcgtcttgtactagaacatcgagtttcagacaaagacttctcgccagttgcaaacgatttctcaggttcaaattgttggttcgtgcttcttcagtgtcattaaaaaagaaagcagcaaggtgttcacaatctcaacaagttgttaaacataatgatgataggattgaggaacattcttctagtaatcggggttttaaagatggcaacaatttcttagtatcatcaacagaaacgaagaagcttgttgcgttttgtggtgaacctttccaaccactcaacgaggaggaagtagctctagtcaatagtgccttgtctaagagaaacagaaagaagattttggtttcgcataaaaactccaatattgacatctctggagaaactttacaatgcctaaggccgaatcaatggcttaacgatgatgtcactaatctctatctggagttgctgaaagagagacaaactagagatccgcaaaagtacttcaagtgtcatttcttcaataccttcttttacgttaagctcgtaagcggctccggttacaattacaaagctgtcagtagatggactaccaagagaaagcttggatatgatcttattgactgtgacataatatttgttccaatccacatagatatacattggaccctgggagtgattaacaatagggaacgcaagttcgtgtatcttgattcattatttactggagttggtcatacaattttgaatgctatggcaaagtacttggtggatgaagtaaaacaaaagagtcaaaagaatattgacgttagttcatggggaatggaatacgttgaagaacgtcctcagcaacagaacggtagaggattgagtctacaatttagccagaaagacatgccgtacttcaggttaagaacagctaaggagatactgagactgcgagctgactaa

SEQ ID NO: 86142 - protein, 326 aa, Arabidopsis thaliana
  peptide (1)..(326): Ceres Seq. ID no. 12686852
MALVPKIRNRTISDKPVSSSCTRTSSFRQRLLASCKRFLRFKLLVRASSVSLKKKAARCSQSQQVVKHNDDRIEEHSSSNRGFKDGNNFLVSSTETKKLVAFCGEPFQPLNEEEVALVNSALSKRNRKKILVSHKNSNIDISGETLQCLRPNQWLNDDVTNLYLELLKERQTRDPQKYFKCHFFNTFFYVKLVSGSGYNYKAVSRWTTKRKLGYDLIDCDIIFVPIHIDIHWTLGVINNRERKFVYLDSLFTGVGHTILNAMAKYLVDEVKQKSQKNIDVSSWGMEYVEERPQQQNGRGLSLQFSQKDMPYFRLRTAKEILRLRAD

SEQ ID NO: 86143 - DNA, 762 bp, Arabidopsis thaliana
  misc_feature (1)..(762): Ceres Seq. ID no. 12686885
  misc_feature (1)..(762): Ortholog of  Ceres SEQ ID NO 13655598 as cited in SEQ ID NO 64077
atgattccaacatcgttttcaagtaagtttcaaggagtactaagtatgaatgcgttgagatgttatgtatcagagtttatctcaaccttcttcttcgtcctcgcagccgttggttctgtcatgtcttcaaggaaattgatggctggtgatgtgtctggtccgtttggtgttttaataccggcgattgctaatgcgttggcgttatcatcgtcagtttacatctcttggaacgtctctggtggtcatgtgaatccagcggttacgtttgcgatggctgttgctggtcggattagcgttccaaccgctatgttttattggacttctcagatgattgcctctgttatggcttgccttgttcttaaagtaaccgtcatggaacagcacgtaccgatttataagattgctggagaaatgactggatttggagcatctgttcttgaaggtgttttagctttcgtcttggtttatactgtgttcacggctagcgatcccagacgtgggctacctttagcagtgggacctatatttatagggtttgttgcgggagccaatgttctagccgctggtccattctctggaggttcaatgaatcctgcgtgtgcctttgggtcggcgatggtttacggaagctttaagaaccaagctgtgtattgggttgggcctctgcttggaggagccacagctgctttagtgtatgataacgtggtggtccctgtagaagatgatcgtggttcatctactggtgatgccattggtgtgtaa

SEQ ID NO: 86144 - protein, 253 aa, Arabidopsis thaliana; identical to SEQ ID NO: 69464
  peptide (1)..(253): Ceres Seq. ID no. 12686886

SEQ ID NO: 86145 - protein, 238 aa, Arabidopsis thaliana; identical to SEQ ID NO: 69465
  peptide (1)..(238): Ceres Seq. ID no. 12686887

SEQ ID NO: 86146 - protein, 213 aa, Arabidopsis thaliana
  peptide (1)..(213): Ceres Seq. ID no. 12686888
MSSRKLMAGDVSGPFGVLIPAIANALALSSSVYISWNVSGGHVNPAVTFAMAVAGRISVPTAMFYWTSQMIASVMACLVLKVTVMEQHVPIYKIAGEMTGFGASVLEGVLAFVLVYTVFTASDPRRGLPLAVGPIFIGFVAGANVLAAGPFSGGSMNPACAFGSAMVYGSFKNQAVYWVGPLLGGATAALVYDNVVVPVEDDRGSSTGDAIGV

SEQ ID NO: 86147 - DNA, 1683 bp, Arabidopsis thaliana
  misc_feature (1)..(1683): Ceres Seq. ID no. 12686893
  misc_feature (1)..(1683): Ortholog of  Ceres SEQ ID NO 14312989 as cited in SEQ ID NO 59121
  misc_feature (1)..(1683): Ortholog of  Ceres SEQ ID NO 12586556 as cited in SEQ ID NO 64667
atgttgaagtccataagcagcagcagcggcgacgatcatcttctttctctgatcgtatcttccaccggaaaactccatctccggcagattcacgccctcttactccgcacttccttaatcagaaactctgacgttttccaccatttcctctctcgtctcgctctctctctgattcctcgagacatcaattactcatgccgagttttctcccagagattgaacccaactctctctcactgcaacaccatgatcagagctttctctctcagccaaactccatgcgaagggtttcgcttgtttcgatctcttcgacgaaacagctctcttcctgctaatccgctctcgtcttcttttgctctcaagtgttgtatcaaatcaggtgacttactcggtggttttactgatgcatgtaaagtgttcgacgaaattcccaagagagatactgtttcttggaatgtgctgttttcgtgttatctgcggaataaacgtacgagagatgttttagttttgtttgataagatgaagaacgatgtcgatggttgtgtaaaaccagatggtgtaacatgtttgttagctttacaagcttgtgctaacttgggggcgttggattttggtaaacaagttcatgactttatcgatgaaaatggactcagtggtgctttgaatttgagtaacactctggtttcaatgtactcacgttgcgggtctatggataaggcttaccaagtattttatggaatgcgtgaaagaaacgtagtctcgtggacggctctgatctcgggtttagctatgaatgggtttggaaaagaagccattgaagctttcaacgaaatgttgaagtttggaatctctccagaggaacagacactcactggtttattgtctgcctgtagccattccgggctggtcgctgaaggaatgatgtttttcgatagaatgaggagtggtgaatttaagataaagccaaatttacatcactatggctgcgttgttgacctcttgggacgtgctcgtctacttgataaagcttacagtctcattaagtcaatggagatgaaaccggactcaaccatttggcgtacgcttctcggggcttgtagagtccatggagatgtggaacttggggaacgtgtgatctctcatctcatcgaactcaaagccgaagaagctggagattacgttctgttactcaacacatactccacggttgggaaatgggagaaagtgactgaattgcgttctttaatgaaggagaaaagaatccatactaaacctggatgcagcgcgatcgagctacaaggaaccgttcatgagtttatagtagacgatgtttcgcatccgcggaaggaagaaatctataaaatgctggcggaaatcaatcagcagctgaagattgcggggtatgtggcggaaattacatcggaactgcacaatcttgagtcagaagaagaaaagggatacgcgttaagataccatagcgagaagctagctatagcctttgggattctggtgactccaccaggaacaaccattagagtgaccaagaatctcagaacttgtgttgattgtcataattttgcaaagtttgtatctgatgtttatgatcgtatcgtgatcgttagagaccgttccagatttcatcattttaaaggcggctcttgctcttgtaatgacttttggtga

SEQ ID NO: 86148 - protein, 560 aa, Arabidopsis thaliana
  peptide (1)..(560): Ceres Seq. ID no. 12686894
MLKSISSSSGDDHLLSLIVSSTGKLHLRQIHALLLRTSLIRNSDVFHHFLSRLALSLIPRDINYSCRVFSQRLNPTLSHCNTMIRAFSLSQTPCEGFRLFRSLRRNSSLPANPLSSSFALKCCIKSGDLLGGFTDACKVFDEIPKRDTVSWNVLFSCYLRNKRTRDVLVLFDKMKNDVDGCVKPDGVTCLLALQACANLGALDFGKQVHDFIDENGLSGALNLSNTLVSMYSRCGSMDKAYQVFYGMRERNVVSWTALISGLAMNGFGKEAIEAFNEMLKFGISPEEQTLTGLLSACSHSGLVAEGMMFFDRMRSGEFKIKPNLHHYGCVVDLLGRARLLDKAYSLIKSMEMKPDSTIWRTLLGACRVHGDVELGERVISHLIELKAEEAGDYVLLLNTYSTVGKWEKVTELRSLMKEKRIHTKPGCSAIELQGTVHEFIVDDVSHPRKEEIYKMLAEINQQLKIAGYVAEITSELHNLESEEEKGYALRYHSEKLAIAFGILVTPPGTTIRVTKNLRTCVDCHNFAKFVSDVYDRIVIVRDRSRFHHFKGGSCSCNDFW

SEQ ID NO: 86149 - protein, 478 aa, Arabidopsis thaliana
  peptide (1)..(478): Ceres Seq. ID no. 12686895
MIRAFSLSQTPCEGFRLFRSLRRNSSLPANPLSSSFALKCCIKSGDLLGGFTDACKVFDEIPKRDTVSWNVLFSCYLRNKRTRDVLVLFDKMKNDVDGCVKPDGVTCLLALQACANLGALDFGKQVHDFIDENGLSGALNLSNTLVSMYSRCGSMDKAYQVFYGMRERNVVSWTALISGLAMNGFGKEAIEAFNEMLKFGISPEEQTLTGLLSACSHSGLVAEGMMFFDRMRSGEFKIKPNLHHYGCVVDLLGRARLLDKAYSLIKSMEMKPDSTIWRTLLGACRVHGDVELGERVISHLIELKAEEAGDYVLLLNTYSTVGKWEKVTELRSLMKEKRIHTKPGCSAIELQGTVHEFIVDDVSHPRKEEIYKMLAEINQQLKIAGYVAEITSELHNLESEEEKGYALRYHSEKLAIAFGILVTPPGTTIRVTKNLRTCVDCHNFAKFVSDVYDRIVIVRDRSRFHHFKGGSCSCNDFW

SEQ ID NO: 86150 - protein, 387 aa, Arabidopsis thaliana
  peptide (1)..(387): Ceres Seq. ID no. 12686896
MKNDVDGCVKPDGVTCLLALQACANLGALDFGKQVHDFIDENGLSGALNLSNTLVSMYSRCGSMDKAYQVFYGMRERNVVSWTALISGLAMNGFGKEAIEAFNEMLKFGISPEEQTLTGLLSACSHSGLVAEGMMFFDRMRSGEFKIKPNLHHYGCVVDLLGRARLLDKAYSLIKSMEMKPDSTIWRTLLGACRVHGDVELGERVISHLIELKAEEAGDYVLLLNTYSTVGKWEKVTELRSLMKEKRIHTKPGCSAIELQGTVHEFIVDDVSHPRKEEIYKMLAEINQQLKIAGYVAEITSELHNLESEEEKGYALRYHSEKLAIAFGILVTPPGTTIRVTKNLRTCVDCHNFAKFVSDVYDRIVIVRDRSRFHHFKGGSCSCNDFW

SEQ ID NO: 86151 - DNA, 924 bp, Arabidopsis thaliana
  misc_feature (1)..(924): Ceres Seq. ID no. 12686899
  misc_feature (1)..(924): Ortholog of  Ceres SEQ ID NO 14312166 as cited in SEQ ID NO 59253
aaggagacccaaatttcctgcaacaaacaaagtaaaaaagttgagaatggattcatcgcagggaagtacacaacagaagattgtgattctgaacagccacaatgagaacctggtgggtctgcttcatgaaactggttctacagaaattgtagtcttgtgtcatggctttcgatcaaacaagaacttcgaaattatgaaaaatgtggctgttgctatagagagagaagggattagtgctttccgttttgatttctccgggaatggagagagtgaaggcagtttctattatggtaactacaattacgaagctgatgatctacattctgttatccaatacttctctaacttgaaccgtgttgttactataattctcggtcacagtaaaggaggtgatgtggtcctcctctatgcctccaagtatcacgatatccccaatgtgatcaatctctcgggacgttatgatctgaagaaaggcataggagaacgtcttggtgaagattttttggaaagaattaagcaacaaggatacatcgatgttaaagatggagattctggttaccgtgttaccgaggagagtttgatggaccggttaaacacagatatgcatgaagcttgcctcaagattgacaaagaatgcagggtcttgacggtccatggatcgggtgacgagacagtaccagtggaagatgcaaaggagtttgcaaagataataccgaaccacgagctacagattgtggaaggagctgatcattgttataccaattatcaaagtcaattggttttaacggttatggagttcataaagagtcattgtgaagaaaaaaacgacaagacttgtaattgaccctccaatattgcattggacatttatttatgtttggttgaccaaataaatttataaaaggtaaataaaaatataatact

SEQ ID NO: 86152 - protein, 280 aa, Arabidopsis thaliana
  peptide (1)..(280): Ceres Seq. ID no. 12686900
RRPKFPATNKVKKLRMDSSQGSTQQKIVILNSHNENLVGLLHETGSTEIVVLCHGFRSNKNFEIMKNVAVAIEREGISAFRFDFSGNGESEGSFYYGNYNYEADDLHSVIQYFSNLNRVVTIILGHSKGGDVVLLYASKYHDIPNVINLSGRYDLKKGIGERLGEDFLERIKQQGYIDVKDGDSGYRVTEESLMDRLNTDMHEACLKIDKECRVLTVHGSGDETVPVEDAKEFAKIIPNHELQIVEGADHCYTNYQSQLVLTVMEFIKSHCEEKNDKTCN

SEQ ID NO: 86153 - protein, 265 aa, Arabidopsis thaliana
  peptide (1)..(265): Ceres Seq. ID no. 12686901
MDSSQGSTQQKIVILNSHNENLVGLLHETGSTEIVVLCHGFRSNKNFEIMKNVAVAIEREGISAFRFDFSGNGESEGSFYYGNYNYEADDLHSVIQYFSNLNRVVTIILGHSKGGDVVLLYASKYHDIPNVINLSGRYDLKKGIGERLGEDFLERIKQQGYIDVKDGDSGYRVTEESLMDRLNTDMHEACLKIDKECRVLTVHGSGDETVPVEDAKEFAKIIPNHELQIVEGADHCYTNYQSQLVLTVMEFIKSHCEEKNDKTCN

SEQ ID NO: 86154 - protein, 216 aa, Arabidopsis thaliana; identical to SEQ ID NO: 37014
  peptide (1)..(216): Ceres Seq. ID no. 12686902

SEQ ID NO: 86155 - DNA, 831 bp, Arabidopsis thaliana
  misc_feature (1)..(831): Ceres Seq. ID no. 12686910
  misc_feature (1)..(831): Ortholog of  Ceres SEQ ID NO 14308679 as cited in SEQ ID NO 58616
  misc_feature (1)..(831): Ortholog of  Ceres SEQ ID NO 13596492 as cited in SEQ ID NO 68623
atggcgacgaacatcggaatgatggatagtgcatacttcgtcggaagaaacgagattctgacttggattaatgatcgtcttcacctcaatctctctcgcgtcgaagaggctgcatctggtgctgtgcaatgtcagatgcttgatatgacatttccaggagttgtgccaatgcacaaggttaactttgatgcaaagaacgagtacgatatgatacaaaactacaaggtcttgcaagatgtgttcaacaagctgaaaattacaaagccattggaaattaacaggcttgtcaaaggccggccactggataacttggagtttctgcaatggctgaaacgtttctgtgattccattaatggtggcattatgaatgagaactataatccagtggagcgaagatcaagaaatggtaaagagaggagtgtgaagggatctaataagattccaaagtcactgcaaacaaacaataaccatcctccacccaattccagttcagttggtcttagcaaagcatcagggcccaagtcagcaaaagcagctgaagtgcaggctttgtcgaaggagctcgtggatctcaagatctctactgatctcttggaaaaagaaagagacttttacttctccaagctccgggatgtagagatactctgccaaactcctgagctagatgatcttccgatagtggtagcagtgaagaagatactgtatgcaaccgatgcaaatgaatctgcattagaagacgctcaagagtacctaaaccagtccctaggagttgaagatgatgaagctgaaggaaacggagaacaactggaagaagaaaagactcaagcctaa

SEQ ID NO: 86156 - protein, 276 aa, Arabidopsis thaliana
  peptide (1)..(276): Ceres Seq. ID no. 12686911
MATNIGMMDSAYFVGRNEILTWINDRLHLNLSRVEEAASGAVQCQMLDMTFPGVVPMHKVNFDAKNEYDMIQNYKVLQDVFNKLKITKPLEINRLVKGRPLDNLEFLQWLKRFCDSINGGIMNENYNPVERRSRNGKERSVKGSNKIPKSLQTNNNHPPPNSSSVGLSKASGPKSAKAAEVQALSKELVDLKISTDLLEKERDFYFSKLRDVEILCQTPELDDLPIVVAVKKILYATDANESALEDAQEYLNQSLGVEDDEAEGNGEQLEEEKTQA

SEQ ID NO: 86157 - protein, 270 aa, Arabidopsis thaliana
  peptide (1)..(270): Ceres Seq. ID no. 12686912
MMDSAYFVGRNEILTWINDRLHLNLSRVEEAASGAVQCQMLDMTFPGVVPMHKVNFDAKNEYDMIQNYKVLQDVFNKLKITKPLEINRLVKGRPLDNLEFLQWLKRFCDSINGGIMNENYNPVERRSRNGKERSVKGSNKIPKSLQTNNNHPPPNSSSVGLSKASGPKSAKAAEVQALSKELVDLKISTDLLEKERDFYFSKLRDVEILCQTPELDDLPIVVAVKKILYATDANESALEDAQEYLNQSLGVEDDEAEGNGEQLEEEKTQA

SEQ ID NO: 86158 - protein, 269 aa, Arabidopsis thaliana
  peptide (1)..(269): Ceres Seq. ID no. 12686913
MDSAYFVGRNEILTWINDRLHLNLSRVEEAASGAVQCQMLDMTFPGVVPMHKVNFDAKNEYDMIQNYKVLQDVFNKLKITKPLEINRLVKGRPLDNLEFLQWLKRFCDSINGGIMNENYNPVERRSRNGKERSVKGSNKIPKSLQTNNNHPPPNSSSVGLSKASGPKSAKAAEVQALSKELVDLKISTDLLEKERDFYFSKLRDVEILCQTPELDDLPIVVAVKKILYATDANESALEDAQEYLNQSLGVEDDEAEGNGEQLEEEKTQA

SEQ ID NO: 86159 - DNA, 1077 bp, Arabidopsis thaliana
  misc_feature (1)..(1077): Ceres Seq. ID no. 12686922
  misc_feature (1)..(1077): Ortholog of  Ceres SEQ ID NO 15176317 as cited in SEQ ID NO 52865
  misc_feature (1)..(1077): Ortholog of  Ceres SEQ ID NO 13518893 as cited in SEQ ID NO 58108
  misc_feature (1)..(1077): Ortholog of  Ceres SEQ ID NO 12617152 as cited in SEQ ID NO 63555
atggtgaagaagcaatcgccattacacgttgtcggtgtgtctgttttgatggtgttgttatgcagtgttaattacagtctctgtgaaaagatcaaaacgtataagctcacaagaggaagcttaagtgttactttcactaactatggtgctgtcatgacctctcttctcctccctgacagacatggaaaacaagacgatgttgttcttggatttgatactgttgatggttacaagaatgatacaacatattttggagcaattgtgggaagagtggctaatagaataggaggtgctaaattcaagttaaatggtcatctctacaaaaccgatcccaacgaaggccgtaacactctccatggtggttcaaagggatttagtgatgtgatttggtcagtccaaaagtatgttcccactagtcacattactttcacatacgatagcttcgacggtgaagaaggttttccgggcaatgtgacggtgaaagtgacgtacatgttgatcggagaaaacaaactcggtgtaaaaatggaagcaaagccactcaacaaacctacaccaatcaacttagctctccacacttactggaacctccacagccacaactccgggaacatcctctcccacaaaattcaactcctcgccggaaaaatcactcccgtcgacgacaaactcattcccaccggagaaatcacctccattaccggaactccttacgatttcctcgagccacgtgagatcggtagccggatccacgaattacccggcggttacgacatcaattacgtgatcgacggaccgatcgggaaacatctgaggaaaactgcggttgtgacggagcaagtcaccgggaggaagatggagctgtggacgaatcagcctggtgttcagttttacacgagtaatatgatgaaacgtgtcgtcggtaaaggtaaagccgtttatgagaaatacggtggcttgtgtttggagactcaaggcttcccagattccgtcaatcacaagaactttccgtcgcagattgttaatcccggcgagagttatttgcatgttatgctcttcagattcactgctcactaa

SEQ ID NO: 86160 - protein, 358 aa, Arabidopsis thaliana
  peptide (1)..(358): Ceres Seq. ID no. 12686923
MVKKQSPLHVVGVSVLMVLLCSVNYSLCEKIKTYKLTRGSLSVTFTNYGAVMTSLLLPDRHGKQDDVVLGFDTVDGYKNDTTYFGAIVGRVANRIGGAKFKLNGHLYKTDPNEGRNTLHGGSKGFSDVIWSVQKYVPTSHITFTYDSFDGEEGFPGNVTVKVTYMLIGENKLGVKMEAKPLNKPTPINLALHTYWNLHSHNSGNILSHKIQLLAGKITPVDDKLIPTGEITSITGTPYDFLEPREIGSRIHELPGGYDINYVIDGPIGKHLRKTAVVTEQVTGRKMELWTNQPGVQFYTSNMMKRVVGKGKAVYEKYGGLCLETQGFPDSVNHKNFPSQIVNPGESYLHVMLFRFTAH

SEQ ID NO: 86161 - protein, 342 aa, Arabidopsis thaliana
  peptide (1)..(342): Ceres Seq. ID no. 12686924
MVLLCSVNYSLCEKIKTYKLTRGSLSVTFTNYGAVMTSLLLPDRHGKQDDVVLGFDTVDGYKNDTTYFGAIVGRVANRIGGAKFKLNGHLYKTDPNEGRNTLHGGSKGFSDVIWSVQKYVPTSHITFTYDSFDGEEGFPGNVTVKVTYMLIGENKLGVKMEAKPLNKPTPINLALHTYWNLHSHNSGNILSHKIQLLAGKITPVDDKLIPTGEITSITGTPYDFLEPREIGSRIHELPGGYDINYVIDGPIGKHLRKTAVVTEQVTGRKMELWTNQPGVQFYTSNMMKRVVGKGKAVYEKYGGLCLETQGFPDSVNHKNFPSQIVNPGESYLHVMLFRFTAH

SEQ ID NO: 86162 - protein, 307 aa, Arabidopsis thaliana
  peptide (1)..(307): Ceres Seq. ID no. 12686925
MTSLLLPDRHGKQDDVVLGFDTVDGYKNDTTYFGAIVGRVANRIGGAKFKLNGHLYKTDPNEGRNTLHGGSKGFSDVIWSVQKYVPTSHITFTYDSFDGEEGFPGNVTVKVTYMLIGENKLGVKMEAKPLNKPTPINLALHTYWNLHSHNSGNILSHKIQLLAGKITPVDDKLIPTGEITSITGTPYDFLEPREIGSRIHELPGGYDINYVIDGPIGKHLRKTAVVTEQVTGRKMELWTNQPGVQFYTSNMMKRVVGKGKAVYEKYGGLCLETQGFPDSVNHKNFPSQIVNPGESYLHVMLFRFTAH

SEQ ID NO: 86163 - DNA, 1014 bp, Arabidopsis thaliana
  misc_feature (1)..(1014): Ceres Seq. ID no. 12687288
  misc_feature (1)..(1014): Ortholog of  Ceres SEQ ID NO 13654431 as cited in SEQ ID NO 67761
atgggagacgaccagctagatttcgagctcccagaagaggttttgtcggtgattccgatggacccttttgagcagctggatctcgcgaggaagattacatcaatggcgatagcttcaagggtgtcgaatctggactctgaggtggttgaattgagacagaagcttctgggtaaggaaagtgttgtccgtgagcttgaggagaaagcgtctcgcctggagagagactgccgcgaggctgattcgagattgaaggtcgttctcgaagataatattcaggactttcttggtgttacaggatacttaaggatgaacctgacaaaggagaaggattcactggcaatgactgtaacgaaactcacccgtgatttggctaagctggagacattcaagcggcagttaatcaaatccctgagcgatgagagtggtccgcaaacagaacctgttgatattaggacatgcgaccagccaggatcatatccaggcaaagatggaaggatcaatgcacactcaattaaacaagcttacagtggatctacagacacgaacaatccagttgttgaagcttcaaaatacactggaaacaaattttcaatgacatcatacatatctccacgtcttaccccaaccgcaacaccaaagatcatctccacaagtgtgtctcctcgaggctattctgcagcaggttctcctaaaagaacatcaggtgcagtttctcccacaaaggcaacactctggtacccgtcaagtcagcaatcatcggctgcgaattctcctcctcgcaaccgcacactcccagctcgtacaccgcggatggatggtaaagaattcttccggcaagccaggagccgattatcctatgaacaattcagttccttcttagctaacatcaaagagctcaacgcccagaagcaaacccgagaggaaactctgaggaaagcagatgagatatttggggaagagaacaaagatctttatttatctttccaaggtctccttaacagaaacatgcgttaa

SEQ ID NO: 86164 - protein, 337 aa, Arabidopsis thaliana
  peptide (1)..(337): Ceres Seq. ID no. 12687289
MGDDQLDFELPEEVLSVIPMDPFEQLDLARKITSMAIASRVSNLDSEVVELRQKLLGKESVVRELEEKASRLERDCREADSRLKVVLEDNIQDFLGVTGYLRMNLTKEKDSLAMTVTKLTRDLAKLETFKRQLIKSLSDESGPQTEPVDIRTCDQPGSYPGKDGRINAHSIKQAYSGSTDTNNPVVEASKYTGNKFSMTSYISPRLTPTATPKIISTSVSPRGYSAAGSPKRTSGAVSPTKATLWYPSSQQSSAANSPPRNRTLPARTPRMDGKEFFRQARSRLSYEQFSSFLANIKELNAQKQTREETLRKADEIFGEENKDLYLSFQGLLNRNMR

SEQ ID NO: 86165 - protein, 318 aa, Arabidopsis thaliana
  peptide (1)..(318): Ceres Seq. ID no. 12687290
MDPFEQLDLARKITSMAIASRVSNLDSEVVELRQKLLGKESVVRELEEKASRLERDCREADSRLKVVLEDNIQDFLGVTGYLRMNLTKEKDSLAMTVTKLTRDLAKLETFKRQLIKSLSDESGPQTEPVDIRTCDQPGSYPGKDGRINAHSIKQAYSGSTDTNNPVVEASKYTGNKFSMTSYISPRLTPTATPKIISTSVSPRGYSAAGSPKRTSGAVSPTKATLWYPSSQQSSAANSPPRNRTLPARTPRMDGKEFFRQARSRLSYEQFSSFLANIKELNAQKQTREETLRKADEIFGEENKDLYLSFQGLLNRNMR

SEQ ID NO: 86166 - protein, 303 aa, Arabidopsis thaliana
  peptide (1)..(303): Ceres Seq. ID no. 12687291
MAIASRVSNLDSEVVELRQKLLGKESVVRELEEKASRLERDCREADSRLKVVLEDNIQDFLGVTGYLRMNLTKEKDSLAMTVTKLTRDLAKLETFKRQLIKSLSDESGPQTEPVDIRTCDQPGSYPGKDGRINAHSIKQAYSGSTDTNNPVVEASKYTGNKFSMTSYISPRLTPTATPKIISTSVSPRGYSAAGSPKRTSGAVSPTKATLWYPSSQQSSAANSPPRNRTLPARTPRMDGKEFFRQARSRLSYEQFSSFLANIKELNAQKQTREETLRKADEIFGEENKDLYLSFQGLLNRNMR

SEQ ID NO: 86167 - DNA, 657 bp, Arabidopsis thaliana
  misc_feature (1)..(657): Ceres Seq. ID no. 12687345
  misc_feature (1)..(657): Ortholog of  Ceres SEQ ID NO 13595376 as cited in SEQ ID NO 56084
gtaaaaaaaaatatcctctctcttgttctttctcgcgttctgctctctcgatttcagccaagagatgtcggcatacgacaatgttattggtgggaagctaaagctaaaagggaaggctttggatgtgaaagcaggtggagtaaagaagaagaagaaacataagagacaggaagaacaagctcttaaaattactgatcatgaactcatagaaggagaaagcactgaagcattgggtaaattgattgaaggagaagaaggagatgaagaaatgaacaggagtgaaaaggcaagcgaggatgcgaagttgcagcagcagctcgatgatgatgatcacttaacgccagcagaaaggcgatacatagagcagaaacaaagattggatgtgcagaagctagctaaggaagcgaacaagtctcaccgtaacaggattgaggatttcaatcagtatctggctaacatgagtgagcactacgatatccctaaagtcggacctggttaatataattctttcttgtctttgttttactctgcttatctattttgcatcgttaaacgactactttggatgtctgttatgtttagtccctttaacttttgaatgatgtgatcgcaaatctgtaatgtcaaaaacacattttcttggaatatttcttctgc

SEQ ID NO: 86168 - protein, 144 aa, Arabidopsis thaliana; identical to SEQ ID NO: 27004
  peptide (1)..(144): Ceres Seq. ID no. 12687346

SEQ ID NO: 86169 - protein, 76 aa, Arabidopsis thaliana; identical to SEQ ID NO: 27005
  peptide (1)..(76): Ceres Seq. ID no. 12687347

SEQ ID NO: 86170 - DNA, 659 bp, Arabidopsis thaliana
  misc_feature (1)..(659): Ceres Seq. ID no. 12687370
  misc_feature (1)..(659): Ortholog of  Ceres SEQ ID NO 12586366 as cited in SEQ ID NO 68983
tgaacatttctcagtcccacagggtcgcagagctattgagcttgtagcgggtaaagagagtgccatcgctcaagtggttcggactgtcattgggaagacttacgtgctgtcttttgcggttggagacgccaacaatgcttgcaaaggatcaatggtggttgaggcttttgcaggaaaagatacacttaaggtcccttacgagtcgaaaggcacaggagggtttaaacgagcttctattcgatttgtggcggtttcgacccgatcaagaattatgttctacagcactttctatgccatgaggagcgatgatttctcgtcattgtgtgggcctgtgatcgatgatgtcaagcttataagcgttcgtaaaccatagatgaatcaccaatcctattacaagaaaatgcatcgtgtggtcttcttttattttccttaaactgtctttggtgtgtgttggattttattgaaacgagaaggtgaaaaaaacagagttttatttacgagagttagggttttatataggcagatgggcctttgcttatattgtattttcttgtatgagaaggcaaaagaaacgttgcctatatcttatgtatctaggccttttaatttttatggaagagttacaaaacttacaataaagttgtatgcatattttactt

SEQ ID NO: 86171 - protein, 123 aa, Arabidopsis thaliana
  peptide (1)..(123): Ceres Seq. ID no. 12687371
EHFSVPQGRRAIELVAGKESAIAQVVRTVIGKTYVLSFAVGDANNACKGSMVVEAFAGKDTLKVPYESKGTGGFKRASIRFVAVSTRSRIMFYSTFYAMRSDDFSSLCGPVIDDVKLISVRKP

SEQ ID NO: 86172 - protein, 73 aa, Arabidopsis thaliana; identical to SEQ ID NO: 39856
  peptide (1)..(73): Ceres Seq. ID no. 12687372

SEQ ID NO: 86173 - DNA, 1725 bp, Arabidopsis thaliana
  misc_feature (1)..(1725): Ceres Seq. ID no. 12687373
  misc_feature (1)..(1725): Ortholog of  Ceres SEQ ID NO 14306781 as cited in SEQ ID NO 53019
  misc_feature (1)..(1725): Ortholog of  Ceres SEQ ID NO 15177237 as cited in SEQ ID NO 53825
  misc_feature (1)..(1725): Ortholog of  Ceres SEQ ID NO 15176012 as cited in SEQ ID NO 60374
  misc_feature (1)..(1725): Ortholog of  Ceres SEQ ID NO 13598643 as cited in SEQ ID NO 64307
gtcctttttttcttggtttctgaaacataatttcttagaggcggtctgctgcgaaagatccttcctctcacaaccatctctgttcgatagatccaaccaaaaaccgcatcgattttccattcacacggcactgaatgatgatgacttggaggagagcttctcaagtttgtagctgtcgattgttaaatattttcttgtttcttcttgtccagatttcacatataactcaaggaaacaatgttccctctccaataccagttggtgcaaggcatgtgatttgattttttttcaatttcatttaacttatcgaaatttttttaaaaagtatctaaccaaatgcaatagaaaacaaaatatgtgacgacaaatataaaaagtgtttttattaaagataacattaaagaaaacaaaaaggtatttaaagctaactaaaacacgtcattaagagtcatgtagataattgtgaaattgcatgccgttgacataaatttcgtaacaaaagaaaaaacagaacacagaatcttgttctcccaccgatcaccaccggagatatggaatcgccgattactcaaccccaaatgtttagattgcagtttcttcgtcttcttcatagtcgacgatcaccccaagttccattaatagccgattcttcaaatcctatcgagaatcctctctttcaagctgatgttccttctaccacagcaatagagtcttgtccaaaagaaaacattggtaagttaaaagatatgcttaaagaagaaaacattcatttgcacactgaggattcagagcaagggaaattacctttgcttattttaagcttgaaagagagaagtgaagaaaaaaggccagcgattgtgtttatgcatggcacaaacacaaacaaagaatggttaaggccatggcttgaagcatatgcttcgcggggatatgtagccatcggtttagactctcgttaccacggtgaacgtgctgattgcaaaactgcatatcgagatgctcttatatcatcttggagaaatggaaacactatgccttttatctttgatactgtatgggatttgatcaaactagctgaatatcttactcagagggatgatatagacccgaaaaagataggaatcaccggtatttcgctaggagggatgcatgcttggtttgctgctgcagctgacactcgctattccgtggttgtcccattaatcggtgttcagggttttagatgggcaatagagaatgatgagtgggaagcaagagtcaacagtatcaaacctttatttgaagaagcaaggattgatctcggaaagaacataatcgacaaagaactagtcgagaaggtgtggaacagaatagctcctggcctagcttcgaagtttgattcaccgtactcattaccagtgattgctccacggcctctttacatccttaacggcgcaaatgatcctcgatgtcctcttggcggactagaacttgcgttaaagagagctgaaaaggcgtataaggaaacagcttctcctggaaacttcaagttcaaagcagaagatggagttggacacgaagcgacgagtttcatgatcaaagaatcatcagactggtttgacaaattccttaaacaagaagatatgacaacttgacagattgtaatattgtgaactaataaagaagaatcatcttcttctcgttaataatgtattcactctcgcaaatcaatatcattacaaattt

SEQ ID NO: 86174 - protein, 360 aa, Arabidopsis thaliana
  peptide (1)..(360): Ceres Seq. ID no. 12687374
MESPITQPQMFRLQFLRLLHSRRSPQVPLIADSSNPIENPLFQADVPSTTAIESCPKENIGKLKDMLKEENIHLHTEDSEQGKLPLLILSLKERSEEKRPAIVFMHGTNTNKEWLRPWLEAYASRGYVAIGLDSRYHGERADCKTAYRDALISSWRNGNTMPFIFDTVWDLIKLAEYLTQRDDIDPKKIGITGISLGGMHAWFAAAADTRYSVVVPLIGVQGFRWAIENDEWEARVNSIKPLFEEARIDLGKNIIDKELVEKVWNRIAPGLASKFDSPYSLPVIAPRPLYILNGANDPRCPLGGLELALKRAEKAYKETASPGNFKFKAEDGVGHEATSFMIKESSDWFDKFLKQEDMTT

SEQ ID NO: 86175 - protein, 351 aa, Arabidopsis thaliana
  peptide (1)..(351): Ceres Seq. ID no. 12687375
MFRLQFLRLLHSRRSPQVPLIADSSNPIENPLFQADVPSTTAIESCPKENIGKLKDMLKEENIHLHTEDSEQGKLPLLILSLKERSEEKRPAIVFMHGTNTNKEWLRPWLEAYASRGYVAIGLDSRYHGERADCKTAYRDALISSWRNGNTMPFIFDTVWDLIKLAEYLTQRDDIDPKKIGITGISLGGMHAWFAAAADTRYSVVVPLIGVQGFRWAIENDEWEARVNSIKPLFEEARIDLGKNIIDKELVEKVWNRIAPGLASKFDSPYSLPVIAPRPLYILNGANDPRCPLGGLELALKRAEKAYKETASPGNFKFKAEDGVGHEATSFMIKESSDWFDKFLKQEDMTT

SEQ ID NO: 86176 - protein, 295 aa, Arabidopsis thaliana; identical to SEQ ID NO: 24152
  peptide (1)..(295): Ceres Seq. ID no. 12687376

SEQ ID NO: 86177 - DNA, 1038 bp, Arabidopsis thaliana
  misc_feature (1)..(1038): Ceres Seq. ID no. 12687430
  misc_feature (1)..(1038): Ortholog of  Ceres SEQ ID NO 12620190 as cited in SEQ ID NO 66274
cccacttcttatccattcgaagcaatgaagccttcttctatcttcttcttcttcttcttcttcctcttctcatggccattctacttcactccctctctcttcatccaccaaaccctaaacctcaaaacccttataaacccaaaattctctcttcttctgctacctttcggagagatgtggtgcttagaacagcatcactctgtttcgtctccttcatctttcaaaaccaaattccagagtcattagctgatcctttgaagtctaccaaaccgttacgactcggcattgcgaacactaagtcttggttccagtactttggtagtgggttcgctattagggttcctcctgactttgaagacgtcaatgagcctgaggattactctgcgggattgtctctctatggtgacaaggcaaagccacaaactttcgccgcccggttccaaactcctgatggatcagaagttttgagtgtagtcattcgtccttcaaatcaacttaagatcactttcttagaggctaaagatatatctgatttgggatcattgaaggcagctgcaagactttttgttccaggtgcggcaacaatttactctgctcgtacaatcaaggtaaaggaagaagaaggtttaagaaattactacttctacgagtttggtagagatgaagaacgcatagctctagtagcctctgtgaacagagggaaggtttatatcgctggagcagctgcaccggaatccaaatggaaagacgatgagttgaagctccgatctgctgccatttctttcactattctatagtcaaaaggcagcttcttctaacagaaaactcgaaaatcgctctctagtcgactcgaaaatgtgggactaagaacaaactggccaaatgcgataaccagatattgttttgagacacatttgtcattccattttcgtttatctgtttatttttggttgatgtaatatgttcattgatgttctgtataatgagataacaaatcaagattctttgtaccgcgaaagtcctagaacgtgtttttac

SEQ ID NO: 86178 - protein, 264 aa, Arabidopsis thaliana
  peptide (1)..(264): Ceres Seq. ID no. 12687431
HFLSIRSNEAFFYLLLLLLLPLLMAILLHSLSLHPPNPKPQNPYKPKILSSSATFRRDVVLRTASLCFVSFIFQNQIPESLADPLKSTKPLRLGIANTKSWFQYFGSGFAIRVPPDFEDVNEPEDYSAGLSLYGDKAKPQTFAARFQTPDGSEVLSVVIRPSNQLKITFLEAKDISDLGSLKAAARLFVPGAATIYSARTIKVKEEEGLRNYYFYEFGRDEERIALVASVNRGKVYIAGAAAPESKWKDDELKLRSAAISFTIL

SEQ ID NO: 86179 - protein, 241 aa, Arabidopsis thaliana; identical to SEQ ID NO: 43398
  peptide (1)..(241): Ceres Seq. ID no. 12687432

SEQ ID NO: 86180 - DNA, 2189 bp, Arabidopsis thaliana
  misc_feature (1)..(2189): Ceres Seq. ID no. 12687448
  misc_feature (1)..(2189): Ortholog of  Ceres SEQ ID NO 14303276 as cited in SEQ ID NO 1264
  misc_feature (1)..(2189): Ortholog of  Ceres SEQ ID NO 12465083 as cited in SEQ ID NO 68239
aaaagagagatcgtacgcaaaagtttccgatatggctcgctcgtttggagctaacagtaccgttgtgttggcgatcatcttcttcggatgtttatttgcgttgtcctctgcaatagaagaggctacgaagttaggatcagtgatagggatagatcttggtactacttactcttgtgttggtgtttacaagaatggtcatgtcgaaattattgccaatgaccaaggaaaccgtattacaccttcatgggttggttttactgactctgaaagactcattggtgaggctgctaagaatcaagcagctgttaatccagagaggactgtcttcgacgttaagagattgatcgggcgaaaatttgaggataaggaggttcaaaaggataggaaacttgtaccttaccagattgtgaacaaggatggtaagccatacattcaagtcaagatcaaggatggtgagactaaggttttcagtcctgaggagattagtgctatgattctgactaagatgaaggagacagctgaagcctaccttggaaagaaaatcaaggacgctgttgtcactgttccagcttacttcaatgatgctcaaaggcaagctactaaggatgctggtgttattgctgggctcaatgttgctagaatcattaatgaacctactgctgctgctattgcctatggtcttgataagaagggtggcgagaagaatatccttgtgtttgatcttggtggtggtacttttgatgtcagtgtcttgaccattgataacggagtgtttgaggttctctccacaaatggtgacactcacttgggaggtgaggactttgaccacagggtgatggagtacttcatcaagttgattaagaagaagcaccagaaggacatcagcaaggacaacaaggctcttggtaagctccgaagggaatgtgagagggcaaagagagctctaagtagtcagcaccaagtccgtgtagagattgagtcactctttgatggtgttgatttttctgagccactcaccagagctcgtttcgaggagcttaacaatgatttgttcaggaagaccatgggacctgtgaagaaggccatggatgatgccggtctacagaagagccagatcgatgagattgtccttgttggtggaagcaccaggatcccaaaggttcagcaactgttgaaggacttctttgaaggtaaagagccaaacaagggtgtgaaccccgacgaggctgttgcctatggtgctgctgttcagggtggtattttgagcggagaaggcggtgatgagaccaaagatatccttcttcttgatgttgcgccactcactttgggtatcgagactgtaggaggagtgatgacaaagttgatcccgagaaacacggttattccaaccaagaaatctcaggttttcacaacgtaccaagaccagcagactaccgtctccattcaggtctttgaaggtgaacgaagtctcaccaaggactgcaggctactcgggaaattcgacctcaatggaatcccaccggccccaagaggaacccctcaaatcgaggtcacattcgaagtggacgccaacggtattcttaatgtgaaagcagaggacaaggcgagtggtaaatcagagaagattactatcacaaacgagaagggtcgtctgagccaagaagagattgaccggatggtgaaggaggcagaggagtttgcagaggaagacaagaaggtaaaggagaagatcgacgccaggaatgccctggagacatacgtgtacaacatgaagaaccaagtgaacgacaaggacaagcttgccgacaaattggaaggagatgaaaaggagaagatcgaagcagcgacgaaagaggctttggagtggctcgacgaaaaccaaaactcagagaaagaagagtacgacgagaagctcaaggaggtagaggcagtgtgtaacccaatcatcacagcagtttaccagagatctggcggagcaccaggtggtgcaggaggagaatcatcgactgaggaggaagatgagtctcacgatgagctctagatgtcttttgttattgttaatttgttaaaccatagagacgagttttgaggatgaaacgtcgttttttttgtatttggtttcctttttatatggatttttaggaaaaggggagagattaagtaacgtcccttctttagtctccctggac

SEQ ID NO: 86181 - protein, 679 aa, Arabidopsis thaliana
  peptide (1)..(679): Ceres Seq. ID no. 12687449
KERSYAKVSDMARSFGANSTVVLAIIFFGCLFALSSAIEEATKLGSVIGIDLGTTYSCVGVYKNGHVEIIANDQGNRITPSWVGFTDSERLIGEAAKNQAAVNPERTVFDVKRLIGRKFEDKEVQKDRKLVPYQIVNKDGKPYIQVKIKDGETKVFSPEEISAMILTKMKETAEAYLGKKIKDAVVTVPAYFNDAQRQATKDAGVIAGLNVARIINEPTAAAIAYGLDKKGGEKNILVFDLGGGTFDVSVLTIDNGVFEVLSTNGDTHLGGEDFDHRVMEYFIKLIKKKHQKDISKDNKALGKLRRECERAKRALSSQHQVRVEIESLFDGVDFSEPLTRARFEELNNDLFRKTMGPVKKAMDDAGLQKSQIDEIVLVGGSTRIPKVQQLLKDFFEGKEPNKGVNPDEAVAYGAAVQGGILSGEGGDETKDILLLDVAPLTLGIETVGGVMTKLIPRNTVIPTKKSQVFTTYQDQQTTVSIQVFEGERSLTKDCRLLGKFDLNGIPPAPRGTPQIEVTFEVDANGILNVKAEDKASGKSEKITITNEKGRLSQEEIDRMVKEAEEFAEEDKKVKEKIDARNALETYVYNMKNQVNDKDKLADKLEGDEKEKIEAATKEALEWLDENQNSEKEEYDEKLKEVEAVCNPIITAVYQRSGGAPGGAGGESSTEEEDESHDEL

SEQ ID NO: 86182 - protein, 669 aa, Arabidopsis thaliana; identical to SEQ ID NO: 25857
  peptide (1)..(669): Ceres Seq. ID no. 12687450

SEQ ID NO: 86183 - protein, 516 aa, Arabidopsis thaliana; identical to SEQ ID NO: 25858
  peptide (1)..(516): Ceres Seq. ID no. 12687451

SEQ ID NO: 86184 - DNA, 4806 bp, Arabidopsis thaliana
  misc_feature (1)..(4806): Ceres Seq. ID no. 12687456
  misc_feature (1)..(4806): Ortholog of  Ceres SEQ ID NO 14303434 as cited in SEQ ID NO 53963
atggaactgcctgacgttccggtgtggagaagagtcatgtccgttgtttgggattatataaaactgtttgcgttttctgcattctttgaggcgttgactttcaatattgatatcgaagaagaaagatcggagataatgatgaagaccggtgctgttgtttccaatccacgttcgagggtcaagtgggacgcattcctgagtttccaaagagacacgagccacaatttcacggatcgtctctatgaagcgcttgtcaaggaagagctccgggtttggaacgatgatttggaacgtgtggatcatgatcatgatcatgagctacgtccaagtctcgtggaggctatagaggactcggtggcttttgtcgtcgtcttatcccctaactacgctaactctcacctgcgcctcgaagaattagctaagctctgcgatctaaaatgtttgatggtaccgatcttttataaggttgaaccacgggaagttaaggaacagaacggtcctttcgaaaaggattttgaagagcattccaaaagatttggcgaggagaagatacaacgatggaagggagctatgactacggtcggaaatatctccggattcatttgcgggtatgagatccaattggagatggagactggcgttgttccgaataggctaaagtacagcgtctttctgagcttccgaggattcgacacgcgaaccaacttctgtgagcgtctgtatatcgctctcaacgaaaagcaaaatgtccgagtctttcgcgacaacgagggtatggaaaaaggtgataagatcgatccaagtctcttcgaagccattgaggactcggctgcctccgtcatcatcttatccactaactacgctaactcttcttggtgcctagatgaattagctttgctctgcgatcttagatcgtctctgaaacgtcccatgatacctatcttctatggagtcaatcccgaggatgtccgcaaacagagcggtgagttcaggaaagattttgaagagaaagcgaaaagttttgatgaggagacgattcagcgatggaagcgagctatgaatttagtcggaaatatccctggatatgtttgcacagcaaagactgttggagatgacaatgaaggcataaacagagagaaagtagatgacatgattgatctggtggtgaaaaaggttgtagctgctgtgaggaatagaccagagatagttgcagactacactgttggtctggaatcacctataaaggatttgatgaaactgttcaacactgaatccagttctggcatccaagtcatgggactttatggtatgggcggtattgggaagactacccttgcaaaagccttttataacaagatcattgttaacttcaaccgtcatcgagttttcatcgaaagcgttaggggaaaatcgtcagaccaagatggtttagtcaatctacaaaaaactctcatcaaggaacttttccgtttggtacctgaaatagaggatgttagcataggcctggaaaagataaaagagaatgttcatgagaagaagattattgtggttttggatgatgttgatcacatagaccaggttaatgcgctggttggtgaaacaagctggtatggtgaaggaagtcttatagtcatcactaccagagattctgagattctgagtaagctctcagtgaaccaacagtatgaggtcaagtgcttgactgaaccgcaggcgttgaagctctttagtttttattcactacgaaaagagaaaccaccaacacagggtttattggagttgtccaagaagattgccgaggtgacgggactgttgccactggctgttaaagtgtttggttctcatttttatgacaaggacgaaaacgaatggcaagttgaactagagaagctgaaaacccaacaagacaaacttcacggtgttctggctctgagtttcaaatctttagacgaagaagaaaagaagatattcctcgacattgcatgtctctttctcaaaatggatataacaaaagaagaagttgtcgacatactgaaaggatgtgggttaaacgccgaggctgctctccgtgttcttatacagaaatctctccttacaatcttgacagacgacactctgtggatgcatgatcagatcagagacatgggtaggcagatggttcataaagaaagcagcgatgatcctgagatgcggagtagactctgggatcgtggtgaaataatgaacgtattggactatatgaagggaacatcatccattcgaggaatcgtactagactttaataagaagtttgcgagggaccatactgcagatgaaattttctcgagtaatctacgcaacaatccgggtatctactctgtattcaattacctgaagaataagttagtaagatttccagcagaggaaaagccaaaaaggtctgaaatcaccattcccgtagaatcttttgcaccaatgaagaagttgagacttcttcagattaataacgtggaactggaaggagatcttaaacttctcccatctgaactcaagtggatacagtggaaaggtttcccattagaaaatctccctccggatattctttctaggcaacttggtgttcttgatctttcagagagtggagtaagacgagtcaagactttgccccgcaaaaggggggatgagaacttgaaagttgtaaatttgcgtggttgccacggcttagaagccattcctgatttatcaaaccataatgcactagaaaagcttgttcttgagcgatgcaaccttctggtgaaggttcctagatcagttggtaatctgggaaaattgcttcagctggaccttagaaggtgctcaagtctttctgaatttcttggggatgtttctggactgaagtgtcttgaaaaatttttcctctctggctgttcaaatctgagtgtgttaccagaaaacattggttccatgccatgtttgaaagagcttcttcttgatggaactgcgataagtaacttaccgtactctatttttcgcctccaaaagcttgaaaagcttagtctaatgggttgcaggtctattgaagagctaccttcgtgtgtaggatatttgacatcgctcgaagatttatatcttgatgatactgcattgcgaaaccttcctagttctattggagatctaaaaaatctccagaagctgcatctgatgcgctgcacgtccctttctacgattcctgagactataaataagctcatgtcattgaaggaattattcatcaatggaagcgcggtggaggagctacctatagaaaccggctcactcctatgtttgactgacctctctgcaggagattgcaaatttctgaaacaggttccgagttcaattggtggattaaattctcttctccaacttcagttggatagcaccccaattgaagctctaccagaagagattggagacttgcactttattcgacaacttgacttgagaaactgcaaatctctgaaggctctgcctaaaacaatcggaaagatggacacactctatagcttaaaccttgtaggctctaacattgaggaactgccggaagaatttggcaagctggaaaacctagttgaactgcgaatgaacaactgtaaaatgctcaaacggcttcctaaatcgtttggagacttgaaatctcttcaccgtctgtacatgcaggaaactttggtcgcggagttgccagaaagtttcggaaacctctcaaatttaatggtactggaaatgctgaagaagcctctttttagaatttctgagagtaatgttccaggtacaagcgaagaacctcgttttgtagaagtaccaaactctttctcaaagctcttgaagcttgaggaactagatgcttgcagctggagaatatcgggtaaaatccctgatgatcttgagaagctttcgtgtttgatgaaactgaatctggggaataattattttcatagtcttccgtctagcctcgtaaagttatcaaatctccaagaactttcattacgtgactgccgagagctcaagcgtcttccccctcttccatgtaaactggagcagctaaacctagcaaactgtttctcattggagagtgtatccgacctttcagagttaacgatcttgacggatctcaatctcacaaactgtgcgaaagtggttgatattccaggcctagagcacttgacggctctgaaaagattatacatgaccggatgtaactccaactactcccttgcagtaaagaaaagactttccaaggcttctttgaagatgatgcggaatctgagcttgcctggaaacagggtcccggactggttctcgcaaggccctgtcacattctcagctcaaccgaacagagagctcagaggtgtaatcattgctgttgttgtggctcttaatgatgaaaccgaagatgacgactatcagctgcctgatgtgatggaggttcaagcccaaattcataaacttgatcatcacaaatgcaccaacacattgcatctctccggagtgcctagaacaaataacgatcagcttcacatctgccgatactcagcttttcacccactggttacgatgttgaaagacgggtacaccatacaggtgatcaaacgaaacccaccaatcaaacaaggcgttgagctaaagatgcatggcattcatctcgtttacgagggggatgatgatttggaaggcagagaaaatacattacccgaggctcaacaaaccgtttctcagaaacttgccaattttttcagctcgtttgaagaaggtgaagccagcgcaaaaggtgattccactgttgcatga

SEQ ID NO: 86185 - protein, 1601 aa, Arabidopsis thaliana
  peptide (1)..(1601): Ceres Seq. ID no. 12687457
MELPDVPVWRRVMSVVWDYIKLFAFSAFFEALTFNIDIEEERSEIMMKTGAVVSNPRSRVKWDAFLSFQRDTSHNFTDRLYEALVKEELRVWNDDLERVDHDHDHELRPSLVEAIEDSVAFVVVLSPNYANSHLRLEELAKLCDLKCLMVPIFYKVEPREVKEQNGPFEKDFEEHSKRFGEEKIQRWKGAMTTVGNISGFICGYEIQLEMETGVVPNRLKYSVFLSFRGFDTRTNFCERLYIALNEKQNVRVFRDNEGMEKGDKIDPSLFEAIEDSAASVIILSTNYANSSWCLDELALLCDLRSSLKRPMIPIFYGVNPEDVRKQSGEFRKDFEEKAKSFDEETIQRWKRAMNLVGNIPGYVCTAKTVGDDNEGINREKVDDMIDLVVKKVVAAVRNRPEIVADYTVGLESPIKDLMKLFNTESSSGIQVMGLYGMGGIGKTTLAKAFYNKIIVNFNRHRVFIESVRGKSSDQDGLVNLQKTLIKELFRLVPEIEDVSIGLEKIKENVHEKKIIVVLDDVDHIDQVNALVGETSWYGEGSLIVITTRDSEILSKLSVNQQYEVKCLTEPQALKLFSFYSLRKEKPPTQGLLELSKKIAEVTGLLPLAVKVFGSHFYDKDENEWQVELEKLKTQQDKLHGVLALSFKSLDEEEKKIFLDIACLFLKMDITKEEVVDILKGCGLNAEAALRVLIQKSLLTILTDDTLWMHDQIRDMGRQMVHKESSDDPEMRSRLWDRGEIMNVLDYMKGTSSIRGIVLDFNKKFARDHTADEIFSSNLRNNPGIYSVFNYLKNKLVRFPAEEKPKRSEITIPVESFAPMKKLRLLQINNVELEGDLKLLPSELKWIQWKGFPLENLPPDILSRQLGVLDLSESGVRRVKTLPRKRGDENLKVVNLRGCHGLEAIPDLSNHNALEKLVLERCNLLVKVPRSVGNLGKLLQLDLRRCSSLSEFLGDVSGLKCLEKFFLSGCSNLSVLPENIGSMPCLKELLLDGTAISNLPYSIFRLQKLEKLSLMGCRSIEELPSCVGYLTSLEDLYLDDTALRNLPSSIGDLKNLQKLHLMRCTSLSTIPETINKLMSLKELFINGSAVEELPIETGSLLCLTDLSAGDCKFLKQVPSSIGGLNSLLQLQLDSTPIEALPEEIGDLHFIRQLDLRNCKSLKALPKTIGKMDTLYSLNLVGSNIEELPEEFGKLENLVELRMNNCKMLKRLPKSFGDLKSLHRLYMQETLVAELPESFGNLSNLMVLEMLKKPLFRISESNVPGTSEEPRFVEVPNSFSKLLKLEELDACSWRISGKIPDDLEKLSCLMKLNLGNNYFHSLPSSLVKLSNLQELSLRDCRELKRLPPLPCKLEQLNLANCFSLESVSDLSELTILTDLNLTNCAKVVDIPGLEHLTALKRLYMTGCNSNYSLAVKKRLSKASLKMMRNLSLPGNRVPDWFSQGPVTFSAQPNRELRGVIIAVVVALNDETEDDDYQLPDVMEVQAQIHKLDHHKCTNTLHLSGVPRTNNDQLHICRYSAFHPLVTMLKDGYTIQVIKRNPPIKQGVELKMHGIHLVYEGDDDLEGRENTLPEAQQTVSQKLANFFSSFEEGEASAKGDSTVA

SEQ ID NO: 86186 - protein, 1589 aa, Arabidopsis thaliana
  peptide (1)..(1589): Ceres Seq. ID no. 12687458
MSVVWDYIKLFAFSAFFEALTFNIDIEEERSEIMMKTGAVVSNPRSRVKWDAFLSFQRDTSHNFTDRLYEALVKEELRVWNDDLERVDHDHDHELRPSLVEAIEDSVAFVVVLSPNYANSHLRLEELAKLCDLKCLMVPIFYKVEPREVKEQNGPFEKDFEEHSKRFGEEKIQRWKGAMTTVGNISGFICGYEIQLEMETGVVPNRLKYSVFLSFRGFDTRTNFCERLYIALNEKQNVRVFRDNEGMEKGDKIDPSLFEAIEDSAASVIILSTNYANSSWCLDELALLCDLRSSLKRPMIPIFYGVNPEDVRKQSGEFRKDFEEKAKSFDEETIQRWKRAMNLVGNIPGYVCTAKTVGDDNEGINREKVDDMIDLVVKKVVAAVRNRPEIVADYTVGLESPIKDLMKLFNTESSSGIQVMGLYGMGGIGKTTLAKAFYNKIIVNFNRHRVFIESVRGKSSDQDGLVNLQKTLIKELFRLVPEIEDVSIGLEKIKENVHEKKIIVVLDDVDHIDQVNALVGETSWYGEGSLIVITTRDSEILSKLSVNQQYEVKCLTEPQALKLFSFYSLRKEKPPTQGLLELSKKIAEVTGLLPLAVKVFGSHFYDKDENEWQVELEKLKTQQDKLHGVLALSFKSLDEEEKKIFLDIACLFLKMDITKEEVVDILKGCGLNAEAALRVLIQKSLLTILTDDTLWMHDQIRDMGRQMVHKESSDDPEMRSRLWDRGEIMNVLDYMKGTSSIRGIVLDFNKKFARDHTADEIFSSNLRNNPGIYSVFNYLKNKLVRFPAEEKPKRSEITIPVESFAPMKKLRLLQINNVELEGDLKLLPSELKWIQWKGFPLENLPPDILSRQLGVLDLSESGVRRVKTLPRKRGDENLKVVNLRGCHGLEAIPDLSNHNALEKLVLERCNLLVKVPRSVGNLGKLLQLDLRRCSSLSEFLGDVSGLKCLEKFFLSGCSNLSVLPENIGSMPCLKELLLDGTAISNLPYSIFRLQKLEKLSLMGCRSIEELPSCVGYLTSLEDLYLDDTALRNLPSSIGDLKNLQKLHLMRCTSLSTIPETINKLMSLKELFINGSAVEELPIETGSLLCLTDLSAGDCKFLKQVPSSIGGLNSLLQLQLDSTPIEALPEEIGDLHFIRQLDLRNCKSLKALPKTIGKMDTLYSLNLVGSNIEELPEEFGKLENLVELRMNNCKMLKRLPKSFGDLKSLHRLYMQETLVAELPESFGNLSNLMVLEMLKKPLFRISESNVPGTSEEPRFVEVPNSFSKLLKLEELDACSWRISGKIPDDLEKLSCLMKLNLGNNYFHSLPSSLVKLSNLQELSLRDCRELKRLPPLPCKLEQLNLANCFSLESVSDLSELTILTDLNLTNCAKVVDIPGLEHLTALKRLYMTGCNSNYSLAVKKRLSKASLKMMRNLSLPGNRVPDWFSQGPVTFSAQPNRELRGVIIAVVVALNDETEDDDYQLPDVMEVQAQIHKLDHHKCTNTLHLSGVPRTNNDQLHICRYSAFHPLVTMLKDGYTIQVIKRNPPIKQGVELKMHGIHLVYEGDDDLEGRENTLPEAQQTVSQKLANFFSSFEEGEASAKGDSTVA

SEQ ID NO: 86187 - protein, 1556 aa, Arabidopsis thaliana; identical to SEQ ID NO: 73561
  peptide (1)..(1556): Ceres Seq. ID no. 12687459

SEQ ID NO: 86188 - DNA, 1791 bp, Arabidopsis thaliana
  misc_feature (1)..(1791): Ceres Seq. ID no. 12687548
  misc_feature (1)..(1791): Ortholog of  Ceres SEQ ID NO 15169092 as cited in SEQ ID NO 60430
  misc_feature (1)..(1791): Ortholog of  Ceres SEQ ID NO 15224940 as cited in SEQ ID NO 0
atgttaaaagaaaagaaaacattgcagaattatccatccgaatatgggttcgcttcagacaccgatagaaatgagaagctcatcgttgttggatacgtcctgcggatatttgctcagagagttacaggcaagtttgttttgatgagtattctgatcgatgcccgatggtcactgttttatgcacagatgatatgggatgaagttggagaagataagtttgagagagaaaaagtgttgcttgatatagagcaggaatgtgtagaggcttaccggagaaaagttgaccatgccaatgtttcgaggtctcgtctacatcaagagctggcagaatctgaagccgaactcacccattttcttttgtgcctcggtgaaagatcagtacctggaagaccggagaaaaagggaggaacactgagggagcagctggattctattgcgcctgcactgcgtgagatgaggcttaggaaagacgagagagtgaagcagttccgatctgtcaaaggggaaattcagaaaatatcagcagaaatagcaggtagatcgacatatgaagactcaactagaaagataaccatagatgacaacgatctttctaataaaaaacttgaggaatatcagaatgaactgcatagactccatgatgagaagaatgagagactacagaaggttgatatatacatatgcgccattcgagatctatcagcaacattgggaacagaagcatcaatgatcataacaaagattcacccaagcttgaacgacctctatggaatatccaaaaacatcagtgatgatatcttaaaaaagcttaatggcactgttgtgtctctggaagaggaaaagcacaagcgccttgaaaagcttcaccatcttggtagagctttatcgaacctgtggaatctgatggatgcatcttatgaagatcgtcaaaagttttttcatgtcattgatttactgtcgtccgcaccatcagacgtgtgtgctcctggaagcattacattggacataattcagcaggctgaggctgaagtcaagagactagatcaactgaaagcaagcagaatcaaagaacttttcatcaagaagcaaaaggaactagaagatacgtgcaacatgtcgcatatggagactccatcaacggaaatgggaaatatcacgaaccttgtagactctggggaagttgaccatgttgaccttctagccgccatggatgaaaagatagcaagagcaaaggaagaagcagcaagtagaaaaggaataattgaaaaagttgataggtggatgttggcaagtgatgaagagcgctggctagaagaatatgaccaggacgagaatcggtactcagtaagtagaaatgctcatcgaaacctaaggagagcagaacgggcacgcataacagtcagcaaaatctcaggattagtggaatctatattggttaaggctaagagctgggaggtagaaagacagaaagtcttcttatacaatgaggtacctcttgttgcaatgttgcaagaatacaataagctgaggcaggaaaaagaaatggagaagcaaaggctccgggaaatgaagaagatgagcattccacaacctgtggctgagggagataatttttacatggcaaggccagctagcagcaataggcgaatatcaaatcgaagcatgaatggtggatttggaagtggaagtcctataaacagaaagtattcaggaggattcaacaatactaacaataattacacagcacttggtacatctataagaagagaaagcagaaagagtgaggcataa

SEQ ID NO: 86189 - protein, 596 aa, Arabidopsis thaliana
  peptide (1)..(596): Ceres Seq. ID no. 12687549
MLKEKKTLQNYPSEYGFASDTDRNEKLIVVGYVLRIFAQRVTGKFVLMSILIDARWSLFYAQMIWDEVGEDKFEREKVLLDIEQECVEAYRRKVDHANVSRSRLHQELAESEAELTHFLLCLGERSVPGRPEKKGGTLREQLDSIAPALREMRLRKDERVKQFRSVKGEIQKISAEIAGRSTYEDSTRKITIDDNDLSNKKLEEYQNELHRLHDEKNERLQKVDIYICAIRDLSATLGTEASMIITKIHPSLNDLYGISKNISDDILKKLNGTVVSLEEEKHKRLEKLHHLGRALSNLWNLMDASYEDRQKFFHVIDLLSSAPSDVCAPGSITLDIIQQAEAEVKRLDQLKASRIKELFIKKQKELEDTCNMSHMETPSTEMGNITNLVDSGEVDHVDLLAAMDEKIARAKEEAASRKGIIEKVDRWMLASDEERWLEEYDQDENRYSVSRNAHRNLRRAERARITVSKISGLVESILVKAKSWEVERQKVFLYNEVPLVAMLQEYNKLRQEKEMEKQRLREMKKMSIPQPVAEGDNFYMARPASSNRRISNRSMNGGFGSGSPINRKYSGGFNNTNNNYTALGTSIRRESRKSEA

SEQ ID NO: 86190 - protein, 549 aa, Arabidopsis thaliana
  peptide (1)..(549): Ceres Seq. ID no. 12687550
MSILIDARWSLFYAQMIWDEVGEDKFEREKVLLDIEQECVEAYRRKVDHANVSRSRLHQELAESEAELTHFLLCLGERSVPGRPEKKGGTLREQLDSIAPALREMRLRKDERVKQFRSVKGEIQKISAEIAGRSTYEDSTRKITIDDNDLSNKKLEEYQNELHRLHDEKNERLQKVDIYICAIRDLSATLGTEASMIITKIHPSLNDLYGISKNISDDILKKLNGTVVSLEEEKHKRLEKLHHLGRALSNLWNLMDASYEDRQKFFHVIDLLSSAPSDVCAPGSITLDIIQQAEAEVKRLDQLKASRIKELFIKKQKELEDTCNMSHMETPSTEMGNITNLVDSGEVDHVDLLAAMDEKIARAKEEAASRKGIIEKVDRWMLASDEERWLEEYDQDENRYSVSRNAHRNLRRAERARITVSKISGLVESILVKAKSWEVERQKVFLYNEVPLVAMLQEYNKLRQEKEMEKQRLREMKKMSIPQPVAEGDNFYMARPASSNRRISNRSMNGGFGSGSPINRKYSGGFNNTNNNYTALGTSIRRESRKSEA

SEQ ID NO: 86191 - protein, 534 aa, Arabidopsis thaliana
  peptide (1)..(534): Ceres Seq. ID no. 12687551
MIWDEVGEDKFEREKVLLDIEQECVEAYRRKVDHANVSRSRLHQELAESEAELTHFLLCLGERSVPGRPEKKGGTLREQLDSIAPALREMRLRKDERVKQFRSVKGEIQKISAEIAGRSTYEDSTRKITIDDNDLSNKKLEEYQNELHRLHDEKNERLQKVDIYICAIRDLSATLGTEASMIITKIHPSLNDLYGISKNISDDILKKLNGTVVSLEEEKHKRLEKLHHLGRALSNLWNLMDASYEDRQKFFHVIDLLSSAPSDVCAPGSITLDIIQQAEAEVKRLDQLKASRIKELFIKKQKELEDTCNMSHMETPSTEMGNITNLVDSGEVDHVDLLAAMDEKIARAKEEAASRKGIIEKVDRWMLASDEERWLEEYDQDENRYSVSRNAHRNLRRAERARITVSKISGLVESILVKAKSWEVERQKVFLYNEVPLVAMLQEYNKLRQEKEMEKQRLREMKKMSIPQPVAEGDNFYMARPASSNRRISNRSMNGGFGSGSPINRKYSGGFNNTNNNYTALGTSIRRESRKSEA

SEQ ID NO: 86192 - DNA, 782 bp, Arabidopsis thaliana
  misc_feature (1)..(782): Ceres Seq. ID no. 12687555
  misc_feature (1)..(782): Ortholog of  Ceres SEQ ID NO 12563476 as cited in SEQ ID NO 53763
aaaagagtaattgaacaaaagaaagaaaaactgataatgaagggtcttcatctccacctcgtcctagtcaccatgacgatcgttgcctccatcgccgccgctgcaccggctgctcccggaggagctctggctgatgaatgcaaccaggattttcaaaaggtgactttgtgtttggactttgcgaccgggaaggcaacaattccgtctaagaagtgttgtgacgctgttgaagatatcaaagaaagagatccaaagtgtttgtgtttcgttatacaacaagcgaagacaggaggacaagccttgaaggatcttggtgttcaagaagacaaactcattcaactcccaacttcttgtcagctccacaacgctagcattaccaactgtccaaagcttctagggatttcacctagctcgccagacgcagccgtattcacaaacaatgccacaacaacaccggtggcaccagcaggaaagtctccggcaactccagctacgtccacggataagggaggatcagcttcagcaaaggatggtcacgcagtcgttgctctagccgtcgctttgatggccgtctcctttgtcttgaccttgcctagacatgtcacattagggatgtaatcttttcttatgaagttggttggtgcttttgtttttgtcccttttgtttcaaaacttatctttcaagtgtgtttctttgttcggacatttgttgtaatgagtcaacttcccactcaaatctgatatctctccgcaaatgagtaaatttatgctatttcattttc

SEQ ID NO: 86193 - protein, 205 aa, Arabidopsis thaliana; identical to SEQ ID NO: 29703
  peptide (1)..(205): Ceres Seq. ID no. 12687556

SEQ ID NO: 86194 - protein, 193 aa, Arabidopsis thaliana; identical to SEQ ID NO: 29704
  peptide (1)..(193): Ceres Seq. ID no. 12687557

SEQ ID NO: 86195 - protein, 181 aa, Arabidopsis thaliana; identical to SEQ ID NO: 29705
  peptide (1)..(181): Ceres Seq. ID no. 12687558

SEQ ID NO: 86196 - DNA, 1367 bp, Arabidopsis thaliana
  misc_feature (1)..(1367): Ceres Seq. ID no. 12687585
  misc_feature (1)..(1367): Ortholog of  Ceres SEQ ID NO 14307119 as cited in SEQ ID NO 54170
gatttgagaaatctttttcatcatcatcactcttcctccttccccattgcttagtgttggttcccaagtcccaacctgcttcaatttaggtcgcaaacgatctcaattattcacaatccaatcttttcttcaatcgatcttcgtttctgatcaagctaataataagctaggaagagagtttagtgaagtagtgaagatgcagaatcagattgatatggtgaaggatgaagcggaagtagctgcatcgatttcagcaattaagggtgaagaatggggaaattgttcatcagtggaagatcaaccatcttttcaagaagaagaagctgctaaagttccttatgttggtgataaggaacctctgtctagtttagctgcagagtatcaatcagggagtcccattttgctggagaagattaagatactggacagtcaatatatcggaatccggcgaacaagaggagatggaaattgcttcttccgaagttttatgttctcttaccttgagcatatattggaatcacaagatcgtgctgaagtcgatcgtatcaaggtcaatgttgagaaatgtagaaagactctgcaaaacttaggttatacagattttacatttgaggacttctttgcgttgttccttgagcaactagatgacattctccaaggaactgaagagtctataagctacgatgagctggttaacagaagtagagatcagtcagtctcagattacattgtaatgttctttaggtttgttactgctggtgatatacgaacgcgtgccgattttttcgagccttttataacaggcttatcaaatgcaacagtggatcagttttgcaagtcctcggtcgaaccaatgggggaagagagtgaccatattcacataactgctttgtcggacgcacttggtgttgcaatccgtgttgtgtatcttgaccgtagctcatgtgatagtgggggcgtcactgtgaatcatcatgactttgttcctgtgggcattaccaatgagaaagatgaagaagcttctgctccatttataaccttgctgtatcgtccaggccattacgatatcctctaccccaagccatcttgtaaggtatcagacaatgtggggaaatgatcatttgacatatcgtaaatcgcattaggagacgtttacaaaaaactgtggtaatatggattcatgtggatgaaaccatggaacaatcaacaattaccccatcgatttgcattttgattatgataaaagaaccctttttgcaacactatagaatggaccgtctctttactttgatattgccttgtatttttcatgaatcatgataatatcctttatgatatttctgatgagcaagtggaatcaaagggtt

SEQ ID NO: 86197 - protein, 306 aa, Arabidopsis thaliana; identical to SEQ ID NO: 39407
  peptide (1)..(306): Ceres Seq. ID no. 12687586

SEQ ID NO: 86198 - protein, 300 aa, Arabidopsis thaliana; identical to SEQ ID NO: 39408
  peptide (1)..(300): Ceres Seq. ID no. 12687587

SEQ ID NO: 86199 - protein, 209 aa, Arabidopsis thaliana; identical to SEQ ID NO: 39409
  peptide (1)..(209): Ceres Seq. ID no. 12687588

SEQ ID NO: 86200 - DNA, 1080 bp, Arabidopsis thaliana
  misc_feature (1)..(1080): Ceres Seq. ID no. 12687601
  misc_feature (1)..(1080): Ortholog of  Ceres SEQ ID NO 15178884 as cited in SEQ ID NO 0
atgggtttcattggtaagagtgtattagtgagtctcgtagcactttggtgcttcacttcctctgtcttcactgaagaagtgaaccataagactcaaaccccttctctagctcctgctcctgctccttaccaccacggccaccaccacccacaccctcctcatcaccaccaccctcaccctcaccctcacccccacccaccggccaaatctcctgttaaacccccggttaaggcaccagtgtctccaccagccaaacctccggttaagcccccggtttacccacccaccaaagccccggtgaaacccccaactaaacccccggtcaagccacctgtttccccaccagccaaacctccggttaagccaccagtttaccctccaaccaaagctccagttaagcccccaactaaacccccagtcaagccaccagtttaccctccaaccaaagccccggttaagcccccaactaaacccccagtcaagccaccagtttaccctccaaccaaagccccggttaagcccccaactaaacccccggtcaagccaccagtttccccaccagccaaacctccagttaagcccccggtttaccctcctaccaaagctccggttaagcctccggtttctcctccgacgaagccacctgttacaccgccggtttacccgcctaagttcaaccgtagtctagtcgccgttcggggtacggtttactgcaaaagctgcaagtacgctgctttcaacacactcttaggcgctaaacccatcgaaggtgctacggtgaaactagtgtgtaagagcaagaagaacataacagcggagacgacgacagacaagaacggatacttcttgttgttggctcctaagacggtgacgaacttcggtttcagaggatgtcgtgtgtatttggtgaaatcaaaggactacaaatgcagcaaagtctcaaagctcttcggtggagatgtcggcgctgaacttaagcctgagaaaaagctgggaaaatctacggtggtcgtcaacaagctcgtatacggtctctttaacgttggtccatttgcctttaacccgtcttgccccaaatga

SEQ ID NO: 86201 - protein, 359 aa, Arabidopsis thaliana
  peptide (1)..(359): Ceres Seq. ID no. 12687602
MGFIGKSVLVSLVALWCFTSSVFTEEVNHKTQTPSLAPAPAPYHHGHHHPHPPHHHHPHPHPHPHPPAKSPVKPPVKAPVSPPAKPPVKPPVYPPTKAPVKPPTKPPVKPPVSPPAKPPVKPPVYPPTKAPVKPPTKPPVKPPVYPPTKAPVKPPTKPPVKPPVYPPTKAPVKPPTKPPVKPPVSPPAKPPVKPPVYPPTKAPVKPPVSPPTKPPVTPPVYPPKFNRSLVAVRGTVYCKSCKYAAFNTLLGAKPIEGATVKLVCKSKKNITAETTTDKNGYFLLLAPKTVTNFGFRGCRVYLVKSKDYKCSKVSKLFGGDVGAELKPEKKLGKSTVVVNKLVYGLFNVGPFAFNPSCPK

SEQ ID NO: 86202 - DNA, 1170 bp, Arabidopsis thaliana
  misc_feature (1)..(1170): Ceres Seq. ID no. 12687637
  misc_feature (1)..(1170): Ortholog of  Ceres SEQ ID NO 13592961 as cited in SEQ ID NO 20522
  misc_feature (1)..(1170): Ortholog of  Ceres SEQ ID NO 12583469 as cited in SEQ ID NO 51031
  misc_feature (1)..(1170): Ortholog of  Ceres SEQ ID NO 15226378 as cited in SEQ ID NO 62741
  misc_feature (1)..(1170): Ortholog of  Ceres SEQ ID NO 13597389 as cited in SEQ ID NO 63426
  misc_feature (1)..(1170): Ortholog of  Ceres SEQ ID NO 14303071 as cited in SEQ ID NO 67114
  misc_feature (1)..(1170): Ortholog of  Ceres SEQ ID NO 13595998 as cited in SEQ ID NO 68161
  misc_feature (1)..(1170): Ortholog of  Ceres SEQ ID NO 14303635 as cited in SEQ ID NO 68503
atggctactctgttcatgaagctggtgagcttctttctaattctatctactttttgtctcactactgtgaactcggagccacagtgccataatttcaaatcgatcattagtttcggcgattctattgccgacactggaaacttgctcgccctctccgatcctaccaatctccctaaggtcgcgtttctaccgtacggagaaaccttcttccaccatccgaccggccgtttctcaaacggccgcctcatcatcgatttcattgctgaatttttgggttttccgcttgtgcctcctttttacggatctcaaaatgcaaattttgagaaaggagttaattttgcggttggaggagcaacggcactggaacgttcctttcttgaagagagaggcattcattttccttacaccaacgttagtttagccgtacagcttagtagcttcaaggagagtttgcctaacttatgtgtctctccttcagactgcagagatatgatagaaaattctttgattctcatgggagaaattggagggaatgactataactacgcattctttgtgggcaaaaacattgaagagatcaaagagctggttccgcttgttattgaaactatctcttctgcaatcacggagttgattggtatgggggggaaaacatttctggtgcccggagagttcccgctcggatgctcagtagcctatttgagtttatatcaaacatcaaacatagaagaatatgatcctctaacaggatgtttgaaatggctgaacaagttttcagaataccacgacgagcagcttcaagcagaactcaacagacttcagaagttgtaccctcatgtcaacatcatatacgctgactactacaacacactgttgcgtcttgcccaagaaccagccaaattcgggttcataagcagacccttgccggcttgctgcgctttaggaggaccgtttaacttcacattaggtaggaaacgtgggactcaagtacctgaatgttgtgacgatccttcaaagtatgtgagttgggatggtgttcatatgactgaagctgcatatagattgatggctgagggtatacttaagggaccttatgcgattcctcctttcgattggtcttgcctcagctctgaaattaagaacacacagaattctttgatgaacaactga

SEQ ID NO: 86203 - protein, 389 aa, Arabidopsis thaliana; identical to SEQ ID NO: 48604
  peptide (1)..(389): Ceres Seq. ID no. 12687638

SEQ ID NO: 86204 - protein, 384 aa, Arabidopsis thaliana; identical to SEQ ID NO: 48605
  peptide (1)..(384): Ceres Seq. ID no. 12687639

SEQ ID NO: 86205 - protein, 226 aa, Arabidopsis thaliana; identical to SEQ ID NO: 48606
  peptide (1)..(226): Ceres Seq. ID no. 12687640

SEQ ID NO: 86206 - DNA, 1409 bp, Arabidopsis thaliana
  misc_feature (1)..(1409): Ceres Seq. ID no. 12687641
  misc_feature (1)..(1409): Ortholog of  Ceres SEQ ID NO 13592961 as cited in SEQ ID NO 20522
  misc_feature (1)..(1409): Ortholog of  Ceres SEQ ID NO 12583469 as cited in SEQ ID NO 51031
  misc_feature (1)..(1409): Ortholog of  Ceres SEQ ID NO 15226378 as cited in SEQ ID NO 62741
  misc_feature (1)..(1409): Ortholog of  Ceres SEQ ID NO 13597389 as cited in SEQ ID NO 63426
  misc_feature (1)..(1409): Ortholog of  Ceres SEQ ID NO 15169639 as cited in SEQ ID NO 64624
  misc_feature (1)..(1409): Ortholog of  Ceres SEQ ID NO 13595998 as cited in SEQ ID NO 68161
  misc_feature (1)..(1409): Ortholog of  Ceres SEQ ID NO 14303635 as cited in SEQ ID NO 68503
aaaataaaaaaaaataagatagaaactcactcctgacctctcgcatggcgtctctagactctctagtcatctttcttttttctactctttttgtcactatcgtgagctcggaaacgccgtgcccgaatttcaagtcgatcatcagtttcggcgattcgattgcggacacgggaaacttggttggtctctctgatcgtaaccagcttcctgtgactgcgtttccaccgtacggagaaaccttcttccaccacccaaccggtcgttcctgcgatggccgcatcatcatggactttatcgctgaatttgtggggcttccttatgtgcctccgtactttggatctaaaaatagaaactttgataagggtgttaatttcgcggtagccggagcaacggcactgaaaagttcctttcttaagaagagaggaattcaaccacacaccaacgttagtttaggagttcagctaaagagcttcaaaaagagtttaccaaatttatgcggctcaccatcagactgtagagatatgattggaaatgctttgattctcatgggagagattggagggaatgattataatttcccattcttcaaccgcaaacccgttaaggaagttgaagagctggttccatttgtaatcgcttctatttcttctacaataacggagttgattggtatggggggtaaaacctttctagtgcccggagagttccctatcggatgctcagtagtctatttgacattatacaaaacatcaaacaaggacgaatacgatccttcaacaggatgtttgaaatggttgaacaagtttggcgaataccatagcgagaaacttaaggtggaactcaacagacttaggaagctctaccctcatgtcaacatcatatacgctgactactacaactctctcttgcgcatttttaaagaaccagccaaattcgggttcatggaaagacccttccctgcttgttgcggtataggaggaccgtacaacttcaacttcactaggaaatgtgggagtgtaggagtgaaatcttgtaaggatccttcaaagtatgtgggctgggatggcgttcatatgactgaggctgcatacaaatggatagctgatggaatactcaatggaccatatgcgaatcctccttttgatcggtcctgcctcagatctgagattaagaaggagtcattgtacaatcaaagtactctgacacaagcttgtgtgaaactttgacagacaaaagtgatgataagaatattccctctattccttattaatccaaattcaagcaaacaaatttgttgcaaaaaagatatgtttctaggtttctatgtatttttttattacttattgatgatgaattgtagaccttaattttctttttcttttttacttttattggtttaaatttgttaa

SEQ ID NO: 86207 - protein, 393 aa, Arabidopsis thaliana; identical to SEQ ID NO: 23923
  peptide (1)..(393): Ceres Seq. ID no. 12687642

SEQ ID NO: 86208 - protein, 313 aa, Arabidopsis thaliana; identical to SEQ ID NO: 23924
  peptide (1)..(313): Ceres Seq. ID no. 12687643

SEQ ID NO: 86209 - protein, 234 aa, Arabidopsis thaliana; identical to SEQ ID NO: 23925
  peptide (1)..(234): Ceres Seq. ID no. 12687644

SEQ ID NO: 86210 - DNA, 2343 bp, Arabidopsis thaliana
  misc_feature (1)..(2343): Ceres Seq. ID no. 12687655
  misc_feature (1)..(2343): Ortholog of  Ceres SEQ ID NO 12586556 as cited in SEQ ID NO 64667
  misc_feature (1)..(2343): Ortholog of  Ceres SEQ ID NO 13656797 as cited in SEQ ID NO 65756
  misc_feature (1)..(2343): Ortholog of  Ceres SEQ ID NO 13658498 as cited in SEQ ID NO 66557
  misc_feature (1)..(2343): Ortholog of  Ceres SEQ ID NO 15227053 as cited in SEQ ID NO 0
atgccactttgcaataatttctccggcaatctcgtcgtcgccgttgctctcttctttgccggcgccctatatatcttcaactaccaaaactatgtcaacactctgagaacaacacagtatccggtagatgagctagaggcggccttgtatacggcagccgccggaaacaacaagacggtgataataacgatggtgaacaaagcgtacgtgaaggaggttggaagagggagtacgatgcttgatctgtttttggagagtttttgggaaggagaagggactctaccacttttggaccatctaatggtggtggcagtggatcaaacggcctatgatcgctgccgtttcaagaggcttcactgctacaagatggagactgaagatggggttgacttagagggagagaaagtattcatgtcaaaagatttcattgagatgatgtggagaaggactcgcttgatcctagacgttcttcgtcgtggctacaatgttattttcacggacacggacgtgatgtggctaaggagtccattgtctcggttaaacatgagcttggatatgcaaataagcgtggacagaattaacgtgggaggacagttgatcaacacgggattctaccacgtccggtctaacaacaagaccatctcactcttccaaaaatggtacgacatgaggctaaactcgacggggatgaaggaacaagacgttctcaagaatctcctagactccggcttcttcaaccagttaggtctcaacgttggcttccttagtaccaccgaattcagcggtttttgccaagacagtcctcacatgggcgttgtcactaccgtccatgctaactgctgcctccacatccctgccaaagtctttgatctcactcgtgttcttcgtgattggaaacgctacaaagcgtcacatgtcaacagcaaatggagccctcatcttaagtctaatgtaagcatgagaatcttcagattcacgtcaatctcaccgcggattttgccgtcgaatcattactcaacattcccgttgaaacaaaacgtgtcttctctctcaccggcgaaatacattgcgggagctttacaagaacatatcaattctccggccccaaaagctggtaagaagatacacgcagatatcatcaaaactgggtttcaaccagatttgaatatatccatcaaactactcattcttcatttaaaatgcggttgcttgagttatgcacgccaagtgttcgacgaattacccaagccaacattatcggcttacaactacatgattagtgggtacttgaagcatggattggtaaaggaattacttcttctagttcaacggatgtcatactctggggaaaaggcagatgggtacacgctttccatggttctaaaggcttctaatagtcgtggctcgactatgatactgccgcgtagcttatgtaggttggtccatgcccggattataaaatgtgatgttgagctagatgatgtgttgattactgcacttgttgatacttatgtgaagagtgggaagttggagtctgcaaggactgtgtttgaaacaatgaaagatgagaatgttgtgtgttgtacatcaatgatctcaggttacatgaatcaaggttttgtagaggatgcggaagagattttcaatactaccaaagtgaaggatattgtagtttacaatgctatggtggaaggtttcagcagatcaggtgaaactgctaagagatcagttgacatgtatatttcgatgcaacgagctggtttccatccgaatatttcaactttcgctagcgtgattggagcgtgttcggttttgacgtcccatgaagttggtcagcaagtgcacgctcagattatgaagagtggagtttacacgcatatcaaaatggggagctctttgttagacatgtatgccaaatgcggagggatcaatgatgcaagaagagtctttgaccaaatgcaagagaaaaacgtattttcgtggacttcgatgattgatggatatggaaagaatggaaaccctgaggaagcactcgaactcttcactaggatgaaggaattccgtatagaacccaattatgtaacctttcttggtgctctctctgcttgttcacattctggtttagtcgataaaggttatgagatctttgagagcatgcagagagattattccatgaaaccaaagatggaacactatgcttgcatagttgatctcatgggacgagctggagatttgaataaagctttcgaatttgctagggcgatgccggaaaggcctgactcagatatttggctcttctcagttcttgtaatttgcatggtaatgttgaactcgcaagcatag

SEQ ID NO: 86211 - protein, 780 aa, Arabidopsis thaliana
  peptide (1)..(780): Ceres Seq. ID no. 12687656
MPLCNNFSGNLVVAVALFFAGALYIFNYQNYVNTLRTTQYPVDELEAALYTAAAGNNKTVIITMVNKAYVKEVGRGSTMLDLFLESFWEGEGTLPLLDHLMVVAVDQTAYDRCRFKRLHCYKMETEDGVDLEGEKVFMSKDFIEMMWRRTRLILDVLRRGYNVIFTDTDVMWLRSPLSRLNMSLDMQISVDRINVGGQLINTGFYHVRSNNKTISLFQKWYDMRLNSTGMKEQDVLKNLLDSGFFNQLGLNVGFLSTTEFSGFCQDSPHMGVVTTVHANCCLHIPAKVFDLTRVLRDWKRYKASHVNSKWSPHLKSNVSMRIFRFTSISPRILPSNHYSTFPLKQNVSSLSPAKYIAGALQEHINSPAPKAGKKIHADIIKTGFQPDLNISIKLLILHLKCGCLSYARQVFDELPKPTLSAYNYMISGYLKHGLVKELLLLVQRMSYSGEKADGYTLSMVLKASNSRGSTMILPRSLCRLVHARIIKCDVELDDVLITALVDTYVKSGKLESARTVFETMKDENVVCCTSMISGYMNQGFVEDAEEIFNTTKVKDIVVYNAMVEGFSRSGETAKRSVDMYISMQRAGFHPNISTFASVIGACSVLTSHEVGQQVHAQIMKSGVYTHIKMGSSLLDMYAKCGGINDARRVFDQMQEKNVFSWTSMIDGYGKNGNPEEALELFTRMKEFRIEPNYVTFLGALSACSHSGLVDKGYEIFESMQRDYSMKPKMEHYACIVDLMGRAGDLNKAFEFARAMPERPDSDIWLFSVLVICMVMLNSQA

SEQ ID NO: 86212 - protein, 717 aa, Arabidopsis thaliana
  peptide (1)..(717): Ceres Seq. ID no. 12687657
MVNKAYVKEVGRGSTMLDLFLESFWEGEGTLPLLDHLMVVAVDQTAYDRCRFKRLHCYKMETEDGVDLEGEKVFMSKDFIEMMWRRTRLILDVLRRGYNVIFTDTDVMWLRSPLSRLNMSLDMQISVDRINVGGQLINTGFYHVRSNNKTISLFQKWYDMRLNSTGMKEQDVLKNLLDSGFFNQLGLNVGFLSTTEFSGFCQDSPHMGVVTTVHANCCLHIPAKVFDLTRVLRDWKRYKASHVNSKWSPHLKSNVSMRIFRFTSISPRILPSNHYSTFPLKQNVSSLSPAKYIAGALQEHINSPAPKAGKKIHADIIKTGFQPDLNISIKLLILHLKCGCLSYARQVFDELPKPTLSAYNYMISGYLKHGLVKELLLLVQRMSYSGEKADGYTLSMVLKASNSRGSTMILPRSLCRLVHARIIKCDVELDDVLITALVDTYVKSGKLESARTVFETMKDENVVCCTSMISGYMNQGFVEDAEEIFNTTKVKDIVVYNAMVEGFSRSGETAKRSVDMYISMQRAGFHPNISTFASVIGACSVLTSHEVGQQVHAQIMKSGVYTHIKMGSSLLDMYAKCGGINDARRVFDQMQEKNVFSWTSMIDGYGKNGNPEEALELFTRMKEFRIEPNYVTFLGALSACSHSGLVDKGYEIFESMQRDYSMKPKMEHYACIVDLMGRAGDLNKAFEFARAMPERPDSDIWLFSVLVICMVMLNSQA

SEQ ID NO: 86213 - protein, 702 aa, Arabidopsis thaliana
  peptide (1)..(702): Ceres Seq. ID no. 12687658
MLDLFLESFWEGEGTLPLLDHLMVVAVDQTAYDRCRFKRLHCYKMETEDGVDLEGEKVFMSKDFIEMMWRRTRLILDVLRRGYNVIFTDTDVMWLRSPLSRLNMSLDMQISVDRINVGGQLINTGFYHVRSNNKTISLFQKWYDMRLNSTGMKEQDVLKNLLDSGFFNQLGLNVGFLSTTEFSGFCQDSPHMGVVTTVHANCCLHIPAKVFDLTRVLRDWKRYKASHVNSKWSPHLKSNVSMRIFRFTSISPRILPSNHYSTFPLKQNVSSLSPAKYIAGALQEHINSPAPKAGKKIHADIIKTGFQPDLNISIKLLILHLKCGCLSYARQVFDELPKPTLSAYNYMISGYLKHGLVKELLLLVQRMSYSGEKADGYTLSMVLKASNSRGSTMILPRSLCRLVHARIIKCDVELDDVLITALVDTYVKSGKLESARTVFETMKDENVVCCTSMISGYMNQGFVEDAEEIFNTTKVKDIVVYNAMVEGFSRSGETAKRSVDMYISMQRAGFHPNISTFASVIGACSVLTSHEVGQQVHAQIMKSGVYTHIKMGSSLLDMYAKCGGINDARRVFDQMQEKNVFSWTSMIDGYGKNGNPEEALELFTRMKEFRIEPNYVTFLGALSACSHSGLVDKGYEIFESMQRDYSMKPKMEHYACIVDLMGRAGDLNKAFEFARAMPERPDSDIWLFSVLVICMVMLNSQA

SEQ ID NO: 86214 - DNA, 1017 bp, Arabidopsis thaliana
  misc_feature (1)..(1017): Ceres Seq. ID no. 12687659
  misc_feature (1)..(1017): Ortholog of  Ceres SEQ ID NO 14313893 as cited in SEQ ID NO 54646
  misc_feature (1)..(1017): Ortholog of  Ceres SEQ ID NO 13656797 as cited in SEQ ID NO 65756
  misc_feature (1)..(1017): Ortholog of  Ceres SEQ ID NO 13658498 as cited in SEQ ID NO 66557
atgacttcctacaataactcctccggcagtctcgccctggccgttgctcttctatttgccggcgccttatatatctacttctcatcacgttcagcttctgatcccatctccggtctcctacaaaatgtcaacactagattgatacagtatccggtggacgagctagagacggtgctggacaaggcgtcgacagggaacaacaagacggtgataatagcaatggtgaacaaagcttacgtggaggaggatggaggagggaggacgatgctggatctgtttttggagagtttttgggaaggagaggggacacgcccgcttcttaaccatctgatggtggttgcagcggatcagacggcctacgatcgctgcctcttcaggaggctccattgctacaagatggatacggaaggggttgacttggagggagagaaagtatacatgtcaaaagatttcatagagatgatgtggaggaggactcgcttgctcctagacgtcctcagccgcggctaccatattattttcacggatacggacgtgatgtggctaaggagtcccttgtcccggctaaacgtgagcttggatatgcatataagcgtggacagaaataacgtgagaggacaattgatcaacacgggattctaccatgcccggtccaacaacaagaccatctccctcttccagaaatggtacgacatgaggctcaagtctttgggcatgaaggaacaagacgtcctcaagaatctcctagactctggcttctttaaccagcttggtctcaacgttggcttcctcagtacggccgaattcagcggtttctgccaagacagccctgacatgggggctgtcacaaccgtccacgccaactgttgcgtccacatccctgctaagatctctgatctcagtcttgctcttcgtgactggaaacgctacaaagcctcccgtgtcaacagcaggtggagcccccatgttgagtgcaggcgttcatggaaggacgttcattatgtccccaagctctga

SEQ ID NO: 86215 - protein, 338 aa, Arabidopsis thaliana
  peptide (1)..(338): Ceres Seq. ID no. 12687660
MTSYNNSSGSLALAVALLFAGALYIYFSSRSASDPISGLLQNVNTRLIQYPVDELETVLDKASTGNNKTVIIAMVNKAYVEEDGGGRTMLDLFLESFWEGEGTRPLLNHLMVVAADQTAYDRCLFRRLHCYKMDTEGVDLEGEKVYMSKDFIEMMWRRTRLLLDVLSRGYHIIFTDTDVMWLRSPLSRLNVSLDMHISVDRNNVRGQLINTGFYHARSNNKTISLFQKWYDMRLKSLGMKEQDVLKNLLDSGFFNQLGLNVGFLSTAEFSGFCQDSPDMGAVTTVHANCCVHIPAKISDLSLALRDWKRYKASRVNSRWSPHVECRRSWKDVHYVPKL

SEQ ID NO: 86216 - protein, 265 aa, Arabidopsis thaliana
  peptide (1)..(265): Ceres Seq. ID no. 12687661
MVNKAYVEEDGGGRTMLDLFLESFWEGEGTRPLLNHLMVVAADQTAYDRCLFRRLHCYKMDTEGVDLEGEKVYMSKDFIEMMWRRTRLLLDVLSRGYHIIFTDTDVMWLRSPLSRLNVSLDMHISVDRNNVRGQLINTGFYHARSNNKTISLFQKWYDMRLKSLGMKEQDVLKNLLDSGFFNQLGLNVGFLSTAEFSGFCQDSPDMGAVTTVHANCCVHIPAKISDLSLALRDWKRYKASRVNSRWSPHVECRRSWKDVHYVPKL

SEQ ID NO: 86217 - protein, 250 aa, Arabidopsis thaliana
  peptide (1)..(250): Ceres Seq. ID no. 12687662
MLDLFLESFWEGEGTRPLLNHLMVVAADQTAYDRCLFRRLHCYKMDTEGVDLEGEKVYMSKDFIEMMWRRTRLLLDVLSRGYHIIFTDTDVMWLRSPLSRLNVSLDMHISVDRNNVRGQLINTGFYHARSNNKTISLFQKWYDMRLKSLGMKEQDVLKNLLDSGFFNQLGLNVGFLSTAEFSGFCQDSPDMGAVTTVHANCCVHIPAKISDLSLALRDWKRYKASRVNSRWSPHVECRRSWKDVHYVPKL

SEQ ID NO: 86218 - DNA, 1818 bp, Arabidopsis thaliana
  misc_feature (1)..(1818): Ceres Seq. ID no. 12687674
  misc_feature (1)..(1818): Ortholog of  Ceres SEQ ID NO 15180350 as cited in SEQ ID NO 0
atggcacgtctttctctgtttctgtcttttctctctttgatagctttgatctctgttgtgaactgtcgtgttttaagttctttatctgagaaagactcaatcttggtctccgatggagttcaagacgggtccagctacgagtttctgagtcttgatccgccaaatgacattaccaagaatatgtgcgtacatgtctacgattttcttccatgtgcagacaatgttgcaggatatgtcttccaagttttctcgtttggttgcatcttgatcatcggtgaatacttcttgactaaaggaaggactaagctctttctcatattcgaggtcggtttttatggcggaatcatctttcctctccttactatgttcccacgaatcgcgcttattctctcgactggactggtgggaagccgcgaaatggcaagctcgagggttggtaatatcattggagttactgtgggatactctgtctttgctttgacaatacaatggggagcttgtattctctttggcttgtctggtactaaaccagaacagcccatagatttatctggtactaaaccagaacagcccacagaatcatctggagaaaattcagacgtaaagtgtccaagaatacaattttactggaaaaaactatcagattacgttttcgctagtgtagaagcagatataacgaacaagaaatcggcagggattatgctcttgactatactacctttcatattggtcacattttcagagatatctagttcacaatattggaatgacataatcgttttgatcacactcataatctctgcttctgcaacttttgcctactttttttattcggttttctttgtgaaaaactcgcagtattttgatagagacgaccaagcgaagagtttagatcacgcgaggtttgagctcatgtcagaagttcataagcatttacagattttttcacccaaaagccttataagagatggacaactaaatcaagagagcttgaaaagattgtttcaaaaaatcgatgcaaacggagatggaaagatccaagttgcagagttgaaagatcttacggtggagtttgggatgatagggagagtcaagtgtcacatagataagcttgtccatacattggttgatgatttcgacagggatggagatcgtgagatcgatgaggctgaattcgagattgggatcaaaaaatggctgaatcagtacaaattcagcttcgataccaccgtgccaccaagagaggaccaagctgagggagtaccaattctgaaggtagaaaagccagagcagagtcttgttaagaagctgctctcatggagaaccttgagagcttcccttgaagtcattttagggatgctagttgtcatctatcttgcaagacctttcatgatgaacatccaacttttgtcggaatcagctggagttccttctttctatgttgtctttgtagtcattcctttggcaagaaacctaaagaacaccttgtcagctcacttctgtcgcaagaaagacaaagcgaaaatcacatctgacacattttctgagatctacaaggatgttacaatgaacaatctcatgggaatttcaattatattggcaattgtgtacgcaagagaactagtttgggattacacaacagaagttctcattatagtgatcgttggtctcttaataggcttaccggcttatgtgagaacgacttatccattttggatatgtctcttggcctttgctctctacttcatctctcttgtcgtagtgtatttccatttcatgtctctcgaaaagggcacaactgtcacctttaacaaataa

SEQ ID NO: 86219 - protein, 605 aa, Arabidopsis thaliana
  peptide (1)..(605): Ceres Seq. ID no. 12687675
MARLSLFLSFLSLIALISVVNCRVLSSLSEKDSILVSDGVQDGSSYEFLSLDPPNDITKNMCVHVYDFLPCADNVAGYVFQVFSFGCILIIGEYFLTKGRTKLFLIFEVGFYGGIIFPLLTMFPRIALILSTGLVGSREMASSRVGNIIGVTVGYSVFALTIQWGACILFGLSGTKPEQPIDLSGTKPEQPTESSGENSDVKCPRIQFYWKKLSDYVFASVEADITNKKSAGIMLLTILPFILVTFSEISSSQYWNDIIVLITLIISASATFAYFFYSVFFVKNSQYFDRDDQAKSLDHARFELMSEVHKHLQIFSPKSLIRDGQLNQESLKRLFQKIDANGDGKIQVAELKDLTVEFGMIGRVKCHIDKLVHTLVDDFDRDGDREIDEAEFEIGIKKWLNQYKFSFDTTVPPREDQAEGVPILKVEKPEQSLVKKLLSWRTLRASLEVILGMLVVIYLARPFMMNIQLLSESAGVPSFYVVFVVIPLARNLKNTLSAHFCRKKDKAKITSDTFSEIYKDVTMNNLMGISIILAIVYARELVWDYTTEVLIIVIVGLLIGLPAYVRTTYPFWICLLAFALYFISLVVVYFHFMSLEKGTTVTFNK

SEQ ID NO: 86220 - protein, 545 aa, Arabidopsis thaliana
  peptide (1)..(545): Ceres Seq. ID no. 12687676
MCVHVYDFLPCADNVAGYVFQVFSFGCILIIGEYFLTKGRTKLFLIFEVGFYGGIIFPLLTMFPRIALILSTGLVGSREMASSRVGNIIGVTVGYSVFALTIQWGACILFGLSGTKPEQPIDLSGTKPEQPTESSGENSDVKCPRIQFYWKKLSDYVFASVEADITNKKSAGIMLLTILPFILVTFSEISSSQYWNDIIVLITLIISASATFAYFFYSVFFVKNSQYFDRDDQAKSLDHARFELMSEVHKHLQIFSPKSLIRDGQLNQESLKRLFQKIDANGDGKIQVAELKDLTVEFGMIGRVKCHIDKLVHTLVDDFDRDGDREIDEAEFEIGIKKWLNQYKFSFDTTVPPREDQAEGVPILKVEKPEQSLVKKLLSWRTLRASLEVILGMLVVIYLARPFMMNIQLLSESAGVPSFYVVFVVIPLARNLKNTLSAHFCRKKDKAKITSDTFSEIYKDVTMNNLMGISIILAIVYARELVWDYTTEVLIIVIVGLLIGLPAYVRTTYPFWICLLAFALYFISLVVVYFHFMSLEKGTTVTFNK

SEQ ID NO: 86221 - protein, 484 aa, Arabidopsis thaliana
  peptide (1)..(484): Ceres Seq. ID no. 12687677
MFPRIALILSTGLVGSREMASSRVGNIIGVTVGYSVFALTIQWGACILFGLSGTKPEQPIDLSGTKPEQPTESSGENSDVKCPRIQFYWKKLSDYVFASVEADITNKKSAGIMLLTILPFILVTFSEISSSQYWNDIIVLITLIISASATFAYFFYSVFFVKNSQYFDRDDQAKSLDHARFELMSEVHKHLQIFSPKSLIRDGQLNQESLKRLFQKIDANGDGKIQVAELKDLTVEFGMIGRVKCHIDKLVHTLVDDFDRDGDREIDEAEFEIGIKKWLNQYKFSFDTTVPPREDQAEGVPILKVEKPEQSLVKKLLSWRTLRASLEVILGMLVVIYLARPFMMNIQLLSESAGVPSFYVVFVVIPLARNLKNTLSAHFCRKKDKAKITSDTFSEIYKDVTMNNLMGISIILAIVYARELVWDYTTEVLIIVIVGLLIGLPAYVRTTYPFWICLLAFALYFISLVVVYFHFMSLEKGTTVTFNK

SEQ ID NO: 86222 - DNA, 1260 bp, Arabidopsis thaliana
  misc_feature (1)..(1260): Ceres Seq. ID no. 12687697
  misc_feature (1)..(1260): Ortholog of  Ceres SEQ ID NO 13662745 as cited in SEQ ID NO 66320
  misc_feature (1)..(1260): Ortholog of  Ceres SEQ ID NO 13660029 as cited in SEQ ID NO 67353
atggtttcctatcgtgctaccacagagacgatttccctggctttagaagccaacagctcggaggctattacgatactgtaccaggttttggaagacccttcttcatctcctgaggctatacggatcaaggagcaagcgattacaaacctttgtgatcgattgactgaagagaagagaggtgaggatctccggaaactgttgaccaagttgaggcctttcttttccttaatccccaaggcgaaaactgcgaaaatcgtcagaggaatcattgatgctgtggcaaagattcctggaacaactgatctccagatcactctctgcaaagagatggtcgaatggacccgcgctgagaagcgtactttcctcaggcagcgagtagaggctaggcttgcagctcttttgatggagaacaaggagtatgttgaagctttggcgttgttgagtactttggtaaaagaggttaggagattagatgataagctccttctggtcgacatagacttgctggagagcaaacttcacttctcattgagaaacttacccaaggcaaaagctgcactcactgcagctaggacagctgctaacgctatatatgtcccaccagctcaacaaggcacgatagatctgcagagtgggattcttcatgctgaagagaaagactacaaaaccggatacagttacttctttgaagcctttgagtccttcaacgctctcggagatccgagagcggttttcagtttgaagtacatgttactgtgcaagatcatggttagccaagctgatgatgttgcaggaataatctcctcaaaggctggactacagtacgttggccctgacctggatgccatgaaagcagtcgctgatgctcactcgaagaggtccttgaagttgtttgagaacgcactccgtgactacaaagcacagcttgaagatgacccaattgtccacaggcatctctcttctctctatgacacgcttctggagcaaaatctgtgtcgtttgatcgagcccttctcaagagttgagatagctcacattgctgagctcattggattgccgctcgaccatgtggaaaagaagctatctcagatgatactcgacaagaaatttgcaggtaccttggatcaaggagctggatgcctcatcatcttcgaagacccaaaggcagatgctatctactcggctaccctcgaaaccattgcaaacatggggaaggtcgtcgacagcctttatgtccggtctgccaaaatcatgtcctga

SEQ ID NO: 86223 - protein, 419 aa, Arabidopsis thaliana; identical to SEQ ID NO: 84568
  peptide (1)..(419): Ceres Seq. ID no. 12687698

SEQ ID NO: 86224 - protein, 310 aa, Arabidopsis thaliana; identical to SEQ ID NO: 84569
  peptide (1)..(310): Ceres Seq. ID no. 12687699

SEQ ID NO: 86225 - protein, 285 aa, Arabidopsis thaliana; identical to SEQ ID NO: 84570
  peptide (1)..(285): Ceres Seq. ID no. 12687700

SEQ ID NO: 86226 - DNA, 1782 bp, Arabidopsis thaliana
  misc_feature (1)..(1782): Ceres Seq. ID no. 12687723
  misc_feature (1)..(1782): Ortholog of  Ceres SEQ ID NO 15170885 as cited in SEQ ID NO 54326
  misc_feature (1)..(1782): Ortholog of  Ceres SEQ ID NO 14311609 as cited in SEQ ID NO 58341
atggggaaacagggatcaccgagaagtcctcgacctgaaaccatagataaagaagagaaatttgggaggagaagtttggattctttatctggtaatgatctcttactcggtagaagaatatatgcaagtgaagtttccaaggctcaaggatctaagcatgatcaaagcagtggtagtagcaacaaattttggaagaagcaacattcatggcttcgtaggaactttaagtcgatagttttgatgatctcagtcaccggtttcattttctgtatggattccattatggtttcgatctttcattccgatagtagagccgtggtgcaagacatttcaaggttgagcaatatgactttgcataagaatggagcagtagatgcttcaccagttcaaatgtatagccgtcttctaaacttagcttcggattctcttgcaaagaatgaattcaaacccgatacaccaaacttccgggaggaaagatcttcaaagtcatcacagtggaagccttgtgcagataataacaaagcagctgtggcattagagaggtctagagaattaagcaatggttacatcatggttagtgcaaatggaggccttaatcaacagcgcgtggctatctgtaacgctgttgcggttgctgctctgctcaacgcgactctagttcttcctcggtttctttacagcaatgtatggaaagatcctagccaatttggtgatatataccaagaggatcattttatcgagtatctgaaagatgaggtgaatatagtgaagaatcttcctcaacatctaaaatctactgataacaagaatctcagcttggttactgatacggagcttgtaaaagaggcaacaccagtcgattacatcgaacatgttcttcctttgttaaagaagtatggaatggttcatcttttcggatacgggaatcgcctcgggtttgatccattgccttttgacgttcagagattacgatgtaaatgcaactttcacgcgctgaaattcgcgcccaagattcaagaagcgggatctctgttggtgaaacggataagaagattcaaaacatcgcgtagagaagaagaaccgttgaagtatcttgctttgcatctaaggtttgaagaagacatggttgcttattctctatgcgattttggaggaggagaagccgagcgcaaagagcttcaagcttaccgtgaagatcatttccctcttctactcaaacgtttgaagaaatcaaagccagtgtccccagaagagttaagaaaaacgggcaagtgtccactaacaccagaggaagcaactctggttcttgctggtcttggattcaagagaaaaacatatatttacttagctggatctcaaatctatggaggctcttctcgtatgcttcctttaacaagactgtacccgaatatcgcgaccaaagaaactctccttacacctcaagaacttgcgccattcaagaacttctcttctcagctagctgcactagatttcatagcttgtatagcatcagatgtctttgcaatgactgattctgggagtcaactatcatccttagtgtctggatttagaaactactacggaaacggtcaggcaccaacattgagacctaacaagaagaggcttgcagcaatcttatcagacagtgaaacaataaagtggaagatttttgaagatcgtgtgagaaaaatggtagaggaaggccaaaagcttcgtactaggccttatggacgcagcatttatagacaaccgagatgtcctgagtgtatgtgtaaattttga

SEQ ID NO: 86227 - protein, 593 aa, Arabidopsis thaliana
  peptide (1)..(593): Ceres Seq. ID no. 12687724
MGKQGSPRSPRPETIDKEEKFGRRSLDSLSGNDLLLGRRIYASEVSKAQGSKHDQSSGSSNKFWKKQHSWLRRNFKSIVLMISVTGFIFCMDSIMVSIFHSDSRAVVQDISRLSNMTLHKNGAVDASPVQMYSRLLNLASDSLAKNEFKPDTPNFREERSSKSSQWKPCADNNKAAVALERSRELSNGYIMVSANGGLNQQRVAICNAVAVAALLNATLVLPRFLYSNVWKDPSQFGDIYQEDHFIEYLKDEVNIVKNLPQHLKSTDNKNLSLVTDTELVKEATPVDYIEHVLPLLKKYGMVHLFGYGNRLGFDPLPFDVQRLRCKCNFHALKFAPKIQEAGSLLVKRIRRFKTSRREEEPLKYLALHLRFEEDMVAYSLCDFGGGEAERKELQAYREDHFPLLLKRLKKSKPVSPEELRKTGKCPLTPEEATLVLAGLGFKRKTYIYLAGSQIYGGSSRMLPLTRLYPNIATKETLLTPQELAPFKNFSSQLAALDFIACIASDVFAMTDSGSQLSSLVSGFRNYYGNGQAPTLRPNKKRLAAILSDSETIKWKIFEDRVRKMVEEGQKLRTRPYGRSIYRQPRCPECMCKF

SEQ ID NO: 86228 - protein, 513 aa, Arabidopsis thaliana
  peptide (1)..(513): Ceres Seq. ID no. 12687725
MISVTGFIFCMDSIMVSIFHSDSRAVVQDISRLSNMTLHKNGAVDASPVQMYSRLLNLASDSLAKNEFKPDTPNFREERSSKSSQWKPCADNNKAAVALERSRELSNGYIMVSANGGLNQQRVAICNAVAVAALLNATLVLPRFLYSNVWKDPSQFGDIYQEDHFIEYLKDEVNIVKNLPQHLKSTDNKNLSLVTDTELVKEATPVDYIEHVLPLLKKYGMVHLFGYGNRLGFDPLPFDVQRLRCKCNFHALKFAPKIQEAGSLLVKRIRRFKTSRREEEPLKYLALHLRFEEDMVAYSLCDFGGGEAERKELQAYREDHFPLLLKRLKKSKPVSPEELRKTGKCPLTPEEATLVLAGLGFKRKTYIYLAGSQIYGGSSRMLPLTRLYPNIATKETLLTPQELAPFKNFSSQLAALDFIACIASDVFAMTDSGSQLSSLVSGFRNYYGNGQAPTLRPNKKRLAAILSDSETIKWKIFEDRVRKMVEEGQKLRTRPYGRSIYRQPRCPECMCKF

SEQ ID NO: 86229 - protein, 503 aa, Arabidopsis thaliana
  peptide (1)..(503): Ceres Seq. ID no. 12687726
MDSIMVSIFHSDSRAVVQDISRLSNMTLHKNGAVDASPVQMYSRLLNLASDSLAKNEFKPDTPNFREERSSKSSQWKPCADNNKAAVALERSRELSNGYIMVSANGGLNQQRVAICNAVAVAALLNATLVLPRFLYSNVWKDPSQFGDIYQEDHFIEYLKDEVNIVKNLPQHLKSTDNKNLSLVTDTELVKEATPVDYIEHVLPLLKKYGMVHLFGYGNRLGFDPLPFDVQRLRCKCNFHALKFAPKIQEAGSLLVKRIRRFKTSRREEEPLKYLALHLRFEEDMVAYSLCDFGGGEAERKELQAYREDHFPLLLKRLKKSKPVSPEELRKTGKCPLTPEEATLVLAGLGFKRKTYIYLAGSQIYGGSSRMLPLTRLYPNIATKETLLTPQELAPFKNFSSQLAALDFIACIASDVFAMTDSGSQLSSLVSGFRNYYGNGQAPTLRPNKKRLAAILSDSETIKWKIFEDRVRKMVEEGQKLRTRPYGRSIYRQPRCPECMCKF

SEQ ID NO: 86230 - DNA, 1140 bp, Arabidopsis thaliana
  misc_feature (1)..(1140): Ceres Seq. ID no. 12687769
  misc_feature (1)..(1140): Ortholog of  Ceres SEQ ID NO 13597268 as cited in SEQ ID NO 63929
  misc_feature (1)..(1140): Ortholog of  Ceres SEQ ID NO 13659840 as cited in SEQ ID NO 66970
  misc_feature (1)..(1140): Ortholog of  Ceres SEQ ID NO 13624708 as cited in SEQ ID NO 0
  misc_feature (1)..(1140): Ortholog of  Ceres SEQ ID NO 15180683 as cited in SEQ ID NO 0
atgaaggtggattttttagtcataaaggttgaaaaactatcttctttgagagttttttatttttttttatttttttttgagagcaaatatgtcgaagatcagaagattaaagatgcaaaattattgcaacttgactttgataccataagattagcaactaatgacttctctccttacaaccatcttggtgaaggtggtttcggtgcagtttataagggcgtccttgattccggggaagagatagctgtgaaaagattgtcaatgaaatcaggacaaggagacaatgagttcgtaaacgaagtctcattggttgcgaaacttcaacatcgtaatcttgttaggcttttaggtttctgttttaaaggagaagaacgacttctcatctatgagttctttaagaacacaagcctcgaaaagttcatatttgattctgatagaagaatgatcttagattgggaaaaacgttataggataatctcaggtgttgctcgaggtcttctctatctccatgaagattctcatttcaaaattattcatagagatatgaaagctagcaatgttctattggacgatgcaatgaatccgaaaatcgcagattttgggatggtaaaattgtttaatactgaccaaacaagtcagaccatgtttacaagcaaagttgcaggaacttacggttacatggctcctgagtatgcaatgagtgggcaattctcggtgaaaaccgacgtatttagtttcggtgtactagtccttgagatcattaaaggtaagaaaaacaattggtctccggaagaacaaagctcattattcctccttagctatgtgtggaaatgctggagagaaggagaagtgttgaacattgtggatccaagtttgattgaaacaagaggtctaagtgatgagatcaggaaatgcattcacattggtttgttgtgtgttcaggagaatccagggagtagaccaacaatggcttctattgttagaatgctcaatgcaaattctttcactttaccgagacccttgcaacccgctttttactcaggagttgtagactcatcgtcaagagacaacaatcatacaagaaacccgcgtattgcgtctttgaatgatgttacaattacggagttagatcctcgttga

SEQ ID NO: 86231 - protein, 379 aa, Arabidopsis thaliana
  peptide (1)..(379): Ceres Seq. ID no. 12687770
MKVDFLVIKVEKLSSLRVFYFFLFFFESKYVEDQKIKDAKLLQLDFDTIRLATNDFSPYNHLGEGGFGAVYKGVLDSGEEIAVKRLSMKSGQGDNEFVNEVSLVAKLQHRNLVRLLGFCFKGEERLLIYEFFKNTSLEKFIFDSDRRMILDWEKRYRIISGVARGLLYLHEDSHFKIIHRDMKASNVLLDDAMNPKIADFGMVKLFNTDQTSQTMFTSKVAGTYGYMAPEYAMSGQFSVKTDVFSFGVLVLEIIKGKKNNWSPEEQSSLFLLSYVWKCWREGEVLNIVDPSLIETRGLSDEIRKCIHIGLLCVQENPGSRPTMASIVRMLNANSFTLPRPLQPAFYSGVVDSSSRDNNHTRNPRIASLNDVTITELDPR

SEQ ID NO: 86232 - protein, 292 aa, Arabidopsis thaliana
  peptide (1)..(292): Ceres Seq. ID no. 12687771
MKSGQGDNEFVNEVSLVAKLQHRNLVRLLGFCFKGEERLLIYEFFKNTSLEKFIFDSDRRMILDWEKRYRIISGVARGLLYLHEDSHFKIIHRDMKASNVLLDDAMNPKIADFGMVKLFNTDQTSQTMFTSKVAGTYGYMAPEYAMSGQFSVKTDVFSFGVLVLEIIKGKKNNWSPEEQSSLFLLSYVWKCWREGEVLNIVDPSLIETRGLSDEIRKCIHIGLLCVQENPGSRPTMASIVRMLNANSFTLPRPLQPAFYSGVVDSSSRDNNHTRNPRIASLNDVTITELDPR

SEQ ID NO: 86233 - protein, 232 aa, Arabidopsis thaliana; identical to SEQ ID NO: 69398
  peptide (1)..(232): Ceres Seq. ID no. 12687772

SEQ ID NO: 86234 - DNA, 2028 bp, Arabidopsis thaliana
  misc_feature (1)..(2028): Ceres Seq. ID no. 12687773
  misc_feature (1)..(2028): Ortholog of  Ceres SEQ ID NO 13655640 as cited in SEQ ID NO 63844
  misc_feature (1)..(2028): Ortholog of  Ceres SEQ ID NO 13597268 as cited in SEQ ID NO 63929
  misc_feature (1)..(2028): Ortholog of  Ceres SEQ ID NO 13659840 as cited in SEQ ID NO 66970
  misc_feature (1)..(2028): Ortholog of  Ceres SEQ ID NO 15180683 as cited in SEQ ID NO 0
atgactagttcttgttctttgtctcgaccacaacacttgttctttttcttcttcttgttcgtcccatttcttagcttaggacaacaaatctccgtcgacataaacagtgctatatgggaatttccctcgaatccattatgtttatcccaacaaagcaactttgccaaatcatcccaattctccaaaaacctagacagtcttgtctcttcgatcccttctctcaagtccaacacttacaacttctacagtctctctgtcggaagtatctcggatcaagaacgagtcgaggccatcgggatctgcaacagagtagtcaatcgagtagattgccttaactgtattgctcaagccgcagtgaatctaaccacaatgtactgcccacaacataggggagcttacgtgcgagccacgaaatgtatgtttcgttactcagacaaacccattttcgggaaactcgaaacgagtcctgttctggaagcaccaaatccgagcaatgctacgggagatagaaacgagtttattcggttgcagagcgagttacttaaccgactcagatccatggctgcatcaggtggctctaagaggaagtatgctcaaggaactgatcctggctctccaccttacaccacattctttggtgccgtgcagtgcacgccggatttatctgagaaagactgcaacgactgtctctcttatggtttcagtaacgcgaccaaaggaagagttggtatcaggtggttttgtccaagctgtaattttcagatagagagtgacttgagattcttccttctcgactccgagtatgagcctgatccaaaaccagtgtatgtcttgacaaatttaatcttagcaggaaatgacaaagtaaaaatcattattgccaccgtttgctctgttattggttttgctataatcgcagtctttctttacttctttatgacaaggaacagaagaacggcaaaacagagacatgaaggcaaagatcttgaagagcttatgattaaagatgcacaattattgcaacttgactttgataccataagattagcaactaatgacttctctcgtgacaatcaacttggagaaggtggcttcggtgcagtttataagggtgttcttgattatggggaagagatagctgtgaaaagattgtcaatgaaatcaggacaaggagacaatgagttcataaacgaagtctcattggttgcaaaactccaacatcgtaaccttgttaggctcttaggtttctgcttacaaggagaagaacgaattctcatctatgagttcttcaagaacacaagcctagaccattacatatttgattctaataggagaatgatcttagattgggaaacacgttataggattatctcaggtgttgctagaggtcttctctatctccatgaagattctcgtttcaagattgttcatagagatatgaaagccagcaatgttctattggacgatgcaatgaatccgaaaatcgcggattttggaatggcaaagttgtttgatactgaccaaacaagtcagaccaggtttacaagcaaagttgcaggaacctacggttacatggctccagagtatgcaatgagtggcgaattctcggtaaaaaccgatgtatttagcttcggtgtactagtccttgagattattaaaggtaagaaaaacaattggtctccagaagaagacagctcattattcctccttagctatgtatggaagagctggagagaaggggaagtgttaaacattgtggatccaagtttggttgaaacaataggtgtcagtgatgaaatcatgaaatgcattcacattggtttgttgtgtgttcaggagaatgcagagagtagaccaacaatggcttctgttgttgtaatgctcaatgcaaattctttcactttaccgagaccctcgcaacccgcattttactcgggagatggagaatcattgtcaagagacaaaaatcagataaatcatattgcatctttgaatgatgttacaattaccgagttcgatgctcgttaa

SEQ ID NO: 86235 - protein, 675 aa, Arabidopsis thaliana
  peptide (1)..(675): Ceres Seq. ID no. 12687774
MTSSCSLSRPQHLFFFFFLFVPFLSLGQQISVDINSAIWEFPSNPLCLSQQSNFAKSSQFSKNLDSLVSSIPSLKSNTYNFYSLSVGSISDQERVEAIGICNRVVNRVDCLNCIAQAAVNLTTMYCPQHRGAYVRATKCMFRYSDKPIFGKLETSPVLEAPNPSNATGDRNEFIRLQSELLNRLRSMAASGGSKRKYAQGTDPGSPPYTTFFGAVQCTPDLSEKDCNDCLSYGFSNATKGRVGIRWFCPSCNFQIESDLRFFLLDSEYEPDPKPVYVLTNLILAGNDKVKIIIATVCSVIGFAIIAVFLYFFMTRNRRTAKQRHEGKDLEELMIKDAQLLQLDFDTIRLATNDFSRDNQLGEGGFGAVYKGVLDYGEEIAVKRLSMKSGQGDNEFINEVSLVAKLQHRNLVRLLGFCLQGEERILIYEFFKNTSLDHYIFDSNRRMILDWETRYRIISGVARGLLYLHEDSRFKIVHRDMKASNVLLDDAMNPKIADFGMAKLFDTDQTSQTRFTSKVAGTYGYMAPEYAMSGEFSVKTDVFSFGVLVLEIIKGKKNNWSPEEDSSLFLLSYVWKSWREGEVLNIVDPSLVETIGVSDEIMKCIHIGLLCVQENAESRPTMASVVVMLNANSFTLPRPSQPAFYSGDGESLSRDKNQINHIASLNDVTITEFDAR

SEQ ID NO: 86236 - protein, 552 aa, Arabidopsis thaliana
  peptide (1)..(552): Ceres Seq. ID no. 12687775
MYCPQHRGAYVRATKCMFRYSDKPIFGKLETSPVLEAPNPSNATGDRNEFIRLQSELLNRLRSMAASGGSKRKYAQGTDPGSPPYTTFFGAVQCTPDLSEKDCNDCLSYGFSNATKGRVGIRWFCPSCNFQIESDLRFFLLDSEYEPDPKPVYVLTNLILAGNDKVKIIIATVCSVIGFAIIAVFLYFFMTRNRRTAKQRHEGKDLEELMIKDAQLLQLDFDTIRLATNDFSRDNQLGEGGFGAVYKGVLDYGEEIAVKRLSMKSGQGDNEFINEVSLVAKLQHRNLVRLLGFCLQGEERILIYEFFKNTSLDHYIFDSNRRMILDWETRYRIISGVARGLLYLHEDSRFKIVHRDMKASNVLLDDAMNPKIADFGMAKLFDTDQTSQTRFTSKVAGTYGYMAPEYAMSGEFSVKTDVFSFGVLVLEIIKGKKNNWSPEEDSSLFLLSYVWKSWREGEVLNIVDPSLVETIGVSDEIMKCIHIGLLCVQENAESRPTMASVVVMLNANSFTLPRPSQPAFYSGDGESLSRDKNQINHIASLNDVTITEFDAR

SEQ ID NO: 86237 - protein, 536 aa, Arabidopsis thaliana
  peptide (1)..(536): Ceres Seq. ID no. 12687776
MFRYSDKPIFGKLETSPVLEAPNPSNATGDRNEFIRLQSELLNRLRSMAASGGSKRKYAQGTDPGSPPYTTFFGAVQCTPDLSEKDCNDCLSYGFSNATKGRVGIRWFCPSCNFQIESDLRFFLLDSEYEPDPKPVYVLTNLILAGNDKVKIIIATVCSVIGFAIIAVFLYFFMTRNRRTAKQRHEGKDLEELMIKDAQLLQLDFDTIRLATNDFSRDNQLGEGGFGAVYKGVLDYGEEIAVKRLSMKSGQGDNEFINEVSLVAKLQHRNLVRLLGFCLQGEERILIYEFFKNTSLDHYIFDSNRRMILDWETRYRIISGVARGLLYLHEDSRFKIVHRDMKASNVLLDDAMNPKIADFGMAKLFDTDQTSQTRFTSKVAGTYGYMAPEYAMSGEFSVKTDVFSFGVLVLEIIKGKKNNWSPEEDSSLFLLSYVWKSWREGEVLNIVDPSLVETIGVSDEIMKCIHIGLLCVQENAESRPTMASVVVMLNANSFTLPRPSQPAFYSGDGESLSRDKNQINHIASLNDVTITEFDAR

SEQ ID NO: 86238 - DNA, 1626 bp, Arabidopsis thaliana
  misc_feature (1)..(1626): Ceres Seq. ID no. 12687825
  misc_feature (1)..(1626): Ortholog of  Ceres SEQ ID NO 13654989 as cited in SEQ ID NO 63117
  misc_feature (1)..(1626): Ortholog of  Ceres SEQ ID NO 13584744 as cited in SEQ ID NO 69137
atgtctatattcaatcctgattcaatcaacaacgagctatcgaaaccaacatcgatctttggtctaaagctttgggtcgtcatcggaattttactaggatctcttatagtcatcgctctcttctttctctccctctgtttaacctctcgccggagaaaccgtaagccacgtcacgccgatttcgcatccgcagccgtagcaacgccgccgatttcaaaggagattcaggagatcgttagacctcctgcgcaagaccattgccatccgacgcagcccgttgcggcggagattcaagtggatatagggaagaccgagcaccgtgttgtgttctcggatcgagtctcgagtggtgaaagcagaggaacggttagtgaaacggcgtcgtattcagggagtggttgtgttggacctgaggtttcgcatcttggttggggaagatggtatactcttagagagcttgaagcagctactaatggattgtgtgaagagaatgtgatcggagaaggaggttatgggattgtttatagtgggattttaactgatggaactaaagtcgctgtcaagaatctgcttaacaacaggggtcaagctgagaaggagtttagagtggaagtggaagctatcgggcgtgtaaggcataagaatctcgttaggctattaggatactgcgtcgaaggagcatacaggatgctcgtgtatgactacgtcgataatggcaacttggagcaatggattcatggggatgttggtgataaaagtccgttgacttgggatattcgtatgaacataatactttgcatggcgaaaggattggcctatctgcatgagggtcttgaaccgaaagtcgttcatcgggacataaaatctagtaatattttgcttgatcgtcaatggaatgctaaggtatcagattttggacttgctaagctcttgttctccgagagcagctacgtgacaacccgagtaatgggaacttttggatatgttgcgcctgagtatgcttgcaccggaatgttgacagaaaagagtgatatctatagttttgggatattaatcatggagataatcaccggaagaaatcctgtcgattatagtcgacctcaaggagaggtgaatttggttgagtggctgaaaacaatggttggaaaccgaaggtctgaggaagtagtcgatccaaaaatacccgaaccgcccacttcaaaagctcttaaacgcgtgttgctcgtcgcgctgcgttgtgtggatccggacgcgaataagagacctaaaatgggtcatattatacacatgcttgaagctgaagacttgttctatcgtgacaatatgaaaaggatcttttgttcatatttattgcatggggaaaacgacatctttgctggcttagaagaagcttcagctgatgacacatacactgataatctgtggaatagttacatgaaagacgagggatttgaacggtttgggattccatccaagaggggaagagactgggaagacaatgatttatcacttaaccaactgttcatgaagccttgtagcagtcgttcaagaaaaaattgtgatgaaccatctttggaagctgttgcatcaccagataatcatgatcacggagagaatatgcattag

SEQ ID NO: 86239 - protein, 541 aa, Arabidopsis thaliana
  peptide (1)..(541): Ceres Seq. ID no. 12687826
MSIFNPDSINNELSKPTSIFGLKLWVVIGILLGSLIVIALFFLSLCLTSRRRNRKPRHADFASAAVATPPISKEIQEIVRPPAQDHCHPTQPVAAEIQVDIGKTEHRVVFSDRVSSGESRGTVSETASYSGSGCVGPEVSHLGWGRWYTLRELEAATNGLCEENVIGEGGYGIVYSGILTDGTKVAVKNLLNNRGQAEKEFRVEVEAIGRVRHKNLVRLLGYCVEGAYRMLVYDYVDNGNLEQWIHGDVGDKSPLTWDIRMNIILCMAKGLAYLHEGLEPKVVHRDIKSSNILLDRQWNAKVSDFGLAKLLFSESSYVTTRVMGTFGYVAPEYACTGMLTEKSDIYSFGILIMEIITGRNPVDYSRPQGEVNLVEWLKTMVGNRRSEEVVDPKIPEPPTSKALKRVLLVALRCVDPDANKRPKMGHIIHMLEAEDLFYRDNMKRIFCSYLLHGENDIFAGLEEASADDTYTDNLWNSYMKDEGFERFGIPSKRGRDWEDNDLSLNQLFMKPCSSRSRKNCDEPSLEAVASPDNHDHGENMH

SEQ ID NO: 86240 - protein, 312 aa, Arabidopsis thaliana
  peptide (1)..(312): Ceres Seq. ID no. 12687827
MLVYDYVDNGNLEQWIHGDVGDKSPLTWDIRMNIILCMAKGLAYLHEGLEPKVVHRDIKSSNILLDRQWNAKVSDFGLAKLLFSESSYVTTRVMGTFGYVAPEYACTGMLTEKSDIYSFGILIMEIITGRNPVDYSRPQGEVNLVEWLKTMVGNRRSEEVVDPKIPEPPTSKALKRVLLVALRCVDPDANKRPKMGHIIHMLEAEDLFYRDNMKRIFCSYLLHGENDIFAGLEEASADDTYTDNLWNSYMKDEGFERFGIPSKRGRDWEDNDLSLNQLFMKPCSSRSRKNCDEPSLEAVASPDNHDHGENMH

SEQ ID NO: 86241 - protein, 281 aa, Arabidopsis thaliana
  peptide (1)..(281): Ceres Seq. ID no. 12687828
MNIILCMAKGLAYLHEGLEPKVVHRDIKSSNILLDRQWNAKVSDFGLAKLLFSESSYVTTRVMGTFGYVAPEYACTGMLTEKSDIYSFGILIMEIITGRNPVDYSRPQGEVNLVEWLKTMVGNRRSEEVVDPKIPEPPTSKALKRVLLVALRCVDPDANKRPKMGHIIHMLEAEDLFYRDNMKRIFCSYLLHGENDIFAGLEEASADDTYTDNLWNSYMKDEGFERFGIPSKRGRDWEDNDLSLNQLFMKPCSSRSRKNCDEPSLEAVASPDNHDHGENMH

SEQ ID NO: 86242 - DNA, 5229 bp, Arabidopsis thaliana
  misc_feature (1)..(5229): Ceres Seq. ID no. 12687851
  misc_feature (1)..(5229): Ortholog of  Ceres SEQ ID NO 15168935 as cited in SEQ ID NO 209
atgtcacaagactctgccctagacgccttcgttagaataaccattggattacgtgtgatcttgctgagttcccaggacctaagtatagaccaaagaatcccttactctgcaaaaggaaaagacatagctcacagtcaaaaatcttactcaaattatgccagtcaaaaccgctcaagggactctggggaaagagctatgtcagtttatgaaaatgataggaggtcagaaagaagcttctcacctccacctaagaagcgaataagagcacccaccctagacaactcggagctgatccaagagaactcgcttacccttatgggaatactcacaaatccctcagcccagcgtttgtggtccctcatacctttcctatcaaacagatggaatcttaagggcaaagctactggatctgacctaggcagaggttgtttccagttcagatttgaatatgaagaggacctccagaaagtccttgataatagaccctaccactttggtcagtggatggtcattctccagaggtggaaaccagtgatctcaccttccttcccctcagaaatccctttttggattgaactgcagggccttccaatgcactactggataaaagaaatgctttatgccataggcaaggaagctggggaggtagtggaccatgaaatttcaccagctgcagcaaagataaaagtcctcattaacgggctccaacctattacaaaagaaacagtggtggaattccctgatggtagtgaagcattggtttacctggaatacaaaaatctgaagagccattgtcatcattgtcaacgcctctctcatgctgaagctgattgtcctggcctaaagaaagtagaggcggtaagcaaaacatcaaagctcactccccctgagcagcctccccaaaattatgcagagagaaacaaaggtagtaaacaaaatcccagggcatcccacgacaagttactttcctctcactcgggtttatctagacccctcggtgattacaatctctacaagagaaaatcagatggcaggaatgggagaagtgattacaggctaagaccaggagtacaaggctatgtttccccaaatagcagagcatcctctcctagacacactccttccctcagaagagaaccatcaagaagttacagtagggaccattataacaggcccaacccaaactttcaatggcgagaaaaacaagttccacgagaacttacctggcaggagatgtctgaaacttcgagaacaagacgcccttcactggagagagaagtggttactgaatcctcaaaccccctgccagtacctatccctacaaaagaagcaatcatgggtgaactgcgggaagtaactgttcagtacataagctgcgcagaccccactgaaagtatggccaggaaacagagagtgttacaaggtgaagccagaggtttgatgttggagactgcctatcagatactcaccgcggctacttctgctaatcaactactcctccaaaacaccactgcaaatgatcctgaaccacccttaagcccttcccaggacttaccaatccatccagctgagctcccacctgcgcctgagccaagccagaaaaagaaaagaggaagacccccaattaacaaaccatcaaacaaaccagggaataaaagtcctttaagactggcaggtgcgaaatccagcaagagaaacatgttgggagtccaaaactctcctaaagggaggacagtcacagatactgcaggaccttctactggtgatgctagagaaataatcaaaaagaaacaatctaaacagcagaaccctccaagatccaacaactctctgcttgcgtcgagttctacacctcctactcataccatcatccctgcaatggtcaaaaagaaggtggattttcaaattcacagaatcaaggagatgcagaagaccatctccccggatataattttcctcatggagacaaaaaactcaaatgattttgttctcaaggcgcttaaatgtttaaattacacggaatctctgctagttgctccccatagtcctggtggtggggggctagctcttccctggaacacaaacatagccatcaaagttctatcagagagtcagaactttattgatactaccattgaagcggaagggcgtaccttctttgcaactttcatttatggtgaacctgataaaaccaaaaggaaagccatctgggacaagctaacggagcgtgggaaagatagaattgatccctatcaggtggtcctacacgccctgaaggatcctttgtggacctcagaacctttatgtccacttgtgacctctttgatcttcgccactcaggaggttacagagctagtggaaaagaactggatgaaagatgtctatgaagaggttgagaaaaaaataagtagatgtagacacgctattattacctggagccgggaaaagcaccttaatagccaaaaacagattcaaaattgccgtgctaagcttgaggaagccatgtcaagcctagattctgaaccaacccttattaactccatcaatgaagagctagcagctgcttacaaagaggaagaagaacactggaaacagcgaagtagacagttatggctcactctgggtgacaaaaacactggattttttcacgcttgcactaaaggacgattagcagtcaataaattttctgttattgaaaatgaagaagggactaccttttatgaagaacaccaaatcttgaaggttatttctgagtattatcagaaaattttcactacaaaaccaggagaaagaaggtcagtcatagctgcaaccctacaaccttgcatctcagatgaaaccaataggaaacttacgagaatgccaactgcaaaagagataaaaactgcttgcttctccatccatgctgacaaagcccctggtcctgatggcttctctgcaagtttttttcagactaactggcgcacagtaggagctcaaatcattctggaaatacagaacttcttctcctccggaatcctgccaaggaacattaacactacccatgtcagactgatcccaaaaatcacgagttcaaaaactatgaaagattataggcctattgccctatgctctatctactacaaaatcatagcaaaggtactcaccaagagactccagccaattcttcacttcctgatctcagaaaaccaatctgcttttgttcctcaacgggcgattgctgacaatgtattgattacccatgaagttctacactacctacataattcaaaggcaaaagaaagatgctttatggccgtgaagactgatatgagtaaggcatatgatagagttgagtgggatttcattgaactagttatggagaggatgggcttccacagtacttggatcaattggatcatgcaatgtataacaacggtctcttactcttacctccttaatggatcggctcaaggttcagtgataccacaaaggggcattcgccaaggtgatcccctatcacccttaatttttatcctctgcagtgaagttctctctggtctctgcaacaaagcccaagaaagaggtgatcttactggcattaaagtggggaagaacaatccaagaattaaccacttactatttgcagatgatacgatgttcttctgcaaatctgaccctcaagactgtgaaactcttatgctcatcctgcagcactatgaacaagcttcgggccagtttattaaccctcaaaagtcagcagttactttctctgcaaaaacatgtgtagagacaagagatagagttaagctattactcggaatccaaaaagaggggggcttgggcaaatacctaggtttacctgagctctttggtagaaagaagaaggatttattcaccctgattgtcgacaggattcgccaaaaggcttgcagctggtcatctagattcctatcttcagctgggaagttgatcatgctgaagtctgttctagcagcaatgccaacctatacgatgtcctgctttaaactaccctgctctctatataagcgcatccaatctgctttgacacggttctggtgggattctagtatggacaagaagaaaatgtgttggatctcctggctaaacttaacaaaatctaaaggagagggaggacttggtttcagggacttacaatgctttaatgatgctttgttggcaaaacagagctggagaatactcacaaagccgcagtgccttcttgctagaacccttcttgggaaatactgccattctacgccattcttagattgtaaaccacctgcgaccatttcacatggatggagaagcatatgtattggtagagatctactaaaacggaagcttggtaaagtcattgggtgtggcaaacaaacctctctgtggcaagaaccgtggctatccctacaatctcctatcacccctatgggccctcctcctgcatcatcacacaagtggacagtatcgcagctcatttctcctacaacacttgagtgggacagagaaatctggcaaaacgcgccttttaaacagcccttggatcccaataccactgtgtcctttagggatctaattaagaaagttaatctgagcgtttgcctcccaccaattggcgtaggaacgggacctctcctaccgtggattctctggtcgatctggctttctaggaaccacttaatcttcaaggatcgcctcagctccccctctgaaactctggctcgagcaatcagtctagcacgagagtggcttttagctcagaatacaacccatatccgacctctgcagcaaaccctagggaaaatcatttcaatctcaaacaacactagtatctgccaaaccgacgctgcctggaacaaagaacataaattggttggtttaggatggattttcaatcccaccatcactgaaacaagtaggattggatctaattcaagaaggaatgttcgatcacctcttttagcggaagctctcgccatccacgaagctctctgccatgcatcgactttgggtatccaaaacattgtaatagcgtccgattccaagcagttgatcaacgcaatcaatttgggggatcctccattggaactccacgggattctacacgatatcctgagtttatcttctacttttctgcaatctagtttttctttcatctctcggaaacacaatggcgaagctgatgagattgctaagtgttctcttaaaacgattgtactggacccggtttag

SEQ ID NO: 86243 - protein, 1742 aa, Arabidopsis thaliana
  peptide (1)..(1742): Ceres Seq. ID no. 12687852
MSQDSALDAFVRITIGLRVILLSSQDLSIDQRIPYSAKGKDIAHSQKSYSNYASQNRSRDSGERAMSVYENDRRSERSFSPPPKKRIRAPTLDNSELIQENSLTLMGILTNPSAQRLWSLIPFLSNRWNLKGKATGSDLGRGCFQFRFEYEEDLQKVLDNRPYHFGQWMVILQRWKPVISPSFPSEIPFWIELQGLPMHYWIKEMLYAIGKEAGEVVDHEISPAAAKIKVLINGLQPITKETVVEFPDGSEALVYLEYKNLKSHCHHCQRLSHAEADCPGLKKVEAVSKTSKLTPPEQPPQNYAERNKGSKQNPRASHDKLLSSHSGLSRPLGDYNLYKRKSDGRNGRSDYRLRPGVQGYVSPNSRASSPRHTPSLRREPSRSYSRDHYNRPNPNFQWREKQVPRELTWQEMSETSRTRRPSLEREVVTESSNPLPVPIPTKEAIMGELREVTVQYISCADPTESMARKQRVLQGEARGLMLETAYQILTAATSANQLLLQNTTANDPEPPLSPSQDLPIHPAELPPAPEPSQKKKRGRPPINKPSNKPGNKSPLRLAGAKSSKRNMLGVQNSPKGRTVTDTAGPSTGDAREIIKKKQSKQQNPPRSNNSLLASSSTPPTHTIIPAMVKKKVDFQIHRIKEMQKTISPDIIFLMETKNSNDFVLKALKCLNYTESLLVAPHSPGGGGLALPWNTNIAIKVLSESQNFIDTTIEAEGRTFFATFIYGEPDKTKRKAIWDKLTERGKDRIDPYQVVLHALKDPLWTSEPLCPLVTSLIFATQEVTELVEKNWMKDVYEEVEKKISRCRHAIITWSREKHLNSQKQIQNCRAKLEEAMSSLDSEPTLINSINEELAAAYKEEEEHWKQRSRQLWLTLGDKNTGFFHACTKGRLAVNKFSVIENEEGTTFYEEHQILKVISEYYQKIFTTKPGERRSVIAATLQPCISDETNRKLTRMPTAKEIKTACFSIHADKAPGPDGFSASFFQTNWRTVGAQIILEIQNFFSSGILPRNINTTHVRLIPKITSSKTMKDYRPIALCSIYYKIIAKVLTKRLQPILHFLISENQSAFVPQRAIADNVLITHEVLHYLHNSKAKERCFMAVKTDMSKAYDRVEWDFIELVMERMGFHSTWINWIMQCITTVSYSYLLNGSAQGSVIPQRGIRQGDPLSPLIFILCSEVLSGLCNKAQERGDLTGIKVGKNNPRINHLLFADDTMFFCKSDPQDCETLMLILQHYEQASGQFINPQKSAVTFSAKTCVETRDRVKLLLGIQKEGGLGKYLGLPELFGRKKKDLFTLIVDRIRQKACSWSSRFLSSAGKLIMLKSVLAAMPTYTMSCFKLPCSLYKRIQSALTRFWWDSSMDKKKMCWISWLNLTKSKGEGGLGFRDLQCFNDALLAKQSWRILTKPQCLLARTLLGKYCHSTPFLDCKPPATISHGWRSICIGRDLLKRKLGKVIGCGKQTSLWQEPWLSLQSPITPMGPPPASSHKWTVSQLISPTTLEWDREIWQNAPFKQPLDPNTTVSFRDLIKKVNLSVCLPPIGVGTGPLLPWILWSIWLSRNHLIFKDRLSSPSETLARAISLAREWLLAQNTTHIRPLQQTLGKIISISNNTSICQTDAAWNKEHKLVGLGWIFNPTITETSRIGSNSRRNVRSPLLAEALAIHEALCHASTLGIQNIVIASDSKQLINAINLGDPPLELHGILHDILSLSSTFLQSSFSFISRKHNGEADEIAKCSLKTIVLDPV

SEQ ID NO: 86244 - protein, 1677 aa, Arabidopsis thaliana
  peptide (1)..(1677): Ceres Seq. ID no. 12687853
MSVYENDRRSERSFSPPPKKRIRAPTLDNSELIQENSLTLMGILTNPSAQRLWSLIPFLSNRWNLKGKATGSDLGRGCFQFRFEYEEDLQKVLDNRPYHFGQWMVILQRWKPVISPSFPSEIPFWIELQGLPMHYWIKEMLYAIGKEAGEVVDHEISPAAAKIKVLINGLQPITKETVVEFPDGSEALVYLEYKNLKSHCHHCQRLSHAEADCPGLKKVEAVSKTSKLTPPEQPPQNYAERNKGSKQNPRASHDKLLSSHSGLSRPLGDYNLYKRKSDGRNGRSDYRLRPGVQGYVSPNSRASSPRHTPSLRREPSRSYSRDHYNRPNPNFQWREKQVPRELTWQEMSETSRTRRPSLEREVVTESSNPLPVPIPTKEAIMGELREVTVQYISCADPTESMARKQRVLQGEARGLMLETAYQILTAATSANQLLLQNTTANDPEPPLSPSQDLPIHPAELPPAPEPSQKKKRGRPPINKPSNKPGNKSPLRLAGAKSSKRNMLGVQNSPKGRTVTDTAGPSTGDAREIIKKKQSKQQNPPRSNNSLLASSSTPPTHTIIPAMVKKKVDFQIHRIKEMQKTISPDIIFLMETKNSNDFVLKALKCLNYTESLLVAPHSPGGGGLALPWNTNIAIKVLSESQNFIDTTIEAEGRTFFATFIYGEPDKTKRKAIWDKLTERGKDRIDPYQVVLHALKDPLWTSEPLCPLVTSLIFATQEVTELVEKNWMKDVYEEVEKKISRCRHAIITWSREKHLNSQKQIQNCRAKLEEAMSSLDSEPTLINSINEELAAAYKEEEEHWKQRSRQLWLTLGDKNTGFFHACTKGRLAVNKFSVIENEEGTTFYEEHQILKVISEYYQKIFTTKPGERRSVIAATLQPCISDETNRKLTRMPTAKEIKTACFSIHADKAPGPDGFSASFFQTNWRTVGAQIILEIQNFFSSGILPRNINTTHVRLIPKITSSKTMKDYRPIALCSIYYKIIAKVLTKRLQPILHFLISENQSAFVPQRAIADNVLITHEVLHYLHNSKAKERCFMAVKTDMSKAYDRVEWDFIELVMERMGFHSTWINWIMQCITTVSYSYLLNGSAQGSVIPQRGIRQGDPLSPLIFILCSEVLSGLCNKAQERGDLTGIKVGKNNPRINHLLFADDTMFFCKSDPQDCETLMLILQHYEQASGQFINPQKSAVTFSAKTCVETRDRVKLLLGIQKEGGLGKYLGLPELFGRKKKDLFTLIVDRIRQKACSWSSRFLSSAGKLIMLKSVLAAMPTYTMSCFKLPCSLYKRIQSALTRFWWDSSMDKKKMCWISWLNLTKSKGEGGLGFRDLQCFNDALLAKQSWRILTKPQCLLARTLLGKYCHSTPFLDCKPPATISHGWRSICIGRDLLKRKLGKVIGCGKQTSLWQEPWLSLQSPITPMGPPPASSHKWTVSQLISPTTLEWDREIWQNAPFKQPLDPNTTVSFRDLIKKVNLSVCLPPIGVGTGPLLPWILWSIWLSRNHLIFKDRLSSPSETLARAISLAREWLLAQNTTHIRPLQQTLGKIISISNNTSICQTDAAWNKEHKLVGLGWIFNPTITETSRIGSNSRRNVRSPLLAEALAIHEALCHASTLGIQNIVIASDSKQLINAINLGDPPLELHGILHDILSLSSTFLQSSFSFISRKHNGEADEIAKCSLKTIVLDPV

SEQ ID NO: 86245 - protein, 1637 aa, Arabidopsis thaliana
  peptide (1)..(1637): Ceres Seq. ID no. 12687854
MGILTNPSAQRLWSLIPFLSNRWNLKGKATGSDLGRGCFQFRFEYEEDLQKVLDNRPYHFGQWMVILQRWKPVISPSFPSEIPFWIELQGLPMHYWIKEMLYAIGKEAGEVVDHEISPAAAKIKVLINGLQPITKETVVEFPDGSEALVYLEYKNLKSHCHHCQRLSHAEADCPGLKKVEAVSKTSKLTPPEQPPQNYAERNKGSKQNPRASHDKLLSSHSGLSRPLGDYNLYKRKSDGRNGRSDYRLRPGVQGYVSPNSRASSPRHTPSLRREPSRSYSRDHYNRPNPNFQWREKQVPRELTWQEMSETSRTRRPSLEREVVTESSNPLPVPIPTKEAIMGELREVTVQYISCADPTESMARKQRVLQGEARGLMLETAYQILTAATSANQLLLQNTTANDPEPPLSPSQDLPIHPAELPPAPEPSQKKKRGRPPINKPSNKPGNKSPLRLAGAKSSKRNMLGVQNSPKGRTVTDTAGPSTGDAREIIKKKQSKQQNPPRSNNSLLASSSTPPTHTIIPAMVKKKVDFQIHRIKEMQKTISPDIIFLMETKNSNDFVLKALKCLNYTESLLVAPHSPGGGGLALPWNTNIAIKVLSESQNFIDTTIEAEGRTFFATFIYGEPDKTKRKAIWDKLTERGKDRIDPYQVVLHALKDPLWTSEPLCPLVTSLIFATQEVTELVEKNWMKDVYEEVEKKISRCRHAIITWSREKHLNSQKQIQNCRAKLEEAMSSLDSEPTLINSINEELAAAYKEEEEHWKQRSRQLWLTLGDKNTGFFHACTKGRLAVNKFSVIENEEGTTFYEEHQILKVISEYYQKIFTTKPGERRSVIAATLQPCISDETNRKLTRMPTAKEIKTACFSIHADKAPGPDGFSASFFQTNWRTVGAQIILEIQNFFSSGILPRNINTTHVRLIPKITSSKTMKDYRPIALCSIYYKIIAKVLTKRLQPILHFLISENQSAFVPQRAIADNVLITHEVLHYLHNSKAKERCFMAVKTDMSKAYDRVEWDFIELVMERMGFHSTWINWIMQCITTVSYSYLLNGSAQGSVIPQRGIRQGDPLSPLIFILCSEVLSGLCNKAQERGDLTGIKVGKNNPRINHLLFADDTMFFCKSDPQDCETLMLILQHYEQASGQFINPQKSAVTFSAKTCVETRDRVKLLLGIQKEGGLGKYLGLPELFGRKKKDLFTLIVDRIRQKACSWSSRFLSSAGKLIMLKSVLAAMPTYTMSCFKLPCSLYKRIQSALTRFWWDSSMDKKKMCWISWLNLTKSKGEGGLGFRDLQCFNDALLAKQSWRILTKPQCLLARTLLGKYCHSTPFLDCKPPATISHGWRSICIGRDLLKRKLGKVIGCGKQTSLWQEPWLSLQSPITPMGPPPASSHKWTVSQLISPTTLEWDREIWQNAPFKQPLDPNTTVSFRDLIKKVNLSVCLPPIGVGTGPLLPWILWSIWLSRNHLIFKDRLSSPSETLARAISLAREWLLAQNTTHIRPLQQTLGKIISISNNTSICQTDAAWNKEHKLVGLGWIFNPTITETSRIGSNSRRNVRSPLLAEALAIHEALCHASTLGIQNIVIASDSKQLINAINLGDPPLELHGILHDILSLSSTFLQSSFSFISRKHNGEADEIAKCSLKTIVLDPV

SEQ ID NO: 86246 - DNA, 1422 bp, Arabidopsis thaliana
  misc_feature (1)..(1422): Ceres Seq. ID no. 12687983
  misc_feature (1)..(1422): Ortholog of  Ceres SEQ ID NO 13594209 as cited in SEQ ID NO 59089
  misc_feature (1)..(1422): Ortholog of  Ceres SEQ ID NO 13502874 as cited in SEQ ID NO 66298
  misc_feature (1)..(1422): Ortholog of  Ceres SEQ ID NO 12614124 as cited in SEQ ID NO 68392
atggaagtcttccgatcatcggaaacttgcaccaagcttggaagattgcttcatagttcttttcacaagctctctttagaacatggaccagtgatgcttctccgtttcggggtcgtcccgatggttgttatctcttccaaggaagcagctaaacaagttctaaagtctcgcgatctagagacatgctcccgacctaagctggttgcgaacgggttgtttactcgcaacttcaaagacattgctttcgctcagtatggtgaggactggcgagagatgaaaaagctcgtggggcttgagctcttcaatccaaagaagcacaaatttttcaggtatatcagagaggaagagggtgacttgctggtcaagaaactatccaaatcttctcaaacacaaactttagtggatttgagaaaagcctttttctccttcaccgcgggtatcatatttagagtctcctttggacagaacttccgcgagtgcgatttcatcgatatggacagacttgaagagttggtgcaagagtcagagaccaacgtattcagcttcgcattcactgacttcttcccaacgggtctcggttggcttgtagaccggatctccggtcaacattcgaggatcgagaaagccttttcaaaactcaccaagttctttcaacatgtaatcgatgaggagttgaagattggacaatcccaagatcactcaaacctcgtcagttccatgttggatatgatcaatagatccactgaatacggttctttcaagatcacttctgatcatctcatagcaatgatgacggacatagttttggggggagtgaacgcaggaacaatcacaatgatatggacgatgacagagctaaccagacatccaagagtgatgaagaaactccgagaagagattcgagcaacacttggacccaacaaagagagaatcacagaagaagatctagagaaagttgagtacttgaagttggtgatcaaagaaactttcagattacatccaccaggtcctttcttgctcccaagacaagtaatgtccgacatagagattcaaggctaccacattcccaagaacgcacatatcaagatcagcacttacgccataggacgtgatcccaaatgttggactaatcctgaagaattcaatcctgagaggtttgcaaatacctcaatcaactacaaaggtcagcattacgagcttttaccctttggagccggtcgtaggagctgtcctggtatgactttgggaatcaccattcttgagctaggccttcttaacattctttactacttcgattggagtttacccaatggaatgaccattaaagacattgacatggaagaagatggagctttgaccatcgccaagaaagtccctcttgagctcatacctacgctcccagcatcactatgcattaaataa

SEQ ID NO: 86247 - protein, 473 aa, Arabidopsis thaliana
  peptide (1)..(473): Ceres Seq. ID no. 12687984
MEVFRSSETCTKLGRLLHSSFHKLSLEHGPVMLLRFGVVPMVVISSKEAAKQVLKSRDLETCSRPKLVANGLFTRNFKDIAFAQYGEDWREMKKLVGLELFNPKKHKFFRYIREEEGDLLVKKLSKSSQTQTLVDLRKAFFSFTAGIIFRVSFGQNFRECDFIDMDRLEELVQESETNVFSFAFTDFFPTGLGWLVDRISGQHSRIEKAFSKLTKFFQHVIDEELKIGQSQDHSNLVSSMLDMINRSTEYGSFKITSDHLIAMMTDIVLGGVNAGTITMIWTMTELTRHPRVMKKLREEIRATLGPNKERITEEDLEKVEYLKLVIKETFRLHPPGPFLLPRQVMSDIEIQGYHIPKNAHIKISTYAIGRDPKCWTNPEEFNPERFANTSINYKGQHYELLPFGAGRRSCPGMTLGITILELGLLNILYYFDWSLPNGMTIKDIDMEEDGALTIAKKVPLELIPTLPASLCIK

SEQ ID NO: 86248 - protein, 442 aa, Arabidopsis thaliana
  peptide (1)..(442): Ceres Seq. ID no. 12687985
MLLRFGVVPMVVISSKEAAKQVLKSRDLETCSRPKLVANGLFTRNFKDIAFAQYGEDWREMKKLVGLELFNPKKHKFFRYIREEEGDLLVKKLSKSSQTQTLVDLRKAFFSFTAGIIFRVSFGQNFRECDFIDMDRLEELVQESETNVFSFAFTDFFPTGLGWLVDRISGQHSRIEKAFSKLTKFFQHVIDEELKIGQSQDHSNLVSSMLDMINRSTEYGSFKITSDHLIAMMTDIVLGGVNAGTITMIWTMTELTRHPRVMKKLREEIRATLGPNKERITEEDLEKVEYLKLVIKETFRLHPPGPFLLPRQVMSDIEIQGYHIPKNAHIKISTYAIGRDPKCWTNPEEFNPERFANTSINYKGQHYELLPFGAGRRSCPGMTLGITILELGLLNILYYFDWSLPNGMTIKDIDMEEDGALTIAKKVPLELIPTLPASLCIK

SEQ ID NO: 86249 - protein, 433 aa, Arabidopsis thaliana; identical to SEQ ID NO: 81942
  peptide (1)..(433): Ceres Seq. ID no. 12687986

SEQ ID NO: 86250 - DNA, 1545 bp, Arabidopsis thaliana
  misc_feature (1)..(1545): Ceres Seq. ID no. 12688276
  misc_feature (1)..(1545): Ortholog of  Ceres SEQ ID NO 14313131 as cited in SEQ ID NO 54934
atggccacaagcgaagctctcaacctcgtcgacgacgaaaacgatggtgtctctgtgagagcattctgcgatttgaaggaaggagatgttgttgccaatatctcaaaaactgcttgtctcactatcaaaaccagtggagctcgtgagatgatcgaatctgctgatttagatggaagtttaggtctctctgtggctctcatgtacgagagaagcttaggtgaagaatctccttgggctggttatcttcagattcttcctattcaagaagatttgcctcttgtttggtctcttgaagacttagattctctcttatctggaactgagcttcataagttggtgaaggaagatcatgttcttatatatgaggattggaaagaaaacattttgccgcttacctcttcactgcctcagaatgttgattctgattcgtttggaatcaaagagtatcttgctgctaagagtttaattgcttcacggtctttcgaaatcgatgattaccatggatccgggatggttcctcttgcagacctctttaatcataaaactggggcagaagacgttcacttcactcatgaatccgattctgaagctgatgaatctgacaacgatgatgctgcaaatgagaccactgatgaagacgagccttccagtaaaatttcttcctcgcctgagcagtcttttgaggaagttcctggtgaaaacactgatgacgaagccaaagaagaagaagaagaagaagaagaagaagaagaaggagaagaagaagaagaaggagaagaggaagaagaaaactcttcaatgctgcaaaatgatcaatccggtctaaaaatgattatggtgaaggatgtctcagctggagctgaggtattcaatacatacggtttgatgggtaatgctgcattactccacaggtacggatttacagagctcgataatccatatgacatagtaaacatagatctagaattagtaaccgaatggagcacatcctcattcacaagccggtacactcgagctagactggccttgtggagaaaactaggttacacaggatgcgagagtcaaaactcagaatactttgaggtatcttcaaccggagaaccccaaaccgagctcctgatcctactctatatactgctcttaccagacgacacatacaataaactggatctagctgaatcaacaacaggagcttctccctcgaaagaaggaaaaagatcttcttcttacgagataacaattgggaaacacaagtttgtgtatggagaaagcggaaatgatattcttctgacagatggtgtttgtgaagctcttctaactattgtggataagcgagagagtttatatggatcattgagctcattggaagatgacattgttagggtgaagacttgttgtcttccgagagacaggagactatatcattcgcttgtgttgcgtgtgagtgagaggaagattctaaagaagcttaggagctacatccatacccagaccaatgagtcttccagcggaaagcgccggaagaagatggttccaaaatcctag

SEQ ID NO: 86251 - protein, 514 aa, Arabidopsis thaliana
  peptide (1)..(514): Ceres Seq. ID no. 12688277
MATSEALNLVDDENDGVSVRAFCDLKEGDVVANISKTACLTIKTSGAREMIESADLDGSLGLSVALMYERSLGEESPWAGYLQILPIQEDLPLVWSLEDLDSLLSGTELHKLVKEDHVLIYEDWKENILPLTSSLPQNVDSDSFGIKEYLAAKSLIASRSFEIDDYHGSGMVPLADLFNHKTGAEDVHFTHESDSEADESDNDDAANETTDEDEPSSKISSSPEQSFEEVPGENTDDEAKEEEEEEEEEEEGEEEEEGEEEEENSSMLQNDQSGLKMIMVKDVSAGAEVFNTYGLMGNAALLHRYGFTELDNPYDIVNIDLELVTEWSTSSFTSRYTRARLALWRKLGYTGCESQNSEYFEVSSTGEPQTELLILLYILLLPDDTYNKLDLAESTTGASPSKEGKRSSSYEITIGKHKFVYGESGNDILLTDGVCEALLTIVDKRESLYGSLSSLEDDIVRVKTCCLPRDRRLYHSLVLRVSERKILKKLRSYIHTQTNESSSGKRRKKMVPKS

SEQ ID NO: 86252 - protein, 465 aa, Arabidopsis thaliana; identical to SEQ ID NO: 71280
  peptide (1)..(465): Ceres Seq. ID no. 12688278

SEQ ID NO: 86253 - protein, 448 aa, Arabidopsis thaliana
  peptide (1)..(448): Ceres Seq. ID no. 12688279
MYERSLGEESPWAGYLQILPIQEDLPLVWSLEDLDSLLSGTELHKLVKEDHVLIYEDWKENILPLTSSLPQNVDSDSFGIKEYLAAKSLIASRSFEIDDYHGSGMVPLADLFNHKTGAEDVHFTHESDSEADESDNDDAANETTDEDEPSSKISSSPEQSFEEVPGENTDDEAKEEEEEEEEEEEGEEEEEGEEEEENSSMLQNDQSGLKMIMVKDVSAGAEVFNTYGLMGNAALLHRYGFTELDNPYDIVNIDLELVTEWSTSSFTSRYTRARLALWRKLGYTGCESQNSEYFEVSSTGEPQTELLILLYILLLPDDTYNKLDLAESTTGASPSKEGKRSSSYEITIGKHKFVYGESGNDILLTDGVCEALLTIVDKRESLYGSLSSLEDDIVRVKTCCLPRDRRLYHSLVLRVSERKILKKLRSYIHTQTNESSSGKRRKKMVPKS

SEQ ID NO: 86254 - DNA, 1305 bp, Arabidopsis thaliana
  misc_feature (1)..(1305): Ceres Seq. ID no. 12688345
  misc_feature (1)..(1305): Ortholog of  Ceres SEQ ID NO 14315966 as cited in SEQ ID NO 57769
atgggagtcaatgcttcagagccaaaacgaacacgatcgcgaccaagtcaatcgcaggggaggcatccgtcgacgagacgatctccgtcaacgagcaacaccggcacaacaacaaccacgacgacatcgaattctaacaaaactggtgcctcctcttcctcctccggtgcggcttcttcctcagtcgctagtcgaacatctctcgctagtctccgagaatccttaccggaaaatcctcacatatacaacgtctccgagattcgtgccgctaccaacaatttcctcgctaatcgcttatcttcctcttcctctaaagcctcctggcgttgcaatttaagagggaaagaagtcgttgtgtttcagagaaagtttaggcgaaggatcgacacggatgagcttagagatcgtctttcagatatttgccggagccaccacggaagcatcattaatctactcggcgcttctgtttccggcggtggaagagtaggaggaggaggaggaggaggaggtgatcacatctacttggtctacgaatacgtcaacggagcatctctagctgattgcttgagaaaccctaagaaccctaaatttacagttctatcgaattggacttcacggattcaaattgcaacagatctagctcatggactcgattacatccacaacaaaaccggattaaagatcgaaaacctagttcacaatcacatcaagagctcggcggtgatcgtgacggagccagatttcaacgctaagatctgtcacttcggaactgcgcagctttgcggcgaaacagatgaaatgtcactggagagagacgaatcgagaaattcaaggcgatctgatagcagagcgatcagattcgaaggagttagaggttacatgtcgccggaatttcaaaatttgggaatcgctactcagaaatcggatgtttacgctttcggagttatgatgttggagcttctctcaggcgaggagccgttgaagtacaggtatgataaagccacaggagatttcgagcggacgtcggtgattgaaacggcgagagcggcgatcgaagatggagatggtgatagagatggaagactgaggaggtggatggatcggagattggaggattcgtttcctgtgacggtggtggagaagttaacgaggctagcgttggattgtgttcaggatgatccagtgaataggccggagatgggaagagtcgccggaaaaatatcacaactgtatttagaatcggaaaaatggtcggcgaatatgaaacggccaacggatatcaccgtctctttcgctcccagatga

SEQ ID NO: 86255 - protein, 434 aa, Arabidopsis thaliana
  peptide (1)..(434): Ceres Seq. ID no. 12688346
MGVNASEPKRTRSRPSQSQGRHPSTRRSPSTSNTGTTTTTTTSNSNKTGASSSSSGAASSSVASRTSLASLRESLPENPHIYNVSEIRAATNNFLANRLSSSSSKASWRCNLRGKEVVVFQRKFRRRIDTDELRDRLSDICRSHHGSIINLLGASVSGGGRVGGGGGGGGDHIYLVYEYVNGASLADCLRNPKNPKFTVLSNWTSRIQIATDLAHGLDYIHNKTGLKIENLVHNHIKSSAVIVTEPDFNAKICHFGTAQLCGETDEMSLERDESRNSRRSDSRAIRFEGVRGYMSPEFQNLGIATQKSDVYAFGVMMLELLSGEEPLKYRYDKATGDFERTSVIETARAAIEDGDGDRDGRLRRWMDRRLEDSFPVTVVEKLTRLALDCVQDDPVNRPEMGRVAGKISQLYLESEKWSANMKRPTDITVSFAPR

SEQ ID NO: 86256 - DNA, 1070 bp, Arabidopsis thaliana
  misc_feature (1)..(1070): Ceres Seq. ID no. 12688414
  misc_feature (1)..(1070): Ortholog of  Ceres SEQ ID NO 14315013 as cited in SEQ ID NO 57760
  misc_feature (1)..(1070): Ortholog of  Ceres SEQ ID NO 13598248 as cited in SEQ ID NO 64224
aagggtcagagttcctaaacatgttggatccattttgttgcgaacatctttaagatccgataaaagacttgtttgagagatctcaaggaagaagaagaaggggggaagcagataacatgtctgcgattgtttgcgggaagagatctctgttcgaggacttagccgccgcttctcctcccgtctccaagaaactccgttgcttttcttcatcttcttcgtctcgtttttctcctccgattcctccttcttcctcacttcttctcgatcacctcgccgcgattttccccgatatggataagcagattcttgagagggcaatcgaggaatgtggagatgaccttgattcagccattagatgtttgaatcagcttcgtttagaatctgccaataagaattctgattctgctacaaaccaatctcctgttgtaatccaggaaccaaatgttgaacctcaacagcaaggatcagccaaggaggaaccaaatgtcttgaacttggatggtacagagtgggttgagctttttgttagggaaatgatgaatgcttctgacatgaaagacgccaaagcccgtgctgcaagagcattggaagctttggagaagtcaattaatgcacgtactggtactgacgcaatgcaaaatctccaacaggaaaacatgatgctgaagcagcaattagaagctattgtacaggaaaacagtttactgaaacgagcggtagtgacacagcagaagcggcaaagagaatcggaagaccaaagtcaggaattgcagcatctgaggcagctagtcactcaataccaggaacagttgagaactttagaggtgaataactatgctctgacgcttcatctgaaacaagctcagcaaaacagttccatcccggggcggtaccatccagacgtcttctaatactttgtgaggccctcgtatcattttgtttccagtgtatttttctctgttggtttgtgactatttatatatattcggggaatcaaaactgtgttcttttgttgttgttgttgttgttattgttgtatatattctctttcgagttcaatgatggattcc

SEQ ID NO: 86257 - protein, 264 aa, Arabidopsis thaliana; identical to SEQ ID NO: 50311
  peptide (1)..(264): Ceres Seq. ID no. 12688415

SEQ ID NO: 86258 - protein, 206 aa, Arabidopsis thaliana; identical to SEQ ID NO: 50312
  peptide (1)..(206): Ceres Seq. ID no. 12688416

SEQ ID NO: 86259 - DNA, 1643 bp, Arabidopsis thaliana
  misc_feature (1)..(1643): Ceres Seq. ID no. 12688434
  misc_feature (1)..(1643): Ortholog of  Ceres SEQ ID NO 12620986 as cited in SEQ ID NO 66720
atactctgttctgatcgcagcaaagccgacgttgaactttctcgccgccggagcgcgtgatctccactctctgtcatcgaatcactctaattgaagattctccgatggcgattgtctatgctgttgtagcgagaggtaccgtggtattagctgaattcagcgccgttacgggaaacacaggcgccgtggtgcgacggatcctcgagaagctttcaccggaaatctccgatgaaagactttgtttctctcaagatcgttatatcttccatattcttagatctgatggtcttacctttctctgtatggccaatgatacctttggaaggagggttccattttcgtatttggaagagattcatatgagattcatgaaaaactatggcaaagtggctcataatgctccagcttatgcaatgaatgatgaattctcaagggttttgcatcagcagatggagttcttctctagtaatcctagtgttgatactctcaatcgtgttagaggagaagtcagtgaggtataattgtttcttcgtatgatctctagatattactcagctatatccattgaaaaggttgaatttttatgagttattacgccttcttggctcacacaggcttctttaaatctgtcttgggtgaaagatgaagtttgttatctcattgttgtgttatcgtgtttacagattcgatcggtcatggtagagaacattgagaagataatggaaagaggtgataggattgagcttcttgttgataaaacagcaacaatgcaagatagctcgtttcacttcaggaagcaatctaagcgccttcgccgagctctttggatgaaaaatgctaagctcctgtaaggatctctctcacttctagattctcttcattccttttctttgctaactaagagatacgctcttctacattctaggtgtttcaactcgcctttgcagcatagtttattgatatgtttcttaaactagagatacagtagttctaagattcaacattattttcgattttgggaaattctcctcgacaaaatatctaatttttggctgataggaactacactgccttgattccacctctgcttaaagaaatttcattattgttttgttttgatgcttgagttccagatcacttttattaatcaacaaaactgcttttcttgtttgtgttcggcagggtcttgttgacatgcttgatagttttcttgctgtacataataatcgcatctttctgcggaggaatcactttaccatcatgcagatcttaaaatctggcggccttatctaaggtatactgaaacggaccactgtttttgtaaatcaactcagtcgcatcatttcgatttgaagccttggttttgtcatgaaaatgactgtgagtttgaagttacatgtcatggtcctccttgcttatgtaactcttgtaaatgtcaaaatcaaaatgatacagaggttcattgaactcttgccttgtcttttagatttagtcacgtgagtgagtttgttctctgtatttccaaaactttatccgctgtgtctttataatttttgcatttgcaatgtacatcacatattcgttatttttgttgttaaaattacttcagttttcatctttgtttaataacatttctgattcac

SEQ ID NO: 86260 - protein, 138 aa, Arabidopsis thaliana
  peptide (1)..(138): Ceres Seq. ID no. 12688435
MAIVYAVVARGTVVLAEFSAVTGNTGAVVRRILEKLSPEISDERLCFSQDRYIFHILRSDGLTFLCMANDTFGRRVPFSYLEEIHMRFMKNYGKVAHNAPAYAMNDEFSRVLHQQMEFFSSNPSVDTLNRVRGEVSEV

SEQ ID NO: 86261 - protein, 72 aa, Arabidopsis thaliana
  peptide (1)..(72): Ceres Seq. ID no. 12688436
MANDTFGRRVPFSYLEEIHMRFMKNYGKVAHNAPAYAMNDEFSRVLHQQMEFFSSNPSVDTLNRVRGEVSEV

SEQ ID NO: 86262 - DNA, 935 bp, Arabidopsis thaliana
  misc_feature (1)..(935): Ceres Seq. ID no. 12688437
  misc_feature (1)..(935): Ortholog of  Ceres SEQ ID NO 13585342 as cited in SEQ ID NO 63601
  misc_feature (1)..(935): Ortholog of  Ceres SEQ ID NO 15177459 as cited in SEQ ID NO 0
ttacttcttcttttttctttcttgacgtgtctttttaaattttttgcaggatgtaattgaggagcttgggatatactttgtgttctacgatagagcaggatatggagaaagtgatccacacccatcacgcactgttaagagtgaagcatacgacattcaagaactcgccgataaactcaagatcggaccaaagttctatgttcttggtatatcactaggtgcttactcggtttatagttgcctcaaatacattccccacagactagctggagcagtcttaatggttccatttgtgaactattggtggactaaagtgcctcaagaaaaattgagtaaagcgttggagctaatgccaaagaaagaccaatggacgtttaaagtggctcattatgttccgtggttgttatattggtggttgacccaaaaactatttccgtcttcgagtatggtcacggggaacaatgcgttatgcagcgacaaagatttggtcgtcataaagaagaaaatggagaatccacgccctggcttggtgaaaaagttagacaacaaggagaccatgaatgtcttcaccgggacatgatagccggattcgcgacatgggaattcgacccgactgaattagaaaatccgtttgcggaaggcgaaggatcggtccacgtttggcaagggatggaagacagaatcattccatacgaaattaatcgatatatatcagagaagcttccatggattaagtaccatgaggtcttaggttatggacatcttctaaacgccgaggaggagaaatgcaaagacattatcaaggcacttcttgtcaactgatgatcatctctacacaagatgccacgaaaaatatagcatatttaatagattttatttatggattataatattatagcatattataagtttgtaagtaagatgaaaaccacttg

SEQ ID NO: 86263 - protein, 117 aa, Arabidopsis thaliana
  peptide (1)..(117): Ceres Seq. ID no. 12688438
MQRQRFGRHKEENGESTPWLGEKVRQQGDHECLHRDMIAGFATWEFDPTELENPFAEGEGSVHVWQGMEDRIIPYEINRYISEKLPWIKYHEVLGYGHLLNAEEEKCKDIIKALLVN

SEQ ID NO: 86264 - protein, 99 aa, Arabidopsis thaliana
  peptide (1)..(99): Ceres Seq. ID no. 12688439
MVPFVNYWWTKVPQEKLSKALELMPKKDQWTFKVAHYVPWLLYWWLTQKLFPSSSMVTGNNALCSDKDLVVIKKKMENPRPGLVKKLDNKETMNVFTGT

SEQ ID NO: 86265 - protein, 81 aa, Arabidopsis thaliana; identical to SEQ ID NO: 29393
  peptide (1)..(81): Ceres Seq. ID no. 12688440

SEQ ID NO: 86266 - DNA, 1175 bp, Arabidopsis thaliana
  misc_feature (1)..(1175): Ceres Seq. ID no. 12688445
  misc_feature (1)..(1175): Ortholog of  Ceres SEQ ID NO 13595521 as cited in SEQ ID NO 59840
ggaaccgccggaatatggagaatagcggcgataaatgaagctggtgggtggaaagatcggaccaccgtggaagatatggatctcgccgtccgagcaagtcttcgcggctggaaatttctctacctcggtgaccttcaggtgaaaagtgagcttccaagtacttttagagccttccgttttcagcaacatagatggtcttgtggacctgcaaatctctttaggaaaatggttatggagatcgtaagaaacaagaaagtgagattctggaagaaagtgtacgtgatatacagcttcttctttgtgaggaaaatcattgcacattgggtcacattttgtttctactgcgttgttcttcctctcacaattctcgtcccggaggttaaagttccgatttggggttcggtttatatcccatccatcatcactatcctcaattccgtcggtactccaaggtcaattcatctgctgttctattggattctattcgagaatgtgatgtcgctgcaccggacaaaggccactctcattggtctgtttgaggcaggaagggctaacgagtgggtagtgactgctaagcttggaagcggtcagagcgctaaaggaaacactaaagggatcaaaaggttcccaagaatcttcaaattgcctgatcgattgaatacattggagcttggatttgcggctttcttgttcgtgtgcggatgctatgactttgtgcacgggaagaacaattacttcatctacctgtttcttcagacaatgtctttcttcatcagtgggctgggctggatcgggacttatgtcccgagttagtagttgtgttgtttcagagagaaaagagaatgttattaattttcttgagaaataaagacaattttcattgaaatgacaaaggaaaattgataggggagatagagacgtaccggtaacaacaagtaggaagaaaggagaagacttttatcaaagaccaggaaagaggagaagctccaagggttcttttgatttatttttaatttttctgtgttttatttatatagctatgggatttgtgattcagttgttgtgagattttaattttcgttctttgttttttattttggtttttgggtattttttcgttttgaaagtgttagtctttttgttttgtttttaaattaaattccaagtaaaaatta

SEQ ID NO: 86267 - protein, 270 aa, Arabidopsis thaliana
  peptide (1)..(270): Ceres Seq. ID no. 12688446
GTAGIWRIAAINEAGGWKDRTTVEDMDLAVRASLRGWKFLYLGDLQVKSELPSTFRAFRFQQHRWSCGPANLFRKMVMEIVRNKKVRFWKKVYVIYSFFFVRKIIAHWVTFCFYCVVLPLTILVPEVKVPIWGSVYIPSIITILNSVGTPRSIHLLFYWILFENVMSLHRTKATLIGLFEAGRANEWVVTAKLGSGQSAKGNTKGIKRFPRIFKLPDRLNTLELGFAAFLFVCGCYDFVHGKNNYFIYLFLQTMSFFISGLGWIGTYVPS

SEQ ID NO: 86268 - protein, 245 aa, Arabidopsis thaliana
  peptide (1)..(245): Ceres Seq. ID no. 12688447
MDLAVRASLRGWKFLYLGDLQVKSELPSTFRAFRFQQHRWSCGPANLFRKMVMEIVRNKKVRFWKKVYVIYSFFFVRKIIAHWVTFCFYCVVLPLTILVPEVKVPIWGSVYIPSIITILNSVGTPRSIHLLFYWILFENVMSLHRTKATLIGLFEAGRANEWVVTAKLGSGQSAKGNTKGIKRFPRIFKLPDRLNTLELGFAAFLFVCGCYDFVHGKNNYFIYLFLQTMSFFISGLGWIGTYVPS

SEQ ID NO: 86269 - protein, 195 aa, Arabidopsis thaliana
  peptide (1)..(195): Ceres Seq. ID no. 12688448
MVMEIVRNKKVRFWKKVYVIYSFFFVRKIIAHWVTFCFYCVVLPLTILVPEVKVPIWGSVYIPSIITILNSVGTPRSIHLLFYWILFENVMSLHRTKATLIGLFEAGRANEWVVTAKLGSGQSAKGNTKGIKRFPRIFKLPDRLNTLELGFAAFLFVCGCYDFVHGKNNYFIYLFLQTMSFFISGLGWIGTYVPS

SEQ ID NO: 86270 - DNA, 1232 bp, Arabidopsis thaliana
  misc_feature (1)..(1232): Ceres Seq. ID no. 12688449
  misc_feature (1)..(1232): Ortholog of  Ceres SEQ ID NO 13585342 as cited in SEQ ID NO 63601
  misc_feature (1)..(1232): Ortholog of  Ceres SEQ ID NO 15177459 as cited in SEQ ID NO 0
aagcatctctccatctcaaatcatattcacctaaaaatcaggttaatataaaagaataatgatgttttcggtgacggttgcgatccttgtttgtcttattggctacatttaccgatcatttaagcctccaccaccgcgaatctgcggccatcctaacggtcctccggttacttctccgagaatcaagctcagtgatggaagatatcttgcttatagagaatctggggttgatagagacaatgctaactacaagatcattgtcgttcatggcttcaacagctccaaagacactgaatttcccatccctaaggatgtaattgaggagcttgggatatactttgtgttctacgatagagcaggatatggagaaagtgatccacacccatcacgcactgttaagagtgaagcatacgacattcaagaactcgccgataaactcaagatcggaccaaagttctatgttcttggtatatcactaggtgcttactcggtttatagttgcctcaaatacattccccacagactagctggagcagtcttaatggttccatttgtgaactattggtggactaaagtgcctcaagaaaaattgagtaaagcgttggagctaatgccaaagaaagaccaatggacgtttaaagtggctcattatgttccgtggttgttatattggtggttgacccaaaaactatttccgtcttcgagtatggtcacggggaacaatgcgttatgcagcgacaaagatttggtcgtcataaagaagaaaatggagaatccacgccctggcttggaaaaagttagacaacaaggagaccatgaatgtcttcaccgggacatgatagccggattcgcgacatgggaattcgacccgactgaattagaaaatccgtttgcggaaggcgaaggatcggtccacgtttggcaagggatggaagacagaatcattccatacgaaattaatcgatatatatcagagaagcttccatggattaagtaccatgaggtcttaggttatggacatcttctaaacgccgaggaggagaaatgcaaagacattatcaaggcacttcttgtcaactgatgatcatctctacacaagatgccacgaaaaatatagcatatttaatagattttatttatggattataatattatagcatattataagtttgtaagtaagatgaaaaccacttgaaagtcattaatttactataaaatacttgttatcttcc

SEQ ID NO: 86271 - protein, 340 aa, Arabidopsis thaliana; identical to SEQ ID NO: 41700
  peptide (1)..(340): Ceres Seq. ID no. 12688450

SEQ ID NO: 86272 - protein, 339 aa, Arabidopsis thaliana; identical to SEQ ID NO: 41701
  peptide (1)..(339): Ceres Seq. ID no. 12688451

SEQ ID NO: 86273 - protein, 179 aa, Arabidopsis thaliana; identical to SEQ ID NO: 41702
  peptide (1)..(179): Ceres Seq. ID no. 12688452

SEQ ID NO: 86274 - DNA, 1273 bp, Arabidopsis thaliana
  misc_feature (1)..(1273): Ceres Seq. ID no. 12688453
  misc_feature (1)..(1273): Ortholog of  Ceres SEQ ID NO 13585342 as cited in SEQ ID NO 63601
  misc_feature (1)..(1273): Ortholog of  Ceres SEQ ID NO 15177459 as cited in SEQ ID NO 0
tcatattcacctaaaaatcaggtcccctctctttatatctctaacattcttatatcagatcatattttttggatttcttgttaagtaacaccaatcttttaaaagtgttttcaggttaatataaaagaataatgatgttttcggtgacggttgcgatccttgtttgtcttattggctacatttaccgatcatttaagcctccaccaccgcgaatctgcggccatcctaacggtcctccggttacttctccgagaatcaagctcagtgatggaagatatcttgcttatagagaatctggggttgatagagacaatgctaactacaagatcattgtcgttcatggcttcaacagctccaaagacactgaatttcccatccctaaggatgtaattgaggagcttgggatatactttgtgttctacgatagagcaggatatggagaaagtgatccacacccatcacgcactgttaagagtgaagcatacgacattcaagaactcgccgataaactcaagatcggaccaaagttctatgttcttggtatatcactaggtgcttactcggtttatagttgcctcaaatacattccccacagactagctggagcagtcttaatggttccatttgtgaactattggtggactaaagtgcctcaagaaaaattgagtaaagcgttggagctaatgccaaagaaagaccaatggacgtttaaagtggctcattatgttccgtggttgttatattggtggttgacccaaaaactatttccgtcttcgagtatggtcacggggaacaatgcgttatgcagcgacaaagatttggtcgtcataaagaagaaaatggagaatccacgccctggcttggaaaaagttagacaacaaggagaccatgaatgtcttcaccgggacatgatagccggattcgcgacatgggaattcgacccgactgaattagaaaatccgtttgcggaaggcgaaggatcggtccacgtttggcaagggatggaagacagaatcattccatacgaaattaatcgatatatatcagagaagcttccatggattaagtaccatgaggtcttaggttatggacatcttctaaacgccgaggaggagaaatgcaaagacattatcaaggcacttcttgtcaactgatgatcatctctacacaagatgccacgaaaaatatagcatatttaatagattttatttatggattataatattatagcatattataagtttgtaagtaagatgaaaaccacttgaaagtc

SEQ ID NO: 86275 - protein, 340 aa, Arabidopsis thaliana; identical to SEQ ID NO: 41700
  peptide (1)..(340): Ceres Seq. ID no. 12688454

SEQ ID NO: 86276 - protein, 339 aa, Arabidopsis thaliana; identical to SEQ ID NO: 41701
  peptide (1)..(339): Ceres Seq. ID no. 12688455

SEQ ID NO: 86277 - protein, 179 aa, Arabidopsis thaliana; identical to SEQ ID NO: 41702
  peptide (1)..(179): Ceres Seq. ID no. 12688456

SEQ ID NO: 86278 - DNA, 2061 bp, Arabidopsis thaliana
  misc_feature (1)..(2061): Ceres Seq. ID no. 12688506
  misc_feature (1)..(2061): Ortholog of  Ceres SEQ ID NO 14311361 as cited in SEQ ID NO 54033
aaaaaatataaattaaataaagaatcccataaatatctctctatcgaactctctctgcttttacaaatctcagaatctccttcagcgaattcacatctcagctgcttttgaatccgccgtaactaaaaacaatcctccttttctcgattcgttaaactatggccccgccggcaggacaaacggcggcggtggctgaagcggctggcgccgatggtgctccaccgcagcagcagcgtggatttggttccacgatttccggcatcgttagaatcgccgtcttttggtattttgcttctaagttcttttctcctaagcagaaacctatggatcccactgctccgtctcagctcatgactaatctcttccacaagggcgaatcattggatatgtggttttatctatcagagcaggagaagttcaatgactttggcaatgatcgtgcgctatattggcatgagacgaatataccttatgctgtatggacaccagagagtattaggaccaagtcacttacgtattatccatctgagacactacagaataatggaagtctgtatgctcatatcttttttgctcgatctggatttcccattgaccccactgatcctgaatatcaacctcttaatagttttagtaggacgcatgctgtggcgacttactttccaaagcagaaaaaaaataagaagaagagtctcttgggcagtcccaaagactctgatgaatccgaacctgaagttgagaaagttggagataagaaatcagatcccaaggaagaggtccctgtggaatggatatccctctggaaacctaatgtcacgattaacctggttgatgattttactcactattcacagaatggtgtaccaccaaacattgctcctcacttactggtagaaccgaccacaggaaattactatcctacaatttacttcaatgagttttggctgctaagggacaagttcattccagtcaatgagacagtctcagaactaccactaaatctggaaataagtcccataagcatgatgaagtggcaactgtttcagcaagttgatcaatctttccagatgcagcgtagctatggaagcatgcttgacggtgaatctgacgaactaaagaaggtgtttttggaaggaaatccctatcttttggggatcacgatgtttgtttcgatgcttcattcagtgttcgacttcctggcattcaaaaatgatatccaattctggaacaaaaataaatctatggaagggctgtctgcaaagtctgttgtactgaactttatctgtcagtttgtcatcttcctctacttgcttgacaacgacacttcatggatgatactggctagttccggagtcggtgtctgcattgagttctggaaaatagggaaagccatgcgcatagaggttgatcgaagtggaatgattccaaggttgaggttccatgatcgtgaatcgtatgcaagcaataaaaccaaggagtatgatgacattgccatcaaattcttatcctatgtgctcctcctccttgtcattggcttgtccatatattctctcgcttatgaacgccacaagagctggtattcttggatactatcttcactaacaagctgtgtctacatgttcggtttcatcatgatgtgtcctcagctattcatcaactacaagcttaaatcagtggcacatttaccatggagacagatgacttacaagttcctcaacaccattatcgacgatctctttgcctttgtcatcaaaatgccgattttacatcgactttctgtattcagagatgatgtgatattcttgatatacttataccaaaggtgggtttacccagtggataagacacgtgtgaacgagttcggttttggaggtgaggatgaaactgcagagaagaagttgatcactgagaaagaagaagaagacaagaaaacaaactaatctcttctcttcttcaaattttattacagttcagttatagtgtcttaatttatttttgttctcacttttggaaattgttttgttcaagtttaatgtcaaccctcaagacacattattaagc

SEQ ID NO: 86279 - protein, 593 aa, Arabidopsis thaliana; identical to SEQ ID NO: 50365
  peptide (1)..(593): Ceres Seq. ID no. 12688507

SEQ ID NO: 86280 - protein, 538 aa, Arabidopsis thaliana; identical to SEQ ID NO: 50366
  peptide (1)..(538): Ceres Seq. ID no. 12688508

SEQ ID NO: 86281 - protein, 529 aa, Arabidopsis thaliana; identical to SEQ ID NO: 50367
  peptide (1)..(529): Ceres Seq. ID no. 12688509

SEQ ID NO: 86282 - DNA, 3162 bp, Arabidopsis thaliana
  misc_feature (1)..(3162): Ceres Seq. ID no. 12688518
  misc_feature (1)..(3162): Ortholog of  Ceres SEQ ID NO 15169032 as cited in SEQ ID NO 55013
gtatattttccttttgattcccagaaaatgtcactagattccactttctagcttgcgttttctcgggaatctgaagtttccttttgtgttgaatcgctgggaaaaatctgatggaagcagcttcaagttttttgtgtagaagtattcggattccgtcgactactacggcgacggcggcgttcacgttcactcgaccgccgttaaactacgtttgtgttgtcggagttcgtgttttcccgacgcggaaggtcttttgcagcggcgttaatggcggctccagtgttactaagaagaagccacgaaggaaaagtaacgtttccgataaacttaggtttaagaaaattgagaagaggaacgataatactgaatctgagagtttaagtgttgttgaggaaccgaagaacgataaagaattgagtcttcgagctttgaatcaaaatggtgatccattagggcggagagatttagggaggaacgtagtgaagtggattagtcaggcgatgaaagcgatggcttcggattttgcaactgcggaggttcagggggagttttcggagttgaggcagaacgtcggatctggtttgacgtttgtgattcaagctcaaccgtatctcaatgctattcccatgccattaggttctgaagtcatttgtttgaaggcttgtactcattatcctaccttgttcgatcatttccagagagagttgcgtgatgttcttcaagacctggagcggaagaatataatggagagttggaaggagtctgagtcttggaagctgctcaaggagattgcaaattcagctcagcatcgggaggttgctcgcaaagctgctcaagctaagcctgttcaaggagttttggggatggactcagagaaggtgaaggctatacaggaaaggattgatgagttcaccagccagatgtcgcagttacttcaagtggaacgagatacagaactggaagttacacaggaagaactagatgttgttcctactccagatgagagctctgattcctcaaaaccgattgagttcttggttaggcatggtgatgctccacaggaactttgtgatacaatttgcaatttgtatgcagttagtacctccacagggctcggaggtatgcacttggtgttgtttaaggttgggggaaaccaccgtcttcctcctactacactttcccctggtgacatggtttgcataagagtttgtgacagtaggggtgctggggcaactgcctgtacgcagggctttgttcacaaccttggagaagatgggtgtagcattggtgtggctctagaatctcgtcatggagatcctactttttccaagctctttggaaagagtgtgagaattgatcgtattcatgggttggccgatgcccttacttacgagcgtaactgcgaagccctaatgcttctgcagaagaatggtctgcagaagaaaaatccatcaatatctgttgtggcgactttatttggggatggtgaagatataacatggctggagcaaaatgattatgtagactggagtgaagcggagttgagtgatgagccagtgagtaagttatttgattcttcccaaaggagagccatagctcttggagtaaacaaaaaaagacctgttatgatagtccaaggacctcctggcacgggaaagactggaatgcttaaggaggtcattaccctggctgttcaacagggggaaagagtacttgtaacagcgcctactaatgcagctgttgataacatggtcgagaagctcttgcatcttggactaaacattgtccgagtaggaaatcccgctagaatatcatctgctgttgcttcaaagtctttgggggaaattgtgaactctaagcttgcaagcttccgagcagaattggaaaggaagaagtcagatttaagaaaagatcttcggcaatgcctgagggatgatgttcttgcagctggcattcggcagctcttgaaacagcttggaaagacgttgaagaagaaggaaaaagagactgtgaaggaaatactatcaaatgcacaggttgtttttgccactaacattggagcagctgatcctttgattaggaggttagaaacatttgatttggttgttatagatgaagctggtcagtctatcgagccttcatgctggatcccaatattgcaagggaaacgttgtattctttccggtgatccatgccaattagcaccagttgttctatcacgtaaagctttagaaggtggacttggtgtatccttactggaaagagctgcatctttacatgatggagttcttgcgacaaaattaacaactcagtatcgtatgaacgatgtaatcgctggttgggcatcaaaggagatgtatggtggatggttgaaatctgctccaagtgtggcctctcatctgcttatcgattctccttttgtgaaggctacttggataacgcaatgcccactggttctgcttgacacaagaatgccatatgggagtttatccgtgggctgcgaggagcgtttggatccagctggcacaggctcattatacaatgaaggagaagcagatattgtggttaatcacgtcatttctttgatatacgcaggtgttagtccaatggctattgctgttcaatccccatatgttgctcaggttcaacttctcagagaaaggctggatgattttccagtggctgatggagttgaggtcgcaaccattgacagctttcaagggcgggaggctgatgcagtgatcatctcaatggtacggtcaaacaacctaggtgcagtgggattcctaggggatagcagacggatgaatgtagccattacaagagcccggaagcacgtggcagtggtatgtgacagctccacaatctgccacaacacgttcctagcaagactgttgcgccacatacgctatttcgggagagttaagcatgcagaccctggtagcttgggagggtcaggactaggcttggacccaatgttgccctaccttggttaaaaccgttgtaagtactacaaaaaccagaaccttctgcttactctctccctctctctctatctctcccgctgaaagaaacagtttccatagcaaattgtcgttgtacagaacaattgttaccacagaaaatagtctctgtatatgatgacaatatataattcatgta

SEQ ID NO: 86283 - protein, 961 aa, Arabidopsis thaliana
  peptide (1)..(961): Ceres Seq. ID no. 12688519
MEAASSFLCRSIRIPSTTTATAAFTFTRPPLNYVCVVGVRVFPTRKVFCSGVNGGSSVTKKKPRRKSNVSDKLRFKKIEKRNDNTESESLSVVEEPKNDKELSLRALNQNGDPLGRRDLGRNVVKWISQAMKAMASDFATAEVQGEFSELRQNVGSGLTFVIQAQPYLNAIPMPLGSEVICLKACTHYPTLFDHFQRELRDVLQDLERKNIMESWKESESWKLLKEIANSAQHREVARKAAQAKPVQGVLGMDSEKVKAIQERIDEFTSQMSQLLQVERDTELEVTQEELDVVPTPDESSDSSKPIEFLVRHGDAPQELCDTICNLYAVSTSTGLGGMHLVLFKVGGNHRLPPTTLSPGDMVCIRVCDSRGAGATACTQGFVHNLGEDGCSIGVALESRHGDPTFSKLFGKSVRIDRIHGLADALTYERNCEALMLLQKNGLQKKNPSISVVATLFGDGEDITWLEQNDYVDWSEAELSDEPVSKLFDSSQRRAIALGVNKKRPVMIVQGPPGTGKTGMLKEVITLAVQQGERVLVTAPTNAAVDNMVEKLLHLGLNIVRVGNPARISSAVASKSLGEIVNSKLASFRAELERKKSDLRKDLRQCLRDDVLAAGIRQLLKQLGKTLKKKEKETVKEILSNAQVVFATNIGAADPLIRRLETFDLVVIDEAGQSIEPSCWIPILQGKRCILSGDPCQLAPVVLSRKALEGGLGVSLLERAASLHDGVLATKLTTQYRMNDVIAGWASKEMYGGWLKSAPSVASHLLIDSPFVKATWITQCPLVLLDTRMPYGSLSVGCEERLDPAGTGSLYNEGEADIVVNHVISLIYAGVSPMAIAVQSPYVAQVQLLRERLDDFPVADGVEVATIDSFQGREADAVIISMVRSNNLGAVGFLGDSRRMNVAITRARKHVAVVCDSSTICHNTFLARLLRHIRYFGRVKHADPGSLGGSGLGLDPMLPYLG

SEQ ID NO: 86284 - protein, 831 aa, Arabidopsis thaliana
  peptide (1)..(831): Ceres Seq. ID no. 12688520
MKAMASDFATAEVQGEFSELRQNVGSGLTFVIQAQPYLNAIPMPLGSEVICLKACTHYPTLFDHFQRELRDVLQDLERKNIMESWKESESWKLLKEIANSAQHREVARKAAQAKPVQGVLGMDSEKVKAIQERIDEFTSQMSQLLQVERDTELEVTQEELDVVPTPDESSDSSKPIEFLVRHGDAPQELCDTICNLYAVSTSTGLGGMHLVLFKVGGNHRLPPTTLSPGDMVCIRVCDSRGAGATACTQGFVHNLGEDGCSIGVALESRHGDPTFSKLFGKSVRIDRIHGLADALTYERNCEALMLLQKNGLQKKNPSISVVATLFGDGEDITWLEQNDYVDWSEAELSDEPVSKLFDSSQRRAIALGVNKKRPVMIVQGPPGTGKTGMLKEVITLAVQQGERVLVTAPTNAAVDNMVEKLLHLGLNIVRVGNPARISSAVASKSLGEIVNSKLASFRAELERKKSDLRKDLRQCLRDDVLAAGIRQLLKQLGKTLKKKEKETVKEILSNAQVVFATNIGAADPLIRRLETFDLVVIDEAGQSIEPSCWIPILQGKRCILSGDPCQLAPVVLSRKALEGGLGVSLLERAASLHDGVLATKLTTQYRMNDVIAGWASKEMYGGWLKSAPSVASHLLIDSPFVKATWITQCPLVLLDTRMPYGSLSVGCEERLDPAGTGSLYNEGEADIVVNHVISLIYAGVSPMAIAVQSPYVAQVQLLRERLDDFPVADGVEVATIDSFQGREADAVIISMVRSNNLGAVGFLGDSRRMNVAITRARKHVAVVCDSSTICHNTFLARLLRHIRYFGRVKHADPGSLGGSGLGLDPMLPYLG

SEQ ID NO: 86285 - protein, 828 aa, Arabidopsis thaliana
  peptide (1)..(828): Ceres Seq. ID no. 12688521
MASDFATAEVQGEFSELRQNVGSGLTFVIQAQPYLNAIPMPLGSEVICLKACTHYPTLFDHFQRELRDVLQDLERKNIMESWKESESWKLLKEIANSAQHREVARKAAQAKPVQGVLGMDSEKVKAIQERIDEFTSQMSQLLQVERDTELEVTQEELDVVPTPDESSDSSKPIEFLVRHGDAPQELCDTICNLYAVSTSTGLGGMHLVLFKVGGNHRLPPTTLSPGDMVCIRVCDSRGAGATACTQGFVHNLGEDGCSIGVALESRHGDPTFSKLFGKSVRIDRIHGLADALTYERNCEALMLLQKNGLQKKNPSISVVATLFGDGEDITWLEQNDYVDWSEAELSDEPVSKLFDSSQRRAIALGVNKKRPVMIVQGPPGTGKTGMLKEVITLAVQQGERVLVTAPTNAAVDNMVEKLLHLGLNIVRVGNPARISSAVASKSLGEIVNSKLASFRAELERKKSDLRKDLRQCLRDDVLAAGIRQLLKQLGKTLKKKEKETVKEILSNAQVVFATNIGAADPLIRRLETFDLVVIDEAGQSIEPSCWIPILQGKRCILSGDPCQLAPVVLSRKALEGGLGVSLLERAASLHDGVLATKLTTQYRMNDVIAGWASKEMYGGWLKSAPSVASHLLIDSPFVKATWITQCPLVLLDTRMPYGSLSVGCEERLDPAGTGSLYNEGEADIVVNHVISLIYAGVSPMAIAVQSPYVAQVQLLRERLDDFPVADGVEVATIDSFQGREADAVIISMVRSNNLGAVGFLGDSRRMNVAITRARKHVAVVCDSSTICHNTFLARLLRHIRYFGRVKHADPGSLGGSGLGLDPMLPYLG

SEQ ID NO: 86286 - DNA, 1117 bp, Arabidopsis thaliana
  misc_feature (1)..(1117): Ceres Seq. ID no. 12688556
  misc_feature (1)..(1117): Ortholog of  Ceres SEQ ID NO 13582052 as cited in SEQ ID NO 59823
  misc_feature (1)..(1117): Ortholog of  Ceres SEQ ID NO 13659378 as cited in SEQ ID NO 67014
  misc_feature (1)..(1117): Ortholog of  Ceres SEQ ID NO 13599365 as cited in SEQ ID NO 0
atcttcgttgtcgtttcgtctgcttcacatcggaaagctacatctttttcgttttttgtggtggcgatttctattctccggctgaaacctaccttcaggattcagcctttctcaggttttcagttggattcagatagcagcttgtacttcttctagataatcggcgacacatatggatgattgggaggccgaggactttcaaccacttccctcaaaagttgaactgaaaagtaactgggatgatgaggatgtggatgagaatgatatcaaggactcgtgggaggaggaagatgtatctgctccgccacctatagtaaagcctgcttctgagaaggctccaaagaaaccagcagtaaaagctgttgaaaagaaggttaaaactgttgaagctccgaaaggaacatcaagggaagaacctctagatcctattgctgagaaacttcgcatgcagaggcttgtagaggaagctgattaccaatcaactgctgaactctttggagtaaagactgaagagaaaagcgtcgatatgttaattccgaagtctgaaagcgatttcttggattatgctgagttgatatctcagagacttgtaccatttgagaaaagctttcactatatcgggctactcaaagcagtgatgagactttctgtggctaatatgaaagcagcagatgttaaagacgttgcttcgtccattacagctatagcaaatgaaaaattgaaggcggagaaagaagctgctgctggcaaaaagaagtcaggtaagaagaaacaacttcatgttgataagcctgatgatgatcttgtttcgggtccttatgatgccatggacgatgatgatttcatgtgagaaaatggcaattttggagattgcattttacctcctataggattgtaactgagaagaggtttaaatcgtcggcggttttttgttttgtatactgaattgcaaaagtgtttttcttctgttttctttgctcggtttgatttaaaaatttgtgtaataagatttgttgtgggcacactatttcctattatatgaattgaacgagtactaagagcacggcctatgattcacttagaatttgaagccacattagtaagataagttttcgat

SEQ ID NO: 86287 - protein, 225 aa, Arabidopsis thaliana; identical to SEQ ID NO: 39745
  peptide (1)..(225): Ceres Seq. ID no. 12688557

SEQ ID NO: 86288 - protein, 134 aa, Arabidopsis thaliana; identical to SEQ ID NO: 39746
  peptide (1)..(134): Ceres Seq. ID no. 12688558

SEQ ID NO: 86289 - DNA, 757 bp, Arabidopsis thaliana
  misc_feature (1)..(757): Ceres Seq. ID no. 12688589
  misc_feature (1)..(757): Ortholog of  Ceres SEQ ID NO 15179194 as cited in SEQ ID NO 0
aagtaagagaaaaaccaaaagaagaagagaaacaacaagaagaagtaatggcttcctctatgttctcctccaccgctgtggttacctccccggctcaagccaccatggtcgctccattcaccggcttgaagtcatccgcttctttcccggtcacccgcaaggccaacaacgacattacttccatcacaagcaacggaggaagagttagctgcatgaaggtgtggccaccaatcggaaagaagaagtttgagactctatcttacctccctgaccttagtgacgttgaattggctaaggaagttgactaccttctccgcaacaagtggattccttgtgttgaattcgagttggagcacggatttgtgtaccgtgagcacggaaacactcccggatactatgatggacgatactggacaatgtggaagcttccattgttcggatgcaccgactccgctcaagtgttgaaggaagttgaagaatgcaagaaggagtaccctggcgccttcattaggatcatcggattcgacaacacccgtcaagtccaatgcatcagtttcattgcctacaagcccccaagcttcaccgaagcttaatcccctttctggaatattcagcgttgattattctggaacccatttctatgtggtcaatgcaaatttaagaaattatttgccgacttaacagttgaggaactattgtttgaaagtgaaaatgttattcctatcagtttctctataattatagttatcatttcatt

SEQ ID NO: 86290 - protein, 196 aa, Arabidopsis thaliana
  peptide (1)..(196): Ceres Seq. ID no. 12688590
VREKPKEEEKQQEEVMASSMFSSTAVVTSPAQATMVAPFTGLKSSASFPVTRKANNDITSITSNGGRVSCMKVWPPIGKKKFETLSYLPDLSDVELAKEVDYLLRNKWIPCVEFELEHGFVYREHGNTPGYYDGRYWTMWKLPLFGCTDSAQVLKEVEECKKEYPGAFIRIIGFDNTRQVQCISFIAYKPPSFTEA

SEQ ID NO: 86291 - protein, 181 aa, Arabidopsis thaliana
  peptide (1)..(181): Ceres Seq. ID no. 12688591
MASSMFSSTAVVTSPAQATMVAPFTGLKSSASFPVTRKANNDITSITSNGGRVSCMKVWPPIGKKKFETLSYLPDLSDVELAKEVDYLLRNKWIPCVEFELEHGFVYREHGNTPGYYDGRYWTMWKLPLFGCTDSAQVLKEVEECKKEYPGAFIRIIGFDNTRQVQCISFIAYKPPSFTEA

SEQ ID NO: 86292 - protein, 177 aa, Arabidopsis thaliana
  peptide (1)..(177): Ceres Seq. ID no. 12688592
MFSSTAVVTSPAQATMVAPFTGLKSSASFPVTRKANNDITSITSNGGRVSCMKVWPPIGKKKFETLSYLPDLSDVELAKEVDYLLRNKWIPCVEFELEHGFVYREHGNTPGYYDGRYWTMWKLPLFGCTDSAQVLKEVEECKKEYPGAFIRIIGFDNTRQVQCISFIAYKPPSFTEA

SEQ ID NO: 86293 - DNA, 1163 bp, Arabidopsis thaliana
  misc_feature (1)..(1163): Ceres Seq. ID no. 12688601
  misc_feature (1)..(1163): Ortholog of  Ceres SEQ ID NO 15226950 as cited in SEQ ID NO 68649
  misc_feature (1)..(1163): Ortholog of  Ceres SEQ ID NO 13502947 as cited in SEQ ID NO 69257
cagattctttcgaatccggagtttcttgctgaaggaactgctatcgctgatctttttaaccctgaccgtgttttgatcggagggcgagaaacacctgaaggattcaaagctgttcagacacttaaagaggtttatgctaattgggttcctgaaggtcagatcatcacaactaatctctggtctgctgagctttctaagttagctgcaaatgctttcttggctcagaggatttcatcagtcaatgccatgtctgcactttgtgaatccactggtgctgatgttactcaagtgtcttacgctgttggtactgattcaagaatcggttccaaattcttgaacgctagtgttggattcggaggttcttgtttccagaaggacattctgaatctcgtctacatctgtcaatgcaacggacttccagaagtggcggaatactggaaacaagtgatcaagatcaacgattaccaaaagaaccggttcgtgaacagaatcgtgtcctctatgttcaacactgtctccaacaagaaggttgcgattcttggattcgcattcaagaaagacactggtgacacaagggaaacacctgccattgatgtgtgtaaaggtctattaggagacaaagcacagatcagtatctatgatcctcaagtcacagaggaacagattcagagagatctctcgatgaaaaagttcgactgggaccatcctcttcacttgcagccaatgagtccaaccacagtgaaacaagtgagtgtgacttgggacgcatatgaagctacaaaagacgcacacgcggtttgcgttttgactgagtgggacgagtttaagtcgttagattaccagaagatcttcgacaacatgcagaaaccggcttttatcttcgacggaagaaacattatgaatgttaacaagttaagagagattggtttcattgtttactccattggtaagccacttgacccatggctcaaggacatgcctgcctttgtctaatcacaaggcaaaacctggttgattcttgtttcttactttcattgtttgtgcttttttgctttcgctttcatataaattttagtctcaagattcgatttgtgaagtcttgaagagttgtttcttacattttacaatgtgtttcttatgctaagctcttataattttgtgtt

SEQ ID NO: 86294 - protein, 330 aa, Arabidopsis thaliana
  peptide (1)..(330): Ceres Seq. ID no. 12688602
QILSNPEFLAEGTAIADLFNPDRVLIGGRETPEGFKAVQTLKEVYANWVPEGQIITTNLWSAELSKLAANAFLAQRISSVNAMSALCESTGADVTQVSYAVGTDSRIGSKFLNASVGFGGSCFQKDILNLVYICQCNGLPEVAEYWKQVIKINDYQKNRFVNRIVSSMFNTVSNKKVAILGFAFKKDTGDTRETPAIDVCKGLLGDKAQISIYDPQVTEEQIQRDLSMKKFDWDHPLHLQPMSPTTVKQVSVTWDAYEATKDAHAVCVLTEWDEFKSLDYQKIFDNMQKPAFIFDGRNIMNVNKLREIGFIVYSIGKPLDPWLKDMPAFV

SEQ ID NO: 86295 - protein, 248 aa, Arabidopsis thaliana
  peptide (1)..(248): Ceres Seq. ID no. 12688603
MSALCESTGADVTQVSYAVGTDSRIGSKFLNASVGFGGSCFQKDILNLVYICQCNGLPEVAEYWKQVIKINDYQKNRFVNRIVSSMFNTVSNKKVAILGFAFKKDTGDTRETPAIDVCKGLLGDKAQISIYDPQVTEEQIQRDLSMKKFDWDHPLHLQPMSPTTVKQVSVTWDAYEATKDAHAVCVLTEWDEFKSLDYQKIFDNMQKPAFIFDGRNIMNVNKLREIGFIVYSIGKPLDPWLKDMPAFV

SEQ ID NO: 86296 - DNA, 1429 bp, Arabidopsis thaliana
  misc_feature (1)..(1429): Ceres Seq. ID no. 12688608
  misc_feature (1)..(1429): Ortholog of  Ceres SEQ ID NO 14302287 as cited in SEQ ID NO 68134
  misc_feature (1)..(1429): Ortholog of  Ceres SEQ ID NO 14309328 as cited in SEQ ID NO 0
aagaaaccaaaagagtaaaacaaacacagagaagcttcttcttaaacgatgccgtactataccagagatgacaacgacgtcgacgatttcgatgagtttgatccaacgccgtacagtggtggttacgacatcacggtgatctacggccgtccgattccaccttccgatgagacttgttatcctctctcatctggtgtcgatgatgatttcgaatacgagagacctgaatttactcagatccatgagccttctgcttacggtgatgaagctcttaacacagagtacagtagctattctcgacccaagccacgacccgcatttcgacccgattcaggttatggatctgaatccggttatgggaggaaaccggaatctgagtacggatctggctatggtggacaaacggaggtggagtatggtcggagacctgagcagagttatggatctggttatggtggaaggacggagactgaatcggagtatggatctggtggtggtggaagaactgaggttgagtatggtaggagacctgaatcagggcttggatctggttatggtgggagatcggagtctgagtatgagcgtaagcctagctatggaaggtctgaggaacaagaagaaggttataggaagcctagctatggaagatctgaagaacaagaggaaggttacaggaagccaagttatggaagatctgaggagcaggaagaaggatatagaaagcctagctatggaagatctgaggaggaacaagaggaaggttataggaagcctagctatggaagatctgaggaacaagaggaaggaagttacaggaaacctagttatgggaggtctgatgatcaggtggagagttacattaagcctagctatggaagatctgaggaacaggaggagggaagttacaggaagcctagttatgggaggtctgaggaacaggaagaggggagttacaggaagcagcctagctatggccgtggcaatgacgatgatgatgatgagcagcgtaggaaccgttctggttctggtgatgatgaggaagggagctatggccgcaagaaatatggtggcaatgactctgatgaggatgaggagaagaagaagcaccgtcacaagcatcaccaccagaagcgtcgtgacgaagacgatgagtaaactaaaccctctctgtgctagagagtgtaatgagaatgtgtgtttgcttagcctcaaaaatctactaaataaagagctaagtcacatacctttctacataatatcttccgacgttggtgttgtgtttgtttgaatctctgtattattactacagagtcttcgtactggttcataataagacctttaagtggtattgggtcaccatgtaactgttgctactctgtttcgttttctatctatcgttttgtgttatgatttacttttctatccttat

SEQ ID NO: 86297 - protein, 373 aa, Arabidopsis thaliana
  peptide (1)..(373): Ceres Seq. ID no. 12688609
MRLVILSHLVSMMISNTRDLNLLRSMSLLLTVMKLLTQSTVAILDPSHDPHFDPIQVMDLNPVMGGNRNLSTDLAMVDKRRWSMVGDLSRVMDLVMVEGRRLNRSMDLVVVEELRLSMVGDLNQGLDLVMVGDRSLSMSVSLAMEGLRNKKKVIGSLAMEDLKNKRKVTGSQVMEDLRSRKKDIESLAMEDLRRNKRKVIGSLAMEDLRNKRKEVTGNLVMGGLMIRWRVTLSLAMEDLRNRRREVTGSLVMGGLRNRKRGVTGSSLAMAVAMTMMMMSSVGTVLVLVMMRKGAMAARNMVAMTLMRMRRRRSTVTSITTRSVVTKTMSKLNPLCARECNENVCLLSLKNLLNKELSHIPFYIISSDVGVVFV

SEQ ID NO: 86298 - protein, 368 aa, Arabidopsis thaliana
  peptide (1)..(368): Ceres Seq. ID no. 12688610
MPYYTRDDNDVDDFDEFDPTPYSGGYDITVIYGRPIPPSDETCYPLSSGVDDDFEYERPEFTQIHEPSAYGDEALNTEYSSYSRPKPRPAFRPDSGYGSESGYGRKPESEYGSGYGGQTEVEYGRRPEQSYGSGYGGRTETESEYGSGGGGRTEVEYGRRPESGLGSGYGGRSESEYERKPSYGRSEEQEEGYRKPSYGRSEEQEEGYRKPSYGRSEEQEEGYRKPSYGRSEEEQEEGYRKPSYGRSEEQEEGSYRKPSYGRSDDQVESYIKPSYGRSEEQEEGSYRKPSYGRSEEQEEGSYRKQPSYGRGNDDDDDEQRRNRSGSGDDEEGSYGRKKYGGNDSDEDEEKKKHRHKHHHQKRRDEDDE

SEQ ID NO: 86299 - protein, 362 aa, Arabidopsis thaliana
  peptide (1)..(362): Ceres Seq. ID no. 12688611
MMISNTRDLNLLRSMSLLLTVMKLLTQSTVAILDPSHDPHFDPIQVMDLNPVMGGNRNLSTDLAMVDKRRWSMVGDLSRVMDLVMVEGRRLNRSMDLVVVEELRLSMVGDLNQGLDLVMVGDRSLSMSVSLAMEGLRNKKKVIGSLAMEDLKNKRKVTGSQVMEDLRSRKKDIESLAMEDLRRNKRKVIGSLAMEDLRNKRKEVTGNLVMGGLMIRWRVTLSLAMEDLRNRRREVTGSLVMGGLRNRKRGVTGSSLAMAVAMTMMMMSSVGTVLVLVMMRKGAMAARNMVAMTLMRMRRRRSTVTSITTRSVVTKTMSKLNPLCARECNENVCLLSLKNLLNKELSHIPFYIISSDVGVVFV

SEQ ID NO: 86300 - DNA, 879 bp, Arabidopsis thaliana
  misc_feature (1)..(879): Ceres Seq. ID no. 12688616
  misc_feature (1)..(879): Ortholog of  Ceres SEQ ID NO 12592832 as cited in SEQ ID NO 62031
aactctgtcttagttttgagcagcagcagctatggttaacgtcagattctaccgaaactatgggaaaacattcaagaagccacgtcgtccttatgagaaagagcgtcttgatgctgagctaaagcttgttggagaatacggtcttcgttgtaagagagagctttggagagttcaatatacacttagcagaatccgtaatgctgcaagagaactcttaactcttgatgagaagaatcctcgtcgtatctttgaaggtgaagctcttcttaggagaatgaatcgatatggtcttcttgatgaaacccagaacaagcttgattatgttcttgctttgactgttgagaatttccttgaacgtcgtctccaaactattgtctttaagtctggtatggctaagtccattcaccacgctcgtgtccttatccgacaaaggcatatcagggttgggaggcaacttgtgaacattccatcgtttatggtgagagtagagtcacagaagcacgtagacttttctctaaccagtccattcggtggtggtcgacctggaagagtgaagagaaggaacgagagagccggagctaagaaagcttctggtggtgatggagatgaggatgatgaagagtgaaaagtaccaaacccttaaaaaaatccctaagatgaaacactacctagctaaacctatcaaaatgcttttagttgataatagtttggttttgttacctctttttgtgagatatttggtttgttagtgttcttaattagtagtagaagtgaagtgtttttttttttttttataatgttttggaccttgtgttcttgaaccatgtcactttcgaatcttgcttcttataagatactagtagttgatattattatgtc

SEQ ID NO: 86301 - protein, 197 aa, Arabidopsis thaliana [sequence omitted]

SEQ ID NO: 86302 - protein, 116 aa, Arabidopsis thaliana; identical to SEQ ID NO: 37501
  peptide (1)..(116): Ceres Seq. ID no. 12688618

SEQ ID NO: 86303 - DNA, 1012 bp, Arabidopsis thaliana
  misc_feature (1)..(1012): Ceres Seq. ID no. 12688631
  misc_feature (1)..(1012): Ortholog of  Ceres SEQ ID NO 15169248 as cited in SEQ ID NO 55022
  misc_feature (1)..(1012): Ortholog of  Ceres SEQ ID NO 12608620 as cited in SEQ ID NO 60192
  misc_feature (1)..(1012): Ortholog of  Ceres SEQ ID NO 13662898 as cited in SEQ ID NO 66199
  misc_feature (1)..(1012): Ortholog of  Ceres SEQ ID NO 13654314 as cited in SEQ ID NO 67914
aattaggttttcttctacacttgttcttcttcatttgctctcttcttcatcaatctctctctttttgtaaacggcgattttaaaatggttgatgcaaaacaagttcgtttcatcatcggagttatcggaaatgttatctcctttggtctctttgccgcaccagcgaagactttctggaggatcttcaagaagaaatcagtggaagagttttcgtatgtgccgtacgtagcaacggtgatgaattgtatgttgtgggtgttttacggtctccctgtggttcacaaagacagtattctagtttcaaccattaatggtgttgggttagttatcgaacttttctacgttggtgtctacttgatgtactgtggtcacaagaagaaccatcgaaggaacattttgggattcttagctcttgaagttattttggtggtggctatcattcttattacgctctttgcgcttaagggtgattttgttaagcaaacatttgttggtgtgatttgcgatgtcttcaacattgctatgtatggagctccttcattggccattattaaagtggtaaaaacaaagagtgttgaatacatgccattcttgttgtctttggtctgtttcgttaatgctggaatttggactacttactcgctcatcttcaagatcgattactacgtcctcgcaagtaatgggattggaacctttttggcactttctcagttgatagtgtacttcatgtactataagtcaactccaaaggagaagacggtgaagccatcagaagttgagatttctgctacggagagggtttaggagaattgtgctttggattctatcttcttacgtacattttacatacacaatttgtgtgtatgtttaggcttttgggtttttatgtttggtagaattttccaatcgtttagtttctggattttgaggattcgtcttggttcattttcttaatacattttttatggtgtgaaacgctttgacggaaatcatcaagttttggatttattct

SEQ ID NO: 86304 - protein, 239 aa, Arabidopsis thaliana; identical to SEQ ID NO: 28773
  peptide (1)..(239): Ceres Seq. ID no. 12688632

SEQ ID NO: 86305 - protein, 188 aa, Arabidopsis thaliana; identical to SEQ ID NO: 28774
  peptide (1)..(188): Ceres Seq. ID no. 12688633

SEQ ID NO: 86306 - protein, 185 aa, Arabidopsis thaliana; identical to SEQ ID NO: 28775
  peptide (1)..(185): Ceres Seq. ID no. 12688634

SEQ ID NO: 86307 - DNA, 1369 bp, Arabidopsis thaliana
  misc_feature (1)..(1369): Ceres Seq. ID no. 12688635
  misc_feature (1)..(1369): Ortholog of  Ceres SEQ ID NO 13639645 as cited in SEQ ID NO 57488
aaattcccagacgtggtgtagtgaacaaccaaaaaaacaacatgattgattgattctgaaattcactttaattttcaagagagagtttctgaggatcttgatatcagaatctgtcatgagagaagcaggagaagagaaagtggcgtggaagtactttaccagagatgttgtgccgtttgctgcgatgtttgcggtggagtgtgccactgttgggtcaaacacgctgtttaaggctgctactttaagaggattgagcttctatgtctttgtcttctactcttatattgtttcaacacttctccttcttccactttctgtaatctttggaaggtcaagaagattaccagcagctaagtctcctcttttcttcaagattttcttacttgggcttgttggattgctggttgtaaaggtattgcatacagttccccaactcttgcatctgctatcagcaatctcacaccggctttcacattcacactcgctgttatcttcaggatggagcaagtaaggttaaggagctctgcgactcaggctaaaatcattggtgcaatactatctatatctggtgctctggtagttgtgctgtataaaggcccacaagttctcgcctctgcatcttttacaactgtattacctaccgttacacttcaccagcagttgacctcaatagagtcaagctggataatcggagggctcttgcttgcttcacagtattttcttatatccgtctgactcgtgtcatggaggtttaccctgaagagataaccgtagtcttcttctacaatttatttgcaacactaatctcagtaccagtatgtctttttgcggagagcaacttgacttcttgggtgcttaaaccagacatttccctcgctgcaatcatatactcgggagtcttcgtttcattattcagcgcgcttacccacacatggggtctgcatctgaagggtccggtatacatatccttgttcaggccattgtctattgcgattgcagtcgccatgggtgctatattcctcggcgatgcacttcaccttgggagtgtcattggatcaatgatattgtgcattggattctacactgtgatttggggcaaagcaagagaggatacaatcaaaactgtagctggttctgagcagtcacctttgctgcttacacatatcatagaagatggagcctttccattaagctaggattgatgcaagtgaaatccttatactatttattaataaatatggatccctaaaagaggtgtaccatatatgtctatagttacatataagatatctgttctttttttcttgttttattttgatgttacatatgaatgagaattatgaatctataagaaatatttggtcctttt

SEQ ID NO: 86308 - protein, 150 aa, Arabidopsis thaliana; identical to SEQ ID NO: 36399
  peptide (1)..(150): Ceres Seq. ID no. 12688636

SEQ ID NO: 86309 - protein, 131 aa, Arabidopsis thaliana; identical to SEQ ID NO: 36400
  peptide (1)..(131): Ceres Seq. ID no. 12688637

SEQ ID NO: 86310 - protein, 108 aa, Arabidopsis thaliana; identical to SEQ ID NO: 36401
  peptide (1)..(108): Ceres Seq. ID no. 12688638

SEQ ID NO: 86311 - DNA, 3039 bp, Arabidopsis thaliana
  misc_feature (1)..(3039): Ceres Seq. ID no. 12688669
  misc_feature (1)..(3039): Ortholog of  Ceres SEQ ID NO 15169032 as cited in SEQ ID NO 55013
atggaagcagcttcaagttttttgtgtagaagtattcggattccgtcgactactacggcgacggcggcgttcacgttcactcgaccgccgttaaactacgtttgtgttgtcggagttcgtgttttcccgacgcggaaggtcttttgcagcggcgttaatggcggctccagtgttactaagaagaagccacgaaggaaaagtaacgtttccgataaacttaggtttaagaaaattgagaagaggaacgataatactgaatctgagagtttaagtgttgttgaggaaccgaagaacgataaagaattgagtcttcgagctttgaatcaaaatggtgatccattagggcggagagatttagggaggaacgtagtgaagtggattagtcaggcgatgaaagcgatggcttcggattttgcaactgcggaggttcagggggagttttcggagttgaggcagaacgtcggatctggtttgacgtttgtgattcaagctcaaccgtatctcaatgctattcccatgccattaggttctgaagtcatttgtttgaaggcttgtactcattatcctaccttgttcgatcatttccagagagagttgcgtgatgttcttcaagacctggagcggaagaatataatggagagttggaaggagtctgagtcttggaagctgctcaaggagattgcaaattcagctcagcatcgggaggttgctcgcaaagctgctcaagctaagcctgttcaaggagttttggggatggactcagagaaggtgaaggctatacaggaaaggattgatgagttcaccagccagatgtcgcagttacttcaagtggaacgagatacagaactggaagttacacaggaagaactagatgttgttcctactccagatgagagctctgattcctcaaaaccgattgagttcttggttaggcatggtgatgctccacaggaactttgtgatacaatttgcaatttgtatgcagttagtacctccacagggctcggaggtatgcacttggtgttgtttaaggttgggggaaaccaccgtcttcctcctactacactttcccctggtgacatggtttgcataagagtttgtgacagtaggggtgctggggcaactgcctgtacgcagggctttgttcacaaccttggagaagatgggtgtagcattggtgtggctctagaatctcgtcatggagatcctactttttccaagctctttggaaagagtgtgagaattgatcgtattcatgggttggccgatgcccttacttacgagcgtaactgcgaagccctaatgcttctgcagaagaatggtctgcagaagaaaaatccatcaatatctgttgtggcgactttatttggggatggtgaagatataacatggctggagcaaaatgattatgtagactggagtgaagcggagttgagtgatgagccagtgagtaagttatttgattcttcccaaaggagagccatagctcttggagtaaacaaaaaaagacctgttatgatagtccaaggacctcctggcacgggaaagactggaatgcttaaggaggtcattaccctggctgttcaacagggggaaagagtacttgtaacagcgcctactaatgcagctgttgataacatggtcgagaagctcttgcatcttggactaaacattgtccgagtaggaaatcccgctagaatatcatctgctgttgcttcaaagtctttgggggaaattgtgaactctaagcttgcaagcttccgagcagaattggaaaggaagaagtcagatttaagaaaagatcttcggcaatgcctgagggatgatgttcttgcagctggcattcggcagctcttgaaacagcttggaaagacgttgaagaagaaggaaaaagagactgtgaaggaaatactatcaaatgcacaggttgtttttgccactaacattggagcagctgatcctttgattaggaggttagaaacatttgatttggttgttatagatgaagctggtcagtctatcgagccttcatgctggatcccaatattgcaagggaaacgttgtattctttccggtgatccatgccaattagcaccagttgttctatcacgtaaagctttagaaggtggacttggtgtatccttactggaaagagctgcatctttacatgatggagttcttgcgacaaaattaacaactcagtatcgtatgaacgatgtaatcgctggttgggcatcaaaggagatgtatggtggatggttgaaatctgctccaagtgtggcctctcatctgcttatcgattctccttttgtgaagaaattttccattttagcattatctggtttctcttgcaactctgttggtttgtctttcatgatactatctttacttgtggttgaaatatctactgattacagcttttttatggccttattgaaaagtgatgttgctcatgagcttgcaatagatgctacttggataacgcaatgcccactggttctgcttgacacaagaatgccatatgggagtttatccgtgggctgcgaggagcgtttggatccagctggcacaggctcattatacaatgaaggagaagcagatattgtggttaatcacgtcatttctttgatatacgcaggtgttagtccaatggctattgctgttcaatccccatatgttgctcaggttcaacttctcagagaaaggctggatgattttccagtggctgatggagttgaggtcgcaaccattgacagctttcaagggcgggaggctgatgcagtgatcatctcaatggtacggtcaaacaacctaggtgcagtgggattcctaggggatagcagacggatgaatgtagccattacaagagcccggaagcacgtggcagtggtatgtgacagctccacaatctgccacaacacgttcctagcaagactgttgcgccacatacgctatttcgggagagttaagcatgcagaccctggtagcttgggagggtcaggactaggcttggacccaatgttgccctaccttggttaa

SEQ ID NO: 86312 - protein, 1012 aa, Arabidopsis thaliana
  peptide (1)..(1012): Ceres Seq. ID no. 12688670
MEAASSFLCRSIRIPSTTTATAAFTFTRPPLNYVCVVGVRVFPTRKVFCSGVNGGSSVTKKKPRRKSNVSDKLRFKKIEKRNDNTESESLSVVEEPKNDKELSLRALNQNGDPLGRRDLGRNVVKWISQAMKAMASDFATAEVQGEFSELRQNVGSGLTFVIQAQPYLNAIPMPLGSEVICLKACTHYPTLFDHFQRELRDVLQDLERKNIMESWKESESWKLLKEIANSAQHREVARKAAQAKPVQGVLGMDSEKVKAIQERIDEFTSQMSQLLQVERDTELEVTQEELDVVPTPDESSDSSKPIEFLVRHGDAPQELCDTICNLYAVSTSTGLGGMHLVLFKVGGNHRLPPTTLSPGDMVCIRVCDSRGAGATACTQGFVHNLGEDGCSIGVALESRHGDPTFSKLFGKSVRIDRIHGLADALTYERNCEALMLLQKNGLQKKNPSISVVATLFGDGEDITWLEQNDYVDWSEAELSDEPVSKLFDSSQRRAIALGVNKKRPVMIVQGPPGTGKTGMLKEVITLAVQQGERVLVTAPTNAAVDNMVEKLLHLGLNIVRVGNPARISSAVASKSLGEIVNSKLASFRAELERKKSDLRKDLRQCLRDDVLAAGIRQLLKQLGKTLKKKEKETVKEILSNAQVVFATNIGAADPLIRRLETFDLVVIDEAGQSIEPSCWIPILQGKRCILSGDPCQLAPVVLSRKALEGGLGVSLLERAASLHDGVLATKLTTQYRMNDVIAGWASKEMYGGWLKSAPSVASHLLIDSPFVKKFSILALSGFSCNSVGLSFMILSLLVVEISTDYSFFMALLKSDVAHELAIDATWITQCPLVLLDTRMPYGSLSVGCEERLDPAGTGSLYNEGEADIVVNHVISLIYAGVSPMAIAVQSPYVAQVQLLRERLDDFPVADGVEVATIDSFQGREADAVIISMVRSNNLGAVGFLGDSRRMNVAITRARKHVAVVCDSSTICHNTFLARLLRHIRYFGRVKHADPGSLGGSGLGLDPMLPYLG

SEQ ID NO: 86313 - protein, 882 aa, Arabidopsis thaliana
  peptide (1)..(882): Ceres Seq. ID no. 12688671
MKAMASDFATAEVQGEFSELRQNVGSGLTFVIQAQPYLNAIPMPLGSEVICLKACTHYPTLFDHFQRELRDVLQDLERKNIMESWKESESWKLLKEIANSAQHREVARKAAQAKPVQGVLGMDSEKVKAIQERIDEFTSQMSQLLQVERDTELEVTQEELDVVPTPDESSDSSKPIEFLVRHGDAPQELCDTICNLYAVSTSTGLGGMHLVLFKVGGNHRLPPTTLSPGDMVCIRVCDSRGAGATACTQGFVHNLGEDGCSIGVALESRHGDPTFSKLFGKSVRIDRIHGLADALTYERNCEALMLLQKNGLQKKNPSISVVATLFGDGEDITWLEQNDYVDWSEAELSDEPVSKLFDSSQRRAIALGVNKKRPVMIVQGPPGTGKTGMLKEVITLAVQQGERVLVTAPTNAAVDNMVEKLLHLGLNIVRVGNPARISSAVASKSLGEIVNSKLASFRAELERKKSDLRKDLRQCLRDDVLAAGIRQLLKQLGKTLKKKEKETVKEILSNAQVVFATNIGAADPLIRRLETFDLVVIDEAGQSIEPSCWIPILQGKRCILSGDPCQLAPVVLSRKALEGGLGVSLLERAASLHDGVLATKLTTQYRMNDVIAGWASKEMYGGWLKSAPSVASHLLIDSPFVKKFSILALSGFSCNSVGLSFMILSLLVVEISTDYSFFMALLKSDVAHELAIDATWITQCPLVLLDTRMPYGSLSVGCEERLDPAGTGSLYNEGEADIVVNHVISLIYAGVSPMAIAVQSPYVAQVQLLRERLDDFPVADGVEVATIDSFQGREADAVIISMVRSNNLGAVGFLGDSRRMNVAITRARKHVAVVCDSSTICHNTFLARLLRHIRYFGRVKHADPGSLGGSGLGLDPMLPYLG

SEQ ID NO: 86314 - protein, 879 aa, Arabidopsis thaliana
  peptide (1)..(879): Ceres Seq. ID no. 12688672
MASDFATAEVQGEFSELRQNVGSGLTFVIQAQPYLNAIPMPLGSEVICLKACTHYPTLFDHFQRELRDVLQDLERKNIMESWKESESWKLLKEIANSAQHREVARKAAQAKPVQGVLGMDSEKVKAIQERIDEFTSQMSQLLQVERDTELEVTQEELDVVPTPDESSDSSKPIEFLVRHGDAPQELCDTICNLYAVSTSTGLGGMHLVLFKVGGNHRLPPTTLSPGDMVCIRVCDSRGAGATACTQGFVHNLGEDGCSIGVALESRHGDPTFSKLFGKSVRIDRIHGLADALTYERNCEALMLLQKNGLQKKNPSISVVATLFGDGEDITWLEQNDYVDWSEAELSDEPVSKLFDSSQRRAIALGVNKKRPVMIVQGPPGTGKTGMLKEVITLAVQQGERVLVTAPTNAAVDNMVEKLLHLGLNIVRVGNPARISSAVASKSLGEIVNSKLASFRAELERKKSDLRKDLRQCLRDDVLAAGIRQLLKQLGKTLKKKEKETVKEILSNAQVVFATNIGAADPLIRRLETFDLVVIDEAGQSIEPSCWIPILQGKRCILSGDPCQLAPVVLSRKALEGGLGVSLLERAASLHDGVLATKLTTQYRMNDVIAGWASKEMYGGWLKSAPSVASHLLIDSPFVKKFSILALSGFSCNSVGLSFMILSLLVVEISTDYSFFMALLKSDVAHELAIDATWITQCPLVLLDTRMPYGSLSVGCEERLDPAGTGSLYNEGEADIVVNHVISLIYAGVSPMAIAVQSPYVAQVQLLRERLDDFPVADGVEVATIDSFQGREADAVIISMVRSNNLGAVGFLGDSRRMNVAITRARKHVAVVCDSSTICHNTFLARLLRHIRYFGRVKHADPGSLGGSGLGLDPMLPYLG

SEQ ID NO: 86315 - DNA, 1218 bp, Arabidopsis thaliana
  misc_feature (1)..(1218): Ceres Seq. ID no. 12688705
  misc_feature (1)..(1218): Ortholog of  Ceres SEQ ID NO 13597546 as cited in SEQ ID NO 65017
  misc_feature (1)..(1218): Ortholog of  Ceres SEQ ID NO 13654353 as cited in SEQ ID NO 68318
atggcaatcatgattatcctcttccttagctccattcttctttctctcctattgctccttagaaaacatttgtcacacttctcctatcccaaccttcctcccggaaataccggccttcccttaatcggagagagtttctccttcctctctgctggccgtcaaggccatccagagaagttcatcactgaccgagttcgtcgtttctcctcctcctcctcatgtgtcttcaagacccacctctttgggtctcccaccgcggtggtgactggtgcatctgggaacaagtttctattcactaacgagaacaagcttgtggtctcgtggttcacgttttcaatagcatgccgttcgttcctgagcatggaagatcccgcaagagtaaggcaactagaagagcaattcaatacggtagcggtagggatcttctcaatcccaatagacttgccaggaacacggtttaaccgagccatcaaggcgtcgaggttactcagaaaagaggtttccgctatcgtaaggcagaggaaagaagagctcaaagccgggaaagcattagaggagcacgacatattatctcacatgttgatgaatataggagagaccaaagacgaggatttggctgataaaattattggattgttaatcggaggacatgacacagctagtatcgtatgcactttcgttgtcaattatcttgctgaattccctcatgtctaccaacgtgtgctacaagagcaaaaggagatactaaaggagaaaaaagaaaaggaaggattaaggtgggaggacattgagaaaatgagatattcatggaatgttgcatgtgaagtgatgagaattgttcctcctctttctggcacttttcgtgaggccattgatcacttctcttttaagggtttttacattcccaaaggatggaagttatattggagtgccaccgcgacacatatgaatccagactacttcccagaaccagagagatttgagccaaaccgtttcgaaggaagtggtccgaagccttatacctatgttccatttggaggaggaccaagaatgtgtccagggaaagagtatgctcgtctagagattcttatattcatgcacaatcttgttaatagatttaagtgggaaaaagtgtttccaaatgaaaataaaatagttgttgatcccttaccaataccagacaaaggtctccctataagaatttttcctcaatcttga

SEQ ID NO: 86316 - protein, 405 aa, Arabidopsis thaliana
  peptide (1)..(405): Ceres Seq. ID no. 12688706
MAIMIILFLSSILLSLLLLLRKHLSHFSYPNLPPGNTGLPLIGESFSFLSAGRQGHPEKFITDRVRRFSSSSSCVFKTHLFGSPTAVVTGASGNKFLFTNENKLVVSWFTFSIACRSFLSMEDPARVRQLEEQFNTVAVGIFSIPIDLPGTRFNRAIKASRLLRKEVSAIVRQRKEELKAGKALEEHDILSHMLMNIGETKDEDLADKIIGLLIGGHDTASIVCTFVVNYLAEFPHVYQRVLQEQKEILKEKKEKEGLRWEDIEKMRYSWNVACEVMRIVPPLSGTFREAIDHFSFKGFYIPKGWKLYWSATATHMNPDYFPEPERFEPNRFEGSGPKPYTYVPFGGGPRMCPGKEYARLEILIFMHNLVNRFKWEKVFPNENKIVVDPLPIPDKGLPIRIFPQS

SEQ ID NO: 86317 - protein, 402 aa, Arabidopsis thaliana
  peptide (1)..(402): Ceres Seq. ID no. 12688707
MIILFLSSILLSLLLLLRKHLSHFSYPNLPPGNTGLPLIGESFSFLSAGRQGHPEKFITDRVRRFSSSSSCVFKTHLFGSPTAVVTGASGNKFLFTNENKLVVSWFTFSIACRSFLSMEDPARVRQLEEQFNTVAVGIFSIPIDLPGTRFNRAIKASRLLRKEVSAIVRQRKEELKAGKALEEHDILSHMLMNIGETKDEDLADKIIGLLIGGHDTASIVCTFVVNYLAEFPHVYQRVLQEQKEILKEKKEKEGLRWEDIEKMRYSWNVACEVMRIVPPLSGTFREAIDHFSFKGFYIPKGWKLYWSATATHMNPDYFPEPERFEPNRFEGSGPKPYTYVPFGGGPRMCPGKEYARLEILIFMHNLVNRFKWEKVFPNENKIVVDPLPIPDKGLPIRIFPQS

SEQ ID NO: 86318 - protein, 285 aa, Arabidopsis thaliana
  peptide (1)..(285): Ceres Seq. ID no. 12688708
MEDPARVRQLEEQFNTVAVGIFSIPIDLPGTRFNRAIKASRLLRKEVSAIVRQRKEELKAGKALEEHDILSHMLMNIGETKDEDLADKIIGLLIGGHDTASIVCTFVVNYLAEFPHVYQRVLQEQKEILKEKKEKEGLRWEDIEKMRYSWNVACEVMRIVPPLSGTFREAIDHFSFKGFYIPKGWKLYWSATATHMNPDYFPEPERFEPNRFEGSGPKPYTYVPFGGGPRMCPGKEYARLEILIFMHNLVNRFKWEKVFPNENKIVVDPLPIPDKGLPIRIFPQS

SEQ ID NO: 86319 - DNA, 2043 bp, Arabidopsis thaliana
  misc_feature (1)..(2043): Ceres Seq. ID no. 12688727
  misc_feature (1)..(2043): Ortholog of  Ceres SEQ ID NO 13599132 as cited in SEQ ID NO 0
atgtcttcttcttcccccgacgctgctcagactcctctaaccaccgctccttatggctcctggaaatctccaatcaccgccgacatcgtttccggagcttcaaagcgtcttggcggcaccgccgtcgattctcatggccgtctcgtcttgctcgagtctcgccctaacgaatccgggagaggagttttggtgctacaaggagaaacatcaattgatattactccaaaagacttcgctgtgagaactttaacacaagaatacggtggtggtgctttccagatttcatcagatgatacacttgtgttctctaattacaaggatcagcgattgtacaagcaagacattactgataaagatggagtctttgattcacgctttaaccgttatgttactgttagggaagatggtcgccaggatagatcaaacccaattacaacaatcgtggaggttaatctaagtggagagacacttgaaggtagattatcaaactttagtgaaagaagtattcttactcccattgaaagagtctataggggatatccagaaccaaaagtactcgtaagtggcaatgatttctatgcatttccacggttggatcccaagtgtgagcgattggcatggattgaatggagtcaccctaatatgccatgggataaagcagagctgtgggttgggtacatttccgagggcggaaatattgataagcgcgtatgtgttgctggttgtgatcccaaatacgtcgaatcacccactgagccgaagtggtcatcaagaggggaactcttttttgtaactgacagaaagaatggatgttggaatattcataaatggattgagagtaccaatgaggttgtttctgtatatcctctcgacggtgagtttgcgaaaccactatggattttcggtactaactcctacgagataatcgagtgttctgaagagaagaacctaattgcatgcagctataggcagaaagggaagtcatatctaggcattgtagatgattcacagggatcatgttctctgctcgatattcctttaacggattttgacagcattacattgggaaatcagtgcctttatgttgagggagcatcagcagttcttccaccatcagttgccagggtaacactggatcagcataagacgaaagcactcagttctgagattgtttggtcgtcgtcacccgatgttttgaagtacaaggcttacttcagcgtgccagagttgattgaatttccaacagaggttcctggtcagaacgcttatgcatacttttatcctccaaccaatccgctctacaatgctagcatggaagagaaacctccgttgttagtgaagagtcatggaggacctactgctgaatcacgtggatccttaaatctgaatatccaatactggacaagtcgaggttgggcatttgttgatgtcaattatggtggaagcacaggttatggtcgagagtatcgagagcggttgttaaggcagtggggaatagtcgacgttgatgactgttgtggctgtgctaaatacttggtatcttctggcaaggcagatgttaagcggctctgtatatctggcggttctgcaggaggttacacaactcttgcatcattggcgttcagggatgttttcaaagctggagcgtccttatacggagtggctgatttaaaaatgttgaaagaagaaggtcataaatttgaatcccgttatatcgacaatcttgttggagatgaaaaagatttctatgagagatcaccaatcaatttcgtcgataagttctcttgtcccatcatccttttccaaggactagaagacaaggttgtaactccagatcaatcacgtaaaatctatgaagcattaaagaaaaaaggtctgcctgttgctcttgtcgagtacgaaggagaacaacacggttttcgcaaggcggaaaacatcaaatacacacttgagcaacagatggtgttctttgcccgagtggttggagggttcaaagttgctgatgacatcactcctttgaaaattgacaacttcgacacttag

SEQ ID NO: 86320 - protein, 680 aa, Arabidopsis thaliana
  peptide (1)..(680): Ceres Seq. ID no. 12688728
MSSSSPDAAQTPLTTAPYGSWKSPITADIVSGASKRLGGTAVDSHGRLVLLESRPNESGRGVLVLQGETSIDITPKDFAVRTLTQEYGGGAFQISSDDTLVFSNYKDQRLYKQDITDKDGVFDSRFNRYVTVREDGRQDRSNPITTIVEVNLSGETLEGRLSNFSERSILTPIERVYRGYPEPKVLVSGNDFYAFPRLDPKCERLAWIEWSHPNMPWDKAELWVGYISEGGNIDKRVCVAGCDPKYVESPTEPKWSSRGELFFVTDRKNGCWNIHKWIESTNEVVSVYPLDGEFAKPLWIFGTNSYEIIECSEEKNLIACSYRQKGKSYLGIVDDSQGSCSLLDIPLTDFDSITLGNQCLYVEGASAVLPPSVARVTLDQHKTKALSSEIVWSSSPDVLKYKAYFSVPELIEFPTEVPGQNAYAYFYPPTNPLYNASMEEKPPLLVKSHGGPTAESRGSLNLNIQYWTSRGWAFVDVNYGGSTGYGREYRERLLRQWGIVDVDDCCGCAKYLVSSGKADVKRLCISGGSAGGYTTLASLAFRDVFKAGASLYGVADLKMLKEEGHKFESRYIDNLVGDEKDFYERSPINFVDKFSCPIILFQGLEDKVVTPDQSRKIYEALKKKGLPVALVEYEGEQHGFRKAENIKYTLEQQMVFFARVVGGFKVADDITPLKIDNFDT

SEQ ID NO: 86321 - protein, 466 aa, Arabidopsis thaliana; identical to SEQ ID NO: 44637
  peptide (1)..(466): Ceres Seq. ID no. 12688729

SEQ ID NO: 86322 - DNA, 552 bp, Arabidopsis thaliana
  misc_feature (1)..(552): Ceres Seq. ID no. 12688797
  misc_feature (1)..(552): Ortholog of  Ceres SEQ ID NO 13663563 as cited in SEQ ID NO 66853
atgggaatgtcgaaatcgaaaggcaacacacacaacatcttccttctctgcaactacatcctcttaggctcagcctcaagttgcatcttcctcacaatctccctccgtctcttcccatctctctccggtctctcccttatcttcctctacactctcacaatcgcaaccgcggtatccggctgctcgatcttcgcctcctccacatccgccaccgcgagcgatagattatacggttcacacatggtagccacagtcctcacggccattttccaaggcgctgtctctgttctgatattcacgagaacaggggatttccttaggttcttgaaatcttatgttcgggaagaagacggtgaagtgatacttaaactctctggtggtttgtgtgtattgatgttttgcttagagtggattgttcttgtgttagcgtttttgttgaagtatagtgattatttggatgagagtgttgtagatgatgatgattttaaggtgaggaggcaagaagaagatctcaaggattggccttcttacccatttcaactcaagatttaa

SEQ ID NO: 86323 - protein, 183 aa, Arabidopsis thaliana; identical to SEQ ID NO: 30610
  peptide (1)..(183): Ceres Seq. ID no. 12688798

SEQ ID NO: 86324 - protein, 181 aa, Arabidopsis thaliana; identical to SEQ ID NO: 30611
  peptide (1)..(181): Ceres Seq. ID no. 12688799

SEQ ID NO: 86325 - protein, 103 aa, Arabidopsis thaliana
  peptide (1)..(103): Ceres Seq. ID no. 12688800
MVATVLTAIFQGAVSVLIFTRTGDFLRFLKSYVREEDGEVILKLSGGLCVLMFCLEWIVLVLAFLLKYSDYLDESVVDDDDFKVRRQEEDLKDWPSYPFQLKI

SEQ ID NO: 86326 - DNA, 1851 bp, Arabidopsis thaliana
  misc_feature (1)..(1851): Ceres Seq. ID no. 12688835
  misc_feature (1)..(1851): Ortholog of  Ceres SEQ ID NO 13596319 as cited in SEQ ID NO 67933
atgggttgtttaagaagcttagtaagaaggaaacaattcgactcttcaaatggcaaagcagagactcatcatcatcaccaacagcttgcaaaagcgttgacctttcctcacttgattgccattggtgttggatcaacaattggagcaggggtttatattcttgtgggaacagtagctagagagcattcaggacctgctcttgctttatccttccttatagctggaatttctgctgccctttctgcgttttgttatgcggaactatctagtcgttttccctctgctgggagtgcctatcattattcttacatttgcattggtgaaggtgttgcgtggttgattggctgggcgctgattttggaatacacaattggtggttcaacagttgcccgcggcatatctccaaatctggcaatgattttcggtggtgaagattgtctgcctacaatattagctcgtcatcaaatcccaggccttgatattgttgttgacccgtgtgctgctgtgctagtgttcattgtaacaggactttgttgccttggagtaaaggagagcacatttgctcagggaattgtaacaacagcaaatgtctttgtcatgatatttgtcatagtagctggaagctatttgtgtttcaagacaggttgggttggttatgaacttccaacggggtattttccttacggggttgatggaatgcttactggatctgctactgtcttctttgcctacatcgggtttgatacagttgcaagtatggcagaggaggtgaaaaatccccggcgggatttaccgctcggtattgggatttcgctcctgctttgttgtttgctgtacatgatggtgtctgttgttattgttggtttagtgccgtattatgctatggaccctgacactccaatatcatccgcattttctagtcatggaattcaatgggctgcatatttgataaatttaggtgctgtcatggctctctgttctgcattaatgggctccattctccctcagccgcggattctgatggcaatggctagggatggtctcttgccttcatatttctcatatgtgaatcaacgcacgcaggttccaattaatggcaccataaccactggtgtttgtgcagcaatcttagctttctttatggatgtttcgcaactggcgggaatggtgagtgtcgggacacttgttgcatttacaatggttgcaatatcattgttgatagtcagatatgttgttcctccagatgaggtactgataagattggaactggtacctcttccctcatcacttcaagaaaactcatccagtcacgtcggaacttccatccgtagtaaacaacctttacttggcaaagtggatgattcagttgtcgataaggaaaatgctccaggaagttgggttctcaacaaaaaaaacagacggaaatttgctggttggagcattatgttcacttgtattggaaacttccttttaagctatgcagcgtcaagcttcctcttgccaggactcctccgatattctctatgtggtgttggtggattgttccttcttgtcggtttgattgttctgatttgcatagatcaggatgatgctagacacagttttgggcattctggaggcttcatttgcccgtttgttccgcttttgcctatagtttgcattcttatcaacatgtatctcttggtaaaccttggagctgcgacgtgggttcgtgtatcggtttggctgttcctcggagtggttgtttacattttctatgggagaagaaacagctctcttgtgaatgctgtttatgtctccactgctcatctccaggagattcgtcgcacttctggacattctttggcttaa

SEQ ID NO: 86327 - protein, 616 aa, Arabidopsis thaliana
  peptide (1)..(616): Ceres Seq. ID no. 12688836
MGCLRSLVRRKQFDSSNGKAETHHHHQQLAKALTFPHLIAIGVGSTIGAGVYILVGTVAREHSGPALALSFLIAGISAALSAFCYAELSSRFPSAGSAYHYSYICIGEGVAWLIGWALILEYTIGGSTVARGISPNLAMIFGGEDCLPTILARHQIPGLDIVVDPCAAVLVFIVTGLCCLGVKESTFAQGIVTTANVFVMIFVIVAGSYLCFKTGWVGYELPTGYFPYGVDGMLTGSATVFFAYIGFDTVASMAEEVKNPRRDLPLGIGISLLLCCLLYMMVSVVIVGLVPYYAMDPDTPISSAFSSHGIQWAAYLINLGAVMALCSALMGSILPQPRILMAMARDGLLPSYFSYVNQRTQVPINGTITTGVCAAILAFFMDVSQLAGMVSVGTLVAFTMVAISLLIVRYVVPPDEVLIRLELVPLPSSLQENSSSHVGTSIRSKQPLLGKVDDSVVDKENAPGSWVLNKKNRRKFAGWSIMFTCIGNFLLSYAASSFLLPGLLRYSLCGVGGLFLLVGLIVLICIDQDDARHSFGHSGGFICPFVPLLPIVCILINMYLLVNLGAATWVRVSVWLFLGVVVYIFYGRRNSSLVNAVYVSTAHLQEIRRTSGHSLA

SEQ ID NO: 86328 - protein, 478 aa, Arabidopsis thaliana; identical to SEQ ID NO: 72812
  peptide (1)..(478): Ceres Seq. ID no. 12688837

SEQ ID NO: 86329 - protein, 417 aa, Arabidopsis thaliana
  peptide (1)..(417): Ceres Seq. ID no. 12688838
MIFVIVAGSYLCFKTGWVGYELPTGYFPYGVDGMLTGSATVFFAYIGFDTVASMAEEVKNPRRDLPLGIGISLLLCCLLYMMVSVVIVGLVPYYAMDPDTPISSAFSSHGIQWAAYLINLGAVMALCSALMGSILPQPRILMAMARDGLLPSYFSYVNQRTQVPINGTITTGVCAAILAFFMDVSQLAGMVSVGTLVAFTMVAISLLIVRYVVPPDEVLIRLELVPLPSSLQENSSSHVGTSIRSKQPLLGKVDDSVVDKENAPGSWVLNKKNRRKFAGWSIMFTCIGNFLLSYAASSFLLPGLLRYSLCGVGGLFLLVGLIVLICIDQDDARHSFGHSGGFICPFVPLLPIVCILINMYLLVNLGAATWVRVSVWLFLGVVVYIFYGRRNSSLVNAVYVSTAHLQEIRRTSGHSLA

SEQ ID NO: 86330 - DNA, 1578 bp, Arabidopsis thaliana
  misc_feature (1)..(1578): Ceres Seq. ID no. 12688848
  misc_feature (1)..(1578): Ortholog of  Ceres SEQ ID NO 14306420 as cited in SEQ ID NO 53854
atggagtgttttggtattccctgtcggaattctttttgcttgtctccaattaaggtttcagtgattgagttaactaactccaatgtcactcaagtttctgtgatgaactacacaaatctttctgatgatgatgatgaggaacttgaaaataaaaaggaggatcttgatagcgaaaatgatgtggtgattagtaaggagaaggtagagatgaatgtatcttttattgctataggaaatatatctttaaggaatcctaaaatggtggttgttagctcagagtcagagtcagatccaaattcggttatgattagggttaaagatagtagaaagggtaatgttttatctctgaggaggcacaagcaagggagtgcgatttcgatatctcagatgaactcattgctgatccagagtctttcttcttttaaatctcctaagcctcggtggtcatctgctagagactctgaaatgctctctgcgagatccgagattgagaaagtctctcttgttcatgattttcttggacttaatcctttggtttatcgaaatatctccaagtttctaaggagttatgacttgatggagaggaaactcaagatttatgtgtacaaggaaggagggaaaccaatattccacacgccgatgcctcgaggaatatacgcttcagaaggttggtttatgaaactcatggaaagcaacaagaagtttgtagtaaaagaccccaggaaggctcatttgttctacatacccatcagcataaaagctcttaggtcctctctgggactggattttcagacaccgaagagtcttgcagaccatttgaaagaatatgtcgatctgatagcaggaaagtataagttctggaaccgaactggtggagctgatcattttcttgttgcttgtcatgattggggcaacaaactgacaacaaaaaccatgaagaacagtgttagatcactttgtaactcaaatgttgcccaaggcttcagaattgggaccgatactgctttaccggtaacatatatacgctcttccgaggcccctcttgagtatctcggtggaaaaacttcgtccgaaaggaagattcttgcattctttgctggcagcatgcacggatatctccgtccgatactagtgaagctttgggagaataaagaacctgacatgaagatttttggtccaatgcctcgtgaccctaaaagcaagaaacaataccgagaatatatgaagagcagcaggtactgcatatgtgcgaggggttatgaagtccacactcctagggttgtcgaggctatcattaatgaatgtgttccggttatcattgctgacaactacgtgcctccctttttcgaggttttgaactgggaggaatttgctgtgtttgttgaggagaaagatataccgaatctgagaaacattctgctatccatacccgaagatagatatattggcatgcaagcaagggttaaagcggtgcagcaacatttcctgtggcacaagaaaccggtgaagttcgatcaattccatatgattttgcattctatttggtacagccgagttcatagaattaaaaccaggtga

SEQ ID NO: 86331 - protein, 525 aa, Arabidopsis thaliana
  peptide (1)..(525): Ceres Seq. ID no. 12688849
MECFGIPCRNSFCLSPIKVSVIELTNSNVTQVSVMNYTNLSDDDDEELENKKEDLDSENDVVISKEKVEMNVSFIAIGNISLRNPKMVVVSSESESDPNSVMIRVKDSRKGNVLSLRRHKQGSAISISQMNSLLIQSLSSFKSPKPRWSSARDSEMLSARSEIEKVSLVHDFLGLNPLVYRNISKFLRSYDLMERKLKIYVYKEGGKPIFHTPMPRGIYASEGWFMKLMESNKKFVVKDPRKAHLFYIPISIKALRSSLGLDFQTPKSLADHLKEYVDLIAGKYKFWNRTGGADHFLVACHDWGNKLTTKTMKNSVRSLCNSNVAQGFRIGTDTALPVTYIRSSEAPLEYLGGKTSSERKILAFFAGSMHGYLRPILVKLWENKEPDMKIFGPMPRDPKSKKQYREYMKSSRYCICARGYEVHTPRVVEAIINECVPVIIADNYVPPFFEVLNWEEFAVFVEEKDIPNLRNILLSIPEDRYIGMQARVKAVQQHFLWHKKPVKFDQFHMILHSIWYSRVHRIKTR

SEQ ID NO: 86332 - protein, 491 aa, Arabidopsis thaliana
  peptide (1)..(491): Ceres Seq. ID no. 12688850
MNYTNLSDDDDEELENKKEDLDSENDVVISKEKVEMNVSFIAIGNISLRNPKMVVVSSESESDPNSVMIRVKDSRKGNVLSLRRHKQGSAISISQMNSLLIQSLSSFKSPKPRWSSARDSEMLSARSEIEKVSLVHDFLGLNPLVYRNISKFLRSYDLMERKLKIYVYKEGGKPIFHTPMPRGIYASEGWFMKLMESNKKFVVKDPRKAHLFYIPISIKALRSSLGLDFQTPKSLADHLKEYVDLIAGKYKFWNRTGGADHFLVACHDWGNKLTTKTMKNSVRSLCNSNVAQGFRIGTDTALPVTYIRSSEAPLEYLGGKTSSERKILAFFAGSMHGYLRPILVKLWENKEPDMKIFGPMPRDPKSKKQYREYMKSSRYCICARGYEVHTPRVVEAIINECVPVIIADNYVPPFFEVLNWEEFAVFVEEKDIPNLRNILLSIPEDRYIGMQARVKAVQQHFLWHKKPVKFDQFHMILHSIWYSRVHRIKTR

SEQ ID NO: 86333 - protein, 456 aa, Arabidopsis thaliana
  peptide (1)..(456): Ceres Seq. ID no. 12688851
MNVSFIAIGNISLRNPKMVVVSSESESDPNSVMIRVKDSRKGNVLSLRRHKQGSAISISQMNSLLIQSLSSFKSPKPRWSSARDSEMLSARSEIEKVSLVHDFLGLNPLVYRNISKFLRSYDLMERKLKIYVYKEGGKPIFHTPMPRGIYASEGWFMKLMESNKKFVVKDPRKAHLFYIPISIKALRSSLGLDFQTPKSLADHLKEYVDLIAGKYKFWNRTGGADHFLVACHDWGNKLTTKTMKNSVRSLCNSNVAQGFRIGTDTALPVTYIRSSEAPLEYLGGKTSSERKILAFFAGSMHGYLRPILVKLWENKEPDMKIFGPMPRDPKSKKQYREYMKSSRYCICARGYEVHTPRVVEAIINECVPVIIADNYVPPFFEVLNWEEFAVFVEEKDIPNLRNILLSIPEDRYIGMQARVKAVQQHFLWHKKPVKFDQFHMILHSIWYSRVHRIKTR

SEQ ID NO: 86334 - DNA, 1605 bp, Arabidopsis thaliana
  misc_feature (1)..(1605): Ceres Seq. ID no. 12688861
  misc_feature (1)..(1605): Ortholog of  Ceres SEQ ID NO 13646221 as cited in SEQ ID NO 20310
atgtggtgtttgtcctgctttaaaccttccactaaacatgatccctctgaggatcgttttgaagaagaaacaaatatcgttacaggtatttctctgtatgaagatgtcatcttacgtcagagaagatcagaagctgatcagatagaatgggctattcaagatagcttcaacccgcaagaaacttctcgttgtcgtcagcgagaggaggatgatcagatagcgcgtggtttgcaatatgtggaagaaactgagcttgataaatcagttgtggacgaagaagatcagcagctttctaagattgttgaggagagtttgaaggagaaaggcaaaagtaagcaatttgaagatgatcaagtggaaaatgatgaacagcaagctctgatggttcaggagagtctatacatggtggagctttctgctcaacttgaagaagataaaaacatttcaacaatacctccgctgaatgaagatgcgcagcttcagaaggttatttgggaaagcgcgaagggtaaaggccaaatagagcatttcaaagatccagtggaagaagatggaaatcttccaagggtagatctcaacgttaaccatcctcatagcatatgtgatggttgcaaatctgcgattgaatatggaagatctgttcatgccttgggtgttaattggcatcctgaatgtttctgttgtcgttattgcgacaaaccaatcgctatgcacgagtttcctggtagaaagtataaagaacatcccttctggaaggaaaagtactgcccttttcatgaagttgatggaactcccaagtgttgcagttgtgaaagattagagccctggggaacgaagtatgtaatgcttgctgacaatcggtggctatgcgtaaaatgtatggaatgcgcggttatggatacttatgagtgccaaccattgcactttgaaatccgtgaattcttcggaagcttaaacatgaaggttgagaaagaattccctcttcttttggtggagaaagaagcgctgaaaaaagctgaggcgcaagaaaagatcgacaatcagcatggggttgtaaccagaggtatttgcctgtctgaagggcagattgtcaatagtgtctttaaaaagccaaccatggggccaaacggcgagctagtaagcttgggtacagaacctcaaaaggttgttggtggatgtgaggtcactgcaattctcatcctatatggacttcctaggttactaactggatatatcttggctcatgagatgatgcatgcttggcttagactcaatggttataggaatcttaagttagagctggaagaaggaatatgccaagtgctaggccacatgtggttggagtcacagacatactccagttctgcagctgcatcatcagcttcttcttcttcgaggactccagctgctaatgcatcaaagaaaggtgctcaatctgattacgagaagaaactggtggaattttgcaaggatcagatagaaacagacgattcaccggtctacggtgttggattcaggaaagttaaccagatggtctcagactccagcctccataaaatcctgaaaagtattcaacactggacgaaaccagattcaaatctttga

SEQ ID NO: 86335 - protein, 534 aa, Arabidopsis thaliana
  peptide (1)..(534): Ceres Seq. ID no. 12688862
MWCLSCFKPSTKHDPSEDRFEEETNIVTGISLYEDVILRQRRSEADQIEWAIQDSFNPQETSRCRQREEDDQIARGLQYVEETELDKSVVDEEDQQLSKIVEESLKEKGKSKQFEDDQVENDEQQALMVQESLYMVELSAQLEEDKNISTIPPLNEDAQLQKVIWESAKGKGQIEHFKDPVEEDGNLPRVDLNVNHPHSICDGCKSAIEYGRSVHALGVNWHPECFCCRYCDKPIAMHEFPGRKYKEHPFWKEKYCPFHEVDGTPKCCSCERLEPWGTKYVMLADNRWLCVKCMECAVMDTYECQPLHFEIREFFGSLNMKVEKEFPLLLVEKEALKKAEAQEKIDNQHGVVTRGICLSEGQIVNSVFKKPTMGPNGELVSLGTEPQKVVGGCEVTAILILYGLPRLLTGYILAHEMMHAWLRLNGYRNLKLELEEGICQVLGHMWLESQTYSSSAAASSASSSSRTPAANASKKGAQSDYEKKLVEFCKDQIETDDSPVYGVGFRKVNQMVSDSSLHKILKSIQHWTKPDSNL

SEQ ID NO: 86336 - protein, 407 aa, Arabidopsis thaliana
  peptide (1)..(407): Ceres Seq. ID no. 12688863
MVQESLYMVELSAQLEEDKNISTIPPLNEDAQLQKVIWESAKGKGQIEHFKDPVEEDGNLPRVDLNVNHPHSICDGCKSAIEYGRSVHALGVNWHPECFCCRYCDKPIAMHEFPGRKYKEHPFWKEKYCPFHEVDGTPKCCSCERLEPWGTKYVMLADNRWLCVKCMECAVMDTYECQPLHFEIREFFGSLNMKVEKEFPLLLVEKEALKKAEAQEKIDNQHGVVTRGICLSEGQIVNSVFKKPTMGPNGELVSLGTEPQKVVGGCEVTAILILYGLPRLLTGYILAHEMMHAWLRLNGYRNLKLELEEGICQVLGHMWLESQTYSSSAAASSASSSSRTPAANASKKGAQSDYEKKLVEFCKDQIETDDSPVYGVGFRKVNQMVSDSSLHKILKSIQHWTKPDSNL

SEQ ID NO: 86337 - protein, 400 aa, Arabidopsis thaliana
  peptide (1)..(400): Ceres Seq. ID no. 12688864
MVELSAQLEEDKNISTIPPLNEDAQLQKVIWESAKGKGQIEHFKDPVEEDGNLPRVDLNVNHPHSICDGCKSAIEYGRSVHALGVNWHPECFCCRYCDKPIAMHEFPGRKYKEHPFWKEKYCPFHEVDGTPKCCSCERLEPWGTKYVMLADNRWLCVKCMECAVMDTYECQPLHFEIREFFGSLNMKVEKEFPLLLVEKEALKKAEAQEKIDNQHGVVTRGICLSEGQIVNSVFKKPTMGPNGELVSLGTEPQKVVGGCEVTAILILYGLPRLLTGYILAHEMMHAWLRLNGYRNLKLELEEGICQVLGHMWLESQTYSSSAAASSASSSSRTPAANASKKGAQSDYEKKLVEFCKDQIETDDSPVYGVGFRKVNQMVSDSSLHKILKSIQHWTKPDSNL

SEQ ID NO: 86338 - DNA, 966 bp, Arabidopsis thaliana
  misc_feature (1)..(966): Ceres Seq. ID no. 12688873
  misc_feature (1)..(966): Ortholog of  Ceres SEQ ID NO 12336358 as cited in SEQ ID NO 20733
  misc_feature (1)..(966): Ortholog of  Ceres SEQ ID NO 12623467 as cited in SEQ ID NO 60951
  misc_feature (1)..(966): Ortholog of  Ceres SEQ ID NO 14309133 as cited in SEQ ID NO 0
atgtcgtcgaagaaatccctagttcaaagtctcttcaacatttccaaaacctactccaggatttctggtcttacccgaatgcgtccgaccaaatccggcggcattcctcccgacgccggagattctggaatccgccgcagatttctccacaagagggcatttttctcgccggagatagttcctaaaggtggtaacttgatggagaaactcagggaattgactttgtccaataataatcgtattagactcgacgagatgttaccgccaccttcgccgaagaaatcatcaccggagtttttcccggcggtcacggtggaagacgtgaagaagctcatgagagcagcggaaatggagctggtgaaatcgaagctgagagagattggcaagaactgggttccttattcggagtttgttcgggtctgcggagaatacagttcggatcctgaacaaggtaaccgggtcgcgaatatgcttgacgaagctggaaacgtcatcgttttgggaaaactcgtctgccttaaacccgaagagctaacaagcgccatggctggtctgattccgacactcgaacccagtctcgacgccgagacaagacaagagttcgaacaacttgagatcataaaatcagatatcgacaaaagagccgatgatctggttcgaaaagaattatgggccggattaggcctaataatggcccaaacagttggattttttaggctgacgttttgggaactgtcgtgggacgtgatggaacccatatgcttctacgtaacttcgacatatttcatggctggttacgccttcttcctccgaacttcaaaggaaccttcctttgaaggtttttacaaaagccggttcgagacgaagcagaaacgtttgattaaaatgcttgatttcgatatcgatcgatttaccaagctacagaagatgcatcgtccaaatttgactaaatctggtcgttgttga

SEQ ID NO: 86339 - protein, 321 aa, Arabidopsis thaliana
  peptide (1)..(321): Ceres Seq. ID no. 12688874
MSSKKSLVQSLFNISKTYSRISGLTRMRPTKSGGIPPDAGDSGIRRRFLHKRAFFSPEIVPKGGNLMEKLRELTLSNNNRIRLDEMLPPPSPKKSSPEFFPAVTVEDVKKLMRAAEMELVKSKLREIGKNWVPYSEFVRVCGEYSSDPEQGNRVANMLDEAGNVIVLGKLVCLKPEELTSAMAGLIPTLEPSLDAETRQEFEQLEIIKSDIDKRADDLVRKELWAGLGLIMAQTVGFFRLTFWELSWDVMEPICFYVTSTYFMAGYAFFLRTSKEPSFEGFYKSRFETKQKRLIKMLDFDIDRFTKLQKMHRPNLTKSGRC

SEQ ID NO: 86340 - protein, 295 aa, Arabidopsis thaliana
  peptide (1)..(295): Ceres Seq. ID no. 12688875
MRPTKSGGIPPDAGDSGIRRRFLHKRAFFSPEIVPKGGNLMEKLRELTLSNNNRIRLDEMLPPPSPKKSSPEFFPAVTVEDVKKLMRAAEMELVKSKLREIGKNWVPYSEFVRVCGEYSSDPEQGNRVANMLDEAGNVIVLGKLVCLKPEELTSAMAGLIPTLEPSLDAETRQEFEQLEIIKSDIDKRADDLVRKELWAGLGLIMAQTVGFFRLTFWELSWDVMEPICFYVTSTYFMAGYAFFLRTSKEPSFEGFYKSRFETKQKRLIKMLDFDIDRFTKLQKMHRPNLTKSGRC

SEQ ID NO: 86341 - protein, 255 aa, Arabidopsis thaliana
  peptide (1)..(255): Ceres Seq. ID no. 12688876
MEKLRELTLSNNNRIRLDEMLPPPSPKKSSPEFFPAVTVEDVKKLMRAAEMELVKSKLREIGKNWVPYSEFVRVCGEYSSDPEQGNRVANMLDEAGNVIVLGKLVCLKPEELTSAMAGLIPTLEPSLDAETRQEFEQLEIIKSDIDKRADDLVRKELWAGLGLIMAQTVGFFRLTFWELSWDVMEPICFYVTSTYFMAGYAFFLRTSKEPSFEGFYKSRFETKQKRLIKMLDFDIDRFTKLQKMHRPNLTKSGRC

SEQ ID NO: 86342 - DNA, 1263 bp, Arabidopsis thaliana
  misc_feature (1)..(1263): Ceres Seq. ID no. 12688884
  misc_feature (1)..(1263): Ortholog of  Ceres SEQ ID NO 13581959 as cited in SEQ ID NO 56156
atgagacctcgcgggtatcaacgagctccgtcaatgcagaaaccaacagattatccgacggataagacgcttcatccgaattacccatttctcatgtcctctcatggtctcaagtcctttgaatcggacgacgaagacgacgactccgactcctccaacgatcaattcgctttcactatcaacacagagttgcttgtcgatgtcaaagacatatctataggggacttcatcggcgaaggttcatcatctactgtctacagaggattgtgggtttctcgtttctcaatctcctacttcgaaattgcttctgggttcaggagagttgtccctgtgtctgtgaagatattccagcctaaaagaacatctgctttaagcattgagcagaggaagaagtttcagagagaggttttgctgctttccaagtttagacatgaaaacattgtgcggttcattggggcgtgcatagaaccaaagttgatgataattactgaactcatggaaggcaatactcttcagaagtttatgttgagtgttcgtccaaagcctcttgatctgaagctctccattagctttgcgttggatattgctcggggaatggagttcttgaatgcaaatggcattattcaccgagatttgaaaccaagtaatatgctcttaacaggtgatcagaaacatgtaaagttggctgactttggacttgctagagaggagactaaaggtttcatgacctttgaggctggtacatacagatggatggctccagagttattcagctatgacacgcttgaaattggcgaaaagaaacactacgatcataaggtggacgtttacagtttcgccattgttttctgggagttacttaccaacaaaaccccattcaaaggaaagaacaacatctttgtagcttatgctgccagcaaaaaccagagaccaagtgtggagaatcttccagaaggcgttgtttctatcctgcaatcatgctgggcagagaatcctgacgctcgtcctgagtttaaagaaattacatattcactaacaaacttgctcagaagcttaagctcagacactgatgctacttcatccaatagcaaagccaatatagctaccgaggattcaacaagcagtctggttcaagaacgtgttgtctgtgattgtcccggactaaagatgagcaagacgaagaagctgaagaagaagacgaataaactgatgaatatgatcgtcccttttctcaagatcttcaaaagttgtatgtccaagtga

SEQ ID NO: 86343 - protein, 420 aa, Arabidopsis thaliana
  peptide (1)..(420): Ceres Seq. ID no. 12688885
MRPRGYQRAPSMQKPTDYPTDKTLHPNYPFLMSSHGLKSFESDDEDDDSDSSNDQFAFTINTELLVDVKDISIGDFIGEGSSSTVYRGLWVSRFSISYFEIASGFRRVVPVSVKIFQPKRTSALSIEQRKKFQREVLLLSKFRHENIVRFIGACIEPKLMIITELMEGNTLQKFMLSVRPKPLDLKLSISFALDIARGMEFLNANGIIHRDLKPSNMLLTGDQKHVKLADFGLAREETKGFMTFEAGTYRWMAPELFSYDTLEIGEKKHYDHKVDVYSFAIVFWELLTNKTPFKGKNNIFVAYAASKNQRPSVENLPEGVVSILQSCWAENPDARPEFKEITYSLTNLLRSLSSDTDATSSNSKANIATEDSTSSLVQERVVCDCPGLKMSKTKKLKKKTNKLMNMIVPFLKIFKSCMSK

SEQ ID NO: 86344 - protein, 409 aa, Arabidopsis thaliana
  peptide (1)..(409): Ceres Seq. ID no. 12688886
MQKPTDYPTDKTLHPNYPFLMSSHGLKSFESDDEDDDSDSSNDQFAFTINTELLVDVKDISIGDFIGEGSSSTVYRGLWVSRFSISYFEIASGFRRVVPVSVKIFQPKRTSALSIEQRKKFQREVLLLSKFRHENIVRFIGACIEPKLMIITELMEGNTLQKFMLSVRPKPLDLKLSISFALDIARGMEFLNANGIIHRDLKPSNMLLTGDQKHVKLADFGLAREETKGFMTFEAGTYRWMAPELFSYDTLEIGEKKHYDHKVDVYSFAIVFWELLTNKTPFKGKNNIFVAYAASKNQRPSVENLPEGVVSILQSCWAENPDARPEFKEITYSLTNLLRSLSSDTDATSSNSKANIATEDSTSSLVQERVVCDCPGLKMSKTKKLKKKTNKLMNMIVPFLKIFKSCMSK

SEQ ID NO: 86345 - protein, 389 aa, Arabidopsis thaliana
  peptide (1)..(389): Ceres Seq. ID no. 12688887
MSSHGLKSFESDDEDDDSDSSNDQFAFTINTELLVDVKDISIGDFIGEGSSSTVYRGLWVSRFSISYFEIASGFRRVVPVSVKIFQPKRTSALSIEQRKKFQREVLLLSKFRHENIVRFIGACIEPKLMIITELMEGNTLQKFMLSVRPKPLDLKLSISFALDIARGMEFLNANGIIHRDLKPSNMLLTGDQKHVKLADFGLAREETKGFMTFEAGTYRWMAPELFSYDTLEIGEKKHYDHKVDVYSFAIVFWELLTNKTPFKGKNNIFVAYAASKNQRPSVENLPEGVVSILQSCWAENPDARPEFKEITYSLTNLLRSLSSDTDATSSNSKANIATEDSTSSLVQERVVCDCPGLKMSKTKKLKKKTNKLMNMIVPFLKIFKSCMSK

SEQ ID NO: 86346 - DNA, 1824 bp, Arabidopsis thaliana
  misc_feature (1)..(1824): Ceres Seq. ID no. 12688888
  misc_feature (1)..(1824): Ortholog of  Ceres SEQ ID NO 13654989 as cited in SEQ ID NO 63117
atggcagaaactcctcaaccgtatctcatcttcgtcttcttcgtcttcactctaaccgttgctacacaaaccaccggttcggttaagtgcaaaacaagtttgctccgttacccgtttggtttctccgacggttatccgatccgattcaactgctctgagataaccggagaggccgtgatcggtgaattcgctgtgcaagaagtgacaaactccaacatctacgtcgaaatcccgccggtttgcaaacgcaacatccgtaaaatcgaacaacttttccgggaaaatcttgctccgtcgaaattacagaacataattctcgtccaaggatgcaagaaacagaacaagtcttctaattgcttaatccgcaataaattcgttgaaaaccggttaaatctcagcaaatgtaaatctccggttagctgtctcgacggagcaacaacgacaactgccgatgtgatgagtttaggcgacgttgtgaacggaagtggatgtaagtattggttctcttctatttctcaatcgcaagtttcggtcaatttgggtcgactcaagcttgattggtggcttaagggaagttgcagtaacaccacttgctcggagaacgcagactgtgccaaagttaagctcgacgacggtggactcggtcatcgctgcacttgtcgtgaaggatttagcggtaaagccttcaccgtgcctggtggttgccaccgattagcggggattttggttggagttttagtaatcgtggtcttgatagctacatatttcttccggaacaagcaatctgcgtcatctgaaagagcatcaatcgcgaatcgcttgctttgcgagctagccggaaactcaagtgttcctttctacacctacaaagagattgagaaagctaccgatagtttctccgacaagaacatgctcggaaccggagcatacggaacagtctacgcaggcgaattcccaaacagctcatgcgtcgctataaaacgtctcaaacacaaagacactacaagcattgaccaagttgtgaacgagatcaagcttctttcctctgtgagccacccaaatctagtacgtctcttaggttgttgctttgcagatggagaaccgtttctagtctatgagttcatgccaaacggaactctttatcagcatttacaacacgagagaggccaaccaccactttcttggcagctccgactcgccattgcgtgtcaaaccgcaaacgcaatcgcacatctccactcttcagtaaaccctcctatctaccaccgagacataaaatctagtaacatcctccttgaccacgaattcaactccaagatatctgatttcggactctctaggctcggcatgtctaccgatttcgaagcctctcatatctccacggctccacaaggcactccaggatacttagatcctcaatatcaccaagattttcagctctcggacaagagtgatgtctatagctttggagttgttctcgtagaaatcatctcaggctttaaagtcatagacttcactcgtccctactctgaagtgaacctagcctctcttgccgtcgacaggatcggaagagggcgtgtggtagatatcatcgatccctgcttaaacaaagaaatcaatccgaaaatgtttgcatctatccacaacttagcagaattggcgtttcgctgcttatcctttcacagaaacatgaggcctacgatggtagaaattacggaagatctccaccggattaagcttatgcactatggtacagagtcaggtaagttcaaaaaccgatccgaaatagatatgaagagacaacaatcatttccgagagaatga

SEQ ID NO: 86347 - protein, 607 aa, Arabidopsis thaliana
  peptide (1)..(607): Ceres Seq. ID no. 12688889
MAETPQPYLIFVFFVFTLTVATQTTGSVKCKTSLLRYPFGFSDGYPIRFNCSEITGEAVIGEFAVQEVTNSNIYVEIPPVCKRNIRKIEQLFRENLAPSKLQNIILVQGCKKQNKSSNCLIRNKFVENRLNLSKCKSPVSCLDGATTTTADVMSLGDVVNGSGCKYWFSSISQSQVSVNLGRLKLDWWLKGSCSNTTCSENADCAKVKLDDGGLGHRCTCREGFSGKAFTVPGGCHRLAGILVGVLVIVVLIATYFFRNKQSASSERASIANRLLCELAGNSSVPFYTYKEIEKATDSFSDKNMLGTGAYGTVYAGEFPNSSCVAIKRLKHKDTTSIDQVVNEIKLLSSVSHPNLVRLLGCCFADGEPFLVYEFMPNGTLYQHLQHERGQPPLSWQLRLAIACQTANAIAHLHSSVNPPIYHRDIKSSNILLDHEFNSKISDFGLSRLGMSTDFEASHISTAPQGTPGYLDPQYHQDFQLSDKSDVYSFGVVLVEIISGFKVIDFTRPYSEVNLASLAVDRIGRGRVVDIIDPCLNKEINPKMFASIHNLAELAFRCLSFHRNMRPTMVEITEDLHRIKLMHYGTESGKFKNRSEIDMKRQQSFPRE

SEQ ID NO: 86348 - protein, 455 aa, Arabidopsis thaliana
  peptide (1)..(455): Ceres Seq. ID no. 12688890
MSLGDVVNGSGCKYWFSSISQSQVSVNLGRLKLDWWLKGSCSNTTCSENADCAKVKLDDGGLGHRCTCREGFSGKAFTVPGGCHRLAGILVGVLVIVVLIATYFFRNKQSASSERASIANRLLCELAGNSSVPFYTYKEIEKATDSFSDKNMLGTGAYGTVYAGEFPNSSCVAIKRLKHKDTTSIDQVVNEIKLLSSVSHPNLVRLLGCCFADGEPFLVYEFMPNGTLYQHLQHERGQPPLSWQLRLAIACQTANAIAHLHSSVNPPIYHRDIKSSNILLDHEFNSKISDFGLSRLGMSTDFEASHISTAPQGTPGYLDPQYHQDFQLSDKSDVYSFGVVLVEIISGFKVIDFTRPYSEVNLASLAVDRIGRGRVVDIIDPCLNKEINPKMFASIHNLAELAFRCLSFHRNMRPTMVEITEDLHRIKLMHYGTESGKFKNRSEIDMKRQQSFPRE

SEQ ID NO: 86349 - protein, 304 aa, Arabidopsis thaliana
  peptide (1)..(304): Ceres Seq. ID no. 12688891
MLGTGAYGTVYAGEFPNSSCVAIKRLKHKDTTSIDQVVNEIKLLSSVSHPNLVRLLGCCFADGEPFLVYEFMPNGTLYQHLQHERGQPPLSWQLRLAIACQTANAIAHLHSSVNPPIYHRDIKSSNILLDHEFNSKISDFGLSRLGMSTDFEASHISTAPQGTPGYLDPQYHQDFQLSDKSDVYSFGVVLVEIISGFKVIDFTRPYSEVNLASLAVDRIGRGRVVDIIDPCLNKEINPKMFASIHNLAELAFRCLSFHRNMRPTMVEITEDLHRIKLMHYGTESGKFKNRSEIDMKRQQSFPRE

SEQ ID NO: 86350 - DNA, 2008 bp, Arabidopsis thaliana
  misc_feature (1)..(2008): Ceres Seq. ID no. 12688912
  misc_feature (1)..(2008): Ortholog of  Ceres SEQ ID NO 14313167 as cited in SEQ ID NO 54354
gcactttttatagaccaaagtccctacattactctattttctcaaaccccatttagaagaagagttcttagctgtcttcaatctctttgtctgtatcattctttacggaagccatgaaaatggcatcaagaaaaacaacatccttgcttaatcatcttcttcttcttggagctttgactcttttgagcagtttggtgatagtgaaaggagaaagcccttacaagttttacacttggactgtgacttatggcattatctctcctcttggtgttcctcaacaggttattctcatcaatggtcagtttcctggtccaaaacttgaagttgtgaccaacgacaacatcatcctcaacctcatcaacaaacttgaccagcctttcctcttgacctggaatgggattaagcagaggaagaactcatggcaagatggtgttttgggaacaaactgtccgatccaaccaaactcaaacttcacttacaaattccaaaccaaagatcagatcggaactttcaactacttcccttccactgcttttcacaaagccgccggtggattcggagccatcaatgtctacgcaagacctggaattccaatcccttaccctctcccaaccgcagatttcactttactcgttggtgattggttcaaaaccaaccacaaaacgcttcaacagcgtttggattctggtggggttcttccatttcccgatgggatgcttataaatggacaaacccaatcaacgttttcaggcgaccaagggaagacttacatgttgagaatctccaatgttgggttatcaagcactttcaatttcagaatccaaggccatacaatgaaagtagttgaagttgaaggctctcatgttattcaaactgattatgattctcttgacattcacgttggccagtctttagcagttcttgttactttaaaccaatctcctaaagattattacatcgttgcaagcacccggttcataagaagcaagctttctgttatgggtttgttgcgttattctaactctcgcgtcccagcttctggtgatcctcccgctcttccacctggagagcttgtttggtccatgagacaagctagaaccttcagatggaacttaacagcaaatgcagctagaccaaaccctcaaggatctttccactatggaatgatcagtccaacaaagacatttgtcttctcaaattcagctcctttgattaatgggaagcaaagatatgcagtcaatggagtctcttatgtgaaatcagagacgcctcttaaactcgctgatcactttggcatctcaggagttttcagcaccaatgccattcaaagcgtcccatcaaactctccgccaacagttgcaacatcagttgttcaaacatctcaccatgacttccttgaaattgtatttcagaacaatgagaagtcaatgcagtcttggcatcttgatggatatgacttctgggtcgttggatttggttctggacaatggacacctgcaaaaagatcacttcacaatcttgttgatgctctgaccagacacacaactcaggtctacccagagtcttggacaacaatcttagtgtctttagacaatcaagggatgtggaatatgagatcagcgatatgggaaagacaatattcaggacaacagttttatctcaaagtatggaattcagtacagagtcttgccaatgaatacaatcctcctgacaatcttcaactctgtggcaaagctgttggacgacatgtttagagaaaatcctcttacagtttcctctgttctttcttaaaagtgatttactttaaggctttttcgattcaatttggttgaggttttgcgtttgttcgttatggtcatgagagtatggctgatggcttacttgtagtaaacaaagggaagaggaaagttatatgtgtcattggtggtaggctagcttggagttttataataatcttcctatatacaattctattcatgtgttttttctaatcgaaatctcttgcggt

SEQ ID NO: 86351 - protein, 546 aa, Arabidopsis thaliana; identical to SEQ ID NO: 40844
  peptide (1)..(546): Ceres Seq. ID no. 12688913

SEQ ID NO: 86352 - protein, 544 aa, Arabidopsis thaliana; identical to SEQ ID NO: 40845
  peptide (1)..(544): Ceres Seq. ID no. 12688914

SEQ ID NO: 86353 - protein, 346 aa, Arabidopsis thaliana; identical to SEQ ID NO: 40846
  peptide (1)..(346): Ceres Seq. ID no. 12688915

SEQ ID NO: 86354 - DNA, 899 bp, Arabidopsis thaliana
  misc_feature (1)..(899): Ceres Seq. ID no. 12688916
  misc_feature (1)..(899): Ortholog of  Ceres SEQ ID NO 12627139 as cited in SEQ ID NO 64036
aacaaggacgatcagaagaaatcttagagaaatcggaaaattctcttactcgggttttgcatcggtgaatatgaattgcgaagtttgtcagctaaaggaactggaagtggaatccttcgagatacgcgaagttttgcgctgcattctacatacgattgtctttcatcgtgcgcttggtcttatccgccctaaagatattgatttggagctttttgagatcacttatgtacaatgcggtgaaattgaagtggagaagaaaatcgatgaaaagattgagcagttcattaactggattgagaaacacccaaacaaaaagagtcagatttgtctatcgttctatgaagtcaaaagcaaacagccttcttggttcaccaaaatcgaacggttgtactgggaacaatggtacatcaatctgaatgtgcttcagcccactaagccccctgtcggaaagtctcaccattctaaactagttatggaccctggagaggcatcggaggagagaagttctcgtaggacactgcttgagcaatcccttcaagaagtcttgttccaaatcataaaattcgtgaatgagaagaaggatcatgttcctcccattaacgatggtgtaatctactacccttttgagatcactatcccaagctcatcggactctgcctttgggatggatatgttcaagaggatactacacagtggccatccatcaatgctcggctaaattccattttccacttaacttagtacatatacactttgatgtttcttggtgcagcctaactccaatcaacactttcctagttacattttctgtgtaaatatattatatgttaccctctcctcgtcgatggataatgttaccttatctatgctttgttgtatataagtgatgtgttgtatat

SEQ ID NO: 86355 - protein, 238 aa, Arabidopsis thaliana
  peptide (1)..(238): Ceres Seq. ID no. 12688917
TRTIRRNLREIGKFSYSGFASVNMNCEVCQLKELEVESFEIREVLRCILHTIVFHRALGLIRPKDIDLELFEITYVQCGEIEVEKKIDEKIEQFINWIEKHPNKKSQICLSFYEVKSKQPSWFTKIERLYWEQWYINLNVLQPTKPPVGKSHHSKLVMDPGEASEERSSRRTLLEQSLQEVLFQIIKFVNEKKDHVPPINDGVIYYPFEITIPSSSDSAFGMDMFKRILHSGHPSMLG

SEQ ID NO: 86356 - protein, 215 aa, Arabidopsis thaliana; identical to SEQ ID NO: 29785
  peptide (1)..(215): Ceres Seq. ID no. 12688918

SEQ ID NO: 86357 - DNA, 2442 bp, Arabidopsis thaliana
  misc_feature (1)..(2442): Ceres Seq. ID no. 12689243
  misc_feature (1)..(2442): Ortholog of  Ceres SEQ ID NO 15179918 as cited in SEQ ID NO 57077
ataaaccatattaagaactagcttatagataaggatatggcctttacgaacgtttgcctatggacgctactcgccttcatgctgacttggacagtgttctacgtcacaaacagggggaagaaggcgacgcagttggcggatgcggtggttgaagagcgagaagacggtgctactgacgttatcatcgttggggctggagtaggcggctcggctctcgcatatgctcttgctaaggacgggcgtcgagtccatgtaatagagagggacctgagagaaccagagagaatcatgggtgagtttatgcaaccaggaggacgactcatgctctctaagcttggtcttgaaggtcggtctctatttcagtttcatttatgtaattaaatcagaaagtcatataattgtgtcttagtttcatgatcatatttttgcgattatatatatatatatatatatgtatagattgtttggagggaatagatgcccaaaaagccacgggcatgacagtttataaggacggaaaagaagcagtcgcatcttttcccgtggacaacaacaattttccttttgatccttcggctcgatcttttcacaatggccgattcgtccaacgattgcggcaaaaggcttcttctcttcccaagtaagtattatggtcatgttcgttaggaagtcagcgaccaagtgttgttgttcgtttgacagtggatacaccgattaatcgtagcgatcaacgactaaagttttcagtccttagatttctcaaatctcaaataactaactacaaaacgaactgactacaaataaaattaaaagaaacaaatataattctaattaaataaaaatttaatttaaaataaatataaaatatattaggttaaacaaaataaacctaattgaatatatatgaagtaataaataaggaaaaaaatcccttcagttagcacctcatattttttaaacattggacaatagctactatataataagcttgacaataggaatggtttgttttataacgctaatcaatacactgcaccaaacatttattggtagtgtgcgcctggaagaaggaacggtgaagtctttgatagaagaaaaaggagtgatcaaaggagtgacatacaaaaatagcgcaggcgaagaaacaacagccttggcacctctcactgtagtatgcgacggttgctactcaaaccttcgccggtctcttaatgacaacaatgcggaggttctgtcataccaagttggttttatctcaaagaactgtcagcttgaagaacccgaaaagttaaagttgataatgtctaaaccctccttcaccatgttgtatcaaatcagcagcaccgacgttcgttgtgtttttgaagttctccccaacaacattccttctatttcaaatggtgaaatggctactttcgtgaagaacactattgctcctcaggtacactacacattgggctttattcaattaaaaaaccaactcaatatagaactatattactaagtttgtgtacatagtagataagtaatacatatacacattctaaatttgttataagtacatgcatatatatatgtcttaacgtttttgaacatttcttttcaaggtacctttaaaactccgcaaaatatttttgaaagggattgatgaaggagaacatataaaagccatgccaacaaagaagatgacagctactttgagcgagaagaaaggagtgattttattgggagatgcattcaacatgcgtcatccagcaatcgcatctggaatgatggttttattatctgacattctcattctacgccgtcttctccagccattaagcaaccttggcaatgcgcaaaaaatctcacaagttatcaagtccttttatgatatccgcaagccaatgtcagcgacagttaacacgttaggaaatgcattctctcaagtgctagttgcatcgacggacgaagcaaaagaggcaatgagacaaggttgctatgattacctctctagtggtgggtttcgcacgtcagggatgatggctttgctaggcggcatgaaccctcgtccgatctctctcatctatcatctatgtgctatcactctatcctccattggccatctactctctccatttccctctccccttcgcatttggcatagccttcgactttttggtttggctatgaaaatgttggttccccatctcaaggctgaaggagttagccaaatgttgtttccagtcaacgccgccgcgtatagcaaaagctatatggctgcaacggctctctaaaacactggtgctttaaactgcaaaatataacacatatataaatcacgaatctttgtgattctgcatatattgtgttctacaattattctcatataaatgaaaattgttctacgtaaaagtaaaaagaaggaattgtaatactaataaaacgagtttttaattc

SEQ ID NO: 86358 - protein, 202 aa, Arabidopsis thaliana
  peptide (1)..(202): Ceres Seq. ID no. 12689244
MPTKKMTATLSEKKGVILLGDAFNMRHPAIASGMMVLLSDILILRRLLQPLSNLGNAQKISQVIKSFYDIRKPMSATVNTLGNAFSQVLVASTDEAKEAMRQGCYDYLSSGGFRTSGMMALLGGMNPRPISLIYHLCAITLSSIGHLLSPFPSPLRIWHSLRLFGLAMKMLVPHLKAEGVSQMLFPVNAAAYSKSYMAATAL

SEQ ID NO: 86359 - protein, 197 aa, Arabidopsis thaliana
  peptide (1)..(197): Ceres Seq. ID no. 12689245
MTATLSEKKGVILLGDAFNMRHPAIASGMMVLLSDILILRRLLQPLSNLGNAQKISQVIKSFYDIRKPMSATVNTLGNAFSQVLVASTDEAKEAMRQGCYDYLSSGGFRTSGMMALLGGMNPRPISLIYHLCAITLSSIGHLLSPFPSPLRIWHSLRLFGLAMKMLVPHLKAEGVSQMLFPVNAAAYSKSYMAATAL

SEQ ID NO: 86360 - protein, 178 aa, Arabidopsis thaliana
  peptide (1)..(178): Ceres Seq. ID no. 12689246
MRHPAIASGMMVLLSDILILRRLLQPLSNLGNAQKISQVIKSFYDIRKPMSATVNTLGNAFSQVLVASTDEAKEAMRQGCYDYLSSGGFRTSGMMALLGGMNPRPISLIYHLCAITLSSIGHLLSPFPSPLRIWHSLRLFGLAMKMLVPHLKAEGVSQMLFPVNAAAYSKSYMAATAL

SEQ ID NO: 86361 - DNA, 964 bp, Arabidopsis thaliana
  misc_feature (1)..(964): Ceres Seq. ID no. 12689271
  misc_feature (1)..(964): Ortholog of  Ceres SEQ ID NO 13637842 as cited in SEQ ID NO 54650
  misc_feature (1)..(964): Ortholog of  Ceres SEQ ID NO 12608127 as cited in SEQ ID NO 57579
  misc_feature (1)..(964): Ortholog of  Ceres SEQ ID NO 12634558 as cited in SEQ ID NO 0
aaacaccataaactaaacaataaaccatacaaaaaaatatgaaaatcctctcactttcactactcttgctcttggccgctacggtctcccacgtccagtcttcggcatccgttccagggctcatcgaactcctcgaatcgaacaccatctttgggaacgaagccgaactcttagagaaagagggactgtccatcaactaccccaactgcagaagctggcaccttggtgttgagacctctaacatcataaacttcgacacggtgcccgcaaattgcaaagcctatgttgaagactacttgatcacttccaaacagtaccaatacgactccaaaactgtaaacaaagaggcatatttttacgccaaaggacttgccctaaagaacgataccgtcaatgtttggatctttgacctagacgacactctcctctctagtattccctactacgctaaatatggatatgggaccgagaacacagccccgggggcgtactggtcgtggttagagtccggagaatcaactccaggactcccggagaccttgcatctatacgaaaacctcttggaactcgggattgaacccatcataatctctgacagatggaaaaaattgtcagaagtcactgtcgagaatctcaaggctgttggtgtaacaaaatggaagcatctcatactcaagccaaacggatcgaagttgacgcaagtggtgtacaagtcaaaggttaggaatagccttgtgaagaaagggtacaacatcgttgggaatattggagaccaatgggctgatttggttgaggatactcctggaagggtttttaagctcccaaatccactctactacgtaccttcttaattaagcatctatcttcatggcattgtccccttgtatccatttcatatctatgtcgtttcgtttatctttgtagccgttttggcaccactgcttaaataaaatgccaatcctat

SEQ ID NO: 86362 - protein, 270 aa, Arabidopsis thaliana
  peptide (1)..(270): Ceres Seq. ID no. 12689272
MKILSLSLLLLLAATVSHVQSSASVPGLIELLESNTIFGNEAELLEKEGLSINYPNCRSWHLGVETSNIINFDTVPANCKAYVEDYLITSKQYQYDSKTVNKEAYFYAKGLALKNDTVNVWIFDLDDTLLSSIPYYAKYGYGTENTAPGAYWSWLESGESTPGLPETLHLYENLLELGIEPIIISDRWKKLSEVTVENLKAVGVTKWKHLILKPNGSKLTQVVYKSKVRNSLVKKGYNIVGNIGDQWADLVEDTPGRVFKLPNPLYYVPS

SEQ ID NO: 86363 - DNA, 951 bp, Arabidopsis thaliana
  misc_feature (1)..(951): Ceres Seq. ID no. 12689273
  misc_feature (1)..(951): Ortholog of  Ceres SEQ ID NO 13593932 as cited in SEQ ID NO 54078
  misc_feature (1)..(951): Ortholog of  Ceres SEQ ID NO 12635231 as cited in SEQ ID NO 0
gcgaaagaataaaagtgtgacaaattaagaagagagaaatggggaaagacggagaaggagacaagaagcgagaaacaatggcggtgatgagcttaatgaaggatcaacagaatccaattcaacagtttcaagtcaaattcaaggagattgagactggtttcaagtcgtggttatcaaaacagaagttaccggtggaagccgccgttgtcacggccatgggtggtgttcagggagcttttatcggtggtttaatgggaactttatctcctgaaatgcctcaggctggtattgaccctcaagctatggcttcgctaaagcaaactcaggctcttgttggtgggcctttggttcaagctcggaactttgctgctataactggtgttaatgctggtattgcttgtgttatgaaacggattagaggcaaggaggatttagaatctgctgtggtcgcagcattcggatctggagttgcatattctcttgtgagcgcaggattacaaggacagcctatgaatgcaatcaccactgctgctggtttcgctgtttttcaaggagtgtttttcaagttgggtgaaaggttctctaaaccaagtgttgaagatccatattacacccggggaagatctatgttgttgaaactgggtctagagaagtatgagaagaacttcaagaaaggtttattagctgacccaactctgccattgctcactgatagcgcgctaagagacgtgagcatcccgcctggaccaaggctactgatacttgatcacatccaaagggaccctgagctaaagggcaagcggggaagtcgtggttgagacttgagagcctctctccttcttctgcagaatctttgttgttgtaagatgttataaggatctcaagcacctattattcttaaatattattggttgatgttgctagcaagaaaaattgaatacaaccttaaaa

SEQ ID NO: 86364 - protein, 259 aa, Arabidopsis thaliana; identical to SEQ ID NO: 27175
  peptide (1)..(259): Ceres Seq. ID no. 12689274

SEQ ID NO: 86365 - protein, 246 aa, Arabidopsis thaliana; identical to SEQ ID NO: 27176
  peptide (1)..(246): Ceres Seq. ID no. 12689275

SEQ ID NO: 86366 - protein, 243 aa, Arabidopsis thaliana; identical to SEQ ID NO: 27177
  peptide (1)..(243): Ceres Seq. ID no. 12689276

SEQ ID NO: 86367 - DNA, 937 bp, Arabidopsis thaliana
  misc_feature (1)..(937): Ceres Seq. ID no. 12689277
  misc_feature (1)..(937): Ortholog of  Ceres SEQ ID NO 13637842 as cited in SEQ ID NO 54650
  misc_feature (1)..(937): Ortholog of  Ceres SEQ ID NO 12608127 as cited in SEQ ID NO 57579
  misc_feature (1)..(937): Ortholog of  Ceres SEQ ID NO 12634558 as cited in SEQ ID NO 0
aaacaccataaactaaacaataaaccatacaaaaaaatatgaaaatcctctcactttcactactcttgctcttggccgctacggtctcccacgtccagtcttcggcatccgttccagggctcatcgaactcctcgaccgaactcttagagaaagagggactgtccatcaactaccccaactgcagaagctggcaccttggtgttgagacctctaacatcataaacttcgacacggtgcccgcaaattgcaaagcctatgttgaagactacttgatcacttccaaacagtaccaatacgactccaaaactgtaaacaaagaggcatatttttacgccaaaggacttgccctaaagaacgataccgtcaatgtttggatctttgacctagacgacactctcctctctagtattccctactacgctaaatatggatatgggaccgagaacacagccccgggggcgtactggtcgtggttagagtccggagaatcaactccaggactcccggagaccttgcatctatacgaaaacctcttggaactcgggattgaacccatcataatctctgacagatggaaaaaattgtcagaagtcactgtcgagaatctcaaggctgttggtgtaacaaaatggaagcatctcatactcaagccaaacggatcgaagttgacgcaagtggtgtacaagtcaaaggttaggaatagccttgtgaagaaagggtacaacatcgttgggaatattggagaccaatgggctgatttggttgaggatactcctggaagggtttttaagctcccaaatccactctactacgtaccttcttaattaagcatctatcttcatggcattgtccccttgtatccatttcatatctatgtcgtttcgtttatctttgtagccgttttggcaccactgcttaaataaaatgccaatccta

SEQ ID NO: 86368 - protein, 55 aa, Arabidopsis thaliana; identical to SEQ ID NO: 42043
  peptide (1)..(55): Ceres Seq. ID no. 12689278

SEQ ID NO: 86369 - protein, 41 aa, Arabidopsis thaliana
  peptide (1)..(41): Ceres Seq. ID no. 12689279
MEKIVRSHCRESQGCWCNKMEASHTQAKRIEVDASGVQVKG

SEQ ID NO: 86370 - DNA, 849 bp, Arabidopsis thaliana
  misc_feature (1)..(849): Ceres Seq. ID no. 12689307
  misc_feature (1)..(849): Ortholog of  Ceres SEQ ID NO 13594298 as cited in SEQ ID NO 57803
  misc_feature (1)..(849): Ortholog of  Ceres SEQ ID NO 14301894 as cited in SEQ ID NO 61677
  misc_feature (1)..(849): Ortholog of  Ceres SEQ ID NO 13503476 as cited in SEQ ID NO 61978
  misc_feature (1)..(849): Ortholog of  Ceres SEQ ID NO 12578438 as cited in SEQ ID NO 62201
  misc_feature (1)..(849): Ortholog of  Ceres SEQ ID NO 12617675 as cited in SEQ ID NO 64656
atgaagctttcttgtggtacaagctttgcgttcttacttctgtttcttcttgcggcacaatctgtgcatgtctatgcgggtagcttccacaaagacgttcagatacattggggtgatggccgcggaaagattcacgacagagatggaaaacttctttctctctcgctcgacaaatcctctggatccggttttcagtctaaccaggagtttctctatggcaaagccgaggttcaaatgaaacttgttcctggtaattcagctggaacagtgacaacattctatctaaaatctccgggaactacgtgggatgagatcgatttcgagttcttgggaaacataagtggtcatccatatactctccatactaatgtttacacaaaaggcacaggagacaaagaacaacaatttcatctatggttcgacccaaccgttaactttcacacttattgcatcacatggaatcctcaaaggattatttttacggttgatggaattcctattagagagttcaagaaccccgaggcgattggagtcccgttcccaactagacaaccaatgagactctacgcgagtctttgggaagccgagcattgggcaacaagaggaggattagagaaaacagattggtcaaaagctccttttactgctttttatagaaactacaatgtcgatggatgtgtatgggctaatggaaaatcatcttgttccgcgaattccccatggttcactcaaaaactcgattcgaacggccagacaagaatgaaaggtgtgcaaagtaaatacatgatctacaactattgcaccgataaaagaaggtttcctcgaggagttcctgccgagtgcacttaa

SEQ ID NO: 86371 - protein, 282 aa, Arabidopsis thaliana [sequence omitted]

SEQ ID NO: 86372 - protein, 204 aa, Arabidopsis thaliana; identical to SEQ ID NO: 81386
  peptide (1)..(204): Ceres Seq. ID no. 12689309

SEQ ID NO: 86373 - DNA, 1116 bp, Arabidopsis thaliana
  misc_feature (1)..(1116): Ceres Seq. ID no. 12689324
  misc_feature (1)..(1116): Ortholog of  Ceres SEQ ID NO 13596465 as cited in SEQ ID NO 62133
atgaatgtgaaaaaggctatgaagaagcaaaacgacgtcgcgatgatccttgggaggcacgtcttatcttctgagtcggaatctaacgtcatcttctcgccggcgtcaataaactctgcgatcaccatgcacgccgctggttccggaggtggcttagtcgccggtgaaatcctctccttcctcagatcttcttcaatcgatgagctcaaatccgtcttccgagaactatcatccatcgtctacgccgacagcagcgctagtggcggcccaaagatgagggcggtgaatggcctctggattgagaaatcactaccgattgatcccaaatacaaggctctcttcgagaacttcttcaaggctgtttacgttcccgtagatttccgatcaaaggctgaagaagtgcgtaaggaggtgaattcatgggttgaagatcacaccaataatctcatcaaagatcttcttcctcgtgaatctgtgacaagccgaaccaacaagatttacgcaaacgcattgtatttcaagggagcttggaagagaccatttgaaaagtactatacaaaagacagagacttccacatggtcaatggcactacagtctctgtgccattcatgaccagctacgagacacaaaaagtaagagcttataacggtccttaccgacgaggccgtgatgataccaaccgcaaattctcaatgtatttctatctccctgacaagaaagatggattggattatctcttgaagaaaatagcatctacacctggattcttggatagtcacattccgagatacaaagttgaacttgaggaatttagaattccaaagtttaagatcgaattcggtttttctgctacaagcgttttgaatcaagtgggagtactgcattcagtgtcaatgtaccataaagcttgtgtcgagatcgatgaagaaggtgctgaagctgcggctgcaactgctgatgtagaagatgacggttgtgctcttgatatggggccacctcctaagaagatagattttgtggctgatcatccatttattttccttatccgagaagacaaaaccgggaccgttttgttctttggtcagctcttcaaaccttcggaattcttgttctga

SEQ ID NO: 86374 - protein, 371 aa, Arabidopsis thaliana
  peptide (1)..(371): Ceres Seq. ID no. 12689325
MNVKKAMKKQNDVAMILGRHVLSSESESNVIFSPASINSAITMHAAGSGGGLVAGEILSFLRSSSIDELKSVFRELSSIVYADSSASGGPKMRAVNGLWIEKSLPIDPKYKALFENFFKAVYVPVDFRSKAEEVRKEVNSWVEDHTNNLIKDLLPRESVTSRTNKIYANALYFKGAWKRPFEKYYTKDRDFHMVNGTTVSVPFMTSYETQKVRAYNGPYRRGRDDTNRKFSMYFYLPDKKDGLDYLLKKIASTPGFLDSHIPRYKVELEEFRIPKFKIEFGFSATSVLNQVGVLHSVSMYHKACVEIDEEGAEAAAATADVEDDGCALDMGPPPKKIDFVADHPFIFLIREDKTGTVLFFGQLFKPSEFLF

SEQ ID NO: 86375 - protein, 365 aa, Arabidopsis thaliana
  peptide (1)..(365): Ceres Seq. ID no. 12689326
MKKQNDVAMILGRHVLSSESESNVIFSPASINSAITMHAAGSGGGLVAGEILSFLRSSSIDELKSVFRELSSIVYADSSASGGPKMRAVNGLWIEKSLPIDPKYKALFENFFKAVYVPVDFRSKAEEVRKEVNSWVEDHTNNLIKDLLPRESVTSRTNKIYANALYFKGAWKRPFEKYYTKDRDFHMVNGTTVSVPFMTSYETQKVRAYNGPYRRGRDDTNRKFSMYFYLPDKKDGLDYLLKKIASTPGFLDSHIPRYKVELEEFRIPKFKIEFGFSATSVLNQVGVLHSVSMYHKACVEIDEEGAEAAAATADVEDDGCALDMGPPPKKIDFVADHPFIFLIREDKTGTVLFFGQLFKPSEFLF

SEQ ID NO: 86376 - protein, 357 aa, Arabidopsis thaliana
  peptide (1)..(357): Ceres Seq. ID no. 12689327
MILGRHVLSSESESNVIFSPASINSAITMHAAGSGGGLVAGEILSFLRSSSIDELKSVFRELSSIVYADSSASGGPKMRAVNGLWIEKSLPIDPKYKALFENFFKAVYVPVDFRSKAEEVRKEVNSWVEDHTNNLIKDLLPRESVTSRTNKIYANALYFKGAWKRPFEKYYTKDRDFHMVNGTTVSVPFMTSYETQKVRAYNGPYRRGRDDTNRKFSMYFYLPDKKDGLDYLLKKIASTPGFLDSHIPRYKVELEEFRIPKFKIEFGFSATSVLNQVGVLHSVSMYHKACVEIDEEGAEAAAATADVEDDGCALDMGPPPKKIDFVADHPFIFLIREDKTGTVLFFGQLFKPSEFLF

SEQ ID NO: 86377 - DNA, 823 bp, Arabidopsis thaliana
  misc_feature (1)..(823): Ceres Seq. ID no. 12689347
  misc_feature (1)..(823): Ortholog of  Ceres SEQ ID NO 15174752 as cited in SEQ ID NO 53279
  misc_feature (1)..(823): Ortholog of  Ceres SEQ ID NO 15226087 as cited in SEQ ID NO 58655
acaaacttcactcaaaacctaattaacttagagagaaagagagagagagaagggttgcaaaatgggttcttcgtaccaagaatctccaccgttgcttcttgaagatcttaaggttacgatcaaagaatcaacactcattttcccatctgaagaaaccagcgagagaaaatccatgttcttatccaacgtcgaccaaattctcaactttgacgttcaaacagttcatttcttccgacctaacaaggagtttccaccggagatggtctcggagaagctgagaaaggcgttggtgaaactcatggacgcttatgagttcttggccgggagactccgcgtggatcctagctctggacggcttgatgttgactgtaacggtgctggagctggctttgtgacggcggcgagtgactacacgttggaggaacttggagatttggtttatccaaatccagcttttgctcaattggttacaagtcagcttcagagtttgcccaaagatgatcaacccttgtttgtctttcaggaagaaagaaaaaaaaaatcaaaagttttgagtgtataaacacaaagaagcttccttagaatcaaaaaaatttcgaacatgttcacaataaattttgtgaacttttagctattttgcaacctcgagggagggatctcaaggatctaagtaccatcatgatatttatagaaatctagtttatataggtcattagtcgaggaccatgtgggtaaaatagaataaaaacttgtttcttctatagagtccaagtattaatcggagttttgtgtgagatcctccgtattcaaaatataaatgttt

SEQ ID NO: 86378 - protein, 166 aa, Arabidopsis thaliana
  peptide (1)..(166): Ceres Seq. ID no. 12689348
MGSSYQESPPLLLEDLKVTIKESTLIFPSEETSERKSMFLSNVDQILNFDVQTVHFFRPNKEFPPEMVSEKLRKALVKLMDAYEFLAGRLRVDPSSGRLDVDCNGAGAGFVTAASDYTLEELGDLVYPNPAFAQLVTSQLQSLPKDDQPLFVFQEERKKKSKVLSV

SEQ ID NO: 86379 - protein, 129 aa, Arabidopsis thaliana
  peptide (1)..(129): Ceres Seq. ID no. 12689349
MFLSNVDQILNFDVQTVHFFRPNKEFPPEMVSEKLRKALVKLMDAYEFLAGRLRVDPSSGRLDVDCNGAGAGFVTAASDYTLEELGDLVYPNPAFAQLVTSQLQSLPKDDQPLFVFQEERKKKSKVLSV

SEQ ID NO: 86380 - protein, 100 aa, Arabidopsis thaliana
  peptide (1)..(100): Ceres Seq. ID no. 12689350
MVSEKLRKALVKLMDAYEFLAGRLRVDPSSGRLDVDCNGAGAGFVTAASDYTLEELGDLVYPNPAFAQLVTSQLQSLPKDDQPLFVFQEERKKKSKVLSV

SEQ ID NO: 86381 - DNA, 1201 bp, Arabidopsis thaliana
  misc_feature (1)..(1201): Ceres Seq. ID no. 12689351
  misc_feature (1)..(1201): Ortholog of  Ceres SEQ ID NO 15174752 as cited in SEQ ID NO 53279
  misc_feature (1)..(1201): Ortholog of  Ceres SEQ ID NO 15226087 as cited in SEQ ID NO 58655
aatgaacgtataaagtaggatttcataatgcaacgtctaatagctagaacataagtgattcaaaataagttttctcaagtttggcgcatgtagttgagtttcatggagatgtatgtactttaaatttttaaattttggcagataacatcattcaagtgcggtggatttgcaatgggaatctcaacaaaccataccacgttcgatggacttagtttcaaaacattcctcgaaaacttagcttctctacttcacgagaagcccttatcaacacctccatgcaacgaccgtactcttctcaaagctcgtgatccaccaagtgttgcattcccacaccacgagcttgtcaagttccaagactgtgagacaacaacagtcttcgaagctacttcagagcacttagacttcaagatcttcaagctatcctctgaacaaatcaagaagctcaaggagagagcctcagagactagtaacggtaatgttcgcgtgacgggtttcaacgttgtaaccgctttggtctggaggtgcaaggcactctctgtagcagcagaggaaggagaagaaaccaatcttgaaagagaatcaacgattctttatgctgtggacattagagggaggctgaatcctgagcttccaccgtcttacactggaaacgcggttttaacggcatacgcaaaggagaaatgcaaggcattgcttgaagagccgtttgggaggattgtagaaatggtaggagaagggtcaaagaggataacggatgagtatgcgcggtctgctatagattggggagagttatacaaagggtttccccatggggaagttttggtttcttcttggtggaaactcggattcgcagaggttgagtatccttggggaaagcctaagtatagctgtcccgttgtctatcatcgaaaagacattgttttgctgtttccggacatcgatggagatagtaaaggtgtttatgtcttggctgctttgccttctaaggagatgtccaagtttcagcactggtttgaagacactctgtgctgatttcgtgatggcttcactttgcattgctattgctttattttacttctttgacgattataaacacattatggtattttatatttgtatacggttgaaaagtgaacgttataaaacatctattttctgctactttctctaagtataaacaagcacaaaagatttaaaggtg

SEQ ID NO: 86382 - protein, 286 aa, Arabidopsis thaliana; identical to SEQ ID NO: 30273
  peptide (1)..(286): Ceres Seq. ID no. 12689352

SEQ ID NO: 86383 - DNA, 492 bp, Arabidopsis thaliana
  misc_feature (1)..(492): Ceres Seq. ID no. 12689609
  misc_feature (1)..(492): Ortholog of  Ceres SEQ ID NO 13589868 as cited in SEQ ID NO 55521
atggggacagctctgggaaagccatttgccggttttttccaccaagaagaatcgaggatagtgttgttcggtctcgacgctgccggaaaatcatcaataatgcacaaactcaaaaccggagaaacccttaccacaaccatgcctactattggaacggatgtggaaagtgtaaaatacaaggattcaaacttacgcttttgggaaatgggcggccaacaatgttacaagtggtttccaatgacgaaacatgacttccaagaaatagcggggcttgtgcttgtagtcgatagcacagacagagatcgaatagaagatgcgaaagattttcttaatgcggtgattgatgagatacaagggagtgtaccggacaatgtggctgttcttgtatttggaaacaagcatgaagttcctggtgctatgtctgcttctgagatcagtaacaagcttgatctcacttctcttcgtcaaaaaaactggcagagaaactggtaa

SEQ ID NO: 86384 - protein, 163 aa, Arabidopsis thaliana
  peptide (1)..(163): Ceres Seq. ID no. 12689610
MGTALGKPFAGFFHQEESRIVLFGLDAAGKSSIMHKLKTGETLTTTMPTIGTDVESVKYKDSNLRFWEMGGQQCYKWFPMTKHDFQEIAGLVLVVDSTDRDRIEDAKDFLNAVIDEIQGSVPDNVAVLVFGNKHEVPGAMSASEISNKLDLTSLRQKNWQRNW

SEQ ID NO: 86385 - protein, 130 aa, Arabidopsis thaliana
  peptide (1)..(130): Ceres Seq. ID no. 12689611
MHKLKTGETLTTTMPTIGTDVESVKYKDSNLRFWEMGGQQCYKWFPMTKHDFQEIAGLVLVVDSTDRDRIEDAKDFLNAVIDEIQGSVPDNVAVLVFGNKHEVPGAMSASEISNKLDLTSLRQKNWQRNW

SEQ ID NO: 86386 - protein, 117 aa, Arabidopsis thaliana
  peptide (1)..(117): Ceres Seq. ID no. 12689612
MPTIGTDVESVKYKDSNLRFWEMGGQQCYKWFPMTKHDFQEIAGLVLVVDSTDRDRIEDAKDFLNAVIDEIQGSVPDNVAVLVFGNKHEVPGAMSASEISNKLDLTSLRQKNWQRNW

SEQ ID NO: 86387 - DNA, 896 bp, Arabidopsis thaliana
  misc_feature (1)..(896): Ceres Seq. ID no. 12689652
  misc_feature (1)..(896): Ortholog of  Ceres SEQ ID NO 15177927 as cited in SEQ ID NO 1170
  misc_feature (1)..(896): Ortholog of  Ceres SEQ ID NO 13596295 as cited in SEQ ID NO 68019
agttctccgccacaccaatctccagaaaaggggagaagcaaaaatggtttctctgaagctccagaagcggctcgccgcatcagtgatgaagtgcgggaagggcaaagtttggctcgatcccaacgaaagctccgacatctccatggccaattcccgccaaaacatcaggaagcttgtgaaggatggtttcatcatcaggaagccaaccaagattcactctcgttccagagctcgcaaaatgaagattgccaagatgaagggtcgtcactctggatacggtaagaggaagggtacccgtgaagctaggttgccaacaaaggtactgtggatgcgtaggatgcgtgttcttaggcgtctgttgaagaaatacagagagacgaagaagattgacaagcacatgtaccatgacatgtacatgcgtgttaagggtaatgtgttcaagaacaagcgtgtcttgatggagagtatccacaagtcaaaggctgagaaggctagggagaagactctgtctgatcagtttgaggctaagagggcgaagaacaaggctagccgagaaaggaagcatgctaggagagaggagcgtttagctaagggtcccggtggagatgttgcgcctgtagctgctccagcacctgctgctacacctgctccaactgcagctgtaccgaagaagaagtctaagaagtgaagaggatatatagtgtgaagctatatcgatcatcagttcacggattagactctgaagaaggttttgaatgttttatcgaatgcgtttgtggaataacttttattttcgcaaagaacataacttatgtcagttaatctttatgctttcagatttttagcttacagtgtttcaacagacctactttgcaagttgttctttttttggtttc

SEQ ID NO: 86388 - protein, 228 aa, Arabidopsis thaliana; identical to SEQ ID NO: 26502
  peptide (1)..(228): Ceres Seq. ID no. 12689653

SEQ ID NO: 86389 - protein, 214 aa, Arabidopsis thaliana [sequence omitted]

SEQ ID NO: 86390 - protein, 200 aa, Arabidopsis thaliana; identical to SEQ ID NO: 26504
  peptide (1)..(200): Ceres Seq. ID no. 12689655

SEQ ID NO: 86391 - DNA, 695 bp, Arabidopsis thaliana
  misc_feature (1)..(695): Ceres Seq. ID no. 12689673
  misc_feature (1)..(695): Ortholog of  Ceres SEQ ID NO 13638567 as cited in SEQ ID NO 51303
  misc_feature (1)..(695): Ortholog of  Ceres SEQ ID NO 12610031 as cited in SEQ ID NO 55811
  misc_feature (1)..(695): Ortholog of  Ceres SEQ ID NO 12610896 as cited in SEQ ID NO 55861
  misc_feature (1)..(695): Ortholog of  Ceres SEQ ID NO 12619664 as cited in SEQ ID NO 66048
  misc_feature (1)..(695): Ortholog of  Ceres SEQ ID NO 12635952 as cited in SEQ ID NO 0
atggcaggaatcaaagttttcggtcacccagcttccacagccactagaagagttctcatcgctcttcacgagaagaatctcgactttgaattcgttcatatcgagctcaaagatggtgaacacaagaaagagcctttcatcttccgcaacccttttggtaaagttccagcctttgaagatggagacttcaagcttttcgaatcaagagcaatcactcaatacatagctcatttttactcagacaaaggaaaccaacttgtctcccttggctccaaggacattgcgggcatagccatgggcattgaaattgaatcgcatgagtttgacccagttggttcaaagcttgtttgggagcaagtcttaaagcctttgtatggtatgaccacagacaaaaccgttgttgaagaagaagaggctaagctagccaaggtcctcgatgtttacgaacacaggcttggtgagtccaagtatttggcttctgataaattcactttggtcgatcttcacactatccctgtgattcagtacttgcttggtacaccaactaagaaactctttgacgagcgtccacatgtcagtgcttgggttgctgacatcacttctaggccttctgctaagaaggttctttaagtgactcacaaactgttaatcagaagattgaataaagtggcgatgacctcattgccctaattctc

SEQ ID NO: 86392 - protein, 209 aa, Arabidopsis thaliana; identical to SEQ ID NO: 34803
  peptide (1)..(209): Ceres Seq. ID no. 12689674

SEQ ID NO: 86393 - protein, 111 aa, Arabidopsis thaliana; identical to SEQ ID NO: 34804
  peptide (1)..(111): Ceres Seq. ID no. 12689675

SEQ ID NO: 86394 - DNA, 2401 bp, Arabidopsis thaliana
  misc_feature (1)..(2401): Ceres Seq. ID no. 12689689
  misc_feature (1)..(2401): Ortholog of  Ceres SEQ ID NO 15168900 as cited in SEQ ID NO 217
acaatcacatggccttttcaaaaaatcaatcttttagttctctatcgatgcgtaggcttgaagcatgatgacgacagtcgccgccgatctccaccgttatcttttcctgattaccgtttttcttttcttcctctgcgacaaaacctctcttgctctgaccacagacggtgttcttcttctctctttccgttactcaatcgttgacgatcctctttacgtttttcggagctggagattcgacgacgagactccttgctcttggcgtggtgtcacgtgcgatgcatcttcccggcacgtgactgttctgtcacttccaagctcgaaccttaccggcacactaccttcaaatttgggttcactcaattcacttcaaagacttgatctttccaacaattccatcaatgggtctttcccggtttcgcttctcaacgcgacggagcttcgatttcttgatctgtccgataatcacatctccggtgcactaccggcgagttttggcgcgctttcgaacctccaagtgttgaatctctccgataattccttcgtcggcgaattaccgaacacattaggatggaaccggaacttaacggagatttcacttcagaaaaactatttatccggcgggattccgggaggttttaagtcgacggagtatcttgatctctcgtcaaatttgatcaaaggctcgttgccgtcacatttcagagggaatcgtctacgctatttcaacgcttcgtacaacagaatctccggcgagattccgtcaggtttcgccgacgaaatcccggaagacgccaccgttgatctctcattcaaccaacttacaggtcaaatcccgggttttcgggttctcgataaccaagaatccaactctttctccggtaacccgggtctctgcggatccgaccatgcaaaacacccttgtcgtgacggtgaagcaacctctccacctccatcgccgactccaaattctcctcctgcattagctgctataccaaatactattggcttaaccaatcacccaattagctccaaaaccggtccgaaatcaaaatgggatcataaaccggtgcttatcattggcattgttgtcggtgacttagccggtttagcaatcctcgggattgtgtttttctacatttaccagtcgagaaaacggaagaccgtaacggctacgtcaaaatggtccacgtcatcaacagattccaaggtctcaaaatggtactgtttacgcaaatccgtttacgttgacggtgactgcgaagaagaagaagaggaatctgagacatcggaatccgaatccgacgaagagaacccggtcggaccaaatcgacggtcaggattagacgatcaagaaaaaaagggaacgttagtgaatctcgattcagagaaagagcttgaaatcgaaacgcttctcaaagcatcagcttatattttgggagccaccggttcgagcataatgtataaagcggtgcttcaagacggaacagctgtggcggttcgacgaatagctgaatgcggtttagaccggtttagagatttcgaagctcaggttcgagccgtggctaagttaatacatccaaacctggtacgaattcgcggtttctattggggatccgacgagaaacttgtcatttacgattttgtccctaacggcagcctcgctaacgcccgttaccggaaagtgggctcctctccttgtcatttaccttgggacgctcggctcaagatagcaaaaggcatagctcgcgggctaacatacgtacacgacaagaagtacgtgcatggtaacctcaagcctagcaatatccttttgggcttagatatggagcctaaagttgcggatttcggtcttgagaagcttttgattggggacatgagttatagaaccggtggatcggctccaatattcggaagcaagagatccacaacgtctcttgagtttgggccgagtccaagcccaagtccaagttcagtcgggttaccctacaatgctccagaatctcttcggagtattaagccgaattcgaaatgggatgtgtactcgttcggagttattctgcttgagctactaacgggaaagatcgtggtggtcgacgagcttggacaggttaatgggcttgtgattgatgacggtgagcgggcaattcggatggcggactctgctatacgggctgagttagaaggcaaagaagaagctgtgttggcatgtttgaaaatgggcctagcttgtgcgtctccaataccacagagaaggcccaatatcaaagaggctttgcaagttctcgagagattccctgttcattctagtcaacagtaatgataataattaagaccaagaaagagttaaataacttgactgtgtgtacttagagttagattgataggcaagtttgatctt

SEQ ID NO: 86395 - protein, 751 aa, Arabidopsis thaliana
  peptide (1)..(751): Ceres Seq. ID no. 12689690
MMTTVAADLHRYLFLITVFLFFLCDKTSLALTTDGVLLLSFRYSIVDDPLYVFRSWRFDDETPCSWRGVTCDASSRHVTVLSLPSSNLTGTLPSNLGSLNSLQRLDLSNNSINGSFPVSLLNATELRFLDLSDNHISGALPASFGALSNLQVLNLSDNSFVGELPNTLGWNRNLTEISLQKNYLSGGIPGGFKSTEYLDLSSNLIKGSLPSHFRGNRLRYFNASYNRISGEIPSGFADEIPEDATVDLSFNQLTGQIPGFRVLDNQESNSFSGNPGLCGSDHAKHPCRDGEATSPPPSPTPNSPPALAAIPNTIGLTNHPISSKTGPKSKWDHKPVLIIGIVVGDLAGLAILGIVFFYIYQSRKRKTVTATSKWSTSSTDSKVSKWYCLRKSVYVDGDCEEEEEESETSESESDEENPVGPNRRSGLDDQEKKGTLVNLDSEKELEIETLLKASAYILGATGSSIMYKAVLQDGTAVAVRRIAECGLDRFRDFEAQVRAVAKLIHPNLVRIRGFYWGSDEKLVIYDFVPNGSLANARYRKVGSSPCHLPWDARLKIAKGIARGLTYVHDKKYVHGNLKPSNILLGLDMEPKVADFGLEKLLIGDMSYRTGGSAPIFGSKRSTTSLEFGPSPSPSPSSVGLPYNAPESLRSIKPNSKWDVYSFGVILLELLTGKIVVVDELGQVNGLVIDDGERAIRMADSAIRAELEGKEEAVLACLKMGLACASPIPQRRPNIKEALQVLERFPVHSSQQ

SEQ ID NO: 86396 - protein, 750 aa, Arabidopsis thaliana
  peptide (1)..(750): Ceres Seq. ID no. 12689691
MTTVAADLHRYLFLITVFLFFLCDKTSLALTTDGVLLLSFRYSIVDDPLYVFRSWRFDDETPCSWRGVTCDASSRHVTVLSLPSSNLTGTLPSNLGSLNSLQRLDLSNNSINGSFPVSLLNATELRFLDLSDNHISGALPASFGALSNLQVLNLSDNSFVGELPNTLGWNRNLTEISLQKNYLSGGIPGGFKSTEYLDLSSNLIKGSLPSHFRGNRLRYFNASYNRISGEIPSGFADEIPEDATVDLSFNQLTGQIPGFRVLDNQESNSFSGNPGLCGSDHAKHPCRDGEATSPPPSPTPNSPPALAAIPNTIGLTNHPISSKTGPKSKWDHKPVLIIGIVVGDLAGLAILGIVFFYIYQSRKRKTVTATSKWSTSSTDSKVSKWYCLRKSVYVDGDCEEEEEESETSESESDEENPVGPNRRSGLDDQEKKGTLVNLDSEKELEIETLLKASAYILGATGSSIMYKAVLQDGTAVAVRRIAECGLDRFRDFEAQVRAVAKLIHPNLVRIRGFYWGSDEKLVIYDFVPNGSLANARYRKVGSSPCHLPWDARLKIAKGIARGLTYVHDKKYVHGNLKPSNILLGLDMEPKVADFGLEKLLIGDMSYRTGGSAPIFGSKRSTTSLEFGPSPSPSPSSVGLPYNAPESLRSIKPNSKWDVYSFGVILLELLTGKIVVVDELGQVNGLVIDDGERAIRMADSAIRAELEGKEEAVLACLKMGLACASPIPQRRPNIKEALQVLERFPVHSSQQ

SEQ ID NO: 86397 - DNA, 1563 bp, Arabidopsis thaliana
  misc_feature (1)..(1563): Ceres Seq. ID no. 12690197
  misc_feature (1)..(1563): Ortholog of  Ceres SEQ ID NO 13648124 as cited in SEQ ID NO 20362
atgactgatgcaatgttctcttcttcggccaagccacacttcatcaagcctatgcttccaggcttcgaaacctatattgttattcctaaagctttttactcgaactacttagagggaagacaagagggaaacgctgcagaactgagatcagacgccacggagatcacttggaaaataaagatagacggccgaagaatgaccaaagggtgggaagaatttgcggtggctcacaatcttcaggtcgacgacattcttgttttcagacacgaaggaaatctcttgtttcatgtcacaccttttggactgagtttttgtgagatactttactcacagagagacgagaaagatgtcaaagacacgacgggaaaggttacaagatctagaacggtgaagaaaaacggaaaaaatgagtgttcatcagtggacactgattttgtggtccctgttacagcctcaaaccaacgagttgattcattttatcttccaagaggttttaccacatcaagtggttcgagtaaactgtgcaatgagataattctaatagatgaaaaagacaggccatcgacgctaaaactgcgttacaataaatcaagtaatcggttttgtgttagccgaggttggagagctttctgctgcaggaatggttatagaactggttgtttcttgagaatcatattggtccgaaaaggaaaaacacccgtgctccggatttttcctttggagagggatgaggacaacattggaacggtttctataccagaaaaacactcaaagaaggttaagcaagaagtagagcatgaggagtctgtgaaagaagagacgaatgtggaatcaggaaagcttaaaagagatagattactgcagaaagatcccaaaaatttgtgttctacatcacaagacactaattttgtggtccctgtcacagcttcaaaccaacgacatgattcatttcatcttccaaaaggtttaaccacctcaagtggtctgagtaaactgtgcaagaagattatttttatggatcaaaaaggtaggtcatcgatactagacttgagctacagtatatcagatgatcggtttactgtcaggcgaggctggaaagctttctgctgcaggaatgagcataaaactggttgtttcttgaggctcatattggtccaaaatggaaaaacacccgtactccggatttttcctttggagagatatgagaacagcattgcgaagaactctaagaagattaagcaagaagtagaatatgagtctgcgaaagaagagaagaacctggaatcattgtctttgtcagataattctagctttgtggtatctgtcacagtttctaatctaagtgaagatatactgcatcttccaataaggctttcaagatcaaacttactggacaaaaaaattcacgagatagttttgatgaacaaagagggaagaacatggatattaagtttaaaatacagcaagtactccggtaggtttagaatcacacgcggctggaaaagtttctgcgaggcgaacggtcaaaaacctggatgtaccttcttactcaagctgttctag

SEQ ID NO: 86398 - protein, 520 aa, Arabidopsis thaliana
  peptide (1)..(520): Ceres Seq. ID no. 12690198
MTDAMFSSSAKPHFIKPMLPGFETYIVIPKAFYSNYLEGRQEGNAAELRSDATEITWKIKIDGRRMTKGWEEFAVAHNLQVDDILVFRHEGNLLFHVTPFGLSFCEILYSQRDEKDVKDTTGKVTRSRTVKKNGKNECSSVDTDFVVPVTASNQRVDSFYLPRGFTTSSGSSKLCNEIILIDEKDRPSTLKLRYNKSSNRFCVSRGWRAFCCRNGYRTGCFLRIILVRKGKTPVLRIFPLERDEDNIGTVSIPEKHSKKVKQEVEHEESVKEETNVESGKLKRDRLLQKDPKNLCSTSQDTNFVVPVTASNQRHDSFHLPKGLTTSSGLSKLCKKIIFMDQKGRSSILDLSYSISDDRFTVRRGWKAFCCRNEHKTGCFLRLILVQNGKTPVLRIFPLERYENSIAKNSKKIKQEVEYESAKEEKNLESLSLSDNSSFVVSVTVSNLSEDILHLPIRLSRSNLLDKKIHEIVLMNKEGRTWILSLKYSKYSGRFRITRGWKSFCEANGQKPGCTFLLKLF

SEQ ID NO: 86399 - protein, 516 aa, Arabidopsis thaliana
  peptide (1)..(516): Ceres Seq. ID no. 12690199
MFSSSAKPHFIKPMLPGFETYIVIPKAFYSNYLEGRQEGNAAELRSDATEITWKIKIDGRRMTKGWEEFAVAHNLQVDDILVFRHEGNLLFHVTPFGLSFCEILYSQRDEKDVKDTTGKVTRSRTVKKNGKNECSSVDTDFVVPVTASNQRVDSFYLPRGFTTSSGSSKLCNEIILIDEKDRPSTLKLRYNKSSNRFCVSRGWRAFCCRNGYRTGCFLRIILVRKGKTPVLRIFPLERDEDNIGTVSIPEKHSKKVKQEVEHEESVKEETNVESGKLKRDRLLQKDPKNLCSTSQDTNFVVPVTASNQRHDSFHLPKGLTTSSGLSKLCKKIIFMDQKGRSSILDLSYSISDDRFTVRRGWKAFCCRNEHKTGCFLRLILVQNGKTPVLRIFPLERYENSIAKNSKKIKQEVEYESAKEEKNLESLSLSDNSSFVVSVTVSNLSEDILHLPIRLSRSNLLDKKIHEIVLMNKEGRTWILSLKYSKYSGRFRITRGWKSFCEANGQKPGCTFLLKLF

SEQ ID NO: 86400 - protein, 503 aa, Arabidopsis thaliana
  peptide (1)..(503): Ceres Seq. ID no. 12690200
MLPGFETYIVIPKAFYSNYLEGRQEGNAAELRSDATEITWKIKIDGRRMTKGWEEFAVAHNLQVDDILVFRHEGNLLFHVTPFGLSFCEILYSQRDEKDVKDTTGKVTRSRTVKKNGKNECSSVDTDFVVPVTASNQRVDSFYLPRGFTTSSGSSKLCNEIILIDEKDRPSTLKLRYNKSSNRFCVSRGWRAFCCRNGYRTGCFLRIILVRKGKTPVLRIFPLERDEDNIGTVSIPEKHSKKVKQEVEHEESVKEETNVESGKLKRDRLLQKDPKNLCSTSQDTNFVVPVTASNQRHDSFHLPKGLTTSSGLSKLCKKIIFMDQKGRSSILDLSYSISDDRFTVRRGWKAFCCRNEHKTGCFLRLILVQNGKTPVLRIFPLERYENSIAKNSKKIKQEVEYESAKEEKNLESLSLSDNSSFVVSVTVSNLSEDILHLPIRLSRSNLLDKKIHEIVLMNKEGRTWILSLKYSKYSGRFRITRGWKSFCEANGQKPGCTFLLKLF

SEQ ID NO: 86401 - DNA, 336 bp, Arabidopsis thaliana
  misc_feature (1)..(336): Ceres Seq. ID no. 12690259
  misc_feature (1)..(336): Ortholog of  Ceres SEQ ID NO 15169443 as cited in SEQ ID NO 58785
atgaaggttgccgctgctttcctcctcgccgttttgggcggaaacgctaatccttctgctgataatatcaaagatatcatcggagctgttggtgctgatgttgatggagagagcattgagcttctattgaaagaagtgagtggtaaagacattgctgagctgattgcttctggtagggagaagttagcgtctgtgccatctggtggtggtgtggctgtttcagctgctccatcaagcggtggtggtggtgctgctgcccctgcggagaagaaagaagccaagaaggaagagaaagaagagtctgatgatgacatgggattcagtctcttcgagtaa

SEQ ID NO: 86402 - protein, 111 aa, Arabidopsis thaliana
  peptide (1)..(111): Ceres Seq. ID no. 12690260
MKVAAAFLLAVLGGNANPSADNIKDIIGAVGADVDGESIELLLKEVSGKDIAELIASGREKLASVPSGGGVAVSAAPSSGGGGAAAPAEKKEAKKEEKEESDDDMGFSLFE

SEQ ID NO: 86403 - DNA, 2781 bp, Arabidopsis thaliana
  misc_feature (1)..(2781): Ceres Seq. ID no. 12690352
  misc_feature (1)..(2781): Ortholog of  Ceres SEQ ID NO 13582285 as cited in SEQ ID NO 59817
atgtcgacttcattcacaatgatcggtggtgaaggtcccaacagttaccgagaccattcgaaataccagggagcattggttgaagctgcaaaggaaaagatcaatgaagccatctctacgaaactcgatatcgactttacttcaaatcttgttaacatagcagattttggttgctcttctggaccaaacactttcacagcggtgcaaaccttaatcgatgctgtggaaaacaagtataagaaagaaagtaatatcgagttccaagttttcttcaatgattcttcgaacaatgatttcaacactcttttcaaaacacttcctccggctagactgtatttcgcaagtggagtaccgggttctttctttggtcgtgttcttcctagaaatagtctccatttgggagtttctgcttactcactccatttcatatccaagattcccaaagaagttaaagatcgtgattctcctgtgtggaacaaggacatacattgctctggatcttcaaaagaggtagcaaaattgtatcttggtcaatacaagatcgatgtggggagtttcttgaacgcgagagcgcaagagcttgtgtccggtggattgctattgcttcttggttcatgtcgtccaaatggagttcaaatgtttgaaacggttgaaggcatgatgattgattttattggagcttctcttaatgaaattgctaaccagggtctaatagatcaacaaaagcttgacacttttaagttgcctatctatgctccacaagcggatgaattgaagcaaatcatcgaggataacgggtgtttcacgattgaggtattcgaaaatattatacacgccaagggagagtatccgttagaccccgagtttttaacagtctcctttaaggtcacggttggaggatcagtagcttcactatttgggcaagatggtatggagaaaacctttgagcttgtgaaagagaagacacaagaaatgcttcctcagatagccaaagccaaacccggaatgcaatacctcattgtgcttcgaagaaactgttttcatgatctatttagatctttgaaacgagacttaaataatgtaattgcaatgatgtgtgtttgtgtgtgtatgtgttgtattcttgaaataagattcatcagaagagtaaataaacatcaaaatccaacaaaccaaactagaaaaatgtcagtagttttactctcttctacttctgcaacaatcaccaaatcccaatccaaaaagattccctttttatctcccaccacaaaattcccattaaaggtctcaatttctccatcaagatcgaaacttttccacaaccctttacgcgtggcggcgccgccgtctgtacccacttcggattcgacggaggagaagcggatcgaagaagaatacggcggagataaggaagaagaagggtctgagtttaagtggagagatcattggtatccagtttctttggttgaggatttggatccgaatgtgccaaccccgttccagctcttgggtcgagaccttgtactctggtttgatcggaatgatcagaaatgggcagcctttgatgatctctgccctcaccggctcgctcctttatctgaaggaaggttggatgagaatggacacttgcaatgttcgtatcatggatggtcatttggtgggtgtggatcttgcactaggattcctcaggctgctacttcaggtcctgaagctcgtgctgttaaatccccgagagcttgtgctattaagttcccgacaatggtgtctcaaggtcttctctttgtgtggcctgatgaaaatggttgggatagagccaattcaattgaaccccctaggttgccggatgatttcgataaaccggaattttcgacggtgacaattcaaagggatcttttctatggatatgatactctcatggaaaatgtatctgatccttcccatatagattttgctcatcacaaggttacaggaagaagagacagagccaaaccattgccgttcaaggtggagtcaagtgggccttggggtttccaaggtgcgaatgatgacagtccaaggataaccgcaaaatttgttgctccgtgctattctatgaacaaaattgagttagatgcgaaactaccaatcgtcggtaatcaaaaatgggtcatttggatttgctcattcaatataccaatggctccaggaaagacccgttccatcgtttgcagcgcccgtaacttctttcagttctctgtaccaggaccagcttggtggcaggttgtaccaagatggtatgaacactggacttcgaacttagtctatgacggagacatgatcgtacttcaaggacaagagaaagtattcctcgctaaatcaatggagtcaccagactacgacgtgaacaaacagtacacaaagctcacattcactccaacccaggcagaccgttttgttctagcattcagaaactggctcagacggcatggtaagagtcagcctgaatggttcggctccaccccgtctaaccaacctctcccttccactgtcttaaccaagcgtcagatgctagatagatttgatcagcatacacaagtatgctcttcctgcaaaggagcttacaacagtttccaaatcctcaagaagtttctcgttggcgcgacggttttctgggccgccacggctggtgttccttctgatgttcagattcgactggttcttgctggtttatcactgatatcagctgcttctgcatatgctttacatgaacaagagaagaactttagattatgtacattctga

SEQ ID NO: 86404 - protein, 926 aa, Arabidopsis thaliana
  peptide (1)..(926): Ceres Seq. ID no. 12690353
MSTSFTMIGGEGPNSYRDHSKYQGALVEAAKEKINEAISTKLDIDFTSNLVNIADFGCSSGPNTFTAVQTLIDAVENKYKKESNIEFQVFFNDSSNNDFNTLFKTLPPARLYFASGVPGSFFGRVLPRNSLHLGVSAYSLHFISKIPKEVKDRDSPVWNKDIHCSGSSKEVAKLYLGQYKIDVGSFLNARAQELVSGGLLLLLGSCRPNGVQMFETVEGMMIDFIGASLNEIANQGLIDQQKLDTFKLPIYAPQADELKQIIEDNGCFTIEVFENIIHAKGEYPLDPEFLTVSFKVTVGGSVASLFGQDGMEKTFELVKEKTQEMLPQIAKAKPGMQYLIVLRRNCFHDLFRSLKRDLNNVIAMMCVCVCMCCILEIRFIRRVNKHQNPTNQTRKMSVVLLSSTSATITKSQSKKIPFLSPTTKFPLKVSISPSRSKLFHNPLRVAAPPSVPTSDSTEEKRIEEEYGGDKEEEGSEFKWRDHWYPVSLVEDLDPNVPTPFQLLGRDLVLWFDRNDQKWAAFDDLCPHRLAPLSEGRLDENGHLQCSYHGWSFGGCGSCTRIPQAATSGPEARAVKSPRACAIKFPTMVSQGLLFVWPDENGWDRANSIEPPRLPDDFDKPEFSTVTIQRDLFYGYDTLMENVSDPSHIDFAHHKVTGRRDRAKPLPFKVESSGPWGFQGANDDSPRITAKFVAPCYSMNKIELDAKLPIVGNQKWVIWICSFNIPMAPGKTRSIVCSARNFFQFSVPGPAWWQVVPRWYEHWTSNLVYDGDMIVLQGQEKVFLAKSMESPDYDVNKQYTKLTFTPTQADRFVLAFRNWLRRHGKSQPEWFGSTPSNQPLPSTVLTKRQMLDRFDQHTQVCSSCKGAYNSFQILKKFLVGATVFWAATAGVPSDVQIRLVLAGLSLISAASAYALHEQEKNFRLCTF

SEQ ID NO: 86405 - protein, 920 aa, Arabidopsis thaliana
  peptide (1)..(920): Ceres Seq. ID no. 12690354
MIGGEGPNSYRDHSKYQGALVEAAKEKINEAISTKLDIDFTSNLVNIADFGCSSGPNTFTAVQTLIDAVENKYKKESNIEFQVFFNDSSNNDFNTLFKTLPPARLYFASGVPGSFFGRVLPRNSLHLGVSAYSLHFISKIPKEVKDRDSPVWNKDIHCSGSSKEVAKLYLGQYKIDVGSFLNARAQELVSGGLLLLLGSCRPNGVQMFETVEGMMIDFIGASLNEIANQGLIDQQKLDTFKLPIYAPQADELKQIIEDNGCFTIEVFENIIHAKGEYPLDPEFLTVSFKVTVGGSVASLFGQDGMEKTFELVKEKTQEMLPQIAKAKPGMQYLIVLRRNCFHDLFRSLKRDLNNVIAMMCVCVCMCCILEIRFIRRVNKHQNPTNQTRKMSVVLLSSTSATITKSQSKKIPFLSPTTKFPLKVSISPSRSKLFHNPLRVAAPPSVPTSDSTEEKRIEEEYGGDKEEEGSEFKWRDHWYPVSLVEDLDPNVPTPFQLLGRDLVLWFDRNDQKWAAFDDLCPHRLAPLSEGRLDENGHLQCSYHGWSFGGCGSCTRIPQAATSGPEARAVKSPRACAIKFPTMVSQGLLFVWPDENGWDRANSIEPPRLPDDFDKPEFSTVTIQRDLFYGYDTLMENVSDPSHIDFAHHKVTGRRDRAKPLPFKVESSGPWGFQGANDDSPRITAKFVAPCYSMNKIELDAKLPIVGNQKWVIWICSFNIPMAPGKTRSIVCSARNFFQFSVPGPAWWQVVPRWYEHWTSNLVYDGDMIVLQGQEKVFLAKSMESPDYDVNKQYTKLTFTPTQADRFVLAFRNWLRRHGKSQPEWFGSTPSNQPLPSTVLTKRQMLDRFDQHTQVCSSCKGAYNSFQILKKFLVGATVFWAATAGVPSDVQIRLVLAGLSLISAASAYALHEQEKNFRLCTF

SEQ ID NO: 86406 - protein, 714 aa, Arabidopsis thaliana
  peptide (1)..(714): Ceres Seq. ID no. 12690355
MFETVEGMMIDFIGASLNEIANQGLIDQQKLDTFKLPIYAPQADELKQIIEDNGCFTIEVFENIIHAKGEYPLDPEFLTVSFKVTVGGSVASLFGQDGMEKTFELVKEKTQEMLPQIAKAKPGMQYLIVLRRNCFHDLFRSLKRDLNNVIAMMCVCVCMCCILEIRFIRRVNKHQNPTNQTRKMSVVLLSSTSATITKSQSKKIPFLSPTTKFPLKVSISPSRSKLFHNPLRVAAPPSVPTSDSTEEKRIEEEYGGDKEEEGSEFKWRDHWYPVSLVEDLDPNVPTPFQLLGRDLVLWFDRNDQKWAAFDDLCPHRLAPLSEGRLDENGHLQCSYHGWSFGGCGSCTRIPQAATSGPEARAVKSPRACAIKFPTMVSQGLLFVWPDENGWDRANSIEPPRLPDDFDKPEFSTVTIQRDLFYGYDTLMENVSDPSHIDFAHHKVTGRRDRAKPLPFKVESSGPWGFQGANDDSPRITAKFVAPCYSMNKIELDAKLPIVGNQKWVIWICSFNIPMAPGKTRSIVCSARNFFQFSVPGPAWWQVVPRWYEHWTSNLVYDGDMIVLQGQEKVFLAKSMESPDYDVNKQYTKLTFTPTQADRFVLAFRNWLRRHGKSQPEWFGSTPSNQPLPSTVLTKRQMLDRFDQHTQVCSSCKGAYNSFQILKKFLVGATVFWAATAGVPSDVQIRLVLAGLSLISAASAYALHEQEKNFRLCTF

SEQ ID NO: 86407 - DNA, 1368 bp, Arabidopsis thaliana
  misc_feature (1)..(1368): Ceres Seq. ID no. 12690379
  misc_feature (1)..(1368): Ortholog of  Ceres SEQ ID NO 13597546 as cited in SEQ ID NO 65017
  misc_feature (1)..(1368): Ortholog of  Ceres SEQ ID NO 14307912 as cited in SEQ ID NO 66380
  misc_feature (1)..(1368): Ortholog of  Ceres SEQ ID NO 14308045 as cited in SEQ ID NO 67444
  misc_feature (1)..(1368): Ortholog of  Ceres SEQ ID NO 13654353 as cited in SEQ ID NO 68318
atgaacttgttttggaacacaggattttgtgttatagttttagtggttgcgagggttggtcattggtggtaccaatggtcaaaccctaagtctaacggcaagttacctccgggatcaatgggtttcccgatcatcggagagacattagatttctttaagccttatggattctacgagatctccccatatctcaagaaaaagatgttaaggtatgggccattatttcggacaaacattcttggagtaaaaaccgtggtatcgacggataaggatgttaacatggagattttaagacaagagaacaagtctttcattttaagttatccggatggtttaatgaagccattgggaaaagatagcttgttcttgaagattggaaacatccacaagcacatcaaacaaataactcttcatcttttgtcctccgagggtttaaaacggaaaatattaaaagatatggaccgtgtgacacgcgagcatcttagttcgaaagctaaaacaggaagattggatgttaaggacgcagtttcaaaattgataatagcccacttgacacctaagatgatgagtaatctcaaaccacagactcaagcaaagcttatgggaatttttaaggcatgccgagaggggatgcgagagataaaggatatatatacaatgaggaaaacgtctgaggagaagtacgatgacttcctcaacacggcaatagaagagtcagagaaagcaggagagttattgaacgaaaatgcaattataaccctcatctttaccctttcatgtgtcactcaagataccacctcaaaggcgatttgcttggctgtgaaattcctattggaaaacccaaaagttctcgcagagttaaagaaagaacatgaggtgatccttgaaagcagagaagacaaagaaggtggagttacttgggaagaatacagacacaagatgactttcaccaacatggttatcaatgagtctcttcgaataacaaacttggctcctatgttatttagaaaagcggtaaaggatgtggaaatcaaaggatacaccattccagcaggttggatagtgatgattataccttcagtggttcattttgatcctgaaatctatgaaaacccttttgagtttaatccatggagatgggaggggaaagagttgcgggctggatctaaaacgttcatggtgtttggaaccggacttagacaatgcgctggtgcagagtttgctaggcttcagatttcagtatttcttcatcatcttgttaccacttataatttctcgttgcaccaagactgcgaggtgcttcgtgtaccagctgctcacctccctaatggcatatctataaacatctccaagtgtcccaaaaaatga

SEQ ID NO: 86408 - protein, 455 aa, Arabidopsis thaliana
  peptide (1)..(455): Ceres Seq. ID no. 12690380
MNLFWNTGFCVIVLVVARVGHWWYQWSNPKSNGKLPPGSMGFPIIGETLDFFKPYGFYEISPYLKKKMLRYGPLFRTNILGVKTVVSTDKDVNMEILRQENKSFILSYPDGLMKPLGKDSLFLKIGNIHKHIKQITLHLLSSEGLKRKILKDMDRVTREHLSSKAKTGRLDVKDAVSKLIIAHLTPKMMSNLKPQTQAKLMGIFKACREGMREIKDIYTMRKTSEEKYDDFLNTAIEESEKAGELLNENAIITLIFTLSCVTQDTTSKAICLAVKFLLENPKVLAELKKEHEVILESREDKEGGVTWEEYRHKMTFTNMVINESLRITNLAPMLFRKAVKDVEIKGYTIPAGWIVMIIPSVVHFDPEIYENPFEFNPWRWEGKELRAGSKTFMVFGTGLRQCAGAEFARLQISVFLHHLVTTYNFSLHQDCEVLRVPAAHLPNGISINISKCPKK

SEQ ID NO: 86409 - protein, 416 aa, Arabidopsis thaliana
  peptide (1)..(416): Ceres Seq. ID no. 12690381
MGFPIIGETLDFFKPYGFYEISPYLKKKMLRYGPLFRTNILGVKTVVSTDKDVNMEILRQENKSFILSYPDGLMKPLGKDSLFLKIGNIHKHIKQITLHLLSSEGLKRKILKDMDRVTREHLSSKAKTGRLDVKDAVSKLIIAHLTPKMMSNLKPQTQAKLMGIFKACREGMREIKDIYTMRKTSEEKYDDFLNTAIEESEKAGELLNENAIITLIFTLSCVTQDTTSKAICLAVKFLLENPKVLAELKKEHEVILESREDKEGGVTWEEYRHKMTFTNMVINESLRITNLAPMLFRKAVKDVEIKGYTIPAGWIVMIIPSVVHFDPEIYENPFEFNPWRWEGKELRAGSKTFMVFGTGLRQCAGAEFARLQISVFLHHLVTTYNFSLHQDCEVLRVPAAHLPNGISINISKCPKK

SEQ ID NO: 86410 - protein, 388 aa, Arabidopsis thaliana
  peptide (1)..(388): Ceres Seq. ID no. 12690382
MLRYGPLFRTNILGVKTVVSTDKDVNMEILRQENKSFILSYPDGLMKPLGKDSLFLKIGNIHKHIKQITLHLLSSEGLKRKILKDMDRVTREHLSSKAKTGRLDVKDAVSKLIIAHLTPKMMSNLKPQTQAKLMGIFKACREGMREIKDIYTMRKTSEEKYDDFLNTAIEESEKAGELLNENAIITLIFTLSCVTQDTTSKAICLAVKFLLENPKVLAELKKEHEVILESREDKEGGVTWEEYRHKMTFTNMVINESLRITNLAPMLFRKAVKDVEIKGYTIPAGWIVMIIPSVVHFDPEIYENPFEFNPWRWEGKELRAGSKTFMVFGTGLRQCAGAEFARLQISVFLHHLVTTYNFSLHQDCEVLRVPAAHLPNGISINISKCPKK

SEQ ID NO: 86411 - DNA, 1711 bp, Arabidopsis thaliana
  misc_feature (1)..(1711): Ceres Seq. ID no. 12690391
  misc_feature (1)..(1711): Ortholog of  Ceres SEQ ID NO 13663419 as cited in SEQ ID NO 66561
ataacccaaaaattctctcacagaaaaccaaaaaaaaaatggactccaaaacaacttttctcacatttctcctctgtattttcattttctctcatttttcaccctcaacttccaaatctctgacagaaaagcccttatctttctcaccgtcggcgagtttgccgactctcacggcggagagacttatcaaaggattcaatttgatgcctacacgcgacgtcaatgtcatcgatgaagaaggttctgaggctccgagactggtcgagagagcattcgatttgccggcggcggttgaccgtcgtggctccggtggttctccgtcggttcaagattttggtcaccatgctggttactacaaactccctaactcaaaagcagcaaggatgttctactttttcttcgagtcaaggacgaacaaagccgatccagtggtgatttggctaaccggtggaccaggttgcagtagtgaactggctctgttctacgagaacggaccgttcaccgtctctaacaactcatctctttcttggaacgaatttggttgggacaaggcatcaaatctaatctacgtggaccaaccggtaggaactggtttcagttacacatcggaccaaagcgatcttcgtcatgacgaggatggtgtcagtaatgacctttatgacttcttacaggcgtttttcaaagagcatccacaatttgtgaagaatgatttttacattaccggtgaatcctacgctggacattacattccggcattggcttcacgtgttcaccgtggaaacaagaacaaagaaggaactcacattaaccttaagggttttgcgatcggtaacggtttaaccaacccggagattcaatatggtgcgtatgcggattacgcgctagacatgaatttaatcacacagtctgatcatgataacctcaaccgttattacgcaacttgtcaacaatctatcaaagaatgcagcgcggatggtggtgaaggggatgcgtgtgcttcttcttacactgtctgcaacaacattttccaaaagataatggatattgctggaaacgtaaactattatgacgtgaggaaacaatgtgaaggaagcttatgctatgatttctcgaacatggagaatttcttgaaccagaaatcggtgcggaaggcattaggtgtgggagatatcgagtttgtgtcttgcagtacagcggtctacgaagcaatgcagatggactggatgcggaatcttgaggtcgggattccagctcttcttcaagatggaattaagctccttgtttatgccggagaatacgatctcatctgcaattggctcggaaactcaaagtgggttcacgaaatggaatggtcaggccagaaagagtttgtagcagcagcgacagttccattccacgtagacaacaaagaagcgggtttaatgaagaactacggttcactcactttcctaaaggtccatgatgctggacacatggttccgatggatcagccaaaggcagcattgcaaatgcttcagaactggatgcaaggaaagctcagtacacccactggtcggaccgctcatcagtaaatccaaattccgaaccggctgaattattatgtatttaggagatcaatattttacttttaagaaaagctaaataacatatacttgtgaattatttctatcaatacacaggaaacttcattgttaatttctaaccatcatat

SEQ ID NO: 86412 - protein, 522 aa, Arabidopsis thaliana
  peptide (1)..(522): Ceres Seq. ID no. 12690392
NPKILSQKTKKKMDSKTTFLTFLLCIFIFSHFSPSTSKSLTEKPLSFSPSASLPTLTAERLIKGFNLMPTRDVNVIDEEGSEAPRLVERAFDLPAAVDRRGSGGSPSVQDFGHHAGYYKLPNSKAARMFYFFFESRTNKADPVVIWLTGGPGCSSELALFYENGPFTVSNNSSLSWNEFGWDKASNLIYVDQPVGTGFSYTSDQSDLRHDEDGVSNDLYDFLQAFFKEHPQFVKNDFYITGESYAGHYIPALASRVHRGNKNKEGTHINLKGFAIGNGLTNPEIQYGAYADYALDMNLITQSDHDNLNRYYATCQQSIKECSADGGEGDACASSYTVCNNIFQKIMDIAGNVNYYDVRKQCEGSLCYDFSNMENFLNQKSVRKALGVGDIEFVSCSTAVYEAMQMDWMRNLEVGIPALLQDGIKLLVYAGEYDLICNWLGNSKWVHEMEWSGQKEFVAAATVPFHVDNKEAGLMKNYGSLTFLKVHDAGHMVPMDQPKAALQMLQNWMQGKLSTPTGRTAHQ

SEQ ID NO: 86413 - protein, 510 aa, Arabidopsis thaliana; identical to SEQ ID NO: 30708
  peptide (1)..(510): Ceres Seq. ID no. 12690393

SEQ ID NO: 86414 - protein, 455 aa, Arabidopsis thaliana; identical to SEQ ID NO: 30709
  peptide (1)..(455): Ceres Seq. ID no. 12690394

SEQ ID NO: 86415 - DNA, 1593 bp, Arabidopsis thaliana
  misc_feature (1)..(1593): Ceres Seq. ID no. 12690399
  misc_feature (1)..(1593): Ortholog of  Ceres SEQ ID NO 14311232 as cited in SEQ ID NO 53073
atggcttctccctcttcctcctctctctctccgccttcctcgtcgagatccgcgtcgagacttctccgtttcttctctctcatttcagctccagggatattactaggagctgtgacacttccttctgttatgatatctaagttagttcagctttcaagagctatttcaatccatgaagctgaacaagatgagcttgcacatgtgacaatgcagtattgggcagcatcggctagttgttgtgctatacttatatatctatcagtgattatgtcacaagtgagaaaagatgaatctttgtcgtcatcgtctatttggcttacgagagttagcttgactgggacagtgttgtatggagtagcatgttttgtttcactttccatgatttcacacactggcttgaatacgtcattgaaaatgttgtggatgttatttcatggacttgcagctgtgaagttgattcgacatttgctttgcactttcccatcgtgtgcttcgataggggaagcacttcttgtgaccagtggtcttgttctctattttggcgactttttggcatgcacaattgcaaagatttttgagaaattgatacctgtggatcttgtctcaataagctatggaataaagagaacggaaaccggcataatcgttcagggtctactgttgggccttctacttttcccgatggtgtttagatttgttctgcatatatatgaaagctctttgagaaagagagatgctcgacaaagaaactgcagtgatgctgcaaaatctgtcttattctttgtttcacttctattttttatggtcgtggctgttccttcttggatgcagtttgtacacgatttcaaccagcatcccttcttatgggtgctcacatttgtcttttctgaacctctgaagagactttcattatgtatctactggattctgttgatcgttgtgtctgtctcacgattttataacatctcgaggagtagcaaggttgagagaatcttgcttcggaagtactaccatctgatggctgttttaatgttcttgccagctcttgtcttacagcctaaatttctcgatctagcatttggtgcagcattggcagtatttgttgcattggagatcattcgaatatggagaattcagcctcttggagagcctttacatcaattcatgaatgctttcactgaccatcgtgactcagagcatctgattgtcagccacttctcactcttgcttgggtgtgcgcttccgatttggatgtcatctgggttcaatgaccgagccttatctccatttgctggaattctcagcctaggaattggagatacaatggcatcgatggttggtcacaaatatggggtgttgagatggagcaagacaggaaagaaaacggttgaaggaacagcagcgggaataacatcgatgatggcagtgtgctttgttctggtcccaatattagcatcaatgggttatatactaagtcaaggatggtggtcgcttctggtggctgtgacagccaccgggatgttggaagcttacacggcgcagttagacaatgcctttatacctcttgtcttctactcactcctctgcttgtaa

SEQ ID NO: 86416 - protein, 530 aa, Arabidopsis thaliana
  peptide (1)..(530): Ceres Seq. ID no. 12690400
MASPSSSSLSPPSSSRSASRLLRFFSLISAPGILLGAVTLPSVMISKLVQLSRAISIHEAEQDELAHVTMQYWAASASCCAILIYLSVIMSQVRKDESLSSSSIWLTRVSLTGTVLYGVACFVSLSMISHTGLNTSLKMLWMLFHGLAAVKLIRHLLCTFPSCASIGEALLVTSGLVLYFGDFLACTIAKIFEKLIPVDLVSISYGIKRTETGIIVQGLLLGLLLFPMVFRFVLHIYESSLRKRDARQRNCSDAAKSVLFFVSLLFFMVVAVPSWMQFVHDFNQHPFLWVLTFVFSEPLKRLSLCIYWILLIVVSVSRFYNISRSSKVERILLRKYYHLMAVLMFLPALVLQPKFLDLAFGAALAVFVALEIIRIWRIQPLGEPLHQFMNAFTDHRDSEHLIVSHFSLLLGCALPIWMSSGFNDRALSPFAGILSLGIGDTMASMVGHKYGVLRWSKTGKKTVEGTAAGITSMMAVCFVLVPILASMGYILSQGWWSLLVAVTATGMLEAYTAQLDNAFIPLVFYSLLCL

SEQ ID NO: 86417 - protein, 487 aa, Arabidopsis thaliana
  peptide (1)..(487): Ceres Seq. ID no. 12690401
MISKLVQLSRAISIHEAEQDELAHVTMQYWAASASCCAILIYLSVIMSQVRKDESLSSSSIWLTRVSLTGTVLYGVACFVSLSMISHTGLNTSLKMLWMLFHGLAAVKLIRHLLCTFPSCASIGEALLVTSGLVLYFGDFLACTIAKIFEKLIPVDLVSISYGIKRTETGIIVQGLLLGLLLFPMVFRFVLHIYESSLRKRDARQRNCSDAAKSVLFFVSLLFFMVVAVPSWMQFVHDFNQHPFLWVLTFVFSEPLKRLSLCIYWILLIVVSVSRFYNISRSSKVERILLRKYYHLMAVLMFLPALVLQPKFLDLAFGAALAVFVALEIIRIWRIQPLGEPLHQFMNAFTDHRDSEHLIVSHFSLLLGCALPIWMSSGFNDRALSPFAGILSLGIGDTMASMVGHKYGVLRWSKTGKKTVEGTAAGITSMMAVCFVLVPILASMGYILSQGWWSLLVAVTATGMLEAYTAQLDNAFIPLVFYSLLCL

SEQ ID NO: 86418 - protein, 461 aa, Arabidopsis thaliana
  peptide (1)..(461): Ceres Seq. ID no. 12690402
MQYWAASASCCAILIYLSVIMSQVRKDESLSSSSIWLTRVSLTGTVLYGVACFVSLSMISHTGLNTSLKMLWMLFHGLAAVKLIRHLLCTFPSCASIGEALLVTSGLVLYFGDFLACTIAKIFEKLIPVDLVSISYGIKRTETGIIVQGLLLGLLLFPMVFRFVLHIYESSLRKRDARQRNCSDAAKSVLFFVSLLFFMVVAVPSWMQFVHDFNQHPFLWVLTFVFSEPLKRLSLCIYWILLIVVSVSRFYNISRSSKVERILLRKYYHLMAVLMFLPALVLQPKFLDLAFGAALAVFVALEIIRIWRIQPLGEPLHQFMNAFTDHRDSEHLIVSHFSLLLGCALPIWMSSGFNDRALSPFAGILSLGIGDTMASMVGHKYGVLRWSKTGKKTVEGTAAGITSMMAVCFVLVPILASMGYILSQGWWSLLVAVTATGMLEAYTAQLDNAFIPLVFYSLLCL

SEQ ID NO: 86419 - DNA, 1422 bp, Arabidopsis thaliana
  misc_feature (1)..(1422): Ceres Seq. ID no. 12690497
  misc_feature (1)..(1422): Ortholog of  Ceres SEQ ID NO 12613725 as cited in SEQ ID NO 68196
atggctcgttcagtcgacacagaagcaatgaccactcgcgatccaagcagcaagcgcggtggctggaaaacgtttccattcatgatcgctacattgttaggactttccatagcttcattcggatgggtgatgaacttggtcgtcttcctaattaaagaattcaacatcaagagcatcgctgctacgcagaattctaatattgttaatggatgtgtgagcatgttgcctgttgttgcagccattctagctgattcttttttcggaaacattcccgtcatctccgtctctgccttcatttctttgcttggcatcattctattgaccatgattacatctttggaccacttgagacctccaccgtgtgaaacagggtcaattctatgcgaatcgccatcaaaactccagctcgggatcttgtatatagccttagctctagtgatcattggatcagctggtacgcggtttaccttagcatccgcgggtgcaaaccaatatgagaaacctaaagaacaaggaagctttttcaactggtacttcctcacactctacactggagctattactggtgcaacagcaattgtatatacacaggaaaatgctagctggaaacttgggttcggtctttgcgccgtcgctaatttgatcagtttcatagttttcgtctctggcaagagatactacaagcatgacaaaccaatgggaagtcccttcacaaatctgatccgcgttgtagtcgctgctacaagaaaaaggaaagctgtgatttcatctagagaagaagactatcaccatgggcttggaagagaaggcaagacatcttctgcaatgccctccaagagctttaggttctttaaccgtgcagcattgaaaaccgaagatgactcagttaataacaactggaggctatgttctgttcaagaagtagaagattttaaagccgttttccgagttctccctctgttactagccatcatcttcgttagtactcccatggtgacgcaaacaagcttgattatattacaagctctagtcacagaccgcggtctcgggcctcacttcaaaatcccggccgggtccctccaagtcatagtaatcatcactgcatgtattgttatcttaatgaacaattgccttgtctatcccatgtaccagaagctagcccataagccattgacaccgcttcaaaaagtcggtataggccacgttttcatcattttaagcatggcgatatccgccattgtggaagcaaagaggctgaaaacagttactaatggccattccatgtcagtgctatggctggttcctccccttgtgatagtaggaataggagaaacgttccaatttccggcgaatattgaattattctatagagaattccccgagtctctgagtagcaccgcgacttcattgcctcagtggtga

SEQ ID NO: 86420 - protein, 473 aa, Arabidopsis thaliana
  peptide (1)..(473): Ceres Seq. ID no. 12690498
MARSVDTEAMTTRDPSSKRGGWKTFPFMIATLLGLSIASFGWVMNLVVFLIKEFNIKSIAATQNSNIVNGCVSMLPVVAAILADSFFGNIPVISVSAFISLLGIILLTMITSLDHLRPPPCETGSILCESPSKLQLGILYIALALVIIGSAGTRFTLASAGANQYEKPKEQGSFFNWYFLTLYTGAITGATAIVYTQENASWKLGFGLCAVANLISFIVFVSGKRYYKHDKPMGSPFTNLIRVVVAATRKRKAVISSREEDYHHGLGREGKTSSAMPSKSFRFFNRAALKTEDDSVNNNWRLCSVQEVEDFKAVFRVLPLLLAIIFVSTPMVTQTSLIILQALVTDRGLGPHFKIPAGSLQVIVIITACIVILMNNCLVYPMYQKLAHKPLTPLQKVGIGHVFIILSMAISAIVEAKRLKTVTNGHSMSVLWLVPPLVIVGIGETFQFPANIELFYREFPESLSSTATSLPQW

SEQ ID NO: 86421 - protein, 464 aa, Arabidopsis thaliana
  peptide (1)..(464): Ceres Seq. ID no. 12690499
MTTRDPSSKRGGWKTFPFMIATLLGLSIASFGWVMNLVVFLIKEFNIKSIAATQNSNIVNGCVSMLPVVAAILADSFFGNIPVISVSAFISLLGIILLTMITSLDHLRPPPCETGSILCESPSKLQLGILYIALALVIIGSAGTRFTLASAGANQYEKPKEQGSFFNWYFLTLYTGAITGATAIVYTQENASWKLGFGLCAVANLISFIVFVSGKRYYKHDKPMGSPFTNLIRVVVAATRKRKAVISSREEDYHHGLGREGKTSSAMPSKSFRFFNRAALKTEDDSVNNNWRLCSVQEVEDFKAVFRVLPLLLAIIFVSTPMVTQTSLIILQALVTDRGLGPHFKIPAGSLQVIVIITACIVILMNNCLVYPMYQKLAHKPLTPLQKVGIGHVFIILSMAISAIVEAKRLKTVTNGHSMSVLWLVPPLVIVGIGETFQFPANIELFYREFPESLSSTATSLPQW

SEQ ID NO: 86422 - protein, 446 aa, Arabidopsis thaliana
  peptide (1)..(446): Ceres Seq. ID no. 12690500
MIATLLGLSIASFGWVMNLVVFLIKEFNIKSIAATQNSNIVNGCVSMLPVVAAILADSFFGNIPVISVSAFISLLGIILLTMITSLDHLRPPPCETGSILCESPSKLQLGILYIALALVIIGSAGTRFTLASAGANQYEKPKEQGSFFNWYFLTLYTGAITGATAIVYTQENASWKLGFGLCAVANLISFIVFVSGKRYYKHDKPMGSPFTNLIRVVVAATRKRKAVISSREEDYHHGLGREGKTSSAMPSKSFRFFNRAALKTEDDSVNNNWRLCSVQEVEDFKAVFRVLPLLLAIIFVSTPMVTQTSLIILQALVTDRGLGPHFKIPAGSLQVIVIITACIVILMNNCLVYPMYQKLAHKPLTPLQKVGIGHVFIILSMAISAIVEAKRLKTVTNGHSMSVLWLVPPLVIVGIGETFQFPANIELFYREFPESLSSTATSLPQW

SEQ ID NO: 86423 - DNA, 1347 bp, Arabidopsis thaliana
  misc_feature (1)..(1347): Ceres Seq. ID no. 12690501
  misc_feature (1)..(1347): Ortholog of  Ceres SEQ ID NO 12613725 as cited in SEQ ID NO 68196
atggctgattcaaaatctggtgacacggaagtagcgcatcgctctagcgatccaagcgaaaagcgtggtggctggatcactttaccgttcatgctagccttagctctagtgatcattggatcagctgggacgcggttcaccttggcagccgcgggtgcgaaccaatataagaagcctaaagaacaaggaagattcttcaactggttcttccttgcactgtatattggagctattactggcacgacagcgattgtatatacacaagacaatgctagctggaaacttgggttcggtctatgtgccgttgctaacttgatcagtttcatcgttttcatcgccggggttagattctacaagcatgacaaacccttgggaagtccttatacaagcctgatccgtgttttagttgctgctacaatgaaaagaaaggcagtgatttcatcaaaagacgaagactatcatcaatatggtctcgggaaagaggccaagacttatactacaatgccctccaagagctttaggttcttgaaccgtgcagcattaaagaacaaagaagatttaaacacgagtggtgactcaagtaataacatgtggaggctatgctctgttcaggaagtagaagacttcaaagccattctccgacttgtacctctctgggcagccgtcatgttcctcagcactcccgtggcagtacaaatgagcatgacggttctccaagctttggtcatggaccgcaaacttagcccgcacttcgaagtctctgccgggtctctacaagtcatagtactcgtctttggttgtgtctttatcatgctcaacaactggatcatctatcccatgtaccaaaagctaatcggcaaaccactgacaccacttcaacaagttgggatcggtcacgttttcaccatcctaagcatggcgatatcagctgttgtggaagcaaagagactgaaaacagttgaaaatggaggccatcccatgtcagtgctatggctagttcctgctcttgtgatggttggaataggcgaggcgtttcattttcccgcgaatgttgcagtattctatggagaattccctgagtctctgaagaacaccgcaacttcattgacctcagtggtgattggaatctctttctatctgagcacagctgttatcgacgtgatccaaagaaccacctcgtggttaccaaatgacataaaccatggaagagttgacaatgtttactgggttgtagtcataggaggagtcttgaatctcggctatttccttgtctgctcttggttttacaaatacagaaacctcaaggatgatgatcatgaacaagatcctaaagatgttaaaacctag

SEQ ID NO: 86424 - protein, 448 aa, Arabidopsis thaliana
  peptide (1)..(448): Ceres Seq. ID no. 12690502
MADSKSGDTEVAHRSSDPSEKRGGWITLPFMLALALVIIGSAGTRFTLAAAGANQYKKPKEQGRFFNWFFLALYIGAITGTTAIVYTQDNASWKLGFGLCAVANLISFIVFIAGVRFYKHDKPLGSPYTSLIRVLVAATMKRKAVISSKDEDYHQYGLGKEAKTYTTMPSKSFRFLNRAALKNKEDLNTSGDSSNNMWRLCSVQEVEDFKAILRLVPLWAAVMFLSTPVAVQMSMTVLQALVMDRKLSPHFEVSAGSLQVIVLVFGCVFIMLNNWIIYPMYQKLIGKPLTPLQQVGIGHVFTILSMAISAVVEAKRLKTVENGGHPMSVLWLVPALVMVGIGEAFHFPANVAVFYGEFPESLKNTATSLTSVVIGISFYLSTAVIDVIQRTTSWLPNDINHGRVDNVYWVVVIGGVLNLGYFLVCSWFYKYRNLKDDDHEQDPKDVKT

SEQ ID NO: 86425 - protein, 418 aa, Arabidopsis thaliana
  peptide (1)..(418): Ceres Seq. ID no. 12690503
MLALALVIIGSAGTRFTLAAAGANQYKKPKEQGRFFNWFFLALYIGAITGTTAIVYTQDNASWKLGFGLCAVANLISFIVFIAGVRFYKHDKPLGSPYTSLIRVLVAATMKRKAVISSKDEDYHQYGLGKEAKTYTTMPSKSFRFLNRAALKNKEDLNTSGDSSNNMWRLCSVQEVEDFKAILRLVPLWAAVMFLSTPVAVQMSMTVLQALVMDRKLSPHFEVSAGSLQVIVLVFGCVFIMLNNWIIYPMYQKLIGKPLTPLQQVGIGHVFTILSMAISAVVEAKRLKTVENGGHPMSVLWLVPALVMVGIGEAFHFPANVAVFYGEFPESLKNTATSLTSVVIGISFYLSTAVIDVIQRTTSWLPNDINHGRVDNVYWVVVIGGVLNLGYFLVCSWFYKYRNLKDDDHEQDPKDVKT

SEQ ID NO: 86426 - protein, 309 aa, Arabidopsis thaliana
  peptide (1)..(309): Ceres Seq. ID no. 12690504
MKRKAVISSKDEDYHQYGLGKEAKTYTTMPSKSFRFLNRAALKNKEDLNTSGDSSNNMWRLCSVQEVEDFKAILRLVPLWAAVMFLSTPVAVQMSMTVLQALVMDRKLSPHFEVSAGSLQVIVLVFGCVFIMLNNWIIYPMYQKLIGKPLTPLQQVGIGHVFTILSMAISAVVEAKRLKTVENGGHPMSVLWLVPALVMVGIGEAFHFPANVAVFYGEFPESLKNTATSLTSVVIGISFYLSTAVIDVIQRTTSWLPNDINHGRVDNVYWVVVIGGVLNLGYFLVCSWFYKYRNLKDDDHEQDPKDVKT

SEQ ID NO: 86427 - DNA, 990 bp, Arabidopsis thaliana
  misc_feature (1)..(990): Ceres Seq. ID no. 12690508
  misc_feature (1)..(990): Ortholog of  Ceres SEQ ID NO 13581579 as cited in SEQ ID NO 58361
  misc_feature (1)..(990): Ortholog of  Ceres SEQ ID NO 13598714 as cited in SEQ ID NO 62656
  misc_feature (1)..(990): Ortholog of  Ceres SEQ ID NO 13596969 as cited in SEQ ID NO 63375
  misc_feature (1)..(990): Ortholog of  Ceres SEQ ID NO 14302240 as cited in SEQ ID NO 64162
  misc_feature (1)..(990): Ortholog of  Ceres SEQ ID NO 13597519 as cited in SEQ ID NO 64759
  misc_feature (1)..(990): Ortholog of  Ceres SEQ ID NO 13597870 as cited in SEQ ID NO 64982
  misc_feature (1)..(990): Ortholog of  Ceres SEQ ID NO 13595926 as cited in SEQ ID NO 67778
  misc_feature (1)..(990): Ortholog of  Ceres SEQ ID NO 12567001 as cited in SEQ ID NO 0
atggctcgcttcgatattgttctactcataggtctttgcctcataatctctgtctttcccgatacaaccaccgcacaactaagccgcggtttctactccaaaacttgccccaatgtcgaacaaatcgtgagaaatgctgtccaaaagaaaataaagaagacattcgtcgccgtccctgccactctccgtctcttcttccacgactgctttgtcaatggttgtgatgcatctgtcatgatccaatcaacgcctaagaacaaggcagagaaggatcatccagataacatttcgctagctggagatggatttgatgtggtgatccaagctaagaaagcccttgactctaaccctagttgccggaacaaggtctcatgtgccgatattcttactttggccacccgagatgttgttgttgcggctggaggaccgtcctatgaagttgaacttggtaggttcgatggtttggtatcaaccgcgtcaagtgtcgaagggaacttaccaggaccttcggacaatgtagacaaacttaatgctcttttcacgaaaaacaaacttacccaagaagatatgattgctctttcagcggctcacacccttggattcgcacattgtggcaaggtctttaaaagaatccacaaattcaacggcatcaactccgtggacccaactttaaacaaggcttacgctattgagcttcaaaaggcttgtcctaagaatgtggacccaagaattgcaatcaacatggacccagtcacgcccaagacgtttgacaacacttacttcaagaatcttcaacaaggcaaaggtctcttcacctccgatcaagttctcttcacggatggtcgctctaggcccaccgttaatgcttgggcctcaaactctacggcctttaaccgcgcttttgtgatagccatgaccaaacttggccgtgttggagttaagaatagcagcaatggaaacatccgtcgtgattgtggtgcgtttaactag

SEQ ID NO: 86428 - protein, 329 aa, Arabidopsis thaliana; identical to SEQ ID NO: 21898
  peptide (1)..(329): Ceres Seq. ID no. 12690509

SEQ ID NO: 86429 - protein, 251 aa, Arabidopsis thaliana; identical to SEQ ID NO: 21899
  peptide (1)..(251): Ceres Seq. ID no. 12690510

SEQ ID NO: 86430 - DNA, 1154 bp, Arabidopsis thaliana
  misc_feature (1)..(1154): Ceres Seq. ID no. 12690530
  misc_feature (1)..(1154): Ortholog of  Ceres SEQ ID NO 13582052 as cited in SEQ ID NO 59823
  misc_feature (1)..(1154): Ortholog of  Ceres SEQ ID NO 13659378 as cited in SEQ ID NO 67014
  misc_feature (1)..(1154): Ortholog of  Ceres SEQ ID NO 13599365 as cited in SEQ ID NO 0
aaaaggaaacacacaaaagccctaaatctctttttaacctctgaagcaaaaaccaccacatcggagatttctaatccaacgaaaacgcttcaattttcttgcgatttctcttcctctgcgaaaaacccttttggattcagactttcctcggtttaccagttggactcagatagaagcttatatctgtacctgataatttgcagcaaatatggatgactgggaggacgagaaaattgcaccacttccagcaaaagttgagcttaaaagtaactgggatgatgaagatgtggatgagaatgaaattaaggattcatgggaggatgatgatgatgaacctgctcagccgcctgttataaatcctgctccggagaaggctcctaagaaagcagcccccaaaactgttgaaaagaagggtaaagcagtcgaagttccaaaggaagcaccaaaagaaaaacctctagatcctatagcggagaaacttcgccagcagaggcttgttgaggaagccgactaccgggcaactgctgagctctttggagtgaaggatgatgacaaaaaccttgatatgtttatccccaagtctgaaagcgattttttggaatatgctgaaatgatttctcataggattaaaccatatgagaaaagttatcactatatagcgctgctcaaaacaatcatgagactttcattgaccaacatgaaagcagctgatgttaaagatgttgcttcgtccattacaacgatagcaaatgaaaaactaaaggcagagaaagaagctgctgcgggaaaaaagaaaggtggaaagaagaaacaacttattgtagataaggccaatgacgatctagtggctggtccttatgatgccatggatgacttcgacttcatgtagattaaaagagctttttgagcaaatgcaaattggatttgtccagcgtctattttatcatttatctatcactcaaaagaaacacatttttcttaattttggtttgaatagagcaagaagagccaaatttctggttgcggaaatatatagttggaacatgggaagcttttgttttggtttggtctgggaattctctagagtcatgtttttggttctatttgttggttgaaaaagctatacttaaagtgtccgtataaatttattattg

SEQ ID NO: 86431 - protein, 226 aa, Arabidopsis thaliana; identical to SEQ ID NO: 34809
  peptide (1)..(226): Ceres Seq. ID no. 12690531

SEQ ID NO: 86432 - DNA, 573 bp, Arabidopsis thaliana
  misc_feature (1)..(573): Ceres Seq. ID no. 12690532
  misc_feature (1)..(573): Ortholog of  Ceres SEQ ID NO 12626028 as cited in SEQ ID NO 69063
atgttcggagtcgtcttccccaatcgaagtttcccaatagacatctcaaccttcactcaaatcgacacattccactgggttctcgacatgaaccacttcgtcggtgaagcttatgatcaaatctcagagatgtgtatcttcttgttaaacaatttcaatcttccaccagataaagctttagctgtttatgttcaatctccaggatcagcttttgtgttctgtggtgctgtaactttagctagaccttctgctgttttatcacttcaatggcctgaacctggtagtgcagcgaagatgcaactcacggcgggtgattcgagttccttatcggcgaagatcggtgtttcggtggaggatgtagcagcgttgaggtcgttggatgttgttgcggagaggaggattgagaaattggctatgaaagttggagagaatttgtttaactttatgcagtctttttgtggtgttgatggaagtaaattggttgttcctatggatattttggatcgttggtttaagaagtttcaggagaaagctaaacgtgatcctgatttcctcaaaagctttgctttgtaa

SEQ ID NO: 86433 - protein, 190 aa, Arabidopsis thaliana
  peptide (1)..(190): Ceres Seq. ID no. 12690533
MFGVVFPNRSFPIDISTFTQIDTFHWVLDMNHFVGEAYDQISEMCIFLLNNFNLPPDKALAVYVQSPGSAFVFCGAVTLARPSAVLSLQWPEPGSAAKMQLTAGDSSSLSAKIGVSVEDVAALRSLDVVAERRIEKLAMKVGENLFNFMQSFCGVDGSKLVVPMDILDRWFKKFQEKAKRDPDFLKSFAL

SEQ ID NO: 86434 - protein, 161 aa, Arabidopsis thaliana
  peptide (1)..(161): Ceres Seq. ID no. 12690534
MNHFVGEAYDQISEMCIFLLNNFNLPPDKALAVYVQSPGSAFVFCGAVTLARPSAVLSLQWPEPGSAAKMQLTAGDSSSLSAKIGVSVEDVAALRSLDVVAERRIEKLAMKVGENLFNFMQSFCGVDGSKLVVPMDILDRWFKKFQEKAKRDPDFLKSFAL

SEQ ID NO: 86435 - protein, 147 aa, Arabidopsis thaliana
  peptide (1)..(147): Ceres Seq. ID no. 12690535
MCIFLLNNFNLPPDKALAVYVQSPGSAFVFCGAVTLARPSAVLSLQWPEPGSAAKMQLTAGDSSSLSAKIGVSVEDVAALRSLDVVAERRIEKLAMKVGENLFNFMQSFCGVDGSKLVVPMDILDRWFKKFQEKAKRDPDFLKSFAL

SEQ ID NO: 86436 - DNA, 1283 bp, Arabidopsis thaliana
  misc_feature (1)..(1283): Ceres Seq. ID no. 12690538
  misc_feature (1)..(1283): Ortholog of  Ceres SEQ ID NO 14313471 as cited in SEQ ID NO 64513
  misc_feature (1)..(1283): Ortholog of  Ceres SEQ ID NO 13591377 as cited in SEQ ID NO 66534
atgagtgacactaaaacggtgcgttttggtcttcttggatgtatcagattcgcatcaaagttcgtcagaacagtaacagaatcctcaaacgccgtcattatcgccatcagcgatccatcactcgaaaccgcaaaaaccttcgccaccgggaacaatttatcgccggagaccgtcacgatatacggaagctacgaggagcttttaaacgatgcaaacgtcgacgccgtttacttgacgatgccggtgacgcaacgagcgagatgggctgtgacggcggcagagaagaagaagcatgttcttgttgagaaaccaccagctcaagacgcgacggagctggagaagattgtggaggcgtgtgaatataacggtgttcagtttatggacggtacgatttggttgcatcatcaacggacggttaagattagagatacgatgtttgattctggattgcttggagatgttcgccacatgtatagcacgatgaccactccggtaccggagcaagtattggaaagactgactaaagaagctatgggtttagccggagctatcggagagcttggatggtatcctataggcgcagctttgtgggctatgtcttaccaaatgccgatatcggtcagggctcttccctcctctgtctccacaaactcggttggcactatcttgtcctgcactgcctctcttcagttcggttcaactgcaaccacaaccgcaatcgttcattgctctttcctctctcaactttcaacggacttagctatctcaggctcaaaagggtcgattcaaatgaatgactatgtgataccctacaaggaggacaaagcttggttcgaatacacaagtggtgcgaagtttgtggacatgcacattggttggaatgtgacgccagagagagttacagtggactgtagcggaactccggagacgcaagaggcaatgatgctgagagagttcacgcggcttgtggaaggaatcaagcgtggcgacttagaggctgatcgtaggtggccggatataagtaagaagacgcagttgatcgttgatgctgtaaagaaatctgttgatattggttgtgaagtggttcatctgtgaaacttgttgaaatcttctgctaattagattatgatatttatgttagtgtcattgatacatgctttatggtaactaacttttataagtcgaagatgatatgtacttcatatttttatttggcactccatatgtactcaaaactgagatatgttaggtcagtagaagtaggtggagtttaagtttagttc

SEQ ID NO: 86437 - protein, 364 aa, Arabidopsis thaliana
  peptide (1)..(364): Ceres Seq. ID no. 12690539
MSDTKTVRFGLLGCIRFASKFVRTVTESSNAVIIAISDPSLETAKTFATGNNLSPETVTIYGSYEELLNDANVDAVYLTMPVTQRARWAVTAAEKKKHVLVEKPPAQDATELEKIVEACEYNGVQFMDGTIWLHHQRTVKIRDTMFDSGLLGDVRHMYSTMTTPVPEQVLERLTKEAMGLAGAIGELGWYPIGAALWAMSYQMPISVRALPSSVSTNSVGTILSCTASLQFGSTATTTAIVHCSFLSQLSTDLAISGSKGSIQMNDYVIPYKEDKAWFEYTSGAKFVDMHIGWNVTPERVTVDCSGTPETQEAMMLREFTRLVEGIKRGDLEADRRWPDISKKTQLIVDAVKKSVDIGCEVVHL

SEQ ID NO: 86438 - protein, 285 aa, Arabidopsis thaliana
  peptide (1)..(285): Ceres Seq. ID no. 12690540
MPVTQRARWAVTAAEKKKHVLVEKPPAQDATELEKIVEACEYNGVQFMDGTIWLHHQRTVKIRDTMFDSGLLGDVRHMYSTMTTPVPEQVLERLTKEAMGLAGAIGELGWYPIGAALWAMSYQMPISVRALPSSVSTNSVGTILSCTASLQFGSTATTTAIVHCSFLSQLSTDLAISGSKGSIQMNDYVIPYKEDKAWFEYTSGAKFVDMHIGWNVTPERVTVDCSGTPETQEAMMLREFTRLVEGIKRGDLEADRRWPDISKKTQLIVDAVKKSVDIGCEVVHL

SEQ ID NO: 86439 - protein, 238 aa, Arabidopsis thaliana
  peptide (1)..(238): Ceres Seq. ID no. 12690541
MDGTIWLHHQRTVKIRDTMFDSGLLGDVRHMYSTMTTPVPEQVLERLTKEAMGLAGAIGELGWYPIGAALWAMSYQMPISVRALPSSVSTNSVGTILSCTASLQFGSTATTTAIVHCSFLSQLSTDLAISGSKGSIQMNDYVIPYKEDKAWFEYTSGAKFVDMHIGWNVTPERVTVDCSGTPETQEAMMLREFTRLVEGIKRGDLEADRRWPDISKKTQLIVDAVKKSVDIGCEVVHL

SEQ ID NO: 86440 - DNA, 1427 bp, Arabidopsis thaliana
  misc_feature (1)..(1427): Ceres Seq. ID no. 12690553
  misc_feature (1)..(1427): Ortholog of  Ceres SEQ ID NO 14310524 as cited in SEQ ID NO 58840
  misc_feature (1)..(1427): Ortholog of  Ceres SEQ ID NO 15169541 as cited in SEQ ID NO 67500
atcatctcattaacaaaaataaaacacacaatctcaagattttctacttcttattacaaagattcaatcttcttgtttcttcttgcaaccatgagtcttcttgcagatcttgttaaccttgacatctcagacaacagtgaaaagatcatcgctgaatacatatgggttggtggttctggtatggacatgagaagcaaagccaggactctccctggacctgtgaccgatccatcaaaacttccaaagtggaactatgatggttcaagcactggtcaagctcctggtcaagacagtgaagtgatcttataccctcaagcaattttcaaagatccattccgtagaggcaacaacatccttgttatgtgtgatgcttacactccagcgggagagccaatccctactaacaagcgacatgctgcggctgagatctttgctaaccctgatgttattgctgaagtgccatggtatggaatcgaacaagaatacactttgttgcagaaggatgtgaactggcctcttggatggcccattggtggcttccctggccctcagggaccatactactgcagtattggagctgacaaatcttttggaagagacattgttgatgctcactacaaagcctctttgtatgctggaatcaacatcagtgggatcaatggagaagtcatgccgggacaatgggagttccaagtcggcccatcggtcggtatctcagctgctgatgaaatatggatcgctcgttacattttggagaggatcacagagattgctggtgtggttgtatcttttgacccaaaacctattcctggtgactggaatggagctggtgctcacaccaattacagtactaaatcaatgagggaagaaggaggatacgagataatcaagaaggcgatcgagaagcttggcttgagacacaaggaacacatttccgcttacggtgaaggaaacgagcgtcgtctcacgggacaccatgaaactgctgacatcaacactttcctttggggtgttgcgaaccgtggtgcatcgatccgagtaggacgtgacaccgagaaagaagggaagggatactttgaggataggaggccagcttcaaacatggacccttacgttgttacttccatgattgcagagactacactcctctggaacccttgaaaggatgatccgtaactcttgaagttgcttctgattgggttttttggaagttccaagcttgtcttttctctacagtgtgtattaagcaattgtaccggttgacactgccggagtttgtgatttggggcctttctttctttttcttctttttataatcttttgggttctgtggttagagcaaattcggtttgctctgtttgtttgacctttattgaaacctttggtattggtactaataatacaatctgaaaaggcctcttcatgtt

SEQ ID NO: 86441 - protein, 386 aa, Arabidopsis thaliana; identical to SEQ ID NO: 26399
  peptide (1)..(386): Ceres Seq. ID no. 12690554

SEQ ID NO: 86442 - protein, 356 aa, Arabidopsis thaliana; identical to SEQ ID NO: 26400
  peptide (1)..(356): Ceres Seq. ID no. 12690555

SEQ ID NO: 86443 - protein, 326 aa, Arabidopsis thaliana; identical to SEQ ID NO: 26401
  peptide (1)..(326): Ceres Seq. ID no. 12690556

SEQ ID NO: 86444 - DNA, 1575 bp, Arabidopsis thaliana
  misc_feature (1)..(1575): Ceres Seq. ID no. 12690569
  misc_feature (1)..(1575): Ortholog of  Ceres SEQ ID NO 13600220 as cited in SEQ ID NO 0
atggcattgcaaaagtttcctctcatggggctgcttttgctcctaaccatcctcgtctctgtgacaacagcggttgatgatcctgtttgcccggcgacttccaagctaagccgagcaagtttccctaatgggtttttgtttggcacggctactgctgcgtttcaggtcgaaggtgcaattaatgaaacttgtcgtggaccggctctatgggatatctactgtagaagaaatccagagagatgtagtggcgaccacgccgatgtggccgttgatttcttccatcgttataaggaagatattcagctaatgaagaatctaaacacagatgcattcagactctcaatcgcatggtcaagaatatttcctcatgggagaaaggagaagggagtgagtcaagctggtgtgcaattctaccacgagctcatcgatgaactccttaaaaatggtatagttccgtttgtgactgttttccattgggacactccacaagatttggaagacgaatatggcggtttcttaagccaaaacattgtgaaagattttcgagaatatgcagattatgttttcactgaatacggtggaaaagtgaaaaactggatcactttcaacgagccatgggtctttgctcacgcaggttacgacttaggaaagaaagcaccaggacgttgttctcgctacgttccaggttgcgaagaccgagagggacaatctggtaaagaggcttatctagtcagtcacaatctcctcaacgctcacgcagaagctgttgaagttttccgccaaaaggttaaaggtgggaaaatcggaatcgcacatagtccggcttggttcgaaccacatgatcttaaagattcaaatgacgctccaactgttagccgtgtacttgactttatgttgggatggcatctggagccaactacttcgggagattatccacaaatcatgaaagaccttcttggttacagattgcctcaatttactgctgcacaaaaagcaaaattgaaagattcgaccgatttcgtagggcttaactactatacttcgacattttcaaattataatgagaagccagatccgtctaaaccaagttggaagcaagattctcttgtttcctgggaacctaagaatgtagatcacagcgccattggtagcatgcctcttactgctgcattgcccgtctacgctaaaggatttagaaagcttttaaagtacatcaaggacaaatacgcaaacccggagattatgataatggaaaatggatatggagataaacttgggaccacagattcggttgacgttggtactgctgatcataacaggaaatattatcttcagaggcatcttctggctatgaacgaggctatttgcatcgataaggtgagagttacgggatactttgtatggtcattgttggataacttcgaatggcaagatggttacaaaaacagattcggactctattacgtcgatttcaaaaataacctcacacgttatgagaaagaatcagccaagtattacaaagatttcctcgctcaaggtgttcgtccatccgcactcaagagggatgagctttaa

SEQ ID NO: 86445 - protein, 524 aa, Arabidopsis thaliana; identical to SEQ ID NO: 77129
  peptide (1)..(524): Ceres Seq. ID no. 12690570

SEQ ID NO: 86446 - protein, 516 aa, Arabidopsis thaliana; identical to SEQ ID NO: 77130
  peptide (1)..(516): Ceres Seq. ID no. 12690571

SEQ ID NO: 86447 - protein, 422 aa, Arabidopsis thaliana
  peptide (1)..(422): Ceres Seq. ID no. 12690572
MKNLNTDAFRLSIAWSRIFPHGRKEKGVSQAGVQFYHELIDELLKNGIVPFVTVFHWDTPQDLEDEYGGFLSQNIVKDFREYADYVFTEYGGKVKNWITFNEPWVFAHAGYDLGKKAPGRCSRYVPGCEDREGQSGKEAYLVSHNLLNAHAEAVEVFRQKVKGGKIGIAHSPAWFEPHDLKDSNDAPTVSRVLDFMLGWHLEPTTSGDYPQIMKDLLGYRLPQFTAAQKAKLKDSTDFVGLNYYTSTFSNYNEKPDPSKPSWKQDSLVSWEPKNVDHSAIGSMPLTAALPVYAKGFRKLLKYIKDKYANPEIMIMENGYGDKLGTTDSVDVGTADHNRKYYLQRHLLAMNEAICIDKVRVTGYFVWSLLDNFEWQDGYKNRFGLYYVDFKNNLTRYEKESAKYYKDFLAQGVRPSALKRDEL

SEQ ID NO: 86448 - DNA, 4263 bp, Arabidopsis thaliana
  misc_feature (1)..(4263): Ceres Seq. ID no. 12690617
  misc_feature (1)..(4263): Ortholog of  Ceres SEQ ID NO 13623497 as cited in SEQ ID NO 0
atggcctctgattccgccggagccacaatctccggcaacttctcaaactccgacaactcagaaaccctaaatctcaacactacgaaactctactcatcagcaatttcctctatctctccacaattcccctcaccgaaaccaacatcttcatgtccttcaatccctaattcaaaacgaatccctaatactaacttcatcgtcgatctcttccgcctcccacaccaatcatcctccgtcgctttcttcctctcacatttccactccgatcactactccggtctctcctcttcctggtccaaaggaataatctactgctcacacaaaaccgctcgtctcgttgcagaaatccttcaagttccttcacaattcgttttcgctttacctatgaaccaaatggttaagatcgatggctctgaagttgtgttgattgaagctaatcattgtccaggagcggtacagtttttgtttaaagtcaaattagagagcagtggatttgaaaagtatgttcatactggagattttagattctgtgatgagatgagatttgatccgtttcttaatggttttgttggttgtgatggtgtttttctcgatactacttattgtaatcctaagtttgtttttccgagtcaagaagagtctgttggttatgttgttagtgtgatagataagattagtgaggagaaggttttgtttcttgtagctacttatgttgttggtaaagagaagattttggttgagattgctaggagatatgagaatgagagtgatgttcatgttgtggggtggaatgtgttgggtgagacttggccgtattttaggccgaattttgtgaagatgaatgagattatggttgagaaagggtatgataaggttgtaggttttgtgcctacagggtggacttatgaagtgaagcggaataagtttgcggttaggtttaaagattcgatggagattcatcttgtaccgtatagtgagcattcgaattatgatgaacttagagagtttataaagttcctgaaacctaaaagagttattcctactgttggagttgatattgagaagtttgattgcaaggaggttaataagatgcagaagcatttctctggattggttgatgagatggcaaacaagaaagattttttattgggtttctatcgtcagtcttaccagaagaatgagaaaagtgatgtagatgttgtgtcacacagtgctgaggtttacgaagaggaagagaaaaatgcatgtgaagacggtggagagaatgttccatcatctagaggacccatattgcatgatacaactccaagtagtgattcaagattgctgataaaactacgtgattctttgcctgcttgggtcactgaagagcagatgttagatctgattaagaagcatgctggtaatcccgtggatatagtaagtaacttttatgaatatgaagcagagctttacaagcaagcctctcttcccacgccttccttgaataatcaggctgttttgtttgatgacgatgtaaccgacctccaacctaatcctgtgaaaggcatttgtccagatgttcaagcaattcaaaaaggttttgacttaccaagaaaaatgaatttaacaaagggtactatttctcctgggaagagaggcaaaagctcgggcagtaagtcaaacaagaaggccaagaaagatccaaaatcaaaaccagttggtccagggcagccaacactttttaagtttttcaataaggtcttagatggtggatctaattctgttagtgttggttcagagactgaagaatgcaatacagataaaaagatggtccacattgatgcttcagaagcatacaaagaagtgacagatcaatttattgatattgttaacggttctgaatctttaagagattatgctgcttccatcattgatgaggctaaaggagatataagtagggcactgaacatctattatagcaaaccccgtgaaatacctggtgaccatgcaggtgagagaggactctctagcaaaacaattcagtatccgaaatgttcagaagcatgctcctctcaggaggacaaaaaggcttcagaaaattcaggacatgcagtcaacatatgcgtgcagacatcagcagaggaaagtgtagacaagaattatgtatctctacctcctgaaaaatatcaacctaaagagcacgcttgttggagggagggacagcctgctccatatatccaccttgtccgaacatttgcttctgttgaaagtgaaaagggaaagatcaaagctatgtctatgctttgcaacatgtttagaagcttgtttgctctctctccagaagatgttctgcccgctgtttatctttgcacaaataagattgccgctgaccatgagaatattgagcttaacattggtggaagtctaatctcttctgcattggaagaagcatgtggaataagtcggtctactgtgagagatatgtataatagcttgggggatcttggggatgttgctcagctatgtcgacaaacgcaaaagctactggttcctccacctccacttctagttagagatgtgttttcaactctacgaaagataagaaagctcctaacagtttttctcagtgtgcagacaggtactggaagtactaggctaaagaaaaatctcatcgtgaagctaatgcgctcttgtagagagaaagagatcaaatttcttgttagaacattgttccgtgttgtaagcagtgatgtccctgttcaggcccgtaatttaaggattggcgctatgttgagaactgttctacctgcacttgggcgagcaatcgttatgaattctttctggaatgaccataataaagaactatcagaaagctgtttcagggagaaacttgagggtgtttctgctgcagtagttgaggcttacaacattcttccatctctggacgtggttgttccttctctcatggacaaagacattgagttttcaacgtcaactctgtcaatggtcccagggatacctataaaacccatgcttgcaaaaattgctaagggggttcaagaattttttaacctctcccaagaaaaggcctttacttgtgaatacaaatatgatggccagcgcgcccagatccataagttacttgatggtactgtgtgtatcttttctcggaatggggacgaaacaacgtccagatttccggatctggttgatgtcataaaacagttttcttgccctgccgctgagacattcatgttggacgcagaggtggttgccactgatagaataaatggaaacaaactcatgtcattccaagagttatcaacaagagagagagggagcaaagatgctttgataactacagaaagtattaaggttgaagtctgcgtcttcgtgtttgatattatgtttgtcaatggagaacagctgttggctcttcccctccgtgagagacgaagacgtctaaaggaggtcttccctgagactaggccaggttatcttgagtatgctaaggaaataactgtgggagcagaagaagcgtctctgaataatcatgacacattgagtaggataaatgcttttcttgaagaagcatttcagtcatcttgtgaaggaatcatggtcaagtctttagatgtaaatgctggatactgccccacaaagcgctctgattcatggctcaaggttaagcgagattatgtagatggattgggcgatacattggatttagttcctattggtgcttggtatggcaatgggagaaaagcaggatggtatagtccattccttatggcctgcttcaaccctgagactgaagaattccagagtgtctgccgtgtcatgtctggtttttctgatgccttttacatcgaggtaatgaaaagctcaactctaacgttgttgtttaatgatgaaacagatggggtagtaaatacgttgggtttggtctatacttggactcctaattgtcacatgaaagaattctactcggaggataagatccttgcgaaaaagccgccttactacagaacaggggagacacctgacatgtggttttccgcagaggtagtttgggaaatcagaggtgctgatttcacagtctcgcctgttcacagtgccagtttaggtctcgtccatccatcgcgaggcatctctgttaggtttccgagatttatcagtaaagtgacagatagaaatcctgaagaatgtagtacggctacagatatcgcagagatgtttcatgctcaaaccagaaaaatgaacatcacttctcaacattaa

SEQ ID NO: 86449 - protein, 1420 aa, Arabidopsis thaliana
  peptide (1)..(1420): Ceres Seq. ID no. 12690618
MASDSAGATISGNFSNSDNSETLNLNTTKLYSSAISSISPQFPSPKPTSSCPSIPNSKRIPNTNFIVDLFRLPHQSSSVAFFLSHFHSDHYSGLSSSWSKGIIYCSHKTARLVAEILQVPSQFVFALPMNQMVKIDGSEVVLIEANHCPGAVQFLFKVKLESSGFEKYVHTGDFRFCDEMRFDPFLNGFVGCDGVFLDTTYCNPKFVFPSQEESVGYVVSVIDKISEEKVLFLVATYVVGKEKILVEIARRYENESDVHVVGWNVLGETWPYFRPNFVKMNEIMVEKGYDKVVGFVPTGWTYEVKRNKFAVRFKDSMEIHLVPYSEHSNYDELREFIKFLKPKRVIPTVGVDIEKFDCKEVNKMQKHFSGLVDEMANKKDFLLGFYRQSYQKNEKSDVDVVSHSAEVYEEEEKNACEDGGENVPSSRGPILHDTTPSSDSRLLIKLRDSLPAWVTEEQMLDLIKKHAGNPVDIVSNFYEYEAELYKQASLPTPSLNNQAVLFDDDVTDLQPNPVKGICPDVQAIQKGFDLPRKMNLTKGTISPGKRGKSSGSKSNKKAKKDPKSKPVGPGQPTLFKFFNKVLDGGSNSVSVGSETEECNTDKKMVHIDASEAYKEVTDQFIDIVNGSESLRDYAASIIDEAKGDISRALNIYYSKPREIPGDHAGERGLSSKTIQYPKCSEACSSQEDKKASENSGHAVNICVQTSAEESVDKNYVSLPPEKYQPKEHACWREGQPAPYIHLVRTFASVESEKGKIKAMSMLCNMFRSLFALSPEDVLPAVYLCTNKIAADHENIELNIGGSLISSALEEACGISRSTVRDMYNSLGDLGDVAQLCRQTQKLLVPPPPLLVRDVFSTLRKIRKLLTVFLSVQTGTGSTRLKKNLIVKLMRSCREKEIKFLVRTLFRVVSSDVPVQARNLRIGAMLRTVLPALGRAIVMNSFWNDHNKELSESCFREKLEGVSAAVVEAYNILPSLDVVVPSLMDKDIEFSTSTLSMVPGIPIKPMLAKIAKGVQEFFNLSQEKAFTCEYKYDGQRAQIHKLLDGTVCIFSRNGDETTSRFPDLVDVIKQFSCPAAETFMLDAEVVATDRINGNKLMSFQELSTRERGSKDALITTESIKVEVCVFVFDIMFVNGEQLLALPLRERRRRLKEVFPETRPGYLEYAKEITVGAEEASLNNHDTLSRINAFLEEAFQSSCEGIMVKSLDVNAGYCPTKRSDSWLKVKRDYVDGLGDTLDLVPIGAWYGNGRKAGWYSPFLMACFNPETEEFQSVCRVMSGFSDAFYIEVMKSSTLTLLFNDETDGVVNTLGLVYTWTPNCHMKEFYSEDKILAKKPPYYRTGETPDMWFSAEVVWEIRGADFTVSPVHSASLGLVHPSRGISVRFPRFISKVTDRNPEECSTATDIAEMFHAQTRKMNITSQH

SEQ ID NO: 86450 - protein, 1292 aa, Arabidopsis thaliana
  peptide (1)..(1292): Ceres Seq. ID no. 12690619
MNQMVKIDGSEVVLIEANHCPGAVQFLFKVKLESSGFEKYVHTGDFRFCDEMRFDPFLNGFVGCDGVFLDTTYCNPKFVFPSQEESVGYVVSVIDKISEEKVLFLVATYVVGKEKILVEIARRYENESDVHVVGWNVLGETWPYFRPNFVKMNEIMVEKGYDKVVGFVPTGWTYEVKRNKFAVRFKDSMEIHLVPYSEHSNYDELREFIKFLKPKRVIPTVGVDIEKFDCKEVNKMQKHFSGLVDEMANKKDFLLGFYRQSYQKNEKSDVDVVSHSAEVYEEEEKNACEDGGENVPSSRGPILHDTTPSSDSRLLIKLRDSLPAWVTEEQMLDLIKKHAGNPVDIVSNFYEYEAELYKQASLPTPSLNNQAVLFDDDVTDLQPNPVKGICPDVQAIQKGFDLPRKMNLTKGTISPGKRGKSSGSKSNKKAKKDPKSKPVGPGQPTLFKFFNKVLDGGSNSVSVGSETEECNTDKKMVHIDASEAYKEVTDQFIDIVNGSESLRDYAASIIDEAKGDISRALNIYYSKPREIPGDHAGERGLSSKTIQYPKCSEACSSQEDKKASENSGHAVNICVQTSAEESVDKNYVSLPPEKYQPKEHACWREGQPAPYIHLVRTFASVESEKGKIKAMSMLCNMFRSLFALSPEDVLPAVYLCTNKIAADHENIELNIGGSLISSALEEACGISRSTVRDMYNSLGDLGDVAQLCRQTQKLLVPPPPLLVRDVFSTLRKIRKLLTVFLSVQTGTGSTRLKKNLIVKLMRSCREKEIKFLVRTLFRVVSSDVPVQARNLRIGAMLRTVLPALGRAIVMNSFWNDHNKELSESCFREKLEGVSAAVVEAYNILPSLDVVVPSLMDKDIEFSTSTLSMVPGIPIKPMLAKIAKGVQEFFNLSQEKAFTCEYKYDGQRAQIHKLLDGTVCIFSRNGDETTSRFPDLVDVIKQFSCPAAETFMLDAEVVATDRINGNKLMSFQELSTRERGSKDALITTESIKVEVCVFVFDIMFVNGEQLLALPLRERRRRLKEVFPETRPGYLEYAKEITVGAEEASLNNHDTLSRINAFLEEAFQSSCEGIMVKSLDVNAGYCPTKRSDSWLKVKRDYVDGLGDTLDLVPIGAWYGNGRKAGWYSPFLMACFNPETEEFQSVCRVMSGFSDAFYIEVMKSSTLTLLFNDETDGVVNTLGLVYTWTPNCHMKEFYSEDKILAKKPPYYRTGETPDMWFSAEVVWEIRGADFTVSPVHSASLGLVHPSRGISVRFPRFISKVTDRNPEECSTATDIAEMFHAQTRKMNITSQH

SEQ ID NO: 86451 - protein, 1289 aa, Arabidopsis thaliana
  peptide (1)..(1289): Ceres Seq. ID no. 12690620
MVKIDGSEVVLIEANHCPGAVQFLFKVKLESSGFEKYVHTGDFRFCDEMRFDPFLNGFVGCDGVFLDTTYCNPKFVFPSQEESVGYVVSVIDKISEEKVLFLVATYVVGKEKILVEIARRYENESDVHVVGWNVLGETWPYFRPNFVKMNEIMVEKGYDKVVGFVPTGWTYEVKRNKFAVRFKDSMEIHLVPYSEHSNYDELREFIKFLKPKRVIPTVGVDIEKFDCKEVNKMQKHFSGLVDEMANKKDFLLGFYRQSYQKNEKSDVDVVSHSAEVYEEEEKNACEDGGENVPSSRGPILHDTTPSSDSRLLIKLRDSLPAWVTEEQMLDLIKKHAGNPVDIVSNFYEYEAELYKQASLPTPSLNNQAVLFDDDVTDLQPNPVKGICPDVQAIQKGFDLPRKMNLTKGTISPGKRGKSSGSKSNKKAKKDPKSKPVGPGQPTLFKFFNKVLDGGSNSVSVGSETEECNTDKKMVHIDASEAYKEVTDQFIDIVNGSESLRDYAASIIDEAKGDISRALNIYYSKPREIPGDHAGERGLSSKTIQYPKCSEACSSQEDKKASENSGHAVNICVQTSAEESVDKNYVSLPPEKYQPKEHACWREGQPAPYIHLVRTFASVESEKGKIKAMSMLCNMFRSLFALSPEDVLPAVYLCTNKIAADHENIELNIGGSLISSALEEACGISRSTVRDMYNSLGDLGDVAQLCRQTQKLLVPPPPLLVRDVFSTLRKIRKLLTVFLSVQTGTGSTRLKKNLIVKLMRSCREKEIKFLVRTLFRVVSSDVPVQARNLRIGAMLRTVLPALGRAIVMNSFWNDHNKELSESCFREKLEGVSAAVVEAYNILPSLDVVVPSLMDKDIEFSTSTLSMVPGIPIKPMLAKIAKGVQEFFNLSQEKAFTCEYKYDGQRAQIHKLLDGTVCIFSRNGDETTSRFPDLVDVIKQFSCPAAETFMLDAEVVATDRINGNKLMSFQELSTRERGSKDALITTESIKVEVCVFVFDIMFVNGEQLLALPLRERRRRLKEVFPETRPGYLEYAKEITVGAEEASLNNHDTLSRINAFLEEAFQSSCEGIMVKSLDVNAGYCPTKRSDSWLKVKRDYVDGLGDTLDLVPIGAWYGNGRKAGWYSPFLMACFNPETEEFQSVCRVMSGFSDAFYIEVMKSSTLTLLFNDETDGVVNTLGLVYTWTPNCHMKEFYSEDKILAKKPPYYRTGETPDMWFSAEVVWEIRGADFTVSPVHSASLGLVHPSRGISVRFPRFISKVTDRNPEECSTATDIAEMFHAQTRKMNITSQH

SEQ ID NO: 86452 - DNA, 2088 bp, Arabidopsis thaliana
  misc_feature (1)..(2088): Ceres Seq. ID no. 12690658
  misc_feature (1)..(2088): Ortholog of  Ceres SEQ ID NO 14306268 as cited in SEQ ID NO 51135
  misc_feature (1)..(2088): Ortholog of  Ceres SEQ ID NO 15225368 as cited in SEQ ID NO 58345
  misc_feature (1)..(2088): Ortholog of  Ceres SEQ ID NO 13584744 as cited in SEQ ID NO 69137
atgatcaatttgtctctttccctgaccaaatacatgtcctatagcttcatatggatgctctttgtgatccatatatcttgtgttttatcagctactgagcttgagcttcacagacgctgcaatggcacgtttagctgcggcgatcagagagaactcttttaccctttctggacatctggtagagaagactgtggccaccctgacttcaagctcgacgactgtagcggaagattcgcagagcttagcatttcctctgtgaaatttagaattctagcgtcggtttatggctctaatatcataagactcggcagatccgaatatataggcgatctctgtccccaagatcctataaatgcaccattcagcgaaagtgtccttccatttgctcctaacaccgagctgctgactattttttacaactgcagccgagactttccacagcaagttactaattttggagactttgcttgtggggatgatagtgatgatgatagaagttactatgtgacgagaaacctctcgtttcctccactcagtgagattaatgaccttttatacgacttcagtcaatcttgcgatagaaacgtcagtattcccgcatctggatcgacgcttaacatactgcagagcactccgagtaacgataatctaaagaaggctctcgaatacggtttcgagcttgaacttaaccaagattgtcggacgtgcatagactctaagggtgcttgtggatatagtcaaacctcaagtagattcgtctgctattctatagaagagccacaaacccctactccaccaaaccctactagaaacaagggcattgcggttgcttctgtatcgggtttggccattcttctactcgcaggtttgttcttatgcatcagacggagaaggaagactcaggacgctcaatacacaagcaaaagcttgcctatcacatcatactcgagtagagatacatcaagaaatccaacttccacaacaatctcctccagtagcaatcactctcttcttccctcaatctctaaccttgcaaaccgaagcgactactgtggagtccaagtctttagctatgaagaacttgaagaagcaactgagaatttctctagagaactcggggatggtggcttcggtactgtctactacggcgtgttgaaagacggacgagctgtagcagtgaaacgactctacgaaagatcactaaaacgcgtagaacaattcaagaacgaaatcgaaatcttgaaatcactaaaacatccgaacctcgtgatcctctacggatgcacatcaagacacagcagagagcttctactagtctacgaatacatctcaaacggaactctagccgaacatctacacggcaaccgcgcagaagctcgtcctctctgctggtcaacccgattaaacatcgcaatcgaaaccgcaagcgcattatcattcctccacataaaaggaatcatacacagagacatcaagactactaacatactcttagacgataactaccaagtcaaagtcgccgatttcggactttcacggttgtttccaatggatcaaacacacatatcaaccgcaccacaaggcacaccaggctacgtggatccagagtattaccaatgttaccaattaaacgagaagagcgatgtctacagcttcggagtcgtactaacggaactaatctcatcaaaagaagcagtagacattactcgacaccgtcacgatatcaatctagcgaacatggctgtatctaagattcagaacaatgcattacacgagcttgtggattcgagtttaggatacgataatgatcctgaagttaggaggaagatgatggcggtggcggaattagcgtttcgatgtttgcaacaagagagagatgttagaccggcgatggatgagattgtggagattttgagagggattaaggatgatgagaagaagcgtgtgttggtgaagtcgccggatgttgtggatattgaatgcggtggtggtgatgatgttggattgttgaggaatagtgttccgccgccgatttcgccggagactgataagtggactagtagttctgatacggcggcgagtttgtaa

SEQ ID NO: 86453 - protein, 695 aa, Arabidopsis thaliana
  peptide (1)..(695): Ceres Seq. ID no. 12690659
MINLSLSLTKYMSYSFIWMLFVIHISCVLSATELELHRRCNGTFSCGDQRELFYPFWTSGREDCGHPDFKLDDCSGRFAELSISSVKFRILASVYGSNIIRLGRSEYIGDLCPQDPINAPFSESVLPFAPNTELLTIFYNCSRDFPQQVTNFGDFACGDDSDDDRSYYVTRNLSFPPLSEINDLLYDFSQSCDRNVSIPASGSTLNILQSTPSNDNLKKALEYGFELELNQDCRTCIDSKGACGYSQTSSRFVCYSIEEPQTPTPPNPTRNKGIAVASVSGLAILLLAGLFLCIRRRRKTQDAQYTSKSLPITSYSSRDTSRNPTSTTISSSSNHSLLPSISNLANRSDYCGVQVFSYEELEEATENFSRELGDGGFGTVYYGVLKDGRAVAVKRLYERSLKRVEQFKNEIEILKSLKHPNLVILYGCTSRHSRELLLVYEYISNGTLAEHLHGNRAEARPLCWSTRLNIAIETASALSFLHIKGIIHRDIKTTNILLDDNYQVKVADFGLSRLFPMDQTHISTAPQGTPGYVDPEYYQCYQLNEKSDVYSFGVVLTELISSKEAVDITRHRHDINLANMAVSKIQNNALHELVDSSLGYDNDPEVRRKMMAVAELAFRCLQQERDVRPAMDEIVEILRGIKDDEKKRVLVKSPDVVDIECGGGDDVGLLRNSVPPPISPETDKWTSSSDTAASL

SEQ ID NO: 86454 - protein, 684 aa, Arabidopsis thaliana
  peptide (1)..(684): Ceres Seq. ID no. 12690660
MSYSFIWMLFVIHISCVLSATELELHRRCNGTFSCGDQRELFYPFWTSGREDCGHPDFKLDDCSGRFAELSISSVKFRILASVYGSNIIRLGRSEYIGDLCPQDPINAPFSESVLPFAPNTELLTIFYNCSRDFPQQVTNFGDFACGDDSDDDRSYYVTRNLSFPPLSEINDLLYDFSQSCDRNVSIPASGSTLNILQSTPSNDNLKKALEYGFELELNQDCRTCIDSKGACGYSQTSSRFVCYSIEEPQTPTPPNPTRNKGIAVASVSGLAILLLAGLFLCIRRRRKTQDAQYTSKSLPITSYSSRDTSRNPTSTTISSSSNHSLLPSISNLANRSDYCGVQVFSYEELEEATENFSRELGDGGFGTVYYGVLKDGRAVAVKRLYERSLKRVEQFKNEIEILKSLKHPNLVILYGCTSRHSRELLLVYEYISNGTLAEHLHGNRAEARPLCWSTRLNIAIETASALSFLHIKGIIHRDIKTTNILLDDNYQVKVADFGLSRLFPMDQTHISTAPQGTPGYVDPEYYQCYQLNEKSDVYSFGVVLTELISSKEAVDITRHRHDINLANMAVSKIQNNALHELVDSSLGYDNDPEVRRKMMAVAELAFRCLQQERDVRPAMDEIVEILRGIKDDEKKRVLVKSPDVVDIECGGGDDVGLLRNSVPPPISPETDKWTSSSDTAASL

SEQ ID NO: 86455 - protein, 677 aa, Arabidopsis thaliana
  peptide (1)..(677): Ceres Seq. ID no. 12690661
MLFVIHISCVLSATELELHRRCNGTFSCGDQRELFYPFWTSGREDCGHPDFKLDDCSGRFAELSISSVKFRILASVYGSNIIRLGRSEYIGDLCPQDPINAPFSESVLPFAPNTELLTIFYNCSRDFPQQVTNFGDFACGDDSDDDRSYYVTRNLSFPPLSEINDLLYDFSQSCDRNVSIPASGSTLNILQSTPSNDNLKKALEYGFELELNQDCRTCIDSKGACGYSQTSSRFVCYSIEEPQTPTPPNPTRNKGIAVASVSGLAILLLAGLFLCIRRRRKTQDAQYTSKSLPITSYSSRDTSRNPTSTTISSSSNHSLLPSISNLANRSDYCGVQVFSYEELEEATENFSRELGDGGFGTVYYGVLKDGRAVAVKRLYERSLKRVEQFKNEIEILKSLKHPNLVILYGCTSRHSRELLLVYEYISNGTLAEHLHGNRAEARPLCWSTRLNIAIETASALSFLHIKGIIHRDIKTTNILLDDNYQVKVADFGLSRLFPMDQTHISTAPQGTPGYVDPEYYQCYQLNEKSDVYSFGVVLTELISSKEAVDITRHRHDINLANMAVSKIQNNALHELVDSSLGYDNDPEVRRKMMAVAELAFRCLQQERDVRPAMDEIVEILRGIKDDEKKRVLVKSPDVVDIECGGGDDVGLLRNSVPPPISPETDKWTSSSDTAASL

SEQ ID NO: 86456 - DNA, 3357 bp, Arabidopsis thaliana
  misc_feature (1)..(3357): Ceres Seq. ID no. 12690677
  misc_feature (1)..(3357): Ortholog of  Ceres SEQ ID NO 15176941 as cited in SEQ ID NO 55559
atgaattcccagcaaagtactcggacaaagcaaatgttacaacaatcttcgacgcatttactctgcggtgttgttctgttacagctgtttgctgctcaagtcgatgctcaaagatctacaagtccatggcagacgctcagtggtgatgctccacttgtgattgctcgtggtggattttctggactttttccagattcgagtttagctgcataccaatttgcaatggtggtaagtgtagccgatgttgttctatggtgtgatgttcagctaaccaaagatgggcatgggatttgcttccctgatttaaatctggccaatgcctcaaatagtgaagaagtttacccaaatcgtcaaaaatcttaccctgttaatggagtcactactaagggttggttccccattgatttctccttgacagagctgcagaaagttttgttttctttgatccgaggaatattatcacgatcaggaaaatttgatgaaaatggatactcgatttcaacggttcaaaatgtagccacgcagatgaaaccagcattattctggttaaatgttcagcatgatgagttctatgagcagcataatcttagcatgagtagttttcttttatcaacttcaagaactgtttccattgacttcatctcttcccctgaagtaaatttctttaggaaaattgctggcggtttcgggaataatggaccgagttttgtgttccagtttatggggaaagaagatttcgagccgacaacaaatcgaacatacggttctatcttgagtaacctaagttttgtcaagacgtttgcttcagggattcttgtacccaaatcttacatattgcccctcgatgacaagcagtacttgcttcctcatacatccttagttcaagatgctcacaaagcagggctaaaactatatgcgtcaggttttgcaaatgatgttgatattgcatataactacagttgggatccagtttctgaatatctatcttttgttgacaatggcaatttttctgttgatggtatgctctctgattttcctttaactgcatctgcatctgttgactgcttctcccacattggcagaaacgctacaaaacaagtggattttcttgttatatcaaaaaatggtgcaagtggggagtatcctggatgtacaaaattggcatatgagaaggcaatcaaagatggttctgatgttattgattgcccagttcaaatgtctagcgacggtattcccttttgctcaagttcgatagatctcgtgaacagcacaacggtcggccaaactcatctcagaaaccgttccataatcgttcctgagattagctcagttgctggaatatttacttttagtctcacatggcatgagatccagagtttgactcctgcgatttcaaacccttttagggagaacggtatgtcgaggaatccgaatgagagaaattctgggaaccttatttcactctatgaattcctaaacttggcaaaaaactccacttctctatccggtattttgatcagtctagagaatgtagtatacctaagagagaagaaaggactcgacgtagttaaagtagttcttaatagactcacggaaactggttacatcgttggaacattaaaggtcatgattcagtctacgaccagattggttctagttgacttcaagaatcagagcacgtacaagactgtctacaaaattaaagaaaccattggtaatattactgactcggccatcgaagacataaagaaattcgctaacgctgttgtaatcaacaaagcttctgtttttcctaactctgattcgtttctcactggacaaacaacaaatgttttggagaggttgcagaagtttcagctcccggtttatgtggaactatttcagaatgagtttgtctctcaaccatttgacttcttcgcagatgaaactgttgagataaatgcatatatctttggagccggtatcaatggaaccatcacagagttcccttatacagctgcaagatataaaaggaatcgatgtttgggaagagaagaagtaccaccttacatgttacctgttaaccccggtggcgtcttaacgctcataagtacttcatccttacctccagcccaagatccaaacccgattttcacacacgatgatgtcactgagccaccactacctccagttatagcaaaatccccaacctcaactcttggaacaccatcaaccattgcaaaacctctaagaaattttctcaaagtaattcgcatagtttcatggtcagtagccggagttgtattgttcctggtcttattaacattagttttctgttttcaccgaaagagagaaacacggctgagacaacagaagctgaaggctcttattccactcgaacactatacttatgcacaagtgaagagaattacaaagtcatttgcggaagttgttgggagaggaggatttggaattgtttataaaggaacacttagtgatggccgggtggttgcggtgaaggtcttgaaagacacaaaaggtaatggtgaagacttcatcaatgaagttgcgaccatgagcagaacttctcatctcaacattgtttccttgcttggtttctgctctgaaggttccaaaagggcaattatatatgagtttttggaaaatgggtcacttgataagtttatattaggcaagacctccgtgaatatggattggacggcactatatagaattgctttaggagttgctcatggtttagagtacctgcaccatagctgcaaaacaaggatagtacatttcgacattaaaccacaaaatgtactcttggatgacagtttttgtcccaaagtttcggactttggcctcgctaaactctgtgagaagaaagagagcatcttgtctatgctggacacaagaggtaccatagggtacattgcaccagagatgatctcgagagtttatgggaatgtgtcacacaagtcagatgtgtatagctatggaatgttagtccttgagataattggtgcaagaaacaaagagaaagcaaatcaagcatgtgcttctaacacaagttcaatgtactttcctgaatgggtatatagggatcttgaatcatgcaagtctggaaggcatattgaggatggaattaacagcgaagaagatgagcttgcaaagaagatgacattggtgggtttgtggtgtattcagccttctccggtagatcgtcctgcgatgaacagagttgtggagatgatggaaggaagcttggaagctcttgaagtccctcctaggcctgttttgcagcaaatccccatatcaaatcttcatgaatcttctattctttcagaggatgtctctgtctacacagaaggatga

SEQ ID NO: 86457 - protein, 1118 aa, Arabidopsis thaliana
  peptide (1)..(1118): Ceres Seq. ID no. 12690678
MNSQQSTRTKQMLQQSSTHLLCGVVLLQLFAAQVDAQRSTSPWQTLSGDAPLVIARGGFSGLFPDSSLAAYQFAMVVSVADVVLWCDVQLTKDGHGICFPDLNLANASNSEEVYPNRQKSYPVNGVTTKGWFPIDFSLTELQKVLFSLIRGILSRSGKFDENGYSISTVQNVATQMKPALFWLNVQHDEFYEQHNLSMSSFLLSTSRTVSIDFISSPEVNFFRKIAGGFGNNGPSFVFQFMGKEDFEPTTNRTYGSILSNLSFVKTFASGILVPKSYILPLDDKQYLLPHTSLVQDAHKAGLKLYASGFANDVDIAYNYSWDPVSEYLSFVDNGNFSVDGMLSDFPLTASASVDCFSHIGRNATKQVDFLVISKNGASGEYPGCTKLAYEKAIKDGSDVIDCPVQMSSDGIPFCSSSIDLVNSTTVGQTHLRNRSIIVPEISSVAGIFTFSLTWHEIQSLTPAISNPFRENGMSRNPNERNSGNLISLYEFLNLAKNSTSLSGILISLENVVYLREKKGLDVVKVVLNRLTETGYIVGTLKVMIQSTTRLVLVDFKNQSTYKTVYKIKETIGNITDSAIEDIKKFANAVVINKASVFPNSDSFLTGQTTNVLERLQKFQLPVYVELFQNEFVSQPFDFFADETVEINAYIFGAGINGTITEFPYTAARYKRNRCLGREEVPPYMLPVNPGGVLTLISTSSLPPAQDPNPIFTHDDVTEPPLPPVIAKSPTSTLGTPSTIAKPLRNFLKVIRIVSWSVAGVVLFLVLLTLVFCFHRKRETRLRQQKLKALIPLEHYTYAQVKRITKSFAEVVGRGGFGIVYKGTLSDGRVVAVKVLKDTKGNGEDFINEVATMSRTSHLNIVSLLGFCSEGSKRAIIYEFLENGSLDKFILGKTSVNMDWTALYRIALGVAHGLEYLHHSCKTRIVHFDIKPQNVLLDDSFCPKVSDFGLAKLCEKKESILSMLDTRGTIGYIAPEMISRVYGNVSHKSDVYSYGMLVLEIIGARNKEKANQACASNTSSMYFPEWVYRDLESCKSGRHIEDGINSEEDELAKKMTLVGLWCIQPSPVDRPAMNRVVEMMEGSLEALEVPPRPVLQQIPISNLHESSILSEDVSVYTEG

SEQ ID NO: 86458 - protein, 1107 aa, Arabidopsis thaliana
  peptide (1)..(1107): Ceres Seq. ID no. 12690679
MLQQSSTHLLCGVVLLQLFAAQVDAQRSTSPWQTLSGDAPLVIARGGFSGLFPDSSLAAYQFAMVVSVADVVLWCDVQLTKDGHGICFPDLNLANASNSEEVYPNRQKSYPVNGVTTKGWFPIDFSLTELQKVLFSLIRGILSRSGKFDENGYSISTVQNVATQMKPALFWLNVQHDEFYEQHNLSMSSFLLSTSRTVSIDFISSPEVNFFRKIAGGFGNNGPSFVFQFMGKEDFEPTTNRTYGSILSNLSFVKTFASGILVPKSYILPLDDKQYLLPHTSLVQDAHKAGLKLYASGFANDVDIAYNYSWDPVSEYLSFVDNGNFSVDGMLSDFPLTASASVDCFSHIGRNATKQVDFLVISKNGASGEYPGCTKLAYEKAIKDGSDVIDCPVQMSSDGIPFCSSSIDLVNSTTVGQTHLRNRSIIVPEISSVAGIFTFSLTWHEIQSLTPAISNPFRENGMSRNPNERNSGNLISLYEFLNLAKNSTSLSGILISLENVVYLREKKGLDVVKVVLNRLTETGYIVGTLKVMIQSTTRLVLVDFKNQSTYKTVYKIKETIGNITDSAIEDIKKFANAVVINKASVFPNSDSFLTGQTTNVLERLQKFQLPVYVELFQNEFVSQPFDFFADETVEINAYIFGAGINGTITEFPYTAARYKRNRCLGREEVPPYMLPVNPGGVLTLISTSSLPPAQDPNPIFTHDDVTEPPLPPVIAKSPTSTLGTPSTIAKPLRNFLKVIRIVSWSVAGVVLFLVLLTLVFCFHRKRETRLRQQKLKALIPLEHYTYAQVKRITKSFAEVVGRGGFGIVYKGTLSDGRVVAVKVLKDTKGNGEDFINEVATMSRTSHLNIVSLLGFCSEGSKRAIIYEFLENGSLDKFILGKTSVNMDWTALYRIALGVAHGLEYLHHSCKTRIVHFDIKPQNVLLDDSFCPKVSDFGLAKLCEKKESILSMLDTRGTIGYIAPEMISRVYGNVSHKSDVYSYGMLVLEIIGARNKEKANQACASNTSSMYFPEWVYRDLESCKSGRHIEDGINSEEDELAKKMTLVGLWCIQPSPVDRPAMNRVVEMMEGSLEALEVPPRPVLQQIPISNLHESSILSEDVSVYTEG

SEQ ID NO: 86459 - protein, 1044 aa, Arabidopsis thaliana
  peptide (1)..(1044): Ceres Seq. ID no. 12690680
MVVSVADVVLWCDVQLTKDGHGICFPDLNLANASNSEEVYPNRQKSYPVNGVTTKGWFPIDFSLTELQKVLFSLIRGILSRSGKFDENGYSISTVQNVATQMKPALFWLNVQHDEFYEQHNLSMSSFLLSTSRTVSIDFISSPEVNFFRKIAGGFGNNGPSFVFQFMGKEDFEPTTNRTYGSILSNLSFVKTFASGILVPKSYILPLDDKQYLLPHTSLVQDAHKAGLKLYASGFANDVDIAYNYSWDPVSEYLSFVDNGNFSVDGMLSDFPLTASASVDCFSHIGRNATKQVDFLVISKNGASGEYPGCTKLAYEKAIKDGSDVIDCPVQMSSDGIPFCSSSIDLVNSTTVGQTHLRNRSIIVPEISSVAGIFTFSLTWHEIQSLTPAISNPFRENGMSRNPNERNSGNLISLYEFLNLAKNSTSLSGILISLENVVYLREKKGLDVVKVVLNRLTETGYIVGTLKVMIQSTTRLVLVDFKNQSTYKTVYKIKETIGNITDSAIEDIKKFANAVVINKASVFPNSDSFLTGQTTNVLERLQKFQLPVYVELFQNEFVSQPFDFFADETVEINAYIFGAGINGTITEFPYTAARYKRNRCLGREEVPPYMLPVNPGGVLTLISTSSLPPAQDPNPIFTHDDVTEPPLPPVIAKSPTSTLGTPSTIAKPLRNFLKVIRIVSWSVAGVVLFLVLLTLVFCFHRKRETRLRQQKLKALIPLEHYTYAQVKRITKSFAEVVGRGGFGIVYKGTLSDGRVVAVKVLKDTKGNGEDFINEVATMSRTSHLNIVSLLGFCSEGSKRAIIYEFLENGSLDKFILGKTSVNMDWTALYRIALGVAHGLEYLHHSCKTRIVHFDIKPQNVLLDDSFCPKVSDFGLAKLCEKKESILSMLDTRGTIGYIAPEMISRVYGNVSHKSDVYSYGMLVLEIIGARNKEKANQACASNTSSMYFPEWVYRDLESCKSGRHIEDGINSEEDELAKKMTLVGLWCIQPSPVDRPAMNRVVEMMEGSLEALEVPPRPVLQQIPISNLHESSILSEDVSVYTEG

SEQ ID NO: 86460 - DNA, 1197 bp, Arabidopsis thaliana
  misc_feature (1)..(1197): Ceres Seq. ID no. 12690721
  misc_feature (1)..(1197): Ortholog of  Ceres SEQ ID NO 14311576 as cited in SEQ ID NO 51551
atggaaagcaaaggaagaatccatccatctcatcatcatatgaggcgtcctcttccaggtcccggtggctgtatagcgcatccggagactttcggtaatcacggtgctataccaccttctgctgctcaaggtgtgtatccttccttcaacatgttacctccacctgaagttatggagcaaaagtttgtggcacaacacggggaattacagagacttgctatagagaatcagagacttggtggaactcatggtagtttaagacaagagttagcagcagcacagcatgaaatacagatgttgcacgcgcaaattgggtcgatgaagtccgagagagagcaacggatgatgggtcttgctgagaaagttgctaaaatggagactgagcttcagaaatctgaggctgttaagttggagatgcaacaagcacgtgctgaggcacggagtcttgttgtggctagggaggagcttatgtctaaagtgcatcagttgactcaggaacttcaaaaatctcgttctgatgtgcagcaaatacctgctctgatgtctgaacttgagaatctaagacaggagtaccagcagtgcagggcaacatatgactatgagaagaagttttataatgaccatctcgagtcacttcaggcaatggagaagaactacatgactatggctagggaagttgaaaaacttcaagcacagttgatgaacaatgcaaattcagatagaagagcaggtggcccttatggtaacaacataaatgctgaaattgacgcttctggacatcagagtggaaacggttattatgaagatgcttttggtcctcagggatatattcctcaaccagtagctggtaacgcaactggaccaaattcagttgttggcgcagctcaatacccttatcaaggagtaactcagccaggatacttccctcaaagacccggttacaactttccaagaggccctcctggttcatatgacccaacaacaaggttaccaacaggaccttacggcgctccattcccacctggaccatctaacaatactccttacgccgagagatgtaacatcgggaaagaaaaaacaaagaaagagaaatttgttgtttgcccttcaccattttgtctctatgactctatgtttcactcagttaaaaagtttacaaatgaatcgaaagttaaatttatctttgtaatactgtag

SEQ ID NO: 86461 - protein, 398 aa, Arabidopsis thaliana
  peptide (1)..(398): Ceres Seq. ID no. 12690722
MESKGRIHPSHHHMRRPLPGPGGCIAHPETFGNHGAIPPSAAQGVYPSFNMLPPPEVMEQKFVAQHGELQRLAIENQRLGGTHGSLRQELAAAQHEIQMLHAQIGSMKSEREQRMMGLAEKVAKMETELQKSEAVKLEMQQARAEARSLVVAREELMSKVHQLTQELQKSRSDVQQIPALMSELENLRQEYQQCRATYDYEKKFYNDHLESLQAMEKNYMTMAREVEKLQAQLMNNANSDRRAGGPYGNNINAEIDASGHQSGNGYYEDAFGPQGYIPQPVAGNATGPNSVVGAAQYPYQGVTQPGYFPQRPGYNFPRGPPGSYDPTTRLPTGPYGAPFPPGPSNNTPYAERCNIGKEKTKKEKFVVCPSPFCLYDSMFHSVKKFTNESKVKFIFVIL

SEQ ID NO: 86462 - protein, 385 aa, Arabidopsis thaliana
  peptide (1)..(385): Ceres Seq. ID no. 12690723
MRRPLPGPGGCIAHPETFGNHGAIPPSAAQGVYPSFNMLPPPEVMEQKFVAQHGELQRLAIENQRLGGTHGSLRQELAAAQHEIQMLHAQIGSMKSEREQRMMGLAEKVAKMETELQKSEAVKLEMQQARAEARSLVVAREELMSKVHQLTQELQKSRSDVQQIPALMSELENLRQEYQQCRATYDYEKKFYNDHLESLQAMEKNYMTMAREVEKLQAQLMNNANSDRRAGGPYGNNINAEIDASGHQSGNGYYEDAFGPQGYIPQPVAGNATGPNSVVGAAQYPYQGVTQPGYFPQRPGYNFPRGPPGSYDPTTRLPTGPYGAPFPPGPSNNTPYAERCNIGKEKTKKEKFVVCPSPFCLYDSMFHSVKKFTNESKVKFIFVIL

SEQ ID NO: 86463 - protein, 348 aa, Arabidopsis thaliana
  peptide (1)..(348): Ceres Seq. ID no. 12690724
MLPPPEVMEQKFVAQHGELQRLAIENQRLGGTHGSLRQELAAAQHEIQMLHAQIGSMKSEREQRMMGLAEKVAKMETELQKSEAVKLEMQQARAEARSLVVAREELMSKVHQLTQELQKSRSDVQQIPALMSELENLRQEYQQCRATYDYEKKFYNDHLESLQAMEKNYMTMAREVEKLQAQLMNNANSDRRAGGPYGNNINAEIDASGHQSGNGYYEDAFGPQGYIPQPVAGNATGPNSVVGAAQYPYQGVTQPGYFPQRPGYNFPRGPPGSYDPTTRLPTGPYGAPFPPGPSNNTPYAERCNIGKEKTKKEKFVVCPSPFCLYDSMFHSVKKFTNESKVKFIFVIL

SEQ ID NO: 86464 - DNA, 1986 bp, Arabidopsis thaliana
  misc_feature (1)..(1986): Ceres Seq. ID no. 12690753
  misc_feature (1)..(1986): Ortholog of  Ceres SEQ ID NO 14315774 as cited in SEQ ID NO 20630
atgagggatgctggtaaggtcaatggtttatcggcttcggttcccgacccgcctcctaatgctaaccctaaccttgagtttcgaattgcaccggggcatccagtagagattgaaacgaatgaacaacctcattctaaccgtttcaacgctgttattgagaagatagagaggctctataaggttgttatatgtttgatttttcacattcacaacatttttgcataccatgcaatagcactgttgcattcacacatctctgaaaagtgtatgcttacttcagagaataaatctcaggggaacgatagcagtgatggggaagagttagacggtgctcctgatgatgatgagtatgacactgaagattcatttatagatgatgctgaactggatgagtatttcgaagttgataattcaacagttaaacatgatggattttatgtaaatagaggcaagttggagcggatggaaccttcaacaacatctaaccagcaacccaaaaaacggcgacgaaaagattcagcaaaaccctgtcgtgatgcagttgacgtatccgataaacacaccaagttgtctataacagctaggaaaaaggagtcacctttgccttctggagcgcaagatgcaaatacttcagtacctctggatgatgtgaagcattctgatagagcaaatcatcagtctaggaatgatacaagtcacaagtcaagggaaactggatcctctagtgcccttcatcagaaatacagcaacaaaagcttacaccaacaatctacgtccctgctaggaaaatctccccccaatgtctttgcagaggtaacagtagtccgtcagaaagaaaacaatggtatgcatcagctggcaaatgtaacgggaagcagacaatctagtcaagcgtctaaaaaagatggttctaatgtgaagtctaaaacctcaatcctcgagaaagccataagggaactggagaaggtggttgtggaatcaaggcctcctgctatcactgaaaatcaagaagctgatacctcatcccaggcagtgaagagaagattgcccagggatgttaaattgaaacttgctaaagttgctaggattgcgcaggcaagccagggaaaacattcaacagagttaatcaaccgtcttatgagcattgttggtcacctaatccagcttaggtctcttaagaggaacttgaaaatcatgattgatatgggagattctgcaacccgagaaaaggatactaggttcaagcaaatcaacaatgaagttcttgatatgataaaggccaaagtttctttgatggaatcacaggcaatcaaaccagaaggtgcaacatcagacgattttcaggactcagtagaaaagccatctttgaagaagtttgtcatggatgcggcattggaggataaattgtgtgacctatatgacatatttatcgacggattggatgaagatcaaggtccacaaacaaaaaagctatatgtcaatttggctgaactctggccaaatagattgatggattatcgtgggatcaaacatgcaattttccgggcaaaggagagacgaaaagcattgtatggaaaccttgcgaaagagatggatcaaacaaagatgaagaagagtatgaagcagttggtaccaagaacagactgtactgctcagcccaacaccgaattagtggttcagagacaacacagtggggaaaaaaaattgattgttgatccaaatgcaaccagcacttccgtggtcactagtcaaactatggttgacagatcaaatcagcagcagcctgagaagctaaagggaatctcaagctcttgcaatcctacagaggaaacaagagtggtcaagagaaagaacgaggctgtaatggctgagaaacaagtcgttcttgccctgaagaagcccgaacatccacagacacgtgtaatcccagctcctcagaatctgaacatcccacgaacaaccccggacctgaacttgccaagttga

SEQ ID NO: 86465 - protein, 661 aa, Arabidopsis thaliana
  peptide (1)..(661): Ceres Seq. ID no. 12690754
MRDAGKVNGLSASVPDPPPNANPNLEFRIAPGHPVEIETNEQPHSNRFNAVIEKIERLYKVVICLIFHIHNIFAYHAIALLHSHISEKCMLTSENKSQGNDSSDGEELDGAPDDDEYDTEDSFIDDAELDEYFEVDNSTVKHDGFYVNRGKLERMEPSTTSNQQPKKRRRKDSAKPCRDAVDVSDKHTKLSITARKKESPLPSGAQDANTSVPLDDVKHSDRANHQSRNDTSHKSRETGSSSALHQKYSNKSLHQQSTSLLGKSPPNVFAEVTVVRQKENNGMHQLANVTGSRQSSQASKKDGSNVKSKTSILEKAIRELEKVVVESRPPAITENQEADTSSQAVKRRLPRDVKLKLAKVARIAQASQGKHSTELINRLMSIVGHLIQLRSLKRNLKIMIDMGDSATREKDTRFKQINNEVLDMIKAKVSLMESQAIKPEGATSDDFQDSVEKPSLKKFVMDAALEDKLCDLYDIFIDGLDEDQGPQTKKLYVNLAELWPNRLMDYRGIKHAIFRAKERRKALYGNLAKEMDQTKMKKSMKQLVPRTDCTAQPNTELVVQRQHSGEKKLIVDPNATSTSVVTSQTMVDRSNQQQPEKLKGISSSCNPTEETRVVKRKNEAVMAEKQVVLALKKPEHPQTRVIPAPQNLNIPRTTPDLNLPS

SEQ ID NO: 86466 - protein, 572 aa, Arabidopsis thaliana
  peptide (1)..(572): Ceres Seq. ID no. 12690755
MLTSENKSQGNDSSDGEELDGAPDDDEYDTEDSFIDDAELDEYFEVDNSTVKHDGFYVNRGKLERMEPSTTSNQQPKKRRRKDSAKPCRDAVDVSDKHTKLSITARKKESPLPSGAQDANTSVPLDDVKHSDRANHQSRNDTSHKSRETGSSSALHQKYSNKSLHQQSTSLLGKSPPNVFAEVTVVRQKENNGMHQLANVTGSRQSSQASKKDGSNVKSKTSILEKAIRELEKVVVESRPPAITENQEADTSSQAVKRRLPRDVKLKLAKVARIAQASQGKHSTELINRLMSIVGHLIQLRSLKRNLKIMIDMGDSATREKDTRFKQINNEVLDMIKAKVSLMESQAIKPEGATSDDFQDSVEKPSLKKFVMDAALEDKLCDLYDIFIDGLDEDQGPQTKKLYVNLAELWPNRLMDYRGIKHAIFRAKERRKALYGNLAKEMDQTKMKKSMKQLVPRTDCTAQPNTELVVQRQHSGEKKLIVDPNATSTSVVTSQTMVDRSNQQQPEKLKGISSSCNPTEETRVVKRKNEAVMAEKQVVLALKKPEHPQTRVIPAPQNLNIPRTTPDLNLPS

SEQ ID NO: 86467 - protein, 507 aa, Arabidopsis thaliana
  peptide (1)..(507): Ceres Seq. ID no. 12690756
MEPSTTSNQQPKKRRRKDSAKPCRDAVDVSDKHTKLSITARKKESPLPSGAQDANTSVPLDDVKHSDRANHQSRNDTSHKSRETGSSSALHQKYSNKSLHQQSTSLLGKSPPNVFAEVTVVRQKENNGMHQLANVTGSRQSSQASKKDGSNVKSKTSILEKAIRELEKVVVESRPPAITENQEADTSSQAVKRRLPRDVKLKLAKVARIAQASQGKHSTELINRLMSIVGHLIQLRSLKRNLKIMIDMGDSATREKDTRFKQINNEVLDMIKAKVSLMESQAIKPEGATSDDFQDSVEKPSLKKFVMDAALEDKLCDLYDIFIDGLDEDQGPQTKKLYVNLAELWPNRLMDYRGIKHAIFRAKERRKALYGNLAKEMDQTKMKKSMKQLVPRTDCTAQPNTELVVQRQHSGEKKLIVDPNATSTSVVTSQTMVDRSNQQQPEKLKGISSSCNPTEETRVVKRKNEAVMAEKQVVLALKKPEHPQTRVIPAPQNLNIPRTTPDLNLPS

SEQ ID NO: 86468 - DNA, 1686 bp, Arabidopsis thaliana
  misc_feature (1)..(1686): Ceres Seq. ID no. 12690834
  misc_feature (1)..(1686): Ortholog of  Ceres SEQ ID NO 14314220 as cited in SEQ ID NO 57321
ctcctatttctctcttctctctctctttaagtgagcttcgccgttaaactttctccggtaccgggaaattaacgaagaaagcgaaaagtcactgttacactaatatcacaaatctctctctgtctctctctctctctttgtcgaagtcgtgcgtgatgctagttacggtggtgaagcagcggttagtgtactctcgccggagaaattggttatgaccggaatctcacctccgtgatcgaagaaactgttttcgtttttttatcgttacgaagaaatggaaaaacaggcgaagctaacgaggacacagtcgtcgttactccggtcatcgtcgaatctccgttcgtcatatcaaagcttatcttcaatcgtcgaaggcgagcaagatctagaagccggagagaaagaagagaaacagagaagaaaaccacctaaaccattcggttcaccaaatcctaaaaccggtttaaccagaatcaatcccggtttagctttcacaatggtatctctctctttcctaagtctctcatcgttcttcttcttcgtcgtcttctcacaaaccgatgagattctcacatcggagaatcttttactagctttaatcttcgtcgctgtagctctcttcttcgcttccaagaacatctctctactaaaccaaaccgtaatcgcaatcaaaaacttagggttccaaaacagagactcgaaatcaaaaccggtacaatggtacatcggagacgattcaaaaccggagaagaaggtaatcaagagattcgttaaagaaggagttcaattctacagtaatggagatttctacgaaggtgaatttaacaaagggaagtgtaacggaagtggtgtgtattactatttcgtgagaggacgttatgaaggagattggctagatgggagatatgatggtcatgggattgagagttgggctagaggaagtagatataaaggtcaatataggcaaggtcttagacatggttttggtgtttatagattctacactggtgattgttatgctggtgagtggtttaatggtcaaagccatggttttggtgttcaatcttgttctgatggtagctcttaccttggtgagtctagatttggtgttaagcatggtcttggttcttaccatttcagaaatggagataagtatgcaggagagtactttggagacaagattcatgggtttggtgtgtatcgatttgctaatggacactgttatgaaggagcatggcatgaaggtcgtaagcaagggtttggtgcttactcgtttagaaatggtgatgctaaatctggtgaatgggattcaggggttcttgtgacttcacttcctcttacgagtgagccagtttcaagagctgttcaggcggctcgagaaacagcgaataaggcagtgaatcggagacgagtagatgagcaggtgagccgagctgtggctgcagctaataaggctgctacggctgcaagagtggctgctgtgagagccgttcagaatcaaatggatggtaaattttgtcaaagttgaaaaaaggaaaatgtaaaaaatctttttttttaccggtttctctgtaaccctgaatcgaaagtttgtttcagaggtttgtaacagagagttaattttcgatctttttactaatgtaacaaaactgtaaatagttgaagaagaagctttgtttttgttgt

SEQ ID NO: 86469 - protein, 417 aa, Arabidopsis thaliana; identical to SEQ ID NO: 24011
  peptide (1)..(417): Ceres Seq. ID no. 12690835

SEQ ID NO: 86470 - protein, 343 aa, Arabidopsis thaliana; identical to SEQ ID NO: 24012
  peptide (1)..(343): Ceres Seq. ID no. 12690836

SEQ ID NO: 86471 - DNA, 717 bp, Arabidopsis thaliana
  misc_feature (1)..(717): Ceres Seq. ID no. 12690842
  misc_feature (1)..(717): Ortholog of  Ceres SEQ ID NO 14316060 as cited in SEQ ID NO 52465
  misc_feature (1)..(717): Ortholog of  Ceres SEQ ID NO 13664032 as cited in SEQ ID NO 67527
atggaacgtggagctcccttctctcactatcagctaccaaaatccatctctgaattgaacttggaccagcacagcaacaacccaaccccaatgaccagctcagtcgtagtagccggcgccggtgacaagaacaatggtatcgtggtccagcagcaaccaccatgtgtggctcgtgagcaagaccaatacatgccaatcgcaaacgtcataagaatcatgcgtaaaaccttaccgtctcacgccaaaatctctgacgacgccaaagaaacgattcaagaatgtgtctccgagtacatcagcttcgtgaccggtgaagccaacgagcgttgccaacgtgagcaacgtaagaccataactgctgaagatatcctttgggctatgagcaagcttgggttcgataactacgtggaccccctcaccgtgttcattaaccggtaccgtgagatagagaccgatcgtggttctgcacttagaggtgagccaccgtcgttgagacaaacctatggaggaaatggtattgggtttcacggcccatctcatggcctacctcctccgggtccttatggttatggtatgttggaccaatccatggttatgggaggtggtcggtactaccaaaacgggtcgtcgggtcaagatgaatccagtgttggtggtggctcttcgtcttccattaacggaatgccggcttttgaccattatggtcagtataagtga

SEQ ID NO: 86472 - protein, 238 aa, Arabidopsis thaliana
  peptide (1)..(238): Ceres Seq. ID no. 12690843
MERGAPFSHYQLPKSISELNLDQHSNNPTPMTSSVVVAGAGDKNNGIVVQQQPPCVAREQDQYMPIANVIRIMRKTLPSHAKISDDAKETIQECVSEYISFVTGEANERCQREQRKTITAEDILWAMSKLGFDNYVDPLTVFINRYREIETDRGSALRGEPPSLRQTYGGNGIGFHGPSHGLPPPGPYGYGMLDQSMVMGGGRYYQNGSSGQDESSVGGGSSSSINGMPAFDHYGQYK

SEQ ID NO: 86473 - protein, 208 aa, Arabidopsis thaliana; identical to SEQ ID NO: 72072
  peptide (1)..(208): Ceres Seq. ID no. 12690844

SEQ ID NO: 86474 - protein, 175 aa, Arabidopsis thaliana; identical to SEQ ID NO: 72073
  peptide (1)..(175): Ceres Seq. ID no. 12690845

SEQ ID NO: 86475 - DNA, 906 bp, Arabidopsis thaliana
  misc_feature (1)..(906): Ceres Seq. ID no. 12690862
  misc_feature (1)..(906): Ortholog of  Ceres SEQ ID NO 13592803 as cited in SEQ ID NO 20481
atggaggtttcttctttctccactgtacccagatactgtaactcacgctcctttgttccagaattgtctcgtttcaggggattcaaagttcacttatgggaccaatctcttgttcctcttcatttcagcattcgaaaacgaaagaacacccctcgttatttgatttcttgcagtcagaagaaagatgtcactgttgttgatggaagttgtatggatgagatctatgataagttggcggaacgtcttgtccctacagcagcggcaatgtttagccccaatcttaaacgtttggtcggtttggctggtcctcctggtgccgggaaaagtacagtagcaaatgaagttgtgcgtcgtgtaaataagctatggcctcagaaagctgcttcttttgatgctgaggttaatccaccggatgttgctatagtacttcccatggatggtttccatttgtatcgttcgcaactcgatgctatggaggatcccaaagaagcccatgcgagaagaggggctccgtggacttttgatcctgcactactgcttaactgtttaaagaagctgaaaaacgagggctcagtttatgtgccatcatttgatcatggagttggggatccagttgaagatgatatctttgttagcctccagcataaagtggtaattgtagaaggaaactacatcttgttagaagaagggtcttggaaagacatctcagatatgtttgatgagaaatggttcatcgatgtgaatctcgatacagcaatgcaacgtgttgaaaaccggcatatctcaactggtaaacccccagatgttgctaaatggcgggtggattataatgaccgacccaacgcagagctgataataaagtcaaagacaaacgctgatctactgatcagatctatgaacatttga

SEQ ID NO: 86476 - protein, 301 aa, Arabidopsis thaliana; identical to SEQ ID NO: 20482
  peptide (1)..(301): Ceres Seq. ID no. 12690863

SEQ ID NO: 86477 - protein, 231 aa, Arabidopsis thaliana; identical to SEQ ID NO: 20483
  peptide (1)..(231): Ceres Seq. ID no. 12690864

SEQ ID NO: 86478 - protein, 213 aa, Arabidopsis thaliana; identical to SEQ ID NO: 20484
  peptide (1)..(213): Ceres Seq. ID no. 12690865

SEQ ID NO: 86479 - DNA, 5417 bp, Arabidopsis thaliana
  misc_feature (1)..(5417): Ceres Seq. ID no. 12690874
  misc_feature (1)..(5417): Ortholog of  Ceres SEQ ID NO 14304495 as cited in SEQ ID NO 53507
  misc_feature (1)..(5417): Ortholog of  Ceres SEQ ID NO 13663328 as cited in SEQ ID NO 66678
atgactgctgttgtgaatggtaactctaaacgctattcttggtggtgggatagtcacataagccccaagaactcgaaatggcttcaggagaatcttacagatatggatagtaaagtcaagcaaatgatcaaggttattgaagaagatgctgactcttttgctaggcgagcggaaatgtattacaagaagcggcctgagcttatgaaactggttgaggagttttatcgagcatatcgtgctttggctgaaagatacgatcatgccaccggtgttattcgtcatgctcagcagactatggctgaagccttcccaaaccaagaccctatgatgtttggtgaggagtcacctctcggttcttccaccgatggttttgatccacaaacgcctgacagttatccacctatccgagctcctgtttacccagatgatttacgaaaaggtgcttttgggatttcttcctctcatttgagtaccgttaagcgcaatatagccttcatggaagaccctcagtctgtgagtagcgggaaaggttttaaaactgcaaaggcaaggaaaggactgaatttcaataatgttgatggaaaagaaataaatgctaaggttctttcagaatctgaacgcgcaagcaaagctgaggctgaaattgtggctttaaaagatgctctttctaaagtgcaggctgaaaaggaagctagcttagctcagtttgatcagaatttggagaaactgtctaatttggagtctgaggtatctcgtgcacaagaggactctagggtgcttattgaacgagccacaagagccgaagctgaggtcgaaacgctcagagaatccctcagcaaagtagaggttgaaaaggagtccagccttcttcagtatcagcaatgtctgcaaaacatagctgatttggaggatcgcatttctctagcccagaaggaggctggagaagtagatgagcgagccaacagagccgaagctgaaactctagcactgaagcaaagccttgttagttccgaaactgacaaggaagctgctcttgttcaatatcaacaatgcttgaaaaccatatctaacctggaagagaggttgcacaaggctgaggaagattcaaggttaaccaatcagcgggcagaaaatgctgagggtgaagttgaaagcttgaagcaaaaggtttccaaattaattgaagagaatgaagcttacgaactccaataccaacaatgtctggacacaattgcagatttaaagctcaagctgtttcatgctcaagaagaaactcaaaggctcagccgtgaaatagaggatggagttgctaagttaaaatttgcagaggaaaaatgtgttgtgcttgagagatcaaatcaaaatcttcactctgaactggatggtctactagagaaactggggaatcaaagtcatgagctcacggagaaacagaaagagttgggaagattgtggacttgtgtacaagaagaaaacttgcgttttatggaagctgagactgcctttcaaaccctacaacagttacactctcagtctcaggaggaactaagcactttggcattggaactgcaaaacaggtctcaaatcctgaaagatatggaagcccgtaacaatggtttacaggaggaagttcaggaagccaaagaccagagcaaaagcctcaatgagctcaatctctcctcggctgcatcaattaaaagtttgcaggaggaggtctcaaaattacgagagacaatacagaaacttgaggcagaagttgaactaagagtggaccaaagaaatgctttgcagcaagaaatatactgtcttaaagaggaattaagtcagatagggaagaaacaccagtccatggtagaacaggtggaattggttggtttacatccagaaagctttgggtcttctgtcaaggagttacaggaggagaactcaaagctaaaggaaatccgggaaagagaaagtattgaaaagacggccctgattgagaagttagaaatgatggaaaagcttgttcagaaaaaccttcttctggagaactccatatcagatttgaatgctgagctggaaacaatcagaggaaagctgaaaacattggaggaagcttctatgtcacttgctgaagagaaatcaggccttcattctgagaaggacatgttgatttcccgtctgcagagtgctacagaaaacagcaagaaactctctgaggaaaacatggtactggagaattctctttttaatgccaatgtagaacttgaagaactcaagtcgaaattgaaaagcctagaagaatcatgccacctgctgaatgatgacaagaccactttaactagtgaaagagaaagcctactctctcatattgatacaatgagaaaaagaattgaagatctggagaaagaacatgcagaattaaaagtgaaagttttggaattagcgactgagagggagtcttctcttcagaaaattgaagagttgggagtgtctttaaatgccaaggactgtgagtatgctagttttgtgcaattttcagagagtcggatgaatggcatggaatcaacgatccatcaccttcaagatgaaaatcaatgccgggtgagagaatatcaagtggaactggatcgagctcatgatgctcacattgagattattgttctgcagaaatgtttgcaggactggcttgagaagagttcctctttgattgctgagaatcaggatattaaagaggcttctaaactgttagagaagctagtttctgaactagaagaggaaaatattgggaaacaagtgcagattgactcctcgattaactgcattaaaatactgagaacagggatctaccaggtattgatgaagcttgaaataattccaggtataggttccggtgatgagaactcgcgagaccagagaaatatgcatgatatattgaatagacttgaagacatgcaaactatgcttttgagcattcgggatgaaaaccagcactctgccatagagaacctcgtccttattgaatttcttcggcaacttaaatcagaagctgtaggtattgaaacagagaagaaaatccttgaggaagaacttgaatctcagtgtcagcagctctcgttttcgcgggatgagacccagaaacttatcttcgtgaacggagaattgaccacaaaagttaatcaaggagtcaacagagaaaaggttttgatggtggaaattgaggattttcacaggcaggtgttgcagttacgagatgactacaccattctacagggagataataacaaaacgttggatgagaaagcatacttgacaaagtcaacattgcagttggaggaggagaaatgtaaactagaagatgatatctctttgcttctgtcggagactatatatcaaagcaatctcatcattctgttggaggatgtcatcttggaaaagctttcaggagcaatgaaactaaacgaggatctagacagactcagtattgtcaagtgtaagcttgaggaagaggtaagagagcttggtgataagttaaaatctgcagacattgcgaactttcagcttcaagttgtgctagagaaatcgaatgccgaactactctctgccagatcagccaatgttcatttggaacatgaaatagctaatgtgaaggttcagaaggagaaagagcttttagaagcaatgctgatgatctccatcatgcaaaatgaaaaatctgaattatctaaggcagtggagggtttagaatgtagatacaaggaagctaaagcgatagaagaggatagggataagcaggtcttgagactccgtggagattacgatgagcaggttaagaagaatagtcattcgaacgaagctaatctgaaattggaagctgacttgatgaacttactcatggaactcgaagaaatcaaagtggagaaggaaaatctgaaccaggagctttttacagaaaggaatgagattgaactatgggagtctcagtctgcaacattgtttggagagttgcagatttcggctgttcatgaaacattgcttgaagggttgaccaatgagctggtcgaagcatgtaagaaccttgaaagcagaagcacgttaaaagacagggagattgagcagcttaaaggaagagtgaacaacttagaagatgcgaacaaaggacaaaacgatcttatgtgcaaatacgcccaagctattttcctgttgaaggaaagcatacaatctctggaaaaacatgcaatgcttcacgaattcgagaatggaccagccacaactaaccaatcttttgtgggtatctcttatcaggaaactgcttcattggtggataacagcgatggcttcttagagatacaagaattgcatttgagaattaaagctattgaggaggcaataaccaaaaagcttgcaatggaagaactaaaaacttcctctgcccgaagaagcagaaggagaaatggaagcctccggaaacagaaccatgaaatctactccgaggaaaccgagatgatcacaaaagatatcgtactcgatcaggtttctgattgctcatcatatgggataagtacgagagacattttgaagatagaagatgatcacagtttagaggcaaagtcacaaaatcctccgaaaggtaaatccttgtctgaagagtcattggttgtggacaaactagagatctccgatagattcacggatccaaacaaagatgcaaacaagaggaaagttctcgagagacttaattcagatttacagaagctctcaaatcttcatgtcgccgttgaagatttgaaaatcaaagtggagacagaggagaaagacgagaaaggaaaagaaaacgagtacgagacgatcaagggacagatcaacgaagctgaagaagcattagagaaactgttaagcatcaacaggaaactggtgacgaaagttcaaaatggatttgaaagatcagatggaagcaaatcatcaatggatcttgatgagaatgagagtagcagaaggaggaggatatcagaacaggcgagaagaggatcagagaagattggtaggttacagttggagatacagagattacagtttctgttactgaaactggaaggagatagagaggatcgagcaaaagcaaagatatcggatagcaaaacgaggattcttcttcgggattatatctatagcggagtgagaggtgagcgacgaaagaggattaaaaagcggtttgcgttttgtgggtgcgtgcaaccgcctccatctccttgatagttagaactgttgttgcaagtaagctaaataatgttcatgtgaatggaaacgtattgaagtttgatatgaaagagaaacacttttgctaatatctgttttttgcttttccgtagggtttaaaagaaatttgtatattgctaatagtttaaattccaaatttgttctacgtttgcgtttca

SEQ ID NO: 86480 - protein, 1744 aa, Arabidopsis thaliana
  peptide (1)..(1744): Ceres Seq. ID no. 12690875
MTAVVNGNSKRYSWWWDSHISPKNSKWLQENLTDMDSKVKQMIKVIEEDADSFARRAEMYYKKRPELMKLVEEFYRAYRALAERYDHATGVIRHAQQTMAEAFPNQDPMMFGEESPLGSSTDGFDPQTPDSYPPIRAPVYPDDLRKGAFGISSSHLSTVKRNIAFMEDPQSVSSGKGFKTAKARKGLNFNNVDGKEINAKVLSESERASKAEAEIVALKDALSKVQAEKEASLAQFDQNLEKLSNLESEVSRAQEDSRVLIERATRAEAEVETLRESLSKVEVEKESSLLQYQQCLQNIADLEDRISLAQKEAGEVDERANRAEAETLALKQSLVSSETDKEAALVQYQQCLKTISNLEERLHKAEEDSRLTNQRAENAEGEVESLKQKVSKLIEENEAYELQYQQCLDTIADLKLKLFHAQEETQRLSREIEDGVAKLKFAEEKCVVLERSNQNLHSELDGLLEKLGNQSHELTEKQKELGRLWTCVQEENLRFMEAETAFQTLQQLHSQSQEELSTLALELQNRSQILKDMEARNNGLQEEVQEAKDQSKSLNELNLSSAASIKSLQEEVSKLRETIQKLEAEVELRVDQRNALQQEIYCLKEELSQIGKKHQSMVEQVELVGLHPESFGSSVKELQEENSKLKEIRERESIEKTALIEKLEMMEKLVQKNLLLENSISDLNAELETIRGKLKTLEEASMSLAEEKSGLHSEKDMLISRLQSATENSKKLSEENMVLENSLFNANVELEELKSKLKSLEESCHLLNDDKTTLTSERESLLSHIDTMRKRIEDLEKEHAELKVKVLELATERESSLQKIEELGVSLNAKDCEYASFVQFSESRMNGMESTIHHLQDENQCRVREYQVELDRAHDAHIEIIVLQKCLQDWLEKSSSLIAENQDIKEASKLLEKLVSELEEENIGKQVQIDSSINCIKILRTGIYQVLMKLEIIPGIGSGDENSRDQRNMHDILNRLEDMQTMLLSIRDENQHSAIENLVLIEFLRQLKSEAVGIETEKKILEEELESQCQQLSFSRDETQKLIFVNGELTTKVNQGVNREKVLMVEIEDFHRQVLQLRDDYTILQGDNNKTLDEKAYLTKSTLQLEEEKCKLEDDISLLLSETIYQSNLIILLEDVILEKLSGAMKLNEDLDRLSIVKCKLEEEVRELGDKLKSADIANFQLQVVLEKSNAELLSARSANVHLEHEIANVKVQKEKELLEAMLMISIMQNEKSELSKAVEGLECRYKEAKAIEEDRDKQVLRLRGDYDEQVKKNSHSNEANLKLEADLMNLLMELEEIKVEKENLNQELFTERNEIELWESQSATLFGELQISAVHETLLEGLTNELVEACKNLESRSTLKDREIEQLKGRVNNLEDANKGQNDLMCKYAQAIFLLKESIQSLEKHAMLHEFENGPATTNQSFVGISYQETASLVDNSDGFLEIQELHLRIKAIEEAITKKLAMEELKTSSARRSRRRNGSLRKQNHEIYSEETEMITKDIVLDQVSDCSSYGISTRDILKIEDDHSLEAKSQNPPKGKSLSEESLVVDKLEISDRFTDPNKDANKRKVLERLNSDLQKLSNLHVAVEDLKIKVETEEKDEKGKENEYETIKGQINEAEEALEKLLSINRKLVTKVQNGFERSDGSKSSMDLDENESSRRRRISEQARRGSEKIGRLQLEIQRLQFLLLKLEGDREDRAKAKISDSKTRILLRDYIYSGVRGERRKRIKKRFAFCGCVQPPPSP

SEQ ID NO: 86481 - protein, 1710 aa, Arabidopsis thaliana
  peptide (1)..(1710): Ceres Seq. ID no. 12690876
MDSKVKQMIKVIEEDADSFARRAEMYYKKRPELMKLVEEFYRAYRALAERYDHATGVIRHAQQTMAEAFPNQDPMMFGEESPLGSSTDGFDPQTPDSYPPIRAPVYPDDLRKGAFGISSSHLSTVKRNIAFMEDPQSVSSGKGFKTAKARKGLNFNNVDGKEINAKVLSESERASKAEAEIVALKDALSKVQAEKEASLAQFDQNLEKLSNLESEVSRAQEDSRVLIERATRAEAEVETLRESLSKVEVEKESSLLQYQQCLQNIADLEDRISLAQKEAGEVDERANRAEAETLALKQSLVSSETDKEAALVQYQQCLKTISNLEERLHKAEEDSRLTNQRAENAEGEVESLKQKVSKLIEENEAYELQYQQCLDTIADLKLKLFHAQEETQRLSREIEDGVAKLKFAEEKCVVLERSNQNLHSELDGLLEKLGNQSHELTEKQKELGRLWTCVQEENLRFMEAETAFQTLQQLHSQSQEELSTLALELQNRSQILKDMEARNNGLQEEVQEAKDQSKSLNELNLSSAASIKSLQEEVSKLRETIQKLEAEVELRVDQRNALQQEIYCLKEELSQIGKKHQSMVEQVELVGLHPESFGSSVKELQEENSKLKEIRERESIEKTALIEKLEMMEKLVQKNLLLENSISDLNAELETIRGKLKTLEEASMSLAEEKSGLHSEKDMLISRLQSATENSKKLSEENMVLENSLFNANVELEELKSKLKSLEESCHLLNDDKTTLTSERESLLSHIDTMRKRIEDLEKEHAELKVKVLELATERESSLQKIEELGVSLNAKDCEYASFVQFSESRMNGMESTIHHLQDENQCRVREYQVELDRAHDAHIEIIVLQKCLQDWLEKSSSLIAENQDIKEASKLLEKLVSELEEENIGKQVQIDSSINCIKILRTGIYQVLMKLEIIPGIGSGDENSRDQRNMHDILNRLEDMQTMLLSIRDENQHSAIENLVLIEFLRQLKSEAVGIETEKKILEEELESQCQQLSFSRDETQKLIFVNGELTTKVNQGVNREKVLMVEIEDFHRQVLQLRDDYTILQGDNNKTLDEKAYLTKSTLQLEEEKCKLEDDISLLLSETIYQSNLIILLEDVILEKLSGAMKLNEDLDRLSIVKCKLEEEVRELGDKLKSADIANFQLQVVLEKSNAELLSARSANVHLEHEIANVKVQKEKELLEAMLMISIMQNEKSELSKAVEGLECRYKEAKAIEEDRDKQVLRLRGDYDEQVKKNSHSNEANLKLEADLMNLLMELEEIKVEKENLNQELFTERNEIELWESQSATLFGELQISAVHETLLEGLTNELVEACKNLESRSTLKDREIEQLKGRVNNLEDANKGQNDLMCKYAQAIFLLKESIQSLEKHAMLHEFENGPATTNQSFVGISYQETASLVDNSDGFLEIQELHLRIKAIEEAITKKLAMEELKTSSARRSRRRNGSLRKQNHEIYSEETEMITKDIVLDQVSDCSSYGISTRDILKIEDDHSLEAKSQNPPKGKSLSEESLVVDKLEISDRFTDPNKDANKRKVLERLNSDLQKLSNLHVAVEDLKIKVETEEKDEKGKENEYETIKGQINEAEEALEKLLSINRKLVTKVQNGFERSDGSKSSMDLDENESSRRRRISEQARRGSEKIGRLQLEIQRLQFLLLKLEGDREDRAKAKISDSKTRILLRDYIYSGVRGERRKRIKKRFAFCGCVQPPPSP

SEQ ID NO: 86482 - protein, 1703 aa, Arabidopsis thaliana
  peptide (1)..(1703): Ceres Seq. ID no. 12690877
MIKVIEEDADSFARRAEMYYKKRPELMKLVEEFYRAYRALAERYDHATGVIRHAQQTMAEAFPNQDPMMFGEESPLGSSTDGFDPQTPDSYPPIRAPVYPDDLRKGAFGISSSHLSTVKRNIAFMEDPQSVSSGKGFKTAKARKGLNFNNVDGKEINAKVLSESERASKAEAEIVALKDALSKVQAEKEASLAQFDQNLEKLSNLESEVSRAQEDSRVLIERATRAEAEVETLRESLSKVEVEKESSLLQYQQCLQNIADLEDRISLAQKEAGEVDERANRAEAETLALKQSLVSSETDKEAALVQYQQCLKTISNLEERLHKAEEDSRLTNQRAENAEGEVESLKQKVSKLIEENEAYELQYQQCLDTIADLKLKLFHAQEETQRLSREIEDGVAKLKFAEEKCVVLERSNQNLHSELDGLLEKLGNQSHELTEKQKELGRLWTCVQEENLRFMEAETAFQTLQQLHSQSQEELSTLALELQNRSQILKDMEARNNGLQEEVQEAKDQSKSLNELNLSSAASIKSLQEEVSKLRETIQKLEAEVELRVDQRNALQQEIYCLKEELSQIGKKHQSMVEQVELVGLHPESFGSSVKELQEENSKLKEIRERESIEKTALIEKLEMMEKLVQKNLLLENSISDLNAELETIRGKLKTLEEASMSLAEEKSGLHSEKDMLISRLQSATENSKKLSEENMVLENSLFNANVELEELKSKLKSLEESCHLLNDDKTTLTSERESLLSHIDTMRKRIEDLEKEHAELKVKVLELATERESSLQKIEELGVSLNAKDCEYASFVQFSESRMNGMESTIHHLQDENQCRVREYQVELDRAHDAHIEIIVLQKCLQDWLEKSSSLIAENQDIKEASKLLEKLVSELEEENIGKQVQIDSSINCIKILRTGIYQVLMKLEIIPGIGSGDENSRDQRNMHDILNRLEDMQTMLLSIRDENQHSAIENLVLIEFLRQLKSEAVGIETEKKILEEELESQCQQLSFSRDETQKLIFVNGELTTKVNQGVNREKVLMVEIEDFHRQVLQLRDDYTILQGDNNKTLDEKAYLTKSTLQLEEEKCKLEDDISLLLSETIYQSNLIILLEDVILEKLSGAMKLNEDLDRLSIVKCKLEEEVRELGDKLKSADIANFQLQVVLEKSNAELLSARSANVHLEHEIANVKVQKEKELLEAMLMISIMQNEKSELSKAVEGLECRYKEAKAIEEDRDKQVLRLRGDYDEQVKKNSHSNEANLKLEADLMNLLMELEEIKVEKENLNQELFTERNEIELWESQSATLFGELQISAVHETLLEGLTNELVEACKNLESRSTLKDREIEQLKGRVNNLEDANKGQNDLMCKYAQAIFLLKESIQSLEKHAMLHEFENGPATTNQSFVGISYQETASLVDNSDGFLEIQELHLRIKAIEEAITKKLAMEELKTSSARRSRRRNGSLRKQNHEIYSEETEMITKDIVLDQVSDCSSYGISTRDILKIEDDHSLEAKSQNPPKGKSLSEESLVVDKLEISDRFTDPNKDANKRKVLERLNSDLQKLSNLHVAVEDLKIKVETEEKDEKGKENEYETIKGQINEAEEALEKLLSINRKLVTKVQNGFERSDGSKSSMDLDENESSRRRRISEQARRGSEKIGRLQLEIQRLQFLLLKLEGDREDRAKAKISDSKTRILLRDYIYSGVRGERRKRIKKRFAFCGCVQPPPSP

SEQ ID NO: 86483 - DNA, 1482 bp, Arabidopsis thaliana
  misc_feature (1)..(1482): Ceres Seq. ID no. 12690893
  misc_feature (1)..(1482): Ortholog of  Ceres SEQ ID NO 15177676 as cited in SEQ ID NO 52631
  misc_feature (1)..(1482): Ortholog of  Ceres SEQ ID NO 14314212 as cited in SEQ ID NO 57401
  misc_feature (1)..(1482): Ortholog of  Ceres SEQ ID NO 13596376 as cited in SEQ ID NO 68056
aacatcgtcatctctaacaatggcgccttctccgatcatcttctccgttcttcttctcttcatcttctcactctcatcatctgctcaaacacctttccgtcccaaagctctccttctcccagtaacaaaagaccaatctaccctccagtacacaaccgtcatcaaccaacgcacacctctcgtccccgcttccgtcgtcttcgacctcggtggtcgagaactctgggtcgactgcgacaaaggctacgtctcctccacttaccagtctcctcgctgcaactccgccgtctgctcacgtgccggctccacaagctgcggcacatgcttctcccctccgagacctggctgtagtaacaacacttgcggcggcattccggataacaccgttaccggtaccgcaacttccggcgaatttgctttagacgttgtgtctatccagtccactaacggatccaatccgggcagggtcgttaaaatcccaaatttgatcttcgattgtggagcaacgtttcttcttaaaggactcgctaaaggaaccgttggtatggcgggaatgggacgtcacaacatcggtttaccgtcgcaattcgccgccgcgtttagcttccaccgtaaattcgccgtctgtctaacttccggtaaaggcgtcgccttcttcggcaacggaccttacgttttccttcccggaatccagatctcaagtctccaaacgacgccccttctcatcaatccggtcagcactgcttctgcgttttcacaaggtgagaaatcctcagagtactttatcggcgtgacggcgattcaaatcgtcgagaaaacagttccgatcaatccaacgctattgaagattaacgcaagtaccggtatcggaggaaccaaaatcagctccgtcaatccttacacggtgttggagtcatcgatctacaatgcttttacgtcggagttcgttaaacaagcagcggcgaggagcatcaagagagtagcgtcggtgaaaccgttcggcgcgtgtttcagcacgaagaacgtcggcgtgacgcgcctaggatacgccgtgccggagattgagcttgtgcttcatagcaaagacgtcgtttggaggatatttggagccaactcgatggtgagtgtcagtgatgacgtcatctgtttgggtttcgttgacggaggagtcaacgcaagaacctctgttgtgattggagggtttcagttggaggataatttgatcgaatttgatttggcgagtaacaaatttgggtttagttccacgttattgggccgtcaaactaactgcgccaacttcaatttcacttccactgcttgattaaattagttgatccgttttctttttttaaaactgttttttagtggttattatattatgtttgatgtgattaataaagagccaatggaatcattatttggcatttgttatcaactgatttgaataaattatgtaacgagtgaattttatttgataaatct

SEQ ID NO: 86484 - protein, 439 aa, Arabidopsis thaliana
  peptide (1)..(439): Ceres Seq. ID no. 12690894
TSSSLTMAPSPIIFSVLLLFIFSLSSSAQTPFRPKALLLPVTKDQSTLQYTTVINQRTPLVPASVVFDLGGRELWVDCDKGYVSSTYQSPRCNSAVCSRAGSTSCGTCFSPPRPGCSNNTCGGIPDNTVTGTATSGEFALDVVSIQSTNGSNPGRVVKIPNLIFDCGATFLLKGLAKGTVGMAGMGRHNIGLPSQFAAAFSFHRKFAVCLTSGKGVAFFGNGPYVFLPGIQISSLQTTPLLINPVSTASAFSQGEKSSEYFIGVTAIQIVEKTVPINPTLLKINASTGIGGTKISSVNPYTVLESSIYNAFTSEFVKQAAARSIKRVASVKPFGACFSTKNVGVTRLGYAVPEIELVLHSKDVVWRIFGANSMVSVSDDVICLGFVDGGVNARTSVVIGGFQLEDNLIEFDLASNKFGFSSTLLGRQTNCANFNFTSTA

SEQ ID NO: 86485 - protein, 433 aa, Arabidopsis thaliana; identical to SEQ ID NO: 28927
  peptide (1)..(433): Ceres Seq. ID no. 12690895

SEQ ID NO: 86486 - protein, 258 aa, Arabidopsis thaliana; identical to SEQ ID NO: 28928
  peptide (1)..(258): Ceres Seq. ID no. 12690896

SEQ ID NO: 86487 - DNA, 2472 bp, Arabidopsis thaliana
  misc_feature (1)..(2472): Ceres Seq. ID no. 12690910
  misc_feature (1)..(2472): Ortholog of  Ceres SEQ ID NO 15174712 as cited in SEQ ID NO 52965
  misc_feature (1)..(2472): Ortholog of  Ceres SEQ ID NO 15175476 as cited in SEQ ID NO 53735
atgagtatagttcaaaagcaagaagagatgaatggatgtggtctcaatgttgacaaagtagaagcctttacagtgtcacctcaggaaaaaggaaggaaaaacaagagaaagttagctgatccttctcaaccaaatgcttcttccctcactgaattccctccatatgagttaccttcgttgaaacctcagaaccatttgagcggaaatggatcggttggggaagtttctaatcagctgcaagttgaagtgtctgaatctgtcgaatgggatgacccatttgcctgtcatcttgaagaattgttgtcgtcaaatttgctcacgctcttccttgatacaatgaagcagcttattgatttaggctacaccgatgacgaagttctgaaagctgtatcacgctgtaggctgtactgtggaggcaataatcttttgtcaaacattgtcaataacaccttgagtgctctcaagactggagacgaaggtgctggttcaggagactatgtgtttgaggatttacaacagcttgtttcctatacgttggtagaaatgataagtcttattaaggaggtcaggccgtccctatcaacagttgaagctatgtggaggcttttgatgtgcgacttgaatgtcttgcaagcctttgaagctgaaggcgatggattggtgagttcaagtaaattatctgattcggaatctcttggtgctgaatctaatcctccaaaatctagtgacccagataacccaaagcctccccaatccgatcctcaaagcaatcggaatgagccactcaaatttggaaacttcccaaatacaccgaactccaaaaaaactcagtctagtggaacaacaccaggaaaagaagtatgctcgggtagcactgtttcttgtcaaggcatgagaagtacatcatttactctagtctctgatgaaaaattggtatcttgtcgaaaaggccgtactaaaaaagagatagcaatgcttcggcaaaaatcatgtgtggaaaaaattaggacttacagcaaaggcagtggctataaggcggcaaagtttgcatcagttggcagcttccttttagagaaaagagtcaaatcatcttctgaatttgtgccaagaaattcttcatcaaagataacagcagagattggagtgaaagtttcattagctgaggatagcggctgttttgtaagaaagaacagtaagttggattcacctgtggtagtggtagatgcaaagggctatataactgccttacctgctaggtcggtaaaatctgcttcaaaaaaaaagactggttctgagtctgtaactctgataccatcagcttcagaaaagaagtctgattcttcgataccatcaacttcagaaaagaagtctggttctgagtctgaagagaaggcatctgtgtctgcaaagctagcaccagattactatgctgggatcccatatgatgcagctctgggtatatatgttccccgggataagaaagatgaattgattctaaagcttgttcctcgagtgaatgatctgcagaatgaactgcaggtctggactgactgggctaatcagaaagtaaaagaggcaactggtagactacttaaggaccaaccagagcttaaggcactaaggaaagagagggaagaggcagaacagtataaaaaagagaagcagttattggaagaaaacactaggaaaaggctatctgagatggattttgcgttgaaaaatgcgaccagccagttggaaaaagcattcaatactgctcacaggctcgagctggaacaatctatactgaagaaagagatggaagctgctaagataaaagccgtcgagtctgctgagagctttagagaagcaaaagagagaggggaaagatcactgaaggatattcactcgtgggaagggcaaaaaattatgttgcaggaagagctcaagggtcaaagggaaaaggtgacagtgctacagaaagaagttaccaaagcaaaaaatcgccagaatcaaatcgaggctgctttgaagcaagaaagaacagccaaagggaaactcagtgctcaggcttcattgataaggaaagaaacaaaggaacttgaagcgcttggaaaagtggaagaagagcggatcaaagggaaagcagaaaccgacgtgaaatattacatagataacatcaagagacttgaaagagagatctcagagctgaaacttaaatcagactactcgagaatcattgcactgaagaaaggcagcagtgagtcaaaggcaacaaaaagagagagtcttgggatgccgaaagtgaaaagagaaagagaatgtgtgatgtgtttatctgaagagatgagtgtgattttcttgccttgtgctcaccaagttctttgctttaaatgcaatcagcttcacgagaaagaaggaatgatggattgtccgtcttgtcgtggaacaatccataggaggattcaagctcgtttcgctcgctccgggtga

SEQ ID NO: 86488 - protein, 823 aa, Arabidopsis thaliana
  peptide (1)..(823): Ceres Seq. ID no. 12690911
MSIVQKQEEMNGCGLNVDKVEAFTVSPQEKGRKNKRKLADPSQPNASSLTEFPPYELPSLKPQNHLSGNGSVGEVSNQLQVEVSESVEWDDPFACHLEELLSSNLLTLFLDTMKQLIDLGYTDDEVLKAVSRCRLYCGGNNLLSNIVNNTLSALKTGDEGAGSGDYVFEDLQQLVSYTLVEMISLIKEVRPSLSTVEAMWRLLMCDLNVLQAFEAEGDGLVSSSKLSDSESLGAESNPPKSSDPDNPKPPQSDPQSNRNEPLKFGNFPNTPNSKKTQSSGTTPGKEVCSGSTVSCQGMRSTSFTLVSDEKLVSCRKGRTKKEIAMLRQKSCVEKIRTYSKGSGYKAAKFASVGSFLLEKRVKSSSEFVPRNSSSKITAEIGVKVSLAEDSGCFVRKNSKLDSPVVVVDAKGYITALPARSVKSASKKKTGSESVTLIPSASEKKSDSSIPSTSEKKSGSESEEKASVSAKLAPDYYAGIPYDAALGIYVPRDKKDELILKLVPRVNDLQNELQVWTDWANQKVKEATGRLLKDQPELKALRKEREEAEQYKKEKQLLEENTRKRLSEMDFALKNATSQLEKAFNTAHRLELEQSILKKEMEAAKIKAVESAESFREAKERGERSLKDIHSWEGQKIMLQEELKGQREKVTVLQKEVTKAKNRQNQIEAALKQERTAKGKLSAQASLIRKETKELEALGKVEEERIKGKAETDVKYYIDNIKRLEREISELKLKSDYSRIIALKKGSSESKATKRESLGMPKVKRERECVMCLSEEMSVIFLPCAHQVLCFKCNQLHEKEGMMDCPSCRGTIHRRIQARFARSG

SEQ ID NO: 86489 - protein, 814 aa, Arabidopsis thaliana
  peptide (1)..(814): Ceres Seq. ID no. 12690912
MNGCGLNVDKVEAFTVSPQEKGRKNKRKLADPSQPNASSLTEFPPYELPSLKPQNHLSGNGSVGEVSNQLQVEVSESVEWDDPFACHLEELLSSNLLTLFLDTMKQLIDLGYTDDEVLKAVSRCRLYCGGNNLLSNIVNNTLSALKTGDEGAGSGDYVFEDLQQLVSYTLVEMISLIKEVRPSLSTVEAMWRLLMCDLNVLQAFEAEGDGLVSSSKLSDSESLGAESNPPKSSDPDNPKPPQSDPQSNRNEPLKFGNFPNTPNSKKTQSSGTTPGKEVCSGSTVSCQGMRSTSFTLVSDEKLVSCRKGRTKKEIAMLRQKSCVEKIRTYSKGSGYKAAKFASVGSFLLEKRVKSSSEFVPRNSSSKITAEIGVKVSLAEDSGCFVRKNSKLDSPVVVVDAKGYITALPARSVKSASKKKTGSESVTLIPSASEKKSDSSIPSTSEKKSGSESEEKASVSAKLAPDYYAGIPYDAALGIYVPRDKKDELILKLVPRVNDLQNELQVWTDWANQKVKEATGRLLKDQPELKALRKEREEAEQYKKEKQLLEENTRKRLSEMDFALKNATSQLEKAFNTAHRLELEQSILKKEMEAAKIKAVESAESFREAKERGERSLKDIHSWEGQKIMLQEELKGQREKVTVLQKEVTKAKNRQNQIEAALKQERTAKGKLSAQASLIRKETKELEALGKVEEERIKGKAETDVKYYIDNIKRLEREISELKLKSDYSRIIALKKGSSESKATKRESLGMPKVKRERECVMCLSEEMSVIFLPCAHQVLCFKCNQLHEKEGMMDCPSCRGTIHRRIQARFARSG

SEQ ID NO: 86490 - protein, 711 aa, Arabidopsis thaliana
  peptide (1)..(711): Ceres Seq. ID no. 12690913
MKQLIDLGYTDDEVLKAVSRCRLYCGGNNLLSNIVNNTLSALKTGDEGAGSGDYVFEDLQQLVSYTLVEMISLIKEVRPSLSTVEAMWRLLMCDLNVLQAFEAEGDGLVSSSKLSDSESLGAESNPPKSSDPDNPKPPQSDPQSNRNEPLKFGNFPNTPNSKKTQSSGTTPGKEVCSGSTVSCQGMRSTSFTLVSDEKLVSCRKGRTKKEIAMLRQKSCVEKIRTYSKGSGYKAAKFASVGSFLLEKRVKSSSEFVPRNSSSKITAEIGVKVSLAEDSGCFVRKNSKLDSPVVVVDAKGYITALPARSVKSASKKKTGSESVTLIPSASEKKSDSSIPSTSEKKSGSESEEKASVSAKLAPDYYAGIPYDAALGIYVPRDKKDELILKLVPRVNDLQNELQVWTDWANQKVKEATGRLLKDQPELKALRKEREEAEQYKKEKQLLEENTRKRLSEMDFALKNATSQLEKAFNTAHRLELEQSILKKEMEAAKIKAVESAESFREAKERGERSLKDIHSWEGQKIMLQEELKGQREKVTVLQKEVTKAKNRQNQIEAALKQERTAKGKLSAQASLIRKETKELEALGKVEEERIKGKAETDVKYYIDNIKRLEREISELKLKSDYSRIIALKKGSSESKATKRESLGMPKVKRERECVMCLSEEMSVIFLPCAHQVLCFKCNQLHEKEGMMDCPSCRGTIHRRIQARFARSG

SEQ ID NO: 86491 - DNA, 2439 bp, Arabidopsis thaliana
  misc_feature (1)..(2439): Ceres Seq. ID no. 12690921
  misc_feature (1)..(2439): Ortholog of  Ceres SEQ ID NO 13596392 as cited in SEQ ID NO 62136
  misc_feature (1)..(2439): Ortholog of  Ceres SEQ ID NO 13654360 as cited in SEQ ID NO 67980
  misc_feature (1)..(2439): Ortholog of  Ceres SEQ ID NO 13596394 as cited in SEQ ID NO 68561
atggagacgaaggcgattggatttcaccacctttctccaccacaaaatattgtgttatggctcctgatcaatcttatcaatatccatctccttcgtatgaatcgatacagaccttttacgatacctgatgaggattggccgggtcctagatgcggccatactctcacggcggttttcgtcaacaattcccatcagcttatcctcttcggcggcagtactactgccgtcgccaaccataactcctccttacccgagatcagtttagatggcgtcaccaattcggtccattcttttgatgttttgaccaggaagtggacaaggcttaatccgattggtgacgttccgtctcccagggcttgtcatgctgccgctttatatggcaccttgatccttattcagggtgggattggtccatccggaccttctgatggagatgtctacatgcttgacatgactaataacaagtggattaagtttctggttggaggggagactccaagccctcgctatggccatgttatggatatagctgctcagaggtggcttgtcatattcagcgggaataatggaaatgaaattctggatgatacatgggcattggacacgcgtggaccattttcatgggacagattgaacccgtctggcaatcagccaagtgggagaatgtatgcttcaggtagttctcgagaagatggtatttttttgctctgcggtggaatagatcactcaggagtgacactgggagatacttacgggctgaaaatggatagcgataatgtttggactcctgttccagctgtagctccttccccgagatatcaacatactgcggttttcggaggttcaaaactgcatgtcattgggggtatactgaatagggctcgcctaatcgatggtgaagcagttgttgctgtgcttgatactgagactggtgaatgggtagataccaatcaaccagagacctctgcgagcggcgccaatagacaaaatcaatatcaacttatgcgacgttgtcaccatgctgctgcatcgtttggcagccacctatatgtgcatggcgggattagagaagatgtattgctcgacgatttgctagttgctgaaacatcccagtcttcaagtcctgaaccagaagaagataatcctgataattatatgttgctcgacgactatctaatggatgaacctaagcctttaagttctgaaccagaagcttcatcctttataatgaggagcacaagtgaaattgcgatggatagattggcagaggcacataacttaccaactatcgaaaatgctttttatgatagtgctattgaaggatacgttccacttcaacatggagctgagacggttggaaatcgaggtggcttggtgagaactgcaagcttggatcaatctactcaagacttgcataagaaggtcatttcgacactgttgagacctaaaacctggacgcctcctgccaacagagattttttcttgagttatttagaagttaagcatttgtgcgatgaggtagagaaaatatttatgaatgaaccaacacttcttcagctcaaagttccaatcaaagtcttcggcgatatccatggacaatacggggatttgatgcgtttatttcatgaatatggacatccttcagtggaaggagatatcacccatatagactatttgtttttgggagattatgttgaccgtggacaacacagcttggagatcatcatgttgctgtttgctttgaagatagaatatccgaagaacatccacttgattcgtggaaatcatgagtctcttgcaatgaatagaatttatggttttcttacagaatgcgaagaaagaatgggcgagtcctatgggttcgaagcatggttaaagattaatcaagtttttgattatcttccgcttgctgcacttctagaaaagaaagttttgtgtgtccatggcggaattgggagggcagttacgatcgaagaaattgaaaatatcgaaaggccggcattcccggatactggatcaatggtcttgaaagacatcttatggtcagatcctacgatgaatgacactgttttgggtatagtagacaatgccagaggagaaggtgttgtctcatttgggcctgatatagtcaaggcatttctagaaaggaatggtctggagatgatactaagagcacacgagtgtgttattgacggctttgaaagattcgctgacggacggcttataacagtcttttctgctacaaattactgtggaactgcacaaaatgcgggagcaatattggtaattggtagagatatggtaatttatcctaagctgattcatcctcaccctcctcccatctcatcttcagaagaagactatacagacaaagcatggatgcaggagctgaacatcgagatgccgcctactccagctcgaggggagtcaagtgaataa

SEQ ID NO: 86492 - protein, 812 aa, Arabidopsis thaliana
  peptide (1)..(812): Ceres Seq. ID no. 12690922
METKAIGFHHLSPPQNIVLWLLINLINIHLLRMNRYRPFTIPDEDWPGPRCGHTLTAVFVNNSHQLILFGGSTTAVANHNSSLPEISLDGVTNSVHSFDVLTRKWTRLNPIGDVPSPRACHAAALYGTLILIQGGIGPSGPSDGDVYMLDMTNNKWIKFLVGGETPSPRYGHVMDIAAQRWLVIFSGNNGNEILDDTWALDTRGPFSWDRLNPSGNQPSGRMYASGSSREDGIFLLCGGIDHSGVTLGDTYGLKMDSDNVWTPVPAVAPSPRYQHTAVFGGSKLHVIGGILNRARLIDGEAVVAVLDTETGEWVDTNQPETSASGANRQNQYQLMRRCHHAAASFGSHLYVHGGIREDVLLDDLLVAETSQSSSPEPEEDNPDNYMLLDDYLMDEPKPLSSEPEASSFIMRSTSEIAMDRLAEAHNLPTIENAFYDSAIEGYVPLQHGAETVGNRGGLVRTASLDQSTQDLHKKVISTLLRPKTWTPPANRDFFLSYLEVKHLCDEVEKIFMNEPTLLQLKVPIKVFGDIHGQYGDLMRLFHEYGHPSVEGDITHIDYLFLGDYVDRGQHSLEIIMLLFALKIEYPKNIHLIRGNHESLAMNRIYGFLTECEERMGESYGFEAWLKINQVFDYLPLAALLEKKVLCVHGGIGRAVTIEEIENIERPAFPDTGSMVLKDILWSDPTMNDTVLGIVDNARGEGVVSFGPDIVKAFLERNGLEMILRAHECVIDGFERFADGRLITVFSATNYCGTAQNAGAILVIGRDMVIYPKLIHPHPPPISSSEEDYTDKAWMQELNIEMPPTPARGESSE

SEQ ID NO: 86493 - protein, 780 aa, Arabidopsis thaliana
  peptide (1)..(780): Ceres Seq. ID no. 12690923
MNRYRPFTIPDEDWPGPRCGHTLTAVFVNNSHQLILFGGSTTAVANHNSSLPEISLDGVTNSVHSFDVLTRKWTRLNPIGDVPSPRACHAAALYGTLILIQGGIGPSGPSDGDVYMLDMTNNKWIKFLVGGETPSPRYGHVMDIAAQRWLVIFSGNNGNEILDDTWALDTRGPFSWDRLNPSGNQPSGRMYASGSSREDGIFLLCGGIDHSGVTLGDTYGLKMDSDNVWTPVPAVAPSPRYQHTAVFGGSKLHVIGGILNRARLIDGEAVVAVLDTETGEWVDTNQPETSASGANRQNQYQLMRRCHHAAASFGSHLYVHGGIREDVLLDDLLVAETSQSSSPEPEEDNPDNYMLLDDYLMDEPKPLSSEPEASSFIMRSTSEIAMDRLAEAHNLPTIENAFYDSAIEGYVPLQHGAETVGNRGGLVRTASLDQSTQDLHKKVISTLLRPKTWTPPANRDFFLSYLEVKHLCDEVEKIFMNEPTLLQLKVPIKVFGDIHGQYGDLMRLFHEYGHPSVEGDITHIDYLFLGDYVDRGQHSLEIIMLLFALKIEYPKNIHLIRGNHESLAMNRIYGFLTECEERMGESYGFEAWLKINQVFDYLPLAALLEKKVLCVHGGIGRAVTIEEIENIERPAFPDTGSMVLKDILWSDPTMNDTVLGIVDNARGEGVVSFGPDIVKAFLERNGLEMILRAHECVIDGFERFADGRLITVFSATNYCGTAQNAGAILVIGRDMVIYPKLIHPHPPPISSSEEDYTDKAWMQELNIEMPPTPARGESSE

SEQ ID NO: 86494 - protein, 665 aa, Arabidopsis thaliana
  peptide (1)..(665): Ceres Seq. ID no. 12690924
MLDMTNNKWIKFLVGGETPSPRYGHVMDIAAQRWLVIFSGNNGNEILDDTWALDTRGPFSWDRLNPSGNQPSGRMYASGSSREDGIFLLCGGIDHSGVTLGDTYGLKMDSDNVWTPVPAVAPSPRYQHTAVFGGSKLHVIGGILNRARLIDGEAVVAVLDTETGEWVDTNQPETSASGANRQNQYQLMRRCHHAAASFGSHLYVHGGIREDVLLDDLLVAETSQSSSPEPEEDNPDNYMLLDDYLMDEPKPLSSEPEASSFIMRSTSEIAMDRLAEAHNLPTIENAFYDSAIEGYVPLQHGAETVGNRGGLVRTASLDQSTQDLHKKVISTLLRPKTWTPPANRDFFLSYLEVKHLCDEVEKIFMNEPTLLQLKVPIKVFGDIHGQYGDLMRLFHEYGHPSVEGDITHIDYLFLGDYVDRGQHSLEIIMLLFALKIEYPKNIHLIRGNHESLAMNRIYGFLTECEERMGESYGFEAWLKINQVFDYLPLAALLEKKVLCVHGGIGRAVTIEEIENIERPAFPDTGSMVLKDILWSDPTMNDTVLGIVDNARGEGVVSFGPDIVKAFLERNGLEMILRAHECVIDGFERFADGRLITVFSATNYCGTAQNAGAILVIGRDMVIYPKLIHPHPPPISSSEEDYTDKAWMQELNIEMPPTPARGESSE

SEQ ID NO: 86495 - DNA, 1365 bp, Arabidopsis thaliana
  misc_feature (1)..(1365): Ceres Seq. ID no. 12690937
  misc_feature (1)..(1365): Ortholog of  Ceres SEQ ID NO 14313049 as cited in SEQ ID NO 54099
atggcggctcaacttcaaccttataacatcatcgagacctgtcacatctctcccccaaagggcaccgttgcatccaccactcttcctctcaccttcttcgatgccccctggctctctctcccactcgccgattctctcttcttcttctcttaccaaaactcaactgaatctttcctccaagactttgtacccaacctcaaacattccctctccatcactctccaacatttcttcccttacgccggtaaactgattatcccgcctcgtcccgaccctccatatttacactacaacgctggcgaagactctcttgttttcaccgtagcagagtctactgaaaccgacttcgaccaactgaagtctgattcccctaaagatatcagtgtgttgcatggcgtcttgcccaagttacctcctcctcacgtctctccggaaggaattcagatgcgaccaataatggcaatgcaagtcaccatcttccctggagctggaatctgtataggcaactcagctacacatgttgtagcagatggagtcaccttcagtcatttcatgaagtattggatgtcattgaccaaatccagcggcaaagatccggccacggttcttctaccctctctgcctattcacagctgcagaaacataatcaaggacccaggagaggtagccgcaggacatttggagcggttttggagccaaaactctgcaaaacacagttcacatgttacgcctgagaacatggtcagagccacttttacattgagccggaagcagatagacaatctcaagagttgggttacagagcagtctgagaatcaatctcctgtttctaccttcgtggtgactctagctttcatttgggtaagcttgattaagacacttgttcaagacagtgaaacagaggccaaggacgaagtctttcacttgatgatcaacgtggattgcaggaatcgtctcaagtacacacaaccaataccacaaacatactttggcaactgtatggctcctggtatcgtatcagtcaagaacacgatttatgcaatcacagcgagaatcaaagatatgttatcaagcgatctgttgaagacagcaccaagatggggacaaggagtacgtaaatgggtcatgtcccattatccaacctcaattgcaggagctccgaaattgggactgtatgacatggattttggattaggaaagccctgcaaaatggagatagtgcacatagaaacaggtggttctatcgcattctcagagtccagagacggcagcaatggagttgagattggaatagcactagagaagaagaaaatggatgtgtttgactcacttctacaaaaggggatcaagaaattcgcaacgtag

SEQ ID NO: 86496 - protein, 454 aa, Arabidopsis thaliana
  peptide (1)..(454): Ceres Seq. ID no. 12690938
MAAQLQPYNIIETCHISPPKGTVASTTLPLTFFDAPWLSLPLADSLFFFSYQNSTESFLQDFVPNLKHSLSITLQHFFPYAGKLIIPPRPDPPYLHYNAGEDSLVFTVAESTETDFDQLKSDSPKDISVLHGVLPKLPPPHVSPEGIQMRPIMAMQVTIFPGAGICIGNSATHVVADGVTFSHFMKYWMSLTKSSGKDPATVLLPSLPIHSCRNIIKDPGEVAAGHLERFWSQNSAKHSSHVTPENMVRATFTLSRKQIDNLKSWVTEQSENQSPVSTFVVTLAFIWVSLIKTLVQDSETEAKDEVFHLMINVDCRNRLKYTQPIPQTYFGNCMAPGIVSVKNTIYAITARIKDMLSSDLLKTAPRWGQGVRKWVMSHYPTSIAGAPKLGLYDMDFGLGKPCKMEIVHIETGGSIAFSESRDGSNGVEIGIALEKKKMDVFDSLLQKGIKKFAT

SEQ ID NO: 86497 - protein, 306 aa, Arabidopsis thaliana
  peptide (1)..(306): Ceres Seq. ID no. 12690939
MRPIMAMQVTIFPGAGICIGNSATHVVADGVTFSHFMKYWMSLTKSSGKDPATVLLPSLPIHSCRNIIKDPGEVAAGHLERFWSQNSAKHSSHVTPENMVRATFTLSRKQIDNLKSWVTEQSENQSPVSTFVVTLAFIWVSLIKTLVQDSETEAKDEVFHLMINVDCRNRLKYTQPIPQTYFGNCMAPGIVSVKNTIYAITARIKDMLSSDLLKTAPRWGQGVRKWVMSHYPTSIAGAPKLGLYDMDFGLGKPCKMEIVHIETGGSIAFSESRDGSNGVEIGIALEKKKMDVFDSLLQKGIKKFAT

SEQ ID NO: 86498 - protein, 302 aa, Arabidopsis thaliana
  peptide (1)..(302): Ceres Seq. ID no. 12690940
MAMQVTIFPGAGICIGNSATHVVADGVTFSHFMKYWMSLTKSSGKDPATVLLPSLPIHSCRNIIKDPGEVAAGHLERFWSQNSAKHSSHVTPENMVRATFTLSRKQIDNLKSWVTEQSENQSPVSTFVVTLAFIWVSLIKTLVQDSETEAKDEVFHLMINVDCRNRLKYTQPIPQTYFGNCMAPGIVSVKNTIYAITARIKDMLSSDLLKTAPRWGQGVRKWVMSHYPTSIAGAPKLGLYDMDFGLGKPCKMEIVHIETGGSIAFSESRDGSNGVEIGIALEKKKMDVFDSLLQKGIKKFAT

SEQ ID NO: 86499 - DNA, 1887 bp, Arabidopsis thaliana
  misc_feature (1)..(1887): Ceres Seq. ID no. 12690945
  misc_feature (1)..(1887): Ortholog of  Ceres SEQ ID NO 13657677 as cited in SEQ ID NO 66119
atgcgaagattttaccggaagcccttttctgtaccgcttctgaatcgtccgcattgttcttcacaatctcactgtttgtacaaaaatggagactttttgtcggatgattcaaagtgctcgcctttatcgagctcaaggacgagtgttagatgggtgttcaatagcagctcacttcctcctcccgaatggatagaaccttttaacgatgtctccgatttggtgaaatcgaatcgtaatctcctgccgtcgccatgggtaagccaaattctcaaccttttagatggttcggcttctatggaatcgaatctagatggtttctgccgtaagtttcttatcaaactatcgcccaattttgtttcgtttgtgttgaaatccgatgagattcgcgaaaaacctgatattgcttggagtttcttctgttggtctcgtaagcagaagaagtatactcataacctcgagtgttatgtctccttggttgatgtattggctctggcaaaagatgtggatagaattaggtttgtaagcagtgagattaagaaatttgagtttcctatgactgtttctgcggcgaatgctctgattaagagttttgggaagcttggaatggtggaggaattgttgtgggtttggcgtaaaatgaaagagaatgggattgagccgactttgtacacttataactttttgatgaacggtttagtgagcgccatgttcgttgattcggcagagcgtgtttttgaggttatggagagtggcaggatcaaaccagacattgtgacttataacacaatgatcaaaggttattgtaaagcagggcagacacagaaagctatggagaagcttagagatatggagacgagaggtcatgaggctgataagattacgtatatgactatgatccaggcttgttatgcagatagcgactttggttcttgtgtggctttgtatcaagagatggatgagaagggaattcaagtcccgcctcatgcgtttagcttagtgattggtggactttgtaaggaagggaaattgaatgaagggtatactgtttttgagaatatgatacgtaaaggatctaaaccaaatgtagctatatacacggttttgatagatggttatgcgaaaagtggaagtgttgaagacgcgataaggcttttacatagaatgatagacgaagggtttaaacccgatgtggtaacttattctgtcgtagttaatggtttgtgtaaaaacgggagagtggaagaggcattggactatttccatacttgccggtttgacggattggctatcaattcaatgttttattctagtctcattgatggtttaggaaaagcgggcagagtagatgaagccgagaggctttttgaagagatgtctgagaaaggatgcacaagggattcatactgttacaatgcactgatcgatgcgtttacaaagcatcggaaagtcgatgaagcgatagccctgtttaagagaatggaagaagaagaaggttgtgatcaaacggtttatacatacacgatactcttatccggaatgttcaaagaacatagaaacgaggaggcgttaaagctttgggacatgatgatcgataaaggcattacaccaaccgcagcttgcttcagggcgttgtcgactgggctatgtttgtccggaaaagtggcgagagcttgtaagatactggatgagttagcaccaatggagagaggaagagaagtgccagggaggatcagaacagtgatgatcaatgcgttgaggaaagtgggaaaagcagatttagcaatgaagctaatgcatagcaaaattgggattggttatgaaagaatgggtagtgttaaaaggcgtgtcaagtttacgactttacttgaaacttgttttgactcttga

SEQ ID NO: 86500 - protein, 628 aa, Arabidopsis thaliana
  peptide (1)..(628): Ceres Seq. ID no. 12690946
MRRFYRKPFSVPLLNRPHCSSQSHCLYKNGDFLSDDSKCSPLSSSRTSVRWVFNSSSLPPPEWIEPFNDVSDLVKSNRNLLPSPWVSQILNLLDGSASMESNLDGFCRKFLIKLSPNFVSFVLKSDEIREKPDIAWSFFCWSRKQKKYTHNLECYVSLVDVLALAKDVDRIRFVSSEIKKFEFPMTVSAANALIKSFGKLGMVEELLWVWRKMKENGIEPTLYTYNFLMNGLVSAMFVDSAERVFEVMESGRIKPDIVTYNTMIKGYCKAGQTQKAMEKLRDMETRGHEADKITYMTMIQACYADSDFGSCVALYQEMDEKGIQVPPHAFSLVIGGLCKEGKLNEGYTVFENMIRKGSKPNVAIYTVLIDGYAKSGSVEDAIRLLHRMIDEGFKPDVVTYSVVVNGLCKNGRVEEALDYFHTCRFDGLAINSMFYSSLIDGLGKAGRVDEAERLFEEMSEKGCTRDSYCYNALIDAFTKHRKVDEAIALFKRMEEEEGCDQTVYTYTILLSGMFKEHRNEEALKLWDMMIDKGITPTAACFRALSTGLCLSGKVARACKILDELAPMERGREVPGRIRTVMINALRKVGKADLAMKLMHSKIGIGYERMGSVKRRVKFTTLLETCFDS

SEQ ID NO: 86501 - protein, 530 aa, Arabidopsis thaliana
  peptide (1)..(530): Ceres Seq. ID no. 12690947
MESNLDGFCRKFLIKLSPNFVSFVLKSDEIREKPDIAWSFFCWSRKQKKYTHNLECYVSLVDVLALAKDVDRIRFVSSEIKKFEFPMTVSAANALIKSFGKLGMVEELLWVWRKMKENGIEPTLYTYNFLMNGLVSAMFVDSAERVFEVMESGRIKPDIVTYNTMIKGYCKAGQTQKAMEKLRDMETRGHEADKITYMTMIQACYADSDFGSCVALYQEMDEKGIQVPPHAFSLVIGGLCKEGKLNEGYTVFENMIRKGSKPNVAIYTVLIDGYAKSGSVEDAIRLLHRMIDEGFKPDVVTYSVVVNGLCKNGRVEEALDYFHTCRFDGLAINSMFYSSLIDGLGKAGRVDEAERLFEEMSEKGCTRDSYCYNALIDAFTKHRKVDEAIALFKRMEEEEGCDQTVYTYTILLSGMFKEHRNEEALKLWDMMIDKGITPTAACFRALSTGLCLSGKVARACKILDELAPMERGREVPGRIRTVMINALRKVGKADLAMKLMHSKIGIGYERMGSVKRRVKFTTLLETCFDS

SEQ ID NO: 86502 - protein, 444 aa, Arabidopsis thaliana
  peptide (1)..(444): Ceres Seq. ID no. 12690948
MTVSAANALIKSFGKLGMVEELLWVWRKMKENGIEPTLYTYNFLMNGLVSAMFVDSAERVFEVMESGRIKPDIVTYNTMIKGYCKAGQTQKAMEKLRDMETRGHEADKITYMTMIQACYADSDFGSCVALYQEMDEKGIQVPPHAFSLVIGGLCKEGKLNEGYTVFENMIRKGSKPNVAIYTVLIDGYAKSGSVEDAIRLLHRMIDEGFKPDVVTYSVVVNGLCKNGRVEEALDYFHTCRFDGLAINSMFYSSLIDGLGKAGRVDEAERLFEEMSEKGCTRDSYCYNALIDAFTKHRKVDEAIALFKRMEEEEGCDQTVYTYTILLSGMFKEHRNEEALKLWDMMIDKGITPTAACFRALSTGLCLSGKVARACKILDELAPMERGREVPGRIRTVMINALRKVGKADLAMKLMHSKIGIGYERMGSVKRRVKFTTLLETCFDS

SEQ ID NO: 86503 - DNA, 750 bp, Arabidopsis thaliana
  misc_feature (1)..(750): Ceres Seq. ID no. 12690952
  misc_feature (1)..(750): Ortholog of  Ceres SEQ ID NO 13594176 as cited in SEQ ID NO 59144
atgaagcgtgggaaaggcgagaaaaaggcaacaaagagccgcgatggcagcggtcaagtagttccgctcactgaaccagtggttacagctacgggtatggttggaacaagatcatggataggagggctcttcacacgctccaatagacgtcaagacaaggcagtcgactacactttgtctcctcttcaggaggaaagacttcaaaggctgcaagatcgtatggttgtacctttcgacgagacacgtcctgatcatcaggaatcacttaaagcattgtggaacgtcgcgtttccgaatgttcatctcacgggtttagtaacagaacaatggaaagaaatgggatggcaaggtcccaatccatctaccgatttcaggggttgcggatttatcgctctagaaaatttactattttctgcaagaacttatccggtttgtttccggaggctattgttaaaacaaagaggcgaccgggcaaagtgggagtacccttttgcagtggccggaatcaacatctccttcatgttgatccaaatgctcgatttacaaaataatcaagacgagagggcattcgatgtactatactgtatagctttcgcgatgatggatgctcaatggcttgcaatgcacgcttcttacatggaattcaatgaagtattacaagcaactcggaatcagctggagagagagctttctttggatgatattcatcggattcaagatcttcctgcctacaatctcttgttccaatag

SEQ ID NO: 86504 - protein, 249 aa, Arabidopsis thaliana
  peptide (1)..(249): Ceres Seq. ID no. 12690953
MKRGKGEKKATKSRDGSGQVVPLTEPVVTATGMVGTRSWIGGLFTRSNRRQDKAVDYTLSPLQEERLQRLQDRMVVPFDETRPDHQESLKALWNVAFPNVHLTGLVTEQWKEMGWQGPNPSTDFRGCGFIALENLLFSARTYPVCFRRLLLKQRGDRAKWEYPFAVAGINISFMLIQMLDLQNNQDERAFDVLYCIAFAMMDAQWLAMHASYMEFNEVLQATRNQLERELSLDDIHRIQDLPAYNLLFQ

SEQ ID NO: 86505 - protein, 217 aa, Arabidopsis thaliana
  peptide (1)..(217): Ceres Seq. ID no. 12690954
MVGTRSWIGGLFTRSNRRQDKAVDYTLSPLQEERLQRLQDRMVVPFDETRPDHQESLKALWNVAFPNVHLTGLVTEQWKEMGWQGPNPSTDFRGCGFIALENLLFSARTYPVCFRRLLLKQRGDRAKWEYPFAVAGINISFMLIQMLDLQNNQDERAFDVLYCIAFAMMDAQWLAMHASYMEFNEVLQATRNQLERELSLDDIHRIQDLPAYNLLFQ

SEQ ID NO: 86506 - protein, 176 aa, Arabidopsis thaliana
  peptide (1)..(176): Ceres Seq. ID no. 12690955
MVVPFDETRPDHQESLKALWNVAFPNVHLTGLVTEQWKEMGWQGPNPSTDFRGCGFIALENLLFSARTYPVCFRRLLLKQRGDRAKWEYPFAVAGINISFMLIQMLDLQNNQDERAFDVLYCIAFAMMDAQWLAMHASYMEFNEVLQATRNQLERELSLDDIHRIQDLPAYNLLFQ

SEQ ID NO: 86507 - DNA, 1428 bp, Arabidopsis thaliana
  misc_feature (1)..(1428): Ceres Seq. ID no. 12690982
  misc_feature (1)..(1428): Ortholog of  Ceres SEQ ID NO 14304969 as cited in SEQ ID NO 53193
  misc_feature (1)..(1428): Ortholog of  Ceres SEQ ID NO 14314851 as cited in SEQ ID NO 54014
  misc_feature (1)..(1428): Ortholog of  Ceres SEQ ID NO 15227214 as cited in SEQ ID NO 55368
  misc_feature (1)..(1428): Ortholog of  Ceres SEQ ID NO 13638897 as cited in SEQ ID NO 55839
  misc_feature (1)..(1428): Ortholog of  Ceres SEQ ID NO 15177710 as cited in SEQ ID NO 59217
  misc_feature (1)..(1428): Ortholog of  Ceres SEQ ID NO 13596958 as cited in SEQ ID NO 63319
  misc_feature (1)..(1428): Ortholog of  Ceres SEQ ID NO 12614573 as cited in SEQ ID NO 68344
  misc_feature (1)..(1428): Ortholog of  Ceres SEQ ID NO 12614814 as cited in SEQ ID NO 68816
  misc_feature (1)..(1428): Ortholog of  Ceres SEQ ID NO 13624040 as cited in SEQ ID NO 0
gtaatgataattaagcttttttctgctttaatggaaggaccttgacacttctctctctctttctctttgctattcatcttctacagtttcttaaaaattatactcttcttctccaaaatatctcagactctcttatttttgatcgtcttcttcttcttcgttgtgagcttccatttttcatccaggatttgttttttccgtttgaggtaaagcagctttgcagttaaagaaaccttgagtatccaatgtccccggaagaggagctacagagcaatgtatcggtggctagttcttcacctactagcaattgcatctccaggaacactctaggaggacttaaagagcataactacttgggtctctctgattgttcttctgttggaagctctactctctctccccttgctgaagatgacaaagctactatcagcctcaaggctacggagctgacacttggtcttcctggatcacaatctcctgcgagagacacagagcttaaccttttgagcccagcaaagctagatgagaagccattctttcctttgcttccttctaaagatgagatatgctcctcctcgcaaaagaacaatgcatcgggaaacaaaagaggcttttctgacacaatggatcagtttgctgaagctaaaagttcagtgtatactgagaaaaactggatgttccctgaagcagcagccacccagtctgtaacaaagaaagatgtgccacaaaacatacccaaaggacagtctagcactacaaacaatagctctagtccacctgcagccaaggcacaaattgtcggttggcctccagtgagatcctacaggaagaacacattggccactacttgtaagaacagtgacgaagttgatgggaggccaggttctggggctctcttcgtgaaggtcagtatggatggtgctccttatctgaggaaagttgacctgaggagctacactaactacggggagctttcttcagccttggagaaaatgttcaccactttcactcttggtcaatgtggatctaatggagctgctgggaaggatatgcttagtgagaccaagctcaaggatcttttgaatggaaaagactatgtgctcacttatgaggataaggatggtgactggatgcttgttggagatgttccgtgggagatgtttattgatgtctgcaagaagctgaagataatgaaagggtgtgatgctattggctgcagctccgagagcaatggagaaatcgaagatgagagcttaaaagatggaacatgacaaagctttctaactatacaaaatatgtgcgatcttttggtggtgtttttaaatttcaaaacatcaatatctttagtttctgaatttttaaaatgaagtaagtaagactacgaatgtaaggaaatgaagaagaattaaaaatgatctatttttgttg

SEQ ID NO: 86508 - protein, 341 aa, Arabidopsis thaliana
  peptide (1)..(341): Ceres Seq. ID no. 12690983
MSPEEELQSNVSVASSSPTSNCISRNTLGGLKEHNYLGLSDCSSVGSSTLSPLAEDDKATISLKATELTLGLPGSQSPARDTELNLLSPAKLDEKPFFPLLPSKDEICSSSQKNNASGNKRGFSDTMDQFAEAKSSVYTEKNWMFPEAAATQSVTKKDVPQNIPKGQSSTTNNSSSPPAAKAQIVGWPPVRSYRKNTLATTCKNSDEVDGRPGSGALFVKVSMDGAPYLRKVDLRSYTNYGELSSALEKMFTTFTLGQCGSNGAAGKDMLSETKLKDLLNGKDYVLTYEDKDGDWMLVGDVPWEMFIDVCKKLKIMKGCDAIGCSSESNGEIEDESLKDGT

SEQ ID NO: 86509 - protein, 215 aa, Arabidopsis thaliana
  peptide (1)..(215): Ceres Seq. ID no. 12690984
MDQFAEAKSSVYTEKNWMFPEAAATQSVTKKDVPQNIPKGQSSTTNNSSSPPAAKAQIVGWPPVRSYRKNTLATTCKNSDEVDGRPGSGALFVKVSMDGAPYLRKVDLRSYTNYGELSSALEKMFTTFTLGQCGSNGAAGKDMLSETKLKDLLNGKDYVLTYEDKDGDWMLVGDVPWEMFIDVCKKLKIMKGCDAIGCSSESNGEIEDESLKDGT

SEQ ID NO: 86510 - protein, 198 aa, Arabidopsis thaliana
  peptide (1)..(198): Ceres Seq. ID no. 12690985
MFPEAAATQSVTKKDVPQNIPKGQSSTTNNSSSPPAAKAQIVGWPPVRSYRKNTLATTCKNSDEVDGRPGSGALFVKVSMDGAPYLRKVDLRSYTNYGELSSALEKMFTTFTLGQCGSNGAAGKDMLSETKLKDLLNGKDYVLTYEDKDGDWMLVGDVPWEMFIDVCKKLKIMKGCDAIGCSSESNGEIEDESLKDGT

SEQ ID NO: 86511 - DNA, 1572 bp, Arabidopsis thaliana
  misc_feature (1)..(1572): Ceres Seq. ID no. 12690988
  misc_feature (1)..(1572): Ortholog of  Ceres SEQ ID NO 12605597 as cited in SEQ ID NO 20378
  misc_feature (1)..(1572): Ortholog of  Ceres SEQ ID NO 13494050 as cited in SEQ ID NO 20553
  misc_feature (1)..(1572): Ortholog of  Ceres SEQ ID NO 15177308 as cited in SEQ ID NO 52713
aaagctccgttattcaagattattccgataatgcagtcactctccaccccacacaccatctctcttcttctccccagaacctctccgtctcgtctttctccctctcttcactcccttgctttccccactcgattacggtctctttcctattcttctcaaacgtcgatcctccccgatgccggcgatgatttcattgtcggtgactgtctcgtctacgaggacggcgtcttcgaagacccttaccttgataaggaggtcactcaggttgcgaagcaggagcgcaagaagaatcggcgtggcggggctaagagattagatgaatccgagattgagcccgagaacctcgtgccagaggaatggagggatattcaggcggaggtgaatctgacgaagaaggacaagcgcaaaatagcgcaggagatggagttcggggttcgggtggagaagaagaggcaagggctaattccgctgaggaaagttgacttgaatgactttctcacgtacaaggaagccaagttggctcaattgaggcctgtcattctcgataaaccgggaaatttctccgacgacagtggagcgtcaagcgatggagagaccgctgtatcatctcccagcgagcgagtggctcctaagaaccctagatgggcagtttacggaaagggattcgaccacgttgccaagttcttcaatagcgacaagtacgatcccagcgacaagaaatccgacggccctcgaaagctgctttcaaaagaagagaagtttatgctcaatagccggaatcctgacctagccgttgccacatcaaaaaaatggcttcctcttcacacactggcagcatgtggagagttttatctggttgattccttgctaaagcacaatcttgatatcaatgcaaccgatgtgggcggcttgacagtacttcaccgagcaatcattggtaagaagcaggctattactaactacctgctgagggaatcggcaaatccatttgttcttgatgacgaaggtgcgaccttgatgcactatgctgtgcaaacagcatcagctcccacaataaaacttctcctactgtataacgctgatataaacgctcaggacagggacgggtggactccactgcacgttgcagtacaggccagaagaagcgacattgtaaagcttcttttgataaaaggggcggacatagaagtgaagaacaaggatgggttaactccgcttgggctttgcctctaccttggaagagagataaggacgtatgaggtgatgaagctgttgaaagagtttccacttagcagacacaagaagagattggtaacaacagatgaagatattgaatagtcctttcaatttcagcttgaagtacactcacttatgagaacctgagaaaaggagatggaggtaaaggtgatgattagggcattggaacctcggagtcggagtgggtccactgtctcacttccttaaatttggtttgctgttagtcttatccatcgattttggatatttatcacaacttgatccattcttaaagaaaatatctgaaaataaataaaaagtaatacatatatatat

SEQ ID NO: 86512 - protein, 445 aa, Arabidopsis thaliana; identical to SEQ ID NO: 20554
  peptide (1)..(445): Ceres Seq. ID no. 12690989

SEQ ID NO: 86513 - protein, 435 aa, Arabidopsis thaliana; identical to SEQ ID NO: 20555
  peptide (1)..(435): Ceres Seq. ID no. 12690990

SEQ ID NO: 86514 - protein, 305 aa, Arabidopsis thaliana; identical to SEQ ID NO: 20556
  peptide (1)..(305): Ceres Seq. ID no. 12690991

SEQ ID NO: 86515 - DNA, 1364 bp, Arabidopsis thaliana
  misc_feature (1)..(1364): Ceres Seq. ID no. 12691000
  misc_feature (1)..(1364): Ortholog of  Ceres SEQ ID NO 15177328 as cited in SEQ ID NO 52523
  misc_feature (1)..(1364): Ortholog of  Ceres SEQ ID NO 13655881 as cited in SEQ ID NO 64426
agtcgagatggcctctcagtctcaggttttggtggaagagaaatcgagtgttagaatcttgacactaaacagaccaaagcagctgaatgctctgtccttccacatgatctctcgattgctgcaactgttccttgcatttgaggaggaccctagtgtgaaacttgtcatcctaaagggtcatgggagagccttttgtgctggtggcgatgttgcagctgttgttcgtgacatcaatcaaggtaactggagactcggtgccaattacttctcatctgaatacatgctcaactatgttatggccacatatagcaaagctcaggtttcaatcttgaatggtatcgtcatgggaggcggagctggtgtatccgtccatggtcgatttcgtattgcaactgagaacacggtttttgccatgcctgagacagctctggggctctttccagatgtaggcgcctcctacttcttgtcaaggctccctggtttttttggggagtatgttggcctcacaggagctagattagatggtgctgaaatgcttgcttgtggccttgcaactcattttgtgccttcaacgaggttgactgcattagaagcagatctttgcagaattaattcaaatgatccaacttttgcctcaacaattctcgatgcatacacccagcatccgcgcctgaaacagcagagtgcttaccgcaggttagatgttattgataggtgtttctcaaggagaacagtcgaagaaattatatctgcacttgagagagaggccactcaagaagcagatggttggatctcagctaccattcaagcattgaagaagggttcaccagcaagccttaaaatctctcttagatcgataagggaagggcgattgcagggggtggggcagtgtcttatccgcgagtatagaatggtgtgtcatgtgatgaagggagaaatcagcaaagattttgtggaggttttgcaagctttttccatctgaaaccgtctttgttgtagaccgtagttacaacagcgtgtctttacttatgcaggggtgcagagccatattggtagacaaagataagaacccaaagtgggagccaaggcgactggaggacatgaaggatagcatggtggagcagtacttcgagagagtggaacgggaggatgatctaaagcttccgccaaggaataacttgcctgctttagggatcgcaaagctgtgaagtggagaaggtgatggagcactattgtttacgtctgtgggaaagaaaaaagaaaataaatgtaacaacacttgtgttgaataggacttgcatacattacataaatcattattgtatttgagaattgacaccaaagcagcagagcagaattgtgtt

SEQ ID NO: 86516 - protein, 326 aa, Arabidopsis thaliana
  peptide (1)..(326): Ceres Seq. ID no. 12691001
VEMASQSQVLVEEKSSVRILTLNRPKQLNALSFHMISRLLQLFLAFEEDPSVKLVILKGHGRAFCAGGDVAAVVRDINQGNWRLGANYFSSEYMLNYVMATYSKAQVSILNGIVMGGGAGVSVHGRFRIATENTVFAMPETALGLFPDVGASYFLSRLPGFFGEYVGLTGARLDGAEMLACGLATHFVPSTRLTALEADLCRINSNDPTFASTILDAYTQHPRLKQQSAYRRLDVIDRCFSRRTVEEIISALEREATQEADGWISATIQALKKGSPASLKISLRSIREGRLQGVGQCLIREYRMVCHVMKGEISKDFVEVLQAFSI

SEQ ID NO: 86517 - protein, 324 aa, Arabidopsis thaliana
  peptide (1)..(324): Ceres Seq. ID no. 12691002
MASQSQVLVEEKSSVRILTLNRPKQLNALSFHMISRLLQLFLAFEEDPSVKLVILKGHGRAFCAGGDVAAVVRDINQGNWRLGANYFSSEYMLNYVMATYSKAQVSILNGIVMGGGAGVSVHGRFRIATENTVFAMPETALGLFPDVGASYFLSRLPGFFGEYVGLTGARLDGAEMLACGLATHFVPSTRLTALEADLCRINSNDPTFASTILDAYTQHPRLKQQSAYRRLDVIDRCFSRRTVEEIISALEREATQEADGWISATIQALKKGSPASLKISLRSIREGRLQGVGQCLIREYRMVCHVMKGEISKDFVEVLQAFSI

SEQ ID NO: 86518 - protein, 292 aa, Arabidopsis thaliana
  peptide (1)..(292): Ceres Seq. ID no. 12691003
MISRLLQLFLAFEEDPSVKLVILKGHGRAFCAGGDVAAVVRDINQGNWRLGANYFSSEYMLNYVMATYSKAQVSILNGIVMGGGAGVSVHGRFRIATENTVFAMPETALGLFPDVGASYFLSRLPGFFGEYVGLTGARLDGAEMLACGLATHFVPSTRLTALEADLCRINSNDPTFASTILDAYTQHPRLKQQSAYRRLDVIDRCFSRRTVEEIISALEREATQEADGWISATIQALKKGSPASLKISLRSIREGRLQGVGQCLIREYRMVCHVMKGEISKDFVEVLQAFSI

SEQ ID NO: 86519 - DNA, 865 bp, Arabidopsis thaliana
  misc_feature (1)..(865): Ceres Seq. ID no. 12691011
  misc_feature (1)..(865): Ortholog of  Ceres SEQ ID NO 14311659 as cited in SEQ ID NO 51212
  misc_feature (1)..(865): Ortholog of  Ceres SEQ ID NO 12635180 as cited in SEQ ID NO 0
accaaaaaaaaaactcaagagagactttgtggccatggcagcctctctccaatccaccgctacattcctccagtcggcgaagatcgccaccgctccttctcgcggaagttctcacctccgatcgactcaagccgtcggcaaatcttttgggctcgaaacttcctcggctcgcctcacttgctccttccagtctgactttaaggacttcaccggtaaatgctccgacgctgtcaaaatcgccggattcgctcttgccacctctgctctcgtcgtctcgggagcaagtgcggagggagctccaaagagattgacctatgatgagatcgaaggacccttcgaggttgcttcagacggaagcgtcaatttcaaggaagaagatggaatcgactatgctgcagtcacagtccaacttccaggaggtgaacgtgtgccattccttttcacagtcaaacagcttgacgcctcaggcaaaccagacagcttcaccggaaaattcttggttccatcgtaccgtggctcttccttcttggacccaaagggccgtggtggatccacaggatatgacaacgccgtggcattgccagctggaggcagaggagacgaggaggagcttgtaaaggagaacgtgaagaacactgccgcttcagtgggagagatcactctgaaagtgacaaagagcaagccggagacaggagaggtgatcggagtgttcgagagtcttcagccgtcggatactgacttgggtgctaaggtaccaaaggatgtgaagatccaaggggtgtggtatggtcaacttgagtgatcatgttattatattttccgttgattgtgtttgatgataatgataacatcttttgatgctttc

SEQ ID NO: 86520 - protein, 266 aa, Arabidopsis thaliana
  peptide (1)..(266): Ceres Seq. ID no. 12691012
PKKKLKRDFVAMAASLQSTATFLQSAKIATAPSRGSSHLRSTQAVGKSFGLETSSARLTCSFQSDFKDFTGKCSDAVKIAGFALATSALVVSGASAEGAPKRLTYDEIEGPFEVASDGSVNFKEEDGIDYAAVTVQLPGGERVPFLFTVKQLDASGKPDSFTGKFLVPSYRGSSFLDPKGRGGSTGYDNAVALPAGGRGDEEELVKENVKNTAASVGEITLKVTKSKPETGEVIGVFESLQPSDTDLGAKVPKDVKIQGVWYGQLE

SEQ ID NO: 86521 - protein, 255 aa, Arabidopsis thaliana
  peptide (1)..(255): Ceres Seq. ID no. 12691013
MAASLQSTATFLQSAKIATAPSRGSSHLRSTQAVGKSFGLETSSARLTCSFQSDFKDFTGKCSDAVKIAGFALATSALVVSGASAEGAPKRLTYDEIEGPFEVASDGSVNFKEEDGIDYAAVTVQLPGGERVPFLFTVKQLDASGKPDSFTGKFLVPSYRGSSFLDPKGRGGSTGYDNAVALPAGGRGDEEELVKENVKNTAASVGEITLKVTKSKPETGEVIGVFESLQPSDTDLGAKVPKDVKIQGVWYGQLE

SEQ ID NO: 86522 - DNA, 1176 bp, Arabidopsis thaliana
  misc_feature (1)..(1176): Ceres Seq. ID no. 12691014
  misc_feature (1)..(1176): Ortholog of  Ceres SEQ ID NO 14312416 as cited in SEQ ID NO 55270
  misc_feature (1)..(1176): Ortholog of  Ceres SEQ ID NO 15225352 as cited in SEQ ID NO 67888
cttcaaacgctcggaagtttccgctttggattcctgtcaccggcgatttcgtgggatgataacgacgccgagctatatttcgtgactgaagcaaagtgatgattcttcgattgaaagaccaaacgctcatcaaaatcaattcaactcgttcgtacttatcttccttagttttccgacgagattctcactcgcaggctcggacaaaacccgatcacgaccgccggagaagaggatacgagagggatgtgagaatcgaggagaagaaggaacacgatggattgtttctgtgcaagagcaaaggccaacaccttcttaccaacactagaatcctcgactccattgttcgaagctccgatatcaggccgactgatacagtcttggagatcggacctggcactggaaatctcacgatgaaacttcttgaagctgctcagaatgtcgtagccgtcgagctagataagcgtatggtggagattctacgcaaaagggtttctgaccatggttttgcagataaacttacgattattcaaaaagatgttctgaagacagattttcctcactttgatctcgtggttgcaaatattccttacaacatatcttcccctcttgtggccaagcttgtatacggctccaatacttttcgaagcgccacactcttgcttcaaaaggaattctcccgccggctcctggcaaatccaggagattccgatttcaatagattggcggtgaacgttaagattacaccaaaggagataataccggatgttaatgttcaagaatggttggcattcactcgcacgtgtttcgggaagaagaataagacgcttggttccatgtttaggcagaagaaaaaggtcatggaattgcagagtttgtctgcagggaggcatggctcgaatgttgaggttatgaatcagacaggtggtgattctgacagtgatgttgaagaagatgggaaagatgatttgttgtgtttggatacagatgcaagtatgttcaaggaaagggtaattgaaattctgagaacaaatgggttcgaagagaagagaccatccaagctttcacatcgtgagttgttacatttgctttctttgtttaaccaagctggaatttttttccatgatattacatcattacaaatggatctacacgaataatgataagttttctttaatg

SEQ ID NO: 86523 - protein, 352 aa, Arabidopsis thaliana
  peptide (1)..(352): Ceres Seq. ID no. 12691015
MILRLKDQTLIKINSTRSYLSSLVFRRDSHSQARTKPDHDRRRRGYERDVRIEEKKEHDGLFLCKSKGQHLLTNTRILDSIVRSSDIRPTDTVLEIGPGTGNLTMKLLEAAQNVVAVELDKRMVEILRKRVSDHGFADKLTIIQKDVLKTDFPHFDLVVANIPYNISSPLVAKLVYGSNTFRSATLLLQKEFSRRLLANPGDSDFNRLAVNVKITPKEIIPDVNVQEWLAFTRTCFGKKNKTLGSMFRQKKKVMELQSLSAGRHGSNVEVMNQTGGDSDSDVEEDGKDDLLCLDTDASMFKERVIEILRTNGFEEKRPSKLSHRELLHLLSLFNQAGIFFHDITSLQMDLHE

SEQ ID NO: 86524 - protein, 248 aa, Arabidopsis thaliana
  peptide (1)..(248): Ceres Seq. ID no. 12691016
MKLLEAAQNVVAVELDKRMVEILRKRVSDHGFADKLTIIQKDVLKTDFPHFDLVVANIPYNISSPLVAKLVYGSNTFRSATLLLQKEFSRRLLANPGDSDFNRLAVNVKITPKEIIPDVNVQEWLAFTRTCFGKKNKTLGSMFRQKKKVMELQSLSAGRHGSNVEVMNQTGGDSDSDVEEDGKDDLLCLDTDASMFKERVIEILRTNGFEEKRPSKLSHRELLHLLSLFNQAGIFFHDITSLQMDLHE

SEQ ID NO: 86525 - protein, 230 aa, Arabidopsis thaliana
  peptide (1)..(230): Ceres Seq. ID no. 12691017
MVEILRKRVSDHGFADKLTIIQKDVLKTDFPHFDLVVANIPYNISSPLVAKLVYGSNTFRSATLLLQKEFSRRLLANPGDSDFNRLAVNVKITPKEIIPDVNVQEWLAFTRTCFGKKNKTLGSMFRQKKKVMELQSLSAGRHGSNVEVMNQTGGDSDSDVEEDGKDDLLCLDTDASMFKERVIEILRTNGFEEKRPSKLSHRELLHLLSLFNQAGIFFHDITSLQMDLHE

SEQ ID NO: 86526 - DNA, 1239 bp, Arabidopsis thaliana
  misc_feature (1)..(1239): Ceres Seq. ID no. 12691088
  misc_feature (1)..(1239): Ortholog of  Ceres SEQ ID NO 13623325 as cited in SEQ ID NO 357
  misc_feature (1)..(1239): Ortholog of  Ceres SEQ ID NO 13635680 as cited in SEQ ID NO 578
  misc_feature (1)..(1239): Ortholog of  Ceres SEQ ID NO 13582040 as cited in SEQ ID NO 51006
atgactggtctgaactcaaggcacccgaaagttgatctcaaaccacttcctaaaggtataaggtacgcattccttggtccaaactctacttaccctgtgatcattaatgcagagttaaatgatgacgaagtgaacctgctattatctgaacttagaaagtataggagagcaattggttattcattatctgacattaatggaatttcacctagtttatgcaaccataggatctaccttgaaaacgaattctattctagcattgaaccacagaggaggttaaatctcaacttgaaagaagtagtgaaaaaagaaattttgaaactgcttgatgttggtgtcatctaccctatctctgatagtacttgggtttctccagtgcattgcgtccctaaaaaaggtggaatgattgtagttaaaaatgaaaaggatgaactgatccctactagaactataactggtcatataatgtgcattgattataggaagataaatgctgcatgtaggaaagatcaatttcttttatcattcattgatcaaatgcttaaacgcctagccaatcatccatactattgctttcttgatggatatagtggttactttcaaataccaattcaccctaatgatcaagagaaaaccactttcacatgtcctcatggaacttttgcttataagagaatgccatttggtttatgcaatgctcctgcaacatttcagaggtgtatgacctctatattttcagatttaatcgaggagatggtggaggtcttcatggacgatttttcggtctatggcccctctttctcctcatgtttgttgaatcttggcagggtattgaccaggtgcgaagagacgaaccttgttctcaattgggaaaagtgtcatttcatggtgaaggaaggcatagtgttgtgtcacaagatatcagaaaagggcatagaggttgacaaaggaaaaattgaagtgatgatgcagttgcagccaccaaaaacggtgaaggacatcagaagtttcattggtcatgctgggttctacggaagatttattaaagacttctccaagatagccaggccggacttctttagaactaggagaaagttctgggccgaatttggaaatcttcaaaacatcaataagttgcgcaattcaattgccgtcaggtattggtgtctctcgacaccagggattgtgtcgatcgacacctacgtcaattttcgtctccggattactgccgtagcttaa

SEQ ID NO: 86527 - protein, 412 aa, Arabidopsis thaliana
  peptide (1)..(412): Ceres Seq. ID no. 12691089
MTGLNSRHPKVDLKPLPKGIRYAFLGPNSTYPVIINAELNDDEVNLLLSELRKYRRAIGYSLSDINGISPSLCNHRIYLENEFYSSIEPQRRLNLNLKEVVKKEILKLLDVGVIYPISDSTWVSPVHCVPKKGGMIVVKNEKDELIPTRTITGHIMCIDYRKINAACRKDQFLLSFIDQMLKRLANHPYYCFLDGYSGYFQIPIHPNDQEKTTFTCPHGTFAYKRMPFGLCNAPATFQRCMTSIFSDLIEEMVEVFMDDFSVYGPSFSSCLLNLGRVLTRCEETNLVLNWEKCHFMVKEGIVLCHKISEKGIEVDKGKIEVMMQLQPPKTVKDIRSFIGHAGFYGRFIKDFSKIARPDFFRTRRKFWAEFGNLQNINKLRNSIAVRYWCLSTPGIVSIDTYVNFRLRITAVA

SEQ ID NO: 86528 - protein, 278 aa, Arabidopsis thaliana
  peptide (1)..(278): Ceres Seq. ID no. 12691090
MIVVKNEKDELIPTRTITGHIMCIDYRKINAACRKDQFLLSFIDQMLKRLANHPYYCFLDGYSGYFQIPIHPNDQEKTTFTCPHGTFAYKRMPFGLCNAPATFQRCMTSIFSDLIEEMVEVFMDDFSVYGPSFSSCLLNLGRVLTRCEETNLVLNWEKCHFMVKEGIVLCHKISEKGIEVDKGKIEVMMQLQPPKTVKDIRSFIGHAGFYGRFIKDFSKIARPDFFRTRRKFWAEFGNLQNINKLRNSIAVRYWCLSTPGIVSIDTYVNFRLRITAVA

SEQ ID NO: 86529 - protein, 257 aa, Arabidopsis thaliana
  peptide (1)..(257): Ceres Seq. ID no. 12691091
MCIDYRKINAACRKDQFLLSFIDQMLKRLANHPYYCFLDGYSGYFQIPIHPNDQEKTTFTCPHGTFAYKRMPFGLCNAPATFQRCMTSIFSDLIEEMVEVFMDDFSVYGPSFSSCLLNLGRVLTRCEETNLVLNWEKCHFMVKEGIVLCHKISEKGIEVDKGKIEVMMQLQPPKTVKDIRSFIGHAGFYGRFIKDFSKIARPDFFRTRRKFWAEFGNLQNINKLRNSIAVRYWCLSTPGIVSIDTYVNFRLRITAVA

SEQ ID NO: 86530 - DNA, 2127 bp, Arabidopsis thaliana
  misc_feature (1)..(2127): Ceres Seq. ID no. 12691276
  misc_feature (1)..(2127): Ortholog of  Ceres SEQ ID NO 13654989 as cited in SEQ ID NO 63117
  misc_feature (1)..(2127): Ortholog of  Ceres SEQ ID NO 13584744 as cited in SEQ ID NO 69137
atggcttcaccgtactcgtccgacgatatccattctccggtgaactcaacggtcgttgcaatagacaaagagaaacatagttcttacgctgttcgttgggccgtcgaccatctcctcaatatgattcacaatcccgtcatgattcttgtccatgttcgtaccaaaaattcaaaccatggagccaacttgaacaatgatgatctaaatcagctttttattccatatcgaggatattgtgcgcgaaaagggatttctatgacggaggttgttctagacgattccgacgtagcaaaaacaatcttggattacgttaataacaacctggttaacaatcttgtattgggagcatccacgaagaacaccttcgctaggtcttttatgtttagtaaaccacatgaggtgcaatctagcataatgaaatcgacgcctgatttttgttcggtgtatgtcatttctaaaggagggaaagttcagtcttcccgaccagctcaaagacctatcaccaatacgcttgccccgcctcgtgttccatcctctggctttttaatccaatctttatccgatagcgagcaagatctcatacctagggtccagcgtagtgcaaggaacaaacctaatgagactacttatccgcataatcgtgccgccttcaacacgacgcaaaaaggttacaaaagccctataaatgggtcgatggatttcaacaacggctttaatcaagctgccttccaaagaaatcccacgttacaaagttcgttttctgatgaatctgatggtgggtttggagtgatgggttcagttgatctctcttctcaaaatagtatggatttttatcatggtgcatcgagttcttcagaagagtcaattccacaatcaactaaagatattgaagctgagatgagaaggctaaagcttgaacttaagcaaactatggacatgtatagctcagcttgtaaagaagcacttacggcaaaaagaaaggcaaacgagctaaatcaatggaagatagaagaagctcgtaaattcgagaaagcgaggctttctgaagaagcagcattggcagttgctgaaatcgagaaagcaaagtgtagaacagccgtagaagcagctgagaaagctcaaagaatggctgaactagaaggacaaagaaggaagcaagcagagatgaaagctgtaagtgaagaaaaggacaaagaccgcgcagtgagtgctttggcacataacgatgttcgctacagaaaatatagtatagaagagatcgaagaagctacagagaggtttgcaaatcataggaagattggtgaaggaggatatggacctgtgtacaatggtgaacttgaccacactcctgttgccattaaagttttaagacctgatgctgctcaaggaaaaaaacaatttcaacaagaagttgaggttctatgttccataaggcatcctcacatggttcttctccttggtgcatgtcctgaatatggatgtttggtttacgagttcatggaaaatgggagcttagaggatagactttttcgtactggaaactctccaccgctttcgtggaggaaacgttttgaaatagcggcggagattgctaccgcactctcattccttcatcaagctaagccagaacctttagttcaccgcgacctaaaaccagccaatatactcttagacaaaaactacgtgagcaagatcagcgacgttggtttagcgcggttagtccccgcatcgatagctgatagcgtcacgcaattccacatgacatctgcggcaggaacgttttgttacatagaccctgaataccaacaaacaggaatgttaaccacaaaatcagacgtatactcattggggatattgctacttcagattataaccggaaggcctcccatggggctggctcaccaagtttcaagggcaattagtaaaggaactttcaaggaaatgcttgaccccgttgtgcctgattggcctgtacaagaggctcaatcttttgctactctagcgttgaaatgtgcggagctaagaaaaagagatagaccagatcttgggaaggaagtagtcccacatcttattagattaaaaaactttgggaatgatggtgatgagagaactaacgaatggatatga

SEQ ID NO: 86531 - protein, 708 aa, Arabidopsis thaliana
  peptide (1)..(708): Ceres Seq. ID no. 12691277
MASPYSSDDIHSPVNSTVVAIDKEKHSSYAVRWAVDHLLNMIHNPVMILVHVRTKNSNHGANLNNDDLNQLFIPYRGYCARKGISMTEVVLDDSDVAKTILDYVNNNLVNNLVLGASTKNTFARSFMFSKPHEVQSSIMKSTPDFCSVYVISKGGKVQSSRPAQRPITNTLAPPRVPSSGFLIQSLSDSEQDLIPRVQRSARNKPNETTYPHNRAAFNTTQKGYKSPINGSMDFNNGFNQAAFQRNPTLQSSFSDESDGGFGVMGSVDLSSQNSMDFYHGASSSSEESIPQSTKDIEAEMRRLKLELKQTMDMYSSACKEALTAKRKANELNQWKIEEARKFEKARLSEEAALAVAEIEKAKCRTAVEAAEKAQRMAELEGQRRKQAEMKAVSEEKDKDRAVSALAHNDVRYRKYSIEEIEEATERFANHRKIGEGGYGPVYNGELDHTPVAIKVLRPDAAQGKKQFQQEVEVLCSIRHPHMVLLLGACPEYGCLVYEFMENGSLEDRLFRTGNSPPLSWRKRFEIAAEIATALSFLHQAKPEPLVHRDLKPANILLDKNYVSKISDVGLARLVPASIADSVTQFHMTSAAGTFCYIDPEYQQTGMLTTKSDVYSLGILLLQIITGRPPMGLAHQVSRAISKGTFKEMLDPVVPDWPVQEAQSFATLALKCAELRKRDRPDLGKEVVPHLIRLKNFGNDGDERTNEWI

SEQ ID NO: 86532 - protein, 668 aa, Arabidopsis thaliana
  peptide (1)..(668): Ceres Seq. ID no. 12691278
MIHNPVMILVHVRTKNSNHGANLNNDDLNQLFIPYRGYCARKGISMTEVVLDDSDVAKTILDYVNNNLVNNLVLGASTKNTFARSFMFSKPHEVQSSIMKSTPDFCSVYVISKGGKVQSSRPAQRPITNTLAPPRVPSSGFLIQSLSDSEQDLIPRVQRSARNKPNETTYPHNRAAFNTTQKGYKSPINGSMDFNNGFNQAAFQRNPTLQSSFSDESDGGFGVMGSVDLSSQNSMDFYHGASSSSEESIPQSTKDIEAEMRRLKLELKQTMDMYSSACKEALTAKRKANELNQWKIEEARKFEKARLSEEAALAVAEIEKAKCRTAVEAAEKAQRMAELEGQRRKQAEMKAVSEEKDKDRAVSALAHNDVRYRKYSIEEIEEATERFANHRKIGEGGYGPVYNGELDHTPVAIKVLRPDAAQGKKQFQQEVEVLCSIRHPHMVLLLGACPEYGCLVYEFMENGSLEDRLFRTGNSPPLSWRKRFEIAAEIATALSFLHQAKPEPLVHRDLKPANILLDKNYVSKISDVGLARLVPASIADSVTQFHMTSAAGTFCYIDPEYQQTGMLTTKSDVYSLGILLLQIITGRPPMGLAHQVSRAISKGTFKEMLDPVVPDWPVQEAQSFATLALKCAELRKRDRPDLGKEVVPHLIRLKNFGNDGDERTNEWI

SEQ ID NO: 86533 - protein, 662 aa, Arabidopsis thaliana
  peptide (1)..(662): Ceres Seq. ID no. 12691279
MILVHVRTKNSNHGANLNNDDLNQLFIPYRGYCARKGISMTEVVLDDSDVAKTILDYVNNNLVNNLVLGASTKNTFARSFMFSKPHEVQSSIMKSTPDFCSVYVISKGGKVQSSRPAQRPITNTLAPPRVPSSGFLIQSLSDSEQDLIPRVQRSARNKPNETTYPHNRAAFNTTQKGYKSPINGSMDFNNGFNQAAFQRNPTLQSSFSDESDGGFGVMGSVDLSSQNSMDFYHGASSSSEESIPQSTKDIEAEMRRLKLELKQTMDMYSSACKEALTAKRKANELNQWKIEEARKFEKARLSEEAALAVAEIEKAKCRTAVEAAEKAQRMAELEGQRRKQAEMKAVSEEKDKDRAVSALAHNDVRYRKYSIEEIEEATERFANHRKIGEGGYGPVYNGELDHTPVAIKVLRPDAAQGKKQFQQEVEVLCSIRHPHMVLLLGACPEYGCLVYEFMENGSLEDRLFRTGNSPPLSWRKRFEIAAEIATALSFLHQAKPEPLVHRDLKPANILLDKNYVSKISDVGLARLVPASIADSVTQFHMTSAAGTFCYIDPEYQQTGMLTTKSDVYSLGILLLQIITGRPPMGLAHQVSRAISKGTFKEMLDPVVPDWPVQEAQSFATLALKCAELRKRDRPDLGKEVVPHLIRLKNFGNDGDERTNEWI

SEQ ID NO: 86534 - DNA, 1187 bp, Arabidopsis thaliana
  misc_feature (1)..(1187): Ceres Seq. ID no. 12691440
  misc_feature (1)..(1187): Ortholog of  Ceres SEQ ID NO 14307065 as cited in SEQ ID NO 53918
aaatccagtttcgctcctccttgctctagctctgttatctgattcgtaaccattgatgaaatgcgagttctcgacgaaattgcagagtcaccatttctgatttcaccgctaaaccctaattcgacagccaatggatatagatgggtcgataagtgccatggattcttacataacacggttctcgttgcggcttctctcttcttcgtcgcttacttagcttacgaagcgaagaagagtctgtctaaactctcgaatcggagatcttatatcatgattgcttattatggttgtctttggcttgttagcttgctcaatcttgcttggtgctgtctccagggttgggaatgtactcctgggaaagaagttgtttggaatctgttaactttgttcacaacatctggaatgttgtttctggaagtaagcttggtggcttttctcttccaaggaaactatgcaagcggtgcagaagcattaactagaacgttcctaatctcgggttttattgttgctcttgatttgcttctcaaggcaatttttctctttggatttggagtgccattgtttattgacaacaatgaaaatggaaaaacgttcaaatggggcttatggatcattcataagcttctactcactggcgtttatgggatggtgttcttgatgtacaactctaggtggagagaaaaattgcctgcaaggcctgcattctacaactacataatcatcatgttcgccttatacagcctttacctagttgcatctgcgtttaccgcaaacaacgcgcattttggtttctggttatatgggatcatgagtgtttgctaccacgcattataccttcctcttctttacataacgttcctcgcagactttttccaggaagaagatttgaacttggagaatgtatactactcagagatgaaggatgctggatttttcgactctgattgggaataggactagggtaacaaacatcttcctcattttctcaatctgtaaatacacgttgggtaggatctcctagaagtcatggctgctttttccggctttggcgggttacattttagggtctagtcttttgtatgtctgtactttttcctcatgtttctttctcttttataaatccaaaatgtcttgtgaatctctttgttccttaagctgataatctaaaagaaagttttgtagtagtc

SEQ ID NO: 86535 - protein, 297 aa, Arabidopsis thaliana
  peptide (1)..(297): Ceres Seq. ID no. 12691441
MRVLDEIAESPFLISPLNPNSTANGYRWVDKCHGFLHNTVLVAASLFFVAYLAYEAKKSLSKLSNRRSYIMIAYYGCLWLVSLLNLAWCCLQGWECTPGKEVVWNLLTLFTTSGMLFLEVSLVAFLFQGNYASGAEALTRTFLISGFIVALDLLLKAIFLFGFGVPLFIDNNENGKTFKWGLWIIHKLLLTGVYGMVFLMYNSRWREKLPARPAFYNYIIIMFALYSLYLVASAFTANNAHFGFWLYGIMSVCYHALYLPLLYITFLADFFQEEDLNLENVYYSEMKDAGFFDSDWE

SEQ ID NO: 86536 - protein, 227 aa, Arabidopsis thaliana
  peptide (1)..(227): Ceres Seq. ID no. 12691442
MIAYYGCLWLVSLLNLAWCCLQGWECTPGKEVVWNLLTLFTTSGMLFLEVSLVAFLFQGNYASGAEALTRTFLISGFIVALDLLLKAIFLFGFGVPLFIDNNENGKTFKWGLWIIHKLLLTGVYGMVFLMYNSRWREKLPARPAFYNYIIIMFALYSLYLVASAFTANNAHFGFWLYGIMSVCYHALYLPLLYITFLADFFQEEDLNLENVYYSEMKDAGFFDSDWE

SEQ ID NO: 86537 - protein, 183 aa, Arabidopsis thaliana
  peptide (1)..(183): Ceres Seq. ID no. 12691443
MLFLEVSLVAFLFQGNYASGAEALTRTFLISGFIVALDLLLKAIFLFGFGVPLFIDNNENGKTFKWGLWIIHKLLLTGVYGMVFLMYNSRWREKLPARPAFYNYIIIMFALYSLYLVASAFTANNAHFGFWLYGIMSVCYHALYLPLLYITFLADFFQEEDLNLENVYYSEMKDAGFFDSDWE

SEQ ID NO: 86538 - DNA, 1371 bp, Arabidopsis thaliana
  misc_feature (1)..(1371): Ceres Seq. ID no. 12691466
  misc_feature (1)..(1371): Ortholog of  Ceres SEQ ID NO 13596198 as cited in SEQ ID NO 68488
aattaaccgtcacgagctacatgctctgtatcttcagatttcctaaatacttacaattcccattccaattctgatttggttaatccaaaacaaaaaaaaaggaaactttcttttaccctaaatctataaaaacgaaacccttcttcacaaatctttgttcttcgtaatctctcttaaaagcttttgtttcaatttcaatggagtgggttcgaggagaaacaattgggttcggaaccttctctactgtcagtacagcgacaaagtctagaaactccggcgactttcctgcacttatcgctgtgaagtcgacggatgcttatggcgccgcttcactctccaacgagaaatcggtgttggattcactcggtgattgtcctgagatcatacggtgttacggcgaggattcaacggtggagaacggagaagagatgcataacttgttattagagtacgcttcgagaggaagcttagcgagttacatgaagaaacttggcggtgagggtttaccggagtccaccgtgcgtcgccacacaggatcagtgcttcgagggttacgtcacatccacgctaaagggtttgcacactgcgatataaaactcgcgaatattctgttatttaacgacggctctgttaaaattgccgatttcggtttggcgatgagagttgacggagatttaacggcgttaagaaaaagtgtggagattagagggacgccgttatacatggcaccggaatgtgttaatgataacgagtatggatcagcggctgacgtgtgggctttaggatgtgctgtagttgagatgtttagtggcaaaacggcatggagtgttaaagaaggatcacacttcatgtcgcttttgatacgtataggtgttggtgatgagttaccgaagattccagagatgttgtccgaagaaggcaaggattttttgtcgaagtgttttgttaaagatccagcgaaaagatggacggctgagatgcttttgaaccattcgtttgtaaccattgatcttgaagatgatcaccgagaaaacttcgttgtgaaggttaaggatgaggataaagtattgatgtctccaaagtgtccttttgagtttgatgattgggattcttttacattggattcaaacccctcgtttgattctccggtggagagacttgggagtttggttagtggttcgatccctgattggtctgtcggtgggagttggcttacagtccggtgatgaaagttatatgaaaacagaggaaaaacagtgtgtttggaaggctagggcttttttttagcacctagttagacccattctacgattcttgttcgtattctttaggtgtaattgatttgttaatacaattcattctagtgttcct

SEQ ID NO: 86539 - protein, 342 aa, Arabidopsis thaliana
  peptide (1)..(342): Ceres Seq. ID no. 12691467
MEWVRGETIGFGTFSTVSTATKSRNSGDFPALIAVKSTDAYGAASLSNEKSVLDSLGDCPEIIRCYGEDSTVENGEEMHNLLLEYASRGSLASYMKKLGGEGLPESTVRRHTGSVLRGLRHIHAKGFAHCDIKLANILLFNDGSVKIADFGLAMRVDGDLTALRKSVEIRGTPLYMAPECVNDNEYGSAADVWALGCAVVEMFSGKTAWSVKEGSHFMSLLIRIGVGDELPKIPEMLSEEGKDFLSKCFVKDPAKRWTAEMLLNHSFVTIDLEDDHRENFVVKVKDEDKVLMSPKCPFEFDDWDSFTLDSNPSFDSPVERLGSLVSGSIPDWSVGGSWLTVR

SEQ ID NO: 86540 - protein, 265 aa, Arabidopsis thaliana
  peptide (1)..(265): Ceres Seq. ID no. 12691468
MHNLLLEYASRGSLASYMKKLGGEGLPESTVRRHTGSVLRGLRHIHAKGFAHCDIKLANILLFNDGSVKIADFGLAMRVDGDLTALRKSVEIRGTPLYMAPECVNDNEYGSAADVWALGCAVVEMFSGKTAWSVKEGSHFMSLLIRIGVGDELPKIPEMLSEEGKDFLSKCFVKDPAKRWTAEMLLNHSFVTIDLEDDHRENFVVKVKDEDKVLMSPKCPFEFDDWDSFTLDSNPSFDSPVERLGSLVSGSIPDWSVGGSWLTVR

SEQ ID NO: 86541 - protein, 248 aa, Arabidopsis thaliana
  peptide (1)..(248): Ceres Seq. ID no. 12691469
MKKLGGEGLPESTVRRHTGSVLRGLRHIHAKGFAHCDIKLANILLFNDGSVKIADFGLAMRVDGDLTALRKSVEIRGTPLYMAPECVNDNEYGSAADVWALGCAVVEMFSGKTAWSVKEGSHFMSLLIRIGVGDELPKIPEMLSEEGKDFLSKCFVKDPAKRWTAEMLLNHSFVTIDLEDDHRENFVVKVKDEDKVLMSPKCPFEFDDWDSFTLDSNPSFDSPVERLGSLVSGSIPDWSVGGSWLTVR

SEQ ID NO: 86542 - DNA, 2124 bp, Arabidopsis thaliana
  misc_feature (1)..(2124): Ceres Seq. ID no. 12691487
  misc_feature (1)..(2124): Ortholog of  Ceres SEQ ID NO 12586556 as cited in SEQ ID NO 64667
  misc_feature (1)..(2124): Ortholog of  Ceres SEQ ID NO 13660894 as cited in SEQ ID NO 67475
atgccactgaacgaaatagcttcttccgttgtagaacttacacggaaatgcgtctcgatcacggtactaaaacgggcgcgtcagatccacgctctcgtcctcaccgccggcgctggcgccgctaccgagtctccgtacgcaaataacaatctcatctcaatgtatgtgaggtgtggttcactggaacaagcacggaaagtgttcgacaaaatgcctcacagaaacgtagtttcttataatgcgctttattcggcgtattcccggaacccagattttgcaagttatgcgtttcctctaacaacccatatggcgtttgagtacgtgaagcccaatagttcaactttcactagcttagtgcaagtatgtgctgtgcttgaggatgttttaatggggtcatcattaaactcgcagattataaagcttggttattcagataatgtagttgtccagacatcggttttggggatgtactctagttgcggggacttagaatctgcgaggagaatatttgactgtgtaaataatagagatgcggttgcttggaacacaatgatagttgggagtttgaaaaatgataagatagaagatgggcttatgttctttcgaaacatgttgatgtctggtgttgatccaacgcagttcacgtattcgattgtgttgaatggttgtagtaaattgggaagctattcactggggaaactaatccatgcccggataatagtctctgatagtttagctgatttacctctagataatgctcttcttgacatgtattgcagttgtggagacatgagggaagcattttatgtgtttgggaggattcataacccaaatttggtttcatggaactcgattatttcagggtgctcagaaaacggctttggagagcaagcgatgcttatgtatagaaggttgctgaggatgtccacacctcggccggatgaatatactttctctgctgctatatctgcgacagcggaaccagaaagatttgttcatgggaagcttcttcacggacaagtaacgaaattaggatatgaaaggagtgtttttgttggaacaacactattgtcgatgtacttcaagaacagggaagctgaatctgcacagaaggtgtttgatgtgatgaaggaaagggatgttgttctctggactgagatgatcgtagggcattctagattaggaaacagcgaattagcggtccaattcttcattgaaatgtacagagaaaagaatagaagtgatggtttttccctgagtagtgtcataggagcatgttcagatatggcaatgctaagacaaggtgaagttttccattgtcttgccataaggacgggattcgattgtgttatgtcagtatgtggagcgctagtagacatgtatgggaaaaacggtaaatacgaaactgcagaaacaatattctctcttgcttcaaatccagatttgaaatgttggaattcgatgctaggtgcttatagtcagcatggaatggtagaaaaagctctgagcttcttcgagcaaatactagaaaacggattcatgccagatgctgttacatacttgtctttattagcagcctgtagccacaggggatcaacgttgcaaggtaagttcctatggaaccaaatgaaggaacagggcatcaaagcagggtttaagcactactcttgcatggtgaatttagtatcaaaagctgggttagtagacgaggcactggaactgatagaacaatctcctcccgggaacaaccaagcagagctctggagaactctgctaagcgcatgtgttaacacaagaaacttgcagataggactatatgcagctgagcaaatactgaaacttgatccagaagacactgcaacacacattctactatcaaatttatatgcagtaaatgggagatgggaggatgttgcagagatgagaaggaagattagaggattagcttcatctaaagatccaggattgagctggattgaagtgaacaacaacaatacacaagttttctcctcaggagaccagtcgaacccagaagttgtaagtcaagctcaagatgaattaaatagattaaagagaaatatgttgtgcaaatcatcattcaataaacttgtctgttcaaattaa

SEQ ID NO: 86543 - protein, 707 aa, Arabidopsis thaliana
  peptide (1)..(707): Ceres Seq. ID no. 12691488
MPLNEIASSVVELTRKCVSITVLKRARQIHALVLTAGAGAATESPYANNNLISMYVRCGSLEQARKVFDKMPHRNVVSYNALYSAYSRNPDFASYAFPLTTHMAFEYVKPNSSTFTSLVQVCAVLEDVLMGSSLNSQIIKLGYSDNVVVQTSVLGMYSSCGDLESARRIFDCVNNRDAVAWNTMIVGSLKNDKIEDGLMFFRNMLMSGVDPTQFTYSIVLNGCSKLGSYSLGKLIHARIIVSDSLADLPLDNALLDMYCSCGDMREAFYVFGRIHNPNLVSWNSIISGCSENGFGEQAMLMYRRLLRMSTPRPDEYTFSAAISATAEPERFVHGKLLHGQVTKLGYERSVFVGTTLLSMYFKNREAESAQKVFDVMKERDVVLWTEMIVGHSRLGNSELAVQFFIEMYREKNRSDGFSLSSVIGACSDMAMLRQGEVFHCLAIRTGFDCVMSVCGALVDMYGKNGKYETAETIFSLASNPDLKCWNSMLGAYSQHGMVEKALSFFEQILENGFMPDAVTYLSLLAACSHRGSTLQGKFLWNQMKEQGIKAGFKHYSCMVNLVSKAGLVDEALELIEQSPPGNNQAELWRTLLSACVNTRNLQIGLYAAEQILKLDPEDTATHILLSNLYAVNGRWEDVAEMRRKIRGLASSKDPGLSWIEVNNNNTQVFSSGDQSNPEVVSQAQDELNRLKRNMLCKSSFNKLVCSN

SEQ ID NO: 86544 - protein, 654 aa, Arabidopsis thaliana
  peptide (1)..(654): Ceres Seq. ID no. 12691489
MYVRCGSLEQARKVFDKMPHRNVVSYNALYSAYSRNPDFASYAFPLTTHMAFEYVKPNSSTFTSLVQVCAVLEDVLMGSSLNSQIIKLGYSDNVVVQTSVLGMYSSCGDLESARRIFDCVNNRDAVAWNTMIVGSLKNDKIEDGLMFFRNMLMSGVDPTQFTYSIVLNGCSKLGSYSLGKLIHARIIVSDSLADLPLDNALLDMYCSCGDMREAFYVFGRIHNPNLVSWNSIISGCSENGFGEQAMLMYRRLLRMSTPRPDEYTFSAAISATAEPERFVHGKLLHGQVTKLGYERSVFVGTTLLSMYFKNREAESAQKVFDVMKERDVVLWTEMIVGHSRLGNSELAVQFFIEMYREKNRSDGFSLSSVIGACSDMAMLRQGEVFHCLAIRTGFDCVMSVCGALVDMYGKNGKYETAETIFSLASNPDLKCWNSMLGAYSQHGMVEKALSFFEQILENGFMPDAVTYLSLLAACSHRGSTLQGKFLWNQMKEQGIKAGFKHYSCMVNLVSKAGLVDEALELIEQSPPGNNQAELWRTLLSACVNTRNLQIGLYAAEQILKLDPEDTATHILLSNLYAVNGRWEDVAEMRRKIRGLASSKDPGLSWIEVNNNNTQVFSSGDQSNPEVVSQAQDELNRLKRNMLCKSSFNKLVCSN

SEQ ID NO: 86545 - protein, 637 aa, Arabidopsis thaliana
  peptide (1)..(637): Ceres Seq. ID no. 12691490
MPHRNVVSYNALYSAYSRNPDFASYAFPLTTHMAFEYVKPNSSTFTSLVQVCAVLEDVLMGSSLNSQIIKLGYSDNVVVQTSVLGMYSSCGDLESARRIFDCVNNRDAVAWNTMIVGSLKNDKIEDGLMFFRNMLMSGVDPTQFTYSIVLNGCSKLGSYSLGKLIHARIIVSDSLADLPLDNALLDMYCSCGDMREAFYVFGRIHNPNLVSWNSIISGCSENGFGEQAMLMYRRLLRMSTPRPDEYTFSAAISATAEPERFVHGKLLHGQVTKLGYERSVFVGTTLLSMYFKNREAESAQKVFDVMKERDVVLWTEMIVGHSRLGNSELAVQFFIEMYREKNRSDGFSLSSVIGACSDMAMLRQGEVFHCLAIRTGFDCVMSVCGALVDMYGKNGKYETAETIFSLASNPDLKCWNSMLGAYSQHGMVEKALSFFEQILENGFMPDAVTYLSLLAACSHRGSTLQGKFLWNQMKEQGIKAGFKHYSCMVNLVSKAGLVDEALELIEQSPPGNNQAELWRTLLSACVNTRNLQIGLYAAEQILKLDPEDTATHILLSNLYAVNGRWEDVAEMRRKIRGLASSKDPGLSWIEVNNNNTQVFSSGDQSNPEVVSQAQDELNRLKRNMLCKSSFNKLVCSN

SEQ ID NO: 86546 - DNA, 2040 bp, Arabidopsis thaliana
  misc_feature (1)..(2040): Ceres Seq. ID no. 12691491
  misc_feature (1)..(2040): Ortholog of  Ceres SEQ ID NO 14315634 as cited in SEQ ID NO 53029
atggctaccggaaacttggcttctcgtcttcatctcttgatcgatctttgtgttcgccaattccctgaaagagaagaagtaactttgccgacgaaggaaacggaaaaagatctgcttctttctctatctcaggtgttgagagaaattcaatcttggaggagcgaaatttcatgtgataaggcggtggaatcgcgagaggagactgttgttgatcatgatgaatctgctgatgctttatatggtccagactctatagagtatttatgcttagaaagacttgtggcggatcttgtttgtttgttgggtatggagaatgtgcatgttaaacatttggctggcaacatacttgtggaagtatccggttgtcttgttgaatctggaagtcaatgggatgagttcattcgtttgctttgtgaatgtttgcggttagcagttatctacagtttcccaattcctgctgtaggatctgaaactggatttggaagtctagatcaatgtttcttcggttctgatgttcttaaatgtaagctggaaaaggctaactggtccacggtgtcggatatctttcgagttcttcgtaatatattgaagcgcttgagccaagaagacaatgaggaaatttttgatgtatacttggaatctgtcaactctacacttgcaaaagttccttggtgccgattggatactattttttctcatcagcatggtagtggtgaaagaaatttccaaggtcagagtggaaacagtgaggaagcaactgtatttcttgggagctttgtccagtttctctgttccatggttcagcaggttcatgttgtagaagattctgatgattttgaaccttcatatttgatcctccaaaaaaccatcaagcttattccggatctcctccgttggtgccaaccaaagttgaaaagtcaaagtggctcttgcatgtcaagatacctagggcacaagttactggtgttgatgatcaggcttactgataagtccaaaatcaaatgtaccattcttctttcatggctgcaatatttgcaacgggattctcaaggctttcttcaacacaccctaacaaagtttaaacccgttcaagataattgtttggagggttcgccattctttgtgagtttgtctgatagggaggtcaatgagatgcattctaatcatttgcaaagactctctgtgtttctgttcctacggtgctccttcactttgatttactcaagtagacataacgacaagctatgtgagtttgattgtagaaagaaagggatggcagagatgtttaaatggattgaacgacagattccaggcaatatgttttctgatcacagaatttatagcaagaagaatgttgaattttctgcatccttcgttcggctgttcatgcatgaggatgatctattatttaaagtcctcctgcaattgctgtctgtaccattgcatagacaggaattgcctaacgtggaagggggttcgcttgaagatgaggaacaaattactctcttccgtttatcaaccttgttcaatcctctgcattatgatcatcaagtacttcttgattaccttatatctaaagatattggggctagctgcgcagagtacctgctgagatgcttgcgtgcagtatgtgattcatggactctatttgtggaattcccatttgaaggaagtacagatgctccatctccgaagagaagaaaagttttgcctgagacttctgaggttgaacaaaactggagattacatgcccaggcttttgaagacgccaaagattgtctgctttcgttacaaaattcagttgttaagctacatcagaagaaactgtttccatacaacccagaggctcttctacgacgctctgtctatcccatgagtaatatatctggaccaaagcaaaatgttgtgatccttagtttgtgggttgcggtgagattctctgagacagaacagaaggatcagatgccaacacaaagaagtctcctttccagatcaaatttcaaactaatcggctcaccagtagaagtgtatctgctatga

SEQ ID NO: 86547 - protein, 679 aa, Arabidopsis thaliana
  peptide (1)..(679): Ceres Seq. ID no. 12691492
MATGNLASRLHLLIDLCVRQFPEREEVTLPTKETEKDLLLSLSQVLREIQSWRSEISCDKAVESREETVVDHDESADALYGPDSIEYLCLERLVADLVCLLGMENVHVKHLAGNILVEVSGCLVESGSQWDEFIRLLCECLRLAVIYSFPIPAVGSETGFGSLDQCFFGSDVLKCKLEKANWSTVSDIFRVLRNILKRLSQEDNEEIFDVYLESVNSTLAKVPWCRLDTIFSHQHGSGERNFQGQSGNSEEATVFLGSFVQFLCSMVQQVHVVEDSDDFEPSYLILQKTIKLIPDLLRWCQPKLKSQSGSCMSRYLGHKLLVLMIRLTDKSKIKCTILLSWLQYLQRDSQGFLQHTLTKFKPVQDNCLEGSPFFVSLSDREVNEMHSNHLQRLSVFLFLRCSFTLIYSSRHNDKLCEFDCRKKGMAEMFKWIERQIPGNMFSDHRIYSKKNVEFSASFVRLFMHEDDLLFKVLLQLLSVPLHRQELPNVEGGSLEDEEQITLFRLSTLFNPLHYDHQVLLDYLISKDIGASCAEYLLRCLRAVCDSWTLFVEFPFEGSTDAPSPKRRKVLPETSEVEQNWRLHAQAFEDAKDCLLSLQNSVVKLHQKKLFPYNPEALLRRSVYPMSNISGPKQNVVILSLWVAVRFSETEQKDQMPTQRSLLSRSNFKLIGSPVEVYLL

SEQ ID NO: 86548 - protein, 577 aa, Arabidopsis thaliana
  peptide (1)..(577): Ceres Seq. ID no. 12691493
MENVHVKHLAGNILVEVSGCLVESGSQWDEFIRLLCECLRLAVIYSFPIPAVGSETGFGSLDQCFFGSDVLKCKLEKANWSTVSDIFRVLRNILKRLSQEDNEEIFDVYLESVNSTLAKVPWCRLDTIFSHQHGSGERNFQGQSGNSEEATVFLGSFVQFLCSMVQQVHVVEDSDDFEPSYLILQKTIKLIPDLLRWCQPKLKSQSGSCMSRYLGHKLLVLMIRLTDKSKIKCTILLSWLQYLQRDSQGFLQHTLTKFKPVQDNCLEGSPFFVSLSDREVNEMHSNHLQRLSVFLFLRCSFTLIYSSRHNDKLCEFDCRKKGMAEMFKWIERQIPGNMFSDHRIYSKKNVEFSASFVRLFMHEDDLLFKVLLQLLSVPLHRQELPNVEGGSLEDEEQITLFRLSTLFNPLHYDHQVLLDYLISKDIGASCAEYLLRCLRAVCDSWTLFVEFPFEGSTDAPSPKRRKVLPETSEVEQNWRLHAQAFEDAKDCLLSLQNSVVKLHQKKLFPYNPEALLRRSVYPMSNISGPKQNVVILSLWVAVRFSETEQKDQMPTQRSLLSRSNFKLIGSPVEVYLL

SEQ ID NO: 86549 - protein, 414 aa, Arabidopsis thaliana
  peptide (1)..(414): Ceres Seq. ID no. 12691494
MVQQVHVVEDSDDFEPSYLILQKTIKLIPDLLRWCQPKLKSQSGSCMSRYLGHKLLVLMIRLTDKSKIKCTILLSWLQYLQRDSQGFLQHTLTKFKPVQDNCLEGSPFFVSLSDREVNEMHSNHLQRLSVFLFLRCSFTLIYSSRHNDKLCEFDCRKKGMAEMFKWIERQIPGNMFSDHRIYSKKNVEFSASFVRLFMHEDDLLFKVLLQLLSVPLHRQELPNVEGGSLEDEEQITLFRLSTLFNPLHYDHQVLLDYLISKDIGASCAEYLLRCLRAVCDSWTLFVEFPFEGSTDAPSPKRRKVLPETSEVEQNWRLHAQAFEDAKDCLLSLQNSVVKLHQKKLFPYNPEALLRRSVYPMSNISGPKQNVVILSLWVAVRFSETEQKDQMPTQRSLLSRSNFKLIGSPVEVYLL

SEQ ID NO: 86550 - DNA, 908 bp, Arabidopsis thaliana
  misc_feature (1)..(908): Ceres Seq. ID no. 12691495
  misc_feature (1)..(908): Ortholog of  Ceres SEQ ID NO 13638849 as cited in SEQ ID NO 52046
  misc_feature (1)..(908): Ortholog of  Ceres SEQ ID NO 13599613 as cited in SEQ ID NO 0
atgacataccaaaagcaataccaaatgcaaacacaccacatgcagcaacaacaactccatcacttcgtctttgtccacggctcatgtcatggagcatggtgctggttcaaactagctgcaaagctcaagctcgatggtcaccgtgtgacagctatcgaccttggtggctccggtgtcgacacgaggcagctccatgaggttcgtttggtgtcggcgtatctagagcctttgatgagtttcatggagtctctccctgaaaacgagaaagtggttcttgttggtcatagctatggtggcattggaacttctcttgctatggaaaggtttccgaccaaagtctctgtcggaatcttcctctctgcttacatgccgcaccatgactctcctccggcggttttgattcaagagtattttacgagactaccagagggtttcgctatggactgtgagtttacattcgaggaaggattagaacacccaccaagttcagttttgttcggtactagtttcttgaaggagaaggcatatagtaattgccagttagaggatctagaattagccatggcgttgatgaaaccaagctggttatacactaaggaaatgggaggtgaagatctgataacaaaggagaggtatggatctgggaagagagtgtttattgtctgtgaaggcgacaatgtggttccagaggagattcagaagtggatgattagtaactacgagcctcacgaagttaagcggattgaagaagctggtcacatggctatgctcactaagcctcatgaactttctcaactgctacaagaaatagcagcgaaatataactaaatgtaaaatgatgacacctgtgtatgatttgggctcagttacatctatgatatgaataagagagtttcaatatttgtgat

SEQ ID NO: 86551 - protein, 275 aa, Arabidopsis thaliana
  peptide (1)..(275): Ceres Seq. ID no. 12691496
MTYQKQYQMQTHHMQQQQLHHFVFVHGSCHGAWCWFKLAAKLKLDGHRVTAIDLGGSGVDTRQLHEVRLVSAYLEPLMSFMESLPENEKVVLVGHSYGGIGTSLAMERFPTKVSVGIFLSAYMPHHDSPPAVLIQEYFTRLPEGFAMDCEFTFEEGLEHPPSSVLFGTSFLKEKAYSNCQLEDLELAMALMKPSWLYTKEMGGEDLITKERYGSGKRVFIVCEGDNVVPEEIQKWMISNYEPHEVKRIEEAGHMAMLTKPHELSQLLQEIAAKYN

SEQ ID NO: 86552 - protein, 267 aa, Arabidopsis thaliana; identical to SEQ ID NO: 83900
  peptide (1)..(267): Ceres Seq. ID no. 12691497

SEQ ID NO: 86553 - protein, 262 aa, Arabidopsis thaliana; identical to SEQ ID NO: 83901
  peptide (1)..(262): Ceres Seq. ID no. 12691498

SEQ ID NO: 86554 - DNA, 1023 bp, Arabidopsis thaliana
  misc_feature (1)..(1023): Ceres Seq. ID no. 12691526
  misc_feature (1)..(1023): Ortholog of  Ceres SEQ ID NO 15226870 as cited in SEQ ID NO 58831
  misc_feature (1)..(1023): Ortholog of  Ceres SEQ ID NO 15224334 as cited in SEQ ID NO 0
atggcggagtatatctgtttattcggcaaggacagtgcagcgattgttataaagcaaccaaagaaatcaccattattcttaaggatgattgttttagtgtttgctatggtttgtggtctctacatttgcgctgtttgcttaaaacagttaagtaatgtcagcttccaaacctcccaacttgtccaaactagtcctattgattctcactcgctacgctttgttactcggattcattatccaaagcctcagacttttaatagagctgaatgtggacataatccggtgaggtactttgcgatattgtcgatgcagagatcaggaagcggttggttcgaaacattgttgaatagtcataacaatgtgagttctaatggagagattttctctgttttggatcgaaggaaaaacatttcttcaatcattcagactcttgatagagtttataatcttgattggtttacgagtgcttcaaagaacgaatgttctgctgctattggtttcaaatggatgcttaaccagggtttgttggagaaccataaagacatagtagagtactttaaccgaagaggcgtctctgcgatatttctgtttagaaggaatcctttaagaagaatggtttctgtgttggcaaattcttatgaccgttatgctaagcttttgaatggaactcataagtctcatgttcattctcctgcagaggcagatgcactttctagatataagccggtaatcaactcgacatcgttgatccacgatttacaagaaacagagaattcagctgcaaaggctttagaatatttcaataccactcgtcatattgttgtcttctacgaagatctcataacaaatcaaacgacattgaaacaagttcaagagtttttgaacattccagtgaaggatttgtcaagcagacaggtgaaaatacatagaggagatttgtcagatcatataaagaattgggaagatataaacaagactttgaatgggactgagtacgagaaatttctacgagctgattattag

SEQ ID NO: 86555 - protein, 340 aa, Arabidopsis thaliana
  peptide (1)..(340): Ceres Seq. ID no. 12691527
MAEYICLFGKDSAAIVIKQPKKSPLFLRMIVLVFAMVCGLYICAVCLKQLSNVSFQTSQLVQTSPIDSHSLRFVTRIHYPKPQTFNRAECGHNPVRYFAILSMQRSGSGWFETLLNSHNNVSSNGEIFSVLDRRKNISSIIQTLDRVYNLDWFTSASKNECSAAIGFKWMLNQGLLENHKDIVEYFNRRGVSAIFLFRRNPLRRMVSVLANSYDRYAKLLNGTHKSHVHSPAEADALSRYKPVINSTSLIHDLQETENSAAKALEYFNTTRHIVVFYEDLITNQTTLKQVQEFLNIPVKDLSSRQVKIHRGDLSDHIKNWEDINKTLNGTEYEKFLRADY

SEQ ID NO: 86556 - protein, 312 aa, Arabidopsis thaliana
  peptide (1)..(312): Ceres Seq. ID no. 12691528
MIVLVFAMVCGLYICAVCLKQLSNVSFQTSQLVQTSPIDSHSLRFVTRIHYPKPQTFNRAECGHNPVRYFAILSMQRSGSGWFETLLNSHNNVSSNGEIFSVLDRRKNISSIIQTLDRVYNLDWFTSASKNECSAAIGFKWMLNQGLLENHKDIVEYFNRRGVSAIFLFRRNPLRRMVSVLANSYDRYAKLLNGTHKSHVHSPAEADALSRYKPVINSTSLIHDLQETENSAAKALEYFNTTRHIVVFYEDLITNQTTLKQVQEFLNIPVKDLSSRQVKIHRGDLSDHIKNWEDINKTLNGTEYEKFLRADY

SEQ ID NO: 86557 - protein, 305 aa, Arabidopsis thaliana
  peptide (1)..(305): Ceres Seq. ID no. 12691529
MVCGLYICAVCLKQLSNVSFQTSQLVQTSPIDSHSLRFVTRIHYPKPQTFNRAECGHNPVRYFAILSMQRSGSGWFETLLNSHNNVSSNGEIFSVLDRRKNISSIIQTLDRVYNLDWFTSASKNECSAAIGFKWMLNQGLLENHKDIVEYFNRRGVSAIFLFRRNPLRRMVSVLANSYDRYAKLLNGTHKSHVHSPAEADALSRYKPVINSTSLIHDLQETENSAAKALEYFNTTRHIVVFYEDLITNQTTLKQVQEFLNIPVKDLSSRQVKIHRGDLSDHIKNWEDINKTLNGTEYEKFLRADY

SEQ ID NO: 86558 - DNA, 1095 bp, Arabidopsis thaliana
  misc_feature (1)..(1095): Ceres Seq. ID no. 12691549
  misc_feature (1)..(1095): Ortholog of  Ceres SEQ ID NO 13658590 as cited in SEQ ID NO 66762
acaattaacaaactcggccgtcgtcatgtctctccgtaaaaccctaaccgccgtgaatcaatcttcgttaccgccggattctttaatctccgccggtaatctcactgtttcagaggtctctggttcatcttctagaatcagatttcgtcctcgtaaaatcaggaaagtttcgtcagatccgtcgccgaggatcattatcaccgcgtctcctcctctatcaacaaaatcgactgttgatatcgctctacgtcacttacaaagctccgatgaacttctcggagcattaatcacaacgcacaacgatcctccactgttcgactcaagtaatactccgtttctctccttagcgagatcaatcctataccaacaactcgcgacgaaagcagcgaaatgtatctacgatcgattcatctctctattcaacggtggagaagcaggtgttgttcctgaatctgtgatctcactctccgccgttgatcttcgtaagatcggtgtctccgggagaaaagctagttacctccacgatctagctgataaatacaacaacggtgtgctttctgatgaattgattctgaaaatgagtgatgaagagttgattgataggttaactttggttaaaggaattggagtgtggactgttcatatgtttatgatcttctcgttgcatagacctgatgtgttgcctgtgggagatcttggtgtgaggaaaggtgtgaaagatctttatggtttgaaaaatcttccaggtccattgcaaatggagcagctttgtgagaaatggcgtccttataggtctgttggttcatggtacatgtggagactaatcgagtctcgtaagaccaaatagcacctgcctgtaatcgggcagttaatatgatcctgtgacgaagaagcttttccatgcccatcacttcctttccaagtttcacttgctggtaatctgagttattttgtgtctgtaaattatggagcacgtaagaaaaatccttcttgtattttaactgtattccacggattatatttctgtgactgttgtaaacatgtatcatgtatggggtttcatttgacttggatattgagaagcatggcttattt

SEQ ID NO: 86559 - protein, 281 aa, Arabidopsis thaliana
  peptide (1)..(281): Ceres Seq. ID no. 12691550
QLTNSAVVMSLRKTLTAVNQSSLPPDSLISAGNLTVSEVSGSSSRIRFRPRKIRKVSSDPSPRIIITASPPLSTKSTVDIALRHLQSSDELLGALITTHNDPPLFDSSNTPFLSLARSILYQQLATKAAKCIYDRFISLFNGGEAGVVPESVISLSAVDLRKIGVSGRKASYLHDLADKYNNGVLSDELILKMSDEELIDRLTLVKGIGVWTVHMFMIFSLHRPDVLPVGDLGVRKGVKDLYGLKNLPGPLQMEQLCEKWRPYRSVGSWYMWRLIESRKTK

SEQ ID NO: 86560 - protein, 273 aa, Arabidopsis thaliana; identical to SEQ ID NO: 25819
  peptide (1)..(273): Ceres Seq. ID no. 12691551

SEQ ID NO: 86561 - DNA, 1326 bp, Arabidopsis thaliana
  misc_feature (1)..(1326): Ceres Seq. ID no. 12691597
  misc_feature (1)..(1326): Ortholog of  Ceres SEQ ID NO 13582350 as cited in SEQ ID NO 56734
  misc_feature (1)..(1326): Ortholog of  Ceres SEQ ID NO 12476493 as cited in SEQ ID NO 58163
  misc_feature (1)..(1326): Ortholog of  Ceres SEQ ID NO 12578315 as cited in SEQ ID NO 62451
  misc_feature (1)..(1326): Ortholog of  Ceres SEQ ID NO 12615466 as cited in SEQ ID NO 62761
  misc_feature (1)..(1326): Ortholog of  Ceres SEQ ID NO 12617090 as cited in SEQ ID NO 64005
  misc_feature (1)..(1326): Ortholog of  Ceres SEQ ID NO 13597439 as cited in SEQ ID NO 64081
  misc_feature (1)..(1326): Ortholog of  Ceres SEQ ID NO 13597233 as cited in SEQ ID NO 64370
atctctcttaatttagtcttttgtcttcgtaattacaatggctccaggaactttgactgagctagccggagagtctaagctcaactctaaatttgtcagggacgaagatgaacggcccaaagtcgcttacaatgtgtttagcgacgaaatcccggtgatctctctcgccggtatcgatgacgtcgatggaaaaagaggagagatctgccgtcagatcgttgaggcttgtgagaattggggcatcttccaagtggtcgatcacggcgtcgatactaacttagtggcggatatgactcgtctcgctcgtgacttctttgctttacctccggaagacaagctccgtttcgacatgtccggtggtaaaaaaggaggattcatcgtctctagtcacctccagggagaggctgtgcaagattggagagagattgtaacgtatttctcgtacccggtgagaaacagagactactcacggtggccagataagccggaaggttgggtgaaagtgacggaggagtatagtgagaggcttatgagtttggcttgtaagcttcttgaggttttgtctgaagctatgggtcttgagaaagagtctcttaccaatgcatgcgtcgatatggaccaaaagattgttgttaattattacccaaaatgccctcagcctgatctcaccctcggactcaagcgtcacactgaccctggaaccattaccttgctgctacaagaccaagtcggtggattacaagccacacgtgacaatggcaagacatggattacggttcagcctgttgaaggagcgtttgtcgtcaatctcggcgaccacggccattttttgagcaatgggaggttcaagaatgctgatcatcaggccgtggtgaactctaactcgagcagattatccatagccacgttccagaaccccgcgccggatgccacagtgtatccactgaaagtaagagaaggagagaaggcaatattggaggagccaatcacgtttgccgagatgtataagagaaagatgggaagagatttggagcttgctcgcctcaagaagctggctaaagaggagcgtgaccacaaagaagttgacaagcctgtcgaccaaatcttcgcttagaatctttgtgttcttgcttacttgttgttgcgttggttctgttttgtacgttggtactgaaaattatgctaggctcggtgtgttttgtgtttatttatgttctttcgaatcataaagaaataatgataattgatgcacttgtctatgacaaaaacatcatactccacctgtatttgacgcgttgggtttatgtcaaaaagcattaatacttc

SEQ ID NO: 86562 - protein, 358 aa, Arabidopsis thaliana; identical to SEQ ID NO: 23579
  peptide (1)..(358): Ceres Seq. ID no. 12691598

SEQ ID NO: 86563 - protein, 274 aa, Arabidopsis thaliana; identical to SEQ ID NO: 23580
  peptide (1)..(274): Ceres Seq. ID no. 12691599

SEQ ID NO: 86564 - protein, 254 aa, Arabidopsis thaliana; identical to SEQ ID NO: 23581
  peptide (1)..(254): Ceres Seq. ID no. 12691600

SEQ ID NO: 86565 - DNA, 1241 bp, Arabidopsis thaliana
  misc_feature (1)..(1241): Ceres Seq. ID no. 12691709
  misc_feature (1)..(1241): Ortholog of  Ceres SEQ ID NO 14313038 as cited in SEQ ID NO 59520
  misc_feature (1)..(1241): Ortholog of  Ceres SEQ ID NO 13595464 as cited in SEQ ID NO 59792
  misc_feature (1)..(1241): Ortholog of  Ceres SEQ ID NO 14316416 as cited in SEQ ID NO 60078
  misc_feature (1)..(1241): Ortholog of  Ceres SEQ ID NO 13664262 as cited in SEQ ID NO 61094
aaagacaaatatataacaattgaaacacatgtgtgttatcaggagaatttgtatgttttgaggaggtgtgcatcatccgtctatcaataccctgacaaggaaaaccctaattttttttggcccaaagggttttatactttaatctcatactccgattcattgtcgaaaaacgatgatgcataattcaaccgaagaatcggaatgggaggtgagacctggtggtatgctcgtccaacgaagagacgacaccgcttcctccgaccacaaacctctccaggatcccgactctgcttccgccgcttttgctcaaaccatcagaatcactgtttctcatggctcatcgcaccacgatcttcatatttctgctcacgccactttcggggatgtaaagaaagctcttgttcagaaaactggattggaagctagtgaattgaagatcttgttcagaggagttgagagagatgatgctgaacaattgcaagctgctggtgttaaggatgcgtctaagcttgttgttgttgttgaggatacgaataagagagtggaacaacagcctcctgtggtaactaaagagatggaaaaagctattgctgctgttaacgcggttacaggagaggtcgataagctctcggatagagttgttgctttagaagttgctgtgaatggagggacgcaagttgcggtgcgggagtttgacatggctgcagagcttcttatgaggcagctgctcaaattggatggcattgaggctgaaggggacgctaaagtacagcgtaaggctgaggtacgtagaatccaaaacttgcaggaggctgtggataagttgaaggcaagatgttcaaatccgtttgtggatcagagcaaagctgcagctgtaagcactgagtgggaatcgttcggaaacggtgtcggaagcttgaaccctcctccgccagcttcgccttcggccaatgtaactcaagattgggagaaatttgactgacattttagtactgctacgttgccttggaaaaaaatgcttattgaaactgtttatctttttgattattgttaaatattggaaaacgaccatcgtctttatcttctaatgtatagatatattatatatagtatcggaaatctacatctctgttcgttatgttggaataatccctgggaatagtctttgatgtctctcagtctctgtcgtgcctaattggcttatgtcgtagtactaaagattatggctacgagttttggag

SEQ ID NO: 86566 - protein, 269 aa, Arabidopsis thaliana
  peptide (1)..(269): Ceres Seq. ID no. 12691710
MMHNSTEESEWEVRPGGMLVQRRDDTASSDHKPLQDPDSASAAFAQTIRITVSHGSSHHDLHISAHATFGDVKKALVQKTGLEASELKILFRGVERDDAEQLQAAGVKDASKLVVVVEDTNKRVEQQPPVVTKEMEKAIAAVNAVTGEVDKLSDRVVALEVAVNGGTQVAVREFDMAAELLMRQLLKLDGIEAEGDAKVQRKAEVRRIQNLQEAVDKLKARCSNPFVDQSKAAAVSTEWESFGNGVGSLNPPPPASPSANVTQDWEKFD

SEQ ID NO: 86567 - protein, 268 aa, Arabidopsis thaliana
  peptide (1)..(268): Ceres Seq. ID no. 12691711
MHNSTEESEWEVRPGGMLVQRRDDTASSDHKPLQDPDSASAAFAQTIRITVSHGSSHHDLHISAHATFGDVKKALVQKTGLEASELKILFRGVERDDAEQLQAAGVKDASKLVVVVEDTNKRVEQQPPVVTKEMEKAIAAVNAVTGEVDKLSDRVVALEVAVNGGTQVAVREFDMAAELLMRQLLKLDGIEAEGDAKVQRKAEVRRIQNLQEAVDKLKARCSNPFVDQSKAAAVSTEWESFGNGVGSLNPPPPASPSANVTQDWEKFD

SEQ ID NO: 86568 - protein, 252 aa, Arabidopsis thaliana
  peptide (1)..(252): Ceres Seq. ID no. 12691712
MLVQRRDDTASSDHKPLQDPDSASAAFAQTIRITVSHGSSHHDLHISAHATFGDVKKALVQKTGLEASELKILFRGVERDDAEQLQAAGVKDASKLVVVVEDTNKRVEQQPPVVTKEMEKAIAAVNAVTGEVDKLSDRVVALEVAVNGGTQVAVREFDMAAELLMRQLLKLDGIEAEGDAKVQRKAEVRRIQNLQEAVDKLKARCSNPFVDQSKAAAVSTEWESFGNGVGSLNPPPPASPSANVTQDWEKFD

SEQ ID NO: 86569 - DNA, 2052 bp, Arabidopsis thaliana
  misc_feature (1)..(2052): Ceres Seq. ID no. 12691754
  misc_feature (1)..(2052): Ortholog of  Ceres SEQ ID NO 13586013 as cited in SEQ ID NO 1182
atgtcggctagagctcatcctgtggacgatgacggagagatttccccggtggaaagatcttccccgcggcaagcaaatacaccgtatgtccacaaagtcgaagttcctcctaagcaaaaccttttcaatgagttcatgtacacttttaaagaaactttcttccacgatgatcctctaaggcatttcaaggaccagtcaaaatccaaaaagctcatgctcggtatccagtccgtctttccggttatcgagtggggaagaaaatataatcttaagttgtttcgcggcgatcttattgccggtttaaccatagccagtctctgcattcctcaggatattggatatgcaaagctcgcgagtcttgaccctaagtatggtctatattcaagttttgttcctccgttggtgtacgcatgtatgggaagctcaaaggatatagcgattggacccgttgcagtggtttcactcctattaggtactctgcttcgtgctgagatcgaccccaacacaaaccctaatgaatatctccgcttagccttcacctccacgttctttgccggtgtcactcaagcagcactcggattcttcagattgggtttcttgatcgatttcttgtcccacgcggcggtggtaggtttcatgggcggagcagccatcaccattgcgctgcaacagctcaaaggcttcctaggaatcaataagttcacaaagaaaaccgatatcatcgcggttctttcttccgtaatcagctcagcccatcacggagtaaagagtctttcaatcactctgtttttagtatctttcactctttatgtatcttcaccgtttgatatcaaatgcttgcagtggaattggcagacaatactcattagtgcatcgttcttgatcttccttctcatctccaagtttatcgggaagagaaacaagaaactgttttggattccagctattgctccgttagtatctgtcatcatttcaaccttcttcgtctacataacccgagccgacaagaaaggagttcagatagtgaaacatcttgacaaaggtctgaacccttcttctttgcgtctaatatatttctcgggcgattaccttctcaagggcttccgcataggcgttgtctcaggcatggttgccttgacggaagctgtagcgataggaagaacatttgcagcaatgaaagactaccaaatcgatggtaacaaagagatggtagcattaggagcaatgaacgtaatcggttcaatgacctcttgctatgtatccaccggttctttctcaagatccgccgtcaactttatggccggatgtcaaacggcagtctccaacatcatcatgtccattgtcgtcctcttaacgcttctcttcctcactcctcttttcaaatacacacccaacgcaattcttgcagcgatcatcatcaacgctgtgattcctttggttgacgttaatgctaccattttgatcttcaagatcgataagctcgattttgttgcttgtatgggggctttttttggtgtcatctttgtatccgtagagattggccttctaatagccgtggggatatcttttgccaagatacttttgcaagttacgagacctaggacagcgattcttggaaagataccagggacttcggtttacaggaatatcaatcagtatcctgaagcgactaggattccgggagttttgacaattcgtgttgactccgcgatttacttctccaactccaattatgttagggaaaggattcaaagatggttgacagatgaagaagagatggtggaagctgcaagattgcctaggatccagtttcttatcatcgaaatgtcacctgttacggacatcgatactagtggtattcacgccttagaagacttgtataagtctctccaaaaacgagacattcagttggttctagcgaatccaggaccgccggtcataaataagctacatgtttctcactttgcggacttgataggacacgacaaaatctttctgacggtggctgaggccgtggattcttgctcccctaaactgtccgacgaggtctga

SEQ ID NO: 86570 - protein, 683 aa, Arabidopsis thaliana
  peptide (1)..(683): Ceres Seq. ID no. 12691755
MSARAHPVDDDGEISPVERSSPRQANTPYVHKVEVPPKQNLFNEFMYTFKETFFHDDPLRHFKDQSKSKKLMLGIQSVFPVIEWGRKYNLKLFRGDLIAGLTIASLCIPQDIGYAKLASLDPKYGLYSSFVPPLVYACMGSSKDIAIGPVAVVSLLLGTLLRAEIDPNTNPNEYLRLAFTSTFFAGVTQAALGFFRLGFLIDFLSHAAVVGFMGGAAITIALQQLKGFLGINKFTKKTDIIAVLSSVISSAHHGVKSLSITLFLVSFTLYVSSPFDIKCLQWNWQTILISASFLIFLLISKFIGKRNKKLFWIPAIAPLVSVIISTFFVYITRADKKGVQIVKHLDKGLNPSSLRLIYFSGDYLLKGFRIGVVSGMVALTEAVAIGRTFAAMKDYQIDGNKEMVALGAMNVIGSMTSCYVSTGSFSRSAVNFMAGCQTAVSNIIMSIVVLLTLLFLTPLFKYTPNAILAAIIINAVIPLVDVNATILIFKIDKLDFVACMGAFFGVIFVSVEIGLLIAVGISFAKILLQVTRPRTAILGKIPGTSVYRNINQYPEATRIPGVLTIRVDSAIYFSNSNYVRERIQRWLTDEEEMVEAARLPRIQFLIIEMSPVTDIDTSGIHALEDLYKSLQKRDIQLVLANPGPPVINKLHVSHFADLIGHDKIFLTVAEAVDSCSPKLSDEV

SEQ ID NO: 86571 - protein, 638 aa, Arabidopsis thaliana
  peptide (1)..(638): Ceres Seq. ID no. 12691756
MYTFKETFFHDDPLRHFKDQSKSKKLMLGIQSVFPVIEWGRKYNLKLFRGDLIAGLTIASLCIPQDIGYAKLASLDPKYGLYSSFVPPLVYACMGSSKDIAIGPVAVVSLLLGTLLRAEIDPNTNPNEYLRLAFTSTFFAGVTQAALGFFRLGFLIDFLSHAAVVGFMGGAAITIALQQLKGFLGINKFTKKTDIIAVLSSVISSAHHGVKSLSITLFLVSFTLYVSSPFDIKCLQWNWQTILISASFLIFLLISKFIGKRNKKLFWIPAIAPLVSVIISTFFVYITRADKKGVQIVKHLDKGLNPSSLRLIYFSGDYLLKGFRIGVVSGMVALTEAVAIGRTFAAMKDYQIDGNKEMVALGAMNVIGSMTSCYVSTGSFSRSAVNFMAGCQTAVSNIIMSIVVLLTLLFLTPLFKYTPNAILAAIIINAVIPLVDVNATILIFKIDKLDFVACMGAFFGVIFVSVEIGLLIAVGISFAKILLQVTRPRTAILGKIPGTSVYRNINQYPEATRIPGVLTIRVDSAIYFSNSNYVRERIQRWLTDEEEMVEAARLPRIQFLIIEMSPVTDIDTSGIHALEDLYKSLQKRDIQLVLANPGPPVINKLHVSHFADLIGHDKIFLTVAEAVDSCSPKLSDEV

SEQ ID NO: 86572 - protein, 612 aa, Arabidopsis thaliana
  peptide (1)..(612): Ceres Seq. ID no. 12691757
MLGIQSVFPVIEWGRKYNLKLFRGDLIAGLTIASLCIPQDIGYAKLASLDPKYGLYSSFVPPLVYACMGSSKDIAIGPVAVVSLLLGTLLRAEIDPNTNPNEYLRLAFTSTFFAGVTQAALGFFRLGFLIDFLSHAAVVGFMGGAAITIALQQLKGFLGINKFTKKTDIIAVLSSVISSAHHGVKSLSITLFLVSFTLYVSSPFDIKCLQWNWQTILISASFLIFLLISKFIGKRNKKLFWIPAIAPLVSVIISTFFVYITRADKKGVQIVKHLDKGLNPSSLRLIYFSGDYLLKGFRIGVVSGMVALTEAVAIGRTFAAMKDYQIDGNKEMVALGAMNVIGSMTSCYVSTGSFSRSAVNFMAGCQTAVSNIIMSIVVLLTLLFLTPLFKYTPNAILAAIIINAVIPLVDVNATILIFKIDKLDFVACMGAFFGVIFVSVEIGLLIAVGISFAKILLQVTRPRTAILGKIPGTSVYRNINQYPEATRIPGVLTIRVDSAIYFSNSNYVRERIQRWLTDEEEMVEAARLPRIQFLIIEMSPVTDIDTSGIHALEDLYKSLQKRDIQLVLANPGPPVINKLHVSHFADLIGHDKIFLTVAEAVDSCSPKLSDEV

SEQ ID NO: 86573 - DNA, 987 bp, Arabidopsis thaliana
  misc_feature (1)..(987): Ceres Seq. ID no. 12691758
  misc_feature (1)..(987): Ortholog of  Ceres SEQ ID NO 14310639 as cited in SEQ ID NO 53858
  misc_feature (1)..(987): Ortholog of  Ceres SEQ ID NO 14312851 as cited in SEQ ID NO 58364
atggctactgctacgtctcaccaatcagtcgtttcatttgcttctctccggtcttctccttcttctacaatctctcaatgtggattcaagatcgattcttcactgagctttacatcgaaaaagacaaacttttgcaagattaaagcaatggcatcatcagtttcttatgacaacactctcttgtctccttccaagacaatccctgacaattctcaaaagaaatcaaatgaagcagctttgatattgattaggcatggagaatctttatggaacgagaagaatctttttactggttgtgttgatgtgccattgactgagaaaggtgttgaagaagctattgaagcagggaagaggattagtaacattcctgttgatgttatctttacatcttctttgattcgtgctcagatgactgcaatgcttgctatgattcaacaccgtcgtaagaaggtaccgatcatcttgcacgatgaaagcgaacaggcgaaaacttggagtcaagtttttagtgatgagactaaaaaccaatccattcctgtcatacctgcttggtatggagaattacaaggtcttaacaagcaagaaacagccgagagatatgggaaagagcaagttcacgaatggcgtaggagttatgatattcctcctcccaaaggagagagtttggagatgtgtgctgagagagcagtagcttattttcaggacaatatcgaaccgaagcttgcagctggaaagaacgtaatgatagctgctcacgggaactcgctgcggtctatcattatgtatcttgacaaattgacttgccaggaggtgataagtctagagctatcgacaggtatacctcttctctacatattcaaagaaggcaaattcatgaagcggggaagcccggttggtccaacagaagctggtgtttatgcttataccaagagattggctcaatacagacagaagctagaggacgatagtgaagtactctgtgcctga

SEQ ID NO: 86574 - protein, 328 aa, Arabidopsis thaliana
  peptide (1)..(328): Ceres Seq. ID no. 12691759
MATATSHQSVVSFASLRSSPSSTISQCGFKIDSSLSFTSKKTNFCKIKAMASSVSYDNTLLSPSKTIPDNSQKKSNEAALILIRHGESLWNEKNLFTGCVDVPLTEKGVEEAIEAGKRISNIPVDVIFTSSLIRAQMTAMLAMIQHRRKKVPIILHDESEQAKTWSQVFSDETKNQSIPVIPAWYGELQGLNKQETAERYGKEQVHEWRRSYDIPPPKGESLEMCAERAVAYFQDNIEPKLAAGKNVMIAAHGNSLRSIIMYLDKLTCQEVISLELSTGIPLLYIFKEGKFMKRGSPVGPTEAGVYAYTKRLAQYRQKLEDDSEVLCA

SEQ ID NO: 86575 - protein, 279 aa, Arabidopsis thaliana
  peptide (1)..(279): Ceres Seq. ID no. 12691760
MASSVSYDNTLLSPSKTIPDNSQKKSNEAALILIRHGESLWNEKNLFTGCVDVPLTEKGVEEAIEAGKRISNIPVDVIFTSSLIRAQMTAMLAMIQHRRKKVPIILHDESEQAKTWSQVFSDETKNQSIPVIPAWYGELQGLNKQETAERYGKEQVHEWRRSYDIPPPKGESLEMCAERAVAYFQDNIEPKLAAGKNVMIAAHGNSLRSIIMYLDKLTCQEVISLELSTGIPLLYIFKEGKFMKRGSPVGPTEAGVYAYTKRLAQYRQKLEDDSEVLCA

SEQ ID NO: 86576 - protein, 192 aa, Arabidopsis thaliana
  peptide (1)..(192): Ceres Seq. ID no. 12691761
MTAMLAMIQHRRKKVPIILHDESEQAKTWSQVFSDETKNQSIPVIPAWYGELQGLNKQETAERYGKEQVHEWRRSYDIPPPKGESLEMCAERAVAYFQDNIEPKLAAGKNVMIAAHGNSLRSIIMYLDKLTCQEVISLELSTGIPLLYIFKEGKFMKRGSPVGPTEAGVYAYTKRLAQYRQKLEDDSEVLCA

SEQ ID NO: 86577 - DNA, 2685 bp, Arabidopsis thaliana
  misc_feature (1)..(2685): Ceres Seq. ID no. 12691812
  misc_feature (1)..(2685): Ortholog of  Ceres SEQ ID NO 13597957 as cited in SEQ ID NO 60744
atggcgaaatcggaaaactcaacgacttcgactttctcttctttcgccaacaagattcaaccgtccaacgatgcagagtccgatcccgattcgtatgccctcgagaaattcaaactctacgaaaccagagcgaggttttatctagtagggagtgataggaataaaagattcttcagagtgttgaagattgatcgttcagagccatctgagcttaatattagtgaagatcctgttgtatattcgcctcaagagatcaagagtctgcttcagcgtatcgctgaaggcaatcgtgccacgggaggattggcttttgtggccaaagtctatggaattgctggttgtgctaagtttatggagtcatactatttagttttggttacaaaacggcgacagattggatgtatatgcgggcatgcgatatatgctattgatgaaagtcaaatgatcagtgttccacatgcaactattcaatctgatgttgcgaattccaaaactgaactaaggtacaagaagcttctgtcaagtgtagatttgacaaaagatttcttctacagttacacttaccctataatgcaaagcttgcaaaagaatgttctatcatctggtgaggaagggatgccttatgataacatattcgtatggaattcgtatctgacgcagcctattcgatcaaggtgcaacaacactatttggacactggcattagttcatgggcactttaagcagataagactatcaatatatggaagagacttcagtgttactttagtctccagacgttctcgacattttgcaggcacacgttacttgaaaaggggagtgaatgatcgtggaagggttgcaaatgatgttgaaacagaacaacttgttcttgatgatgaagctggatcatgcaaaggaaaaatgagctcagtggtgcagatgcgagggtcaattccactcttttggtcacaagaggcctccagatttagtcctaagcctgatatcttcttacagaggtatgaccctacatatgagtcaaccaaaatgcattttgaagacctggtgaatcgatatgggaatccgatcattgtgctcaacttaattaagacagttgagaaaaggccaagggaaatggtgctaagacgtgagtttgcgaatgctgtgggttatctaaattcaatttttcgtgaagaaaatcatctcaaattcatccactgggatttccataaatttgcgaagagcaagtcggcgaatgtattggctgttttgggtgctgtagcaagcgaagcccttgatttgactggattatatttcagcggcaaggaaccttctctgcgtgatctaagagcttactctgcggaactttcaaggggtgagagtgcaaatgatatacttagtgctcttgctaatcgagagaaagagatgaagctaacccaacaaaaaaaagacgagggaactaattcttcagctcctcgttaccaaagtggtgttctgcgtactaactgtatcgattgcttggatcgaacaaatgtagcacagtatgcatatggtttggctgctttaggccggcagctgcatgcaatgggtttgagcgatacacctaagatcgaccctgacagtagcatagctgctgcacttatggatatgtaccagagcatgggagatgcccttgcacaacaatatggcggctcagctgctcataacactgttttcccagaaaggcaggggaaatggaaggccacgacacagtctagagagtttctcaagtctatcaaacgatactacagcaatacctacactgatggcgaaaagcaagacgccataaacttattcttgggctactttcaacctcaggaagggaaacctgcgctctgggagctggattctgattactatctccatgtttcagggattggagatgatattttcccagatatcggggtccagtccattgctaaacctatgagtggtattggagtcaatcttgcaccagtgccagctttcagagacgacttctcgcggaagaagctgacatcgtttgacaaactgatagagcagacatgcagttcaataaagaacgtgaggctttgtagtgagacagaccaaaggccaggtggcaacactggaagcactggtgtggctcctgatgcagctgagattcaactcaagagccccaattggctgtttggttcaagaaagcccgaagagagtagctctgccacaaaatctggtgcagacgatagtgagaaaggagtaacctcgactgagagagtcaacgatttctgcaacttggactggctttctaagtccgaccgtcatcaaggagatatcttccaaaggtatctatcgattacatcaaccaatgaagccaatggttggtatggtggcactctcctcggtgaccaagatgaaaacagcgaaatttacagacattacgcccaattctgtcagtgtccagcgatggaaccatttgagaacgatcatgagtttgaacagaactttgcggaagttctccgcatgaacacaatcgatgtaatggacattgaagaagaagaaacggagatggaaagcgatttcaatgaatacactcagatcggtagcgatctcgggatcattccaatgcaatgcaaacactttgctagtgatccttgttggctagccagatggcttgtcggagatgataaggtcccgaaggtcatttaa

SEQ ID NO: 86578 - protein, 894 aa, Arabidopsis thaliana
  peptide (1)..(894): Ceres Seq. ID no. 12691813
MAKSENSTTSTFSSFANKIQPSNDAESDPDSYALEKFKLYETRARFYLVGSDRNKRFFRVLKIDRSEPSELNISEDPVVYSPQEIKSLLQRIAEGNRATGGLAFVAKVYGIAGCAKFMESYYLVLVTKRRQIGCICGHAIYAIDESQMISVPHATIQSDVANSKTELRYKKLLSSVDLTKDFFYSYTYPIMQSLQKNVLSSGEEGMPYDNIFVWNSYLTQPIRSRCNNTIWTLALVHGHFKQIRLSIYGRDFSVTLVSRRSRHFAGTRYLKRGVNDRGRVANDVETEQLVLDDEAGSCKGKMSSVVQMRGSIPLFWSQEASRFSPKPDIFLQRYDPTYESTKMHFEDLVNRYGNPIIVLNLIKTVEKRPREMVLRREFANAVGYLNSIFREENHLKFIHWDFHKFAKSKSANVLAVLGAVASEALDLTGLYFSGKEPSLRDLRAYSAELSRGESANDILSALANREKEMKLTQQKKDEGTNSSAPRYQSGVLRTNCIDCLDRTNVAQYAYGLAALGRQLHAMGLSDTPKIDPDSSIAAALMDMYQSMGDALAQQYGGSAAHNTVFPERQGKWKATTQSREFLKSIKRYYSNTYTDGEKQDAINLFLGYFQPQEGKPALWELDSDYYLHVSGIGDDIFPDIGVQSIAKPMSGIGVNLAPVPAFRDDFSRKKLTSFDKLIEQTCSSIKNVRLCSETDQRPGGNTGSTGVAPDAAEIQLKSPNWLFGSRKPEESSSATKSGADDSEKGVTSTERVNDFCNLDWLSKSDRHQGDIFQRYLSITSTNEANGWYGGTLLGDQDENSEIYRHYAQFCQCPAMEPFENDHEFEQNFAEVLRMNTIDVMDIEEEETEMESDFNEYTQIGSDLGIIPMQCKHFASDPCWLARWLVGDDKVPKVI

SEQ ID NO: 86579 - protein, 777 aa, Arabidopsis thaliana
  peptide (1)..(777): Ceres Seq. ID no. 12691814
MESYYLVLVTKRRQIGCICGHAIYAIDESQMISVPHATIQSDVANSKTELRYKKLLSSVDLTKDFFYSYTYPIMQSLQKNVLSSGEEGMPYDNIFVWNSYLTQPIRSRCNNTIWTLALVHGHFKQIRLSIYGRDFSVTLVSRRSRHFAGTRYLKRGVNDRGRVANDVETEQLVLDDEAGSCKGKMSSVVQMRGSIPLFWSQEASRFSPKPDIFLQRYDPTYESTKMHFEDLVNRYGNPIIVLNLIKTVEKRPREMVLRREFANAVGYLNSIFREENHLKFIHWDFHKFAKSKSANVLAVLGAVASEALDLTGLYFSGKEPSLRDLRAYSAELSRGESANDILSALANREKEMKLTQQKKDEGTNSSAPRYQSGVLRTNCIDCLDRTNVAQYAYGLAALGRQLHAMGLSDTPKIDPDSSIAAALMDMYQSMGDALAQQYGGSAAHNTVFPERQGKWKATTQSREFLKSIKRYYSNTYTDGEKQDAINLFLGYFQPQEGKPALWELDSDYYLHVSGIGDDIFPDIGVQSIAKPMSGIGVNLAPVPAFRDDFSRKKLTSFDKLIEQTCSSIKNVRLCSETDQRPGGNTGSTGVAPDAAEIQLKSPNWLFGSRKPEESSSATKSGADDSEKGVTSTERVNDFCNLDWLSKSDRHQGDIFQRYLSITSTNEANGWYGGTLLGDQDENSEIYRHYAQFCQCPAMEPFENDHEFEQNFAEVLRMNTIDVMDIEEEETEMESDFNEYTQIGSDLGIIPMQCKHFASDPCWLARWLVGDDKVPKVI

SEQ ID NO: 86580 - protein, 747 aa, Arabidopsis thaliana
  peptide (1)..(747): Ceres Seq. ID no. 12691815
MISVPHATIQSDVANSKTELRYKKLLSSVDLTKDFFYSYTYPIMQSLQKNVLSSGEEGMPYDNIFVWNSYLTQPIRSRCNNTIWTLALVHGHFKQIRLSIYGRDFSVTLVSRRSRHFAGTRYLKRGVNDRGRVANDVETEQLVLDDEAGSCKGKMSSVVQMRGSIPLFWSQEASRFSPKPDIFLQRYDPTYESTKMHFEDLVNRYGNPIIVLNLIKTVEKRPREMVLRREFANAVGYLNSIFREENHLKFIHWDFHKFAKSKSANVLAVLGAVASEALDLTGLYFSGKEPSLRDLRAYSAELSRGESANDILSALANREKEMKLTQQKKDEGTNSSAPRYQSGVLRTNCIDCLDRTNVAQYAYGLAALGRQLHAMGLSDTPKIDPDSSIAAALMDMYQSMGDALAQQYGGSAAHNTVFPERQGKWKATTQSREFLKSIKRYYSNTYTDGEKQDAINLFLGYFQPQEGKPALWELDSDYYLHVSGIGDDIFPDIGVQSIAKPMSGIGVNLAPVPAFRDDFSRKKLTSFDKLIEQTCSSIKNVRLCSETDQRPGGNTGSTGVAPDAAEIQLKSPNWLFGSRKPEESSSATKSGADDSEKGVTSTERVNDFCNLDWLSKSDRHQGDIFQRYLSITSTNEANGWYGGTLLGDQDENSEIYRHYAQFCQCPAMEPFENDHEFEQNFAEVLRMNTIDVMDIEEEETEMESDFNEYTQIGSDLGIIPMQCKHFASDPCWLARWLVGDDKVPKVI

SEQ ID NO: 86581 - DNA, 1155 bp, Arabidopsis thaliana
  misc_feature (1)..(1155): Ceres Seq. ID no. 12691822
  misc_feature (1)..(1155): Ortholog of  Ceres SEQ ID NO 14313268 as cited in SEQ ID NO 66794
atggaagctgatttctctccatcagtgactacggtggaaaccggagtggtttatgtagctgagcctctcaacgcttgccgaaacttgaggaataaaccggagcagagcccttatggtacttcccctcttgtgttgatcataagaggaggctgcagttttgagtacaaagtcagaaacgcgcagagaagcggtttcaaggctgccattgtctatgacaatgtggaccgcaacttcttatccgcaatggggggagactcggacggtataaagattcaagcggtttttgtgatgaagagagccggagaaatgctcaagaagtacgcgggttcggaggaaatggaagtcatgttggttcctcctaatacagaggactcggtgtggtcattgtacgcttccatagcattgatcttgtcgctggctattttttgtgttatggttacttgtgtcttcttctatagatattgctcaacaattagaaactctacatctcaattcaatgggatgtgccgtagaacggtgaaagcaatgccgagtgttacattcacttgtgcaaaaatagacaacactacaggtttctcttgcgctatctgccttgaagactacattgttggagacaagctcagggtcttaccttgcagtcacaagtttcatgtcgcttgcgtagactcgtggcttatatcatggagaacgttttgtccagtgtgtaaacgggatgcgagaacgaccgcagatgagccactagctacagagagcacaccgtttctcagttcttccattgcaacatcatctctagtgtgtatagactctcctcctttgggatcctcagtttctttctctccagcgcatgtgagctcgtccttcattcatcaatttgtcaggtcttcgccaatgaatggcagccgtatctcagagaatcttaggcgacaagcctcaccattacagtcatcatcacagcgatcacacctctctatgaagtcttcccattcactgggttattcgaccatgtcacctctcaacgcgatgggcatgtcaccataccggccatacccaagcaatgcatcgcctggattattcagttcaacaaatcatctgctttccaattatacagcaaatacattctctcatttcgcctctgcacactcgcttccggactag

SEQ ID NO: 86582 - protein, 384 aa, Arabidopsis thaliana; identical to SEQ ID NO: 72641
  peptide (1)..(384): Ceres Seq. ID no. 12691823

SEQ ID NO: 86583 - protein, 303 aa, Arabidopsis thaliana; identical to SEQ ID NO: 72642
  peptide (1)..(303): Ceres Seq. ID no. 12691824

SEQ ID NO: 86584 - protein, 288 aa, Arabidopsis thaliana
  peptide (1)..(288): Ceres Seq. ID no. 12691825
MKRAGEMLKKYAGSEEMEVMLVPPNTEDSVWSLYASIALILSLAIFCVMVTCVFFYRYCSTIRNSTSQFNGMCRRTVKAMPSVTFTCAKIDNTTGFSCAICLEDYIVGDKLRVLPCSHKFHVACVDSWLISWRTFCPVCKRDARTTADEPLATESTPFLSSSIATSSLVCIDSPPLGSSVSFSPAHVSSSFIHQFVRSSPMNGSRISENLRRQASPLQSSSQRSHLSMKSSHSLGYSTMSPLNAMGMSPYRPYPSNASPGLFSSTNHLLSNYTANTFSHFASAHSLPD

SEQ ID NO: 86585 - DNA, 1497 bp, Arabidopsis thaliana
  misc_feature (1)..(1497): Ceres Seq. ID no. 12691874
  misc_feature (1)..(1497): Ortholog of  Ceres SEQ ID NO 15170698 as cited in SEQ ID NO 58326
  misc_feature (1)..(1497): Ortholog of  Ceres SEQ ID NO 14302279 as cited in SEQ ID NO 68864
aaaaaaaaactaaaccctagaatgcgtatcgctttctttgacctgaatgtgcaatcaaactcctcttagatctatggctctcgattcttccggaaaacaacctgagcagcagcaacaacaacaaccacgagcctcctctggaaacggcgaggcaagattgaagcttcggagaacccctaatgaagaacatgagcctgagaactatgaagatctacctttggactatagtccttctctgttcacctctcttgagcgttacttacctgagcagcttctcaattccacacgaatcgataaagctagtttcatgagagaccttcttctccgatattcccctgatactgagcgagttcgggttctgaggcataaagaatacagagacaaaatcatgtcttcttaccaacgtctgcatggagagatctatactcttgaccctagtagtttctttgcgccatcgtttcttggagcttttagtcggaagtcagagccgaatttcagaagtagtatggttgaatcttatcctgggattttcacttttgaaatgtttaaaccacagttttgtgaaatgttattagcagaggttgaacatatggagaaatgggtttatgattcaagatccacaataatgagacctaatacgatgaacaatttcggtgttgtccttgatgattttggctttgatagcatgcttcagaagttggttgatgactttattagtcctatagctcaagttctgttcccggaagtctgtggaacctctttagattctcaccatggctatattgttgaatatggaaaagatagggatgttgatcttgggtttcatgtggatgactcagaagttagtttaaatgtctgcttgggtaaacaattctctggcggggagctgtattttcgaggggtgagatgtgataagcatgtgaattccgatagcactgaaaaggaagtttatgattactctcatgtacctggtcacgccattcttcatcgtggacgtcatcgccatggtgctagagctacaacttctggacaccgagccaacttgattttgtggtgtagaagctcaacttttcgagagatgaagaattatcagagagatttctcaggttggtgtggaggatgcaaacttgataaacagagaaggcagcgtgattcgattaatgcaactaaagagatactagcaaggaaagctgcagagaagacacttgttgagctggcttcaaaatcatgtgccgagtaaacaaaaacaagaatatgtcaaatacctcatcttctttgtaccattccagtggctatgtgtatatagagaggcaagttaaatcgtttgtttgtaagcaagcattagatacctttgtcaaaggtaaattttgttccatttttcagattgctgcctgtaacaataaatttcttagaggagtgaaggcaaatgaaatacacaaatgttatctcttggagaatttgagaatgttggaagtttttggaagtaaaaatgtttgt

SEQ ID NO: 86586 - protein, 397 aa, Arabidopsis thaliana
  peptide (1)..(397): Ceres Seq. ID no. 12691875
MCNQTPLRSMALDSSGKQPEQQQQQQPRASSGNGEARLKLRRTPNEEHEPENYEDLPLDYSPSLFTSLERYLPEQLLNSTRIDKASFMRDLLLRYSPDTERVRVLRHKEYRDKIMSSYQRLHGEIYTLDPSSFFAPSFLGAFSRKSEPNFRSSMVESYPGIFTFEMFKPQFCEMLLAEVEHMEKWVYDSRSTIMRPNTMNNFGVVLDDFGFDSMLQKLVDDFISPIAQVLFPEVCGTSLDSHHGYIVEYGKDRDVDLGFHVDDSEVSLNVCLGKQFSGGELYFRGVRCDKHVNSDSTEKEVYDYSHVPGHAILHRGRHRHGARATTSGHRANLILWCRSSTFREMKNYQRDFSGWCGGCKLDKQRRQRDSINATKEILARKAAEKTLVELASKSCAE

SEQ ID NO: 86587 - protein, 388 aa, Arabidopsis thaliana
  peptide (1)..(388): Ceres Seq. ID no. 12691876
MALDSSGKQPEQQQQQQPRASSGNGEARLKLRRTPNEEHEPENYEDLPLDYSPSLFTSLERYLPEQLLNSTRIDKASFMRDLLLRYSPDTERVRVLRHKEYRDKIMSSYQRLHGEIYTLDPSSFFAPSFLGAFSRKSEPNFRSSMVESYPGIFTFEMFKPQFCEMLLAEVEHMEKWVYDSRSTIMRPNTMNNFGVVLDDFGFDSMLQKLVDDFISPIAQVLFPEVCGTSLDSHHGYIVEYGKDRDVDLGFHVDDSEVSLNVCLGKQFSGGELYFRGVRCDKHVNSDSTEKEVYDYSHVPGHAILHRGRHRHGARATTSGHRANLILWCRSSTFREMKNYQRDFSGWCGGCKLDKQRRQRDSINATKEILARKAAEKTLVELASKSCAE

SEQ ID NO: 86588 - protein, 310 aa, Arabidopsis thaliana; identical to SEQ ID NO: 23612
  peptide (1)..(310): Ceres Seq. ID no. 12691877

SEQ ID NO: 86589 - DNA, 3900 bp, Arabidopsis thaliana
  misc_feature (1)..(3900): Ceres Seq. ID no. 12691904
  misc_feature (1)..(3900): Ortholog of  Ceres SEQ ID NO 12581802 as cited in SEQ ID NO 54880
atggatccaattgaatcagtggagtacaatggctttgaaactaccaatggtaactctcacaacgacgaccatggttggaagaaagtagtgtacccaaaacgtaaccggaagcaaaaaccggcggatcaagcggcggcgacgaagaatggtgtcaccgggaatctaattcccaatggtactttatccaatggaggaggcaacgtcttccgttctcttgaggagcaagctgaaggtcgtcatctacagatcctcgccgcgaagaaagcttccgatacggcggatgtgtcggacgggggaagatctaaatggcgatctaacgggtacggcgacgaagggtatgattttgatgacagcgacagtgaaatcgcggtggggaaggagaatttgaaagcggaggaagttaagaaaccgaaggttaagaaggtgaagaagcctaaggttactttagctgaagctgctgctaagattgatgtatctaatctcgcagctttcctcgttgaagcttcgattccactttctcatattcctgaagcagtgtataagacatcagctgattggattaaccaacgtcccattgaggcacttggagcctttgtattgtggggcttggattgtattcttgctgacttggctgtacaacaaggaggtgtcaagggtggtaagaaaggagcacaacaggcttcttcgaaatctcaggttgcgatatttgtggcggtagcaatggttttgcgtaagaaacctgatgctttaactaatatattgccaactttgagggagaatcccaagtatcagggacaggataagcttccagttacagtttggatgatggctcaggcctcccaaggtgatatatcagtaggcttgtactcgtgggctcacaacttgttaccggtggtcagtagcaagagttgcaatcctcagtcaagggatctcattcttcagttggttgagaggatcttgtccaacccgaaggcccggaccatacttgtaaatggggctgttaggaagggagagcgattgattccacctccttcgtttgagatcttggttcgacttacattccctgcatcttccgcaagagtgaaggagaatctttataccgacaatttgaaagccagtgttgctgttcttaaaaagctcattggcgagtggaaggagcgttctgtcaagctgactcctgctgaaaccctcactctcaaccaaacaatgaagagcttgaggcaaaagaacgaggaagctcttactgagggaggtaatggtgtaagccagtccctatacaaagacgcagacaagtactgcaaggtgatcgctgggaaactctccagtggtggctgcatcaaaagtatagctaccactgctgcacttctagctgctactggttttgctggtgctgctgctctgtctgccaaccctgaggctatagcttacctaaagaacctgtttatcagagaaaaggttagaacttttgaagaatcagatagcttcttcacagaaggaacgttcgaattgattcgcttcttaatgtcactctctacaatagcttctggtatcggcgttctcgagcttccttgtttgcgtctgttaccaatctcaagcacccaaatccagtttctcactgttgaagctagaaaacaatctagaagaataagacgcgagcgctccttcagcccttttccagtacttattcaatcgaaccgtcgtcttcgtcatggtttctcagagctcaattcgagttttgatcgttccaacagtggagaaactggttccgataccactcttaaagatggtgaagaagtgaggagtgaaagctcttcaggtgttggtgatagctatgtgggcttgtttgtgggaatgctcggtttggacaacgatcctcttgatagagagcaggcgatagagacgctatggaagtactctttgggtggaaagaaatgtattgatgcgataatgcagtttcatggttgtttgaatctaattgtcaatcttctcaagtctgagtccagctccgcctgtgaagctgctgctgggcttatacggtctatagcttctgtgaatctgtacagagaatccgttgctgagagtggagcgttggaagagataaccgctctactgagccgaccttcgctagctacagtggtgaaagaacaatgcatatgtgctctgtggaatctgactgtggatgaagaaattagggagaaggttgctgactttgatatccttaggctactcattagtttccttgaagatgatgatgtaaacgtaaaggaagcagctggtggcgtcttggccaatctagcccttagccgctcgactcacaagattctggttgaagtaggagtcataccaaaactggcaaaattgttgaaagccgataatacagaaaacaaagggtctaaagttattagaaaagaagcaagaaatgtgcttttggagctagccaaagacgaatactacagaattctcgtcattgaggagggagttgtacccattcccataattggtgcagacgcttataagtccttcagaccggatttgtattcttggcctagtttaccagatggtataaatattgagcagacagcaaaagctccttcaagatttggtgcctctgagctgctccttggtttaaatgttgacaagaatgttgacgacgtagatgaagccaaaatgaaagcaatagttgggaggacaaatcagcagttccttgcccgtattggagcaattgaatttgagaaggaaattaagtccgaagggccagggaaatctcagcagcttacccttcttccttgtgtagatggtgtggctcgattagtcttgattcttggattggcagatgaattggcagctacaagagctgcagagtcaattgctgatgcatctatcaacgaggatatgcgggtttctttcatggaagccggagctgtaaagcctttggttcagcttttagccaacaacaacaaagagactgttaaattacccgtcatccgtgccttgaaaaatttatcacttagaagtattaattactcaaaacatcggatgggaatgaacagaaaggaagttctggacgctgctgttttttctcggctcgtccagattgcgaaaacagcctctccgaacctgctaagaaacgcaatctctgtcatcgagtttggtataatcagtaatccaaacatggacacgatcatctccaaggatatcacaactgttcttgatcttgctctccggcagaaagtcctggaagcatacaatactttttatggaaatgcagaacctgagaatgaagctgaggagttagagaaacatctgcttaagctagaagaagctggtttgacgatttccgctgcttcaaggctactgacaaaacttcttgactccgagtcctttcgccaaacaatagataccgcggtcttcatagaattagtaaggaagatcctaagatcaagcctccctctacactacaaagactgggttgccgcttgtcttgtcaaactcaccgctctctcctctccctctcaatccctcaacaatccgatcaatcttgaggtaactctgtacaaaacgatcccgagcctcgtggaacaaatgagcttttcctcatcaccagaaacgaaagaagcagcggttttagaactgaacaagatagtctccgagggagttccagaatctatccaaacacttgcttcacaaggaggtatcgaaccgctggttaagcttcttgaagaaaggaacgagcggtgcgttgaagcgagtttgtcagtattgtacaacttaaccatggacagtgagaaccacacagccatcataagagcaggagctgtaccagtattgagacgtatcgttatgtctcaacgaccacaatgggagaaagctcttcggttactcagaaatttacccgtttaa

SEQ ID NO: 86590 - protein, 1299 aa, Arabidopsis thaliana
  peptide (1)..(1299): Ceres Seq. ID no. 12691905
MDPIESVEYNGFETTNGNSHNDDHGWKKVVYPKRNRKQKPADQAAATKNGVTGNLIPNGTLSNGGGNVFRSLEEQAEGRHLQILAAKKASDTADVSDGGRSKWRSNGYGDEGYDFDDSDSEIAVGKENLKAEEVKKPKVKKVKKPKVTLAEAAAKIDVSNLAAFLVEASIPLSHIPEAVYKTSADWINQRPIEALGAFVLWGLDCILADLAVQQGGVKGGKKGAQQASSKSQVAIFVAVAMVLRKKPDALTNILPTLRENPKYQGQDKLPVTVWMMAQASQGDISVGLYSWAHNLLPVVSSKSCNPQSRDLILQLVERILSNPKARTILVNGAVRKGERLIPPPSFEILVRLTFPASSARVKENLYTDNLKASVAVLKKLIGEWKERSVKLTPAETLTLNQTMKSLRQKNEEALTEGGNGVSQSLYKDADKYCKVIAGKLSSGGCIKSIATTAALLAATGFAGAAALSANPEAIAYLKNLFIREKVRTFEESDSFFTEGTFELIRFLMSLSTIASGIGVLELPCLRLLPISSTQIQFLTVEARKQSRRIRRERSFSPFPVLIQSNRRLRHGFSELNSSFDRSNSGETGSDTTLKDGEEVRSESSSGVGDSYVGLFVGMLGLDNDPLDREQAIETLWKYSLGGKKCIDAIMQFHGCLNLIVNLLKSESSSACEAAAGLIRSIASVNLYRESVAESGALEEITALLSRPSLATVVKEQCICALWNLTVDEEIREKVADFDILRLLISFLEDDDVNVKEAAGGVLANLALSRSTHKILVEVGVIPKLAKLLKADNTENKGSKVIRKEARNVLLELAKDEYYRILVIEEGVVPIPIIGADAYKSFRPDLYSWPSLPDGINIEQTAKAPSRFGASELLLGLNVDKNVDDVDEAKMKAIVGRTNQQFLARIGAIEFEKEIKSEGPGKSQQLTLLPCVDGVARLVLILGLADELAATRAAESIADASINEDMRVSFMEAGAVKPLVQLLANNNKETVKLPVIRALKNLSLRSINYSKHRMGMNRKEVLDAAVFSRLVQIAKTASPNLLRNAISVIEFGIISNPNMDTIISKDITTVLDLALRQKVLEAYNTFYGNAEPENEAEELEKHLLKLEEAGLTISAASRLLTKLLDSESFRQTIDTAVFIELVRKILRSSLPLHYKDWVAACLVKLTALSSPSQSLNNPINLEVTLYKTIPSLVEQMSFSSSPETKEAAVLELNKIVSEGVPESIQTLASQGGIEPLVKLLEERNERCVEASLSVLYNLTMDSENHTAIIRAGAVPVLRRIVMSQRPQWEKALRLLRNLPV

SEQ ID NO: 86591 - protein, 1059 aa, Arabidopsis thaliana
  peptide (1)..(1059): Ceres Seq. ID no. 12691906
MVLRKKPDALTNILPTLRENPKYQGQDKLPVTVWMMAQASQGDISVGLYSWAHNLLPVVSSKSCNPQSRDLILQLVERILSNPKARTILVNGAVRKGERLIPPPSFEILVRLTFPASSARVKENLYTDNLKASVAVLKKLIGEWKERSVKLTPAETLTLNQTMKSLRQKNEEALTEGGNGVSQSLYKDADKYCKVIAGKLSSGGCIKSIATTAALLAATGFAGAAALSANPEAIAYLKNLFIREKVRTFEESDSFFTEGTFELIRFLMSLSTIASGIGVLELPCLRLLPISSTQIQFLTVEARKQSRRIRRERSFSPFPVLIQSNRRLRHGFSELNSSFDRSNSGETGSDTTLKDGEEVRSESSSGVGDSYVGLFVGMLGLDNDPLDREQAIETLWKYSLGGKKCIDAIMQFHGCLNLIVNLLKSESSSACEAAAGLIRSIASVNLYRESVAESGALEEITALLSRPSLATVVKEQCICALWNLTVDEEIREKVADFDILRLLISFLEDDDVNVKEAAGGVLANLALSRSTHKILVEVGVIPKLAKLLKADNTENKGSKVIRKEARNVLLELAKDEYYRILVIEEGVVPIPIIGADAYKSFRPDLYSWPSLPDGINIEQTAKAPSRFGASELLLGLNVDKNVDDVDEAKMKAIVGRTNQQFLARIGAIEFEKEIKSEGPGKSQQLTLLPCVDGVARLVLILGLADELAATRAAESIADASINEDMRVSFMEAGAVKPLVQLLANNNKETVKLPVIRALKNLSLRSINYSKHRMGMNRKEVLDAAVFSRLVQIAKTASPNLLRNAISVIEFGIISNPNMDTIISKDITTVLDLALRQKVLEAYNTFYGNAEPENEAEELEKHLLKLEEAGLTISAASRLLTKLLDSESFRQTIDTAVFIELVRKILRSSLPLHYKDWVAACLVKLTALSSPSQSLNNPINLEVTLYKTIPSLVEQMSFSSSPETKEAAVLELNKIVSEGVPESIQTLASQGGIEPLVKLLEERNERCVEASLSVLYNLTMDSENHTAIIRAGAVPVLRRIVMSQRPQWEKALRLLRNLPV

SEQ ID NO: 86592 - protein, 1025 aa, Arabidopsis thaliana
  peptide (1)..(1025): Ceres Seq. ID no. 12691907
MMAQASQGDISVGLYSWAHNLLPVVSSKSCNPQSRDLILQLVERILSNPKARTILVNGAVRKGERLIPPPSFEILVRLTFPASSARVKENLYTDNLKASVAVLKKLIGEWKERSVKLTPAETLTLNQTMKSLRQKNEEALTEGGNGVSQSLYKDADKYCKVIAGKLSSGGCIKSIATTAALLAATGFAGAAALSANPEAIAYLKNLFIREKVRTFEESDSFFTEGTFELIRFLMSLSTIASGIGVLELPCLRLLPISSTQIQFLTVEARKQSRRIRRERSFSPFPVLIQSNRRLRHGFSELNSSFDRSNSGETGSDTTLKDGEEVRSESSSGVGDSYVGLFVGMLGLDNDPLDREQAIETLWKYSLGGKKCIDAIMQFHGCLNLIVNLLKSESSSACEAAAGLIRSIASVNLYRESVAESGALEEITALLSRPSLATVVKEQCICALWNLTVDEEIREKVADFDILRLLISFLEDDDVNVKEAAGGVLANLALSRSTHKILVEVGVIPKLAKLLKADNTENKGSKVIRKEARNVLLELAKDEYYRILVIEEGVVPIPIIGADAYKSFRPDLYSWPSLPDGINIEQTAKAPSRFGASELLLGLNVDKNVDDVDEAKMKAIVGRTNQQFLARIGAIEFEKEIKSEGPGKSQQLTLLPCVDGVARLVLILGLADELAATRAAESIADASINEDMRVSFMEAGAVKPLVQLLANNNKETVKLPVIRALKNLSLRSINYSKHRMGMNRKEVLDAAVFSRLVQIAKTASPNLLRNAISVIEFGIISNPNMDTIISKDITTVLDLALRQKVLEAYNTFYGNAEPENEAEELEKHLLKLEEAGLTISAASRLLTKLLDSESFRQTIDTAVFIELVRKILRSSLPLHYKDWVAACLVKLTALSSPSQSLNNPINLEVTLYKTIPSLVEQMSFSSSPETKEAAVLELNKIVSEGVPESIQTLASQGGIEPLVKLLEERNERCVEASLSVLYNLTMDSENHTAIIRAGAVPVLRRIVMSQRPQWEKALRLLRNLPV

SEQ ID NO: 86593 - DNA, 569 bp, Arabidopsis thaliana
  misc_feature (1)..(569): Ceres Seq. ID no. 12691930
  misc_feature (1)..(569): Ortholog of  Ceres SEQ ID NO 12585656 as cited in SEQ ID NO 68874
aaaaccctagatctgatactaaaatggcgacggcgttgaagaagaacagaaagaagagaggtcacgtcagcgccggacatggacgtatcggtaagcaccgtaagcatcccggaggtcgtggaaacgcaggaggtatgcatcaccacaggatcctcttcgacaagtaccatccaggttacttcgggaaagttggtatgaggtatttccacaagcttcgtaacaagttcttttgcccaatcgtgaacctggacaagctatggtcacttgttcctgaagacgtgaaggcgaaatcgagcaaggataatgttccgttgatcgatgtgacgcagcatggtttcttcaaggttttggggaaaggtcatttgcctgagaacaaacctttcgttgtgaaggctaagcttatctctaagactgctgagaagaagattaaggaagctggtggtgctgttgttctcactgcttagttttttttttcaattcagtctctttttaatttatttcatgttattgaactcagctttgttggattttggaatcagagatcttttaatctatggtattggattata

SEQ ID NO: 86594 - protein, 153 aa, Arabidopsis thaliana
  peptide (1)..(153): Ceres Seq. ID no. 12691931
NPRSDTKMATALKKNRKKRGHVSAGHGRIGKHRKHPGGRGNAGGMHHHRILFDKYHPGYFGKVGMRYFHKLRNKFFCPIVNLDKLWSLVPEDVKAKSSKDNVPLIDVTQHGFFKVLGKGHLPENKPFVVKAKLISKTAEKKIKEAGGAVVLTA

SEQ ID NO: 86595 - protein, 146 aa, Arabidopsis thaliana; identical to SEQ ID NO: 35436
  peptide (1)..(146): Ceres Seq. ID no. 12691932

SEQ ID NO: 86596 - protein, 109 aa, Arabidopsis thaliana; identical to SEQ ID NO: 35437
  peptide (1)..(109): Ceres Seq. ID no. 12691933

SEQ ID NO: 86597 - DNA, 1790 bp, Arabidopsis thaliana
  misc_feature (1)..(1790): Ceres Seq. ID no. 12691942
  misc_feature (1)..(1790): Ortholog of  Ceres SEQ ID NO 13600098 as cited in SEQ ID NO 0
aactctccccactctttgccttgcccttggctctagaaccgaacgtgactctccagatagacttttggagtcacaacattgagtttgaagaggagggaagaagtgagctagggattggttcagagtgaacataaatggctctcaaggcattagactacgatactctgaatgaaaacgtcaagaagtgtcagtatgccgtaagaggtgaactttatctccgagcttctgagctgcagaaagaaggcaaaaagattattttcacaaacgttgggaaccctcatgctttaggacagaagccattgacatttcctcgccaggtggttgcgctttgccaagctccgtttctactagatgacccaaatgttggaatgctatttccagctgatgctattgcaagagctaaacattatctttccttgacttcaggcggtttaggtgcttacagtgattcaagaggccttccaggagttaggaaagaggttgctgagttcattcaacggcgtgatgggtatccaagtgacccagaactcatctttctcactgatggagctagcaaaggtgtgatgcaaatcttgaattgtgttatacgcggtaatggagatgggattctagttccggttccacagtatccactttactcagctaccatatcactgttaggtggtactcttgttccttactatcttgatgagtctgaaaactggggacttgatgttgctaaccttcgacaatccgttgctcaggctcgttctcaagggataacagtaagggcaatggtgatcattaaccctgggaacccaactggccagtgtctaagcgaagctaacataagagagatattgaagttctgttataacgagaaactggttcttctgggagacgaggtttatcagcagaacatataccaggatgagcgtccctttatcagctccaagaaggttttgatggaaatgggttcgccgttcagcaaggaagttcagcttgtatcttttcacacagtctctaaaggatattggggtgaatgtggacagcgaggtggatactttgagatgaccaacctccctccaagggttgttgaggagatatacaaggttgcatcaattgccctcagccctaatgtctctgcgcaaatctttatgggtttgatggttaatcctccaaagcctggagacatttcatatgaccagttcgcccgtgaaagcaaggggattcttgaatctttgagaagaagagcaaggctcatgacagatggattcaacagctgcaaaaacgtcgtgtgcaatttcacagaaggtgcaatgtattcgtttcctcaaatacggttaccaacgggagctctccaagctgcaaaacaagctggaaaagtgccagacgttttctactgtctcaagctcttagaagccacaggaatctccacagtacctggctctggatttggacagaaagaaggtgtgttccatctgaggacaacaatcctgccagcagaagatgagatgccggagatcatggatagcttcaagaagttcaacgacgagttcatgactcagtatgataataactttggttattcgaaaatgtgattacttcttcttctgaacgactattgtgttctgctacactctttaaagctaaatctctgtagtacactctttctctttgccctattctataaaccatatctctctctttgtgtctcttttttttgggtgtaaactctctcttgtgtctctatttctattttcaattggaaactgattaagatcttttctcaatgaaatgaagtttaggcc

SEQ ID NO: 86598 - protein, 481 aa, Arabidopsis thaliana; identical to SEQ ID NO: 28645
  peptide (1)..(481): Ceres Seq. ID no. 12691943

SEQ ID NO: 86599 - protein, 403 aa, Arabidopsis thaliana; identical to SEQ ID NO: 28646
  peptide (1)..(403): Ceres Seq. ID no. 12691944

SEQ ID NO: 86600 - protein, 338 aa, Arabidopsis thaliana; identical to SEQ ID NO: 28647
  peptide (1)..(338): Ceres Seq. ID no. 12691945

SEQ ID NO: 86601 - DNA, 1275 bp, Arabidopsis thaliana
  misc_feature (1)..(1275): Ceres Seq. ID no. 12691965
  misc_feature (1)..(1275): Ortholog of  Ceres SEQ ID NO 14303043 as cited in SEQ ID NO 67110
atgccgagaccgtggactgggaaagcaccgttgaagaaatcgaagaagaagattccattgtttgattcttttaatccaccgccggcgggaaaatctggagttaagtatgtagaaatgcctgggccgttaccgtttgggaggtatccaaaggaaggaatgaatagagaagaggttttaggagagccattgaagagatgggagaaaggaatgttgattaagcctcatatgcatgataatcgtcaggttaatttgggtagagatggatttacacataatatgttggaattgatacattcgcattggaagagacgacgtgtttgtaaagttcgatgtaaaggagttcctactgtggatatgaataacgtgtgtcgtgttcttgaggaaaagacaggaggagagatcattcatagagttggaggtgtggtgtaccttttcaggggtaggaattacaattaccgtacacgtccgcagtacccattgatgttgtggaaaccagcagctcctgtttatccaaagcttattcaagaagttcctgaaggattgacgaaagaggaagctcatgagttcagggtgaagggaaagtctcttaggcctatatgcaagttgtctaaaaatggagtttacgtgtcgctagtcaaagatgtgagggatgcctttgaactgagttcattggtgaaagtcgactgcccagggcttgaaccaagtgattataagaaaattggcgctaagctcaaggagttagttccttgtgtgcttctgtctttcgatgatgagcaaatactcatgtggagaggacgagaatggaagtcgcggtttgtagacaatcctctaattccaagcctttctgagaccaacacaacgaacgaacttgatccctcagacaaacctagtgaagaacaaactgtggctaatccaagtacaacgatctcaagccccaaaatgatctcgctctggcaacgagcgttggaatcgtcgaaggctgtgattcttgaagagcttgacctcggtccagacgatctattgaagaaggtggaagagttagaaggcacttcactggctgcagaacacacttacacagctatggtcttgtcaaatactgatggtgcagcagaggattacgtggatgaaaaggaccggtccgaagagtattatagtgacatagacgatgactttgatgacgagtgttccgatgatgagtcgctagatccggttggtccagtgggatctttacccgttgacaagatagttaggaagttgagggaaagactaaaatag

SEQ ID NO: 86602 - protein, 424 aa, Arabidopsis thaliana
  peptide (1)..(424): Ceres Seq. ID no. 12691966
MPRPWTGKAPLKKSKKKIPLFDSFNPPPAGKSGVKYVEMPGPLPFGRYPKEGMNREEVLGEPLKRWEKGMLIKPHMHDNRQVNLGRDGFTHNMLELIHSHWKRRRVCKVRCKGVPTVDMNNVCRVLEEKTGGEIIHRVGGVVYLFRGRNYNYRTRPQYPLMLWKPAAPVYPKLIQEVPEGLTKEEAHEFRVKGKSLRPICKLSKNGVYVSLVKDVRDAFELSSLVKVDCPGLEPSDYKKIGAKLKELVPCVLLSFDDEQILMWRGREWKSRFVDNPLIPSLSETNTTNELDPSDKPSEEQTVANPSTTISSPKMISLWQRALESSKAVILEELDLGPDDLLKKVEELEGTSLAAEHTYTAMVLSNTDGAAEDYVDEKDRSEEYYSDIDDDFDDECSDDESLDPVGPVGSLPVDKIVRKLRERLK

SEQ ID NO: 86603 - protein, 386 aa, Arabidopsis thaliana
  peptide (1)..(386): Ceres Seq. ID no. 12691967
MPGPLPFGRYPKEGMNREEVLGEPLKRWEKGMLIKPHMHDNRQVNLGRDGFTHNMLELIHSHWKRRRVCKVRCKGVPTVDMNNVCRVLEEKTGGEIIHRVGGVVYLFRGRNYNYRTRPQYPLMLWKPAAPVYPKLIQEVPEGLTKEEAHEFRVKGKSLRPICKLSKNGVYVSLVKDVRDAFELSSLVKVDCPGLEPSDYKKIGAKLKELVPCVLLSFDDEQILMWRGREWKSRFVDNPLIPSLSETNTTNELDPSDKPSEEQTVANPSTTISSPKMISLWQRALESSKAVILEELDLGPDDLLKKVEELEGTSLAAEHTYTAMVLSNTDGAAEDYVDEKDRSEEYYSDIDDDFDDECSDDESLDPVGPVGSLPVDKIVRKLRERLK

SEQ ID NO: 86604 - protein, 372 aa, Arabidopsis thaliana
  peptide (1)..(372): Ceres Seq. ID no. 12691968
MNREEVLGEPLKRWEKGMLIKPHMHDNRQVNLGRDGFTHNMLELIHSHWKRRRVCKVRCKGVPTVDMNNVCRVLEEKTGGEIIHRVGGVVYLFRGRNYNYRTRPQYPLMLWKPAAPVYPKLIQEVPEGLTKEEAHEFRVKGKSLRPICKLSKNGVYVSLVKDVRDAFELSSLVKVDCPGLEPSDYKKIGAKLKELVPCVLLSFDDEQILMWRGREWKSRFVDNPLIPSLSETNTTNELDPSDKPSEEQTVANPSTTISSPKMISLWQRALESSKAVILEELDLGPDDLLKKVEELEGTSLAAEHTYTAMVLSNTDGAAEDYVDEKDRSEEYYSDIDDDFDDECSDDESLDPVGPVGSLPVDKIVRKLRERLK

SEQ ID NO: 86605 - DNA, 2742 bp, Arabidopsis thaliana
  misc_feature (1)..(2742): Ceres Seq. ID no. 12692025
  misc_feature (1)..(2742): Ortholog of  Ceres SEQ ID NO 13638292 as cited in SEQ ID NO 57738
atggggcgttctgcccatcttgtttatgctcttggttttattatcatggccacaatggttgctgcgtcttatgagccctacacgtatagctcaccaccaccaccattgtatgactctcctacaccaaaggttgactataagtctccaccacctccatacgtttacagttctccaccacctccactatcgtattcgccatctcccaaggtagactacaagtctccaccacctccatatgtttacagctctccaccaccaccatattactcaccatcccctaaagtcgaatacaaatccccaccacctccatatgtttatagttctccaccaccaccatattactcaccctcacctaaagtagattacaagtctccaccaccaccgtatgtttacagctccccaccaccaccatactattcaccttctccaaagcccacatacaaatcaccaccacctccatatgtttacaattctccaccaccaccatactactcaccatcccctaaggtcgaatacaaatctccaccacctccatacgtctatagctctccacccccaccatactactcaccctcacctaaagtagattataagtctccaccaccaccgtatgtttacaactctccaccaccaccatactattcaccttctccaaaacccacatacaagtccccaccaccaccatatatttacagctctccaccaccaccatactattctccttctcctaaaccagtatacaaatctccaccaccaccatacgtctattcctctccaccaccaccatactattcaccttctcctaaaccagcatacaaatctccaccaccaccgtatgtttatagctctccacctcctccatactactcgccttctcctaaacccatatacaagtctccaccaccaccgtacgtctacaactctcctccaccaccatactactctccttctccaaaaccggcatacaaatctccaccaccaccatacgtatacagctttccacctcctccatactactcgccttctcctaaacccgtatacaagtctccaccaccaccatacgtctacaactctcctccaccaccatactactctccttctccaaaaccggcatacaaatctccaccaccaccatacgtatacagctctccaccaccaccatactactcgccttctcctaaaccaacatacaaatctccaccaccaccatatgtttatagctctccacctcctccatactactcgccttctcctaaacccgtatacaagtctccaccaccaccgtacatctacaactctccaccaccaccatactactccccttcacctaaaccatcatacaaatccccaccaccaccatatgtttacagctctccaccaccaccatattactcgccttctcctaagcttacatacaaatcctcaccaccaccctatgtttacagctctccaccaccaccatattactctccttctcctaaggttgtatacaaatctccaccaccaccatatgtttacagctctccaccaccaccatactactccccttcacctaaaccatcatacaaatccccaccaccaccgtacgtctataactctccacctcctccttactactctccttcacctaaggtcatatacaaatcgccaccacacccacatgtatgtgtttgtcccccacctccaccatgctactctcattctccaaagattgagtacaaatccccaccaacaccatatgtttaccactcaccacctcccccaccttattattcgccttcgcctaaacctgcatataaatcttcaccaccaccttacgtctacagctctccaccaccaccatattactcacctgctcctaagcccgtatacaaatctccaccaccaccatacgtgtacaactccccaccaccaccatattactcaccatcccctaaacctacatacaaatctccaccaccaccatatgtatacagctctccaccaccaccatattactcacctactcctaaacctacatacaaatctccaccacccccatatgtctacagttccccaccaccaccatattactcgccttctcctaagccaacatacaaatccccaccaccaccatacgtctacagttctccaccaccaccatattactcacctgctcctaagcccacatacaaatctccaccaccaccatacgtttacagctccccaccaccaccatactactcgccttcccctaagcctacatacaaatctccaccacctccatatgtatatagctctccacctccaccaccttattactctccttctccaaaggttgagtacaaatctccgccaccaccatatgtctacagttctcctcccccaccatattactctccttctccaaaggttgagtacaaatctcctcctccaccgtatgtttatagttctccacctccaccaccatattactctccttctccaaaggttgagtacaaatcccctccaccaccgtatgtctacagctccccaccaccacccacgtattattctccttctccaaaggttgaatacaaatctccaccacctccatatgtctacaactctccacctccaccggcgtattactctccatctccaaagattgagtacaaatctccacctccaccatatgtctacagttctccaccaccaccatcatattctccttctccaaaagctgaatacaaatctcctcctcccccatccttatattactaa

SEQ ID NO: 86606 - protein, 913 aa, Arabidopsis thaliana
  peptide (1)..(913): Ceres Seq. ID no. 12692026
MGRSAHLVYALGFIIMATMVAASYEPYTYSSPPPPLYDSPTPKVDYKSPPPPYVYSSPPPPLSYSPSPKVDYKSPPPPYVYSSPPPPYYSPSPKVEYKSPPPPYVYSSPPPPYYSPSPKVDYKSPPPPYVYSSPPPPYYSPSPKPTYKSPPPPYVYNSPPPPYYSPSPKVEYKSPPPPYVYSSPPPPYYSPSPKVDYKSPPPPYVYNSPPPPYYSPSPKPTYKSPPPPYIYSSPPPPYYSPSPKPVYKSPPPPYVYSSPPPPYYSPSPKPAYKSPPPPYVYSSPPPPYYSPSPKPIYKSPPPPYVYNSPPPPYYSPSPKPAYKSPPPPYVYSFPPPPYYSPSPKPVYKSPPPPYVYNSPPPPYYSPSPKPAYKSPPPPYVYSSPPPPYYSPSPKPTYKSPPPPYVYSSPPPPYYSPSPKPVYKSPPPPYIYNSPPPPYYSPSPKPSYKSPPPPYVYSSPPPPYYSPSPKLTYKSSPPPYVYSSPPPPYYSPSPKVVYKSPPPPYVYSSPPPPYYSPSPKPSYKSPPPPYVYNSPPPPYYSPSPKVIYKSPPHPHVCVCPPPPPCYSHSPKIEYKSPPTPYVYHSPPPPPYYSPSPKPAYKSSPPPYVYSSPPPPYYSPAPKPVYKSPPPPYVYNSPPPPYYSPSPKPTYKSPPPPYVYSSPPPPYYSPTPKPTYKSPPPPYVYSSPPPPYYSPSPKPTYKSPPPPYVYSSPPPPYYSPAPKPTYKSPPPPYVYSSPPPPYYSPSPKPTYKSPPPPYVYSSPPPPPYYSPSPKVEYKSPPPPYVYSSPPPPYYSPSPKVEYKSPPPPYVYSSPPPPPYYSPSPKVEYKSPPPPYVYSSPPPPTYYSPSPKVEYKSPPPPYVYNSPPPPAYYSPSPKIEYKSPPPPYVYSSPPPPSYSPSPKAEYKSPPPPSLYY

SEQ ID NO: 86607 - protein, 898 aa, Arabidopsis thaliana
  peptide (1)..(898): Ceres Seq. ID no. 12692027
MATMVAASYEPYTYSSPPPPLYDSPTPKVDYKSPPPPYVYSSPPPPLSYSPSPKVDYKSPPPPYVYSSPPPPYYSPSPKVEYKSPPPPYVYSSPPPPYYSPSPKVDYKSPPPPYVYSSPPPPYYSPSPKPTYKSPPPPYVYNSPPPPYYSPSPKVEYKSPPPPYVYSSPPPPYYSPSPKVDYKSPPPPYVYNSPPPPYYSPSPKPTYKSPPPPYIYSSPPPPYYSPSPKPVYKSPPPPYVYSSPPPPYYSPSPKPAYKSPPPPYVYSSPPPPYYSPSPKPIYKSPPPPYVYNSPPPPYYSPSPKPAYKSPPPPYVYSFPPPPYYSPSPKPVYKSPPPPYVYNSPPPPYYSPSPKPAYKSPPPPYVYSSPPPPYYSPSPKPTYKSPPPPYVYSSPPPPYYSPSPKPVYKSPPPPYIYNSPPPPYYSPSPKPSYKSPPPPYVYSSPPPPYYSPSPKLTYKSSPPPYVYSSPPPPYYSPSPKVVYKSPPPPYVYSSPPPPYYSPSPKPSYKSPPPPYVYNSPPPPYYSPSPKVIYKSPPHPHVCVCPPPPPCYSHSPKIEYKSPPTPYVYHSPPPPPYYSPSPKPAYKSSPPPYVYSSPPPPYYSPAPKPVYKSPPPPYVYNSPPPPYYSPSPKPTYKSPPPPYVYSSPPPPYYSPTPKPTYKSPPPPYVYSSPPPPYYSPSPKPTYKSPPPPYVYSSPPPPYYSPAPKPTYKSPPPPYVYSSPPPPYYSPSPKPTYKSPPPPYVYSSPPPPPYYSPSPKVEYKSPPPPYVYSSPPPPYYSPSPKVEYKSPPPPYVYSSPPPPPYYSPSPKVEYKSPPPPYVYSSPPPPTYYSPSPKVEYKSPPPPYVYNSPPPPAYYSPSPKIEYKSPPPPYVYSSPPPPSYSPSPKAEYKSPPPPSLYY

SEQ ID NO: 86608 - protein, 895 aa, Arabidopsis thaliana; identical to SEQ ID NO: 72150
  peptide (1)..(895): Ceres Seq. ID no. 12692028

SEQ ID NO: 86609 - protein, 710 aa, Arabidopsis thaliana; identical to SEQ ID NO: 72151
  peptide (1)..(710): Ceres Seq. ID no. 12692029

SEQ ID NO: 86610 - DNA, 1593 bp, Arabidopsis thaliana
  misc_feature (1)..(1593): Ceres Seq. ID no. 12692033
  misc_feature (1)..(1593): Ortholog of  Ceres SEQ ID NO 14301554 as cited in SEQ ID NO 66183
atggcttctaactatgataagcttacttcttcgagagtagccatcatcggtgctggtgttagcggattagcagccgctaagaacttagttcatcacaacccgaccgtattcgaagcctcggattcagtcggaggtgtttggaggagctgcacttacgagacgactaaattacaatcggctcgagtcgattacgagttctccgactttccatggcccaataatagagatgacacaactttcccaccttaccttgagatattagattacttggaatcttatgccaaacattttgatcttctcaaattcatgaagtttggctctaaggtcatcgaagtaaggttcatcggtgatggcgaaactcctcagatggttgaccttggtgcttacggcaacttgttgcccggaaaacctgtatgggaagttgctgttcagatcggagattctggagatattcagtggcatgcatttgagttcgtggttgtgtgtaccgggaaatacggcgacgttccaagaataccagcttttccggcaaagaaagggccggagatgtttcaaggaaaagtaatgcattcgatggattactgcaagttagagaaagaagaagcttctactctcctcagtggcaaaaaagtagccgtcatcggcttcaagaaatccgccattgatttggctttagagtctgctttagctaatcaaggggaaggaggaaaagcttgcacaatggtggtgagaacaactcattgggggatcccacattattgggtgtggggcttaccattcttcttgttctactcttcgagagcttctcagttcctccatgataggcctaaccaaagcttccttagaactctcttttgcctcctcttctctcttctgcgtgccgtagtttccaagttcatcgaatcatatgttttatggaagctacctcttgagaaatatggtctaaaaccaaaccattctttcgaggaagactatgcttcttgtcaaatggcgatcataccggagaatttctttgaggaagcggataaagggatgatccggtttaagaaatcatcaaaatggtggttttatgaagaagggattgtgtttgaagatgggacgacattagaagctgatgttgtgatacttgctactggttatgatggcaagaagaagctcaaagctattgttcctgaacctttccgaacttggcttgagtttccaagcggtgtcatgcctttatacaggggaacaatccatccattgataccaaacatgggtttcgtaggatacgtccaaagcagctcgaacttacacacatcagagctacgttcaatgtggctaagccggctagtggatgagaaattcagattaccaagcaaagagaagatgttggatcaattcttaaaagaaatggaagtgacgagaaactcaagcagattctacaaacgtcattgcatttccacgttcagcatccaacatgctgatgatatgtgcaacgacatgggactcaatccttggcgtaaatccaacttcctccttgaagcttttagtccttatggttctcaagattaccgactcggtcaagaagaaaaagaagatatgactgcttaa

SEQ ID NO: 86611 - protein, 530 aa, Arabidopsis thaliana
  peptide (1)..(530): Ceres Seq. ID no. 12692034
MASNYDKLTSSRVAIIGAGVSGLAAAKNLVHHNPTVFEASDSVGGVWRSCTYETTKLQSARVDYEFSDFPWPNNRDDTTFPPYLEILDYLESYAKHFDLLKFMKFGSKVIEVRFIGDGETPQMVDLGAYGNLLPGKPVWEVAVQIGDSGDIQWHAFEFVVVCTGKYGDVPRIPAFPAKKGPEMFQGKVMHSMDYCKLEKEEASTLLSGKKVAVIGFKKSAIDLALESALANQGEGGKACTMVVRTTHWGIPHYWVWGLPFFLFYSSRASQFLHDRPNQSFLRTLFCLLFSLLRAVVSKFIESYVLWKLPLEKYGLKPNHSFEEDYASCQMAIIPENFFEEADKGMIRFKKSSKWWFYEEGIVFEDGTTLEADVVILATGYDGKKKLKAIVPEPFRTWLEFPSGVMPLYRGTIHPLIPNMGFVGYVQSSSNLHTSELRSMWLSRLVDEKFRLPSKEKMLDQFLKEMEVTRNSSRFYKRHCISTFSIQHADDMCNDMGLNPWRKSNFLLEAFSPYGSQDYRLGQEEKEDMTA

SEQ ID NO: 86612 - protein, 428 aa, Arabidopsis thaliana
  peptide (1)..(428): Ceres Seq. ID no. 12692035
MKFGSKVIEVRFIGDGETPQMVDLGAYGNLLPGKPVWEVAVQIGDSGDIQWHAFEFVVVCTGKYGDVPRIPAFPAKKGPEMFQGKVMHSMDYCKLEKEEASTLLSGKKVAVIGFKKSAIDLALESALANQGEGGKACTMVVRTTHWGIPHYWVWGLPFFLFYSSRASQFLHDRPNQSFLRTLFCLLFSLLRAVVSKFIESYVLWKLPLEKYGLKPNHSFEEDYASCQMAIIPENFFEEADKGMIRFKKSSKWWFYEEGIVFEDGTTLEADVVILATGYDGKKKLKAIVPEPFRTWLEFPSGVMPLYRGTIHPLIPNMGFVGYVQSSSNLHTSELRSMWLSRLVDEKFRLPSKEKMLDQFLKEMEVTRNSSRFYKRHCISTFSIQHADDMCNDMGLNPWRKSNFLLEAFSPYGSQDYRLGQEEKEDMTA

SEQ ID NO: 86613 - protein, 408 aa, Arabidopsis thaliana
  peptide (1)..(408): Ceres Seq. ID no. 12692036
MVDLGAYGNLLPGKPVWEVAVQIGDSGDIQWHAFEFVVVCTGKYGDVPRIPAFPAKKGPEMFQGKVMHSMDYCKLEKEEASTLLSGKKVAVIGFKKSAIDLALESALANQGEGGKACTMVVRTTHWGIPHYWVWGLPFFLFYSSRASQFLHDRPNQSFLRTLFCLLFSLLRAVVSKFIESYVLWKLPLEKYGLKPNHSFEEDYASCQMAIIPENFFEEADKGMIRFKKSSKWWFYEEGIVFEDGTTLEADVVILATGYDGKKKLKAIVPEPFRTWLEFPSGVMPLYRGTIHPLIPNMGFVGYVQSSSNLHTSELRSMWLSRLVDEKFRLPSKEKMLDQFLKEMEVTRNSSRFYKRHCISTFSIQHADDMCNDMGLNPWRKSNFLLEAFSPYGSQDYRLGQEEKEDMTA

SEQ ID NO: 86614 - DNA, 2247 bp, Arabidopsis thaliana
  misc_feature (1)..(2247): Ceres Seq. ID no. 12692041
  misc_feature (1)..(2247): Ortholog of  Ceres SEQ ID NO 13657677 as cited in SEQ ID NO 66119
atgatactgaaagtttatgcagagaagggtttggttaagaatgctttacatgtgtttgacaacatgggaaactatggaagaattcctagtttgttgtcttgtaatagcttgttgagcaatttggtcaggaaaggggaaaactttgtggctttacatgtttatgatcagatgattagctttgaggtttctccggatgtgtttacttgcagtattgttgttaatgcttattgtagaagtgggaatgtggataaagccatggtatttgcgaaagaaacggagagttcattgggtttggagctgaatgtggtaacttacaatagtttgatcaatgggtatgctatgatcggagatgttgagggaatgacaagagtgttgcggttgatgtctgagagaggggtttctaggaacgttgttacgtatacttcgttgattaagggttactgcaaaaagggtttgatggaagaagcggaacatgtgtttgaattgctaaaggaaaagaaacttgttgcggatcagcatatgtacggtgtgttgatggatggatattgtcgtactggtcaaatccgtgatgctgttagggttcatgataatatgattgagataggcgtaagaacaaatactaccatttgtaactccttgatcaatgggtactgcaaatctggtcaattagttgaagcggaacaaatattttctcggatgaacgattggagcttgaaaccagatcatcacacgtacaatacccttgtggatgggtattgcagggctggttatgttgacgaggctttaaagctttgtgatcaaatgtgccaaaaagaagttgtaccaacagttatgacttacaatattctgcttaaaggttatagtaggattggtgcttttcatgatgttttgagcctttggaagatgatgcttaaaagaggcgtaaacgccgatgagattagttgtagcaccctactcgaagcattgttcaagcttggcgattttaatgaagctatgaagctgtgggagaatgtcttagcaagaggtctattgactgatacgataacattaaatgtaatgatcagtggatgtaagccagctgtgcaaacatatcaagcgttgagccatgggtattataaagtcggaaatttgaaagaagcctttgcggttaaagagtatatggaaaggaaaggaatcttccccaccatagagatgtataacactctgatatctggtgctttcaaatatagacacttgaataaagtagcggatcttgtgatcgagctacgcgcaagaggattaactcctactgttgctacatatggtgctctcatcaccggctggtgcaatattggaatgatagataaagcctacgctacatgtttcgaaatgatagagaaagggattaccttaaatgtgaatatttgcagcaagattgcaaatagtttgtttcgtcttgataagattgatgaggcttgtttgctattgcagaagattgtggattttgatctgcttcttcccggttaccagagcttgaaagagtttcttgaggccagtgctacgacgtgtcttaaaacacaaaaaatcgctgagtctgtcgagaatagcacccctaagaagctcttagttcccaataacattgtttacaatgttgctatcgcaggtctctgtaaagctgggaaactcgaggatgctcgaaaactcttctcggatttactatcaagtgataggtttattccagacgaatacacatacacgatcctaattcacggatgtgctattgctggtgatataaacaaagcctttaccctgagggatgagatggctctaaaaggtattatcccgaacattgttacatacaacgctttgataaaaggcttgtgcaagttgggtaatgtagatcgtgctcagaggcttttacataagcttccacagaagggcataactcctaatgctattacctataacacattaattgatggactagttaaaagtggtaatgttgctgaagctatgcgtttaaaagaaaaaatgattgagaaaggcttggttagagggtccgataaacagggggatgttgacataccaaaggaggtggttttggatccggaagttaaattggggagcacaggagtgatcgaaatgaactcaaatgagctttatgatgttaggagagtttctgaagcagtagtttatatagtaaaggccaaacgatcgatattagtcactggtctttttgataagctgatcaaccgatcaaaccagtaa

SEQ ID NO: 86615 - protein, 748 aa, Arabidopsis thaliana
  peptide (1)..(748): Ceres Seq. ID no. 12692042
MILKVYAEKGLVKNALHVFDNMGNYGRIPSLLSCNSLLSNLVRKGENFVALHVYDQMISFEVSPDVFTCSIVVNAYCRSGNVDKAMVFAKETESSLGLELNVVTYNSLINGYAMIGDVEGMTRVLRLMSERGVSRNVVTYTSLIKGYCKKGLMEEAEHVFELLKEKKLVADQHMYGVLMDGYCRTGQIRDAVRVHDNMIEIGVRTNTTICNSLINGYCKSGQLVEAEQIFSRMNDWSLKPDHHTYNTLVDGYCRAGYVDEALKLCDQMCQKEVVPTVMTYNILLKGYSRIGAFHDVLSLWKMMLKRGVNADEISCSTLLEALFKLGDFNEAMKLWENVLARGLLTDTITLNVMISGCKPAVQTYQALSHGYYKVGNLKEAFAVKEYMERKGIFPTIEMYNTLISGAFKYRHLNKVADLVIELRARGLTPTVATYGALITGWCNIGMIDKAYATCFEMIEKGITLNVNICSKIANSLFRLDKIDEACLLLQKIVDFDLLLPGYQSLKEFLEASATTCLKTQKIAESVENSTPKKLLVPNNIVYNVAIAGLCKAGKLEDARKLFSDLLSSDRFIPDEYTYTILIHGCAIAGDINKAFTLRDEMALKGIIPNIVTYNALIKGLCKLGNVDRAQRLLHKLPQKGITPNAITYNTLIDGLVKSGNVAEAMRLKEKMIEKGLVRGSDKQGDVDIPKEVVLDPEVKLGSTGVIEMNSNELYDVRRVSEAVVYIVKAKRSILVTGLFDKLINRSNQ

SEQ ID NO: 86616 - protein, 727 aa, Arabidopsis thaliana
  peptide (1)..(727): Ceres Seq. ID no. 12692043
MGNYGRIPSLLSCNSLLSNLVRKGENFVALHVYDQMISFEVSPDVFTCSIVVNAYCRSGNVDKAMVFAKETESSLGLELNVVTYNSLINGYAMIGDVEGMTRVLRLMSERGVSRNVVTYTSLIKGYCKKGLMEEAEHVFELLKEKKLVADQHMYGVLMDGYCRTGQIRDAVRVHDNMIEIGVRTNTTICNSLINGYCKSGQLVEAEQIFSRMNDWSLKPDHHTYNTLVDGYCRAGYVDEALKLCDQMCQKEVVPTVMTYNILLKGYSRIGAFHDVLSLWKMMLKRGVNADEISCSTLLEALFKLGDFNEAMKLWENVLARGLLTDTITLNVMISGCKPAVQTYQALSHGYYKVGNLKEAFAVKEYMERKGIFPTIEMYNTLISGAFKYRHLNKVADLVIELRARGLTPTVATYGALITGWCNIGMIDKAYATCFEMIEKGITLNVNICSKIANSLFRLDKIDEACLLLQKIVDFDLLLPGYQSLKEFLEASATTCLKTQKIAESVENSTPKKLLVPNNIVYNVAIAGLCKAGKLEDARKLFSDLLSSDRFIPDEYTYTILIHGCAIAGDINKAFTLRDEMALKGIIPNIVTYNALIKGLCKLGNVDRAQRLLHKLPQKGITPNAITYNTLIDGLVKSGNVAEAMRLKEKMIEKGLVRGSDKQGDVDIPKEVVLDPEVKLGSTGVIEMNSNELYDVRRVSEAVVYIVKAKRSILVTGLFDKLINRSNQ

SEQ ID NO: 86617 - protein, 692 aa, Arabidopsis thaliana
  peptide (1)..(692): Ceres Seq. ID no. 12692044
MISFEVSPDVFTCSIVVNAYCRSGNVDKAMVFAKETESSLGLELNVVTYNSLINGYAMIGDVEGMTRVLRLMSERGVSRNVVTYTSLIKGYCKKGLMEEAEHVFELLKEKKLVADQHMYGVLMDGYCRTGQIRDAVRVHDNMIEIGVRTNTTICNSLINGYCKSGQLVEAEQIFSRMNDWSLKPDHHTYNTLVDGYCRAGYVDEALKLCDQMCQKEVVPTVMTYNILLKGYSRIGAFHDVLSLWKMMLKRGVNADEISCSTLLEALFKLGDFNEAMKLWENVLARGLLTDTITLNVMISGCKPAVQTYQALSHGYYKVGNLKEAFAVKEYMERKGIFPTIEMYNTLISGAFKYRHLNKVADLVIELRARGLTPTVATYGALITGWCNIGMIDKAYATCFEMIEKGITLNVNICSKIANSLFRLDKIDEACLLLQKIVDFDLLLPGYQSLKEFLEASATTCLKTQKIAESVENSTPKKLLVPNNIVYNVAIAGLCKAGKLEDARKLFSDLLSSDRFIPDEYTYTILIHGCAIAGDINKAFTLRDEMALKGIIPNIVTYNALIKGLCKLGNVDRAQRLLHKLPQKGITPNAITYNTLIDGLVKSGNVAEAMRLKEKMIEKGLVRGSDKQGDVDIPKEVVLDPEVKLGSTGVIEMNSNELYDVRRVSEAVVYIVKAKRSILVTGLFDKLINRSNQ

SEQ ID NO: 86618 - DNA, 2520 bp, Arabidopsis thaliana
  misc_feature (1)..(2520): Ceres Seq. ID no. 12692056
  misc_feature (1)..(2520): Ortholog of  Ceres SEQ ID NO 13660025 as cited in SEQ ID NO 67389
gaggcatcacaacagataaagtcttgaactttgatcaagaattctaaacggagtttttgctcttctcgtcggtgaaagaaaaatcgagatgggttcaactccgttttgctactctatcaatccatctccatcaaagcttgatttcacgaggacccatgtgtttagtcctgtttctaaacagttttacttagatttatcatcgttttccggaaaacccggaggagtatctgggtttaggagccgtcgagctttgctcggagtaaaggcggcgacggcgttagttgagaaggaggagaagagagaggcggtgacggagaagaagaagaaatcgagggttttagttgccggaggtggaatcggaggattggtgtttgctttagcggctaagaagaaaggattcgatgtgttagtgtttgagaaagatttgagtgctataagaggagaaggaaaatacagaggcccgattcaaatacagagcaacgctttagctgctttggaagctattgatattgaagttgctgaacaagttatggaagctgggtgtatcactggtgatcggattaacggtctcgttgatggtatctctggtacttggtatgtaaagtttgatactttcactcctgcggcgtcacggggacttcctgtgactagagtaattagtagaatgactctgcagcagattctagcacgtgcggttggagaagatgtgattagaaacgagagtaatgttgttgattttgaagattctggagataaggttactgtggtactcgagaatggtcaacgctatgaaggtgatctgcttgtgggtgcagatggcatttggtctaaggtgagaaataatttgtttggccgtagtgaagctacttattcaggctacacttgttacacggggattgcagattttataccagcggatatcgagtctgttggctaccgggttttcttgggacacaaacagtactttgtttcttcggatgttggtggtggaaaaatgcaatggtatgcatttcacgaggaaccagctggtggggctgatgctccaaatggtatgaagaaaaggttgtttgaaatatttgacggttggtgcgacaatgtactcgacttgttgcatgcgactgaggaggaagccattctgagaagagatatttatgatagaagtcctggttttacttggggtaaagggcgtgttacgctgctcggggattctatccatgcgatgcagccaaatatgggtcaaggtggatgcatggccattgaggatagttttcaactagcattggagcttgatgaagcatggaaacagagtgttgaaacgactacacctgttgatgttgtttcctctttgaaaagatatgaggaatctagaagactgagagtcgctattatccatgcaatggcgaggatggctgcaattatggcttccacttacaaagcatacttaggtgttgggcttggtcctctgtctttcttgacaaagtttagagtaccacatccaggaagagttggtggtagattcttcgttgacattgctatgccatcgatgcttgactgggtccttggaggtaacaggttagttctatctgtgagttttatctaaagagaacttgatttgacagacctgtaaagccaactcgtttacacgcttttgcagtgaaaaactccaaggaaggccacctagttgcagactcactgacaaagccgatgaccggcttcgagagtggtttgaagatgacgatgctcttgaacgtactataaagggagagtatgtactcacaaatctgaattcgacatttagttccattatatttcttcacctacctaacaaaaaaacggccttgctctctatactgctttggtctgagtctgagtcttaatttctttgcagatggtatctaattccacacggcgacgattgttgcgtttcggaaacattatgtctaaccaaagatgaagatcaaccttgcatcgtcggaagcgaaccagatcaagattttcctggaatgcgcattgtgatcccttcgtctcaggtttcgaagatgcatgctcgtgtgatttacaaagacggagctttcttcttgatggatcttcgaagcgaacacggaacctatgtgaccgataacgaaggaagaagatatagagcaacaccgaattttcccgcgcggtttagatcgtccgacatcatcgagtttggttcagataagaaggcggcgtttagggtgaaagtaatcaggaaaactccgaaatcgacgaggaagaatgagagtaacaacgataaattacttcagacagcttgaaataagtaaaccgatggtgaaattaagtaattttaatcggtttggcagataatttgagtagtaattttctcaaaagaaaaaaaatctgctttcagctattccttgcatgacaatgtatatataggtctgaaacaaaatataaattatacaagacattaatcttcatttcttcaacttccaggcaacaataatctaattttgattactaaaaggtaattatatt

SEQ ID NO: 86619 - protein, 503 aa, Arabidopsis thaliana
  peptide (1)..(503): Ceres Seq. ID no. 12692057
MGSTPFCYSINPSPSKLDFTRTHVFSPVSKQFYLDLSSFSGKPGGVSGFRSRRALLGVKAATALVEKEEKREAVTEKKKKSRVLVAGGGIGGLVFALAAKKKGFDVLVFEKDLSAIRGEGKYRGPIQIQSNALAALEAIDIEVAEQVMEAGCITGDRINGLVDGISGTWYVKFDTFTPAASRGLPVTRVISRMTLQQILARAVGEDVIRNESNVVDFEDSGDKVTVVLENGQRYEGDLLVGADGIWSKVRNNLFGRSEATYSGYTCYTGIADFIPADIESVGYRVFLGHKQYFVSSDVGGGKMQWYAFHEEPAGGADAPNGMKKRLFEIFDGWCDNVLDLLHATEEEAILRRDIYDRSPGFTWGKGRVTLLGDSIHAMQPNMGQGGCMAIEDSFQLALELDEAWKQSVETTTPVDVVSSLKRYEESRRLRVAIIHAMARMAAIMASTYKAYLGVGLGPLSFLTKFRVPHPGRVGGRFFVDIAMPSMLDWVLGGNRLVLSVSFI

SEQ ID NO: 86620 - protein, 356 aa, Arabidopsis thaliana
  peptide (1)..(356): Ceres Seq. ID no. 12692058
MEAGCITGDRINGLVDGISGTWYVKFDTFTPAASRGLPVTRVISRMTLQQILARAVGEDVIRNESNVVDFEDSGDKVTVVLENGQRYEGDLLVGADGIWSKVRNNLFGRSEATYSGYTCYTGIADFIPADIESVGYRVFLGHKQYFVSSDVGGGKMQWYAFHEEPAGGADAPNGMKKRLFEIFDGWCDNVLDLLHATEEEAILRRDIYDRSPGFTWGKGRVTLLGDSIHAMQPNMGQGGCMAIEDSFQLALELDEAWKQSVETTTPVDVVSSLKRYEESRRLRVAIIHAMARMAAIMASTYKAYLGVGLGPLSFLTKFRVPHPGRVGGRFFVDIAMPSMLDWVLGGNRLVLSVSFI

SEQ ID NO: 86621 - protein, 311 aa, Arabidopsis thaliana
  peptide (1)..(311): Ceres Seq. ID no. 12692059
MTLQQILARAVGEDVIRNESNVVDFEDSGDKVTVVLENGQRYEGDLLVGADGIWSKVRNNLFGRSEATYSGYTCYTGIADFIPADIESVGYRVFLGHKQYFVSSDVGGGKMQWYAFHEEPAGGADAPNGMKKRLFEIFDGWCDNVLDLLHATEEEAILRRDIYDRSPGFTWGKGRVTLLGDSIHAMQPNMGQGGCMAIEDSFQLALELDEAWKQSVETTTPVDVVSSLKRYEESRRLRVAIIHAMARMAAIMASTYKAYLGVGLGPLSFLTKFRVPHPGRVGGRFFVDIAMPSMLDWVLGGNRLVLSVSFI

SEQ ID NO: 86622 - DNA, 3855 bp, Arabidopsis thaliana
  misc_feature (1)..(3855): Ceres Seq. ID no. 12692167
  misc_feature (1)..(3855): Ortholog of  Ceres SEQ ID NO 14312324 as cited in SEQ ID NO 60453
  misc_feature (1)..(3855): Ortholog of  Ceres SEQ ID NO 12624791 as cited in SEQ ID NO 63574
  misc_feature (1)..(3855): Ortholog of  Ceres SEQ ID NO 12780574 as cited in SEQ ID NO 65624
atgatttcgaaagatcaccttcatcatctggatcctctgggtacaaccaaatcgtaccacatgaatacctccaccgtatcgccgccgtctccggcatcatcaatttcgttgtcgcaatcggcgtggctggaggttcgtttgttctacgtccgtatcgctccttgcgtcgttgagaacgtccctgacttcctcaccctccgtcaccctcgtcgcgaaaccggtgcttctcttgaggttaacggcgttcgcgttccttcgtcgcagacggcgtcgcttaaactccgccgtgacagagtcgaccgggaatcgtcggaggtgacttacgtgagcactgagaccgttcgcgttaccggatgcgttgatttcgaggtttatgataacgaggatatggtcttgtgtgggaacctagatagaatcgaaggtgcttggaacaatggaactgtgagtgatcccaagactggatggggcatggattgttacattgctatgggaaacggacacgtgtcaggtccttctgcctctgtgtttttccagccaaagtttggagtctcgtctccgtccgtcgaggtttatatagctggttgttgtggtggtgtcccggtgatattgaccaagacgattcaggcgagtccgaggaggaaggtggctaggcacgtgacactcgacgctatccctgaggatgaggaagttggcaaagagcaagacattggtaccattggtgatgaattggcccgtcaaagcaaagtacagatgatggaatcagaagttgatgaatacgatgactcagatatgaaaatggcacagagatattaccctgaaggaatgtacgttgatgaggatggtcagctctcatggttcaatgcaggagtcagagtcggagttgggataggccttgggatgtgtcttggtgtaggcattggagttggattactcatgcgttcgtatcaagcaacaactagtaaccttcgtaggagcgagaagaaggaggagatgagcaagatccgttcgtctgcgacaatgccacatcgcgaccagccgtcaccggcgtcgcctcacgtcgttacactcaactgtatagaggattgtgcgctcgagcaagactccctcgccggcgttgctggtgtcgaatacgtcccgctcagccgcatcgccgatggtaagatcgagtccgccaccgccgttctcctccattccctcgcgtatcttccacgagcagctcaacgccgactccgtcctcaccagctcattctctgccttggctctgctgatcgcgctgtcgattcgactctcgccgccgacctaggtctccgacttgtccatgtagatacttcacgagccgaggaaatcgcggataccgtcatggcgctcatccttggactccttcgacggacgcatttactctcgcgacacgctctatcggcgtctggttggctcggatcgcttcagcctctttgccggggaatgagacggtgccgtggtatggttttgggtatcgttggcagatctgtatcggctcggtatttagctagtagaagcttggctttcaagatgagtgtgctctacttcgatgtcccagagggagatgaagaacgaatcaggccctcgagattcccacgtgctgctcgaagaatggatacattgaatgatcttctagcagcaagtgatgtcatttcgctacattgtgcattaacaaatgacacggttcagatactcaatgcagagtgtttgcagcatataaaacctggggcttttcttgtaaatactggaagctgccagctgttggatgattgtgctgtgaaacaacttctaattgatggcactatagctggctgcgcccttgacggtgctgaaggtccacaatggatggaagcatgggtgaaggaaatgccaaatgtgttaattctacctcgcagtgcagattacagtgaggaagtatggatggagataagggagaaggctatctctatcttgcattcatttttcttagatggtgtaattccaagtaacactgtttctgatgaggaagttgaggaaagtgaagcaagtgaagaagaagaacaatcacctagcaaacacgagaaattagcaatagtggaatccaccagtaggcaacagggagaaagtactctcaccagcactgagatcgtacgtagagaggctagtgagttaaaagaatctctgagccctggtcagcaacacgtttctcaaaatactgccgtaaaacctgaaggaagacgtagcagatccggtaagaaagccaaaaagagacattcacagcaaaaatacatgcaaaaaacggatggttcctcagggttaaatgaagaaagtacttcacgaagagatgatattgctatgagtgacacagaagaagtattaagttccagttctagatgtgcttctcctgaagattccagaagtaggaaaacacctcttgaagtaatgcaagagtcttccccaaatcagcttgtaatgtcaagtaagaagttcattggaaagtcaagtgagctactgaaagatggatatgtagtagccttgtatgcgaaagacctctcgggcctccacgtttccaggcaaagaacgaaaaacggtggctggttcctcgatactttgtccaatgtatccaaacgagatcctgctgcacaattcattatcgcatacagaaacaaggacactgttggtctgagatcatttgctgctggtgggaagttactgcagatcaatagaagaatggagtttgtgtttgctagccatagttttgacgtgtgggagagttggagtctagaaggttctctggacgaatgtcggcttgttaactgcaggaattcctctgcggtgttggacgttcgtgtggagatattggcaatggtaggagacgatgaaacatccgatgagcttgtcttagagggacgtttgttgttgttttctgggtctggtcgtgatgaactcgaaagcattgtgtgtttgggaactttgtgtgtgttgtcgagttttatggtgactgtaaaccctagccaagctcattgtttgcctatgaaaatgagtctaccgggtttcaatactcttccccacacggcaacaacgataccggtttccatacggagcaataggacgatgtcgttttttgaggatccaacaaagaaggttagaaagccttacactatcaccaaatctagagagaactggacggagcaagaacacgacaagttccttgaagcccttcatctatttgaccgggattggaagaaaataaaggcctttgttggatcaaaaacagtgatacagatacgaagccacgcacagaagtactttctcaaagttcagaagaatgggactaaagaacatctcccacctcctcgaccaaagaggaaagccaatcacccatatccacaaaaagctcctaaatttactctttcttcttcaaacgcattatttcaacatgactacttatacaacactaattcacatccggtgattagcaccacccgtaagcatggattagtgcattgcgatgttagtataccaagttctgttatcaaagaggaatttggtgtctcagagaactgttgcagcactagtagtagtagagataagcagaggactagaatcgttacagagacaaatgaccaagaaagttgtggaaagccacatagagtggcgccaaatttcgctgaagtttacaattttataggaagtgtgtttgatcctaaaacaacaggtcatgtcaagagattaaaggaaatggatccaataaatcttgagacggttctcttactgatgaaaaatttatctgtaaacctgacgagtcccgagtttgatgaacaacggaagttgatatcatcttacaacgccagttag

SEQ ID NO: 86623 - protein, 1284 aa, Arabidopsis thaliana
  peptide (1)..(1284): Ceres Seq. ID no. 12692168
MISKDHLHHLDPLGTTKSYHMNTSTVSPPSPASSISLSQSAWLEVRLFYVRIAPCVVENVPDFLTLRHPRRETGASLEVNGVRVPSSQTASLKLRRDRVDRESSEVTYVSTETVRVTGCVDFEVYDNEDMVLCGNLDRIEGAWNNGTVSDPKTGWGMDCYIAMGNGHVSGPSASVFFQPKFGVSSPSVEVYIAGCCGGVPVILTKTIQASPRRKVARHVTLDAIPEDEEVGKEQDIGTIGDELARQSKVQMMESEVDEYDDSDMKMAQRYYPEGMYVDEDGQLSWFNAGVRVGVGIGLGMCLGVGIGVGLLMRSYQATTSNLRRSEKKEEMSKIRSSATMPHRDQPSPASPHVVTLNCIEDCALEQDSLAGVAGVEYVPLSRIADGKIESATAVLLHSLAYLPRAAQRRLRPHQLILCLGSADRAVDSTLAADLGLRLVHVDTSRAEEIADTVMALILGLLRRTHLLSRHALSASGWLGSLQPLCRGMRRCRGMVLGIVGRSVSARYLASRSLAFKMSVLYFDVPEGDEERIRPSRFPRAARRMDTLNDLLAASDVISLHCALTNDTVQILNAECLQHIKPGAFLVNTGSCQLLDDCAVKQLLIDGTIAGCALDGAEGPQWMEAWVKEMPNVLILPRSADYSEEVWMEIREKAISILHSFFLDGVIPSNTVSDEEVEESEASEEEEQSPSKHEKLAIVESTSRQQGESTLTSTEIVRREASELKESLSPGQQHVSQNTAVKPEGRRSRSGKKAKKRHSQQKYMQKTDGSSGLNEESTSRRDDIAMSDTEEVLSSSSRCASPEDSRSRKTPLEVMQESSPNQLVMSSKKFIGKSSELLKDGYVVALYAKDLSGLHVSRQRTKNGGWFLDTLSNVSKRDPAAQFIIAYRNKDTVGLRSFAAGGKLLQINRRMEFVFASHSFDVWESWSLEGSLDECRLVNCRNSSAVLDVRVEILAMVGDDETSDELVLEGRLLLFSGSGRDELESIVCLGTLCVLSSFMVTVNPSQAHCLPMKMSLPGFNTLPHTATTIPVSIRSNRTMSFFEDPTKKVRKPYTITKSRENWTEQEHDKFLEALHLFDRDWKKIKAFVGSKTVIQIRSHAQKYFLKVQKNGTKEHLPPPRPKRKANHPYPQKAPKFTLSSSNALFQHDYLYNTNSHPVISTTRKHGLVHCDVSIPSSVIKEEFGVSENCCSTSSSRDKQRTRIVTETNDQESCGKPHRVAPNFAEVYNFIGSVFDPKTTGHVKRLKEMDPINLETVLLLMKNLSVNLTSPEFDEQRKLISSYNAS

SEQ ID NO: 86624 - protein, 1264 aa, Arabidopsis thaliana
  peptide (1)..(1264): Ceres Seq. ID no. 12692169
MNTSTVSPPSPASSISLSQSAWLEVRLFYVRIAPCVVENVPDFLTLRHPRRETGASLEVNGVRVPSSQTASLKLRRDRVDRESSEVTYVSTETVRVTGCVDFEVYDNEDMVLCGNLDRIEGAWNNGTVSDPKTGWGMDCYIAMGNGHVSGPSASVFFQPKFGVSSPSVEVYIAGCCGGVPVILTKTIQASPRRKVARHVTLDAIPEDEEVGKEQDIGTIGDELARQSKVQMMESEVDEYDDSDMKMAQRYYPEGMYVDEDGQLSWFNAGVRVGVGIGLGMCLGVGIGVGLLMRSYQATTSNLRRSEKKEEMSKIRSSATMPHRDQPSPASPHVVTLNCIEDCALEQDSLAGVAGVEYVPLSRIADGKIESATAVLLHSLAYLPRAAQRRLRPHQLILCLGSADRAVDSTLAADLGLRLVHVDTSRAEEIADTVMALILGLLRRTHLLSRHALSASGWLGSLQPLCRGMRRCRGMVLGIVGRSVSARYLASRSLAFKMSVLYFDVPEGDEERIRPSRFPRAARRMDTLNDLLAASDVISLHCALTNDTVQILNAECLQHIKPGAFLVNTGSCQLLDDCAVKQLLIDGTIAGCALDGAEGPQWMEAWVKEMPNVLILPRSADYSEEVWMEIREKAISILHSFFLDGVIPSNTVSDEEVEESEASEEEEQSPSKHEKLAIVESTSRQQGESTLTSTEIVRREASELKESLSPGQQHVSQNTAVKPEGRRSRSGKKAKKRHSQQKYMQKTDGSSGLNEESTSRRDDIAMSDTEEVLSSSSRCASPEDSRSRKTPLEVMQESSPNQLVMSSKKFIGKSSELLKDGYVVALYAKDLSGLHVSRQRTKNGGWFLDTLSNVSKRDPAAQFIIAYRNKDTVGLRSFAAGGKLLQINRRMEFVFASHSFDVWESWSLEGSLDECRLVNCRNSSAVLDVRVEILAMVGDDETSDELVLEGRLLLFSGSGRDELESIVCLGTLCVLSSFMVTVNPSQAHCLPMKMSLPGFNTLPHTATTIPVSIRSNRTMSFFEDPTKKVRKPYTITKSRENWTEQEHDKFLEALHLFDRDWKKIKAFVGSKTVIQIRSHAQKYFLKVQKNGTKEHLPPPRPKRKANHPYPQKAPKFTLSSSNALFQHDYLYNTNSHPVISTTRKHGLVHCDVSIPSSVIKEEFGVSENCCSTSSSRDKQRTRIVTETNDQESCGKPHRVAPNFAEVYNFIGSVFDPKTTGHVKRLKEMDPINLETVLLLMKNLSVNLTSPEFDEQRKLISSYNAS

SEQ ID NO: 86625 - protein, 1155 aa, Arabidopsis thaliana
  peptide (1)..(1155): Ceres Seq. ID no. 12692170
MVLCGNLDRIEGAWNNGTVSDPKTGWGMDCYIAMGNGHVSGPSASVFFQPKFGVSSPSVEVYIAGCCGGVPVILTKTIQASPRRKVARHVTLDAIPEDEEVGKEQDIGTIGDELARQSKVQMMESEVDEYDDSDMKMAQRYYPEGMYVDEDGQLSWFNAGVRVGVGIGLGMCLGVGIGVGLLMRSYQATTSNLRRSEKKEEMSKIRSSATMPHRDQPSPASPHVVTLNCIEDCALEQDSLAGVAGVEYVPLSRIADGKIESATAVLLHSLAYLPRAAQRRLRPHQLILCLGSADRAVDSTLAADLGLRLVHVDTSRAEEIADTVMALILGLLRRTHLLSRHALSASGWLGSLQPLCRGMRRCRGMVLGIVGRSVSARYLASRSLAFKMSVLYFDVPEGDEERIRPSRFPRAARRMDTLNDLLAASDVISLHCALTNDTVQILNAECLQHIKPGAFLVNTGSCQLLDDCAVKQLLIDGTIAGCALDGAEGPQWMEAWVKEMPNVLILPRSADYSEEVWMEIREKAISILHSFFLDGVIPSNTVSDEEVEESEASEEEEQSPSKHEKLAIVESTSRQQGESTLTSTEIVRREASELKESLSPGQQHVSQNTAVKPEGRRSRSGKKAKKRHSQQKYMQKTDGSSGLNEESTSRRDDIAMSDTEEVLSSSSRCASPEDSRSRKTPLEVMQESSPNQLVMSSKKFIGKSSELLKDGYVVALYAKDLSGLHVSRQRTKNGGWFLDTLSNVSKRDPAAQFIIAYRNKDTVGLRSFAAGGKLLQINRRMEFVFASHSFDVWESWSLEGSLDECRLVNCRNSSAVLDVRVEILAMVGDDETSDELVLEGRLLLFSGSGRDELESIVCLGTLCVLSSFMVTVNPSQAHCLPMKMSLPGFNTLPHTATTIPVSIRSNRTMSFFEDPTKKVRKPYTITKSRENWTEQEHDKFLEALHLFDRDWKKIKAFVGSKTVIQIRSHAQKYFLKVQKNGTKEHLPPPRPKRKANHPYPQKAPKFTLSSSNALFQHDYLYNTNSHPVISTTRKHGLVHCDVSIPSSVIKEEFGVSENCCSTSSSRDKQRTRIVTETNDQESCGKPHRVAPNFAEVYNFIGSVFDPKTTGHVKRLKEMDPINLETVLLLMKNLSVNLTSPEFDEQRKLISSYNAS

SEQ ID NO: 86626 - DNA, 1419 bp, Arabidopsis thaliana
  misc_feature (1)..(1419): Ceres Seq. ID no. 12692173
  misc_feature (1)..(1419): Ortholog of  Ceres SEQ ID NO 15176911 as cited in SEQ ID NO 54868
  misc_feature (1)..(1419): Ortholog of  Ceres SEQ ID NO 13596433 as cited in SEQ ID NO 68721
  misc_feature (1)..(1419): Ortholog of  Ceres SEQ ID NO 13599169 as cited in SEQ ID NO 0
gaagttcagacacctaggactataagtagacgatctcttattgtcttgtcttctcatcagacagacatcagatcagaagattttggtttcaagctcttcttctacgattccccgaagcttctggattgagatctctctctcaagcaatggcagctacaagtgagaaacagaacaccacaaagcctcctccttctccttctcctctccgcaattccaagttttgtcagcccaatatgaggatcttgatctctggaggagctggcttcattggttctcacttggttgataagcttatggaaaatgagaagaatgaggtggttgttgctgataactatttcactggctcaaaagaaaacctcaagaagtggatcggtcaccccaggtttgaacttattcgtcacgatgttaccgagcctttgttgatcgaggttgatcggatttaccatcttgcttgtcctgcctctcctatcttctacaaatacaaccctgttaagacaatcaagaccaatgtgattggtacactcaacatgctcggtcttgccaagcgtgttggagcaagaattttactaacctcaacctctgaagtgtatggagatcctctcatccaccctcaaccagagagctactggggaaatgtcaaccctattggggttcggagttgctatgacgaaggcaagcgggtagccgaaaccttgatgtttgactaccacagacaacatggcattgaaatccgcattgctagaatcttcaacacatatggtcctcgaatgaacatcgatgatgggcgtgttgtgagcaacttcattgctcaagcactccggggtgaggcattgacagttcagaaaccggggacacagacccgcagtttctgttatgtctccgacatggtggatggacttatccgtcttatggaaggcaatgatactggccctatcaacatcggtaacccaggtgagttcacaatggtggaactggctgagacggttaaggagcttattaacccaagcatagagataaagatggtggagaacacaccagatgatccaagacagaggaaaccagacattagtaaagccaaagaagtgttgggttgggagccaaaggtgaagctcagagaaggacttcctctcatggaagaagatttccgactaaggcttaacgtcccaagaaactaaaaccacaagaaaacacagacggttttgagttcacgagagttgtcagctgttgagttatatgatgatgctattatactacaaagtggtgggtttttgtttggtctcatgtgttattcatattgcttttgttcgtagaaaaataagttgggaatgggtctccttgtgaggaatggctcttctttgtttttcagtatattgtggtatggttattatttgtgtggttttaatgaaatttgttcactta

SEQ ID NO: 86627 - protein, 342 aa, Arabidopsis thaliana; identical to SEQ ID NO: 27948
  peptide (1)..(342): Ceres Seq. ID no. 12692174

SEQ ID NO: 86628 - protein, 313 aa, Arabidopsis thaliana; identical to SEQ ID NO: 27949
  peptide (1)..(313): Ceres Seq. ID no. 12692175

SEQ ID NO: 86629 - protein, 293 aa, Arabidopsis thaliana; identical to SEQ ID NO: 27578
  peptide (1)..(293): Ceres Seq. ID no. 12692176

SEQ ID NO: 86630 - DNA, 876 bp, Arabidopsis thaliana
  misc_feature (1)..(876): Ceres Seq. ID no. 12692222
  misc_feature (1)..(876): Ortholog of  Ceres SEQ ID NO 15178472 as cited in SEQ ID NO 65628
atgttaacttctaaggaagatatattggtgaaagaaaacataaggataaccaaattcatttcttttcttttccctgaagttactattgagatgtgttttgctgacttattatgtggattaggttcgtacaaacacccgagttgtccaaggtcgaggaaattagttattccgctgcattgttcgttgaacatgcttgaaggagataccgggtgttccatctggccatcgagtctgtttctgtcagaatttgttttgtcatttccagagttattcgccaataaagcctgttttgaggttggttctggagttggtatggtcgggatttgccttgcacatgtaaaggccaaagaggtgatactaacagacggagatcttttaactttgtctaacatgaagcttaatttggagagaaatcacttaaactatgatgacgagtttctcaaacaacccggagaagctcagagtacacgagttaaatgcactcatcttccatgggaaactgcatcggaaagtgaactaagccaatatcgtccagatattgttctaggcgcagatgtaatctatgatccgtcatgtctccctcatctacttcgggtgctagtagcccttttaaagaacccacccaaaagaggaaatggctctctcgagactgaagacagagacacgacacaagaagaacacagtcccgcggtggcttatatcgcatctgtgatccgcaatgtagacacttttaatgtgtgcttgacacttgcagaccaaatggacctttccatcacagacgtgaccgcagaacttacgcctcgctttgagcttttaccatatatgcattcgtatgaccgctcaaccgttcggctcttctccatatcctccagataa

SEQ ID NO: 86631 - protein, 291 aa, Arabidopsis thaliana
  peptide (1)..(291): Ceres Seq. ID no. 12692223
MLTSKEDILVKENIRITKFISFLFPEVTIEMCFADLLCGLGSYKHPSCPRSRKLVIPLHCSLNMLEGDTGCSIWPSSLFLSEFVLSFPELFANKACFEVGSGVGMVGICLAHVKAKEVILTDGDLLTLSNMKLNLERNHLNYDDEFLKQPGEAQSTRVKCTHLPWETASESELSQYRPDIVLGADVIYDPSCLPHLLRVLVALLKNPPKRGNGSLETEDRDTTQEEHSPAVAYIASVIRNVDTFNVCLTLADQMDLSITDVTAELTPRFELLPYMHSYDRSTVRLFSISSR

SEQ ID NO: 86632 - protein, 261 aa, Arabidopsis thaliana
  peptide (1)..(261): Ceres Seq. ID no. 12692224
MCFADLLCGLGSYKHPSCPRSRKLVIPLHCSLNMLEGDTGCSIWPSSLFLSEFVLSFPELFANKACFEVGSGVGMVGICLAHVKAKEVILTDGDLLTLSNMKLNLERNHLNYDDEFLKQPGEAQSTRVKCTHLPWETASESELSQYRPDIVLGADVIYDPSCLPHLLRVLVALLKNPPKRGNGSLETEDRDTTQEEHSPAVAYIASVIRNVDTFNVCLTLADQMDLSITDVTAELTPRFELLPYMHSYDRSTVRLFSISSR

SEQ ID NO: 86633 - protein, 228 aa, Arabidopsis thaliana; identical to SEQ ID NO: 82155
  peptide (1)..(228): Ceres Seq. ID no. 12692225

SEQ ID NO: 86634 - DNA, 849 bp, Arabidopsis thaliana
  misc_feature (1)..(849): Ceres Seq. ID no. 12692239
  misc_feature (1)..(849): Ortholog of  Ceres SEQ ID NO 15224418 as cited in SEQ ID NO 51528
  misc_feature (1)..(849): Ortholog of  Ceres SEQ ID NO 13593846 as cited in SEQ ID NO 53152
  misc_feature (1)..(849): Ortholog of  Ceres SEQ ID NO 12781936 as cited in SEQ ID NO 56320
  misc_feature (1)..(849): Ortholog of  Ceres SEQ ID NO 13659489 as cited in SEQ ID NO 66986
  misc_feature (1)..(849): Ortholog of  Ceres SEQ ID NO 15175169 as cited in SEQ ID NO 0
atgatgatgtccggtggaagctacacgaacatcgatcaccagaaagtttctggatctgtacccgctgttccagatcctggacatgtcaccgtcaaattcgcagactcaaatctacaaacgtttcctccatctgctactcagggaaagatttctggtggtactaatcctcctcgagatgctgacgatacattttcgaggcctgtgaatggtactacagatgaacctcagtctagtggttggcttcatagattcactgttggtgcttacaagccttactttgatgtggacacttcagatgtcgtagagagactcaaagaatcgctctttccgtttagaggaacatttacggaaaagacagccaacaaccctgatttgtacgggccattctggatatgcacaacattgatctttgtagcagcatccataggaacatttgttacatacatagcacacaaattgaagaaacaggaatggaactacgatattaatctggtgacttggtctgcaggagttttctacggttatgtaactattgtccctctcgcattatacgttgttctcaagtacttctctgcaccatcaggcttagtccaactcttctgtctatacggatattccctattcgtcttcatccctgcattgtgtctctctgttgtgccattagagatcttcagatgggttattgcgggtttagctggattcatgtctgctacatttgtagcattgaatctcaaagcacatattaactctgcaggagagagatggttcttgattgtggtcagcatatttcttctacagctcgctctctcagtagtgctgaagctatatctgttcactgtcaccgtataa

SEQ ID NO: 86635 - protein, 282 aa, Arabidopsis thaliana
  peptide (1)..(282): Ceres Seq. ID no. 12692240
MMMSGGSYTNIDHQKVSGSVPAVPDPGHVTVKFADSNLQTFPPSATQGKISGGTNPPRDADDTFSRPVNGTTDEPQSSGWLHRFTVGAYKPYFDVDTSDVVERLKESLFPFRGTFTEKTANNPDLYGPFWICTTLIFVAASIGTFVTYIAHKLKKQEWNYDINLVTWSAGVFYGYVTIVPLALYVVLKYFSAPSGLVQLFCLYGYSLFVFIPALCLSVVPLEIFRWVIAGLAGFMSATFVALNLKAHINSAGERWFLIVVSIFLLQLALSVVLKLYLFTVTV

SEQ ID NO: 86636 - protein, 281 aa, Arabidopsis thaliana
  peptide (1)..(281): Ceres Seq. ID no. 12692241
MMSGGSYTNIDHQKVSGSVPAVPDPGHVTVKFADSNLQTFPPSATQGKISGGTNPPRDADDTFSRPVNGTTDEPQSSGWLHRFTVGAYKPYFDVDTSDVVERLKESLFPFRGTFTEKTANNPDLYGPFWICTTLIFVAASIGTFVTYIAHKLKKQEWNYDINLVTWSAGVFYGYVTIVPLALYVVLKYFSAPSGLVQLFCLYGYSLFVFIPALCLSVVPLEIFRWVIAGLAGFMSATFVALNLKAHINSAGERWFLIVVSIFLLQLALSVVLKLYLFTVTV

SEQ ID NO: 86637 - protein, 280 aa, Arabidopsis thaliana
  peptide (1)..(280): Ceres Seq. ID no. 12692242
MSGGSYTNIDHQKVSGSVPAVPDPGHVTVKFADSNLQTFPPSATQGKISGGTNPPRDADDTFSRPVNGTTDEPQSSGWLHRFTVGAYKPYFDVDTSDVVERLKESLFPFRGTFTEKTANNPDLYGPFWICTTLIFVAASIGTFVTYIAHKLKKQEWNYDINLVTWSAGVFYGYVTIVPLALYVVLKYFSAPSGLVQLFCLYGYSLFVFIPALCLSVVPLEIFRWVIAGLAGFMSATFVALNLKAHINSAGERWFLIVVSIFLLQLALSVVLKLYLFTVTV

SEQ ID NO: 86638 - DNA, 2019 bp, Arabidopsis thaliana
  misc_feature (1)..(2019): Ceres Seq. ID no. 12692264
  misc_feature (1)..(2019): Ortholog of  Ceres SEQ ID NO 13600310 as cited in SEQ ID NO 5086
  misc_feature (1)..(2019): Ortholog of  Ceres SEQ ID NO 15180362 as cited in SEQ ID NO 0
atgcctcaacgtgttttaatggaagctactaagcttggagctcttgaaaaacagtacttggaagagtcatcagagaggaaacgattatacaatgaagtgatcgaactcaagggaaatatcagagtcttttgcagatgcagacctctaaaccaagctgaaatagccaatggttgtgcttctgtagctgagtttgatacaacacaggaaaacgagctccagatactttcatctgattcctccaagaagcattttaaatttgaccatgtctttaagcctgacgatggccaagagactgtttttgcacagacaaaacctatagttacttcggtgctggatgggtataatgtctgcatatttgcctatggccaaacgggaactggcaagacatttaccatggagggaacaccagagaatagaggagtgaactataggaccttagaagaactatttcgctgttcagaaagcaaaagtcatctcatgaagtttgagctatcagttagcatgttggaggtttataatgagaagataagggacctcttggtagataactcaaaccagccccctaaaaagttggaggttaagcaatcagcagaagggacgcaagaagtcccaggattagtcgaagctcaagtttacaatacagatggagtgtgggatctgctcaagaaaggatatgctgttcgatctgtgggttcaactgctgcaaatgagcaaagcagccgctctcattgcttgctgcgagtgacagtgaagggagagaatttgataaatggtcagagaacgagaagtcatctttggttagtggacttggctggcagtgagcgagtaggaaaggtagaagttgaaggagaaaggctgaaagaatctcaatttatcaataagtcgctttcagcactcggtgatgttatctctgcccttgcatccaaaacaagccacattccttacagaaactcaaagctgacccatatgctgcaaaactctttgggtggagattgcaagacattaatgtttgtccagattagtccgagttctgccgatctaggagagaccctttgctccttgaactttgcaagtagagtccgaggaatcgaaagtggacctgcccgaaaacaggctgatgtctctgaactccttaagtcaaaacaaatggccgagaagctgaaacacgaggaaaaggaaacaaagaagctgcaggacaatgtgcagtcactacagctacgcctcactgctagagaacacatatgccgaggacttcaagataaggttcgagatctggaatttcaactagcagaagaaagaaagaccagaatcaagcaggagtcacgagctctagcaactgcatcatcaacaacaacaacaacatctagacatctgagagagacactaccgacaattatagagaaaaaaccgcctttggctccaacaagaatgcgaatgccactcagaaggatcacaaacttcatgccccaacaacaaccatctcagggtcattctaagagattctcagacacaacattcaaagagaataataacagcaacagaagatcatcatctatggacgtgaatacactaatgaaaccaagaagaagctccatcgcattcaggccagctcctgctccatcagccattgcttcaagcaataaaaccatcatgcccagaaggagagtctcaattgcaacgctaagaccagaaccatcatcattatcatctatggaaactccatcacgccctcctccttcattccgtggtgacccgagaaaggcaagatactctaaactcttctctccagaccgcaatctggtgactccgaatgcaatgaaaagcagcagattcatgaagagccctcttggaggaggaggcagctcgtggaagccaagccatccgacagtgattgcattgcagaagaaggcggtggtgtggagtccccttaagttcaagaacagaagaccttccctcgtagcgatacgatcttctgcttcttcttcttccgcctctgacttgcttcggagggaacaatag

SEQ ID NO: 86639 - protein, 672 aa, Arabidopsis thaliana
  peptide (1)..(672): Ceres Seq. ID no. 12692265
MPQRVLMEATKLGALEKQYLEESSERKRLYNEVIELKGNIRVFCRCRPLNQAEIANGCASVAEFDTTQENELQILSSDSSKKHFKFDHVFKPDDGQETVFAQTKPIVTSVLDGYNVCIFAYGQTGTGKTFTMEGTPENRGVNYRTLEELFRCSESKSHLMKFELSVSMLEVYNEKIRDLLVDNSNQPPKKLEVKQSAEGTQEVPGLVEAQVYNTDGVWDLLKKGYAVRSVGSTAANEQSSRSHCLLRVTVKGENLINGQRTRSHLWLVDLAGSERVGKVEVEGERLKESQFINKSLSALGDVISALASKTSHIPYRNSKLTHMLQNSLGGDCKTLMFVQISPSSADLGETLCSLNFASRVRGIESGPARKQADVSELLKSKQMAEKLKHEEKETKKLQDNVQSLQLRLTAREHICRGLQDKVRDLEFQLAEERKTRIKQESRALATASSTTTTTSRHLRETLPTIIEKKPPLAPTRMRMPLRRITNFMPQQQPSQGHSKRFSDTTFKENNNSNRRSSSMDVNTLMKPRRSSIAFRPAPAPSAIASSNKTIMPRRRVSIATLRPEPSSLSSMETPSRPPPSFRGDPRKARYSKLFSPDRNLVTPNAMKSSRFMKSPLGGGGSSWKPSHPTVIALQKKAVVWSPLKFKNRRPSLVAIRSSASSSSASDLLRREQ

SEQ ID NO: 86640 - protein, 666 aa, Arabidopsis thaliana
  peptide (1)..(666): Ceres Seq. ID no. 12692266
MEATKLGALEKQYLEESSERKRLYNEVIELKGNIRVFCRCRPLNQAEIANGCASVAEFDTTQENELQILSSDSSKKHFKFDHVFKPDDGQETVFAQTKPIVTSVLDGYNVCIFAYGQTGTGKTFTMEGTPENRGVNYRTLEELFRCSESKSHLMKFELSVSMLEVYNEKIRDLLVDNSNQPPKKLEVKQSAEGTQEVPGLVEAQVYNTDGVWDLLKKGYAVRSVGSTAANEQSSRSHCLLRVTVKGENLINGQRTRSHLWLVDLAGSERVGKVEVEGERLKESQFINKSLSALGDVISALASKTSHIPYRNSKLTHMLQNSLGGDCKTLMFVQISPSSADLGETLCSLNFASRVRGIESGPARKQADVSELLKSKQMAEKLKHEEKETKKLQDNVQSLQLRLTAREHICRGLQDKVRDLEFQLAEERKTRIKQESRALATASSTTTTTSRHLRETLPTIIEKKPPLAPTRMRMPLRRITNFMPQQQPSQGHSKRFSDTTFKENNNSNRRSSSMDVNTLMKPRRSSIAFRPAPAPSAIASSNKTIMPRRRVSIATLRPEPSSLSSMETPSRPPPSFRGDPRKARYSKLFSPDRNLVTPNAMKSSRFMKSPLGGGGSSWKPSHPTVIALQKKAVVWSPLKFKNRRPSLVAIRSSASSSSASDLLRREQ

SEQ ID NO: 86641 - protein, 541 aa, Arabidopsis thaliana
  peptide (1)..(541): Ceres Seq. ID no. 12692267
MEGTPENRGVNYRTLEELFRCSESKSHLMKFELSVSMLEVYNEKIRDLLVDNSNQPPKKLEVKQSAEGTQEVPGLVEAQVYNTDGVWDLLKKGYAVRSVGSTAANEQSSRSHCLLRVTVKGENLINGQRTRSHLWLVDLAGSERVGKVEVEGERLKESQFINKSLSALGDVISALASKTSHIPYRNSKLTHMLQNSLGGDCKTLMFVQISPSSADLGETLCSLNFASRVRGIESGPARKQADVSELLKSKQMAEKLKHEEKETKKLQDNVQSLQLRLTAREHICRGLQDKVRDLEFQLAEERKTRIKQESRALATASSTTTTTSRHLRETLPTIIEKKPPLAPTRMRMPLRRITNFMPQQQPSQGHSKRFSDTTFKENNNSNRRSSSMDVNTLMKPRRSSIAFRPAPAPSAIASSNKTIMPRRRVSIATLRPEPSSLSSMETPSRPPPSFRGDPRKARYSKLFSPDRNLVTPNAMKSSRFMKSPLGGGGSSWKPSHPTVIALQKKAVVWSPLKFKNRRPSLVAIRSSASSSSASDLLRREQ

SEQ ID NO: 86642 - DNA, 3033 bp, Arabidopsis thaliana
  misc_feature (1)..(3033): Ceres Seq. ID no. 12692277
  misc_feature (1)..(3033): Ortholog of  Ceres SEQ ID NO 14307510 as cited in SEQ ID NO 54687
atggcgcctactaggaagtcgaagagtgtgaacaagcgtttcaccaatgaagcgtctccagatatcaattttgggagcgcaagcaaaaccaagcaaagaaagaagaaattggctgataagctgggacctcagtggaccaaaagggagcttgtgcgtttctatgatgcttataggaagtatgtgggagactggaaaaaggtagctgctgcagtacggaataaccggtctgttgagatggtcgaaacactcttttgtatgaatcgggcatacttatccttgcccgagggaactgcttctgtagctggccttattgcaatgatgactgatcactacagcgtcatggaggggagcgaaagtgaaggagaagaccatgatgcttctgaggtaacgaggaaacatctgaagcgcaaacgtcctcaagttctgcctagtgattttcgagaagaagttgttccaccacattcagttgcatcagtagaaggatgtctctcattcttgaagcagacacaagcttatgaaaaaaggcaacgggccactggaaaacgtacacctcggtttcttgtcgcaattacacatgagagggatgatatagaagattttagtccaccaaataaaagagccaagaaacaacttgatgccgatgatgatgcatcaagaaggggaggagggtctccatacagaagaaaagaactcagtgaaatcacaccaactaggcttaggaaaacgtcacaagcacaggaagcacaattcaagcaccctgatagttccatgtttgagaatggggtgagagatagatggcataaaaagggagctgctgatagagatggtgccttgttgatggatatggaaggacttgttacccaaaaggaaaaaattgtgagagttgaagaagcagaaggaaattattctgatgatgatgatggattaggagctctgaagacattggctgaaatgtcagcttcactggctccggctggtttgttggaatcagaatcatctccacactgggaagaagaaagaaaaactaacaacgtggataagaaatctaacactctggaaaccgtgtcaacaagccatcacagagaaaaagcaaaacaagcaggactagaagataatctcctgcatgcaatttcagcccctgataaaagaaaaccgaagtctgtgccggaatccgttgatggtaatgttgtttccatcgaggagcttcgcacttcaagcagaaaacgtaaaccaaaggtgctagatgttgtagctccaaaagagtctacacaggacaaatctctatatactaaggaatcggctgaagttgatagtttgaagactcccgtcaaagcaagacgttctagtcaaggtccagcaaaacagctgaaaactgcaaagaccacggtagaatcttcttcagctagtgataagaaaataactggaccggatgcagtagtgccagctacacaagtttcagcttcgggtccagagactttgccacagaaaccaccaaacaggcgtaagataagtttgaagaaaagtttacaagaaagagctaaatctttagaaaccactcatgacaaaccacgtagtttcaaaaaactttcagaacatgaattactacaggagaagttgtcaaattgtctgtcatatccattggtacgtcgatggtgcatatatgaatggttctacagtgctattgactatccctggtttgcaaagatggagttcactgattatctaaatcatgtggggcttggtcacgctccaagacttactcgtgttgaatggagtgtcattaaaagttctctcggtagacctcggagattgtctcagagattcctacaggatgagcgggataaactccaagaatatcgtgagtctgtgagaaagcattatacagagctgcgtggatgtgctacgggagtgcttcatacagatttggcccgtcctttatcagtcgggaatagagtgattgccatccatcctaaaacacgggagattcgtgatggcaagattcttactgtggatcataacaagtgcaacgttctctttgatgaattgggtgtcgagttagttatggacattgactgcatgcctttaaatccattggaatacatgccagagggtctaaggaggcaaattgataagtgcttggctatatgcaaagaagcaaggcttaacagacacccaagctctgatgcatctgttctgttctctccttctgtgcttgaaaatgtcaacttttccatgaatcctcctcctgcgaaacaggatgatatcagagagccagttttgtatggtaaagtaatagcaaccaacactactgatcaatctatcgtaatcaatagcaaagtaacaggaacagaaattcaacggactctggcactgcagcatacttccgatgcgcagctacagaaattcttttctcatgattctgctttccaggaaatggagccagaaatgattgaaattgtcattgaatcaaagtcaatagcgcaagcaatggtggatgcagctataaaggctgcatcgtcggggaagaacaatgaagactcagagaatatggttcaccaagctttaagctccattggcgaacatcagccattagacaactctatagtgcctggtatcaagcatcaagagtataccaatggcagcttggatcatcattccttaaacacagcagagccgatgagtaacggtttcatctcacaggaaggatcaggaaaaaacaaaacaccaatgccttcagagcttatcacctcttgtgttgcatcttggctcatgatgcagatgatctcaaagaagcagtacccaccagcagatgtggctcagctaatggatacagtagtgaatgacttgcagccacggtgtccacagaatatgccgatatacagagaaattcaaacttgtatgggattgatcaagactcaaataatggctcttgatctgaaacctgaacagatacctgaaatatcgaaactcaaacggatacatgttcaatatcaggtttcaattaaatttgagaaccagcccgaacccgaatag

SEQ ID NO: 86643 - protein, 1010 aa, Arabidopsis thaliana
  peptide (1)..(1010): Ceres Seq. ID no. 12692278
MAPTRKSKSVNKRFTNEASPDINFGSASKTKQRKKKLADKLGPQWTKRELVRFYDAYRKYVGDWKKVAAAVRNNRSVEMVETLFCMNRAYLSLPEGTASVAGLIAMMTDHYSVMEGSESEGEDHDASEVTRKHLKRKRPQVLPSDFREEVVPPHSVASVEGCLSFLKQTQAYEKRQRATGKRTPRFLVAITHERDDIEDFSPPNKRAKKQLDADDDASRRGGGSPYRRKELSEITPTRLRKTSQAQEAQFKHPDSSMFENGVRDRWHKKGAADRDGALLMDMEGLVTQKEKIVRVEEAEGNYSDDDDGLGALKTLAEMSASLAPAGLLESESSPHWEEERKTNNVDKKSNTLETVSTSHHREKAKQAGLEDNLLHAISAPDKRKPKSVPESVDGNVVSIEELRTSSRKRKPKVLDVVAPKESTQDKSLYTKESAEVDSLKTPVKARRSSQGPAKQLKTAKTTVESSSASDKKITGPDAVVPATQVSASGPETLPQKPPNRRKISLKKSLQERAKSLETTHDKPRSFKKLSEHELLQEKLSNCLSYPLVRRWCIYEWFYSAIDYPWFAKMEFTDYLNHVGLGHAPRLTRVEWSVIKSSLGRPRRLSQRFLQDERDKLQEYRESVRKHYTELRGCATGVLHTDLARPLSVGNRVIAIHPKTREIRDGKILTVDHNKCNVLFDELGVELVMDIDCMPLNPLEYMPEGLRRQIDKCLAICKEARLNRHPSSDASVLFSPSVLENVNFSMNPPPAKQDDIREPVLYGKVIATNTTDQSIVINSKVTGTEIQRTLALQHTSDAQLQKFFSHDSAFQEMEPEMIEIVIESKSIAQAMVDAAIKAASSGKNNEDSENMVHQALSSIGEHQPLDNSIVPGIKHQEYTNGSLDHHSLNTAEPMSNGFISQEGSGKNKTPMPSELITSCVASWLMMQMISKKQYPPADVAQLMDTVVNDLQPRCPQNMPIYREIQTCMGLIKTQIMALDLKPEQIPEISKLKRIHVQYQVSIKFENQPEPE

SEQ ID NO: 86644 - protein, 932 aa, Arabidopsis thaliana
  peptide (1)..(932): Ceres Seq. ID no. 12692279
MVETLFCMNRAYLSLPEGTASVAGLIAMMTDHYSVMEGSESEGEDHDASEVTRKHLKRKRPQVLPSDFREEVVPPHSVASVEGCLSFLKQTQAYEKRQRATGKRTPRFLVAITHERDDIEDFSPPNKRAKKQLDADDDASRRGGGSPYRRKELSEITPTRLRKTSQAQEAQFKHPDSSMFENGVRDRWHKKGAADRDGALLMDMEGLVTQKEKIVRVEEAEGNYSDDDDGLGALKTLAEMSASLAPAGLLESESSPHWEEERKTNNVDKKSNTLETVSTSHHREKAKQAGLEDNLLHAISAPDKRKPKSVPESVDGNVVSIEELRTSSRKRKPKVLDVVAPKESTQDKSLYTKESAEVDSLKTPVKARRSSQGPAKQLKTAKTTVESSSASDKKITGPDAVVPATQVSASGPETLPQKPPNRRKISLKKSLQERAKSLETTHDKPRSFKKLSEHELLQEKLSNCLSYPLVRRWCIYEWFYSAIDYPWFAKMEFTDYLNHVGLGHAPRLTRVEWSVIKSSLGRPRRLSQRFLQDERDKLQEYRESVRKHYTELRGCATGVLHTDLARPLSVGNRVIAIHPKTREIRDGKILTVDHNKCNVLFDELGVELVMDIDCMPLNPLEYMPEGLRRQIDKCLAICKEARLNRHPSSDASVLFSPSVLENVNFSMNPPPAKQDDIREPVLYGKVIATNTTDQSIVINSKVTGTEIQRTLALQHTSDAQLQKFFSHDSAFQEMEPEMIEIVIESKSIAQAMVDAAIKAASSGKNNEDSENMVHQALSSIGEHQPLDNSIVPGIKHQEYTNGSLDHHSLNTAEPMSNGFISQEGSGKNKTPMPSELITSCVASWLMMQMISKKQYPPADVAQLMDTVVNDLQPRCPQNMPIYREIQTCMGLIKTQIMALDLKPEQIPEISKLKRIHVQYQVSIKFENQPEPE

SEQ ID NO: 86645 - protein, 925 aa, Arabidopsis thaliana
  peptide (1)..(925): Ceres Seq. ID no. 12692280
MNRAYLSLPEGTASVAGLIAMMTDHYSVMEGSESEGEDHDASEVTRKHLKRKRPQVLPSDFREEVVPPHSVASVEGCLSFLKQTQAYEKRQRATGKRTPRFLVAITHERDDIEDFSPPNKRAKKQLDADDDASRRGGGSPYRRKELSEITPTRLRKTSQAQEAQFKHPDSSMFENGVRDRWHKKGAADRDGALLMDMEGLVTQKEKIVRVEEAEGNYSDDDDGLGALKTLAEMSASLAPAGLLESESSPHWEEERKTNNVDKKSNTLETVSTSHHREKAKQAGLEDNLLHAISAPDKRKPKSVPESVDGNVVSIEELRTSSRKRKPKVLDVVAPKESTQDKSLYTKESAEVDSLKTPVKARRSSQGPAKQLKTAKTTVESSSASDKKITGPDAVVPATQVSASGPETLPQKPPNRRKISLKKSLQERAKSLETTHDKPRSFKKLSEHELLQEKLSNCLSYPLVRRWCIYEWFYSAIDYPWFAKMEFTDYLNHVGLGHAPRLTRVEWSVIKSSLGRPRRLSQRFLQDERDKLQEYRESVRKHYTELRGCATGVLHTDLARPLSVGNRVIAIHPKTREIRDGKILTVDHNKCNVLFDELGVELVMDIDCMPLNPLEYMPEGLRRQIDKCLAICKEARLNRHPSSDASVLFSPSVLENVNFSMNPPPAKQDDIREPVLYGKVIATNTTDQSIVINSKVTGTEIQRTLALQHTSDAQLQKFFSHDSAFQEMEPEMIEIVIESKSIAQAMVDAAIKAASSGKNNEDSENMVHQALSSIGEHQPLDNSIVPGIKHQEYTNGSLDHHSLNTAEPMSNGFISQEGSGKNKTPMPSELITSCVASWLMMQMISKKQYPPADVAQLMDTVVNDLQPRCPQNMPIYREIQTCMGLIKTQIMALDLKPEQIPEISKLKRIHVQYQVSIKFENQPEPE

SEQ ID NO: 86646 - DNA, 2007 bp, Arabidopsis thaliana
  misc_feature (1)..(2007): Ceres Seq. ID no. 12692285
  misc_feature (1)..(2007): Ortholog of  Ceres SEQ ID NO 14307496 as cited in SEQ ID NO 58986
atggctcacatggtgagagcgagctctggcctttcttacccggagagattctacgccgccgcatcgtacgtcggcctcgacggatctcaatcgtcggtcaaacaactcagctccaaattctccaacgatacctctttgcttctctacacgttgcaccagcaggctactctaggaccttgtagtattccaaaaccgagtgcgtggaatccagtagagcaaagcaaatggaaaagttggcaggggcttggaaccatgccctccattgaggcaatgcgtctatttgtgaaaatcttggaggaagcagatcctggttggtatccaaggacatctaactctgttcttgaccctgctgtacatgtccaaatcaatagcacaaaggctgagcctagttttgagagtggagcttcatttggtgagacaaagacgattacttctgaggatgggcgcttgacagaaacgcaagataaagatgtagttttggaagacccagatactgtttctgtgtataatcagtggactgcaccacgaacatcaggtcagccaccaaaagcccgatatcagcatggagcagcggttattcaagataagatgtatatgtatggtggaaaccacaacggccgttatctaggtgatcttcatgttctggatttaaaaaactggacttggtcaagagttgaaaccaaggttgtgactggatcacaggaaacatcatctccagcaaaactaactcactgtgctggtcattctttgataccatgggataaccagcttttgtctatcggtggtcatacaaaagatccttcagaatccatgccagtgatggtctttgatctacattgctgttcatggtcaatcttaaagacatacgggaagccaccgatttcgcgtggaggtcagtcagtgacccttgtgggaaaaagcttggtgatatttggtggccaggatgcaaagagatcgcttctgaacgatttgcatatacttgatttagataccatgacctgggaggaaattgatgccgtgggttctcctccaactccaaggtctgatcatgctgctgcagtgcacgctgagcgttaccttctaatctttggtggaggatcacatgcaacttgttttgatgatctgcacgtccttgatctgcaaactatggaatggtcaagacatacacaacaaggtgacgcaccaactccacgtgctggacacgctggtgtgacgattggggaaaattggtatattgttggtggtggagataacaaaagcggggcatctaagactgttgtattaaatatgtcaactcttgcatggtcagttgtcacttcagtccaagaacatgtacctctcgctagtgagggattgagtttagttgtgagctcatacaatggagaagacatagtggttgcttttggtggatacaacggacattacaacaatgaagtgaatgttcttaaaccaagccacaaatcaagcttgaaatccaagattatgggagcttctgctgtgccagatagtttttccgctgttaataacgccacgactagagatattgagtctgagatcaaggtgagccaagaaggcaaagtaagggaaattgtcatggataatgttaactccagattaaaggttgaaggaaaagccgaccgcattatcacaacccttaaatccgaaaaagaagaagtggaggcatcactcaacaaggaaaagatacaaactctccaactaaaggaagagttagcagagatagacacacgaaatacagagttatacaaggaacttcaatctgtgcggaaccaacttgcagcggaacaatcaaggtgtttcaaactagaggttgaagttgcagagctaagacaaaagcttcagacaatggaaacacttcaaaaggaactcgaactcctccaacgtcaaagagccgttgcgtctgaacaagccgccaccatgaacgccaaacgacaaagctctggtggcgtctggggttggctcgctggaactcctccgcctaaaacatga

SEQ ID NO: 86647 - protein, 668 aa, Arabidopsis thaliana
  peptide (1)..(668): Ceres Seq. ID no. 12692286
MAHMVRASSGLSYPERFYAAASYVGLDGSQSSVKQLSSKFSNDTSLLLYTLHQQATLGPCSIPKPSAWNPVEQSKWKSWQGLGTMPSIEAMRLFVKILEEADPGWYPRTSNSVLDPAVHVQINSTKAEPSFESGASFGETKTITSEDGRLTETQDKDVVLEDPDTVSVYNQWTAPRTSGQPPKARYQHGAAVIQDKMYMYGGNHNGRYLGDLHVLDLKNWTWSRVETKVVTGSQETSSPAKLTHCAGHSLIPWDNQLLSIGGHTKDPSESMPVMVFDLHCCSWSILKTYGKPPISRGGQSVTLVGKSLVIFGGQDAKRSLLNDLHILDLDTMTWEEIDAVGSPPTPRSDHAAAVHAERYLLIFGGGSHATCFDDLHVLDLQTMEWSRHTQQGDAPTPRAGHAGVTIGENWYIVGGGDNKSGASKTVVLNMSTLAWSVVTSVQEHVPLASEGLSLVVSSYNGEDIVVAFGGYNGHYNNEVNVLKPSHKSSLKSKIMGASAVPDSFSAVNNATTRDIESEIKVSQEGKVREIVMDNVNSRLKVEGKADRIITTLKSEKEEVEASLNKEKIQTLQLKEELAEIDTRNTELYKELQSVRNQLAAEQSRCFKLEVEVAELRQKLQTMETLQKELELLQRQRAVASEQAATMNAKRQSSGGVWGWLAGTPPPKT

SEQ ID NO: 86648 - protein, 665 aa, Arabidopsis thaliana
  peptide (1)..(665): Ceres Seq. ID no. 12692287
MVRASSGLSYPERFYAAASYVGLDGSQSSVKQLSSKFSNDTSLLLYTLHQQATLGPCSIPKPSAWNPVEQSKWKSWQGLGTMPSIEAMRLFVKILEEADPGWYPRTSNSVLDPAVHVQINSTKAEPSFESGASFGETKTITSEDGRLTETQDKDVVLEDPDTVSVYNQWTAPRTSGQPPKARYQHGAAVIQDKMYMYGGNHNGRYLGDLHVLDLKNWTWSRVETKVVTGSQETSSPAKLTHCAGHSLIPWDNQLLSIGGHTKDPSESMPVMVFDLHCCSWSILKTYGKPPISRGGQSVTLVGKSLVIFGGQDAKRSLLNDLHILDLDTMTWEEIDAVGSPPTPRSDHAAAVHAERYLLIFGGGSHATCFDDLHVLDLQTMEWSRHTQQGDAPTPRAGHAGVTIGENWYIVGGGDNKSGASKTVVLNMSTLAWSVVTSVQEHVPLASEGLSLVVSSYNGEDIVVAFGGYNGHYNNEVNVLKPSHKSSLKSKIMGASAVPDSFSAVNNATTRDIESEIKVSQEGKVREIVMDNVNSRLKVEGKADRIITTLKSEKEEVEASLNKEKIQTLQLKEELAEIDTRNTELYKELQSVRNQLAAEQSRCFKLEVEVAELRQKLQTMETLQKELELLQRQRAVASEQAATMNAKRQSSGGVWGWLAGTPPPKT

SEQ ID NO: 86649 - protein, 584 aa, Arabidopsis thaliana
  peptide (1)..(584): Ceres Seq. ID no. 12692288
MPSIEAMRLFVKILEEADPGWYPRTSNSVLDPAVHVQINSTKAEPSFESGASFGETKTITSEDGRLTETQDKDVVLEDPDTVSVYNQWTAPRTSGQPPKARYQHGAAVIQDKMYMYGGNHNGRYLGDLHVLDLKNWTWSRVETKVVTGSQETSSPAKLTHCAGHSLIPWDNQLLSIGGHTKDPSESMPVMVFDLHCCSWSILKTYGKPPISRGGQSVTLVGKSLVIFGGQDAKRSLLNDLHILDLDTMTWEEIDAVGSPPTPRSDHAAAVHAERYLLIFGGGSHATCFDDLHVLDLQTMEWSRHTQQGDAPTPRAGHAGVTIGENWYIVGGGDNKSGASKTVVLNMSTLAWSVVTSVQEHVPLASEGLSLVVSSYNGEDIVVAFGGYNGHYNNEVNVLKPSHKSSLKSKIMGASAVPDSFSAVNNATTRDIESEIKVSQEGKVREIVMDNVNSRLKVEGKADRIITTLKSEKEEVEASLNKEKIQTLQLKEELAEIDTRNTELYKELQSVRNQLAAEQSRCFKLEVEVAELRQKLQTMETLQKELELLQRQRAVASEQAATMNAKRQSSGGVWGWLAGTPPPKT

SEQ ID NO: 86650 - DNA, 865 bp, Arabidopsis thaliana
  misc_feature (1)..(865): Ceres Seq. ID no. 12692341
  misc_feature (1)..(865): Ortholog of  Ceres SEQ ID NO 13582184 as cited in SEQ ID NO 56002
  misc_feature (1)..(865): Ortholog of  Ceres SEQ ID NO 15227042 as cited in SEQ ID NO 0
atgggtatcgatcttatcgcaggaggtaagagtaagaagaccaaaaggactgctcctaagtccgatgatgtctacctaaagcttctcgtcaagctttaccggtttttggtgaggagatctaacagcaacttcaatgctgtgattctgaaaaggcttttcatgagcaaagtcaacaaagctcctctttcactctctaggcttgtagagttcatgactggcaaggatgacaagattgctgtgttggttggaactatcactgatgatttgagagttcatgagattcctgccatgaaggttactgccttgaggtttactgagagggctagggctagaattgagaaagctggtggagagtgcttaacctttgaccagcttgctctcagagctccattgggacagaacacagttcttcttagaggaccaaagaactcgcgtgaagcagtgaagcatttcggacctgctcctggtgtgccacacagtaacactaagccatatgttaggcataagggaaggaagtttgagaaagctagaggaaagcgaaagagtcgtggattcaaggtctaagaagatgttttctggtttcgttttgcttggtttaagtatcgaagttttggtagggaacgctggttcctctttaccctgttccagactttgttttaagttctgtttttctattctcaagacaattggatattttgctttgtcttttaatcttactactattagctgcaatgagattttatctagaatttggatttgatcagtatttggagttcatagtatcattatggtctatttcgttttgtatttctcttccttggaaataaaatatctgtacatgagtattaaaatgtgtaaacaaccc

SEQ ID NO: 86651 - protein, 187 aa, Arabidopsis thaliana [sequence omitted]

SEQ ID NO: 86652 - protein, 134 aa, Arabidopsis thaliana; identical to SEQ ID NO: 29015
  peptide (1)..(134): Ceres Seq. ID no. 12692343

SEQ ID NO: 86653 - protein, 117 aa, Arabidopsis thaliana
  peptide (1)..(117): Ceres Seq. ID no. 12692344
MTGKDDKIAVLVGTITDDLRVHEIPAMKVTALRFTERARARIEKAGGECLTFDQLALRAPLGQNTVLLRGPKNSREAVKHFGPAPGVPHSNTKPYVRHKGRKFEKARGKRKSRGFKV

SEQ ID NO: 86654 - DNA, 2148 bp, Arabidopsis thaliana
  misc_feature (1)..(2148): Ceres Seq. ID no. 12692348
  misc_feature (1)..(2148): Ortholog of  Ceres SEQ ID NO 13594037 as cited in SEQ ID NO 55666
  misc_feature (1)..(2148): Ortholog of  Ceres SEQ ID NO 13657707 as cited in SEQ ID NO 66407
atgtcatatggatacgacgatgaggatgcaaagaggaaaaagagatatgtaattatctctatctcctctgttcttttaatctccatggttgtcgctgttaccataggtgttagcgtcaacaagtccgataacgctggtgacgaagaaatcacaacttctgttaaagccatcaaagatgtttgtgcaccgacggattacaaagagacttgtgaggatacactaaggaaagatgcgaaggacacatcagacccgttggagctggtgaagacagcttttaacgcaacgatgaaacaaataagtgacgtggcaaagaagtcacaaactatgattgagctacaaaaggatccaagggcaaagatggcgttggatcaatgcaaggagctaatggattacgcaatcggtgagcttagtaagtcgtttgaagagttggggaagttcgagtttcataaagttgatgaggccttggttaagttgaggatttggcttagtgcgacgataagccatgagcaaacttgtcttgatgggtttcaagggacacaaggtaatgctggtgagacgataaagaaggcgttgaaaaccgcggtgcagttaacgcataacgggcttgcaatggttaccgaaatgtcgaattacttaggacaaatgcagattccggagatgaatagtagacggttgttgtcccaagagtttccttcgtggatggatgcgcgagcacgtaggctattgaacgctcctatgtccgaggtaaaacccgatatcgtggtggcgcaagacggaagtggtcagtacaagacgattaacgaggcattgaattttgtcccgaagaagaagaacacgactttcgtggttcatattaaggaaggaatctataaagagtatgttcaggtgaataggagcatgacacatctagttttcataggtgatggccccgacaaaactgtcatttctgcaatcgttggagatcatttcattgccaagaacattgccttcgagaacacagccggggcaataaagcatcaagcggttgctattagggttctagcagatgagtcaatattctacaattgtaaattcgatggttaccaagacactctatatgcacattcccaccgtcagttttaccgtgactgtactatctcgggcacaatcgattttctctttggagacgcagctgcggtattccaaaactgtactttactggtgagaaagccacttctaaaccaagcatgccccattacagcccatggacgtaaagatccgcgagaatccacgggatttgttctccaaggatgtacgattgttggcgaaccggattacttggcagtcaaggaacagagcaaaacttatcttggaagaccatggaaagagtattcaagaactatcatcatgaacacgttcataccagattttgttccgccggaaggatggcaaccgtggctcggcgaattcggtcttaacacacttttctactcggaggtgcagaacactgggccgggtgcagctatcacaaaacgggttacttggccaggaatcaagaagttgagtgatgaagaaatccttaaattcactccagctcaatacatccaaggtgacgcttggattcctggtaaaggtgttccgtacatcctaggtctttttagtggaaacggttccacaaattctaccgtaactggctctagtttgtcttctaacacaacagagtcatcagattcaccttcgacggtagtaactccttcaacttctccaccagctggtcatcttggttctccatcagatacaccttcatcggtagtgtctccttcaacttctctgccagctggtcaacttggtgccccaccggctacaccatcaatggtagtgtctccttcaacttctccaccagctggtcatcttggttccccatcagatacaccttcatcgttagtttctccttcaacttctccaccagctggtcatcttggttctccatcagatacaccttcatcggtagtgactccttcagcttctccttctacttcaccatcagcttctccttctgtttcaccatcagcttttccttctgcttcaccatcagcttcaccatcagcttctccttcagtttctccttctgcttcaccatcagcttctccacaaagctcaatcggttga

SEQ ID NO: 86655 - protein, 715 aa, Arabidopsis thaliana
  peptide (1)..(715): Ceres Seq. ID no. 12692349
MSYGYDDEDAKRKKRYVIISISSVLLISMVVAVTIGVSVNKSDNAGDEEITTSVKAIKDVCAPTDYKETCEDTLRKDAKDTSDPLELVKTAFNATMKQISDVAKKSQTMIELQKDPRAKMALDQCKELMDYAIGELSKSFEELGKFEFHKVDEALVKLRIWLSATISHEQTCLDGFQGTQGNAGETIKKALKTAVQLTHNGLAMVTEMSNYLGQMQIPEMNSRRLLSQEFPSWMDARARRLLNAPMSEVKPDIVVAQDGSGQYKTINEALNFVPKKKNTTFVVHIKEGIYKEYVQVNRSMTHLVFIGDGPDKTVISAIVGDHFIAKNIAFENTAGAIKHQAVAIRVLADESIFYNCKFDGYQDTLYAHSHRQFYRDCTISGTIDFLFGDAAAVFQNCTLLVRKPLLNQACPITAHGRKDPRESTGFVLQGCTIVGEPDYLAVKEQSKTYLGRPWKEYSRTIIMNTFIPDFVPPEGWQPWLGEFGLNTLFYSEVQNTGPGAAITKRVTWPGIKKLSDEEILKFTPAQYIQGDAWIPGKGVPYILGLFSGNGSTNSTVTGSSLSSNTTESSDSPSTVVTPSTSPPAGHLGSPSDTPSSVVSPSTSLPAGQLGAPPATPSMVVSPSTSPPAGHLGSPSDTPSSLVSPSTSPPAGHLGSPSDTPSSVVTPSASPSTSPSASPSVSPSAFPSASPSASPSASPSVSPSASPSASPQSSIG

SEQ ID NO: 86656 - protein, 687 aa, Arabidopsis thaliana
  peptide (1)..(687): Ceres Seq. ID no. 12692350
MVVAVTIGVSVNKSDNAGDEEITTSVKAIKDVCAPTDYKETCEDTLRKDAKDTSDPLELVKTAFNATMKQISDVAKKSQTMIELQKDPRAKMALDQCKELMDYAIGELSKSFEELGKFEFHKVDEALVKLRIWLSATISHEQTCLDGFQGTQGNAGETIKKALKTAVQLTHNGLAMVTEMSNYLGQMQIPEMNSRRLLSQEFPSWMDARARRLLNAPMSEVKPDIVVAQDGSGQYKTINEALNFVPKKKNTTFVVHIKEGIYKEYVQVNRSMTHLVFIGDGPDKTVISAIVGDHFIAKNIAFENTAGAIKHQAVAIRVLADESIFYNCKFDGYQDTLYAHSHRQFYRDCTISGTIDFLFGDAAAVFQNCTLLVRKPLLNQACPITAHGRKDPRESTGFVLQGCTIVGEPDYLAVKEQSKTYLGRPWKEYSRTIIMNTFIPDFVPPEGWQPWLGEFGLNTLFYSEVQNTGPGAAITKRVTWPGIKKLSDEEILKFTPAQYIQGDAWIPGKGVPYILGLFSGNGSTNSTVTGSSLSSNTTESSDSPSTVVTPSTSPPAGHLGSPSDTPSSVVSPSTSLPAGQLGAPPATPSMVVSPSTSPPAGHLGSPSDTPSSLVSPSTSPPAGHLGSPSDTPSSVVTPSASPSTSPSASPSVSPSAFPSASPSASPSASPSVSPSASPSASPQSSIG

SEQ ID NO: 86657 - protein, 620 aa, Arabidopsis thaliana
  peptide (1)..(620): Ceres Seq. ID no. 12692351
MKQISDVAKKSQTMIELQKDPRAKMALDQCKELMDYAIGELSKSFEELGKFEFHKVDEALVKLRIWLSATISHEQTCLDGFQGTQGNAGETIKKALKTAVQLTHNGLAMVTEMSNYLGQMQIPEMNSRRLLSQEFPSWMDARARRLLNAPMSEVKPDIVVAQDGSGQYKTINEALNFVPKKKNTTFVVHIKEGIYKEYVQVNRSMTHLVFIGDGPDKTVISAIVGDHFIAKNIAFENTAGAIKHQAVAIRVLADESIFYNCKFDGYQDTLYAHSHRQFYRDCTISGTIDFLFGDAAAVFQNCTLLVRKPLLNQACPITAHGRKDPRESTGFVLQGCTIVGEPDYLAVKEQSKTYLGRPWKEYSRTIIMNTFIPDFVPPEGWQPWLGEFGLNTLFYSEVQNTGPGAAITKRVTWPGIKKLSDEEILKFTPAQYIQGDAWIPGKGVPYILGLFSGNGSTNSTVTGSSLSSNTTESSDSPSTVVTPSTSPPAGHLGSPSDTPSSVVSPSTSLPAGQLGAPPATPSMVVSPSTSPPAGHLGSPSDTPSSLVSPSTSPPAGHLGSPSDTPSSVVTPSASPSTSPSASPSVSPSAFPSASPSASPSASPSVSPSASPSASPQSSIG

SEQ ID NO: 86658 - DNA, 579 bp, Arabidopsis thaliana
  misc_feature (1)..(579): Ceres Seq. ID no. 12692409
  misc_feature (1)..(579): Ortholog of  Ceres SEQ ID NO 14311773 as cited in SEQ ID NO 59245
atgagcgaagaacagctgcagaaacctatagattgtgctgatgtaaaaggagaggcagagaagatttcgacaacggagggaggcattaaggcggcggaggacaaagagaaaggtgttgtagccgaggcctccggtgaacaggcggagggagaagttaaccagaaaaaggtggtagctaatcctctgaaatcggaaggaaccataacaattggagaggctctagaggcagcggttctcacggcagggaataagccggtggagtggagtgacgcagccgccattcaagcggccgaggttagagctacggggcggaccaatatcatgcccggcggtgttgcggcttcagctcaatcagccgccactcttaatgctcgtatcggctctgacgataccaagactacgctagccgacgttctcactggagcgagtagcaaattaccatcggataaagcagcaacgagaaaggacgcagagggagtgactggcgccgagatgaggaacgatcctcatctcactacatacccaaccggtgtggctgcctctgtcgctgccgccgctcggatcaatcagtccaaatga

SEQ ID NO: 86659 - protein, 192 aa, Arabidopsis thaliana; identical to SEQ ID NO: 40339
  peptide (1)..(192): Ceres Seq. ID no. 12692410

SEQ ID NO: 86660 - DNA, 1114 bp, Arabidopsis thaliana
  misc_feature (1)..(1114): Ceres Seq. ID no. 12692413
  misc_feature (1)..(1114): Ortholog of  Ceres SEQ ID NO 13595164 as cited in SEQ ID NO 56222
  misc_feature (1)..(1114): Ortholog of  Ceres SEQ ID NO 13595665 as cited in SEQ ID NO 59902
  misc_feature (1)..(1114): Ortholog of  Ceres SEQ ID NO 14302438 as cited in SEQ ID NO 62982
  misc_feature (1)..(1114): Ortholog of  Ceres SEQ ID NO 13591068 as cited in SEQ ID NO 69043
  misc_feature (1)..(1114): Ortholog of  Ceres SEQ ID NO 13623041 as cited in SEQ ID NO 0
atggaagatcggtgcttgatcaagaacgatatcactgaattgattggtaacacaccaatggtgtatctgaacaatgttgttgatggttgcgtggctcgtatcgctgcgaagcttgagatgatggagccttgttctagcgtcaaagacagaatcgcgtatagtatgatcaaagatgcagaagacaaaggattgattactcccggaaagagtacattgatagagccaactgctggtaacaccgggattggtttagcttgcatgggagctgcaagaggctataaagtgatccttgtgatgccttcaactatgagcttagagagaagaatcattctgagggcactaggtgcagagcttcatctctcggaccagcgcataggccttaaaggaatgttggagaaaactgaagcgattttaagcaaaactcctggtggttacattccacaacaatttgaaaatcctgcaaaccccgagattcattaccgaaccacgggaccggaaatatggagagattcagccgggaaagtagatatattggtcgctggcgtagggactggtggaactgctactggagtagggaagttcctcaaggagcagaacaaagacatcaaggtttgtgtggtggaaccagtagaaagtccggtacttagcggaggtcaaccaggtccacatttgattcagggaattggctctggtatcgtcccattcaatttggacttaaccattgttgatgaaattattcaagtggcaggtgaagaggctattgaaacagccaagcttcttgccctcaaagaaggattactggtgggaatatcctctggagccgcagcagcggctgcgttaaaggttgcaaagcggccagaaaacgcggggaaactcattgtggtggtttttcctagtggaggagaacgttatttatcgactaaactgttcgattcgattagatatgaagcagagaatttgcctattgaatgaatgttggacgtgtgccggtttcgtgtgtaataagagacgttcgttccaagagtccaagatttcaatttgcttattactggtcaatgtgaaatgtataaaaagttgcatattcgattatgaataattttagttgactacttcc

SEQ ID NO: 86661 - protein, 323 aa, Arabidopsis thaliana; identical to SEQ ID NO: 75872
  peptide (1)..(323): Ceres Seq. ID no. 12692414

SEQ ID NO: 86662 - protein, 304 aa, Arabidopsis thaliana; identical to SEQ ID NO: 75873
  peptide (1)..(304): Ceres Seq. ID no. 12692415

SEQ ID NO: 86663 - protein, 284 aa, Arabidopsis thaliana; identical to SEQ ID NO: 75874
  peptide (1)..(284): Ceres Seq. ID no. 12692416

SEQ ID NO: 86664 - DNA, 561 bp, Arabidopsis thaliana
  misc_feature (1)..(561): Ceres Seq. ID no. 12692420
  misc_feature (1)..(561): Ortholog of  Ceres SEQ ID NO 15170395 as cited in SEQ ID NO 58055
atggatgtaattgttcttgtggaagcaaaagatggtaccatctccgtagcttctgcattttccggtcaccaacaagctgttcacgatagcgaccataaattcctaacgcaagctgttgaagaagcttacaagggagtggactgtggtgatggtggcccatttggtgcggtgattgtgcataataacgaggttgtcgctagctgccacaatatggttttgaaatatactgacccaactgcacatgctgaagtcactgccattagagaggcatgtaagaaacttaacaaaatcgagttatcagaatgcgagatttacgcatcttgtgagccatgtccgatgtgcttcggagccatccatctctcgagactcaagaggttggtttatggagccaaagccgaagcagctatagccatcgggtttgatgacttcatagctgatgctttgagaggcacgggggtttaccagaaatctagtctggagatcaagaaagcagacgggaatggcgctgcgattgcggagcaagttttccagaacacaaaggagaagttccgtttatactaa

SEQ ID NO: 86665 - protein, 186 aa, Arabidopsis thaliana
  peptide (1)..(186): Ceres Seq. ID no. 12692421
MDVIVLVEAKDGTISVASAFSGHQQAVHDSDHKFLTQAVEEAYKGVDCGDGGPFGAVIVHNNEVVASCHNMVLKYTDPTAHAEVTAIREACKKLNKIELSECEIYASCEPCPMCFGAIHLSRLKRLVYGAKAEAAIAIGFDDFIADALRGTGVYQKSSLEIKKADGNGAAIAEQVFQNTKEKFRLY

SEQ ID NO: 86666 - protein, 116 aa, Arabidopsis thaliana; identical to SEQ ID NO: 23877
  peptide (1)..(116): Ceres Seq. ID no. 12692422

SEQ ID NO: 86667 - DNA, 1233 bp, Arabidopsis thaliana
  misc_feature (1)..(1233): Ceres Seq. ID no. 12692465
  misc_feature (1)..(1233): Ortholog of  Ceres SEQ ID NO 13654989 as cited in SEQ ID NO 63117
  misc_feature (1)..(1233): Ortholog of  Ceres SEQ ID NO 13584744 as cited in SEQ ID NO 69137
atgaactgtctgttcttgttcaaatcaaagaaacccagaaagcaacagaaagacaacaacaagaacaaaagaaaaggtaaagagttgttacaaaactcagctccagaactgacgaatcggagtgaaacgtcttcgtttaatctccagacaccaagatcgttgccttctccaagaagtatcaaagatttgtatacagagagagaacaaaatcttagggttttttcttacgaagaactcagtaaagccacttatgtgtttagcagaaagcttgtgatcggtgaaggtggatttggtattgtttataaaggaaagattctcagcaatggagattcttctgatcctccacttgtcgttgccatcaagaaactcaatcgacaaggtttacagggtcacaagcaatggctagcagaggttcagtttcttggagtagtgaatcatccgaacgttgtgaagctcataggttattgctcggaagacggcgagaccgggatcgagaggcttttggtttatgagtacatgtcgaatcgaagtttagaagaccatctcttccctcgtcgatcacacacattaccgtggaaaaaaagactcgagatcatgcttggtgctgctgaaggattgacttatttacatgatcttaaggtgatatatagagatttcaaatcctctaatgtgcttttagacgatcaattctgtccaaaattatcggactttgggcttgccagagaaggacctgatggcgacaatactcatgtcactaccgcaagagttggaacacacggctatgcggctccggaatacgtgcaaacaggtcatcttcggttaaagagcgacgtctatagcttcggtgttgtgctctacgagatcataaccggacgcagaaccattgagaggaacaagccagtggctgaacgaaggctattggattgggtcaaagagtatcctgctgatagtcaacgtttcagcatgatcgttgaccctcggttacgcaacaattatccagctgctggagctaggagtttggctaaattggctgatctttgcctgaaaaagaacgataaagagcgacctacgatggaaattgtagtggaaagattgaaaaagattatcgaagaatcggatagtgaagattatccgatggctacgactacgaccaaggaaagtagtcaggtaaggaggagacaagttgcaaaacctgagaaacaaagtttgagaggggttagtgtcagaggatga

SEQ ID NO: 86668 - protein, 410 aa, Arabidopsis thaliana; identical to SEQ ID NO: 38356
  peptide (1)..(410): Ceres Seq. ID no. 12692466

SEQ ID NO: 86669 - protein, 238 aa, Arabidopsis thaliana; identical to SEQ ID NO: 38357
  peptide (1)..(238): Ceres Seq. ID no. 12692467

SEQ ID NO: 86670 - protein, 212 aa, Arabidopsis thaliana; identical to SEQ ID NO: 38358
  peptide (1)..(212): Ceres Seq. ID no. 12692468

SEQ ID NO: 86671 - DNA, 907 bp, Arabidopsis thaliana
  misc_feature (1)..(907): Ceres Seq. ID no. 12692477
  misc_feature (1)..(907): Ortholog of  Ceres SEQ ID NO 14306439 as cited in SEQ ID NO 53628
  misc_feature (1)..(907): Ortholog of  Ceres SEQ ID NO 12611235 as cited in SEQ ID NO 56101
tttctcagtttttcccctctttttaccttttctggaaaaaagttagataaaatcggaattgtttggattagggcttcgattttttgatgttgttgtatacttttttcaatagagatttgattgtgaaacttttgtcgtcgtagctttaagcaaacaaaaaaaaaagatgaccggcgttggcgagaatcagcttatctccattcaacctgatgaactcaaatttctctttgaacttgagaagcaaagctactgtgatcttaaagttgccaataaaacagagaactatgttgctttcaaggtgaaaacaacatctccaaagaagtattttgtaagacctaacactggtgtcattcagccatgggactcttgcatcattagagttactctacaagcgcaacgagagtatcctccagatatgcagtgcaaagacaaatttctcctgcaaagtaccattgtacctccacacactgatgtggatgaacttcctcaagacactttcaccaaggacagtggaaagacattaacagaatgtaagctcaaagtctcttatattaccccgtctacaacccaaagatcctctgaatccggagcaacaaatggtgatggacaaagctcggaaaccatctctactatacagcggctgaaggaagagcgagatgcagccgttaagcaaacacaacagctgcaacatgaattggaaacggtaaggaggcggagaaaccagaggaacagcggaaatgggctatccttgaagttggcagctatggttggactcatcggactcatcatcggtttcatcctaaaacttaccttagcttctcccacataacaactcttgagcttcaacacatcgcctatcatctcaatatatgtaacagccgaatcaaaacagattcacatattttcg

SEQ ID NO: 86672 - protein, 220 aa, Arabidopsis thaliana; identical to SEQ ID NO: 21397
  peptide (1)..(220): Ceres Seq. ID no. 12692478

SEQ ID NO: 86673 - protein, 137 aa, Arabidopsis thaliana; identical to SEQ ID NO: 21398
  peptide (1)..(137): Ceres Seq. ID no. 12692479

SEQ ID NO: 86674 - DNA, 917 bp, Arabidopsis thaliana
  misc_feature (1)..(917): Ceres Seq. ID no. 12692480
  misc_feature (1)..(917): Ortholog of  Ceres SEQ ID NO 13594992 as cited in SEQ ID NO 55798
  misc_feature (1)..(917): Ortholog of  Ceres SEQ ID NO 14308171 as cited in SEQ ID NO 58912
aaggctcttctttactctggtttcgagtttgggttgtgcaaacatggcgacgagctctcatcttcttcctcaggcattgcatatgataccgagaaccccttctttctcgtcgaagaatttaggggtttcttcaattctaccacgagcatcatcagtgaactcaagactatcagtttctagggtttttctcaatcattcgagctccaattttggtttcgccatcgattccaagaagagaaaagagtttatcgctaaagctgaagagagtactgaaggtgaaactgaggctgttgtggagaatgctgttgaaactgaagcggaaggagaaggagaagccactgttgcggcggaggaagctaaacctccgtggaagacgagagtcaagctcggagatatcatggggctactgaacaagaaagctattgaggttgcagagactgtaagaccggttcctggacttaggactggggatattgtagaaatcaaactggaagttcctgagaacaaacgtaggctatctatctacaaaggtattgtgatgtctagacaaaatgcaggcatccacactactatccgtatccggaggattattgcaggcattggtgttgaaatcgtctttcccatatactctcccaacataaaggagataaaagtggtaagtcacaggaaagtgagaagagcaagactttactatctgagggacaaacttcctcgtctctcaacttttaaatgatcaccaaacccaacaccagtcttgtcttgtgttgtcttcaatctccaaaggtagctagctactctcttttctcttgtaataattgtttgtttgtttcgtcttttggatttcatttcttttcatgtaatttacagtaacagtaatttaagaaaagtaaatcaatgttgattgttttgatcttgag

SEQ ID NO: 86675 - protein, 243 aa, Arabidopsis thaliana; identical to SEQ ID NO: 21468
  peptide (1)..(243): Ceres Seq. ID no. 12692481

SEQ ID NO: 86676 - protein, 229 aa, Arabidopsis thaliana; identical to SEQ ID NO: 21469
  peptide (1)..(229): Ceres Seq. ID no. 12692482

SEQ ID NO: 86677 - protein, 216 aa, Arabidopsis thaliana; identical to SEQ ID NO: 21470
  peptide (1)..(216): Ceres Seq. ID no. 12692483

SEQ ID NO: 86678 - DNA, 1316 bp, Arabidopsis thaliana
  misc_feature (1)..(1316): Ceres Seq. ID no. 12692494
  misc_feature (1)..(1316): Ortholog of  Ceres SEQ ID NO 15171943 as cited in SEQ ID NO 54306
  misc_feature (1)..(1316): Ortholog of  Ceres SEQ ID NO 13655812 as cited in SEQ ID NO 64743
  misc_feature (1)..(1316): Ortholog of  Ceres SEQ ID NO 15178828 as cited in SEQ ID NO 0
aaacaaatttcaagttctttaaacgatttccttttcaagaaaaatccttctccttcttctttttaccacatagatcttcttgatctacaatggattctgtttctctttctgaggttactgtcattaaaggaacaacacatttgggttttatgcacagtttcagacagccattttgtggtgtcaaaatatctccaaagttctatttatccaaagttgatggaccaaaggcaatatcttcgagcagcaacacaaagagtcaatttgtttatggaggaggaagcatagctgcaacttcagattcaggttataagatgaatggagtaaacctaaaaagcagaacattgatgagttctgcagttaaagaaagatcattacttgatgcttatgatgatgagtatggtggagtaatagtagatcatggaaaattaccatcaaacccttatgctttcgcttctatgcttcgagcttctctatccgattggagaagaaagggaaagaaaggagtttggttaaagttacctgtggaacaatcagaattagtcccaatagctataaaggaaggttttgagtatcatcatgcagagaaaggatatgtaatgttaacatattggataccagaggaggaacctagtatgcttcctgcaaatgcttcacatcaagttggtgttggaggttttgtattaaatcaacataaagaggtgcttgtggtacaagaaaagtattgtgctccttcgattactggtctatggaagttaccaacagggtttattaatgaatctgaagagattttctctggtgctgtaagagaagtcaaggaagaaactggggtagatacagagttctcagaggttatagctttcagacatgctcacaacgttgcatttgagaaatctgatctgttcttcatctgtatgttgagaccactctctgataagataatcatcgatgctcttgagatcaaagccgcaaagtggatgccattggctgaatttgtggagcaaccgatgataagaggagacaaaatgtttaaaagagtgattgaaatatgcgaggcgagattaagccatcggtactgcggtctttctcctcatcgacttgtctctacttttgatggcaaaccttcttctctctattacaacgttgttgatgatgatcatgatccttcccactccaattgtagcactgagttttatagatagacgggtaaaacagaaccaaatcaagtggttcgattctgtatatacttattctcatgtaatgtatgttgttatttgatactctctcttcagtatagtaaatagtaatagatcctctgc

SEQ ID NO: 86679 - protein, 369 aa, Arabidopsis thaliana
  peptide (1)..(369): Ceres Seq. ID no. 12692495
MDSVSLSEVTVIKGTTHLGFMHSFRQPFCGVKISPKFYLSKVDGPKAISSSSNTKSQFVYGGGSIAATSDSGYKMNGVNLKSRTLMSSAVKERSLLDAYDDEYGGVIVDHGKLPSNPYAFASMLRASLSDWRRKGKKGVWLKLPVEQSELVPIAIKEGFEYHHAEKGYVMLTYWIPEEEPSMLPANASHQVGVGGFVLNQHKEVLVVQEKYCAPSITGLWKLPTGFINESEEIFSGAVREVKEETGVDTEFSEVIAFRHAHNVAFEKSDLFFICMLRPLSDKIIIDALEIKAAKWMPLAEFVEQPMIRGDKMFKRVIEICEARLSHRYCGLSPHRLVSTFDGKPSSLYYNVVDDDHDPSHSNCSTEFYR

SEQ ID NO: 86680 - protein, 349 aa, Arabidopsis thaliana
  peptide (1)..(349): Ceres Seq. ID no. 12692496
MHSFRQPFCGVKISPKFYLSKVDGPKAISSSSNTKSQFVYGGGSIAATSDSGYKMNGVNLKSRTLMSSAVKERSLLDAYDDEYGGVIVDHGKLPSNPYAFASMLRASLSDWRRKGKKGVWLKLPVEQSELVPIAIKEGFEYHHAEKGYVMLTYWIPEEEPSMLPANASHQVGVGGFVLNQHKEVLVVQEKYCAPSITGLWKLPTGFINESEEIFSGAVREVKEETGVDTEFSEVIAFRHAHNVAFEKSDLFFICMLRPLSDKIIIDALEIKAAKWMPLAEFVEQPMIRGDKMFKRVIEICEARLSHRYCGLSPHRLVSTFDGKPSSLYYNVVDDDHDPSHSNCSTEFYR

SEQ ID NO: 86681 - protein, 295 aa, Arabidopsis thaliana
  peptide (1)..(295): Ceres Seq. ID no. 12692497
MNGVNLKSRTLMSSAVKERSLLDAYDDEYGGVIVDHGKLPSNPYAFASMLRASLSDWRRKGKKGVWLKLPVEQSELVPIAIKEGFEYHHAEKGYVMLTYWIPEEEPSMLPANASHQVGVGGFVLNQHKEVLVVQEKYCAPSITGLWKLPTGFINESEEIFSGAVREVKEETGVDTEFSEVIAFRHAHNVAFEKSDLFFICMLRPLSDKIIIDALEIKAAKWMPLAEFVEQPMIRGDKMFKRVIEICEARLSHRYCGLSPHRLVSTFDGKPSSLYYNVVDDDHDPSHSNCSTEFYR

SEQ ID NO: 86682 - DNA, 1851 bp, Arabidopsis thaliana
  misc_feature (1)..(1851): Ceres Seq. ID no. 12692498
  misc_feature (1)..(1851): Ortholog of  Ceres SEQ ID NO 14307030 as cited in SEQ ID NO 54041
  misc_feature (1)..(1851): Ortholog of  Ceres SEQ ID NO 14302891 as cited in SEQ ID NO 66282
atggaatgccagacatataaagttttcacaccagattgccccatcaacaatatgattgacactcctggcaagaggaaggtgaaggagatgctttttaatttgaacgatgaggcaagaattattgggatctcagggatgatcggttcagggaaaaccattcttgccaaggagcttgcgcgggacgaggaggtccgaggccattttgcgaaccgagttttgtttctgactgtgtcacaatctcccaatcttgaggagctgagatcccttatacgggattttcttactggtcatgaggctggctttggtaccgctcttccggaatccgttggtcatacacggaagctagtgatccttgatgatgttaggacaagggaatctctagaccagctgatgttcaatattcctggaaccacaacgcttgtggtctcacagtctaaactcgtagatcctagaaccacctatgatgtagagttattaaatgaacatgacgcaacatctctgttctgtctctctgctttcaaccagaaatcagttccttcagggttcagcaaaagtttggtcaagcaggttgttggggagtctaaaggtctacctttgtctctgaaagtccttggcgcttcattaaacgatcgacctgaaacatattgggcaattgcagtggagaggttatcaagaggtgaacctgttgatgaaactcatgagagtaaagtgtttgctcaaatcgaagcaactctagaaaatctcgatccaaaaaccaaagagtgtttcttggatatgggtgctttccctgaaggcaagaaaatccctgttgatgttctcatcaacatgttggtcaagatacatgatcttgaggacgcagccgcctttgatgttcttgttgatctagcaaataggaatcttcttactctcgtgaaagatccaacgtttgtcgctatgggcactagctactatgatatattcgtgacgcagcacgatgttttaagagatgtagcacttcatcttaccaatcgtggaaaagtaagagaaatgactgagatggactggtttgacatggatttccccaaggcagaagttctgatagtaaacttctcttcagacaactatgtattgcctcctttcattgctaagatgggaatgcttagggtgttcgtgattataaacaacggtacctctccagcgcatctacatgacttccccatccctaccagtttgaccaatctaaggagtctctggcttgagagggttcatgtccctgaactctctagcagtatgatacccttgaaaaacctccacaagctatatctgattatttgcaagatcaataacagttttgatcagacagccatagacattgcccaaatcttcccaaaattgactgatatcacaatagattattgcgatgatcttgcggaactaccttcgaccatctgtggaataacctctctcaactccatcagcataacaaattgtcccaacatcaaggagttaccgaagaatataagtaagctacaagcccttcaacttttgaggctatacgcttgcccagagctaaaatctctgcctgtggaaatctgtgaattgccaagactagtgtatgtcgacatctctcactgtctcagcctaagttctcttccggaaaagataggaaatgtaaggacacttgagaaaatcgacatgagagaatgtagcttatcgagcataccaagttccgcagtttcattgacttccctatgctatgtaacatgctatagagaggctttgtggatgtggaaagaggttgagaaggcagttcccggacttcgtattgaagctactgaaaaatggttcaacatgacttggcccgacgagtag

SEQ ID NO: 86683 - protein, 616 aa, Arabidopsis thaliana
  peptide (1)..(616): Ceres Seq. ID no. 12692499
MECQTYKVFTPDCPINNMIDTPGKRKVKEMLFNLNDEARIIGISGMIGSGKTILAKELARDEEVRGHFANRVLFLTVSQSPNLEELRSLIRDFLTGHEAGFGTALPESVGHTRKLVILDDVRTRESLDQLMFNIPGTTTLVVSQSKLVDPRTTYDVELLNEHDATSLFCLSAFNQKSVPSGFSKSLVKQVVGESKGLPLSLKVLGASLNDRPETYWAIAVERLSRGEPVDETHESKVFAQIEATLENLDPKTKECFLDMGAFPEGKKIPVDVLINMLVKIHDLEDAAAFDVLVDLANRNLLTLVKDPTFVAMGTSYYDIFVTQHDVLRDVALHLTNRGKVREMTEMDWFDMDFPKAEVLIVNFSSDNYVLPPFIAKMGMLRVFVIINNGTSPAHLHDFPIPTSLTNLRSLWLERVHVPELSSSMIPLKNLHKLYLIICKINNSFDQTAIDIAQIFPKLTDITIDYCDDLAELPSTICGITSLNSISITNCPNIKELPKNISKLQALQLLRLYACPELKSLPVEICELPRLVYVDISHCLSLSSLPEKIGNVRTLEKIDMRECSLSSIPSSAVSLTSLCYVTCYREALWMWKEVEKAVPGLRIEATEKWFNMTWPDE

SEQ ID NO: 86684 - protein, 599 aa, Arabidopsis thaliana
  peptide (1)..(599): Ceres Seq. ID no. 12692500
MIDTPGKRKVKEMLFNLNDEARIIGISGMIGSGKTILAKELARDEEVRGHFANRVLFLTVSQSPNLEELRSLIRDFLTGHEAGFGTALPESVGHTRKLVILDDVRTRESLDQLMFNIPGTTTLVVSQSKLVDPRTTYDVELLNEHDATSLFCLSAFNQKSVPSGFSKSLVKQVVGESKGLPLSLKVLGASLNDRPETYWAIAVERLSRGEPVDETHESKVFAQIEATLENLDPKTKECFLDMGAFPEGKKIPVDVLINMLVKIHDLEDAAAFDVLVDLANRNLLTLVKDPTFVAMGTSYYDIFVTQHDVLRDVALHLTNRGKVREMTEMDWFDMDFPKAEVLIVNFSSDNYVLPPFIAKMGMLRVFVIINNGTSPAHLHDFPIPTSLTNLRSLWLERVHVPELSSSMIPLKNLHKLYLIICKINNSFDQTAIDIAQIFPKLTDITIDYCDDLAELPSTICGITSLNSISITNCPNIKELPKNISKLQALQLLRLYACPELKSLPVEICELPRLVYVDISHCLSLSSLPEKIGNVRTLEKIDMRECSLSSIPSSAVSLTSLCYVTCYREALWMWKEVEKAVPGLRIEATEKWFNMTWPDE

SEQ ID NO: 86685 - protein, 587 aa, Arabidopsis thaliana
  peptide (1)..(587): Ceres Seq. ID no. 12692501
MLFNLNDEARIIGISGMIGSGKTILAKELARDEEVRGHFANRVLFLTVSQSPNLEELRSLIRDFLTGHEAGFGTALPESVGHTRKLVILDDVRTRESLDQLMFNIPGTTTLVVSQSKLVDPRTTYDVELLNEHDATSLFCLSAFNQKSVPSGFSKSLVKQVVGESKGLPLSLKVLGASLNDRPETYWAIAVERLSRGEPVDETHESKVFAQIEATLENLDPKTKECFLDMGAFPEGKKIPVDVLINMLVKIHDLEDAAAFDVLVDLANRNLLTLVKDPTFVAMGTSYYDIFVTQHDVLRDVALHLTNRGKVREMTEMDWFDMDFPKAEVLIVNFSSDNYVLPPFIAKMGMLRVFVIINNGTSPAHLHDFPIPTSLTNLRSLWLERVHVPELSSSMIPLKNLHKLYLIICKINNSFDQTAIDIAQIFPKLTDITIDYCDDLAELPSTICGITSLNSISITNCPNIKELPKNISKLQALQLLRLYACPELKSLPVEICELPRLVYVDISHCLSLSSLPEKIGNVRTLEKIDMRECSLSSIPSSAVSLTSLCYVTCYREALWMWKEVEKAVPGLRIEATEKWFNMTWPDE

SEQ ID NO: 86686 - DNA, 738 bp, Arabidopsis thaliana
  misc_feature (1)..(738): Ceres Seq. ID no. 12692506
  misc_feature (1)..(738): Ortholog of  Ceres SEQ ID NO 13582388 as cited in SEQ ID NO 56812
atgcgggtgcttggtttgagctcaagcttatgctctggtgaggataaggaagaagaagagattaatggagaaggctctctcacgcctgtttatctcaacgtctatgatctaactcctgtcaacaattatctctattggttcggccttggcatatttcactctggcattgaggctcatggtttcgaatatggatatggagctcatgagtattcgagcagtggggtatttgaggttgaacctaggagctgtccaggtttcatctttaggcgctcagttttgttgggaaccaccagcatgtctcgctctgatttccgctccttcatggagaagctttcgagaaagtatcatggggacacataccatttgattgccaaaaactgtaaccatttcactgaagaagtatgcttgcaggtaacaggaaagcctattcctggatggattaataggatggctcgagttggttcgttctgtaactgtatccttccagaaagcatacagctctcatcggttaatcatcctgaagccctcgagttctctgatgataacgatggatcagaagaatcagttgcatcttctgtgtcatacgaaacagatggagaaggatcggatcatcatctcataacagcaccaaacagcgatattgcgtatctacaggacagaccagtgagacttgcccgtgagctcctccaagaaccaaccgatgatacatctccgcagtacttgttgaagcggtcctga

SEQ ID NO: 86687 - protein, 245 aa, Arabidopsis thaliana; identical to SEQ ID NO: 24698
  peptide (1)..(245): Ceres Seq. ID no. 12692507

SEQ ID NO: 86688 - protein, 147 aa, Arabidopsis thaliana; identical to SEQ ID NO: 24699
  peptide (1)..(147): Ceres Seq. ID no. 12692508

SEQ ID NO: 86689 - protein, 138 aa, Arabidopsis thaliana; identical to SEQ ID NO: 24700
  peptide (1)..(138): Ceres Seq. ID no. 12692509

SEQ ID NO: 86690 - DNA, 573 bp, Arabidopsis thaliana
  misc_feature (1)..(573): Ceres Seq. ID no. 12692584
  misc_feature (1)..(573): Ortholog of  Ceres SEQ ID NO 13597058 as cited in SEQ ID NO 63499
atggtgctggtattggcattgggggatctccatgtaccccatagagcggctgatctacctcctaagttcaaatcaatgcttgttcctgggaagattcaacacatcatctgcactggaaatctctgcatcaaagaaatccatgactacttgaagactatctgccctgatttgcatatagttcgaggggagtttgacgaagatgcgcgataccctgagaataaaaccttgactattgggcaattcaagctgggattgtgtcatggccaccaggtgatcccatggggtgatctagactcactcgccatgcttcagagacaactgggcgtcgacattctcgtaacaggccatacccaccagttcacagcgtacaaacacgagggaggagtggtgataaacccgggctctgcaaccggagcttacagcagcataaaccaagacgttaacccaagctttgtccttatggacatcgatggtttccgagctgtagtctatgtctatgagctaatcgatggagaagttaaagtcgacaagatcgagttcaagaagccccctactaccagctctggtccgtag

SEQ ID NO: 86691 - protein, 190 aa, Arabidopsis thaliana; identical to SEQ ID NO: 21979
  peptide (1)..(190): Ceres Seq. ID no. 12692585

SEQ ID NO: 86692 - protein, 165 aa, Arabidopsis thaliana; identical to SEQ ID NO: 21980
  peptide (1)..(165): Ceres Seq. ID no. 12692586

SEQ ID NO: 86693 - DNA, 1002 bp, Arabidopsis thaliana
  misc_feature (1)..(1002): Ceres Seq. ID no. 12692607
  misc_feature (1)..(1002): Ortholog of  Ceres SEQ ID NO 13639663 as cited in SEQ ID NO 57850
  misc_feature (1)..(1002): Ortholog of  Ceres SEQ ID NO 15224330 as cited in SEQ ID NO 58808
atgggtgtagattactacaatatactaaaggtgaatcacaacgcgacggaggatgatctcaagaaagcttacaagcgtctcgccatgatttggcatcccgataagaatccatcgacgcgtcgagacgaagctgaagccaaattcaaacggatctccgaagcttacgatgttctctctgatcctcagaaacgtcagatctacgatctttacggcgaggaaggtcttaaatctggcaaaatccctaattcttcttcatcggagcacaggccgcagcatccgcctaacgcttcgtcgtttcgttttaaccctagagacgcggaggacatctatgctgagttctttggatctgaaaatggtggaggaagcaataatgctggtgggagaggaaacagagcgtttaggaatggtcatttcaacaccggtggtgccaatggttatagcggtgagatgaggaaagttccagctatggagaatccattgcctgtgagtttggaggatctgtataaaggtgtggtgaagaagatgcggataactagaaatgtctatgatgcttctgggagaatgatggtagaggcggagatattgcctatagaaataaaacctggttggaagaaaggaacaaagctgacatttcctaagaaaggcaatgaagagcctggaatcataccagcagatattgtattcgtggttgaagagaagccacatcctgtttacaagagagatgggaacgatcttttggtcagtcaggagataactctacttgaagctttaactggtaagactgtcaatctgatcacgcttgatggaaggactctcatgatcccattgacggagatcattaaacctgatcatgagattgttgttccaaacgaaggaatgcctatctctaaagaacctggaaaaaagggtaacttgaaactgaagcttagtgtgaaatacccgtcgaggctcacatcggatcagaaattcgagctaaagagagttcttggtggggtctcatga

SEQ ID NO: 86694 - protein, 333 aa, Arabidopsis thaliana
  peptide (1)..(333): Ceres Seq. ID no. 12692608
MGVDYYNILKVNHNATEDDLKKAYKRLAMIWHPDKNPSTRRDEAEAKFKRISEAYDVLSDPQKRQIYDLYGEEGLKSGKIPNSSSSEHRPQHPPNASSFRFNPRDAEDIYAEFFGSENGGGSNNAGGRGNRAFRNGHFNTGGANGYSGEMRKVPAMENPLPVSLEDLYKGVVKKMRITRNVYDASGRMMVEAEILPIEIKPGWKKGTKLTFPKKGNEEPGIIPADIVFVVEEKPHPVYKRDGNDLLVSQEITLLEALTGKTVNLITLDGRTLMIPLTEIIKPDHEIVVPNEGMPISKEPGKKGNLKLKLSVKYPSRLTSDQKFELKRVLGGVS

SEQ ID NO: 86695 - protein, 305 aa, Arabidopsis thaliana
  peptide (1)..(305): Ceres Seq. ID no. 12692609
MIWHPDKNPSTRRDEAEAKFKRISEAYDVLSDPQKRQIYDLYGEEGLKSGKIPNSSSSEHRPQHPPNASSFRFNPRDAEDIYAEFFGSENGGGSNNAGGRGNRAFRNGHFNTGGANGYSGEMRKVPAMENPLPVSLEDLYKGVVKKMRITRNVYDASGRMMVEAEILPIEIKPGWKKGTKLTFPKKGNEEPGIIPADIVFVVEEKPHPVYKRDGNDLLVSQEITLLEALTGKTVNLITLDGRTLMIPLTEIIKPDHEIVVPNEGMPISKEPGKKGNLKLKLSVKYPSRLTSDQKFELKRVLGGVS

SEQ ID NO: 86696 - protein, 184 aa, Arabidopsis thaliana; identical to SEQ ID NO: 44749
  peptide (1)..(184): Ceres Seq. ID no. 12692610

SEQ ID NO: 86697 - DNA, 1452 bp, Arabidopsis thaliana
  misc_feature (1)..(1452): Ceres Seq. ID no. 12692662
  misc_feature (1)..(1452): Ortholog of  Ceres SEQ ID NO 13594209 as cited in SEQ ID NO 59089
  misc_feature (1)..(1452): Ortholog of  Ceres SEQ ID NO 14307995 as cited in SEQ ID NO 63970
  misc_feature (1)..(1452): Ortholog of  Ceres SEQ ID NO 15169585 as cited in SEQ ID NO 66076
  misc_feature (1)..(1452): Ortholog of  Ceres SEQ ID NO 13502874 as cited in SEQ ID NO 66298
  misc_feature (1)..(1452): Ortholog of  Ceres SEQ ID NO 12614124 as cited in SEQ ID NO 68392
  misc_feature (1)..(1452): Ortholog of  Ceres SEQ ID NO 15176087 as cited in SEQ ID NO 68692
atgatacttttcttatgcttaataatattgttcatcataaccattctcttcttcaaaaaacataagacagtgaacaaaatcatcaactttccatccccaccgagacttccgttgatcggaaatcttcatcagcttagccaacatcctcaccgatcactctgctatctcagccaccgttacggtccactcatgctcctccacttcggaagtgtccccgttattgtagcctctacagcagaagcagctcgagacgttttaaagacgcatgatcgcgtttttgctagccgtccacggtcaaaaatcttcgaaaagcttctttacaagagccgtaatatggcctcagctccttatggagagtattggcgacaaatgaagagtgttagtgttctccatctcctcagcaacaaaatggtacggtcctttcaagacgtgagacaagaagagatcactctgatgatggaaacgatccgtaaatcgagttctaaaccggtaaatcttagcaagatcttgtcgagtttaactaacgatgttatatgtagagtagctttgggacggaaatatggtgttggaacagattttaaagagttaatagacaggctcatgaggcaacttggtacgtttactatcgggagttatgtaccgtggcttgcgtggactgattgggtcagcggtttggaggctcgactggaaaagaccgctaatgattttgataagctattggagagaattgtgcaggatcatgaagatggagacggcgacaagactgattttgtggatgtattgctcgcagctcagagagacaagagtttcgggttcgatattgaccggttaagcataaaagcaatcgtcttggatgcttttgtgggtggtacagacacatcctccacgcttgtggaatgggaaatgacagagcttctacgacacccaacgtgtctaaaaaaacttcaagaggaagtccgtacgatttgtaagggaaaatcaagtgtgtctgaagatgacattcaaggaatggaatacttaaaagctgtggtcaaagaggcactcaggctacatccaccagttccattgatggttcctcatcaatcaacacaagatgttaggttaagagataaccatatacctgccggtacgcaggttatagtcaatctttgggccgtcgggagagaggctgcgacgtggggaccagatgcgaatgagtttagaccggagaggcatttagagtcgccttctgatttccggggtcaggattttgagctgattccttttggagcagggagaaggatgtgtccaggaatatcatttgctgtggtgctgaatgaggtagtcttggctaacttagtgcatgggtttgattggcaatctatagacgatgagaccgatgttgctgaatcaatcggtagtgtgattcgccgcatgcaccctctttacgtcattccatcatctactacttga

SEQ ID NO: 86698 - protein, 483 aa, Arabidopsis thaliana
  peptide (1)..(483): Ceres Seq. ID no. 12692663
MILFLCLIILFIITILFFKKHKTVNKIINFPSPPRLPLIGNLHQLSQHPHRSLCYLSHRYGPLMLLHFGSVPVIVASTAEAARDVLKTHDRVFASRPRSKIFEKLLYKSRNMASAPYGEYWRQMKSVSVLHLLSNKMVRSFQDVRQEEITLMMETIRKSSSKPVNLSKILSSLTNDVICRVALGRKYGVGTDFKELIDRLMRQLGTFTIGSYVPWLAWTDWVSGLEARLEKTANDFDKLLERIVQDHEDGDGDKTDFVDVLLAAQRDKSFGFDIDRLSIKAIVLDAFVGGTDTSSTLVEWEMTELLRHPTCLKKLQEEVRTICKGKSSVSEDDIQGMEYLKAVVKEALRLHPPVPLMVPHQSTQDVRLRDNHIPAGTQVIVNLWAVGREAATWGPDANEFRPERHLESPSDFRGQDFELIPFGAGRRMCPGISFAVVLNEVVLANLVHGFDWQSIDDETDVAESIGSVIRRMHPLYVIPSSTT

SEQ ID NO: 86699 - protein, 420 aa, Arabidopsis thaliana
  peptide (1)..(420): Ceres Seq. ID no. 12692664
MLLHFGSVPVIVASTAEAARDVLKTHDRVFASRPRSKIFEKLLYKSRNMASAPYGEYWRQMKSVSVLHLLSNKMVRSFQDVRQEEITLMMETIRKSSSKPVNLSKILSSLTNDVICRVALGRKYGVGTDFKELIDRLMRQLGTFTIGSYVPWLAWTDWVSGLEARLEKTANDFDKLLERIVQDHEDGDGDKTDFVDVLLAAQRDKSFGFDIDRLSIKAIVLDAFVGGTDTSSTLVEWEMTELLRHPTCLKKLQEEVRTICKGKSSVSEDDIQGMEYLKAVVKEALRLHPPVPLMVPHQSTQDVRLRDNHIPAGTQVIVNLWAVGREAATWGPDANEFRPERHLESPSDFRGQDFELIPFGAGRRMCPGISFAVVLNEVVLANLVHGFDWQSIDDETDVAESIGSVIRRMHPLYVIPSSTT

SEQ ID NO: 86700 - protein, 372 aa, Arabidopsis thaliana
  peptide (1)..(372): Ceres Seq. ID no. 12692665
MASAPYGEYWRQMKSVSVLHLLSNKMVRSFQDVRQEEITLMMETIRKSSSKPVNLSKILSSLTNDVICRVALGRKYGVGTDFKELIDRLMRQLGTFTIGSYVPWLAWTDWVSGLEARLEKTANDFDKLLERIVQDHEDGDGDKTDFVDVLLAAQRDKSFGFDIDRLSIKAIVLDAFVGGTDTSSTLVEWEMTELLRHPTCLKKLQEEVRTICKGKSSVSEDDIQGMEYLKAVVKEALRLHPPVPLMVPHQSTQDVRLRDNHIPAGTQVIVNLWAVGREAATWGPDANEFRPERHLESPSDFRGQDFELIPFGAGRRMCPGISFAVVLNEVVLANLVHGFDWQSIDDETDVAESIGSVIRRMHPLYVIPSSTT

SEQ ID NO: 86701 - DNA, 4083 bp, Arabidopsis thaliana
  misc_feature (1)..(4083): Ceres Seq. ID no. 12692678
  misc_feature (1)..(4083): Ortholog of  Ceres SEQ ID NO 13597129 as cited in SEQ ID NO 64175
atggcggtttcagagcagagtcaagatgtgtttccatggcttaaatcgttaccggttgctccagagttcagacctactctagcagagtttcaagatccgatcgcttacattttgaagattgaagaagaagcttctagatatggaatctgtaaaattctgcctccactgcctcctccttccaaaaaaacctcgatttctaatctcaaccgttctctggcggcaagagcggcggcgagggttcgtgacggcggctttggcgcgtgtgattatgacggtggtcccacattcgccacgcgccagcagcagatcgggttttgccctaggaaacagcgtccagtgcagagacctgtgtggcagagtggagaggagtactcttttggtgagttcgagtttaaagctaagaactttgagaagaattatctcaagaaatgtggtaaaaagagtcaactctctgcccttgaaattgaaacactttactggagagccactgtggataaacccttctctgttgagtatgccaatgacatgcctggctcggcttttatccctctgagtctggctgctgcgaggaggagagagtctggtggtgaaggaggaacagttggtgagaccgcttggaacatgagggcaatgtctagagccgaaggatcattgcttaagttcatgaaggaagagatccctggagttacatcaccaatggtgtatgttgctatgatgtttagttggtttgcttggcatgtggaggaccatgaccttcatagtctcaattacttgcatatgggtgctggtaagacttggtacggtgtgccaaaggatgctgctctggcttttgaggaggttgttagggttcatggttacggtgaagagctcaatcctcttgtgacattttctactcttggtgagaagacaactgtgatgtctcctgaagtatttgttaaagccggaataccgtgttgcaggttagtgcaaaatcctggagagtttgtcgtcacctttccgggagcttatcattcgggatttagtcatggatttaattttggagaagcatctaacattgccactcccgaatggttgagaatggctaaagatgctgctatccggcgagctgctataaattaccctccaatggtttctcatctccagctactttatgactttgtattggctctaggttctagagtgccaacaagcatcaatcccaaaccacggagttctagattaaaagataaggcaagaagcgaaggagaaagattgaccaaaaagctatttgtgcaaaacattatccacaacaacgaattgctttcttctctcggaaaaggatccccagtggcccttctcccacagagttcctcagatatatcagtttgttctgacctgcgaattggatcccatttgataaccaaccaggaaaacccaatccagttaaagtgtgaggacttaagttctgatagtgttgtggttgatctcagtaacggtttaaaggatacagtttcagtgaaagaaaaatttacatctttatgtgaaaggagcagaaatcacctagcaagcacggagaaggacactcaagaaactctgtctgatgctgaaaggaggaagaatgatgcagctgttgcgctttcggatcaaaggcttttctcttgtgttacatgtggagtcttaagctttgattgtgtagctatcgttcaacctaaagaagcagctgctagatatctcatgtctgcagattgtagcttcttcaatgattggacagctgcttctggatctgcaaatcttggtcaggctgcaagatcacttcatcctcaaagcaaagagaagcatgatgtaaattacttctacaatgttcctgttcaaactatggatcattcagtgaagactggcgatcaaaaaacttcaacaacttccccgacaatagcgcataaagataatgatgttcttgggatgttagcttcagcatatggagactcttctgattccgaggaagaagatcaaaaaggcttagttacccctagttccaaaggggaaacaaaaacgtatgatcaagaaggttcagatggccatgaggaggctagagatggtagaacttctgattttaactgccagagactaaccagcgaacagaatgggttaagcaaaggcggaaaatcatcacttctggaaatagctttaccatttattccaagatctgatgacgattcatgtcggttgcacgtgttttgtcttgagcatgctgcggaagtggaacagcaacttcgtccttttggggggattaacttaatgttactgtgccatccagagtaccccaggatagaggctgaagcaaagatagttgccgaagagctcgtcatcaatcacgaatggaatgatactgaattcaggaatgtgacccgagaggatgaggaaacgattcaggcagcgttggataatgttgaagctaagggtgggaacagtgattggaccgtaaaattgggtgttaacctttcttacagcgctattctcagtcgctctcctctgtacagtaagcagatgccgtataactccatcatatacaaggcgttcggtcgcagctctccagtagcgagctcaccctcgaaacccaaagtctctggtaaaagatcgtccagacagaggaaatatgttgttggaaaatggtgtggtaaggtttggatgtcacatcaggtgcatccctttttgctggagcaggacttagagggggaagaatctgaaagaagttgtcatcttcgagttgctatggatgaggatgccactggaaagagatcgtttcctaataatgtttccagggattcgacaacaatgtttggaagaaagtattgtaggaagagaaagataagagcaaaggcggtgccacgcaagaagcttacttcttttaagagggaagatggagtttctgatgacacatcagaagatcattcttataagcagcaatggagggcttccgggaatgaggaagagtcttattttgagacagggaacacagcttctggtgattcatcaaatcaaatgtctgatccgcacaagggaattatcagacataaaggttataaagaatttgagtcagatgatgaggtttcagaccgttcacttggggaagagtatactgtacgggcatgtgcagcttcagagagctcaatggagaatggctctcagcattcaatgtatgaccatgatgatgatgatgatgatatcgacaggcagcctagggggattccaaggagccaacagacaagagtttttaggaatccagtttcatatgagtcagaagataatggcgtttatcagcaaagcggaagaatatccataagtaataggcaagctaatcgaatggttggtgaatatgattcagcagagaattctttggaggaacgaggcttttgcagtacagggaaaaggcaaaccaggtcaacagccaaacgaatagcaaaaaccaagacagttcagagttcgagagacacaaaaggtcgctttttgcaagaatttgcatctggaaagaagaatgaagaattggattcatacatggagggacctagcacacggcttagggtgagacatcagaagccgtcgagagggtctttagaaacaaaaccaaagaagattggtaagaagagaagtggtaatgcttccttctccagagttgcaactgaaaaagatgtggaggaaaaagaagaagaagaagaagaagaagagaatgaggaagaggaatgtgcagcataccaatgtaacatggagggttgcacgatgagtttcagttcggaaaaacagttgatgttacacaaaagaaacatatgcccaattaaaggctgtggtaaaaacttcttctcacacaagtatttggttcaacaccagcgtgttcactcagacgaccgtcctctgaaatgtccatggaagggatgtaagatgacgttcaagtgggcttggtctagaaccgagcacataagggttcacacaggcgctaggccttatgtttgcgctgaaccggattgtggtcaaacattcaggtttgtctctgacttcagccggcataaaaggaagaccggtcattcggttaagaagaccaacaaaaggtga

SEQ ID NO: 86702 - protein, 1360 aa, Arabidopsis thaliana
  peptide (1)..(1360): Ceres Seq. ID no. 12692679
MAVSEQSQDVFPWLKSLPVAPEFRPTLAEFQDPIAYILKIEEEASRYGICKILPPLPPPSKKTSISNLNRSLAARAAARVRDGGFGACDYDGGPTFATRQQQIGFCPRKQRPVQRPVWQSGEEYSFGEFEFKAKNFEKNYLKKCGKKSQLSALEIETLYWRATVDKPFSVEYANDMPGSAFIPLSLAAARRRESGGEGGTVGETAWNMRAMSRAEGSLLKFMKEEIPGVTSPMVYVAMMFSWFAWHVEDHDLHSLNYLHMGAGKTWYGVPKDAALAFEEVVRVHGYGEELNPLVTFSTLGEKTTVMSPEVFVKAGIPCCRLVQNPGEFVVTFPGAYHSGFSHGFNFGEASNIATPEWLRMAKDAAIRRAAINYPPMVSHLQLLYDFVLALGSRVPTSINPKPRSSRLKDKARSEGERLTKKLFVQNIIHNNELLSSLGKGSPVALLPQSSSDISVCSDLRIGSHLITNQENPIQLKCEDLSSDSVVVDLSNGLKDTVSVKEKFTSLCERSRNHLASTEKDTQETLSDAERRKNDAAVALSDQRLFSCVTCGVLSFDCVAIVQPKEAAARYLMSADCSFFNDWTAASGSANLGQAARSLHPQSKEKHDVNYFYNVPVQTMDHSVKTGDQKTSTTSPTIAHKDNDVLGMLASAYGDSSDSEEEDQKGLVTPSSKGETKTYDQEGSDGHEEARDGRTSDFNCQRLTSEQNGLSKGGKSSLLEIALPFIPRSDDDSCRLHVFCLEHAAEVEQQLRPFGGINLMLLCHPEYPRIEAEAKIVAEELVINHEWNDTEFRNVTREDEETIQAALDNVEAKGGNSDWTVKLGVNLSYSAILSRSPLYSKQMPYNSIIYKAFGRSSPVASSPSKPKVSGKRSSRQRKYVVGKWCGKVWMSHQVHPFLLEQDLEGEESERSCHLRVAMDEDATGKRSFPNNVSRDSTTMFGRKYCRKRKIRAKAVPRKKLTSFKREDGVSDDTSEDHSYKQQWRASGNEEESYFETGNTASGDSSNQMSDPHKGIIRHKGYKEFESDDEVSDRSLGEEYTVRACAASESSMENGSQHSMYDHDDDDDDIDRQPRGIPRSQQTRVFRNPVSYESEDNGVYQQSGRISISNRQANRMVGEYDSAENSLEERGFCSTGKRQTRSTAKRIAKTKTVQSSRDTKGRFLQEFASGKKNEELDSYMEGPSTRLRVRHQKPSRGSLETKPKKIGKKRSGNASFSRVATEKDVEEKEEEEEEEENEEEECAAYQCNMEGCTMSFSSEKQLMLHKRNICPIKGCGKNFFSHKYLVQHQRVHSDDRPLKCPWKGCKMTFKWAWSRTEHIRVHTGARPYVCAEPDCGQTFRFVSDFSRHKRKTGHSVKKTNKR

SEQ ID NO: 86703 - protein, 1185 aa, Arabidopsis thaliana
  peptide (1)..(1185): Ceres Seq. ID no. 12692680
MPGSAFIPLSLAAARRRESGGEGGTVGETAWNMRAMSRAEGSLLKFMKEEIPGVTSPMVYVAMMFSWFAWHVEDHDLHSLNYLHMGAGKTWYGVPKDAALAFEEVVRVHGYGEELNPLVTFSTLGEKTTVMSPEVFVKAGIPCCRLVQNPGEFVVTFPGAYHSGFSHGFNFGEASNIATPEWLRMAKDAAIRRAAINYPPMVSHLQLLYDFVLALGSRVPTSINPKPRSSRLKDKARSEGERLTKKLFVQNIIHNNELLSSLGKGSPVALLPQSSSDISVCSDLRIGSHLITNQENPIQLKCEDLSSDSVVVDLSNGLKDTVSVKEKFTSLCERSRNHLASTEKDTQETLSDAERRKNDAAVALSDQRLFSCVTCGVLSFDCVAIVQPKEAAARYLMSADCSFFNDWTAASGSANLGQAARSLHPQSKEKHDVNYFYNVPVQTMDHSVKTGDQKTSTTSPTIAHKDNDVLGMLASAYGDSSDSEEEDQKGLVTPSSKGETKTYDQEGSDGHEEARDGRTSDFNCQRLTSEQNGLSKGGKSSLLEIALPFIPRSDDDSCRLHVFCLEHAAEVEQQLRPFGGINLMLLCHPEYPRIEAEAKIVAEELVINHEWNDTEFRNVTREDEETIQAALDNVEAKGGNSDWTVKLGVNLSYSAILSRSPLYSKQMPYNSIIYKAFGRSSPVASSPSKPKVSGKRSSRQRKYVVGKWCGKVWMSHQVHPFLLEQDLEGEESERSCHLRVAMDEDATGKRSFPNNVSRDSTTMFGRKYCRKRKIRAKAVPRKKLTSFKREDGVSDDTSEDHSYKQQWRASGNEEESYFETGNTASGDSSNQMSDPHKGIIRHKGYKEFESDDEVSDRSLGEEYTVRACAASESSMENGSQHSMYDHDDDDDDIDRQPRGIPRSQQTRVFRNPVSYESEDNGVYQQSGRISISNRQANRMVGEYDSAENSLEERGFCSTGKRQTRSTAKRIAKTKTVQSSRDTKGRFLQEFASGKKNEELDSYMEGPSTRLRVRHQKPSRGSLETKPKKIGKKRSGNASFSRVATEKDVEEKEEEEEEEENEEEECAAYQCNMEGCTMSFSSEKQLMLHKRNICPIKGCGKNFFSHKYLVQHQRVHSDDRPLKCPWKGCKMTFKWAWSRTEHIRVHTGARPYVCAEPDCGQTFRFVSDFSRHKRKTGHSVKKTNKR

SEQ ID NO: 86704 - protein, 1153 aa, Arabidopsis thaliana
  peptide (1)..(1153): Ceres Seq. ID no. 12692681
MRAMSRAEGSLLKFMKEEIPGVTSPMVYVAMMFSWFAWHVEDHDLHSLNYLHMGAGKTWYGVPKDAALAFEEVVRVHGYGEELNPLVTFSTLGEKTTVMSPEVFVKAGIPCCRLVQNPGEFVVTFPGAYHSGFSHGFNFGEASNIATPEWLRMAKDAAIRRAAINYPPMVSHLQLLYDFVLALGSRVPTSINPKPRSSRLKDKARSEGERLTKKLFVQNIIHNNELLSSLGKGSPVALLPQSSSDISVCSDLRIGSHLITNQENPIQLKCEDLSSDSVVVDLSNGLKDTVSVKEKFTSLCERSRNHLASTEKDTQETLSDAERRKNDAAVALSDQRLFSCVTCGVLSFDCVAIVQPKEAAARYLMSADCSFFNDWTAASGSANLGQAARSLHPQSKEKHDVNYFYNVPVQTMDHSVKTGDQKTSTTSPTIAHKDNDVLGMLASAYGDSSDSEEEDQKGLVTPSSKGETKTYDQEGSDGHEEARDGRTSDFNCQRLTSEQNGLSKGGKSSLLEIALPFIPRSDDDSCRLHVFCLEHAAEVEQQLRPFGGINLMLLCHPEYPRIEAEAKIVAEELVINHEWNDTEFRNVTREDEETIQAALDNVEAKGGNSDWTVKLGVNLSYSAILSRSPLYSKQMPYNSIIYKAFGRSSPVASSPSKPKVSGKRSSRQRKYVVGKWCGKVWMSHQVHPFLLEQDLEGEESERSCHLRVAMDEDATGKRSFPNNVSRDSTTMFGRKYCRKRKIRAKAVPRKKLTSFKREDGVSDDTSEDHSYKQQWRASGNEEESYFETGNTASGDSSNQMSDPHKGIIRHKGYKEFESDDEVSDRSLGEEYTVRACAASESSMENGSQHSMYDHDDDDDDIDRQPRGIPRSQQTRVFRNPVSYESEDNGVYQQSGRISISNRQANRMVGEYDSAENSLEERGFCSTGKRQTRSTAKRIAKTKTVQSSRDTKGRFLQEFASGKKNEELDSYMEGPSTRLRVRHQKPSRGSLETKPKKIGKKRSGNASFSRVATEKDVEEKEEEEEEEENEEEECAAYQCNMEGCTMSFSSEKQLMLHKRNICPIKGCGKNFFSHKYLVQHQRVHSDDRPLKCPWKGCKMTFKWAWSRTEHIRVHTGARPYVCAEPDCGQTFRFVSDFSRHKRKTGHSVKKTNKR

SEQ ID NO: 86705 - DNA, 1587 bp, Arabidopsis thaliana
  misc_feature (1)..(1587): Ceres Seq. ID no. 12692778
  misc_feature (1)..(1587): Ortholog of  Ceres SEQ ID NO 12608463 as cited in SEQ ID NO 60238
atgatgaggaactcgccgtcatatacctctgcaacgcactctcgtaatttcgacaccattttgtctccactcgtcaaaaccggcaccggtgcttctaaccgatcctacgccttcttctccatctttctcttcctcctcctcggcgcgtttctctccacgcgcctcctcctcgatccctccgttttgatagagaaagaagcggtgtccgtgactgagagagaaaccactcaatccccagaataccctcagtcgactaagctaattacggaaaaaccaaaagagtttacgctaaactgcgctgctttctccggcaacgacactggaacttgcccaaaggacaattatccgacgagtttccgatctagcgccggagaaggagaatctgaccgttctccatccgccacgtgcccagattacttccgatggattcacgaggatctacggccatgggagaagaccgggatcacgagggaagccttggagcgagccaatgcgacggcgattttccgcctggcgattatcaacgggagaatctacgtcgagaaatttcgtgaggcttttcagacaagagatgtgttcacgatctggggattcgtacagctcctacggagatatccgggaaagattccggatctcgagctcatgtttgactgcgttgactggccggtagtgaaggcggctgaattcgccggagttgatcaacctccaccgccgccattgttccgttattgcgcgaacgacgagacgctcgacattgtatttcccgattggtcctattggggatgggctgaggtgaatataaagccatgggaaagtctgttgaaagaactaagagaaggaaaccagaggactaaatggatagatagagagccttatgcttactggaaagggaatccaacggttgctgagacgagacttgatctcatgaaatgtaatctctccgaggactgggtcaaggaatcaaaggaaggttacaagcagtcagacttggcgagccaatgccatcacaggtacaagatttacatagaagggtctgcgtggtcggtgagtgagaagtacattctggcttgtgactcggtgacattaatggtgaaacctcattactacgatttcttcacaagaggtatgtttccaggtcaccattactggcctgtcaaggaggacgacaaatgccgttccatcaaattcgctgttgattggggcaacttgcatatgcgaaaggcacaagacataggtaagaaggcaagtgagtttgtgcaacaagaactcaagatggactatgtgtacgattacatgtttcatctcttaatccaatactctaaactcctccggtttaaacccgagatccctcagaactccactgagctctgctcagaggcaatggcatgcccgagggatggaaatgaacgaaagtttatgatggaatcactcgtaaaacgcccagctgagacaggtccctgcgccatgccgcctccgtatgatccggcatcattttattcagttttgaaaaggagacagagtacgactagtagaatcgaacagtgggagagtaagtactggaggaagcagaacaagaccggttcgtaa

SEQ ID NO: 86706 - protein, 528 aa, Arabidopsis thaliana
  peptide (1)..(528): Ceres Seq. ID no. 12692779
MMRNSPSYTSATHSRNFDTILSPLVKTGTGASNRSYAFFSIFLFLLLGAFLSTRLLLDPSVLIEKEAVSVTERETTQSPEYPQSTKLITEKPKEFTLNCAAFSGNDTGTCPKDNYPTSFRSSAGEGESDRSPSATCPDYFRWIHEDLRPWEKTGITREALERANATAIFRLAIINGRIYVEKFREAFQTRDVFTIWGFVQLLRRYPGKIPDLELMFDCVDWPVVKAAEFAGVDQPPPPPLFRYCANDETLDIVFPDWSYWGWAEVNIKPWESLLKELREGNQRTKWIDREPYAYWKGNPTVAETRLDLMKCNLSEDWVKESKEGYKQSDLASQCHHRYKIYIEGSAWSVSEKYILACDSVTLMVKPHYYDFFTRGMFPGHHYWPVKEDDKCRSIKFAVDWGNLHMRKAQDIGKKASEFVQQELKMDYVYDYMFHLLIQYSKLLRFKPEIPQNSTELCSEAMACPRDGNERKFMMESLVKRPAETGPCAMPPPYDPASFYSVLKRRQSTTSRIEQWESKYWRKQNKTGS

SEQ ID NO: 86707 - protein, 527 aa, Arabidopsis thaliana
  peptide (1)..(527): Ceres Seq. ID no. 12692780
MRNSPSYTSATHSRNFDTILSPLVKTGTGASNRSYAFFSIFLFLLLGAFLSTRLLLDPSVLIEKEAVSVTERETTQSPEYPQSTKLITEKPKEFTLNCAAFSGNDTGTCPKDNYPTSFRSSAGEGESDRSPSATCPDYFRWIHEDLRPWEKTGITREALERANATAIFRLAIINGRIYVEKFREAFQTRDVFTIWGFVQLLRRYPGKIPDLELMFDCVDWPVVKAAEFAGVDQPPPPPLFRYCANDETLDIVFPDWSYWGWAEVNIKPWESLLKELREGNQRTKWIDREPYAYWKGNPTVAETRLDLMKCNLSEDWVKESKEGYKQSDLASQCHHRYKIYIEGSAWSVSEKYILACDSVTLMVKPHYYDFFTRGMFPGHHYWPVKEDDKCRSIKFAVDWGNLHMRKAQDIGKKASEFVQQELKMDYVYDYMFHLLIQYSKLLRFKPEIPQNSTELCSEAMACPRDGNERKFMMESLVKRPAETGPCAMPPPYDPASFYSVLKRRQSTTSRIEQWESKYWRKQNKTGS

SEQ ID NO: 86708 - protein, 314 aa, Arabidopsis thaliana
  peptide (1)..(314): Ceres Seq. ID no. 12692781
MFDCVDWPVVKAAEFAGVDQPPPPPLFRYCANDETLDIVFPDWSYWGWAEVNIKPWESLLKELREGNQRTKWIDREPYAYWKGNPTVAETRLDLMKCNLSEDWVKESKEGYKQSDLASQCHHRYKIYIEGSAWSVSEKYILACDSVTLMVKPHYYDFFTRGMFPGHHYWPVKEDDKCRSIKFAVDWGNLHMRKAQDIGKKASEFVQQELKMDYVYDYMFHLLIQYSKLLRFKPEIPQNSTELCSEAMACPRDGNERKFMMESLVKRPAETGPCAMPPPYDPASFYSVLKRRQSTTSRIEQWESKYWRKQNKTGS

SEQ ID NO: 86709 - DNA, 1903 bp, Arabidopsis thaliana
  misc_feature (1)..(1903): Ceres Seq. ID no. 12692786
  misc_feature (1)..(1903): Ortholog of  Ceres SEQ ID NO 13656490 as cited in SEQ ID NO 65717
atcgaaattttggattcgaacgtgtggatcgctggaaaaattaaactttagggtcgctagattacgattgcttcgctttttagtagtagtaggctacaatcgattggcaaacatctctatatcggccataactccgtcaagctctgcagaggctgcttcatcagtattgagagacttcctggtgattgattctcatgtctatgtctgagtttggcattgtctacgccatccatatcatcaccgtccaattcggctccgtcgtctcgaaagtttgtgaatgtcttctacgtaaaggacctctttcctcacgagacatctctcgtttagctgaatcagatatcaaccataacaaagttaaagatattctctatctcttgattcagcacaattgtgttcaagctttctccattgaacctcctgatggttctgagagcaaagctattgtacagtatattgtgttgtttaacaacattctgcatcgtgtgaggtataacaagttttcgaggattgtaaacgaagaacttgactccaagtgcggtgcagttcttgatggtttacttagtaacggtaggcttaccttgggacagtttattgaaagagatagagattcaggaaatacgataggttctgaagcaatcagagattctcttcagaaattggttgctgcccgttttgttgagcgcattccttctcccgaacctgttcttggaaacaaagaaaaagagccggcaaagagaagaggcgctaaagctgccaagattcttaaagaaccagaaaccttggaggaacaagttgttgaagcagcaactccagttgacgcaataaggtttccacttatattcgaagaagattccaattcatctttagcagatgacaatagcaacatcactgaggggaagcgtaaacaacgtgatgtggacacatcagattcgagcagtggagtaatttggcgtcctaattttgaggagttcatccaccgccttagacataaggcgtgtgtggagatagtgaaagagcgccgggatgaaggatgtgccattgtcttgagggcaatgttagaagtaggaagatcgcaagagaagaaggtgaaaacagacaattcggctccaatgtcagttggttccatttatgaagaagttattaagacagaagcaggtcgcactatgttacaagagcgagttgaagcatgccttgaccaattgagtgctacgtcttcttatctaccagcatttgtgaacgaagtgaatgattcatacatagttgattataaatccattatcagcgtagcacagaaagatgagatagaggcagtagtgatgagaagatatgggaaagaagctttcagaatgttcagatacttatcacaggaagggcgttttgttgagaccgataagattgctgatgccgcgctgactgaaaagaaagatacaccgcaattccttttaaagatgtggaaagacggatacttacatatgcagaaattggcggtcacagctccgggtatgtatacaccgtttctgttgtggaaggtaaacaagttgattgtgacaactcaaatgttggatgagatgtaccatgcgtcccttaacttgagtcttaggttggcccatgagttagaagccgaaaaagagttgctgttgttgccattagataaactggaaggaccattaaaggagagactgaaaaaggtcaaagccaagaggctgttactctcttccactatgtttaaacttgatgatgccattatgctttttcatgacttttaaactcatacattcaaaaactaatttcttttggtcgatttagttcacattgtcttctagcatttttttttttttttttgacataatgagaagttgtaactttgaaggtaattgatactgtttcgagagaaatgttgttt

SEQ ID NO: 86710 - protein, 523 aa, Arabidopsis thaliana; identical to SEQ ID NO: 43266
  peptide (1)..(523): Ceres Seq. ID no. 12692787

SEQ ID NO: 86711 - protein, 521 aa, Arabidopsis thaliana; identical to SEQ ID NO: 43267
  peptide (1)..(521): Ceres Seq. ID no. 12692788

SEQ ID NO: 86712 - DNA, 1488 bp, Arabidopsis thaliana
  misc_feature (1)..(1488): Ceres Seq. ID no. 12692816
  misc_feature (1)..(1488): Ortholog of  Ceres SEQ ID NO 14315457 as cited in SEQ ID NO 57014
  misc_feature (1)..(1488): Ortholog of  Ceres SEQ ID NO 13597043 as cited in SEQ ID NO 63508
agacttggaatcagtttctctttacttccctctttctctgagctatggagattactgtaatcgcttcttcctcaatcgatgaaggaattggaagttgggatctcaaaaccgggacagagcagcttcaattcaagccgtgtgcttctccggcgcatggtctcaccgccgtcggcgaaaaatttctcgcctcctctcagctctcggcgagaaatacttctggctcgattttttactggtcttggactaagcctcaagctgaagtgaagagctacccagtggaaccaataaaggctcttgcagcaaacaatgaaggaacttacttagttggtggtggaatctctggagatatttacctttgggaggttgcgactgggaagttgcttaagaagtggcatggtcattatcgttcagtaacatgtttggtgttctctggagatgattctttgttggtttctggatctcaagatgggtctattagagtttggtctcttataaggctatttgatgatttccagaggcagcaagggaacactctttatgaacacaattttaatgagcatacaatgtctgtaactgatattgttatagactatggaggctgcaatgctgtgataatttcctcttcagaagatcggacttgcaaggtttggagcttgtcaagagggaaattgttgaaaaatatcatttttccttcagtcatcaatgcactcgcattggaccctggagggtgtgtgttctatgctggtgccagagacagcaaaatctatatcggtgccattaatgccacaagtgaatacgggacacaagttcttggttcagtatctgaaaaaggcaaagctattacttgcttagcatattgtgcagacggaaaccttttgatatctggatcagaagatggtgtggtttgtgtttgggatcccaaatcacttcgccatgttcgtactctcatccatgcaaaaggttctagaaaaggtcctgtgaacaatattcaaattgttagaaaaacgattgttgctaattccaacaaaacccaagtttcctggaaaagtcgtggggctttaatcccaccgcctttggaaaaatatgaaagaccagtagaagatactatggatggtatcgttacggttgatccgccgccattttctgatgttcctgtttactcttctttcctcagtgctgaccttattgacgagcaagttaaagaacttcagcaacaaggctctgcagcaacagagatggaaatggaaagactgaaacttgaatacaaaagatctttacagatgaatgaacaatggcagaagaactatgagaatttgcttcaagtggttatggaagaagaacaaatcggtggtaccaattgaaagctttttattgttgtttctacacatttttggaattacattaagagatattgtcaagtggcatatgaagtcgtcactaaagatatgttttatcaagatcccaaatttaggtatcatagcattctgt

SEQ ID NO: 86713 - protein, 438 aa, Arabidopsis thaliana
  peptide (1)..(438): Ceres Seq. ID no. 12692817
MEITVIASSSIDEGIGSWDLKTGTEQLQFKPCASPAHGLTAVGEKFLASSQLSARNTSGSIFYWSWTKPQAEVKSYPVEPIKALAANNEGTYLVGGGISGDIYLWEVATGKLLKKWHGHYRSVTCLVFSGDDSLLVSGSQDGSIRVWSLIRLFDDFQRQQGNTLYEHNFNEHTMSVTDIVIDYGGCNAVIISSSEDRTCKVWSLSRGKLLKNIIFPSVINALALDPGGCVFYAGARDSKIYIGAINATSEYGTQVLGSVSEKGKAITCLAYCADGNLLISGSEDGVVCVWDPKSLRHVRTLIHAKGSRKGPVNNIQIVRKTIVANSNKTQVSWKSRGALIPPPLEKYERPVEDTMDGIVTVDPPPFSDVPVYSSFLSADLIDEQVKELQQQGSAATEMEMERLKLEYKRSLQMNEQWQKNYENLLQVVMEEEQIGGTN

SEQ ID NO: 86714 - protein, 265 aa, Arabidopsis thaliana
  peptide (1)..(265): Ceres Seq. ID no. 12692818
MSVTDIVIDYGGCNAVIISSSEDRTCKVWSLSRGKLLKNIIFPSVINALALDPGGCVFYAGARDSKIYIGAINATSEYGTQVLGSVSEKGKAITCLAYCADGNLLISGSEDGVVCVWDPKSLRHVRTLIHAKGSRKGPVNNIQIVRKTIVANSNKTQVSWKSRGALIPPPLEKYERPVEDTMDGIVTVDPPPFSDVPVYSSFLSADLIDEQVKELQQQGSAATEMEMERLKLEYKRSLQMNEQWQKNYENLLQVVMEEEQIGGTN

SEQ ID NO: 86715 - DNA, 1452 bp, Arabidopsis thaliana
  misc_feature (1)..(1452): Ceres Seq. ID no. 12692851
  misc_feature (1)..(1452): Ortholog of  Ceres SEQ ID NO 15226175 as cited in SEQ ID NO 0
atgaaagctttgagacggattcaaacgacgtcttcgtcttctaatccttcatcgccattatcgtctcctccttcttcttcatcatcatcctcgtggatccaaatacgttctgctctcttcgttgttgcttcttcatctcctgcttcttgttctgatcggcctcgtcttaaatcaccatggtctcggaggaaaaggaaaaggccacttagacctcagcaatggaagaggttttttactcctgacggtagattgcggaatggaggagtggatttgttgaagaaagttcgaagtagaggtattgagccaagcattcggctagaggtgtggccattccttcttggattgtatggttttaatagttctaaagaagagagagttactataagaaaccggaggagaaaggagtatgagagactacgtaggcagtgcaaacggcttcaaaaacacaataacgggactcttgagagagacgacggtagtagttcaagacgaatcaccaatgctactatctctacacttaattccgagtcatcagattcagattcttcagatgagagtgaagtggtacaggtctttcaatcttctgctactccggatgtgaatagtacttatccagccagttcatctattccccggacagaagaggattttgtgacgtggcagcgtattatccgtctagacgccgtgcgtgctgactcagagtggacctcctattctccatcccaggcagttatatcggaggatagagcatgtcgtgccgctgaggcggttgggttgaaagattacaatcacctggaaccgtacaaaatctttcaagctgcacggctagttgctgttcttgaagcttatgctttgtatgaccctgacattggatattgccaaggaatgagtgatcttctctctcctatactctctgtaatccctgatgaccatgaagtcttttggtgtttcgtcgggttcatgaagaaagctcgtcacaatttcagacttgacgaggttggaatcagaagacaactcaacatagtctcaaagataatcaaatctaaagactctcagctttataggcaccttgagaaactccaagctgaagactgtttctttgtatacagaatggttgttgtgatgttcagacgagagctgacacttgatcagacattgtgtctatgggaagtaatgtgggcagatcaagccgcaatcagagccgggatgggaaaatccgcgtggagtaggataaggcaacgtgcacctcccactgatgatttggtgctctatgcaatagcggcctcggtgttgcaaagaaggaaacgtattatagaaaggtataacagcatggatgagattttaagggagtgccaaagtatggcagggcagttagatgtgtggaagctccttgatgatgcacatgacctcgttgttactctacacaccaagattgaacattcattctcataa

SEQ ID NO: 86716 - protein, 483 aa, Arabidopsis thaliana
  peptide (1)..(483): Ceres Seq. ID no. 12692852
MKALRRIQTTSSSSNPSSPLSSPPSSSSSSSWIQIRSALFVVASSSPASCSDRPRLKSPWSRRKRKRPLRPQQWKRFFTPDGRLRNGGVDLLKKVRSRGIEPSIRLEVWPFLLGLYGFNSSKEERVTIRNRRRKEYERLRRQCKRLQKHNNGTLERDDGSSSRRITNATISTLNSESSDSDSSDESEVVQVFQSSATPDVNSTYPASSSIPRTEEDFVTWQRIIRLDAVRADSEWTSYSPSQAVISEDRACRAAEAVGLKDYNHLEPYKIFQAARLVAVLEAYALYDPDIGYCQGMSDLLSPILSVIPDDHEVFWCFVGFMKKARHNFRLDEVGIRRQLNIVSKIIKSKDSQLYRHLEKLQAEDCFFVYRMVVVMFRRELTLDQTLCLWEVMWADQAAIRAGMGKSAWSRIRQRAPPTDDLVLYAIAASVLQRRKRIIERYNSMDEILRECQSMAGQLDVWKLLDDAHDLVVTLHTKIEHSFS

SEQ ID NO: 86717 - DNA, 1820 bp, Arabidopsis thaliana
  misc_feature (1)..(1820): Ceres Seq. ID no. 12692882
  misc_feature (1)..(1820): Ortholog of  Ceres SEQ ID NO 15175923 as cited in SEQ ID NO 54037
  misc_feature (1)..(1820): Ortholog of  Ceres SEQ ID NO 14303366 as cited in SEQ ID NO 54418
  misc_feature (1)..(1820): Ortholog of  Ceres SEQ ID NO 13503610 as cited in SEQ ID NO 62416
  misc_feature (1)..(1820): Ortholog of  Ceres SEQ ID NO 13657610 as cited in SEQ ID NO 66165
  misc_feature (1)..(1820): Ortholog of  Ceres SEQ ID NO 13598312 as cited in SEQ ID NO 68448
  misc_feature (1)..(1820): Ortholog of  Ceres SEQ ID NO 13596100 as cited in SEQ ID NO 68573
gtcttttggtgggtcttcgtcaaagctctctcctttacggtccttttctccagcgcatgaaataataaaggacacctgtatttattaaaatcactacattttccgtaacaaaaaaaatcaaactttgttttctcaatggacggtgccggagaatcacgactcggtggtgatggtggtggtgatggttctgttggagttcagatccgacaaacacggatgctaccggattttctccagagcgtgaatctcaagtatgtgaaattaggttaccattacttaatctcaaatctcttgactctctgtttattccctctcgccgttgttatctccgtcgaagcctctcagatgaacccagatgatctcaaacagctctggatccatctacaatacaatctggttagtatcatcatctgttcagcgattctagtcttcgggttaacggtttatgttatgacccgacctagacccgtttacttggttgatttctcttgttatctcccacctgatcatctcaaagctccttacgctcggttcatggaacattctagactcaccggagatttcgatgactctgctctcgagtttcaacgcaagatccttgagcgttctggtttaggggaagacacttatgtccctgaagctatgcattatgttccaccgagaatttcaatggctgctgctagagaagaagctgaacaagtcatgtttggtgctttagataaccttttcgctaacactaatgtgaaaccaaaggatattggaatccttgttgtgaattgtagtctctttaatccaactccttcgttatctgcaatgattgtgaacaagtataagcttagaggtaacattagaagctacaatctaggcggtatgggttgcagcgcgggagttatcgctgtggatcttgctaaagacatgttgttggtacataggaacacttatgcggttgttgtttctactgagaacattactcagaattggtattttggtaacaagaaatcgatgttgataccgaactgcttgtttcgagttggtggctctgcggttttgctatcgaacaagtcgagggacaagagacggtctaagtacaggcttgtacatgtagtcaggactcaccgtggagcagatgataaagctttccgttgtgtttatcaagagcaggatgatacagggagaaccggggtttcgttgtcgaaagatctaatggcgattgcaggggaaactctcaaaaccaatatcactacattgggtcctcttgttctaccgataagtgagcagattctcttctttatgactctagttgtgaagaagctctttaacggtaaagtgaaaccgtatatcccggatttcaaacttgctttcgagcatttctgtatccatgctggtggaagagctgtgatcgatgagttagagaagaatctgcagctttcaccagttcatgtcgaggcttcgaggatgactcttcatcgatttggtaacacatcttcgagctccatttggtatgaattggcttacattgaagcgaagggaaggatgcgaagaggtaatcgtgtttggcaaatcgcgttcggaagtggatttaaatgtaatagcgcgatttgggaagcattaaggcatgtgaaaccttcgaacaacagtccttgggaagattgtattgacaagtatccggtaactttaagttattagcttcgtttgaggaactgttattgtgtaacttcgagactaatccatggttgtttttttcttagagaagaaacccttagatttgatctctgacaatgtcaatgtgtttgttgtttatgtgttttggagagtttgtg

SEQ ID NO: 86718 - protein, 516 aa, Arabidopsis thaliana
  peptide (1)..(516): Ceres Seq. ID no. 12692883
MDGAGESRLGGDGGGDGSVGVQIRQTRMLPDFLQSVNLKYVKLGYHYLISNLLTLCLFPLAVVISVEASQMNPDDLKQLWIHLQYNLVSIIICSAILVFGLTVYVMTRPRPVYLVDFSCYLPPDHLKAPYARFMEHSRLTGDFDDSALEFQRKILERSGLGEDTYVPEAMHYVPPRISMAAAREEAEQVMFGALDNLFANTNVKPKDIGILVVNCSLFNPTPSLSAMIVNKYKLRGNIRSYNLGGMGCSAGVIAVDLAKDMLLVHRNTYAVVVSTENITQNWYFGNKKSMLIPNCLFRVGGSAVLLSNKSRDKRRSKYRLVHVVRTHRGADDKAFRCVYQEQDDTGRTGVSLSKDLMAIAGETLKTNITTLGPLVLPISEQILFFMTLVVKKLFNGKVKPYIPDFKLAFEHFCIHAGGRAVIDELEKNLQLSPVHVEASRMTLHRFGNTSSSSIWYELAYIEAKGRMRRGNRVWQIAFGSGFKCNSAIWEALRHVKPSNNSPWEDCIDKYPVTLSY

SEQ ID NO: 86719 - protein, 489 aa, Arabidopsis thaliana
  peptide (1)..(489): Ceres Seq. ID no. 12692884
MLPDFLQSVNLKYVKLGYHYLISNLLTLCLFPLAVVISVEASQMNPDDLKQLWIHLQYNLVSIIICSAILVFGLTVYVMTRPRPVYLVDFSCYLPPDHLKAPYARFMEHSRLTGDFDDSALEFQRKILERSGLGEDTYVPEAMHYVPPRISMAAAREEAEQVMFGALDNLFANTNVKPKDIGILVVNCSLFNPTPSLSAMIVNKYKLRGNIRSYNLGGMGCSAGVIAVDLAKDMLLVHRNTYAVVVSTENITQNWYFGNKKSMLIPNCLFRVGGSAVLLSNKSRDKRRSKYRLVHVVRTHRGADDKAFRCVYQEQDDTGRTGVSLSKDLMAIAGETLKTNITTLGPLVLPISEQILFFMTLVVKKLFNGKVKPYIPDFKLAFEHFCIHAGGRAVIDELEKNLQLSPVHVEASRMTLHRFGNTSSSSIWYELAYIEAKGRMRRGNRVWQIAFGSGFKCNSAIWEALRHVKPSNNSPWEDCIDKYPVTLSY

SEQ ID NO: 86720 - protein, 446 aa, Arabidopsis thaliana
  peptide (1)..(446): Ceres Seq. ID no. 12692885
MNPDDLKQLWIHLQYNLVSIIICSAILVFGLTVYVMTRPRPVYLVDFSCYLPPDHLKAPYARFMEHSRLTGDFDDSALEFQRKILERSGLGEDTYVPEAMHYVPPRISMAAAREEAEQVMFGALDNLFANTNVKPKDIGILVVNCSLFNPTPSLSAMIVNKYKLRGNIRSYNLGGMGCSAGVIAVDLAKDMLLVHRNTYAVVVSTENITQNWYFGNKKSMLIPNCLFRVGGSAVLLSNKSRDKRRSKYRLVHVVRTHRGADDKAFRCVYQEQDDTGRTGVSLSKDLMAIAGETLKTNITTLGPLVLPISEQILFFMTLVVKKLFNGKVKPYIPDFKLAFEHFCIHAGGRAVIDELEKNLQLSPVHVEASRMTLHRFGNTSSSSIWYELAYIEAKGRMRRGNRVWQIAFGSGFKCNSAIWEALRHVKPSNNSPWEDCIDKYPVTLSY

SEQ ID NO: 86721 - DNA, 2904 bp, Arabidopsis thaliana
  misc_feature (1)..(2904): Ceres Seq. ID no. 12693016
  misc_feature (1)..(2904): Ortholog of  Ceres SEQ ID NO 13593955 as cited in SEQ ID NO 54278
  misc_feature (1)..(2904): Ortholog of  Ceres SEQ ID NO 13597380 as cited in SEQ ID NO 64054
atgcaacagggagattacaattcgtactatcaccaccaatactctcaatttcaaaatcctactccgaatcctaatcctaatcccaatccttctccgccggcgccggcaaccgtagctggtccgaccgatcttactcgaaacacgtacgcatcagcgccaccgttcaccggcggttacggttccgccgattactctaactattcacagaattacactccttacgggcaaaactctgagcatgtccctccttcagctccttccttcacttcaccatcacaacctcctccttctccgccggcgacatcactaaaccctaattcttattcaaccttcaaccaaccaccacctccacccacgattcatccacaacctctatcctcttatggatcatttgattctactgctccgtatcagcaacctacctcgcaacatatgtattactcaccgtatgatcagcatcaaacctctggctattcatctgcgcctcctccttcatctgcgcctgcgccgaatcctaatcccgcgccttattcatcatccttgtactctgcacctccttatagtagcggaggatcatccatacctccttcgtatgagaaaccgtcagtgaaatttgatcaatctggttatgacggttataaccggagcagatcggatttaggatctgatctatacggaaaacgatctgatagcggagaatatcctgcttttgaagattcctatggcgatggcgtttatgcttatcaaggaggcaaagttgagccatacggttctcgtggaactgcgccgaaatcatcgaattcaacattgttcgatgattatggacgatccattagcttttcttcttcagggagagattcttctgttagctcgaattctgctaagatcgtgagagctgttcctaaggctgatgtgcaggaagattccactggtggtgtgcagaaatttcgtgtcaaattgttggctgagacttatggacaaaccacaacagatgttctttgtcagattggtttggatggtcttcgtatgcttgatccaagtactagccgaactttgagaatatatcctcttgagaacatcacaagatgcgaaaaactagattcgtctattctggctttctggtctaagactccggtagacattgaagctaaacgtatcagattgcaatcaaatagttacaccaccaacacccttctggacactgtgacggctgcaatgtttcaggccaaggagatcgggggaagtagcaggcctcccacctctggaaaactgattgaacaaactgctgagaagaaaaaaggattgggtgattggatgaacattataaagcctgttaatgaggagaaagatcattgggtacctgatgaagctgtttctaagtgcacatcatgtggttcagatttcggtgcatttatacgaaggcaccactgcaggaattgtggtgacgtcttctgtgacaagtgtactcaaggcaggattgctctcactgctgaggataatgctcctcaagtccgtgtttgtgaccggtgcatggcagaagtgtcacaaaggttgagtaatgccaaggaaaccactggcaggaatgtgagcctgcagagccatgaagaccttgctagaaagttacaggaggaaatggagagaaaccgcaagtcttcgtctggtttgagggaaggatctgggaggcggatgaaagaagtagcttgtccaacatgcactgtgcacttacaggtccaggttccagtctcaggatcagagaccattgagtgcggagtttgccaaaaccctttcctcgtccaaacacttgaaacgttatgttatactgcgcctggaaccgaaacagagcggtttcaagttgacctggtcttcttccatgcaaaccgcttacagcgagttccaaatccagggccttccccggcaccagagcctaagccatgtccgagtccagggccaaaccccgcaccagcgacaactaagaggacacataacactacgtttccggcgatcttcgcctttggggattcgatcttagacacaggaaataacgattatattttgaccttgatcaaagctaattttcttccatatggcatgaattttccagataaagttcccaccggcagattttgcaacggcaaaatcccttcggactttatcgcggattatataggagtaaaaccagttgtaccggcatatttgagaccgggactgacccaggaagatttgctcactggtgtatcctttgcttcgggtggttctggctatgatcctttgacaccaatcgtagtaagtgcgataccgatgtcaaaacaattgacatactttcaagaatacatagagaaagtgaaaggctttgtgggaaaagagaaagccgagcacataatatccaaaggcctagccattgtggtagcgggcagcgacgatctggccaatacctactatggtgaacacttagaggaattcttgtatgacatagatacatatacctcttttatggctagctctgctgcaagttttgctatgagaaccacaagaggaggacttaaaagaaaatgtgctgatgaactcaactttgcagctcagctttttaattccaaactctccacaagtttgaacgaattggctaaaaccatgaaaaataccacattggtgtatattgacatctactcttctttcaatgatatgattcaaaaccccaaaaaatatggatttgatgagattgatagaggatgttgcgggacggggctactcgaattaggtccgctttgcaacaaatatacatcacttctttgcaagaatgtgtcttcttttatgttttgggactcttaccatccaacggaaagagcttataaaatcttaagccaaaagtttgtagagaatgacatgggccctttctatgacaattaa

SEQ ID NO: 86722 - protein, 967 aa, Arabidopsis thaliana
  peptide (1)..(967): Ceres Seq. ID no. 12693017
MQQGDYNSYYHHQYSQFQNPTPNPNPNPNPSPPAPATVAGPTDLTRNTYASAPPFTGGYGSADYSNYSQNYTPYGQNSEHVPPSAPSFTSPSQPPPSPPATSLNPNSYSTFNQPPPPPTIHPQPLSSYGSFDSTAPYQQPTSQHMYYSPYDQHQTSGYSSAPPPSSAPAPNPNPAPYSSSLYSAPPYSSGGSSIPPSYEKPSVKFDQSGYDGYNRSRSDLGSDLYGKRSDSGEYPAFEDSYGDGVYAYQGGKVEPYGSRGTAPKSSNSTLFDDYGRSISFSSSGRDSSVSSNSAKIVRAVPKADVQEDSTGGVQKFRVKLLAETYGQTTTDVLCQIGLDGLRMLDPSTSRTLRIYPLENITRCEKLDSSILAFWSKTPVDIEAKRIRLQSNSYTTNTLLDTVTAAMFQAKEIGGSSRPPTSGKLIEQTAEKKKGLGDWMNIIKPVNEEKDHWVPDEAVSKCTSCGSDFGAFIRRHHCRNCGDVFCDKCTQGRIALTAEDNAPQVRVCDRCMAEVSQRLSNAKETTGRNVSLQSHEDLARKLQEEMERNRKSSSGLREGSGRRMKEVACPTCTVHLQVQVPVSGSETIECGVCQNPFLVQTLETLCYTAPGTETERFQVDLVFFHANRLQRVPNPGPSPAPEPKPCPSPGPNPAPATTKRTHNTTFPAIFAFGDSILDTGNNDYILTLIKANFLPYGMNFPDKVPTGRFCNGKIPSDFIADYIGVKPVVPAYLRPGLTQEDLLTGVSFASGGSGYDPLTPIVVSAIPMSKQLTYFQEYIEKVKGFVGKEKAEHIISKGLAIVVAGSDDLANTYYGEHLEEFLYDIDTYTSFMASSAASFAMRTTRGGLKRKCADELNFAAQLFNSKLSTSLNELAKTMKNTTLVYIDIYSSFNDMIQNPKKYGFDEIDRGCCGTGLLELGPLCNKYTSLLCKNVSSFMFWDSYHPTERAYKILSQKFVENDMGPFYDN

SEQ ID NO: 86723 - protein, 823 aa, Arabidopsis thaliana
  peptide (1)..(823): Ceres Seq. ID no. 12693018
MYYSPYDQHQTSGYSSAPPPSSAPAPNPNPAPYSSSLYSAPPYSSGGSSIPPSYEKPSVKFDQSGYDGYNRSRSDLGSDLYGKRSDSGEYPAFEDSYGDGVYAYQGGKVEPYGSRGTAPKSSNSTLFDDYGRSISFSSSGRDSSVSSNSAKIVRAVPKADVQEDSTGGVQKFRVKLLAETYGQTTTDVLCQIGLDGLRMLDPSTSRTLRIYPLENITRCEKLDSSILAFWSKTPVDIEAKRIRLQSNSYTTNTLLDTVTAAMFQAKEIGGSSRPPTSGKLIEQTAEKKKGLGDWMNIIKPVNEEKDHWVPDEAVSKCTSCGSDFGAFIRRHHCRNCGDVFCDKCTQGRIALTAEDNAPQVRVCDRCMAEVSQRLSNAKETTGRNVSLQSHEDLARKLQEEMERNRKSSSGLREGSGRRMKEVACPTCTVHLQVQVPVSGSETIECGVCQNPFLVQTLETLCYTAPGTETERFQVDLVFFHANRLQRVPNPGPSPAPEPKPCPSPGPNPAPATTKRTHNTTFPAIFAFGDSILDTGNNDYILTLIKANFLPYGMNFPDKVPTGRFCNGKIPSDFIADYIGVKPVVPAYLRPGLTQEDLLTGVSFASGGSGYDPLTPIVVSAIPMSKQLTYFQEYIEKVKGFVGKEKAEHIISKGLAIVVAGSDDLANTYYGEHLEEFLYDIDTYTSFMASSAASFAMRTTRGGLKRKCADELNFAAQLFNSKLSTSLNELAKTMKNTTLVYIDIYSSFNDMIQNPKKYGFDEIDRGCCGTGLLELGPLCNKYTSLLCKNVSSFMFWDSYHPTERAYKILSQKFVENDMGPFYDN

SEQ ID NO: 86724 - protein, 625 aa, Arabidopsis thaliana
  peptide (1)..(625): Ceres Seq. ID no. 12693019
MLDPSTSRTLRIYPLENITRCEKLDSSILAFWSKTPVDIEAKRIRLQSNSYTTNTLLDTVTAAMFQAKEIGGSSRPPTSGKLIEQTAEKKKGLGDWMNIIKPVNEEKDHWVPDEAVSKCTSCGSDFGAFIRRHHCRNCGDVFCDKCTQGRIALTAEDNAPQVRVCDRCMAEVSQRLSNAKETTGRNVSLQSHEDLARKLQEEMERNRKSSSGLREGSGRRMKEVACPTCTVHLQVQVPVSGSETIECGVCQNPFLVQTLETLCYTAPGTETERFQVDLVFFHANRLQRVPNPGPSPAPEPKPCPSPGPNPAPATTKRTHNTTFPAIFAFGDSILDTGNNDYILTLIKANFLPYGMNFPDKVPTGRFCNGKIPSDFIADYIGVKPVVPAYLRPGLTQEDLLTGVSFASGGSGYDPLTPIVVSAIPMSKQLTYFQEYIEKVKGFVGKEKAEHIISKGLAIVVAGSDDLANTYYGEHLEEFLYDIDTYTSFMASSAASFAMRTTRGGLKRKCADELNFAAQLFNSKLSTSLNELAKTMKNTTLVYIDIYSSFNDMIQNPKKYGFDEIDRGCCGTGLLELGPLCNKYTSLLCKNVSSFMFWDSYHPTERAYKILSQKFVENDMGPFYDN

SEQ ID NO: 86725 - DNA, 492 bp, Arabidopsis thaliana
  misc_feature (1)..(492): Ceres Seq. ID no. 12693024
  misc_feature (1)..(492): Ortholog of  Ceres SEQ ID NO 15168904 as cited in SEQ ID NO 20611
  misc_feature (1)..(492): Ortholog of  Ceres SEQ ID NO 15172900 as cited in SEQ ID NO 51859
atggcagaaacgaagaagatgatcatccttaagagctccgacggtgaatccttcgagatcgaggaagccgtcgctgttaagtcccagacgattaagcacatgattgaggacgactgtgccgataacggaattccacttcccaatgtcaccggagccatcctcgccaaggttattgagtattgcaagaagcacgttgaagccgctgctgaagctggtggagacaaggatttctatggttccgctgagaacgacgagcttaagaattgggacagcgaattcgtcaaagtcgatcagcctactctcttcgatctcatcttggctgcgaactatttgaacatcggtggacttcttgaccttacgtgcaaggccgtggctgatcagatgagaggcaaaactccagagcagatgcgtgcacacttcaacatcaagaacgattacacacctgaggaagaggcggaggttcgcaatgagaacaagtgggcgttcgagtga

SEQ ID NO: 86726 - protein, 163 aa, Arabidopsis thaliana; identical to SEQ ID NO: 37296
  peptide (1)..(163): Ceres Seq. ID no. 12693025

SEQ ID NO: 86727 - protein, 157 aa, Arabidopsis thaliana; identical to SEQ ID NO: 37297
  peptide (1)..(157): Ceres Seq. ID no. 12693026

SEQ ID NO: 86728 - protein, 130 aa, Arabidopsis thaliana
  peptide (1)..(130): Ceres Seq. ID no. 12693027
MIEDDCADNGIPLPNVTGAILAKVIEYCKKHVEAAAEAGGDKDFYGSAENDELKNWDSEFVKVDQPTLFDLILAANYLNIGGLLDLTCKAVADQMRGKTPEQMRAHFNIKNDYTPEEEAEVRNENKWAFE

SEQ ID NO: 86729 - DNA, 2319 bp, Arabidopsis thaliana
  misc_feature (1)..(2319): Ceres Seq. ID no. 12693032
  misc_feature (1)..(2319): Ortholog of  Ceres SEQ ID NO 12586556 as cited in SEQ ID NO 64667
  misc_feature (1)..(2319): Ortholog of  Ceres SEQ ID NO 13660894 as cited in SEQ ID NO 67475
atgacaaaacaagttcttccactgatagagaaaattcctcaatcgatcgttggattcttagaatcttcatcatatcattggtcttcttcgttgtcgaagacaacacaagctcatgctcgtatactcaaatccggagctcaaaacgatggctatatctccgctaaactcattgcttcatactcgaactataattgtttcaacgatgctgatctcgtcttgcaatcgattccggatcctactatttactctttctcttctcttatatacgctttaacaaaggctaagctttttacgcaatcgattggtgtgttttctcggatgttctctcatgggttgattccagatagtcatgttcttccgaatttgttcaaggtttgtgctgaattatcggcttttaaagtgggtaaacagatacattgtgtgtcgtgtgtttccgggttggatatggatgcgtttgttcaggggtctatgtttcatatgtacatgaggtgtggtaggatgggtgatgcacgcaaagtgttcgatagaatgtctgacaaagatgttgtcacttgcagtgctttgctttgtgcctatgcgcgaaagggttgcttagaagaggtggttcgtatcctctctgagatggaaagttcaggtattgaggcgaatattgtgtcttggaatggtattcttagtgggtttaatcggagtgggtatcacaaggaagcagtggtgatgttccagaagattcaccatttggggttttgtcctgatcaagttacagtttcaagtgttcttccttcagttggagattcagagatgctgaatatggggaggctgattcatggatatgtgattaaacagggtttgcttaaggataaatgtgtcattagtgcaatgattgatatgtatgggaaatctgggcatgtttatggaatcataagtcttttcaatcaatttgagatgatggaggcaggggtttgcaatgcctacattacagggctatcgcgaaatggtcttgttgacaaggcacttgaaatgtttgagctattcaaggagcaaacgatggagcttaatgttgtgtcatggacttcaatcatagctgggtgtgctcagaacgggaaagatatcgaagctttggaattgttcagagaaatgcaggttgcaggggtgaagccaaaccatgtaacaatcccttcaatgcttccagcttgcggaaatatagcagctttgggtcatgggagatccactcatggatttgcagtaagggtccaccttttggataatgttcatgtagggagtgctctgattgacatgtatgccaaatgtggaagaatcaacttgtctcagattgtctttaatatgatgcctacaaaaaacttagtctgctggaactctttaatgaatggattttcgatgcatgggaaggccaaggaagtcatgagcatatttgaatctcttatgagaaccaggttgaaacccgatttcatcagctttaccagtttattatcagcatgtggccaagtaggtttaacagatgaagggtggaaatatttcaaaatgatgtcagaggaatatgggataaaaccgaggttggaacactattcttgcatggtaaaccttcttggacgcgcaggcaagttgcaagaagcatatgatctgataaaagagatgccttttgagccagactcctgcgtctggggagctttgttaaattcttgcaggcttcaaaacaatgtagatttagctgaaatcgcagcagaaaagcttttccatttagaacccgaaaacccagggacttacgttctcttgtccaatatatatgccgctaaaggcatgtggacagaagtagacagtattagaaacaagatggagagtctgggactgaagaagaacccgggatgcagctggattcaagtgaagaacagagtgtacacgcttctggctggtgacaagtcgcatccgcagatagatcaaataacagagaagatggatgagattagcaaagagatgaggaaatcaggtcaccgcccaaatttagattttgctctgcatgatgtggaggagcaagagcaagagcagatgttatggggacacagtgagaaactagcagtagttttcggtcttcttaacacaccagacggcacacctcttcaggtagagagattttcattagagatacaaataggtttcatcattttaaagacggaatttgttcctgtggagatttctggtgatactaagagtaagagatacatgtctcatattcttttatctacactagtgtttcaggttcgtttaaaaagctcatctaaagcttataaatgggaattgaattga

SEQ ID NO: 86730 - protein, 772 aa, Arabidopsis thaliana
  peptide (1)..(772): Ceres Seq. ID no. 12693033
MTKQVLPLIEKIPQSIVGFLESSSYHWSSSLSKTTQAHARILKSGAQNDGYISAKLIASYSNYNCFNDADLVLQSIPDPTIYSFSSLIYALTKAKLFTQSIGVFSRMFSHGLIPDSHVLPNLFKVCAELSAFKVGKQIHCVSCVSGLDMDAFVQGSMFHMYMRCGRMGDARKVFDRMSDKDVVTCSALLCAYARKGCLEEVVRILSEMESSGIEANIVSWNGILSGFNRSGYHKEAVVMFQKIHHLGFCPDQVTVSSVLPSVGDSEMLNMGRLIHGYVIKQGLLKDKCVISAMIDMYGKSGHVYGIISLFNQFEMMEAGVCNAYITGLSRNGLVDKALEMFELFKEQTMELNVVSWTSIIAGCAQNGKDIEALELFREMQVAGVKPNHVTIPSMLPACGNIAALGHGRSTHGFAVRVHLLDNVHVGSALIDMYAKCGRINLSQIVFNMMPTKNLVCWNSLMNGFSMHGKAKEVMSIFESLMRTRLKPDFISFTSLLSACGQVGLTDEGWKYFKMMSEEYGIKPRLEHYSCMVNLLGRAGKLQEAYDLIKEMPFEPDSCVWGALLNSCRLQNNVDLAEIAAEKLFHLEPENPGTYVLLSNIYAAKGMWTEVDSIRNKMESLGLKKNPGCSWIQVKNRVYTLLAGDKSHPQIDQITEKMDEISKEMRKSGHRPNLDFALHDVEEQEQEQMLWGHSEKLAVVFGLLNTPDGTPLQVERFSLEIQIGFIILKTEFVPVEISGDTKSKRYMSHILLSTLVFQVRLKSSSKAYKWELN

SEQ ID NO: 86731 - protein, 666 aa, Arabidopsis thaliana
  peptide (1)..(666): Ceres Seq. ID no. 12693034
MFSHGLIPDSHVLPNLFKVCAELSAFKVGKQIHCVSCVSGLDMDAFVQGSMFHMYMRCGRMGDARKVFDRMSDKDVVTCSALLCAYARKGCLEEVVRILSEMESSGIEANIVSWNGILSGFNRSGYHKEAVVMFQKIHHLGFCPDQVTVSSVLPSVGDSEMLNMGRLIHGYVIKQGLLKDKCVISAMIDMYGKSGHVYGIISLFNQFEMMEAGVCNAYITGLSRNGLVDKALEMFELFKEQTMELNVVSWTSIIAGCAQNGKDIEALELFREMQVAGVKPNHVTIPSMLPACGNIAALGHGRSTHGFAVRVHLLDNVHVGSALIDMYAKCGRINLSQIVFNMMPTKNLVCWNSLMNGFSMHGKAKEVMSIFESLMRTRLKPDFISFTSLLSACGQVGLTDEGWKYFKMMSEEYGIKPRLEHYSCMVNLLGRAGKLQEAYDLIKEMPFEPDSCVWGALLNSCRLQNNVDLAEIAAEKLFHLEPENPGTYVLLSNIYAAKGMWTEVDSIRNKMESLGLKKNPGCSWIQVKNRVYTLLAGDKSHPQIDQITEKMDEISKEMRKSGHRPNLDFALHDVEEQEQEQMLWGHSEKLAVVFGLLNTPDGTPLQVERFSLEIQIGFIILKTEFVPVEISGDTKSKRYMSHILLSTLVFQVRLKSSSKAYKWELN

SEQ ID NO: 86732 - protein, 624 aa, Arabidopsis thaliana
  peptide (1)..(624): Ceres Seq. ID no. 12693035
MDAFVQGSMFHMYMRCGRMGDARKVFDRMSDKDVVTCSALLCAYARKGCLEEVVRILSEMESSGIEANIVSWNGILSGFNRSGYHKEAVVMFQKIHHLGFCPDQVTVSSVLPSVGDSEMLNMGRLIHGYVIKQGLLKDKCVISAMIDMYGKSGHVYGIISLFNQFEMMEAGVCNAYITGLSRNGLVDKALEMFELFKEQTMELNVVSWTSIIAGCAQNGKDIEALELFREMQVAGVKPNHVTIPSMLPACGNIAALGHGRSTHGFAVRVHLLDNVHVGSALIDMYAKCGRINLSQIVFNMMPTKNLVCWNSLMNGFSMHGKAKEVMSIFESLMRTRLKPDFISFTSLLSACGQVGLTDEGWKYFKMMSEEYGIKPRLEHYSCMVNLLGRAGKLQEAYDLIKEMPFEPDSCVWGALLNSCRLQNNVDLAEIAAEKLFHLEPENPGTYVLLSNIYAAKGMWTEVDSIRNKMESLGLKKNPGCSWIQVKNRVYTLLAGDKSHPQIDQITEKMDEISKEMRKSGHRPNLDFALHDVEEQEQEQMLWGHSEKLAVVFGLLNTPDGTPLQVERFSLEIQIGFIILKTEFVPVEISGDTKSKRYMSHILLSTLVFQVRLKSSSKAYKWELN

SEQ ID NO: 86733 - DNA, 1437 bp, Arabidopsis thaliana
  misc_feature (1)..(1437): Ceres Seq. ID no. 12693047
  misc_feature (1)..(1437): Ortholog of  Ceres SEQ ID NO 14302343 as cited in SEQ ID NO 67343
atggtggagactagtatcgacatggaggaaggaactctcgagatcggaatggagtatagaactgtctccggagttgctggacctttggtcatccttgacaaagtgaagggtccaaagtaccaggagattgttaatattcgcttaggagatggatcaacgagacgtggtcaggtcttggaggttgatggggagaaagctgttgtccaggtttttgaaggaacatctgggattgacaacaagtttaccaccgtgcaattcacaggagaggtactgaaaacgcctgtgtcattggacatgcttggccgcatatttaacggctcgggaaagccaattgataatggccctcctattttgccagaggcataccttgatatttctggaagttcaatcaaccccagtgaaagaacctaccctgaagagatgatacaaacggggatttctaccattgatgtcatgaactccattgctcgtggacagaagattcctcttttctctgctgctggtctacctcataatgagattgctgctcaaatttgtcgtcaggctggacttgtgaagcggttggaaaagactgagaacttaattcaggaggatcatggagaggacaattttgcaattgtttttgcagctatgggtgtaaacatggagacagctcagtttttcaagcgtgattttgaagaaaatggatcgatggaaagggttacccttttcctgaacttggccaatgatccaaccattgagagaattatcactcctcgaattgccctaacaaccgctgaatatttggcttatgaatgtggaaagcatgtgcttgttatattgacagacatgagttcttatgcagatgctcttcgtgaggtttctgctgctcgagaagaagttcctggaagacatcttgcaactatttatgaacgcgcgggacgtattgaaggaagaaagggttccattacccaaatccctatcctgactatgcccaatgacgatatcactcaccctactccggatcttactggttacattactgagggtcagatatatattgataggcaacttcacaacagacagatatacccacccattaacgtgcttccatcactttctcggctgatgaagagtgctattggtgaaggaatgactcgcaaagaccattctgatgtgtccaaccagctatacgcaaattatgcaatcggaaaagatgttcaagccatgaaagctgttgttggagaagaagctctgtcttccgaggatctgctgtatttagagtttctggataaatttgaaaggaagtttgtgatgcaaggcgcatacgatacaaggaacatcttccagtcgcttgacttggcatggacactgctccgtatcttcccacgtgagcttcttcaccgtattcctgccaaaacacttgatcaattctacagccgcgactccacaagctaa

SEQ ID NO: 86734 - protein, 478 aa, Arabidopsis thaliana
  peptide (1)..(478): Ceres Seq. ID no. 12693048
MVETSIDMEEGTLEIGMEYRTVSGVAGPLVILDKVKGPKYQEIVNIRLGDGSTRRGQVLEVDGEKAVVQVFEGTSGIDNKFTTVQFTGEVLKTPVSLDMLGRIFNGSGKPIDNGPPILPEAYLDISGSSINPSERTYPEEMIQTGISTIDVMNSIARGQKIPLFSAAGLPHNEIAAQICRQAGLVKRLEKTENLIQEDHGEDNFAIVFAAMGVNMETAQFFKRDFEENGSMERVTLFLNLANDPTIERIITPRIALTTAEYLAYECGKHVLVILTDMSSYADALREVSAAREEVPGRHLATIYERAGRIEGRKGSITQIPILTMPNDDITHPTPDLTGYITEGQIYIDRQLHNRQIYPPINVLPSLSRLMKSAIGEGMTRKDHSDVSNQLYANYAIGKDVQAMKAVVGEEALSSEDLLYLEFLDKFERKFVMQGAYDTRNIFQSLDLAWTLLRIFPRELLHRIPAKTLDQFYSRDSTS

SEQ ID NO: 86735 - protein, 471 aa, Arabidopsis thaliana
  peptide (1)..(471): Ceres Seq. ID no. 12693049
MEEGTLEIGMEYRTVSGVAGPLVILDKVKGPKYQEIVNIRLGDGSTRRGQVLEVDGEKAVVQVFEGTSGIDNKFTTVQFTGEVLKTPVSLDMLGRIFNGSGKPIDNGPPILPEAYLDISGSSINPSERTYPEEMIQTGISTIDVMNSIARGQKIPLFSAAGLPHNEIAAQICRQAGLVKRLEKTENLIQEDHGEDNFAIVFAAMGVNMETAQFFKRDFEENGSMERVTLFLNLANDPTIERIITPRIALTTAEYLAYECGKHVLVILTDMSSYADALREVSAAREEVPGRHLATIYERAGRIEGRKGSITQIPILTMPNDDITHPTPDLTGYITEGQIYIDRQLHNRQIYPPINVLPSLSRLMKSAIGEGMTRKDHSDVSNQLYANYAIGKDVQAMKAVVGEEALSSEDLLYLEFLDKFERKFVMQGAYDTRNIFQSLDLAWTLLRIFPRELLHRIPAKTLDQFYSRDSTS

SEQ ID NO: 86736 - protein, 462 aa, Arabidopsis thaliana
  peptide (1)..(462): Ceres Seq. ID no. 12693050
MEYRTVSGVAGPLVILDKVKGPKYQEIVNIRLGDGSTRRGQVLEVDGEKAVVQVFEGTSGIDNKFTTVQFTGEVLKTPVSLDMLGRIFNGSGKPIDNGPPILPEAYLDISGSSINPSERTYPEEMIQTGISTIDVMNSIARGQKIPLFSAAGLPHNEIAAQICRQAGLVKRLEKTENLIQEDHGEDNFAIVFAAMGVNMETAQFFKRDFEENGSMERVTLFLNLANDPTIERIITPRIALTTAEYLAYECGKHVLVILTDMSSYADALREVSAAREEVPGRHLATIYERAGRIEGRKGSITQIPILTMPNDDITHPTPDLTGYITEGQIYIDRQLHNRQIYPPINVLPSLSRLMKSAIGEGMTRKDHSDVSNQLYANYAIGKDVQAMKAVVGEEALSSEDLLYLEFLDKFERKFVMQGAYDTRNIFQSLDLAWTLLRIFPRELLHRIPAKTLDQFYSRDSTS

SEQ ID NO: 86737 - DNA, 5517 bp, Arabidopsis thaliana
  misc_feature (1)..(5517): Ceres Seq. ID no. 12693066
  misc_feature (1)..(5517): Ortholog of  Ceres SEQ ID NO 14310053 as cited in SEQ ID NO 221
  misc_feature (1)..(5517): Ortholog of  Ceres SEQ ID NO 13623325 as cited in SEQ ID NO 357
  misc_feature (1)..(5517): Ortholog of  Ceres SEQ ID NO 13635680 as cited in SEQ ID NO 578
  misc_feature (1)..(5517): Ortholog of  Ceres SEQ ID NO 13624195 as cited in SEQ ID NO 1018
atgacaacaggcggaccttcaggagcgctcgacgcaaacgcctccagctcgggaggtagggcagcggcaccagccccaggacggatccacatctcaacatccatcccggctccatcactcccatctaccccggaaggacaaatggcaggggccaacgtagaaacccccccgctgccgggttccagctcgcaaactcccctagccgagcagaacccgccagttcgtcggaatacggaccaggaggaacgacgcgttactgacggaacctatgtcgggcccggaggactactccagaacatcctcgaccacttaagtcgacaggaggccagaacggaagcacgattcgccaccctagccgctgcacaagcacattcgatggacgaaatcaatcgtctacaaaccagccgaacttcagtccataggccagtgtttgaaagcatcgagcatcgtcctcaagtccgtatcgccggtcccaccaacgatgtcgcaagagacgcagaagtcgccgacctcagacgcactatatctgaaatgagctccaagatccaccgcgcaacaagcacggcgcccgagctcgaccgcgttctggaggagactcagcaaaccccctttactcgacgaataactaacgtctcgatcagaggagcccaaaaaatcaagctggaaagttacaacggtagaaacgacccgaaagagttcctaacatcgttcaacgtcgccataaaccgggccgagctcacgatcgacaactttgatgccgggaggtgtcaaatattcatcgaacatctgaccggaccagctcacaactggttttcacgtctaaaacccaattccatcgacagcttccatcagctcacctcgtccttcctcaaacattacgcgcctctaattgaaaatcaaacatcgaacgccgacctatggtccatctctcagggagctaaagaatcacttcgatctttcgttgatcgtttcaaactggtagtcacaaatatcactgtgcccgacgaagctgcaatagttgcgctacgaaatgcagtatggtacgactccagattccgggatgacataacattacacgctccgagcaccctagaggacgccctgcatcgggcatccaggttcatcgaacttgaagaggagaagctcattctggcaagaaaacacaactcgaccaaaacccccgcatgtaaagacgcagtggttattaaggtcggacctgacgactcaaacgagccgcgacagcacctcgatcgcaatcccagtgcgggccgaaaaccaacttcattcttagtaagcaccgaaactcccgacgctaaaccttggaacaaatatattcgcgacgccgattccccagcagcagggccgatgtactgcgaataccacaaaagcagagcgcattcgaccgagaattgccgtttcctgcagggcctcctgatggccaagtataagagcggcggaataacaatcgaatgcgaccgacccccgataaataacaaaaatcaacgacgtaacgaaactacggcccgacaatatttgaacgatcaaaccaaaccaccgaccccagcagaacaagggataattacctcggctgacgatccggcagccaaaagacagcgaaacggaaaggctatcgccgcggaaccagtcgtggttagacaagttcacgtgataatggggggactccagaattgcagcgattcagtgcgctcaattaagcaataccgaaagaaagccgagatggtggtagcttggccctcatccacaagcacgacaagaaatccgaaccaaagcgctccgatctcattcaccgacgtcgacctagaaggtttggataccccgcacaacgacccgctcgttgtcgagttgatcataagcgatagcagagtaacaagggttctgattgacaccgggagctcggtagacttgattttcaaagatgttttaaccgcgatgaacataacggatcgtcagattaagccagtctcaaaacctctcgccggtttcgatggagatttcgtcatgacaataggcacgattaaactaccaatctttgtcggaggattaatcgcctgggtgaagttcgtcgtgattggcaaaccagcggtctacaacgttatcctcggcaccccctggattcaccaaatgcaagccatcccgtccacttatcatcagtgcgttaagttcccaacgcacaacggcatcttcactctccgagcgccgaaggaagccaagaccccgagtaggtcttacgaggagtccgagttgtgccgcaccgagatggtaaacatagatgagtccgacccgacaaggtgcgttggtgttggggcagagatttcaccatcaattcggctcgaactcattgcactacttaaacgaaattccaaaaccttcgcatggagcatcgaagatatgaagggaatcgacccggcaatcaccgcacacgaacttaacgtagatccaactttcaagccggtaaaacagaaacgaaggaaactcggcccggagcgtgcacgagcagtaaatgaagaggtggaaaaactccttaaggcggggcaaatcatcgaggtgaaataccctgaatggctagcaaatcccgtcgtcgtcaaaaagaagaacggaaagtggcgcgtctgtgtcgattataccgacctcaacaaagcctgcccaaaggatagttatccactaccgcacatcgaccggctcgtcgaagcaacttcagggaatggtctcctctccttcatggacgctttctcaggctacaaccagatcctgatgcacaaggacgatcaagaaaagacatcattcgttaccgaccgcggcacgtattgttacaaggtgatgtccttcgggcttaaaaacgccggggcaacataccagcggttcgtcaataaaatgttagccgaccagatcgggagaaccgtcgaggtgtacatcgacgacatgctcgtaaagtcattgaagcccgaagaccatgtcgagcatctgagcaaatgcttcgacgtcctcaatacatacggaatgaagctaaatccaaccaagtgcaccttcggagtaacatcgggagagtttcttgggtatgtcgtcactaaaagaggaatagaagcaaacccaaaacaaattcgcgctatcctcgaactaccatcaccgcggaacgcccgagaagtgcaaaggctcacaggacgaattgccgccctcaatcgattcatctcacgatcaacggacaagtgcctaccattctacaacctgctcaagcgccgggcccaattcgattgggataaggatagcgaggaagctttcgaaaagctaaaggactacctttccacaccaccgatcctggtaaagcccgaagtcggcgaaactttgtatctctatatcgcagtatcggatcacgcagtaagtagcgtactagtacgagaagaccgaggcgagcaaaggccgatcttctatacgagcaaatcactagtcgaagccgaaacacgatacccggtaatagaaaaagccgcgctggcagtcgtcacgtcggcacgaaaactgcgaccatacttccaatcacatacaatagccgtcctgaccgatcaacctctaagagtcgccctacacagcccaagtcagtcaggacggatgacaaagtgggctgtggagttaagcgaatacgacatcgattttcgaccacgccccgcaatgaaatcacaggtcctggctgacttcctcatcgaactaccgttacagtcagcagaacgtgcggtcagtggaaaccgcggtgaagagtggagtctgtacgtggacggttcatcttcagctcgcggatcggggataggaattcgcctcgtctccccaaccgccgaggtgctagaacagtcctttcgtctccgattcgtcgcaacaaacaacgtggccgagtacgaggtcctaattgccgggctccgcctcgccgcggggatgcagataaccacgatccacgcattcaccgactcgcaactcatcgccgggcagctcagtggggagtacgaagcaaagaacgagaaaatggacgcctatctcaagatcgtccaactgatgacgaaagatttcgaaaactttaaactctcaaaaattccccgaggtgacaacgcaccggcagatgcgctcgccgccttagcgttaacttccgactccgacttgcgacgaatcatcccggtggaaagtattgataaaccaagtatcgattcgaccgacgccgtggaaatcgtaaataccatccgaagctcgaacgcccccgacccagcggatccgaccgattggcgagtagaaattcgcgattacctctccgatggaacattgccaagtgataagtggacagcgcggcgtctacgaatcaaagcggccaagtataccctcatgaaggagcatctccttaaggtcagcgcgttcggagcaatgctgaactgcctccacggaaccgagatcaatgaaataatgaaggaaactcacgaaggagcagccggaaaccactccggaggacgagctctcgcacttaagctcaaaaagttaggattttactggccaacaatgatttctgactgcaagaccttcacggccaagtgtgaacaatgtcaaagacacgcgcccaccatccatcaacccacggaactgctacgagccggagtcgcaccatacccctttatgcgatgggcaatggacatcgtcggcccgatgcctgcttcacgacagaaacggttcatccttgtaatgaccgattacttcacgaagtgggtcgaagccgaatcatacgcgacgatccgagccaatgatgtccaaaactttgtctggaaattcatcatctgccggcacggtctcccttatgaaatcataaccgataacggttcgcagttcatctcgctgtctttcgaaaatttctgcgccagctggaaaatacgactcaataagtccacgccacggtacccacaggggaatggccaggccgaggccacaaacaagacaattctctccggtctgaagaaaagactagacgaaaagaaaggagcttgggcagacgagctggatggtgtcctatggtcctaccgaacgacgccccgaagtgcaacggatcaaactccattcgcacacgcatacggaatggaggccatggcccctgccgaggtaggatactccagtcttcgaagatccatgatggtgaaaaaccccgaactcaacgacagaatgatgctcgatcgactcgacgacctggaagaaatacggaacgccgccctctgccgcattcagaactaccaactcgccgccgccaaacactataaccaaaaggtccacaatcgccacttcgacgtcggagatctcgttctccggaaagttttcgaaaatacagccgagatcaacgccggcaaactgggagcgaactgggaaggatcataccaagtatcgaaaatcgtccgacccggagactacgaactcctaacaatgagcggcaccgcggtgcctcgcacctggaactcaatgcacctgaagagatactattactaa

SEQ ID NO: 86738 - protein, 1838 aa, Arabidopsis thaliana
  peptide (1)..(1838): Ceres Seq. ID no. 12693067
MTTGGPSGALDANASSSGGRAAAPAPGRIHISTSIPAPSLPSTPEGQMAGANVETPPLPGSSSQTPLAEQNPPVRRNTDQEERRVTDGTYVGPGGLLQNILDHLSRQEARTEARFATLAAAQAHSMDEINRLQTSRTSVHRPVFESIEHRPQVRIAGPTNDVARDAEVADLRRTISEMSSKIHRATSTAPELDRVLEETQQTPFTRRITNVSIRGAQKIKLESYNGRNDPKEFLTSFNVAINRAELTIDNFDAGRCQIFIEHLTGPAHNWFSRLKPNSIDSFHQLTSSFLKHYAPLIENQTSNADLWSISQGAKESLRSFVDRFKLVVTNITVPDEAAIVALRNAVWYDSRFRDDITLHAPSTLEDALHRASRFIELEEEKLILARKHNSTKTPACKDAVVIKVGPDDSNEPRQHLDRNPSAGRKPTSFLVSTETPDAKPWNKYIRDADSPAAGPMYCEYHKSRAHSTENCRFLQGLLMAKYKSGGITIECDRPPINNKNQRRNETTARQYLNDQTKPPTPAEQGIITSADDPAAKRQRNGKAIAAEPVVVRQVHVIMGGLQNCSDSVRSIKQYRKKAEMVVAWPSSTSTTRNPNQSAPISFTDVDLEGLDTPHNDPLVVELIISDSRVTRVLIDTGSSVDLIFKDVLTAMNITDRQIKPVSKPLAGFDGDFVMTIGTIKLPIFVGGLIAWVKFVVIGKPAVYNVILGTPWIHQMQAIPSTYHQCVKFPTHNGIFTLRAPKEAKTPSRSYEESELCRTEMVNIDESDPTRCVGVGAEISPSIRLELIALLKRNSKTFAWSIEDMKGIDPAITAHELNVDPTFKPVKQKRRKLGPERARAVNEEVEKLLKAGQIIEVKYPEWLANPVVVKKKNGKWRVCVDYTDLNKACPKDSYPLPHIDRLVEATSGNGLLSFMDAFSGYNQILMHKDDQEKTSFVTDRGTYCYKVMSFGLKNAGATYQRFVNKMLADQIGRTVEVYIDDMLVKSLKPEDHVEHLSKCFDVLNTYGMKLNPTKCTFGVTSGEFLGYVVTKRGIEANPKQIRAILELPSPRNAREVQRLTGRIAALNRFISRSTDKCLPFYNLLKRRAQFDWDKDSEEAFEKLKDYLSTPPILVKPEVGETLYLYIAVSDHAVSSVLVREDRGEQRPIFYTSKSLVEAETRYPVIEKAALAVVTSARKLRPYFQSHTIAVLTDQPLRVALHSPSQSGRMTKWAVELSEYDIDFRPRPAMKSQVLADFLIELPLQSAERAVSGNRGEEWSLYVDGSSSARGSGIGIRLVSPTAEVLEQSFRLRFVATNNVAEYEVLIAGLRLAAGMQITTIHAFTDSQLIAGQLSGEYEAKNEKMDAYLKIVQLMTKDFENFKLSKIPRGDNAPADALAALALTSDSDLRRIIPVESIDKPSIDSTDAVEIVNTIRSSNAPDPADPTDWRVEIRDYLSDGTLPSDKWTARRLRIKAAKYTLMKEHLLKVSAFGAMLNCLHGTEINEIMKETHEGAAGNHSGGRALALKLKKLGFYWPTMISDCKTFTAKCEQCQRHAPTIHQPTELLRAGVAPYPFMRWAMDIVGPMPASRQKRFILVMTDYFTKWVEAESYATIRANDVQNFVWKFIICRHGLPYEIITDNGSQFISLSFENFCASWKIRLNKSTPRYPQGNGQAEATNKTILSGLKKRLDEKKGAWADELDGVLWSYRTTPRSATDQTPFAHAYGMEAMAPAEVGYSSLRRSMMVKNPELNDRMMLDRLDDLEEIRNAALCRIQNYQLAAAKHYNQKVHNRHFDVGDLVLRKVFENTAEINAGKLGANWEGSYQVSKIVRPGDYELLTMSGTAVPRTWNSMHLKRYYY

SEQ ID NO: 86739 - protein, 1791 aa, Arabidopsis thaliana; identical to SEQ ID NO: 73599
  peptide (1)..(1791): Ceres Seq. ID no. 12693068

SEQ ID NO: 86740 - protein, 1713 aa, Arabidopsis thaliana; identical to SEQ ID NO: 73600
  peptide (1)..(1713): Ceres Seq. ID no. 12693069

SEQ ID NO: 86741 - DNA, 4650 bp, Arabidopsis thaliana
  misc_feature (1)..(4650): Ceres Seq. ID no. 12693077
  misc_feature (1)..(4650): Ortholog of  Ceres SEQ ID NO 13648571 as cited in SEQ ID NO 197
  misc_feature (1)..(4650): Ortholog of  Ceres SEQ ID NO 15171446 as cited in SEQ ID NO 51590
atggcgtatcctgagagatctctcattgttgatcctagaagtggtttctgcaaatcaaactctacattctatagcaagcgccaaccattaagtctcccgccaaatctttcgcgtgacgtcaccacattcatctcctctcagccacaccgtggcaaaaccgcctttatcgacgctgccacaggccagtgcttaaccttctccgatctctggagagccgtcgatcgcgtcgccgactgtctatatcatgaagtcggaatacgaagaggcgacgtcgtcctcatcctttctccaaactccatcttcattcccgttgtttgcctctccgtcatgtctctcggcgccgttttcaccaccgccaacactctcaatacttccggtgaaatctccaaacagattgccgacagtaatccaactctcgtcttcactacgcgccagctggcaccaaaactccccgtcgctatctccgtcgttctcaccgacgacgaagtttaccaggagctcactagcgcaatcagagtcgttgggattttaagcgagatggtgaagaaagaaccgagtgggcaacgagtcagggaccgagtcaaccaggacgacacggcgatgatgctttactcgtcgggaaccacgggaccgagcaaaggagtgatctcgtctcaccggaatttaacagctcacgtggctagattcatatcggataatttgaaacgagacgatattttcatctgtaccgtcccgatgttccacacctacggtttattgaccttcgctatgggcaccgtagcattgggttcaacggtggtgatcctccggagatttcagctccacgatatgatggatgcggtggagaagcaccgagccacagctctggctttggcgccacctgttttggtagctatgattaacgacgcagatctgatcaaggctaagtacgatctgagctcactgaaaacggtgaggtgtggtggagcgccgttgagcaaggaggtgacggaagggtttctagagaaatatccgacggttgatatactgcaggggtatgctttgacggaatccaacggcggaggggctttcacgaattcagcggaggagagccggagatatggcacggcggggacgttgacgtctgatgtggaggcgaggatcgtggatccgaatacgggtcggttcatgggaattaaccaaacgggagagctctggctcaagggcccttctatttctaaaggttattttaaaaaccaagaagctacaaatgaaaccattaatttagagggatggctaaaaactggagatctttgctacatcgatgaagatgggtttctttttgttgtggatcgattgaaagaactgataaaatacaaaggctatcaggtgcctccagctgaactagaagctcttctgattactcatccggacattctcgatgccgccgttattccttttccggacaaagaagcaggacaatatccaatggcttacgtggttcgaaaacacgagagcaatctctctgagaaacaagtcattgacttcatctctaagcaggtagcaccatataagaagataagaaaggtctcatttataaactccataccaaaaactgcatccgagaagttgtacttagagaagagcttcatattaagaaatatggcgtatcctgagagagatctcattgttgatcctagaagcggtttctgcaaatcaaactctacattctatagcaagcgaaacccattatgtctcccgccaaatccgtcgcttgacgtcacaactttcatatcatctcaaccgcaacgcggcaccaccgccttcatcgacgcctccacgggccaccgcttaaccttctccgatctctggagagtcgttgatcgcgtcgctgactgtctatatcatgaagtcggaatacgaagaggcgacgtcgtcctcatcctctctccaaattcaatctacattcccgtcgtttgcctctccgtcatgtctctcggcgccgtcgtcaccaccgccaacactctcaacacctccggcgaaatctccaaacagatcgcccaaagtaatccaactctcgtcttcaccacgagccagctggcacccaaactcgcagccgcaatctccgtcgtcctcaccgacgaagaagacgagaagcgagtggagctcactagtggagtcagagtcgttgggattttgagcgagatgatgaagaaagaaacgagtggtcaacgagtcagagaccgagtcaaccaggacgacacggcgatgatgctttactcgtcgggaaccacagggacgagcaaaggagtgatctcgtctcaccggaatttaacagcttacgttgcgaaatacatcgacgataaatggaaacgagacgagatattcgtatgtaccgtgccgatgttccactccttcgggttattggcgttcgcaatgggctccgtagcatcgggttcaacggtggtgattctccggagattcgggctcgacgatatgatgcaagcggtggagaagtacaaagccacgattctgagtttggctccaccggttttggtagctatgattaacggtgcagatcagctcaaggccaagtacgatttgacctccctgagaaaggttaggtgtggtggagcaccgttgagcaaggaggttatggatagcttcctagagaaatatccaacggttaatatttttcaaggatatgcgttgactgagtcgcacggttcaggagcttcgacggaatctgtggaggagagtctgaaatacggtgcggttgggttgttgtcgtccggtattgaagcgaggattgtggatccggatacgggtcgggtcatgggtgtgaaccaacccggtgagctctggctcaagggtccttctatttctaaagatgggtttctatttgttgtggatcgactgaaagaattgatcaaatacaaaggctatcaggtgcctccagctgaactagaggctcttttgatcgctcatccacacattcttgatgctgctgttattccgtttccggatagagaagccggacaatatccgatggcttatgtagcccgaaagcccgagagcaatctctccgaaaaagaagttattgacttcatctctaatcaggtggcaccgtataagaaaataagaaagcctcatcgcggcaaaaccgtattcgtcgacgccgtaaccggtcgtcgactaagcttccctgagctctggctcggtgtcgaaagagtcgcgggttgtctttacgcattaggtgtacgcaaaggaaatgtcgtcattatactctctccaaactcaatcctcttcccgatcgtctccctctccgtaatgtcactcggcgcaatcataaccaccgctaatccgatcaacacgtccgacgaaatctccaaacagataggcgattcgcgtcctgttctcgccttcaccacatgcaaactcgtctccaaactcgccgccgcgtcgaattttaatctcccggtggttctcatggacgactaccacgttccttcgcaaagttacggtgaccgcgtgaaactagtcgggaggttagagacgatgattgaaacagaaccgagtgagtcacgagttaagcaacgagtcaaccaggacgacacggcggctctgttatactcatcaggtacgacggggacgagtaaaggagtaatgctgagtcaccgtaacctaatcgcattggtacaagcataccgggcccggttcggtttagagcagcgaaccatttgcacaatcccaatgtgtcacatcttcggattcggtggtttcgcgacggggctaatcgcgttaggatggacaatcgttgttcttcctaaattcgacatggctaagcttctctcggcggtggagactcatcgttcttcgtacctttctcttgtaccgccgattgtagtagctatggttaacggagcaaatgagattaattccaagtatgatctgagctcgttgcacactgtggtggctggaggagctccgttgagtagagaggtgacggagaagttcgttgagaattatcccaaggttaagatcctacaagggtatggtttgactgagtcaacggctatagctgcttctatgtttaataaagaggagactaagaggtatggagcttctggcttactggctccgaatgtggaaggtaagattgtggatccggatacgggtcgggttttgggtgtgaatcaaacgggtgagctgtggattcgaagtcctactgtgatgaaaggttatttcaagaataaagaagctactgcttctaccattgattcagaaggatggttgaaaactggagatttgtgttacattgacggtgatgggtttgtctttgttgttgatagattaaaggagctcatcaaatgcaatggttatcaggttgctccagctgaactagaggcattgttgcttgctcatccagagattgctgatgcagcagtaatacccatccctgacatgaaagctgggcaatatccaatggcatatatcgtaagaaaagttggaagtaacttatccgagagcgaaatcatgggatttgtcgcaaaacaggtatcaccgtacaagaagattcgcaaagtcacatttttggcttcaatccccaaaaatccttcgggcaagattttaagaagagaacttacaaagctcacaacttcaaaactctag

SEQ ID NO: 86742 - protein, 1549 aa, Arabidopsis thaliana
  peptide (1)..(1549): Ceres Seq. ID no. 12693078
MAYPERSLIVDPRSGFCKSNSTFYSKRQPLSLPPNLSRDVTTFISSQPHRGKTAFIDAATGQCLTFSDLWRAVDRVADCLYHEVGIRRGDVVLILSPNSIFIPVVCLSVMSLGAVFTTANTLNTSGEISKQIADSNPTLVFTTRQLAPKLPVAISVVLTDDEVYQELTSAIRVVGILSEMVKKEPSGQRVRDRVNQDDTAMMLYSSGTTGPSKGVISSHRNLTAHVARFISDNLKRDDIFICTVPMFHTYGLLTFAMGTVALGSTVVILRRFQLHDMMDAVEKHRATALALAPPVLVAMINDADLIKAKYDLSSLKTVRCGGAPLSKEVTEGFLEKYPTVDILQGYALTESNGGGAFTNSAEESRRYGTAGTLTSDVEARIVDPNTGRFMGINQTGELWLKGPSISKGYFKNQEATNETINLEGWLKTGDLCYIDEDGFLFVVDRLKELIKYKGYQVPPAELEALLITHPDILDAAVIPFPDKEAGQYPMAYVVRKHESNLSEKQVIDFISKQVAPYKKIRKVSFINSIPKTASEKLYLEKSFILRNMAYPERDLIVDPRSGFCKSNSTFYSKRNPLCLPPNPSLDVTTFISSQPQRGTTAFIDASTGHRLTFSDLWRVVDRVADCLYHEVGIRRGDVVLILSPNSIYIPVVCLSVMSLGAVVTTANTLNTSGEISKQIAQSNPTLVFTTSQLAPKLAAAISVVLTDEEDEKRVELTSGVRVVGILSEMMKKETSGQRVRDRVNQDDTAMMLYSSGTTGTSKGVISSHRNLTAYVAKYIDDKWKRDEIFVCTVPMFHSFGLLAFAMGSVASGSTVVILRRFGLDDMMQAVEKYKATILSLAPPVLVAMINGADQLKAKYDLTSLRKVRCGGAPLSKEVMDSFLEKYPTVNIFQGYALTESHGSGASTESVEESLKYGAVGLLSSGIEARIVDPDTGRVMGVNQPGELWLKGPSISKDGFLFVVDRLKELIKYKGYQVPPAELEALLIAHPHILDAAVIPFPDREAGQYPMAYVARKPESNLSEKEVIDFISNQVAPYKKIRKPHRGKTVFVDAVTGRRLSFPELWLGVERVAGCLYALGVRKGNVVIILSPNSILFPIVSLSVMSLGAIITTANPINTSDEISKQIGDSRPVLAFTTCKLVSKLAAASNFNLPVVLMDDYHVPSQSYGDRVKLVGRLETMIETEPSESRVKQRVNQDDTAALLYSSGTTGTSKGVMLSHRNLIALVQAYRARFGLEQRTICTIPMCHIFGFGGFATGLIALGWTIVVLPKFDMAKLLSAVETHRSSYLSLVPPIVVAMVNGANEINSKYDLSSLHTVVAGGAPLSREVTEKFVENYPKVKILQGYGLTESTAIAASMFNKEETKRYGASGLLAPNVEGKIVDPDTGRVLGVNQTGELWIRSPTVMKGYFKNKEATASTIDSEGWLKTGDLCYIDGDGFVFVVDRLKELIKCNGYQVAPAELEALLLAHPEIADAAVIPIPDMKAGQYPMAYIVRKVGSNLSESEIMGFVAKQVSPYKKIRKVTFLASIPKNPSGKILRRELTKLTTSKL

SEQ ID NO: 86743 - protein, 1440 aa, Arabidopsis thaliana
  peptide (1)..(1440): Ceres Seq. ID no. 12693079
MSLGAVFTTANTLNTSGEISKQIADSNPTLVFTTRQLAPKLPVAISVVLTDDEVYQELTSAIRVVGILSEMVKKEPSGQRVRDRVNQDDTAMMLYSSGTTGPSKGVISSHRNLTAHVARFISDNLKRDDIFICTVPMFHTYGLLTFAMGTVALGSTVVILRRFQLHDMMDAVEKHRATALALAPPVLVAMINDADLIKAKYDLSSLKTVRCGGAPLSKEVTEGFLEKYPTVDILQGYALTESNGGGAFTNSAEESRRYGTAGTLTSDVEARIVDPNTGRFMGINQTGELWLKGPSISKGYFKNQEATNETINLEGWLKTGDLCYIDEDGFLFVVDRLKELIKYKGYQVPPAELEALLITHPDILDAAVIPFPDKEAGQYPMAYVVRKHESNLSEKQVIDFISKQVAPYKKIRKVSFINSIPKTASEKLYLEKSFILRNMAYPERDLIVDPRSGFCKSNSTFYSKRNPLCLPPNPSLDVTTFISSQPQRGTTAFIDASTGHRLTFSDLWRVVDRVADCLYHEVGIRRGDVVLILSPNSIYIPVVCLSVMSLGAVVTTANTLNTSGEISKQIAQSNPTLVFTTSQLAPKLAAAISVVLTDEEDEKRVELTSGVRVVGILSEMMKKETSGQRVRDRVNQDDTAMMLYSSGTTGTSKGVISSHRNLTAYVAKYIDDKWKRDEIFVCTVPMFHSFGLLAFAMGSVASGSTVVILRRFGLDDMMQAVEKYKATILSLAPPVLVAMINGADQLKAKYDLTSLRKVRCGGAPLSKEVMDSFLEKYPTVNIFQGYALTESHGSGASTESVEESLKYGAVGLLSSGIEARIVDPDTGRVMGVNQPGELWLKGPSISKDGFLFVVDRLKELIKYKGYQVPPAELEALLIAHPHILDAAVIPFPDREAGQYPMAYVARKPESNLSEKEVIDFISNQVAPYKKIRKPHRGKTVFVDAVTGRRLSFPELWLGVERVAGCLYALGVRKGNVVIILSPNSILFPIVSLSVMSLGAIITTANPINTSDEISKQIGDSRPVLAFTTCKLVSKLAAASNFNLPVVLMDDYHVPSQSYGDRVKLVGRLETMIETEPSESRVKQRVNQDDTAALLYSSGTTGTSKGVMLSHRNLIALVQAYRARFGLEQRTICTIPMCHIFGFGGFATGLIALGWTIVVLPKFDMAKLLSAVETHRSSYLSLVPPIVVAMVNGANEINSKYDLSSLHTVVAGGAPLSREVTEKFVENYPKVKILQGYGLTESTAIAASMFNKEETKRYGASGLLAPNVEGKIVDPDTGRVLGVNQTGELWIRSPTVMKGYFKNKEATASTIDSEGWLKTGDLCYIDGDGFVFVVDRLKELIKCNGYQVAPAELEALLLAHPEIADAAVIPIPDMKAGQYPMAYIVRKVGSNLSESEIMGFVAKQVSPYKKIRKVTFLASIPKNPSGKILRRELTKLTTSKL

SEQ ID NO: 86744 - protein, 1370 aa, Arabidopsis thaliana
  peptide (1)..(1370): Ceres Seq. ID no. 12693080
MVKKEPSGQRVRDRVNQDDTAMMLYSSGTTGPSKGVISSHRNLTAHVARFISDNLKRDDIFICTVPMFHTYGLLTFAMGTVALGSTVVILRRFQLHDMMDAVEKHRATALALAPPVLVAMINDADLIKAKYDLSSLKTVRCGGAPLSKEVTEGFLEKYPTVDILQGYALTESNGGGAFTNSAEESRRYGTAGTLTSDVEARIVDPNTGRFMGINQTGELWLKGPSISKGYFKNQEATNETINLEGWLKTGDLCYIDEDGFLFVVDRLKELIKYKGYQVPPAELEALLITHPDILDAAVIPFPDKEAGQYPMAYVVRKHESNLSEKQVIDFISKQVAPYKKIRKVSFINSIPKTASEKLYLEKSFILRNMAYPERDLIVDPRSGFCKSNSTFYSKRNPLCLPPNPSLDVTTFISSQPQRGTTAFIDASTGHRLTFSDLWRVVDRVADCLYHEVGIRRGDVVLILSPNSIYIPVVCLSVMSLGAVVTTANTLNTSGEISKQIAQSNPTLVFTTSQLAPKLAAAISVVLTDEEDEKRVELTSGVRVVGILSEMMKKETSGQRVRDRVNQDDTAMMLYSSGTTGTSKGVISSHRNLTAYVAKYIDDKWKRDEIFVCTVPMFHSFGLLAFAMGSVASGSTVVILRRFGLDDMMQAVEKYKATILSLAPPVLVAMINGADQLKAKYDLTSLRKVRCGGAPLSKEVMDSFLEKYPTVNIFQGYALTESHGSGASTESVEESLKYGAVGLLSSGIEARIVDPDTGRVMGVNQPGELWLKGPSISKDGFLFVVDRLKELIKYKGYQVPPAELEALLIAHPHILDAAVIPFPDREAGQYPMAYVARKPESNLSEKEVIDFISNQVAPYKKIRKPHRGKTVFVDAVTGRRLSFPELWLGVERVAGCLYALGVRKGNVVIILSPNSILFPIVSLSVMSLGAIITTANPINTSDEISKQIGDSRPVLAFTTCKLVSKLAAASNFNLPVVLMDDYHVPSQSYGDRVKLVGRLETMIETEPSESRVKQRVNQDDTAALLYSSGTTGTSKGVMLSHRNLIALVQAYRARFGLEQRTICTIPMCHIFGFGGFATGLIALGWTIVVLPKFDMAKLLSAVETHRSSYLSLVPPIVVAMVNGANEINSKYDLSSLHTVVAGGAPLSREVTEKFVENYPKVKILQGYGLTESTAIAASMFNKEETKRYGASGLLAPNVEGKIVDPDTGRVLGVNQTGELWIRSPTVMKGYFKNKEATASTIDSEGWLKTGDLCYIDGDGFVFVVDRLKELIKCNGYQVAPAELEALLLAHPEIADAAVIPIPDMKAGQYPMAYIVRKVGSNLSESEIMGFVAKQVSPYKKIRKVTFLASIPKNPSGKILRRELTKLTTSKL

SEQ ID NO: 86745 - DNA, 1095 bp, Arabidopsis thaliana
  misc_feature (1)..(1095): Ceres Seq. ID no. 12693154
  misc_feature (1)..(1095): Ortholog of  Ceres SEQ ID NO 13597831 as cited in SEQ ID NO 64617
atggcatccattgattctctccaattccattctctctgcaatctccaggtaaaaatcgaacccatctcttcttcttcacttacacttataccgtcgtcgattggaagagccaagctccagaatccttcaagtttggttattttcagacggagacccgtaaatctgaattgggttcaattcgaaactaaaggaagtttcgtgtgtaaagcgattggtgattcctcgactccagatgaagatattcagaacactcaaagtgatgataatgttgttgttgttactgctacgactcagagtgacattccccatgattccgagtattcaatttcgaggtttcgaagtatggttaccacactccctcctgttgtcttcctgatgaagaagtgctcagtgaacagcatttggattggggtctgcatcacggctactgttttggtcgctgcgattagggcttatgtagtcagaaagtcaagagataatcagcgtgctggctctgttgctgatcttgtgagacgtggccagctgaggtctggtgatagaagaggcatctccaaatctcttaactacgaggacccattcaacaacccttttgtgaaacttgataaaggaagctcaacggtagagatgtgcgggaaagtttatcggctagctccagtcacacttacagagaaagaacaaactattcatcagaaaagaaggtcaagagcttaccaatggaagcgaccaacgatttttctcaaagaaggggactcgataccacctgatgttgatcccgatacagtcagatggatcccggccaatcatccgtttgccaccacagttagcgatatcgatcaagaccttgcccagaataatgtctaccagaagcaaggtgttcctttccggattcgagctgagcatgaagctatgcagaaaaagcttgaagctttacaaaatgaggagaaattgaacaatctgagtattgacagtcaaaatgccagagatttccagaggccatacaagttctcagcgaagctcgaaggcgagaatatccagaagaattctcaggagaatcatacaggcaattcatcctctgaggaaacgcacaagtcctga

SEQ ID NO: 86746 - protein, 364 aa, Arabidopsis thaliana
  peptide (1)..(364): Ceres Seq. ID no. 12693155
MASIDSLQFHSLCNLQVKIEPISSSSLTLIPSSIGRAKLQNPSSLVIFRRRPVNLNWVQFETKGSFVCKAIGDSSTPDEDIQNTQSDDNVVVVTATTQSDIPHDSEYSISRFRSMVTTLPPVVFLMKKCSVNSIWIGVCITATVLVAAIRAYVVRKSRDNQRAGSVADLVRRGQLRSGDRRGISKSLNYEDPFNNPFVKLDKGSSTVEMCGKVYRLAPVTLTEKEQTIHQKRRSRAYQWKRPTIFLKEGDSIPPDVDPDTVRWIPANHPFATTVSDIDQDLAQNNVYQKQGVPFRIRAEHEAMQKKLEALQNEEKLNNLSIDSQNARDFQRPYKFSAKLEGENIQKNSQENHTGNSSSEETHKS

SEQ ID NO: 86747 - protein, 250 aa, Arabidopsis thaliana; identical to SEQ ID NO: 47559
  peptide (1)..(250): Ceres Seq. ID no. 12693156

SEQ ID NO: 86748 - protein, 239 aa, Arabidopsis thaliana; identical to SEQ ID NO: 47560
  peptide (1)..(239): Ceres Seq. ID no. 12693157

SEQ ID NO: 86749 - DNA, 1210 bp, Arabidopsis thaliana
  misc_feature (1)..(1210): Ceres Seq. ID no. 12693172
  misc_feature (1)..(1210): Ortholog of  Ceres SEQ ID NO 15176375 as cited in SEQ ID NO 53238
  misc_feature (1)..(1210): Ortholog of  Ceres SEQ ID NO 15170532 as cited in SEQ ID NO 55671
  misc_feature (1)..(1210): Ortholog of  Ceres SEQ ID NO 14316507 as cited in SEQ ID NO 57397
  misc_feature (1)..(1210): Ortholog of  Ceres SEQ ID NO 13663060 as cited in SEQ ID NO 60964
  misc_feature (1)..(1210): Ortholog of  Ceres SEQ ID NO 13598532 as cited in SEQ ID NO 65204
  misc_feature (1)..(1210): Ortholog of  Ceres SEQ ID NO 13656849 as cited in SEQ ID NO 65764
  misc_feature (1)..(1210): Ortholog of  Ceres SEQ ID NO 13656501 as cited in SEQ ID NO 69206
ttcctctctctttccccaaattgaaaacaaaatctgagattcgcgaaggaagaagaagagttgtcttgagagattgatagagatggacaacaatggagttaaacccgctgtttccgccatggaagcctttgaaaagcttgagaaagtaggtgaagggacttatgggaaagtttacagagcaagagagaaagctactgggatgatcgttgctttgaagaagacgcgtctccatgaggatgaagaaggtgttcctcccactactcttcgcgagatctctatcttgcgtatgctcgctcgtgatcctcacatcgttaggttgatggatgttaagcaaggaataaacaaagaaggaaaaactgtactttaccttgttttcgagtatgttgatactgatctcaagaaattcatcagaagctttcgtcaagctggacagaacattccacaaaatactgtcaagtgcttgatgtaccagttatgcaaaggcatggctttttgccatggtcatggagtgttgcacagggatcttaagcctcacaatctcttgatggaccggaagacaatgacgctcaaaatagcagatcttggattagccagagccttcactctcccaatgaaaaagtatacacatgagattctaactctatggtatagagctccggaagttcttcttggagcaacccattactctactggagtggatatgtggtctgttggctgtatttttgctgaactagtgaccaagcaagcaatctttgcgggagactctgagctccaacagctcctccgtatattcaggttgttgggaacaccaaacgaagaagtttggcctggagtaagcaaactcaaggactggcatgaatacccgcaatggaaaccgttgagtctctccacagctgtgccaaacctcgacgaggctggacttgatctcttatctaaaatgctggagtacgagccagcaaaacgaatctcagcaaagaaagctatggagcatccttacttcgatgatttgcctgacaagtcctctctctgaggctctctttataaactctcaataggatattttgttctatctctgtctttgcttgtctcaagcatttatctgctatcttaggatgattgaagtttcaatattcccttttgattgggtctctattcccaattgtataaccttccaacatttttatcaatgaaagaatatatcagtttctct

SEQ ID NO: 86750 - protein, 315 aa, Arabidopsis thaliana; identical to SEQ ID NO: 39620
  peptide (1)..(315): Ceres Seq. ID no. 12693173

SEQ ID NO: 86751 - protein, 303 aa, Arabidopsis thaliana; identical to SEQ ID NO: 39621
  peptide (1)..(303): Ceres Seq. ID no. 12693174

SEQ ID NO: 86752 - protein, 276 aa, Arabidopsis thaliana; identical to SEQ ID NO: 39622
  peptide (1)..(276): Ceres Seq. ID no. 12693175

SEQ ID NO: 86753 - DNA, 4659 bp, Arabidopsis thaliana
  misc_feature (1)..(4659): Ceres Seq. ID no. 12693224
  misc_feature (1)..(4659): Ortholog of  Ceres SEQ ID NO 13581775 as cited in SEQ ID NO 51066
  misc_feature (1)..(4659): Ortholog of  Ceres SEQ ID NO 13595727 as cited in SEQ ID NO 57082
  misc_feature (1)..(4659): Ortholog of  Ceres SEQ ID NO 15171152 as cited in SEQ ID NO 60275
atggatccgaggaattcgagtgcgtggggtgggggtgatggtctcccccttatctcatccatgggaggtgttgaatcaaagaatagatgctgtgtgactgacgacgatggctctattggtacgaagctatgtgagaaacctaaagctgaggagattgatttttctgctcggaaaaagaagttgaaatcgaagaaaggcgggtctgttagctttgctcttctcgatgttgaagatgacaaggaggaagcagaggatggagacgacaaaaatccttctattaggagtgatgaggtggttggagaaacttcaatgagtaagaaaaagaagaaggataagagtggcaagcatggggtatgtgaagaagatgatgatgcggacaagattcttgctcaacatgggataacaactactgtttcaacagggcctgaagcggagatagctctagctcaacctgagcaagttgcatctgcagatggggctgttgacaaggacggagaagaaaagactgttgagtcagctacagcgaagaaaaagaaaaagaagaaggacaaggacaagaaagcaagtgcttctttagctatttcttctgtggaggctaaggaggatagacaagggaagaaagatgtaaagattaaagtagcggaaaagaaagttcctaaacatgttcgagagaagcaagagactcttgcgcggtggaaagaagctgaagatgggaagaagaaggaagaagaagagagattgaggaaagaggaagaggagcgccgtatagaggaagagcgagaaagggaagctgaagagattaggcagaagagaaagatcaggaaaatggagaagaagcaagaaggcctgattctaacagcaaagcaaaagcgtgatgctgctaagaatgaggctttcagaaaaagggtgttgactgatgctggaagtcttcttgttgcagataaaaacggtgattcctcaaaacgtcccatatatggcaataaaaacaaattagcttgcaaaaaagcaaacgatcctgcttctgtccaggctaaaggtgatggggaaaccaaggaaaatcatgcagcagatgaaccatgtactttacctgacttggtttcagttgaagatagaagggttggtattatcgaatcagtagacacagaagagacacatgaatctgttgatgtatcacaagagaatggtgatgaggaagatgtgtgggatgcaaaaactaattttaccatcaagggtgattctgatgatgaggaggaaaaacctcagcctgtgttcaagaaaggtttaaaagacactgcatcaaaggcacatgattcagttcctggcgcagatagaccaacagtgaagcctggaggttctggcaagccaaaaacagctgccaaaaaagctatgcctaaggtggatgatactacccggccgaaagatacttctaaaaaggatgaaggcttagtactgaatgaacttgctaaagaagtagaagaaaatcttcgctctccaatttgctgcatcatgggtcatgttgattctggtaaaacaaagctgttggattgcatcagaggaacaaatgttcaggaaggtgaagctggaggtattactcaacagattggtgcaacctttttccctgcagaaaacatccgtgagaggaccaaagagttacaagctaatgctaaactcaaggtgccaggtatattggttatcgatacacctggacacgagtcattcacaaatctgcggtcaaggggttcaaatttgtgtgaccttgcaattctagtggttgatataatgcgaggtctagagccacaaaccatagaatctcttaatcttttgagaagaaggaatgtaaagttcattattgccttgaataaggtggataggctatatgggtgggaaaaaagcaagaatgctcctataaggaagacaatgatgcaacaaacgggagatgtggttaaggaatttaaaatgaggctaaaccgagttcaaaaccagttccaagaacaaggactcaacagtatgctttattacaagaacagagaaatgggagaaactatcagtatcctacctgctagcgctattagtggggaagggattccagatcttttactgttcttggttcaatgggctcagaaaacgatggtggagaaacttacatatgttgacaaagtgcagtgtaccgtccttgaggtcaaagttattgaaggccatggtattacagttgatgttgttttggtcaacggtgtactccgtgaaggtgatcaaattgttgtttgtgggtcacagggaccaattgtaacaactattagatcattgttgactccttatcctatgaacgagatgcgggtgacgggtacctatatgcctcacagagaagtaaaggctgcgcagggtatcaaaattgctgcacagggccttgaacacgccattgctggtactgccttgcatgtgattggacctaatgaggacatggaagaagccaagaaaaatgccatggaagatattgagtcagttatgaaccgcattgacaaaagtggtgaaggcgtttatgtacaagcatctacattagggtccttggaagcattgctcgagttcttgaagtcctcagatgtaaaaatacctgtcagtggtattggcataggacctgtgcataagaaggatatcatgaaggccggggtaatgctagagaagaaaaaagagtttgcaacgattttggcctttgatgtgaaaataagtgcagaagctcgtgaacttgcagacaaaatgggagtaaaaatcttctgcgatgataccatctattgtctgttcgataagtttaagagttacatagagggtatcaaagaggagaaaaagaaagaaacagcttgtgaagcagttttcccatgtatccttcagattttaccaaaccatatctacaatcagagggacccaattatccttggagttaaagtcaatgatggaatactaaaggttggaactcccatttgcattgttaaaaggattgagaatgtaagagtgtttatggacattgggcgcgtctcatcaattaagaataacaacaacatgccagttgattatgcaaggaaaggacaggaggtggctattaagatcattgcttctaacccagaagaacagaaaatgtttgggaggcactttggtgtagacgacaggcttatcagtcacatttctagtcgatccgtggacgtaatcagaactaattactggagaaataaaggacctattcacagattcagacaacatcgtcgcattttgattttgaatcgattattttacctacactcgtgtatgagccagtcctccggaataagacaacatctccaggagtctctacgaaattcttcggctctcaaaggtattcacgacggtcttttagctctattctctattgagaacctgatttttccggtgaattttgattattgcaaagttggagaatttttgagatttagaagagatactggcttaggattcgtattcatgtcgagcttattacactgtagaaatgtcgtagattgtgcgtttacttcttccactgttcgtcgcattgtcaatttagggtttttagtgggtagaataagaacgttgtgttcagtgtcacaagtgaaatcagagaatctcgaaaagcaaaaaccatgtttggaatcttttacagtttcttatctcgtggattcttgtggactgtctttggaatctgctaaatcgaattccagattcgtcaaattggtttcgtccaagaaaccagactctgttcttgctctcttcaaggaccatggcttcaccaatgaccagatcaccagtgtcatcaaatcctttcctcgtgttctgtcactgagcccggaagatgtaatctcgcccaagctcatgtttttcagttctatcgggttttcgacctcggatactgcgaaaatgatctcttcttccccgaaaatgctatcatatagcttgcacaaaagattgatcccttgctatgattccctcaagagcatactcgttgaggaagaaagtgttgtcaagtgtctcaagcgtggaatcagatgtttctcattgaagattacacattgtgtgtctcttcgtgtctccatttgtagagagcttggagttcctgacaaaagcatcaagtggttggttcaagcgtctccattcacttttttctctcgtgagagaagattcaacgaggtcttaaacagagtttgcagctacggttttgacccgaaaaaggcgggttttgttcacgctatggtagcctttgattgcacgagtgaatcagcaatggagcggaaatttaagttgttccaatgttttggttggtctaaagaagatttcgtcgcagcgatcatgagattcccaaactgtgtgacggtttcagatgagaagataatgtacacattggagtaccttgtaaacaacattggtctgcaagctcgtgacattgttgcaagaccggtggtgttatctctgagcatggagaagagaatcaaaccgaggaaccaggtcatctctttgcttctctccaaaggacttgtgaagaaggaagacatcaactatttcactatactaaagctgaaaagctccgagttcatggataagtttgtgctgaaatatcaggatgagatgccacaacttgtacaaccctttacaagtaatcgatga

SEQ ID NO: 86754 - protein, 1552 aa, Arabidopsis thaliana
  peptide (1)..(1552): Ceres Seq. ID no. 12693225
MDPRNSSAWGGGDGLPLISSMGGVESKNRCCVTDDDGSIGTKLCEKPKAEEIDFSARKKKLKSKKGGSVSFALLDVEDDKEEAEDGDDKNPSIRSDEVVGETSMSKKKKKDKSGKHGVCEEDDDADKILAQHGITTTVSTGPEAEIALAQPEQVASADGAVDKDGEEKTVESATAKKKKKKKDKDKKASASLAISSVEAKEDRQGKKDVKIKVAEKKVPKHVREKQETLARWKEAEDGKKKEEEERLRKEEEERRIEEEREREAEEIRQKRKIRKMEKKQEGLILTAKQKRDAAKNEAFRKRVLTDAGSLLVADKNGDSSKRPIYGNKNKLACKKANDPASVQAKGDGETKENHAADEPCTLPDLVSVEDRRVGIIESVDTEETHESVDVSQENGDEEDVWDAKTNFTIKGDSDDEEEKPQPVFKKGLKDTASKAHDSVPGADRPTVKPGGSGKPKTAAKKAMPKVDDTTRPKDTSKKDEGLVLNELAKEVEENLRSPICCIMGHVDSGKTKLLDCIRGTNVQEGEAGGITQQIGATFFPAENIRERTKELQANAKLKVPGILVIDTPGHESFTNLRSRGSNLCDLAILVVDIMRGLEPQTIESLNLLRRRNVKFIIALNKVDRLYGWEKSKNAPIRKTMMQQTGDVVKEFKMRLNRVQNQFQEQGLNSMLYYKNREMGETISILPASAISGEGIPDLLLFLVQWAQKTMVEKLTYVDKVQCTVLEVKVIEGHGITVDVVLVNGVLREGDQIVVCGSQGPIVTTIRSLLTPYPMNEMRVTGTYMPHREVKAAQGIKIAAQGLEHAIAGTALHVIGPNEDMEEAKKNAMEDIESVMNRIDKSGEGVYVQASTLGSLEALLEFLKSSDVKIPVSGIGIGPVHKKDIMKAGVMLEKKKEFATILAFDVKISAEARELADKMGVKIFCDDTIYCLFDKFKSYIEGIKEEKKKETACEAVFPCILQILPNHIYNQRDPIILGVKVNDGILKVGTPICIVKRIENVRVFMDIGRVSSIKNNNNMPVDYARKGQEVAIKIIASNPEEQKMFGRHFGVDDRLISHISSRSVDVIRTNYWRNKGPIHRFRQHRRILILNRLFYLHSCMSQSSGIRQHLQESLRNSSALKGIHDGLLALFSIENLIFPVNFDYCKVGEFLRFRRDTGLGFVFMSSLLHCRNVVDCAFTSSTVRRIVNLGFLVGRIRTLCSVSQVKSENLEKQKPCLESFTVSYLVDSCGLSLESAKSNSRFVKLVSSKKPDSVLALFKDHGFTNDQITSVIKSFPRVLSLSPEDVISPKLMFFSSIGFSTSDTAKMISSSPKMLSYSLHKRLIPCYDSLKSILVEEESVVKCLKRGIRCFSLKITHCVSLRVSICRELGVPDKSIKWLVQASPFTFFSRERRFNEVLNRVCSYGFDPKKAGFVHAMVAFDCTSESAMERKFKLFQCFGWSKEDFVAAIMRFPNCVTVSDEKIMYTLEYLVNNIGLQARDIVARPVVLSLSMEKRIKPRNQVISLLLSKGLVKKEDINYFTILKLKSSEFMDKFVLKYQDEMPQLVQPFTSNR

SEQ ID NO: 86755 - protein, 1532 aa, Arabidopsis thaliana
  peptide (1)..(1532): Ceres Seq. ID no. 12693226
MGGVESKNRCCVTDDDGSIGTKLCEKPKAEEIDFSARKKKLKSKKGGSVSFALLDVEDDKEEAEDGDDKNPSIRSDEVVGETSMSKKKKKDKSGKHGVCEEDDDADKILAQHGITTTVSTGPEAEIALAQPEQVASADGAVDKDGEEKTVESATAKKKKKKKDKDKKASASLAISSVEAKEDRQGKKDVKIKVAEKKVPKHVREKQETLARWKEAEDGKKKEEEERLRKEEEERRIEEEREREAEEIRQKRKIRKMEKKQEGLILTAKQKRDAAKNEAFRKRVLTDAGSLLVADKNGDSSKRPIYGNKNKLACKKANDPASVQAKGDGETKENHAADEPCTLPDLVSVEDRRVGIIESVDTEETHESVDVSQENGDEEDVWDAKTNFTIKGDSDDEEEKPQPVFKKGLKDTASKAHDSVPGADRPTVKPGGSGKPKTAAKKAMPKVDDTTRPKDTSKKDEGLVLNELAKEVEENLRSPICCIMGHVDSGKTKLLDCIRGTNVQEGEAGGITQQIGATFFPAENIRERTKELQANAKLKVPGILVIDTPGHESFTNLRSRGSNLCDLAILVVDIMRGLEPQTIESLNLLRRRNVKFIIALNKVDRLYGWEKSKNAPIRKTMMQQTGDVVKEFKMRLNRVQNQFQEQGLNSMLYYKNREMGETISILPASAISGEGIPDLLLFLVQWAQKTMVEKLTYVDKVQCTVLEVKVIEGHGITVDVVLVNGVLREGDQIVVCGSQGPIVTTIRSLLTPYPMNEMRVTGTYMPHREVKAAQGIKIAAQGLEHAIAGTALHVIGPNEDMEEAKKNAMEDIESVMNRIDKSGEGVYVQASTLGSLEALLEFLKSSDVKIPVSGIGIGPVHKKDIMKAGVMLEKKKEFATILAFDVKISAEARELADKMGVKIFCDDTIYCLFDKFKSYIEGIKEEKKKETACEAVFPCILQILPNHIYNQRDPIILGVKVNDGILKVGTPICIVKRIENVRVFMDIGRVSSIKNNNNMPVDYARKGQEVAIKIIASNPEEQKMFGRHFGVDDRLISHISSRSVDVIRTNYWRNKGPIHRFRQHRRILILNRLFYLHSCMSQSSGIRQHLQESLRNSSALKGIHDGLLALFSIENLIFPVNFDYCKVGEFLRFRRDTGLGFVFMSSLLHCRNVVDCAFTSSTVRRIVNLGFLVGRIRTLCSVSQVKSENLEKQKPCLESFTVSYLVDSCGLSLESAKSNSRFVKLVSSKKPDSVLALFKDHGFTNDQITSVIKSFPRVLSLSPEDVISPKLMFFSSIGFSTSDTAKMISSSPKMLSYSLHKRLIPCYDSLKSILVEEESVVKCLKRGIRCFSLKITHCVSLRVSICRELGVPDKSIKWLVQASPFTFFSRERRFNEVLNRVCSYGFDPKKAGFVHAMVAFDCTSESAMERKFKLFQCFGWSKEDFVAAIMRFPNCVTVSDEKIMYTLEYLVNNIGLQARDIVARPVVLSLSMEKRIKPRNQVISLLLSKGLVKKEDINYFTILKLKSSEFMDKFVLKYQDEMPQLVQPFTSNR

SEQ ID NO: 86756 - protein, 1449 aa, Arabidopsis thaliana
  peptide (1)..(1449): Ceres Seq. ID no. 12693227
MSKKKKKDKSGKHGVCEEDDDADKILAQHGITTTVSTGPEAEIALAQPEQVASADGAVDKDGEEKTVESATAKKKKKKKDKDKKASASLAISSVEAKEDRQGKKDVKIKVAEKKVPKHVREKQETLARWKEAEDGKKKEEEERLRKEEEERRIEEEREREAEEIRQKRKIRKMEKKQEGLILTAKQKRDAAKNEAFRKRVLTDAGSLLVADKNGDSSKRPIYGNKNKLACKKANDPASVQAKGDGETKENHAADEPCTLPDLVSVEDRRVGIIESVDTEETHESVDVSQENGDEEDVWDAKTNFTIKGDSDDEEEKPQPVFKKGLKDTASKAHDSVPGADRPTVKPGGSGKPKTAAKKAMPKVDDTTRPKDTSKKDEGLVLNELAKEVEENLRSPICCIMGHVDSGKTKLLDCIRGTNVQEGEAGGITQQIGATFFPAENIRERTKELQANAKLKVPGILVIDTPGHESFTNLRSRGSNLCDLAILVVDIMRGLEPQTIESLNLLRRRNVKFIIALNKVDRLYGWEKSKNAPIRKTMMQQTGDVVKEFKMRLNRVQNQFQEQGLNSMLYYKNREMGETISILPASAISGEGIPDLLLFLVQWAQKTMVEKLTYVDKVQCTVLEVKVIEGHGITVDVVLVNGVLREGDQIVVCGSQGPIVTTIRSLLTPYPMNEMRVTGTYMPHREVKAAQGIKIAAQGLEHAIAGTALHVIGPNEDMEEAKKNAMEDIESVMNRIDKSGEGVYVQASTLGSLEALLEFLKSSDVKIPVSGIGIGPVHKKDIMKAGVMLEKKKEFATILAFDVKISAEARELADKMGVKIFCDDTIYCLFDKFKSYIEGIKEEKKKETACEAVFPCILQILPNHIYNQRDPIILGVKVNDGILKVGTPICIVKRIENVRVFMDIGRVSSIKNNNNMPVDYARKGQEVAIKIIASNPEEQKMFGRHFGVDDRLISHISSRSVDVIRTNYWRNKGPIHRFRQHRRILILNRLFYLHSCMSQSSGIRQHLQESLRNSSALKGIHDGLLALFSIENLIFPVNFDYCKVGEFLRFRRDTGLGFVFMSSLLHCRNVVDCAFTSSTVRRIVNLGFLVGRIRTLCSVSQVKSENLEKQKPCLESFTVSYLVDSCGLSLESAKSNSRFVKLVSSKKPDSVLALFKDHGFTNDQITSVIKSFPRVLSLSPEDVISPKLMFFSSIGFSTSDTAKMISSSPKMLSYSLHKRLIPCYDSLKSILVEEESVVKCLKRGIRCFSLKITHCVSLRVSICRELGVPDKSIKWLVQASPFTFFSRERRFNEVLNRVCSYGFDPKKAGFVHAMVAFDCTSESAMERKFKLFQCFGWSKEDFVAAIMRFPNCVTVSDEKIMYTLEYLVNNIGLQARDIVARPVVLSLSMEKRIKPRNQVISLLLSKGLVKKEDINYFTILKLKSSEFMDKFVLKYQDEMPQLVQPFTSNR

SEQ ID NO: 86757 - DNA, 2709 bp, Arabidopsis thaliana
  misc_feature (1)..(2709): Ceres Seq. ID no. 12693234
  misc_feature (1)..(2709): Ortholog of  Ceres SEQ ID NO 13654989 as cited in SEQ ID NO 63117
  misc_feature (1)..(2709): Ortholog of  Ceres SEQ ID NO 13584744 as cited in SEQ ID NO 69137
atgaagttccaggagggtgtgttcttggtggttattttcttccttgcatatactcagcttgtgaaggggcaacatcaacctcgcgaagattgtaaacttaaatgtggaaacgtcacaatagagtacccttttggtatttctacaggttgttactatcccggagatgataatttcaatctcacctgtgtcgtggaagagaagctactactctttggcatcattcaagtgaccaatatttctcacagtggccatgtaagtgtactgtttgaacgattctctgaatgctacgagcagaaaaatgagactaatggaactgccctcgggtatcagctgggtagtagtttctctctctcctccaacaacaagtttactttagtaggatgtaacgctttatcacttttgagcacttttggaaagcaaaactactcaactggatgcttgtcattatgcaattctcaaccagaggcaaatggaagatgtaatggtgtaggttgctgcacaacagaggacttctctgtcccgttcgatagcgatacattccaatttggctcagttcgcttgagaaaccaagttaataattccttagatctatttaatacttcggtatatcagtttaatccttgcacctacgcttttctcgttgaagatggtaagtttaacttcgattcttcaaaagatcttaagaatctgaggaatgtcacgaggttccctgtggcactagattggtctattggaaaccagacatgtgagcaagctggaagcacaagaatatgcggtaagaacagctcatgttacaattctactactagaaacgggtatatctgcaaatgtaatgaaggttatgatgggaatccataccgttcagagggttgcaaagacatcgatgagtgtattagtgatacacataactgttcggatccaaaaacctgtagaaacagggatggaggcttcgattgtaagtgtccatctggttacgacttaaactccagtatgagctgcacgaggcccgaatacaaacggactcgaatttttcttgtaatcataatcggcgtcttggtcctcctgcttgctgcgatctgtatacaacatgcaacgaagcaaaggaagtataccaagctccgacgacaattctttgagcaaaatggtggtggcatgttgatacagcgactttcaggagcagggttgtcaaacattgatttcaaaatctttactgaggaaggcatgaaagaggcaactaatggctatgatgagagcagaatcttgggccagggaggtcaaggaacagtctacaaagggatattgccggacaacactatcgttgctataaagaaagctcggcttgcagacagtagacaagtagatcagttcatccacgaagtgctcgtgctttcacaaattaaccacaggaacgtggtcaagatcttgggttgctgtctagagactgaagtccccttgttggtctatgaattcattaccaatggcacccttttcgatcacttgcacggttccatttttgattcttctcttacatgggaacaccgcctcagaatagcgatagaagtcgctggaactcttgcttatcttcactcctctgcttctattccaatcatccatcgcgatatcaaaactgcaaatattctcttggatgaaaacttaactgcaaaagtagccgactttggcgcttctaagcttataccaatggataaagagcagctcacaactatggtgcaaggcactctaggctatttagacccagaatactataccacagggcttctgaacgagaagagcgatgtgtatagctttggggtagtcctcatggaactgctctcaggtcaaaaggcattgtgctttgaacggccacaggcttcaaaacatttggtgagttactttgtttctgccacggaagagaataggttgcatgagattattgacgaccaagtgttgaacgaggataatctgaaggagatccaggaagctgcaagaattgctgcagagtgtacaaggctaatgggagaggaaaggccaaggatgaaagaagtagctgcaaagctagaagccttgagggtcgagaaaaccaaacataagtggtcggatcagtatcctgaggagaatgaacacttgattggtggtcacatcttgtctgcacaaggcgaaaccagtagcagcattggctatgatagcatcaaaaatgtagcaatattggacattgaaactggcactctaggctatttagacccagaatactataccacagggcttctgaacgagaagagcgatgtgtatagctttggggtagtcctcatggaactgctctcaggtcaaaaggcattgtgctttgaacggccacaggcttcaaaacatttggtgagttactttgtttctgccacggaagagaataggttgcatgagattattgacgaccaagtgttgaacgaggataatctgaaggagatccaggaagctgcaagaattgctgcagagtgtacaaggctaatgggaaaagaaaggccaaggatgaaagaagtagctgtagagctagaaactttgagcgtcaaaacaaccaaacataattggtcggatcagtatcgagaggagaatttacacttgcttggtagcaacatcgtgtcttcccaaggcgataccaatagccgtggttatgacagcgtcaagaatgtagcattgcttgacattgaagctggccgctga

SEQ ID NO: 86758 - protein, 902 aa, Arabidopsis thaliana
  peptide (1)..(902): Ceres Seq. ID no. 12693235
MKFQEGVFLVVIFFLAYTQLVKGQHQPREDCKLKCGNVTIEYPFGISTGCYYPGDDNFNLTCVVEEKLLLFGIIQVTNISHSGHVSVLFERFSECYEQKNETNGTALGYQLGSSFSLSSNNKFTLVGCNALSLLSTFGKQNYSTGCLSLCNSQPEANGRCNGVGCCTTEDFSVPFDSDTFQFGSVRLRNQVNNSLDLFNTSVYQFNPCTYAFLVEDGKFNFDSSKDLKNLRNVTRFPVALDWSIGNQTCEQAGSTRICGKNSSCYNSTTRNGYICKCNEGYDGNPYRSEGCKDIDECISDTHNCSDPKTCRNRDGGFDCKCPSGYDLNSSMSCTRPEYKRTRIFLVIIIGVLVLLLAAICIQHATKQRKYTKLRRQFFEQNGGGMLIQRLSGAGLSNIDFKIFTEEGMKEATNGYDESRILGQGGQGTVYKGILPDNTIVAIKKARLADSRQVDQFIHEVLVLSQINHRNVVKILGCCLETEVPLLVYEFITNGTLFDHLHGSIFDSSLTWEHRLRIAIEVAGTLAYLHSSASIPIIHRDIKTANILLDENLTAKVADFGASKLIPMDKEQLTTMVQGTLGYLDPEYYTTGLLNEKSDVYSFGVVLMELLSGQKALCFERPQASKHLVSYFVSATEENRLHEIIDDQVLNEDNLKEIQEAARIAAECTRLMGEERPRMKEVAAKLEALRVEKTKHKWSDQYPEENEHLIGGHILSAQGETSSSIGYDSIKNVAILDIETGTLGYLDPEYYTTGLLNEKSDVYSFGVVLMELLSGQKALCFERPQASKHLVSYFVSATEENRLHEIIDDQVLNEDNLKEIQEAARIAAECTRLMGKERPRMKEVAVELETLSVKTTKHNWSDQYREENLHLLGSNIVSSQGDTNSRGYDSVKNVALLDIEAGR

SEQ ID NO: 86759 - protein, 572 aa, Arabidopsis thaliana
  peptide (1)..(572): Ceres Seq. ID no. 12693236
MSCTRPEYKRTRIFLVIIIGVLVLLLAAICIQHATKQRKYTKLRRQFFEQNGGGMLIQRLSGAGLSNIDFKIFTEEGMKEATNGYDESRILGQGGQGTVYKGILPDNTIVAIKKARLADSRQVDQFIHEVLVLSQINHRNVVKILGCCLETEVPLLVYEFITNGTLFDHLHGSIFDSSLTWEHRLRIAIEVAGTLAYLHSSASIPIIHRDIKTANILLDENLTAKVADFGASKLIPMDKEQLTTMVQGTLGYLDPEYYTTGLLNEKSDVYSFGVVLMELLSGQKALCFERPQASKHLVSYFVSATEENRLHEIIDDQVLNEDNLKEIQEAARIAAECTRLMGEERPRMKEVAAKLEALRVEKTKHKWSDQYPEENEHLIGGHILSAQGETSSSIGYDSIKNVAILDIETGTLGYLDPEYYTTGLLNEKSDVYSFGVVLMELLSGQKALCFERPQASKHLVSYFVSATEENRLHEIIDDQVLNEDNLKEIQEAARIAAECTRLMGKERPRMKEVAVELETLSVKTTKHNWSDQYREENLHLLGSNIVSSQGDTNSRGYDSVKNVALLDIEAGR

SEQ ID NO: 86760 - protein, 518 aa, Arabidopsis thaliana
  peptide (1)..(518): Ceres Seq. ID no. 12693237
MLIQRLSGAGLSNIDFKIFTEEGMKEATNGYDESRILGQGGQGTVYKGILPDNTIVAIKKARLADSRQVDQFIHEVLVLSQINHRNVVKILGCCLETEVPLLVYEFITNGTLFDHLHGSIFDSSLTWEHRLRIAIEVAGTLAYLHSSASIPIIHRDIKTANILLDENLTAKVADFGASKLIPMDKEQLTTMVQGTLGYLDPEYYTTGLLNEKSDVYSFGVVLMELLSGQKALCFERPQASKHLVSYFVSATEENRLHEIIDDQVLNEDNLKEIQEAARIAAECTRLMGEERPRMKEVAAKLEALRVEKTKHKWSDQYPEENEHLIGGHILSAQGETSSSIGYDSIKNVAILDIETGTLGYLDPEYYTTGLLNEKSDVYSFGVVLMELLSGQKALCFERPQASKHLVSYFVSATEENRLHEIIDDQVLNEDNLKEIQEAARIAAECTRLMGKERPRMKEVAVELETLSVKTTKHNWSDQYREENLHLLGSNIVSSQGDTNSRGYDSVKNVALLDIEAGR

SEQ ID NO: 86761 - DNA, 2027 bp, Arabidopsis thaliana
  misc_feature (1)..(2027): Ceres Seq. ID no. 12693270
  misc_feature (1)..(2027): Ortholog of  Ceres SEQ ID NO 13594380 as cited in SEQ ID NO 58039
aggtgtgttgtgtttgagtgtctctctaggtaaacatggtagcagaagaagcaagaaaagaagccatggctaaatcagtatctggcgggaagattacttattttgtggtggcttcatgtgtcatggccgccatgggcggtgtcatcttcggctacgacatcggggtttcaggttcacatatatattcttgctaattaggatatatatgttctttcttttttttgtttgtgtttgtgtttgcgtttgcaaaaagaataaatcatatttttgaagtagaaaacattttagtttttcataatatttaaatgaaatgttgtggttctctaaacctaaacataaatgcaaacatgtaactatataaatatgtaggtggagtgatgtcaatggggccatttctaaaaagatttttcccaaaagtgtataagctccaagaagaagatagaagaagaagaggcaatagcaataaccactactgccttttcaatagccaacttcttacatccttcacatcttctctatacgtttccggtctcatcgctactctgttagcttcgtccgtgactcgttcatggggtcgcaagccctctatatttcttggcggtgtgtcctttctcgccggcgctgctcttggtggctctgctcaaaacgttgctatgctcattattgcgcgtctcttgctcggcgtaggagttggattcgctaaccaggtaacaaaagacaagttgattaatgatgtttcaattttctctgtatgttgactggtttgttgttttatattttagtcggttcctctgtatctctccgagatggcgccggcaaaatacagaggagcaatcagcaatggtttccagctctgtatcggaattggatttctatctgcaaatgtaataaactacgaaacccaaaatatcaaacatggttggagaatctctttagccacagctgcaatacctgcttcaatcctcactttaggatcactgtttctcccggaaacgccgaatagtatcatccagaccaccggagatgttcacaagaccgagcttatgcttcgccgtgtccgtggaactaacgacgttcaagatgagcttactgatctcgttgaagcgagttctggttctgatacagattcaaacgcgtttttgaaactgcttcaaagaaaatataggcctgagttagtgatggctttggtgatacctttctttcagcaagttactggaatcaatgttgttgctttctacgcaccggttttgtatagaaccgttgggtttggagagagtggttcgttgatgtcgaccctcgtgactggaatcgtgggaacctcgtcgacgttgttgtcgatgcttgtcgttgacagaatcggtagaaagactctgtttttgattggagggttacagatgctcgtgtcgcaagttaccattggtgtgatcgttatggtggctgatgttcacgacggtgtgatcaaggaagggtatggttacgcggttgtggttttggtgtgtgtctacgtggccgggtttggttggtcttggggtccattaggatggcttgtaccgagtgagatttttccgttggagataagatcggtggcgcagagtgtaactgtggcagtgagttttgtgtttacttttgcggtggctcaaagtgcaccaccgatgttgtgtaagtttcgagctgggattttcttcttttatggagggtggttggtggtaatgacggtagcggtgcagctgtttttgccggagactaagaatgttccaatcgagaaggtggttggactttgggagaagcattggttttggaggagaatgacgagcaagcgtgatatccaagaaaccaccattcttagccattgaaaacaataaaaaaaccagcacctcatgatttgagatgagacgcatcttttgttgccaaaaaaattattgcatataagttttaaaattttcaaagttcaaactaaattaaggatatttttttactattcacgtaacaataatcaaatcacatgatccaagattcgattattgttc

SEQ ID NO: 86762 - protein, 348 aa, Arabidopsis thaliana
  peptide (1)..(348): Ceres Seq. ID no. 12693271
MAPAKYRGAISNGFQLCIGIGFLSANVINYETQNIKHGWRISLATAAIPASILTLGSLFLPETPNSIIQTTGDVHKTELMLRRVRGTNDVQDELTDLVEASSGSDTDSNAFLKLLQRKYRPELVMALVIPFFQQVTGINVVAFYAPVLYRTVGFGESGSLMSTLVTGIVGTSSTLLSMLVVDRIGRKTLFLIGGLQMLVSQVTIGVIVMVADVHDGVIKEGYGYAVVVLVCVYVAGFGWSWGPLGWLVPSEIFPLEIRSVAQSVTVAVSFVFTFAVAQSAPPMLCKFRAGIFFFYGGWLVVMTVAVQLFLPETKNVPIEKVVGLWEKHWFWRRMTSKRDIQETTILSH

SEQ ID NO: 86763 - protein, 269 aa, Arabidopsis thaliana
  peptide (1)..(269): Ceres Seq. ID no. 12693272
MLRRVRGTNDVQDELTDLVEASSGSDTDSNAFLKLLQRKYRPELVMALVIPFFQQVTGINVVAFYAPVLYRTVGFGESGSLMSTLVTGIVGTSSTLLSMLVVDRIGRKTLFLIGGLQMLVSQVTIGVIVMVADVHDGVIKEGYGYAVVVLVCVYVAGFGWSWGPLGWLVPSEIFPLEIRSVAQSVTVAVSFVFTFAVAQSAPPMLCKFRAGIFFFYGGWLVVMTVAVQLFLPETKNVPIEKVVGLWEKHWFWRRMTSKRDIQETTILSH

SEQ ID NO: 86764 - protein, 224 aa, Arabidopsis thaliana
  peptide (1)..(224): Ceres Seq. ID no. 12693273
MALVIPFFQQVTGINVVAFYAPVLYRTVGFGESGSLMSTLVTGIVGTSSTLLSMLVVDRIGRKTLFLIGGLQMLVSQVTIGVIVMVADVHDGVIKEGYGYAVVVLVCVYVAGFGWSWGPLGWLVPSEIFPLEIRSVAQSVTVAVSFVFTFAVAQSAPPMLCKFRAGIFFFYGGWLVVMTVAVQLFLPETKNVPIEKVVGLWEKHWFWRRMTSKRDIQETTILSH

SEQ ID NO: 86765 - DNA, 1899 bp, Arabidopsis thaliana
  misc_feature (1)..(1899): Ceres Seq. ID no. 12693274
  misc_feature (1)..(1899): Ortholog of  Ceres SEQ ID NO 13594380 as cited in SEQ ID NO 58039
ttgagtgtctctctaggtaaacatggtagcagaagaagcaagaaaagaagccatggctaaatcagtatctggcgggaagattacttattttgtggtggcttcatgtgtcatggccgccatgggcggtgtcatcttcggctacgacatcggggtttcaggtggagtgatgtcaatggggccatttctaaaaagatttttcccaaaagtgtataagctccaagaagaagatagaagaagaagaggcaatagcaataaccactactgccttttcaatagccaacttcttacatccttcacatcttctctatacgtttccggtctcatcgctactctgttagcttcgtccgtgactcgttcatggggtcgcaagccctctatatttcttggcggtgtgtcctttctcgccggcgctgctcttggtggctctgctcaaaacgttgctatgctcattattgcgcgtctcttgctcggcgtaggagttggattcgctaaccagtcggttcctctgtatctctccgagatggcgccggcaaaatacagaggagcaatcagcaatggtttccagctctgtatcggaattggatttctatctgcaaatgtaataaactacgaaacccaaaatatcaaacatggttggagaatctctttagccacagctgcaatacctgcttcaatcctcactttaggatcactgtttctcccggaaacgccgaatagtatcatccagaccaccggagatgttcacaagaccgagcttatgcttcgccgtgtccgtggaactaacgacgttcaagatgagcttactgatctcgttgaagcgagttctggttctgatacagattcaaacgcgtttttgaaactgcttcaaagaaaatataggcctgagttagtgatggctttggtgatacctttctttcagcaagttactggaatcaatgttgttgctttctacgcaccggttttgtatagaaccgttgggtttggagagagtggttcgttgatgtcgaccctcgtgactggaatcgtgggaacctcgtcgacgttgttgtcgatgcttgtcgttgacagaatcggtagaaagactctgtttttgattggagggttacagatgctcgtgtcgcaagttaccattggtgtgatcgttatggtggctgatgttcacgacggtgtgatcaaggaagggtatggttacgcggttgtggttttggtgtgtgtctacgtggccgggtttggttggtcttggggtccattaggatggcttgtaccgagtgagatttttccgttggagataagatcggtggcgcagagtgtaactgtggcagtgagttttgtgtttacttttgcggtggctcaaagtgcaccaccgatgttgtgtaagtttcgagctgggattttcttcttttatggagggtggttggtggtaatgacggtagcggtgcagctgtttttgccggagactaagaatgttccaatcgagaaggtggttggactttgggagaagcattggttttggaggagaatgacgagcaagcgtgatatccaagaaaccaccattcttagccattgaaaacaataaaaaaaccagcacctcatgatttgagatgagacgcatcttttgttgccaaaaaaattattgcatataagttttaaaattttcaaagttcaaactaaattaaggatatttttttactattcacgtaacaataatcaaatcacatgatccaagattcgattattgttcaaattattttgtaaatttagccatagtttcattttttcacttatatgtttgtgaaataacgatttgtgtttggaattaaaattaggggtgttttataaatatagtaaaactaggatagtgataatgtaatatattgaacgttaaaggacaaagatggg

SEQ ID NO: 86766 - protein, 514 aa, Arabidopsis thaliana
  peptide (1)..(514): Ceres Seq. ID no. 12693275
MVAEEARKEAMAKSVSGGKITYFVVASCVMAAMGGVIFGYDIGVSGGVMSMGPFLKRFFPKVYKLQEEDRRRRGNSNNHYCLFNSQLLTSFTSSLYVSGLIATLLASSVTRSWGRKPSIFLGGVSFLAGAALGGSAQNVAMLIIARLLLGVGVGFANQSVPLYLSEMAPAKYRGAISNGFQLCIGIGFLSANVINYETQNIKHGWRISLATAAIPASILTLGSLFLPETPNSIIQTTGDVHKTELMLRRVRGTNDVQDELTDLVEASSGSDTDSNAFLKLLQRKYRPELVMALVIPFFQQVTGINVVAFYAPVLYRTVGFGESGSLMSTLVTGIVGTSSTLLSMLVVDRIGRKTLFLIGGLQMLVSQVTIGVIVMVADVHDGVIKEGYGYAVVVLVCVYVAGFGWSWGPLGWLVPSEIFPLEIRSVAQSVTVAVSFVFTFAVAQSAPPMLCKFRAGIFFFYGGWLVVMTVAVQLFLPETKNVPIEKVVGLWEKHWFWRRMTSKRDIQETTILSH

SEQ ID NO: 86767 - protein, 504 aa, Arabidopsis thaliana; identical to SEQ ID NO: 73783
  peptide (1)..(504): Ceres Seq. ID no. 12693276

SEQ ID NO: 86768 - protein, 485 aa, Arabidopsis thaliana; identical to SEQ ID NO: 73784
  peptide (1)..(485): Ceres Seq. ID no. 12693277

SEQ ID NO: 86769 - DNA, 1291 bp, Arabidopsis thaliana
  misc_feature (1)..(1291): Ceres Seq. ID no. 12693278
  misc_feature (1)..(1291): Ortholog of  Ceres SEQ ID NO 14316277 as cited in SEQ ID NO 57806
  misc_feature (1)..(1291): Ortholog of  Ceres SEQ ID NO 14309252 as cited in SEQ ID NO 0
ctacacgaattcgattctctcttatctcgacgagaaaaccctactgcgaaaaaactccgatctctctggcgagaagtaaatttttatctctgagcttggtttcaccatttctctatctctatctcctcgctgggttacggtttggtaaggtcagtgttctctaaggctgaaatttgggggtttctcagtctcgatgtggtcgtgctccgttaggattcttcacaatcattagggttatatttcttacaaactgatgctcattttctcttccctgtctatggctttatctgtgatccttcaaaagcttagtgtcttcggccctggtttgaatccttctttcccttactgcatcgccaatcactcctttgcctcccgttaattgagttgctctctttcaacttaattacattagtctgcttcctttgctgtctagtctggatagtgttgcaaatcaagtagtatcttctttagacattcttggctgagagatttacactaaaagcatagaataagaaacccctgtttggttagtatctacccgagtctcgtagtcctacacagatccggatcctagtttcgaagctagttcttgtttagctgaagctcagacccaaaatgctccaagaaccgtcggctgcattctccctccggcgtaactcattcagacgccgatctcccagatcaaatgtcgatgacagaggctggaatccgctccatatcaaagccagaaaaggcgatctgaaatctgtcaagcagcttctcgaccaaggaatggatgtgaatgctctagcatggggacccaaatcaaaaggagtgagtgcacttcaccttgcagcagagggaggtcacattgaagtcatggatttactcctagaacgtggggccaacattgatgctaaaacatggggctcatgcgggtggactcctctccacgctgcagccaaagagcggaagagagaagcagtgaagtttctggtggagaacggcgcattcttggcagatgatataactgataccaggtttaatccgccggtgcattactgtcacggccttgaatgggcgtacgaggaaatgaagaagcttaacagcgagtcttcttcttcatctggtggagacacatcttccagttctgacaactgaacttcttcttggttgtttctcggtgtgttttgttttgttttctagttgagactacttatcagaactattatggttggtgtttgatcttatgggctatgtgaaacattgaaactgcggatacattcatgtaatcttcagtgtgttattttgc

SEQ ID NO: 86770 - protein, 174 aa, Arabidopsis thaliana; identical to SEQ ID NO: 24022
  peptide (1)..(174): Ceres Seq. ID no. 12693279

SEQ ID NO: 86771 - protein, 122 aa, Arabidopsis thaliana; identical to SEQ ID NO: 24023
  peptide (1)..(122): Ceres Seq. ID no. 12693280

SEQ ID NO: 86772 - protein, 93 aa, Arabidopsis thaliana; identical to SEQ ID NO: 24024
  peptide (1)..(93): Ceres Seq. ID no. 12693281

SEQ ID NO: 86773 - DNA, 1162 bp, Arabidopsis thaliana
  misc_feature (1)..(1162): Ceres Seq. ID no. 12693291
  misc_feature (1)..(1162): Ortholog of  Ceres SEQ ID NO 13600141 as cited in SEQ ID NO 0
atagaacaatcaacaattacacttattttgctatcgtttgagcatctcaaaaatttctccggggagatttgtttgtatatatactcttccacaaagaagatgctcaaggtccctgaacaccaagttgctggtcacattgctagtgatgggaagctcggtccactcgtagatgaccaaggccggttcttcaagccacttcagggagattctcgtggcgaacacgaggctaagttctatgagtctttcacatcgaacatgaaggttccagatcacatccatagatacttcccggtgtatcacggcactcagctagttgaagcatctgatggatctggcaagcttcctcatcttgttcttgatgatgttgtttcagggtacgcaaacccgtcggtaatggatgttaagattggatctaggacatggtacccggatgtatcagaagaatacttcaagaaatgtattaagaaagatagacagaccaccacggtttcgttggggttcagggtttcaggttttaagatttttgatcaccaagaatcaagtttttggagagctgagaagaagcttgttcttgggtataatgcagatggtgctagattggctctgaggaagtttgtgtcatcgaactctcccgctgactctaacttgacaccaaactgtgcttttgcatcagaggtttatggcggttgtaacgggatcttagcgcagttgttggagcttaaagattggttcgaaacccaaacgctttaccatttcaattcctgctcgattctgatgatttacgagaatgaatcaatcttgatgcaaggaggagatgatgcaccggcaccacgggcacaagtgaagctggtggatttcgcgcatgttcttgatggaaacggtgtcatcgaccataatttcttgggtggactctgctctttcataaagttcatcaaagatattcttcagagcgttgaaaagcacgatgaaaccgatacttccctacttgagaacgggcgctagagaaacgtcgttcttcccggctccatttcaaataatctccaagtttttcctttcttggactagttgggttttggacatgaacgtttgtccctttcaattgtataatttcgttaactaaaccattgtactttctcattagagaaatatatcgagagtttca

SEQ ID NO: 86774 - protein, 333 aa, Arabidopsis thaliana; identical to SEQ ID NO: 30773
  peptide (1)..(333): Ceres Seq. ID no. 12693292

SEQ ID NO: 86775 - protein, 300 aa, Arabidopsis thaliana; identical to SEQ ID NO: 30774
  peptide (1)..(300): Ceres Seq. ID no. 12693293

SEQ ID NO: 86776 - protein, 248 aa, Arabidopsis thaliana; identical to SEQ ID NO: 30775
  peptide (1)..(248): Ceres Seq. ID no. 12693294

SEQ ID NO: 86777 - DNA, 767 bp, Arabidopsis thaliana
  misc_feature (1)..(767): Ceres Seq. ID no. 12693299
  misc_feature (1)..(767): Ortholog of  Ceres SEQ ID NO 13594962 as cited in SEQ ID NO 56140
  misc_feature (1)..(767): Ortholog of  Ceres SEQ ID NO 13598378 as cited in SEQ ID NO 62631
tccgcctccgtcatagaacgcagaactgggtggatcaccgtggtcgtcaaattcctagctcctcgactccaaaaaaaaatcataaacgtattaccgtctcttgttttcctcgtaaggtattatatcggtcgaagtctccaatcatcggtctgagtaatctctgacaatggctgcaagagttttggcaagtgtgattgtgatgggctctggaatcatagccagggcttgtactcaggcatatcgtcaggcgcttgcaaatgcatcaaaaaccggggttgcgcatgaagcgacacagactattaagagagggttgactataggtgaagcagaagctagacagattcttggtgtaactgagaaatcatcttgggacgagattcttaagaaatacgacacgttgttcgaacgcaatgcgcagaatggaagcttctatctccaatctaaggtccatagagctaaggaatgcttagagactgcataccagaagagtacaacaacaagcgcatgaacaagcaataaaacaataggagcaaatcaggaacatatcttttgatacaagttatagttttaggacagaagtttgaaattgagtggagatagccgcaaaagttgaaattgagacaaggtcggtgatggccggaatgctgccagtaaccgactcaccggcgttgttaaaagtcttgttattttgtttaataatattgacttttctagttcttaggtaaactagttgaattctagcatgtctattgaattatctgagtttg

SEQ ID NO: 86778 - protein, 113 aa, Arabidopsis thaliana; identical to SEQ ID NO: 42406
  peptide (1)..(113): Ceres Seq. ID no. 12693300

SEQ ID NO: 86779 - protein, 102 aa, Arabidopsis thaliana; identical to SEQ ID NO: 42407
  peptide (1)..(102): Ceres Seq. ID no. 12693301

SEQ ID NO: 86780 - DNA, 809 bp, Arabidopsis thaliana
  misc_feature (1)..(809): Ceres Seq. ID no. 12693313
  misc_feature (1)..(809): Ortholog of  Ceres SEQ ID NO 12474478 as cited in SEQ ID NO 96
actagaaaacatatcattatcacactttcataaagctcataacatacataaaaaatgggtgaatcttttagattattcaatcatcatcacttcctcacaacttttctcataatcatagccatgctcaaattggttcatacaacaacaacaacaactacaacaacaacaacaaacaccgagttcgtaaaatcatcatgcactttcacaacgtacccaagactctgtttctcttcactctcaactcatgctagtctcatccaaacaagccccaagctcatggctcatgcggctctcaacatcacattagcctcggctaaagtaacttcagcaatgatggtgcgtctctcgaatagtcggctcaagcctaaagaagtctcggccatgagagactgcgtcgaggagttaggtgacacgttggaggagcttaggaaatcgattggtgagatgtgtcagctaagtggctcgaactatgaagtttacataagcgatatacagacttgggtcagtgcggctttgacagatgtgaacacatgtactgacggatttgaaggagaagatatggacgggaaggttaaggttttggttagagggaggattttggttattgctcatttaacaagtaatgctttagctttgattaatcactttgcttctattcatggctaaagagagttatgataagtactgttagtttgttttttattgatttttctagtgattttgtgtgtataatgataatataatgtatgtgtctttatgattccagaatcaatatgtaacaaatgaagtgtttcatgaaaattgatttt

SEQ ID NO: 86781 - protein, 203 aa, Arabidopsis thaliana
  peptide (1)..(203): Ceres Seq. ID no. 12693314
MGESFRLFNHHHFLTTFLIIIAMLKLVHTTTTTTTTTTTNTEFVKSSCTFTTYPRLCFSSLSTHASLIQTSPKLMAHAALNITLASAKVTSAMMVRLSNSRLKPKEVSAMRDCVEELGDTLEELRKSIGEMCQLSGSNYEVYISDIQTWVSAALTDVNTCTDGFEGEDMDGKVKVLVRGRILVIAHLTSNALALINHFASIHG

SEQ ID NO: 86782 - protein, 181 aa, Arabidopsis thaliana
  peptide (1)..(181): Ceres Seq. ID no. 12693315
MLKLVHTTTTTTTTTTTNTEFVKSSCTFTTYPRLCFSSLSTHASLIQTSPKLMAHAALNITLASAKVTSAMMVRLSNSRLKPKEVSAMRDCVEELGDTLEELRKSIGEMCQLSGSNYEVYISDIQTWVSAALTDVNTCTDGFEGEDMDGKVKVLVRGRILVIAHLTSNALALINHFASIHG

SEQ ID NO: 86783 - protein, 129 aa, Arabidopsis thaliana; identical to SEQ ID NO: 26452
  peptide (1)..(129): Ceres Seq. ID no. 12693316

SEQ ID NO: 86784 - DNA, 1811 bp, Arabidopsis thaliana
  misc_feature (1)..(1811): Ceres Seq. ID no. 12693391
  misc_feature (1)..(1811): Ortholog of  Ceres SEQ ID NO 13598582 as cited in SEQ ID NO 65294
  misc_feature (1)..(1811): Ortholog of  Ceres SEQ ID NO 15176145 as cited in SEQ ID NO 0
aattcgatttggattgcagaaaaagaaaagaaaagaaaagactaaaaatttggacgataagcagaaaagagagaggagggcctctcgccctcttattaaaaccttgccttctccaaatctgaagatttctcaatcctaaaatcttttttttttcctctttctccgtttctttattttcggaatccaagatcgtgggtcgatcggtttttacacaatccgatcacgacccatctgctctttttcatcctattttgcttcccttgaggtaaatggaaatggaatcatgtaagctcttcatcggtggtatatcttgggaaaccagtgaagatcgtcttcgtgactattttcacagttttggtgaggttttagaggctgttattatgaaggatcgtgccactggccgtgctcgtggctttggtttcgttgtctttgctgatcctaatgttgctgaaagagtcgtcttgcttaaacatatcattgatggtaaaattgttgaggcaaagaaggctgttccaagagatgatcacgtagtatttaataaaagtaacagcagccttcagggatcacctggcccatcaaactccaagaagatctttgtgggaggtttggcatcatccgtgacagaggctgagttcaaaaagtattttgctcagtttgggatgatcactgatgttgtggtgatgtatgaccacagaacccagcggcctagaggctttgggttcatttcatatgactctgaggaagctgttgacaaagtactgcagaagacattccacgaactcaatggtaagatggtggaggtcaaactggctgttcctaaggatatggctctcaacacaatgcggaaccaaatgaatgtaaatagctttggcactagtagaatcagttcattactgaatgagtacacccagggattcagcccgagtccaatctctggttatggagtgaaacctgaagttaggtacagtccagcagtaggtaataggggaggattctcaccgtttggacatggatacggaatcgagctgaattttgagccaaaccagactcagaactacggttctggttccagtggaggctttggacgaccctttagccctggatatgctgcgagtctcggcaggttcggtagccaaatggagtcgggaggagctagtgttgggaacggttctgtcctaaatgcagcaccaaagaaccatttatggggaaatggtggtctaggttacatgtcaaactctccgatatcaagaagcagcttcagtggaaactctggaatgtcttcactaggcagcattggtgacaactggggaacagttgcacgtgcacgcagtagctaccacggtgagagaggaggtgtaggattagaagcaatgagaggagttcatgttggtggttacagcagcggctcaagcatcttggaggcagactctctgtacagcgactcgatgtggctttcgctgcctgcaaaggcagaggaaggattgggaatgggaccattggacttcatgtctagaggaccagctggatacatcaacaggcaaccaaacggaggaattgcagcttagagaagtgacaaatctataccatggagatcagatgattgcagaagagagtttttagaagaggaaaaaagtttattaaaaaaaaaaaaattattggtaccaaaaagcttaaagcttttatttactttttactattttgatttgttgttatagctttcttttcacccttttttctaatttggggttttgtttcttttgtttttatcgttaaagaaaaaagatgtaaacttgagtgatataaaaagagac

SEQ ID NO: 86785 - protein, 431 aa, Arabidopsis thaliana; identical to SEQ ID NO: 26118
  peptide (1)..(431): Ceres Seq. ID no. 12693392

SEQ ID NO: 86786 - protein, 429 aa, Arabidopsis thaliana; identical to SEQ ID NO: 26119
  peptide (1)..(429): Ceres Seq. ID no. 12693393

SEQ ID NO: 86787 - protein, 394 aa, Arabidopsis thaliana; identical to SEQ ID NO: 26120
  peptide (1)..(394): Ceres Seq. ID no. 12693394

SEQ ID NO: 86788 - DNA, 678 bp, Arabidopsis thaliana
  misc_feature (1)..(678): Ceres Seq. ID no. 12693399
  misc_feature (1)..(678): Ortholog of  Ceres SEQ ID NO 14316060 as cited in SEQ ID NO 52465
  misc_feature (1)..(678): Ortholog of  Ceres SEQ ID NO 13664032 as cited in SEQ ID NO 67527
atggaacgtggaggcttccatggctaccgcaagctgtccgtgaacaacaccactccttctccaccagagggcagtatgcgtcctccagaattcaaccagcctaacaaaaccagtaatggtggtgaggaggagtgcacggtgagggagcaagacaggttcatgcctattgccaacgtgatacggatcatgcggaggatcttacctgctcacgccaagatctcagatgactccaaggagacgatccaagagtgtgtttcggagtacatcagcttcataacaggggaggctaatgagcggtgccagcgggaacagcgcaagaccatcactgctgaggacgtcttgtgggcaatgagcaagctcggttttgatgactacatcgaacccctcacgttgtacctccaccgctacagagagttggaaggtgaaagaggggttagctgcagtgctgggtccgttagtatgaccaacggcttggtggtcaagaggcctaatgggaccatgaccgagtatggagcctacgggcctgtgccagggattcacatggcgcagtaccattatcgtcatcagaacgggtttgttttcagtggtaacgaacctaattctaagatgagtggttcatcttcaggagcaagtggcgccagagttgaagtatttccgactcaacaacataagtactga

SEQ ID NO: 86789 - protein, 225 aa, Arabidopsis thaliana
  peptide (1)..(225): Ceres Seq. ID no. 12693400
MERGGFHGYRKLSVNNTTPSPPEGSMRPPEFNQPNKTSNGGEEECTVREQDRFMPIANVIRIMRRILPAHAKISDDSKETIQECVSEYISFITGEANERCQREQRKTITAEDVLWAMSKLGFDDYIEPLTLYLHRYRELEGERGVSCSAGSVSMTNGLVVKRPNGTMTEYGAYGPVPGIHMAQYHYRHQNGFVFSGNEPNSKMSGSSSGASGARVEVFPTQQHKY

SEQ ID NO: 86790 - protein, 200 aa, Arabidopsis thaliana; identical to SEQ ID NO: 72879
  peptide (1)..(200): Ceres Seq. ID no. 12693401

SEQ ID NO: 86791 - protein, 172 aa, Arabidopsis thaliana; identical to SEQ ID NO: 72880
  peptide (1)..(172): Ceres Seq. ID no. 12693402

SEQ ID NO: 86792 - DNA, 1254 bp, Arabidopsis thaliana
  misc_feature (1)..(1254): Ceres Seq. ID no. 12693411
  misc_feature (1)..(1254): Ortholog of  Ceres SEQ ID NO 15170442 as cited in SEQ ID NO 52782
  misc_feature (1)..(1254): Ortholog of  Ceres SEQ ID NO 13596115 as cited in SEQ ID NO 68672
atgactctgacaatacgttttgacttgtgtagtttattgtatattcagtttaactctgtcacccgccgtgttcaaccttgctggttcagagttccacaggttggtatggttgccatcaacgatgggattctacttcgtaatcacatccacaggattctcaaagcatttccgtttaagaagtcccaaacttcggaacccttctctgtatcagcaaatcctcctccggtggtacaacaacatctgtctccggaggcattgtcggggcaaaaaactcagattggagctggtcaatcaaactggcatccccctgattgggcgattgagcctcgtgccggtgtctactctctggaagttgtgaaagacggccagatccttgatcggattcatctagatagacgaaggcatatcttcgggagacaacatcagacttgtgattttgtccttgatcatcagtctgtttcccgccagcatgccgcagttgttcctcacaagaatggcagcatctttgtgattgacttgggatcagctcatggtacgtttgttgcaaatgagaggttgactaaagatactcctgtagagcttgaagtgggtcaatccttacgatttgctgcctccacaagaatctaccttctgagaaagaacagtgaggctctcttttctcgccctccacctccagctgagattaagcttcctccacctcctgatgcttctgatgaggaagctgttgttgcttacaataccttgctgaatcgatatggtttaagcaatggagaatctggtggtatgttagggaaaaggaaagagaagaccggatcagaagcgggagtggctaagaggatgaagaaagtgagagtgagcttcagggatcaactaggaggagagctggctgagattgttggcatgtctgatggagcagacgtggaaacagagcctggtcctataaatgtcaaagaaggaagcctcgttgggaaatatgaatcactggtgcgagtgacactcatacccaaaggcaaagtgaaggaagagaaagcctttacaggaggaacaagaggaggtgtaacagatcgactccaggaagctatgaatatgttgaaacggggtccaaaaacagggatttacgatgacctttacggtggtgactcacttgccaaggctgttggtacgtcatgggcttctgtgagtcaaccagcagctgaaactgaatgtggaggggttggtgaagaagatgataacgacgatctgtttggtgactaa

SEQ ID NO: 86793 - protein, 417 aa, Arabidopsis thaliana
  peptide (1)..(417): Ceres Seq. ID no. 12693412
MTLTIRFDLCSLLYIQFNSVTRRVQPCWFRVPQVGMVAINDGILLRNHIHRILKAFPFKKSQTSEPFSVSANPPPVVQQHLSPEALSGQKTQIGAGQSNWHPPDWAIEPRAGVYSLEVVKDGQILDRIHLDRRRHIFGRQHQTCDFVLDHQSVSRQHAAVVPHKNGSIFVIDLGSAHGTFVANERLTKDTPVELEVGQSLRFAASTRIYLLRKNSEALFSRPPPPAEIKLPPPPDASDEEAVVAYNTLLNRYGLSNGESGGMLGKRKEKTGSEAGVAKRMKKVRVSFRDQLGGELAEIVGMSDGADVETEPGPINVKEGSLVGKYESLVRVTLIPKGKVKEEKAFTGGTRGGVTDRLQEAMNMLKRGPKTGIYDDLYGGDSLAKAVGTSWASVSQPAAETECGGVGEEDDNDDLFGD

SEQ ID NO: 86794 - protein, 382 aa, Arabidopsis thaliana
  peptide (1)..(382): Ceres Seq. ID no. 12693413
MVAINDGILLRNHIHRILKAFPFKKSQTSEPFSVSANPPPVVQQHLSPEALSGQKTQIGAGQSNWHPPDWAIEPRAGVYSLEVVKDGQILDRIHLDRRRHIFGRQHQTCDFVLDHQSVSRQHAAVVPHKNGSIFVIDLGSAHGTFVANERLTKDTPVELEVGQSLRFAASTRIYLLRKNSEALFSRPPPPAEIKLPPPPDASDEEAVVAYNTLLNRYGLSNGESGGMLGKRKEKTGSEAGVAKRMKKVRVSFRDQLGGELAEIVGMSDGADVETEPGPINVKEGSLVGKYESLVRVTLIPKGKVKEEKAFTGGTRGGVTDRLQEAMNMLKRGPKTGIYDDLYGGDSLAKAVGTSWASVSQPAAETECGGVGEEDDNDDLFGD

SEQ ID NO: 86795 - DNA, 2691 bp, Arabidopsis thaliana
  misc_feature (1)..(2691): Ceres Seq. ID no. 12693429
  misc_feature (1)..(2691): Ortholog of  Ceres SEQ ID NO 14309727 as cited in SEQ ID NO 1030
  misc_feature (1)..(2691): Ortholog of  Ceres SEQ ID NO 15224315 as cited in SEQ ID NO 66131
atgagacgaggcaattcaagtaacgaccatgaacttgggattctacgaggagctaactcggacaccaactcggacacggagagcatcgctagcgaccgtggtgcctttagcggtccgcttggccggcctaaacgtgcgtccaagaaaaacgcaagattcgccgacgatcttcccaagagaagcaatagtgttgctggcggccgtggtgatgacgatgagtacgtggagatcacgctagacatcagggacgactcggtggccgtccatagtgtccaacaagcagctggaggtggaggccacctggaggacccggagctagcccttcttacgaagaagactctcgagagcagcctcaacaacaccacctccttatctttcttccgaagcacctcctcacgcatcaagaacgcctcccgcgagctccgccgcgtgttctctagacgtccctccccggccgtgcggcggtttgaccgcacgagctccgcggccatccacgcactcaaaggtctcaagttcattgccaccaagacggccgcatggccggccgtcgaccaacgtttcgataaactctccgctgattccaacggcctcttactctctgccaagttttgggaatgcttaggaatgaataaggaatctaaagacttcgctgaccagctctttagagcattagctcgccggaataacgtctccggcgatgcaatcacaaaggaacaggtggacaaagatgaagatgggcgagtaacagaagaagaggtggctgagattattagtcttagtgcttctgcaaacaagctctcaaatattcaaaagcaagccaaagaatatgcggcactgataatggaagagttggacccagacaatgctgggtttattatgatcgaaaacttggaaatgttgctattacaagcaccaaaccagtcggtgcggatgggagacagcaggatacttagtcagatgttaagtcagaagcttagaccggcaaaagagagcaaccctttagtgagatggtcggagaaaatcaaatatttcatacttgacaattggcagagactatggataatgatgttatggcttggcatctgtggtggcctctttacttataaattcattcagtacaagaacaaagctgcctatggtgtcatgggttattgcgtttgtgtcgccaaaggaggcgccgagactctcaaattcaacatggctctcatattgttgcctgtttgtcgaaacaccatcacttggcttaggaacaagactaagcttggtactgtcgttccttttgatgatagtcttaacttccacaaggttattgcaagcgggatagtcgtcggtgttttactccatgcgggtgcccatttaacgtgtgattttccacgtttaattgccgcggatgaggacacctatgagccgatggaaaaatactttggggatcaaccgactagctactggtggtttgtgaaaggagtggaaggatggactggcattgtgatggttgtgctaatggctatagcctttacactcgcgacgccttggttccgacgtaacaagcttaacttacctaacttcctcaagaagcttaccggtttcaacgccttttggtacacccaccatttgttcatcattgtttatgctcttctcattgtccatggtatcaagctctacctcacaaagatttggtatcagaaaacgacatggatgtatcttgctgtacccatccttctatatgcatcggagaggctgctccgtgctttcagatcaagcatcaaaccggttaagatgatcaaggtggctgtttaccccgggaacgtgttgtctctacacatgacgaagccacaaggattcaaatacaaaagtggacagttcatgttggtgaactgccgagccgtatctccattcgaatggcatcctttctcaatcacatcagctcccggagacgattacctgagcgtacatatccgcactctcggtgactggacacgtaagctcaggaccgttttctccgaggtttgcaaacctcctaccgccggtaaaagcggtcttctccgagcagacggaggagatggaaacctcccgttcccgaaggtccttatcgacggtccatacggtgctcccgcacaagactacaagaaatacgacgtggtactcctcgtaggtctcggcattggagccacgcctatgatcagtatccttaaggacatcatcaacaacatgaaaggtcctgaccgcgacagcgacattgagaacaataacagtaacaacaatagtaaagggtttaagacaaggaaagcttatttctactgggtgactagggaacaaggatcattcgagtggttcaagggaataatggacgagatttcggagttagacgaggaaggaatcatcgagcttcacaattattgcacgagtgtgtacgaggaaggtgatgcaagagtggctctcattgccatgcttcagtcgttgcaacacgctaagaacggtgtggatgttgtgtcgggtacacgtgtcaagtcccacttcgctaaacctaactggagacaagtctacaagaagatcgctgttcaacatcccggcaaaagaataggagtcttctactgtggaatgccaggaatgataaaggaattaaaaaatctagctttggatttttctcgaaagacaactaccaagtttgacttccacaaagagaacttctag

SEQ ID NO: 86796 - protein, 896 aa, Arabidopsis thaliana
  peptide (1)..(896): Ceres Seq. ID no. 12693430
MRRGNSSNDHELGILRGANSDTNSDTESIASDRGAFSGPLGRPKRASKKNARFADDLPKRSNSVAGGRGDDDEYVEITLDIRDDSVAVHSVQQAAGGGGHLEDPELALLTKKTLESSLNNTTSLSFFRSTSSRIKNASRELRRVFSRRPSPAVRRFDRTSSAAIHALKGLKFIATKTAAWPAVDQRFDKLSADSNGLLLSAKFWECLGMNKESKDFADQLFRALARRNNVSGDAITKEQVDKDEDGRVTEEEVAEIISLSASANKLSNIQKQAKEYAALIMEELDPDNAGFIMIENLEMLLLQAPNQSVRMGDSRILSQMLSQKLRPAKESNPLVRWSEKIKYFILDNWQRLWIMMLWLGICGGLFTYKFIQYKNKAAYGVMGYCVCVAKGGAETLKFNMALILLPVCRNTITWLRNKTKLGTVVPFDDSLNFHKVIASGIVVGVLLHAGAHLTCDFPRLIAADEDTYEPMEKYFGDQPTSYWWFVKGVEGWTGIVMVVLMAIAFTLATPWFRRNKLNLPNFLKKLTGFNAFWYTHHLFIIVYALLIVHGIKLYLTKIWYQKTTWMYLAVPILLYASERLLRAFRSSIKPVKMIKVAVYPGNVLSLHMTKPQGFKYKSGQFMLVNCRAVSPFEWHPFSITSAPGDDYLSVHIRTLGDWTRKLRTVFSEVCKPPTAGKSGLLRADGGDGNLPFPKVLIDGPYGAPAQDYKKYDVVLLVGLGIGATPMISILKDIINNMKGPDRDSDIENNNSNNNSKGFKTRKAYFYWVTREQGSFEWFKGIMDEISELDEEGIIELHNYCTSVYEEGDARVALIAMLQSLQHAKNGVDVVSGTRVKSHFAKPNWRQVYKKIAVQHPGKRIGVFYCGMPGMIKELKNLALDFSRKTTTKFDFHKENF

SEQ ID NO: 86797 - protein, 688 aa, Arabidopsis thaliana
  peptide (1)..(688): Ceres Seq. ID no. 12693431
MNKESKDFADQLFRALARRNNVSGDAITKEQVDKDEDGRVTEEEVAEIISLSASANKLSNIQKQAKEYAALIMEELDPDNAGFIMIENLEMLLLQAPNQSVRMGDSRILSQMLSQKLRPAKESNPLVRWSEKIKYFILDNWQRLWIMMLWLGICGGLFTYKFIQYKNKAAYGVMGYCVCVAKGGAETLKFNMALILLPVCRNTITWLRNKTKLGTVVPFDDSLNFHKVIASGIVVGVLLHAGAHLTCDFPRLIAADEDTYEPMEKYFGDQPTSYWWFVKGVEGWTGIVMVVLMAIAFTLATPWFRRNKLNLPNFLKKLTGFNAFWYTHHLFIIVYALLIVHGIKLYLTKIWYQKTTWMYLAVPILLYASERLLRAFRSSIKPVKMIKVAVYPGNVLSLHMTKPQGFKYKSGQFMLVNCRAVSPFEWHPFSITSAPGDDYLSVHIRTLGDWTRKLRTVFSEVCKPPTAGKSGLLRADGGDGNLPFPKVLIDGPYGAPAQDYKKYDVVLLVGLGIGATPMISILKDIINNMKGPDRDSDIENNNSNNNSKGFKTRKAYFYWVTREQGSFEWFKGIMDEISELDEEGIIELHNYCTSVYEEGDARVALIAMLQSLQHAKNGVDVVSGTRVKSHFAKPNWRQVYKKIAVQHPGKRIGVFYCGMPGMIKELKNLALDFSRKTTTKFDFHKENF

SEQ ID NO: 86798 - protein, 616 aa, Arabidopsis thaliana
  peptide (1)..(616): Ceres Seq. ID no. 12693432
MEELDPDNAGFIMIENLEMLLLQAPNQSVRMGDSRILSQMLSQKLRPAKESNPLVRWSEKIKYFILDNWQRLWIMMLWLGICGGLFTYKFIQYKNKAAYGVMGYCVCVAKGGAETLKFNMALILLPVCRNTITWLRNKTKLGTVVPFDDSLNFHKVIASGIVVGVLLHAGAHLTCDFPRLIAADEDTYEPMEKYFGDQPTSYWWFVKGVEGWTGIVMVVLMAIAFTLATPWFRRNKLNLPNFLKKLTGFNAFWYTHHLFIIVYALLIVHGIKLYLTKIWYQKTTWMYLAVPILLYASERLLRAFRSSIKPVKMIKVAVYPGNVLSLHMTKPQGFKYKSGQFMLVNCRAVSPFEWHPFSITSAPGDDYLSVHIRTLGDWTRKLRTVFSEVCKPPTAGKSGLLRADGGDGNLPFPKVLIDGPYGAPAQDYKKYDVVLLVGLGIGATPMISILKDIINNMKGPDRDSDIENNNSNNNSKGFKTRKAYFYWVTREQGSFEWFKGIMDEISELDEEGIIELHNYCTSVYEEGDARVALIAMLQSLQHAKNGVDVVSGTRVKSHFAKPNWRQVYKKIAVQHPGKRIGVFYCGMPGMIKELKNLALDFSRKTTTKFDFHKENF

SEQ ID NO: 86799 - DNA, 1053 bp, Arabidopsis thaliana
  misc_feature (1)..(1053): Ceres Seq. ID no. 12693497
  misc_feature (1)..(1053): Ortholog of  Ceres SEQ ID NO 14314542 as cited in SEQ ID NO 52282
atgtctaccggagaagaaggtcacatggcgatggcagatagaggctctagaaagagaagagtcggcgttaagaaaggtactaaagcggcgaggaacaaaaagcaaaaatcaaaaccttctacttccgataggtttaaggttacaatgaagaatcaaaagctatttcagaagagagcacgagattacaattccgatgacgatgaagaagaagatgatgaatcgaagaaacaaccagaagtaacaattcgtgagaagatcttctctgatgctaacatgggaccaaattacgaagagattggagaagaagataatgatgagaattcagatggtgaagatcatggagagattgaatctggaatcactaagtttgctactgatggatgtaatgctttcaaaatcgcttttaaagctattatgaagaagactaaaggagatgatacattgggcccagttttatcagcacataagcatcttattggagagaagctagctgaagatgaagctgaaaagaaagctaaaggtcaagctagaaaggctaaacatttgatgatgatttatcttaacaattgcttttttaagattgctgagaagggacatgttaaacctggaagttatttggattctcatgaaaagattcttattggtgttgctactaaaggagtggtcaagcttttcaatgctgtcaacaaggctcaacatgctcagaagggtttgaatccttcaaggtctaaagacgctaaagtgctgaagaagcgaagaaaagaagcattcttgtctgagttagggaaaacaaaaacagacaccaagccttcaactttggatgaacatagaagcaagttagtattctgtcttgagctggcttctatagagaaaggatcaccttcagtagcgagagccgctcacaaatctgaagacgaagctcctgtttgggctcctctacgagataattacatgttagcaaacccaaaactgaaggactgggacaagaaacaggaaacaagcgagggagatgattttgccggtttgtcaggagatgaaagttatgaagactga

SEQ ID NO: 86800 - protein, 350 aa, Arabidopsis thaliana
  peptide (1)..(350): Ceres Seq. ID no. 12693498
MSTGEEGHMAMADRGSRKRRVGVKKGTKAARNKKQKSKPSTSDRFKVTMKNQKLFQKRARDYNSDDDEEEDDESKKQPEVTIREKIFSDANMGPNYEEIGEEDNDENSDGEDHGEIESGITKFATDGCNAFKIAFKAIMKKTKGDDTLGPVLSAHKHLIGEKLAEDEAEKKAKGQARKAKHLMMIYLNNCFFKIAEKGHVKPGSYLDSHEKILIGVATKGVVKLFNAVNKAQHAQKGLNPSRSKDAKVLKKRRKEAFLSELGKTKTDTKPSTLDEHRSKLVFCLELASIEKGSPSVARAAHKSEDEAPVWAPLRDNYMLANPKLKDWDKKQETSEGDDFAGLSGDESYED

SEQ ID NO: 86801 - protein, 342 aa, Arabidopsis thaliana
  peptide (1)..(342): Ceres Seq. ID no. 12693499
MAMADRGSRKRRVGVKKGTKAARNKKQKSKPSTSDRFKVTMKNQKLFQKRARDYNSDDDEEEDDESKKQPEVTIREKIFSDANMGPNYEEIGEEDNDENSDGEDHGEIESGITKFATDGCNAFKIAFKAIMKKTKGDDTLGPVLSAHKHLIGEKLAEDEAEKKAKGQARKAKHLMMIYLNNCFFKIAEKGHVKPGSYLDSHEKILIGVATKGVVKLFNAVNKAQHAQKGLNPSRSKDAKVLKKRRKEAFLSELGKTKTDTKPSTLDEHRSKLVFCLELASIEKGSPSVARAAHKSEDEAPVWAPLRDNYMLANPKLKDWDKKQETSEGDDFAGLSGDESYED

SEQ ID NO: 86802 - protein, 340 aa, Arabidopsis thaliana
  peptide (1)..(340): Ceres Seq. ID no. 12693500
MADRGSRKRRVGVKKGTKAARNKKQKSKPSTSDRFKVTMKNQKLFQKRARDYNSDDDEEEDDESKKQPEVTIREKIFSDANMGPNYEEIGEEDNDENSDGEDHGEIESGITKFATDGCNAFKIAFKAIMKKTKGDDTLGPVLSAHKHLIGEKLAEDEAEKKAKGQARKAKHLMMIYLNNCFFKIAEKGHVKPGSYLDSHEKILIGVATKGVVKLFNAVNKAQHAQKGLNPSRSKDAKVLKKRRKEAFLSELGKTKTDTKPSTLDEHRSKLVFCLELASIEKGSPSVARAAHKSEDEAPVWAPLRDNYMLANPKLKDWDKKQETSEGDDFAGLSGDESYED

SEQ ID NO: 86803 - DNA, 999 bp, Arabidopsis thaliana
  misc_feature (1)..(999): Ceres Seq. ID no. 12693731
  misc_feature (1)..(999): Ortholog of  Ceres SEQ ID NO 13598527 as cited in SEQ ID NO 64914
atggtgacagacttcaaatccctactaccagttatcgacatcagtcctttactggccaaatgtgatgatttcgacatggctgaggatgcgggggttgtggaagtagtcggaaaactggacagggcatgtcgggacgtcggattcttctacgtgattggtcatggaatatcggatgatcttataaataaggtgaaagagatgacgcatcagttcttcgagcttccttacgaggagaaacttaagatcaagattactccaactgctggatacagaggataccaaagaattggagtaaattttacgagtgggaaacaagatatgcacgaagccattgattgttacagagagttcaagcaagggaaacatggggacatcggaaaggtcttggaagggccaaaccagtggccaggaaatcctcaagagtacaaagatttaatggagaagtatattaagctgtgcacagatctttctagaaatatcttaaggggaatctcattagcccttggtggatcaccttatgagtttgagggaaagatgcttagagaccctttttgggtaatgcgtatcattggttatccaggtgtaaaccaagaaaatgttattggatgtggagctcacactgactatggcttgttgacgcttataaatcaagatgatgataaaactgctcttcaggtgaaaaacgtggacggtgattggataccagctattccgatccctggatcatttatctgcaacatcggtgacatgttaacgatactatcaaacggagtttaccaatccacactacataaagtaatcaataactctcctaaataccgtgtatgtgttgcatttttctacgagactaacttcgaggcggaggtagagccacttgatatctttaaagagaagcatccacgaaaagaaacatctcaagttgccaaaagagtcgtctatggacagcatctgattaacaaagtcctgacaacctttgcaaatttagtggaaaacagttaa

SEQ ID NO: 86804 - protein, 332 aa, Arabidopsis thaliana
  peptide (1)..(332): Ceres Seq. ID no. 12693732
MVTDFKSLLPVIDISPLLAKCDDFDMAEDAGVVEVVGKLDRACRDVGFFYVIGHGISDDLINKVKEMTHQFFELPYEEKLKIKITPTAGYRGYQRIGVNFTSGKQDMHEAIDCYREFKQGKHGDIGKVLEGPNQWPGNPQEYKDLMEKYIKLCTDLSRNILRGISLALGGSPYEFEGKMLRDPFWVMRIIGYPGVNQENVIGCGAHTDYGLLTLINQDDDKTALQVKNVDGDWIPAIPIPGSFICNIGDMLTILSNGVYQSTLHKVINNSPKYRVCVAFFYETNFEAEVEPLDIFKEKHPRKETSQVAKRVVYGQHLINKVLTTFANLVENS

SEQ ID NO: 86805 - protein, 307 aa, Arabidopsis thaliana
  peptide (1)..(307): Ceres Seq. ID no. 12693733
MAEDAGVVEVVGKLDRACRDVGFFYVIGHGISDDLINKVKEMTHQFFELPYEEKLKIKITPTAGYRGYQRIGVNFTSGKQDMHEAIDCYREFKQGKHGDIGKVLEGPNQWPGNPQEYKDLMEKYIKLCTDLSRNILRGISLALGGSPYEFEGKMLRDPFWVMRIIGYPGVNQENVIGCGAHTDYGLLTLINQDDDKTALQVKNVDGDWIPAIPIPGSFICNIGDMLTILSNGVYQSTLHKVINNSPKYRVCVAFFYETNFEAEVEPLDIFKEKHPRKETSQVAKRVVYGQHLINKVLTTFANLVENS

SEQ ID NO: 86806 - protein, 266 aa, Arabidopsis thaliana
  peptide (1)..(266): Ceres Seq. ID no. 12693734
MTHQFFELPYEEKLKIKITPTAGYRGYQRIGVNFTSGKQDMHEAIDCYREFKQGKHGDIGKVLEGPNQWPGNPQEYKDLMEKYIKLCTDLSRNILRGISLALGGSPYEFEGKMLRDPFWVMRIIGYPGVNQENVIGCGAHTDYGLLTLINQDDDKTALQVKNVDGDWIPAIPIPGSFICNIGDMLTILSNGVYQSTLHKVINNSPKYRVCVAFFYETNFEAEVEPLDIFKEKHPRKETSQVAKRVVYGQHLINKVLTTFANLVENS

SEQ ID NO: 86807 - DNA, 2043 bp, Arabidopsis thaliana
  misc_feature (1)..(2043): Ceres Seq. ID no. 12693742
  misc_feature (1)..(2043): Ortholog of  Ceres SEQ ID NO 12586556 as cited in SEQ ID NO 64667
  misc_feature (1)..(2043): Ortholog of  Ceres SEQ ID NO 13660894 as cited in SEQ ID NO 67475
atgaatcagacgccatggaagttcaaaacttttcgagaccttctactgaaatctgtagcggagagagatctcttcactgggaaatcacttcacgcgctctacgtgaaatccattgtagcttcgtccacttatctctcaaatcacttcgtgaatctctactccaaatgtggtcgcctttcctacgcacgagccgcgttctactccacggaagaacccaatgtcttctcttacaatgtaattgtcaaagcttacgcgaaagattcgaaaatccatattgcacgccagttgttcgacgaaattccccaaccagacactgtctcttacaatactcttatctcggggtacgctgatgctagagaaacttttgccgcaatggttctgtttaagagaatgagaaaattgggatttgaggttgatgggtttacgttatcagggttgatagcagcttgttgtgaccgtgttgatttgataaagcagcttcactgtttctctgtctcgggagggtttgattcgtactcgtctgtgaataacgcgtttgttacgtattatagtaaaggcgggcttttgagagaggcggtatcggtgttttatgggatggatgaattaagagatgaagtttcgtggaattcgatgattgtggcttatgggcagcacaaggaaggagcaaaggcattagctttgtataaagaaatgatctttaaaggattcaagattgatatgtttacattggcaagtgttttaaatgctctcactagcttggatcatttgatcggtggccgtcagttccacggtaagctgatcaaggctggatttcaccagaactcacatgtgggaagtggtttgattgatttttactcaaaatgcgggggttgtgatggtatgtatgatagtgagaaggtatttcaagagattctatcttttgtctgtgtcacaagcgcttgctcgaatctctcctctccttctcagtgcaagcagattcatggcttggcgatcaaatctcacatcccttcgaatagaatctctgtgaacaacgcgttgatttcgttgtattacaaaagcggaaacctgcaagacgcaaggtgggtatttgatagaatgccggaacttaatgcggtatctttcaattgtatgatcaaaggttatgcgcagcacgggcatggaacagaagctttgcttttataccaacggatgctggactcgggtattgcgcctaacaagataacctttgtagccgttctttctgcttgtgcgcactgtggtaaggtcgacgagggtcaggagtacttcaacaccatgaaggagacgttcaagatcgaaccagaggctgagcactattcttgtatgattgatcttttaggccgagcagggaagctagaagaggcagagagattcatagatgcaatgccttataagccaggctctgttgcttgggctgctttgctcggggcttgtaggaaacacaaaaacatggctcttgcagagagagcagctaatgagcttatggtgatgcaaccattagctgccacgccatatgtgatgctagcaaacatgtatgcagatgccaggaaatgggaagagatggcctcggtgaggaaatcaatgagggggaaaaggataaggaagaaaccgggatgtagttggatcgaagtgaagaagaaaaagcatgtattcgtcgcagaagattggtctcatccgatgatacgagaagtgaatgaatatctagaggagatgatgaagaagatgaagaaagttgggtatgtgatggataagaaatgggcaatggtaaaagaggatgaagcaggcgaaggggacgaagaaatgcggttaggacatcacagcgagaagctagcggtggcttttgggttgatgtcgactagagatggagaagaattagttgtagttaagaatttgaggatatgtggggattgtcacaatgctatcaagtttatgtctgcggttgcaggtagagagatcattgtaagagataaccttcggtttcattgcttcaaagatggcaagtgttcatgtggggattattggtga

SEQ ID NO: 86808 - protein, 680 aa, Arabidopsis thaliana
  peptide (1)..(680): Ceres Seq. ID no. 12693743
MNQTPWKFKTFRDLLLKSVAERDLFTGKSLHALYVKSIVASSTYLSNHFVNLYSKCGRLSYARAAFYSTEEPNVFSYNVIVKAYAKDSKIHIARQLFDEIPQPDTVSYNTLISGYADARETFAAMVLFKRMRKLGFEVDGFTLSGLIAACCDRVDLIKQLHCFSVSGGFDSYSSVNNAFVTYYSKGGLLREAVSVFYGMDELRDEVSWNSMIVAYGQHKEGAKALALYKEMIFKGFKIDMFTLASVLNALTSLDHLIGGRQFHGKLIKAGFHQNSHVGSGLIDFYSKCGGCDGMYDSEKVFQEILSFVCVTSACSNLSSPSQCKQIHGLAIKSHIPSNRISVNNALISLYYKSGNLQDARWVFDRMPELNAVSFNCMIKGYAQHGHGTEALLLYQRMLDSGIAPNKITFVAVLSACAHCGKVDEGQEYFNTMKETFKIEPEAEHYSCMIDLLGRAGKLEEAERFIDAMPYKPGSVAWAALLGACRKHKNMALAERAANELMVMQPLAATPYVMLANMYADARKWEEMASVRKSMRGKRIRKKPGCSWIEVKKKKHVFVAEDWSHPMIREVNEYLEEMMKKMKKVGYVMDKKWAMVKEDEAGEGDEEMRLGHHSEKLAVAFGLMSTRDGEELVVVKNLRICGDCHNAIKFMSAVAGREIIVRDNLRFHCFKDGKCSCGDYW

SEQ ID NO: 86809 - protein, 556 aa, Arabidopsis thaliana
  peptide (1)..(556): Ceres Seq. ID no. 12693744
MVLFKRMRKLGFEVDGFTLSGLIAACCDRVDLIKQLHCFSVSGGFDSYSSVNNAFVTYYSKGGLLREAVSVFYGMDELRDEVSWNSMIVAYGQHKEGAKALALYKEMIFKGFKIDMFTLASVLNALTSLDHLIGGRQFHGKLIKAGFHQNSHVGSGLIDFYSKCGGCDGMYDSEKVFQEILSFVCVTSACSNLSSPSQCKQIHGLAIKSHIPSNRISVNNALISLYYKSGNLQDARWVFDRMPELNAVSFNCMIKGYAQHGHGTEALLLYQRMLDSGIAPNKITFVAVLSACAHCGKVDEGQEYFNTMKETFKIEPEAEHYSCMIDLLGRAGKLEEAERFIDAMPYKPGSVAWAALLGACRKHKNMALAERAANELMVMQPLAATPYVMLANMYADARKWEEMASVRKSMRGKRIRKKPGCSWIEVKKKKHVFVAEDWSHPMIREVNEYLEEMMKKMKKVGYVMDKKWAMVKEDEAGEGDEEMRLGHHSEKLAVAFGLMSTRDGEELVVVKNLRICGDCHNAIKFMSAVAGREIIVRDNLRFHCFKDGKCSCGDYW

SEQ ID NO: 86810 - protein, 550 aa, Arabidopsis thaliana
  peptide (1)..(550): Ceres Seq. ID no. 12693745
MRKLGFEVDGFTLSGLIAACCDRVDLIKQLHCFSVSGGFDSYSSVNNAFVTYYSKGGLLREAVSVFYGMDELRDEVSWNSMIVAYGQHKEGAKALALYKEMIFKGFKIDMFTLASVLNALTSLDHLIGGRQFHGKLIKAGFHQNSHVGSGLIDFYSKCGGCDGMYDSEKVFQEILSFVCVTSACSNLSSPSQCKQIHGLAIKSHIPSNRISVNNALISLYYKSGNLQDARWVFDRMPELNAVSFNCMIKGYAQHGHGTEALLLYQRMLDSGIAPNKITFVAVLSACAHCGKVDEGQEYFNTMKETFKIEPEAEHYSCMIDLLGRAGKLEEAERFIDAMPYKPGSVAWAALLGACRKHKNMALAERAANELMVMQPLAATPYVMLANMYADARKWEEMASVRKSMRGKRIRKKPGCSWIEVKKKKHVFVAEDWSHPMIREVNEYLEEMMKKMKKVGYVMDKKWAMVKEDEAGEGDEEMRLGHHSEKLAVAFGLMSTRDGEELVVVKNLRICGDCHNAIKFMSAVAGREIIVRDNLRFHCFKDGKCSCGDYW

SEQ ID NO: 86811 - DNA, 1824 bp, Arabidopsis thaliana
  misc_feature (1)..(1824): Ceres Seq. ID no. 12693766
  misc_feature (1)..(1824): Ortholog of  Ceres SEQ ID NO 15175269 as cited in SEQ ID NO 63840
  misc_feature (1)..(1824): Ortholog of  Ceres SEQ ID NO 15176141 as cited in SEQ ID NO 0
atgagtgactcatcatcagtcattgtccgaagctcaaatttcattgtcgtgattctcttcctcaacctcgtcactttcttctcccttgtctcctccaatgaacttgtctttgctgtgggtgaaactggttcactacaagtgactccaagaacagaggtgatatattcacctggtctgaaacgaggtataacatcgatatgtgagagattacatatccatggattacaaagaagacttgagcacattgatagatatgcacattcactaaagttgactcttttgagtaataatgcttccaacagtatcgacgtttgcttccacaggaattcgtcgcgtgcaattggaatgtgtcctgataatcagtggaagagagtgtccaaagggttaccttgggttgggataatgtcaccttttgactataagattcttgatataagaacatttggtggctcatctaatgtcagcaccgtggagttggttgctaaacaagagtttttcatataccggattgtgtttttaatcatggggatagtgttactgagtttggcttctagacttagcaaatcagttgcgttttactatatcggtgcaatgtctattgggattgtcattcttgtaactcttatcattaatcaggggataaagcgtctaccaactagagggaagagtcgttttcagttatttttctactcgtctatgatagaaatcagtgaagatttgtacatccctctggcgattcttttggttgtgtttgtatttatgttgggagcgtggtcaggattttggactgtcaagaaatttgttgtgacaaaagatggttctgttgacattagtacatcaatctttgtctcttggtccatccgagcttttgctgtggctctgatccttcagagctctttagatccattacttgctggaggagcgttgataactggaattctcatctcattgattctaaagagtattagcagaaagctgttagctcaaagaatatatgagcaagatgatgaaactgagagttgtagccccggcttgatccatgctacctcgtttgcttctcctcttcctagaggttccaacaagaagttgaggacagtaccattatctgagtcagatatctttccttcttcattccacaaaacaccagaagggagaaggaagctaacgaaggaagagttgcaaaaattcactaaagagagcacggaaaatgcattgaaggaattggtttcttcacctggttttggcgaatgggcggtgaaaaatgctaaaagaatcactgtaaatccgataaaggaatcgtcaaaagaaggttcctctggttctgaaaagcaagcagctaggggaacttctgaaccagtcggagagtgtacgaagaaaaagaagcaaagagttcgttataaagaaagaaataaaccctcagataagagcataacagagaagaagaagaagatgtcttatcaagacccacaacatcccgttagtgctcctcctcctcaagggtatcctcctaaggaaggatatccaccagcagggtatcctccaccagcaggttatcctccaccacaatatcctcaagcgggatatcctccagcaggttatcctccaccgcagcaaggatacggtcaaggatatccagcacaaggctatcctccaccgcaatatcctcaaggtcatccaccacaatatccttatcaaggtcctccaccaccgcattatggtcaggctccaccgaaaaataagaaagataagaaggattcaggaggcttcatggaaggatgtttggctatgctctgctgttgcgttctcttggaagcttgcttttga

SEQ ID NO: 86812 - protein, 607 aa, Arabidopsis thaliana
  peptide (1)..(607): Ceres Seq. ID no. 12693767
MSDSSSVIVRSSNFIVVILFLNLVTFFSLVSSNELVFAVGETGSLQVTPRTEVIYSPGLKRGITSICERLHIHGLQRRLEHIDRYAHSLKLTLLSNNASNSIDVCFHRNSSRAIGMCPDNQWKRVSKGLPWVGIMSPFDYKILDIRTFGGSSNVSTVELVAKQEFFIYRIVFLIMGIVLLSLASRLSKSVAFYYIGAMSIGIVILVTLIINQGIKRLPTRGKSRFQLFFYSSMIEISEDLYIPLAILLVVFVFMLGAWSGFWTVKKFVVTKDGSVDISTSIFVSWSIRAFAVALILQSSLDPLLAGGALITGILISLILKSISRKLLAQRIYEQDDETESCSPGLIHATSFASPLPRGSNKKLRTVPLSESDIFPSSFHKTPEGRRKLTKEELQKFTKESTENALKELVSSPGFGEWAVKNAKRITVNPIKESSKEGSSGSEKQAARGTSEPVGECTKKKKQRVRYKERNKPSDKSITEKKKKMSYQDPQHPVSAPPPQGYPPKEGYPPAGYPPPAGYPPPQYPQAGYPPAGYPPPQQGYGQGYPAQGYPPPQYPQGHPPQYPYQGPPPPHYGQAPPKNKKDKKDSGGFMEGCLAMLCCCVLLEACF

SEQ ID NO: 86813 - protein, 492 aa, Arabidopsis thaliana
  peptide (1)..(492): Ceres Seq. ID no. 12693768
MCPDNQWKRVSKGLPWVGIMSPFDYKILDIRTFGGSSNVSTVELVAKQEFFIYRIVFLIMGIVLLSLASRLSKSVAFYYIGAMSIGIVILVTLIINQGIKRLPTRGKSRFQLFFYSSMIEISEDLYIPLAILLVVFVFMLGAWSGFWTVKKFVVTKDGSVDISTSIFVSWSIRAFAVALILQSSLDPLLAGGALITGILISLILKSISRKLLAQRIYEQDDETESCSPGLIHATSFASPLPRGSNKKLRTVPLSESDIFPSSFHKTPEGRRKLTKEELQKFTKESTENALKELVSSPGFGEWAVKNAKRITVNPIKESSKEGSSGSEKQAARGTSEPVGECTKKKKQRVRYKERNKPSDKSITEKKKKMSYQDPQHPVSAPPPQGYPPKEGYPPAGYPPPAGYPPPQYPQAGYPPAGYPPPQQGYGQGYPAQGYPPPQYPQGHPPQYPYQGPPPPHYGQAPPKNKKDKKDSGGFMEGCLAMLCCCVLLEACF

SEQ ID NO: 86814 - protein, 473 aa, Arabidopsis thaliana
  peptide (1)..(473): Ceres Seq. ID no. 12693769
MSPFDYKILDIRTFGGSSNVSTVELVAKQEFFIYRIVFLIMGIVLLSLASRLSKSVAFYYIGAMSIGIVILVTLIINQGIKRLPTRGKSRFQLFFYSSMIEISEDLYIPLAILLVVFVFMLGAWSGFWTVKKFVVTKDGSVDISTSIFVSWSIRAFAVALILQSSLDPLLAGGALITGILISLILKSISRKLLAQRIYEQDDETESCSPGLIHATSFASPLPRGSNKKLRTVPLSESDIFPSSFHKTPEGRRKLTKEELQKFTKESTENALKELVSSPGFGEWAVKNAKRITVNPIKESSKEGSSGSEKQAARGTSEPVGECTKKKKQRVRYKERNKPSDKSITEKKKKMSYQDPQHPVSAPPPQGYPPKEGYPPAGYPPPAGYPPPQYPQAGYPPAGYPPPQQGYGQGYPAQGYPPPQYPQGHPPQYPYQGPPPPHYGQAPPKNKKDKKDSGGFMEGCLAMLCCCVLLEACF

SEQ ID NO: 86815 - DNA, 942 bp, Arabidopsis thaliana
  misc_feature (1)..(942): Ceres Seq. ID no. 12693772
  misc_feature (1)..(942): Ortholog of  Ceres SEQ ID NO 15176678 as cited in SEQ ID NO 59743
  misc_feature (1)..(942): Ortholog of  Ceres SEQ ID NO 15173314 as cited in SEQ ID NO 60298
acgcagttcacggtaagacatagaaacaaagtagagagatttcacggcgacggtattggaatggctaaacgggagttaagtggaggagatagcagcagcgaagatgaagatcccaagtggagagctgcaatcaattcgatagccaccaccaccgtttacggcgcctccgccacgaaacccgcagctactcagtcacataactatggagattttcgtctcaaacctaaaaaactaacacatgggcaaatcaaggtgaagaatcttttgaatgaaatggtggagaagactttagactttgttgaagatcctgtcaatattcctgaggataaacccgagaatgactgtggagttcggttatttaagcggtgtgctactggcattgtatttgatcatgtagatgagattagaggacctaaaaagaagcctaatttacgccctgacaaaggagttgaaggaagctctaaagagtttaagaaacgagtaaaatcaattgctgttgatggttcggatattttaactgctgctgtggaagcggcgaagaaagcctcggctagattagatgcgaaagaagtggcagcgaaagataaagctaagaaagaggaagagagaatcgcagagttgaagaaagtaagaggagaaaaatggttaccttctattgaaagggcaatgaaaaaggaaatgaagcgtatcaaacataccgcatggaagtctgcaatgtcgtgagctttcttcttttgaacttattatcaattttggagtctcattaattgaagaagaaacacagaatcattcactcttggctacaaaacttttactgaaagaagattatgaaattattatgtagagtagagagagattatttgttcttaatgtagtgagagtgaagttcttcagagatgttgtcatcattgtcgtctttgatccagacgaagtcttctaatc

SEQ ID NO: 86816 - protein, 240 aa, Arabidopsis thaliana
  peptide (1)..(240): Ceres Seq. ID no. 12693773
TQFTVRHRNKVERFHGDGIGMAKRELSGGDSSSEDEDPKWRAAINSIATTTVYGASATKPAATQSHNYGDFRLKPKKLTHGQIKVKNLLNEMVEKTLDFVEDPVNIPEDKPENDCGVRLFKRCATGIVFDHVDEIRGPKKKPNLRPDKGVEGSSKEFKKRVKSIAVDGSDILTAAVEAAKKASARLDAKEVAAKDKAKKEEERIAELKKVRGEKWLPSIERAMKKEMKRIKHTAWKSAMS

SEQ ID NO: 86817 - protein, 220 aa, Arabidopsis thaliana
  peptide (1)..(220): Ceres Seq. ID no. 12693774
MAKRELSGGDSSSEDEDPKWRAAINSIATTTVYGASATKPAATQSHNYGDFRLKPKKLTHGQIKVKNLLNEMVEKTLDFVEDPVNIPEDKPENDCGVRLFKRCATGIVFDHVDEIRGPKKKPNLRPDKGVEGSSKEFKKRVKSIAVDGSDILTAAVEAAKKASARLDAKEVAAKDKAKKEEERIAELKKVRGEKWLPSIERAMKKEMKRIKHTAWKSAMS

SEQ ID NO: 86818 - protein, 149 aa, Arabidopsis thaliana
  peptide (1)..(149): Ceres Seq. ID no. 12693775
MVEKTLDFVEDPVNIPEDKPENDCGVRLFKRCATGIVFDHVDEIRGPKKKPNLRPDKGVEGSSKEFKKRVKSIAVDGSDILTAAVEAAKKASARLDAKEVAAKDKAKKEEERIAELKKVRGEKWLPSIERAMKKEMKRIKHTAWKSAMS

SEQ ID NO: 86819 - DNA, 714 bp, Arabidopsis thaliana
  misc_feature (1)..(714): Ceres Seq. ID no. 12693776
  misc_feature (1)..(714): Ortholog of  Ceres SEQ ID NO 14305657 as cited in SEQ ID NO 52544
tcctcatccccttaaaaaaccctaagagtagagactctctcaatcccggcggcgaagatgaagtacaacccaagagtgacctcttctcgcagaaagaacaggaaggctcatttcacagcttcctccagcgagaggcgtgtgataatgagctctcctctctccaccgatcttcgtcagaagtacaatgtcagatccatgccgatccgtaaagacgacgaggttcagatcgttcgtggtacttacaagggacgtgaaggcaaagttgttcaggtttaccgtcgcaaatgggtgattcacatcgagagaatcacgagggagaaggtgaatggaacaaccgtgaacgttgggattcagccgtcgaaagttgtgataacgaagcttcgtcttgataaagataggaaatcgcttttggagaggaaggctaagggacgtgctgctgctgataaggagaagggtactaagtttacgtctgaggatgttatgcagaacgttgattaagtaagaaggaagaagaaatcttcttgaaaggttttatcttttagagttatcttcaatcgctttttaattttcaagttttggatattttggaatgttgtcagtggatctttatggtgctagacatgagaacttatgttttgattttgagtatttgaagtttggttatggaagtttatctctttgtctcattctttataatgatgtgtttgtttggtt

SEQ ID NO: 86820 - protein, 146 aa, Arabidopsis thaliana; identical to SEQ ID NO: 35384
  peptide (1)..(146): Ceres Seq. ID no. 12693777

SEQ ID NO: 86821 - protein, 117 aa, Arabidopsis thaliana; identical to SEQ ID NO: 35385
  peptide (1)..(117): Ceres Seq. ID no. 12693778

SEQ ID NO: 86822 - protein, 100 aa, Arabidopsis thaliana; identical to SEQ ID NO: 35386
  peptide (1)..(100): Ceres Seq. ID no. 12693779

SEQ ID NO: 86823 - DNA, 2919 bp, Arabidopsis thaliana
  misc_feature (1)..(2919): Ceres Seq. ID no. 12694023
  misc_feature (1)..(2919): Ortholog of  Ceres SEQ ID NO 13600310 as cited in SEQ ID NO 5086
atgggacctccgagaactccgttaagtaagatagataagtccaatccttatactccatgtggttccaaagttacagaggagaagattcttgtcactgttcggatgagaccattaaattggagggaacatgccaaatatgatctcattgcttgggaatgtcccgatgatgagactatcgtctttaagaatccgaatcctgacaaggctccaacaaaatattcatttgataaagtttttgagccaacttgtgcaactcaagaggtgtatgaaggtggttctagggacgttgcactatctgcattagcaggaacaaatgcaactatttttgcttatggtcagactagtagtggcaagacgtttacaatgaggggggttactgaaagtgttgttaaagatatatacgaacatataagaaaaactcaagaaaggagctttgtcttgaaagtatctgctttggagatttataacgagaccgtggttgaccttttaaatcgtgatactgggccccttagactgttagatgatccagagaaaggaaccattgtggaaaatctggtggaggaagtggtagaaagcaggcaacatttacagcatttaattagcatttgtgaagatcaaaggcaagtaggtgaaactgctttaaacgacaaaagttcaagatcgcatcagattattcggctgaccatccatagcagtctcagggaaatagcaggctgtgtgcagtctttcatggcaactctgaatcttgttgatcttgctggaagcgaacgtgcttttcaaacaaacgcagatggtctaagattgaaggaaggaagccacattaaccgtagtttattgacacttactacagtgatcagaaaactgagttctggaagaaaaagggatcacgtgccgtatagagactcaaagctgacaagaattttgcaaaattcacttggcgggaatgctagaacagcaattatatgtacgattagtccggcactgagtcatgttgaacagacaaaaaagacactttcttttgccatgagtgcgaaggaagtcaccaattgcgctaaagtaaacatgaaccaggatgattgtatagagctttgtctttggcttactaaagcttttctttggcctttcattgcaaatgtggttttgtttctgagtagcaatcatcatcctatagttgtctcagaaaaaaagctgctgaaacatctgcagcaaaaagtagctaaactcgagtcagagttaagaagcccggagcccagttcatccacctgcttaaagtctctgttaattgagaaagagatgaaaatccaacagatggaatccgaaatgaaagagctaaagcgtcagagagacattgcacagtctgaacttgatctagaaagaaaagcaaaggagcggaagggatcaagtgagtgtgaacctttttctcaagtggcaaggtgtctctcataccatacaaaggaggaatccattccaagcaaatctgttccgtcaagccgcagaacagctcgtgataggagaaaggataatgtgaggcagtctttaacttcggcggatccaacagcgctagtccaagaaattcgtttgcttgaaaaacatcaaaagaagttgggtgaagaagcaaaccaagcactggatctaattcacaaagaagtgacatcccataaactgggtgatcaacaagctgcagaaaaagttgcgaaaatgctgtcagaaatcagggacatgcagaagagcaaccttttaactgaggaaattgtagttggtgataaagccaacctgaaggaagaaataaatcggttgaattctcaagaaattgcagctttggagaagaagctagagtgtgttcagaacactattgacatgcttgtctcgtcttttcagacagatgaacagactccagatttcaggacccaggtgaaaaagaagagacttcttcccttcggcttaagtaatagtcctaacctacagcatatgatccggggaccatgttcacctctttctgggactgaaaataaggatcctgagagcaatgttgtgtctgctaattcagccccagtgtcttttggagctactccaccaaagagggatgataaccgatgtcgtacacagtcaagggaaggaacgcctgtatcacgacaagcaaattcagtcgatattaagagaatgaatcgaatgtataagaatgctgccgaagagaatatacgtaatatcaaatcttatgttactggattgaaagaacgtgtggcgaagcttcaataccagaagcagctgcttgtttgccaggtgttagaactggaggcaaacgagacaggcgctgcttcggagtacgatgcaaccgatgaatctcagatggattggccattgtgttttgaagagcagagaaagcaaatcataatgttatggcatctgtgccacatttcaatcattcacagaacacaattctacatgttattcaaaggagacccagctgatcaaatctacatggaggttgagctccgcaggctgacatggctcgaacagcacttggctgagcttgggaatgcgagtcctgcattgcttggtgatgaaccagcaagctacgtagcatcgagtataagagctttgaagcaggagagagagtatttggcgaaacgggtaaacacaaagctaggagcagaggaaagagagatgctatacctgaaatgggatgtcccgccggtgggaaaacagaggagacaacagttcatcaacaaactctggacagatcctcacaacatgcaacacgtgagagagagtgcggagatcgtggctaagcttgtcggattctgtgactcgggagagaccataaggaaagaaatgtttgagctcaactttgcatctccttcagataagaagacttggatgatgggttggaacttcatatccaacttgttgcatctctag

SEQ ID NO: 86824 - protein, 972 aa, Arabidopsis thaliana
  peptide (1)..(972): Ceres Seq. ID no. 12694024
MGPPRTPLSKIDKSNPYTPCGSKVTEEKILVTVRMRPLNWREHAKYDLIAWECPDDETIVFKNPNPDKAPTKYSFDKVFEPTCATQEVYEGGSRDVALSALAGTNATIFAYGQTSSGKTFTMRGVTESVVKDIYEHIRKTQERSFVLKVSALEIYNETVVDLLNRDTGPLRLLDDPEKGTIVENLVEEVVESRQHLQHLISICEDQRQVGETALNDKSSRSHQIIRLTIHSSLREIAGCVQSFMATLNLVDLAGSERAFQTNADGLRLKEGSHINRSLLTLTTVIRKLSSGRKRDHVPYRDSKLTRILQNSLGGNARTAIICTISPALSHVEQTKKTLSFAMSAKEVTNCAKVNMNQDDCIELCLWLTKAFLWPFIANVVLFLSSNHHPIVVSEKKLLKHLQQKVAKLESELRSPEPSSSTCLKSLLIEKEMKIQQMESEMKELKRQRDIAQSELDLERKAKERKGSSECEPFSQVARCLSYHTKEESIPSKSVPSSRRTARDRRKDNVRQSLTSADPTALVQEIRLLEKHQKKLGEEANQALDLIHKEVTSHKLGDQQAAEKVAKMLSEIRDMQKSNLLTEEIVVGDKANLKEEINRLNSQEIAALEKKLECVQNTIDMLVSSFQTDEQTPDFRTQVKKKRLLPFGLSNSPNLQHMIRGPCSPLSGTENKDPESNVVSANSAPVSFGATPPKRDDNRCRTQSREGTPVSRQANSVDIKRMNRMYKNAAEENIRNIKSYVTGLKERVAKLQYQKQLLVCQVLELEANETGAASEYDATDESQMDWPLCFEEQRKQIIMLWHLCHISIIHRTQFYMLFKGDPADQIYMEVELRRLTWLEQHLAELGNASPALLGDEPASYVASSIRALKQEREYLAKRVNTKLGAEEREMLYLKWDVPPVGKQRRQQFINKLWTDPHNMQHVRESAEIVAKLVGFCDSGETIRKEMFELNFASPSDKKTWMMGWNFISNLLHL

SEQ ID NO: 86825 - protein, 938 aa, Arabidopsis thaliana
  peptide (1)..(938): Ceres Seq. ID no. 12694025
MRPLNWREHAKYDLIAWECPDDETIVFKNPNPDKAPTKYSFDKVFEPTCATQEVYEGGSRDVALSALAGTNATIFAYGQTSSGKTFTMRGVTESVVKDIYEHIRKTQERSFVLKVSALEIYNETVVDLLNRDTGPLRLLDDPEKGTIVENLVEEVVESRQHLQHLISICEDQRQVGETALNDKSSRSHQIIRLTIHSSLREIAGCVQSFMATLNLVDLAGSERAFQTNADGLRLKEGSHINRSLLTLTTVIRKLSSGRKRDHVPYRDSKLTRILQNSLGGNARTAIICTISPALSHVEQTKKTLSFAMSAKEVTNCAKVNMNQDDCIELCLWLTKAFLWPFIANVVLFLSSNHHPIVVSEKKLLKHLQQKVAKLESELRSPEPSSSTCLKSLLIEKEMKIQQMESEMKELKRQRDIAQSELDLERKAKERKGSSECEPFSQVARCLSYHTKEESIPSKSVPSSRRTARDRRKDNVRQSLTSADPTALVQEIRLLEKHQKKLGEEANQALDLIHKEVTSHKLGDQQAAEKVAKMLSEIRDMQKSNLLTEEIVVGDKANLKEEINRLNSQEIAALEKKLECVQNTIDMLVSSFQTDEQTPDFRTQVKKKRLLPFGLSNSPNLQHMIRGPCSPLSGTENKDPESNVVSANSAPVSFGATPPKRDDNRCRTQSREGTPVSRQANSVDIKRMNRMYKNAAEENIRNIKSYVTGLKERVAKLQYQKQLLVCQVLELEANETGAASEYDATDESQMDWPLCFEEQRKQIIMLWHLCHISIIHRTQFYMLFKGDPADQIYMEVELRRLTWLEQHLAELGNASPALLGDEPASYVASSIRALKQEREYLAKRVNTKLGAEEREMLYLKWDVPPVGKQRRQQFINKLWTDPHNMQHVRESAEIVAKLVGFCDSGETIRKEMFELNFASPSDKKTWMMGWNFISNLLHL

SEQ ID NO: 86826 - protein, 851 aa, Arabidopsis thaliana
  peptide (1)..(851): Ceres Seq. ID no. 12694026
MRGVTESVVKDIYEHIRKTQERSFVLKVSALEIYNETVVDLLNRDTGPLRLLDDPEKGTIVENLVEEVVESRQHLQHLISICEDQRQVGETALNDKSSRSHQIIRLTIHSSLREIAGCVQSFMATLNLVDLAGSERAFQTNADGLRLKEGSHINRSLLTLTTVIRKLSSGRKRDHVPYRDSKLTRILQNSLGGNARTAIICTISPALSHVEQTKKTLSFAMSAKEVTNCAKVNMNQDDCIELCLWLTKAFLWPFIANVVLFLSSNHHPIVVSEKKLLKHLQQKVAKLESELRSPEPSSSTCLKSLLIEKEMKIQQMESEMKELKRQRDIAQSELDLERKAKERKGSSECEPFSQVARCLSYHTKEESIPSKSVPSSRRTARDRRKDNVRQSLTSADPTALVQEIRLLEKHQKKLGEEANQALDLIHKEVTSHKLGDQQAAEKVAKMLSEIRDMQKSNLLTEEIVVGDKANLKEEINRLNSQEIAALEKKLECVQNTIDMLVSSFQTDEQTPDFRTQVKKKRLLPFGLSNSPNLQHMIRGPCSPLSGTENKDPESNVVSANSAPVSFGATPPKRDDNRCRTQSREGTPVSRQANSVDIKRMNRMYKNAAEENIRNIKSYVTGLKERVAKLQYQKQLLVCQVLELEANETGAASEYDATDESQMDWPLCFEEQRKQIIMLWHLCHISIIHRTQFYMLFKGDPADQIYMEVELRRLTWLEQHLAELGNASPALLGDEPASYVASSIRALKQEREYLAKRVNTKLGAEEREMLYLKWDVPPVGKQRRQQFINKLWTDPHNMQHVRESAEIVAKLVGFCDSGETIRKEMFELNFASPSDKKTWMMGWNFISNLLHL

SEQ ID NO: 86827 - DNA, 1980 bp, Arabidopsis thaliana
  misc_feature (1)..(1980): Ceres Seq. ID no. 12694119
  misc_feature (1)..(1980): Ortholog of  Ceres SEQ ID NO 14315774 as cited in SEQ ID NO 20630
atgagggatgctggtaaggtcaatggtttatcggcttcggttcccgacccgcctcctaatgctaaccctaaccttgagtttcgaattgcaccggggcatccagtagagattgaaacgaatgaacaacctcattctaaccgtttcaacgctgttattgagaagatagagaggctctataaggttgttatatgtttgatttttcacattcacaacatttttgcataccatgcaatagcactgttgcattcacacatctctgaaaagtgtatgcttacttcagagaataaatctcaggggaacgatagcagtgatggggaagagttagacggtgctcctgatgatgatgagtatgacactgaagattcatttatagatgatgctgaactggatgagtatttcgaagttgataattcaacagttaaacatgatggattttatgtaaatagaggcaagttggaggaaccttcaacaacatctaaccagcaacccaaaaaacggcgacgaaaagattcagcaaaaccctgtcgtgatgcagttgacgtatccgataaacacaccaagttgtctataacagctaggaaaaaggagtcacctttgccttctggagcgcaagatgcaaatacttcagtacctctggatgatgtgaagcattctgatagagcaaatcatcagtctaggaatgatacaagtcacaagtcaagggaaactggatcctctagtgcccttcatcagaaatacagcaacaaaagcttacaccaacaatctacgtccctgctaggaaaatctccccccaatgtctttgcagaggtaacagtagtccgtcagaaagaaaacaatggtatgcatcagctggcaaatgtaacgggaagcagacaatctagtcaagcgtctaaaaaagatggttctaatgtgaagtctaaaacctcaatcctcgagaaagccataagggaactggagaaggtggttgtggaatcaaggcctcctgctatcactgaaaatcaagaagctgatacctcatcccaggcagtgaagagaagattgcccagggatgttaaattgaaacttgctaaagttgctaggattgcgcaggcaagccagggaaaacattcaacagagttaatcaaccgtcttatgagcattgttggtcacctaatccagcttaggtctcttaagaggaacttgaaaatcatgattgatatgggagattctgcaacccgagaaaaggatactaggttcaagcaaatcaacaatgaagttcttgatatgataaaggccaaagtttctttgatggaatcacaggcaatcaaaccagaaggtgcaacatcagacgattttcaggactcagtagaaaagccatctttgaagaagtttgtcatggatgcggcattggaggataaattgtgtgacctatatgacatatttatcgacggattggatgaagatcaaggtccacaaacaaaaaagctatatgtcaatttggctgaactctggccaaatagattgatggattatcgtgggatcaaacatgcaattttccgggcaaaggagagacgaaaagcattgtatggaaaccttgcgaaagagatggatcaaacaaagatgaagaagagtatgaagcagttggtaccaagaacagactgtactgctcagcccaacaccgaattagtggttcagagacaacacagtggggaaaaaaaattgattgttgatccaaatgcaaccagcacttccgtggtcactagtcaaactatggttgacagatcaaatcagcagcagcctgagaagctaaagggaatctcaagctcttgcaatcctacagaggaaacaagagtggtcaagagaaagaacgaggctgtaatggctgagaaacaagtcgttcttgccctgaagaagcccgaacatccacagacacgtgtaatcccagctcctcagaatctgaacatcccacgaacaaccccggacctgaacttgccaagttga

SEQ ID NO: 86828 - protein, 659 aa, Arabidopsis thaliana
  peptide (1)..(659): Ceres Seq. ID no. 12694120
MRDAGKVNGLSASVPDPPPNANPNLEFRIAPGHPVEIETNEQPHSNRFNAVIEKIERLYKVVICLIFHIHNIFAYHAIALLHSHISEKCMLTSENKSQGNDSSDGEELDGAPDDDEYDTEDSFIDDAELDEYFEVDNSTVKHDGFYVNRGKLEEPSTTSNQQPKKRRRKDSAKPCRDAVDVSDKHTKLSITARKKESPLPSGAQDANTSVPLDDVKHSDRANHQSRNDTSHKSRETGSSSALHQKYSNKSLHQQSTSLLGKSPPNVFAEVTVVRQKENNGMHQLANVTGSRQSSQASKKDGSNVKSKTSILEKAIRELEKVVVESRPPAITENQEADTSSQAVKRRLPRDVKLKLAKVARIAQASQGKHSTELINRLMSIVGHLIQLRSLKRNLKIMIDMGDSATREKDTRFKQINNEVLDMIKAKVSLMESQAIKPEGATSDDFQDSVEKPSLKKFVMDAALEDKLCDLYDIFIDGLDEDQGPQTKKLYVNLAELWPNRLMDYRGIKHAIFRAKERRKALYGNLAKEMDQTKMKKSMKQLVPRTDCTAQPNTELVVQRQHSGEKKLIVDPNATSTSVVTSQTMVDRSNQQQPEKLKGISSSCNPTEETRVVKRKNEAVMAEKQVVLALKKPEHPQTRVIPAPQNLNIPRTTPDLNLPS

SEQ ID NO: 86829 - protein, 570 aa, Arabidopsis thaliana
  peptide (1)..(570): Ceres Seq. ID no. 12694121
MLTSENKSQGNDSSDGEELDGAPDDDEYDTEDSFIDDAELDEYFEVDNSTVKHDGFYVNRGKLEEPSTTSNQQPKKRRRKDSAKPCRDAVDVSDKHTKLSITARKKESPLPSGAQDANTSVPLDDVKHSDRANHQSRNDTSHKSRETGSSSALHQKYSNKSLHQQSTSLLGKSPPNVFAEVTVVRQKENNGMHQLANVTGSRQSSQASKKDGSNVKSKTSILEKAIRELEKVVVESRPPAITENQEADTSSQAVKRRLPRDVKLKLAKVARIAQASQGKHSTELINRLMSIVGHLIQLRSLKRNLKIMIDMGDSATREKDTRFKQINNEVLDMIKAKVSLMESQAIKPEGATSDDFQDSVEKPSLKKFVMDAALEDKLCDLYDIFIDGLDEDQGPQTKKLYVNLAELWPNRLMDYRGIKHAIFRAKERRKALYGNLAKEMDQTKMKKSMKQLVPRTDCTAQPNTELVVQRQHSGEKKLIVDPNATSTSVVTSQTMVDRSNQQQPEKLKGISSSCNPTEETRVVKRKNEAVMAEKQVVLALKKPEHPQTRVIPAPQNLNIPRTTPDLNLPS

SEQ ID NO: 86830 - protein, 379 aa, Arabidopsis thaliana
  peptide (1)..(379): Ceres Seq. ID no. 12694122
MHQLANVTGSRQSSQASKKDGSNVKSKTSILEKAIRELEKVVVESRPPAITENQEADTSSQAVKRRLPRDVKLKLAKVARIAQASQGKHSTELINRLMSIVGHLIQLRSLKRNLKIMIDMGDSATREKDTRFKQINNEVLDMIKAKVSLMESQAIKPEGATSDDFQDSVEKPSLKKFVMDAALEDKLCDLYDIFIDGLDEDQGPQTKKLYVNLAELWPNRLMDYRGIKHAIFRAKERRKALYGNLAKEMDQTKMKKSMKQLVPRTDCTAQPNTELVVQRQHSGEKKLIVDPNATSTSVVTSQTMVDRSNQQQPEKLKGISSSCNPTEETRVVKRKNEAVMAEKQVVLALKKPEHPQTRVIPAPQNLNIPRTTPDLNLPS

SEQ ID NO: 86831 - DNA, 960 bp, Arabidopsis thaliana
  misc_feature (1)..(960): Ceres Seq. ID no. 12694131
  misc_feature (1)..(960): Ortholog of  Ceres SEQ ID NO 13595844 as cited in SEQ ID NO 51300
  misc_feature (1)..(960): Ortholog of  Ceres SEQ ID NO 13596593 as cited in SEQ ID NO 62448
  misc_feature (1)..(960): Ortholog of  Ceres SEQ ID NO 13586031 as cited in SEQ ID NO 0
gaaaaaaagcgactaacagaagaaaaaaacgaaaaggattattccgccgtagaatccatattctctccctcatcactttgataaacaagagtctcatttttcgcttttccaaagggaacaacttcttcggattattatctatggcagagaagcttgagccggtgaaggttttgtactgcggagtttgctctcttccagcggaatactgcgaattcggtcccgatttcgctagatgtaagccctggctcgtcgaaaacgccccagatctctatcctgatctcctcaaagaagcaaatgagaaggcagcagataatgtttctgacaaactccagtcggtgggaatctcttcaggtggtgctgatggggcaccatcttcagctcagactggagggacatccaagaaggaggaagtgaagcgcctacctggggggaaagttaaaaagaaagatcgacaggaagttatcattgaaaaggttgtacgcaacaaacgcaagtgtatcaccattgtgaaaggactagaactgtttgggataaaactcagtgatgcctctaaaaagcttggtaagaagtttgccactggagcatcagttgtcaagggaccaactgaaaaggagcaaattgatgttcaaggggatataatctatgatatcgttgaattcattacagacacttggcccgacgtacctgaaagatccattttcttcatcgaagatgggaagaaggttcaggctggttgatgatcacctttgtcctcgttttttggcatggcgggttcatgtagacgagctagttcctgagttttcctatgtgtttggaggaaatcgcatcttgattataactttcaacgtaacgtatagttggatttatcatactattttcttattcgggttgcgatagttccagacatgtttctccaaacatttctctttttgggggtcttaatatttaaaatgtgtcttg

SEQ ID NO: 86832 - protein, 244 aa, Arabidopsis thaliana
  peptide (1)..(244): Ceres Seq. ID no. 12694132
KKATNRRKKRKGLFRRRIHILSLITLINKSLIFRFSKGNNFFGLLSMAEKLEPVKVLYCGVCSLPAEYCEFGPDFARCKPWLVENAPDLYPDLLKEANEKAADNVSDKLQSVGISSGGADGAPSSAQTGGTSKKEEVKRLPGGKVKKKDRQEVIIEKVVRNKRKCITIVKGLELFGIKLSDASKKLGKKFATGASVVKGPTEKEQIDVQGDIIYDIVEFITDTWPDVPERSIFFIEDGKKVQAG

SEQ ID NO: 86833 - protein, 198 aa, Arabidopsis thaliana; identical to SEQ ID NO: 49606
  peptide (1)..(198): Ceres Seq. ID no. 12694133

SEQ ID NO: 86834 - DNA, 1382 bp, Arabidopsis thaliana
  misc_feature (1)..(1382): Ceres Seq. ID no. 12694145
  misc_feature (1)..(1382): Ortholog of  Ceres SEQ ID NO 13595509 as cited in SEQ ID NO 59833
ccaaaatctagggttttcttctcgcccaatttcacttttcttctacgaaattctccattcctgccggctgtcgggttttctgaatcgattctccttcaccaacttcttctctggttctgttcgattctgattttttttcaaggtcaattttttcttctctttaaactctgcaaaatcgtgatcgattaaattcacctcagggttttttgatttctgaaagaagttaatcttcttcgaaggcgattgcaaaagagtgctctgctgtgaatttccactgagatgcaatcaaaaccgggaagagaaaacgaagaggaagtcaataatcaccatgctgttcagcagccgatgatgtatgcagagccctggtggaaaaacaactcctttggtgttgtacctcaagcgagaccttctggaattccatcaaattcctcttctttggattgccccaatggttccgagtcaaacgatgttcattcagcatctgaagacggtgcgttgaatggtgaaaacgatggcacttggaaggattcacaagctgcaacttcctctcgttcagataatcacggaatggaaggaaatgacccagcgctctctatccgtaacatgcatgatcagccacttgtacaaccaccagagcttgttggacactatatcgcttgtgtcccaaacccatatcaggatccatattatgggggattgatgggagcatatggtcatcagcaattgggttttcgtccatatcttggaatgcctcgtgaaagaacagctctgccacttgacatggcacaagagcccgtttatgtgaatgcaaagcagtacgagggaattctaaggcgaagaaaagcacgtgccaaggcagagctagagaggaaagtcatccgggacagaaagccatatcttcacgagtcaagacacaagcatgcaatgagaagggcacgagcgagtggaggccggtttgcgaagaaaagtgaggtagaagcgggagaggatgcaggagggagagacagagaaaggggttcagcaaccaactcatcaggctctgaacaagttgagacagactctaatgagaccctgaattcttctggtgcaccataataaaaaaagccaaagctctgagaggagagagagacacacactttggctaatataatcattgcctcaaaccggcaaatcattcttggctttttcgtttttgtgtttgctagttgttcttgtcagagtctcatattgtgtgggtttaacagttatgatgaatgtacaaagagcgagttatgttaggtgttagattttggagacaagagactaaggaatagcaagtaggtcttgtttttattctttgaccttttttttctcttttgcaaaattgaaaaatacgtttgctt

SEQ ID NO: 86835 - protein, 271 aa, Arabidopsis thaliana
  peptide (1)..(271): Ceres Seq. ID no. 12694146
MQSKPGRENEEEVNNHHAVQQPMMYAEPWWKNNSFGVVPQARPSGIPSNSSSLDCPNGSESNDVHSASEDGALNGENDGTWKDSQAATSSRSDNHGMEGNDPALSIRNMHDQPLVQPPELVGHYIACVPNPYQDPYYGGLMGAYGHQQLGFRPYLGMPRERTALPLDMAQEPVYVNAKQYEGILRRRKARAKAELERKVIRDRKPYLHESRHKHAMRRARASGGRFAKKSEVEAGEDAGGRDRERGSATNSSGSEQVETDSNETLNSSGAP

SEQ ID NO: 86836 - protein, 249 aa, Arabidopsis thaliana
  peptide (1)..(249): Ceres Seq. ID no. 12694147
MMYAEPWWKNNSFGVVPQARPSGIPSNSSSLDCPNGSESNDVHSASEDGALNGENDGTWKDSQAATSSRSDNHGMEGNDPALSIRNMHDQPLVQPPELVGHYIACVPNPYQDPYYGGLMGAYGHQQLGFRPYLGMPRERTALPLDMAQEPVYVNAKQYEGILRRRKARAKAELERKVIRDRKPYLHESRHKHAMRRARASGGRFAKKSEVEAGEDAGGRDRERGSATNSSGSEQVETDSNETLNSSGAP

SEQ ID NO: 86837 - protein, 248 aa, Arabidopsis thaliana
  peptide (1)..(248): Ceres Seq. ID no. 12694148
MYAEPWWKNNSFGVVPQARPSGIPSNSSSLDCPNGSESNDVHSASEDGALNGENDGTWKDSQAATSSRSDNHGMEGNDPALSIRNMHDQPLVQPPELVGHYIACVPNPYQDPYYGGLMGAYGHQQLGFRPYLGMPRERTALPLDMAQEPVYVNAKQYEGILRRRKARAKAELERKVIRDRKPYLHESRHKHAMRRARASGGRFAKKSEVEAGEDAGGRDRERGSATNSSGSEQVETDSNETLNSSGAP
